United States Patent Application Publication US 2005/0255487 A1 - sequence listing, part 11

SEQ ID NO: 278551 - RNA, 19 nt, Homo sapiens
  misc_RNA (1)...(19): siRNA sense strand
cgaaacaacaguaggagau

SEQ ID NO: 278552 - RNA, 19 nt, Homo sapiens
  misc_RNA (1)...(19): siRNA sense strand
gauuaaauacagugacuca

SEQ ID NO: 278553 - RNA, 19 nt, Homo sapiens
  misc_RNA (1)...(19): siRNA sense strand
acuggaaagcucuaauuua

SEQ ID NO: 278554 - RNA, 19 nt, Homo sapiens
  misc_RNA (1)...(19): siRNA sense strand
gagaaggaaauugugguuu

SEQ ID NO: 278555 - RNA, 19 nt, Homo sapiens
  misc_RNA (1)...(19): siRNA sense strand
uaguucaucugaucauuuc

SEQ ID NO: 278556 - RNA, 19 nt, Homo sapiens
  misc_RNA (1)...(19): siRNA sense strand
cccaauaugcaauuuguuu

SEQ ID NO: 278557 - RNA, 19 nt, Homo sapiens
  misc_RNA (1)...(19): siRNA sense strand
ggaaacuggcuaaaauuaa

SEQ ID NO: 278558 - RNA, 19 nt, Homo sapiens
  misc_RNA (1)...(19): siRNA sense strand
gcaaacuacaugaagacuu

SEQ ID NO: 278559 - RNA, 19 nt, Homo sapiens
  misc_RNA (1)...(19): siRNA sense strand
ggaacaugaggcuacguuu

SEQ ID NO: 278560 - RNA, 19 nt, Homo sapiens
  misc_RNA (1)...(19): siRNA sense strand
aaacaacaguaggagaugu

SEQ ID NO: 278561 - RNA, 19 nt, Homo sapiens
  misc_RNA (1)...(19): siRNA sense strand
acagaucuccaacuaaaga

SEQ ID NO: 278562 - RNA, 19 nt, Homo sapiens
  misc_RNA (1)...(19): siRNA sense strand
gaggcuacguuuggagaga

SEQ ID NO: 278563 - RNA, 19 nt, Homo sapiens
  misc_RNA (1)...(19): siRNA sense strand
gaauacucauugauaagcu

SEQ ID NO: 278564 - RNA, 19 nt, Homo sapiens
  misc_RNA (1)...(19): siRNA sense strand
accgaauacucauugauaa

SEQ ID NO: 278565 - RNA, 19 nt, Homo sapiens
  misc_RNA (1)...(19): siRNA sense strand
guucaggaugcauauuuaa

SEQ ID NO: 278566 - RNA, 19 nt, Homo sapiens
  misc_RNA (1)...(19): siRNA sense strand
ucaggaugcauauuuaaug

SEQ ID NO: 278567 - RNA, 19 nt, Homo sapiens
  misc_RNA (1)...(19): siRNA sense strand
agagcuggaucuggaaauu

SEQ ID NO: 278568 - RNA, 19 nt, Homo sapiens
  misc_RNA (1)...(19): siRNA sense strand
gaaucugagguucccagua

SEQ ID NO: 278569 - RNA, 19 nt, Homo sapiens
  misc_RNA (1)...(19): siRNA sense strand
aaacagagcgaaggaaucu

SEQ ID NO: 278570 - RNA, 19 nt, Homo sapiens
  misc_RNA (1)...(19): siRNA sense strand
ccaucuugaucgaguagaa

SEQ ID NO: 278571 - RNA, 19 nt, Homo sapiens
  misc_RNA (1)...(19): siRNA sense strand
gaaugaaagagcuggaucu

SEQ ID NO: 278572 - RNA, 19 nt, Homo sapiens
  misc_RNA (1)...(19): siRNA sense strand
cacauuagcaacaaagaug

SEQ ID NO: 278573 - RNA, 19 nt, Homo sapiens
  misc_RNA (1)...(19): siRNA sense strand
ucagugaaguugagcaaaa

SEQ ID NO: 278574 - RNA, 19 nt, Homo sapiens
  misc_RNA (1)...(19): siRNA sense strand
agacuuuaccaccagauaa

SEQ ID NO: 278575 - RNA, 19 nt, Homo sapiens
  misc_RNA (1)...(19): siRNA sense strand
gagguucccaguagcaaug

SEQ ID NO: 278576 - RNA, 19 nt, Homo sapiens
  misc_RNA (1)...(19): siRNA sense strand
gcauccagaaagagauuaa

SEQ ID NO: 278577 - RNA, 19 nt, Homo sapiens
  misc_RNA (1)...(19): siRNA sense strand
gcaugaaagcugguuugaa

SEQ ID NO: 278578 - RNA, 19 nt, Homo sapiens
  misc_RNA (1)...(19): siRNA sense strand
gagcagcccaauaugcaau

SEQ ID NO: 278579 - RNA, 19 nt, Homo sapiens
  misc_RNA (1)...(19): siRNA sense strand
uaucaguucuaaccacagu

SEQ ID NO: 278580 - RNA, 19 nt, Homo sapiens
  misc_RNA (1)...(19): siRNA sense strand
gaaaacagagcgaaggaau

SEQ ID NO: 278581 - RNA, 19 nt, Homo sapiens
  misc_RNA (1)...(19): siRNA sense strand
gacauggauucagaagaga

SEQ ID NO: 278582 - RNA, 19 nt, Homo sapiens
  misc_RNA (1)...(19): siRNA sense strand
gaaagugauggaauugaac

SEQ ID NO: 278583 - RNA, 19 nt, Homo sapiens
  misc_RNA (1)...(19): siRNA sense strand
gagcuggaucuggaaauug

SEQ ID NO: 278584 - RNA, 19 nt, Homo sapiens
  misc_RNA (1)...(19): siRNA sense strand
ggagauguggugcuguugu

SEQ ID NO: 278585 - RNA, 19 nt, Homo sapiens
  misc_RNA (1)...(19): siRNA sense strand
caaauacccuuucuguuua

SEQ ID NO: 278586 - RNA, 19 nt, Homo sapiens
  misc_RNA (1)...(19): siRNA sense strand
gcaaauacccuuucuguuu

SEQ ID NO: 278587 - RNA, 19 nt, Homo sapiens
  misc_RNA (1)...(19): siRNA sense strand
gaaauaugcugaacaacuu

SEQ ID NO: 278588 - RNA, 19 nt, Homo sapiens
  misc_RNA (1)...(19): siRNA sense strand
gagcuacuguuuauuauug

SEQ ID NO: 278589 - RNA, 19 nt, Homo sapiens
  misc_RNA (1)...(19): siRNA sense strand
gaacaaauguggcagaaaa

SEQ ID NO: 278590 - RNA, 19 nt, Homo sapiens
  misc_RNA (1)...(19): siRNA sense strand
gauauggccuguaauccua

SEQ ID NO: 278591 - RNA, 19 nt, Homo sapiens
  misc_RNA (1)...(19): siRNA sense strand
ggaaguggauuauagaagu

SEQ ID NO: 278592 - RNA, 19 nt, Homo sapiens
  misc_RNA (1)...(19): siRNA sense strand
acaaugagcuacuguuuau

SEQ ID NO: 278593 - RNA, 19 nt, Homo sapiens
  misc_RNA (1)...(19): siRNA sense strand
cagaugauauggccuguaa

SEQ ID NO: 278594 - RNA, 19 nt, Homo sapiens
  misc_RNA (1)...(19): siRNA sense strand
uaauggaaccucugaaaua

SEQ ID NO: 278595 - RNA, 19 nt, Homo sapiens
  misc_RNA (1)...(19): siRNA sense strand
ggacaucgcacugaucuuu

SEQ ID NO: 278596 - RNA, 19 nt, Homo sapiens
  misc_RNA (1)...(19): siRNA sense strand
gaaguggauuauagaaguu

SEQ ID NO: 278597 - RNA, 19 nt, Homo sapiens
  misc_RNA (1)...(19): siRNA sense strand
guauggagaugauguggaa

SEQ ID NO: 278598 - RNA, 19 nt, Homo sapiens
  misc_RNA (1)...(19): siRNA sense strand
guacggaaaguggaaauua

SEQ ID NO: 278599 - RNA, 19 nt, Homo sapiens
  misc_RNA (1)...(19): siRNA sense strand
ccagcuagccaaacuaaua

SEQ ID NO: 278600 - RNA, 19 nt, Homo sapiens
  misc_RNA (1)...(19): siRNA sense strand
ggaaagcagcuauaaggaa

SEQ ID NO: 278601 - RNA, 19 nt, Homo sapiens
  misc_RNA (1)...(19): siRNA sense strand
ccagauggaugagaaacua

SEQ ID NO: 278602 - RNA, 19 nt, Homo sapiens
  misc_RNA (1)...(19): siRNA sense strand
ccaaggagcauccauguau

SEQ ID NO: 278603 - RNA, 19 nt, Homo sapiens
  misc_RNA (1)...(19): siRNA sense strand
cauaauggcucuagcuagu

SEQ ID NO: 278604 - RNA, 19 nt, Homo sapiens
  misc_RNA (1)...(19): siRNA sense strand
gcacuuauuaucaugguuu

SEQ ID NO: 278605 - RNA, 19 nt, Homo sapiens
  misc_RNA (1)...(19): siRNA sense strand
gaaauuacaacagagacua

SEQ ID NO: 278606 - RNA, 19 nt, Homo sapiens
  misc_RNA (1)...(19): siRNA sense strand
gauaacugauuucuuugga

SEQ ID NO: 278607 - RNA, 19 nt, Homo sapiens
  misc_RNA (1)...(19): siRNA sense strand
ggauuaugggcacuuauua

SEQ ID NO: 278608 - RNA, 19 nt, Homo sapiens
  misc_RNA (1)...(19): siRNA sense strand
gaagaaauuaccaacauag

SEQ ID NO: 278609 - RNA, 19 nt, Homo sapiens
  misc_RNA (1)...(19): siRNA sense strand
gaaguggccauacaaacaa

SEQ ID NO: 278610 - RNA, 19 nt, Homo sapiens
  misc_RNA (1)...(19): siRNA sense strand
caaaacgucuucuuucuga

SEQ ID NO: 278611 - RNA, 19 nt, Homo sapiens
  misc_RNA (1)...(19): siRNA sense strand
ggaacuaaauguguaugga

SEQ ID NO: 278612 - RNA, 19 nt, Homo sapiens
  misc_RNA (1)...(19): siRNA sense strand
gaugacagaagcaauauuc

SEQ ID NO: 278613 - RNA, 19 nt, Homo sapiens
  misc_RNA (1)...(19): siRNA sense strand
ggaucaagcagaacaauuc

SEQ ID NO: 278614 - RNA, 19 nt, Homo sapiens
  misc_RNA (1)...(19): siRNA sense strand
gaaauuaccaacauagaac

SEQ ID NO: 278615 - RNA, 19 nt, Homo sapiens
  misc_RNA (1)...(19): siRNA sense strand
ucacaagaauauggaacua

SEQ ID NO: 278616 - RNA, 19 nt, Homo sapiens
  misc_RNA (1)...(19): siRNA sense strand
uaucgaggaucaagcagaa

SEQ ID NO: 278617 - RNA, 19 nt, Homo sapiens
  misc_RNA (1)...(19): siRNA sense strand
gaagaaauuaacccagcua

SEQ ID NO: 278618 - RNA, 19 nt, Homo sapiens
  misc_RNA (1)...(19): siRNA sense strand
gaauauggaacuaaaugug

SEQ ID NO: 278619 - RNA, 19 nt, Homo sapiens
  misc_RNA (1)...(19): siRNA sense strand
gaaaguggaaauuacaaca

SEQ ID NO: 278620 - RNA, 19 nt, Homo sapiens
  misc_RNA (1)...(19): siRNA sense strand
ggaauuaagcauaugaagu

SEQ ID NO: 278621 - RNA, 19 nt, Homo sapiens
  misc_RNA (1)...(19): siRNA sense strand
aauggaaccucugaaauau

SEQ ID NO: 278622 - RNA, 19 nt, Homo sapiens
  misc_RNA (1)...(19): siRNA sense strand
ucugaaauaugcugaacaa

SEQ ID NO: 278623 - RNA, 19 nt, Homo sapiens
  misc_RNA (1)...(19): siRNA sense strand
caaggagcauccauguaug

SEQ ID NO: 278624 - RNA, 19 nt, Homo sapiens
  misc_RNA (1)...(19): siRNA sense strand
cagcuacaguguuuaguca

SEQ ID NO: 278625 - RNA, 19 nt, Homo sapiens
  misc_RNA (1)...(19): siRNA sense strand
uccuguagcucagauaaua

SEQ ID NO: 278626 - RNA, 19 nt, Homo sapiens
  misc_RNA (1)...(19): siRNA sense strand
ugagguaacuguggagaau

SEQ ID NO: 278627 - RNA, 19 nt, Homo sapiens
  misc_RNA (1)...(19): siRNA sense strand
gaugauauggccuguaauc

SEQ ID NO: 278628 - RNA, 19 nt, Homo sapiens
  misc_RNA (1)...(19): siRNA sense strand
gccaaacuaauaugaauga

SEQ ID NO: 278629 - RNA, 19 nt, Homo sapiens
  misc_RNA (1)...(19): siRNA sense strand
aagauucacucucgcauca

SEQ ID NO: 278630 - RNA, 19 nt, Homo sapiens
  misc_RNA (1)...(19): siRNA sense strand
gggcuuuauucugggauua

SEQ ID NO: 278631 - RNA, 19 nt, Homo sapiens
  misc_RNA (1)...(19): siRNA sense strand
gacagggcaugguggaaau

SEQ ID NO: 278632 - RNA, 19 nt, Homo sapiens
  misc_RNA (1)...(19): siRNA sense strand
gggauuaugggcacuuauu

SEQ ID NO: 278633 - RNA, 19 nt, Homo sapiens
  misc_RNA (1)...(19): siRNA sense strand
uaacccagcuagccaaacu

SEQ ID NO: 278634 - RNA, 19 nt, Homo sapiens
  misc_RNA (1)...(19): siRNA sense strand
uacaaugagcuacuguuua

SEQ ID NO: 278635 - RNA, 19 nt, Homo sapiens
  misc_RNA (1)...(19): siRNA sense strand
cugaagaaauuaccaacau

SEQ ID NO: 278636 - RNA, 19 nt, Homo sapiens
  misc_RNA (1)...(19): siRNA sense strand
cuacaaugagcuacuguuu

SEQ ID NO: 278637 - RNA, 19 nt, Homo sapiens
  misc_RNA (1)...(19): siRNA sense strand
gauuaugggcacuuauuau

SEQ ID NO: 278638 - RNA, 19 nt, Homo sapiens
  misc_RNA (1)...(19): siRNA sense strand
guacaucccgauucugguu

SEQ ID NO: 278639 - RNA, 19 nt, Homo sapiens
  misc_RNA (1)...(19): siRNA sense strand
agguaacuguggagaauuu

SEQ ID NO: 278640 - RNA, 19 nt, Homo sapiens
  misc_RNA (1)...(19): siRNA sense strand
cagagacuauuaaauugca

SEQ ID NO: 278641 - RNA, 19 nt, Homo sapiens
  misc_RNA (1)...(19): siRNA sense strand
uaauggcucuagcuaguag

SEQ ID NO: 278642 - RNA, 19 nt, Homo sapiens
  misc_RNA (1)...(19): siRNA sense strand
cuagucauaucgaggauca

SEQ ID NO: 278643 - RNA, 19 nt, Homo sapiens
  misc_RNA (1)...(19): siRNA sense strand
guagucaagugggagaaga

SEQ ID NO: 278644 - RNA, 19 nt, Homo sapiens
  misc_RNA (1)...(19): siRNA sense strand
gcuacaguguuuagucaca

SEQ ID NO: 278645 - RNA, 19 nt, Homo sapiens
  misc_RNA (1)...(19): siRNA sense strand
ucagauaauacaccagaaa

SEQ ID NO: 278646 - RNA, 19 nt, Homo sapiens
  misc_RNA (1)...(19): siRNA sense strand
ugaaauaugcugaacaacu

SEQ ID NO: 278647 - RNA, 19 nt, Homo sapiens
  misc_RNA (1)...(19): siRNA sense strand
aaacuaauggaaccucuga

SEQ ID NO: 278648 - RNA, 19 nt, Homo sapiens
  misc_RNA (1)...(19): siRNA sense strand
ucccgauucugguuuaauu

SEQ ID NO: 278649 - RNA, 19 nt, Homo sapiens
  misc_RNA (1)...(19): siRNA sense strand
aagaccagauggaugagaa

SEQ ID NO: 278650 - RNA, 19 nt, Homo sapiens
  misc_RNA (1)...(19): siRNA sense strand
gggcuguucugguguguac

SEQ ID NO: 278651 - RNA, 19 nt, Homo sapiens
  misc_RNA (1)...(19): siRNA sense strand
cuaaauguguauggagaug

SEQ ID NO: 278652 - RNA, 19 nt, Homo sapiens
  misc_RNA (1)...(19): siRNA sense strand
agaaguggccauacaaaca

SEQ ID NO: 278653 - RNA, 19 nt, Homo sapiens
  misc_RNA (1)...(19): siRNA sense strand
aaguggaaauuacaacaga

SEQ ID NO: 278654 - RNA, 19 nt, Homo sapiens
  misc_RNA (1)...(19): siRNA sense strand
ugauuucuuuggaagugua

SEQ ID NO: 278655 - RNA, 19 nt, Homo sapiens
  misc_RNA (1)...(19): siRNA sense strand
gcuagccaaacuaauauga

SEQ ID NO: 278656 - RNA, 19 nt, Homo sapiens
  misc_RNA (1)...(19): siRNA sense strand
ucaaccugauccugcaauu

SEQ ID NO: 278657 - RNA, 19 nt, Homo sapiens
  misc_RNA (1)...(19): siRNA sense strand
acaucccgauucugguuua

SEQ ID NO: 278658 - RNA, 19 nt, Homo sapiens
  misc_RNA (1)...(19): siRNA sense strand
aggaagaccagauggauga

SEQ ID NO: 278659 - RNA, 19 nt, Homo sapiens
  misc_RNA (1)...(19): siRNA sense strand
cagcuagccaaacuaauau

SEQ ID NO: 278660 - RNA, 19 nt, Homo sapiens
  misc_RNA (1)...(19): siRNA sense strand
auccauguaugaacgauuu

SEQ ID NO: 278661 - RNA, 19 nt, Homo sapiens
  misc_RNA (1)...(19): siRNA sense strand
gaaaagacgcuacaaugag

SEQ ID NO: 278662 - RNA, 19 nt, Homo sapiens
  misc_RNA (1)...(19): siRNA sense strand
gauguggaaguggauuaua

SEQ ID NO: 278663 - RNA, 19 nt, Homo sapiens
  misc_RNA (1)...(19): siRNA sense strand
ugacagggcaugguggaaa

SEQ ID NO: 278664 - RNA, 19 nt, Homo sapiens
  misc_RNA (1)...(19): siRNA sense strand
uaugggcacuuauuaucau

SEQ ID NO: 278665 - RNA, 19 nt, Homo sapiens
  misc_RNA (1)...(19): siRNA sense strand
ccagaaaccgaagcugaaa

SEQ ID NO: 278666 - RNA, 19 nt, Homo sapiens
  misc_RNA (1)...(19): siRNA sense strand
uggaaccucugaaauaugc

SEQ ID NO: 278667 - RNA, 19 nt, Homo sapiens
  misc_RNA (1)...(19): siRNA sense strand
gucaagaggcuagguauuc

SEQ ID NO: 278668 - RNA, 19 nt, Homo sapiens
  misc_RNA (1)...(19): siRNA sense strand
agaaaccgaagcugaaaga

SEQ ID NO: 278669 - RNA, 19 nt, Homo sapiens
  misc_RNA (1)...(19): siRNA sense strand
ggaugagaaacuaauggaa

SEQ ID NO: 278670 - RNA, 19 nt, Homo sapiens
  misc_RNA (1)...(19): siRNA sense strand
agaaaucccaaaccagcua

SEQ ID NO: 278671 - RNA, 19 nt, Homo sapiens
  misc_RNA (1)...(19): siRNA sense strand
gcugaacaacuuccuguag

SEQ ID NO: 278672 - RNA, 19 nt, Homo sapiens
  misc_RNA (1)...(19): siRNA sense strand
auucagaaaucauggaaag

SEQ ID NO: 278673 - RNA, 19 nt, Homo sapiens
  misc_RNA (1)...(19): siRNA sense strand
ucaagugggagaagauuca

SEQ ID NO: 278674 - RNA, 19 nt, Homo sapiens
  misc_RNA (1)...(19): siRNA sense strand
gaacgauuuuauucuccua

SEQ ID NO: 278675 - RNA, 19 nt, Homo sapiens
  misc_RNA (1)...(19): siRNA sense strand
gggcaugguggaaaugguu

SEQ ID NO: 278676 - RNA, 19 nt, Homo sapiens
  misc_RNA (1)...(19): siRNA sense strand
aaauguguauggagaugau

SEQ ID NO: 278677 - RNA, 19 nt, Homo sapiens
  misc_RNA (1)...(19): siRNA sense strand
guguuuagucacaagaaua

SEQ ID NO: 278678 - RNA, 19 nt, Homo sapiens
  misc_RNA (1)...(19): siRNA sense strand
ggccuguaauccuagaaau

SEQ ID NO: 278679 - RNA, 19 nt, Homo sapiens
  misc_RNA (1)...(19): siRNA sense strand
gauucugguuuaauuaucg

SEQ ID NO: 278680 - RNA, 19 nt, Homo sapiens
  misc_RNA (1)...(19): siRNA sense strand
acagucacauuguccuaau

SEQ ID NO: 278681 - RNA, 19 nt, Homo sapiens
  misc_RNA (1)...(19): siRNA sense strand
uccuaaugcuugcagauga

SEQ ID NO: 278682 - RNA, 19 nt, Homo sapiens
  misc_RNA (1)...(19): siRNA sense strand
aaacgucuucuuucugaug

SEQ ID NO: 278683 - RNA, 19 nt, Homo sapiens
  misc_RNA (1)...(19): siRNA sense strand
cgacugucuuggcaacugu

SEQ ID NO: 278684 - RNA, 19 nt, Homo sapiens
  misc_RNA (1)...(19): siRNA sense strand
gccaaggagcauccaugua

SEQ ID NO: 278685 - RNA, 19 nt, Homo sapiens
  misc_RNA (1)...(19): siRNA sense strand
gaauggagcccaaacagau

SEQ ID NO: 278686 - RNA, 19 nt, Homo sapiens
  misc_RNA (1)...(19): siRNA sense strand
ggaccuccguagcgucuug

SEQ ID NO: 278687 - RNA, 19 nt, Homo sapiens
  misc_RNA (1)...(19): siRNA sense strand
ugagccagcugcagagaau

SEQ ID NO: 278688 - RNA, 19 nt, Homo sapiens
  misc_RNA (1)...(19): siRNA sense strand
caaaagagguacccauugg

SEQ ID NO: 278689 - RNA, 19 nt, Homo sapiens
  misc_RNA (1)...(19): siRNA sense strand
aagagcugcuugacuguga

SEQ ID NO: 278690 - RNA, 19 nt, Homo sapiens
  misc_RNA (1)...(19): siRNA sense strand
ccucauugaccaguauuua

SEQ ID NO: 278691 - RNA, 19 nt, Homo sapiens
  misc_RNA (1)...(19): siRNA sense strand
gauggaguccuagcuguga

SEQ ID NO: 278692 - RNA, 19 nt, Homo sapiens
  misc_RNA (1)...(19): siRNA sense strand
gacccucauugaccaguau

SEQ ID NO: 278693 - RNA, 19 nt, Homo sapiens
  misc_RNA (1)...(19): siRNA sense strand
cauuggcgcucaaccgaau

SEQ ID NO: 278694 - RNA, 19 nt, Homo sapiens
  misc_RNA (1)...(19): siRNA sense strand
caaguggagcggacacgaa

SEQ ID NO: 278695 - RNA, 19 nt, Homo sapiens
  misc_RNA (1)...(19): siRNA sense strand
gagaauggagcccaaacag

SEQ ID NO: 278696 - RNA, 19 nt, Homo sapiens
  misc_RNA (1)...(19): siRNA sense strand
cgaacagggucgagcuucu

SEQ ID NO: 278697 - RNA, 19 nt, Homo sapiens
  misc_RNA (1)...(19): siRNA sense strand
gcagagaauggagcccaaa

SEQ ID NO: 278698 - RNA, 19 nt, Homo sapiens
  misc_RNA (1)...(19): siRNA sense strand
gugaaggccgugcaacaug

SEQ ID NO: 278699 - RNA, 19 nt, Homo sapiens
  misc_RNA (1)...(19): siRNA sense strand
gaacagggucgagcuucuc

SEQ ID NO: 278700 - RNA, 19 nt, Homo sapiens
  misc_RNA (1)...(19): siRNA sense strand
cgaagcugccaguacugua

SEQ ID NO: 278701 - RNA, 19 nt, Homo sapiens
  misc_RNA (1)...(19): siRNA sense strand
agaauggagcccaaacaga

SEQ ID NO: 278702 - RNA, 19 nt, Homo sapiens
  misc_RNA (1)...(19): siRNA sense strand
caccagaagagcugcuuga

SEQ ID NO: 278703 - RNA, 19 nt, Homo sapiens
  misc_RNA (1)...(19): siRNA sense strand
agacccucauugaccagua

SEQ ID NO: 278704 - RNA, 19 nt, Homo sapiens
  misc_RNA (1)...(19): siRNA sense strand
ucauugaccaguauuuaag

SEQ ID NO: 278705 - RNA, 19 nt, Homo sapiens
  misc_RNA (1)...(19): siRNA sense strand
cucauugaccaguauuuaa

SEQ ID NO: 278706 - RNA, 19 nt, Homo sapiens
  misc_RNA (1)...(19): siRNA sense strand
gcuggacgaggaucucuuc

SEQ ID NO: 278707 - RNA, 19 nt, Homo sapiens
  misc_RNA (1)...(19): siRNA sense strand
gacccuaaccuccaaaaga

SEQ ID NO: 278708 - RNA, 19 nt, Homo sapiens
  misc_RNA (1)...(19): siRNA sense strand
ggaccuccguagcgucuug

SEQ ID NO: 278709 - RNA, 19 nt, Homo sapiens
  misc_RNA (1)...(19): siRNA sense strand
caaguggagcggacacgaa

SEQ ID NO: 278710 - RNA, 19 nt, Homo sapiens
  misc_RNA (1)...(19): siRNA sense strand
cgaacagggucgagcuucu

SEQ ID NO: 278711 - RNA, 19 nt, Homo sapiens
  misc_RNA (1)...(19): siRNA sense strand
gugaaggccgugcaacaug

SEQ ID NO: 278712 - RNA, 19 nt, Homo sapiens
  misc_RNA (1)...(19): siRNA sense strand
gaacagggucgagcuucuc

SEQ ID NO: 278713 - RNA, 19 nt, Homo sapiens
  misc_RNA (1)...(19): siRNA sense strand
cgaagcugccaguacugua

SEQ ID NO: 278714 - RNA, 19 nt, Homo sapiens
  misc_RNA (1)...(19): siRNA sense strand
caccagaagagcugcuuga

SEQ ID NO: 278715 - RNA, 19 nt, Homo sapiens
  misc_RNA (1)...(19): siRNA sense strand
gcuggacgaggaucucuuc

SEQ ID NO: 278716 - RNA, 19 nt, Homo sapiens
  misc_RNA (1)...(19): siRNA sense strand
gaauggagcccaaacagau

SEQ ID NO: 278717 - RNA, 19 nt, Homo sapiens
  misc_RNA (1)...(19): siRNA sense strand
ggaccuccguagcgucuug

SEQ ID NO: 278718 - RNA, 19 nt, Homo sapiens
  misc_RNA (1)...(19): siRNA sense strand
ugagccagcugcagagaau

SEQ ID NO: 278719 - RNA, 19 nt, Homo sapiens
  misc_RNA (1)...(19): siRNA sense strand
caaaagagguacccauugg

SEQ ID NO: 278720 - RNA, 19 nt, Homo sapiens
  misc_RNA (1)...(19): siRNA sense strand
aagagcugcuugacuguga

SEQ ID NO: 278721 - RNA, 19 nt, Homo sapiens
  misc_RNA (1)...(19): siRNA sense strand
ccucauugaccaguauuua

SEQ ID NO: 278722 - RNA, 19 nt, Homo sapiens
  misc_RNA (1)...(19): siRNA sense strand
gauggaguccuagcuguga

SEQ ID NO: 278723 - RNA, 19 nt, Homo sapiens
  misc_RNA (1)...(19): siRNA sense strand
gacccucauugaccaguau

SEQ ID NO: 278724 - RNA, 19 nt, Homo sapiens
  misc_RNA (1)...(19): siRNA sense strand
cauuggcgcucaaccgaau

SEQ ID NO: 278725 - RNA, 19 nt, Homo sapiens
  misc_RNA (1)...(19): siRNA sense strand
caaguggagcggacacgaa

SEQ ID NO: 278726 - RNA, 19 nt, Homo sapiens
  misc_RNA (1)...(19): siRNA sense strand
gagaauggagcccaaacag

SEQ ID NO: 278727 - RNA, 19 nt, Homo sapiens
  misc_RNA (1)...(19): siRNA sense strand
cgaacagggucgagcuucu

SEQ ID NO: 278728 - RNA, 19 nt, Homo sapiens
  misc_RNA (1)...(19): siRNA sense strand
gcagagaauggagcccaaa

SEQ ID NO: 278729 - RNA, 19 nt, Homo sapiens
  misc_RNA (1)...(19): siRNA sense strand
gugaaggccgugcaacaug

SEQ ID NO: 278730 - RNA, 19 nt, Homo sapiens
  misc_RNA (1)...(19): siRNA sense strand
gaacagggucgagcuucuc

SEQ ID NO: 278731 - RNA, 19 nt, Homo sapiens
  misc_RNA (1)...(19): siRNA sense strand
cgaagcugccaguacugua

SEQ ID NO: 278732 - RNA, 19 nt, Homo sapiens
  misc_RNA (1)...(19): siRNA sense strand
agaauggagcccaaacaga

SEQ ID NO: 278733 - RNA, 19 nt, Homo sapiens
  misc_RNA (1)...(19): siRNA sense strand
caccagaagagcugcuuga

SEQ ID NO: 278734 - RNA, 19 nt, Homo sapiens
  misc_RNA (1)...(19): siRNA sense strand
agacccucauugaccagua

SEQ ID NO: 278735 - RNA, 19 nt, Homo sapiens
  misc_RNA (1)...(19): siRNA sense strand
ucauugaccaguauuuaag

SEQ ID NO: 278736 - RNA, 19 nt, Homo sapiens
  misc_RNA (1)...(19): siRNA sense strand
cucauugaccaguauuuaa

SEQ ID NO: 278737 - RNA, 19 nt, Homo sapiens
  misc_RNA (1)...(19): siRNA sense strand
gcuggacgaggaucucuuc

SEQ ID NO: 278738 - RNA, 19 nt, Homo sapiens
  misc_RNA (1)...(19): siRNA sense strand
gacccuaaccuccaaaaga

SEQ ID NO: 278739 - RNA, 19 nt, Homo sapiens
  misc_RNA (1)...(19): siRNA sense strand
gaagggcgauuacgaugua

SEQ ID NO: 278740 - RNA, 19 nt, Homo sapiens
  misc_RNA (1)...(19): siRNA sense strand
ggagaaaccucugaagaaa

SEQ ID NO: 278741 - RNA, 19 nt, Homo sapiens
  misc_RNA (1)...(19): siRNA sense strand
gaacagaauuggaagacaa

SEQ ID NO: 278742 - RNA, 19 nt, Homo sapiens
  misc_RNA (1)...(19): siRNA sense strand
gaagaaacaucuggacaaa

SEQ ID NO: 278743 - RNA, 19 nt, Homo sapiens
  misc_RNA (1)...(19): siRNA sense strand
agaaacaucuggacaaauu

SEQ ID NO: 278744 - RNA, 19 nt, Homo sapiens
  misc_RNA (1)...(19): siRNA sense strand
gaagacaagcgguaauaua

SEQ ID NO: 278745 - RNA, 19 nt, Homo sapiens
  misc_RNA (1)...(19): siRNA sense strand
gaauaucacucauaacaag

SEQ ID NO: 278746 - RNA, 19 nt, Homo sapiens
  misc_RNA (1)...(19): siRNA sense strand
gaagaagccuuguauugca

SEQ ID NO: 278747 - RNA, 19 nt, Homo sapiens
  misc_RNA (1)...(19): siRNA sense strand
gaagacagcauuauagaga

SEQ ID NO: 278748 - RNA, 19 nt, Homo sapiens
  misc_RNA (1)...(19): siRNA sense strand
gaaugguguucacagaaua

SEQ ID NO: 278749 - RNA, 19 nt, Homo sapiens
  misc_RNA (1)...(19): siRNA sense strand
ggaaugguguucacagaau

SEQ ID NO: 278750 - RNA, 19 nt, Homo sapiens
  misc_RNA (1)...(19): siRNA sense strand
cagaggaacccaaagaaua

SEQ ID NO: 278751 - RNA, 19 nt, Homo sapiens
  misc_RNA (1)...(19): siRNA sense strand
gagcagaggauguucauga

SEQ ID NO: 278752 - RNA, 19 nt, Homo sapiens
  misc_RNA (1)...(19): siRNA sense strand
gaacggauucuguuugcua

SEQ ID NO: 278753 - RNA, 19 nt, Homo sapiens
  misc_RNA (1)...(19): siRNA sense strand
ggacaaucauggaaacugu

SEQ ID NO: 278754 - RNA, 19 nt, Homo sapiens
  misc_RNA (1)...(19): siRNA sense strand
ggacagcucuccggugguu

SEQ ID NO: 278755 - RNA, 19 nt, Homo sapiens
  misc_RNA (1)...(19): siRNA sense strand
ccacaagauaucaguauua

SEQ ID NO: 278756 - RNA, 19 nt, Homo sapiens
  misc_RNA (1)...(19): siRNA sense strand
gcaagaggccacaagauau

SEQ ID NO: 278757 - RNA, 19 nt, Homo sapiens
  misc_RNA (1)...(19): siRNA sense strand
ggaagagaaucgaguugau

SEQ ID NO: 278758 - RNA, 19 nt, Homo sapiens
  misc_RNA (1)...(19): siRNA sense strand
caaugaaguugaacguuug

SEQ ID NO: 278759 - RNA, 19 nt, Homo sapiens
  misc_RNA (1)...(19): siRNA sense strand
gaucaggaaucuagagaag

SEQ ID NO: 278760 - RNA, 19 nt, Homo sapiens
  misc_RNA (1)...(19): siRNA sense strand
gaaugaagaagccuuguau

SEQ ID NO: 278761 - RNA, 19 nt, Homo sapiens
  misc_RNA (1)...(19): siRNA sense strand
ugucauggcuucagcaaga

SEQ ID NO: 278762 - RNA, 19 nt, Homo sapiens
  misc_RNA (1)...(19): siRNA sense strand
gguguggcauuuacaauau

SEQ ID NO: 278763 - RNA, 19 nt, Homo sapiens
  misc_RNA (1)...(19): siRNA sense strand
ucacacggaugauaucgaa

SEQ ID NO: 278764 - RNA, 19 nt, Homo sapiens
  misc_RNA (1)...(19): siRNA sense strand
gaaaggacgguguggcauu

SEQ ID NO: 278765 - RNA, 19 nt, Homo sapiens
  misc_RNA (1)...(19): siRNA sense strand
uuucugagcugaugaucua

SEQ ID NO: 278766 - RNA, 19 nt, Homo sapiens
  misc_RNA (1)...(19): siRNA sense strand
gggaauaucacucauaaca

SEQ ID NO: 278767 - RNA, 19 nt, Homo sapiens
  misc_RNA (1)...(19): siRNA sense strand
cagagaguaugugcuauuu

SEQ ID NO: 278768 - RNA, 19 nt, Homo sapiens
  misc_RNA (1)...(19): siRNA sense strand
guauauuucucgguuguuu

SEQ ID NO: 278769 - RNA, 19 nt, Homo sapiens
  misc_RNA (1)...(19): siRNA sense strand
cauaacaagucgaccauuc

SEQ ID NO: 278770 - RNA, 19 nt, Homo sapiens
  misc_RNA (1)...(19): siRNA sense strand
agaaaccucugaagaaaca

SEQ ID NO: 278771 - RNA, 19 nt, Homo sapiens
  misc_RNA (1)...(19): siRNA sense strand
gagcagggagugaauguga

SEQ ID NO: 278772 - RNA, 19 nt, Homo sapiens
  misc_RNA (1)...(19): siRNA sense strand
ggaaugaagaagccuugua

SEQ ID NO: 278773 - RNA, 19 nt, Homo sapiens
  misc_RNA (1)...(19): siRNA sense strand
uggaggagcugacccagaa

SEQ ID NO: 278774 - RNA, 19 nt, Homo sapiens
  misc_RNA (1)...(19): siRNA sense strand
gaagguagcccaagaacac

SEQ ID NO: 278775 - RNA, 19 nt, Homo sapiens
  misc_RNA (1)...(19): siRNA sense strand
gcacggcccacaugcuuaa

SEQ ID NO: 278776 - RNA, 19 nt, Homo sapiens
  misc_RNA (1)...(19): siRNA sense strand
ggauggauuuggacaggaa

SEQ ID NO: 278777 - RNA, 19 nt, Homo sapiens
  misc_RNA (1)...(19): siRNA sense strand
uaguggagcucaucaacaa

SEQ ID NO: 278778 - RNA, 19 nt, Homo sapiens
  misc_RNA (1)...(19): siRNA sense strand
acaacagccuggacuuaaa

SEQ ID NO: 278779 - RNA, 19 nt, Homo sapiens
  misc_RNA (1)...(19): siRNA sense strand
gcacagcucagccaccuau

SEQ ID NO: 278780 - RNA, 19 nt, Homo sapiens
  misc_RNA (1)...(19): siRNA sense strand
cacagaauaugagcaaauu

SEQ ID NO: 278781 - RNA, 19 nt, Homo sapiens
  misc_RNA (1)...(19): siRNA sense strand
agaggaacccaaagaauaa

SEQ ID NO: 278782 - RNA, 19 nt, Homo sapiens
  misc_RNA (1)...(19): siRNA sense strand
gcuaaugagccuuugcuuu

SEQ ID NO: 278783 - RNA, 19 nt, Homo sapiens
  misc_RNA (1)...(19): siRNA sense strand
ggaaagcacagggcaagaa

SEQ ID NO: 278784 - RNA, 19 nt, Homo sapiens
  misc_RNA (1)...(19): siRNA sense strand
gggagaagauggaguacag

SEQ ID NO: 278785 - RNA, 19 nt, Homo sapiens
  misc_RNA (1)...(19): siRNA sense strand
ggugagcacuacucggaaa

SEQ ID NO: 278786 - RNA, 19 nt, Homo sapiens
  misc_RNA (1)...(19): siRNA sense strand
ggaagagugugagcaaugg

SEQ ID NO: 278787 - RNA, 19 nt, Homo sapiens
  misc_RNA (1)...(19): siRNA sense strand
aaaggacgguguggcauuu

SEQ ID NO: 278788 - RNA, 19 nt, Homo sapiens
  misc_RNA (1)...(19): siRNA sense strand
gaagaggccgcugauguug

SEQ ID NO: 278789 - RNA, 19 nt, Homo sapiens
  misc_RNA (1)...(19): siRNA sense strand
gaagagaaucgaguugaug

SEQ ID NO: 278790 - RNA, 19 nt, Homo sapiens
  misc_RNA (1)...(19): siRNA sense strand
gagacuauaaucaguuuga

SEQ ID NO: 278791 - RNA, 19 nt, Homo sapiens
  misc_RNA (1)...(19): siRNA sense strand
gaaacuagaagagggaaug

SEQ ID NO: 278792 - RNA, 19 nt, Homo sapiens
  misc_RNA (1)...(19): siRNA sense strand
gcacuacuuuggccuuugg

SEQ ID NO: 278793 - RNA, 19 nt, Homo sapiens
  misc_RNA (1)...(19): siRNA sense strand
ggaauaucacucauaacaa

SEQ ID NO: 278794 - RNA, 19 nt, Homo sapiens
  misc_RNA (1)...(19): siRNA sense strand
ggaaugacauggggaauau

SEQ ID NO: 278795 - RNA, 19 nt, Homo sapiens
  misc_RNA (1)...(19): siRNA sense strand
uaaaggacaaucauggaaa

SEQ ID NO: 278796 - RNA, 19 nt, Homo sapiens
  misc_RNA (1)...(19): siRNA sense strand
aagcugaacugauguacau

SEQ ID NO: 278797 - RNA, 19 nt, Homo sapiens
  misc_RNA (1)...(19): siRNA sense strand
gagaguaugugcuauuucc

SEQ ID NO: 278798 - RNA, 19 nt, Homo sapiens
  misc_RNA (1)...(19): siRNA sense strand
ugagcaaauuccaaagaaa

SEQ ID NO: 278799 - RNA, 19 nt, Homo sapiens
  misc_RNA (1)...(19): siRNA sense strand
ucacaacagccuggacuua

SEQ ID NO: 278800 - RNA, 19 nt, Homo sapiens
  misc_RNA (1)...(19): siRNA sense strand
uaacaagucgaccauucua

SEQ ID NO: 278801 - RNA, 19 nt, Homo sapiens
  misc_RNA (1)...(19): siRNA sense strand
guaaaggacaaucauggaa

SEQ ID NO: 278802 - RNA, 19 nt, Homo sapiens
  misc_RNA (1)...(19): siRNA sense strand
gaaagcacagggcaagaau

SEQ ID NO: 278803 - RNA, 19 nt, Homo sapiens
  misc_RNA (1)...(19): siRNA sense strand
ggacaaauucgcuaaugag

SEQ ID NO: 278804 - RNA, 19 nt, Homo sapiens
  misc_RNA (1)...(19): siRNA sense strand
gaagaagaaacuagaagag

SEQ ID NO: 278805 - RNA, 19 nt, Homo sapiens
  misc_RNA (1)...(19): siRNA sense strand
ucaggaaucuagagaagca

SEQ ID NO: 278806 - RNA, 19 nt, Homo sapiens
  misc_RNA (1)...(19): siRNA sense strand
gccacaagauaucaguauu

SEQ ID NO: 278807 - RNA, 19 nt, Homo sapiens
  misc_RNA (1)...(19): siRNA sense strand
gcgagagacgcacuacuuu

SEQ ID NO: 278808 - RNA, 19 nt, Homo sapiens
  misc_RNA (1)...(19): siRNA sense strand
gcugauaccaaccaaagaa

SEQ ID NO: 278809 - RNA, 19 nt, Homo sapiens
  misc_RNA (1)...(19): siRNA sense strand
gaugaucuacugcuuggaa

SEQ ID NO: 278810 - RNA, 19 nt, Homo sapiens
  misc_RNA (1)...(19): siRNA sense strand
gcgauuacgauguacauug

SEQ ID NO: 278811 - RNA, 19 nt, Homo sapiens
  misc_RNA (1)...(19): siRNA sense strand
cagaagaggccgcugaugu

SEQ ID NO: 278812 - RNA, 19 nt, Homo sapiens
  misc_RNA (1)...(19): siRNA sense strand
gaacccgaccugacuagug

SEQ ID NO: 278813 - RNA, 19 nt, Homo sapiens
  misc_RNA (1)...(19): siRNA sense strand
gcucuccggugguucauca

SEQ ID NO: 278814 - RNA, 19 nt, Homo sapiens
  misc_RNA (1)...(19): siRNA sense strand
agcagaagcugaacugaug

SEQ ID NO: 278815 - RNA, 19 nt, Homo sapiens
  misc_RNA (1)...(19): siRNA sense strand
gcuacaacguccugagcaa

SEQ ID NO: 278816 - RNA, 19 nt, Homo sapiens
  misc_RNA (1)...(19): siRNA sense strand
gauguuggcagcauugaau

SEQ ID NO: 278817 - RNA, 19 nt, Homo sapiens
  misc_RNA (1)...(19): siRNA sense strand
gaccagaggaacccaaaga

SEQ ID NO: 278818 - RNA, 19 nt, Homo sapiens
  misc_RNA (1)...(19): siRNA sense strand
gacaagcgguaauauacag

SEQ ID NO: 278819 - RNA, 19 nt, Homo sapiens
  misc_RNA (1)...(19): siRNA sense strand
uggagacuauaaucaguuu

SEQ ID NO: 278820 - RNA, 19 nt, Homo sapiens
  misc_RNA (1)...(19): siRNA sense strand
ggcagaauggcacuacaua

SEQ ID NO: 278821 - RNA, 19 nt, Homo sapiens
  misc_RNA (1)...(19): siRNA sense strand
cccaaagaauaauguggua

SEQ ID NO: 278822 - RNA, 19 nt, Homo sapiens
  misc_RNA (1)...(19): siRNA sense strand
uggagaaaccucugaagaa

SEQ ID NO: 278823 - RNA, 19 nt, Homo sapiens
  misc_RNA (1)...(19): siRNA sense strand
ccucagagaguaugugcua

SEQ ID NO: 278824 - RNA, 19 nt, Homo sapiens
  misc_RNA (1)...(19): siRNA sense strand
uggacaaauucgcuaauga

SEQ ID NO: 278825 - RNA, 19 nt, Homo sapiens
  misc_RNA (1)...(19): siRNA sense strand
gcagggagugaaugugauu

SEQ ID NO: 278826 - RNA, 19 nt, Homo sapiens
  misc_RNA (1)...(19): siRNA sense strand
gagcugauaccaaccaaag

SEQ ID NO: 278827 - RNA, 19 nt, Homo sapiens
  misc_RNA (1)...(19): siRNA sense strand
caaggaagagugugagcaa

SEQ ID NO: 278828 - RNA, 19 nt, Homo sapiens
  misc_RNA (1)...(19): siRNA sense strand
gugcagcucucggugaaga

SEQ ID NO: 278829 - RNA, 19 nt, Homo sapiens
  misc_RNA (1)...(19): siRNA sense strand
caacacccaugccuacaac

SEQ ID NO: 278830 - RNA, 19 nt, Homo sapiens
  misc_RNA (1)...(19): siRNA sense strand
ugaagaaacaucuggacaa

SEQ ID NO: 278831 - RNA, 19 nt, Homo sapiens
  misc_RNA (1)...(19): siRNA sense strand
ggaagacaagcgguaauau

SEQ ID NO: 278832 - RNA, 19 nt, Homo sapiens
  misc_RNA (1)...(19): siRNA sense strand
ggaacagaauuggaagaca

SEQ ID NO: 278833 - RNA, 19 nt, Homo sapiens
  misc_RNA (1)...(19): siRNA sense strand
gaguaugugcuauuuccua

SEQ ID NO: 278834 - RNA, 19 nt, Homo sapiens
  misc_RNA (1)...(19): siRNA sense strand
caacagccuggacuuaaau

SEQ ID NO: 278835 - RNA, 19 nt, Homo sapiens
  misc_RNA (1)...(19): siRNA sense strand
agaagaggccgcugauguu

SEQ ID NO: 278836 - RNA, 19 nt, Homo sapiens
  misc_RNA (1)...(19): siRNA sense strand
guguggcauuuacaauaua

SEQ ID NO: 278837 - RNA, 19 nt, Homo sapiens
  misc_RNA (1)...(19): siRNA sense strand
gagagacgcacuacuuugg

SEQ ID NO: 278838 - RNA, 19 nt, Homo sapiens
  misc_RNA (1)...(19): siRNA sense strand
ugaagaagaaacuagaaga

SEQ ID NO: 278839 - RNA, 19 nt, Homo sapiens
  misc_RNA (1)...(19): siRNA sense strand
ggacauaguuuagguauug

SEQ ID NO: 278840 - RNA, 19 nt, Homo sapiens
  misc_RNA (1)...(19): siRNA sense strand
caagaacacugcaaacaaa

SEQ ID NO: 278841 - RNA, 19 nt, Homo sapiens
  misc_RNA (1)...(19): siRNA sense strand
gggaagagaugguuacaug

SEQ ID NO: 278842 - RNA, 19 nt, Homo sapiens
  misc_RNA (1)...(19): siRNA sense strand
gaucacagcaaguuaauaa

SEQ ID NO: 278843 - RNA, 19 nt, Homo sapiens
  misc_RNA (1)...(19): siRNA sense strand
gucauuggcuguuguguua

SEQ ID NO: 278844 - RNA, 19 nt, Homo sapiens
  misc_RNA (1)...(19): siRNA sense strand
cuacaaaggucauggcaaa

SEQ ID NO: 278845 - RNA, 19 nt, Homo sapiens
  misc_RNA (1)...(19): siRNA sense strand
ggagaaacuucauccaaug

SEQ ID NO: 278846 - RNA, 19 nt, Homo sapiens
  misc_RNA (1)...(19): siRNA sense strand
ugaaacaacacaacaguua

SEQ ID NO: 278847 - RNA, 19 nt, Homo sapiens
  misc_RNA (1)...(19): siRNA sense strand
agaauuagcuuccauuaag

SEQ ID NO: 278848 - RNA, 19 nt, Homo sapiens
  misc_RNA (1)...(19): siRNA sense strand
caacuugaauguaccagaa

SEQ ID NO: 278849 - RNA, 19 nt, Homo sapiens
  misc_RNA (1)...(19): siRNA sense strand
gauaagcauucauaugguu

SEQ ID NO: 278850 - RNA, 19 nt, Homo sapiens
  misc_RNA (1)...(19): siRNA sense strand
gaacaugaauagacuacca

SEQ ID NO: 278851 - RNA, 19 nt, Homo sapiens
  misc_RNA (1)...(19): siRNA sense strand
gacgagagcugcaagcaau

SEQ ID NO: 278852 - RNA, 19 nt, Homo sapiens
  misc_RNA (1)...(19): siRNA sense strand
gaauuagcuuccauuaaga

SEQ ID NO: 278853 - RNA, 19 nt, Homo sapiens
  misc_RNA (1)...(19): siRNA sense strand
ccugugggauuuauuauuu

SEQ ID NO: 278854 - RNA, 19 nt, Homo sapiens
  misc_RNA (1)...(19): siRNA sense strand
gaacagcccaguuggaaau

SEQ ID NO: 278855 - RNA, 19 nt, Homo sapiens
  misc_RNA (1)...(19): siRNA sense strand
gcaagaacacugcaaacaa

SEQ ID NO: 278856 - RNA, 19 nt, Homo sapiens
  misc_RNA (1)...(19): siRNA sense strand
gaaacuucauccaaugguu

SEQ ID NO: 278857 - RNA, 19 nt, Homo sapiens
  misc_RNA (1)...(19): siRNA sense strand
caacaguuauacccaaguu

SEQ ID NO: 278858 - RNA, 19 nt, Homo sapiens
  misc_RNA (1)...(19): siRNA sense strand
aaugguagcucuaaacaug

SEQ ID NO: 278859 - RNA, 19 nt, Homo sapiens
  misc_RNA (1)...(19): siRNA sense strand
uaccagaacuaaacaguau

SEQ ID NO: 278860 - RNA, 19 nt, Homo sapiens
  misc_RNA (1)...(19): siRNA sense strand
caagaucacagcaaguuaa

SEQ ID NO: 278861 - RNA, 19 nt, Homo sapiens
  misc_RNA (1)...(19): siRNA sense strand
caagaauggacauaguuua

SEQ ID NO: 278862 - RNA, 19 nt, Homo sapiens
  misc_RNA (1)...(19): siRNA sense strand
ggaaugaauauccacaauu

SEQ ID NO: 278863 - RNA, 19 nt, Homo sapiens
  misc_RNA (1)...(19): siRNA sense strand
uaucggagaucgagaagga

SEQ ID NO: 278864 - RNA, 19 nt, Homo sapiens
  misc_RNA (1)...(19): siRNA sense strand
ucacugaccuaccgccaaa

SEQ ID NO: 278865 - RNA, 19 nt, Homo sapiens
  misc_RNA (1)...(19): siRNA sense strand
gguauuagcaggaagaaug

SEQ ID NO: 278866 - RNA, 19 nt, Homo sapiens
  misc_RNA (1)...(19): siRNA sense strand
gaauggacauaguuuaggu

SEQ ID NO: 278867 - RNA, 19 nt, Homo sapiens
  misc_RNA (1)...(19): siRNA sense strand
gggauaagcauucauaugg

SEQ ID NO: 278868 - RNA, 19 nt, Homo sapiens
  misc_RNA (1)...(19): siRNA sense strand
gcaaugagugaacagcuaa

SEQ ID NO: 278869 - RNA, 19 nt, Homo sapiens
  misc_RNA (1)...(19): siRNA sense strand
caauuuagcaucaggcaaa

SEQ ID NO: 278870 - RNA, 19 nt, Homo sapiens
  misc_RNA (1)...(19): siRNA sense strand
gugcgucaguuuauagaaa

SEQ ID NO: 278871 - RNA, 19 nt, Homo sapiens
  misc_RNA (1)...(19): siRNA sense strand
ugaaagaaauccuaaucuc

SEQ ID NO: 278872 - RNA, 19 nt, Homo sapiens
  misc_RNA (1)...(19): siRNA sense strand
gaaacaacacaacaguuau

SEQ ID NO: 278873 - RNA, 19 nt, Homo sapiens
  misc_RNA (1)...(19): siRNA sense strand
gagaagccauugaaacaac

SEQ ID NO: 278874 - RNA, 19 nt, Homo sapiens
  misc_RNA (1)...(19): siRNA sense strand
ggaccaacuuucacuacug

SEQ ID NO: 278875 - RNA, 19 nt, Homo sapiens
  misc_RNA (1)...(19): siRNA sense strand
gcacagauagaucgauuuc

SEQ ID NO: 278876 - RNA, 19 nt, Homo sapiens
  misc_RNA (1)...(19): siRNA sense strand
uaucaacaauaccugcuuu

SEQ ID NO: 278877 - RNA, 19 nt, Homo sapiens
  misc_RNA (1)...(19): siRNA sense strand
gcagaggccuuugccagau

SEQ ID NO: 278878 - RNA, 19 nt, Homo sapiens
  misc_RNA (1)...(19): siRNA sense strand
guggaagacuaccuacauu

SEQ ID NO: 278879 - RNA, 19 nt, Homo sapiens
  misc_RNA (1)...(19): siRNA sense strand
gugcucagcucuuaacagu

SEQ ID NO: 278880 - RNA, 19 nt, Homo sapiens
  misc_RNA (1)...(19): siRNA sense strand
aaacagaucacuacuccaa

SEQ ID NO: 278881 - RNA, 19 nt, Homo sapiens
  misc_RNA (1)...(19): siRNA sense strand
guaauaaacaccagucauc

SEQ ID NO: 278882 - RNA, 19 nt, Homo sapiens
  misc_RNA (1)...(19): siRNA sense strand
acaguuauacccaaguuua

SEQ ID NO: 278883 - RNA, 19 nt, Homo sapiens
  misc_RNA (1)...(19): siRNA sense strand
gggagaagccauugaaaca

SEQ ID NO: 278884 - RNA, 19 nt, Homo sapiens
  misc_RNA (1)...(19): siRNA sense strand
uagcuuccauuaagaauag

SEQ ID NO: 278885 - RNA, 19 nt, Homo sapiens
  misc_RNA (1)...(19): siRNA sense strand
ggaagacuaccuacauuag

SEQ ID NO: 278886 - RNA, 19 nt, Homo sapiens
  misc_RNA (1)...(19): siRNA sense strand
gaaggaugcauucagucua

SEQ ID NO: 278887 - RNA, 19 nt, Homo sapiens
  misc_RNA (1)...(19): siRNA sense strand
ggauaagcauucauauggu

SEQ ID NO: 278888 - RNA, 19 nt, Homo sapiens
  misc_RNA (1)...(19): siRNA sense strand
gcuguuguguuaaucuuau

SEQ ID NO: 278889 - RNA, 19 nt, Homo sapiens
  misc_RNA (1)...(19): siRNA sense strand
gaacuggacaaccuuaugg

SEQ ID NO: 278890 - RNA, 19 nt, Homo sapiens
  misc_RNA (1)...(19): siRNA sense strand
ccaaagcaaccuccacuug

SEQ ID NO: 278891 - RNA, 19 nt, Homo sapiens
  misc_RNA (1)...(19): siRNA sense strand
uagaaagaaugauccacuu

SEQ ID NO: 278892 - RNA, 19 nt, Homo sapiens
  misc_RNA (1)...(19): siRNA sense strand
cgaaauggaaguugauuca

SEQ ID NO: 278893 - RNA, 19 nt, Homo sapiens
  misc_RNA (1)...(19): siRNA sense strand
gaauguaccagaacuaaac

SEQ ID NO: 278894 - RNA, 19 nt, Homo sapiens
  misc_RNA (1)...(19): siRNA sense strand
ccaagaauggacauaguuu

SEQ ID NO: 278895 - RNA, 19 nt, Homo sapiens
  misc_RNA (1)...(19): siRNA sense strand
guaccagaacuaaacagua

SEQ ID NO: 278896 - RNA, 19 nt, Homo sapiens
  misc_RNA (1)...(19): siRNA sense strand
gguuucaucuuauuuaguc

SEQ ID NO: 278897 - RNA, 19 nt, Homo sapiens
  misc_RNA (1)...(19): siRNA sense strand
caaauaaagcacaucaauc

SEQ ID NO: 278898 - RNA, 19 nt, Homo sapiens
  misc_RNA (1)...(19): siRNA sense strand
gcucuuaacagugcaauau

SEQ ID NO: 278899 - RNA, 19 nt, Homo sapiens
  misc_RNA (1)...(19): siRNA sense strand
gugaacagcuaaggagaga

SEQ ID NO: 278900 - RNA, 19 nt, Homo sapiens
  misc_RNA (1)...(19): siRNA sense strand
acaccgaaauggaaguuga

SEQ ID NO: 278901 - RNA, 19 nt, Homo sapiens
  misc_RNA (1)...(19): siRNA sense strand
ccaaugguuuccuaaaugg

SEQ ID NO: 278902 - RNA, 19 nt, Homo sapiens
  misc_RNA (1)...(19): siRNA sense strand
acagaucacuacuccaaug

SEQ ID NO: 278903 - RNA, 19 nt, Homo sapiens
  misc_RNA (1)...(19): siRNA sense strand
ccagaacuaaacaguauaa

SEQ ID NO: 278904 - RNA, 19 nt, Homo sapiens
  misc_RNA (1)...(19): siRNA sense strand
ccugugugcucagcucuua

SEQ ID NO: 278905 - RNA, 19 nt, Homo sapiens
  misc_RNA (1)...(19): siRNA sense strand
guaagggaagagaugguua

SEQ ID NO: 278906 - RNA, 19 nt, Homo sapiens
  misc_RNA (1)...(19): siRNA sense strand
uuauagaaauggugaaugg

SEQ ID NO: 278907 - RNA, 19 nt, Homo sapiens
  misc_RNA (1)...(19): siRNA sense strand
ggagaagccauugaaacaa

SEQ ID NO: 278908 - RNA, 19 nt, Homo sapiens
  misc_RNA (1)...(19): siRNA sense strand
ugguacagauagugaagua

SEQ ID NO: 278909 - RNA, 19 nt, Homo sapiens
  misc_RNA (1)...(19): siRNA sense strand
gcucaaggugugaacauga

SEQ ID NO: 278910 - RNA, 19 nt, Homo sapiens
  misc_RNA (1)...(19): siRNA sense strand
uggaagacuaccuacauua

SEQ ID NO: 278911 - RNA, 19 nt, Homo sapiens
  misc_RNA (1)...(19): siRNA sense strand
cagccugugggauuuauua

SEQ ID NO: 278912 - RNA, 19 nt, Homo sapiens
  misc_RNA (1)...(19): siRNA sense strand
cgaaggacaaguucagcua

SEQ ID NO: 278913 - RNA, 19 nt, Homo sapiens
  misc_RNA (1)...(19): siRNA sense strand
ccagcagccugugggauuu

SEQ ID NO: 278914 - RNA, 19 nt, Homo sapiens
  misc_RNA (1)...(19): siRNA sense strand
uggcagaccaugauacaaa

SEQ ID NO: 278915 - RNA, 19 nt, Homo sapiens
  misc_RNA (1)...(19): siRNA sense strand
caaggugugaacaugaaua

SEQ ID NO: 278916 - RNA, 19 nt, Homo sapiens
  misc_RNA (1)...(19): siRNA sense strand
ggaacagcccaguuggaaa

SEQ ID NO: 278917 - RNA, 19 nt, Homo sapiens
  misc_RNA (1)...(19): siRNA sense strand
gagagacuguggcaagaac

SEQ ID NO: 278918 - RNA, 19 nt, Homo sapiens
  misc_RNA (1)...(19): siRNA sense strand
uccaaugguuuccuaaaug

SEQ ID NO: 278919 - RNA, 19 nt, Homo sapiens
  misc_RNA (1)...(19): siRNA sense strand
gaauauccacaauuuagca

SEQ ID NO: 278920 - RNA, 19 nt, Homo sapiens
  misc_RNA (1)...(19): siRNA sense strand
ccaaauuuguauccuacug

SEQ ID NO: 278921 - RNA, 19 nt, Homo sapiens
  misc_RNA (1)...(19): siRNA sense strand
ggaacuggacaaccuuaug

SEQ ID NO: 278922 - RNA, 19 nt, Homo sapiens
  misc_RNA (1)...(19): siRNA sense strand
gaacagcuaaggagagacu

SEQ ID NO: 278923 - RNA, 19 nt, Homo sapiens
  misc_RNA (1)...(19): siRNA sense strand
ggacgagagcugcaagcaa

SEQ ID NO: 278924 - RNA, 19 nt, Homo sapiens
  misc_RNA (1)...(19): siRNA sense strand
gaaauggaagauugugaca

SEQ ID NO: 278925 - RNA, 19 nt, Homo sapiens
  misc_RNA (1)...(19): siRNA sense strand
gaccagaccguucuagaag

SEQ ID NO: 278926 - RNA, 19 nt, Homo sapiens
  misc_RNA (1)...(19): siRNA sense strand
ucaaacaccaggagaagug

SEQ ID NO: 278927 - RNA, 19 nt, Homo sapiens
  misc_RNA (1)...(19): siRNA sense strand
ggacaaccuuauggaccaa

SEQ ID NO: 278928 - RNA, 19 nt, Homo sapiens
  misc_RNA (1)...(19): siRNA sense strand
guugggauaagcauucaua

SEQ ID NO: 278929 - RNA, 19 nt, Homo sapiens
  misc_RNA (1)...(19): siRNA sense strand
ccuaaaugguagcucuaaa

SEQ ID NO: 278930 - RNA, 19 nt, Homo sapiens
  misc_RNA (1)...(19): siRNA sense strand
gauagugaaguacgauguu

SEQ ID NO: 278931 - RNA, 19 nt, Homo sapiens
  misc_RNA (1)...(19): siRNA sense strand
ugaccuaccgccaaauuug

SEQ ID NO: 278932 - RNA, 19 nt, Homo sapiens
  misc_RNA (1)...(19): siRNA sense strand
ugaacgagcaggagaagga

SEQ ID NO: 278933 - RNA, 19 nt, Homo sapiens
  misc_RNA (1)...(19): siRNA sense strand
ucaagaucacagcaaguua

SEQ ID NO: 278934 - RNA, 19 nt, Homo sapiens
  misc_RNA (1)...(19): siRNA sense strand
uauccacaauuuagcauca

SEQ ID NO: 278935 - RNA, 19 nt, Homo sapiens
  misc_RNA (1)...(19): siRNA sense strand
uaaacaugaccacgaaaug

SEQ ID NO: 278936 - RNA, 19 nt, Homo sapiens
  misc_RNA (1)...(19): siRNA sense strand
uaaaugguagcucuaaaca

SEQ ID NO: 278937 - RNA, 19 nt, Homo sapiens
  misc_RNA (1)...(19): siRNA sense strand
uaacuucaccaguaaugau

SEQ ID NO: 278938 - RNA, 19 nt, Homo sapiens
  misc_RNA (1)...(19): siRNA sense strand
aaaggaagcaccgcacauu

SEQ ID NO: 278939 - RNA, 19 nt, Homo sapiens
  misc_RNA (1)...(19): siRNA sense strand
ggacacagcuguaagauug

SEQ ID NO: 278940 - RNA, 19 nt, Homo sapiens
  misc_RNA (1)...(19): siRNA sense strand
gaagaaacauucccuauuc

SEQ ID NO: 278941 - RNA, 19 nt, Homo sapiens
  misc_RNA (1)...(19): siRNA sense strand
gacaagagauuacagauaa

SEQ ID NO: 278942 - RNA, 19 nt, Homo sapiens
  misc_RNA (1)...(19): siRNA sense strand
gagaugagcaagucaauua

SEQ ID NO: 278943 - RNA, 19 nt, Homo sapiens
  misc_RNA (1)...(19): siRNA sense strand
ggaaugagcuucagaugca

SEQ ID NO: 278944 - RNA, 19 nt, Homo sapiens
  misc_RNA (1)...(19): siRNA sense strand
gaaugaaagcugaagauua

SEQ ID NO: 278945 - RNA, 19 nt, Homo sapiens
  misc_RNA (1)...(19): siRNA sense strand
gcaaagagagugauauuga

SEQ ID NO: 278946 - RNA, 19 nt, Homo sapiens
  misc_RNA (1)...(19): siRNA sense strand
ugaagcaucucaaacauaa

SEQ ID NO: 278947 - RNA, 19 nt, Homo sapiens
  misc_RNA (1)...(19): siRNA sense strand
ccacagagaucacuuagau

SEQ ID NO: 278948 - RNA, 19 nt, Homo sapiens
  misc_RNA (1)...(19): siRNA sense strand
aagaacagcugcauaauga

SEQ ID NO: 278949 - RNA, 19 nt, Homo sapiens
  misc_RNA (1)...(19): siRNA sense strand
guauagagcugaaacugaa

SEQ ID NO: 278950 - RNA, 19 nt, Homo sapiens
  misc_RNA (1)...(19): siRNA sense strand
cagcaaauccuaaugauaa

SEQ ID NO: 278951 - RNA, 19 nt, Homo sapiens
  misc_RNA (1)...(19): siRNA sense strand
gaagcaaucucagcagaaa

SEQ ID NO: 278952 - RNA, 19 nt, Homo sapiens
  misc_RNA (1)...(19): siRNA sense strand
gaagguauaugcuaugaag

SEQ ID NO: 278953 - RNA, 19 nt, Homo sapiens
  misc_RNA (1)...(19): siRNA sense strand
ugucgaagaugccauguua

SEQ ID NO: 278954 - RNA, 19 nt, Homo sapiens
  misc_RNA (1)...(19): siRNA sense strand
gauaaaagcuugcaggaaa

SEQ ID NO: 278955 - RNA, 19 nt, Homo sapiens
  misc_RNA (1)...(19): siRNA sense strand
caauauuucucgacacuuu

SEQ ID NO: 278956 - RNA, 19 nt, Homo sapiens
  misc_RNA (1)...(19): siRNA sense strand
gaaaugguguagaagaaau

SEQ ID NO: 278957 - RNA, 19 nt, Homo sapiens
  misc_RNA (1)...(19): siRNA sense strand
gaaagaggacuuaauuugu

SEQ ID NO: 278958 - RNA, 19 nt, Homo sapiens
  misc_RNA (1)...(19): siRNA sense strand
agaagaagccaaugacuua

SEQ ID NO: 278959 - RNA, 19 nt, Homo sapiens
  misc_RNA (1)...(19): siRNA sense strand
ucacuuaccuuuccugaug

SEQ ID NO: 278960 - RNA, 19 nt, Homo sapiens
  misc_RNA (1)...(19): siRNA sense strand
ucacaaaggccaugaguuu

SEQ ID NO: 278961 - RNA, 19 nt, Homo sapiens
  misc_RNA (1)...(19): siRNA sense strand
gcaauugcgugcuaaacuu

SEQ ID NO: 278962 - RNA, 19 nt, Homo sapiens
  misc_RNA (1)...(19): siRNA sense strand
ggaagcaaagagauuauua

SEQ ID NO: 278963 - RNA, 19 nt, Homo sapiens
  misc_RNA (1)...(19): siRNA sense strand
uaacagaacuagcuccaau

SEQ ID NO: 278964 - RNA, 19 nt, Homo sapiens
  misc_RNA (1)...(19): siRNA sense strand
cuacaaguguugcuaguuu

SEQ ID NO: 278965 - RNA, 19 nt, Homo sapiens
  misc_RNA (1)...(19): siRNA sense strand
gugcagaaccucaaacaua

SEQ ID NO: 278966 - RNA, 19 nt, Homo sapiens
  misc_RNA (1)...(19): siRNA sense strand
guaugaagaugaauaagga

SEQ ID NO: 278967 - RNA, 19 nt, Homo sapiens
  misc_RNA (1)...(19): siRNA sense strand
gaaagaaagcuaauacaca

SEQ ID NO: 278968 - RNA, 19 nt, Homo sapiens
  misc_RNA (1)...(19): siRNA sense strand
caaauuggcagaaauaaug

SEQ ID NO: 278969 - RNA, 19 nt, Homo sapiens
  misc_RNA (1)...(19): siRNA sense strand
gaacagcugcauaaugaaa

SEQ ID NO: 278970 - RNA, 19 nt, Homo sapiens
  misc_RNA (1)...(19): siRNA sense strand
caagucaauuagucaguua

SEQ ID NO: 278971 - RNA, 19 nt, Homo sapiens
  misc_RNA (1)...(19): siRNA sense strand
caagagauaugcugcuguu

SEQ ID NO: 278972 - RNA, 19 nt, Homo sapiens
  misc_RNA (1)...(19): siRNA sense strand
ccaaauagaggaaauauca

SEQ ID NO: 278973 - RNA, 19 nt, Homo sapiens
  misc_RNA (1)...(19): siRNA sense strand
guacuuguaugaagaugaa

SEQ ID NO: 278974 - RNA, 19 nt, Homo sapiens
  misc_RNA (1)...(19): siRNA sense strand
caaauaagcggcuguuguu

SEQ ID NO: 278975 - RNA, 19 nt, Homo sapiens
  misc_RNA (1)...(19): siRNA sense strand
gaaagucagucagaauuca

SEQ ID NO: 278976 - RNA, 19 nt, Homo sapiens
  misc_RNA (1)...(19): siRNA sense strand
gaagaacagcugcauaaug

SEQ ID NO: 278977 - RNA, 19 nt, Homo sapiens
  misc_RNA (1)...(19): siRNA sense strand
guggagaucuuguaaacuu

SEQ ID NO: 278978 - RNA, 19 nt, Homo sapiens
  misc_RNA (1)...(19): siRNA sense strand
gcugcaagcuauauuagaa

SEQ ID NO: 278979 - RNA, 19 nt, Homo sapiens
  misc_RNA (1)...(19): siRNA sense strand
gcuguaagauugaggaaga

SEQ ID NO: 278980 - RNA, 19 nt, Homo sapiens
  misc_RNA (1)...(19): siRNA sense strand
ugaaagaauuggaugaaga

SEQ ID NO: 278981 - RNA, 19 nt, Homo sapiens
  misc_RNA (1)...(19): siRNA sense strand
gcgaaaugguguagaagaa

SEQ ID NO: 278982 - RNA, 19 nt, Homo sapiens
  misc_RNA (1)...(19): siRNA sense strand
caaacgacaucucuucuuc

SEQ ID NO: 278983 - RNA, 19 nt, Homo sapiens
  misc_RNA (1)...(19): siRNA sense strand
gaagagaagaaauguagaa

SEQ ID NO: 278984 - RNA, 19 nt, Homo sapiens
  misc_RNA (1)...(19): siRNA sense strand
gccaaugacuuacuuagga

SEQ ID NO: 278985 - RNA, 19 nt, Homo sapiens
  misc_RNA (1)...(19): siRNA sense strand
cgaauuacaucuuuacaag

SEQ ID NO: 278986 - RNA, 19 nt, Homo sapiens
  misc_RNA (1)...(19): siRNA sense strand
gaagaugccauguuaagug

SEQ ID NO: 278987 - RNA, 19 nt, Homo sapiens
  misc_RNA (1)...(19): siRNA sense strand
gaaggcagaggaagaauau

SEQ ID NO: 278988 - RNA, 19 nt, Homo sapiens
  misc_RNA (1)...(19): siRNA sense strand
gauaacaugcugcuggaua

SEQ ID NO: 278989 - RNA, 19 nt, Homo sapiens
  misc_RNA (1)...(19): siRNA sense strand
ccaaggagauguguauaga

SEQ ID NO: 278990 - RNA, 19 nt, Homo sapiens
  misc_RNA (1)...(19): siRNA sense strand
aauauaaacuggagaagga

SEQ ID NO: 278991 - RNA, 19 nt, Homo sapiens
  misc_RNA (1)...(19): siRNA sense strand
gaagaaggcagaggaagaa

SEQ ID NO: 278992 - RNA, 19 nt, Homo sapiens
  misc_RNA (1)...(19): siRNA sense strand
gauaaagaucacacuguua

SEQ ID NO: 278993 - RNA, 19 nt, Homo sapiens
  misc_RNA (1)...(19): siRNA sense strand
gaaacaguauagaggaaau

SEQ ID NO: 278994 - RNA, 19 nt, Homo sapiens
  misc_RNA (1)...(19): siRNA sense strand
uggaacaccugauuauauu

SEQ ID NO: 278995 - RNA, 19 nt, Homo sapiens
  misc_RNA (1)...(19): siRNA sense strand
gaauaaggaaggcauggua

SEQ ID NO: 278996 - RNA, 19 nt, Homo sapiens
  misc_RNA (1)...(19): siRNA sense strand
gaagagggaaaucaaagaa

SEQ ID NO: 278997 - RNA, 19 nt, Homo sapiens
  misc_RNA (1)...(19): siRNA sense strand
gaagugaauucggauuguu

SEQ ID NO: 278998 - RNA, 19 nt, Homo sapiens
  misc_RNA (1)...(19): siRNA sense strand
gcagaaauaaugaaucgaa

SEQ ID NO: 278999 - RNA, 19 nt, Homo sapiens
  misc_RNA (1)...(19): siRNA sense strand
gcaagucaauuagucaguu

SEQ ID NO: 279000 - RNA, 19 nt, Homo sapiens
  misc_RNA (1)...(19): siRNA sense strand
uaaagaaagucagucagaa

SEQ ID NO: 279001 - RNA, 19 nt, Homo sapiens
  misc_RNA (1)...(19): siRNA sense strand
gagaagagaagaaauguag

SEQ ID NO: 279002 - RNA, 19 nt, Homo sapiens
  misc_RNA (1)...(19): siRNA sense strand
ugcagaaccucaaacauaa

SEQ ID NO: 279003 - RNA, 19 nt, Homo sapiens
  misc_RNA (1)...(19): siRNA sense strand
auucacagcuugcuaauga

SEQ ID NO: 279004 - RNA, 19 nt, Homo sapiens
  misc_RNA (1)...(19): siRNA sense strand
gaagaaaucaaacgacauc

SEQ ID NO: 279005 - RNA, 19 nt, Homo sapiens
  misc_RNA (1)...(19): siRNA sense strand
caaaggccaugaguuuauu

SEQ ID NO: 279006 - RNA, 19 nt, Homo sapiens
  misc_RNA (1)...(19): siRNA sense strand
aagaaaggauggaggauga

SEQ ID NO: 279007 - RNA, 19 nt, Homo sapiens
  misc_RNA (1)...(19): siRNA sense strand
agagguaaaugaacacaaa

SEQ ID NO: 279008 - RNA, 19 nt, Homo sapiens
  misc_RNA (1)...(19): siRNA sense strand
agacagaggucaugauucu

SEQ ID NO: 279009 - RNA, 19 nt, Homo sapiens
  misc_RNA (1)...(19): siRNA sense strand
caacaacgguuagaacaag

SEQ ID NO: 279010 - RNA, 19 nt, Homo sapiens
  misc_RNA (1)...(19): siRNA sense strand
gaaacauucccuauuccua

SEQ ID NO: 279011 - RNA, 19 nt, Homo sapiens
  misc_RNA (1)...(19): siRNA sense strand
acagagaucacuuagauaa

SEQ ID NO: 279012 - RNA, 19 nt, Homo sapiens
  misc_RNA (1)...(19): siRNA sense strand
ccaaagcucguuuaacuga

SEQ ID NO: 279013 - RNA, 19 nt, Homo sapiens
  misc_RNA (1)...(19): siRNA sense strand
ggaaaucaaagaagaaauc

SEQ ID NO: 279014 - RNA, 19 nt, Homo sapiens
  misc_RNA (1)...(19): siRNA sense strand
ucuauaagcuggaagaaca

SEQ ID NO: 279015 - RNA, 19 nt, Homo sapiens
  misc_RNA (1)...(19): siRNA sense strand
uggagaaguucaauuggua

SEQ ID NO: 279016 - RNA, 19 nt, Homo sapiens
  misc_RNA (1)...(19): siRNA sense strand
ggccaugaguuuauuccua

SEQ ID NO: 279017 - RNA, 19 nt, Homo sapiens
  misc_RNA (1)...(19): siRNA sense strand
ggaacugaaugacaugcaa

SEQ ID NO: 279018 - RNA, 19 nt, Homo sapiens
  misc_RNA (1)...(19): siRNA sense strand
gagagaaauucaaccagau

SEQ ID NO: 279019 - RNA, 19 nt, Homo sapiens
  misc_RNA (1)...(19): siRNA sense strand
acacaagauuugagaaaga

SEQ ID NO: 279020 - RNA, 19 nt, Homo sapiens
  misc_RNA (1)...(19): siRNA sense strand
gguaaaggaacuuaaagaa

SEQ ID NO: 279021 - RNA, 19 nt, Homo sapiens
  misc_RNA (1)...(19): siRNA sense strand
gcagaugaaacaggaaaua

SEQ ID NO: 279022 - RNA, 19 nt, Homo sapiens
  misc_RNA (1)...(19): siRNA sense strand
gaaaugcaguuaaaagaug

SEQ ID NO: 279023 - RNA, 19 nt, Homo sapiens
  misc_RNA (1)...(19): siRNA sense strand
uagcaaucguagauacuua

SEQ ID NO: 279024 - RNA, 19 nt, Homo sapiens
  misc_RNA (1)...(19): siRNA sense strand
cgacaucucuucuucaaaa

SEQ ID NO: 279025 - RNA, 19 nt, Homo sapiens
  misc_RNA (1)...(19): siRNA sense strand
ccaggaagguauaugcuau

SEQ ID NO: 279026 - RNA, 19 nt, Homo sapiens
  misc_RNA (1)...(19): siRNA sense strand
aaagaggacuuaauuuguc

SEQ ID NO: 279027 - RNA, 19 nt, Homo sapiens
  misc_RNA (1)...(19): siRNA sense strand
agaaagaggacuuaauuug

SEQ ID NO: 279028 - RNA, 19 nt, Homo sapiens
  misc_RNA (1)...(19): siRNA sense strand
gaaaagauguagagaugga

SEQ ID NO: 279029 - RNA, 19 nt, Homo sapiens
  misc_RNA (1)...(19): siRNA sense strand
gcaauccaauccaucuaug

SEQ ID NO: 279030 - RNA, 19 nt, Homo sapiens
  misc_RNA (1)...(19): siRNA sense strand
caaagucuguggcaaugug

SEQ ID NO: 279031 - RNA, 19 nt, Homo sapiens
  misc_RNA (1)...(19): siRNA sense strand
gaccuucaagcucgaauua

SEQ ID NO: 279032 - RNA, 19 nt, Homo sapiens
  misc_RNA (1)...(19): siRNA sense strand
uaaaggaucaguuggaaga

SEQ ID NO: 279033 - RNA, 19 nt, Homo sapiens
  misc_RNA (1)...(19): siRNA sense strand
gaacaccugauuauauuuc

SEQ ID NO: 279034 - RNA, 19 nt, Homo sapiens
  misc_RNA (1)...(19): siRNA sense strand
aaacauucccuauuccuaa

SEQ ID NO: 279035 - RNA, 19 nt, Homo sapiens
  misc_RNA (1)...(19): siRNA sense strand
gcaaacagcaugcuaacca

SEQ ID NO: 279036 - RNA, 19 nt, Homo sapiens
  misc_RNA (1)...(19): siRNA sense strand
gcagaaacuagaacauuug

SEQ ID NO: 279037 - RNA, 19 nt, Homo sapiens
  misc_RNA (1)...(19): siRNA sense strand
gaacacaaaguaaccaaag

SEQ ID NO: 279038 - RNA, 19 nt, Homo sapiens
  misc_RNA (1)...(19): siRNA sense strand
gguaaaugaacacaaagua

SEQ ID NO: 279039 - RNA, 19 nt, Homo sapiens
  misc_RNA (1)...(19): siRNA sense strand
ggacaacgaugccuaaauc

SEQ ID NO: 279040 - RNA, 19 nt, Homo sapiens
  misc_RNA (1)...(19): siRNA sense strand
gagaaagccuccauaaugu

SEQ ID NO: 279041 - RNA, 19 nt, Homo sapiens
  misc_RNA (1)...(19): siRNA sense strand
ugagaaagccuccauaaug

SEQ ID NO: 279042 - RNA, 19 nt, Homo sapiens
  misc_RNA (1)...(19): siRNA sense strand
gauauugugugcuacaguu

SEQ ID NO: 279043 - RNA, 19 nt, Homo sapiens
  misc_RNA (1)...(19): siRNA sense strand
gcugugauauugugugcua

SEQ ID NO: 279044 - RNA, 19 nt, Homo sapiens
  misc_RNA (1)...(19): siRNA sense strand
gaaaguggcagauauugag

SEQ ID NO: 279045 - RNA, 19 nt, Homo sapiens
  misc_RNA (1)...(19): siRNA sense strand
gcagugaaaguggcagaua

SEQ ID NO: 279046 - RNA, 19 nt, Homo sapiens
  misc_RNA (1)...(19): siRNA sense strand
cagugaaaguggcagauau

SEQ ID NO: 279047 - RNA, 19 nt, Homo sapiens
  misc_RNA (1)...(19): siRNA sense strand
uccauaauguacccaagua

SEQ ID NO: 279048 - RNA, 19 nt, Homo sapiens
  misc_RNA (1)...(19): siRNA sense strand
gaaagccuccauaauguac

SEQ ID NO: 279049 - RNA, 19 nt, Homo sapiens
  misc_RNA (1)...(19): siRNA sense strand
guacccaaguaacaacugu

SEQ ID NO: 279050 - RNA, 19 nt, Homo sapiens
  misc_RNA (1)...(19): siRNA sense strand
agaaagccuccauaaugua

SEQ ID NO: 279051 - RNA, 19 nt, Homo sapiens
  misc_RNA (1)...(19): siRNA sense strand
gccuaaaucccaaaucgaa

SEQ ID NO: 279052 - RNA, 19 nt, Homo sapiens
  misc_RNA (1)...(19): siRNA sense strand
gaaaauaaaggacaacgau

SEQ ID NO: 279053 - RNA, 19 nt, Homo sapiens
  misc_RNA (1)...(19): siRNA sense strand
ugaaaguggcagauauuga

SEQ ID NO: 279054 - RNA, 19 nt, Homo sapiens
  misc_RNA (1)...(19): siRNA sense strand
agaggacgcugucuuugca

SEQ ID NO: 279055 - RNA, 19 nt, Homo sapiens
  misc_RNA (1)...(19): siRNA sense strand
uggcagauauugagaaagc

SEQ ID NO: 279056 - RNA, 19 nt, Homo sapiens
  misc_RNA (1)...(19): siRNA sense strand
aaaggacaacgaugccuaa

SEQ ID NO: 279057 - RNA, 19 nt, Homo sapiens
  misc_RNA (1)...(19): siRNA sense strand
guucaaggcuuccccaugu

SEQ ID NO: 279058 - RNA, 19 nt, Homo sapiens
  misc_RNA (1)...(19): siRNA sense strand
ccaaguaacaacugugaca

SEQ ID NO: 279059 - RNA, 19 nt, Homo sapiens
  misc_RNA (1)...(19): siRNA sense strand
gauuauuacccugaaagaa

SEQ ID NO: 279060 - RNA, 19 nt, Homo sapiens
  misc_RNA (1)...(19): siRNA sense strand
aguggcagauauugagaaa

SEQ ID NO: 279061 - RNA, 19 nt, Homo sapiens
  misc_RNA (1)...(19): siRNA sense strand
gugaagggcauggcuauag

SEQ ID NO: 279062 - RNA, 19 nt, Homo sapiens
  misc_RNA (1)...(19): siRNA sense strand
aggacgcugucuuugcaua

SEQ ID NO: 279063 - RNA, 19 nt, Homo sapiens
  misc_RNA (1)...(19): siRNA sense strand
uaauguacccaaguaacaa

SEQ ID NO: 279064 - RNA, 19 nt, Homo sapiens
  misc_RNA (1)...(19): siRNA sense strand
ccauaauguacccaaguaa

SEQ ID NO: 279065 - RNA, 19 nt, Homo sapiens
  misc_RNA (1)...(19): siRNA sense strand
gugaaaguggcagauauug

SEQ ID NO: 279066 - RNA, 19 nt, Homo sapiens
  misc_RNA (1)...(19): siRNA sense strand
ggacgcugucuuugcauag

SEQ ID NO: 279067 - RNA, 19 nt, Homo sapiens
  misc_RNA (1)...(19): siRNA sense strand
caaguaacaacugugacaa

SEQ ID NO: 279068 - RNA, 19 nt, Homo sapiens
  misc_RNA (1)...(19): siRNA sense strand
cauaggcccugggguaaaa

SEQ ID NO: 279069 - RNA, 19 nt, Homo sapiens
  misc_RNA (1)...(19): siRNA sense strand
gguaaaagcagugaaagug

SEQ ID NO: 279070 - RNA, 19 nt, Homo sapiens
  misc_RNA (1)...(19): siRNA sense strand
ugaagggcauggcuauagc

SEQ ID NO: 279071 - RNA, 19 nt, Homo sapiens
  misc_RNA (1)...(19): siRNA sense strand
aaguaacaacugugacaaa

SEQ ID NO: 279072 - RNA, 19 nt, Homo sapiens
  misc_RNA (1)...(19): siRNA sense strand
gcaaggcuuauaaucaaaa

SEQ ID NO: 279073 - RNA, 19 nt, Homo sapiens
  misc_RNA (1)...(19): siRNA sense strand
agcaaggcuuauaaucaaa

SEQ ID NO: 279074 - RNA, 19 nt, Homo sapiens
  misc_RNA (1)...(19): siRNA sense strand
gaacauaacugaaucuugu

SEQ ID NO: 279075 - RNA, 19 nt, Homo sapiens
  misc_RNA (1)...(19): siRNA sense strand
gaccaaagcuccuuaugua

SEQ ID NO: 279076 - RNA, 19 nt, Homo sapiens
  misc_RNA (1)...(19): siRNA sense strand
gcagugagcuuucagagaa

SEQ ID NO: 279077 - RNA, 19 nt, Homo sapiens
  misc_RNA (1)...(19): siRNA sense strand
cgaaagagauguauaaauc

SEQ ID NO: 279078 - RNA, 19 nt, Homo sapiens
  misc_RNA (1)...(19): siRNA sense strand
agaaugaccuucaaacuaa

SEQ ID NO: 279079 - RNA, 19 nt, Homo sapiens
  misc_RNA (1)...(19): siRNA sense strand
gcaaucaccugacagugua

SEQ ID NO: 279080 - RNA, 19 nt, Homo sapiens
  misc_RNA (1)...(19): siRNA sense strand
gagaaugaccuucaaacua

SEQ ID NO: 279081 - RNA, 19 nt, Homo sapiens
  misc_RNA (1)...(19): siRNA sense strand
gaagaagccauuaagauug

SEQ ID NO: 279082 - RNA, 19 nt, Homo sapiens
  misc_RNA (1)...(19): siRNA sense strand
gaaacuccaucgccucauu

SEQ ID NO: 279083 - RNA, 19 nt, Homo sapiens
  misc_RNA (1)...(19): siRNA sense strand
caucgaggcaucuaaauua

SEQ ID NO: 279084 - RNA, 19 nt, Homo sapiens
  misc_RNA (1)...(19): siRNA sense strand
ucacgacucucaaagauga

SEQ ID NO: 279085 - RNA, 19 nt, Homo sapiens
  misc_RNA (1)...(19): siRNA sense strand
caaggaaucucuucucgau

SEQ ID NO: 279086 - RNA, 19 nt, Homo sapiens
  misc_RNA (1)...(19): siRNA sense strand
cagagcauauuccuguuua

SEQ ID NO: 279087 - RNA, 19 nt, Homo sapiens
  misc_RNA (1)...(19): siRNA sense strand
ccagcugccugacaaauaa

SEQ ID NO: 279088 - RNA, 19 nt, Homo sapiens
  misc_RNA (1)...(19): siRNA sense strand
gccagcaagugaagauuua

SEQ ID NO: 279089 - RNA, 19 nt, Homo sapiens
  misc_RNA (1)...(19): siRNA sense strand
gcccacagauucagaguug

SEQ ID NO: 279090 - RNA, 19 nt, Homo sapiens
  misc_RNA (1)...(19): siRNA sense strand
gcauauuccuguuuaucaa

SEQ ID NO: 279091 - RNA, 19 nt, Homo sapiens
  misc_RNA (1)...(19): siRNA sense strand
aagaagcucugucgaaaga

SEQ ID NO: 279092 - RNA, 19 nt, Homo sapiens
  misc_RNA (1)...(19): siRNA sense strand
guaaauugcccacagauuc

SEQ ID NO: 279093 - RNA, 19 nt, Homo sapiens
  misc_RNA (1)...(19): siRNA sense strand
agaagaagccauuaagauu

SEQ ID NO: 279094 - RNA, 19 nt, Homo sapiens
  misc_RNA (1)...(19): siRNA sense strand
gaguaaaacugaagaaaga

SEQ ID NO: 279095 - RNA, 19 nt, Homo sapiens
  misc_RNA (1)...(19): siRNA sense strand
gaauaagguuucagagcau

SEQ ID NO: 279096 - RNA, 19 nt, Homo sapiens
  misc_RNA (1)...(19): siRNA sense strand
uagaagaccugcgaguaaa

SEQ ID NO: 279097 - RNA, 19 nt, Homo sapiens
  misc_RNA (1)...(19): siRNA sense strand
gucgacaucugauauuuga

SEQ ID NO: 279098 - RNA, 19 nt, Homo sapiens
  misc_RNA (1)...(19): siRNA sense strand
gaggagaacauaacugaau

SEQ ID NO: 279099 - RNA, 19 nt, Homo sapiens
  misc_RNA (1)...(19): siRNA sense strand
ggaccaaagcuccuuaugu

SEQ ID NO: 279100 - RNA, 19 nt, Homo sapiens
  misc_RNA (1)...(19): siRNA sense strand
gagcauaagagaucaagau

SEQ ID NO: 279101 - RNA, 19 nt, Homo sapiens
  misc_RNA (1)...(19): siRNA sense strand
cgacaucugauauuugaaa

SEQ ID NO: 279102 - RNA, 19 nt, Homo sapiens
  misc_RNA (1)...(19): siRNA sense strand
gcacaagggucagcauagg

SEQ ID NO: 279103 - RNA, 19 nt, Homo sapiens
  misc_RNA (1)...(19): siRNA sense strand
gaaaagaaauguggaaacu

SEQ ID NO: 279104 - RNA, 19 nt, Homo sapiens
  misc_RNA (1)...(19): siRNA sense strand
gagauaugccagcaaguga

SEQ ID NO: 279105 - RNA, 19 nt, Homo sapiens
  misc_RNA (1)...(19): siRNA sense strand
cagaggagaacauaacuga

SEQ ID NO: 279106 - RNA, 19 nt, Homo sapiens
  misc_RNA (1)...(19): siRNA sense strand
caagugaagauuuacaaga

SEQ ID NO: 279107 - RNA, 19 nt, Homo sapiens
  misc_RNA (1)...(19): siRNA sense strand
uuagaagaccugcgaguaa

SEQ ID NO: 279108 - RNA, 19 nt, Homo sapiens
  misc_RNA (1)...(19): siRNA sense strand
gaaaaccucccaucuuuau

SEQ ID NO: 279109 - RNA, 19 nt, Homo sapiens
  misc_RNA (1)...(19): siRNA sense strand
cuuccuaacuuucccauau

SEQ ID NO: 279110 - RNA, 19 nt, Homo sapiens
  misc_RNA (1)...(19): siRNA sense strand
gauguggccgucuuguaua

SEQ ID NO: 279111 - RNA, 19 nt, Homo sapiens
  misc_RNA (1)...(19): siRNA sense strand
uaaauggaagcaaagauga

SEQ ID NO: 279112 - RNA, 19 nt, Homo sapiens
  misc_RNA (1)...(19): siRNA sense strand
gaagaaaaccaaacagaug

SEQ ID NO: 279113 - RNA, 19 nt, Homo sapiens
  misc_RNA (1)...(19): siRNA sense strand
guagaagaagccauuaaga

SEQ ID NO: 279114 - RNA, 19 nt, Homo sapiens
  misc_RNA (1)...(19): siRNA sense strand
acaaauaagucagcagcuu

SEQ ID NO: 279115 - RNA, 19 nt, Homo sapiens
  misc_RNA (1)...(19): siRNA sense strand
gagcugaugcugccauugu

SEQ ID NO: 279116 - RNA, 19 nt, Homo sapiens
  misc_RNA (1)...(19): siRNA sense strand
aaaagaagcucugucgaaa

SEQ ID NO: 279117 - RNA, 19 nt, Homo sapiens
  misc_RNA (1)...(19): siRNA sense strand
uagaagaagccauuaagau

SEQ ID NO: 279118 - RNA, 19 nt, Homo sapiens
  misc_RNA (1)...(19): siRNA sense strand
uaaauugcccacagauuca

SEQ ID NO: 279119 - RNA, 19 nt, Homo sapiens
  misc_RNA (1)...(19): siRNA sense strand
uguggaaacugcucucuca

SEQ ID NO: 279120 - RNA, 19 nt, Homo sapiens
  misc_RNA (1)...(19): siRNA sense strand
ugucgaaagagauguauaa

SEQ ID NO: 279121 - RNA, 19 nt, Homo sapiens
  misc_RNA (1)...(19): siRNA sense strand
ggucugcaaucaccugaca

SEQ ID NO: 279122 - RNA, 19 nt, Homo sapiens
  misc_RNA (1)...(19): siRNA sense strand
cgucuuguauaucaucuug

SEQ ID NO: 279123 - RNA, 19 nt, Homo sapiens
  misc_RNA (1)...(19): siRNA sense strand
augcuaaacuccaaugguu

SEQ ID NO: 279124 - RNA, 19 nt, Homo sapiens
  misc_RNA (1)...(19): siRNA sense strand
gaugaagacuuuuguaaac

SEQ ID NO: 279125 - RNA, 19 nt, Homo sapiens
  misc_RNA (1)...(19): siRNA sense strand
aaacuccaucgccucauua

SEQ ID NO: 279126 - RNA, 19 nt, Homo sapiens
  misc_RNA (1)...(19): siRNA sense strand
ucucacgacucucaaagau

SEQ ID NO: 279127 - RNA, 19 nt, Homo sapiens
  misc_RNA (1)...(19): siRNA sense strand
caaccaggagcaccaaaug

SEQ ID NO: 279128 - RNA, 19 nt, Homo sapiens
  misc_RNA (1)...(19): siRNA sense strand
caucaucgaggcaucuaaa

SEQ ID NO: 279129 - RNA, 19 nt, Homo sapiens
  misc_RNA (1)...(19): siRNA sense strand
aauaagguuucagagcaua

SEQ ID NO: 279130 - RNA, 19 nt, Homo sapiens
  misc_RNA (1)...(19): siRNA sense strand
gcuaaacuccaaugguuca

SEQ ID NO: 279131 - RNA, 19 nt, Homo sapiens
  misc_RNA (1)...(19): siRNA sense strand
caaaagaagcucugucgaa

SEQ ID NO: 279132 - RNA, 19 nt, Homo sapiens
  misc_RNA (1)...(19): siRNA sense strand
uuaaauggaagcaaagaug

SEQ ID NO: 279133 - RNA, 19 nt, Homo sapiens
  misc_RNA (1)...(19): siRNA sense strand
gagcauauuccuguuuauc

SEQ ID NO: 279134 - RNA, 19 nt, Homo sapiens
  misc_RNA (1)...(19): siRNA sense strand
gcaaccaggagcaccaaau

SEQ ID NO: 279135 - RNA, 19 nt, Homo sapiens
  misc_RNA (1)...(19): siRNA sense strand
ugauagauguggccgucuu

SEQ ID NO: 279136 - RNA, 19 nt, Homo sapiens
  misc_RNA (1)...(19): siRNA sense strand
gagcaucaucacaaucaug

SEQ ID NO: 279137 - RNA, 19 nt, Homo sapiens
  misc_RNA (1)...(19): siRNA sense strand
caccaaaugcuccuacuca

SEQ ID NO: 279138 - RNA, 19 nt, Homo sapiens
  misc_RNA (1)...(19): siRNA sense strand
aaaccucccaucuuuaugu

SEQ ID NO: 279139 - RNA, 19 nt, Homo sapiens
  misc_RNA (1)...(19): siRNA sense strand
aaagugagaaugaccuuca

SEQ ID NO: 279140 - RNA, 19 nt, Homo sapiens
  misc_RNA (1)...(19): siRNA sense strand
ucagagcauauuccuguuu

SEQ ID NO: 279141 - RNA, 19 nt, Homo sapiens
  misc_RNA (1)...(19): siRNA sense strand
agaagccagugccaguuga

SEQ ID NO: 279142 - RNA, 19 nt, Homo sapiens
  misc_RNA (1)...(19): siRNA sense strand
gggcagaggagaacauaac

SEQ ID NO: 279143 - RNA, 19 nt, Homo sapiens
  misc_RNA (1)...(19): siRNA sense strand
ccagagaaccgagauaugc

SEQ ID NO: 279144 - RNA, 19 nt, Homo sapiens
  misc_RNA (1)...(19): siRNA sense strand
guggccgucuuguauauca

SEQ ID NO: 279145 - RNA, 19 nt, Homo sapiens
  misc_RNA (1)...(19): siRNA sense strand
gcaagugaagauuuacaag

SEQ ID NO: 279146 - RNA, 19 nt, Homo sapiens
  misc_RNA (1)...(19): siRNA sense strand
cgagauaugccagcaagug

SEQ ID NO: 279147 - RNA, 19 nt, Homo sapiens
  misc_RNA (1)...(19): siRNA sense strand
aagauugcuuacugugaaa

SEQ ID NO: 279148 - RNA, 19 nt, Homo sapiens
  misc_RNA (1)...(19): siRNA sense strand
aagaagccauuaagauugc

SEQ ID NO: 279149 - RNA, 19 nt, Homo sapiens
  misc_RNA (1)...(19): siRNA sense strand
uaacuuucccauauguaga

SEQ ID NO: 279150 - RNA, 19 nt, Homo sapiens
  misc_RNA (1)...(19): siRNA sense strand
agauguggccgucuuguau

SEQ ID NO: 279151 - RNA, 19 nt, Homo sapiens
  misc_RNA (1)...(19): siRNA sense strand
aaccucccaucuuuaugua

SEQ ID NO: 279152 - RNA, 19 nt, Homo sapiens
  misc_RNA (1)...(19): siRNA sense strand
caccugacaguguaaagaa

SEQ ID NO: 279153 - RNA, 19 nt, Homo sapiens
  misc_RNA (1)...(19): siRNA sense strand
caagauccaaugcuaaacu

SEQ ID NO: 279154 - RNA, 19 nt, Homo sapiens
  misc_RNA (1)...(19): siRNA sense strand
ccaaaugcuccuacucauc

SEQ ID NO: 279155 - RNA, 19 nt, Homo sapiens
  misc_RNA (1)...(19): siRNA sense strand
uuguaaacguguaucuuug

SEQ ID NO: 279156 - RNA, 19 nt, Homo sapiens
  misc_RNA (1)...(19): siRNA sense strand
ucaucgaggcaucuaaauu

SEQ ID NO: 279157 - RNA, 19 nt, Homo sapiens
  misc_RNA (1)...(19): siRNA sense strand
uguauaucaucuugguuug

SEQ ID NO: 279158 - RNA, 19 nt, Homo sapiens
  misc_RNA (1)...(19): siRNA sense strand
acagagagccaggaccaaa

SEQ ID NO: 279159 - RNA, 19 nt, Homo sapiens
  misc_RNA (1)...(19): siRNA sense strand
cagaagccagugccaguug

SEQ ID NO: 279160 - RNA, 19 nt, Homo sapiens
  misc_RNA (1)...(19): siRNA sense strand
gagaacauaacugaaucuu

SEQ ID NO: 279161 - RNA, 19 nt, Homo sapiens
  misc_RNA (1)...(19): siRNA sense strand
ugacugugguugcucuucu

SEQ ID NO: 279162 - RNA, 19 nt, Homo sapiens
  misc_RNA (1)...(19): siRNA sense strand
cagcuuauacccacagaag

SEQ ID NO: 279163 - RNA, 19 nt, Homo sapiens
  misc_RNA (1)...(19): siRNA sense strand
ugugguugcucuucuucaa

SEQ ID NO: 279164 - RNA, 19 nt, Homo sapiens
  misc_RNA (1)...(19): siRNA sense strand
uagauguggccgucuugua

SEQ ID NO: 279165 - RNA, 19 nt, Homo sapiens
  misc_RNA (1)...(19): siRNA sense strand
gauagauguggccgucuug

SEQ ID NO: 279166 - RNA, 19 nt, Homo sapiens
  misc_RNA (1)...(19): siRNA sense strand
gcagaggagaacauaacug

SEQ ID NO: 279167 - RNA, 19 nt, Homo sapiens
  misc_RNA (1)...(19): siRNA sense strand
uuucccauauguagaagaa

SEQ ID NO: 279168 - RNA, 19 nt, Homo sapiens
  misc_RNA (1)...(19): siRNA sense strand
gacugugguugcucuucuu

SEQ ID NO: 279169 - RNA, 19 nt, Homo sapiens
  misc_RNA (1)...(19): siRNA sense strand
ccaguugacgcugaaagaa

SEQ ID NO: 279170 - RNA, 19 nt, Homo sapiens
  misc_RNA (1)...(19): siRNA sense strand
gccaguugacgcugaaaga

SEQ ID NO: 279171 - RNA, 19 nt, Homo sapiens
  misc_RNA (1)...(19): siRNA sense strand
aagcacaagggucagcaua

SEQ ID NO: 279172 - RNA, 19 nt, Homo sapiens
  misc_RNA (1)...(19): siRNA sense strand
aggagaacauaacugaauc

SEQ ID NO: 279173 - RNA, 19 nt, Homo sapiens
  misc_RNA (1)...(19): siRNA sense strand
ggagaacauaacugaaucu

SEQ ID NO: 279174 - RNA, 19 nt, Homo sapiens
  misc_RNA (1)...(19): siRNA sense strand
gaagacacguuguuaccua

SEQ ID NO: 279175 - RNA, 19 nt, Homo sapiens
  misc_RNA (1)...(19): siRNA sense strand
ccacacagcuuucccugaa

SEQ ID NO: 279176 - RNA, 19 nt, Homo sapiens
  misc_RNA (1)...(19): siRNA sense strand
gagcagaguggaaugaaua

SEQ ID NO: 279177 - RNA, 19 nt, Homo sapiens
  misc_RNA (1)...(19): siRNA sense strand
gaaaaugccuaugaagaua

SEQ ID NO: 279178 - RNA, 19 nt, Homo sapiens
  misc_RNA (1)...(19): siRNA sense strand
gcaaaucuguggccuccaa

SEQ ID NO: 279179 - RNA, 19 nt, Homo sapiens
  misc_RNA (1)...(19): siRNA sense strand
ggaagaccaucaaagugaa

SEQ ID NO: 279180 - RNA, 19 nt, Homo sapiens
  misc_RNA (1)...(19): siRNA sense strand
gaaaauccuuugaguuuga

SEQ ID NO: 279181 - RNA, 19 nt, Homo sapiens
  misc_RNA (1)...(19): siRNA sense strand
ccaaggagaauccauauga

SEQ ID NO: 279182 - RNA, 19 nt, Homo sapiens
  misc_RNA (1)...(19): siRNA sense strand
gggaagaccaucaaaguga

SEQ ID NO: 279183 - RNA, 19 nt, Homo sapiens
  misc_RNA (1)...(19): siRNA sense strand
cgaagucuccuaccaguuu

SEQ ID NO: 279184 - RNA, 19 nt, Homo sapiens
  misc_RNA (1)...(19): siRNA sense strand
guuguuaccuaggaaguua

SEQ ID NO: 279185 - RNA, 19 nt, Homo sapiens
  misc_RNA (1)...(19): siRNA sense strand
agaauuaacuccaucuaca

SEQ ID NO: 279186 - RNA, 19 nt, Homo sapiens
  misc_RNA (1)...(19): siRNA sense strand
gaccaugacugccaacaag

SEQ ID NO: 279187 - RNA, 19 nt, Homo sapiens
  misc_RNA (1)...(19): siRNA sense strand
cgagaggccuuccgcaaau

SEQ ID NO: 279188 - RNA, 19 nt, Homo sapiens
  misc_RNA (1)...(19): siRNA sense strand
ggucuauccuuucaugaga

SEQ ID NO: 279189 - RNA, 19 nt, Homo sapiens
  misc_RNA (1)...(19): siRNA sense strand
cgacgaagacacguuguua

SEQ ID NO: 279190 - RNA, 19 nt, Homo sapiens
  misc_RNA (1)...(19): siRNA sense strand
ggacuggcuuccuguguca

SEQ ID NO: 279191 - RNA, 19 nt, Homo sapiens
  misc_RNA (1)...(19): siRNA sense strand
gcauuggucuauccuuuca

SEQ ID NO: 279192 - RNA, 19 nt, Homo sapiens
  misc_RNA (1)...(19): siRNA sense strand
aagcuuguccaaagaauua

SEQ ID NO: 279193 - RNA, 19 nt, Homo sapiens
  misc_RNA (1)...(19): siRNA sense strand
gaggaaagaagagauuaaa

SEQ ID NO: 279194 - RNA, 19 nt, Homo sapiens
  misc_RNA (1)...(19): siRNA sense strand
ugaaacagcaucacugaga

SEQ ID NO: 279195 - RNA, 19 nt, Homo sapiens
  misc_RNA (1)...(19): siRNA sense strand
gaauuaacuccaucuacaa

SEQ ID NO: 279196 - RNA, 19 nt, Homo sapiens
  misc_RNA (1)...(19): siRNA sense strand
caucuacaaugccaagaga

SEQ ID NO: 279197 - RNA, 19 nt, Homo sapiens
  misc_RNA (1)...(19): siRNA sense strand
agaguggaaugaauaaguu

SEQ ID NO: 279198 - RNA, 19 nt, Homo sapiens
  misc_RNA (1)...(19): siRNA sense strand
ccaucaaagugaagacauu

SEQ ID NO: 279199 - RNA, 19 nt, Homo sapiens
  misc_RNA (1)...(19): siRNA sense strand
gagaggaaagaagagauua

SEQ ID NO: 279200 - RNA, 19 nt, Homo sapiens
  misc_RNA (1)...(19): siRNA sense strand
gcagugagaccuuuucuuu

SEQ ID NO: 279201 - RNA, 19 nt, Homo sapiens
  misc_RNA (1)...(19): siRNA sense strand
cagaaaauccuuugaguuu

SEQ ID NO: 279202 - RNA, 19 nt, Homo sapiens
  misc_RNA (1)...(19): siRNA sense strand
uauggagucucagauguuu

SEQ ID NO: 279203 - RNA, 19 nt, Homo sapiens
  misc_RNA (1)...(19): siRNA sense strand
guauagcagugagaccuuu

SEQ ID NO: 279204 - RNA, 19 nt, Homo sapiens
  misc_RNA (1)...(19): siRNA sense strand
aaaugaaguuucuccacaa

SEQ ID NO: 279205 - RNA, 19 nt, Homo sapiens
  misc_RNA (1)...(19): siRNA sense strand
gcgagaggccuuccgcaaa

SEQ ID NO: 279206 - RNA, 19 nt, Homo sapiens
  misc_RNA (1)...(19): siRNA sense strand
ggacuuaaagagccgaaga

SEQ ID NO: 279207 - RNA, 19 nt, Homo sapiens
  misc_RNA (1)...(19): siRNA sense strand
gaguggagcaguacuuaga

SEQ ID NO: 279208 - RNA, 19 nt, Homo sapiens
  misc_RNA (1)...(19): siRNA sense strand
agaagaagccaucgcgaaa

SEQ ID NO: 279209 - RNA, 19 nt, Homo sapiens
  misc_RNA (1)...(19): siRNA sense strand
agugggaacuggucagaaa

SEQ ID NO: 279210 - RNA, 19 nt, Homo sapiens
  misc_RNA (1)...(19): siRNA sense strand
gccaagagaggaaagaaga

SEQ ID NO: 279211 - RNA, 19 nt, Homo sapiens
  misc_RNA (1)...(19): siRNA sense strand
ggagcaguacuuagaagaa

SEQ ID NO: 279212 - RNA, 19 nt, Homo sapiens
  misc_RNA (1)...(19): siRNA sense strand
gaagucuccuaccaguuuc

SEQ ID NO: 279213 - RNA, 19 nt, Homo sapiens
  misc_RNA (1)...(19): siRNA sense strand
caagacagggagcuaagaa

SEQ ID NO: 279214 - RNA, 19 nt, Homo sapiens
  misc_RNA (1)...(19): siRNA sense strand
caaggagaauccauaugag

SEQ ID NO: 279215 - RNA, 19 nt, Homo sapiens
  misc_RNA (1)...(19): siRNA sense strand
gcgaguggagcaguacuua

SEQ ID NO: 279216 - RNA, 19 nt, Homo sapiens
  misc_RNA (1)...(19): siRNA sense strand
cugcauuggucuauccuuu

SEQ ID NO: 279217 - RNA, 19 nt, Homo sapiens
  misc_RNA (1)...(19): siRNA sense strand
ccagagguguacuguguca

SEQ ID NO: 279218 - RNA, 19 nt, Homo sapiens
  misc_RNA (1)...(19): siRNA sense strand
ugccagagguguacugugu

SEQ ID NO: 279219 - RNA, 19 nt, Homo sapiens
  misc_RNA (1)...(19): siRNA sense strand
ccacugagaaugguacuga

SEQ ID NO: 279220 - RNA, 19 nt, Homo sapiens
  misc_RNA (1)...(19): siRNA sense strand
acagggagcuaagaaagug

SEQ ID NO: 279221 - RNA, 19 nt, Homo sapiens
  misc_RNA (1)...(19): siRNA sense strand
ucugggaucugaccgauuc

SEQ ID NO: 279222 - RNA, 19 nt, Homo sapiens
  misc_RNA (1)...(19): siRNA sense strand
agaacuccuuggacucuuu

SEQ ID NO: 279223 - RNA, 19 nt, Homo sapiens
  misc_RNA (1)...(19): siRNA sense strand
gagcaguacuuagaagaac

SEQ ID NO: 279224 - RNA, 19 nt, Homo sapiens
  misc_RNA (1)...(19): siRNA sense strand
gaauguaauacccucaaug

SEQ ID NO: 279225 - RNA, 19 nt, Homo sapiens
  misc_RNA (1)...(19): siRNA sense strand
gaggaagaaugagcugauc

SEQ ID NO: 279226 - RNA, 19 nt, Homo sapiens
  misc_RNA (1)...(19): siRNA sense strand
gagaaccaacccaaguuug

SEQ ID NO: 279227 - RNA, 19 nt, Homo sapiens
  misc_RNA (1)...(19): siRNA sense strand
uuuccaagguccuagauga

SEQ ID NO: 279228 - RNA, 19 nt, Homo sapiens
  misc_RNA (1)...(19): siRNA sense strand
auaugaggauguggacuua

SEQ ID NO: 279229 - RNA, 19 nt, Homo sapiens
  misc_RNA (1)...(19): siRNA sense strand
gauggcagcagacgcuuug

SEQ ID NO: 279230 - RNA, 19 nt, Homo sapiens
  misc_RNA (1)...(19): siRNA sense strand
aagaagccaucgcgaaaca

SEQ ID NO: 279231 - RNA, 19 nt, Homo sapiens
  misc_RNA (1)...(19): siRNA sense strand
gagaucugcccaaggagaa

SEQ ID NO: 279232 - RNA, 19 nt, Homo sapiens
  misc_RNA (1)...(19): siRNA sense strand
cagcucauccgaaucuuug

SEQ ID NO: 279233 - RNA, 19 nt, Homo sapiens
  misc_RNA (1)...(19): siRNA sense strand
cccagcaacugucugagaa

SEQ ID NO: 279234 - RNA, 19 nt, Homo sapiens
  misc_RNA (1)...(19): siRNA sense strand
gcaacaaaaugaaguuucu

SEQ ID NO: 279235 - RNA, 19 nt, Homo sapiens
  misc_RNA (1)...(19): siRNA sense strand
ugagaaccaacccaaguuu

SEQ ID NO: 279236 - RNA, 19 nt, Homo sapiens
  misc_RNA (1)...(19): siRNA sense strand
aacaagaauuccagcauca

SEQ ID NO: 279237 - RNA, 19 nt, Homo sapiens
  misc_RNA (1)...(19): siRNA sense strand
gagguguacugugucauca

SEQ ID NO: 279238 - RNA, 19 nt, Homo sapiens
  misc_RNA (1)...(19): siRNA sense strand
ccuccagccucaaugaaga

SEQ ID NO: 279239 - RNA, 19 nt, Homo sapiens
  misc_RNA (1)...(19): siRNA sense strand
augaggauguggacuuaaa

SEQ ID NO: 279240 - RNA, 19 nt, Homo sapiens
  misc_RNA (1)...(19): siRNA sense strand
cgacuccgacgaugaaugu

SEQ ID NO: 279241 - RNA, 19 nt, Homo sapiens
  misc_RNA (1)...(19): siRNA sense strand
ccaagaggcacagccauga

SEQ ID NO: 279242 - RNA, 19 nt, Homo sapiens
  misc_RNA (1)...(19): siRNA sense strand
caagagaggaaagaagaga

SEQ ID NO: 279243 - RNA, 19 nt, Homo sapiens
  misc_RNA (1)...(19): siRNA sense strand
uggagcacguggacuuuga

SEQ ID NO: 279244 - RNA, 19 nt, Homo sapiens
  misc_RNA (1)...(19): siRNA sense strand
gaagauauugugggagauc

SEQ ID NO: 279245 - RNA, 19 nt, Homo sapiens
  misc_RNA (1)...(19): siRNA sense strand
gaggauguggacuuaaaga

SEQ ID NO: 279246 - RNA, 19 nt, Homo sapiens
  misc_RNA (1)...(19): siRNA sense strand
cagggaagaccaucaaagu

SEQ ID NO: 279247 - RNA, 19 nt, Homo sapiens
  misc_RNA (1)...(19): siRNA sense strand
gaacuccuuggacucuuug

SEQ ID NO: 279248 - RNA, 19 nt, Homo sapiens
  misc_RNA (1)...(19): siRNA sense strand
aggaggcgcugauggugaa

SEQ ID NO: 279249 - RNA, 19 nt, Homo sapiens
  misc_RNA (1)...(19): siRNA sense strand
cauaugaggauguggacuu

SEQ ID NO: 279250 - RNA, 19 nt, Homo sapiens
  misc_RNA (1)...(19): siRNA sense strand
ccaagcuuguccaaagaau

SEQ ID NO: 279251 - RNA, 19 nt, Homo sapiens
  misc_RNA (1)...(19): siRNA sense strand
ggaacuggucagaaaggaa

SEQ ID NO: 279252 - RNA, 19 nt, Homo sapiens
  misc_RNA (1)...(19): siRNA sense strand
gggaacuggucagaaagga

SEQ ID NO: 279253 - RNA, 19 nt, Homo sapiens
  misc_RNA (1)...(19): siRNA sense strand
ugaauguaauacccucaau

SEQ ID NO: 279254 - RNA, 19 nt, Homo sapiens
  misc_RNA (1)...(19): siRNA sense strand
cagcgacuccgacgaugaa

SEQ ID NO: 279255 - RNA, 19 nt, Homo sapiens
  misc_RNA (1)...(19): siRNA sense strand
ggaagaaugagcugaucuc

SEQ ID NO: 279256 - RNA, 19 nt, Homo sapiens
  misc_RNA (1)...(19): siRNA sense strand
agaagaaaaugccuaugaa

SEQ ID NO: 279257 - RNA, 19 nt, Homo sapiens
  misc_RNA (1)...(19): siRNA sense strand
uggugucccucaagaagaa

SEQ ID NO: 279258 - RNA, 19 nt, Homo sapiens
  misc_RNA (1)...(19): siRNA sense strand
gagaggccuuccgcaaauc

SEQ ID NO: 279259 - RNA, 19 nt, Homo sapiens
  misc_RNA (1)...(19): siRNA sense strand
ugacagcgacuccgacgau

SEQ ID NO: 279260 - RNA, 19 nt, Homo sapiens
  misc_RNA (1)...(19): siRNA sense strand
gagaacuccuuggacucuu

SEQ ID NO: 279261 - RNA, 19 nt, Homo sapiens
  misc_RNA (1)...(19): siRNA sense strand
auaaguuucuccgagguuu

SEQ ID NO: 279262 - RNA, 19 nt, Homo sapiens
  misc_RNA (1)...(19): siRNA sense strand
ugagcagaguggaaugaau

SEQ ID NO: 279263 - RNA, 19 nt, Homo sapiens
  misc_RNA (1)...(19): siRNA sense strand
uaagaaagugucgggcaaa

SEQ ID NO: 279264 - RNA, 19 nt, Homo sapiens
  misc_RNA (1)...(19): siRNA sense strand
gacacguuguuaccuagga

SEQ ID NO: 279265 - RNA, 19 nt, Homo sapiens
  misc_RNA (1)...(19): siRNA sense strand
ugacugccaacaagaauuc

SEQ ID NO: 279266 - RNA, 19 nt, Homo sapiens
  misc_RNA (1)...(19): siRNA sense strand
gcagaggaaaggcucaaag

SEQ ID NO: 279267 - RNA, 19 nt, Homo sapiens
  misc_RNA (1)...(19): siRNA sense strand
gaugcgagaggcagaggaa

SEQ ID NO: 279268 - RNA, 19 nt, Homo sapiens
  misc_RNA (1)...(19): siRNA sense strand
gcagaaaauccuuugaguu

SEQ ID NO: 279269 - RNA, 19 nt, Homo sapiens
  misc_RNA (1)...(19): siRNA sense strand
gaguggaaugaauaaguuu

SEQ ID NO: 279270 - RNA, 19 nt, Homo sapiens
  misc_RNA (1)...(19): siRNA sense strand
cagaguggaaugaauaagu

SEQ ID NO: 279271 - RNA, 19 nt, Homo sapiens
  misc_RNA (1)...(19): siRNA sense strand
guguuuauccgguucuuug

SEQ ID NO: 279272 - RNA, 19 nt, Homo sapiens
  misc_RNA (1)...(19): siRNA sense strand
gugguggugucccucaaga

SEQ ID NO: 279273 - RNA, 19 nt, Homo sapiens
  misc_RNA (1)...(19): siRNA sense strand
agaggaaagaagagauuaa

SEQ ID NO: 279274 - RNA, 19 nt, Homo sapiens
  misc_RNA (1)...(19): siRNA sense strand
gaagacacguuguuaccua

SEQ ID NO: 279275 - RNA, 19 nt, Homo sapiens
  misc_RNA (1)...(19): siRNA sense strand
ccacacagcuuucccugaa

SEQ ID NO: 279276 - RNA, 19 nt, Homo sapiens
  misc_RNA (1)...(19): siRNA sense strand
gagcagaguggaaugaaua

SEQ ID NO: 279277 - RNA, 19 nt, Homo sapiens
  misc_RNA (1)...(19): siRNA sense strand
gaaaaugccuaugaagaua

SEQ ID NO: 279278 - RNA, 19 nt, Homo sapiens
  misc_RNA (1)...(19): siRNA sense strand
gcaaaucuguggccuccaa

SEQ ID NO: 279279 - RNA, 19 nt, Homo sapiens
  misc_RNA (1)...(19): siRNA sense strand
ggaagaccaucaaagugaa

SEQ ID NO: 279280 - RNA, 19 nt, Homo sapiens
  misc_RNA (1)...(19): siRNA sense strand
gaaaauccuuugaguuuga

SEQ ID NO: 279281 - RNA, 19 nt, Homo sapiens
  misc_RNA (1)...(19): siRNA sense strand
ccaaggagaauccauauga

SEQ ID NO: 279282 - RNA, 19 nt, Homo sapiens
  misc_RNA (1)...(19): siRNA sense strand
gggaagaccaucaaaguga

SEQ ID NO: 279283 - RNA, 19 nt, Homo sapiens
  misc_RNA (1)...(19): siRNA sense strand
cgaagucuccuaccaguuu

SEQ ID NO: 279284 - RNA, 19 nt, Homo sapiens
  misc_RNA (1)...(19): siRNA sense strand
guuguuaccuaggaaguua

SEQ ID NO: 279285 - RNA, 19 nt, Homo sapiens
  misc_RNA (1)...(19): siRNA sense strand
agaauuaacuccaucuaca

SEQ ID NO: 279286 - RNA, 19 nt, Homo sapiens
  misc_RNA (1)...(19): siRNA sense strand
gaccaugacugccaacaag

SEQ ID NO: 279287 - RNA, 19 nt, Homo sapiens
  misc_RNA (1)...(19): siRNA sense strand
cgagaggccuuccgcaaau

SEQ ID NO: 279288 - RNA, 19 nt, Homo sapiens
  misc_RNA (1)...(19): siRNA sense strand
ggucuauccuuucaugaga

SEQ ID NO: 279289 - RNA, 19 nt, Homo sapiens
  misc_RNA (1)...(19): siRNA sense strand
cgacgaagacacguuguua

SEQ ID NO: 279290 - RNA, 19 nt, Homo sapiens
  misc_RNA (1)...(19): siRNA sense strand
ggacuggcuuccuguguca

SEQ ID NO: 279291 - RNA, 19 nt, Homo sapiens
  misc_RNA (1)...(19): siRNA sense strand
gcauuggucuauccuuuca

SEQ ID NO: 279292 - RNA, 19 nt, Homo sapiens
  misc_RNA (1)...(19): siRNA sense strand
aagcuuguccaaagaauua

SEQ ID NO: 279293 - RNA, 19 nt, Homo sapiens
  misc_RNA (1)...(19): siRNA sense strand
gaggaaagaagagauuaaa

SEQ ID NO: 279294 - RNA, 19 nt, Homo sapiens
  misc_RNA (1)...(19): siRNA sense strand
ugaaacagcaucacugaga

SEQ ID NO: 279295 - RNA, 19 nt, Homo sapiens
  misc_RNA (1)...(19): siRNA sense strand
gaauuaacuccaucuacaa

SEQ ID NO: 279296 - RNA, 19 nt, Homo sapiens
  misc_RNA (1)...(19): siRNA sense strand
caucuacaaugccaagaga

SEQ ID NO: 279297 - RNA, 19 nt, Homo sapiens
  misc_RNA (1)...(19): siRNA sense strand
agaguggaaugaauaaguu

SEQ ID NO: 279298 - RNA, 19 nt, Homo sapiens
  misc_RNA (1)...(19): siRNA sense strand
ccaucaaagugaagacauu

SEQ ID NO: 279299 - RNA, 19 nt, Homo sapiens
  misc_RNA (1)...(19): siRNA sense strand
gagaggaaagaagagauua

SEQ ID NO: 279300 - RNA, 19 nt, Homo sapiens
  misc_RNA (1)...(19): siRNA sense strand
gcagugagaccuuuucuuu

SEQ ID NO: 279301 - RNA, 19 nt, Homo sapiens
  misc_RNA (1)...(19): siRNA sense strand
cagaaaauccuuugaguuu

SEQ ID NO: 279302 - RNA, 19 nt, Homo sapiens
  misc_RNA (1)...(19): siRNA sense strand
uauggagucucagauguuu

SEQ ID NO: 279303 - RNA, 19 nt, Homo sapiens
  misc_RNA (1)...(19): siRNA sense strand
guauagcagugagaccuuu

SEQ ID NO: 279304 - RNA, 19 nt, Homo sapiens
  misc_RNA (1)...(19): siRNA sense strand
aaaugaaguuucuccacaa

SEQ ID NO: 279305 - RNA, 19 nt, Homo sapiens
  misc_RNA (1)...(19): siRNA sense strand
gcgagaggccuuccgcaaa

SEQ ID NO: 279306 - RNA, 19 nt, Homo sapiens
  misc_RNA (1)...(19): siRNA sense strand
ggacuuaaagagccgaaga

SEQ ID NO: 279307 - RNA, 19 nt, Homo sapiens
  misc_RNA (1)...(19): siRNA sense strand
gaguggagcaguacuuaga

SEQ ID NO: 279308 - RNA, 19 nt, Homo sapiens
  misc_RNA (1)...(19): siRNA sense strand
agaagaagccaucgcgaaa

SEQ ID NO: 279309 - RNA, 19 nt, Homo sapiens
  misc_RNA (1)...(19): siRNA sense strand
agugggaacuggucagaaa

SEQ ID NO: 279310 - RNA, 19 nt, Homo sapiens
  misc_RNA (1)...(19): siRNA sense strand
gccaagagaggaaagaaga

SEQ ID NO: 279311 - RNA, 19 nt, Homo sapiens
  misc_RNA (1)...(19): siRNA sense strand
ggagcaguacuuagaagaa

SEQ ID NO: 279312 - RNA, 19 nt, Homo sapiens
  misc_RNA (1)...(19): siRNA sense strand
gaagucuccuaccaguuuc

SEQ ID NO: 279313 - RNA, 19 nt, Homo sapiens
  misc_RNA (1)...(19): siRNA sense strand
caagacagggagcuaagaa

SEQ ID NO: 279314 - RNA, 19 nt, Homo sapiens
  misc_RNA (1)...(19): siRNA sense strand
caaggagaauccauaugag

SEQ ID NO: 279315 - RNA, 19 nt, Homo sapiens
  misc_RNA (1)...(19): siRNA sense strand
gcgaguggagcaguacuua

SEQ ID NO: 279316 - RNA, 19 nt, Homo sapiens
  misc_RNA (1)...(19): siRNA sense strand
cugcauuggucuauccuuu

SEQ ID NO: 279317 - RNA, 19 nt, Homo sapiens
  misc_RNA (1)...(19): siRNA sense strand
ccagagguguacuguguca

SEQ ID NO: 279318 - RNA, 19 nt, Homo sapiens
  misc_RNA (1)...(19): siRNA sense strand
ugccagagguguacugugu

SEQ ID NO: 279319 - RNA, 19 nt, Homo sapiens
  misc_RNA (1)...(19): siRNA sense strand
ccacugagaaugguacuga

SEQ ID NO: 279320 - RNA, 19 nt, Homo sapiens
  misc_RNA (1)...(19): siRNA sense strand
acagggagcuaagaaagug

SEQ ID NO: 279321 - RNA, 19 nt, Homo sapiens
  misc_RNA (1)...(19): siRNA sense strand
ucugggaucugaccgauuc

SEQ ID NO: 279322 - RNA, 19 nt, Homo sapiens
  misc_RNA (1)...(19): siRNA sense strand
agaacuccuuggacucuuu

SEQ ID NO: 279323 - RNA, 19 nt, Homo sapiens
  misc_RNA (1)...(19): siRNA sense strand
gagcaguacuuagaagaac

SEQ ID NO: 279324 - RNA, 19 nt, Homo sapiens
  misc_RNA (1)...(19): siRNA sense strand
gaauguaauacccucaaug

SEQ ID NO: 279325 - RNA, 19 nt, Homo sapiens
  misc_RNA (1)...(19): siRNA sense strand
gaggaagaaugagcugauc

SEQ ID NO: 279326 - RNA, 19 nt, Homo sapiens
  misc_RNA (1)...(19): siRNA sense strand
gagaaccaacccaaguuug

SEQ ID NO: 279327 - RNA, 19 nt, Homo sapiens
  misc_RNA (1)...(19): siRNA sense strand
uuuccaagguccuagauga

SEQ ID NO: 279328 - RNA, 19 nt, Homo sapiens
  misc_RNA (1)...(19): siRNA sense strand
auaugaggauguggacuua

SEQ ID NO: 279329 - RNA, 19 nt, Homo sapiens
  misc_RNA (1)...(19): siRNA sense strand
gauggcagcagacgcuuug

SEQ ID NO: 279330 - RNA, 19 nt, Homo sapiens
  misc_RNA (1)...(19): siRNA sense strand
aagaagccaucgcgaaaca

SEQ ID NO: 279331 - RNA, 19 nt, Homo sapiens
  misc_RNA (1)...(19): siRNA sense strand
gagaucugcccaaggagaa

SEQ ID NO: 279332 - RNA, 19 nt, Homo sapiens
  misc_RNA (1)...(19): siRNA sense strand
cagcucauccgaaucuuug

SEQ ID NO: 279333 - RNA, 19 nt, Homo sapiens
  misc_RNA (1)...(19): siRNA sense strand
cccagcaacugucugagaa

SEQ ID NO: 279334 - RNA, 19 nt, Homo sapiens
  misc_RNA (1)...(19): siRNA sense strand
gcaacaaaaugaaguuucu

SEQ ID NO: 279335 - RNA, 19 nt, Homo sapiens
  misc_RNA (1)...(19): siRNA sense strand
ugagaaccaacccaaguuu

SEQ ID NO: 279336 - RNA, 19 nt, Homo sapiens
  misc_RNA (1)...(19): siRNA sense strand
aacaagaauuccagcauca

SEQ ID NO: 279337 - RNA, 19 nt, Homo sapiens
  misc_RNA (1)...(19): siRNA sense strand
gagguguacugugucauca

SEQ ID NO: 279338 - RNA, 19 nt, Homo sapiens
  misc_RNA (1)...(19): siRNA sense strand
ccuccagccucaaugaaga

SEQ ID NO: 279339 - RNA, 19 nt, Homo sapiens
  misc_RNA (1)...(19): siRNA sense strand
augaggauguggacuuaaa

SEQ ID NO: 279340 - RNA, 19 nt, Homo sapiens
  misc_RNA (1)...(19): siRNA sense strand
cgacuccgacgaugaaugu

SEQ ID NO: 279341 - RNA, 19 nt, Homo sapiens
  misc_RNA (1)...(19): siRNA sense strand
ccaagaggcacagccauga

SEQ ID NO: 279342 - RNA, 19 nt, Homo sapiens
  misc_RNA (1)...(19): siRNA sense strand
caagagaggaaagaagaga

SEQ ID NO: 279343 - RNA, 19 nt, Homo sapiens
  misc_RNA (1)...(19): siRNA sense strand
uggagcacguggacuuuga

SEQ ID NO: 279344 - RNA, 19 nt, Homo sapiens
  misc_RNA (1)...(19): siRNA sense strand
gaagauauugugggagauc

SEQ ID NO: 279345 - RNA, 19 nt, Homo sapiens
  misc_RNA (1)...(19): siRNA sense strand
gaggauguggacuuaaaga

SEQ ID NO: 279346 - RNA, 19 nt, Homo sapiens
  misc_RNA (1)...(19): siRNA sense strand
cagggaagaccaucaaagu

SEQ ID NO: 279347 - RNA, 19 nt, Homo sapiens
  misc_RNA (1)...(19): siRNA sense strand
gaacuccuuggacucuuug

SEQ ID NO: 279348 - RNA, 19 nt, Homo sapiens
  misc_RNA (1)...(19): siRNA sense strand
aggaggcgcugauggugaa

SEQ ID NO: 279349 - RNA, 19 nt, Homo sapiens
  misc_RNA (1)...(19): siRNA sense strand
cauaugaggauguggacuu

SEQ ID NO: 279350 - RNA, 19 nt, Homo sapiens
  misc_RNA (1)...(19): siRNA sense strand
ccaagcuuguccaaagaau

SEQ ID NO: 279351 - RNA, 19 nt, Homo sapiens
  misc_RNA (1)...(19): siRNA sense strand
ggaacuggucagaaaggaa

SEQ ID NO: 279352 - RNA, 19 nt, Homo sapiens
  misc_RNA (1)...(19): siRNA sense strand
gggaacuggucagaaagga

SEQ ID NO: 279353 - RNA, 19 nt, Homo sapiens
  misc_RNA (1)...(19): siRNA sense strand
ugaauguaauacccucaau

SEQ ID NO: 279354 - RNA, 19 nt, Homo sapiens
  misc_RNA (1)...(19): siRNA sense strand
cagcgacuccgacgaugaa

SEQ ID NO: 279355 - RNA, 19 nt, Homo sapiens
  misc_RNA (1)...(19): siRNA sense strand
ggaagaaugagcugaucuc

SEQ ID NO: 279356 - RNA, 19 nt, Homo sapiens
  misc_RNA (1)...(19): siRNA sense strand
agaagaaaaugccuaugaa

SEQ ID NO: 279357 - RNA, 19 nt, Homo sapiens
  misc_RNA (1)...(19): siRNA sense strand
uggugucccucaagaagaa

SEQ ID NO: 279358 - RNA, 19 nt, Homo sapiens
  misc_RNA (1)...(19): siRNA sense strand
gagaggccuuccgcaaauc

SEQ ID NO: 279359 - RNA, 19 nt, Homo sapiens
  misc_RNA (1)...(19): siRNA sense strand
ugacagcgacuccgacgau

SEQ ID NO: 279360 - RNA, 19 nt, Homo sapiens
  misc_RNA (1)...(19): siRNA sense strand
gagaacuccuuggacucuu

SEQ ID NO: 279361 - RNA, 19 nt, Homo sapiens
  misc_RNA (1)...(19): siRNA sense strand
auaaguuucuccgagguuu

SEQ ID NO: 279362 - RNA, 19 nt, Homo sapiens
  misc_RNA (1)...(19): siRNA sense strand
ugagcagaguggaaugaau

SEQ ID NO: 279363 - RNA, 19 nt, Homo sapiens
  misc_RNA (1)...(19): siRNA sense strand
uaagaaagugucgggcaaa

SEQ ID NO: 279364 - RNA, 19 nt, Homo sapiens
  misc_RNA (1)...(19): siRNA sense strand
gacacguuguuaccuagga

SEQ ID NO: 279365 - RNA, 19 nt, Homo sapiens
  misc_RNA (1)...(19): siRNA sense strand
ugacugccaacaagaauuc

SEQ ID NO: 279366 - RNA, 19 nt, Homo sapiens
  misc_RNA (1)...(19): siRNA sense strand
gcagaggaaaggcucaaag

SEQ ID NO: 279367 - RNA, 19 nt, Homo sapiens
  misc_RNA (1)...(19): siRNA sense strand
gaugcgagaggcagaggaa

SEQ ID NO: 279368 - RNA, 19 nt, Homo sapiens
  misc_RNA (1)...(19): siRNA sense strand
gcagaaaauccuuugaguu

SEQ ID NO: 279369 - RNA, 19 nt, Homo sapiens
  misc_RNA (1)...(19): siRNA sense strand
gaguggaaugaauaaguuu

SEQ ID NO: 279370 - RNA, 19 nt, Homo sapiens
  misc_RNA (1)...(19): siRNA sense strand
cagaguggaaugaauaagu

SEQ ID NO: 279371 - RNA, 19 nt, Homo sapiens
  misc_RNA (1)...(19): siRNA sense strand
guguuuauccgguucuuug

SEQ ID NO: 279372 - RNA, 19 nt, Homo sapiens
  misc_RNA (1)...(19): siRNA sense strand
gugguggugucccucaaga

SEQ ID NO: 279373 - RNA, 19 nt, Homo sapiens
  misc_RNA (1)...(19): siRNA sense strand
agaggaaagaagagauuaa

SEQ ID NO: 279374 - RNA, 19 nt, Homo sapiens
  misc_RNA (1)...(19): siRNA sense strand
agaaagagcuugacaguaa

SEQ ID NO: 279375 - RNA, 19 nt, Homo sapiens
  misc_RNA (1)...(19): siRNA sense strand
ugcaagagcugaauuauaa

SEQ ID NO: 279376 - RNA, 19 nt, Homo sapiens
  misc_RNA (1)...(19): siRNA sense strand
ggaaguaguucacaaaaua

SEQ ID NO: 279377 - RNA, 19 nt, Homo sapiens
  misc_RNA (1)...(19): siRNA sense strand
ugaaguaucuguauccaaa

SEQ ID NO: 279378 - RNA, 19 nt, Homo sapiens
  misc_RNA (1)...(19): siRNA sense strand
gaaaggaaguaguucacaa

SEQ ID NO: 279379 - RNA, 19 nt, Homo sapiens
  misc_RNA (1)...(19): siRNA sense strand
uaaaggaacuggauauauc

SEQ ID NO: 279380 - RNA, 19 nt, Homo sapiens
  misc_RNA (1)...(19): siRNA sense strand
gagcuucacucccuuaguu

SEQ ID NO: 279381 - RNA, 19 nt, Homo sapiens
  misc_RNA (1)...(19): siRNA sense strand
gaaagagcuugacaguaaa

SEQ ID NO: 279382 - RNA, 19 nt, Homo sapiens
  misc_RNA (1)...(19): siRNA sense strand
gaacaugacccuaucacaa

SEQ ID NO: 279383 - RNA, 19 nt, Homo sapiens
  misc_RNA (1)...(19): siRNA sense strand
ucaagagccuggaagauuu

SEQ ID NO: 279384 - RNA, 19 nt, Homo sapiens
  misc_RNA (1)...(19): siRNA sense strand
gaauaugacuucaaaugca

SEQ ID NO: 279385 - RNA, 19 nt, Homo sapiens
  misc_RNA (1)...(19): siRNA sense strand
agaaugcccugauuaauga

SEQ ID NO: 279386 - RNA, 19 nt, Homo sapiens
  misc_RNA (1)...(19): siRNA sense strand
ucacugaacuuacccagaa

SEQ ID NO: 279387 - RNA, 19 nt, Homo sapiens
  misc_RNA (1)...(19): siRNA sense strand
gcacagugauguuagacaa

SEQ ID NO: 279388 - RNA, 19 nt, Homo sapiens
  misc_RNA (1)...(19): siRNA sense strand
gaccgcaccuucagucuuu

SEQ ID NO: 279389 - RNA, 19 nt, Homo sapiens
  misc_RNA (1)...(19): siRNA sense strand
ggacaagguuauguguaua

SEQ ID NO: 279390 - RNA, 19 nt, Homo sapiens
  misc_RNA (1)...(19): siRNA sense strand
uaauagaguugcugaaugu

SEQ ID NO: 279391 - RNA, 19 nt, Homo sapiens
  misc_RNA (1)...(19): siRNA sense strand
ggaacuggauauaucaaga

SEQ ID NO: 279392 - RNA, 19 nt, Homo sapiens
  misc_RNA (1)...(19): siRNA sense strand
gaaauacaccuacgaacau

SEQ ID NO: 279393 - RNA, 19 nt, Homo sapiens
  misc_RNA (1)...(19): siRNA sense strand
cagcagagcgccuguauug

SEQ ID NO: 279394 - RNA, 19 nt, Homo sapiens
  misc_RNA (1)...(19): siRNA sense strand
ggcaaagagugaucagaaa

SEQ ID NO: 279395 - RNA, 19 nt, Homo sapiens
  misc_RNA (1)...(19): siRNA sense strand
gggcucagcuuucagaagu

SEQ ID NO: 279396 - RNA, 19 nt, Homo sapiens
  misc_RNA (1)...(19): siRNA sense strand
ucagaaaugugaaggacaa

SEQ ID NO: 279397 - RNA, 19 nt, Homo sapiens
  misc_RNA (1)...(19): siRNA sense strand
gaaagcauccuagaacuca

SEQ ID NO: 279398 - RNA, 19 nt, Homo sapiens
  misc_RNA (1)...(19): siRNA sense strand
gcaauugaaagaacagaaa

SEQ ID NO: 279399 - RNA, 19 nt, Homo sapiens
  misc_RNA (1)...(19): siRNA sense strand
ugucacagcuggaugauca

SEQ ID NO: 279400 - RNA, 19 nt, Homo sapiens
  misc_RNA (1)...(19): siRNA sense strand
ggaacuugauggcccuaaa

SEQ ID NO: 279401 - RNA, 19 nt, Homo sapiens
  misc_RNA (1)...(19): siRNA sense strand
gauuaaugaugaacuagug

SEQ ID NO: 279402 - RNA, 19 nt, Homo sapiens
  misc_RNA (1)...(19): siRNA sense strand
caaaagaggucucaaugug

SEQ ID NO: 279403 - RNA, 19 nt, Homo sapiens
  misc_RNA (1)...(19): siRNA sense strand
ggagcacgcugccaaugau

SEQ ID NO: 279404 - RNA, 19 nt, Homo sapiens
  misc_RNA (1)...(19): siRNA sense strand
agacugaguugauuucugu

SEQ ID NO: 279405 - RNA, 19 nt, Homo sapiens
  misc_RNA (1)...(19): siRNA sense strand
ccagaugucuaugaucauu

SEQ ID NO: 279406 - RNA, 19 nt, Homo sapiens
  misc_RNA (1)...(19): siRNA sense strand
cagaaugcccugauuaaug

SEQ ID NO: 279407 - RNA, 19 nt, Homo sapiens
  misc_RNA (1)...(19): siRNA sense strand
uaagagaaaggaaguaguu

SEQ ID NO: 279408 - RNA, 19 nt, Homo sapiens
  misc_RNA (1)...(19): siRNA sense strand
gaaaacgcccagagauuua

SEQ ID NO: 279409 - RNA, 19 nt, Homo sapiens
  misc_RNA (1)...(19): siRNA sense strand
guauagagcaugaaaucaa

SEQ ID NO: 279410 - RNA, 19 nt, Homo sapiens
  misc_RNA (1)...(19): siRNA sense strand
caagagccuggaagauuua

SEQ ID NO: 279411 - RNA, 19 nt, Homo sapiens
  misc_RNA (1)...(19): siRNA sense strand
ccuggaagauuuacaagau

SEQ ID NO: 279412 - RNA, 19 nt, Homo sapiens
  misc_RNA (1)...(19): siRNA sense strand
cuggauauaucaagacuga

SEQ ID NO: 279413 - RNA, 19 nt, Homo sapiens
  misc_RNA (1)...(19): siRNA sense strand
caaguucggcagcagcuua

SEQ ID NO: 279414 - RNA, 19 nt, Homo sapiens
  misc_RNA (1)...(19): siRNA sense strand
acagcuggaugaucaauau

SEQ ID NO: 279415 - RNA, 19 nt, Homo sapiens
  misc_RNA (1)...(19): siRNA sense strand
agucauggcugcugagaau

SEQ ID NO: 279416 - RNA, 19 nt, Homo sapiens
  misc_RNA (1)...(19): siRNA sense strand
gaugugaaugagagaaaua

SEQ ID NO: 279417 - RNA, 19 nt, Homo sapiens
  misc_RNA (1)...(19): siRNA sense strand
ggaaaacgcccagagauuu

SEQ ID NO: 279418 - RNA, 19 nt, Homo sapiens
  misc_RNA (1)...(19): siRNA sense strand
agcguaaucuucaggauaa

SEQ ID NO: 279419 - RNA, 19 nt, Homo sapiens
  misc_RNA (1)...(19): siRNA sense strand
gggccuccauccuuuggua

SEQ ID NO: 279420 - RNA, 19 nt, Homo sapiens
  misc_RNA (1)...(19): siRNA sense strand
ccauggaaaucagacagua

SEQ ID NO: 279421 - RNA, 19 nt, Homo sapiens
  misc_RNA (1)...(19): siRNA sense strand
uggaagauuuacaagauga

SEQ ID NO: 279422 - RNA, 19 nt, Homo sapiens
  misc_RNA (1)...(19): siRNA sense strand
gguugggccuccauccuuu

SEQ ID NO: 279423 - RNA, 19 nt, Homo sapiens
  misc_RNA (1)...(19): siRNA sense strand
ggaggaauuggaacagaaa

SEQ ID NO: 279424 - RNA, 19 nt, Homo sapiens
  misc_RNA (1)...(19): siRNA sense strand
gacaguaaagucagaaaug

SEQ ID NO: 279425 - RNA, 19 nt, Homo sapiens
  misc_RNA (1)...(19): siRNA sense strand
ucagagcacagugauguua

SEQ ID NO: 279426 - RNA, 19 nt, Homo sapiens
  misc_RNA (1)...(19): siRNA sense strand
ugagacuguuggugaaauu

SEQ ID NO: 279427 - RNA, 19 nt, Homo sapiens
  misc_RNA (1)...(19): siRNA sense strand
ccugauuaaugaugaacua

SEQ ID NO: 279428 - RNA, 19 nt, Homo sapiens
  misc_RNA (1)...(19): siRNA sense strand
gaaggacaagguuaugugu

SEQ ID NO: 279429 - RNA, 19 nt, Homo sapiens
  misc_RNA (1)...(19): siRNA sense strand
cugagaauauuccugagaa

SEQ ID NO: 279430 - RNA, 19 nt, Homo sapiens
  misc_RNA (1)...(19): siRNA sense strand
guugaacccuacacgaaga

SEQ ID NO: 279431 - RNA, 19 nt, Homo sapiens
  misc_RNA (1)...(19): siRNA sense strand
acaguaaagucagaaaugu

SEQ ID NO: 279432 - RNA, 19 nt, Homo sapiens
  misc_RNA (1)...(19): siRNA sense strand
ugacaucauucgcaauuac

SEQ ID NO: 279433 - RNA, 19 nt, Homo sapiens
  misc_RNA (1)...(19): siRNA sense strand
gaaugagagaaauacagua

SEQ ID NO: 279434 - RNA, 19 nt, Homo sapiens
  misc_RNA (1)...(19): siRNA sense strand
gauaaagaugugaaugaga

SEQ ID NO: 279435 - RNA, 19 nt, Homo sapiens
  misc_RNA (1)...(19): siRNA sense strand
guaccuggcacagugguua

SEQ ID NO: 279436 - RNA, 19 nt, Homo sapiens
  misc_RNA (1)...(19): siRNA sense strand
aaagagugaucagaaacaa

SEQ ID NO: 279437 - RNA, 19 nt, Homo sapiens
  misc_RNA (1)...(19): siRNA sense strand
ccaaugguguggcaaagag

SEQ ID NO: 279438 - RNA, 19 nt, Homo sapiens
  misc_RNA (1)...(19): siRNA sense strand
aggacaagguuauguguau

SEQ ID NO: 279439 - RNA, 19 nt, Homo sapiens
  misc_RNA (1)...(19): siRNA sense strand
gaaugucacugaacuuacc

SEQ ID NO: 279440 - RNA, 19 nt, Homo sapiens
  misc_RNA (1)...(19): siRNA sense strand
cauccuagaacucauuaaa

SEQ ID NO: 279441 - RNA, 19 nt, Homo sapiens
  misc_RNA (1)...(19): siRNA sense strand
gcacgaugggcucagcuuu

SEQ ID NO: 279442 - RNA, 19 nt, Homo sapiens
  misc_RNA (1)...(19): siRNA sense strand
ggaagacccaauccagaug

SEQ ID NO: 279443 - RNA, 19 nt, Homo sapiens
  misc_RNA (1)...(19): siRNA sense strand
caucguuacugaagagcuu

SEQ ID NO: 279444 - RNA, 19 nt, Homo sapiens
  misc_RNA (1)...(19): siRNA sense strand
cuacgaacaugacccuauc

SEQ ID NO: 279445 - RNA, 19 nt, Homo sapiens
  misc_RNA (1)...(19): siRNA sense strand
uggaucagcugcagaacug

SEQ ID NO: 279446 - RNA, 19 nt, Homo sapiens
  misc_RNA (1)...(19): siRNA sense strand
auaauagaguugcugaaug

SEQ ID NO: 279447 - RNA, 19 nt, Homo sapiens
  misc_RNA (1)...(19): siRNA sense strand
aaaggaaguaguucacaaa

SEQ ID NO: 279448 - RNA, 19 nt, Homo sapiens
  misc_RNA (1)...(19): siRNA sense strand
gaaaugugaaggacaaggu

SEQ ID NO: 279449 - RNA, 19 nt, Homo sapiens
  misc_RNA (1)...(19): siRNA sense strand
gaaaggaaaauucuggaaa

SEQ ID NO: 279450 - RNA, 19 nt, Homo sapiens
  misc_RNA (1)...(19): siRNA sense strand
caauccagaugucuaugau

SEQ ID NO: 279451 - RNA, 19 nt, Homo sapiens
  misc_RNA (1)...(19): siRNA sense strand
ggauauaucaagacugagu

SEQ ID NO: 279452 - RNA, 19 nt, Homo sapiens
  misc_RNA (1)...(19): siRNA sense strand
guacgaacuucagcagcuu

SEQ ID NO: 279453 - RNA, 19 nt, Homo sapiens
  misc_RNA (1)...(19): siRNA sense strand
agaaauacaccuacgaaca

SEQ ID NO: 279454 - RNA, 19 nt, Homo sapiens
  misc_RNA (1)...(19): siRNA sense strand
ggaauuggaacagaaauac

SEQ ID NO: 279455 - RNA, 19 nt, Homo sapiens
  misc_RNA (1)...(19): siRNA sense strand
caaagagugaucagaaaca

SEQ ID NO: 279456 - RNA, 19 nt, Homo sapiens
  misc_RNA (1)...(19): siRNA sense strand
gggagcacgcugccaauga

SEQ ID NO: 279457 - RNA, 19 nt, Homo sapiens
  misc_RNA (1)...(19): siRNA sense strand
gaacuugauggcccuaaag

SEQ ID NO: 279458 - RNA, 19 nt, Homo sapiens
  misc_RNA (1)...(19): siRNA sense strand
caaaagugaugaacaugga

SEQ ID NO: 279459 - RNA, 19 nt, Homo sapiens
  misc_RNA (1)...(19): siRNA sense strand
gaaauugcaagagcugaau

SEQ ID NO: 279460 - RNA, 19 nt, Homo sapiens
  misc_RNA (1)...(19): siRNA sense strand
agaggccgcuggucuugaa

SEQ ID NO: 279461 - RNA, 19 nt, Homo sapiens
  misc_RNA (1)...(19): siRNA sense strand
gaagacccaauccagaugu

SEQ ID NO: 279462 - RNA, 19 nt, Homo sapiens
  misc_RNA (1)...(19): siRNA sense strand
cuaaaggaacuggauauau

SEQ ID NO: 279463 - RNA, 19 nt, Homo sapiens
  misc_RNA (1)...(19): siRNA sense strand
gcuguuacuuucccugaca

SEQ ID NO: 279464 - RNA, 19 nt, Homo sapiens
  misc_RNA (1)...(19): siRNA sense strand
cgaccucucugcccguugu

SEQ ID NO: 279465 - RNA, 19 nt, Homo sapiens
  misc_RNA (1)...(19): siRNA sense strand
aacaugacccuaucacaaa

SEQ ID NO: 279466 - RNA, 19 nt, Homo sapiens
  misc_RNA (1)...(19): siRNA sense strand
gcaaagagugaucagaaac

SEQ ID NO: 279467 - RNA, 19 nt, Homo sapiens
  misc_RNA (1)...(19): siRNA sense strand
uauagagcaugaaaucaag

SEQ ID NO: 279468 - RNA, 19 nt, Homo sapiens
  misc_RNA (1)...(19): siRNA sense strand
acagcugucugaaggaaga

SEQ ID NO: 279469 - RNA, 19 nt, Homo sapiens
  misc_RNA (1)...(19): siRNA sense strand
cagagccaauggaacuuga

SEQ ID NO: 279470 - RNA, 19 nt, Homo sapiens
  misc_RNA (1)...(19): siRNA sense strand
ugaucaauauagucgcuuu

SEQ ID NO: 279471 - RNA, 19 nt, Homo sapiens
  misc_RNA (1)...(19): siRNA sense strand
gcuggaugaucaauauagu

SEQ ID NO: 279472 - RNA, 19 nt, Homo sapiens
  misc_RNA (1)...(19): siRNA sense strand
gauugaaagcauccuagaa

SEQ ID NO: 279473 - RNA, 19 nt, Homo sapiens
  misc_RNA (1)...(19): siRNA sense strand
ugauaaagaugugaaugag

SEQ ID NO: 279474 - RNA, 19 nt, Homo sapiens
  misc_RNA (1)...(19): siRNA sense strand
agaaagagcuugacaguaa

SEQ ID NO: 279475 - RNA, 19 nt, Homo sapiens
  misc_RNA (1)...(19): siRNA sense strand
ugcaagagcugaauuauaa

SEQ ID NO: 279476 - RNA, 19 nt, Homo sapiens
  misc_RNA (1)...(19): siRNA sense strand
ggaaguaguucacaaaaua

SEQ ID NO: 279477 - RNA, 19 nt, Homo sapiens
  misc_RNA (1)...(19): siRNA sense strand
ugaaguaucuguauccaaa

SEQ ID NO: 279478 - RNA, 19 nt, Homo sapiens
  misc_RNA (1)...(19): siRNA sense strand
gaaaggaaguaguucacaa

SEQ ID NO: 279479 - RNA, 19 nt, Homo sapiens
  misc_RNA (1)...(19): siRNA sense strand
uaaaggaacuggauauauc

SEQ ID NO: 279480 - RNA, 19 nt, Homo sapiens
  misc_RNA (1)...(19): siRNA sense strand
gagcuucacucccuuaguu

SEQ ID NO: 279481 - RNA, 19 nt, Homo sapiens
  misc_RNA (1)...(19): siRNA sense strand
gaaagagcuugacaguaaa

SEQ ID NO: 279482 - RNA, 19 nt, Homo sapiens
  misc_RNA (1)...(19): siRNA sense strand
gaacaugacccuaucacaa

SEQ ID NO: 279483 - RNA, 19 nt, Homo sapiens
  misc_RNA (1)...(19): siRNA sense strand
ucaagagccuggaagauuu

SEQ ID NO: 279484 - RNA, 19 nt, Homo sapiens
  misc_RNA (1)...(19): siRNA sense strand
gaauaugacuucaaaugca

SEQ ID NO: 279485 - RNA, 19 nt, Homo sapiens
  misc_RNA (1)...(19): siRNA sense strand
agaaugcccugauuaauga

SEQ ID NO: 279486 - RNA, 19 nt, Homo sapiens
  misc_RNA (1)...(19): siRNA sense strand
ucacugaacuuacccagaa

SEQ ID NO: 279487 - RNA, 19 nt, Homo sapiens
  misc_RNA (1)...(19): siRNA sense strand
gcacagugauguuagacaa

SEQ ID NO: 279488 - RNA, 19 nt, Homo sapiens
  misc_RNA (1)...(19): siRNA sense strand
gaccgcaccuucagucuuu

SEQ ID NO: 279489 - RNA, 19 nt, Homo sapiens
  misc_RNA (1)...(19): siRNA sense strand
ggacaagguuauguguaua

SEQ ID NO: 279490 - RNA, 19 nt, Homo sapiens
  misc_RNA (1)...(19): siRNA sense strand
uaauagaguugcugaaugu

SEQ ID NO: 279491 - RNA, 19 nt, Homo sapiens
  misc_RNA (1)...(19): siRNA sense strand
ggaacuggauauaucaaga

SEQ ID NO: 279492 - RNA, 19 nt, Homo sapiens
  misc_RNA (1)...(19): siRNA sense strand
gaaauacaccuacgaacau

SEQ ID NO: 279493 - RNA, 19 nt, Homo sapiens
  misc_RNA (1)...(19): siRNA sense strand
cagcagagcgccuguauug

SEQ ID NO: 279494 - RNA, 19 nt, Homo sapiens
  misc_RNA (1)...(19): siRNA sense strand
ggcaaagagugaucagaaa

SEQ ID NO: 279495 - RNA, 19 nt, Homo sapiens
  misc_RNA (1)...(19): siRNA sense strand
gggcucagcuuucagaagu

SEQ ID NO: 279496 - RNA, 19 nt, Homo sapiens
  misc_RNA (1)...(19): siRNA sense strand
ucagaaaugugaaggacaa

SEQ ID NO: 279497 - RNA, 19 nt, Homo sapiens
  misc_RNA (1)...(19): siRNA sense strand
gaaagcauccuagaacuca

SEQ ID NO: 279498 - RNA, 19 nt, Homo sapiens
  misc_RNA (1)...(19): siRNA sense strand
gcaauugaaagaacagaaa

SEQ ID NO: 279499 - RNA, 19 nt, Homo sapiens
  misc_RNA (1)...(19): siRNA sense strand
ugucacagcuggaugauca

SEQ ID NO: 279500 - RNA, 19 nt, Homo sapiens
  misc_RNA (1)...(19): siRNA sense strand
ggaacuugauggcccuaaa

SEQ ID NO: 279501 - RNA, 19 nt, Homo sapiens
  misc_RNA (1)...(19): siRNA sense strand
gauuaaugaugaacuagug

SEQ ID NO: 279502 - RNA, 19 nt, Homo sapiens
  misc_RNA (1)...(19): siRNA sense strand
caaaagaggucucaaugug

SEQ ID NO: 279503 - RNA, 19 nt, Homo sapiens
  misc_RNA (1)...(19): siRNA sense strand
ggagcacgcugccaaugau

SEQ ID NO: 279504 - RNA, 19 nt, Homo sapiens
  misc_RNA (1)...(19): siRNA sense strand
agacugaguugauuucugu

SEQ ID NO: 279505 - RNA, 19 nt, Homo sapiens
  misc_RNA (1)...(19): siRNA sense strand
ccagaugucuaugaucauu

SEQ ID NO: 279506 - RNA, 19 nt, Homo sapiens
  misc_RNA (1)...(19): siRNA sense strand
cagaaugcccugauuaaug

SEQ ID NO: 279507 - RNA, 19 nt, Homo sapiens
  misc_RNA (1)...(19): siRNA sense strand
uaagagaaaggaaguaguu

SEQ ID NO: 279508 - RNA, 19 nt, Homo sapiens
  misc_RNA (1)...(19): siRNA sense strand
gaaaacgcccagagauuua

SEQ ID NO: 279509 - RNA, 19 nt, Homo sapiens
  misc_RNA (1)...(19): siRNA sense strand
guauagagcaugaaaucaa

SEQ ID NO: 279510 - RNA, 19 nt, Homo sapiens
  misc_RNA (1)...(19): siRNA sense strand
caagagccuggaagauuua

SEQ ID NO: 279511 - RNA, 19 nt, Homo sapiens
  misc_RNA (1)...(19): siRNA sense strand
ccuggaagauuuacaagau

SEQ ID NO: 279512 - RNA, 19 nt, Homo sapiens
  misc_RNA (1)...(19): siRNA sense strand
cuggauauaucaagacuga

SEQ ID NO: 279513 - RNA, 19 nt, Homo sapiens
  misc_RNA (1)...(19): siRNA sense strand
caaguucggcagcagcuua

SEQ ID NO: 279514 - RNA, 19 nt, Homo sapiens
  misc_RNA (1)...(19): siRNA sense strand
acagcuggaugaucaauau

SEQ ID NO: 279515 - RNA, 19 nt, Homo sapiens
  misc_RNA (1)...(19): siRNA sense strand
agucauggcugcugagaau

SEQ ID NO: 279516 - RNA, 19 nt, Homo sapiens
  misc_RNA (1)...(19): siRNA sense strand
gaugugaaugagagaaaua

SEQ ID NO: 279517 - RNA, 19 nt, Homo sapiens
  misc_RNA (1)...(19): siRNA sense strand
ggaaaacgcccagagauuu

SEQ ID NO: 279518 - RNA, 19 nt, Homo sapiens
  misc_RNA (1)...(19): siRNA sense strand
agcguaaucuucaggauaa

SEQ ID NO: 279519 - RNA, 19 nt, Homo sapiens
  misc_RNA (1)...(19): siRNA sense strand
gggccuccauccuuuggua

SEQ ID NO: 279520 - RNA, 19 nt, Homo sapiens
  misc_RNA (1)...(19): siRNA sense strand
ccauggaaaucagacagua

SEQ ID NO: 279521 - RNA, 19 nt, Homo sapiens
  misc_RNA (1)...(19): siRNA sense strand
uggaagauuuacaagauga

SEQ ID NO: 279522 - RNA, 19 nt, Homo sapiens
  misc_RNA (1)...(19): siRNA sense strand
gguugggccuccauccuuu

SEQ ID NO: 279523 - RNA, 19 nt, Homo sapiens
  misc_RNA (1)...(19): siRNA sense strand
ggaggaauuggaacagaaa

SEQ ID NO: 279524 - RNA, 19 nt, Homo sapiens
  misc_RNA (1)...(19): siRNA sense strand
gacaguaaagucagaaaug

SEQ ID NO: 279525 - RNA, 19 nt, Homo sapiens
  misc_RNA (1)...(19): siRNA sense strand
ucagagcacagugauguua

SEQ ID NO: 279526 - RNA, 19 nt, Homo sapiens
  misc_RNA (1)...(19): siRNA sense strand
ugagacuguuggugaaauu

SEQ ID NO: 279527 - RNA, 19 nt, Homo sapiens
  misc_RNA (1)...(19): siRNA sense strand
ccugauuaaugaugaacua

SEQ ID NO: 279528 - RNA, 19 nt, Homo sapiens
  misc_RNA (1)...(19): siRNA sense strand
gaaggacaagguuaugugu

SEQ ID NO: 279529 - RNA, 19 nt, Homo sapiens
  misc_RNA (1)...(19): siRNA sense strand
cugagaauauuccugagaa

SEQ ID NO: 279530 - RNA, 19 nt, Homo sapiens
  misc_RNA (1)...(19): siRNA sense strand
guugaacccuacacgaaga

SEQ ID NO: 279531 - RNA, 19 nt, Homo sapiens
  misc_RNA (1)...(19): siRNA sense strand
acaguaaagucagaaaugu

SEQ ID NO: 279532 - RNA, 19 nt, Homo sapiens
  misc_RNA (1)...(19): siRNA sense strand
ugacaucauucgcaauuac

SEQ ID NO: 279533 - RNA, 19 nt, Homo sapiens
  misc_RNA (1)...(19): siRNA sense strand
gaaugagagaaauacagua

SEQ ID NO: 279534 - RNA, 19 nt, Homo sapiens
  misc_RNA (1)...(19): siRNA sense strand
gauaaagaugugaaugaga

SEQ ID NO: 279535 - RNA, 19 nt, Homo sapiens
  misc_RNA (1)...(19): siRNA sense strand
guaccuggcacagugguua

SEQ ID NO: 279536 - RNA, 19 nt, Homo sapiens
  misc_RNA (1)...(19): siRNA sense strand
aaagagugaucagaaacaa

SEQ ID NO: 279537 - RNA, 19 nt, Homo sapiens
  misc_RNA (1)...(19): siRNA sense strand
ccaaugguguggcaaagag

SEQ ID NO: 279538 - RNA, 19 nt, Homo sapiens
  misc_RNA (1)...(19): siRNA sense strand
aggacaagguuauguguau

SEQ ID NO: 279539 - RNA, 19 nt, Homo sapiens
  misc_RNA (1)...(19): siRNA sense strand
gaaugucacugaacuuacc

SEQ ID NO: 279540 - RNA, 19 nt, Homo sapiens
  misc_RNA (1)...(19): siRNA sense strand
cauccuagaacucauuaaa

SEQ ID NO: 279541 - RNA, 19 nt, Homo sapiens
  misc_RNA (1)...(19): siRNA sense strand
gcacgaugggcucagcuuu

SEQ ID NO: 279542 - RNA, 19 nt, Homo sapiens
  misc_RNA (1)...(19): siRNA sense strand
ggaagacccaauccagaug

SEQ ID NO: 279543 - RNA, 19 nt, Homo sapiens
  misc_RNA (1)...(19): siRNA sense strand
caucguuacugaagagcuu

SEQ ID NO: 279544 - RNA, 19 nt, Homo sapiens
  misc_RNA (1)...(19): siRNA sense strand
cuacgaacaugacccuauc

SEQ ID NO: 279545 - RNA, 19 nt, Homo sapiens
  misc_RNA (1)...(19): siRNA sense strand
uggaucagcugcagaacug

SEQ ID NO: 279546 - RNA, 19 nt, Homo sapiens
  misc_RNA (1)...(19): siRNA sense strand
auaauagaguugcugaaug

SEQ ID NO: 279547 - RNA, 19 nt, Homo sapiens
  misc_RNA (1)...(19): siRNA sense strand
aaaggaaguaguucacaaa

SEQ ID NO: 279548 - RNA, 19 nt, Homo sapiens
  misc_RNA (1)...(19): siRNA sense strand
gaaaugugaaggacaaggu

SEQ ID NO: 279549 - RNA, 19 nt, Homo sapiens
  misc_RNA (1)...(19): siRNA sense strand
gaaaggaaaauucuggaaa

SEQ ID NO: 279550 - RNA, 19 nt, Homo sapiens
  misc_RNA (1)...(19): siRNA sense strand
caauccagaugucuaugau

SEQ ID NO: 279551 - RNA, 19 nt, Homo sapiens
  misc_RNA (1)...(19): siRNA sense strand
ggauauaucaagacugagu

SEQ ID NO: 279552 - RNA, 19 nt, Homo sapiens
  misc_RNA (1)...(19): siRNA sense strand
guacgaacuucagcagcuu

SEQ ID NO: 279553 - RNA, 19 nt, Homo sapiens
  misc_RNA (1)...(19): siRNA sense strand
agaaauacaccuacgaaca

SEQ ID NO: 279554 - RNA, 19 nt, Homo sapiens
  misc_RNA (1)...(19): siRNA sense strand
ggaauuggaacagaaauac

SEQ ID NO: 279555 - RNA, 19 nt, Homo sapiens
  misc_RNA (1)...(19): siRNA sense strand
caaagagugaucagaaaca

SEQ ID NO: 279556 - RNA, 19 nt, Homo sapiens
  misc_RNA (1)...(19): siRNA sense strand
gggagcacgcugccaauga

SEQ ID NO: 279557 - RNA, 19 nt, Homo sapiens
  misc_RNA (1)...(19): siRNA sense strand
gaacuugauggcccuaaag

SEQ ID NO: 279558 - RNA, 19 nt, Homo sapiens
  misc_RNA (1)...(19): siRNA sense strand
caaaagugaugaacaugga

SEQ ID NO: 279559 - RNA, 19 nt, Homo sapiens
  misc_RNA (1)...(19): siRNA sense strand
gaaauugcaagagcugaau

SEQ ID NO: 279560 - RNA, 19 nt, Homo sapiens
  misc_RNA (1)...(19): siRNA sense strand
agaggccgcuggucuugaa

SEQ ID NO: 279561 - RNA, 19 nt, Homo sapiens
  misc_RNA (1)...(19): siRNA sense strand
gaagacccaauccagaugu

SEQ ID NO: 279562 - RNA, 19 nt, Homo sapiens
  misc_RNA (1)...(19): siRNA sense strand
cuaaaggaacuggauauau

SEQ ID NO: 279563 - RNA, 19 nt, Homo sapiens
  misc_RNA (1)...(19): siRNA sense strand
gcuguuacuuucccugaca

SEQ ID NO: 279564 - RNA, 19 nt, Homo sapiens
  misc_RNA (1)...(19): siRNA sense strand
cgaccucucugcccguugu

SEQ ID NO: 279565 - RNA, 19 nt, Homo sapiens
  misc_RNA (1)...(19): siRNA sense strand
aacaugacccuaucacaaa

SEQ ID NO: 279566 - RNA, 19 nt, Homo sapiens
  misc_RNA (1)...(19): siRNA sense strand
gcaaagagugaucagaaac

SEQ ID NO: 279567 - RNA, 19 nt, Homo sapiens
  misc_RNA (1)...(19): siRNA sense strand
uauagagcaugaaaucaag

SEQ ID NO: 279568 - RNA, 19 nt, Homo sapiens
  misc_RNA (1)...(19): siRNA sense strand
acagcugucugaaggaaga

SEQ ID NO: 279569 - RNA, 19 nt, Homo sapiens
  misc_RNA (1)...(19): siRNA sense strand
cagagccaauggaacuuga

SEQ ID NO: 279570 - RNA, 19 nt, Homo sapiens
  misc_RNA (1)...(19): siRNA sense strand
ugaucaauauagucgcuuu

SEQ ID NO: 279571 - RNA, 19 nt, Homo sapiens
  misc_RNA (1)...(19): siRNA sense strand
gcuggaugaucaauauagu

SEQ ID NO: 279572 - RNA, 19 nt, Homo sapiens
  misc_RNA (1)...(19): siRNA sense strand
gauugaaagcauccuagaa

SEQ ID NO: 279573 - RNA, 19 nt, Homo sapiens
  misc_RNA (1)...(19): siRNA sense strand
ugauaaagaugugaaugag

SEQ ID NO: 279574 - RNA, 19 nt, Homo sapiens
  misc_RNA (1)...(19): siRNA sense strand
gagcaaagcuguuguuuca

SEQ ID NO: 279575 - RNA, 19 nt, Homo sapiens
  misc_RNA (1)...(19): siRNA sense strand
ggacugaguugccugguua

SEQ ID NO: 279576 - RNA, 19 nt, Homo sapiens
  misc_RNA (1)...(19): siRNA sense strand
gcaggaaacucucaaugaa

SEQ ID NO: 279577 - RNA, 19 nt, Homo sapiens
  misc_RNA (1)...(19): siRNA sense strand
guacuuggcugucuggauu

SEQ ID NO: 279578 - RNA, 19 nt, Homo sapiens
  misc_RNA (1)...(19): siRNA sense strand
gaaacuguguaaagauuga

SEQ ID NO: 279579 - RNA, 19 nt, Homo sapiens
  misc_RNA (1)...(19): siRNA sense strand
gaagaaaucaugccgaaug

SEQ ID NO: 279580 - RNA, 19 nt, Homo sapiens
  misc_RNA (1)...(19): siRNA sense strand
gaccaugucuggcaccuuu

SEQ ID NO: 279581 - RNA, 19 nt, Homo sapiens
  misc_RNA (1)...(19): siRNA sense strand
gaaaguuaaucuccaggaa

SEQ ID NO: 279582 - RNA, 19 nt, Homo sapiens
  misc_RNA (1)...(19): siRNA sense strand
ugaaggaucucuggaauga

SEQ ID NO: 279583 - RNA, 19 nt, Homo sapiens
  misc_RNA (1)...(19): siRNA sense strand
caauggaaaucuucagaaa

SEQ ID NO: 279584 - RNA, 19 nt, Homo sapiens
  misc_RNA (1)...(19): siRNA sense strand
ggacauggcuggacaaaau

SEQ ID NO: 279585 - RNA, 19 nt, Homo sapiens
  misc_RNA (1)...(19): siRNA sense strand
ggacugaggauccauuauu

SEQ ID NO: 279586 - RNA, 19 nt, Homo sapiens
  misc_RNA (1)...(19): siRNA sense strand
cagaaacuguguaaagauu

SEQ ID NO: 279587 - RNA, 19 nt, Homo sapiens
  misc_RNA (1)...(19): siRNA sense strand
uggaucagcugaacuauga

SEQ ID NO: 279588 - RNA, 19 nt, Homo sapiens
  misc_RNA (1)...(19): siRNA sense strand
ucaguucucugguucaauu

SEQ ID NO: 279589 - RNA, 19 nt, Homo sapiens
  misc_RNA (1)...(19): siRNA sense strand
gggaaaugcugcagaaucu

SEQ ID NO: 279590 - RNA, 19 nt, Homo sapiens
  misc_RNA (1)...(19): siRNA sense strand
gugauuauuuccaacauga

SEQ ID NO: 279591 - RNA, 19 nt, Homo sapiens
  misc_RNA (1)...(19): siRNA sense strand
gaaaugcugcagaaucuug

SEQ ID NO: 279592 - RNA, 19 nt, Homo sapiens
  misc_RNA (1)...(19): siRNA sense strand
ggaaagggcagcaauaagg

SEQ ID NO: 279593 - RNA, 19 nt, Homo sapiens
  misc_RNA (1)...(19): siRNA sense strand
gagcccuccuggcaaguua

SEQ ID NO: 279594 - RNA, 19 nt, Homo sapiens
  misc_RNA (1)...(19): siRNA sense strand
gacugaggauccauuauug

SEQ ID NO: 279595 - RNA, 19 nt, Homo sapiens
  misc_RNA (1)...(19): siRNA sense strand
caucagagcucccauugac

SEQ ID NO: 279596 - RNA, 19 nt, Homo sapiens
  misc_RNA (1)...(19): siRNA sense strand
gcaccaggaugaugacaag

SEQ ID NO: 279597 - RNA, 19 nt, Homo sapiens
  misc_RNA (1)...(19): siRNA sense strand
guucacagcuggagcaaag

SEQ ID NO: 279598 - RNA, 19 nt, Homo sapiens
  misc_RNA (1)...(19): siRNA sense strand
uggaacagcuggagacaug

SEQ ID NO: 279599 - RNA, 19 nt, Homo sapiens
  misc_RNA (1)...(19): siRNA sense strand
ccacugcgcuuccucuauc

SEQ ID NO: 279600 - RNA, 19 nt, Homo sapiens
  misc_RNA (1)...(19): siRNA sense strand
ugaguugccugguuagcua

SEQ ID NO: 279601 - RNA, 19 nt, Homo sapiens
  misc_RNA (1)...(19): siRNA sense strand
gcacugcuaggccgauuaa

SEQ ID NO: 279602 - RNA, 19 nt, Homo sapiens
  misc_RNA (1)...(19): siRNA sense strand
ugagacauuugaacacuga

SEQ ID NO: 279603 - RNA, 19 nt, Homo sapiens
  misc_RNA (1)...(19): siRNA sense strand
caacaaccgcuggagcuua

SEQ ID NO: 279604 - RNA, 19 nt, Homo sapiens
  misc_RNA (1)...(19): siRNA sense strand
gcaguucuccuccuauguu

SEQ ID NO: 279605 - RNA, 19 nt, Homo sapiens
  misc_RNA (1)...(19): siRNA sense strand
gcccaaaccuucagaacca

SEQ ID NO: 279606 - RNA, 19 nt, Homo sapiens
  misc_RNA (1)...(19): siRNA sense strand
ucaacauucugacuucaaa

SEQ ID NO: 279607 - RNA, 19 nt, Homo sapiens
  misc_RNA (1)...(19): siRNA sense strand
uaagggcuaugauggagaa

SEQ ID NO: 279608 - RNA, 19 nt, Homo sapiens
  misc_RNA (1)...(19): siRNA sense strand
ccugugaucugagacauuu

SEQ ID NO: 279609 - RNA, 19 nt, Homo sapiens
  misc_RNA (1)...(19): siRNA sense strand
gaaauucugccgggacauu

SEQ ID NO: 279610 - RNA, 19 nt, Homo sapiens
  misc_RNA (1)...(19): siRNA sense strand
gagcaacguucaggugguu

SEQ ID NO: 279611 - RNA, 19 nt, Homo sapiens
  misc_RNA (1)...(19): siRNA sense strand
gggcuucaguucucugguu

SEQ ID NO: 279612 - RNA, 19 nt, Homo sapiens
  misc_RNA (1)...(19): siRNA sense strand
ggacuuugguuaccugacu

SEQ ID NO: 279613 - RNA, 19 nt, Homo sapiens
  misc_RNA (1)...(19): siRNA sense strand
gaucugagacauuugaaca

SEQ ID NO: 279614 - RNA, 19 nt, Homo sapiens
  misc_RNA (1)...(19): siRNA sense strand
cagaggaacugcacaucau

SEQ ID NO: 279615 - RNA, 19 nt, Homo sapiens
  misc_RNA (1)...(19): siRNA sense strand
ucagagggcccaauuggaa

SEQ ID NO: 279616 - RNA, 19 nt, Homo sapiens
  misc_RNA (1)...(19): siRNA sense strand
gaacacugagccaauggaa

SEQ ID NO: 279617 - RNA, 19 nt, Homo sapiens
  misc_RNA (1)...(19): siRNA sense strand
gauuugcccugugaucuga

SEQ ID NO: 279618 - RNA, 19 nt, Homo sapiens
  misc_RNA (1)...(19): siRNA sense strand
aacaaccgcuggagcuuaa

SEQ ID NO: 279619 - RNA, 19 nt, Homo sapiens
  misc_RNA (1)...(19): siRNA sense strand
ggaugacccucugaccaaa

SEQ ID NO: 279620 - RNA, 19 nt, Homo sapiens
  misc_RNA (1)...(19): siRNA sense strand
ugaaagaccagcaggaugu

SEQ ID NO: 279621 - RNA, 19 nt, Homo sapiens
  misc_RNA (1)...(19): siRNA sense strand
gaacaccguggaugagguu

SEQ ID NO: 279622 - RNA, 19 nt, Homo sapiens
  misc_RNA (1)...(19): siRNA sense strand
gaggagaauauaccugaaa

SEQ ID NO: 279623 - RNA, 19 nt, Homo sapiens
  misc_RNA (1)...(19): siRNA sense strand
aaggaucucuggaaugaug

SEQ ID NO: 279624 - RNA, 19 nt, Homo sapiens
  misc_RNA (1)...(19): siRNA sense strand
ggaauccuccucaauuaca

SEQ ID NO: 279625 - RNA, 19 nt, Homo sapiens
  misc_RNA (1)...(19): siRNA sense strand
gaccaaagagcagaagauu

SEQ ID NO: 279626 - RNA, 19 nt, Homo sapiens
  misc_RNA (1)...(19): siRNA sense strand
ggacaaaauucuggaguug

SEQ ID NO: 279627 - RNA, 19 nt, Homo sapiens
  misc_RNA (1)...(19): siRNA sense strand
gccgaggccucaacucaga

SEQ ID NO: 279628 - RNA, 19 nt, Homo sapiens
  misc_RNA (1)...(19): siRNA sense strand
gaauccuccucaauuacaa

SEQ ID NO: 279629 - RNA, 19 nt, Homo sapiens
  misc_RNA (1)...(19): siRNA sense strand
ccaguuggcugagaugauc

SEQ ID NO: 279630 - RNA, 19 nt, Homo sapiens
  misc_RNA (1)...(19): siRNA sense strand
ggaaaucuucagaaacugu

SEQ ID NO: 279631 - RNA, 19 nt, Homo sapiens
  misc_RNA (1)...(19): siRNA sense strand
caggaaagggcagcaauaa

SEQ ID NO: 279632 - RNA, 19 nt, Homo sapiens
  misc_RNA (1)...(19): siRNA sense strand
acacugagccaauggaaau

SEQ ID NO: 279633 - RNA, 19 nt, Homo sapiens
  misc_RNA (1)...(19): siRNA sense strand
gacccuugaugccuucuga

SEQ ID NO: 279634 - RNA, 19 nt, Homo sapiens
  misc_RNA (1)...(19): siRNA sense strand
gaauggugacccacuguug

SEQ ID NO: 279635 - RNA, 19 nt, Homo sapiens
  misc_RNA (1)...(19): siRNA sense strand
ucaaugaacuggacaaaag

SEQ ID NO: 279636 - RNA, 19 nt, Homo sapiens
  misc_RNA (1)...(19): siRNA sense strand
ugaaccagcucucaauugc

SEQ ID NO: 279637 - RNA, 19 nt, Homo sapiens
  misc_RNA (1)...(19): siRNA sense strand
cagcuucacggucaaauau

SEQ ID NO: 279638 - RNA, 19 nt, Homo sapiens
  misc_RNA (1)...(19): siRNA sense strand
gaugaucuuuaaccuccuu

SEQ ID NO: 279639 - RNA, 19 nt, Homo sapiens
  misc_RNA (1)...(19): siRNA sense strand
ucaggaaagggcagcaaua

SEQ ID NO: 279640 - RNA, 19 nt, Homo sapiens
  misc_RNA (1)...(19): siRNA sense strand
gagcugaagggacugaguu

SEQ ID NO: 279641 - RNA, 19 nt, Homo sapiens
  misc_RNA (1)...(19): siRNA sense strand
gcagcacaauuugcggaaa

SEQ ID NO: 279642 - RNA, 19 nt, Homo sapiens
  misc_RNA (1)...(19): siRNA sense strand
cauccgccauuaccaguug

SEQ ID NO: 279643 - RNA, 19 nt, Homo sapiens
  misc_RNA (1)...(19): siRNA sense strand
ggauuuaagggcuaugaug

SEQ ID NO: 279644 - RNA, 19 nt, Homo sapiens
  misc_RNA (1)...(19): siRNA sense strand
cuaauagacagguggauga

SEQ ID NO: 279645 - RNA, 19 nt, Homo sapiens
  misc_RNA (1)...(19): siRNA sense strand
ccaggauccuacccaguug

SEQ ID NO: 279646 - RNA, 19 nt, Homo sapiens
  misc_RNA (1)...(19): siRNA sense strand
cuugaugccuucugacuuc

SEQ ID NO: 279647 - RNA, 19 nt, Homo sapiens
  misc_RNA (1)...(19): siRNA sense strand
acagguggaugaacugcaa

SEQ ID NO: 279648 - RNA, 19 nt, Homo sapiens
  misc_RNA (1)...(19): siRNA sense strand
gaaaucauccgccauuacc

SEQ ID NO: 279649 - RNA, 19 nt, Homo sapiens
  misc_RNA (1)...(19): siRNA sense strand
caacaugaaccagcucuca

SEQ ID NO: 279650 - RNA, 19 nt, Homo sapiens
  misc_RNA (1)...(19): siRNA sense strand
ggugauuauuuccaacaug

SEQ ID NO: 279651 - RNA, 19 nt, Homo sapiens
  misc_RNA (1)...(19): siRNA sense strand
gcagagucaggguuugauu

SEQ ID NO: 279652 - RNA, 19 nt, Homo sapiens
  misc_RNA (1)...(19): siRNA sense strand
cugcuaggccgauuaacua

SEQ ID NO: 279653 - RNA, 19 nt, Homo sapiens
  misc_RNA (1)...(19): siRNA sense strand
guggagagccagcaacaug

SEQ ID NO: 279654 - RNA, 19 nt, Homo sapiens
  misc_RNA (1)...(19): siRNA sense strand
ucauuguggucucuaauag

SEQ ID NO: 279655 - RNA, 19 nt, Homo sapiens
  misc_RNA (1)...(19): siRNA sense strand
ggaggaaauaccugaaaca

SEQ ID NO: 279656 - RNA, 19 nt, Homo sapiens
  misc_RNA (1)...(19): siRNA sense strand
acaaggugcucaucuacuc

SEQ ID NO: 279657 - RNA, 19 nt, Homo sapiens
  misc_RNA (1)...(19): siRNA sense strand
ccugaaggaucucuggaau

SEQ ID NO: 279658 - RNA, 19 nt, Homo sapiens
  misc_RNA (1)...(19): siRNA sense strand
gggacugaguugccugguu

SEQ ID NO: 279659 - RNA, 19 nt, Homo sapiens
  misc_RNA (1)...(19): siRNA sense strand
ggagcaaagcuguuguuuc

SEQ ID NO: 279660 - RNA, 19 nt, Homo sapiens
  misc_RNA (1)...(19): siRNA sense strand
ccagcaacaugagauugaa

SEQ ID NO: 279661 - RNA, 19 nt, Homo sapiens
  misc_RNA (1)...(19): siRNA sense strand
gcaacgcccaggucacaga

SEQ ID NO: 279662 - RNA, 19 nt, Homo sapiens
  misc_RNA (1)...(19): siRNA sense strand
gccagaacaccguggauga

SEQ ID NO: 279663 - RNA, 19 nt, Homo sapiens
  misc_RNA (1)...(19): siRNA sense strand
ccaaggcuaccaugcuauu

SEQ ID NO: 279664 - RNA, 19 nt, Homo sapiens
  misc_RNA (1)...(19): siRNA sense strand
cugaaaucauccgccauua

SEQ ID NO: 279665 - RNA, 19 nt, Homo sapiens
  misc_RNA (1)...(19): siRNA sense strand
gcucaucuacucugugcaa

SEQ ID NO: 279666 - RNA, 19 nt, Homo sapiens
  misc_RNA (1)...(19): siRNA sense strand
ugauuugggacuuugguua

SEQ ID NO: 279667 - RNA, 19 nt, Homo sapiens
  misc_RNA (1)...(19): siRNA sense strand
ggaacaaggagagccaguu

SEQ ID NO: 279668 - RNA, 19 nt, Homo sapiens
  misc_RNA (1)...(19): siRNA sense strand
ccaauggaaaucuucagaa

SEQ ID NO: 279669 - RNA, 19 nt, Homo sapiens
  misc_RNA (1)...(19): siRNA sense strand
gcuauucuuccacuucuug

SEQ ID NO: 279670 - RNA, 19 nt, Homo sapiens
  misc_RNA (1)...(19): siRNA sense strand
guuggcaguucuccuccua

SEQ ID NO: 279671 - RNA, 19 nt, Homo sapiens
  misc_RNA (1)...(19): siRNA sense strand
cagagucaggguuugauuu

SEQ ID NO: 279672 - RNA, 19 nt, Homo sapiens
  misc_RNA (1)...(19): siRNA sense strand
gagcuacugcugccaaagu

SEQ ID NO: 279673 - RNA, 19 nt, Homo sapiens
  misc_RNA (1)...(19): siRNA sense strand
ccagccacuucuacacuga

SEQ ID NO: 279674 - RNA, 19 nt, Homo sapiens
  misc_RNA (1)...(19): siRNA sense strand
ggaaauaacucacaugaca

SEQ ID NO: 279675 - RNA, 19 nt, Homo sapiens
  misc_RNA (1)...(19): siRNA sense strand
gcacgcauaucauguauaa

SEQ ID NO: 279676 - RNA, 19 nt, Homo sapiens
  misc_RNA (1)...(19): siRNA sense strand
caagauggcucucuacaaa

SEQ ID NO: 279677 - RNA, 19 nt, Homo sapiens
  misc_RNA (1)...(19): siRNA sense strand
ggagagagcuggcgugugu

SEQ ID NO: 279678 - RNA, 19 nt, Homo sapiens
  misc_RNA (1)...(19): siRNA sense strand
guggaaaccucaccaauuu

SEQ ID NO: 279679 - RNA, 19 nt, Homo sapiens
  misc_RNA (1)...(19): siRNA sense strand
gaaaaguacuccuguaaaa

SEQ ID NO: 279680 - RNA, 19 nt, Homo sapiens
  misc_RNA (1)...(19): siRNA sense strand
gcccagacauccagauaua

SEQ ID NO: 279681 - RNA, 19 nt, Homo sapiens
  misc_RNA (1)...(19): siRNA sense strand
caacaacacuggcaacauc

SEQ ID NO: 279682 - RNA, 19 nt, Homo sapiens
  misc_RNA (1)...(19): siRNA sense strand
ucacuggccuuguggguua

SEQ ID NO: 279683 - RNA, 19 nt, Homo sapiens
  misc_RNA (1)...(19): siRNA sense strand
uauaagaacugccuguuug

SEQ ID NO: 279684 - RNA, 19 nt, Homo sapiens
  misc_RNA (1)...(19): siRNA sense strand
gucagaaccucaaagauaa

SEQ ID NO: 279685 - RNA, 19 nt, Homo sapiens
  misc_RNA (1)...(19): siRNA sense strand
ccaaggacaucaggaagua

SEQ ID NO: 279686 - RNA, 19 nt, Homo sapiens
  misc_RNA (1)...(19): siRNA sense strand
gggcagagcugggugaaga

SEQ ID NO: 279687 - RNA, 19 nt, Homo sapiens
  misc_RNA (1)...(19): siRNA sense strand
guaauuaaccugacaguuc

SEQ ID NO: 279688 - RNA, 19 nt, Homo sapiens
  misc_RNA (1)...(19): siRNA sense strand
gcgagaggcugcagaacaa

SEQ ID NO: 279689 - RNA, 19 nt, Homo sapiens
  misc_RNA (1)...(19): siRNA sense strand
gcaaugauaagcuccgaua

SEQ ID NO: 279690 - RNA, 19 nt, Homo sapiens
  misc_RNA (1)...(19): siRNA sense strand
gcaagcgccugcaagaaug

SEQ ID NO: 279691 - RNA, 19 nt, Homo sapiens
  misc_RNA (1)...(19): siRNA sense strand
caaagcagcccaaauggaa

SEQ ID NO: 279692 - RNA, 19 nt, Homo sapiens
  misc_RNA (1)...(19): siRNA sense strand
cauucacccucuucaauua

SEQ ID NO: 279693 - RNA, 19 nt, Homo sapiens
  misc_RNA (1)...(19): siRNA sense strand
gcuccgauauuucaucauu

SEQ ID NO: 279694 - RNA, 19 nt, Homo sapiens
  misc_RNA (1)...(19): siRNA sense strand
gauaagcuccgauauuuca

SEQ ID NO: 279695 - RNA, 19 nt, Homo sapiens
  misc_RNA (1)...(19): siRNA sense strand
uaaaguugauggaaaggaa

SEQ ID NO: 279696 - RNA, 19 nt, Homo sapiens
  misc_RNA (1)...(19): siRNA sense strand
ugucagaaccucaaagaua

SEQ ID NO: 279697 - RNA, 19 nt, Homo sapiens
  misc_RNA (1)...(19): siRNA sense strand
gcaacgagcugcaguucuc

SEQ ID NO: 279698 - RNA, 19 nt, Homo sapiens
  misc_RNA (1)...(19): siRNA sense strand
gaacgccacugccuacuac

SEQ ID NO: 279699 - RNA, 19 nt, Homo sapiens
  misc_RNA (1)...(19): siRNA sense strand
ucaaagacauggcaaccuu

SEQ ID NO: 279700 - RNA, 19 nt, Homo sapiens
  misc_RNA (1)...(19): siRNA sense strand
ggaggaagguggccuguac

SEQ ID NO: 279701 - RNA, 19 nt, Homo sapiens
  misc_RNA (1)...(19): siRNA sense strand
gcacaugcgugguguuugg

SEQ ID NO: 279702 - RNA, 19 nt, Homo sapiens
  misc_RNA (1)...(19): siRNA sense strand
gggcagaugugcacaaugg

SEQ ID NO: 279703 - RNA, 19 nt, Homo sapiens
  misc_RNA (1)...(19): siRNA sense strand
ccaaagaacagaucauuuc

SEQ ID NO: 279704 - RNA, 19 nt, Homo sapiens
  misc_RNA (1)...(19): siRNA sense strand
gagcugacgccacacauuu

SEQ ID NO: 279705 - RNA, 19 nt, Homo sapiens
  misc_RNA (1)...(19): siRNA sense strand
ggaccuaacagaugauuau

SEQ ID NO: 279706 - RNA, 19 nt, Homo sapiens
  misc_RNA (1)...(19): siRNA sense strand
gucccaggcuccuauauaa

SEQ ID NO: 279707 - RNA, 19 nt, Homo sapiens
  misc_RNA (1)...(19): siRNA sense strand
gccugaagguuguauauga

SEQ ID NO: 279708 - RNA, 19 nt, Homo sapiens
  misc_RNA (1)...(19): siRNA sense strand
ccucaaagauaacaccauu

SEQ ID NO: 279709 - RNA, 19 nt, Homo sapiens
  misc_RNA (1)...(19): siRNA sense strand
ggaacacggucaaggugaa

SEQ ID NO: 279710 - RNA, 19 nt, Homo sapiens
  misc_RNA (1)...(19): siRNA sense strand
caaguugaauggucaggaa

SEQ ID NO: 279711 - RNA, 19 nt, Homo sapiens
  misc_RNA (1)...(19): siRNA sense strand
ggauugagaaggagaauug

SEQ ID NO: 279712 - RNA, 19 nt, Homo sapiens
  misc_RNA (1)...(19): siRNA sense strand
gaguguggcugcaacuuug

SEQ ID NO: 279713 - RNA, 19 nt, Homo sapiens
  misc_RNA (1)...(19): siRNA sense strand
ggacaacuuucgaggagau

SEQ ID NO: 279714 - RNA, 19 nt, Homo sapiens
  misc_RNA (1)...(19): siRNA sense strand
caaaggaagcuauggaaga

SEQ ID NO: 279715 - RNA, 19 nt, Homo sapiens
  misc_RNA (1)...(19): siRNA sense strand
gcucaggagugguugaaga

SEQ ID NO: 279716 - RNA, 19 nt, Homo sapiens
  misc_RNA (1)...(19): siRNA sense strand
gaaaucgacaucaacaaga

SEQ ID NO: 279717 - RNA, 19 nt, Homo sapiens
  misc_RNA (1)...(19): siRNA sense strand
gaagagucaagguuaauga

SEQ ID NO: 279718 - RNA, 19 nt, Homo sapiens
  misc_RNA (1)...(19): siRNA sense strand
gcacaggcaggauuuaaug

SEQ ID NO: 279719 - RNA, 19 nt, Homo sapiens
  misc_RNA (1)...(19): siRNA sense strand
gaauuugggucucuuucau

SEQ ID NO: 279720 - RNA, 19 nt, Homo sapiens
  misc_RNA (1)...(19): siRNA sense strand
augauaagcuccgauauuu

SEQ ID NO: 279721 - RNA, 19 nt, Homo sapiens
  misc_RNA (1)...(19): siRNA sense strand
uaacucacaugacauuauc

SEQ ID NO: 279722 - RNA, 19 nt, Homo sapiens
  misc_RNA (1)...(19): siRNA sense strand
gacaucuccuuccagcuua

SEQ ID NO: 279723 - RNA, 19 nt, Homo sapiens
  misc_RNA (1)...(19): siRNA sense strand
gggcaagggaagauaaaua

SEQ ID NO: 279724 - RNA, 19 nt, Homo sapiens
  misc_RNA (1)...(19): siRNA sense strand
gccacuaccucaccuuuga

SEQ ID NO: 279725 - RNA, 19 nt, Homo sapiens
  misc_RNA (1)...(19): siRNA sense strand
gaucugcaauggagagugu

SEQ ID NO: 279726 - RNA, 19 nt, Homo sapiens
  misc_RNA (1)...(19): siRNA sense strand
ggaguuguuuccuucaaug

SEQ ID NO: 279727 - RNA, 19 nt, Homo sapiens
  misc_RNA (1)...(19): siRNA sense strand
gggaggaagucacguuuua

SEQ ID NO: 279728 - RNA, 19 nt, Homo sapiens
  misc_RNA (1)...(19): siRNA sense strand
cuuaugagcuggauaucaa

SEQ ID NO: 279729 - RNA, 19 nt, Homo sapiens
  misc_RNA (1)...(19): siRNA sense strand
cuacuccgauggcaaauau

SEQ ID NO: 279730 - RNA, 19 nt, Homo sapiens
  misc_RNA (1)...(19): siRNA sense strand
cuggaaagcuggacaacuu

SEQ ID NO: 279731 - RNA, 19 nt, Homo sapiens
  misc_RNA (1)...(19): siRNA sense strand
uuaaugaccuagugacuuc

SEQ ID NO: 279732 - RNA, 19 nt, Homo sapiens
  misc_RNA (1)...(19): siRNA sense strand
ucaccaagauggcucucua

SEQ ID NO: 279733 - RNA, 19 nt, Homo sapiens
  misc_RNA (1)...(19): siRNA sense strand
gugacuggcuggaggaauu

SEQ ID NO: 279734 - RNA, 19 nt, Homo sapiens
  misc_RNA (1)...(19): siRNA sense strand
gugccaagguggaagguuu

SEQ ID NO: 279735 - RNA, 19 nt, Homo sapiens
  misc_RNA (1)...(19): siRNA sense strand
ccuaacagaugauuaugug

SEQ ID NO: 279736 - RNA, 19 nt, Homo sapiens
  misc_RNA (1)...(19): siRNA sense strand
gaaacauugugcaguccaa

SEQ ID NO: 279737 - RNA, 19 nt, Homo sapiens
  misc_RNA (1)...(19): siRNA sense strand
ccagggagcucauguaucc

SEQ ID NO: 279738 - RNA, 19 nt, Homo sapiens
  misc_RNA (1)...(19): siRNA sense strand
gaagagcagauucucauca

SEQ ID NO: 279739 - RNA, 19 nt, Homo sapiens
  misc_RNA (1)...(19): siRNA sense strand
cggggaagcuggaaauuua

SEQ ID NO: 279740 - RNA, 19 nt, Homo sapiens
  misc_RNA (1)...(19): siRNA sense strand
ggaaaucgacaucaacaag

SEQ ID NO: 279741 - RNA, 19 nt, Homo sapiens
  misc_RNA (1)...(19): siRNA sense strand
gaggagugcaucacaugua

SEQ ID NO: 279742 - RNA, 19 nt, Homo sapiens
  misc_RNA (1)...(19): siRNA sense strand
gcaaagcagcccaaaugga

SEQ ID NO: 279743 - RNA, 19 nt, Homo sapiens
  misc_RNA (1)...(19): siRNA sense strand
ggaggugaauggcuacaag

SEQ ID NO: 279744 - RNA, 19 nt, Homo sapiens
  misc_RNA (1)...(19): siRNA sense strand
ggacuggugugaggacaau

SEQ ID NO: 279745 - RNA, 19 nt, Homo sapiens
  misc_RNA (1)...(19): siRNA sense strand
ucacgucaccgucuuuaaa

SEQ ID NO: 279746 - RNA, 19 nt, Homo sapiens
  misc_RNA (1)...(19): siRNA sense strand
caaagggaauuguggaaac

SEQ ID NO: 279747 - RNA, 19 nt, Homo sapiens
  misc_RNA (1)...(19): siRNA sense strand
gugaauggcacacaaguga

SEQ ID NO: 279748 - RNA, 19 nt, Homo sapiens
  misc_RNA (1)...(19): siRNA sense strand
caaggugaauggcacacaa

SEQ ID NO: 279749 - RNA, 19 nt, Homo sapiens
  misc_RNA (1)...(19): siRNA sense strand
aaaucgacaucaacaagaa

SEQ ID NO: 279750 - RNA, 19 nt, Homo sapiens
  misc_RNA (1)...(19): siRNA sense strand
aagaacagaucauuucagu

SEQ ID NO: 279751 - RNA, 19 nt, Homo sapiens
  misc_RNA (1)...(19): siRNA sense strand
caucgagugucaaugaguu

SEQ ID NO: 279752 - RNA, 19 nt, Homo sapiens
  misc_RNA (1)...(19): siRNA sense strand
gcaccaacuugccaccaau

SEQ ID NO: 279753 - RNA, 19 nt, Homo sapiens
  misc_RNA (1)...(19): siRNA sense strand
ccucuucaauuauuacgaa

SEQ ID NO: 279754 - RNA, 19 nt, Homo sapiens
  misc_RNA (1)...(19): siRNA sense strand
caaaagagcccaaagaaca

SEQ ID NO: 279755 - RNA, 19 nt, Homo sapiens
  misc_RNA (1)...(19): siRNA sense strand
gagcugcaguucucacagu

SEQ ID NO: 279756 - RNA, 19 nt, Homo sapiens
  misc_RNA (1)...(19): siRNA sense strand
gcacugucuaugucaauaa

SEQ ID NO: 279757 - RNA, 19 nt, Homo sapiens
  misc_RNA (1)...(19): siRNA sense strand
gcaccaagaccuccuacug

SEQ ID NO: 279758 - RNA, 19 nt, Homo sapiens
  misc_RNA (1)...(19): siRNA sense strand
caacuugccaccaaugaga

SEQ ID NO: 279759 - RNA, 19 nt, Homo sapiens
  misc_RNA (1)...(19): siRNA sense strand
caacgccagugacgaguuc

SEQ ID NO: 279760 - RNA, 19 nt, Homo sapiens
  misc_RNA (1)...(19): siRNA sense strand
ucacccucuucaauuauua

SEQ ID NO: 279761 - RNA, 19 nt, Homo sapiens
  misc_RNA (1)...(19): siRNA sense strand
cacgaucaauguggaauuu

SEQ ID NO: 279762 - RNA, 19 nt, Homo sapiens
  misc_RNA (1)...(19): siRNA sense strand
caacaacaccaaagggaau

SEQ ID NO: 279763 - RNA, 19 nt, Homo sapiens
  misc_RNA (1)...(19): siRNA sense strand
ggcaagggaagauaaauau

SEQ ID NO: 279764 - RNA, 19 nt, Homo sapiens
  misc_RNA (1)...(19): siRNA sense strand
gcugaaggccugcaacaau

SEQ ID NO: 279765 - RNA, 19 nt, Homo sapiens
  misc_RNA (1)...(19): siRNA sense strand
gugcgacgcugccacugaa

SEQ ID NO: 279766 - RNA, 19 nt, Homo sapiens
  misc_RNA (1)...(19): siRNA sense strand
uauggaagagucaagguua

SEQ ID NO: 279767 - RNA, 19 nt, Homo sapiens
  misc_RNA (1)...(19): siRNA sense strand
ggccaugucuguccuggau

SEQ ID NO: 279768 - RNA, 19 nt, Homo sapiens
  misc_RNA (1)...(19): siRNA sense strand
cgacaucuccuuccagcuu

SEQ ID NO: 279769 - RNA, 19 nt, Homo sapiens
  misc_RNA (1)...(19): siRNA sense strand
cagaccagcugcccacuca

SEQ ID NO: 279770 - RNA, 19 nt, Homo sapiens
  misc_RNA (1)...(19): siRNA sense strand
gcaaggaugaugaguacug

SEQ ID NO: 279771 - RNA, 19 nt, Homo sapiens
  misc_RNA (1)...(19): siRNA sense strand
ccagagaacagccacuuug

SEQ ID NO: 279772 - RNA, 19 nt, Homo sapiens
  misc_RNA (1)...(19): siRNA sense strand
ccgaguggauugagaagga

SEQ ID NO: 279773 - RNA, 19 nt, Homo sapiens
  misc_RNA (1)...(19): siRNA sense strand
gauccagauuucauuaugg

SEQ ID NO: 279774 - RNA, 19 nt, Homo sapiens
  misc_RNA (1)...(19): siRNA sense strand
gaagagaacuuugagaaca

SEQ ID NO: 279775 - RNA, 19 nt, Homo sapiens
  misc_RNA (1)...(19): siRNA sense strand
gcacggagacucaaaguga

SEQ ID NO: 279776 - RNA, 19 nt, Homo sapiens
  misc_RNA (1)...(19): siRNA sense strand
gccagaagauugaguuuga

SEQ ID NO: 279777 - RNA, 19 nt, Homo sapiens
  misc_RNA (1)...(19): siRNA sense strand
aaacauagcuguggaucau

SEQ ID NO: 279778 - RNA, 19 nt, Homo sapiens
  misc_RNA (1)...(19): siRNA sense strand
ccaaguaugugacguaguc

SEQ ID NO: 279779 - RNA, 19 nt, Homo sapiens
  misc_RNA (1)...(19): siRNA sense strand
caauggcucuucucucguu

SEQ ID NO: 279780 - RNA, 19 nt, Homo sapiens
  misc_RNA (1)...(19): siRNA sense strand
gugauguuguccugaauaa

SEQ ID NO: 279781 - RNA, 19 nt, Homo sapiens
  misc_RNA (1)...(19): siRNA sense strand
ucaaacugcugcuccagaa

SEQ ID NO: 279782 - RNA, 19 nt, Homo sapiens
  misc_RNA (1)...(19): siRNA sense strand
uaucuucuccuuccaagua

SEQ ID NO: 279783 - RNA, 19 nt, Homo sapiens
  misc_RNA (1)...(19): siRNA sense strand
ccgagagaaugaugaauug

SEQ ID NO: 279784 - RNA, 19 nt, Homo sapiens
  misc_RNA (1)...(19): siRNA sense strand
uuucagaccuggaagagaa

SEQ ID NO: 279785 - RNA, 19 nt, Homo sapiens
  misc_RNA (1)...(19): siRNA sense strand
acauagcuguggaucauuu

SEQ ID NO: 279786 - RNA, 19 nt, Homo sapiens
  misc_RNA (1)...(19): siRNA sense strand
ggacugcaauaacaauguc

SEQ ID NO: 279787 - RNA, 19 nt, Homo sapiens
  misc_RNA (1)...(19): siRNA sense strand
caauaacaauguccagagu

SEQ ID NO: 279788 - RNA, 19 nt, Homo sapiens
  misc_RNA (1)...(19): siRNA sense strand
gcuccaaacucaucaacuc

SEQ ID NO: 279789 - RNA, 19 nt, Homo sapiens
  misc_RNA (1)...(19): siRNA sense strand
gcugcaagaggucaaauuu

SEQ ID NO: 279790 - RNA, 19 nt, Homo sapiens
  misc_RNA (1)...(19): siRNA sense strand
gagaggaguuggaccuucu

SEQ ID NO: 279791 - RNA, 19 nt, Homo sapiens
  misc_RNA (1)...(19): siRNA sense strand
gccgauuccugguauuuga

SEQ ID NO: 279792 - RNA, 19 nt, Homo sapiens
  misc_RNA (1)...(19): siRNA sense strand
ucaagacgcugcuccaaac

SEQ ID NO: 279793 - RNA, 19 nt, Homo sapiens
  misc_RNA (1)...(19): siRNA sense strand
uuccagagccugaugaaua

SEQ ID NO: 279794 - RNA, 19 nt, Homo sapiens
  misc_RNA (1)...(19): siRNA sense strand
gcucuucucucguuuacag

SEQ ID NO: 279795 - RNA, 19 nt, Homo sapiens
  misc_RNA (1)...(19): siRNA sense strand
ccucaaguccuuucugauu

SEQ ID NO: 279796 - RNA, 19 nt, Homo sapiens
  misc_RNA (1)...(19): siRNA sense strand
caaccagaccuaucaggaa

SEQ ID NO: 279797 - RNA, 19 nt, Homo sapiens
  misc_RNA (1)...(19): siRNA sense strand
gggucuaccugccuuaugu

SEQ ID NO: 279798 - RNA, 19 nt, Homo sapiens
  misc_RNA (1)...(19): siRNA sense strand
gguagccgauuccugguau

SEQ ID NO: 279799 - RNA, 19 nt, Homo sapiens
  misc_RNA (1)...(19): siRNA sense strand
gaauagcaacagcaauuuc

SEQ ID NO: 279800 - RNA, 19 nt, Homo sapiens
  misc_RNA (1)...(19): siRNA sense strand
ggaaaagugugaaaugaag

SEQ ID NO: 279801 - RNA, 19 nt, Homo sapiens
  misc_RNA (1)...(19): siRNA sense strand
auaacaauguccagaguau

SEQ ID NO: 279802 - RNA, 19 nt, Homo sapiens
  misc_RNA (1)...(19): siRNA sense strand
aagagaacuuugagaacaa

SEQ ID NO: 279803 - RNA, 19 nt, Homo sapiens
  misc_RNA (1)...(19): siRNA sense strand
gaucauuuccaacuuucaa

SEQ ID NO: 279804 - RNA, 19 nt, Homo sapiens
  misc_RNA (1)...(19): siRNA sense strand
ggaguauagugauguuguc

SEQ ID NO: 279805 - RNA, 19 nt, Homo sapiens
  misc_RNA (1)...(19): siRNA sense strand
uaaucuaccugagccagaa

SEQ ID NO: 279806 - RNA, 19 nt, Homo sapiens
  misc_RNA (1)...(19): siRNA sense strand
gaacuuugagaacaauauc

SEQ ID NO: 279807 - RNA, 19 nt, Homo sapiens
  misc_RNA (1)...(19): siRNA sense strand
ccaggaguauagugauguu

SEQ ID NO: 279808 - RNA, 19 nt, Homo sapiens
  misc_RNA (1)...(19): siRNA sense strand
gaaagccgacguggugaug

SEQ ID NO: 279809 - RNA, 19 nt, Homo sapiens
  misc_RNA (1)...(19): siRNA sense strand
gauguuguccugaauaagg

SEQ ID NO: 279810 - RNA, 19 nt, Homo sapiens
  misc_RNA (1)...(19): siRNA sense strand
ggaagagaacuuugagaac

SEQ ID NO: 279811 - RNA, 19 nt, Homo sapiens
  misc_RNA (1)...(19): siRNA sense strand
gcgccacguuccuuucaga

SEQ ID NO: 279812 - RNA, 19 nt, Homo sapiens
  misc_RNA (1)...(19): siRNA sense strand
ccugcgcagucuaaacaua

SEQ ID NO: 279813 - RNA, 19 nt, Homo sapiens
  misc_RNA (1)...(19): siRNA sense strand
ugaauuggcacuggagaaa

SEQ ID NO: 279814 - RNA, 19 nt, Homo sapiens
  misc_RNA (1)...(19): siRNA sense strand
uaccugagccagaagauug

SEQ ID NO: 279815 - RNA, 19 nt, Homo sapiens
  misc_RNA (1)...(19): siRNA sense strand
ucaccaaccagaccuauca

SEQ ID NO: 279816 - RNA, 19 nt, Homo sapiens
  misc_RNA (1)...(19): siRNA sense strand
uggaagagaacuuugagaa

SEQ ID NO: 279817 - RNA, 19 nt, Homo sapiens
  misc_RNA (1)...(19): siRNA sense strand
agacgcugcuccaaacuca

SEQ ID NO: 279818 - RNA, 19 nt, Homo sapiens
  misc_RNA (1)...(19): siRNA sense strand
ggggaaaagugugaaauga

SEQ ID NO: 279819 - RNA, 19 nt, Homo sapiens
  misc_RNA (1)...(19): siRNA sense strand
ggaagcucaucgagucaag

SEQ ID NO: 279820 - RNA, 19 nt, Homo sapiens
  misc_RNA (1)...(19): siRNA sense strand
uccagagccugaugaauag

SEQ ID NO: 279821 - RNA, 19 nt, Homo sapiens
  misc_RNA (1)...(19): siRNA sense strand
agauugaguuugagugcaa

SEQ ID NO: 279822 - RNA, 19 nt, Homo sapiens
  misc_RNA (1)...(19): siRNA sense strand
ugaauagcaacagcaauuu

SEQ ID NO: 279823 - RNA, 19 nt, Homo sapiens
  misc_RNA (1)...(19): siRNA sense strand
auagugauguuguccugaa

SEQ ID NO: 279824 - RNA, 19 nt, Homo sapiens
  misc_RNA (1)...(19): siRNA sense strand
uggaccuucuggaguguua

SEQ ID NO: 279825 - RNA, 19 nt, Homo sapiens
  misc_RNA (1)...(19): siRNA sense strand
gggccacacuuuccaacca

SEQ ID NO: 279826 - RNA, 19 nt, Homo sapiens
  misc_RNA (1)...(19): siRNA sense strand
gguggaacagcaagccuaa

SEQ ID NO: 279827 - RNA, 19 nt, Homo sapiens
  misc_RNA (1)...(19): siRNA sense strand
cacggagacucaaagugaa

SEQ ID NO: 279828 - RNA, 19 nt, Homo sapiens
  misc_RNA (1)...(19): siRNA sense strand
ucaaguccuuucugauucu

SEQ ID NO: 279829 - RNA, 19 nt, Homo sapiens
  misc_RNA (1)...(19): siRNA sense strand
ugacucagcagagcaguga

SEQ ID NO: 279830 - RNA, 19 nt, Homo sapiens
  misc_RNA (1)...(19): siRNA sense strand
gaaccacgccccagacuuc

SEQ ID NO: 279831 - RNA, 19 nt, Homo sapiens
  misc_RNA (1)...(19): siRNA sense strand
uaccaggaguauagugaug

SEQ ID NO: 279832 - RNA, 19 nt, Homo sapiens
  misc_RNA (1)...(19): siRNA sense strand
cagcagguggaguucauuu

SEQ ID NO: 279833 - RNA, 19 nt, Homo sapiens
  misc_RNA (1)...(19): siRNA sense strand
ugaaaugaagcuacaugga

SEQ ID NO: 279834 - RNA, 19 nt, Homo sapiens
  misc_RNA (1)...(19): siRNA sense strand
gagccagaagauugaguuu

SEQ ID NO: 279835 - RNA, 19 nt, Homo sapiens
  misc_RNA (1)...(19): siRNA sense strand
gcaccaauggcucuucucu

SEQ ID NO: 279836 - RNA, 19 nt, Homo sapiens
  misc_RNA (1)...(19): siRNA sense strand
gugcacagaaccugaagga

SEQ ID NO: 279837 - RNA, 19 nt, Homo sapiens
  misc_RNA (1)...(19): siRNA sense strand
aaaccuguuccgacucuuu

SEQ ID NO: 279838 - RNA, 19 nt, Homo sapiens
  misc_RNA (1)...(19): siRNA sense strand
ucccucaaguccuuucuga

SEQ ID NO: 279839 - RNA, 19 nt, Homo sapiens
  misc_RNA (1)...(19): siRNA sense strand
augaauagcaacagcaauu

SEQ ID NO: 279840 - RNA, 19 nt, Homo sapiens
  misc_RNA (1)...(19): siRNA sense strand
uaugugacguaguccugaa

SEQ ID NO: 279841 - RNA, 19 nt, Homo sapiens
  misc_RNA (1)...(19): siRNA sense strand
cccgagagaaugaugaauu

SEQ ID NO: 279842 - RNA, 19 nt, Homo sapiens
  misc_RNA (1)...(19): siRNA sense strand
ccgagaggguagccgauuc

SEQ ID NO: 279843 - RNA, 19 nt, Homo sapiens
  misc_RNA (1)...(19): siRNA sense strand
caaccaggagcaccaaugg

SEQ ID NO: 279844 - RNA, 19 nt, Homo sapiens
  misc_RNA (1)...(19): siRNA sense strand
cucaaguccuuucugauuc

SEQ ID NO: 279845 - RNA, 19 nt, Homo sapiens
  misc_RNA (1)...(19): siRNA sense strand
uccgggaggucuuggagaa

SEQ ID NO: 279846 - RNA, 19 nt, Homo sapiens
  misc_RNA (1)...(19): siRNA sense strand
ccucccagcugcuuuacca

SEQ ID NO: 279847 - RNA, 19 nt, Homo sapiens
  misc_RNA (1)...(19): siRNA sense strand
gagaacuuugagaacaaua

SEQ ID NO: 279848 - RNA, 19 nt, Homo sapiens
  misc_RNA (1)...(19): siRNA sense strand
caauaucuucuccuuccaa

SEQ ID NO: 279849 - RNA, 19 nt, Homo sapiens
  misc_RNA (1)...(19): siRNA sense strand
ccagagguccgugcacaga

SEQ ID NO: 279850 - RNA, 19 nt, Homo sapiens
  misc_RNA (1)...(19): siRNA sense strand
gugaaaagcuucgguggau

SEQ ID NO: 279851 - RNA, 19 nt, Homo sapiens
  misc_RNA (1)...(19): siRNA sense strand
gcucccuucuccuccauuc

SEQ ID NO: 279852 - RNA, 19 nt, Homo sapiens
  misc_RNA (1)...(19): siRNA sense strand
acgcaucacccgccucaaa

SEQ ID NO: 279853 - RNA, 19 nt, Homo sapiens
  misc_RNA (1)...(19): siRNA sense strand
gccuuucccucaaguccuu

SEQ ID NO: 279854 - RNA, 19 nt, Homo sapiens
  misc_RNA (1)...(19): siRNA sense strand
gcaauuuccgggaggucuu

SEQ ID NO: 279855 - RNA, 19 nt, Homo sapiens
  misc_RNA (1)...(19): siRNA sense strand
agagaacuuugagaacaau

SEQ ID NO: 279856 - RNA, 19 nt, Homo sapiens
  misc_RNA (1)...(19): siRNA sense strand
aacuacagcugguggaaca

SEQ ID NO: 279857 - RNA, 19 nt, Homo sapiens
  misc_RNA (1)...(19): siRNA sense strand
caccugcaccucuucaaug

SEQ ID NO: 279858 - RNA, 19 nt, Homo sapiens
  misc_RNA (1)...(19): siRNA sense strand
aauaacaauguccagagua

SEQ ID NO: 279859 - RNA, 19 nt, Homo sapiens
  misc_RNA (1)...(19): siRNA sense strand
aaacugcugcuccagaaca

SEQ ID NO: 279860 - RNA, 19 nt, Homo sapiens
  misc_RNA (1)...(19): siRNA sense strand
caaacuacagcugguggaa

SEQ ID NO: 279861 - RNA, 19 nt, Homo sapiens
  misc_RNA (1)...(19): siRNA sense strand
uauucccgcucauuucuca

SEQ ID NO: 279862 - RNA, 19 nt, Homo sapiens
  misc_RNA (1)...(19): siRNA sense strand
cuacauggaccucacaaaa

SEQ ID NO: 279863 - RNA, 19 nt, Homo sapiens
  misc_RNA (1)...(19): siRNA sense strand
gccagcgccuuucccucaa

SEQ ID NO: 279864 - RNA, 19 nt, Homo sapiens
  misc_RNA (1)...(19): siRNA sense strand
guagccgauuccugguauu

SEQ ID NO: 279865 - RNA, 19 nt, Homo sapiens
  misc_RNA (1)...(19): siRNA sense strand
accugcaccucuucaauga

SEQ ID NO: 279866 - RNA, 19 nt, Homo sapiens
  misc_RNA (1)...(19): siRNA sense strand
caaaauauucccgcucauu

SEQ ID NO: 279867 - RNA, 19 nt, Homo sapiens
  misc_RNA (1)...(19): siRNA sense strand
ccaaccaggagcaccaaug

SEQ ID NO: 279868 - RNA, 19 nt, Homo sapiens
  misc_RNA (1)...(19): siRNA sense strand
ugacagccuuggaguucag

SEQ ID NO: 279869 - RNA, 19 nt, Homo sapiens
  misc_RNA (1)...(19): siRNA sense strand
gggacugcaauaacaaugu

SEQ ID NO: 279870 - RNA, 19 nt, Homo sapiens
  misc_RNA (1)...(19): siRNA sense strand
uaaacauagcuguggauca

SEQ ID NO: 279871 - RNA, 19 nt, Homo sapiens
  misc_RNA (1)...(19): siRNA sense strand
ggguagccgauuccuggua

SEQ ID NO: 279872 - RNA, 19 nt, Homo sapiens
  misc_RNA (1)...(19): siRNA sense strand
gaagcucaucgagucaaga

SEQ ID NO: 279873 - RNA, 19 nt, Homo sapiens
  misc_RNA (1)...(19): siRNA sense strand
gggaaaagugugaaaugaa

SEQ ID NO: 279874 - RNA, 19 nt, Homo sapiens
  misc_RNA (1)...(19): siRNA sense strand
ggagaaagaugaugacaug

SEQ ID NO: 279875 - RNA, 19 nt, Homo sapiens
  misc_RNA (1)...(19): siRNA sense strand
ggaggaaggucccaaagau

SEQ ID NO: 279876 - RNA, 19 nt, Homo sapiens
  misc_RNA (1)...(19): siRNA sense strand
gcagugagcuggagauggu

SEQ ID NO: 279877 - RNA, 19 nt, Homo sapiens
  misc_RNA (1)...(19): siRNA sense strand
ggaagaagacccaggagaa

SEQ ID NO: 279878 - RNA, 19 nt, Homo sapiens
  misc_RNA (1)...(19): siRNA sense strand
gaagaugaguuugacaugu

SEQ ID NO: 279879 - RNA, 19 nt, Homo sapiens
  misc_RNA (1)...(19): siRNA sense strand
gaagaagacccaggagaaa

SEQ ID NO: 279880 - RNA, 19 nt, Homo sapiens
  misc_RNA (1)...(19): siRNA sense strand
ggacugggcccucaacaug

SEQ ID NO: 279881 - RNA, 19 nt, Homo sapiens
  misc_RNA (1)...(19): siRNA sense strand
ggaccauccugcccaagaa

SEQ ID NO: 279882 - RNA, 19 nt, Homo sapiens
  misc_RNA (1)...(19): siRNA sense strand
gaacaggccagaccaccaa

SEQ ID NO: 279883 - RNA, 19 nt, Homo sapiens
  misc_RNA (1)...(19): siRNA sense strand
ggaaagagguaaaauacga

SEQ ID NO: 279884 - RNA, 19 nt, Homo sapiens
  misc_RNA (1)...(19): siRNA sense strand
ccaaugagcagcugacaga

SEQ ID NO: 279885 - RNA, 19 nt, Homo sapiens
  misc_RNA (1)...(19): siRNA sense strand
uuagaaaccugugucaaga

SEQ ID NO: 279886 - RNA, 19 nt, Homo sapiens
  misc_RNA (1)...(19): siRNA sense strand
caaugacaaucucaacaau

SEQ ID NO: 279887 - RNA, 19 nt, Homo sapiens
  misc_RNA (1)...(19): siRNA sense strand
ggucaccagcgaagaauuu

SEQ ID NO: 279888 - RNA, 19 nt, Homo sapiens
  misc_RNA (1)...(19): siRNA sense strand
aagaugaguuugacauguu

SEQ ID NO: 279889 - RNA, 19 nt, Homo sapiens
  misc_RNA (1)...(19): siRNA sense strand
gagcuggccugcagucucu

SEQ ID NO: 279890 - RNA, 19 nt, Homo sapiens
  misc_RNA (1)...(19): siRNA sense strand
ggaccguguucaacucaga

SEQ ID NO: 279891 - RNA, 19 nt, Homo sapiens
  misc_RNA (1)...(19): siRNA sense strand
gaugaugacaugcuguuug

SEQ ID NO: 279892 - RNA, 19 nt, Homo sapiens
  misc_RNA (1)...(19): siRNA sense strand
cagcugaccugaucgacau

SEQ ID NO: 279893 - RNA, 19 nt, Homo sapiens
  misc_RNA (1)...(19): siRNA sense strand
caucgugcaugacaaagug

SEQ ID NO: 279894 - RNA, 19 nt, Homo sapiens
  misc_RNA (1)...(19): siRNA sense strand
caacucagagacacaauca

SEQ ID NO: 279895 - RNA, 19 nt, Homo sapiens
  misc_RNA (1)...(19): siRNA sense strand
ggaagaugaguuugacaug

SEQ ID NO: 279896 - RNA, 19 nt, Homo sapiens
  misc_RNA (1)...(19): siRNA sense strand
gaacuuccacgaggugaug

SEQ ID NO: 279897 - RNA, 19 nt, Homo sapiens
  misc_RNA (1)...(19): siRNA sense strand
ggagaucugcgacaucauc

SEQ ID NO: 279898 - RNA, 19 nt, Homo sapiens
  misc_RNA (1)...(19): siRNA sense strand
ugacaugcuguuugccuua

SEQ ID NO: 279899 - RNA, 19 nt, Homo sapiens
  misc_RNA (1)...(19): siRNA sense strand
gaggaaaggccuggaguuc

SEQ ID NO: 279900 - RNA, 19 nt, Homo sapiens
  misc_RNA (1)...(19): siRNA sense strand
ggacagcgcaucgagaaag

SEQ ID NO: 279901 - RNA, 19 nt, Homo sapiens
  misc_RNA (1)...(19): siRNA sense strand
ucccucagaucgccaauga

SEQ ID NO: 279902 - RNA, 19 nt, Homo sapiens
  misc_RNA (1)...(19): siRNA sense strand
ugacugaccuggacaugcu

SEQ ID NO: 279903 - RNA, 19 nt, Homo sapiens
  misc_RNA (1)...(19): siRNA sense strand
ggaggaaaggccuggaguu

SEQ ID NO: 279904 - RNA, 19 nt, Homo sapiens
  misc_RNA (1)...(19): siRNA sense strand
caucccagcuggcaggaau

SEQ ID NO: 279905 - RNA, 19 nt, Homo sapiens
  misc_RNA (1)...(19): siRNA sense strand
ucaaugacaaucucaacaa

SEQ ID NO: 279906 - RNA, 19 nt, Homo sapiens
  misc_RNA (1)...(19): siRNA sense strand
gaggaaggucccaaagaug

SEQ ID NO: 279907 - RNA, 19 nt, Homo sapiens
  misc_RNA (1)...(19): siRNA sense strand
acaaagugcucaaccucau

SEQ ID NO: 279908 - RNA, 19 nt, Homo sapiens
  misc_RNA (1)...(19): siRNA sense strand
agaugaguuugacauguuu

SEQ ID NO: 279909 - RNA, 19 nt, Homo sapiens
  misc_RNA (1)...(19): siRNA sense strand
aaaccugugucaagaacug

SEQ ID NO: 279910 - RNA, 19 nt, Homo sapiens
  misc_RNA (1)...(19): siRNA sense strand
augacaaucucaacaaugu

SEQ ID NO: 279911 - RNA, 19 nt, Homo sapiens
  misc_RNA (1)...(19): siRNA sense strand
gcucucacagucuuagaaa

SEQ ID NO: 279912 - RNA, 19 nt, Homo sapiens
  misc_RNA (1)...(19): siRNA sense strand
caugcuguuugccuuauga

SEQ ID NO: 279913 - RNA, 19 nt, Homo sapiens
  misc_RNA (1)...(19): siRNA sense strand
gacaugcuguuugccuuau

SEQ ID NO: 279914 - RNA, 19 nt, Homo sapiens
  misc_RNA (1)...(19): siRNA sense strand
gacaaucucaacaaugugu

SEQ ID NO: 279915 - RNA, 19 nt, Homo sapiens
  misc_RNA (1)...(19): siRNA sense strand
agaagacccaggagaaaga

SEQ ID NO: 279916 - RNA, 19 nt, Homo sapiens
  misc_RNA (1)...(19): siRNA sense strand
gagcaguaaagaagagaau

SEQ ID NO: 279917 - RNA, 19 nt, Homo sapiens
  misc_RNA (1)...(19): siRNA sense strand
uugggaagcugcgcaguga

SEQ ID NO: 279918 - RNA, 19 nt, Homo sapiens
  misc_RNA (1)...(19): siRNA sense strand
cacccaccaucgugcauga

SEQ ID NO: 279919 - RNA, 19 nt, Homo sapiens
  misc_RNA (1)...(19): siRNA sense strand
agaaaccugugucaagaac

SEQ ID NO: 279920 - RNA, 19 nt, Homo sapiens
  misc_RNA (1)...(19): siRNA sense strand
gcaguaaagaagagaaucg

SEQ ID NO: 279921 - RNA, 19 nt, Homo sapiens
  misc_RNA (1)...(19): siRNA sense strand
ugacauguuugcgcugaca

SEQ ID NO: 279922 - RNA, 19 nt, Homo sapiens
  misc_RNA (1)...(19): siRNA sense strand
ccaccaucgugcaugacaa

SEQ ID NO: 279923 - RNA, 19 nt, Homo sapiens
  misc_RNA (1)...(19): siRNA sense strand
gacuggaagaugaguuuga

SEQ ID NO: 279924 - RNA, 19 nt, Homo sapiens
  misc_RNA (1)...(19): siRNA sense strand
cuggucgacuggaagauga

SEQ ID NO: 279925 - RNA, 19 nt, Homo sapiens
  misc_RNA (1)...(19): siRNA sense strand
ugagggugaugucggagau

SEQ ID NO: 279926 - RNA, 19 nt, Homo sapiens
  misc_RNA (1)...(19): siRNA sense strand
gaucugcgacaucaucaac

SEQ ID NO: 279927 - RNA, 19 nt, Homo sapiens
  misc_RNA (1)...(19): siRNA sense strand
gaagacccaggagaaagau

SEQ ID NO: 279928 - RNA, 19 nt, Homo sapiens
  misc_RNA (1)...(19): siRNA sense strand
gaccaacggaaagagguaa

SEQ ID NO: 279929 - RNA, 19 nt, Homo sapiens
  misc_RNA (1)...(19): siRNA sense strand
gacacaaucaggacaggau

SEQ ID NO: 279930 - RNA, 19 nt, Homo sapiens
  misc_RNA (1)...(19): siRNA sense strand
caccaucgugcaugacaaa

SEQ ID NO: 279931 - RNA, 19 nt, Homo sapiens
  misc_RNA (1)...(19): siRNA sense strand
uagaaaccugugucaagaa

SEQ ID NO: 279932 - RNA, 19 nt, Homo sapiens
  misc_RNA (1)...(19): siRNA sense strand
gaggugaugcuggcucuca

SEQ ID NO: 279933 - RNA, 19 nt, Homo sapiens
  misc_RNA (1)...(19): siRNA sense strand
ugaccaacggaaagaggua

SEQ ID NO: 279934 - RNA, 19 nt, Homo sapiens
  misc_RNA (1)...(19): siRNA sense strand
cuuagaaaccugugucaag

SEQ ID NO: 279935 - RNA, 19 nt, Homo sapiens
  misc_RNA (1)...(19): siRNA sense strand
agacccaggagaaagauga

SEQ ID NO: 279936 - RNA, 19 nt, Homo sapiens
  misc_RNA (1)...(19): siRNA sense strand
gcaucgagaaagccacaga

SEQ ID NO: 279937 - RNA, 19 nt, Homo sapiens
  misc_RNA (1)...(19): siRNA sense strand
ggccucuggucgacuggaa

SEQ ID NO: 279938 - RNA, 19 nt, Homo sapiens
  misc_RNA (1)...(19): siRNA sense strand
cggaggaaggucccaaaga

SEQ ID NO: 279939 - RNA, 19 nt, Homo sapiens
  misc_RNA (1)...(19): siRNA sense strand
ccugcgccaugaacgguuu

SEQ ID NO: 279940 - RNA, 19 nt, Homo sapiens
  misc_RNA (1)...(19): siRNA sense strand
gaaagagguaaaauacgaa

SEQ ID NO: 279941 - RNA, 19 nt, Homo sapiens
  misc_RNA (1)...(19): siRNA sense strand
gagaucugcgacaucauca

SEQ ID NO: 279942 - RNA, 19 nt, Homo sapiens
  misc_RNA (1)...(19): siRNA sense strand
gaggaccguguucaacuca

SEQ ID NO: 279943 - RNA, 19 nt, Homo sapiens
  misc_RNA (1)...(19): siRNA sense strand
auggagaucugcgacauca

SEQ ID NO: 279944 - RNA, 19 nt, Homo sapiens
  misc_RNA (1)...(19): siRNA sense strand
cgacaaagcucuacucauc

SEQ ID NO: 279945 - RNA, 19 nt, Homo sapiens
  misc_RNA (1)...(19): siRNA sense strand
ggaggaagauuauucugaa

SEQ ID NO: 279946 - RNA, 19 nt, Homo sapiens
  misc_RNA (1)...(19): siRNA sense strand
caagagaauugaagaagaa

SEQ ID NO: 279947 - RNA, 19 nt, Homo sapiens
  misc_RNA (1)...(19): siRNA sense strand
gcuaugagcuguucuucaa

SEQ ID NO: 279948 - RNA, 19 nt, Homo sapiens
  misc_RNA (1)...(19): siRNA sense strand
gcagcgaguucucaaauau

SEQ ID NO: 279949 - RNA, 19 nt, Homo sapiens
  misc_RNA (1)...(19): siRNA sense strand
gcagaacucucuaaaggau

SEQ ID NO: 279950 - RNA, 19 nt, Homo sapiens
  misc_RNA (1)...(19): siRNA sense strand
gcagaaauacaucuacuaa

SEQ ID NO: 279951 - RNA, 19 nt, Homo sapiens
  misc_RNA (1)...(19): siRNA sense strand
gcucaacccuggagacauu

SEQ ID NO: 279952 - RNA, 19 nt, Homo sapiens
  misc_RNA (1)...(19): siRNA sense strand
gaauuugccaucagcauua

SEQ ID NO: 279953 - RNA, 19 nt, Homo sapiens
  misc_RNA (1)...(19): siRNA sense strand
gaaggaugcagcagaauuu

SEQ ID NO: 279954 - RNA, 19 nt, Homo sapiens
  misc_RNA (1)...(19): siRNA sense strand
ccugaaaccucaagacauu

SEQ ID NO: 279955 - RNA, 19 nt, Homo sapiens
  misc_RNA (1)...(19): siRNA sense strand
gggcaugacuuccagaugu

SEQ ID NO: 279956 - RNA, 19 nt, Homo sapiens
  misc_RNA (1)...(19): siRNA sense strand
uuacggagcugguggaguu

SEQ ID NO: 279957 - RNA, 19 nt, Homo sapiens
  misc_RNA (1)...(19): siRNA sense strand
cagcagaacucucuaaagg

SEQ ID NO: 279958 - RNA, 19 nt, Homo sapiens
  misc_RNA (1)...(19): siRNA sense strand
ucaagauccuuaacaagaa

SEQ ID NO: 279959 - RNA, 19 nt, Homo sapiens
  misc_RNA (1)...(19): siRNA sense strand
ggugaaggaugcagcagaa

SEQ ID NO: 279960 - RNA, 19 nt, Homo sapiens
  misc_RNA (1)...(19): siRNA sense strand
gccaucagcauuaaauaua

SEQ ID NO: 279961 - RNA, 19 nt, Homo sapiens
  misc_RNA (1)...(19): siRNA sense strand
gggaggacgugcagaugaa

SEQ ID NO: 279962 - RNA, 19 nt, Homo sapiens
  misc_RNA (1)...(19): siRNA sense strand
gaaggacuguaccggauca

SEQ ID NO: 279963 - RNA, 19 nt, Homo sapiens
  misc_RNA (1)...(19): siRNA sense strand
caacaucuauccggagaau

SEQ ID NO: 279964 - RNA, 19 nt, Homo sapiens
  misc_RNA (1)...(19): siRNA sense strand
uaaugaaauuggcugguuu

SEQ ID NO: 279965 - RNA, 19 nt, Homo sapiens
  misc_RNA (1)...(19): siRNA sense strand
agaugaagcuggaggaaug

SEQ ID NO: 279966 - RNA, 19 nt, Homo sapiens
  misc_RNA (1)...(19): siRNA sense strand
caaggagggugacaucauc

SEQ ID NO: 279967 - RNA, 19 nt, Homo sapiens
  misc_RNA (1)...(19): siRNA sense strand
gaagaaggacaaacuacau

SEQ ID NO: 279968 - RNA, 19 nt, Homo sapiens
  misc_RNA (1)...(19): siRNA sense strand
ccaacuacguggaggaaga

SEQ ID NO: 279969 - RNA, 19 nt, Homo sapiens
  misc_RNA (1)...(19): siRNA sense strand
gaggagaaguacacugaca

SEQ ID NO: 279970 - RNA, 19 nt, Homo sapiens
  misc_RNA (1)...(19): siRNA sense strand
acaagagaauugaagaaga

SEQ ID NO: 279971 - RNA, 19 nt, Homo sapiens
  misc_RNA (1)...(19): siRNA sense strand
ugcgacagaucaccaauuu

SEQ ID NO: 279972 - RNA, 19 nt, Homo sapiens
  misc_RNA (1)...(19): siRNA sense strand
agaaguggauggagcaguu

SEQ ID NO: 279973 - RNA, 19 nt, Homo sapiens
  misc_RNA (1)...(19): siRNA sense strand
ccuaugaccucaaggacuu

SEQ ID NO: 279974 - RNA, 19 nt, Homo sapiens
  misc_RNA (1)...(19): siRNA sense strand
uaccaggucuucaucaaau

SEQ ID NO: 279975 - RNA, 19 nt, Homo sapiens
  misc_RNA (1)...(19): siRNA sense strand
caggaacuaugaagaagga

SEQ ID NO: 279976 - RNA, 19 nt, Homo sapiens
  misc_RNA (1)...(19): siRNA sense strand
ucaucaagauccuuaacaa

SEQ ID NO: 279977 - RNA, 19 nt, Homo sapiens
  misc_RNA (1)...(19): siRNA sense strand
ucucaaauaucaccuccuu

SEQ ID NO: 279978 - RNA, 19 nt, Homo sapiens
  misc_RNA (1)...(19): siRNA sense strand
gacaucaucaagauccuua

SEQ ID NO: 279979 - RNA, 19 nt, Homo sapiens
  misc_RNA (1)...(19): siRNA sense strand
ggaccugucuguucaucuc

SEQ ID NO: 279980 - RNA, 19 nt, Homo sapiens
  misc_RNA (1)...(19): siRNA sense strand
gaacuaugaagaaggacaa

SEQ ID NO: 279981 - RNA, 19 nt, Homo sapiens
  misc_RNA (1)...(19): siRNA sense strand
ggaaggcgacgagaucuau

SEQ ID NO: 279982 - RNA, 19 nt, Homo sapiens
  misc_RNA (1)...(19): siRNA sense strand
agaacucucuaaaggauug

SEQ ID NO: 279983 - RNA, 19 nt, Homo sapiens
  misc_RNA (1)...(19): siRNA sense strand
cuaaugaaauuggcugguu

SEQ ID NO: 279984 - RNA, 19 nt, Homo sapiens
  misc_RNA (1)...(19): siRNA sense strand
ucgcagggcucaggacaaa

SEQ ID NO: 279985 - RNA, 19 nt, Homo sapiens
  misc_RNA (1)...(19): siRNA sense strand
ugugucagcugcuuaacaa

SEQ ID NO: 279986 - RNA, 19 nt, Homo sapiens
  misc_RNA (1)...(19): siRNA sense strand
gaguguaggugaugaagac

SEQ ID NO: 279987 - RNA, 19 nt, Homo sapiens
  misc_RNA (1)...(19): siRNA sense strand
ggauggagcaguuugagau

SEQ ID NO: 279988 - RNA, 19 nt, Homo sapiens
  misc_RNA (1)...(19): siRNA sense strand
ucaaauacaaggagagguu

SEQ ID NO: 279989 - RNA, 19 nt, Homo sapiens
  misc_RNA (1)...(19): siRNA sense strand
cgcccaagaugacagagua

SEQ ID NO: 279990 - RNA, 19 nt, Homo sapiens
  misc_RNA (1)...(19): siRNA sense strand
gagaauugaagaagaagug

SEQ ID NO: 279991 - RNA, 19 nt, Homo sapiens
  misc_RNA (1)...(19): siRNA sense strand
ucuaaaggauugcuucaag

SEQ ID NO: 279992 - RNA, 19 nt, Homo sapiens
  misc_RNA (1)...(19): siRNA sense strand
ggaggagaguguaggugau

SEQ ID NO: 279993 - RNA, 19 nt, Homo sapiens
  misc_RNA (1)...(19): siRNA sense strand
ggcaugacuuccagauguu

SEQ ID NO: 279994 - RNA, 19 nt, Homo sapiens
  misc_RNA (1)...(19): siRNA sense strand
aagcucuacucaucuguaa

SEQ ID NO: 279995 - RNA, 19 nt, Homo sapiens
  misc_RNA (1)...(19): siRNA sense strand
ccaagaugacagaguauga

SEQ ID NO: 279996 - RNA, 19 nt, Homo sapiens
  misc_RNA (1)...(19): siRNA sense strand
caagauccuuaacaagaag

SEQ ID NO: 279997 - RNA, 19 nt, Homo sapiens
  misc_RNA (1)...(19): siRNA sense strand
ggacaccaccuugcaguuc

SEQ ID NO: 279998 - RNA, 19 nt, Homo sapiens
  misc_RNA (1)...(19): siRNA sense strand
acaaagcucuacucaucug

SEQ ID NO: 279999 - RNA, 19 nt, Homo sapiens
  misc_RNA (1)...(19): siRNA sense strand
cauacucacuuccuaaagg

SEQ ID NO: 280000 - RNA, 19 nt, Homo sapiens
  misc_RNA (1)...(19): siRNA sense strand
cuaaaggauugcuucaagu

SEQ ID NO: 280001 - RNA, 19 nt, Homo sapiens
  misc_RNA (1)...(19): siRNA sense strand
uggagguguuucaggaaua

SEQ ID NO: 280002 - RNA, 19 nt, Homo sapiens
  misc_RNA (1)...(19): siRNA sense strand
ugaaggaugcagcagaauu

SEQ ID NO: 280003 - RNA, 19 nt, Homo sapiens
  misc_RNA (1)...(19): siRNA sense strand
cagaugcugcuuagaggua

SEQ ID NO: 280004 - RNA, 19 nt, Homo sapiens
  misc_RNA (1)...(19): siRNA sense strand
ccaaagcccgcuaugacuu

SEQ ID NO: 280005 - RNA, 19 nt, Homo sapiens
  misc_RNA (1)...(19): siRNA sense strand
ccuuugaccucuucgaugu

SEQ ID NO: 280006 - RNA, 19 nt, Homo sapiens
  misc_RNA (1)...(19): siRNA sense strand
gugggaagcacaaaguauu

SEQ ID NO: 280007 - RNA, 19 nt, Homo sapiens
  misc_RNA (1)...(19): siRNA sense strand
caaggagccugaaaagaga

SEQ ID NO: 280008 - RNA, 19 nt, Homo sapiens
  misc_RNA (1)...(19): siRNA sense strand
gcagcagaauuugccauca

SEQ ID NO: 280009 - RNA, 19 nt, Homo sapiens
  misc_RNA (1)...(19): siRNA sense strand
gggcagaaauacaucuacu

SEQ ID NO: 280010 - RNA, 19 nt, Homo sapiens
  misc_RNA (1)...(19): siRNA sense strand
ugcagcgaguucucaaaua

SEQ ID NO: 280011 - RNA, 19 nt, Homo sapiens
  misc_RNA (1)...(19): siRNA sense strand
gagggugacaucaucaaga

SEQ ID NO: 280012 - RNA, 19 nt, Homo sapiens
  misc_RNA (1)...(19): siRNA sense strand
gcagugggaagcacaaagu

SEQ ID NO: 280013 - RNA, 19 nt, Homo sapiens
  misc_RNA (1)...(19): siRNA sense strand
ucaaauaucaccuccuucu

SEQ ID NO: 280014 - RNA, 19 nt, Homo sapiens
  misc_RNA (1)...(19): siRNA sense strand
gaugacagaguaugacaag

SEQ ID NO: 280015 - RNA, 19 nt, Homo sapiens
  misc_RNA (1)...(19): siRNA sense strand
aauauaacgucgaggucaa

SEQ ID NO: 280016 - RNA, 19 nt, Homo sapiens
  misc_RNA (1)...(19): siRNA sense strand
ggagguguuucaggaauac

SEQ ID NO: 280017 - RNA, 19 nt, Homo sapiens
  misc_RNA (1)...(19): siRNA sense strand
ggccaucuccaacaucuau

SEQ ID NO: 280018 - RNA, 19 nt, Homo sapiens
  misc_RNA (1)...(19): siRNA sense strand
guucauacucacuuccuaa

SEQ ID NO: 280019 - RNA, 19 nt, Homo sapiens
  misc_RNA (1)...(19): siRNA sense strand
caacauugaggaccugcuu

SEQ ID NO: 280020 - RNA, 19 nt, Homo sapiens
  misc_RNA (1)...(19): siRNA sense strand
uaacaagaagggacagcaa

SEQ ID NO: 280021 - RNA, 19 nt, Homo sapiens
  misc_RNA (1)...(19): siRNA sense strand
gaugaggaccuguaugacu

SEQ ID NO: 280022 - RNA, 19 nt, Homo sapiens
  misc_RNA (1)...(19): siRNA sense strand
gaaguggauggagcaguuu

SEQ ID NO: 280023 - RNA, 19 nt, Homo sapiens
  misc_RNA (1)...(19): siRNA sense strand
cggaggagaaguacacuga

SEQ ID NO: 280024 - RNA, 19 nt, Homo sapiens
  misc_RNA (1)...(19): siRNA sense strand
ggaggaugaggaccuguau

SEQ ID NO: 280025 - RNA, 19 nt, Homo sapiens
  misc_RNA (1)...(19): siRNA sense strand
ggaacggcgcuccaagaug

SEQ ID NO: 280026 - RNA, 19 nt, Homo sapiens
  misc_RNA (1)...(19): siRNA sense strand
caagacaagagaauugaag

SEQ ID NO: 280027 - RNA, 19 nt, Homo sapiens
  misc_RNA (1)...(19): siRNA sense strand
cuacguggaggaagauuau

SEQ ID NO: 280028 - RNA, 19 nt, Homo sapiens
  misc_RNA (1)...(19): siRNA sense strand
caaagcccgcuaugacuuc

SEQ ID NO: 280029 - RNA, 19 nt, Homo sapiens
  misc_RNA (1)...(19): siRNA sense strand
ggcagaaauacaucuacua

SEQ ID NO: 280030 - RNA, 19 nt, Homo sapiens
  misc_RNA (1)...(19): siRNA sense strand
gacaagagaauugaagaag

SEQ ID NO: 280031 - RNA, 19 nt, Homo sapiens
  misc_RNA (1)...(19): siRNA sense strand
ggaccugcuucguguucau

SEQ ID NO: 280032 - RNA, 19 nt, Homo sapiens
  misc_RNA (1)...(19): siRNA sense strand
cagcagaauuugccaucag

SEQ ID NO: 280033 - RNA, 19 nt, Homo sapiens
  misc_RNA (1)...(19): siRNA sense strand
ugaagaaggacaaacuaca

SEQ ID NO: 280034 - RNA, 19 nt, Homo sapiens
  misc_RNA (1)...(19): siRNA sense strand
uaugaagaaggacaaacua

SEQ ID NO: 280035 - RNA, 19 nt, Homo sapiens
  misc_RNA (1)...(19): siRNA sense strand
uuccagauguucuccuuug

SEQ ID NO: 280036 - RNA, 19 nt, Homo sapiens
  misc_RNA (1)...(19): siRNA sense strand
ggagaguguaggugaugaa

SEQ ID NO: 280037 - RNA, 19 nt, Homo sapiens
  misc_RNA (1)...(19): siRNA sense strand
ggagaccgagacaacaaga

SEQ ID NO: 280038 - RNA, 19 nt, Homo sapiens
  misc_RNA (1)...(19): siRNA sense strand
gaccucaaggacuuuguaa

SEQ ID NO: 280039 - RNA, 19 nt, Homo sapiens
  misc_RNA (1)...(19): siRNA sense strand
cgacagaucaccaauuucc

SEQ ID NO: 280040 - RNA, 19 nt, Homo sapiens
  misc_RNA (1)...(19): siRNA sense strand
gagggcagaaauacaucua

SEQ ID NO: 280041 - RNA, 19 nt, Homo sapiens
  misc_RNA (1)...(19): siRNA sense strand
gcucaaggagggugacauc

SEQ ID NO: 280042 - RNA, 19 nt, Homo sapiens
  misc_RNA (1)...(19): siRNA sense strand
uaaaggauugcuucaaguc

SEQ ID NO: 280043 - RNA, 19 nt, Homo sapiens
  misc_RNA (1)...(19): siRNA sense strand
cgaggucaagcacauuaaa

SEQ ID NO: 280044 - RNA, 19 nt, Homo sapiens
  misc_RNA (1)...(19): siRNA sense strand
ccacgaaccugcuuacaga

SEQ ID NO: 280045 - RNA, 19 nt, Homo sapiens
  misc_RNA (1)...(19): siRNA sense strand
gaccugcgcuuccucauga

SEQ ID NO: 280046 - RNA, 19 nt, Homo sapiens
  misc_RNA (1)...(19): siRNA sense strand
gcguuuaucuucgcuauca

SEQ ID NO: 280047 - RNA, 19 nt, Homo sapiens
  misc_RNA (1)...(19): siRNA sense strand
caaccgaggcugucgagaa

SEQ ID NO: 280048 - RNA, 19 nt, Homo sapiens
  misc_RNA (1)...(19): siRNA sense strand
aaccgaggcugucgagaaa

SEQ ID NO: 280049 - RNA, 19 nt, Homo sapiens
  misc_RNA (1)...(19): siRNA sense strand
cgagaaaucgcccaacuuc

SEQ ID NO: 280050 - RNA, 19 nt, Homo sapiens
  misc_RNA (1)...(19): siRNA sense strand
ucagaagguuccaucgaau

SEQ ID NO: 280051 - RNA, 19 nt, Homo sapiens
  misc_RNA (1)...(19): siRNA sense strand
caaacagcggcgucugaua

SEQ ID NO: 280052 - RNA, 19 nt, Homo sapiens
  misc_RNA (1)...(19): siRNA sense strand
cucagaagguuccaucgaa

SEQ ID NO: 280053 - RNA, 19 nt, Homo sapiens
  misc_RNA (1)...(19): siRNA sense strand
aaacagcggcgucugauac

SEQ ID NO: 280054 - RNA, 19 nt, Homo sapiens
  misc_RNA (1)...(19): siRNA sense strand
gcaaacagcggcgucugau

SEQ ID NO: 280055 - RNA, 19 nt, Homo sapiens
  misc_RNA (1)...(19): siRNA sense strand
gggcugcagcgacaacauu

SEQ ID NO: 280056 - RNA, 19 nt, Homo sapiens
  misc_RNA (1)...(19): siRNA sense strand
ggaccugcgcuuccucaug

SEQ ID NO: 280057 - RNA, 19 nt, Homo sapiens
  misc_RNA (1)...(19): siRNA sense strand
gcucagaagguuccaucga

SEQ ID NO: 280058 - RNA, 19 nt, Homo sapiens
  misc_RNA (1)...(19): siRNA sense strand
guacugcacgagugucugu

SEQ ID NO: 280059 - RNA, 19 nt, Homo sapiens
  misc_RNA (1)...(19): siRNA sense strand
gcagcgacaacauugacuu

SEQ ID NO: 280060 - RNA, 19 nt, Homo sapiens
  misc_RNA (1)...(19): siRNA sense strand
caagagucugcaacuggua

SEQ ID NO: 280061 - RNA, 19 nt, Homo sapiens
  misc_RNA (1)...(19): siRNA sense strand
cggcguuuaucuucgcuau

SEQ ID NO: 280062 - RNA, 19 nt, Homo sapiens
  misc_RNA (1)...(19): siRNA sense strand
cacgucagcugccgcaacu

SEQ ID NO: 280063 - RNA, 19 nt, Homo sapiens
  misc_RNA (1)...(19): siRNA sense strand
ccaaagcucugaagaaaua

SEQ ID NO: 280064 - RNA, 19 nt, Homo sapiens
  misc_RNA (1)...(19): siRNA sense strand
uagagaagcuuguaaauga

SEQ ID NO: 280065 - RNA, 19 nt, Homo sapiens
  misc_RNA (1)...(19): siRNA sense strand
ggaaguagaagucuuauuu

SEQ ID NO: 280066 - RNA, 19 nt, Homo sapiens
  misc_RNA (1)...(19): siRNA sense strand
gaaauguucucagugcuua

SEQ ID NO: 280067 - RNA, 19 nt, Homo sapiens
  misc_RNA (1)...(19): siRNA sense strand
gaaaugcuuuaucaccuaa

SEQ ID NO: 280068 - RNA, 19 nt, Homo sapiens
  misc_RNA (1)...(19): siRNA sense strand
gauaugcuccggcuaguua

SEQ ID NO: 280069 - RNA, 19 nt, Homo sapiens
  misc_RNA (1)...(19): siRNA sense strand
ugauacagauuaccacuuu

SEQ ID NO: 280070 - RNA, 19 nt, Homo sapiens
  misc_RNA (1)...(19): siRNA sense strand
caaacaagaugauucucaa

SEQ ID NO: 280071 - RNA, 19 nt, Homo sapiens
  misc_RNA (1)...(19): siRNA sense strand
gcaacgacacaaacuauaa

SEQ ID NO: 280072 - RNA, 19 nt, Homo sapiens
  misc_RNA (1)...(19): siRNA sense strand
gaaguuccuugaaagaaau

SEQ ID NO: 280073 - RNA, 19 nt, Homo sapiens
  misc_RNA (1)...(19): siRNA sense strand
gaaauagaaccaaaucugu

SEQ ID NO: 280074 - RNA, 19 nt, Homo sapiens
  misc_RNA (1)...(19): siRNA sense strand
gaaaguauguuuuguaguc

SEQ ID NO: 280075 - RNA, 19 nt, Homo sapiens
  misc_RNA (1)...(19): siRNA sense strand
gagcacagacuaucccaaa

SEQ ID NO: 280076 - RNA, 19 nt, Homo sapiens
  misc_RNA (1)...(19): siRNA sense strand
agaaguuccuugaaagaaa

SEQ ID NO: 280077 - RNA, 19 nt, Homo sapiens
  misc_RNA (1)...(19): siRNA sense strand
acacuuuacucacuagaaa

SEQ ID NO: 280078 - RNA, 19 nt, Homo sapiens
  misc_RNA (1)...(19): siRNA sense strand
gauguauacuucccaaauc

SEQ ID NO: 280079 - RNA, 19 nt, Homo sapiens
  misc_RNA (1)...(19): siRNA sense strand
gguagaaguuccuugaaag

SEQ ID NO: 280080 - RNA, 19 nt, Homo sapiens
  misc_RNA (1)...(19): siRNA sense strand
ccacuuacuucuuacacuu

SEQ ID NO: 280081 - RNA, 19 nt, Homo sapiens
  misc_RNA (1)...(19): siRNA sense strand
agaaaugcuuuaucaccua

SEQ ID NO: 280082 - RNA, 19 nt, Homo sapiens
  misc_RNA (1)...(19): siRNA sense strand
ucccaaagcucugaagaaa

SEQ ID NO: 280083 - RNA, 19 nt, Homo sapiens
  misc_RNA (1)...(19): siRNA sense strand
caagaugauucucaaagca

SEQ ID NO: 280084 - RNA, 19 nt, Homo sapiens
  misc_RNA (1)...(19): siRNA sense strand
ucaaagcagcaaccaauuu

SEQ ID NO: 280085 - RNA, 19 nt, Homo sapiens
  misc_RNA (1)...(19): siRNA sense strand
ccuaacagcacgauguaua

SEQ ID NO: 280086 - RNA, 19 nt, Homo sapiens
  misc_RNA (1)...(19): siRNA sense strand
cagauuaccacuuugauau

SEQ ID NO: 280087 - RNA, 19 nt, Homo sapiens
  misc_RNA (1)...(19): siRNA sense strand
gaagguggccuggaaguag

SEQ ID NO: 280088 - RNA, 19 nt, Homo sapiens
  misc_RNA (1)...(19): siRNA sense strand
uggauagccugucagcuuu

SEQ ID NO: 280089 - RNA, 19 nt, Homo sapiens
  misc_RNA (1)...(19): siRNA sense strand
ggaaauguucucagugcuu

SEQ ID NO: 280090 - RNA, 19 nt, Homo sapiens
  misc_RNA (1)...(19): siRNA sense strand
gcauggugauauucuugaa

SEQ ID NO: 280091 - RNA, 19 nt, Homo sapiens
  misc_RNA (1)...(19): siRNA sense strand
ggauagaccgcgucaaugg

SEQ ID NO: 280092 - RNA, 19 nt, Homo sapiens
  misc_RNA (1)...(19): siRNA sense strand
guagaaguuccuugaaaga

SEQ ID NO: 280093 - RNA, 19 nt, Homo sapiens
  misc_RNA (1)...(19): siRNA sense strand
cacaaacuauaaugcagaa

SEQ ID NO: 280094 - RNA, 19 nt, Homo sapiens
  misc_RNA (1)...(19): siRNA sense strand
caacgacacaaacuauaau

SEQ ID NO: 280095 - RNA, 19 nt, Homo sapiens
  misc_RNA (1)...(19): siRNA sense strand
ccaaacaagaugauucuca

SEQ ID NO: 280096 - RNA, 19 nt, Homo sapiens
  misc_RNA (1)...(19): siRNA sense strand
ccuggaaguagaagucuua

SEQ ID NO: 280097 - RNA, 19 nt, Homo sapiens
  misc_RNA (1)...(19): siRNA sense strand
gaaagccucgagcucauca

SEQ ID NO: 280098 - RNA, 19 nt, Homo sapiens
  misc_RNA (1)...(19): siRNA sense strand
acagauuaccacuuugaua

SEQ ID NO: 280099 - RNA, 19 nt, Homo sapiens
  misc_RNA (1)...(19): siRNA sense strand
gauacagauuaccacuuug

SEQ ID NO: 280100 - RNA, 19 nt, Homo sapiens
  misc_RNA (1)...(19): siRNA sense strand
cagaaagccucgagcucau

SEQ ID NO: 280101 - RNA, 19 nt, Homo sapiens
  misc_RNA (1)...(19): siRNA sense strand
agguagaaguuccuugaaa

SEQ ID NO: 280102 - RNA, 19 nt, Homo sapiens
  misc_RNA (1)...(19): siRNA sense strand
acagcacgauguauacuuc

SEQ ID NO: 280103 - RNA, 19 nt, Homo sapiens
  misc_RNA (1)...(19): siRNA sense strand
agaaauagaaccaaaucug

SEQ ID NO: 280104 - RNA, 19 nt, Homo sapiens
  misc_RNA (1)...(19): siRNA sense strand
cgacacaaacuauaaugca

SEQ ID NO: 280105 - RNA, 19 nt, Homo sapiens
  misc_RNA (1)...(19): siRNA sense strand
caaacuauaaugcagaaag

SEQ ID NO: 280106 - RNA, 19 nt, Homo sapiens
  misc_RNA (1)...(19): siRNA sense strand
gaaagugggguugaauuuu

SEQ ID NO: 280107 - RNA, 19 nt, Homo sapiens
  misc_RNA (1)...(19): siRNA sense strand
gauuaccacuuugauaugc

SEQ ID NO: 280108 - RNA, 19 nt, Homo sapiens
  misc_RNA (1)...(19): siRNA sense strand
aaagugggguugaauuuug

SEQ ID NO: 280109 - RNA, 19 nt, Homo sapiens
  misc_RNA (1)...(19): siRNA sense strand
caaagcagcaaccaauuuu

SEQ ID NO: 280110 - RNA, 19 nt, Homo sapiens
  misc_RNA (1)...(19): siRNA sense strand
ucucaaagcagcaaccaau

SEQ ID NO: 280111 - RNA, 19 nt, Homo sapiens
  misc_RNA (1)...(19): siRNA sense strand
agcacccacuuacuucuua

SEQ ID NO: 280112 - RNA, 19 nt, Homo sapiens
  misc_RNA (1)...(19): siRNA sense strand
ccgcgucaauggaggagaa

SEQ ID NO: 280113 - RNA, 19 nt, Homo sapiens
  misc_RNA (1)...(19): siRNA sense strand
gauagaccgcgucaaugga

SEQ ID NO: 280114 - RNA, 19 nt, Homo sapiens
  misc_RNA (1)...(19): siRNA sense strand
ucuguuugcugaugaagau

SEQ ID NO: 280115 - RNA, 19 nt, Homo sapiens
  misc_RNA (1)...(19): siRNA sense strand
gcacagacuaucccaaagc

SEQ ID NO: 280116 - RNA, 19 nt, Homo sapiens
  misc_RNA (1)...(19): siRNA sense strand
caaauacugccugggaaga

SEQ ID NO: 280117 - RNA, 19 nt, Homo sapiens
  misc_RNA (1)...(19): siRNA sense strand
cgauguauacuucccaaau

SEQ ID NO: 280118 - RNA, 19 nt, Homo sapiens
  misc_RNA (1)...(19): siRNA sense strand
aaacuauaaugcagaaagc

SEQ ID NO: 280119 - RNA, 19 nt, Homo sapiens
  misc_RNA (1)...(19): siRNA sense strand
agucuacucugaggaaaug

SEQ ID NO: 280120 - RNA, 19 nt, Homo sapiens
  misc_RNA (1)...(19): siRNA sense strand
uuagagaagcuuguaaaug

SEQ ID NO: 280121 - RNA, 19 nt, Homo sapiens
  misc_RNA (1)...(19): siRNA sense strand
ucauuaguuucacguuguu

SEQ ID NO: 280122 - RNA, 19 nt, Homo sapiens
  misc_RNA (1)...(19): siRNA sense strand
uagaaguuccuugaaagaa

SEQ ID NO: 280123 - RNA, 19 nt, Homo sapiens
  misc_RNA (1)...(19): siRNA sense strand
cagcaaccaauuuucauua

SEQ ID NO: 280124 - RNA, 19 nt, Homo sapiens
  misc_RNA (1)...(19): siRNA sense strand
acaagaugauucucaaagc

SEQ ID NO: 280125 - RNA, 19 nt, Homo sapiens
  misc_RNA (1)...(19): siRNA sense strand
gccucgagcucaucagaag

SEQ ID NO: 280126 - RNA, 19 nt, Homo sapiens
  misc_RNA (1)...(19): siRNA sense strand
ucaccuaacagcacgaugu

SEQ ID NO: 280127 - RNA, 19 nt, Homo sapiens
  misc_RNA (1)...(19): siRNA sense strand
aauacugccugggaagauu

SEQ ID NO: 280128 - RNA, 19 nt, Homo sapiens
  misc_RNA (1)...(19): siRNA sense strand
auacagauuaccacuuuga

SEQ ID NO: 280129 - RNA, 19 nt, Homo sapiens
  misc_RNA (1)...(19): siRNA sense strand
caccuaacagcacgaugua

SEQ ID NO: 280130 - RNA, 19 nt, Homo sapiens
  misc_RNA (1)...(19): siRNA sense strand
guauacuucccaaaucaga

SEQ ID NO: 280131 - RNA, 19 nt, Homo sapiens
  misc_RNA (1)...(19): siRNA sense strand
gcucugaagaaauaaucaa

SEQ ID NO: 280132 - RNA, 19 nt, Homo sapiens
  misc_RNA (1)...(19): siRNA sense strand
aagguggccuggaaguaga

SEQ ID NO: 280133 - RNA, 19 nt, Homo sapiens
  misc_RNA (1)...(19): siRNA sense strand
gcaguaguagcacccacuu

SEQ ID NO: 280134 - RNA, 19 nt, Homo sapiens
  misc_RNA (1)...(19): siRNA sense strand
gcuccuugcccgacuugaa

SEQ ID NO: 280135 - RNA, 19 nt, Homo sapiens
  misc_RNA (1)...(19): siRNA sense strand
gcacccacuuacuucuuac

SEQ ID NO: 280136 - RNA, 19 nt, Homo sapiens
  misc_RNA (1)...(19): siRNA sense strand
gaacuuacaggagucuacu

SEQ ID NO: 280137 - RNA, 19 nt, Homo sapiens
  misc_RNA (1)...(19): siRNA sense strand
ucuuacacuuuacucacua

SEQ ID NO: 280138 - RNA, 19 nt, Homo sapiens
  misc_RNA (1)...(19): siRNA sense strand
uuggauagccugucagcuu

SEQ ID NO: 280139 - RNA, 19 nt, Homo sapiens
  misc_RNA (1)...(19): siRNA sense strand
agaagcuuguaaaugacua

SEQ ID NO: 280140 - RNA, 19 nt, Homo sapiens
  misc_RNA (1)...(19): siRNA sense strand
gugcauggugauauucuug

SEQ ID NO: 280141 - RNA, 19 nt, Homo sapiens
  misc_RNA (1)...(19): siRNA sense strand
ggugaagcacaggauguuu

SEQ ID NO: 280142 - RNA, 19 nt, Homo sapiens
  misc_RNA (1)...(19): siRNA sense strand
gaagcuuguaaaugacuau

SEQ ID NO: 280143 - RNA, 19 nt, Homo sapiens
  misc_RNA (1)...(19): siRNA sense strand
aaaucuguuugcugaugaa

SEQ ID NO: 280144 - RNA, 19 nt, Homo sapiens
  misc_RNA (1)...(19): siRNA sense strand
gacuacagaccuuaucucu

SEQ ID NO: 280145 - RNA, 19 nt, Homo sapiens
  misc_RNA (1)...(19): siRNA sense strand
gcccagaaggaacaggaaa

SEQ ID NO: 280146 - RNA, 19 nt, Homo sapiens
  misc_RNA (1)...(19): siRNA sense strand
agaagguggccuggaagua

SEQ ID NO: 280147 - RNA, 19 nt, Homo sapiens
  misc_RNA (1)...(19): siRNA sense strand
gagaaagugggguugaauu

SEQ ID NO: 280148 - RNA, 19 nt, Homo sapiens
  misc_RNA (1)...(19): siRNA sense strand
aucagaagguggccuggaa

SEQ ID NO: 280149 - RNA, 19 nt, Homo sapiens
  misc_RNA (1)...(19): siRNA sense strand
cuggauagaccgcgucaau

SEQ ID NO: 280150 - RNA, 19 nt, Homo sapiens
  misc_RNA (1)...(19): siRNA sense strand
gcaaccaauuuucauuagu

SEQ ID NO: 280151 - RNA, 19 nt, Homo sapiens
  misc_RNA (1)...(19): siRNA sense strand
gagaagcuuguaaaugacu

SEQ ID NO: 280152 - RNA, 19 nt, Homo sapiens
  misc_RNA (1)...(19): siRNA sense strand
uaagaaagccaaacugaaa

SEQ ID NO: 280153 - RNA, 19 nt, Homo sapiens
  misc_RNA (1)...(19): siRNA sense strand
caggagagcugcuucagaa

SEQ ID NO: 280154 - RNA, 19 nt, Homo sapiens
  misc_RNA (1)...(19): siRNA sense strand
ggaccugaaucccagaauu

SEQ ID NO: 280155 - RNA, 19 nt, Homo sapiens
  misc_RNA (1)...(19): siRNA sense strand
gaccugaaucccagaauua

SEQ ID NO: 280156 - RNA, 19 nt, Homo sapiens
  misc_RNA (1)...(19): siRNA sense strand
gcugagaacggccuccuua

SEQ ID NO: 280157 - RNA, 19 nt, Homo sapiens
  misc_RNA (1)...(19): siRNA sense strand
gcagccagaucuucaucga

SEQ ID NO: 280158 - RNA, 19 nt, Homo sapiens
  misc_RNA (1)...(19): siRNA sense strand
uggagugugugaauaagaa

SEQ ID NO: 280159 - RNA, 19 nt, Homo sapiens
  misc_RNA (1)...(19): siRNA sense strand
aaacugaaaucgguaaagg

SEQ ID NO: 280160 - RNA, 19 nt, Homo sapiens
  misc_RNA (1)...(19): siRNA sense strand
ggaagcagcauccuuacag

SEQ ID NO: 280161 - RNA, 19 nt, Homo sapiens
  misc_RNA (1)...(19): siRNA sense strand
gaccagacuugaagagacu

SEQ ID NO: 280162 - RNA, 19 nt, Homo sapiens
  misc_RNA (1)...(19): siRNA sense strand
gaacggccuccuuacacuu

SEQ ID NO: 280163 - RNA, 19 nt, Homo sapiens
  misc_RNA (1)...(19): siRNA sense strand
cugaaucccagaauuauug

SEQ ID NO: 280164 - RNA, 19 nt, Homo sapiens
  misc_RNA (1)...(19): siRNA sense strand
ugaagagacugaccaaccu

SEQ ID NO: 280165 - RNA, 19 nt, Homo sapiens
  misc_RNA (1)...(19): siRNA sense strand
gcaucaaccaggugacaga

SEQ ID NO: 280166 - RNA, 19 nt, Homo sapiens
  misc_RNA (1)...(19): siRNA sense strand
uuaagaaagccaaacugaa

SEQ ID NO: 280167 - RNA, 19 nt, Homo sapiens
  misc_RNA (1)...(19): siRNA sense strand
gagaacggccuccuuacac

SEQ ID NO: 280168 - RNA, 19 nt, Homo sapiens
  misc_RNA (1)...(19): siRNA sense strand
ugagaacggccuccuuaca

SEQ ID NO: 280169 - RNA, 19 nt, Homo sapiens
  misc_RNA (1)...(19): siRNA sense strand
gccaaacugaaaucgguaa

SEQ ID NO: 280170 - RNA, 19 nt, Homo sapiens
  misc_RNA (1)...(19): siRNA sense strand
gcccugugcugugcaucaa

SEQ ID NO: 280171 - RNA, 19 nt, Homo sapiens
  misc_RNA (1)...(19): siRNA sense strand
ccaggagagcugcuucaga

SEQ ID NO: 280172 - RNA, 19 nt, Homo sapiens
  misc_RNA (1)...(19): siRNA sense strand
gucuggcacuugcugagaa

SEQ ID NO: 280173 - RNA, 19 nt, Homo sapiens
  misc_RNA (1)...(19): siRNA sense strand
caauuaagaaagccaaacu

SEQ ID NO: 280174 - RNA, 19 nt, Homo sapiens
  misc_RNA (1)...(19): siRNA sense strand
auuaagaaagccaaacuga

SEQ ID NO: 280175 - RNA, 19 nt, Homo sapiens
  misc_RNA (1)...(19): siRNA sense strand
uguuggagugugugaauaa

SEQ ID NO: 280176 - RNA, 19 nt, Homo sapiens
  misc_RNA (1)...(19): siRNA sense strand
cgauguggacaccuuguug

SEQ ID NO: 280177 - RNA, 19 nt, Homo sapiens
  misc_RNA (1)...(19): siRNA sense strand
agaacggccuccuuacacu

SEQ ID NO: 280178 - RNA, 19 nt, Homo sapiens
  misc_RNA (1)...(19): siRNA sense strand
gaaaucgguaaaggagguu

SEQ ID NO: 280179 - RNA, 19 nt, Homo sapiens
  misc_RNA (1)...(19): siRNA sense strand
gggaagcagcauccuuaca

SEQ ID NO: 280180 - RNA, 19 nt, Homo sapiens
  misc_RNA (1)...(19): siRNA sense strand
cagaagaccuuucauuuaa

SEQ ID NO: 280181 - RNA, 19 nt, Homo sapiens
  misc_RNA (1)...(19): siRNA sense strand
ggaaggagauggaaaguau

SEQ ID NO: 280182 - RNA, 19 nt, Homo sapiens
  misc_RNA (1)...(19): siRNA sense strand
gaaggacccugaugaaaga

SEQ ID NO: 280183 - RNA, 19 nt, Homo sapiens
  misc_RNA (1)...(19): siRNA sense strand
uaagaagggugaaagauuu

SEQ ID NO: 280184 - RNA, 19 nt, Homo sapiens
  misc_RNA (1)...(19): siRNA sense strand
ggaaaucccucgagaaucu

SEQ ID NO: 280185 - RNA, 19 nt, Homo sapiens
  misc_RNA (1)...(19): siRNA sense strand
guacaagugugagccauua

SEQ ID NO: 280186 - RNA, 19 nt, Homo sapiens
  misc_RNA (1)...(19): siRNA sense strand
ucaagaagcucagauaaug

SEQ ID NO: 280187 - RNA, 19 nt, Homo sapiens
  misc_RNA (1)...(19): siRNA sense strand
gaagaccuuucauuuaaga

SEQ ID NO: 280188 - RNA, 19 nt, Homo sapiens
  misc_RNA (1)...(19): siRNA sense strand
cagaaucccuccaugaauu

SEQ ID NO: 280189 - RNA, 19 nt, Homo sapiens
  misc_RNA (1)...(19): siRNA sense strand
gaugaaagaccaacauuug

SEQ ID NO: 280190 - RNA, 19 nt, Homo sapiens
  misc_RNA (1)...(19): siRNA sense strand
gagaaaagaugcugaaaga

SEQ ID NO: 280191 - RNA, 19 nt, Homo sapiens
  misc_RNA (1)...(19): siRNA sense strand
gcaaagggaacagcaguua

SEQ ID NO: 280192 - RNA, 19 nt, Homo sapiens
  misc_RNA (1)...(19): siRNA sense strand
gaacagcaguuaauuucag

SEQ ID NO: 280193 - RNA, 19 nt, Homo sapiens
  misc_RNA (1)...(19): siRNA sense strand
gaagaaggacccugaugaa

SEQ ID NO: 280194 - RNA, 19 nt, Homo sapiens
  misc_RNA (1)...(19): siRNA sense strand
uauggucgguuuacaauaa

SEQ ID NO: 280195 - RNA, 19 nt, Homo sapiens
  misc_RNA (1)...(19): siRNA sense strand
ugauauggcugcucagauu

SEQ ID NO: 280196 - RNA, 19 nt, Homo sapiens
  misc_RNA (1)...(19): siRNA sense strand
acagaagaccuuucauuua

SEQ ID NO: 280197 - RNA, 19 nt, Homo sapiens
  misc_RNA (1)...(19): siRNA sense strand
ggaagaaggacccugauga

SEQ ID NO: 280198 - RNA, 19 nt, Homo sapiens
  misc_RNA (1)...(19): siRNA sense strand
agaacaugcugaugguuua

SEQ ID NO: 280199 - RNA, 19 nt, Homo sapiens
  misc_RNA (1)...(19): siRNA sense strand
gcaaacagaacuaguaaca

SEQ ID NO: 280200 - RNA, 19 nt, Homo sapiens
  misc_RNA (1)...(19): siRNA sense strand
gaaaagaugcugaaagauu

SEQ ID NO: 280201 - RNA, 19 nt, Homo sapiens
  misc_RNA (1)...(19): siRNA sense strand
ggugaaccgugaaguacua

SEQ ID NO: 280202 - RNA, 19 nt, Homo sapiens
  misc_RNA (1)...(19): siRNA sense strand
ugacaaugguggauacuau

SEQ ID NO: 280203 - RNA, 19 nt, Homo sapiens
  misc_RNA (1)...(19): siRNA sense strand
guucauauccugcugguuu

SEQ ID NO: 280204 - RNA, 19 nt, Homo sapiens
  misc_RNA (1)...(19): siRNA sense strand
ggccuuauaugauuaugaa

SEQ ID NO: 280205 - RNA, 19 nt, Homo sapiens
  misc_RNA (1)...(19): siRNA sense strand
agaaauuggugaaacacua

SEQ ID NO: 280206 - RNA, 19 nt, Homo sapiens
  misc_RNA (1)...(19): siRNA sense strand
gagaaaaucuugugugcaa

SEQ ID NO: 280207 - RNA, 19 nt, Homo sapiens
  misc_RNA (1)...(19): siRNA sense strand
caacuaaaggugcuuauuc

SEQ ID NO: 280208 - RNA, 19 nt, Homo sapiens
  misc_RNA (1)...(19): siRNA sense strand
gaauggaaccacgaaagua

SEQ ID NO: 280209 - RNA, 19 nt, Homo sapiens
  misc_RNA (1)...(19): siRNA sense strand
gagcagaacccacuacagu

SEQ ID NO: 280210 - RNA, 19 nt, Homo sapiens
  misc_RNA (1)...(19): siRNA sense strand
uauaugcuguuguuucuga

SEQ ID NO: 280211 - RNA, 19 nt, Homo sapiens
  misc_RNA (1)...(19): siRNA sense strand
gaaagaccaacauuugaau

SEQ ID NO: 280212 - RNA, 19 nt, Homo sapiens
  misc_RNA (1)...(19): siRNA sense strand
ccucagggcuguccagaau

SEQ ID NO: 280213 - RNA, 19 nt, Homo sapiens
  misc_RNA (1)...(19): siRNA sense strand
gggaacagcaguuaauuuc

SEQ ID NO: 280214 - RNA, 19 nt, Homo sapiens
  misc_RNA (1)...(19): siRNA sense strand
ggagauggaaaguauuuga

SEQ ID NO: 280215 - RNA, 19 nt, Homo sapiens
  misc_RNA (1)...(19): siRNA sense strand
gguuauaucccgagcaauu

SEQ ID NO: 280216 - RNA, 19 nt, Homo sapiens
  misc_RNA (1)...(19): siRNA sense strand
gaacuauauucaccgagau

SEQ ID NO: 280217 - RNA, 19 nt, Homo sapiens
  misc_RNA (1)...(19): siRNA sense strand
gagcacaauuugauacucu

SEQ ID NO: 280218 - RNA, 19 nt, Homo sapiens
  misc_RNA (1)...(19): siRNA sense strand
uuaggaaacuugacaaugg

SEQ ID NO: 280219 - RNA, 19 nt, Homo sapiens
  misc_RNA (1)...(19): siRNA sense strand
gcagaagaaugguauuuug

SEQ ID NO: 280220 - RNA, 19 nt, Homo sapiens
  misc_RNA (1)...(19): siRNA sense strand
ugauaaacuuguuccacua

SEQ ID NO: 280221 - RNA, 19 nt, Homo sapiens
  misc_RNA (1)...(19): siRNA sense strand
gugacaaugugaaacacua

SEQ ID NO: 280222 - RNA, 19 nt, Homo sapiens
  misc_RNA (1)...(19): siRNA sense strand
gaucuucgggcugcuaaua

SEQ ID NO: 280223 - RNA, 19 nt, Homo sapiens
  misc_RNA (1)...(19): siRNA sense strand
ccacgaaaguagcaaucaa

SEQ ID NO: 280224 - RNA, 19 nt, Homo sapiens
  misc_RNA (1)...(19): siRNA sense strand
uugauacucugcagaaauu

SEQ ID NO: 280225 - RNA, 19 nt, Homo sapiens
  misc_RNA (1)...(19): siRNA sense strand
uacagaagaccuuucauuu

SEQ ID NO: 280226 - RNA, 19 nt, Homo sapiens
  misc_RNA (1)...(19): siRNA sense strand
ucugaugucuggucauuug

SEQ ID NO: 280227 - RNA, 19 nt, Homo sapiens
  misc_RNA (1)...(19): siRNA sense strand
ucaacgagguauuuucuua

SEQ ID NO: 280228 - RNA, 19 nt, Homo sapiens
  misc_RNA (1)...(19): siRNA sense strand
ugaagacaaugaauacaca

SEQ ID NO: 280229 - RNA, 19 nt, Homo sapiens
  misc_RNA (1)...(19): siRNA sense strand
caggugguguuacuauauu

SEQ ID NO: 280230 - RNA, 19 nt, Homo sapiens
  misc_RNA (1)...(19): siRNA sense strand
ugaaagaccaacauuugaa

SEQ ID NO: 280231 - RNA, 19 nt, Homo sapiens
  misc_RNA (1)...(19): siRNA sense strand
gacaaugaauacacagcaa

SEQ ID NO: 280232 - RNA, 19 nt, Homo sapiens
  misc_RNA (1)...(19): siRNA sense strand
aauagcagacuuugguuua

SEQ ID NO: 280233 - RNA, 19 nt, Homo sapiens
  misc_RNA (1)...(19): siRNA sense strand
cuacaggaaagaaugguua

SEQ ID NO: 280234 - RNA, 19 nt, Homo sapiens
  misc_RNA (1)...(19): siRNA sense strand
gacaaugguggauacuaua

SEQ ID NO: 280235 - RNA, 19 nt, Homo sapiens
  misc_RNA (1)...(19): siRNA sense strand
gaaccgugaaguacuagaa

SEQ ID NO: 280236 - RNA, 19 nt, Homo sapiens
  misc_RNA (1)...(19): siRNA sense strand
gaaaguagcaaucaaaaca

SEQ ID NO: 280237 - RNA, 19 nt, Homo sapiens
  misc_RNA (1)...(19): siRNA sense strand
ggaauggaaccacgaaagu

SEQ ID NO: 280238 - RNA, 19 nt, Homo sapiens
  misc_RNA (1)...(19): siRNA sense strand
gcgacuagagguuaaacua

SEQ ID NO: 280239 - RNA, 19 nt, Homo sapiens
  misc_RNA (1)...(19): siRNA sense strand
ggugaaacacuacacagaa

SEQ ID NO: 280240 - RNA, 19 nt, Homo sapiens
  misc_RNA (1)...(19): siRNA sense strand
cuacagaagaccuuucauu

SEQ ID NO: 280241 - RNA, 19 nt, Homo sapiens
  misc_RNA (1)...(19): siRNA sense strand
caagguuaauugaagacaa

SEQ ID NO: 280242 - RNA, 19 nt, Homo sapiens
  misc_RNA (1)...(19): siRNA sense strand
uagcaagguuaauugaaga

SEQ ID NO: 280243 - RNA, 19 nt, Homo sapiens
  misc_RNA (1)...(19): siRNA sense strand
cauugucacugaauuuaug

SEQ ID NO: 280244 - RNA, 19 nt, Homo sapiens
  misc_RNA (1)...(19): siRNA sense strand
caagaagcucagauaauga

SEQ ID NO: 280245 - RNA, 19 nt, Homo sapiens
  misc_RNA (1)...(19): siRNA sense strand
aaaguccagccauuaaaua

SEQ ID NO: 280246 - RNA, 19 nt, Homo sapiens
  misc_RNA (1)...(19): siRNA sense strand
cgagugccauauccaggua

SEQ ID NO: 280247 - RNA, 19 nt, Homo sapiens
  misc_RNA (1)...(19): siRNA sense strand
caaagggaacagcaguuaa

SEQ ID NO: 280248 - RNA, 19 nt, Homo sapiens
  misc_RNA (1)...(19): siRNA sense strand
ugaugaaucuguguuggaa

SEQ ID NO: 280249 - RNA, 19 nt, Homo sapiens
  misc_RNA (1)...(19): siRNA sense strand
gauaaacuuguuccacuau

SEQ ID NO: 280250 - RNA, 19 nt, Homo sapiens
  misc_RNA (1)...(19): siRNA sense strand
ucgagaaucuuugcgacua

SEQ ID NO: 280251 - RNA, 19 nt, Homo sapiens
  misc_RNA (1)...(19): siRNA sense strand
cagaacaugcugaugguuu

SEQ ID NO: 280252 - RNA, 19 nt, Homo sapiens
  misc_RNA (1)...(19): siRNA sense strand
ggagauuggugggaagcaa

SEQ ID NO: 280253 - RNA, 19 nt, Homo sapiens
  misc_RNA (1)...(19): siRNA sense strand
aaacaaaaguccagccauu

SEQ ID NO: 280254 - RNA, 19 nt, Homo sapiens
  misc_RNA (1)...(19): siRNA sense strand
uuaagaagggugaaagauu

SEQ ID NO: 280255 - RNA, 19 nt, Homo sapiens
  misc_RNA (1)...(19): siRNA sense strand
gaagcuagaacuacagaag

SEQ ID NO: 280256 - RNA, 19 nt, Homo sapiens
  misc_RNA (1)...(19): siRNA sense strand
guuauaucccgagcaauua

SEQ ID NO: 280257 - RNA, 19 nt, Homo sapiens
  misc_RNA (1)...(19): siRNA sense strand
gaugucuggucauuuggaa

SEQ ID NO: 280258 - RNA, 19 nt, Homo sapiens
  misc_RNA (1)...(19): siRNA sense strand
uuccacagcugguugauau

SEQ ID NO: 280259 - RNA, 19 nt, Homo sapiens
  misc_RNA (1)...(19): siRNA sense strand
gauuaugaagcuagaacua

SEQ ID NO: 280260 - RNA, 19 nt, Homo sapiens
  misc_RNA (1)...(19): siRNA sense strand
caaagggccgagugccaua

SEQ ID NO: 280261 - RNA, 19 nt, Homo sapiens
  misc_RNA (1)...(19): siRNA sense strand
guuaauuucagcagucuuu

SEQ ID NO: 280262 - RNA, 19 nt, Homo sapiens
  misc_RNA (1)...(19): siRNA sense strand
gagaaucuuugcgacuaga

SEQ ID NO: 280263 - RNA, 19 nt, Homo sapiens
  misc_RNA (1)...(19): siRNA sense strand
gagagagugaaacaacuaa

SEQ ID NO: 280264 - RNA, 19 nt, Homo sapiens
  misc_RNA (1)...(19): siRNA sense strand
gaucaaucgcuacaggaaa

SEQ ID NO: 280265 - RNA, 19 nt, Homo sapiens
  misc_RNA (1)...(19): siRNA sense strand
gagauggaaaguauuugaa

SEQ ID NO: 280266 - RNA, 19 nt, Homo sapiens
  misc_RNA (1)...(19): siRNA sense strand
cgagguauuuucuuaguaa

SEQ ID NO: 280267 - RNA, 19 nt, Homo sapiens
  misc_RNA (1)...(19): siRNA sense strand
caggaaagaaugguuauau

SEQ ID NO: 280268 - RNA, 19 nt, Homo sapiens
  misc_RNA (1)...(19): siRNA sense strand
caaauggacagcuccugaa

SEQ ID NO: 280269 - RNA, 19 nt, Homo sapiens
  misc_RNA (1)...(19): siRNA sense strand
uaaacuaggacaaggaugu

SEQ ID NO: 280270 - RNA, 19 nt, Homo sapiens
  misc_RNA (1)...(19): siRNA sense strand
gauaaggggugacaaugug

SEQ ID NO: 280271 - RNA, 19 nt, Homo sapiens
  misc_RNA (1)...(19): siRNA sense strand
ggaaagaaugguuauaucc

SEQ ID NO: 280272 - RNA, 19 nt, Homo sapiens
  misc_RNA (1)...(19): siRNA sense strand
gcacuguauggucgguuua

SEQ ID NO: 280273 - RNA, 19 nt, Homo sapiens
  misc_RNA (1)...(19): siRNA sense strand
aagacaaggugcaaaauuu

SEQ ID NO: 280274 - RNA, 19 nt, Homo sapiens
  misc_RNA (1)...(19): siRNA sense strand
gaaggagauggaaaguauu

SEQ ID NO: 280275 - RNA, 19 nt, Homo sapiens
  misc_RNA (1)...(19): siRNA sense strand
uuuguggccuuauaugauu

SEQ ID NO: 280276 - RNA, 19 nt, Homo sapiens
  misc_RNA (1)...(19): siRNA sense strand
uuagcaagguuaauugaag

SEQ ID NO: 280277 - RNA, 19 nt, Homo sapiens
  misc_RNA (1)...(19): siRNA sense strand
ggaacagcaguuaauuuca

SEQ ID NO: 280278 - RNA, 19 nt, Homo sapiens
  misc_RNA (1)...(19): siRNA sense strand
gaaauuggugaaacacuac

SEQ ID NO: 280279 - RNA, 19 nt, Homo sapiens
  misc_RNA (1)...(19): siRNA sense strand
uaagagagagugaaacaac

SEQ ID NO: 280280 - RNA, 19 nt, Homo sapiens
  misc_RNA (1)...(19): siRNA sense strand
gaaauugacuuuagugaug

SEQ ID NO: 280281 - RNA, 19 nt, Homo sapiens
  misc_RNA (1)...(19): siRNA sense strand
ggaugugccuuauauuaaa

SEQ ID NO: 280282 - RNA, 19 nt, Homo sapiens
  misc_RNA (1)...(19): siRNA sense strand
gcaagucacucccuucuuc

SEQ ID NO: 280283 - RNA, 19 nt, Homo sapiens
  misc_RNA (1)...(19): siRNA sense strand
ggagaagacugccucaaug

SEQ ID NO: 280284 - RNA, 19 nt, Homo sapiens
  misc_RNA (1)...(19): siRNA sense strand
guaaagacuuccuaaacaa

SEQ ID NO: 280285 - RNA, 19 nt, Homo sapiens
  misc_RNA (1)...(19): siRNA sense strand
gaaagaauaaggcagcaua

SEQ ID NO: 280286 - RNA, 19 nt, Homo sapiens
  misc_RNA (1)...(19): siRNA sense strand
cagcggaccuccacaagua

SEQ ID NO: 280287 - RNA, 19 nt, Homo sapiens
  misc_RNA (1)...(19): siRNA sense strand
gaaccaacuccaacaauuu

SEQ ID NO: 280288 - RNA, 19 nt, Homo sapiens
  misc_RNA (1)...(19): siRNA sense strand
gaaaggaaaucucagaaaa

SEQ ID NO: 280289 - RNA, 19 nt, Homo sapiens
  misc_RNA (1)...(19): siRNA sense strand
ggacgcagguuuccuuuca

SEQ ID NO: 280290 - RNA, 19 nt, Homo sapiens
  misc_RNA (1)...(19): siRNA sense strand
ggacaucucagaacuuaaa

SEQ ID NO: 280291 - RNA, 19 nt, Homo sapiens
  misc_RNA (1)...(19): siRNA sense strand
gcaccucacuucuuugaug

SEQ ID NO: 280292 - RNA, 19 nt, Homo sapiens
  misc_RNA (1)...(19): siRNA sense strand
gagcagcgaaccagacuua

SEQ ID NO: 280293 - RNA, 19 nt, Homo sapiens
  misc_RNA (1)...(19): siRNA sense strand
gaucucaccuccucugguu

SEQ ID NO: 280294 - RNA, 19 nt, Homo sapiens
  misc_RNA (1)...(19): siRNA sense strand
caacagugccguucacgua

SEQ ID NO: 280295 - RNA, 19 nt, Homo sapiens
  misc_RNA (1)...(19): siRNA sense strand
uaggacaucucagaacuua

SEQ ID NO: 280296 - RNA, 19 nt, Homo sapiens
  misc_RNA (1)...(19): siRNA sense strand
gagcaaaugucaccaugca

SEQ ID NO: 280297 - RNA, 19 nt, Homo sapiens
  misc_RNA (1)...(19): siRNA sense strand
ggaaaggaaaucucagaaa

SEQ ID NO: 280298 - RNA, 19 nt, Homo sapiens
  misc_RNA (1)...(19): siRNA sense strand
gaaaggagugaguaucuga

SEQ ID NO: 280299 - RNA, 19 nt, Homo sapiens
  misc_RNA (1)...(19): siRNA sense strand
guagaaagcguagagagua

SEQ ID NO: 280300 - RNA, 19 nt, Homo sapiens
  misc_RNA (1)...(19): siRNA sense strand
gcaugucgcuggccucuca

SEQ ID NO: 280301 - RNA, 19 nt, Homo sapiens
  misc_RNA (1)...(19): siRNA sense strand
ugacuuuagugaugacaua

SEQ ID NO: 280302 - RNA, 19 nt, Homo sapiens
  misc_RNA (1)...(19): siRNA sense strand
gucagcagcuugccucuuu

SEQ ID NO: 280303 - RNA, 19 nt, Homo sapiens
  misc_RNA (1)...(19): siRNA sense strand
uuccaagccuuauucauua

SEQ ID NO: 280304 - RNA, 19 nt, Homo sapiens
  misc_RNA (1)...(19): siRNA sense strand
ucacaucacucaagacgau

SEQ ID NO: 280305 - RNA, 19 nt, Homo sapiens
  misc_RNA (1)...(19): siRNA sense strand
uguggcaucucaacucuua

SEQ ID NO: 280306 - RNA, 19 nt, Homo sapiens
  misc_RNA (1)...(19): siRNA sense strand
ggagaacaaugaaagugau

SEQ ID NO: 280307 - RNA, 19 nt, Homo sapiens
  misc_RNA (1)...(19): siRNA sense strand
gaaaucagagggcaaguca

SEQ ID NO: 280308 - RNA, 19 nt, Homo sapiens
  misc_RNA (1)...(19): siRNA sense strand
ucaaugagcgcaacacuga

SEQ ID NO: 280309 - RNA, 19 nt, Homo sapiens
  misc_RNA (1)...(19): siRNA sense strand
gcacaucgcugggugaacu

SEQ ID NO: 280310 - RNA, 19 nt, Homo sapiens
  misc_RNA (1)...(19): siRNA sense strand
acaccuagcugcagacaau

SEQ ID NO: 280311 - RNA, 19 nt, Homo sapiens
  misc_RNA (1)...(19): siRNA sense strand
gcuaaaggaacaaacagua

SEQ ID NO: 280312 - RNA, 19 nt, Homo sapiens
  misc_RNA (1)...(19): siRNA sense strand
gaacugugccgaagaugug

SEQ ID NO: 280313 - RNA, 19 nt, Homo sapiens
  misc_RNA (1)...(19): siRNA sense strand
ccaagcagcuaaaggaaca

SEQ ID NO: 280314 - RNA, 19 nt, Homo sapiens
  misc_RNA (1)...(19): siRNA sense strand
ucgcugauguguacaguaa

SEQ ID NO: 280315 - RNA, 19 nt, Homo sapiens
  misc_RNA (1)...(19): siRNA sense strand
ccacaggaaucgcugaugu

SEQ ID NO: 280316 - RNA, 19 nt, Homo sapiens
  misc_RNA (1)...(19): siRNA sense strand
caucucaacucuuauuaca

SEQ ID NO: 280317 - RNA, 19 nt, Homo sapiens
  misc_RNA (1)...(19): siRNA sense strand
gagaagacugccucaauga

SEQ ID NO: 280318 - RNA, 19 nt, Homo sapiens
  misc_RNA (1)...(19): siRNA sense strand
gcucagggccuuccaccua

SEQ ID NO: 280319 - RNA, 19 nt, Homo sapiens
  misc_RNA (1)...(19): siRNA sense strand
gugaugacauaucuuauuc

SEQ ID NO: 280320 - RNA, 19 nt, Homo sapiens
  misc_RNA (1)...(19): siRNA sense strand
caaugaaagugaugaccaa

SEQ ID NO: 280321 - RNA, 19 nt, Homo sapiens
  misc_RNA (1)...(19): siRNA sense strand
ccagaaaguugccacaagu

SEQ ID NO: 280322 - RNA, 19 nt, Homo sapiens
  misc_RNA (1)...(19): siRNA sense strand
gcucaggcuuccucuagaa

SEQ ID NO: 280323 - RNA, 19 nt, Homo sapiens
  misc_RNA (1)...(19): siRNA sense strand
cugaauaccuugauuugga

SEQ ID NO: 280324 - RNA, 19 nt, Homo sapiens
  misc_RNA (1)...(19): siRNA sense strand
agaaccaacuccaacaauu

SEQ ID NO: 280325 - RNA, 19 nt, Homo sapiens
  misc_RNA (1)...(19): siRNA sense strand
gaaguuaaccaagcagcua

SEQ ID NO: 280326 - RNA, 19 nt, Homo sapiens
  misc_RNA (1)...(19): siRNA sense strand
gaauauggagcaaauguca

SEQ ID NO: 280327 - RNA, 19 nt, Homo sapiens
  misc_RNA (1)...(19): siRNA sense strand
uacagcaccucacuucuuu

SEQ ID NO: 280328 - RNA, 19 nt, Homo sapiens
  misc_RNA (1)...(19): siRNA sense strand
gcacuacgaccucgacaug

SEQ ID NO: 280329 - RNA, 19 nt, Homo sapiens
  misc_RNA (1)...(19): siRNA sense strand
gagcgaaacagaagccauu

SEQ ID NO: 280330 - RNA, 19 nt, Homo sapiens
  misc_RNA (1)...(19): siRNA sense strand
uaaccaagcagcuaaagga

SEQ ID NO: 280331 - RNA, 19 nt, Homo sapiens
  misc_RNA (1)...(19): siRNA sense strand
ggaugaaauugacuuuagu

SEQ ID NO: 280332 - RNA, 19 nt, Homo sapiens
  misc_RNA (1)...(19): siRNA sense strand
gcauacagaccuugguuga

SEQ ID NO: 280333 - RNA, 19 nt, Homo sapiens
  misc_RNA (1)...(19): siRNA sense strand
uuaccaaggugacuucaga

SEQ ID NO: 280334 - RNA, 19 nt, Homo sapiens
  misc_RNA (1)...(19): siRNA sense strand
cagcauggcuaccuuggau

SEQ ID NO: 280335 - RNA, 19 nt, Homo sapiens
  misc_RNA (1)...(19): siRNA sense strand
aguaaagacuuccuaaaca

SEQ ID NO: 280336 - RNA, 19 nt, Homo sapiens
  misc_RNA (1)...(19): siRNA sense strand
uggaugagauucuggaugu

SEQ ID NO: 280337 - RNA, 19 nt, Homo sapiens
  misc_RNA (1)...(19): siRNA sense strand
auacagaccuugguugaau

SEQ ID NO: 280338 - RNA, 19 nt, Homo sapiens
  misc_RNA (1)...(19): siRNA sense strand
gcuagcaaaggaaagaaua

SEQ ID NO: 280339 - RNA, 19 nt, Homo sapiens
  misc_RNA (1)...(19): siRNA sense strand
gccugcaccugaugauuaa

SEQ ID NO: 280340 - RNA, 19 nt, Homo sapiens
  misc_RNA (1)...(19): siRNA sense strand
ccagaacugugccgaagau

SEQ ID NO: 280341 - RNA, 19 nt, Homo sapiens
  misc_RNA (1)...(19): siRNA sense strand
aaaagcaucuugaacauug

SEQ ID NO: 280342 - RNA, 19 nt, Homo sapiens
  misc_RNA (1)...(19): siRNA sense strand
ggagcagccuagccuugaa

SEQ ID NO: 280343 - RNA, 19 nt, Homo sapiens
  misc_RNA (1)...(19): siRNA sense strand
gaccuugguugaauaugga

SEQ ID NO: 280344 - RNA, 19 nt, Homo sapiens
  misc_RNA (1)...(19): siRNA sense strand
gguugaauauggagcaaau

SEQ ID NO: 280345 - RNA, 19 nt, Homo sapiens
  misc_RNA (1)...(19): siRNA sense strand
gaaagucccaguggaaauc

SEQ ID NO: 280346 - RNA, 19 nt, Homo sapiens
  misc_RNA (1)...(19): siRNA sense strand
gaugacauaucuuauucag

SEQ ID NO: 280347 - RNA, 19 nt, Homo sapiens
  misc_RNA (1)...(19): siRNA sense strand
cagcgaaccagacuuagaa

SEQ ID NO: 280348 - RNA, 19 nt, Homo sapiens
  misc_RNA (1)...(19): siRNA sense strand
uggaugaaauugacuuuag

SEQ ID NO: 280349 - RNA, 19 nt, Homo sapiens
  misc_RNA (1)...(19): siRNA sense strand
gaaacacaccuuggcauca

SEQ ID NO: 280350 - RNA, 19 nt, Homo sapiens
  misc_RNA (1)...(19): siRNA sense strand
uagaaagcguagagaguau

SEQ ID NO: 280351 - RNA, 19 nt, Homo sapiens
  misc_RNA (1)...(19): siRNA sense strand
gggagaagacugccucaau

SEQ ID NO: 280352 - RNA, 19 nt, Homo sapiens
  misc_RNA (1)...(19): siRNA sense strand
gcaggucaguggccuaaac

SEQ ID NO: 280353 - RNA, 19 nt, Homo sapiens
  misc_RNA (1)...(19): siRNA sense strand
gaguaaagacuuccuaaac

SEQ ID NO: 280354 - RNA, 19 nt, Homo sapiens
  misc_RNA (1)...(19): siRNA sense strand
ucagucacaucacucaaga

SEQ ID NO: 280355 - RNA, 19 nt, Homo sapiens
  misc_RNA (1)...(19): siRNA sense strand
gaaagccugcaccugauga

SEQ ID NO: 280356 - RNA, 19 nt, Homo sapiens
  misc_RNA (1)...(19): siRNA sense strand
cagaaagccugcaccugau

SEQ ID NO: 280357 - RNA, 19 nt, Homo sapiens
  misc_RNA (1)...(19): siRNA sense strand
ccagaaagucccaguggaa

SEQ ID NO: 280358 - RNA, 19 nt, Homo sapiens
  misc_RNA (1)...(19): siRNA sense strand
gaagaaaggagugaguauc

SEQ ID NO: 280359 - RNA, 19 nt, Homo sapiens
  misc_RNA (1)...(19): siRNA sense strand
cgacauggaugagauucug

SEQ ID NO: 280360 - RNA, 19 nt, Homo sapiens
  misc_RNA (1)...(19): siRNA sense strand
ugggugaacuggagcacua

SEQ ID NO: 280361 - RNA, 19 nt, Homo sapiens
  misc_RNA (1)...(19): siRNA sense strand
cuggaugugccuuauauua

SEQ ID NO: 280362 - RNA, 19 nt, Homo sapiens
  misc_RNA (1)...(19): siRNA sense strand
ccucucaaguggugaaguu

SEQ ID NO: 280363 - RNA, 19 nt, Homo sapiens
  misc_RNA (1)...(19): siRNA sense strand
uaaauguggcucugcauau

SEQ ID NO: 280364 - RNA, 19 nt, Homo sapiens
  misc_RNA (1)...(19): siRNA sense strand
gagcucaucauccaacaug

SEQ ID NO: 280365 - RNA, 19 nt, Homo sapiens
  misc_RNA (1)...(19): siRNA sense strand
aggaaucgcugauguguac

SEQ ID NO: 280366 - RNA, 19 nt, Homo sapiens
  misc_RNA (1)...(19): siRNA sense strand
agacagaugccaagggaaa

SEQ ID NO: 280367 - RNA, 19 nt, Homo sapiens
  misc_RNA (1)...(19): siRNA sense strand
uauccaggcucagggagua

SEQ ID NO: 280368 - RNA, 19 nt, Homo sapiens
  misc_RNA (1)...(19): siRNA sense strand
agacuuagaaucccaguau

SEQ ID NO: 280369 - RNA, 19 nt, Homo sapiens
  misc_RNA (1)...(19): siRNA sense strand
gggcuagacccaaagcaaa

SEQ ID NO: 280370 - RNA, 19 nt, Homo sapiens
  misc_RNA (1)...(19): siRNA sense strand
ucaccugccuccagaaagu

SEQ ID NO: 280371 - RNA, 19 nt, Homo sapiens
  misc_RNA (1)...(19): siRNA sense strand
gcagaaccaacuccaacaa

SEQ ID NO: 280372 - RNA, 19 nt, Homo sapiens
  misc_RNA (1)...(19): siRNA sense strand
uaaaggaacaaacaguaga

SEQ ID NO: 280373 - RNA, 19 nt, Homo sapiens
  misc_RNA (1)...(19): siRNA sense strand
uacagaccuugguugaaua

SEQ ID NO: 280374 - RNA, 19 nt, Homo sapiens
  misc_RNA (1)...(19): siRNA sense strand
aacaagacauuuagugauc

SEQ ID NO: 280375 - RNA, 19 nt, Homo sapiens
  misc_RNA (1)...(19): siRNA sense strand
caccuccucugguuaaaug

SEQ ID NO: 280376 - RNA, 19 nt, Homo sapiens
  misc_RNA (1)...(19): siRNA sense strand
uggaugugccuuauauuaa

SEQ ID NO: 280377 - RNA, 19 nt, Homo sapiens
  misc_RNA (1)...(19): siRNA sense strand
gcagcgaaccagacuuaga

SEQ ID NO: 280378 - RNA, 19 nt, Homo sapiens
  misc_RNA (1)...(19): siRNA sense strand
caggcuuccucuagaaauu

SEQ ID NO: 280379 - RNA, 19 nt, Homo sapiens
  misc_RNA (1)...(19): siRNA sense strand
uaccuuggaugcauacaga

SEQ ID NO: 280380 - RNA, 19 nt, Homo sapiens
  misc_RNA (1)...(19): siRNA sense strand
gagcaggugauaauaaaua

SEQ ID NO: 280381 - RNA, 19 nt, Homo sapiens
  misc_RNA (1)...(19): siRNA sense strand
ggagauuguugauaagguu

SEQ ID NO: 280382 - RNA, 19 nt, Homo sapiens
  misc_RNA (1)...(19): siRNA sense strand
uggaagcugugcaguauaa

SEQ ID NO: 280383 - RNA, 19 nt, Homo sapiens
  misc_RNA (1)...(19): siRNA sense strand
uccaggagauuguugauaa

SEQ ID NO: 280384 - RNA, 19 nt, Homo sapiens
  misc_RNA (1)...(19): siRNA sense strand
aaugaggacuugguacuua

SEQ ID NO: 280385 - RNA, 19 nt, Homo sapiens
  misc_RNA (1)...(19): siRNA sense strand
acgagcaggugauaauaaa

SEQ ID NO: 280386 - RNA, 19 nt, Homo sapiens
  misc_RNA (1)...(19): siRNA sense strand
guacgagcaggugauaaua

SEQ ID NO: 280387 - RNA, 19 nt, Homo sapiens
  misc_RNA (1)...(19): siRNA sense strand
gagauuguugauaagguua

SEQ ID NO: 280388 - RNA, 19 nt, Homo sapiens
  misc_RNA (1)...(19): siRNA sense strand
gguacgagcaggugauaau

SEQ ID NO: 280389 - RNA, 19 nt, Homo sapiens
  misc_RNA (1)...(19): siRNA sense strand
aaccacagcuugaagaaaa

SEQ ID NO: 280390 - RNA, 19 nt, Homo sapiens
  misc_RNA (1)...(19): siRNA sense strand
uaaaccacagcuugaagaa

SEQ ID NO: 280391 - RNA, 19 nt, Homo sapiens
  misc_RNA (1)...(19): siRNA sense strand
aggcuuaucugaggccaaa

SEQ ID NO: 280392 - RNA, 19 nt, Homo sapiens
  misc_RNA (1)...(19): siRNA sense strand
ccaggagauuguugauaag

SEQ ID NO: 280393 - RNA, 19 nt, Homo sapiens
  misc_RNA (1)...(19): siRNA sense strand
caaacccgccacuccagaa

SEQ ID NO: 280394 - RNA, 19 nt, Homo sapiens
  misc_RNA (1)...(19): siRNA sense strand
auuggaagcugugcaguau

SEQ ID NO: 280395 - RNA, 19 nt, Homo sapiens
  misc_RNA (1)...(19): siRNA sense strand
uacgagcaggugauaauaa

SEQ ID NO: 280396 - RNA, 19 nt, Homo sapiens
  misc_RNA (1)...(19): siRNA sense strand
uuaaaccacagcuugaaga

SEQ ID NO: 280397 - RNA, 19 nt, Homo sapiens
  misc_RNA (1)...(19): siRNA sense strand
acuugguacuuacuggaua

SEQ ID NO: 280398 - RNA, 19 nt, Homo sapiens
  misc_RNA (1)...(19): siRNA sense strand
aaaccacagcuugaagaaa

SEQ ID NO: 280399 - RNA, 19 nt, Homo sapiens
  misc_RNA (1)...(19): siRNA sense strand
gaagcugugcaguauaaaa

SEQ ID NO: 280400 - RNA, 19 nt, Homo sapiens
  misc_RNA (1)...(19): siRNA sense strand
aauuggaagcugugcagua

SEQ ID NO: 280401 - RNA, 19 nt, Homo sapiens
  misc_RNA (1)...(19): siRNA sense strand
ggaagaggcuggaggugaa

SEQ ID NO: 280402 - RNA, 19 nt, Homo sapiens
  misc_RNA (1)...(19): siRNA sense strand
gcagacuccucguuguuua

SEQ ID NO: 280403 - RNA, 19 nt, Homo sapiens
  misc_RNA (1)...(19): siRNA sense strand
ggagaaggcugccgucacu

SEQ ID NO: 280404 - RNA, 19 nt, Homo sapiens
  misc_RNA (1)...(19): siRNA sense strand
ccauugcccuggcccauaa

SEQ ID NO: 280405 - RNA, 19 nt, Homo sapiens
  misc_RNA (1)...(19): siRNA sense strand
guaacgugauggugauuau

SEQ ID NO: 280406 - RNA, 19 nt, Homo sapiens
  misc_RNA (1)...(19): siRNA sense strand
gcaagaugaauguggaaga

SEQ ID NO: 280407 - RNA, 19 nt, Homo sapiens
  misc_RNA (1)...(19): siRNA sense strand
caagaugaauguggaagag

SEQ ID NO: 280408 - RNA, 19 nt, Homo sapiens
  misc_RNA (1)...(19): siRNA sense strand
cuuuggagaugcuauuaaa

SEQ ID NO: 280409 - RNA, 19 nt, Homo sapiens
  misc_RNA (1)...(19): siRNA sense strand
gcauguggauccugagaac

SEQ ID NO: 280410 - RNA, 19 nt, Homo sapiens
  misc_RNA (1)...(19): siRNA sense strand
uauucuggcuacucacuuu

SEQ ID NO: 280411 - RNA, 19 nt, Homo sapiens
  misc_RNA (1)...(19): siRNA sense strand
ucacuagccuguggagcaa

SEQ ID NO: 280412 - RNA, 19 nt, Homo sapiens
  misc_RNA (1)...(19): siRNA sense strand
ggugucugcugucgccauu

SEQ ID NO: 280413 - RNA, 19 nt, Homo sapiens
  misc_RNA (1)...(19): siRNA sense strand
ggugcugacuuccuuugga

SEQ ID NO: 280414 - RNA, 19 nt, Homo sapiens
  misc_RNA (1)...(19): siRNA sense strand
gggcagacuccucguuguu

SEQ ID NO: 280415 - RNA, 19 nt, Homo sapiens
  misc_RNA (1)...(19): siRNA sense strand
gguaacgugauggugauua

SEQ ID NO: 280416 - RNA, 19 nt, Homo sapiens
  misc_RNA (1)...(19): siRNA sense strand
gcuccuggguaacgugaug

SEQ ID NO: 280417 - RNA, 19 nt, Homo sapiens
  misc_RNA (1)...(19): siRNA sense strand
acuucaagcuccuggguaa

SEQ ID NO: 280418 - RNA, 19 nt, Homo sapiens
  misc_RNA (1)...(19): siRNA sense strand
ugauuauucuggcuacuca

SEQ ID NO: 280419 - RNA, 19 nt, Homo sapiens
  misc_RNA (1)...(19): siRNA sense strand
aaacauggacaaccucaag

SEQ ID NO: 280420 - RNA, 19 nt, Homo sapiens
  misc_RNA (1)...(19): siRNA sense strand
ggcagacuccucguuguuu

SEQ ID NO: 280421 - RNA, 19 nt, Homo sapiens
  misc_RNA (1)...(19): siRNA sense strand
caaggcccauggcaagaag

SEQ ID NO: 280422 - RNA, 19 nt, Homo sapiens
  misc_RNA (1)...(19): siRNA sense strand
gagcaagaugaauguggaa

SEQ ID NO: 280423 - RNA, 19 nt, Homo sapiens
  misc_RNA (1)...(19): siRNA sense strand
ggcaagaaggugcugacuu

SEQ ID NO: 280424 - RNA, 19 nt, Homo sapiens
  misc_RNA (1)...(19): siRNA sense strand
cuacucacuuuggcaagga

SEQ ID NO: 280425 - RNA, 19 nt, Homo sapiens
  misc_RNA (1)...(19): siRNA sense strand
ucaaggcccauggcaagaa

SEQ ID NO: 280426 - RNA, 19 nt, Homo sapiens
  misc_RNA (1)...(19): siRNA sense strand
uaacgugauggugauuauu

SEQ ID NO: 280427 - RNA, 19 nt, Homo sapiens
  misc_RNA (1)...(19): siRNA sense strand
gaaagcagauaccaucaaa

SEQ ID NO: 280428 - RNA, 19 nt, Homo sapiens
  misc_RNA (1)...(19): siRNA sense strand
caaacuggauggcaaauug

SEQ ID NO: 280429 - RNA, 19 nt, Homo sapiens
  misc_RNA (1)...(19): siRNA sense strand
gaucaaggauauggaaauu

SEQ ID NO: 280430 - RNA, 19 nt, Homo sapiens
  misc_RNA (1)...(19): siRNA sense strand
gaacgaguacagcaauaua

SEQ ID NO: 280431 - RNA, 19 nt, Homo sapiens
  misc_RNA (1)...(19): siRNA sense strand
gcaagaaucagcaggauga

SEQ ID NO: 280432 - RNA, 19 nt, Homo sapiens
  misc_RNA (1)...(19): siRNA sense strand
caaagaugcugcuaguguu

SEQ ID NO: 280433 - RNA, 19 nt, Homo sapiens
  misc_RNA (1)...(19): siRNA sense strand
guacagcaauauagaggaa

SEQ ID NO: 280434 - RNA, 19 nt, Homo sapiens
  misc_RNA (1)...(19): siRNA sense strand
gagcugggauacaagcaaa

SEQ ID NO: 280435 - RNA, 19 nt, Homo sapiens
  misc_RNA (1)...(19): siRNA sense strand
ggauuuggauuugugcuuu

SEQ ID NO: 280436 - RNA, 19 nt, Homo sapiens
  misc_RNA (1)...(19): siRNA sense strand
ucacauauacugaugaaga

SEQ ID NO: 280437 - RNA, 19 nt, Homo sapiens
  misc_RNA (1)...(19): siRNA sense strand
gcagauaccaucaaauugg

SEQ ID NO: 280438 - RNA, 19 nt, Homo sapiens
  misc_RNA (1)...(19): siRNA sense strand
ucaaggauauggaaauuac

SEQ ID NO: 280439 - RNA, 19 nt, Homo sapiens
  misc_RNA (1)...(19): siRNA sense strand
ucaagaggauuuggauuug

SEQ ID NO: 280440 - RNA, 19 nt, Homo sapiens
  misc_RNA (1)...(19): siRNA sense strand
gaaagaacacaaacuggau

SEQ ID NO: 280441 - RNA, 19 nt, Homo sapiens
  misc_RNA (1)...(19): siRNA sense strand
uggaggauaugaacgagua

SEQ ID NO: 280442 - RNA, 19 nt, Homo sapiens
  misc_RNA (1)...(19): siRNA sense strand
aagcagauaccaucaaauu

SEQ ID NO: 280443 - RNA, 19 nt, Homo sapiens
  misc_RNA (1)...(19): siRNA sense strand
gcaaucaccaaaacaauua

SEQ ID NO: 280444 - RNA, 19 nt, Homo sapiens
  misc_RNA (1)...(19): siRNA sense strand
gauggcaaauugauagauc

SEQ ID NO: 280445 - RNA, 19 nt, Homo sapiens
  misc_RNA (1)...(19): siRNA sense strand
acaauuaccagccauacua

SEQ ID NO: 280446 - RNA, 19 nt, Homo sapiens
  misc_RNA (1)...(19): siRNA sense strand
gaacuucccauggauacaa

SEQ ID NO: 280447 - RNA, 19 nt, Homo sapiens
  misc_RNA (1)...(19): siRNA sense strand
aaacuggaaccaaggauuu

SEQ ID NO: 280448 - RNA, 19 nt, Homo sapiens
  misc_RNA (1)...(19): siRNA sense strand
cagaguacuugucucgauu

SEQ ID NO: 280449 - RNA, 19 nt, Homo sapiens
  misc_RNA (1)...(19): siRNA sense strand
gaaagaagaggauuuuguu

SEQ ID NO: 280450 - RNA, 19 nt, Homo sapiens
  misc_RNA (1)...(19): siRNA sense strand
gaucaacgcgagcaagaau

SEQ ID NO: 280451 - RNA, 19 nt, Homo sapiens
  misc_RNA (1)...(19): siRNA sense strand
guauaacuaugggaacuau

SEQ ID NO: 280452 - RNA, 19 nt, Homo sapiens
  misc_RNA (1)...(19): siRNA sense strand
ucaaagaugcugcuagugu

SEQ ID NO: 280453 - RNA, 19 nt, Homo sapiens
  misc_RNA (1)...(19): siRNA sense strand
ggaacugaaagaacacaaa

SEQ ID NO: 280454 - RNA, 19 nt, Homo sapiens
  misc_RNA (1)...(19): siRNA sense strand
ggauugagcccggauacuu

SEQ ID NO: 280455 - RNA, 19 nt, Homo sapiens
  misc_RNA (1)...(19): siRNA sense strand
gagcaagaaucagcaggau

SEQ ID NO: 280456 - RNA, 19 nt, Homo sapiens
  misc_RNA (1)...(19): siRNA sense strand
gaagugugaaaucaaaguu

SEQ ID NO: 280457 - RNA, 19 nt, Homo sapiens
  misc_RNA (1)...(19): siRNA sense strand
gccgacagcuccgucacua

SEQ ID NO: 280458 - RNA, 19 nt, Homo sapiens
  misc_RNA (1)...(19): siRNA sense strand
ugggaagugugaaaucaaa

SEQ ID NO: 280459 - RNA, 19 nt, Homo sapiens
  misc_RNA (1)...(19): siRNA sense strand
caagaggauuuggauuugu

SEQ ID NO: 280460 - RNA, 19 nt, Homo sapiens
  misc_RNA (1)...(19): siRNA sense strand
gcuauggcggauaugauua

SEQ ID NO: 280461 - RNA, 19 nt, Homo sapiens
  misc_RNA (1)...(19): siRNA sense strand
caaauugguucugggaagu

SEQ ID NO: 280462 - RNA, 19 nt, Homo sapiens
  misc_RNA (1)...(19): siRNA sense strand
cgacagcuccgucacuaug

SEQ ID NO: 280463 - RNA, 19 nt, Homo sapiens
  misc_RNA (1)...(19): siRNA sense strand
ggacagggauaugcagacu

SEQ ID NO: 280464 - RNA, 19 nt, Homo sapiens
  misc_RNA (1)...(19): siRNA sense strand
ggaugacgguaaaauguuu

SEQ ID NO: 280465 - RNA, 19 nt, Homo sapiens
  misc_RNA (1)...(19): siRNA sense strand
gaacugaaagaacacaaac

SEQ ID NO: 280466 - RNA, 19 nt, Homo sapiens
  misc_RNA (1)...(19): siRNA sense strand
ucagcaggaugacgguaaa

SEQ ID NO: 280467 - RNA, 19 nt, Homo sapiens
  misc_RNA (1)...(19): siRNA sense strand
acagcaauauagaggaauu

SEQ ID NO: 280468 - RNA, 19 nt, Homo sapiens
  misc_RNA (1)...(19): siRNA sense strand
caauuaccagccauacuaa

SEQ ID NO: 280469 - RNA, 19 nt, Homo sapiens
  misc_RNA (1)...(19): siRNA sense strand
ggcuugagcugggauacaa

SEQ ID NO: 280470 - RNA, 19 nt, Homo sapiens
  misc_RNA (1)...(19): siRNA sense strand
gaucaagaggauuuggauu

SEQ ID NO: 280471 - RNA, 19 nt, Homo sapiens
  misc_RNA (1)...(19): siRNA sense strand
gaguacuugucucgauuug

SEQ ID NO: 280472 - RNA, 19 nt, Homo sapiens
  misc_RNA (1)...(19): siRNA sense strand
caaauugauagaucccaaa

SEQ ID NO: 280473 - RNA, 19 nt, Homo sapiens
  misc_RNA (1)...(19): siRNA sense strand
uuucaaagaugcugcuagu

SEQ ID NO: 280474 - RNA, 19 nt, Homo sapiens
  misc_RNA (1)...(19): siRNA sense strand
gcagcaacagcaacaacaa

SEQ ID NO: 280475 - RNA, 19 nt, Homo sapiens
  misc_RNA (1)...(19): siRNA sense strand
acagaguacuugucucgau

SEQ ID NO: 280476 - RNA, 19 nt, Homo sapiens
  misc_RNA (1)...(19): siRNA sense strand
acagggauaugcagacuac

SEQ ID NO: 280477 - RNA, 19 nt, Homo sapiens
  misc_RNA (1)...(19): siRNA sense strand
cagcaacagcaacaacaaa

SEQ ID NO: 280478 - RNA, 19 nt, Homo sapiens
  misc_RNA (1)...(19): siRNA sense strand
gcacaacccaaagagguau

SEQ ID NO: 280479 - RNA, 19 nt, Homo sapiens
  misc_RNA (1)...(19): siRNA sense strand
ggaagugugaaaucaaagu

SEQ ID NO: 280480 - RNA, 19 nt, Homo sapiens
  misc_RNA (1)...(19): siRNA sense strand
auauugaacuucccaugga

SEQ ID NO: 280481 - RNA, 19 nt, Homo sapiens
  misc_RNA (1)...(19): siRNA sense strand
uaaauccagcuccauacaa

SEQ ID NO: 280482 - RNA, 19 nt, Homo sapiens
  misc_RNA (1)...(19): siRNA sense strand
aagaggauuuggauuugug

SEQ ID NO: 280483 - RNA, 19 nt, Homo sapiens
  misc_RNA (1)...(19): siRNA sense strand
uaugggaacuauggauaug

SEQ ID NO: 280484 - RNA, 19 nt, Homo sapiens
  misc_RNA (1)...(19): siRNA sense strand
gauugagcccggauacuuc

SEQ ID NO: 280485 - RNA, 19 nt, Homo sapiens
  misc_RNA (1)...(19): siRNA sense strand
ggcuauggcggauaugauu

SEQ ID NO: 280486 - RNA, 19 nt, Homo sapiens
  misc_RNA (1)...(19): siRNA sense strand
ugaaaucaaaguugcacaa

SEQ ID NO: 280487 - RNA, 19 nt, Homo sapiens
  misc_RNA (1)...(19): siRNA sense strand
caaaugaaagaagaggauu

SEQ ID NO: 280488 - RNA, 19 nt, Homo sapiens
  misc_RNA (1)...(19): siRNA sense strand
uaaaacagauccagucacu

SEQ ID NO: 280489 - RNA, 19 nt, Homo sapiens
  misc_RNA (1)...(19): siRNA sense strand
uauggcggauaugauuaua

SEQ ID NO: 280490 - RNA, 19 nt, Homo sapiens
  misc_RNA (1)...(19): siRNA sense strand
cacauauacugaugaagag

SEQ ID NO: 280491 - RNA, 19 nt, Homo sapiens
  misc_RNA (1)...(19): siRNA sense strand
gagcccggauacuucugaa

SEQ ID NO: 280492 - RNA, 19 nt, Homo sapiens
  misc_RNA (1)...(19): siRNA sense strand
ugggagaucaagaggauuu

SEQ ID NO: 280493 - RNA, 19 nt, Homo sapiens
  misc_RNA (1)...(19): siRNA sense strand
gauaagguuuuggaacuga

SEQ ID NO: 280494 - RNA, 19 nt, Homo sapiens
  misc_RNA (1)...(19): siRNA sense strand
gagaucaagaggauuugga

SEQ ID NO: 280495 - RNA, 19 nt, Homo sapiens
  misc_RNA (1)...(19): siRNA sense strand
acacaaacuggauggcaaa

SEQ ID NO: 280496 - RNA, 19 nt, Homo sapiens
  misc_RNA (1)...(19): siRNA sense strand
aaauccagcuccauacaac

SEQ ID NO: 280497 - RNA, 19 nt, Homo sapiens
  misc_RNA (1)...(19): siRNA sense strand
aaacuggauggcaaauuga

SEQ ID NO: 280498 - RNA, 19 nt, Homo sapiens
  misc_RNA (1)...(19): siRNA sense strand
ugggaacuauggauaugga

SEQ ID NO: 280499 - RNA, 19 nt, Homo sapiens
  misc_RNA (1)...(19): siRNA sense strand
gguauaacuaugggaacua

SEQ ID NO: 280500 - RNA, 19 nt, Homo sapiens
  misc_RNA (1)...(19): siRNA sense strand
ggagagauugaaaauauug

SEQ ID NO: 280501 - RNA, 19 nt, Homo sapiens
  misc_RNA (1)...(19): siRNA sense strand
gccaacagagcacuuaugg

SEQ ID NO: 280502 - RNA, 19 nt, Homo sapiens
  misc_RNA (1)...(19): siRNA sense strand
uggcggauaugauuauacu

SEQ ID NO: 280503 - RNA, 19 nt, Homo sapiens
  misc_RNA (1)...(19): siRNA sense strand
ucugggaagugugaaauca

SEQ ID NO: 280504 - RNA, 19 nt, Homo sapiens
  misc_RNA (1)...(19): siRNA sense strand
acugggagaucaagaggau

SEQ ID NO: 280505 - RNA, 19 nt, Homo sapiens
  misc_RNA (1)...(19): siRNA sense strand
ucaacgcgagcaagaauca

SEQ ID NO: 280506 - RNA, 19 nt, Homo sapiens
  misc_RNA (1)...(19): siRNA sense strand
cgcccaggcuuucccaugu

SEQ ID NO: 280507 - RNA, 19 nt, Homo sapiens
  misc_RNA (1)...(19): siRNA sense strand
gcccaggcuuucccaugug

SEQ ID NO: 280508 - RNA, 19 nt, Homo sapiens
  misc_RNA (1)...(19): siRNA sense strand
aucaagaggauuuggauuu

SEQ ID NO: 280509 - RNA, 19 nt, Homo sapiens
  misc_RNA (1)...(19): siRNA sense strand
caacccaaagagguauaua

SEQ ID NO: 280510 - RNA, 19 nt, Homo sapiens
  misc_RNA (1)...(19): siRNA sense strand
augaacgaguacagcaaua

SEQ ID NO: 280511 - RNA, 19 nt, Homo sapiens
  misc_RNA (1)...(19): siRNA sense strand
aaagaugcugcuaguguug

SEQ ID NO: 280512 - RNA, 19 nt, Homo sapiens
  misc_RNA (1)...(19): siRNA sense strand
ccuccgcucccgcuacuuu

SEQ ID NO: 280513 - RNA, 19 nt, Homo sapiens
  misc_RNA (1)...(19): siRNA sense strand
ggguauaacuaugggaacu

SEQ ID NO: 280514 - RNA, 19 nt, Homo sapiens
  misc_RNA (1)...(19): siRNA sense strand
ucacuauggaggauaugaa

SEQ ID NO: 280515 - RNA, 19 nt, Homo sapiens
  misc_RNA (1)...(19): siRNA sense strand
uaguggcuauggcggauau

SEQ ID NO: 280516 - RNA, 19 nt, Homo sapiens
  misc_RNA (1)...(19): siRNA sense strand
gcugguggacgagguggua

SEQ ID NO: 280517 - RNA, 19 nt, Homo sapiens
  misc_RNA (1)...(19): siRNA sense strand
agacuacaguggccaacag

SEQ ID NO: 280518 - RNA, 19 nt, Homo sapiens
  misc_RNA (1)...(19): siRNA sense strand
gggauaugcagacuacagu

SEQ ID NO: 280519 - RNA, 19 nt, Homo sapiens
  misc_RNA (1)...(19): siRNA sense strand
acuaugggaacuauggaua

SEQ ID NO: 280520 - RNA, 19 nt, Homo sapiens
  misc_RNA (1)...(19): siRNA sense strand
ugaacgaguacagcaauau

SEQ ID NO: 280521 - RNA, 19 nt, Homo sapiens
  misc_RNA (1)...(19): siRNA sense strand
guagacugcacaauuaaaa

SEQ ID NO: 280522 - RNA, 19 nt, Homo sapiens
  misc_RNA (1)...(19): siRNA sense strand
uaugaucaaggauauggaa

SEQ ID NO: 280523 - RNA, 19 nt, Homo sapiens
  misc_RNA (1)...(19): siRNA sense strand
agaaagcagauaccaucaa

SEQ ID NO: 280524 - RNA, 19 nt, Homo sapiens
  misc_RNA (1)...(19): siRNA sense strand
acaaaugaaagaagaggau

SEQ ID NO: 280525 - RNA, 19 nt, Homo sapiens
  misc_RNA (1)...(19): siRNA sense strand
cugcuaguguugauaaggu

SEQ ID NO: 280526 - RNA, 19 nt, Homo sapiens
  misc_RNA (1)...(19): siRNA sense strand
gcuaguguugauaagguuu

SEQ ID NO: 280527 - RNA, 19 nt, Homo sapiens
  misc_RNA (1)...(19): siRNA sense strand
gaaagcagauaccaucaaa

SEQ ID NO: 280528 - RNA, 19 nt, Homo sapiens
  misc_RNA (1)...(19): siRNA sense strand
caaacuggauggcaaauug

SEQ ID NO: 280529 - RNA, 19 nt, Homo sapiens
  misc_RNA (1)...(19): siRNA sense strand
gaucaaggauauggaaauu

SEQ ID NO: 280530 - RNA, 19 nt, Homo sapiens
  misc_RNA (1)...(19): siRNA sense strand
gaacgaguacagcaauaua

SEQ ID NO: 280531 - RNA, 19 nt, Homo sapiens
  misc_RNA (1)...(19): siRNA sense strand
gcaagaaucagcaggauga

SEQ ID NO: 280532 - RNA, 19 nt, Homo sapiens
  misc_RNA (1)...(19): siRNA sense strand
caaagaugcugcuaguguu

SEQ ID NO: 280533 - RNA, 19 nt, Homo sapiens
  misc_RNA (1)...(19): siRNA sense strand
guacagcaauauagaggaa

SEQ ID NO: 280534 - RNA, 19 nt, Homo sapiens
  misc_RNA (1)...(19): siRNA sense strand
gagcugggauacaagcaaa

SEQ ID NO: 280535 - RNA, 19 nt, Homo sapiens
  misc_RNA (1)...(19): siRNA sense strand
ggauuuggauuugugcuuu

SEQ ID NO: 280536 - RNA, 19 nt, Homo sapiens
  misc_RNA (1)...(19): siRNA sense strand
ucacauauacugaugaaga

SEQ ID NO: 280537 - RNA, 19 nt, Homo sapiens
  misc_RNA (1)...(19): siRNA sense strand
gcagauaccaucaaauugg

SEQ ID NO: 280538 - RNA, 19 nt, Homo sapiens
  misc_RNA (1)...(19): siRNA sense strand
ucaaggauauggaaauuac

SEQ ID NO: 280539 - RNA, 19 nt, Homo sapiens
  misc_RNA (1)...(19): siRNA sense strand
ucaagaggauuuggauuug

SEQ ID NO: 280540 - RNA, 19 nt, Homo sapiens
  misc_RNA (1)...(19): siRNA sense strand
gaaagaacacaaacuggau

SEQ ID NO: 280541 - RNA, 19 nt, Homo sapiens
  misc_RNA (1)...(19): siRNA sense strand
uggaggauaugaacgagua

SEQ ID NO: 280542 - RNA, 19 nt, Homo sapiens
  misc_RNA (1)...(19): siRNA sense strand
aagcagauaccaucaaauu

SEQ ID NO: 280543 - RNA, 19 nt, Homo sapiens
  misc_RNA (1)...(19): siRNA sense strand
gcaaucaccaaaacaauua

SEQ ID NO: 280544 - RNA, 19 nt, Homo sapiens
  misc_RNA (1)...(19): siRNA sense strand
gauggcaaauugauagauc

SEQ ID NO: 280545 - RNA, 19 nt, Homo sapiens
  misc_RNA (1)...(19): siRNA sense strand
acaauuaccagccauacua

SEQ ID NO: 280546 - RNA, 19 nt, Homo sapiens
  misc_RNA (1)...(19): siRNA sense strand
gaacuucccauggauacaa

SEQ ID NO: 280547 - RNA, 19 nt, Homo sapiens
  misc_RNA (1)...(19): siRNA sense strand
aaacuggaaccaaggauuu

SEQ ID NO: 280548 - RNA, 19 nt, Homo sapiens
  misc_RNA (1)...(19): siRNA sense strand
cagaguacuugucucgauu

SEQ ID NO: 280549 - RNA, 19 nt, Homo sapiens
  misc_RNA (1)...(19): siRNA sense strand
gaaagaagaggauuuuguu

SEQ ID NO: 280550 - RNA, 19 nt, Homo sapiens
  misc_RNA (1)...(19): siRNA sense strand
gaucaacgcgagcaagaau

SEQ ID NO: 280551 - RNA, 19 nt, Homo sapiens
  misc_RNA (1)...(19): siRNA sense strand
guauaacuaugggaacuau

SEQ ID NO: 280552 - RNA, 19 nt, Homo sapiens
  misc_RNA (1)...(19): siRNA sense strand
ucaaagaugcugcuagugu

SEQ ID NO: 280553 - RNA, 19 nt, Homo sapiens
  misc_RNA (1)...(19): siRNA sense strand
ggaacugaaagaacacaaa

SEQ ID NO: 280554 - RNA, 19 nt, Homo sapiens
  misc_RNA (1)...(19): siRNA sense strand
ggauugagcccggauacuu

SEQ ID NO: 280555 - RNA, 19 nt, Homo sapiens
  misc_RNA (1)...(19): siRNA sense strand
gagcaagaaucagcaggau

SEQ ID NO: 280556 - RNA, 19 nt, Homo sapiens
  misc_RNA (1)...(19): siRNA sense strand
gaagugugaaaucaaaguu

SEQ ID NO: 280557 - RNA, 19 nt, Homo sapiens
  misc_RNA (1)...(19): siRNA sense strand
gccgacagcuccgucacua

SEQ ID NO: 280558 - RNA, 19 nt, Homo sapiens
  misc_RNA (1)...(19): siRNA sense strand
ugggaagugugaaaucaaa

SEQ ID NO: 280559 - RNA, 19 nt, Homo sapiens
  misc_RNA (1)...(19): siRNA sense strand
caagaggauuuggauuugu

SEQ ID NO: 280560 - RNA, 19 nt, Homo sapiens
  misc_RNA (1)...(19): siRNA sense strand
gcuauggcggauaugauua

SEQ ID NO: 280561 - RNA, 19 nt, Homo sapiens
  misc_RNA (1)...(19): siRNA sense strand
caaauugguucugggaagu

SEQ ID NO: 280562 - RNA, 19 nt, Homo sapiens
  misc_RNA (1)...(19): siRNA sense strand
cgacagcuccgucacuaug

SEQ ID NO: 280563 - RNA, 19 nt, Homo sapiens
  misc_RNA (1)...(19): siRNA sense strand
ggacagggauaugcagacu

SEQ ID NO: 280564 - RNA, 19 nt, Homo sapiens
  misc_RNA (1)...(19): siRNA sense strand
ggaugacgguaaaauguuu

SEQ ID NO: 280565 - RNA, 19 nt, Homo sapiens
  misc_RNA (1)...(19): siRNA sense strand
gaacugaaagaacacaaac

SEQ ID NO: 280566 - RNA, 19 nt, Homo sapiens
  misc_RNA (1)...(19): siRNA sense strand
ucagcaggaugacgguaaa

SEQ ID NO: 280567 - RNA, 19 nt, Homo sapiens
  misc_RNA (1)...(19): siRNA sense strand
acagcaauauagaggaauu

SEQ ID NO: 280568 - RNA, 19 nt, Homo sapiens
  misc_RNA (1)...(19): siRNA sense strand
caauuaccagccauacuaa

SEQ ID NO: 280569 - RNA, 19 nt, Homo sapiens
  misc_RNA (1)...(19): siRNA sense strand
ggcuugagcugggauacaa

SEQ ID NO: 280570 - RNA, 19 nt, Homo sapiens
  misc_RNA (1)...(19): siRNA sense strand
gaucaagaggauuuggauu

SEQ ID NO: 280571 - RNA, 19 nt, Homo sapiens
  misc_RNA (1)...(19): siRNA sense strand
gaguacuugucucgauuug

SEQ ID NO: 280572 - RNA, 19 nt, Homo sapiens
  misc_RNA (1)...(19): siRNA sense strand
caaauugauagaucccaaa

SEQ ID NO: 280573 - RNA, 19 nt, Homo sapiens
  misc_RNA (1)...(19): siRNA sense strand
uuucaaagaugcugcuagu

SEQ ID NO: 280574 - RNA, 19 nt, Homo sapiens
  misc_RNA (1)...(19): siRNA sense strand
gcagcaacagcaacaacaa

SEQ ID NO: 280575 - RNA, 19 nt, Homo sapiens
  misc_RNA (1)...(19): siRNA sense strand
acagaguacuugucucgau

SEQ ID NO: 280576 - RNA, 19 nt, Homo sapiens
  misc_RNA (1)...(19): siRNA sense strand
acagggauaugcagacuac

SEQ ID NO: 280577 - RNA, 19 nt, Homo sapiens
  misc_RNA (1)...(19): siRNA sense strand
cagcaacagcaacaacaaa

SEQ ID NO: 280578 - RNA, 19 nt, Homo sapiens
  misc_RNA (1)...(19): siRNA sense strand
gcacaacccaaagagguau

SEQ ID NO: 280579 - RNA, 19 nt, Homo sapiens
  misc_RNA (1)...(19): siRNA sense strand
ggaagugugaaaucaaagu

SEQ ID NO: 280580 - RNA, 19 nt, Homo sapiens
  misc_RNA (1)...(19): siRNA sense strand
auauugaacuucccaugga

SEQ ID NO: 280581 - RNA, 19 nt, Homo sapiens
  misc_RNA (1)...(19): siRNA sense strand
uaaauccagcuccauacaa

SEQ ID NO: 280582 - RNA, 19 nt, Homo sapiens
  misc_RNA (1)...(19): siRNA sense strand
aagaggauuuggauuugug

SEQ ID NO: 280583 - RNA, 19 nt, Homo sapiens
  misc_RNA (1)...(19): siRNA sense strand
uaugggaacuauggauaug

SEQ ID NO: 280584 - RNA, 19 nt, Homo sapiens
  misc_RNA (1)...(19): siRNA sense strand
gauugagcccggauacuuc

SEQ ID NO: 280585 - RNA, 19 nt, Homo sapiens
  misc_RNA (1)...(19): siRNA sense strand
ggcuauggcggauaugauu

SEQ ID NO: 280586 - RNA, 19 nt, Homo sapiens
  misc_RNA (1)...(19): siRNA sense strand
ugaaaucaaaguugcacaa

SEQ ID NO: 280587 - RNA, 19 nt, Homo sapiens
  misc_RNA (1)...(19): siRNA sense strand
caaaugaaagaagaggauu

SEQ ID NO: 280588 - RNA, 19 nt, Homo sapiens
  misc_RNA (1)...(19): siRNA sense strand
uaaaacagauccagucacu

SEQ ID NO: 280589 - RNA, 19 nt, Homo sapiens
  misc_RNA (1)...(19): siRNA sense strand
uauggcggauaugauuaua

SEQ ID NO: 280590 - RNA, 19 nt, Homo sapiens
  misc_RNA (1)...(19): siRNA sense strand
cacauauacugaugaagag

SEQ ID NO: 280591 - RNA, 19 nt, Homo sapiens
  misc_RNA (1)...(19): siRNA sense strand
gagcccggauacuucugaa

SEQ ID NO: 280592 - RNA, 19 nt, Homo sapiens
  misc_RNA (1)...(19): siRNA sense strand
ugggagaucaagaggauuu

SEQ ID NO: 280593 - RNA, 19 nt, Homo sapiens
  misc_RNA (1)...(19): siRNA sense strand
gauaagguuuuggaacuga

SEQ ID NO: 280594 - RNA, 19 nt, Homo sapiens
  misc_RNA (1)...(19): siRNA sense strand
gagaucaagaggauuugga

SEQ ID NO: 280595 - RNA, 19 nt, Homo sapiens
  misc_RNA (1)...(19): siRNA sense strand
acacaaacuggauggcaaa

SEQ ID NO: 280596 - RNA, 19 nt, Homo sapiens
  misc_RNA (1)...(19): siRNA sense strand
aaauccagcuccauacaac

SEQ ID NO: 280597 - RNA, 19 nt, Homo sapiens
  misc_RNA (1)...(19): siRNA sense strand
aaacuggauggcaaauuga

SEQ ID NO: 280598 - RNA, 19 nt, Homo sapiens
  misc_RNA (1)...(19): siRNA sense strand
ugggaacuauggauaugga

SEQ ID NO: 280599 - RNA, 19 nt, Homo sapiens
  misc_RNA (1)...(19): siRNA sense strand
gguauaacuaugggaacua

SEQ ID NO: 280600 - RNA, 19 nt, Homo sapiens
  misc_RNA (1)...(19): siRNA sense strand
ggagagauugaaaauauug

SEQ ID NO: 280601 - RNA, 19 nt, Homo sapiens
  misc_RNA (1)...(19): siRNA sense strand
gccaacagagcacuuaugg

SEQ ID NO: 280602 - RNA, 19 nt, Homo sapiens
  misc_RNA (1)...(19): siRNA sense strand
uggcggauaugauuauacu

SEQ ID NO: 280603 - RNA, 19 nt, Homo sapiens
  misc_RNA (1)...(19): siRNA sense strand
ucugggaagugugaaauca

SEQ ID NO: 280604 - RNA, 19 nt, Homo sapiens
  misc_RNA (1)...(19): siRNA sense strand
acugggagaucaagaggau

SEQ ID NO: 280605 - RNA, 19 nt, Homo sapiens
  misc_RNA (1)...(19): siRNA sense strand
ucaacgcgagcaagaauca

SEQ ID NO: 280606 - RNA, 19 nt, Homo sapiens
  misc_RNA (1)...(19): siRNA sense strand
cgcccaggcuuucccaugu

SEQ ID NO: 280607 - RNA, 19 nt, Homo sapiens
  misc_RNA (1)...(19): siRNA sense strand
gcccaggcuuucccaugug

SEQ ID NO: 280608 - RNA, 19 nt, Homo sapiens
  misc_RNA (1)...(19): siRNA sense strand
aucaagaggauuuggauuu

SEQ ID NO: 280609 - RNA, 19 nt, Homo sapiens
  misc_RNA (1)...(19): siRNA sense strand
caacccaaagagguauaua

SEQ ID NO: 280610 - RNA, 19 nt, Homo sapiens
  misc_RNA (1)...(19): siRNA sense strand
augaacgaguacagcaaua

SEQ ID NO: 280611 - RNA, 19 nt, Homo sapiens
  misc_RNA (1)...(19): siRNA sense strand
aaagaugcugcuaguguug

SEQ ID NO: 280612 - RNA, 19 nt, Homo sapiens
  misc_RNA (1)...(19): siRNA sense strand
ccuccgcucccgcuacuuu

SEQ ID NO: 280613 - RNA, 19 nt, Homo sapiens
  misc_RNA (1)...(19): siRNA sense strand
ggguauaacuaugggaacu

SEQ ID NO: 280614 - RNA, 19 nt, Homo sapiens
  misc_RNA (1)...(19): siRNA sense strand
ucacuauggaggauaugaa

SEQ ID NO: 280615 - RNA, 19 nt, Homo sapiens
  misc_RNA (1)...(19): siRNA sense strand
uaguggcuauggcggauau

SEQ ID NO: 280616 - RNA, 19 nt, Homo sapiens
  misc_RNA (1)...(19): siRNA sense strand
gcugguggacgagguggua

SEQ ID NO: 280617 - RNA, 19 nt, Homo sapiens
  misc_RNA (1)...(19): siRNA sense strand
agacuacaguggccaacag

SEQ ID NO: 280618 - RNA, 19 nt, Homo sapiens
  misc_RNA (1)...(19): siRNA sense strand
gggauaugcagacuacagu

SEQ ID NO: 280619 - RNA, 19 nt, Homo sapiens
  misc_RNA (1)...(19): siRNA sense strand
acuaugggaacuauggaua

SEQ ID NO: 280620 - RNA, 19 nt, Homo sapiens
  misc_RNA (1)...(19): siRNA sense strand
ugaacgaguacagcaauau

SEQ ID NO: 280621 - RNA, 19 nt, Homo sapiens
  misc_RNA (1)...(19): siRNA sense strand
guagacugcacaauuaaaa

SEQ ID NO: 280622 - RNA, 19 nt, Homo sapiens
  misc_RNA (1)...(19): siRNA sense strand
uaugaucaaggauauggaa

SEQ ID NO: 280623 - RNA, 19 nt, Homo sapiens
  misc_RNA (1)...(19): siRNA sense strand
agaaagcagauaccaucaa

SEQ ID NO: 280624 - RNA, 19 nt, Homo sapiens
  misc_RNA (1)...(19): siRNA sense strand
acaaaugaaagaagaggau

SEQ ID NO: 280625 - RNA, 19 nt, Homo sapiens
  misc_RNA (1)...(19): siRNA sense strand
cugcuaguguugauaaggu

SEQ ID NO: 280626 - RNA, 19 nt, Homo sapiens
  misc_RNA (1)...(19): siRNA sense strand
gcuaguguugauaagguuu

SEQ ID NO: 280627 - RNA, 19 nt, Homo sapiens
  misc_RNA (1)...(19): siRNA sense strand
guaggaagaugguugaguu

SEQ ID NO: 280628 - RNA, 19 nt, Homo sapiens
  misc_RNA (1)...(19): siRNA sense strand
gaagaugguugaguugguu

SEQ ID NO: 280629 - RNA, 19 nt, Homo sapiens
  misc_RNA (1)...(19): siRNA sense strand
gagaguguccucagaaauu

SEQ ID NO: 280630 - RNA, 19 nt, Homo sapiens
  misc_RNA (1)...(19): siRNA sense strand
gggaggagcugaguauguu

SEQ ID NO: 280631 - RNA, 19 nt, Homo sapiens
  misc_RNA (1)...(19): siRNA sense strand
cagaaaugcuggagagugu

SEQ ID NO: 280632 - RNA, 19 nt, Homo sapiens
  misc_RNA (1)...(19): siRNA sense strand
gaaaccagcuaugugaaag

SEQ ID NO: 280633 - RNA, 19 nt, Homo sapiens
  misc_RNA (1)...(19): siRNA sense strand
ccagggagccggucacaaa

SEQ ID NO: 280634 - RNA, 19 nt, Homo sapiens
  misc_RNA (1)...(19): siRNA sense strand
gaaauugccaggacuucuu

SEQ ID NO: 280635 - RNA, 19 nt, Homo sapiens
  misc_RNA (1)...(19): siRNA sense strand
gugaaaguccugcaccaua

SEQ ID NO: 280636 - RNA, 19 nt, Homo sapiens
  misc_RNA (1)...(19): siRNA sense strand
ggacuucuuucccgugauc

SEQ ID NO: 280637 - RNA, 19 nt, Homo sapiens
  misc_RNA (1)...(19): siRNA sense strand
ccaagggcccucauugaaa

SEQ ID NO: 280638 - RNA, 19 nt, Homo sapiens
  misc_RNA (1)...(19): siRNA sense strand
ggaagaugguugaguuggu

SEQ ID NO: 280639 - RNA, 19 nt, Homo sapiens
  misc_RNA (1)...(19): siRNA sense strand
cagcaaagccuccgaguac

SEQ ID NO: 280640 - RNA, 19 nt, Homo sapiens
  misc_RNA (1)...(19): siRNA sense strand
gagaaccucacauuuccua

SEQ ID NO: 280641 - RNA, 19 nt, Homo sapiens
  misc_RNA (1)...(19): siRNA sense strand
gcacugcaagccugaagaa

SEQ ID NO: 280642 - RNA, 19 nt, Homo sapiens
  misc_RNA (1)...(19): siRNA sense strand
gcagcaaucaguaggaaga

SEQ ID NO: 280643 - RNA, 19 nt, Homo sapiens
  misc_RNA (1)...(19): siRNA sense strand
gagagagggagaagaguga

SEQ ID NO: 280644 - RNA, 19 nt, Homo sapiens
  misc_RNA (1)...(19): siRNA sense strand
caagggcccucauugaaac

SEQ ID NO: 280645 - RNA, 19 nt, Homo sapiens
  misc_RNA (1)...(19): siRNA sense strand
gauaaucguccuggccaua

SEQ ID NO: 280646 - RNA, 19 nt, Homo sapiens
  misc_RNA (1)...(19): siRNA sense strand
gcaaagccuccgaguacuu

SEQ ID NO: 280647 - RNA, 19 nt, Homo sapiens
  misc_RNA (1)...(19): siRNA sense strand
ugaaaguccugcaccauac

SEQ ID NO: 280648 - RNA, 19 nt, Homo sapiens
  misc_RNA (1)...(19): siRNA sense strand
guggagaaccucacauuuc

SEQ ID NO: 280649 - RNA, 19 nt, Homo sapiens
  misc_RNA (1)...(19): siRNA sense strand
ugguugaguugguucauuu

SEQ ID NO: 280650 - RNA, 19 nt, Homo sapiens
  misc_RNA (1)...(19): siRNA sense strand
ugaaaccagcuaugugaaa

SEQ ID NO: 280651 - RNA, 19 nt, Homo sapiens
  misc_RNA (1)...(19): siRNA sense strand
ggucacaaaggcagaaaug

SEQ ID NO: 280652 - RNA, 19 nt, Homo sapiens
  misc_RNA (1)...(19): siRNA sense strand
gcuggagaguguccucaga

SEQ ID NO: 280653 - RNA, 19 nt, Homo sapiens
  misc_RNA (1)...(19): siRNA sense strand
gguggagaaccucacauuu

SEQ ID NO: 280654 - RNA, 19 nt, Homo sapiens
  misc_RNA (1)...(19): siRNA sense strand
uggagaguguccucagaaa

SEQ ID NO: 280655 - RNA, 19 nt, Homo sapiens
  misc_RNA (1)...(19): siRNA sense strand
ggagaguguccucagaaau

SEQ ID NO: 280656 - RNA, 19 nt, Homo sapiens
  misc_RNA (1)...(19): siRNA sense strand
caaagccuccgaguacuug

SEQ ID NO: 280657 - RNA, 19 nt, Homo sapiens
  misc_RNA (1)...(19): siRNA sense strand
agaguguccucagaaauug

SEQ ID NO: 280658 - RNA, 19 nt, Homo sapiens
  misc_RNA (1)...(19): siRNA sense strand
accaucaacuacacucuuu

SEQ ID NO: 280659 - RNA, 19 nt, Homo sapiens
  misc_RNA (1)...(19): siRNA sense strand
gaaaguccugcaccauaca

SEQ ID NO: 280660 - RNA, 19 nt, Homo sapiens
  misc_RNA (1)...(19): siRNA sense strand
gcaugaacgggcuuugaga

SEQ ID NO: 280661 - RNA, 19 nt, Homo sapiens
  misc_RNA (1)...(19): siRNA sense strand
aaagaucgguggagaaccu

SEQ ID NO: 280662 - RNA, 19 nt, Homo sapiens
  misc_RNA (1)...(19): siRNA sense strand
gccuccagcuucucgacua

SEQ ID NO: 280663 - RNA, 19 nt, Homo sapiens
  misc_RNA (1)...(19): siRNA sense strand
gguccaagggcccucauug

SEQ ID NO: 280664 - RNA, 19 nt, Homo sapiens
  misc_RNA (1)...(19): siRNA sense strand
gggcgacaaucaggucaug

SEQ ID NO: 280665 - RNA, 19 nt, Homo sapiens
  misc_RNA (1)...(19): siRNA sense strand
cgacuaccaucaacuacac

SEQ ID NO: 280666 - RNA, 19 nt, Homo sapiens
  misc_RNA (1)...(19): siRNA sense strand
guacuugcagcuggucuuu

SEQ ID NO: 280667 - RNA, 19 nt, Homo sapiens
  misc_RNA (1)...(19): siRNA sense strand
aagcagcaaucaguaggaa

SEQ ID NO: 280668 - RNA, 19 nt, Homo sapiens
  misc_RNA (1)...(19): siRNA sense strand
guccaagggcccucauuga

SEQ ID NO: 280669 - RNA, 19 nt, Homo sapiens
  misc_RNA (1)...(19): siRNA sense strand
ucagcaaagccuccgagua

SEQ ID NO: 280670 - RNA, 19 nt, Homo sapiens
  misc_RNA (1)...(19): siRNA sense strand
cccgugaucuucagcaaag

SEQ ID NO: 280671 - RNA, 19 nt, Homo sapiens
  misc_RNA (1)...(19): siRNA sense strand
gcaccauacacuaaagauc

SEQ ID NO: 280672 - RNA, 19 nt, Homo sapiens
  misc_RNA (1)...(19): siRNA sense strand
guccugcaccauacacuaa

SEQ ID NO: 280673 - RNA, 19 nt, Homo sapiens
  misc_RNA (1)...(19): siRNA sense strand
uccaagggcccucauugaa

SEQ ID NO: 280674 - RNA, 19 nt, Homo sapiens
  misc_RNA (1)...(19): siRNA sense strand
ucaguaggaagaugguuga

SEQ ID NO: 280675 - RNA, 19 nt, Homo sapiens
  misc_RNA (1)...(19): siRNA sense strand
uggagaaccucacauuucc

SEQ ID NO: 280676 - RNA, 19 nt, Homo sapiens
  misc_RNA (1)...(19): siRNA sense strand
uaaucguccuggccauaau

SEQ ID NO: 280677 - RNA, 19 nt, Homo sapiens
  misc_RNA (1)...(19): siRNA sense strand
aaauugccaggacuucuuu

SEQ ID NO: 280678 - RNA, 19 nt, Homo sapiens
  misc_RNA (1)...(19): siRNA sense strand
ucucgacuaccaucaacua

SEQ ID NO: 280679 - RNA, 19 nt, Homo sapiens
  misc_RNA (1)...(19): siRNA sense strand
ugaguauguuggagguguu

SEQ ID NO: 280680 - RNA, 19 nt, Homo sapiens
  misc_RNA (1)...(19): siRNA sense strand
aaucaggucaugcccaaga

SEQ ID NO: 280681 - RNA, 19 nt, Homo sapiens
  misc_RNA (1)...(19): siRNA sense strand
guuccaagcagcaaucagu

SEQ ID NO: 280682 - RNA, 19 nt, Homo sapiens
  misc_RNA (1)...(19): siRNA sense strand
ucacaaaggcagaaaugcu

SEQ ID NO: 280683 - RNA, 19 nt, Homo sapiens
  misc_RNA (1)...(19): siRNA sense strand
gaagaggaggggccaagaa

SEQ ID NO: 280684 - RNA, 19 nt, Homo sapiens
  misc_RNA (1)...(19): siRNA sense strand
ggccauaaucgcaauagag

SEQ ID NO: 280685 - RNA, 19 nt, Homo sapiens
  misc_RNA (1)...(19): siRNA sense strand
ggaguccgaguuccaagca

SEQ ID NO: 280686 - RNA, 19 nt, Homo sapiens
  misc_RNA (1)...(19): siRNA sense strand
auugaaaccagcuauguga

SEQ ID NO: 280687 - RNA, 19 nt, Homo sapiens
  misc_RNA (1)...(19): siRNA sense strand
guauguuggagguguuuga

SEQ ID NO: 280688 - RNA, 19 nt, Homo sapiens
  misc_RNA (1)...(19): siRNA sense strand
ggaggagcugaguauguug

SEQ ID NO: 280689 - RNA, 19 nt, Homo sapiens
  misc_RNA (1)...(19): siRNA sense strand
guaggaagaugguugaguu

SEQ ID NO: 280690 - RNA, 19 nt, Homo sapiens
  misc_RNA (1)...(19): siRNA sense strand
gaagaugguugaguugguu

SEQ ID NO: 280691 - RNA, 19 nt, Homo sapiens
  misc_RNA (1)...(19): siRNA sense strand
gagaguguccucagaaauu

SEQ ID NO: 280692 - RNA, 19 nt, Homo sapiens
  misc_RNA (1)...(19): siRNA sense strand
gggaggagcugaguauguu

SEQ ID NO: 280693 - RNA, 19 nt, Homo sapiens
  misc_RNA (1)...(19): siRNA sense strand
cagaaaugcuggagagugu

SEQ ID NO: 280694 - RNA, 19 nt, Homo sapiens
  misc_RNA (1)...(19): siRNA sense strand
gaaaccagcuaugugaaag

SEQ ID NO: 280695 - RNA, 19 nt, Homo sapiens
  misc_RNA (1)...(19): siRNA sense strand
ccagggagccggucacaaa

SEQ ID NO: 280696 - RNA, 19 nt, Homo sapiens
  misc_RNA (1)...(19): siRNA sense strand
gaaauugccaggacuucuu

SEQ ID NO: 280697 - RNA, 19 nt, Homo sapiens
  misc_RNA (1)...(19): siRNA sense strand
gugaaaguccugcaccaua

SEQ ID NO: 280698 - RNA, 19 nt, Homo sapiens
  misc_RNA (1)...(19): siRNA sense strand
ggacuucuuucccgugauc

SEQ ID NO: 280699 - RNA, 19 nt, Homo sapiens
  misc_RNA (1)...(19): siRNA sense strand
ccaagggcccucauugaaa

SEQ ID NO: 280700 - RNA, 19 nt, Homo sapiens
  misc_RNA (1)...(19): siRNA sense strand
ggaagaugguugaguuggu

SEQ ID NO: 280701 - RNA, 19 nt, Homo sapiens
  misc_RNA (1)...(19): siRNA sense strand
cagcaaagccuccgaguac

SEQ ID NO: 280702 - RNA, 19 nt, Homo sapiens
  misc_RNA (1)...(19): siRNA sense strand
gagaaccucacauuuccua

SEQ ID NO: 280703 - RNA, 19 nt, Homo sapiens
  misc_RNA (1)...(19): siRNA sense strand
gcacugcaagccugaagaa

SEQ ID NO: 280704 - RNA, 19 nt, Homo sapiens
  misc_RNA (1)...(19): siRNA sense strand
gcagcaaucaguaggaaga

SEQ ID NO: 280705 - RNA, 19 nt, Homo sapiens
  misc_RNA (1)...(19): siRNA sense strand
gagagagggagaagaguga

SEQ ID NO: 280706 - RNA, 19 nt, Homo sapiens
  misc_RNA (1)...(19): siRNA sense strand
caagggcccucauugaaac

SEQ ID NO: 280707 - RNA, 19 nt, Homo sapiens
  misc_RNA (1)...(19): siRNA sense strand
gauaaucguccuggccaua

SEQ ID NO: 280708 - RNA, 19 nt, Homo sapiens
  misc_RNA (1)...(19): siRNA sense strand
gcaaagccuccgaguacuu

SEQ ID NO: 280709 - RNA, 19 nt, Homo sapiens
  misc_RNA (1)...(19): siRNA sense strand
ugaaaguccugcaccauac

SEQ ID NO: 280710 - RNA, 19 nt, Homo sapiens
  misc_RNA (1)...(19): siRNA sense strand
guggagaaccucacauuuc

SEQ ID NO: 280711 - RNA, 19 nt, Homo sapiens
  misc_RNA (1)...(19): siRNA sense strand
ugguugaguugguucauuu

SEQ ID NO: 280712 - RNA, 19 nt, Homo sapiens
  misc_RNA (1)...(19): siRNA sense strand
ugaaaccagcuaugugaaa

SEQ ID NO: 280713 - RNA, 19 nt, Homo sapiens
  misc_RNA (1)...(19): siRNA sense strand
ggucacaaaggcagaaaug

SEQ ID NO: 280714 - RNA, 19 nt, Homo sapiens
  misc_RNA (1)...(19): siRNA sense strand
gcuggagaguguccucaga

SEQ ID NO: 280715 - RNA, 19 nt, Homo sapiens
  misc_RNA (1)...(19): siRNA sense strand
gguggagaaccucacauuu

SEQ ID NO: 280716 - RNA, 19 nt, Homo sapiens
  misc_RNA (1)...(19): siRNA sense strand
uggagaguguccucagaaa

SEQ ID NO: 280717 - RNA, 19 nt, Homo sapiens
  misc_RNA (1)...(19): siRNA sense strand
ggagaguguccucagaaau

SEQ ID NO: 280718 - RNA, 19 nt, Homo sapiens
  misc_RNA (1)...(19): siRNA sense strand
caaagccuccgaguacuug

SEQ ID NO: 280719 - RNA, 19 nt, Homo sapiens
  misc_RNA (1)...(19): siRNA sense strand
agaguguccucagaaauug

SEQ ID NO: 280720 - RNA, 19 nt, Homo sapiens
  misc_RNA (1)...(19): siRNA sense strand
accaucaacuacacucuuu

SEQ ID NO: 280721 - RNA, 19 nt, Homo sapiens
  misc_RNA (1)...(19): siRNA sense strand
gaaaguccugcaccauaca

SEQ ID NO: 280722 - RNA, 19 nt, Homo sapiens
  misc_RNA (1)...(19): siRNA sense strand
gcaugaacgggcuuugaga

SEQ ID NO: 280723 - RNA, 19 nt, Homo sapiens
  misc_RNA (1)...(19): siRNA sense strand
aaagaucgguggagaaccu

SEQ ID NO: 280724 - RNA, 19 nt, Homo sapiens
  misc_RNA (1)...(19): siRNA sense strand
gccuccagcuucucgacua

SEQ ID NO: 280725 - RNA, 19 nt, Homo sapiens
  misc_RNA (1)...(19): siRNA sense strand
gguccaagggcccucauug

SEQ ID NO: 280726 - RNA, 19 nt, Homo sapiens
  misc_RNA (1)...(19): siRNA sense strand
gggcgacaaucaggucaug

SEQ ID NO: 280727 - RNA, 19 nt, Homo sapiens
  misc_RNA (1)...(19): siRNA sense strand
cgacuaccaucaacuacac

SEQ ID NO: 280728 - RNA, 19 nt, Homo sapiens
  misc_RNA (1)...(19): siRNA sense strand
guacuugcagcuggucuuu

SEQ ID NO: 280729 - RNA, 19 nt, Homo sapiens
  misc_RNA (1)...(19): siRNA sense strand
aagcagcaaucaguaggaa

SEQ ID NO: 280730 - RNA, 19 nt, Homo sapiens
  misc_RNA (1)...(19): siRNA sense strand
guccaagggcccucauuga

SEQ ID NO: 280731 - RNA, 19 nt, Homo sapiens
  misc_RNA (1)...(19): siRNA sense strand
ucagcaaagccuccgagua

SEQ ID NO: 280732 - RNA, 19 nt, Homo sapiens
  misc_RNA (1)...(19): siRNA sense strand
cccgugaucuucagcaaag

SEQ ID NO: 280733 - RNA, 19 nt, Homo sapiens
  misc_RNA (1)...(19): siRNA sense strand
gcaccauacacuaaagauc

SEQ ID NO: 280734 - RNA, 19 nt, Homo sapiens
  misc_RNA (1)...(19): siRNA sense strand
guccugcaccauacacuaa

SEQ ID NO: 280735 - RNA, 19 nt, Homo sapiens
  misc_RNA (1)...(19): siRNA sense strand
uccaagggcccucauugaa

SEQ ID NO: 280736 - RNA, 19 nt, Homo sapiens
  misc_RNA (1)...(19): siRNA sense strand
ucaguaggaagaugguuga

SEQ ID NO: 280737 - RNA, 19 nt, Homo sapiens
  misc_RNA (1)...(19): siRNA sense strand
uggagaaccucacauuucc

SEQ ID NO: 280738 - RNA, 19 nt, Homo sapiens
  misc_RNA (1)...(19): siRNA sense strand
uaaucguccuggccauaau

SEQ ID NO: 280739 - RNA, 19 nt, Homo sapiens
  misc_RNA (1)...(19): siRNA sense strand
aaauugccaggacuucuuu

SEQ ID NO: 280740 - RNA, 19 nt, Homo sapiens
  misc_RNA (1)...(19): siRNA sense strand
ucucgacuaccaucaacua

SEQ ID NO: 280741 - RNA, 19 nt, Homo sapiens
  misc_RNA (1)...(19): siRNA sense strand
ugaguauguuggagguguu

SEQ ID NO: 280742 - RNA, 19 nt, Homo sapiens
  misc_RNA (1)...(19): siRNA sense strand
aaucaggucaugcccaaga

SEQ ID NO: 280743 - RNA, 19 nt, Homo sapiens
  misc_RNA (1)...(19): siRNA sense strand
guuccaagcagcaaucagu

SEQ ID NO: 280744 - RNA, 19 nt, Homo sapiens
  misc_RNA (1)...(19): siRNA sense strand
ucacaaaggcagaaaugcu

SEQ ID NO: 280745 - RNA, 19 nt, Homo sapiens
  misc_RNA (1)...(19): siRNA sense strand
gaagaggaggggccaagaa

SEQ ID NO: 280746 - RNA, 19 nt, Homo sapiens
  misc_RNA (1)...(19): siRNA sense strand
ggccauaaucgcaauagag

SEQ ID NO: 280747 - RNA, 19 nt, Homo sapiens
  misc_RNA (1)...(19): siRNA sense strand
ggaguccgaguuccaagca

SEQ ID NO: 280748 - RNA, 19 nt, Homo sapiens
  misc_RNA (1)...(19): siRNA sense strand
auugaaaccagcuauguga

SEQ ID NO: 280749 - RNA, 19 nt, Homo sapiens
  misc_RNA (1)...(19): siRNA sense strand
guauguuggagguguuuga

SEQ ID NO: 280750 - RNA, 19 nt, Homo sapiens
  misc_RNA (1)...(19): siRNA sense strand
ggaggagcugaguauguug

SEQ ID NO: 280751 - RNA, 19 nt, Homo sapiens
  misc_RNA (1)...(19): siRNA sense strand
guaggaagaugguugaguu

SEQ ID NO: 280752 - RNA, 19 nt, Homo sapiens
  misc_RNA (1)...(19): siRNA sense strand
gaagaugguugaguugguu

SEQ ID NO: 280753 - RNA, 19 nt, Homo sapiens
  misc_RNA (1)...(19): siRNA sense strand
gagaguguccucagaaauu

SEQ ID NO: 280754 - RNA, 19 nt, Homo sapiens
  misc_RNA (1)...(19): siRNA sense strand
gggaggagcugaguauguu

SEQ ID NO: 280755 - RNA, 19 nt, Homo sapiens
  misc_RNA (1)...(19): siRNA sense strand
cagaaaugcuggagagugu

SEQ ID NO: 280756 - RNA, 19 nt, Homo sapiens
  misc_RNA (1)...(19): siRNA sense strand
gaaaccagcuaugugaaag

SEQ ID NO: 280757 - RNA, 19 nt, Homo sapiens
  misc_RNA (1)...(19): siRNA sense strand
ccagggagccggucacaaa

SEQ ID NO: 280758 - RNA, 19 nt, Homo sapiens
  misc_RNA (1)...(19): siRNA sense strand
gaaauugccaggacuucuu

SEQ ID NO: 280759 - RNA, 19 nt, Homo sapiens
  misc_RNA (1)...(19): siRNA sense strand
gugaaaguccugcaccaua

SEQ ID NO: 280760 - RNA, 19 nt, Homo sapiens
  misc_RNA (1)...(19): siRNA sense strand
ggacuucuuucccgugauc

SEQ ID NO: 280761 - RNA, 19 nt, Homo sapiens
  misc_RNA (1)...(19): siRNA sense strand
ccaagggcccucauugaaa

SEQ ID NO: 280762 - RNA, 19 nt, Homo sapiens
  misc_RNA (1)...(19): siRNA sense strand
ggaagaugguugaguuggu

SEQ ID NO: 280763 - RNA, 19 nt, Homo sapiens
  misc_RNA (1)...(19): siRNA sense strand
cagcaaagccuccgaguac

SEQ ID NO: 280764 - RNA, 19 nt, Homo sapiens
  misc_RNA (1)...(19): siRNA sense strand
gagaaccucacauuuccua

SEQ ID NO: 280765 - RNA, 19 nt, Homo sapiens
  misc_RNA (1)...(19): siRNA sense strand
gcacugcaagccugaagaa

SEQ ID NO: 280766 - RNA, 19 nt, Homo sapiens
  misc_RNA (1)...(19): siRNA sense strand
gcagcaaucaguaggaaga

SEQ ID NO: 280767 - RNA, 19 nt, Homo sapiens
  misc_RNA (1)...(19): siRNA sense strand
gagagagggagaagaguga

SEQ ID NO: 280768 - RNA, 19 nt, Homo sapiens
  misc_RNA (1)...(19): siRNA sense strand
caagggcccucauugaaac

SEQ ID NO: 280769 - RNA, 19 nt, Homo sapiens
  misc_RNA (1)...(19): siRNA sense strand
gauaaucguccuggccaua

SEQ ID NO: 280770 - RNA, 19 nt, Homo sapiens
  misc_RNA (1)...(19): siRNA sense strand
gcaaagccuccgaguacuu

SEQ ID NO: 280771 - RNA, 19 nt, Homo sapiens
  misc_RNA (1)...(19): siRNA sense strand
ugaaaguccugcaccauac

SEQ ID NO: 280772 - RNA, 19 nt, Homo sapiens
  misc_RNA (1)...(19): siRNA sense strand
guggagaaccucacauuuc

SEQ ID NO: 280773 - RNA, 19 nt, Homo sapiens
  misc_RNA (1)...(19): siRNA sense strand
ugguugaguugguucauuu

SEQ ID NO: 280774 - RNA, 19 nt, Homo sapiens
  misc_RNA (1)...(19): siRNA sense strand
ugaaaccagcuaugugaaa

SEQ ID NO: 280775 - RNA, 19 nt, Homo sapiens
  misc_RNA (1)...(19): siRNA sense strand
ggucacaaaggcagaaaug

SEQ ID NO: 280776 - RNA, 19 nt, Homo sapiens
  misc_RNA (1)...(19): siRNA sense strand
gcuggagaguguccucaga

SEQ ID NO: 280777 - RNA, 19 nt, Homo sapiens
  misc_RNA (1)...(19): siRNA sense strand
gguggagaaccucacauuu

SEQ ID NO: 280778 - RNA, 19 nt, Homo sapiens
  misc_RNA (1)...(19): siRNA sense strand
uggagaguguccucagaaa

SEQ ID NO: 280779 - RNA, 19 nt, Homo sapiens
  misc_RNA (1)...(19): siRNA sense strand
ggagaguguccucagaaau

SEQ ID NO: 280780 - RNA, 19 nt, Homo sapiens
  misc_RNA (1)...(19): siRNA sense strand
caaagccuccgaguacuug

SEQ ID NO: 280781 - RNA, 19 nt, Homo sapiens
  misc_RNA (1)...(19): siRNA sense strand
agaguguccucagaaauug

SEQ ID NO: 280782 - RNA, 19 nt, Homo sapiens
  misc_RNA (1)...(19): siRNA sense strand
accaucaacuacacucuuu

SEQ ID NO: 280783 - RNA, 19 nt, Homo sapiens
  misc_RNA (1)...(19): siRNA sense strand
gaaaguccugcaccauaca

SEQ ID NO: 280784 - RNA, 19 nt, Homo sapiens
  misc_RNA (1)...(19): siRNA sense strand
gcaugaacgggcuuugaga

SEQ ID NO: 280785 - RNA, 19 nt, Homo sapiens
  misc_RNA (1)...(19): siRNA sense strand
aaagaucgguggagaaccu

SEQ ID NO: 280786 - RNA, 19 nt, Homo sapiens
  misc_RNA (1)...(19): siRNA sense strand
gccuccagcuucucgacua

SEQ ID NO: 280787 - RNA, 19 nt, Homo sapiens
  misc_RNA (1)...(19): siRNA sense strand
gguccaagggcccucauug

SEQ ID NO: 280788 - RNA, 19 nt, Homo sapiens
  misc_RNA (1)...(19): siRNA sense strand
gggcgacaaucaggucaug

SEQ ID NO: 280789 - RNA, 19 nt, Homo sapiens
  misc_RNA (1)...(19): siRNA sense strand
cgacuaccaucaacuacac

SEQ ID NO: 280790 - RNA, 19 nt, Homo sapiens
  misc_RNA (1)...(19): siRNA sense strand
guacuugcagcuggucuuu

SEQ ID NO: 280791 - RNA, 19 nt, Homo sapiens
  misc_RNA (1)...(19): siRNA sense strand
aagcagcaaucaguaggaa

SEQ ID NO: 280792 - RNA, 19 nt, Homo sapiens
  misc_RNA (1)...(19): siRNA sense strand
guccaagggcccucauuga

SEQ ID NO: 280793 - RNA, 19 nt, Homo sapiens
  misc_RNA (1)...(19): siRNA sense strand
ucagcaaagccuccgagua

SEQ ID NO: 280794 - RNA, 19 nt, Homo sapiens
  misc_RNA (1)...(19): siRNA sense strand
cccgugaucuucagcaaag

SEQ ID NO: 280795 - RNA, 19 nt, Homo sapiens
  misc_RNA (1)...(19): siRNA sense strand
gcaccauacacuaaagauc

SEQ ID NO: 280796 - RNA, 19 nt, Homo sapiens
  misc_RNA (1)...(19): siRNA sense strand
guccugcaccauacacuaa

SEQ ID NO: 280797 - RNA, 19 nt, Homo sapiens
  misc_RNA (1)...(19): siRNA sense strand
uccaagggcccucauugaa

SEQ ID NO: 280798 - RNA, 19 nt, Homo sapiens
  misc_RNA (1)...(19): siRNA sense strand
ucaguaggaagaugguuga

SEQ ID NO: 280799 - RNA, 19 nt, Homo sapiens
  misc_RNA (1)...(19): siRNA sense strand
uggagaaccucacauuucc

SEQ ID NO: 280800 - RNA, 19 nt, Homo sapiens
  misc_RNA (1)...(19): siRNA sense strand
uaaucguccuggccauaau

SEQ ID NO: 280801 - RNA, 19 nt, Homo sapiens
  misc_RNA (1)...(19): siRNA sense strand
aaauugccaggacuucuuu

SEQ ID NO: 280802 - RNA, 19 nt, Homo sapiens
  misc_RNA (1)...(19): siRNA sense strand
ucucgacuaccaucaacua

SEQ ID NO: 280803 - RNA, 19 nt, Homo sapiens
  misc_RNA (1)...(19): siRNA sense strand
ugaguauguuggagguguu

SEQ ID NO: 280804 - RNA, 19 nt, Homo sapiens
  misc_RNA (1)...(19): siRNA sense strand
aaucaggucaugcccaaga

SEQ ID NO: 280805 - RNA, 19 nt, Homo sapiens
  misc_RNA (1)...(19): siRNA sense strand
guuccaagcagcaaucagu

SEQ ID NO: 280806 - RNA, 19 nt, Homo sapiens
  misc_RNA (1)...(19): siRNA sense strand
ucacaaaggcagaaaugcu

SEQ ID NO: 280807 - RNA, 19 nt, Homo sapiens
  misc_RNA (1)...(19): siRNA sense strand
gaagaggaggggccaagaa

SEQ ID NO: 280808 - RNA, 19 nt, Homo sapiens
  misc_RNA (1)...(19): siRNA sense strand
ggccauaaucgcaauagag

SEQ ID NO: 280809 - RNA, 19 nt, Homo sapiens
  misc_RNA (1)...(19): siRNA sense strand
ggaguccgaguuccaagca

SEQ ID NO: 280810 - RNA, 19 nt, Homo sapiens
  misc_RNA (1)...(19): siRNA sense strand
auugaaaccagcuauguga

SEQ ID NO: 280811 - RNA, 19 nt, Homo sapiens
  misc_RNA (1)...(19): siRNA sense strand
guauguuggagguguuuga

SEQ ID NO: 280812 - RNA, 19 nt, Homo sapiens
  misc_RNA (1)...(19): siRNA sense strand
ggaggagcugaguauguug

SEQ ID NO: 280813 - RNA, 19 nt, Homo sapiens
  misc_RNA (1)...(19): siRNA sense strand
ccacagaaaugcuuguuaa

SEQ ID NO: 280814 - RNA, 19 nt, Homo sapiens
  misc_RNA (1)...(19): siRNA sense strand
gauaaugaguggagaaaga

SEQ ID NO: 280815 - RNA, 19 nt, Homo sapiens
  misc_RNA (1)...(19): siRNA sense strand
ggagaugacucaacagaug

SEQ ID NO: 280816 - RNA, 19 nt, Homo sapiens
  misc_RNA (1)...(19): siRNA sense strand
ccaauuacauguggaauaa

SEQ ID NO: 280817 - RNA, 19 nt, Homo sapiens
  misc_RNA (1)...(19): siRNA sense strand
aaaggaggcuggcaacaua

SEQ ID NO: 280818 - RNA, 19 nt, Homo sapiens
  misc_RNA (1)...(19): siRNA sense strand
acaaagaacuagacagaaa

SEQ ID NO: 280819 - RNA, 19 nt, Homo sapiens
  misc_RNA (1)...(19): siRNA sense strand
cgacaaacaccuucuuuaa

SEQ ID NO: 280820 - RNA, 19 nt, Homo sapiens
  misc_RNA (1)...(19): siRNA sense strand
acaaggagcuggaugaaga

SEQ ID NO: 280821 - RNA, 19 nt, Homo sapiens
  misc_RNA (1)...(19): siRNA sense strand
ggacagaagagacuauaaa

SEQ ID NO: 280822 - RNA, 19 nt, Homo sapiens
  misc_RNA (1)...(19): siRNA sense strand
gaagaagugugucguugug

SEQ ID NO: 280823 - RNA, 19 nt, Homo sapiens
  misc_RNA (1)...(19): siRNA sense strand
gacaaacaccuucuuuaaa

SEQ ID NO: 280824 - RNA, 19 nt, Homo sapiens
  misc_RNA (1)...(19): siRNA sense strand
acagagaucuugaaaagua

SEQ ID NO: 280825 - RNA, 19 nt, Homo sapiens
  misc_RNA (1)...(19): siRNA sense strand
acaaacaccuucuuuaaac

SEQ ID NO: 280826 - RNA, 19 nt, Homo sapiens
  misc_RNA (1)...(19): siRNA sense strand
ccacaaagaacuagacaga

SEQ ID NO: 280827 - RNA, 19 nt, Homo sapiens
  misc_RNA (1)...(19): siRNA sense strand
ggagaaagacucaaugcau

SEQ ID NO: 280828 - RNA, 19 nt, Homo sapiens
  misc_RNA (1)...(19): siRNA sense strand
gcgacaaacaccuucuuua

SEQ ID NO: 280829 - RNA, 19 nt, Homo sapiens
  misc_RNA (1)...(19): siRNA sense strand
guacagaaaguccacagaa

SEQ ID NO: 280830 - RNA, 19 nt, Homo sapiens
  misc_RNA (1)...(19): siRNA sense strand
gaaauuacagugccucucu

SEQ ID NO: 280831 - RNA, 19 nt, Homo sapiens
  misc_RNA (1)...(19): siRNA sense strand
caaacaaggagcuggauga

SEQ ID NO: 280832 - RNA, 19 nt, Homo sapiens
  misc_RNA (1)...(19): siRNA sense strand
cagacaaguucauuccauu

SEQ ID NO: 280833 - RNA, 19 nt, Homo sapiens
  misc_RNA (1)...(19): siRNA sense strand
gagccaggauuuucauaua

SEQ ID NO: 280834 - RNA, 19 nt, Homo sapiens
  misc_RNA (1)...(19): siRNA sense strand
uacagaaaguccacagaaa

SEQ ID NO: 280835 - RNA, 19 nt, Homo sapiens
  misc_RNA (1)...(19): siRNA sense strand
gaaaggaggcuggcaacau

SEQ ID NO: 280836 - RNA, 19 nt, Homo sapiens
  misc_RNA (1)...(19): siRNA sense strand
caaccgagaauuugaugaa

SEQ ID NO: 280837 - RNA, 19 nt, Homo sapiens
  misc_RNA (1)...(19): siRNA sense strand
gaaguuccaccaccaaaca

SEQ ID NO: 280838 - RNA, 19 nt, Homo sapiens
  misc_RNA (1)...(19): siRNA sense strand
agcaagacguuauuugaaa

SEQ ID NO: 280839 - RNA, 19 nt, Homo sapiens
  misc_RNA (1)...(19): siRNA sense strand
ggagguguguauagaugug

SEQ ID NO: 280840 - RNA, 19 nt, Homo sapiens
  misc_RNA (1)...(19): siRNA sense strand
aaaugugccugugaaugua

SEQ ID NO: 280841 - RNA, 19 nt, Homo sapiens
  misc_RNA (1)...(19): siRNA sense strand
agacaaguucauuccauua

SEQ ID NO: 280842 - RNA, 19 nt, Homo sapiens
  misc_RNA (1)...(19): siRNA sense strand
cagaaaguccacagaaaug

SEQ ID NO: 280843 - RNA, 19 nt, Homo sapiens
  misc_RNA (1)...(19): siRNA sense strand
guacaagugucagcuaagg

SEQ ID NO: 280844 - RNA, 19 nt, Homo sapiens
  misc_RNA (1)...(19): siRNA sense strand
gaacuagacagaaacucau

SEQ ID NO: 280845 - RNA, 19 nt, Homo sapiens
  misc_RNA (1)...(19): siRNA sense strand
cagcaagacguuauuugaa

SEQ ID NO: 280846 - RNA, 19 nt, Homo sapiens
  misc_RNA (1)...(19): siRNA sense strand
ucagcaagacguuauuuga

SEQ ID NO: 280847 - RNA, 19 nt, Homo sapiens
  misc_RNA (1)...(19): siRNA sense strand
gagaacaggccaaccucaa

SEQ ID NO: 280848 - RNA, 19 nt, Homo sapiens
  misc_RNA (1)...(19): siRNA sense strand
aaaagaaccugccccagaa

SEQ ID NO: 280849 - RNA, 19 nt, Homo sapiens
  misc_RNA (1)...(19): siRNA sense strand
gacaaguucauuccauuau

SEQ ID NO: 280850 - RNA, 19 nt, Homo sapiens
  misc_RNA (1)...(19): siRNA sense strand
gucguugugucccuucaua

SEQ ID NO: 280851 - RNA, 19 nt, Homo sapiens
  misc_RNA (1)...(19): siRNA sense strand
ugacaucuguggaccaaac

SEQ ID NO: 280852 - RNA, 19 nt, Homo sapiens
  misc_RNA (1)...(19): siRNA sense strand
gaacaggccaaccucaacu

SEQ ID NO: 280853 - RNA, 19 nt, Homo sapiens
  misc_RNA (1)...(19): siRNA sense strand
ugaagagaccugucagugu

SEQ ID NO: 280854 - RNA, 19 nt, Homo sapiens
  misc_RNA (1)...(19): siRNA sense strand
acucaugacuguacucuac

SEQ ID NO: 280855 - RNA, 19 nt, Homo sapiens
  misc_RNA (1)...(19): siRNA sense strand
cagaaaugcuuguuaaaag

SEQ ID NO: 280856 - RNA, 19 nt, Homo sapiens
  misc_RNA (1)...(19): siRNA sense strand
caugacaucuguggaccaa

SEQ ID NO: 280857 - RNA, 19 nt, Homo sapiens
  misc_RNA (1)...(19): siRNA sense strand
acagaaaguccacagaaau

SEQ ID NO: 280858 - RNA, 19 nt, Homo sapiens
  misc_RNA (1)...(19): siRNA sense strand
gcugcagcacauuauaaua

SEQ ID NO: 280859 - RNA, 19 nt, Homo sapiens
  misc_RNA (1)...(19): siRNA sense strand
ugacucaacagauggauuc

SEQ ID NO: 280860 - RNA, 19 nt, Homo sapiens
  misc_RNA (1)...(19): siRNA sense strand
cgggagguguguauagaug

SEQ ID NO: 280861 - RNA, 19 nt, Homo sapiens
  misc_RNA (1)...(19): siRNA sense strand
auacagagaucuugaaaag

SEQ ID NO: 280862 - RNA, 19 nt, Homo sapiens
  misc_RNA (1)...(19): siRNA sense strand
cagaaacucaugccagugu

SEQ ID NO: 280863 - RNA, 19 nt, Homo sapiens
  misc_RNA (1)...(19): siRNA sense strand
uuacagugccucucucuca

SEQ ID NO: 280864 - RNA, 19 nt, Homo sapiens
  misc_RNA (1)...(19): siRNA sense strand
acagacaaguucauuccau

SEQ ID NO: 280865 - RNA, 19 nt, Homo sapiens
  misc_RNA (1)...(19): siRNA sense strand
gagcaguuacggucugugu

SEQ ID NO: 280866 - RNA, 19 nt, Homo sapiens
  misc_RNA (1)...(19): siRNA sense strand
gggccaaccgagaauuuga

SEQ ID NO: 280867 - RNA, 19 nt, Homo sapiens
  misc_RNA (1)...(19): siRNA sense strand
gcacauuauaauacagaga

SEQ ID NO: 280868 - RNA, 19 nt, Homo sapiens
  misc_RNA (1)...(19): siRNA sense strand
guugugucccuucauauug

SEQ ID NO: 280869 - RNA, 19 nt, Homo sapiens
  misc_RNA (1)...(19): siRNA sense strand
gaaacucaugccagugugu

SEQ ID NO: 280870 - RNA, 19 nt, Homo sapiens
  misc_RNA (1)...(19): siRNA sense strand
aaacaaggagcuggaugaa

SEQ ID NO: 280871 - RNA, 19 nt, Homo sapiens
  misc_RNA (1)...(19): siRNA sense strand
gauguuuacagacaaguuc

SEQ ID NO: 280872 - RNA, 19 nt, Homo sapiens
  misc_RNA (1)...(19): siRNA sense strand
gccgaugcaugucuaaacu

SEQ ID NO: 280873 - RNA, 19 nt, Homo sapiens
  misc_RNA (1)...(19): siRNA sense strand
acaagugucagcuaaggaa

SEQ ID NO: 280874 - RNA, 19 nt, Homo sapiens
  misc_RNA (1)...(19): siRNA sense strand
cacgggagguguguauaga

SEQ ID NO: 280875 - RNA, 19 nt, Homo sapiens
  misc_RNA (1)...(19): siRNA sense strand
gcuggcaacauaacagaga

SEQ ID NO: 280876 - RNA, 19 nt, Homo sapiens
  misc_RNA (1)...(19): siRNA sense strand
uggaaaagaccacaaauga

SEQ ID NO: 280877 - RNA, 19 nt, Homo sapiens
  misc_RNA (1)...(19): siRNA sense strand
gcacuugcugggcuucuuc

SEQ ID NO: 280878 - RNA, 19 nt, Homo sapiens
  misc_RNA (1)...(19): siRNA sense strand
gaacucaugacuguacucu

SEQ ID NO: 280879 - RNA, 19 nt, Homo sapiens
  misc_RNA (1)...(19): siRNA sense strand
agaacuagacagaaacuca

SEQ ID NO: 280880 - RNA, 19 nt, Homo sapiens
  misc_RNA (1)...(19): siRNA sense strand
guacucuacccagaauauu

SEQ ID NO: 280881 - RNA, 19 nt, Homo sapiens
  misc_RNA (1)...(19): siRNA sense strand
gaaaguccacagaaaugcu

SEQ ID NO: 280882 - RNA, 19 nt, Homo sapiens
  misc_RNA (1)...(19): siRNA sense strand
gaaaaugugccugugaaug

SEQ ID NO: 280883 - RNA, 19 nt, Homo sapiens
  misc_RNA (1)...(19): siRNA sense strand
uacagugccucucucucaa

SEQ ID NO: 280884 - RNA, 19 nt, Homo sapiens
  misc_RNA (1)...(19): siRNA sense strand
cagcacauuauaauacaga

SEQ ID NO: 280885 - RNA, 19 nt, Homo sapiens
  misc_RNA (1)...(19): siRNA sense strand
ccacgggagguguguauag

SEQ ID NO: 280886 - RNA, 19 nt, Homo sapiens
  misc_RNA (1)...(19): siRNA sense strand
caaagaacuagacagaaac

SEQ ID NO: 280887 - RNA, 19 nt, Homo sapiens
  misc_RNA (1)...(19): siRNA sense strand
gacagaagagacuauaaaa

SEQ ID NO: 280888 - RNA, 19 nt, Homo sapiens
  misc_RNA (1)...(19): siRNA sense strand
ugaagaagugugucguugu

SEQ ID NO: 280889 - RNA, 19 nt, Homo sapiens
  misc_RNA (1)...(19): siRNA sense strand
cacagaaaugcuuguuaaa

SEQ ID NO: 280890 - RNA, 19 nt, Homo sapiens
  misc_RNA (1)...(19): siRNA sense strand
gaaaucaaccccuaaaucc

SEQ ID NO: 280891 - RNA, 19 nt, Homo sapiens
  misc_RNA (1)...(19): siRNA sense strand
aaccgagaauuugaugaaa

SEQ ID NO: 280892 - RNA, 19 nt, Homo sapiens
  misc_RNA (1)...(19): siRNA sense strand
caaacaccuucuuuaaacc

SEQ ID NO: 280893 - RNA, 19 nt, Homo sapiens
  misc_RNA (1)...(19): siRNA sense strand
caaggacagaagagacuau

SEQ ID NO: 280894 - RNA, 19 nt, Homo sapiens
  misc_RNA (1)...(19): siRNA sense strand
aaagaccacaaaugagcua

SEQ ID NO: 280895 - RNA, 19 nt, Homo sapiens
  misc_RNA (1)...(19): siRNA sense strand
ggaaaggaggcuggcaaca

SEQ ID NO: 280896 - RNA, 19 nt, Homo sapiens
  misc_RNA (1)...(19): siRNA sense strand
ccuaaauccuggaaaaugu

SEQ ID NO: 280897 - RNA, 19 nt, Homo sapiens
  misc_RNA (1)...(19): siRNA sense strand
ggauguuuacagacaaguu

SEQ ID NO: 280898 - RNA, 19 nt, Homo sapiens
  misc_RNA (1)...(19): siRNA sense strand
gcagcacauuauaauacag

SEQ ID NO: 280899 - RNA, 19 nt, Homo sapiens
  misc_RNA (1)...(19): siRNA sense strand
gaaaugcuuguuaaaagga

SEQ ID NO: 280900 - RNA, 19 nt, Homo sapiens
  misc_RNA (1)...(19): siRNA sense strand
gaugaagagaccugucagu

SEQ ID NO: 280901 - RNA, 19 nt, Homo sapiens
  misc_RNA (1)...(19): siRNA sense strand
cuacccagaauauuggaaa

SEQ ID NO: 280902 - RNA, 19 nt, Homo sapiens
  misc_RNA (1)...(19): siRNA sense strand
aggccaaccucaacucaag

SEQ ID NO: 280903 - RNA, 19 nt, Homo sapiens
  misc_RNA (1)...(19): siRNA sense strand
ccaaaccaguaacaaucag

SEQ ID NO: 280904 - RNA, 19 nt, Homo sapiens
  misc_RNA (1)...(19): siRNA sense strand
gcacgagcuaccucagcaa

SEQ ID NO: 280905 - RNA, 19 nt, Homo sapiens
  misc_RNA (1)...(19): siRNA sense strand
agaccugccccaccaauua

SEQ ID NO: 280906 - RNA, 19 nt, Homo sapiens
  misc_RNA (1)...(19): siRNA sense strand
aaaccaguaacaaucaguu

SEQ ID NO: 280907 - RNA, 19 nt, Homo sapiens
  misc_RNA (1)...(19): siRNA sense strand
cgagcuaccucagcaagac

SEQ ID NO: 280908 - RNA, 19 nt, Homo sapiens
  misc_RNA (1)...(19): siRNA sense strand
ugcagcacauuauaauaca

SEQ ID NO: 280909 - RNA, 19 nt, Homo sapiens
  misc_RNA (1)...(19): siRNA sense strand
caagugucagcuaaggaaa

SEQ ID NO: 280910 - RNA, 19 nt, Homo sapiens
  misc_RNA (1)...(19): siRNA sense strand
guguguccgucuacagaug

SEQ ID NO: 280911 - RNA, 19 nt, Homo sapiens
  misc_RNA (1)...(19): siRNA sense strand
aaagaaguuccaccaccaa

SEQ ID NO: 280912 - RNA, 19 nt, Homo sapiens
  misc_RNA (1)...(19): siRNA sense strand
cguugugucccuucauauu

SEQ ID NO: 280913 - RNA, 19 nt, Homo sapiens
  misc_RNA (1)...(19): siRNA sense strand
gugaaaggcuggaaacuua

SEQ ID NO: 280914 - RNA, 19 nt, Homo sapiens
  misc_RNA (1)...(19): siRNA sense strand
gaaagaaagcuauguauga

SEQ ID NO: 280915 - RNA, 19 nt, Homo sapiens
  misc_RNA (1)...(19): siRNA sense strand
gaaagaaguuggcaagguu

SEQ ID NO: 280916 - RNA, 19 nt, Homo sapiens
  misc_RNA (1)...(19): siRNA sense strand
gcaaugauuugaugaagaa

SEQ ID NO: 280917 - RNA, 19 nt, Homo sapiens
  misc_RNA (1)...(19): siRNA sense strand
gcaaagcuaucuccucuga

SEQ ID NO: 280918 - RNA, 19 nt, Homo sapiens
  misc_RNA (1)...(19): siRNA sense strand
gaaccucacuuucagaaga

SEQ ID NO: 280919 - RNA, 19 nt, Homo sapiens
  misc_RNA (1)...(19): siRNA sense strand
cgacaaggccgcaccauua

SEQ ID NO: 280920 - RNA, 19 nt, Homo sapiens
  misc_RNA (1)...(19): siRNA sense strand
gaccauaucucgcuucaug

SEQ ID NO: 280921 - RNA, 19 nt, Homo sapiens
  misc_RNA (1)...(19): siRNA sense strand
gaagaaaacuggugucuau

SEQ ID NO: 280922 - RNA, 19 nt, Homo sapiens
  misc_RNA (1)...(19): siRNA sense strand
gcugagggcugaugucauu

SEQ ID NO: 280923 - RNA, 19 nt, Homo sapiens
  misc_RNA (1)...(19): siRNA sense strand
gcagaucgauuucucaaca

SEQ ID NO: 280924 - RNA, 19 nt, Homo sapiens
  misc_RNA (1)...(19): siRNA sense strand
gugcuuacaucucauagua

SEQ ID NO: 280925 - RNA, 19 nt, Homo sapiens
  misc_RNA (1)...(19): siRNA sense strand
gaagagaugauucaacuug

SEQ ID NO: 280926 - RNA, 19 nt, Homo sapiens
  misc_RNA (1)...(19): siRNA sense strand
ucaagucucucaacuggua

SEQ ID NO: 280927 - RNA, 19 nt, Homo sapiens
  misc_RNA (1)...(19): siRNA sense strand
ugguuuagcugguucauua

SEQ ID NO: 280928 - RNA, 19 nt, Homo sapiens
  misc_RNA (1)...(19): siRNA sense strand
gagagaacccuagccauua

SEQ ID NO: 280929 - RNA, 19 nt, Homo sapiens
  misc_RNA (1)...(19): siRNA sense strand
ggcaugagcugaccuaugu

SEQ ID NO: 280930 - RNA, 19 nt, Homo sapiens
  misc_RNA (1)...(19): siRNA sense strand
gaucuaagguugucauucu

SEQ ID NO: 280931 - RNA, 19 nt, Homo sapiens
  misc_RNA (1)...(19): siRNA sense strand
gggagcugcugcugaaaua

SEQ ID NO: 280932 - RNA, 19 nt, Homo sapiens
  misc_RNA (1)...(19): siRNA sense strand
ccauggagcugcuggauga

SEQ ID NO: 280933 - RNA, 19 nt, Homo sapiens
  misc_RNA (1)...(19): siRNA sense strand
ggagaugguuauacaauag

SEQ ID NO: 280934 - RNA, 19 nt, Homo sapiens
  misc_RNA (1)...(19): siRNA sense strand
ggagagaacccuagccauu

SEQ ID NO: 280935 - RNA, 19 nt, Homo sapiens
  misc_RNA (1)...(19): siRNA sense strand
gugaugaccugguacauug

SEQ ID NO: 280936 - RNA, 19 nt, Homo sapiens
  misc_RNA (1)...(19): siRNA sense strand
gcugaaaccuucuaugaca

SEQ ID NO: 280937 - RNA, 19 nt, Homo sapiens
  misc_RNA (1)...(19): siRNA sense strand
ggagggagccuuuguggaa

SEQ ID NO: 280938 - RNA, 19 nt, Homo sapiens
  misc_RNA (1)...(19): siRNA sense strand
gcaguuggauggcuuagau

SEQ ID NO: 280939 - RNA, 19 nt, Homo sapiens
  misc_RNA (1)...(19): siRNA sense strand
ggaagaaccucacuuucag

SEQ ID NO: 280940 - RNA, 19 nt, Homo sapiens
  misc_RNA (1)...(19): siRNA sense strand
cugcagugcuuccugauua

SEQ ID NO: 280941 - RNA, 19 nt, Homo sapiens
  misc_RNA (1)...(19): siRNA sense strand
caacgaacaguacacauuu

SEQ ID NO: 280942 - RNA, 19 nt, Homo sapiens
  misc_RNA (1)...(19): siRNA sense strand
ucuacuggcucucuaauuu

SEQ ID NO: 280943 - RNA, 19 nt, Homo sapiens
  misc_RNA (1)...(19): siRNA sense strand
gacauucgcucugagauga

SEQ ID NO: 280944 - RNA, 19 nt, Homo sapiens
  misc_RNA (1)...(19): siRNA sense strand
uaaacgcccucaccaaaga

SEQ ID NO: 280945 - RNA, 19 nt, Homo sapiens
  misc_RNA (1)...(19): siRNA sense strand
ggaagagacugcuaauugc

SEQ ID NO: 280946 - RNA, 19 nt, Homo sapiens
  misc_RNA (1)...(19): siRNA sense strand
gaacaagcuagaacccaua

SEQ ID NO: 280947 - RNA, 19 nt, Homo sapiens
  misc_RNA (1)...(19): siRNA sense strand
gaucauagccaaaagcuua

SEQ ID NO: 280948 - RNA, 19 nt, Homo sapiens
  misc_RNA (1)...(19): siRNA sense strand
ggaacucuuucaugagauu

SEQ ID NO: 280949 - RNA, 19 nt, Homo sapiens
  misc_RNA (1)...(19): siRNA sense strand
gaaaagacauucgcucuga

SEQ ID NO: 280950 - RNA, 19 nt, Homo sapiens
  misc_RNA (1)...(19): siRNA sense strand
gagaagagccacccugguu

SEQ ID NO: 280951 - RNA, 19 nt, Homo sapiens
  misc_RNA (1)...(19): siRNA sense strand
ucaagggcaucguguauga

SEQ ID NO: 280952 - RNA, 19 nt, Homo sapiens
  misc_RNA (1)...(19): siRNA sense strand
ggagaugcuuuccuuaaca

SEQ ID NO: 280953 - RNA, 19 nt, Homo sapiens
  misc_RNA (1)...(19): siRNA sense strand
gaacaguacacauuuguca

SEQ ID NO: 280954 - RNA, 19 nt, Homo sapiens
  misc_RNA (1)...(19): siRNA sense strand
ggacaguucugcagaucga

SEQ ID NO: 280955 - RNA, 19 nt, Homo sapiens
  misc_RNA (1)...(19): siRNA sense strand
gcacuaggauggcaaucau

SEQ ID NO: 280956 - RNA, 19 nt, Homo sapiens
  misc_RNA (1)...(19): siRNA sense strand
aaacauugcugcauagucu

SEQ ID NO: 280957 - RNA, 19 nt, Homo sapiens
  misc_RNA (1)...(19): siRNA sense strand
ggagagaacacguggaguu

SEQ ID NO: 280958 - RNA, 19 nt, Homo sapiens
  misc_RNA (1)...(19): siRNA sense strand
cagcagaaguccuaugugu

SEQ ID NO: 280959 - RNA, 19 nt, Homo sapiens
  misc_RNA (1)...(19): siRNA sense strand
gaaauccagcucaaacuug

SEQ ID NO: 280960 - RNA, 19 nt, Homo sapiens
  misc_RNA (1)...(19): siRNA sense strand
gaugagaaagugaaagaaa

SEQ ID NO: 280961 - RNA, 19 nt, Homo sapiens
  misc_RNA (1)...(19): siRNA sense strand
gugguguucuuccucauua

SEQ ID NO: 280962 - RNA, 19 nt, Homo sapiens
  misc_RNA (1)...(19): siRNA sense strand
gucaaggugugguucaaua

SEQ ID NO: 280963 - RNA, 19 nt, Homo sapiens
  misc_RNA (1)...(19): siRNA sense strand
ggacaggauugccaucauc

SEQ ID NO: 280964 - RNA, 19 nt, Homo sapiens
  misc_RNA (1)...(19): siRNA sense strand
cagaagagaugauucaacu

SEQ ID NO: 280965 - RNA, 19 nt, Homo sapiens
  misc_RNA (1)...(19): siRNA sense strand
ugacaggacuggacaccaa

SEQ ID NO: 280966 - RNA, 19 nt, Homo sapiens
  misc_RNA (1)...(19): siRNA sense strand
ggagaacagccaagaaaug

SEQ ID NO: 280967 - RNA, 19 nt, Homo sapiens
  misc_RNA (1)...(19): siRNA sense strand
ucaaugauauccugaaguc

SEQ ID NO: 280968 - RNA, 19 nt, Homo sapiens
  misc_RNA (1)...(19): siRNA sense strand
cagcugguguggacccuua

SEQ ID NO: 280969 - RNA, 19 nt, Homo sapiens
  misc_RNA (1)...(19): siRNA sense strand
gaacauuacagcagaucaa

SEQ ID NO: 280970 - RNA, 19 nt, Homo sapiens
  misc_RNA (1)...(19): siRNA sense strand
gaaagugaaagaaagcuau

SEQ ID NO: 280971 - RNA, 19 nt, Homo sapiens
  misc_RNA (1)...(19): siRNA sense strand
aaacauccaugaaguacau

SEQ ID NO: 280972 - RNA, 19 nt, Homo sapiens
  misc_RNA (1)...(19): siRNA sense strand
ugacgaagauauauagaag

SEQ ID NO: 280973 - RNA, 19 nt, Homo sapiens
  misc_RNA (1)...(19): siRNA sense strand
gagugaagccugucaucua

SEQ ID NO: 280974 - RNA, 19 nt, Homo sapiens
  misc_RNA (1)...(19): siRNA sense strand
guggaacucuuucaugaga

SEQ ID NO: 280975 - RNA, 19 nt, Homo sapiens
  misc_RNA (1)...(19): siRNA sense strand
gguauuguguucacuggaa

SEQ ID NO: 280976 - RNA, 19 nt, Homo sapiens
  misc_RNA (1)...(19): siRNA sense strand
gguaugaggacaacaacua

SEQ ID NO: 280977 - RNA, 19 nt, Homo sapiens
  misc_RNA (1)...(19): siRNA sense strand
gacaggaggugauguuucu

SEQ ID NO: 280978 - RNA, 19 nt, Homo sapiens
  misc_RNA (1)...(19): siRNA sense strand
ggagagaagcuuucaacga

SEQ ID NO: 280979 - RNA, 19 nt, Homo sapiens
  misc_RNA (1)...(19): siRNA sense strand
uaaaagaccucucauuaca

SEQ ID NO: 280980 - RNA, 19 nt, Homo sapiens
  misc_RNA (1)...(19): siRNA sense strand
gagaggagucccagagaaa

SEQ ID NO: 280981 - RNA, 19 nt, Homo sapiens
  misc_RNA (1)...(19): siRNA sense strand
uaucaaacauccaugaagu

SEQ ID NO: 280982 - RNA, 19 nt, Homo sapiens
  misc_RNA (1)...(19): siRNA sense strand
aaagcuaucuccucugaau

SEQ ID NO: 280983 - RNA, 19 nt, Homo sapiens
  misc_RNA (1)...(19): siRNA sense strand
guccaucugugucaucuuu

SEQ ID NO: 280984 - RNA, 19 nt, Homo sapiens
  misc_RNA (1)...(19): siRNA sense strand
gaauuacugcuuucaauca

SEQ ID NO: 280985 - RNA, 19 nt, Homo sapiens
  misc_RNA (1)...(19): siRNA sense strand
caaaugauucugacauaga

SEQ ID NO: 280986 - RNA, 19 nt, Homo sapiens
  misc_RNA (1)...(19): siRNA sense strand
auagaagacuacucuguuu

SEQ ID NO: 280987 - RNA, 19 nt, Homo sapiens
  misc_RNA (1)...(19): siRNA sense strand
ucugggauaugugcaauua

SEQ ID NO: 280988 - RNA, 19 nt, Homo sapiens
  misc_RNA (1)...(19): siRNA sense strand
guacacauuugucagcaau

SEQ ID NO: 280989 - RNA, 19 nt, Homo sapiens
  misc_RNA (1)...(19): siRNA sense strand
uggaagagacugcuaauug

SEQ ID NO: 280990 - RNA, 19 nt, Homo sapiens
  misc_RNA (1)...(19): siRNA sense strand
guacauugaggcugucuuu

SEQ ID NO: 280991 - RNA, 19 nt, Homo sapiens
  misc_RNA (1)...(19): siRNA sense strand
cagcuuccaucuucauuau

SEQ ID NO: 280992 - RNA, 19 nt, Homo sapiens
  misc_RNA (1)...(19): siRNA sense strand
uggagaugguuauacaaua

SEQ ID NO: 280993 - RNA, 19 nt, Homo sapiens
  misc_RNA (1)...(19): siRNA sense strand
uaucuccucugaaugauga

SEQ ID NO: 280994 - RNA, 19 nt, Homo sapiens
  misc_RNA (1)...(19): siRNA sense strand
gcccagaccuguaaaugca

SEQ ID NO: 280995 - RNA, 19 nt, Homo sapiens
  misc_RNA (1)...(19): siRNA sense strand
gaacuucagcccuggaugu

SEQ ID NO: 280996 - RNA, 19 nt, Homo sapiens
  misc_RNA (1)...(19): siRNA sense strand
ugaagaauuuggagucuag

SEQ ID NO: 280997 - RNA, 19 nt, Homo sapiens
  misc_RNA (1)...(19): siRNA sense strand
gaagcucuuugcacuagga

SEQ ID NO: 280998 - RNA, 19 nt, Homo sapiens
  misc_RNA (1)...(19): siRNA sense strand
gaucaguagugcuuacauc

SEQ ID NO: 280999 - RNA, 19 nt, Homo sapiens
  misc_RNA (1)...(19): siRNA sense strand
cagaaugacaucuuagaaa

SEQ ID NO: 281000 - RNA, 19 nt, Homo sapiens
  misc_RNA (1)...(19): siRNA sense strand
caaaugaagaaacaccuaa

SEQ ID NO: 281001 - RNA, 19 nt, Homo sapiens
  misc_RNA (1)...(19): siRNA sense strand
guaguagcacugugucaua

SEQ ID NO: 281002 - RNA, 19 nt, Homo sapiens
  misc_RNA (1)...(19): siRNA sense strand
caagaaagauguggaaucc

SEQ ID NO: 281003 - RNA, 19 nt, Homo sapiens
  misc_RNA (1)...(19): siRNA sense strand
ggaggaacccacccacuug

SEQ ID NO: 281004 - RNA, 19 nt, Homo sapiens
  misc_RNA (1)...(19): siRNA sense strand
gcagugggacaaccuguuu

SEQ ID NO: 281005 - RNA, 19 nt, Homo sapiens
  misc_RNA (1)...(19): siRNA sense strand
caaccucucucucccaaag

SEQ ID NO: 281006 - RNA, 19 nt, Homo sapiens
  misc_RNA (1)...(19): siRNA sense strand
caacagcuugggaagauuu

SEQ ID NO: 281007 - RNA, 19 nt, Homo sapiens
  misc_RNA (1)...(19): siRNA sense strand
uccaaaugauucugacaua

SEQ ID NO: 281008 - RNA, 19 nt, Homo sapiens
  misc_RNA (1)...(19): siRNA sense strand
uaugggagcugcugcugaa

SEQ ID NO: 281009 - RNA, 19 nt, Homo sapiens
  misc_RNA (1)...(19): siRNA sense strand
guucugggcugguauugug

SEQ ID NO: 281010 - RNA, 19 nt, Homo sapiens
  misc_RNA (1)...(19): siRNA sense strand
gaggauguccaguccagua

SEQ ID NO: 281011 - RNA, 19 nt, Homo sapiens
  misc_RNA (1)...(19): siRNA sense strand
ugaaguacaucagaacaug

SEQ ID NO: 281012 - RNA, 19 nt, Homo sapiens
  misc_RNA (1)...(19): siRNA sense strand
gcagauggcccuggauguu

SEQ ID NO: 281013 - RNA, 19 nt, Homo sapiens
  misc_RNA (1)...(19): siRNA sense strand
uaagagaacuuuccagaga

SEQ ID NO: 281014 - RNA, 19 nt, Homo sapiens
  misc_RNA (1)...(19): siRNA sense strand
gagagggacuuauucaaug

SEQ ID NO: 281015 - RNA, 19 nt, Homo sapiens
  misc_RNA (1)...(19): siRNA sense strand
ugaagaauaucuccacaga

SEQ ID NO: 281016 - RNA, 19 nt, Homo sapiens
  misc_RNA (1)...(19): siRNA sense strand
cgacaacacugaagacaag

SEQ ID NO: 281017 - RNA, 19 nt, Homo sapiens
  misc_RNA (1)...(19): siRNA sense strand
gggaagauguggccugugu

SEQ ID NO: 281018 - RNA, 19 nt, Homo sapiens
  misc_RNA (1)...(19): siRNA sense strand
gguacaacauccugaauca

SEQ ID NO: 281019 - RNA, 19 nt, Homo sapiens
  misc_RNA (1)...(19): siRNA sense strand
ggacuuauucaaugggaua

SEQ ID NO: 281020 - RNA, 19 nt, Homo sapiens
  misc_RNA (1)...(19): siRNA sense strand
ccacagacacaucggguua

SEQ ID NO: 281021 - RNA, 19 nt, Homo sapiens
  misc_RNA (1)...(19): siRNA sense strand
aagaauaucuccacagaca

SEQ ID NO: 281022 - RNA, 19 nt, Homo sapiens
  misc_RNA (1)...(19): siRNA sense strand
ggaaggacgacaacacuga

SEQ ID NO: 281023 - RNA, 19 nt, Homo sapiens
  misc_RNA (1)...(19): siRNA sense strand
cagcugaccugccaaucaa

SEQ ID NO: 281024 - RNA, 19 nt, Homo sapiens
  misc_RNA (1)...(19): siRNA sense strand
gaagauguggccuguguug

SEQ ID NO: 281025 - RNA, 19 nt, Homo sapiens
  misc_RNA (1)...(19): siRNA sense strand
gaacguggcccuguaugug

SEQ ID NO: 281026 - RNA, 19 nt, Homo sapiens
  misc_RNA (1)...(19): siRNA sense strand
auggugagcuuuauaagaa

SEQ ID NO: 281027 - RNA, 19 nt, Homo sapiens
  misc_RNA (1)...(19): siRNA sense strand
caacggcaccuacgagugu

SEQ ID NO: 281028 - RNA, 19 nt, Homo sapiens
  misc_RNA (1)...(19): siRNA sense strand
cuacauccauggugagcuu

SEQ ID NO: 281029 - RNA, 19 nt, Homo sapiens
  misc_RNA (1)...(19): siRNA sense strand
ccaugaacguggcccugua

SEQ ID NO: 281030 - RNA, 19 nt, Homo sapiens
  misc_RNA (1)...(19): siRNA sense strand
gaauaucuccacagacaca

SEQ ID NO: 281031 - RNA, 19 nt, Homo sapiens
  misc_RNA (1)...(19): siRNA sense strand
cgagagggacuuauucaau

SEQ ID NO: 281032 - RNA, 19 nt, Homo sapiens
  misc_RNA (1)...(19): siRNA sense strand
gaaggacgacaacacugaa

SEQ ID NO: 281033 - RNA, 19 nt, Homo sapiens
  misc_RNA (1)...(19): siRNA sense strand
caccagagcagcuaagaga

SEQ ID NO: 281034 - RNA, 19 nt, Homo sapiens
  misc_RNA (1)...(19): siRNA sense strand
gagcagcuaagagaacuuu

SEQ ID NO: 281035 - RNA, 19 nt, Homo sapiens
  misc_RNA (1)...(19): siRNA sense strand
gaggagcacugggcgugaa

SEQ ID NO: 281036 - RNA, 19 nt, Homo sapiens
  misc_RNA (1)...(19): siRNA sense strand
cgagggagagaccauaauu

SEQ ID NO: 281037 - RNA, 19 nt, Homo sapiens
  misc_RNA (1)...(19): siRNA sense strand
gggaggaggaggaugacua

SEQ ID NO: 281038 - RNA, 19 nt, Homo sapiens
  misc_RNA (1)...(19): siRNA sense strand
cagccugucucccugaaga

SEQ ID NO: 281039 - RNA, 19 nt, Homo sapiens
  misc_RNA (1)...(19): siRNA sense strand
ucagaucucccuccaugaa

SEQ ID NO: 281040 - RNA, 19 nt, Homo sapiens
  misc_RNA (1)...(19): siRNA sense strand
uaagaaucgcgucagcaua

SEQ ID NO: 281041 - RNA, 19 nt, Homo sapiens
  misc_RNA (1)...(19): siRNA sense strand
ucauuggcaucaucaucua

SEQ ID NO: 281042 - RNA, 19 nt, Homo sapiens
  misc_RNA (1)...(19): siRNA sense strand
aagaaucgcgucagcauau

SEQ ID NO: 281043 - RNA, 19 nt, Homo sapiens
  misc_RNA (1)...(19): siRNA sense strand
gagggagagaccauaauug

SEQ ID NO: 281044 - RNA, 19 nt, Homo sapiens
  misc_RNA (1)...(19): siRNA sense strand
agagaacuuuccagagaga

SEQ ID NO: 281045 - RNA, 19 nt, Homo sapiens
  misc_RNA (1)...(19): siRNA sense strand
cggaaaggguggucaucug

SEQ ID NO: 281046 - RNA, 19 nt, Homo sapiens
  misc_RNA (1)...(19): siRNA sense strand
gucagcauauccaacaaug

SEQ ID NO: 281047 - RNA, 19 nt, Homo sapiens
  misc_RNA (1)...(19): siRNA sense strand
ggugagcuuuauaagaauc

SEQ ID NO: 281048 - RNA, 19 nt, Homo sapiens
  misc_RNA (1)...(19): siRNA sense strand
gcagcccucauuaucauug

SEQ ID NO: 281049 - RNA, 19 nt, Homo sapiens
  misc_RNA (1)...(19): siRNA sense strand
cauggugagcuuuauaaga

SEQ ID NO: 281050 - RNA, 19 nt, Homo sapiens
  misc_RNA (1)...(19): siRNA sense strand
ggaccaccucgaccaguga

SEQ ID NO: 281051 - RNA, 19 nt, Homo sapiens
  misc_RNA (1)...(19): siRNA sense strand
aagcuccuccucacucaua

SEQ ID NO: 281052 - RNA, 19 nt, Homo sapiens
  misc_RNA (1)...(19): siRNA sense strand
gaccauaauugggaacaac

SEQ ID NO: 281053 - RNA, 19 nt, Homo sapiens
  misc_RNA (1)...(19): siRNA sense strand
ccagcugaccugccaauca

SEQ ID NO: 281054 - RNA, 19 nt, Homo sapiens
  misc_RNA (1)...(19): siRNA sense strand
ggaggaggaggaugacuac

SEQ ID NO: 281055 - RNA, 19 nt, Homo sapiens
  misc_RNA (1)...(19): siRNA sense strand
cacaucggguuacuacauc

SEQ ID NO: 281056 - RNA, 19 nt, Homo sapiens
  misc_RNA (1)...(19): siRNA sense strand
agagggaggaggaggauga

SEQ ID NO: 281057 - RNA, 19 nt, Homo sapiens
  misc_RNA (1)...(19): siRNA sense strand
gugguugcagcccucauua

SEQ ID NO: 281058 - RNA, 19 nt, Homo sapiens
  misc_RNA (1)...(19): siRNA sense strand
ggagggcaacaccaaguca

SEQ ID NO: 281059 - RNA, 19 nt, Homo sapiens
  misc_RNA (1)...(19): siRNA sense strand
gaaccgggaagccuaugag

SEQ ID NO: 281060 - RNA, 19 nt, Homo sapiens
  misc_RNA (1)...(19): siRNA sense strand
agagggacuuauucaaugg

SEQ ID NO: 281061 - RNA, 19 nt, Homo sapiens
  misc_RNA (1)...(19): siRNA sense strand
cauuaucauuggcaucauc

SEQ ID NO: 281062 - RNA, 19 nt, Homo sapiens
  misc_RNA (1)...(19): siRNA sense strand
gcuggaagagguacaacau

SEQ ID NO: 281063 - RNA, 19 nt, Homo sapiens
  misc_RNA (1)...(19): siRNA sense strand
agacacaucggguuacuac

SEQ ID NO: 281064 - RNA, 19 nt, Homo sapiens
  misc_RNA (1)...(19): siRNA sense strand
gguugcagcccucauuauc

SEQ ID NO: 281065 - RNA, 19 nt, Homo sapiens
  misc_RNA (1)...(19): siRNA sense strand
acacaucggguuacuacau

SEQ ID NO: 281066 - RNA, 19 nt, Homo sapiens
  misc_RNA (1)...(19): siRNA sense strand
cauccauggugagcuuuau

SEQ ID NO: 281067 - RNA, 19 nt, Homo sapiens
  misc_RNA (1)...(19): siRNA sense strand
uugcagcccucauuaucau

SEQ ID NO: 281068 - RNA, 19 nt, Homo sapiens
  misc_RNA (1)...(19): siRNA sense strand
gcaccuacgaguguucugu

SEQ ID NO: 281069 - RNA, 19 nt, Homo sapiens
  misc_RNA (1)...(19): siRNA sense strand
cagagcagcuaagagaacu

SEQ ID NO: 281070 - RNA, 19 nt, Homo sapiens
  misc_RNA (1)...(19): siRNA sense strand
gagguacaacauccugaau

SEQ ID NO: 281071 - RNA, 19 nt, Homo sapiens
  misc_RNA (1)...(19): siRNA sense strand
ggaagauguggccuguguu

SEQ ID NO: 281072 - RNA, 19 nt, Homo sapiens
  misc_RNA (1)...(19): siRNA sense strand
gaagacaaggaggaugcaa

SEQ ID NO: 281073 - RNA, 19 nt, Homo sapiens
  misc_RNA (1)...(19): siRNA sense strand
ggacgacaacacugaagac

SEQ ID NO: 281074 - RNA, 19 nt, Homo sapiens
  misc_RNA (1)...(19): siRNA sense strand
cugucucccugaagaauau

SEQ ID NO: 281075 - RNA, 19 nt, Homo sapiens
  misc_RNA (1)...(19): siRNA sense strand
caucgagggagagaccaua

SEQ ID NO: 281076 - RNA, 19 nt, Homo sapiens
  misc_RNA (1)...(19): siRNA sense strand
ggaaacuccgcaggacguu

SEQ ID NO: 281077 - RNA, 19 nt, Homo sapiens
  misc_RNA (1)...(19): siRNA sense strand
guugcagcccucauuauca

SEQ ID NO: 281078 - RNA, 19 nt, Homo sapiens
  misc_RNA (1)...(19): siRNA sense strand
auaagcuccuccucacuca

SEQ ID NO: 281079 - RNA, 19 nt, Homo sapiens
  misc_RNA (1)...(19): siRNA sense strand
gagaggccaucaucaaaua

SEQ ID NO: 281080 - RNA, 19 nt, Homo sapiens
  misc_RNA (1)...(19): siRNA sense strand
gaagaaaccucugaagaca

SEQ ID NO: 281081 - RNA, 19 nt, Homo sapiens
  misc_RNA (1)...(19): siRNA sense strand
gaagggccguauugaguuu

SEQ ID NO: 281082 - RNA, 19 nt, Homo sapiens
  misc_RNA (1)...(19): siRNA sense strand
ucgagacggugaaguauua

SEQ ID NO: 281083 - RNA, 19 nt, Homo sapiens
  misc_RNA (1)...(19): siRNA sense strand
gcgcauacuuugucacuga

SEQ ID NO: 281084 - RNA, 19 nt, Homo sapiens
  misc_RNA (1)...(19): siRNA sense strand
gcagggaagagcacaauuu

SEQ ID NO: 281085 - RNA, 19 nt, Homo sapiens
  misc_RNA (1)...(19): siRNA sense strand
ucucuggccuggacuguua

SEQ ID NO: 281086 - RNA, 19 nt, Homo sapiens
  misc_RNA (1)...(19): siRNA sense strand
acacuguccucuuuaauga

SEQ ID NO: 281087 - RNA, 19 nt, Homo sapiens
  misc_RNA (1)...(19): siRNA sense strand
gcaaugggcaucuggauca

SEQ ID NO: 281088 - RNA, 19 nt, Homo sapiens
  misc_RNA (1)...(19): siRNA sense strand
gaacgugcacuucagcuau

SEQ ID NO: 281089 - RNA, 19 nt, Homo sapiens
  misc_RNA (1)...(19): siRNA sense strand
gccaacagguucaguuuag

SEQ ID NO: 281090 - RNA, 19 nt, Homo sapiens
  misc_RNA (1)...(19): siRNA sense strand
ggaagaaaccucugaagac

SEQ ID NO: 281091 - RNA, 19 nt, Homo sapiens
  misc_RNA (1)...(19): siRNA sense strand
gcacacaggcucucaacug

SEQ ID NO: 281092 - RNA, 19 nt, Homo sapiens
  misc_RNA (1)...(19): siRNA sense strand
gaacgggcacucaaugugu

SEQ ID NO: 281093 - RNA, 19 nt, Homo sapiens
  misc_RNA (1)...(19): siRNA sense strand
ggaccaagauguggaaagg

SEQ ID NO: 281094 - RNA, 19 nt, Homo sapiens
  misc_RNA (1)...(19): siRNA sense strand
cgucagcgcuggauacauc

SEQ ID NO: 281095 - RNA, 19 nt, Homo sapiens
  misc_RNA (1)...(19): siRNA sense strand
cauuauggcuuucccugaa

SEQ ID NO: 281096 - RNA, 19 nt, Homo sapiens
  misc_RNA (1)...(19): siRNA sense strand
ugaacuugcugacugagaa

SEQ ID NO: 281097 - RNA, 19 nt, Homo sapiens
  misc_RNA (1)...(19): siRNA sense strand
gaaagaggagacagaagug

SEQ ID NO: 281098 - RNA, 19 nt, Homo sapiens
  misc_RNA (1)...(19): siRNA sense strand
guacaggcuucgugagcaa

SEQ ID NO: 281099 - RNA, 19 nt, Homo sapiens
  misc_RNA (1)...(19): siRNA sense strand
gaacuuggcccuggugucu

SEQ ID NO: 281100 - RNA, 19 nt, Homo sapiens
  misc_RNA (1)...(19): siRNA sense strand
gucgagcgcuucacugguu

SEQ ID NO: 281101 - RNA, 19 nt, Homo sapiens
  misc_RNA (1)...(19): siRNA sense strand
gcucucaacuguggucaau

SEQ ID NO: 281102 - RNA, 19 nt, Homo sapiens
  misc_RNA (1)...(19): siRNA sense strand
ccaguuacgucuuccucaa

SEQ ID NO: 281103 - RNA, 19 nt, Homo sapiens
  misc_RNA (1)...(19): siRNA sense strand
ggagaacauguuugacuug

SEQ ID NO: 281104 - RNA, 19 nt, Homo sapiens
  misc_RNA (1)...(19): siRNA sense strand
ucagcuaccugguguucaa

SEQ ID NO: 281105 - RNA, 19 nt, Homo sapiens
  misc_RNA (1)...(19): siRNA sense strand
guuggugccuauauucuau

SEQ ID NO: 281106 - RNA, 19 nt, Homo sapiens
  misc_RNA (1)...(19): siRNA sense strand
cuggauacaucuaaugaga

SEQ ID NO: 281107 - RNA, 19 nt, Homo sapiens
  misc_RNA (1)...(19): siRNA sense strand
gaccagauccucgucauca

SEQ ID NO: 281108 - RNA, 19 nt, Homo sapiens
  misc_RNA (1)...(19): siRNA sense strand
cagucuaccuggcgagauu

SEQ ID NO: 281109 - RNA, 19 nt, Homo sapiens
  misc_RNA (1)...(19): siRNA sense strand
cagaagggccguauugagu

SEQ ID NO: 281110 - RNA, 19 nt, Homo sapiens
  misc_RNA (1)...(19): siRNA sense strand
cagaccaacuucauugaca

SEQ ID NO: 281111 - RNA, 19 nt, Homo sapiens
  misc_RNA (1)...(19): siRNA sense strand
gauccagaccaacuucauu

SEQ ID NO: 281112 - RNA, 19 nt, Homo sapiens
  misc_RNA (1)...(19): siRNA sense strand
ucaauugguuuggcaccua

SEQ ID NO: 281113 - RNA, 19 nt, Homo sapiens
  misc_RNA (1)...(19): siRNA sense strand
auaggaacauugugaacuu

SEQ ID NO: 281114 - RNA, 19 nt, Homo sapiens
  misc_RNA (1)...(19): siRNA sense strand
ggccaacagguucaguuua

SEQ ID NO: 281115 - RNA, 19 nt, Homo sapiens
  misc_RNA (1)...(19): siRNA sense strand
caaccgcaccaccaucgua

SEQ ID NO: 281116 - RNA, 19 nt, Homo sapiens
  misc_RNA (1)...(19): siRNA sense strand
guauugaguuugagaacgu

SEQ ID NO: 281117 - RNA, 19 nt, Homo sapiens
  misc_RNA (1)...(19): siRNA sense strand
ugaaagaggagacagaagu

SEQ ID NO: 281118 - RNA, 19 nt, Homo sapiens
  misc_RNA (1)...(19): siRNA sense strand
caucaucauuggcaucauc

SEQ ID NO: 281119 - RNA, 19 nt, Homo sapiens
  misc_RNA (1)...(19): siRNA sense strand
cauugcagguucaugaaga

SEQ ID NO: 281120 - RNA, 19 nt, Homo sapiens
  misc_RNA (1)...(19): siRNA sense strand
ggaacgggcacucaaugug

SEQ ID NO: 281121 - RNA, 19 nt, Homo sapiens
  misc_RNA (1)...(19): siRNA sense strand
uggagaacauguuugacuu

SEQ ID NO: 281122 - RNA, 19 nt, Homo sapiens
  misc_RNA (1)...(19): siRNA sense strand
gggacuaugugcucuuugg

SEQ ID NO: 281123 - RNA, 19 nt, Homo sapiens
  misc_RNA (1)...(19): siRNA sense strand
gguuuggccucauuguguu

SEQ ID NO: 281124 - RNA, 19 nt, Homo sapiens
  misc_RNA (1)...(19): siRNA sense strand
ucacagcugggaaugauga

SEQ ID NO: 281125 - RNA, 19 nt, Homo sapiens
  misc_RNA (1)...(19): siRNA sense strand
guuugcagcugagaacuug

SEQ ID NO: 281126 - RNA, 19 nt, Homo sapiens
  misc_RNA (1)...(19): siRNA sense strand
acacuaagccucagaccau

SEQ ID NO: 281127 - RNA, 19 nt, Homo sapiens
  misc_RNA (1)...(19): siRNA sense strand
cugccaagcuaucuacuuc

SEQ ID NO: 281128 - RNA, 19 nt, Homo sapiens
  misc_RNA (1)...(19): siRNA sense strand
caaguuucgucgugcuaug

SEQ ID NO: 281129 - RNA, 19 nt, Homo sapiens
  misc_RNA (1)...(19): siRNA sense strand
ucaauguguuggugccuau

SEQ ID NO: 281130 - RNA, 19 nt, Homo sapiens
  misc_RNA (1)...(19): siRNA sense strand
gccaagcuaucuacuucug

SEQ ID NO: 281131 - RNA, 19 nt, Homo sapiens
  misc_RNA (1)...(19): siRNA sense strand
ccucuggacuguggcguuu

SEQ ID NO: 281132 - RNA, 19 nt, Homo sapiens
  misc_RNA (1)...(19): siRNA sense strand
agaaaccucugaagacacu

SEQ ID NO: 281133 - RNA, 19 nt, Homo sapiens
  misc_RNA (1)...(19): siRNA sense strand
ucauugacauggagaacau

SEQ ID NO: 281134 - RNA, 19 nt, Homo sapiens
  misc_RNA (1)...(19): siRNA sense strand
ucacugagcagaagcuaca

SEQ ID NO: 281135 - RNA, 19 nt, Homo sapiens
  misc_RNA (1)...(19): siRNA sense strand
ucauuggcaucaucuacuu

SEQ ID NO: 281136 - RNA, 19 nt, Homo sapiens
  misc_RNA (1)...(19): siRNA sense strand
gggccaacagguucaguuu

SEQ ID NO: 281137 - RNA, 19 nt, Homo sapiens
  misc_RNA (1)...(19): siRNA sense strand
cgagaggccaucaucaaau

SEQ ID NO: 281138 - RNA, 19 nt, Homo sapiens
  misc_RNA (1)...(19): siRNA sense strand
gaauagaugggcaggacau

SEQ ID NO: 281139 - RNA, 19 nt, Homo sapiens
  misc_RNA (1)...(19): siRNA sense strand
auacauugcagguucauga

SEQ ID NO: 281140 - RNA, 19 nt, Homo sapiens
  misc_RNA (1)...(19): siRNA sense strand
ugucacagcugggaaugau

SEQ ID NO: 281141 - RNA, 19 nt, Homo sapiens
  misc_RNA (1)...(19): siRNA sense strand
caccaucgccgacaauauc

SEQ ID NO: 281142 - RNA, 19 nt, Homo sapiens
  misc_RNA (1)...(19): siRNA sense strand
ucucuccggucucacauug

SEQ ID NO: 281143 - RNA, 19 nt, Homo sapiens
  misc_RNA (1)...(19): siRNA sense strand
uggacucucugcuaaacuu

SEQ ID NO: 281144 - RNA, 19 nt, Homo sapiens
  misc_RNA (1)...(19): siRNA sense strand
ggauccgggugcagcaguu

SEQ ID NO: 281145 - RNA, 19 nt, Homo sapiens
  misc_RNA (1)...(19): siRNA sense strand
gaagacacuaagccucaga

SEQ ID NO: 281146 - RNA, 19 nt, Homo sapiens
  misc_RNA (1)...(19): siRNA sense strand
gaagcagcgcgucgccauu

SEQ ID NO: 281147 - RNA, 19 nt, Homo sapiens
  misc_RNA (1)...(19): siRNA sense strand
gcuaccugguguucaaugu

SEQ ID NO: 281148 - RNA, 19 nt, Homo sapiens
  misc_RNA (1)...(19): siRNA sense strand
ugaagaggaccaagaugug

SEQ ID NO: 281149 - RNA, 19 nt, Homo sapiens
  misc_RNA (1)...(19): siRNA sense strand
gcugaaagaggagacagaa

SEQ ID NO: 281150 - RNA, 19 nt, Homo sapiens
  misc_RNA (1)...(19): siRNA sense strand
gcucccugcuuugcgcaua

SEQ ID NO: 281151 - RNA, 19 nt, Homo sapiens
  misc_RNA (1)...(19): siRNA sense strand
uaccugguguucaauguca

SEQ ID NO: 281152 - RNA, 19 nt, Homo sapiens
  misc_RNA (1)...(19): siRNA sense strand
gacaggaagaaaccucuga

SEQ ID NO: 281153 - RNA, 19 nt, Homo sapiens
  misc_RNA (1)...(19): siRNA sense strand
ugugaugccuggacagaca

SEQ ID NO: 281154 - RNA, 19 nt, Homo sapiens
  misc_RNA (1)...(19): siRNA sense strand
ccaacuucauugacaugga

SEQ ID NO: 281155 - RNA, 19 nt, Homo sapiens
  misc_RNA (1)...(19): siRNA sense strand
guucuucaacgccugguuu

SEQ ID NO: 281156 - RNA, 19 nt, Homo sapiens
  misc_RNA (1)...(19): siRNA sense strand
uagaugggcaggacauuuc

SEQ ID NO: 281157 - RNA, 19 nt, Homo sapiens
  misc_RNA (1)...(19): siRNA sense strand
uaggaacauugugaacuug

SEQ ID NO: 281158 - RNA, 19 nt, Homo sapiens
  misc_RNA (1)...(19): siRNA sense strand
gcccuggugucuuggaaca

SEQ ID NO: 281159 - RNA, 19 nt, Homo sapiens
  misc_RNA (1)...(19): siRNA sense strand
ucucaacuguggucaaugc

SEQ ID NO: 281160 - RNA, 19 nt, Homo sapiens
  misc_RNA (1)...(19): siRNA sense strand
aggcuucucuggccaaagu

SEQ ID NO: 281161 - RNA, 19 nt, Homo sapiens
  misc_RNA (1)...(19): siRNA sense strand
caacgucagcgcuggauac

SEQ ID NO: 281162 - RNA, 19 nt, Homo sapiens
  misc_RNA (1)...(19): siRNA sense strand
ggucucacauuggaguugu

SEQ ID NO: 281163 - RNA, 19 nt, Homo sapiens
  misc_RNA (1)...(19): siRNA sense strand
ucgagaggccaucaucaaa

SEQ ID NO: 281164 - RNA, 19 nt, Homo sapiens
  misc_RNA (1)...(19): siRNA sense strand
gggcacauccagugucaca

SEQ ID NO: 281165 - RNA, 19 nt, Homo sapiens
  misc_RNA (1)...(19): siRNA sense strand
gugcugauucgcugucuug

SEQ ID NO: 281166 - RNA, 19 nt, Homo sapiens
  misc_RNA (1)...(19): siRNA sense strand
aggaagaaaccucugaaga

SEQ ID NO: 281167 - RNA, 19 nt, Homo sapiens
  misc_RNA (1)...(19): siRNA sense strand
gcaucuggaucaaguucag

SEQ ID NO: 281168 - RNA, 19 nt, Homo sapiens
  misc_RNA (1)...(19): siRNA sense strand
gaguggagaaccaaguuuc

SEQ ID NO: 281169 - RNA, 19 nt, Homo sapiens
  misc_RNA (1)...(19): siRNA sense strand
gcaacgucagcgcuggaua

SEQ ID NO: 281170 - RNA, 19 nt, Homo sapiens
  misc_RNA (1)...(19): siRNA sense strand
agaagggccguauugaguu

SEQ ID NO: 281171 - RNA, 19 nt, Homo sapiens
  misc_RNA (1)...(19): siRNA sense strand
uguuugacuugcugaaaga

SEQ ID NO: 281172 - RNA, 19 nt, Homo sapiens
  misc_RNA (1)...(19): siRNA sense strand
gcucuuuggcaccuacauu

SEQ ID NO: 281173 - RNA, 19 nt, Homo sapiens
  misc_RNA (1)...(19): siRNA sense strand
ggaacauugugaacuugcu

SEQ ID NO: 281174 - RNA, 19 nt, Homo sapiens
  misc_RNA (1)...(19): siRNA sense strand
cgagaguuacgaaguggaa

SEQ ID NO: 281175 - RNA, 19 nt, Homo sapiens
  misc_RNA (1)...(19): siRNA sense strand
ugagcaaccugcgcaccuu

SEQ ID NO: 281176 - RNA, 19 nt, Homo sapiens
  misc_RNA (1)...(19): siRNA sense strand
gggcaucauucugcuggau

SEQ ID NO: 281177 - RNA, 19 nt, Homo sapiens
  misc_RNA (1)...(19): siRNA sense strand
gacaccaucgccgacaaua

SEQ ID NO: 281178 - RNA, 19 nt, Homo sapiens
  misc_RNA (1)...(19): siRNA sense strand
uaccucacccugaccauug

SEQ ID NO: 281179 - RNA, 19 nt, Homo sapiens
  misc_RNA (1)...(19): siRNA sense strand
ucacaagacucacaauuca

SEQ ID NO: 281180 - RNA, 19 nt, Homo sapiens
  misc_RNA (1)...(19): siRNA sense strand
caggagagcugaccuugga

SEQ ID NO: 281181 - RNA, 19 nt, Homo sapiens
  misc_RNA (1)...(19): siRNA sense strand
aaacagagccagaaugcuu

SEQ ID NO: 281182 - RNA, 19 nt, Homo sapiens
  misc_RNA (1)...(19): siRNA sense strand
gaaggaaggaacacgcaaa

SEQ ID NO: 281183 - RNA, 19 nt, Homo sapiens
  misc_RNA (1)...(19): siRNA sense strand
gaagcaaauucacaagacu

SEQ ID NO: 281184 - RNA, 19 nt, Homo sapiens
  misc_RNA (1)...(19): siRNA sense strand
acaagacucacaauucaaa

SEQ ID NO: 281185 - RNA, 19 nt, Homo sapiens
  misc_RNA (1)...(19): siRNA sense strand
caaauucacaagacucaca

SEQ ID NO: 281186 - RNA, 19 nt, Homo sapiens
  misc_RNA (1)...(19): siRNA sense strand
cagaagcaaauucacaaga

SEQ ID NO: 281187 - RNA, 19 nt, Homo sapiens
  misc_RNA (1)...(19): siRNA sense strand
agaagcaaauucacaagac

SEQ ID NO: 281188 - RNA, 19 nt, Homo sapiens
  misc_RNA (1)...(19): siRNA sense strand
agacucacaauucaaagaa

SEQ ID NO: 281189 - RNA, 19 nt, Homo sapiens
  misc_RNA (1)...(19): siRNA sense strand
ggacacccagaagcaaauu

SEQ ID NO: 281190 - RNA, 19 nt, Homo sapiens
  misc_RNA (1)...(19): siRNA sense strand
uaccuucuucuuucaauug

SEQ ID NO: 281191 - RNA, 19 nt, Homo sapiens
  misc_RNA (1)...(19): siRNA sense strand
gaauuugggaaggaaggaa

SEQ ID NO: 281192 - RNA, 19 nt, Homo sapiens
  misc_RNA (1)...(19): siRNA sense strand
uggacacuauggacggaaa

SEQ ID NO: 281193 - RNA, 19 nt, Homo sapiens
  misc_RNA (1)...(19): siRNA sense strand
uuuccugucaguugaauuu

SEQ ID NO: 281194 - RNA, 19 nt, Homo sapiens
  misc_RNA (1)...(19): siRNA sense strand
ggaacgagcugccgaaguu

SEQ ID NO: 281195 - RNA, 19 nt, Homo sapiens
  misc_RNA (1)...(19): siRNA sense strand
gaaagagccuguuaccuau

SEQ ID NO: 281196 - RNA, 19 nt, Homo sapiens
  misc_RNA (1)...(19): siRNA sense strand
gaacgcauuuggcaauaug

SEQ ID NO: 281197 - RNA, 19 nt, Homo sapiens
  misc_RNA (1)...(19): siRNA sense strand
gaaacuagcuccaaaagau

SEQ ID NO: 281198 - RNA, 19 nt, Homo sapiens
  misc_RNA (1)...(19): siRNA sense strand
caacggauccggugugauu

SEQ ID NO: 281199 - RNA, 19 nt, Homo sapiens
  misc_RNA (1)...(19): siRNA sense strand
agaaagagccuguuaccua

SEQ ID NO: 281200 - RNA, 19 nt, Homo sapiens
  misc_RNA (1)...(19): siRNA sense strand
ugaagaaacuagcuccaaa

SEQ ID NO: 281201 - RNA, 19 nt, Homo sapiens
  misc_RNA (1)...(19): siRNA sense strand
ugacugaggcgccuuuaaa

SEQ ID NO: 281202 - RNA, 19 nt, Homo sapiens
  misc_RNA (1)...(19): siRNA sense strand
ccuguuaccuauccauaaa

SEQ ID NO: 281203 - RNA, 19 nt, Homo sapiens
  misc_RNA (1)...(19): siRNA sense strand
gaagaugugggucuccaaa

SEQ ID NO: 281204 - RNA, 19 nt, Homo sapiens
  misc_RNA (1)...(19): siRNA sense strand
caaccagccugucgugauc

SEQ ID NO: 281205 - RNA, 19 nt, Homo sapiens
  misc_RNA (1)...(19): siRNA sense strand
agagaaagcucaguacuac

SEQ ID NO: 281206 - RNA, 19 nt, Homo sapiens
  misc_RNA (1)...(19): siRNA sense strand
gcucuacccuguucaaagg

SEQ ID NO: 281207 - RNA, 19 nt, Homo sapiens
  misc_RNA (1)...(19): siRNA sense strand
ggaacgcauuuggcaauau

SEQ ID NO: 281208 - RNA, 19 nt, Homo sapiens
  misc_RNA (1)...(19): siRNA sense strand
cagagaaagcucaguacua

SEQ ID NO: 281209 - RNA, 19 nt, Homo sapiens
  misc_RNA (1)...(19): siRNA sense strand
ccucugaguuugagauugu

SEQ ID NO: 281210 - RNA, 19 nt, Homo sapiens
  misc_RNA (1)...(19): siRNA sense strand
gacaacggauccgguguga

SEQ ID NO: 281211 - RNA, 19 nt, Homo sapiens
  misc_RNA (1)...(19): siRNA sense strand
agacagagaaagcucagua

SEQ ID NO: 281212 - RNA, 19 nt, Homo sapiens
  misc_RNA (1)...(19): siRNA sense strand
ccaaauacugcuuuccaaa

SEQ ID NO: 281213 - RNA, 19 nt, Homo sapiens
  misc_RNA (1)...(19): siRNA sense strand
aggaccagcugcagacuuu

SEQ ID NO: 281214 - RNA, 19 nt, Homo sapiens
  misc_RNA (1)...(19): siRNA sense strand
gaugugaagaucaggauau

SEQ ID NO: 281215 - RNA, 19 nt, Homo sapiens
  misc_RNA (1)...(19): siRNA sense strand
gaacgacauggaacgcauu

SEQ ID NO: 281216 - RNA, 19 nt, Homo sapiens
  misc_RNA (1)...(19): siRNA sense strand
guaaggagggcuacgacuu

SEQ ID NO: 281217 - RNA, 19 nt, Homo sapiens
  misc_RNA (1)...(19): siRNA sense strand
cuggacaccuuuaagaaga

SEQ ID NO: 281218 - RNA, 19 nt, Homo sapiens
  misc_RNA (1)...(19): siRNA sense strand
uaaaagaaagagccuguua

SEQ ID NO: 281219 - RNA, 19 nt, Homo sapiens
  misc_RNA (1)...(19): siRNA sense strand
gcagcaccauugagauugg

SEQ ID NO: 281220 - RNA, 19 nt, Homo sapiens
  misc_RNA (1)...(19): siRNA sense strand
gaacgagcugccgaaguuu

SEQ ID NO: 281221 - RNA, 19 nt, Homo sapiens
  misc_RNA (1)...(19): siRNA sense strand
ggacaccuuuaagaagaug

SEQ ID NO: 281222 - RNA, 19 nt, Homo sapiens
  misc_RNA (1)...(19): siRNA sense strand
gauugguccuucccgauuc

SEQ ID NO: 281223 - RNA, 19 nt, Homo sapiens
  misc_RNA (1)...(19): siRNA sense strand
gcauuuggcaauaugucua

SEQ ID NO: 281224 - RNA, 19 nt, Homo sapiens
  misc_RNA (1)...(19): siRNA sense strand
gagauugucaaggccauaa

SEQ ID NO: 281225 - RNA, 19 nt, Homo sapiens
  misc_RNA (1)...(19): siRNA sense strand
uaaggagggcuacgacuuc

SEQ ID NO: 281226 - RNA, 19 nt, Homo sapiens
  misc_RNA (1)...(19): siRNA sense strand
gggcuacgacuuccacuca

SEQ ID NO: 281227 - RNA, 19 nt, Homo sapiens
  misc_RNA (1)...(19): siRNA sense strand
auacugcuuuccaaacuau

SEQ ID NO: 281228 - RNA, 19 nt, Homo sapiens
  misc_RNA (1)...(19): siRNA sense strand
gaagaaacuagcuccaaaa

SEQ ID NO: 281229 - RNA, 19 nt, Homo sapiens
  misc_RNA (1)...(19): siRNA sense strand
uggaacgcauuuggcaaua

SEQ ID NO: 281230 - RNA, 19 nt, Homo sapiens
  misc_RNA (1)...(19): siRNA sense strand
aaauacugcuuuccaaacu

SEQ ID NO: 281231 - RNA, 19 nt, Homo sapiens
  misc_RNA (1)...(19): siRNA sense strand
ggauuggaacgacauggaa

SEQ ID NO: 281232 - RNA, 19 nt, Homo sapiens
  misc_RNA (1)...(19): siRNA sense strand
gauccggugugauuaaagc

SEQ ID NO: 281233 - RNA, 19 nt, Homo sapiens
  misc_RNA (1)...(19): siRNA sense strand
caaaagaugugaagaucag

SEQ ID NO: 281234 - RNA, 19 nt, Homo sapiens
  misc_RNA (1)...(19): siRNA sense strand
caaauacugcuuuccaaac

SEQ ID NO: 281235 - RNA, 19 nt, Homo sapiens
  misc_RNA (1)...(19): siRNA sense strand
gcuacgacuuccacucauc

SEQ ID NO: 281236 - RNA, 19 nt, Homo sapiens
  misc_RNA (1)...(19): siRNA sense strand
aauacugcuuuccaaacua

SEQ ID NO: 281237 - RNA, 19 nt, Homo sapiens
  misc_RNA (1)...(19): siRNA sense strand
cgacauggaacgcauuugg

SEQ ID NO: 281238 - RNA, 19 nt, Homo sapiens
  misc_RNA (1)...(19): siRNA sense strand
cccgauccauccacagaaa

SEQ ID NO: 281239 - RNA, 19 nt, Homo sapiens
  misc_RNA (1)...(19): siRNA sense strand
cccaaauacugcuuuccaa

SEQ ID NO: 281240 - RNA, 19 nt, Homo sapiens
  misc_RNA (1)...(19): siRNA sense strand
gauuaaagcugguuuugcu

SEQ ID NO: 281241 - RNA, 19 nt, Homo sapiens
  misc_RNA (1)...(19): siRNA sense strand
cggauccggugugauuaaa

SEQ ID NO: 281242 - RNA, 19 nt, Homo sapiens
  misc_RNA (1)...(19): siRNA sense strand
gcucuucaggccagauuug

SEQ ID NO: 281243 - RNA, 19 nt, Homo sapiens
  misc_RNA (1)...(19): siRNA sense strand
gcaccgagggcugcuuuca

SEQ ID NO: 281244 - RNA, 19 nt, Homo sapiens
  misc_RNA (1)...(19): siRNA sense strand
aaaggaauaugaggaagac

SEQ ID NO: 281245 - RNA, 19 nt, Homo sapiens
  misc_RNA (1)...(19): siRNA sense strand
accgagggcugcuuucaau

SEQ ID NO: 281246 - RNA, 19 nt, Homo sapiens
  misc_RNA (1)...(19): siRNA sense strand
uggcagcaccauugagauu

SEQ ID NO: 281247 - RNA, 19 nt, Homo sapiens
  misc_RNA (1)...(19): siRNA sense strand
cuucaggccagauuugauu

SEQ ID NO: 281248 - RNA, 19 nt, Homo sapiens
  misc_RNA (1)...(19): siRNA sense strand
ggaugagacgcuagagaca

SEQ ID NO: 281249 - RNA, 19 nt, Homo sapiens
  misc_RNA (1)...(19): siRNA sense strand
ggcgcacgcuuuucucuaa

SEQ ID NO: 281250 - RNA, 19 nt, Homo sapiens
  misc_RNA (1)...(19): siRNA sense strand
cccaugcugugcccaucua

SEQ ID NO: 281251 - RNA, 19 nt, Homo sapiens
  misc_RNA (1)...(19): siRNA sense strand
augagacgcuagagacaga

SEQ ID NO: 281252 - RNA, 19 nt, Homo sapiens
  misc_RNA (1)...(19): siRNA sense strand
ggaguccuacgaugugauc

SEQ ID NO: 281253 - RNA, 19 nt, Homo sapiens
  misc_RNA (1)...(19): siRNA sense strand
caggagagacuguauucca

SEQ ID NO: 281254 - RNA, 19 nt, Homo sapiens
  misc_RNA (1)...(19): siRNA sense strand
gugaagaaacuagcuccaa

SEQ ID NO: 281255 - RNA, 19 nt, Homo sapiens
  misc_RNA (1)...(19): siRNA sense strand
ccaaccagccugucgugau

SEQ ID NO: 281256 - RNA, 19 nt, Homo sapiens
  misc_RNA (1)...(19): siRNA sense strand
gguguucgccauucagaag

SEQ ID NO: 281257 - RNA, 19 nt, Homo sapiens
  misc_RNA (1)...(19): siRNA sense strand
cuacccuguucaaagguuu

SEQ ID NO: 281258 - RNA, 19 nt, Homo sapiens
  misc_RNA (1)...(19): siRNA sense strand
gccuguuaccuauccauaa

SEQ ID NO: 281259 - RNA, 19 nt, Homo sapiens
  misc_RNA (1)...(19): siRNA sense strand
cauggcaucgucaaggauu

SEQ ID NO: 281260 - RNA, 19 nt, Homo sapiens
  misc_RNA (1)...(19): siRNA sense strand
gacgcuagagacagagaaa

SEQ ID NO: 281261 - RNA, 19 nt, Homo sapiens
  misc_RNA (1)...(19): siRNA sense strand
aggaggcucuacccuguuc

SEQ ID NO: 281262 - RNA, 19 nt, Homo sapiens
  misc_RNA (1)...(19): siRNA sense strand
gagaccagauucccaaaua

SEQ ID NO: 281263 - RNA, 19 nt, Homo sapiens
  misc_RNA (1)...(19): siRNA sense strand
gaggauggcucccgugcua

SEQ ID NO: 281264 - RNA, 19 nt, Homo sapiens
  misc_RNA (1)...(19): siRNA sense strand
gcagagguguucuuugaga

SEQ ID NO: 281265 - RNA, 19 nt, Homo sapiens
  misc_RNA (1)...(19): siRNA sense strand
cggcagagguguucuuuga

SEQ ID NO: 281266 - RNA, 19 nt, Homo sapiens
  misc_RNA (1)...(19): siRNA sense strand
ucagguggcucaacgcuuu

SEQ ID NO: 281267 - RNA, 19 nt, Homo sapiens
  misc_RNA (1)...(19): siRNA sense strand
cgacaggagugguucuaga

SEQ ID NO: 281268 - RNA, 19 nt, Homo sapiens
  misc_RNA (1)...(19): siRNA sense strand
ucaaagagcgagcgugcua

SEQ ID NO: 281269 - RNA, 19 nt, Homo sapiens
  misc_RNA (1)...(19): siRNA sense strand
ugaagaagcuugccccaaa

SEQ ID NO: 281270 - RNA, 19 nt, Homo sapiens
  misc_RNA (1)...(19): siRNA sense strand
gaacggcuguacuccacau

SEQ ID NO: 281271 - RNA, 19 nt, Homo sapiens
  misc_RNA (1)...(19): siRNA sense strand
uggccucgcuggacacuuu

SEQ ID NO: 281272 - RNA, 19 nt, Homo sapiens
  misc_RNA (1)...(19): siRNA sense strand
ccaaauacuguuucccaaa

SEQ ID NO: 281273 - RNA, 19 nt, Homo sapiens
  misc_RNA (1)...(19): siRNA sense strand
agacggagaaggugcagua

SEQ ID NO: 281274 - RNA, 19 nt, Homo sapiens
  misc_RNA (1)...(19): siRNA sense strand
gaagauguggguguccaaa

SEQ ID NO: 281275 - RNA, 19 nt, Homo sapiens
  misc_RNA (1)...(19): siRNA sense strand
aaaggaguaugaagaggau

SEQ ID NO: 281276 - RNA, 19 nt, Homo sapiens
  misc_RNA (1)...(19): siRNA sense strand
ggauggcucccgugcuauu

SEQ ID NO: 281277 - RNA, 19 nt, Homo sapiens
  misc_RNA (1)...(19): siRNA sense strand
aggaucagcugcagaccuu

SEQ ID NO: 281278 - RNA, 19 nt, Homo sapiens
  misc_RNA (1)...(19): siRNA sense strand
ucagugaagugaagaagcu

SEQ ID NO: 281279 - RNA, 19 nt, Homo sapiens
  misc_RNA (1)...(19): siRNA sense strand
cggcugaguuugagguugu

SEQ ID NO: 281280 - RNA, 19 nt, Homo sapiens
  misc_RNA (1)...(19): siRNA sense strand
guacgucuacuccaaggau

SEQ ID NO: 281281 - RNA, 19 nt, Homo sapiens
  misc_RNA (1)...(19): siRNA sense strand
cgugcuaccuguccaucaa

SEQ ID NO: 281282 - RNA, 19 nt, Homo sapiens
  misc_RNA (1)...(19): siRNA sense strand
ccgcucaacccgaguaaga

SEQ ID NO: 281283 - RNA, 19 nt, Homo sapiens
  misc_RNA (1)...(19): siRNA sense strand
gaaggcggcagagguguuc

SEQ ID NO: 281284 - RNA, 19 nt, Homo sapiens
  misc_RNA (1)...(19): siRNA sense strand
gagaccgauuacucaguga

SEQ ID NO: 281285 - RNA, 19 nt, Homo sapiens
  misc_RNA (1)...(19): siRNA sense strand
ccauaccucggcugaguuu

SEQ ID NO: 281286 - RNA, 19 nt, Homo sapiens
  misc_RNA (1)...(19): siRNA sense strand
gcaucuggcaguacgucua

SEQ ID NO: 281287 - RNA, 19 nt, Homo sapiens
  misc_RNA (1)...(19): siRNA sense strand
ggagaccagauucccaaau

SEQ ID NO: 281288 - RNA, 19 nt, Homo sapiens
  misc_RNA (1)...(19): siRNA sense strand
cggagaaggugcaguacac

SEQ ID NO: 281289 - RNA, 19 nt, Homo sapiens
  misc_RNA (1)...(19): siRNA sense strand
gaagaagcuugccccaaag

SEQ ID NO: 281290 - RNA, 19 nt, Homo sapiens
  misc_RNA (1)...(19): siRNA sense strand
gacggcagcacgcuugaug

SEQ ID NO: 281291 - RNA, 19 nt, Homo sapiens
  misc_RNA (1)...(19): siRNA sense strand
ccagauucccaaauacugu

SEQ ID NO: 281292 - RNA, 19 nt, Homo sapiens
  misc_RNA (1)...(19): siRNA sense strand
agacuggaacgacauggaa

SEQ ID NO: 281293 - RNA, 19 nt, Homo sapiens
  misc_RNA (1)...(19): siRNA sense strand
ggaguccuacgacaucauc

SEQ ID NO: 281294 - RNA, 19 nt, Homo sapiens
  misc_RNA (1)...(19): siRNA sense strand
gaccagauucccaaauacu

SEQ ID NO: 281295 - RNA, 19 nt, Homo sapiens
  misc_RNA (1)...(19): siRNA sense strand
uggaacgcaucuggcagua

SEQ ID NO: 281296 - RNA, 19 nt, Homo sapiens
  misc_RNA (1)...(19): siRNA sense strand
agaaggugcaguacacguu

SEQ ID NO: 281297 - RNA, 19 nt, Homo sapiens
  misc_RNA (1)...(19): siRNA sense strand
agaccagauucccaaauac

SEQ ID NO: 281298 - RNA, 19 nt, Homo sapiens
  misc_RNA (1)...(19): siRNA sense strand
cgaguaagaaccgggagaa

SEQ ID NO: 281299 - RNA, 19 nt, Homo sapiens
  misc_RNA (1)...(19): siRNA sense strand
gagacuggaacgacaugga

SEQ ID NO: 281300 - RNA, 19 nt, Homo sapiens
  misc_RNA (1)...(19): siRNA sense strand
aggcugugcucagucugua

SEQ ID NO: 281301 - RNA, 19 nt, Homo sapiens
  misc_RNA (1)...(19): siRNA sense strand
ucaacccacagaaggauga

SEQ ID NO: 281302 - RNA, 19 nt, Homo sapiens
  misc_RNA (1)...(19): siRNA sense strand
gaacacaucuucccagcuu

SEQ ID NO: 281303 - RNA, 19 nt, Homo sapiens
  misc_RNA (1)...(19): siRNA sense strand
ggagggauauaacuagaua

SEQ ID NO: 281304 - RNA, 19 nt, Homo sapiens
  misc_RNA (1)...(19): siRNA sense strand
gaaguuaacuacccuaugg

SEQ ID NO: 281305 - RNA, 19 nt, Homo sapiens
  misc_RNA (1)...(19): siRNA sense strand
gcagaaagcacaugguauu

SEQ ID NO: 281306 - RNA, 19 nt, Homo sapiens
  misc_RNA (1)...(19): siRNA sense strand
ggacguaucaucaaaguug

SEQ ID NO: 281307 - RNA, 19 nt, Homo sapiens
  misc_RNA (1)...(19): siRNA sense strand
gcaagugaauuacgaucaa

SEQ ID NO: 281308 - RNA, 19 nt, Homo sapiens
  misc_RNA (1)...(19): siRNA sense strand
gaauuacgaucaauguuag

SEQ ID NO: 281309 - RNA, 19 nt, Homo sapiens
  misc_RNA (1)...(19): siRNA sense strand
gaucugaauucuacaaaca

SEQ ID NO: 281310 - RNA, 19 nt, Homo sapiens
  misc_RNA (1)...(19): siRNA sense strand
gaagaccuauuaucagauc

SEQ ID NO: 281311 - RNA, 19 nt, Homo sapiens
  misc_RNA (1)...(19): siRNA sense strand
gaaacgguucgcaugauua

SEQ ID NO: 281312 - RNA, 19 nt, Homo sapiens
  misc_RNA (1)...(19): siRNA sense strand
gaaauugggaugacaugaa

SEQ ID NO: 281313 - RNA, 19 nt, Homo sapiens
  misc_RNA (1)...(19): siRNA sense strand
cgacaagaguaccaagaaa

SEQ ID NO: 281314 - RNA, 19 nt, Homo sapiens
  misc_RNA (1)...(19): siRNA sense strand
ucacagaaccuccuaugaa

SEQ ID NO: 281315 - RNA, 19 nt, Homo sapiens
  misc_RNA (1)...(19): siRNA sense strand
uagcggauaucaugaaaga

SEQ ID NO: 281316 - RNA, 19 nt, Homo sapiens
  misc_RNA (1)...(19): siRNA sense strand
aaucaaggaucuuaugguu

SEQ ID NO: 281317 - RNA, 19 nt, Homo sapiens
  misc_RNA (1)...(19): siRNA sense strand
ccagagaaacuuaauauag

SEQ ID NO: 281318 - RNA, 19 nt, Homo sapiens
  misc_RNA (1)...(19): siRNA sense strand
aaauugggaugacaugaaa

SEQ ID NO: 281319 - RNA, 19 nt, Homo sapiens
  misc_RNA (1)...(19): siRNA sense strand
cuuagaaaccacaguauua

SEQ ID NO: 281320 - RNA, 19 nt, Homo sapiens
  misc_RNA (1)...(19): siRNA sense strand
gaccagagaaacuuaauau

SEQ ID NO: 281321 - RNA, 19 nt, Homo sapiens
  misc_RNA (1)...(19): siRNA sense strand
ugaaacaccugugggacua

SEQ ID NO: 281322 - RNA, 19 nt, Homo sapiens
  misc_RNA (1)...(19): siRNA sense strand
uggaagaccuauuaucaga

SEQ ID NO: 281323 - RNA, 19 nt, Homo sapiens
  misc_RNA (1)...(19): siRNA sense strand
gauuguagagguaauguuu

SEQ ID NO: 281324 - RNA, 19 nt, Homo sapiens
  misc_RNA (1)...(19): siRNA sense strand
cgaucaauguuagaaguua

SEQ ID NO: 281325 - RNA, 19 nt, Homo sapiens
  misc_RNA (1)...(19): siRNA sense strand
ugaaacgguucgcaugauu

SEQ ID NO: 281326 - RNA, 19 nt, Homo sapiens
  misc_RNA (1)...(19): siRNA sense strand
gcaccggguuugugaagug

SEQ ID NO: 281327 - RNA, 19 nt, Homo sapiens
  misc_RNA (1)...(19): siRNA sense strand
gaaaccacaguauuaguug

SEQ ID NO: 281328 - RNA, 19 nt, Homo sapiens
  misc_RNA (1)...(19): siRNA sense strand
uuuguacgcucaagguuua

SEQ ID NO: 281329 - RNA, 19 nt, Homo sapiens
  misc_RNA (1)...(19): siRNA sense strand
uaccagaucugaauucuac

SEQ ID NO: 281330 - RNA, 19 nt, Homo sapiens
  misc_RNA (1)...(19): siRNA sense strand
ggaccagagaaacuuaaua

SEQ ID NO: 281331 - RNA, 19 nt, Homo sapiens
  misc_RNA (1)...(19): siRNA sense strand
gaguugguguugcugaauu

SEQ ID NO: 281332 - RNA, 19 nt, Homo sapiens
  misc_RNA (1)...(19): siRNA sense strand
gcagaaacuggccuuagaa

SEQ ID NO: 281333 - RNA, 19 nt, Homo sapiens
  misc_RNA (1)...(19): siRNA sense strand
agagaagauuguagaggua

SEQ ID NO: 281334 - RNA, 19 nt, Homo sapiens
  misc_RNA (1)...(19): siRNA sense strand
caaccacucugcugauuuu

SEQ ID NO: 281335 - RNA, 19 nt, Homo sapiens
  misc_RNA (1)...(19): siRNA sense strand
ugaugaggcaagugaauua

SEQ ID NO: 281336 - RNA, 19 nt, Homo sapiens
  misc_RNA (1)...(19): siRNA sense strand
gaaagcacaugguauuccu

SEQ ID NO: 281337 - RNA, 19 nt, Homo sapiens
  misc_RNA (1)...(19): siRNA sense strand
gcucuaacuuuccagaaca

SEQ ID NO: 281338 - RNA, 19 nt, Homo sapiens
  misc_RNA (1)...(19): siRNA sense strand
guagagguaauguuugaaa

SEQ ID NO: 281339 - RNA, 19 nt, Homo sapiens
  misc_RNA (1)...(19): siRNA sense strand
gaaacuuggugugacuguu

SEQ ID NO: 281340 - RNA, 19 nt, Homo sapiens
  misc_RNA (1)...(19): siRNA sense strand
cccaguauaugaaggcuuu

SEQ ID NO: 281341 - RNA, 19 nt, Homo sapiens
  misc_RNA (1)...(19): siRNA sense strand
cagccucacuugaucaaug

SEQ ID NO: 281342 - RNA, 19 nt, Homo sapiens
  misc_RNA (1)...(19): siRNA sense strand
aaacagagagaagauugua

SEQ ID NO: 281343 - RNA, 19 nt, Homo sapiens
  misc_RNA (1)...(19): siRNA sense strand
guuggaagaccuauuauca

SEQ ID NO: 281344 - RNA, 19 nt, Homo sapiens
  misc_RNA (1)...(19): siRNA sense strand
uguguuacgugggauauaa

SEQ ID NO: 281345 - RNA, 19 nt, Homo sapiens
  misc_RNA (1)...(19): siRNA sense strand
aggcaguucugacuuugua

SEQ ID NO: 281346 - RNA, 19 nt, Homo sapiens
  misc_RNA (1)...(19): siRNA sense strand
gaaaucaaggaucuuaugg

SEQ ID NO: 281347 - RNA, 19 nt, Homo sapiens
  misc_RNA (1)...(19): siRNA sense strand
gguagacucuggagauggu

SEQ ID NO: 281348 - RNA, 19 nt, Homo sapiens
  misc_RNA (1)...(19): siRNA sense strand
gaaacuggccuuagaaacc

SEQ ID NO: 281349 - RNA, 19 nt, Homo sapiens
  misc_RNA (1)...(19): siRNA sense strand
gagaagauuguagagguaa

SEQ ID NO: 281350 - RNA, 19 nt, Homo sapiens
  misc_RNA (1)...(19): siRNA sense strand
gaaaauggcauaguacgaa

SEQ ID NO: 281351 - RNA, 19 nt, Homo sapiens
  misc_RNA (1)...(19): siRNA sense strand
gugcaguucuagcggauau

SEQ ID NO: 281352 - RNA, 19 nt, Homo sapiens
  misc_RNA (1)...(19): siRNA sense strand
cgacaacggcaccggguuu

SEQ ID NO: 281353 - RNA, 19 nt, Homo sapiens
  misc_RNA (1)...(19): siRNA sense strand
aaacgguucgcaugauuaa

SEQ ID NO: 281354 - RNA, 19 nt, Homo sapiens
  misc_RNA (1)...(19): siRNA sense strand
guacgaaauugggaugaca

SEQ ID NO: 281355 - RNA, 19 nt, Homo sapiens
  misc_RNA (1)...(19): siRNA sense strand
caaagugggaaacauugaa

SEQ ID NO: 281356 - RNA, 19 nt, Homo sapiens
  misc_RNA (1)...(19): siRNA sense strand
uggugugacuguucgauaa

SEQ ID NO: 281357 - RNA, 19 nt, Homo sapiens
  misc_RNA (1)...(19): siRNA sense strand
gcggauaucaugaaagaca

SEQ ID NO: 281358 - RNA, 19 nt, Homo sapiens
  misc_RNA (1)...(19): siRNA sense strand
aaaccacaguauuaguuga

SEQ ID NO: 281359 - RNA, 19 nt, Homo sapiens
  misc_RNA (1)...(19): siRNA sense strand
ucacauuugcccaguauau

SEQ ID NO: 281360 - RNA, 19 nt, Homo sapiens
  misc_RNA (1)...(19): siRNA sense strand
cacagaaccuccuaugaac

SEQ ID NO: 281361 - RNA, 19 nt, Homo sapiens
  misc_RNA (1)...(19): siRNA sense strand
agaaaccacaguauuaguu

SEQ ID NO: 281362 - RNA, 19 nt, Homo sapiens
  misc_RNA (1)...(19): siRNA sense strand
gauaccagaucugaauucu

SEQ ID NO: 281363 - RNA, 19 nt, Homo sapiens
  misc_RNA (1)...(19): siRNA sense strand
caccagaagcuuuauuuca

SEQ ID NO: 281364 - RNA, 19 nt, Homo sapiens
  misc_RNA (1)...(19): siRNA sense strand
ugaaaucaaggaucuuaug

SEQ ID NO: 281365 - RNA, 19 nt, Homo sapiens
  misc_RNA (1)...(19): siRNA sense strand
ggaacgagaacuuaaacag

SEQ ID NO: 281366 - RNA, 19 nt, Homo sapiens
  misc_RNA (1)...(19): siRNA sense strand
uggagggucuacuauguau

SEQ ID NO: 281367 - RNA, 19 nt, Homo sapiens
  misc_RNA (1)...(19): siRNA sense strand
ugacauugauaccagaucu

SEQ ID NO: 281368 - RNA, 19 nt, Homo sapiens
  misc_RNA (1)...(19): siRNA sense strand
caagugaauuacgaucaau

SEQ ID NO: 281369 - RNA, 19 nt, Homo sapiens
  misc_RNA (1)...(19): siRNA sense strand
ugaggcaagugaauuacga

SEQ ID NO: 281370 - RNA, 19 nt, Homo sapiens
  misc_RNA (1)...(19): siRNA sense strand
gaagauuguagagguaaug

SEQ ID NO: 281371 - RNA, 19 nt, Homo sapiens
  misc_RNA (1)...(19): siRNA sense strand
ugaaagacaaagacaacuu

SEQ ID NO: 281372 - RNA, 19 nt, Homo sapiens
  misc_RNA (1)...(19): siRNA sense strand
ccgcagaaagcacauggua

SEQ ID NO: 281373 - RNA, 19 nt, Homo sapiens
  misc_RNA (1)...(19): siRNA sense strand
uaucagaucaaccaccaaa

SEQ ID NO: 281374 - RNA, 19 nt, Homo sapiens
  misc_RNA (1)...(19): siRNA sense strand
uaugcaggcucuaacuuuc

SEQ ID NO: 281375 - RNA, 19 nt, Homo sapiens
  misc_RNA (1)...(19): siRNA sense strand
cagaaacuggccuuagaaa

SEQ ID NO: 281376 - RNA, 19 nt, Homo sapiens
  misc_RNA (1)...(19): siRNA sense strand
gcugggagggauauaacua

SEQ ID NO: 281377 - RNA, 19 nt, Homo sapiens
  misc_RNA (1)...(19): siRNA sense strand
caccaaagugggaaacauu

SEQ ID NO: 281378 - RNA, 19 nt, Homo sapiens
  misc_RNA (1)...(19): siRNA sense strand
gauaugcaggcucuaacuu

SEQ ID NO: 281379 - RNA, 19 nt, Homo sapiens
  misc_RNA (1)...(19): siRNA sense strand
aauuuaagauccgcauuga

SEQ ID NO: 281380 - RNA, 19 nt, Homo sapiens
  misc_RNA (1)...(19): siRNA sense strand
gcaccagaagcuuuauuuc

SEQ ID NO: 281381 - RNA, 19 nt, Homo sapiens
  misc_RNA (1)...(19): siRNA sense strand
aaacuggccuuagaaacca

SEQ ID NO: 281382 - RNA, 19 nt, Homo sapiens
  misc_RNA (1)...(19): siRNA sense strand
agcagaaacuggccuuaga

SEQ ID NO: 281383 - RNA, 19 nt, Homo sapiens
  misc_RNA (1)...(19): siRNA sense strand
gauauugcugggagggaua

SEQ ID NO: 281384 - RNA, 19 nt, Homo sapiens
  misc_RNA (1)...(19): siRNA sense strand
uuguagagguaauguuuga

SEQ ID NO: 281385 - RNA, 19 nt, Homo sapiens
  misc_RNA (1)...(19): siRNA sense strand
ggaugacccgacaagagua

SEQ ID NO: 281386 - RNA, 19 nt, Homo sapiens
  misc_RNA (1)...(19): siRNA sense strand
ucuggagggucuacuaugu

SEQ ID NO: 281387 - RNA, 19 nt, Homo sapiens
  misc_RNA (1)...(19): siRNA sense strand
ggccuuagaaaccacagua

SEQ ID NO: 281388 - RNA, 19 nt, Homo sapiens
  misc_RNA (1)...(19): siRNA sense strand
cuacuucuguugcgaggau

SEQ ID NO: 281389 - RNA, 19 nt, Homo sapiens
  misc_RNA (1)...(19): siRNA sense strand
acagagagaagauuguaga

SEQ ID NO: 281390 - RNA, 19 nt, Homo sapiens
  misc_RNA (1)...(19): siRNA sense strand
ccaaagugggaaacauuga

SEQ ID NO: 281391 - RNA, 19 nt, Homo sapiens
  misc_RNA (1)...(19): siRNA sense strand
gagauuugaagcaccagaa

SEQ ID NO: 281392 - RNA, 19 nt, Homo sapiens
  misc_RNA (1)...(19): siRNA sense strand
gaggauacgccuucaacca

SEQ ID NO: 281393 - RNA, 19 nt, Homo sapiens
  misc_RNA (1)...(19): siRNA sense strand
uccaggcaguucugacuuu

SEQ ID NO: 281394 - RNA, 19 nt, Homo sapiens
  misc_RNA (1)...(19): siRNA sense strand
gaucuuaugguuggugaug

SEQ ID NO: 281395 - RNA, 19 nt, Homo sapiens
  misc_RNA (1)...(19): siRNA sense strand
cuagagaaacuugguguga

SEQ ID NO: 281396 - RNA, 19 nt, Homo sapiens
  misc_RNA (1)...(19): siRNA sense strand
ucuagcggauaucaugaaa

SEQ ID NO: 281397 - RNA, 19 nt, Homo sapiens
  misc_RNA (1)...(19): siRNA sense strand
uuugaagggugauguggaa

SEQ ID NO: 281398 - RNA, 19 nt, Homo sapiens
  misc_RNA (1)...(19): siRNA sense strand
ugaaggaguugguguugcu

SEQ ID NO: 281399 - RNA, 19 nt, Homo sapiens
  misc_RNA (1)...(19): siRNA sense strand
gagcagaaacuggccuuag

SEQ ID NO: 281400 - RNA, 19 nt, Homo sapiens
  misc_RNA (1)...(19): siRNA sense strand
ccacaguauuaguugaauc

SEQ ID NO: 281401 - RNA, 19 nt, Homo sapiens
  misc_RNA (1)...(19): siRNA sense strand
aaacagcuuuacuuagaac

SEQ ID NO: 281402 - RNA, 19 nt, Homo sapiens
  misc_RNA (1)...(19): siRNA sense strand
ggaauauacugcugaaaua

SEQ ID NO: 281403 - RNA, 19 nt, Homo sapiens
  misc_RNA (1)...(19): siRNA sense strand
uaaaggagcgcuauaguua

SEQ ID NO: 281404 - RNA, 19 nt, Homo sapiens
  misc_RNA (1)...(19): siRNA sense strand
ggacgucgcuugcaaagag

SEQ ID NO: 281405 - RNA, 19 nt, Homo sapiens
  misc_RNA (1)...(19): siRNA sense strand
gaccuagacuucuucauug

SEQ ID NO: 281406 - RNA, 19 nt, Homo sapiens
  misc_RNA (1)...(19): siRNA sense strand
gaacaauccuuggaaacug

SEQ ID NO: 281407 - RNA, 19 nt, Homo sapiens
  misc_RNA (1)...(19): siRNA sense strand
gugauuggcagcuguauua

SEQ ID NO: 281408 - RNA, 19 nt, Homo sapiens
  misc_RNA (1)...(19): siRNA sense strand
gcugagagaccgagaagua

SEQ ID NO: 281409 - RNA, 19 nt, Homo sapiens
  misc_RNA (1)...(19): siRNA sense strand
ucaaugcuaucucaaagaa

SEQ ID NO: 281410 - RNA, 19 nt, Homo sapiens
  misc_RNA (1)...(19): siRNA sense strand
ggaauugaguggugguaga

SEQ ID NO: 281411 - RNA, 19 nt, Homo sapiens
  misc_RNA (1)...(19): siRNA sense strand
uaucaucccuuccuguauu

SEQ ID NO: 281412 - RNA, 19 nt, Homo sapiens
  misc_RNA (1)...(19): siRNA sense strand
ucucagaaguuguagauga

SEQ ID NO: 281413 - RNA, 19 nt, Homo sapiens
  misc_RNA (1)...(19): siRNA sense strand
gauugggacuuaauggaaa

SEQ ID NO: 281414 - RNA, 19 nt, Homo sapiens
  misc_RNA (1)...(19): siRNA sense strand
ccagaacaauccuuggaaa

SEQ ID NO: 281415 - RNA, 19 nt, Homo sapiens
  misc_RNA (1)...(19): siRNA sense strand
gaugaaagguguugaugac

SEQ ID NO: 281416 - RNA, 19 nt, Homo sapiens
  misc_RNA (1)...(19): siRNA sense strand
guuccaggcuuguacauug

SEQ ID NO: 281417 - RNA, 19 nt, Homo sapiens
  misc_RNA (1)...(19): siRNA sense strand
ggacuuaauggaaagguuu

SEQ ID NO: 281418 - RNA, 19 nt, Homo sapiens
  misc_RNA (1)...(19): siRNA sense strand
gaaucaaugcuaucucaaa

SEQ ID NO: 281419 - RNA, 19 nt, Homo sapiens
  misc_RNA (1)...(19): siRNA sense strand
guaaaggagcgcuauaguu

SEQ ID NO: 281420 - RNA, 19 nt, Homo sapiens
  misc_RNA (1)...(19): siRNA sense strand
gagauggugucacucaugu

SEQ ID NO: 281421 - RNA, 19 nt, Homo sapiens
  misc_RNA (1)...(19): siRNA sense strand
gaaccuccauugaauacuc

SEQ ID NO: 281422 - RNA, 19 nt, Homo sapiens
  misc_RNA (1)...(19): siRNA sense strand
ugacugaaccuccauugaa

SEQ ID NO: 281423 - RNA, 19 nt, Homo sapiens
  misc_RNA (1)...(19): siRNA sense strand
gggaauauacugcugaaau

SEQ ID NO: 281424 - RNA, 19 nt, Homo sapiens
  misc_RNA (1)...(19): siRNA sense strand
gacugaaccuccauugaau

SEQ ID NO: 281425 - RNA, 19 nt, Homo sapiens
  misc_RNA (1)...(19): siRNA sense strand
gagcaagugaucuuuaaau

SEQ ID NO: 281426 - RNA, 19 nt, Homo sapiens
  misc_RNA (1)...(19): siRNA sense strand
uuugggaccugaaaucuuu

SEQ ID NO: 281427 - RNA, 19 nt, Homo sapiens
  misc_RNA (1)...(19): siRNA sense strand
ugaccuagacuucuucauu

SEQ ID NO: 281428 - RNA, 19 nt, Homo sapiens
  misc_RNA (1)...(19): siRNA sense strand
gacguccucucuacaagaa

SEQ ID NO: 281429 - RNA, 19 nt, Homo sapiens
  misc_RNA (1)...(19): siRNA sense strand
uggagcaagugaucuuuaa

SEQ ID NO: 281430 - RNA, 19 nt, Homo sapiens
  misc_RNA (1)...(19): siRNA sense strand
gcagcgauaugcaguuugg

SEQ ID NO: 281431 - RNA, 19 nt, Homo sapiens
  misc_RNA (1)...(19): siRNA sense strand
gcaacaaaguggccaaucc

SEQ ID NO: 281432 - RNA, 19 nt, Homo sapiens
  misc_RNA (1)...(19): siRNA sense strand
cguccucucuacaagaaua

SEQ ID NO: 281433 - RNA, 19 nt, Homo sapiens
  misc_RNA (1)...(19): siRNA sense strand
gccaaaaccuauugaugua

SEQ ID NO: 281434 - RNA, 19 nt, Homo sapiens
  misc_RNA (1)...(19): siRNA sense strand
gaagaaauuggaccuagca

SEQ ID NO: 281435 - RNA, 19 nt, Homo sapiens
  misc_RNA (1)...(19): siRNA sense strand
ccaaguaugccacaccaaa

SEQ ID NO: 281436 - RNA, 19 nt, Homo sapiens
  misc_RNA (1)...(19): siRNA sense strand
gaaauacagaaccacaguu

SEQ ID NO: 281437 - RNA, 19 nt, Homo sapiens
  misc_RNA (1)...(19): siRNA sense strand
caaaggagggugaugaaag

SEQ ID NO: 281438 - RNA, 19 nt, Homo sapiens
  misc_RNA (1)...(19): siRNA sense strand
gcaguaaaggagcgcuaua

SEQ ID NO: 281439 - RNA, 19 nt, Homo sapiens
  misc_RNA (1)...(19): siRNA sense strand
ggaaauacagaaccacagu

SEQ ID NO: 281440 - RNA, 19 nt, Homo sapiens
  misc_RNA (1)...(19): siRNA sense strand
uuacacaaccuaucucaga

SEQ ID NO: 281441 - RNA, 19 nt, Homo sapiens
  misc_RNA (1)...(19): siRNA sense strand
aaggagcgcuauaguuaug

SEQ ID NO: 281442 - RNA, 19 nt, Homo sapiens
  misc_RNA (1)...(19): siRNA sense strand
gcugaaggguaugugauug

SEQ ID NO: 281443 - RNA, 19 nt, Homo sapiens
  misc_RNA (1)...(19): siRNA sense strand
aaauacagaaccacaguuu

SEQ ID NO: 281444 - RNA, 19 nt, Homo sapiens
  misc_RNA (1)...(19): siRNA sense strand
uggaaucaaugcuaucuca

SEQ ID NO: 281445 - RNA, 19 nt, Homo sapiens
  misc_RNA (1)...(19): siRNA sense strand
aggaaucccuccagaacaa

SEQ ID NO: 281446 - RNA, 19 nt, Homo sapiens
  misc_RNA (1)...(19): siRNA sense strand
gguaauagacaguggagau

SEQ ID NO: 281447 - RNA, 19 nt, Homo sapiens
  misc_RNA (1)...(19): siRNA sense strand
ggcagaaccugaagaccau

SEQ ID NO: 281448 - RNA, 19 nt, Homo sapiens
  misc_RNA (1)...(19): siRNA sense strand
gcucaaaggagggugauga

SEQ ID NO: 281449 - RNA, 19 nt, Homo sapiens
  misc_RNA (1)...(19): siRNA sense strand
auacagaaccacaguuuau

SEQ ID NO: 281450 - RNA, 19 nt, Homo sapiens
  misc_RNA (1)...(19): siRNA sense strand
gcgauaugcaguuugguuu

SEQ ID NO: 281451 - RNA, 19 nt, Homo sapiens
  misc_RNA (1)...(19): siRNA sense strand
gaaguuguagaugaaguaa

SEQ ID NO: 281452 - RNA, 19 nt, Homo sapiens
  misc_RNA (1)...(19): siRNA sense strand
aaacuaggauaugcuggaa

SEQ ID NO: 281453 - RNA, 19 nt, Homo sapiens
  misc_RNA (1)...(19): siRNA sense strand
cugcugaaauaauguuuga

SEQ ID NO: 281454 - RNA, 19 nt, Homo sapiens
  misc_RNA (1)...(19): siRNA sense strand
gaaccugaagaccauuauu

SEQ ID NO: 281455 - RNA, 19 nt, Homo sapiens
  misc_RNA (1)...(19): siRNA sense strand
ggaaagguuuauggagcaa

SEQ ID NO: 281456 - RNA, 19 nt, Homo sapiens
  misc_RNA (1)...(19): siRNA sense strand
aaaggagggugaugaaagg

SEQ ID NO: 281457 - RNA, 19 nt, Homo sapiens
  misc_RNA (1)...(19): siRNA sense strand
gaauuguccuauugauguc

SEQ ID NO: 281458 - RNA, 19 nt, Homo sapiens
  misc_RNA (1)...(19): siRNA sense strand
gcagcuguauuaaacacau

SEQ ID NO: 281459 - RNA, 19 nt, Homo sapiens
  misc_RNA (1)...(19): siRNA sense strand
aguugaagauugggacuua

SEQ ID NO: 281460 - RNA, 19 nt, Homo sapiens
  misc_RNA (1)...(19): siRNA sense strand
ggagauggugucacucaug

SEQ ID NO: 281461 - RNA, 19 nt, Homo sapiens
  misc_RNA (1)...(19): siRNA sense strand
agaauuguccuauugaugu

SEQ ID NO: 281462 - RNA, 19 nt, Homo sapiens
  misc_RNA (1)...(19): siRNA sense strand
cuacauaugcaacaaagug

SEQ ID NO: 281463 - RNA, 19 nt, Homo sapiens
  misc_RNA (1)...(19): siRNA sense strand
gauaugcaguuugguuugg

SEQ ID NO: 281464 - RNA, 19 nt, Homo sapiens
  misc_RNA (1)...(19): siRNA sense strand
ggugaugaagcaauagaaa

SEQ ID NO: 281465 - RNA, 19 nt, Homo sapiens
  misc_RNA (1)...(19): siRNA sense strand
cuuccuguauugcuauuaa

SEQ ID NO: 281466 - RNA, 19 nt, Homo sapiens
  misc_RNA (1)...(19): siRNA sense strand
cgauguugguuaugagaga

SEQ ID NO: 281467 - RNA, 19 nt, Homo sapiens
  misc_RNA (1)...(19): siRNA sense strand
gaagauugggacuuaaugg

SEQ ID NO: 281468 - RNA, 19 nt, Homo sapiens
  misc_RNA (1)...(19): siRNA sense strand
gccaauccgccaugguaua

SEQ ID NO: 281469 - RNA, 19 nt, Homo sapiens
  misc_RNA (1)...(19): siRNA sense strand
ggagcaagugaucuuuaaa

SEQ ID NO: 281470 - RNA, 19 nt, Homo sapiens
  misc_RNA (1)...(19): siRNA sense strand
aaucaaugcuaucucaaag

SEQ ID NO: 281471 - RNA, 19 nt, Homo sapiens
  misc_RNA (1)...(19): siRNA sense strand
auacuggaaucaaugcuau

SEQ ID NO: 281472 - RNA, 19 nt, Homo sapiens
  misc_RNA (1)...(19): siRNA sense strand
gccaugguauaguugaaga

SEQ ID NO: 281473 - RNA, 19 nt, Homo sapiens
  misc_RNA (1)...(19): siRNA sense strand
caagaauauuguccucucu

SEQ ID NO: 281474 - RNA, 19 nt, Homo sapiens
  misc_RNA (1)...(19): siRNA sense strand
uacacaaccuaucucagaa

SEQ ID NO: 281475 - RNA, 19 nt, Homo sapiens
  misc_RNA (1)...(19): siRNA sense strand
acuaggauaugcuggaaau

SEQ ID NO: 281476 - RNA, 19 nt, Homo sapiens
  misc_RNA (1)...(19): siRNA sense strand
aaaccuacauaugcaacaa

SEQ ID NO: 281477 - RNA, 19 nt, Homo sapiens
  misc_RNA (1)...(19): siRNA sense strand
gcaguuugguuuggaggau

SEQ ID NO: 281478 - RNA, 19 nt, Homo sapiens
  misc_RNA (1)...(19): siRNA sense strand
ugucagacguccucucuac

SEQ ID NO: 281479 - RNA, 19 nt, Homo sapiens
  misc_RNA (1)...(19): siRNA sense strand
gauuggcagcuguauuaaa

SEQ ID NO: 281480 - RNA, 19 nt, Homo sapiens
  misc_RNA (1)...(19): siRNA sense strand
cagggaauauacugcugaa

SEQ ID NO: 281481 - RNA, 19 nt, Homo sapiens
  misc_RNA (1)...(19): siRNA sense strand
ucagaauuguccuauugau

SEQ ID NO: 281482 - RNA, 19 nt, Homo sapiens
  misc_RNA (1)...(19): siRNA sense strand
aaugcuaucucaaagaaag

SEQ ID NO: 281483 - RNA, 19 nt, Homo sapiens
  misc_RNA (1)...(19): siRNA sense strand
gauggugucacucauguca

SEQ ID NO: 281484 - RNA, 19 nt, Homo sapiens
  misc_RNA (1)...(19): siRNA sense strand
gggacuuaauggaaagguu

SEQ ID NO: 281485 - RNA, 19 nt, Homo sapiens
  misc_RNA (1)...(19): siRNA sense strand
cacaccacaugcagcgaua

SEQ ID NO: 281486 - RNA, 19 nt, Homo sapiens
  misc_RNA (1)...(19): siRNA sense strand
guaggaaucccuccagaac

SEQ ID NO: 281487 - RNA, 19 nt, Homo sapiens
  misc_RNA (1)...(19): siRNA sense strand
gcugaaauaauguuugagu

SEQ ID NO: 281488 - RNA, 19 nt, Homo sapiens
  misc_RNA (1)...(19): siRNA sense strand
cagaaccugaagaccauua

SEQ ID NO: 281489 - RNA, 19 nt, Homo sapiens
  misc_RNA (1)...(19): siRNA sense strand
ccugaguucuaccaaguau

SEQ ID NO: 281490 - RNA, 19 nt, Homo sapiens
  misc_RNA (1)...(19): siRNA sense strand
cucagaaguuguagaugaa

SEQ ID NO: 281491 - RNA, 19 nt, Homo sapiens
  misc_RNA (1)...(19): siRNA sense strand
cuaucgauguugguuauga

SEQ ID NO: 281492 - RNA, 19 nt, Homo sapiens
  misc_RNA (1)...(19): siRNA sense strand
aaucgcaggacgagauaua

SEQ ID NO: 281493 - RNA, 19 nt, Homo sapiens
  misc_RNA (1)...(19): siRNA sense strand
ccaaucgcaggacgagaua

SEQ ID NO: 281494 - RNA, 19 nt, Homo sapiens
  misc_RNA (1)...(19): siRNA sense strand
uggugucacucaugucauu

SEQ ID NO: 281495 - RNA, 19 nt, Homo sapiens
  misc_RNA (1)...(19): siRNA sense strand
aaccugaagaccauuauuu

SEQ ID NO: 281496 - RNA, 19 nt, Homo sapiens
  misc_RNA (1)...(19): siRNA sense strand
aauccgccaugguauaguu

SEQ ID NO: 281497 - RNA, 19 nt, Homo sapiens
  misc_RNA (1)...(19): siRNA sense strand
guaauagacaguggagaug

SEQ ID NO: 281498 - RNA, 19 nt, Homo sapiens
  misc_RNA (1)...(19): siRNA sense strand
gacuuaauggaaagguuua

SEQ ID NO: 281499 - RNA, 19 nt, Homo sapiens
  misc_RNA (1)...(19): siRNA sense strand
guugaagauugggacuuaa

SEQ ID NO: 281500 - RNA, 19 nt, Homo sapiens
  misc_RNA (1)...(19): siRNA sense strand
gagagaccgagaaguagga

SEQ ID NO: 281501 - RNA, 19 nt, Homo sapiens
  misc_RNA (1)...(19): siRNA sense strand
ucagacguccucucuacaa

SEQ ID NO: 281502 - RNA, 19 nt, Homo sapiens
  misc_RNA (1)...(19): siRNA sense strand
ggaaggagaugacaauuua

SEQ ID NO: 281503 - RNA, 19 nt, Homo sapiens
  misc_RNA (1)...(19): siRNA sense strand
gcaccaagcugcccgacaa

SEQ ID NO: 281504 - RNA, 19 nt, Homo sapiens
  misc_RNA (1)...(19): siRNA sense strand
ggaacgagcugaacuacgu

SEQ ID NO: 281505 - RNA, 19 nt, Homo sapiens
  misc_RNA (1)...(19): siRNA sense strand
caacagacauauagugaag

SEQ ID NO: 281506 - RNA, 19 nt, Homo sapiens
  misc_RNA (1)...(19): siRNA sense strand
gcaaagcaaauuucacaaa

SEQ ID NO: 281507 - RNA, 19 nt, Homo sapiens
  misc_RNA (1)...(19): siRNA sense strand
gaacaacagacauauagug

SEQ ID NO: 281508 - RNA, 19 nt, Homo sapiens
  misc_RNA (1)...(19): siRNA sense strand
gaauucaguuugccuguuc

SEQ ID NO: 281509 - RNA, 19 nt, Homo sapiens
  misc_RNA (1)...(19): siRNA sense strand
ugacgcagcuggugacuuc

SEQ ID NO: 281510 - RNA, 19 nt, Homo sapiens
  misc_RNA (1)...(19): siRNA sense strand
caaagcaaauuucacaaag

SEQ ID NO: 281511 - RNA, 19 nt, Homo sapiens
  misc_RNA (1)...(19): siRNA sense strand
gcaggaaacggaagcaguu

SEQ ID NO: 281512 - RNA, 19 nt, Homo sapiens
  misc_RNA (1)...(19): siRNA sense strand
gaggugaggauaagaaaga

SEQ ID NO: 281513 - RNA, 19 nt, Homo sapiens
  misc_RNA (1)...(19): siRNA sense strand
gaagcggcgucaggaauug

SEQ ID NO: 281514 - RNA, 19 nt, Homo sapiens
  misc_RNA (1)...(19): siRNA sense strand
ggacgaggaugugaagaag

SEQ ID NO: 281515 - RNA, 19 nt, Homo sapiens
  misc_RNA (1)...(19): siRNA sense strand
aaacugaugcagagucuaa

SEQ ID NO: 281516 - RNA, 19 nt, Homo sapiens
  misc_RNA (1)...(19): siRNA sense strand
agaagcaucugcaaagcaa

SEQ ID NO: 281517 - RNA, 19 nt, Homo sapiens
  misc_RNA (1)...(19): siRNA sense strand
gaauugauggagaaagaaa

SEQ ID NO: 281518 - RNA, 19 nt, Homo sapiens
  misc_RNA (1)...(19): siRNA sense strand
cgaccgcaauggcagcuuu

SEQ ID NO: 281519 - RNA, 19 nt, Homo sapiens
  misc_RNA (1)...(19): siRNA sense strand
cucaggagaugaagaauuc

SEQ ID NO: 281520 - RNA, 19 nt, Homo sapiens
  misc_RNA (1)...(19): siRNA sense strand
gaaguggaacaaacugaug

SEQ ID NO: 281521 - RNA, 19 nt, Homo sapiens
  misc_RNA (1)...(19): siRNA sense strand
caguuugccuguucuguau

SEQ ID NO: 281522 - RNA, 19 nt, Homo sapiens
  misc_RNA (1)...(19): siRNA sense strand
acgaagagauccagaagca

SEQ ID NO: 281523 - RNA, 19 nt, Homo sapiens
  misc_RNA (1)...(19): siRNA sense strand
gagaagcggcgucaggaau

SEQ ID NO: 281524 - RNA, 19 nt, Homo sapiens
  misc_RNA (1)...(19): siRNA sense strand
aggaauugauggagaaaga

SEQ ID NO: 281525 - RNA, 19 nt, Homo sapiens
  misc_RNA (1)...(19): siRNA sense strand
gcucaggagaugaagaauu

SEQ ID NO: 281526 - RNA, 19 nt, Homo sapiens
  misc_RNA (1)...(19): siRNA sense strand
ugaaacuguugauccagaa

SEQ ID NO: 281527 - RNA, 19 nt, Homo sapiens
  misc_RNA (1)...(19): siRNA sense strand
aaagagacccugcgguuca

SEQ ID NO: 281528 - RNA, 19 nt, Homo sapiens
  misc_RNA (1)...(19): siRNA sense strand
guccauggcucccgacuac

SEQ ID NO: 281529 - RNA, 19 nt, Homo sapiens
  misc_RNA (1)...(19): siRNA sense strand
aagcaaauuucacaaagag

SEQ ID NO: 281530 - RNA, 19 nt, Homo sapiens
  misc_RNA (1)...(19): siRNA sense strand
gaaaaccagucuccaugug

SEQ ID NO: 281531 - RNA, 19 nt, Homo sapiens
  misc_RNA (1)...(19): siRNA sense strand
gaaagaaaccgcaaaacca

SEQ ID NO: 281532 - RNA, 19 nt, Homo sapiens
  misc_RNA (1)...(19): siRNA sense strand
caaguuccguagcuuugau

SEQ ID NO: 281533 - RNA, 19 nt, Homo sapiens
  misc_RNA (1)...(19): siRNA sense strand
acagacauauagugaagau

SEQ ID NO: 281534 - RNA, 19 nt, Homo sapiens
  misc_RNA (1)...(19): siRNA sense strand
caaccagcguuuggacaug

SEQ ID NO: 281535 - RNA, 19 nt, Homo sapiens
  misc_RNA (1)...(19): siRNA sense strand
gucaggaauugauggagaa

SEQ ID NO: 281536 - RNA, 19 nt, Homo sapiens
  misc_RNA (1)...(19): siRNA sense strand
ucaguuugccuguucugua

SEQ ID NO: 281537 - RNA, 19 nt, Homo sapiens
  misc_RNA (1)...(19): siRNA sense strand
cagcuacgacuaugaguuc

SEQ ID NO: 281538 - RNA, 19 nt, Homo sapiens
  misc_RNA (1)...(19): siRNA sense strand
gcagaaagugcccaaacca

SEQ ID NO: 281539 - RNA, 19 nt, Homo sapiens
  misc_RNA (1)...(19): siRNA sense strand
uggaaggagaugacaauuu

SEQ ID NO: 281540 - RNA, 19 nt, Homo sapiens
  misc_RNA (1)...(19): siRNA sense strand
gaaacuguugauccagaaa

SEQ ID NO: 281541 - RNA, 19 nt, Homo sapiens
  misc_RNA (1)...(19): siRNA sense strand
aaaaccagauccuuucaaa

SEQ ID NO: 281542 - RNA, 19 nt, Homo sapiens
  misc_RNA (1)...(19): siRNA sense strand
cgacaagaccguggaguuc

SEQ ID NO: 281543 - RNA, 19 nt, Homo sapiens
  misc_RNA (1)...(19): siRNA sense strand
gcaaguuccguagcuuuga

SEQ ID NO: 281544 - RNA, 19 nt, Homo sapiens
  misc_RNA (1)...(19): siRNA sense strand
gugaagaagagaagggaaa

SEQ ID NO: 281545 - RNA, 19 nt, Homo sapiens
  misc_RNA (1)...(19): siRNA sense strand
gccaggagcacuucuucaa

SEQ ID NO: 281546 - RNA, 19 nt, Homo sapiens
  misc_RNA (1)...(19): siRNA sense strand
cagguuggcugcugaacag

SEQ ID NO: 281547 - RNA, 19 nt, Homo sapiens
  misc_RNA (1)...(19): siRNA sense strand
ggaauugauggagaaagaa

SEQ ID NO: 281548 - RNA, 19 nt, Homo sapiens
  misc_RNA (1)...(19): siRNA sense strand
gagacccugcgguucauaa

SEQ ID NO: 281549 - RNA, 19 nt, Homo sapiens
  misc_RNA (1)...(19): siRNA sense strand
gaaauggaaggagaugaca

SEQ ID NO: 281550 - RNA, 19 nt, Homo sapiens
  misc_RNA (1)...(19): siRNA sense strand
caauuccgacucccucauu

SEQ ID NO: 281551 - RNA, 19 nt, Homo sapiens
  misc_RNA (1)...(19): siRNA sense strand
gcagugagggccguagaug

SEQ ID NO: 281552 - RNA, 19 nt, Homo sapiens
  misc_RNA (1)...(19): siRNA sense strand
cgucuuagcagaggugauu

SEQ ID NO: 281553 - RNA, 19 nt, Homo sapiens
  misc_RNA (1)...(19): siRNA sense strand
ggagaaagaaaccgcaaaa

SEQ ID NO: 281554 - RNA, 19 nt, Homo sapiens
  misc_RNA (1)...(19): siRNA sense strand
ggacgaggacgaggaugug

SEQ ID NO: 281555 - RNA, 19 nt, Homo sapiens
  misc_RNA (1)...(19): siRNA sense strand
caagaucaaccagcguuug

SEQ ID NO: 281556 - RNA, 19 nt, Homo sapiens
  misc_RNA (1)...(19): siRNA sense strand
gcaucugcaaagcaaauuu

SEQ ID NO: 281557 - RNA, 19 nt, Homo sapiens
  misc_RNA (1)...(19): siRNA sense strand
gaacaaacugaugcagagu

SEQ ID NO: 281558 - RNA, 19 nt, Homo sapiens
  misc_RNA (1)...(19): siRNA sense strand
caauuuaggaggugaggau

SEQ ID NO: 281559 - RNA, 19 nt, Homo sapiens
  misc_RNA (1)...(19): siRNA sense strand
gaagagaagggaaaagcaa

SEQ ID NO: 281560 - RNA, 19 nt, Homo sapiens
  misc_RNA (1)...(19): siRNA sense strand
acaaacugaugcagagucu

SEQ ID NO: 281561 - RNA, 19 nt, Homo sapiens
  misc_RNA (1)...(19): siRNA sense strand
agaagcggcgucaggaauu

SEQ ID NO: 281562 - RNA, 19 nt, Homo sapiens
  misc_RNA (1)...(19): siRNA sense strand
uagcuuugaugacgaagag

SEQ ID NO: 281563 - RNA, 19 nt, Homo sapiens
  misc_RNA (1)...(19): siRNA sense strand
ugacagugaaggagauuuc

SEQ ID NO: 281564 - RNA, 19 nt, Homo sapiens
  misc_RNA (1)...(19): siRNA sense strand
aacaacagacauauaguga

SEQ ID NO: 281565 - RNA, 19 nt, Homo sapiens
  misc_RNA (1)...(19): siRNA sense strand
agaauucaguuugccuguu

SEQ ID NO: 281566 - RNA, 19 nt, Homo sapiens
  misc_RNA (1)...(19): siRNA sense strand
caccaugcccuacggaugu

SEQ ID NO: 281567 - RNA, 19 nt, Homo sapiens
  misc_RNA (1)...(19): siRNA sense strand
gaaggagaugacaauuuag

SEQ ID NO: 281568 - RNA, 19 nt, Homo sapiens
  misc_RNA (1)...(19): siRNA sense strand
ccauguggcuaagaguguu

SEQ ID NO: 281569 - RNA, 19 nt, Homo sapiens
  misc_RNA (1)...(19): siRNA sense strand
aagcaaaggagaagagaca

SEQ ID NO: 281570 - RNA, 19 nt, Homo sapiens
  misc_RNA (1)...(19): siRNA sense strand
gaggaugugaagaagagaa

SEQ ID NO: 281571 - RNA, 19 nt, Homo sapiens
  misc_RNA (1)...(19): siRNA sense strand
cgaggagccagacaccaaa

SEQ ID NO: 281572 - RNA, 19 nt, Homo sapiens
  misc_RNA (1)...(19): siRNA sense strand
ggaggacgaggacgaggau

SEQ ID NO: 281573 - RNA, 19 nt, Homo sapiens
  misc_RNA (1)...(19): siRNA sense strand
gcaagguuaugaaaacuac

SEQ ID NO: 281574 - RNA, 19 nt, Homo sapiens
  misc_RNA (1)...(19): siRNA sense strand
aaccagcguuuggacauga

SEQ ID NO: 281575 - RNA, 19 nt, Homo sapiens
  misc_RNA (1)...(19): siRNA sense strand
cugcaaagcaaauuucaca

SEQ ID NO: 281576 - RNA, 19 nt, Homo sapiens
  misc_RNA (1)...(19): siRNA sense strand
acgaggaugugaagaagag

SEQ ID NO: 281577 - RNA, 19 nt, Homo sapiens
  misc_RNA (1)...(19): siRNA sense strand
ggagcaacccuggcaccuu

SEQ ID NO: 281578 - RNA, 19 nt, Homo sapiens
  misc_RNA (1)...(19): siRNA sense strand
gguugacagugaaggagau

SEQ ID NO: 281579 - RNA, 19 nt, Homo sapiens
  misc_RNA (1)...(19): siRNA sense strand
gccgacagaauucaguuug

SEQ ID NO: 281580 - RNA, 19 nt, Homo sapiens
  misc_RNA (1)...(19): siRNA sense strand
gacuuccgcucaggagaug

SEQ ID NO: 281581 - RNA, 19 nt, Homo sapiens
  misc_RNA (1)...(19): siRNA sense strand
cgcggaugcugaaguggaa

SEQ ID NO: 281582 - RNA, 19 nt, Homo sapiens
  misc_RNA (1)...(19): siRNA sense strand
ccaagaucaaccagcguuu

SEQ ID NO: 281583 - RNA, 19 nt, Homo sapiens
  misc_RNA (1)...(19): siRNA sense strand
uagugaagaugcuggaaaa

SEQ ID NO: 281584 - RNA, 19 nt, Homo sapiens
  misc_RNA (1)...(19): siRNA sense strand
uugaacaacagacauauag

SEQ ID NO: 281585 - RNA, 19 nt, Homo sapiens
  misc_RNA (1)...(19): siRNA sense strand
ggauuggccaggagcacuu

SEQ ID NO: 281586 - RNA, 19 nt, Homo sapiens
  misc_RNA (1)...(19): siRNA sense strand
caucugcaaagcaaauuuc

SEQ ID NO: 281587 - RNA, 19 nt, Homo sapiens
  misc_RNA (1)...(19): siRNA sense strand
guaugcaaguuccguagcu

SEQ ID NO: 281588 - RNA, 19 nt, Homo sapiens
  misc_RNA (1)...(19): siRNA sense strand
ccgcucaggagaugaagaa

SEQ ID NO: 281589 - RNA, 19 nt, Homo sapiens
  misc_RNA (1)...(19): siRNA sense strand
gaaaagcaaaggagaagag

SEQ ID NO: 281590 - RNA, 19 nt, Homo sapiens
  misc_RNA (1)...(19): siRNA sense strand
ccgacaagaccguggaguu

SEQ ID NO: 281591 - RNA, 19 nt, Homo sapiens
  misc_RNA (1)...(19): siRNA sense strand
ccgugcagccgacagaauu

SEQ ID NO: 281592 - RNA, 19 nt, Homo sapiens
  misc_RNA (1)...(19): siRNA sense strand
uaggaggugaggauaagaa

SEQ ID NO: 281593 - RNA, 19 nt, Homo sapiens
  misc_RNA (1)...(19): siRNA sense strand
ugacgaagagauccagaag

SEQ ID NO: 281594 - RNA, 19 nt, Homo sapiens
  misc_RNA (1)...(19): siRNA sense strand
ggagccagacaccaaacug

SEQ ID NO: 281595 - RNA, 19 nt, Homo sapiens
  misc_RNA (1)...(19): siRNA sense strand
gcuacagcuacgacuauga

SEQ ID NO: 281596 - RNA, 19 nt, Homo sapiens
  misc_RNA (1)...(19): siRNA sense strand
guggaacggcacaugagaa

SEQ ID NO: 281597 - RNA, 19 nt, Homo sapiens
  misc_RNA (1)...(19): siRNA sense strand
gagccaugcaccgacaauu

SEQ ID NO: 281598 - RNA, 19 nt, Homo sapiens
  misc_RNA (1)...(19): siRNA sense strand
ccguagcuuugaugacgaa

SEQ ID NO: 281599 - RNA, 19 nt, Homo sapiens
  misc_RNA (1)...(19): siRNA sense strand
ggaugaacucugcgacucu

SEQ ID NO: 281600 - RNA, 19 nt, Homo sapiens
  misc_RNA (1)...(19): siRNA sense strand
ggaacucuuugcugaauuu

SEQ ID NO: 281601 - RNA, 19 nt, Homo sapiens
  misc_RNA (1)...(19): siRNA sense strand
ggaaacugcugguguccaa

SEQ ID NO: 281602 - RNA, 19 nt, Homo sapiens
  misc_RNA (1)...(19): siRNA sense strand
gaaggcggcugugcacuau

SEQ ID NO: 281603 - RNA, 19 nt, Homo sapiens
  misc_RNA (1)...(19): siRNA sense strand
ugaaggccaugaagcagua

SEQ ID NO: 281604 - RNA, 19 nt, Homo sapiens
  misc_RNA (1)...(19): siRNA sense strand
gagguggcaugacuagaaa

SEQ ID NO: 281605 - RNA, 19 nt, Homo sapiens
  misc_RNA (1)...(19): siRNA sense strand
aaacagagguggcaugacu

SEQ ID NO: 281606 - RNA, 19 nt, Homo sapiens
  misc_RNA (1)...(19): siRNA sense strand
gagaauggacaccaguuaa

SEQ ID NO: 281607 - RNA, 19 nt, Homo sapiens
  misc_RNA (1)...(19): siRNA sense strand
ggagacaggugggaaacug

SEQ ID NO: 281608 - RNA, 19 nt, Homo sapiens
  misc_RNA (1)...(19): siRNA sense strand
gaacagcaaacgugcacuu

SEQ ID NO: 281609 - RNA, 19 nt, Homo sapiens
  misc_RNA (1)...(19): siRNA sense strand
caaaacaacuucccgacaa

SEQ ID NO: 281610 - RNA, 19 nt, Homo sapiens
  misc_RNA (1)...(19): siRNA sense strand
cgagaauggacaccaguua

SEQ ID NO: 281611 - RNA, 19 nt, Homo sapiens
  misc_RNA (1)...(19): siRNA sense strand
gacgacaucauuaaacuga

SEQ ID NO: 281612 - RNA, 19 nt, Homo sapiens
  misc_RNA (1)...(19): siRNA sense strand
gaauuuggaacgcugaaga

SEQ ID NO: 281613 - RNA, 19 nt, Homo sapiens
  misc_RNA (1)...(19): siRNA sense strand
guaaacagagguggcauga

SEQ ID NO: 281614 - RNA, 19 nt, Homo sapiens
  misc_RNA (1)...(19): siRNA sense strand
caggaacucuuugcugaau

SEQ ID NO: 281615 - RNA, 19 nt, Homo sapiens
  misc_RNA (1)...(19): siRNA sense strand
ggucgcagcuuaggaacag

SEQ ID NO: 281616 - RNA, 19 nt, Homo sapiens
  misc_RNA (1)...(19): siRNA sense strand
cgacaucauuaaacugaac

SEQ ID NO: 281617 - RNA, 19 nt, Homo sapiens
  misc_RNA (1)...(19): siRNA sense strand
agagguggcaugacuagaa

SEQ ID NO: 281618 - RNA, 19 nt, Homo sapiens
  misc_RNA (1)...(19): siRNA sense strand
agacgccgauauucaggaa

SEQ ID NO: 281619 - RNA, 19 nt, Homo sapiens
  misc_RNA (1)...(19): siRNA sense strand
cagcuggacgccuauaaug

SEQ ID NO: 281620 - RNA, 19 nt, Homo sapiens
  misc_RNA (1)...(19): siRNA sense strand
aggcggcugugcacuauga

SEQ ID NO: 281621 - RNA, 19 nt, Homo sapiens
  misc_RNA (1)...(19): siRNA sense strand
acucuuugcugaauuugga

SEQ ID NO: 281622 - RNA, 19 nt, Homo sapiens
  misc_RNA (1)...(19): siRNA sense strand
ucucuggacgacaucauua

SEQ ID NO: 281623 - RNA, 19 nt, Homo sapiens
  misc_RNA (1)...(19): siRNA sense strand
agaaggcggcugugcacua

SEQ ID NO: 281624 - RNA, 19 nt, Homo sapiens
  misc_RNA (1)...(19): siRNA sense strand
gauauucaggaacucuuug

SEQ ID NO: 281625 - RNA, 19 nt, Homo sapiens
  misc_RNA (1)...(19): siRNA sense strand
ucgcucuggucgcagcuua

SEQ ID NO: 281626 - RNA, 19 nt, Homo sapiens
  misc_RNA (1)...(19): siRNA sense strand
ggacgacaucauuaaacug

SEQ ID NO: 281627 - RNA, 19 nt, Homo sapiens
  misc_RNA (1)...(19): siRNA sense strand
ucucagacgccgauauuca

SEQ ID NO: 281628 - RNA, 19 nt, Homo sapiens
  misc_RNA (1)...(19): siRNA sense strand
cagcuugucacgucacaga

SEQ ID NO: 281629 - RNA, 19 nt, Homo sapiens
  misc_RNA (1)...(19): siRNA sense strand
cgauauucaggaacucuuu

SEQ ID NO: 281630 - RNA, 19 nt, Homo sapiens
  misc_RNA (1)...(19): siRNA sense strand
cuugucacgucacagauug

SEQ ID NO: 281631 - RNA, 19 nt, Homo sapiens
  misc_RNA (1)...(19): siRNA sense strand
gcuugucacgucacagauu

SEQ ID NO: 281632 - RNA, 19 nt, Homo sapiens
  misc_RNA (1)...(19): siRNA sense strand
uggacgacaucauuaaacu

SEQ ID NO: 281633 - RNA, 19 nt, Homo sapiens
  misc_RNA (1)...(19): siRNA sense strand
gcgagaauggacaccaguu

SEQ ID NO: 281634 - RNA, 19 nt, Homo sapiens
  misc_RNA (1)...(19): siRNA sense strand
acaaguggcagcacgaucu

SEQ ID NO: 281635 - RNA, 19 nt, Homo sapiens
  misc_RNA (1)...(19): siRNA sense strand
ccagcuggacgccuauaau

SEQ ID NO: 281636 - RNA, 19 nt, Homo sapiens
  misc_RNA (1)...(19): siRNA sense strand
caacggcuucccucuggau

SEQ ID NO: 281637 - RNA, 19 nt, Homo sapiens
  misc_RNA (1)...(19): siRNA sense strand
gaacaaacuucacaaagcu

SEQ ID NO: 281638 - RNA, 19 nt, Homo sapiens
  misc_RNA (1)...(19): siRNA sense strand
gaaauaugauucagacucu

SEQ ID NO: 281639 - RNA, 19 nt, Homo sapiens
  misc_RNA (1)...(19): siRNA sense strand
ucacaaagcuggaaaagaa

SEQ ID NO: 281640 - RNA, 19 nt, Homo sapiens
  misc_RNA (1)...(19): siRNA sense strand
ggaacaaacuucacaaagc

SEQ ID NO: 281641 - RNA, 19 nt, Homo sapiens
  misc_RNA (1)...(19): siRNA sense strand
ggaugaggaugaauuggaa

SEQ ID NO: 281642 - RNA, 19 nt, Homo sapiens
  misc_RNA (1)...(19): siRNA sense strand
agaaaucccuagugaaaga

SEQ ID NO: 281643 - RNA, 19 nt, Homo sapiens
  misc_RNA (1)...(19): siRNA sense strand
acagagaaaucccuaguga

SEQ ID NO: 281644 - RNA, 19 nt, Homo sapiens
  misc_RNA (1)...(19): siRNA sense strand
caaagucauucccacacua

SEQ ID NO: 281645 - RNA, 19 nt, Homo sapiens
  misc_RNA (1)...(19): siRNA sense strand
ccacagaaacuuuagaaug

SEQ ID NO: 281646 - RNA, 19 nt, Homo sapiens
  misc_RNA (1)...(19): siRNA sense strand
cacagaaacuuuagaaugg

SEQ ID NO: 281647 - RNA, 19 nt, Homo sapiens
  misc_RNA (1)...(19): siRNA sense strand
ccaaaguccuggagcauca

SEQ ID NO: 281648 - RNA, 19 nt, Homo sapiens
  misc_RNA (1)...(19): siRNA sense strand
agagaaaucccuagugaaa

SEQ ID NO: 281649 - RNA, 19 nt, Homo sapiens
  misc_RNA (1)...(19): siRNA sense strand
gcucgguucuucugacauu

SEQ ID NO: 281650 - RNA, 19 nt, Homo sapiens
  misc_RNA (1)...(19): siRNA sense strand
agaaacaccucgagaccaa

SEQ ID NO: 281651 - RNA, 19 nt, Homo sapiens
  misc_RNA (1)...(19): siRNA sense strand
gaacauuuggauucugaaa

SEQ ID NO: 281652 - RNA, 19 nt, Homo sapiens
  misc_RNA (1)...(19): siRNA sense strand
ggaaagcucaacagcagaa

SEQ ID NO: 281653 - RNA, 19 nt, Homo sapiens
  misc_RNA (1)...(19): siRNA sense strand
cuacagagacuccacauuc

SEQ ID NO: 281654 - RNA, 19 nt, Homo sapiens
  misc_RNA (1)...(19): siRNA sense strand
gaggaaagaaauaugauuc

SEQ ID NO: 281655 - RNA, 19 nt, Homo sapiens
  misc_RNA (1)...(19): siRNA sense strand
ggaaagaaauaugauucag

SEQ ID NO: 281656 - RNA, 19 nt, Homo sapiens
  misc_RNA (1)...(19): siRNA sense strand
gugagagacugcauaucaa

SEQ ID NO: 281657 - RNA, 19 nt, Homo sapiens
  misc_RNA (1)...(19): siRNA sense strand
gcaauauuguccaagaaac

SEQ ID NO: 281658 - RNA, 19 nt, Homo sapiens
  misc_RNA (1)...(19): siRNA sense strand
cagaugacuucaccacaga

SEQ ID NO: 281659 - RNA, 19 nt, Homo sapiens
  misc_RNA (1)...(19): siRNA sense strand
ucagauggaugaggaugaa

SEQ ID NO: 281660 - RNA, 19 nt, Homo sapiens
  misc_RNA (1)...(19): siRNA sense strand
gaagucaaggagagugaaa

SEQ ID NO: 281661 - RNA, 19 nt, Homo sapiens
  misc_RNA (1)...(19): siRNA sense strand
ccaaacugguggaagaaca

SEQ ID NO: 281662 - RNA, 19 nt, Homo sapiens
  misc_RNA (1)...(19): siRNA sense strand
ugaauuggaacgccuuaaa

SEQ ID NO: 281663 - RNA, 19 nt, Homo sapiens
  misc_RNA (1)...(19): siRNA sense strand
gcaccuuuccuuugugaga

SEQ ID NO: 281664 - RNA, 19 nt, Homo sapiens
  misc_RNA (1)...(19): siRNA sense strand
gaauuggaacgccuuaaag

SEQ ID NO: 281665 - RNA, 19 nt, Homo sapiens
  misc_RNA (1)...(19): siRNA sense strand
uacagagacuccacauuca

SEQ ID NO: 281666 - RNA, 19 nt, Homo sapiens
  misc_RNA (1)...(19): siRNA sense strand
gcuaaaagaugggaaaaca

SEQ ID NO: 281667 - RNA, 19 nt, Homo sapiens
  misc_RNA (1)...(19): siRNA sense strand
gauggaugaggaugaauug

SEQ ID NO: 281668 - RNA, 19 nt, Homo sapiens
  misc_RNA (1)...(19): siRNA sense strand
ugugagagacugcauauca

SEQ ID NO: 281669 - RNA, 19 nt, Homo sapiens
  misc_RNA (1)...(19): siRNA sense strand
gguuugccauuucuacaga

SEQ ID NO: 281670 - RNA, 19 nt, Homo sapiens
  misc_RNA (1)...(19): siRNA sense strand
caucagcugcuucagacua

SEQ ID NO: 281671 - RNA, 19 nt, Homo sapiens
  misc_RNA (1)...(19): siRNA sense strand
ggcaauauuguccaagaaa

SEQ ID NO: 281672 - RNA, 19 nt, Homo sapiens
  misc_RNA (1)...(19): siRNA sense strand
uggaagaacauuuggauuc

SEQ ID NO: 281673 - RNA, 19 nt, Homo sapiens
  misc_RNA (1)...(19): siRNA sense strand
uuacugaccuaggaaauac

SEQ ID NO: 281674 - RNA, 19 nt, Homo sapiens
  misc_RNA (1)...(19): siRNA sense strand
caacagcagaaacaagaau

SEQ ID NO: 281675 - RNA, 19 nt, Homo sapiens
  misc_RNA (1)...(19): siRNA sense strand
gaauggaggcucgguucuu

SEQ ID NO: 281676 - RNA, 19 nt, Homo sapiens
  misc_RNA (1)...(19): siRNA sense strand
ggaaauacagaugacuuca

SEQ ID NO: 281677 - RNA, 19 nt, Homo sapiens
  misc_RNA (1)...(19): siRNA sense strand
ugagagacugcauaucaaa

SEQ ID NO: 281678 - RNA, 19 nt, Homo sapiens
  misc_RNA (1)...(19): siRNA sense strand
cgaggaaagaaauaugauu

SEQ ID NO: 281679 - RNA, 19 nt, Homo sapiens
  misc_RNA (1)...(19): siRNA sense strand
uuggaacgccuuaaagaaa

SEQ ID NO: 281680 - RNA, 19 nt, Homo sapiens
  misc_RNA (1)...(19): siRNA sense strand
ggaaaacacaagauuaugu

SEQ ID NO: 281681 - RNA, 19 nt, Homo sapiens
  misc_RNA (1)...(19): siRNA sense strand
aagcaccuuuccuuuguga

SEQ ID NO: 281682 - RNA, 19 nt, Homo sapiens
  misc_RNA (1)...(19): siRNA sense strand
acagaaacuuuagaaugga

SEQ ID NO: 281683 - RNA, 19 nt, Homo sapiens
  misc_RNA (1)...(19): siRNA sense strand
gaugaauuggaacgccuua

SEQ ID NO: 281684 - RNA, 19 nt, Homo sapiens
  misc_RNA (1)...(19): siRNA sense strand
gaugacuucaccacagaaa

SEQ ID NO: 281685 - RNA, 19 nt, Homo sapiens
  misc_RNA (1)...(19): siRNA sense strand
agacucugaugaugauuag

SEQ ID NO: 281686 - RNA, 19 nt, Homo sapiens
  misc_RNA (1)...(19): siRNA sense strand
uggcaauauuguccaagaa

SEQ ID NO: 281687 - RNA, 19 nt, Homo sapiens
  misc_RNA (1)...(19): siRNA sense strand
cuucaccacagaaacuuua

SEQ ID NO: 281688 - RNA, 19 nt, Homo sapiens
  misc_RNA (1)...(19): siRNA sense strand
cagaaacaagaauggcuuu

SEQ ID NO: 281689 - RNA, 19 nt, Homo sapiens
  misc_RNA (1)...(19): siRNA sense strand
guucuucugacauucuuaa

SEQ ID NO: 281690 - RNA, 19 nt, Homo sapiens
  misc_RNA (1)...(19): siRNA sense strand
caauauuguccaagaaaca

SEQ ID NO: 281691 - RNA, 19 nt, Homo sapiens
  misc_RNA (1)...(19): siRNA sense strand
ucaaagucauucccacacu

SEQ ID NO: 281692 - RNA, 19 nt, Homo sapiens
  misc_RNA (1)...(19): siRNA sense strand
gguggaagaacauuuggau

SEQ ID NO: 281693 - RNA, 19 nt, Homo sapiens
  misc_RNA (1)...(19): siRNA sense strand
agauuauguuguuggguuu

SEQ ID NO: 281694 - RNA, 19 nt, Homo sapiens
  misc_RNA (1)...(19): siRNA sense strand
gagaaaucccuagugaaag

SEQ ID NO: 281695 - RNA, 19 nt, Homo sapiens
  misc_RNA (1)...(19): siRNA sense strand
aauggaggcucgguucuuc

SEQ ID NO: 281696 - RNA, 19 nt, Homo sapiens
  misc_RNA (1)...(19): siRNA sense strand
caccacagaaacuuuagaa

SEQ ID NO: 281697 - RNA, 19 nt, Homo sapiens
  misc_RNA (1)...(19): siRNA sense strand
gaaacaccucgagaccaaa

SEQ ID NO: 281698 - RNA, 19 nt, Homo sapiens
  misc_RNA (1)...(19): siRNA sense strand
guaaaauacuagacagaca

SEQ ID NO: 281699 - RNA, 19 nt, Homo sapiens
  misc_RNA (1)...(19): siRNA sense strand
gacuccacauucaggugua

SEQ ID NO: 281700 - RNA, 19 nt, Homo sapiens
  misc_RNA (1)...(19): siRNA sense strand
gauuauguuguuggguuua

SEQ ID NO: 281701 - RNA, 19 nt, Homo sapiens
  misc_RNA (1)...(19): siRNA sense strand
acaccucgagaccaaauuu

SEQ ID NO: 281702 - RNA, 19 nt, Homo sapiens
  misc_RNA (1)...(19): siRNA sense strand
agacaucuggcaauauugu

SEQ ID NO: 281703 - RNA, 19 nt, Homo sapiens
  misc_RNA (1)...(19): siRNA sense strand
gaaauacagaugacuucac

SEQ ID NO: 281704 - RNA, 19 nt, Homo sapiens
  misc_RNA (1)...(19): siRNA sense strand
cagagaaaucccuagugaa

SEQ ID NO: 281705 - RNA, 19 nt, Homo sapiens
  misc_RNA (1)...(19): siRNA sense strand
gaccuaggaaauacagaug

SEQ ID NO: 281706 - RNA, 19 nt, Homo sapiens
  misc_RNA (1)...(19): siRNA sense strand
gagagacugcauaucaaag

SEQ ID NO: 281707 - RNA, 19 nt, Homo sapiens
  misc_RNA (1)...(19): siRNA sense strand
gaaagcucaacagcagaaa

SEQ ID NO: 281708 - RNA, 19 nt, Homo sapiens
  misc_RNA (1)...(19): siRNA sense strand
cuggcaauauuguccaaga

SEQ ID NO: 281709 - RNA, 19 nt, Homo sapiens
  misc_RNA (1)...(19): siRNA sense strand
aaagagacuccaggcacua

SEQ ID NO: 281710 - RNA, 19 nt, Homo sapiens
  misc_RNA (1)...(19): siRNA sense strand
uggguuuacugaccuagga

SEQ ID NO: 281711 - RNA, 19 nt, Homo sapiens
  misc_RNA (1)...(19): siRNA sense strand
uggaacgccuuaaagaaaa

SEQ ID NO: 281712 - RNA, 19 nt, Homo sapiens
  misc_RNA (1)...(19): siRNA sense strand
caaggagagugaaaaugug

SEQ ID NO: 281713 - RNA, 19 nt, Homo sapiens
  misc_RNA (1)...(19): siRNA sense strand
aauuggaacgccuuaaaga

SEQ ID NO: 281714 - RNA, 19 nt, Homo sapiens
  misc_RNA (1)...(19): siRNA sense strand
uaggaaauacagaugacuu

SEQ ID NO: 281715 - RNA, 19 nt, Homo sapiens
  misc_RNA (1)...(19): siRNA sense strand
gcucaacagcagaaacaag

SEQ ID NO: 281716 - RNA, 19 nt, Homo sapiens
  misc_RNA (1)...(19): siRNA sense strand
uaaaggacauggggaauac

SEQ ID NO: 281717 - RNA, 19 nt, Homo sapiens
  misc_RNA (1)...(19): siRNA sense strand
aaacaccucgagaccaaau

SEQ ID NO: 281718 - RNA, 19 nt, Homo sapiens
  misc_RNA (1)...(19): siRNA sense strand
cucaacagcagaaacaaga

SEQ ID NO: 281719 - RNA, 19 nt, Homo sapiens
  misc_RNA (1)...(19): siRNA sense strand
ugacuucaccacagaaacu

SEQ ID NO: 281720 - RNA, 19 nt, Homo sapiens
  misc_RNA (1)...(19): siRNA sense strand
gcacuaaggaaagcucaac

SEQ ID NO: 281721 - RNA, 19 nt, Homo sapiens
  misc_RNA (1)...(19): siRNA sense strand
ucaaggagagugaaaaugu

SEQ ID NO: 281722 - RNA, 19 nt, Homo sapiens
  misc_RNA (1)...(19): siRNA sense strand
uuuacugaccuaggaaaua

SEQ ID NO: 281723 - RNA, 19 nt, Homo sapiens
  misc_RNA (1)...(19): siRNA sense strand
ugaaggugcucaucucuuu

SEQ ID NO: 281724 - RNA, 19 nt, Homo sapiens
  misc_RNA (1)...(19): siRNA sense strand
ggacaagaaugguguggau

SEQ ID NO: 281725 - RNA, 19 nt, Homo sapiens
  misc_RNA (1)...(19): siRNA sense strand
ggaguaggguccauuguuc

SEQ ID NO: 281726 - RNA, 19 nt, Homo sapiens
  misc_RNA (1)...(19): siRNA sense strand
ggacguggaugaauaugac

SEQ ID NO: 281727 - RNA, 19 nt, Homo sapiens
  misc_RNA (1)...(19): siRNA sense strand
gagagcccgucugacaaua

SEQ ID NO: 281728 - RNA, 19 nt, Homo sapiens
  misc_RNA (1)...(19): siRNA sense strand
uuacugcaauggcaugaaa

SEQ ID NO: 281729 - RNA, 19 nt, Homo sapiens
  misc_RNA (1)...(19): siRNA sense strand
ggaugaauaugacgagaac

SEQ ID NO: 281730 - RNA, 19 nt, Homo sapiens
  misc_RNA (1)...(19): siRNA sense strand
guguggaucuccuaaugaa

SEQ ID NO: 281731 - RNA, 19 nt, Homo sapiens
  misc_RNA (1)...(19): siRNA sense strand
guucgugucuugacugcaa

SEQ ID NO: 281732 - RNA, 19 nt, Homo sapiens
  misc_RNA (1)...(19): siRNA sense strand
gaagguggacguggaugaa

SEQ ID NO: 281733 - RNA, 19 nt, Homo sapiens
  misc_RNA (1)...(19): siRNA sense strand
caugacagcugcccuacag

SEQ ID NO: 281734 - RNA, 19 nt, Homo sapiens
  misc_RNA (1)...(19): siRNA sense strand
uucaaucucuggacaagaa

SEQ ID NO: 281735 - RNA, 19 nt, Homo sapiens
  misc_RNA (1)...(19): siRNA sense strand
ggaagguggacguggauga

SEQ ID NO: 281736 - RNA, 19 nt, Homo sapiens
  misc_RNA (1)...(19): siRNA sense strand
gaucuccuaaugaaguaua

SEQ ID NO: 281737 - RNA, 19 nt, Homo sapiens
  misc_RNA (1)...(19): siRNA sense strand
gauuugagagcccgucuga

SEQ ID NO: 281738 - RNA, 19 nt, Homo sapiens
  misc_RNA (1)...(19): siRNA sense strand
gcaggcagcauugucuuga

SEQ ID NO: 281739 - RNA, 19 nt, Homo sapiens
  misc_RNA (1)...(19): siRNA sense strand
gaauaugacgagaacaagu

SEQ ID NO: 281740 - RNA, 19 nt, Homo sapiens
  misc_RNA (1)...(19): siRNA sense strand
ggaggaguaggguccauug

SEQ ID NO: 281741 - RNA, 19 nt, Homo sapiens
  misc_RNA (1)...(19): siRNA sense strand
guccauuguucgugucuug

SEQ ID NO: 281742 - RNA, 19 nt, Homo sapiens
  misc_RNA (1)...(19): siRNA sense strand
agguggacguggaugaaua

SEQ ID NO: 281743 - RNA, 19 nt, Homo sapiens
  misc_RNA (1)...(19): siRNA sense strand
uggaucuccuaaugaagua

SEQ ID NO: 281744 - RNA, 19 nt, Homo sapiens
  misc_RNA (1)...(19): siRNA sense strand
gcagcauugucuugaaggu

SEQ ID NO: 281745 - RNA, 19 nt, Homo sapiens
  misc_RNA (1)...(19): siRNA sense strand
gguguggaucuccuaauga

SEQ ID NO: 281746 - RNA, 19 nt, Homo sapiens
  misc_RNA (1)...(19): siRNA sense strand
ccaagagucaggcagugaa

SEQ ID NO: 281747 - RNA, 19 nt, Homo sapiens
  misc_RNA (1)...(19): siRNA sense strand
aauaugacgagaacaaguu

SEQ ID NO: 281748 - RNA, 19 nt, Homo sapiens
  misc_RNA (1)...(19): siRNA sense strand
caggcagcauugucuugaa

SEQ ID NO: 281749 - RNA, 19 nt, Homo sapiens
  misc_RNA (1)...(19): siRNA sense strand
ugguguggaucuccuaaug

SEQ ID NO: 281750 - RNA, 19 nt, Homo sapiens
  misc_RNA (1)...(19): siRNA sense strand
guggaucuccuaaugaagu

SEQ ID NO: 281751 - RNA, 19 nt, Homo sapiens
  misc_RNA (1)...(19): siRNA sense strand
gguggacguggaugaauau

SEQ ID NO: 281752 - RNA, 19 nt, Homo sapiens
  misc_RNA (1)...(19): siRNA sense strand
caagaaugguguggaucuc

SEQ ID NO: 281753 - RNA, 19 nt, Homo sapiens
  misc_RNA (1)...(19): siRNA sense strand
ugagagcccgucugacaau

SEQ ID NO: 281754 - RNA, 19 nt, Homo sapiens
  misc_RNA (1)...(19): siRNA sense strand
gaaugguguggaucuccua

SEQ ID NO: 281755 - RNA, 19 nt, Homo sapiens
  misc_RNA (1)...(19): siRNA sense strand
cuacaggcagcucugaaga

SEQ ID NO: 281756 - RNA, 19 nt, Homo sapiens
  misc_RNA (1)...(19): siRNA sense strand
gugcuauguuacugcaaug

SEQ ID NO: 281757 - RNA, 19 nt, Homo sapiens
  misc_RNA (1)...(19): siRNA sense strand
gagcccgucugacaauagc

SEQ ID NO: 281758 - RNA, 19 nt, Homo sapiens
  misc_RNA (1)...(19): siRNA sense strand
acaggcagcucugaagaac

SEQ ID NO: 281759 - RNA, 19 nt, Homo sapiens
  misc_RNA (1)...(19): siRNA sense strand
uuugagagcccgucugaca

SEQ ID NO: 281760 - RNA, 19 nt, Homo sapiens
  misc_RNA (1)...(19): siRNA sense strand
gauaggaccuugauauaua

SEQ ID NO: 281761 - RNA, 19 nt, Homo sapiens
  misc_RNA (1)...(19): siRNA sense strand
gcaagagacuggacugaga

SEQ ID NO: 281762 - RNA, 19 nt, Homo sapiens
  misc_RNA (1)...(19): siRNA sense strand
gaugagagccuauuuacaa

SEQ ID NO: 281763 - RNA, 19 nt, Homo sapiens
  misc_RNA (1)...(19): siRNA sense strand
ggacugagacuuugugaga

SEQ ID NO: 281764 - RNA, 19 nt, Homo sapiens
  misc_RNA (1)...(19): siRNA sense strand
auacagauauuguggauga

SEQ ID NO: 281765 - RNA, 19 nt, Homo sapiens
  misc_RNA (1)...(19): siRNA sense strand
caaacaaacaggaagauga

SEQ ID NO: 281766 - RNA, 19 nt, Homo sapiens
  misc_RNA (1)...(19): siRNA sense strand
ugccaaaccugcaaacaaa

SEQ ID NO: 281767 - RNA, 19 nt, Homo sapiens
  misc_RNA (1)...(19): siRNA sense strand
uaacgcaauuuaugccaaa

SEQ ID NO: 281768 - RNA, 19 nt, Homo sapiens
  misc_RNA (1)...(19): siRNA sense strand
acaggaagaugaagugaug

SEQ ID NO: 281769 - RNA, 19 nt, Homo sapiens
  misc_RNA (1)...(19): siRNA sense strand
ccacuuaacgcaauuuaug

SEQ ID NO: 281770 - RNA, 19 nt, Homo sapiens
  misc_RNA (1)...(19): siRNA sense strand
gagacuggacugagacuuu

SEQ ID NO: 281771 - RNA, 19 nt, Homo sapiens
  misc_RNA (1)...(19): siRNA sense strand
ggacuugcuuugugaagag

SEQ ID NO: 281772 - RNA, 19 nt, Homo sapiens
  misc_RNA (1)...(19): siRNA sense strand
aaacaaacaggaagaugaa

SEQ ID NO: 281773 - RNA, 19 nt, Homo sapiens
  misc_RNA (1)...(19): siRNA sense strand
auaccaaacucaucggaaa

SEQ ID NO: 281774 - RNA, 19 nt, Homo sapiens
  misc_RNA (1)...(19): siRNA sense strand
gcugauaggaccuugauau

SEQ ID NO: 281775 - RNA, 19 nt, Homo sapiens
  misc_RNA (1)...(19): siRNA sense strand
caaggccaaugucuucuuc

SEQ ID NO: 281776 - RNA, 19 nt, Homo sapiens
  misc_RNA (1)...(19): siRNA sense strand
ugaagaaacugcaaaagug

SEQ ID NO: 281777 - RNA, 19 nt, Homo sapiens
  misc_RNA (1)...(19): siRNA sense strand
gccaaugucuucuucaaaa

SEQ ID NO: 281778 - RNA, 19 nt, Homo sapiens
  misc_RNA (1)...(19): siRNA sense strand
caacagcuaaggcaagaga

SEQ ID NO: 281779 - RNA, 19 nt, Homo sapiens
  misc_RNA (1)...(19): siRNA sense strand
gagccugguuuuccacuua

SEQ ID NO: 281780 - RNA, 19 nt, Homo sapiens
  misc_RNA (1)...(19): siRNA sense strand
ggugagaaagaaauguaua

SEQ ID NO: 281781 - RNA, 19 nt, Homo sapiens
  misc_RNA (1)...(19): siRNA sense strand
gcuuaccacucuucucuca

SEQ ID NO: 281782 - RNA, 19 nt, Homo sapiens
  misc_RNA (1)...(19): siRNA sense strand
uuaccacucuucucucaug

SEQ ID NO: 281783 - RNA, 19 nt, Homo sapiens
  misc_RNA (1)...(19): siRNA sense strand
gcacuguugccuaucagaa

SEQ ID NO: 281784 - RNA, 19 nt, Homo sapiens
  misc_RNA (1)...(19): siRNA sense strand
gaagugaugagagccuauu

SEQ ID NO: 281785 - RNA, 19 nt, Homo sapiens
  misc_RNA (1)...(19): siRNA sense strand
cauggauccugauaccaaa

SEQ ID NO: 281786 - RNA, 19 nt, Homo sapiens
  misc_RNA (1)...(19): siRNA sense strand
agacuggacugagacuuug

SEQ ID NO: 281787 - RNA, 19 nt, Homo sapiens
  misc_RNA (1)...(19): siRNA sense strand
cugauaggaccuugauaua

SEQ ID NO: 281788 - RNA, 19 nt, Homo sapiens
  misc_RNA (1)...(19): siRNA sense strand
acugagacuuugugagaaa

SEQ ID NO: 281789 - RNA, 19 nt, Homo sapiens
  misc_RNA (1)...(19): siRNA sense strand
gcaaacaaacaggaagaug

SEQ ID NO: 281790 - RNA, 19 nt, Homo sapiens
  misc_RNA (1)...(19): siRNA sense strand
cugaaugucugaagaaacu

SEQ ID NO: 281791 - RNA, 19 nt, Homo sapiens
  misc_RNA (1)...(19): siRNA sense strand
ggaccuugauauauauaac

SEQ ID NO: 281792 - RNA, 19 nt, Homo sapiens
  misc_RNA (1)...(19): siRNA sense strand
aagccaaggugagaaagaa

SEQ ID NO: 281793 - RNA, 19 nt, Homo sapiens
  misc_RNA (1)...(19): siRNA sense strand
caaacaggaagaugaagug

SEQ ID NO: 281794 - RNA, 19 nt, Homo sapiens
  misc_RNA (1)...(19): siRNA sense strand
gagagccuauuuacaacag

SEQ ID NO: 281795 - RNA, 19 nt, Homo sapiens
  misc_RNA (1)...(19): siRNA sense strand
uacaacagcuaaggcaaga

SEQ ID NO: 281796 - RNA, 19 nt, Homo sapiens
  misc_RNA (1)...(19): siRNA sense strand
ugauaggaccuugauauau

SEQ ID NO: 281797 - RNA, 19 nt, Homo sapiens
  misc_RNA (1)...(19): siRNA sense strand
gugguggacuugcuuugug

SEQ ID NO: 281798 - RNA, 19 nt, Homo sapiens
  misc_RNA (1)...(19): siRNA sense strand
ccacucuucucucauggau

SEQ ID NO: 281799 - RNA, 19 nt, Homo sapiens
  misc_RNA (1)...(19): siRNA sense strand
gacugagacuuugugagaa

SEQ ID NO: 281800 - RNA, 19 nt, Homo sapiens
  misc_RNA (1)...(19): siRNA sense strand
cgcugggaaucacuaauuu

SEQ ID NO: 281801 - RNA, 19 nt, Homo sapiens
  misc_RNA (1)...(19): siRNA sense strand
agauacagauauuguggau

SEQ ID NO: 281802 - RNA, 19 nt, Homo sapiens
  misc_RNA (1)...(19): siRNA sense strand
augaagccaucuauuacuu

SEQ ID NO: 281803 - RNA, 19 nt, Homo sapiens
  misc_RNA (1)...(19): siRNA sense strand
ggaagaugaagugaugaga

SEQ ID NO: 281804 - RNA, 19 nt, Homo sapiens
  misc_RNA (1)...(19): siRNA sense strand
ucauggauccugauaccaa

SEQ ID NO: 281805 - RNA, 19 nt, Homo sapiens
  misc_RNA (1)...(19): siRNA sense strand
ggccaaugucuucuucaaa

SEQ ID NO: 281806 - RNA, 19 nt, Homo sapiens
  misc_RNA (1)...(19): siRNA sense strand
caaacucaucggaaacaug

SEQ ID NO: 281807 - RNA, 19 nt, Homo sapiens
  misc_RNA (1)...(19): siRNA sense strand
caaaagugcaauuccaaaa

SEQ ID NO: 281808 - RNA, 19 nt, Homo sapiens
  misc_RNA (1)...(19): siRNA sense strand
gcaaaagugcaauuccaaa

SEQ ID NO: 281809 - RNA, 19 nt, Homo sapiens
  misc_RNA (1)...(19): siRNA sense strand
cuucaaggccaaugucuuc

SEQ ID NO: 281810 - RNA, 19 nt, Homo sapiens
  misc_RNA (1)...(19): siRNA sense strand
gugaugagagccuauuuac

SEQ ID NO: 281811 - RNA, 19 nt, Homo sapiens
  misc_RNA (1)...(19): siRNA sense strand
agugaugagagccuauuua

SEQ ID NO: 281812 - RNA, 19 nt, Homo sapiens
  misc_RNA (1)...(19): siRNA sense strand
ccaaaccugcaaacaaaca

SEQ ID NO: 281813 - RNA, 19 nt, Homo sapiens
  misc_RNA (1)...(19): siRNA sense strand
gaagcugauaggaccuuga

SEQ ID NO: 281814 - RNA, 19 nt, Homo sapiens
  misc_RNA (1)...(19): siRNA sense strand
aaggugagaaagaaaugua

SEQ ID NO: 281815 - RNA, 19 nt, Homo sapiens
  misc_RNA (1)...(19): siRNA sense strand
ccaaggugagaaagaaaug

SEQ ID NO: 281816 - RNA, 19 nt, Homo sapiens
  misc_RNA (1)...(19): siRNA sense strand
caaaagccaaggugagaaa

SEQ ID NO: 281817 - RNA, 19 nt, Homo sapiens
  misc_RNA (1)...(19): siRNA sense strand
ccuaucagaagucaauuca

SEQ ID NO: 281818 - RNA, 19 nt, Homo sapiens
  misc_RNA (1)...(19): siRNA sense strand
gccaaggugagaaagaaau

SEQ ID NO: 281819 - RNA, 19 nt, Homo sapiens
  misc_RNA (1)...(19): siRNA sense strand
ugguggacuugcuuuguga

SEQ ID NO: 281820 - RNA, 19 nt, Homo sapiens
  misc_RNA (1)...(19): siRNA sense strand
aaacaggaagaugaaguga

SEQ ID NO: 281821 - RNA, 19 nt, Homo sapiens
  misc_RNA (1)...(19): siRNA sense strand
aggccaaugucuucuucaa

SEQ ID NO: 281822 - RNA, 19 nt, Homo sapiens
  misc_RNA (1)...(19): siRNA sense strand
cagaagucaauucaaagga

SEQ ID NO: 281823 - RNA, 19 nt, Homo sapiens
  misc_RNA (1)...(19): siRNA sense strand
acgcugggaaucacuaauu

SEQ ID NO: 281824 - RNA, 19 nt, Homo sapiens
  misc_RNA (1)...(19): siRNA sense strand
aaauguauacgcugggaau

SEQ ID NO: 281825 - RNA, 19 nt, Homo sapiens
  misc_RNA (1)...(19): siRNA sense strand
aaugauaaacccagcaagu

SEQ ID NO: 281826 - RNA, 19 nt, Homo sapiens
  misc_RNA (1)...(19): siRNA sense strand
gagacaaaagauacagaua

SEQ ID NO: 281827 - RNA, 19 nt, Homo sapiens
  misc_RNA (1)...(19): siRNA sense strand
ccaaacucaucggaaacau

SEQ ID NO: 281828 - RNA, 19 nt, Homo sapiens
  misc_RNA (1)...(19): siRNA sense strand
gaaguaacauuugcagauu

SEQ ID NO: 281829 - RNA, 19 nt, Homo sapiens
  misc_RNA (1)...(19): siRNA sense strand
gcaucaagcuggcauguug

SEQ ID NO: 281830 - RNA, 19 nt, Homo sapiens
  misc_RNA (1)...(19): siRNA sense strand
guacgggaguuucuuggua

SEQ ID NO: 281831 - RNA, 19 nt, Homo sapiens
  misc_RNA (1)...(19): siRNA sense strand
ggagagaacagggcaguua

SEQ ID NO: 281832 - RNA, 19 nt, Homo sapiens
  misc_RNA (1)...(19): siRNA sense strand
gcugaugaguuauuaaaga

SEQ ID NO: 281833 - RNA, 19 nt, Homo sapiens
  misc_RNA (1)...(19): siRNA sense strand
ccauguauguugagucuaa

SEQ ID NO: 281834 - RNA, 19 nt, Homo sapiens
  misc_RNA (1)...(19): siRNA sense strand
aaacaaaccggaagcagua

SEQ ID NO: 281835 - RNA, 19 nt, Homo sapiens
  misc_RNA (1)...(19): siRNA sense strand
gaugagaccauguauguug

SEQ ID NO: 281836 - RNA, 19 nt, Homo sapiens
  misc_RNA (1)...(19): siRNA sense strand
gaacagggcaguuauccau

SEQ ID NO: 281837 - RNA, 19 nt, Homo sapiens
  misc_RNA (1)...(19): siRNA sense strand
acagggcaguuauccauua

SEQ ID NO: 281838 - RNA, 19 nt, Homo sapiens
  misc_RNA (1)...(19): siRNA sense strand
caaugucucuuugcuauau

SEQ ID NO: 281839 - RNA, 19 nt, Homo sapiens
  misc_RNA (1)...(19): siRNA sense strand
acauggugcugaugaguua

SEQ ID NO: 281840 - RNA, 19 nt, Homo sapiens
  misc_RNA (1)...(19): siRNA sense strand
ugacaacauuggcuacauu

SEQ ID NO: 281841 - RNA, 19 nt, Homo sapiens
  misc_RNA (1)...(19): siRNA sense strand
gggcaguuauccauuauag

SEQ ID NO: 281842 - RNA, 19 nt, Homo sapiens
  misc_RNA (1)...(19): siRNA sense strand
aaagugauggucaguauuu

SEQ ID NO: 281843 - RNA, 19 nt, Homo sapiens
  misc_RNA (1)...(19): siRNA sense strand
gcucuaaggccuauauuca

SEQ ID NO: 281844 - RNA, 19 nt, Homo sapiens
  misc_RNA (1)...(19): siRNA sense strand
uacaaugucucuuugcuau

SEQ ID NO: 281845 - RNA, 19 nt, Homo sapiens
  misc_RNA (1)...(19): siRNA sense strand
gacaacauuggcuacauua

SEQ ID NO: 281846 - RNA, 19 nt, Homo sapiens
  misc_RNA (1)...(19): siRNA sense strand
gaccauguauguugagucu

SEQ ID NO: 281847 - RNA, 19 nt, Homo sapiens
  misc_RNA (1)...(19): siRNA sense strand
ggacagagucacaguaguc

SEQ ID NO: 281848 - RNA, 19 nt, Homo sapiens
  misc_RNA (1)...(19): siRNA sense strand
gauggucaguauuucuuug

SEQ ID NO: 281849 - RNA, 19 nt, Homo sapiens
  misc_RNA (1)...(19): siRNA sense strand
gcaguagaaguaacauuug

SEQ ID NO: 281850 - RNA, 19 nt, Homo sapiens
  misc_RNA (1)...(19): siRNA sense strand
caaaagugauggucaguau

SEQ ID NO: 281851 - RNA, 19 nt, Homo sapiens
  misc_RNA (1)...(19): siRNA sense strand
gguccucuaucauauuuca

SEQ ID NO: 281852 - RNA, 19 nt, Homo sapiens
  misc_RNA (1)...(19): siRNA sense strand
caggauacaaugucucuuu

SEQ ID NO: 281853 - RNA, 19 nt, Homo sapiens
  misc_RNA (1)...(19): siRNA sense strand
ccaagaagagggcaaggaa

SEQ ID NO: 281854 - RNA, 19 nt, Homo sapiens
  misc_RNA (1)...(19): siRNA sense strand
gggaugaugagaccaugua

SEQ ID NO: 281855 - RNA, 19 nt, Homo sapiens
  misc_RNA (1)...(19): siRNA sense strand
ggaagcaguagaaguaaca

SEQ ID NO: 281856 - RNA, 19 nt, Homo sapiens
  misc_RNA (1)...(19): siRNA sense strand
gaaucaggauacaaugucu

SEQ ID NO: 281857 - RNA, 19 nt, Homo sapiens
  misc_RNA (1)...(19): siRNA sense strand
gaaauucuacaaggaacuu

SEQ ID NO: 281858 - RNA, 19 nt, Homo sapiens
  misc_RNA (1)...(19): siRNA sense strand
gaaauuguuuugccucugu

SEQ ID NO: 281859 - RNA, 19 nt, Homo sapiens
  misc_RNA (1)...(19): siRNA sense strand
gggacuaccugcacuacca

SEQ ID NO: 281860 - RNA, 19 nt, Homo sapiens
  misc_RNA (1)...(19): siRNA sense strand
uacgggaguuucuugguaa

SEQ ID NO: 281861 - RNA, 19 nt, Homo sapiens
  misc_RNA (1)...(19): siRNA sense strand
gauacaaugucucuuugcu

SEQ ID NO: 281862 - RNA, 19 nt, Homo sapiens
  misc_RNA (1)...(19): siRNA sense strand
gggaguuucuugguaaauc

SEQ ID NO: 281863 - RNA, 19 nt, Homo sapiens
  misc_RNA (1)...(19): siRNA sense strand
caagugcucuaaggccuau

SEQ ID NO: 281864 - RNA, 19 nt, Homo sapiens
  misc_RNA (1)...(19): siRNA sense strand
gagagaacagggcaguuau

SEQ ID NO: 281865 - RNA, 19 nt, Homo sapiens
  misc_RNA (1)...(19): siRNA sense strand
gugcugaugaguuauuaaa

SEQ ID NO: 281866 - RNA, 19 nt, Homo sapiens
  misc_RNA (1)...(19): siRNA sense strand
ucuaaggccuauauucaca

SEQ ID NO: 281867 - RNA, 19 nt, Homo sapiens
  misc_RNA (1)...(19): siRNA sense strand
agaaguaacauuugcagau

SEQ ID NO: 281868 - RNA, 19 nt, Homo sapiens
  misc_RNA (1)...(19): siRNA sense strand
cagggcaguuauccauuau

SEQ ID NO: 281869 - RNA, 19 nt, Homo sapiens
  misc_RNA (1)...(19): siRNA sense strand
gaggugaacaaccgcauca

SEQ ID NO: 281870 - RNA, 19 nt, Homo sapiens
  misc_RNA (1)...(19): siRNA sense strand
caaaccggaagcaguagaa

SEQ ID NO: 281871 - RNA, 19 nt, Homo sapiens
  misc_RNA (1)...(19): siRNA sense strand
aguaacauuugcagauuuc

SEQ ID NO: 281872 - RNA, 19 nt, Homo sapiens
  misc_RNA (1)...(19): siRNA sense strand
gaugggguccucuaucaua

SEQ ID NO: 281873 - RNA, 19 nt, Homo sapiens
  misc_RNA (1)...(19): siRNA sense strand
aggauacaaugucucuuug

SEQ ID NO: 281874 - RNA, 19 nt, Homo sapiens
  misc_RNA (1)...(19): siRNA sense strand
gaugaugagaccauguaug

SEQ ID NO: 281875 - RNA, 19 nt, Homo sapiens
  misc_RNA (1)...(19): siRNA sense strand
uaccugcacuaccacauca

SEQ ID NO: 281876 - RNA, 19 nt, Homo sapiens
  misc_RNA (1)...(19): siRNA sense strand
cagagucacaguagucuuc

SEQ ID NO: 281877 - RNA, 19 nt, Homo sapiens
  misc_RNA (1)...(19): siRNA sense strand
aaaggacagagucacagua

SEQ ID NO: 281878 - RNA, 19 nt, Homo sapiens
  misc_RNA (1)...(19): siRNA sense strand
agcaguagaaguaacauuu

SEQ ID NO: 281879 - RNA, 19 nt, Homo sapiens
  misc_RNA (1)...(19): siRNA sense strand
uguugaagcgaaauuguuu

SEQ ID NO: 281880 - RNA, 19 nt, Homo sapiens
  misc_RNA (1)...(19): siRNA sense strand
gggguccucuaucauauuu

SEQ ID NO: 281881 - RNA, 19 nt, Homo sapiens
  misc_RNA (1)...(19): siRNA sense strand
ggagacaaaacaaaaguga

SEQ ID NO: 281882 - RNA, 19 nt, Homo sapiens
  misc_RNA (1)...(19): siRNA sense strand
uaaggccuauauucacaca

SEQ ID NO: 281883 - RNA, 19 nt, Homo sapiens
  misc_RNA (1)...(19): siRNA sense strand
uuggaaagguguucaugca

SEQ ID NO: 281884 - RNA, 19 nt, Homo sapiens
  misc_RNA (1)...(19): siRNA sense strand
accggaagcaguagaagua

SEQ ID NO: 281885 - RNA, 19 nt, Homo sapiens
  misc_RNA (1)...(19): siRNA sense strand
cgucugacuuccucaaggu

SEQ ID NO: 281886 - RNA, 19 nt, Homo sapiens
  misc_RNA (1)...(19): siRNA sense strand
cacaucaagugcucuaagg

SEQ ID NO: 281887 - RNA, 19 nt, Homo sapiens
  misc_RNA (1)...(19): siRNA sense strand
ucaaccugauccacacguu

SEQ ID NO: 281888 - RNA, 19 nt, Homo sapiens
  misc_RNA (1)...(19): siRNA sense strand
acgauguggucauuggaaa

SEQ ID NO: 281889 - RNA, 19 nt, Homo sapiens
  misc_RNA (1)...(19): siRNA sense strand
ggaguuucuugguaaaucc

SEQ ID NO: 281890 - RNA, 19 nt, Homo sapiens
  misc_RNA (1)...(19): siRNA sense strand
cugaugaguuauuaaagag

SEQ ID NO: 281891 - RNA, 19 nt, Homo sapiens
  misc_RNA (1)...(19): siRNA sense strand
caguagaaguaacauuugc

SEQ ID NO: 281892 - RNA, 19 nt, Homo sapiens
  misc_RNA (1)...(19): siRNA sense strand
gacgauguggucauuggaa

SEQ ID NO: 281893 - RNA, 19 nt, Homo sapiens
  misc_RNA (1)...(19): siRNA sense strand
ggugaacaaccgcaucauc

SEQ ID NO: 281894 - RNA, 19 nt, Homo sapiens
  misc_RNA (1)...(19): siRNA sense strand
gcaaggaaggagagaacag

SEQ ID NO: 281895 - RNA, 19 nt, Homo sapiens
  misc_RNA (1)...(19): siRNA sense strand
gcauguugaagcgaaauug

SEQ ID NO: 281896 - RNA, 19 nt, Homo sapiens
  misc_RNA (1)...(19): siRNA sense strand
gugauggucaguauuucuu

SEQ ID NO: 281897 - RNA, 19 nt, Homo sapiens
  misc_RNA (1)...(19): siRNA sense strand
augaugagaccauguaugu

SEQ ID NO: 281898 - RNA, 19 nt, Homo sapiens
  misc_RNA (1)...(19): siRNA sense strand
aggagacgcucgcgcucaa

SEQ ID NO: 281899 - RNA, 19 nt, Homo sapiens
  misc_RNA (1)...(19): siRNA sense strand
uggugcugaugaguuauua

SEQ ID NO: 281900 - RNA, 19 nt, Homo sapiens
  misc_RNA (1)...(19): siRNA sense strand
gcucgagacaacaccauca

SEQ ID NO: 281901 - RNA, 19 nt, Homo sapiens
  misc_RNA (1)...(19): siRNA sense strand
cgcugugggugacaacauu

SEQ ID NO: 281902 - RNA, 19 nt, Homo sapiens
  misc_RNA (1)...(19): siRNA sense strand
ucaugcaggaguucaaaga

SEQ ID NO: 281903 - RNA, 19 nt, Homo sapiens
  misc_RNA (1)...(19): siRNA sense strand
acaaugucucuuugcuaua

SEQ ID NO: 281904 - RNA, 19 nt, Homo sapiens
  misc_RNA (1)...(19): siRNA sense strand
auacaaugucucuuugcua

SEQ ID NO: 281905 - RNA, 19 nt, Homo sapiens
  misc_RNA (1)...(19): siRNA sense strand
gguguacgggaguuucuug

SEQ ID NO: 281906 - RNA, 19 nt, Homo sapiens
  misc_RNA (1)...(19): siRNA sense strand
cauguauguugagucuaaa

SEQ ID NO: 281907 - RNA, 19 nt, Homo sapiens
  misc_RNA (1)...(19): siRNA sense strand
augagaccauguauguuga

SEQ ID NO: 281908 - RNA, 19 nt, Homo sapiens
  misc_RNA (1)...(19): siRNA sense strand
uuugcuauaugaccuugaa

SEQ ID NO: 281909 - RNA, 19 nt, Homo sapiens
  misc_RNA (1)...(19): siRNA sense strand
auacuuccaauuccaagaa

SEQ ID NO: 281910 - RNA, 19 nt, Homo sapiens
  misc_RNA (1)...(19): siRNA sense strand
ccacaucaagugcucuaag

SEQ ID NO: 281911 - RNA, 19 nt, Homo sapiens
  misc_RNA (1)...(19): siRNA sense strand
caacauuggcuacauuacc

SEQ ID NO: 281912 - RNA, 19 nt, Homo sapiens
  misc_RNA (1)...(19): siRNA sense strand
gugacaacauuggcuacau

SEQ ID NO: 281913 - RNA, 19 nt, Homo sapiens
  misc_RNA (1)...(19): siRNA sense strand
caugcaggaguucaaagaa

SEQ ID NO: 281914 - RNA, 19 nt, Homo sapiens
  misc_RNA (1)...(19): siRNA sense strand
gagaccauguauguugagu

SEQ ID NO: 281915 - RNA, 19 nt, Homo sapiens
  misc_RNA (1)...(19): siRNA sense strand
cuuugaaauucuacaagga

SEQ ID NO: 281916 - RNA, 19 nt, Homo sapiens
  misc_RNA (1)...(19): siRNA sense strand
ugaacaaccgcaucaucga

SEQ ID NO: 281917 - RNA, 19 nt, Homo sapiens
  misc_RNA (1)...(19): siRNA sense strand
uaacauuugcagauuucga

SEQ ID NO: 281918 - RNA, 19 nt, Homo sapiens
  misc_RNA (1)...(19): siRNA sense strand
gaaguaacauuugcagauu

SEQ ID NO: 281919 - RNA, 19 nt, Homo sapiens
  misc_RNA (1)...(19): siRNA sense strand
gcaucaagcuggcauguug

SEQ ID NO: 281920 - RNA, 19 nt, Homo sapiens
  misc_RNA (1)...(19): siRNA sense strand
guacgggaguuucuuggua

SEQ ID NO: 281921 - RNA, 19 nt, Homo sapiens
  misc_RNA (1)...(19): siRNA sense strand
ggagagaacagggcaguua

SEQ ID NO: 281922 - RNA, 19 nt, Homo sapiens
  misc_RNA (1)...(19): siRNA sense strand
gcugaugaguuauuaaaga

SEQ ID NO: 281923 - RNA, 19 nt, Homo sapiens
  misc_RNA (1)...(19): siRNA sense strand
ccauguauguugagucuaa

SEQ ID NO: 281924 - RNA, 19 nt, Homo sapiens
  misc_RNA (1)...(19): siRNA sense strand
aaacaaaccggaagcagua

SEQ ID NO: 281925 - RNA, 19 nt, Homo sapiens
  misc_RNA (1)...(19): siRNA sense strand
gaugagaccauguauguug

SEQ ID NO: 281926 - RNA, 19 nt, Homo sapiens
  misc_RNA (1)...(19): siRNA sense strand
gaacagggcaguuauccau

SEQ ID NO: 281927 - RNA, 19 nt, Homo sapiens
  misc_RNA (1)...(19): siRNA sense strand
acagggcaguuauccauua

SEQ ID NO: 281928 - RNA, 19 nt, Homo sapiens
  misc_RNA (1)...(19): siRNA sense strand
caaugucucuuugcuauau

SEQ ID NO: 281929 - RNA, 19 nt, Homo sapiens
  misc_RNA (1)...(19): siRNA sense strand
acauggugcugaugaguua

SEQ ID NO: 281930 - RNA, 19 nt, Homo sapiens
  misc_RNA (1)...(19): siRNA sense strand
ugacaacauuggcuacauu

SEQ ID NO: 281931 - RNA, 19 nt, Homo sapiens
  misc_RNA (1)...(19): siRNA sense strand
gggcaguuauccauuauag

SEQ ID NO: 281932 - RNA, 19 nt, Homo sapiens
  misc_RNA (1)...(19): siRNA sense strand
aaagugauggucaguauuu

SEQ ID NO: 281933 - RNA, 19 nt, Homo sapiens
  misc_RNA (1)...(19): siRNA sense strand
gcucuaaggccuauauuca

SEQ ID NO: 281934 - RNA, 19 nt, Homo sapiens
  misc_RNA (1)...(19): siRNA sense strand
uacaaugucucuuugcuau

SEQ ID NO: 281935 - RNA, 19 nt, Homo sapiens
  misc_RNA (1)...(19): siRNA sense strand
gacaacauuggcuacauua

SEQ ID NO: 281936 - RNA, 19 nt, Homo sapiens
  misc_RNA (1)...(19): siRNA sense strand
gaccauguauguugagucu

SEQ ID NO: 281937 - RNA, 19 nt, Homo sapiens
  misc_RNA (1)...(19): siRNA sense strand
ggacagagucacaguaguc

SEQ ID NO: 281938 - RNA, 19 nt, Homo sapiens
  misc_RNA (1)...(19): siRNA sense strand
gauggucaguauuucuuug

SEQ ID NO: 281939 - RNA, 19 nt, Homo sapiens
  misc_RNA (1)...(19): siRNA sense strand
gcaguagaaguaacauuug

SEQ ID NO: 281940 - RNA, 19 nt, Homo sapiens
  misc_RNA (1)...(19): siRNA sense strand
caaaagugauggucaguau

SEQ ID NO: 281941 - RNA, 19 nt, Homo sapiens
  misc_RNA (1)...(19): siRNA sense strand
gguccucuaucauauuuca

SEQ ID NO: 281942 - RNA, 19 nt, Homo sapiens
  misc_RNA (1)...(19): siRNA sense strand
caggauacaaugucucuuu

SEQ ID NO: 281943 - RNA, 19 nt, Homo sapiens
  misc_RNA (1)...(19): siRNA sense strand
ccaagaagagggcaaggaa

SEQ ID NO: 281944 - RNA, 19 nt, Homo sapiens
  misc_RNA (1)...(19): siRNA sense strand
gggaugaugagaccaugua

SEQ ID NO: 281945 - RNA, 19 nt, Homo sapiens
  misc_RNA (1)...(19): siRNA sense strand
ggaagcaguagaaguaaca

SEQ ID NO: 281946 - RNA, 19 nt, Homo sapiens
  misc_RNA (1)...(19): siRNA sense strand
gaaucaggauacaaugucu

SEQ ID NO: 281947 - RNA, 19 nt, Homo sapiens
  misc_RNA (1)...(19): siRNA sense strand
gaaauucuacaaggaacuu

SEQ ID NO: 281948 - RNA, 19 nt, Homo sapiens
  misc_RNA (1)...(19): siRNA sense strand
gaaauuguuuugccucugu

SEQ ID NO: 281949 - RNA, 19 nt, Homo sapiens
  misc_RNA (1)...(19): siRNA sense strand
gggacuaccugcacuacca

SEQ ID NO: 281950 - RNA, 19 nt, Homo sapiens
  misc_RNA (1)...(19): siRNA sense strand
uacgggaguuucuugguaa

SEQ ID NO: 281951 - RNA, 19 nt, Homo sapiens
  misc_RNA (1)...(19): siRNA sense strand
gauacaaugucucuuugcu

SEQ ID NO: 281952 - RNA, 19 nt, Homo sapiens
  misc_RNA (1)...(19): siRNA sense strand
gggaguuucuugguaaauc

SEQ ID NO: 281953 - RNA, 19 nt, Homo sapiens
  misc_RNA (1)...(19): siRNA sense strand
caagugcucuaaggccuau

SEQ ID NO: 281954 - RNA, 19 nt, Homo sapiens
  misc_RNA (1)...(19): siRNA sense strand
gagagaacagggcaguuau

SEQ ID NO: 281955 - RNA, 19 nt, Homo sapiens
  misc_RNA (1)...(19): siRNA sense strand
gugcugaugaguuauuaaa

SEQ ID NO: 281956 - RNA, 19 nt, Homo sapiens
  misc_RNA (1)...(19): siRNA sense strand
ucuaaggccuauauucaca

SEQ ID NO: 281957 - RNA, 19 nt, Homo sapiens
  misc_RNA (1)...(19): siRNA sense strand
agaaguaacauuugcagau

SEQ ID NO: 281958 - RNA, 19 nt, Homo sapiens
  misc_RNA (1)...(19): siRNA sense strand
cagggcaguuauccauuau

SEQ ID NO: 281959 - RNA, 19 nt, Homo sapiens
  misc_RNA (1)...(19): siRNA sense strand
gaggugaacaaccgcauca

SEQ ID NO: 281960 - RNA, 19 nt, Homo sapiens
  misc_RNA (1)...(19): siRNA sense strand
caaaccggaagcaguagaa

SEQ ID NO: 281961 - RNA, 19 nt, Homo sapiens
  misc_RNA (1)...(19): siRNA sense strand
aguaacauuugcagauuuc

SEQ ID NO: 281962 - RNA, 19 nt, Homo sapiens
  misc_RNA (1)...(19): siRNA sense strand
gaugggguccucuaucaua

SEQ ID NO: 281963 - RNA, 19 nt, Homo sapiens
  misc_RNA (1)...(19): siRNA sense strand
aggauacaaugucucuuug

SEQ ID NO: 281964 - RNA, 19 nt, Homo sapiens
  misc_RNA (1)...(19): siRNA sense strand
gaugaugagaccauguaug

SEQ ID NO: 281965 - RNA, 19 nt, Homo sapiens
  misc_RNA (1)...(19): siRNA sense strand
uaccugcacuaccacauca

SEQ ID NO: 281966 - RNA, 19 nt, Homo sapiens
  misc_RNA (1)...(19): siRNA sense strand
cagagucacaguagucuuc

SEQ ID NO: 281967 - RNA, 19 nt, Homo sapiens
  misc_RNA (1)...(19): siRNA sense strand
aaaggacagagucacagua

SEQ ID NO: 281968 - RNA, 19 nt, Homo sapiens
  misc_RNA (1)...(19): siRNA sense strand
agcaguagaaguaacauuu

SEQ ID NO: 281969 - RNA, 19 nt, Homo sapiens
  misc_RNA (1)...(19): siRNA sense strand
uguugaagcgaaauuguuu

SEQ ID NO: 281970 - RNA, 19 nt, Homo sapiens
  misc_RNA (1)...(19): siRNA sense strand
gggguccucuaucauauuu

SEQ ID NO: 281971 - RNA, 19 nt, Homo sapiens
  misc_RNA (1)...(19): siRNA sense strand
ggagacaaaacaaaaguga

SEQ ID NO: 281972 - RNA, 19 nt, Homo sapiens
  misc_RNA (1)...(19): siRNA sense strand
uaaggccuauauucacaca

SEQ ID NO: 281973 - RNA, 19 nt, Homo sapiens
  misc_RNA (1)...(19): siRNA sense strand
uuggaaagguguucaugca

SEQ ID NO: 281974 - RNA, 19 nt, Homo sapiens
  misc_RNA (1)...(19): siRNA sense strand
accggaagcaguagaagua

SEQ ID NO: 281975 - RNA, 19 nt, Homo sapiens
  misc_RNA (1)...(19): siRNA sense strand
cgucugacuuccucaaggu

SEQ ID NO: 281976 - RNA, 19 nt, Homo sapiens
  misc_RNA (1)...(19): siRNA sense strand
cacaucaagugcucuaagg

SEQ ID NO: 281977 - RNA, 19 nt, Homo sapiens
  misc_RNA (1)...(19): siRNA sense strand
ucaaccugauccacacguu

SEQ ID NO: 281978 - RNA, 19 nt, Homo sapiens
  misc_RNA (1)...(19): siRNA sense strand
acgauguggucauuggaaa

SEQ ID NO: 281979 - RNA, 19 nt, Homo sapiens
  misc_RNA (1)...(19): siRNA sense strand
ggaguuucuugguaaaucc

SEQ ID NO: 281980 - RNA, 19 nt, Homo sapiens
  misc_RNA (1)...(19): siRNA sense strand
cugaugaguuauuaaagag

SEQ ID NO: 281981 - RNA, 19 nt, Homo sapiens
  misc_RNA (1)...(19): siRNA sense strand
caguagaaguaacauuugc

SEQ ID NO: 281982 - RNA, 19 nt, Homo sapiens
  misc_RNA (1)...(19): siRNA sense strand
gacgauguggucauuggaa

SEQ ID NO: 281983 - RNA, 19 nt, Homo sapiens
  misc_RNA (1)...(19): siRNA sense strand
ggugaacaaccgcaucauc

SEQ ID NO: 281984 - RNA, 19 nt, Homo sapiens
  misc_RNA (1)...(19): siRNA sense strand
gcaaggaaggagagaacag

SEQ ID NO: 281985 - RNA, 19 nt, Homo sapiens
  misc_RNA (1)...(19): siRNA sense strand
gcauguugaagcgaaauug

SEQ ID NO: 281986 - RNA, 19 nt, Homo sapiens
  misc_RNA (1)...(19): siRNA sense strand
gugauggucaguauuucuu

SEQ ID NO: 281987 - RNA, 19 nt, Homo sapiens
  misc_RNA (1)...(19): siRNA sense strand
augaugagaccauguaugu

SEQ ID NO: 281988 - RNA, 19 nt, Homo sapiens
  misc_RNA (1)...(19): siRNA sense strand
aggagacgcucgcgcucaa

SEQ ID NO: 281989 - RNA, 19 nt, Homo sapiens
  misc_RNA (1)...(19): siRNA sense strand
uggugcugaugaguuauua

SEQ ID NO: 281990 - RNA, 19 nt, Homo sapiens
  misc_RNA (1)...(19): siRNA sense strand
gcucgagacaacaccauca

SEQ ID NO: 281991 - RNA, 19 nt, Homo sapiens
  misc_RNA (1)...(19): siRNA sense strand
cgcugugggugacaacauu

SEQ ID NO: 281992 - RNA, 19 nt, Homo sapiens
  misc_RNA (1)...(19): siRNA sense strand
ucaugcaggaguucaaaga

SEQ ID NO: 281993 - RNA, 19 nt, Homo sapiens
  misc_RNA (1)...(19): siRNA sense strand
acaaugucucuuugcuaua

SEQ ID NO: 281994 - RNA, 19 nt, Homo sapiens
  misc_RNA (1)...(19): siRNA sense strand
auacaaugucucuuugcua

SEQ ID NO: 281995 - RNA, 19 nt, Homo sapiens
  misc_RNA (1)...(19): siRNA sense strand
gguguacgggaguuucuug

SEQ ID NO: 281996 - RNA, 19 nt, Homo sapiens
  misc_RNA (1)...(19): siRNA sense strand
cauguauguugagucuaaa

SEQ ID NO: 281997 - RNA, 19 nt, Homo sapiens
  misc_RNA (1)...(19): siRNA sense strand
augagaccauguauguuga

SEQ ID NO: 281998 - RNA, 19 nt, Homo sapiens
  misc_RNA (1)...(19): siRNA sense strand
uuugcuauaugaccuugaa

SEQ ID NO: 281999 - RNA, 19 nt, Homo sapiens
  misc_RNA (1)...(19): siRNA sense strand
auacuuccaauuccaagaa

SEQ ID NO: 282000 - RNA, 19 nt, Homo sapiens
  misc_RNA (1)...(19): siRNA sense strand
ccacaucaagugcucuaag

SEQ ID NO: 282001 - RNA, 19 nt, Homo sapiens
  misc_RNA (1)...(19): siRNA sense strand
caacauuggcuacauuacc

SEQ ID NO: 282002 - RNA, 19 nt, Homo sapiens
  misc_RNA (1)...(19): siRNA sense strand
gugacaacauuggcuacau

SEQ ID NO: 282003 - RNA, 19 nt, Homo sapiens
  misc_RNA (1)...(19): siRNA sense strand
caugcaggaguucaaagaa

SEQ ID NO: 282004 - RNA, 19 nt, Homo sapiens
  misc_RNA (1)...(19): siRNA sense strand
gagaccauguauguugagu

SEQ ID NO: 282005 - RNA, 19 nt, Homo sapiens
  misc_RNA (1)...(19): siRNA sense strand
cuuugaaauucuacaagga

SEQ ID NO: 282006 - RNA, 19 nt, Homo sapiens
  misc_RNA (1)...(19): siRNA sense strand
ugaacaaccgcaucaucga

SEQ ID NO: 282007 - RNA, 19 nt, Homo sapiens
  misc_RNA (1)...(19): siRNA sense strand
uaacauuugcagauuucga

SEQ ID NO: 282008 - RNA, 19 nt, Homo sapiens
  misc_RNA (1)...(19): siRNA sense strand
gagaaugacugguggguuu

SEQ ID NO: 282009 - RNA, 19 nt, Homo sapiens
  misc_RNA (1)...(19): siRNA sense strand
gagaguaaccguauuguga

SEQ ID NO: 282010 - RNA, 19 nt, Homo sapiens
  misc_RNA (1)...(19): siRNA sense strand
ugaaggaccucaagaucaa

SEQ ID NO: 282011 - RNA, 19 nt, Homo sapiens
  misc_RNA (1)...(19): siRNA sense strand
uagacucgcugcacaagaa

SEQ ID NO: 282012 - RNA, 19 nt, Homo sapiens
  misc_RNA (1)...(19): siRNA sense strand
aaagagcggugccaaaugg

SEQ ID NO: 282013 - RNA, 19 nt, Homo sapiens
  misc_RNA (1)...(19): siRNA sense strand
guacauggcgucuguuucu

SEQ ID NO: 282014 - RNA, 19 nt, Homo sapiens
  misc_RNA (1)...(19): siRNA sense strand
gaacagcgucagccagauc

SEQ ID NO: 282015 - RNA, 19 nt, Homo sapiens
  misc_RNA (1)...(19): siRNA sense strand
cgugugaucuccaucuguu

SEQ ID NO: 282016 - RNA, 19 nt, Homo sapiens
  misc_RNA (1)...(19): siRNA sense strand
gaaaagagcggugccaaau

SEQ ID NO: 282017 - RNA, 19 nt, Homo sapiens
  misc_RNA (1)...(19): siRNA sense strand
caacaaccaugaggugcau

SEQ ID NO: 282018 - RNA, 19 nt, Homo sapiens
  misc_RNA (1)...(19): siRNA sense strand
ggaccucaagaucaaauga

SEQ ID NO: 282019 - RNA, 19 nt, Homo sapiens
  misc_RNA (1)...(19): siRNA sense strand
ucgcgacucuggccucuga

SEQ ID NO: 282020 - RNA, 19 nt, Homo sapiens
  misc_RNA (1)...(19): siRNA sense strand
cagcggcucucgugugauc

SEQ ID NO: 282021 - RNA, 19 nt, Homo sapiens
  misc_RNA (1)...(19): siRNA sense strand
accaugaggugcauaucua

SEQ ID NO: 282022 - RNA, 19 nt, Homo sapiens
  misc_RNA (1)...(19): siRNA sense strand
cuucaagugucggaucuuu

SEQ ID NO: 282023 - RNA, 19 nt, Homo sapiens
  misc_RNA (1)...(19): siRNA sense strand
gcaugaguaucugggaugu

SEQ ID NO: 282024 - RNA, 19 nt, Homo sapiens
  misc_RNA (1)...(19): siRNA sense strand
ugaucuccaucuguuauuu

SEQ ID NO: 282025 - RNA, 19 nt, Homo sapiens
  misc_RNA (1)...(19): siRNA sense strand
gccaagugcucgcaguucu

SEQ ID NO: 282026 - RNA, 19 nt, Homo sapiens
  misc_RNA (1)...(19): siRNA sense strand
augaguaucugggauguga

SEQ ID NO: 282027 - RNA, 19 nt, Homo sapiens
  misc_RNA (1)...(19): siRNA sense strand
gaaggaccucaagaucaaa

SEQ ID NO: 282028 - RNA, 19 nt, Homo sapiens
  misc_RNA (1)...(19): siRNA sense strand
gaucuccaucuguuauuuc

SEQ ID NO: 282029 - RNA, 19 nt, Homo sapiens
  misc_RNA (1)...(19): siRNA sense strand
ucuggccucugaaacacua

SEQ ID NO: 282030 - RNA, 19 nt, Homo sapiens
  misc_RNA (1)...(19): siRNA sense strand
caaggaccgcacccagauu

SEQ ID NO: 282031 - RNA, 19 nt, Homo sapiens
  misc_RNA (1)...(19): siRNA sense strand
ggguacauggcgucuguuu

SEQ ID NO: 282032 - RNA, 19 nt, Homo sapiens
  misc_RNA (1)...(19): siRNA sense strand
ucugggaugugaagagcuu

SEQ ID NO: 282033 - RNA, 19 nt, Homo sapiens
  misc_RNA (1)...(19): siRNA sense strand
gauggcggcaugaguaucu

SEQ ID NO: 282034 - RNA, 19 nt, Homo sapiens
  misc_RNA (1)...(19): siRNA sense strand
uggcugaugccgacaagaa

SEQ ID NO: 282035 - RNA, 19 nt, Homo sapiens
  misc_RNA (1)...(19): siRNA sense strand
gcugaugccgacaagaaga

SEQ ID NO: 282036 - RNA, 19 nt, Homo sapiens
  misc_RNA (1)...(19): siRNA sense strand
ugaccuucaucacagacaa

SEQ ID NO: 282037 - RNA, 19 nt, Homo sapiens
  misc_RNA (1)...(19): siRNA sense strand
gcucucgugugaucuccau

SEQ ID NO: 282038 - RNA, 19 nt, Homo sapiens
  misc_RNA (1)...(19): siRNA sense strand
acaaggaccgcacccagau

SEQ ID NO: 282039 - RNA, 19 nt, Homo sapiens
  misc_RNA (1)...(19): siRNA sense strand
ggcuggacguuccuaagca

SEQ ID NO: 282040 - RNA, 19 nt, Homo sapiens
  misc_RNA (1)...(19): siRNA sense strand
ccaacgagaacaaguuugc

SEQ ID NO: 282041 - RNA, 19 nt, Homo sapiens
  misc_RNA (1)...(19): siRNA sense strand
cugcaccacuggcauggau

SEQ ID NO: 282042 - RNA, 19 nt, Homo sapiens
  misc_RNA (1)...(19): siRNA sense strand
cuggguacauggcgucugu

SEQ ID NO: 282043 - RNA, 19 nt, Homo sapiens
  misc_RNA (1)...(19): siRNA sense strand
caucaaggagguggaggaa

SEQ ID NO: 282044 - RNA, 19 nt, Homo sapiens
  misc_RNA (1)...(19): siRNA sense strand
gaaacuacaugauaugauc

SEQ ID NO: 282045 - RNA, 19 nt, Homo sapiens
  misc_RNA (1)...(19): siRNA sense strand
ggaaggacuugagaaacua

SEQ ID NO: 282046 - RNA, 19 nt, Homo sapiens
  misc_RNA (1)...(19): siRNA sense strand
ccaaaggauuuaacacuga

SEQ ID NO: 282047 - RNA, 19 nt, Homo sapiens
  misc_RNA (1)...(19): siRNA sense strand
ggacugugcuggaaagaca

SEQ ID NO: 282048 - RNA, 19 nt, Homo sapiens
  misc_RNA (1)...(19): siRNA sense strand
gcacagauggcauuguauu

SEQ ID NO: 282049 - RNA, 19 nt, Homo sapiens
  misc_RNA (1)...(19): siRNA sense strand
guaaauaccguaccuacca

SEQ ID NO: 282050 - RNA, 19 nt, Homo sapiens
  misc_RNA (1)...(19): siRNA sense strand
ggacucuguugaugucgaa

SEQ ID NO: 282051 - RNA, 19 nt, Homo sapiens
  misc_RNA (1)...(19): siRNA sense strand
gagaaacuacaugauauga

SEQ ID NO: 282052 - RNA, 19 nt, Homo sapiens
  misc_RNA (1)...(19): siRNA sense strand
uguccaaccugccuucauu

SEQ ID NO: 282053 - RNA, 19 nt, Homo sapiens
  misc_RNA (1)...(19): siRNA sense strand
cagauggcauuguauuugu

SEQ ID NO: 282054 - RNA, 19 nt, Homo sapiens
  misc_RNA (1)...(19): siRNA sense strand
guaccuaccaaaggauuua

SEQ ID NO: 282055 - RNA, 19 nt, Homo sapiens
  misc_RNA (1)...(19): siRNA sense strand
uaaauaccguaccuaccaa

SEQ ID NO: 282056 - RNA, 19 nt, Homo sapiens
  misc_RNA (1)...(19): siRNA sense strand
aaaggaaggacuugagaaa

SEQ ID NO: 282057 - RNA, 19 nt, Homo sapiens
  misc_RNA (1)...(19): siRNA sense strand
gaacucauugucacuuuca

SEQ ID NO: 282058 - RNA, 19 nt, Homo sapiens
  misc_RNA (1)...(19): siRNA sense strand
uauacaggcugcaguucaa

SEQ ID NO: 282059 - RNA, 19 nt, Homo sapiens
  misc_RNA (1)...(19): siRNA sense strand
cuugagaaacuacaugaua

SEQ ID NO: 282060 - RNA, 19 nt, Homo sapiens
  misc_RNA (1)...(19): siRNA sense strand
caaccugccuucauuucag

SEQ ID NO: 282061 - RNA, 19 nt, Homo sapiens
  misc_RNA (1)...(19): siRNA sense strand
uauaccagaugcacagaug

SEQ ID NO: 282062 - RNA, 19 nt, Homo sapiens
  misc_RNA (1)...(19): siRNA sense strand
uaccguaccuaccaaagga

SEQ ID NO: 282063 - RNA, 19 nt, Homo sapiens
  misc_RNA (1)...(19): siRNA sense strand
agacuucuauccuguccaa

SEQ ID NO: 282064 - RNA, 19 nt, Homo sapiens
  misc_RNA (1)...(19): siRNA sense strand
gccuaccugugcaaucaua

SEQ ID NO: 282065 - RNA, 19 nt, Homo sapiens
  misc_RNA (1)...(19): siRNA sense strand
ggaagaagccaaaacugaa

SEQ ID NO: 282066 - RNA, 19 nt, Homo sapiens
  misc_RNA (1)...(19): siRNA sense strand
ugucagaccagacuucuau

SEQ ID NO: 282067 - RNA, 19 nt, Homo sapiens
  misc_RNA (1)...(19): siRNA sense strand
ggaagucauauaccagaug

SEQ ID NO: 282068 - RNA, 19 nt, Homo sapiens
  misc_RNA (1)...(19): siRNA sense strand
uaaaggaaggacuugagaa

SEQ ID NO: 282069 - RNA, 19 nt, Homo sapiens
  misc_RNA (1)...(19): siRNA sense strand
guacuuauaguugcuaaca

SEQ ID NO: 282070 - RNA, 19 nt, Homo sapiens
  misc_RNA (1)...(19): siRNA sense strand
ggacuugagaaacuacaug

SEQ ID NO: 282071 - RNA, 19 nt, Homo sapiens
  misc_RNA (1)...(19): siRNA sense strand
aggaaggacuugagaaacu

SEQ ID NO: 282072 - RNA, 19 nt, Homo sapiens
  misc_RNA (1)...(19): siRNA sense strand
acagauggcauuguauuug

SEQ ID NO: 282073 - RNA, 19 nt, Homo sapiens
  misc_RNA (1)...(19): siRNA sense strand
guuguggacucuguugaug

SEQ ID NO: 282074 - RNA, 19 nt, Homo sapiens
  misc_RNA (1)...(19): siRNA sense strand
ugccuucauuucagucuuu

SEQ ID NO: 282075 - RNA, 19 nt, Homo sapiens
  misc_RNA (1)...(19): siRNA sense strand
uaaccuugggaaauucuaa

SEQ ID NO: 282076 - RNA, 19 nt, Homo sapiens
  misc_RNA (1)...(19): siRNA sense strand
ugagaaacuacaugauaug

SEQ ID NO: 282077 - RNA, 19 nt, Homo sapiens
  misc_RNA (1)...(19): siRNA sense strand
cuaaaggaaggacuugaga

SEQ ID NO: 282078 - RNA, 19 nt, Homo sapiens
  misc_RNA (1)...(19): siRNA sense strand
gauggcauuguauuuguug

SEQ ID NO: 282079 - RNA, 19 nt, Homo sapiens
  misc_RNA (1)...(19): siRNA sense strand
uagguggucaggagaaauu

SEQ ID NO: 282080 - RNA, 19 nt, Homo sapiens
  misc_RNA (1)...(19): siRNA sense strand
cacagauggcauuguauuu

SEQ ID NO: 282081 - RNA, 19 nt, Homo sapiens
  misc_RNA (1)...(19): siRNA sense strand
gagaaauuaaggccacugu

SEQ ID NO: 282082 - RNA, 19 nt, Homo sapiens
  misc_RNA (1)...(19): siRNA sense strand
gacuugagaaacuacauga

SEQ ID NO: 282083 - RNA, 19 nt, Homo sapiens
  misc_RNA (1)...(19): siRNA sense strand
gguggucaggagaaauuaa

SEQ ID NO: 282084 - RNA, 19 nt, Homo sapiens
  misc_RNA (1)...(19): siRNA sense strand
agauggcauuguauuuguu

SEQ ID NO: 282085 - RNA, 19 nt, Homo sapiens
  misc_RNA (1)...(19): siRNA sense strand
ccaaccugccuucauuuca

SEQ ID NO: 282086 - RNA, 19 nt, Homo sapiens
  misc_RNA (1)...(19): siRNA sense strand
uguagguggucaggagaaa

SEQ ID NO: 282087 - RNA, 19 nt, Homo sapiens
  misc_RNA (1)...(19): siRNA sense strand
uguggacucuguugauguc

SEQ ID NO: 282088 - RNA, 19 nt, Homo sapiens
  misc_RNA (1)...(19): siRNA sense strand
uuucagucuuuccacauug

SEQ ID NO: 282089 - RNA, 19 nt, Homo sapiens
  misc_RNA (1)...(19): siRNA sense strand
ugggugaacugagcucauc

SEQ ID NO: 282090 - RNA, 19 nt, Homo sapiens
  misc_RNA (1)...(19): siRNA sense strand
ggagucccuguacuuauag

SEQ ID NO: 282091 - RNA, 19 nt, Homo sapiens
  misc_RNA (1)...(19): siRNA sense strand
gaaauuggaucaagaaugg

SEQ ID NO: 282092 - RNA, 19 nt, Homo sapiens
  misc_RNA (1)...(19): siRNA sense strand
ggaauuauuugaaggauug

SEQ ID NO: 282093 - RNA, 19 nt, Homo sapiens
  misc_RNA (1)...(19): siRNA sense strand
ggagaaaccucauaucaag

SEQ ID NO: 282094 - RNA, 19 nt, Homo sapiens
  misc_RNA (1)...(19): siRNA sense strand
guacaaaggcgagacaaua

SEQ ID NO: 282095 - RNA, 19 nt, Homo sapiens
  misc_RNA (1)...(19): siRNA sense strand
gaaggcauuucgaggagua

SEQ ID NO: 282096 - RNA, 19 nt, Homo sapiens
  misc_RNA (1)...(19): siRNA sense strand
gagagcgacuggacaauug

SEQ ID NO: 282097 - RNA, 19 nt, Homo sapiens
  misc_RNA (1)...(19): siRNA sense strand
aaaugaagauggagaagaa

SEQ ID NO: 282098 - RNA, 19 nt, Homo sapiens
  misc_RNA (1)...(19): siRNA sense strand
caauacacauuccaacuau

SEQ ID NO: 282099 - RNA, 19 nt, Homo sapiens
  misc_RNA (1)...(19): siRNA sense strand
ggagugguccucagaguuu

SEQ ID NO: 282100 - RNA, 19 nt, Homo sapiens
  misc_RNA (1)...(19): siRNA sense strand
gaagagagcgacuggacaa

SEQ ID NO: 282101 - RNA, 19 nt, Homo sapiens
  misc_RNA (1)...(19): siRNA sense strand
gaacagagugagagagaug

SEQ ID NO: 282102 - RNA, 19 nt, Homo sapiens
  misc_RNA (1)...(19): siRNA sense strand
gcaguggaauuauuugaag

SEQ ID NO: 282103 - RNA, 19 nt, Homo sapiens
  misc_RNA (1)...(19): siRNA sense strand
gcuaaagaccuaauaguca

SEQ ID NO: 282104 - RNA, 19 nt, Homo sapiens
  misc_RNA (1)...(19): siRNA sense strand
agagauaccucaccaugga

SEQ ID NO: 282105 - RNA, 19 nt, Homo sapiens
  misc_RNA (1)...(19): siRNA sense strand
aauuacggcucaucucuuu

SEQ ID NO: 282106 - RNA, 19 nt, Homo sapiens
  misc_RNA (1)...(19): siRNA sense strand
gggagaaaccucauaucaa

SEQ ID NO: 282107 - RNA, 19 nt, Homo sapiens
  misc_RNA (1)...(19): siRNA sense strand
gaauuuaaggugucagaga

SEQ ID NO: 282108 - RNA, 19 nt, Homo sapiens
  misc_RNA (1)...(19): siRNA sense strand
caacucugccgguauuuga

SEQ ID NO: 282109 - RNA, 19 nt, Homo sapiens
  misc_RNA (1)...(19): siRNA sense strand
ggagaggaccaucagauca

SEQ ID NO: 282110 - RNA, 19 nt, Homo sapiens
  misc_RNA (1)...(19): siRNA sense strand
gaagugggaacuaugaauc

SEQ ID NO: 282111 - RNA, 19 nt, Homo sapiens
  misc_RNA (1)...(19): siRNA sense strand
gauaaaugaagauggagaa

SEQ ID NO: 282112 - RNA, 19 nt, Homo sapiens
  misc_RNA (1)...(19): siRNA sense strand
gcaagaugggagggaauua

SEQ ID NO: 282113 - RNA, 19 nt, Homo sapiens
  misc_RNA (1)...(19): siRNA sense strand
gcucaucagcuuugcacua

SEQ ID NO: 282114 - RNA, 19 nt, Homo sapiens
  misc_RNA (1)...(19): siRNA sense strand
ggaacugagccuucucuug

SEQ ID NO: 282115 - RNA, 19 nt, Homo sapiens
  misc_RNA (1)...(19): siRNA sense strand
caacaucugcuagucugua

SEQ ID NO: 282116 - RNA, 19 nt, Homo sapiens
  misc_RNA (1)...(19): siRNA sense strand
gggccaaucccaaguaugu

SEQ ID NO: 282117 - RNA, 19 nt, Homo sapiens
  misc_RNA (1)...(19): siRNA sense strand
acaauacacauuccaacua

SEQ ID NO: 282118 - RNA, 19 nt, Homo sapiens
  misc_RNA (1)...(19): siRNA sense strand
caccauggaugacuugaca

SEQ ID NO: 282119 - RNA, 19 nt, Homo sapiens
  misc_RNA (1)...(19): siRNA sense strand
uaucaagccucuucagaac

SEQ ID NO: 282120 - RNA, 19 nt, Homo sapiens
  misc_RNA (1)...(19): siRNA sense strand
guauauucguccuacauuc

SEQ ID NO: 282121 - RNA, 19 nt, Homo sapiens
  misc_RNA (1)...(19): siRNA sense strand
ucaagaagccuaccaaagc

SEQ ID NO: 282122 - RNA, 19 nt, Homo sapiens
  misc_RNA (1)...(19): siRNA sense strand
cguccuacauucauuggaa

SEQ ID NO: 282123 - RNA, 19 nt, Homo sapiens
  misc_RNA (1)...(19): siRNA sense strand
ggaauuacggcucaucucu

SEQ ID NO: 282124 - RNA, 19 nt, Homo sapiens
  misc_RNA (1)...(19): siRNA sense strand
gcauuucgaggaguagaua

SEQ ID NO: 282125 - RNA, 19 nt, Homo sapiens
  misc_RNA (1)...(19): siRNA sense strand
gggaacagagugagagaga

SEQ ID NO: 282126 - RNA, 19 nt, Homo sapiens
  misc_RNA (1)...(19): siRNA sense strand
gccaaucccaaguauguaa

SEQ ID NO: 282127 - RNA, 19 nt, Homo sapiens
  misc_RNA (1)...(19): siRNA sense strand
cuacauucauuggaacuga

SEQ ID NO: 282128 - RNA, 19 nt, Homo sapiens
  misc_RNA (1)...(19): siRNA sense strand
ccaaaccucaacauggaua

SEQ ID NO: 282129 - RNA, 19 nt, Homo sapiens
  misc_RNA (1)...(19): siRNA sense strand
gaugggagaaaccucauau

SEQ ID NO: 282130 - RNA, 19 nt, Homo sapiens
  misc_RNA (1)...(19): siRNA sense strand
gugaagcaguagauaaugg

SEQ ID NO: 282131 - RNA, 19 nt, Homo sapiens
  misc_RNA (1)...(19): siRNA sense strand
gaauuacggcucaucucuu

SEQ ID NO: 282132 - RNA, 19 nt, Homo sapiens
  misc_RNA (1)...(19): siRNA sense strand
acuaugcaguggaauuauu

SEQ ID NO: 282133 - RNA, 19 nt, Homo sapiens
  misc_RNA (1)...(19): siRNA sense strand
agccaaaccucaacaugga

SEQ ID NO: 282134 - RNA, 19 nt, Homo sapiens
  misc_RNA (1)...(19): siRNA sense strand
cuggauaaaugaagaugga

SEQ ID NO: 282135 - RNA, 19 nt, Homo sapiens
  misc_RNA (1)...(19): siRNA sense strand
ggaacagagugagagagau

SEQ ID NO: 282136 - RNA, 19 nt, Homo sapiens
  misc_RNA (1)...(19): siRNA sense strand
cuaauagucacaccagcua

SEQ ID NO: 282137 - RNA, 19 nt, Homo sapiens
  misc_RNA (1)...(19): siRNA sense strand
gcaaauuaacugauaucca

SEQ ID NO: 282138 - RNA, 19 nt, Homo sapiens
  misc_RNA (1)...(19): siRNA sense strand
uaaaugaagauggagaaga

SEQ ID NO: 282139 - RNA, 19 nt, Homo sapiens
  misc_RNA (1)...(19): siRNA sense strand
ucaaguggaaccuuuaauc

SEQ ID NO: 282140 - RNA, 19 nt, Homo sapiens
  misc_RNA (1)...(19): siRNA sense strand
ugaaauuggaucaagaaug

SEQ ID NO: 282141 - RNA, 19 nt, Homo sapiens
  misc_RNA (1)...(19): siRNA sense strand
ucaacagcuugugaaauug

SEQ ID NO: 282142 - RNA, 19 nt, Homo sapiens
  misc_RNA (1)...(19): siRNA sense strand
caucagcuuugcacuaugc

SEQ ID NO: 282143 - RNA, 19 nt, Homo sapiens
  misc_RNA (1)...(19): siRNA sense strand
ggucccauauucaacaucu

SEQ ID NO: 282144 - RNA, 19 nt, Homo sapiens
  misc_RNA (1)...(19): siRNA sense strand
caucugcuagucuguauau

SEQ ID NO: 282145 - RNA, 19 nt, Homo sapiens
  misc_RNA (1)...(19): siRNA sense strand
cacccuggcucaucagcuu

SEQ ID NO: 282146 - RNA, 19 nt, Homo sapiens
  misc_RNA (1)...(19): siRNA sense strand
cgacuggacaauugugcua

SEQ ID NO: 282147 - RNA, 19 nt, Homo sapiens
  misc_RNA (1)...(19): siRNA sense strand
gagcaaauuaacugauauc

SEQ ID NO: 282148 - RNA, 19 nt, Homo sapiens
  misc_RNA (1)...(19): siRNA sense strand
ccgcaucuugagcaaauua

SEQ ID NO: 282149 - RNA, 19 nt, Homo sapiens
  misc_RNA (1)...(19): siRNA sense strand
ggcaacuccuccacuagau

SEQ ID NO: 282150 - RNA, 19 nt, Homo sapiens
  misc_RNA (1)...(19): siRNA sense strand
ggaugggagaaaccucaua

SEQ ID NO: 282151 - RNA, 19 nt, Homo sapiens
  misc_RNA (1)...(19): siRNA sense strand
gagacaauacacauuccaa

SEQ ID NO: 282152 - RNA, 19 nt, Homo sapiens
  misc_RNA (1)...(19): siRNA sense strand
uugcccaguuucugauaua

SEQ ID NO: 282153 - RNA, 19 nt, Homo sapiens
  misc_RNA (1)...(19): siRNA sense strand
gaagaagaacuggcaacuc

SEQ ID NO: 282154 - RNA, 19 nt, Homo sapiens
  misc_RNA (1)...(19): siRNA sense strand
ugcccaaugugaagcagua

SEQ ID NO: 282155 - RNA, 19 nt, Homo sapiens
  misc_RNA (1)...(19): siRNA sense strand
cacaccagcuaccauuuua

SEQ ID NO: 282156 - RNA, 19 nt, Homo sapiens
  misc_RNA (1)...(19): siRNA sense strand
cauaucaagccucuucaga

SEQ ID NO: 282157 - RNA, 19 nt, Homo sapiens
  misc_RNA (1)...(19): siRNA sense strand
ugaagauggagaagaagaa

SEQ ID NO: 282158 - RNA, 19 nt, Homo sapiens
  misc_RNA (1)...(19): siRNA sense strand
uaaggcuaaagaccuaaua

SEQ ID NO: 282159 - RNA, 19 nt, Homo sapiens
  misc_RNA (1)...(19): siRNA sense strand
gcaacucugccgguauuug

SEQ ID NO: 282160 - RNA, 19 nt, Homo sapiens
  misc_RNA (1)...(19): siRNA sense strand
gcaacuccuccacuagaug

SEQ ID NO: 282161 - RNA, 19 nt, Homo sapiens
  misc_RNA (1)...(19): siRNA sense strand
uguguuguuugcccaguuu

SEQ ID NO: 282162 - RNA, 19 nt, Homo sapiens
  misc_RNA (1)...(19): siRNA sense strand
ugggagaaaccucauauca

SEQ ID NO: 282163 - RNA, 19 nt, Homo sapiens
  misc_RNA (1)...(19): siRNA sense strand
cucaucagcuuugcacuau

SEQ ID NO: 282164 - RNA, 19 nt, Homo sapiens
  misc_RNA (1)...(19): siRNA sense strand
ggcuaaagaccuaauaguc

SEQ ID NO: 282165 - RNA, 19 nt, Homo sapiens
  misc_RNA (1)...(19): siRNA sense strand
acuggcaacuccuccacua

SEQ ID NO: 282166 - RNA, 19 nt, Homo sapiens
  misc_RNA (1)...(19): siRNA sense strand
ccucauaucaagccucuuc

SEQ ID NO: 282167 - RNA, 19 nt, Homo sapiens
  misc_RNA (1)...(19): siRNA sense strand
aaugugaagcaguagauaa

SEQ ID NO: 282168 - RNA, 19 nt, Homo sapiens
  misc_RNA (1)...(19): siRNA sense strand
caacagcuugugaaauugg

SEQ ID NO: 282169 - RNA, 19 nt, Homo sapiens
  misc_RNA (1)...(19): siRNA sense strand
uucgaggaguagauaauaa

SEQ ID NO: 282170 - RNA, 19 nt, Homo sapiens
  misc_RNA (1)...(19): siRNA sense strand
cuaugcaguggaauuauuu

SEQ ID NO: 282171 - RNA, 19 nt, Homo sapiens
  misc_RNA (1)...(19): siRNA sense strand
gcacaucaguggggugaau

SEQ ID NO: 282172 - RNA, 19 nt, Homo sapiens
  misc_RNA (1)...(19): siRNA sense strand
caaugugaagcaguagaua

SEQ ID NO: 282173 - RNA, 19 nt, Homo sapiens
  misc_RNA (1)...(19): siRNA sense strand
guauguaagagccuggaaa

SEQ ID NO: 282174 - RNA, 19 nt, Homo sapiens
  misc_RNA (1)...(19): siRNA sense strand
ucgaggaguagauaauaaa

SEQ ID NO: 282175 - RNA, 19 nt, Homo sapiens
  misc_RNA (1)...(19): siRNA sense strand
uauauucguccuacauuca

SEQ ID NO: 282176 - RNA, 19 nt, Homo sapiens
  misc_RNA (1)...(19): siRNA sense strand
gacaauacacauuccaacu

SEQ ID NO: 282177 - RNA, 19 nt, Homo sapiens
  misc_RNA (1)...(19): siRNA sense strand
uguaagagccuggaaaggu

SEQ ID NO: 282178 - RNA, 19 nt, Homo sapiens
  misc_RNA (1)...(19): siRNA sense strand
gugacaaggcggugcauuc

SEQ ID NO: 282179 - RNA, 19 nt, Homo sapiens
  misc_RNA (1)...(19): siRNA sense strand
gugggaacuaugaaucuuu

SEQ ID NO: 282180 - RNA, 19 nt, Homo sapiens
  misc_RNA (1)...(19): siRNA sense strand
uugaaggauugaaggcauu

SEQ ID NO: 282181 - RNA, 19 nt, Homo sapiens
  misc_RNA (1)...(19): siRNA sense strand
agagagcgacuggacaauu

SEQ ID NO: 282182 - RNA, 19 nt, Homo sapiens
  misc_RNA (1)...(19): siRNA sense strand
gagugguccucagaguuug

SEQ ID NO: 282183 - RNA, 19 nt, Homo sapiens
  misc_RNA (1)...(19): siRNA sense strand
ggcgagacaauacacauuc

SEQ ID NO: 282184 - RNA, 19 nt, Homo sapiens
  misc_RNA (1)...(19): siRNA sense strand
gcccugcucuuuguacucu

SEQ ID NO: 282185 - RNA, 19 nt, Homo sapiens
  misc_RNA (1)...(19): siRNA sense strand
ccaaugugaagcaguagau

SEQ ID NO: 282186 - RNA, 19 nt, Homo sapiens
  misc_RNA (1)...(19): siRNA sense strand
gagauguuuggcucuggua

SEQ ID NO: 282187 - RNA, 19 nt, Homo sapiens
  misc_RNA (1)...(19): siRNA sense strand
ucaagccucuucagaaccu

SEQ ID NO: 282188 - RNA, 19 nt, Homo sapiens
  misc_RNA (1)...(19): siRNA sense strand
cagcuaccauuuuaaagga

SEQ ID NO: 282189 - RNA, 19 nt, Homo sapiens
  misc_RNA (1)...(19): siRNA sense strand
guggagugguccucagagu

SEQ ID NO: 282190 - RNA, 19 nt, Homo sapiens
  misc_RNA (1)...(19): siRNA sense strand
gaagauggagaagaagaac

SEQ ID NO: 282191 - RNA, 19 nt, Homo sapiens
  misc_RNA (1)...(19): siRNA sense strand
aaacaaagcugcugugcua

SEQ ID NO: 282192 - RNA, 19 nt, Homo sapiens
  misc_RNA (1)...(19): siRNA sense strand
gaaauaggccaugaaguua

SEQ ID NO: 282193 - RNA, 19 nt, Homo sapiens
  misc_RNA (1)...(19): siRNA sense strand
ugaaauaggccaugaaguu

SEQ ID NO: 282194 - RNA, 19 nt, Homo sapiens
  misc_RNA (1)...(19): siRNA sense strand
caacuggauuucuagguaa

SEQ ID NO: 282195 - RNA, 19 nt, Homo sapiens
  misc_RNA (1)...(19): siRNA sense strand
gcaaaguaacugcuauaaa

SEQ ID NO: 282196 - RNA, 19 nt, Homo sapiens
  misc_RNA (1)...(19): siRNA sense strand
caaagcugcugugcuauau

SEQ ID NO: 282197 - RNA, 19 nt, Homo sapiens
  misc_RNA (1)...(19): siRNA sense strand
acaacuggauuucuaggua

SEQ ID NO: 282198 - RNA, 19 nt, Homo sapiens
  misc_RNA (1)...(19): siRNA sense strand
ggaacuauggcuaugcuaa

SEQ ID NO: 282199 - RNA, 19 nt, Homo sapiens
  misc_RNA (1)...(19): siRNA sense strand
gaacuauggcuaugcuaau

SEQ ID NO: 282200 - RNA, 19 nt, Homo sapiens
  misc_RNA (1)...(19): siRNA sense strand
aagcugcugugcuauauga

SEQ ID NO: 282201 - RNA, 19 nt, Homo sapiens
  misc_RNA (1)...(19): siRNA sense strand
guauagugccugugaagaa

SEQ ID NO: 282202 - RNA, 19 nt, Homo sapiens
  misc_RNA (1)...(19): siRNA sense strand
gaaguuaaaacccagaaua

SEQ ID NO: 282203 - RNA, 19 nt, Homo sapiens
  misc_RNA (1)...(19): siRNA sense strand
aauaggccaugaaguuaaa

SEQ ID NO: 282204 - RNA, 19 nt, Homo sapiens
  misc_RNA (1)...(19): siRNA sense strand
gcuaauaguggguauagug

SEQ ID NO: 282205 - RNA, 19 nt, Homo sapiens
  misc_RNA (1)...(19): siRNA sense strand
acaaagcugcugugcuaua

SEQ ID NO: 282206 - RNA, 19 nt, Homo sapiens
  misc_RNA (1)...(19): siRNA sense strand
gaaagucugagaagcaaag

SEQ ID NO: 282207 - RNA, 19 nt, Homo sapiens
  misc_RNA (1)...(19): siRNA sense strand
ccagagggagccaaacaaa

SEQ ID NO: 282208 - RNA, 19 nt, Homo sapiens
  misc_RNA (1)...(19): siRNA sense strand
aacuauggcuaugcuaaua

SEQ ID NO: 282209 - RNA, 19 nt, Homo sapiens
  misc_RNA (1)...(19): siRNA sense strand
gcaacuaugggaacuaugg

SEQ ID NO: 282210 - RNA, 19 nt, Homo sapiens
  misc_RNA (1)...(19): siRNA sense strand
aaauaggccaugaaguuaa

SEQ ID NO: 282211 - RNA, 19 nt, Homo sapiens
  misc_RNA (1)...(19): siRNA sense strand
agucugagaagcaaaguaa

SEQ ID NO: 282212 - RNA, 19 nt, Homo sapiens
  misc_RNA (1)...(19): siRNA sense strand
caauuugauuccacaacug

SEQ ID NO: 282213 - RNA, 19 nt, Homo sapiens
  misc_RNA (1)...(19): siRNA sense strand
ccauugaaauaggccauga

SEQ ID NO: 282214 - RNA, 19 nt, Homo sapiens
  misc_RNA (1)...(19): siRNA sense strand
uggcaacuaugggaacuau

SEQ ID NO: 282215 - RNA, 19 nt, Homo sapiens
  misc_RNA (1)...(19): siRNA sense strand
acaauuugauuccacaacu

SEQ ID NO: 282216 - RNA, 19 nt, Homo sapiens
  misc_RNA (1)...(19): siRNA sense strand
uauagugccugugaagaag

SEQ ID NO: 282217 - RNA, 19 nt, Homo sapiens
  misc_RNA (1)...(19): siRNA sense strand
aggccugggugaaggagua

SEQ ID NO: 282218 - RNA, 19 nt, Homo sapiens
  misc_RNA (1)...(19): siRNA sense strand
cugaaagucugagaagcaa

SEQ ID NO: 282219 - RNA, 19 nt, Homo sapiens
  misc_RNA (1)...(19): siRNA sense strand
gaguaccuccuggcaacua

SEQ ID NO: 282220 - RNA, 19 nt, Homo sapiens
  misc_RNA (1)...(19): siRNA sense strand
ucacugaaagucugagaag

SEQ ID NO: 282221 - RNA, 19 nt, Homo sapiens
  misc_RNA (1)...(19): siRNA sense strand
gcuauaugaugcuguuuuc

SEQ ID NO: 282222 - RNA, 19 nt, Homo sapiens
  misc_RNA (1)...(19): siRNA sense strand
uaugggaacuauggcuaug

SEQ ID NO: 282223 - RNA, 19 nt, Homo sapiens
  misc_RNA (1)...(19): siRNA sense strand
guggguauagugccuguga

SEQ ID NO: 282224 - RNA, 19 nt, Homo sapiens
  misc_RNA (1)...(19): siRNA sense strand
ugugcuauaugaugcuguu

SEQ ID NO: 282225 - RNA, 19 nt, Homo sapiens
  misc_RNA (1)...(19): siRNA sense strand
ugggcaaacugaagauuuu

SEQ ID NO: 282226 - RNA, 19 nt, Homo sapiens
  misc_RNA (1)...(19): siRNA sense strand
gguauagugccugugaaga

SEQ ID NO: 282227 - RNA, 19 nt, Homo sapiens
  misc_RNA (1)...(19): siRNA sense strand
uagugccugugaagaagaa

SEQ ID NO: 282228 - RNA, 19 nt, Homo sapiens
  misc_RNA (1)...(19): siRNA sense strand
aaacuaugggcaaacugaa

SEQ ID NO: 282229 - RNA, 19 nt, Homo sapiens
  misc_RNA (1)...(19): siRNA sense strand
gagaggcucacugaaaguc

SEQ ID NO: 282230 - RNA, 19 nt, Homo sapiens
  misc_RNA (1)...(19): siRNA sense strand
gcuauaaaaucucuuucca

SEQ ID NO: 282231 - RNA, 19 nt, Homo sapiens
  misc_RNA (1)...(19): siRNA sense strand
cugcagaucuugcgacuaa

SEQ ID NO: 282232 - RNA, 19 nt, Homo sapiens
  misc_RNA (1)...(19): siRNA sense strand
ggagacggacccagcagua

SEQ ID NO: 282233 - RNA, 19 nt, Homo sapiens
  misc_RNA (1)...(19): siRNA sense strand
gagcaucgacuucaagcaa

SEQ ID NO: 282234 - RNA, 19 nt, Homo sapiens
  misc_RNA (1)...(19): siRNA sense strand
caaucaacaugcucuacuu

SEQ ID NO: 282235 - RNA, 19 nt, Homo sapiens
  misc_RNA (1)...(19): siRNA sense strand
cguauccgcucacugaaga

SEQ ID NO: 282236 - RNA, 19 nt, Homo sapiens
  misc_RNA (1)...(19): siRNA sense strand
caacaugcucuacuucaau

SEQ ID NO: 282237 - RNA, 19 nt, Homo sapiens
  misc_RNA (1)...(19): siRNA sense strand
ucaacaugcucuacuucaa

SEQ ID NO: 282238 - RNA, 19 nt, Homo sapiens
  misc_RNA (1)...(19): siRNA sense strand
gcaaacugcggcucaagga

SEQ ID NO: 282239 - RNA, 19 nt, Homo sapiens
  misc_RNA (1)...(19): siRNA sense strand
ucgcagaucuugagcaaac

SEQ ID NO: 282240 - RNA, 19 nt, Homo sapiens
  misc_RNA (1)...(19): siRNA sense strand
gagcuucgaguccuagaga

SEQ ID NO: 282241 - RNA, 19 nt, Homo sapiens
  misc_RNA (1)...(19): siRNA sense strand
ggacccagcaguacagaca

SEQ ID NO: 282242 - RNA, 19 nt, Homo sapiens
  misc_RNA (1)...(19): siRNA sense strand
gcagcaggccaauccaaga

SEQ ID NO: 282243 - RNA, 19 nt, Homo sapiens
  misc_RNA (1)...(19): siRNA sense strand
ggacugcgacgagcacuca

SEQ ID NO: 282244 - RNA, 19 nt, Homo sapiens
  misc_RNA (1)...(19): siRNA sense strand
ccaccgagaccgucauuag

SEQ ID NO: 282245 - RNA, 19 nt, Homo sapiens
  misc_RNA (1)...(19): siRNA sense strand
caguggacuuugaggcuuu

SEQ ID NO: 282246 - RNA, 19 nt, Homo sapiens
  misc_RNA (1)...(19): siRNA sense strand
aauauccgcauacccauuu

SEQ ID NO: 282247 - RNA, 19 nt, Homo sapiens
  misc_RNA (1)...(19): siRNA sense strand
aaugacaagcagcagauua

SEQ ID NO: 282248 - RNA, 19 nt, Homo sapiens
  misc_RNA (1)...(19): siRNA sense strand
ggcagagcaucgacuucaa

SEQ ID NO: 282249 - RNA, 19 nt, Homo sapiens
  misc_RNA (1)...(19): siRNA sense strand
gcuacaaggccaacuacug

SEQ ID NO: 282250 - RNA, 19 nt, Homo sapiens
  misc_RNA (1)...(19): siRNA sense strand
cagucuaccugcagaucuu

SEQ ID NO: 282251 - RNA, 19 nt, Homo sapiens
  misc_RNA (1)...(19): siRNA sense strand
gcagagcaucgacuucaag

SEQ ID NO: 282252 - RNA, 19 nt, Homo sapiens
  misc_RNA (1)...(19): siRNA sense strand
aacaugcucuacuucaaug

SEQ ID NO: 282253 - RNA, 19 nt, Homo sapiens
  misc_RNA (1)...(19): siRNA sense strand
cauggagcuucgaguccua

SEQ ID NO: 282254 - RNA, 19 nt, Homo sapiens
  misc_RNA (1)...(19): siRNA sense strand
agucgcagaucuugagcaa

SEQ ID NO: 282255 - RNA, 19 nt, Homo sapiens
  misc_RNA (1)...(19): siRNA sense strand
ccagugcgaguacauguuc

SEQ ID NO: 282256 - RNA, 19 nt, Homo sapiens
  misc_RNA (1)...(19): siRNA sense strand
gcaucaagucgcagaucuu

SEQ ID NO: 282257 - RNA, 19 nt, Homo sapiens
  misc_RNA (1)...(19): siRNA sense strand
ucaaugacaagcagcagau

SEQ ID NO: 282258 - RNA, 19 nt, Homo sapiens
  misc_RNA (1)...(19): siRNA sense strand
ccaccaagauguccccaau

SEQ ID NO: 282259 - RNA, 19 nt, Homo sapiens
  misc_RNA (1)...(19): siRNA sense strand
gcagaucuugcgacuaaaa

SEQ ID NO: 282260 - RNA, 19 nt, Homo sapiens
  misc_RNA (1)...(19): siRNA sense strand
uccgcucacugaagauuga

SEQ ID NO: 282261 - RNA, 19 nt, Homo sapiens
  misc_RNA (1)...(19): siRNA sense strand
gaaagcauauacagcaauu

SEQ ID NO: 282262 - RNA, 19 nt, Homo sapiens
  misc_RNA (1)...(19): siRNA sense strand
gcaauuacuaucuguauga

SEQ ID NO: 282263 - RNA, 19 nt, Homo sapiens
  misc_RNA (1)...(19): siRNA sense strand
ggagaaauuucgcaaguac

SEQ ID NO: 282264 - RNA, 19 nt, Homo sapiens
  misc_RNA (1)...(19): siRNA sense strand
gcauauacagcaauuacua

SEQ ID NO: 282265 - RNA, 19 nt, Homo sapiens
  misc_RNA (1)...(19): siRNA sense strand
gaaagauacuuggacuaug

SEQ ID NO: 282266 - RNA, 19 nt, Homo sapiens
  misc_RNA (1)...(19): siRNA sense strand
gaacaaggcggugaagaug

SEQ ID NO: 282267 - RNA, 19 nt, Homo sapiens
  misc_RNA (1)...(19): siRNA sense strand
gaaauucuguggugguucu

SEQ ID NO: 282268 - RNA, 19 nt, Homo sapiens
  misc_RNA (1)...(19): siRNA sense strand
caacauagugcucuuccua

SEQ ID NO: 282269 - RNA, 19 nt, Homo sapiens
  misc_RNA (1)...(19): siRNA sense strand
gcaagaugauuuccuggau

SEQ ID NO: 282270 - RNA, 19 nt, Homo sapiens
  misc_RNA (1)...(19): siRNA sense strand
guucucagcucccuggaaa

SEQ ID NO: 282271 - RNA, 19 nt, Homo sapiens
  misc_RNA (1)...(19): siRNA sense strand
gggagaaauuucgcaagua

SEQ ID NO: 282272 - RNA, 19 nt, Homo sapiens
  misc_RNA (1)...(19): siRNA sense strand
cuggacaccuuacaacaua

SEQ ID NO: 282273 - RNA, 19 nt, Homo sapiens
  misc_RNA (1)...(19): siRNA sense strand
ucaugagcauugauagaua

SEQ ID NO: 282274 - RNA, 19 nt, Homo sapiens
  misc_RNA (1)...(19): siRNA sense strand
auagauaccuggcaauugu

SEQ ID NO: 282275 - RNA, 19 nt, Homo sapiens
  misc_RNA (1)...(19): siRNA sense strand
ggaccuugcagcauuguaa

SEQ ID NO: 282276 - RNA, 19 nt, Homo sapiens
  misc_RNA (1)...(19): siRNA sense strand
aaagauacuuggacuaugc

SEQ ID NO: 282277 - RNA, 19 nt, Homo sapiens
  misc_RNA (1)...(19): siRNA sense strand
guucagcacuuguuauacu

SEQ ID NO: 282278 - RNA, 19 nt, Homo sapiens
  misc_RNA (1)...(19): siRNA sense strand
guucacugcugccuuaauc

SEQ ID NO: 282279 - RNA, 19 nt, Homo sapiens
  misc_RNA (1)...(19): siRNA sense strand
cacccucgaugaaagcaua

SEQ ID NO: 282280 - RNA, 19 nt, Homo sapiens
  misc_RNA (1)...(19): siRNA sense strand
gugggcuccuccaaauuua

SEQ ID NO: 282281 - RNA, 19 nt, Homo sapiens
  misc_RNA (1)...(19): siRNA sense strand
ugaaagauacuuggacuau

SEQ ID NO: 282282 - RNA, 19 nt, Homo sapiens
  misc_RNA (1)...(19): siRNA sense strand
ccacuguauuccuugguuu

SEQ ID NO: 282283 - RNA, 19 nt, Homo sapiens
  misc_RNA (1)...(19): siRNA sense strand
cuaggucugugcaagauga

SEQ ID NO: 282284 - RNA, 19 nt, Homo sapiens
  misc_RNA (1)...(19): siRNA sense strand
aagaaggcaucaaggcauu

SEQ ID NO: 282285 - RNA, 19 nt, Homo sapiens
  misc_RNA (1)...(19): siRNA sense strand
uuuguucacugcugccuua

SEQ ID NO: 282286 - RNA, 19 nt, Homo sapiens
  misc_RNA (1)...(19): siRNA sense strand
gauagauaccuggcaauug

SEQ ID NO: 282287 - RNA, 19 nt, Homo sapiens
  misc_RNA (1)...(19): siRNA sense strand
cuucaggacugcaccuuug

SEQ ID NO: 282288 - RNA, 19 nt, Homo sapiens
  misc_RNA (1)...(19): siRNA sense strand
guccaugacugauguguac

SEQ ID NO: 282289 - RNA, 19 nt, Homo sapiens
  misc_RNA (1)...(19): siRNA sense strand
acaaggcggugaagaugau

SEQ ID NO: 282290 - RNA, 19 nt, Homo sapiens
  misc_RNA (1)...(19): siRNA sense strand
uauuuggucugcuuggaaa

SEQ ID NO: 282291 - RNA, 19 nt, Homo sapiens
  misc_RNA (1)...(19): siRNA sense strand
ggucugugcaagaugauuu

SEQ ID NO: 282292 - RNA, 19 nt, Homo sapiens
  misc_RNA (1)...(19): siRNA sense strand
caaccauaccuacugcaaa

SEQ ID NO: 282293 - RNA, 19 nt, Homo sapiens
  misc_RNA (1)...(19): siRNA sense strand
acauagugcucuuccuaga

SEQ ID NO: 282294 - RNA, 19 nt, Homo sapiens
  misc_RNA (1)...(19): siRNA sense strand
gaucugcucuucguguuuu

SEQ ID NO: 282295 - RNA, 19 nt, Homo sapiens
  misc_RNA (1)...(19): siRNA sense strand
aagaugauuuccuggaugu

SEQ ID NO: 282296 - RNA, 19 nt, Homo sapiens
  misc_RNA (1)...(19): siRNA sense strand
gaaggcaucaaggcauuug

SEQ ID NO: 282297 - RNA, 19 nt, Homo sapiens
  misc_RNA (1)...(19): siRNA sense strand
uuaaucccaucaucuacuu

SEQ ID NO: 282298 - RNA, 19 nt, Homo sapiens
  misc_RNA (1)...(19): siRNA sense strand
ucaggaccuugcagcauug

SEQ ID NO: 282299 - RNA, 19 nt, Homo sapiens
  misc_RNA (1)...(19): siRNA sense strand
gcaaccauaccuacugcaa

SEQ ID NO: 282300 - RNA, 19 nt, Homo sapiens
  misc_RNA (1)...(19): siRNA sense strand
uuacaguggcauauucuuu

SEQ ID NO: 282301 - RNA, 19 nt, Homo sapiens
  misc_RNA (1)...(19): siRNA sense strand
gcagcagaccaguggguuu

SEQ ID NO: 282302 - RNA, 19 nt, Homo sapiens
  misc_RNA (1)...(19): siRNA sense strand
ucagcucccuggaaaucaa

SEQ ID NO: 282303 - RNA, 19 nt, Homo sapiens
  misc_RNA (1)...(19): siRNA sense strand
cagcaauuacuaucuguau

SEQ ID NO: 282304 - RNA, 19 nt, Homo sapiens
  misc_RNA (1)...(19): siRNA sense strand
auacagcaauuacuaucug

SEQ ID NO: 282305 - RNA, 19 nt, Homo sapiens
  misc_RNA (1)...(19): siRNA sense strand
ugugggcuccuccaaauuu

SEQ ID NO: 282306 - RNA, 19 nt, Homo sapiens
  misc_RNA (1)...(19): siRNA sense strand
guucugguccuguucaaau

SEQ ID NO: 282307 - RNA, 19 nt, Homo sapiens
  misc_RNA (1)...(19): siRNA sense strand
gccuuaaucccaucaucua

SEQ ID NO: 282308 - RNA, 19 nt, Homo sapiens
  misc_RNA (1)...(19): siRNA sense strand
caugagcauugauagauac

SEQ ID NO: 282309 - RNA, 19 nt, Homo sapiens
  misc_RNA (1)...(19): siRNA sense strand
acaccacccucgaugaaag

SEQ ID NO: 282310 - RNA, 19 nt, Homo sapiens
  misc_RNA (1)...(19): siRNA sense strand
ucaccaguuuggcuacaug

SEQ ID NO: 282311 - RNA, 19 nt, Homo sapiens
  misc_RNA (1)...(19): siRNA sense strand
acugugggcuccuccaaau

SEQ ID NO: 282312 - RNA, 19 nt, Homo sapiens
  misc_RNA (1)...(19): siRNA sense strand
agacaccacccucgaugaa

SEQ ID NO: 282313 - RNA, 19 nt, Homo sapiens
  misc_RNA (1)...(19): siRNA sense strand
ccuuagggaucaugcuguu

SEQ ID NO: 282314 - RNA, 19 nt, Homo sapiens
  misc_RNA (1)...(19): siRNA sense strand
gggcuaggucugugcaaga

SEQ ID NO: 282315 - RNA, 19 nt, Homo sapiens
  misc_RNA (1)...(19): siRNA sense strand
cauccuacagcucuucaaa

SEQ ID NO: 282316 - RNA, 19 nt, Homo sapiens
  misc_RNA (1)...(19): siRNA sense strand
agaacaaggcggugaagau

SEQ ID NO: 282317 - RNA, 19 nt, Homo sapiens
  misc_RNA (1)...(19): siRNA sense strand
cuuccuggcuuucuguuca

SEQ ID NO: 282318 - RNA, 19 nt, Homo sapiens
  misc_RNA (1)...(19): siRNA sense strand
caucucggaucugcucuuc

SEQ ID NO: 282319 - RNA, 19 nt, Homo sapiens
  misc_RNA (1)...(19): siRNA sense strand
ggaucaugcuguuuugcua

SEQ ID NO: 282320 - RNA, 19 nt, Homo sapiens
  misc_RNA (1)...(19): siRNA sense strand
cauggucaguggcuguguu

SEQ ID NO: 282321 - RNA, 19 nt, Homo sapiens
  misc_RNA (1)...(19): siRNA sense strand
ugauagauaccuggcaauu

SEQ ID NO: 282322 - RNA, 19 nt, Homo sapiens
  misc_RNA (1)...(19): siRNA sense strand
ggaucugcucuucguguuu

SEQ ID NO: 282323 - RNA, 19 nt, Homo sapiens
  misc_RNA (1)...(19): siRNA sense strand
uacaguggcauauucuuug

SEQ ID NO: 282324 - RNA, 19 nt, Homo sapiens
  misc_RNA (1)...(19): siRNA sense strand
guauuuggucugcuuggaa

SEQ ID NO: 282325 - RNA, 19 nt, Homo sapiens
  misc_RNA (1)...(19): siRNA sense strand
gaccuugcagcauuguaaa

SEQ ID NO: 282326 - RNA, 19 nt, Homo sapiens
  misc_RNA (1)...(19): siRNA sense strand
uggaaauucuguggugguu

SEQ ID NO: 282327 - RNA, 19 nt, Homo sapiens
  misc_RNA (1)...(19): siRNA sense strand
uggcauauucuuugucaug

SEQ ID NO: 282328 - RNA, 19 nt, Homo sapiens
  misc_RNA (1)...(19): siRNA sense strand
acaguggcauauucuuugu

SEQ ID NO: 282329 - RNA, 19 nt, Homo sapiens
  misc_RNA (1)...(19): siRNA sense strand
cggaucugcucuucguguu

SEQ ID NO: 282330 - RNA, 19 nt, Homo sapiens
  misc_RNA (1)...(19): siRNA sense strand
ucucggaucugcucuucgu

SEQ ID NO: 282331 - RNA, 19 nt, Homo sapiens
  misc_RNA (1)...(19): siRNA sense strand
caccaaagaaggcaucaag

SEQ ID NO: 282332 - RNA, 19 nt, Homo sapiens
  misc_RNA (1)...(19): siRNA sense strand
gaagaacaaggcggugaag

SEQ ID NO: 282333 - RNA, 19 nt, Homo sapiens
  misc_RNA (1)...(19): siRNA sense strand
aucaggaccuugcagcauu

SEQ ID NO: 282334 - RNA, 19 nt, Homo sapiens
  misc_RNA (1)...(19): siRNA sense strand
aaccauaccuacugcaaaa

SEQ ID NO: 282335 - RNA, 19 nt, Homo sapiens
  misc_RNA (1)...(19): siRNA sense strand
gguccaugacugaugugua

SEQ ID NO: 282336 - RNA, 19 nt, Homo sapiens
  misc_RNA (1)...(19): siRNA sense strand
auacugagcgcaaccauac

SEQ ID NO: 282337 - RNA, 19 nt, Homo sapiens
  misc_RNA (1)...(19): siRNA sense strand
uauacugagcgcaaccaua

SEQ ID NO: 282338 - RNA, 19 nt, Homo sapiens
  misc_RNA (1)...(19): siRNA sense strand
ggacaccuuacaacauagu

SEQ ID NO: 282339 - RNA, 19 nt, Homo sapiens
  misc_RNA (1)...(19): siRNA sense strand
ccaaguacucucucaacuc

SEQ ID NO: 282340 - RNA, 19 nt, Homo sapiens
  misc_RNA (1)...(19): siRNA sense strand
ggcuaggucugugcaagau

SEQ ID NO: 282341 - RNA, 19 nt, Homo sapiens
  misc_RNA (1)...(19): siRNA sense strand
gacaccacccucgaugaaa

SEQ ID NO: 282342 - RNA, 19 nt, Homo sapiens
  misc_RNA (1)...(19): siRNA sense strand
gaaauuucgcaaguacauc

SEQ ID NO: 282343 - RNA, 19 nt, Homo sapiens
  misc_RNA (1)...(19): siRNA sense strand
ggggagaaauuucgcaagu

SEQ ID NO: 282344 - RNA, 19 nt, Homo sapiens
  misc_RNA (1)...(19): siRNA sense strand
caggacugcaccuuugaaa

SEQ ID NO: 282345 - RNA, 19 nt, Homo sapiens
  misc_RNA (1)...(19): siRNA sense strand
cuguucagcacuuguuaua

SEQ ID NO: 282346 - RNA, 19 nt, Homo sapiens
  misc_RNA (1)...(19): siRNA sense strand
aguggcauauucuuuguca

SEQ ID NO: 282347 - RNA, 19 nt, Homo sapiens
  misc_RNA (1)...(19): siRNA sense strand
agaaauuucgcaaguacau

SEQ ID NO: 282348 - RNA, 19 nt, Homo sapiens
  misc_RNA (1)...(19): siRNA sense strand
uucugguccuguucaaaua

SEQ ID NO: 282349 - RNA, 19 nt, Homo sapiens
  misc_RNA (1)...(19): siRNA sense strand
gagaaauuucgcaaguaca

SEQ ID NO: 282350 - RNA, 19 nt, Homo sapiens
  misc_RNA (1)...(19): siRNA sense strand
aagcauauacagcaauuac

SEQ ID NO: 282351 - RNA, 19 nt, Homo sapiens
  misc_RNA (1)...(19): siRNA sense strand
gaugauuuccuggauguac

SEQ ID NO: 282352 - RNA, 19 nt, Homo sapiens
  misc_RNA (1)...(19): siRNA sense strand
gaugaaaucuugucccuua

SEQ ID NO: 282353 - RNA, 19 nt, Homo sapiens
  misc_RNA (1)...(19): siRNA sense strand
uaaaguuccugcagaaaua

SEQ ID NO: 282354 - RNA, 19 nt, Homo sapiens
  misc_RNA (1)...(19): siRNA sense strand
gaacagauggagauucuuu

SEQ ID NO: 282355 - RNA, 19 nt, Homo sapiens
  misc_RNA (1)...(19): siRNA sense strand
ucacuugacugguggauaa

SEQ ID NO: 282356 - RNA, 19 nt, Homo sapiens
  misc_RNA (1)...(19): siRNA sense strand
ggagaagacaguuaccuua

SEQ ID NO: 282357 - RNA, 19 nt, Homo sapiens
  misc_RNA (1)...(19): siRNA sense strand
gccaagagguuccaaauca

SEQ ID NO: 282358 - RNA, 19 nt, Homo sapiens
  misc_RNA (1)...(19): siRNA sense strand
ucacacaguugacgaauug

SEQ ID NO: 282359 - RNA, 19 nt, Homo sapiens
  misc_RNA (1)...(19): siRNA sense strand
ggaagaccaugagacauuu

SEQ ID NO: 282360 - RNA, 19 nt, Homo sapiens
  misc_RNA (1)...(19): siRNA sense strand
caacauacccuacaucauc

SEQ ID NO: 282361 - RNA, 19 nt, Homo sapiens
  misc_RNA (1)...(19): siRNA sense strand
gaacgagaccaaucuguug

SEQ ID NO: 282362 - RNA, 19 nt, Homo sapiens
  misc_RNA (1)...(19): siRNA sense strand
guauaaaguuccugcagaa

SEQ ID NO: 282363 - RNA, 19 nt, Homo sapiens
  misc_RNA (1)...(19): siRNA sense strand
gagaagacaguuaccuuaa

SEQ ID NO: 282364 - RNA, 19 nt, Homo sapiens
  misc_RNA (1)...(19): siRNA sense strand
acagacaagugcaauauga

SEQ ID NO: 282365 - RNA, 19 nt, Homo sapiens
  misc_RNA (1)...(19): siRNA sense strand
gacaagugcaauaugauua

SEQ ID NO: 282366 - RNA, 19 nt, Homo sapiens
  misc_RNA (1)...(19): siRNA sense strand
aagaugagguccuuuaugu

SEQ ID NO: 282367 - RNA, 19 nt, Homo sapiens
  misc_RNA (1)...(19): siRNA sense strand
agacauuuguggacauuaa

SEQ ID NO: 282368 - RNA, 19 nt, Homo sapiens
  misc_RNA (1)...(19): siRNA sense strand
gcagaugagagguuuguuu

SEQ ID NO: 282369 - RNA, 19 nt, Homo sapiens
  misc_RNA (1)...(19): siRNA sense strand
ccaagcagaugagagguuu

SEQ ID NO: 282370 - RNA, 19 nt, Homo sapiens
  misc_RNA (1)...(19): siRNA sense strand
gggaacagcggaugaaaga

SEQ ID NO: 282371 - RNA, 19 nt, Homo sapiens
  misc_RNA (1)...(19): siRNA sense strand
gaucaucgaggccauguug

SEQ ID NO: 282372 - RNA, 19 nt, Homo sapiens
  misc_RNA (1)...(19): siRNA sense strand
gagguuuguuucugccaua

SEQ ID NO: 282373 - RNA, 19 nt, Homo sapiens
  misc_RNA (1)...(19): siRNA sense strand
gaugagagguuuguuucug

SEQ ID NO: 282374 - RNA, 19 nt, Homo sapiens
  misc_RNA (1)...(19): siRNA sense strand
gcaggucaguguauauuac

SEQ ID NO: 282375 - RNA, 19 nt, Homo sapiens
  misc_RNA (1)...(19): siRNA sense strand
ggacauuaauccuuugacu

SEQ ID NO: 282376 - RNA, 19 nt, Homo sapiens
  misc_RNA (1)...(19): siRNA sense strand
gauuaacacuacuuugauc

SEQ ID NO: 282377 - RNA, 19 nt, Homo sapiens
  misc_RNA (1)...(19): siRNA sense strand
cagcagaagcucuuuguga

SEQ ID NO: 282378 - RNA, 19 nt, Homo sapiens
  misc_RNA (1)...(19): siRNA sense strand
ccaagagguuccaaaucaa

SEQ ID NO: 282379 - RNA, 19 nt, Homo sapiens
  misc_RNA (1)...(19): siRNA sense strand
ggagauaauggaacaacaa

SEQ ID NO: 282380 - RNA, 19 nt, Homo sapiens
  misc_RNA (1)...(19): siRNA sense strand
gaaacgggagacauuagaa

SEQ ID NO: 282381 - RNA, 19 nt, Homo sapiens
  misc_RNA (1)...(19): siRNA sense strand
uaacagacaagugcaauau

SEQ ID NO: 282382 - RNA, 19 nt, Homo sapiens
  misc_RNA (1)...(19): siRNA sense strand
gaacucagaaacaaagcaa

SEQ ID NO: 282383 - RNA, 19 nt, Homo sapiens
  misc_RNA (1)...(19): siRNA sense strand
cccgauaucucucccuauu

SEQ ID NO: 282384 - RNA, 19 nt, Homo sapiens
  misc_RNA (1)...(19): siRNA sense strand
ugacuggaauaauccuaaa

SEQ ID NO: 282385 - RNA, 19 nt, Homo sapiens
  misc_RNA (1)...(19): siRNA sense strand
uagaaggcaugcacccaaa

SEQ ID NO: 282386 - RNA, 19 nt, Homo sapiens
  misc_RNA (1)...(19): siRNA sense strand
gacuaaugauggagacuau

SEQ ID NO: 282387 - RNA, 19 nt, Homo sapiens
  misc_RNA (1)...(19): siRNA sense strand
gccaauacgucagacaaug

SEQ ID NO: 282388 - RNA, 19 nt, Homo sapiens
  misc_RNA (1)...(19): siRNA sense strand
ggacuaaugauggagacua

SEQ ID NO: 282389 - RNA, 19 nt, Homo sapiens
  misc_RNA (1)...(19): siRNA sense strand
gagaguguucacauugaua

SEQ ID NO: 282390 - RNA, 19 nt, Homo sapiens
  misc_RNA (1)...(19): siRNA sense strand
caaaucaggaagaccauga

SEQ ID NO: 282391 - RNA, 19 nt, Homo sapiens
  misc_RNA (1)...(19): siRNA sense strand
acagggaacucagaaacaa

SEQ ID NO: 282392 - RNA, 19 nt, Homo sapiens
  misc_RNA (1)...(19): siRNA sense strand
cgauaucucucccuauuuu

SEQ ID NO: 282393 - RNA, 19 nt, Homo sapiens
  misc_RNA (1)...(19): siRNA sense strand
gaaagccuaucagcagaag

SEQ ID NO: 282394 - RNA, 19 nt, Homo sapiens
  misc_RNA (1)...(19): siRNA sense strand
ccacuaauaaccaaagaug

SEQ ID NO: 282395 - RNA, 19 nt, Homo sapiens
  misc_RNA (1)...(19): siRNA sense strand
gacaaugccggcuucugua

SEQ ID NO: 282396 - RNA, 19 nt, Homo sapiens
  misc_RNA (1)...(19): siRNA sense strand
gaugagguccuuuaugucu

SEQ ID NO: 282397 - RNA, 19 nt, Homo sapiens
  misc_RNA (1)...(19): siRNA sense strand
ggucaguguauauuacuuu

SEQ ID NO: 282398 - RNA, 19 nt, Homo sapiens
  misc_RNA (1)...(19): siRNA sense strand
gucagcaucugcaagaaug

SEQ ID NO: 282399 - RNA, 19 nt, Homo sapiens
  misc_RNA (1)...(19): siRNA sense strand
uaacacuacuuugaucauc

SEQ ID NO: 282400 - RNA, 19 nt, Homo sapiens
  misc_RNA (1)...(19): siRNA sense strand
gaaaucuugucccuuaucc

SEQ ID NO: 282401 - RNA, 19 nt, Homo sapiens
  misc_RNA (1)...(19): siRNA sense strand
guguucacauugauaaaga

SEQ ID NO: 282402 - RNA, 19 nt, Homo sapiens
  misc_RNA (1)...(19): siRNA sense strand
gagauaauggaacaacaau

SEQ ID NO: 282403 - RNA, 19 nt, Homo sapiens
  misc_RNA (1)...(19): siRNA sense strand
uggaacagauggagauucu

SEQ ID NO: 282404 - RNA, 19 nt, Homo sapiens
  misc_RNA (1)...(19): siRNA sense strand
ugagacauuuguggacauu

SEQ ID NO: 282405 - RNA, 19 nt, Homo sapiens
  misc_RNA (1)...(19): siRNA sense strand
gaaggcaugcacccaaauc

SEQ ID NO: 282406 - RNA, 19 nt, Homo sapiens
  misc_RNA (1)...(19): siRNA sense strand
agacaagugcaauaugauu

SEQ ID NO: 282407 - RNA, 19 nt, Homo sapiens
  misc_RNA (1)...(19): siRNA sense strand
caaugccggcuucuguaua

SEQ ID NO: 282408 - RNA, 19 nt, Homo sapiens
  misc_RNA (1)...(19): siRNA sense strand
ugaacgagaccaaucuguu

SEQ ID NO: 282409 - RNA, 19 nt, Homo sapiens
  misc_RNA (1)...(19): siRNA sense strand
ugaaagagcaccccucauu

SEQ ID NO: 282410 - RNA, 19 nt, Homo sapiens
  misc_RNA (1)...(19): siRNA sense strand
gaagaaaauuguguuaagg

SEQ ID NO: 282411 - RNA, 19 nt, Homo sapiens
  misc_RNA (1)...(19): siRNA sense strand
aggaagaccaugagacauu

SEQ ID NO: 282412 - RNA, 19 nt, Homo sapiens
  misc_RNA (1)...(19): siRNA sense strand
cugccugccuuucgguaua

SEQ ID NO: 282413 - RNA, 19 nt, Homo sapiens
  misc_RNA (1)...(19): siRNA sense strand
ugagguccuuuaugucuuc

SEQ ID NO: 282414 - RNA, 19 nt, Homo sapiens
  misc_RNA (1)...(19): siRNA sense strand
aaaugggacuaaugaugga

SEQ ID NO: 282415 - RNA, 19 nt, Homo sapiens
  misc_RNA (1)...(19): siRNA sense strand
ugaagucuaugauuaacac

SEQ ID NO: 282416 - RNA, 19 nt, Homo sapiens
  misc_RNA (1)...(19): siRNA sense strand
cagaugagagguuuguuuc

SEQ ID NO: 282417 - RNA, 19 nt, Homo sapiens
  misc_RNA (1)...(19): siRNA sense strand
agacaaugccggcuucugu

SEQ ID NO: 282418 - RNA, 19 nt, Homo sapiens
  misc_RNA (1)...(19): siRNA sense strand
gcacccaucauuaugucuu

SEQ ID NO: 282419 - RNA, 19 nt, Homo sapiens
  misc_RNA (1)...(19): siRNA sense strand
ucaggaagaccaugagaca

SEQ ID NO: 282420 - RNA, 19 nt, Homo sapiens
  misc_RNA (1)...(19): siRNA sense strand
cacccaucauuaugucuuu

SEQ ID NO: 282421 - RNA, 19 nt, Homo sapiens
  misc_RNA (1)...(19): siRNA sense strand
aaccaaagaugagguccuu

SEQ ID NO: 282422 - RNA, 19 nt, Homo sapiens
  misc_RNA (1)...(19): siRNA sense strand
ugagaguguucacauugau

SEQ ID NO: 282423 - RNA, 19 nt, Homo sapiens
  misc_RNA (1)...(19): siRNA sense strand
gaagaccaugagacauuug

SEQ ID NO: 282424 - RNA, 19 nt, Homo sapiens
  misc_RNA (1)...(19): siRNA sense strand
gauaacagacaagugcaau

SEQ ID NO: 282425 - RNA, 19 nt, Homo sapiens
  misc_RNA (1)...(19): siRNA sense strand
ucaccaacauacccuacau

SEQ ID NO: 282426 - RNA, 19 nt, Homo sapiens
  misc_RNA (1)...(19): siRNA sense strand
ugaaacgggagacauuaga

SEQ ID NO: 282427 - RNA, 19 nt, Homo sapiens
  misc_RNA (1)...(19): siRNA sense strand
caucgaggccauguugaaa

SEQ ID NO: 282428 - RNA, 19 nt, Homo sapiens
  misc_RNA (1)...(19): siRNA sense strand
ucaaugagaguguucacau

SEQ ID NO: 282429 - RNA, 19 nt, Homo sapiens
  misc_RNA (1)...(19): siRNA sense strand
ggccgaugcugcuucuaca

SEQ ID NO: 282430 - RNA, 19 nt, Homo sapiens
  misc_RNA (1)...(19): siRNA sense strand
ugucuucccaucugacuuu

SEQ ID NO: 282431 - RNA, 19 nt, Homo sapiens
  misc_RNA (1)...(19): siRNA sense strand
ggauaacagacaagugcaa

SEQ ID NO: 282432 - RNA, 19 nt, Homo sapiens
  misc_RNA (1)...(19): siRNA sense strand
agaguguucacauugauaa

SEQ ID NO: 282433 - RNA, 19 nt, Homo sapiens
  misc_RNA (1)...(19): siRNA sense strand
aacauacccuacaucauca

SEQ ID NO: 282434 - RNA, 19 nt, Homo sapiens
  misc_RNA (1)...(19): siRNA sense strand
caauuuggagauaauggaa

SEQ ID NO: 282435 - RNA, 19 nt, Homo sapiens
  misc_RNA (1)...(19): siRNA sense strand
gcaaaggacagggauccau

SEQ ID NO: 282436 - RNA, 19 nt, Homo sapiens
  misc_RNA (1)...(19): siRNA sense strand
uuguggacauuaauccuuu

SEQ ID NO: 282437 - RNA, 19 nt, Homo sapiens
  misc_RNA (1)...(19): siRNA sense strand
uaauggaacagauggagau

SEQ ID NO: 282438 - RNA, 19 nt, Homo sapiens
  misc_RNA (1)...(19): siRNA sense strand
gaccagaguaucgagaaga

SEQ ID NO: 282439 - RNA, 19 nt, Homo sapiens
  misc_RNA (1)...(19): siRNA sense strand
gggcuacaaagaugaaauc

SEQ ID NO: 282440 - RNA, 19 nt, Homo sapiens
  misc_RNA (1)...(19): siRNA sense strand
gaaagagcaccccucauuc

SEQ ID NO: 282441 - RNA, 19 nt, Homo sapiens
  misc_RNA (1)...(19): siRNA sense strand
ggcgcuggguguguucuuu

SEQ ID NO: 282442 - RNA, 19 nt, Homo sapiens
  misc_RNA (1)...(19): siRNA sense strand
augagaguguucacauuga

SEQ ID NO: 282443 - RNA, 19 nt, Homo sapiens
  misc_RNA (1)...(19): siRNA sense strand
gagguuccaaaucaacauu

SEQ ID NO: 282444 - RNA, 19 nt, Homo sapiens
  misc_RNA (1)...(19): siRNA sense strand
gcacccaaaucaggaagac

SEQ ID NO: 282445 - RNA, 19 nt, Homo sapiens
  misc_RNA (1)...(19): siRNA sense strand
aaugauggagacuauguuu

SEQ ID NO: 282446 - RNA, 19 nt, Homo sapiens
  misc_RNA (1)...(19): siRNA sense strand
cuaaugauggagacuaugu

SEQ ID NO: 282447 - RNA, 19 nt, Homo sapiens
  misc_RNA (1)...(19): siRNA sense strand
gugcacccaucauuauguc

SEQ ID NO: 282448 - RNA, 19 nt, Homo sapiens
  misc_RNA (1)...(19): siRNA sense strand
gagggaacagcggaugaaa

SEQ ID NO: 282449 - RNA, 19 nt, Homo sapiens
  misc_RNA (1)...(19): siRNA sense strand
accagaguaucgagaagaa

SEQ ID NO: 282450 - RNA, 19 nt, Homo sapiens
  misc_RNA (1)...(19): siRNA sense strand
auaaaguuccugcagaaau

SEQ ID NO: 282451 - RNA, 19 nt, Homo sapiens
  misc_RNA (1)...(19): siRNA sense strand
ucauggcgcuggguguguu

SEQ ID NO: 282452 - RNA, 19 nt, Homo sapiens
  misc_RNA (1)...(19): siRNA sense strand
gaacauaucugaaggaucu

SEQ ID NO: 282453 - RNA, 19 nt, Homo sapiens
  misc_RNA (1)...(19): siRNA sense strand
aagaagaacucacaaggua

SEQ ID NO: 282454 - RNA, 19 nt, Homo sapiens
  misc_RNA (1)...(19): siRNA sense strand
gcacguuguuguuaaguuu

SEQ ID NO: 282455 - RNA, 19 nt, Homo sapiens
  misc_RNA (1)...(19): siRNA sense strand
caaagcacguuguuguuaa

SEQ ID NO: 282456 - RNA, 19 nt, Homo sapiens
  misc_RNA (1)...(19): siRNA sense strand
gaacaucaugccuucuuua

SEQ ID NO: 282457 - RNA, 19 nt, Homo sapiens
  misc_RNA (1)...(19): siRNA sense strand
gagaaucaguugucuggaa

SEQ ID NO: 282458 - RNA, 19 nt, Homo sapiens
  misc_RNA (1)...(19): siRNA sense strand
ugaaggaucucgaaguuau

SEQ ID NO: 282459 - RNA, 19 nt, Homo sapiens
  misc_RNA (1)...(19): siRNA sense strand
cagcgcagcucucuugauu

SEQ ID NO: 282460 - RNA, 19 nt, Homo sapiens
  misc_RNA (1)...(19): siRNA sense strand
gcgcagcucucuugauuuc

SEQ ID NO: 282461 - RNA, 19 nt, Homo sapiens
  misc_RNA (1)...(19): siRNA sense strand
gaaaccugcugaggaaauu

SEQ ID NO: 282462 - RNA, 19 nt, Homo sapiens
  misc_RNA (1)...(19): siRNA sense strand
ugaucaagauggagaauuu

SEQ ID NO: 282463 - RNA, 19 nt, Homo sapiens
  misc_RNA (1)...(19): siRNA sense strand
ugauaaagcguacuucaua

SEQ ID NO: 282464 - RNA, 19 nt, Homo sapiens
  misc_RNA (1)...(19): siRNA sense strand
cagcagagcaccagccuua

SEQ ID NO: 282465 - RNA, 19 nt, Homo sapiens
  misc_RNA (1)...(19): siRNA sense strand
acacacaacuccaagaaga

SEQ ID NO: 282466 - RNA, 19 nt, Homo sapiens
  misc_RNA (1)...(19): siRNA sense strand
gaacuucugcagagacuuu

SEQ ID NO: 282467 - RNA, 19 nt, Homo sapiens
  misc_RNA (1)...(19): siRNA sense strand
caaggcagguugacgugua

SEQ ID NO: 282468 - RNA, 19 nt, Homo sapiens
  misc_RNA (1)...(19): siRNA sense strand
gaagcagguucucgacuau

SEQ ID NO: 282469 - RNA, 19 nt, Homo sapiens
  misc_RNA (1)...(19): siRNA sense strand
auaagaaggugcaguuuga

SEQ ID NO: 282470 - RNA, 19 nt, Homo sapiens
  misc_RNA (1)...(19): siRNA sense strand
gauaaagcguacuucauag

SEQ ID NO: 282471 - RNA, 19 nt, Homo sapiens
  misc_RNA (1)...(19): siRNA sense strand
ccaaagcacguuguuguua

SEQ ID NO: 282472 - RNA, 19 nt, Homo sapiens
  misc_RNA (1)...(19): siRNA sense strand
gauaggacccagcagagua

SEQ ID NO: 282473 - RNA, 19 nt, Homo sapiens
  misc_RNA (1)...(19): siRNA sense strand
gaaaggaagcacagcaaga

SEQ ID NO: 282474 - RNA, 19 nt, Homo sapiens
  misc_RNA (1)...(19): siRNA sense strand
ggacagagagcacuuagca

SEQ ID NO: 282475 - RNA, 19 nt, Homo sapiens
  misc_RNA (1)...(19): siRNA sense strand
gaaauugagcaacgacuug

SEQ ID NO: 282476 - RNA, 19 nt, Homo sapiens
  misc_RNA (1)...(19): siRNA sense strand
gcaccagccuuacauuugg

SEQ ID NO: 282477 - RNA, 19 nt, Homo sapiens
  misc_RNA (1)...(19): siRNA sense strand
ucaacgacguccugcuaua

SEQ ID NO: 282478 - RNA, 19 nt, Homo sapiens
  misc_RNA (1)...(19): siRNA sense strand
cgaguuuccugaucacaaa

SEQ ID NO: 282479 - RNA, 19 nt, Homo sapiens
  misc_RNA (1)...(19): siRNA sense strand
acagcaagauucauucuau

SEQ ID NO: 282480 - RNA, 19 nt, Homo sapiens
  misc_RNA (1)...(19): siRNA sense strand
ccagaaagacuacguguuc

SEQ ID NO: 282481 - RNA, 19 nt, Homo sapiens
  misc_RNA (1)...(19): siRNA sense strand
gguccgagauggagaagug

SEQ ID NO: 282482 - RNA, 19 nt, Homo sapiens
  misc_RNA (1)...(19): siRNA sense strand
gaggaggucguuaaggaua

SEQ ID NO: 282483 - RNA, 19 nt, Homo sapiens
  misc_RNA (1)...(19): siRNA sense strand
ggacggacgaugaggauga

SEQ ID NO: 282484 - RNA, 19 nt, Homo sapiens
  misc_RNA (1)...(19): siRNA sense strand
ccgagaacauccagaaaga

SEQ ID NO: 282485 - RNA, 19 nt, Homo sapiens
  misc_RNA (1)...(19): siRNA sense strand
guacgaugaucaagaugga

SEQ ID NO: 282486 - RNA, 19 nt, Homo sapiens
  misc_RNA (1)...(19): siRNA sense strand
ccauugaccuggcggagaa

SEQ ID NO: 282487 - RNA, 19 nt, Homo sapiens
  misc_RNA (1)...(19): siRNA sense strand
gagcaccagccuuacauuu

SEQ ID NO: 282488 - RNA, 19 nt, Homo sapiens
  misc_RNA (1)...(19): siRNA sense strand
ggacaaacaccagcagaau

SEQ ID NO: 282489 - RNA, 19 nt, Homo sapiens
  misc_RNA (1)...(19): siRNA sense strand
aggaagcgcuuucucauca

SEQ ID NO: 282490 - RNA, 19 nt, Homo sapiens
  misc_RNA (1)...(19): siRNA sense strand
caucaugccuucuuuagac

SEQ ID NO: 282491 - RNA, 19 nt, Homo sapiens
  misc_RNA (1)...(19): siRNA sense strand
guaccaggauaccuuggaa

SEQ ID NO: 282492 - RNA, 19 nt, Homo sapiens
  misc_RNA (1)...(19): siRNA sense strand
agaaucaguugucuggaaa

SEQ ID NO: 282493 - RNA, 19 nt, Homo sapiens
  misc_RNA (1)...(19): siRNA sense strand
acagagagcacuuagcaaa

SEQ ID NO: 282494 - RNA, 19 nt, Homo sapiens
  misc_RNA (1)...(19): siRNA sense strand
ucugaaggaucucgaaguu

SEQ ID NO: 282495 - RNA, 19 nt, Homo sapiens
  misc_RNA (1)...(19): siRNA sense strand
gcaggccucucccuugauc

SEQ ID NO: 282496 - RNA, 19 nt, Homo sapiens
  misc_RNA (1)...(19): siRNA sense strand
gcgaugucaugcugaagaa

SEQ ID NO: 282497 - RNA, 19 nt, Homo sapiens
  misc_RNA (1)...(19): siRNA sense strand
aagcguacuucauagcuaa

SEQ ID NO: 282498 - RNA, 19 nt, Homo sapiens
  misc_RNA (1)...(19): siRNA sense strand
gcccaagcccguccucuuu

SEQ ID NO: 282499 - RNA, 19 nt, Homo sapiens
  misc_RNA (1)...(19): siRNA sense strand
gaaguggguugaggacauc

SEQ ID NO: 282500 - RNA, 19 nt, Homo sapiens
  misc_RNA (1)...(19): siRNA sense strand
gaagagauucccaacugau

SEQ ID NO: 282501 - RNA, 19 nt, Homo sapiens
  misc_RNA (1)...(19): siRNA sense strand
aagcaggccucucccuuga

SEQ ID NO: 282502 - RNA, 19 nt, Homo sapiens
  misc_RNA (1)...(19): siRNA sense strand
ucucgacuauguuaaagaa

SEQ ID NO: 282503 - RNA, 19 nt, Homo sapiens
  misc_RNA (1)...(19): siRNA sense strand
uaagaucaaugccuucaac

SEQ ID NO: 282504 - RNA, 19 nt, Homo sapiens
  misc_RNA (1)...(19): siRNA sense strand
ggaaaccugcugaggaaau

SEQ ID NO: 282505 - RNA, 19 nt, Homo sapiens
  misc_RNA (1)...(19): siRNA sense strand
cuggaaaccugcugaggaa

SEQ ID NO: 282506 - RNA, 19 nt, Homo sapiens
  misc_RNA (1)...(19): siRNA sense strand
gagauucccaacugauaaa

SEQ ID NO: 282507 - RNA, 19 nt, Homo sapiens
  misc_RNA (1)...(19): siRNA sense strand
ccaggaggcauuugaaguu

SEQ ID NO: 282508 - RNA, 19 nt, Homo sapiens
  misc_RNA (1)...(19): siRNA sense strand
aaagaaggaggacauaaga

SEQ ID NO: 282509 - RNA, 19 nt, Homo sapiens
  misc_RNA (1)...(19): siRNA sense strand
ugaacaucaugccuucuuu

SEQ ID NO: 282510 - RNA, 19 nt, Homo sapiens
  misc_RNA (1)...(19): siRNA sense strand
ggcuagagauguauggaau

SEQ ID NO: 282511 - RNA, 19 nt, Homo sapiens
  misc_RNA (1)...(19): siRNA sense strand
gcaucgcaguggagaauca

SEQ ID NO: 282512 - RNA, 19 nt, Homo sapiens
  misc_RNA (1)...(19): siRNA sense strand
uggcagagaucacggagau

SEQ ID NO: 282513 - RNA, 19 nt, Homo sapiens
  misc_RNA (1)...(19): siRNA sense strand
ggaaauugagcaacgacuu

SEQ ID NO: 282514 - RNA, 19 nt, Homo sapiens
  misc_RNA (1)...(19): siRNA sense strand
gacauaagaaggugcaguu

SEQ ID NO: 282515 - RNA, 19 nt, Homo sapiens
  misc_RNA (1)...(19): siRNA sense strand
ggaagcgcuuucucaucaa

SEQ ID NO: 282516 - RNA, 19 nt, Homo sapiens
  misc_RNA (1)...(19): siRNA sense strand
cacgggaauucuaguguuu

SEQ ID NO: 282517 - RNA, 19 nt, Homo sapiens
  misc_RNA (1)...(19): siRNA sense strand
ccacacacaacuccaagaa

SEQ ID NO: 282518 - RNA, 19 nt, Homo sapiens
  misc_RNA (1)...(19): siRNA sense strand
gaacauccagaaagacuac

SEQ ID NO: 282519 - RNA, 19 nt, Homo sapiens
  misc_RNA (1)...(19): siRNA sense strand
gaagaggaggaggucguua

SEQ ID NO: 282520 - RNA, 19 nt, Homo sapiens
  misc_RNA (1)...(19): siRNA sense strand
uaaagaaggaggacauaag

SEQ ID NO: 282521 - RNA, 19 nt, Homo sapiens
  misc_RNA (1)...(19): siRNA sense strand
uugaagagcccaaaccaaa

SEQ ID NO: 282522 - RNA, 19 nt, Homo sapiens
  misc_RNA (1)...(19): siRNA sense strand
uaaccacauuggacaaaca

SEQ ID NO: 282523 - RNA, 19 nt, Homo sapiens
  misc_RNA (1)...(19): siRNA sense strand
gaaagguggauggaaguga

SEQ ID NO: 282524 - RNA, 19 nt, Homo sapiens
  misc_RNA (1)...(19): siRNA sense strand
ucaagucccacgucuacua

SEQ ID NO: 282525 - RNA, 19 nt, Homo sapiens
  misc_RNA (1)...(19): siRNA sense strand
ugcacgaacucaagaaaga

SEQ ID NO: 282526 - RNA, 19 nt, Homo sapiens
  misc_RNA (1)...(19): siRNA sense strand
aaagcguacuucauagcua

SEQ ID NO: 282527 - RNA, 19 nt, Homo sapiens
  misc_RNA (1)...(19): siRNA sense strand
aggaggaggucguuaagga

SEQ ID NO: 282528 - RNA, 19 nt, Homo sapiens
  misc_RNA (1)...(19): siRNA sense strand
ggaagcacagcaagauuca

SEQ ID NO: 282529 - RNA, 19 nt, Homo sapiens
  misc_RNA (1)...(19): siRNA sense strand
gaagcgcuuucucaucaag

SEQ ID NO: 282530 - RNA, 19 nt, Homo sapiens
  misc_RNA (1)...(19): siRNA sense strand
acaaacaccagcagaauca

SEQ ID NO: 282531 - RNA, 19 nt, Homo sapiens
  misc_RNA (1)...(19): siRNA sense strand
gcagguugacguguaauga

SEQ ID NO: 282532 - RNA, 19 nt, Homo sapiens
  misc_RNA (1)...(19): siRNA sense strand
ucuauggcaugacgauuga

SEQ ID NO: 282533 - RNA, 19 nt, Homo sapiens
  misc_RNA (1)...(19): siRNA sense strand
guucaacgacguccugcua

SEQ ID NO: 282534 - RNA, 19 nt, Homo sapiens
  misc_RNA (1)...(19): siRNA sense strand
caaaugcccaaaucagaga

SEQ ID NO: 282535 - RNA, 19 nt, Homo sapiens
  misc_RNA (1)...(19): siRNA sense strand
caacugauaaagcguacuu

SEQ ID NO: 282536 - RNA, 19 nt, Homo sapiens
  misc_RNA (1)...(19): siRNA sense strand
uggagaaggugccgaaucu

SEQ ID NO: 282537 - RNA, 19 nt, Homo sapiens
  misc_RNA (1)...(19): siRNA sense strand
cgacuauguuaaagaagga

SEQ ID NO: 282538 - RNA, 19 nt, Homo sapiens
  misc_RNA (1)...(19): siRNA sense strand
uuucaggguuucacuaaga

SEQ ID NO: 282539 - RNA, 19 nt, Homo sapiens
  misc_RNA (1)...(19): siRNA sense strand
ggccaaagcacguuguugu

SEQ ID NO: 282540 - RNA, 19 nt, Homo sapiens
  misc_RNA (1)...(19): siRNA sense strand
ucacaaacuucugccuguu

SEQ ID NO: 282541 - RNA, 19 nt, Homo sapiens
  misc_RNA (1)...(19): siRNA sense strand
caaggaaauugagcaacga

SEQ ID NO: 282542 - RNA, 19 nt, Homo sapiens
  misc_RNA (1)...(19): siRNA sense strand
gcgaacauaucugaaggau

SEQ ID NO: 282543 - RNA, 19 nt, Homo sapiens
  misc_RNA (1)...(19): siRNA sense strand
cauaagaaggugcaguuug

SEQ ID NO: 282544 - RNA, 19 nt, Homo sapiens
  misc_RNA (1)...(19): siRNA sense strand
cagguucucgacuauguua

SEQ ID NO: 282545 - RNA, 19 nt, Homo sapiens
  misc_RNA (1)...(19): siRNA sense strand
gaaagacuacguguucaag

SEQ ID NO: 282546 - RNA, 19 nt, Homo sapiens
  misc_RNA (1)...(19): siRNA sense strand
caagaagaacucacaaggu

SEQ ID NO: 282547 - RNA, 19 nt, Homo sapiens
  misc_RNA (1)...(19): siRNA sense strand
aaagguggauggaagugau

SEQ ID NO: 282548 - RNA, 19 nt, Homo sapiens
  misc_RNA (1)...(19): siRNA sense strand
gcagagcaccagccuuaca

SEQ ID NO: 282549 - RNA, 19 nt, Homo sapiens
  misc_RNA (1)...(19): siRNA sense strand
ucucuugauuucacacauu

SEQ ID NO: 282550 - RNA, 19 nt, Homo sapiens
  misc_RNA (1)...(19): siRNA sense strand
cagcaagauucauucuauc

SEQ ID NO: 282551 - RNA, 19 nt, Homo sapiens
  misc_RNA (1)...(19): siRNA sense strand
aauagugcguaccaggaua

SEQ ID NO: 282552 - RNA, 19 nt, Homo sapiens
  misc_RNA (1)...(19): siRNA sense strand
gaaaggagaagaacacugu

SEQ ID NO: 282553 - RNA, 19 nt, Homo sapiens
  misc_RNA (1)...(19): siRNA sense strand
caugagagcccuaggauuu

SEQ ID NO: 282554 - RNA, 19 nt, Homo sapiens
  misc_RNA (1)...(19): siRNA sense strand
gaagaacacuguggacauc

SEQ ID NO: 282555 - RNA, 19 nt, Homo sapiens
  misc_RNA (1)...(19): siRNA sense strand
gaacacuguggacaucuaa

SEQ ID NO: 282556 - RNA, 19 nt, Homo sapiens
  misc_RNA (1)...(19): siRNA sense strand
ugagagcccuaggauuuaa

SEQ ID NO: 282557 - RNA, 19 nt, Homo sapiens
  misc_RNA (1)...(19): siRNA sense strand
agaacacuguggacaucua

SEQ ID NO: 282558 - RNA, 19 nt, Homo sapiens
  misc_RNA (1)...(19): siRNA sense strand
gcaugagagcccuaggauu

SEQ ID NO: 282559 - RNA, 19 nt, Homo sapiens
  misc_RNA (1)...(19): siRNA sense strand
acacuguggacaucuaauu

SEQ ID NO: 282560 - RNA, 19 nt, Homo sapiens
  misc_RNA (1)...(19): siRNA sense strand
caucgagaaaggagaagaa

SEQ ID NO: 282561 - RNA, 19 nt, Homo sapiens
  misc_RNA (1)...(19): siRNA sense strand
uaucaucgagaaaggagaa

SEQ ID NO: 282562 - RNA, 19 nt, Homo sapiens
  misc_RNA (1)...(19): siRNA sense strand
cgagaaaggagaagaacac

SEQ ID NO: 282563 - RNA, 19 nt, Homo sapiens
  misc_RNA (1)...(19): siRNA sense strand
gagagcccuaggauuuaaa

SEQ ID NO: 282564 - RNA, 19 nt, Homo sapiens
  misc_RNA (1)...(19): siRNA sense strand
agaagaacacuguggacau

SEQ ID NO: 282565 - RNA, 19 nt, Homo sapiens
  misc_RNA (1)...(19): siRNA sense strand
gagaagggacaagcagaua

SEQ ID NO: 282566 - RNA, 19 nt, Homo sapiens
  misc_RNA (1)...(19): siRNA sense strand
gaugaaccccggauauuua

SEQ ID NO: 282567 - RNA, 19 nt, Homo sapiens
  misc_RNA (1)...(19): siRNA sense strand
gauaagcgcaagcccauca

SEQ ID NO: 282568 - RNA, 19 nt, Homo sapiens
  misc_RNA (1)...(19): siRNA sense strand
ccacaaucauaaccagaga

SEQ ID NO: 282569 - RNA, 19 nt, Homo sapiens
  misc_RNA (1)...(19): siRNA sense strand
uccaugggcuccacaagaa

SEQ ID NO: 282570 - RNA, 19 nt, Homo sapiens
  misc_RNA (1)...(19): siRNA sense strand
ggaaauaccaacuuuaccu

SEQ ID NO: 282571 - RNA, 19 nt, Homo sapiens
  misc_RNA (1)...(19): siRNA sense strand
gaagggacaagcagauaag

SEQ ID NO: 282572 - RNA, 19 nt, Homo sapiens
  misc_RNA (1)...(19): siRNA sense strand
ggagaagggacaagcagau

SEQ ID NO: 282573 - RNA, 19 nt, Homo sapiens
  misc_RNA (1)...(19): siRNA sense strand
agacagugaugccgcuuca

SEQ ID NO: 282574 - RNA, 19 nt, Homo sapiens
  misc_RNA (1)...(19): siRNA sense strand
ucaccagcauugcacucua

SEQ ID NO: 282575 - RNA, 19 nt, Homo sapiens
  misc_RNA (1)...(19): siRNA sense strand
cagcuucuccuacggauuc

SEQ ID NO: 282576 - RNA, 19 nt, Homo sapiens
  misc_RNA (1)...(19): siRNA sense strand
cagcauugcacucuacuuc

SEQ ID NO: 282577 - RNA, 19 nt, Homo sapiens
  misc_RNA (1)...(19): siRNA sense strand
uaaagucugcaacaucguu

SEQ ID NO: 282578 - RNA, 19 nt, Homo sapiens
  misc_RNA (1)...(19): siRNA sense strand
agaagggacaagcagauaa

SEQ ID NO: 282579 - RNA, 19 nt, Homo sapiens
  misc_RNA (1)...(19): siRNA sense strand
gagaggggcagcaauuuug

SEQ ID NO: 282580 - RNA, 19 nt, Homo sapiens
  misc_RNA (1)...(19): siRNA sense strand
caccagcauugcacucuac

SEQ ID NO: 282581 - RNA, 19 nt, Homo sapiens
  misc_RNA (1)...(19): siRNA sense strand
gauccugccucagcuucuc

SEQ ID NO: 282582 - RNA, 19 nt, Homo sapiens
  misc_RNA (1)...(19): siRNA sense strand
gaagaaguguugaagaaga

SEQ ID NO: 282583 - RNA, 19 nt, Homo sapiens
  misc_RNA (1)...(19): siRNA sense strand
caagaaggaugaagaagug

SEQ ID NO: 282584 - RNA, 19 nt, Homo sapiens
  misc_RNA (1)...(19): siRNA sense strand
uaaagaaugugaagcacuu

SEQ ID NO: 282585 - RNA, 19 nt, Homo sapiens
  misc_RNA (1)...(19): siRNA sense strand
ggacgagugugacaagaug

SEQ ID NO: 282586 - RNA, 19 nt, Homo sapiens
  misc_RNA (1)...(19): siRNA sense strand
ggauuacgaugaagaggaa

SEQ ID NO: 282587 - RNA, 19 nt, Homo sapiens
  misc_RNA (1)...(19): siRNA sense strand
gagaagcagugcaugaugu

SEQ ID NO: 282588 - RNA, 19 nt, Homo sapiens
  misc_RNA (1)...(19): siRNA sense strand
caaggaauaugagcgcuuu

SEQ ID NO: 282589 - RNA, 19 nt, Homo sapiens
  misc_RNA (1)...(19): siRNA sense strand
gagucaacaucgucuuuaa

SEQ ID NO: 282590 - RNA, 19 nt, Homo sapiens
  misc_RNA (1)...(19): siRNA sense strand
aaaucgacaucuccacaua

SEQ ID NO: 282591 - RNA, 19 nt, Homo sapiens
  misc_RNA (1)...(19): siRNA sense strand
uggaugugcuggaguuuaa

SEQ ID NO: 282592 - RNA, 19 nt, Homo sapiens
  misc_RNA (1)...(19): siRNA sense strand
caggaccgguuugaaguua

SEQ ID NO: 282593 - RNA, 19 nt, Homo sapiens
  misc_RNA (1)...(19): siRNA sense strand
gguggucucuccaucaaga

SEQ ID NO: 282594 - RNA, 19 nt, Homo sapiens
  misc_RNA (1)...(19): siRNA sense strand
caaggugucuguguucuuc

SEQ ID NO: 282595 - RNA, 19 nt, Homo sapiens
  misc_RNA (1)...(19): siRNA sense strand
ugacgagaaugaugccaaa

SEQ ID NO: 282596 - RNA, 19 nt, Homo sapiens
  misc_RNA (1)...(19): siRNA sense strand
uaucagcaguucaaggauu

SEQ ID NO: 282597 - RNA, 19 nt, Homo sapiens
  misc_RNA (1)...(19): siRNA sense strand
ucaaagacagugagaagaa

SEQ ID NO: 282598 - RNA, 19 nt, Homo sapiens
  misc_RNA (1)...(19): siRNA sense strand
cuucugagguccagcauga

SEQ ID NO: 282599 - RNA, 19 nt, Homo sapiens
  misc_RNA (1)...(19): siRNA sense strand
gaaggaugaagaaguguug

SEQ ID NO: 282600 - RNA, 19 nt, Homo sapiens
  misc_RNA (1)...(19): siRNA sense strand
ggaccgguuugaaguuaau

SEQ ID NO: 282601 - RNA, 19 nt, Homo sapiens
  misc_RNA (1)...(19): siRNA sense strand
caacaucgucuuuaacuac

SEQ ID NO: 282602 - RNA, 19 nt, Homo sapiens
  misc_RNA (1)...(19): siRNA sense strand
augaagaaguguugaagaa

SEQ ID NO: 282603 - RNA, 19 nt, Homo sapiens
  misc_RNA (1)...(19): siRNA sense strand
gauaaucuucgucaaguca

SEQ ID NO: 282604 - RNA, 19 nt, Homo sapiens
  misc_RNA (1)...(19): siRNA sense strand
ucaacaucgucuuuaacua

SEQ ID NO: 282605 - RNA, 19 nt, Homo sapiens
  misc_RNA (1)...(19): siRNA sense strand
gcuaucagcaguucaagga

SEQ ID NO: 282606 - RNA, 19 nt, Homo sapiens
  misc_RNA (1)...(19): siRNA sense strand
gcuuugagcauccuucuga

SEQ ID NO: 282607 - RNA, 19 nt, Homo sapiens
  misc_RNA (1)...(19): siRNA sense strand
gugauaaucuucgucaagu

SEQ ID NO: 282608 - RNA, 19 nt, Homo sapiens
  misc_RNA (1)...(19): siRNA sense strand
aagaaguguugaagaagaa

SEQ ID NO: 282609 - RNA, 19 nt, Homo sapiens
  misc_RNA (1)...(19): siRNA sense strand
guacuacgucaaacucaaa

SEQ ID NO: 282610 - RNA, 19 nt, Homo sapiens
  misc_RNA (1)...(19): siRNA sense strand
gcucuuugaucucuuggau

SEQ ID NO: 282611 - RNA, 19 nt, Homo sapiens
  misc_RNA (1)...(19): siRNA sense strand
gaugaagaaguguugaaga

SEQ ID NO: 282612 - RNA, 19 nt, Homo sapiens
  misc_RNA (1)...(19): siRNA sense strand
gaguuuaaccaggugauaa

SEQ ID NO: 282613 - RNA, 19 nt, Homo sapiens
  misc_RNA (1)...(19): siRNA sense strand
gcagcaguacuacgucaaa

SEQ ID NO: 282614 - RNA, 19 nt, Homo sapiens
  misc_RNA (1)...(19): siRNA sense strand
gagcuucagccuaaagaau

SEQ ID NO: 282615 - RNA, 19 nt, Homo sapiens
  misc_RNA (1)...(19): siRNA sense strand
caucguggacuguggcuuu

SEQ ID NO: 282616 - RNA, 19 nt, Homo sapiens
  misc_RNA (1)...(19): siRNA sense strand
gauccuacguuuccaucca

SEQ ID NO: 282617 - RNA, 19 nt, Homo sapiens
  misc_RNA (1)...(19): siRNA sense strand
cgacaucuccacauacauc

SEQ ID NO: 282618 - RNA, 19 nt, Homo sapiens
  misc_RNA (1)...(19): siRNA sense strand
ggaguuuaaccaggugaua

SEQ ID NO: 282619 - RNA, 19 nt, Homo sapiens
  misc_RNA (1)...(19): siRNA sense strand
gaaaucgacaucuccacau

SEQ ID NO: 282620 - RNA, 19 nt, Homo sapiens
  misc_RNA (1)...(19): siRNA sense strand
ggacaucgagcgagucaac

SEQ ID NO: 282621 - RNA, 19 nt, Homo sapiens
  misc_RNA (1)...(19): siRNA sense strand
uuaaccaggugauaaucuu

SEQ ID NO: 282622 - RNA, 19 nt, Homo sapiens
  misc_RNA (1)...(19): siRNA sense strand
ucuuugaucucuuggaugu

SEQ ID NO: 282623 - RNA, 19 nt, Homo sapiens
  misc_RNA (1)...(19): siRNA sense strand
cgagucaacaucgucuuua

SEQ ID NO: 282624 - RNA, 19 nt, Homo sapiens
  misc_RNA (1)...(19): siRNA sense strand
gcgagucaacaucgucuuu

SEQ ID NO: 282625 - RNA, 19 nt, Homo sapiens
  misc_RNA (1)...(19): siRNA sense strand
ucaagaaggaugaagaagu

SEQ ID NO: 282626 - RNA, 19 nt, Homo sapiens
  misc_RNA (1)...(19): siRNA sense strand
caaagacagugagaagaac

SEQ ID NO: 282627 - RNA, 19 nt, Homo sapiens
  misc_RNA (1)...(19): siRNA sense strand
caucaagggauccuacguu

SEQ ID NO: 282628 - RNA, 19 nt, Homo sapiens
  misc_RNA (1)...(19): siRNA sense strand
cagaggaaaucgacaucuc

SEQ ID NO: 282629 - RNA, 19 nt, Homo sapiens
  misc_RNA (1)...(19): siRNA sense strand
guacaugcccagcgucaag

SEQ ID NO: 282630 - RNA, 19 nt, Homo sapiens
  misc_RNA (1)...(19): siRNA sense strand
gcgucaaggugucuguguu

SEQ ID NO: 282631 - RNA, 19 nt, Homo sapiens
  misc_RNA (1)...(19): siRNA sense strand
gaagaacuguccccauguc

SEQ ID NO: 282632 - RNA, 19 nt, Homo sapiens
  misc_RNA (1)...(19): siRNA sense strand
gcuucagccuaaagaaugu

SEQ ID NO: 282633 - RNA, 19 nt, Homo sapiens
  misc_RNA (1)...(19): siRNA sense strand
gaaccgcaagcucuuugau

SEQ ID NO: 282634 - RNA, 19 nt, Homo sapiens
  misc_RNA (1)...(19): siRNA sense strand
aucaagggauccuacguuu

SEQ ID NO: 282635 - RNA, 19 nt, Homo sapiens
  misc_RNA (1)...(19): siRNA sense strand
gaaugugaagcacuuugug

SEQ ID NO: 282636 - RNA, 19 nt, Homo sapiens
  misc_RNA (1)...(19): siRNA sense strand
ugaaguuaauguggcagaa

SEQ ID NO: 282637 - RNA, 19 nt, Homo sapiens
  misc_RNA (1)...(19): siRNA sense strand
gcaguacuacgucaaacuc

SEQ ID NO: 282638 - RNA, 19 nt, Homo sapiens
  misc_RNA (1)...(19): siRNA sense strand
caagggauccuacguuucc

SEQ ID NO: 282639 - RNA, 19 nt, Homo sapiens
  misc_RNA (1)...(19): siRNA sense strand
ggacuguggcuuugagcau

SEQ ID NO: 282640 - RNA, 19 nt, Homo sapiens
  misc_RNA (1)...(19): siRNA sense strand
gcaagcucuuugaucucuu

SEQ ID NO: 282641 - RNA, 19 nt, Homo sapiens
  misc_RNA (1)...(19): siRNA sense strand
ggagaucuuccgccugaca

SEQ ID NO: 282642 - RNA, 19 nt, Homo sapiens
  misc_RNA (1)...(19): siRNA sense strand
gaucagcaaggaauaugag

SEQ ID NO: 282643 - RNA, 19 nt, Homo sapiens
  misc_RNA (1)...(19): siRNA sense strand
ccaaaggccuagccaucac

SEQ ID NO: 282644 - RNA, 19 nt, Homo sapiens
  misc_RNA (1)...(19): siRNA sense strand
ggugauaaucuucgucaag

SEQ ID NO: 282645 - RNA, 19 nt, Homo sapiens
  misc_RNA (1)...(19): siRNA sense strand
ggcgggaugugcaggagau

SEQ ID NO: 282646 - RNA, 19 nt, Homo sapiens
  misc_RNA (1)...(19): siRNA sense strand
gguccagcaugagugcauu

SEQ ID NO: 282647 - RNA, 19 nt, Homo sapiens
  misc_RNA (1)...(19): siRNA sense strand
cgagaagcagugcaugaug

SEQ ID NO: 282648 - RNA, 19 nt, Homo sapiens
  misc_RNA (1)...(19): siRNA sense strand
ccagaucagcaaggaauau

SEQ ID NO: 282649 - RNA, 19 nt, Homo sapiens
  misc_RNA (1)...(19): siRNA sense strand
cgagaaugaugccaaaauc

SEQ ID NO: 282650 - RNA, 19 nt, Homo sapiens
  misc_RNA (1)...(19): siRNA sense strand
ucgguggucucuccaucaa

SEQ ID NO: 282651 - RNA, 19 nt, Homo sapiens
  misc_RNA (1)...(19): siRNA sense strand
ccaggaccgguuugaaguu

SEQ ID NO: 282652 - RNA, 19 nt, Homo sapiens
  misc_RNA (1)...(19): siRNA sense strand
ggcagaacaggauguggaa

SEQ ID NO: 282653 - RNA, 19 nt, Homo sapiens
  misc_RNA (1)...(19): siRNA sense strand
ggaugaagaaguguugaag

SEQ ID NO: 282654 - RNA, 19 nt, Homo sapiens
  misc_RNA (1)...(19): siRNA sense strand
aucagcaguucaaggauuu

SEQ ID NO: 282655 - RNA, 19 nt, Homo sapiens
  misc_RNA (1)...(19): siRNA sense strand
ucuuggaugugcuggaguu

SEQ ID NO: 282656 - RNA, 19 nt, Homo sapiens
  misc_RNA (1)...(19): siRNA sense strand
uaugagcgcuuuuccaagu

SEQ ID NO: 282657 - RNA, 19 nt, Homo sapiens
  misc_RNA (1)...(19): siRNA sense strand
cacgagaagcagugcauga

SEQ ID NO: 282658 - RNA, 19 nt, Homo sapiens
  misc_RNA (1)...(19): siRNA sense strand
gggaugugcaggagaucuu

SEQ ID NO: 282659 - RNA, 19 nt, Homo sapiens
  misc_RNA (1)...(19): siRNA sense strand
gcagaacaggauguggaaa

SEQ ID NO: 282660 - RNA, 19 nt, Homo sapiens
  misc_RNA (1)...(19): siRNA sense strand
cgcaagcucuuugaucucu

SEQ ID NO: 282661 - RNA, 19 nt, Homo sapiens
  misc_RNA (1)...(19): siRNA sense strand
ggagcuucagccuaaagaa

SEQ ID NO: 282662 - RNA, 19 nt, Homo sapiens
  misc_RNA (1)...(19): siRNA sense strand
gaagaaguguugaagaaga

SEQ ID NO: 282663 - RNA, 19 nt, Homo sapiens
  misc_RNA (1)...(19): siRNA sense strand
caagaaggaugaagaagug

SEQ ID NO: 282664 - RNA, 19 nt, Homo sapiens
  misc_RNA (1)...(19): siRNA sense strand
uaaagaaugugaagcacuu

SEQ ID NO: 282665 - RNA, 19 nt, Homo sapiens
  misc_RNA (1)...(19): siRNA sense strand
ggacgagugugacaagaug

SEQ ID NO: 282666 - RNA, 19 nt, Homo sapiens
  misc_RNA (1)...(19): siRNA sense strand
ggauuacgaugaagaggaa

SEQ ID NO: 282667 - RNA, 19 nt, Homo sapiens
  misc_RNA (1)...(19): siRNA sense strand
gagaagcagugcaugaugu

SEQ ID NO: 282668 - RNA, 19 nt, Homo sapiens
  misc_RNA (1)...(19): siRNA sense strand
caaggaauaugagcgcuuu

SEQ ID NO: 282669 - RNA, 19 nt, Homo sapiens
  misc_RNA (1)...(19): siRNA sense strand
gguggucucuccaucaaga

SEQ ID NO: 282670 - RNA, 19 nt, Homo sapiens
  misc_RNA (1)...(19): siRNA sense strand
caaggugucuguguucuuc

SEQ ID NO: 282671 - RNA, 19 nt, Homo sapiens
  misc_RNA (1)...(19): siRNA sense strand
cuucugagguccagcauga

SEQ ID NO: 282672 - RNA, 19 nt, Homo sapiens
  misc_RNA (1)...(19): siRNA sense strand
gaaggaugaagaaguguug

SEQ ID NO: 282673 - RNA, 19 nt, Homo sapiens
  misc_RNA (1)...(19): siRNA sense strand
augaagaaguguugaagaa

SEQ ID NO: 282674 - RNA, 19 nt, Homo sapiens
  misc_RNA (1)...(19): siRNA sense strand
gcuuugagcauccuucuga

SEQ ID NO: 282675 - RNA, 19 nt, Homo sapiens
  misc_RNA (1)...(19): siRNA sense strand
aagaaguguugaagaagaa

SEQ ID NO: 282676 - RNA, 19 nt, Homo sapiens
  misc_RNA (1)...(19): siRNA sense strand
gaugaagaaguguugaaga

SEQ ID NO: 282677 - RNA, 19 nt, Homo sapiens
  misc_RNA (1)...(19): siRNA sense strand
gagcuucagccuaaagaau

SEQ ID NO: 282678 - RNA, 19 nt, Homo sapiens
  misc_RNA (1)...(19): siRNA sense strand
caucguggacuguggcuuu

SEQ ID NO: 282679 - RNA, 19 nt, Homo sapiens
  misc_RNA (1)...(19): siRNA sense strand
gauccuacguuuccaucca

SEQ ID NO: 282680 - RNA, 19 nt, Homo sapiens
  misc_RNA (1)...(19): siRNA sense strand
ucaagaaggaugaagaagu

SEQ ID NO: 282681 - RNA, 19 nt, Homo sapiens
  misc_RNA (1)...(19): siRNA sense strand
caucaagggauccuacguu

SEQ ID NO: 282682 - RNA, 19 nt, Homo sapiens
  misc_RNA (1)...(19): siRNA sense strand
guacaugcccagcgucaag

SEQ ID NO: 282683 - RNA, 19 nt, Homo sapiens
  misc_RNA (1)...(19): siRNA sense strand
gcgucaaggugucuguguu

SEQ ID NO: 282684 - RNA, 19 nt, Homo sapiens
  misc_RNA (1)...(19): siRNA sense strand
gaagaacuguccccauguc

SEQ ID NO: 282685 - RNA, 19 nt, Homo sapiens
  misc_RNA (1)...(19): siRNA sense strand
gcuucagccuaaagaaugu

SEQ ID NO: 282686 - RNA, 19 nt, Homo sapiens
  misc_RNA (1)...(19): siRNA sense strand
aucaagggauccuacguuu

SEQ ID NO: 282687 - RNA, 19 nt, Homo sapiens
  misc_RNA (1)...(19): siRNA sense strand
gaaugugaagcacuuugug

SEQ ID NO: 282688 - RNA, 19 nt, Homo sapiens
  misc_RNA (1)...(19): siRNA sense strand
caagggauccuacguuucc

SEQ ID NO: 282689 - RNA, 19 nt, Homo sapiens
  misc_RNA (1)...(19): siRNA sense strand
ggagaucuuccgccugaca

SEQ ID NO: 282690 - RNA, 19 nt, Homo sapiens
  misc_RNA (1)...(19): siRNA sense strand
ggacuguggcuuugagcau

SEQ ID NO: 282691 - RNA, 19 nt, Homo sapiens
  misc_RNA (1)...(19): siRNA sense strand
gaucagcaaggaauaugag

SEQ ID NO: 282692 - RNA, 19 nt, Homo sapiens
  misc_RNA (1)...(19): siRNA sense strand
gguccagcaugagugcauu

SEQ ID NO: 282693 - RNA, 19 nt, Homo sapiens
  misc_RNA (1)...(19): siRNA sense strand
cgagaagcagugcaugaug

SEQ ID NO: 282694 - RNA, 19 nt, Homo sapiens
  misc_RNA (1)...(19): siRNA sense strand
ggcgggaugugcaggagau

SEQ ID NO: 282695 - RNA, 19 nt, Homo sapiens
  misc_RNA (1)...(19): siRNA sense strand
ccagaucagcaaggaauau

SEQ ID NO: 282696 - RNA, 19 nt, Homo sapiens
  misc_RNA (1)...(19): siRNA sense strand
ucgguggucucuccaucaa

SEQ ID NO: 282697 - RNA, 19 nt, Homo sapiens
  misc_RNA (1)...(19): siRNA sense strand
ggcagaacaggauguggaa

SEQ ID NO: 282698 - RNA, 19 nt, Homo sapiens
  misc_RNA (1)...(19): siRNA sense strand
ggaugaagaaguguugaag

SEQ ID NO: 282699 - RNA, 19 nt, Homo sapiens
  misc_RNA (1)...(19): siRNA sense strand
uaugagcgcuuuuccaagu

SEQ ID NO: 282700 - RNA, 19 nt, Homo sapiens
  misc_RNA (1)...(19): siRNA sense strand
cacgagaagcagugcauga

SEQ ID NO: 282701 - RNA, 19 nt, Homo sapiens
  misc_RNA (1)...(19): siRNA sense strand
gggaugugcaggagaucuu

SEQ ID NO: 282702 - RNA, 19 nt, Homo sapiens
  misc_RNA (1)...(19): siRNA sense strand
gcagaacaggauguggaaa

SEQ ID NO: 282703 - RNA, 19 nt, Homo sapiens
  misc_RNA (1)...(19): siRNA sense strand
ggagcuucagccuaaagaa

SEQ ID NO: 282704 - RNA, 19 nt, Homo sapiens
  misc_RNA (1)...(19): siRNA sense strand
gagcugaugcugcagauga

SEQ ID NO: 282705 - RNA, 19 nt, Homo sapiens
  misc_RNA (1)...(19): siRNA sense strand
cagcagcgcuuguccuaca

SEQ ID NO: 282706 - RNA, 19 nt, Homo sapiens
  misc_RNA (1)...(19): siRNA sense strand
gcagcccugucccaccaua

SEQ ID NO: 282707 - RNA, 19 nt, Homo sapiens
  misc_RNA (1)...(19): siRNA sense strand
uacagagccuggugaagga

SEQ ID NO: 282708 - RNA, 19 nt, Homo sapiens
  misc_RNA (1)...(19): siRNA sense strand
agaugaaccugcuggaacu

SEQ ID NO: 282709 - RNA, 19 nt, Homo sapiens
  misc_RNA (1)...(19): siRNA sense strand
gcuucuacgugaccaccaa

SEQ ID NO: 282710 - RNA, 19 nt, Homo sapiens
  misc_RNA (1)...(19): siRNA sense strand
gcagagcacacuggagaag

SEQ ID NO: 282711 - RNA, 19 nt, Homo sapiens
  misc_RNA (1)...(19): siRNA sense strand
gaaccugcuggaacucauc

SEQ ID NO: 282712 - RNA, 19 nt, Homo sapiens
  misc_RNA (1)...(19): siRNA sense strand
gcaccguguucgaaaucgu

SEQ ID NO: 282713 - RNA, 19 nt, Homo sapiens
  misc_RNA (1)...(19): siRNA sense strand
aaaagagccuguacaacca

SEQ ID NO: 282714 - RNA, 19 nt, Homo sapiens
  misc_RNA (1)...(19): siRNA sense strand
gaaguuagcugugcacaua

SEQ ID NO: 282715 - RNA, 19 nt, Homo sapiens
  misc_RNA (1)...(19): siRNA sense strand
ccacaaagcuuuacuggaa

SEQ ID NO: 282716 - RNA, 19 nt, Homo sapiens
  misc_RNA (1)...(19): siRNA sense strand
ucaguuggcucuuguaaua

SEQ ID NO: 282717 - RNA, 19 nt, Homo sapiens
  misc_RNA (1)...(19): siRNA sense strand
gaaugaagcugaaucuaau

SEQ ID NO: 282718 - RNA, 19 nt, Homo sapiens
  misc_RNA (1)...(19): siRNA sense strand
gauaaugugugucgucuuu

SEQ ID NO: 282719 - RNA, 19 nt, Homo sapiens
  misc_RNA (1)...(19): siRNA sense strand
gacaguggcucuugaagua

SEQ ID NO: 282720 - RNA, 19 nt, Homo sapiens
  misc_RNA (1)...(19): siRNA sense strand
gcagauaugcuauuuagua

SEQ ID NO: 282721 - RNA, 19 nt, Homo sapiens
  misc_RNA (1)...(19): siRNA sense strand
ggaaauaaguuuggaauag

SEQ ID NO: 282722 - RNA, 19 nt, Homo sapiens
  misc_RNA (1)...(19): siRNA sense strand
ugaauaaccuugagaagaa

SEQ ID NO: 282723 - RNA, 19 nt, Homo sapiens
  misc_RNA (1)...(19): siRNA sense strand
gagaaacucuugaugaaug

SEQ ID NO: 282724 - RNA, 19 nt, Homo sapiens
  misc_RNA (1)...(19): siRNA sense strand
gcaauuuaguggccuauaa

SEQ ID NO: 282725 - RNA, 19 nt, Homo sapiens
  misc_RNA (1)...(19): siRNA sense strand
guacagguguccuuuguuu

SEQ ID NO: 282726 - RNA, 19 nt, Homo sapiens
  misc_RNA (1)...(19): siRNA sense strand
gagaaaugcuuccaguaaa

SEQ ID NO: 282727 - RNA, 19 nt, Homo sapiens
  misc_RNA (1)...(19): siRNA sense strand
gcaggcagcucaccuaaug

SEQ ID NO: 282728 - RNA, 19 nt, Homo sapiens
  misc_RNA (1)...(19): siRNA sense strand
ggaauuaggcugugauaaa

SEQ ID NO: 282729 - RNA, 19 nt, Homo sapiens
  misc_RNA (1)...(19): siRNA sense strand
gagaguacguuaaguaaau

SEQ ID NO: 282730 - RNA, 19 nt, Homo sapiens
  misc_RNA (1)...(19): siRNA sense strand
ggagguaaagcaagaauua

SEQ ID NO: 282731 - RNA, 19 nt, Homo sapiens
  misc_RNA (1)...(19): siRNA sense strand
gagauuauaugaagcaguu

SEQ ID NO: 282732 - RNA, 19 nt, Homo sapiens
  misc_RNA (1)...(19): siRNA sense strand
gagcaaaucuccagaguac

SEQ ID NO: 282733 - RNA, 19 nt, Homo sapiens
  misc_RNA (1)...(19): siRNA sense strand
aaacagaucuuaacuuugg

SEQ ID NO: 282734 - RNA, 19 nt, Homo sapiens
  misc_RNA (1)...(19): siRNA sense strand
gcaagaaucucagcaggaa

SEQ ID NO: 282735 - RNA, 19 nt, Homo sapiens
  misc_RNA (1)...(19): siRNA sense strand
agacaaccguucacuguua

SEQ ID NO: 282736 - RNA, 19 nt, Homo sapiens
  misc_RNA (1)...(19): siRNA sense strand
gaacuggagugaugcaaau

SEQ ID NO: 282737 - RNA, 19 nt, Homo sapiens
  misc_RNA (1)...(19): siRNA sense strand
gcaaccaucuucuaaacaa

SEQ ID NO: 282738 - RNA, 19 nt, Homo sapiens
  misc_RNA (1)...(19): siRNA sense strand
ggaccuaguuucuucugua

SEQ ID NO: 282739 - RNA, 19 nt, Homo sapiens
  misc_RNA (1)...(19): siRNA sense strand
ccacacaggucuacacuug

SEQ ID NO: 282740 - RNA, 19 nt, Homo sapiens
  misc_RNA (1)...(19): siRNA sense strand
caaucaaacuccacucuuu

SEQ ID NO: 282741 - RNA, 19 nt, Homo sapiens
  misc_RNA (1)...(19): siRNA sense strand
ucagaggacuugugacuuu

SEQ ID NO: 282742 - RNA, 19 nt, Homo sapiens
  misc_RNA (1)...(19): siRNA sense strand
gaagccaacugaagaugaa

SEQ ID NO: 282743 - RNA, 19 nt, Homo sapiens
  misc_RNA (1)...(19): siRNA sense strand
gcaaagaacagacacauuc

SEQ ID NO: 282744 - RNA, 19 nt, Homo sapiens
  misc_RNA (1)...(19): siRNA sense strand
ggacuggcaggaacaauua

SEQ ID NO: 282745 - RNA, 19 nt, Homo sapiens
  misc_RNA (1)...(19): siRNA sense strand
ccaguuaguucaccucuuu

SEQ ID NO: 282746 - RNA, 19 nt, Homo sapiens
  misc_RNA (1)...(19): siRNA sense strand
gaacuacagucugcauuug

SEQ ID NO: 282747 - RNA, 19 nt, Homo sapiens
  misc_RNA (1)...(19): siRNA sense strand
gcagaaaaguggccaauuu

SEQ ID NO: 282748 - RNA, 19 nt, Homo sapiens
  misc_RNA (1)...(19): siRNA sense strand
gaugagagguggcguaaag

SEQ ID NO: 282749 - RNA, 19 nt, Homo sapiens
  misc_RNA (1)...(19): siRNA sense strand
gaaaaucuguggaaagaaa

SEQ ID NO: 282750 - RNA, 19 nt, Homo sapiens
  misc_RNA (1)...(19): siRNA sense strand
guaauguacuguugacuug

SEQ ID NO: 282751 - RNA, 19 nt, Homo sapiens
  misc_RNA (1)...(19): siRNA sense strand
gacaggagcucaagaugga

SEQ ID NO: 282752 - RNA, 19 nt, Homo sapiens
  misc_RNA (1)...(19): siRNA sense strand
ggacagugauaaugaugaa

SEQ ID NO: 282753 - RNA, 19 nt, Homo sapiens
  misc_RNA (1)...(19): siRNA sense strand
ggaauuggaucaaaacuuu

SEQ ID NO: 282754 - RNA, 19 nt, Homo sapiens
  misc_RNA (1)...(19): siRNA sense strand
gaaaauaaaucccgaaaag

SEQ ID NO: 282755 - RNA, 19 nt, Homo sapiens
  misc_RNA (1)...(19): siRNA sense strand
ggagaucacuugcucuugu

SEQ ID NO: 282756 - RNA, 19 nt, Homo sapiens
  misc_RNA (1)...(19): siRNA sense strand
uggauuggcuggaugaaua

SEQ ID NO: 282757 - RNA, 19 nt, Homo sapiens
  misc_RNA (1)...(19): siRNA sense strand
uaucaaagaugccuaaagu

SEQ ID NO: 282758 - RNA, 19 nt, Homo sapiens
  misc_RNA (1)...(19): siRNA sense strand
ggagaaaucuaguaaugag

SEQ ID NO: 282759 - RNA, 19 nt, Homo sapiens
  misc_RNA (1)...(19): siRNA sense strand
ugaagcagcucauguacuu

SEQ ID NO: 282760 - RNA, 19 nt, Homo sapiens
  misc_RNA (1)...(19): siRNA sense strand
agaaggaguugagauaaua

SEQ ID NO: 282761 - RNA, 19 nt, Homo sapiens
  misc_RNA (1)...(19): siRNA sense strand
gaaguucuaccuaauugua

SEQ ID NO: 282762 - RNA, 19 nt, Homo sapiens
  misc_RNA (1)...(19): siRNA sense strand
caucaaugcuuauuucuuc

SEQ ID NO: 282763 - RNA, 19 nt, Homo sapiens
  misc_RNA (1)...(19): siRNA sense strand
gaugcaaacucucucugua

SEQ ID NO: 282764 - RNA, 19 nt, Homo sapiens
  misc_RNA (1)...(19): siRNA sense strand
gcacuuugccacuuucaua

SEQ ID NO: 282765 - RNA, 19 nt, Homo sapiens
  misc_RNA (1)...(19): siRNA sense strand
ccacaucaaugcuuauuuc

SEQ ID NO: 282766 - RNA, 19 nt, Homo sapiens
  misc_RNA (1)...(19): siRNA sense strand
ggaaacaucagaaccacua

SEQ ID NO: 282767 - RNA, 19 nt, Homo sapiens
  misc_RNA (1)...(19): siRNA sense strand
gagaauaucacaucaaaca

SEQ ID NO: 282768 - RNA, 19 nt, Homo sapiens
  misc_RNA (1)...(19): siRNA sense strand
gucaauuccugucucauua

SEQ ID NO: 282769 - RNA, 19 nt, Homo sapiens
  misc_RNA (1)...(19): siRNA sense strand
ggaggugacugcagccauu

SEQ ID NO: 282770 - RNA, 19 nt, Homo sapiens
  misc_RNA (1)...(19): siRNA sense strand
gggccauucucaacaaaua

SEQ ID NO: 282771 - RNA, 19 nt, Homo sapiens
  misc_RNA (1)...(19): siRNA sense strand
gaaauucaggaaaccuuua

SEQ ID NO: 282772 - RNA, 19 nt, Homo sapiens
  misc_RNA (1)...(19): siRNA sense strand
uuaguaaucugacacauga

SEQ ID NO: 282773 - RNA, 19 nt, Homo sapiens
  misc_RNA (1)...(19): siRNA sense strand
ggauggagcagaugucuuu

SEQ ID NO: 282774 - RNA, 19 nt, Homo sapiens
  misc_RNA (1)...(19): siRNA sense strand
uaucaucccuugcagcuuu

SEQ ID NO: 282775 - RNA, 19 nt, Homo sapiens
  misc_RNA (1)...(19): siRNA sense strand
gcauuuaguucacuuagau

SEQ ID NO: 282776 - RNA, 19 nt, Homo sapiens
  misc_RNA (1)...(19): siRNA sense strand
gaaguaaaucugagacauu

SEQ ID NO: 282777 - RNA, 19 nt, Homo sapiens
  misc_RNA (1)...(19): siRNA sense strand
gaagcugaaucuaaucaug

SEQ ID NO: 282778 - RNA, 19 nt, Homo sapiens
  misc_RNA (1)...(19): siRNA sense strand
gcugauggauauuuaaguu

SEQ ID NO: 282779 - RNA, 19 nt, Homo sapiens
  misc_RNA (1)...(19): siRNA sense strand
gcagugcuccuuauuuauu

SEQ ID NO: 282780 - RNA, 19 nt, Homo sapiens
  misc_RNA (1)...(19): siRNA sense strand
gcauuuaccugccaugaca

SEQ ID NO: 282781 - RNA, 19 nt, Homo sapiens
  misc_RNA (1)...(19): siRNA sense strand
gguagaugaugauauagaa

SEQ ID NO: 282782 - RNA, 19 nt, Homo sapiens
  misc_RNA (1)...(19): siRNA sense strand
ugaagaggcuuuggcagua

SEQ ID NO: 282783 - RNA, 19 nt, Homo sapiens
  misc_RNA (1)...(19): siRNA sense strand
ccaaagcaauaaaguguau

SEQ ID NO: 282784 - RNA, 19 nt, Homo sapiens
  misc_RNA (1)...(19): siRNA sense strand
ggagaaagccgagacagaa

SEQ ID NO: 282785 - RNA, 19 nt, Homo sapiens
  misc_RNA (1)...(19): siRNA sense strand
gagaucacuugcucuugua

SEQ ID NO: 282786 - RNA, 19 nt, Homo sapiens
  misc_RNA (1)...(19): siRNA sense strand
cagcuggucuuucaacuga

SEQ ID NO: 282787 - RNA, 19 nt, Homo sapiens
  misc_RNA (1)...(19): siRNA sense strand
gacugauacucauauguua

SEQ ID NO: 282788 - RNA, 19 nt, Homo sapiens
  misc_RNA (1)...(19): siRNA sense strand
caucugaguucaucuucua

SEQ ID NO: 282789 - RNA, 19 nt, Homo sapiens
  misc_RNA (1)...(19): siRNA sense strand
gagcuugcccggauuaauu

SEQ ID NO: 282790 - RNA, 19 nt, Homo sapiens
  misc_RNA (1)...(19): siRNA sense strand
caacucugguccaauacua

SEQ ID NO: 282791 - RNA, 19 nt, Homo sapiens
  misc_RNA (1)...(19): siRNA sense strand
uacaaacacuccuuucaaa

SEQ ID NO: 282792 - RNA, 19 nt, Homo sapiens
  misc_RNA (1)...(19): siRNA sense strand
gagcauggcauauuggauu

SEQ ID NO: 282793 - RNA, 19 nt, Homo sapiens
  misc_RNA (1)...(19): siRNA sense strand
ugagguaugucuugagaaa

SEQ ID NO: 282794 - RNA, 19 nt, Homo sapiens
  misc_RNA (1)...(19): siRNA sense strand
ccacuucuuccaucuauua

SEQ ID NO: 282795 - RNA, 19 nt, Homo sapiens
  misc_RNA (1)...(19): siRNA sense strand
ugauuuagcuugccacuca

SEQ ID NO: 282796 - RNA, 19 nt, Homo sapiens
  misc_RNA (1)...(19): siRNA sense strand
gguggcaauucaagaguua

SEQ ID NO: 282797 - RNA, 19 nt, Homo sapiens
  misc_RNA (1)...(19): siRNA sense strand
gcaaauagaaacugcauag

SEQ ID NO: 282798 - RNA, 19 nt, Homo sapiens
  misc_RNA (1)...(19): siRNA sense strand
gaacuucguacuuuaucua

SEQ ID NO: 282799 - RNA, 19 nt, Homo sapiens
  misc_RNA (1)...(19): siRNA sense strand
aaagaaagcugugauuugg

SEQ ID NO: 282800 - RNA, 19 nt, Homo sapiens
  misc_RNA (1)...(19): siRNA sense strand
gcaacuacaagcacugaua

SEQ ID NO: 282801 - RNA, 19 nt, Homo sapiens
  misc_RNA (1)...(19): siRNA sense strand
ugaaugaagcugaaucuaa

SEQ ID NO: 282802 - RNA, 19 nt, Homo sapiens
  misc_RNA (1)...(19): siRNA sense strand
ggacuucagagcaauagua

SEQ ID NO: 282803 - RNA, 19 nt, Homo sapiens
  misc_RNA (1)...(19): siRNA sense strand
cagcucaccuaauggauuu

SEQ ID NO: 282804 - RNA, 19 nt, Homo sapiens
  misc_RNA (1)...(19): siRNA sense strand
gaauaaccuugagaagaaa

SEQ ID NO: 282805 - RNA, 19 nt, Homo sapiens
  misc_RNA (1)...(19): siRNA sense strand
caaaggaucagaagauuuc

SEQ ID NO: 282806 - RNA, 19 nt, Homo sapiens
  misc_RNA (1)...(19): siRNA sense strand
aagaaacggugucuaaaug

SEQ ID NO: 282807 - RNA, 19 nt, Homo sapiens
  misc_RNA (1)...(19): siRNA sense strand
acaaagaaacggugucuaa

SEQ ID NO: 282808 - RNA, 19 nt, Homo sapiens
  misc_RNA (1)...(19): siRNA sense strand
ccaggaacauucuaauuca

SEQ ID NO: 282809 - RNA, 19 nt, Homo sapiens
  misc_RNA (1)...(19): siRNA sense strand
ugaaauagaugguggaaaa

SEQ ID NO: 282810 - RNA, 19 nt, Homo sapiens
  misc_RNA (1)...(19): siRNA sense strand
caacuucuaaugacugaua

SEQ ID NO: 282811 - RNA, 19 nt, Homo sapiens
  misc_RNA (1)...(19): siRNA sense strand
cauaugagccuaacaggaa

SEQ ID NO: 282812 - RNA, 19 nt, Homo sapiens
  misc_RNA (1)...(19): siRNA sense strand
cgaaggcaauauaaagauu

SEQ ID NO: 282813 - RNA, 19 nt, Homo sapiens
  misc_RNA (1)...(19): siRNA sense strand
gaagcaugccuaagccaua

SEQ ID NO: 282814 - RNA, 19 nt, Homo sapiens
  misc_RNA (1)...(19): siRNA sense strand
ccaugaagauguuugaaua

SEQ ID NO: 282815 - RNA, 19 nt, Homo sapiens
  misc_RNA (1)...(19): siRNA sense strand
guacaugugugcagacaaa

SEQ ID NO: 282816 - RNA, 19 nt, Homo sapiens
  misc_RNA (1)...(19): siRNA sense strand
guacaugggauacaaauuu

SEQ ID NO: 282817 - RNA, 19 nt, Homo sapiens
  misc_RNA (1)...(19): siRNA sense strand
gauacaaauuugagcagua

SEQ ID NO: 282818 - RNA, 19 nt, Homo sapiens
  misc_RNA (1)...(19): siRNA sense strand
gagaggagcugagaagaca

SEQ ID NO: 282819 - RNA, 19 nt, Homo sapiens
  misc_RNA (1)...(19): siRNA sense strand
gaagauguuugaauauguc

SEQ ID NO: 282820 - RNA, 19 nt, Homo sapiens
  misc_RNA (1)...(19): siRNA sense strand
gcacgguuguccaggauga

SEQ ID NO: 282821 - RNA, 19 nt, Homo sapiens
  misc_RNA (1)...(19): siRNA sense strand
ccacagacccugcccucua

SEQ ID NO: 282822 - RNA, 19 nt, Homo sapiens
  misc_RNA (1)...(19): siRNA sense strand
uugaauaugucaggaauga

SEQ ID NO: 282823 - RNA, 19 nt, Homo sapiens
  misc_RNA (1)...(19): siRNA sense strand
uaugguauguggaagcuau

SEQ ID NO: 282824 - RNA, 19 nt, Homo sapiens
  misc_RNA (1)...(19): siRNA sense strand
uacaugggauacaaauuug

SEQ ID NO: 282825 - RNA, 19 nt, Homo sapiens
  misc_RNA (1)...(19): siRNA sense strand
gagcacgguuguccaggau

SEQ ID NO: 282826 - RNA, 19 nt, Homo sapiens
  misc_RNA (1)...(19): siRNA sense strand
caagagaggagcugagaag

SEQ ID NO: 282827 - RNA, 19 nt, Homo sapiens
  misc_RNA (1)...(19): siRNA sense strand
ccucuacucugggcccuuu

SEQ ID NO: 282828 - RNA, 19 nt, Homo sapiens
  misc_RNA (1)...(19): siRNA sense strand
acggauacccggaucgaua

SEQ ID NO: 282829 - RNA, 19 nt, Homo sapiens
  misc_RNA (1)...(19): siRNA sense strand
acaccaagaugcaccuuac

SEQ ID NO: 282830 - RNA, 19 nt, Homo sapiens
  misc_RNA (1)...(19): siRNA sense strand
ucguucaucucuucucuug

SEQ ID NO: 282831 - RNA, 19 nt, Homo sapiens
  misc_RNA (1)...(19): siRNA sense strand
gaagccacccucugcucuu

SEQ ID NO: 282832 - RNA, 19 nt, Homo sapiens
  misc_RNA (1)...(19): siRNA sense strand
uagcugagccucggaacaa

SEQ ID NO: 282833 - RNA, 19 nt, Homo sapiens
  misc_RNA (1)...(19): siRNA sense strand
guuugaauaugucaggaau

SEQ ID NO: 282834 - RNA, 19 nt, Homo sapiens
  misc_RNA (1)...(19): siRNA sense strand
uccgggagcuuauguacau

SEQ ID NO: 282835 - RNA, 19 nt, Homo sapiens
  misc_RNA (1)...(19): siRNA sense strand
caagacucccucucccaaa

SEQ ID NO: 282836 - RNA, 19 nt, Homo sapiens
  misc_RNA (1)...(19): siRNA sense strand
gaggagcugagaagacaga

SEQ ID NO: 282837 - RNA, 19 nt, Homo sapiens
  misc_RNA (1)...(19): siRNA sense strand
acucugggcccuuuccuuu

SEQ ID NO: 282838 - RNA, 19 nt, Homo sapiens
  misc_RNA (1)...(19): siRNA sense strand
aagacucccucucccaaau

SEQ ID NO: 282839 - RNA, 19 nt, Homo sapiens
  misc_RNA (1)...(19): siRNA sense strand
gaccuuuccuaccaugaag

SEQ ID NO: 282840 - RNA, 19 nt, Homo sapiens
  misc_RNA (1)...(19): siRNA sense strand
gcucguucaucucuucucu

SEQ ID NO: 282841 - RNA, 19 nt, Homo sapiens
  misc_RNA (1)...(19): siRNA sense strand
acgaggagguccaggaaag

SEQ ID NO: 282842 - RNA, 19 nt, Homo sapiens
  misc_RNA (1)...(19): siRNA sense strand
agacucccucucccaaaua

SEQ ID NO: 282843 - RNA, 19 nt, Homo sapiens
  misc_RNA (1)...(19): siRNA sense strand
cacagacccugcccucuac

SEQ ID NO: 282844 - RNA, 19 nt, Homo sapiens
  misc_RNA (1)...(19): siRNA sense strand
auacaaauuugagcaguac

SEQ ID NO: 282845 - RNA, 19 nt, Homo sapiens
  misc_RNA (1)...(19): siRNA sense strand
caaauuugagcaguacaug

SEQ ID NO: 282846 - RNA, 19 nt, Homo sapiens
  misc_RNA (1)...(19): siRNA sense strand
caggcucguucaucucuuc

SEQ ID NO: 282847 - RNA, 19 nt, Homo sapiens
  misc_RNA (1)...(19): siRNA sense strand
gacucccucucccaaauag

SEQ ID NO: 282848 - RNA, 19 nt, Homo sapiens
  misc_RNA (1)...(19): siRNA sense strand
acaccaacguggccuucug

SEQ ID NO: 282849 - RNA, 19 nt, Homo sapiens
  misc_RNA (1)...(19): siRNA sense strand
ggccuucugcucugugcua

SEQ ID NO: 282850 - RNA, 19 nt, Homo sapiens
  misc_RNA (1)...(19): siRNA sense strand
cuucggaacugggcugcuu

SEQ ID NO: 282851 - RNA, 19 nt, Homo sapiens
  misc_RNA (1)...(19): siRNA sense strand
ccaugaagauguuugaaua

SEQ ID NO: 282852 - RNA, 19 nt, Homo sapiens
  misc_RNA (1)...(19): siRNA sense strand
guacaugugugcagacaaa

SEQ ID NO: 282853 - RNA, 19 nt, Homo sapiens
  misc_RNA (1)...(19): siRNA sense strand
guacaugggauacaaauuu

SEQ ID NO: 282854 - RNA, 19 nt, Homo sapiens
  misc_RNA (1)...(19): siRNA sense strand
gauacaaauuugagcagua

SEQ ID NO: 282855 - RNA, 19 nt, Homo sapiens
  misc_RNA (1)...(19): siRNA sense strand
gagaggagcugagaagaca

SEQ ID NO: 282856 - RNA, 19 nt, Homo sapiens
  misc_RNA (1)...(19): siRNA sense strand
gaagauguuugaauauguc

SEQ ID NO: 282857 - RNA, 19 nt, Homo sapiens
  misc_RNA (1)...(19): siRNA sense strand
gcacgguuguccaggauga

SEQ ID NO: 282858 - RNA, 19 nt, Homo sapiens
  misc_RNA (1)...(19): siRNA sense strand
ccacagacccugcccucua

SEQ ID NO: 282859 - RNA, 19 nt, Homo sapiens
  misc_RNA (1)...(19): siRNA sense strand
uugaauaugucaggaauga

SEQ ID NO: 282860 - RNA, 19 nt, Homo sapiens
  misc_RNA (1)...(19): siRNA sense strand
uaugguauguggaagcuau

SEQ ID NO: 282861 - RNA, 19 nt, Homo sapiens
  misc_RNA (1)...(19): siRNA sense strand
uacaugggauacaaauuug

SEQ ID NO: 282862 - RNA, 19 nt, Homo sapiens
  misc_RNA (1)...(19): siRNA sense strand
gagcacgguuguccaggau

SEQ ID NO: 282863 - RNA, 19 nt, Homo sapiens
  misc_RNA (1)...(19): siRNA sense strand
caagagaggagcugagaag

SEQ ID NO: 282864 - RNA, 19 nt, Homo sapiens
  misc_RNA (1)...(19): siRNA sense strand
ccucuacucugggcccuuu

SEQ ID NO: 282865 - RNA, 19 nt, Homo sapiens
  misc_RNA (1)...(19): siRNA sense strand
acggauacccggaucgaua

SEQ ID NO: 282866 - RNA, 19 nt, Homo sapiens
  misc_RNA (1)...(19): siRNA sense strand
acaccaagaugcaccuuac

SEQ ID NO: 282867 - RNA, 19 nt, Homo sapiens
  misc_RNA (1)...(19): siRNA sense strand
ucguucaucucuucucuug

SEQ ID NO: 282868 - RNA, 19 nt, Homo sapiens
  misc_RNA (1)...(19): siRNA sense strand
gaagccacccucugcucuu

SEQ ID NO: 282869 - RNA, 19 nt, Homo sapiens
  misc_RNA (1)...(19): siRNA sense strand
uagcugagccucggaacaa

SEQ ID NO: 282870 - RNA, 19 nt, Homo sapiens
  misc_RNA (1)...(19): siRNA sense strand
guuugaauaugucaggaau

SEQ ID NO: 282871 - RNA, 19 nt, Homo sapiens
  misc_RNA (1)...(19): siRNA sense strand
uccgggagcuuauguacau

SEQ ID NO: 282872 - RNA, 19 nt, Homo sapiens
  misc_RNA (1)...(19): siRNA sense strand
caagacucccucucccaaa

SEQ ID NO: 282873 - RNA, 19 nt, Homo sapiens
  misc_RNA (1)...(19): siRNA sense strand
gaggagcugagaagacaga

SEQ ID NO: 282874 - RNA, 19 nt, Homo sapiens
  misc_RNA (1)...(19): siRNA sense strand
acucugggcccuuuccuuu

SEQ ID NO: 282875 - RNA, 19 nt, Homo sapiens
  misc_RNA (1)...(19): siRNA sense strand
aagacucccucucccaaau

SEQ ID NO: 282876 - RNA, 19 nt, Homo sapiens
  misc_RNA (1)...(19): siRNA sense strand
gaccuuuccuaccaugaag

SEQ ID NO: 282877 - RNA, 19 nt, Homo sapiens
  misc_RNA (1)...(19): siRNA sense strand
gcucguucaucucuucucu

SEQ ID NO: 282878 - RNA, 19 nt, Homo sapiens
  misc_RNA (1)...(19): siRNA sense strand
acgaggagguccaggaaag

SEQ ID NO: 282879 - RNA, 19 nt, Homo sapiens
  misc_RNA (1)...(19): siRNA sense strand
agacucccucucccaaaua

SEQ ID NO: 282880 - RNA, 19 nt, Homo sapiens
  misc_RNA (1)...(19): siRNA sense strand
cacagacccugcccucuac

SEQ ID NO: 282881 - RNA, 19 nt, Homo sapiens
  misc_RNA (1)...(19): siRNA sense strand
auacaaauuugagcaguac

SEQ ID NO: 282882 - RNA, 19 nt, Homo sapiens
  misc_RNA (1)...(19): siRNA sense strand
caaauuugagcaguacaug

SEQ ID NO: 282883 - RNA, 19 nt, Homo sapiens
  misc_RNA (1)...(19): siRNA sense strand
caggcucguucaucucuuc

SEQ ID NO: 282884 - RNA, 19 nt, Homo sapiens
  misc_RNA (1)...(19): siRNA sense strand
gacucccucucccaaauag

SEQ ID NO: 282885 - RNA, 19 nt, Homo sapiens
  misc_RNA (1)...(19): siRNA sense strand
acaccaacguggccuucug

SEQ ID NO: 282886 - RNA, 19 nt, Homo sapiens
  misc_RNA (1)...(19): siRNA sense strand
ggccuucugcucugugcua

SEQ ID NO: 282887 - RNA, 19 nt, Homo sapiens
  misc_RNA (1)...(19): siRNA sense strand
cuucggaacugggcugcuu

SEQ ID NO: 282888 - RNA, 19 nt, Homo sapiens
  misc_RNA (1)...(19): siRNA sense strand
caauugaacuggcuuauau

SEQ ID NO: 282889 - RNA, 19 nt, Homo sapiens
  misc_RNA (1)...(19): siRNA sense strand
gaaagaagcagcugauaug

SEQ ID NO: 282890 - RNA, 19 nt, Homo sapiens
  misc_RNA (1)...(19): siRNA sense strand
ggagccagcuagauauuaa

SEQ ID NO: 282891 - RNA, 19 nt, Homo sapiens
  misc_RNA (1)...(19): siRNA sense strand
gaaacaggcuagccagaga

SEQ ID NO: 282892 - RNA, 19 nt, Homo sapiens
  misc_RNA (1)...(19): siRNA sense strand
ugacuugucuucuucguaa

SEQ ID NO: 282893 - RNA, 19 nt, Homo sapiens
  misc_RNA (1)...(19): siRNA sense strand
agaauuaccuucagcugua

SEQ ID NO: 282894 - RNA, 19 nt, Homo sapiens
  misc_RNA (1)...(19): siRNA sense strand
caaaggcaguaaugcauuu

SEQ ID NO: 282895 - RNA, 19 nt, Homo sapiens
  misc_RNA (1)...(19): siRNA sense strand
caaggagccagucaaauua

SEQ ID NO: 282896 - RNA, 19 nt, Homo sapiens
  misc_RNA (1)...(19): siRNA sense strand
ggaacaaaguaucuugcua

SEQ ID NO: 282897 - RNA, 19 nt, Homo sapiens
  misc_RNA (1)...(19): siRNA sense strand
guaaauuucuucacaccaa

SEQ ID NO: 282898 - RNA, 19 nt, Homo sapiens
  misc_RNA (1)...(19): siRNA sense strand
ggaaagaagcagcugauau

SEQ ID NO: 282899 - RNA, 19 nt, Homo sapiens
  misc_RNA (1)...(19): siRNA sense strand
ggaauaauuggaguaguua

SEQ ID NO: 282900 - RNA, 19 nt, Homo sapiens
  misc_RNA (1)...(19): siRNA sense strand
gcaaaucaaacgucuagaa

SEQ ID NO: 282901 - RNA, 19 nt, Homo sapiens
  misc_RNA (1)...(19): siRNA sense strand
caucagagauuguuuacca

SEQ ID NO: 282902 - RNA, 19 nt, Homo sapiens
  misc_RNA (1)...(19): siRNA sense strand
caauagaaauggaacaaag

SEQ ID NO: 282903 - RNA, 19 nt, Homo sapiens
  misc_RNA (1)...(19): siRNA sense strand
acaagaagauaaacggaaa

SEQ ID NO: 282904 - RNA, 19 nt, Homo sapiens
  misc_RNA (1)...(19): siRNA sense strand
cguaaaagguugccuguua

SEQ ID NO: 282905 - RNA, 19 nt, Homo sapiens
  misc_RNA (1)...(19): siRNA sense strand
gcagaacccuagcuguaau

SEQ ID NO: 282906 - RNA, 19 nt, Homo sapiens
  misc_RNA (1)...(19): siRNA sense strand
caaauuugccacagaauau

SEQ ID NO: 282907 - RNA, 19 nt, Homo sapiens
  misc_RNA (1)...(19): siRNA sense strand
gcaauugaacuggcuuaua

SEQ ID NO: 282908 - RNA, 19 nt, Homo sapiens
  misc_RNA (1)...(19): siRNA sense strand
gaugaaauucgacaagaaa

SEQ ID NO: 282909 - RNA, 19 nt, Homo sapiens
  misc_RNA (1)...(19): siRNA sense strand
acaaggagccagucaaauu

SEQ ID NO: 282910 - RNA, 19 nt, Homo sapiens
  misc_RNA (1)...(19): siRNA sense strand
caggcuagccagagaauua

SEQ ID NO: 282911 - RNA, 19 nt, Homo sapiens
  misc_RNA (1)...(19): siRNA sense strand
cacccaacguugucaauuu

SEQ ID NO: 282912 - RNA, 19 nt, Homo sapiens
  misc_RNA (1)...(19): siRNA sense strand
gaacuggcuuauaucaaca

SEQ ID NO: 282913 - RNA, 19 nt, Homo sapiens
  misc_RNA (1)...(19): siRNA sense strand
ugaaggaacugcaaaauau

SEQ ID NO: 282914 - RNA, 19 nt, Homo sapiens
  misc_RNA (1)...(19): siRNA sense strand
gaaccaauucaucuuaaga

SEQ ID NO: 282915 - RNA, 19 nt, Homo sapiens
  misc_RNA (1)...(19): siRNA sense strand
gcuaaaggcauuacaagga

SEQ ID NO: 282916 - RNA, 19 nt, Homo sapiens
  misc_RNA (1)...(19): siRNA sense strand
gggcuaaugaacaauaaua

SEQ ID NO: 282917 - RNA, 19 nt, Homo sapiens
  misc_RNA (1)...(19): siRNA sense strand
uggcuuauaucaacacaaa

SEQ ID NO: 282918 - RNA, 19 nt, Homo sapiens
  misc_RNA (1)...(19): siRNA sense strand
caguaucagucucuucuaa

SEQ ID NO: 282919 - RNA, 19 nt, Homo sapiens
  misc_RNA (1)...(19): siRNA sense strand
guuauugaacgacucauua

SEQ ID NO: 282920 - RNA, 19 nt, Homo sapiens
  misc_RNA (1)...(19): siRNA sense strand
ccaaauuugccacagaaua

SEQ ID NO: 282921 - RNA, 19 nt, Homo sapiens
  misc_RNA (1)...(19): siRNA sense strand
ucacuaaacuugaucucau

SEQ ID NO: 282922 - RNA, 19 nt, Homo sapiens
  misc_RNA (1)...(19): siRNA sense strand
gcacagcgcaggaaagaag

SEQ ID NO: 282923 - RNA, 19 nt, Homo sapiens
  misc_RNA (1)...(19): siRNA sense strand
gcuaauuccugucauaaac

SEQ ID NO: 282924 - RNA, 19 nt, Homo sapiens
  misc_RNA (1)...(19): siRNA sense strand
uaaacuucaugaugccaua

SEQ ID NO: 282925 - RNA, 19 nt, Homo sapiens
  misc_RNA (1)...(19): siRNA sense strand
ucacaucagagauuguuua

SEQ ID NO: 282926 - RNA, 19 nt, Homo sapiens
  misc_RNA (1)...(19): siRNA sense strand
uggaauaauuggaguaguu

SEQ ID NO: 282927 - RNA, 19 nt, Homo sapiens
  misc_RNA (1)...(19): siRNA sense strand
caacaucagaggcacuuaa

SEQ ID NO: 282928 - RNA, 19 nt, Homo sapiens
  misc_RNA (1)...(19): siRNA sense strand
gugaacccguggaugauaa

SEQ ID NO: 282929 - RNA, 19 nt, Homo sapiens
  misc_RNA (1)...(19): siRNA sense strand
guaucagucucuucuaaau

SEQ ID NO: 282930 - RNA, 19 nt, Homo sapiens
  misc_RNA (1)...(19): siRNA sense strand
gaaaacaacaggagaagaa

SEQ ID NO: 282931 - RNA, 19 nt, Homo sapiens
  misc_RNA (1)...(19): siRNA sense strand
gaacgacucauuaaaucau

SEQ ID NO: 282932 - RNA, 19 nt, Homo sapiens
  misc_RNA (1)...(19): siRNA sense strand
gaaauggaacaaaguaucu

SEQ ID NO: 282933 - RNA, 19 nt, Homo sapiens
  misc_RNA (1)...(19): siRNA sense strand
caagaagaguguaacugau

SEQ ID NO: 282934 - RNA, 19 nt, Homo sapiens
  misc_RNA (1)...(19): siRNA sense strand
cuaaggauauugagcuuca

SEQ ID NO: 282935 - RNA, 19 nt, Homo sapiens
  misc_RNA (1)...(19): siRNA sense strand
aguaagcccugaaccaauu

SEQ ID NO: 282936 - RNA, 19 nt, Homo sapiens
  misc_RNA (1)...(19): siRNA sense strand
ggaaauaauaagggaguaa

SEQ ID NO: 282937 - RNA, 19 nt, Homo sapiens
  misc_RNA (1)...(19): siRNA sense strand
ggugcuagaauuuguuaua

SEQ ID NO: 282938 - RNA, 19 nt, Homo sapiens
  misc_RNA (1)...(19): siRNA sense strand
gcuguaaucacuaaacuug

SEQ ID NO: 282939 - RNA, 19 nt, Homo sapiens
  misc_RNA (1)...(19): siRNA sense strand
ggaguaagcccugaaccaa

SEQ ID NO: 282940 - RNA, 19 nt, Homo sapiens
  misc_RNA (1)...(19): siRNA sense strand
gcuaugcgguggugcuaga

SEQ ID NO: 282941 - RNA, 19 nt, Homo sapiens
  misc_RNA (1)...(19): siRNA sense strand
ugccugagguuucauuuga

SEQ ID NO: 282942 - RNA, 19 nt, Homo sapiens
  misc_RNA (1)...(19): siRNA sense strand
auacagauauggcaacauc

SEQ ID NO: 282943 - RNA, 19 nt, Homo sapiens
  misc_RNA (1)...(19): siRNA sense strand
gggaacagcgagauuguga

SEQ ID NO: 282944 - RNA, 19 nt, Homo sapiens
  misc_RNA (1)...(19): siRNA sense strand
ucaaaacccauuccaauua

SEQ ID NO: 282945 - RNA, 19 nt, Homo sapiens
  misc_RNA (1)...(19): siRNA sense strand
gaagaguuauuagcagaag

SEQ ID NO: 282946 - RNA, 19 nt, Homo sapiens
  misc_RNA (1)...(19): siRNA sense strand
uaacuuaguggcaauugaa

SEQ ID NO: 282947 - RNA, 19 nt, Homo sapiens
  misc_RNA (1)...(19): siRNA sense strand
gaagauaaacggaaaacaa

SEQ ID NO: 282948 - RNA, 19 nt, Homo sapiens
  misc_RNA (1)...(19): siRNA sense strand
cuacuuuacuccaacuuau

SEQ ID NO: 282949 - RNA, 19 nt, Homo sapiens
  misc_RNA (1)...(19): siRNA sense strand
acaagaagaguguaacuga

SEQ ID NO: 282950 - RNA, 19 nt, Homo sapiens
  misc_RNA (1)...(19): siRNA sense strand
gaaggguuauuccagucaa

SEQ ID NO: 282951 - RNA, 19 nt, Homo sapiens
  misc_RNA (1)...(19): siRNA sense strand
ugaugaaauucgacaagaa

SEQ ID NO: 282952 - RNA, 19 nt, Homo sapiens
  misc_RNA (1)...(19): siRNA sense strand
ugaacuggcuuauaucaac

SEQ ID NO: 282953 - RNA, 19 nt, Homo sapiens
  misc_RNA (1)...(19): siRNA sense strand
gagauuguuuaccagaguu

SEQ ID NO: 282954 - RNA, 19 nt, Homo sapiens
  misc_RNA (1)...(19): siRNA sense strand
guacugaugccauggaugu

SEQ ID NO: 282955 - RNA, 19 nt, Homo sapiens
  misc_RNA (1)...(19): siRNA sense strand
ggugaucaaccuaaggaua

SEQ ID NO: 282956 - RNA, 19 nt, Homo sapiens
  misc_RNA (1)...(19): siRNA sense strand
caaggugccuguaggugau

SEQ ID NO: 282957 - RNA, 19 nt, Homo sapiens
  misc_RNA (1)...(19): siRNA sense strand
gguuggagaugguguucaa

SEQ ID NO: 282958 - RNA, 19 nt, Homo sapiens
  misc_RNA (1)...(19): siRNA sense strand
gaauuaccuucagcuguau

SEQ ID NO: 282959 - RNA, 19 nt, Homo sapiens
  misc_RNA (1)...(19): siRNA sense strand
acacaggaauuguuacgau

SEQ ID NO: 282960 - RNA, 19 nt, Homo sapiens
  misc_RNA (1)...(19): siRNA sense strand
aaucaaacgucuagaagag

SEQ ID NO: 282961 - RNA, 19 nt, Homo sapiens
  misc_RNA (1)...(19): siRNA sense strand
guauugaugggaaggguua

SEQ ID NO: 282962 - RNA, 19 nt, Homo sapiens
  misc_RNA (1)...(19): siRNA sense strand
gagauugugagguuauuga

SEQ ID NO: 282963 - RNA, 19 nt, Homo sapiens
  misc_RNA (1)...(19): siRNA sense strand
cuaaauagcuacggugaac

SEQ ID NO: 282964 - RNA, 19 nt, Homo sapiens
  misc_RNA (1)...(19): siRNA sense strand
aaagguugccuguuacaaa

SEQ ID NO: 282965 - RNA, 19 nt, Homo sapiens
  misc_RNA (1)...(19): siRNA sense strand
auucagcacuguagcaauu

SEQ ID NO: 282966 - RNA, 19 nt, Homo sapiens
  misc_RNA (1)...(19): siRNA sense strand
ugagguuucauuugaguua

SEQ ID NO: 282967 - RNA, 19 nt, Homo sapiens
  misc_RNA (1)...(19): siRNA sense strand
uaccaaauuugccacagaa

SEQ ID NO: 282968 - RNA, 19 nt, Homo sapiens
  misc_RNA (1)...(19): siRNA sense strand
ccuuaacacuauugacauu

SEQ ID NO: 282969 - RNA, 19 nt, Homo sapiens
  misc_RNA (1)...(19): siRNA sense strand
acagcgagauugugagguu

SEQ ID NO: 282970 - RNA, 19 nt, Homo sapiens
  misc_RNA (1)...(19): siRNA sense strand
acaggcaacuggagaggaa

SEQ ID NO: 282971 - RNA, 19 nt, Homo sapiens
  misc_RNA (1)...(19): siRNA sense strand
agacuuugcugaugcuugu

SEQ ID NO: 282972 - RNA, 19 nt, Homo sapiens
  misc_RNA (1)...(19): siRNA sense strand
gaggaaaugcaaaggauca

SEQ ID NO: 282973 - RNA, 19 nt, Homo sapiens
  misc_RNA (1)...(19): siRNA sense strand
gugaucaaccuaaggauau

SEQ ID NO: 282974 - RNA, 19 nt, Homo sapiens
  misc_RNA (1)...(19): siRNA sense strand
uaggccagcuguauaaauc

SEQ ID NO: 282975 - RNA, 19 nt, Homo sapiens
  misc_RNA (1)...(19): siRNA sense strand
caaaacccauuccaauuau

SEQ ID NO: 282976 - RNA, 19 nt, Homo sapiens
  misc_RNA (1)...(19): siRNA sense strand
cacaaaacauccagacuuu

SEQ ID NO: 282977 - RNA, 19 nt, Homo sapiens
  misc_RNA (1)...(19): siRNA sense strand
gaauuguuacgauuuccua

SEQ ID NO: 282978 - RNA, 19 nt, Homo sapiens
  misc_RNA (1)...(19): siRNA sense strand
cacaggaauuguuacgauu

SEQ ID NO: 282979 - RNA, 19 nt, Homo sapiens
  misc_RNA (1)...(19): siRNA sense strand
caauuacaguacacaggaa

SEQ ID NO: 282980 - RNA, 19 nt, Homo sapiens
  misc_RNA (1)...(19): siRNA sense strand
gggcgaaccuuagaaucug

SEQ ID NO: 282981 - RNA, 19 nt, Homo sapiens
  misc_RNA (1)...(19): siRNA sense strand
ggcgcuaauuccugucaua

SEQ ID NO: 282982 - RNA, 19 nt, Homo sapiens
  misc_RNA (1)...(19): siRNA sense strand
uaaacuugaucucauggau

SEQ ID NO: 282983 - RNA, 19 nt, Homo sapiens
  misc_RNA (1)...(19): siRNA sense strand
gaacgcagagcagcggaaa

SEQ ID NO: 282984 - RNA, 19 nt, Homo sapiens
  misc_RNA (1)...(19): siRNA sense strand
gaggaaugcugaaaacuuc

SEQ ID NO: 282985 - RNA, 19 nt, Homo sapiens
  misc_RNA (1)...(19): siRNA sense strand
gguugccuguuacaaauga

SEQ ID NO: 282986 - RNA, 19 nt, Homo sapiens
  misc_RNA (1)...(19): siRNA sense strand
gcuacuuuacuccaacuua

SEQ ID NO: 282987 - RNA, 19 nt, Homo sapiens
  misc_RNA (1)...(19): siRNA sense strand
cagcgagauugugagguua

SEQ ID NO: 282988 - RNA, 19 nt, Homo sapiens
  misc_RNA (1)...(19): siRNA sense strand
caauugaacuggcuuauau

SEQ ID NO: 282989 - RNA, 19 nt, Homo sapiens
  misc_RNA (1)...(19): siRNA sense strand
gaaagaagcagcugauaug

SEQ ID NO: 282990 - RNA, 19 nt, Homo sapiens
  misc_RNA (1)...(19): siRNA sense strand
ggagccagcuagauauuaa

SEQ ID NO: 282991 - RNA, 19 nt, Homo sapiens
  misc_RNA (1)...(19): siRNA sense strand
gaaacaggcuagccagaga

SEQ ID NO: 282992 - RNA, 19 nt, Homo sapiens
  misc_RNA (1)...(19): siRNA sense strand
ugacuugucuucuucguaa

SEQ ID NO: 282993 - RNA, 19 nt, Homo sapiens
  misc_RNA (1)...(19): siRNA sense strand
agaauuaccuucagcugua

SEQ ID NO: 282994 - RNA, 19 nt, Homo sapiens
  misc_RNA (1)...(19): siRNA sense strand
caaaggcaguaaugcauuu

SEQ ID NO: 282995 - RNA, 19 nt, Homo sapiens
  misc_RNA (1)...(19): siRNA sense strand
caaggagccagucaaauua

SEQ ID NO: 282996 - RNA, 19 nt, Homo sapiens
  misc_RNA (1)...(19): siRNA sense strand
ggaacaaaguaucuugcua

SEQ ID NO: 282997 - RNA, 19 nt, Homo sapiens
  misc_RNA (1)...(19): siRNA sense strand
guaaauuucuucacaccaa

SEQ ID NO: 282998 - RNA, 19 nt, Homo sapiens
  misc_RNA (1)...(19): siRNA sense strand
ggaaagaagcagcugauau

SEQ ID NO: 282999 - RNA, 19 nt, Homo sapiens
  misc_RNA (1)...(19): siRNA sense strand
ggaauaauuggaguaguua

SEQ ID NO: 283000 - RNA, 19 nt, Homo sapiens
  misc_RNA (1)...(19): siRNA sense strand
gcaaaucaaacgucuagaa

SEQ ID NO: 283001 - RNA, 19 nt, Homo sapiens
  misc_RNA (1)...(19): siRNA sense strand
caucagagauuguuuacca

SEQ ID NO: 283002 - RNA, 19 nt, Homo sapiens
  misc_RNA (1)...(19): siRNA sense strand
caauagaaauggaacaaag

SEQ ID NO: 283003 - RNA, 19 nt, Homo sapiens
  misc_RNA (1)...(19): siRNA sense strand
acaagaagauaaacggaaa

SEQ ID NO: 283004 - RNA, 19 nt, Homo sapiens
  misc_RNA (1)...(19): siRNA sense strand
cguaaaagguugccuguua

SEQ ID NO: 283005 - RNA, 19 nt, Homo sapiens
  misc_RNA (1)...(19): siRNA sense strand
gcagaacccuagcuguaau

SEQ ID NO: 283006 - RNA, 19 nt, Homo sapiens
  misc_RNA (1)...(19): siRNA sense strand
caaauuugccacagaauau

SEQ ID NO: 283007 - RNA, 19 nt, Homo sapiens
  misc_RNA (1)...(19): siRNA sense strand
gcaauugaacuggcuuaua

SEQ ID NO: 283008 - RNA, 19 nt, Homo sapiens
  misc_RNA (1)...(19): siRNA sense strand
gaugaaauucgacaagaaa

SEQ ID NO: 283009 - RNA, 19 nt, Homo sapiens
  misc_RNA (1)...(19): siRNA sense strand
acaaggagccagucaaauu

SEQ ID NO: 283010 - RNA, 19 nt, Homo sapiens
  misc_RNA (1)...(19): siRNA sense strand
caggcuagccagagaauua

SEQ ID NO: 283011 - RNA, 19 nt, Homo sapiens
  misc_RNA (1)...(19): siRNA sense strand
cacccaacguugucaauuu

SEQ ID NO: 283012 - RNA, 19 nt, Homo sapiens
  misc_RNA (1)...(19): siRNA sense strand
gaacuggcuuauaucaaca

SEQ ID NO: 283013 - RNA, 19 nt, Homo sapiens
  misc_RNA (1)...(19): siRNA sense strand
ugaaggaacugcaaaauau

SEQ ID NO: 283014 - RNA, 19 nt, Homo sapiens
  misc_RNA (1)...(19): siRNA sense strand
gaaccaauucaucuuaaga

SEQ ID NO: 283015 - RNA, 19 nt, Homo sapiens
  misc_RNA (1)...(19): siRNA sense strand
gcuaaaggcauuacaagga

SEQ ID NO: 283016 - RNA, 19 nt, Homo sapiens
  misc_RNA (1)...(19): siRNA sense strand
gggcuaaugaacaauaaua

SEQ ID NO: 283017 - RNA, 19 nt, Homo sapiens
  misc_RNA (1)...(19): siRNA sense strand
uggcuuauaucaacacaaa

SEQ ID NO: 283018 - RNA, 19 nt, Homo sapiens
  misc_RNA (1)...(19): siRNA sense strand
caguaucagucucuucuaa

SEQ ID NO: 283019 - RNA, 19 nt, Homo sapiens
  misc_RNA (1)...(19): siRNA sense strand
guuauugaacgacucauua

SEQ ID NO: 283020 - RNA, 19 nt, Homo sapiens
  misc_RNA (1)...(19): siRNA sense strand
ccaaauuugccacagaaua

SEQ ID NO: 283021 - RNA, 19 nt, Homo sapiens
  misc_RNA (1)...(19): siRNA sense strand
ucacuaaacuugaucucau

SEQ ID NO: 283022 - RNA, 19 nt, Homo sapiens
  misc_RNA (1)...(19): siRNA sense strand
gcacagcgcaggaaagaag

SEQ ID NO: 283023 - RNA, 19 nt, Homo sapiens
  misc_RNA (1)...(19): siRNA sense strand
gcuaauuccugucauaaac

SEQ ID NO: 283024 - RNA, 19 nt, Homo sapiens
  misc_RNA (1)...(19): siRNA sense strand
uaaacuucaugaugccaua

SEQ ID NO: 283025 - RNA, 19 nt, Homo sapiens
  misc_RNA (1)...(19): siRNA sense strand
ucacaucagagauuguuua

SEQ ID NO: 283026 - RNA, 19 nt, Homo sapiens
  misc_RNA (1)...(19): siRNA sense strand
uggaauaauuggaguaguu

SEQ ID NO: 283027 - RNA, 19 nt, Homo sapiens
  misc_RNA (1)...(19): siRNA sense strand
caacaucagaggcacuuaa

SEQ ID NO: 283028 - RNA, 19 nt, Homo sapiens
  misc_RNA (1)...(19): siRNA sense strand
gugaacccguggaugauaa

SEQ ID NO: 283029 - RNA, 19 nt, Homo sapiens
  misc_RNA (1)...(19): siRNA sense strand
guaucagucucuucuaaau

SEQ ID NO: 283030 - RNA, 19 nt, Homo sapiens
  misc_RNA (1)...(19): siRNA sense strand
gaaaacaacaggagaagaa

SEQ ID NO: 283031 - RNA, 19 nt, Homo sapiens
  misc_RNA (1)...(19): siRNA sense strand
gaacgacucauuaaaucau

SEQ ID NO: 283032 - RNA, 19 nt, Homo sapiens
  misc_RNA (1)...(19): siRNA sense strand
gaaauggaacaaaguaucu

SEQ ID NO: 283033 - RNA, 19 nt, Homo sapiens
  misc_RNA (1)...(19): siRNA sense strand
caagaagaguguaacugau

SEQ ID NO: 283034 - RNA, 19 nt, Homo sapiens
  misc_RNA (1)...(19): siRNA sense strand
cuaaggauauugagcuuca

SEQ ID NO: 283035 - RNA, 19 nt, Homo sapiens
  misc_RNA (1)...(19): siRNA sense strand
aguaagcccugaaccaauu

SEQ ID NO: 283036 - RNA, 19 nt, Homo sapiens
  misc_RNA (1)...(19): siRNA sense strand
ggaaauaauaagggaguaa

SEQ ID NO: 283037 - RNA, 19 nt, Homo sapiens
  misc_RNA (1)...(19): siRNA sense strand
ggugcuagaauuuguuaua

SEQ ID NO: 283038 - RNA, 19 nt, Homo sapiens
  misc_RNA (1)...(19): siRNA sense strand
gcuguaaucacuaaacuug

SEQ ID NO: 283039 - RNA, 19 nt, Homo sapiens
  misc_RNA (1)...(19): siRNA sense strand
ggaguaagcccugaaccaa

SEQ ID NO: 283040 - RNA, 19 nt, Homo sapiens
  misc_RNA (1)...(19): siRNA sense strand
gcuaugcgguggugcuaga

SEQ ID NO: 283041 - RNA, 19 nt, Homo sapiens
  misc_RNA (1)...(19): siRNA sense strand
ugccugagguuucauuuga

SEQ ID NO: 283042 - RNA, 19 nt, Homo sapiens
  misc_RNA (1)...(19): siRNA sense strand
auacagauauggcaacauc

SEQ ID NO: 283043 - RNA, 19 nt, Homo sapiens
  misc_RNA (1)...(19): siRNA sense strand
gggaacagcgagauuguga

SEQ ID NO: 283044 - RNA, 19 nt, Homo sapiens
  misc_RNA (1)...(19): siRNA sense strand
ucaaaacccauuccaauua

SEQ ID NO: 283045 - RNA, 19 nt, Homo sapiens
  misc_RNA (1)...(19): siRNA sense strand
gaagaguuauuagcagaag

SEQ ID NO: 283046 - RNA, 19 nt, Homo sapiens
  misc_RNA (1)...(19): siRNA sense strand
uaacuuaguggcaauugaa

SEQ ID NO: 283047 - RNA, 19 nt, Homo sapiens
  misc_RNA (1)...(19): siRNA sense strand
gaagauaaacggaaaacaa

SEQ ID NO: 283048 - RNA, 19 nt, Homo sapiens
  misc_RNA (1)...(19): siRNA sense strand
cuacuuuacuccaacuuau

SEQ ID NO: 283049 - RNA, 19 nt, Homo sapiens
  misc_RNA (1)...(19): siRNA sense strand
acaagaagaguguaacuga

SEQ ID NO: 283050 - RNA, 19 nt, Homo sapiens
  misc_RNA (1)...(19): siRNA sense strand
gaaggguuauuccagucaa

SEQ ID NO: 283051 - RNA, 19 nt, Homo sapiens
  misc_RNA (1)...(19): siRNA sense strand
ugaugaaauucgacaagaa

SEQ ID NO: 283052 - RNA, 19 nt, Homo sapiens
  misc_RNA (1)...(19): siRNA sense strand
ugaacuggcuuauaucaac

SEQ ID NO: 283053 - RNA, 19 nt, Homo sapiens
  misc_RNA (1)...(19): siRNA sense strand
gagauuguuuaccagaguu

SEQ ID NO: 283054 - RNA, 19 nt, Homo sapiens
  misc_RNA (1)...(19): siRNA sense strand
guacugaugccauggaugu

SEQ ID NO: 283055 - RNA, 19 nt, Homo sapiens
  misc_RNA (1)...(19): siRNA sense strand
ggugaucaaccuaaggaua

SEQ ID NO: 283056 - RNA, 19 nt, Homo sapiens
  misc_RNA (1)...(19): siRNA sense strand
caaggugccuguaggugau

SEQ ID NO: 283057 - RNA, 19 nt, Homo sapiens
  misc_RNA (1)...(19): siRNA sense strand
gguuggagaugguguucaa

SEQ ID NO: 283058 - RNA, 19 nt, Homo sapiens
  misc_RNA (1)...(19): siRNA sense strand
gaauuaccuucagcuguau

SEQ ID NO: 283059 - RNA, 19 nt, Homo sapiens
  misc_RNA (1)...(19): siRNA sense strand
acacaggaauuguuacgau

SEQ ID NO: 283060 - RNA, 19 nt, Homo sapiens
  misc_RNA (1)...(19): siRNA sense strand
aaucaaacgucuagaagag

SEQ ID NO: 283061 - RNA, 19 nt, Homo sapiens
  misc_RNA (1)...(19): siRNA sense strand
guauugaugggaaggguua

SEQ ID NO: 283062 - RNA, 19 nt, Homo sapiens
  misc_RNA (1)...(19): siRNA sense strand
gagauugugagguuauuga

SEQ ID NO: 283063 - RNA, 19 nt, Homo sapiens
  misc_RNA (1)...(19): siRNA sense strand
cuaaauagcuacggugaac

SEQ ID NO: 283064 - RNA, 19 nt, Homo sapiens
  misc_RNA (1)...(19): siRNA sense strand
aaagguugccuguuacaaa

SEQ ID NO: 283065 - RNA, 19 nt, Homo sapiens
  misc_RNA (1)...(19): siRNA sense strand
auucagcacuguagcaauu

SEQ ID NO: 283066 - RNA, 19 nt, Homo sapiens
  misc_RNA (1)...(19): siRNA sense strand
ugagguuucauuugaguua

SEQ ID NO: 283067 - RNA, 19 nt, Homo sapiens
  misc_RNA (1)...(19): siRNA sense strand
uaccaaauuugccacagaa

SEQ ID NO: 283068 - RNA, 19 nt, Homo sapiens
  misc_RNA (1)...(19): siRNA sense strand
ccuuaacacuauugacauu

SEQ ID NO: 283069 - RNA, 19 nt, Homo sapiens
  misc_RNA (1)...(19): siRNA sense strand
acagcgagauugugagguu

SEQ ID NO: 283070 - RNA, 19 nt, Homo sapiens
  misc_RNA (1)...(19): siRNA sense strand
acaggcaacuggagaggaa

SEQ ID NO: 283071 - RNA, 19 nt, Homo sapiens
  misc_RNA (1)...(19): siRNA sense strand
agacuuugcugaugcuugu

SEQ ID NO: 283072 - RNA, 19 nt, Homo sapiens
  misc_RNA (1)...(19): siRNA sense strand
gaggaaaugcaaaggauca

SEQ ID NO: 283073 - RNA, 19 nt, Homo sapiens
  misc_RNA (1)...(19): siRNA sense strand
gugaucaaccuaaggauau

SEQ ID NO: 283074 - RNA, 19 nt, Homo sapiens
  misc_RNA (1)...(19): siRNA sense strand
uaggccagcuguauaaauc

SEQ ID NO: 283075 - RNA, 19 nt, Homo sapiens
  misc_RNA (1)...(19): siRNA sense strand
caaaacccauuccaauuau

SEQ ID NO: 283076 - RNA, 19 nt, Homo sapiens
  misc_RNA (1)...(19): siRNA sense strand
cacaaaacauccagacuuu

SEQ ID NO: 283077 - RNA, 19 nt, Homo sapiens
  misc_RNA (1)...(19): siRNA sense strand
gaauuguuacgauuuccua

SEQ ID NO: 283078 - RNA, 19 nt, Homo sapiens
  misc_RNA (1)...(19): siRNA sense strand
cacaggaauuguuacgauu

SEQ ID NO: 283079 - RNA, 19 nt, Homo sapiens
  misc_RNA (1)...(19): siRNA sense strand
caauuacaguacacaggaa

SEQ ID NO: 283080 - RNA, 19 nt, Homo sapiens
  misc_RNA (1)...(19): siRNA sense strand
gggcgaaccuuagaaucug

SEQ ID NO: 283081 - RNA, 19 nt, Homo sapiens
  misc_RNA (1)...(19): siRNA sense strand
ggcgcuaauuccugucaua

SEQ ID NO: 283082 - RNA, 19 nt, Homo sapiens
  misc_RNA (1)...(19): siRNA sense strand
uaaacuugaucucauggau

SEQ ID NO: 283083 - RNA, 19 nt, Homo sapiens
  misc_RNA (1)...(19): siRNA sense strand
gaacgcagagcagcggaaa

SEQ ID NO: 283084 - RNA, 19 nt, Homo sapiens
  misc_RNA (1)...(19): siRNA sense strand
gaggaaugcugaaaacuuc

SEQ ID NO: 283085 - RNA, 19 nt, Homo sapiens
  misc_RNA (1)...(19): siRNA sense strand
gguugccuguuacaaauga

SEQ ID NO: 283086 - RNA, 19 nt, Homo sapiens
  misc_RNA (1)...(19): siRNA sense strand
gcuacuuuacuccaacuua

SEQ ID NO: 283087 - RNA, 19 nt, Homo sapiens
  misc_RNA (1)...(19): siRNA sense strand
cagcgagauugugagguua

SEQ ID NO: 283088 - RNA, 19 nt, Homo sapiens
  misc_RNA (1)...(19): siRNA sense strand
caauugaacuggcuuauau

SEQ ID NO: 283089 - RNA, 19 nt, Homo sapiens
  misc_RNA (1)...(19): siRNA sense strand
gaaagaagcagcugauaug

SEQ ID NO: 283090 - RNA, 19 nt, Homo sapiens
  misc_RNA (1)...(19): siRNA sense strand
ggagccagcuagauauuaa

SEQ ID NO: 283091 - RNA, 19 nt, Homo sapiens
  misc_RNA (1)...(19): siRNA sense strand
gaaacaggcuagccagaga

SEQ ID NO: 283092 - RNA, 19 nt, Homo sapiens
  misc_RNA (1)...(19): siRNA sense strand
ugacuugucuucuucguaa

SEQ ID NO: 283093 - RNA, 19 nt, Homo sapiens
  misc_RNA (1)...(19): siRNA sense strand
agaauuaccuucagcugua

SEQ ID NO: 283094 - RNA, 19 nt, Homo sapiens
  misc_RNA (1)...(19): siRNA sense strand
caaaggcaguaaugcauuu

SEQ ID NO: 283095 - RNA, 19 nt, Homo sapiens
  misc_RNA (1)...(19): siRNA sense strand
caaggagccagucaaauua

SEQ ID NO: 283096 - RNA, 19 nt, Homo sapiens
  misc_RNA (1)...(19): siRNA sense strand
ggaacaaaguaucuugcua

SEQ ID NO: 283097 - RNA, 19 nt, Homo sapiens
  misc_RNA (1)...(19): siRNA sense strand
guaaauuucuucacaccaa

SEQ ID NO: 283098 - RNA, 19 nt, Homo sapiens
  misc_RNA (1)...(19): siRNA sense strand
ggaaagaagcagcugauau

SEQ ID NO: 283099 - RNA, 19 nt, Homo sapiens
  misc_RNA (1)...(19): siRNA sense strand
ggaauaauuggaguaguua

SEQ ID NO: 283100 - RNA, 19 nt, Homo sapiens
  misc_RNA (1)...(19): siRNA sense strand
gcaaaucaaacgucuagaa

SEQ ID NO: 283101 - RNA, 19 nt, Homo sapiens
  misc_RNA (1)...(19): siRNA sense strand
caucagagauuguuuacca

SEQ ID NO: 283102 - RNA, 19 nt, Homo sapiens
  misc_RNA (1)...(19): siRNA sense strand
caauagaaauggaacaaag

SEQ ID NO: 283103 - RNA, 19 nt, Homo sapiens
  misc_RNA (1)...(19): siRNA sense strand
acaagaagauaaacggaaa

SEQ ID NO: 283104 - RNA, 19 nt, Homo sapiens
  misc_RNA (1)...(19): siRNA sense strand
cguaaaagguugccuguua

SEQ ID NO: 283105 - RNA, 19 nt, Homo sapiens
  misc_RNA (1)...(19): siRNA sense strand
gcagaacccuagcuguaau

SEQ ID NO: 283106 - RNA, 19 nt, Homo sapiens
  misc_RNA (1)...(19): siRNA sense strand
caaauuugccacagaauau

SEQ ID NO: 283107 - RNA, 19 nt, Homo sapiens
  misc_RNA (1)...(19): siRNA sense strand
gcaauugaacuggcuuaua

SEQ ID NO: 283108 - RNA, 19 nt, Homo sapiens
  misc_RNA (1)...(19): siRNA sense strand
gaugaaauucgacaagaaa

SEQ ID NO: 283109 - RNA, 19 nt, Homo sapiens
  misc_RNA (1)...(19): siRNA sense strand
acaaggagccagucaaauu

SEQ ID NO: 283110 - RNA, 19 nt, Homo sapiens
  misc_RNA (1)...(19): siRNA sense strand
caggcuagccagagaauua

SEQ ID NO: 283111 - RNA, 19 nt, Homo sapiens
  misc_RNA (1)...(19): siRNA sense strand
cacccaacguugucaauuu

SEQ ID NO: 283112 - RNA, 19 nt, Homo sapiens
  misc_RNA (1)...(19): siRNA sense strand
gaacuggcuuauaucaaca

SEQ ID NO: 283113 - RNA, 19 nt, Homo sapiens
  misc_RNA (1)...(19): siRNA sense strand
ugaaggaacugcaaaauau

SEQ ID NO: 283114 - RNA, 19 nt, Homo sapiens
  misc_RNA (1)...(19): siRNA sense strand
gaaccaauucaucuuaaga

SEQ ID NO: 283115 - RNA, 19 nt, Homo sapiens
  misc_RNA (1)...(19): siRNA sense strand
gcuaaaggcauuacaagga

SEQ ID NO: 283116 - RNA, 19 nt, Homo sapiens
  misc_RNA (1)...(19): siRNA sense strand
gggcuaaugaacaauaaua

SEQ ID NO: 283117 - RNA, 19 nt, Homo sapiens
  misc_RNA (1)...(19): siRNA sense strand
uggcuuauaucaacacaaa

SEQ ID NO: 283118 - RNA, 19 nt, Homo sapiens
  misc_RNA (1)...(19): siRNA sense strand
caguaucagucucuucuaa

SEQ ID NO: 283119 - RNA, 19 nt, Homo sapiens
  misc_RNA (1)...(19): siRNA sense strand
guuauugaacgacucauua

SEQ ID NO: 283120 - RNA, 19 nt, Homo sapiens
  misc_RNA (1)...(19): siRNA sense strand
ccaaauuugccacagaaua

SEQ ID NO: 283121 - RNA, 19 nt, Homo sapiens
  misc_RNA (1)...(19): siRNA sense strand
ucacuaaacuugaucucau

SEQ ID NO: 283122 - RNA, 19 nt, Homo sapiens
  misc_RNA (1)...(19): siRNA sense strand
gcacagcgcaggaaagaag

SEQ ID NO: 283123 - RNA, 19 nt, Homo sapiens
  misc_RNA (1)...(19): siRNA sense strand
gcuaauuccugucauaaac

SEQ ID NO: 283124 - RNA, 19 nt, Homo sapiens
  misc_RNA (1)...(19): siRNA sense strand
uaaacuucaugaugccaua

SEQ ID NO: 283125 - RNA, 19 nt, Homo sapiens
  misc_RNA (1)...(19): siRNA sense strand
ucacaucagagauuguuua

SEQ ID NO: 283126 - RNA, 19 nt, Homo sapiens
  misc_RNA (1)...(19): siRNA sense strand
uggaauaauuggaguaguu

SEQ ID NO: 283127 - RNA, 19 nt, Homo sapiens
  misc_RNA (1)...(19): siRNA sense strand
caacaucagaggcacuuaa

SEQ ID NO: 283128 - RNA, 19 nt, Homo sapiens
  misc_RNA (1)...(19): siRNA sense strand
gugaacccguggaugauaa

SEQ ID NO: 283129 - RNA, 19 nt, Homo sapiens
  misc_RNA (1)...(19): siRNA sense strand
guaucagucucuucuaaau

SEQ ID NO: 283130 - RNA, 19 nt, Homo sapiens
  misc_RNA (1)...(19): siRNA sense strand
gaaaacaacaggagaagaa

SEQ ID NO: 283131 - RNA, 19 nt, Homo sapiens
  misc_RNA (1)...(19): siRNA sense strand
gaacgacucauuaaaucau

SEQ ID NO: 283132 - RNA, 19 nt, Homo sapiens
  misc_RNA (1)...(19): siRNA sense strand
gaaauggaacaaaguaucu

SEQ ID NO: 283133 - RNA, 19 nt, Homo sapiens
  misc_RNA (1)...(19): siRNA sense strand
caagaagaguguaacugau

SEQ ID NO: 283134 - RNA, 19 nt, Homo sapiens
  misc_RNA (1)...(19): siRNA sense strand
cuaaggauauugagcuuca

SEQ ID NO: 283135 - RNA, 19 nt, Homo sapiens
  misc_RNA (1)...(19): siRNA sense strand
aguaagcccugaaccaauu

SEQ ID NO: 283136 - RNA, 19 nt, Homo sapiens
  misc_RNA (1)...(19): siRNA sense strand
ggaaauaauaagggaguaa

SEQ ID NO: 283137 - RNA, 19 nt, Homo sapiens
  misc_RNA (1)...(19): siRNA sense strand
ggugcuagaauuuguuaua

SEQ ID NO: 283138 - RNA, 19 nt, Homo sapiens
  misc_RNA (1)...(19): siRNA sense strand
gcuguaaucacuaaacuug

SEQ ID NO: 283139 - RNA, 19 nt, Homo sapiens
  misc_RNA (1)...(19): siRNA sense strand
ggaguaagcccugaaccaa

SEQ ID NO: 283140 - RNA, 19 nt, Homo sapiens
  misc_RNA (1)...(19): siRNA sense strand
gcuaugcgguggugcuaga

SEQ ID NO: 283141 - RNA, 19 nt, Homo sapiens
  misc_RNA (1)...(19): siRNA sense strand
ugccugagguuucauuuga

SEQ ID NO: 283142 - RNA, 19 nt, Homo sapiens
  misc_RNA (1)...(19): siRNA sense strand
auacagauauggcaacauc

SEQ ID NO: 283143 - RNA, 19 nt, Homo sapiens
  misc_RNA (1)...(19): siRNA sense strand
gggaacagcgagauuguga

SEQ ID NO: 283144 - RNA, 19 nt, Homo sapiens
  misc_RNA (1)...(19): siRNA sense strand
ucaaaacccauuccaauua

SEQ ID NO: 283145 - RNA, 19 nt, Homo sapiens
  misc_RNA (1)...(19): siRNA sense strand
gaagaguuauuagcagaag

SEQ ID NO: 283146 - RNA, 19 nt, Homo sapiens
  misc_RNA (1)...(19): siRNA sense strand
uaacuuaguggcaauugaa

SEQ ID NO: 283147 - RNA, 19 nt, Homo sapiens
  misc_RNA (1)...(19): siRNA sense strand
gaagauaaacggaaaacaa

SEQ ID NO: 283148 - RNA, 19 nt, Homo sapiens
  misc_RNA (1)...(19): siRNA sense strand
cuacuuuacuccaacuuau

SEQ ID NO: 283149 - RNA, 19 nt, Homo sapiens
  misc_RNA (1)...(19): siRNA sense strand
acaagaagaguguaacuga

SEQ ID NO: 283150 - RNA, 19 nt, Homo sapiens
  misc_RNA (1)...(19): siRNA sense strand
gaaggguuauuccagucaa

SEQ ID NO: 283151 - RNA, 19 nt, Homo sapiens
  misc_RNA (1)...(19): siRNA sense strand
ugaugaaauucgacaagaa

SEQ ID NO: 283152 - RNA, 19 nt, Homo sapiens
  misc_RNA (1)...(19): siRNA sense strand
ugaacuggcuuauaucaac

SEQ ID NO: 283153 - RNA, 19 nt, Homo sapiens
  misc_RNA (1)...(19): siRNA sense strand
gagauuguuuaccagaguu

SEQ ID NO: 283154 - RNA, 19 nt, Homo sapiens
  misc_RNA (1)...(19): siRNA sense strand
guacugaugccauggaugu

SEQ ID NO: 283155 - RNA, 19 nt, Homo sapiens
  misc_RNA (1)...(19): siRNA sense strand
ggugaucaaccuaaggaua

SEQ ID NO: 283156 - RNA, 19 nt, Homo sapiens
  misc_RNA (1)...(19): siRNA sense strand
caaggugccuguaggugau

SEQ ID NO: 283157 - RNA, 19 nt, Homo sapiens
  misc_RNA (1)...(19): siRNA sense strand
gguuggagaugguguucaa

SEQ ID NO: 283158 - RNA, 19 nt, Homo sapiens
  misc_RNA (1)...(19): siRNA sense strand
gaauuaccuucagcuguau

SEQ ID NO: 283159 - RNA, 19 nt, Homo sapiens
  misc_RNA (1)...(19): siRNA sense strand
acacaggaauuguuacgau

SEQ ID NO: 283160 - RNA, 19 nt, Homo sapiens
  misc_RNA (1)...(19): siRNA sense strand
aaucaaacgucuagaagag

SEQ ID NO: 283161 - RNA, 19 nt, Homo sapiens
  misc_RNA (1)...(19): siRNA sense strand
guauugaugggaaggguua

SEQ ID NO: 283162 - RNA, 19 nt, Homo sapiens
  misc_RNA (1)...(19): siRNA sense strand
gagauugugagguuauuga

SEQ ID NO: 283163 - RNA, 19 nt, Homo sapiens
  misc_RNA (1)...(19): siRNA sense strand
cuaaauagcuacggugaac

SEQ ID NO: 283164 - RNA, 19 nt, Homo sapiens
  misc_RNA (1)...(19): siRNA sense strand
aaagguugccuguuacaaa

SEQ ID NO: 283165 - RNA, 19 nt, Homo sapiens
  misc_RNA (1)...(19): siRNA sense strand
auucagcacuguagcaauu

SEQ ID NO: 283166 - RNA, 19 nt, Homo sapiens
  misc_RNA (1)...(19): siRNA sense strand
ugagguuucauuugaguua

SEQ ID NO: 283167 - RNA, 19 nt, Homo sapiens
  misc_RNA (1)...(19): siRNA sense strand
uaccaaauuugccacagaa

SEQ ID NO: 283168 - RNA, 19 nt, Homo sapiens
  misc_RNA (1)...(19): siRNA sense strand
ccuuaacacuauugacauu

SEQ ID NO: 283169 - RNA, 19 nt, Homo sapiens
  misc_RNA (1)...(19): siRNA sense strand
acagcgagauugugagguu

SEQ ID NO: 283170 - RNA, 19 nt, Homo sapiens
  misc_RNA (1)...(19): siRNA sense strand
acaggcaacuggagaggaa

SEQ ID NO: 283171 - RNA, 19 nt, Homo sapiens
  misc_RNA (1)...(19): siRNA sense strand
agacuuugcugaugcuugu

SEQ ID NO: 283172 - RNA, 19 nt, Homo sapiens
  misc_RNA (1)...(19): siRNA sense strand
gaggaaaugcaaaggauca

SEQ ID NO: 283173 - RNA, 19 nt, Homo sapiens
  misc_RNA (1)...(19): siRNA sense strand
gugaucaaccuaaggauau

SEQ ID NO: 283174 - RNA, 19 nt, Homo sapiens
  misc_RNA (1)...(19): siRNA sense strand
uaggccagcuguauaaauc

SEQ ID NO: 283175 - RNA, 19 nt, Homo sapiens
  misc_RNA (1)...(19): siRNA sense strand
caaaacccauuccaauuau

SEQ ID NO: 283176 - RNA, 19 nt, Homo sapiens
  misc_RNA (1)...(19): siRNA sense strand
cacaaaacauccagacuuu

SEQ ID NO: 283177 - RNA, 19 nt, Homo sapiens
  misc_RNA (1)...(19): siRNA sense strand
gaauuguuacgauuuccua

SEQ ID NO: 283178 - RNA, 19 nt, Homo sapiens
  misc_RNA (1)...(19): siRNA sense strand
cacaggaauuguuacgauu

SEQ ID NO: 283179 - RNA, 19 nt, Homo sapiens
  misc_RNA (1)...(19): siRNA sense strand
caauuacaguacacaggaa

SEQ ID NO: 283180 - RNA, 19 nt, Homo sapiens
  misc_RNA (1)...(19): siRNA sense strand
gggcgaaccuuagaaucug

SEQ ID NO: 283181 - RNA, 19 nt, Homo sapiens
  misc_RNA (1)...(19): siRNA sense strand
ggcgcuaauuccugucaua

SEQ ID NO: 283182 - RNA, 19 nt, Homo sapiens
  misc_RNA (1)...(19): siRNA sense strand
uaaacuugaucucauggau

SEQ ID NO: 283183 - RNA, 19 nt, Homo sapiens
  misc_RNA (1)...(19): siRNA sense strand
gaacgcagagcagcggaaa

SEQ ID NO: 283184 - RNA, 19 nt, Homo sapiens
  misc_RNA (1)...(19): siRNA sense strand
gaggaaugcugaaaacuuc

SEQ ID NO: 283185 - RNA, 19 nt, Homo sapiens
  misc_RNA (1)...(19): siRNA sense strand
gguugccuguuacaaauga

SEQ ID NO: 283186 - RNA, 19 nt, Homo sapiens
  misc_RNA (1)...(19): siRNA sense strand
gcuacuuuacuccaacuua

SEQ ID NO: 283187 - RNA, 19 nt, Homo sapiens
  misc_RNA (1)...(19): siRNA sense strand
cagcgagauugugagguua

SEQ ID NO: 283188 - RNA, 19 nt, Homo sapiens
  misc_RNA (1)...(19): siRNA sense strand
uaacagagcacaucaucaa

SEQ ID NO: 283189 - RNA, 19 nt, Homo sapiens
  misc_RNA (1)...(19): siRNA sense strand
ucacggauguccagcuguu

SEQ ID NO: 283190 - RNA, 19 nt, Homo sapiens
  misc_RNA (1)...(19): siRNA sense strand
gcagcagcuucgugccuuu

SEQ ID NO: 283191 - RNA, 19 nt, Homo sapiens
  misc_RNA (1)...(19): siRNA sense strand
ugaaguacuggauccguua

SEQ ID NO: 283192 - RNA, 19 nt, Homo sapiens
  misc_RNA (1)...(19): siRNA sense strand
cuucgugccuuucauaaca

SEQ ID NO: 283193 - RNA, 19 nt, Homo sapiens
  misc_RNA (1)...(19): siRNA sense strand
cucaggaccucacagacua

SEQ ID NO: 283194 - RNA, 19 nt, Homo sapiens
  misc_RNA (1)...(19): siRNA sense strand
gcccugcaguggaaggaaa

SEQ ID NO: 283195 - RNA, 19 nt, Homo sapiens
  misc_RNA (1)...(19): siRNA sense strand
cagcuucgugccuuucaua

SEQ ID NO: 283196 - RNA, 19 nt, Homo sapiens
  misc_RNA (1)...(19): siRNA sense strand
cauaacagagcacaucauc

SEQ ID NO: 283197 - RNA, 19 nt, Homo sapiens
  misc_RNA (1)...(19): siRNA sense strand
gcucaggaccucacagacu

SEQ ID NO: 283198 - RNA, 19 nt, Homo sapiens
  misc_RNA (1)...(19): siRNA sense strand
uccaccagcugcaccauca

SEQ ID NO: 283199 - RNA, 19 nt, Homo sapiens
  misc_RNA (1)...(19): siRNA sense strand
guacuggauccguuacaag

SEQ ID NO: 283200 - RNA, 19 nt, Homo sapiens
  misc_RNA (1)...(19): siRNA sense strand
uguccuucauugccacgua

SEQ ID NO: 283201 - RNA, 19 nt, Homo sapiens
  misc_RNA (1)...(19): siRNA sense strand
gcagcuucgugccuuucau

SEQ ID NO: 283202 - RNA, 19 nt, Homo sapiens
  misc_RNA (1)...(19): siRNA sense strand
gaaacgagcgucagccuua

SEQ ID NO: 283203 - RNA, 19 nt, Homo sapiens
  misc_RNA (1)...(19): siRNA sense strand
gcagggagauggaggauga

SEQ ID NO: 283204 - RNA, 19 nt, Homo sapiens
  misc_RNA (1)...(19): siRNA sense strand
ggacaaagcucagggaucu

SEQ ID NO: 283205 - RNA, 19 nt, Homo sapiens
  misc_RNA (1)...(19): siRNA sense strand
ugacugcccugccuccuuu

SEQ ID NO: 283206 - RNA, 19 nt, Homo sapiens
  misc_RNA (1)...(19): siRNA sense strand
ggucagggcugcagguaca

SEQ ID NO: 283207 - RNA, 19 nt, Homo sapiens
  misc_RNA (1)...(19): siRNA sense strand
ucacuacccugcucacuag

SEQ ID NO: 283208 - RNA, 19 nt, Homo sapiens
  misc_RNA (1)...(19): siRNA sense strand
cagccuuacucaauuugua

SEQ ID NO: 283209 - RNA, 19 nt, Homo sapiens
  misc_RNA (1)...(19): siRNA sense strand
ggaugaugcucccuaugau

SEQ ID NO: 283210 - RNA, 19 nt, Homo sapiens
  misc_RNA (1)...(19): siRNA sense strand
cgucagccuuacucaauuu

SEQ ID NO: 283211 - RNA, 19 nt, Homo sapiens
  misc_RNA (1)...(19): siRNA sense strand
cagcaggacaccacaauga

SEQ ID NO: 283212 - RNA, 19 nt, Homo sapiens
  misc_RNA (1)...(19): siRNA sense strand
gagaugccuuggaggucua

SEQ ID NO: 283213 - RNA, 19 nt, Homo sapiens
  misc_RNA (1)...(19): siRNA sense strand
gagauggugcaguguguaa

SEQ ID NO: 283214 - RNA, 19 nt, Homo sapiens
  misc_RNA (1)...(19): siRNA sense strand
ccacugugcuggcugucaa

SEQ ID NO: 283215 - RNA, 19 nt, Homo sapiens
  misc_RNA (1)...(19): siRNA sense strand
gcgucagccuuacucaauu

SEQ ID NO: 283216 - RNA, 19 nt, Homo sapiens
  misc_RNA (1)...(19): siRNA sense strand
gcucaucgccugguguuug

SEQ ID NO: 283217 - RNA, 19 nt, Homo sapiens
  misc_RNA (1)...(19): siRNA sense strand
guaugaagcacccgaggaa

SEQ ID NO: 283218 - RNA, 19 nt, Homo sapiens
  misc_RNA (1)...(19): siRNA sense strand
caggacaccacaaugagua

SEQ ID NO: 283219 - RNA, 19 nt, Homo sapiens
  misc_RNA (1)...(19): siRNA sense strand
cuccugaccucaucuacaa

SEQ ID NO: 283220 - RNA, 19 nt, Homo sapiens
  misc_RNA (1)...(19): siRNA sense strand
ggugcaguguguaacagaa

SEQ ID NO: 283221 - RNA, 19 nt, Homo sapiens
  misc_RNA (1)...(19): siRNA sense strand
cgaggaguaugacuauguc

SEQ ID NO: 283222 - RNA, 19 nt, Homo sapiens
  misc_RNA (1)...(19): siRNA sense strand
gaugaugcucccuaugaug

SEQ ID NO: 283223 - RNA, 19 nt, Homo sapiens
  misc_RNA (1)...(19): siRNA sense strand
ccaguacccaggcuaauca

SEQ ID NO: 283224 - RNA, 19 nt, Homo sapiens
  misc_RNA (1)...(19): siRNA sense strand
ccuuggaggucuacgaugu

SEQ ID NO: 283225 - RNA, 19 nt, Homo sapiens
  misc_RNA (1)...(19): siRNA sense strand
gcaggacaccacaaugagu

SEQ ID NO: 283226 - RNA, 19 nt, Homo sapiens
  misc_RNA (1)...(19): siRNA sense strand
gagaucugcagcuccugua

SEQ ID NO: 283227 - RNA, 19 nt, Homo sapiens
  misc_RNA (1)...(19): siRNA sense strand
aggaugaugcucccuauga

SEQ ID NO: 283228 - RNA, 19 nt, Homo sapiens
  misc_RNA (1)...(19): siRNA sense strand
agaggaugaugcucccuau

SEQ ID NO: 283229 - RNA, 19 nt, Homo sapiens
  misc_RNA (1)...(19): siRNA sense strand
ugaagggcauggacaaagc

SEQ ID NO: 283230 - RNA, 19 nt, Homo sapiens
  misc_RNA (1)...(19): siRNA sense strand
gagccuuggccucccauga

SEQ ID NO: 283231 - RNA, 19 nt, Homo sapiens
  misc_RNA (1)...(19): siRNA sense strand
gcccugccauccaagagau

SEQ ID NO: 283232 - RNA, 19 nt, Homo sapiens
  misc_RNA (1)...(19): siRNA sense strand
aagagauggugcagugugu

SEQ ID NO: 283233 - RNA, 19 nt, Homo sapiens
  misc_RNA (1)...(19): siRNA sense strand
gagcgucagccuuacucaa

SEQ ID NO: 283234 - RNA, 19 nt, Homo sapiens
  misc_RNA (1)...(19): siRNA sense strand
ggccgaggaguaugacuau

SEQ ID NO: 283235 - RNA, 19 nt, Homo sapiens
  misc_RNA (1)...(19): siRNA sense strand
ccgccugccugguuaugga

SEQ ID NO: 283236 - RNA, 19 nt, Homo sapiens
  misc_RNA (1)...(19): siRNA sense strand
gauggugcaguguguaaca

SEQ ID NO: 283237 - RNA, 19 nt, Homo sapiens
  misc_RNA (1)...(19): siRNA sense strand
ccgaggaguaugacuaugu

SEQ ID NO: 283238 - RNA, 19 nt, Homo sapiens
  misc_RNA (1)...(19): siRNA sense strand
gcagcuccuguacuucuau

SEQ ID NO: 283239 - RNA, 19 nt, Homo sapiens
  misc_RNA (1)...(19): siRNA sense strand
gcagcccugauguccagua

SEQ ID NO: 283240 - RNA, 19 nt, Homo sapiens
  misc_RNA (1)...(19): siRNA sense strand
gaaacgagcgucagccuua

SEQ ID NO: 283241 - RNA, 19 nt, Homo sapiens
  misc_RNA (1)...(19): siRNA sense strand
gcagggagauggaggauga

SEQ ID NO: 283242 - RNA, 19 nt, Homo sapiens
  misc_RNA (1)...(19): siRNA sense strand
ggacaaagcucagggaucu

SEQ ID NO: 283243 - RNA, 19 nt, Homo sapiens
  misc_RNA (1)...(19): siRNA sense strand
ugacugcccugccuccuuu

SEQ ID NO: 283244 - RNA, 19 nt, Homo sapiens
  misc_RNA (1)...(19): siRNA sense strand
ggucagggcugcagguaca

SEQ ID NO: 283245 - RNA, 19 nt, Homo sapiens
  misc_RNA (1)...(19): siRNA sense strand
ucacuacccugcucacuag

SEQ ID NO: 283246 - RNA, 19 nt, Homo sapiens
  misc_RNA (1)...(19): siRNA sense strand
cagccuuacucaauuugua

SEQ ID NO: 283247 - RNA, 19 nt, Homo sapiens
  misc_RNA (1)...(19): siRNA sense strand
ggaugaugcucccuaugau

SEQ ID NO: 283248 - RNA, 19 nt, Homo sapiens
  misc_RNA (1)...(19): siRNA sense strand
cgucagccuuacucaauuu

SEQ ID NO: 283249 - RNA, 19 nt, Homo sapiens
  misc_RNA (1)...(19): siRNA sense strand
cagcaggacaccacaauga

SEQ ID NO: 283250 - RNA, 19 nt, Homo sapiens
  misc_RNA (1)...(19): siRNA sense strand
gagaugccuuggaggucua

SEQ ID NO: 283251 - RNA, 19 nt, Homo sapiens
  misc_RNA (1)...(19): siRNA sense strand
gagauggugcaguguguaa

SEQ ID NO: 283252 - RNA, 19 nt, Homo sapiens
  misc_RNA (1)...(19): siRNA sense strand
ccacugugcuggcugucaa

SEQ ID NO: 283253 - RNA, 19 nt, Homo sapiens
  misc_RNA (1)...(19): siRNA sense strand
gcgucagccuuacucaauu

SEQ ID NO: 283254 - RNA, 19 nt, Homo sapiens
  misc_RNA (1)...(19): siRNA sense strand
gcucaucgccugguguuug

SEQ ID NO: 283255 - RNA, 19 nt, Homo sapiens
  misc_RNA (1)...(19): siRNA sense strand
guaugaagcacccgaggaa

SEQ ID NO: 283256 - RNA, 19 nt, Homo sapiens
  misc_RNA (1)...(19): siRNA sense strand
caggacaccacaaugagua

SEQ ID NO: 283257 - RNA, 19 nt, Homo sapiens
  misc_RNA (1)...(19): siRNA sense strand
cuccugaccucaucuacaa

SEQ ID NO: 283258 - RNA, 19 nt, Homo sapiens
  misc_RNA (1)...(19): siRNA sense strand
ggugcaguguguaacagaa

SEQ ID NO: 283259 - RNA, 19 nt, Homo sapiens
  misc_RNA (1)...(19): siRNA sense strand
cgaggaguaugacuauguc

SEQ ID NO: 283260 - RNA, 19 nt, Homo sapiens
  misc_RNA (1)...(19): siRNA sense strand
gaugaugcucccuaugaug

SEQ ID NO: 283261 - RNA, 19 nt, Homo sapiens
  misc_RNA (1)...(19): siRNA sense strand
ccaguacccaggcuaauca

SEQ ID NO: 283262 - RNA, 19 nt, Homo sapiens
  misc_RNA (1)...(19): siRNA sense strand
ccuuggaggucuacgaugu

SEQ ID NO: 283263 - RNA, 19 nt, Homo sapiens
  misc_RNA (1)...(19): siRNA sense strand
gcaggacaccacaaugagu

SEQ ID NO: 283264 - RNA, 19 nt, Homo sapiens
  misc_RNA (1)...(19): siRNA sense strand
gagaucugcagcuccugua

SEQ ID NO: 283265 - RNA, 19 nt, Homo sapiens
  misc_RNA (1)...(19): siRNA sense strand
aggaugaugcucccuauga

SEQ ID NO: 283266 - RNA, 19 nt, Homo sapiens
  misc_RNA (1)...(19): siRNA sense strand
agaggaugaugcucccuau

SEQ ID NO: 283267 - RNA, 19 nt, Homo sapiens
  misc_RNA (1)...(19): siRNA sense strand
ugaagggcauggacaaagc

SEQ ID NO: 283268 - RNA, 19 nt, Homo sapiens
  misc_RNA (1)...(19): siRNA sense strand
gagccuuggccucccauga

SEQ ID NO: 283269 - RNA, 19 nt, Homo sapiens
  misc_RNA (1)...(19): siRNA sense strand
gcccugccauccaagagau

SEQ ID NO: 283270 - RNA, 19 nt, Homo sapiens
  misc_RNA (1)...(19): siRNA sense strand
aagagauggugcagugugu

SEQ ID NO: 283271 - RNA, 19 nt, Homo sapiens
  misc_RNA (1)...(19): siRNA sense strand
gagcgucagccuuacucaa

SEQ ID NO: 283272 - RNA, 19 nt, Homo sapiens
  misc_RNA (1)...(19): siRNA sense strand
ggccgaggaguaugacuau

SEQ ID NO: 283273 - RNA, 19 nt, Homo sapiens
  misc_RNA (1)...(19): siRNA sense strand
ccgccugccugguuaugga

SEQ ID NO: 283274 - RNA, 19 nt, Homo sapiens
  misc_RNA (1)...(19): siRNA sense strand
gauggugcaguguguaaca

SEQ ID NO: 283275 - RNA, 19 nt, Homo sapiens
  misc_RNA (1)...(19): siRNA sense strand
ccgaggaguaugacuaugu

SEQ ID NO: 283276 - RNA, 19 nt, Homo sapiens
  misc_RNA (1)...(19): siRNA sense strand
gcagcuccuguacuucuau

SEQ ID NO: 283277 - RNA, 19 nt, Homo sapiens
  misc_RNA (1)...(19): siRNA sense strand
gcagcccugauguccagua

SEQ ID NO: 283278 - RNA, 19 nt, Homo sapiens
  misc_RNA (1)...(19): siRNA sense strand
gaacucauccggcagaaua

SEQ ID NO: 283279 - RNA, 19 nt, Homo sapiens
  misc_RNA (1)...(19): siRNA sense strand
gcacaucuccguacaagga

SEQ ID NO: 283280 - RNA, 19 nt, Homo sapiens
  misc_RNA (1)...(19): siRNA sense strand
acaauucucugcuuucuau

SEQ ID NO: 283281 - RNA, 19 nt, Homo sapiens
  misc_RNA (1)...(19): siRNA sense strand
gcaacgauaaauacucuua

SEQ ID NO: 283282 - RNA, 19 nt, Homo sapiens
  misc_RNA (1)...(19): siRNA sense strand
gagcaacgauaaauacucu

SEQ ID NO: 283283 - RNA, 19 nt, Homo sapiens
  misc_RNA (1)...(19): siRNA sense strand
gaacaauccgcccaugaug

SEQ ID NO: 283284 - RNA, 19 nt, Homo sapiens
  misc_RNA (1)...(19): siRNA sense strand
gcacuucagccaagcagaa

SEQ ID NO: 283285 - RNA, 19 nt, Homo sapiens
  misc_RNA (1)...(19): siRNA sense strand
ggaucgagcaccucaaaga

SEQ ID NO: 283286 - RNA, 19 nt, Homo sapiens
  misc_RNA (1)...(19): siRNA sense strand
cgccuggucugcaagauuu

SEQ ID NO: 283287 - RNA, 19 nt, Homo sapiens
  misc_RNA (1)...(19): siRNA sense strand
gagaacaauccgcccauga

SEQ ID NO: 283288 - RNA, 19 nt, Homo sapiens
  misc_RNA (1)...(19): siRNA sense strand
guacgacaacuaccgacua

SEQ ID NO: 283289 - RNA, 19 nt, Homo sapiens
  misc_RNA (1)...(19): siRNA sense strand
gaauccaggaguucauuga

SEQ ID NO: 283290 - RNA, 19 nt, Homo sapiens
  misc_RNA (1)...(19): siRNA sense strand
gaagaggaagcgcauggau

SEQ ID NO: 283291 - RNA, 19 nt, Homo sapiens
  misc_RNA (1)...(19): siRNA sense strand
ccgagaagguguacaucau

SEQ ID NO: 283292 - RNA, 19 nt, Homo sapiens
  misc_RNA (1)...(19): siRNA sense strand
gcgacgugaugaacgagaa

SEQ ID NO: 283293 - RNA, 19 nt, Homo sapiens
  misc_RNA (1)...(19): siRNA sense strand
gagacuggacgcugugaga

SEQ ID NO: 283294 - RNA, 19 nt, Homo sapiens
  misc_RNA (1)...(19): siRNA sense strand
ucaagacaccacagugcua

SEQ ID NO: 283295 - RNA, 19 nt, Homo sapiens
  misc_RNA (1)...(19): siRNA sense strand
gauccgugagcaacgauaa

SEQ ID NO: 283296 - RNA, 19 nt, Homo sapiens
  misc_RNA (1)...(19): siRNA sense strand
gaggacggcagcuccaaga

SEQ ID NO: 283297 - RNA, 19 nt, Homo sapiens
  misc_RNA (1)...(19): siRNA sense strand
ggaguucagccucagaauc

SEQ ID NO: 283298 - RNA, 19 nt, Homo sapiens
  misc_RNA (1)...(19): siRNA sense strand
ggcuacaauucucugcuuu

SEQ ID NO: 283299 - RNA, 19 nt, Homo sapiens
  misc_RNA (1)...(19): siRNA sense strand
ugugagacaugcaagaaag

SEQ ID NO: 283300 - RNA, 19 nt, Homo sapiens
  misc_RNA (1)...(19): siRNA sense strand
cggcuacaauucucugcuu

SEQ ID NO: 283301 - RNA, 19 nt, Homo sapiens
  misc_RNA (1)...(19): siRNA sense strand
aaagauccgugagcaacga

SEQ ID NO: 283302 - RNA, 19 nt, Homo sapiens
  misc_RNA (1)...(19): siRNA sense strand
aaagucgugugcccgagaa

SEQ ID NO: 283303 - RNA, 19 nt, Homo sapiens
  misc_RNA (1)...(19): siRNA sense strand
cuacaauucucugcuuucu

SEQ ID NO: 283304 - RNA, 19 nt, Homo sapiens
  misc_RNA (1)...(19): siRNA sense strand
gaucgagcaccucaaagag

SEQ ID NO: 283305 - RNA, 19 nt, Homo sapiens
  misc_RNA (1)...(19): siRNA sense strand
cgagaagguguacaucaug

SEQ ID NO: 283306 - RNA, 19 nt, Homo sapiens
  misc_RNA (1)...(19): siRNA sense strand
gagcaccucaaagagcaua

SEQ ID NO: 283307 - RNA, 19 nt, Homo sapiens
  misc_RNA (1)...(19): siRNA sense strand
gagcuggagaggacguuga

SEQ ID NO: 283308 - RNA, 19 nt, Homo sapiens
  misc_RNA (1)...(19): siRNA sense strand
gcugugagacaugcaagaa

SEQ ID NO: 283309 - RNA, 19 nt, Homo sapiens
  misc_RNA (1)...(19): siRNA sense strand
ggaagaggaagcgcaugga

SEQ ID NO: 283310 - RNA, 19 nt, Homo sapiens
  misc_RNA (1)...(19): siRNA sense strand
ccgcucagaagaacauuga

SEQ ID NO: 283311 - RNA, 19 nt, Homo sapiens
  misc_RNA (1)...(19): siRNA sense strand
gaagcucagcguccucaag

SEQ ID NO: 283312 - RNA, 19 nt, Homo sapiens
  misc_RNA (1)...(19): siRNA sense strand
acacgcacaucuccguaca

SEQ ID NO: 283313 - RNA, 19 nt, Homo sapiens
  misc_RNA (1)...(19): siRNA sense strand
ccgucaagaugauaaaguc

SEQ ID NO: 283314 - RNA, 19 nt, Homo sapiens
  misc_RNA (1)...(19): siRNA sense strand
ccuacgagacgcugaacaa

SEQ ID NO: 283315 - RNA, 19 nt, Homo sapiens
  misc_RNA (1)...(19): siRNA sense strand
uacaccagcugggaaacaa

SEQ ID NO: 283316 - RNA, 19 nt, Homo sapiens
  misc_RNA (1)...(19): siRNA sense strand
aagcucagcguccucaaga

SEQ ID NO: 283317 - RNA, 19 nt, Homo sapiens
  misc_RNA (1)...(19): siRNA sense strand
agaacaauccgcccaugau

SEQ ID NO: 283318 - RNA, 19 nt, Homo sapiens
  misc_RNA (1)...(19): siRNA sense strand
cuacaacacggcugucaag

SEQ ID NO: 283319 - RNA, 19 nt, Homo sapiens
  misc_RNA (1)...(19): siRNA sense strand
gcacgguggcggaucugau

SEQ ID NO: 283320 - RNA, 19 nt, Homo sapiens
  misc_RNA (1)...(19): siRNA sense strand
caacgauaaauacucuuag

SEQ ID NO: 283321 - RNA, 19 nt, Homo sapiens
  misc_RNA (1)...(19): siRNA sense strand
caccagcugggaaacaauu

SEQ ID NO: 283322 - RNA, 19 nt, Homo sapiens
  misc_RNA (1)...(19): siRNA sense strand
acgagacgcugaacaaacg

SEQ ID NO: 283323 - RNA, 19 nt, Homo sapiens
  misc_RNA (1)...(19): siRNA sense strand
cuacgagacgcugaacaaa

SEQ ID NO: 283324 - RNA, 19 nt, Homo sapiens
  misc_RNA (1)...(19): siRNA sense strand
agaggaaggcgguggaauc

SEQ ID NO: 283325 - RNA, 19 nt, Homo sapiens
  misc_RNA (1)...(19): siRNA sense strand
gccgagaagguguacauca

SEQ ID NO: 283326 - RNA, 19 nt, Homo sapiens
  misc_RNA (1)...(19): siRNA sense strand
cuacgucuacggcuacaau

SEQ ID NO: 283327 - RNA, 19 nt, Homo sapiens
  misc_RNA (1)...(19): siRNA sense strand
gcccaacggcuacgucuac

SEQ ID NO: 283328 - RNA, 19 nt, Homo sapiens
  misc_RNA (1)...(19): siRNA sense strand
gugaugaacgagaacaauc

SEQ ID NO: 283329 - RNA, 19 nt, Homo sapiens
  misc_RNA (1)...(19): siRNA sense strand
gacuacaccagcugggaaa

SEQ ID NO: 283330 - RNA, 19 nt, Homo sapiens
  misc_RNA (1)...(19): siRNA sense strand
cagaauccaggaguucauu

SEQ ID NO: 283331 - RNA, 19 nt, Homo sapiens
  misc_RNA (1)...(19): siRNA sense strand
gaguucagccucagaaucc

SEQ ID NO: 283332 - RNA, 19 nt, Homo sapiens
  misc_RNA (1)...(19): siRNA sense strand
ccggaucgagcaccucaaa

SEQ ID NO: 283333 - RNA, 19 nt, Homo sapiens
  misc_RNA (1)...(19): siRNA sense strand
gcuacaauucucugcuuuc

SEQ ID NO: 283334 - RNA, 19 nt, Homo sapiens
  misc_RNA (1)...(19): siRNA sense strand
uacgacaacuaccgacuac

SEQ ID NO: 283335 - RNA, 19 nt, Homo sapiens
  misc_RNA (1)...(19): siRNA sense strand
guaugaagcugaagagaga

SEQ ID NO: 283336 - RNA, 19 nt, Homo sapiens
  misc_RNA (1)...(19): siRNA sense strand
gaaauugaguccaaguugu

SEQ ID NO: 283337 - RNA, 19 nt, Homo sapiens
  misc_RNA (1)...(19): siRNA sense strand
gagagagcccucagaguua

SEQ ID NO: 283338 - RNA, 19 nt, Homo sapiens
  misc_RNA (1)...(19): siRNA sense strand
ccagaugaguucccacuug

SEQ ID NO: 283339 - RNA, 19 nt, Homo sapiens
  misc_RNA (1)...(19): siRNA sense strand
ugaggaaacugaggaaaga

SEQ ID NO: 283340 - RNA, 19 nt, Homo sapiens
  misc_RNA (1)...(19): siRNA sense strand
agagagagcccucagaguu

SEQ ID NO: 283341 - RNA, 19 nt, Homo sapiens
  misc_RNA (1)...(19): siRNA sense strand
aaagcgcucugaacuguau

SEQ ID NO: 283342 - RNA, 19 nt, Homo sapiens
  misc_RNA (1)...(19): siRNA sense strand
ucagaaacgugaaauugag

SEQ ID NO: 283343 - RNA, 19 nt, Homo sapiens
  misc_RNA (1)...(19): siRNA sense strand
gcuggagggugaagugugu

SEQ ID NO: 283344 - RNA, 19 nt, Homo sapiens
  misc_RNA (1)...(19): siRNA sense strand
gagaaauugaggaaacuga

SEQ ID NO: 283345 - RNA, 19 nt, Homo sapiens
  misc_RNA (1)...(19): siRNA sense strand
ccucagaguuaugcuagaa

SEQ ID NO: 283346 - RNA, 19 nt, Homo sapiens
  misc_RNA (1)...(19): siRNA sense strand
ugaaauugaguccaaguug

SEQ ID NO: 283347 - RNA, 19 nt, Homo sapiens
  misc_RNA (1)...(19): siRNA sense strand
gccauccgaucaucccaaa

SEQ ID NO: 283348 - RNA, 19 nt, Homo sapiens
  misc_RNA (1)...(19): siRNA sense strand
ugaacuguaugaagcugaa

SEQ ID NO: 283349 - RNA, 19 nt, Homo sapiens
  misc_RNA (1)...(19): siRNA sense strand
agaaggagaacaagaggaa

SEQ ID NO: 283350 - RNA, 19 nt, Homo sapiens
  misc_RNA (1)...(19): siRNA sense strand
agagagcccucagaguuau

SEQ ID NO: 283351 - RNA, 19 nt, Homo sapiens
  misc_RNA (1)...(19): siRNA sense strand
ugcaggagguggaggagaa

SEQ ID NO: 283352 - RNA, 19 nt, Homo sapiens
  misc_RNA (1)...(19): siRNA sense strand
ucuacgggcuuuggagaaa

SEQ ID NO: 283353 - RNA, 19 nt, Homo sapiens
  misc_RNA (1)...(19): siRNA sense strand
gcuagaaggagaacaagag

SEQ ID NO: 283354 - RNA, 19 nt, Homo sapiens
  misc_RNA (1)...(19): siRNA sense strand
gaagaagcgggagcaggaa

SEQ ID NO: 283355 - RNA, 19 nt, Homo sapiens
  misc_RNA (1)...(19): siRNA sense strand
ugccagcgcucauccagau

SEQ ID NO: 283356 - RNA, 19 nt, Homo sapiens
  misc_RNA (1)...(19): siRNA sense strand
gaagagaggaaaagagaau

SEQ ID NO: 283357 - RNA, 19 nt, Homo sapiens
  misc_RNA (1)...(19): siRNA sense strand
caacuucguuccccaagga

SEQ ID NO: 283358 - RNA, 19 nt, Homo sapiens
  misc_RNA (1)...(19): siRNA sense strand
aaauugaguccaaguuguu

SEQ ID NO: 283359 - RNA, 19 nt, Homo sapiens
  misc_RNA (1)...(19): siRNA sense strand
gagccuuuccgacaguauu

SEQ ID NO: 283360 - RNA, 19 nt, Homo sapiens
  misc_RNA (1)...(19): siRNA sense strand
gcugauggcguacuaucug

SEQ ID NO: 283361 - RNA, 19 nt, Homo sapiens
  misc_RNA (1)...(19): siRNA sense strand
gaggaaaagagaauuagaa

SEQ ID NO: 283362 - RNA, 19 nt, Homo sapiens
  misc_RNA (1)...(19): siRNA sense strand
ggaacgcgagcaggagauu

SEQ ID NO: 283363 - RNA, 19 nt, Homo sapiens
  misc_RNA (1)...(19): siRNA sense strand
ggcguacuaucugaaguga

SEQ ID NO: 283364 - RNA, 19 nt, Homo sapiens
  misc_RNA (1)...(19): siRNA sense strand
uacgggcuuuggagaaauu

SEQ ID NO: 283365 - RNA, 19 nt, Homo sapiens
  misc_RNA (1)...(19): siRNA sense strand
cccacuugcucaccucuug

SEQ ID NO: 283366 - RNA, 19 nt, Homo sapiens
  misc_RNA (1)...(19): siRNA sense strand
gaacgcgagcaggagauug

SEQ ID NO: 283367 - RNA, 19 nt, Homo sapiens
  misc_RNA (1)...(19): siRNA sense strand
cugauggcguacuaucuga

SEQ ID NO: 283368 - RNA, 19 nt, Homo sapiens
  misc_RNA (1)...(19): siRNA sense strand
ccgacaguauuaucuccaa

SEQ ID NO: 283369 - RNA, 19 nt, Homo sapiens
  misc_RNA (1)...(19): siRNA sense strand
aacgugaaauugaguccaa

SEQ ID NO: 283370 - RNA, 19 nt, Homo sapiens
  misc_RNA (1)...(19): siRNA sense strand
acaagcagauaccaaaaga

SEQ ID NO: 283371 - RNA, 19 nt, Homo sapiens
  misc_RNA (1)...(19): siRNA sense strand
gcagauaccaaaagaaugg

SEQ ID NO: 283372 - RNA, 19 nt, Homo sapiens
  misc_RNA (1)...(19): siRNA sense strand
aaaacaagcagauaccaaa

SEQ ID NO: 283373 - RNA, 19 nt, Homo sapiens
  misc_RNA (1)...(19): siRNA sense strand
ggagcaggaacucaaagca

SEQ ID NO: 283374 - RNA, 19 nt, Homo sapiens
  misc_RNA (1)...(19): siRNA sense strand
gugaaauugaguccaaguu

SEQ ID NO: 283375 - RNA, 19 nt, Homo sapiens
  misc_RNA (1)...(19): siRNA sense strand
ggagaacaagaggaagaga

SEQ ID NO: 283376 - RNA, 19 nt, Homo sapiens
  misc_RNA (1)...(19): siRNA sense strand
ccaaaagaaugguggacau

SEQ ID NO: 283377 - RNA, 19 nt, Homo sapiens
  misc_RNA (1)...(19): siRNA sense strand
gggcaacugcuguuaagcu

SEQ ID NO: 283378 - RNA, 19 nt, Homo sapiens
  misc_RNA (1)...(19): siRNA sense strand
aaggagaacaagaggaaga

SEQ ID NO: 283379 - RNA, 19 nt, Homo sapiens
  misc_RNA (1)...(19): siRNA sense strand
gcagagaagucccaacuaa

SEQ ID NO: 283380 - RNA, 19 nt, Homo sapiens
  misc_RNA (1)...(19): siRNA sense strand
gagaagucccaacuaauua

SEQ ID NO: 283381 - RNA, 19 nt, Homo sapiens
  misc_RNA (1)...(19): siRNA sense strand
gaggaucucucucaacaca

SEQ ID NO: 283382 - RNA, 19 nt, Homo sapiens
  misc_RNA (1)...(19): siRNA sense strand
gugguuagcuacacucuga

SEQ ID NO: 283383 - RNA, 19 nt, Homo sapiens
  misc_RNA (1)...(19): siRNA sense strand
acagagagauuacgaacug

SEQ ID NO: 283384 - RNA, 19 nt, Homo sapiens
  misc_RNA (1)...(19): siRNA sense strand
agacuaagcagcagauuga

SEQ ID NO: 283385 - RNA, 19 nt, Homo sapiens
  misc_RNA (1)...(19): siRNA sense strand
gaagacggaggcugagauu

SEQ ID NO: 283386 - RNA, 19 nt, Homo sapiens
  misc_RNA (1)...(19): siRNA sense strand
gaaguacuggacauucuaa

SEQ ID NO: 283387 - RNA, 19 nt, Homo sapiens
  misc_RNA (1)...(19): siRNA sense strand
uggaggagaucuauaagga

SEQ ID NO: 283388 - RNA, 19 nt, Homo sapiens
  misc_RNA (1)...(19): siRNA sense strand
ucgaacagcucaaguccaa

SEQ ID NO: 283389 - RNA, 19 nt, Homo sapiens
  misc_RNA (1)...(19): siRNA sense strand
agagaagucccaacuaauu

SEQ ID NO: 283390 - RNA, 19 nt, Homo sapiens
  misc_RNA (1)...(19): siRNA sense strand
ggaaguacuggacauucua

SEQ ID NO: 283391 - RNA, 19 nt, Homo sapiens
  misc_RNA (1)...(19): siRNA sense strand
ccaaggcacagagagauua

SEQ ID NO: 283392 - RNA, 19 nt, Homo sapiens
  misc_RNA (1)...(19): siRNA sense strand
ucacaagccuuugagaaca

SEQ ID NO: 283393 - RNA, 19 nt, Homo sapiens
  misc_RNA (1)...(19): siRNA sense strand
caaagugacuggggaagua

SEQ ID NO: 283394 - RNA, 19 nt, Homo sapiens
  misc_RNA (1)...(19): siRNA sense strand
gcaucagugugguuagcua

SEQ ID NO: 283395 - RNA, 19 nt, Homo sapiens
  misc_RNA (1)...(19): siRNA sense strand
gggaaguacuggacauucu

SEQ ID NO: 283396 - RNA, 19 nt, Homo sapiens
  misc_RNA (1)...(19): siRNA sense strand
gagauuacgaacugaagaa

SEQ ID NO: 283397 - RNA, 19 nt, Homo sapiens
  misc_RNA (1)...(19): siRNA sense strand
aaaggugucugcucaguac

SEQ ID NO: 283398 - RNA, 19 nt, Homo sapiens
  misc_RNA (1)...(19): siRNA sense strand
gaucaguggucccuugacu

SEQ ID NO: 283399 - RNA, 19 nt, Homo sapiens
  misc_RNA (1)...(19): siRNA sense strand
gcugaggccuuugccauag

SEQ ID NO: 283400 - RNA, 19 nt, Homo sapiens
  misc_RNA (1)...(19): siRNA sense strand
gaacagcucaaguccaaaa

SEQ ID NO: 283401 - RNA, 19 nt, Homo sapiens
  misc_RNA (1)...(19): siRNA sense strand
cugagcagauggccaagaa

SEQ ID NO: 283402 - RNA, 19 nt, Homo sapiens
  misc_RNA (1)...(19): siRNA sense strand
gaaggacauucacgaugac

SEQ ID NO: 283403 - RNA, 19 nt, Homo sapiens
  misc_RNA (1)...(19): siRNA sense strand
gaagucccaacuaauuaug

SEQ ID NO: 283404 - RNA, 19 nt, Homo sapiens
  misc_RNA (1)...(19): siRNA sense strand
ucaacacacugacccucaa

SEQ ID NO: 283405 - RNA, 19 nt, Homo sapiens
  misc_RNA (1)...(19): siRNA sense strand
gcuacacucugaaggacau

SEQ ID NO: 283406 - RNA, 19 nt, Homo sapiens
  misc_RNA (1)...(19): siRNA sense strand
ggaagacggaggcugagau

SEQ ID NO: 283407 - RNA, 19 nt, Homo sapiens
  misc_RNA (1)...(19): siRNA sense strand
ucacuuguggcccaaauga

SEQ ID NO: 283408 - RNA, 19 nt, Homo sapiens
  misc_RNA (1)...(19): siRNA sense strand
cagaacagguuuucaaagu

SEQ ID NO: 283409 - RNA, 19 nt, Homo sapiens
  misc_RNA (1)...(19): siRNA sense strand
ggaucucucucaacacacu

SEQ ID NO: 283410 - RNA, 19 nt, Homo sapiens
  misc_RNA (1)...(19): siRNA sense strand
gcuaaagccaagcaggaaa

SEQ ID NO: 283411 - RNA, 19 nt, Homo sapiens
  misc_RNA (1)...(19): siRNA sense strand
acauugcccuggagacguu

SEQ ID NO: 283412 - RNA, 19 nt, Homo sapiens
  misc_RNA (1)...(19): siRNA sense strand
gccagagaguguggaaaga

SEQ ID NO: 283413 - RNA, 19 nt, Homo sapiens
  misc_RNA (1)...(19): siRNA sense strand
gaaaaggugucugcucagu

SEQ ID NO: 283414 - RNA, 19 nt, Homo sapiens
  misc_RNA (1)...(19): siRNA sense strand
ucaaaguggccuccucaga

SEQ ID NO: 283415 - RNA, 19 nt, Homo sapiens
  misc_RNA (1)...(19): siRNA sense strand
auaaggacaggcagaaauu

SEQ ID NO: 283416 - RNA, 19 nt, Homo sapiens
  misc_RNA (1)...(19): siRNA sense strand
uauaaggacaggcagaaau

SEQ ID NO: 283417 - RNA, 19 nt, Homo sapiens
  misc_RNA (1)...(19): siRNA sense strand
guacuggacauucuaacuc

SEQ ID NO: 283418 - RNA, 19 nt, Homo sapiens
  misc_RNA (1)...(19): siRNA sense strand
ugacuucagccaauaagau

SEQ ID NO: 283419 - RNA, 19 nt, Homo sapiens
  misc_RNA (1)...(19): siRNA sense strand
gagaucaguggucccuuga

SEQ ID NO: 283420 - RNA, 19 nt, Homo sapiens
  misc_RNA (1)...(19): siRNA sense strand
gcugagauugcccacauug

SEQ ID NO: 283421 - RNA, 19 nt, Homo sapiens
  misc_RNA (1)...(19): siRNA sense strand
cuaacucgccugccagaga

SEQ ID NO: 283422 - RNA, 19 nt, Homo sapiens
  misc_RNA (1)...(19): siRNA sense strand
ugaccuggccuaucagcuu

SEQ ID NO: 283423 - RNA, 19 nt, Homo sapiens
  misc_RNA (1)...(19): siRNA sense strand
ucaguggucccuugacuuc

SEQ ID NO: 283424 - RNA, 19 nt, Homo sapiens
  misc_RNA (1)...(19): siRNA sense strand
ggacaugcugcuagagaag

SEQ ID NO: 283425 - RNA, 19 nt, Homo sapiens
  misc_RNA (1)...(19): siRNA sense strand
uggacaugcugcuagagaa

SEQ ID NO: 283426 - RNA, 19 nt, Homo sapiens
  misc_RNA (1)...(19): siRNA sense strand
cagagaagucccaacuaau

SEQ ID NO: 283427 - RNA, 19 nt, Homo sapiens
  misc_RNA (1)...(19): siRNA sense strand
aaucacaagccuuugagaa

SEQ ID NO: 283428 - RNA, 19 nt, Homo sapiens
  misc_RNA (1)...(19): siRNA sense strand
gcugggauccgggaagcua

SEQ ID NO: 283429 - RNA, 19 nt, Homo sapiens
  misc_RNA (1)...(19): siRNA sense strand
ccuuccagcuguaccaaga

SEQ ID NO: 283430 - RNA, 19 nt, Homo sapiens
  misc_RNA (1)...(19): siRNA sense strand
agaagucccaacuaauuau

SEQ ID NO: 283431 - RNA, 19 nt, Homo sapiens
  misc_RNA (1)...(19): siRNA sense strand
cagagaguguggaaagacu

SEQ ID NO: 283432 - RNA, 19 nt, Homo sapiens
  misc_RNA (1)...(19): siRNA sense strand
ggacuauuugcacucuuug

SEQ ID NO: 283433 - RNA, 19 nt, Homo sapiens
  misc_RNA (1)...(19): siRNA sense strand
gagaagcagaggccaagag

SEQ ID NO: 283434 - RNA, 19 nt, Homo sapiens
  misc_RNA (1)...(19): siRNA sense strand
gccaaggcacagagagauu

SEQ ID NO: 283435 - RNA, 19 nt, Homo sapiens
  misc_RNA (1)...(19): siRNA sense strand
cagagagauuacgaacuga

SEQ ID NO: 283436 - RNA, 19 nt, Homo sapiens
  misc_RNA (1)...(19): siRNA sense strand
gggcagaacaaggagaugu

SEQ ID NO: 283437 - RNA, 19 nt, Homo sapiens
  misc_RNA (1)...(19): siRNA sense strand
aggcugagauugcccacau

SEQ ID NO: 283438 - RNA, 19 nt, Homo sapiens
  misc_RNA (1)...(19): siRNA sense strand
cuguggaggagaucuauaa

SEQ ID NO: 283439 - RNA, 19 nt, Homo sapiens
  misc_RNA (1)...(19): siRNA sense strand
ggcagagaagucccaacua

SEQ ID NO: 283440 - RNA, 19 nt, Homo sapiens
  misc_RNA (1)...(19): siRNA sense strand
gagagauuacgaacugaag

SEQ ID NO: 283441 - RNA, 19 nt, Homo sapiens
  misc_RNA (1)...(19): siRNA sense strand
agaagcagaggccaagaga

SEQ ID NO: 283442 - RNA, 19 nt, Homo sapiens
  misc_RNA (1)...(19): siRNA sense strand
acacacugacccucaaugu

SEQ ID NO: 283443 - RNA, 19 nt, Homo sapiens
  misc_RNA (1)...(19): siRNA sense strand
ucccuugacuucagccaau

SEQ ID NO: 283444 - RNA, 19 nt, Homo sapiens
  misc_RNA (1)...(19): siRNA sense strand
caacacacugacccucaau

SEQ ID NO: 283445 - RNA, 19 nt, Homo sapiens
  misc_RNA (1)...(19): siRNA sense strand
ugacuguggaggagaucua

SEQ ID NO: 283446 - RNA, 19 nt, Homo sapiens
  misc_RNA (1)...(19): siRNA sense strand
ggcuggagggcgugucuuu

SEQ ID NO: 283447 - RNA, 19 nt, Homo sapiens
  misc_RNA (1)...(19): siRNA sense strand
agacggaggcugagauugc

SEQ ID NO: 283448 - RNA, 19 nt, Homo sapiens
  misc_RNA (1)...(19): siRNA sense strand
gacuucagccaauaagauc

SEQ ID NO: 283449 - RNA, 19 nt, Homo sapiens
  misc_RNA (1)...(19): siRNA sense strand
gcaacaacaacgucaccua

SEQ ID NO: 283450 - RNA, 19 nt, Homo sapiens
  misc_RNA (1)...(19): siRNA sense strand
ccacugccuucccugcaaa

SEQ ID NO: 283451 - RNA, 19 nt, Homo sapiens
  misc_RNA (1)...(19): siRNA sense strand
ugccuucccugcaaagauu

SEQ ID NO: 283452 - RNA, 19 nt, Homo sapiens
  misc_RNA (1)...(19): siRNA sense strand
cagaagaggaagagaacuu

SEQ ID NO: 283453 - RNA, 19 nt, Homo sapiens
  misc_RNA (1)...(19): siRNA sense strand
caacaacgucaccuacauc

SEQ ID NO: 283454 - RNA, 19 nt, Homo sapiens
  misc_RNA (1)...(19): siRNA sense strand
acaacaacgucaccuacau

SEQ ID NO: 283455 - RNA, 19 nt, Homo sapiens
  misc_RNA (1)...(19): siRNA sense strand
caaccuccucggcuucuug

SEQ ID NO: 283456 - RNA, 19 nt, Homo sapiens
  misc_RNA (1)...(19): siRNA sense strand
ggaccugagcgucauguac

SEQ ID NO: 283457 - RNA, 19 nt, Homo sapiens
  misc_RNA (1)...(19): siRNA sense strand
guggugagucugcagaaga

SEQ ID NO: 283458 - RNA, 19 nt, Homo sapiens
  misc_RNA (1)...(19): siRNA sense strand
uaacaguggugggaaauua

SEQ ID NO: 283459 - RNA, 19 nt, Homo sapiens
  misc_RNA (1)...(19): siRNA sense strand
ggaggagucugaagaagaa

SEQ ID NO: 283460 - RNA, 19 nt, Homo sapiens
  misc_RNA (1)...(19): siRNA sense strand
agacauagcucagacagua

SEQ ID NO: 283461 - RNA, 19 nt, Homo sapiens
  misc_RNA (1)...(19): siRNA sense strand
gcuaaaugaugguguggua

SEQ ID NO: 283462 - RNA, 19 nt, Homo sapiens
  misc_RNA (1)...(19): siRNA sense strand
gggcaucugugaccaguaa

SEQ ID NO: 283463 - RNA, 19 nt, Homo sapiens
  misc_RNA (1)...(19): siRNA sense strand
ugacauggaagaacauuua

SEQ ID NO: 283464 - RNA, 19 nt, Homo sapiens
  misc_RNA (1)...(19): siRNA sense strand
ggacaaaucagagcuuaaa

SEQ ID NO: 283465 - RNA, 19 nt, Homo sapiens
  misc_RNA (1)...(19): siRNA sense strand
cgagaacaacgaauaaaua

SEQ ID NO: 283466 - RNA, 19 nt, Homo sapiens
  misc_RNA (1)...(19): siRNA sense strand
agaaagaaauccacaggaa

SEQ ID NO: 283467 - RNA, 19 nt, Homo sapiens
  misc_RNA (1)...(19): siRNA sense strand
guaaugacauggaagaaca

SEQ ID NO: 283468 - RNA, 19 nt, Homo sapiens
  misc_RNA (1)...(19): siRNA sense strand
gaaagaaauccacaggaaa

SEQ ID NO: 283469 - RNA, 19 nt, Homo sapiens
  misc_RNA (1)...(19): siRNA sense strand
agaggaaccugaagaaaga

SEQ ID NO: 283470 - RNA, 19 nt, Homo sapiens
  misc_RNA (1)...(19): siRNA sense strand
acaagaaccuguaucugaa

SEQ ID NO: 283471 - RNA, 19 nt, Homo sapiens
  misc_RNA (1)...(19): siRNA sense strand
gaaggcgaccgacgagaua

SEQ ID NO: 283472 - RNA, 19 nt, Homo sapiens
  misc_RNA (1)...(19): siRNA sense strand
gauaccaccucauguuguu

SEQ ID NO: 283473 - RNA, 19 nt, Homo sapiens
  misc_RNA (1)...(19): siRNA sense strand
gaaauccacaggaaaguga

SEQ ID NO: 283474 - RNA, 19 nt, Homo sapiens
  misc_RNA (1)...(19): siRNA sense strand
ggagauucaugcaaacguu

SEQ ID NO: 283475 - RNA, 19 nt, Homo sapiens
  misc_RNA (1)...(19): siRNA sense strand
caaccugccucaugaagug

SEQ ID NO: 283476 - RNA, 19 nt, Homo sapiens
  misc_RNA (1)...(19): siRNA sense strand
gggauuggauucaaaugga

SEQ ID NO: 283477 - RNA, 19 nt, Homo sapiens
  misc_RNA (1)...(19): siRNA sense strand
gcagaaaccaggauuugga

SEQ ID NO: 283478 - RNA, 19 nt, Homo sapiens
  misc_RNA (1)...(19): siRNA sense strand
gaacucuucuuauguccau

SEQ ID NO: 283479 - RNA, 19 nt, Homo sapiens
  misc_RNA (1)...(19): siRNA sense strand
gggcuucucucuaacaaca

SEQ ID NO: 283480 - RNA, 19 nt, Homo sapiens
  misc_RNA (1)...(19): siRNA sense strand
gugguggaguugcgcauua

SEQ ID NO: 283481 - RNA, 19 nt, Homo sapiens
  misc_RNA (1)...(19): siRNA sense strand
ucacaaugauaucuucaga

SEQ ID NO: 283482 - RNA, 19 nt, Homo sapiens
  misc_RNA (1)...(19): siRNA sense strand
ggaaaagccugagccagua

SEQ ID NO: 283483 - RNA, 19 nt, Homo sapiens
  misc_RNA (1)...(19): siRNA sense strand
ggugguaccugaugauucu

SEQ ID NO: 283484 - RNA, 19 nt, Homo sapiens
  misc_RNA (1)...(19): siRNA sense strand
ugagcaaggugacauugaa

SEQ ID NO: 283485 - RNA, 19 nt, Homo sapiens
  misc_RNA (1)...(19): siRNA sense strand
caaaucagagcuuaaagau

SEQ ID NO: 283486 - RNA, 19 nt, Homo sapiens
  misc_RNA (1)...(19): siRNA sense strand
ggauuggauucaaauggaa

SEQ ID NO: 283487 - RNA, 19 nt, Homo sapiens
  misc_RNA (1)...(19): siRNA sense strand
gagccaguauuagaagaaa

SEQ ID NO: 283488 - RNA, 19 nt, Homo sapiens
  misc_RNA (1)...(19): siRNA sense strand
gggaauuugugagacagua

SEQ ID NO: 283489 - RNA, 19 nt, Homo sapiens
  misc_RNA (1)...(19): siRNA sense strand
guggacaaaucagagcuua

SEQ ID NO: 283490 - RNA, 19 nt, Homo sapiens
  misc_RNA (1)...(19): siRNA sense strand
gaagaaagacagcaaacac

SEQ ID NO: 283491 - RNA, 19 nt, Homo sapiens
  misc_RNA (1)...(19): siRNA sense strand
gcucaugccacgcuaaaug

SEQ ID NO: 283492 - RNA, 19 nt, Homo sapiens
  misc_RNA (1)...(19): siRNA sense strand
aacaagaaccuguaucuga

SEQ ID NO: 283493 - RNA, 19 nt, Homo sapiens
  misc_RNA (1)...(19): siRNA sense strand
ugaagaagaaguagaggaa

SEQ ID NO: 283494 - RNA, 19 nt, Homo sapiens
  misc_RNA (1)...(19): siRNA sense strand
uugaggagauucaugcaaa

SEQ ID NO: 283495 - RNA, 19 nt, Homo sapiens
  misc_RNA (1)...(19): siRNA sense strand
gaggugagguccgucugaa

SEQ ID NO: 283496 - RNA, 19 nt, Homo sapiens
  misc_RNA (1)...(19): siRNA sense strand
uccagcaccugcagacaua

SEQ ID NO: 283497 - RNA, 19 nt, Homo sapiens
  misc_RNA (1)...(19): siRNA sense strand
gaucaaagagugcgagaac

SEQ ID NO: 283498 - RNA, 19 nt, Homo sapiens
  misc_RNA (1)...(19): siRNA sense strand
gaacaagaaccuguaucug

SEQ ID NO: 283499 - RNA, 19 nt, Homo sapiens
  misc_RNA (1)...(19): siRNA sense strand
gcgagaacaacgaauaaau

SEQ ID NO: 283500 - RNA, 19 nt, Homo sapiens
  misc_RNA (1)...(19): siRNA sense strand
ucaaagagugcgagaacaa

SEQ ID NO: 283501 - RNA, 19 nt, Homo sapiens
  misc_RNA (1)...(19): siRNA sense strand
ggagucugaagaagaagua

SEQ ID NO: 283502 - RNA, 19 nt, Homo sapiens
  misc_RNA (1)...(19): siRNA sense strand
ggaaggcgaccgacgagau

SEQ ID NO: 283503 - RNA, 19 nt, Homo sapiens
  misc_RNA (1)...(19): siRNA sense strand
caacugccacaccaagauu

SEQ ID NO: 283504 - RNA, 19 nt, Homo sapiens
  misc_RNA (1)...(19): siRNA sense strand
cagaaaguccuuagcaaca

SEQ ID NO: 283505 - RNA, 19 nt, Homo sapiens
  misc_RNA (1)...(19): siRNA sense strand
gacaguacaggaagacuug

SEQ ID NO: 283506 - RNA, 19 nt, Homo sapiens
  misc_RNA (1)...(19): siRNA sense strand
caagaaccuguaucugaaa

SEQ ID NO: 283507 - RNA, 19 nt, Homo sapiens
  misc_RNA (1)...(19): siRNA sense strand
gaauuugugagacaguauu

SEQ ID NO: 283508 - RNA, 19 nt, Homo sapiens
  misc_RNA (1)...(19): siRNA sense strand
caggaagacuugaggacau

SEQ ID NO: 283509 - RNA, 19 nt, Homo sapiens
  misc_RNA (1)...(19): siRNA sense strand
cauuaacaguggugggaaa

SEQ ID NO: 283510 - RNA, 19 nt, Homo sapiens
  misc_RNA (1)...(19): siRNA sense strand
ugaggucuuugguggguuu

SEQ ID NO: 283511 - RNA, 19 nt, Homo sapiens
  misc_RNA (1)...(19): siRNA sense strand
ggugagguccgucugaaug

SEQ ID NO: 283512 - RNA, 19 nt, Homo sapiens
  misc_RNA (1)...(19): siRNA sense strand
aaagaaauccacaggaaag

SEQ ID NO: 283513 - RNA, 19 nt, Homo sapiens
  misc_RNA (1)...(19): siRNA sense strand
acaaaucagagcuuaaaga

SEQ ID NO: 283514 - RNA, 19 nt, Homo sapiens
  misc_RNA (1)...(19): siRNA sense strand
gaaccuguaucugaaaucc

SEQ ID NO: 283515 - RNA, 19 nt, Homo sapiens
  misc_RNA (1)...(19): siRNA sense strand
gaucaggcaguugucagua

SEQ ID NO: 283516 - RNA, 19 nt, Homo sapiens
  misc_RNA (1)...(19): siRNA sense strand
gagauucaugcaaacguuu

SEQ ID NO: 283517 - RNA, 19 nt, Homo sapiens
  misc_RNA (1)...(19): siRNA sense strand
agucuaagccugaaucuca

SEQ ID NO: 283518 - RNA, 19 nt, Homo sapiens
  misc_RNA (1)...(19): siRNA sense strand
caccucauguuguuaaagu

SEQ ID NO: 283519 - RNA, 19 nt, Homo sapiens
  misc_RNA (1)...(19): siRNA sense strand
gggauaccaccucauguug

SEQ ID NO: 283520 - RNA, 19 nt, Homo sapiens
  misc_RNA (1)...(19): siRNA sense strand
guagaggaaccugaagaaa

SEQ ID NO: 283521 - RNA, 19 nt, Homo sapiens
  misc_RNA (1)...(19): siRNA sense strand
guggaggcauggugcagaa

SEQ ID NO: 283522 - RNA, 19 nt, Homo sapiens
  misc_RNA (1)...(19): siRNA sense strand
gcugggugguggaaugaga

SEQ ID NO: 283523 - RNA, 19 nt, Homo sapiens
  misc_RNA (1)...(19): siRNA sense strand
agaggagccuguugcugaa

SEQ ID NO: 283524 - RNA, 19 nt, Homo sapiens
  misc_RNA (1)...(19): siRNA sense strand
gccagcagaugcagucuac

SEQ ID NO: 283525 - RNA, 19 nt, Homo sapiens
  misc_RNA (1)...(19): siRNA sense strand
gugcgagaacaacgaauaa

SEQ ID NO: 283526 - RNA, 19 nt, Homo sapiens
  misc_RNA (1)...(19): siRNA sense strand
ugauggggcuucucucuaa

SEQ ID NO: 283527 - RNA, 19 nt, Homo sapiens
  misc_RNA (1)...(19): siRNA sense strand
acaccaagauucgccaugu

SEQ ID NO: 283528 - RNA, 19 nt, Homo sapiens
  misc_RNA (1)...(19): siRNA sense strand
ucacaaaacuucaccaacu

SEQ ID NO: 283529 - RNA, 19 nt, Homo sapiens
  misc_RNA (1)...(19): siRNA sense strand
uaacaacaaccaggcuuug

SEQ ID NO: 283530 - RNA, 19 nt, Homo sapiens
  misc_RNA (1)...(19): siRNA sense strand
caccaagauucgccauguu

SEQ ID NO: 283531 - RNA, 19 nt, Homo sapiens
  misc_RNA (1)...(19): siRNA sense strand
uagaggaaccugaagaaag

SEQ ID NO: 283532 - RNA, 19 nt, Homo sapiens
  misc_RNA (1)...(19): siRNA sense strand
ggucuguugcaaauaaauu

SEQ ID NO: 283533 - RNA, 19 nt, Homo sapiens
  misc_RNA (1)...(19): siRNA sense strand
gugcagaaaccaggauuug

SEQ ID NO: 283534 - RNA, 19 nt, Homo sapiens
  misc_RNA (1)...(19): siRNA sense strand
ggauaccaccucauguugu

SEQ ID NO: 283535 - RNA, 19 nt, Homo sapiens
  misc_RNA (1)...(19): siRNA sense strand
ucaggcaguugucaguaau

SEQ ID NO: 283536 - RNA, 19 nt, Homo sapiens
  misc_RNA (1)...(19): siRNA sense strand
agaaguagaggaaccugaa

SEQ ID NO: 283537 - RNA, 19 nt, Homo sapiens
  misc_RNA (1)...(19): siRNA sense strand
ucucagauuccaccacaaa

SEQ ID NO: 283538 - RNA, 19 nt, Homo sapiens
  misc_RNA (1)...(19): siRNA sense strand
ggaauuugugagacaguau

SEQ ID NO: 283539 - RNA, 19 nt, Homo sapiens
  misc_RNA (1)...(19): siRNA sense strand
gaaccaggccccagacaug

SEQ ID NO: 283540 - RNA, 19 nt, Homo sapiens
  misc_RNA (1)...(19): siRNA sense strand
ucaguaaugacauggaaga

SEQ ID NO: 283541 - RNA, 19 nt, Homo sapiens
  misc_RNA (1)...(19): siRNA sense strand
ucagauuccaccacaaaga

SEQ ID NO: 283542 - RNA, 19 nt, Homo sapiens
  misc_RNA (1)...(19): siRNA sense strand
ccaagauucgccauguuga

SEQ ID NO: 283543 - RNA, 19 nt, Homo sapiens
  misc_RNA (1)...(19): siRNA sense strand
uaaaugauggugugguagu

SEQ ID NO: 283544 - RNA, 19 nt, Homo sapiens
  misc_RNA (1)...(19): siRNA sense strand
cucaugaaguggacaaauc

SEQ ID NO: 283545 - RNA, 19 nt, Homo sapiens
  misc_RNA (1)...(19): siRNA sense strand
aggaagacuugaggacauu

SEQ ID NO: 283546 - RNA, 19 nt, Homo sapiens
  misc_RNA (1)...(19): siRNA sense strand
ugaugauucuggaacuuuc

SEQ ID NO: 283547 - RNA, 19 nt, Homo sapiens
  misc_RNA (1)...(19): siRNA sense strand
gaugcagucuacggacaga

SEQ ID NO: 283548 - RNA, 19 nt, Homo sapiens
  misc_RNA (1)...(19): siRNA sense strand
gucugaaugucgaagagaa

SEQ ID NO: 283549 - RNA, 19 nt, Homo sapiens
  misc_RNA (1)...(19): siRNA sense strand
guucagaaaguccuuagca

SEQ ID NO: 283550 - RNA, 19 nt, Homo sapiens
  misc_RNA (1)...(19): siRNA sense strand
gaccucagcgggaucaaag

SEQ ID NO: 283551 - RNA, 19 nt, Homo sapiens
  misc_RNA (1)...(19): siRNA sense strand
cuaacaacaaccaggcuuu

SEQ ID NO: 283552 - RNA, 19 nt, Homo sapiens
  misc_RNA (1)...(19): siRNA sense strand
gcaaccugccucaugaagu

SEQ ID NO: 283553 - RNA, 19 nt, Homo sapiens
  misc_RNA (1)...(19): siRNA sense strand
ggaagacuugaggacauuu

SEQ ID NO: 283554 - RNA, 19 nt, Homo sapiens
  misc_RNA (1)...(19): siRNA sense strand
aaccagaaccagaacaaga

SEQ ID NO: 283555 - RNA, 19 nt, Homo sapiens
  misc_RNA (1)...(19): siRNA sense strand
gaaccagaaccagaacaag

SEQ ID NO: 283556 - RNA, 19 nt, Homo sapiens
  misc_RNA (1)...(19): siRNA sense strand
aaagccugagccaguauua

SEQ ID NO: 283557 - RNA, 19 nt, Homo sapiens
  misc_RNA (1)...(19): siRNA sense strand
aagaaccuguaucugaaau

SEQ ID NO: 283558 - RNA, 19 nt, Homo sapiens
  misc_RNA (1)...(19): siRNA sense strand
uaacaguggugggaaauua

SEQ ID NO: 283559 - RNA, 19 nt, Homo sapiens
  misc_RNA (1)...(19): siRNA sense strand
ggaggagucugaagaagaa

SEQ ID NO: 283560 - RNA, 19 nt, Homo sapiens
  misc_RNA (1)...(19): siRNA sense strand
agacauagcucagacagua

SEQ ID NO: 283561 - RNA, 19 nt, Homo sapiens
  misc_RNA (1)...(19): siRNA sense strand
gcuaaaugaugguguggua

SEQ ID NO: 283562 - RNA, 19 nt, Homo sapiens
  misc_RNA (1)...(19): siRNA sense strand
gggcaucugugaccaguaa

SEQ ID NO: 283563 - RNA, 19 nt, Homo sapiens
  misc_RNA (1)...(19): siRNA sense strand
ugacauggaagaacauuua

SEQ ID NO: 283564 - RNA, 19 nt, Homo sapiens
  misc_RNA (1)...(19): siRNA sense strand
ggacaaaucagagcuuaaa

SEQ ID NO: 283565 - RNA, 19 nt, Homo sapiens
  misc_RNA (1)...(19): siRNA sense strand
cgagaacaacgaauaaaua

SEQ ID NO: 283566 - RNA, 19 nt, Homo sapiens
  misc_RNA (1)...(19): siRNA sense strand
agaaagaaauccacaggaa

SEQ ID NO: 283567 - RNA, 19 nt, Homo sapiens
  misc_RNA (1)...(19): siRNA sense strand
guaaugacauggaagaaca

SEQ ID NO: 283568 - RNA, 19 nt, Homo sapiens
  misc_RNA (1)...(19): siRNA sense strand
gaaagaaauccacaggaaa

SEQ ID NO: 283569 - RNA, 19 nt, Homo sapiens
  misc_RNA (1)...(19): siRNA sense strand
agaggaaccugaagaaaga

SEQ ID NO: 283570 - RNA, 19 nt, Homo sapiens
  misc_RNA (1)...(19): siRNA sense strand
acaagaaccuguaucugaa

SEQ ID NO: 283571 - RNA, 19 nt, Homo sapiens
  misc_RNA (1)...(19): siRNA sense strand
gaaggcgaccgacgagaua

SEQ ID NO: 283572 - RNA, 19 nt, Homo sapiens
  misc_RNA (1)...(19): siRNA sense strand
gauaccaccucauguuguu

SEQ ID NO: 283573 - RNA, 19 nt, Homo sapiens
  misc_RNA (1)...(19): siRNA sense strand
gaaauccacaggaaaguga

SEQ ID NO: 283574 - RNA, 19 nt, Homo sapiens
  misc_RNA (1)...(19): siRNA sense strand
ggagauucaugcaaacguu

SEQ ID NO: 283575 - RNA, 19 nt, Homo sapiens
  misc_RNA (1)...(19): siRNA sense strand
caaccugccucaugaagug

SEQ ID NO: 283576 - RNA, 19 nt, Homo sapiens
  misc_RNA (1)...(19): siRNA sense strand
gggauuggauucaaaugga

SEQ ID NO: 283577 - RNA, 19 nt, Homo sapiens
  misc_RNA (1)...(19): siRNA sense strand
gcagaaaccaggauuugga

SEQ ID NO: 283578 - RNA, 19 nt, Homo sapiens
  misc_RNA (1)...(19): siRNA sense strand
gaacucuucuuauguccau

SEQ ID NO: 283579 - RNA, 19 nt, Homo sapiens
  misc_RNA (1)...(19): siRNA sense strand
gggcuucucucuaacaaca

SEQ ID NO: 283580 - RNA, 19 nt, Homo sapiens
  misc_RNA (1)...(19): siRNA sense strand
gugguggaguugcgcauua

SEQ ID NO: 283581 - RNA, 19 nt, Homo sapiens
  misc_RNA (1)...(19): siRNA sense strand
ucacaaugauaucuucaga

SEQ ID NO: 283582 - RNA, 19 nt, Homo sapiens
  misc_RNA (1)...(19): siRNA sense strand
ggaaaagccugagccagua

SEQ ID NO: 283583 - RNA, 19 nt, Homo sapiens
  misc_RNA (1)...(19): siRNA sense strand
ggugguaccugaugauucu

SEQ ID NO: 283584 - RNA, 19 nt, Homo sapiens
  misc_RNA (1)...(19): siRNA sense strand
ugagcaaggugacauugaa

SEQ ID NO: 283585 - RNA, 19 nt, Homo sapiens
  misc_RNA (1)...(19): siRNA sense strand
caaaucagagcuuaaagau

SEQ ID NO: 283586 - RNA, 19 nt, Homo sapiens
  misc_RNA (1)...(19): siRNA sense strand
ggauuggauucaaauggaa

SEQ ID NO: 283587 - RNA, 19 nt, Homo sapiens
  misc_RNA (1)...(19): siRNA sense strand
gagccaguauuagaagaaa

SEQ ID NO: 283588 - RNA, 19 nt, Homo sapiens
  misc_RNA (1)...(19): siRNA sense strand
gggaauuugugagacagua

SEQ ID NO: 283589 - RNA, 19 nt, Homo sapiens
  misc_RNA (1)...(19): siRNA sense strand
guggacaaaucagagcuua

SEQ ID NO: 283590 - RNA, 19 nt, Homo sapiens
  misc_RNA (1)...(19): siRNA sense strand
gaagaaagacagcaaacac

SEQ ID NO: 283591 - RNA, 19 nt, Homo sapiens
  misc_RNA (1)...(19): siRNA sense strand
gcucaugccacgcuaaaug

SEQ ID NO: 283592 - RNA, 19 nt, Homo sapiens
  misc_RNA (1)...(19): siRNA sense strand
aacaagaaccuguaucuga

SEQ ID NO: 283593 - RNA, 19 nt, Homo sapiens
  misc_RNA (1)...(19): siRNA sense strand
ugaagaagaaguagaggaa

SEQ ID NO: 283594 - RNA, 19 nt, Homo sapiens
  misc_RNA (1)...(19): siRNA sense strand
uugaggagauucaugcaaa

SEQ ID NO: 283595 - RNA, 19 nt, Homo sapiens
  misc_RNA (1)...(19): siRNA sense strand
gaggugagguccgucugaa

SEQ ID NO: 283596 - RNA, 19 nt, Homo sapiens
  misc_RNA (1)...(19): siRNA sense strand
uccagcaccugcagacaua

SEQ ID NO: 283597 - RNA, 19 nt, Homo sapiens
  misc_RNA (1)...(19): siRNA sense strand
gaucaaagagugcgagaac

SEQ ID NO: 283598 - RNA, 19 nt, Homo sapiens
  misc_RNA (1)...(19): siRNA sense strand
gaacaagaaccuguaucug

SEQ ID NO: 283599 - RNA, 19 nt, Homo sapiens
  misc_RNA (1)...(19): siRNA sense strand
gcgagaacaacgaauaaau

SEQ ID NO: 283600 - RNA, 19 nt, Homo sapiens
  misc_RNA (1)...(19): siRNA sense strand
ucaaagagugcgagaacaa

SEQ ID NO: 283601 - RNA, 19 nt, Homo sapiens
  misc_RNA (1)...(19): siRNA sense strand
ggagucugaagaagaagua

SEQ ID NO: 283602 - RNA, 19 nt, Homo sapiens
  misc_RNA (1)...(19): siRNA sense strand
ggaaggcgaccgacgagau

SEQ ID NO: 283603 - RNA, 19 nt, Homo sapiens
  misc_RNA (1)...(19): siRNA sense strand
caacugccacaccaagauu

SEQ ID NO: 283604 - RNA, 19 nt, Homo sapiens
  misc_RNA (1)...(19): siRNA sense strand
cagaaaguccuuagcaaca

SEQ ID NO: 283605 - RNA, 19 nt, Homo sapiens
  misc_RNA (1)...(19): siRNA sense strand
gacaguacaggaagacuug

SEQ ID NO: 283606 - RNA, 19 nt, Homo sapiens
  misc_RNA (1)...(19): siRNA sense strand
caagaaccuguaucugaaa

SEQ ID NO: 283607 - RNA, 19 nt, Homo sapiens
  misc_RNA (1)...(19): siRNA sense strand
gaauuugugagacaguauu

SEQ ID NO: 283608 - RNA, 19 nt, Homo sapiens
  misc_RNA (1)...(19): siRNA sense strand
caggaagacuugaggacau

SEQ ID NO: 283609 - RNA, 19 nt, Homo sapiens
  misc_RNA (1)...(19): siRNA sense strand
cauuaacaguggugggaaa

SEQ ID NO: 283610 - RNA, 19 nt, Homo sapiens
  misc_RNA (1)...(19): siRNA sense strand
ugaggucuuugguggguuu

SEQ ID NO: 283611 - RNA, 19 nt, Homo sapiens
  misc_RNA (1)...(19): siRNA sense strand
ggugagguccgucugaaug

SEQ ID NO: 283612 - RNA, 19 nt, Homo sapiens
  misc_RNA (1)...(19): siRNA sense strand
aaagaaauccacaggaaag

SEQ ID NO: 283613 - RNA, 19 nt, Homo sapiens
  misc_RNA (1)...(19): siRNA sense strand
acaaaucagagcuuaaaga

SEQ ID NO: 283614 - RNA, 19 nt, Homo sapiens
  misc_RNA (1)...(19): siRNA sense strand
gaaccuguaucugaaaucc

SEQ ID NO: 283615 - RNA, 19 nt, Homo sapiens
  misc_RNA (1)...(19): siRNA sense strand
gaucaggcaguugucagua

SEQ ID NO: 283616 - RNA, 19 nt, Homo sapiens
  misc_RNA (1)...(19): siRNA sense strand
gagauucaugcaaacguuu

SEQ ID NO: 283617 - RNA, 19 nt, Homo sapiens
  misc_RNA (1)...(19): siRNA sense strand
agucuaagccugaaucuca

SEQ ID NO: 283618 - RNA, 19 nt, Homo sapiens
  misc_RNA (1)...(19): siRNA sense strand
caccucauguuguuaaagu

SEQ ID NO: 283619 - RNA, 19 nt, Homo sapiens
  misc_RNA (1)...(19): siRNA sense strand
gggauaccaccucauguug

SEQ ID NO: 283620 - RNA, 19 nt, Homo sapiens
  misc_RNA (1)...(19): siRNA sense strand
guagaggaaccugaagaaa

SEQ ID NO: 283621 - RNA, 19 nt, Homo sapiens
  misc_RNA (1)...(19): siRNA sense strand
guggaggcauggugcagaa

SEQ ID NO: 283622 - RNA, 19 nt, Homo sapiens
  misc_RNA (1)...(19): siRNA sense strand
gcugggugguggaaugaga

SEQ ID NO: 283623 - RNA, 19 nt, Homo sapiens
  misc_RNA (1)...(19): siRNA sense strand
agaggagccuguugcugaa

SEQ ID NO: 283624 - RNA, 19 nt, Homo sapiens
  misc_RNA (1)...(19): siRNA sense strand
gccagcagaugcagucuac

SEQ ID NO: 283625 - RNA, 19 nt, Homo sapiens
  misc_RNA (1)...(19): siRNA sense strand
gugcgagaacaacgaauaa

SEQ ID NO: 283626 - RNA, 19 nt, Homo sapiens
  misc_RNA (1)...(19): siRNA sense strand
ugauggggcuucucucuaa

SEQ ID NO: 283627 - RNA, 19 nt, Homo sapiens
  misc_RNA (1)...(19): siRNA sense strand
acaccaagauucgccaugu

SEQ ID NO: 283628 - RNA, 19 nt, Homo sapiens
  misc_RNA (1)...(19): siRNA sense strand
ucacaaaacuucaccaacu

SEQ ID NO: 283629 - RNA, 19 nt, Homo sapiens
  misc_RNA (1)...(19): siRNA sense strand
uaacaacaaccaggcuuug

SEQ ID NO: 283630 - RNA, 19 nt, Homo sapiens
  misc_RNA (1)...(19): siRNA sense strand
caccaagauucgccauguu

SEQ ID NO: 283631 - RNA, 19 nt, Homo sapiens
  misc_RNA (1)...(19): siRNA sense strand
uagaggaaccugaagaaag

SEQ ID NO: 283632 - RNA, 19 nt, Homo sapiens
  misc_RNA (1)...(19): siRNA sense strand
ggucuguugcaaauaaauu

SEQ ID NO: 283633 - RNA, 19 nt, Homo sapiens
  misc_RNA (1)...(19): siRNA sense strand
gugcagaaaccaggauuug

SEQ ID NO: 283634 - RNA, 19 nt, Homo sapiens
  misc_RNA (1)...(19): siRNA sense strand
ggauaccaccucauguugu

SEQ ID NO: 283635 - RNA, 19 nt, Homo sapiens
  misc_RNA (1)...(19): siRNA sense strand
ucaggcaguugucaguaau

SEQ ID NO: 283636 - RNA, 19 nt, Homo sapiens
  misc_RNA (1)...(19): siRNA sense strand
agaaguagaggaaccugaa

SEQ ID NO: 283637 - RNA, 19 nt, Homo sapiens
  misc_RNA (1)...(19): siRNA sense strand
ucucagauuccaccacaaa

SEQ ID NO: 283638 - RNA, 19 nt, Homo sapiens
  misc_RNA (1)...(19): siRNA sense strand
ggaauuugugagacaguau

SEQ ID NO: 283639 - RNA, 19 nt, Homo sapiens
  misc_RNA (1)...(19): siRNA sense strand
gaaccaggccccagacaug

SEQ ID NO: 283640 - RNA, 19 nt, Homo sapiens
  misc_RNA (1)...(19): siRNA sense strand
ucaguaaugacauggaaga

SEQ ID NO: 283641 - RNA, 19 nt, Homo sapiens
  misc_RNA (1)...(19): siRNA sense strand
ucagauuccaccacaaaga

SEQ ID NO: 283642 - RNA, 19 nt, Homo sapiens
  misc_RNA (1)...(19): siRNA sense strand
ccaagauucgccauguuga

SEQ ID NO: 283643 - RNA, 19 nt, Homo sapiens
  misc_RNA (1)...(19): siRNA sense strand
uaaaugauggugugguagu

SEQ ID NO: 283644 - RNA, 19 nt, Homo sapiens
  misc_RNA (1)...(19): siRNA sense strand
cucaugaaguggacaaauc

SEQ ID NO: 283645 - RNA, 19 nt, Homo sapiens
  misc_RNA (1)...(19): siRNA sense strand
aggaagacuugaggacauu

SEQ ID NO: 283646 - RNA, 19 nt, Homo sapiens
  misc_RNA (1)...(19): siRNA sense strand
ugaugauucuggaacuuuc

SEQ ID NO: 283647 - RNA, 19 nt, Homo sapiens
  misc_RNA (1)...(19): siRNA sense strand
gaugcagucuacggacaga

SEQ ID NO: 283648 - RNA, 19 nt, Homo sapiens
  misc_RNA (1)...(19): siRNA sense strand
gucugaaugucgaagagaa

SEQ ID NO: 283649 - RNA, 19 nt, Homo sapiens
  misc_RNA (1)...(19): siRNA sense strand
guucagaaaguccuuagca

SEQ ID NO: 283650 - RNA, 19 nt, Homo sapiens
  misc_RNA (1)...(19): siRNA sense strand
gaccucagcgggaucaaag

SEQ ID NO: 283651 - RNA, 19 nt, Homo sapiens
  misc_RNA (1)...(19): siRNA sense strand
cuaacaacaaccaggcuuu

SEQ ID NO: 283652 - RNA, 19 nt, Homo sapiens
  misc_RNA (1)...(19): siRNA sense strand
gcaaccugccucaugaagu

SEQ ID NO: 283653 - RNA, 19 nt, Homo sapiens
  misc_RNA (1)...(19): siRNA sense strand
ggaagacuugaggacauuu

SEQ ID NO: 283654 - RNA, 19 nt, Homo sapiens
  misc_RNA (1)...(19): siRNA sense strand
aaccagaaccagaacaaga

SEQ ID NO: 283655 - RNA, 19 nt, Homo sapiens
  misc_RNA (1)...(19): siRNA sense strand
gaaccagaaccagaacaag

SEQ ID NO: 283656 - RNA, 19 nt, Homo sapiens
  misc_RNA (1)...(19): siRNA sense strand
aaagccugagccaguauua

SEQ ID NO: 283657 - RNA, 19 nt, Homo sapiens
  misc_RNA (1)...(19): siRNA sense strand
aagaaccuguaucugaaau

SEQ ID NO: 283658 - RNA, 19 nt, Homo sapiens
  misc_RNA (1)...(19): siRNA sense strand
gggagggcaucaacaagaa

SEQ ID NO: 283659 - RNA, 19 nt, Homo sapiens
  misc_RNA (1)...(19): siRNA sense strand
ucaauguccagucaugaua

SEQ ID NO: 283660 - RNA, 19 nt, Homo sapiens
  misc_RNA (1)...(19): siRNA sense strand
acgcgcagcugcagaucua

SEQ ID NO: 283661 - RNA, 19 nt, Homo sapiens
  misc_RNA (1)...(19): siRNA sense strand
guacagcgaggagaacaug

SEQ ID NO: 283662 - RNA, 19 nt, Homo sapiens
  misc_RNA (1)...(19): siRNA sense strand
aggcgaggcucaucuacga

SEQ ID NO: 283663 - RNA, 19 nt, Homo sapiens
  misc_RNA (1)...(19): siRNA sense strand
cagaguacagcgaggagaa

SEQ ID NO: 283664 - RNA, 19 nt, Homo sapiens
  misc_RNA (1)...(19): siRNA sense strand
gagggcaucaacaagaaga

SEQ ID NO: 283665 - RNA, 19 nt, Homo sapiens
  misc_RNA (1)...(19): siRNA sense strand
gcgaggagaacaugcucuu

SEQ ID NO: 283666 - RNA, 19 nt, Homo sapiens
  misc_RNA (1)...(19): siRNA sense strand
agaaggcgaggcucaucua

SEQ ID NO: 283667 - RNA, 19 nt, Homo sapiens
  misc_RNA (1)...(19): siRNA sense strand
gcagaucuacacgcucaug

SEQ ID NO: 283668 - RNA, 19 nt, Homo sapiens
  misc_RNA (1)...(19): siRNA sense strand
cgggagggcaucaacaaga

SEQ ID NO: 283669 - RNA, 19 nt, Homo sapiens
  misc_RNA (1)...(19): siRNA sense strand
gagaaggcgaggcucaucu

SEQ ID NO: 283670 - RNA, 19 nt, Homo sapiens
  misc_RNA (1)...(19): siRNA sense strand
agagcugggcgcagucuuu

SEQ ID NO: 283671 - RNA, 19 nt, Homo sapiens
  misc_RNA (1)...(19): siRNA sense strand
ccuucaauguccagucaug

SEQ ID NO: 283672 - RNA, 19 nt, Homo sapiens
  misc_RNA (1)...(19): siRNA sense strand
agaacaaacugcuccauuu

SEQ ID NO: 283673 - RNA, 19 nt, Homo sapiens
  misc_RNA (1)...(19): siRNA sense strand
gauuugagcuacaaugaga

SEQ ID NO: 283674 - RNA, 19 nt, Homo sapiens
  misc_RNA (1)...(19): siRNA sense strand
ugacugagcuggaccuuuc

SEQ ID NO: 283675 - RNA, 19 nt, Homo sapiens
  misc_RNA (1)...(19): siRNA sense strand
guaagaugguggacaagaa

SEQ ID NO: 283676 - RNA, 19 nt, Homo sapiens
  misc_RNA (1)...(19): siRNA sense strand
ggaaccagcugcggaguau

SEQ ID NO: 283677 - RNA, 19 nt, Homo sapiens
  misc_RNA (1)...(19): siRNA sense strand
gaacaucaaccucaucauc

SEQ ID NO: 283678 - RNA, 19 nt, Homo sapiens
  misc_RNA (1)...(19): siRNA sense strand
gaacaaacugcuccauuuc

SEQ ID NO: 283679 - RNA, 19 nt, Homo sapiens
  misc_RNA (1)...(19): siRNA sense strand
ggaauucccucaccugcau

SEQ ID NO: 283680 - RNA, 19 nt, Homo sapiens
  misc_RNA (1)...(19): siRNA sense strand
gaccugaucugccgcuuca

SEQ ID NO: 283681 - RNA, 19 nt, Homo sapiens
  misc_RNA (1)...(19): siRNA sense strand
caaagugcccuguaagaug

SEQ ID NO: 283682 - RNA, 19 nt, Homo sapiens
  misc_RNA (1)...(19): siRNA sense strand
gagaacaaacugcuccauu

SEQ ID NO: 283683 - RNA, 19 nt, Homo sapiens
  misc_RNA (1)...(19): siRNA sense strand
gaaguuuaaccaacaguau

SEQ ID NO: 283684 - RNA, 19 nt, Homo sapiens
  misc_RNA (1)...(19): siRNA sense strand
gaccugagcaccaaugaga

SEQ ID NO: 283685 - RNA, 19 nt, Homo sapiens
  misc_RNA (1)...(19): siRNA sense strand
aagacaaagugcccuguaa

SEQ ID NO: 283686 - RNA, 19 nt, Homo sapiens
  misc_RNA (1)...(19): siRNA sense strand
ccaacaguauaaagccuaa

SEQ ID NO: 283687 - RNA, 19 nt, Homo sapiens
  misc_RNA (1)...(19): siRNA sense strand
gaaggucucgugccagguu

SEQ ID NO: 283688 - RNA, 19 nt, Homo sapiens
  misc_RNA (1)...(19): siRNA sense strand
ccugguggauaaugagaua

SEQ ID NO: 283689 - RNA, 19 nt, Homo sapiens
  misc_RNA (1)...(19): siRNA sense strand
gcaacgugcugauggacau

SEQ ID NO: 283690 - RNA, 19 nt, Homo sapiens
  misc_RNA (1)...(19): siRNA sense strand
ggcagaaguuuaaccaaca

SEQ ID NO: 283691 - RNA, 19 nt, Homo sapiens
  misc_RNA (1)...(19): siRNA sense strand
gacaaagugcccuguaaga

SEQ ID NO: 283692 - RNA, 19 nt, Homo sapiens
  misc_RNA (1)...(19): siRNA sense strand
uaccugaacuuguccaaca

SEQ ID NO: 283693 - RNA, 19 nt, Homo sapiens
  misc_RNA (1)...(19): siRNA sense strand
gccugagccugguggauaa

SEQ ID NO: 283694 - RNA, 19 nt, Homo sapiens
  misc_RNA (1)...(19): siRNA sense strand
gaccugcccugcuucaucu

SEQ ID NO: 283695 - RNA, 19 nt, Homo sapiens
  misc_RNA (1)...(19): siRNA sense strand
ccuguaagaugguggacaa

SEQ ID NO: 283696 - RNA, 19 nt, Homo sapiens
  misc_RNA (1)...(19): siRNA sense strand
ugaagaacaucaaccucau

SEQ ID NO: 283697 - RNA, 19 nt, Homo sapiens
  misc_RNA (1)...(19): siRNA sense strand
caagacaaagugcccugua

SEQ ID NO: 283698 - RNA, 19 nt, Homo sapiens
  misc_RNA (1)...(19): siRNA sense strand
gcagaaguuuaaccaacag

SEQ ID NO: 283699 - RNA, 19 nt, Homo sapiens
  misc_RNA (1)...(19): siRNA sense strand
gcacaacaccaagacaaag

SEQ ID NO: 283700 - RNA, 19 nt, Homo sapiens
  misc_RNA (1)...(19): siRNA sense strand
gaagaacaucaaccucauc

SEQ ID NO: 283701 - RNA, 19 nt, Homo sapiens
  misc_RNA (1)...(19): siRNA sense strand
ggaccugcccugcuucauc

SEQ ID NO: 283702 - RNA, 19 nt, Homo sapiens
  misc_RNA (1)...(19): siRNA sense strand
gcaccaaugagaucagcuu

SEQ ID NO: 283703 - RNA, 19 nt, Homo sapiens
  misc_RNA (1)...(19): siRNA sense strand
caucauccucaccuucaua

SEQ ID NO: 283704 - RNA, 19 nt, Homo sapiens
  misc_RNA (1)...(19): siRNA sense strand
ccauacaccuuugccaauc

SEQ ID NO: 283705 - RNA, 19 nt, Homo sapiens
  misc_RNA (1)...(19): siRNA sense strand
gaaacugcuugcggaccuu

SEQ ID NO: 283706 - RNA, 19 nt, Homo sapiens
  misc_RNA (1)...(19): siRNA sense strand
gggaaccagcugcggagua

SEQ ID NO: 283707 - RNA, 19 nt, Homo sapiens
  misc_RNA (1)...(19): siRNA sense strand
ggcucaaucuugccgagaa

SEQ ID NO: 283708 - RNA, 19 nt, Homo sapiens
  misc_RNA (1)...(19): siRNA sense strand
ccugaugcuccuugacuua

SEQ ID NO: 283709 - RNA, 19 nt, Homo sapiens
  misc_RNA (1)...(19): siRNA sense strand
caacagcaucgaggccuuu

SEQ ID NO: 283710 - RNA, 19 nt, Homo sapiens
  misc_RNA (1)...(19): siRNA sense strand
cucaaccucuccaggaauu

SEQ ID NO: 283711 - RNA, 19 nt, Homo sapiens
  misc_RNA (1)...(19): siRNA sense strand
ugagccugguggauaauga

SEQ ID NO: 283712 - RNA, 19 nt, Homo sapiens
  misc_RNA (1)...(19): siRNA sense strand
acaaugcccuggagacacu

SEQ ID NO: 283713 - RNA, 19 nt, Homo sapiens
  misc_RNA (1)...(19): siRNA sense strand
ucaucuaccugaacuuguc

SEQ ID NO: 283714 - RNA, 19 nt, Homo sapiens
  misc_RNA (1)...(19): siRNA sense strand
acacugagacccuugaucu

SEQ ID NO: 283715 - RNA, 19 nt, Homo sapiens
  misc_RNA (1)...(19): siRNA sense strand
ucaccugcaucuccgacuu

SEQ ID NO: 283716 - RNA, 19 nt, Homo sapiens
  misc_RNA (1)...(19): siRNA sense strand
ccaaugagaucagcuuccu

SEQ ID NO: 283717 - RNA, 19 nt, Homo sapiens
  misc_RNA (1)...(19): siRNA sense strand
agacucaucuaccugaacu

SEQ ID NO: 283718 - RNA, 19 nt, Homo sapiens
  misc_RNA (1)...(19): siRNA sense strand
cgagacucaucuaccugaa

SEQ ID NO: 283719 - RNA, 19 nt, Homo sapiens
  misc_RNA (1)...(19): siRNA sense strand
cagcuugaccugcauagca

SEQ ID NO: 283720 - RNA, 19 nt, Homo sapiens
  misc_RNA (1)...(19): siRNA sense strand
ggaccuuucuuccaauccu

SEQ ID NO: 283721 - RNA, 19 nt, Homo sapiens
  misc_RNA (1)...(19): siRNA sense strand
ugagacccuugaucuaucu

SEQ ID NO: 283722 - RNA, 19 nt, Homo sapiens
  misc_RNA (1)...(19): siRNA sense strand
uuucccagcucuugaaucu

SEQ ID NO: 283723 - RNA, 19 nt, Homo sapiens
  misc_RNA (1)...(19): siRNA sense strand
gugcuggaccugcgaaaca

SEQ ID NO: 283724 - RNA, 19 nt, Homo sapiens
  misc_RNA (1)...(19): siRNA sense strand
ccacaaugcccuggagaca

SEQ ID NO: 283725 - RNA, 19 nt, Homo sapiens
  misc_RNA (1)...(19): siRNA sense strand
acaaagugcccuguaagau

SEQ ID NO: 283726 - RNA, 19 nt, Homo sapiens
  misc_RNA (1)...(19): siRNA sense strand
ggcuugaccugcgggagaa

SEQ ID NO: 283727 - RNA, 19 nt, Homo sapiens
  misc_RNA (1)...(19): siRNA sense strand
acaucaaccucaucaucau

SEQ ID NO: 283728 - RNA, 19 nt, Homo sapiens
  misc_RNA (1)...(19): siRNA sense strand
cugagacccuugaucuauc

SEQ ID NO: 283729 - RNA, 19 nt, Homo sapiens
  misc_RNA (1)...(19): siRNA sense strand
cauacaccuuugccaaucu

SEQ ID NO: 283730 - RNA, 19 nt, Homo sapiens
  misc_RNA (1)...(19): siRNA sense strand
gcucauccccgacagcuuu

SEQ ID NO: 283731 - RNA, 19 nt, Homo sapiens
  misc_RNA (1)...(19): siRNA sense strand
gccugaugcuccuugacuu

SEQ ID NO: 283732 - RNA, 19 nt, Homo sapiens
  misc_RNA (1)...(19): siRNA sense strand
uaagaugguggacaagaag

SEQ ID NO: 283733 - RNA, 19 nt, Homo sapiens
  misc_RNA (1)...(19): siRNA sense strand
agaaguuuaaccaacagua

SEQ ID NO: 283734 - RNA, 19 nt, Homo sapiens
  misc_RNA (1)...(19): siRNA sense strand
gauggccacugcgcugagu

SEQ ID NO: 283735 - RNA, 19 nt, Homo sapiens
  misc_RNA (1)...(19): siRNA sense strand
cauccucaccuucauacug

SEQ ID NO: 283736 - RNA, 19 nt, Homo sapiens
  misc_RNA (1)...(19): siRNA sense strand
gcucaaucuugccgagaac

SEQ ID NO: 283737 - RNA, 19 nt, Homo sapiens
  misc_RNA (1)...(19): siRNA sense strand
aacaucaaccucaucauca

SEQ ID NO: 283738 - RNA, 19 nt, Homo sapiens
  misc_RNA (1)...(19): siRNA sense strand
gaagaugacuuuccuacaa

SEQ ID NO: 283739 - RNA, 19 nt, Homo sapiens
  misc_RNA (1)...(19): siRNA sense strand
gaaguuggcugaaauggaa

SEQ ID NO: 283740 - RNA, 19 nt, Homo sapiens
  misc_RNA (1)...(19): siRNA sense strand
gaacagaggaagcauauaa

SEQ ID NO: 283741 - RNA, 19 nt, Homo sapiens
  misc_RNA (1)...(19): siRNA sense strand
caagaaaggccacaguuua

SEQ ID NO: 283742 - RNA, 19 nt, Homo sapiens
  misc_RNA (1)...(19): siRNA sense strand
gacaugaagucugcaauua

SEQ ID NO: 283743 - RNA, 19 nt, Homo sapiens
  misc_RNA (1)...(19): siRNA sense strand
gauggugacuucuugcaua

SEQ ID NO: 283744 - RNA, 19 nt, Homo sapiens
  misc_RNA (1)...(19): siRNA sense strand
gcgagaguauccuaaauuu

SEQ ID NO: 283745 - RNA, 19 nt, Homo sapiens
  misc_RNA (1)...(19): siRNA sense strand
gaggacagcuggcagaaga

SEQ ID NO: 283746 - RNA, 19 nt, Homo sapiens
  misc_RNA (1)...(19): siRNA sense strand
gguagaagaugaugaagau

SEQ ID NO: 283747 - RNA, 19 nt, Homo sapiens
  misc_RNA (1)...(19): siRNA sense strand
ucaaagggauaaaguggua

SEQ ID NO: 283748 - RNA, 19 nt, Homo sapiens
  misc_RNA (1)...(19): siRNA sense strand
gcaguugguuguagaagaa

SEQ ID NO: 283749 - RNA, 19 nt, Homo sapiens
  misc_RNA (1)...(19): siRNA sense strand
gcaaguggcuacucugcaa

SEQ ID NO: 283750 - RNA, 19 nt, Homo sapiens
  misc_RNA (1)...(19): siRNA sense strand
gaaaugaagguauacagaa

SEQ ID NO: 283751 - RNA, 19 nt, Homo sapiens
  misc_RNA (1)...(19): siRNA sense strand
uaaggaaacugagaagaaa

SEQ ID NO: 283752 - RNA, 19 nt, Homo sapiens
  misc_RNA (1)...(19): siRNA sense strand
caugaagucugcaauuauu

SEQ ID NO: 283753 - RNA, 19 nt, Homo sapiens
  misc_RNA (1)...(19): siRNA sense strand
gcaauuauuucuggaaugu

SEQ ID NO: 283754 - RNA, 19 nt, Homo sapiens
  misc_RNA (1)...(19): siRNA sense strand
cuaacagucugauuaauga

SEQ ID NO: 283755 - RNA, 19 nt, Homo sapiens
  misc_RNA (1)...(19): siRNA sense strand
gcaacacuuucucauugua

SEQ ID NO: 283756 - RNA, 19 nt, Homo sapiens
  misc_RNA (1)...(19): siRNA sense strand
cgagacguauuauaucuuu

SEQ ID NO: 283757 - RNA, 19 nt, Homo sapiens
  misc_RNA (1)...(19): siRNA sense strand
gggauaaagugguagaaga

SEQ ID NO: 283758 - RNA, 19 nt, Homo sapiens
  misc_RNA (1)...(19): siRNA sense strand
gaagaacagaggaagcaua

SEQ ID NO: 283759 - RNA, 19 nt, Homo sapiens
  misc_RNA (1)...(19): siRNA sense strand
gaagagaaguagaagaaaa

SEQ ID NO: 283760 - RNA, 19 nt, Homo sapiens
  misc_RNA (1)...(19): siRNA sense strand
gagggaaaccaggaaauua

SEQ ID NO: 283761 - RNA, 19 nt, Homo sapiens
  misc_RNA (1)...(19): siRNA sense strand
caacauccaccucuucauu

SEQ ID NO: 283762 - RNA, 19 nt, Homo sapiens
  misc_RNA (1)...(19): siRNA sense strand
gcaccagccucaguguuaa

SEQ ID NO: 283763 - RNA, 19 nt, Homo sapiens
  misc_RNA (1)...(19): siRNA sense strand
gaaauuagcagggacaaca

SEQ ID NO: 283764 - RNA, 19 nt, Homo sapiens
  misc_RNA (1)...(19): siRNA sense strand
aaggagaaaugaagguaua

SEQ ID NO: 283765 - RNA, 19 nt, Homo sapiens
  misc_RNA (1)...(19): siRNA sense strand
ggugacuucuugcauagua

SEQ ID NO: 283766 - RNA, 19 nt, Homo sapiens
  misc_RNA (1)...(19): siRNA sense strand
caucuuauguagacaaguu

SEQ ID NO: 283767 - RNA, 19 nt, Homo sapiens
  misc_RNA (1)...(19): siRNA sense strand
guggaaacauuagcugaua

SEQ ID NO: 283768 - RNA, 19 nt, Homo sapiens
  misc_RNA (1)...(19): siRNA sense strand
ggacaugaagucugcaauu

SEQ ID NO: 283769 - RNA, 19 nt, Homo sapiens
  misc_RNA (1)...(19): siRNA sense strand
uagcaaggcugucaucaca

SEQ ID NO: 283770 - RNA, 19 nt, Homo sapiens
  misc_RNA (1)...(19): siRNA sense strand
gagaguauccuaaauuucu

SEQ ID NO: 283771 - RNA, 19 nt, Homo sapiens
  misc_RNA (1)...(19): siRNA sense strand
gaagguauacagaagagaa

SEQ ID NO: 283772 - RNA, 19 nt, Homo sapiens
  misc_RNA (1)...(19): siRNA sense strand
cuacagaaguacuuugaug

SEQ ID NO: 283773 - RNA, 19 nt, Homo sapiens
  misc_RNA (1)...(19): siRNA sense strand
ggaaacauuuagagacauc

SEQ ID NO: 283774 - RNA, 19 nt, Homo sapiens
  misc_RNA (1)...(19): siRNA sense strand
gaacagcacaagacugaau

SEQ ID NO: 283775 - RNA, 19 nt, Homo sapiens
  misc_RNA (1)...(19): siRNA sense strand
gaguauggcugcagaggau

SEQ ID NO: 283776 - RNA, 19 nt, Homo sapiens
  misc_RNA (1)...(19): siRNA sense strand
cagaagagaaguagaagaa

SEQ ID NO: 283777 - RNA, 19 nt, Homo sapiens
  misc_RNA (1)...(19): siRNA sense strand
agaagagacuggauaagga

SEQ ID NO: 283778 - RNA, 19 nt, Homo sapiens
  misc_RNA (1)...(19): siRNA sense strand
gaagagacuggauaaggaa

SEQ ID NO: 283779 - RNA, 19 nt, Homo sapiens
  misc_RNA (1)...(19): siRNA sense strand
gcaaugacagaacuuaaga

SEQ ID NO: 283780 - RNA, 19 nt, Homo sapiens
  misc_RNA (1)...(19): siRNA sense strand
gaugaaugucgauuugaua

SEQ ID NO: 283781 - RNA, 19 nt, Homo sapiens
  misc_RNA (1)...(19): siRNA sense strand
gaucauagacagcaaugga

SEQ ID NO: 283782 - RNA, 19 nt, Homo sapiens
  misc_RNA (1)...(19): siRNA sense strand
gcucugaguuacuacaaau

SEQ ID NO: 283783 - RNA, 19 nt, Homo sapiens
  misc_RNA (1)...(19): siRNA sense strand
gcaaagcgagaguauccua

SEQ ID NO: 283784 - RNA, 19 nt, Homo sapiens
  misc_RNA (1)...(19): siRNA sense strand
agacagcaauggauagaug

SEQ ID NO: 283785 - RNA, 19 nt, Homo sapiens
  misc_RNA (1)...(19): siRNA sense strand
ugacagugcuccucuaaac

SEQ ID NO: 283786 - RNA, 19 nt, Homo sapiens
  misc_RNA (1)...(19): siRNA sense strand
uugcaacacuuucucauug

SEQ ID NO: 283787 - RNA, 19 nt, Homo sapiens
  misc_RNA (1)...(19): siRNA sense strand
ggcaccagccucaguguua

SEQ ID NO: 283788 - RNA, 19 nt, Homo sapiens
  misc_RNA (1)...(19): siRNA sense strand
gacugaaucuggauaugga

SEQ ID NO: 283789 - RNA, 19 nt, Homo sapiens
  misc_RNA (1)...(19): siRNA sense strand
gaaagccuauuuuguucua

SEQ ID NO: 283790 - RNA, 19 nt, Homo sapiens
  misc_RNA (1)...(19): siRNA sense strand
uugaagagauggugcagaa

SEQ ID NO: 283791 - RNA, 19 nt, Homo sapiens
  misc_RNA (1)...(19): siRNA sense strand
gugagaaguuggcugaaau

SEQ ID NO: 283792 - RNA, 19 nt, Homo sapiens
  misc_RNA (1)...(19): siRNA sense strand
caucacaccucacgauuuu

SEQ ID NO: 283793 - RNA, 19 nt, Homo sapiens
  misc_RNA (1)...(19): siRNA sense strand
gggacaacauucuaugcaa

SEQ ID NO: 283794 - RNA, 19 nt, Homo sapiens
  misc_RNA (1)...(19): siRNA sense strand
ggcccuaacagucugauua

SEQ ID NO: 283795 - RNA, 19 nt, Homo sapiens
  misc_RNA (1)...(19): siRNA sense strand
ggccacaguuuacgugaga

SEQ ID NO: 283796 - RNA, 19 nt, Homo sapiens
  misc_RNA (1)...(19): siRNA sense strand
gggaagcgauaacuuuuaa

SEQ ID NO: 283797 - RNA, 19 nt, Homo sapiens
  misc_RNA (1)...(19): siRNA sense strand
ucaagaaaggccacaguuu

SEQ ID NO: 283798 - RNA, 19 nt, Homo sapiens
  misc_RNA (1)...(19): siRNA sense strand
ggaaacaacuauagaaaac

SEQ ID NO: 283799 - RNA, 19 nt, Homo sapiens
  misc_RNA (1)...(19): siRNA sense strand
ugaagcugcucuugacaga

SEQ ID NO: 283800 - RNA, 19 nt, Homo sapiens
  misc_RNA (1)...(19): siRNA sense strand
auaaugcucugaguuacua

SEQ ID NO: 283801 - RNA, 19 nt, Homo sapiens
  misc_RNA (1)...(19): siRNA sense strand
ggauagaugccauugaaca

SEQ ID NO: 283802 - RNA, 19 nt, Homo sapiens
  misc_RNA (1)...(19): siRNA sense strand
gugcugaugcugucucuaa

SEQ ID NO: 283803 - RNA, 19 nt, Homo sapiens
  misc_RNA (1)...(19): siRNA sense strand
ggauaaagugguagaagau

SEQ ID NO: 283804 - RNA, 19 nt, Homo sapiens
  misc_RNA (1)...(19): siRNA sense strand
ucagcgagacguauuauau

SEQ ID NO: 283805 - RNA, 19 nt, Homo sapiens
  misc_RNA (1)...(19): siRNA sense strand
gaaggagaaaugaagguau

SEQ ID NO: 283806 - RNA, 19 nt, Homo sapiens
  misc_RNA (1)...(19): siRNA sense strand
aaaguuauuuccacaugug

SEQ ID NO: 283807 - RNA, 19 nt, Homo sapiens
  misc_RNA (1)...(19): siRNA sense strand
ggauccaucugucuuagca

SEQ ID NO: 283808 - RNA, 19 nt, Homo sapiens
  misc_RNA (1)...(19): siRNA sense strand
uagaagaugaugaagauga

SEQ ID NO: 283809 - RNA, 19 nt, Homo sapiens
  misc_RNA (1)...(19): siRNA sense strand
guucuuugaugcuguugaa

SEQ ID NO: 283810 - RNA, 19 nt, Homo sapiens
  misc_RNA (1)...(19): siRNA sense strand
caggaucguuggguaguuu

SEQ ID NO: 283811 - RNA, 19 nt, Homo sapiens
  misc_RNA (1)...(19): siRNA sense strand
gagauuacauuggccuaca

SEQ ID NO: 283812 - RNA, 19 nt, Homo sapiens
  misc_RNA (1)...(19): siRNA sense strand
auaaagugguagaagauga

SEQ ID NO: 283813 - RNA, 19 nt, Homo sapiens
  misc_RNA (1)...(19): siRNA sense strand
gaaaaggugagauuacauu

SEQ ID NO: 283814 - RNA, 19 nt, Homo sapiens
  misc_RNA (1)...(19): siRNA sense strand
guaccaacggcaauaaaga

SEQ ID NO: 283815 - RNA, 19 nt, Homo sapiens
  misc_RNA (1)...(19): siRNA sense strand
auaccagccuugacugaaa

SEQ ID NO: 283816 - RNA, 19 nt, Homo sapiens
  misc_RNA (1)...(19): siRNA sense strand
uggaaacauuagcugauaa

SEQ ID NO: 283817 - RNA, 19 nt, Homo sapiens
  misc_RNA (1)...(19): siRNA sense strand
gcccuaacagucugauuaa

SEQ ID NO: 283818 - RNA, 19 nt, Homo sapiens
  misc_RNA (1)...(19): siRNA sense strand
cgaaagauaccagccuuga

SEQ ID NO: 283819 - RNA, 19 nt, Homo sapiens
  misc_RNA (1)...(19): siRNA sense strand
cgugagaaguuggcugaaa

SEQ ID NO: 283820 - RNA, 19 nt, Homo sapiens
  misc_RNA (1)...(19): siRNA sense strand
aaaugaagguauacagaag

SEQ ID NO: 283821 - RNA, 19 nt, Homo sapiens
  misc_RNA (1)...(19): siRNA sense strand
ggcaguugguuguagaaga

SEQ ID NO: 283822 - RNA, 19 nt, Homo sapiens
  misc_RNA (1)...(19): siRNA sense strand
ugcagaaccacaugacuua

SEQ ID NO: 283823 - RNA, 19 nt, Homo sapiens
  misc_RNA (1)...(19): siRNA sense strand
ggaauccuugcaacacuuu

SEQ ID NO: 283824 - RNA, 19 nt, Homo sapiens
  misc_RNA (1)...(19): siRNA sense strand
caaguugacacgcuacaga

SEQ ID NO: 283825 - RNA, 19 nt, Homo sapiens
  misc_RNA (1)...(19): siRNA sense strand
gcaggaucguuggguaguu

SEQ ID NO: 283826 - RNA, 19 nt, Homo sapiens
  misc_RNA (1)...(19): siRNA sense strand
gaaaaugacccugaaacuu

SEQ ID NO: 283827 - RNA, 19 nt, Homo sapiens
  misc_RNA (1)...(19): siRNA sense strand
ucaguaaguggacaaacua

SEQ ID NO: 283828 - RNA, 19 nt, Homo sapiens
  misc_RNA (1)...(19): siRNA sense strand
uugacacgcuacagaagua

SEQ ID NO: 283829 - RNA, 19 nt, Homo sapiens
  misc_RNA (1)...(19): siRNA sense strand
ucauagacagcaauggaua

SEQ ID NO: 283830 - RNA, 19 nt, Homo sapiens
  misc_RNA (1)...(19): siRNA sense strand
ugaugaaugucgauuugau

SEQ ID NO: 283831 - RNA, 19 nt, Homo sapiens
  misc_RNA (1)...(19): siRNA sense strand
guagaagaaggagaaauga

SEQ ID NO: 283832 - RNA, 19 nt, Homo sapiens
  misc_RNA (1)...(19): siRNA sense strand
ccuaacagucugauuaaug

SEQ ID NO: 283833 - RNA, 19 nt, Homo sapiens
  misc_RNA (1)...(19): siRNA sense strand
ugaagaaggcccuaacagu

SEQ ID NO: 283834 - RNA, 19 nt, Homo sapiens
  misc_RNA (1)...(19): siRNA sense strand
auaaggaaacugagaagaa

SEQ ID NO: 283835 - RNA, 19 nt, Homo sapiens
  misc_RNA (1)...(19): siRNA sense strand
ggcagaagagacuggauaa

SEQ ID NO: 283836 - RNA, 19 nt, Homo sapiens
  misc_RNA (1)...(19): siRNA sense strand
gaacuucaaagggauaaag

SEQ ID NO: 283837 - RNA, 19 nt, Homo sapiens
  misc_RNA (1)...(19): siRNA sense strand
caacauucuaugcaagauu

SEQ ID NO: 283838 - RNA, 19 nt, Homo sapiens
  misc_RNA (1)...(19): siRNA sense strand
gaagaugacuuuccuacaa

SEQ ID NO: 283839 - RNA, 19 nt, Homo sapiens
  misc_RNA (1)...(19): siRNA sense strand
gaaguuggcugaaauggaa

SEQ ID NO: 283840 - RNA, 19 nt, Homo sapiens
  misc_RNA (1)...(19): siRNA sense strand
gaacagaggaagcauauaa

SEQ ID NO: 283841 - RNA, 19 nt, Homo sapiens
  misc_RNA (1)...(19): siRNA sense strand
caagaaaggccacaguuua

SEQ ID NO: 283842 - RNA, 19 nt, Homo sapiens
  misc_RNA (1)...(19): siRNA sense strand
gacaugaagucugcaauua

SEQ ID NO: 283843 - RNA, 19 nt, Homo sapiens
  misc_RNA (1)...(19): siRNA sense strand
gauggugacuucuugcaua

SEQ ID NO: 283844 - RNA, 19 nt, Homo sapiens
  misc_RNA (1)...(19): siRNA sense strand
gcgagaguauccuaaauuu

SEQ ID NO: 283845 - RNA, 19 nt, Homo sapiens
  misc_RNA (1)...(19): siRNA sense strand
gaggacagcuggcagaaga

SEQ ID NO: 283846 - RNA, 19 nt, Homo sapiens
  misc_RNA (1)...(19): siRNA sense strand
gguagaagaugaugaagau

SEQ ID NO: 283847 - RNA, 19 nt, Homo sapiens
  misc_RNA (1)...(19): siRNA sense strand
ucaaagggauaaaguggua

SEQ ID NO: 283848 - RNA, 19 nt, Homo sapiens
  misc_RNA (1)...(19): siRNA sense strand
gcaguugguuguagaagaa

SEQ ID NO: 283849 - RNA, 19 nt, Homo sapiens
  misc_RNA (1)...(19): siRNA sense strand
gcaaguggcuacucugcaa

SEQ ID NO: 283850 - RNA, 19 nt, Homo sapiens
  misc_RNA (1)...(19): siRNA sense strand
gaaaugaagguauacagaa

SEQ ID NO: 283851 - RNA, 19 nt, Homo sapiens
  misc_RNA (1)...(19): siRNA sense strand
uaaggaaacugagaagaaa

SEQ ID NO: 283852 - RNA, 19 nt, Homo sapiens
  misc_RNA (1)...(19): siRNA sense strand
caugaagucugcaauuauu

SEQ ID NO: 283853 - RNA, 19 nt, Homo sapiens
  misc_RNA (1)...(19): siRNA sense strand
gcaauuauuucuggaaugu

SEQ ID NO: 283854 - RNA, 19 nt, Homo sapiens
  misc_RNA (1)...(19): siRNA sense strand
cuaacagucugauuaauga

SEQ ID NO: 283855 - RNA, 19 nt, Homo sapiens
  misc_RNA (1)...(19): siRNA sense strand
gcaacacuuucucauugua

SEQ ID NO: 283856 - RNA, 19 nt, Homo sapiens
  misc_RNA (1)...(19): siRNA sense strand
cgagacguauuauaucuuu

SEQ ID NO: 283857 - RNA, 19 nt, Homo sapiens
  misc_RNA (1)...(19): siRNA sense strand
gggauaaagugguagaaga

SEQ ID NO: 283858 - RNA, 19 nt, Homo sapiens
  misc_RNA (1)...(19): siRNA sense strand
gaagaacagaggaagcaua

SEQ ID NO: 283859 - RNA, 19 nt, Homo sapiens
  misc_RNA (1)...(19): siRNA sense strand
gaagagaaguagaagaaaa

SEQ ID NO: 283860 - RNA, 19 nt, Homo sapiens
  misc_RNA (1)...(19): siRNA sense strand
gagggaaaccaggaaauua

SEQ ID NO: 283861 - RNA, 19 nt, Homo sapiens
  misc_RNA (1)...(19): siRNA sense strand
caacauccaccucuucauu

SEQ ID NO: 283862 - RNA, 19 nt, Homo sapiens
  misc_RNA (1)...(19): siRNA sense strand
gcaccagccucaguguuaa

SEQ ID NO: 283863 - RNA, 19 nt, Homo sapiens
  misc_RNA (1)...(19): siRNA sense strand
gaaauuagcagggacaaca

SEQ ID NO: 283864 - RNA, 19 nt, Homo sapiens
  misc_RNA (1)...(19): siRNA sense strand
aaggagaaaugaagguaua

SEQ ID NO: 283865 - RNA, 19 nt, Homo sapiens
  misc_RNA (1)...(19): siRNA sense strand
ggugacuucuugcauagua

SEQ ID NO: 283866 - RNA, 19 nt, Homo sapiens
  misc_RNA (1)...(19): siRNA sense strand
caucuuauguagacaaguu

SEQ ID NO: 283867 - RNA, 19 nt, Homo sapiens
  misc_RNA (1)...(19): siRNA sense strand
guggaaacauuagcugaua

SEQ ID NO: 283868 - RNA, 19 nt, Homo sapiens
  misc_RNA (1)...(19): siRNA sense strand
ggacaugaagucugcaauu

SEQ ID NO: 283869 - RNA, 19 nt, Homo sapiens
  misc_RNA (1)...(19): siRNA sense strand
uagcaaggcugucaucaca

SEQ ID NO: 283870 - RNA, 19 nt, Homo sapiens
  misc_RNA (1)...(19): siRNA sense strand
gagaguauccuaaauuucu

SEQ ID NO: 283871 - RNA, 19 nt, Homo sapiens
  misc_RNA (1)...(19): siRNA sense strand
gaagguauacagaagagaa

SEQ ID NO: 283872 - RNA, 19 nt, Homo sapiens
  misc_RNA (1)...(19): siRNA sense strand
cuacagaaguacuuugaug

SEQ ID NO: 283873 - RNA, 19 nt, Homo sapiens
  misc_RNA (1)...(19): siRNA sense strand
ggaaacauuuagagacauc

SEQ ID NO: 283874 - RNA, 19 nt, Homo sapiens
  misc_RNA (1)...(19): siRNA sense strand
gaacagcacaagacugaau

SEQ ID NO: 283875 - RNA, 19 nt, Homo sapiens
  misc_RNA (1)...(19): siRNA sense strand
gaguauggcugcagaggau

SEQ ID NO: 283876 - RNA, 19 nt, Homo sapiens
  misc_RNA (1)...(19): siRNA sense strand
cagaagagaaguagaagaa

SEQ ID NO: 283877 - RNA, 19 nt, Homo sapiens
  misc_RNA (1)...(19): siRNA sense strand
agaagagacuggauaagga

SEQ ID NO: 283878 - RNA, 19 nt, Homo sapiens
  misc_RNA (1)...(19): siRNA sense strand
gaagagacuggauaaggaa

SEQ ID NO: 283879 - RNA, 19 nt, Homo sapiens
  misc_RNA (1)...(19): siRNA sense strand
gcaaugacagaacuuaaga

SEQ ID NO: 283880 - RNA, 19 nt, Homo sapiens
  misc_RNA (1)...(19): siRNA sense strand
gaugaaugucgauuugaua

SEQ ID NO: 283881 - RNA, 19 nt, Homo sapiens
  misc_RNA (1)...(19): siRNA sense strand
gaucauagacagcaaugga

SEQ ID NO: 283882 - RNA, 19 nt, Homo sapiens
  misc_RNA (1)...(19): siRNA sense strand
gcucugaguuacuacaaau

SEQ ID NO: 283883 - RNA, 19 nt, Homo sapiens
  misc_RNA (1)...(19): siRNA sense strand
gcaaagcgagaguauccua

SEQ ID NO: 283884 - RNA, 19 nt, Homo sapiens
  misc_RNA (1)...(19): siRNA sense strand
agacagcaauggauagaug

SEQ ID NO: 283885 - RNA, 19 nt, Homo sapiens
  misc_RNA (1)...(19): siRNA sense strand
ugacagugcuccucuaaac

SEQ ID NO: 283886 - RNA, 19 nt, Homo sapiens
  misc_RNA (1)...(19): siRNA sense strand
uugcaacacuuucucauug

SEQ ID NO: 283887 - RNA, 19 nt, Homo sapiens
  misc_RNA (1)...(19): siRNA sense strand
ggcaccagccucaguguua

SEQ ID NO: 283888 - RNA, 19 nt, Homo sapiens
  misc_RNA (1)...(19): siRNA sense strand
gacugaaucuggauaugga

SEQ ID NO: 283889 - RNA, 19 nt, Homo sapiens
  misc_RNA (1)...(19): siRNA sense strand
gaaagccuauuuuguucua

SEQ ID NO: 283890 - RNA, 19 nt, Homo sapiens
  misc_RNA (1)...(19): siRNA sense strand
uugaagagauggugcagaa

SEQ ID NO: 283891 - RNA, 19 nt, Homo sapiens
  misc_RNA (1)...(19): siRNA sense strand
gugagaaguuggcugaaau

SEQ ID NO: 283892 - RNA, 19 nt, Homo sapiens
  misc_RNA (1)...(19): siRNA sense strand
caucacaccucacgauuuu

SEQ ID NO: 283893 - RNA, 19 nt, Homo sapiens
  misc_RNA (1)...(19): siRNA sense strand
gggacaacauucuaugcaa

SEQ ID NO: 283894 - RNA, 19 nt, Homo sapiens
  misc_RNA (1)...(19): siRNA sense strand
ggcccuaacagucugauua

SEQ ID NO: 283895 - RNA, 19 nt, Homo sapiens
  misc_RNA (1)...(19): siRNA sense strand
ggccacaguuuacgugaga

SEQ ID NO: 283896 - RNA, 19 nt, Homo sapiens
  misc_RNA (1)...(19): siRNA sense strand
gggaagcgauaacuuuuaa

SEQ ID NO: 283897 - RNA, 19 nt, Homo sapiens
  misc_RNA (1)...(19): siRNA sense strand
ucaagaaaggccacaguuu

SEQ ID NO: 283898 - RNA, 19 nt, Homo sapiens
  misc_RNA (1)...(19): siRNA sense strand
ggaaacaacuauagaaaac

SEQ ID NO: 283899 - RNA, 19 nt, Homo sapiens
  misc_RNA (1)...(19): siRNA sense strand
ugaagcugcucuugacaga

SEQ ID NO: 283900 - RNA, 19 nt, Homo sapiens
  misc_RNA (1)...(19): siRNA sense strand
auaaugcucugaguuacua

SEQ ID NO: 283901 - RNA, 19 nt, Homo sapiens
  misc_RNA (1)...(19): siRNA sense strand
ggauagaugccauugaaca

SEQ ID NO: 283902 - RNA, 19 nt, Homo sapiens
  misc_RNA (1)...(19): siRNA sense strand
gugcugaugcugucucuaa

SEQ ID NO: 283903 - RNA, 19 nt, Homo sapiens
  misc_RNA (1)...(19): siRNA sense strand
ggauaaagugguagaagau

SEQ ID NO: 283904 - RNA, 19 nt, Homo sapiens
  misc_RNA (1)...(19): siRNA sense strand
ucagcgagacguauuauau

SEQ ID NO: 283905 - RNA, 19 nt, Homo sapiens
  misc_RNA (1)...(19): siRNA sense strand
gaaggagaaaugaagguau

SEQ ID NO: 283906 - RNA, 19 nt, Homo sapiens
  misc_RNA (1)...(19): siRNA sense strand
aaaguuauuuccacaugug

SEQ ID NO: 283907 - RNA, 19 nt, Homo sapiens
  misc_RNA (1)...(19): siRNA sense strand
ggauccaucugucuuagca

SEQ ID NO: 283908 - RNA, 19 nt, Homo sapiens
  misc_RNA (1)...(19): siRNA sense strand
uagaagaugaugaagauga

SEQ ID NO: 283909 - RNA, 19 nt, Homo sapiens
  misc_RNA (1)...(19): siRNA sense strand
guucuuugaugcuguugaa

SEQ ID NO: 283910 - RNA, 19 nt, Homo sapiens
  misc_RNA (1)...(19): siRNA sense strand
caggaucguuggguaguuu

SEQ ID NO: 283911 - RNA, 19 nt, Homo sapiens
  misc_RNA (1)...(19): siRNA sense strand
gagauuacauuggccuaca

SEQ ID NO: 283912 - RNA, 19 nt, Homo sapiens
  misc_RNA (1)...(19): siRNA sense strand
auaaagugguagaagauga

SEQ ID NO: 283913 - RNA, 19 nt, Homo sapiens
  misc_RNA (1)...(19): siRNA sense strand
gaaaaggugagauuacauu

SEQ ID NO: 283914 - RNA, 19 nt, Homo sapiens
  misc_RNA (1)...(19): siRNA sense strand
guaccaacggcaauaaaga

SEQ ID NO: 283915 - RNA, 19 nt, Homo sapiens
  misc_RNA (1)...(19): siRNA sense strand
auaccagccuugacugaaa

SEQ ID NO: 283916 - RNA, 19 nt, Homo sapiens
  misc_RNA (1)...(19): siRNA sense strand
uggaaacauuagcugauaa

SEQ ID NO: 283917 - RNA, 19 nt, Homo sapiens
  misc_RNA (1)...(19): siRNA sense strand
gcccuaacagucugauuaa

SEQ ID NO: 283918 - RNA, 19 nt, Homo sapiens
  misc_RNA (1)...(19): siRNA sense strand
cgaaagauaccagccuuga

SEQ ID NO: 283919 - RNA, 19 nt, Homo sapiens
  misc_RNA (1)...(19): siRNA sense strand
cgugagaaguuggcugaaa

SEQ ID NO: 283920 - RNA, 19 nt, Homo sapiens
  misc_RNA (1)...(19): siRNA sense strand
aaaugaagguauacagaag

SEQ ID NO: 283921 - RNA, 19 nt, Homo sapiens
  misc_RNA (1)...(19): siRNA sense strand
ggcaguugguuguagaaga

SEQ ID NO: 283922 - RNA, 19 nt, Homo sapiens
  misc_RNA (1)...(19): siRNA sense strand
ugcagaaccacaugacuua

SEQ ID NO: 283923 - RNA, 19 nt, Homo sapiens
  misc_RNA (1)...(19): siRNA sense strand
ggaauccuugcaacacuuu

SEQ ID NO: 283924 - RNA, 19 nt, Homo sapiens
  misc_RNA (1)...(19): siRNA sense strand
caaguugacacgcuacaga

SEQ ID NO: 283925 - RNA, 19 nt, Homo sapiens
  misc_RNA (1)...(19): siRNA sense strand
gcaggaucguuggguaguu

SEQ ID NO: 283926 - RNA, 19 nt, Homo sapiens
  misc_RNA (1)...(19): siRNA sense strand
gaaaaugacccugaaacuu

SEQ ID NO: 283927 - RNA, 19 nt, Homo sapiens
  misc_RNA (1)...(19): siRNA sense strand
ucaguaaguggacaaacua

SEQ ID NO: 283928 - RNA, 19 nt, Homo sapiens
  misc_RNA (1)...(19): siRNA sense strand
uugacacgcuacagaagua

SEQ ID NO: 283929 - RNA, 19 nt, Homo sapiens
  misc_RNA (1)...(19): siRNA sense strand
ucauagacagcaauggaua

SEQ ID NO: 283930 - RNA, 19 nt, Homo sapiens
  misc_RNA (1)...(19): siRNA sense strand
ugaugaaugucgauuugau

SEQ ID NO: 283931 - RNA, 19 nt, Homo sapiens
  misc_RNA (1)...(19): siRNA sense strand
guagaagaaggagaaauga

SEQ ID NO: 283932 - RNA, 19 nt, Homo sapiens
  misc_RNA (1)...(19): siRNA sense strand
ccuaacagucugauuaaug

SEQ ID NO: 283933 - RNA, 19 nt, Homo sapiens
  misc_RNA (1)...(19): siRNA sense strand
ugaagaaggcccuaacagu

SEQ ID NO: 283934 - RNA, 19 nt, Homo sapiens
  misc_RNA (1)...(19): siRNA sense strand
auaaggaaacugagaagaa

SEQ ID NO: 283935 - RNA, 19 nt, Homo sapiens
  misc_RNA (1)...(19): siRNA sense strand
ggcagaagagacuggauaa

SEQ ID NO: 283936 - RNA, 19 nt, Homo sapiens
  misc_RNA (1)...(19): siRNA sense strand
gaacuucaaagggauaaag

SEQ ID NO: 283937 - RNA, 19 nt, Homo sapiens
  misc_RNA (1)...(19): siRNA sense strand
caacauucuaugcaagauu

SEQ ID NO: 283938 - RNA, 19 nt, Homo sapiens
  misc_RNA (1)...(19): siRNA sense strand
ccacagaaauggaagacaa

SEQ ID NO: 283939 - RNA, 19 nt, Homo sapiens
  misc_RNA (1)...(19): siRNA sense strand
ucacagagcugaaaaggua

SEQ ID NO: 283940 - RNA, 19 nt, Homo sapiens
  misc_RNA (1)...(19): siRNA sense strand
caagauuucugaagccauu

SEQ ID NO: 283941 - RNA, 19 nt, Homo sapiens
  misc_RNA (1)...(19): siRNA sense strand
agaaauggaagacaaguua

SEQ ID NO: 283942 - RNA, 19 nt, Homo sapiens
  misc_RNA (1)...(19): siRNA sense strand
gcaaugaugucaauuucca

SEQ ID NO: 283943 - RNA, 19 nt, Homo sapiens
  misc_RNA (1)...(19): siRNA sense strand
gcagaaaagucacuaaaug

SEQ ID NO: 283944 - RNA, 19 nt, Homo sapiens
  misc_RNA (1)...(19): siRNA sense strand
cagcaaagccagauacuug

SEQ ID NO: 283945 - RNA, 19 nt, Homo sapiens
  misc_RNA (1)...(19): siRNA sense strand
ccacggaguuugaguuugu

SEQ ID NO: 283946 - RNA, 19 nt, Homo sapiens
  misc_RNA (1)...(19): siRNA sense strand
cgauagaugucaagauuuc

SEQ ID NO: 283947 - RNA, 19 nt, Homo sapiens
  misc_RNA (1)...(19): siRNA sense strand
gaaauugaagcucucuaaa

SEQ ID NO: 283948 - RNA, 19 nt, Homo sapiens
  misc_RNA (1)...(19): siRNA sense strand
caacaaagcaaacucgaau

SEQ ID NO: 283949 - RNA, 19 nt, Homo sapiens
  misc_RNA (1)...(19): siRNA sense strand
ggacacaagugaugaaucc

SEQ ID NO: 283950 - RNA, 19 nt, Homo sapiens
  misc_RNA (1)...(19): siRNA sense strand
ggaaaugcucaaugacuuu

SEQ ID NO: 283951 - RNA, 19 nt, Homo sapiens
  misc_RNA (1)...(19): siRNA sense strand
gcagagacugugcagauaa

SEQ ID NO: 283952 - RNA, 19 nt, Homo sapiens
  misc_RNA (1)...(19): siRNA sense strand
gaaauggaagacaaguuaa

SEQ ID NO: 283953 - RNA, 19 nt, Homo sapiens
  misc_RNA (1)...(19): siRNA sense strand
ucaccaaccagaucaauaa

SEQ ID NO: 283954 - RNA, 19 nt, Homo sapiens
  misc_RNA (1)...(19): siRNA sense strand
uggaggaaaugcucaauga

SEQ ID NO: 283955 - RNA, 19 nt, Homo sapiens
  misc_RNA (1)...(19): siRNA sense strand
cccgauagaugucaagauu

SEQ ID NO: 283956 - RNA, 19 nt, Homo sapiens
  misc_RNA (1)...(19): siRNA sense strand
uggaaugugugagcaaaua

SEQ ID NO: 283957 - RNA, 19 nt, Homo sapiens
  misc_RNA (1)...(19): siRNA sense strand
gaggaaagaccaacaacug

SEQ ID NO: 283958 - RNA, 19 nt, Homo sapiens
  misc_RNA (1)...(19): siRNA sense strand
gugcauggaugacgugugu

SEQ ID NO: 283959 - RNA, 19 nt, Homo sapiens
  misc_RNA (1)...(19): siRNA sense strand
acaaagcaaacucgaauuu

SEQ ID NO: 283960 - RNA, 19 nt, Homo sapiens
  misc_RNA (1)...(19): siRNA sense strand
gcauuacccuacacuaucu

SEQ ID NO: 283961 - RNA, 19 nt, Homo sapiens
  misc_RNA (1)...(19): siRNA sense strand
ucacucggccugacacuuu

SEQ ID NO: 283962 - RNA, 19 nt, Homo sapiens
  misc_RNA (1)...(19): siRNA sense strand
caauggcaaugaugucaau

SEQ ID NO: 283963 - RNA, 19 nt, Homo sapiens
  misc_RNA (1)...(19): siRNA sense strand
aguggaaucuguuuauaga

SEQ ID NO: 283964 - RNA, 19 nt, Homo sapiens
  misc_RNA (1)...(19): siRNA sense strand
ccagauacuugccugagau

SEQ ID NO: 283965 - RNA, 19 nt, Homo sapiens
  misc_RNA (1)...(19): siRNA sense strand
ucaugaagaugcuguacug

SEQ ID NO: 283966 - RNA, 19 nt, Homo sapiens
  misc_RNA (1)...(19): siRNA sense strand
agaguggaaucuguuuaua

SEQ ID NO: 283967 - RNA, 19 nt, Homo sapiens
  misc_RNA (1)...(19): siRNA sense strand
ggaccuauggcaugcugua

SEQ ID NO: 283968 - RNA, 19 nt, Homo sapiens
  misc_RNA (1)...(19): siRNA sense strand
gugaugaccaacaaacuaa

SEQ ID NO: 283969 - RNA, 19 nt, Homo sapiens
  misc_RNA (1)...(19): siRNA sense strand
aagacuaccuggaaugugu

SEQ ID NO: 283970 - RNA, 19 nt, Homo sapiens
  misc_RNA (1)...(19): siRNA sense strand
gcauaagaaauuugacgaa

SEQ ID NO: 283971 - RNA, 19 nt, Homo sapiens
  misc_RNA (1)...(19): siRNA sense strand
aaaggucuggucagcauua

SEQ ID NO: 283972 - RNA, 19 nt, Homo sapiens
  misc_RNA (1)...(19): siRNA sense strand
agaaauugaagcucucuaa

SEQ ID NO: 283973 - RNA, 19 nt, Homo sapiens
  misc_RNA (1)...(19): siRNA sense strand
guccaggcauaagaaauuu

SEQ ID NO: 283974 - RNA, 19 nt, Homo sapiens
  misc_RNA (1)...(19): siRNA sense strand
uggcaaugaugucaauuuc

SEQ ID NO: 283975 - RNA, 19 nt, Homo sapiens
  misc_RNA (1)...(19): siRNA sense strand
aggcugaccucgacacaga

SEQ ID NO: 283976 - RNA, 19 nt, Homo sapiens
  misc_RNA (1)...(19): siRNA sense strand
gaagagacaagccauuuug

SEQ ID NO: 283977 - RNA, 19 nt, Homo sapiens
  misc_RNA (1)...(19): siRNA sense strand
gccagauacuugccugaga

SEQ ID NO: 283978 - RNA, 19 nt, Homo sapiens
  misc_RNA (1)...(19): siRNA sense strand
cagcauuacccuacacuau

SEQ ID NO: 283979 - RNA, 19 nt, Homo sapiens
  misc_RNA (1)...(19): siRNA sense strand
aggaaaugcucaaugacuu

SEQ ID NO: 283980 - RNA, 19 nt, Homo sapiens
  misc_RNA (1)...(19): siRNA sense strand
uccaggaccucuucacaga

SEQ ID NO: 283981 - RNA, 19 nt, Homo sapiens
  misc_RNA (1)...(19): siRNA sense strand
caacaacuacugucucaac

SEQ ID NO: 283982 - RNA, 19 nt, Homo sapiens
  misc_RNA (1)...(19): siRNA sense strand
ccaaccagaucaauaaucc

SEQ ID NO: 283983 - RNA, 19 nt, Homo sapiens
  misc_RNA (1)...(19): siRNA sense strand
guacaugcagaauucagaa

SEQ ID NO: 283984 - RNA, 19 nt, Homo sapiens
  misc_RNA (1)...(19): siRNA sense strand
gcagugggugcauggauga

SEQ ID NO: 283985 - RNA, 19 nt, Homo sapiens
  misc_RNA (1)...(19): siRNA sense strand
gcacagcaaagccagauac

SEQ ID NO: 283986 - RNA, 19 nt, Homo sapiens
  misc_RNA (1)...(19): siRNA sense strand
ucacagacauaaaagagaa

SEQ ID NO: 283987 - RNA, 19 nt, Homo sapiens
  misc_RNA (1)...(19): siRNA sense strand
gaggaaaugcucaaugacu

SEQ ID NO: 283988 - RNA, 19 nt, Homo sapiens
  misc_RNA (1)...(19): siRNA sense strand
ggauguuucagcugauaaa

SEQ ID NO: 283989 - RNA, 19 nt, Homo sapiens
  misc_RNA (1)...(19): siRNA sense strand
gaccagcucaagccauuug

SEQ ID NO: 283990 - RNA, 19 nt, Homo sapiens
  misc_RNA (1)...(19): siRNA sense strand
gaucgcaggggaacacuua

SEQ ID NO: 283991 - RNA, 19 nt, Homo sapiens
  misc_RNA (1)...(19): siRNA sense strand
gaguggaaucuguuuauag

SEQ ID NO: 283992 - RNA, 19 nt, Homo sapiens
  misc_RNA (1)...(19): siRNA sense strand
cugaccagcucaagccauu

SEQ ID NO: 283993 - RNA, 19 nt, Homo sapiens
  misc_RNA (1)...(19): siRNA sense strand
caaguuaagccaacaaagc

SEQ ID NO: 283994 - RNA, 19 nt, Homo sapiens
  misc_RNA (1)...(19): siRNA sense strand
ccaggcauaagaaauuuga

SEQ ID NO: 283995 - RNA, 19 nt, Homo sapiens
  misc_RNA (1)...(19): siRNA sense strand
gacaaguuaagccaacaaa

SEQ ID NO: 283996 - RNA, 19 nt, Homo sapiens
  misc_RNA (1)...(19): siRNA sense strand
auacuugccugagaucaug

SEQ ID NO: 283997 - RNA, 19 nt, Homo sapiens
  misc_RNA (1)...(19): siRNA sense strand
ugcaacaacuacugucuca

SEQ ID NO: 283998 - RNA, 19 nt, Homo sapiens
  misc_RNA (1)...(19): siRNA sense strand
gggcagagaaguugcaaac

SEQ ID NO: 283999 - RNA, 19 nt, Homo sapiens
  misc_RNA (1)...(19): siRNA sense strand
uaaugugaaucuggaggaa

SEQ ID NO: 284000 - RNA, 19 nt, Homo sapiens
  misc_RNA (1)...(19): siRNA sense strand
uggaagagacaagccauuu

SEQ ID NO: 284001 - RNA, 19 nt, Homo sapiens
  misc_RNA (1)...(19): siRNA sense strand
ggggaacacuuaagaaucu

SEQ ID NO: 284002 - RNA, 19 nt, Homo sapiens
  misc_RNA (1)...(19): siRNA sense strand
gggauguggucagcccaaa

SEQ ID NO: 284003 - RNA, 19 nt, Homo sapiens
  misc_RNA (1)...(19): siRNA sense strand
ccaacaaagcaaacucgaa

SEQ ID NO: 284004 - RNA, 19 nt, Homo sapiens
  misc_RNA (1)...(19): siRNA sense strand
gaagggcugcuuggcaaau

SEQ ID NO: 284005 - RNA, 19 nt, Homo sapiens
  misc_RNA (1)...(19): siRNA sense strand
uguccaggcauaagaaauu

SEQ ID NO: 284006 - RNA, 19 nt, Homo sapiens
  misc_RNA (1)...(19): siRNA sense strand
gaaugugugagcaaauaca

SEQ ID NO: 284007 - RNA, 19 nt, Homo sapiens
  misc_RNA (1)...(19): siRNA sense strand
cugaagccauuaugaacau

SEQ ID NO: 284008 - RNA, 19 nt, Homo sapiens
  misc_RNA (1)...(19): siRNA sense strand
ucauggacccgauagaugu

SEQ ID NO: 284009 - RNA, 19 nt, Homo sapiens
  misc_RNA (1)...(19): siRNA sense strand
ggaagagacaagccauuuu

SEQ ID NO: 284010 - RNA, 19 nt, Homo sapiens
  misc_RNA (1)...(19): siRNA sense strand
ugugaugaccaacaaacua

SEQ ID NO: 284011 - RNA, 19 nt, Homo sapiens
  misc_RNA (1)...(19): siRNA sense strand
guuaagccaacaaagcaaa

SEQ ID NO: 284012 - RNA, 19 nt, Homo sapiens
  misc_RNA (1)...(19): siRNA sense strand
cagugaagacuaccuggaa

SEQ ID NO: 284013 - RNA, 19 nt, Homo sapiens
  misc_RNA (1)...(19): siRNA sense strand
cagaaaagucacuaaauga

SEQ ID NO: 284014 - RNA, 19 nt, Homo sapiens
  misc_RNA (1)...(19): siRNA sense strand
caacauugagucggucaug

SEQ ID NO: 284015 - RNA, 19 nt, Homo sapiens
  misc_RNA (1)...(19): siRNA sense strand
gugaggcccugcaacaacu

SEQ ID NO: 284016 - RNA, 19 nt, Homo sapiens
  misc_RNA (1)...(19): siRNA sense strand
gaagacuaccuggaaugug

SEQ ID NO: 284017 - RNA, 19 nt, Homo sapiens
  misc_RNA (1)...(19): siRNA sense strand
ccuauggcaugcuguacau

SEQ ID NO: 284018 - RNA, 19 nt, Homo sapiens
  misc_RNA (1)...(19): siRNA sense strand
gaggggccauucaacauug

SEQ ID NO: 284019 - RNA, 19 nt, Homo sapiens
  misc_RNA (1)...(19): siRNA sense strand
ccuggaaugugugagcaaa

SEQ ID NO: 284020 - RNA, 19 nt, Homo sapiens
  misc_RNA (1)...(19): siRNA sense strand
gaucggggcugugauucuu

SEQ ID NO: 284021 - RNA, 19 nt, Homo sapiens
  misc_RNA (1)...(19): siRNA sense strand
ugaaugaugggcucaccaa

SEQ ID NO: 284022 - RNA, 19 nt, Homo sapiens
  misc_RNA (1)...(19): siRNA sense strand
guguauccgugcccucaug

SEQ ID NO: 284023 - RNA, 19 nt, Homo sapiens
  misc_RNA (1)...(19): siRNA sense strand
uugaaaaccuuguggaaga

SEQ ID NO: 284024 - RNA, 19 nt, Homo sapiens
  misc_RNA (1)...(19): siRNA sense strand
cagaaauggaagacaaguu

SEQ ID NO: 284025 - RNA, 19 nt, Homo sapiens
  misc_RNA (1)...(19): siRNA sense strand
caucagacagcagauuaug

SEQ ID NO: 284026 - RNA, 19 nt, Homo sapiens
  misc_RNA (1)...(19): siRNA sense strand
gauacuugccugagaucau

SEQ ID NO: 284027 - RNA, 19 nt, Homo sapiens
  misc_RNA (1)...(19): siRNA sense strand
uagaugcaaugcucuuggu

SEQ ID NO: 284028 - RNA, 19 nt, Homo sapiens
  misc_RNA (1)...(19): siRNA sense strand
caugcagaauucagaaguc

SEQ ID NO: 284029 - RNA, 19 nt, Homo sapiens
  misc_RNA (1)...(19): siRNA sense strand
gcaccacagaaauggaaga

SEQ ID NO: 284030 - RNA, 19 nt, Homo sapiens
  misc_RNA (1)...(19): siRNA sense strand
ggagaaugcagaaaaguca

SEQ ID NO: 284031 - RNA, 19 nt, Homo sapiens
  misc_RNA (1)...(19): siRNA sense strand
gugaagacuaccuggaaug

SEQ ID NO: 284032 - RNA, 19 nt, Homo sapiens
  misc_RNA (1)...(19): siRNA sense strand
gaaaugcucaaugacuuuu

SEQ ID NO: 284033 - RNA, 19 nt, Homo sapiens
  misc_RNA (1)...(19): siRNA sense strand
ugcuguacaugcagaauuc

SEQ ID NO: 284034 - RNA, 19 nt, Homo sapiens
  misc_RNA (1)...(19): siRNA sense strand
ugaagacuaccuggaaugu

SEQ ID NO: 284035 - RNA, 19 nt, Homo sapiens
  misc_RNA (1)...(19): siRNA sense strand
acggauguuucagcugaua

SEQ ID NO: 284036 - RNA, 19 nt, Homo sapiens
  misc_RNA (1)...(19): siRNA sense strand
ccaggacacaagugaugaa

SEQ ID NO: 284037 - RNA, 19 nt, Homo sapiens
  misc_RNA (1)...(19): siRNA sense strand
gauucagccuggcggacau

SEQ ID NO: 284038 - RNA, 19 nt, Homo sapiens
  misc_RNA (1)...(19): siRNA sense strand
gggagcagucgcaggaaga

SEQ ID NO: 284039 - RNA, 19 nt, Homo sapiens
  misc_RNA (1)...(19): siRNA sense strand
ggagcagucgcaggaagaa

SEQ ID NO: 284040 - RNA, 19 nt, Homo sapiens
  misc_RNA (1)...(19): siRNA sense strand
ggaagaaggugauuaaaga

SEQ ID NO: 284041 - RNA, 19 nt, Homo sapiens
  misc_RNA (1)...(19): siRNA sense strand
gaaagaacaugagguauuu

SEQ ID NO: 284042 - RNA, 19 nt, Homo sapiens
  misc_RNA (1)...(19): siRNA sense strand
ggauuucaguucacauuua

SEQ ID NO: 284043 - RNA, 19 nt, Homo sapiens
  misc_RNA (1)...(19): siRNA sense strand
aaacauggacagagaauua

SEQ ID NO: 284044 - RNA, 19 nt, Homo sapiens
  misc_RNA (1)...(19): siRNA sense strand
ggagaaagaacaugaggua

SEQ ID NO: 284045 - RNA, 19 nt, Homo sapiens
  misc_RNA (1)...(19): siRNA sense strand
uagaagaucuguauaaugg

SEQ ID NO: 284046 - RNA, 19 nt, Homo sapiens
  misc_RNA (1)...(19): siRNA sense strand
gaaggcauacagaaaguua

SEQ ID NO: 284047 - RNA, 19 nt, Homo sapiens
  misc_RNA (1)...(19): siRNA sense strand
gaaaguuagccaaggaaua

SEQ ID NO: 284048 - RNA, 19 nt, Homo sapiens
  misc_RNA (1)...(19): siRNA sense strand
gaaagcagcagccaucaug

SEQ ID NO: 284049 - RNA, 19 nt, Homo sapiens
  misc_RNA (1)...(19): siRNA sense strand
gaacaugagguauuucaga

SEQ ID NO: 284050 - RNA, 19 nt, Homo sapiens
  misc_RNA (1)...(19): siRNA sense strand
aaggagagguaauuaauga

SEQ ID NO: 284051 - RNA, 19 nt, Homo sapiens
  misc_RNA (1)...(19): siRNA sense strand
gaagaaggcauacagaaag

SEQ ID NO: 284052 - RNA, 19 nt, Homo sapiens
  misc_RNA (1)...(19): siRNA sense strand
gugaagggaugccgcagua

SEQ ID NO: 284053 - RNA, 19 nt, Homo sapiens
  misc_RNA (1)...(19): siRNA sense strand
gggaaugauuugcacauga

SEQ ID NO: 284054 - RNA, 19 nt, Homo sapiens
  misc_RNA (1)...(19): siRNA sense strand
gcagugugcccaucaguaa

SEQ ID NO: 284055 - RNA, 19 nt, Homo sapiens
  misc_RNA (1)...(19): siRNA sense strand
ugauagcucugaugaagaa

SEQ ID NO: 284056 - RNA, 19 nt, Homo sapiens
  misc_RNA (1)...(19): siRNA sense strand
ggagaaggagagguaauua

SEQ ID NO: 284057 - RNA, 19 nt, Homo sapiens
  misc_RNA (1)...(19): siRNA sense strand
cgugaagccuauaaugaua

SEQ ID NO: 284058 - RNA, 19 nt, Homo sapiens
  misc_RNA (1)...(19): siRNA sense strand
gagaaggagagguaauuaa

SEQ ID NO: 284059 - RNA, 19 nt, Homo sapiens
  misc_RNA (1)...(19): siRNA sense strand
ggagagguaauuaaugaaa

SEQ ID NO: 284060 - RNA, 19 nt, Homo sapiens
  misc_RNA (1)...(19): siRNA sense strand
gaagaaggugauuaaagaa

SEQ ID NO: 284061 - RNA, 19 nt, Homo sapiens
  misc_RNA (1)...(19): siRNA sense strand
agacaagcuuucugaacua

SEQ ID NO: 284062 - RNA, 19 nt, Homo sapiens
  misc_RNA (1)...(19): siRNA sense strand
caugaugcauccacucaaa

SEQ ID NO: 284063 - RNA, 19 nt, Homo sapiens
  misc_RNA (1)...(19): siRNA sense strand
acacgaagcuguacgacau

SEQ ID NO: 284064 - RNA, 19 nt, Homo sapiens
  misc_RNA (1)...(19): siRNA sense strand
gaagggaagaaggugauua

SEQ ID NO: 284065 - RNA, 19 nt, Homo sapiens
  misc_RNA (1)...(19): siRNA sense strand
gaaggagagguaauuaaug

SEQ ID NO: 284066 - RNA, 19 nt, Homo sapiens
  misc_RNA (1)...(19): siRNA sense strand
agguagagcuucaggaauu

SEQ ID NO: 284067 - RNA, 19 nt, Homo sapiens
  misc_RNA (1)...(19): siRNA sense strand
ggagguagagcuucaggaa

SEQ ID NO: 284068 - RNA, 19 nt, Homo sapiens
  misc_RNA (1)...(19): siRNA sense strand
caagacaaccaaacuacaa

SEQ ID NO: 284069 - RNA, 19 nt, Homo sapiens
  misc_RNA (1)...(19): siRNA sense strand
gguagagcuucaggaauuu

SEQ ID NO: 284070 - RNA, 19 nt, Homo sapiens
  misc_RNA (1)...(19): siRNA sense strand
ugaagaaggcauacagaaa

SEQ ID NO: 284071 - RNA, 19 nt, Homo sapiens
  misc_RNA (1)...(19): siRNA sense strand
agaaagaacaugagguauu

SEQ ID NO: 284072 - RNA, 19 nt, Homo sapiens
  misc_RNA (1)...(19): siRNA sense strand
gaaggugauuaaagaaguc

SEQ ID NO: 284073 - RNA, 19 nt, Homo sapiens
  misc_RNA (1)...(19): siRNA sense strand
gcaguaucguaaucccuuu

SEQ ID NO: 284074 - RNA, 19 nt, Homo sapiens
  misc_RNA (1)...(19): siRNA sense strand
gauuugcacaugacauaua

SEQ ID NO: 284075 - RNA, 19 nt, Homo sapiens
  misc_RNA (1)...(19): siRNA sense strand
ggaaugauuugcacaugac

SEQ ID NO: 284076 - RNA, 19 nt, Homo sapiens
  misc_RNA (1)...(19): siRNA sense strand
ugagaagcgugaguuauau

SEQ ID NO: 284077 - RNA, 19 nt, Homo sapiens
  misc_RNA (1)...(19): siRNA sense strand
ugaguuauaugacagauac

SEQ ID NO: 284078 - RNA, 19 nt, Homo sapiens
  misc_RNA (1)...(19): siRNA sense strand
cugagaagcgugaguuaua

SEQ ID NO: 284079 - RNA, 19 nt, Homo sapiens
  misc_RNA (1)...(19): siRNA sense strand
gucagauuguggugaaaua

SEQ ID NO: 284080 - RNA, 19 nt, Homo sapiens
  misc_RNA (1)...(19): siRNA sense strand
gaagcucuauguggauuuc

SEQ ID NO: 284081 - RNA, 19 nt, Homo sapiens
  misc_RNA (1)...(19): siRNA sense strand
aaaguuugaugugcaguuu

SEQ ID NO: 284082 - RNA, 19 nt, Homo sapiens
  misc_RNA (1)...(19): siRNA sense strand
aaaguuagccaaggaauau

SEQ ID NO: 284083 - RNA, 19 nt, Homo sapiens
  misc_RNA (1)...(19): siRNA sense strand
acaaccaaacuacaacuua

SEQ ID NO: 284084 - RNA, 19 nt, Homo sapiens
  misc_RNA (1)...(19): siRNA sense strand
gagcuucaggaauuugaua

SEQ ID NO: 284085 - RNA, 19 nt, Homo sapiens
  misc_RNA (1)...(19): siRNA sense strand
acagaaaguuagccaagga

SEQ ID NO: 284086 - RNA, 19 nt, Homo sapiens
  misc_RNA (1)...(19): siRNA sense strand
cagaguagaagucgaaaug

SEQ ID NO: 284087 - RNA, 19 nt, Homo sapiens
  misc_RNA (1)...(19): siRNA sense strand
gaaguuccuaacauaauug

SEQ ID NO: 284088 - RNA, 19 nt, Homo sapiens
  misc_RNA (1)...(19): siRNA sense strand
gacgucagauuguggugaa

SEQ ID NO: 284089 - RNA, 19 nt, Homo sapiens
  misc_RNA (1)...(19): siRNA sense strand
ucagagagaugggaaugau

SEQ ID NO: 284090 - RNA, 19 nt, Homo sapiens
  misc_RNA (1)...(19): siRNA sense strand
cgaaauggcagaagaagag

SEQ ID NO: 284091 - RNA, 19 nt, Homo sapiens
  misc_RNA (1)...(19): siRNA sense strand
agagagaugggaaugauuu

SEQ ID NO: 284092 - RNA, 19 nt, Homo sapiens
  misc_RNA (1)...(19): siRNA sense strand
aaugauagcucugaugaag

SEQ ID NO: 284093 - RNA, 19 nt, Homo sapiens
  misc_RNA (1)...(19): siRNA sense strand
gaucaacccagacaagcuu

SEQ ID NO: 284094 - RNA, 19 nt, Homo sapiens
  misc_RNA (1)...(19): siRNA sense strand
caaaugcaggagacaaauu

SEQ ID NO: 284095 - RNA, 19 nt, Homo sapiens
  misc_RNA (1)...(19): siRNA sense strand
uaauggagaaggagaggua

SEQ ID NO: 284096 - RNA, 19 nt, Homo sapiens
  misc_RNA (1)...(19): siRNA sense strand
cagaggagguagagcuuca

SEQ ID NO: 284097 - RNA, 19 nt, Homo sapiens
  misc_RNA (1)...(19): siRNA sense strand
gggaagaaggugauuaaag

SEQ ID NO: 284098 - RNA, 19 nt, Homo sapiens
  misc_RNA (1)...(19): siRNA sense strand
ugacagauacggagagcaa

SEQ ID NO: 284099 - RNA, 19 nt, Homo sapiens
  misc_RNA (1)...(19): siRNA sense strand
gaagggaugccgcaguauc

SEQ ID NO: 284100 - RNA, 19 nt, Homo sapiens
  misc_RNA (1)...(19): siRNA sense strand
gaagaggagaggacaugau

SEQ ID NO: 284101 - RNA, 19 nt, Homo sapiens
  misc_RNA (1)...(19): siRNA sense strand
ggcgugaagccuauaauga

SEQ ID NO: 284102 - RNA, 19 nt, Homo sapiens
  misc_RNA (1)...(19): siRNA sense strand
ggaugccgcaguaucguaa

SEQ ID NO: 284103 - RNA, 19 nt, Homo sapiens
  misc_RNA (1)...(19): siRNA sense strand
ugaaguccacguagacaaa

SEQ ID NO: 284104 - RNA, 19 nt, Homo sapiens
  misc_RNA (1)...(19): siRNA sense strand
gcaagacaaccaaacuaca

SEQ ID NO: 284105 - RNA, 19 nt, Homo sapiens
  misc_RNA (1)...(19): siRNA sense strand
gcgagaacgagcugaagaa

SEQ ID NO: 284106 - RNA, 19 nt, Homo sapiens
  misc_RNA (1)...(19): siRNA sense strand
agaaggugauuaaagaagu

SEQ ID NO: 284107 - RNA, 19 nt, Homo sapiens
  misc_RNA (1)...(19): siRNA sense strand
agaaggagagguaauuaau

SEQ ID NO: 284108 - RNA, 19 nt, Homo sapiens
  misc_RNA (1)...(19): siRNA sense strand
gcaggagacaaauuuaaag

SEQ ID NO: 284109 - RNA, 19 nt, Homo sapiens
  misc_RNA (1)...(19): siRNA sense strand
gcgugaagccuauaaugau

SEQ ID NO: 284110 - RNA, 19 nt, Homo sapiens
  misc_RNA (1)...(19): siRNA sense strand
ggugguggcauggaugaua

SEQ ID NO: 284111 - RNA, 19 nt, Homo sapiens
  misc_RNA (1)...(19): siRNA sense strand
uaucguaaucccuuugaaa

SEQ ID NO: 284112 - RNA, 19 nt, Homo sapiens
  misc_RNA (1)...(19): siRNA sense strand
gugguggcauggaugauau

SEQ ID NO: 284113 - RNA, 19 nt, Homo sapiens
  misc_RNA (1)...(19): siRNA sense strand
gaaacauggacagagaauu

SEQ ID NO: 284114 - RNA, 19 nt, Homo sapiens
  misc_RNA (1)...(19): siRNA sense strand
gacaagcuuucugaacuag

SEQ ID NO: 284115 - RNA, 19 nt, Homo sapiens
  misc_RNA (1)...(19): siRNA sense strand
gcauaugaaguacuaucaa

SEQ ID NO: 284116 - RNA, 19 nt, Homo sapiens
  misc_RNA (1)...(19): siRNA sense strand
aagggaagaaggugauuaa

SEQ ID NO: 284117 - RNA, 19 nt, Homo sapiens
  misc_RNA (1)...(19): siRNA sense strand
gagaaacagaggagguaga

SEQ ID NO: 284118 - RNA, 19 nt, Homo sapiens
  misc_RNA (1)...(19): siRNA sense strand
gagaagcgugaguuauaug

SEQ ID NO: 284119 - RNA, 19 nt, Homo sapiens
  misc_RNA (1)...(19): siRNA sense strand
caggagacaaauuuaaaga

SEQ ID NO: 284120 - RNA, 19 nt, Homo sapiens
  misc_RNA (1)...(19): siRNA sense strand
cuauguggauuucaguuca

SEQ ID NO: 284121 - RNA, 19 nt, Homo sapiens
  misc_RNA (1)...(19): siRNA sense strand
gaugcauccacucaaagua

SEQ ID NO: 284122 - RNA, 19 nt, Homo sapiens
  misc_RNA (1)...(19): siRNA sense strand
gaggagaggacaugaugca

SEQ ID NO: 284123 - RNA, 19 nt, Homo sapiens
  misc_RNA (1)...(19): siRNA sense strand
gaugauauuuucucucaca

SEQ ID NO: 284124 - RNA, 19 nt, Homo sapiens
  misc_RNA (1)...(19): siRNA sense strand
aagaaggcauacagaaagu

SEQ ID NO: 284125 - RNA, 19 nt, Homo sapiens
  misc_RNA (1)...(19): siRNA sense strand
ggugugcgcaucaugauca

SEQ ID NO: 284126 - RNA, 19 nt, Homo sapiens
  misc_RNA (1)...(19): siRNA sense strand
ugauaagaauccaaaugca

SEQ ID NO: 284127 - RNA, 19 nt, Homo sapiens
  misc_RNA (1)...(19): siRNA sense strand
auaaugauagcucugauga

SEQ ID NO: 284128 - RNA, 19 nt, Homo sapiens
  misc_RNA (1)...(19): siRNA sense strand
gacaugaugcauccacuca

SEQ ID NO: 284129 - RNA, 19 nt, Homo sapiens
  misc_RNA (1)...(19): siRNA sense strand
cgaggugugcgcaucauga

SEQ ID NO: 284130 - RNA, 19 nt, Homo sapiens
  misc_RNA (1)...(19): siRNA sense strand
aagcgugaguuauaugaca

SEQ ID NO: 284131 - RNA, 19 nt, Homo sapiens
  misc_RNA (1)...(19): siRNA sense strand
aaucagaguagaagucgaa

SEQ ID NO: 284132 - RNA, 19 nt, Homo sapiens
  misc_RNA (1)...(19): siRNA sense strand
gagaugggaaugauuugca

SEQ ID NO: 284133 - RNA, 19 nt, Homo sapiens
  misc_RNA (1)...(19): siRNA sense strand
gagagaugggaaugauuug

SEQ ID NO: 284134 - RNA, 19 nt, Homo sapiens
  misc_RNA (1)...(19): siRNA sense strand
ucugugugcucugauugua

SEQ ID NO: 284135 - RNA, 19 nt, Homo sapiens
  misc_RNA (1)...(19): siRNA sense strand
ccagggaugguacaacaga

SEQ ID NO: 284136 - RNA, 19 nt, Homo sapiens
  misc_RNA (1)...(19): siRNA sense strand
gggaugccgcaguaucgua

SEQ ID NO: 284137 - RNA, 19 nt, Homo sapiens
  misc_RNA (1)...(19): siRNA sense strand
gagaaagaacaugagguau

SEQ ID NO: 284138 - RNA, 19 nt, Homo sapiens
  misc_RNA (1)...(19): siRNA sense strand
ugugugcucugauuguaau

SEQ ID NO: 284139 - RNA, 19 nt, Homo sapiens
  misc_RNA (1)...(19): siRNA sense strand
gaggugguggcauggauga

SEQ ID NO: 284140 - RNA, 19 nt, Homo sapiens
  misc_RNA (1)...(19): siRNA sense strand
ccaaggagcugcgcugcua

SEQ ID NO: 284141 - RNA, 19 nt, Homo sapiens
  misc_RNA (1)...(19): siRNA sense strand
cuacagauguuaccacuuc

SEQ ID NO: 284142 - RNA, 19 nt, Homo sapiens
  misc_RNA (1)...(19): siRNA sense strand
gagcugcgcugcuacagau

SEQ ID NO: 284143 - RNA, 19 nt, Homo sapiens
  misc_RNA (1)...(19): siRNA sense strand
ccucagaucugcuggagaa

SEQ ID NO: 284144 - RNA, 19 nt, Homo sapiens
  misc_RNA (1)...(19): siRNA sense strand
ggaacgcacugcccucaga

SEQ ID NO: 284145 - RNA, 19 nt, Homo sapiens
  misc_RNA (1)...(19): siRNA sense strand
gcauuguucucaucaucua

SEQ ID NO: 284146 - RNA, 19 nt, Homo sapiens
  misc_RNA (1)...(19): siRNA sense strand
cagaucugcuggagaaugu

SEQ ID NO: 284147 - RNA, 19 nt, Homo sapiens
  misc_RNA (1)...(19): siRNA sense strand
gcaaauagggccaaaacuu

SEQ ID NO: 284148 - RNA, 19 nt, Homo sapiens
  misc_RNA (1)...(19): siRNA sense strand
ugucucagcugucgaugga

SEQ ID NO: 284149 - RNA, 19 nt, Homo sapiens
  misc_RNA (1)...(19): siRNA sense strand
gggcauuguucucaucauc

SEQ ID NO: 284150 - RNA, 19 nt, Homo sapiens
  misc_RNA (1)...(19): siRNA sense strand
acacauuccugcacacagu

SEQ ID NO: 284151 - RNA, 19 nt, Homo sapiens
  misc_RNA (1)...(19): siRNA sense strand
gagaugcuccugccauuuu

SEQ ID NO: 284152 - RNA, 19 nt, Homo sapiens
  misc_RNA (1)...(19): siRNA sense strand
cuacacagcaauugccuau

SEQ ID NO: 284153 - RNA, 19 nt, Homo sapiens
  misc_RNA (1)...(19): siRNA sense strand
caaauagggccaaaacuug

SEQ ID NO: 284154 - RNA, 19 nt, Homo sapiens
  misc_RNA (1)...(19): siRNA sense strand
cgaaauugaccgcuacaca

SEQ ID NO: 284155 - RNA, 19 nt, Homo sapiens
  misc_RNA (1)...(19): siRNA sense strand
ugacugggcucaggaacag

SEQ ID NO: 284156 - RNA, 19 nt, Homo sapiens
  misc_RNA (1)...(19): siRNA sense strand
uccuaucgcugaaguguuc

SEQ ID NO: 284157 - RNA, 19 nt, Homo sapiens
  misc_RNA (1)...(19): siRNA sense strand
ugaacuggcagcaucauuc

SEQ ID NO: 284158 - RNA, 19 nt, Homo sapiens
  misc_RNA (1)...(19): siRNA sense strand
gacauuuucuccugcauug

SEQ ID NO: 284159 - RNA, 19 nt, Homo sapiens
  misc_RNA (1)...(19): siRNA sense strand
ccacccaugcugacaguga

SEQ ID NO: 284160 - RNA, 19 nt, Homo sapiens
  misc_RNA (1)...(19): siRNA sense strand
ggaaggauuugggccuacu

SEQ ID NO: 284161 - RNA, 19 nt, Homo sapiens
  misc_RNA (1)...(19): siRNA sense strand
ugaagcuccuacuccaaug

SEQ ID NO: 284162 - RNA, 19 nt, Homo sapiens
  misc_RNA (1)...(19): siRNA sense strand
gaagcuccuacuccaaugu

SEQ ID NO: 284163 - RNA, 19 nt, Homo sapiens
  misc_RNA (1)...(19): siRNA sense strand
gaacgcacugcccucagau

SEQ ID NO: 284164 - RNA, 19 nt, Homo sapiens
  misc_RNA (1)...(19): siRNA sense strand
gccaaaacuugaugggaaa

SEQ ID NO: 284165 - RNA, 19 nt, Homo sapiens
  misc_RNA (1)...(19): siRNA sense strand
ggagcugcgcugcuacaga

SEQ ID NO: 284166 - RNA, 19 nt, Homo sapiens
  misc_RNA (1)...(19): siRNA sense strand
caucaucgugggcauuguu

SEQ ID NO: 284167 - RNA, 19 nt, Homo sapiens
  misc_RNA (1)...(19): siRNA sense strand
ccaggccuuuucuuacuua

SEQ ID NO: 284168 - RNA, 19 nt, Homo sapiens
  misc_RNA (1)...(19): siRNA sense strand
cacccaugcugacagugaa

SEQ ID NO: 284169 - RNA, 19 nt, Homo sapiens
  misc_RNA (1)...(19): siRNA sense strand
gcuggagaaugugcugugu

SEQ ID NO: 284170 - RNA, 19 nt, Homo sapiens
  misc_RNA (1)...(19): siRNA sense strand
gaacuggcagcaucauucc

SEQ ID NO: 284171 - RNA, 19 nt, Homo sapiens
  misc_RNA (1)...(19): siRNA sense strand
cagaugaccugcaaaacca

SEQ ID NO: 284172 - RNA, 19 nt, Homo sapiens
  misc_RNA (1)...(19): siRNA sense strand
acuccaauguggccagaug

SEQ ID NO: 284173 - RNA, 19 nt, Homo sapiens
  misc_RNA (1)...(19): siRNA sense strand
gaaggauuugggccuacuu

SEQ ID NO: 284174 - RNA, 19 nt, Homo sapiens
  misc_RNA (1)...(19): siRNA sense strand
ggaccagcuuuucuucuuc

SEQ ID NO: 284175 - RNA, 19 nt, Homo sapiens
  misc_RNA (1)...(19): siRNA sense strand
guggccagaugaccugcaa

SEQ ID NO: 284176 - RNA, 19 nt, Homo sapiens
  misc_RNA (1)...(19): siRNA sense strand
ucuccugcauugugacuca

SEQ ID NO: 284177 - RNA, 19 nt, Homo sapiens
  misc_RNA (1)...(19): siRNA sense strand
ggagggagcuacucuaagg

SEQ ID NO: 284178 - RNA, 19 nt, Homo sapiens
  misc_RNA (1)...(19): siRNA sense strand
aagaagagcucaggacauu

SEQ ID NO: 284179 - RNA, 19 nt, Homo sapiens
  misc_RNA (1)...(19): siRNA sense strand
caucauugcuggccugguu

SEQ ID NO: 284180 - RNA, 19 nt, Homo sapiens
  misc_RNA (1)...(19): siRNA sense strand
gcacagauuuuccgaguga

SEQ ID NO: 284181 - RNA, 19 nt, Homo sapiens
  misc_RNA (1)...(19): siRNA sense strand
gcugugauauggaggaaga

SEQ ID NO: 284182 - RNA, 19 nt, Homo sapiens
  misc_RNA (1)...(19): siRNA sense strand
gagcaaaagucaaaugaug

SEQ ID NO: 284183 - RNA, 19 nt, Homo sapiens
  misc_RNA (1)...(19): siRNA sense strand
ugugguugcugcugugaua

SEQ ID NO: 284184 - RNA, 19 nt, Homo sapiens
  misc_RNA (1)...(19): siRNA sense strand
guagauggaacccuccuuu

SEQ ID NO: 284185 - RNA, 19 nt, Homo sapiens
  misc_RNA (1)...(19): siRNA sense strand
gaagagcucaggacauuuu

SEQ ID NO: 284186 - RNA, 19 nt, Homo sapiens
  misc_RNA (1)...(19): siRNA sense strand
caaagacacacgugacuca

SEQ ID NO: 284187 - RNA, 19 nt, Homo sapiens
  misc_RNA (1)...(19): siRNA sense strand
aggauuaucucacccugaa

SEQ ID NO: 284188 - RNA, 19 nt, Homo sapiens
  misc_RNA (1)...(19): siRNA sense strand
gaagaagagcucaggacau

SEQ ID NO: 284189 - RNA, 19 nt, Homo sapiens
  misc_RNA (1)...(19): siRNA sense strand
gauuaucucacccugaaug

SEQ ID NO: 284190 - RNA, 19 nt, Homo sapiens
  misc_RNA (1)...(19): siRNA sense strand
gagauacacgugccaugug

SEQ ID NO: 284191 - RNA, 19 nt, Homo sapiens
  misc_RNA (1)...(19): siRNA sense strand
ccuacgacggcaaggauua

SEQ ID NO: 284192 - RNA, 19 nt, Homo sapiens
  misc_RNA (1)...(19): siRNA sense strand
ccacaaauaccuggagaag

SEQ ID NO: 284193 - RNA, 19 nt, Homo sapiens
  misc_RNA (1)...(19): siRNA sense strand
cccacuccuugaaguauuu

SEQ ID NO: 284194 - RNA, 19 nt, Homo sapiens
  misc_RNA (1)...(19): siRNA sense strand
cagggacaccgcacagauu

SEQ ID NO: 284195 - RNA, 19 nt, Homo sapiens
  misc_RNA (1)...(19): siRNA sense strand
gcucccacuccuugaagua

SEQ ID NO: 284196 - RNA, 19 nt, Homo sapiens
  misc_RNA (1)...(19): siRNA sense strand
aaggagggagcuacucuaa

SEQ ID NO: 284197 - RNA, 19 nt, Homo sapiens
  misc_RNA (1)...(19): siRNA sense strand
agucaaaugaugccucuga

SEQ ID NO: 284198 - RNA, 19 nt, Homo sapiens
  misc_RNA (1)...(19): siRNA sense strand
agauggaacccuccuuuua

SEQ ID NO: 284199 - RNA, 19 nt, Homo sapiens
  misc_RNA (1)...(19): siRNA sense strand
aaaggagggagcuacucua

SEQ ID NO: 284200 - RNA, 19 nt, Homo sapiens
  misc_RNA (1)...(19): siRNA sense strand
ccagggacaccgcacagau

SEQ ID NO: 284201 - RNA, 19 nt, Homo sapiens
  misc_RNA (1)...(19): siRNA sense strand
ucccacuccuugaaguauu

SEQ ID NO: 284202 - RNA, 19 nt, Homo sapiens
  misc_RNA (1)...(19): siRNA sense strand
gaagagaccucaauuacug

SEQ ID NO: 284203 - RNA, 19 nt, Homo sapiens
  misc_RNA (1)...(19): siRNA sense strand
acacagauauguugaagua

SEQ ID NO: 284204 - RNA, 19 nt, Homo sapiens
  misc_RNA (1)...(19): siRNA sense strand
gaacucuucuugaauucua

SEQ ID NO: 284205 - RNA, 19 nt, Homo sapiens
  misc_RNA (1)...(19): siRNA sense strand
gaacucuucuugaauucua

SEQ ID NO: 284206 - RNA, 19 nt, Homo sapiens
  misc_RNA (1)...(19): siRNA sense strand
ggacuucccuuuggaugua

SEQ ID NO: 284207 - RNA, 19 nt, Homo sapiens
  misc_RNA (1)...(19): siRNA sense strand
ggaagaaauuguucaguuc

SEQ ID NO: 284208 - RNA, 19 nt, Homo sapiens
  misc_RNA (1)...(19): siRNA sense strand
gcacagguauauugaaauc

SEQ ID NO: 284209 - RNA, 19 nt, Homo sapiens
  misc_RNA (1)...(19): siRNA sense strand
gcaguuugcuucacaggaa

SEQ ID NO: 284210 - RNA, 19 nt, Homo sapiens
  misc_RNA (1)...(19): siRNA sense strand
gaacuugaaucagaagaug

SEQ ID NO: 284211 - RNA, 19 nt, Homo sapiens
  misc_RNA (1)...(19): siRNA sense strand
gggcacagguauauugaaa

SEQ ID NO: 284212 - RNA, 19 nt, Homo sapiens
  misc_RNA (1)...(19): siRNA sense strand
caguagagcugaaguuaga

SEQ ID NO: 284213 - RNA, 19 nt, Homo sapiens
  misc_RNA (1)...(19): siRNA sense strand
gaaacacaaggaaagaaua

SEQ ID NO: 284214 - RNA, 19 nt, Homo sapiens
  misc_RNA (1)...(19): siRNA sense strand
uuacagagcuacugagaau

SEQ ID NO: 284215 - RNA, 19 nt, Homo sapiens
  misc_RNA (1)...(19): siRNA sense strand
caaacaacguugaaaugga

SEQ ID NO: 284216 - RNA, 19 nt, Homo sapiens
  misc_RNA (1)...(19): siRNA sense strand
ugaaaaggcucuaaagaaa

SEQ ID NO: 284217 - RNA, 19 nt, Homo sapiens
  misc_RNA (1)...(19): siRNA sense strand
gagaguacacauugaaauu

SEQ ID NO: 284218 - RNA, 19 nt, Homo sapiens
  misc_RNA (1)...(19): siRNA sense strand
ugaaauggauuggguguug

SEQ ID NO: 284219 - RNA, 19 nt, Homo sapiens
  misc_RNA (1)...(19): siRNA sense strand
gaacacagauauguagaac

SEQ ID NO: 284220 - RNA, 19 nt, Homo sapiens
  misc_RNA (1)...(19): siRNA sense strand
gaaauggauuggguguuga

SEQ ID NO: 284221 - RNA, 19 nt, Homo sapiens
  misc_RNA (1)...(19): siRNA sense strand
caaauaugcaacacagaua

SEQ ID NO: 284222 - RNA, 19 nt, Homo sapiens
  misc_RNA (1)...(19): siRNA sense strand
gaagcauacugguccaaau

SEQ ID NO: 284223 - RNA, 19 nt, Homo sapiens
  misc_RNA (1)...(19): siRNA sense strand
cagaguaacuggugaagca

SEQ ID NO: 284224 - RNA, 19 nt, Homo sapiens
  misc_RNA (1)...(19): siRNA sense strand
gaauagggcacagguauau

SEQ ID NO: 284225 - RNA, 19 nt, Homo sapiens
  misc_RNA (1)...(19): siRNA sense strand
aaacaacguugaaauggau

SEQ ID NO: 284226 - RNA, 19 nt, Homo sapiens
  misc_RNA (1)...(19): siRNA sense strand
ugaagcagaugucgaguuc

SEQ ID NO: 284227 - RNA, 19 nt, Homo sapiens
  misc_RNA (1)...(19): siRNA sense strand
ggacacagauauguugaag

SEQ ID NO: 284228 - RNA, 19 nt, Homo sapiens
  misc_RNA (1)...(19): siRNA sense strand
gauuggguguugaagcaua

SEQ ID NO: 284229 - RNA, 19 nt, Homo sapiens
  misc_RNA (1)...(19): siRNA sense strand
uacaauggcuauaaugaug

SEQ ID NO: 284230 - RNA, 19 nt, Homo sapiens
  misc_RNA (1)...(19): siRNA sense strand
gcaaauaugcaacacagau

SEQ ID NO: 284231 - RNA, 19 nt, Homo sapiens
  misc_RNA (1)...(19): siRNA sense strand
gaugaggcguggugcuuau

SEQ ID NO: 284232 - RNA, 19 nt, Homo sapiens
  misc_RNA (1)...(19): siRNA sense strand
cagaggagcuggcuuugag

SEQ ID NO: 284233 - RNA, 19 nt, Homo sapiens
  misc_RNA (1)...(19): siRNA sense strand
acacagauauguagaacuc

SEQ ID NO: 284234 - RNA, 19 nt, Homo sapiens
  misc_RNA (1)...(19): siRNA sense strand
acacagauauguagaacuc

SEQ ID NO: 284235 - RNA, 19 nt, Homo sapiens
  misc_RNA (1)...(19): siRNA sense strand
aggaagaaauuguucaguu

SEQ ID NO: 284236 - RNA, 19 nt, Homo sapiens
  misc_RNA (1)...(19): siRNA sense strand
guucgcaacucaugaagau

SEQ ID NO: 284237 - RNA, 19 nt, Homo sapiens
  misc_RNA (1)...(19): siRNA sense strand
gauccaccacgaaagcuua

SEQ ID NO: 284238 - RNA, 19 nt, Homo sapiens
  misc_RNA (1)...(19): siRNA sense strand
ucagauagauuuggaagag

SEQ ID NO: 284239 - RNA, 19 nt, Homo sapiens
  misc_RNA (1)...(19): siRNA sense strand
cagauauguugaaguauuc

SEQ ID NO: 284240 - RNA, 19 nt, Homo sapiens
  misc_RNA (1)...(19): siRNA sense strand
uaaagaaacacaaggaaag

SEQ ID NO: 284241 - RNA, 19 nt, Homo sapiens
  misc_RNA (1)...(19): siRNA sense strand
gaagaugaagucaaauugg

SEQ ID NO: 284242 - RNA, 19 nt, Homo sapiens
  misc_RNA (1)...(19): siRNA sense strand
cagaagaugaagucaaauu

SEQ ID NO: 284243 - RNA, 19 nt, Homo sapiens
  misc_RNA (1)...(19): siRNA sense strand
gaguacacauugaaauugg

SEQ ID NO: 284244 - RNA, 19 nt, Homo sapiens
  misc_RNA (1)...(19): siRNA sense strand
ggauuugggucagauagau

SEQ ID NO: 284245 - RNA, 19 nt, Homo sapiens
  misc_RNA (1)...(19): siRNA sense strand
uaacauugccgguggacuu

SEQ ID NO: 284246 - RNA, 19 nt, Homo sapiens
  misc_RNA (1)...(19): siRNA sense strand
ggaagagaccucaauuacu

SEQ ID NO: 284247 - RNA, 19 nt, Homo sapiens
  misc_RNA (1)...(19): siRNA sense strand
caggaaaacuccagugauu

SEQ ID NO: 284248 - RNA, 19 nt, Homo sapiens
  misc_RNA (1)...(19): siRNA sense strand
caacacagauauguagaac

SEQ ID NO: 284249 - RNA, 19 nt, Homo sapiens
  misc_RNA (1)...(19): siRNA sense strand
gcaacacagauauguagaa

SEQ ID NO: 284250 - RNA, 19 nt, Homo sapiens
  misc_RNA (1)...(19): siRNA sense strand
agacaaagcaaauaugcaa

SEQ ID NO: 284251 - RNA, 19 nt, Homo sapiens
  misc_RNA (1)...(19): siRNA sense strand
gaaacuaugggacacagau

SEQ ID NO: 284252 - RNA, 19 nt, Homo sapiens
  misc_RNA (1)...(19): siRNA sense strand
ccgaugaagugcagagguu

SEQ ID NO: 284253 - RNA, 19 nt, Homo sapiens
  misc_RNA (1)...(19): siRNA sense strand
aagcauacugguccaaaua

SEQ ID NO: 284254 - RNA, 19 nt, Homo sapiens
  misc_RNA (1)...(19): siRNA sense strand
gaugguggcucuacuuucc

SEQ ID NO: 284255 - RNA, 19 nt, Homo sapiens
  misc_RNA (1)...(19): siRNA sense strand
gguauucguuucaucuaca

SEQ ID NO: 284256 - RNA, 19 nt, Homo sapiens
  misc_RNA (1)...(19): siRNA sense strand
ggaugaggcguggugcuua

SEQ ID NO: 284257 - RNA, 19 nt, Homo sapiens
  misc_RNA (1)...(19): siRNA sense strand
uaagagcaguagagcugaa

SEQ ID NO: 284258 - RNA, 19 nt, Homo sapiens
  misc_RNA (1)...(19): siRNA sense strand
cuaaagaaacacaaggaaa

SEQ ID NO: 284259 - RNA, 19 nt, Homo sapiens
  misc_RNA (1)...(19): siRNA sense strand
gagagggauucguggugaa

SEQ ID NO: 284260 - RNA, 19 nt, Homo sapiens
  misc_RNA (1)...(19): siRNA sense strand
gaaagcuuauggccaugca

SEQ ID NO: 284261 - RNA, 19 nt, Homo sapiens
  misc_RNA (1)...(19): siRNA sense strand
gcuuagaggacuucccuuu

SEQ ID NO: 284262 - RNA, 19 nt, Homo sapiens
  misc_RNA (1)...(19): siRNA sense strand
acagagcuacugagaauga

SEQ ID NO: 284263 - RNA, 19 nt, Homo sapiens
  misc_RNA (1)...(19): siRNA sense strand
ggauuaccuuacagagcua

SEQ ID NO: 284264 - RNA, 19 nt, Homo sapiens
  misc_RNA (1)...(19): siRNA sense strand
aaugauggcuauggauuug

SEQ ID NO: 284265 - RNA, 19 nt, Homo sapiens
  misc_RNA (1)...(19): siRNA sense strand
gcaaggaagaaauuguuca

SEQ ID NO: 284266 - RNA, 19 nt, Homo sapiens
  misc_RNA (1)...(19): siRNA sense strand
ggauguagcaaggaagaaa

SEQ ID NO: 284267 - RNA, 19 nt, Homo sapiens
  misc_RNA (1)...(19): siRNA sense strand
gcauacugguccaaauagu

SEQ ID NO: 284268 - RNA, 19 nt, Homo sapiens
  misc_RNA (1)...(19): siRNA sense strand
gaguggauacgaccaaguu

SEQ ID NO: 284269 - RNA, 19 nt, Homo sapiens
  misc_RNA (1)...(19): siRNA sense strand
gccagguccuuaugacaga

SEQ ID NO: 284270 - RNA, 19 nt, Homo sapiens
  misc_RNA (1)...(19): siRNA sense strand
aucagaagaugaagucaaa

SEQ ID NO: 284271 - RNA, 19 nt, Homo sapiens
  misc_RNA (1)...(19): siRNA sense strand
uaaugauggcuauggauuu

SEQ ID NO: 284272 - RNA, 19 nt, Homo sapiens
  misc_RNA (1)...(19): siRNA sense strand
uauggaggcuaugaugauu

SEQ ID NO: 284273 - RNA, 19 nt, Homo sapiens
  misc_RNA (1)...(19): siRNA sense strand
gagcuggcuuugagaggau

SEQ ID NO: 284274 - RNA, 19 nt, Homo sapiens
  misc_RNA (1)...(19): siRNA sense strand
gcagaggagcuggcuuuga

SEQ ID NO: 284275 - RNA, 19 nt, Homo sapiens
  misc_RNA (1)...(19): siRNA sense strand
uuagaggacuucccuuugg

SEQ ID NO: 284276 - RNA, 19 nt, Homo sapiens
  misc_RNA (1)...(19): siRNA sense strand
gaaguauucaagucaaaca

SEQ ID NO: 284277 - RNA, 19 nt, Homo sapiens
  misc_RNA (1)...(19): siRNA sense strand
gcuaugaugauuacaaugg

SEQ ID NO: 284278 - RNA, 19 nt, Homo sapiens
  misc_RNA (1)...(19): siRNA sense strand
acagauauguagaacucuu

SEQ ID NO: 284279 - RNA, 19 nt, Homo sapiens
  misc_RNA (1)...(19): siRNA sense strand
uuacgaacacagauaugua

SEQ ID NO: 284280 - RNA, 19 nt, Homo sapiens
  misc_RNA (1)...(19): siRNA sense strand
acagauauguagaacucuu

SEQ ID NO: 284281 - RNA, 19 nt, Homo sapiens
  misc_RNA (1)...(19): siRNA sense strand
uagcaaggaagaaauuguu

SEQ ID NO: 284282 - RNA, 19 nt, Homo sapiens
  misc_RNA (1)...(19): siRNA sense strand
ugucaaaccaguccagcua

SEQ ID NO: 284283 - RNA, 19 nt, Homo sapiens
  misc_RNA (1)...(19): siRNA sense strand
gggaugguggcucuacuuu

SEQ ID NO: 284284 - RNA, 19 nt, Homo sapiens
  misc_RNA (1)...(19): siRNA sense strand
agaauagggcacagguaua

SEQ ID NO: 284285 - RNA, 19 nt, Homo sapiens
  misc_RNA (1)...(19): siRNA sense strand
caaaauggggcucaaggua

SEQ ID NO: 284286 - RNA, 19 nt, Homo sapiens
  misc_RNA (1)...(19): siRNA sense strand
uagaggguauaacagcauu

SEQ ID NO: 284287 - RNA, 19 nt, Homo sapiens
  misc_RNA (1)...(19): siRNA sense strand
gcugguagaggguauaaca

SEQ ID NO: 284288 - RNA, 19 nt, Homo sapiens
  misc_RNA (1)...(19): siRNA sense strand
gagcaguagagcugaaguu

SEQ ID NO: 284289 - RNA, 19 nt, Homo sapiens
  misc_RNA (1)...(19): siRNA sense strand
gggaggccuucgugcaguu

SEQ ID NO: 284290 - RNA, 19 nt, Homo sapiens
  misc_RNA (1)...(19): siRNA sense strand
uagaggacuucccuuugga

SEQ ID NO: 284291 - RNA, 19 nt, Homo sapiens
  misc_RNA (1)...(19): siRNA sense strand
gugcuuacgaacacagaua

SEQ ID NO: 284292 - RNA, 19 nt, Homo sapiens
  misc_RNA (1)...(19): siRNA sense strand
gcucaagguauucguuuca

SEQ ID NO: 284293 - RNA, 19 nt, Homo sapiens
  misc_RNA (1)...(19): siRNA sense strand
gcuauggaggcuaugauga

SEQ ID NO: 284294 - RNA, 19 nt, Homo sapiens
  misc_RNA (1)...(19): siRNA sense strand
gcaguagagcugaaguuag

SEQ ID NO: 284295 - RNA, 19 nt, Homo sapiens
  misc_RNA (1)...(19): siRNA sense strand
aaacacaaggaaagaauag

SEQ ID NO: 284296 - RNA, 19 nt, Homo sapiens
  misc_RNA (1)...(19): siRNA sense strand
aaacuaugggacacagaua

SEQ ID NO: 284297 - RNA, 19 nt, Homo sapiens
  misc_RNA (1)...(19): siRNA sense strand
aaagaaacacaaggaaaga

SEQ ID NO: 284298 - RNA, 19 nt, Homo sapiens
  misc_RNA (1)...(19): siRNA sense strand
agaagaugaagucaaauug

SEQ ID NO: 284299 - RNA, 19 nt, Homo sapiens
  misc_RNA (1)...(19): siRNA sense strand
uuguugaacuugaaucaga

SEQ ID NO: 284300 - RNA, 19 nt, Homo sapiens
  misc_RNA (1)...(19): siRNA sense strand
gggcucaagguauucguuu

SEQ ID NO: 284301 - RNA, 19 nt, Homo sapiens
  misc_RNA (1)...(19): siRNA sense strand
gaccaaguggcgaggcuuu

SEQ ID NO: 284302 - RNA, 19 nt, Homo sapiens
  misc_RNA (1)...(19): siRNA sense strand
gaauagaggguaugcauuu

SEQ ID NO: 284303 - RNA, 19 nt, Homo sapiens
  misc_RNA (1)...(19): siRNA sense strand
aaaggaagcugcacaggaa

SEQ ID NO: 284304 - RNA, 19 nt, Homo sapiens
  misc_RNA (1)...(19): siRNA sense strand
gaugauggcuaugcaguaa

SEQ ID NO: 284305 - RNA, 19 nt, Homo sapiens
  misc_RNA (1)...(19): siRNA sense strand
ggaagaaauugaaauaguc

SEQ ID NO: 284306 - RNA, 19 nt, Homo sapiens
  misc_RNA (1)...(19): siRNA sense strand
ugaaaugaauggcaaagaa

SEQ ID NO: 284307 - RNA, 19 nt, Homo sapiens
  misc_RNA (1)...(19): siRNA sense strand
guaaugcgguacaguuaaa

SEQ ID NO: 284308 - RNA, 19 nt, Homo sapiens
  misc_RNA (1)...(19): siRNA sense strand
gcagaaagacuugaugaaa

SEQ ID NO: 284309 - RNA, 19 nt, Homo sapiens
  misc_RNA (1)...(19): siRNA sense strand
gcacugcguaugaagauua

SEQ ID NO: 284310 - RNA, 19 nt, Homo sapiens
  misc_RNA (1)...(19): siRNA sense strand
cagaaagacuugaugaaau

SEQ ID NO: 284311 - RNA, 19 nt, Homo sapiens
  misc_RNA (1)...(19): siRNA sense strand
ggaauuuaaugaagaagga

SEQ ID NO: 284312 - RNA, 19 nt, Homo sapiens
  misc_RNA (1)...(19): siRNA sense strand
gggaagaaauugaaauagu

SEQ ID NO: 284313 - RNA, 19 nt, Homo sapiens
  misc_RNA (1)...(19): siRNA sense strand
gaaaugaauggcaaagaaa

SEQ ID NO: 284314 - RNA, 19 nt, Homo sapiens
  misc_RNA (1)...(19): siRNA sense strand
cuaaucaggugaaugguaa

SEQ ID NO: 284315 - RNA, 19 nt, Homo sapiens
  misc_RNA (1)...(19): siRNA sense strand
gagcagcuguuaaggcuau

SEQ ID NO: 284316 - RNA, 19 nt, Homo sapiens
  misc_RNA (1)...(19): siRNA sense strand
ggaagaaccagauccagaa

SEQ ID NO: 284317 - RNA, 19 nt, Homo sapiens
  misc_RNA (1)...(19): siRNA sense strand
agacaggauugguagcuua

SEQ ID NO: 284318 - RNA, 19 nt, Homo sapiens
  misc_RNA (1)...(19): siRNA sense strand
agaaggagcucugucugua

SEQ ID NO: 284319 - RNA, 19 nt, Homo sapiens
  misc_RNA (1)...(19): siRNA sense strand
gugagaaacuuggcuacua

SEQ ID NO: 284320 - RNA, 19 nt, Homo sapiens
  misc_RNA (1)...(19): siRNA sense strand
gagaaggccggacccauuu

SEQ ID NO: 284321 - RNA, 19 nt, Homo sapiens
  misc_RNA (1)...(19): siRNA sense strand
ugacuauucugguaacuau

SEQ ID NO: 284322 - RNA, 19 nt, Homo sapiens
  misc_RNA (1)...(19): siRNA sense strand
gaugaaagagcaauugaug

SEQ ID NO: 284323 - RNA, 19 nt, Homo sapiens
  misc_RNA (1)...(19): siRNA sense strand
gaagaauucaguaaaguca

SEQ ID NO: 284324 - RNA, 19 nt, Homo sapiens
  misc_RNA (1)...(19): siRNA sense strand
gcuaugaagauuacuauga

SEQ ID NO: 284325 - RNA, 19 nt, Homo sapiens
  misc_RNA (1)...(19): siRNA sense strand
gaguaaagaaguugaaaga

SEQ ID NO: 284326 - RNA, 19 nt, Homo sapiens
  misc_RNA (1)...(19): siRNA sense strand
cuacagcaguucaaggaaa

SEQ ID NO: 284327 - RNA, 19 nt, Homo sapiens
  misc_RNA (1)...(19): siRNA sense strand
gguggugacuauucuggua

SEQ ID NO: 284328 - RNA, 19 nt, Homo sapiens
  misc_RNA (1)...(19): siRNA sense strand
gaggaagaaccaauggaua

SEQ ID NO: 284329 - RNA, 19 nt, Homo sapiens
  misc_RNA (1)...(19): siRNA sense strand
gcauuucuguggcaaacaa

SEQ ID NO: 284330 - RNA, 19 nt, Homo sapiens
  misc_RNA (1)...(19): siRNA sense strand
ggaucuacgucuuaugaug

SEQ ID NO: 284331 - RNA, 19 nt, Homo sapiens
  misc_RNA (1)...(19): siRNA sense strand
ugagagaacugguuauacu

SEQ ID NO: 284332 - RNA, 19 nt, Homo sapiens
  misc_RNA (1)...(19): siRNA sense strand
uagcuuaugucgaucuuga

SEQ ID NO: 284333 - RNA, 19 nt, Homo sapiens
  misc_RNA (1)...(19): siRNA sense strand
gaagguggcagaaagacuu

SEQ ID NO: 284334 - RNA, 19 nt, Homo sapiens
  misc_RNA (1)...(19): siRNA sense strand
gaaauucgcccugguaaac

SEQ ID NO: 284335 - RNA, 19 nt, Homo sapiens
  misc_RNA (1)...(19): siRNA sense strand
gcaagguggugacuauucu

SEQ ID NO: 284336 - RNA, 19 nt, Homo sapiens
  misc_RNA (1)...(19): siRNA sense strand
cuacuacggugacagaaga

SEQ ID NO: 284337 - RNA, 19 nt, Homo sapiens
  misc_RNA (1)...(19): siRNA sense strand
gaagucauggcuaagguaa

SEQ ID NO: 284338 - RNA, 19 nt, Homo sapiens
  misc_RNA (1)...(19): siRNA sense strand
cgaagaauaagacuaaaga

SEQ ID NO: 284339 - RNA, 19 nt, Homo sapiens
  misc_RNA (1)...(19): siRNA sense strand
ggugacagaagaaauauug

SEQ ID NO: 284340 - RNA, 19 nt, Homo sapiens
  misc_RNA (1)...(19): siRNA sense strand
ucagcaagguggugacuau

SEQ ID NO: 284341 - RNA, 19 nt, Homo sapiens
  misc_RNA (1)...(19): siRNA sense strand
ucagggaauuuaaugaaga

SEQ ID NO: 284342 - RNA, 19 nt, Homo sapiens
  misc_RNA (1)...(19): siRNA sense strand
ccacaaagggaccugauga

SEQ ID NO: 284343 - RNA, 19 nt, Homo sapiens
  misc_RNA (1)...(19): siRNA sense strand
cagaagcacugcguaugaa

SEQ ID NO: 284344 - RNA, 19 nt, Homo sapiens
  misc_RNA (1)...(19): siRNA sense strand
gaaagaguaaagaaguuga

SEQ ID NO: 284345 - RNA, 19 nt, Homo sapiens
  misc_RNA (1)...(19): siRNA sense strand
aauagaggguaugcauuua

SEQ ID NO: 284346 - RNA, 19 nt, Homo sapiens
  misc_RNA (1)...(19): siRNA sense strand
gaacacuacaagacacuga

SEQ ID NO: 284347 - RNA, 19 nt, Homo sapiens
  misc_RNA (1)...(19): siRNA sense strand
gaauggcaaagaaauagaa

SEQ ID NO: 284348 - RNA, 19 nt, Homo sapiens
  misc_RNA (1)...(19): siRNA sense strand
agacaggccuccagaagca

SEQ ID NO: 284349 - RNA, 19 nt, Homo sapiens
  misc_RNA (1)...(19): siRNA sense strand
gcuaaucaggugaauggua

SEQ ID NO: 284350 - RNA, 19 nt, Homo sapiens
  misc_RNA (1)...(19): siRNA sense strand
gcuaugaagaucccuacua

SEQ ID NO: 284351 - RNA, 19 nt, Homo sapiens
  misc_RNA (1)...(19): siRNA sense strand
ccagaagcacugcguauga

SEQ ID NO: 284352 - RNA, 19 nt, Homo sapiens
  misc_RNA (1)...(19): siRNA sense strand
ccacaggacagaggaagua

SEQ ID NO: 284353 - RNA, 19 nt, Homo sapiens
  misc_RNA (1)...(19): siRNA sense strand
gggcugacccuguggaaga

SEQ ID NO: 284354 - RNA, 19 nt, Homo sapiens
  misc_RNA (1)...(19): siRNA sense strand
cagggaauuuaaugaagaa

SEQ ID NO: 284355 - RNA, 19 nt, Homo sapiens
  misc_RNA (1)...(19): siRNA sense strand
gguaaugcgguacaguuaa

SEQ ID NO: 284356 - RNA, 19 nt, Homo sapiens
  misc_RNA (1)...(19): siRNA sense strand
gaugauuacuaugguuaug

SEQ ID NO: 284357 - RNA, 19 nt, Homo sapiens
  misc_RNA (1)...(19): siRNA sense strand
ggcuauggaugaaaugaau

SEQ ID NO: 284358 - RNA, 19 nt, Homo sapiens
  misc_RNA (1)...(19): siRNA sense strand
ucgaaagaguaaagaaguu

SEQ ID NO: 284359 - RNA, 19 nt, Homo sapiens
  misc_RNA (1)...(19): siRNA sense strand
ugagaaggccggacccauu

SEQ ID NO: 284360 - RNA, 19 nt, Homo sapiens
  misc_RNA (1)...(19): siRNA sense strand
gaauuggaacggagguauu

SEQ ID NO: 284361 - RNA, 19 nt, Homo sapiens
  misc_RNA (1)...(19): siRNA sense strand
gguaugcauuuaucaccuu

SEQ ID NO: 284362 - RNA, 19 nt, Homo sapiens
  misc_RNA (1)...(19): siRNA sense strand
agguagagcuggcuauuca

SEQ ID NO: 284363 - RNA, 19 nt, Homo sapiens
  misc_RNA (1)...(19): siRNA sense strand
gaagcacugcguaugaaga

SEQ ID NO: 284364 - RNA, 19 nt, Homo sapiens
  misc_RNA (1)...(19): siRNA sense strand
uuaaggcuauggaugaaau

SEQ ID NO: 284365 - RNA, 19 nt, Homo sapiens
  misc_RNA (1)...(19): siRNA sense strand
ugagaaacuuggcuacuac

SEQ ID NO: 284366 - RNA, 19 nt, Homo sapiens
  misc_RNA (1)...(19): siRNA sense strand
gcugaugaguggaaaagua

SEQ ID NO: 284367 - RNA, 19 nt, Homo sapiens
  misc_RNA (1)...(19): siRNA sense strand
cacagaagguggcagaaag

SEQ ID NO: 284368 - RNA, 19 nt, Homo sapiens
  misc_RNA (1)...(19): siRNA sense strand
gacagaagaaauauuggaa

SEQ ID NO: 284369 - RNA, 19 nt, Homo sapiens
  misc_RNA (1)...(19): siRNA sense strand
gaagaaccaauggauacuu

SEQ ID NO: 284370 - RNA, 19 nt, Homo sapiens
  misc_RNA (1)...(19): siRNA sense strand
ggaagaauucaguaaaguc

SEQ ID NO: 284371 - RNA, 19 nt, Homo sapiens
  misc_RNA (1)...(19): siRNA sense strand
ccacuguccggucagaaua

SEQ ID NO: 284372 - RNA, 19 nt, Homo sapiens
  misc_RNA (1)...(19): siRNA sense strand
uaccaagggauuuauauga

SEQ ID NO: 284373 - RNA, 19 nt, Homo sapiens
  misc_RNA (1)...(19): siRNA sense strand
ugauggcuaugcaguaaga

SEQ ID NO: 284374 - RNA, 19 nt, Homo sapiens
  misc_RNA (1)...(19): siRNA sense strand
gguggacguuauucucuau

SEQ ID NO: 284375 - RNA, 19 nt, Homo sapiens
  misc_RNA (1)...(19): siRNA sense strand
caggauugguagcuuaugu

SEQ ID NO: 284376 - RNA, 19 nt, Homo sapiens
  misc_RNA (1)...(19): siRNA sense strand
cuaugaagaucccuacuac

SEQ ID NO: 284377 - RNA, 19 nt, Homo sapiens
  misc_RNA (1)...(19): siRNA sense strand
caugccaccuccaauuaga

SEQ ID NO: 284378 - RNA, 19 nt, Homo sapiens
  misc_RNA (1)...(19): siRNA sense strand
ugugacagcuaugaaauuc

SEQ ID NO: 284379 - RNA, 19 nt, Homo sapiens
  misc_RNA (1)...(19): siRNA sense strand
gaagaggaagaaccaaugg

SEQ ID NO: 284380 - RNA, 19 nt, Homo sapiens
  misc_RNA (1)...(19): siRNA sense strand
uuaugucgaucuugaugaa

SEQ ID NO: 284381 - RNA, 19 nt, Homo sapiens
  misc_RNA (1)...(19): siRNA sense strand
caauguaggaggcaagaga

SEQ ID NO: 284382 - RNA, 19 nt, Homo sapiens
  misc_RNA (1)...(19): siRNA sense strand
cgacuaucguggaggcuau

SEQ ID NO: 284383 - RNA, 19 nt, Homo sapiens
  misc_RNA (1)...(19): siRNA sense strand
cugcguaugaagauuauua

SEQ ID NO: 284384 - RNA, 19 nt, Homo sapiens
  misc_RNA (1)...(19): siRNA sense strand
ggacguuauucucuaucau

SEQ ID NO: 284385 - RNA, 19 nt, Homo sapiens
  misc_RNA (1)...(19): siRNA sense strand
uuuaucaccuucuguggaa

SEQ ID NO: 284386 - RNA, 19 nt, Homo sapiens
  misc_RNA (1)...(19): siRNA sense strand
ggauuuauaugaggaugag

SEQ ID NO: 284387 - RNA, 19 nt, Homo sapiens
  misc_RNA (1)...(19): siRNA sense strand
uaacucacacagaacacua

SEQ ID NO: 284388 - RNA, 19 nt, Homo sapiens
  misc_RNA (1)...(19): siRNA sense strand
gaugcucucagggaauuua

SEQ ID NO: 284389 - RNA, 19 nt, Homo sapiens
  misc_RNA (1)...(19): siRNA sense strand
guggaguuaugaagaccua

SEQ ID NO: 284390 - RNA, 19 nt, Homo sapiens
  misc_RNA (1)...(19): siRNA sense strand
gaaaggcagauggguacaa

SEQ ID NO: 284391 - RNA, 19 nt, Homo sapiens
  misc_RNA (1)...(19): siRNA sense strand
cagcagagaggccgugguu

SEQ ID NO: 284392 - RNA, 19 nt, Homo sapiens
  misc_RNA (1)...(19): siRNA sense strand
cuacggcuaugaagauuac

SEQ ID NO: 284393 - RNA, 19 nt, Homo sapiens
  misc_RNA (1)...(19): siRNA sense strand
gaaguugaaagauuaugca

SEQ ID NO: 284394 - RNA, 19 nt, Homo sapiens
  misc_RNA (1)...(19): siRNA sense strand
guaaagucacagaggguuu

SEQ ID NO: 284395 - RNA, 19 nt, Homo sapiens
  misc_RNA (1)...(19): siRNA sense strand
aagaaccaauggauacuuc

SEQ ID NO: 284396 - RNA, 19 nt, Homo sapiens
  misc_RNA (1)...(19): siRNA sense strand
uagaggguaugcauuuauc

SEQ ID NO: 284397 - RNA, 19 nt, Homo sapiens
  misc_RNA (1)...(19): siRNA sense strand
gugcaagaguccacaaagg

SEQ ID NO: 284398 - RNA, 19 nt, Homo sapiens
  misc_RNA (1)...(19): siRNA sense strand
gguucugcuuccuugaaua

SEQ ID NO: 284399 - RNA, 19 nt, Homo sapiens
  misc_RNA (1)...(19): siRNA sense strand
agagcuggcuauucacaga

SEQ ID NO: 284400 - RNA, 19 nt, Homo sapiens
  misc_RNA (1)...(19): siRNA sense strand
cgcaugccaccuccaauua

SEQ ID NO: 284401 - RNA, 19 nt, Homo sapiens
  misc_RNA (1)...(19): siRNA sense strand
caagccaccagacaagaaa

SEQ ID NO: 284402 - RNA, 19 nt, Homo sapiens
  misc_RNA (1)...(19): siRNA sense strand
gagaagcgccugcaacugu

SEQ ID NO: 284403 - RNA, 19 nt, Homo sapiens
  misc_RNA (1)...(19): siRNA sense strand
caaccucacugaucgucaa

SEQ ID NO: 284404 - RNA, 19 nt, Homo sapiens
  misc_RNA (1)...(19): siRNA sense strand
uaacagagaccguuuacag

SEQ ID NO: 284405 - RNA, 19 nt, Homo sapiens
  misc_RNA (1)...(19): siRNA sense strand
acagagaccguuuacagua

SEQ ID NO: 284406 - RNA, 19 nt, Homo sapiens
  misc_RNA (1)...(19): siRNA sense strand
uaacauguauuugccaagu

SEQ ID NO: 284407 - RNA, 19 nt, Homo sapiens
  misc_RNA (1)...(19): siRNA sense strand
gcgucuacauuaacaaaga

SEQ ID NO: 284408 - RNA, 19 nt, Homo sapiens
  misc_RNA (1)...(19): siRNA sense strand
cagcaaauccacuccucua

SEQ ID NO: 284409 - RNA, 19 nt, Homo sapiens
  misc_RNA (1)...(19): siRNA sense strand
ucuccagccucccuucuuu

SEQ ID NO: 284410 - RNA, 19 nt, Homo sapiens
  misc_RNA (1)...(19): siRNA sense strand
ggacaagagcgccgagaag

SEQ ID NO: 284411 - RNA, 19 nt, Homo sapiens
  misc_RNA (1)...(19): siRNA sense strand
uuucagaacaggagaauga

SEQ ID NO: 284412 - RNA, 19 nt, Homo sapiens
  misc_RNA (1)...(19): siRNA sense strand
gcuccucuaacauguauuu

SEQ ID NO: 284413 - RNA, 19 nt, Homo sapiens
  misc_RNA (1)...(19): siRNA sense strand
acauguauuugccaaguug

SEQ ID NO: 284414 - RNA, 19 nt, Homo sapiens
  misc_RNA (1)...(19): siRNA sense strand
gaacaggagaaugaaggaa

SEQ ID NO: 284415 - RNA, 19 nt, Homo sapiens
  misc_RNA (1)...(19): siRNA sense strand
ucagagaguacgccauuga

SEQ ID NO: 284416 - RNA, 19 nt, Homo sapiens
  misc_RNA (1)...(19): siRNA sense strand
gcaaucuggcccacugcua

SEQ ID NO: 284417 - RNA, 19 nt, Homo sapiens
  misc_RNA (1)...(19): siRNA sense strand
cagagaccguuuacaguac

SEQ ID NO: 284418 - RNA, 19 nt, Homo sapiens
  misc_RNA (1)...(19): siRNA sense strand
gagaccguuuacaguacua

SEQ ID NO: 284419 - RNA, 19 nt, Homo sapiens
  misc_RNA (1)...(19): siRNA sense strand
ccaaugacauacuccuacu

SEQ ID NO: 284420 - RNA, 19 nt, Homo sapiens
  misc_RNA (1)...(19): siRNA sense strand
ggucccugcuccucuaaca

SEQ ID NO: 284421 - RNA, 19 nt, Homo sapiens
  misc_RNA (1)...(19): siRNA sense strand
ucacugaucgucaagucaa

SEQ ID NO: 284422 - RNA, 19 nt, Homo sapiens
  misc_RNA (1)...(19): siRNA sense strand
cgucucggguccagauuuc

SEQ ID NO: 284423 - RNA, 19 nt, Homo sapiens
  misc_RNA (1)...(19): siRNA sense strand
cagcgucuacauuaacaaa

SEQ ID NO: 284424 - RNA, 19 nt, Homo sapiens
  misc_RNA (1)...(19): siRNA sense strand
cguggucccugcuccucua

SEQ ID NO: 284425 - RNA, 19 nt, Homo sapiens
  misc_RNA (1)...(19): siRNA sense strand
gcagucucguccaauuucu

SEQ ID NO: 284426 - RNA, 19 nt, Homo sapiens
  misc_RNA (1)...(19): siRNA sense strand
caaagagaagcgccugcaa

SEQ ID NO: 284427 - RNA, 19 nt, Homo sapiens
  misc_RNA (1)...(19): siRNA sense strand
cuucagagaguacgccauu

SEQ ID NO: 284428 - RNA, 19 nt, Homo sapiens
  misc_RNA (1)...(19): siRNA sense strand
gggacaagagcgccgagaa

SEQ ID NO: 284429 - RNA, 19 nt, Homo sapiens
  misc_RNA (1)...(19): siRNA sense strand
cacaggcuuucgaccaguu

SEQ ID NO: 284430 - RNA, 19 nt, Homo sapiens
  misc_RNA (1)...(19): siRNA sense strand
guacuacucagcaaaucca

SEQ ID NO: 284431 - RNA, 19 nt, Homo sapiens
  misc_RNA (1)...(19): siRNA sense strand
cugcuccucuaacauguau

SEQ ID NO: 284432 - RNA, 19 nt, Homo sapiens
  misc_RNA (1)...(19): siRNA sense strand
gcccaaugacauacuccua

SEQ ID NO: 284433 - RNA, 19 nt, Homo sapiens
  misc_RNA (1)...(19): siRNA sense strand
ccucacugaucgucaaguc

SEQ ID NO: 284434 - RNA, 19 nt, Homo sapiens
  misc_RNA (1)...(19): siRNA sense strand
gagcucggccaacgucuac

SEQ ID NO: 284435 - RNA, 19 nt, Homo sapiens
  misc_RNA (1)...(19): siRNA sense strand
ccgcagucucguccaauuu

SEQ ID NO: 284436 - RNA, 19 nt, Homo sapiens
  misc_RNA (1)...(19): siRNA sense strand
aaauuaacagagaccguuu

SEQ ID NO: 284437 - RNA, 19 nt, Homo sapiens
  misc_RNA (1)...(19): siRNA sense strand
ucuucagcgucuacauuaa

SEQ ID NO: 284438 - RNA, 19 nt, Homo sapiens
  misc_RNA (1)...(19): siRNA sense strand
cccgcagucucguccaauu

SEQ ID NO: 284439 - RNA, 19 nt, Homo sapiens
  misc_RNA (1)...(19): siRNA sense strand
aauuaacagagaccguuua

SEQ ID NO: 284440 - RNA, 19 nt, Homo sapiens
  misc_RNA (1)...(19): siRNA sense strand
aacaggagaaugaaggaaa

SEQ ID NO: 284441 - RNA, 19 nt, Homo sapiens
  misc_RNA (1)...(19): siRNA sense strand
aaagauagcucgcggcauu

SEQ ID NO: 284442 - RNA, 19 nt, Homo sapiens
  misc_RNA (1)...(19): siRNA sense strand
caucaaagccuauuaugga

SEQ ID NO: 284443 - RNA, 19 nt, Homo sapiens
  misc_RNA (1)...(19): siRNA sense strand
ccaguuugcuuuccucauu

SEQ ID NO: 284444 - RNA, 19 nt, Homo sapiens
  misc_RNA (1)...(19): siRNA sense strand
gaagagcaagaauaaauga

SEQ ID NO: 284445 - RNA, 19 nt, Homo sapiens
  misc_RNA (1)...(19): siRNA sense strand
caaagccuauuauggagaa

SEQ ID NO: 284446 - RNA, 19 nt, Homo sapiens
  misc_RNA (1)...(19): siRNA sense strand
agacgaagagcaagaauaa

SEQ ID NO: 284447 - RNA, 19 nt, Homo sapiens
  misc_RNA (1)...(19): siRNA sense strand
gagcaagaauaaaugaaag

SEQ ID NO: 284448 - RNA, 19 nt, Homo sapiens
  misc_RNA (1)...(19): siRNA sense strand
gcacagaaagucaucaaag

SEQ ID NO: 284449 - RNA, 19 nt, Homo sapiens
  misc_RNA (1)...(19): siRNA sense strand
cagcugauauaauggagaa

SEQ ID NO: 284450 - RNA, 19 nt, Homo sapiens
  misc_RNA (1)...(19): siRNA sense strand
uggaugcucugaagaaaga

SEQ ID NO: 284451 - RNA, 19 nt, Homo sapiens
  misc_RNA (1)...(19): siRNA sense strand
gaaagucaucaaagccuau

SEQ ID NO: 284452 - RNA, 19 nt, Homo sapiens
  misc_RNA (1)...(19): siRNA sense strand
cgaagagcaagaauaaaug

SEQ ID NO: 284453 - RNA, 19 nt, Homo sapiens
  misc_RNA (1)...(19): siRNA sense strand
gaaggcggacauucuggaa

SEQ ID NO: 284454 - RNA, 19 nt, Homo sapiens
  misc_RNA (1)...(19): siRNA sense strand
gagaggcggcuaagguguu

SEQ ID NO: 284455 - RNA, 19 nt, Homo sapiens
  misc_RNA (1)...(19): siRNA sense strand
caacacgacaccggauaaa

SEQ ID NO: 284456 - RNA, 19 nt, Homo sapiens
  misc_RNA (1)...(19): siRNA sense strand
gagcacagaaagucaucaa

SEQ ID NO: 284457 - RNA, 19 nt, Homo sapiens
  misc_RNA (1)...(19): siRNA sense strand
acgaagagcaagaauaaau

SEQ ID NO: 284458 - RNA, 19 nt, Homo sapiens
  misc_RNA (1)...(19): siRNA sense strand
cgacaccggauaaaccaaa

SEQ ID NO: 284459 - RNA, 19 nt, Homo sapiens
  misc_RNA (1)...(19): siRNA sense strand
gagaaaagacgaagagcaa

SEQ ID NO: 284460 - RNA, 19 nt, Homo sapiens
  misc_RNA (1)...(19): siRNA sense strand
caagugugcuggggaagua

SEQ ID NO: 284461 - RNA, 19 nt, Homo sapiens
  misc_RNA (1)...(19): siRNA sense strand
gaaaagacgaagagcaaga

SEQ ID NO: 284462 - RNA, 19 nt, Homo sapiens
  misc_RNA (1)...(19): siRNA sense strand
ccaacugcaugacccagau

SEQ ID NO: 284463 - RNA, 19 nt, Homo sapiens
  misc_RNA (1)...(19): siRNA sense strand
ucaacacgacaccggauaa

SEQ ID NO: 284464 - RNA, 19 nt, Homo sapiens
  misc_RNA (1)...(19): siRNA sense strand
aaccaaagacagcaucuga

SEQ ID NO: 284465 - RNA, 19 nt, Homo sapiens
  misc_RNA (1)...(19): siRNA sense strand
cacagaaagucaucaaagc

SEQ ID NO: 284466 - RNA, 19 nt, Homo sapiens
  misc_RNA (1)...(19): siRNA sense strand
gcaagaauaaaugaaaguc

SEQ ID NO: 284467 - RNA, 19 nt, Homo sapiens
  misc_RNA (1)...(19): siRNA sense strand
agaggcggcuaagguguuu

SEQ ID NO: 284468 - RNA, 19 nt, Homo sapiens
  misc_RNA (1)...(19): siRNA sense strand
aggcggacauucuggaaau

SEQ ID NO: 284469 - RNA, 19 nt, Homo sapiens
  misc_RNA (1)...(19): siRNA sense strand
aagacgaagagcaagaaua

SEQ ID NO: 284470 - RNA, 19 nt, Homo sapiens
  misc_RNA (1)...(19): siRNA sense strand
gaugcucugaagaaagaua

SEQ ID NO: 284471 - RNA, 19 nt, Homo sapiens
  misc_RNA (1)...(19): siRNA sense strand
ccgauggccaguuugcuuu

SEQ ID NO: 284472 - RNA, 19 nt, Homo sapiens
  misc_RNA (1)...(19): siRNA sense strand
caguuugcuuuccucauuc

SEQ ID NO: 284473 - RNA, 19 nt, Homo sapiens
  misc_RNA (1)...(19): siRNA sense strand
gacgaagagcaagaauaaa

SEQ ID NO: 284474 - RNA, 19 nt, Homo sapiens
  misc_RNA (1)...(19): siRNA sense strand
gauaaaccaaagacagcau

SEQ ID NO: 284475 - RNA, 19 nt, Homo sapiens
  misc_RNA (1)...(19): siRNA sense strand
gcugagcacagacccaagu

SEQ ID NO: 284476 - RNA, 19 nt, Homo sapiens
  misc_RNA (1)...(19): siRNA sense strand
gucaacacgacaccggaua

SEQ ID NO: 284477 - RNA, 19 nt, Homo sapiens
  misc_RNA (1)...(19): siRNA sense strand
gacaccggauaaaccaaag

SEQ ID NO: 284478 - RNA, 19 nt, Homo sapiens
  misc_RNA (1)...(19): siRNA sense strand
ggaagcagcuggugcacua

SEQ ID NO: 284479 - RNA, 19 nt, Homo sapiens
  misc_RNA (1)...(19): siRNA sense strand
ucaacaagcucauucaguu

SEQ ID NO: 284480 - RNA, 19 nt, Homo sapiens
  misc_RNA (1)...(19): siRNA sense strand
gacaguggcucagcacauu

SEQ ID NO: 284481 - RNA, 19 nt, Homo sapiens
  misc_RNA (1)...(19): siRNA sense strand
gcagaagcaugcccagcaa

SEQ ID NO: 284482 - RNA, 19 nt, Homo sapiens
  misc_RNA (1)...(19): siRNA sense strand
ccugaagagugaagacaua

SEQ ID NO: 284483 - RNA, 19 nt, Homo sapiens
  misc_RNA (1)...(19): siRNA sense strand
ggacaagaaugagcucagu

SEQ ID NO: 284484 - RNA, 19 nt, Homo sapiens
  misc_RNA (1)...(19): siRNA sense strand
gagaacagcagcccggauu

SEQ ID NO: 284485 - RNA, 19 nt, Homo sapiens
  misc_RNA (1)...(19): siRNA sense strand
ccaaguacuucaagcacaa

SEQ ID NO: 284486 - RNA, 19 nt, Homo sapiens
  misc_RNA (1)...(19): siRNA sense strand
cacauuccaugcccaagua

SEQ ID NO: 284487 - RNA, 19 nt, Homo sapiens
  misc_RNA (1)...(19): siRNA sense strand
gaagagugaagacauaaag

SEQ ID NO: 284488 - RNA, 19 nt, Homo sapiens
  misc_RNA (1)...(19): siRNA sense strand
gaacagcagcccggauuca

SEQ ID NO: 284489 - RNA, 19 nt, Homo sapiens
  misc_RNA (1)...(19): siRNA sense strand
uagccugccuggacaagaa

SEQ ID NO: 284490 - RNA, 19 nt, Homo sapiens
  misc_RNA (1)...(19): siRNA sense strand
aggaggugcugcccaagua

SEQ ID NO: 284491 - RNA, 19 nt, Homo sapiens
  misc_RNA (1)...(19): siRNA sense strand
agaggaaagugaccagugu

SEQ ID NO: 284492 - RNA, 19 nt, Homo sapiens
  misc_RNA (1)...(19): siRNA sense strand
ugcggcagcucaacaugua

SEQ ID NO: 284493 - RNA, 19 nt, Homo sapiens
  misc_RNA (1)...(19): siRNA sense strand
gacagcagccuggccagua

SEQ ID NO: 284494 - RNA, 19 nt, Homo sapiens
  misc_RNA (1)...(19): siRNA sense strand
gaacaucaagaggaaagug

SEQ ID NO: 284495 - RNA, 19 nt, Homo sapiens
  misc_RNA (1)...(19): siRNA sense strand
aacagaaagucgucaacaa

SEQ ID NO: 284496 - RNA, 19 nt, Homo sapiens
  misc_RNA (1)...(19): siRNA sense strand
ccaagcuccuggccaugaa

SEQ ID NO: 284497 - RNA, 19 nt, Homo sapiens
  misc_RNA (1)...(19): siRNA sense strand
uguccacccugaagaguga

SEQ ID NO: 284498 - RNA, 19 nt, Homo sapiens
  misc_RNA (1)...(19): siRNA sense strand
gcacauuccaugcccaagu

SEQ ID NO: 284499 - RNA, 19 nt, Homo sapiens
  misc_RNA (1)...(19): siRNA sense strand
caacaagcucauucaguuc

SEQ ID NO: 284500 - RNA, 19 nt, Homo sapiens
  misc_RNA (1)...(19): siRNA sense strand
acaacaacauggccagcuu

SEQ ID NO: 284501 - RNA, 19 nt, Homo sapiens
  misc_RNA (1)...(19): siRNA sense strand
acaagaaugagcucaguga

SEQ ID NO: 284502 - RNA, 19 nt, Homo sapiens
  misc_RNA (1)...(19): siRNA sense strand
caacagaaagucgucaaca

SEQ ID NO: 284503 - RNA, 19 nt, Homo sapiens
  misc_RNA (1)...(19): siRNA sense strand
ugacggacgugcagcugau

SEQ ID NO: 284504 - RNA, 19 nt, Homo sapiens
  misc_RNA (1)...(19): siRNA sense strand
gagaacaucaagaggaaag

SEQ ID NO: 284505 - RNA, 19 nt, Homo sapiens
  misc_RNA (1)...(19): siRNA sense strand
uggauaaccugcagaccau

SEQ ID NO: 284506 - RNA, 19 nt, Homo sapiens
  misc_RNA (1)...(19): siRNA sense strand
acagcagccuggccaguau

SEQ ID NO: 284507 - RNA, 19 nt, Homo sapiens
  misc_RNA (1)...(19): siRNA sense strand
gagugaagacauaaagauc

SEQ ID NO: 284508 - RNA, 19 nt, Homo sapiens
  misc_RNA (1)...(19): siRNA sense strand
gagccugccugaccuugac

SEQ ID NO: 284509 - RNA, 19 nt, Homo sapiens
  misc_RNA (1)...(19): siRNA sense strand
acagaaagucgucaacaag

SEQ ID NO: 284510 - RNA, 19 nt, Homo sapiens
  misc_RNA (1)...(19): siRNA sense strand
ugaagagugaagacauaaa

SEQ ID NO: 284511 - RNA, 19 nt, Homo sapiens
  misc_RNA (1)...(19): siRNA sense strand
ggaagcaggagugcaugga

SEQ ID NO: 284512 - RNA, 19 nt, Homo sapiens
  misc_RNA (1)...(19): siRNA sense strand
agaaagucgucaacaagcu

SEQ ID NO: 284513 - RNA, 19 nt, Homo sapiens
  misc_RNA (1)...(19): siRNA sense strand
agagagacgacacggaguu

SEQ ID NO: 284514 - RNA, 19 nt, Homo sapiens
  misc_RNA (1)...(19): siRNA sense strand
guucgaccagggccaguuu

SEQ ID NO: 284515 - RNA, 19 nt, Homo sapiens
  misc_RNA (1)...(19): siRNA sense strand
ccaaguauagccggcaguu

SEQ ID NO: 284516 - RNA, 19 nt, Homo sapiens
  misc_RNA (1)...(19): siRNA sense strand
agagugaagacauaaagau

SEQ ID NO: 284517 - RNA, 19 nt, Homo sapiens
  misc_RNA (1)...(19): siRNA sense strand
gagagacgacacggaguuc

SEQ ID NO: 284518 - RNA, 19 nt, Homo sapiens
  misc_RNA (1)...(19): siRNA sense strand
cccaucaucuccgacauca

SEQ ID NO: 284519 - RNA, 19 nt, Homo sapiens
  misc_RNA (1)...(19): siRNA sense strand
aagcaugcccagcaacaga

SEQ ID NO: 284520 - RNA, 19 nt, Homo sapiens
  misc_RNA (1)...(19): siRNA sense strand
gcagcuccuugagaacauc

SEQ ID NO: 284521 - RNA, 19 nt, Homo sapiens
  misc_RNA (1)...(19): siRNA sense strand
cgaccugccggugcuguuu

SEQ ID NO: 284522 - RNA, 19 nt, Homo sapiens
  misc_RNA (1)...(19): siRNA sense strand
gugaccacuuggaugcuau

SEQ ID NO: 284523 - RNA, 19 nt, Homo sapiens
  misc_RNA (1)...(19): siRNA sense strand
gcaugcccagcaacagaaa

SEQ ID NO: 284524 - RNA, 19 nt, Homo sapiens
  misc_RNA (1)...(19): siRNA sense strand
ggaaaucucuucgauggua

SEQ ID NO: 284525 - RNA, 19 nt, Homo sapiens
  misc_RNA (1)...(19): siRNA sense strand
ggacaagucugagaaggua

SEQ ID NO: 284526 - RNA, 19 nt, Homo sapiens
  misc_RNA (1)...(19): siRNA sense strand
uaaaggaggucaaggagaa

SEQ ID NO: 284527 - RNA, 19 nt, Homo sapiens
  misc_RNA (1)...(19): siRNA sense strand
caccagagcucgauuugaa

SEQ ID NO: 284528 - RNA, 19 nt, Homo sapiens
  misc_RNA (1)...(19): siRNA sense strand
ccaaaguccuuguguccua

SEQ ID NO: 284529 - RNA, 19 nt, Homo sapiens
  misc_RNA (1)...(19): siRNA sense strand
ccaaugguauucucaaugu

SEQ ID NO: 284530 - RNA, 19 nt, Homo sapiens
  misc_RNA (1)...(19): siRNA sense strand
ucaaucaacuggcagagaa

SEQ ID NO: 284531 - RNA, 19 nt, Homo sapiens
  misc_RNA (1)...(19): siRNA sense strand
cgugaugacugcccugaua

SEQ ID NO: 284532 - RNA, 19 nt, Homo sapiens
  misc_RNA (1)...(19): siRNA sense strand
aagcagauaugaaacuuug

SEQ ID NO: 284533 - RNA, 19 nt, Homo sapiens
  misc_RNA (1)...(19): siRNA sense strand
ugaagaguguugugaguga

SEQ ID NO: 284534 - RNA, 19 nt, Homo sapiens
  misc_RNA (1)...(19): siRNA sense strand
gaacgacauguccugauuu

SEQ ID NO: 284535 - RNA, 19 nt, Homo sapiens
  misc_RNA (1)...(19): siRNA sense strand
ggagacugcugaggccuuu

SEQ ID NO: 284536 - RNA, 19 nt, Homo sapiens
  misc_RNA (1)...(19): siRNA sense strand
caagauggauaaggcuaaa

SEQ ID NO: 284537 - RNA, 19 nt, Homo sapiens
  misc_RNA (1)...(19): siRNA sense strand
gcaaagaaugccuuagaau

SEQ ID NO: 284538 - RNA, 19 nt, Homo sapiens
  misc_RNA (1)...(19): siRNA sense strand
gacgugaucucaacaagag

SEQ ID NO: 284539 - RNA, 19 nt, Homo sapiens
  misc_RNA (1)...(19): siRNA sense strand
caaagaaugccuuagaauc

SEQ ID NO: 284540 - RNA, 19 nt, Homo sapiens
  misc_RNA (1)...(19): siRNA sense strand
gcauugacuucuauacauc

SEQ ID NO: 284541 - RNA, 19 nt, Homo sapiens
  misc_RNA (1)...(19): siRNA sense strand
guaacccuaucaucacaaa

SEQ ID NO: 284542 - RNA, 19 nt, Homo sapiens
  misc_RNA (1)...(19): siRNA sense strand
ggcaggaaauuuaaugauc

SEQ ID NO: 284543 - RNA, 19 nt, Homo sapiens
  misc_RNA (1)...(19): siRNA sense strand
agaacgacauguccugauu

SEQ ID NO: 284544 - RNA, 19 nt, Homo sapiens
  misc_RNA (1)...(19): siRNA sense strand
gaaaucucuucgaugguau

SEQ ID NO: 284545 - RNA, 19 nt, Homo sapiens
  misc_RNA (1)...(19): siRNA sense strand
gaucauaagagaaaggaau

SEQ ID NO: 284546 - RNA, 19 nt, Homo sapiens
  misc_RNA (1)...(19): siRNA sense strand
ggcauugacuucuauacau

SEQ ID NO: 284547 - RNA, 19 nt, Homo sapiens
  misc_RNA (1)...(19): siRNA sense strand
ugaguuugaucauaagaga

SEQ ID NO: 284548 - RNA, 19 nt, Homo sapiens
  misc_RNA (1)...(19): siRNA sense strand
uaaugauccuguuguacaa

SEQ ID NO: 284549 - RNA, 19 nt, Homo sapiens
  misc_RNA (1)...(19): siRNA sense strand
gcagauguguaacccuauc

SEQ ID NO: 284550 - RNA, 19 nt, Homo sapiens
  misc_RNA (1)...(19): siRNA sense strand
gguuugaccugacuggaau

SEQ ID NO: 284551 - RNA, 19 nt, Homo sapiens
  misc_RNA (1)...(19): siRNA sense strand
agagaaagaugaguuugau

SEQ ID NO: 284552 - RNA, 19 nt, Homo sapiens
  misc_RNA (1)...(19): siRNA sense strand
gagcucgauuugaagaguu

SEQ ID NO: 284553 - RNA, 19 nt, Homo sapiens
  misc_RNA (1)...(19): siRNA sense strand
gguuugaagggcaagauua

SEQ ID NO: 284554 - RNA, 19 nt, Homo sapiens
  misc_RNA (1)...(19): siRNA sense strand
ggacgugaucucaacaaga

SEQ ID NO: 284555 - RNA, 19 nt, Homo sapiens
  misc_RNA (1)...(19): siRNA sense strand
auauaaagcugaagaugag

SEQ ID NO: 284556 - RNA, 19 nt, Homo sapiens
  misc_RNA (1)...(19): siRNA sense strand
gcgagagggccaugacaaa

SEQ ID NO: 284557 - RNA, 19 nt, Homo sapiens
  misc_RNA (1)...(19): siRNA sense strand
gcaagauuagugagucuga

SEQ ID NO: 284558 - RNA, 19 nt, Homo sapiens
  misc_RNA (1)...(19): siRNA sense strand
uggaggaguucaagaggaa

SEQ ID NO: 284559 - RNA, 19 nt, Homo sapiens
  misc_RNA (1)...(19): siRNA sense strand
ugcaaagaaugccuuagaa

SEQ ID NO: 284560 - RNA, 19 nt, Homo sapiens
  misc_RNA (1)...(19): siRNA sense strand
caaccuagaaauugauuca

SEQ ID NO: 284561 - RNA, 19 nt, Homo sapiens
  misc_RNA (1)...(19): siRNA sense strand
ccuagaaauugauucacuu

SEQ ID NO: 284562 - RNA, 19 nt, Homo sapiens
  misc_RNA (1)...(19): siRNA sense strand
agaaagaugaguuugauca

SEQ ID NO: 284563 - RNA, 19 nt, Homo sapiens
  misc_RNA (1)...(19): siRNA sense strand
cagagaaagaugaguuuga

SEQ ID NO: 284564 - RNA, 19 nt, Homo sapiens
  misc_RNA (1)...(19): siRNA sense strand
agaucgaggugacguuuga

SEQ ID NO: 284565 - RNA, 19 nt, Homo sapiens
  misc_RNA (1)...(19): siRNA sense strand
caccuacucugacaaccaa

SEQ ID NO: 284566 - RNA, 19 nt, Homo sapiens
  misc_RNA (1)...(19): siRNA sense strand
ucaagugauuaaugaagga

SEQ ID NO: 284567 - RNA, 19 nt, Homo sapiens
  misc_RNA (1)...(19): siRNA sense strand
gaaccagguagcaaugaau

SEQ ID NO: 284568 - RNA, 19 nt, Homo sapiens
  misc_RNA (1)...(19): siRNA sense strand
ugugauugcuggacuuaau

SEQ ID NO: 284569 - RNA, 19 nt, Homo sapiens
  misc_RNA (1)...(19): siRNA sense strand
uguacaagcagauaugaaa

SEQ ID NO: 284570 - RNA, 19 nt, Homo sapiens
  misc_RNA (1)...(19): siRNA sense strand
gaagaguguugugagugau

SEQ ID NO: 284571 - RNA, 19 nt, Homo sapiens
  misc_RNA (1)...(19): siRNA sense strand
caugaagaguguugugagu

SEQ ID NO: 284572 - RNA, 19 nt, Homo sapiens
  misc_RNA (1)...(19): siRNA sense strand
caagaucaccaucaccaau

SEQ ID NO: 284573 - RNA, 19 nt, Homo sapiens
  misc_RNA (1)...(19): siRNA sense strand
ccaagaaccagguagcaau

SEQ ID NO: 284574 - RNA, 19 nt, Homo sapiens
  misc_RNA (1)...(19): siRNA sense strand
caauggacgugaucucaac

SEQ ID NO: 284575 - RNA, 19 nt, Homo sapiens
  misc_RNA (1)...(19): siRNA sense strand
cuucaggacuacuucaaug

SEQ ID NO: 284576 - RNA, 19 nt, Homo sapiens
  misc_RNA (1)...(19): siRNA sense strand
gggaugccaagauggauaa

SEQ ID NO: 284577 - RNA, 19 nt, Homo sapiens
  misc_RNA (1)...(19): siRNA sense strand
gugcuaagaaucaucaaug

SEQ ID NO: 284578 - RNA, 19 nt, Homo sapiens
  misc_RNA (1)...(19): siRNA sense strand
uaaggaugcaggugugauu

SEQ ID NO: 284579 - RNA, 19 nt, Homo sapiens
  misc_RNA (1)...(19): siRNA sense strand
ggagauugagcgcaugguu

SEQ ID NO: 284580 - RNA, 19 nt, Homo sapiens
  misc_RNA (1)...(19): siRNA sense strand
auaugaaacuuuggccuuu

SEQ ID NO: 284581 - RNA, 19 nt, Homo sapiens
  misc_RNA (1)...(19): siRNA sense strand
caagaaccagguagcaaug

SEQ ID NO: 284582 - RNA, 19 nt, Homo sapiens
  misc_RNA (1)...(19): siRNA sense strand
gaaggaggcaagcccaaag

SEQ ID NO: 284583 - RNA, 19 nt, Homo sapiens
  misc_RNA (1)...(19): siRNA sense strand
acaagcagauaugaaacuu

SEQ ID NO: 284584 - RNA, 19 nt, Homo sapiens
  misc_RNA (1)...(19): siRNA sense strand
gauuagugagucugauaaa

SEQ ID NO: 284585 - RNA, 19 nt, Homo sapiens
  misc_RNA (1)...(19): siRNA sense strand
gaucucaacaagagcauca

SEQ ID NO: 284586 - RNA, 19 nt, Homo sapiens
  misc_RNA (1)...(19): siRNA sense strand
ccaagauggauaaggcuaa

SEQ ID NO: 284587 - RNA, 19 nt, Homo sapiens
  misc_RNA (1)...(19): siRNA sense strand
aggccaaccuagaaauuga

SEQ ID NO: 284588 - RNA, 19 nt, Homo sapiens
  misc_RNA (1)...(19): siRNA sense strand
gcacccaggccaaccuaga

SEQ ID NO: 284589 - RNA, 19 nt, Homo sapiens
  misc_RNA (1)...(19): siRNA sense strand
gguauugacuaaguugaag

SEQ ID NO: 284590 - RNA, 19 nt, Homo sapiens
  misc_RNA (1)...(19): siRNA sense strand
gggccacccugucaccaau

SEQ ID NO: 284591 - RNA, 19 nt, Homo sapiens
  misc_RNA (1)...(19): siRNA sense strand
agaaccagguagcaaugaa

SEQ ID NO: 284592 - RNA, 19 nt, Homo sapiens
  misc_RNA (1)...(19): siRNA sense strand
cugaucggcaggaaauuua

SEQ ID NO: 284593 - RNA, 19 nt, Homo sapiens
  misc_RNA (1)...(19): siRNA sense strand
ccaccaagcagacacagau

SEQ ID NO: 284594 - RNA, 19 nt, Homo sapiens
  misc_RNA (1)...(19): siRNA sense strand
ugaugaggccguagcauau

SEQ ID NO: 284595 - RNA, 19 nt, Homo sapiens
  misc_RNA (1)...(19): siRNA sense strand
cugaugaggccguagcaua

SEQ ID NO: 284596 - RNA, 19 nt, Homo sapiens
  misc_RNA (1)...(19): siRNA sense strand
cuucgaugguauugacuaa

SEQ ID NO: 284597 - RNA, 19 nt, Homo sapiens
  misc_RNA (1)...(19): siRNA sense strand
uuaaugauccuguuguaca

SEQ ID NO: 284598 - RNA, 19 nt, Homo sapiens
  misc_RNA (1)...(19): siRNA sense strand
agaaugccuuagaauccua

SEQ ID NO: 284599 - RNA, 19 nt, Homo sapiens
  misc_RNA (1)...(19): siRNA sense strand
gggaggacuuugacaacag

SEQ ID NO: 284600 - RNA, 19 nt, Homo sapiens
  misc_RNA (1)...(19): siRNA sense strand
gguggaggcacauuugaug

SEQ ID NO: 284601 - RNA, 19 nt, Homo sapiens
  misc_RNA (1)...(19): siRNA sense strand
ccaagggaaucgccauagg

SEQ ID NO: 284602 - RNA, 19 nt, Homo sapiens
  misc_RNA (1)...(19): siRNA sense strand
gcagagaaagaugaguuug

SEQ ID NO: 284603 - RNA, 19 nt, Homo sapiens
  misc_RNA (1)...(19): siRNA sense strand
agagggccaugacaaagga

SEQ ID NO: 284604 - RNA, 19 nt, Homo sapiens
  misc_RNA (1)...(19): siRNA sense strand
ggacaucagccagaacaag

SEQ ID NO: 284605 - RNA, 19 nt, Homo sapiens
  misc_RNA (1)...(19): siRNA sense strand
gugccagccuauuucaaug

SEQ ID NO: 284606 - RNA, 19 nt, Homo sapiens
  misc_RNA (1)...(19): siRNA sense strand
ucgaugguauugacuaagu

SEQ ID NO: 284607 - RNA, 19 nt, Homo sapiens
  misc_RNA (1)...(19): siRNA sense strand
ccggcaaggugaacaagau

SEQ ID NO: 284608 - RNA, 19 nt, Homo sapiens
  misc_RNA (1)...(19): siRNA sense strand
aagauuagugagucugaua

SEQ ID NO: 284609 - RNA, 19 nt, Homo sapiens
  misc_RNA (1)...(19): siRNA sense strand
ugaagggcaagauuaguga

SEQ ID NO: 284610 - RNA, 19 nt, Homo sapiens
  misc_RNA (1)...(19): siRNA sense strand
uggaugcugagaaauauaa

SEQ ID NO: 284611 - RNA, 19 nt, Homo sapiens
  misc_RNA (1)...(19): siRNA sense strand
ucuggaugcugagaaauau

SEQ ID NO: 284612 - RNA, 19 nt, Homo sapiens
  misc_RNA (1)...(19): siRNA sense strand
agaucaccaucaccaauga

SEQ ID NO: 284613 - RNA, 19 nt, Homo sapiens
  misc_RNA (1)...(19): siRNA sense strand
ccaggccaaccuagaaauu

SEQ ID NO: 284614 - RNA, 19 nt, Homo sapiens
  misc_RNA (1)...(19): siRNA sense strand
ggcagagaaagaugaguuu

SEQ ID NO: 284615 - RNA, 19 nt, Homo sapiens
  misc_RNA (1)...(19): siRNA sense strand
caagcagauaugaaacuuu

SEQ ID NO: 284616 - RNA, 19 nt, Homo sapiens
  misc_RNA (1)...(19): siRNA sense strand
cuacuucaauggacgugau

SEQ ID NO: 284617 - RNA, 19 nt, Homo sapiens
  misc_RNA (1)...(19): siRNA sense strand
ccagagcucgauuugaaga

SEQ ID NO: 284618 - RNA, 19 nt, Homo sapiens
  misc_RNA (1)...(19): siRNA sense strand
cugaggaaaucucuucgau

SEQ ID NO: 284619 - RNA, 19 nt, Homo sapiens
  misc_RNA (1)...(19): siRNA sense strand
gggcaagauuagugagucu

SEQ ID NO: 284620 - RNA, 19 nt, Homo sapiens
  misc_RNA (1)...(19): siRNA sense strand
ugaacaagaucaccaucac

SEQ ID NO: 284621 - RNA, 19 nt, Homo sapiens
  misc_RNA (1)...(19): siRNA sense strand
gugaugacugcccugauaa

SEQ ID NO: 284622 - RNA, 19 nt, Homo sapiens
  misc_RNA (1)...(19): siRNA sense strand
ggucaaggagaacgacaug

SEQ ID NO: 284623 - RNA, 19 nt, Homo sapiens
  misc_RNA (1)...(19): siRNA sense strand
gaugguauugacuaaguug

SEQ ID NO: 284624 - RNA, 19 nt, Homo sapiens
  misc_RNA (1)...(19): siRNA sense strand
gcagaaagcuguaaagaua

SEQ ID NO: 284625 - RNA, 19 nt, Homo sapiens
  misc_RNA (1)...(19): siRNA sense strand
ggaaaucugucgccgagua

SEQ ID NO: 284626 - RNA, 19 nt, Homo sapiens
  misc_RNA (1)...(19): siRNA sense strand
gaacgucacugccauucaa

SEQ ID NO: 284627 - RNA, 19 nt, Homo sapiens
  misc_RNA (1)...(19): siRNA sense strand
gcacaaagccaacaucaug

SEQ ID NO: 284628 - RNA, 19 nt, Homo sapiens
  misc_RNA (1)...(19): siRNA sense strand
ggaaagagcuugacaaaag

SEQ ID NO: 284629 - RNA, 19 nt, Homo sapiens
  misc_RNA (1)...(19): siRNA sense strand
gcuaaagaguccauggaua

SEQ ID NO: 284630 - RNA, 19 nt, Homo sapiens
  misc_RNA (1)...(19): siRNA sense strand
gaauugaggcugcguguuu

SEQ ID NO: 284631 - RNA, 19 nt, Homo sapiens
  misc_RNA (1)...(19): siRNA sense strand
gaacacagaaggagaauac

SEQ ID NO: 284632 - RNA, 19 nt, Homo sapiens
  misc_RNA (1)...(19): siRNA sense strand
acaagauccuucccaauuu

SEQ ID NO: 284633 - RNA, 19 nt, Homo sapiens
  misc_RNA (1)...(19): siRNA sense strand
uuaaugagauguaccuuga

SEQ ID NO: 284634 - RNA, 19 nt, Homo sapiens
  misc_RNA (1)...(19): siRNA sense strand
gaaggagaauacaguggaa

SEQ ID NO: 284635 - RNA, 19 nt, Homo sapiens
  misc_RNA (1)...(19): siRNA sense strand
gaauugagcaugugauugu

SEQ ID NO: 284636 - RNA, 19 nt, Homo sapiens
  misc_RNA (1)...(19): siRNA sense strand
cuaaagaguccauggauaa

SEQ ID NO: 284637 - RNA, 19 nt, Homo sapiens
  misc_RNA (1)...(19): siRNA sense strand
caagauccuucccaauuug

SEQ ID NO: 284638 - RNA, 19 nt, Homo sapiens
  misc_RNA (1)...(19): siRNA sense strand
gguauuggcccagaaauuu

SEQ ID NO: 284639 - RNA, 19 nt, Homo sapiens
  misc_RNA (1)...(19): siRNA sense strand
ccaauuugauguucuuguu

SEQ ID NO: 284640 - RNA, 19 nt, Homo sapiens
  misc_RNA (1)...(19): siRNA sense strand
ggucacccaucuaugaauu

SEQ ID NO: 284641 - RNA, 19 nt, Homo sapiens
  misc_RNA (1)...(19): siRNA sense strand
gcagggaaguugcagaaag

SEQ ID NO: 284642 - RNA, 19 nt, Homo sapiens
  misc_RNA (1)...(19): siRNA sense strand
gacaguaacuuuaauucca

SEQ ID NO: 284643 - RNA, 19 nt, Homo sapiens
  misc_RNA (1)...(19): siRNA sense strand
aaugagauguaccuugaua

SEQ ID NO: 284644 - RNA, 19 nt, Homo sapiens
  misc_RNA (1)...(19): siRNA sense strand
ucacccaucuaugaauuua

SEQ ID NO: 284645 - RNA, 19 nt, Homo sapiens
  misc_RNA (1)...(19): siRNA sense strand
ucaaggaccuggaggaaag

SEQ ID NO: 284646 - RNA, 19 nt, Homo sapiens
  misc_RNA (1)...(19): siRNA sense strand
gaaauuucagcugcaguua

SEQ ID NO: 284647 - RNA, 19 nt, Homo sapiens
  misc_RNA (1)...(19): siRNA sense strand
ugaccaugcugcaagaauu

SEQ ID NO: 284648 - RNA, 19 nt, Homo sapiens
  misc_RNA (1)...(19): siRNA sense strand
gcaaggacauggcgaaucc

SEQ ID NO: 284649 - RNA, 19 nt, Homo sapiens
  misc_RNA (1)...(19): siRNA sense strand
ugacuugugugcaggauug

SEQ ID NO: 284650 - RNA, 19 nt, Homo sapiens
  misc_RNA (1)...(19): siRNA sense strand
guucagacaguaacuuuaa

SEQ ID NO: 284651 - RNA, 19 nt, Homo sapiens
  misc_RNA (1)...(19): siRNA sense strand
gaaagagcuugacaaaaga

SEQ ID NO: 284652 - RNA, 19 nt, Homo sapiens
  misc_RNA (1)...(19): siRNA sense strand
gaaaucugucgccgaguaa

SEQ ID NO: 284653 - RNA, 19 nt, Homo sapiens
  misc_RNA (1)...(19): siRNA sense strand
guaaauauugugaccauuc

SEQ ID NO: 284654 - RNA, 19 nt, Homo sapiens
  misc_RNA (1)...(19): siRNA sense strand
uacaagauccuucccaauu

SEQ ID NO: 284655 - RNA, 19 nt, Homo sapiens
  misc_RNA (1)...(19): siRNA sense strand
gagaauacaguggaauuga

SEQ ID NO: 284656 - RNA, 19 nt, Homo sapiens
  misc_RNA (1)...(19): siRNA sense strand
caagcgcauugcugaguuu

SEQ ID NO: 284657 - RNA, 19 nt, Homo sapiens
  misc_RNA (1)...(19): siRNA sense strand
ccaaugggguugcaauuuu

SEQ ID NO: 284658 - RNA, 19 nt, Homo sapiens
  misc_RNA (1)...(19): siRNA sense strand
gacaccaaguggcaacauu

SEQ ID NO: 284659 - RNA, 19 nt, Homo sapiens
  misc_RNA (1)...(19): siRNA sense strand
aagaguccauggauaagaa

SEQ ID NO: 284660 - RNA, 19 nt, Homo sapiens
  misc_RNA (1)...(19): siRNA sense strand
gaccaugugucucuaucga

SEQ ID NO: 284661 - RNA, 19 nt, Homo sapiens
  misc_RNA (1)...(19): siRNA sense strand
cagcugcaguuaugaagau

SEQ ID NO: 284662 - RNA, 19 nt, Homo sapiens
  misc_RNA (1)...(19): siRNA sense strand
gauggagucgugcagagua

SEQ ID NO: 284663 - RNA, 19 nt, Homo sapiens
  misc_RNA (1)...(19): siRNA sense strand
ggagaauacaguggaauug

SEQ ID NO: 284664 - RNA, 19 nt, Homo sapiens
  misc_RNA (1)...(19): siRNA sense strand
ggagacauccuuagugacu

SEQ ID NO: 284665 - RNA, 19 nt, Homo sapiens
  misc_RNA (1)...(19): siRNA sense strand
guuugaauaugguacaaga

SEQ ID NO: 284666 - RNA, 19 nt, Homo sapiens
  misc_RNA (1)...(19): siRNA sense strand
agacauccuuagugacuug

SEQ ID NO: 284667 - RNA, 19 nt, Homo sapiens
  misc_RNA (1)...(19): siRNA sense strand
gcaugugauuguugaugga

SEQ ID NO: 284668 - RNA, 19 nt, Homo sapiens
  misc_RNA (1)...(19): siRNA sense strand
ugggacggcuccagacauu

SEQ ID NO: 284669 - RNA, 19 nt, Homo sapiens
  misc_RNA (1)...(19): siRNA sense strand
gaaguugcagaaagcugua

SEQ ID NO: 284670 - RNA, 19 nt, Homo sapiens
  misc_RNA (1)...(19): siRNA sense strand
aauuucagcugcaguuaug

SEQ ID NO: 284671 - RNA, 19 nt, Homo sapiens
  misc_RNA (1)...(19): siRNA sense strand
uugcugaguuugccuuuga

SEQ ID NO: 284672 - RNA, 19 nt, Homo sapiens
  misc_RNA (1)...(19): siRNA sense strand
gcgaauguccgaccaugug

SEQ ID NO: 284673 - RNA, 19 nt, Homo sapiens
  misc_RNA (1)...(19): siRNA sense strand
ugaguuugccuuugaguau

SEQ ID NO: 284674 - RNA, 19 nt, Homo sapiens
  misc_RNA (1)...(19): siRNA sense strand
acaccgauguaaauauugu

SEQ ID NO: 284675 - RNA, 19 nt, Homo sapiens
  misc_RNA (1)...(19): siRNA sense strand
gcaaaaugcucagacuuca

SEQ ID NO: 284676 - RNA, 19 nt, Homo sapiens
  misc_RNA (1)...(19): siRNA sense strand
ggaauugagcaugugauug

SEQ ID NO: 284677 - RNA, 19 nt, Homo sapiens
  misc_RNA (1)...(19): siRNA sense strand
gaguuugccuuugaguaug

SEQ ID NO: 284678 - RNA, 19 nt, Homo sapiens
  misc_RNA (1)...(19): siRNA sense strand
gaccaugcugcaagaauug

SEQ ID NO: 284679 - RNA, 19 nt, Homo sapiens
  misc_RNA (1)...(19): siRNA sense strand
gccggucacccaucuauga

SEQ ID NO: 284680 - RNA, 19 nt, Homo sapiens
  misc_RNA (1)...(19): siRNA sense strand
auggagacauccuuaguga

SEQ ID NO: 284681 - RNA, 19 nt, Homo sapiens
  misc_RNA (1)...(19): siRNA sense strand
aaauuuguauggagacauc

SEQ ID NO: 284682 - RNA, 19 nt, Homo sapiens
  misc_RNA (1)...(19): siRNA sense strand
acaguggaauugagcaugu

SEQ ID NO: 284683 - RNA, 19 nt, Homo sapiens
  misc_RNA (1)...(19): siRNA sense strand
uaaauauugugaccauucg

SEQ ID NO: 284684 - RNA, 19 nt, Homo sapiens
  misc_RNA (1)...(19): siRNA sense strand
gaugguauuggcccagaaa

SEQ ID NO: 284685 - RNA, 19 nt, Homo sapiens
  misc_RNA (1)...(19): siRNA sense strand
guacaagauccuucccaau

SEQ ID NO: 284686 - RNA, 19 nt, Homo sapiens
  misc_RNA (1)...(19): siRNA sense strand
ggacggaaagagcuugaca

SEQ ID NO: 284687 - RNA, 19 nt, Homo sapiens
  misc_RNA (1)...(19): siRNA sense strand
agaauacaguggaauugag

SEQ ID NO: 284688 - RNA, 19 nt, Homo sapiens
  misc_RNA (1)...(19): siRNA sense strand
gagacauccuuagugacuu

SEQ ID NO: 284689 - RNA, 19 nt, Homo sapiens
  misc_RNA (1)...(19): siRNA sense strand
ucacggcggugcacaaagc

SEQ ID NO: 284690 - RNA, 19 nt, Homo sapiens
  misc_RNA (1)...(19): siRNA sense strand
cagaguaucaagcucauca

SEQ ID NO: 284691 - RNA, 19 nt, Homo sapiens
  misc_RNA (1)...(19): siRNA sense strand
ccgcguggaucucuaaggu

SEQ ID NO: 284692 - RNA, 19 nt, Homo sapiens
  misc_RNA (1)...(19): siRNA sense strand
aaacaggugaccagagguu

SEQ ID NO: 284693 - RNA, 19 nt, Homo sapiens
  misc_RNA (1)...(19): siRNA sense strand
agagaacacagaaggagaa

SEQ ID NO: 284694 - RNA, 19 nt, Homo sapiens
  misc_RNA (1)...(19): siRNA sense strand
gcucagugccgugaugaug

SEQ ID NO: 284695 - RNA, 19 nt, Homo sapiens
  misc_RNA (1)...(19): siRNA sense strand
cagaaagcuguaaagauau

SEQ ID NO: 284696 - RNA, 19 nt, Homo sapiens
  misc_RNA (1)...(19): siRNA sense strand
gggcauuccacaacccaaa

SEQ ID NO: 284697 - RNA, 19 nt, Homo sapiens
  misc_RNA (1)...(19): siRNA sense strand
gagcaugugauuguugaug

SEQ ID NO: 284698 - RNA, 19 nt, Homo sapiens
  misc_RNA (1)...(19): siRNA sense strand
acaguauguuugaauaugg

SEQ ID NO: 284699 - RNA, 19 nt, Homo sapiens
  misc_RNA (1)...(19): siRNA sense strand
agaaauuucagcugcaguu

SEQ ID NO: 284700 - RNA, 19 nt, Homo sapiens
  misc_RNA (1)...(19): siRNA sense strand
cagggaaguugcagaaagc

SEQ ID NO: 284701 - RNA, 19 nt, Homo sapiens
  misc_RNA (1)...(19): siRNA sense strand
ggaacaaccaccggagcaa

SEQ ID NO: 284702 - RNA, 19 nt, Homo sapiens
  misc_RNA (1)...(19): siRNA sense strand
uugagcaugugauuguuga

SEQ ID NO: 284703 - RNA, 19 nt, Homo sapiens
  misc_RNA (1)...(19): siRNA sense strand
acggaaagagcuugacaaa

SEQ ID NO: 284704 - RNA, 19 nt, Homo sapiens
  misc_RNA (1)...(19): siRNA sense strand
ggacggcuccagacauugc

SEQ ID NO: 284705 - RNA, 19 nt, Homo sapiens
  misc_RNA (1)...(19): siRNA sense strand
ggagucgugcagaguauca

SEQ ID NO: 284706 - RNA, 19 nt, Homo sapiens
  misc_RNA (1)...(19): siRNA sense strand
ccaaauuuguauggagaca

SEQ ID NO: 284707 - RNA, 19 nt, Homo sapiens
  misc_RNA (1)...(19): siRNA sense strand
guucuuguuaugccaaauu

SEQ ID NO: 284708 - RNA, 19 nt, Homo sapiens
  misc_RNA (1)...(19): siRNA sense strand
guauuggcccagaaauuuc

SEQ ID NO: 284709 - RNA, 19 nt, Homo sapiens
  misc_RNA (1)...(19): siRNA sense strand
gaauuuacugcugcgcaaa

SEQ ID NO: 284710 - RNA, 19 nt, Homo sapiens
  misc_RNA (1)...(19): siRNA sense strand
ggaacgucacugccauuca

SEQ ID NO: 284711 - RNA, 19 nt, Homo sapiens
  misc_RNA (1)...(19): siRNA sense strand
gauccuucccaauuugaug

SEQ ID NO: 284712 - RNA, 19 nt, Homo sapiens
  misc_RNA (1)...(19): siRNA sense strand
cauccuuagugacuugugu

SEQ ID NO: 284713 - RNA, 19 nt, Homo sapiens
  misc_RNA (1)...(19): siRNA sense strand
guauggagacauccuuagu

SEQ ID NO: 284714 - RNA, 19 nt, Homo sapiens
  misc_RNA (1)...(19): siRNA sense strand
cagacaguaacuuuaauuc

SEQ ID NO: 284715 - RNA, 19 nt, Homo sapiens
  misc_RNA (1)...(19): siRNA sense strand
guguucagacaguaacuuu

SEQ ID NO: 284716 - RNA, 19 nt, Homo sapiens
  misc_RNA (1)...(19): siRNA sense strand
acaccaaguggcaacauug

SEQ ID NO: 284717 - RNA, 19 nt, Homo sapiens
  misc_RNA (1)...(19): siRNA sense strand
ccauggauaagaacaagau

SEQ ID NO: 284718 - RNA, 19 nt, Homo sapiens
  misc_RNA (1)...(19): siRNA sense strand
gccaaagcaccuauucagu

SEQ ID NO: 284719 - RNA, 19 nt, Homo sapiens
  misc_RNA (1)...(19): siRNA sense strand
gugcacaaagccaacauca

SEQ ID NO: 284720 - RNA, 19 nt, Homo sapiens
  misc_RNA (1)...(19): siRNA sense strand
aaagaguccauggauaaga

SEQ ID NO: 284721 - RNA, 19 nt, Homo sapiens
  misc_RNA (1)...(19): siRNA sense strand
ggugguguucagacaguaa

SEQ ID NO: 284722 - RNA, 19 nt, Homo sapiens
  misc_RNA (1)...(19): siRNA sense strand
uggaauugagcaugugauu

SEQ ID NO: 284723 - RNA, 19 nt, Homo sapiens
  misc_RNA (1)...(19): siRNA sense strand
cuacaauuaaggacggaaa

SEQ ID NO: 284724 - RNA, 19 nt, Homo sapiens
  misc_RNA (1)...(19): siRNA sense strand
ggaggucacuuaccgacua

SEQ ID NO: 284725 - RNA, 19 nt, Homo sapiens
  misc_RNA (1)...(19): siRNA sense strand
ggauauccagugaucguua

SEQ ID NO: 284726 - RNA, 19 nt, Homo sapiens
  misc_RNA (1)...(19): siRNA sense strand
cuagggaccugagaugcua

SEQ ID NO: 284727 - RNA, 19 nt, Homo sapiens
  misc_RNA (1)...(19): siRNA sense strand
acaucaagguguccaaguu

SEQ ID NO: 284728 - RNA, 19 nt, Homo sapiens
  misc_RNA (1)...(19): siRNA sense strand
gaaccagacguggcacauu

SEQ ID NO: 284729 - RNA, 19 nt, Homo sapiens
  misc_RNA (1)...(19): siRNA sense strand
gaaccagugagugcuguuu

SEQ ID NO: 284730 - RNA, 19 nt, Homo sapiens
  misc_RNA (1)...(19): siRNA sense strand
ccaggaaccagacagagaa

SEQ ID NO: 284731 - RNA, 19 nt, Homo sapiens
  misc_RNA (1)...(19): siRNA sense strand
aaccagacguggcacauuc

SEQ ID NO: 284732 - RNA, 19 nt, Homo sapiens
  misc_RNA (1)...(19): siRNA sense strand
gauauccagugaucguuac

SEQ ID NO: 284733 - RNA, 19 nt, Homo sapiens
  misc_RNA (1)...(19): siRNA sense strand
ccaccaggcugcaguucuc

SEQ ID NO: 284734 - RNA, 19 nt, Homo sapiens
  misc_RNA (1)...(19): siRNA sense strand
ugucugugcuguacacugu

SEQ ID NO: 284735 - RNA, 19 nt, Homo sapiens
  misc_RNA (1)...(19): siRNA sense strand
uuccugcgguguugccuua

SEQ ID NO: 284736 - RNA, 19 nt, Homo sapiens
  misc_RNA (1)...(19): siRNA sense strand
caucaagguguccaaguug

SEQ ID NO: 284737 - RNA, 19 nt, Homo sapiens
  misc_RNA (1)...(19): siRNA sense strand
ugaauguggcccaggaauu

SEQ ID NO: 284738 - RNA, 19 nt, Homo sapiens
  misc_RNA (1)...(19): siRNA sense strand
gacuacagcuccacaugcu

SEQ ID NO: 284739 - RNA, 19 nt, Homo sapiens
  misc_RNA (1)...(19): siRNA sense strand
caucuccucgaaccaauuu

SEQ ID NO: 284740 - RNA, 19 nt, Homo sapiens
  misc_RNA (1)...(19): siRNA sense strand
ggaaccagacagagaaguc

SEQ ID NO: 284741 - RNA, 19 nt, Homo sapiens
  misc_RNA (1)...(19): siRNA sense strand
gccaggaaccagacagaga

SEQ ID NO: 284742 - RNA, 19 nt, Homo sapiens
  misc_RNA (1)...(19): siRNA sense strand
gcggaccucaggaugauga

SEQ ID NO: 284743 - RNA, 19 nt, Homo sapiens
  misc_RNA (1)...(19): siRNA sense strand
ggaccucaggaugaugaua

SEQ ID NO: 284744 - RNA, 19 nt, Homo sapiens
  misc_RNA (1)...(19): siRNA sense strand
cagcagcccauggaaguug

SEQ ID NO: 284745 - RNA, 19 nt, Homo sapiens
  misc_RNA (1)...(19): siRNA sense strand
cgagugcuccuggcaguau

SEQ ID NO: 284746 - RNA, 19 nt, Homo sapiens
  misc_RNA (1)...(19): siRNA sense strand
gaccucaggaugaugauac

SEQ ID NO: 284747 - RNA, 19 nt, Homo sapiens
  misc_RNA (1)...(19): siRNA sense strand
gaggucacuuaccgacuac

SEQ ID NO: 284748 - RNA, 19 nt, Homo sapiens
  misc_RNA (1)...(19): siRNA sense strand
gaugaauguggcccaggaa

SEQ ID NO: 284749 - RNA, 19 nt, Homo sapiens
  misc_RNA (1)...(19): siRNA sense strand
ggaggucacuuaccgacua

SEQ ID NO: 284750 - RNA, 19 nt, Homo sapiens
  misc_RNA (1)...(19): siRNA sense strand
ggauauccagugaucguua

SEQ ID NO: 284751 - RNA, 19 nt, Homo sapiens
  misc_RNA (1)...(19): siRNA sense strand
cuagggaccugagaugcua

SEQ ID NO: 284752 - RNA, 19 nt, Homo sapiens
  misc_RNA (1)...(19): siRNA sense strand
acaucaagguguccaaguu

SEQ ID NO: 284753 - RNA, 19 nt, Homo sapiens
  misc_RNA (1)...(19): siRNA sense strand
gaaccagacguggcacauu

SEQ ID NO: 284754 - RNA, 19 nt, Homo sapiens
  misc_RNA (1)...(19): siRNA sense strand
gaaccagugagugcuguuu

SEQ ID NO: 284755 - RNA, 19 nt, Homo sapiens
  misc_RNA (1)...(19): siRNA sense strand
ccaggaaccagacagagaa

SEQ ID NO: 284756 - RNA, 19 nt, Homo sapiens
  misc_RNA (1)...(19): siRNA sense strand
aaccagacguggcacauuc

SEQ ID NO: 284757 - RNA, 19 nt, Homo sapiens
  misc_RNA (1)...(19): siRNA sense strand
gauauccagugaucguuac

SEQ ID NO: 284758 - RNA, 19 nt, Homo sapiens
  misc_RNA (1)...(19): siRNA sense strand
ccaccaggcugcaguucuc

SEQ ID NO: 284759 - RNA, 19 nt, Homo sapiens
  misc_RNA (1)...(19): siRNA sense strand
ugucugugcuguacacugu

SEQ ID NO: 284760 - RNA, 19 nt, Homo sapiens
  misc_RNA (1)...(19): siRNA sense strand
uuccugcgguguugccuua

SEQ ID NO: 284761 - RNA, 19 nt, Homo sapiens
  misc_RNA (1)...(19): siRNA sense strand
caucaagguguccaaguug

SEQ ID NO: 284762 - RNA, 19 nt, Homo sapiens
  misc_RNA (1)...(19): siRNA sense strand
ugaauguggcccaggaauu

SEQ ID NO: 284763 - RNA, 19 nt, Homo sapiens
  misc_RNA (1)...(19): siRNA sense strand
gacuacagcuccacaugcu

SEQ ID NO: 284764 - RNA, 19 nt, Homo sapiens
  misc_RNA (1)...(19): siRNA sense strand
caucuccucgaaccaauuu

SEQ ID NO: 284765 - RNA, 19 nt, Homo sapiens
  misc_RNA (1)...(19): siRNA sense strand
ggaaccagacagagaaguc

SEQ ID NO: 284766 - RNA, 19 nt, Homo sapiens
  misc_RNA (1)...(19): siRNA sense strand
gccaggaaccagacagaga

SEQ ID NO: 284767 - RNA, 19 nt, Homo sapiens
  misc_RNA (1)...(19): siRNA sense strand
gcggaccucaggaugauga

SEQ ID NO: 284768 - RNA, 19 nt, Homo sapiens
  misc_RNA (1)...(19): siRNA sense strand
ggaccucaggaugaugaua

SEQ ID NO: 284769 - RNA, 19 nt, Homo sapiens
  misc_RNA (1)...(19): siRNA sense strand
cagcagcccauggaaguug

SEQ ID NO: 284770 - RNA, 19 nt, Homo sapiens
  misc_RNA (1)...(19): siRNA sense strand
cgagugcuccuggcaguau

SEQ ID NO: 284771 - RNA, 19 nt, Homo sapiens
  misc_RNA (1)...(19): siRNA sense strand
gaccucaggaugaugauac

SEQ ID NO: 284772 - RNA, 19 nt, Homo sapiens
  misc_RNA (1)...(19): siRNA sense strand
gaggucacuuaccgacuac

SEQ ID NO: 284773 - RNA, 19 nt, Homo sapiens
  misc_RNA (1)...(19): siRNA sense strand
gaugaauguggcccaggaa

SEQ ID NO: 284774 - RNA, 19 nt, Homo sapiens
  misc_RNA (1)...(19): siRNA sense strand
gcaaagcgaccuaaaauua

SEQ ID NO: 284775 - RNA, 19 nt, Homo sapiens
  misc_RNA (1)...(19): siRNA sense strand
ucgaagagcuacagaauau

SEQ ID NO: 284776 - RNA, 19 nt, Homo sapiens
  misc_RNA (1)...(19): siRNA sense strand
gaacacauagagugguuua

SEQ ID NO: 284777 - RNA, 19 nt, Homo sapiens
  misc_RNA (1)...(19): siRNA sense strand
gaaaguaacauacaguuca

SEQ ID NO: 284778 - RNA, 19 nt, Homo sapiens
  misc_RNA (1)...(19): siRNA sense strand
gaccagagcuucggauuca

SEQ ID NO: 284779 - RNA, 19 nt, Homo sapiens
  misc_RNA (1)...(19): siRNA sense strand
gggcaugaaaguugaauua

SEQ ID NO: 284780 - RNA, 19 nt, Homo sapiens
  misc_RNA (1)...(19): siRNA sense strand
gcaguuagccacaguaaau

SEQ ID NO: 284781 - RNA, 19 nt, Homo sapiens
  misc_RNA (1)...(19): siRNA sense strand
gaugaaggcuaugacaauu

SEQ ID NO: 284782 - RNA, 19 nt, Homo sapiens
  misc_RNA (1)...(19): siRNA sense strand
acagaagguugaacacaua

SEQ ID NO: 284783 - RNA, 19 nt, Homo sapiens
  misc_RNA (1)...(19): siRNA sense strand
ucauggagcuggugacuug

SEQ ID NO: 284784 - RNA, 19 nt, Homo sapiens
  misc_RNA (1)...(19): siRNA sense strand
gaacugaggagacuuccaa

SEQ ID NO: 284785 - RNA, 19 nt, Homo sapiens
  misc_RNA (1)...(19): siRNA sense strand
gaauuaagcacaguaaaug

SEQ ID NO: 284786 - RNA, 19 nt, Homo sapiens
  misc_RNA (1)...(19): siRNA sense strand
uaaagaagcaccugaaaca

SEQ ID NO: 284787 - RNA, 19 nt, Homo sapiens
  misc_RNA (1)...(19): siRNA sense strand
gcaugaaaguugaauuaag

SEQ ID NO: 284788 - RNA, 19 nt, Homo sapiens
  misc_RNA (1)...(19): siRNA sense strand
ugaaggcuaugacaauuau

SEQ ID NO: 284789 - RNA, 19 nt, Homo sapiens
  misc_RNA (1)...(19): siRNA sense strand
gauaagcagucuguucgaa

SEQ ID NO: 284790 - RNA, 19 nt, Homo sapiens
  misc_RNA (1)...(19): siRNA sense strand
guaaauguacgaacaacaa

SEQ ID NO: 284791 - RNA, 19 nt, Homo sapiens
  misc_RNA (1)...(19): siRNA sense strand
cagaauaugcuccaaagaa

SEQ ID NO: 284792 - RNA, 19 nt, Homo sapiens
  misc_RNA (1)...(19): siRNA sense strand
gauggcaguuacuaaagaa

SEQ ID NO: 284793 - RNA, 19 nt, Homo sapiens
  misc_RNA (1)...(19): siRNA sense strand
ugaugaugguucagaauuu

SEQ ID NO: 284794 - RNA, 19 nt, Homo sapiens
  misc_RNA (1)...(19): siRNA sense strand
agaaacaccuggagagcuu

SEQ ID NO: 284795 - RNA, 19 nt, Homo sapiens
  misc_RNA (1)...(19): siRNA sense strand
caagaaagauaagcagucu

SEQ ID NO: 284796 - RNA, 19 nt, Homo sapiens
  misc_RNA (1)...(19): siRNA sense strand
gaugaugguucagaauuuc

SEQ ID NO: 284797 - RNA, 19 nt, Homo sapiens
  misc_RNA (1)...(19): siRNA sense strand
gaacaaccccuucagaaug

SEQ ID NO: 284798 - RNA, 19 nt, Homo sapiens
  misc_RNA (1)...(19): siRNA sense strand
cacauagagugguuuagaa

SEQ ID NO: 284799 - RNA, 19 nt, Homo sapiens
  misc_RNA (1)...(19): siRNA sense strand
aaagacuuguuaggcauua

SEQ ID NO: 284800 - RNA, 19 nt, Homo sapiens
  misc_RNA (1)...(19): siRNA sense strand
gaaacagacacaucaccuu

SEQ ID NO: 284801 - RNA, 19 nt, Homo sapiens
  misc_RNA (1)...(19): siRNA sense strand
gaauaugcuccaaagaaga

SEQ ID NO: 284802 - RNA, 19 nt, Homo sapiens
  misc_RNA (1)...(19): siRNA sense strand
caugaaaguugaauuaagc

SEQ ID NO: 284803 - RNA, 19 nt, Homo sapiens
  misc_RNA (1)...(19): siRNA sense strand
agaauaugcuccaaagaag

SEQ ID NO: 284804 - RNA, 19 nt, Homo sapiens
  misc_RNA (1)...(19): siRNA sense strand
acacaucaccuucacuuug

SEQ ID NO: 284805 - RNA, 19 nt, Homo sapiens
  misc_RNA (1)...(19): siRNA sense strand
acccauaucuuaguguuaa

SEQ ID NO: 284806 - RNA, 19 nt, Homo sapiens
  misc_RNA (1)...(19): siRNA sense strand
uuaagggcaugaaaguuga

SEQ ID NO: 284807 - RNA, 19 nt, Homo sapiens
  misc_RNA (1)...(19): siRNA sense strand
cacaguaaauguacgaaca

SEQ ID NO: 284808 - RNA, 19 nt, Homo sapiens
  misc_RNA (1)...(19): siRNA sense strand
ugauggcaguuacuaaaga

SEQ ID NO: 284809 - RNA, 19 nt, Homo sapiens
  misc_RNA (1)...(19): siRNA sense strand
caugauggcaguuacuaaa

SEQ ID NO: 284810 - RNA, 19 nt, Homo sapiens
  misc_RNA (1)...(19): siRNA sense strand
gaagagcuacagaauaugc

SEQ ID NO: 284811 - RNA, 19 nt, Homo sapiens
  misc_RNA (1)...(19): siRNA sense strand
aaacccauaucuuaguguu

SEQ ID NO: 284812 - RNA, 19 nt, Homo sapiens
  misc_RNA (1)...(19): siRNA sense strand
uaugaaaguugccagaucu

SEQ ID NO: 284813 - RNA, 19 nt, Homo sapiens
  misc_RNA (1)...(19): siRNA sense strand
agugugaucuguagcaaga

SEQ ID NO: 284814 - RNA, 19 nt, Homo sapiens
  misc_RNA (1)...(19): siRNA sense strand
gagcuucggauucaguuug

SEQ ID NO: 284815 - RNA, 19 nt, Homo sapiens
  misc_RNA (1)...(19): siRNA sense strand
ucaguuugaugaaggcuau

SEQ ID NO: 284816 - RNA, 19 nt, Homo sapiens
  misc_RNA (1)...(19): siRNA sense strand
caaaagaagaccacuuaaa

SEQ ID NO: 284817 - RNA, 19 nt, Homo sapiens
  misc_RNA (1)...(19): siRNA sense strand
aaagauaagcagucuguuc

SEQ ID NO: 284818 - RNA, 19 nt, Homo sapiens
  misc_RNA (1)...(19): siRNA sense strand
ggaguucccaauuaacaau

SEQ ID NO: 284819 - RNA, 19 nt, Homo sapiens
  misc_RNA (1)...(19): siRNA sense strand
cagauucucucccuuuuga

SEQ ID NO: 284820 - RNA, 19 nt, Homo sapiens
  misc_RNA (1)...(19): siRNA sense strand
cacaucaccuucacuuugg

SEQ ID NO: 284821 - RNA, 19 nt, Homo sapiens
  misc_RNA (1)...(19): siRNA sense strand
aagaagcaccugaaacaga

SEQ ID NO: 284822 - RNA, 19 nt, Homo sapiens
  misc_RNA (1)...(19): siRNA sense strand
gauaagcaaacaaccaagu

SEQ ID NO: 284823 - RNA, 19 nt, Homo sapiens
  misc_RNA (1)...(19): siRNA sense strand
cgauuaugcuacucacugu

SEQ ID NO: 284824 - RNA, 19 nt, Homo sapiens
  misc_RNA (1)...(19): siRNA sense strand
agaaagauaagcagucugu

SEQ ID NO: 284825 - RNA, 19 nt, Homo sapiens
  misc_RNA (1)...(19): siRNA sense strand
gccaggagaagacggauga

SEQ ID NO: 284826 - RNA, 19 nt, Homo sapiens
  misc_RNA (1)...(19): siRNA sense strand
uacagaauaugcuccaaag

SEQ ID NO: 284827 - RNA, 19 nt, Homo sapiens
  misc_RNA (1)...(19): siRNA sense strand
acacauagagugguuuaga

SEQ ID NO: 284828 - RNA, 19 nt, Homo sapiens
  misc_RNA (1)...(19): siRNA sense strand
ggagagcuuuccaaaacaa

SEQ ID NO: 284829 - RNA, 19 nt, Homo sapiens
  misc_RNA (1)...(19): siRNA sense strand
ugaugaugaugguucagaa

SEQ ID NO: 284830 - RNA, 19 nt, Homo sapiens
  misc_RNA (1)...(19): siRNA sense strand
ggcaugaaaguugaauuaa

SEQ ID NO: 284831 - RNA, 19 nt, Homo sapiens
  misc_RNA (1)...(19): siRNA sense strand
uaagcagucuguucgaacu

SEQ ID NO: 284832 - RNA, 19 nt, Homo sapiens
  misc_RNA (1)...(19): siRNA sense strand
ugugaucuguagcaagaaa

SEQ ID NO: 284833 - RNA, 19 nt, Homo sapiens
  misc_RNA (1)...(19): siRNA sense strand
gacuuguuaggcauuauua

SEQ ID NO: 284834 - RNA, 19 nt, Homo sapiens
  misc_RNA (1)...(19): siRNA sense strand
gaagguugaacacauagag

SEQ ID NO: 284835 - RNA, 19 nt, Homo sapiens
  misc_RNA (1)...(19): siRNA sense strand
gacaugauggcaguuacua

SEQ ID NO: 284836 - RNA, 19 nt, Homo sapiens
  misc_RNA (1)...(19): siRNA sense strand
ugaugaaggcuaugacaau

SEQ ID NO: 284837 - RNA, 19 nt, Homo sapiens
  misc_RNA (1)...(19): siRNA sense strand
aaaguugccagaucugcua

SEQ ID NO: 284838 - RNA, 19 nt, Homo sapiens
  misc_RNA (1)...(19): siRNA sense strand
cuacagaauaugcuccaaa

SEQ ID NO: 284839 - RNA, 19 nt, Homo sapiens
  misc_RNA (1)...(19): siRNA sense strand
acacuuggcaggcuucgaa

SEQ ID NO: 284840 - RNA, 19 nt, Homo sapiens
  misc_RNA (1)...(19): siRNA sense strand
ggaccaauucgccacuuca

SEQ ID NO: 284841 - RNA, 19 nt, Homo sapiens
  misc_RNA (1)...(19): siRNA sense strand
acauagagugguuuagaaa

SEQ ID NO: 284842 - RNA, 19 nt, Homo sapiens
  misc_RNA (1)...(19): siRNA sense strand
gcuccaaagaagagaauug

SEQ ID NO: 284843 - RNA, 19 nt, Homo sapiens
  misc_RNA (1)...(19): siRNA sense strand
aacagaagguugaacacau

SEQ ID NO: 284844 - RNA, 19 nt, Homo sapiens
  misc_RNA (1)...(19): siRNA sense strand
acagucagguaccgcaguu

SEQ ID NO: 284845 - RNA, 19 nt, Homo sapiens
  misc_RNA (1)...(19): siRNA sense strand
gggcacagagagaugcaaa

SEQ ID NO: 284846 - RNA, 19 nt, Homo sapiens
  misc_RNA (1)...(19): siRNA sense strand
ccaagacagugaaaaggaa

SEQ ID NO: 284847 - RNA, 19 nt, Homo sapiens
  misc_RNA (1)...(19): siRNA sense strand
caaaagaggggaaacuaug

SEQ ID NO: 284848 - RNA, 19 nt, Homo sapiens
  misc_RNA (1)...(19): siRNA sense strand
agacacaucaccuucacuu

SEQ ID NO: 284849 - RNA, 19 nt, Homo sapiens
  misc_RNA (1)...(19): siRNA sense strand
uggcagauucucucccuuu

SEQ ID NO: 284850 - RNA, 19 nt, Homo sapiens
  misc_RNA (1)...(19): siRNA sense strand
uuaaacagaagguugaaca

SEQ ID NO: 284851 - RNA, 19 nt, Homo sapiens
  misc_RNA (1)...(19): siRNA sense strand
cagaucugcuacagcuaga

SEQ ID NO: 284852 - RNA, 19 nt, Homo sapiens
  misc_RNA (1)...(19): siRNA sense strand
auuaagggcaugaaaguug

SEQ ID NO: 284853 - RNA, 19 nt, Homo sapiens
  misc_RNA (1)...(19): siRNA sense strand
gaugaugaugguucagaau

SEQ ID NO: 284854 - RNA, 19 nt, Homo sapiens
  misc_RNA (1)...(19): siRNA sense strand
ggcaguuacuaaagaagca

SEQ ID NO: 284855 - RNA, 19 nt, Homo sapiens
  misc_RNA (1)...(19): siRNA sense strand
gagaugcaaagcgaccuaa

SEQ ID NO: 284856 - RNA, 19 nt, Homo sapiens
  misc_RNA (1)...(19): siRNA sense strand
gcacagagagaugcaaagc

SEQ ID NO: 284857 - RNA, 19 nt, Homo sapiens
  misc_RNA (1)...(19): siRNA sense strand
uaagcaaacaaccaaguca

SEQ ID NO: 284858 - RNA, 19 nt, Homo sapiens
  misc_RNA (1)...(19): siRNA sense strand
gauaugaaaguugccagau

SEQ ID NO: 284859 - RNA, 19 nt, Homo sapiens
  misc_RNA (1)...(19): siRNA sense strand
aaacagaagguugaacaca

SEQ ID NO: 284860 - RNA, 19 nt, Homo sapiens
  misc_RNA (1)...(19): siRNA sense strand
gaaacaccuggagagcuuu

SEQ ID NO: 284861 - RNA, 19 nt, Homo sapiens
  misc_RNA (1)...(19): siRNA sense strand
gacacaucaccuucacuuu

SEQ ID NO: 284862 - RNA, 19 nt, Homo sapiens
  misc_RNA (1)...(19): siRNA sense strand
guugaauuaagcacaguaa

SEQ ID NO: 284863 - RNA, 19 nt, Homo sapiens
  misc_RNA (1)...(19): siRNA sense strand
gaaagauaagcagucuguu

SEQ ID NO: 284864 - RNA, 19 nt, Homo sapiens
  misc_RNA (1)...(19): siRNA sense strand
cugaggagacuuccaagga

SEQ ID NO: 284865 - RNA, 19 nt, Homo sapiens
  misc_RNA (1)...(19): siRNA sense strand
cccaaaagaagaccacuua

SEQ ID NO: 284866 - RNA, 19 nt, Homo sapiens
  misc_RNA (1)...(19): siRNA sense strand
cauagagugguuuagaaau

SEQ ID NO: 284867 - RNA, 19 nt, Homo sapiens
  misc_RNA (1)...(19): siRNA sense strand
uugaacacauagagugguu

SEQ ID NO: 284868 - RNA, 19 nt, Homo sapiens
  misc_RNA (1)...(19): siRNA sense strand
cagagagccaagacaguga

SEQ ID NO: 284869 - RNA, 19 nt, Homo sapiens
  misc_RNA (1)...(19): siRNA sense strand
augaaggcuaugacaauua

SEQ ID NO: 284870 - RNA, 19 nt, Homo sapiens
  misc_RNA (1)...(19): siRNA sense strand
gaagagucaagggcacaga

SEQ ID NO: 284871 - RNA, 19 nt, Homo sapiens
  misc_RNA (1)...(19): siRNA sense strand
ugaagcagguuuugaugau

SEQ ID NO: 284872 - RNA, 19 nt, Homo sapiens
  misc_RNA (1)...(19): siRNA sense strand
auaugaaaguugccagauc

SEQ ID NO: 284873 - RNA, 19 nt, Homo sapiens
  misc_RNA (1)...(19): siRNA sense strand
guucccaauuaacaaugaa

SEQ ID NO: 284874 - RNA, 19 nt, Homo sapiens
  misc_RNA (1)...(19): siRNA sense strand
ggaaauggaugaagaaaga

SEQ ID NO: 284875 - RNA, 19 nt, Homo sapiens
  misc_RNA (1)...(19): siRNA sense strand
gaagcagucuccuuucuua

SEQ ID NO: 284876 - RNA, 19 nt, Homo sapiens
  misc_RNA (1)...(19): siRNA sense strand
gaucaaauauuggccauua

SEQ ID NO: 284877 - RNA, 19 nt, Homo sapiens
  misc_RNA (1)...(19): siRNA sense strand
gagaggagcuuaaagguau

SEQ ID NO: 284878 - RNA, 19 nt, Homo sapiens
  misc_RNA (1)...(19): siRNA sense strand
agacagggaucaaagauua

SEQ ID NO: 284879 - RNA, 19 nt, Homo sapiens
  misc_RNA (1)...(19): siRNA sense strand
gagaagaaacuccaaauuu

SEQ ID NO: 284880 - RNA, 19 nt, Homo sapiens
  misc_RNA (1)...(19): siRNA sense strand
gaggagaacuuggagauuu

SEQ ID NO: 284881 - RNA, 19 nt, Homo sapiens
  misc_RNA (1)...(19): siRNA sense strand
caagauuguugaacuagua

SEQ ID NO: 284882 - RNA, 19 nt, Homo sapiens
  misc_RNA (1)...(19): siRNA sense strand
cagaggaacuguuguagaa

SEQ ID NO: 284883 - RNA, 19 nt, Homo sapiens
  misc_RNA (1)...(19): siRNA sense strand
gguccuagcuugcucauug

SEQ ID NO: 284884 - RNA, 19 nt, Homo sapiens
  misc_RNA (1)...(19): siRNA sense strand
gcaugcagcuuuauggaaa

SEQ ID NO: 284885 - RNA, 19 nt, Homo sapiens
  misc_RNA (1)...(19): siRNA sense strand
aagaagaacuuguggauga

SEQ ID NO: 284886 - RNA, 19 nt, Homo sapiens
  misc_RNA (1)...(19): siRNA sense strand
ggaagauaaugaagaagaa

SEQ ID NO: 284887 - RNA, 19 nt, Homo sapiens
  misc_RNA (1)...(19): siRNA sense strand
gaaccaaggcgcacugaaa

SEQ ID NO: 284888 - RNA, 19 nt, Homo sapiens
  misc_RNA (1)...(19): siRNA sense strand
uauuggagaugaacucuua

SEQ ID NO: 284889 - RNA, 19 nt, Homo sapiens
  misc_RNA (1)...(19): siRNA sense strand
ucuaauaacucgacuguau

SEQ ID NO: 284890 - RNA, 19 nt, Homo sapiens
  misc_RNA (1)...(19): siRNA sense strand
acacacagauugcagauga

SEQ ID NO: 284891 - RNA, 19 nt, Homo sapiens
  misc_RNA (1)...(19): siRNA sense strand
gacaggaaaugauuauaga

SEQ ID NO: 284892 - RNA, 19 nt, Homo sapiens
  misc_RNA (1)...(19): siRNA sense strand
ggaaagguuuguuaguguu

SEQ ID NO: 284893 - RNA, 19 nt, Homo sapiens
  misc_RNA (1)...(19): siRNA sense strand
ucaauggcaugcagcuuua

SEQ ID NO: 284894 - RNA, 19 nt, Homo sapiens
  misc_RNA (1)...(19): siRNA sense strand
gggcagagucuuggaauua

SEQ ID NO: 284895 - RNA, 19 nt, Homo sapiens
  misc_RNA (1)...(19): siRNA sense strand
ggagggagcaagaagauuu

SEQ ID NO: 284896 - RNA, 19 nt, Homo sapiens
  misc_RNA (1)...(19): siRNA sense strand
acacagugguugcaugaua

SEQ ID NO: 284897 - RNA, 19 nt, Homo sapiens
  misc_RNA (1)...(19): siRNA sense strand
caacauacaagccuuagaa

SEQ ID NO: 284898 - RNA, 19 nt, Homo sapiens
  misc_RNA (1)...(19): siRNA sense strand
gcacauuauugaacuugaa

SEQ ID NO: 284899 - RNA, 19 nt, Homo sapiens
  misc_RNA (1)...(19): siRNA sense strand
gaaacuuccuccuccuuau

SEQ ID NO: 284900 - RNA, 19 nt, Homo sapiens
  misc_RNA (1)...(19): siRNA sense strand
gguggaagauaaugaagaa

SEQ ID NO: 284901 - RNA, 19 nt, Homo sapiens
  misc_RNA (1)...(19): siRNA sense strand
caagaagauuugccuuuau

SEQ ID NO: 284902 - RNA, 19 nt, Homo sapiens
  misc_RNA (1)...(19): siRNA sense strand
gacuguaucuggguuauuu

SEQ ID NO: 284903 - RNA, 19 nt, Homo sapiens
  misc_RNA (1)...(19): siRNA sense strand
auaaagcucugacugauga

SEQ ID NO: 284904 - RNA, 19 nt, Homo sapiens
  misc_RNA (1)...(19): siRNA sense strand
gaaguggauuccuuugaug

SEQ ID NO: 284905 - RNA, 19 nt, Homo sapiens
  misc_RNA (1)...(19): siRNA sense strand
gaaaccaccagcucucuuu

SEQ ID NO: 284906 - RNA, 19 nt, Homo sapiens
  misc_RNA (1)...(19): siRNA sense strand
gaacauuucccaucagcaa

SEQ ID NO: 284907 - RNA, 19 nt, Homo sapiens
  misc_RNA (1)...(19): siRNA sense strand
agacagagguugaccacaa

SEQ ID NO: 284908 - RNA, 19 nt, Homo sapiens
  misc_RNA (1)...(19): siRNA sense strand
guugggaaaugaagacuuu

SEQ ID NO: 284909 - RNA, 19 nt, Homo sapiens
  misc_RNA (1)...(19): siRNA sense strand
ggagaggagcuuaaaggua

SEQ ID NO: 284910 - RNA, 19 nt, Homo sapiens
  misc_RNA (1)...(19): siRNA sense strand
ugaugaagcuucuguagau

SEQ ID NO: 284911 - RNA, 19 nt, Homo sapiens
  misc_RNA (1)...(19): siRNA sense strand
gcaauugcauuauuacaac

SEQ ID NO: 284912 - RNA, 19 nt, Homo sapiens
  misc_RNA (1)...(19): siRNA sense strand
ggagguuguuugaugauga

SEQ ID NO: 284913 - RNA, 19 nt, Homo sapiens
  misc_RNA (1)...(19): siRNA sense strand
cuaaggaacugugggaauu

SEQ ID NO: 284914 - RNA, 19 nt, Homo sapiens
  misc_RNA (1)...(19): siRNA sense strand
ggaauguugucuucuagau

SEQ ID NO: 284915 - RNA, 19 nt, Homo sapiens
  misc_RNA (1)...(19): siRNA sense strand
gaagagguugagcucauua

SEQ ID NO: 284916 - RNA, 19 nt, Homo sapiens
  misc_RNA (1)...(19): siRNA sense strand
ggacaggaaaugauuauag

SEQ ID NO: 284917 - RNA, 19 nt, Homo sapiens
  misc_RNA (1)...(19): siRNA sense strand
cgucgaaguugguauuaaa

SEQ ID NO: 284918 - RNA, 19 nt, Homo sapiens
  misc_RNA (1)...(19): siRNA sense strand
gcaccgaaccuauuaguag

SEQ ID NO: 284919 - RNA, 19 nt, Homo sapiens
  misc_RNA (1)...(19): siRNA sense strand
ggagaugcaugaauuucug

SEQ ID NO: 284920 - RNA, 19 nt, Homo sapiens
  misc_RNA (1)...(19): siRNA sense strand
gaugaaccauuucuagauc

SEQ ID NO: 284921 - RNA, 19 nt, Homo sapiens
  misc_RNA (1)...(19): siRNA sense strand
gguuugggauucagcauuu

SEQ ID NO: 284922 - RNA, 19 nt, Homo sapiens
  misc_RNA (1)...(19): siRNA sense strand
caaagcugcugccuauuca

SEQ ID NO: 284923 - RNA, 19 nt, Homo sapiens
  misc_RNA (1)...(19): siRNA sense strand
gaagauugguggcacaaac

SEQ ID NO: 284924 - RNA, 19 nt, Homo sapiens
  misc_RNA (1)...(19): siRNA sense strand
aaacgaggaugcagucaau

SEQ ID NO: 284925 - RNA, 19 nt, Homo sapiens
  misc_RNA (1)...(19): siRNA sense strand
gaagacgaacgcacuuaaa

SEQ ID NO: 284926 - RNA, 19 nt, Homo sapiens
  misc_RNA (1)...(19): siRNA sense strand
ggaagacgaacgcacuuaa

SEQ ID NO: 284927 - RNA, 19 nt, Homo sapiens
  misc_RNA (1)...(19): siRNA sense strand
caggaacaauucaugauau

SEQ ID NO: 284928 - RNA, 19 nt, Homo sapiens
  misc_RNA (1)...(19): siRNA sense strand
aaagaccgaucacgcauga

SEQ ID NO: 284929 - RNA, 19 nt, Homo sapiens
  misc_RNA (1)...(19): siRNA sense strand
ggagaacugcacauuauug

SEQ ID NO: 284930 - RNA, 19 nt, Homo sapiens
  misc_RNA (1)...(19): siRNA sense strand
guugaaguauuacgaaaug

SEQ ID NO: 284931 - RNA, 19 nt, Homo sapiens
  misc_RNA (1)...(19): siRNA sense strand
ggaguagauuugcagaaug

SEQ ID NO: 284932 - RNA, 19 nt, Homo sapiens
  misc_RNA (1)...(19): siRNA sense strand
gaaggaaacagucaacaag

SEQ ID NO: 284933 - RNA, 19 nt, Homo sapiens
  misc_RNA (1)...(19): siRNA sense strand
gaaaugaagacuuuaacuc

SEQ ID NO: 284934 - RNA, 19 nt, Homo sapiens
  misc_RNA (1)...(19): siRNA sense strand
gaauguugucuucuagaua

SEQ ID NO: 284935 - RNA, 19 nt, Homo sapiens
  misc_RNA (1)...(19): siRNA sense strand
guaaugaagacaagacuga

SEQ ID NO: 284936 - RNA, 19 nt, Homo sapiens
  misc_RNA (1)...(19): siRNA sense strand
ggaugucaauacugaagaa

SEQ ID NO: 284937 - RNA, 19 nt, Homo sapiens
  misc_RNA (1)...(19): siRNA sense strand
gggaaccaguccacacaaa

SEQ ID NO: 284938 - RNA, 19 nt, Homo sapiens
  misc_RNA (1)...(19): siRNA sense strand
gaacuucacuuugguacac

SEQ ID NO: 284939 - RNA, 19 nt, Homo sapiens
  misc_RNA (1)...(19): siRNA sense strand
ccugggagaugcaugaauu

SEQ ID NO: 284940 - RNA, 19 nt, Homo sapiens
  misc_RNA (1)...(19): siRNA sense strand
ucuagcagccuaaaugaua

SEQ ID NO: 284941 - RNA, 19 nt, Homo sapiens
  misc_RNA (1)...(19): siRNA sense strand
gugaagaugaggaaauuaa

SEQ ID NO: 284942 - RNA, 19 nt, Homo sapiens
  misc_RNA (1)...(19): siRNA sense strand
gaacuccagccacgaagaa

SEQ ID NO: 284943 - RNA, 19 nt, Homo sapiens
  misc_RNA (1)...(19): siRNA sense strand
caucauaccauucaacaga

SEQ ID NO: 284944 - RNA, 19 nt, Homo sapiens
  misc_RNA (1)...(19): siRNA sense strand
acaauugccugaaagugaa

SEQ ID NO: 284945 - RNA, 19 nt, Homo sapiens
  misc_RNA (1)...(19): siRNA sense strand
gcuuaaagguauauucauc

SEQ ID NO: 284946 - RNA, 19 nt, Homo sapiens
  misc_RNA (1)...(19): siRNA sense strand
acaggaauguugucuucua

SEQ ID NO: 284947 - RNA, 19 nt, Homo sapiens
  misc_RNA (1)...(19): siRNA sense strand
acacaggaauguugucuuc

SEQ ID NO: 284948 - RNA, 19 nt, Homo sapiens
  misc_RNA (1)...(19): siRNA sense strand
gcagagucuuggaauuaga

SEQ ID NO: 284949 - RNA, 19 nt, Homo sapiens
  misc_RNA (1)...(19): siRNA sense strand
gaucacgcaugagcauauu

SEQ ID NO: 284950 - RNA, 19 nt, Homo sapiens
  misc_RNA (1)...(19): siRNA sense strand
cuggagaacugcacauuau

SEQ ID NO: 284951 - RNA, 19 nt, Homo sapiens
  misc_RNA (1)...(19): siRNA sense strand
ugaagaagaagaugccuuu

SEQ ID NO: 284952 - RNA, 19 nt, Homo sapiens
  misc_RNA (1)...(19): siRNA sense strand
gaaccaggacacccaagaa

SEQ ID NO: 284953 - RNA, 19 nt, Homo sapiens
  misc_RNA (1)...(19): siRNA sense strand
cacagugguugcaugauaa

SEQ ID NO: 284954 - RNA, 19 nt, Homo sapiens
  misc_RNA (1)...(19): siRNA sense strand
caagggauuuagagaugaa

SEQ ID NO: 284955 - RNA, 19 nt, Homo sapiens
  misc_RNA (1)...(19): siRNA sense strand
auucaaagcugcugccuau

SEQ ID NO: 284956 - RNA, 19 nt, Homo sapiens
  misc_RNA (1)...(19): siRNA sense strand
cgaaguugguauuaaacaa

SEQ ID NO: 284957 - RNA, 19 nt, Homo sapiens
  misc_RNA (1)...(19): siRNA sense strand
gagaacugcacauuauuga

SEQ ID NO: 284958 - RNA, 19 nt, Homo sapiens
  misc_RNA (1)...(19): siRNA sense strand
ugaguuaccugagagagaa

SEQ ID NO: 284959 - RNA, 19 nt, Homo sapiens
  misc_RNA (1)...(19): siRNA sense strand
caauauggaugucaauacu

SEQ ID NO: 284960 - RNA, 19 nt, Homo sapiens
  misc_RNA (1)...(19): siRNA sense strand
gguagcagaugguguagca

SEQ ID NO: 284961 - RNA, 19 nt, Homo sapiens
  misc_RNA (1)...(19): siRNA sense strand
caucuucuauugaggauca

SEQ ID NO: 284962 - RNA, 19 nt, Homo sapiens
  misc_RNA (1)...(19): siRNA sense strand
gaacugcacauuauugaac

SEQ ID NO: 284963 - RNA, 19 nt, Homo sapiens
  misc_RNA (1)...(19): siRNA sense strand
gaagaagaagaugccuuua

SEQ ID NO: 284964 - RNA, 19 nt, Homo sapiens
  misc_RNA (1)...(19): siRNA sense strand
gagcuuaaagguauauuca

SEQ ID NO: 284965 - RNA, 19 nt, Homo sapiens
  misc_RNA (1)...(19): siRNA sense strand
cgacacgaguuauuuccaa

SEQ ID NO: 284966 - RNA, 19 nt, Homo sapiens
  misc_RNA (1)...(19): siRNA sense strand
aaacuagucuggauuuagg

SEQ ID NO: 284967 - RNA, 19 nt, Homo sapiens
  misc_RNA (1)...(19): siRNA sense strand
guccacaggcccucuaaua

SEQ ID NO: 284968 - RNA, 19 nt, Homo sapiens
  misc_RNA (1)...(19): siRNA sense strand
gagagaagaaggcgaagga

SEQ ID NO: 284969 - RNA, 19 nt, Homo sapiens
  misc_RNA (1)...(19): siRNA sense strand
caagaucccucaccaucca

SEQ ID NO: 284970 - RNA, 19 nt, Homo sapiens
  misc_RNA (1)...(19): siRNA sense strand
gagguuguuugaugaugaa

SEQ ID NO: 284971 - RNA, 19 nt, Homo sapiens
  misc_RNA (1)...(19): siRNA sense strand
ugucggagguuguuugaug

SEQ ID NO: 284972 - RNA, 19 nt, Homo sapiens
  misc_RNA (1)...(19): siRNA sense strand
uaauguggauggugaagau

SEQ ID NO: 284973 - RNA, 19 nt, Homo sapiens
  misc_RNA (1)...(19): siRNA sense strand
gccggcaaauugaauauau

SEQ ID NO: 284974 - RNA, 19 nt, Homo sapiens
  misc_RNA (1)...(19): siRNA sense strand
ggaaauggaugaagaaaga

SEQ ID NO: 284975 - RNA, 19 nt, Homo sapiens
  misc_RNA (1)...(19): siRNA sense strand
gaagcagucuccuuucuua

SEQ ID NO: 284976 - RNA, 19 nt, Homo sapiens
  misc_RNA (1)...(19): siRNA sense strand
gaucaaauauuggccauua

SEQ ID NO: 284977 - RNA, 19 nt, Homo sapiens
  misc_RNA (1)...(19): siRNA sense strand
gagaggagcuuaaagguau

SEQ ID NO: 284978 - RNA, 19 nt, Homo sapiens
  misc_RNA (1)...(19): siRNA sense strand
agacagggaucaaagauua

SEQ ID NO: 284979 - RNA, 19 nt, Homo sapiens
  misc_RNA (1)...(19): siRNA sense strand
gagaagaaacuccaaauuu

SEQ ID NO: 284980 - RNA, 19 nt, Homo sapiens
  misc_RNA (1)...(19): siRNA sense strand
gaggagaacuuggagauuu

SEQ ID NO: 284981 - RNA, 19 nt, Homo sapiens
  misc_RNA (1)...(19): siRNA sense strand
caagauuguugaacuagua

SEQ ID NO: 284982 - RNA, 19 nt, Homo sapiens
  misc_RNA (1)...(19): siRNA sense strand
cagaggaacuguuguagaa

SEQ ID NO: 284983 - RNA, 19 nt, Homo sapiens
  misc_RNA (1)...(19): siRNA sense strand
gguccuagcuugcucauug

SEQ ID NO: 284984 - RNA, 19 nt, Homo sapiens
  misc_RNA (1)...(19): siRNA sense strand
gcaugcagcuuuauggaaa

SEQ ID NO: 284985 - RNA, 19 nt, Homo sapiens
  misc_RNA (1)...(19): siRNA sense strand
aagaagaacuuguggauga

SEQ ID NO: 284986 - RNA, 19 nt, Homo sapiens
  misc_RNA (1)...(19): siRNA sense strand
ggaagauaaugaagaagaa

SEQ ID NO: 284987 - RNA, 19 nt, Homo sapiens
  misc_RNA (1)...(19): siRNA sense strand
gaaccaaggcgcacugaaa

SEQ ID NO: 284988 - RNA, 19 nt, Homo sapiens
  misc_RNA (1)...(19): siRNA sense strand
uauuggagaugaacucuua

SEQ ID NO: 284989 - RNA, 19 nt, Homo sapiens
  misc_RNA (1)...(19): siRNA sense strand
ucuaauaacucgacuguau

SEQ ID NO: 284990 - RNA, 19 nt, Homo sapiens
  misc_RNA (1)...(19): siRNA sense strand
acacacagauugcagauga

SEQ ID NO: 284991 - RNA, 19 nt, Homo sapiens
  misc_RNA (1)...(19): siRNA sense strand
gacaggaaaugauuauaga

SEQ ID NO: 284992 - RNA, 19 nt, Homo sapiens
  misc_RNA (1)...(19): siRNA sense strand
ggaaagguuuguuaguguu

SEQ ID NO: 284993 - RNA, 19 nt, Homo sapiens
  misc_RNA (1)...(19): siRNA sense strand
ucaauggcaugcagcuuua

SEQ ID NO: 284994 - RNA, 19 nt, Homo sapiens
  misc_RNA (1)...(19): siRNA sense strand
gggcagagucuuggaauua

SEQ ID NO: 284995 - RNA, 19 nt, Homo sapiens
  misc_RNA (1)...(19): siRNA sense strand
ggagggagcaagaagauuu

SEQ ID NO: 284996 - RNA, 19 nt, Homo sapiens
  misc_RNA (1)...(19): siRNA sense strand
acacagugguugcaugaua

SEQ ID NO: 284997 - RNA, 19 nt, Homo sapiens
  misc_RNA (1)...(19): siRNA sense strand
caacauacaagccuuagaa

SEQ ID NO: 284998 - RNA, 19 nt, Homo sapiens
  misc_RNA (1)...(19): siRNA sense strand
gcacauuauugaacuugaa

SEQ ID NO: 284999 - RNA, 19 nt, Homo sapiens
  misc_RNA (1)...(19): siRNA sense strand
gaaacuuccuccuccuuau

SEQ ID NO: 285000 - RNA, 19 nt, Homo sapiens
  misc_RNA (1)...(19): siRNA sense strand
gguggaagauaaugaagaa

SEQ ID NO: 285001 - RNA, 19 nt, Homo sapiens
  misc_RNA (1)...(19): siRNA sense strand
caagaagauuugccuuuau

SEQ ID NO: 285002 - RNA, 19 nt, Homo sapiens
  misc_RNA (1)...(19): siRNA sense strand
gacuguaucuggguuauuu

SEQ ID NO: 285003 - RNA, 19 nt, Homo sapiens
  misc_RNA (1)...(19): siRNA sense strand
auaaagcucugacugauga

SEQ ID NO: 285004 - RNA, 19 nt, Homo sapiens
  misc_RNA (1)...(19): siRNA sense strand
gaaguggauuccuuugaug

SEQ ID NO: 285005 - RNA, 19 nt, Homo sapiens
  misc_RNA (1)...(19): siRNA sense strand
gaaaccaccagcucucuuu

SEQ ID NO: 285006 - RNA, 19 nt, Homo sapiens
  misc_RNA (1)...(19): siRNA sense strand
gaacauuucccaucagcaa

SEQ ID NO: 285007 - RNA, 19 nt, Homo sapiens
  misc_RNA (1)...(19): siRNA sense strand
agacagagguugaccacaa

SEQ ID NO: 285008 - RNA, 19 nt, Homo sapiens
  misc_RNA (1)...(19): siRNA sense strand
guugggaaaugaagacuuu

SEQ ID NO: 285009 - RNA, 19 nt, Homo sapiens
  misc_RNA (1)...(19): siRNA sense strand
ggagaggagcuuaaaggua

SEQ ID NO: 285010 - RNA, 19 nt, Homo sapiens
  misc_RNA (1)...(19): siRNA sense strand
ugaugaagcuucuguagau

SEQ ID NO: 285011 - RNA, 19 nt, Homo sapiens
  misc_RNA (1)...(19): siRNA sense strand
gcaauugcauuauuacaac

SEQ ID NO: 285012 - RNA, 19 nt, Homo sapiens
  misc_RNA (1)...(19): siRNA sense strand
ggagguuguuugaugauga

SEQ ID NO: 285013 - RNA, 19 nt, Homo sapiens
  misc_RNA (1)...(19): siRNA sense strand
cuaaggaacugugggaauu

SEQ ID NO: 285014 - RNA, 19 nt, Homo sapiens
  misc_RNA (1)...(19): siRNA sense strand
ggaauguugucuucuagau

SEQ ID NO: 285015 - RNA, 19 nt, Homo sapiens
  misc_RNA (1)...(19): siRNA sense strand
gaagagguugagcucauua

SEQ ID NO: 285016 - RNA, 19 nt, Homo sapiens
  misc_RNA (1)...(19): siRNA sense strand
ggacaggaaaugauuauag

SEQ ID NO: 285017 - RNA, 19 nt, Homo sapiens
  misc_RNA (1)...(19): siRNA sense strand
cgucgaaguugguauuaaa

SEQ ID NO: 285018 - RNA, 19 nt, Homo sapiens
  misc_RNA (1)...(19): siRNA sense strand
gcaccgaaccuauuaguag

SEQ ID NO: 285019 - RNA, 19 nt, Homo sapiens
  misc_RNA (1)...(19): siRNA sense strand
ggagaugcaugaauuucug

SEQ ID NO: 285020 - RNA, 19 nt, Homo sapiens
  misc_RNA (1)...(19): siRNA sense strand
gaugaaccauuucuagauc

SEQ ID NO: 285021 - RNA, 19 nt, Homo sapiens
  misc_RNA (1)...(19): siRNA sense strand
gguuugggauucagcauuu

SEQ ID NO: 285022 - RNA, 19 nt, Homo sapiens
  misc_RNA (1)...(19): siRNA sense strand
caaagcugcugccuauuca

SEQ ID NO: 285023 - RNA, 19 nt, Homo sapiens
  misc_RNA (1)...(19): siRNA sense strand
gaagauugguggcacaaac

SEQ ID NO: 285024 - RNA, 19 nt, Homo sapiens
  misc_RNA (1)...(19): siRNA sense strand
aaacgaggaugcagucaau

SEQ ID NO: 285025 - RNA, 19 nt, Homo sapiens
  misc_RNA (1)...(19): siRNA sense strand
gaagacgaacgcacuuaaa

SEQ ID NO: 285026 - RNA, 19 nt, Homo sapiens
  misc_RNA (1)...(19): siRNA sense strand
ggaagacgaacgcacuuaa

SEQ ID NO: 285027 - RNA, 19 nt, Homo sapiens
  misc_RNA (1)...(19): siRNA sense strand
caggaacaauucaugauau

SEQ ID NO: 285028 - RNA, 19 nt, Homo sapiens
  misc_RNA (1)...(19): siRNA sense strand
aaagaccgaucacgcauga

SEQ ID NO: 285029 - RNA, 19 nt, Homo sapiens
  misc_RNA (1)...(19): siRNA sense strand
ggagaacugcacauuauug

SEQ ID NO: 285030 - RNA, 19 nt, Homo sapiens
  misc_RNA (1)...(19): siRNA sense strand
guugaaguauuacgaaaug

SEQ ID NO: 285031 - RNA, 19 nt, Homo sapiens
  misc_RNA (1)...(19): siRNA sense strand
ggaguagauuugcagaaug

SEQ ID NO: 285032 - RNA, 19 nt, Homo sapiens
  misc_RNA (1)...(19): siRNA sense strand
gaaggaaacagucaacaag

SEQ ID NO: 285033 - RNA, 19 nt, Homo sapiens
  misc_RNA (1)...(19): siRNA sense strand
gaaaugaagacuuuaacuc

SEQ ID NO: 285034 - RNA, 19 nt, Homo sapiens
  misc_RNA (1)...(19): siRNA sense strand
gaauguugucuucuagaua

SEQ ID NO: 285035 - RNA, 19 nt, Homo sapiens
  misc_RNA (1)...(19): siRNA sense strand
guaaugaagacaagacuga

SEQ ID NO: 285036 - RNA, 19 nt, Homo sapiens
  misc_RNA (1)...(19): siRNA sense strand
ggaugucaauacugaagaa

SEQ ID NO: 285037 - RNA, 19 nt, Homo sapiens
  misc_RNA (1)...(19): siRNA sense strand
gggaaccaguccacacaaa

SEQ ID NO: 285038 - RNA, 19 nt, Homo sapiens
  misc_RNA (1)...(19): siRNA sense strand
gaacuucacuuugguacac

SEQ ID NO: 285039 - RNA, 19 nt, Homo sapiens
  misc_RNA (1)...(19): siRNA sense strand
ccugggagaugcaugaauu

SEQ ID NO: 285040 - RNA, 19 nt, Homo sapiens
  misc_RNA (1)...(19): siRNA sense strand
ucuagcagccuaaaugaua

SEQ ID NO: 285041 - RNA, 19 nt, Homo sapiens
  misc_RNA (1)...(19): siRNA sense strand
gugaagaugaggaaauuaa

SEQ ID NO: 285042 - RNA, 19 nt, Homo sapiens
  misc_RNA (1)...(19): siRNA sense strand
gaacuccagccacgaagaa

SEQ ID NO: 285043 - RNA, 19 nt, Homo sapiens
  misc_RNA (1)...(19): siRNA sense strand
caucauaccauucaacaga

SEQ ID NO: 285044 - RNA, 19 nt, Homo sapiens
  misc_RNA (1)...(19): siRNA sense strand
acaauugccugaaagugaa

SEQ ID NO: 285045 - RNA, 19 nt, Homo sapiens
  misc_RNA (1)...(19): siRNA sense strand
gcuuaaagguauauucauc

SEQ ID NO: 285046 - RNA, 19 nt, Homo sapiens
  misc_RNA (1)...(19): siRNA sense strand
acaggaauguugucuucua

SEQ ID NO: 285047 - RNA, 19 nt, Homo sapiens
  misc_RNA (1)...(19): siRNA sense strand
acacaggaauguugucuuc

SEQ ID NO: 285048 - RNA, 19 nt, Homo sapiens
  misc_RNA (1)...(19): siRNA sense strand
gcagagucuuggaauuaga

SEQ ID NO: 285049 - RNA, 19 nt, Homo sapiens
  misc_RNA (1)...(19): siRNA sense strand
gaucacgcaugagcauauu

SEQ ID NO: 285050 - RNA, 19 nt, Homo sapiens
  misc_RNA (1)...(19): siRNA sense strand
cuggagaacugcacauuau

SEQ ID NO: 285051 - RNA, 19 nt, Homo sapiens
  misc_RNA (1)...(19): siRNA sense strand
ugaagaagaagaugccuuu

SEQ ID NO: 285052 - RNA, 19 nt, Homo sapiens
  misc_RNA (1)...(19): siRNA sense strand
gaaccaggacacccaagaa

SEQ ID NO: 285053 - RNA, 19 nt, Homo sapiens
  misc_RNA (1)...(19): siRNA sense strand
cacagugguugcaugauaa

SEQ ID NO: 285054 - RNA, 19 nt, Homo sapiens
  misc_RNA (1)...(19): siRNA sense strand
caagggauuuagagaugaa

SEQ ID NO: 285055 - RNA, 19 nt, Homo sapiens
  misc_RNA (1)...(19): siRNA sense strand
auucaaagcugcugccuau

SEQ ID NO: 285056 - RNA, 19 nt, Homo sapiens
  misc_RNA (1)...(19): siRNA sense strand
cgaaguugguauuaaacaa

SEQ ID NO: 285057 - RNA, 19 nt, Homo sapiens
  misc_RNA (1)...(19): siRNA sense strand
gagaacugcacauuauuga

SEQ ID NO: 285058 - RNA, 19 nt, Homo sapiens
  misc_RNA (1)...(19): siRNA sense strand
ugaguuaccugagagagaa

SEQ ID NO: 285059 - RNA, 19 nt, Homo sapiens
  misc_RNA (1)...(19): siRNA sense strand
caauauggaugucaauacu

SEQ ID NO: 285060 - RNA, 19 nt, Homo sapiens
  misc_RNA (1)...(19): siRNA sense strand
gguagcagaugguguagca

SEQ ID NO: 285061 - RNA, 19 nt, Homo sapiens
  misc_RNA (1)...(19): siRNA sense strand
caucuucuauugaggauca

SEQ ID NO: 285062 - RNA, 19 nt, Homo sapiens
  misc_RNA (1)...(19): siRNA sense strand
gaacugcacauuauugaac

SEQ ID NO: 285063 - RNA, 19 nt, Homo sapiens
  misc_RNA (1)...(19): siRNA sense strand
gaagaagaagaugccuuua

SEQ ID NO: 285064 - RNA, 19 nt, Homo sapiens
  misc_RNA (1)...(19): siRNA sense strand
gagcuuaaagguauauuca

SEQ ID NO: 285065 - RNA, 19 nt, Homo sapiens
  misc_RNA (1)...(19): siRNA sense strand
cgacacgaguuauuuccaa

SEQ ID NO: 285066 - RNA, 19 nt, Homo sapiens
  misc_RNA (1)...(19): siRNA sense strand
aaacuagucuggauuuagg

SEQ ID NO: 285067 - RNA, 19 nt, Homo sapiens
  misc_RNA (1)...(19): siRNA sense strand
guccacaggcccucuaaua

SEQ ID NO: 285068 - RNA, 19 nt, Homo sapiens
  misc_RNA (1)...(19): siRNA sense strand
gagagaagaaggcgaagga

SEQ ID NO: 285069 - RNA, 19 nt, Homo sapiens
  misc_RNA (1)...(19): siRNA sense strand
caagaucccucaccaucca

SEQ ID NO: 285070 - RNA, 19 nt, Homo sapiens
  misc_RNA (1)...(19): siRNA sense strand
gagguuguuugaugaugaa

SEQ ID NO: 285071 - RNA, 19 nt, Homo sapiens
  misc_RNA (1)...(19): siRNA sense strand
ugucggagguuguuugaug

SEQ ID NO: 285072 - RNA, 19 nt, Homo sapiens
  misc_RNA (1)...(19): siRNA sense strand
uaauguggauggugaagau

SEQ ID NO: 285073 - RNA, 19 nt, Homo sapiens
  misc_RNA (1)...(19): siRNA sense strand
gccggcaaauugaauauau

SEQ ID NO: 285074 - RNA, 19 nt, Homo sapiens
  misc_RNA (1)...(19): siRNA sense strand
ggaaauggaugaagaaaga

SEQ ID NO: 285075 - RNA, 19 nt, Homo sapiens
  misc_RNA (1)...(19): siRNA sense strand
gaagcagucuccuuucuua

SEQ ID NO: 285076 - RNA, 19 nt, Homo sapiens
  misc_RNA (1)...(19): siRNA sense strand
gaucaaauauuggccauua

SEQ ID NO: 285077 - RNA, 19 nt, Homo sapiens
  misc_RNA (1)...(19): siRNA sense strand
gagaggagcuuaaagguau

SEQ ID NO: 285078 - RNA, 19 nt, Homo sapiens
  misc_RNA (1)...(19): siRNA sense strand
agacagggaucaaagauua

SEQ ID NO: 285079 - RNA, 19 nt, Homo sapiens
  misc_RNA (1)...(19): siRNA sense strand
gagaagaaacuccaaauuu

SEQ ID NO: 285080 - RNA, 19 nt, Homo sapiens
  misc_RNA (1)...(19): siRNA sense strand
gaggagaacuuggagauuu

SEQ ID NO: 285081 - RNA, 19 nt, Homo sapiens
  misc_RNA (1)...(19): siRNA sense strand
caagauuguugaacuagua

SEQ ID NO: 285082 - RNA, 19 nt, Homo sapiens
  misc_RNA (1)...(19): siRNA sense strand
cagaggaacuguuguagaa

SEQ ID NO: 285083 - RNA, 19 nt, Homo sapiens
  misc_RNA (1)...(19): siRNA sense strand
gguccuagcuugcucauug

SEQ ID NO: 285084 - RNA, 19 nt, Homo sapiens
  misc_RNA (1)...(19): siRNA sense strand
gcaugcagcuuuauggaaa

SEQ ID NO: 285085 - RNA, 19 nt, Homo sapiens
  misc_RNA (1)...(19): siRNA sense strand
aagaagaacuuguggauga

SEQ ID NO: 285086 - RNA, 19 nt, Homo sapiens
  misc_RNA (1)...(19): siRNA sense strand
ggaagauaaugaagaagaa

SEQ ID NO: 285087 - RNA, 19 nt, Homo sapiens
  misc_RNA (1)...(19): siRNA sense strand
gaaccaaggcgcacugaaa

SEQ ID NO: 285088 - RNA, 19 nt, Homo sapiens
  misc_RNA (1)...(19): siRNA sense strand
uauuggagaugaacucuua

SEQ ID NO: 285089 - RNA, 19 nt, Homo sapiens
  misc_RNA (1)...(19): siRNA sense strand
ucuaauaacucgacuguau

SEQ ID NO: 285090 - RNA, 19 nt, Homo sapiens
  misc_RNA (1)...(19): siRNA sense strand
acacacagauugcagauga

SEQ ID NO: 285091 - RNA, 19 nt, Homo sapiens
  misc_RNA (1)...(19): siRNA sense strand
gacaggaaaugauuauaga

SEQ ID NO: 285092 - RNA, 19 nt, Homo sapiens
  misc_RNA (1)...(19): siRNA sense strand
ggaaagguuuguuaguguu

SEQ ID NO: 285093 - RNA, 19 nt, Homo sapiens
  misc_RNA (1)...(19): siRNA sense strand
ucaauggcaugcagcuuua

SEQ ID NO: 285094 - RNA, 19 nt, Homo sapiens
  misc_RNA (1)...(19): siRNA sense strand
gggcagagucuuggaauua

SEQ ID NO: 285095 - RNA, 19 nt, Homo sapiens
  misc_RNA (1)...(19): siRNA sense strand
ggagggagcaagaagauuu

SEQ ID NO: 285096 - RNA, 19 nt, Homo sapiens
  misc_RNA (1)...(19): siRNA sense strand
acacagugguugcaugaua

SEQ ID NO: 285097 - RNA, 19 nt, Homo sapiens
  misc_RNA (1)...(19): siRNA sense strand
caacauacaagccuuagaa

SEQ ID NO: 285098 - RNA, 19 nt, Homo sapiens
  misc_RNA (1)...(19): siRNA sense strand
gcacauuauugaacuugaa

SEQ ID NO: 285099 - RNA, 19 nt, Homo sapiens
  misc_RNA (1)...(19): siRNA sense strand
gaaacuuccuccuccuuau

SEQ ID NO: 285100 - RNA, 19 nt, Homo sapiens
  misc_RNA (1)...(19): siRNA sense strand
gguggaagauaaugaagaa

SEQ ID NO: 285101 - RNA, 19 nt, Homo sapiens
  misc_RNA (1)...(19): siRNA sense strand
caagaagauuugccuuuau

SEQ ID NO: 285102 - RNA, 19 nt, Homo sapiens
  misc_RNA (1)...(19): siRNA sense strand
gacuguaucuggguuauuu

SEQ ID NO: 285103 - RNA, 19 nt, Homo sapiens
  misc_RNA (1)...(19): siRNA sense strand
auaaagcucugacugauga

SEQ ID NO: 285104 - RNA, 19 nt, Homo sapiens
  misc_RNA (1)...(19): siRNA sense strand
gaaguggauuccuuugaug

SEQ ID NO: 285105 - RNA, 19 nt, Homo sapiens
  misc_RNA (1)...(19): siRNA sense strand
gaaaccaccagcucucuuu

SEQ ID NO: 285106 - RNA, 19 nt, Homo sapiens
  misc_RNA (1)...(19): siRNA sense strand
gaacauuucccaucagcaa

SEQ ID NO: 285107 - RNA, 19 nt, Homo sapiens
  misc_RNA (1)...(19): siRNA sense strand
agacagagguugaccacaa

SEQ ID NO: 285108 - RNA, 19 nt, Homo sapiens
  misc_RNA (1)...(19): siRNA sense strand
guugggaaaugaagacuuu

SEQ ID NO: 285109 - RNA, 19 nt, Homo sapiens
  misc_RNA (1)...(19): siRNA sense strand
ggagaggagcuuaaaggua

SEQ ID NO: 285110 - RNA, 19 nt, Homo sapiens
  misc_RNA (1)...(19): siRNA sense strand
ugaugaagcuucuguagau

SEQ ID NO: 285111 - RNA, 19 nt, Homo sapiens
  misc_RNA (1)...(19): siRNA sense strand
gcaauugcauuauuacaac

SEQ ID NO: 285112 - RNA, 19 nt, Homo sapiens
  misc_RNA (1)...(19): siRNA sense strand
ggagguuguuugaugauga

SEQ ID NO: 285113 - RNA, 19 nt, Homo sapiens
  misc_RNA (1)...(19): siRNA sense strand
cuaaggaacugugggaauu

SEQ ID NO: 285114 - RNA, 19 nt, Homo sapiens
  misc_RNA (1)...(19): siRNA sense strand
ggaauguugucuucuagau

SEQ ID NO: 285115 - RNA, 19 nt, Homo sapiens
  misc_RNA (1)...(19): siRNA sense strand
gaagagguugagcucauua

SEQ ID NO: 285116 - RNA, 19 nt, Homo sapiens
  misc_RNA (1)...(19): siRNA sense strand
ggacaggaaaugauuauag

SEQ ID NO: 285117 - RNA, 19 nt, Homo sapiens
  misc_RNA (1)...(19): siRNA sense strand
cgucgaaguugguauuaaa

SEQ ID NO: 285118 - RNA, 19 nt, Homo sapiens
  misc_RNA (1)...(19): siRNA sense strand
gcaccgaaccuauuaguag

SEQ ID NO: 285119 - RNA, 19 nt, Homo sapiens
  misc_RNA (1)...(19): siRNA sense strand
ggagaugcaugaauuucug

SEQ ID NO: 285120 - RNA, 19 nt, Homo sapiens
  misc_RNA (1)...(19): siRNA sense strand
gaugaaccauuucuagauc

SEQ ID NO: 285121 - RNA, 19 nt, Homo sapiens
  misc_RNA (1)...(19): siRNA sense strand
gguuugggauucagcauuu

SEQ ID NO: 285122 - RNA, 19 nt, Homo sapiens
  misc_RNA (1)...(19): siRNA sense strand
caaagcugcugccuauuca

SEQ ID NO: 285123 - RNA, 19 nt, Homo sapiens
  misc_RNA (1)...(19): siRNA sense strand
gaagauugguggcacaaac

SEQ ID NO: 285124 - RNA, 19 nt, Homo sapiens
  misc_RNA (1)...(19): siRNA sense strand
aaacgaggaugcagucaau

SEQ ID NO: 285125 - RNA, 19 nt, Homo sapiens
  misc_RNA (1)...(19): siRNA sense strand
gaagacgaacgcacuuaaa

SEQ ID NO: 285126 - RNA, 19 nt, Homo sapiens
  misc_RNA (1)...(19): siRNA sense strand
ggaagacgaacgcacuuaa

SEQ ID NO: 285127 - RNA, 19 nt, Homo sapiens
  misc_RNA (1)...(19): siRNA sense strand
caggaacaauucaugauau

SEQ ID NO: 285128 - RNA, 19 nt, Homo sapiens
  misc_RNA (1)...(19): siRNA sense strand
aaagaccgaucacgcauga

SEQ ID NO: 285129 - RNA, 19 nt, Homo sapiens
  misc_RNA (1)...(19): siRNA sense strand
ggagaacugcacauuauug

SEQ ID NO: 285130 - RNA, 19 nt, Homo sapiens
  misc_RNA (1)...(19): siRNA sense strand
guugaaguauuacgaaaug

SEQ ID NO: 285131 - RNA, 19 nt, Homo sapiens
  misc_RNA (1)...(19): siRNA sense strand
ggaguagauuugcagaaug

SEQ ID NO: 285132 - RNA, 19 nt, Homo sapiens
  misc_RNA (1)...(19): siRNA sense strand
gaaggaaacagucaacaag

SEQ ID NO: 285133 - RNA, 19 nt, Homo sapiens
  misc_RNA (1)...(19): siRNA sense strand
gaaaugaagacuuuaacuc

SEQ ID NO: 285134 - RNA, 19 nt, Homo sapiens
  misc_RNA (1)...(19): siRNA sense strand
gaauguugucuucuagaua

SEQ ID NO: 285135 - RNA, 19 nt, Homo sapiens
  misc_RNA (1)...(19): siRNA sense strand
guaaugaagacaagacuga

SEQ ID NO: 285136 - RNA, 19 nt, Homo sapiens
  misc_RNA (1)...(19): siRNA sense strand
ggaugucaauacugaagaa

SEQ ID NO: 285137 - RNA, 19 nt, Homo sapiens
  misc_RNA (1)...(19): siRNA sense strand
gggaaccaguccacacaaa

SEQ ID NO: 285138 - RNA, 19 nt, Homo sapiens
  misc_RNA (1)...(19): siRNA sense strand
gaacuucacuuugguacac

SEQ ID NO: 285139 - RNA, 19 nt, Homo sapiens
  misc_RNA (1)...(19): siRNA sense strand
ccugggagaugcaugaauu

SEQ ID NO: 285140 - RNA, 19 nt, Homo sapiens
  misc_RNA (1)...(19): siRNA sense strand
ucuagcagccuaaaugaua

SEQ ID NO: 285141 - RNA, 19 nt, Homo sapiens
  misc_RNA (1)...(19): siRNA sense strand
gugaagaugaggaaauuaa

SEQ ID NO: 285142 - RNA, 19 nt, Homo sapiens
  misc_RNA (1)...(19): siRNA sense strand
gaacuccagccacgaagaa

SEQ ID NO: 285143 - RNA, 19 nt, Homo sapiens
  misc_RNA (1)...(19): siRNA sense strand
caucauaccauucaacaga

SEQ ID NO: 285144 - RNA, 19 nt, Homo sapiens
  misc_RNA (1)...(19): siRNA sense strand
acaauugccugaaagugaa

SEQ ID NO: 285145 - RNA, 19 nt, Homo sapiens
  misc_RNA (1)...(19): siRNA sense strand
gcuuaaagguauauucauc

SEQ ID NO: 285146 - RNA, 19 nt, Homo sapiens
  misc_RNA (1)...(19): siRNA sense strand
acaggaauguugucuucua

SEQ ID NO: 285147 - RNA, 19 nt, Homo sapiens
  misc_RNA (1)...(19): siRNA sense strand
acacaggaauguugucuuc

SEQ ID NO: 285148 - RNA, 19 nt, Homo sapiens
  misc_RNA (1)...(19): siRNA sense strand
gcagagucuuggaauuaga

SEQ ID NO: 285149 - RNA, 19 nt, Homo sapiens
  misc_RNA (1)...(19): siRNA sense strand
gaucacgcaugagcauauu

SEQ ID NO: 285150 - RNA, 19 nt, Homo sapiens
  misc_RNA (1)...(19): siRNA sense strand
cuggagaacugcacauuau

SEQ ID NO: 285151 - RNA, 19 nt, Homo sapiens
  misc_RNA (1)...(19): siRNA sense strand
ugaagaagaagaugccuuu

SEQ ID NO: 285152 - RNA, 19 nt, Homo sapiens
  misc_RNA (1)...(19): siRNA sense strand
gaaccaggacacccaagaa

SEQ ID NO: 285153 - RNA, 19 nt, Homo sapiens
  misc_RNA (1)...(19): siRNA sense strand
cacagugguugcaugauaa

SEQ ID NO: 285154 - RNA, 19 nt, Homo sapiens
  misc_RNA (1)...(19): siRNA sense strand
caagggauuuagagaugaa

SEQ ID NO: 285155 - RNA, 19 nt, Homo sapiens
  misc_RNA (1)...(19): siRNA sense strand
auucaaagcugcugccuau

SEQ ID NO: 285156 - RNA, 19 nt, Homo sapiens
  misc_RNA (1)...(19): siRNA sense strand
cgaaguugguauuaaacaa

SEQ ID NO: 285157 - RNA, 19 nt, Homo sapiens
  misc_RNA (1)...(19): siRNA sense strand
gagaacugcacauuauuga

SEQ ID NO: 285158 - RNA, 19 nt, Homo sapiens
  misc_RNA (1)...(19): siRNA sense strand
ugaguuaccugagagagaa

SEQ ID NO: 285159 - RNA, 19 nt, Homo sapiens
  misc_RNA (1)...(19): siRNA sense strand
caauauggaugucaauacu

SEQ ID NO: 285160 - RNA, 19 nt, Homo sapiens
  misc_RNA (1)...(19): siRNA sense strand
gguagcagaugguguagca

SEQ ID NO: 285161 - RNA, 19 nt, Homo sapiens
  misc_RNA (1)...(19): siRNA sense strand
caucuucuauugaggauca

SEQ ID NO: 285162 - RNA, 19 nt, Homo sapiens
  misc_RNA (1)...(19): siRNA sense strand
gaacugcacauuauugaac

SEQ ID NO: 285163 - RNA, 19 nt, Homo sapiens
  misc_RNA (1)...(19): siRNA sense strand
gaagaagaagaugccuuua

SEQ ID NO: 285164 - RNA, 19 nt, Homo sapiens
  misc_RNA (1)...(19): siRNA sense strand
gagcuuaaagguauauuca

SEQ ID NO: 285165 - RNA, 19 nt, Homo sapiens
  misc_RNA (1)...(19): siRNA sense strand
cgacacgaguuauuuccaa

SEQ ID NO: 285166 - RNA, 19 nt, Homo sapiens
  misc_RNA (1)...(19): siRNA sense strand
aaacuagucuggauuuagg

SEQ ID NO: 285167 - RNA, 19 nt, Homo sapiens
  misc_RNA (1)...(19): siRNA sense strand
guccacaggcccucuaaua

SEQ ID NO: 285168 - RNA, 19 nt, Homo sapiens
  misc_RNA (1)...(19): siRNA sense strand
gagagaagaaggcgaagga

SEQ ID NO: 285169 - RNA, 19 nt, Homo sapiens
  misc_RNA (1)...(19): siRNA sense strand
caagaucccucaccaucca

SEQ ID NO: 285170 - RNA, 19 nt, Homo sapiens
  misc_RNA (1)...(19): siRNA sense strand
gagguuguuugaugaugaa

SEQ ID NO: 285171 - RNA, 19 nt, Homo sapiens
  misc_RNA (1)...(19): siRNA sense strand
ugucggagguuguuugaug

SEQ ID NO: 285172 - RNA, 19 nt, Homo sapiens
  misc_RNA (1)...(19): siRNA sense strand
uaauguggauggugaagau

SEQ ID NO: 285173 - RNA, 19 nt, Homo sapiens
  misc_RNA (1)...(19): siRNA sense strand
gccggcaaauugaauauau

SEQ ID NO: 285174 - RNA, 19 nt, Homo sapiens
  misc_RNA (1)...(19): siRNA sense strand
ggaaauggaugaagaaaga

SEQ ID NO: 285175 - RNA, 19 nt, Homo sapiens
  misc_RNA (1)...(19): siRNA sense strand
gaagcagucuccuuucuua

SEQ ID NO: 285176 - RNA, 19 nt, Homo sapiens
  misc_RNA (1)...(19): siRNA sense strand
gaucaaauauuggccauua

SEQ ID NO: 285177 - RNA, 19 nt, Homo sapiens
  misc_RNA (1)...(19): siRNA sense strand
gagaggagcuuaaagguau

SEQ ID NO: 285178 - RNA, 19 nt, Homo sapiens
  misc_RNA (1)...(19): siRNA sense strand
agacagggaucaaagauua

SEQ ID NO: 285179 - RNA, 19 nt, Homo sapiens
  misc_RNA (1)...(19): siRNA sense strand
gagaagaaacuccaaauuu

SEQ ID NO: 285180 - RNA, 19 nt, Homo sapiens
  misc_RNA (1)...(19): siRNA sense strand
gaggagaacuuggagauuu

SEQ ID NO: 285181 - RNA, 19 nt, Homo sapiens
  misc_RNA (1)...(19): siRNA sense strand
caagauuguugaacuagua

SEQ ID NO: 285182 - RNA, 19 nt, Homo sapiens
  misc_RNA (1)...(19): siRNA sense strand
cagaggaacuguuguagaa

SEQ ID NO: 285183 - RNA, 19 nt, Homo sapiens
  misc_RNA (1)...(19): siRNA sense strand
gguccuagcuugcucauug

SEQ ID NO: 285184 - RNA, 19 nt, Homo sapiens
  misc_RNA (1)...(19): siRNA sense strand
gcaugcagcuuuauggaaa

SEQ ID NO: 285185 - RNA, 19 nt, Homo sapiens
  misc_RNA (1)...(19): siRNA sense strand
aagaagaacuuguggauga

SEQ ID NO: 285186 - RNA, 19 nt, Homo sapiens
  misc_RNA (1)...(19): siRNA sense strand
ggaagauaaugaagaagaa

SEQ ID NO: 285187 - RNA, 19 nt, Homo sapiens
  misc_RNA (1)...(19): siRNA sense strand
gaaccaaggcgcacugaaa

SEQ ID NO: 285188 - RNA, 19 nt, Homo sapiens
  misc_RNA (1)...(19): siRNA sense strand
uauuggagaugaacucuua

SEQ ID NO: 285189 - RNA, 19 nt, Homo sapiens
  misc_RNA (1)...(19): siRNA sense strand
ucuaauaacucgacuguau

SEQ ID NO: 285190 - RNA, 19 nt, Homo sapiens
  misc_RNA (1)...(19): siRNA sense strand
acacacagauugcagauga

SEQ ID NO: 285191 - RNA, 19 nt, Homo sapiens
  misc_RNA (1)...(19): siRNA sense strand
gacaggaaaugauuauaga

SEQ ID NO: 285192 - RNA, 19 nt, Homo sapiens
  misc_RNA (1)...(19): siRNA sense strand
ggaaagguuuguuaguguu

SEQ ID NO: 285193 - RNA, 19 nt, Homo sapiens
  misc_RNA (1)...(19): siRNA sense strand
ucaauggcaugcagcuuua

SEQ ID NO: 285194 - RNA, 19 nt, Homo sapiens
  misc_RNA (1)...(19): siRNA sense strand
gggcagagucuuggaauua

SEQ ID NO: 285195 - RNA, 19 nt, Homo sapiens
  misc_RNA (1)...(19): siRNA sense strand
ggagggagcaagaagauuu

SEQ ID NO: 285196 - RNA, 19 nt, Homo sapiens
  misc_RNA (1)...(19): siRNA sense strand
acacagugguugcaugaua

SEQ ID NO: 285197 - RNA, 19 nt, Homo sapiens
  misc_RNA (1)...(19): siRNA sense strand
caacauacaagccuuagaa

SEQ ID NO: 285198 - RNA, 19 nt, Homo sapiens
  misc_RNA (1)...(19): siRNA sense strand
gcacauuauugaacuugaa

SEQ ID NO: 285199 - RNA, 19 nt, Homo sapiens
  misc_RNA (1)...(19): siRNA sense strand
gaaacuuccuccuccuuau

SEQ ID NO: 285200 - RNA, 19 nt, Homo sapiens
  misc_RNA (1)...(19): siRNA sense strand
gguggaagauaaugaagaa

SEQ ID NO: 285201 - RNA, 19 nt, Homo sapiens
  misc_RNA (1)...(19): siRNA sense strand
caagaagauuugccuuuau

SEQ ID NO: 285202 - RNA, 19 nt, Homo sapiens
  misc_RNA (1)...(19): siRNA sense strand
gacuguaucuggguuauuu

SEQ ID NO: 285203 - RNA, 19 nt, Homo sapiens
  misc_RNA (1)...(19): siRNA sense strand
auaaagcucugacugauga

SEQ ID NO: 285204 - RNA, 19 nt, Homo sapiens
  misc_RNA (1)...(19): siRNA sense strand
gaaguggauuccuuugaug

SEQ ID NO: 285205 - RNA, 19 nt, Homo sapiens
  misc_RNA (1)...(19): siRNA sense strand
gaaaccaccagcucucuuu

SEQ ID NO: 285206 - RNA, 19 nt, Homo sapiens
  misc_RNA (1)...(19): siRNA sense strand
gaacauuucccaucagcaa

SEQ ID NO: 285207 - RNA, 19 nt, Homo sapiens
  misc_RNA (1)...(19): siRNA sense strand
agacagagguugaccacaa

SEQ ID NO: 285208 - RNA, 19 nt, Homo sapiens
  misc_RNA (1)...(19): siRNA sense strand
guugggaaaugaagacuuu

SEQ ID NO: 285209 - RNA, 19 nt, Homo sapiens
  misc_RNA (1)...(19): siRNA sense strand
ggagaggagcuuaaaggua

SEQ ID NO: 285210 - RNA, 19 nt, Homo sapiens
  misc_RNA (1)...(19): siRNA sense strand
ugaugaagcuucuguagau

SEQ ID NO: 285211 - RNA, 19 nt, Homo sapiens
  misc_RNA (1)...(19): siRNA sense strand
gcaauugcauuauuacaac

SEQ ID NO: 285212 - RNA, 19 nt, Homo sapiens
  misc_RNA (1)...(19): siRNA sense strand
ggagguuguuugaugauga

SEQ ID NO: 285213 - RNA, 19 nt, Homo sapiens
  misc_RNA (1)...(19): siRNA sense strand
cuaaggaacugugggaauu

SEQ ID NO: 285214 - RNA, 19 nt, Homo sapiens
  misc_RNA (1)...(19): siRNA sense strand
ggaauguugucuucuagau

SEQ ID NO: 285215 - RNA, 19 nt, Homo sapiens
  misc_RNA (1)...(19): siRNA sense strand
gaagagguugagcucauua

SEQ ID NO: 285216 - RNA, 19 nt, Homo sapiens
  misc_RNA (1)...(19): siRNA sense strand
ggacaggaaaugauuauag

SEQ ID NO: 285217 - RNA, 19 nt, Homo sapiens
  misc_RNA (1)...(19): siRNA sense strand
cgucgaaguugguauuaaa

SEQ ID NO: 285218 - RNA, 19 nt, Homo sapiens
  misc_RNA (1)...(19): siRNA sense strand
gcaccgaaccuauuaguag

SEQ ID NO: 285219 - RNA, 19 nt, Homo sapiens
  misc_RNA (1)...(19): siRNA sense strand
ggagaugcaugaauuucug

SEQ ID NO: 285220 - RNA, 19 nt, Homo sapiens
  misc_RNA (1)...(19): siRNA sense strand
gaugaaccauuucuagauc

SEQ ID NO: 285221 - RNA, 19 nt, Homo sapiens
  misc_RNA (1)...(19): siRNA sense strand
gguuugggauucagcauuu

SEQ ID NO: 285222 - RNA, 19 nt, Homo sapiens
  misc_RNA (1)...(19): siRNA sense strand
caaagcugcugccuauuca

SEQ ID NO: 285223 - RNA, 19 nt, Homo sapiens
  misc_RNA (1)...(19): siRNA sense strand
gaagauugguggcacaaac

SEQ ID NO: 285224 - RNA, 19 nt, Homo sapiens
  misc_RNA (1)...(19): siRNA sense strand
aaacgaggaugcagucaau

SEQ ID NO: 285225 - RNA, 19 nt, Homo sapiens
  misc_RNA (1)...(19): siRNA sense strand
gaagacgaacgcacuuaaa

SEQ ID NO: 285226 - RNA, 19 nt, Homo sapiens
  misc_RNA (1)...(19): siRNA sense strand
ggaagacgaacgcacuuaa

SEQ ID NO: 285227 - RNA, 19 nt, Homo sapiens
  misc_RNA (1)...(19): siRNA sense strand
caggaacaauucaugauau

SEQ ID NO: 285228 - RNA, 19 nt, Homo sapiens
  misc_RNA (1)...(19): siRNA sense strand
aaagaccgaucacgcauga

SEQ ID NO: 285229 - RNA, 19 nt, Homo sapiens
  misc_RNA (1)...(19): siRNA sense strand
ggagaacugcacauuauug

SEQ ID NO: 285230 - RNA, 19 nt, Homo sapiens
  misc_RNA (1)...(19): siRNA sense strand
guugaaguauuacgaaaug

SEQ ID NO: 285231 - RNA, 19 nt, Homo sapiens
  misc_RNA (1)...(19): siRNA sense strand
ggaguagauuugcagaaug

SEQ ID NO: 285232 - RNA, 19 nt, Homo sapiens
  misc_RNA (1)...(19): siRNA sense strand
gaaggaaacagucaacaag

SEQ ID NO: 285233 - RNA, 19 nt, Homo sapiens
  misc_RNA (1)...(19): siRNA sense strand
gaaaugaagacuuuaacuc

SEQ ID NO: 285234 - RNA, 19 nt, Homo sapiens
  misc_RNA (1)...(19): siRNA sense strand
gaauguugucuucuagaua

SEQ ID NO: 285235 - RNA, 19 nt, Homo sapiens
  misc_RNA (1)...(19): siRNA sense strand
guaaugaagacaagacuga

SEQ ID NO: 285236 - RNA, 19 nt, Homo sapiens
  misc_RNA (1)...(19): siRNA sense strand
ggaugucaauacugaagaa

SEQ ID NO: 285237 - RNA, 19 nt, Homo sapiens
  misc_RNA (1)...(19): siRNA sense strand
gggaaccaguccacacaaa

SEQ ID NO: 285238 - RNA, 19 nt, Homo sapiens
  misc_RNA (1)...(19): siRNA sense strand
gaacuucacuuugguacac

SEQ ID NO: 285239 - RNA, 19 nt, Homo sapiens
  misc_RNA (1)...(19): siRNA sense strand
ccugggagaugcaugaauu

SEQ ID NO: 285240 - RNA, 19 nt, Homo sapiens
  misc_RNA (1)...(19): siRNA sense strand
ucuagcagccuaaaugaua

SEQ ID NO: 285241 - RNA, 19 nt, Homo sapiens
  misc_RNA (1)...(19): siRNA sense strand
gugaagaugaggaaauuaa

SEQ ID NO: 285242 - RNA, 19 nt, Homo sapiens
  misc_RNA (1)...(19): siRNA sense strand
gaacuccagccacgaagaa

SEQ ID NO: 285243 - RNA, 19 nt, Homo sapiens
  misc_RNA (1)...(19): siRNA sense strand
caucauaccauucaacaga

SEQ ID NO: 285244 - RNA, 19 nt, Homo sapiens
  misc_RNA (1)...(19): siRNA sense strand
acaauugccugaaagugaa

SEQ ID NO: 285245 - RNA, 19 nt, Homo sapiens
  misc_RNA (1)...(19): siRNA sense strand
gcuuaaagguauauucauc

SEQ ID NO: 285246 - RNA, 19 nt, Homo sapiens
  misc_RNA (1)...(19): siRNA sense strand
acaggaauguugucuucua

SEQ ID NO: 285247 - RNA, 19 nt, Homo sapiens
  misc_RNA (1)...(19): siRNA sense strand
acacaggaauguugucuuc

SEQ ID NO: 285248 - RNA, 19 nt, Homo sapiens
  misc_RNA (1)...(19): siRNA sense strand
gcagagucuuggaauuaga

SEQ ID NO: 285249 - RNA, 19 nt, Homo sapiens
  misc_RNA (1)...(19): siRNA sense strand
gaucacgcaugagcauauu

SEQ ID NO: 285250 - RNA, 19 nt, Homo sapiens
  misc_RNA (1)...(19): siRNA sense strand
cuggagaacugcacauuau

SEQ ID NO: 285251 - RNA, 19 nt, Homo sapiens
  misc_RNA (1)...(19): siRNA sense strand
ugaagaagaagaugccuuu

SEQ ID NO: 285252 - RNA, 19 nt, Homo sapiens
  misc_RNA (1)...(19): siRNA sense strand
gaaccaggacacccaagaa

SEQ ID NO: 285253 - RNA, 19 nt, Homo sapiens
  misc_RNA (1)...(19): siRNA sense strand
cacagugguugcaugauaa

SEQ ID NO: 285254 - RNA, 19 nt, Homo sapiens
  misc_RNA (1)...(19): siRNA sense strand
caagggauuuagagaugaa

SEQ ID NO: 285255 - RNA, 19 nt, Homo sapiens
  misc_RNA (1)...(19): siRNA sense strand
auucaaagcugcugccuau

SEQ ID NO: 285256 - RNA, 19 nt, Homo sapiens
  misc_RNA (1)...(19): siRNA sense strand
cgaaguugguauuaaacaa

SEQ ID NO: 285257 - RNA, 19 nt, Homo sapiens
  misc_RNA (1)...(19): siRNA sense strand
gagaacugcacauuauuga

SEQ ID NO: 285258 - RNA, 19 nt, Homo sapiens
  misc_RNA (1)...(19): siRNA sense strand
ugaguuaccugagagagaa

SEQ ID NO: 285259 - RNA, 19 nt, Homo sapiens
  misc_RNA (1)...(19): siRNA sense strand
caauauggaugucaauacu

SEQ ID NO: 285260 - RNA, 19 nt, Homo sapiens
  misc_RNA (1)...(19): siRNA sense strand
gguagcagaugguguagca

SEQ ID NO: 285261 - RNA, 19 nt, Homo sapiens
  misc_RNA (1)...(19): siRNA sense strand
caucuucuauugaggauca

SEQ ID NO: 285262 - RNA, 19 nt, Homo sapiens
  misc_RNA (1)...(19): siRNA sense strand
gaacugcacauuauugaac

SEQ ID NO: 285263 - RNA, 19 nt, Homo sapiens
  misc_RNA (1)...(19): siRNA sense strand
gaagaagaagaugccuuua

SEQ ID NO: 285264 - RNA, 19 nt, Homo sapiens
  misc_RNA (1)...(19): siRNA sense strand
gagcuuaaagguauauuca

SEQ ID NO: 285265 - RNA, 19 nt, Homo sapiens
  misc_RNA (1)...(19): siRNA sense strand
cgacacgaguuauuuccaa

SEQ ID NO: 285266 - RNA, 19 nt, Homo sapiens
  misc_RNA (1)...(19): siRNA sense strand
aaacuagucuggauuuagg

SEQ ID NO: 285267 - RNA, 19 nt, Homo sapiens
  misc_RNA (1)...(19): siRNA sense strand
guccacaggcccucuaaua

SEQ ID NO: 285268 - RNA, 19 nt, Homo sapiens
  misc_RNA (1)...(19): siRNA sense strand
gagagaagaaggcgaagga

SEQ ID NO: 285269 - RNA, 19 nt, Homo sapiens
  misc_RNA (1)...(19): siRNA sense strand
caagaucccucaccaucca

SEQ ID NO: 285270 - RNA, 19 nt, Homo sapiens
  misc_RNA (1)...(19): siRNA sense strand
gagguuguuugaugaugaa

SEQ ID NO: 285271 - RNA, 19 nt, Homo sapiens
  misc_RNA (1)...(19): siRNA sense strand
ugucggagguuguuugaug

SEQ ID NO: 285272 - RNA, 19 nt, Homo sapiens
  misc_RNA (1)...(19): siRNA sense strand
uaauguggauggugaagau

SEQ ID NO: 285273 - RNA, 19 nt, Homo sapiens
  misc_RNA (1)...(19): siRNA sense strand
gccggcaaauugaauauau

SEQ ID NO: 285274 - RNA, 19 nt, Homo sapiens
  misc_RNA (1)...(19): siRNA sense strand
gaacaggaaugugaaauca

SEQ ID NO: 285275 - RNA, 19 nt, Homo sapiens
  misc_RNA (1)...(19): siRNA sense strand
gccaugaacuucugcauag

SEQ ID NO: 285276 - RNA, 19 nt, Homo sapiens
  misc_RNA (1)...(19): siRNA sense strand
gcaacauugucaagacuga

SEQ ID NO: 285277 - RNA, 19 nt, Homo sapiens
  misc_RNA (1)...(19): siRNA sense strand
gugcagcucccuuccaaua

SEQ ID NO: 285278 - RNA, 19 nt, Homo sapiens
  misc_RNA (1)...(19): siRNA sense strand
caaggaggguccaggaugu

SEQ ID NO: 285279 - RNA, 19 nt, Homo sapiens
  misc_RNA (1)...(19): siRNA sense strand
cccugucucugcucuauua

SEQ ID NO: 285280 - RNA, 19 nt, Homo sapiens
  misc_RNA (1)...(19): siRNA sense strand
ggacaacagggaacaggaa

SEQ ID NO: 285281 - RNA, 19 nt, Homo sapiens
  misc_RNA (1)...(19): siRNA sense strand
ugucucugcucuauuauga

SEQ ID NO: 285282 - RNA, 19 nt, Homo sapiens
  misc_RNA (1)...(19): siRNA sense strand
gcaggccagucucauguuc

SEQ ID NO: 285283 - RNA, 19 nt, Homo sapiens
  misc_RNA (1)...(19): siRNA sense strand
gugcuggguccacauaaua

SEQ ID NO: 285284 - RNA, 19 nt, Homo sapiens
  misc_RNA (1)...(19): siRNA sense strand
ggaacaggaaugugaaauc

SEQ ID NO: 285285 - RNA, 19 nt, Homo sapiens
  misc_RNA (1)...(19): siRNA sense strand
gaaagugagaguccuugug

SEQ ID NO: 285286 - RNA, 19 nt, Homo sapiens
  misc_RNA (1)...(19): siRNA sense strand
ucacuucuccucugauaga

SEQ ID NO: 285287 - RNA, 19 nt, Homo sapiens
  misc_RNA (1)...(19): siRNA sense strand
acaggaaugugaaaucauc

SEQ ID NO: 285288 - RNA, 19 nt, Homo sapiens
  misc_RNA (1)...(19): siRNA sense strand
ugacagggacagcaacauu

SEQ ID NO: 285289 - RNA, 19 nt, Homo sapiens
  misc_RNA (1)...(19): siRNA sense strand
caacagggaacaggaaugu

SEQ ID NO: 285290 - RNA, 19 nt, Homo sapiens
  misc_RNA (1)...(19): siRNA sense strand
agagaagcaucuuggacaa

SEQ ID NO: 285291 - RNA, 19 nt, Homo sapiens
  misc_RNA (1)...(19): siRNA sense strand
gaugugcugucgacaagag

SEQ ID NO: 285292 - RNA, 19 nt, Homo sapiens
  misc_RNA (1)...(19): siRNA sense strand
uuucacuucuccucugaua

SEQ ID NO: 285293 - RNA, 19 nt, Homo sapiens
  misc_RNA (1)...(19): siRNA sense strand
agacaggccucuccaccau

SEQ ID NO: 285294 - RNA, 19 nt, Homo sapiens
  misc_RNA (1)...(19): siRNA sense strand
gacagggacagcaacauug

SEQ ID NO: 285295 - RNA, 19 nt, Homo sapiens
  misc_RNA (1)...(19): siRNA sense strand
aaugugaaaucaucagcuu

SEQ ID NO: 285296 - RNA, 19 nt, Homo sapiens
  misc_RNA (1)...(19): siRNA sense strand
gggagcugcuucuugaucu

SEQ ID NO: 285297 - RNA, 19 nt, Homo sapiens
  misc_RNA (1)...(19): siRNA sense strand
ugguauugcugccuccuuu

SEQ ID NO: 285298 - RNA, 19 nt, Homo sapiens
  misc_RNA (1)...(19): siRNA sense strand
acagggaacaggaauguga

SEQ ID NO: 285299 - RNA, 19 nt, Homo sapiens
  misc_RNA (1)...(19): siRNA sense strand
cccuggagcugguacuuga

SEQ ID NO: 285300 - RNA, 19 nt, Homo sapiens
  misc_RNA (1)...(19): siRNA sense strand
gcagugcucaaucuucuca

SEQ ID NO: 285301 - RNA, 19 nt, Homo sapiens
  misc_RNA (1)...(19): siRNA sense strand
ccugagggcuacgccauga

SEQ ID NO: 285302 - RNA, 19 nt, Homo sapiens
  misc_RNA (1)...(19): siRNA sense strand
agcgggagcugcuucuuga

SEQ ID NO: 285303 - RNA, 19 nt, Homo sapiens
  misc_RNA (1)...(19): siRNA sense strand
gggcacuucuagaggacaa

SEQ ID NO: 285304 - RNA, 19 nt, Homo sapiens
  misc_RNA (1)...(19): siRNA sense strand
gagcugcccauaggccuuu

SEQ ID NO: 285305 - RNA, 19 nt, Homo sapiens
  misc_RNA (1)...(19): siRNA sense strand
ugugaaaucaucagcuuug

SEQ ID NO: 285306 - RNA, 19 nt, Homo sapiens
  misc_RNA (1)...(19): siRNA sense strand
ucucugcucuauuaugaca

SEQ ID NO: 285307 - RNA, 19 nt, Homo sapiens
  misc_RNA (1)...(19): siRNA sense strand
ccuagggccugaagcucaa

SEQ ID NO: 285308 - RNA, 19 nt, Homo sapiens
  misc_RNA (1)...(19): siRNA sense strand
acaggccucuccaccauca

SEQ ID NO: 285309 - RNA, 19 nt, Homo sapiens
  misc_RNA (1)...(19): siRNA sense strand
agacugacauaccugacau

SEQ ID NO: 285310 - RNA, 19 nt, Homo sapiens
  misc_RNA (1)...(19): siRNA sense strand
cagcaacauugucaagacu

SEQ ID NO: 285311 - RNA, 19 nt, Homo sapiens
  misc_RNA (1)...(19): siRNA sense strand
cagcaggccagucucaugu

SEQ ID NO: 285312 - RNA, 19 nt, Homo sapiens
  misc_RNA (1)...(19): siRNA sense strand
cgccaugaacuucugcaua

SEQ ID NO: 285313 - RNA, 19 nt, Homo sapiens
  misc_RNA (1)...(19): siRNA sense strand
ggagcugcuucuugaucug

SEQ ID NO: 285314 - RNA, 19 nt, Homo sapiens
  misc_RNA (1)...(19): siRNA sense strand
gccagucucauguucuuug

SEQ ID NO: 285315 - RNA, 19 nt, Homo sapiens
  misc_RNA (1)...(19): siRNA sense strand
gcuacgccaugaacuucug

SEQ ID NO: 285316 - RNA, 19 nt, Homo sapiens
  misc_RNA (1)...(19): siRNA sense strand
ccagucucauguucuuugu

SEQ ID NO: 285317 - RNA, 19 nt, Homo sapiens
  misc_RNA (1)...(19): siRNA sense strand
gcagcucccuuccaauacc

SEQ ID NO: 285318 - RNA, 19 nt, Homo sapiens
  misc_RNA (1)...(19): siRNA sense strand
gggcuacgccaugaacuuc

SEQ ID NO: 285319 - RNA, 19 nt, Homo sapiens
  misc_RNA (1)...(19): siRNA sense strand
cugcagugcucaaucuucu

SEQ ID NO: 285320 - RNA, 19 nt, Homo sapiens
  misc_RNA (1)...(19): siRNA sense strand
gaucuggccaagagaagca

SEQ ID NO: 285321 - RNA, 19 nt, Homo sapiens
  misc_RNA (1)...(19): siRNA sense strand
acccagcgcccaacacuga

SEQ ID NO: 285322 - RNA, 19 nt, Homo sapiens
  misc_RNA (1)...(19): siRNA sense strand
gacaacagggaacaggaau

SEQ ID NO: 285323 - RNA, 19 nt, Homo sapiens
  misc_RNA (1)...(19): siRNA sense strand
acagcaacauugucaagac

SEQ ID NO: 285324 - RNA, 19 nt, Homo sapiens
  misc_RNA (1)...(19): siRNA sense strand
guauugcugccuccuuuca

SEQ ID NO: 285325 - RNA, 19 nt, Homo sapiens
  misc_RNA (1)...(19): siRNA sense strand
ccagcaggccagucucaug

SEQ ID NO: 285326 - RNA, 19 nt, Homo sapiens
  misc_RNA (1)...(19): siRNA sense strand
aggaugugcugucgacaag

SEQ ID NO: 285327 - RNA, 19 nt, Homo sapiens
  misc_RNA (1)...(19): siRNA sense strand
gguacuugaaggccaggua

SEQ ID NO: 285328 - RNA, 19 nt, Homo sapiens
  misc_RNA (1)...(19): siRNA sense strand
gaggagagaugguaacuuu

SEQ ID NO: 285329 - RNA, 19 nt, Homo sapiens
  misc_RNA (1)...(19): siRNA sense strand
gaauaacguuggacuuuaa

SEQ ID NO: 285330 - RNA, 19 nt, Homo sapiens
  misc_RNA (1)...(19): siRNA sense strand
gaagacauguuuggauaua

SEQ ID NO: 285331 - RNA, 19 nt, Homo sapiens
  misc_RNA (1)...(19): siRNA sense strand
aaagagagcuugcuauuca

SEQ ID NO: 285332 - RNA, 19 nt, Homo sapiens
  misc_RNA (1)...(19): siRNA sense strand
gaaacaguaugcauaaaug

SEQ ID NO: 285333 - RNA, 19 nt, Homo sapiens
  misc_RNA (1)...(19): siRNA sense strand
uaugacagcucuuggaaua

SEQ ID NO: 285334 - RNA, 19 nt, Homo sapiens
  misc_RNA (1)...(19): siRNA sense strand
gcagaaggcuagucaaauc

SEQ ID NO: 285335 - RNA, 19 nt, Homo sapiens
  misc_RNA (1)...(19): siRNA sense strand
gcaagugaauaccacauuu

SEQ ID NO: 285336 - RNA, 19 nt, Homo sapiens
  misc_RNA (1)...(19): siRNA sense strand
gaacaguugucaugcagaa

SEQ ID NO: 285337 - RNA, 19 nt, Homo sapiens
  misc_RNA (1)...(19): siRNA sense strand
caacugacauugacaagga

SEQ ID NO: 285338 - RNA, 19 nt, Homo sapiens
  misc_RNA (1)...(19): siRNA sense strand
gaacuggagaugucuauaa

SEQ ID NO: 285339 - RNA, 19 nt, Homo sapiens
  misc_RNA (1)...(19): siRNA sense strand
uaaaugaccuucuugaaag

SEQ ID NO: 285340 - RNA, 19 nt, Homo sapiens
  misc_RNA (1)...(19): siRNA sense strand
ugggagaggugaaucauua

SEQ ID NO: 285341 - RNA, 19 nt, Homo sapiens
  misc_RNA (1)...(19): siRNA sense strand
ggaaguggcaagacuauaa

SEQ ID NO: 285342 - RNA, 19 nt, Homo sapiens
  misc_RNA (1)...(19): siRNA sense strand
gcacuaagcacuccuucua

SEQ ID NO: 285343 - RNA, 19 nt, Homo sapiens
  misc_RNA (1)...(19): siRNA sense strand
agacaaauaucacgaaguu

SEQ ID NO: 285344 - RNA, 19 nt, Homo sapiens
  misc_RNA (1)...(19): siRNA sense strand
gaacaugacauuuggauca

SEQ ID NO: 285345 - RNA, 19 nt, Homo sapiens
  misc_RNA (1)...(19): siRNA sense strand
uaucaacucuggaaagaaa

SEQ ID NO: 285346 - RNA, 19 nt, Homo sapiens
  misc_RNA (1)...(19): siRNA sense strand
gagcuccgcuggaagauga

SEQ ID NO: 285347 - RNA, 19 nt, Homo sapiens
  misc_RNA (1)...(19): siRNA sense strand
ggauaucccuuccugagaa

SEQ ID NO: 285348 - RNA, 19 nt, Homo sapiens
  misc_RNA (1)...(19): siRNA sense strand
ugaagaaggucauccaaga

SEQ ID NO: 285349 - RNA, 19 nt, Homo sapiens
  misc_RNA (1)...(19): siRNA sense strand
gcacaauucuggacugcaa

SEQ ID NO: 285350 - RNA, 19 nt, Homo sapiens
  misc_RNA (1)...(19): siRNA sense strand
gauaggagcuccgcuggaa

SEQ ID NO: 285351 - RNA, 19 nt, Homo sapiens
  misc_RNA (1)...(19): siRNA sense strand
gaaggcuagucaaaucaua

SEQ ID NO: 285352 - RNA, 19 nt, Homo sapiens
  misc_RNA (1)...(19): siRNA sense strand
gcacucaacuggacauagu

SEQ ID NO: 285353 - RNA, 19 nt, Homo sapiens
  misc_RNA (1)...(19): siRNA sense strand
gaauggauauugguccuaa

SEQ ID NO: 285354 - RNA, 19 nt, Homo sapiens
  misc_RNA (1)...(19): siRNA sense strand
caaacucaguacaugaaua

SEQ ID NO: 285355 - RNA, 19 nt, Homo sapiens
  misc_RNA (1)...(19): siRNA sense strand
gaaaaugcaucucugguuu

SEQ ID NO: 285356 - RNA, 19 nt, Homo sapiens
  misc_RNA (1)...(19): siRNA sense strand
gacagucccugaaguuauu

SEQ ID NO: 285357 - RNA, 19 nt, Homo sapiens
  misc_RNA (1)...(19): siRNA sense strand
caaaggacagugccuauaa

SEQ ID NO: 285358 - RNA, 19 nt, Homo sapiens
  misc_RNA (1)...(19): siRNA sense strand
aaacagaacuggagauguc

SEQ ID NO: 285359 - RNA, 19 nt, Homo sapiens
  misc_RNA (1)...(19): siRNA sense strand
agagaaagguucaaaggaa

SEQ ID NO: 285360 - RNA, 19 nt, Homo sapiens
  misc_RNA (1)...(19): siRNA sense strand
ggagaugugcucuauauug

SEQ ID NO: 285361 - RNA, 19 nt, Homo sapiens
  misc_RNA (1)...(19): siRNA sense strand
gagaauaacguuggacuuu

SEQ ID NO: 285362 - RNA, 19 nt, Homo sapiens
  misc_RNA (1)...(19): siRNA sense strand
ggacugcaauacauguaaa

SEQ ID NO: 285363 - RNA, 19 nt, Homo sapiens
  misc_RNA (1)...(19): siRNA sense strand
uggaagacauguuuggaua

SEQ ID NO: 285364 - RNA, 19 nt, Homo sapiens
  misc_RNA (1)...(19): siRNA sense strand
agacaagguuugaauauca

SEQ ID NO: 285365 - RNA, 19 nt, Homo sapiens
  misc_RNA (1)...(19): siRNA sense strand
cauguaaucucacuucuuc

SEQ ID NO: 285366 - RNA, 19 nt, Homo sapiens
  misc_RNA (1)...(19): siRNA sense strand
ccaggacaauagugcauua

SEQ ID NO: 285367 - RNA, 19 nt, Homo sapiens
  misc_RNA (1)...(19): siRNA sense strand
agaauaacguuggacuuua

SEQ ID NO: 285368 - RNA, 19 nt, Homo sapiens
  misc_RNA (1)...(19): siRNA sense strand
gaaagaguaugcacaacgu

SEQ ID NO: 285369 - RNA, 19 nt, Homo sapiens
  misc_RNA (1)...(19): siRNA sense strand
caaaugagccuggaaccua

SEQ ID NO: 285370 - RNA, 19 nt, Homo sapiens
  misc_RNA (1)...(19): siRNA sense strand
ucacagaaguaaaggagaa

SEQ ID NO: 285371 - RNA, 19 nt, Homo sapiens
  misc_RNA (1)...(19): siRNA sense strand
gaauaccacauuucaauug

SEQ ID NO: 285372 - RNA, 19 nt, Homo sapiens
  misc_RNA (1)...(19): siRNA sense strand
gcauuauucuccaaaucua

SEQ ID NO: 285373 - RNA, 19 nt, Homo sapiens
  misc_RNA (1)...(19): siRNA sense strand
uaaaggagaacaugacauu

SEQ ID NO: 285374 - RNA, 19 nt, Homo sapiens
  misc_RNA (1)...(19): siRNA sense strand
uaacacauccuaucucaug

SEQ ID NO: 285375 - RNA, 19 nt, Homo sapiens
  misc_RNA (1)...(19): siRNA sense strand
gcucuagucaccauuguua

SEQ ID NO: 285376 - RNA, 19 nt, Homo sapiens
  misc_RNA (1)...(19): siRNA sense strand
gaauagacacagcaagaaa

SEQ ID NO: 285377 - RNA, 19 nt, Homo sapiens
  misc_RNA (1)...(19): siRNA sense strand
gaaacacaaccuuuaaugu

SEQ ID NO: 285378 - RNA, 19 nt, Homo sapiens
  misc_RNA (1)...(19): siRNA sense strand
ggaaacaguaugcauaaau

SEQ ID NO: 285379 - RNA, 19 nt, Homo sapiens
  misc_RNA (1)...(19): siRNA sense strand
uaacaacaacugacauuga

SEQ ID NO: 285380 - RNA, 19 nt, Homo sapiens
  misc_RNA (1)...(19): siRNA sense strand
caacuggaaucuguucuga

SEQ ID NO: 285381 - RNA, 19 nt, Homo sapiens
  misc_RNA (1)...(19): siRNA sense strand
gaaagaaaaugacuacauc

SEQ ID NO: 285382 - RNA, 19 nt, Homo sapiens
  misc_RNA (1)...(19): siRNA sense strand
gcuuauugguucuccguua

SEQ ID NO: 285383 - RNA, 19 nt, Homo sapiens
  misc_RNA (1)...(19): siRNA sense strand
uuacacaacuggaaucugu

SEQ ID NO: 285384 - RNA, 19 nt, Homo sapiens
  misc_RNA (1)...(19): siRNA sense strand
gaggauccuuucaguauca

SEQ ID NO: 285385 - RNA, 19 nt, Homo sapiens
  misc_RNA (1)...(19): siRNA sense strand
guacccaacuggauuguca

SEQ ID NO: 285386 - RNA, 19 nt, Homo sapiens
  misc_RNA (1)...(19): siRNA sense strand
ugacagaugugacuauugg

SEQ ID NO: 285387 - RNA, 19 nt, Homo sapiens
  misc_RNA (1)...(19): siRNA sense strand
gcaagacuauaaggaaaga

SEQ ID NO: 285388 - RNA, 19 nt, Homo sapiens
  misc_RNA (1)...(19): siRNA sense strand
cauaaucccucgaaacaca

SEQ ID NO: 285389 - RNA, 19 nt, Homo sapiens
  misc_RNA (1)...(19): siRNA sense strand
ccaagacugugaagaugaa

SEQ ID NO: 285390 - RNA, 19 nt, Homo sapiens
  misc_RNA (1)...(19): siRNA sense strand
gaaaaugggugcuuauugg

SEQ ID NO: 285391 - RNA, 19 nt, Homo sapiens
  misc_RNA (1)...(19): siRNA sense strand
acagauugguuccuacuuu

SEQ ID NO: 285392 - RNA, 19 nt, Homo sapiens
  misc_RNA (1)...(19): siRNA sense strand
augaaccgcuugcuucuua

SEQ ID NO: 285393 - RNA, 19 nt, Homo sapiens
  misc_RNA (1)...(19): siRNA sense strand
aaaguuggaucuaccaguu

SEQ ID NO: 285394 - RNA, 19 nt, Homo sapiens
  misc_RNA (1)...(19): siRNA sense strand
caacuggauugucaucuuc

SEQ ID NO: 285395 - RNA, 19 nt, Homo sapiens
  misc_RNA (1)...(19): siRNA sense strand
ucaggacucugugagaaua

SEQ ID NO: 285396 - RNA, 19 nt, Homo sapiens
  misc_RNA (1)...(19): siRNA sense strand
gaaggaaaaugggugcuua

SEQ ID NO: 285397 - RNA, 19 nt, Homo sapiens
  misc_RNA (1)...(19): siRNA sense strand
gaaauggaaaugucucaga

SEQ ID NO: 285398 - RNA, 19 nt, Homo sapiens
  misc_RNA (1)...(19): siRNA sense strand
gaaguaaaggagaacauga

SEQ ID NO: 285399 - RNA, 19 nt, Homo sapiens
  misc_RNA (1)...(19): siRNA sense strand
gagaaaacgugacccauga

SEQ ID NO: 285400 - RNA, 19 nt, Homo sapiens
  misc_RNA (1)...(19): siRNA sense strand
gagaagaggagagauggua

SEQ ID NO: 285401 - RNA, 19 nt, Homo sapiens
  misc_RNA (1)...(19): siRNA sense strand
gccaaagauuguggaaaua

SEQ ID NO: 285402 - RNA, 19 nt, Homo sapiens
  misc_RNA (1)...(19): siRNA sense strand
ggagggaaaggaaacagua

SEQ ID NO: 285403 - RNA, 19 nt, Homo sapiens
  misc_RNA (1)...(19): siRNA sense strand
gcuccucacuguuguucua

SEQ ID NO: 285404 - RNA, 19 nt, Homo sapiens
  misc_RNA (1)...(19): siRNA sense strand
gaauggaacaguugucaug

SEQ ID NO: 285405 - RNA, 19 nt, Homo sapiens
  misc_RNA (1)...(19): siRNA sense strand
ugacagcucuuggaauaga

SEQ ID NO: 285406 - RNA, 19 nt, Homo sapiens
  misc_RNA (1)...(19): siRNA sense strand
aaaggaaacaguaugcaua

SEQ ID NO: 285407 - RNA, 19 nt, Homo sapiens
  misc_RNA (1)...(19): siRNA sense strand
uuaaguagcagcaaucaaa

SEQ ID NO: 285408 - RNA, 19 nt, Homo sapiens
  misc_RNA (1)...(19): siRNA sense strand
uaaauuugcuaccaucaca

SEQ ID NO: 285409 - RNA, 19 nt, Homo sapiens
  misc_RNA (1)...(19): siRNA sense strand
gaaaaggaccugcugauug

SEQ ID NO: 285410 - RNA, 19 nt, Homo sapiens
  misc_RNA (1)...(19): siRNA sense strand
ggaaauuuaagcacugaaa

SEQ ID NO: 285411 - RNA, 19 nt, Homo sapiens
  misc_RNA (1)...(19): siRNA sense strand
ggagagaugguaacuuuca

SEQ ID NO: 285412 - RNA, 19 nt, Homo sapiens
  misc_RNA (1)...(19): siRNA sense strand
ggacaagcaugacuuucag

SEQ ID NO: 285413 - RNA, 19 nt, Homo sapiens
  misc_RNA (1)...(19): siRNA sense strand
cacccuagauucacuaaga

SEQ ID NO: 285414 - RNA, 19 nt, Homo sapiens
  misc_RNA (1)...(19): siRNA sense strand
aagaagacacgauuuauga

SEQ ID NO: 285415 - RNA, 19 nt, Homo sapiens
  misc_RNA (1)...(19): siRNA sense strand
cauaaaugcuacagugugu

SEQ ID NO: 285416 - RNA, 19 nt, Homo sapiens
  misc_RNA (1)...(19): siRNA sense strand
guacauuuaucauggaagu

SEQ ID NO: 285417 - RNA, 19 nt, Homo sapiens
  misc_RNA (1)...(19): siRNA sense strand
ugacaaggauucuaauacu

SEQ ID NO: 285418 - RNA, 19 nt, Homo sapiens
  misc_RNA (1)...(19): siRNA sense strand
gagaugugcucuauauugc

SEQ ID NO: 285419 - RNA, 19 nt, Homo sapiens
  misc_RNA (1)...(19): siRNA sense strand
gacacagguuggaauugua

SEQ ID NO: 285420 - RNA, 19 nt, Homo sapiens
  misc_RNA (1)...(19): siRNA sense strand
uuacagcucugcaagugaa

SEQ ID NO: 285421 - RNA, 19 nt, Homo sapiens
  misc_RNA (1)...(19): siRNA sense strand
ccagucagcagcuucauuu

SEQ ID NO: 285422 - RNA, 19 nt, Homo sapiens
  misc_RNA (1)...(19): siRNA sense strand
gagacagucccugaaguua

SEQ ID NO: 285423 - RNA, 19 nt, Homo sapiens
  misc_RNA (1)...(19): siRNA sense strand
ccaaagauuguggaaauaa

SEQ ID NO: 285424 - RNA, 19 nt, Homo sapiens
  misc_RNA (1)...(19): siRNA sense strand
gaggaaauuuaagcacuga

SEQ ID NO: 285425 - RNA, 19 nt, Homo sapiens
  misc_RNA (1)...(19): siRNA sense strand
cagccucgguacaaucaua

SEQ ID NO: 285426 - RNA, 19 nt, Homo sapiens
  misc_RNA (1)...(19): siRNA sense strand
ccucgaaacacaaccuuua

SEQ ID NO: 285427 - RNA, 19 nt, Homo sapiens
  misc_RNA (1)...(19): siRNA sense strand
acguuggacuuuaaucuua

SEQ ID NO: 285428 - RNA, 19 nt, Homo sapiens
  misc_RNA (1)...(19): siRNA sense strand
gcacaugacugcuguaaag

SEQ ID NO: 285429 - RNA, 19 nt, Homo sapiens
  misc_RNA (1)...(19): siRNA sense strand
acaaacagcuggaagaaga

SEQ ID NO: 285430 - RNA, 19 nt, Homo sapiens
  misc_RNA (1)...(19): siRNA sense strand
gcaacuggaucaagagcua

SEQ ID NO: 285431 - RNA, 19 nt, Homo sapiens
  misc_RNA (1)...(19): siRNA sense strand
gggaacagcaugaggaaua

SEQ ID NO: 285432 - RNA, 19 nt, Homo sapiens
  misc_RNA (1)...(19): siRNA sense strand
caagagagaugagcaacug

SEQ ID NO: 285433 - RNA, 19 nt, Homo sapiens
  misc_RNA (1)...(19): siRNA sense strand
ggaacagcaugaggaauau

SEQ ID NO: 285434 - RNA, 19 nt, Homo sapiens
  misc_RNA (1)...(19): siRNA sense strand
caguggaggucccaucaaa

SEQ ID NO: 285435 - RNA, 19 nt, Homo sapiens
  misc_RNA (1)...(19): siRNA sense strand
ugaagcagcuagagaagca

SEQ ID NO: 285436 - RNA, 19 nt, Homo sapiens
  misc_RNA (1)...(19): siRNA sense strand
gcaagaaugugagcaacag

SEQ ID NO: 285437 - RNA, 19 nt, Homo sapiens
  misc_RNA (1)...(19): siRNA sense strand
acaaagggaucagcagcua

SEQ ID NO: 285438 - RNA, 19 nt, Homo sapiens
  misc_RNA (1)...(19): siRNA sense strand
ugaagcaccuggagaagca

SEQ ID NO: 285439 - RNA, 19 nt, Homo sapiens
  misc_RNA (1)...(19): siRNA sense strand
cagcaggacggacaacuaa

SEQ ID NO: 285440 - RNA, 19 nt, Homo sapiens
  misc_RNA (1)...(19): siRNA sense strand
ccacaaagggagaaguauu

SEQ ID NO: 285441 - RNA, 19 nt, Homo sapiens
  misc_RNA (1)...(19): siRNA sense strand
gcaugaggaauaucagaaa

SEQ ID NO: 285442 - RNA, 19 nt, Homo sapiens
  misc_RNA (1)...(19): siRNA sense strand
gcagcaggacggacaacua

SEQ ID NO: 285443 - RNA, 19 nt, Homo sapiens
  misc_RNA (1)...(19): siRNA sense strand
uaaacaaacagcuggaaga

SEQ ID NO: 285444 - RNA, 19 nt, Homo sapiens
  misc_RNA (1)...(19): siRNA sense strand
gggaucagcagcuaaacaa

SEQ ID NO: 285445 - RNA, 19 nt, Homo sapiens
  misc_RNA (1)...(19): siRNA sense strand
gagaugagcaacugggaau

SEQ ID NO: 285446 - RNA, 19 nt, Homo sapiens
  misc_RNA (1)...(19): siRNA sense strand
aaccagcccugcccacaaa

SEQ ID NO: 285447 - RNA, 19 nt, Homo sapiens
  misc_RNA (1)...(19): siRNA sense strand
gagcaacugggaaugaaga

SEQ ID NO: 285448 - RNA, 19 nt, Homo sapiens
  misc_RNA (1)...(19): siRNA sense strand
gaugagcaacugggaauga

SEQ ID NO: 285449 - RNA, 19 nt, Homo sapiens
  misc_RNA (1)...(19): siRNA sense strand
gggacugccugagcaagaa

SEQ ID NO: 285450 - RNA, 19 nt, Homo sapiens
  misc_RNA (1)...(19): siRNA sense strand
cacaaagggagaaguauug

SEQ ID NO: 285451 - RNA, 19 nt, Homo sapiens
  misc_RNA (1)...(19): siRNA sense strand
aaacaaacagcuggaagaa

SEQ ID NO: 285452 - RNA, 19 nt, Homo sapiens
  misc_RNA (1)...(19): siRNA sense strand
gaucaagagcuagucaaga

SEQ ID NO: 285453 - RNA, 19 nt, Homo sapiens
  misc_RNA (1)...(19): siRNA sense strand
aaagggaucagcagcuaaa

SEQ ID NO: 285454 - RNA, 19 nt, Homo sapiens
  misc_RNA (1)...(19): siRNA sense strand
caacugggaaugaagaaag

SEQ ID NO: 285455 - RNA, 19 nt, Homo sapiens
  misc_RNA (1)...(19): siRNA sense strand
gcccacaaagggagaagua

SEQ ID NO: 285456 - RNA, 19 nt, Homo sapiens
  misc_RNA (1)...(19): siRNA sense strand
ggaggucccaucaaagcaa

SEQ ID NO: 285457 - RNA, 19 nt, Homo sapiens
  misc_RNA (1)...(19): siRNA sense strand
gaucagcagcuaaacaaac

SEQ ID NO: 285458 - RNA, 19 nt, Homo sapiens
  misc_RNA (1)...(19): siRNA sense strand
ugaggaauaucagaaagca

SEQ ID NO: 285459 - RNA, 19 nt, Homo sapiens
  misc_RNA (1)...(19): siRNA sense strand
caaagggaucagcagcuaa

SEQ ID NO: 285460 - RNA, 19 nt, Homo sapiens
  misc_RNA (1)...(19): siRNA sense strand
gagcuagucaagagagaug

SEQ ID NO: 285461 - RNA, 19 nt, Homo sapiens
  misc_RNA (1)...(19): siRNA sense strand
caaaugaaacagccaacuc

SEQ ID NO: 285462 - RNA, 19 nt, Homo sapiens
  misc_RNA (1)...(19): siRNA sense strand
gaauaucagaaagcagaaa

SEQ ID NO: 285463 - RNA, 19 nt, Homo sapiens
  misc_RNA (1)...(19): siRNA sense strand
aaagggagaaguauugcuu

SEQ ID NO: 285464 - RNA, 19 nt, Homo sapiens
  misc_RNA (1)...(19): siRNA sense strand
caugaggaauaucagaaag

SEQ ID NO: 285465 - RNA, 19 nt, Homo sapiens
  misc_RNA (1)...(19): siRNA sense strand
caaccagcccugcccacaa

SEQ ID NO: 285466 - RNA, 19 nt, Homo sapiens
  misc_RNA (1)...(19): siRNA sense strand
aaguauugcuuccuguaga

SEQ ID NO: 285467 - RNA, 19 nt, Homo sapiens
  misc_RNA (1)...(19): siRNA sense strand
ugaagaaagagcaacuguu

SEQ ID NO: 285468 - RNA, 19 nt, Homo sapiens
  misc_RNA (1)...(19): siRNA sense strand
agggacagcugaagcaucu

SEQ ID NO: 285469 - RNA, 19 nt, Homo sapiens
  misc_RNA (1)...(19): siRNA sense strand
ggaauaucagaaagcagaa

SEQ ID NO: 285470 - RNA, 19 nt, Homo sapiens
  misc_RNA (1)...(19): siRNA sense strand
ggccacccaaacauaaaua

SEQ ID NO: 285471 - RNA, 19 nt, Homo sapiens
  misc_RNA (1)...(19): siRNA sense strand
gcaguggccacccaaacau

SEQ ID NO: 285472 - RNA, 19 nt, Homo sapiens
  misc_RNA (1)...(19): siRNA sense strand
caucaaagcaagaggaaaa

SEQ ID NO: 285473 - RNA, 19 nt, Homo sapiens
  misc_RNA (1)...(19): siRNA sense strand
gaaugaagaaagagcaacu

SEQ ID NO: 285474 - RNA, 19 nt, Homo sapiens
  misc_RNA (1)...(19): siRNA sense strand
gcucuuagaccagcaacug

SEQ ID NO: 285475 - RNA, 19 nt, Homo sapiens
  misc_RNA (1)...(19): siRNA sense strand
acccagagcagcagcuuaa

SEQ ID NO: 285476 - RNA, 19 nt, Homo sapiens
  misc_RNA (1)...(19): siRNA sense strand
gcaacugggaaugaagaaa

SEQ ID NO: 285477 - RNA, 19 nt, Homo sapiens
  misc_RNA (1)...(19): siRNA sense strand
cagagcagcagcuuaagca

SEQ ID NO: 285478 - RNA, 19 nt, Homo sapiens
  misc_RNA (1)...(19): siRNA sense strand
gcaggacggacaacuaaaa

SEQ ID NO: 285479 - RNA, 19 nt, Homo sapiens
  misc_RNA (1)...(19): siRNA sense strand
ggaucagcagcuaaacaaa

SEQ ID NO: 285480 - RNA, 19 nt, Homo sapiens
  misc_RNA (1)...(19): siRNA sense strand
ggaucaagagcuagucaag

SEQ ID NO: 285481 - RNA, 19 nt, Homo sapiens
  misc_RNA (1)...(19): siRNA sense strand
aucaagagcuagucaagag

SEQ ID NO: 285482 - RNA, 19 nt, Homo sapiens
  misc_RNA (1)...(19): siRNA sense strand
gcagcugaaguaccuggaa

SEQ ID NO: 285483 - RNA, 19 nt, Homo sapiens
  misc_RNA (1)...(19): siRNA sense strand
gcagguaggacagccaaag

SEQ ID NO: 285484 - RNA, 19 nt, Homo sapiens
  misc_RNA (1)...(19): siRNA sense strand
caauacccaucaggagcaa

SEQ ID NO: 285485 - RNA, 19 nt, Homo sapiens
  misc_RNA (1)...(19): siRNA sense strand
gugagcaacagcagaagga

SEQ ID NO: 285486 - RNA, 19 nt, Homo sapiens
  misc_RNA (1)...(19): siRNA sense strand
caguggccacccaaacaua

SEQ ID NO: 285487 - RNA, 19 nt, Homo sapiens
  misc_RNA (1)...(19): siRNA sense strand
gcuaaacaaacagcuggaa

SEQ ID NO: 285488 - RNA, 19 nt, Homo sapiens
  misc_RNA (1)...(19): siRNA sense strand
gaacagcaugaggaauauc

SEQ ID NO: 285489 - RNA, 19 nt, Homo sapiens
  misc_RNA (1)...(19): siRNA sense strand
cagcaugaggaauaucaga

SEQ ID NO: 285490 - RNA, 19 nt, Homo sapiens
  misc_RNA (1)...(19): siRNA sense strand
gccacccaaacauaaauaa

SEQ ID NO: 285491 - RNA, 19 nt, Homo sapiens
  misc_RNA (1)...(19): siRNA sense strand
gcaaaugaaacagccaacu

SEQ ID NO: 285492 - RNA, 19 nt, Homo sapiens
  misc_RNA (1)...(19): siRNA sense strand
aaugugagcaacagcagaa

SEQ ID NO: 285493 - RNA, 19 nt, Homo sapiens
  misc_RNA (1)...(19): siRNA sense strand
gggaaugaagaaagagcaa

SEQ ID NO: 285494 - RNA, 19 nt, Homo sapiens
  misc_RNA (1)...(19): siRNA sense strand
ugccugagcaagaauguga

SEQ ID NO: 285495 - RNA, 19 nt, Homo sapiens
  misc_RNA (1)...(19): siRNA sense strand
gagcuccucaagacuguuc

SEQ ID NO: 285496 - RNA, 19 nt, Homo sapiens
  misc_RNA (1)...(19): siRNA sense strand
ccaucaggagcaaaugaaa

SEQ ID NO: 285497 - RNA, 19 nt, Homo sapiens
  misc_RNA (1)...(19): siRNA sense strand
uagagcaccagcagcagaa

SEQ ID NO: 285498 - RNA, 19 nt, Homo sapiens
  misc_RNA (1)...(19): siRNA sense strand
gcucuaagaucaucacaua

SEQ ID NO: 285499 - RNA, 19 nt, Homo sapiens
  misc_RNA (1)...(19): siRNA sense strand
gaaacgaaccucuuugaaa

SEQ ID NO: 285500 - RNA, 19 nt, Homo sapiens
  misc_RNA (1)...(19): siRNA sense strand
ugacugacaucaccuuaaa

SEQ ID NO: 285501 - RNA, 19 nt, Homo sapiens
  misc_RNA (1)...(19): siRNA sense strand
ccagaacucuaucauaaga

SEQ ID NO: 285502 - RNA, 19 nt, Homo sapiens
  misc_RNA (1)...(19): siRNA sense strand
gaaggaggccaaacagaaa

SEQ ID NO: 285503 - RNA, 19 nt, Homo sapiens
  misc_RNA (1)...(19): siRNA sense strand
gagcugggauuccuagaga

SEQ ID NO: 285504 - RNA, 19 nt, Homo sapiens
  misc_RNA (1)...(19): siRNA sense strand
gaaucaacaugguagaaga

SEQ ID NO: 285505 - RNA, 19 nt, Homo sapiens
  misc_RNA (1)...(19): siRNA sense strand
ggacaugaacuuauauaug

SEQ ID NO: 285506 - RNA, 19 nt, Homo sapiens
  misc_RNA (1)...(19): siRNA sense strand
gauugaaacucccaugaug

SEQ ID NO: 285507 - RNA, 19 nt, Homo sapiens
  misc_RNA (1)...(19): siRNA sense strand
cuccagaacucuaucauaa

SEQ ID NO: 285508 - RNA, 19 nt, Homo sapiens
  misc_RNA (1)...(19): siRNA sense strand
guacugcccuggaauaugg

SEQ ID NO: 285509 - RNA, 19 nt, Homo sapiens
  misc_RNA (1)...(19): siRNA sense strand
ccugaaagcugagaagaaa

SEQ ID NO: 285510 - RNA, 19 nt, Homo sapiens
  misc_RNA (1)...(19): siRNA sense strand
ccaagccuuucaucacuua

SEQ ID NO: 285511 - RNA, 19 nt, Homo sapiens
  misc_RNA (1)...(19): siRNA sense strand
acaacgagcuggacaugaa

SEQ ID NO: 285512 - RNA, 19 nt, Homo sapiens
  misc_RNA (1)...(19): siRNA sense strand
ggaugaagcugccagaaac

SEQ ID NO: 285513 - RNA, 19 nt, Homo sapiens
  misc_RNA (1)...(19): siRNA sense strand
gagaauugcuccagaacuc

SEQ ID NO: 285514 - RNA, 19 nt, Homo sapiens
  misc_RNA (1)...(19): siRNA sense strand
ccacacaaguuccauguag

SEQ ID NO: 285515 - RNA, 19 nt, Homo sapiens
  misc_RNA (1)...(19): siRNA sense strand
ugaagaaacucgcaaaauu

SEQ ID NO: 285516 - RNA, 19 nt, Homo sapiens
  misc_RNA (1)...(19): siRNA sense strand
aaacgaaccucuuugaaac

SEQ ID NO: 285517 - RNA, 19 nt, Homo sapiens
  misc_RNA (1)...(19): siRNA sense strand
cgaccggguuuaugaaauu

SEQ ID NO: 285518 - RNA, 19 nt, Homo sapiens
  misc_RNA (1)...(19): siRNA sense strand
gaaccucuuugaaacugaa

SEQ ID NO: 285519 - RNA, 19 nt, Homo sapiens
  misc_RNA (1)...(19): siRNA sense strand
gaagaaagagauaugcaau

SEQ ID NO: 285520 - RNA, 19 nt, Homo sapiens
  misc_RNA (1)...(19): siRNA sense strand
ggaaagcucaucuucuaug

SEQ ID NO: 285521 - RNA, 19 nt, Homo sapiens
  misc_RNA (1)...(19): siRNA sense strand
ggggaaagcucaucuucua

SEQ ID NO: 285522 - RNA, 19 nt, Homo sapiens
  misc_RNA (1)...(19): siRNA sense strand
gguagaagagcuugagaaa

SEQ ID NO: 285523 - RNA, 19 nt, Homo sapiens
  misc_RNA (1)...(19): siRNA sense strand
gaagaaaguagcagagaag

SEQ ID NO: 285524 - RNA, 19 nt, Homo sapiens
  misc_RNA (1)...(19): siRNA sense strand
ggacccaaaucaauacuac

SEQ ID NO: 285525 - RNA, 19 nt, Homo sapiens
  misc_RNA (1)...(19): siRNA sense strand
cuaaagagggucugacuga

SEQ ID NO: 285526 - RNA, 19 nt, Homo sapiens
  misc_RNA (1)...(19): siRNA sense strand
ggacgccaguuccggaaug

SEQ ID NO: 285527 - RNA, 19 nt, Homo sapiens
  misc_RNA (1)...(19): siRNA sense strand
ggauugauuugacgcacaa

SEQ ID NO: 285528 - RNA, 19 nt, Homo sapiens
  misc_RNA (1)...(19): siRNA sense strand
gaugaaaacuucuguacug

SEQ ID NO: 285529 - RNA, 19 nt, Homo sapiens
  misc_RNA (1)...(19): siRNA sense strand
agaagaaaguagcagagaa

SEQ ID NO: 285530 - RNA, 19 nt, Homo sapiens
  misc_RNA (1)...(19): siRNA sense strand
caacaucaaggaaguacuu

SEQ ID NO: 285531 - RNA, 19 nt, Homo sapiens
  misc_RNA (1)...(19): siRNA sense strand
ggaaugaggggauugauuu

SEQ ID NO: 285532 - RNA, 19 nt, Homo sapiens
  misc_RNA (1)...(19): siRNA sense strand
ccaacaacaucaaggaagu

SEQ ID NO: 285533 - RNA, 19 nt, Homo sapiens
  misc_RNA (1)...(19): siRNA sense strand
ggaaaucacggagaagaug

SEQ ID NO: 285534 - RNA, 19 nt, Homo sapiens
  misc_RNA (1)...(19): siRNA sense strand
gaagacccauacccacaca

SEQ ID NO: 285535 - RNA, 19 nt, Homo sapiens
  misc_RNA (1)...(19): siRNA sense strand
gggaugaagcugccagaaa

SEQ ID NO: 285536 - RNA, 19 nt, Homo sapiens
  misc_RNA (1)...(19): siRNA sense strand
gggauggugaagcauauua

SEQ ID NO: 285537 - RNA, 19 nt, Homo sapiens
  misc_RNA (1)...(19): siRNA sense strand
gcaucgaccggguuuauga

SEQ ID NO: 285538 - RNA, 19 nt, Homo sapiens
  misc_RNA (1)...(19): siRNA sense strand
gauccugaaugacuuugug

SEQ ID NO: 285539 - RNA, 19 nt, Homo sapiens
  misc_RNA (1)...(19): siRNA sense strand
gaucacccacagauaauga

SEQ ID NO: 285540 - RNA, 19 nt, Homo sapiens
  misc_RNA (1)...(19): siRNA sense strand
uaugagaauugcuccagaa

SEQ ID NO: 285541 - RNA, 19 nt, Homo sapiens
  misc_RNA (1)...(19): siRNA sense strand
gaaacucccaugaugaaca

SEQ ID NO: 285542 - RNA, 19 nt, Homo sapiens
  misc_RNA (1)...(19): siRNA sense strand
gagcaagaaugagcugaag

SEQ ID NO: 285543 - RNA, 19 nt, Homo sapiens
  misc_RNA (1)...(19): siRNA sense strand
ggccaaggcugcaggugau

SEQ ID NO: 285544 - RNA, 19 nt, Homo sapiens
  misc_RNA (1)...(19): siRNA sense strand
cuaaauggcaccgcucuaa

SEQ ID NO: 285545 - RNA, 19 nt, Homo sapiens
  misc_RNA (1)...(19): siRNA sense strand
cagaaacgaaccucuuuga

SEQ ID NO: 285546 - RNA, 19 nt, Homo sapiens
  misc_RNA (1)...(19): siRNA sense strand
ucauggaaaucacggagaa

SEQ ID NO: 285547 - RNA, 19 nt, Homo sapiens
  misc_RNA (1)...(19): siRNA sense strand
gcguggacccaaaucaaua

SEQ ID NO: 285548 - RNA, 19 nt, Homo sapiens
  misc_RNA (1)...(19): siRNA sense strand
gcuuugagcuguuugucau

SEQ ID NO: 285549 - RNA, 19 nt, Homo sapiens
  misc_RNA (1)...(19): siRNA sense strand
gcuccagaacucuaucaua

SEQ ID NO: 285550 - RNA, 19 nt, Homo sapiens
  misc_RNA (1)...(19): siRNA sense strand
gagauugaaacucccauga

SEQ ID NO: 285551 - RNA, 19 nt, Homo sapiens
  misc_RNA (1)...(19): siRNA sense strand
agaaggaggccaaacagaa

SEQ ID NO: 285552 - RNA, 19 nt, Homo sapiens
  misc_RNA (1)...(19): siRNA sense strand
gggaucaccugacugacau

SEQ ID NO: 285553 - RNA, 19 nt, Homo sapiens
  misc_RNA (1)...(19): siRNA sense strand
gagcuggacaugaacuuau

SEQ ID NO: 285554 - RNA, 19 nt, Homo sapiens
  misc_RNA (1)...(19): siRNA sense strand
caacaacaucaaggaagua

SEQ ID NO: 285555 - RNA, 19 nt, Homo sapiens
  misc_RNA (1)...(19): siRNA sense strand
gaggccauguucauagaug

SEQ ID NO: 285556 - RNA, 19 nt, Homo sapiens
  misc_RNA (1)...(19): siRNA sense strand
gaagaaacucgcaaaauuc

SEQ ID NO: 285557 - RNA, 19 nt, Homo sapiens
  misc_RNA (1)...(19): siRNA sense strand
gcaagaaugagcugaagag

SEQ ID NO: 285558 - RNA, 19 nt, Homo sapiens
  misc_RNA (1)...(19): siRNA sense strand
gaauugcuccagaacucua

SEQ ID NO: 285559 - RNA, 19 nt, Homo sapiens
  misc_RNA (1)...(19): siRNA sense strand
agaacucuaucauaagaug

SEQ ID NO: 285560 - RNA, 19 nt, Homo sapiens
  misc_RNA (1)...(19): siRNA sense strand
agaaagagauaugcaaugc

SEQ ID NO: 285561 - RNA, 19 nt, Homo sapiens
  misc_RNA (1)...(19): siRNA sense strand
caucaauccuacauucauc

SEQ ID NO: 285562 - RNA, 19 nt, Homo sapiens
  misc_RNA (1)...(19): siRNA sense strand
gagaagaaaguagcagaga

SEQ ID NO: 285563 - RNA, 19 nt, Homo sapiens
  misc_RNA (1)...(19): siRNA sense strand
cgaaacugagcaagaauga

SEQ ID NO: 285564 - RNA, 19 nt, Homo sapiens
  misc_RNA (1)...(19): siRNA sense strand
uaaauggcaccgcucuaaa

SEQ ID NO: 285565 - RNA, 19 nt, Homo sapiens
  misc_RNA (1)...(19): siRNA sense strand
gagcguggacccaaaucaa

SEQ ID NO: 285566 - RNA, 19 nt, Homo sapiens
  misc_RNA (1)...(19): siRNA sense strand
ggcaaaagcuguugaaugc

SEQ ID NO: 285567 - RNA, 19 nt, Homo sapiens
  misc_RNA (1)...(19): siRNA sense strand
ccaccaaccacaccacuga

SEQ ID NO: 285568 - RNA, 19 nt, Homo sapiens
  misc_RNA (1)...(19): siRNA sense strand
ccaaccacaccacugauaa

SEQ ID NO: 285569 - RNA, 19 nt, Homo sapiens
  misc_RNA (1)...(19): siRNA sense strand
ccagagauacuuggacuug

SEQ ID NO: 285570 - RNA, 19 nt, Homo sapiens
  misc_RNA (1)...(19): siRNA sense strand
gccagaaacgaaccucuuu

SEQ ID NO: 285571 - RNA, 19 nt, Homo sapiens
  misc_RNA (1)...(19): siRNA sense strand
caacaugguagaagagcuu

SEQ ID NO: 285572 - RNA, 19 nt, Homo sapiens
  misc_RNA (1)...(19): siRNA sense strand
ggccaagccuuucaucacu

SEQ ID NO: 285573 - RNA, 19 nt, Homo sapiens
  misc_RNA (1)...(19): siRNA sense strand
gagaaggaggccaaacaga

SEQ ID NO: 285574 - RNA, 19 nt, Homo sapiens
  misc_RNA (1)...(19): siRNA sense strand
gagccgaaacugagcaaga

SEQ ID NO: 285575 - RNA, 19 nt, Homo sapiens
  misc_RNA (1)...(19): siRNA sense strand
caucuucuaugaucuucga

SEQ ID NO: 285576 - RNA, 19 nt, Homo sapiens
  misc_RNA (1)...(19): siRNA sense strand
gaauguagcaaccacugau

SEQ ID NO: 285577 - RNA, 19 nt, Homo sapiens
  misc_RNA (1)...(19): siRNA sense strand
agagauacuuggacuugau

SEQ ID NO: 285578 - RNA, 19 nt, Homo sapiens
  misc_RNA (1)...(19): siRNA sense strand
gcucaaagacaaggaaaca

SEQ ID NO: 285579 - RNA, 19 nt, Homo sapiens
  misc_RNA (1)...(19): siRNA sense strand
caugaaacccgaagacaag

SEQ ID NO: 285580 - RNA, 19 nt, Homo sapiens
  misc_RNA (1)...(19): siRNA sense strand
gaaagcugagaagaaagua

SEQ ID NO: 285581 - RNA, 19 nt, Homo sapiens
  misc_RNA (1)...(19): siRNA sense strand
cagggauggugaagcauau

SEQ ID NO: 285582 - RNA, 19 nt, Homo sapiens
  misc_RNA (1)...(19): siRNA sense strand
uugcauauguuaccucauc

SEQ ID NO: 285583 - RNA, 19 nt, Homo sapiens
  misc_RNA (1)...(19): siRNA sense strand
gcagucaagcaauucauca

SEQ ID NO: 285584 - RNA, 19 nt, Homo sapiens
  misc_RNA (1)...(19): siRNA sense strand
aaacucccaugaugaacau

SEQ ID NO: 285585 - RNA, 19 nt, Homo sapiens
  misc_RNA (1)...(19): siRNA sense strand
ucaaagacaaggaaacaag

SEQ ID NO: 285586 - RNA, 19 nt, Homo sapiens
  misc_RNA (1)...(19): siRNA sense strand
gaucgagucgccauguuuc

SEQ ID NO: 285587 - RNA, 19 nt, Homo sapiens
  misc_RNA (1)...(19): siRNA sense strand
ucagggauggugaagcaua

SEQ ID NO: 285588 - RNA, 19 nt, Homo sapiens
  misc_RNA (1)...(19): siRNA sense strand
gccaagccuuucaucacuu

SEQ ID NO: 285589 - RNA, 19 nt, Homo sapiens
  misc_RNA (1)...(19): siRNA sense strand
uggacuugauccugaauga

SEQ ID NO: 285590 - RNA, 19 nt, Homo sapiens
  misc_RNA (1)...(19): siRNA sense strand
cagagauacuuggacuuga

SEQ ID NO: 285591 - RNA, 19 nt, Homo sapiens
  misc_RNA (1)...(19): siRNA sense strand
uuugugaggcagaaauuua

SEQ ID NO: 285592 - RNA, 19 nt, Homo sapiens
  misc_RNA (1)...(19): siRNA sense strand
ccaugaaacccgaagacaa

SEQ ID NO: 285593 - RNA, 19 nt, Homo sapiens
  misc_RNA (1)...(19): siRNA sense strand
ugaagaaagagauaugcaa

SEQ ID NO: 285594 - RNA, 19 nt, Homo sapiens
  misc_RNA (1)...(19): siRNA sense strand
uugcaucaauccuacauuc

SEQ ID NO: 285595 - RNA, 19 nt, Homo sapiens
  misc_RNA (1)...(19): siRNA sense strand
gaaacucgcaaaauucuug

SEQ ID NO: 285596 - RNA, 19 nt, Homo sapiens
  misc_RNA (1)...(19): siRNA sense strand
caaccacaccacugauaau

SEQ ID NO: 285597 - RNA, 19 nt, Homo sapiens
  misc_RNA (1)...(19): siRNA sense strand
gaccggguuuaugaaauug

SEQ ID NO: 285598 - RNA, 19 nt, Homo sapiens
  misc_RNA (1)...(19): siRNA sense strand
ggacgaggaugccauguca

SEQ ID NO: 285599 - RNA, 19 nt, Homo sapiens
  misc_RNA (1)...(19): siRNA sense strand
gcaagaugaugucugaguu

SEQ ID NO: 285600 - RNA, 19 nt, Homo sapiens
  misc_RNA (1)...(19): siRNA sense strand
gaacaucgucaaccagaaa

SEQ ID NO: 285601 - RNA, 19 nt, Homo sapiens
  misc_RNA (1)...(19): siRNA sense strand
acaagaaccuggacacugu

SEQ ID NO: 285602 - RNA, 19 nt, Homo sapiens
  misc_RNA (1)...(19): siRNA sense strand
gaggaaaggcugugucuuc

SEQ ID NO: 285603 - RNA, 19 nt, Homo sapiens
  misc_RNA (1)...(19): siRNA sense strand
caagacagccuggaaguug

SEQ ID NO: 285604 - RNA, 19 nt, Homo sapiens
  misc_RNA (1)...(19): siRNA sense strand
gaggagaggcugcauaagu

SEQ ID NO: 285605 - RNA, 19 nt, Homo sapiens
  misc_RNA (1)...(19): siRNA sense strand
caucugcaaugaccaguug

SEQ ID NO: 285606 - RNA, 19 nt, Homo sapiens
  misc_RNA (1)...(19): siRNA sense strand
gggaggagaggcugcauaa

SEQ ID NO: 285607 - RNA, 19 nt, Homo sapiens
  misc_RNA (1)...(19): siRNA sense strand
gcaccucccugaagcugau

SEQ ID NO: 285608 - RNA, 19 nt, Homo sapiens
  misc_RNA (1)...(19): siRNA sense strand
ucugggaccuggagaaguu

SEQ ID NO: 285609 - RNA, 19 nt, Homo sapiens
  misc_RNA (1)...(19): siRNA sense strand
gcaaugaccaguugauagg

SEQ ID NO: 285610 - RNA, 19 nt, Homo sapiens
  misc_RNA (1)...(19): siRNA sense strand
ccggcaagaugaugucuga

SEQ ID NO: 285611 - RNA, 19 nt, Homo sapiens
  misc_RNA (1)...(19): siRNA sense strand
gaaccugagcggugcuuug

SEQ ID NO: 285612 - RNA, 19 nt, Homo sapiens
  misc_RNA (1)...(19): siRNA sense strand
gugaagcucugggaucuca

SEQ ID NO: 285613 - RNA, 19 nt, Homo sapiens
  misc_RNA (1)...(19): siRNA sense strand
cagcaaaggaggcagcaaa

SEQ ID NO: 285614 - RNA, 19 nt, Homo sapiens
  misc_RNA (1)...(19): siRNA sense strand
aagcccaacugcaucauga

SEQ ID NO: 285615 - RNA, 19 nt, Homo sapiens
  misc_RNA (1)...(19): siRNA sense strand
aggagaggcugcauaagug

SEQ ID NO: 285616 - RNA, 19 nt, Homo sapiens
  misc_RNA (1)...(19): siRNA sense strand
gaggaugccaugucacaga

SEQ ID NO: 285617 - RNA, 19 nt, Homo sapiens
  misc_RNA (1)...(19): siRNA sense strand
ccuggaagcugccaaaauu

SEQ ID NO: 285618 - RNA, 19 nt, Homo sapiens
  misc_RNA (1)...(19): siRNA sense strand
ccugagcggugcuuugaug

SEQ ID NO: 285619 - RNA, 19 nt, Homo sapiens
  misc_RNA (1)...(19): siRNA sense strand
gcaaaggccacgacaccau

SEQ ID NO: 285620 - RNA, 19 nt, Homo sapiens
  misc_RNA (1)...(19): siRNA sense strand
ggacuacaacgagaucuuc

SEQ ID NO: 285621 - RNA, 19 nt, Homo sapiens
  misc_RNA (1)...(19): siRNA sense strand
ggaccuggaagcugccaaa

SEQ ID NO: 285622 - RNA, 19 nt, Homo sapiens
  misc_RNA (1)...(19): siRNA sense strand
agagcaacgucuccuccua

SEQ ID NO: 285623 - RNA, 19 nt, Homo sapiens
  misc_RNA (1)...(19): siRNA sense strand
gggugaagcagaacucaga

SEQ ID NO: 285624 - RNA, 19 nt, Homo sapiens
  misc_RNA (1)...(19): siRNA sense strand
ucaacguggucgaguuuca

SEQ ID NO: 285625 - RNA, 19 nt, Homo sapiens
  misc_RNA (1)...(19): siRNA sense strand
gccuggaaguugcaagaga

SEQ ID NO: 285626 - RNA, 19 nt, Homo sapiens
  misc_RNA (1)...(19): siRNA sense strand
gaccaugggcgacaucaag

SEQ ID NO: 285627 - RNA, 19 nt, Homo sapiens
  misc_RNA (1)...(19): siRNA sense strand
ucaacaagcccaacugcau

SEQ ID NO: 285628 - RNA, 19 nt, Homo sapiens
  misc_RNA (1)...(19): siRNA sense strand
caagaugaugucugaguuc

SEQ ID NO: 285629 - RNA, 19 nt, Homo sapiens
  misc_RNA (1)...(19): siRNA sense strand
ugaacaucgucaaccagaa

SEQ ID NO: 285630 - RNA, 19 nt, Homo sapiens
  misc_RNA (1)...(19): siRNA sense strand
caacaucugcagccuggau

SEQ ID NO: 285631 - RNA, 19 nt, Homo sapiens
  misc_RNA (1)...(19): siRNA sense strand
ccuggaaguugcaagagau

SEQ ID NO: 285632 - RNA, 19 nt, Homo sapiens
  misc_RNA (1)...(19): siRNA sense strand
cagaugaccacaccgugaa

SEQ ID NO: 285633 - RNA, 19 nt, Homo sapiens
  misc_RNA (1)...(19): siRNA sense strand
gaccuggccaucugcaaug

SEQ ID NO: 285634 - RNA, 19 nt, Homo sapiens
  misc_RNA (1)...(19): siRNA sense strand
cugcagagcaaguaugaga

SEQ ID NO: 285635 - RNA, 19 nt, Homo sapiens
  misc_RNA (1)...(19): siRNA sense strand
cgacgcagccacagcaaag

SEQ ID NO: 285636 - RNA, 19 nt, Homo sapiens
  misc_RNA (1)...(19): siRNA sense strand
gaacgccgaggacuacaac

SEQ ID NO: 285637 - RNA, 19 nt, Homo sapiens
  misc_RNA (1)...(19): siRNA sense strand
ucaccaagacagccuggaa

SEQ ID NO: 285638 - RNA, 19 nt, Homo sapiens
  misc_RNA (1)...(19): siRNA sense strand
aaggcugugucuuccgaua

SEQ ID NO: 285639 - RNA, 19 nt, Homo sapiens
  misc_RNA (1)...(19): siRNA sense strand
gagagcguccgccucaaca

SEQ ID NO: 285640 - RNA, 19 nt, Homo sapiens
  misc_RNA (1)...(19): siRNA sense strand
ccaccguccugccacagau

SEQ ID NO: 285641 - RNA, 19 nt, Homo sapiens
  misc_RNA (1)...(19): siRNA sense strand
ccaagacagccuggaaguu

SEQ ID NO: 285642 - RNA, 19 nt, Homo sapiens
  misc_RNA (1)...(19): siRNA sense strand
gucaaccugugguccauca

SEQ ID NO: 285643 - RNA, 19 nt, Homo sapiens
  misc_RNA (1)...(19): siRNA sense strand
ugucaacguggucgaguuu

SEQ ID NO: 285644 - RNA, 19 nt, Homo sapiens
  misc_RNA (1)...(19): siRNA sense strand
ggcugugucuuccgauaca

SEQ ID NO: 285645 - RNA, 19 nt, Homo sapiens
  misc_RNA (1)...(19): siRNA sense strand
ucaccagccgccacaagaa

SEQ ID NO: 285646 - RNA, 19 nt, Homo sapiens
  misc_RNA (1)...(19): siRNA sense strand
ccagaacgccgaggacuac

SEQ ID NO: 285647 - RNA, 19 nt, Homo sapiens
  misc_RNA (1)...(19): siRNA sense strand
cucagagggugaagcagaa

SEQ ID NO: 285648 - RNA, 19 nt, Homo sapiens
  misc_RNA (1)...(19): siRNA sense strand
ggcaagaugaugucugagu

SEQ ID NO: 285649 - RNA, 19 nt, Homo sapiens
  misc_RNA (1)...(19): siRNA sense strand
ucagcggccuggucaagag

SEQ ID NO: 285650 - RNA, 19 nt, Homo sapiens
  misc_RNA (1)...(19): siRNA sense strand
gcaguucccggugccaaau

SEQ ID NO: 285651 - RNA, 19 nt, Homo sapiens
  misc_RNA (1)...(19): siRNA sense strand
ccagcaacguguccucacu

SEQ ID NO: 285652 - RNA, 19 nt, Homo sapiens
  misc_RNA (1)...(19): siRNA sense strand
gcaaguaugagagcuacgu

SEQ ID NO: 285653 - RNA, 19 nt, Homo sapiens
  misc_RNA (1)...(19): siRNA sense strand
ccacccguacggcgaguuu

SEQ ID NO: 285654 - RNA, 19 nt, Homo sapiens
  misc_RNA (1)...(19): siRNA sense strand
agaaagccucccuguggaa

SEQ ID NO: 285655 - RNA, 19 nt, Homo sapiens
  misc_RNA (1)...(19): siRNA sense strand
ugucacagauccgcaaagg

SEQ ID NO: 285656 - RNA, 19 nt, Homo sapiens
  misc_RNA (1)...(19): siRNA sense strand
ugccauggaugugcaguuc

SEQ ID NO: 285657 - RNA, 19 nt, Homo sapiens
  misc_RNA (1)...(19): siRNA sense strand
cgaccuggccaucugcaau

SEQ ID NO: 285658 - RNA, 19 nt, Homo sapiens
  misc_RNA (1)...(19): siRNA sense strand
ccuccuacgugguggaucu

SEQ ID NO: 285659 - RNA, 19 nt, Homo sapiens
  misc_RNA (1)...(19): siRNA sense strand
ugguggaccuccugaacau

SEQ ID NO: 285660 - RNA, 19 nt, Homo sapiens
  misc_RNA (1)...(19): siRNA sense strand
gcacagacucucuuaauaa

SEQ ID NO: 285661 - RNA, 19 nt, Homo sapiens
  misc_RNA (1)...(19): siRNA sense strand
gaacaucccaggagaaauu

SEQ ID NO: 285662 - RNA, 19 nt, Homo sapiens
  misc_RNA (1)...(19): siRNA sense strand
gaugaaaucuccuucuaug

SEQ ID NO: 285663 - RNA, 19 nt, Homo sapiens
  misc_RNA (1)...(19): siRNA sense strand
gaacaucauugacaucauc

SEQ ID NO: 285664 - RNA, 19 nt, Homo sapiens
  misc_RNA (1)...(19): siRNA sense strand
caacauugcugggcugaga

SEQ ID NO: 285665 - RNA, 19 nt, Homo sapiens
  misc_RNA (1)...(19): siRNA sense strand
cagaugaaauccaagaaga

SEQ ID NO: 285666 - RNA, 19 nt, Homo sapiens
  misc_RNA (1)...(19): siRNA sense strand
caacuucaauuacuucuac

SEQ ID NO: 285667 - RNA, 19 nt, Homo sapiens
  misc_RNA (1)...(19): siRNA sense strand
caggagaaauugaaagaau

SEQ ID NO: 285668 - RNA, 19 nt, Homo sapiens
  misc_RNA (1)...(19): siRNA sense strand
caugacaacuguaggcuau

SEQ ID NO: 285669 - RNA, 19 nt, Homo sapiens
  misc_RNA (1)...(19): siRNA sense strand
ccacagagaagucuaggaa

SEQ ID NO: 285670 - RNA, 19 nt, Homo sapiens
  misc_RNA (1)...(19): siRNA sense strand
uaucuuugcugaugaaauc

SEQ ID NO: 285671 - RNA, 19 nt, Homo sapiens
  misc_RNA (1)...(19): siRNA sense strand
acagagaagucuaggaaau

SEQ ID NO: 285672 - RNA, 19 nt, Homo sapiens
  misc_RNA (1)...(19): siRNA sense strand
caucaaagacccugaaaca

SEQ ID NO: 285673 - RNA, 19 nt, Homo sapiens
  misc_RNA (1)...(19): siRNA sense strand
ucuaugagcuggguaguga

SEQ ID NO: 285674 - RNA, 19 nt, Homo sapiens
  misc_RNA (1)...(19): siRNA sense strand
gaaagcaccaaccaugaga

SEQ ID NO: 285675 - RNA, 19 nt, Homo sapiens
  misc_RNA (1)...(19): siRNA sense strand
aaagaauccucaacagugu

SEQ ID NO: 285676 - RNA, 19 nt, Homo sapiens
  misc_RNA (1)...(19): siRNA sense strand
caucuucuuucucuucauu

SEQ ID NO: 285677 - RNA, 19 nt, Homo sapiens
  misc_RNA (1)...(19): siRNA sense strand
guguguggcuggaaagaaa

SEQ ID NO: 285678 - RNA, 19 nt, Homo sapiens
  misc_RNA (1)...(19): siRNA sense strand
ggauguguguggcuggaaa

SEQ ID NO: 285679 - RNA, 19 nt, Homo sapiens
  misc_RNA (1)...(19): siRNA sense strand
agagaagucuaggaaauga

SEQ ID NO: 285680 - RNA, 19 nt, Homo sapiens
  misc_RNA (1)...(19): siRNA sense strand
ucagaacccuuagucaguu

SEQ ID NO: 285681 - RNA, 19 nt, Homo sapiens
  misc_RNA (1)...(19): siRNA sense strand
gcgaaagcaccaaccauga

SEQ ID NO: 285682 - RNA, 19 nt, Homo sapiens
  misc_RNA (1)...(19): siRNA sense strand
agguugcgcuggucaauuu

SEQ ID NO: 285683 - RNA, 19 nt, Homo sapiens
  misc_RNA (1)...(19): siRNA sense strand
gacaucaucuccauuaucc

SEQ ID NO: 285684 - RNA, 19 nt, Homo sapiens
  misc_RNA (1)...(19): siRNA sense strand
ucaggaacaucaugaacau

SEQ ID NO: 285685 - RNA, 19 nt, Homo sapiens
  misc_RNA (1)...(19): siRNA sense strand
cugaugaaaucuccuucua

SEQ ID NO: 285686 - RNA, 19 nt, Homo sapiens
  misc_RNA (1)...(19): siRNA sense strand
ccacagacuucgacucaac

SEQ ID NO: 285687 - RNA, 19 nt, Homo sapiens
  misc_RNA (1)...(19): siRNA sense strand
agcacagacucucuuaaua

SEQ ID NO: 285688 - RNA, 19 nt, Homo sapiens
  misc_RNA (1)...(19): siRNA sense strand
caccgacccuuucuucaug

SEQ ID NO: 285689 - RNA, 19 nt, Homo sapiens
  misc_RNA (1)...(19): siRNA sense strand
ucaaagacccugaaacacu

SEQ ID NO: 285690 - RNA, 19 nt, Homo sapiens
  misc_RNA (1)...(19): siRNA sense strand
uugcaacucucaucacaga

SEQ ID NO: 285691 - RNA, 19 nt, Homo sapiens
  misc_RNA (1)...(19): siRNA sense strand
cagcacagacucucuuaau

SEQ ID NO: 285692 - RNA, 19 nt, Homo sapiens
  misc_RNA (1)...(19): siRNA sense strand
gaaaccagcgggugaucau

SEQ ID NO: 285693 - RNA, 19 nt, Homo sapiens
  misc_RNA (1)...(19): siRNA sense strand
gcagaacaucccaggagaa

SEQ ID NO: 285694 - RNA, 19 nt, Homo sapiens
  misc_RNA (1)...(19): siRNA sense strand
aaacacugcuacccaccaa

SEQ ID NO: 285695 - RNA, 19 nt, Homo sapiens
  misc_RNA (1)...(19): siRNA sense strand
ugauaucuuugcugaugaa

SEQ ID NO: 285696 - RNA, 19 nt, Homo sapiens
  misc_RNA (1)...(19): siRNA sense strand
cagaacaucccaggagaaa

SEQ ID NO: 285697 - RNA, 19 nt, Homo sapiens
  misc_RNA (1)...(19): siRNA sense strand
uggagacacugccagaguu

SEQ ID NO: 285698 - RNA, 19 nt, Homo sapiens
  misc_RNA (1)...(19): siRNA sense strand
ugaaaucuccuucuaugag

SEQ ID NO: 285699 - RNA, 19 nt, Homo sapiens
  misc_RNA (1)...(19): siRNA sense strand
gucauugucuccaacuuca

SEQ ID NO: 285700 - RNA, 19 nt, Homo sapiens
  misc_RNA (1)...(19): siRNA sense strand
gugaggccauggaccaguu

SEQ ID NO: 285701 - RNA, 19 nt, Homo sapiens
  misc_RNA (1)...(19): siRNA sense strand
gcucaucuucuuucucuuc

SEQ ID NO: 285702 - RNA, 19 nt, Homo sapiens
  misc_RNA (1)...(19): siRNA sense strand
gugagggucuuccgcaucu

SEQ ID NO: 285703 - RNA, 19 nt, Homo sapiens
  misc_RNA (1)...(19): siRNA sense strand
ugaaagaauccucaacagu

SEQ ID NO: 285704 - RNA, 19 nt, Homo sapiens
  misc_RNA (1)...(19): siRNA sense strand
gagccagagucccauuucu

SEQ ID NO: 285705 - RNA, 19 nt, Homo sapiens
  misc_RNA (1)...(19): siRNA sense strand
agccagugguccuaaauga

SEQ ID NO: 285706 - RNA, 19 nt, Homo sapiens
  misc_RNA (1)...(19): siRNA sense strand
aguguaggcucaagaaugg

SEQ ID NO: 285707 - RNA, 19 nt, Homo sapiens
  misc_RNA (1)...(19): siRNA sense strand
uugcugggcugagauuuga

SEQ ID NO: 285708 - RNA, 19 nt, Homo sapiens
  misc_RNA (1)...(19): siRNA sense strand
caacaguguaggcucaaga

SEQ ID NO: 285709 - RNA, 19 nt, Homo sapiens
  misc_RNA (1)...(19): siRNA sense strand
cuaccugcaucgugugguu

SEQ ID NO: 285710 - RNA, 19 nt, Homo sapiens
  misc_RNA (1)...(19): siRNA sense strand
cagagaagucuaggaaaug

SEQ ID NO: 285711 - RNA, 19 nt, Homo sapiens
  misc_RNA (1)...(19): siRNA sense strand
gcagcacagacucucuuaa

SEQ ID NO: 285712 - RNA, 19 nt, Homo sapiens
  misc_RNA (1)...(19): siRNA sense strand
ucccauuucucuagcauuc

SEQ ID NO: 285713 - RNA, 19 nt, Homo sapiens
  misc_RNA (1)...(19): siRNA sense strand
ggagacugagaaugaagaa

SEQ ID NO: 285714 - RNA, 19 nt, Homo sapiens
  misc_RNA (1)...(19): siRNA sense strand
ccagugguccuaaaugaag

SEQ ID NO: 285715 - RNA, 19 nt, Homo sapiens
  misc_RNA (1)...(19): siRNA sense strand
ucuccaacuucaauuacuu

SEQ ID NO: 285716 - RNA, 19 nt, Homo sapiens
  misc_RNA (1)...(19): siRNA sense strand
ggaagauugugggcacucu

SEQ ID NO: 285717 - RNA, 19 nt, Homo sapiens
  misc_RNA (1)...(19): siRNA sense strand
ugacaacuguaggcuaugg

SEQ ID NO: 285718 - RNA, 19 nt, Homo sapiens
  misc_RNA (1)...(19): siRNA sense strand
auugacaucaucuccauua

SEQ ID NO: 285719 - RNA, 19 nt, Homo sapiens
  misc_RNA (1)...(19): siRNA sense strand
ucauugacaucaucuccau

SEQ ID NO: 285720 - RNA, 19 nt, Homo sapiens
  misc_RNA (1)...(19): siRNA sense strand
auugauaucuuugcugaug

SEQ ID NO: 285721 - RNA, 19 nt, Homo sapiens
  misc_RNA (1)...(19): siRNA sense strand
ggaaaccagcgggugauca

SEQ ID NO: 285722 - RNA, 19 nt, Homo sapiens
  misc_RNA (1)...(19): siRNA sense strand
cuacuuugcugagguggau

SEQ ID NO: 285723 - RNA, 19 nt, Homo sapiens
  misc_RNA (1)...(19): siRNA sense strand
ggagacacugccagaguuc

SEQ ID NO: 285724 - RNA, 19 nt, Homo sapiens
  misc_RNA (1)...(19): siRNA sense strand
cuuagucaguucccagaga

SEQ ID NO: 285725 - RNA, 19 nt, Homo sapiens
  misc_RNA (1)...(19): siRNA sense strand
caguguaggcucaagaaug

SEQ ID NO: 285726 - RNA, 19 nt, Homo sapiens
  misc_RNA (1)...(19): siRNA sense strand
aggagaaauugaaagaauc

SEQ ID NO: 285727 - RNA, 19 nt, Homo sapiens
  misc_RNA (1)...(19): siRNA sense strand
ccagugcagucuacuuugc

SEQ ID NO: 285728 - RNA, 19 nt, Homo sapiens
  misc_RNA (1)...(19): siRNA sense strand
ggaauccuauauuauuacc

SEQ ID NO: 285729 - RNA, 19 nt, Homo sapiens
  misc_RNA (1)...(19): siRNA sense strand
ggcagcacagacucucuua

SEQ ID NO: 285730 - RNA, 19 nt, Homo sapiens
  misc_RNA (1)...(19): siRNA sense strand
gagccagugguccuaaaug

SEQ ID NO: 285731 - RNA, 19 nt, Homo sapiens
  misc_RNA (1)...(19): siRNA sense strand
ugacaucaucuccauuauc

SEQ ID NO: 285732 - RNA, 19 nt, Homo sapiens
  misc_RNA (1)...(19): siRNA sense strand
guucaccgacccuuucuuc

SEQ ID NO: 285733 - RNA, 19 nt, Homo sapiens
  misc_RNA (1)...(19): siRNA sense strand
ccagaguuccgggaggaua

SEQ ID NO: 285734 - RNA, 19 nt, Homo sapiens
  misc_RNA (1)...(19): siRNA sense strand
ucaguucuggcuccucuuu

SEQ ID NO: 285735 - RNA, 19 nt, Homo sapiens
  misc_RNA (1)...(19): siRNA sense strand
gagccgagugcccaacaga

SEQ ID NO: 285736 - RNA, 19 nt, Homo sapiens
  misc_RNA (1)...(19): siRNA sense strand
cgaaagcaccaaccaugag

SEQ ID NO: 285737 - RNA, 19 nt, Homo sapiens
  misc_RNA (1)...(19): siRNA sense strand
gggagacugagaaugaaga

SEQ ID NO: 285738 - RNA, 19 nt, Homo sapiens
  misc_RNA (1)...(19): siRNA sense strand
ugaugaaaucuccuucuau

SEQ ID NO: 285739 - RNA, 19 nt, Homo sapiens
  misc_RNA (1)...(19): siRNA sense strand
uugcucaucuucuuucucu

SEQ ID NO: 285740 - RNA, 19 nt, Homo sapiens
  misc_RNA (1)...(19): siRNA sense strand
uugaguacccugaaaguuc

SEQ ID NO: 285741 - RNA, 19 nt, Homo sapiens
  misc_RNA (1)...(19): siRNA sense strand
guucuuugacuccaugaga

SEQ ID NO: 285742 - RNA, 19 nt, Homo sapiens
  misc_RNA (1)...(19): siRNA sense strand
gggcagcacagacucucuu

SEQ ID NO: 285743 - RNA, 19 nt, Homo sapiens
  misc_RNA (1)...(19): siRNA sense strand
ccgggagacugagaaugaa

SEQ ID NO: 285744 - RNA, 19 nt, Homo sapiens
  misc_RNA (1)...(19): siRNA sense strand
gccagugguccuaaaugaa

SEQ ID NO: 285745 - RNA, 19 nt, Homo sapiens
  misc_RNA (1)...(19): siRNA sense strand
aguucuggcuccucuuuga

SEQ ID NO: 285746 - RNA, 19 nt, Homo sapiens
  misc_RNA (1)...(19): siRNA sense strand
gagguugcgcuggucaauu

SEQ ID NO: 285747 - RNA, 19 nt, Homo sapiens
  misc_RNA (1)...(19): siRNA sense strand
gcagggguccucaccauug

SEQ ID NO: 285748 - RNA, 19 nt, Homo sapiens
  misc_RNA (1)...(19): siRNA sense strand
ucaccgacccuuucuucau

SEQ ID NO: 285749 - RNA, 19 nt, Homo sapiens
  misc_RNA (1)...(19): siRNA sense strand
ucuggcuccucuuugagua

SEQ ID NO: 285750 - RNA, 19 nt, Homo sapiens
  misc_RNA (1)...(19): siRNA sense strand
ggagaaauugaaagaaucc

SEQ ID NO: 285751 - RNA, 19 nt, Homo sapiens
  misc_RNA (1)...(19): siRNA sense strand
acacugcuacccaccaaug

SEQ ID NO: 285752 - RNA, 19 nt, Homo sapiens
  misc_RNA (1)...(19): siRNA sense strand
gaugagccagagucccauu

SEQ ID NO: 285753 - RNA, 19 nt, Homo sapiens
  misc_RNA (1)...(19): siRNA sense strand
gcagauccucgggcaaaca

SEQ ID NO: 285754 - RNA, 19 nt, Homo sapiens
  misc_RNA (1)...(19): siRNA sense strand
acccagcucagaacccuua

SEQ ID NO: 285755 - RNA, 19 nt, Homo sapiens
  misc_RNA (1)...(19): siRNA sense strand
aggaacaucaugaacauca

SEQ ID NO: 285756 - RNA, 19 nt, Homo sapiens
  misc_RNA (1)...(19): siRNA sense strand
gguguugguuguggucauc

SEQ ID NO: 285757 - RNA, 19 nt, Homo sapiens
  misc_RNA (1)...(19): siRNA sense strand
ucauuggagucauccucuu

SEQ ID NO: 285758 - RNA, 19 nt, Homo sapiens
  misc_RNA (1)...(19): siRNA sense strand
caucccaggagaaauugaa

SEQ ID NO: 285759 - RNA, 19 nt, Homo sapiens
  misc_RNA (1)...(19): siRNA sense strand
agacugagaaugaagaaaa

SEQ ID NO: 285760 - RNA, 19 nt, Homo sapiens
  misc_RNA (1)...(19): siRNA sense strand
gauacgggcuccugguugu

SEQ ID NO: 285761 - RNA, 19 nt, Homo sapiens
  misc_RNA (1)...(19): siRNA sense strand
gaaaggccuucugcauggu

SEQ ID NO: 285762 - RNA, 19 nt, Homo sapiens
  misc_RNA (1)...(19): siRNA sense strand
ccauuggccuggaggacuu

SEQ ID NO: 285763 - RNA, 19 nt, Homo sapiens
  misc_RNA (1)...(19): siRNA sense strand
ggccagcucgcacuucuug

SEQ ID NO: 285764 - RNA, 19 nt, Homo sapiens
  misc_RNA (1)...(19): siRNA sense strand
gcggaaaggccuucugcau

SEQ ID NO: 285765 - RNA, 19 nt, Homo sapiens
  misc_RNA (1)...(19): siRNA sense strand
cacagguuauggccacaug

SEQ ID NO: 285766 - RNA, 19 nt, Homo sapiens
  misc_RNA (1)...(19): siRNA sense strand
ggaccaagguggcauccua

SEQ ID NO: 285767 - RNA, 19 nt, Homo sapiens
  misc_RNA (1)...(19): siRNA sense strand
gauacgggcuccugguugu

SEQ ID NO: 285768 - RNA, 19 nt, Homo sapiens
  misc_RNA (1)...(19): siRNA sense strand
gaaaggccuucugcauggu

SEQ ID NO: 285769 - RNA, 19 nt, Homo sapiens
  misc_RNA (1)...(19): siRNA sense strand
ccauuggccuggaggacuu

SEQ ID NO: 285770 - RNA, 19 nt, Homo sapiens
  misc_RNA (1)...(19): siRNA sense strand
ggccagcucgcacuucuug

SEQ ID NO: 285771 - RNA, 19 nt, Homo sapiens
  misc_RNA (1)...(19): siRNA sense strand
gcggaaaggccuucugcau

SEQ ID NO: 285772 - RNA, 19 nt, Homo sapiens
  misc_RNA (1)...(19): siRNA sense strand
cacagguuauggccacaug

SEQ ID NO: 285773 - RNA, 19 nt, Homo sapiens
  misc_RNA (1)...(19): siRNA sense strand
gauacgggcuccugguugu

SEQ ID NO: 285774 - RNA, 19 nt, Homo sapiens
  misc_RNA (1)...(19): siRNA sense strand
gaaaggccuucugcauggu

SEQ ID NO: 285775 - RNA, 19 nt, Homo sapiens
  misc_RNA (1)...(19): siRNA sense strand
ccauuggccuggaggacuu

SEQ ID NO: 285776 - RNA, 19 nt, Homo sapiens
  misc_RNA (1)...(19): siRNA sense strand
ggccagcucgcacuucuug

SEQ ID NO: 285777 - RNA, 19 nt, Homo sapiens
  misc_RNA (1)...(19): siRNA sense strand
gcggaaaggccuucugcau

SEQ ID NO: 285778 - RNA, 19 nt, Homo sapiens
  misc_RNA (1)...(19): siRNA sense strand
cacagguuauggccacaug

SEQ ID NO: 285779 - RNA, 19 nt, Homo sapiens
  misc_RNA (1)...(19): siRNA sense strand
gauacgggcuccugguugu

SEQ ID NO: 285780 - RNA, 19 nt, Homo sapiens
  misc_RNA (1)...(19): siRNA sense strand
gaaaggccuucugcauggu

SEQ ID NO: 285781 - RNA, 19 nt, Homo sapiens
  misc_RNA (1)...(19): siRNA sense strand
ccauuggccuggaggacuu

SEQ ID NO: 285782 - RNA, 19 nt, Homo sapiens
  misc_RNA (1)...(19): siRNA sense strand
ggccagcucgcacuucuug

SEQ ID NO: 285783 - RNA, 19 nt, Homo sapiens
  misc_RNA (1)...(19): siRNA sense strand
gcggaaaggccuucugcau

SEQ ID NO: 285784 - RNA, 19 nt, Homo sapiens
  misc_RNA (1)...(19): siRNA sense strand
cacagguuauggccacaug

SEQ ID NO: 285785 - RNA, 19 nt, Homo sapiens
  misc_RNA (1)...(19): siRNA sense strand
gauacgggcuccugguugu

SEQ ID NO: 285786 - RNA, 19 nt, Homo sapiens
  misc_RNA (1)...(19): siRNA sense strand
gaaaggccuucugcauggu

SEQ ID NO: 285787 - RNA, 19 nt, Homo sapiens
  misc_RNA (1)...(19): siRNA sense strand
ccauuggccuggaggacuu

SEQ ID NO: 285788 - RNA, 19 nt, Homo sapiens
  misc_RNA (1)...(19): siRNA sense strand
ggccagcucgcacuucuug

SEQ ID NO: 285789 - RNA, 19 nt, Homo sapiens
  misc_RNA (1)...(19): siRNA sense strand
gcggaaaggccuucugcau

SEQ ID NO: 285790 - RNA, 19 nt, Homo sapiens
  misc_RNA (1)...(19): siRNA sense strand
cacagguuauggccacaug

SEQ ID NO: 285791 - RNA, 19 nt, Homo sapiens
  misc_RNA (1)...(19): siRNA sense strand
gaacaaauaugaggaugaa

SEQ ID NO: 285792 - RNA, 19 nt, Homo sapiens
  misc_RNA (1)...(19): siRNA sense strand
gaacaagguugaacugcaa

SEQ ID NO: 285793 - RNA, 19 nt, Homo sapiens
  misc_RNA (1)...(19): siRNA sense strand
ggaagcagcuacuccuaug

SEQ ID NO: 285794 - RNA, 19 nt, Homo sapiens
  misc_RNA (1)...(19): siRNA sense strand
ucaagacccucaacaacaa

SEQ ID NO: 285795 - RNA, 19 nt, Homo sapiens
  misc_RNA (1)...(19): siRNA sense strand
gcacagcagcagagaauga

SEQ ID NO: 285796 - RNA, 19 nt, Homo sapiens
  misc_RNA (1)...(19): siRNA sense strand
gcaguuccaccaucaagua

SEQ ID NO: 285797 - RNA, 19 nt, Homo sapiens
  misc_RNA (1)...(19): siRNA sense strand
ggagauggcccucaaggau

SEQ ID NO: 285798 - RNA, 19 nt, Homo sapiens
  misc_RNA (1)...(19): siRNA sense strand
ggaggcagcuauggcuuug

SEQ ID NO: 285799 - RNA, 19 nt, Homo sapiens
  misc_RNA (1)...(19): siRNA sense strand
gcagagaaugaauuuguga

SEQ ID NO: 285800 - RNA, 19 nt, Homo sapiens
  misc_RNA (1)...(19): siRNA sense strand
gaagaaggauguggaugcu

SEQ ID NO: 285801 - RNA, 19 nt, Homo sapiens
  misc_RNA (1)...(19): siRNA sense strand
ggagauugcugagaucaac

SEQ ID NO: 285802 - RNA, 19 nt, Homo sapiens
  misc_RNA (1)...(19): siRNA sense strand
cagcagagaaugaauuugu

SEQ ID NO: 285803 - RNA, 19 nt, Homo sapiens
  misc_RNA (1)...(19): siRNA sense strand
caucaucgcugaggucaag

SEQ ID NO: 285804 - RNA, 19 nt, Homo sapiens
  misc_RNA (1)...(19): siRNA sense strand
gaucaagacccucaacaac

SEQ ID NO: 285805 - RNA, 19 nt, Homo sapiens
  misc_RNA (1)...(19): siRNA sense strand
gcaggagauugcugagauc

SEQ ID NO: 285806 - RNA, 19 nt, Homo sapiens
  misc_RNA (1)...(19): siRNA sense strand
gcgcacagcagcagagaau

SEQ ID NO: 285807 - RNA, 19 nt, Homo sapiens
  misc_RNA (1)...(19): siRNA sense strand
cgaaggcguuggacaaguc

SEQ ID NO: 285808 - RNA, 19 nt, Homo sapiens
  misc_RNA (1)...(19): siRNA sense strand
caaauaugaggaugaaauc

SEQ ID NO: 285809 - RNA, 19 nt, Homo sapiens
  misc_RNA (1)...(19): siRNA sense strand
ggucaaggcccaauaugag

SEQ ID NO: 285810 - RNA, 19 nt, Homo sapiens
  misc_RNA (1)...(19): siRNA sense strand
agaaugaauuugugacucu

SEQ ID NO: 285811 - RNA, 19 nt, Homo sapiens
  misc_RNA (1)...(19): siRNA sense strand
gcugagaucaaccgcauga

SEQ ID NO: 285812 - RNA, 19 nt, Homo sapiens
  misc_RNA (1)...(19): siRNA sense strand
ccaagacugugaggcagaa

SEQ ID NO: 285813 - RNA, 19 nt, Homo sapiens
  misc_RNA (1)...(19): siRNA sense strand
gaauuugugacucugaaga

SEQ ID NO: 285814 - RNA, 19 nt, Homo sapiens
  misc_RNA (1)...(19): siRNA sense strand
acaacaaguuugccuccuu

SEQ ID NO: 285815 - RNA, 19 nt, Homo sapiens
  misc_RNA (1)...(19): siRNA sense strand
augcagagcugucccagau

SEQ ID NO: 285816 - RNA, 19 nt, Homo sapiens
  misc_RNA (1)...(19): siRNA sense strand
caaguuugccuccuucauc

SEQ ID NO: 285817 - RNA, 19 nt, Homo sapiens
  misc_RNA (1)...(19): siRNA sense strand
cugagagccuuguaugaug

SEQ ID NO: 285818 - RNA, 19 nt, Homo sapiens
  misc_RNA (1)...(19): siRNA sense strand
gaugcugccuacaugaaca

SEQ ID NO: 285819 - RNA, 19 nt, Homo sapiens
  misc_RNA (1)...(19): siRNA sense strand
caagaacaaauaugaggau

SEQ ID NO: 285820 - RNA, 19 nt, Homo sapiens
  misc_RNA (1)...(19): siRNA sense strand
gaggagugcaggcugaaug

SEQ ID NO: 285821 - RNA, 19 nt, Homo sapiens
  misc_RNA (1)...(19): siRNA sense strand
ggcccaauaugaggagauu

SEQ ID NO: 285822 - RNA, 19 nt, Homo sapiens
  misc_RNA (1)...(19): siRNA sense strand
ccacaucucagacacaucu

SEQ ID NO: 285823 - RNA, 19 nt, Homo sapiens
  misc_RNA (1)...(19): siRNA sense strand
cagcagcagagaaugaauu

SEQ ID NO: 285824 - RNA, 19 nt, Homo sapiens
  misc_RNA (1)...(19): siRNA sense strand
cggccuugcugguggcuuu

SEQ ID NO: 285825 - RNA, 19 nt, Homo sapiens
  misc_RNA (1)...(19): siRNA sense strand
gagcgugaacagaucaaga

SEQ ID NO: 285826 - RNA, 19 nt, Homo sapiens
  misc_RNA (1)...(19): siRNA sense strand
uccaagaggucaccgucaa

SEQ ID NO: 285827 - RNA, 19 nt, Homo sapiens
  misc_RNA (1)...(19): siRNA sense strand
ugaggagcgugaacagauc

SEQ ID NO: 285828 - RNA, 19 nt, Homo sapiens
  misc_RNA (1)...(19): siRNA sense strand
gcgaaggcguuggacaagu

SEQ ID NO: 285829 - RNA, 19 nt, Homo sapiens
  misc_RNA (1)...(19): siRNA sense strand
gaauggcgaaggcguugga

SEQ ID NO: 285830 - RNA, 19 nt, Homo sapiens
  misc_RNA (1)...(19): siRNA sense strand
gcacauccaccaccaucag

SEQ ID NO: 285831 - RNA, 19 nt, Homo sapiens
  misc_RNA (1)...(19): siRNA sense strand
gacccucaacaacaaguuu

SEQ ID NO: 285832 - RNA, 19 nt, Homo sapiens
  misc_RNA (1)...(19): siRNA sense strand
ggaccuggacagcaucauc

SEQ ID NO: 285833 - RNA, 19 nt, Homo sapiens
  misc_RNA (1)...(19): siRNA sense strand
uguggaugcugccuacaug

SEQ ID NO: 285834 - RNA, 19 nt, Homo sapiens
  misc_RNA (1)...(19): siRNA sense strand
caacaccaagcaggagauu

SEQ ID NO: 285835 - RNA, 19 nt, Homo sapiens
  misc_RNA (1)...(19): siRNA sense strand
uccaagaggaucuccauug

SEQ ID NO: 285836 - RNA, 19 nt, Homo sapiens
  misc_RNA (1)...(19): siRNA sense strand
gggaguggauuugguuucg

SEQ ID NO: 285837 - RNA, 19 nt, Homo sapiens
  misc_RNA (1)...(19): siRNA sense strand
ggcggcaguuccaccauca

SEQ ID NO: 285838 - RNA, 19 nt, Homo sapiens
  misc_RNA (1)...(19): siRNA sense strand
ccugagagccuuguaugau

SEQ ID NO: 285839 - RNA, 19 nt, Homo sapiens
  misc_RNA (1)...(19): siRNA sense strand
agaacaaauaugaggauga

SEQ ID NO: 285840 - RNA, 19 nt, Homo sapiens
  misc_RNA (1)...(19): siRNA sense strand
gggagauggcccucaagga

SEQ ID NO: 285841 - RNA, 19 nt, Homo sapiens
  misc_RNA (1)...(19): siRNA sense strand
ugaggucaaggcccaauau

SEQ ID NO: 285842 - RNA, 19 nt, Homo sapiens
  misc_RNA (1)...(19): siRNA sense strand
caucuguggugcuguccau

SEQ ID NO: 285843 - RNA, 19 nt, Homo sapiens
  misc_RNA (1)...(19): siRNA sense strand
gaggucaaggcccaauaug

SEQ ID NO: 285844 - RNA, 19 nt, Homo sapiens
  misc_RNA (1)...(19): siRNA sense strand
gaaggcguuggacaaguca

SEQ ID NO: 285845 - RNA, 19 nt, Homo sapiens
  misc_RNA (1)...(19): siRNA sense strand
cggaggcagcuauggcuuu

SEQ ID NO: 285846 - RNA, 19 nt, Homo sapiens
  misc_RNA (1)...(19): siRNA sense strand
cccggcugcugaaggagua

SEQ ID NO: 285847 - RNA, 19 nt, Homo sapiens
  misc_RNA (1)...(19): siRNA sense strand
gcaacaccaagcaggagau

SEQ ID NO: 285848 - RNA, 19 nt, Homo sapiens
  misc_RNA (1)...(19): siRNA sense strand
gaggagcgugaacagauca

SEQ ID NO: 285849 - RNA, 19 nt, Homo sapiens
  misc_RNA (1)...(19): siRNA sense strand
gaacaaauaugaggaugaa

SEQ ID NO: 285850 - RNA, 19 nt, Homo sapiens
  misc_RNA (1)...(19): siRNA sense strand
gaacaagguugaacugcaa

SEQ ID NO: 285851 - RNA, 19 nt, Homo sapiens
  misc_RNA (1)...(19): siRNA sense strand
ggaagcagcuacuccuaug

SEQ ID NO: 285852 - RNA, 19 nt, Homo sapiens
  misc_RNA (1)...(19): siRNA sense strand
ucaagacccucaacaacaa

SEQ ID NO: 285853 - RNA, 19 nt, Homo sapiens
  misc_RNA (1)...(19): siRNA sense strand
gcacagcagcagagaauga

SEQ ID NO: 285854 - RNA, 19 nt, Homo sapiens
  misc_RNA (1)...(19): siRNA sense strand
gcaguuccaccaucaagua

SEQ ID NO: 285855 - RNA, 19 nt, Homo sapiens
  misc_RNA (1)...(19): siRNA sense strand
ggagauggcccucaaggau

SEQ ID NO: 285856 - RNA, 19 nt, Homo sapiens
  misc_RNA (1)...(19): siRNA sense strand
ggaggcagcuauggcuuug

SEQ ID NO: 285857 - RNA, 19 nt, Homo sapiens
  misc_RNA (1)...(19): siRNA sense strand
gcagagaaugaauuuguga

SEQ ID NO: 285858 - RNA, 19 nt, Homo sapiens
  misc_RNA (1)...(19): siRNA sense strand
gaagaaggauguggaugcu

SEQ ID NO: 285859 - RNA, 19 nt, Homo sapiens
  misc_RNA (1)...(19): siRNA sense strand
ggagauugcugagaucaac

SEQ ID NO: 285860 - RNA, 19 nt, Homo sapiens
  misc_RNA (1)...(19): siRNA sense strand
cagcagagaaugaauuugu

SEQ ID NO: 285861 - RNA, 19 nt, Homo sapiens
  misc_RNA (1)...(19): siRNA sense strand
caucaucgcugaggucaag

SEQ ID NO: 285862 - RNA, 19 nt, Homo sapiens
  misc_RNA (1)...(19): siRNA sense strand
gaucaagacccucaacaac

SEQ ID NO: 285863 - RNA, 19 nt, Homo sapiens
  misc_RNA (1)...(19): siRNA sense strand
gaagagcuacaagcacuga

SEQ ID NO: 285864 - RNA, 19 nt, Homo sapiens
  misc_RNA (1)...(19): siRNA sense strand
gcaggaagagcuacaagca

SEQ ID NO: 285865 - RNA, 19 nt, Homo sapiens
  misc_RNA (1)...(19): siRNA sense strand
gcaggagauugcugagauc

SEQ ID NO: 285866 - RNA, 19 nt, Homo sapiens
  misc_RNA (1)...(19): siRNA sense strand
gcgcacagcagcagagaau

SEQ ID NO: 285867 - RNA, 19 nt, Homo sapiens
  misc_RNA (1)...(19): siRNA sense strand
cgaaggcguuggacaaguc

SEQ ID NO: 285868 - RNA, 19 nt, Homo sapiens
  misc_RNA (1)...(19): siRNA sense strand
caaauaugaggaugaaauc

SEQ ID NO: 285869 - RNA, 19 nt, Homo sapiens
  misc_RNA (1)...(19): siRNA sense strand
ggucaaggcccaauaugag

SEQ ID NO: 285870 - RNA, 19 nt, Homo sapiens
  misc_RNA (1)...(19): siRNA sense strand
agaaugaauuugugacucu

SEQ ID NO: 285871 - RNA, 19 nt, Homo sapiens
  misc_RNA (1)...(19): siRNA sense strand
gcugagaucaaccgcauga

SEQ ID NO: 285872 - RNA, 19 nt, Homo sapiens
  misc_RNA (1)...(19): siRNA sense strand
ccaagacugugaggcagaa

SEQ ID NO: 285873 - RNA, 19 nt, Homo sapiens
  misc_RNA (1)...(19): siRNA sense strand
gaauuugugacucugaaga

SEQ ID NO: 285874 - RNA, 19 nt, Homo sapiens
  misc_RNA (1)...(19): siRNA sense strand
acaacaaguuugccuccuu

SEQ ID NO: 285875 - RNA, 19 nt, Homo sapiens
  misc_RNA (1)...(19): siRNA sense strand
augcagagcugucccagau

SEQ ID NO: 285876 - RNA, 19 nt, Homo sapiens
  misc_RNA (1)...(19): siRNA sense strand
caaguuugccuccuucauc

SEQ ID NO: 285877 - RNA, 19 nt, Homo sapiens
  misc_RNA (1)...(19): siRNA sense strand
cugagagccuuguaugaug

SEQ ID NO: 285878 - RNA, 19 nt, Homo sapiens
  misc_RNA (1)...(19): siRNA sense strand
gaugcugccuacaugaaca

SEQ ID NO: 285879 - RNA, 19 nt, Homo sapiens
  misc_RNA (1)...(19): siRNA sense strand
caagaacaaauaugaggau

SEQ ID NO: 285880 - RNA, 19 nt, Homo sapiens
  misc_RNA (1)...(19): siRNA sense strand
gaggagugcaggcugaaug

SEQ ID NO: 285881 - RNA, 19 nt, Homo sapiens
  misc_RNA (1)...(19): siRNA sense strand
ggcccaauaugaggagauu

SEQ ID NO: 285882 - RNA, 19 nt, Homo sapiens
  misc_RNA (1)...(19): siRNA sense strand
uccaagaggucacugucaa

SEQ ID NO: 285883 - RNA, 19 nt, Homo sapiens
  misc_RNA (1)...(19): siRNA sense strand
cagcagcagagaaugaauu

SEQ ID NO: 285884 - RNA, 19 nt, Homo sapiens
  misc_RNA (1)...(19): siRNA sense strand
cggccuugcugguggcuuu

SEQ ID NO: 285885 - RNA, 19 nt, Homo sapiens
  misc_RNA (1)...(19): siRNA sense strand
acacauccguggugcuauc

SEQ ID NO: 285886 - RNA, 19 nt, Homo sapiens
  misc_RNA (1)...(19): siRNA sense strand
gcgaaggcguuggacaagu

SEQ ID NO: 285887 - RNA, 19 nt, Homo sapiens
  misc_RNA (1)...(19): siRNA sense strand
gagcgugagcagaucaaga

SEQ ID NO: 285888 - RNA, 19 nt, Homo sapiens
  misc_RNA (1)...(19): siRNA sense strand
gcacauccaccaccaucag

SEQ ID NO: 285889 - RNA, 19 nt, Homo sapiens
  misc_RNA (1)...(19): siRNA sense strand
gaauggcgaaggcguugga

SEQ ID NO: 285890 - RNA, 19 nt, Homo sapiens
  misc_RNA (1)...(19): siRNA sense strand
agacacauccguggugcua

SEQ ID NO: 285891 - RNA, 19 nt, Homo sapiens
  misc_RNA (1)...(19): siRNA sense strand
gacccucaacaacaaguuu

SEQ ID NO: 285892 - RNA, 19 nt, Homo sapiens
  misc_RNA (1)...(19): siRNA sense strand
ggaccuggacagcaucauc

SEQ ID NO: 285893 - RNA, 19 nt, Homo sapiens
  misc_RNA (1)...(19): siRNA sense strand
uguggaugcugccuacaug

SEQ ID NO: 285894 - RNA, 19 nt, Homo sapiens
  misc_RNA (1)...(19): siRNA sense strand
uccaagaggaucuccauug

SEQ ID NO: 285895 - RNA, 19 nt, Homo sapiens
  misc_RNA (1)...(19): siRNA sense strand
caacaccaagcaggagauu

SEQ ID NO: 285896 - RNA, 19 nt, Homo sapiens
  misc_RNA (1)...(19): siRNA sense strand
gggaguggauuugguuucg

SEQ ID NO: 285897 - RNA, 19 nt, Homo sapiens
  misc_RNA (1)...(19): siRNA sense strand
ggcggcaguuccaccauca

SEQ ID NO: 285898 - RNA, 19 nt, Homo sapiens
  misc_RNA (1)...(19): siRNA sense strand
ccugagagccuuguaugau

SEQ ID NO: 285899 - RNA, 19 nt, Homo sapiens
  misc_RNA (1)...(19): siRNA sense strand
agaacaaauaugaggauga

SEQ ID NO: 285900 - RNA, 19 nt, Homo sapiens
  misc_RNA (1)...(19): siRNA sense strand
gggagauggcccucaagga

SEQ ID NO: 285901 - RNA, 19 nt, Homo sapiens
  misc_RNA (1)...(19): siRNA sense strand
ugaggucaaggcccaauau

SEQ ID NO: 285902 - RNA, 19 nt, Homo sapiens
  misc_RNA (1)...(19): siRNA sense strand
ccgaggagcgugagcagau

SEQ ID NO: 285903 - RNA, 19 nt, Homo sapiens
  misc_RNA (1)...(19): siRNA sense strand
gaggucaaggcccaauaug

SEQ ID NO: 285904 - RNA, 19 nt, Homo sapiens
  misc_RNA (1)...(19): siRNA sense strand
cgacaaggugcgguuccua

SEQ ID NO: 285905 - RNA, 19 nt, Homo sapiens
  misc_RNA (1)...(19): siRNA sense strand
gaaggcguuggacaaguca

SEQ ID NO: 285906 - RNA, 19 nt, Homo sapiens
  misc_RNA (1)...(19): siRNA sense strand
uagagcagcagaacaaggu

SEQ ID NO: 285907 - RNA, 19 nt, Homo sapiens
  misc_RNA (1)...(19): siRNA sense strand
gcaacaccaagcaggagau

SEQ ID NO: 285908 - RNA, 19 nt, Homo sapiens
  misc_RNA (1)...(19): siRNA sense strand
cccggcugcugaaggagua

SEQ ID NO: 285909 - RNA, 19 nt, Homo sapiens
  misc_RNA (1)...(19): siRNA sense strand
cggaggcagcuauggcuuu

SEQ ID NO: 285910 - RNA, 19 nt, Homo sapiens
  misc_RNA (1)...(19): siRNA sense strand
gaaaugagcucaaaucaaa

SEQ ID NO: 285911 - RNA, 19 nt, Homo sapiens
  misc_RNA (1)...(19): siRNA sense strand
gaaagaagcucucgguuga

SEQ ID NO: 285912 - RNA, 19 nt, Homo sapiens
  misc_RNA (1)...(19): siRNA sense strand
gcaaacagcuggacaagga

SEQ ID NO: 285913 - RNA, 19 nt, Homo sapiens
  misc_RNA (1)...(19): siRNA sense strand
ggaugaagauuuccuacua

SEQ ID NO: 285914 - RNA, 19 nt, Homo sapiens
  misc_RNA (1)...(19): siRNA sense strand
caaagaaacugcaguguca

SEQ ID NO: 285915 - RNA, 19 nt, Homo sapiens
  misc_RNA (1)...(19): siRNA sense strand
gcagaaaccuaucagaaau

SEQ ID NO: 285916 - RNA, 19 nt, Homo sapiens
  misc_RNA (1)...(19): siRNA sense strand
ggaagaggauugauagaug

SEQ ID NO: 285917 - RNA, 19 nt, Homo sapiens
  misc_RNA (1)...(19): siRNA sense strand
gaacuggauccuauuguua

SEQ ID NO: 285918 - RNA, 19 nt, Homo sapiens
  misc_RNA (1)...(19): siRNA sense strand
gaacaauccuguggaaaug

SEQ ID NO: 285919 - RNA, 19 nt, Homo sapiens
  misc_RNA (1)...(19): siRNA sense strand
gcacaacaaugaacuaaag

SEQ ID NO: 285920 - RNA, 19 nt, Homo sapiens
  misc_RNA (1)...(19): siRNA sense strand
ggaugaaacuacaaagaaa

SEQ ID NO: 285921 - RNA, 19 nt, Homo sapiens
  misc_RNA (1)...(19): siRNA sense strand
caaggcugcugaagauuua

SEQ ID NO: 285922 - RNA, 19 nt, Homo sapiens
  misc_RNA (1)...(19): siRNA sense strand
caacuuggcuauaaggauu

SEQ ID NO: 285923 - RNA, 19 nt, Homo sapiens
  misc_RNA (1)...(19): siRNA sense strand
gagaugaaguggucuguga

SEQ ID NO: 285924 - RNA, 19 nt, Homo sapiens
  misc_RNA (1)...(19): siRNA sense strand
guagaaagcaggacgauaa

SEQ ID NO: 285925 - RNA, 19 nt, Homo sapiens
  misc_RNA (1)...(19): siRNA sense strand
gacaacagauggcacagua

SEQ ID NO: 285926 - RNA, 19 nt, Homo sapiens
  misc_RNA (1)...(19): siRNA sense strand
cuaaagaacuggauccuau

SEQ ID NO: 285927 - RNA, 19 nt, Homo sapiens
  misc_RNA (1)...(19): siRNA sense strand
gaacagcaguggcaucauc

SEQ ID NO: 285928 - RNA, 19 nt, Homo sapiens
  misc_RNA (1)...(19): siRNA sense strand
gaaagcaagucauuuacau

SEQ ID NO: 285929 - RNA, 19 nt, Homo sapiens
  misc_RNA (1)...(19): siRNA sense strand
ggaaacggacucacuuuaa

SEQ ID NO: 285930 - RNA, 19 nt, Homo sapiens
  misc_RNA (1)...(19): siRNA sense strand
gauaacagcugcauaugag

SEQ ID NO: 285931 - RNA, 19 nt, Homo sapiens
  misc_RNA (1)...(19): siRNA sense strand
ggacgucacugcucacaau

SEQ ID NO: 285932 - RNA, 19 nt, Homo sapiens
  misc_RNA (1)...(19): siRNA sense strand
gaagcucacuaggauguua

SEQ ID NO: 285933 - RNA, 19 nt, Homo sapiens
  misc_RNA (1)...(19): siRNA sense strand
cuacagggcugaugaugaa

SEQ ID NO: 285934 - RNA, 19 nt, Homo sapiens
  misc_RNA (1)...(19): siRNA sense strand
gagugaagguuaugacuga

SEQ ID NO: 285935 - RNA, 19 nt, Homo sapiens
  misc_RNA (1)...(19): siRNA sense strand
cuaaauaucuccaggaauc

SEQ ID NO: 285936 - RNA, 19 nt, Homo sapiens
  misc_RNA (1)...(19): siRNA sense strand
ucagaaagcaagucauuua

SEQ ID NO: 285937 - RNA, 19 nt, Homo sapiens
  misc_RNA (1)...(19): siRNA sense strand
gcagaucucaugacccuua

SEQ ID NO: 285938 - RNA, 19 nt, Homo sapiens
  misc_RNA (1)...(19): siRNA sense strand
gaacaucacacuggaguuu

SEQ ID NO: 285939 - RNA, 19 nt, Homo sapiens
  misc_RNA (1)...(19): siRNA sense strand
aaacagccauuucaucuug

SEQ ID NO: 285940 - RNA, 19 nt, Homo sapiens
  misc_RNA (1)...(19): siRNA sense strand
agagaaugcuguugaaauu

SEQ ID NO: 285941 - RNA, 19 nt, Homo sapiens
  misc_RNA (1)...(19): siRNA sense strand
gaaccucacuggcauuauc

SEQ ID NO: 285942 - RNA, 19 nt, Homo sapiens
  misc_RNA (1)...(19): siRNA sense strand
ggaauacucuuuggaggaa

SEQ ID NO: 285943 - RNA, 19 nt, Homo sapiens
  misc_RNA (1)...(19): siRNA sense strand
gaaacggacucacuuuaag

SEQ ID NO: 285944 - RNA, 19 nt, Homo sapiens
  misc_RNA (1)...(19): siRNA sense strand
ucaaagacguggaaauuca

SEQ ID NO: 285945 - RNA, 19 nt, Homo sapiens
  misc_RNA (1)...(19): siRNA sense strand
gaaguugggcacauuagua

SEQ ID NO: 285946 - RNA, 19 nt, Homo sapiens
  misc_RNA (1)...(19): siRNA sense strand
gagauguucugcaaacuug

SEQ ID NO: 285947 - RNA, 19 nt, Homo sapiens
  misc_RNA (1)...(19): siRNA sense strand
acaaacagauuucaagaga

SEQ ID NO: 285948 - RNA, 19 nt, Homo sapiens
  misc_RNA (1)...(19): siRNA sense strand
gaucagagccaacuacaau

SEQ ID NO: 285949 - RNA, 19 nt, Homo sapiens
  misc_RNA (1)...(19): siRNA sense strand
gaagcuagcucugauuaag

SEQ ID NO: 285950 - RNA, 19 nt, Homo sapiens
  misc_RNA (1)...(19): siRNA sense strand
caagacagacuauguuaaa

SEQ ID NO: 285951 - RNA, 19 nt, Homo sapiens
  misc_RNA (1)...(19): siRNA sense strand
gaaagcaggacgauaaaug

SEQ ID NO: 285952 - RNA, 19 nt, Homo sapiens
  misc_RNA (1)...(19): siRNA sense strand
gaaaggcggcuacauugaa

SEQ ID NO: 285953 - RNA, 19 nt, Homo sapiens
  misc_RNA (1)...(19): siRNA sense strand
uaaaggaaaugagcucaaa

SEQ ID NO: 285954 - RNA, 19 nt, Homo sapiens
  misc_RNA (1)...(19): siRNA sense strand
ggacauagccagcucuaau

SEQ ID NO: 285955 - RNA, 19 nt, Homo sapiens
  misc_RNA (1)...(19): siRNA sense strand
cacaaucacucuggacuua

SEQ ID NO: 285956 - RNA, 19 nt, Homo sapiens
  misc_RNA (1)...(19): siRNA sense strand
ucaagaaccuggaaauauc

SEQ ID NO: 285957 - RNA, 19 nt, Homo sapiens
  misc_RNA (1)...(19): siRNA sense strand
ccgauaaucuucucuucua

SEQ ID NO: 285958 - RNA, 19 nt, Homo sapiens
  misc_RNA (1)...(19): siRNA sense strand
guaaacaauucaacacuca

SEQ ID NO: 285959 - RNA, 19 nt, Homo sapiens
  misc_RNA (1)...(19): siRNA sense strand
gaacgcaguuggcgcugaa

SEQ ID NO: 285960 - RNA, 19 nt, Homo sapiens
  misc_RNA (1)...(19): siRNA sense strand
caaaguggaugccauugga

SEQ ID NO: 285961 - RNA, 19 nt, Homo sapiens
  misc_RNA (1)...(19): siRNA sense strand
ugaccuccauucugacuua

SEQ ID NO: 285962 - RNA, 19 nt, Homo sapiens
  misc_RNA (1)...(19): siRNA sense strand
agacagacguuauaacaau

SEQ ID NO: 285963 - RNA, 19 nt, Homo sapiens
  misc_RNA (1)...(19): siRNA sense strand
gaggacaaaucaagaaauc

SEQ ID NO: 285964 - RNA, 19 nt, Homo sapiens
  misc_RNA (1)...(19): siRNA sense strand
gcaacaaccucagcaggaa

SEQ ID NO: 285965 - RNA, 19 nt, Homo sapiens
  misc_RNA (1)...(19): siRNA sense strand
gaacaagaaguagcaauga

SEQ ID NO: 285966 - RNA, 19 nt, Homo sapiens
  misc_RNA (1)...(19): siRNA sense strand
gcagaugguuacuauggaa

SEQ ID NO: 285967 - RNA, 19 nt, Homo sapiens
  misc_RNA (1)...(19): siRNA sense strand
gaaauucaagccaaccuuu

SEQ ID NO: 285968 - RNA, 19 nt, Homo sapiens
  misc_RNA (1)...(19): siRNA sense strand
ggaacugagugaauugaga

SEQ ID NO: 285969 - RNA, 19 nt, Homo sapiens
  misc_RNA (1)...(19): siRNA sense strand
gaaaggugcuccucaagcu

SEQ ID NO: 285970 - RNA, 19 nt, Homo sapiens
  misc_RNA (1)...(19): siRNA sense strand
gaucagaaagcaagucauu

SEQ ID NO: 285971 - RNA, 19 nt, Homo sapiens
  misc_RNA (1)...(19): siRNA sense strand
gagcagaaaccuaucagaa

SEQ ID NO: 285972 - RNA, 19 nt, Homo sapiens
  misc_RNA (1)...(19): siRNA sense strand
uaagagacuucacacaguu

SEQ ID NO: 285973 - RNA, 19 nt, Homo sapiens
  misc_RNA (1)...(19): siRNA sense strand
guacaucuuugcuagaaau

SEQ ID NO: 285974 - RNA, 19 nt, Homo sapiens
  misc_RNA (1)...(19): siRNA sense strand
uaaaucagacuuuggauga

SEQ ID NO: 285975 - RNA, 19 nt, Homo sapiens
  misc_RNA (1)...(19): siRNA sense strand
gaaccgaggcacauucuga

SEQ ID NO: 285976 - RNA, 19 nt, Homo sapiens
  misc_RNA (1)...(19): siRNA sense strand
gaauaucacugggucacaa

SEQ ID NO: 285977 - RNA, 19 nt, Homo sapiens
  misc_RNA (1)...(19): siRNA sense strand
ggucaaugcuaaucugaga

SEQ ID NO: 285978 - RNA, 19 nt, Homo sapiens
  misc_RNA (1)...(19): siRNA sense strand
caaagacuguuacuaugau

SEQ ID NO: 285979 - RNA, 19 nt, Homo sapiens
  misc_RNA (1)...(19): siRNA sense strand
caauggugcuggcaggaua

SEQ ID NO: 285980 - RNA, 19 nt, Homo sapiens
  misc_RNA (1)...(19): siRNA sense strand
gaaucagaauggcugguaa

SEQ ID NO: 285981 - RNA, 19 nt, Homo sapiens
  misc_RNA (1)...(19): siRNA sense strand
gcaagugacugugcucugu

SEQ ID NO: 285982 - RNA, 19 nt, Homo sapiens
  misc_RNA (1)...(19): siRNA sense strand
gagcauggagagauucaua

SEQ ID NO: 285983 - RNA, 19 nt, Homo sapiens
  misc_RNA (1)...(19): siRNA sense strand
gaaaugaaguugggcacau

SEQ ID NO: 285984 - RNA, 19 nt, Homo sapiens
  misc_RNA (1)...(19): siRNA sense strand
gagcccauccggaguguua

SEQ ID NO: 285985 - RNA, 19 nt, Homo sapiens
  misc_RNA (1)...(19): siRNA sense strand
caacuacaauaccuuaaca

SEQ ID NO: 285986 - RNA, 19 nt, Homo sapiens
  misc_RNA (1)...(19): siRNA sense strand
cuagaaaucaugcagauaa

SEQ ID NO: 285987 - RNA, 19 nt, Homo sapiens
  misc_RNA (1)...(19): siRNA sense strand
caaagugucuccuuaugag

SEQ ID NO: 285988 - RNA, 19 nt, Homo sapiens
  misc_RNA (1)...(19): siRNA sense strand
aaaccuguauugauggaua

SEQ ID NO: 285989 - RNA, 19 nt, Homo sapiens
  misc_RNA (1)...(19): siRNA sense strand
ccaggaagaucccgucuca

SEQ ID NO: 285990 - RNA, 19 nt, Homo sapiens
  misc_RNA (1)...(19): siRNA sense strand
cagcaccgcuucugauuuc

SEQ ID NO: 285991 - RNA, 19 nt, Homo sapiens
  misc_RNA (1)...(19): siRNA sense strand
gaaauuaccaggcaaacca

SEQ ID NO: 285992 - RNA, 19 nt, Homo sapiens
  misc_RNA (1)...(19): siRNA sense strand
gagcagaaucucagacauu

SEQ ID NO: 285993 - RNA, 19 nt, Homo sapiens
  misc_RNA (1)...(19): siRNA sense strand
gggaaacggacucacuuua

SEQ ID NO: 285994 - RNA, 19 nt, Homo sapiens
  misc_RNA (1)...(19): siRNA sense strand
ggauaacagcugcauauga

SEQ ID NO: 285995 - RNA, 19 nt, Homo sapiens
  misc_RNA (1)...(19): siRNA sense strand
cagcaucccugccugcauu

SEQ ID NO: 285996 - RNA, 19 nt, Homo sapiens
  misc_RNA (1)...(19): siRNA sense strand
cuaauggacuucuucucua

SEQ ID NO: 285997 - RNA, 19 nt, Homo sapiens
  misc_RNA (1)...(19): siRNA sense strand
ggaaaugagcucaaaucaa

SEQ ID NO: 285998 - RNA, 19 nt, Homo sapiens
  misc_RNA (1)...(19): siRNA sense strand
cugagugaauugagaaaua

SEQ ID NO: 285999 - RNA, 19 nt, Homo sapiens
  misc_RNA (1)...(19): siRNA sense strand
gaacugagugaauugagaa

SEQ ID NO: 286000 - RNA, 19 nt, Homo sapiens
  misc_RNA (1)...(19): siRNA sense strand
cagcgcagcuccagauuuc

SEQ ID NO: 286001 - RNA, 19 nt, Homo sapiens
  misc_RNA (1)...(19): siRNA sense strand
ugagagaauucagugauaa

SEQ ID NO: 286002 - RNA, 19 nt, Homo sapiens
  misc_RNA (1)...(19): siRNA sense strand
agaagccgcuggaagaauu

SEQ ID NO: 286003 - RNA, 19 nt, Homo sapiens
  misc_RNA (1)...(19): siRNA sense strand
ccaaagacuguuacuauga

SEQ ID NO: 286004 - RNA, 19 nt, Homo sapiens
  misc_RNA (1)...(19): siRNA sense strand
gaaaucuccugcugugaag

SEQ ID NO: 286005 - RNA, 19 nt, Homo sapiens
  misc_RNA (1)...(19): siRNA sense strand
gagaaugcuguugaaauua

SEQ ID NO: 286006 - RNA, 19 nt, Homo sapiens
  misc_RNA (1)...(19): siRNA sense strand
ccaaggaagaggauugaua

SEQ ID NO: 286007 - RNA, 19 nt, Homo sapiens
  misc_RNA (1)...(19): siRNA sense strand
caauggagguuggcagaaa

SEQ ID NO: 286008 - RNA, 19 nt, Homo sapiens
  misc_RNA (1)...(19): siRNA sense strand
gcaagucauuuacauggau

SEQ ID NO: 286009 - RNA, 19 nt, Homo sapiens
  misc_RNA (1)...(19): siRNA sense strand
ugugaaaccuguauugaug

SEQ ID NO: 286010 - RNA, 19 nt, Homo sapiens
  misc_RNA (1)...(19): siRNA sense strand
ggaaggagcuggaguuuga

SEQ ID NO: 286011 - RNA, 19 nt, Homo sapiens
  misc_RNA (1)...(19): siRNA sense strand
gcaaagaggaucaaacaaa

SEQ ID NO: 286012 - RNA, 19 nt, Homo sapiens
  misc_RNA (1)...(19): siRNA sense strand
gcaccuguauuccuuguaa

SEQ ID NO: 286013 - RNA, 19 nt, Homo sapiens
  misc_RNA (1)...(19): siRNA sense strand
ggacuggccucucugaaga

SEQ ID NO: 286014 - RNA, 19 nt, Homo sapiens
  misc_RNA (1)...(19): siRNA sense strand
ugacaacacugauggcauu

SEQ ID NO: 286015 - RNA, 19 nt, Homo sapiens
  misc_RNA (1)...(19): siRNA sense strand
caagaugacuguggaaaga

SEQ ID NO: 286016 - RNA, 19 nt, Homo sapiens
  misc_RNA (1)...(19): siRNA sense strand
gaaaucagaucagcugcuu

SEQ ID NO: 286017 - RNA, 19 nt, Homo sapiens
  misc_RNA (1)...(19): siRNA sense strand
ggaaggcuguccaacgaaa

SEQ ID NO: 286018 - RNA, 19 nt, Homo sapiens
  misc_RNA (1)...(19): siRNA sense strand
gcacagagggcaaagaaug

SEQ ID NO: 286019 - RNA, 19 nt, Homo sapiens
  misc_RNA (1)...(19): siRNA sense strand
cagcagcucuuacagaaug

SEQ ID NO: 286020 - RNA, 19 nt, Homo sapiens
  misc_RNA (1)...(19): siRNA sense strand
ggagaacgcugugauaggu

SEQ ID NO: 286021 - RNA, 19 nt, Homo sapiens
  misc_RNA (1)...(19): siRNA sense strand
gaauauggaugcaguacag

SEQ ID NO: 286022 - RNA, 19 nt, Homo sapiens
  misc_RNA (1)...(19): siRNA sense strand
ggaagucugugauugcaau

SEQ ID NO: 286023 - RNA, 19 nt, Homo sapiens
  misc_RNA (1)...(19): siRNA sense strand
aaggagagcuggaaaggaa

SEQ ID NO: 286024 - RNA, 19 nt, Homo sapiens
  misc_RNA (1)...(19): siRNA sense strand
gaaguugagagcauccuua

SEQ ID NO: 286025 - RNA, 19 nt, Homo sapiens
  misc_RNA (1)...(19): siRNA sense strand
cgaaaugggucuccugcaa

SEQ ID NO: 286026 - RNA, 19 nt, Homo sapiens
  misc_RNA (1)...(19): siRNA sense strand
ggagggaagucugugauug

SEQ ID NO: 286027 - RNA, 19 nt, Homo sapiens
  misc_RNA (1)...(19): siRNA sense strand
gcacaagaagcacugagua

SEQ ID NO: 286028 - RNA, 19 nt, Homo sapiens
  misc_RNA (1)...(19): siRNA sense strand
uaagaucaccucuaccuuu

SEQ ID NO: 286029 - RNA, 19 nt, Homo sapiens
  misc_RNA (1)...(19): siRNA sense strand
gaaaugggucuccugcaaa

SEQ ID NO: 286030 - RNA, 19 nt, Homo sapiens
  misc_RNA (1)...(19): siRNA sense strand
gcagguguuugaaguguau

SEQ ID NO: 286031 - RNA, 19 nt, Homo sapiens
  misc_RNA (1)...(19): siRNA sense strand
uaaaugagcauccaagcaa

SEQ ID NO: 286032 - RNA, 19 nt, Homo sapiens
  misc_RNA (1)...(19): siRNA sense strand
caaagaggaucaaacaaaa

SEQ ID NO: 286033 - RNA, 19 nt, Homo sapiens
  misc_RNA (1)...(19): siRNA sense strand
cacaggagauuguuauuca

SEQ ID NO: 286034 - RNA, 19 nt, Homo sapiens
  misc_RNA (1)...(19): siRNA sense strand
gagcauccaagcaauaauu

SEQ ID NO: 286035 - RNA, 19 nt, Homo sapiens
  misc_RNA (1)...(19): siRNA sense strand
gaacuucacagacaaacug

SEQ ID NO: 286036 - RNA, 19 nt, Homo sapiens
  misc_RNA (1)...(19): siRNA sense strand
gcacagcagcucuuacaga

SEQ ID NO: 286037 - RNA, 19 nt, Homo sapiens
  misc_RNA (1)...(19): siRNA sense strand
caccaagacuuacacauuc

SEQ ID NO: 286038 - RNA, 19 nt, Homo sapiens
  misc_RNA (1)...(19): siRNA sense strand
ggaaucaacaggugagcua

SEQ ID NO: 286039 - RNA, 19 nt, Homo sapiens
  misc_RNA (1)...(19): siRNA sense strand
cagaauacaguguccauaa

SEQ ID NO: 286040 - RNA, 19 nt, Homo sapiens
  misc_RNA (1)...(19): siRNA sense strand
cacagcagcucuuacagaa

SEQ ID NO: 286041 - RNA, 19 nt, Homo sapiens
  misc_RNA (1)...(19): siRNA sense strand
gaauggaggcccugauuuc

SEQ ID NO: 286042 - RNA, 19 nt, Homo sapiens
  misc_RNA (1)...(19): siRNA sense strand
caacacagccggcaucuac

SEQ ID NO: 286043 - RNA, 19 nt, Homo sapiens
  misc_RNA (1)...(19): siRNA sense strand
ggguucagcugcucaguga

SEQ ID NO: 286044 - RNA, 19 nt, Homo sapiens
  misc_RNA (1)...(19): siRNA sense strand
ucaggaggccacaagauua

SEQ ID NO: 286045 - RNA, 19 nt, Homo sapiens
  misc_RNA (1)...(19): siRNA sense strand
gaauacaguguccauaaga

SEQ ID NO: 286046 - RNA, 19 nt, Homo sapiens
  misc_RNA (1)...(19): siRNA sense strand
cagacaaacugguaaugga

SEQ ID NO: 286047 - RNA, 19 nt, Homo sapiens
  misc_RNA (1)...(19): siRNA sense strand
ggagagagaaaucagauca

SEQ ID NO: 286048 - RNA, 19 nt, Homo sapiens
  misc_RNA (1)...(19): siRNA sense strand
gagaauggaggcccugauu

SEQ ID NO: 286049 - RNA, 19 nt, Homo sapiens
  misc_RNA (1)...(19): siRNA sense strand
ucaccaagacuuacacauu

SEQ ID NO: 286050 - RNA, 19 nt, Homo sapiens
  misc_RNA (1)...(19): siRNA sense strand
caagggaaacugaggacua

SEQ ID NO: 286051 - RNA, 19 nt, Homo sapiens
  misc_RNA (1)...(19): siRNA sense strand
gaagguuacugcggaaucu

SEQ ID NO: 286052 - RNA, 19 nt, Homo sapiens
  misc_RNA (1)...(19): siRNA sense strand
uaaccaggcauauggauga

SEQ ID NO: 286053 - RNA, 19 nt, Homo sapiens
  misc_RNA (1)...(19): siRNA sense strand
ggacggugcuguggugcaa

SEQ ID NO: 286054 - RNA, 19 nt, Homo sapiens
  misc_RNA (1)...(19): siRNA sense strand
cauccgagcuacauaugga

SEQ ID NO: 286055 - RNA, 19 nt, Homo sapiens
  misc_RNA (1)...(19): siRNA sense strand
ggucacagcgccaucaaga

SEQ ID NO: 286056 - RNA, 19 nt, Homo sapiens
  misc_RNA (1)...(19): siRNA sense strand
gcauauggaugaguucaag

SEQ ID NO: 286057 - RNA, 19 nt, Homo sapiens
  misc_RNA (1)...(19): siRNA sense strand
uggaggcccugauuucaaa

SEQ ID NO: 286058 - RNA, 19 nt, Homo sapiens
  misc_RNA (1)...(19): siRNA sense strand
ucagauggaucaguuuaug

SEQ ID NO: 286059 - RNA, 19 nt, Homo sapiens
  misc_RNA (1)...(19): siRNA sense strand
gugcaaagcaggcuacuuc

SEQ ID NO: 286060 - RNA, 19 nt, Homo sapiens
  misc_RNA (1)...(19): siRNA sense strand
caacugcaaugacaacacu

SEQ ID NO: 286061 - RNA, 19 nt, Homo sapiens
  misc_RNA (1)...(19): siRNA sense strand
gcaguacagauggugauua

SEQ ID NO: 286062 - RNA, 19 nt, Homo sapiens
  misc_RNA (1)...(19): siRNA sense strand
ccaggcauauggaugaguu

SEQ ID NO: 286063 - RNA, 19 nt, Homo sapiens
  misc_RNA (1)...(19): siRNA sense strand
gccacaagauuagcagaaa

SEQ ID NO: 286064 - RNA, 19 nt, Homo sapiens
  misc_RNA (1)...(19): siRNA sense strand
gaagugauggcaccugugu

SEQ ID NO: 286065 - RNA, 19 nt, Homo sapiens
  misc_RNA (1)...(19): siRNA sense strand
gaggagguggugugcaaua

SEQ ID NO: 286066 - RNA, 19 nt, Homo sapiens
  misc_RNA (1)...(19): siRNA sense strand
caguguauauguccuguug

SEQ ID NO: 286067 - RNA, 19 nt, Homo sapiens
  misc_RNA (1)...(19): siRNA sense strand
gaaagggaccgcuguuugc

SEQ ID NO: 286068 - RNA, 19 nt, Homo sapiens
  misc_RNA (1)...(19): siRNA sense strand
gacaaugugacccugauuu

SEQ ID NO: 286069 - RNA, 19 nt, Homo sapiens
  misc_RNA (1)...(19): siRNA sense strand
ugaggacuauuccaaacaa

SEQ ID NO: 286070 - RNA, 19 nt, Homo sapiens
  misc_RNA (1)...(19): siRNA sense strand
gagaaagggaccgcuguuu

SEQ ID NO: 286071 - RNA, 19 nt, Homo sapiens
  misc_RNA (1)...(19): siRNA sense strand
aagacacacucaacacauu

SEQ ID NO: 286072 - RNA, 19 nt, Homo sapiens
  misc_RNA (1)...(19): siRNA sense strand
gauggaguaguaccugaua

SEQ ID NO: 286073 - RNA, 19 nt, Homo sapiens
  misc_RNA (1)...(19): siRNA sense strand
ggguggugauggaguagua

SEQ ID NO: 286074 - RNA, 19 nt, Homo sapiens
  misc_RNA (1)...(19): siRNA sense strand
ucaggguggugauggagua

SEQ ID NO: 286075 - RNA, 19 nt, Homo sapiens
  misc_RNA (1)...(19): siRNA sense strand
aauuguaacuccaaagguu

SEQ ID NO: 286076 - RNA, 19 nt, Homo sapiens
  misc_RNA (1)...(19): siRNA sense strand
gcagaaagccacguugagu

SEQ ID NO: 286077 - RNA, 19 nt, Homo sapiens
  misc_RNA (1)...(19): siRNA sense strand
gagaugcccagauuucaga

SEQ ID NO: 286078 - RNA, 19 nt, Homo sapiens
  misc_RNA (1)...(19): siRNA sense strand
gaucaccucuaccuuucau

SEQ ID NO: 286079 - RNA, 19 nt, Homo sapiens
  misc_RNA (1)...(19): siRNA sense strand
gaagugcaagaauggcuuu

SEQ ID NO: 286080 - RNA, 19 nt, Homo sapiens
  misc_RNA (1)...(19): siRNA sense strand
ggaaguccaggcaguguau

SEQ ID NO: 286081 - RNA, 19 nt, Homo sapiens
  misc_RNA (1)...(19): siRNA sense strand
cagcugagccuggcagaaa

SEQ ID NO: 286082 - RNA, 19 nt, Homo sapiens
  misc_RNA (1)...(19): siRNA sense strand
ucgaucagguuacuauaau

SEQ ID NO: 286083 - RNA, 19 nt, Homo sapiens
  misc_RNA (1)...(19): siRNA sense strand
gaagaagcaaagaggauca

SEQ ID NO: 286084 - RNA, 19 nt, Homo sapiens
  misc_RNA (1)...(19): siRNA sense strand
agacacacucaacacauua

SEQ ID NO: 286085 - RNA, 19 nt, Homo sapiens
  misc_RNA (1)...(19): siRNA sense strand
gcagaauacaguguccaua

SEQ ID NO: 286086 - RNA, 19 nt, Homo sapiens
  misc_RNA (1)...(19): siRNA sense strand
caagaagcacugaguaugg

SEQ ID NO: 286087 - RNA, 19 nt, Homo sapiens
  misc_RNA (1)...(19): siRNA sense strand
aaacugaggacuauuccaa

SEQ ID NO: 286088 - RNA, 19 nt, Homo sapiens
  misc_RNA (1)...(19): siRNA sense strand
gagcaacugacaagggaaa

SEQ ID NO: 286089 - RNA, 19 nt, Homo sapiens
  misc_RNA (1)...(19): siRNA sense strand
uaacauggagcaacugaca

SEQ ID NO: 286090 - RNA, 19 nt, Homo sapiens
  misc_RNA (1)...(19): siRNA sense strand
cggaggagguggugugcaa

SEQ ID NO: 286091 - RNA, 19 nt, Homo sapiens
  misc_RNA (1)...(19): siRNA sense strand
caggugagcuaugggcaaa

SEQ ID NO: 286092 - RNA, 19 nt, Homo sapiens
  misc_RNA (1)...(19): siRNA sense strand
uagcucagcccaacgacua

SEQ ID NO: 286093 - RNA, 19 nt, Homo sapiens
  misc_RNA (1)...(19): siRNA sense strand
gcuauaaucaagugaagau

SEQ ID NO: 286094 - RNA, 19 nt, Homo sapiens
  misc_RNA (1)...(19): siRNA sense strand
aagaucaccucuaccuuuc

SEQ ID NO: 286095 - RNA, 19 nt, Homo sapiens
  misc_RNA (1)...(19): siRNA sense strand
ugaagaagccaugaagaga

SEQ ID NO: 286096 - RNA, 19 nt, Homo sapiens
  misc_RNA (1)...(19): siRNA sense strand
agauucagauggaucaguu

SEQ ID NO: 286097 - RNA, 19 nt, Homo sapiens
  misc_RNA (1)...(19): siRNA sense strand
caacccagcagacaagugu

SEQ ID NO: 286098 - RNA, 19 nt, Homo sapiens
  misc_RNA (1)...(19): siRNA sense strand
gagguggugugcaauaacu

SEQ ID NO: 286099 - RNA, 19 nt, Homo sapiens
  misc_RNA (1)...(19): siRNA sense strand
gacuuacacauucagguua

SEQ ID NO: 286100 - RNA, 19 nt, Homo sapiens
  misc_RNA (1)...(19): siRNA sense strand
cagcugaguuacuuugagu

SEQ ID NO: 286101 - RNA, 19 nt, Homo sapiens
  misc_RNA (1)...(19): siRNA sense strand
gcgcaaggcccugcaugaa

SEQ ID NO: 286102 - RNA, 19 nt, Homo sapiens
  misc_RNA (1)...(19): siRNA sense strand
gggaaacugaggacuauuc

SEQ ID NO: 286103 - RNA, 19 nt, Homo sapiens
  misc_RNA (1)...(19): siRNA sense strand
ccaguaacauggagcaacu

SEQ ID NO: 286104 - RNA, 19 nt, Homo sapiens
  misc_RNA (1)...(19): siRNA sense strand
ugagagaugcccagauuuc

SEQ ID NO: 286105 - RNA, 19 nt, Homo sapiens
  misc_RNA (1)...(19): siRNA sense strand
gaugagaauccugacauug

SEQ ID NO: 286106 - RNA, 19 nt, Homo sapiens
  misc_RNA (1)...(19): siRNA sense strand
ccacaagauuagcagaaag

SEQ ID NO: 286107 - RNA, 19 nt, Homo sapiens
  misc_RNA (1)...(19): siRNA sense strand
ggauuccgcugccucaacu

SEQ ID NO: 286108 - RNA, 19 nt, Homo sapiens
  misc_RNA (1)...(19): siRNA sense strand
aagggaaacugaggacuau

SEQ ID NO: 286109 - RNA, 19 nt, Homo sapiens
  misc_RNA (1)...(19): siRNA sense strand
agaaagggaccgcuguuug

SEQ ID NO: 286110 - RNA, 19 nt, Homo sapiens
  misc_RNA (1)...(19): siRNA sense strand
ggaaggagcuggaguuuga

SEQ ID NO: 286111 - RNA, 19 nt, Homo sapiens
  misc_RNA (1)...(19): siRNA sense strand
gcaaagaggaucaaacaaa

SEQ ID NO: 286112 - RNA, 19 nt, Homo sapiens
  misc_RNA (1)...(19): siRNA sense strand
gcaccuguauuccuuguaa

SEQ ID NO: 286113 - RNA, 19 nt, Homo sapiens
  misc_RNA (1)...(19): siRNA sense strand
ggacuggccucucugaaga

SEQ ID NO: 286114 - RNA, 19 nt, Homo sapiens
  misc_RNA (1)...(19): siRNA sense strand
ugacaacacugauggcauu

SEQ ID NO: 286115 - RNA, 19 nt, Homo sapiens
  misc_RNA (1)...(19): siRNA sense strand
caagaugacuguggaaaga

SEQ ID NO: 286116 - RNA, 19 nt, Homo sapiens
  misc_RNA (1)...(19): siRNA sense strand
gaaaucagaucagcugcuu

SEQ ID NO: 286117 - RNA, 19 nt, Homo sapiens
  misc_RNA (1)...(19): siRNA sense strand
ggaaggcuguccaacgaaa

SEQ ID NO: 286118 - RNA, 19 nt, Homo sapiens
  misc_RNA (1)...(19): siRNA sense strand
gcacagagggcaaagaaug

SEQ ID NO: 286119 - RNA, 19 nt, Homo sapiens
  misc_RNA (1)...(19): siRNA sense strand
cagcagcucuuacagaaug

SEQ ID NO: 286120 - RNA, 19 nt, Homo sapiens
  misc_RNA (1)...(19): siRNA sense strand
ggagaacgcugugauaggu

SEQ ID NO: 286121 - RNA, 19 nt, Homo sapiens
  misc_RNA (1)...(19): siRNA sense strand
gaauauggaugcaguacag

SEQ ID NO: 286122 - RNA, 19 nt, Homo sapiens
  misc_RNA (1)...(19): siRNA sense strand
ggaagucugugauugcaau

SEQ ID NO: 286123 - RNA, 19 nt, Homo sapiens
  misc_RNA (1)...(19): siRNA sense strand
aaggagagcuggaaaggaa

SEQ ID NO: 286124 - RNA, 19 nt, Homo sapiens
  misc_RNA (1)...(19): siRNA sense strand
gaaguugagagcauccuua

SEQ ID NO: 286125 - RNA, 19 nt, Homo sapiens
  misc_RNA (1)...(19): siRNA sense strand
cgaaaugggucuccugcaa

SEQ ID NO: 286126 - RNA, 19 nt, Homo sapiens
  misc_RNA (1)...(19): siRNA sense strand
ggagggaagucugugauug

SEQ ID NO: 286127 - RNA, 19 nt, Homo sapiens
  misc_RNA (1)...(19): siRNA sense strand
gcacaagaagcacugagua

SEQ ID NO: 286128 - RNA, 19 nt, Homo sapiens
  misc_RNA (1)...(19): siRNA sense strand
uaagaucaccucuaccuuu

SEQ ID NO: 286129 - RNA, 19 nt, Homo sapiens
  misc_RNA (1)...(19): siRNA sense strand
gaaaugggucuccugcaaa

SEQ ID NO: 286130 - RNA, 19 nt, Homo sapiens
  misc_RNA (1)...(19): siRNA sense strand
gcagguguuugaaguguau

SEQ ID NO: 286131 - RNA, 19 nt, Homo sapiens
  misc_RNA (1)...(19): siRNA sense strand
uaaaugagcauccaagcaa

SEQ ID NO: 286132 - RNA, 19 nt, Homo sapiens
  misc_RNA (1)...(19): siRNA sense strand
caaagaggaucaaacaaaa

SEQ ID NO: 286133 - RNA, 19 nt, Homo sapiens
  misc_RNA (1)...(19): siRNA sense strand
cacaggagauuguuauuca

SEQ ID NO: 286134 - RNA, 19 nt, Homo sapiens
  misc_RNA (1)...(19): siRNA sense strand
gagcauccaagcaauaauu

SEQ ID NO: 286135 - RNA, 19 nt, Homo sapiens
  misc_RNA (1)...(19): siRNA sense strand
gaacuucacagacaaacug

SEQ ID NO: 286136 - RNA, 19 nt, Homo sapiens
  misc_RNA (1)...(19): siRNA sense strand
gcacagcagcucuuacaga

SEQ ID NO: 286137 - RNA, 19 nt, Homo sapiens
  misc_RNA (1)...(19): siRNA sense strand
caccaagacuuacacauuc

SEQ ID NO: 286138 - RNA, 19 nt, Homo sapiens
  misc_RNA (1)...(19): siRNA sense strand
ggaaucaacaggugagcua

SEQ ID NO: 286139 - RNA, 19 nt, Homo sapiens
  misc_RNA (1)...(19): siRNA sense strand
cagaauacaguguccauaa

SEQ ID NO: 286140 - RNA, 19 nt, Homo sapiens
  misc_RNA (1)...(19): siRNA sense strand
cacagcagcucuuacagaa

SEQ ID NO: 286141 - RNA, 19 nt, Homo sapiens
  misc_RNA (1)...(19): siRNA sense strand
gaauggaggcccugauuuc

SEQ ID NO: 286142 - RNA, 19 nt, Homo sapiens
  misc_RNA (1)...(19): siRNA sense strand
caacacagccggcaucuac

SEQ ID NO: 286143 - RNA, 19 nt, Homo sapiens
  misc_RNA (1)...(19): siRNA sense strand
ggguucagcugcucaguga

SEQ ID NO: 286144 - RNA, 19 nt, Homo sapiens
  misc_RNA (1)...(19): siRNA sense strand
ucaggaggccacaagauua

SEQ ID NO: 286145 - RNA, 19 nt, Homo sapiens
  misc_RNA (1)...(19): siRNA sense strand
gaauacaguguccauaaga

SEQ ID NO: 286146 - RNA, 19 nt, Homo sapiens
  misc_RNA (1)...(19): siRNA sense strand
cagacaaacugguaaugga

SEQ ID NO: 286147 - RNA, 19 nt, Homo sapiens
  misc_RNA (1)...(19): siRNA sense strand
ggagagagaaaucagauca

SEQ ID NO: 286148 - RNA, 19 nt, Homo sapiens
  misc_RNA (1)...(19): siRNA sense strand
gagaauggaggcccugauu

SEQ ID NO: 286149 - RNA, 19 nt, Homo sapiens
  misc_RNA (1)...(19): siRNA sense strand
ucaccaagacuuacacauu

SEQ ID NO: 286150 - RNA, 19 nt, Homo sapiens
  misc_RNA (1)...(19): siRNA sense strand
caagggaaacugaggacua

SEQ ID NO: 286151 - RNA, 19 nt, Homo sapiens
  misc_RNA (1)...(19): siRNA sense strand
gaagguuacugcggaaucu

SEQ ID NO: 286152 - RNA, 19 nt, Homo sapiens
  misc_RNA (1)...(19): siRNA sense strand
uaaccaggcauauggauga

SEQ ID NO: 286153 - RNA, 19 nt, Homo sapiens
  misc_RNA (1)...(19): siRNA sense strand
ggacggugcuguggugcaa

SEQ ID NO: 286154 - RNA, 19 nt, Homo sapiens
  misc_RNA (1)...(19): siRNA sense strand
cauccgagcuacauaugga

SEQ ID NO: 286155 - RNA, 19 nt, Homo sapiens
  misc_RNA (1)...(19): siRNA sense strand
ggucacagcgccaucaaga

SEQ ID NO: 286156 - RNA, 19 nt, Homo sapiens
  misc_RNA (1)...(19): siRNA sense strand
gcauauggaugaguucaag

SEQ ID NO: 286157 - RNA, 19 nt, Homo sapiens
  misc_RNA (1)...(19): siRNA sense strand
uggaggcccugauuucaaa

SEQ ID NO: 286158 - RNA, 19 nt, Homo sapiens
  misc_RNA (1)...(19): siRNA sense strand
ucagauggaucaguuuaug

SEQ ID NO: 286159 - RNA, 19 nt, Homo sapiens
  misc_RNA (1)...(19): siRNA sense strand
gugcaaagcaggcuacuuc

SEQ ID NO: 286160 - RNA, 19 nt, Homo sapiens
  misc_RNA (1)...(19): siRNA sense strand
caacugcaaugacaacacu

SEQ ID NO: 286161 - RNA, 19 nt, Homo sapiens
  misc_RNA (1)...(19): siRNA sense strand
gcaguacagauggugauua

SEQ ID NO: 286162 - RNA, 19 nt, Homo sapiens
  misc_RNA (1)...(19): siRNA sense strand
ccaggcauauggaugaguu

SEQ ID NO: 286163 - RNA, 19 nt, Homo sapiens
  misc_RNA (1)...(19): siRNA sense strand
gccacaagauuagcagaaa

SEQ ID NO: 286164 - RNA, 19 nt, Homo sapiens
  misc_RNA (1)...(19): siRNA sense strand
gaagugauggcaccugugu

SEQ ID NO: 286165 - RNA, 19 nt, Homo sapiens
  misc_RNA (1)...(19): siRNA sense strand
gaggagguggugugcaaua

SEQ ID NO: 286166 - RNA, 19 nt, Homo sapiens
  misc_RNA (1)...(19): siRNA sense strand
caguguauauguccuguug

SEQ ID NO: 286167 - RNA, 19 nt, Homo sapiens
  misc_RNA (1)...(19): siRNA sense strand
gaaagggaccgcuguuugc

SEQ ID NO: 286168 - RNA, 19 nt, Homo sapiens
  misc_RNA (1)...(19): siRNA sense strand
gacaaugugacccugauuu

SEQ ID NO: 286169 - RNA, 19 nt, Homo sapiens
  misc_RNA (1)...(19): siRNA sense strand
ugaggacuauuccaaacaa

SEQ ID NO: 286170 - RNA, 19 nt, Homo sapiens
  misc_RNA (1)...(19): siRNA sense strand
gagaaagggaccgcuguuu

SEQ ID NO: 286171 - RNA, 19 nt, Homo sapiens
  misc_RNA (1)...(19): siRNA sense strand
aagacacacucaacacauu

SEQ ID NO: 286172 - RNA, 19 nt, Homo sapiens
  misc_RNA (1)...(19): siRNA sense strand
gauggaguaguaccugaua

SEQ ID NO: 286173 - RNA, 19 nt, Homo sapiens
  misc_RNA (1)...(19): siRNA sense strand
ggguggugauggaguagua

SEQ ID NO: 286174 - RNA, 19 nt, Homo sapiens
  misc_RNA (1)...(19): siRNA sense strand
ucaggguggugauggagua

SEQ ID NO: 286175 - RNA, 19 nt, Homo sapiens
  misc_RNA (1)...(19): siRNA sense strand
aauuguaacuccaaagguu

SEQ ID NO: 286176 - RNA, 19 nt, Homo sapiens
  misc_RNA (1)...(19): siRNA sense strand
gcagaaagccacguugagu

SEQ ID NO: 286177 - RNA, 19 nt, Homo sapiens
  misc_RNA (1)...(19): siRNA sense strand
gagaugcccagauuucaga

SEQ ID NO: 286178 - RNA, 19 nt, Homo sapiens
  misc_RNA (1)...(19): siRNA sense strand
gaucaccucuaccuuucau

SEQ ID NO: 286179 - RNA, 19 nt, Homo sapiens
  misc_RNA (1)...(19): siRNA sense strand
gaagugcaagaauggcuuu

SEQ ID NO: 286180 - RNA, 19 nt, Homo sapiens
  misc_RNA (1)...(19): siRNA sense strand
ggaaguccaggcaguguau

SEQ ID NO: 286181 - RNA, 19 nt, Homo sapiens
  misc_RNA (1)...(19): siRNA sense strand
cagcugagccuggcagaaa

SEQ ID NO: 286182 - RNA, 19 nt, Homo sapiens
  misc_RNA (1)...(19): siRNA sense strand
ucgaucagguuacuauaau

SEQ ID NO: 286183 - RNA, 19 nt, Homo sapiens
  misc_RNA (1)...(19): siRNA sense strand
gaagaagcaaagaggauca

SEQ ID NO: 286184 - RNA, 19 nt, Homo sapiens
  misc_RNA (1)...(19): siRNA sense strand
agacacacucaacacauua

SEQ ID NO: 286185 - RNA, 19 nt, Homo sapiens
  misc_RNA (1)...(19): siRNA sense strand
gcagaauacaguguccaua

SEQ ID NO: 286186 - RNA, 19 nt, Homo sapiens
  misc_RNA (1)...(19): siRNA sense strand
caagaagcacugaguaugg

SEQ ID NO: 286187 - RNA, 19 nt, Homo sapiens
  misc_RNA (1)...(19): siRNA sense strand
aaacugaggacuauuccaa

SEQ ID NO: 286188 - RNA, 19 nt, Homo sapiens
  misc_RNA (1)...(19): siRNA sense strand
gagcaacugacaagggaaa

SEQ ID NO: 286189 - RNA, 19 nt, Homo sapiens
  misc_RNA (1)...(19): siRNA sense strand
uaacauggagcaacugaca

SEQ ID NO: 286190 - RNA, 19 nt, Homo sapiens
  misc_RNA (1)...(19): siRNA sense strand
cggaggagguggugugcaa

SEQ ID NO: 286191 - RNA, 19 nt, Homo sapiens
  misc_RNA (1)...(19): siRNA sense strand
caggugagcuaugggcaaa

SEQ ID NO: 286192 - RNA, 19 nt, Homo sapiens
  misc_RNA (1)...(19): siRNA sense strand
uagcucagcccaacgacua

SEQ ID NO: 286193 - RNA, 19 nt, Homo sapiens
  misc_RNA (1)...(19): siRNA sense strand
gcuauaaucaagugaagau

SEQ ID NO: 286194 - RNA, 19 nt, Homo sapiens
  misc_RNA (1)...(19): siRNA sense strand
aagaucaccucuaccuuuc

SEQ ID NO: 286195 - RNA, 19 nt, Homo sapiens
  misc_RNA (1)...(19): siRNA sense strand
ugaagaagccaugaagaga

SEQ ID NO: 286196 - RNA, 19 nt, Homo sapiens
  misc_RNA (1)...(19): siRNA sense strand
agauucagauggaucaguu

SEQ ID NO: 286197 - RNA, 19 nt, Homo sapiens
  misc_RNA (1)...(19): siRNA sense strand
caacccagcagacaagugu

SEQ ID NO: 286198 - RNA, 19 nt, Homo sapiens
  misc_RNA (1)...(19): siRNA sense strand
gagguggugugcaauaacu

SEQ ID NO: 286199 - RNA, 19 nt, Homo sapiens
  misc_RNA (1)...(19): siRNA sense strand
gacuuacacauucagguua

SEQ ID NO: 286200 - RNA, 19 nt, Homo sapiens
  misc_RNA (1)...(19): siRNA sense strand
cagcugaguuacuuugagu

SEQ ID NO: 286201 - RNA, 19 nt, Homo sapiens
  misc_RNA (1)...(19): siRNA sense strand
gcgcaaggcccugcaugaa

SEQ ID NO: 286202 - RNA, 19 nt, Homo sapiens
  misc_RNA (1)...(19): siRNA sense strand
gggaaacugaggacuauuc

SEQ ID NO: 286203 - RNA, 19 nt, Homo sapiens
  misc_RNA (1)...(19): siRNA sense strand
ccaguaacauggagcaacu

SEQ ID NO: 286204 - RNA, 19 nt, Homo sapiens
  misc_RNA (1)...(19): siRNA sense strand
ugagagaugcccagauuuc

SEQ ID NO: 286205 - RNA, 19 nt, Homo sapiens
  misc_RNA (1)...(19): siRNA sense strand
gaugagaauccugacauug

SEQ ID NO: 286206 - RNA, 19 nt, Homo sapiens
  misc_RNA (1)...(19): siRNA sense strand
ccacaagauuagcagaaag

SEQ ID NO: 286207 - RNA, 19 nt, Homo sapiens
  misc_RNA (1)...(19): siRNA sense strand
ggauuccgcugccucaacu

SEQ ID NO: 286208 - RNA, 19 nt, Homo sapiens
  misc_RNA (1)...(19): siRNA sense strand
aagggaaacugaggacuau

SEQ ID NO: 286209 - RNA, 19 nt, Homo sapiens
  misc_RNA (1)...(19): siRNA sense strand
agaaagggaccgcuguuug

SEQ ID NO: 286210 - RNA, 19 nt, Homo sapiens
  misc_RNA (1)...(19): siRNA sense strand
ucaagaagcucaacuauaa

SEQ ID NO: 286211 - RNA, 19 nt, Homo sapiens
  misc_RNA (1)...(19): siRNA sense strand
gaagagagaaugaugaaga

SEQ ID NO: 286212 - RNA, 19 nt, Homo sapiens
  misc_RNA (1)...(19): siRNA sense strand
gaaggaaagucaaguuuac

SEQ ID NO: 286213 - RNA, 19 nt, Homo sapiens
  misc_RNA (1)...(19): siRNA sense strand
ggaggaagagaauucauua

SEQ ID NO: 286214 - RNA, 19 nt, Homo sapiens
  misc_RNA (1)...(19): siRNA sense strand
gaagaagacgauuaugaaa

SEQ ID NO: 286215 - RNA, 19 nt, Homo sapiens
  misc_RNA (1)...(19): siRNA sense strand
caacagaccaccuaucaga

SEQ ID NO: 286216 - RNA, 19 nt, Homo sapiens
  misc_RNA (1)...(19): siRNA sense strand
aaaccaggauggcacauuu

SEQ ID NO: 286217 - RNA, 19 nt, Homo sapiens
  misc_RNA (1)...(19): siRNA sense strand
agaaggcagugaagaagua

SEQ ID NO: 286218 - RNA, 19 nt, Homo sapiens
  misc_RNA (1)...(19): siRNA sense strand
ggaggaugauggagacuau

SEQ ID NO: 286219 - RNA, 19 nt, Homo sapiens
  misc_RNA (1)...(19): siRNA sense strand
ccuaugagcuccaacacuu

SEQ ID NO: 286220 - RNA, 19 nt, Homo sapiens
  misc_RNA (1)...(19): siRNA sense strand
aaacaacaaccaauccaua

SEQ ID NO: 286221 - RNA, 19 nt, Homo sapiens
  misc_RNA (1)...(19): siRNA sense strand
gaacccagcagaagcagaa

SEQ ID NO: 286222 - RNA, 19 nt, Homo sapiens
  misc_RNA (1)...(19): siRNA sense strand
ugaagaagacgauuaugaa

SEQ ID NO: 286223 - RNA, 19 nt, Homo sapiens
  misc_RNA (1)...(19): siRNA sense strand
ggaaagaaaccaccauuuu

SEQ ID NO: 286224 - RNA, 19 nt, Homo sapiens
  misc_RNA (1)...(19): siRNA sense strand
agaagacgauuaugaaagu

SEQ ID NO: 286225 - RNA, 19 nt, Homo sapiens
  misc_RNA (1)...(19): siRNA sense strand
gagagaaugaugaagauga

SEQ ID NO: 286226 - RNA, 19 nt, Homo sapiens
  misc_RNA (1)...(19): siRNA sense strand
gucaggaaaucaacaagaa

SEQ ID NO: 286227 - RNA, 19 nt, Homo sapiens
  misc_RNA (1)...(19): siRNA sense strand
gcucccugcuccuucaaua

SEQ ID NO: 286228 - RNA, 19 nt, Homo sapiens
  misc_RNA (1)...(19): siRNA sense strand
ggaagaggcacccguggaa

SEQ ID NO: 286229 - RNA, 19 nt, Homo sapiens
  misc_RNA (1)...(19): siRNA sense strand
gaagagaggaggagcaucu

SEQ ID NO: 286230 - RNA, 19 nt, Homo sapiens
  misc_RNA (1)...(19): siRNA sense strand
gaagaaguaccacaucgau

SEQ ID NO: 286231 - RNA, 19 nt, Homo sapiens
  misc_RNA (1)...(19): siRNA sense strand
caacaaccaauccauaugu

SEQ ID NO: 286232 - RNA, 19 nt, Homo sapiens
  misc_RNA (1)...(19): siRNA sense strand
uaaguuaagucaggaaauc

SEQ ID NO: 286233 - RNA, 19 nt, Homo sapiens
  misc_RNA (1)...(19): siRNA sense strand
agaaggaaagucaaguuua

SEQ ID NO: 286234 - RNA, 19 nt, Homo sapiens
  misc_RNA (1)...(19): siRNA sense strand
gaagaacccagcagaagca

SEQ ID NO: 286235 - RNA, 19 nt, Homo sapiens
  misc_RNA (1)...(19): siRNA sense strand
agagaacccuucacacuag

SEQ ID NO: 286236 - RNA, 19 nt, Homo sapiens
  misc_RNA (1)...(19): siRNA sense strand
gaagaugacgcggauuaug

SEQ ID NO: 286237 - RNA, 19 nt, Homo sapiens
  misc_RNA (1)...(19): siRNA sense strand
gugguacguuucuuauauu

SEQ ID NO: 286238 - RNA, 19 nt, Homo sapiens
  misc_RNA (1)...(19): siRNA sense strand
ucaaggcccuagcaacaga

SEQ ID NO: 286239 - RNA, 19 nt, Homo sapiens
  misc_RNA (1)...(19): siRNA sense strand
uagagaacccuucacacua

SEQ ID NO: 286240 - RNA, 19 nt, Homo sapiens
  misc_RNA (1)...(19): siRNA sense strand
aaaaugacauccagaaguu

SEQ ID NO: 286241 - RNA, 19 nt, Homo sapiens
  misc_RNA (1)...(19): siRNA sense strand
cagauaccagugcacauua

SEQ ID NO: 286242 - RNA, 19 nt, Homo sapiens
  misc_RNA (1)...(19): siRNA sense strand
ccagauccguuaucagaag

SEQ ID NO: 286243 - RNA, 19 nt, Homo sapiens
  misc_RNA (1)...(19): siRNA sense strand
aaugaagagugguacguuu

SEQ ID NO: 286244 - RNA, 19 nt, Homo sapiens
  misc_RNA (1)...(19): siRNA sense strand
gggugccgauucucaguaa

SEQ ID NO: 286245 - RNA, 19 nt, Homo sapiens
  misc_RNA (1)...(19): siRNA sense strand
cagaaggaaagucaaguuu

SEQ ID NO: 286246 - RNA, 19 nt, Homo sapiens
  misc_RNA (1)...(19): siRNA sense strand
cagaagcugcucuuagaaa

SEQ ID NO: 286247 - RNA, 19 nt, Homo sapiens
  misc_RNA (1)...(19): siRNA sense strand
agugguacguuucuuauau

SEQ ID NO: 286248 - RNA, 19 nt, Homo sapiens
  misc_RNA (1)...(19): siRNA sense strand
gaggaagagaauucauuaa

SEQ ID NO: 286249 - RNA, 19 nt, Homo sapiens
  misc_RNA (1)...(19): siRNA sense strand
gugccucccugccaccaua

SEQ ID NO: 286250 - RNA, 19 nt, Homo sapiens
  misc_RNA (1)...(19): siRNA sense strand
uggaagaugacgcggauua

SEQ ID NO: 286251 - RNA, 19 nt, Homo sapiens
  misc_RNA (1)...(19): siRNA sense strand
ggucguccuuugaagaaga

SEQ ID NO: 286252 - RNA, 19 nt, Homo sapiens
  misc_RNA (1)...(19): siRNA sense strand
gcaaagcucccugcuccuu

SEQ ID NO: 286253 - RNA, 19 nt, Homo sapiens
  misc_RNA (1)...(19): siRNA sense strand
ggaaaucaacaagaacgaa

SEQ ID NO: 286254 - RNA, 19 nt, Homo sapiens
  misc_RNA (1)...(19): siRNA sense strand
gaagccaccugugccaaag

SEQ ID NO: 286255 - RNA, 19 nt, Homo sapiens
  misc_RNA (1)...(19): siRNA sense strand
agauaccagugcacauuaa

SEQ ID NO: 286256 - RNA, 19 nt, Homo sapiens
  misc_RNA (1)...(19): siRNA sense strand
cagaagagagaaugaugaa

SEQ ID NO: 286257 - RNA, 19 nt, Homo sapiens
  misc_RNA (1)...(19): siRNA sense strand
ggaccagacagaagagaga

SEQ ID NO: 286258 - RNA, 19 nt, Homo sapiens
  misc_RNA (1)...(19): siRNA sense strand
gagaggaggagcaucuuca

SEQ ID NO: 286259 - RNA, 19 nt, Homo sapiens
  misc_RNA (1)...(19): siRNA sense strand
ccagauaccagugcacauu

SEQ ID NO: 286260 - RNA, 19 nt, Homo sapiens
  misc_RNA (1)...(19): siRNA sense strand
cauauguccucaugguguu

SEQ ID NO: 286261 - RNA, 19 nt, Homo sapiens
  misc_RNA (1)...(19): siRNA sense strand
gagcauuuacccaagauuc

SEQ ID NO: 286262 - RNA, 19 nt, Homo sapiens
  misc_RNA (1)...(19): siRNA sense strand
cgaggaagcucugcagaac

SEQ ID NO: 286263 - RNA, 19 nt, Homo sapiens
  misc_RNA (1)...(19): siRNA sense strand
aagaugacgcggauuauga

SEQ ID NO: 286264 - RNA, 19 nt, Homo sapiens
  misc_RNA (1)...(19): siRNA sense strand
ugaugaagaugaugugcau

SEQ ID NO: 286265 - RNA, 19 nt, Homo sapiens
  misc_RNA (1)...(19): siRNA sense strand
caauccauauguccucaug

SEQ ID NO: 286266 - RNA, 19 nt, Homo sapiens
  misc_RNA (1)...(19): siRNA sense strand
gugagaaggcagugaagaa

SEQ ID NO: 286267 - RNA, 19 nt, Homo sapiens
  misc_RNA (1)...(19): siRNA sense strand
aagagagaaugaugaagau

SEQ ID NO: 286268 - RNA, 19 nt, Homo sapiens
  misc_RNA (1)...(19): siRNA sense strand
agagaaugaugaagaugau

SEQ ID NO: 286269 - RNA, 19 nt, Homo sapiens
  misc_RNA (1)...(19): siRNA sense strand
gcucaacuauaaggacugu

SEQ ID NO: 286270 - RNA, 19 nt, Homo sapiens
  misc_RNA (1)...(19): siRNA sense strand
ccacuucugcucauugaug

SEQ ID NO: 286271 - RNA, 19 nt, Homo sapiens
  misc_RNA (1)...(19): siRNA sense strand
gagugguacguuucuuaua

SEQ ID NO: 286272 - RNA, 19 nt, Homo sapiens
  misc_RNA (1)...(19): siRNA sense strand
ggaagaugacgcggauuau

SEQ ID NO: 286273 - RNA, 19 nt, Homo sapiens
  misc_RNA (1)...(19): siRNA sense strand
uaugaaagucccaaugaug

SEQ ID NO: 286274 - RNA, 19 nt, Homo sapiens
  misc_RNA (1)...(19): siRNA sense strand
gaaaaugacauccagaagu

SEQ ID NO: 286275 - RNA, 19 nt, Homo sapiens
  misc_RNA (1)...(19): siRNA sense strand
gacagaagagagaaugaug

SEQ ID NO: 286276 - RNA, 19 nt, Homo sapiens
  misc_RNA (1)...(19): siRNA sense strand
agacagaaagccacgaaga

SEQ ID NO: 286277 - RNA, 19 nt, Homo sapiens
  misc_RNA (1)...(19): siRNA sense strand
ucaacuauaaggacuguga

SEQ ID NO: 286278 - RNA, 19 nt, Homo sapiens
  misc_RNA (1)...(19): siRNA sense strand
guacguuucuuauauuacc

SEQ ID NO: 286279 - RNA, 19 nt, Homo sapiens
  misc_RNA (1)...(19): siRNA sense strand
ccaccauacuucucucaag

SEQ ID NO: 286280 - RNA, 19 nt, Homo sapiens
  misc_RNA (1)...(19): siRNA sense strand
gaagacgauuaugaaaguc

SEQ ID NO: 286281 - RNA, 19 nt, Homo sapiens
  misc_RNA (1)...(19): siRNA sense strand
agaagcugcucuuagaaag

SEQ ID NO: 286282 - RNA, 19 nt, Homo sapiens
  misc_RNA (1)...(19): siRNA sense strand
aagaggacuuucugucugu

SEQ ID NO: 286283 - RNA, 19 nt, Homo sapiens
  misc_RNA (1)...(19): siRNA sense strand
ccgauucucaguaaguuaa

SEQ ID NO: 286284 - RNA, 19 nt, Homo sapiens
  misc_RNA (1)...(19): siRNA sense strand
caacauccagauccguuau

SEQ ID NO: 286285 - RNA, 19 nt, Homo sapiens
  misc_RNA (1)...(19): siRNA sense strand
gcgguuuccugaagagaca

SEQ ID NO: 286286 - RNA, 19 nt, Homo sapiens
  misc_RNA (1)...(19): siRNA sense strand
ccagcacuacuuccuauga

SEQ ID NO: 286287 - RNA, 19 nt, Homo sapiens
  misc_RNA (1)...(19): siRNA sense strand
uagcuccguuugauagaga

SEQ ID NO: 286288 - RNA, 19 nt, Homo sapiens
  misc_RNA (1)...(19): siRNA sense strand
aaagcucccugcuccuuca

SEQ ID NO: 286289 - RNA, 19 nt, Homo sapiens
  misc_RNA (1)...(19): siRNA sense strand
ccaacuccauguacaucga

SEQ ID NO: 286290 - RNA, 19 nt, Homo sapiens
  misc_RNA (1)...(19): siRNA sense strand
uugaagaagacgauuauga

SEQ ID NO: 286291 - RNA, 19 nt, Homo sapiens
  misc_RNA (1)...(19): siRNA sense strand
gagcaucuucacacgcaaa

SEQ ID NO: 286292 - RNA, 19 nt, Homo sapiens
  misc_RNA (1)...(19): siRNA sense strand
ucagaaggaaagucaaguu

SEQ ID NO: 286293 - RNA, 19 nt, Homo sapiens
  misc_RNA (1)...(19): siRNA sense strand
ucaugguguuguacaaaga

SEQ ID NO: 286294 - RNA, 19 nt, Homo sapiens
  misc_RNA (1)...(19): siRNA sense strand
gagaaggcagugaagaagu

SEQ ID NO: 286295 - RNA, 19 nt, Homo sapiens
  misc_RNA (1)...(19): siRNA sense strand
ccagaccaaccacgaagaa

SEQ ID NO: 286296 - RNA, 19 nt, Homo sapiens
  misc_RNA (1)...(19): siRNA sense strand
gguguuguacaaagauaaa

SEQ ID NO: 286297 - RNA, 19 nt, Homo sapiens
  misc_RNA (1)...(19): siRNA sense strand
cagaaaguaacagcaguuu

SEQ ID NO: 286298 - RNA, 19 nt, Homo sapiens
  misc_RNA (1)...(19): siRNA sense strand
gaacccuucacacuaggaa

SEQ ID NO: 286299 - RNA, 19 nt, Homo sapiens
  misc_RNA (1)...(19): siRNA sense strand
gcacgaaaccuccccuaga

SEQ ID NO: 286300 - RNA, 19 nt, Homo sapiens
  misc_RNA (1)...(19): siRNA sense strand
gggagcauuuacccaagau

SEQ ID NO: 286301 - RNA, 19 nt, Homo sapiens
  misc_RNA (1)...(19): siRNA sense strand
gcauuuacccaagauucaa

SEQ ID NO: 286302 - RNA, 19 nt, Homo sapiens
  misc_RNA (1)...(19): siRNA sense strand
gauuaugaaagucccaaug

SEQ ID NO: 286303 - RNA, 19 nt, Homo sapiens
  misc_RNA (1)...(19): siRNA sense strand
ugaggaaugugcccuuucg

SEQ ID NO: 286304 - RNA, 19 nt, Homo sapiens
  misc_RNA (1)...(19): siRNA sense strand
gauccguuaucagaaggaa

SEQ ID NO: 286305 - RNA, 19 nt, Homo sapiens
  misc_RNA (1)...(19): siRNA sense strand
cggaggaagagaauucauu

SEQ ID NO: 286306 - RNA, 19 nt, Homo sapiens
  misc_RNA (1)...(19): siRNA sense strand
ucucaaggcccuagcaaca

SEQ ID NO: 286307 - RNA, 19 nt, Homo sapiens
  misc_RNA (1)...(19): siRNA sense strand
gaaugaugaagaugaugug

SEQ ID NO: 286308 - RNA, 19 nt, Homo sapiens
  misc_RNA (1)...(19): siRNA sense strand
acagaagagagaaugauga

SEQ ID NO: 286309 - RNA, 19 nt, Homo sapiens
  misc_RNA (1)...(19): siRNA sense strand
guucauuagcuccguuuga

SEQ ID NO: 286310 - RNA, 19 nt, Homo sapiens
  misc_RNA (1)...(19): siRNA sense strand
ggagaaagccgucuuaauu

SEQ ID NO: 286311 - RNA, 19 nt, Homo sapiens
  misc_RNA (1)...(19): siRNA sense strand
ggaaagagguucacaagca

SEQ ID NO: 286312 - RNA, 19 nt, Homo sapiens
  misc_RNA (1)...(19): siRNA sense strand
gagaaagccgucuuaauuu

SEQ ID NO: 286313 - RNA, 19 nt, Homo sapiens
  misc_RNA (1)...(19): siRNA sense strand
ggcaaagacuauaauguaa

SEQ ID NO: 286314 - RNA, 19 nt, Homo sapiens
  misc_RNA (1)...(19): siRNA sense strand
gaugaugucuuccuuagug

SEQ ID NO: 286315 - RNA, 19 nt, Homo sapiens
  misc_RNA (1)...(19): siRNA sense strand
gaagaagagugcagauaca

SEQ ID NO: 286316 - RNA, 19 nt, Homo sapiens
  misc_RNA (1)...(19): siRNA sense strand
gaagaggcccguuugaaga

SEQ ID NO: 286317 - RNA, 19 nt, Homo sapiens
  misc_RNA (1)...(19): siRNA sense strand
cuacguggcuuggaagaua

SEQ ID NO: 286318 - RNA, 19 nt, Homo sapiens
  misc_RNA (1)...(19): siRNA sense strand
agaaagccgucuuaauuug

SEQ ID NO: 286319 - RNA, 19 nt, Homo sapiens
  misc_RNA (1)...(19): siRNA sense strand
ggacuuggcagaugaacuu

SEQ ID NO: 286320 - RNA, 19 nt, Homo sapiens
  misc_RNA (1)...(19): siRNA sense strand
cagaugaacuugcucuugu

SEQ ID NO: 286321 - RNA, 19 nt, Homo sapiens
  misc_RNA (1)...(19): siRNA sense strand
gcagagaguauaaugaaga

SEQ ID NO: 286322 - RNA, 19 nt, Homo sapiens
  misc_RNA (1)...(19): siRNA sense strand
aauaaaggaugaugucuuc

SEQ ID NO: 286323 - RNA, 19 nt, Homo sapiens
  misc_RNA (1)...(19): siRNA sense strand
ugaaggacuuggcagauga

SEQ ID NO: 286324 - RNA, 19 nt, Homo sapiens
  misc_RNA (1)...(19): siRNA sense strand
uggcaaagacuauaaugua

SEQ ID NO: 286325 - RNA, 19 nt, Homo sapiens
  misc_RNA (1)...(19): siRNA sense strand
gaauguugcuggugucucu

SEQ ID NO: 286326 - RNA, 19 nt, Homo sapiens
  misc_RNA (1)...(19): siRNA sense strand
ggaagaggcccguuugaag

SEQ ID NO: 286327 - RNA, 19 nt, Homo sapiens
  misc_RNA (1)...(19): siRNA sense strand
gaauaaaggaugaugucuu

SEQ ID NO: 286328 - RNA, 19 nt, Homo sapiens
  misc_RNA (1)...(19): siRNA sense strand
gcuggugucucucugaaga

SEQ ID NO: 286329 - RNA, 19 nt, Homo sapiens
  misc_RNA (1)...(19): siRNA sense strand
gggaaaggcugggaguuca

SEQ ID NO: 286330 - RNA, 19 nt, Homo sapiens
  misc_RNA (1)...(19): siRNA sense strand
cagaauaagauuacaguug

SEQ ID NO: 286331 - RNA, 19 nt, Homo sapiens
  misc_RNA (1)...(19): siRNA sense strand
cagagaguauaaugaagaa

SEQ ID NO: 286332 - RNA, 19 nt, Homo sapiens
  misc_RNA (1)...(19): siRNA sense strand
uaagggucuuuacggaaua

SEQ ID NO: 286333 - RNA, 19 nt, Homo sapiens
  misc_RNA (1)...(19): siRNA sense strand
acuccaagcuggucauuau

SEQ ID NO: 286334 - RNA, 19 nt, Homo sapiens
  misc_RNA (1)...(19): siRNA sense strand
ggacugauaaagauaagga

SEQ ID NO: 286335 - RNA, 19 nt, Homo sapiens
  misc_RNA (1)...(19): siRNA sense strand
uuaauuugguccagcguaa

SEQ ID NO: 286336 - RNA, 19 nt, Homo sapiens
  misc_RNA (1)...(19): siRNA sense strand
ugaccuacguggcuuggaa

SEQ ID NO: 286337 - RNA, 19 nt, Homo sapiens
  misc_RNA (1)...(19): siRNA sense strand
gagggagaaagccgucuua

SEQ ID NO: 286338 - RNA, 19 nt, Homo sapiens
  misc_RNA (1)...(19): siRNA sense strand
ccaguuuccaccaugauua

SEQ ID NO: 286339 - RNA, 19 nt, Homo sapiens
  misc_RNA (1)...(19): siRNA sense strand
gcagaugaacuugcucuug

SEQ ID NO: 286340 - RNA, 19 nt, Homo sapiens
  misc_RNA (1)...(19): siRNA sense strand
uuaagggucuuuacggaau

SEQ ID NO: 286341 - RNA, 19 nt, Homo sapiens
  misc_RNA (1)...(19): siRNA sense strand
gagaguauaaugaagaauc

SEQ ID NO: 286342 - RNA, 19 nt, Homo sapiens
  misc_RNA (1)...(19): siRNA sense strand
caguggauaucuugaccua

SEQ ID NO: 286343 - RNA, 19 nt, Homo sapiens
  misc_RNA (1)...(19): siRNA sense strand
gaaagccgucuuaauuugg

SEQ ID NO: 286344 - RNA, 19 nt, Homo sapiens
  misc_RNA (1)...(19): siRNA sense strand
gauaagugguuuucccaaa

SEQ ID NO: 286345 - RNA, 19 nt, Homo sapiens
  misc_RNA (1)...(19): siRNA sense strand
ugaacuugcucuuguugau

SEQ ID NO: 286346 - RNA, 19 nt, Homo sapiens
  misc_RNA (1)...(19): siRNA sense strand
gggacagaauggaaucuca

SEQ ID NO: 286347 - RNA, 19 nt, Homo sapiens
  misc_RNA (1)...(19): siRNA sense strand
caaauugaagggagagaug

SEQ ID NO: 286348 - RNA, 19 nt, Homo sapiens
  misc_RNA (1)...(19): siRNA sense strand
gcuauuggacucucuguag

SEQ ID NO: 286349 - RNA, 19 nt, Homo sapiens
  misc_RNA (1)...(19): siRNA sense strand
gaacuugcucuuguugaug

SEQ ID NO: 286350 - RNA, 19 nt, Homo sapiens
  misc_RNA (1)...(19): siRNA sense strand
gggagaaagccgucuuaau

SEQ ID NO: 286351 - RNA, 19 nt, Homo sapiens
  misc_RNA (1)...(19): siRNA sense strand
gaauggaaucucagaccuu

SEQ ID NO: 286352 - RNA, 19 nt, Homo sapiens
  misc_RNA (1)...(19): siRNA sense strand
cuuaugaggugaucaaacu

SEQ ID NO: 286353 - RNA, 19 nt, Homo sapiens
  misc_RNA (1)...(19): siRNA sense strand
gcaaagacuauaauguaac

SEQ ID NO: 286354 - RNA, 19 nt, Homo sapiens
  misc_RNA (1)...(19): siRNA sense strand
ccaucaguaucuuaaugaa

SEQ ID NO: 286355 - RNA, 19 nt, Homo sapiens
  misc_RNA (1)...(19): siRNA sense strand
uggcagagaguauaaugaa

SEQ ID NO: 286356 - RNA, 19 nt, Homo sapiens
  misc_RNA (1)...(19): siRNA sense strand
ccagauuuagggacugaua

SEQ ID NO: 286357 - RNA, 19 nt, Homo sapiens
  misc_RNA (1)...(19): siRNA sense strand
ggaguucacccauuaagcu

SEQ ID NO: 286358 - RNA, 19 nt, Homo sapiens
  misc_RNA (1)...(19): siRNA sense strand
gaaggacuuggcagaugaa

SEQ ID NO: 286359 - RNA, 19 nt, Homo sapiens
  misc_RNA (1)...(19): siRNA sense strand
gaggaagaggcccguuuga

SEQ ID NO: 286360 - RNA, 19 nt, Homo sapiens
  misc_RNA (1)...(19): siRNA sense strand
gacucugacuucugaggaa

SEQ ID NO: 286361 - RNA, 19 nt, Homo sapiens
  misc_RNA (1)...(19): siRNA sense strand
gccaucaguaucuuaauga

SEQ ID NO: 286362 - RNA, 19 nt, Homo sapiens
  misc_RNA (1)...(19): siRNA sense strand
gaugaacuugcucuuguug

SEQ ID NO: 286363 - RNA, 19 nt, Homo sapiens
  misc_RNA (1)...(19): siRNA sense strand
ugaagaagagugcagauac

SEQ ID NO: 286364 - RNA, 19 nt, Homo sapiens
  misc_RNA (1)...(19): siRNA sense strand
ccuuagaacaccaaagauu

SEQ ID NO: 286365 - RNA, 19 nt, Homo sapiens
  misc_RNA (1)...(19): siRNA sense strand
gauaaggaacaguggaaag

SEQ ID NO: 286366 - RNA, 19 nt, Homo sapiens
  misc_RNA (1)...(19): siRNA sense strand
uguauggaguggaaugaau

SEQ ID NO: 286367 - RNA, 19 nt, Homo sapiens
  misc_RNA (1)...(19): siRNA sense strand
gauuuggcagagaguauaa

SEQ ID NO: 286368 - RNA, 19 nt, Homo sapiens
  misc_RNA (1)...(19): siRNA sense strand
caucgaagacaaauugaag

SEQ ID NO: 286369 - RNA, 19 nt, Homo sapiens
  misc_RNA (1)...(19): siRNA sense strand
cuuagaacaccaaagauug

SEQ ID NO: 286370 - RNA, 19 nt, Homo sapiens
  misc_RNA (1)...(19): siRNA sense strand
gaggcccguuugaagaaga

SEQ ID NO: 286371 - RNA, 19 nt, Homo sapiens
  misc_RNA (1)...(19): siRNA sense strand
ugccaucaguaucuuaaug

SEQ ID NO: 286372 - RNA, 19 nt, Homo sapiens
  misc_RNA (1)...(19): siRNA sense strand
agaugaacuugcucuuguu

SEQ ID NO: 286373 - RNA, 19 nt, Homo sapiens
  misc_RNA (1)...(19): siRNA sense strand
gugccuguauggaguggaa

SEQ ID NO: 286374 - RNA, 19 nt, Homo sapiens
  misc_RNA (1)...(19): siRNA sense strand
cuacacauccugggcuauu

SEQ ID NO: 286375 - RNA, 19 nt, Homo sapiens
  misc_RNA (1)...(19): siRNA sense strand
gaagggagagaugauggau

SEQ ID NO: 286376 - RNA, 19 nt, Homo sapiens
  misc_RNA (1)...(19): siRNA sense strand
gcagauuuggcagagagua

SEQ ID NO: 286377 - RNA, 19 nt, Homo sapiens
  misc_RNA (1)...(19): siRNA sense strand
gaggugaucaaacucaaag

SEQ ID NO: 286378 - RNA, 19 nt, Homo sapiens
  misc_RNA (1)...(19): siRNA sense strand
uacguggcuuggaagauaa

SEQ ID NO: 286379 - RNA, 19 nt, Homo sapiens
  misc_RNA (1)...(19): siRNA sense strand
guauggaguggaaugaaug

SEQ ID NO: 286380 - RNA, 19 nt, Homo sapiens
  misc_RNA (1)...(19): siRNA sense strand
gacagaauggaaucucaga

SEQ ID NO: 286381 - RNA, 19 nt, Homo sapiens
  misc_RNA (1)...(19): siRNA sense strand
caguuuccaccaugauuaa

SEQ ID NO: 286382 - RNA, 19 nt, Homo sapiens
  misc_RNA (1)...(19): siRNA sense strand
aaagauugucucuggcaaa

SEQ ID NO: 286383 - RNA, 19 nt, Homo sapiens
  misc_RNA (1)...(19): siRNA sense strand
cauggcagccuuuuccuua

SEQ ID NO: 286384 - RNA, 19 nt, Homo sapiens
  misc_RNA (1)...(19): siRNA sense strand
ugaggaagaggcccguuug

SEQ ID NO: 286385 - RNA, 19 nt, Homo sapiens
  misc_RNA (1)...(19): siRNA sense strand
cagauuuagggacugauaa

SEQ ID NO: 286386 - RNA, 19 nt, Homo sapiens
  misc_RNA (1)...(19): siRNA sense strand
cuuggaagauaagugguuu

SEQ ID NO: 286387 - RNA, 19 nt, Homo sapiens
  misc_RNA (1)...(19): siRNA sense strand
uagggacugauaaagauaa

SEQ ID NO: 286388 - RNA, 19 nt, Homo sapiens
  misc_RNA (1)...(19): siRNA sense strand
aggugacucugacuucuga

SEQ ID NO: 286389 - RNA, 19 nt, Homo sapiens
  misc_RNA (1)...(19): siRNA sense strand
gaugucuuccuuaguguuc

SEQ ID NO: 286390 - RNA, 19 nt, Homo sapiens
  misc_RNA (1)...(19): siRNA sense strand
ggcagagaguauaaugaag

SEQ ID NO: 286391 - RNA, 19 nt, Homo sapiens
  misc_RNA (1)...(19): siRNA sense strand
ugauaaagauaaggaacag

SEQ ID NO: 286392 - RNA, 19 nt, Homo sapiens
  misc_RNA (1)...(19): siRNA sense strand
uuagaacaccaaagauugu

SEQ ID NO: 286393 - RNA, 19 nt, Homo sapiens
  misc_RNA (1)...(19): siRNA sense strand
auaaggaacaguggaaaga

SEQ ID NO: 286394 - RNA, 19 nt, Homo sapiens
  misc_RNA (1)...(19): siRNA sense strand
ccaaaaggagcugcaauuu

SEQ ID NO: 286395 - RNA, 19 nt, Homo sapiens
  misc_RNA (1)...(19): siRNA sense strand
aagaggcccguuugaagaa

SEQ ID NO: 286396 - RNA, 19 nt, Homo sapiens
  misc_RNA (1)...(19): siRNA sense strand
ggaauaaaggaugaugucu

SEQ ID NO: 286397 - RNA, 19 nt, Homo sapiens
  misc_RNA (1)...(19): siRNA sense strand
guggaaagagguucacaag

SEQ ID NO: 286398 - RNA, 19 nt, Homo sapiens
  misc_RNA (1)...(19): siRNA sense strand
ggaacaguggaaagagguu

SEQ ID NO: 286399 - RNA, 19 nt, Homo sapiens
  misc_RNA (1)...(19): siRNA sense strand
aaagccgucuuaauuuggu

SEQ ID NO: 286400 - RNA, 19 nt, Homo sapiens
  misc_RNA (1)...(19): siRNA sense strand
aagauugucucuggcaaag

SEQ ID NO: 286401 - RNA, 19 nt, Homo sapiens
  misc_RNA (1)...(19): siRNA sense strand
guaucuuaaugaaggacuu

SEQ ID NO: 286402 - RNA, 19 nt, Homo sapiens
  misc_RNA (1)...(19): siRNA sense strand
cacccaguuuccaccauga

SEQ ID NO: 286403 - RNA, 19 nt, Homo sapiens
  misc_RNA (1)...(19): siRNA sense strand
ugguugagagugcuuauga

SEQ ID NO: 286404 - RNA, 19 nt, Homo sapiens
  misc_RNA (1)...(19): siRNA sense strand
uggaguggaaugaauguug

SEQ ID NO: 286405 - RNA, 19 nt, Homo sapiens
  misc_RNA (1)...(19): siRNA sense strand
aagauaaggaacaguggaa

SEQ ID NO: 286406 - RNA, 19 nt, Homo sapiens
  misc_RNA (1)...(19): siRNA sense strand
caaacucaaaggcuacaca

SEQ ID NO: 286407 - RNA, 19 nt, Homo sapiens
  misc_RNA (1)...(19): siRNA sense strand
cagauuuggcagagaguau

SEQ ID NO: 286408 - RNA, 19 nt, Homo sapiens
  misc_RNA (1)...(19): siRNA sense strand
gaaucucagaccuugugaa

SEQ ID NO: 286409 - RNA, 19 nt, Homo sapiens
  misc_RNA (1)...(19): siRNA sense strand
ggaaucucagaccuuguga

SEQ ID NO: 286410 - RNA, 19 nt, Homo sapiens
  misc_RNA (1)...(19): siRNA sense strand
gagaagcucugccuacagu

SEQ ID NO: 286411 - RNA, 19 nt, Homo sapiens
  misc_RNA (1)...(19): siRNA sense strand
ggucaaauauucuucugau

SEQ ID NO: 286412 - RNA, 19 nt, Homo sapiens
  misc_RNA (1)...(19): siRNA sense strand
ccacagaccugcuccaacu

SEQ ID NO: 286413 - RNA, 19 nt, Homo sapiens
  misc_RNA (1)...(19): siRNA sense strand
uggcagacgucaccgauuu

SEQ ID NO: 286414 - RNA, 19 nt, Homo sapiens
  misc_RNA (1)...(19): siRNA sense strand
ggagugccuuugugacaga

SEQ ID NO: 286415 - RNA, 19 nt, Homo sapiens
  misc_RNA (1)...(19): siRNA sense strand
agucacaacuggucuauca

SEQ ID NO: 286416 - RNA, 19 nt, Homo sapiens
  misc_RNA (1)...(19): siRNA sense strand
gaguguggaugcugagugu

SEQ ID NO: 286417 - RNA, 19 nt, Homo sapiens
  misc_RNA (1)...(19): siRNA sense strand
cgugaacgauggugacaug

SEQ ID NO: 286418 - RNA, 19 nt, Homo sapiens
  misc_RNA (1)...(19): siRNA sense strand
gcagcaaugucaccaugag

SEQ ID NO: 286419 - RNA, 19 nt, Homo sapiens
  misc_RNA (1)...(19): siRNA sense strand
ggaccuguaugccuaugca

SEQ ID NO: 286420 - RNA, 19 nt, Homo sapiens
  misc_RNA (1)...(19): siRNA sense strand
ggaagucacaacuggucua

SEQ ID NO: 286421 - RNA, 19 nt, Homo sapiens
  misc_RNA (1)...(19): siRNA sense strand
cggcucagaucgcaccauu

SEQ ID NO: 286422 - RNA, 19 nt, Homo sapiens
  misc_RNA (1)...(19): siRNA sense strand
gaagcucugccuacaguuc

SEQ ID NO: 286423 - RNA, 19 nt, Homo sapiens
  misc_RNA (1)...(19): siRNA sense strand
caagcuggccucugccuau

SEQ ID NO: 286424 - RNA, 19 nt, Homo sapiens
  misc_RNA (1)...(19): siRNA sense strand
gcaaugucaccaugagugu

SEQ ID NO: 286425 - RNA, 19 nt, Homo sapiens
  misc_RNA (1)...(19): siRNA sense strand
cuacugcgcaagccucuuu

SEQ ID NO: 286426 - RNA, 19 nt, Homo sapiens
  misc_RNA (1)...(19): siRNA sense strand
gaagucacaacuggucuau

SEQ ID NO: 286427 - RNA, 19 nt, Homo sapiens
  misc_RNA (1)...(19): siRNA sense strand
gcguggagaucuucuacag

SEQ ID NO: 286428 - RNA, 19 nt, Homo sapiens
  misc_RNA (1)...(19): siRNA sense strand
ucccugggcuggcugaaga

SEQ ID NO: 286429 - RNA, 19 nt, Homo sapiens
  misc_RNA (1)...(19): siRNA sense strand
ggagugcacggaagucaca

SEQ ID NO: 286430 - RNA, 19 nt, Homo sapiens
  misc_RNA (1)...(19): siRNA sense strand
caacugcaggcacgagaga

SEQ ID NO: 286431 - RNA, 19 nt, Homo sapiens
  misc_RNA (1)...(19): siRNA sense strand
gcucagaucgcaccauugc

SEQ ID NO: 286432 - RNA, 19 nt, Homo sapiens
  misc_RNA (1)...(19): siRNA sense strand
acgaggcccuguuccagaa

SEQ ID NO: 286433 - RNA, 19 nt, Homo sapiens
  misc_RNA (1)...(19): siRNA sense strand
ucaccgaggauaccuacaa

SEQ ID NO: 286434 - RNA, 19 nt, Homo sapiens
  misc_RNA (1)...(19): siRNA sense strand
gaacccaaggcgugaacga

SEQ ID NO: 286435 - RNA, 19 nt, Homo sapiens
  misc_RNA (1)...(19): siRNA sense strand
uggagaagcucugccuaca

SEQ ID NO: 286436 - RNA, 19 nt, Homo sapiens
  misc_RNA (1)...(19): siRNA sense strand
gcccuuggccagaucuuug

SEQ ID NO: 286437 - RNA, 19 nt, Homo sapiens
  misc_RNA (1)...(19): siRNA sense strand
gaggcccuguuccagaaga

SEQ ID NO: 286438 - RNA, 19 nt, Homo sapiens
  misc_RNA (1)...(19): siRNA sense strand
ugucgucagucaagugcuu

SEQ ID NO: 286439 - RNA, 19 nt, Homo sapiens
  misc_RNA (1)...(19): siRNA sense strand
cgaagagcaccuccuccuu

SEQ ID NO: 286440 - RNA, 19 nt, Homo sapiens
  misc_RNA (1)...(19): siRNA sense strand
gcugcgaccuguccaucag

SEQ ID NO: 286441 - RNA, 19 nt, Homo sapiens
  misc_RNA (1)...(19): siRNA sense strand
caccuggagugccuuugug

SEQ ID NO: 286442 - RNA, 19 nt, Homo sapiens
  misc_RNA (1)...(19): siRNA sense strand
aguucaaccugucccugua

SEQ ID NO: 286443 - RNA, 19 nt, Homo sapiens
  misc_RNA (1)...(19): siRNA sense strand
gacaccaacagcucgaaga

SEQ ID NO: 286444 - RNA, 19 nt, Homo sapiens
  misc_RNA (1)...(19): siRNA sense strand
caccgaggauaccuacaag

SEQ ID NO: 286445 - RNA, 19 nt, Homo sapiens
  misc_RNA (1)...(19): siRNA sense strand
ugggcuggcugaagagcaa

SEQ ID NO: 286446 - RNA, 19 nt, Homo sapiens
  misc_RNA (1)...(19): siRNA sense strand
ggagaagcucugccuacag

SEQ ID NO: 286447 - RNA, 19 nt, Homo sapiens
  misc_RNA (1)...(19): siRNA sense strand
cgagcuggcccuacugaag

SEQ ID NO: 286448 - RNA, 19 nt, Homo sapiens
  misc_RNA (1)...(19): siRNA sense strand
caaagaggauuaccuaagu

SEQ ID NO: 286449 - RNA, 19 nt, Homo sapiens
  misc_RNA (1)...(19): siRNA sense strand
aaagaggauuaccuaagua

SEQ ID NO: 286450 - RNA, 19 nt, Homo sapiens
  misc_RNA (1)...(19): siRNA sense strand
ucaccugcaugauguguaa

SEQ ID NO: 286451 - RNA, 19 nt, Homo sapiens
  misc_RNA (1)...(19): siRNA sense strand
gcaaagaggauuaccuaag

SEQ ID NO: 286452 - RNA, 19 nt, Homo sapiens
  misc_RNA (1)...(19): siRNA sense strand
gcgaggaacucuacaucau

SEQ ID NO: 286453 - RNA, 19 nt, Homo sapiens
  misc_RNA (1)...(19): siRNA sense strand
ggcaaacucuacugcaaga

SEQ ID NO: 286454 - RNA, 19 nt, Homo sapiens
  misc_RNA (1)...(19): siRNA sense strand
agaauaaguucgucugcaa

SEQ ID NO: 286455 - RNA, 19 nt, Homo sapiens
  misc_RNA (1)...(19): siRNA sense strand
ccagugcugugaauguaaa

SEQ ID NO: 286456 - RNA, 19 nt, Homo sapiens
  misc_RNA (1)...(19): siRNA sense strand
gagauuaccagagcgagua

SEQ ID NO: 286457 - RNA, 19 nt, Homo sapiens
  misc_RNA (1)...(19): siRNA sense strand
gaauaaguucgucugcaaa

SEQ ID NO: 286458 - RNA, 19 nt, Homo sapiens
  misc_RNA (1)...(19): siRNA sense strand
gcucuccacuggcgaggaa

SEQ ID NO: 286459 - RNA, 19 nt, Homo sapiens
  misc_RNA (1)...(19): siRNA sense strand
guccagugcugugaaugua

SEQ ID NO: 286460 - RNA, 19 nt, Homo sapiens
  misc_RNA (1)...(19): siRNA sense strand
ggagaccggccucaacaug

SEQ ID NO: 286461 - RNA, 19 nt, Homo sapiens
  misc_RNA (1)...(19): siRNA sense strand
ccaaggagcggaggaugaa

SEQ ID NO: 286462 - RNA, 19 nt, Homo sapiens
  misc_RNA (1)...(19): siRNA sense strand
gggcaacuacgacuucuuc

SEQ ID NO: 286463 - RNA, 19 nt, Homo sapiens
  misc_RNA (1)...(19): siRNA sense strand
ccaauggucccuucuccuu

SEQ ID NO: 286464 - RNA, 19 nt, Homo sapiens
  misc_RNA (1)...(19): siRNA sense strand
aaugcaaccugaccgagaa

SEQ ID NO: 286465 - RNA, 19 nt, Homo sapiens
  misc_RNA (1)...(19): siRNA sense strand
ggagagcgcggagcaaagu

SEQ ID NO: 286466 - RNA, 19 nt, Homo sapiens
  misc_RNA (1)...(19): siRNA sense strand
cuggaccgcuuucucuuga

SEQ ID NO: 286467 - RNA, 19 nt, Homo sapiens
  misc_RNA (1)...(19): siRNA sense strand
cugcaaagaggauuaccua

SEQ ID NO: 286468 - RNA, 19 nt, Homo sapiens
  misc_RNA (1)...(19): siRNA sense strand
aaggcaaacucuacugcaa

SEQ ID NO: 286469 - RNA, 19 nt, Homo sapiens
  misc_RNA (1)...(19): siRNA sense strand
ccaaagagaacagccuuca

SEQ ID NO: 286470 - RNA, 19 nt, Homo sapiens
  misc_RNA (1)...(19): siRNA sense strand
gcaguguugccaaagagaa

SEQ ID NO: 286471 - RNA, 19 nt, Homo sapiens
  misc_RNA (1)...(19): siRNA sense strand
ucacugugccggcugcaaa

SEQ ID NO: 286472 - RNA, 19 nt, Homo sapiens
  misc_RNA (1)...(19): siRNA sense strand
acagcaguguugccaaaga

SEQ ID NO: 286473 - RNA, 19 nt, Homo sapiens
  misc_RNA (1)...(19): siRNA sense strand
ucucgucgcugucggucaa

SEQ ID NO: 286474 - RNA, 19 nt, Homo sapiens
  misc_RNA (1)...(19): siRNA sense strand
ggaccgcuuucucuugaac

SEQ ID NO: 286475 - RNA, 19 nt, Homo sapiens
  misc_RNA (1)...(19): siRNA sense strand
cagcaguguugccaaagag

SEQ ID NO: 286476 - RNA, 19 nt, Homo sapiens
  misc_RNA (1)...(19): siRNA sense strand
aaagagaacagccuucacu

SEQ ID NO: 286477 - RNA, 19 nt, Homo sapiens
  misc_RNA (1)...(19): siRNA sense strand
caacaugcgcgucauucag

SEQ ID NO: 286478 - RNA, 19 nt, Homo sapiens
  misc_RNA (1)...(19): siRNA sense strand
ccagggaaggcaaacucua

SEQ ID NO: 286479 - RNA, 19 nt, Homo sapiens
  misc_RNA (1)...(19): siRNA sense strand
cuacaucaucgacgagaau

SEQ ID NO: 286480 - RNA, 19 nt, Homo sapiens
  misc_RNA (1)...(19): siRNA sense strand
gcaaccugaccgagaagug

SEQ ID NO: 286481 - RNA, 19 nt, Homo sapiens
  misc_RNA (1)...(19): siRNA sense strand
ccagacaccaguggaccua

SEQ ID NO: 286482 - RNA, 19 nt, Homo sapiens
  misc_RNA (1)...(19): siRNA sense strand
caggagaccggccucaaca

SEQ ID NO: 286483 - RNA, 19 nt, Homo sapiens
  misc_RNA (1)...(19): siRNA sense strand
uaaguucgucugcaaagag

SEQ ID NO: 286484 - RNA, 19 nt, Homo sapiens
  misc_RNA (1)...(19): siRNA sense strand
cgaggaacucuacaucauc

SEQ ID NO: 286485 - RNA, 19 nt, Homo sapiens
  misc_RNA (1)...(19): siRNA sense strand
caucaucgacgagaauaag

SEQ ID NO: 286486 - RNA, 19 nt, Homo sapiens
  misc_RNA (1)...(19): siRNA sense strand
caaacucuacugcaagaac

SEQ ID NO: 286487 - RNA, 19 nt, Homo sapiens
  misc_RNA (1)...(19): siRNA sense strand
caucgacgagaauaaguuc

SEQ ID NO: 286488 - RNA, 19 nt, Homo sapiens
  misc_RNA (1)...(19): siRNA sense strand
gagcgcggagcaaaguguu

SEQ ID NO: 286489 - RNA, 19 nt, Homo sapiens
  misc_RNA (1)...(19): siRNA sense strand
ggcgaggaacucuacauca

SEQ ID NO: 286490 - RNA, 19 nt, Homo sapiens
  misc_RNA (1)...(19): siRNA sense strand
ggaaagagcuaugaugaga

SEQ ID NO: 286491 - RNA, 19 nt, Homo sapiens
  misc_RNA (1)...(19): siRNA sense strand
gcaaagugauggucaugaa

SEQ ID NO: 286492 - RNA, 19 nt, Homo sapiens
  misc_RNA (1)...(19): siRNA sense strand
gcacaucagucccaacaau

SEQ ID NO: 286493 - RNA, 19 nt, Homo sapiens
  misc_RNA (1)...(19): siRNA sense strand
guggauaucuucuccuuug

SEQ ID NO: 286494 - RNA, 19 nt, Homo sapiens
  misc_RNA (1)...(19): siRNA sense strand
gaccagcauucucgaaauu

SEQ ID NO: 286495 - RNA, 19 nt, Homo sapiens
  misc_RNA (1)...(19): siRNA sense strand
gaucugaacucgcacaacu

SEQ ID NO: 286496 - RNA, 19 nt, Homo sapiens
  misc_RNA (1)...(19): siRNA sense strand
gcugcaaggugaucauuga

SEQ ID NO: 286497 - RNA, 19 nt, Homo sapiens
  misc_RNA (1)...(19): siRNA sense strand
cugcagagcuggaggaguu

SEQ ID NO: 286498 - RNA, 19 nt, Homo sapiens
  misc_RNA (1)...(19): siRNA sense strand
gaggagacguucccuaagg

SEQ ID NO: 286499 - RNA, 19 nt, Homo sapiens
  misc_RNA (1)...(19): siRNA sense strand
ugacugaggugaaagugau

SEQ ID NO: 286500 - RNA, 19 nt, Homo sapiens
  misc_RNA (1)...(19): siRNA sense strand
gaaguuuguucccacagau

SEQ ID NO: 286501 - RNA, 19 nt, Homo sapiens
  misc_RNA (1)...(19): siRNA sense strand
ccagagugcuuugccugua

SEQ ID NO: 286502 - RNA, 19 nt, Homo sapiens
  misc_RNA (1)...(19): siRNA sense strand
cagaaucccuucguuguuc

SEQ ID NO: 286503 - RNA, 19 nt, Homo sapiens
  misc_RNA (1)...(19): siRNA sense strand
ccaaugugcucaaguucau

SEQ ID NO: 286504 - RNA, 19 nt, Homo sapiens
  misc_RNA (1)...(19): siRNA sense strand
ggagguggaggaugcaauu

SEQ ID NO: 286505 - RNA, 19 nt, Homo sapiens
  misc_RNA (1)...(19): siRNA sense strand
cuaaggcgcaguaacagua

SEQ ID NO: 286506 - RNA, 19 nt, Homo sapiens
  misc_RNA (1)...(19): siRNA sense strand
cacuucagcuguugauuga

SEQ ID NO: 286507 - RNA, 19 nt, Homo sapiens
  misc_RNA (1)...(19): siRNA sense strand
gagagugccugcuccaacu

SEQ ID NO: 286508 - RNA, 19 nt, Homo sapiens
  misc_RNA (1)...(19): siRNA sense strand
gcuacacgguggugggaaa

SEQ ID NO: 286509 - RNA, 19 nt, Homo sapiens
  misc_RNA (1)...(19): siRNA sense strand
gaaggccaccaccaagaaa

SEQ ID NO: 286510 - RNA, 19 nt, Homo sapiens
  misc_RNA (1)...(19): siRNA sense strand
gagaaggccaccaccaaga

SEQ ID NO: 286511 - RNA, 19 nt, Homo sapiens
  misc_RNA (1)...(19): siRNA sense strand
gcacaacugccucaucaag

SEQ ID NO: 286512 - RNA, 19 nt, Homo sapiens
  misc_RNA (1)...(19): siRNA sense strand
guaacaguaucuccaaguc

SEQ ID NO: 286513 - RNA, 19 nt, Homo sapiens
  misc_RNA (1)...(19): siRNA sense strand
ucgcacaacugccucauca

SEQ ID NO: 286514 - RNA, 19 nt, Homo sapiens
  misc_RNA (1)...(19): siRNA sense strand
ggaaucgccuccggaaugg

SEQ ID NO: 286515 - RNA, 19 nt, Homo sapiens
  misc_RNA (1)...(19): siRNA sense strand
ggugugcuguacaaggaua

SEQ ID NO: 286516 - RNA, 19 nt, Homo sapiens
  misc_RNA (1)...(19): siRNA sense strand
gccagacacuucagcuguu

SEQ ID NO: 286517 - RNA, 19 nt, Homo sapiens
  misc_RNA (1)...(19): siRNA sense strand
gaacggaaagagcuaugau

SEQ ID NO: 286518 - RNA, 19 nt, Homo sapiens
  misc_RNA (1)...(19): siRNA sense strand
ccuccggaauggccuauuu

SEQ ID NO: 286519 - RNA, 19 nt, Homo sapiens
  misc_RNA (1)...(19): siRNA sense strand
gcaguaacaguaucuccaa

SEQ ID NO: 286520 - RNA, 19 nt, Homo sapiens
  misc_RNA (1)...(19): siRNA sense strand
gcaagaacgaccgcaagaa

SEQ ID NO: 286521 - RNA, 19 nt, Homo sapiens
  misc_RNA (1)...(19): siRNA sense strand
caaagugauggucaugaaa

SEQ ID NO: 286522 - RNA, 19 nt, Homo sapiens
  misc_RNA (1)...(19): siRNA sense strand
caagaacgaccgcaagaag

SEQ ID NO: 286523 - RNA, 19 nt, Homo sapiens
  misc_RNA (1)...(19): siRNA sense strand
cagagugcuuugccuguau

SEQ ID NO: 286524 - RNA, 19 nt, Homo sapiens
  misc_RNA (1)...(19): siRNA sense strand
ggucaugaaagaguuaauu

SEQ ID NO: 286525 - RNA, 19 nt, Homo sapiens
  misc_RNA (1)...(19): siRNA sense strand
cagcugcccuacucuguca

SEQ ID NO: 286526 - RNA, 19 nt, Homo sapiens
  misc_RNA (1)...(19): siRNA sense strand
caacugguacuaugagaag

SEQ ID NO: 286527 - RNA, 19 nt, Homo sapiens
  misc_RNA (1)...(19): siRNA sense strand
gaaagaguuaauucgaugu

SEQ ID NO: 286528 - RNA, 19 nt, Homo sapiens
  misc_RNA (1)...(19): siRNA sense strand
ccagacacuucagcuguug

SEQ ID NO: 286529 - RNA, 19 nt, Homo sapiens
  misc_RNA (1)...(19): siRNA sense strand
gauggucaugaaagaguua

SEQ ID NO: 286530 - RNA, 19 nt, Homo sapiens
  misc_RNA (1)...(19): siRNA sense strand
acacaaagccacgggcaaa

SEQ ID NO: 286531 - RNA, 19 nt, Homo sapiens
  misc_RNA (1)...(19): siRNA sense strand
cugagaugcugaacggaaa

SEQ ID NO: 286532 - RNA, 19 nt, Homo sapiens
  misc_RNA (1)...(19): siRNA sense strand
agaaguuuguucccacaga

SEQ ID NO: 286533 - RNA, 19 nt, Homo sapiens
  misc_RNA (1)...(19): siRNA sense strand
acacuucagcuguugauug

SEQ ID NO: 286534 - RNA, 19 nt, Homo sapiens
  misc_RNA (1)...(19): siRNA sense strand
cagcagaaggucagguuug

SEQ ID NO: 286535 - RNA, 19 nt, Homo sapiens
  misc_RNA (1)...(19): siRNA sense strand
ucauuggugugcuguacaa

SEQ ID NO: 286536 - RNA, 19 nt, Homo sapiens
  misc_RNA (1)...(19): siRNA sense strand
caugaaagaguuaauucga

SEQ ID NO: 286537 - RNA, 19 nt, Homo sapiens
  misc_RNA (1)...(19): siRNA sense strand
cuaucaaggugacacacaa

SEQ ID NO: 286538 - RNA, 19 nt, Homo sapiens
  misc_RNA (1)...(19): siRNA sense strand
gagguggaggaugcaauua

SEQ ID NO: 286539 - RNA, 19 nt, Homo sapiens
  misc_RNA (1)...(19): siRNA sense strand
agaccagcauucucgaaau

SEQ ID NO: 286540 - RNA, 19 nt, Homo sapiens
  misc_RNA (1)...(19): siRNA sense strand
caaagccacgggcaaagug

SEQ ID NO: 286541 - RNA, 19 nt, Homo sapiens
  misc_RNA (1)...(19): siRNA sense strand
caaaggagccccugcuguu

SEQ ID NO: 286542 - RNA, 19 nt, Homo sapiens
  misc_RNA (1)...(19): siRNA sense strand
cugaggagacguucccuaa

SEQ ID NO: 286543 - RNA, 19 nt, Homo sapiens
  misc_RNA (1)...(19): siRNA sense strand
cagacgagccagacacuuc

SEQ ID NO: 286544 - RNA, 19 nt, Homo sapiens
  misc_RNA (1)...(19): siRNA sense strand
ggccucaacgugaagcuuu

SEQ ID NO: 286545 - RNA, 19 nt, Homo sapiens
  misc_RNA (1)...(19): siRNA sense strand
gugaugaggagacccagaa

SEQ ID NO: 286546 - RNA, 19 nt, Homo sapiens
  misc_RNA (1)...(19): siRNA sense strand
gaguuaauucgaugugaug

SEQ ID NO: 286547 - RNA, 19 nt, Homo sapiens
  misc_RNA (1)...(19): siRNA sense strand
gcuauucacagcagaucuu

SEQ ID NO: 286548 - RNA, 19 nt, Homo sapiens
  misc_RNA (1)...(19): siRNA sense strand
ucagaaucccuucguuguu

SEQ ID NO: 286549 - RNA, 19 nt, Homo sapiens
  misc_RNA (1)...(19): siRNA sense strand
ucagcacccuggacaccaa

SEQ ID NO: 286550 - RNA, 19 nt, Homo sapiens
  misc_RNA (1)...(19): siRNA sense strand
gcagaccagcauucucgaa

SEQ ID NO: 286551 - RNA, 19 nt, Homo sapiens
  misc_RNA (1)...(19): siRNA sense strand
gcagcagaaggucagguuu

SEQ ID NO: 286552 - RNA, 19 nt, Homo sapiens
  misc_RNA (1)...(19): siRNA sense strand
cagaccagcauucucgaaa

SEQ ID NO: 286553 - RNA, 19 nt, Homo sapiens
  misc_RNA (1)...(19): siRNA sense strand
ccaacuacgccaccacugu

SEQ ID NO: 286554 - RNA, 19 nt, Homo sapiens
  misc_RNA (1)...(19): siRNA sense strand
gaucauugggcagguguau

SEQ ID NO: 286555 - RNA, 19 nt, Homo sapiens
  misc_RNA (1)...(19): siRNA sense strand
acggaaagagcuaugauga

SEQ ID NO: 286556 - RNA, 19 nt, Homo sapiens
  misc_RNA (1)...(19): siRNA sense strand
agaaggccaccaccaagaa

SEQ ID NO: 286557 - RNA, 19 nt, Homo sapiens
  misc_RNA (1)...(19): siRNA sense strand
uggccuauuugcacucuau

SEQ ID NO: 286558 - RNA, 19 nt, Homo sapiens
  misc_RNA (1)...(19): siRNA sense strand
aggaaucgccuccggaaug

SEQ ID NO: 286559 - RNA, 19 nt, Homo sapiens
  misc_RNA (1)...(19): siRNA sense strand
agaguuaauucgaugugau

SEQ ID NO: 286560 - RNA, 19 nt, Homo sapiens
  misc_RNA (1)...(19): siRNA sense strand
gguggaggaugcaauuagc

SEQ ID NO: 286561 - RNA, 19 nt, Homo sapiens
  misc_RNA (1)...(19): siRNA sense strand
ccagcauucucgaaauugg

SEQ ID NO: 286562 - RNA, 19 nt, Homo sapiens
  misc_RNA (1)...(19): siRNA sense strand
gcagguguaugcagauccu

SEQ ID NO: 286563 - RNA, 19 nt, Homo sapiens
  misc_RNA (1)...(19): siRNA sense strand
gcaugccacccucuacugu

SEQ ID NO: 286564 - RNA, 19 nt, Homo sapiens
  misc_RNA (1)...(19): siRNA sense strand
aggauucccucaccaacug

SEQ ID NO: 286565 - RNA, 19 nt, Homo sapiens
  misc_RNA (1)...(19): siRNA sense strand
gagcugcaaggugaucauu

SEQ ID NO: 286566 - RNA, 19 nt, Homo sapiens
  misc_RNA (1)...(19): siRNA sense strand
aagugauggucaugaaaga

SEQ ID NO: 286567 - RNA, 19 nt, Homo sapiens
  misc_RNA (1)...(19): siRNA sense strand
gcacacugaaggacuuucu

SEQ ID NO: 286568 - RNA, 19 nt, Homo sapiens
  misc_RNA (1)...(19): siRNA sense strand
acaaggauaagaagcugaa

SEQ ID NO: 286569 - RNA, 19 nt, Homo sapiens
  misc_RNA (1)...(19): siRNA sense strand
ugauggucaugaaagaguu

SEQ ID NO: 286570 - RNA, 19 nt, Homo sapiens
  misc_RNA (1)...(19): siRNA sense strand
aagaguuaauucgauguga

SEQ ID NO: 286571 - RNA, 19 nt, Homo sapiens
  misc_RNA (1)...(19): siRNA sense strand
gggcagguguaugcagauc

SEQ ID NO: 286572 - RNA, 19 nt, Homo sapiens
  misc_RNA (1)...(19): siRNA sense strand
gaugagacgguggauaucu

SEQ ID NO: 286573 - RNA, 19 nt, Homo sapiens
  misc_RNA (1)...(19): siRNA sense strand
gcuccucacaugcagaaug

SEQ ID NO: 286574 - RNA, 19 nt, Homo sapiens
  misc_RNA (1)...(19): siRNA sense strand
agaaggaugggaagcucua

SEQ ID NO: 286575 - RNA, 19 nt, Homo sapiens
  misc_RNA (1)...(19): siRNA sense strand
cccgaacacuggacuuugg

SEQ ID NO: 286576 - RNA, 19 nt, Homo sapiens
  misc_RNA (1)...(19): siRNA sense strand
cgguggauaucuucuccuu

SEQ ID NO: 286577 - RNA, 19 nt, Homo sapiens
  misc_RNA (1)...(19): siRNA sense strand
guucauuggugugcuguac

SEQ ID NO: 286578 - RNA, 19 nt, Homo sapiens
  misc_RNA (1)...(19): siRNA sense strand
guaccacccagagugcuuu

SEQ ID NO: 286579 - RNA, 19 nt, Homo sapiens
  misc_RNA (1)...(19): siRNA sense strand
uaucaaggugacacacaaa

SEQ ID NO: 286580 - RNA, 19 nt, Homo sapiens
  misc_RNA (1)...(19): siRNA sense strand
gaccgcauccuggagauca

SEQ ID NO: 286581 - RNA, 19 nt, Homo sapiens
  misc_RNA (1)...(19): siRNA sense strand
ccaacugguacuaugagaa

SEQ ID NO: 286582 - RNA, 19 nt, Homo sapiens
  misc_RNA (1)...(19): siRNA sense strand
gaggagacccagaaaacuu

SEQ ID NO: 286583 - RNA, 19 nt, Homo sapiens
  misc_RNA (1)...(19): siRNA sense strand
aaagugauggucaugaaag

SEQ ID NO: 286584 - RNA, 19 nt, Homo sapiens
  misc_RNA (1)...(19): siRNA sense strand
aggagcagcugcccuacuc

SEQ ID NO: 286585 - RNA, 19 nt, Homo sapiens
  misc_RNA (1)...(19): siRNA sense strand
uuggugugcuguacaagga

SEQ ID NO: 286586 - RNA, 19 nt, Homo sapiens
  misc_RNA (1)...(19): siRNA sense strand
gagagcagaccagcauucu

SEQ ID NO: 286587 - RNA, 19 nt, Homo sapiens
  misc_RNA (1)...(19): siRNA sense strand
gucaugaaagaguuaauuc

SEQ ID NO: 286588 - RNA, 19 nt, Homo sapiens
  misc_RNA (1)...(19): siRNA sense strand
augaugagacgguggauau

SEQ ID NO: 286589 - RNA, 19 nt, Homo sapiens
  misc_RNA (1)...(19): siRNA sense strand
ggaaagagcuaugaugaga

SEQ ID NO: 286590 - RNA, 19 nt, Homo sapiens
  misc_RNA (1)...(19): siRNA sense strand
gcaaagugauggucaugaa

SEQ ID NO: 286591 - RNA, 19 nt, Homo sapiens
  misc_RNA (1)...(19): siRNA sense strand
gcacaucagucccaacaau

SEQ ID NO: 286592 - RNA, 19 nt, Homo sapiens
  misc_RNA (1)...(19): siRNA sense strand
guggauaucuucuccuuug

SEQ ID NO: 286593 - RNA, 19 nt, Homo sapiens
  misc_RNA (1)...(19): siRNA sense strand
gaccagcauucucgaaauu

SEQ ID NO: 286594 - RNA, 19 nt, Homo sapiens
  misc_RNA (1)...(19): siRNA sense strand
gaucugaacucgcacaacu

SEQ ID NO: 286595 - RNA, 19 nt, Homo sapiens
  misc_RNA (1)...(19): siRNA sense strand
gcugcaaggugaucauuga

SEQ ID NO: 286596 - RNA, 19 nt, Homo sapiens
  misc_RNA (1)...(19): siRNA sense strand
cugcagagcuggaggaguu

SEQ ID NO: 286597 - RNA, 19 nt, Homo sapiens
  misc_RNA (1)...(19): siRNA sense strand
gaggagacguucccuaagg

SEQ ID NO: 286598 - RNA, 19 nt, Homo sapiens
  misc_RNA (1)...(19): siRNA sense strand
ugacugaggugaaagugau

SEQ ID NO: 286599 - RNA, 19 nt, Homo sapiens
  misc_RNA (1)...(19): siRNA sense strand
gaaguuuguucccacagau

SEQ ID NO: 286600 - RNA, 19 nt, Homo sapiens
  misc_RNA (1)...(19): siRNA sense strand
ccagagugcuuugccugua

SEQ ID NO: 286601 - RNA, 19 nt, Homo sapiens
  misc_RNA (1)...(19): siRNA sense strand
cagaaucccuucguuguuc

SEQ ID NO: 286602 - RNA, 19 nt, Homo sapiens
  misc_RNA (1)...(19): siRNA sense strand
ccaaugugcucaaguucau

SEQ ID NO: 286603 - RNA, 19 nt, Homo sapiens
  misc_RNA (1)...(19): siRNA sense strand
ggagguggaggaugcaauu

SEQ ID NO: 286604 - RNA, 19 nt, Homo sapiens
  misc_RNA (1)...(19): siRNA sense strand
cuaaggcgcaguaacagua

SEQ ID NO: 286605 - RNA, 19 nt, Homo sapiens
  misc_RNA (1)...(19): siRNA sense strand
cacuucagcuguugauuga

SEQ ID NO: 286606 - RNA, 19 nt, Homo sapiens
  misc_RNA (1)...(19): siRNA sense strand
gagagugccugcuccaacu

SEQ ID NO: 286607 - RNA, 19 nt, Homo sapiens
  misc_RNA (1)...(19): siRNA sense strand
gcuacacgguggugggaaa

SEQ ID NO: 286608 - RNA, 19 nt, Homo sapiens
  misc_RNA (1)...(19): siRNA sense strand
gaaggccaccaccaagaaa

SEQ ID NO: 286609 - RNA, 19 nt, Homo sapiens
  misc_RNA (1)...(19): siRNA sense strand
gagaaggccaccaccaaga

SEQ ID NO: 286610 - RNA, 19 nt, Homo sapiens
  misc_RNA (1)...(19): siRNA sense strand
gcacaacugccucaucaag

SEQ ID NO: 286611 - RNA, 19 nt, Homo sapiens
  misc_RNA (1)...(19): siRNA sense strand
guaacaguaucuccaaguc

SEQ ID NO: 286612 - RNA, 19 nt, Homo sapiens
  misc_RNA (1)...(19): siRNA sense strand
ucgcacaacugccucauca

SEQ ID NO: 286613 - RNA, 19 nt, Homo sapiens
  misc_RNA (1)...(19): siRNA sense strand
ggaaucgccuccggaaugg

SEQ ID NO: 286614 - RNA, 19 nt, Homo sapiens
  misc_RNA (1)...(19): siRNA sense strand
ggugugcuguacaaggaua

SEQ ID NO: 286615 - RNA, 19 nt, Homo sapiens
  misc_RNA (1)...(19): siRNA sense strand
gccagacacuucagcuguu

SEQ ID NO: 286616 - RNA, 19 nt, Homo sapiens
  misc_RNA (1)...(19): siRNA sense strand
gaacggaaagagcuaugau

SEQ ID NO: 286617 - RNA, 19 nt, Homo sapiens
  misc_RNA (1)...(19): siRNA sense strand
ccuccggaauggccuauuu

SEQ ID NO: 286618 - RNA, 19 nt, Homo sapiens
  misc_RNA (1)...(19): siRNA sense strand
gcaguaacaguaucuccaa

SEQ ID NO: 286619 - RNA, 19 nt, Homo sapiens
  misc_RNA (1)...(19): siRNA sense strand
gcaagaacgaccgcaagaa

SEQ ID NO: 286620 - RNA, 19 nt, Homo sapiens
  misc_RNA (1)...(19): siRNA sense strand
caaagugauggucaugaaa

SEQ ID NO: 286621 - RNA, 19 nt, Homo sapiens
  misc_RNA (1)...(19): siRNA sense strand
caagaacgaccgcaagaag

SEQ ID NO: 286622 - RNA, 19 nt, Homo sapiens
  misc_RNA (1)...(19): siRNA sense strand
cagagugcuuugccuguau

SEQ ID NO: 286623 - RNA, 19 nt, Homo sapiens
  misc_RNA (1)...(19): siRNA sense strand
ggucaugaaagaguuaauu

SEQ ID NO: 286624 - RNA, 19 nt, Homo sapiens
  misc_RNA (1)...(19): siRNA sense strand
cagcugcccuacucuguca

SEQ ID NO: 286625 - RNA, 19 nt, Homo sapiens
  misc_RNA (1)...(19): siRNA sense strand
caacugguacuaugagaag

SEQ ID NO: 286626 - RNA, 19 nt, Homo sapiens
  misc_RNA (1)...(19): siRNA sense strand
gaaagaguuaauucgaugu

SEQ ID NO: 286627 - RNA, 19 nt, Homo sapiens
  misc_RNA (1)...(19): siRNA sense strand
ccagacacuucagcuguug

SEQ ID NO: 286628 - RNA, 19 nt, Homo sapiens
  misc_RNA (1)...(19): siRNA sense strand
gauggucaugaaagaguua

SEQ ID NO: 286629 - RNA, 19 nt, Homo sapiens
  misc_RNA (1)...(19): siRNA sense strand
acacaaagccacgggcaaa

SEQ ID NO: 286630 - RNA, 19 nt, Homo sapiens
  misc_RNA (1)...(19): siRNA sense strand
cugagaugcugaacggaaa

SEQ ID NO: 286631 - RNA, 19 nt, Homo sapiens
  misc_RNA (1)...(19): siRNA sense strand
agaaguuuguucccacaga

SEQ ID NO: 286632 - RNA, 19 nt, Homo sapiens
  misc_RNA (1)...(19): siRNA sense strand
acacuucagcuguugauug

SEQ ID NO: 286633 - RNA, 19 nt, Homo sapiens
  misc_RNA (1)...(19): siRNA sense strand
cagcagaaggucagguuug

SEQ ID NO: 286634 - RNA, 19 nt, Homo sapiens
  misc_RNA (1)...(19): siRNA sense strand
ucauuggugugcuguacaa

SEQ ID NO: 286635 - RNA, 19 nt, Homo sapiens
  misc_RNA (1)...(19): siRNA sense strand
caugaaagaguuaauucga

SEQ ID NO: 286636 - RNA, 19 nt, Homo sapiens
  misc_RNA (1)...(19): siRNA sense strand
cuaucaaggugacacacaa

SEQ ID NO: 286637 - RNA, 19 nt, Homo sapiens
  misc_RNA (1)...(19): siRNA sense strand
gagguggaggaugcaauua

SEQ ID NO: 286638 - RNA, 19 nt, Homo sapiens
  misc_RNA (1)...(19): siRNA sense strand
agaccagcauucucgaaau

SEQ ID NO: 286639 - RNA, 19 nt, Homo sapiens
  misc_RNA (1)...(19): siRNA sense strand
caaagccacgggcaaagug

SEQ ID NO: 286640 - RNA, 19 nt, Homo sapiens
  misc_RNA (1)...(19): siRNA sense strand
caaaggagccccugcuguu

SEQ ID NO: 286641 - RNA, 19 nt, Homo sapiens
  misc_RNA (1)...(19): siRNA sense strand
cugaggagacguucccuaa

SEQ ID NO: 286642 - RNA, 19 nt, Homo sapiens
  misc_RNA (1)...(19): siRNA sense strand
cagacgagccagacacuuc

SEQ ID NO: 286643 - RNA, 19 nt, Homo sapiens
  misc_RNA (1)...(19): siRNA sense strand
ggccucaacgugaagcuuu

SEQ ID NO: 286644 - RNA, 19 nt, Homo sapiens
  misc_RNA (1)...(19): siRNA sense strand
gugaugaggagacccagaa

SEQ ID NO: 286645 - RNA, 19 nt, Homo sapiens
  misc_RNA (1)...(19): siRNA sense strand
gaguuaauucgaugugaug

SEQ ID NO: 286646 - RNA, 19 nt, Homo sapiens
  misc_RNA (1)...(19): siRNA sense strand
gcuauucacagcagaucuu

SEQ ID NO: 286647 - RNA, 19 nt, Homo sapiens
  misc_RNA (1)...(19): siRNA sense strand
ucagaaucccuucguuguu

SEQ ID NO: 286648 - RNA, 19 nt, Homo sapiens
  misc_RNA (1)...(19): siRNA sense strand
ucagcacccuggacaccaa

SEQ ID NO: 286649 - RNA, 19 nt, Homo sapiens
  misc_RNA (1)...(19): siRNA sense strand
gcagaccagcauucucgaa

SEQ ID NO: 286650 - RNA, 19 nt, Homo sapiens
  misc_RNA (1)...(19): siRNA sense strand
gcagcagaaggucagguuu

SEQ ID NO: 286651 - RNA, 19 nt, Homo sapiens
  misc_RNA (1)...(19): siRNA sense strand
cagaccagcauucucgaaa

SEQ ID NO: 286652 - RNA, 19 nt, Homo sapiens
  misc_RNA (1)...(19): siRNA sense strand
ccaacuacgccaccacugu

SEQ ID NO: 286653 - RNA, 19 nt, Homo sapiens
  misc_RNA (1)...(19): siRNA sense strand
gaucauugggcagguguau

SEQ ID NO: 286654 - RNA, 19 nt, Homo sapiens
  misc_RNA (1)...(19): siRNA sense strand
acggaaagagcuaugauga

SEQ ID NO: 286655 - RNA, 19 nt, Homo sapiens
  misc_RNA (1)...(19): siRNA sense strand
agaaggccaccaccaagaa

SEQ ID NO: 286656 - RNA, 19 nt, Homo sapiens
  misc_RNA (1)...(19): siRNA sense strand
uggccuauuugcacucuau

SEQ ID NO: 286657 - RNA, 19 nt, Homo sapiens
  misc_RNA (1)...(19): siRNA sense strand
aggaaucgccuccggaaug

SEQ ID NO: 286658 - RNA, 19 nt, Homo sapiens
  misc_RNA (1)...(19): siRNA sense strand
agaguuaauucgaugugau

SEQ ID NO: 286659 - RNA, 19 nt, Homo sapiens
  misc_RNA (1)...(19): siRNA sense strand
gguggaggaugcaauuagc

SEQ ID NO: 286660 - RNA, 19 nt, Homo sapiens
  misc_RNA (1)...(19): siRNA sense strand
ccagcauucucgaaauugg

SEQ ID NO: 286661 - RNA, 19 nt, Homo sapiens
  misc_RNA (1)...(19): siRNA sense strand
gcagguguaugcagauccu

SEQ ID NO: 286662 - RNA, 19 nt, Homo sapiens
  misc_RNA (1)...(19): siRNA sense strand
gcaugccacccucuacugu

SEQ ID NO: 286663 - RNA, 19 nt, Homo sapiens
  misc_RNA (1)...(19): siRNA sense strand
aggauucccucaccaacug

SEQ ID NO: 286664 - RNA, 19 nt, Homo sapiens
  misc_RNA (1)...(19): siRNA sense strand
gagcugcaaggugaucauu

SEQ ID NO: 286665 - RNA, 19 nt, Homo sapiens
  misc_RNA (1)...(19): siRNA sense strand
aagugauggucaugaaaga

SEQ ID NO: 286666 - RNA, 19 nt, Homo sapiens
  misc_RNA (1)...(19): siRNA sense strand
gcacacugaaggacuuucu

SEQ ID NO: 286667 - RNA, 19 nt, Homo sapiens
  misc_RNA (1)...(19): siRNA sense strand
acaaggauaagaagcugaa

SEQ ID NO: 286668 - RNA, 19 nt, Homo sapiens
  misc_RNA (1)...(19): siRNA sense strand
ugauggucaugaaagaguu

SEQ ID NO: 286669 - RNA, 19 nt, Homo sapiens
  misc_RNA (1)...(19): siRNA sense strand
aagaguuaauucgauguga

SEQ ID NO: 286670 - RNA, 19 nt, Homo sapiens
  misc_RNA (1)...(19): siRNA sense strand
gggcagguguaugcagauc

SEQ ID NO: 286671 - RNA, 19 nt, Homo sapiens
  misc_RNA (1)...(19): siRNA sense strand
gaugagacgguggauaucu

SEQ ID NO: 286672 - RNA, 19 nt, Homo sapiens
  misc_RNA (1)...(19): siRNA sense strand
gcuccucacaugcagaaug

SEQ ID NO: 286673 - RNA, 19 nt, Homo sapiens
  misc_RNA (1)...(19): siRNA sense strand
agaaggaugggaagcucua

SEQ ID NO: 286674 - RNA, 19 nt, Homo sapiens
  misc_RNA (1)...(19): siRNA sense strand
cccgaacacuggacuuugg

SEQ ID NO: 286675 - RNA, 19 nt, Homo sapiens
  misc_RNA (1)...(19): siRNA sense strand
cgguggauaucuucuccuu

SEQ ID NO: 286676 - RNA, 19 nt, Homo sapiens
  misc_RNA (1)...(19): siRNA sense strand
guucauuggugugcuguac

SEQ ID NO: 286677 - RNA, 19 nt, Homo sapiens
  misc_RNA (1)...(19): siRNA sense strand
guaccacccagagugcuuu

SEQ ID NO: 286678 - RNA, 19 nt, Homo sapiens
  misc_RNA (1)...(19): siRNA sense strand
uaucaaggugacacacaaa

SEQ ID NO: 286679 - RNA, 19 nt, Homo sapiens
  misc_RNA (1)...(19): siRNA sense strand
gaccgcauccuggagauca

SEQ ID NO: 286680 - RNA, 19 nt, Homo sapiens
  misc_RNA (1)...(19): siRNA sense strand
ccaacugguacuaugagaa

SEQ ID NO: 286681 - RNA, 19 nt, Homo sapiens
  misc_RNA (1)...(19): siRNA sense strand
gaggagacccagaaaacuu

SEQ ID NO: 286682 - RNA, 19 nt, Homo sapiens
  misc_RNA (1)...(19): siRNA sense strand
aaagugauggucaugaaag

SEQ ID NO: 286683 - RNA, 19 nt, Homo sapiens
  misc_RNA (1)...(19): siRNA sense strand
aggagcagcugcccuacuc

SEQ ID NO: 286684 - RNA, 19 nt, Homo sapiens
  misc_RNA (1)...(19): siRNA sense strand
uuggugugcuguacaagga

SEQ ID NO: 286685 - RNA, 19 nt, Homo sapiens
  misc_RNA (1)...(19): siRNA sense strand
gagagcagaccagcauucu

SEQ ID NO: 286686 - RNA, 19 nt, Homo sapiens
  misc_RNA (1)...(19): siRNA sense strand
gucaugaaagaguuaauuc

SEQ ID NO: 286687 - RNA, 19 nt, Homo sapiens
  misc_RNA (1)...(19): siRNA sense strand
augaugagacgguggauau

SEQ ID NO: 286688 - RNA, 19 nt, Homo sapiens
  misc_RNA (1)...(19): siRNA sense strand
gagcaaagauuaccuauua

SEQ ID NO: 286689 - RNA, 19 nt, Homo sapiens
  misc_RNA (1)...(19): siRNA sense strand
ggacauagauaacuuagug

SEQ ID NO: 286690 - RNA, 19 nt, Homo sapiens
  misc_RNA (1)...(19): siRNA sense strand
gcagauuacucaacaagaa

SEQ ID NO: 286691 - RNA, 19 nt, Homo sapiens
  misc_RNA (1)...(19): siRNA sense strand
gaaauaugccaucaaauga

SEQ ID NO: 286692 - RNA, 19 nt, Homo sapiens
  misc_RNA (1)...(19): siRNA sense strand
ggaaauauuugagagugua

SEQ ID NO: 286693 - RNA, 19 nt, Homo sapiens
  misc_RNA (1)...(19): siRNA sense strand
gaaugguguuggaauauuu

SEQ ID NO: 286694 - RNA, 19 nt, Homo sapiens
  misc_RNA (1)...(19): siRNA sense strand
caacacagcacuucauuga

SEQ ID NO: 286695 - RNA, 19 nt, Homo sapiens
  misc_RNA (1)...(19): siRNA sense strand
guaaagagggacauagaua

SEQ ID NO: 286696 - RNA, 19 nt, Homo sapiens
  misc_RNA (1)...(19): siRNA sense strand
gaacagagaagauaugucu

SEQ ID NO: 286697 - RNA, 19 nt, Homo sapiens
  misc_RNA (1)...(19): siRNA sense strand
gaggugacauuucgaguga

SEQ ID NO: 286698 - RNA, 19 nt, Homo sapiens
  misc_RNA (1)...(19): siRNA sense strand
gcaagaagcagcugccaaa

SEQ ID NO: 286699 - RNA, 19 nt, Homo sapiens
  misc_RNA (1)...(19): siRNA sense strand
ugacaaugauggaaagaaa

SEQ ID NO: 286700 - RNA, 19 nt, Homo sapiens
  misc_RNA (1)...(19): siRNA sense strand
ggaaugguguuggaauauu

SEQ ID NO: 286701 - RNA, 19 nt, Homo sapiens
  misc_RNA (1)...(19): siRNA sense strand
ggugcaaacuguauuauuc

SEQ ID NO: 286702 - RNA, 19 nt, Homo sapiens
  misc_RNA (1)...(19): siRNA sense strand
cgaaauaugccaucaaaug

SEQ ID NO: 286703 - RNA, 19 nt, Homo sapiens
  misc_RNA (1)...(19): siRNA sense strand
ggaggaauuugagcacuuu

SEQ ID NO: 286704 - RNA, 19 nt, Homo sapiens
  misc_RNA (1)...(19): siRNA sense strand
uaaagagggacauagauaa

SEQ ID NO: 286705 - RNA, 19 nt, Homo sapiens
  misc_RNA (1)...(19): siRNA sense strand
agauaugucucuuccuuaa

SEQ ID NO: 286706 - RNA, 19 nt, Homo sapiens
  misc_RNA (1)...(19): siRNA sense strand
gcugauggccuagcaauuu

SEQ ID NO: 286707 - RNA, 19 nt, Homo sapiens
  misc_RNA (1)...(19): siRNA sense strand
gcccagaacuaccaccauu

SEQ ID NO: 286708 - RNA, 19 nt, Homo sapiens
  misc_RNA (1)...(19): siRNA sense strand
gcaguuagauaugauucuu

SEQ ID NO: 286709 - RNA, 19 nt, Homo sapiens
  misc_RNA (1)...(19): siRNA sense strand
guggaaugguguuggaaua

SEQ ID NO: 286710 - RNA, 19 nt, Homo sapiens
  misc_RNA (1)...(19): siRNA sense strand
gcaauuugguaugcagaaa

SEQ ID NO: 286711 - RNA, 19 nt, Homo sapiens
  misc_RNA (1)...(19): siRNA sense strand
guauaggucucagcaagaa

SEQ ID NO: 286712 - RNA, 19 nt, Homo sapiens
  misc_RNA (1)...(19): siRNA sense strand
acacagcacuucauugaca

SEQ ID NO: 286713 - RNA, 19 nt, Homo sapiens
  misc_RNA (1)...(19): siRNA sense strand
gaucaauaauggcuuuaca

SEQ ID NO: 286714 - RNA, 19 nt, Homo sapiens
  misc_RNA (1)...(19): siRNA sense strand
aacaagaacuggauacugu

SEQ ID NO: 286715 - RNA, 19 nt, Homo sapiens
  misc_RNA (1)...(19): siRNA sense strand
uguaggagaucgagagcua

SEQ ID NO: 286716 - RNA, 19 nt, Homo sapiens
  misc_RNA (1)...(19): siRNA sense strand
ucgaguagcaccaucuuua

SEQ ID NO: 286717 - RNA, 19 nt, Homo sapiens
  misc_RNA (1)...(19): siRNA sense strand
gagauucugagacaaguaa

SEQ ID NO: 286718 - RNA, 19 nt, Homo sapiens
  misc_RNA (1)...(19): siRNA sense strand
uggaagaggucgaauugga

SEQ ID NO: 286719 - RNA, 19 nt, Homo sapiens
  misc_RNA (1)...(19): siRNA sense strand
guaauuauaggcaacaaug

SEQ ID NO: 286720 - RNA, 19 nt, Homo sapiens
  misc_RNA (1)...(19): siRNA sense strand
gcacuuucaacaagaauug

SEQ ID NO: 286721 - RNA, 19 nt, Homo sapiens
  misc_RNA (1)...(19): siRNA sense strand
caaagagcaccugcacaua

SEQ ID NO: 286722 - RNA, 19 nt, Homo sapiens
  misc_RNA (1)...(19): siRNA sense strand
cagcugaucuguggaaugg

SEQ ID NO: 286723 - RNA, 19 nt, Homo sapiens
  misc_RNA (1)...(19): siRNA sense strand
gaaaugcccagaacuacca

SEQ ID NO: 286724 - RNA, 19 nt, Homo sapiens
  misc_RNA (1)...(19): siRNA sense strand
gaaguugaggugacauuuc

SEQ ID NO: 286725 - RNA, 19 nt, Homo sapiens
  misc_RNA (1)...(19): siRNA sense strand
gaacuaccaccauuuccau

SEQ ID NO: 286726 - RNA, 19 nt, Homo sapiens
  misc_RNA (1)...(19): siRNA sense strand
gagggacauagauaacuua

SEQ ID NO: 286727 - RNA, 19 nt, Homo sapiens
  misc_RNA (1)...(19): siRNA sense strand
cacaccagauaaagaaauu

SEQ ID NO: 286728 - RNA, 19 nt, Homo sapiens
  misc_RNA (1)...(19): siRNA sense strand
cgaguagcaccaucuuuaa

SEQ ID NO: 286729 - RNA, 19 nt, Homo sapiens
  misc_RNA (1)...(19): siRNA sense strand
ggagggcccuguguuugga

SEQ ID NO: 286730 - RNA, 19 nt, Homo sapiens
  misc_RNA (1)...(19): siRNA sense strand
guacaaauacagcuucaag

SEQ ID NO: 286731 - RNA, 19 nt, Homo sapiens
  misc_RNA (1)...(19): siRNA sense strand
gaguagcaccaucuuuaaa

SEQ ID NO: 286732 - RNA, 19 nt, Homo sapiens
  misc_RNA (1)...(19): siRNA sense strand
uggaauaucugcugcaacu

SEQ ID NO: 286733 - RNA, 19 nt, Homo sapiens
  misc_RNA (1)...(19): siRNA sense strand
gagcaccugcacauaguaa

SEQ ID NO: 286734 - RNA, 19 nt, Homo sapiens
  misc_RNA (1)...(19): siRNA sense strand
accaugauguccuuucuuu

SEQ ID NO: 286735 - RNA, 19 nt, Homo sapiens
  misc_RNA (1)...(19): siRNA sense strand
ggaaguugaggugacauuu

SEQ ID NO: 286736 - RNA, 19 nt, Homo sapiens
  misc_RNA (1)...(19): siRNA sense strand
gggcagcaugggcagauua

SEQ ID NO: 286737 - RNA, 19 nt, Homo sapiens
  misc_RNA (1)...(19): siRNA sense strand
cuggaggucuugcagauga

SEQ ID NO: 286738 - RNA, 19 nt, Homo sapiens
  misc_RNA (1)...(19): siRNA sense strand
cagagggacuuccgcaaca

SEQ ID NO: 286739 - RNA, 19 nt, Homo sapiens
  misc_RNA (1)...(19): siRNA sense strand
acaaauccauuaugaccau

SEQ ID NO: 286740 - RNA, 19 nt, Homo sapiens
  misc_RNA (1)...(19): siRNA sense strand
ucaaagagcaccugcacau

SEQ ID NO: 286741 - RNA, 19 nt, Homo sapiens
  misc_RNA (1)...(19): siRNA sense strand
gcccacaccagauaaagaa

SEQ ID NO: 286742 - RNA, 19 nt, Homo sapiens
  misc_RNA (1)...(19): siRNA sense strand
gccgaaaugcccagaacua

SEQ ID NO: 286743 - RNA, 19 nt, Homo sapiens
  misc_RNA (1)...(19): siRNA sense strand
gacaacacagcacuucauu

SEQ ID NO: 286744 - RNA, 19 nt, Homo sapiens
  misc_RNA (1)...(19): siRNA sense strand
gaaccggcaguuagauaug

SEQ ID NO: 286745 - RNA, 19 nt, Homo sapiens
  misc_RNA (1)...(19): siRNA sense strand
aaagagcaccugcacauag

SEQ ID NO: 286746 - RNA, 19 nt, Homo sapiens
  misc_RNA (1)...(19): siRNA sense strand
ccauuuccaucauguuugu

SEQ ID NO: 286747 - RNA, 19 nt, Homo sapiens
  misc_RNA (1)...(19): siRNA sense strand
agagggacauagauaacuu

SEQ ID NO: 286748 - RNA, 19 nt, Homo sapiens
  misc_RNA (1)...(19): siRNA sense strand
caguaaugaucaauaaugg

SEQ ID NO: 286749 - RNA, 19 nt, Homo sapiens
  misc_RNA (1)...(19): siRNA sense strand
gaacuggauacuguuguga

SEQ ID NO: 286750 - RNA, 19 nt, Homo sapiens
  misc_RNA (1)...(19): siRNA sense strand
gaguacaaauacagcuuca

SEQ ID NO: 286751 - RNA, 19 nt, Homo sapiens
  misc_RNA (1)...(19): siRNA sense strand
gucaagcuuuggcaaguug

SEQ ID NO: 286752 - RNA, 19 nt, Homo sapiens
  misc_RNA (1)...(19): siRNA sense strand
agcgaaauaugccaucaaa

SEQ ID NO: 286753 - RNA, 19 nt, Homo sapiens
  misc_RNA (1)...(19): siRNA sense strand
gcagcgaaauaugccauca

SEQ ID NO: 286754 - RNA, 19 nt, Homo sapiens
  misc_RNA (1)...(19): siRNA sense strand
gagacaaguaaaugaaaug

SEQ ID NO: 286755 - RNA, 19 nt, Homo sapiens
  misc_RNA (1)...(19): siRNA sense strand
gaugaacagagaagauaug

SEQ ID NO: 286756 - RNA, 19 nt, Homo sapiens
  misc_RNA (1)...(19): siRNA sense strand
gcagcugaaccggcaguua

SEQ ID NO: 286757 - RNA, 19 nt, Homo sapiens
  misc_RNA (1)...(19): siRNA sense strand
gauucuugaugaacagaga

SEQ ID NO: 286758 - RNA, 19 nt, Homo sapiens
  misc_RNA (1)...(19): siRNA sense strand
caagaacuggauacuguug

SEQ ID NO: 286759 - RNA, 19 nt, Homo sapiens
  misc_RNA (1)...(19): siRNA sense strand
ccagaacuaccaccauuuc

SEQ ID NO: 286760 - RNA, 19 nt, Homo sapiens
  misc_RNA (1)...(19): siRNA sense strand
aggcaacaauggacaaauc

SEQ ID NO: 286761 - RNA, 19 nt, Homo sapiens
  misc_RNA (1)...(19): siRNA sense strand
caacaagaacuggauacug

SEQ ID NO: 286762 - RNA, 19 nt, Homo sapiens
  misc_RNA (1)...(19): siRNA sense strand
ugagcacuuucaacaagaa

SEQ ID NO: 286763 - RNA, 19 nt, Homo sapiens
  misc_RNA (1)...(19): siRNA sense strand
cugauggccuagcaauuug

SEQ ID NO: 286764 - RNA, 19 nt, Homo sapiens
  misc_RNA (1)...(19): siRNA sense strand
gaggcucaguguggacaaa

SEQ ID NO: 286765 - RNA, 19 nt, Homo sapiens
  misc_RNA (1)...(19): siRNA sense strand
gguccacuucauuauauuu

SEQ ID NO: 286766 - RNA, 19 nt, Homo sapiens
  misc_RNA (1)...(19): siRNA sense strand
acgguccacuucauuauau

SEQ ID NO: 286767 - RNA, 19 nt, Homo sapiens
  misc_RNA (1)...(19): siRNA sense strand
caccauuuccaucauguuu

SEQ ID NO: 286768 - RNA, 19 nt, Homo sapiens
  misc_RNA (1)...(19): siRNA sense strand
aagagcaccugcacauagu

SEQ ID NO: 286769 - RNA, 19 nt, Homo sapiens
  misc_RNA (1)...(19): siRNA sense strand
gcuggaggcgucuaugaga

SEQ ID NO: 286770 - RNA, 19 nt, Homo sapiens
  misc_RNA (1)...(19): siRNA sense strand
ggaggaaauauuugagagu

SEQ ID NO: 286771 - RNA, 19 nt, Homo sapiens
  misc_RNA (1)...(19): siRNA sense strand
auaugucucuuccuuaaca

SEQ ID NO: 286772 - RNA, 19 nt, Homo sapiens
  misc_RNA (1)...(19): siRNA sense strand
cagcugaaccggcaguuag

SEQ ID NO: 286773 - RNA, 19 nt, Homo sapiens
  misc_RNA (1)...(19): siRNA sense strand
gaucgagagcuaagacaag

SEQ ID NO: 286774 - RNA, 19 nt, Homo sapiens
  misc_RNA (1)...(19): siRNA sense strand
gagcugauggccuagcaau

SEQ ID NO: 286775 - RNA, 19 nt, Homo sapiens
  misc_RNA (1)...(19): siRNA sense strand
gugcaaacuguauuauuca

SEQ ID NO: 286776 - RNA, 19 nt, Homo sapiens
  misc_RNA (1)...(19): siRNA sense strand
gauuaccuauuaccagaac

SEQ ID NO: 286777 - RNA, 19 nt, Homo sapiens
  misc_RNA (1)...(19): siRNA sense strand
ucuacgguccacuucauua

SEQ ID NO: 286778 - RNA, 19 nt, Homo sapiens
  misc_RNA (1)...(19): siRNA sense strand
gagggacuuccgcaacaaa

SEQ ID NO: 286779 - RNA, 19 nt, Homo sapiens
  misc_RNA (1)...(19): siRNA sense strand
agcaugagauucugagaca

SEQ ID NO: 286780 - RNA, 19 nt, Homo sapiens
  misc_RNA (1)...(19): siRNA sense strand
acuggauacuguugugaaa

SEQ ID NO: 286781 - RNA, 19 nt, Homo sapiens
  misc_RNA (1)...(19): siRNA sense strand
uaaaagaggagcaggaaug

SEQ ID NO: 286782 - RNA, 19 nt, Homo sapiens
  misc_RNA (1)...(19): siRNA sense strand
gcggaggaaauauuugaga

SEQ ID NO: 286783 - RNA, 19 nt, Homo sapiens
  misc_RNA (1)...(19): siRNA sense strand
agaacuggauacuguugug

SEQ ID NO: 286784 - RNA, 19 nt, Homo sapiens
  misc_RNA (1)...(19): siRNA sense strand
caaaugaaaagccgaaaug

SEQ ID NO: 286785 - RNA, 19 nt, Homo sapiens
  misc_RNA (1)...(19): siRNA sense strand
uaacuuagugcagcgaaau

SEQ ID NO: 286786 - RNA, 19 nt, Homo sapiens
  misc_RNA (1)...(19): siRNA sense strand
cauaguaaagagggacaua

SEQ ID NO: 286787 - RNA, 19 nt, Homo sapiens
  misc_RNA (1)...(19): siRNA sense strand
gcaccugcacauaguaaag

SEQ ID NO: 286788 - RNA, 19 nt, Homo sapiens
  misc_RNA (1)...(19): siRNA sense strand
gaaggagggugaccugaua

SEQ ID NO: 286789 - RNA, 19 nt, Homo sapiens
  misc_RNA (1)...(19): siRNA sense strand
ggaagcagcgugaguuuga

SEQ ID NO: 286790 - RNA, 19 nt, Homo sapiens
  misc_RNA (1)...(19): siRNA sense strand
agaagaacaucuacaguga

SEQ ID NO: 286791 - RNA, 19 nt, Homo sapiens
  misc_RNA (1)...(19): siRNA sense strand
gaugaucccuugcugacuu

SEQ ID NO: 286792 - RNA, 19 nt, Homo sapiens
  misc_RNA (1)...(19): siRNA sense strand
caaagugcgugaggaguuu

SEQ ID NO: 286793 - RNA, 19 nt, Homo sapiens
  misc_RNA (1)...(19): siRNA sense strand
gagcugaaagcgcgcaaua

SEQ ID NO: 286794 - RNA, 19 nt, Homo sapiens
  misc_RNA (1)...(19): siRNA sense strand
gcaaagugcgugaggaguu

SEQ ID NO: 286795 - RNA, 19 nt, Homo sapiens
  misc_RNA (1)...(19): siRNA sense strand
guacggcucucaucaacuc

SEQ ID NO: 286796 - RNA, 19 nt, Homo sapiens
  misc_RNA (1)...(19): siRNA sense strand
agaaggagcuggagaagac

SEQ ID NO: 286797 - RNA, 19 nt, Homo sapiens
  misc_RNA (1)...(19): siRNA sense strand
cuaccgaccugguguggaa

SEQ ID NO: 286798 - RNA, 19 nt, Homo sapiens
  misc_RNA (1)...(19): siRNA sense strand
ggaugaggagggcaaguuu

SEQ ID NO: 286799 - RNA, 19 nt, Homo sapiens
  misc_RNA (1)...(19): siRNA sense strand
ugaaagcgcgcaauaccaa

SEQ ID NO: 286800 - RNA, 19 nt, Homo sapiens
  misc_RNA (1)...(19): siRNA sense strand
cgugugcgcucgcuggaaa

SEQ ID NO: 286801 - RNA, 19 nt, Homo sapiens
  misc_RNA (1)...(19): siRNA sense strand
ucacccggcugcaggagaa

SEQ ID NO: 286802 - RNA, 19 nt, Homo sapiens
  misc_RNA (1)...(19): siRNA sense strand
ucacagcacgcacgcacua

SEQ ID NO: 286803 - RNA, 19 nt, Homo sapiens
  misc_RNA (1)...(19): siRNA sense strand
ucagccagcuccagaagca

SEQ ID NO: 286804 - RNA, 19 nt, Homo sapiens
  misc_RNA (1)...(19): siRNA sense strand
gcagaucaagcgccagaau

SEQ ID NO: 286805 - RNA, 19 nt, Homo sapiens
  misc_RNA (1)...(19): siRNA sense strand
agaacaggcugcagaccau

SEQ ID NO: 286806 - RNA, 19 nt, Homo sapiens
  misc_RNA (1)...(19): siRNA sense strand
gagcuggagaagacuuauu

SEQ ID NO: 286807 - RNA, 19 nt, Homo sapiens
  misc_RNA (1)...(19): siRNA sense strand
gaugaggagggcaaguuug

SEQ ID NO: 286808 - RNA, 19 nt, Homo sapiens
  misc_RNA (1)...(19): siRNA sense strand
cugccaagcuggacaaugc

SEQ ID NO: 286809 - RNA, 19 nt, Homo sapiens
  misc_RNA (1)...(19): siRNA sense strand
cggaugcgcugcaggaacu

SEQ ID NO: 286810 - RNA, 19 nt, Homo sapiens
  misc_RNA (1)...(19): siRNA sense strand
gcguacggcucucaucaac

SEQ ID NO: 286811 - RNA, 19 nt, Homo sapiens
  misc_RNA (1)...(19): siRNA sense strand
aggaccagguggagcagua

SEQ ID NO: 286812 - RNA, 19 nt, Homo sapiens
  misc_RNA (1)...(19): siRNA sense strand
gcgccagaauggagaugau

SEQ ID NO: 286813 - RNA, 19 nt, Homo sapiens
  misc_RNA (1)...(19): siRNA sense strand
gaccagguggagcaguaua

SEQ ID NO: 286814 - RNA, 19 nt, Homo sapiens
  misc_RNA (1)...(19): siRNA sense strand
gcggguggaugcugagaac

SEQ ID NO: 286815 - RNA, 19 nt, Homo sapiens
  misc_RNA (1)...(19): siRNA sense strand
gaagcagcgugaguuugag

SEQ ID NO: 286816 - RNA, 19 nt, Homo sapiens
  misc_RNA (1)...(19): siRNA sense strand
gaucaagcgccagaaugga

SEQ ID NO: 286817 - RNA, 19 nt, Homo sapiens
  misc_RNA (1)...(19): siRNA sense strand
auaagaaggagcuggagaa

SEQ ID NO: 286818 - RNA, 19 nt, Homo sapiens
  misc_RNA (1)...(19): siRNA sense strand
gcuuggcggucuacaucga

SEQ ID NO: 286819 - RNA, 19 nt, Homo sapiens
  misc_RNA (1)...(19): siRNA sense strand
ggacgaguaccaggagcuu

SEQ ID NO: 286820 - RNA, 19 nt, Homo sapiens
  misc_RNA (1)...(19): siRNA sense strand
agaccaagcgccgucauga

SEQ ID NO: 286821 - RNA, 19 nt, Homo sapiens
  misc_RNA (1)...(19): siRNA sense strand
cagaucaagcgccagaaug

SEQ ID NO: 286822 - RNA, 19 nt, Homo sapiens
  misc_RNA (1)...(19): siRNA sense strand
caagcuggcccuggacaug

SEQ ID NO: 286823 - RNA, 19 nt, Homo sapiens
  misc_RNA (1)...(19): siRNA sense strand
ugaaggaggaacuggacuu

SEQ ID NO: 286824 - RNA, 19 nt, Homo sapiens
  misc_RNA (1)...(19): siRNA sense strand
gagaccaagcgccgucaug

SEQ ID NO: 286825 - RNA, 19 nt, Homo sapiens
  misc_RNA (1)...(19): siRNA sense strand
uggaggcucugcugaacuc

SEQ ID NO: 286826 - RNA, 19 nt, Homo sapiens
  misc_RNA (1)...(19): siRNA sense strand
augaucccuugcugacuua

SEQ ID NO: 286827 - RNA, 19 nt, Homo sapiens
  misc_RNA (1)...(19): siRNA sense strand
gggaagcagcgugaguuug

SEQ ID NO: 286828 - RNA, 19 nt, Homo sapiens
  misc_RNA (1)...(19): siRNA sense strand
gcaacuucaggaugagaug

SEQ ID NO: 286829 - RNA, 19 nt, Homo sapiens
  misc_RNA (1)...(19): siRNA sense strand
cgagguguccggcaucaag

SEQ ID NO: 286830 - RNA, 19 nt, Homo sapiens
  misc_RNA (1)...(19): siRNA sense strand
uaggugaggccaagaagca

SEQ ID NO: 286831 - RNA, 19 nt, Homo sapiens
  misc_RNA (1)...(19): siRNA sense strand
ggaguuuaaggagcugaaa

SEQ ID NO: 286832 - RNA, 19 nt, Homo sapiens
  misc_RNA (1)...(19): siRNA sense strand
ccagaagaacaucuacagu

SEQ ID NO: 286833 - RNA, 19 nt, Homo sapiens
  misc_RNA (1)...(19): siRNA sense strand
gaaggagggugaccugaua

SEQ ID NO: 286834 - RNA, 19 nt, Homo sapiens
  misc_RNA (1)...(19): siRNA sense strand
ggaagcagcgugaguuuga

SEQ ID NO: 286835 - RNA, 19 nt, Homo sapiens
  misc_RNA (1)...(19): siRNA sense strand
agaagaacaucuacaguga

SEQ ID NO: 286836 - RNA, 19 nt, Homo sapiens
  misc_RNA (1)...(19): siRNA sense strand
gaugaucccuugcugacuu

SEQ ID NO: 286837 - RNA, 19 nt, Homo sapiens
  misc_RNA (1)...(19): siRNA sense strand
caaagugcgugaggaguuu

SEQ ID NO: 286838 - RNA, 19 nt, Homo sapiens
  misc_RNA (1)...(19): siRNA sense strand
gagcugaaagcgcgcaaua

SEQ ID NO: 286839 - RNA, 19 nt, Homo sapiens
  misc_RNA (1)...(19): siRNA sense strand
gcaaagugcgugaggaguu

SEQ ID NO: 286840 - RNA, 19 nt, Homo sapiens
  misc_RNA (1)...(19): siRNA sense strand
guacggcucucaucaacuc

SEQ ID NO: 286841 - RNA, 19 nt, Homo sapiens
  misc_RNA (1)...(19): siRNA sense strand
agaaggagcuggagaagac

SEQ ID NO: 286842 - RNA, 19 nt, Homo sapiens
  misc_RNA (1)...(19): siRNA sense strand
cuaccgaccugguguggaa

SEQ ID NO: 286843 - RNA, 19 nt, Homo sapiens
  misc_RNA (1)...(19): siRNA sense strand
ggaugaggagggcaaguuu

SEQ ID NO: 286844 - RNA, 19 nt, Homo sapiens
  misc_RNA (1)...(19): siRNA sense strand
ugaaagcgcgcaauaccaa

SEQ ID NO: 286845 - RNA, 19 nt, Homo sapiens
  misc_RNA (1)...(19): siRNA sense strand
cgugugcgcucgcuggaaa

SEQ ID NO: 286846 - RNA, 19 nt, Homo sapiens
  misc_RNA (1)...(19): siRNA sense strand
ucacccggcugcaggagaa

SEQ ID NO: 286847 - RNA, 19 nt, Homo sapiens
  misc_RNA (1)...(19): siRNA sense strand
ucacagcacgcacgcacua

SEQ ID NO: 286848 - RNA, 19 nt, Homo sapiens
  misc_RNA (1)...(19): siRNA sense strand
ucagccagcuccagaagca

SEQ ID NO: 286849 - RNA, 19 nt, Homo sapiens
  misc_RNA (1)...(19): siRNA sense strand
gcagaucaagcgccagaau

SEQ ID NO: 286850 - RNA, 19 nt, Homo sapiens
  misc_RNA (1)...(19): siRNA sense strand
agaacaggcugcagaccau

SEQ ID NO: 286851 - RNA, 19 nt, Homo sapiens
  misc_RNA (1)...(19): siRNA sense strand
gagcuggagaagacuuauu

SEQ ID NO: 286852 - RNA, 19 nt, Homo sapiens
  misc_RNA (1)...(19): siRNA sense strand
gaugaggagggcaaguuug

SEQ ID NO: 286853 - RNA, 19 nt, Homo sapiens
  misc_RNA (1)...(19): siRNA sense strand
cugccaagcuggacaaugc

SEQ ID NO: 286854 - RNA, 19 nt, Homo sapiens
  misc_RNA (1)...(19): siRNA sense strand
cggaugcgcugcaggaacu

SEQ ID NO: 286855 - RNA, 19 nt, Homo sapiens
  misc_RNA (1)...(19): siRNA sense strand
gcguacggcucucaucaac

SEQ ID NO: 286856 - RNA, 19 nt, Homo sapiens
  misc_RNA (1)...(19): siRNA sense strand
aggaccagguggagcagua

SEQ ID NO: 286857 - RNA, 19 nt, Homo sapiens
  misc_RNA (1)...(19): siRNA sense strand
gcgccagaauggagaugau

SEQ ID NO: 286858 - RNA, 19 nt, Homo sapiens
  misc_RNA (1)...(19): siRNA sense strand
gaccagguggagcaguaua

SEQ ID NO: 286859 - RNA, 19 nt, Homo sapiens
  misc_RNA (1)...(19): siRNA sense strand
gcggguggaugcugagaac

SEQ ID NO: 286860 - RNA, 19 nt, Homo sapiens
  misc_RNA (1)...(19): siRNA sense strand
gaagcagcgugaguuugag

SEQ ID NO: 286861 - RNA, 19 nt, Homo sapiens
  misc_RNA (1)...(19): siRNA sense strand
gaucaagcgccagaaugga

SEQ ID NO: 286862 - RNA, 19 nt, Homo sapiens
  misc_RNA (1)...(19): siRNA sense strand
auaagaaggagcuggagaa

SEQ ID NO: 286863 - RNA, 19 nt, Homo sapiens
  misc_RNA (1)...(19): siRNA sense strand
gcuuggcggucuacaucga

SEQ ID NO: 286864 - RNA, 19 nt, Homo sapiens
  misc_RNA (1)...(19): siRNA sense strand
ggacgaguaccaggagcuu

SEQ ID NO: 286865 - RNA, 19 nt, Homo sapiens
  misc_RNA (1)...(19): siRNA sense strand
agaccaagcgccgucauga

SEQ ID NO: 286866 - RNA, 19 nt, Homo sapiens
  misc_RNA (1)...(19): siRNA sense strand
cagaucaagcgccagaaug

SEQ ID NO: 286867 - RNA, 19 nt, Homo sapiens
  misc_RNA (1)...(19): siRNA sense strand
caagcuggcccuggacaug

SEQ ID NO: 286868 - RNA, 19 nt, Homo sapiens
  misc_RNA (1)...(19): siRNA sense strand
ugaaggaggaacuggacuu

SEQ ID NO: 286869 - RNA, 19 nt, Homo sapiens
  misc_RNA (1)...(19): siRNA sense strand
gagaccaagcgccgucaug

SEQ ID NO: 286870 - RNA, 19 nt, Homo sapiens
  misc_RNA (1)...(19): siRNA sense strand
uggaggcucugcugaacuc

SEQ ID NO: 286871 - RNA, 19 nt, Homo sapiens
  misc_RNA (1)...(19): siRNA sense strand
augaucccuugcugacuua

SEQ ID NO: 286872 - RNA, 19 nt, Homo sapiens
  misc_RNA (1)...(19): siRNA sense strand
gggaagcagcgugaguuug

SEQ ID NO: 286873 - RNA, 19 nt, Homo sapiens
  misc_RNA (1)...(19): siRNA sense strand
gcaacuucaggaugagaug

SEQ ID NO: 286874 - RNA, 19 nt, Homo sapiens
  misc_RNA (1)...(19): siRNA sense strand
cgagguguccggcaucaag

SEQ ID NO: 286875 - RNA, 19 nt, Homo sapiens
  misc_RNA (1)...(19): siRNA sense strand
uaggugaggccaagaagca

SEQ ID NO: 286876 - RNA, 19 nt, Homo sapiens
  misc_RNA (1)...(19): siRNA sense strand
ggaguuuaaggagcugaaa

SEQ ID NO: 286877 - RNA, 19 nt, Homo sapiens
  misc_RNA (1)...(19): siRNA sense strand
ccagaagaacaucuacagu

SEQ ID NO: 286878 - RNA, 19 nt, Homo sapiens
  misc_RNA (1)...(19): siRNA sense strand
gaaggagggugaccugaua

SEQ ID NO: 286879 - RNA, 19 nt, Homo sapiens
  misc_RNA (1)...(19): siRNA sense strand
ggaagcagcgugaguuuga

SEQ ID NO: 286880 - RNA, 19 nt, Homo sapiens
  misc_RNA (1)...(19): siRNA sense strand
agaagaacaucuacaguga

SEQ ID NO: 286881 - RNA, 19 nt, Homo sapiens
  misc_RNA (1)...(19): siRNA sense strand
gaugaucccuugcugacuu

SEQ ID NO: 286882 - RNA, 19 nt, Homo sapiens
  misc_RNA (1)...(19): siRNA sense strand
caaagugcgugaggaguuu

SEQ ID NO: 286883 - RNA, 19 nt, Homo sapiens
  misc_RNA (1)...(19): siRNA sense strand
gagcugaaagcgcgcaaua

SEQ ID NO: 286884 - RNA, 19 nt, Homo sapiens
  misc_RNA (1)...(19): siRNA sense strand
gcaaagugcgugaggaguu

SEQ ID NO: 286885 - RNA, 19 nt, Homo sapiens
  misc_RNA (1)...(19): siRNA sense strand
guacggcucucaucaacuc

SEQ ID NO: 286886 - RNA, 19 nt, Homo sapiens
  misc_RNA (1)...(19): siRNA sense strand
agaaggagcuggagaagac

SEQ ID NO: 286887 - RNA, 19 nt, Homo sapiens
  misc_RNA (1)...(19): siRNA sense strand
cuaccgaccugguguggaa

SEQ ID NO: 286888 - RNA, 19 nt, Homo sapiens
  misc_RNA (1)...(19): siRNA sense strand
ggaugaggagggcaaguuu

SEQ ID NO: 286889 - RNA, 19 nt, Homo sapiens
  misc_RNA (1)...(19): siRNA sense strand
ugaaagcgcgcaauaccaa

SEQ ID NO: 286890 - RNA, 19 nt, Homo sapiens
  misc_RNA (1)...(19): siRNA sense strand
cgugugcgcucgcuggaaa

SEQ ID NO: 286891 - RNA, 19 nt, Homo sapiens
  misc_RNA (1)...(19): siRNA sense strand
ucacccggcugcaggagaa

SEQ ID NO: 286892 - RNA, 19 nt, Homo sapiens
  misc_RNA (1)...(19): siRNA sense strand
ucacagcacgcacgcacua

SEQ ID NO: 286893 - RNA, 19 nt, Homo sapiens
  misc_RNA (1)...(19): siRNA sense strand
ucagccagcuccagaagca

SEQ ID NO: 286894 - RNA, 19 nt, Homo sapiens
  misc_RNA (1)...(19): siRNA sense strand
gcagaucaagcgccagaau

SEQ ID NO: 286895 - RNA, 19 nt, Homo sapiens
  misc_RNA (1)...(19): siRNA sense strand
agaacaggcugcagaccau

SEQ ID NO: 286896 - RNA, 19 nt, Homo sapiens
  misc_RNA (1)...(19): siRNA sense strand
gagcuggagaagacuuauu

SEQ ID NO: 286897 - RNA, 19 nt, Homo sapiens
  misc_RNA (1)...(19): siRNA sense strand
gaugaggagggcaaguuug

SEQ ID NO: 286898 - RNA, 19 nt, Homo sapiens
  misc_RNA (1)...(19): siRNA sense strand
cugccaagcuggacaaugc

SEQ ID NO: 286899 - RNA, 19 nt, Homo sapiens
  misc_RNA (1)...(19): siRNA sense strand
cggaugcgcugcaggaacu

SEQ ID NO: 286900 - RNA, 19 nt, Homo sapiens
  misc_RNA (1)...(19): siRNA sense strand
gcguacggcucucaucaac

SEQ ID NO: 286901 - RNA, 19 nt, Homo sapiens
  misc_RNA (1)...(19): siRNA sense strand
aggaccagguggagcagua

SEQ ID NO: 286902 - RNA, 19 nt, Homo sapiens
  misc_RNA (1)...(19): siRNA sense strand
gcgccagaauggagaugau

SEQ ID NO: 286903 - RNA, 19 nt, Homo sapiens
  misc_RNA (1)...(19): siRNA sense strand
gaccagguggagcaguaua

SEQ ID NO: 286904 - RNA, 19 nt, Homo sapiens
  misc_RNA (1)...(19): siRNA sense strand
gcggguggaugcugagaac

SEQ ID NO: 286905 - RNA, 19 nt, Homo sapiens
  misc_RNA (1)...(19): siRNA sense strand
gaagcagcgugaguuugag

SEQ ID NO: 286906 - RNA, 19 nt, Homo sapiens
  misc_RNA (1)...(19): siRNA sense strand
gaucaagcgccagaaugga

SEQ ID NO: 286907 - RNA, 19 nt, Homo sapiens
  misc_RNA (1)...(19): siRNA sense strand
auaagaaggagcuggagaa

SEQ ID NO: 286908 - RNA, 19 nt, Homo sapiens
  misc_RNA (1)...(19): siRNA sense strand
gcuuggcggucuacaucga

SEQ ID NO: 286909 - RNA, 19 nt, Homo sapiens
  misc_RNA (1)...(19): siRNA sense strand
ggacgaguaccaggagcuu

SEQ ID NO: 286910 - RNA, 19 nt, Homo sapiens
  misc_RNA (1)...(19): siRNA sense strand
agaccaagcgccgucauga

SEQ ID NO: 286911 - RNA, 19 nt, Homo sapiens
  misc_RNA (1)...(19): siRNA sense strand
cagaucaagcgccagaaug

SEQ ID NO: 286912 - RNA, 19 nt, Homo sapiens
  misc_RNA (1)...(19): siRNA sense strand
caagcuggcccuggacaug

SEQ ID NO: 286913 - RNA, 19 nt, Homo sapiens
  misc_RNA (1)...(19): siRNA sense strand
ugaaggaggaacuggacuu

SEQ ID NO: 286914 - RNA, 19 nt, Homo sapiens
  misc_RNA (1)...(19): siRNA sense strand
gagaccaagcgccgucaug

SEQ ID NO: 286915 - RNA, 19 nt, Homo sapiens
  misc_RNA (1)...(19): siRNA sense strand
uggaggcucugcugaacuc

SEQ ID NO: 286916 - RNA, 19 nt, Homo sapiens
  misc_RNA (1)...(19): siRNA sense strand
augaucccuugcugacuua

SEQ ID NO: 286917 - RNA, 19 nt, Homo sapiens
  misc_RNA (1)...(19): siRNA sense strand
gggaagcagcgugaguuug

SEQ ID NO: 286918 - RNA, 19 nt, Homo sapiens
  misc_RNA (1)...(19): siRNA sense strand
gcaacuucaggaugagaug

SEQ ID NO: 286919 - RNA, 19 nt, Homo sapiens
  misc_RNA (1)...(19): siRNA sense strand
cgagguguccggcaucaag

SEQ ID NO: 286920 - RNA, 19 nt, Homo sapiens
  misc_RNA (1)...(19): siRNA sense strand
uaggugaggccaagaagca

SEQ ID NO: 286921 - RNA, 19 nt, Homo sapiens
  misc_RNA (1)...(19): siRNA sense strand
ggaguuuaaggagcugaaa

SEQ ID NO: 286922 - RNA, 19 nt, Homo sapiens
  misc_RNA (1)...(19): siRNA sense strand
ccagaagaacaucuacagu

SEQ ID NO: 286923 - RNA, 19 nt, Homo sapiens
  misc_RNA (1)...(19): siRNA sense strand
gaaggaaucugaucuuaau

SEQ ID NO: 286924 - RNA, 19 nt, Homo sapiens
  misc_RNA (1)...(19): siRNA sense strand
aauagaagcugugcaauua

SEQ ID NO: 286925 - RNA, 19 nt, Homo sapiens
  misc_RNA (1)...(19): siRNA sense strand
caacugaccucaucuggaa

SEQ ID NO: 286926 - RNA, 19 nt, Homo sapiens
  misc_RNA (1)...(19): siRNA sense strand
gaaagagucuagagcaugu

SEQ ID NO: 286927 - RNA, 19 nt, Homo sapiens
  misc_RNA (1)...(19): siRNA sense strand
gaagaggguugauguggaa

SEQ ID NO: 286928 - RNA, 19 nt, Homo sapiens
  misc_RNA (1)...(19): siRNA sense strand
guuagcagaugaaacuuua

SEQ ID NO: 286929 - RNA, 19 nt, Homo sapiens
  misc_RNA (1)...(19): siRNA sense strand
gcagaugaaacuuuacuua

SEQ ID NO: 286930 - RNA, 19 nt, Homo sapiens
  misc_RNA (1)...(19): siRNA sense strand
gaucaagcuucgagaauau

SEQ ID NO: 286931 - RNA, 19 nt, Homo sapiens
  misc_RNA (1)...(19): siRNA sense strand
gcacugaauucgaaagaug

SEQ ID NO: 286932 - RNA, 19 nt, Homo sapiens
  misc_RNA (1)...(19): siRNA sense strand
gaaagccgcaugagaauug

SEQ ID NO: 286933 - RNA, 19 nt, Homo sapiens
  misc_RNA (1)...(19): siRNA sense strand
ggaaauaagggaucaaaug

SEQ ID NO: 286934 - RNA, 19 nt, Homo sapiens
  misc_RNA (1)...(19): siRNA sense strand
gggaagaacugauggaaag

SEQ ID NO: 286935 - RNA, 19 nt, Homo sapiens
  misc_RNA (1)...(19): siRNA sense strand
ggacuugcuugcuaaagaa

SEQ ID NO: 286936 - RNA, 19 nt, Homo sapiens
  misc_RNA (1)...(19): siRNA sense strand
gcugggagaugaucagaaa

SEQ ID NO: 286937 - RNA, 19 nt, Homo sapiens
  misc_RNA (1)...(19): siRNA sense strand
gcgaagaugugaagguuau

SEQ ID NO: 286938 - RNA, 19 nt, Homo sapiens
  misc_RNA (1)...(19): siRNA sense strand
gaacacuucugaacaggau

SEQ ID NO: 286939 - RNA, 19 nt, Homo sapiens
  misc_RNA (1)...(19): siRNA sense strand
gagaggagguugcucaaag

SEQ ID NO: 286940 - RNA, 19 nt, Homo sapiens
  misc_RNA (1)...(19): siRNA sense strand
acacaucagucaguuauaa

SEQ ID NO: 286941 - RNA, 19 nt, Homo sapiens
  misc_RNA (1)...(19): siRNA sense strand
ccaagagcauccaauagaa

SEQ ID NO: 286942 - RNA, 19 nt, Homo sapiens
  misc_RNA (1)...(19): siRNA sense strand
gaacagcuucuugauguaa

SEQ ID NO: 286943 - RNA, 19 nt, Homo sapiens
  misc_RNA (1)...(19): siRNA sense strand
ggagguugcucaaagaagu

SEQ ID NO: 286944 - RNA, 19 nt, Homo sapiens
  misc_RNA (1)...(19): siRNA sense strand
gaaugacuaugaacagcuu

SEQ ID NO: 286945 - RNA, 19 nt, Homo sapiens
  misc_RNA (1)...(19): siRNA sense strand
agaagcagcuggagugguu

SEQ ID NO: 286946 - RNA, 19 nt, Homo sapiens
  misc_RNA (1)...(19): siRNA sense strand
ucgaagaaauugauguuga

SEQ ID NO: 286947 - RNA, 19 nt, Homo sapiens
  misc_RNA (1)...(19): siRNA sense strand
ggaaauuuauccgcuugaa

SEQ ID NO: 286948 - RNA, 19 nt, Homo sapiens
  misc_RNA (1)...(19): siRNA sense strand
agagagagauggcggaaau

SEQ ID NO: 286949 - RNA, 19 nt, Homo sapiens
  misc_RNA (1)...(19): siRNA sense strand
gaaauaagggaucaaaugc

SEQ ID NO: 286950 - RNA, 19 nt, Homo sapiens
  misc_RNA (1)...(19): siRNA sense strand
caauagaagcugugcaauu

SEQ ID NO: 286951 - RNA, 19 nt, Homo sapiens
  misc_RNA (1)...(19): siRNA sense strand
ggagacacaucagucaguu

SEQ ID NO: 286952 - RNA, 19 nt, Homo sapiens
  misc_RNA (1)...(19): siRNA sense strand
aagcagcacugaauucgaa

SEQ ID NO: 286953 - RNA, 19 nt, Homo sapiens
  misc_RNA (1)...(19): siRNA sense strand
aaacaaccauaccugaaga

SEQ ID NO: 286954 - RNA, 19 nt, Homo sapiens
  misc_RNA (1)...(19): siRNA sense strand
aaucagugcuuacaggaaa

SEQ ID NO: 286955 - RNA, 19 nt, Homo sapiens
  misc_RNA (1)...(19): siRNA sense strand
uuagaggacuugcuugcua

SEQ ID NO: 286956 - RNA, 19 nt, Homo sapiens
  misc_RNA (1)...(19): siRNA sense strand
gcaaaagcauguaugaaga

SEQ ID NO: 286957 - RNA, 19 nt, Homo sapiens
  misc_RNA (1)...(19): siRNA sense strand
gcaugaaacgcgcuuggua

SEQ ID NO: 286958 - RNA, 19 nt, Homo sapiens
  misc_RNA (1)...(19): siRNA sense strand
cgaagaaauugauguugau

SEQ ID NO: 286959 - RNA, 19 nt, Homo sapiens
  misc_RNA (1)...(19): siRNA sense strand
caacuaugcuaagaaggaa

SEQ ID NO: 286960 - RNA, 19 nt, Homo sapiens
  misc_RNA (1)...(19): siRNA sense strand
gcuucuugauguaaaguua

SEQ ID NO: 286961 - RNA, 19 nt, Homo sapiens
  misc_RNA (1)...(19): siRNA sense strand
gcaacaugaugcccaagug

SEQ ID NO: 286962 - RNA, 19 nt, Homo sapiens
  misc_RNA (1)...(19): siRNA sense strand
agaucaagcuucgagaaua

SEQ ID NO: 286963 - RNA, 19 nt, Homo sapiens
  misc_RNA (1)...(19): siRNA sense strand
ggacuuggaguuucgcaaa

SEQ ID NO: 286964 - RNA, 19 nt, Homo sapiens
  misc_RNA (1)...(19): siRNA sense strand
caucccagcuuucuaaucu

SEQ ID NO: 286965 - RNA, 19 nt, Homo sapiens
  misc_RNA (1)...(19): siRNA sense strand
gagcauguuuggaaaggau

SEQ ID NO: 286966 - RNA, 19 nt, Homo sapiens
  misc_RNA (1)...(19): siRNA sense strand
gccagacuguuacaauuug

SEQ ID NO: 286967 - RNA, 19 nt, Homo sapiens
  misc_RNA (1)...(19): siRNA sense strand
uagaagcugugcaauuaug

SEQ ID NO: 286968 - RNA, 19 nt, Homo sapiens
  misc_RNA (1)...(19): siRNA sense strand
gaugugaagguuauauuga

SEQ ID NO: 286969 - RNA, 19 nt, Homo sapiens
  misc_RNA (1)...(19): siRNA sense strand
uagaggacuugcuugcuaa

SEQ ID NO: 286970 - RNA, 19 nt, Homo sapiens
  misc_RNA (1)...(19): siRNA sense strand
ugaacaggaucaaccaaug

SEQ ID NO: 286971 - RNA, 19 nt, Homo sapiens
  misc_RNA (1)...(19): siRNA sense strand
gcgccaagcugcagaucga

SEQ ID NO: 286972 - RNA, 19 nt, Homo sapiens
  misc_RNA (1)...(19): siRNA sense strand
agcaacagcugaaugacua

SEQ ID NO: 286973 - RNA, 19 nt, Homo sapiens
  misc_RNA (1)...(19): siRNA sense strand
gagauuaacgagaccagaa

SEQ ID NO: 286974 - RNA, 19 nt, Homo sapiens
  misc_RNA (1)...(19): siRNA sense strand
gauguugaugggaaauuua

SEQ ID NO: 286975 - RNA, 19 nt, Homo sapiens
  misc_RNA (1)...(19): siRNA sense strand
gaggcgaguaguaguguua

SEQ ID NO: 286976 - RNA, 19 nt, Homo sapiens
  misc_RNA (1)...(19): siRNA sense strand
gaauugagagccuuucauc

SEQ ID NO: 286977 - RNA, 19 nt, Homo sapiens
  misc_RNA (1)...(19): siRNA sense strand
gcaagcccuucaugagaug

SEQ ID NO: 286978 - RNA, 19 nt, Homo sapiens
  misc_RNA (1)...(19): siRNA sense strand
gcgcaagcccuucaugaga

SEQ ID NO: 286979 - RNA, 19 nt, Homo sapiens
  misc_RNA (1)...(19): siRNA sense strand
gaagcugugcaauuaugua

SEQ ID NO: 286980 - RNA, 19 nt, Homo sapiens
  misc_RNA (1)...(19): siRNA sense strand
ggccagacuguuacaauuu

SEQ ID NO: 286981 - RNA, 19 nt, Homo sapiens
  misc_RNA (1)...(19): siRNA sense strand
caagugaggcuguauaagg

SEQ ID NO: 286982 - RNA, 19 nt, Homo sapiens
  misc_RNA (1)...(19): siRNA sense strand
gaacaggaucaaccaaugg

SEQ ID NO: 286983 - RNA, 19 nt, Homo sapiens
  misc_RNA (1)...(19): siRNA sense strand
guacguacaacuagaggaa

SEQ ID NO: 286984 - RNA, 19 nt, Homo sapiens
  misc_RNA (1)...(19): siRNA sense strand
ugaacagcuucuugaugua

SEQ ID NO: 286985 - RNA, 19 nt, Homo sapiens
  misc_RNA (1)...(19): siRNA sense strand
cuccuuagcugcagccaaa

SEQ ID NO: 286986 - RNA, 19 nt, Homo sapiens
  misc_RNA (1)...(19): siRNA sense strand
aaccauaccugaagaagag

SEQ ID NO: 286987 - RNA, 19 nt, Homo sapiens
  misc_RNA (1)...(19): siRNA sense strand
gaagaugugaagguuauau

SEQ ID NO: 286988 - RNA, 19 nt, Homo sapiens
  misc_RNA (1)...(19): siRNA sense strand
aaauuuauccgcuugaaga

SEQ ID NO: 286989 - RNA, 19 nt, Homo sapiens
  misc_RNA (1)...(19): siRNA sense strand
cgagcauccucaagucgua

SEQ ID NO: 286990 - RNA, 19 nt, Homo sapiens
  misc_RNA (1)...(19): siRNA sense strand
acauggaaaucagugcuua

SEQ ID NO: 286991 - RNA, 19 nt, Homo sapiens
  misc_RNA (1)...(19): siRNA sense strand
augaacagcuucuugaugu

SEQ ID NO: 286992 - RNA, 19 nt, Homo sapiens
  misc_RNA (1)...(19): siRNA sense strand
gggaucaaaugcagcaaca

SEQ ID NO: 286993 - RNA, 19 nt, Homo sapiens
  misc_RNA (1)...(19): siRNA sense strand
gaugagagagcaacaugau

SEQ ID NO: 286994 - RNA, 19 nt, Homo sapiens
  misc_RNA (1)...(19): siRNA sense strand
ccaguuggaagccuccuua

SEQ ID NO: 286995 - RNA, 19 nt, Homo sapiens
  misc_RNA (1)...(19): siRNA sense strand
cagcuggagugguuguuga

SEQ ID NO: 286996 - RNA, 19 nt, Homo sapiens
  misc_RNA (1)...(19): siRNA sense strand
caacaugaugcccaaguga

SEQ ID NO: 286997 - RNA, 19 nt, Homo sapiens
  misc_RNA (1)...(19): siRNA sense strand
gagaugagagagcaacaug

SEQ ID NO: 286998 - RNA, 19 nt, Homo sapiens
  misc_RNA (1)...(19): siRNA sense strand
gcucaaagaaguacagucu

SEQ ID NO: 286999 - RNA, 19 nt, Homo sapiens
  misc_RNA (1)...(19): siRNA sense strand
gaggguugauguggaagaa

SEQ ID NO: 287000 - RNA, 19 nt, Homo sapiens
  misc_RNA (1)...(19): siRNA sense strand
gauggaaagccgcaugaga

SEQ ID NO: 287001 - RNA, 19 nt, Homo sapiens
  misc_RNA (1)...(19): siRNA sense strand
agaggagguugcucaaaga

SEQ ID NO: 287002 - RNA, 19 nt, Homo sapiens
  misc_RNA (1)...(19): siRNA sense strand
ugauguugaugggaaauuu

SEQ ID NO: 287003 - RNA, 19 nt, Homo sapiens
  misc_RNA (1)...(19): siRNA sense strand
ggaaagccgcaugagaauu

SEQ ID NO: 287004 - RNA, 19 nt, Homo sapiens
  misc_RNA (1)...(19): siRNA sense strand
agaaggaaucugaucuuaa

SEQ ID NO: 287005 - RNA, 19 nt, Homo sapiens
  misc_RNA (1)...(19): siRNA sense strand
gaaucagaggcgaguagua

SEQ ID NO: 287006 - RNA, 19 nt, Homo sapiens
  misc_RNA (1)...(19): siRNA sense strand
caacagugccagggaagaa

SEQ ID NO: 287007 - RNA, 19 nt, Homo sapiens
  misc_RNA (1)...(19): siRNA sense strand
gccagacugucaucagaga

SEQ ID NO: 287008 - RNA, 19 nt, Homo sapiens
  misc_RNA (1)...(19): siRNA sense strand
gagccuuacugaggacuug

SEQ ID NO: 287009 - RNA, 19 nt, Homo sapiens
  misc_RNA (1)...(19): siRNA sense strand
gagacacaucagucaguua

SEQ ID NO: 287010 - RNA, 19 nt, Homo sapiens
  misc_RNA (1)...(19): siRNA sense strand
aaaguuagcccuggacaug

SEQ ID NO: 287011 - RNA, 19 nt, Homo sapiens
  misc_RNA (1)...(19): siRNA sense strand
cagaaagagucuagagcau

SEQ ID NO: 287012 - RNA, 19 nt, Homo sapiens
  misc_RNA (1)...(19): siRNA sense strand
aagugaggcuguauaagga

SEQ ID NO: 287013 - RNA, 19 nt, Homo sapiens
  misc_RNA (1)...(19): siRNA sense strand
gaaguacagucuuuaaaac

SEQ ID NO: 287014 - RNA, 19 nt, Homo sapiens
  misc_RNA (1)...(19): siRNA sense strand
gaauaugaagcagcacuga

SEQ ID NO: 287015 - RNA, 19 nt, Homo sapiens
  misc_RNA (1)...(19): siRNA sense strand
ccucaacuaugcuaagaag

SEQ ID NO: 287016 - RNA, 19 nt, Homo sapiens
  misc_RNA (1)...(19): siRNA sense strand
ucuagagcauguuuggaaa

SEQ ID NO: 287017 - RNA, 19 nt, Homo sapiens
  misc_RNA (1)...(19): siRNA sense strand
cccaagagcauccaauaga

SEQ ID NO: 287018 - RNA, 19 nt, Homo sapiens
  misc_RNA (1)...(19): siRNA sense strand
caaccauaccugaagaaga

SEQ ID NO: 287019 - RNA, 19 nt, Homo sapiens
  misc_RNA (1)...(19): siRNA sense strand
ugcaaacgcuggugucaca

SEQ ID NO: 287020 - RNA, 19 nt, Homo sapiens
  misc_RNA (1)...(19): siRNA sense strand
gaagaaauugauguugaug

SEQ ID NO: 287021 - RNA, 19 nt, Homo sapiens
  misc_RNA (1)...(19): siRNA sense strand
gaaauguuugcaucgaaga

SEQ ID NO: 287022 - RNA, 19 nt, Homo sapiens
  misc_RNA (1)...(19): siRNA sense strand
ggguugauguggaagaauc

SEQ ID NO: 287023 - RNA, 19 nt, Homo sapiens
  misc_RNA (1)...(19): siRNA sense strand
caaaguguaucaccuggaa

SEQ ID NO: 287024 - RNA, 19 nt, Homo sapiens
  misc_RNA (1)...(19): siRNA sense strand
caucaacucugacauagug

SEQ ID NO: 287025 - RNA, 19 nt, Homo sapiens
  misc_RNA (1)...(19): siRNA sense strand
uguaucaccuggaauguuu

SEQ ID NO: 287026 - RNA, 19 nt, Homo sapiens
  misc_RNA (1)...(19): siRNA sense strand
acagauaccuccucaucaa

SEQ ID NO: 287027 - RNA, 19 nt, Homo sapiens
  misc_RNA (1)...(19): siRNA sense strand
ugaaggccaucgaccagua

SEQ ID NO: 287028 - RNA, 19 nt, Homo sapiens
  misc_RNA (1)...(19): siRNA sense strand
ggugaaagacaaaguguau

SEQ ID NO: 287029 - RNA, 19 nt, Homo sapiens
  misc_RNA (1)...(19): siRNA sense strand
ccucaucaacucugacaua

SEQ ID NO: 287030 - RNA, 19 nt, Homo sapiens
  misc_RNA (1)...(19): siRNA sense strand
ugacaaugcgggugaaaga

SEQ ID NO: 287031 - RNA, 19 nt, Homo sapiens
  misc_RNA (1)...(19): siRNA sense strand
cagaggaaccaguggauga

SEQ ID NO: 287032 - RNA, 19 nt, Homo sapiens
  misc_RNA (1)...(19): siRNA sense strand
ugaaagacaaaguguauca

SEQ ID NO: 287033 - RNA, 19 nt, Homo sapiens
  misc_RNA (1)...(19): siRNA sense strand
ugacagauaccuccucauc

SEQ ID NO: 287034 - RNA, 19 nt, Homo sapiens
  misc_RNA (1)...(19): siRNA sense strand
caaugcgggugaaagacaa

SEQ ID NO: 287035 - RNA, 19 nt, Homo sapiens
  misc_RNA (1)...(19): siRNA sense strand
uggaugaggugcugcagau

SEQ ID NO: 287036 - RNA, 19 nt, Homo sapiens
  misc_RNA (1)...(19): siRNA sense strand
ccuggacccuucagaggaa

SEQ ID NO: 287037 - RNA, 19 nt, Homo sapiens
  misc_RNA (1)...(19): siRNA sense strand
cgaguggacuaagaucaau

SEQ ID NO: 287038 - RNA, 19 nt, Homo sapiens
  misc_RNA (1)...(19): siRNA sense strand
ccucggccaucgaaaggaa

SEQ ID NO: 287039 - RNA, 19 nt, Homo sapiens
  misc_RNA (1)...(19): siRNA sense strand
gcgaacaggacaucuacga

SEQ ID NO: 287040 - RNA, 19 nt, Homo sapiens
  misc_RNA (1)...(19): siRNA sense strand
caagcggauucgugccuau

SEQ ID NO: 287041 - RNA, 19 nt, Homo sapiens
  misc_RNA (1)...(19): siRNA sense strand
gacagauaccuccucauca

SEQ ID NO: 287042 - RNA, 19 nt, Homo sapiens
  misc_RNA (1)...(19): siRNA sense strand
caccuggaauguuucaagu

SEQ ID NO: 287043 - RNA, 19 nt, Homo sapiens
  misc_RNA (1)...(19): siRNA sense strand
gauaccuccucaucaacuc

SEQ ID NO: 287044 - RNA, 19 nt, Homo sapiens
  misc_RNA (1)...(19): siRNA sense strand
gggugaaagacaaagugua

SEQ ID NO: 287045 - RNA, 19 nt, Homo sapiens
  misc_RNA (1)...(19): siRNA sense strand
ugacauagugugcgaacag

SEQ ID NO: 287046 - RNA, 19 nt, Homo sapiens
  misc_RNA (1)...(19): siRNA sense strand
gauucgugccuaugagaug

SEQ ID NO: 287047 - RNA, 19 nt, Homo sapiens
  misc_RNA (1)...(19): siRNA sense strand
ccgccugucagaagcauuu

SEQ ID NO: 287048 - RNA, 19 nt, Homo sapiens
  misc_RNA (1)...(19): siRNA sense strand
cuacaucaauggcaguuua

SEQ ID NO: 287049 - RNA, 19 nt, Homo sapiens
  misc_RNA (1)...(19): siRNA sense strand
ggcaauguguaucaucuua

SEQ ID NO: 287050 - RNA, 19 nt, Homo sapiens
  misc_RNA (1)...(19): siRNA sense strand
ggagaucgguuucacuaca

SEQ ID NO: 287051 - RNA, 19 nt, Homo sapiens
  misc_RNA (1)...(19): siRNA sense strand
ggaaauagcggugcuugca

SEQ ID NO: 287052 - RNA, 19 nt, Homo sapiens
  misc_RNA (1)...(19): siRNA sense strand
caucaauggcaguuuauuu

SEQ ID NO: 287053 - RNA, 19 nt, Homo sapiens
  misc_RNA (1)...(19): siRNA sense strand
gcaugauccuuugcagaaa

SEQ ID NO: 287054 - RNA, 19 nt, Homo sapiens
  misc_RNA (1)...(19): siRNA sense strand
gcaauguguaucaucuuaa

SEQ ID NO: 287055 - RNA, 19 nt, Homo sapiens
  misc_RNA (1)...(19): siRNA sense strand
ggcaugauccuuugcagaa

SEQ ID NO: 287056 - RNA, 19 nt, Homo sapiens
  misc_RNA (1)...(19): siRNA sense strand
caauguguaucaucuuaag

SEQ ID NO: 287057 - RNA, 19 nt, Homo sapiens
  misc_RNA (1)...(19): siRNA sense strand
gagaucgguuucacuacau

SEQ ID NO: 287058 - RNA, 19 nt, Homo sapiens
  misc_RNA (1)...(19): siRNA sense strand
gcaaggcaauguguaucau

SEQ ID NO: 287059 - RNA, 19 nt, Homo sapiens
  misc_RNA (1)...(19): siRNA sense strand
ucagagcaauccacuacug

SEQ ID NO: 287060 - RNA, 19 nt, Homo sapiens
  misc_RNA (1)...(19): siRNA sense strand
caugauccuuugcagaaau

SEQ ID NO: 287061 - RNA, 19 nt, Homo sapiens
  misc_RNA (1)...(19): siRNA sense strand
ggaccgcuuucugcucuau

SEQ ID NO: 287062 - RNA, 19 nt, Homo sapiens
  misc_RNA (1)...(19): siRNA sense strand
ucuaugccauggacagcua

SEQ ID NO: 287063 - RNA, 19 nt, Homo sapiens
  misc_RNA (1)...(19): siRNA sense strand
gaauucacuucagagcaau

SEQ ID NO: 287064 - RNA, 19 nt, Homo sapiens
  misc_RNA (1)...(19): siRNA sense strand
cgggagaucgguuucacua

SEQ ID NO: 287065 - RNA, 19 nt, Homo sapiens
  misc_RNA (1)...(19): siRNA sense strand
gcacguccuguuacaccaa

SEQ ID NO: 287066 - RNA, 19 nt, Homo sapiens
  misc_RNA (1)...(19): siRNA sense strand
gggcgcaaggcaaugugua

SEQ ID NO: 287067 - RNA, 19 nt, Homo sapiens
  misc_RNA (1)...(19): siRNA sense strand
cgguuucacuacaucaaug

SEQ ID NO: 287068 - RNA, 19 nt, Homo sapiens
  misc_RNA (1)...(19): siRNA sense strand
caugagggcgcaaggcaau

SEQ ID NO: 287069 - RNA, 19 nt, Homo sapiens
  misc_RNA (1)...(19): siRNA sense strand
caauggcaguuuauuuugu

SEQ ID NO: 287070 - RNA, 19 nt, Homo sapiens
  misc_RNA (1)...(19): siRNA sense strand
gacaucggcacguccuguu

SEQ ID NO: 287071 - RNA, 19 nt, Homo sapiens
  misc_RNA (1)...(19): siRNA sense strand
caaaguaguuuccgacgua

SEQ ID NO: 287072 - RNA, 19 nt, Homo sapiens
  misc_RNA (1)...(19): siRNA sense strand
gaacuuagaucuguuucaa

SEQ ID NO: 287073 - RNA, 19 nt, Homo sapiens
  misc_RNA (1)...(19): siRNA sense strand
caagagagauccugaccaa

SEQ ID NO: 287074 - RNA, 19 nt, Homo sapiens
  misc_RNA (1)...(19): siRNA sense strand
ggaaaacgcugccaaacaa

SEQ ID NO: 287075 - RNA, 19 nt, Homo sapiens
  misc_RNA (1)...(19): siRNA sense strand
ugaagacucugguuuccua

SEQ ID NO: 287076 - RNA, 19 nt, Homo sapiens
  misc_RNA (1)...(19): siRNA sense strand
aaacugagaauccgagaua

SEQ ID NO: 287077 - RNA, 19 nt, Homo sapiens
  misc_RNA (1)...(19): siRNA sense strand
ggccagcccuugaacaauu

SEQ ID NO: 287078 - RNA, 19 nt, Homo sapiens
  misc_RNA (1)...(19): siRNA sense strand
gaacaauuaccauaugaag

SEQ ID NO: 287079 - RNA, 19 nt, Homo sapiens
  misc_RNA (1)...(19): siRNA sense strand
gaaguggugcuuuaucuca

SEQ ID NO: 287080 - RNA, 19 nt, Homo sapiens
  misc_RNA (1)...(19): siRNA sense strand
gccagcccuugaacaauua

SEQ ID NO: 287081 - RNA, 19 nt, Homo sapiens
  misc_RNA (1)...(19): siRNA sense strand
ggaagucugcaaaguaguu

SEQ ID NO: 287082 - RNA, 19 nt, Homo sapiens
  misc_RNA (1)...(19): siRNA sense strand
aauuugaaguggugcuuua

SEQ ID NO: 287083 - RNA, 19 nt, Homo sapiens
  misc_RNA (1)...(19): siRNA sense strand
ggucuaccaucugaauaaa

SEQ ID NO: 287084 - RNA, 19 nt, Homo sapiens
  misc_RNA (1)...(19): siRNA sense strand
gaaagcugccauugccaaa

SEQ ID NO: 287085 - RNA, 19 nt, Homo sapiens
  misc_RNA (1)...(19): siRNA sense strand
ucaacgagauggacaaucg

SEQ ID NO: 287086 - RNA, 19 nt, Homo sapiens
  misc_RNA (1)...(19): siRNA sense strand
gaagugaaacugagaaucc

SEQ ID NO: 287087 - RNA, 19 nt, Homo sapiens
  misc_RNA (1)...(19): siRNA sense strand
gaaagaagugccucuccau

SEQ ID NO: 287088 - RNA, 19 nt, Homo sapiens
  misc_RNA (1)...(19): siRNA sense strand
cgggaagucugcaaaguag

SEQ ID NO: 287089 - RNA, 19 nt, Homo sapiens
  misc_RNA (1)...(19): siRNA sense strand
gcagacaccagcgaaguga

SEQ ID NO: 287090 - RNA, 19 nt, Homo sapiens
  misc_RNA (1)...(19): siRNA sense strand
cuaccgaacuuagaucugu

SEQ ID NO: 287091 - RNA, 19 nt, Homo sapiens
  misc_RNA (1)...(19): siRNA sense strand
gcugcgcggugcugaaguu

SEQ ID NO: 287092 - RNA, 19 nt, Homo sapiens
  misc_RNA (1)...(19): siRNA sense strand
cauaugaagacucugguuu

SEQ ID NO: 287093 - RNA, 19 nt, Homo sapiens
  misc_RNA (1)...(19): siRNA sense strand
gcggaagguuucaaucucu

SEQ ID NO: 287094 - RNA, 19 nt, Homo sapiens
  misc_RNA (1)...(19): siRNA sense strand
ggucaaggcggaagguuuc

SEQ ID NO: 287095 - RNA, 19 nt, Homo sapiens
  misc_RNA (1)...(19): siRNA sense strand
gaagucugcaaaguaguuu

SEQ ID NO: 287096 - RNA, 19 nt, Homo sapiens
  misc_RNA (1)...(19): siRNA sense strand
gcgcggugcugaaguugag

SEQ ID NO: 287097 - RNA, 19 nt, Homo sapiens
  misc_RNA (1)...(19): siRNA sense strand
cuugaacaauuaccauaug

SEQ ID NO: 287098 - RNA, 19 nt, Homo sapiens
  misc_RNA (1)...(19): siRNA sense strand
guuucaaucucuuguccaa

SEQ ID NO: 287099 - RNA, 19 nt, Homo sapiens
  misc_RNA (1)...(19): siRNA sense strand
ccgggaagucugcaaagua

SEQ ID NO: 287100 - RNA, 19 nt, Homo sapiens
  misc_RNA (1)...(19): siRNA sense strand
gaauuugaaguggugcuuu

SEQ ID NO: 287101 - RNA, 19 nt, Homo sapiens
  misc_RNA (1)...(19): siRNA sense strand
ggaagguuucaaucucuug

SEQ ID NO: 287102 - RNA, 19 nt, Homo sapiens
  misc_RNA (1)...(19): siRNA sense strand
gauccugaccaacccgaaa

SEQ ID NO: 287103 - RNA, 19 nt, Homo sapiens
  misc_RNA (1)...(19): siRNA sense strand
cucaagcgguagacaaaug

SEQ ID NO: 287104 - RNA, 19 nt, Homo sapiens
  misc_RNA (1)...(19): siRNA sense strand
ggcggaagguuucaaucuc

SEQ ID NO: 287105 - RNA, 19 nt, Homo sapiens
  misc_RNA (1)...(19): siRNA sense strand
ugcuuuaucucaaccaaau

SEQ ID NO: 287106 - RNA, 19 nt, Homo sapiens
  misc_RNA (1)...(19): siRNA sense strand
agacaccagcgaagugaaa

SEQ ID NO: 287107 - RNA, 19 nt, Homo sapiens
  misc_RNA (1)...(19): siRNA sense strand
guaaagaugguggcagaca

SEQ ID NO: 287108 - RNA, 19 nt, Homo sapiens
  misc_RNA (1)...(19): siRNA sense strand
gaagguuucaaucucuugu

SEQ ID NO: 287109 - RNA, 19 nt, Homo sapiens
  misc_RNA (1)...(19): siRNA sense strand
acaauuaccauaugaagac

SEQ ID NO: 287110 - RNA, 19 nt, Homo sapiens
  misc_RNA (1)...(19): siRNA sense strand
ugaccaacccgaaaaguuu

SEQ ID NO: 287111 - RNA, 19 nt, Homo sapiens
  misc_RNA (1)...(19): siRNA sense strand
cggaagguuucaaucucuu

SEQ ID NO: 287112 - RNA, 19 nt, Homo sapiens
  misc_RNA (1)...(19): siRNA sense strand
uugaaguggugcuuuaucu

SEQ ID NO: 287113 - RNA, 19 nt, Homo sapiens
  misc_RNA (1)...(19): siRNA sense strand
ugagaauccgagauaggua

SEQ ID NO: 287114 - RNA, 19 nt, Homo sapiens
  misc_RNA (1)...(19): siRNA sense strand
gaaacugagaauccgagau

SEQ ID NO: 287115 - RNA, 19 nt, Homo sapiens
  misc_RNA (1)...(19): siRNA sense strand
agacucugguuuccuacga

SEQ ID NO: 287116 - RNA, 19 nt, Homo sapiens
  misc_RNA (1)...(19): siRNA sense strand
auagguacguggugcagau

SEQ ID NO: 287117 - RNA, 19 nt, Homo sapiens
  misc_RNA (1)...(19): siRNA sense strand
gggaugugguaaagauggu

SEQ ID NO: 287118 - RNA, 19 nt, Homo sapiens
  misc_RNA (1)...(19): siRNA sense strand
cguggcgacuggcaagaga

SEQ ID NO: 287119 - RNA, 19 nt, Homo sapiens
  misc_RNA (1)...(19): siRNA sense strand
caaggcggaagguuucaau

SEQ ID NO: 287120 - RNA, 19 nt, Homo sapiens
  misc_RNA (1)...(19): siRNA sense strand
caaaauccgguccagguuu

SEQ ID NO: 287121 - RNA, 19 nt, Homo sapiens
  misc_RNA (1)...(19): siRNA sense strand
caagcgguagacaaaugua

SEQ ID NO: 287122 - RNA, 19 nt, Homo sapiens
  misc_RNA (1)...(19): siRNA sense strand
ggcucaagcgguagacaaa

SEQ ID NO: 287123 - RNA, 19 nt, Homo sapiens
  misc_RNA (1)...(19): siRNA sense strand
gaaaacgcugccaaacaaa

SEQ ID NO: 287124 - RNA, 19 nt, Homo sapiens
  misc_RNA (1)...(19): siRNA sense strand
ggugcuuuaucucaaccaa

SEQ ID NO: 287125 - RNA, 19 nt, Homo sapiens
  misc_RNA (1)...(19): siRNA sense strand
ucaaggcaaaccucacuca

SEQ ID NO: 287126 - RNA, 19 nt, Homo sapiens
  misc_RNA (1)...(19): siRNA sense strand
cagcgaagugaaacugaga

SEQ ID NO: 287127 - RNA, 19 nt, Homo sapiens
  misc_RNA (1)...(19): siRNA sense strand
aguaagagcagcagcaaau

SEQ ID NO: 287128 - RNA, 19 nt, Homo sapiens
  misc_RNA (1)...(19): siRNA sense strand
cagggcagcaagaagagua

SEQ ID NO: 287129 - RNA, 19 nt, Homo sapiens
  misc_RNA (1)...(19): siRNA sense strand
gaguaagagcagcagcaaa

SEQ ID NO: 287130 - RNA, 19 nt, Homo sapiens
  misc_RNA (1)...(19): siRNA sense strand
ccaaggcccaccggaaguu

SEQ ID NO: 287131 - RNA, 19 nt, Homo sapiens
  misc_RNA (1)...(19): siRNA sense strand
cauccuguccugccuguuc

SEQ ID NO: 287132 - RNA, 19 nt, Homo sapiens
  misc_RNA (1)...(19): siRNA sense strand
gcugugggcucugcuucuc

SEQ ID NO: 287133 - RNA, 19 nt, Homo sapiens
  misc_RNA (1)...(19): siRNA sense strand
gcagcaagaagaguaagag

SEQ ID NO: 287134 - RNA, 19 nt, Homo sapiens
  misc_RNA (1)...(19): siRNA sense strand
ggacagcccucgaccuuaa

SEQ ID NO: 287135 - RNA, 19 nt, Homo sapiens
  misc_RNA (1)...(19): siRNA sense strand
gauaagaucuugacaacug

SEQ ID NO: 287136 - RNA, 19 nt, Homo sapiens
  misc_RNA (1)...(19): siRNA sense strand
gaccaugaaugaaguuaua

SEQ ID NO: 287137 - RNA, 19 nt, Homo sapiens
  misc_RNA (1)...(19): siRNA sense strand
uagaaagggucauugaaua

SEQ ID NO: 287138 - RNA, 19 nt, Homo sapiens
  misc_RNA (1)...(19): siRNA sense strand
gagcaaucauaaaguguua

SEQ ID NO: 287139 - RNA, 19 nt, Homo sapiens
  misc_RNA (1)...(19): siRNA sense strand
caggaagacugaaagaaua

SEQ ID NO: 287140 - RNA, 19 nt, Homo sapiens
  misc_RNA (1)...(19): siRNA sense strand
ucugaaagcuccgguauua

SEQ ID NO: 287141 - RNA, 19 nt, Homo sapiens
  misc_RNA (1)...(19): siRNA sense strand
ccaaugaugugaacaaguu

SEQ ID NO: 287142 - RNA, 19 nt, Homo sapiens
  misc_RNA (1)...(19): siRNA sense strand
gaucuuaacugguacuuag

SEQ ID NO: 287143 - RNA, 19 nt, Homo sapiens
  misc_RNA (1)...(19): siRNA sense strand
gaaauuggacuucacgauu

SEQ ID NO: 287144 - RNA, 19 nt, Homo sapiens
  misc_RNA (1)...(19): siRNA sense strand
gaacacagcguacgccuau

SEQ ID NO: 287145 - RNA, 19 nt, Homo sapiens
  misc_RNA (1)...(19): siRNA sense strand
gaaggagauuuccaagauu

SEQ ID NO: 287146 - RNA, 19 nt, Homo sapiens
  misc_RNA (1)...(19): siRNA sense strand
caagaucucuauugguauu

SEQ ID NO: 287147 - RNA, 19 nt, Homo sapiens
  misc_RNA (1)...(19): siRNA sense strand
ugacagcacucauuaaauc

SEQ ID NO: 287148 - RNA, 19 nt, Homo sapiens
  misc_RNA (1)...(19): siRNA sense strand
ugaggaaagugccaaagua

SEQ ID NO: 287149 - RNA, 19 nt, Homo sapiens
  misc_RNA (1)...(19): siRNA sense strand
caagagcaaucauaaagug

SEQ ID NO: 287150 - RNA, 19 nt, Homo sapiens
  misc_RNA (1)...(19): siRNA sense strand
gaaauuauccacauauugg

SEQ ID NO: 287151 - RNA, 19 nt, Homo sapiens
  misc_RNA (1)...(19): siRNA sense strand
ugucagaccuggcgaauug

SEQ ID NO: 287152 - RNA, 19 nt, Homo sapiens
  misc_RNA (1)...(19): siRNA sense strand
caagagcaguguaucaaga

SEQ ID NO: 287153 - RNA, 19 nt, Homo sapiens
  misc_RNA (1)...(19): siRNA sense strand
ccgagaagcuagaucuuaa

SEQ ID NO: 287154 - RNA, 19 nt, Homo sapiens
  misc_RNA (1)...(19): siRNA sense strand
gcagggaagucaucacugu

SEQ ID NO: 287155 - RNA, 19 nt, Homo sapiens
  misc_RNA (1)...(19): siRNA sense strand
gugcugaaguugagaauau

SEQ ID NO: 287156 - RNA, 19 nt, Homo sapiens
  misc_RNA (1)...(19): siRNA sense strand
agaggaagaugauauguau

SEQ ID NO: 287157 - RNA, 19 nt, Homo sapiens
  misc_RNA (1)...(19): siRNA sense strand
gggaugagguuacgaguag

SEQ ID NO: 287158 - RNA, 19 nt, Homo sapiens
  misc_RNA (1)...(19): siRNA sense strand
gauggcaguucuaaucauu

SEQ ID NO: 287159 - RNA, 19 nt, Homo sapiens
  misc_RNA (1)...(19): siRNA sense strand
caaagacauuggacacuug

SEQ ID NO: 287160 - RNA, 19 nt, Homo sapiens
  misc_RNA (1)...(19): siRNA sense strand
gaggaaauguaaccgagaa

SEQ ID NO: 287161 - RNA, 19 nt, Homo sapiens
  misc_RNA (1)...(19): siRNA sense strand
cauaaaguguuacuggaaa

SEQ ID NO: 287162 - RNA, 19 nt, Homo sapiens
  misc_RNA (1)...(19): siRNA sense strand
agaaggagauuuccaagau

SEQ ID NO: 287163 - RNA, 19 nt, Homo sapiens
  misc_RNA (1)...(19): siRNA sense strand
ucaaucugcuguccaauga

SEQ ID NO: 287164 - RNA, 19 nt, Homo sapiens
  misc_RNA (1)...(19): siRNA sense strand
caaaguaugcuaaauguca

SEQ ID NO: 287165 - RNA, 19 nt, Homo sapiens
  misc_RNA (1)...(19): siRNA sense strand
gauaaucuuugacaaugug

SEQ ID NO: 287166 - RNA, 19 nt, Homo sapiens
  misc_RNA (1)...(19): siRNA sense strand
gaaucaggauccaauuuua

SEQ ID NO: 287167 - RNA, 19 nt, Homo sapiens
  misc_RNA (1)...(19): siRNA sense strand
uacaagagguacaacuuaa

SEQ ID NO: 287168 - RNA, 19 nt, Homo sapiens
  misc_RNA (1)...(19): siRNA sense strand
gaggaaagugccaaaguaa

SEQ ID NO: 287169 - RNA, 19 nt, Homo sapiens
  misc_RNA (1)...(19): siRNA sense strand
agcaagaucucuauuggua

SEQ ID NO: 287170 - RNA, 19 nt, Homo sapiens
  misc_RNA (1)...(19): siRNA sense strand
ggaaagugccaaaguaauc

SEQ ID NO: 287171 - RNA, 19 nt, Homo sapiens
  misc_RNA (1)...(19): siRNA sense strand
ugaaagcuccgguauuauu

SEQ ID NO: 287172 - RNA, 19 nt, Homo sapiens
  misc_RNA (1)...(19): siRNA sense strand
aaagaaggauaaugaggaa

SEQ ID NO: 287173 - RNA, 19 nt, Homo sapiens
  misc_RNA (1)...(19): siRNA sense strand
gggaagucaucacuguuaa

SEQ ID NO: 287174 - RNA, 19 nt, Homo sapiens
  misc_RNA (1)...(19): siRNA sense strand
ugauagaaauccaauagga

SEQ ID NO: 287175 - RNA, 19 nt, Homo sapiens
  misc_RNA (1)...(19): siRNA sense strand
gagccaagauacagagaau

SEQ ID NO: 287176 - RNA, 19 nt, Homo sapiens
  misc_RNA (1)...(19): siRNA sense strand
gugauaaucuuugacaaug

SEQ ID NO: 287177 - RNA, 19 nt, Homo sapiens
  misc_RNA (1)...(19): siRNA sense strand
ggaugaauuuggcuucguu

SEQ ID NO: 287178 - RNA, 19 nt, Homo sapiens
  misc_RNA (1)...(19): siRNA sense strand
guagccaugugccauauga

SEQ ID NO: 287179 - RNA, 19 nt, Homo sapiens
  misc_RNA (1)...(19): siRNA sense strand
caucugacagcacucauua

SEQ ID NO: 287180 - RNA, 19 nt, Homo sapiens
  misc_RNA (1)...(19): siRNA sense strand
ccuaugugcuucaagauug

SEQ ID NO: 287181 - RNA, 19 nt, Homo sapiens
  misc_RNA (1)...(19): siRNA sense strand
caugagaagaucacaauuu

SEQ ID NO: 287182 - RNA, 19 nt, Homo sapiens
  misc_RNA (1)...(19): siRNA sense strand
cagcucagguugccuaugu

SEQ ID NO: 287183 - RNA, 19 nt, Homo sapiens
  misc_RNA (1)...(19): siRNA sense strand
gaucuugacaacugaaauu

SEQ ID NO: 287184 - RNA, 19 nt, Homo sapiens
  misc_RNA (1)...(19): siRNA sense strand
gaaaaggaacgauaugaaa

SEQ ID NO: 287185 - RNA, 19 nt, Homo sapiens
  misc_RNA (1)...(19): siRNA sense strand
guagaaagggucauugaau

SEQ ID NO: 287186 - RNA, 19 nt, Homo sapiens
  misc_RNA (1)...(19): siRNA sense strand
uaaaucguuucuccaaaga

SEQ ID NO: 287187 - RNA, 19 nt, Homo sapiens
  misc_RNA (1)...(19): siRNA sense strand
gcacuucgucuuaguaaca

SEQ ID NO: 287188 - RNA, 19 nt, Homo sapiens
  misc_RNA (1)...(19): siRNA sense strand
caacuuaaagaaaccauug

SEQ ID NO: 287189 - RNA, 19 nt, Homo sapiens
  misc_RNA (1)...(19): siRNA sense strand
gauagaaauccaauaggaa

SEQ ID NO: 287190 - RNA, 19 nt, Homo sapiens
  misc_RNA (1)...(19): siRNA sense strand
uaacugguacuuaggaauu

SEQ ID NO: 287191 - RNA, 19 nt, Homo sapiens
  misc_RNA (1)...(19): siRNA sense strand
cagcgugcauggaagaauu

SEQ ID NO: 287192 - RNA, 19 nt, Homo sapiens
  misc_RNA (1)...(19): siRNA sense strand
gcaaauguggauccaagaa

SEQ ID NO: 287193 - RNA, 19 nt, Homo sapiens
  misc_RNA (1)...(19): siRNA sense strand
uuacaagagguacaacuua

SEQ ID NO: 287194 - RNA, 19 nt, Homo sapiens
  misc_RNA (1)...(19): siRNA sense strand
agaagcaccuugggaauau

SEQ ID NO: 287195 - RNA, 19 nt, Homo sapiens
  misc_RNA (1)...(19): siRNA sense strand
ucacuggauugucuucauu

SEQ ID NO: 287196 - RNA, 19 nt, Homo sapiens
  misc_RNA (1)...(19): siRNA sense strand
gauuuuggcucccuuuuaa

SEQ ID NO: 287197 - RNA, 19 nt, Homo sapiens
  misc_RNA (1)...(19): siRNA sense strand
ggaagaugauauguauuca

SEQ ID NO: 287198 - RNA, 19 nt, Homo sapiens
  misc_RNA (1)...(19): siRNA sense strand
gaagacugaaagaauauga

SEQ ID NO: 287199 - RNA, 19 nt, Homo sapiens
  misc_RNA (1)...(19): siRNA sense strand
gcacacggaugaggaacug

SEQ ID NO: 287200 - RNA, 19 nt, Homo sapiens
  misc_RNA (1)...(19): siRNA sense strand
gaaugucccaguuacacua

SEQ ID NO: 287201 - RNA, 19 nt, Homo sapiens
  misc_RNA (1)...(19): siRNA sense strand
ccaugugccauaugauuua

SEQ ID NO: 287202 - RNA, 19 nt, Homo sapiens
  misc_RNA (1)...(19): siRNA sense strand
gauugaacaccauuauuga

SEQ ID NO: 287203 - RNA, 19 nt, Homo sapiens
  misc_RNA (1)...(19): siRNA sense strand
gagguacaacuuaaagaaa

SEQ ID NO: 287204 - RNA, 19 nt, Homo sapiens
  misc_RNA (1)...(19): siRNA sense strand
gaaguugagaauaugauga

SEQ ID NO: 287205 - RNA, 19 nt, Homo sapiens
  misc_RNA (1)...(19): siRNA sense strand
gaaauccaauaggaagaau

SEQ ID NO: 287206 - RNA, 19 nt, Homo sapiens
  misc_RNA (1)...(19): siRNA sense strand
gaaagcuccgguauuauuc

SEQ ID NO: 287207 - RNA, 19 nt, Homo sapiens
  misc_RNA (1)...(19): siRNA sense strand
gaaggagugauaaucuuug

SEQ ID NO: 287208 - RNA, 19 nt, Homo sapiens
  misc_RNA (1)...(19): siRNA sense strand
ggacuucacgauuuaagga

SEQ ID NO: 287209 - RNA, 19 nt, Homo sapiens
  misc_RNA (1)...(19): siRNA sense strand
ugucagaacccgaagguaa

SEQ ID NO: 287210 - RNA, 19 nt, Homo sapiens
  misc_RNA (1)...(19): siRNA sense strand
uugcaaggguucugggaua

SEQ ID NO: 287211 - RNA, 19 nt, Homo sapiens
  misc_RNA (1)...(19): siRNA sense strand
uuaaggagcacacggauga

SEQ ID NO: 287212 - RNA, 19 nt, Homo sapiens
  misc_RNA (1)...(19): siRNA sense strand
aauuggacuucacgauuua

SEQ ID NO: 287213 - RNA, 19 nt, Homo sapiens
  misc_RNA (1)...(19): siRNA sense strand
gagauuagaggaagaugau

SEQ ID NO: 287214 - RNA, 19 nt, Homo sapiens
  misc_RNA (1)...(19): siRNA sense strand
ggaucaggaccaugaauga

SEQ ID NO: 287215 - RNA, 19 nt, Homo sapiens
  misc_RNA (1)...(19): siRNA sense strand
aaaugucacuguaaaugga

SEQ ID NO: 287216 - RNA, 19 nt, Homo sapiens
  misc_RNA (1)...(19): siRNA sense strand
aaucguaccuucucagagu

SEQ ID NO: 287217 - RNA, 19 nt, Homo sapiens
  misc_RNA (1)...(19): siRNA sense strand
gaaggauaaugaggaaagu

SEQ ID NO: 287218 - RNA, 19 nt, Homo sapiens
  misc_RNA (1)...(19): siRNA sense strand
caaaguaauccagcccaua

SEQ ID NO: 287219 - RNA, 19 nt, Homo sapiens
  misc_RNA (1)...(19): siRNA sense strand
ccagggcaauucucaggaa

SEQ ID NO: 287220 - RNA, 19 nt, Homo sapiens
  misc_RNA (1)...(19): siRNA sense strand
ggaagaaccggagcuggaa

SEQ ID NO: 287221 - RNA, 19 nt, Homo sapiens
  misc_RNA (1)...(19): siRNA sense strand
acaccaggauuuacauuca

SEQ ID NO: 287222 - RNA, 19 nt, Homo sapiens
  misc_RNA (1)...(19): siRNA sense strand
gcuccgguauuauucuuug

SEQ ID NO: 287223 - RNA, 19 nt, Homo sapiens
  misc_RNA (1)...(19): siRNA sense strand
gcaaacaaacaaaguaugc

SEQ ID NO: 287224 - RNA, 19 nt, Homo sapiens
  misc_RNA (1)...(19): siRNA sense strand
caagauugguggcuuucau

SEQ ID NO: 287225 - RNA, 19 nt, Homo sapiens
  misc_RNA (1)...(19): siRNA sense strand
ugacucaucaguugcagua

SEQ ID NO: 287226 - RNA, 19 nt, Homo sapiens
  misc_RNA (1)...(19): siRNA sense strand
gggcagaaagcacggguaa

SEQ ID NO: 287227 - RNA, 19 nt, Homo sapiens
  misc_RNA (1)...(19): siRNA sense strand
gacaaccacaggccagaua

SEQ ID NO: 287228 - RNA, 19 nt, Homo sapiens
  misc_RNA (1)...(19): siRNA sense strand
gaaagcacggguaaaccuu

SEQ ID NO: 287229 - RNA, 19 nt, Homo sapiens
  misc_RNA (1)...(19): siRNA sense strand
gaauacacagaccuugaaa

SEQ ID NO: 287230 - RNA, 19 nt, Homo sapiens
  misc_RNA (1)...(19): siRNA sense strand
gaaagggucauugaauaca

SEQ ID NO: 287231 - RNA, 19 nt, Homo sapiens
  misc_RNA (1)...(19): siRNA sense strand
acaaagugcugaaguugag

SEQ ID NO: 287232 - RNA, 19 nt, Homo sapiens
  misc_RNA (1)...(19): siRNA sense strand
uuaaaucguuucuccaaag

SEQ ID NO: 287233 - RNA, 19 nt, Homo sapiens
  misc_RNA (1)...(19): siRNA sense strand
guaaauggaggaggaaaug

SEQ ID NO: 287234 - RNA, 19 nt, Homo sapiens
  misc_RNA (1)...(19): siRNA sense strand
gaacggguccgaauacuuc

SEQ ID NO: 287235 - RNA, 19 nt, Homo sapiens
  misc_RNA (1)...(19): siRNA sense strand
gaugagcccugaggacauu

SEQ ID NO: 287236 - RNA, 19 nt, Homo sapiens
  misc_RNA (1)...(19): siRNA sense strand
gaugagcucuacccacaag

SEQ ID NO: 287237 - RNA, 19 nt, Homo sapiens
  misc_RNA (1)...(19): siRNA sense strand
cauuggaccugcugcuauu

SEQ ID NO: 287238 - RNA, 19 nt, Homo sapiens
  misc_RNA (1)...(19): siRNA sense strand
gcauggacuuggccacguu

SEQ ID NO: 287239 - RNA, 19 nt, Homo sapiens
  misc_RNA (1)...(19): siRNA sense strand
uggagacccugaaggcuuu

SEQ ID NO: 287240 - RNA, 19 nt, Homo sapiens
  misc_RNA (1)...(19): siRNA sense strand
ccuaggaccuggaccuguu

SEQ ID NO: 287241 - RNA, 19 nt, Homo sapiens
  misc_RNA (1)...(19): siRNA sense strand
gacccuggcuggagagaca

SEQ ID NO: 287242 - RNA, 19 nt, Homo sapiens
  misc_RNA (1)...(19): siRNA sense strand
ccugaaggcuuugcuugaa

SEQ ID NO: 287243 - RNA, 19 nt, Homo sapiens
  misc_RNA (1)...(19): siRNA sense strand
gcaccugggcuaccucuuc

SEQ ID NO: 287244 - RNA, 19 nt, Homo sapiens
  misc_RNA (1)...(19): siRNA sense strand
ggacuuggccacguucaug

SEQ ID NO: 287245 - RNA, 19 nt, Homo sapiens
  misc_RNA (1)...(19): siRNA sense strand
gacgagagccucaucuucu

SEQ ID NO: 287246 - RNA, 19 nt, Homo sapiens
  misc_RNA (1)...(19): siRNA sense strand
gcagcuggacguccucuau

SEQ ID NO: 287247 - RNA, 19 nt, Homo sapiens
  misc_RNA (1)...(19): siRNA sense strand
acgagagccucaucuucua

SEQ ID NO: 287248 - RNA, 19 nt, Homo sapiens
  misc_RNA (1)...(19): siRNA sense strand
gcuggaagccugcguggau

SEQ ID NO: 287249 - RNA, 19 nt, Homo sapiens
  misc_RNA (1)...(19): siRNA sense strand
uaaagcauaaacuggauga

SEQ ID NO: 287250 - RNA, 19 nt, Homo sapiens
  misc_RNA (1)...(19): siRNA sense strand
uaaacuggaugagcucuac

SEQ ID NO: 287251 - RNA, 19 nt, Homo sapiens
  misc_RNA (1)...(19): siRNA sense strand
caaagggcacgaaaugagu

SEQ ID NO: 287252 - RNA, 19 nt, Homo sapiens
  misc_RNA (1)...(19): siRNA sense strand
gacaaagacacccuagaca

SEQ ID NO: 287253 - RNA, 19 nt, Homo sapiens
  misc_RNA (1)...(19): siRNA sense strand
uggcugaggugcagaaacu

SEQ ID NO: 287254 - RNA, 19 nt, Homo sapiens
  misc_RNA (1)...(19): siRNA sense strand
gcagcuggacguccuaaag

SEQ ID NO: 287255 - RNA, 19 nt, Homo sapiens
  misc_RNA (1)...(19): siRNA sense strand
ugaaggcuuugcuugaagu

SEQ ID NO: 287256 - RNA, 19 nt, Homo sapiens
  misc_RNA (1)...(19): siRNA sense strand
ccuaaagcauaaacuggau

SEQ ID NO: 287257 - RNA, 19 nt, Homo sapiens
  misc_RNA (1)...(19): siRNA sense strand
ggaccuggaccuguucuca

SEQ ID NO: 287258 - RNA, 19 nt, Homo sapiens
  misc_RNA (1)...(19): siRNA sense strand
gaaugucaagcucucaaca

SEQ ID NO: 287259 - RNA, 19 nt, Homo sapiens
  misc_RNA (1)...(19): siRNA sense strand
caacggcuaccugguccua

SEQ ID NO: 287260 - RNA, 19 nt, Homo sapiens
  misc_RNA (1)...(19): siRNA sense strand
gaucgaccgcuuugugaag

SEQ ID NO: 287261 - RNA, 19 nt, Homo sapiens
  misc_RNA (1)...(19): siRNA sense strand
gagcucuacccacaagguu

SEQ ID NO: 287262 - RNA, 19 nt, Homo sapiens
  misc_RNA (1)...(19): siRNA sense strand
uggacguccuaaagcauaa

SEQ ID NO: 287263 - RNA, 19 nt, Homo sapiens
  misc_RNA (1)...(19): siRNA sense strand
ggccugcacccguuucuuc

SEQ ID NO: 287264 - RNA, 19 nt, Homo sapiens
  misc_RNA (1)...(19): siRNA sense strand
gaagaaugucaagcucuca

SEQ ID NO: 287265 - RNA, 19 nt, Homo sapiens
  misc_RNA (1)...(19): siRNA sense strand
acaaagggcacgaaaugag

SEQ ID NO: 287266 - RNA, 19 nt, Homo sapiens
  misc_RNA (1)...(19): siRNA sense strand
cauggucugucuccacgau

SEQ ID NO: 287267 - RNA, 19 nt, Homo sapiens
  misc_RNA (1)...(19): siRNA sense strand
gaaugugagcauggacuug

SEQ ID NO: 287268 - RNA, 19 nt, Homo sapiens
  misc_RNA (1)...(19): siRNA sense strand
ucgugaagauccaguccuu

SEQ ID NO: 287269 - RNA, 19 nt, Homo sapiens
  misc_RNA (1)...(19): siRNA sense strand
acaugaacggguccgaaua

SEQ ID NO: 287270 - RNA, 19 nt, Homo sapiens
  misc_RNA (1)...(19): siRNA sense strand
gcaucacgaaggccaaugu

SEQ ID NO: 287271 - RNA, 19 nt, Homo sapiens
  misc_RNA (1)...(19): siRNA sense strand
agacaaagacacccuagac

SEQ ID NO: 287272 - RNA, 19 nt, Homo sapiens
  misc_RNA (1)...(19): siRNA sense strand
ccauuggaccugcugcuau

SEQ ID NO: 287273 - RNA, 19 nt, Homo sapiens
  misc_RNA (1)...(19): siRNA sense strand
gauagacgagagccucauc

SEQ ID NO: 287274 - RNA, 19 nt, Homo sapiens
  misc_RNA (1)...(19): siRNA sense strand
agacgagagccucaucuuc

SEQ ID NO: 287275 - RNA, 19 nt, Homo sapiens
  misc_RNA (1)...(19): siRNA sense strand
gcugaggugcagaaacuuc

SEQ ID NO: 287276 - RNA, 19 nt, Homo sapiens
  misc_RNA (1)...(19): siRNA sense strand
gacuuggccacguucauga

SEQ ID NO: 287277 - RNA, 19 nt, Homo sapiens
  misc_RNA (1)...(19): siRNA sense strand
caugaacggguccgaauac

SEQ ID NO: 287278 - RNA, 19 nt, Homo sapiens
  misc_RNA (1)...(19): siRNA sense strand
caagaagugggagcuggaa

SEQ ID NO: 287279 - RNA, 19 nt, Homo sapiens
  misc_RNA (1)...(19): siRNA sense strand
ccagauggaccgcgugaac

SEQ ID NO: 287280 - RNA, 19 nt, Homo sapiens
  misc_RNA (1)...(19): siRNA sense strand
augucaagcucucaacaga

SEQ ID NO: 287281 - RNA, 19 nt, Homo sapiens
  misc_RNA (1)...(19): siRNA sense strand
cugaggacauucgcaagug

SEQ ID NO: 287282 - RNA, 19 nt, Homo sapiens
  misc_RNA (1)...(19): siRNA sense strand
cuggacguccuaaagcaua

SEQ ID NO: 287283 - RNA, 19 nt, Homo sapiens
  misc_RNA (1)...(19): siRNA sense strand
gagcagcuggacguccuaa

SEQ ID NO: 287284 - RNA, 19 nt, Homo sapiens
  misc_RNA (1)...(19): siRNA sense strand
gaacggguccgaauacuuc

SEQ ID NO: 287285 - RNA, 19 nt, Homo sapiens
  misc_RNA (1)...(19): siRNA sense strand
gaugagcccugaggacauu

SEQ ID NO: 287286 - RNA, 19 nt, Homo sapiens
  misc_RNA (1)...(19): siRNA sense strand
gaugagcucuacccacaag

SEQ ID NO: 287287 - RNA, 19 nt, Homo sapiens
  misc_RNA (1)...(19): siRNA sense strand
cauuggaccugcugcuauu

SEQ ID NO: 287288 - RNA, 19 nt, Homo sapiens
  misc_RNA (1)...(19): siRNA sense strand
gcauggacuuggccacguu

SEQ ID NO: 287289 - RNA, 19 nt, Homo sapiens
  misc_RNA (1)...(19): siRNA sense strand
uggagacccugaaggcuuu

SEQ ID NO: 287290 - RNA, 19 nt, Homo sapiens
  misc_RNA (1)...(19): siRNA sense strand
ccuaggaccuggaccuguu

SEQ ID NO: 287291 - RNA, 19 nt, Homo sapiens
  misc_RNA (1)...(19): siRNA sense strand
gacccuggcuggagagaca

SEQ ID NO: 287292 - RNA, 19 nt, Homo sapiens
  misc_RNA (1)...(19): siRNA sense strand
ccugaaggcuuugcuugaa

SEQ ID NO: 287293 - RNA, 19 nt, Homo sapiens
  misc_RNA (1)...(19): siRNA sense strand
gcaccugggcuaccucuuc

SEQ ID NO: 287294 - RNA, 19 nt, Homo sapiens
  misc_RNA (1)...(19): siRNA sense strand
ggacuuggccacguucaug

SEQ ID NO: 287295 - RNA, 19 nt, Homo sapiens
  misc_RNA (1)...(19): siRNA sense strand
gacgagagccucaucuucu

SEQ ID NO: 287296 - RNA, 19 nt, Homo sapiens
  misc_RNA (1)...(19): siRNA sense strand
gcagcuggacguccucuau

SEQ ID NO: 287297 - RNA, 19 nt, Homo sapiens
  misc_RNA (1)...(19): siRNA sense strand
acgagagccucaucuucua

SEQ ID NO: 287298 - RNA, 19 nt, Homo sapiens
  misc_RNA (1)...(19): siRNA sense strand
gcuggaagccugcguggau

SEQ ID NO: 287299 - RNA, 19 nt, Homo sapiens
  misc_RNA (1)...(19): siRNA sense strand
uaaagcauaaacuggauga

SEQ ID NO: 287300 - RNA, 19 nt, Homo sapiens
  misc_RNA (1)...(19): siRNA sense strand
uaaacuggaugagcucuac

SEQ ID NO: 287301 - RNA, 19 nt, Homo sapiens
  misc_RNA (1)...(19): siRNA sense strand
caaagggcacgaaaugagu

SEQ ID NO: 287302 - RNA, 19 nt, Homo sapiens
  misc_RNA (1)...(19): siRNA sense strand
gacaaagacacccuagaca

SEQ ID NO: 287303 - RNA, 19 nt, Homo sapiens
  misc_RNA (1)...(19): siRNA sense strand
uggcugaggugcagaaacu

SEQ ID NO: 287304 - RNA, 19 nt, Homo sapiens
  misc_RNA (1)...(19): siRNA sense strand
gcagcuggacguccuaaag

SEQ ID NO: 287305 - RNA, 19 nt, Homo sapiens
  misc_RNA (1)...(19): siRNA sense strand
ugaaggcuuugcuugaagu

SEQ ID NO: 287306 - RNA, 19 nt, Homo sapiens
  misc_RNA (1)...(19): siRNA sense strand
ccuaaagcauaaacuggau

SEQ ID NO: 287307 - RNA, 19 nt, Homo sapiens
  misc_RNA (1)...(19): siRNA sense strand
ggaccuggaccuguucuca

SEQ ID NO: 287308 - RNA, 19 nt, Homo sapiens
  misc_RNA (1)...(19): siRNA sense strand
gaaugucaagcucucaaca

SEQ ID NO: 287309 - RNA, 19 nt, Homo sapiens
  misc_RNA (1)...(19): siRNA sense strand
caacggcuaccugguccua

SEQ ID NO: 287310 - RNA, 19 nt, Homo sapiens
  misc_RNA (1)...(19): siRNA sense strand
gaucgaccgcuuugugaag

SEQ ID NO: 287311 - RNA, 19 nt, Homo sapiens
  misc_RNA (1)...(19): siRNA sense strand
gagcucuacccacaagguu

SEQ ID NO: 287312 - RNA, 19 nt, Homo sapiens
  misc_RNA (1)...(19): siRNA sense strand
uggacguccuaaagcauaa

SEQ ID NO: 287313 - RNA, 19 nt, Homo sapiens
  misc_RNA (1)...(19): siRNA sense strand
ggccugcacccguuucuuc

SEQ ID NO: 287314 - RNA, 19 nt, Homo sapiens
  misc_RNA (1)...(19): siRNA sense strand
gaagaaugucaagcucuca

SEQ ID NO: 287315 - RNA, 19 nt, Homo sapiens
  misc_RNA (1)...(19): siRNA sense strand
acaaagggcacgaaaugag

SEQ ID NO: 287316 - RNA, 19 nt, Homo sapiens
  misc_RNA (1)...(19): siRNA sense strand
cauggucugucuccacgau

SEQ ID NO: 287317 - RNA, 19 nt, Homo sapiens
  misc_RNA (1)...(19): siRNA sense strand
gaaugugagcauggacuug

SEQ ID NO: 287318 - RNA, 19 nt, Homo sapiens
  misc_RNA (1)...(19): siRNA sense strand
ucgugaagauccaguccuu

SEQ ID NO: 287319 - RNA, 19 nt, Homo sapiens
  misc_RNA (1)...(19): siRNA sense strand
acaugaacggguccgaaua

SEQ ID NO: 287320 - RNA, 19 nt, Homo sapiens
  misc_RNA (1)...(19): siRNA sense strand
gcaucacgaaggccaaugu

SEQ ID NO: 287321 - RNA, 19 nt, Homo sapiens
  misc_RNA (1)...(19): siRNA sense strand
agacaaagacacccuagac

SEQ ID NO: 287322 - RNA, 19 nt, Homo sapiens
  misc_RNA (1)...(19): siRNA sense strand
ccauuggaccugcugcuau

SEQ ID NO: 287323 - RNA, 19 nt, Homo sapiens
  misc_RNA (1)...(19): siRNA sense strand
gauagacgagagccucauc

SEQ ID NO: 287324 - RNA, 19 nt, Homo sapiens
  misc_RNA (1)...(19): siRNA sense strand
agacgagagccucaucuuc

SEQ ID NO: 287325 - RNA, 19 nt, Homo sapiens
  misc_RNA (1)...(19): siRNA sense strand
gcugaggugcagaaacuuc

SEQ ID NO: 287326 - RNA, 19 nt, Homo sapiens
  misc_RNA (1)...(19): siRNA sense strand
gacuuggccacguucauga

SEQ ID NO: 287327 - RNA, 19 nt, Homo sapiens
  misc_RNA (1)...(19): siRNA sense strand
caugaacggguccgaauac

SEQ ID NO: 287328 - RNA, 19 nt, Homo sapiens
  misc_RNA (1)...(19): siRNA sense strand
caagaagugggagcuggaa

SEQ ID NO: 287329 - RNA, 19 nt, Homo sapiens
  misc_RNA (1)...(19): siRNA sense strand
ccagauggaccgcgugaac

SEQ ID NO: 287330 - RNA, 19 nt, Homo sapiens
  misc_RNA (1)...(19): siRNA sense strand
augucaagcucucaacaga

SEQ ID NO: 287331 - RNA, 19 nt, Homo sapiens
  misc_RNA (1)...(19): siRNA sense strand
cugaggacauucgcaagug

SEQ ID NO: 287332 - RNA, 19 nt, Homo sapiens
  misc_RNA (1)...(19): siRNA sense strand
cuggacguccuaaagcaua

SEQ ID NO: 287333 - RNA, 19 nt, Homo sapiens
  misc_RNA (1)...(19): siRNA sense strand
gagcagcuggacguccuaa

SEQ ID NO: 287334 - RNA, 19 nt, Homo sapiens
  misc_RNA (1)...(19): siRNA sense strand
uggcaaagcuuccuucaua

SEQ ID NO: 287335 - RNA, 19 nt, Homo sapiens
  misc_RNA (1)...(19): siRNA sense strand
gaaguuaaauccuccuuug

SEQ ID NO: 287336 - RNA, 19 nt, Homo sapiens
  misc_RNA (1)...(19): siRNA sense strand
ugaaauugcugaagaagaa

SEQ ID NO: 287337 - RNA, 19 nt, Homo sapiens
  misc_RNA (1)...(19): siRNA sense strand
ugaaagugaugaagacaua

SEQ ID NO: 287338 - RNA, 19 nt, Homo sapiens
  misc_RNA (1)...(19): siRNA sense strand
gcagaagaacuaaguauuu

SEQ ID NO: 287339 - RNA, 19 nt, Homo sapiens
  misc_RNA (1)...(19): siRNA sense strand
gcaguuagugaaacaauua

SEQ ID NO: 287340 - RNA, 19 nt, Homo sapiens
  misc_RNA (1)...(19): siRNA sense strand
ggagaaaacugcuugaaaa

SEQ ID NO: 287341 - RNA, 19 nt, Homo sapiens
  misc_RNA (1)...(19): siRNA sense strand
uaaagaggaugcauaugaa

SEQ ID NO: 287342 - RNA, 19 nt, Homo sapiens
  misc_RNA (1)...(19): siRNA sense strand
cauaaaggaugaagguaaa

SEQ ID NO: 287343 - RNA, 19 nt, Homo sapiens
  misc_RNA (1)...(19): siRNA sense strand
gauagaggcugaugacaag

SEQ ID NO: 287344 - RNA, 19 nt, Homo sapiens
  misc_RNA (1)...(19): siRNA sense strand
ggaaacggaugaagaugau

SEQ ID NO: 287345 - RNA, 19 nt, Homo sapiens
  misc_RNA (1)...(19): siRNA sense strand
gaugauggauucccucuuc

SEQ ID NO: 287346 - RNA, 19 nt, Homo sapiens
  misc_RNA (1)...(19): siRNA sense strand
ggaugaagaugaugaccuu

SEQ ID NO: 287347 - RNA, 19 nt, Homo sapiens
  misc_RNA (1)...(19): siRNA sense strand
gagccuugcugaaauuuau

SEQ ID NO: 287348 - RNA, 19 nt, Homo sapiens
  misc_RNA (1)...(19): siRNA sense strand
gaugaugaccuucaagaaa

SEQ ID NO: 287349 - RNA, 19 nt, Homo sapiens
  misc_RNA (1)...(19): siRNA sense strand
cagaggagaucaaggagaa

SEQ ID NO: 287350 - RNA, 19 nt, Homo sapiens
  misc_RNA (1)...(19): siRNA sense strand
guuaaauccuccuuugaaa

SEQ ID NO: 287351 - RNA, 19 nt, Homo sapiens
  misc_RNA (1)...(19): siRNA sense strand
ggaggagacccuacacuuu

SEQ ID NO: 287352 - RNA, 19 nt, Homo sapiens
  misc_RNA (1)...(19): siRNA sense strand
gggaugauguaguacguaa

SEQ ID NO: 287353 - RNA, 19 nt, Homo sapiens
  misc_RNA (1)...(19): siRNA sense strand
cuaaagaggaugcauauga

SEQ ID NO: 287354 - RNA, 19 nt, Homo sapiens
  misc_RNA (1)...(19): siRNA sense strand
ggaggaagauauugauuuu

SEQ ID NO: 287355 - RNA, 19 nt, Homo sapiens
  misc_RNA (1)...(19): siRNA sense strand
gcaaagcuuccuucauaaa

SEQ ID NO: 287356 - RNA, 19 nt, Homo sapiens
  misc_RNA (1)...(19): siRNA sense strand
gaacaggaguacaucaaac

SEQ ID NO: 287357 - RNA, 19 nt, Homo sapiens
  misc_RNA (1)...(19): siRNA sense strand
gaaacgagagcgaaggaaa

SEQ ID NO: 287358 - RNA, 19 nt, Homo sapiens
  misc_RNA (1)...(19): siRNA sense strand
guaaagacaaggccuuaaa

SEQ ID NO: 287359 - RNA, 19 nt, Homo sapiens
  misc_RNA (1)...(19): siRNA sense strand
agaagaagcagaagaacua

SEQ ID NO: 287360 - RNA, 19 nt, Homo sapiens
  misc_RNA (1)...(19): siRNA sense strand
gaggagacccuacacuuug

SEQ ID NO: 287361 - RNA, 19 nt, Homo sapiens
  misc_RNA (1)...(19): siRNA sense strand
gauggauucccucuucuua

SEQ ID NO: 287362 - RNA, 19 nt, Homo sapiens
  misc_RNA (1)...(19): siRNA sense strand
gaacauguagaaauucaga

SEQ ID NO: 287363 - RNA, 19 nt, Homo sapiens
  misc_RNA (1)...(19): siRNA sense strand
caacuggaagauaucauua

SEQ ID NO: 287364 - RNA, 19 nt, Homo sapiens
  misc_RNA (1)...(19): siRNA sense strand
gaccuugacuuugauauca

SEQ ID NO: 287365 - RNA, 19 nt, Homo sapiens
  misc_RNA (1)...(19): siRNA sense strand
caggauauuucuguucaua

SEQ ID NO: 287366 - RNA, 19 nt, Homo sapiens
  misc_RNA (1)...(19): siRNA sense strand
ggcaaagcuuccuucauaa

SEQ ID NO: 287367 - RNA, 19 nt, Homo sapiens
  misc_RNA (1)...(19): siRNA sense strand
cagaagaacuaaguauuuc

SEQ ID NO: 287368 - RNA, 19 nt, Homo sapiens
  misc_RNA (1)...(19): siRNA sense strand
gaugaagacauaacaaaug

SEQ ID NO: 287369 - RNA, 19 nt, Homo sapiens
  misc_RNA (1)...(19): siRNA sense strand
augaugagcuggauucaaa

SEQ ID NO: 287370 - RNA, 19 nt, Homo sapiens
  misc_RNA (1)...(19): siRNA sense strand
gcacagaagaggccagaga

SEQ ID NO: 287371 - RNA, 19 nt, Homo sapiens
  misc_RNA (1)...(19): siRNA sense strand
gaaugcaguuagugaaaca

SEQ ID NO: 287372 - RNA, 19 nt, Homo sapiens
  misc_RNA (1)...(19): siRNA sense strand
ggaugaagguaaagacaag

SEQ ID NO: 287373 - RNA, 19 nt, Homo sapiens
  misc_RNA (1)...(19): siRNA sense strand
uaccagagauuaaaguugu

SEQ ID NO: 287374 - RNA, 19 nt, Homo sapiens
  misc_RNA (1)...(19): siRNA sense strand
gaagugacagcacagaaga

SEQ ID NO: 287375 - RNA, 19 nt, Homo sapiens
  misc_RNA (1)...(19): siRNA sense strand
caacauaaagaaagcuuga

SEQ ID NO: 287376 - RNA, 19 nt, Homo sapiens
  misc_RNA (1)...(19): siRNA sense strand
gcaaaucugaucugaggaa

SEQ ID NO: 287377 - RNA, 19 nt, Homo sapiens
  misc_RNA (1)...(19): siRNA sense strand
cgacauggguaaugaugau

SEQ ID NO: 287378 - RNA, 19 nt, Homo sapiens
  misc_RNA (1)...(19): siRNA sense strand
uggauucccucuucuuaaa

SEQ ID NO: 287379 - RNA, 19 nt, Homo sapiens
  misc_RNA (1)...(19): siRNA sense strand
gagcagauuuggcaacaac

SEQ ID NO: 287380 - RNA, 19 nt, Homo sapiens
  misc_RNA (1)...(19): siRNA sense strand
ugaagaagaagcagaagaa

SEQ ID NO: 287381 - RNA, 19 nt, Homo sapiens
  misc_RNA (1)...(19): siRNA sense strand
ugagcuggauucaaacaaa

SEQ ID NO: 287382 - RNA, 19 nt, Homo sapiens
  misc_RNA (1)...(19): siRNA sense strand
agaggaugguucagagaua

SEQ ID NO: 287383 - RNA, 19 nt, Homo sapiens
  misc_RNA (1)...(19): siRNA sense strand
uccagaacauguagaaauu

SEQ ID NO: 287384 - RNA, 19 nt, Homo sapiens
  misc_RNA (1)...(19): siRNA sense strand
caagagggauuggcaucaa

SEQ ID NO: 287385 - RNA, 19 nt, Homo sapiens
  misc_RNA (1)...(19): siRNA sense strand
gaccuuugcuuuaccagau

SEQ ID NO: 287386 - RNA, 19 nt, Homo sapiens
  misc_RNA (1)...(19): siRNA sense strand
gaagauauugauucugaug

SEQ ID NO: 287387 - RNA, 19 nt, Homo sapiens
  misc_RNA (1)...(19): siRNA sense strand
ggaggaccuagaagauuua

SEQ ID NO: 287388 - RNA, 19 nt, Homo sapiens
  misc_RNA (1)...(19): siRNA sense strand
aggaggaccuagaagauuu

SEQ ID NO: 287389 - RNA, 19 nt, Homo sapiens
  misc_RNA (1)...(19): siRNA sense strand
uaaugaugauccugaaaug

SEQ ID NO: 287390 - RNA, 19 nt, Homo sapiens
  misc_RNA (1)...(19): siRNA sense strand
gaaaacugcuugaaaagag

SEQ ID NO: 287391 - RNA, 19 nt, Homo sapiens
  misc_RNA (1)...(19): siRNA sense strand
ucucaaacuuccacuuuau

SEQ ID NO: 287392 - RNA, 19 nt, Homo sapiens
  misc_RNA (1)...(19): siRNA sense strand
cagaacauguagaaauuca

SEQ ID NO: 287393 - RNA, 19 nt, Homo sapiens
  misc_RNA (1)...(19): siRNA sense strand
ggcuugggaugauguagua

SEQ ID NO: 287394 - RNA, 19 nt, Homo sapiens
  misc_RNA (1)...(19): siRNA sense strand
ggaaaccacccuucaacug

SEQ ID NO: 287395 - RNA, 19 nt, Homo sapiens
  misc_RNA (1)...(19): siRNA sense strand
aaagaaagcuugaaaagag

SEQ ID NO: 287396 - RNA, 19 nt, Homo sapiens
  misc_RNA (1)...(19): siRNA sense strand
uaaaacagcugaccaaaac

SEQ ID NO: 287397 - RNA, 19 nt, Homo sapiens
  misc_RNA (1)...(19): siRNA sense strand
aaagagcaguguagaucaa

SEQ ID NO: 287398 - RNA, 19 nt, Homo sapiens
  misc_RNA (1)...(19): siRNA sense strand
gauguaguacguaaagaaa

SEQ ID NO: 287399 - RNA, 19 nt, Homo sapiens
  misc_RNA (1)...(19): siRNA sense strand
ucaagcaaaucugaucuga

SEQ ID NO: 287400 - RNA, 19 nt, Homo sapiens
  misc_RNA (1)...(19): siRNA sense strand
guagaaauucagaagauga

SEQ ID NO: 287401 - RNA, 19 nt, Homo sapiens
  misc_RNA (1)...(19): siRNA sense strand
aaacagaggauaagagauc

SEQ ID NO: 287402 - RNA, 19 nt, Homo sapiens
  misc_RNA (1)...(19): siRNA sense strand
auucugaccuugacuuuga

SEQ ID NO: 287403 - RNA, 19 nt, Homo sapiens
  misc_RNA (1)...(19): siRNA sense strand
ggauuggcaucaaaguuca

SEQ ID NO: 287404 - RNA, 19 nt, Homo sapiens
  misc_RNA (1)...(19): siRNA sense strand
aagagugaccuuugcuuua

SEQ ID NO: 287405 - RNA, 19 nt, Homo sapiens
  misc_RNA (1)...(19): siRNA sense strand
gaagaagcagaagaacuaa

SEQ ID NO: 287406 - RNA, 19 nt, Homo sapiens
  misc_RNA (1)...(19): siRNA sense strand
ugaugaaauugcugaagaa

SEQ ID NO: 287407 - RNA, 19 nt, Homo sapiens
  misc_RNA (1)...(19): siRNA sense strand
guaaugaugauccugaaau

SEQ ID NO: 287408 - RNA, 19 nt, Homo sapiens
  misc_RNA (1)...(19): siRNA sense strand
aaaguccucucaagcauuc

SEQ ID NO: 287409 - RNA, 19 nt, Homo sapiens
  misc_RNA (1)...(19): siRNA sense strand
gaagcagaagaacuaagua

SEQ ID NO: 287410 - RNA, 19 nt, Homo sapiens
  misc_RNA (1)...(19): siRNA sense strand
ugacaaggaggaccuagaa

SEQ ID NO: 287411 - RNA, 19 nt, Homo sapiens
  misc_RNA (1)...(19): siRNA sense strand
gguaaaaguuccagaaauc

SEQ ID NO: 287412 - RNA, 19 nt, Homo sapiens
  misc_RNA (1)...(19): siRNA sense strand
caacuggaauugcaaaaug

SEQ ID NO: 287413 - RNA, 19 nt, Homo sapiens
  misc_RNA (1)...(19): siRNA sense strand
gcugaaaacucaagcaaau

SEQ ID NO: 287414 - RNA, 19 nt, Homo sapiens
  misc_RNA (1)...(19): siRNA sense strand
ggaccuagaagauuuagag

SEQ ID NO: 287415 - RNA, 19 nt, Homo sapiens
  misc_RNA (1)...(19): siRNA sense strand
gggauuggcaucaaaguuc

SEQ ID NO: 287416 - RNA, 19 nt, Homo sapiens
  misc_RNA (1)...(19): siRNA sense strand
cagaugaugcggaaacuga

SEQ ID NO: 287417 - RNA, 19 nt, Homo sapiens
  misc_RNA (1)...(19): siRNA sense strand
gagcuggauucaaacaaag

SEQ ID NO: 287418 - RNA, 19 nt, Homo sapiens
  misc_RNA (1)...(19): siRNA sense strand
gaggaugguucagagauag

SEQ ID NO: 287419 - RNA, 19 nt, Homo sapiens
  misc_RNA (1)...(19): siRNA sense strand
caugagaagaguaaauuga

SEQ ID NO: 287420 - RNA, 19 nt, Homo sapiens
  misc_RNA (1)...(19): siRNA sense strand
caaaucugaucugaggaaa

SEQ ID NO: 287421 - RNA, 19 nt, Homo sapiens
  misc_RNA (1)...(19): siRNA sense strand
gaagaggaugguucagaga

SEQ ID NO: 287422 - RNA, 19 nt, Homo sapiens
  misc_RNA (1)...(19): siRNA sense strand
caaacaaagaagaugauga

SEQ ID NO: 287423 - RNA, 19 nt, Homo sapiens
  misc_RNA (1)...(19): siRNA sense strand
gcagggaaauacagcaaaa

SEQ ID NO: 287424 - RNA, 19 nt, Homo sapiens
  misc_RNA (1)...(19): siRNA sense strand
aaacagcuacagacaagaa

SEQ ID NO: 287425 - RNA, 19 nt, Homo sapiens
  misc_RNA (1)...(19): siRNA sense strand
aaauugagccuugcugaaa

SEQ ID NO: 287426 - RNA, 19 nt, Homo sapiens
  misc_RNA (1)...(19): siRNA sense strand
caaggaggaccuagaagau

SEQ ID NO: 287427 - RNA, 19 nt, Homo sapiens
  misc_RNA (1)...(19): siRNA sense strand
caacaacuggaauugcaaa

SEQ ID NO: 287428 - RNA, 19 nt, Homo sapiens
  misc_RNA (1)...(19): siRNA sense strand
gagaucaggcuugggauga

SEQ ID NO: 287429 - RNA, 19 nt, Homo sapiens
  misc_RNA (1)...(19): siRNA sense strand
gaaagugaugaagacauaa

SEQ ID NO: 287430 - RNA, 19 nt, Homo sapiens
  misc_RNA (1)...(19): siRNA sense strand
gauggcaccugugauuaca

SEQ ID NO: 287431 - RNA, 19 nt, Homo sapiens
  misc_RNA (1)...(19): siRNA sense strand
gaaaagagcaguguagauc

SEQ ID NO: 287432 - RNA, 19 nt, Homo sapiens
  misc_RNA (1)...(19): siRNA sense strand
ucaaaucugccagccauaa

SEQ ID NO: 287433 - RNA, 19 nt, Homo sapiens
  misc_RNA (1)...(19): siRNA sense strand
uggaugcccucucaaacuu

SEQ ID NO: 287434 - RNA, 19 nt, Homo sapiens
  misc_RNA (1)...(19): siRNA sense strand
gcacaaagauugcgcuaua

SEQ ID NO: 287435 - RNA, 19 nt, Homo sapiens
  misc_RNA (1)...(19): siRNA sense strand
gaugagaacucuugguuua

SEQ ID NO: 287436 - RNA, 19 nt, Homo sapiens
  misc_RNA (1)...(19): siRNA sense strand
ggagaaagaugcagucaga

SEQ ID NO: 287437 - RNA, 19 nt, Homo sapiens
  misc_RNA (1)...(19): siRNA sense strand
gaaaggcucuaucgaaugu

SEQ ID NO: 287438 - RNA, 19 nt, Homo sapiens
  misc_RNA (1)...(19): siRNA sense strand
gagaagagaucaacuuugg

SEQ ID NO: 287439 - RNA, 19 nt, Homo sapiens
  misc_RNA (1)...(19): siRNA sense strand
gcuaaugacucugaugaua

SEQ ID NO: 287440 - RNA, 19 nt, Homo sapiens
  misc_RNA (1)...(19): siRNA sense strand
gaguauagauuuagcagaa

SEQ ID NO: 287441 - RNA, 19 nt, Homo sapiens
  misc_RNA (1)...(19): siRNA sense strand
cagaacagauggcuaauga

SEQ ID NO: 287442 - RNA, 19 nt, Homo sapiens
  misc_RNA (1)...(19): siRNA sense strand
uaaaguaacccaagccaua

SEQ ID NO: 287443 - RNA, 19 nt, Homo sapiens
  misc_RNA (1)...(19): siRNA sense strand
uaaaauagcuccaaccaaa

SEQ ID NO: 287444 - RNA, 19 nt, Homo sapiens
  misc_RNA (1)...(19): siRNA sense strand
gaacaggaguaaacaugga

SEQ ID NO: 287445 - RNA, 19 nt, Homo sapiens
  misc_RNA (1)...(19): siRNA sense strand
ggagaagauugaagaaaug

SEQ ID NO: 287446 - RNA, 19 nt, Homo sapiens
  misc_RNA (1)...(19): siRNA sense strand
guaaaucacuuuggacguu

SEQ ID NO: 287447 - RNA, 19 nt, Homo sapiens
  misc_RNA (1)...(19): siRNA sense strand
ggagguacgucguuucaga

SEQ ID NO: 287448 - RNA, 19 nt, Homo sapiens
  misc_RNA (1)...(19): siRNA sense strand
ggaggaagaugaauaugca

SEQ ID NO: 287449 - RNA, 19 nt, Homo sapiens
  misc_RNA (1)...(19): siRNA sense strand
cagaggaaaugauacguuu

SEQ ID NO: 287450 - RNA, 19 nt, Homo sapiens
  misc_RNA (1)...(19): siRNA sense strand
gaacaugaguguaaaauag

SEQ ID NO: 287451 - RNA, 19 nt, Homo sapiens
  misc_RNA (1)...(19): siRNA sense strand
cagaugcacuugaugauga

SEQ ID NO: 287452 - RNA, 19 nt, Homo sapiens
  misc_RNA (1)...(19): siRNA sense strand
aggagaagcuguaaagaaa

SEQ ID NO: 287453 - RNA, 19 nt, Homo sapiens
  misc_RNA (1)...(19): siRNA sense strand
ugaagaagaugaugaaguc

SEQ ID NO: 287454 - RNA, 19 nt, Homo sapiens
  misc_RNA (1)...(19): siRNA sense strand
gcagucagaggaaaugaua

SEQ ID NO: 287455 - RNA, 19 nt, Homo sapiens
  misc_RNA (1)...(19): siRNA sense strand
ggagucugcuucugccuuu

SEQ ID NO: 287456 - RNA, 19 nt, Homo sapiens
  misc_RNA (1)...(19): siRNA sense strand
gaugaaaggcucuaucgaa

SEQ ID NO: 287457 - RNA, 19 nt, Homo sapiens
  misc_RNA (1)...(19): siRNA sense strand
ggaaaugauacguuuguaa

SEQ ID NO: 287458 - RNA, 19 nt, Homo sapiens
  misc_RNA (1)...(19): siRNA sense strand
gguagaagaucuuguaaaa

SEQ ID NO: 287459 - RNA, 19 nt, Homo sapiens
  misc_RNA (1)...(19): siRNA sense strand
gaaaugucacuacuaagaa

SEQ ID NO: 287460 - RNA, 19 nt, Homo sapiens
  misc_RNA (1)...(19): siRNA sense strand
gaacucuugguuuaacuua

SEQ ID NO: 287461 - RNA, 19 nt, Homo sapiens
  misc_RNA (1)...(19): siRNA sense strand
ggaagaugaauaugcauaa

SEQ ID NO: 287462 - RNA, 19 nt, Homo sapiens
  misc_RNA (1)...(19): siRNA sense strand
gagaagcuguaaagaaaca

SEQ ID NO: 287463 - RNA, 19 nt, Homo sapiens
  misc_RNA (1)...(19): siRNA sense strand
acacagcgauuucuuaaag

SEQ ID NO: 287464 - RNA, 19 nt, Homo sapiens
  misc_RNA (1)...(19): siRNA sense strand
gauggcaaccucaacauuu

SEQ ID NO: 287465 - RNA, 19 nt, Homo sapiens
  misc_RNA (1)...(19): siRNA sense strand
ccagauaauccuaaaguaa

SEQ ID NO: 287466 - RNA, 19 nt, Homo sapiens
  misc_RNA (1)...(19): siRNA sense strand
ccuggaagcucagugguua

SEQ ID NO: 287467 - RNA, 19 nt, Homo sapiens
  misc_RNA (1)...(19): siRNA sense strand
cgaaaugucacuacuaaga

SEQ ID NO: 287468 - RNA, 19 nt, Homo sapiens
  misc_RNA (1)...(19): siRNA sense strand
gcugaugaccuuaugagua

SEQ ID NO: 287469 - RNA, 19 nt, Homo sapiens
  misc_RNA (1)...(19): siRNA sense strand
aaaggaagcacaaagauug

SEQ ID NO: 287470 - RNA, 19 nt, Homo sapiens
  misc_RNA (1)...(19): siRNA sense strand
caagugaggaugaugauga

SEQ ID NO: 287471 - RNA, 19 nt, Homo sapiens
  misc_RNA (1)...(19): siRNA sense strand
aaucagauguggaagaaga

SEQ ID NO: 287472 - RNA, 19 nt, Homo sapiens
  misc_RNA (1)...(19): siRNA sense strand
aaacacagcgauuucuuaa

SEQ ID NO: 287473 - RNA, 19 nt, Homo sapiens
  misc_RNA (1)...(19): siRNA sense strand
uaacuucauuccagaacaa

SEQ ID NO: 287474 - RNA, 19 nt, Homo sapiens
  misc_RNA (1)...(19): siRNA sense strand
ugaaucagauguggaagaa

SEQ ID NO: 287475 - RNA, 19 nt, Homo sapiens
  misc_RNA (1)...(19): siRNA sense strand
cugaugaccuuaugaguau

SEQ ID NO: 287476 - RNA, 19 nt, Homo sapiens
  misc_RNA (1)...(19): siRNA sense strand
ugagguagaugaaucagau

SEQ ID NO: 287477 - RNA, 19 nt, Homo sapiens
  misc_RNA (1)...(19): siRNA sense strand
gaaaugauacguuuguaac

SEQ ID NO: 287478 - RNA, 19 nt, Homo sapiens
  misc_RNA (1)...(19): siRNA sense strand
gaaagggguugauuuugaa

SEQ ID NO: 287479 - RNA, 19 nt, Homo sapiens
  misc_RNA (1)...(19): siRNA sense strand
cccgaaaugucacuacuaa

SEQ ID NO: 287480 - RNA, 19 nt, Homo sapiens
  misc_RNA (1)...(19): siRNA sense strand
uggagaagauugaagaaau

SEQ ID NO: 287481 - RNA, 19 nt, Homo sapiens
  misc_RNA (1)...(19): siRNA sense strand
uaacccagauaauccuaaa

SEQ ID NO: 287482 - RNA, 19 nt, Homo sapiens
  misc_RNA (1)...(19): siRNA sense strand
gaacaacuuuaaggguaga

SEQ ID NO: 287483 - RNA, 19 nt, Homo sapiens
  misc_RNA (1)...(19): siRNA sense strand
gaacagauggcuaaugacu

SEQ ID NO: 287484 - RNA, 19 nt, Homo sapiens
  misc_RNA (1)...(19): siRNA sense strand
cgaaagggguugauuuuga

SEQ ID NO: 287485 - RNA, 19 nt, Homo sapiens
  misc_RNA (1)...(19): siRNA sense strand
gaaaauaagcccucaagga

SEQ ID NO: 287486 - RNA, 19 nt, Homo sapiens
  misc_RNA (1)...(19): siRNA sense strand
gauagcaucucagcagcaa

SEQ ID NO: 287487 - RNA, 19 nt, Homo sapiens
  misc_RNA (1)...(19): siRNA sense strand
gugaagcaguacaagaauu

SEQ ID NO: 287488 - RNA, 19 nt, Homo sapiens
  misc_RNA (1)...(19): siRNA sense strand
ucagaaggaacaacuuuaa

SEQ ID NO: 287489 - RNA, 19 nt, Homo sapiens
  misc_RNA (1)...(19): siRNA sense strand
gggaacgucuggguaauuc

SEQ ID NO: 287490 - RNA, 19 nt, Homo sapiens
  misc_RNA (1)...(19): siRNA sense strand
caaaaucgaugaggaggua

SEQ ID NO: 287491 - RNA, 19 nt, Homo sapiens
  misc_RNA (1)...(19): siRNA sense strand
gaucaacuuugggaaacuu

SEQ ID NO: 287492 - RNA, 19 nt, Homo sapiens
  misc_RNA (1)...(19): siRNA sense strand
uaggauccauuccagauga

SEQ ID NO: 287493 - RNA, 19 nt, Homo sapiens
  misc_RNA (1)...(19): siRNA sense strand
gaagauugaagaaaugcuu

SEQ ID NO: 287494 - RNA, 19 nt, Homo sapiens
  misc_RNA (1)...(19): siRNA sense strand
uugggaaacuuaucacaaa

SEQ ID NO: 287495 - RNA, 19 nt, Homo sapiens
  misc_RNA (1)...(19): siRNA sense strand
ccagagcacucagaucuca

SEQ ID NO: 287496 - RNA, 19 nt, Homo sapiens
  misc_RNA (1)...(19): siRNA sense strand
ugaagcaguacaagaauuu

SEQ ID NO: 287497 - RNA, 19 nt, Homo sapiens
  misc_RNA (1)...(19): siRNA sense strand
ucaauuccaguguuuagua

SEQ ID NO: 287498 - RNA, 19 nt, Homo sapiens
  misc_RNA (1)...(19): siRNA sense strand
gaccuuaugaguauagauu

SEQ ID NO: 287499 - RNA, 19 nt, Homo sapiens
  misc_RNA (1)...(19): siRNA sense strand
ugacuucauugaucuuguu

SEQ ID NO: 287500 - RNA, 19 nt, Homo sapiens
  misc_RNA (1)...(19): siRNA sense strand
agauugcgcuauaugguuu

SEQ ID NO: 287501 - RNA, 19 nt, Homo sapiens
  misc_RNA (1)...(19): siRNA sense strand
caauuccaguguuuaguau

SEQ ID NO: 287502 - RNA, 19 nt, Homo sapiens
  misc_RNA (1)...(19): siRNA sense strand
ucauugaucuuguuaucug

SEQ ID NO: 287503 - RNA, 19 nt, Homo sapiens
  misc_RNA (1)...(19): siRNA sense strand
gacagcagccuucccgaaa

SEQ ID NO: 287504 - RNA, 19 nt, Homo sapiens
  misc_RNA (1)...(19): siRNA sense strand
ggauauuguucuagcuaau

SEQ ID NO: 287505 - RNA, 19 nt, Homo sapiens
  misc_RNA (1)...(19): siRNA sense strand
aaagggaggaagaugaaua

SEQ ID NO: 287506 - RNA, 19 nt, Homo sapiens
  misc_RNA (1)...(19): siRNA sense strand
caggagaagcuguaaagaa

SEQ ID NO: 287507 - RNA, 19 nt, Homo sapiens
  misc_RNA (1)...(19): siRNA sense strand
gcucagugguuacuucucu

SEQ ID NO: 287508 - RNA, 19 nt, Homo sapiens
  misc_RNA (1)...(19): siRNA sense strand
ggagaagagaucaacuuug

SEQ ID NO: 287509 - RNA, 19 nt, Homo sapiens
  misc_RNA (1)...(19): siRNA sense strand
cauggaggauauuguucua

SEQ ID NO: 287510 - RNA, 19 nt, Homo sapiens
  misc_RNA (1)...(19): siRNA sense strand
caaugucuguggagaagau

SEQ ID NO: 287511 - RNA, 19 nt, Homo sapiens
  misc_RNA (1)...(19): siRNA sense strand
cagcagccuucccgaaaug

SEQ ID NO: 287512 - RNA, 19 nt, Homo sapiens
  misc_RNA (1)...(19): siRNA sense strand
gaggauauuguucuagcua

SEQ ID NO: 287513 - RNA, 19 nt, Homo sapiens
  misc_RNA (1)...(19): siRNA sense strand
gaggaaaugauacguuugu

SEQ ID NO: 287514 - RNA, 19 nt, Homo sapiens
  misc_RNA (1)...(19): siRNA sense strand
gaaauucucagugaucagu

SEQ ID NO: 287515 - RNA, 19 nt, Homo sapiens
  misc_RNA (1)...(19): siRNA sense strand
acagauggcuaaugacucu

SEQ ID NO: 287516 - RNA, 19 nt, Homo sapiens
  misc_RNA (1)...(19): siRNA sense strand
gggugaagcaguacaagaa

SEQ ID NO: 287517 - RNA, 19 nt, Homo sapiens
  misc_RNA (1)...(19): siRNA sense strand
gagaucaacuuugggaaac

SEQ ID NO: 287518 - RNA, 19 nt, Homo sapiens
  misc_RNA (1)...(19): siRNA sense strand
guaaagaaacauguugguu

SEQ ID NO: 287519 - RNA, 19 nt, Homo sapiens
  misc_RNA (1)...(19): siRNA sense strand
gaccaaaggaagaugagaa

SEQ ID NO: 287520 - RNA, 19 nt, Homo sapiens
  misc_RNA (1)...(19): siRNA sense strand
ugaucggccuguccaguuu

SEQ ID NO: 287521 - RNA, 19 nt, Homo sapiens
  misc_RNA (1)...(19): siRNA sense strand
guauagauuuagcagaaca

SEQ ID NO: 287522 - RNA, 19 nt, Homo sapiens
  misc_RNA (1)...(19): siRNA sense strand
agggaugggugaagcagua

SEQ ID NO: 287523 - RNA, 19 nt, Homo sapiens
  misc_RNA (1)...(19): siRNA sense strand
aaaggaagaugagaacucu

SEQ ID NO: 287524 - RNA, 19 nt, Homo sapiens
  misc_RNA (1)...(19): siRNA sense strand
uggagaagauagacauuag

SEQ ID NO: 287525 - RNA, 19 nt, Homo sapiens
  misc_RNA (1)...(19): siRNA sense strand
cauuucaauuccaguguuu

SEQ ID NO: 287526 - RNA, 19 nt, Homo sapiens
  misc_RNA (1)...(19): siRNA sense strand
caaaggugguccagcacau

SEQ ID NO: 287527 - RNA, 19 nt, Homo sapiens
  misc_RNA (1)...(19): siRNA sense strand
auaccugccucgaguuauu

SEQ ID NO: 287528 - RNA, 19 nt, Homo sapiens
  misc_RNA (1)...(19): siRNA sense strand
gaagaaaugcuugaaaaug

SEQ ID NO: 287529 - RNA, 19 nt, Homo sapiens
  misc_RNA (1)...(19): siRNA sense strand
gagaagauagacauuaguc

SEQ ID NO: 287530 - RNA, 19 nt, Homo sapiens
  misc_RNA (1)...(19): siRNA sense strand
guaaacauggaaguacuaa

SEQ ID NO: 287531 - RNA, 19 nt, Homo sapiens
  misc_RNA (1)...(19): siRNA sense strand
gguggaagagggcagaauu

SEQ ID NO: 287532 - RNA, 19 nt, Homo sapiens
  misc_RNA (1)...(19): siRNA sense strand
ucauauugaugcccucgaa

SEQ ID NO: 287533 - RNA, 19 nt, Homo sapiens
  misc_RNA (1)...(19): siRNA sense strand
aaauaagcccucaaggaaa

SEQ ID NO: 287534 - RNA, 19 nt, Homo sapiens
  misc_RNA (1)...(19): siRNA sense strand
gcacaaagauugcgcuaua

SEQ ID NO: 287535 - RNA, 19 nt, Homo sapiens
  misc_RNA (1)...(19): siRNA sense strand
gaugagaacucuugguuua

SEQ ID NO: 287536 - RNA, 19 nt, Homo sapiens
  misc_RNA (1)...(19): siRNA sense strand
ggagaaagaugcagucaga

SEQ ID NO: 287537 - RNA, 19 nt, Homo sapiens
  misc_RNA (1)...(19): siRNA sense strand
gaaaggcucuaucgaaugu

SEQ ID NO: 287538 - RNA, 19 nt, Homo sapiens
  misc_RNA (1)...(19): siRNA sense strand
gagaagagaucaacuuugg

SEQ ID NO: 287539 - RNA, 19 nt, Homo sapiens
  misc_RNA (1)...(19): siRNA sense strand
gcuaaugacucugaugaua

SEQ ID NO: 287540 - RNA, 19 nt, Homo sapiens
  misc_RNA (1)...(19): siRNA sense strand
gaguauagauuuagcagaa

SEQ ID NO: 287541 - RNA, 19 nt, Homo sapiens
  misc_RNA (1)...(19): siRNA sense strand
cagaacagauggcuaauga

SEQ ID NO: 287542 - RNA, 19 nt, Homo sapiens
  misc_RNA (1)...(19): siRNA sense strand
uaaaguaacccaagccaua

SEQ ID NO: 287543 - RNA, 19 nt, Homo sapiens
  misc_RNA (1)...(19): siRNA sense strand
uaaaauagcuccaaccaaa

SEQ ID NO: 287544 - RNA, 19 nt, Homo sapiens
  misc_RNA (1)...(19): siRNA sense strand
gaacaggaguaaacaugga

SEQ ID NO: 287545 - RNA, 19 nt, Homo sapiens
  misc_RNA (1)...(19): siRNA sense strand
ggagaagauugaagaaaug

SEQ ID NO: 287546 - RNA, 19 nt, Homo sapiens
  misc_RNA (1)...(19): siRNA sense strand
guaaaucacuuuggacguu

SEQ ID NO: 287547 - RNA, 19 nt, Homo sapiens
  misc_RNA (1)...(19): siRNA sense strand
ggagguacgucguuucaga

SEQ ID NO: 287548 - RNA, 19 nt, Homo sapiens
  misc_RNA (1)...(19): siRNA sense strand
ggaggaagaugaauaugca

SEQ ID NO: 287549 - RNA, 19 nt, Homo sapiens
  misc_RNA (1)...(19): siRNA sense strand
cagaggaaaugauacguuu

SEQ ID NO: 287550 - RNA, 19 nt, Homo sapiens
  misc_RNA (1)...(19): siRNA sense strand
gaacaugaguguaaaauag

SEQ ID NO: 287551 - RNA, 19 nt, Homo sapiens
  misc_RNA (1)...(19): siRNA sense strand
cagaugcacuugaugauga

SEQ ID NO: 287552 - RNA, 19 nt, Homo sapiens
  misc_RNA (1)...(19): siRNA sense strand
aggagaagcuguaaagaaa

SEQ ID NO: 287553 - RNA, 19 nt, Homo sapiens
  misc_RNA (1)...(19): siRNA sense strand
ugaagaagaugaugaaguc

SEQ ID NO: 287554 - RNA, 19 nt, Homo sapiens
  misc_RNA (1)...(19): siRNA sense strand
gcagucagaggaaaugaua

SEQ ID NO: 287555 - RNA, 19 nt, Homo sapiens
  misc_RNA (1)...(19): siRNA sense strand
ggagucugcuucugccuuu

SEQ ID NO: 287556 - RNA, 19 nt, Homo sapiens
  misc_RNA (1)...(19): siRNA sense strand
gaugaaaggcucuaucgaa

SEQ ID NO: 287557 - RNA, 19 nt, Homo sapiens
  misc_RNA (1)...(19): siRNA sense strand
ggaaaugauacguuuguaa

SEQ ID NO: 287558 - RNA, 19 nt, Homo sapiens
  misc_RNA (1)...(19): siRNA sense strand
gguagaagaucuuguaaaa

SEQ ID NO: 287559 - RNA, 19 nt, Homo sapiens
  misc_RNA (1)...(19): siRNA sense strand
gaaaugucacuacuaagaa

SEQ ID NO: 287560 - RNA, 19 nt, Homo sapiens
  misc_RNA (1)...(19): siRNA sense strand
gaacucuugguuuaacuua

SEQ ID NO: 287561 - RNA, 19 nt, Homo sapiens
  misc_RNA (1)...(19): siRNA sense strand
ggaagaugaauaugcauaa

SEQ ID NO: 287562 - RNA, 19 nt, Homo sapiens
  misc_RNA (1)...(19): siRNA sense strand
gagaagcuguaaagaaaca

SEQ ID NO: 287563 - RNA, 19 nt, Homo sapiens
  misc_RNA (1)...(19): siRNA sense strand
acacagcgauuucuuaaag

SEQ ID NO: 287564 - RNA, 19 nt, Homo sapiens
  misc_RNA (1)...(19): siRNA sense strand
gauggcaaccucaacauuu

SEQ ID NO: 287565 - RNA, 19 nt, Homo sapiens
  misc_RNA (1)...(19): siRNA sense strand
ccagauaauccuaaaguaa

SEQ ID NO: 287566 - RNA, 19 nt, Homo sapiens
  misc_RNA (1)...(19): siRNA sense strand
ccuggaagcucagugguua

SEQ ID NO: 287567 - RNA, 19 nt, Homo sapiens
  misc_RNA (1)...(19): siRNA sense strand
cgaaaugucacuacuaaga

SEQ ID NO: 287568 - RNA, 19 nt, Homo sapiens
  misc_RNA (1)...(19): siRNA sense strand
gcugaugaccuuaugagua

SEQ ID NO: 287569 - RNA, 19 nt, Homo sapiens
  misc_RNA (1)...(19): siRNA sense strand
aaaggaagcacaaagauug

SEQ ID NO: 287570 - RNA, 19 nt, Homo sapiens
  misc_RNA (1)...(19): siRNA sense strand
caagugaggaugaugauga

SEQ ID NO: 287571 - RNA, 19 nt, Homo sapiens
  misc_RNA (1)...(19): siRNA sense strand
aaucagauguggaagaaga

SEQ ID NO: 287572 - RNA, 19 nt, Homo sapiens
  misc_RNA (1)...(19): siRNA sense strand
aaacacagcgauuucuuaa

SEQ ID NO: 287573 - RNA, 19 nt, Homo sapiens
  misc_RNA (1)...(19): siRNA sense strand
uaacuucauuccagaacaa

SEQ ID NO: 287574 - RNA, 19 nt, Homo sapiens
  misc_RNA (1)...(19): siRNA sense strand
ugaaucagauguggaagaa

SEQ ID NO: 287575 - RNA, 19 nt, Homo sapiens
  misc_RNA (1)...(19): siRNA sense strand
cugaugaccuuaugaguau

SEQ ID NO: 287576 - RNA, 19 nt, Homo sapiens
  misc_RNA (1)...(19): siRNA sense strand
ugagguagaugaaucagau

SEQ ID NO: 287577 - RNA, 19 nt, Homo sapiens
  misc_RNA (1)...(19): siRNA sense strand
gaaaugauacguuuguaac

SEQ ID NO: 287578 - RNA, 19 nt, Homo sapiens
  misc_RNA (1)...(19): siRNA sense strand
gaaagggguugauuuugaa

SEQ ID NO: 287579 - RNA, 19 nt, Homo sapiens
  misc_RNA (1)...(19): siRNA sense strand
cccgaaaugucacuacuaa

SEQ ID NO: 287580 - RNA, 19 nt, Homo sapiens
  misc_RNA (1)...(19): siRNA sense strand
uggagaagauugaagaaau

SEQ ID NO: 287581 - RNA, 19 nt, Homo sapiens
  misc_RNA (1)...(19): siRNA sense strand
uaacccagauaauccuaaa

SEQ ID NO: 287582 - RNA, 19 nt, Homo sapiens
  misc_RNA (1)...(19): siRNA sense strand
gaacaacuuuaaggguaga

SEQ ID NO: 287583 - RNA, 19 nt, Homo sapiens
  misc_RNA (1)...(19): siRNA sense strand
gaacagauggcuaaugacu

SEQ ID NO: 287584 - RNA, 19 nt, Homo sapiens
  misc_RNA (1)...(19): siRNA sense strand
cgaaagggguugauuuuga

SEQ ID NO: 287585 - RNA, 19 nt, Homo sapiens
  misc_RNA (1)...(19): siRNA sense strand
gaaaauaagcccucaagga

SEQ ID NO: 287586 - RNA, 19 nt, Homo sapiens
  misc_RNA (1)...(19): siRNA sense strand
gauagcaucucagcagcaa

SEQ ID NO: 287587 - RNA, 19 nt, Homo sapiens
  misc_RNA (1)...(19): siRNA sense strand
gugaagcaguacaagaauu

SEQ ID NO: 287588 - RNA, 19 nt, Homo sapiens
  misc_RNA (1)...(19): siRNA sense strand
ucagaaggaacaacuuuaa

SEQ ID NO: 287589 - RNA, 19 nt, Homo sapiens
  misc_RNA (1)...(19): siRNA sense strand
gggaacgucuggguaauuc

SEQ ID NO: 287590 - RNA, 19 nt, Homo sapiens
  misc_RNA (1)...(19): siRNA sense strand
caaaaucgaugaggaggua

SEQ ID NO: 287591 - RNA, 19 nt, Homo sapiens
  misc_RNA (1)...(19): siRNA sense strand
gaucaacuuugggaaacuu

SEQ ID NO: 287592 - RNA, 19 nt, Homo sapiens
  misc_RNA (1)...(19): siRNA sense strand
uaggauccauuccagauga

SEQ ID NO: 287593 - RNA, 19 nt, Homo sapiens
  misc_RNA (1)...(19): siRNA sense strand
gaagauugaagaaaugcuu

SEQ ID NO: 287594 - RNA, 19 nt, Homo sapiens
  misc_RNA (1)...(19): siRNA sense strand
uugggaaacuuaucacaaa

SEQ ID NO: 287595 - RNA, 19 nt, Homo sapiens
  misc_RNA (1)...(19): siRNA sense strand
ccagagcacucagaucuca

SEQ ID NO: 287596 - RNA, 19 nt, Homo sapiens
  misc_RNA (1)...(19): siRNA sense strand
ugaagcaguacaagaauuu

SEQ ID NO: 287597 - RNA, 19 nt, Homo sapiens
  misc_RNA (1)...(19): siRNA sense strand
ucaauuccaguguuuagua

SEQ ID NO: 287598 - RNA, 19 nt, Homo sapiens
  misc_RNA (1)...(19): siRNA sense strand
gaccuuaugaguauagauu

SEQ ID NO: 287599 - RNA, 19 nt, Homo sapiens
  misc_RNA (1)...(19): siRNA sense strand
ugacuucauugaucuuguu

SEQ ID NO: 287600 - RNA, 19 nt, Homo sapiens
  misc_RNA (1)...(19): siRNA sense strand
agauugcgcuauaugguuu

SEQ ID NO: 287601 - RNA, 19 nt, Homo sapiens
  misc_RNA (1)...(19): siRNA sense strand
caauuccaguguuuaguau

SEQ ID NO: 287602 - RNA, 19 nt, Homo sapiens
  misc_RNA (1)...(19): siRNA sense strand
ucauugaucuuguuaucug

SEQ ID NO: 287603 - RNA, 19 nt, Homo sapiens
  misc_RNA (1)...(19): siRNA sense strand
gacagcagccuucccgaaa

SEQ ID NO: 287604 - RNA, 19 nt, Homo sapiens
  misc_RNA (1)...(19): siRNA sense strand
ggauauuguucuagcuaau

SEQ ID NO: 287605 - RNA, 19 nt, Homo sapiens
  misc_RNA (1)...(19): siRNA sense strand
aaagggaggaagaugaaua

SEQ ID NO: 287606 - RNA, 19 nt, Homo sapiens
  misc_RNA (1)...(19): siRNA sense strand
caggagaagcuguaaagaa

SEQ ID NO: 287607 - RNA, 19 nt, Homo sapiens
  misc_RNA (1)...(19): siRNA sense strand
gcucagugguuacuucucu

SEQ ID NO: 287608 - RNA, 19 nt, Homo sapiens
  misc_RNA (1)...(19): siRNA sense strand
ggagaagagaucaacuuug

SEQ ID NO: 287609 - RNA, 19 nt, Homo sapiens
  misc_RNA (1)...(19): siRNA sense strand
cauggaggauauuguucua

SEQ ID NO: 287610 - RNA, 19 nt, Homo sapiens
  misc_RNA (1)...(19): siRNA sense strand
caaugucuguggagaagau

SEQ ID NO: 287611 - RNA, 19 nt, Homo sapiens
  misc_RNA (1)...(19): siRNA sense strand
cagcagccuucccgaaaug

SEQ ID NO: 287612 - RNA, 19 nt, Homo sapiens
  misc_RNA (1)...(19): siRNA sense strand
gaggauauuguucuagcua

SEQ ID NO: 287613 - RNA, 19 nt, Homo sapiens
  misc_RNA (1)...(19): siRNA sense strand
gaggaaaugauacguuugu

SEQ ID NO: 287614 - RNA, 19 nt, Homo sapiens
  misc_RNA (1)...(19): siRNA sense strand
gaaauucucagugaucagu

SEQ ID NO: 287615 - RNA, 19 nt, Homo sapiens
  misc_RNA (1)...(19): siRNA sense strand
acagauggcuaaugacucu

SEQ ID NO: 287616 - RNA, 19 nt, Homo sapiens
  misc_RNA (1)...(19): siRNA sense strand
gggugaagcaguacaagaa

SEQ ID NO: 287617 - RNA, 19 nt, Homo sapiens
  misc_RNA (1)...(19): siRNA sense strand
gagaucaacuuugggaaac

SEQ ID NO: 287618 - RNA, 19 nt, Homo sapiens
  misc_RNA (1)...(19): siRNA sense strand
guaaagaaacauguugguu

SEQ ID NO: 287619 - RNA, 19 nt, Homo sapiens
  misc_RNA (1)...(19): siRNA sense strand
gaccaaaggaagaugagaa

SEQ ID NO: 287620 - RNA, 19 nt, Homo sapiens
  misc_RNA (1)...(19): siRNA sense strand
ugaucggccuguccaguuu

SEQ ID NO: 287621 - RNA, 19 nt, Homo sapiens
  misc_RNA (1)...(19): siRNA sense strand
guauagauuuagcagaaca

SEQ ID NO: 287622 - RNA, 19 nt, Homo sapiens
  misc_RNA (1)...(19): siRNA sense strand
agggaugggugaagcagua

SEQ ID NO: 287623 - RNA, 19 nt, Homo sapiens
  misc_RNA (1)...(19): siRNA sense strand
aaaggaagaugagaacucu

SEQ ID NO: 287624 - RNA, 19 nt, Homo sapiens
  misc_RNA (1)...(19): siRNA sense strand
uggagaagauagacauuag

SEQ ID NO: 287625 - RNA, 19 nt, Homo sapiens
  misc_RNA (1)...(19): siRNA sense strand
cauuucaauuccaguguuu

SEQ ID NO: 287626 - RNA, 19 nt, Homo sapiens
  misc_RNA (1)...(19): siRNA sense strand
caaaggugguccagcacau

SEQ ID NO: 287627 - RNA, 19 nt, Homo sapiens
  misc_RNA (1)...(19): siRNA sense strand
auaccugccucgaguuauu

SEQ ID NO: 287628 - RNA, 19 nt, Homo sapiens
  misc_RNA (1)...(19): siRNA sense strand
gaagaaaugcuugaaaaug

SEQ ID NO: 287629 - RNA, 19 nt, Homo sapiens
  misc_RNA (1)...(19): siRNA sense strand
gagaagauagacauuaguc

SEQ ID NO: 287630 - RNA, 19 nt, Homo sapiens
  misc_RNA (1)...(19): siRNA sense strand
guaaacauggaaguacuaa

SEQ ID NO: 287631 - RNA, 19 nt, Homo sapiens
  misc_RNA (1)...(19): siRNA sense strand
gguggaagagggcagaauu

SEQ ID NO: 287632 - RNA, 19 nt, Homo sapiens
  misc_RNA (1)...(19): siRNA sense strand
ucauauugaugcccucgaa

SEQ ID NO: 287633 - RNA, 19 nt, Homo sapiens
  misc_RNA (1)...(19): siRNA sense strand
aaauaagcccucaaggaaa

SEQ ID NO: 287634 - RNA, 19 nt, Homo sapiens
  misc_RNA (1)...(19): siRNA sense strand
gcacaaagauugcgcuaua

SEQ ID NO: 287635 - RNA, 19 nt, Homo sapiens
  misc_RNA (1)...(19): siRNA sense strand
gaugagaacucuugguuua

SEQ ID NO: 287636 - RNA, 19 nt, Homo sapiens
  misc_RNA (1)...(19): siRNA sense strand
ggagaaagaugcagucaga

SEQ ID NO: 287637 - RNA, 19 nt, Homo sapiens
  misc_RNA (1)...(19): siRNA sense strand
gaaaggcucuaucgaaugu

SEQ ID NO: 287638 - RNA, 19 nt, Homo sapiens
  misc_RNA (1)...(19): siRNA sense strand
gagaagagaucaacuuugg

SEQ ID NO: 287639 - RNA, 19 nt, Homo sapiens
  misc_RNA (1)...(19): siRNA sense strand
gcuaaugacucugaugaua

SEQ ID NO: 287640 - RNA, 19 nt, Homo sapiens
  misc_RNA (1)...(19): siRNA sense strand
gaguauagauuuagcagaa

SEQ ID NO: 287641 - RNA, 19 nt, Homo sapiens
  misc_RNA (1)...(19): siRNA sense strand
cagaacagauggcuaauga

SEQ ID NO: 287642 - RNA, 19 nt, Homo sapiens
  misc_RNA (1)...(19): siRNA sense strand
uaaaguaacccaagccaua

SEQ ID NO: 287643 - RNA, 19 nt, Homo sapiens
  misc_RNA (1)...(19): siRNA sense strand
uaaaauagcuccaaccaaa

SEQ ID NO: 287644 - RNA, 19 nt, Homo sapiens
  misc_RNA (1)...(19): siRNA sense strand
gaacaggaguaaacaugga

SEQ ID NO: 287645 - RNA, 19 nt, Homo sapiens
  misc_RNA (1)...(19): siRNA sense strand
ggagaagauugaagaaaug

SEQ ID NO: 287646 - RNA, 19 nt, Homo sapiens
  misc_RNA (1)...(19): siRNA sense strand
guaaaucacuuuggacguu

SEQ ID NO: 287647 - RNA, 19 nt, Homo sapiens
  misc_RNA (1)...(19): siRNA sense strand
ggagguacgucguuucaga

SEQ ID NO: 287648 - RNA, 19 nt, Homo sapiens
  misc_RNA (1)...(19): siRNA sense strand
ggaggaagaugaauaugca

SEQ ID NO: 287649 - RNA, 19 nt, Homo sapiens
  misc_RNA (1)...(19): siRNA sense strand
cagaggaaaugauacguuu

SEQ ID NO: 287650 - RNA, 19 nt, Homo sapiens
  misc_RNA (1)...(19): siRNA sense strand
gaacaugaguguaaaauag

SEQ ID NO: 287651 - RNA, 19 nt, Homo sapiens
  misc_RNA (1)...(19): siRNA sense strand
cagaugcacuugaugauga

SEQ ID NO: 287652 - RNA, 19 nt, Homo sapiens
  misc_RNA (1)...(19): siRNA sense strand
aggagaagcuguaaagaaa

SEQ ID NO: 287653 - RNA, 19 nt, Homo sapiens
  misc_RNA (1)...(19): siRNA sense strand
ugaagaagaugaugaaguc

SEQ ID NO: 287654 - RNA, 19 nt, Homo sapiens
  misc_RNA (1)...(19): siRNA sense strand
gcagucagaggaaaugaua

SEQ ID NO: 287655 - RNA, 19 nt, Homo sapiens
  misc_RNA (1)...(19): siRNA sense strand
ggagucugcuucugccuuu

SEQ ID NO: 287656 - RNA, 19 nt, Homo sapiens
  misc_RNA (1)...(19): siRNA sense strand
gaugaaaggcucuaucgaa

SEQ ID NO: 287657 - RNA, 19 nt, Homo sapiens
  misc_RNA (1)...(19): siRNA sense strand
ggaaaugauacguuuguaa

SEQ ID NO: 287658 - RNA, 19 nt, Homo sapiens
  misc_RNA (1)...(19): siRNA sense strand
gguagaagaucuuguaaaa

SEQ ID NO: 287659 - RNA, 19 nt, Homo sapiens
  misc_RNA (1)...(19): siRNA sense strand
gaaaugucacuacuaagaa

SEQ ID NO: 287660 - RNA, 19 nt, Homo sapiens
  misc_RNA (1)...(19): siRNA sense strand
gaacucuugguuuaacuua

SEQ ID NO: 287661 - RNA, 19 nt, Homo sapiens
  misc_RNA (1)...(19): siRNA sense strand
ggaagaugaauaugcauaa

SEQ ID NO: 287662 - RNA, 19 nt, Homo sapiens
  misc_RNA (1)...(19): siRNA sense strand
gagaagcuguaaagaaaca

SEQ ID NO: 287663 - RNA, 19 nt, Homo sapiens
  misc_RNA (1)...(19): siRNA sense strand
acacagcgauuucuuaaag

SEQ ID NO: 287664 - RNA, 19 nt, Homo sapiens
  misc_RNA (1)...(19): siRNA sense strand
gauggcaaccucaacauuu

SEQ ID NO: 287665 - RNA, 19 nt, Homo sapiens
  misc_RNA (1)...(19): siRNA sense strand
ccagauaauccuaaaguaa

SEQ ID NO: 287666 - RNA, 19 nt, Homo sapiens
  misc_RNA (1)...(19): siRNA sense strand
ccuggaagcucagugguua

SEQ ID NO: 287667 - RNA, 19 nt, Homo sapiens
  misc_RNA (1)...(19): siRNA sense strand
cgaaaugucacuacuaaga

SEQ ID NO: 287668 - RNA, 19 nt, Homo sapiens
  misc_RNA (1)...(19): siRNA sense strand
gcugaugaccuuaugagua

SEQ ID NO: 287669 - RNA, 19 nt, Homo sapiens
  misc_RNA (1)...(19): siRNA sense strand
aaaggaagcacaaagauug

SEQ ID NO: 287670 - RNA, 19 nt, Homo sapiens
  misc_RNA (1)...(19): siRNA sense strand
caagugaggaugaugauga

SEQ ID NO: 287671 - RNA, 19 nt, Homo sapiens
  misc_RNA (1)...(19): siRNA sense strand
aaucagauguggaagaaga

SEQ ID NO: 287672 - RNA, 19 nt, Homo sapiens
  misc_RNA (1)...(19): siRNA sense strand
aaacacagcgauuucuuaa

SEQ ID NO: 287673 - RNA, 19 nt, Homo sapiens
  misc_RNA (1)...(19): siRNA sense strand
uaacuucauuccagaacaa

SEQ ID NO: 287674 - RNA, 19 nt, Homo sapiens
  misc_RNA (1)...(19): siRNA sense strand
ugaaucagauguggaagaa

SEQ ID NO: 287675 - RNA, 19 nt, Homo sapiens
  misc_RNA (1)...(19): siRNA sense strand
cugaugaccuuaugaguau

SEQ ID NO: 287676 - RNA, 19 nt, Homo sapiens
  misc_RNA (1)...(19): siRNA sense strand
ugagguagaugaaucagau

SEQ ID NO: 287677 - RNA, 19 nt, Homo sapiens
  misc_RNA (1)...(19): siRNA sense strand
gaaaugauacguuuguaac

SEQ ID NO: 287678 - RNA, 19 nt, Homo sapiens
  misc_RNA (1)...(19): siRNA sense strand
gaaagggguugauuuugaa

SEQ ID NO: 287679 - RNA, 19 nt, Homo sapiens
  misc_RNA (1)...(19): siRNA sense strand
cccgaaaugucacuacuaa

SEQ ID NO: 287680 - RNA, 19 nt, Homo sapiens
  misc_RNA (1)...(19): siRNA sense strand
uggagaagauugaagaaau

SEQ ID NO: 287681 - RNA, 19 nt, Homo sapiens
  misc_RNA (1)...(19): siRNA sense strand
uaacccagauaauccuaaa

SEQ ID NO: 287682 - RNA, 19 nt, Homo sapiens
  misc_RNA (1)...(19): siRNA sense strand
gaacaacuuuaaggguaga

SEQ ID NO: 287683 - RNA, 19 nt, Homo sapiens
  misc_RNA (1)...(19): siRNA sense strand
gaacagauggcuaaugacu

SEQ ID NO: 287684 - RNA, 19 nt, Homo sapiens
  misc_RNA (1)...(19): siRNA sense strand
cgaaagggguugauuuuga

SEQ ID NO: 287685 - RNA, 19 nt, Homo sapiens
  misc_RNA (1)...(19): siRNA sense strand
gaaaauaagcccucaagga

SEQ ID NO: 287686 - RNA, 19 nt, Homo sapiens
  misc_RNA (1)...(19): siRNA sense strand
gauagcaucucagcagcaa

SEQ ID NO: 287687 - RNA, 19 nt, Homo sapiens
  misc_RNA (1)...(19): siRNA sense strand
gugaagcaguacaagaauu

SEQ ID NO: 287688 - RNA, 19 nt, Homo sapiens
  misc_RNA (1)...(19): siRNA sense strand
ucagaaggaacaacuuuaa

SEQ ID NO: 287689 - RNA, 19 nt, Homo sapiens
  misc_RNA (1)...(19): siRNA sense strand
gggaacgucuggguaauuc

SEQ ID NO: 287690 - RNA, 19 nt, Homo sapiens
  misc_RNA (1)...(19): siRNA sense strand
caaaaucgaugaggaggua

SEQ ID NO: 287691 - RNA, 19 nt, Homo sapiens
  misc_RNA (1)...(19): siRNA sense strand
gaucaacuuugggaaacuu

SEQ ID NO: 287692 - RNA, 19 nt, Homo sapiens
  misc_RNA (1)...(19): siRNA sense strand
uaggauccauuccagauga

SEQ ID NO: 287693 - RNA, 19 nt, Homo sapiens
  misc_RNA (1)...(19): siRNA sense strand
gaagauugaagaaaugcuu

SEQ ID NO: 287694 - RNA, 19 nt, Homo sapiens
  misc_RNA (1)...(19): siRNA sense strand
uugggaaacuuaucacaaa

SEQ ID NO: 287695 - RNA, 19 nt, Homo sapiens
  misc_RNA (1)...(19): siRNA sense strand
ccagagcacucagaucuca

SEQ ID NO: 287696 - RNA, 19 nt, Homo sapiens
  misc_RNA (1)...(19): siRNA sense strand
ugaagcaguacaagaauuu

SEQ ID NO: 287697 - RNA, 19 nt, Homo sapiens
  misc_RNA (1)...(19): siRNA sense strand
ucaauuccaguguuuagua

SEQ ID NO: 287698 - RNA, 19 nt, Homo sapiens
  misc_RNA (1)...(19): siRNA sense strand
gaccuuaugaguauagauu

SEQ ID NO: 287699 - RNA, 19 nt, Homo sapiens
  misc_RNA (1)...(19): siRNA sense strand
ugacuucauugaucuuguu

SEQ ID NO: 287700 - RNA, 19 nt, Homo sapiens
  misc_RNA (1)...(19): siRNA sense strand
agauugcgcuauaugguuu

SEQ ID NO: 287701 - RNA, 19 nt, Homo sapiens
  misc_RNA (1)...(19): siRNA sense strand
caauuccaguguuuaguau

SEQ ID NO: 287702 - RNA, 19 nt, Homo sapiens
  misc_RNA (1)...(19): siRNA sense strand
ucauugaucuuguuaucug

SEQ ID NO: 287703 - RNA, 19 nt, Homo sapiens
  misc_RNA (1)...(19): siRNA sense strand
gacagcagccuucccgaaa

SEQ ID NO: 287704 - RNA, 19 nt, Homo sapiens
  misc_RNA (1)...(19): siRNA sense strand
ggauauuguucuagcuaau

SEQ ID NO: 287705 - RNA, 19 nt, Homo sapiens
  misc_RNA (1)...(19): siRNA sense strand
aaagggaggaagaugaaua

SEQ ID NO: 287706 - RNA, 19 nt, Homo sapiens
  misc_RNA (1)...(19): siRNA sense strand
caggagaagcuguaaagaa

SEQ ID NO: 287707 - RNA, 19 nt, Homo sapiens
  misc_RNA (1)...(19): siRNA sense strand
gcucagugguuacuucucu

SEQ ID NO: 287708 - RNA, 19 nt, Homo sapiens
  misc_RNA (1)...(19): siRNA sense strand
ggagaagagaucaacuuug

SEQ ID NO: 287709 - RNA, 19 nt, Homo sapiens
  misc_RNA (1)...(19): siRNA sense strand
cauggaggauauuguucua

SEQ ID NO: 287710 - RNA, 19 nt, Homo sapiens
  misc_RNA (1)...(19): siRNA sense strand
caaugucuguggagaagau

SEQ ID NO: 287711 - RNA, 19 nt, Homo sapiens
  misc_RNA (1)...(19): siRNA sense strand
cagcagccuucccgaaaug

SEQ ID NO: 287712 - RNA, 19 nt, Homo sapiens
  misc_RNA (1)...(19): siRNA sense strand
gaggauauuguucuagcua

SEQ ID NO: 287713 - RNA, 19 nt, Homo sapiens
  misc_RNA (1)...(19): siRNA sense strand
gaggaaaugauacguuugu

SEQ ID NO: 287714 - RNA, 19 nt, Homo sapiens
  misc_RNA (1)...(19): siRNA sense strand
gaaauucucagugaucagu

SEQ ID NO: 287715 - RNA, 19 nt, Homo sapiens
  misc_RNA (1)...(19): siRNA sense strand
acagauggcuaaugacucu

SEQ ID NO: 287716 - RNA, 19 nt, Homo sapiens
  misc_RNA (1)...(19): siRNA sense strand
gggugaagcaguacaagaa

SEQ ID NO: 287717 - RNA, 19 nt, Homo sapiens
  misc_RNA (1)...(19): siRNA sense strand
gagaucaacuuugggaaac

SEQ ID NO: 287718 - RNA, 19 nt, Homo sapiens
  misc_RNA (1)...(19): siRNA sense strand
guaaagaaacauguugguu

SEQ ID NO: 287719 - RNA, 19 nt, Homo sapiens
  misc_RNA (1)...(19): siRNA sense strand
gaccaaaggaagaugagaa

SEQ ID NO: 287720 - RNA, 19 nt, Homo sapiens
  misc_RNA (1)...(19): siRNA sense strand
ugaucggccuguccaguuu

SEQ ID NO: 287721 - RNA, 19 nt, Homo sapiens
  misc_RNA (1)...(19): siRNA sense strand
guauagauuuagcagaaca

SEQ ID NO: 287722 - RNA, 19 nt, Homo sapiens
  misc_RNA (1)...(19): siRNA sense strand
agggaugggugaagcagua

SEQ ID NO: 287723 - RNA, 19 nt, Homo sapiens
  misc_RNA (1)...(19): siRNA sense strand
aaaggaagaugagaacucu

SEQ ID NO: 287724 - RNA, 19 nt, Homo sapiens
  misc_RNA (1)...(19): siRNA sense strand
uggagaagauagacauuag

SEQ ID NO: 287725 - RNA, 19 nt, Homo sapiens
  misc_RNA (1)...(19): siRNA sense strand
cauuucaauuccaguguuu

SEQ ID NO: 287726 - RNA, 19 nt, Homo sapiens
  misc_RNA (1)...(19): siRNA sense strand
caaaggugguccagcacau

SEQ ID NO: 287727 - RNA, 19 nt, Homo sapiens
  misc_RNA (1)...(19): siRNA sense strand
auaccugccucgaguuauu

SEQ ID NO: 287728 - RNA, 19 nt, Homo sapiens
  misc_RNA (1)...(19): siRNA sense strand
gaagaaaugcuugaaaaug

SEQ ID NO: 287729 - RNA, 19 nt, Homo sapiens
  misc_RNA (1)...(19): siRNA sense strand
gagaagauagacauuaguc

SEQ ID NO: 287730 - RNA, 19 nt, Homo sapiens
  misc_RNA (1)...(19): siRNA sense strand
guaaacauggaaguacuaa

SEQ ID NO: 287731 - RNA, 19 nt, Homo sapiens
  misc_RNA (1)...(19): siRNA sense strand
gguggaagagggcagaauu

SEQ ID NO: 287732 - RNA, 19 nt, Homo sapiens
  misc_RNA (1)...(19): siRNA sense strand
ucauauugaugcccucgaa

SEQ ID NO: 287733 - RNA, 19 nt, Homo sapiens
  misc_RNA (1)...(19): siRNA sense strand
aaauaagcccucaaggaaa

SEQ ID NO: 287734 - RNA, 19 nt, Homo sapiens
  misc_RNA (1)...(19): siRNA sense strand
gcacaaagauugcgcuaua

SEQ ID NO: 287735 - RNA, 19 nt, Homo sapiens
  misc_RNA (1)...(19): siRNA sense strand
gaugagaacucuugguuua

SEQ ID NO: 287736 - RNA, 19 nt, Homo sapiens
  misc_RNA (1)...(19): siRNA sense strand
ggagaaagaugcagucaga

SEQ ID NO: 287737 - RNA, 19 nt, Homo sapiens
  misc_RNA (1)...(19): siRNA sense strand
gaaaggcucuaucgaaugu

SEQ ID NO: 287738 - RNA, 19 nt, Homo sapiens
  misc_RNA (1)...(19): siRNA sense strand
gagaagagaucaacuuugg

SEQ ID NO: 287739 - RNA, 19 nt, Homo sapiens
  misc_RNA (1)...(19): siRNA sense strand
gcuaaugacucugaugaua

SEQ ID NO: 287740 - RNA, 19 nt, Homo sapiens
  misc_RNA (1)...(19): siRNA sense strand
gaguauagauuuagcagaa

SEQ ID NO: 287741 - RNA, 19 nt, Homo sapiens
  misc_RNA (1)...(19): siRNA sense strand
cagaacagauggcuaauga

SEQ ID NO: 287742 - RNA, 19 nt, Homo sapiens
  misc_RNA (1)...(19): siRNA sense strand
uaaaguaacccaagccaua

SEQ ID NO: 287743 - RNA, 19 nt, Homo sapiens
  misc_RNA (1)...(19): siRNA sense strand
uaaaauagcuccaaccaaa

SEQ ID NO: 287744 - RNA, 19 nt, Homo sapiens
  misc_RNA (1)...(19): siRNA sense strand
gaacaggaguaaacaugga

SEQ ID NO: 287745 - RNA, 19 nt, Homo sapiens
  misc_RNA (1)...(19): siRNA sense strand
ggagaagauugaagaaaug

SEQ ID NO: 287746 - RNA, 19 nt, Homo sapiens
  misc_RNA (1)...(19): siRNA sense strand
guaaaucacuuuggacguu

SEQ ID NO: 287747 - RNA, 19 nt, Homo sapiens
  misc_RNA (1)...(19): siRNA sense strand
ggagguacgucguuucaga

SEQ ID NO: 287748 - RNA, 19 nt, Homo sapiens
  misc_RNA (1)...(19): siRNA sense strand
ggaggaagaugaauaugca

SEQ ID NO: 287749 - RNA, 19 nt, Homo sapiens
  misc_RNA (1)...(19): siRNA sense strand
cagaggaaaugauacguuu

SEQ ID NO: 287750 - RNA, 19 nt, Homo sapiens
  misc_RNA (1)...(19): siRNA sense strand
gaacaugaguguaaaauag

SEQ ID NO: 287751 - RNA, 19 nt, Homo sapiens
  misc_RNA (1)...(19): siRNA sense strand
cagaugcacuugaugauga

SEQ ID NO: 287752 - RNA, 19 nt, Homo sapiens
  misc_RNA (1)...(19): siRNA sense strand
aggagaagcuguaaagaaa

SEQ ID NO: 287753 - RNA, 19 nt, Homo sapiens
  misc_RNA (1)...(19): siRNA sense strand
ugaagaagaugaugaaguc

SEQ ID NO: 287754 - RNA, 19 nt, Homo sapiens
  misc_RNA (1)...(19): siRNA sense strand
gcagucagaggaaaugaua

SEQ ID NO: 287755 - RNA, 19 nt, Homo sapiens
  misc_RNA (1)...(19): siRNA sense strand
ggagucugcuucugccuuu

SEQ ID NO: 287756 - RNA, 19 nt, Homo sapiens
  misc_RNA (1)...(19): siRNA sense strand
gaugaaaggcucuaucgaa

SEQ ID NO: 287757 - RNA, 19 nt, Homo sapiens
  misc_RNA (1)...(19): siRNA sense strand
ggaaaugauacguuuguaa

SEQ ID NO: 287758 - RNA, 19 nt, Homo sapiens
  misc_RNA (1)...(19): siRNA sense strand
gguagaagaucuuguaaaa

SEQ ID NO: 287759 - RNA, 19 nt, Homo sapiens
  misc_RNA (1)...(19): siRNA sense strand
gaaaugucacuacuaagaa

SEQ ID NO: 287760 - RNA, 19 nt, Homo sapiens
  misc_RNA (1)...(19): siRNA sense strand
gaacucuugguuuaacuua

SEQ ID NO: 287761 - RNA, 19 nt, Homo sapiens
  misc_RNA (1)...(19): siRNA sense strand
ggaagaugaauaugcauaa

SEQ ID NO: 287762 - RNA, 19 nt, Homo sapiens
  misc_RNA (1)...(19): siRNA sense strand
gagaagcuguaaagaaaca

SEQ ID NO: 287763 - RNA, 19 nt, Homo sapiens
  misc_RNA (1)...(19): siRNA sense strand
acacagcgauuucuuaaag

SEQ ID NO: 287764 - RNA, 19 nt, Homo sapiens
  misc_RNA (1)...(19): siRNA sense strand
gauggcaaccucaacauuu

SEQ ID NO: 287765 - RNA, 19 nt, Homo sapiens
  misc_RNA (1)...(19): siRNA sense strand
ccagauaauccuaaaguaa

SEQ ID NO: 287766 - RNA, 19 nt, Homo sapiens
  misc_RNA (1)...(19): siRNA sense strand
ccuggaagcucagugguua

SEQ ID NO: 287767 - RNA, 19 nt, Homo sapiens
  misc_RNA (1)...(19): siRNA sense strand
cgaaaugucacuacuaaga

SEQ ID NO: 287768 - RNA, 19 nt, Homo sapiens
  misc_RNA (1)...(19): siRNA sense strand
gcugaugaccuuaugagua

SEQ ID NO: 287769 - RNA, 19 nt, Homo sapiens
  misc_RNA (1)...(19): siRNA sense strand
aaaggaagcacaaagauug

SEQ ID NO: 287770 - RNA, 19 nt, Homo sapiens
  misc_RNA (1)...(19): siRNA sense strand
caagugaggaugaugauga

SEQ ID NO: 287771 - RNA, 19 nt, Homo sapiens
  misc_RNA (1)...(19): siRNA sense strand
aaucagauguggaagaaga

SEQ ID NO: 287772 - RNA, 19 nt, Homo sapiens
  misc_RNA (1)...(19): siRNA sense strand
aaacacagcgauuucuuaa

SEQ ID NO: 287773 - RNA, 19 nt, Homo sapiens
  misc_RNA (1)...(19): siRNA sense strand
uaacuucauuccagaacaa

SEQ ID NO: 287774 - RNA, 19 nt, Homo sapiens
  misc_RNA (1)...(19): siRNA sense strand
ugaaucagauguggaagaa

SEQ ID NO: 287775 - RNA, 19 nt, Homo sapiens
  misc_RNA (1)...(19): siRNA sense strand
cugaugaccuuaugaguau

SEQ ID NO: 287776 - RNA, 19 nt, Homo sapiens
  misc_RNA (1)...(19): siRNA sense strand
ugagguagaugaaucagau

SEQ ID NO: 287777 - RNA, 19 nt, Homo sapiens
  misc_RNA (1)...(19): siRNA sense strand
gaaaugauacguuuguaac

SEQ ID NO: 287778 - RNA, 19 nt, Homo sapiens
  misc_RNA (1)...(19): siRNA sense strand
gaaagggguugauuuugaa

SEQ ID NO: 287779 - RNA, 19 nt, Homo sapiens
  misc_RNA (1)...(19): siRNA sense strand
cccgaaaugucacuacuaa

SEQ ID NO: 287780 - RNA, 19 nt, Homo sapiens
  misc_RNA (1)...(19): siRNA sense strand
uggagaagauugaagaaau

SEQ ID NO: 287781 - RNA, 19 nt, Homo sapiens
  misc_RNA (1)...(19): siRNA sense strand
uaacccagauaauccuaaa

SEQ ID NO: 287782 - RNA, 19 nt, Homo sapiens
  misc_RNA (1)...(19): siRNA sense strand
gaacaacuuuaaggguaga

SEQ ID NO: 287783 - RNA, 19 nt, Homo sapiens
  misc_RNA (1)...(19): siRNA sense strand
gaacagauggcuaaugacu

SEQ ID NO: 287784 - RNA, 19 nt, Homo sapiens
  misc_RNA (1)...(19): siRNA sense strand
cgaaagggguugauuuuga

SEQ ID NO: 287785 - RNA, 19 nt, Homo sapiens
  misc_RNA (1)...(19): siRNA sense strand
gaaaauaagcccucaagga

SEQ ID NO: 287786 - RNA, 19 nt, Homo sapiens
  misc_RNA (1)...(19): siRNA sense strand
gauagcaucucagcagcaa

SEQ ID NO: 287787 - RNA, 19 nt, Homo sapiens
  misc_RNA (1)...(19): siRNA sense strand
gugaagcaguacaagaauu

SEQ ID NO: 287788 - RNA, 19 nt, Homo sapiens
  misc_RNA (1)...(19): siRNA sense strand
ucagaaggaacaacuuuaa

SEQ ID NO: 287789 - RNA, 19 nt, Homo sapiens
  misc_RNA (1)...(19): siRNA sense strand
gggaacgucuggguaauuc

SEQ ID NO: 287790 - RNA, 19 nt, Homo sapiens
  misc_RNA (1)...(19): siRNA sense strand
caaaaucgaugaggaggua

SEQ ID NO: 287791 - RNA, 19 nt, Homo sapiens
  misc_RNA (1)...(19): siRNA sense strand
gaucaacuuugggaaacuu

SEQ ID NO: 287792 - RNA, 19 nt, Homo sapiens
  misc_RNA (1)...(19): siRNA sense strand
uaggauccauuccagauga

SEQ ID NO: 287793 - RNA, 19 nt, Homo sapiens
  misc_RNA (1)...(19): siRNA sense strand
gaagauugaagaaaugcuu

SEQ ID NO: 287794 - RNA, 19 nt, Homo sapiens
  misc_RNA (1)...(19): siRNA sense strand
uugggaaacuuaucacaaa

SEQ ID NO: 287795 - RNA, 19 nt, Homo sapiens
  misc_RNA (1)...(19): siRNA sense strand
ccagagcacucagaucuca

SEQ ID NO: 287796 - RNA, 19 nt, Homo sapiens
  misc_RNA (1)...(19): siRNA sense strand
ugaagcaguacaagaauuu

SEQ ID NO: 287797 - RNA, 19 nt, Homo sapiens
  misc_RNA (1)...(19): siRNA sense strand
ucaauuccaguguuuagua

SEQ ID NO: 287798 - RNA, 19 nt, Homo sapiens
  misc_RNA (1)...(19): siRNA sense strand
gaccuuaugaguauagauu

SEQ ID NO: 287799 - RNA, 19 nt, Homo sapiens
  misc_RNA (1)...(19): siRNA sense strand
ugacuucauugaucuuguu

SEQ ID NO: 287800 - RNA, 19 nt, Homo sapiens
  misc_RNA (1)...(19): siRNA sense strand
agauugcgcuauaugguuu

SEQ ID NO: 287801 - RNA, 19 nt, Homo sapiens
  misc_RNA (1)...(19): siRNA sense strand
caauuccaguguuuaguau

SEQ ID NO: 287802 - RNA, 19 nt, Homo sapiens
  misc_RNA (1)...(19): siRNA sense strand
ucauugaucuuguuaucug

SEQ ID NO: 287803 - RNA, 19 nt, Homo sapiens
  misc_RNA (1)...(19): siRNA sense strand
gacagcagccuucccgaaa

SEQ ID NO: 287804 - RNA, 19 nt, Homo sapiens
  misc_RNA (1)...(19): siRNA sense strand
ggauauuguucuagcuaau

SEQ ID NO: 287805 - RNA, 19 nt, Homo sapiens
  misc_RNA (1)...(19): siRNA sense strand
aaagggaggaagaugaaua

SEQ ID NO: 287806 - RNA, 19 nt, Homo sapiens
  misc_RNA (1)...(19): siRNA sense strand
caggagaagcuguaaagaa

SEQ ID NO: 287807 - RNA, 19 nt, Homo sapiens
  misc_RNA (1)...(19): siRNA sense strand
gcucagugguuacuucucu

SEQ ID NO: 287808 - RNA, 19 nt, Homo sapiens
  misc_RNA (1)...(19): siRNA sense strand
ggagaagagaucaacuuug

SEQ ID NO: 287809 - RNA, 19 nt, Homo sapiens
  misc_RNA (1)...(19): siRNA sense strand
cauggaggauauuguucua

SEQ ID NO: 287810 - RNA, 19 nt, Homo sapiens
  misc_RNA (1)...(19): siRNA sense strand
caaugucuguggagaagau

SEQ ID NO: 287811 - RNA, 19 nt, Homo sapiens
  misc_RNA (1)...(19): siRNA sense strand
cagcagccuucccgaaaug

SEQ ID NO: 287812 - RNA, 19 nt, Homo sapiens
  misc_RNA (1)...(19): siRNA sense strand
gaggauauuguucuagcua

SEQ ID NO: 287813 - RNA, 19 nt, Homo sapiens
  misc_RNA (1)...(19): siRNA sense strand
gaggaaaugauacguuugu

SEQ ID NO: 287814 - RNA, 19 nt, Homo sapiens
  misc_RNA (1)...(19): siRNA sense strand
gaaauucucagugaucagu

SEQ ID NO: 287815 - RNA, 19 nt, Homo sapiens
  misc_RNA (1)...(19): siRNA sense strand
acagauggcuaaugacucu

SEQ ID NO: 287816 - RNA, 19 nt, Homo sapiens
  misc_RNA (1)...(19): siRNA sense strand
gggugaagcaguacaagaa

SEQ ID NO: 287817 - RNA, 19 nt, Homo sapiens
  misc_RNA (1)...(19): siRNA sense strand
gagaucaacuuugggaaac

SEQ ID NO: 287818 - RNA, 19 nt, Homo sapiens
  misc_RNA (1)...(19): siRNA sense strand
guaaagaaacauguugguu

SEQ ID NO: 287819 - RNA, 19 nt, Homo sapiens
  misc_RNA (1)...(19): siRNA sense strand
gaccaaaggaagaugagaa

SEQ ID NO: 287820 - RNA, 19 nt, Homo sapiens
  misc_RNA (1)...(19): siRNA sense strand
ugaucggccuguccaguuu

SEQ ID NO: 287821 - RNA, 19 nt, Homo sapiens
  misc_RNA (1)...(19): siRNA sense strand
guauagauuuagcagaaca

SEQ ID NO: 287822 - RNA, 19 nt, Homo sapiens
  misc_RNA (1)...(19): siRNA sense strand
agggaugggugaagcagua

SEQ ID NO: 287823 - RNA, 19 nt, Homo sapiens
  misc_RNA (1)...(19): siRNA sense strand
aaaggaagaugagaacucu

SEQ ID NO: 287824 - RNA, 19 nt, Homo sapiens
  misc_RNA (1)...(19): siRNA sense strand
uggagaagauagacauuag

SEQ ID NO: 287825 - RNA, 19 nt, Homo sapiens
  misc_RNA (1)...(19): siRNA sense strand
cauuucaauuccaguguuu

SEQ ID NO: 287826 - RNA, 19 nt, Homo sapiens
  misc_RNA (1)...(19): siRNA sense strand
caaaggugguccagcacau

SEQ ID NO: 287827 - RNA, 19 nt, Homo sapiens
  misc_RNA (1)...(19): siRNA sense strand
auaccugccucgaguuauu

SEQ ID NO: 287828 - RNA, 19 nt, Homo sapiens
  misc_RNA (1)...(19): siRNA sense strand
gaagaaaugcuugaaaaug

SEQ ID NO: 287829 - RNA, 19 nt, Homo sapiens
  misc_RNA (1)...(19): siRNA sense strand
gagaagauagacauuaguc

SEQ ID NO: 287830 - RNA, 19 nt, Homo sapiens
  misc_RNA (1)...(19): siRNA sense strand
guaaacauggaaguacuaa

SEQ ID NO: 287831 - RNA, 19 nt, Homo sapiens
  misc_RNA (1)...(19): siRNA sense strand
gguggaagagggcagaauu

SEQ ID NO: 287832 - RNA, 19 nt, Homo sapiens
  misc_RNA (1)...(19): siRNA sense strand
ucauauugaugcccucgaa

SEQ ID NO: 287833 - RNA, 19 nt, Homo sapiens
  misc_RNA (1)...(19): siRNA sense strand
aaauaagcccucaaggaaa

SEQ ID NO: 287834 - RNA, 19 nt, Homo sapiens
  misc_RNA (1)...(19): siRNA sense strand
gaacaaaccugaagaaaca

SEQ ID NO: 287835 - RNA, 19 nt, Homo sapiens
  misc_RNA (1)...(19): siRNA sense strand
gaaagagacuuacguacua

SEQ ID NO: 287836 - RNA, 19 nt, Homo sapiens
  misc_RNA (1)...(19): siRNA sense strand
ggagaggacuuccaaaugu

SEQ ID NO: 287837 - RNA, 19 nt, Homo sapiens
  misc_RNA (1)...(19): siRNA sense strand
gaagaagacuaagaaaguu

SEQ ID NO: 287838 - RNA, 19 nt, Homo sapiens
  misc_RNA (1)...(19): siRNA sense strand
ccacugagauuaugaacaa

SEQ ID NO: 287839 - RNA, 19 nt, Homo sapiens
  misc_RNA (1)...(19): siRNA sense strand
caagagagguggcagcauu

SEQ ID NO: 287840 - RNA, 19 nt, Homo sapiens
  misc_RNA (1)...(19): siRNA sense strand
gaagaaggccugcucuaaa

SEQ ID NO: 287841 - RNA, 19 nt, Homo sapiens
  misc_RNA (1)...(19): siRNA sense strand
gaaagcaccuccaccuuca

SEQ ID NO: 287842 - RNA, 19 nt, Homo sapiens
  misc_RNA (1)...(19): siRNA sense strand
gcauucagcaguauauuua

SEQ ID NO: 287843 - RNA, 19 nt, Homo sapiens
  misc_RNA (1)...(19): siRNA sense strand
guacagaagugcccuggaa

SEQ ID NO: 287844 - RNA, 19 nt, Homo sapiens
  misc_RNA (1)...(19): siRNA sense strand
gaaggccugcucuaaauua

SEQ ID NO: 287845 - RNA, 19 nt, Homo sapiens
  misc_RNA (1)...(19): siRNA sense strand
ggagaaaugacacagguua

SEQ ID NO: 287846 - RNA, 19 nt, Homo sapiens
  misc_RNA (1)...(19): siRNA sense strand
ggaaauaacagaagaacau

SEQ ID NO: 287847 - RNA, 19 nt, Homo sapiens
  misc_RNA (1)...(19): siRNA sense strand
uauaagaacuggccugaau

SEQ ID NO: 287848 - RNA, 19 nt, Homo sapiens
  misc_RNA (1)...(19): siRNA sense strand
uagauggacugacuacuuu

SEQ ID NO: 287849 - RNA, 19 nt, Homo sapiens
  misc_RNA (1)...(19): siRNA sense strand
gggcagaccuuauccaaag

SEQ ID NO: 287850 - RNA, 19 nt, Homo sapiens
  misc_RNA (1)...(19): siRNA sense strand
cugcggagcuuuccuguaa

SEQ ID NO: 287851 - RNA, 19 nt, Homo sapiens
  misc_RNA (1)...(19): siRNA sense strand
ggaagaaggccugcucuaa

SEQ ID NO: 287852 - RNA, 19 nt, Homo sapiens
  misc_RNA (1)...(19): siRNA sense strand
cagaagaaacucaaaguaa

SEQ ID NO: 287853 - RNA, 19 nt, Homo sapiens
  misc_RNA (1)...(19): siRNA sense strand
caaacaagaagaagacuaa

SEQ ID NO: 287854 - RNA, 19 nt, Homo sapiens
  misc_RNA (1)...(19): siRNA sense strand
caacugugauuauaacugu

SEQ ID NO: 287855 - RNA, 19 nt, Homo sapiens
  misc_RNA (1)...(19): siRNA sense strand
ccaaggagccuaccacuau

SEQ ID NO: 287856 - RNA, 19 nt, Homo sapiens
  misc_RNA (1)...(19): siRNA sense strand
caucuaaagugcuggcuaa

SEQ ID NO: 287857 - RNA, 19 nt, Homo sapiens
  misc_RNA (1)...(19): siRNA sense strand
ggacaauggugacuucaag

SEQ ID NO: 287858 - RNA, 19 nt, Homo sapiens
  misc_RNA (1)...(19): siRNA sense strand
caucaacaaugccagaauu

SEQ ID NO: 287859 - RNA, 19 nt, Homo sapiens
  misc_RNA (1)...(19): siRNA sense strand
caaguaacaucuaccacaa

SEQ ID NO: 287860 - RNA, 19 nt, Homo sapiens
  misc_RNA (1)...(19): siRNA sense strand
aaacagacuucaacugaug

SEQ ID NO: 287861 - RNA, 19 nt, Homo sapiens
  misc_RNA (1)...(19): siRNA sense strand
aggacuaacuggacaaaua

SEQ ID NO: 287862 - RNA, 19 nt, Homo sapiens
  misc_RNA (1)...(19): siRNA sense strand
ggaaggguauucuagagau

SEQ ID NO: 287863 - RNA, 19 nt, Homo sapiens
  misc_RNA (1)...(19): siRNA sense strand
uauaggaccuucucaaaca

SEQ ID NO: 287864 - RNA, 19 nt, Homo sapiens
  misc_RNA (1)...(19): siRNA sense strand
agacagagcuacuaauucu

SEQ ID NO: 287865 - RNA, 19 nt, Homo sapiens
  misc_RNA (1)...(19): siRNA sense strand
gaaggagaaacaccucaua

SEQ ID NO: 287866 - RNA, 19 nt, Homo sapiens
  misc_RNA (1)...(19): siRNA sense strand
gauuauaacugucaacacu

SEQ ID NO: 287867 - RNA, 19 nt, Homo sapiens
  misc_RNA (1)...(19): siRNA sense strand
gaagaaacagcuaaaccaa

SEQ ID NO: 287868 - RNA, 19 nt, Homo sapiens
  misc_RNA (1)...(19): siRNA sense strand
gaaaugacuacaacagcua

SEQ ID NO: 287869 - RNA, 19 nt, Homo sapiens
  misc_RNA (1)...(19): siRNA sense strand
aaauucagcugcuaauaga

SEQ ID NO: 287870 - RNA, 19 nt, Homo sapiens
  misc_RNA (1)...(19): siRNA sense strand
agaaacaccucauaugcuu

SEQ ID NO: 287871 - RNA, 19 nt, Homo sapiens
  misc_RNA (1)...(19): siRNA sense strand
gaauaaagagacaacaguu

SEQ ID NO: 287872 - RNA, 19 nt, Homo sapiens
  misc_RNA (1)...(19): siRNA sense strand
gacaacagaaagagacuua

SEQ ID NO: 287873 - RNA, 19 nt, Homo sapiens
  misc_RNA (1)...(19): siRNA sense strand
gaacccuaccucaagaaua

SEQ ID NO: 287874 - RNA, 19 nt, Homo sapiens
  misc_RNA (1)...(19): siRNA sense strand
gaaguuaaagugaguauac

SEQ ID NO: 287875 - RNA, 19 nt, Homo sapiens
  misc_RNA (1)...(19): siRNA sense strand
caagugcugucccgauuau

SEQ ID NO: 287876 - RNA, 19 nt, Homo sapiens
  misc_RNA (1)...(19): siRNA sense strand
ugacggcuaugauuacuau

SEQ ID NO: 287877 - RNA, 19 nt, Homo sapiens
  misc_RNA (1)...(19): siRNA sense strand
ugaaguaaauccaaagagu

SEQ ID NO: 287878 - RNA, 19 nt, Homo sapiens
  misc_RNA (1)...(19): siRNA sense strand
caagauaccacaccauuca

SEQ ID NO: 287879 - RNA, 19 nt, Homo sapiens
  misc_RNA (1)...(19): siRNA sense strand
gacccagucuuccaccuaa

SEQ ID NO: 287880 - RNA, 19 nt, Homo sapiens
  misc_RNA (1)...(19): siRNA sense strand
aagaaggccugcucuaaau

SEQ ID NO: 287881 - RNA, 19 nt, Homo sapiens
  misc_RNA (1)...(19): siRNA sense strand
gacacaaaguauagagaaa

SEQ ID NO: 287882 - RNA, 19 nt, Homo sapiens
  misc_RNA (1)...(19): siRNA sense strand
gcuaaagagacacaaagua

SEQ ID NO: 287883 - RNA, 19 nt, Homo sapiens
  misc_RNA (1)...(19): siRNA sense strand
gacagcaacuacaacagaa

SEQ ID NO: 287884 - RNA, 19 nt, Homo sapiens
  misc_RNA (1)...(19): siRNA sense strand
ugaaucaacuccugagcuu

SEQ ID NO: 287885 - RNA, 19 nt, Homo sapiens
  misc_RNA (1)...(19): siRNA sense strand
cuaaagagacacaaaguau

SEQ ID NO: 287886 - RNA, 19 nt, Homo sapiens
  misc_RNA (1)...(19): siRNA sense strand
gagaggacuuccaaaugug

SEQ ID NO: 287887 - RNA, 19 nt, Homo sapiens
  misc_RNA (1)...(19): siRNA sense strand
uaaauuauccaguguaugg

SEQ ID NO: 287888 - RNA, 19 nt, Homo sapiens
  misc_RNA (1)...(19): siRNA sense strand
aaagacagagcuacuaauu

SEQ ID NO: 287889 - RNA, 19 nt, Homo sapiens
  misc_RNA (1)...(19): siRNA sense strand
cagaggaaauaacagaaga

SEQ ID NO: 287890 - RNA, 19 nt, Homo sapiens
  misc_RNA (1)...(19): siRNA sense strand
gugguuaccucagcuauau

SEQ ID NO: 287891 - RNA, 19 nt, Homo sapiens
  misc_RNA (1)...(19): siRNA sense strand
gaaggguauucuagagaug

SEQ ID NO: 287892 - RNA, 19 nt, Homo sapiens
  misc_RNA (1)...(19): siRNA sense strand
gcuauaggaccuucucaaa

SEQ ID NO: 287893 - RNA, 19 nt, Homo sapiens
  misc_RNA (1)...(19): siRNA sense strand
gcuacaaccacacaaguaa

SEQ ID NO: 287894 - RNA, 19 nt, Homo sapiens
  misc_RNA (1)...(19): siRNA sense strand
caagaagccugcuccaacu

SEQ ID NO: 287895 - RNA, 19 nt, Homo sapiens
  misc_RNA (1)...(19): siRNA sense strand
caacaaauaaacagacuuc

SEQ ID NO: 287896 - RNA, 19 nt, Homo sapiens
  misc_RNA (1)...(19): siRNA sense strand
gcagaagccaugcuccaaa

SEQ ID NO: 287897 - RNA, 19 nt, Homo sapiens
  misc_RNA (1)...(19): siRNA sense strand
cauuauuucuggaugcuaa

SEQ ID NO: 287898 - RNA, 19 nt, Homo sapiens
  misc_RNA (1)...(19): siRNA sense strand
ggagaaacaccucauaugc

SEQ ID NO: 287899 - RNA, 19 nt, Homo sapiens
  misc_RNA (1)...(19): siRNA sense strand
ucugauacaucuaaagaga

SEQ ID NO: 287900 - RNA, 19 nt, Homo sapiens
  misc_RNA (1)...(19): siRNA sense strand
ggacuaacuggacaaauag

SEQ ID NO: 287901 - RNA, 19 nt, Homo sapiens
  misc_RNA (1)...(19): siRNA sense strand
ccaaacuaguugaaguaaa

SEQ ID NO: 287902 - RNA, 19 nt, Homo sapiens
  misc_RNA (1)...(19): siRNA sense strand
uaacaucuaccacaacuca

SEQ ID NO: 287903 - RNA, 19 nt, Homo sapiens
  misc_RNA (1)...(19): siRNA sense strand
ccaaggagccugcaucuac

SEQ ID NO: 287904 - RNA, 19 nt, Homo sapiens
  misc_RNA (1)...(19): siRNA sense strand
acaagaagaagacuaagaa

SEQ ID NO: 287905 - RNA, 19 nt, Homo sapiens
  misc_RNA (1)...(19): siRNA sense strand
gaaaugacacagguuagga

SEQ ID NO: 287906 - RNA, 19 nt, Homo sapiens
  misc_RNA (1)...(19): siRNA sense strand
uaaacagacuucaacugau

SEQ ID NO: 287907 - RNA, 19 nt, Homo sapiens
  misc_RNA (1)...(19): siRNA sense strand
caaauaaacagacuucaac

SEQ ID NO: 287908 - RNA, 19 nt, Homo sapiens
  misc_RNA (1)...(19): siRNA sense strand
uaggagacgucgcuuugaa

SEQ ID NO: 287909 - RNA, 19 nt, Homo sapiens
  misc_RNA (1)...(19): siRNA sense strand
cagaauuacugaaguuugg

SEQ ID NO: 287910 - RNA, 19 nt, Homo sapiens
  misc_RNA (1)...(19): siRNA sense strand
ccaaaguaacuacaacaaa

SEQ ID NO: 287911 - RNA, 19 nt, Homo sapiens
  misc_RNA (1)...(19): siRNA sense strand
gacuaaaccugaaaugacu

SEQ ID NO: 287912 - RNA, 19 nt, Homo sapiens
  misc_RNA (1)...(19): siRNA sense strand
uaaagggacugcuccaacu

SEQ ID NO: 287913 - RNA, 19 nt, Homo sapiens
  misc_RNA (1)...(19): siRNA sense strand
guaagaaguaugacaagug

SEQ ID NO: 287914 - RNA, 19 nt, Homo sapiens
  misc_RNA (1)...(19): siRNA sense strand
ugaaguuacucccgacaug

SEQ ID NO: 287915 - RNA, 19 nt, Homo sapiens
  misc_RNA (1)...(19): siRNA sense strand
caaggaaccugguguaccu

SEQ ID NO: 287916 - RNA, 19 nt, Homo sapiens
  misc_RNA (1)...(19): siRNA sense strand
agaagaagacuaagaaagu

SEQ ID NO: 287917 - RNA, 19 nt, Homo sapiens
  misc_RNA (1)...(19): siRNA sense strand
caucaaaucaacaaccaaa

SEQ ID NO: 287918 - RNA, 19 nt, Homo sapiens
  misc_RNA (1)...(19): siRNA sense strand
gcucuaaauuauccagugu

SEQ ID NO: 287919 - RNA, 19 nt, Homo sapiens
  misc_RNA (1)...(19): siRNA sense strand
ggccugaaucuguguauuu

SEQ ID NO: 287920 - RNA, 19 nt, Homo sapiens
  misc_RNA (1)...(19): siRNA sense strand
acagagcuacuaauucuaa

SEQ ID NO: 287921 - RNA, 19 nt, Homo sapiens
  misc_RNA (1)...(19): siRNA sense strand
agaaacagcuaaaccaaaa

SEQ ID NO: 287922 - RNA, 19 nt, Homo sapiens
  misc_RNA (1)...(19): siRNA sense strand
ccacacaaguaacaucuac

SEQ ID NO: 287923 - RNA, 19 nt, Homo sapiens
  misc_RNA (1)...(19): siRNA sense strand
ccacauccaccaccucuga

SEQ ID NO: 287924 - RNA, 19 nt, Homo sapiens
  misc_RNA (1)...(19): siRNA sense strand
gacaagcccgcuccaacua

SEQ ID NO: 287925 - RNA, 19 nt, Homo sapiens
  misc_RNA (1)...(19): siRNA sense strand
ccacauccaccaccucuga

SEQ ID NO: 287926 - RNA, 19 nt, Homo sapiens
  misc_RNA (1)...(19): siRNA sense strand
auaaacagacuucaacuga

SEQ ID NO: 287927 - RNA, 19 nt, Homo sapiens
  misc_RNA (1)...(19): siRNA sense strand
ccaaaccaccaaacaagaa

SEQ ID NO: 287928 - RNA, 19 nt, Homo sapiens
  misc_RNA (1)...(19): siRNA sense strand
gcagaauuacugaaguuug

SEQ ID NO: 287929 - RNA, 19 nt, Homo sapiens
  misc_RNA (1)...(19): siRNA sense strand
gaugcuaaguccauucagu

SEQ ID NO: 287930 - RNA, 19 nt, Homo sapiens
  misc_RNA (1)...(19): siRNA sense strand
uaucaucaaucccaugcuu

SEQ ID NO: 287931 - RNA, 19 nt, Homo sapiens
  misc_RNA (1)...(19): siRNA sense strand
ugacaagccugcuccaacu

SEQ ID NO: 287932 - RNA, 19 nt, Homo sapiens
  misc_RNA (1)...(19): siRNA sense strand
guacuacaccugaaacuac

SEQ ID NO: 287933 - RNA, 19 nt, Homo sapiens
  misc_RNA (1)...(19): siRNA sense strand
gcagcgcuuucaacagcua

SEQ ID NO: 287934 - RNA, 19 nt, Homo sapiens
  misc_RNA (1)...(19): siRNA sense strand
gaaaggagguagaagucau

SEQ ID NO: 287935 - RNA, 19 nt, Homo sapiens
  misc_RNA (1)...(19): siRNA sense strand
gaaaucagcuguguuugcu

SEQ ID NO: 287936 - RNA, 19 nt, Homo sapiens
  misc_RNA (1)...(19): siRNA sense strand
gcagcggugucccaaguuu

SEQ ID NO: 287937 - RNA, 19 nt, Homo sapiens
  misc_RNA (1)...(19): siRNA sense strand
ggagguagaagucauccuu

SEQ ID NO: 287938 - RNA, 19 nt, Homo sapiens
  misc_RNA (1)...(19): siRNA sense strand
cagcagcggugucccaagu

SEQ ID NO: 287939 - RNA, 19 nt, Homo sapiens
  misc_RNA (1)...(19): siRNA sense strand
ggaaaucagcuguguuugc

SEQ ID NO: 287940 - RNA, 19 nt, Homo sapiens
  misc_RNA (1)...(19): siRNA sense strand
ccaucuguguuccuacaaa

SEQ ID NO: 287941 - RNA, 19 nt, Homo sapiens
  misc_RNA (1)...(19): siRNA sense strand
ggaaaggagguagaaguca

SEQ ID NO: 287942 - RNA, 19 nt, Homo sapiens
  misc_RNA (1)...(19): siRNA sense strand
cuggaaaucagcuguguuu

SEQ ID NO: 287943 - RNA, 19 nt, Homo sapiens
  misc_RNA (1)...(19): siRNA sense strand
gagguagaagucauccuuu

SEQ ID NO: 287944 - RNA, 19 nt, Homo sapiens
  misc_RNA (1)...(19): siRNA sense strand
guucuaacguuugguccuu

SEQ ID NO: 287945 - RNA, 19 nt, Homo sapiens
  misc_RNA (1)...(19): siRNA sense strand
ggauaauggccucaagauc

SEQ ID NO: 287946 - RNA, 19 nt, Homo sapiens
  misc_RNA (1)...(19): siRNA sense strand
caccuugguuccugacaca

SEQ ID NO: 287947 - RNA, 19 nt, Homo sapiens
  misc_RNA (1)...(19): siRNA sense strand
uccuaaaucccuuggaauu

SEQ ID NO: 287948 - RNA, 19 nt, Homo sapiens
  misc_RNA (1)...(19): siRNA sense strand
auaauggccucaagaucca

SEQ ID NO: 287949 - RNA, 19 nt, Homo sapiens
  misc_RNA (1)...(19): siRNA sense strand
guggaaaggagguagaagu

SEQ ID NO: 287950 - RNA, 19 nt, Homo sapiens
  misc_RNA (1)...(19): siRNA sense strand
gcacaucuuuuguucuaac

SEQ ID NO: 287951 - RNA, 19 nt, Homo sapiens
  misc_RNA (1)...(19): siRNA sense strand
agguagaagucauccuuuc

SEQ ID NO: 287952 - RNA, 19 nt, Homo sapiens
  misc_RNA (1)...(19): siRNA sense strand
uugcacaucuuuuguucua

SEQ ID NO: 287953 - RNA, 19 nt, Homo sapiens
  misc_RNA (1)...(19): siRNA sense strand
gaacgaaauuccuaaagaa

SEQ ID NO: 287954 - RNA, 19 nt, Homo sapiens
  misc_RNA (1)...(19): siRNA sense strand
gugcacaucucgaaguuua

SEQ ID NO: 287955 - RNA, 19 nt, Homo sapiens
  misc_RNA (1)...(19): siRNA sense strand
gaucaaagcuguguaugca

SEQ ID NO: 287956 - RNA, 19 nt, Homo sapiens
  misc_RNA (1)...(19): siRNA sense strand
gaacugacggugcacauga

SEQ ID NO: 287957 - RNA, 19 nt, Homo sapiens
  misc_RNA (1)...(19): siRNA sense strand
gcuuagcucuggauuuaaa

SEQ ID NO: 287958 - RNA, 19 nt, Homo sapiens
  misc_RNA (1)...(19): siRNA sense strand
ucaaagcuguguaugcaaa

SEQ ID NO: 287959 - RNA, 19 nt, Homo sapiens
  misc_RNA (1)...(19): siRNA sense strand
gaaggaggaugcccagaag

SEQ ID NO: 287960 - RNA, 19 nt, Homo sapiens
  misc_RNA (1)...(19): siRNA sense strand
gaggacagcuuggagaaau

SEQ ID NO: 287961 - RNA, 19 nt, Homo sapiens
  misc_RNA (1)...(19): siRNA sense strand
cgaaaguccucaccaacaa

SEQ ID NO: 287962 - RNA, 19 nt, Homo sapiens
  misc_RNA (1)...(19): siRNA sense strand
gcgaccagcuagcccauuu

SEQ ID NO: 287963 - RNA, 19 nt, Homo sapiens
  misc_RNA (1)...(19): siRNA sense strand
ugacugaguuggagaaaca

SEQ ID NO: 287964 - RNA, 19 nt, Homo sapiens
  misc_RNA (1)...(19): siRNA sense strand
ucaaagaggcgcagagcua

SEQ ID NO: 287965 - RNA, 19 nt, Homo sapiens
  misc_RNA (1)...(19): siRNA sense strand
gaaggaggauccgcagugu

SEQ ID NO: 287966 - RNA, 19 nt, Homo sapiens
  misc_RNA (1)...(19): siRNA sense strand
ggaaggaggaugcccagaa

SEQ ID NO: 287967 - RNA, 19 nt, Homo sapiens
  misc_RNA (1)...(19): siRNA sense strand
ccagcuagcccauuucaaa

SEQ ID NO: 287968 - RNA, 19 nt, Homo sapiens
  misc_RNA (1)...(19): siRNA sense strand
uggaggagcugguggagaa

SEQ ID NO: 287969 - RNA, 19 nt, Homo sapiens
  misc_RNA (1)...(19): siRNA sense strand
ucaagucccuggagaauac

SEQ ID NO: 287970 - RNA, 19 nt, Homo sapiens
  misc_RNA (1)...(19): siRNA sense strand
gcgcagagcuaccagaacu

SEQ ID NO: 287971 - RNA, 19 nt, Homo sapiens
  misc_RNA (1)...(19): siRNA sense strand
gacaaggacuccgagaaga

SEQ ID NO: 287972 - RNA, 19 nt, Homo sapiens
  misc_RNA (1)...(19): siRNA sense strand
gagcaagcacgcagucaaa

SEQ ID NO: 287973 - RNA, 19 nt, Homo sapiens
  misc_RNA (1)...(19): siRNA sense strand
ggacaaggacuccgagaag

SEQ ID NO: 287974 - RNA, 19 nt, Homo sapiens
  misc_RNA (1)...(19): siRNA sense strand
agaaagagccagagaagga

SEQ ID NO: 287975 - RNA, 19 nt, Homo sapiens
  misc_RNA (1)...(19): siRNA sense strand
ccaucgaccgcuacuauua

SEQ ID NO: 287976 - RNA, 19 nt, Homo sapiens
  misc_RNA (1)...(19): siRNA sense strand
cagcagacguccucguaug

SEQ ID NO: 287977 - RNA, 19 nt, Homo sapiens
  misc_RNA (1)...(19): siRNA sense strand
gaaaguccucaccaacaaa

SEQ ID NO: 287978 - RNA, 19 nt, Homo sapiens
  misc_RNA (1)...(19): siRNA sense strand
ugaaggaucucuccaagcu

SEQ ID NO: 287979 - RNA, 19 nt, Homo sapiens
  misc_RNA (1)...(19): siRNA sense strand
ggacagcuuggagaaauuu

SEQ ID NO: 287980 - RNA, 19 nt, Homo sapiens
  misc_RNA (1)...(19): siRNA sense strand
aaaccaagcauuaccagaa

SEQ ID NO: 287981 - RNA, 19 nt, Homo sapiens
  misc_RNA (1)...(19): siRNA sense strand
uagcaaagcucagaauggu

SEQ ID NO: 287982 - RNA, 19 nt, Homo sapiens
  misc_RNA (1)...(19): siRNA sense strand
cgaccagcccauugacuua

SEQ ID NO: 287983 - RNA, 19 nt, Homo sapiens
  misc_RNA (1)...(19): siRNA sense strand
ucaaacugcaccuuaguaa

SEQ ID NO: 287984 - RNA, 19 nt, Homo sapiens
  misc_RNA (1)...(19): siRNA sense strand
gaacgagacaggccacuac

SEQ ID NO: 287985 - RNA, 19 nt, Homo sapiens
  misc_RNA (1)...(19): siRNA sense strand
gaacugcuucuacauacau

SEQ ID NO: 287986 - RNA, 19 nt, Homo sapiens
  misc_RNA (1)...(19): siRNA sense strand
gauugugccucucaguuca

SEQ ID NO: 287987 - RNA, 19 nt, Homo sapiens
  misc_RNA (1)...(19): siRNA sense strand
gaccucagcguccacauga

SEQ ID NO: 287988 - RNA, 19 nt, Homo sapiens
  misc_RNA (1)...(19): siRNA sense strand
aaccaagcauuaccagaaa

SEQ ID NO: 287989 - RNA, 19 nt, Homo sapiens
  misc_RNA (1)...(19): siRNA sense strand
uaaccaaguccaagaacaa

SEQ ID NO: 287990 - RNA, 19 nt, Homo sapiens
  misc_RNA (1)...(19): siRNA sense strand
gcaaggcgcagauccucaa

SEQ ID NO: 287991 - RNA, 19 nt, Homo sapiens
  misc_RNA (1)...(19): siRNA sense strand
gcucaccgcccacaugaug

SEQ ID NO: 287992 - RNA, 19 nt, Homo sapiens
  misc_RNA (1)...(19): siRNA sense strand
gcaaugaagagacggagau

SEQ ID NO: 287993 - RNA, 19 nt, Homo sapiens
  misc_RNA (1)...(19): siRNA sense strand
gaccgcuacuauuaugaaa

SEQ ID NO: 287994 - RNA, 19 nt, Homo sapiens
  misc_RNA (1)...(19): siRNA sense strand
gcuuugcaguccaucauga

SEQ ID NO: 287995 - RNA, 19 nt, Homo sapiens
  misc_RNA (1)...(19): siRNA sense strand
gaagagacggagaucaaag

SEQ ID NO: 287996 - RNA, 19 nt, Homo sapiens
  misc_RNA (1)...(19): siRNA sense strand
ccacagagggcaaguacau

SEQ ID NO: 287997 - RNA, 19 nt, Homo sapiens
  misc_RNA (1)...(19): siRNA sense strand
gcgaugcuguacaagauca

SEQ ID NO: 287998 - RNA, 19 nt, Homo sapiens
  misc_RNA (1)...(19): siRNA sense strand
cccagaaggugcugaagug

SEQ ID NO: 287999 - RNA, 19 nt, Homo sapiens
  misc_RNA (1)...(19): siRNA sense strand
gcagaauguuucgaaaguc

SEQ ID NO: 288000 - RNA, 19 nt, Homo sapiens
  misc_RNA (1)...(19): siRNA sense strand
gcaaggucaacaucaagaa

SEQ ID NO: 288001 - RNA, 19 nt, Homo sapiens
  misc_RNA (1)...(19): siRNA sense strand
agaaagugccucugaagga

SEQ ID NO: 288002 - RNA, 19 nt, Homo sapiens
  misc_RNA (1)...(19): siRNA sense strand
gcucuggauuuaaagaagu

SEQ ID NO: 288003 - RNA, 19 nt, Homo sapiens
  misc_RNA (1)...(19): siRNA sense strand
ggaggaagucagcggcaaa

SEQ ID NO: 288004 - RNA, 19 nt, Homo sapiens
  misc_RNA (1)...(19): siRNA sense strand
aagagaagauccaguccau

SEQ ID NO: 288005 - RNA, 19 nt, Homo sapiens
  misc_RNA (1)...(19): siRNA sense strand
uaagucauuuggagacaca

SEQ ID NO: 288006 - RNA, 19 nt, Homo sapiens
  misc_RNA (1)...(19): siRNA sense strand
gggugcacaucucgaaguu

SEQ ID NO: 288007 - RNA, 19 nt, Homo sapiens
  misc_RNA (1)...(19): siRNA sense strand
cuaagaagggcaagcaguu

SEQ ID NO: 288008 - RNA, 19 nt, Homo sapiens
  misc_RNA (1)...(19): siRNA sense strand
ugaucuaugugacugaguu

SEQ ID NO: 288009 - RNA, 19 nt, Homo sapiens
  misc_RNA (1)...(19): siRNA sense strand
gagacacacuugggcuuca

SEQ ID NO: 288010 - RNA, 19 nt, Homo sapiens
  misc_RNA (1)...(19): siRNA sense strand
guacuguggacacuccuuu

SEQ ID NO: 288011 - RNA, 19 nt, Homo sapiens
  misc_RNA (1)...(19): siRNA sense strand
aaagaaagagccagagaag

SEQ ID NO: 288012 - RNA, 19 nt, Homo sapiens
  misc_RNA (1)...(19): siRNA sense strand
gcacaagagcaacgugucu

SEQ ID NO: 288013 - RNA, 19 nt, Homo sapiens
  misc_RNA (1)...(19): siRNA sense strand
ucuccaagcugccacucaa

SEQ ID NO: 288014 - RNA, 19 nt, Homo sapiens
  misc_RNA (1)...(19): siRNA sense strand
gaccagcccauugacuuaa

SEQ ID NO: 288015 - RNA, 19 nt, Homo sapiens
  misc_RNA (1)...(19): siRNA sense strand
uggcgaugcuguacaagau

SEQ ID NO: 288016 - RNA, 19 nt, Homo sapiens
  misc_RNA (1)...(19): siRNA sense strand
agaaggugcugaagugcau

SEQ ID NO: 288017 - RNA, 19 nt, Homo sapiens
  misc_RNA (1)...(19): siRNA sense strand
caagggagggcuggacauu

SEQ ID NO: 288018 - RNA, 19 nt, Homo sapiens
  misc_RNA (1)...(19): siRNA sense strand
gaaaagaaagagccagaga

SEQ ID NO: 288019 - RNA, 19 nt, Homo sapiens
  misc_RNA (1)...(19): siRNA sense strand
gauccaguccaucccacua

SEQ ID NO: 288020 - RNA, 19 nt, Homo sapiens
  misc_RNA (1)...(19): siRNA sense strand
gcuggacccugugguggaa

SEQ ID NO: 288021 - RNA, 19 nt, Homo sapiens
  misc_RNA (1)...(19): siRNA sense strand
cagcuacaccuggcaguuu

SEQ ID NO: 288022 - RNA, 19 nt, Homo sapiens
  misc_RNA (1)...(19): siRNA sense strand
gcaaguuccggugcaaaga

SEQ ID NO: 288023 - RNA, 19 nt, Homo sapiens
  misc_RNA (1)...(19): siRNA sense strand
gaggaccaccugaucuaug

SEQ ID NO: 288024 - RNA, 19 nt, Homo sapiens
  misc_RNA (1)...(19): siRNA sense strand
cgaaauuccuaaagaaccu

SEQ ID NO: 288025 - RNA, 19 nt, Homo sapiens
  misc_RNA (1)...(19): siRNA sense strand
ccacuaccgugacgacaac

SEQ ID NO: 288026 - RNA, 19 nt, Homo sapiens
  misc_RNA (1)...(19): siRNA sense strand
gaucaucauggaccacuca

SEQ ID NO: 288027 - RNA, 19 nt, Homo sapiens
  misc_RNA (1)...(19): siRNA sense strand
acagcagaauguuucgaaa

SEQ ID NO: 288028 - RNA, 19 nt, Homo sapiens
  misc_RNA (1)...(19): siRNA sense strand
aaugugaaguaccaguuga

SEQ ID NO: 288029 - RNA, 19 nt, Homo sapiens
  misc_RNA (1)...(19): siRNA sense strand
aaacagcgaccagcccauu

SEQ ID NO: 288030 - RNA, 19 nt, Homo sapiens
  misc_RNA (1)...(19): siRNA sense strand
caucgaccgcuacuauuau

SEQ ID NO: 288031 - RNA, 19 nt, Homo sapiens
  misc_RNA (1)...(19): siRNA sense strand
ggaagucagcggcaaacca

SEQ ID NO: 288032 - RNA, 19 nt, Homo sapiens
  misc_RNA (1)...(19): siRNA sense strand
gucaaacugcaccuuagua

SEQ ID NO: 288033 - RNA, 19 nt, Homo sapiens
  misc_RNA (1)...(19): siRNA sense strand
gcaacgauugugccucuca

SEQ ID NO: 288034 - RNA, 19 nt, Homo sapiens
  misc_RNA (1)...(19): siRNA sense strand
uuacugggcucuccaugac

SEQ ID NO: 288035 - RNA, 19 nt, Homo sapiens
  misc_RNA (1)...(19): siRNA sense strand
gcgaccagcccauugacuu

SEQ ID NO: 288036 - RNA, 19 nt, Homo sapiens
  misc_RNA (1)...(19): siRNA sense strand
gcggcaaaccacagaagaa

SEQ ID NO: 288037 - RNA, 19 nt, Homo sapiens
  misc_RNA (1)...(19): siRNA sense strand
uaagaagggcaagcaguug

SEQ ID NO: 288038 - RNA, 19 nt, Homo sapiens
  misc_RNA (1)...(19): siRNA sense strand
agacuugggcuccacauuc

SEQ ID NO: 288039 - RNA, 19 nt, Homo sapiens
  misc_RNA (1)...(19): siRNA sense strand
cgaccgcuacuauuaugaa

SEQ ID NO: 288040 - RNA, 19 nt, Homo sapiens
  misc_RNA (1)...(19): siRNA sense strand
gggacaaggacuccgagaa

SEQ ID NO: 288041 - RNA, 19 nt, Homo sapiens
  misc_RNA (1)...(19): siRNA sense strand
gaccaccugaucuauguga

SEQ ID NO: 288042 - RNA, 19 nt, Homo sapiens
  misc_RNA (1)...(19): siRNA sense strand
aggaccaccugaucuaugu

SEQ ID NO: 288043 - RNA, 19 nt, Homo sapiens
  misc_RNA (1)...(19): siRNA sense strand
caaugugaaguaccaguug

SEQ ID NO: 288044 - RNA, 19 nt, Homo sapiens
  misc_RNA (1)...(19): siRNA sense strand
ccuccacaguuucagagaa

SEQ ID NO: 288045 - RNA, 19 nt, Homo sapiens
  misc_RNA (1)...(19): siRNA sense strand
uccacgcccuccacaguuu

SEQ ID NO: 288046 - RNA, 19 nt, Homo sapiens
  misc_RNA (1)...(19): siRNA sense strand
cgggcaaggucaacaucaa

SEQ ID NO: 288047 - RNA, 19 nt, Homo sapiens
  misc_RNA (1)...(19): siRNA sense strand
cagcucaccgcccacauga

SEQ ID NO: 288048 - RNA, 19 nt, Homo sapiens
  misc_RNA (1)...(19): siRNA sense strand
ugaagagacggagaucaaa

SEQ ID NO: 288049 - RNA, 19 nt, Homo sapiens
  misc_RNA (1)...(19): siRNA sense strand
gaagaucaaggaggagagu

SEQ ID NO: 288050 - RNA, 19 nt, Homo sapiens
  misc_RNA (1)...(19): siRNA sense strand
ccgaggaccaccugaucua

SEQ ID NO: 288051 - RNA, 19 nt, Homo sapiens
  misc_RNA (1)...(19): siRNA sense strand
gcagcagacguccucguau

SEQ ID NO: 288052 - RNA, 19 nt, Homo sapiens
  misc_RNA (1)...(19): siRNA sense strand
ccaaugugaaguaccaguu

SEQ ID NO: 288053 - RNA, 19 nt, Homo sapiens
  misc_RNA (1)...(19): siRNA sense strand
ccagauagcugcaucauca

SEQ ID NO: 288054 - RNA, 19 nt, Homo sapiens
  misc_RNA (1)...(19): siRNA sense strand
caccagauguuccuauuaa

SEQ ID NO: 288055 - RNA, 19 nt, Homo sapiens
  misc_RNA (1)...(19): siRNA sense strand
caacauuacuaccaguuau

SEQ ID NO: 288056 - RNA, 19 nt, Homo sapiens
  misc_RNA (1)...(19): siRNA sense strand
ccagcuucauucaacauua

SEQ ID NO: 288057 - RNA, 19 nt, Homo sapiens
  misc_RNA (1)...(19): siRNA sense strand
caucagcccacuccagaua

SEQ ID NO: 288058 - RNA, 19 nt, Homo sapiens
  misc_RNA (1)...(19): siRNA sense strand
cagauuggauccagcuuca

SEQ ID NO: 288059 - RNA, 19 nt, Homo sapiens
  misc_RNA (1)...(19): siRNA sense strand
ggauccagcuucauucaac

SEQ ID NO: 288060 - RNA, 19 nt, Homo sapiens
  misc_RNA (1)...(19): siRNA sense strand
gauuggauccagcuucauu

SEQ ID NO: 288061 - RNA, 19 nt, Homo sapiens
  misc_RNA (1)...(19): siRNA sense strand
ccaccagauguuccuauua

SEQ ID NO: 288062 - RNA, 19 nt, Homo sapiens
  misc_RNA (1)...(19): siRNA sense strand
cagauguuccuauuaaaga

SEQ ID NO: 288063 - RNA, 19 nt, Homo sapiens
  misc_RNA (1)...(19): siRNA sense strand
ucaacauuacuaccaguua

SEQ ID NO: 288064 - RNA, 19 nt, Homo sapiens
  misc_RNA (1)...(19): siRNA sense strand
caacgaugcuuggguuugc

SEQ ID NO: 288065 - RNA, 19 nt, Homo sapiens
  misc_RNA (1)...(19): siRNA sense strand
gauccagcuucauucaaca

SEQ ID NO: 288066 - RNA, 19 nt, Homo sapiens
  misc_RNA (1)...(19): siRNA sense strand
aagcugccauuguggagaa

SEQ ID NO: 288067 - RNA, 19 nt, Homo sapiens
  misc_RNA (1)...(19): siRNA sense strand
cagcuucauucaacauuac

SEQ ID NO: 288068 - RNA, 19 nt, Homo sapiens
  misc_RNA (1)...(19): siRNA sense strand
ccagauguuccuauuaaag

SEQ ID NO: 288069 - RNA, 19 nt, Homo sapiens
  misc_RNA (1)...(19): siRNA sense strand
gugggaaggacaacaguuc

SEQ ID NO: 288070 - RNA, 19 nt, Homo sapiens
  misc_RNA (1)...(19): siRNA sense strand
uccaccagauguuccuauu

SEQ ID NO: 288071 - RNA, 19 nt, Homo sapiens
  misc_RNA (1)...(19): siRNA sense strand
ucaccgcgcaggaccauca

SEQ ID NO: 288072 - RNA, 19 nt, Homo sapiens
  misc_RNA (1)...(19): siRNA sense strand
uugcaccaaugacauguuc

SEQ ID NO: 288073 - RNA, 19 nt, Homo sapiens
  misc_RNA (1)...(19): siRNA sense strand
gcaaaggagagccagauua

SEQ ID NO: 288074 - RNA, 19 nt, Homo sapiens
  misc_RNA (1)...(19): siRNA sense strand
gcuccagccucccuucuua

SEQ ID NO: 288075 - RNA, 19 nt, Homo sapiens
  misc_RNA (1)...(19): siRNA sense strand
caaaggagagccagauuaa

SEQ ID NO: 288076 - RNA, 19 nt, Homo sapiens
  misc_RNA (1)...(19): siRNA sense strand
gauuaagggugaagucuga

SEQ ID NO: 288077 - RNA, 19 nt, Homo sapiens
  misc_RNA (1)...(19): siRNA sense strand
ccagaaguguuuaagcuuu

SEQ ID NO: 288078 - RNA, 19 nt, Homo sapiens
  misc_RNA (1)...(19): siRNA sense strand
gcacuuucccgccucuuua

SEQ ID NO: 288079 - RNA, 19 nt, Homo sapiens
  misc_RNA (1)...(19): siRNA sense strand
gauccuuccuacagcguua

SEQ ID NO: 288080 - RNA, 19 nt, Homo sapiens
  misc_RNA (1)...(19): siRNA sense strand
gagguguagugcaguauga

SEQ ID NO: 288081 - RNA, 19 nt, Homo sapiens
  misc_RNA (1)...(19): siRNA sense strand
cgacagcucugcggacuuc

SEQ ID NO: 288082 - RNA, 19 nt, Homo sapiens
  misc_RNA (1)...(19): siRNA sense strand
gaguucggcuucuauguca

SEQ ID NO: 288083 - RNA, 19 nt, Homo sapiens
  misc_RNA (1)...(19): siRNA sense strand
cgaguauaaugacguggua

SEQ ID NO: 288084 - RNA, 19 nt, Homo sapiens
  misc_RNA (1)...(19): siRNA sense strand
gaacaucuuccagcagcua

SEQ ID NO: 288085 - RNA, 19 nt, Homo sapiens
  misc_RNA (1)...(19): siRNA sense strand
gggccuggcucagugauga

SEQ ID NO: 288086 - RNA, 19 nt, Homo sapiens
  misc_RNA (1)...(19): siRNA sense strand
gcucucagccuugucagua

SEQ ID NO: 288087 - RNA, 19 nt, Homo sapiens
  misc_RNA (1)...(19): siRNA sense strand
cgacagacgauccuuccua

SEQ ID NO: 288088 - RNA, 19 nt, Homo sapiens
  misc_RNA (1)...(19): siRNA sense strand
gagaaucccagauguccuu

SEQ ID NO: 288089 - RNA, 19 nt, Homo sapiens
  misc_RNA (1)...(19): siRNA sense strand
aaagugcuguuuguuaaug

SEQ ID NO: 288090 - RNA, 19 nt, Homo sapiens
  misc_RNA (1)...(19): siRNA sense strand
gcuuuaggauccucagaau

SEQ ID NO: 288091 - RNA, 19 nt, Homo sapiens
  misc_RNA (1)...(19): siRNA sense strand
ggccagaaguguuuaagcu

SEQ ID NO: 288092 - RNA, 19 nt, Homo sapiens
  misc_RNA (1)...(19): siRNA sense strand
gugagcacauucagcaguu

SEQ ID NO: 288093 - RNA, 19 nt, Homo sapiens
  misc_RNA (1)...(19): siRNA sense strand
cggcagugguuguaucaga

SEQ ID NO: 288094 - RNA, 19 nt, Homo sapiens
  misc_RNA (1)...(19): siRNA sense strand
gagcacagaaccucaacug

SEQ ID NO: 288095 - RNA, 19 nt, Homo sapiens
  misc_RNA (1)...(19): siRNA sense strand
ggcucaagcuggcaaagga

SEQ ID NO: 288096 - RNA, 19 nt, Homo sapiens
  misc_RNA (1)...(19): siRNA sense strand
ucagacauguaccgaguuc

SEQ ID NO: 288097 - RNA, 19 nt, Homo sapiens
  misc_RNA (1)...(19): siRNA sense strand
uggcaugugcuaaguguaa

SEQ ID NO: 288098 - RNA, 19 nt, Homo sapiens
  misc_RNA (1)...(19): siRNA sense strand
gcgccugggugagcacauu

SEQ ID NO: 288099 - RNA, 19 nt, Homo sapiens
  misc_RNA (1)...(19): siRNA sense strand
gauaagccuggaacacaga

SEQ ID NO: 288100 - RNA, 19 nt, Homo sapiens
  misc_RNA (1)...(19): siRNA sense strand
gccuugcgcuggcugaugu

SEQ ID NO: 288101 - RNA, 19 nt, Homo sapiens
  misc_RNA (1)...(19): siRNA sense strand
uuuaggauccucagaauca

SEQ ID NO: 288102 - RNA, 19 nt, Homo sapiens
  misc_RNA (1)...(19): siRNA sense strand
gcagguguuugggcucuca

SEQ ID NO: 288103 - RNA, 19 nt, Homo sapiens
  misc_RNA (1)...(19): siRNA sense strand
ggauuucuccgaguauaau

SEQ ID NO: 288104 - RNA, 19 nt, Homo sapiens
  misc_RNA (1)...(19): siRNA sense strand
gugauaagccuggaacaca

SEQ ID NO: 288105 - RNA, 19 nt, Homo sapiens
  misc_RNA (1)...(19): siRNA sense strand
gaccggcagugguuguauc

SEQ ID NO: 288106 - RNA, 19 nt, Homo sapiens
  misc_RNA (1)...(19): siRNA sense strand
ugggagguguagugcagua

SEQ ID NO: 288107 - RNA, 19 nt, Homo sapiens
  misc_RNA (1)...(19): siRNA sense strand
cagcguuacugggugaaug

SEQ ID NO: 288108 - RNA, 19 nt, Homo sapiens
  misc_RNA (1)...(19): siRNA sense strand
gcccucugcucuugguuuc

SEQ ID NO: 288109 - RNA, 19 nt, Homo sapiens
  misc_RNA (1)...(19): siRNA sense strand
cagaaguguuuaagcuuuu

SEQ ID NO: 288110 - RNA, 19 nt, Homo sapiens
  misc_RNA (1)...(19): siRNA sense strand
gcacuggcucccacugcuu

SEQ ID NO: 288111 - RNA, 19 nt, Homo sapiens
  misc_RNA (1)...(19): siRNA sense strand
ggagguguagugcaguaug

SEQ ID NO: 288112 - RNA, 19 nt, Homo sapiens
  misc_RNA (1)...(19): siRNA sense strand
ggcaaaggagagccagauu

SEQ ID NO: 288113 - RNA, 19 nt, Homo sapiens
  misc_RNA (1)...(19): siRNA sense strand
cuggauuucuccgaguaua

SEQ ID NO: 288114 - RNA, 19 nt, Homo sapiens
  misc_RNA (1)...(19): siRNA sense strand
ccucccagcuagaccuaug

SEQ ID NO: 288115 - RNA, 19 nt, Homo sapiens
  misc_RNA (1)...(19): siRNA sense strand
ugagcacauucagcaguuu

SEQ ID NO: 288116 - RNA, 19 nt, Homo sapiens
  misc_RNA (1)...(19): siRNA sense strand
aaggagagccagauuaagg

SEQ ID NO: 288117 - RNA, 19 nt, Homo sapiens
  misc_RNA (1)...(19): siRNA sense strand
ccuggcaugugcuaagugu

SEQ ID NO: 288118 - RNA, 19 nt, Homo sapiens
  misc_RNA (1)...(19): siRNA sense strand
gagcacauucagcaguuuc

SEQ ID NO: 288119 - RNA, 19 nt, Homo sapiens
  misc_RNA (1)...(19): siRNA sense strand
gcccagcuccgcuucuugu

SEQ ID NO: 288120 - RNA, 19 nt, Homo sapiens
  misc_RNA (1)...(19): siRNA sense strand
uaugugagcagguguuugg

SEQ ID NO: 288121 - RNA, 19 nt, Homo sapiens
  misc_RNA (1)...(19): siRNA sense strand
gccagaaguguuuaagcuu

SEQ ID NO: 288122 - RNA, 19 nt, Homo sapiens
  misc_RNA (1)...(19): siRNA sense strand
uggcucagacgaacuccua

SEQ ID NO: 288123 - RNA, 19 nt, Homo sapiens
  misc_RNA (1)...(19): siRNA sense strand
aaucccagauguccuuucu

SEQ ID NO: 288124 - RNA, 19 nt, Homo sapiens
  misc_RNA (1)...(19): siRNA sense strand
gggccgugcuggauuucuc

SEQ ID NO: 288125 - RNA, 19 nt, Homo sapiens
  misc_RNA (1)...(19): siRNA sense strand
cgaguucggcuucuauguc

SEQ ID NO: 288126 - RNA, 19 nt, Homo sapiens
  misc_RNA (1)...(19): siRNA sense strand
gguuguaucagacauguac

SEQ ID NO: 288127 - RNA, 19 nt, Homo sapiens
  misc_RNA (1)...(19): siRNA sense strand
aaaccaggcggagcuguug

SEQ ID NO: 288128 - RNA, 19 nt, Homo sapiens
  misc_RNA (1)...(19): siRNA sense strand
aagccuggaacacagauuu

SEQ ID NO: 288129 - RNA, 19 nt, Homo sapiens
  misc_RNA (1)...(19): siRNA sense strand
gaaucaacucuucuuaucc

SEQ ID NO: 288130 - RNA, 19 nt, Homo sapiens
  misc_RNA (1)...(19): siRNA sense strand
gugguuguaucagacaugu

SEQ ID NO: 288131 - RNA, 19 nt, Homo sapiens
  misc_RNA (1)...(19): siRNA sense strand
ggcacuuucccgccucuuu

SEQ ID NO: 288132 - RNA, 19 nt, Homo sapiens
  misc_RNA (1)...(19): siRNA sense strand
gcuggaggccuggaaaugg

SEQ ID NO: 288133 - RNA, 19 nt, Homo sapiens
  misc_RNA (1)...(19): siRNA sense strand
ggaaacaguugcagagcua

SEQ ID NO: 288134 - RNA, 19 nt, Homo sapiens
  misc_RNA (1)...(19): siRNA sense strand
ugacagagauugaugagaa

SEQ ID NO: 288135 - RNA, 19 nt, Homo sapiens
  misc_RNA (1)...(19): siRNA sense strand
gcuaagaacuguugagagu

SEQ ID NO: 288136 - RNA, 19 nt, Homo sapiens
  misc_RNA (1)...(19): siRNA sense strand
gaaccaagguguuugugau

SEQ ID NO: 288137 - RNA, 19 nt, Homo sapiens
  misc_RNA (1)...(19): siRNA sense strand
gaccagauuucuagauauu

SEQ ID NO: 288138 - RNA, 19 nt, Homo sapiens
  misc_RNA (1)...(19): siRNA sense strand
gagugaagcugcaucuuau

SEQ ID NO: 288139 - RNA, 19 nt, Homo sapiens
  misc_RNA (1)...(19): siRNA sense strand
uaagaacuguugagaguga

SEQ ID NO: 288140 - RNA, 19 nt, Homo sapiens
  misc_RNA (1)...(19): siRNA sense strand
gauagaagauggaaacaac

SEQ ID NO: 288141 - RNA, 19 nt, Homo sapiens
  misc_RNA (1)...(19): siRNA sense strand
gaaucaauaugucacucua

SEQ ID NO: 288142 - RNA, 19 nt, Homo sapiens
  misc_RNA (1)...(19): siRNA sense strand
ccaaagaaguuauuagaac

SEQ ID NO: 288143 - RNA, 19 nt, Homo sapiens
  misc_RNA (1)...(19): siRNA sense strand
gaagguggaucaggaagug

SEQ ID NO: 288144 - RNA, 19 nt, Homo sapiens
  misc_RNA (1)...(19): siRNA sense strand
gauccacucugacaugaau

SEQ ID NO: 288145 - RNA, 19 nt, Homo sapiens
  misc_RNA (1)...(19): siRNA sense strand
ggaccagauuucuagauau

SEQ ID NO: 288146 - RNA, 19 nt, Homo sapiens
  misc_RNA (1)...(19): siRNA sense strand
cagaagacuugguggcaaa

SEQ ID NO: 288147 - RNA, 19 nt, Homo sapiens
  misc_RNA (1)...(19): siRNA sense strand
gaagauggaaacaacuuug

SEQ ID NO: 288148 - RNA, 19 nt, Homo sapiens
  misc_RNA (1)...(19): siRNA sense strand
ugaaggaaccaaucuuaaa

SEQ ID NO: 288149 - RNA, 19 nt, Homo sapiens
  misc_RNA (1)...(19): siRNA sense strand
gacagagauugaugagaaa

SEQ ID NO: 288150 - RNA, 19 nt, Homo sapiens
  misc_RNA (1)...(19): siRNA sense strand
agagugaagcugcaucuua

SEQ ID NO: 288151 - RNA, 19 nt, Homo sapiens
  misc_RNA (1)...(19): siRNA sense strand
uggaccagauuucuagaua

SEQ ID NO: 288152 - RNA, 19 nt, Homo sapiens
  misc_RNA (1)...(19): siRNA sense strand
aaacauccaugaccuaacu

SEQ ID NO: 288153 - RNA, 19 nt, Homo sapiens
  misc_RNA (1)...(19): siRNA sense strand
ggacauuauugagaaagug

SEQ ID NO: 288154 - RNA, 19 nt, Homo sapiens
  misc_RNA (1)...(19): siRNA sense strand
gcagagcuaagaacuguug

SEQ ID NO: 288155 - RNA, 19 nt, Homo sapiens
  misc_RNA (1)...(19): siRNA sense strand
gaaggaaccaaucuuaaac

SEQ ID NO: 288156 - RNA, 19 nt, Homo sapiens
  misc_RNA (1)...(19): siRNA sense strand
gaagguuggaugaguguga

SEQ ID NO: 288157 - RNA, 19 nt, Homo sapiens
  misc_RNA (1)...(19): siRNA sense strand
ccaaggaaccaagguguuu

SEQ ID NO: 288158 - RNA, 19 nt, Homo sapiens
  misc_RNA (1)...(19): siRNA sense strand
gagcagcaaugcagagacu

SEQ ID NO: 288159 - RNA, 19 nt, Homo sapiens
  misc_RNA (1)...(19): siRNA sense strand
gaaagugaaaccugagauc

SEQ ID NO: 288160 - RNA, 19 nt, Homo sapiens
  misc_RNA (1)...(19): siRNA sense strand
uggauggucccacuuauaa

SEQ ID NO: 288161 - RNA, 19 nt, Homo sapiens
  misc_RNA (1)...(19): siRNA sense strand
gauggucccacuuauaaga

SEQ ID NO: 288162 - RNA, 19 nt, Homo sapiens
  misc_RNA (1)...(19): siRNA sense strand
aagacuugguggcaaauuu

SEQ ID NO: 288163 - RNA, 19 nt, Homo sapiens
  misc_RNA (1)...(19): siRNA sense strand
gagauccggcuguugauug

SEQ ID NO: 288164 - RNA, 19 nt, Homo sapiens
  misc_RNA (1)...(19): siRNA sense strand
ggaagugaagcucaagguu

SEQ ID NO: 288165 - RNA, 19 nt, Homo sapiens
  misc_RNA (1)...(19): siRNA sense strand
gagcugaggaaucaauaug

SEQ ID NO: 288166 - RNA, 19 nt, Homo sapiens
  misc_RNA (1)...(19): siRNA sense strand
ucugaaggaaccaaucuua

SEQ ID NO: 288167 - RNA, 19 nt, Homo sapiens
  misc_RNA (1)...(19): siRNA sense strand
gcugaggaaucaauauguc

SEQ ID NO: 288168 - RNA, 19 nt, Homo sapiens
  misc_RNA (1)...(19): siRNA sense strand
agagauugaugagaaagaa

SEQ ID NO: 288169 - RNA, 19 nt, Homo sapiens
  misc_RNA (1)...(19): siRNA sense strand
gagcuaagaacuguugaga

SEQ ID NO: 288170 - RNA, 19 nt, Homo sapiens
  misc_RNA (1)...(19): siRNA sense strand
ggaaccaagguguuuguga

SEQ ID NO: 288171 - RNA, 19 nt, Homo sapiens
  misc_RNA (1)...(19): siRNA sense strand
gguggacauuauugagaaa

SEQ ID NO: 288172 - RNA, 19 nt, Homo sapiens
  misc_RNA (1)...(19): siRNA sense strand
gacuggauggucccacuua

SEQ ID NO: 288173 - RNA, 19 nt, Homo sapiens
  misc_RNA (1)...(19): siRNA sense strand
gagaaagugaaaccugaga

SEQ ID NO: 288174 - RNA, 19 nt, Homo sapiens
  misc_RNA (1)...(19): siRNA sense strand
ggauagaagauggaaacaa

SEQ ID NO: 288175 - RNA, 19 nt, Homo sapiens
  misc_RNA (1)...(19): siRNA sense strand
ccugagauccggcuguuga

SEQ ID NO: 288176 - RNA, 19 nt, Homo sapiens
  misc_RNA (1)...(19): siRNA sense strand
uugcagagcuaagaacugu

SEQ ID NO: 288177 - RNA, 19 nt, Homo sapiens
  misc_RNA (1)...(19): siRNA sense strand
ccauucuucucaccaauag

SEQ ID NO: 288178 - RNA, 19 nt, Homo sapiens
  misc_RNA (1)...(19): siRNA sense strand
gcaccgugacagagauuga

SEQ ID NO: 288179 - RNA, 19 nt, Homo sapiens
  misc_RNA (1)...(19): siRNA sense strand
gacauuauugagaaaguga

SEQ ID NO: 288180 - RNA, 19 nt, Homo sapiens
  misc_RNA (1)...(19): siRNA sense strand
agauccggcuguugauuga

SEQ ID NO: 288181 - RNA, 19 nt, Homo sapiens
  misc_RNA (1)...(19): siRNA sense strand
ggaaccaaucuuaaacauc

SEQ ID NO: 288182 - RNA, 19 nt, Homo sapiens
  misc_RNA (1)...(19): siRNA sense strand
ccaaugggaugcugaaaag

SEQ ID NO: 288183 - RNA, 19 nt, Homo sapiens
  misc_RNA (1)...(19): siRNA sense strand
gaagacuugguggcaaauu

SEQ ID NO: 288184 - RNA, 19 nt, Homo sapiens
  misc_RNA (1)...(19): siRNA sense strand
ggguacagcuccugauucc

SEQ ID NO: 288185 - RNA, 19 nt, Homo sapiens
  misc_RNA (1)...(19): siRNA sense strand
gcuguugauugagaaaugu

SEQ ID NO: 288186 - RNA, 19 nt, Homo sapiens
  misc_RNA (1)...(19): siRNA sense strand
ggcuguugauugagaaaug

SEQ ID NO: 288187 - RNA, 19 nt, Homo sapiens
  misc_RNA (1)...(19): siRNA sense strand
uuaaacauccaugaccuaa

SEQ ID NO: 288188 - RNA, 19 nt, Homo sapiens
  misc_RNA (1)...(19): siRNA sense strand
gcagcugguggacauuauu

SEQ ID NO: 288189 - RNA, 19 nt, Homo sapiens
  misc_RNA (1)...(19): siRNA sense strand
ugguggacauuauugagaa

SEQ ID NO: 288190 - RNA, 19 nt, Homo sapiens
  misc_RNA (1)...(19): siRNA sense strand
gaaacaguugcagagcuaa

SEQ ID NO: 288191 - RNA, 19 nt, Homo sapiens
  misc_RNA (1)...(19): siRNA sense strand
ucccaaagaaguuauuaga

SEQ ID NO: 288192 - RNA, 19 nt, Homo sapiens
  misc_RNA (1)...(19): siRNA sense strand
cugaaggaaccaaucuuaa

SEQ ID NO: 288193 - RNA, 19 nt, Homo sapiens
  misc_RNA (1)...(19): siRNA sense strand
aagcgaagguuggaugagu

SEQ ID NO: 288194 - RNA, 19 nt, Homo sapiens
  misc_RNA (1)...(19): siRNA sense strand
ggaaucaauaugucacucu

SEQ ID NO: 288195 - RNA, 19 nt, Homo sapiens
  misc_RNA (1)...(19): siRNA sense strand
ucagggagcggaucacaag

SEQ ID NO: 288196 - RNA, 19 nt, Homo sapiens
  misc_RNA (1)...(19): siRNA sense strand
uagaagauggaaacaacuu

SEQ ID NO: 288197 - RNA, 19 nt, Homo sapiens
  misc_RNA (1)...(19): siRNA sense strand
cagagcugaggaaucaaua

SEQ ID NO: 288198 - RNA, 19 nt, Homo sapiens
  misc_RNA (1)...(19): siRNA sense strand
caaggaaccaagguguuug

SEQ ID NO: 288199 - RNA, 19 nt, Homo sapiens
  misc_RNA (1)...(19): siRNA sense strand
cccaaagaaguuauuagaa

SEQ ID NO: 288200 - RNA, 19 nt, Homo sapiens
  misc_RNA (1)...(19): siRNA sense strand
uccaugaccuaacucagau

SEQ ID NO: 288201 - RNA, 19 nt, Homo sapiens
  misc_RNA (1)...(19): siRNA sense strand
cuggauggucccacuuaua

SEQ ID NO: 288202 - RNA, 19 nt, Homo sapiens
  misc_RNA (1)...(19): siRNA sense strand
gccuucggcucaucauauc

SEQ ID NO: 288203 - RNA, 19 nt, Homo sapiens
  misc_RNA (1)...(19): siRNA sense strand
agaagauggaaacaacuuu

SEQ ID NO: 288204 - RNA, 19 nt, Homo sapiens
  misc_RNA (1)...(19): siRNA sense strand
caggauagaagauggaaac

SEQ ID NO: 288205 - RNA, 19 nt, Homo sapiens
  misc_RNA (1)...(19): siRNA sense strand
uauuacaagagccaaauug

SEQ ID NO: 288206 - RNA, 19 nt, Homo sapiens
  misc_RNA (1)...(19): siRNA sense strand
cagcugguggacauuauug

SEQ ID NO: 288207 - RNA, 19 nt, Homo sapiens
  misc_RNA (1)...(19): siRNA sense strand
aggaaccaaucuuaaacau

SEQ ID NO: 288208 - RNA, 19 nt, Homo sapiens
  misc_RNA (1)...(19): siRNA sense strand
cccauucuucucaccaaua

SEQ ID NO: 288209 - RNA, 19 nt, Homo sapiens
  misc_RNA (1)...(19): siRNA sense strand
gagauugaugagaaagaau

SEQ ID NO: 288210 - RNA, 19 nt, Homo sapiens
  misc_RNA (1)...(19): siRNA sense strand
guggguacagcuccugauu

SEQ ID NO: 288211 - RNA, 19 nt, Homo sapiens
  misc_RNA (1)...(19): siRNA sense strand
ggaaacaguugcagagcua

SEQ ID NO: 288212 - RNA, 19 nt, Homo sapiens
  misc_RNA (1)...(19): siRNA sense strand
ugacagagauugaugagaa

SEQ ID NO: 288213 - RNA, 19 nt, Homo sapiens
  misc_RNA (1)...(19): siRNA sense strand
gcuaagaacuguugagagu

SEQ ID NO: 288214 - RNA, 19 nt, Homo sapiens
  misc_RNA (1)...(19): siRNA sense strand
gaaccaagguguuugugau

SEQ ID NO: 288215 - RNA, 19 nt, Homo sapiens
  misc_RNA (1)...(19): siRNA sense strand
gaccagauuucuagauauu

SEQ ID NO: 288216 - RNA, 19 nt, Homo sapiens
  misc_RNA (1)...(19): siRNA sense strand
gagugaagcugcaucuuau

SEQ ID NO: 288217 - RNA, 19 nt, Homo sapiens
  misc_RNA (1)...(19): siRNA sense strand
uaagaacuguugagaguga

SEQ ID NO: 288218 - RNA, 19 nt, Homo sapiens
  misc_RNA (1)...(19): siRNA sense strand
gauagaagauggaaacaac

SEQ ID NO: 288219 - RNA, 19 nt, Homo sapiens
  misc_RNA (1)...(19): siRNA sense strand
gaaucaauaugucacucua

SEQ ID NO: 288220 - RNA, 19 nt, Homo sapiens
  misc_RNA (1)...(19): siRNA sense strand
ccaaagaaguuauuagaac

SEQ ID NO: 288221 - RNA, 19 nt, Homo sapiens
  misc_RNA (1)...(19): siRNA sense strand
gaagguggaucaggaagug

SEQ ID NO: 288222 - RNA, 19 nt, Homo sapiens
  misc_RNA (1)...(19): siRNA sense strand
gauccacucugacaugaau

SEQ ID NO: 288223 - RNA, 19 nt, Homo sapiens
  misc_RNA (1)...(19): siRNA sense strand
ggaccagauuucuagauau

SEQ ID NO: 288224 - RNA, 19 nt, Homo sapiens
  misc_RNA (1)...(19): siRNA sense strand
cagaagacuugguggcaaa

SEQ ID NO: 288225 - RNA, 19 nt, Homo sapiens
  misc_RNA (1)...(19): siRNA sense strand
gaagauggaaacaacuuug

SEQ ID NO: 288226 - RNA, 19 nt, Homo sapiens
  misc_RNA (1)...(19): siRNA sense strand
ugaaggaaccaaucuuaaa

SEQ ID NO: 288227 - RNA, 19 nt, Homo sapiens
  misc_RNA (1)...(19): siRNA sense strand
gacagagauugaugagaaa

SEQ ID NO: 288228 - RNA, 19 nt, Homo sapiens
  misc_RNA (1)...(19): siRNA sense strand
agagugaagcugcaucuua

SEQ ID NO: 288229 - RNA, 19 nt, Homo sapiens
  misc_RNA (1)...(19): siRNA sense strand
uggaccagauuucuagaua

SEQ ID NO: 288230 - RNA, 19 nt, Homo sapiens
  misc_RNA (1)...(19): siRNA sense strand
aaacauccaugaccuaacu

SEQ ID NO: 288231 - RNA, 19 nt, Homo sapiens
  misc_RNA (1)...(19): siRNA sense strand
ggacauuauugagaaagug

SEQ ID NO: 288232 - RNA, 19 nt, Homo sapiens
  misc_RNA (1)...(19): siRNA sense strand
gcagagcuaagaacuguug

SEQ ID NO: 288233 - RNA, 19 nt, Homo sapiens
  misc_RNA (1)...(19): siRNA sense strand
gaaggaaccaaucuuaaac

SEQ ID NO: 288234 - RNA, 19 nt, Homo sapiens
  misc_RNA (1)...(19): siRNA sense strand
gaagguuggaugaguguga

SEQ ID NO: 288235 - RNA, 19 nt, Homo sapiens
  misc_RNA (1)...(19): siRNA sense strand
ccaaggaaccaagguguuu

SEQ ID NO: 288236 - RNA, 19 nt, Homo sapiens
  misc_RNA (1)...(19): siRNA sense strand
gagcagcaaugcagagacu

SEQ ID NO: 288237 - RNA, 19 nt, Homo sapiens
  misc_RNA (1)...(19): siRNA sense strand
gaaagugaaaccugagauc

SEQ ID NO: 288238 - RNA, 19 nt, Homo sapiens
  misc_RNA (1)...(19): siRNA sense strand
uggauggucccacuuauaa

SEQ ID NO: 288239 - RNA, 19 nt, Homo sapiens
  misc_RNA (1)...(19): siRNA sense strand
gauggucccacuuauaaga

SEQ ID NO: 288240 - RNA, 19 nt, Homo sapiens
  misc_RNA (1)...(19): siRNA sense strand
aagacuugguggcaaauuu

SEQ ID NO: 288241 - RNA, 19 nt, Homo sapiens
  misc_RNA (1)...(19): siRNA sense strand
gagauccggcuguugauug

SEQ ID NO: 288242 - RNA, 19 nt, Homo sapiens
  misc_RNA (1)...(19): siRNA sense strand
ggaagugaagcucaagguu

SEQ ID NO: 288243 - RNA, 19 nt, Homo sapiens
  misc_RNA (1)...(19): siRNA sense strand
gagcugaggaaucaauaug

SEQ ID NO: 288244 - RNA, 19 nt, Homo sapiens
  misc_RNA (1)...(19): siRNA sense strand
ucugaaggaaccaaucuua

SEQ ID NO: 288245 - RNA, 19 nt, Homo sapiens
  misc_RNA (1)...(19): siRNA sense strand
gcugaggaaucaauauguc

SEQ ID NO: 288246 - RNA, 19 nt, Homo sapiens
  misc_RNA (1)...(19): siRNA sense strand
agagauugaugagaaagaa

SEQ ID NO: 288247 - RNA, 19 nt, Homo sapiens
  misc_RNA (1)...(19): siRNA sense strand
gagcuaagaacuguugaga

SEQ ID NO: 288248 - RNA, 19 nt, Homo sapiens
  misc_RNA (1)...(19): siRNA sense strand
ggaaccaagguguuuguga

SEQ ID NO: 288249 - RNA, 19 nt, Homo sapiens
  misc_RNA (1)...(19): siRNA sense strand
gguggacauuauugagaaa

SEQ ID NO: 288250 - RNA, 19 nt, Homo sapiens
  misc_RNA (1)...(19): siRNA sense strand
gacuggauggucccacuua

SEQ ID NO: 288251 - RNA, 19 nt, Homo sapiens
  misc_RNA (1)...(19): siRNA sense strand
gagaaagugaaaccugaga

SEQ ID NO: 288252 - RNA, 19 nt, Homo sapiens
  misc_RNA (1)...(19): siRNA sense strand
ggauagaagauggaaacaa

SEQ ID NO: 288253 - RNA, 19 nt, Homo sapiens
  misc_RNA (1)...(19): siRNA sense strand
ccugagauccggcuguuga

SEQ ID NO: 288254 - RNA, 19 nt, Homo sapiens
  misc_RNA (1)...(19): siRNA sense strand
uugcagagcuaagaacugu

SEQ ID NO: 288255 - RNA, 19 nt, Homo sapiens
  misc_RNA (1)...(19): siRNA sense strand
ccauucuucucaccaauag

SEQ ID NO: 288256 - RNA, 19 nt, Homo sapiens
  misc_RNA (1)...(19): siRNA sense strand
gcaccgugacagagauuga

SEQ ID NO: 288257 - RNA, 19 nt, Homo sapiens
  misc_RNA (1)...(19): siRNA sense strand
gacauuauugagaaaguga

SEQ ID NO: 288258 - RNA, 19 nt, Homo sapiens
  misc_RNA (1)...(19): siRNA sense strand
agauccggcuguugauuga

SEQ ID NO: 288259 - RNA, 19 nt, Homo sapiens
  misc_RNA (1)...(19): siRNA sense strand
ggaaccaaucuuaaacauc

SEQ ID NO: 288260 - RNA, 19 nt, Homo sapiens
  misc_RNA (1)...(19): siRNA sense strand
ccaaugggaugcugaaaag

SEQ ID NO: 288261 - RNA, 19 nt, Homo sapiens
  misc_RNA (1)...(19): siRNA sense strand
gaagacuugguggcaaauu

SEQ ID NO: 288262 - RNA, 19 nt, Homo sapiens
  misc_RNA (1)...(19): siRNA sense strand
ggguacagcuccugauucc

SEQ ID NO: 288263 - RNA, 19 nt, Homo sapiens
  misc_RNA (1)...(19): siRNA sense strand
gcuguugauugagaaaugu

SEQ ID NO: 288264 - RNA, 19 nt, Homo sapiens
  misc_RNA (1)...(19): siRNA sense strand
ggcuguugauugagaaaug

SEQ ID NO: 288265 - RNA, 19 nt, Homo sapiens
  misc_RNA (1)...(19): siRNA sense strand
uuaaacauccaugaccuaa

SEQ ID NO: 288266 - RNA, 19 nt, Homo sapiens
  misc_RNA (1)...(19): siRNA sense strand
gcagcugguggacauuauu

SEQ ID NO: 288267 - RNA, 19 nt, Homo sapiens
  misc_RNA (1)...(19): siRNA sense strand
ugguggacauuauugagaa

SEQ ID NO: 288268 - RNA, 19 nt, Homo sapiens
  misc_RNA (1)...(19): siRNA sense strand
gaaacaguugcagagcuaa

SEQ ID NO: 288269 - RNA, 19 nt, Homo sapiens
  misc_RNA (1)...(19): siRNA sense strand
ucccaaagaaguuauuaga

SEQ ID NO: 288270 - RNA, 19 nt, Homo sapiens
  misc_RNA (1)...(19): siRNA sense strand
cugaaggaaccaaucuuaa

SEQ ID NO: 288271 - RNA, 19 nt, Homo sapiens
  misc_RNA (1)...(19): siRNA sense strand
aagcgaagguuggaugagu

SEQ ID NO: 288272 - RNA, 19 nt, Homo sapiens
  misc_RNA (1)...(19): siRNA sense strand
ggaaucaauaugucacucu

SEQ ID NO: 288273 - RNA, 19 nt, Homo sapiens
  misc_RNA (1)...(19): siRNA sense strand
ucagggagcggaucacaag

SEQ ID NO: 288274 - RNA, 19 nt, Homo sapiens
  misc_RNA (1)...(19): siRNA sense strand
uagaagauggaaacaacuu

SEQ ID NO: 288275 - RNA, 19 nt, Homo sapiens
  misc_RNA (1)...(19): siRNA sense strand
cagagcugaggaaucaaua

SEQ ID NO: 288276 - RNA, 19 nt, Homo sapiens
  misc_RNA (1)...(19): siRNA sense strand
caaggaaccaagguguuug

SEQ ID NO: 288277 - RNA, 19 nt, Homo sapiens
  misc_RNA (1)...(19): siRNA sense strand
cccaaagaaguuauuagaa

SEQ ID NO: 288278 - RNA, 19 nt, Homo sapiens
  misc_RNA (1)...(19): siRNA sense strand
uccaugaccuaacucagau

SEQ ID NO: 288279 - RNA, 19 nt, Homo sapiens
  misc_RNA (1)...(19): siRNA sense strand
cuggauggucccacuuaua

SEQ ID NO: 288280 - RNA, 19 nt, Homo sapiens
  misc_RNA (1)...(19): siRNA sense strand
gccuucggcucaucauauc

SEQ ID NO: 288281 - RNA, 19 nt, Homo sapiens
  misc_RNA (1)...(19): siRNA sense strand
agaagauggaaacaacuuu

SEQ ID NO: 288282 - RNA, 19 nt, Homo sapiens
  misc_RNA (1)...(19): siRNA sense strand
caggauagaagauggaaac

SEQ ID NO: 288283 - RNA, 19 nt, Homo sapiens
  misc_RNA (1)...(19): siRNA sense strand
uauuacaagagccaaauug

SEQ ID NO: 288284 - RNA, 19 nt, Homo sapiens
  misc_RNA (1)...(19): siRNA sense strand
cagcugguggacauuauug

SEQ ID NO: 288285 - RNA, 19 nt, Homo sapiens
  misc_RNA (1)...(19): siRNA sense strand
aggaaccaaucuuaaacau

SEQ ID NO: 288286 - RNA, 19 nt, Homo sapiens
  misc_RNA (1)...(19): siRNA sense strand
cccauucuucucaccaaua

SEQ ID NO: 288287 - RNA, 19 nt, Homo sapiens
  misc_RNA (1)...(19): siRNA sense strand
gagauugaugagaaagaau

SEQ ID NO: 288288 - RNA, 19 nt, Homo sapiens
  misc_RNA (1)...(19): siRNA sense strand
guggguacagcuccugauu

SEQ ID NO: 288289 - RNA, 19 nt, Homo sapiens
  misc_RNA (1)...(19): siRNA sense strand
gaacauacuucguuucuua

SEQ ID NO: 288290 - RNA, 19 nt, Homo sapiens
  misc_RNA (1)...(19): siRNA sense strand
gauggugaauugucuuuga

SEQ ID NO: 288291 - RNA, 19 nt, Homo sapiens
  misc_RNA (1)...(19): siRNA sense strand
gaaaaucaauuccucuuug

SEQ ID NO: 288292 - RNA, 19 nt, Homo sapiens
  misc_RNA (1)...(19): siRNA sense strand
uggacgaucugcacaauaa

SEQ ID NO: 288293 - RNA, 19 nt, Homo sapiens
  misc_RNA (1)...(19): siRNA sense strand
cacuaaacauuucucauga

SEQ ID NO: 288294 - RNA, 19 nt, Homo sapiens
  misc_RNA (1)...(19): siRNA sense strand
caauaagucugcuccugau

SEQ ID NO: 288295 - RNA, 19 nt, Homo sapiens
  misc_RNA (1)...(19): siRNA sense strand
gaaauucuggcauucuguu

SEQ ID NO: 288296 - RNA, 19 nt, Homo sapiens
  misc_RNA (1)...(19): siRNA sense strand
uaagaccugugcaguuguu

SEQ ID NO: 288297 - RNA, 19 nt, Homo sapiens
  misc_RNA (1)...(19): siRNA sense strand
gucaauagcucugauaaaa

SEQ ID NO: 288298 - RNA, 19 nt, Homo sapiens
  misc_RNA (1)...(19): siRNA sense strand
ugaagaaucgcagguuuaa

SEQ ID NO: 288299 - RNA, 19 nt, Homo sapiens
  misc_RNA (1)...(19): siRNA sense strand
gaaaggcuggcucuucaau

SEQ ID NO: 288300 - RNA, 19 nt, Homo sapiens
  misc_RNA (1)...(19): siRNA sense strand
ucgaaaggcuggcucuuca

SEQ ID NO: 288301 - RNA, 19 nt, Homo sapiens
  misc_RNA (1)...(19): siRNA sense strand
uaagccuggugaugucaua

SEQ ID NO: 288302 - RNA, 19 nt, Homo sapiens
  misc_RNA (1)...(19): siRNA sense strand
aagaaucgcagguuuaaga

SEQ ID NO: 288303 - RNA, 19 nt, Homo sapiens
  misc_RNA (1)...(19): siRNA sense strand
aaugaagaaucgcagguuu

SEQ ID NO: 288304 - RNA, 19 nt, Homo sapiens
  misc_RNA (1)...(19): siRNA sense strand
cuaaacauuucucaugauc

SEQ ID NO: 288305 - RNA, 19 nt, Homo sapiens
  misc_RNA (1)...(19): siRNA sense strand
acacuaaacauuucucaug

SEQ ID NO: 288306 - RNA, 19 nt, Homo sapiens
  misc_RNA (1)...(19): siRNA sense strand
uuuaagaccugugcaguug

SEQ ID NO: 288307 - RNA, 19 nt, Homo sapiens
  misc_RNA (1)...(19): siRNA sense strand
caauguagaagguuggaaa

SEQ ID NO: 288308 - RNA, 19 nt, Homo sapiens
  misc_RNA (1)...(19): siRNA sense strand
caauagcucugauaaaauc

SEQ ID NO: 288309 - RNA, 19 nt, Homo sapiens
  misc_RNA (1)...(19): siRNA sense strand
gagauggugaauugucuuu

SEQ ID NO: 288310 - RNA, 19 nt, Homo sapiens
  misc_RNA (1)...(19): siRNA sense strand
uaagucugcuccugaucuu

SEQ ID NO: 288311 - RNA, 19 nt, Homo sapiens
  misc_RNA (1)...(19): siRNA sense strand
guagaagguuggaaaauca

SEQ ID NO: 288312 - RNA, 19 nt, Homo sapiens
  misc_RNA (1)...(19): siRNA sense strand
auacuucguuucuuagaug

SEQ ID NO: 288313 - RNA, 19 nt, Homo sapiens
  misc_RNA (1)...(19): siRNA sense strand
caauuccucuuugguccua

SEQ ID NO: 288314 - RNA, 19 nt, Homo sapiens
  misc_RNA (1)...(19): siRNA sense strand
gauaaggaagaacauacuu

SEQ ID NO: 288315 - RNA, 19 nt, Homo sapiens
  misc_RNA (1)...(19): siRNA sense strand
gucggucacuugucaauag

SEQ ID NO: 288316 - RNA, 19 nt, Homo sapiens
  misc_RNA (1)...(19): siRNA sense strand
gagauaaggaagaacauac

SEQ ID NO: 288317 - RNA, 19 nt, Homo sapiens
  misc_RNA (1)...(19): siRNA sense strand
aggaagagguggacgaucu

SEQ ID NO: 288318 - RNA, 19 nt, Homo sapiens
  misc_RNA (1)...(19): siRNA sense strand
aaagaaauagcaagaacug

SEQ ID NO: 288319 - RNA, 19 nt, Homo sapiens
  misc_RNA (1)...(19): siRNA sense strand
cuggugaugucauacacua

SEQ ID NO: 288320 - RNA, 19 nt, Homo sapiens
  misc_RNA (1)...(19): siRNA sense strand
gccggacacuaaacauuuc

SEQ ID NO: 288321 - RNA, 19 nt, Homo sapiens
  misc_RNA (1)...(19): siRNA sense strand
caaaagaaauagcaagaac

SEQ ID NO: 288322 - RNA, 19 nt, Homo sapiens
  misc_RNA (1)...(19): siRNA sense strand
ggacacuaaacauuucuca

SEQ ID NO: 288323 - RNA, 19 nt, Homo sapiens
  misc_RNA (1)...(19): siRNA sense strand
ggcuggcucuucaaucuuc

SEQ ID NO: 288324 - RNA, 19 nt, Homo sapiens
  misc_RNA (1)...(19): siRNA sense strand
gugcaguuguuggaaauuc

SEQ ID NO: 288325 - RNA, 19 nt, Homo sapiens
  misc_RNA (1)...(19): siRNA sense strand
gguggacgaucugcacaau

SEQ ID NO: 288326 - RNA, 19 nt, Homo sapiens
  misc_RNA (1)...(19): siRNA sense strand
cgccggacacuaaacauuu

SEQ ID NO: 288327 - RNA, 19 nt, Homo sapiens
  misc_RNA (1)...(19): siRNA sense strand
gauaaaaucauucgaaagg

SEQ ID NO: 288328 - RNA, 19 nt, Homo sapiens
  misc_RNA (1)...(19): siRNA sense strand
ggaaauucuggcauucugu

SEQ ID NO: 288329 - RNA, 19 nt, Homo sapiens
  misc_RNA (1)...(19): siRNA sense strand
ccugugcaguuguuggaaa

SEQ ID NO: 288330 - RNA, 19 nt, Homo sapiens
  misc_RNA (1)...(19): siRNA sense strand
aaggcuggcucuucaaucu

SEQ ID NO: 288331 - RNA, 19 nt, Homo sapiens
  misc_RNA (1)...(19): siRNA sense strand
uguuggaaauucuggcauu

SEQ ID NO: 288332 - RNA, 19 nt, Homo sapiens
  misc_RNA (1)...(19): siRNA sense strand
cauacuucguuucuuagau

SEQ ID NO: 288333 - RNA, 19 nt, Homo sapiens
  misc_RNA (1)...(19): siRNA sense strand
ccagcacaauguagaaggu

SEQ ID NO: 288334 - RNA, 19 nt, Homo sapiens
  misc_RNA (1)...(19): siRNA sense strand
gaauguggaaaggagauug

SEQ ID NO: 288335 - RNA, 19 nt, Homo sapiens
  misc_RNA (1)...(19): siRNA sense strand
ugaucuacauagccuccua

SEQ ID NO: 288336 - RNA, 19 nt, Homo sapiens
  misc_RNA (1)...(19): siRNA sense strand
agagauaaggaagaacaua

SEQ ID NO: 288337 - RNA, 19 nt, Homo sapiens
  misc_RNA (1)...(19): siRNA sense strand
uugagucggucacuuguca

SEQ ID NO: 288338 - RNA, 19 nt, Homo sapiens
  misc_RNA (1)...(19): siRNA sense strand
augaagaaucgcagguuua

SEQ ID NO: 288339 - RNA, 19 nt, Homo sapiens
  misc_RNA (1)...(19): siRNA sense strand
gacagugaauguggaaagg

SEQ ID NO: 288340 - RNA, 19 nt, Homo sapiens
  misc_RNA (1)...(19): siRNA sense strand
uggaaauucuggcauucug

SEQ ID NO: 288341 - RNA, 19 nt, Homo sapiens
  misc_RNA (1)...(19): siRNA sense strand
guuuaagaccugugcaguu

SEQ ID NO: 288342 - RNA, 19 nt, Homo sapiens
  misc_RNA (1)...(19): siRNA sense strand
caaugaagaaucgcagguu

SEQ ID NO: 288343 - RNA, 19 nt, Homo sapiens
  misc_RNA (1)...(19): siRNA sense strand
cuagagauaaggaagaaca

SEQ ID NO: 288344 - RNA, 19 nt, Homo sapiens
  misc_RNA (1)...(19): siRNA sense strand
guuggaaauucuggcauuc

SEQ ID NO: 288345 - RNA, 19 nt, Homo sapiens
  misc_RNA (1)...(19): siRNA sense strand
aaauucuggcauucuguua

SEQ ID NO: 288346 - RNA, 19 nt, Homo sapiens
  misc_RNA (1)...(19): siRNA sense strand
ggaagagguggacgaucug

SEQ ID NO: 288347 - RNA, 19 nt, Homo sapiens
  misc_RNA (1)...(19): siRNA sense strand
ggagauggugaauugucuu

SEQ ID NO: 288348 - RNA, 19 nt, Homo sapiens
  misc_RNA (1)...(19): siRNA sense strand
ugucaauagcucugauaaa

SEQ ID NO: 288349 - RNA, 19 nt, Homo sapiens
  misc_RNA (1)...(19): siRNA sense strand
cggagauggugaauugucu

SEQ ID NO: 288350 - RNA, 19 nt, Homo sapiens
  misc_RNA (1)...(19): siRNA sense strand
aaucuuccagcacaaugua

SEQ ID NO: 288351 - RNA, 19 nt, Homo sapiens
  misc_RNA (1)...(19): siRNA sense strand
gaccugugcaguuguugga

SEQ ID NO: 288352 - RNA, 19 nt, Homo sapiens
  misc_RNA (1)...(19): siRNA sense strand
gacgaucugcacaauaagu

SEQ ID NO: 288353 - RNA, 19 nt, Homo sapiens
  misc_RNA (1)...(19): siRNA sense strand
guggacgaucugcacaaua

SEQ ID NO: 288354 - RNA, 19 nt, Homo sapiens
  misc_RNA (1)...(19): siRNA sense strand
gacaaaagaaauagcaaga

SEQ ID NO: 288355 - RNA, 19 nt, Homo sapiens
  misc_RNA (1)...(19): siRNA sense strand
auucuggcauucuguuaga

SEQ ID NO: 288356 - RNA, 19 nt, Homo sapiens
  misc_RNA (1)...(19): siRNA sense strand
gaacauacuucguuucuua

SEQ ID NO: 288357 - RNA, 19 nt, Homo sapiens
  misc_RNA (1)...(19): siRNA sense strand
gauggugaauugucuuuga

SEQ ID NO: 288358 - RNA, 19 nt, Homo sapiens
  misc_RNA (1)...(19): siRNA sense strand
gaaaaucaauuccucuuug

SEQ ID NO: 288359 - RNA, 19 nt, Homo sapiens
  misc_RNA (1)...(19): siRNA sense strand
uggacgaucugcacaauaa

SEQ ID NO: 288360 - RNA, 19 nt, Homo sapiens
  misc_RNA (1)...(19): siRNA sense strand
cacuaaacauuucucauga

SEQ ID NO: 288361 - RNA, 19 nt, Homo sapiens
  misc_RNA (1)...(19): siRNA sense strand
caauaagucugcuccugau

SEQ ID NO: 288362 - RNA, 19 nt, Homo sapiens
  misc_RNA (1)...(19): siRNA sense strand
gaaauucuggcauucuguu

SEQ ID NO: 288363 - RNA, 19 nt, Homo sapiens
  misc_RNA (1)...(19): siRNA sense strand
uaagaccugugcaguuguu

SEQ ID NO: 288364 - RNA, 19 nt, Homo sapiens
  misc_RNA (1)...(19): siRNA sense strand
gucaauagcucugauaaaa

SEQ ID NO: 288365 - RNA, 19 nt, Homo sapiens
  misc_RNA (1)...(19): siRNA sense strand
ugaagaaucgcagguuuaa

SEQ ID NO: 288366 - RNA, 19 nt, Homo sapiens
  misc_RNA (1)...(19): siRNA sense strand
gaaaggcuggcucuucaau

SEQ ID NO: 288367 - RNA, 19 nt, Homo sapiens
  misc_RNA (1)...(19): siRNA sense strand
ucgaaaggcuggcucuuca

SEQ ID NO: 288368 - RNA, 19 nt, Homo sapiens
  misc_RNA (1)...(19): siRNA sense strand
uaagccuggugaugucaua

SEQ ID NO: 288369 - RNA, 19 nt, Homo sapiens
  misc_RNA (1)...(19): siRNA sense strand
aagaaucgcagguuuaaga

SEQ ID NO: 288370 - RNA, 19 nt, Homo sapiens
  misc_RNA (1)...(19): siRNA sense strand
aaugaagaaucgcagguuu

SEQ ID NO: 288371 - RNA, 19 nt, Homo sapiens
  misc_RNA (1)...(19): siRNA sense strand
cuaaacauuucucaugauc

SEQ ID NO: 288372 - RNA, 19 nt, Homo sapiens
  misc_RNA (1)...(19): siRNA sense strand
acacuaaacauuucucaug

SEQ ID NO: 288373 - RNA, 19 nt, Homo sapiens
  misc_RNA (1)...(19): siRNA sense strand
uuuaagaccugugcaguug

SEQ ID NO: 288374 - RNA, 19 nt, Homo sapiens
  misc_RNA (1)...(19): siRNA sense strand
caauguagaagguuggaaa

SEQ ID NO: 288375 - RNA, 19 nt, Homo sapiens
  misc_RNA (1)...(19): siRNA sense strand
caauagcucugauaaaauc

SEQ ID NO: 288376 - RNA, 19 nt, Homo sapiens
  misc_RNA (1)...(19): siRNA sense strand
gagauggugaauugucuuu

SEQ ID NO: 288377 - RNA, 19 nt, Homo sapiens
  misc_RNA (1)...(19): siRNA sense strand
uaagucugcuccugaucuu

SEQ ID NO: 288378 - RNA, 19 nt, Homo sapiens
  misc_RNA (1)...(19): siRNA sense strand
guagaagguuggaaaauca

SEQ ID NO: 288379 - RNA, 19 nt, Homo sapiens
  misc_RNA (1)...(19): siRNA sense strand
auacuucguuucuuagaug

SEQ ID NO: 288380 - RNA, 19 nt, Homo sapiens
  misc_RNA (1)...(19): siRNA sense strand
caauuccucuuugguccua

SEQ ID NO: 288381 - RNA, 19 nt, Homo sapiens
  misc_RNA (1)...(19): siRNA sense strand
gauaaggaagaacauacuu

SEQ ID NO: 288382 - RNA, 19 nt, Homo sapiens
  misc_RNA (1)...(19): siRNA sense strand
gucggucacuugucaauag

SEQ ID NO: 288383 - RNA, 19 nt, Homo sapiens
  misc_RNA (1)...(19): siRNA sense strand
gagauaaggaagaacauac

SEQ ID NO: 288384 - RNA, 19 nt, Homo sapiens
  misc_RNA (1)...(19): siRNA sense strand
aggaagagguggacgaucu

SEQ ID NO: 288385 - RNA, 19 nt, Homo sapiens
  misc_RNA (1)...(19): siRNA sense strand
aaagaaauagcaagaacug

SEQ ID NO: 288386 - RNA, 19 nt, Homo sapiens
  misc_RNA (1)...(19): siRNA sense strand
cuggugaugucauacacua

SEQ ID NO: 288387 - RNA, 19 nt, Homo sapiens
  misc_RNA (1)...(19): siRNA sense strand
gccggacacuaaacauuuc

SEQ ID NO: 288388 - RNA, 19 nt, Homo sapiens
  misc_RNA (1)...(19): siRNA sense strand
caaaagaaauagcaagaac

SEQ ID NO: 288389 - RNA, 19 nt, Homo sapiens
  misc_RNA (1)...(19): siRNA sense strand
ggacacuaaacauuucuca

SEQ ID NO: 288390 - RNA, 19 nt, Homo sapiens
  misc_RNA (1)...(19): siRNA sense strand
ggcuggcucuucaaucuuc

SEQ ID NO: 288391 - RNA, 19 nt, Homo sapiens
  misc_RNA (1)...(19): siRNA sense strand
gugcaguuguuggaaauuc

SEQ ID NO: 288392 - RNA, 19 nt, Homo sapiens
  misc_RNA (1)...(19): siRNA sense strand
gguggacgaucugcacaau

SEQ ID NO: 288393 - RNA, 19 nt, Homo sapiens
  misc_RNA (1)...(19): siRNA sense strand
cgccggacacuaaacauuu

SEQ ID NO: 288394 - RNA, 19 nt, Homo sapiens
  misc_RNA (1)...(19): siRNA sense strand
gauaaaaucauucgaaagg

SEQ ID NO: 288395 - RNA, 19 nt, Homo sapiens
  misc_RNA (1)...(19): siRNA sense strand
ggaaauucuggcauucugu

SEQ ID NO: 288396 - RNA, 19 nt, Homo sapiens
  misc_RNA (1)...(19): siRNA sense strand
ccugugcaguuguuggaaa

SEQ ID NO: 288397 - RNA, 19 nt, Homo sapiens
  misc_RNA (1)...(19): siRNA sense strand
aaggcuggcucuucaaucu

SEQ ID NO: 288398 - RNA, 19 nt, Homo sapiens
  misc_RNA (1)...(19): siRNA sense strand
uguuggaaauucuggcauu

SEQ ID NO: 288399 - RNA, 19 nt, Homo sapiens
  misc_RNA (1)...(19): siRNA sense strand
cauacuucguuucuuagau

SEQ ID NO: 288400 - RNA, 19 nt, Homo sapiens
  misc_RNA (1)...(19): siRNA sense strand
ccagcacaauguagaaggu

SEQ ID NO: 288401 - RNA, 19 nt, Homo sapiens
  misc_RNA (1)...(19): siRNA sense strand
gaauguggaaaggagauug

SEQ ID NO: 288402 - RNA, 19 nt, Homo sapiens
  misc_RNA (1)...(19): siRNA sense strand
ugaucuacauagccuccua

SEQ ID NO: 288403 - RNA, 19 nt, Homo sapiens
  misc_RNA (1)...(19): siRNA sense strand
agagauaaggaagaacaua

SEQ ID NO: 288404 - RNA, 19 nt, Homo sapiens
  misc_RNA (1)...(19): siRNA sense strand
uugagucggucacuuguca

SEQ ID NO: 288405 - RNA, 19 nt, Homo sapiens
  misc_RNA (1)...(19): siRNA sense strand
augaagaaucgcagguuua

SEQ ID NO: 288406 - RNA, 19 nt, Homo sapiens
  misc_RNA (1)...(19): siRNA sense strand
gacagugaauguggaaagg

SEQ ID NO: 288407 - RNA, 19 nt, Homo sapiens
  misc_RNA (1)...(19): siRNA sense strand
uggaaauucuggcauucug

SEQ ID NO: 288408 - RNA, 19 nt, Homo sapiens
  misc_RNA (1)...(19): siRNA sense strand
guuuaagaccugugcaguu

SEQ ID NO: 288409 - RNA, 19 nt, Homo sapiens
  misc_RNA (1)...(19): siRNA sense strand
caaugaagaaucgcagguu

SEQ ID NO: 288410 - RNA, 19 nt, Homo sapiens
  misc_RNA (1)...(19): siRNA sense strand
cuagagauaaggaagaaca

SEQ ID NO: 288411 - RNA, 19 nt, Homo sapiens
  misc_RNA (1)...(19): siRNA sense strand
guuggaaauucuggcauuc

SEQ ID NO: 288412 - RNA, 19 nt, Homo sapiens
  misc_RNA (1)...(19): siRNA sense strand
aaauucuggcauucuguua

SEQ ID NO: 288413 - RNA, 19 nt, Homo sapiens
  misc_RNA (1)...(19): siRNA sense strand
ggaagagguggacgaucug

SEQ ID NO: 288414 - RNA, 19 nt, Homo sapiens
  misc_RNA (1)...(19): siRNA sense strand
ggagauggugaauugucuu

SEQ ID NO: 288415 - RNA, 19 nt, Homo sapiens
  misc_RNA (1)...(19): siRNA sense strand
ugucaauagcucugauaaa

SEQ ID NO: 288416 - RNA, 19 nt, Homo sapiens
  misc_RNA (1)...(19): siRNA sense strand
cggagauggugaauugucu

SEQ ID NO: 288417 - RNA, 19 nt, Homo sapiens
  misc_RNA (1)...(19): siRNA sense strand
aaucuuccagcacaaugua

SEQ ID NO: 288418 - RNA, 19 nt, Homo sapiens
  misc_RNA (1)...(19): siRNA sense strand
gaccugugcaguuguugga

SEQ ID NO: 288419 - RNA, 19 nt, Homo sapiens
  misc_RNA (1)...(19): siRNA sense strand
gacgaucugcacaauaagu

SEQ ID NO: 288420 - RNA, 19 nt, Homo sapiens
  misc_RNA (1)...(19): siRNA sense strand
guggacgaucugcacaaua

SEQ ID NO: 288421 - RNA, 19 nt, Homo sapiens
  misc_RNA (1)...(19): siRNA sense strand
gacaaaagaaauagcaaga

SEQ ID NO: 288422 - RNA, 19 nt, Homo sapiens
  misc_RNA (1)...(19): siRNA sense strand
auucuggcauucuguuaga

SEQ ID NO: 288423 - RNA, 19 nt, Homo sapiens
  misc_RNA (1)...(19): siRNA sense strand
ucacugagauaaccacuaa

SEQ ID NO: 288424 - RNA, 19 nt, Homo sapiens
  misc_RNA (1)...(19): siRNA sense strand
gcauugauccucagaguaa

SEQ ID NO: 288425 - RNA, 19 nt, Homo sapiens
  misc_RNA (1)...(19): siRNA sense strand
gcaaugagaccuaccaugu

SEQ ID NO: 288426 - RNA, 19 nt, Homo sapiens
  misc_RNA (1)...(19): siRNA sense strand
gcaaggaggucacuuucca

SEQ ID NO: 288427 - RNA, 19 nt, Homo sapiens
  misc_RNA (1)...(19): siRNA sense strand
gacaugaucuuccucaagu

SEQ ID NO: 288428 - RNA, 19 nt, Homo sapiens
  misc_RNA (1)...(19): siRNA sense strand
gagagugugugaagacaga

SEQ ID NO: 288429 - RNA, 19 nt, Homo sapiens
  misc_RNA (1)...(19): siRNA sense strand
gagaagacacacaugauga

SEQ ID NO: 288430 - RNA, 19 nt, Homo sapiens
  misc_RNA (1)...(19): siRNA sense strand
gcagcaauauggccucaug

SEQ ID NO: 288431 - RNA, 19 nt, Homo sapiens
  misc_RNA (1)...(19): siRNA sense strand
gcagugcuguguggaauau

SEQ ID NO: 288432 - RNA, 19 nt, Homo sapiens
  misc_RNA (1)...(19): siRNA sense strand
gggcacagcugaugaagac

SEQ ID NO: 288433 - RNA, 19 nt, Homo sapiens
  misc_RNA (1)...(19): siRNA sense strand
gaaagcugccugcaaggaa

SEQ ID NO: 288434 - RNA, 19 nt, Homo sapiens
  misc_RNA (1)...(19): siRNA sense strand
aauaucaggugcuguuuga

SEQ ID NO: 288435 - RNA, 19 nt, Homo sapiens
  misc_RNA (1)...(19): siRNA sense strand
ucauggagguggaguuuau

SEQ ID NO: 288436 - RNA, 19 nt, Homo sapiens
  misc_RNA (1)...(19): siRNA sense strand
ccacaaagaagaaagacaa

SEQ ID NO: 288437 - RNA, 19 nt, Homo sapiens
  misc_RNA (1)...(19): siRNA sense strand
gauaaccacuaacaucucu

SEQ ID NO: 288438 - RNA, 19 nt, Homo sapiens
  misc_RNA (1)...(19): siRNA sense strand
gaacuacaaacccaacaug

SEQ ID NO: 288439 - RNA, 19 nt, Homo sapiens
  misc_RNA (1)...(19): siRNA sense strand
ggagaagacacacaugaug

SEQ ID NO: 288440 - RNA, 19 nt, Homo sapiens
  misc_RNA (1)...(19): siRNA sense strand
caguacaucuucauucaug

SEQ ID NO: 288441 - RNA, 19 nt, Homo sapiens
  misc_RNA (1)...(19): siRNA sense strand
ggucaacacuucccagcau

SEQ ID NO: 288442 - RNA, 19 nt, Homo sapiens
  misc_RNA (1)...(19): siRNA sense strand
caacaccaacuccaucauu

SEQ ID NO: 288443 - RNA, 19 nt, Homo sapiens
  misc_RNA (1)...(19): siRNA sense strand
gaaggccuaucucaucuac

SEQ ID NO: 288444 - RNA, 19 nt, Homo sapiens
  misc_RNA (1)...(19): siRNA sense strand
ugaagacggccgaggguua

SEQ ID NO: 288445 - RNA, 19 nt, Homo sapiens
  misc_RNA (1)...(19): siRNA sense strand
cacagcugaugaagacuua

SEQ ID NO: 288446 - RNA, 19 nt, Homo sapiens
  misc_RNA (1)...(19): siRNA sense strand
ucuccaagcuccgcaauga

SEQ ID NO: 288447 - RNA, 19 nt, Homo sapiens
  misc_RNA (1)...(19): siRNA sense strand
agccugagauggucuauga

SEQ ID NO: 288448 - RNA, 19 nt, Homo sapiens
  misc_RNA (1)...(19): siRNA sense strand
gccaaugccugccuaugau

SEQ ID NO: 288449 - RNA, 19 nt, Homo sapiens
  misc_RNA (1)...(19): siRNA sense strand
gaagaaagacaaggucaag

SEQ ID NO: 288450 - RNA, 19 nt, Homo sapiens
  misc_RNA (1)...(19): siRNA sense strand
gcucccagcuuugauuaug

SEQ ID NO: 288451 - RNA, 19 nt, Homo sapiens
  misc_RNA (1)...(19): siRNA sense strand
caucucugcucccagcuuu

SEQ ID NO: 288452 - RNA, 19 nt, Homo sapiens
  misc_RNA (1)...(19): siRNA sense strand
ucaacaugauccagacuga

SEQ ID NO: 288453 - RNA, 19 nt, Homo sapiens
  misc_RNA (1)...(19): siRNA sense strand
gaauaucaggugcuguuug

SEQ ID NO: 288454 - RNA, 19 nt, Homo sapiens
  misc_RNA (1)...(19): siRNA sense strand
uccaacaacuacauuaaug

SEQ ID NO: 288455 - RNA, 19 nt, Homo sapiens
  misc_RNA (1)...(19): siRNA sense strand
aaagcugccugcaaggaaa

SEQ ID NO: 288456 - RNA, 19 nt, Homo sapiens
  misc_RNA (1)...(19): siRNA sense strand
caucagacccggcagugaa

SEQ ID NO: 288457 - RNA, 19 nt, Homo sapiens
  misc_RNA (1)...(19): siRNA sense strand
uggcugagguggacaagug

SEQ ID NO: 288458 - RNA, 19 nt, Homo sapiens
  misc_RNA (1)...(19): siRNA sense strand
cuuaguggcucgagucuuc

SEQ ID NO: 288459 - RNA, 19 nt, Homo sapiens
  misc_RNA (1)...(19): siRNA sense strand
gcacagcugaugaagacuu

SEQ ID NO: 288460 - RNA, 19 nt, Homo sapiens
  misc_RNA (1)...(19): siRNA sense strand
ccgcacagguugcuauauc

SEQ ID NO: 288461 - RNA, 19 nt, Homo sapiens
  misc_RNA (1)...(19): siRNA sense strand
gaggagcaguacaucuuca

SEQ ID NO: 288462 - RNA, 19 nt, Homo sapiens
  misc_RNA (1)...(19): siRNA sense strand
gagcaguacaucuucauuc

SEQ ID NO: 288463 - RNA, 19 nt, Homo sapiens
  misc_RNA (1)...(19): siRNA sense strand
ucgcggagcucaucgucaa

SEQ ID NO: 288464 - RNA, 19 nt, Homo sapiens
  misc_RNA (1)...(19): siRNA sense strand
uggagaccauggaucagua

SEQ ID NO: 288465 - RNA, 19 nt, Homo sapiens
  misc_RNA (1)...(19): siRNA sense strand
ccacggcuccuacuugaug

SEQ ID NO: 288466 - RNA, 19 nt, Homo sapiens
  misc_RNA (1)...(19): siRNA sense strand
gggaaccacugggcuacaa

SEQ ID NO: 288467 - RNA, 19 nt, Homo sapiens
  misc_RNA (1)...(19): siRNA sense strand
ccaccuaccucaucaucca

SEQ ID NO: 288468 - RNA, 19 nt, Homo sapiens
  misc_RNA (1)...(19): siRNA sense strand
ggacaugaucuuccucaag

SEQ ID NO: 288469 - RNA, 19 nt, Homo sapiens
  misc_RNA (1)...(19): siRNA sense strand
ggacuccaacaacuacauu

SEQ ID NO: 288470 - RNA, 19 nt, Homo sapiens
  misc_RNA (1)...(19): siRNA sense strand
cauuaaugccaacuacaua

SEQ ID NO: 288471 - RNA, 19 nt, Homo sapiens
  misc_RNA (1)...(19): siRNA sense strand
caaagaagaaagacaaggu

SEQ ID NO: 288472 - RNA, 19 nt, Homo sapiens
  misc_RNA (1)...(19): siRNA sense strand
ccaaggccaccgucaacua

SEQ ID NO: 288473 - RNA, 19 nt, Homo sapiens
  misc_RNA (1)...(19): siRNA sense strand
ggaaagcugccugcaagga

SEQ ID NO: 288474 - RNA, 19 nt, Homo sapiens
  misc_RNA (1)...(19): siRNA sense strand
gggagacccggcugaauug

SEQ ID NO: 288475 - RNA, 19 nt, Homo sapiens
  misc_RNA (1)...(19): siRNA sense strand
ugagauaaccacuaacauc

SEQ ID NO: 288476 - RNA, 19 nt, Homo sapiens
  misc_RNA (1)...(19): siRNA sense strand
cgagaaugauacccacugu

SEQ ID NO: 288477 - RNA, 19 nt, Homo sapiens
  misc_RNA (1)...(19): siRNA sense strand
ggcggcuggucuacgauua

SEQ ID NO: 288478 - RNA, 19 nt, Homo sapiens
  misc_RNA (1)...(19): siRNA sense strand
gggcagugcuguguggaau

SEQ ID NO: 288479 - RNA, 19 nt, Homo sapiens
  misc_RNA (1)...(19): siRNA sense strand
caggucaaaccacuucaua

SEQ ID NO: 288480 - RNA, 19 nt, Homo sapiens
  misc_RNA (1)...(19): siRNA sense strand
cgacacagaguaugagauc

SEQ ID NO: 288481 - RNA, 19 nt, Homo sapiens
  misc_RNA (1)...(19): siRNA sense strand
aggccuaucucaucuacuu

SEQ ID NO: 288482 - RNA, 19 nt, Homo sapiens
  misc_RNA (1)...(19): siRNA sense strand
ccaaaacccuccggaacua

SEQ ID NO: 288483 - RNA, 19 nt, Homo sapiens
  misc_RNA (1)...(19): siRNA sense strand
ccacgguccuggagaugau

SEQ ID NO: 288484 - RNA, 19 nt, Homo sapiens
  misc_RNA (1)...(19): siRNA sense strand
gcuauaucguccuggaugu

SEQ ID NO: 288485 - RNA, 19 nt, Homo sapiens
  misc_RNA (1)...(19): siRNA sense strand
ggaaggccuaucucaucua

SEQ ID NO: 288486 - RNA, 19 nt, Homo sapiens
  misc_RNA (1)...(19): siRNA sense strand
caacaacuacauuaaugca

SEQ ID NO: 288487 - RNA, 19 nt, Homo sapiens
  misc_RNA (1)...(19): siRNA sense strand
gcgagcccaugucaucuuc

SEQ ID NO: 288488 - RNA, 19 nt, Homo sapiens
  misc_RNA (1)...(19): siRNA sense strand
ucaagauuaugcuggugaa

SEQ ID NO: 288489 - RNA, 19 nt, Homo sapiens
  misc_RNA (1)...(19): siRNA sense strand
cuacauuaaugccaacuac

SEQ ID NO: 288490 - RNA, 19 nt, Homo sapiens
  misc_RNA (1)...(19): siRNA sense strand
gcugggacgccacaaagaa

SEQ ID NO: 288491 - RNA, 19 nt, Homo sapiens
  misc_RNA (1)...(19): siRNA sense strand
caggagaagacacacauga

SEQ ID NO: 288492 - RNA, 19 nt, Homo sapiens
  misc_RNA (1)...(19): siRNA sense strand
ucauccagcucaacaccaa

SEQ ID NO: 288493 - RNA, 19 nt, Homo sapiens
  misc_RNA (1)...(19): siRNA sense strand
aacaccaacuccaucauug

SEQ ID NO: 288494 - RNA, 19 nt, Homo sapiens
  misc_RNA (1)...(19): siRNA sense strand
agaaugauacccacugugu

SEQ ID NO: 288495 - RNA, 19 nt, Homo sapiens
  misc_RNA (1)...(19): siRNA sense strand
ccacaggucaaaccacuuc

SEQ ID NO: 288496 - RNA, 19 nt, Homo sapiens
  misc_RNA (1)...(19): siRNA sense strand
gcacuuucuggcccaauga

SEQ ID NO: 288497 - RNA, 19 nt, Homo sapiens
  misc_RNA (1)...(19): siRNA sense strand
ccagcgagcccaugucauc

SEQ ID NO: 288498 - RNA, 19 nt, Homo sapiens
  misc_RNA (1)...(19): siRNA sense strand
gauccgcugccacaacuug

SEQ ID NO: 288499 - RNA, 19 nt, Homo sapiens
  misc_RNA (1)...(19): siRNA sense strand
ggagcaguacaucuucauu

SEQ ID NO: 288500 - RNA, 19 nt, Homo sapiens
  misc_RNA (1)...(19): siRNA sense strand
ugagauggucuaugacuuc

SEQ ID NO: 288501 - RNA, 19 nt, Homo sapiens
  misc_RNA (1)...(19): siRNA sense strand
ucuccugggugccaucauu

SEQ ID NO: 288502 - RNA, 19 nt, Homo sapiens
  misc_RNA (1)...(19): siRNA sense strand
ccugaggccaugcccuuua

SEQ ID NO: 288503 - RNA, 19 nt, Homo sapiens
  misc_RNA (1)...(19): siRNA sense strand
ggagaugauccgcauugau

SEQ ID NO: 288504 - RNA, 19 nt, Homo sapiens
  misc_RNA (1)...(19): siRNA sense strand
gagauggucuaugacuucu

SEQ ID NO: 288505 - RNA, 19 nt, Homo sapiens
  misc_RNA (1)...(19): siRNA sense strand
ucaacuaccgccaggagaa

SEQ ID NO: 288506 - RNA, 19 nt, Homo sapiens
  misc_RNA (1)...(19): siRNA sense strand
gggcaaggaggucacuuuc

SEQ ID NO: 288507 - RNA, 19 nt, Homo sapiens
  misc_RNA (1)...(19): siRNA sense strand
ccgcauugauccucagagu

SEQ ID NO: 288508 - RNA, 19 nt, Homo sapiens
  misc_RNA (1)...(19): siRNA sense strand
ggucaaaccacuucauagc

SEQ ID NO: 288509 - RNA, 19 nt, Homo sapiens
  misc_RNA (1)...(19): siRNA sense strand
gaagacggccgaggguuac

SEQ ID NO: 288510 - RNA, 19 nt, Homo sapiens
  misc_RNA (1)...(19): siRNA sense strand
ccagagaucggaggagaug

SEQ ID NO: 288511 - RNA, 19 nt, Homo sapiens
  misc_RNA (1)...(19): siRNA sense strand
ggagcccaauggucucauc

SEQ ID NO: 288512 - RNA, 19 nt, Homo sapiens
  misc_RNA (1)...(19): siRNA sense strand
agcaguacaucuucauuca

SEQ ID NO: 288513 - RNA, 19 nt, Homo sapiens
  misc_RNA (1)...(19): siRNA sense strand
gcaccuccaucgucaugcu

SEQ ID NO: 288514 - RNA, 19 nt, Homo sapiens
  misc_RNA (1)...(19): siRNA sense strand
ggcgcuuccuggccacuuu

SEQ ID NO: 288515 - RNA, 19 nt, Homo sapiens
  misc_RNA (1)...(19): siRNA sense strand
ucaaggccaccuacaagga

SEQ ID NO: 288516 - RNA, 19 nt, Homo sapiens
  misc_RNA (1)...(19): siRNA sense strand
guucaaggccaccuacaag

SEQ ID NO: 288517 - RNA, 19 nt, Homo sapiens
  misc_RNA (1)...(19): siRNA sense strand
ccaccaucccugucaguga

SEQ ID NO: 288518 - RNA, 19 nt, Homo sapiens
  misc_RNA (1)...(19): siRNA sense strand
ggccgaagccugagauggu

SEQ ID NO: 288519 - RNA, 19 nt, Homo sapiens
  misc_RNA (1)...(19): siRNA sense strand
gcauccgcauugccaggaa

SEQ ID NO: 288520 - RNA, 19 nt, Homo sapiens
  misc_RNA (1)...(19): siRNA sense strand
ccagacggaugaggaugug

SEQ ID NO: 288521 - RNA, 19 nt, Homo sapiens
  misc_RNA (1)...(19): siRNA sense strand
ucacuuuccagacggauga

SEQ ID NO: 288522 - RNA, 19 nt, Homo sapiens
  misc_RNA (1)...(19): siRNA sense strand
uuaaugcagcccugacuga

SEQ ID NO: 288523 - RNA, 19 nt, Homo sapiens
  misc_RNA (1)...(19): siRNA sense strand
ucacugagauaaccacuaa

SEQ ID NO: 288524 - RNA, 19 nt, Homo sapiens
  misc_RNA (1)...(19): siRNA sense strand
gcauugauccucagaguaa

SEQ ID NO: 288525 - RNA, 19 nt, Homo sapiens
  misc_RNA (1)...(19): siRNA sense strand
gcaaugagaccuaccaugu

SEQ ID NO: 288526 - RNA, 19 nt, Homo sapiens
  misc_RNA (1)...(19): siRNA sense strand
gcaaggaggucacuuucca

SEQ ID NO: 288527 - RNA, 19 nt, Homo sapiens
  misc_RNA (1)...(19): siRNA sense strand
gacaugaucuuccucaagu

SEQ ID NO: 288528 - RNA, 19 nt, Homo sapiens
  misc_RNA (1)...(19): siRNA sense strand
gagagugugugaagacaga

SEQ ID NO: 288529 - RNA, 19 nt, Homo sapiens
  misc_RNA (1)...(19): siRNA sense strand
gagaagacacacaugauga

SEQ ID NO: 288530 - RNA, 19 nt, Homo sapiens
  misc_RNA (1)...(19): siRNA sense strand
gcagcaauauggccucaug

SEQ ID NO: 288531 - RNA, 19 nt, Homo sapiens
  misc_RNA (1)...(19): siRNA sense strand
gcagugcuguguggaauau

SEQ ID NO: 288532 - RNA, 19 nt, Homo sapiens
  misc_RNA (1)...(19): siRNA sense strand
gggcacagcugaugaagac

SEQ ID NO: 288533 - RNA, 19 nt, Homo sapiens
  misc_RNA (1)...(19): siRNA sense strand
gaaagcugccugcaaggaa

SEQ ID NO: 288534 - RNA, 19 nt, Homo sapiens
  misc_RNA (1)...(19): siRNA sense strand
aauaucaggugcuguuuga

SEQ ID NO: 288535 - RNA, 19 nt, Homo sapiens
  misc_RNA (1)...(19): siRNA sense strand
ucauggagguggaguuuau

SEQ ID NO: 288536 - RNA, 19 nt, Homo sapiens
  misc_RNA (1)...(19): siRNA sense strand
ccacaaagaagaaagacaa

SEQ ID NO: 288537 - RNA, 19 nt, Homo sapiens
  misc_RNA (1)...(19): siRNA sense strand
gauaaccacuaacaucucu

SEQ ID NO: 288538 - RNA, 19 nt, Homo sapiens
  misc_RNA (1)...(19): siRNA sense strand
gaacuacaaacccaacaug

SEQ ID NO: 288539 - RNA, 19 nt, Homo sapiens
  misc_RNA (1)...(19): siRNA sense strand
ggagaagacacacaugaug

SEQ ID NO: 288540 - RNA, 19 nt, Homo sapiens
  misc_RNA (1)...(19): siRNA sense strand
caguacaucuucauucaug

SEQ ID NO: 288541 - RNA, 19 nt, Homo sapiens
  misc_RNA (1)...(19): siRNA sense strand
ggucaacacuucccagcau

SEQ ID NO: 288542 - RNA, 19 nt, Homo sapiens
  misc_RNA (1)...(19): siRNA sense strand
caacaccaacuccaucauu

SEQ ID NO: 288543 - RNA, 19 nt, Homo sapiens
  misc_RNA (1)...(19): siRNA sense strand
gaaggccuaucucaucuac

SEQ ID NO: 288544 - RNA, 19 nt, Homo sapiens
  misc_RNA (1)...(19): siRNA sense strand
ugaagacggccgaggguua

SEQ ID NO: 288545 - RNA, 19 nt, Homo sapiens
  misc_RNA (1)...(19): siRNA sense strand
cacagcugaugaagacuua

SEQ ID NO: 288546 - RNA, 19 nt, Homo sapiens
  misc_RNA (1)...(19): siRNA sense strand
ucuccaagcuccgcaauga

SEQ ID NO: 288547 - RNA, 19 nt, Homo sapiens
  misc_RNA (1)...(19): siRNA sense strand
agccugagauggucuauga

SEQ ID NO: 288548 - RNA, 19 nt, Homo sapiens
  misc_RNA (1)...(19): siRNA sense strand
gccaaugccugccuaugau

SEQ ID NO: 288549 - RNA, 19 nt, Homo sapiens
  misc_RNA (1)...(19): siRNA sense strand
gaagaaagacaaggucaag

SEQ ID NO: 288550 - RNA, 19 nt, Homo sapiens
  misc_RNA (1)...(19): siRNA sense strand
gcucccagcuuugauuaug

SEQ ID NO: 288551 - RNA, 19 nt, Homo sapiens
  misc_RNA (1)...(19): siRNA sense strand
caucucugcucccagcuuu

SEQ ID NO: 288552 - RNA, 19 nt, Homo sapiens
  misc_RNA (1)...(19): siRNA sense strand
ucaacaugauccagacuga

SEQ ID NO: 288553 - RNA, 19 nt, Homo sapiens
  misc_RNA (1)...(19): siRNA sense strand
gaauaucaggugcuguuug

SEQ ID NO: 288554 - RNA, 19 nt, Homo sapiens
  misc_RNA (1)...(19): siRNA sense strand
uccaacaacuacauuaaug

SEQ ID NO: 288555 - RNA, 19 nt, Homo sapiens
  misc_RNA (1)...(19): siRNA sense strand
aaagcugccugcaaggaaa

SEQ ID NO: 288556 - RNA, 19 nt, Homo sapiens
  misc_RNA (1)...(19): siRNA sense strand
caucagacccggcagugaa

SEQ ID NO: 288557 - RNA, 19 nt, Homo sapiens
  misc_RNA (1)...(19): siRNA sense strand
uggcugagguggacaagug

SEQ ID NO: 288558 - RNA, 19 nt, Homo sapiens
  misc_RNA (1)...(19): siRNA sense strand
cuuaguggcucgagucuuc

SEQ ID NO: 288559 - RNA, 19 nt, Homo sapiens
  misc_RNA (1)...(19): siRNA sense strand
gcacagcugaugaagacuu

SEQ ID NO: 288560 - RNA, 19 nt, Homo sapiens
  misc_RNA (1)...(19): siRNA sense strand
ccgcacagguugcuauauc

SEQ ID NO: 288561 - RNA, 19 nt, Homo sapiens
  misc_RNA (1)...(19): siRNA sense strand
gaggagcaguacaucuuca

SEQ ID NO: 288562 - RNA, 19 nt, Homo sapiens
  misc_RNA (1)...(19): siRNA sense strand
gagcaguacaucuucauuc

SEQ ID NO: 288563 - RNA, 19 nt, Homo sapiens
  misc_RNA (1)...(19): siRNA sense strand
ucgcggagcucaucgucaa

SEQ ID NO: 288564 - RNA, 19 nt, Homo sapiens
  misc_RNA (1)...(19): siRNA sense strand
uggagaccauggaucagua

SEQ ID NO: 288565 - RNA, 19 nt, Homo sapiens
  misc_RNA (1)...(19): siRNA sense strand
ccacggcuccuacuugaug

SEQ ID NO: 288566 - RNA, 19 nt, Homo sapiens
  misc_RNA (1)...(19): siRNA sense strand
gggaaccacugggcuacaa

SEQ ID NO: 288567 - RNA, 19 nt, Homo sapiens
  misc_RNA (1)...(19): siRNA sense strand
ccaccuaccucaucaucca

SEQ ID NO: 288568 - RNA, 19 nt, Homo sapiens
  misc_RNA (1)...(19): siRNA sense strand
ggacaugaucuuccucaag

SEQ ID NO: 288569 - RNA, 19 nt, Homo sapiens
  misc_RNA (1)...(19): siRNA sense strand
ggacuccaacaacuacauu

SEQ ID NO: 288570 - RNA, 19 nt, Homo sapiens
  misc_RNA (1)...(19): siRNA sense strand
cauuaaugccaacuacaua

SEQ ID NO: 288571 - RNA, 19 nt, Homo sapiens
  misc_RNA (1)...(19): siRNA sense strand
caaagaagaaagacaaggu

SEQ ID NO: 288572 - RNA, 19 nt, Homo sapiens
  misc_RNA (1)...(19): siRNA sense strand
ccaaggccaccgucaacua

SEQ ID NO: 288573 - RNA, 19 nt, Homo sapiens
  misc_RNA (1)...(19): siRNA sense strand
ggaaagcugccugcaagga

SEQ ID NO: 288574 - RNA, 19 nt, Homo sapiens
  misc_RNA (1)...(19): siRNA sense strand
gggagacccggcugaauug

SEQ ID NO: 288575 - RNA, 19 nt, Homo sapiens
  misc_RNA (1)...(19): siRNA sense strand
ugagauaaccacuaacauc

SEQ ID NO: 288576 - RNA, 19 nt, Homo sapiens
  misc_RNA (1)...(19): siRNA sense strand
cgagaaugauacccacugu

SEQ ID NO: 288577 - RNA, 19 nt, Homo sapiens
  misc_RNA (1)...(19): siRNA sense strand
ggcggcuggucuacgauua

SEQ ID NO: 288578 - RNA, 19 nt, Homo sapiens
  misc_RNA (1)...(19): siRNA sense strand
gggcagugcuguguggaau

SEQ ID NO: 288579 - RNA, 19 nt, Homo sapiens
  misc_RNA (1)...(19): siRNA sense strand
caggucaaaccacuucaua

SEQ ID NO: 288580 - RNA, 19 nt, Homo sapiens
  misc_RNA (1)...(19): siRNA sense strand
cgacacagaguaugagauc

SEQ ID NO: 288581 - RNA, 19 nt, Homo sapiens
  misc_RNA (1)...(19): siRNA sense strand
aggccuaucucaucuacuu

SEQ ID NO: 288582 - RNA, 19 nt, Homo sapiens
  misc_RNA (1)...(19): siRNA sense strand
ccaaaacccuccggaacua

SEQ ID NO: 288583 - RNA, 19 nt, Homo sapiens
  misc_RNA (1)...(19): siRNA sense strand
ccacgguccuggagaugau

SEQ ID NO: 288584 - RNA, 19 nt, Homo sapiens
  misc_RNA (1)...(19): siRNA sense strand
gcuauaucguccuggaugu

SEQ ID NO: 288585 - RNA, 19 nt, Homo sapiens
  misc_RNA (1)...(19): siRNA sense strand
ggaaggccuaucucaucua

SEQ ID NO: 288586 - RNA, 19 nt, Homo sapiens
  misc_RNA (1)...(19): siRNA sense strand
caacaacuacauuaaugca

SEQ ID NO: 288587 - RNA, 19 nt, Homo sapiens
  misc_RNA (1)...(19): siRNA sense strand
gcgagcccaugucaucuuc

SEQ ID NO: 288588 - RNA, 19 nt, Homo sapiens
  misc_RNA (1)...(19): siRNA sense strand
ucaagauuaugcuggugaa

SEQ ID NO: 288589 - RNA, 19 nt, Homo sapiens
  misc_RNA (1)...(19): siRNA sense strand
cuacauuaaugccaacuac

SEQ ID NO: 288590 - RNA, 19 nt, Homo sapiens
  misc_RNA (1)...(19): siRNA sense strand
gcugggacgccacaaagaa

SEQ ID NO: 288591 - RNA, 19 nt, Homo sapiens
  misc_RNA (1)...(19): siRNA sense strand
caggagaagacacacauga

SEQ ID NO: 288592 - RNA, 19 nt, Homo sapiens
  misc_RNA (1)...(19): siRNA sense strand
ucauccagcucaacaccaa

SEQ ID NO: 288593 - RNA, 19 nt, Homo sapiens
  misc_RNA (1)...(19): siRNA sense strand
aacaccaacuccaucauug

SEQ ID NO: 288594 - RNA, 19 nt, Homo sapiens
  misc_RNA (1)...(19): siRNA sense strand
agaaugauacccacugugu

SEQ ID NO: 288595 - RNA, 19 nt, Homo sapiens
  misc_RNA (1)...(19): siRNA sense strand
ccacaggucaaaccacuuc

SEQ ID NO: 288596 - RNA, 19 nt, Homo sapiens
  misc_RNA (1)...(19): siRNA sense strand
gcacuuucuggcccaauga

SEQ ID NO: 288597 - RNA, 19 nt, Homo sapiens
  misc_RNA (1)...(19): siRNA sense strand
ccagcgagcccaugucauc

SEQ ID NO: 288598 - RNA, 19 nt, Homo sapiens
  misc_RNA (1)...(19): siRNA sense strand
gauccgcugccacaacuug

SEQ ID NO: 288599 - RNA, 19 nt, Homo sapiens
  misc_RNA (1)...(19): siRNA sense strand
ggagcaguacaucuucauu

SEQ ID NO: 288600 - RNA, 19 nt, Homo sapiens
  misc_RNA (1)...(19): siRNA sense strand
ugagauggucuaugacuuc

SEQ ID NO: 288601 - RNA, 19 nt, Homo sapiens
  misc_RNA (1)...(19): siRNA sense strand
ucuccugggugccaucauu

SEQ ID NO: 288602 - RNA, 19 nt, Homo sapiens
  misc_RNA (1)...(19): siRNA sense strand
ccugaggccaugcccuuua

SEQ ID NO: 288603 - RNA, 19 nt, Homo sapiens
  misc_RNA (1)...(19): siRNA sense strand
ggagaugauccgcauugau

SEQ ID NO: 288604 - RNA, 19 nt, Homo sapiens
  misc_RNA (1)...(19): siRNA sense strand
gagauggucuaugacuucu

SEQ ID NO: 288605 - RNA, 19 nt, Homo sapiens
  misc_RNA (1)...(19): siRNA sense strand
ucaacuaccgccaggagaa

SEQ ID NO: 288606 - RNA, 19 nt, Homo sapiens
  misc_RNA (1)...(19): siRNA sense strand
gggcaaggaggucacuuuc

SEQ ID NO: 288607 - RNA, 19 nt, Homo sapiens
  misc_RNA (1)...(19): siRNA sense strand
ccgcauugauccucagagu

SEQ ID NO: 288608 - RNA, 19 nt, Homo sapiens
  misc_RNA (1)...(19): siRNA sense strand
ggucaaaccacuucauagc

SEQ ID NO: 288609 - RNA, 19 nt, Homo sapiens
  misc_RNA (1)...(19): siRNA sense strand
gaagacggccgaggguuac

SEQ ID NO: 288610 - RNA, 19 nt, Homo sapiens
  misc_RNA (1)...(19): siRNA sense strand
ccagagaucggaggagaug

SEQ ID NO: 288611 - RNA, 19 nt, Homo sapiens
  misc_RNA (1)...(19): siRNA sense strand
ggagcccaauggucucauc

SEQ ID NO: 288612 - RNA, 19 nt, Homo sapiens
  misc_RNA (1)...(19): siRNA sense strand
agcaguacaucuucauuca

SEQ ID NO: 288613 - RNA, 19 nt, Homo sapiens
  misc_RNA (1)...(19): siRNA sense strand
gcaccuccaucgucaugcu

SEQ ID NO: 288614 - RNA, 19 nt, Homo sapiens
  misc_RNA (1)...(19): siRNA sense strand
ggcgcuuccuggccacuuu

SEQ ID NO: 288615 - RNA, 19 nt, Homo sapiens
  misc_RNA (1)...(19): siRNA sense strand
ucaaggccaccuacaagga

SEQ ID NO: 288616 - RNA, 19 nt, Homo sapiens
  misc_RNA (1)...(19): siRNA sense strand
guucaaggccaccuacaag

SEQ ID NO: 288617 - RNA, 19 nt, Homo sapiens
  misc_RNA (1)...(19): siRNA sense strand
ccaccaucccugucaguga

SEQ ID NO: 288618 - RNA, 19 nt, Homo sapiens
  misc_RNA (1)...(19): siRNA sense strand
ggccgaagccugagauggu

SEQ ID NO: 288619 - RNA, 19 nt, Homo sapiens
  misc_RNA (1)...(19): siRNA sense strand
gcauccgcauugccaggaa

SEQ ID NO: 288620 - RNA, 19 nt, Homo sapiens
  misc_RNA (1)...(19): siRNA sense strand
ccagacggaugaggaugug

SEQ ID NO: 288621 - RNA, 19 nt, Homo sapiens
  misc_RNA (1)...(19): siRNA sense strand
ucacuuuccagacggauga

SEQ ID NO: 288622 - RNA, 19 nt, Homo sapiens
  misc_RNA (1)...(19): siRNA sense strand
uuaaugcagcccugacuga

SEQ ID NO: 288623 - RNA, 19 nt, Homo sapiens
  misc_RNA (1)...(19): siRNA sense strand
ucacugagauaaccacuaa

SEQ ID NO: 288624 - RNA, 19 nt, Homo sapiens
  misc_RNA (1)...(19): siRNA sense strand
gcauugauccucagaguaa

SEQ ID NO: 288625 - RNA, 19 nt, Homo sapiens
  misc_RNA (1)...(19): siRNA sense strand
gcaaugagaccuaccaugu

SEQ ID NO: 288626 - RNA, 19 nt, Homo sapiens
  misc_RNA (1)...(19): siRNA sense strand
gcaaggaggucacuuucca

SEQ ID NO: 288627 - RNA, 19 nt, Homo sapiens
  misc_RNA (1)...(19): siRNA sense strand
gacaugaucuuccucaagu

SEQ ID NO: 288628 - RNA, 19 nt, Homo sapiens
  misc_RNA (1)...(19): siRNA sense strand
gagagugugugaagacaga

SEQ ID NO: 288629 - RNA, 19 nt, Homo sapiens
  misc_RNA (1)...(19): siRNA sense strand
gagaagacacacaugauga

SEQ ID NO: 288630 - RNA, 19 nt, Homo sapiens
  misc_RNA (1)...(19): siRNA sense strand
gcagcaauauggccucaug

SEQ ID NO: 288631 - RNA, 19 nt, Homo sapiens
  misc_RNA (1)...(19): siRNA sense strand
gcagugcuguguggaauau

SEQ ID NO: 288632 - RNA, 19 nt, Homo sapiens
  misc_RNA (1)...(19): siRNA sense strand
gggcacagcugaugaagac

SEQ ID NO: 288633 - RNA, 19 nt, Homo sapiens
  misc_RNA (1)...(19): siRNA sense strand
gaaagcugccugcaaggaa

SEQ ID NO: 288634 - RNA, 19 nt, Homo sapiens
  misc_RNA (1)...(19): siRNA sense strand
aauaucaggugcuguuuga

SEQ ID NO: 288635 - RNA, 19 nt, Homo sapiens
  misc_RNA (1)...(19): siRNA sense strand
ucauggagguggaguuuau

SEQ ID NO: 288636 - RNA, 19 nt, Homo sapiens
  misc_RNA (1)...(19): siRNA sense strand
ccacaaagaagaaagacaa

SEQ ID NO: 288637 - RNA, 19 nt, Homo sapiens
  misc_RNA (1)...(19): siRNA sense strand
gauaaccacuaacaucucu

SEQ ID NO: 288638 - RNA, 19 nt, Homo sapiens
  misc_RNA (1)...(19): siRNA sense strand
gaacuacaaacccaacaug

SEQ ID NO: 288639 - RNA, 19 nt, Homo sapiens
  misc_RNA (1)...(19): siRNA sense strand
ggagaagacacacaugaug

SEQ ID NO: 288640 - RNA, 19 nt, Homo sapiens
  misc_RNA (1)...(19): siRNA sense strand
caguacaucuucauucaug

SEQ ID NO: 288641 - RNA, 19 nt, Homo sapiens
  misc_RNA (1)...(19): siRNA sense strand
ggucaacacuucccagcau

SEQ ID NO: 288642 - RNA, 19 nt, Homo sapiens
  misc_RNA (1)...(19): siRNA sense strand
caacaccaacuccaucauu

SEQ ID NO: 288643 - RNA, 19 nt, Homo sapiens
  misc_RNA (1)...(19): siRNA sense strand
gaaggccuaucucaucuac

SEQ ID NO: 288644 - RNA, 19 nt, Homo sapiens
  misc_RNA (1)...(19): siRNA sense strand
ugaagacggccgaggguua

SEQ ID NO: 288645 - RNA, 19 nt, Homo sapiens
  misc_RNA (1)...(19): siRNA sense strand
cacagcugaugaagacuua

SEQ ID NO: 288646 - RNA, 19 nt, Homo sapiens
  misc_RNA (1)...(19): siRNA sense strand
ucuccaagcuccgcaauga

SEQ ID NO: 288647 - RNA, 19 nt, Homo sapiens
  misc_RNA (1)...(19): siRNA sense strand
agccugagauggucuauga

SEQ ID NO: 288648 - RNA, 19 nt, Homo sapiens
  misc_RNA (1)...(19): siRNA sense strand
gccaaugccugccuaugau

SEQ ID NO: 288649 - RNA, 19 nt, Homo sapiens
  misc_RNA (1)...(19): siRNA sense strand
gaagaaagacaaggucaag

SEQ ID NO: 288650 - RNA, 19 nt, Homo sapiens
  misc_RNA (1)...(19): siRNA sense strand
gcucccagcuuugauuaug

SEQ ID NO: 288651 - RNA, 19 nt, Homo sapiens
  misc_RNA (1)...(19): siRNA sense strand
caucucugcucccagcuuu

SEQ ID NO: 288652 - RNA, 19 nt, Homo sapiens
  misc_RNA (1)...(19): siRNA sense strand
ucaacaugauccagacuga

SEQ ID NO: 288653 - RNA, 19 nt, Homo sapiens
  misc_RNA (1)...(19): siRNA sense strand
gaauaucaggugcuguuug

SEQ ID NO: 288654 - RNA, 19 nt, Homo sapiens
  misc_RNA (1)...(19): siRNA sense strand
uccaacaacuacauuaaug

SEQ ID NO: 288655 - RNA, 19 nt, Homo sapiens
  misc_RNA (1)...(19): siRNA sense strand
aaagcugccugcaaggaaa

SEQ ID NO: 288656 - RNA, 19 nt, Homo sapiens
  misc_RNA (1)...(19): siRNA sense strand
caucagacccggcagugaa

SEQ ID NO: 288657 - RNA, 19 nt, Homo sapiens
  misc_RNA (1)...(19): siRNA sense strand
uggcugagguggacaagug

SEQ ID NO: 288658 - RNA, 19 nt, Homo sapiens
  misc_RNA (1)...(19): siRNA sense strand
cuuaguggcucgagucuuc

SEQ ID NO: 288659 - RNA, 19 nt, Homo sapiens
  misc_RNA (1)...(19): siRNA sense strand
gcacagcugaugaagacuu

SEQ ID NO: 288660 - RNA, 19 nt, Homo sapiens
  misc_RNA (1)...(19): siRNA sense strand
ccgcacagguugcuauauc

SEQ ID NO: 288661 - RNA, 19 nt, Homo sapiens
  misc_RNA (1)...(19): siRNA sense strand
gaggagcaguacaucuuca

SEQ ID NO: 288662 - RNA, 19 nt, Homo sapiens
  misc_RNA (1)...(19): siRNA sense strand
gagcaguacaucuucauuc

SEQ ID NO: 288663 - RNA, 19 nt, Homo sapiens
  misc_RNA (1)...(19): siRNA sense strand
ucgcggagcucaucgucaa

SEQ ID NO: 288664 - RNA, 19 nt, Homo sapiens
  misc_RNA (1)...(19): siRNA sense strand
uggagaccauggaucagua

SEQ ID NO: 288665 - RNA, 19 nt, Homo sapiens
  misc_RNA (1)...(19): siRNA sense strand
ccacggcuccuacuugaug

SEQ ID NO: 288666 - RNA, 19 nt, Homo sapiens
  misc_RNA (1)...(19): siRNA sense strand
gggaaccacugggcuacaa

SEQ ID NO: 288667 - RNA, 19 nt, Homo sapiens
  misc_RNA (1)...(19): siRNA sense strand
ccaccuaccucaucaucca

SEQ ID NO: 288668 - RNA, 19 nt, Homo sapiens
  misc_RNA (1)...(19): siRNA sense strand
ggacaugaucuuccucaag

SEQ ID NO: 288669 - RNA, 19 nt, Homo sapiens
  misc_RNA (1)...(19): siRNA sense strand
ggacuccaacaacuacauu

SEQ ID NO: 288670 - RNA, 19 nt, Homo sapiens
  misc_RNA (1)...(19): siRNA sense strand
cauuaaugccaacuacaua

SEQ ID NO: 288671 - RNA, 19 nt, Homo sapiens
  misc_RNA (1)...(19): siRNA sense strand
caaagaagaaagacaaggu

SEQ ID NO: 288672 - RNA, 19 nt, Homo sapiens
  misc_RNA (1)...(19): siRNA sense strand
ccaaggccaccgucaacua

SEQ ID NO: 288673 - RNA, 19 nt, Homo sapiens
  misc_RNA (1)...(19): siRNA sense strand
ggaaagcugccugcaagga

SEQ ID NO: 288674 - RNA, 19 nt, Homo sapiens
  misc_RNA (1)...(19): siRNA sense strand
gggagacccggcugaauug

SEQ ID NO: 288675 - RNA, 19 nt, Homo sapiens
  misc_RNA (1)...(19): siRNA sense strand
ugagauaaccacuaacauc

SEQ ID NO: 288676 - RNA, 19 nt, Homo sapiens
  misc_RNA (1)...(19): siRNA sense strand
cgagaaugauacccacugu

SEQ ID NO: 288677 - RNA, 19 nt, Homo sapiens
  misc_RNA (1)...(19): siRNA sense strand
ggcggcuggucuacgauua

SEQ ID NO: 288678 - RNA, 19 nt, Homo sapiens
  misc_RNA (1)...(19): siRNA sense strand
gggcagugcuguguggaau

SEQ ID NO: 288679 - RNA, 19 nt, Homo sapiens
  misc_RNA (1)...(19): siRNA sense strand
caggucaaaccacuucaua

SEQ ID NO: 288680 - RNA, 19 nt, Homo sapiens
  misc_RNA (1)...(19): siRNA sense strand
cgacacagaguaugagauc

SEQ ID NO: 288681 - RNA, 19 nt, Homo sapiens
  misc_RNA (1)...(19): siRNA sense strand
aggccuaucucaucuacuu

SEQ ID NO: 288682 - RNA, 19 nt, Homo sapiens
  misc_RNA (1)...(19): siRNA sense strand
ccaaaacccuccggaacua

SEQ ID NO: 288683 - RNA, 19 nt, Homo sapiens
  misc_RNA (1)...(19): siRNA sense strand
ccacgguccuggagaugau

SEQ ID NO: 288684 - RNA, 19 nt, Homo sapiens
  misc_RNA (1)...(19): siRNA sense strand
gcuauaucguccuggaugu

SEQ ID NO: 288685 - RNA, 19 nt, Homo sapiens
  misc_RNA (1)...(19): siRNA sense strand
ggaaggccuaucucaucua

SEQ ID NO: 288686 - RNA, 19 nt, Homo sapiens
  misc_RNA (1)...(19): siRNA sense strand
caacaacuacauuaaugca

SEQ ID NO: 288687 - RNA, 19 nt, Homo sapiens
  misc_RNA (1)...(19): siRNA sense strand
gcgagcccaugucaucuuc

SEQ ID NO: 288688 - RNA, 19 nt, Homo sapiens
  misc_RNA (1)...(19): siRNA sense strand
ucaagauuaugcuggugaa

SEQ ID NO: 288689 - RNA, 19 nt, Homo sapiens
  misc_RNA (1)...(19): siRNA sense strand
cuacauuaaugccaacuac

SEQ ID NO: 288690 - RNA, 19 nt, Homo sapiens
  misc_RNA (1)...(19): siRNA sense strand
gcugggacgccacaaagaa

SEQ ID NO: 288691 - RNA, 19 nt, Homo sapiens
  misc_RNA (1)...(19): siRNA sense strand
caggagaagacacacauga

SEQ ID NO: 288692 - RNA, 19 nt, Homo sapiens
  misc_RNA (1)...(19): siRNA sense strand
ucauccagcucaacaccaa

SEQ ID NO: 288693 - RNA, 19 nt, Homo sapiens
  misc_RNA (1)...(19): siRNA sense strand
aacaccaacuccaucauug

SEQ ID NO: 288694 - RNA, 19 nt, Homo sapiens
  misc_RNA (1)...(19): siRNA sense strand
agaaugauacccacugugu

SEQ ID NO: 288695 - RNA, 19 nt, Homo sapiens
  misc_RNA (1)...(19): siRNA sense strand
ccacaggucaaaccacuuc

SEQ ID NO: 288696 - RNA, 19 nt, Homo sapiens
  misc_RNA (1)...(19): siRNA sense strand
gcacuuucuggcccaauga

SEQ ID NO: 288697 - RNA, 19 nt, Homo sapiens
  misc_RNA (1)...(19): siRNA sense strand
ccagcgagcccaugucauc

SEQ ID NO: 288698 - RNA, 19 nt, Homo sapiens
  misc_RNA (1)...(19): siRNA sense strand
gauccgcugccacaacuug

SEQ ID NO: 288699 - RNA, 19 nt, Homo sapiens
  misc_RNA (1)...(19): siRNA sense strand
ggagcaguacaucuucauu

SEQ ID NO: 288700 - RNA, 19 nt, Homo sapiens
  misc_RNA (1)...(19): siRNA sense strand
ugagauggucuaugacuuc

SEQ ID NO: 288701 - RNA, 19 nt, Homo sapiens
  misc_RNA (1)...(19): siRNA sense strand
ucuccugggugccaucauu

SEQ ID NO: 288702 - RNA, 19 nt, Homo sapiens
  misc_RNA (1)...(19): siRNA sense strand
ccugaggccaugcccuuua

SEQ ID NO: 288703 - RNA, 19 nt, Homo sapiens
  misc_RNA (1)...(19): siRNA sense strand
ggagaugauccgcauugau

SEQ ID NO: 288704 - RNA, 19 nt, Homo sapiens
  misc_RNA (1)...(19): siRNA sense strand
gagauggucuaugacuucu

SEQ ID NO: 288705 - RNA, 19 nt, Homo sapiens
  misc_RNA (1)...(19): siRNA sense strand
ucaacuaccgccaggagaa

SEQ ID NO: 288706 - RNA, 19 nt, Homo sapiens
  misc_RNA (1)...(19): siRNA sense strand
gggcaaggaggucacuuuc

SEQ ID NO: 288707 - RNA, 19 nt, Homo sapiens
  misc_RNA (1)...(19): siRNA sense strand
ccgcauugauccucagagu

SEQ ID NO: 288708 - RNA, 19 nt, Homo sapiens
  misc_RNA (1)...(19): siRNA sense strand
ggucaaaccacuucauagc

SEQ ID NO: 288709 - RNA, 19 nt, Homo sapiens
  misc_RNA (1)...(19): siRNA sense strand
gaagacggccgaggguuac

SEQ ID NO: 288710 - RNA, 19 nt, Homo sapiens
  misc_RNA (1)...(19): siRNA sense strand
ccagagaucggaggagaug

SEQ ID NO: 288711 - RNA, 19 nt, Homo sapiens
  misc_RNA (1)...(19): siRNA sense strand
ggagcccaauggucucauc

SEQ ID NO: 288712 - RNA, 19 nt, Homo sapiens
  misc_RNA (1)...(19): siRNA sense strand
agcaguacaucuucauuca

SEQ ID NO: 288713 - RNA, 19 nt, Homo sapiens
  misc_RNA (1)...(19): siRNA sense strand
gcaccuccaucgucaugcu

SEQ ID NO: 288714 - RNA, 19 nt, Homo sapiens
  misc_RNA (1)...(19): siRNA sense strand
ggcgcuuccuggccacuuu

SEQ ID NO: 288715 - RNA, 19 nt, Homo sapiens
  misc_RNA (1)...(19): siRNA sense strand
ucaaggccaccuacaagga

SEQ ID NO: 288716 - RNA, 19 nt, Homo sapiens
  misc_RNA (1)...(19): siRNA sense strand
guucaaggccaccuacaag

SEQ ID NO: 288717 - RNA, 19 nt, Homo sapiens
  misc_RNA (1)...(19): siRNA sense strand
ccaccaucccugucaguga

SEQ ID NO: 288718 - RNA, 19 nt, Homo sapiens
  misc_RNA (1)...(19): siRNA sense strand
ggccgaagccugagauggu

SEQ ID NO: 288719 - RNA, 19 nt, Homo sapiens
  misc_RNA (1)...(19): siRNA sense strand
gcauccgcauugccaggaa

SEQ ID NO: 288720 - RNA, 19 nt, Homo sapiens
  misc_RNA (1)...(19): siRNA sense strand
ccagacggaugaggaugug

SEQ ID NO: 288721 - RNA, 19 nt, Homo sapiens
  misc_RNA (1)...(19): siRNA sense strand
ucacuuuccagacggauga

SEQ ID NO: 288722 - RNA, 19 nt, Homo sapiens
  misc_RNA (1)...(19): siRNA sense strand
uuaaugcagcccugacuga

SEQ ID NO: 288723 - RNA, 19 nt, Homo sapiens
  misc_RNA (1)...(19): siRNA sense strand
ccacagacaaugaccuuga

SEQ ID NO: 288724 - RNA, 19 nt, Homo sapiens
  misc_RNA (1)...(19): siRNA sense strand
gcucugcccugcaccuuag

SEQ ID NO: 288725 - RNA, 19 nt, Homo sapiens
  misc_RNA (1)...(19): siRNA sense strand
cugaggcccugcugaguga

SEQ ID NO: 288726 - RNA, 19 nt, Homo sapiens
  misc_RNA (1)...(19): siRNA sense strand
ggaaggcgagcagcaaugu

SEQ ID NO: 288727 - RNA, 19 nt, Homo sapiens
  misc_RNA (1)...(19): siRNA sense strand
ugaggaagccagagacagu

SEQ ID NO: 288728 - RNA, 19 nt, Homo sapiens
  misc_RNA (1)...(19): siRNA sense strand
gagcaggacacagacuaug

SEQ ID NO: 288729 - RNA, 19 nt, Homo sapiens
  misc_RNA (1)...(19): siRNA sense strand
aggaugagcaggacacaga

SEQ ID NO: 288730 - RNA, 19 nt, Homo sapiens
  misc_RNA (1)...(19): siRNA sense strand
gggaaggcgagcagcaaug

SEQ ID NO: 288731 - RNA, 19 nt, Homo sapiens
  misc_RNA (1)...(19): siRNA sense strand
gagcugggguccacagaca

SEQ ID NO: 288732 - RNA, 19 nt, Homo sapiens
  misc_RNA (1)...(19): siRNA sense strand
ccagcucugucaccguugu

SEQ ID NO: 288733 - RNA, 19 nt, Homo sapiens
  misc_RNA (1)...(19): siRNA sense strand
gaagccagagacagugaca

SEQ ID NO: 288734 - RNA, 19 nt, Homo sapiens
  misc_RNA (1)...(19): siRNA sense strand
ggacacaccuucugcaagu

SEQ ID NO: 288735 - RNA, 19 nt, Homo sapiens
  misc_RNA (1)...(19): siRNA sense strand
gaagaagauucaagagaag

SEQ ID NO: 288736 - RNA, 19 nt, Homo sapiens
  misc_RNA (1)...(19): siRNA sense strand
gaugugggcuccaacaagu

SEQ ID NO: 288737 - RNA, 19 nt, Homo sapiens
  misc_RNA (1)...(19): siRNA sense strand
gcgagaaccgcaaguacua

SEQ ID NO: 288738 - RNA, 19 nt, Homo sapiens
  misc_RNA (1)...(19): siRNA sense strand
caacaagcgcuucuucuuc

SEQ ID NO: 288739 - RNA, 19 nt, Homo sapiens
  misc_RNA (1)...(19): siRNA sense strand
cggaggagaugaagaagau

SEQ ID NO: 288740 - RNA, 19 nt, Homo sapiens
  misc_RNA (1)...(19): siRNA sense strand
ggacaacaagcgcuucuuc

SEQ ID NO: 288741 - RNA, 19 nt, Homo sapiens
  misc_RNA (1)...(19): siRNA sense strand
gaaccgcaaguacuacaug

SEQ ID NO: 288742 - RNA, 19 nt, Homo sapiens
  misc_RNA (1)...(19): siRNA sense strand
gcaaguacucggaggagau

SEQ ID NO: 288743 - RNA, 19 nt, Homo sapiens
  misc_RNA (1)...(19): siRNA sense strand
gcuucuaccuggacgugaa

SEQ ID NO: 288744 - RNA, 19 nt, Homo sapiens
  misc_RNA (1)...(19): siRNA sense strand
gaggagaugaagaagauuc

SEQ ID NO: 288745 - RNA, 19 nt, Homo sapiens
  misc_RNA (1)...(19): siRNA sense strand
gcaaguacuacauggaucu

SEQ ID NO: 288746 - RNA, 19 nt, Homo sapiens
  misc_RNA (1)...(19): siRNA sense strand
ggcaacaagagccgccuua

SEQ ID NO: 288747 - RNA, 19 nt, Homo sapiens
  misc_RNA (1)...(19): siRNA sense strand
gacacaccuucugcaagua

SEQ ID NO: 288748 - RNA, 19 nt, Homo sapiens
  misc_RNA (1)...(19): siRNA sense strand
ccaagcucaucgacgacua

SEQ ID NO: 288749 - RNA, 19 nt, Homo sapiens
  misc_RNA (1)...(19): siRNA sense strand
gcgacuaccugggcgacuu

SEQ ID NO: 288750 - RNA, 19 nt, Homo sapiens
  misc_RNA (1)...(19): siRNA sense strand
gcgacuucaucgagcacua

SEQ ID NO: 288751 - RNA, 19 nt, Homo sapiens
  misc_RNA (1)...(19): siRNA sense strand
acaacaagcgcuucuucuu

SEQ ID NO: 288752 - RNA, 19 nt, Homo sapiens
  misc_RNA (1)...(19): siRNA sense strand
caaguacggcguguuuaug

SEQ ID NO: 288753 - RNA, 19 nt, Homo sapiens
  misc_RNA (1)...(19): siRNA sense strand
acaaguacggcguguuuau

SEQ ID NO: 288754 - RNA, 19 nt, Homo sapiens
  misc_RNA (1)...(19): siRNA sense strand
caacaagagccgccuuacu

SEQ ID NO: 288755 - RNA, 19 nt, Homo sapiens
  misc_RNA (1)...(19): siRNA sense strand
ggaagaaggggaagaagau

SEQ ID NO: 288756 - RNA, 19 nt, Homo sapiens
  misc_RNA (1)...(19): siRNA sense strand
gagaaccgcaaguacuaca

SEQ ID NO: 288757 - RNA, 19 nt, Homo sapiens
  misc_RNA (1)...(19): siRNA sense strand
aacaagagccgccuuacuc

SEQ ID NO: 288758 - RNA, 19 nt, Homo sapiens
  misc_RNA (1)...(19): siRNA sense strand
caaggugugggccaaguuc

SEQ ID NO: 288759 - RNA, 19 nt, Homo sapiens
  misc_RNA (1)...(19): siRNA sense strand
acucggaggagaugaagaa

SEQ ID NO: 288760 - RNA, 19 nt, Homo sapiens
  misc_RNA (1)...(19): siRNA sense strand
caaguacucggaggagaug

SEQ ID NO: 288761 - RNA, 19 nt, Homo sapiens
  misc_RNA (1)...(19): siRNA sense strand
acgcagggccagaccauug

SEQ ID NO: 288762 - RNA, 19 nt, Homo sapiens
  misc_RNA (1)...(19): siRNA sense strand
agaagcgggcugccuguga

SEQ ID NO: 288763 - RNA, 19 nt, Homo sapiens
  misc_RNA (1)...(19): siRNA sense strand
aagagaagcagagggagaa

SEQ ID NO: 288764 - RNA, 19 nt, Homo sapiens
  misc_RNA (1)...(19): siRNA sense strand
ccaucaccgugcccuacaa

SEQ ID NO: 288765 - RNA, 19 nt, Homo sapiens
  misc_RNA (1)...(19): siRNA sense strand
gacaacaagcgcuucuucu

SEQ ID NO: 288766 - RNA, 19 nt, Homo sapiens
  misc_RNA (1)...(19): siRNA sense strand
ccuugacuguggacaacaa

SEQ ID NO: 288767 - RNA, 19 nt, Homo sapiens
  misc_RNA (1)...(19): siRNA sense strand
ccaccuaucgcaacuccau

SEQ ID NO: 288768 - RNA, 19 nt, Homo sapiens
  misc_RNA (1)...(19): siRNA sense strand
ccaacucgcuggaggagau

SEQ ID NO: 288769 - RNA, 19 nt, Homo sapiens
  misc_RNA (1)...(19): siRNA sense strand
ggacaagaagcaaaugaca

SEQ ID NO: 288770 - RNA, 19 nt, Homo sapiens
  misc_RNA (1)...(19): siRNA sense strand
gcaacuacauccucaugcu

SEQ ID NO: 288771 - RNA, 19 nt, Homo sapiens
  misc_RNA (1)...(19): siRNA sense strand
ccaccaagaaggacaagaa

SEQ ID NO: 288772 - RNA, 19 nt, Homo sapiens
  misc_RNA (1)...(19): siRNA sense strand
acaagaagcaaaugacaga

SEQ ID NO: 288773 - RNA, 19 nt, Homo sapiens
  misc_RNA (1)...(19): siRNA sense strand
gcgcaagcuuuccaagauc

SEQ ID NO: 288774 - RNA, 19 nt, Homo sapiens
  misc_RNA (1)...(19): siRNA sense strand
gcagcugcgucucaagauc

SEQ ID NO: 288775 - RNA, 19 nt, Homo sapiens
  misc_RNA (1)...(19): siRNA sense strand
ccaagaaggacaagaagca

SEQ ID NO: 288776 - RNA, 19 nt, Homo sapiens
  misc_RNA (1)...(19): siRNA sense strand
gaaggacaagaagcaaaug

SEQ ID NO: 288777 - RNA, 19 nt, Homo sapiens
  misc_RNA (1)...(19): siRNA sense strand
gcgcaacuacauccucaug

SEQ ID NO: 288778 - RNA, 19 nt, Homo sapiens
  misc_RNA (1)...(19): siRNA sense strand
ugcgcaagcuuuccaagau

SEQ ID NO: 288779 - RNA, 19 nt, Homo sapiens
  misc_RNA (1)...(19): siRNA sense strand
caagaaggacaagaagcaa

SEQ ID NO: 288780 - RNA, 19 nt, Homo sapiens
  misc_RNA (1)...(19): siRNA sense strand
agaaggacaagaagcaaau

SEQ ID NO: 288781 - RNA, 19 nt, Homo sapiens
  misc_RNA (1)...(19): siRNA sense strand
uccagcaccucgucgucua

SEQ ID NO: 288782 - RNA, 19 nt, Homo sapiens
  misc_RNA (1)...(19): siRNA sense strand
cagcugcgucucaagauca

SEQ ID NO: 288783 - RNA, 19 nt, Homo sapiens
  misc_RNA (1)...(19): siRNA sense strand
aagaaggacaagaagcaaa

SEQ ID NO: 288784 - RNA, 19 nt, Homo sapiens
  misc_RNA (1)...(19): siRNA sense strand
gugcgcaagcuuuccaaga

SEQ ID NO: 288785 - RNA, 19 nt, Homo sapiens
  misc_RNA (1)...(19): siRNA sense strand
ggaggcaguggcuucaagu

SEQ ID NO: 288786 - RNA, 19 nt, Homo sapiens
  misc_RNA (1)...(19): siRNA sense strand
gcacugagggcauugugua

SEQ ID NO: 288787 - RNA, 19 nt, Homo sapiens
  misc_RNA (1)...(19): siRNA sense strand
gggagacgcugugguguga

SEQ ID NO: 288788 - RNA, 19 nt, Homo sapiens
  misc_RNA (1)...(19): siRNA sense strand
gcccaucaccucuucauga

SEQ ID NO: 288789 - RNA, 19 nt, Homo sapiens
  misc_RNA (1)...(19): siRNA sense strand
gcaggaccaucaggagcua

SEQ ID NO: 288790 - RNA, 19 nt, Homo sapiens
  misc_RNA (1)...(19): siRNA sense strand
augcagagguggacagguu

SEQ ID NO: 288791 - RNA, 19 nt, Homo sapiens
  misc_RNA (1)...(19): siRNA sense strand
gugcauggccgcuacuuca

SEQ ID NO: 288792 - RNA, 19 nt, Homo sapiens
  misc_RNA (1)...(19): siRNA sense strand
caagcgcacugagggcauu

SEQ ID NO: 288793 - RNA, 19 nt, Homo sapiens
  misc_RNA (1)...(19): siRNA sense strand
ucacccaguuccagguaga

SEQ ID NO: 288794 - RNA, 19 nt, Homo sapiens
  misc_RNA (1)...(19): siRNA sense strand
gagacgcuguggugugacu

SEQ ID NO: 288795 - RNA, 19 nt, Homo sapiens
  misc_RNA (1)...(19): siRNA sense strand
cgacugcaccuggcacaug

SEQ ID NO: 288796 - RNA, 19 nt, Homo sapiens
  misc_RNA (1)...(19): siRNA sense strand
ccuggcacauggcggagaa

SEQ ID NO: 288797 - RNA, 19 nt, Homo sapiens
  misc_RNA (1)...(19): siRNA sense strand
ccucaucacucuuguagua

SEQ ID NO: 288798 - RNA, 19 nt, Homo sapiens
  misc_RNA (1)...(19): siRNA sense strand
ucaaauggauccuaucgaa

SEQ ID NO: 288799 - RNA, 19 nt, Homo sapiens
  misc_RNA (1)...(19): siRNA sense strand
cagagaggaucaucuuuga

SEQ ID NO: 288800 - RNA, 19 nt, Homo sapiens
  misc_RNA (1)...(19): siRNA sense strand
gagauugccuggagcacuu

SEQ ID NO: 288801 - RNA, 19 nt, Homo sapiens
  misc_RNA (1)...(19): siRNA sense strand
gcagagaggaucaucuuug

SEQ ID NO: 288802 - RNA, 19 nt, Homo sapiens
  misc_RNA (1)...(19): siRNA sense strand
gagaggaucaucuuugaga

SEQ ID NO: 288803 - RNA, 19 nt, Homo sapiens
  misc_RNA (1)...(19): siRNA sense strand
ggacggugaagaacuauga

SEQ ID NO: 288804 - RNA, 19 nt, Homo sapiens
  misc_RNA (1)...(19): siRNA sense strand
gcacuuugcagaguuguuu

SEQ ID NO: 288805 - RNA, 19 nt, Homo sapiens
  misc_RNA (1)...(19): siRNA sense strand
gcugggcgcuguccugaau

SEQ ID NO: 288806 - RNA, 19 nt, Homo sapiens
  misc_RNA (1)...(19): siRNA sense strand
ggagcacuuugcagaguug

SEQ ID NO: 288807 - RNA, 19 nt, Homo sapiens
  misc_RNA (1)...(19): siRNA sense strand
gcuggaaucauuauaagga

SEQ ID NO: 288808 - RNA, 19 nt, Homo sapiens
  misc_RNA (1)...(19): siRNA sense strand
caaauggauccuaucgaaa

SEQ ID NO: 288809 - RNA, 19 nt, Homo sapiens
  misc_RNA (1)...(19): siRNA sense strand
ggaaucauuauaaggauca

SEQ ID NO: 288810 - RNA, 19 nt, Homo sapiens
  misc_RNA (1)...(19): siRNA sense strand
caauuuugcuggaaucauu

SEQ ID NO: 288811 - RNA, 19 nt, Homo sapiens
  misc_RNA (1)...(19): siRNA sense strand
augauuagcaggccuuaua

SEQ ID NO: 288812 - RNA, 19 nt, Homo sapiens
  misc_RNA (1)...(19): siRNA sense strand
uauagcacccugcgagauu

SEQ ID NO: 288813 - RNA, 19 nt, Homo sapiens
  misc_RNA (1)...(19): siRNA sense strand
gauguacuccuggccauga

SEQ ID NO: 288814 - RNA, 19 nt, Homo sapiens
  misc_RNA (1)...(19): siRNA sense strand
cuuguaguauggaggagua

SEQ ID NO: 288815 - RNA, 19 nt, Homo sapiens
  misc_RNA (1)...(19): siRNA sense strand
ggaggaguaaagacaguga

SEQ ID NO: 288816 - RNA, 19 nt, Homo sapiens
  misc_RNA (1)...(19): siRNA sense strand
ucaucacucuuguaguaug

SEQ ID NO: 288817 - RNA, 19 nt, Homo sapiens
  misc_RNA (1)...(19): siRNA sense strand
ggugaagaacuaugagaca

SEQ ID NO: 288818 - RNA, 19 nt, Homo sapiens
  misc_RNA (1)...(19): siRNA sense strand
guauggaggaguaaagaca

SEQ ID NO: 288819 - RNA, 19 nt, Homo sapiens
  misc_RNA (1)...(19): siRNA sense strand
gcgacugggccaugauuag

SEQ ID NO: 288820 - RNA, 19 nt, Homo sapiens
  misc_RNA (1)...(19): siRNA sense strand
caucacucuuguaguaugg

SEQ ID NO: 288821 - RNA, 19 nt, Homo sapiens
  misc_RNA (1)...(19): siRNA sense strand
uggcagagaggaucaucuu

SEQ ID NO: 288822 - RNA, 19 nt, Homo sapiens
  misc_RNA (1)...(19): siRNA sense strand
uggagcacuuugcagaguu

SEQ ID NO: 288823 - RNA, 19 nt, Homo sapiens
  misc_RNA (1)...(19): siRNA sense strand
aaauggauccuaucgaaaa

SEQ ID NO: 288824 - RNA, 19 nt, Homo sapiens
  misc_RNA (1)...(19): siRNA sense strand
guaguauggaggaguaaag

SEQ ID NO: 288825 - RNA, 19 nt, Homo sapiens
  misc_RNA (1)...(19): siRNA sense strand
ggugcaaccuguccgaguu

SEQ ID NO: 288826 - RNA, 19 nt, Homo sapiens
  misc_RNA (1)...(19): siRNA sense strand
ggaaggcuuucgcagacau

SEQ ID NO: 288827 - RNA, 19 nt, Homo sapiens
  misc_RNA (1)...(19): siRNA sense strand
ccgaguucaucguguacua

SEQ ID NO: 288828 - RNA, 19 nt, Homo sapiens
  misc_RNA (1)...(19): siRNA sense strand
gcaagguggacgucuggaa

SEQ ID NO: 288829 - RNA, 19 nt, Homo sapiens
  misc_RNA (1)...(19): siRNA sense strand
uguccgaguucaucgugua

SEQ ID NO: 288830 - RNA, 19 nt, Homo sapiens
  misc_RNA (1)...(19): siRNA sense strand
gcaacgagacaggcauguu

SEQ ID NO: 288831 - RNA, 19 nt, Homo sapiens
  misc_RNA (1)...(19): siRNA sense strand
acaggcaguucuucuccaa

SEQ ID NO: 288832 - RNA, 19 nt, Homo sapiens
  misc_RNA (1)...(19): siRNA sense strand
ccaaugucgugggcugcua

SEQ ID NO: 288833 - RNA, 19 nt, Homo sapiens
  misc_RNA (1)...(19): siRNA sense strand
ucaucccgcugaucguuau

SEQ ID NO: 288834 - RNA, 19 nt, Homo sapiens
  misc_RNA (1)...(19): siRNA sense strand
gggaaggcuuucgcagaca

SEQ ID NO: 288835 - RNA, 19 nt, Homo sapiens
  misc_RNA (1)...(19): siRNA sense strand
gaguucaucguguacuaug

SEQ ID NO: 288836 - RNA, 19 nt, Homo sapiens
  misc_RNA (1)...(19): siRNA sense strand
caaccuguccgaguucauc

SEQ ID NO: 288837 - RNA, 19 nt, Homo sapiens
  misc_RNA (1)...(19): siRNA sense strand
caucguguacuaugagagu

SEQ ID NO: 288838 - RNA, 19 nt, Homo sapiens
  misc_RNA (1)...(19): siRNA sense strand
guuauacccgucguucuga

SEQ ID NO: 288839 - RNA, 19 nt, Homo sapiens
  misc_RNA (1)...(19): siRNA sense strand
gcaaagaucugguuguguu

SEQ ID NO: 288840 - RNA, 19 nt, Homo sapiens
  misc_RNA (1)...(19): siRNA sense strand
ccacagagcuccaccacua

SEQ ID NO: 288841 - RNA, 19 nt, Homo sapiens
  misc_RNA (1)...(19): siRNA sense strand
gaauaaagacucccucaua

SEQ ID NO: 288842 - RNA, 19 nt, Homo sapiens
  misc_RNA (1)...(19): siRNA sense strand
ggauaucguucucugauua

SEQ ID NO: 288843 - RNA, 19 nt, Homo sapiens
  misc_RNA (1)...(19): siRNA sense strand
gaaacuuacucaaaggaua

SEQ ID NO: 288844 - RNA, 19 nt, Homo sapiens
  misc_RNA (1)...(19): siRNA sense strand
ggaaaccugugucgaagua

SEQ ID NO: 288845 - RNA, 19 nt, Homo sapiens
  misc_RNA (1)...(19): siRNA sense strand
aaacaaggauaucgaugua

SEQ ID NO: 288846 - RNA, 19 nt, Homo sapiens
  misc_RNA (1)...(19): siRNA sense strand
gaacuucaauacacugaug

SEQ ID NO: 288847 - RNA, 19 nt, Homo sapiens
  misc_RNA (1)...(19): siRNA sense strand
aauaaagacucccucauaa

SEQ ID NO: 288848 - RNA, 19 nt, Homo sapiens
  misc_RNA (1)...(19): siRNA sense strand
gaugaaaucuaugagcuuu

SEQ ID NO: 288849 - RNA, 19 nt, Homo sapiens
  misc_RNA (1)...(19): siRNA sense strand
ugacacaacucaaaucaau

SEQ ID NO: 288850 - RNA, 19 nt, Homo sapiens
  misc_RNA (1)...(19): siRNA sense strand
ugacaacugugcuggauuu

SEQ ID NO: 288851 - RNA, 19 nt, Homo sapiens
  misc_RNA (1)...(19): siRNA sense strand
gaucacagccuacuucaug

SEQ ID NO: 288852 - RNA, 19 nt, Homo sapiens
  misc_RNA (1)...(19): siRNA sense strand
gguauuggauaacagaauu

SEQ ID NO: 288853 - RNA, 19 nt, Homo sapiens
  misc_RNA (1)...(19): siRNA sense strand
gaugaacugucacaaacaa

SEQ ID NO: 288854 - RNA, 19 nt, Homo sapiens
  misc_RNA (1)...(19): siRNA sense strand
gcaaacacguccagaggau

SEQ ID NO: 288855 - RNA, 19 nt, Homo sapiens
  misc_RNA (1)...(19): siRNA sense strand
ccagaaacuacgacaauua

SEQ ID NO: 288856 - RNA, 19 nt, Homo sapiens
  misc_RNA (1)...(19): siRNA sense strand
ggaaagugaacguccauaa

SEQ ID NO: 288857 - RNA, 19 nt, Homo sapiens
  misc_RNA (1)...(19): siRNA sense strand
ccaggaaacuuacucaaag

SEQ ID NO: 288858 - RNA, 19 nt, Homo sapiens
  misc_RNA (1)...(19): siRNA sense strand
gaacuggaacaggaaauaa

SEQ ID NO: 288859 - RNA, 19 nt, Homo sapiens
  misc_RNA (1)...(19): siRNA sense strand
acaaggauaucgauguaaa

SEQ ID NO: 288860 - RNA, 19 nt, Homo sapiens
  misc_RNA (1)...(19): siRNA sense strand
gaugguggauucugucuuc

SEQ ID NO: 288861 - RNA, 19 nt, Homo sapiens
  misc_RNA (1)...(19): siRNA sense strand
cgaccaggauggauacauu

SEQ ID NO: 288862 - RNA, 19 nt, Homo sapiens
  misc_RNA (1)...(19): siRNA sense strand
gaaauaugcacagaagaaa

SEQ ID NO: 288863 - RNA, 19 nt, Homo sapiens
  misc_RNA (1)...(19): siRNA sense strand
guaagaagcgagccaagaa

SEQ ID NO: 288864 - RNA, 19 nt, Homo sapiens
  misc_RNA (1)...(19): siRNA sense strand
ggaguguccucacagaaga

SEQ ID NO: 288865 - RNA, 19 nt, Homo sapiens
  misc_RNA (1)...(19): siRNA sense strand
gagagaggcuccgcggaaa

SEQ ID NO: 288866 - RNA, 19 nt, Homo sapiens
  misc_RNA (1)...(19): siRNA sense strand
uagaaucccuccagcuuga

SEQ ID NO: 288867 - RNA, 19 nt, Homo sapiens
  misc_RNA (1)...(19): siRNA sense strand
ccucacaacuuccaagaga

SEQ ID NO: 288868 - RNA, 19 nt, Homo sapiens
  misc_RNA (1)...(19): siRNA sense strand
ggauaucgauguaaagacu

SEQ ID NO: 288869 - RNA, 19 nt, Homo sapiens
  misc_RNA (1)...(19): siRNA sense strand
caacugaaauaugcacaga

SEQ ID NO: 288870 - RNA, 19 nt, Homo sapiens
  misc_RNA (1)...(19): siRNA sense strand
gggaugaacugucacaaac

SEQ ID NO: 288871 - RNA, 19 nt, Homo sapiens
  misc_RNA (1)...(19): siRNA sense strand
gauggaaaccugugucgaa

SEQ ID NO: 288872 - RNA, 19 nt, Homo sapiens
  misc_RNA (1)...(19): siRNA sense strand
cuacagaacuucaauacac

SEQ ID NO: 288873 - RNA, 19 nt, Homo sapiens
  misc_RNA (1)...(19): siRNA sense strand
aaaguuaucacccucuaua

SEQ ID NO: 288874 - RNA, 19 nt, Homo sapiens
  misc_RNA (1)...(19): siRNA sense strand
ccacagagaacaacacuuc

SEQ ID NO: 288875 - RNA, 19 nt, Homo sapiens
  misc_RNA (1)...(19): siRNA sense strand
gccugaagaucuguuauuu

SEQ ID NO: 288876 - RNA, 19 nt, Homo sapiens
  misc_RNA (1)...(19): siRNA sense strand
ucuaugagcuuuccuaugc

SEQ ID NO: 288877 - RNA, 19 nt, Homo sapiens
  misc_RNA (1)...(19): siRNA sense strand
aaucaugucuuagcucaaa

SEQ ID NO: 288878 - RNA, 19 nt, Homo sapiens
  misc_RNA (1)...(19): siRNA sense strand
ugaaauaugcacagaagaa

SEQ ID NO: 288879 - RNA, 19 nt, Homo sapiens
  misc_RNA (1)...(19): siRNA sense strand
gaacaggaaauaaauacuc

SEQ ID NO: 288880 - RNA, 19 nt, Homo sapiens
  misc_RNA (1)...(19): siRNA sense strand
caacuacagaacuucaaua

SEQ ID NO: 288881 - RNA, 19 nt, Homo sapiens
  misc_RNA (1)...(19): siRNA sense strand
gaaagugaacguccauaag

SEQ ID NO: 288882 - RNA, 19 nt, Homo sapiens
  misc_RNA (1)...(19): siRNA sense strand
gaccucaucucccuguaug

SEQ ID NO: 288883 - RNA, 19 nt, Homo sapiens
  misc_RNA (1)...(19): siRNA sense strand
caacugugcuggauuucuc

SEQ ID NO: 288884 - RNA, 19 nt, Homo sapiens
  misc_RNA (1)...(19): siRNA sense strand
cuaaagauccaacugaaau

SEQ ID NO: 288885 - RNA, 19 nt, Homo sapiens
  misc_RNA (1)...(19): siRNA sense strand
gggcuuuccucacaacuuc

SEQ ID NO: 288886 - RNA, 19 nt, Homo sapiens
  misc_RNA (1)...(19): siRNA sense strand
ggacuuugccugaagaucu

SEQ ID NO: 288887 - RNA, 19 nt, Homo sapiens
  misc_RNA (1)...(19): siRNA sense strand
caaacaaggauaucgaugu

SEQ ID NO: 288888 - RNA, 19 nt, Homo sapiens
  misc_RNA (1)...(19): siRNA sense strand
gaacguccauaagcuacug

SEQ ID NO: 288889 - RNA, 19 nt, Homo sapiens
  misc_RNA (1)...(19): siRNA sense strand
gaacauggugaggagagua

SEQ ID NO: 288890 - RNA, 19 nt, Homo sapiens
  misc_RNA (1)...(19): siRNA sense strand
aagcaagacuagaggcaaa

SEQ ID NO: 288891 - RNA, 19 nt, Homo sapiens
  misc_RNA (1)...(19): siRNA sense strand
gauaaugaugcccuaaaga

SEQ ID NO: 288892 - RNA, 19 nt, Homo sapiens
  misc_RNA (1)...(19): siRNA sense strand
ggccugggcuuuccucaca

SEQ ID NO: 288893 - RNA, 19 nt, Homo sapiens
  misc_RNA (1)...(19): siRNA sense strand
cacaugaaaucaauaaggu

SEQ ID NO: 288894 - RNA, 19 nt, Homo sapiens
  misc_RNA (1)...(19): siRNA sense strand
ggagcuccgucaccucaga

SEQ ID NO: 288895 - RNA, 19 nt, Homo sapiens
  misc_RNA (1)...(19): siRNA sense strand
gaauucugggucauguuua

SEQ ID NO: 288896 - RNA, 19 nt, Homo sapiens
  misc_RNA (1)...(19): siRNA sense strand
gggccaguguccaaccuuu

SEQ ID NO: 288897 - RNA, 19 nt, Homo sapiens
  misc_RNA (1)...(19): siRNA sense strand
ucacaaacaaugcaaagau

SEQ ID NO: 288898 - RNA, 19 nt, Homo sapiens
  misc_RNA (1)...(19): siRNA sense strand
uguaaagacugcgggauga

SEQ ID NO: 288899 - RNA, 19 nt, Homo sapiens
  misc_RNA (1)...(19): siRNA sense strand
gaucaaacaaggauaucga

SEQ ID NO: 288900 - RNA, 19 nt, Homo sapiens
  misc_RNA (1)...(19): siRNA sense strand
acagcugcauucaaucuuu

SEQ ID NO: 288901 - RNA, 19 nt, Homo sapiens
  misc_RNA (1)...(19): siRNA sense strand
acacugaggaugaaaucua

SEQ ID NO: 288902 - RNA, 19 nt, Homo sapiens
  misc_RNA (1)...(19): siRNA sense strand
ucaagugggagaauaaaga

SEQ ID NO: 288903 - RNA, 19 nt, Homo sapiens
  misc_RNA (1)...(19): siRNA sense strand
ccaggauacucuauaugug

SEQ ID NO: 288904 - RNA, 19 nt, Homo sapiens
  misc_RNA (1)...(19): siRNA sense strand
gaagacagcccaggauacu

SEQ ID NO: 288905 - RNA, 19 nt, Homo sapiens
  misc_RNA (1)...(19): siRNA sense strand
cacaaacaaugcaaagauc

SEQ ID NO: 288906 - RNA, 19 nt, Homo sapiens
  misc_RNA (1)...(19): siRNA sense strand
uuacauugccgccugauug

SEQ ID NO: 288907 - RNA, 19 nt, Homo sapiens
  misc_RNA (1)...(19): siRNA sense strand
cugaagaucuguuauuuug

SEQ ID NO: 288908 - RNA, 19 nt, Homo sapiens
  misc_RNA (1)...(19): siRNA sense strand
uaaagacucccucauaaaa

SEQ ID NO: 288909 - RNA, 19 nt, Homo sapiens
  misc_RNA (1)...(19): siRNA sense strand
uuacuacacugaggaugaa

SEQ ID NO: 288910 - RNA, 19 nt, Homo sapiens
  misc_RNA (1)...(19): siRNA sense strand
gaggauaucguucucugau

SEQ ID NO: 288911 - RNA, 19 nt, Homo sapiens
  misc_RNA (1)...(19): siRNA sense strand
gcuacuggcccuauacaau

SEQ ID NO: 288912 - RNA, 19 nt, Homo sapiens
  misc_RNA (1)...(19): siRNA sense strand
gacgccagcuugacagaca

SEQ ID NO: 288913 - RNA, 19 nt, Homo sapiens
  misc_RNA (1)...(19): siRNA sense strand
ggagugaucaaacaaggau

SEQ ID NO: 288914 - RNA, 19 nt, Homo sapiens
  misc_RNA (1)...(19): siRNA sense strand
gaccaggauggauacauuu

SEQ ID NO: 288915 - RNA, 19 nt, Homo sapiens
  misc_RNA (1)...(19): siRNA sense strand
ucaaauaccagcaagaaac

SEQ ID NO: 288916 - RNA, 19 nt, Homo sapiens
  misc_RNA (1)...(19): siRNA sense strand
cagcagggaugagaucaca

SEQ ID NO: 288917 - RNA, 19 nt, Homo sapiens
  misc_RNA (1)...(19): siRNA sense strand
guccaaccuuugcucauug

SEQ ID NO: 288918 - RNA, 19 nt, Homo sapiens
  misc_RNA (1)...(19): siRNA sense strand
ccuauacaaucauaucagu

SEQ ID NO: 288919 - RNA, 19 nt, Homo sapiens
  misc_RNA (1)...(19): siRNA sense strand
ggagcagggugacuguucu

SEQ ID NO: 288920 - RNA, 19 nt, Homo sapiens
  misc_RNA (1)...(19): siRNA sense strand
caucuccucugcagaacug

SEQ ID NO: 288921 - RNA, 19 nt, Homo sapiens
  misc_RNA (1)...(19): siRNA sense strand
ucugggacauuuagccaaa

SEQ ID NO: 288922 - RNA, 19 nt, Homo sapiens
  misc_RNA (1)...(19): siRNA sense strand
auaaagacucccucauaaa

SEQ ID NO: 288923 - RNA, 19 nt, Homo sapiens
  misc_RNA (1)...(19): siRNA sense strand
uguccaaccuuugcucauu

SEQ ID NO: 288924 - RNA, 19 nt, Homo sapiens
  misc_RNA (1)...(19): siRNA sense strand
aauucugggucauguuuaa

SEQ ID NO: 288925 - RNA, 19 nt, Homo sapiens
  misc_RNA (1)...(19): siRNA sense strand
ggaagacagcccaggauac

SEQ ID NO: 288926 - RNA, 19 nt, Homo sapiens
  misc_RNA (1)...(19): siRNA sense strand
guaaggaucggaccaucau

SEQ ID NO: 288927 - RNA, 19 nt, Homo sapiens
  misc_RNA (1)...(19): siRNA sense strand
cacugaggaugaaaucuau

SEQ ID NO: 288928 - RNA, 19 nt, Homo sapiens
  misc_RNA (1)...(19): siRNA sense strand
cagacacuauggaggaguu

SEQ ID NO: 288929 - RNA, 19 nt, Homo sapiens
  misc_RNA (1)...(19): siRNA sense strand
agaauucugggucauguuu

SEQ ID NO: 288930 - RNA, 19 nt, Homo sapiens
  misc_RNA (1)...(19): siRNA sense strand
caggaaauaaauacucuga

SEQ ID NO: 288931 - RNA, 19 nt, Homo sapiens
  misc_RNA (1)...(19): siRNA sense strand
caaagaucugguuguguuu

SEQ ID NO: 288932 - RNA, 19 nt, Homo sapiens
  misc_RNA (1)...(19): siRNA sense strand
ccagcucaaucuauuccaa

SEQ ID NO: 288933 - RNA, 19 nt, Homo sapiens
  misc_RNA (1)...(19): siRNA sense strand
ggguacaacugaugguucu

SEQ ID NO: 288934 - RNA, 19 nt, Homo sapiens
  misc_RNA (1)...(19): siRNA sense strand
ggaugaaaucuaugagcuu

SEQ ID NO: 288935 - RNA, 19 nt, Homo sapiens
  misc_RNA (1)...(19): siRNA sense strand
cccuaaagauccaacugaa

SEQ ID NO: 288936 - RNA, 19 nt, Homo sapiens
  misc_RNA (1)...(19): siRNA sense strand
cagauaaugaugcccuaaa

SEQ ID NO: 288937 - RNA, 19 nt, Homo sapiens
  misc_RNA (1)...(19): siRNA sense strand
gcccagucuuggucagaaa

SEQ ID NO: 288938 - RNA, 19 nt, Homo sapiens
  misc_RNA (1)...(19): siRNA sense strand
gguggauucugucuucaag

SEQ ID NO: 288939 - RNA, 19 nt, Homo sapiens
  misc_RNA (1)...(19): siRNA sense strand
gaagugaacugccuuucuu

SEQ ID NO: 288940 - RNA, 19 nt, Homo sapiens
  misc_RNA (1)...(19): siRNA sense strand
gauacucguucaaacaaua

SEQ ID NO: 288941 - RNA, 19 nt, Homo sapiens
  misc_RNA (1)...(19): siRNA sense strand
gcuaugggcuuucuuggaa

SEQ ID NO: 288942 - RNA, 19 nt, Homo sapiens
  misc_RNA (1)...(19): siRNA sense strand
gaucaaccaugaaggagaa

SEQ ID NO: 288943 - RNA, 19 nt, Homo sapiens
  misc_RNA (1)...(19): siRNA sense strand
gaacugccuuucuuucaau

SEQ ID NO: 288944 - RNA, 19 nt, Homo sapiens
  misc_RNA (1)...(19): siRNA sense strand
gaacaccccuuuucuuuau

SEQ ID NO: 288945 - RNA, 19 nt, Homo sapiens
  misc_RNA (1)...(19): siRNA sense strand
ccaccagaguuguuguuua

SEQ ID NO: 288946 - RNA, 19 nt, Homo sapiens
  misc_RNA (1)...(19): siRNA sense strand
gaucaacgaggaauacaaa

SEQ ID NO: 288947 - RNA, 19 nt, Homo sapiens
  misc_RNA (1)...(19): siRNA sense strand
caaagacuccuuccaguga

SEQ ID NO: 288948 - RNA, 19 nt, Homo sapiens
  misc_RNA (1)...(19): siRNA sense strand
caccagaguuguuguuuau

SEQ ID NO: 288949 - RNA, 19 nt, Homo sapiens
  misc_RNA (1)...(19): siRNA sense strand
caaugaaccuugggugauu

SEQ ID NO: 288950 - RNA, 19 nt, Homo sapiens
  misc_RNA (1)...(19): siRNA sense strand
ccagaacccuuguaucauc

SEQ ID NO: 288951 - RNA, 19 nt, Homo sapiens
  misc_RNA (1)...(19): siRNA sense strand
aaaucaagaucaaccauga

SEQ ID NO: 288952 - RNA, 19 nt, Homo sapiens
  misc_RNA (1)...(19): siRNA sense strand
uggcagagaacauuuauaa

SEQ ID NO: 288953 - RNA, 19 nt, Homo sapiens
  misc_RNA (1)...(19): siRNA sense strand
gaccagaagggaaagauuu

SEQ ID NO: 288954 - RNA, 19 nt, Homo sapiens
  misc_RNA (1)...(19): siRNA sense strand
guucuugucuuugacuaua

SEQ ID NO: 288955 - RNA, 19 nt, Homo sapiens
  misc_RNA (1)...(19): siRNA sense strand
uaaugaugaugcucaguuu

SEQ ID NO: 288956 - RNA, 19 nt, Homo sapiens
  misc_RNA (1)...(19): siRNA sense strand
ccagaguuguuguuuauuc

SEQ ID NO: 288957 - RNA, 19 nt, Homo sapiens
  misc_RNA (1)...(19): siRNA sense strand
gugugcagcucccuaauga

SEQ ID NO: 288958 - RNA, 19 nt, Homo sapiens
  misc_RNA (1)...(19): siRNA sense strand
gacaauaucaugcaagugu

SEQ ID NO: 288959 - RNA, 19 nt, Homo sapiens
  misc_RNA (1)...(19): siRNA sense strand
uauagugaguucauucuug

SEQ ID NO: 288960 - RNA, 19 nt, Homo sapiens
  misc_RNA (1)...(19): siRNA sense strand
gugauguucuugucuuuga

SEQ ID NO: 288961 - RNA, 19 nt, Homo sapiens
  misc_RNA (1)...(19): siRNA sense strand
aaacaauacuuccaaacca

SEQ ID NO: 288962 - RNA, 19 nt, Homo sapiens
  misc_RNA (1)...(19): siRNA sense strand
ggacaucagugccguucca

SEQ ID NO: 288963 - RNA, 19 nt, Homo sapiens
  misc_RNA (1)...(19): siRNA sense strand
cugaaugucugggauuuaa

SEQ ID NO: 288964 - RNA, 19 nt, Homo sapiens
  misc_RNA (1)...(19): siRNA sense strand
gcauacggcaguaguagaa

SEQ ID NO: 288965 - RNA, 19 nt, Homo sapiens
  misc_RNA (1)...(19): siRNA sense strand
caagaucaaccaugaagga

SEQ ID NO: 288966 - RNA, 19 nt, Homo sapiens
  misc_RNA (1)...(19): siRNA sense strand
aaaccaagccacucaguug

SEQ ID NO: 288967 - RNA, 19 nt, Homo sapiens
  misc_RNA (1)...(19): siRNA sense strand
ccagugauguucuugucuu

SEQ ID NO: 288968 - RNA, 19 nt, Homo sapiens
  misc_RNA (1)...(19): siRNA sense strand
uaucugauuucuccuggaa

SEQ ID NO: 288969 - RNA, 19 nt, Homo sapiens
  misc_RNA (1)...(19): siRNA sense strand
caacgaggaauacaaaaua

SEQ ID NO: 288970 - RNA, 19 nt, Homo sapiens
  misc_RNA (1)...(19): siRNA sense strand
ccaguggcuuccagaugua

SEQ ID NO: 288971 - RNA, 19 nt, Homo sapiens
  misc_RNA (1)...(19): siRNA sense strand
gaugaucagaaacuuauga

SEQ ID NO: 288972 - RNA, 19 nt, Homo sapiens
  misc_RNA (1)...(19): siRNA sense strand
gacugaaugucugggauuu

SEQ ID NO: 288973 - RNA, 19 nt, Homo sapiens
  misc_RNA (1)...(19): siRNA sense strand
cugccaagauaucugauuu

SEQ ID NO: 288974 - RNA, 19 nt, Homo sapiens
  misc_RNA (1)...(19): siRNA sense strand
gcagcucccuaaugaugau

SEQ ID NO: 288975 - RNA, 19 nt, Homo sapiens
  misc_RNA (1)...(19): siRNA sense strand
caaccaugaaggagaagua

SEQ ID NO: 288976 - RNA, 19 nt, Homo sapiens
  misc_RNA (1)...(19): siRNA sense strand
cugagaaaucugaaacuua

SEQ ID NO: 288977 - RNA, 19 nt, Homo sapiens
  misc_RNA (1)...(19): siRNA sense strand
ggaaggcuaugggcuuucu

SEQ ID NO: 288978 - RNA, 19 nt, Homo sapiens
  misc_RNA (1)...(19): siRNA sense strand
gaaccuugggugauuuguu

SEQ ID NO: 288979 - RNA, 19 nt, Homo sapiens
  misc_RNA (1)...(19): siRNA sense strand
ggucauacugccaagauau

SEQ ID NO: 288980 - RNA, 19 nt, Homo sapiens
  misc_RNA (1)...(19): siRNA sense strand
cagaguuguuguuuauuca

SEQ ID NO: 288981 - RNA, 19 nt, Homo sapiens
  misc_RNA (1)...(19): siRNA sense strand
ggauacucguucaaacaau

SEQ ID NO: 288982 - RNA, 19 nt, Homo sapiens
  misc_RNA (1)...(19): siRNA sense strand
ugagaaaggagaauuugga

SEQ ID NO: 288983 - RNA, 19 nt, Homo sapiens
  misc_RNA (1)...(19): siRNA sense strand
aagcguggauccagaagga

SEQ ID NO: 288984 - RNA, 19 nt, Homo sapiens
  misc_RNA (1)...(19): siRNA sense strand
gaugaagacccugaaggaa

SEQ ID NO: 288985 - RNA, 19 nt, Homo sapiens
  misc_RNA (1)...(19): siRNA sense strand
gccaagauaucugauuucu

SEQ ID NO: 288986 - RNA, 19 nt, Homo sapiens
  misc_RNA (1)...(19): siRNA sense strand
gaguuguuguuuauucaug

SEQ ID NO: 288987 - RNA, 19 nt, Homo sapiens
  misc_RNA (1)...(19): siRNA sense strand
gaagacgggccaccagagu

SEQ ID NO: 288988 - RNA, 19 nt, Homo sapiens
  misc_RNA (1)...(19): siRNA sense strand
gccuuucuuucaauccuua

SEQ ID NO: 288989 - RNA, 19 nt, Homo sapiens
  misc_RNA (1)...(19): siRNA sense strand
ccaagccacucaguugaug

SEQ ID NO: 288990 - RNA, 19 nt, Homo sapiens
  misc_RNA (1)...(19): siRNA sense strand
gggauacucguucaaacaa

SEQ ID NO: 288991 - RNA, 19 nt, Homo sapiens
  misc_RNA (1)...(19): siRNA sense strand
gugcagcucccuaaugaug

SEQ ID NO: 288992 - RNA, 19 nt, Homo sapiens
  misc_RNA (1)...(19): siRNA sense strand
ucagugccguuccaaagga

SEQ ID NO: 288993 - RNA, 19 nt, Homo sapiens
  misc_RNA (1)...(19): siRNA sense strand
cccaguggcuuccagaugu

SEQ ID NO: 288994 - RNA, 19 nt, Homo sapiens
  misc_RNA (1)...(19): siRNA sense strand
gaucagcugacaagacugu

SEQ ID NO: 288995 - RNA, 19 nt, Homo sapiens
  misc_RNA (1)...(19): siRNA sense strand
uaaguugcauuccuuugag

SEQ ID NO: 288996 - RNA, 19 nt, Homo sapiens
  misc_RNA (1)...(19): siRNA sense strand
gauuugggauacucguuca

SEQ ID NO: 288997 - RNA, 19 nt, Homo sapiens
  misc_RNA (1)...(19): siRNA sense strand
aaggaaggcuaugggcuuu

SEQ ID NO: 288998 - RNA, 19 nt, Homo sapiens
  misc_RNA (1)...(19): siRNA sense strand
agaagacaauaucaugcaa

SEQ ID NO: 288999 - RNA, 19 nt, Homo sapiens
  misc_RNA (1)...(19): siRNA sense strand
gaaugucugggauuuaagu

SEQ ID NO: 289000 - RNA, 19 nt, Homo sapiens
  misc_RNA (1)...(19): siRNA sense strand
guucaguggucaccucaca

SEQ ID NO: 289001 - RNA, 19 nt, Homo sapiens
  misc_RNA (1)...(19): siRNA sense strand
gauguaaccagaccagaag

SEQ ID NO: 289002 - RNA, 19 nt, Homo sapiens
  misc_RNA (1)...(19): siRNA sense strand
ccuggcaucuacuccauga

SEQ ID NO: 289003 - RNA, 19 nt, Homo sapiens
  misc_RNA (1)...(19): siRNA sense strand
aaaggagaauuuggagguu

SEQ ID NO: 289004 - RNA, 19 nt, Homo sapiens
  misc_RNA (1)...(19): siRNA sense strand
aaccuugggugauuuguuc

SEQ ID NO: 289005 - RNA, 19 nt, Homo sapiens
  misc_RNA (1)...(19): siRNA sense strand
ucugagaaaucugaaacuu

SEQ ID NO: 289006 - RNA, 19 nt, Homo sapiens
  misc_RNA (1)...(19): siRNA sense strand
caaaccaagccacucaguu

SEQ ID NO: 289007 - RNA, 19 nt, Homo sapiens
  misc_RNA (1)...(19): siRNA sense strand
aacaauacuuccaaaccaa

SEQ ID NO: 289008 - RNA, 19 nt, Homo sapiens
  misc_RNA (1)...(19): siRNA sense strand
guucaaacaauacuuccaa

SEQ ID NO: 289009 - RNA, 19 nt, Homo sapiens
  misc_RNA (1)...(19): siRNA sense strand
cgacgacgcaguggaagaa

SEQ ID NO: 289010 - RNA, 19 nt, Homo sapiens
  misc_RNA (1)...(19): siRNA sense strand
cagugauguucuugucuuu

SEQ ID NO: 289011 - RNA, 19 nt, Homo sapiens
  misc_RNA (1)...(19): siRNA sense strand
uuaaguugcauuccuuuga

SEQ ID NO: 289012 - RNA, 19 nt, Homo sapiens
  misc_RNA (1)...(19): siRNA sense strand
guacugaucgcagacugaa

SEQ ID NO: 289013 - RNA, 19 nt, Homo sapiens
  misc_RNA (1)...(19): siRNA sense strand
cuaaugaugaugcucaguu

SEQ ID NO: 289014 - RNA, 19 nt, Homo sapiens
  misc_RNA (1)...(19): siRNA sense strand
ugggugauuuguucuguau

SEQ ID NO: 289015 - RNA, 19 nt, Homo sapiens
  misc_RNA (1)...(19): siRNA sense strand
aaggagaauuuggagguuu

SEQ ID NO: 289016 - RNA, 19 nt, Homo sapiens
  misc_RNA (1)...(19): siRNA sense strand
cuacgacagugagaaagga

SEQ ID NO: 289017 - RNA, 19 nt, Homo sapiens
  misc_RNA (1)...(19): siRNA sense strand
ugaugaagacccugaagga

SEQ ID NO: 289018 - RNA, 19 nt, Homo sapiens
  misc_RNA (1)...(19): siRNA sense strand
aagacaauaucaugcaagu

SEQ ID NO: 289019 - RNA, 19 nt, Homo sapiens
  misc_RNA (1)...(19): siRNA sense strand
ggaugaaauauuccagguu

SEQ ID NO: 289020 - RNA, 19 nt, Homo sapiens
  misc_RNA (1)...(19): siRNA sense strand
gcaguaguagaagauguuu

SEQ ID NO: 289021 - RNA, 19 nt, Homo sapiens
  misc_RNA (1)...(19): siRNA sense strand
gcaguggaagaacgaguga

SEQ ID NO: 289022 - RNA, 19 nt, Homo sapiens
  misc_RNA (1)...(19): siRNA sense strand
gaaauauuccagguucagu

SEQ ID NO: 289023 - RNA, 19 nt, Homo sapiens
  misc_RNA (1)...(19): siRNA sense strand
gaucugagaaaucugaaac

SEQ ID NO: 289024 - RNA, 19 nt, Homo sapiens
  misc_RNA (1)...(19): siRNA sense strand
caucagugccguuccaaag

SEQ ID NO: 289025 - RNA, 19 nt, Homo sapiens
  misc_RNA (1)...(19): siRNA sense strand
ccagugugcagcucccuaa

SEQ ID NO: 289026 - RNA, 19 nt, Homo sapiens
  misc_RNA (1)...(19): siRNA sense strand
ggaacaauccccagaagau

SEQ ID NO: 289027 - RNA, 19 nt, Homo sapiens
  misc_RNA (1)...(19): siRNA sense strand
aaugaaccuugggugauuu

SEQ ID NO: 289028 - RNA, 19 nt, Homo sapiens
  misc_RNA (1)...(19): siRNA sense strand
aagaacgagugaucaacga

SEQ ID NO: 289029 - RNA, 19 nt, Homo sapiens
  misc_RNA (1)...(19): siRNA sense strand
cagcauucaucgacuuguc

SEQ ID NO: 289030 - RNA, 19 nt, Homo sapiens
  misc_RNA (1)...(19): siRNA sense strand
uguaucaucgcaacaaaga

SEQ ID NO: 289031 - RNA, 19 nt, Homo sapiens
  misc_RNA (1)...(19): siRNA sense strand
uuacuuagugcuucagaug

SEQ ID NO: 289032 - RNA, 19 nt, Homo sapiens
  misc_RNA (1)...(19): siRNA sense strand
cagaagacaauaucaugca

SEQ ID NO: 289033 - RNA, 19 nt, Homo sapiens
  misc_RNA (1)...(19): siRNA sense strand
cccagaagaugcagaagac

SEQ ID NO: 289034 - RNA, 19 nt, Homo sapiens
  misc_RNA (1)...(19): siRNA sense strand
ugugggaucugagaaaucu

SEQ ID NO: 289035 - RNA, 19 nt, Homo sapiens
  misc_RNA (1)...(19): siRNA sense strand
ggcaguaguagaagauguu

SEQ ID NO: 289036 - RNA, 19 nt, Homo sapiens
  misc_RNA (1)...(19): siRNA sense strand
auacggcaguaguagaaga

SEQ ID NO: 289037 - RNA, 19 nt, Homo sapiens
  misc_RNA (1)...(19): siRNA sense strand
gaugaugcucaguuugaug

SEQ ID NO: 289038 - RNA, 19 nt, Homo sapiens
  misc_RNA (1)...(19): siRNA sense strand
aggaucagcugacaagacu

SEQ ID NO: 289039 - RNA, 19 nt, Homo sapiens
  misc_RNA (1)...(19): siRNA sense strand
gagaggagauucaagaaau

SEQ ID NO: 289040 - RNA, 19 nt, Homo sapiens
  misc_RNA (1)...(19): siRNA sense strand
gacaacaggugauuucuga

SEQ ID NO: 289041 - RNA, 19 nt, Homo sapiens
  misc_RNA (1)...(19): siRNA sense strand
cagaagcacucuaauaaga

SEQ ID NO: 289042 - RNA, 19 nt, Homo sapiens
  misc_RNA (1)...(19): siRNA sense strand
gaagcacucuaauaagaug

SEQ ID NO: 289043 - RNA, 19 nt, Homo sapiens
  misc_RNA (1)...(19): siRNA sense strand
gggaacaaauccauaagug

SEQ ID NO: 289044 - RNA, 19 nt, Homo sapiens
  misc_RNA (1)...(19): siRNA sense strand
caucagaagcacucuaaua

SEQ ID NO: 289045 - RNA, 19 nt, Homo sapiens
  misc_RNA (1)...(19): siRNA sense strand
gcaacgggaugaauuugau

SEQ ID NO: 289046 - RNA, 19 nt, Homo sapiens
  misc_RNA (1)...(19): siRNA sense strand
gcuuugaguuggacuauga

SEQ ID NO: 289047 - RNA, 19 nt, Homo sapiens
  misc_RNA (1)...(19): siRNA sense strand
gaggaaguuucuagaggaa

SEQ ID NO: 289048 - RNA, 19 nt, Homo sapiens
  misc_RNA (1)...(19): siRNA sense strand
agagggagaugaagauguu

SEQ ID NO: 289049 - RNA, 19 nt, Homo sapiens
  misc_RNA (1)...(19): siRNA sense strand
ggaaguuucuagaggaaca

SEQ ID NO: 289050 - RNA, 19 nt, Homo sapiens
  misc_RNA (1)...(19): siRNA sense strand
ggggagaucugccgguuua

SEQ ID NO: 289051 - RNA, 19 nt, Homo sapiens
  misc_RNA (1)...(19): siRNA sense strand
uugaagaacuggaggagaa

SEQ ID NO: 289052 - RNA, 19 nt, Homo sapiens
  misc_RNA (1)...(19): siRNA sense strand
guuuagugcucuuauugaa

SEQ ID NO: 289053 - RNA, 19 nt, Homo sapiens
  misc_RNA (1)...(19): siRNA sense strand
uggcagaacucaccagaca

SEQ ID NO: 289054 - RNA, 19 nt, Homo sapiens
  misc_RNA (1)...(19): siRNA sense strand
gacaucagaagcacucuaa

SEQ ID NO: 289055 - RNA, 19 nt, Homo sapiens
  misc_RNA (1)...(19): siRNA sense strand
ugagggagccggucacuau

SEQ ID NO: 289056 - RNA, 19 nt, Homo sapiens
  misc_RNA (1)...(19): siRNA sense strand
ggaacaaauccauaagugu

SEQ ID NO: 289057 - RNA, 19 nt, Homo sapiens
  misc_RNA (1)...(19): siRNA sense strand
gaggcaacgggaugaauuu

SEQ ID NO: 289058 - RNA, 19 nt, Homo sapiens
  misc_RNA (1)...(19): siRNA sense strand
cuaauaagaugugaaacca

SEQ ID NO: 289059 - RNA, 19 nt, Homo sapiens
  misc_RNA (1)...(19): siRNA sense strand
gagagaggagauucaagaa

SEQ ID NO: 289060 - RNA, 19 nt, Homo sapiens
  misc_RNA (1)...(19): siRNA sense strand
cagcucacauuucucuaga

SEQ ID NO: 289061 - RNA, 19 nt, Homo sapiens
  misc_RNA (1)...(19): siRNA sense strand
ccagaggauucgggacuuu

SEQ ID NO: 289062 - RNA, 19 nt, Homo sapiens
  misc_RNA (1)...(19): siRNA sense strand
gaacuggaggagaagaaug

SEQ ID NO: 289063 - RNA, 19 nt, Homo sapiens
  misc_RNA (1)...(19): siRNA sense strand
caagagacaacaggugauu

SEQ ID NO: 289064 - RNA, 19 nt, Homo sapiens
  misc_RNA (1)...(19): siRNA sense strand
ugaauuugauuugcugguu

SEQ ID NO: 289065 - RNA, 19 nt, Homo sapiens
  misc_RNA (1)...(19): siRNA sense strand
ccaacuggcagcuggcuaa

SEQ ID NO: 289066 - RNA, 19 nt, Homo sapiens
  misc_RNA (1)...(19): siRNA sense strand
uggcuaacgugguggagaa

SEQ ID NO: 289067 - RNA, 19 nt, Homo sapiens
  misc_RNA (1)...(19): siRNA sense strand
gcacucuaauaagauguga

SEQ ID NO: 289068 - RNA, 19 nt, Homo sapiens
  misc_RNA (1)...(19): siRNA sense strand
ucgcacaccugaggaaguu

SEQ ID NO: 289069 - RNA, 19 nt, Homo sapiens
  misc_RNA (1)...(19): siRNA sense strand
agagagaggagauucaaga

SEQ ID NO: 289070 - RNA, 19 nt, Homo sapiens
  misc_RNA (1)...(19): siRNA sense strand
ggacaucagaagcacucua

SEQ ID NO: 289071 - RNA, 19 nt, Homo sapiens
  misc_RNA (1)...(19): siRNA sense strand
caacaggugauuucugagu

SEQ ID NO: 289072 - RNA, 19 nt, Homo sapiens
  misc_RNA (1)...(19): siRNA sense strand
cgacugcggccacaacuuc

SEQ ID NO: 289073 - RNA, 19 nt, Homo sapiens
  misc_RNA (1)...(19): siRNA sense strand
gagaucugccgguuuagug

SEQ ID NO: 289074 - RNA, 19 nt, Homo sapiens
  misc_RNA (1)...(19): siRNA sense strand
gaagucaacugccccaucu

SEQ ID NO: 289075 - RNA, 19 nt, Homo sapiens
  misc_RNA (1)...(19): siRNA sense strand
gagcauccucuuagcacaa

SEQ ID NO: 289076 - RNA, 19 nt, Homo sapiens
  misc_RNA (1)...(19): siRNA sense strand
uaagaugugaaaccagaaa

SEQ ID NO: 289077 - RNA, 19 nt, Homo sapiens
  misc_RNA (1)...(19): siRNA sense strand
aucagaagcacucuaauaa

SEQ ID NO: 289078 - RNA, 19 nt, Homo sapiens
  misc_RNA (1)...(19): siRNA sense strand
ggaugcagcggcucccuau

SEQ ID NO: 289079 - RNA, 19 nt, Homo sapiens
  misc_RNA (1)...(19): siRNA sense strand
gcagaacucaccagacaac

SEQ ID NO: 289080 - RNA, 19 nt, Homo sapiens
  misc_RNA (1)...(19): siRNA sense strand
gggaugaauuugauuugcu

SEQ ID NO: 289081 - RNA, 19 nt, Homo sapiens
  misc_RNA (1)...(19): siRNA sense strand
gaugugaaaccagaaagug

SEQ ID NO: 289082 - RNA, 19 nt, Homo sapiens
  misc_RNA (1)...(19): siRNA sense strand
gaaaagagagagaggagau

SEQ ID NO: 289083 - RNA, 19 nt, Homo sapiens
  misc_RNA (1)...(19): siRNA sense strand
gaugaagauguuucuggaa

SEQ ID NO: 289084 - RNA, 19 nt, Homo sapiens
  misc_RNA (1)...(19): siRNA sense strand
gcacaccugaggaaguuuc

SEQ ID NO: 289085 - RNA, 19 nt, Homo sapiens
  misc_RNA (1)...(19): siRNA sense strand
ugaggcaacgggaugaauu

SEQ ID NO: 289086 - RNA, 19 nt, Homo sapiens
  misc_RNA (1)...(19): siRNA sense strand
agaucuacuucuucuguga

SEQ ID NO: 289087 - RNA, 19 nt, Homo sapiens
  misc_RNA (1)...(19): siRNA sense strand
gggagccggucacuaucga

SEQ ID NO: 289088 - RNA, 19 nt, Homo sapiens
  misc_RNA (1)...(19): siRNA sense strand
caacgggaugaauuugauu

SEQ ID NO: 289089 - RNA, 19 nt, Homo sapiens
  misc_RNA (1)...(19): siRNA sense strand
auagggaacaaauccauaa

SEQ ID NO: 289090 - RNA, 19 nt, Homo sapiens
  misc_RNA (1)...(19): siRNA sense strand
uauagggaacaaauccaua

SEQ ID NO: 289091 - RNA, 19 nt, Homo sapiens
  misc_RNA (1)...(19): siRNA sense strand
augaugagaugcaguugug

SEQ ID NO: 289092 - RNA, 19 nt, Homo sapiens
  misc_RNA (1)...(19): siRNA sense strand
gaagaacuggaggagaaga

SEQ ID NO: 289093 - RNA, 19 nt, Homo sapiens
  misc_RNA (1)...(19): siRNA sense strand
gguuuagugcucuuauuga

SEQ ID NO: 289094 - RNA, 19 nt, Homo sapiens
  misc_RNA (1)...(19): siRNA sense strand
ggcaacgggaugaauuuga

SEQ ID NO: 289095 - RNA, 19 nt, Homo sapiens
  misc_RNA (1)...(19): siRNA sense strand
acaggugauuucugaguuc

SEQ ID NO: 289096 - RNA, 19 nt, Homo sapiens
  misc_RNA (1)...(19): siRNA sense strand
agagaggagauucaagaaa

SEQ ID NO: 289097 - RNA, 19 nt, Homo sapiens
  misc_RNA (1)...(19): siRNA sense strand
agagacaacaggugauuuc

SEQ ID NO: 289098 - RNA, 19 nt, Homo sapiens
  misc_RNA (1)...(19): siRNA sense strand
ggcccacacuggcaucaca

SEQ ID NO: 289099 - RNA, 19 nt, Homo sapiens
  misc_RNA (1)...(19): siRNA sense strand
gaugaugagaugcaguugu

SEQ ID NO: 289100 - RNA, 19 nt, Homo sapiens
  misc_RNA (1)...(19): siRNA sense strand
gcagagggagaugaagaug

SEQ ID NO: 289101 - RNA, 19 nt, Homo sapiens
  misc_RNA (1)...(19): siRNA sense strand
ccgguuuagugcucuuauu

SEQ ID NO: 289102 - RNA, 19 nt, Homo sapiens
  misc_RNA (1)...(19): siRNA sense strand
aacaggugauuucugaguu

SEQ ID NO: 289103 - RNA, 19 nt, Homo sapiens
  misc_RNA (1)...(19): siRNA sense strand
uaacgugguggagaacauu

SEQ ID NO: 289104 - RNA, 19 nt, Homo sapiens
  misc_RNA (1)...(19): siRNA sense strand
gccagaggauucgggacuu

SEQ ID NO: 289105 - RNA, 19 nt, Homo sapiens
  misc_RNA (1)...(19): siRNA sense strand
ucagaagcacucuaauaag

SEQ ID NO: 289106 - RNA, 19 nt, Homo sapiens
  misc_RNA (1)...(19): siRNA sense strand
uucaagaaauccagucaag

SEQ ID NO: 289107 - RNA, 19 nt, Homo sapiens
  misc_RNA (1)...(19): siRNA sense strand
ggagaucugccgguuuagu

SEQ ID NO: 289108 - RNA, 19 nt, Homo sapiens
  misc_RNA (1)...(19): siRNA sense strand
ucaagaaauccagucaaga

SEQ ID NO: 289109 - RNA, 19 nt, Homo sapiens
  misc_RNA (1)...(19): siRNA sense strand
acaaauccauaagugucuu

SEQ ID NO: 289110 - RNA, 19 nt, Homo sapiens
  misc_RNA (1)...(19): siRNA sense strand
aaagagagagaggagauuc

SEQ ID NO: 289111 - RNA, 19 nt, Homo sapiens
  misc_RNA (1)...(19): siRNA sense strand
cuaacgugguggagaacau

SEQ ID NO: 289112 - RNA, 19 nt, Homo sapiens
  misc_RNA (1)...(19): siRNA sense strand
gaugcagcggcucccuaua

SEQ ID NO: 289113 - RNA, 19 nt, Homo sapiens
  misc_RNA (1)...(19): siRNA sense strand
agaagcacucuaauaagau

SEQ ID NO: 289114 - RNA, 19 nt, Homo sapiens
  misc_RNA (1)...(19): siRNA sense strand
gcacagaaguagcugcaua

SEQ ID NO: 289115 - RNA, 19 nt, Homo sapiens
  misc_RNA (1)...(19): siRNA sense strand
gagaggagauucaagaaau

SEQ ID NO: 289116 - RNA, 19 nt, Homo sapiens
  misc_RNA (1)...(19): siRNA sense strand
gacaacaggugauuucuga

SEQ ID NO: 289117 - RNA, 19 nt, Homo sapiens
  misc_RNA (1)...(19): siRNA sense strand
cagaagcacucuaauaaga

SEQ ID NO: 289118 - RNA, 19 nt, Homo sapiens
  misc_RNA (1)...(19): siRNA sense strand
gaagcacucuaauaagaug

SEQ ID NO: 289119 - RNA, 19 nt, Homo sapiens
  misc_RNA (1)...(19): siRNA sense strand
gggaacaaauccauaagug

SEQ ID NO: 289120 - RNA, 19 nt, Homo sapiens
  misc_RNA (1)...(19): siRNA sense strand
caucagaagcacucuaaua

SEQ ID NO: 289121 - RNA, 19 nt, Homo sapiens
  misc_RNA (1)...(19): siRNA sense strand
gcaacgggaugaauuugau

SEQ ID NO: 289122 - RNA, 19 nt, Homo sapiens
  misc_RNA (1)...(19): siRNA sense strand
gcuuugaguuggacuauga

SEQ ID NO: 289123 - RNA, 19 nt, Homo sapiens
  misc_RNA (1)...(19): siRNA sense strand
gaggaaguuucuagaggaa

SEQ ID NO: 289124 - RNA, 19 nt, Homo sapiens
  misc_RNA (1)...(19): siRNA sense strand
agagggagaugaagauguu

SEQ ID NO: 289125 - RNA, 19 nt, Homo sapiens
  misc_RNA (1)...(19): siRNA sense strand
ggaaguuucuagaggaaca

SEQ ID NO: 289126 - RNA, 19 nt, Homo sapiens
  misc_RNA (1)...(19): siRNA sense strand
ggggagaucugccgguuua

SEQ ID NO: 289127 - RNA, 19 nt, Homo sapiens
  misc_RNA (1)...(19): siRNA sense strand
uugaagaacuggaggagaa

SEQ ID NO: 289128 - RNA, 19 nt, Homo sapiens
  misc_RNA (1)...(19): siRNA sense strand
ugagggagccggucacuau

SEQ ID NO: 289129 - RNA, 19 nt, Homo sapiens
  misc_RNA (1)...(19): siRNA sense strand
uggcagaacucaccagaca

SEQ ID NO: 289130 - RNA, 19 nt, Homo sapiens
  misc_RNA (1)...(19): siRNA sense strand
gacaucagaagcacucuaa

SEQ ID NO: 289131 - RNA, 19 nt, Homo sapiens
  misc_RNA (1)...(19): siRNA sense strand
guuuagugcucuuauugaa

SEQ ID NO: 289132 - RNA, 19 nt, Homo sapiens
  misc_RNA (1)...(19): siRNA sense strand
ggaacaaauccauaagugu

SEQ ID NO: 289133 - RNA, 19 nt, Homo sapiens
  misc_RNA (1)...(19): siRNA sense strand
gaggcaacgggaugaauuu

SEQ ID NO: 289134 - RNA, 19 nt, Homo sapiens
  misc_RNA (1)...(19): siRNA sense strand
cuaauaagaugugaaacca

SEQ ID NO: 289135 - RNA, 19 nt, Homo sapiens
  misc_RNA (1)...(19): siRNA sense strand
gagagaggagauucaagaa

SEQ ID NO: 289136 - RNA, 19 nt, Homo sapiens
  misc_RNA (1)...(19): siRNA sense strand
cagcucacauuucucuaga

SEQ ID NO: 289137 - RNA, 19 nt, Homo sapiens
  misc_RNA (1)...(19): siRNA sense strand
ccagaggauucgggacuuu

SEQ ID NO: 289138 - RNA, 19 nt, Homo sapiens
  misc_RNA (1)...(19): siRNA sense strand
gaacuggaggagaagaaug

SEQ ID NO: 289139 - RNA, 19 nt, Homo sapiens
  misc_RNA (1)...(19): siRNA sense strand
caagagacaacaggugauu

SEQ ID NO: 289140 - RNA, 19 nt, Homo sapiens
  misc_RNA (1)...(19): siRNA sense strand
ugaauuugauuugcugguu

SEQ ID NO: 289141 - RNA, 19 nt, Homo sapiens
  misc_RNA (1)...(19): siRNA sense strand
ccaacuggcagcuggcuaa

SEQ ID NO: 289142 - RNA, 19 nt, Homo sapiens
  misc_RNA (1)...(19): siRNA sense strand
uggcuaacgugguggagaa

SEQ ID NO: 289143 - RNA, 19 nt, Homo sapiens
  misc_RNA (1)...(19): siRNA sense strand
gcacucuaauaagauguga

SEQ ID NO: 289144 - RNA, 19 nt, Homo sapiens
  misc_RNA (1)...(19): siRNA sense strand
ucgcacaccugaggaaguu

SEQ ID NO: 289145 - RNA, 19 nt, Homo sapiens
  misc_RNA (1)...(19): siRNA sense strand
agagagaggagauucaaga

SEQ ID NO: 289146 - RNA, 19 nt, Homo sapiens
  misc_RNA (1)...(19): siRNA sense strand
ggacaucagaagcacucua

SEQ ID NO: 289147 - RNA, 19 nt, Homo sapiens
  misc_RNA (1)...(19): siRNA sense strand
caacaggugauuucugagu

SEQ ID NO: 289148 - RNA, 19 nt, Homo sapiens
  misc_RNA (1)...(19): siRNA sense strand
gaagucaacugccccaucu

SEQ ID NO: 289149 - RNA, 19 nt, Homo sapiens
  misc_RNA (1)...(19): siRNA sense strand
cgacugcggccacaacuuc

SEQ ID NO: 289150 - RNA, 19 nt, Homo sapiens
  misc_RNA (1)...(19): siRNA sense strand
gagaucugccgguuuagug

SEQ ID NO: 289151 - RNA, 19 nt, Homo sapiens
  misc_RNA (1)...(19): siRNA sense strand
gagcauccucuuagcacaa

SEQ ID NO: 289152 - RNA, 19 nt, Homo sapiens
  misc_RNA (1)...(19): siRNA sense strand
uaagaugugaaaccagaaa

SEQ ID NO: 289153 - RNA, 19 nt, Homo sapiens
  misc_RNA (1)...(19): siRNA sense strand
aucagaagcacucuaauaa

SEQ ID NO: 289154 - RNA, 19 nt, Homo sapiens
  misc_RNA (1)...(19): siRNA sense strand
ggaugcagcggcucccuau

SEQ ID NO: 289155 - RNA, 19 nt, Homo sapiens
  misc_RNA (1)...(19): siRNA sense strand
gcagaacucaccagacaac

SEQ ID NO: 289156 - RNA, 19 nt, Homo sapiens
  misc_RNA (1)...(19): siRNA sense strand
gggaugaauuugauuugcu

SEQ ID NO: 289157 - RNA, 19 nt, Homo sapiens
  misc_RNA (1)...(19): siRNA sense strand
gaugugaaaccagaaagug

SEQ ID NO: 289158 - RNA, 19 nt, Homo sapiens
  misc_RNA (1)...(19): siRNA sense strand
gaaaagagagagaggagau

SEQ ID NO: 289159 - RNA, 19 nt, Homo sapiens
  misc_RNA (1)...(19): siRNA sense strand
gaugaagauguuucuggaa

SEQ ID NO: 289160 - RNA, 19 nt, Homo sapiens
  misc_RNA (1)...(19): siRNA sense strand
gcacaccugaggaaguuuc

SEQ ID NO: 289161 - RNA, 19 nt, Homo sapiens
  misc_RNA (1)...(19): siRNA sense strand
ugaggcaacgggaugaauu

SEQ ID NO: 289162 - RNA, 19 nt, Homo sapiens
  misc_RNA (1)...(19): siRNA sense strand
agaucuacuucuucuguga

SEQ ID NO: 289163 - RNA, 19 nt, Homo sapiens
  misc_RNA (1)...(19): siRNA sense strand
gggagccggucacuaucga

SEQ ID NO: 289164 - RNA, 19 nt, Homo sapiens
  misc_RNA (1)...(19): siRNA sense strand
caacgggaugaauuugauu

SEQ ID NO: 289165 - RNA, 19 nt, Homo sapiens
  misc_RNA (1)...(19): siRNA sense strand
auagggaacaaauccauaa

SEQ ID NO: 289166 - RNA, 19 nt, Homo sapiens
  misc_RNA (1)...(19): siRNA sense strand
uauagggaacaaauccaua

SEQ ID NO: 289167 - RNA, 19 nt, Homo sapiens
  misc_RNA (1)...(19): siRNA sense strand
augaugagaugcaguugug

SEQ ID NO: 289168 - RNA, 19 nt, Homo sapiens
  misc_RNA (1)...(19): siRNA sense strand
gaagaacuggaggagaaga

SEQ ID NO: 289169 - RNA, 19 nt, Homo sapiens
  misc_RNA (1)...(19): siRNA sense strand
gguuuagugcucuuauuga

SEQ ID NO: 289170 - RNA, 19 nt, Homo sapiens
  misc_RNA (1)...(19): siRNA sense strand
ggcaacgggaugaauuuga

SEQ ID NO: 289171 - RNA, 19 nt, Homo sapiens
  misc_RNA (1)...(19): siRNA sense strand
acaggugauuucugaguuc

SEQ ID NO: 289172 - RNA, 19 nt, Homo sapiens
  misc_RNA (1)...(19): siRNA sense strand
agagaggagauucaagaaa

SEQ ID NO: 289173 - RNA, 19 nt, Homo sapiens
  misc_RNA (1)...(19): siRNA sense strand
agagacaacaggugauuuc

SEQ ID NO: 289174 - RNA, 19 nt, Homo sapiens
  misc_RNA (1)...(19): siRNA sense strand
ggcccacacuggcaucaca

SEQ ID NO: 289175 - RNA, 19 nt, Homo sapiens
  misc_RNA (1)...(19): siRNA sense strand
gaugaugagaugcaguugu

SEQ ID NO: 289176 - RNA, 19 nt, Homo sapiens
  misc_RNA (1)...(19): siRNA sense strand
gcagagggagaugaagaug

SEQ ID NO: 289177 - RNA, 19 nt, Homo sapiens
  misc_RNA (1)...(19): siRNA sense strand
ccgguuuagugcucuuauu

SEQ ID NO: 289178 - RNA, 19 nt, Homo sapiens
  misc_RNA (1)...(19): siRNA sense strand
aacaggugauuucugaguu

SEQ ID NO: 289179 - RNA, 19 nt, Homo sapiens
  misc_RNA (1)...(19): siRNA sense strand
uaacgugguggagaacauu

SEQ ID NO: 289180 - RNA, 19 nt, Homo sapiens
  misc_RNA (1)...(19): siRNA sense strand
gccagaggauucgggacuu

SEQ ID NO: 289181 - RNA, 19 nt, Homo sapiens
  misc_RNA (1)...(19): siRNA sense strand
ucagaagcacucuaauaag

SEQ ID NO: 289182 - RNA, 19 nt, Homo sapiens
  misc_RNA (1)...(19): siRNA sense strand
uucaagaaauccagucaag

SEQ ID NO: 289183 - RNA, 19 nt, Homo sapiens
  misc_RNA (1)...(19): siRNA sense strand
ggagaucugccgguuuagu

SEQ ID NO: 289184 - RNA, 19 nt, Homo sapiens
  misc_RNA (1)...(19): siRNA sense strand
ucaagaaauccagucaaga

SEQ ID NO: 289185 - RNA, 19 nt, Homo sapiens
  misc_RNA (1)...(19): siRNA sense strand
acaaauccauaagugucuu

SEQ ID NO: 289186 - RNA, 19 nt, Homo sapiens
  misc_RNA (1)...(19): siRNA sense strand
aaagagagagaggagauuc

SEQ ID NO: 289187 - RNA, 19 nt, Homo sapiens
  misc_RNA (1)...(19): siRNA sense strand
cuaacgugguggagaacau

SEQ ID NO: 289188 - RNA, 19 nt, Homo sapiens
  misc_RNA (1)...(19): siRNA sense strand
gaugcagcggcucccuaua

SEQ ID NO: 289189 - RNA, 19 nt, Homo sapiens
  misc_RNA (1)...(19): siRNA sense strand
agaagcacucuaauaagau

SEQ ID NO: 289190 - RNA, 19 nt, Homo sapiens
  misc_RNA (1)...(19): siRNA sense strand
acaauaaccugcuuugaug

SEQ ID NO: 289191 - RNA, 19 nt, Homo sapiens
  misc_RNA (1)...(19): siRNA sense strand
caaaucaccaucuaaacua

SEQ ID NO: 289192 - RNA, 19 nt, Homo sapiens
  misc_RNA (1)...(19): siRNA sense strand
ccucaagucucgauucuau

SEQ ID NO: 289193 - RNA, 19 nt, Homo sapiens
  misc_RNA (1)...(19): siRNA sense strand
gaucagcugugaagaguac

SEQ ID NO: 289194 - RNA, 19 nt, Homo sapiens
  misc_RNA (1)...(19): siRNA sense strand
gaaaggagccaagaguuca

SEQ ID NO: 289195 - RNA, 19 nt, Homo sapiens
  misc_RNA (1)...(19): siRNA sense strand
aagaggaagucaagaaaug

SEQ ID NO: 289196 - RNA, 19 nt, Homo sapiens
  misc_RNA (1)...(19): siRNA sense strand
caagaaaugggcugaauca

SEQ ID NO: 289197 - RNA, 19 nt, Homo sapiens
  misc_RNA (1)...(19): siRNA sense strand
gaauauagugaggagaaua

SEQ ID NO: 289198 - RNA, 19 nt, Homo sapiens
  misc_RNA (1)...(19): siRNA sense strand
aauauugacuucuggauca

SEQ ID NO: 289199 - RNA, 19 nt, Homo sapiens
  misc_RNA (1)...(19): siRNA sense strand
gaagagacaagccggaaca

SEQ ID NO: 289200 - RNA, 19 nt, Homo sapiens
  misc_RNA (1)...(19): siRNA sense strand
gcagaaaggagccaagagu

SEQ ID NO: 289201 - RNA, 19 nt, Homo sapiens
  misc_RNA (1)...(19): siRNA sense strand
caacaagaaggacaaagug

SEQ ID NO: 289202 - RNA, 19 nt, Homo sapiens
  misc_RNA (1)...(19): siRNA sense strand
caagaaggacaaagugguu

SEQ ID NO: 289203 - RNA, 19 nt, Homo sapiens
  misc_RNA (1)...(19): siRNA sense strand
ccaagaggaagucaagaaa

SEQ ID NO: 289204 - RNA, 19 nt, Homo sapiens
  misc_RNA (1)...(19): siRNA sense strand
ucgauucuaucuugauuug

SEQ ID NO: 289205 - RNA, 19 nt, Homo sapiens
  misc_RNA (1)...(19): siRNA sense strand
gauucuaucuugauuuggu

SEQ ID NO: 289206 - RNA, 19 nt, Homo sapiens
  misc_RNA (1)...(19): siRNA sense strand
gaugaggcccagaagaaga

SEQ ID NO: 289207 - RNA, 19 nt, Homo sapiens
  misc_RNA (1)...(19): siRNA sense strand
gaaggacaaagugguuauu

SEQ ID NO: 289208 - RNA, 19 nt, Homo sapiens
  misc_RNA (1)...(19): siRNA sense strand
caugcuagagccuacaaua

SEQ ID NO: 289209 - RNA, 19 nt, Homo sapiens
  misc_RNA (1)...(19): siRNA sense strand
gagagugagccaagaggaa

SEQ ID NO: 289210 - RNA, 19 nt, Homo sapiens
  misc_RNA (1)...(19): siRNA sense strand
gccaagaggaagucaagaa

SEQ ID NO: 289211 - RNA, 19 nt, Homo sapiens
  misc_RNA (1)...(19): siRNA sense strand
caagaggaagucaagaaau

SEQ ID NO: 289212 - RNA, 19 nt, Homo sapiens
  misc_RNA (1)...(19): siRNA sense strand
ugaggagaauauugacuuc

SEQ ID NO: 289213 - RNA, 19 nt, Homo sapiens
  misc_RNA (1)...(19): siRNA sense strand
uacaauaaccugcuuugau

SEQ ID NO: 289214 - RNA, 19 nt, Homo sapiens
  misc_RNA (1)...(19): siRNA sense strand
gcugugaagaguacaagaa

SEQ ID NO: 289215 - RNA, 19 nt, Homo sapiens
  misc_RNA (1)...(19): siRNA sense strand
cuugaagucugaauauagu

SEQ ID NO: 289216 - RNA, 19 nt, Homo sapiens
  misc_RNA (1)...(19): siRNA sense strand
cagaaaggagccaagaguu

SEQ ID NO: 289217 - RNA, 19 nt, Homo sapiens
  misc_RNA (1)...(19): siRNA sense strand
acacaauucuucccacaac

SEQ ID NO: 289218 - RNA, 19 nt, Homo sapiens
  misc_RNA (1)...(19): siRNA sense strand
gucaagaaaugggcugaau

SEQ ID NO: 289219 - RNA, 19 nt, Homo sapiens
  misc_RNA (1)...(19): siRNA sense strand
ucucgauucuaucuugauu

SEQ ID NO: 289220 - RNA, 19 nt, Homo sapiens
  misc_RNA (1)...(19): siRNA sense strand
ucaaaucaccaucuaaacu

SEQ ID NO: 289221 - RNA, 19 nt, Homo sapiens
  misc_RNA (1)...(19): siRNA sense strand
ccugauuagucaugaaugu

SEQ ID NO: 289222 - RNA, 19 nt, Homo sapiens
  misc_RNA (1)...(19): siRNA sense strand
uggaaaaccugauuaguca

SEQ ID NO: 289223 - RNA, 19 nt, Homo sapiens
  misc_RNA (1)...(19): siRNA sense strand
guuauuugccagagaguga

SEQ ID NO: 289224 - RNA, 19 nt, Homo sapiens
  misc_RNA (1)...(19): siRNA sense strand
caagaguucagcagacugu

SEQ ID NO: 289225 - RNA, 19 nt, Homo sapiens
  misc_RNA (1)...(19): siRNA sense strand
agaaaggagccaagaguuc

SEQ ID NO: 289226 - RNA, 19 nt, Homo sapiens
  misc_RNA (1)...(19): siRNA sense strand
caauaaccugcuuugauga

SEQ ID NO: 289227 - RNA, 19 nt, Homo sapiens
  misc_RNA (1)...(19): siRNA sense strand
gugaggagaauauugacuu

SEQ ID NO: 289228 - RNA, 19 nt, Homo sapiens
  misc_RNA (1)...(19): siRNA sense strand
aaaccugauuagucaugaa

SEQ ID NO: 289229 - RNA, 19 nt, Homo sapiens
  misc_RNA (1)...(19): siRNA sense strand
auagugaggagaauauuga

SEQ ID NO: 289230 - RNA, 19 nt, Homo sapiens
  misc_RNA (1)...(19): siRNA sense strand
gagccaagaggaagucaag

SEQ ID NO: 289231 - RNA, 19 nt, Homo sapiens
  misc_RNA (1)...(19): siRNA sense strand
ugaagucugaauauaguga

SEQ ID NO: 289232 - RNA, 19 nt, Homo sapiens
  misc_RNA (1)...(19): siRNA sense strand
gcuagagccuacaauaacc

SEQ ID NO: 289233 - RNA, 19 nt, Homo sapiens
  misc_RNA (1)...(19): siRNA sense strand
uaugaaacaucggcuaggu

SEQ ID NO: 289234 - RNA, 19 nt, Homo sapiens
  misc_RNA (1)...(19): siRNA sense strand
ugaauauagugaggagaau

SEQ ID NO: 289235 - RNA, 19 nt, Homo sapiens
  misc_RNA (1)...(19): siRNA sense strand
uggaucagcugugaagagu

SEQ ID NO: 289236 - RNA, 19 nt, Homo sapiens
  misc_RNA (1)...(19): siRNA sense strand
aagucucgauucuaucuug

SEQ ID NO: 289237 - RNA, 19 nt, Homo sapiens
  misc_RNA (1)...(19): siRNA sense strand
ucaaccugauggagaagga

SEQ ID NO: 289238 - RNA, 19 nt, Homo sapiens
  misc_RNA (1)...(19): siRNA sense strand
uugaugaggcccagaagaa

SEQ ID NO: 289239 - RNA, 19 nt, Homo sapiens
  misc_RNA (1)...(19): siRNA sense strand
acaacaagaaggacaaagu

SEQ ID NO: 289240 - RNA, 19 nt, Homo sapiens
  misc_RNA (1)...(19): siRNA sense strand
gaaaaucaaaucaccaucu

SEQ ID NO: 289241 - RNA, 19 nt, Homo sapiens
  misc_RNA (1)...(19): siRNA sense strand
aagcuuucuugaagucuga

SEQ ID NO: 289242 - RNA, 19 nt, Homo sapiens
  misc_RNA (1)...(19): siRNA sense strand
agaaaugggcugaaucacu

SEQ ID NO: 289243 - RNA, 19 nt, Homo sapiens
  misc_RNA (1)...(19): siRNA sense strand
gccaagaguucagcagacu

SEQ ID NO: 289244 - RNA, 19 nt, Homo sapiens
  misc_RNA (1)...(19): siRNA sense strand
cugaauauagugaggagaa

SEQ ID NO: 289245 - RNA, 19 nt, Homo sapiens
  misc_RNA (1)...(19): siRNA sense strand
gaaaaccugauuagucaug

SEQ ID NO: 289246 - RNA, 19 nt, Homo sapiens
  misc_RNA (1)...(19): siRNA sense strand
uauagugaggagaauauug

SEQ ID NO: 289247 - RNA, 19 nt, Homo sapiens
  misc_RNA (1)...(19): siRNA sense strand
aagaaggacaaagugguua

SEQ ID NO: 289248 - RNA, 19 nt, Homo sapiens
  misc_RNA (1)...(19): siRNA sense strand
gccagagagugagccaaga

SEQ ID NO: 289249 - RNA, 19 nt, Homo sapiens
  misc_RNA (1)...(19): siRNA sense strand
gaagaguacaagaaaauca

SEQ ID NO: 289250 - RNA, 19 nt, Homo sapiens
  misc_RNA (1)...(19): siRNA sense strand
ccacaacaagaaggacaaa

SEQ ID NO: 289251 - RNA, 19 nt, Homo sapiens
  misc_RNA (1)...(19): siRNA sense strand
ucaagucucgauucuaucu

SEQ ID NO: 289252 - RNA, 19 nt, Homo sapiens
  misc_RNA (1)...(19): siRNA sense strand
gacaagccggaacaugcua

SEQ ID NO: 289253 - RNA, 19 nt, Homo sapiens
  misc_RNA (1)...(19): siRNA sense strand
acaauucuucccacaacaa

SEQ ID NO: 289254 - RNA, 19 nt, Homo sapiens
  misc_RNA (1)...(19): siRNA sense strand
cuacaauaaccugcuuuga

SEQ ID NO: 289255 - RNA, 19 nt, Homo sapiens
  misc_RNA (1)...(19): siRNA sense strand
augcuagagccuacaauaa

SEQ ID NO: 289256 - RNA, 19 nt, Homo sapiens
  misc_RNA (1)...(19): siRNA sense strand
gaacaugcuagagccuaca

SEQ ID NO: 289257 - RNA, 19 nt, Homo sapiens
  misc_RNA (1)...(19): siRNA sense strand
aaggacaaagugguuauuu

SEQ ID NO: 289258 - RNA, 19 nt, Homo sapiens
  misc_RNA (1)...(19): siRNA sense strand
caacagugauggucagcua

SEQ ID NO: 289259 - RNA, 19 nt, Homo sapiens
  misc_RNA (1)...(19): siRNA sense strand
gaaguaugcuggaaaggau

SEQ ID NO: 289260 - RNA, 19 nt, Homo sapiens
  misc_RNA (1)...(19): siRNA sense strand
ugaagaaacuggacaccaa

SEQ ID NO: 289261 - RNA, 19 nt, Homo sapiens
  misc_RNA (1)...(19): siRNA sense strand
uuccuaagcuucaugaaua

SEQ ID NO: 289262 - RNA, 19 nt, Homo sapiens
  misc_RNA (1)...(19): siRNA sense strand
agacagaguuccuaagcuu

SEQ ID NO: 289263 - RNA, 19 nt, Homo sapiens
  misc_RNA (1)...(19): siRNA sense strand
agaacuagcugccuucaca

SEQ ID NO: 289264 - RNA, 19 nt, Homo sapiens
  misc_RNA (1)...(19): siRNA sense strand
ucacaaagaaccagaagga

SEQ ID NO: 289265 - RNA, 19 nt, Homo sapiens
  misc_RNA (1)...(19): siRNA sense strand
cuagcugccuucacaaaga

SEQ ID NO: 289266 - RNA, 19 nt, Homo sapiens
  misc_RNA (1)...(19): siRNA sense strand
cuucaugaauacagaacua

SEQ ID NO: 289267 - RNA, 19 nt, Homo sapiens
  misc_RNA (1)...(19): siRNA sense strand
gugauggucagcuagauuu

SEQ ID NO: 289268 - RNA, 19 nt, Homo sapiens
  misc_RNA (1)...(19): siRNA sense strand
uagcugccuucacaaagaa

SEQ ID NO: 289269 - RNA, 19 nt, Homo sapiens
  misc_RNA (1)...(19): siRNA sense strand
uaagcuucaugaauacaga

SEQ ID NO: 289270 - RNA, 19 nt, Homo sapiens
  misc_RNA (1)...(19): siRNA sense strand
gaacuagcugccuucacaa

SEQ ID NO: 289271 - RNA, 19 nt, Homo sapiens
  misc_RNA (1)...(19): siRNA sense strand
gugcaucgagucccugauu

SEQ ID NO: 289272 - RNA, 19 nt, Homo sapiens
  misc_RNA (1)...(19): siRNA sense strand
cuggaaaggaugguuauaa

SEQ ID NO: 289273 - RNA, 19 nt, Homo sapiens
  misc_RNA (1)...(19): siRNA sense strand
caagacagaguuccuaagc

SEQ ID NO: 289274 - RNA, 19 nt, Homo sapiens
  misc_RNA (1)...(19): siRNA sense strand
guccuugaccgcaugauga

SEQ ID NO: 289275 - RNA, 19 nt, Homo sapiens
  misc_RNA (1)...(19): siRNA sense strand
guuccuaagcuucaugaau

SEQ ID NO: 289276 - RNA, 19 nt, Homo sapiens
  misc_RNA (1)...(19): siRNA sense strand
agaaguaugcuggaaagga

SEQ ID NO: 289277 - RNA, 19 nt, Homo sapiens
  misc_RNA (1)...(19): siRNA sense strand
gcuggaaaggaugguuaua

SEQ ID NO: 289278 - RNA, 19 nt, Homo sapiens
  misc_RNA (1)...(19): siRNA sense strand
gcaaacaccaucaagaaua

SEQ ID NO: 289279 - RNA, 19 nt, Homo sapiens
  misc_RNA (1)...(19): siRNA sense strand
caaacaccaucaagaauau

SEQ ID NO: 289280 - RNA, 19 nt, Homo sapiens
  misc_RNA (1)...(19): siRNA sense strand
agauaaagcugucauugau

SEQ ID NO: 289281 - RNA, 19 nt, Homo sapiens
  misc_RNA (1)...(19): siRNA sense strand
gucaauaucuuccaccaau

SEQ ID NO: 289282 - RNA, 19 nt, Homo sapiens
  misc_RNA (1)...(19): siRNA sense strand
gcugaaggcugcccauuac

SEQ ID NO: 289283 - RNA, 19 nt, Homo sapiens
  misc_RNA (1)...(19): siRNA sense strand
ucaauaucuuccaccaaua

SEQ ID NO: 289284 - RNA, 19 nt, Homo sapiens
  misc_RNA (1)...(19): siRNA sense strand
ggucgacuuucaagaauuc

SEQ ID NO: 289285 - RNA, 19 nt, Homo sapiens
  misc_RNA (1)...(19): siRNA sense strand
gaacaggucgacuuucaag

SEQ ID NO: 289286 - RNA, 19 nt, Homo sapiens
  misc_RNA (1)...(19): siRNA sense strand
cgacuuucaagaauucaua

SEQ ID NO: 289287 - RNA, 19 nt, Homo sapiens
  misc_RNA (1)...(19): siRNA sense strand
aagauaaagcugucauuga

SEQ ID NO: 289288 - RNA, 19 nt, Homo sapiens
  misc_RNA (1)...(19): siRNA sense strand
caaagauaaagcugucauu

SEQ ID NO: 289289 - RNA, 19 nt, Homo sapiens
  misc_RNA (1)...(19): siRNA sense strand
gauaaagcugucauugaug

SEQ ID NO: 289290 - RNA, 19 nt, Homo sapiens
  misc_RNA (1)...(19): siRNA sense strand
caggucgacuuucaagaau

SEQ ID NO: 289291 - RNA, 19 nt, Homo sapiens
  misc_RNA (1)...(19): siRNA sense strand
ggaugcuaaucaagaugaa

SEQ ID NO: 289292 - RNA, 19 nt, Homo sapiens
  misc_RNA (1)...(19): siRNA sense strand
aaagauaaagcugucauug

SEQ ID NO: 289293 - RNA, 19 nt, Homo sapiens
  misc_RNA (1)...(19): siRNA sense strand
ccaucaagaauaucaaaga

SEQ ID NO: 289294 - RNA, 19 nt, Homo sapiens
  misc_RNA (1)...(19): siRNA sense strand
acaggucgacuuucaagaa

SEQ ID NO: 289295 - RNA, 19 nt, Homo sapiens
  misc_RNA (1)...(19): siRNA sense strand
aagagcaucuggagggaau

SEQ ID NO: 289296 - RNA, 19 nt, Homo sapiens
  misc_RNA (1)...(19): siRNA sense strand
uugcaaacaccaucaagaa

SEQ ID NO: 289297 - RNA, 19 nt, Homo sapiens
  misc_RNA (1)...(19): siRNA sense strand
caauaucuuccaccaauac

SEQ ID NO: 289298 - RNA, 19 nt, Homo sapiens
  misc_RNA (1)...(19): siRNA sense strand
cgcugaaggcugcccauua

SEQ ID NO: 289299 - RNA, 19 nt, Homo sapiens
  misc_RNA (1)...(19): siRNA sense strand
gagcaucuggagggaauug

SEQ ID NO: 289300 - RNA, 19 nt, Homo sapiens
  misc_RNA (1)...(19): siRNA sense strand
ccuggaugcuaaucaagau

SEQ ID NO: 289301 - RNA, 19 nt, Homo sapiens
  misc_RNA (1)...(19): siRNA sense strand
uaucuuccaccaauacuca

SEQ ID NO: 289302 - RNA, 19 nt, Homo sapiens
  misc_RNA (1)...(19): siRNA sense strand
agaugaacaggucgacuuu

SEQ ID NO: 289303 - RNA, 19 nt, Homo sapiens
  misc_RNA (1)...(19): siRNA sense strand
caccaucaagaauaucaaa

SEQ ID NO: 289304 - RNA, 19 nt, Homo sapiens
  misc_RNA (1)...(19): siRNA sense strand
agaauucauaucccuggua

SEQ ID NO: 289305 - RNA, 19 nt, Homo sapiens
  misc_RNA (1)...(19): siRNA sense strand
gagcuugcaaacaccauca

SEQ ID NO: 289306 - RNA, 19 nt, Homo sapiens
  misc_RNA (1)...(19): siRNA sense strand
aagaugaacaggucgacuu

SEQ ID NO: 289307 - RNA, 19 nt, Homo sapiens
  misc_RNA (1)...(19): siRNA sense strand
gaacugacaagcuuaguaa

SEQ ID NO: 289308 - RNA, 19 nt, Homo sapiens
  misc_RNA (1)...(19): siRNA sense strand
ugaaagaacugacaagcuu

SEQ ID NO: 289309 - RNA, 19 nt, Homo sapiens
  misc_RNA (1)...(19): siRNA sense strand
gagaagacaugcccacugu

SEQ ID NO: 289310 - RNA, 19 nt, Homo sapiens
  misc_RNA (1)...(19): siRNA sense strand
gaaagaacugacaagcuua

SEQ ID NO: 289311 - RNA, 19 nt, Homo sapiens
  misc_RNA (1)...(19): siRNA sense strand
agaccuggcuaucgaguua

SEQ ID NO: 289312 - RNA, 19 nt, Homo sapiens
  misc_RNA (1)...(19): siRNA sense strand
gaagacaugcccacuguug

SEQ ID NO: 289313 - RNA, 19 nt, Homo sapiens
  misc_RNA (1)...(19): siRNA sense strand
gaaagaagggcacucacuu

SEQ ID NO: 289314 - RNA, 19 nt, Homo sapiens
  misc_RNA (1)...(19): siRNA sense strand
ccagauaggagauuacuug

SEQ ID NO: 289315 - RNA, 19 nt, Homo sapiens
  misc_RNA (1)...(19): siRNA sense strand
ggagauuacuuggacauag

SEQ ID NO: 289316 - RNA, 19 nt, Homo sapiens
  misc_RNA (1)...(19): siRNA sense strand
gaucuacacuuggauggau

SEQ ID NO: 289317 - RNA, 19 nt, Homo sapiens
  misc_RNA (1)...(19): siRNA sense strand
uaagaaggagccagagaaa

SEQ ID NO: 289318 - RNA, 19 nt, Homo sapiens
  misc_RNA (1)...(19): siRNA sense strand
gcgcaugagaccauauuaa

SEQ ID NO: 289319 - RNA, 19 nt, Homo sapiens
  misc_RNA (1)...(19): siRNA sense strand
ccagcgaguugcagaucua

SEQ ID NO: 289320 - RNA, 19 nt, Homo sapiens
  misc_RNA (1)...(19): siRNA sense strand
gagauuggcagcaccaugu

SEQ ID NO: 289321 - RNA, 19 nt, Homo sapiens
  misc_RNA (1)...(19): siRNA sense strand
uaaaagaccuggcuaucga

SEQ ID NO: 289322 - RNA, 19 nt, Homo sapiens
  misc_RNA (1)...(19): siRNA sense strand
ucgcagaaguuccagauag

SEQ ID NO: 289323 - RNA, 19 nt, Homo sapiens
  misc_RNA (1)...(19): siRNA sense strand
aaagaagucuacccagaag

SEQ ID NO: 289324 - RNA, 19 nt, Homo sapiens
  misc_RNA (1)...(19): siRNA sense strand
gcaauuaccccuccaaauc

SEQ ID NO: 289325 - RNA, 19 nt, Homo sapiens
  misc_RNA (1)...(19): siRNA sense strand
aggaggaaauuaagaagga

SEQ ID NO: 289326 - RNA, 19 nt, Homo sapiens
  misc_RNA (1)...(19): siRNA sense strand
gagauuacuuggacauagc

SEQ ID NO: 289327 - RNA, 19 nt, Homo sapiens
  misc_RNA (1)...(19): siRNA sense strand
gaaaggggacugaugauuc

SEQ ID NO: 289328 - RNA, 19 nt, Homo sapiens
  misc_RNA (1)...(19): siRNA sense strand
cccagaagcuagaaagaag

SEQ ID NO: 289329 - RNA, 19 nt, Homo sapiens
  misc_RNA (1)...(19): siRNA sense strand
gcagaaaggggacugauga

SEQ ID NO: 289330 - RNA, 19 nt, Homo sapiens
  misc_RNA (1)...(19): siRNA sense strand
uugcagaucuacacuugga

SEQ ID NO: 289331 - RNA, 19 nt, Homo sapiens
  misc_RNA (1)...(19): siRNA sense strand
gcuaucgaguuaaggagau

SEQ ID NO: 289332 - RNA, 19 nt, Homo sapiens
  misc_RNA (1)...(19): siRNA sense strand
uuaagaaggagccagagaa

SEQ ID NO: 289333 - RNA, 19 nt, Homo sapiens
  misc_RNA (1)...(19): siRNA sense strand
uuacuuggacauagcaauu

SEQ ID NO: 289334 - RNA, 19 nt, Homo sapiens
  misc_RNA (1)...(19): siRNA sense strand
gaagucuacccagaagcua

SEQ ID NO: 289335 - RNA, 19 nt, Homo sapiens
  misc_RNA (1)...(19): siRNA sense strand
gcagaaguuccagauagga

SEQ ID NO: 289336 - RNA, 19 nt, Homo sapiens
  misc_RNA (1)...(19): siRNA sense strand
agaacugacaagcuuagua

SEQ ID NO: 289337 - RNA, 19 nt, Homo sapiens
  misc_RNA (1)...(19): siRNA sense strand
ggacugaugauuccaugac

SEQ ID NO: 289338 - RNA, 19 nt, Homo sapiens
  misc_RNA (1)...(19): siRNA sense strand
uuacccaggaggaaauuaa

SEQ ID NO: 289339 - RNA, 19 nt, Homo sapiens
  misc_RNA (1)...(19): siRNA sense strand
gaaguuccagauaggagau

SEQ ID NO: 289340 - RNA, 19 nt, Homo sapiens
  misc_RNA (1)...(19): siRNA sense strand
gggcgcaugagaccauauu

SEQ ID NO: 289341 - RNA, 19 nt, Homo sapiens
  misc_RNA (1)...(19): siRNA sense strand
aguugcagaucuacacuug

SEQ ID NO: 289342 - RNA, 19 nt, Homo sapiens
  misc_RNA (1)...(19): siRNA sense strand
ugacaagcuuaguaaaaga

SEQ ID NO: 289343 - RNA, 19 nt, Homo sapiens
  misc_RNA (1)...(19): siRNA sense strand
ggcacucacuucaauuuug

SEQ ID NO: 289344 - RNA, 19 nt, Homo sapiens
  misc_RNA (1)...(19): siRNA sense strand
cuagaaagaagggcacuca

SEQ ID NO: 289345 - RNA, 19 nt, Homo sapiens
  misc_RNA (1)...(19): siRNA sense strand
gacaugcccacuguugcua

SEQ ID NO: 289346 - RNA, 19 nt, Homo sapiens
  misc_RNA (1)...(19): siRNA sense strand
ucacuucaauuuugcaauc

SEQ ID NO: 289347 - RNA, 19 nt, Homo sapiens
  misc_RNA (1)...(19): siRNA sense strand
gaagaugacuccucugaau

SEQ ID NO: 289348 - RNA, 19 nt, Homo sapiens
  misc_RNA (1)...(19): siRNA sense strand
gaaaagaggcacucaaauu

SEQ ID NO: 289349 - RNA, 19 nt, Homo sapiens
  misc_RNA (1)...(19): siRNA sense strand
gaaagauaauccaaaucga

SEQ ID NO: 289350 - RNA, 19 nt, Homo sapiens
  misc_RNA (1)...(19): siRNA sense strand
ccaaaucgagggaauguaa

SEQ ID NO: 289351 - RNA, 19 nt, Homo sapiens
  misc_RNA (1)...(19): siRNA sense strand
aaacauacaauaccuguga

SEQ ID NO: 289352 - RNA, 19 nt, Homo sapiens
  misc_RNA (1)...(19): siRNA sense strand
gcaaugacguggccaccau

SEQ ID NO: 289353 - RNA, 19 nt, Homo sapiens
  misc_RNA (1)...(19): siRNA sense strand
gaauguaaacccacguaaa

SEQ ID NO: 289354 - RNA, 19 nt, Homo sapiens
  misc_RNA (1)...(19): siRNA sense strand
caucuugucucgucgcauu

SEQ ID NO: 289355 - RNA, 19 nt, Homo sapiens
  misc_RNA (1)...(19): siRNA sense strand
gaaguuccaccauucaaga

SEQ ID NO: 289356 - RNA, 19 nt, Homo sapiens
  misc_RNA (1)...(19): siRNA sense strand
acacagacccuucauacuu

SEQ ID NO: 289357 - RNA, 19 nt, Homo sapiens
  misc_RNA (1)...(19): siRNA sense strand
ucaacaaucuuaccccuua

SEQ ID NO: 289358 - RNA, 19 nt, Homo sapiens
  misc_RNA (1)...(19): siRNA sense strand
aagaggcacucaaauucua

SEQ ID NO: 289359 - RNA, 19 nt, Homo sapiens
  misc_RNA (1)...(19): siRNA sense strand
gaagauggggcaagaauuu

SEQ ID NO: 289360 - RNA, 19 nt, Homo sapiens
  misc_RNA (1)...(19): siRNA sense strand
uuggagagcucuuuacuca

SEQ ID NO: 289361 - RNA, 19 nt, Homo sapiens
  misc_RNA (1)...(19): siRNA sense strand
caaggaagaagaaguguca

SEQ ID NO: 289362 - RNA, 19 nt, Homo sapiens
  misc_RNA (1)...(19): siRNA sense strand
uaaagucacucagcuggau

SEQ ID NO: 289363 - RNA, 19 nt, Homo sapiens
  misc_RNA (1)...(19): siRNA sense strand
cacagacccuucauacuuc

SEQ ID NO: 289364 - RNA, 19 nt, Homo sapiens
  misc_RNA (1)...(19): siRNA sense strand
caacaucacccuggcaaau

SEQ ID NO: 289365 - RNA, 19 nt, Homo sapiens
  misc_RNA (1)...(19): siRNA sense strand
caagagaagcgggauguug

SEQ ID NO: 289366 - RNA, 19 nt, Homo sapiens
  misc_RNA (1)...(19): siRNA sense strand
ugacuccucugaauuugau

SEQ ID NO: 289367 - RNA, 19 nt, Homo sapiens
  misc_RNA (1)...(19): siRNA sense strand
gaugacuccucugaauuug

SEQ ID NO: 289368 - RNA, 19 nt, Homo sapiens
  misc_RNA (1)...(19): siRNA sense strand
guacagugacucagaagau

SEQ ID NO: 289369 - RNA, 19 nt, Homo sapiens
  misc_RNA (1)...(19): siRNA sense strand
cccagugccugucuuagaa

SEQ ID NO: 289370 - RNA, 19 nt, Homo sapiens
  misc_RNA (1)...(19): siRNA sense strand
ggaauguaaacccacguaa

SEQ ID NO: 289371 - RNA, 19 nt, Homo sapiens
  misc_RNA (1)...(19): siRNA sense strand
agaugacuccucugaauuu

SEQ ID NO: 289372 - RNA, 19 nt, Homo sapiens
  misc_RNA (1)...(19): siRNA sense strand
gacguugccuagcguuaga

SEQ ID NO: 289373 - RNA, 19 nt, Homo sapiens
  misc_RNA (1)...(19): siRNA sense strand
ugacguggccaccaucuug

SEQ ID NO: 289374 - RNA, 19 nt, Homo sapiens
  misc_RNA (1)...(19): siRNA sense strand
caccaccgcuuucugauac

SEQ ID NO: 289375 - RNA, 19 nt, Homo sapiens
  misc_RNA (1)...(19): siRNA sense strand
ccaccaccgcuuucugaua

SEQ ID NO: 289376 - RNA, 19 nt, Homo sapiens
  misc_RNA (1)...(19): siRNA sense strand
ucagcuggaucccaaggaa

SEQ ID NO: 289377 - RNA, 19 nt, Homo sapiens
  misc_RNA (1)...(19): siRNA sense strand
gggauguugugggcaauga

SEQ ID NO: 289378 - RNA, 19 nt, Homo sapiens
  misc_RNA (1)...(19): siRNA sense strand
uaaauaugcagaggacauu

SEQ ID NO: 289379 - RNA, 19 nt, Homo sapiens
  misc_RNA (1)...(19): siRNA sense strand
gcuauaccaccaccgcuuu

SEQ ID NO: 289380 - RNA, 19 nt, Homo sapiens
  misc_RNA (1)...(19): siRNA sense strand
guaaauaugcagaggacau

SEQ ID NO: 289381 - RNA, 19 nt, Homo sapiens
  misc_RNA (1)...(19): siRNA sense strand
gcucuuuacucaggcaaau

SEQ ID NO: 289382 - RNA, 19 nt, Homo sapiens
  misc_RNA (1)...(19): siRNA sense strand
ucgcauugcuguugaguac

SEQ ID NO: 289383 - RNA, 19 nt, Homo sapiens
  misc_RNA (1)...(19): siRNA sense strand
uacaauaccugugauacuc

SEQ ID NO: 289384 - RNA, 19 nt, Homo sapiens
  misc_RNA (1)...(19): siRNA sense strand
gagcagcgggaacaagaga

SEQ ID NO: 289385 - RNA, 19 nt, Homo sapiens
  misc_RNA (1)...(19): siRNA sense strand
gggaauguaaacccacgua

SEQ ID NO: 289386 - RNA, 19 nt, Homo sapiens
  misc_RNA (1)...(19): siRNA sense strand
gcccguagcgaccugcuuu

SEQ ID NO: 289387 - RNA, 19 nt, Homo sapiens
  misc_RNA (1)...(19): siRNA sense strand
gcagcugacuacccaacuc

SEQ ID NO: 289388 - RNA, 19 nt, Homo sapiens
  misc_RNA (1)...(19): siRNA sense strand
cuacacagacccuucauac

SEQ ID NO: 289389 - RNA, 19 nt, Homo sapiens
  misc_RNA (1)...(19): siRNA sense strand
ugggcagccugaguaaaua

SEQ ID NO: 289390 - RNA, 19 nt, Homo sapiens
  misc_RNA (1)...(19): siRNA sense strand
caccagcagaauucaguua

SEQ ID NO: 289391 - RNA, 19 nt, Homo sapiens
  misc_RNA (1)...(19): siRNA sense strand
caaaucgagggaauguaaa

SEQ ID NO: 289392 - RNA, 19 nt, Homo sapiens
  misc_RNA (1)...(19): siRNA sense strand
cuucauacuucuuugaucu

SEQ ID NO: 289393 - RNA, 19 nt, Homo sapiens
  misc_RNA (1)...(19): siRNA sense strand
ccaccuccgccuccaauga

SEQ ID NO: 289394 - RNA, 19 nt, Homo sapiens
  misc_RNA (1)...(19): siRNA sense strand
agaaagauaauccaaaucg

SEQ ID NO: 289395 - RNA, 19 nt, Homo sapiens
  misc_RNA (1)...(19): siRNA sense strand
ggacaaccaaagaggaucu

SEQ ID NO: 289396 - RNA, 19 nt, Homo sapiens
  misc_RNA (1)...(19): siRNA sense strand
uacagugacucagaagaug

SEQ ID NO: 289397 - RNA, 19 nt, Homo sapiens
  misc_RNA (1)...(19): siRNA sense strand
caccaccgccuguaggauu

SEQ ID NO: 289398 - RNA, 19 nt, Homo sapiens
  misc_RNA (1)...(19): siRNA sense strand
uggaaugcgugaccaacau

SEQ ID NO: 289399 - RNA, 19 nt, Homo sapiens
  misc_RNA (1)...(19): siRNA sense strand
ucuuugaucuuuggaagga

SEQ ID NO: 289400 - RNA, 19 nt, Homo sapiens
  misc_RNA (1)...(19): siRNA sense strand
aagaugacuccucugaauu

SEQ ID NO: 289401 - RNA, 19 nt, Homo sapiens
  misc_RNA (1)...(19): siRNA sense strand
ucaguuacccaguggacaa

SEQ ID NO: 289402 - RNA, 19 nt, Homo sapiens
  misc_RNA (1)...(19): siRNA sense strand
aagaaaagcuggggacuuc

SEQ ID NO: 289403 - RNA, 19 nt, Homo sapiens
  misc_RNA (1)...(19): siRNA sense strand
gaagagugggagaaaauga

SEQ ID NO: 289404 - RNA, 19 nt, Homo sapiens
  misc_RNA (1)...(19): siRNA sense strand
aagagaagcgggauguugu

SEQ ID NO: 289405 - RNA, 19 nt, Homo sapiens
  misc_RNA (1)...(19): siRNA sense strand
aaaagaggcacucaaauuc

SEQ ID NO: 289406 - RNA, 19 nt, Homo sapiens
  misc_RNA (1)...(19): siRNA sense strand
guuagaagcgagcuggaau

SEQ ID NO: 289407 - RNA, 19 nt, Homo sapiens
  misc_RNA (1)...(19): siRNA sense strand
uaauccaaaucgagggaau

SEQ ID NO: 289408 - RNA, 19 nt, Homo sapiens
  misc_RNA (1)...(19): siRNA sense strand
aaagaggcacucaaauucu

SEQ ID NO: 289409 - RNA, 19 nt, Homo sapiens
  misc_RNA (1)...(19): siRNA sense strand
cauacuucuuugaucuuug

SEQ ID NO: 289410 - RNA, 19 nt, Homo sapiens
  misc_RNA (1)...(19): siRNA sense strand
ggaaugcgugaccaacauc

SEQ ID NO: 289411 - RNA, 19 nt, Homo sapiens
  misc_RNA (1)...(19): siRNA sense strand
uaccaccaccgcuuucuga

SEQ ID NO: 289412 - RNA, 19 nt, Homo sapiens
  misc_RNA (1)...(19): siRNA sense strand
gggcagccugaguaaauau

SEQ ID NO: 289413 - RNA, 19 nt, Homo sapiens
  misc_RNA (1)...(19): siRNA sense strand
uucagaaguuccaccauuc

SEQ ID NO: 289414 - RNA, 19 nt, Homo sapiens
  misc_RNA (1)...(19): siRNA sense strand
gaaugcgugaccaacauca

SEQ ID NO: 289415 - RNA, 19 nt, Homo sapiens
  misc_RNA (1)...(19): siRNA sense strand
auacuucuuugaucuuugg

SEQ ID NO: 289416 - RNA, 19 nt, Homo sapiens
  misc_RNA (1)...(19): siRNA sense strand
gacccuucauacuucuuug

SEQ ID NO: 289417 - RNA, 19 nt, Homo sapiens
  misc_RNA (1)...(19): siRNA sense strand
acauacaauaccugugaua

SEQ ID NO: 289418 - RNA, 19 nt, Homo sapiens
  misc_RNA (1)...(19): siRNA sense strand
ucagaaguuccaccauuca

SEQ ID NO: 289419 - RNA, 19 nt, Homo sapiens
  misc_RNA (1)...(19): siRNA sense strand
gugccugucuuagaaacau

SEQ ID NO: 289420 - RNA, 19 nt, Homo sapiens
  misc_RNA (1)...(19): siRNA sense strand
ggaaaagaggcacucaaau

SEQ ID NO: 289421 - RNA, 19 nt, Homo sapiens
  misc_RNA (1)...(19): siRNA sense strand
cagaaguuccaccauucaa

SEQ ID NO: 289422 - RNA, 19 nt, Homo sapiens
  misc_RNA (1)...(19): siRNA sense strand
ucagccauccgucaagguu

SEQ ID NO: 289423 - RNA, 19 nt, Homo sapiens
  misc_RNA (1)...(19): siRNA sense strand
cagauggccagccugcuau

SEQ ID NO: 289424 - RNA, 19 nt, Homo sapiens
  misc_RNA (1)...(19): siRNA sense strand
guaaacccacguaaaauca

SEQ ID NO: 289425 - RNA, 19 nt, Homo sapiens
  misc_RNA (1)...(19): siRNA sense strand
cagacguugccuagcguua

SEQ ID NO: 289426 - RNA, 19 nt, Homo sapiens
  misc_RNA (1)...(19): siRNA sense strand
gaaugucucccuccugaua

SEQ ID NO: 289427 - RNA, 19 nt, Homo sapiens
  misc_RNA (1)...(19): siRNA sense strand
gaaguugaguucuggaaac

SEQ ID NO: 289428 - RNA, 19 nt, Homo sapiens
  misc_RNA (1)...(19): siRNA sense strand
guuaucaucguccaaguuu

SEQ ID NO: 289429 - RNA, 19 nt, Homo sapiens
  misc_RNA (1)...(19): siRNA sense strand
gcccucaugcuguaaagaa

SEQ ID NO: 289430 - RNA, 19 nt, Homo sapiens
  misc_RNA (1)...(19): siRNA sense strand
uaucaucguccaaguuuag

SEQ ID NO: 289431 - RNA, 19 nt, Homo sapiens
  misc_RNA (1)...(19): siRNA sense strand
uuaucaucguccaaguuua

SEQ ID NO: 289432 - RNA, 19 nt, Homo sapiens
  misc_RNA (1)...(19): siRNA sense strand
cccaucagcagcaguaaga

SEQ ID NO: 289433 - RNA, 19 nt, Homo sapiens
  misc_RNA (1)...(19): siRNA sense strand
gcuguaaagaaguugaguu

SEQ ID NO: 289434 - RNA, 19 nt, Homo sapiens
  misc_RNA (1)...(19): siRNA sense strand
cagcagcaguaagaggaau

SEQ ID NO: 289435 - RNA, 19 nt, Homo sapiens
  misc_RNA (1)...(19): siRNA sense strand
gaaguugaguucuggaaac

SEQ ID NO: 289436 - RNA, 19 nt, Homo sapiens
  misc_RNA (1)...(19): siRNA sense strand
guuaucaucguccaaguuu

SEQ ID NO: 289437 - RNA, 19 nt, Homo sapiens
  misc_RNA (1)...(19): siRNA sense strand
gcccucaugcuguaaagaa

SEQ ID NO: 289438 - RNA, 19 nt, Homo sapiens
  misc_RNA (1)...(19): siRNA sense strand
uaucaucguccaaguuuag

SEQ ID NO: 289439 - RNA, 19 nt, Homo sapiens
  misc_RNA (1)...(19): siRNA sense strand
uuaucaucguccaaguuua

SEQ ID NO: 289440 - RNA, 19 nt, Homo sapiens
  misc_RNA (1)...(19): siRNA sense strand
gcuguaaagaaguugaguu

SEQ ID NO: 289441 - RNA, 19 nt, Homo sapiens
  misc_RNA (1)...(19): siRNA sense strand
gaaauuagcaagggaaaga

SEQ ID NO: 289442 - RNA, 19 nt, Homo sapiens
  misc_RNA (1)...(19): siRNA sense strand
cagcauaacuccuaucucu

SEQ ID NO: 289443 - RNA, 19 nt, Homo sapiens
  misc_RNA (1)...(19): siRNA sense strand
gaaagaggauagcuugacu

SEQ ID NO: 289444 - RNA, 19 nt, Homo sapiens
  misc_RNA (1)...(19): siRNA sense strand
ggaaagaggaaagaggaua

SEQ ID NO: 289445 - RNA, 19 nt, Homo sapiens
  misc_RNA (1)...(19): siRNA sense strand
ggaaaucaacgagaacuug

SEQ ID NO: 289446 - RNA, 19 nt, Homo sapiens
  misc_RNA (1)...(19): siRNA sense strand
gaagaaaacccaggaaauu

SEQ ID NO: 289447 - RNA, 19 nt, Homo sapiens
  misc_RNA (1)...(19): siRNA sense strand
gguauuacuuggcuuaugg

SEQ ID NO: 289448 - RNA, 19 nt, Homo sapiens
  misc_RNA (1)...(19): siRNA sense strand
gaaagaggaaagaggauag

SEQ ID NO: 289449 - RNA, 19 nt, Homo sapiens
  misc_RNA (1)...(19): siRNA sense strand
ggccacaccucccucugaa

SEQ ID NO: 289450 - RNA, 19 nt, Homo sapiens
  misc_RNA (1)...(19): siRNA sense strand
ccagguauuacuuggcuua

SEQ ID NO: 289451 - RNA, 19 nt, Homo sapiens
  misc_RNA (1)...(19): siRNA sense strand
ggagaauccuugcuuuccu

SEQ ID NO: 289452 - RNA, 19 nt, Homo sapiens
  misc_RNA (1)...(19): siRNA sense strand
uaucucugccuuugucuuu

SEQ ID NO: 289453 - RNA, 19 nt, Homo sapiens
  misc_RNA (1)...(19): siRNA sense strand
gcaagggaaagaggaaaga

SEQ ID NO: 289454 - RNA, 19 nt, Homo sapiens
  misc_RNA (1)...(19): siRNA sense strand
aauccuugcuuuccucuuc

SEQ ID NO: 289455 - RNA, 19 nt, Homo sapiens
  misc_RNA (1)...(19): siRNA sense strand
ggaaagaggauagcuugac

SEQ ID NO: 289456 - RNA, 19 nt, Homo sapiens
  misc_RNA (1)...(19): siRNA sense strand
ccguggaaaucaacgagaa

SEQ ID NO: 289457 - RNA, 19 nt, Homo sapiens
  misc_RNA (1)...(19): siRNA sense strand
gacuuuugcuguuggauuu

SEQ ID NO: 289458 - RNA, 19 nt, Homo sapiens
  misc_RNA (1)...(19): siRNA sense strand
aagaaaacccaggaaauua

SEQ ID NO: 289459 - RNA, 19 nt, Homo sapiens
  misc_RNA (1)...(19): siRNA sense strand
acuccuaucucugccuuug

SEQ ID NO: 289460 - RNA, 19 nt, Homo sapiens
  misc_RNA (1)...(19): siRNA sense strand
ucucugccuuugucuuugu

SEQ ID NO: 289461 - RNA, 19 nt, Homo sapiens
  misc_RNA (1)...(19): siRNA sense strand
gaagaaagcaauccugaaa

SEQ ID NO: 289462 - RNA, 19 nt, Homo sapiens
  misc_RNA (1)...(19): siRNA sense strand
cagcugaaaccaaauauua

SEQ ID NO: 289463 - RNA, 19 nt, Homo sapiens
  misc_RNA (1)...(19): siRNA sense strand
gaaguucaguccaucuuga

SEQ ID NO: 289464 - RNA, 19 nt, Homo sapiens
  misc_RNA (1)...(19): siRNA sense strand
aaacacagcugaaauguac

SEQ ID NO: 289465 - RNA, 19 nt, Homo sapiens
  misc_RNA (1)...(19): siRNA sense strand
ccagacugcugacaaauug

SEQ ID NO: 289466 - RNA, 19 nt, Homo sapiens
  misc_RNA (1)...(19): siRNA sense strand
gaaacacagcugaaaugua

SEQ ID NO: 289467 - RNA, 19 nt, Homo sapiens
  misc_RNA (1)...(19): siRNA sense strand
ggagcugucuuguaugaga

SEQ ID NO: 289468 - RNA, 19 nt, Homo sapiens
  misc_RNA (1)...(19): siRNA sense strand
gaacacaacagcacaacau

SEQ ID NO: 289469 - RNA, 19 nt, Homo sapiens
  misc_RNA (1)...(19): siRNA sense strand
ccugggagcugucuuguau

SEQ ID NO: 289470 - RNA, 19 nt, Homo sapiens
  misc_RNA (1)...(19): siRNA sense strand
gccaauaacuccuaugcau

SEQ ID NO: 289471 - RNA, 19 nt, Homo sapiens
  misc_RNA (1)...(19): siRNA sense strand
ggagcggaauguucuguug

SEQ ID NO: 289472 - RNA, 19 nt, Homo sapiens
  misc_RNA (1)...(19): siRNA sense strand
gcaaggagaacauugaaca

SEQ ID NO: 289473 - RNA, 19 nt, Homo sapiens
  misc_RNA (1)...(19): siRNA sense strand
caucguuuauagagacuua

SEQ ID NO: 289474 - RNA, 19 nt, Homo sapiens
  misc_RNA (1)...(19): siRNA sense strand
gaacgacuuuauucagaag

SEQ ID NO: 289475 - RNA, 19 nt, Homo sapiens
  misc_RNA (1)...(19): siRNA sense strand
ucauggagauuaagaguca

SEQ ID NO: 289476 - RNA, 19 nt, Homo sapiens
  misc_RNA (1)...(19): siRNA sense strand
ggaugggucugaacgacuu

SEQ ID NO: 289477 - RNA, 19 nt, Homo sapiens
  misc_RNA (1)...(19): siRNA sense strand
uaacuccuaugcaugcaaa

SEQ ID NO: 289478 - RNA, 19 nt, Homo sapiens
  misc_RNA (1)...(19): siRNA sense strand
ucacugaacaucguuuaua

SEQ ID NO: 289479 - RNA, 19 nt, Homo sapiens
  misc_RNA (1)...(19): siRNA sense strand
cagcugaaauguacgacaa

SEQ ID NO: 289480 - RNA, 19 nt, Homo sapiens
  misc_RNA (1)...(19): siRNA sense strand
aaagaggagaagcauauua

SEQ ID NO: 289481 - RNA, 19 nt, Homo sapiens
  misc_RNA (1)...(19): siRNA sense strand
agaaagaggagaagcauau

SEQ ID NO: 289482 - RNA, 19 nt, Homo sapiens
  misc_RNA (1)...(19): siRNA sense strand
uguaugagaugcuguaugg

SEQ ID NO: 289483 - RNA, 19 nt, Homo sapiens
  misc_RNA (1)...(19): siRNA sense strand
ccaaguccuucucagcaaa

SEQ ID NO: 289484 - RNA, 19 nt, Homo sapiens
  misc_RNA (1)...(19): siRNA sense strand
ggagaacauugaacacaac

SEQ ID NO: 289485 - RNA, 19 nt, Homo sapiens
  misc_RNA (1)...(19): siRNA sense strand
gaaagaggagaagcauauu

SEQ ID NO: 289486 - RNA, 19 nt, Homo sapiens
  misc_RNA (1)...(19): siRNA sense strand
gaaguguucuaugcaguca

SEQ ID NO: 289487 - RNA, 19 nt, Homo sapiens
  misc_RNA (1)...(19): siRNA sense strand
ggaaagguucuucuagcaa

SEQ ID NO: 289488 - RNA, 19 nt, Homo sapiens
  misc_RNA (1)...(19): siRNA sense strand
uggcaauucucaucgcuuu

SEQ ID NO: 289489 - RNA, 19 nt, Homo sapiens
  misc_RNA (1)...(19): siRNA sense strand
uuaauuaacugggaugauc

SEQ ID NO: 289490 - RNA, 19 nt, Homo sapiens
  misc_RNA (1)...(19): siRNA sense strand
ggucugaacgacuuuauuc

SEQ ID NO: 289491 - RNA, 19 nt, Homo sapiens
  misc_RNA (1)...(19): siRNA sense strand
caucugacuuucacuucuu

SEQ ID NO: 289492 - RNA, 19 nt, Homo sapiens
  misc_RNA (1)...(19): siRNA sense strand
ugggagcugucuuguauga

SEQ ID NO: 289493 - RNA, 19 nt, Homo sapiens
  misc_RNA (1)...(19): siRNA sense strand
guccuagacuacauuaaug

SEQ ID NO: 289494 - RNA, 19 nt, Homo sapiens
  misc_RNA (1)...(19): siRNA sense strand
ucacuucucuuuccagacu

SEQ ID NO: 289495 - RNA, 19 nt, Homo sapiens
  misc_RNA (1)...(19): siRNA sense strand
cacggacucuuuccucuga

SEQ ID NO: 289496 - RNA, 19 nt, Homo sapiens
  misc_RNA (1)...(19): siRNA sense strand
gcuaaaccaucugacuuuc

SEQ ID NO: 289497 - RNA, 19 nt, Homo sapiens
  misc_RNA (1)...(19): siRNA sense strand
uguauggccugccgccuuu

SEQ ID NO: 289498 - RNA, 19 nt, Homo sapiens
  misc_RNA (1)...(19): siRNA sense strand
cauuaaugguggagaguug

SEQ ID NO: 289499 - RNA, 19 nt, Homo sapiens
  misc_RNA (1)...(19): siRNA sense strand
acacaaggcagaagaagug

SEQ ID NO: 289500 - RNA, 19 nt, Homo sapiens
  misc_RNA (1)...(19): siRNA sense strand
guccaauccucaugcuaaa

SEQ ID NO: 289501 - RNA, 19 nt, Homo sapiens
  misc_RNA (1)...(19): siRNA sense strand
gucuucuucuccuuaauua

SEQ ID NO: 289502 - RNA, 19 nt, Homo sapiens
  misc_RNA (1)...(19): siRNA sense strand
ggaaagggcaguuuuggaa

SEQ ID NO: 289503 - RNA, 19 nt, Homo sapiens
  misc_RNA (1)...(19): siRNA sense strand
gcaauucucaucgcuuuca

SEQ ID NO: 289504 - RNA, 19 nt, Homo sapiens
  misc_RNA (1)...(19): siRNA sense strand
gagaguuguucuaccaucu

SEQ ID NO: 289505 - RNA, 19 nt, Homo sapiens
  misc_RNA (1)...(19): siRNA sense strand
caugucuucuucuccuuaa

SEQ ID NO: 289506 - RNA, 19 nt, Homo sapiens
  misc_RNA (1)...(19): siRNA sense strand
uauuacaaauuccgcaaga

SEQ ID NO: 289507 - RNA, 19 nt, Homo sapiens
  misc_RNA (1)...(19): siRNA sense strand
cguccaauccucaugcuaa

SEQ ID NO: 289508 - RNA, 19 nt, Homo sapiens
  misc_RNA (1)...(19): siRNA sense strand
caagacacaaggcagaaga

SEQ ID NO: 289509 - RNA, 19 nt, Homo sapiens
  misc_RNA (1)...(19): siRNA sense strand
gagauuaagagucaugucu

SEQ ID NO: 289510 - RNA, 19 nt, Homo sapiens
  misc_RNA (1)...(19): siRNA sense strand
ugaacaucguuuauagaga

SEQ ID NO: 289511 - RNA, 19 nt, Homo sapiens
  misc_RNA (1)...(19): siRNA sense strand
cacugaacaucguuuauag

SEQ ID NO: 289512 - RNA, 19 nt, Homo sapiens
  misc_RNA (1)...(19): siRNA sense strand
guggagaguuguucuacca

SEQ ID NO: 289513 - RNA, 19 nt, Homo sapiens
  misc_RNA (1)...(19): siRNA sense strand
caaggcagaagaaguguuc

SEQ ID NO: 289514 - RNA, 19 nt, Homo sapiens
  misc_RNA (1)...(19): siRNA sense strand
gagcggaauguucuguuga

SEQ ID NO: 289515 - RNA, 19 nt, Homo sapiens
  misc_RNA (1)...(19): siRNA sense strand
gcugaaaccaaauauuaca

SEQ ID NO: 289516 - RNA, 19 nt, Homo sapiens
  misc_RNA (1)...(19): siRNA sense strand
cgacuuuauucagaagauu

SEQ ID NO: 289517 - RNA, 19 nt, Homo sapiens
  misc_RNA (1)...(19): siRNA sense strand
aagaggagaagcauauuau

SEQ ID NO: 289518 - RNA, 19 nt, Homo sapiens
  misc_RNA (1)...(19): siRNA sense strand
acaagccucuccagcugaa

SEQ ID NO: 289519 - RNA, 19 nt, Homo sapiens
  misc_RNA (1)...(19): siRNA sense strand
agccugagcuuaugaaugc

SEQ ID NO: 289520 - RNA, 19 nt, Homo sapiens
  misc_RNA (1)...(19): siRNA sense strand
ccgaaacacagcugaaaug

SEQ ID NO: 289521 - RNA, 19 nt, Homo sapiens
  misc_RNA (1)...(19): siRNA sense strand
aggagaacauugaacacaa

SEQ ID NO: 289522 - RNA, 19 nt, Homo sapiens
  misc_RNA (1)...(19): siRNA sense strand
uggaaagguucuucuagca

SEQ ID NO: 289523 - RNA, 19 nt, Homo sapiens
  misc_RNA (1)...(19): siRNA sense strand
cgacaacauucugaacaag

SEQ ID NO: 289524 - RNA, 19 nt, Homo sapiens
  misc_RNA (1)...(19): siRNA sense strand
gcugaaauguacgacaaca

SEQ ID NO: 289525 - RNA, 19 nt, Homo sapiens
  misc_RNA (1)...(19): siRNA sense strand
gcacaacauccaccuucug

SEQ ID NO: 289526 - RNA, 19 nt, Homo sapiens
  misc_RNA (1)...(19): siRNA sense strand
guucuaugcagucaaaguu

SEQ ID NO: 289527 - RNA, 19 nt, Homo sapiens
  misc_RNA (1)...(19): siRNA sense strand
uaaaccaucugacuuucac

SEQ ID NO: 289528 - RNA, 19 nt, Homo sapiens
  misc_RNA (1)...(19): siRNA sense strand
gagcugucuuguaugagau

SEQ ID NO: 289529 - RNA, 19 nt, Homo sapiens
  misc_RNA (1)...(19): siRNA sense strand
gagccugagcuuaugaaug

SEQ ID NO: 289530 - RNA, 19 nt, Homo sapiens
  misc_RNA (1)...(19): siRNA sense strand
gaaccacgggcucguuucu

SEQ ID NO: 289531 - RNA, 19 nt, Homo sapiens
  misc_RNA (1)...(19): siRNA sense strand
uuuccagacugcugacaaa

SEQ ID NO: 289532 - RNA, 19 nt, Homo sapiens
  misc_RNA (1)...(19): siRNA sense strand
acgacaacauucugaacaa

SEQ ID NO: 289533 - RNA, 19 nt, Homo sapiens
  misc_RNA (1)...(19): siRNA sense strand
ucuugaaagugaucggaaa

SEQ ID NO: 289534 - RNA, 19 nt, Homo sapiens
  misc_RNA (1)...(19): siRNA sense strand
aguguucuaugcagucaaa

SEQ ID NO: 289535 - RNA, 19 nt, Homo sapiens
  misc_RNA (1)...(19): siRNA sense strand
gccuugggcuaccugcauu

SEQ ID NO: 289536 - RNA, 19 nt, Homo sapiens
  misc_RNA (1)...(19): siRNA sense strand
gcacuuugaccccgaguuu

SEQ ID NO: 289537 - RNA, 19 nt, Homo sapiens
  misc_RNA (1)...(19): siRNA sense strand
cgaaacacagcugaaaugu

SEQ ID NO: 289538 - RNA, 19 nt, Homo sapiens
  misc_RNA (1)...(19): siRNA sense strand
cagagaauauuuugcuaga

SEQ ID NO: 289539 - RNA, 19 nt, Homo sapiens
  misc_RNA (1)...(19): siRNA sense strand
gaaugugaagcacccuuuc

SEQ ID NO: 289540 - RNA, 19 nt, Homo sapiens
  misc_RNA (1)...(19): siRNA sense strand
ucaugucuucuucuccuua

SEQ ID NO: 289541 - RNA, 19 nt, Homo sapiens
  misc_RNA (1)...(19): siRNA sense strand
gaaagggcaguuuuggaaa

SEQ ID NO: 289542 - RNA, 19 nt, Homo sapiens
  misc_RNA (1)...(19): siRNA sense strand
uuacaaauuccgcaagaca

SEQ ID NO: 289543 - RNA, 19 nt, Homo sapiens
  misc_RNA (1)...(19): siRNA sense strand
ggccuucacuucucuuucc

SEQ ID NO: 289544 - RNA, 19 nt, Homo sapiens
  misc_RNA (1)...(19): siRNA sense strand
ucacagccagcgucaagga

SEQ ID NO: 289545 - RNA, 19 nt, Homo sapiens
  misc_RNA (1)...(19): siRNA sense strand
accacgggcucguuucuau

SEQ ID NO: 289546 - RNA, 19 nt, Homo sapiens
  misc_RNA (1)...(19): siRNA sense strand
uguccuagacuacauuaau

SEQ ID NO: 289547 - RNA, 19 nt, Homo sapiens
  misc_RNA (1)...(19): siRNA sense strand
agaagaaagcaauccugaa

SEQ ID NO: 289548 - RNA, 19 nt, Homo sapiens
  misc_RNA (1)...(19): siRNA sense strand
ugucuucuucuccuuaauu

SEQ ID NO: 289549 - RNA, 19 nt, Homo sapiens
  misc_RNA (1)...(19): siRNA sense strand
gcagaaggacaggacaaag

SEQ ID NO: 289550 - RNA, 19 nt, Homo sapiens
  misc_RNA (1)...(19): siRNA sense strand
ugcuaaaccaucugacuuu

SEQ ID NO: 289551 - RNA, 19 nt, Homo sapiens
  misc_RNA (1)...(19): siRNA sense strand
cacaacauccaccuucugu

SEQ ID NO: 289552 - RNA, 19 nt, Homo sapiens
  misc_RNA (1)...(19): siRNA sense strand
ccaucugacuuucacuucu

SEQ ID NO: 289553 - RNA, 19 nt, Homo sapiens
  misc_RNA (1)...(19): siRNA sense strand
cggaauguucuguugaaga

SEQ ID NO: 289554 - RNA, 19 nt, Homo sapiens
  misc_RNA (1)...(19): siRNA sense strand
augcaaacacccugaaguu

SEQ ID NO: 289555 - RNA, 19 nt, Homo sapiens
  misc_RNA (1)...(19): siRNA sense strand
guacuuuguccuagacuac

SEQ ID NO: 289556 - RNA, 19 nt, Homo sapiens
  misc_RNA (1)...(19): siRNA sense strand
agaaugugaagcacccuuu

SEQ ID NO: 289557 - RNA, 19 nt, Homo sapiens
  misc_RNA (1)...(19): siRNA sense strand
agaggaggaugggucugaa

SEQ ID NO: 289558 - RNA, 19 nt, Homo sapiens
  misc_RNA (1)...(19): siRNA sense strand
ccagcugaaaccaaauauu

SEQ ID NO: 289559 - RNA, 19 nt, Homo sapiens
  misc_RNA (1)...(19): siRNA sense strand
gacuuuauucagaagauug

SEQ ID NO: 289560 - RNA, 19 nt, Homo sapiens
  misc_RNA (1)...(19): siRNA sense strand
gagaacauugaacacaaca

SEQ ID NO: 289561 - RNA, 19 nt, Homo sapiens
  misc_RNA (1)...(19): siRNA sense strand
gaaggaauaugaugaagaa

SEQ ID NO: 289562 - RNA, 19 nt, Homo sapiens
  misc_RNA (1)...(19): siRNA sense strand
ggaagagguucacaugaua

SEQ ID NO: 289563 - RNA, 19 nt, Homo sapiens
  misc_RNA (1)...(19): siRNA sense strand
ggaaacaucucaaguccaa

SEQ ID NO: 289564 - RNA, 19 nt, Homo sapiens
  misc_RNA (1)...(19): siRNA sense strand
ggaagcaccugccagaauu

SEQ ID NO: 289565 - RNA, 19 nt, Homo sapiens
  misc_RNA (1)...(19): siRNA sense strand
ggaauaugaugaagaaaga

SEQ ID NO: 289566 - RNA, 19 nt, Homo sapiens
  misc_RNA (1)...(19): siRNA sense strand
ugaaacaccucuuggagua

SEQ ID NO: 289567 - RNA, 19 nt, Homo sapiens
  misc_RNA (1)...(19): siRNA sense strand
ggacacacaugaaagaaug

SEQ ID NO: 289568 - RNA, 19 nt, Homo sapiens
  misc_RNA (1)...(19): siRNA sense strand
gaucaaaccuaaagagaag

SEQ ID NO: 289569 - RNA, 19 nt, Homo sapiens
  misc_RNA (1)...(19): siRNA sense strand
ggacacagagacagacuua

SEQ ID NO: 289570 - RNA, 19 nt, Homo sapiens
  misc_RNA (1)...(19): siRNA sense strand
gaggaucaaucacuacauu

SEQ ID NO: 289571 - RNA, 19 nt, Homo sapiens
  misc_RNA (1)...(19): siRNA sense strand
gcacagagaccgugaagau

SEQ ID NO: 289572 - RNA, 19 nt, Homo sapiens
  misc_RNA (1)...(19): siRNA sense strand
caucacggcucacagcaua

SEQ ID NO: 289573 - RNA, 19 nt, Homo sapiens
  misc_RNA (1)...(19): siRNA sense strand
gaagcaaacucucuaucau

SEQ ID NO: 289574 - RNA, 19 nt, Homo sapiens
  misc_RNA (1)...(19): siRNA sense strand
gaacguguccagaagauga

SEQ ID NO: 289575 - RNA, 19 nt, Homo sapiens
  misc_RNA (1)...(19): siRNA sense strand
gagacagacuuauugauuc

SEQ ID NO: 289576 - RNA, 19 nt, Homo sapiens
  misc_RNA (1)...(19): siRNA sense strand
aagaagagcugaaugaagu

SEQ ID NO: 289577 - RNA, 19 nt, Homo sapiens
  misc_RNA (1)...(19): siRNA sense strand
ccaaagacauggaugaagu

SEQ ID NO: 289578 - RNA, 19 nt, Homo sapiens
  misc_RNA (1)...(19): siRNA sense strand
gcaaccacaucuucaauag

SEQ ID NO: 289579 - RNA, 19 nt, Homo sapiens
  misc_RNA (1)...(19): siRNA sense strand
ugacuugggcauugaauua

SEQ ID NO: 289580 - RNA, 19 nt, Homo sapiens
  misc_RNA (1)...(19): siRNA sense strand
caagauugauggagugaga

SEQ ID NO: 289581 - RNA, 19 nt, Homo sapiens
  misc_RNA (1)...(19): siRNA sense strand
gaccuucucuguucauaug

SEQ ID NO: 289582 - RNA, 19 nt, Homo sapiens
  misc_RNA (1)...(19): siRNA sense strand
augaggaacugaugaauuu

SEQ ID NO: 289583 - RNA, 19 nt, Homo sapiens
  misc_RNA (1)...(19): siRNA sense strand
aaacaccucuuggaguaua

SEQ ID NO: 289584 - RNA, 19 nt, Homo sapiens
  misc_RNA (1)...(19): siRNA sense strand
ugaagcgucuggacaauau

SEQ ID NO: 289585 - RNA, 19 nt, Homo sapiens
  misc_RNA (1)...(19): siRNA sense strand
ggaggauucucaacagguu

SEQ ID NO: 289586 - RNA, 19 nt, Homo sapiens
  misc_RNA (1)...(19): siRNA sense strand
gcacugacuugggcauuga

SEQ ID NO: 289587 - RNA, 19 nt, Homo sapiens
  misc_RNA (1)...(19): siRNA sense strand
gaagagguucacaugauaa

SEQ ID NO: 289588 - RNA, 19 nt, Homo sapiens
  misc_RNA (1)...(19): siRNA sense strand
caacgacaguucccgauuc

SEQ ID NO: 289589 - RNA, 19 nt, Homo sapiens
  misc_RNA (1)...(19): siRNA sense strand
ggagaggacacacaugaaa

SEQ ID NO: 289590 - RNA, 19 nt, Homo sapiens
  misc_RNA (1)...(19): siRNA sense strand
guugacagauuuaagaguu

SEQ ID NO: 289591 - RNA, 19 nt, Homo sapiens
  misc_RNA (1)...(19): siRNA sense strand
gaaagccauucgaggaguu

SEQ ID NO: 289592 - RNA, 19 nt, Homo sapiens
  misc_RNA (1)...(19): siRNA sense strand
ggagagacaccgccaguug

SEQ ID NO: 289593 - RNA, 19 nt, Homo sapiens
  misc_RNA (1)...(19): siRNA sense strand
cagaagaagucacaagaca

SEQ ID NO: 289594 - RNA, 19 nt, Homo sapiens
  misc_RNA (1)...(19): siRNA sense strand
gaacucgaccguuggaaug

SEQ ID NO: 289595 - RNA, 19 nt, Homo sapiens
  misc_RNA (1)...(19): siRNA sense strand
ggaucaaucacuacauuaa

SEQ ID NO: 289596 - RNA, 19 nt, Homo sapiens
  misc_RNA (1)...(19): siRNA sense strand
gcaguacagcuuguuguua

SEQ ID NO: 289597 - RNA, 19 nt, Homo sapiens
  misc_RNA (1)...(19): siRNA sense strand
ggaggagcgucggauauug

SEQ ID NO: 289598 - RNA, 19 nt, Homo sapiens
  misc_RNA (1)...(19): siRNA sense strand
ccacaucacguccagcaua

SEQ ID NO: 289599 - RNA, 19 nt, Homo sapiens
  misc_RNA (1)...(19): siRNA sense strand
ccaagaggguaaacugguu

SEQ ID NO: 289600 - RNA, 19 nt, Homo sapiens
  misc_RNA (1)...(19): siRNA sense strand
gaacaaggucgcugucaag

SEQ ID NO: 289601 - RNA, 19 nt, Homo sapiens
  misc_RNA (1)...(19): siRNA sense strand
gaagcaccugccagaauua

SEQ ID NO: 289602 - RNA, 19 nt, Homo sapiens
  misc_RNA (1)...(19): siRNA sense strand
gaagaagucacaagacaag

SEQ ID NO: 289603 - RNA, 19 nt, Homo sapiens
  misc_RNA (1)...(19): siRNA sense strand
gaggaacugaugaauuuaa

SEQ ID NO: 289604 - RNA, 19 nt, Homo sapiens
  misc_RNA (1)...(19): siRNA sense strand
gcagcgaccugacggagau

SEQ ID NO: 289605 - RNA, 19 nt, Homo sapiens
  misc_RNA (1)...(19): siRNA sense strand
ccgauucuaugccauguuu

SEQ ID NO: 289606 - RNA, 19 nt, Homo sapiens
  misc_RNA (1)...(19): siRNA sense strand
gcagaagacuagagagacu

SEQ ID NO: 289607 - RNA, 19 nt, Homo sapiens
  misc_RNA (1)...(19): siRNA sense strand
gcaagaagagcugaaugaa

SEQ ID NO: 289608 - RNA, 19 nt, Homo sapiens
  misc_RNA (1)...(19): siRNA sense strand
gacaggugguggaguuuga

SEQ ID NO: 289609 - RNA, 19 nt, Homo sapiens
  misc_RNA (1)...(19): siRNA sense strand
acacagagacagacuuauu

SEQ ID NO: 289610 - RNA, 19 nt, Homo sapiens
  misc_RNA (1)...(19): siRNA sense strand
ucagugcccuggucaguau

SEQ ID NO: 289611 - RNA, 19 nt, Homo sapiens
  misc_RNA (1)...(19): siRNA sense strand
guggugaccuucucuguuc

SEQ ID NO: 289612 - RNA, 19 nt, Homo sapiens
  misc_RNA (1)...(19): siRNA sense strand
ggugagcucaucaacauuu

SEQ ID NO: 289613 - RNA, 19 nt, Homo sapiens
  misc_RNA (1)...(19): siRNA sense strand
ggaaggaauaugaugaaga

SEQ ID NO: 289614 - RNA, 19 nt, Homo sapiens
  misc_RNA (1)...(19): siRNA sense strand
gcaccugccagaauuaaga

SEQ ID NO: 289615 - RNA, 19 nt, Homo sapiens
  misc_RNA (1)...(19): siRNA sense strand
ggaugaacguguccagaag

SEQ ID NO: 289616 - RNA, 19 nt, Homo sapiens
  misc_RNA (1)...(19): siRNA sense strand
aaucugaagugauggagaa

SEQ ID NO: 289617 - RNA, 19 nt, Homo sapiens
  misc_RNA (1)...(19): siRNA sense strand
uggaagagguucacaugau

SEQ ID NO: 289618 - RNA, 19 nt, Homo sapiens
  misc_RNA (1)...(19): siRNA sense strand
caguacagcuuguuguuag

SEQ ID NO: 289619 - RNA, 19 nt, Homo sapiens
  misc_RNA (1)...(19): siRNA sense strand
agacagacuuauugauuca

SEQ ID NO: 289620 - RNA, 19 nt, Homo sapiens
  misc_RNA (1)...(19): siRNA sense strand
gagguucacaugauaaaga

SEQ ID NO: 289621 - RNA, 19 nt, Homo sapiens
  misc_RNA (1)...(19): siRNA sense strand
gagagacuguggcaagaag

SEQ ID NO: 289622 - RNA, 19 nt, Homo sapiens
  misc_RNA (1)...(19): siRNA sense strand
agagacagacuuauugauu

SEQ ID NO: 289623 - RNA, 19 nt, Homo sapiens
  misc_RNA (1)...(19): siRNA sense strand
cggcagcucuugugcauag

SEQ ID NO: 289624 - RNA, 19 nt, Homo sapiens
  misc_RNA (1)...(19): siRNA sense strand
caauaaagggcaggaguuu

SEQ ID NO: 289625 - RNA, 19 nt, Homo sapiens
  misc_RNA (1)...(19): siRNA sense strand
gagagacaccgccaguuga

SEQ ID NO: 289626 - RNA, 19 nt, Homo sapiens
  misc_RNA (1)...(19): siRNA sense strand
aaccacaucuucaauagug

SEQ ID NO: 289627 - RNA, 19 nt, Homo sapiens
  misc_RNA (1)...(19): siRNA sense strand
ggcaagaagagcugaauga

SEQ ID NO: 289628 - RNA, 19 nt, Homo sapiens
  misc_RNA (1)...(19): siRNA sense strand
cgacaguucccgauucuau

SEQ ID NO: 289629 - RNA, 19 nt, Homo sapiens
  misc_RNA (1)...(19): siRNA sense strand
gcacugucagaucaaauuu

SEQ ID NO: 289630 - RNA, 19 nt, Homo sapiens
  misc_RNA (1)...(19): siRNA sense strand
aaaguauccuucacgauca

SEQ ID NO: 289631 - RNA, 19 nt, Homo sapiens
  misc_RNA (1)...(19): siRNA sense strand
uggagaggaucaaucacua

SEQ ID NO: 289632 - RNA, 19 nt, Homo sapiens
  misc_RNA (1)...(19): siRNA sense strand
ggaaagaggcacccaugag

SEQ ID NO: 289633 - RNA, 19 nt, Homo sapiens
  misc_RNA (1)...(19): siRNA sense strand
guucuaggcuccgauagga

SEQ ID NO: 289634 - RNA, 19 nt, Homo sapiens
  misc_RNA (1)...(19): siRNA sense strand
uuaagacucuguccuugga

SEQ ID NO: 289635 - RNA, 19 nt, Homo sapiens
  misc_RNA (1)...(19): siRNA sense strand
cauccacgccuacaauaaa

SEQ ID NO: 289636 - RNA, 19 nt, Homo sapiens
  misc_RNA (1)...(19): siRNA sense strand
uggcauuccugguuauuau

SEQ ID NO: 289637 - RNA, 19 nt, Homo sapiens
  misc_RNA (1)...(19): siRNA sense strand
gggcugaugaucguucuua

SEQ ID NO: 289638 - RNA, 19 nt, Homo sapiens
  misc_RNA (1)...(19): siRNA sense strand
cgaagcaaacucucuauca

SEQ ID NO: 289639 - RNA, 19 nt, Homo sapiens
  misc_RNA (1)...(19): siRNA sense strand
gacgugaacugcagaagac

SEQ ID NO: 289640 - RNA, 19 nt, Homo sapiens
  misc_RNA (1)...(19): siRNA sense strand
gaccauccgagaagcauuu

SEQ ID NO: 289641 - RNA, 19 nt, Homo sapiens
  misc_RNA (1)...(19): siRNA sense strand
caagagaccauccgagaag

SEQ ID NO: 289642 - RNA, 19 nt, Homo sapiens
  misc_RNA (1)...(19): siRNA sense strand
uaacggggcuguuccaguu

SEQ ID NO: 289643 - RNA, 19 nt, Homo sapiens
  misc_RNA (1)...(19): siRNA sense strand
ggcaaccacaucuucaaua

SEQ ID NO: 289644 - RNA, 19 nt, Homo sapiens
  misc_RNA (1)...(19): siRNA sense strand
gaguuuguuucuaauggaa

SEQ ID NO: 289645 - RNA, 19 nt, Homo sapiens
  misc_RNA (1)...(19): siRNA sense strand
gagcgucggauauuggaaa

SEQ ID NO: 289646 - RNA, 19 nt, Homo sapiens
  misc_RNA (1)...(19): siRNA sense strand
gaaagagggcuguauuacg

SEQ ID NO: 289647 - RNA, 19 nt, Homo sapiens
  misc_RNA (1)...(19): siRNA sense strand
ugacagauuuaagaguuug

SEQ ID NO: 289648 - RNA, 19 nt, Homo sapiens
  misc_RNA (1)...(19): siRNA sense strand
ugggugagcucaucaacau

SEQ ID NO: 289649 - RNA, 19 nt, Homo sapiens
  misc_RNA (1)...(19): siRNA sense strand
ucgaagcccuaugaaguuu

SEQ ID NO: 289650 - RNA, 19 nt, Homo sapiens
  misc_RNA (1)...(19): siRNA sense strand
ugacugugaugaagugauc

SEQ ID NO: 289651 - RNA, 19 nt, Homo sapiens
  misc_RNA (1)...(19): siRNA sense strand
ucuggaggcugcaucaaga

SEQ ID NO: 289652 - RNA, 19 nt, Homo sapiens
  misc_RNA (1)...(19): siRNA sense strand
cagcugccauggacacaga

SEQ ID NO: 289653 - RNA, 19 nt, Homo sapiens
  misc_RNA (1)...(19): siRNA sense strand
guaacaccguuuucaguaa

SEQ ID NO: 289654 - RNA, 19 nt, Homo sapiens
  misc_RNA (1)...(19): siRNA sense strand
agcaaacucucuaucauuc

SEQ ID NO: 289655 - RNA, 19 nt, Homo sapiens
  misc_RNA (1)...(19): siRNA sense strand
aagagaagauuggcauugu

SEQ ID NO: 289656 - RNA, 19 nt, Homo sapiens
  misc_RNA (1)...(19): siRNA sense strand
caaagacauggaugaaguu

SEQ ID NO: 289657 - RNA, 19 nt, Homo sapiens
  misc_RNA (1)...(19): siRNA sense strand
caggaucaguaaagaagga

SEQ ID NO: 289658 - RNA, 19 nt, Homo sapiens
  misc_RNA (1)...(19): siRNA sense strand
caugaaagagggcuguauu

SEQ ID NO: 289659 - RNA, 19 nt, Homo sapiens
  misc_RNA (1)...(19): siRNA sense strand
ucaguggaaccuucgcuua

SEQ ID NO: 289660 - RNA, 19 nt, Homo sapiens
  misc_RNA (1)...(19): siRNA sense strand
agaacaaggucgcugucaa

SEQ ID NO: 289661 - RNA, 19 nt, Homo sapiens
  misc_RNA (1)...(19): siRNA sense strand
ccaagacgcugcucaagaa

SEQ ID NO: 289662 - RNA, 19 nt, Homo sapiens
  misc_RNA (1)...(19): siRNA sense strand
agacgcugcucaagaaaga

SEQ ID NO: 289663 - RNA, 19 nt, Homo sapiens
  misc_RNA (1)...(19): siRNA sense strand
ccaagaugcacaauucuga

SEQ ID NO: 289664 - RNA, 19 nt, Homo sapiens
  misc_RNA (1)...(19): siRNA sense strand
gcucgguagugaagucuga

SEQ ID NO: 289665 - RNA, 19 nt, Homo sapiens
  misc_RNA (1)...(19): siRNA sense strand
gaaggaguauccggacuac

SEQ ID NO: 289666 - RNA, 19 nt, Homo sapiens
  misc_RNA (1)...(19): siRNA sense strand
gcggguuccugcugauuug

SEQ ID NO: 289667 - RNA, 19 nt, Homo sapiens
  misc_RNA (1)...(19): siRNA sense strand
gcaguacagcccaaugaug

SEQ ID NO: 289668 - RNA, 19 nt, Homo sapiens
  misc_RNA (1)...(19): siRNA sense strand
gaugcacaauucugagauc

SEQ ID NO: 289669 - RNA, 19 nt, Homo sapiens
  misc_RNA (1)...(19): siRNA sense strand
gcgcggagcauuuugauaa

SEQ ID NO: 289670 - RNA, 19 nt, Homo sapiens
  misc_RNA (1)...(19): siRNA sense strand
ugaaggaguauccggacua

SEQ ID NO: 289671 - RNA, 19 nt, Homo sapiens
  misc_RNA (1)...(19): siRNA sense strand
cccaugggcucgguaguga

SEQ ID NO: 289672 - RNA, 19 nt, Homo sapiens
  misc_RNA (1)...(19): siRNA sense strand
gcucaagaaagauaaguac

SEQ ID NO: 289673 - RNA, 19 nt, Homo sapiens
  misc_RNA (1)...(19): siRNA sense strand
ggaggcgcaggcaagagua

SEQ ID NO: 289674 - RNA, 19 nt, Homo sapiens
  misc_RNA (1)...(19): siRNA sense strand
ccgugcacaugaaggagua

SEQ ID NO: 289675 - RNA, 19 nt, Homo sapiens
  misc_RNA (1)...(19): siRNA sense strand
guagggacacccacacaag

SEQ ID NO: 289676 - RNA, 19 nt, Homo sapiens
  misc_RNA (1)...(19): siRNA sense strand
gaccugcgcgacaugauca

SEQ ID NO: 289677 - RNA, 19 nt, Homo sapiens
  misc_RNA (1)...(19): siRNA sense strand
aggaguauccggacuacaa

SEQ ID NO: 289678 - RNA, 19 nt, Homo sapiens
  misc_RNA (1)...(19): siRNA sense strand
agaccaggaccgugugaaa

SEQ ID NO: 289679 - RNA, 19 nt, Homo sapiens
  misc_RNA (1)...(19): siRNA sense strand
gccgagaagcgaccauuca

SEQ ID NO: 289680 - RNA, 19 nt, Homo sapiens
  misc_RNA (1)...(19): siRNA sense strand
ucaagaaagauaaguacuc

SEQ ID NO: 289681 - RNA, 19 nt, Homo sapiens
  misc_RNA (1)...(19): siRNA sense strand
gcaaaauggcccuggagaa

SEQ ID NO: 289682 - RNA, 19 nt, Homo sapiens
  misc_RNA (1)...(19): siRNA sense strand
caagacgcugcucaagaaa

SEQ ID NO: 289683 - RNA, 19 nt, Homo sapiens
  misc_RNA (1)...(19): siRNA sense strand
ucuggagacugaacucaag

SEQ ID NO: 289684 - RNA, 19 nt, Homo sapiens
  misc_RNA (1)...(19): siRNA sense strand
guacagccuucuggagacu

SEQ ID NO: 289685 - RNA, 19 nt, Homo sapiens
  misc_RNA (1)...(19): siRNA sense strand
cgugugaaacggcccauga

SEQ ID NO: 289686 - RNA, 19 nt, Homo sapiens
  misc_RNA (1)...(19): siRNA sense strand
ggaguauccggacuacaag

SEQ ID NO: 289687 - RNA, 19 nt, Homo sapiens
  misc_RNA (1)...(19): siRNA sense strand
ugaaaggucucuucuauca

SEQ ID NO: 289688 - RNA, 19 nt, Homo sapiens
  misc_RNA (1)...(19): siRNA sense strand
gaacagagacugcuaggau

SEQ ID NO: 289689 - RNA, 19 nt, Homo sapiens
  misc_RNA (1)...(19): siRNA sense strand
gcagguacaugucuugucu

SEQ ID NO: 289690 - RNA, 19 nt, Homo sapiens
  misc_RNA (1)...(19): siRNA sense strand
ugugaaaggucucuucuau

SEQ ID NO: 289691 - RNA, 19 nt, Homo sapiens
  misc_RNA (1)...(19): siRNA sense strand
ggacaacugugcugacaac

SEQ ID NO: 289692 - RNA, 19 nt, Homo sapiens
  misc_RNA (1)...(19): siRNA sense strand
gaucagagccauccgaaac

SEQ ID NO: 289693 - RNA, 19 nt, Homo sapiens
  misc_RNA (1)...(19): siRNA sense strand
gaggacaacugugcugaca

SEQ ID NO: 289694 - RNA, 19 nt, Homo sapiens
  misc_RNA (1)...(19): siRNA sense strand
ggacuuguguaugcugugu

SEQ ID NO: 289695 - RNA, 19 nt, Homo sapiens
  misc_RNA (1)...(19): siRNA sense strand
cccagaacgugauugacua

SEQ ID NO: 289696 - RNA, 19 nt, Homo sapiens
  misc_RNA (1)...(19): siRNA sense strand
gccuguugcugauggcaua

SEQ ID NO: 289697 - RNA, 19 nt, Homo sapiens
  misc_RNA (1)...(19): siRNA sense strand
aaaggucucuucuaucacu

SEQ ID NO: 289698 - RNA, 19 nt, Homo sapiens
  misc_RNA (1)...(19): siRNA sense strand
ccacugagcaaggaagauu

SEQ ID NO: 289699 - RNA, 19 nt, Homo sapiens
  misc_RNA (1)...(19): siRNA sense strand
gcugcaaaguucccacugu

SEQ ID NO: 289700 - RNA, 19 nt, Homo sapiens
  misc_RNA (1)...(19): siRNA sense strand
gcugacaacccauguucuu

SEQ ID NO: 289701 - RNA, 19 nt, Homo sapiens
  misc_RNA (1)...(19): siRNA sense strand
uguggcaagugcaaaugua

SEQ ID NO: 289702 - RNA, 19 nt, Homo sapiens
  misc_RNA (1)...(19): siRNA sense strand
ucacuguucuaaugaugau

SEQ ID NO: 289703 - RNA, 19 nt, Homo sapiens
  misc_RNA (1)...(19): siRNA sense strand
gacaacccauguucuugca

SEQ ID NO: 289704 - RNA, 19 nt, Homo sapiens
  misc_RNA (1)...(19): siRNA sense strand
aaacaccaaugaguacaca

SEQ ID NO: 289705 - RNA, 19 nt, Homo sapiens
  misc_RNA (1)...(19): siRNA sense strand
acucgcagguccauucuuc

SEQ ID NO: 289706 - RNA, 19 nt, Homo sapiens
  misc_RNA (1)...(19): siRNA sense strand
agaacgugauugacuaugg

SEQ ID NO: 289707 - RNA, 19 nt, Homo sapiens
  misc_RNA (1)...(19): siRNA sense strand
gacuaugggacuuguguau

SEQ ID NO: 289708 - RNA, 19 nt, Homo sapiens
  misc_RNA (1)...(19): siRNA sense strand
ggucucuucuaucacuguu

SEQ ID NO: 289709 - RNA, 19 nt, Homo sapiens
  misc_RNA (1)...(19): siRNA sense strand
cuaugggacuuguguaugc

SEQ ID NO: 289710 - RNA, 19 nt, Homo sapiens
  misc_RNA (1)...(19): siRNA sense strand
cuaaugaugaugaggacaa

SEQ ID NO: 289711 - RNA, 19 nt, Homo sapiens
  misc_RNA (1)...(19): siRNA sense strand
uccgaaacaccaaugagua

SEQ ID NO: 289712 - RNA, 19 nt, Homo sapiens
  misc_RNA (1)...(19): siRNA sense strand
uucuaucacuguucuaaug

SEQ ID NO: 289713 - RNA, 19 nt, Homo sapiens
  misc_RNA (1)...(19): siRNA sense strand
uuaagccacugagcaagga

SEQ ID NO: 289714 - RNA, 19 nt, Homo sapiens
  misc_RNA (1)...(19): siRNA sense strand
gcgacaagcagugccuuug

SEQ ID NO: 289715 - RNA, 19 nt, Homo sapiens
  misc_RNA (1)...(19): siRNA sense strand
ucacccagcagguacaugu

SEQ ID NO: 289716 - RNA, 19 nt, Homo sapiens
  misc_RNA (1)...(19): siRNA sense strand
gugauugacuaugggacuu

SEQ ID NO: 289717 - RNA, 19 nt, Homo sapiens
  misc_RNA (1)...(19): siRNA sense strand
ccagaacgugauugacuau

SEQ ID NO: 289718 - RNA, 19 nt, Homo sapiens
  misc_RNA (1)...(19): siRNA sense strand
guggcaagugcaaauguaa

SEQ ID NO: 289719 - RNA, 19 nt, Homo sapiens
  misc_RNA (1)...(19): siRNA sense strand
aggguugccuuaaauugug

SEQ ID NO: 289720 - RNA, 19 nt, Homo sapiens
  misc_RNA (1)...(19): siRNA sense strand
cagcagcagcuccucugaa

SEQ ID NO: 289721 - RNA, 19 nt, Homo sapiens
  misc_RNA (1)...(19): siRNA sense strand
gcccagaacgugauugacu

SEQ ID NO: 289722 - RNA, 19 nt, Homo sapiens
  misc_RNA (1)...(19): siRNA sense strand
cccaaggccucugccauca

SEQ ID NO: 289723 - RNA, 19 nt, Homo sapiens
  misc_RNA (1)...(19): siRNA sense strand
gcaagugcaaauguaagga

SEQ ID NO: 289724 - RNA, 19 nt, Homo sapiens
  misc_RNA (1)...(19): siRNA sense strand
ggacuguggcaagugcaaa

SEQ ID NO: 289725 - RNA, 19 nt, Homo sapiens
  misc_RNA (1)...(19): siRNA sense strand
cagcagcuccucugaacag

SEQ ID NO: 289726 - RNA, 19 nt, Homo sapiens
  misc_RNA (1)...(19): siRNA sense strand
gauugacuaugggacuugu

SEQ ID NO: 289727 - RNA, 19 nt, Homo sapiens
  misc_RNA (1)...(19): siRNA sense strand
gugcugacaacccauguuc

SEQ ID NO: 289728 - RNA, 19 nt, Homo sapiens
  misc_RNA (1)...(19): siRNA sense strand
ggugucaugucccucuuuu

SEQ ID NO: 289729 - RNA, 19 nt, Homo sapiens
  misc_RNA (1)...(19): siRNA sense strand
acccaaaucugagcucaag

SEQ ID NO: 289730 - RNA, 19 nt, Homo sapiens
  misc_RNA (1)...(19): siRNA sense strand
gguguuaugaccggguuaa

SEQ ID NO: 289731 - RNA, 19 nt, Homo sapiens
  misc_RNA (1)...(19): siRNA sense strand
gugaaaggucucuucuauc

SEQ ID NO: 289732 - RNA, 19 nt, Homo sapiens
  misc_RNA (1)...(19): siRNA sense strand
gaaacaccaaugaguacac

SEQ ID NO: 289733 - RNA, 19 nt, Homo sapiens
  misc_RNA (1)...(19): siRNA sense strand
acaaugagguucuuucuuu

SEQ ID NO: 289734 - RNA, 19 nt, Homo sapiens
  misc_RNA (1)...(19): siRNA sense strand
gaucauggauucugaaaca

SEQ ID NO: 289735 - RNA, 19 nt, Homo sapiens
  misc_RNA (1)...(19): siRNA sense strand
gggcaucgcuggacgcuuu

SEQ ID NO: 289736 - RNA, 19 nt, Homo sapiens
  misc_RNA (1)...(19): siRNA sense strand
gaagguguauguuguggaa

SEQ ID NO: 289737 - RNA, 19 nt, Homo sapiens
  misc_RNA (1)...(19): siRNA sense strand
ggucaggacucuauucaga

SEQ ID NO: 289738 - RNA, 19 nt, Homo sapiens
  misc_RNA (1)...(19): siRNA sense strand
gaaguaauggcaaagagua

SEQ ID NO: 289739 - RNA, 19 nt, Homo sapiens
  misc_RNA (1)...(19): siRNA sense strand
aaacauggcuucaaucaac

SEQ ID NO: 289740 - RNA, 19 nt, Homo sapiens
  misc_RNA (1)...(19): siRNA sense strand
ugggaaggcuaaagacuua

SEQ ID NO: 289741 - RNA, 19 nt, Homo sapiens
  misc_RNA (1)...(19): siRNA sense strand
ugucuucacuucuacuuua

SEQ ID NO: 289742 - RNA, 19 nt, Homo sapiens
  misc_RNA (1)...(19): siRNA sense strand
gcuaaagacuuauauucug

SEQ ID NO: 289743 - RNA, 19 nt, Homo sapiens
  misc_RNA (1)...(19): siRNA sense strand
gaaagaugcaaucaagaaa

SEQ ID NO: 289744 - RNA, 19 nt, Homo sapiens
  misc_RNA (1)...(19): siRNA sense strand
gaugaauucuuuccugugu

SEQ ID NO: 289745 - RNA, 19 nt, Homo sapiens
  misc_RNA (1)...(19): siRNA sense strand
uagagagacuucaagcuuu

SEQ ID NO: 289746 - RNA, 19 nt, Homo sapiens
  misc_RNA (1)...(19): siRNA sense strand
guuucaagcugaugcauuu

SEQ ID NO: 289747 - RNA, 19 nt, Homo sapiens
  misc_RNA (1)...(19): siRNA sense strand
agggaaagcuuaaagaaga

SEQ ID NO: 289748 - RNA, 19 nt, Homo sapiens
  misc_RNA (1)...(19): siRNA sense strand
ugaauucuuuccuguguuu

SEQ ID NO: 289749 - RNA, 19 nt, Homo sapiens
  misc_RNA (1)...(19): siRNA sense strand
ccauggagucuuuauaaua

SEQ ID NO: 289750 - RNA, 19 nt, Homo sapiens
  misc_RNA (1)...(19): siRNA sense strand
ugacgaagguguauguugu

SEQ ID NO: 289751 - RNA, 19 nt, Homo sapiens
  misc_RNA (1)...(19): siRNA sense strand
caugaaagaugcaaucaag

SEQ ID NO: 289752 - RNA, 19 nt, Homo sapiens
  misc_RNA (1)...(19): siRNA sense strand
ggaggauucuggcauggaa

SEQ ID NO: 289753 - RNA, 19 nt, Homo sapiens
  misc_RNA (1)...(19): siRNA sense strand
gaagggaacagugaagaaa

SEQ ID NO: 289754 - RNA, 19 nt, Homo sapiens
  misc_RNA (1)...(19): siRNA sense strand
gcagagaaggauauauaaa

SEQ ID NO: 289755 - RNA, 19 nt, Homo sapiens
  misc_RNA (1)...(19): siRNA sense strand
cauggauucugaaacauuu

SEQ ID NO: 289756 - RNA, 19 nt, Homo sapiens
  misc_RNA (1)...(19): siRNA sense strand
ugaaggcacucuuauucuu

SEQ ID NO: 289757 - RNA, 19 nt, Homo sapiens
  misc_RNA (1)...(19): siRNA sense strand
uugaucaucuuccaguuua

SEQ ID NO: 289758 - RNA, 19 nt, Homo sapiens
  misc_RNA (1)...(19): siRNA sense strand
cggcagagaaggauauaua

SEQ ID NO: 289759 - RNA, 19 nt, Homo sapiens
  misc_RNA (1)...(19): siRNA sense strand
gauagccaacccacucuua

SEQ ID NO: 289760 - RNA, 19 nt, Homo sapiens
  misc_RNA (1)...(19): siRNA sense strand
caagaaauuuguugugacu

SEQ ID NO: 289761 - RNA, 19 nt, Homo sapiens
  misc_RNA (1)...(19): siRNA sense strand
ggaaggcuaaagacuuaua

SEQ ID NO: 289762 - RNA, 19 nt, Homo sapiens
  misc_RNA (1)...(19): siRNA sense strand
gggaaagcuuaaagaagaa

SEQ ID NO: 289763 - RNA, 19 nt, Homo sapiens
  misc_RNA (1)...(19): siRNA sense strand
cauggagucuuuauaauac

SEQ ID NO: 289764 - RNA, 19 nt, Homo sapiens
  misc_RNA (1)...(19): siRNA sense strand
agggaacagugaagaaaua

SEQ ID NO: 289765 - RNA, 19 nt, Homo sapiens
  misc_RNA (1)...(19): siRNA sense strand
ugaaagaugcaaucaagaa

SEQ ID NO: 289766 - RNA, 19 nt, Homo sapiens
  misc_RNA (1)...(19): siRNA sense strand
ggacgguucugugguuaug

SEQ ID NO: 289767 - RNA, 19 nt, Homo sapiens
  misc_RNA (1)...(19): siRNA sense strand
aguauugacuuuccuuuga

SEQ ID NO: 289768 - RNA, 19 nt, Homo sapiens
  misc_RNA (1)...(19): siRNA sense strand
uaggacagaucauggauuc

SEQ ID NO: 289769 - RNA, 19 nt, Homo sapiens
  misc_RNA (1)...(19): siRNA sense strand
uuagccagaugaauucuuu

SEQ ID NO: 289770 - RNA, 19 nt, Homo sapiens
  misc_RNA (1)...(19): siRNA sense strand
gcacagcggcagagaagga

SEQ ID NO: 289771 - RNA, 19 nt, Homo sapiens
  misc_RNA (1)...(19): siRNA sense strand
gcaaucaagaaauuuguug

SEQ ID NO: 289772 - RNA, 19 nt, Homo sapiens
  misc_RNA (1)...(19): siRNA sense strand
caagaacaagcgaauaguu

SEQ ID NO: 289773 - RNA, 19 nt, Homo sapiens
  misc_RNA (1)...(19): siRNA sense strand
gagacugaaggcacucuua

SEQ ID NO: 289774 - RNA, 19 nt, Homo sapiens
  misc_RNA (1)...(19): siRNA sense strand
gguuugccauggagucuuu

SEQ ID NO: 289775 - RNA, 19 nt, Homo sapiens
  misc_RNA (1)...(19): siRNA sense strand
agaaauuuguugugacuca

SEQ ID NO: 289776 - RNA, 19 nt, Homo sapiens
  misc_RNA (1)...(19): siRNA sense strand
agagagacuucaagcuuug

SEQ ID NO: 289777 - RNA, 19 nt, Homo sapiens
  misc_RNA (1)...(19): siRNA sense strand
ggaagaagggaacagugaa

SEQ ID NO: 289778 - RNA, 19 nt, Homo sapiens
  misc_RNA (1)...(19): siRNA sense strand
guccuaagccgcagauuug

SEQ ID NO: 289779 - RNA, 19 nt, Homo sapiens
  misc_RNA (1)...(19): siRNA sense strand
ggaggaauaccuuaucucu

SEQ ID NO: 289780 - RNA, 19 nt, Homo sapiens
  misc_RNA (1)...(19): siRNA sense strand
gccauggagucuuuauaau

SEQ ID NO: 289781 - RNA, 19 nt, Homo sapiens
  misc_RNA (1)...(19): siRNA sense strand
guugggacauacagucaaa

SEQ ID NO: 289782 - RNA, 19 nt, Homo sapiens
  misc_RNA (1)...(19): siRNA sense strand
aagaacaagcgaauaguuu

SEQ ID NO: 289783 - RNA, 19 nt, Homo sapiens
  misc_RNA (1)...(19): siRNA sense strand
ggcagagaaggauauauaa

SEQ ID NO: 289784 - RNA, 19 nt, Homo sapiens
  misc_RNA (1)...(19): siRNA sense strand
acaaagauaacuugggauu

SEQ ID NO: 289785 - RNA, 19 nt, Homo sapiens
  misc_RNA (1)...(19): siRNA sense strand
gcacucuuauucuucucuu

SEQ ID NO: 289786 - RNA, 19 nt, Homo sapiens
  misc_RNA (1)...(19): siRNA sense strand
cuagagagacuucaagcuu

SEQ ID NO: 289787 - RNA, 19 nt, Homo sapiens
  misc_RNA (1)...(19): siRNA sense strand
gaucaucuuccaguuuauu

SEQ ID NO: 289788 - RNA, 19 nt, Homo sapiens
  misc_RNA (1)...(19): siRNA sense strand
guaauggcaaagaguauug

SEQ ID NO: 289789 - RNA, 19 nt, Homo sapiens
  misc_RNA (1)...(19): siRNA sense strand
gaugcaaucaagaaauuug

SEQ ID NO: 289790 - RNA, 19 nt, Homo sapiens
  misc_RNA (1)...(19): siRNA sense strand
gaagaagggaacagugaag

SEQ ID NO: 289791 - RNA, 19 nt, Homo sapiens
  misc_RNA (1)...(19): siRNA sense strand
gcugaugcauuugccaaga

SEQ ID NO: 289792 - RNA, 19 nt, Homo sapiens
  misc_RNA (1)...(19): siRNA sense strand
ggaguuaggacagaucaug

SEQ ID NO: 289793 - RNA, 19 nt, Homo sapiens
  misc_RNA (1)...(19): siRNA sense strand
ggaccagaauaugagauca

SEQ ID NO: 289794 - RNA, 19 nt, Homo sapiens
  misc_RNA (1)...(19): siRNA sense strand
gaaggcuaaagacuuauau

SEQ ID NO: 289795 - RNA, 19 nt, Homo sapiens
  misc_RNA (1)...(19): siRNA sense strand
gccugugucuucacuucua

SEQ ID NO: 289796 - RNA, 19 nt, Homo sapiens
  misc_RNA (1)...(19): siRNA sense strand
ggaacagugaagaaauaaa

SEQ ID NO: 289797 - RNA, 19 nt, Homo sapiens
  misc_RNA (1)...(19): siRNA sense strand
aaagauaacuugggauucc

SEQ ID NO: 289798 - RNA, 19 nt, Homo sapiens
  misc_RNA (1)...(19): siRNA sense strand
ugccauggagucuuuauaa

SEQ ID NO: 289799 - RNA, 19 nt, Homo sapiens
  misc_RNA (1)...(19): siRNA sense strand
gagggaaagcuuaaagaag

SEQ ID NO: 289800 - RNA, 19 nt, Homo sapiens
  misc_RNA (1)...(19): siRNA sense strand
ugagggaaagcuuaaagaa

SEQ ID NO: 289801 - RNA, 19 nt, Homo sapiens
  misc_RNA (1)...(19): siRNA sense strand
agaaaucucgacucuauca

SEQ ID NO: 289802 - RNA, 19 nt, Homo sapiens
  misc_RNA (1)...(19): siRNA sense strand
gggaacagugaagaaauaa

SEQ ID NO: 289803 - RNA, 19 nt, Homo sapiens
  misc_RNA (1)...(19): siRNA sense strand
gaagaaauugaaguaaugg

SEQ ID NO: 289804 - RNA, 19 nt, Homo sapiens
  misc_RNA (1)...(19): siRNA sense strand
ugaugcauuugccaagaaa

SEQ ID NO: 289805 - RNA, 19 nt, Homo sapiens
  misc_RNA (1)...(19): siRNA sense strand
gaguauugacuuuccuuug

SEQ ID NO: 289806 - RNA, 19 nt, Homo sapiens
  misc_RNA (1)...(19): siRNA sense strand
gcuuuggaccagaauauga

SEQ ID NO: 289807 - RNA, 19 nt, Homo sapiens
  misc_RNA (1)...(19): siRNA sense strand
ucauguaccaccggaguua

SEQ ID NO: 289808 - RNA, 19 nt, Homo sapiens
  misc_RNA (1)...(19): siRNA sense strand
ggaaagcuuaaagaagaaa

SEQ ID NO: 289809 - RNA, 19 nt, Homo sapiens
  misc_RNA (1)...(19): siRNA sense strand
aacaacaacucauguacca

SEQ ID NO: 289810 - RNA, 19 nt, Homo sapiens
  misc_RNA (1)...(19): siRNA sense strand
guugugacucaguguauuu

SEQ ID NO: 289811 - RNA, 19 nt, Homo sapiens
  misc_RNA (1)...(19): siRNA sense strand
caaugagguucuuucuuuu

SEQ ID NO: 289812 - RNA, 19 nt, Homo sapiens
  misc_RNA (1)...(19): siRNA sense strand
uguauuaauuggucgaaag

SEQ ID NO: 289813 - RNA, 19 nt, Homo sapiens
  misc_RNA (1)...(19): siRNA sense strand
cacuggaaguugggacaua

SEQ ID NO: 289814 - RNA, 19 nt, Homo sapiens
  misc_RNA (1)...(19): siRNA sense strand
gacugaaggcacucuuauu

SEQ ID NO: 289815 - RNA, 19 nt, Homo sapiens
  misc_RNA (1)...(19): siRNA sense strand
gaacaagcgaauaguuuug

SEQ ID NO: 289816 - RNA, 19 nt, Homo sapiens
  misc_RNA (1)...(19): siRNA sense strand
ccuggacaguguaucuuug

SEQ ID NO: 289817 - RNA, 19 nt, Homo sapiens
  misc_RNA (1)...(19): siRNA sense strand
acucuguacuaaacaaaga

SEQ ID NO: 289818 - RNA, 19 nt, Homo sapiens
  misc_RNA (1)...(19): siRNA sense strand
uggcaaagaguauugacuu

SEQ ID NO: 289819 - RNA, 19 nt, Homo sapiens
  misc_RNA (1)...(19): siRNA sense strand
augccuggcuguucacauu

SEQ ID NO: 289820 - RNA, 19 nt, Homo sapiens
  misc_RNA (1)...(19): siRNA sense strand
ucuggacgguucugugguu

SEQ ID NO: 289821 - RNA, 19 nt, Homo sapiens
  misc_RNA (1)...(19): siRNA sense strand
ggcuaaagacuuauauucu

SEQ ID NO: 289822 - RNA, 19 nt, Homo sapiens
  misc_RNA (1)...(19): siRNA sense strand
uagccaacccacucuuauu

SEQ ID NO: 289823 - RNA, 19 nt, Homo sapiens
  misc_RNA (1)...(19): siRNA sense strand
ucauggauucugaaacauu

SEQ ID NO: 289824 - RNA, 19 nt, Homo sapiens
  misc_RNA (1)...(19): siRNA sense strand
ugaaaacuaugaagcaaca

SEQ ID NO: 289825 - RNA, 19 nt, Homo sapiens
  misc_RNA (1)...(19): siRNA sense strand
gaaaucucgacucuaucaa

SEQ ID NO: 289826 - RNA, 19 nt, Homo sapiens
  misc_RNA (1)...(19): siRNA sense strand
cugaugcauuugccaagaa

SEQ ID NO: 289827 - RNA, 19 nt, Homo sapiens
  misc_RNA (1)...(19): siRNA sense strand
gcuucaaucaacagacuuu

SEQ ID NO: 289828 - RNA, 19 nt, Homo sapiens
  misc_RNA (1)...(19): siRNA sense strand
ccaccggaguuaggacaga

SEQ ID NO: 289829 - RNA, 19 nt, Homo sapiens
  misc_RNA (1)...(19): siRNA sense strand
gacugguuguucucaaugu

SEQ ID NO: 289830 - RNA, 19 nt, Homo sapiens
  misc_RNA (1)...(19): siRNA sense strand
acugaaggcacucuuauuc

SEQ ID NO: 289831 - RNA, 19 nt, Homo sapiens
  misc_RNA (1)...(19): siRNA sense strand
cuuauuggacuauugauca

SEQ ID NO: 289832 - RNA, 19 nt, Homo sapiens
  misc_RNA (1)...(19): siRNA sense strand
caaagauaacuugggauuc

SEQ ID NO: 289833 - RNA, 19 nt, Homo sapiens
  misc_RNA (1)...(19): siRNA sense strand
caacaucgauaguguauua

SEQ ID NO: 289834 - RNA, 19 nt, Homo sapiens
  misc_RNA (1)...(19): siRNA sense strand
gauaacauguccacuguaa

SEQ ID NO: 289835 - RNA, 19 nt, Homo sapiens
  misc_RNA (1)...(19): siRNA sense strand
caacauugccuacuuauuu

SEQ ID NO: 289836 - RNA, 19 nt, Homo sapiens
  misc_RNA (1)...(19): siRNA sense strand
ugaagaaggugaacaguuu

SEQ ID NO: 289837 - RNA, 19 nt, Homo sapiens
  misc_RNA (1)...(19): siRNA sense strand
uaacacaacuggaauuuca

SEQ ID NO: 289838 - RNA, 19 nt, Homo sapiens
  misc_RNA (1)...(19): siRNA sense strand
aaacaacauugccuacuua

SEQ ID NO: 289839 - RNA, 19 nt, Homo sapiens
  misc_RNA (1)...(19): siRNA sense strand
gcuauuaaaugcuacagua

SEQ ID NO: 289840 - RNA, 19 nt, Homo sapiens
  misc_RNA (1)...(19): siRNA sense strand
ugagagcaguaacaaauua

SEQ ID NO: 289841 - RNA, 19 nt, Homo sapiens
  misc_RNA (1)...(19): siRNA sense strand
ccauugggaugauuucuua

SEQ ID NO: 289842 - RNA, 19 nt, Homo sapiens
  misc_RNA (1)...(19): siRNA sense strand
cgucaaggcuuacaucaaa

SEQ ID NO: 289843 - RNA, 19 nt, Homo sapiens
  misc_RNA (1)...(19): siRNA sense strand
ggacauaaccugagaugga

SEQ ID NO: 289844 - RNA, 19 nt, Homo sapiens
  misc_RNA (1)...(19): siRNA sense strand
cagaaacccucucaucaaa

SEQ ID NO: 289845 - RNA, 19 nt, Homo sapiens
  misc_RNA (1)...(19): siRNA sense strand
gaaagaugcauaugaagaa

SEQ ID NO: 289846 - RNA, 19 nt, Homo sapiens
  misc_RNA (1)...(19): siRNA sense strand
ugagauggauucuuacauu

SEQ ID NO: 289847 - RNA, 19 nt, Homo sapiens
  misc_RNA (1)...(19): siRNA sense strand
aaccugagauggauucuua

SEQ ID NO: 289848 - RNA, 19 nt, Homo sapiens
  misc_RNA (1)...(19): siRNA sense strand
uaucaacgaugguguacua

SEQ ID NO: 289849 - RNA, 19 nt, Homo sapiens
  misc_RNA (1)...(19): siRNA sense strand
cuauauggcuugcaaugua

SEQ ID NO: 289850 - RNA, 19 nt, Homo sapiens
  misc_RNA (1)...(19): siRNA sense strand
ugaaauuccugcaagauga

SEQ ID NO: 289851 - RNA, 19 nt, Homo sapiens
  misc_RNA (1)...(19): siRNA sense strand
gaaaccagauuuaaacaac

SEQ ID NO: 289852 - RNA, 19 nt, Homo sapiens
  misc_RNA (1)...(19): siRNA sense strand
gaaggacauucaaaccaaa

SEQ ID NO: 289853 - RNA, 19 nt, Homo sapiens
  misc_RNA (1)...(19): siRNA sense strand
caaacaacauugccuacuu

SEQ ID NO: 289854 - RNA, 19 nt, Homo sapiens
  misc_RNA (1)...(19): siRNA sense strand
ggacgaagacgaagaggaa

SEQ ID NO: 289855 - RNA, 19 nt, Homo sapiens
  misc_RNA (1)...(19): siRNA sense strand
ggagugagauuucuucaac

SEQ ID NO: 289856 - RNA, 19 nt, Homo sapiens
  misc_RNA (1)...(19): siRNA sense strand
ucggcaagaucaagaauua

SEQ ID NO: 289857 - RNA, 19 nt, Homo sapiens
  misc_RNA (1)...(19): siRNA sense strand
gcaacauacugguggauga

SEQ ID NO: 289858 - RNA, 19 nt, Homo sapiens
  misc_RNA (1)...(19): siRNA sense strand
ugaagaauauggucaaauc

SEQ ID NO: 289859 - RNA, 19 nt, Homo sapiens
  misc_RNA (1)...(19): siRNA sense strand
uacauucgcucuccuguuu

SEQ ID NO: 289860 - RNA, 19 nt, Homo sapiens
  misc_RNA (1)...(19): siRNA sense strand
gcacuuacgauaaccaauu

SEQ ID NO: 289861 - RNA, 19 nt, Homo sapiens
  misc_RNA (1)...(19): siRNA sense strand
ugaaauagcagaaggcauu

SEQ ID NO: 289862 - RNA, 19 nt, Homo sapiens
  misc_RNA (1)...(19): siRNA sense strand
gggaugauuucuuaugcua

SEQ ID NO: 289863 - RNA, 19 nt, Homo sapiens
  misc_RNA (1)...(19): siRNA sense strand
uggaugaacacacuuauua

SEQ ID NO: 289864 - RNA, 19 nt, Homo sapiens
  misc_RNA (1)...(19): siRNA sense strand
ggacaucggaguacaguau

SEQ ID NO: 289865 - RNA, 19 nt, Homo sapiens
  misc_RNA (1)...(19): siRNA sense strand
ccugaaagaugcauaugaa

SEQ ID NO: 289866 - RNA, 19 nt, Homo sapiens
  misc_RNA (1)...(19): siRNA sense strand
gagauuucuucaaccauuu

SEQ ID NO: 289867 - RNA, 19 nt, Homo sapiens
  misc_RNA (1)...(19): siRNA sense strand
acacuacguucuagacuuu

SEQ ID NO: 289868 - RNA, 19 nt, Homo sapiens
  misc_RNA (1)...(19): siRNA sense strand
ugaauuggguugugaggaa

SEQ ID NO: 289869 - RNA, 19 nt, Homo sapiens
  misc_RNA (1)...(19): siRNA sense strand
cuaaucaacucaugugguu

SEQ ID NO: 289870 - RNA, 19 nt, Homo sapiens
  misc_RNA (1)...(19): siRNA sense strand
gccagauauugacuuauua

SEQ ID NO: 289871 - RNA, 19 nt, Homo sapiens
  misc_RNA (1)...(19): siRNA sense strand
gaaacccucucaucaaagg

SEQ ID NO: 289872 - RNA, 19 nt, Homo sapiens
  misc_RNA (1)...(19): siRNA sense strand
gcaugaaaccagauuuaaa

SEQ ID NO: 289873 - RNA, 19 nt, Homo sapiens
  misc_RNA (1)...(19): siRNA sense strand
ggacagaggcagagaaucu

SEQ ID NO: 289874 - RNA, 19 nt, Homo sapiens
  misc_RNA (1)...(19): siRNA sense strand
ucagccagauauugacuua

SEQ ID NO: 289875 - RNA, 19 nt, Homo sapiens
  misc_RNA (1)...(19): siRNA sense strand
ucaaagccaucauaagugu

SEQ ID NO: 289876 - RNA, 19 nt, Homo sapiens
  misc_RNA (1)...(19): siRNA sense strand
gaaaguaaagccuccugaa

SEQ ID NO: 289877 - RNA, 19 nt, Homo sapiens
  misc_RNA (1)...(19): siRNA sense strand
uaacauguccacuguaaug

SEQ ID NO: 289878 - RNA, 19 nt, Homo sapiens
  misc_RNA (1)...(19): siRNA sense strand
ggaggaaacaagaaugaaa

SEQ ID NO: 289879 - RNA, 19 nt, Homo sapiens
  misc_RNA (1)...(19): siRNA sense strand
gagauggauucuuacauuc

SEQ ID NO: 289880 - RNA, 19 nt, Homo sapiens
  misc_RNA (1)...(19): siRNA sense strand
gguguugccuuuuauuuua

SEQ ID NO: 289881 - RNA, 19 nt, Homo sapiens
  misc_RNA (1)...(19): siRNA sense strand
ggaguacaguauaaacaau

SEQ ID NO: 289882 - RNA, 19 nt, Homo sapiens
  misc_RNA (1)...(19): siRNA sense strand
caacuuagucgccauugaa

SEQ ID NO: 289883 - RNA, 19 nt, Homo sapiens
  misc_RNA (1)...(19): siRNA sense strand
cagaaggcauuguuucaga

SEQ ID NO: 289884 - RNA, 19 nt, Homo sapiens
  misc_RNA (1)...(19): siRNA sense strand
ugagauuucuucaaccauu

SEQ ID NO: 289885 - RNA, 19 nt, Homo sapiens
  misc_RNA (1)...(19): siRNA sense strand
gugaacaguuuccugacua

SEQ ID NO: 289886 - RNA, 19 nt, Homo sapiens
  misc_RNA (1)...(19): siRNA sense strand
ggaggaagaugaggaugau

SEQ ID NO: 289887 - RNA, 19 nt, Homo sapiens
  misc_RNA (1)...(19): siRNA sense strand
aaaguucacuggagcaaug

SEQ ID NO: 289888 - RNA, 19 nt, Homo sapiens
  misc_RNA (1)...(19): siRNA sense strand
gaguuucucuugagugaug

SEQ ID NO: 289889 - RNA, 19 nt, Homo sapiens
  misc_RNA (1)...(19): siRNA sense strand
gcgugauucugcucuauaa

SEQ ID NO: 289890 - RNA, 19 nt, Homo sapiens
  misc_RNA (1)...(19): siRNA sense strand
ggugaaaguucgcuuccuu

SEQ ID NO: 289891 - RNA, 19 nt, Homo sapiens
  misc_RNA (1)...(19): siRNA sense strand
uagaugcgguugucacuga

SEQ ID NO: 289892 - RNA, 19 nt, Homo sapiens
  misc_RNA (1)...(19): siRNA sense strand
cacuuacgauaaccaauua

SEQ ID NO: 289893 - RNA, 19 nt, Homo sapiens
  misc_RNA (1)...(19): siRNA sense strand
ggucuucuguaugcacuua

SEQ ID NO: 289894 - RNA, 19 nt, Homo sapiens
  misc_RNA (1)...(19): siRNA sense strand
gcaucuauagcauccauua

SEQ ID NO: 289895 - RNA, 19 nt, Homo sapiens
  misc_RNA (1)...(19): siRNA sense strand
caccacaaccuucucaaua

SEQ ID NO: 289896 - RNA, 19 nt, Homo sapiens
  misc_RNA (1)...(19): siRNA sense strand
gcacgagcgcuguaucaaa

SEQ ID NO: 289897 - RNA, 19 nt, Homo sapiens
  misc_RNA (1)...(19): siRNA sense strand
gaagcaaccagaaguagga

SEQ ID NO: 289898 - RNA, 19 nt, Homo sapiens
  misc_RNA (1)...(19): siRNA sense strand
uugcucagcugaagaauau

SEQ ID NO: 289899 - RNA, 19 nt, Homo sapiens
  misc_RNA (1)...(19): siRNA sense strand
gaacauuggccacaagaag

SEQ ID NO: 289900 - RNA, 19 nt, Homo sapiens
  misc_RNA (1)...(19): siRNA sense strand
ggacuaaaaugccauggaa

SEQ ID NO: 289901 - RNA, 19 nt, Homo sapiens
  misc_RNA (1)...(19): siRNA sense strand
ggccauguauucaagagaa

SEQ ID NO: 289902 - RNA, 19 nt, Homo sapiens
  misc_RNA (1)...(19): siRNA sense strand
caugaauccucagaaagua

SEQ ID NO: 289903 - RNA, 19 nt, Homo sapiens
  misc_RNA (1)...(19): siRNA sense strand
ggacagagacagcuauuuu

SEQ ID NO: 289904 - RNA, 19 nt, Homo sapiens
  misc_RNA (1)...(19): siRNA sense strand
ggaaaacacuuaugaaucg

SEQ ID NO: 289905 - RNA, 19 nt, Homo sapiens
  misc_RNA (1)...(19): siRNA sense strand
gagaaggaacuuugaagga

SEQ ID NO: 289906 - RNA, 19 nt, Homo sapiens
  misc_RNA (1)...(19): siRNA sense strand
cagcuguucuugcuacauu

SEQ ID NO: 289907 - RNA, 19 nt, Homo sapiens
  misc_RNA (1)...(19): siRNA sense strand
acaaauaacacaacuggaa

SEQ ID NO: 289908 - RNA, 19 nt, Homo sapiens
  misc_RNA (1)...(19): siRNA sense strand
gugcaugucugugaaauag

SEQ ID NO: 289909 - RNA, 19 nt, Homo sapiens
  misc_RNA (1)...(19): siRNA sense strand
cacaacacauggcuucauu

SEQ ID NO: 289910 - RNA, 19 nt, Homo sapiens
  misc_RNA (1)...(19): siRNA sense strand
gaacugacggauacaaaca

SEQ ID NO: 289911 - RNA, 19 nt, Homo sapiens
  misc_RNA (1)...(19): siRNA sense strand
ggaaguguccuaagagaag

SEQ ID NO: 289912 - RNA, 19 nt, Homo sapiens
  misc_RNA (1)...(19): siRNA sense strand
gcagugguuuagcuacauu

SEQ ID NO: 289913 - RNA, 19 nt, Homo sapiens
  misc_RNA (1)...(19): siRNA sense strand
gcagucaaagccaucauaa

SEQ ID NO: 289914 - RNA, 19 nt, Homo sapiens
  misc_RNA (1)...(19): siRNA sense strand
gcaaugagagcaguaacaa

SEQ ID NO: 289915 - RNA, 19 nt, Homo sapiens
  misc_RNA (1)...(19): siRNA sense strand
gcagcauucuuauuaugga

SEQ ID NO: 289916 - RNA, 19 nt, Homo sapiens
  misc_RNA (1)...(19): siRNA sense strand
accacaaccuucucaauaa

SEQ ID NO: 289917 - RNA, 19 nt, Homo sapiens
  misc_RNA (1)...(19): siRNA sense strand
ccacauggacaucggagua

SEQ ID NO: 289918 - RNA, 19 nt, Homo sapiens
  misc_RNA (1)...(19): siRNA sense strand
ggagcaauguaaaugaauc

SEQ ID NO: 289919 - RNA, 19 nt, Homo sapiens
  misc_RNA (1)...(19): siRNA sense strand
gaaacaagaaugaaagaac

SEQ ID NO: 289920 - RNA, 19 nt, Homo sapiens
  misc_RNA (1)...(19): siRNA sense strand
gacauaaccugagauggau

SEQ ID NO: 289921 - RNA, 19 nt, Homo sapiens
  misc_RNA (1)...(19): siRNA sense strand
ccuggucccucaugucuuu

SEQ ID NO: 289922 - RNA, 19 nt, Homo sapiens
  misc_RNA (1)...(19): siRNA sense strand
caaaugcacagaugacaga

SEQ ID NO: 289923 - RNA, 19 nt, Homo sapiens
  misc_RNA (1)...(19): siRNA sense strand
gaacuaugaaggcacaaug

SEQ ID NO: 289924 - RNA, 19 nt, Homo sapiens
  misc_RNA (1)...(19): siRNA sense strand
gaaggacucaccaccauuc

SEQ ID NO: 289925 - RNA, 19 nt, Homo sapiens
  misc_RNA (1)...(19): siRNA sense strand
uauggaagcugaccaaacu

SEQ ID NO: 289926 - RNA, 19 nt, Homo sapiens
  misc_RNA (1)...(19): siRNA sense strand
ccucaugucuuucuguugu

SEQ ID NO: 289927 - RNA, 19 nt, Homo sapiens
  misc_RNA (1)...(19): siRNA sense strand
gaaaggcaucaaacuucua

SEQ ID NO: 289928 - RNA, 19 nt, Homo sapiens
  misc_RNA (1)...(19): siRNA sense strand
aaaucggacuccaucuaua

SEQ ID NO: 289929 - RNA, 19 nt, Homo sapiens
  misc_RNA (1)...(19): siRNA sense strand
caaaucggacuccaucuau

SEQ ID NO: 289930 - RNA, 19 nt, Homo sapiens
  misc_RNA (1)...(19): siRNA sense strand
caacguaugcuggaacuga

SEQ ID NO: 289931 - RNA, 19 nt, Homo sapiens
  misc_RNA (1)...(19): siRNA sense strand
ccagaugggugcagugaag

SEQ ID NO: 289932 - RNA, 19 nt, Homo sapiens
  misc_RNA (1)...(19): siRNA sense strand
ucucucagcugccaacaga

SEQ ID NO: 289933 - RNA, 19 nt, Homo sapiens
  misc_RNA (1)...(19): siRNA sense strand
caacaucgauaguguauua

SEQ ID NO: 289934 - RNA, 19 nt, Homo sapiens
  misc_RNA (1)...(19): siRNA sense strand
gauaacauguccacuguaa

SEQ ID NO: 289935 - RNA, 19 nt, Homo sapiens
  misc_RNA (1)...(19): siRNA sense strand
caacauugccuacuuauuu

SEQ ID NO: 289936 - RNA, 19 nt, Homo sapiens
  misc_RNA (1)...(19): siRNA sense strand
ugaagaaggugaacaguuu

SEQ ID NO: 289937 - RNA, 19 nt, Homo sapiens
  misc_RNA (1)...(19): siRNA sense strand
uaacacaacuggaauuuca

SEQ ID NO: 289938 - RNA, 19 nt, Homo sapiens
  misc_RNA (1)...(19): siRNA sense strand
aaacaacauugccuacuua

SEQ ID NO: 289939 - RNA, 19 nt, Homo sapiens
  misc_RNA (1)...(19): siRNA sense strand
gcuauuaaaugcuacagua

SEQ ID NO: 289940 - RNA, 19 nt, Homo sapiens
  misc_RNA (1)...(19): siRNA sense strand
ugagagcaguaacaaauua

SEQ ID NO: 289941 - RNA, 19 nt, Homo sapiens
  misc_RNA (1)...(19): siRNA sense strand
ccauugggaugauuucuua

SEQ ID NO: 289942 - RNA, 19 nt, Homo sapiens
  misc_RNA (1)...(19): siRNA sense strand
cgucaaggcuuacaucaaa

SEQ ID NO: 289943 - RNA, 19 nt, Homo sapiens
  misc_RNA (1)...(19): siRNA sense strand
ggacauaaccugagaugga

SEQ ID NO: 289944 - RNA, 19 nt, Homo sapiens
  misc_RNA (1)...(19): siRNA sense strand
cagaaacccucucaucaaa

SEQ ID NO: 289945 - RNA, 19 nt, Homo sapiens
  misc_RNA (1)...(19): siRNA sense strand
gaaagaugcauaugaagaa

SEQ ID NO: 289946 - RNA, 19 nt, Homo sapiens
  misc_RNA (1)...(19): siRNA sense strand
ugagauggauucuuacauu

SEQ ID NO: 289947 - RNA, 19 nt, Homo sapiens
  misc_RNA (1)...(19): siRNA sense strand
aaccugagauggauucuua

SEQ ID NO: 289948 - RNA, 19 nt, Homo sapiens
  misc_RNA (1)...(19): siRNA sense strand
uaucaacgaugguguacua

SEQ ID NO: 289949 - RNA, 19 nt, Homo sapiens
  misc_RNA (1)...(19): siRNA sense strand
cuauauggcuugcaaugua

SEQ ID NO: 289950 - RNA, 19 nt, Homo sapiens
  misc_RNA (1)...(19): siRNA sense strand
ugaaauuccugcaagauga

SEQ ID NO: 289951 - RNA, 19 nt, Homo sapiens
  misc_RNA (1)...(19): siRNA sense strand
gaaaccagauuuaaacaac

SEQ ID NO: 289952 - RNA, 19 nt, Homo sapiens
  misc_RNA (1)...(19): siRNA sense strand
gaaggacauucaaaccaaa

SEQ ID NO: 289953 - RNA, 19 nt, Homo sapiens
  misc_RNA (1)...(19): siRNA sense strand
caaacaacauugccuacuu

SEQ ID NO: 289954 - RNA, 19 nt, Homo sapiens
  misc_RNA (1)...(19): siRNA sense strand
ggacgaagacgaagaggaa

SEQ ID NO: 289955 - RNA, 19 nt, Homo sapiens
  misc_RNA (1)...(19): siRNA sense strand
ggagugagauuucuucaac

SEQ ID NO: 289956 - RNA, 19 nt, Homo sapiens
  misc_RNA (1)...(19): siRNA sense strand
ucggcaagaucaagaauua

SEQ ID NO: 289957 - RNA, 19 nt, Homo sapiens
  misc_RNA (1)...(19): siRNA sense strand
gcaacauacugguggauga

SEQ ID NO: 289958 - RNA, 19 nt, Homo sapiens
  misc_RNA (1)...(19): siRNA sense strand
ugaagaauauggucaaauc

SEQ ID NO: 289959 - RNA, 19 nt, Homo sapiens
  misc_RNA (1)...(19): siRNA sense strand
uacauucgcucuccuguuu

SEQ ID NO: 289960 - RNA, 19 nt, Homo sapiens
  misc_RNA (1)...(19): siRNA sense strand
gcacuuacgauaaccaauu

SEQ ID NO: 289961 - RNA, 19 nt, Homo sapiens
  misc_RNA (1)...(19): siRNA sense strand
ugaaauagcagaaggcauu

SEQ ID NO: 289962 - RNA, 19 nt, Homo sapiens
  misc_RNA (1)...(19): siRNA sense strand
gggaugauuucuuaugcua

SEQ ID NO: 289963 - RNA, 19 nt, Homo sapiens
  misc_RNA (1)...(19): siRNA sense strand
uggaugaacacacuuauua

SEQ ID NO: 289964 - RNA, 19 nt, Homo sapiens
  misc_RNA (1)...(19): siRNA sense strand
ggacaucggaguacaguau

SEQ ID NO: 289965 - RNA, 19 nt, Homo sapiens
  misc_RNA (1)...(19): siRNA sense strand
ccugaaagaugcauaugaa

SEQ ID NO: 289966 - RNA, 19 nt, Homo sapiens
  misc_RNA (1)...(19): siRNA sense strand
gagauuucuucaaccauuu

SEQ ID NO: 289967 - RNA, 19 nt, Homo sapiens
  misc_RNA (1)...(19): siRNA sense strand
acacuacguucuagacuuu

SEQ ID NO: 289968 - RNA, 19 nt, Homo sapiens
  misc_RNA (1)...(19): siRNA sense strand
ugaauuggguugugaggaa

SEQ ID NO: 289969 - RNA, 19 nt, Homo sapiens
  misc_RNA (1)...(19): siRNA sense strand
cuaaucaacucaugugguu

SEQ ID NO: 289970 - RNA, 19 nt, Homo sapiens
  misc_RNA (1)...(19): siRNA sense strand
gccagauauugacuuauua

SEQ ID NO: 289971 - RNA, 19 nt, Homo sapiens
  misc_RNA (1)...(19): siRNA sense strand
gaaacccucucaucaaagg

SEQ ID NO: 289972 - RNA, 19 nt, Homo sapiens
  misc_RNA (1)...(19): siRNA sense strand
gcaugaaaccagauuuaaa

SEQ ID NO: 289973 - RNA, 19 nt, Homo sapiens
  misc_RNA (1)...(19): siRNA sense strand
ggacagaggcagagaaucu

SEQ ID NO: 289974 - RNA, 19 nt, Homo sapiens
  misc_RNA (1)...(19): siRNA sense strand
ucagccagauauugacuua

SEQ ID NO: 289975 - RNA, 19 nt, Homo sapiens
  misc_RNA (1)...(19): siRNA sense strand
ucaaagccaucauaagugu

SEQ ID NO: 289976 - RNA, 19 nt, Homo sapiens
  misc_RNA (1)...(19): siRNA sense strand
gaaaguaaagccuccugaa

SEQ ID NO: 289977 - RNA, 19 nt, Homo sapiens
  misc_RNA (1)...(19): siRNA sense strand
uaacauguccacuguaaug

SEQ ID NO: 289978 - RNA, 19 nt, Homo sapiens
  misc_RNA (1)...(19): siRNA sense strand
ggaggaaacaagaaugaaa

SEQ ID NO: 289979 - RNA, 19 nt, Homo sapiens
  misc_RNA (1)...(19): siRNA sense strand
gagauggauucuuacauuc

SEQ ID NO: 289980 - RNA, 19 nt, Homo sapiens
  misc_RNA (1)...(19): siRNA sense strand
gguguugccuuuuauuuua

SEQ ID NO: 289981 - RNA, 19 nt, Homo sapiens
  misc_RNA (1)...(19): siRNA sense strand
ggaguacaguauaaacaau

SEQ ID NO: 289982 - RNA, 19 nt, Homo sapiens
  misc_RNA (1)...(19): siRNA sense strand
caacuuagucgccauugaa

SEQ ID NO: 289983 - RNA, 19 nt, Homo sapiens
  misc_RNA (1)...(19): siRNA sense strand
cagaaggcauuguuucaga

SEQ ID NO: 289984 - RNA, 19 nt, Homo sapiens
  misc_RNA (1)...(19): siRNA sense strand
ugagauuucuucaaccauu

SEQ ID NO: 289985 - RNA, 19 nt, Homo sapiens
  misc_RNA (1)...(19): siRNA sense strand
gugaacaguuuccugacua

SEQ ID NO: 289986 - RNA, 19 nt, Homo sapiens
  misc_RNA (1)...(19): siRNA sense strand
ggaggaagaugaggaugau

SEQ ID NO: 289987 - RNA, 19 nt, Homo sapiens
  misc_RNA (1)...(19): siRNA sense strand
aaaguucacuggagcaaug

SEQ ID NO: 289988 - RNA, 19 nt, Homo sapiens
  misc_RNA (1)...(19): siRNA sense strand
gaguuucucuugagugaug

SEQ ID NO: 289989 - RNA, 19 nt, Homo sapiens
  misc_RNA (1)...(19): siRNA sense strand
gcgugauucugcucuauaa

SEQ ID NO: 289990 - RNA, 19 nt, Homo sapiens
  misc_RNA (1)...(19): siRNA sense strand
ggugaaaguucgcuuccuu

SEQ ID NO: 289991 - RNA, 19 nt, Homo sapiens
  misc_RNA (1)...(19): siRNA sense strand
uagaugcgguugucacuga

SEQ ID NO: 289992 - RNA, 19 nt, Homo sapiens
  misc_RNA (1)...(19): siRNA sense strand
cacuuacgauaaccaauua

SEQ ID NO: 289993 - RNA, 19 nt, Homo sapiens
  misc_RNA (1)...(19): siRNA sense strand
ggucuucuguaugcacuua

SEQ ID NO: 289994 - RNA, 19 nt, Homo sapiens
  misc_RNA (1)...(19): siRNA sense strand
gcaucuauagcauccauua

SEQ ID NO: 289995 - RNA, 19 nt, Homo sapiens
  misc_RNA (1)...(19): siRNA sense strand
caccacaaccuucucaaua

SEQ ID NO: 289996 - RNA, 19 nt, Homo sapiens
  misc_RNA (1)...(19): siRNA sense strand
gcacgagcgcuguaucaaa

SEQ ID NO: 289997 - RNA, 19 nt, Homo sapiens
  misc_RNA (1)...(19): siRNA sense strand
gaagcaaccagaaguagga

SEQ ID NO: 289998 - RNA, 19 nt, Homo sapiens
  misc_RNA (1)...(19): siRNA sense strand
uugcucagcugaagaauau

SEQ ID NO: 289999 - RNA, 19 nt, Homo sapiens
  misc_RNA (1)...(19): siRNA sense strand
gaacauuggccacaagaag

SEQ ID NO: 290000 - RNA, 19 nt, Homo sapiens
  misc_RNA (1)...(19): siRNA sense strand
ggacuaaaaugccauggaa

SEQ ID NO: 290001 - RNA, 19 nt, Homo sapiens
  misc_RNA (1)...(19): siRNA sense strand
ggccauguauucaagagaa

SEQ ID NO: 290002 - RNA, 19 nt, Homo sapiens
  misc_RNA (1)...(19): siRNA sense strand
caugaauccucagaaagua

SEQ ID NO: 290003 - RNA, 19 nt, Homo sapiens
  misc_RNA (1)...(19): siRNA sense strand
ggacagagacagcuauuuu

SEQ ID NO: 290004 - RNA, 19 nt, Homo sapiens
  misc_RNA (1)...(19): siRNA sense strand
ggaaaacacuuaugaaucg

SEQ ID NO: 290005 - RNA, 19 nt, Homo sapiens
  misc_RNA (1)...(19): siRNA sense strand
gagaaggaacuuugaagga

SEQ ID NO: 290006 - RNA, 19 nt, Homo sapiens
  misc_RNA (1)...(19): siRNA sense strand
cagcuguucuugcuacauu

SEQ ID NO: 290007 - RNA, 19 nt, Homo sapiens
  misc_RNA (1)...(19): siRNA sense strand
acaaauaacacaacuggaa

SEQ ID NO: 290008 - RNA, 19 nt, Homo sapiens
  misc_RNA (1)...(19): siRNA sense strand
gugcaugucugugaaauag

SEQ ID NO: 290009 - RNA, 19 nt, Homo sapiens
  misc_RNA (1)...(19): siRNA sense strand
cacaacacauggcuucauu

SEQ ID NO: 290010 - RNA, 19 nt, Homo sapiens
  misc_RNA (1)...(19): siRNA sense strand
gaacugacggauacaaaca

SEQ ID NO: 290011 - RNA, 19 nt, Homo sapiens
  misc_RNA (1)...(19): siRNA sense strand
ggaaguguccuaagagaag

SEQ ID NO: 290012 - RNA, 19 nt, Homo sapiens
  misc_RNA (1)...(19): siRNA sense strand
gcagugguuuagcuacauu

SEQ ID NO: 290013 - RNA, 19 nt, Homo sapiens
  misc_RNA (1)...(19): siRNA sense strand
gcagucaaagccaucauaa

SEQ ID NO: 290014 - RNA, 19 nt, Homo sapiens
  misc_RNA (1)...(19): siRNA sense strand
gcaaugagagcaguaacaa

SEQ ID NO: 290015 - RNA, 19 nt, Homo sapiens
  misc_RNA (1)...(19): siRNA sense strand
gcagcauucuuauuaugga

SEQ ID NO: 290016 - RNA, 19 nt, Homo sapiens
  misc_RNA (1)...(19): siRNA sense strand
accacaaccuucucaauaa

SEQ ID NO: 290017 - RNA, 19 nt, Homo sapiens
  misc_RNA (1)...(19): siRNA sense strand
ccacauggacaucggagua

SEQ ID NO: 290018 - RNA, 19 nt, Homo sapiens
  misc_RNA (1)...(19): siRNA sense strand
ggagcaauguaaaugaauc

SEQ ID NO: 290019 - RNA, 19 nt, Homo sapiens
  misc_RNA (1)...(19): siRNA sense strand
gaaacaagaaugaaagaac

SEQ ID NO: 290020 - RNA, 19 nt, Homo sapiens
  misc_RNA (1)...(19): siRNA sense strand
gacauaaccugagauggau

SEQ ID NO: 290021 - RNA, 19 nt, Homo sapiens
  misc_RNA (1)...(19): siRNA sense strand
ccuggucccucaugucuuu

SEQ ID NO: 290022 - RNA, 19 nt, Homo sapiens
  misc_RNA (1)...(19): siRNA sense strand
caaaugcacagaugacaga

SEQ ID NO: 290023 - RNA, 19 nt, Homo sapiens
  misc_RNA (1)...(19): siRNA sense strand
gaacuaugaaggcacaaug

SEQ ID NO: 290024 - RNA, 19 nt, Homo sapiens
  misc_RNA (1)...(19): siRNA sense strand
gaaggacucaccaccauuc

SEQ ID NO: 290025 - RNA, 19 nt, Homo sapiens
  misc_RNA (1)...(19): siRNA sense strand
uauggaagcugaccaaacu

SEQ ID NO: 290026 - RNA, 19 nt, Homo sapiens
  misc_RNA (1)...(19): siRNA sense strand
ccucaugucuuucuguugu

SEQ ID NO: 290027 - RNA, 19 nt, Homo sapiens
  misc_RNA (1)...(19): siRNA sense strand
gaaaggcaucaaacuucua

SEQ ID NO: 290028 - RNA, 19 nt, Homo sapiens
  misc_RNA (1)...(19): siRNA sense strand
aaaucggacuccaucuaua

SEQ ID NO: 290029 - RNA, 19 nt, Homo sapiens
  misc_RNA (1)...(19): siRNA sense strand
caaaucggacuccaucuau

SEQ ID NO: 290030 - RNA, 19 nt, Homo sapiens
  misc_RNA (1)...(19): siRNA sense strand
caacguaugcuggaacuga

SEQ ID NO: 290031 - RNA, 19 nt, Homo sapiens
  misc_RNA (1)...(19): siRNA sense strand
ccagaugggugcagugaag

SEQ ID NO: 290032 - RNA, 19 nt, Homo sapiens
  misc_RNA (1)...(19): siRNA sense strand
ucucucagcugccaacaga

SEQ ID NO: 290033 - RNA, 19 nt, Homo sapiens
  misc_RNA (1)...(19): siRNA sense strand
caacaucgauaguguauua

SEQ ID NO: 290034 - RNA, 19 nt, Homo sapiens
  misc_RNA (1)...(19): siRNA sense strand
gauaacauguccacuguaa

SEQ ID NO: 290035 - RNA, 19 nt, Homo sapiens
  misc_RNA (1)...(19): siRNA sense strand
caacauugccuacuuauuu

SEQ ID NO: 290036 - RNA, 19 nt, Homo sapiens
  misc_RNA (1)...(19): siRNA sense strand
ugaagaaggugaacaguuu

SEQ ID NO: 290037 - RNA, 19 nt, Homo sapiens
  misc_RNA (1)...(19): siRNA sense strand
uaacacaacuggaauuuca

SEQ ID NO: 290038 - RNA, 19 nt, Homo sapiens
  misc_RNA (1)...(19): siRNA sense strand
aaacaacauugccuacuua

SEQ ID NO: 290039 - RNA, 19 nt, Homo sapiens
  misc_RNA (1)...(19): siRNA sense strand
gcuauuaaaugcuacagua

SEQ ID NO: 290040 - RNA, 19 nt, Homo sapiens
  misc_RNA (1)...(19): siRNA sense strand
ugagagcaguaacaaauua

SEQ ID NO: 290041 - RNA, 19 nt, Homo sapiens
  misc_RNA (1)...(19): siRNA sense strand
ccauugggaugauuucuua

SEQ ID NO: 290042 - RNA, 19 nt, Homo sapiens
  misc_RNA (1)...(19): siRNA sense strand
cgucaaggcuuacaucaaa

SEQ ID NO: 290043 - RNA, 19 nt, Homo sapiens
  misc_RNA (1)...(19): siRNA sense strand
ggacauaaccugagaugga

SEQ ID NO: 290044 - RNA, 19 nt, Homo sapiens
  misc_RNA (1)...(19): siRNA sense strand
cagaaacccucucaucaaa

SEQ ID NO: 290045 - RNA, 19 nt, Homo sapiens
  misc_RNA (1)...(19): siRNA sense strand
gaaagaugcauaugaagaa

SEQ ID NO: 290046 - RNA, 19 nt, Homo sapiens
  misc_RNA (1)...(19): siRNA sense strand
ugagauggauucuuacauu

SEQ ID NO: 290047 - RNA, 19 nt, Homo sapiens
  misc_RNA (1)...(19): siRNA sense strand
aaccugagauggauucuua

SEQ ID NO: 290048 - RNA, 19 nt, Homo sapiens
  misc_RNA (1)...(19): siRNA sense strand
uaucaacgaugguguacua

SEQ ID NO: 290049 - RNA, 19 nt, Homo sapiens
  misc_RNA (1)...(19): siRNA sense strand
cuauauggcuugcaaugua

SEQ ID NO: 290050 - RNA, 19 nt, Homo sapiens
  misc_RNA (1)...(19): siRNA sense strand
ugaaauuccugcaagauga

SEQ ID NO: 290051 - RNA, 19 nt, Homo sapiens
  misc_RNA (1)...(19): siRNA sense strand
gaaaccagauuuaaacaac

SEQ ID NO: 290052 - RNA, 19 nt, Homo sapiens
  misc_RNA (1)...(19): siRNA sense strand
gaaggacauucaaaccaaa

SEQ ID NO: 290053 - RNA, 19 nt, Homo sapiens
  misc_RNA (1)...(19): siRNA sense strand
caaacaacauugccuacuu

SEQ ID NO: 290054 - RNA, 19 nt, Homo sapiens
  misc_RNA (1)...(19): siRNA sense strand
ggacgaagacgaagaggaa

SEQ ID NO: 290055 - RNA, 19 nt, Homo sapiens
  misc_RNA (1)...(19): siRNA sense strand
ggagugagauuucuucaac

SEQ ID NO: 290056 - RNA, 19 nt, Homo sapiens
  misc_RNA (1)...(19): siRNA sense strand
ucggcaagaucaagaauua

SEQ ID NO: 290057 - RNA, 19 nt, Homo sapiens
  misc_RNA (1)...(19): siRNA sense strand
gcaacauacugguggauga

SEQ ID NO: 290058 - RNA, 19 nt, Homo sapiens
  misc_RNA (1)...(19): siRNA sense strand
ugaagaauauggucaaauc

SEQ ID NO: 290059 - RNA, 19 nt, Homo sapiens
  misc_RNA (1)...(19): siRNA sense strand
uacauucgcucuccuguuu

SEQ ID NO: 290060 - RNA, 19 nt, Homo sapiens
  misc_RNA (1)...(19): siRNA sense strand
gcacuuacgauaaccaauu

SEQ ID NO: 290061 - RNA, 19 nt, Homo sapiens
  misc_RNA (1)...(19): siRNA sense strand
ugaaauagcagaaggcauu

SEQ ID NO: 290062 - RNA, 19 nt, Homo sapiens
  misc_RNA (1)...(19): siRNA sense strand
gggaugauuucuuaugcua

SEQ ID NO: 290063 - RNA, 19 nt, Homo sapiens
  misc_RNA (1)...(19): siRNA sense strand
uggaugaacacacuuauua

SEQ ID NO: 290064 - RNA, 19 nt, Homo sapiens
  misc_RNA (1)...(19): siRNA sense strand
ggacaucggaguacaguau

SEQ ID NO: 290065 - RNA, 19 nt, Homo sapiens
  misc_RNA (1)...(19): siRNA sense strand
ccugaaagaugcauaugaa

SEQ ID NO: 290066 - RNA, 19 nt, Homo sapiens
  misc_RNA (1)...(19): siRNA sense strand
gagauuucuucaaccauuu

SEQ ID NO: 290067 - RNA, 19 nt, Homo sapiens
  misc_RNA (1)...(19): siRNA sense strand
acacuacguucuagacuuu

SEQ ID NO: 290068 - RNA, 19 nt, Homo sapiens
  misc_RNA (1)...(19): siRNA sense strand
ugaauuggguugugaggaa

SEQ ID NO: 290069 - RNA, 19 nt, Homo sapiens
  misc_RNA (1)...(19): siRNA sense strand
cuaaucaacucaugugguu

SEQ ID NO: 290070 - RNA, 19 nt, Homo sapiens
  misc_RNA (1)...(19): siRNA sense strand
gccagauauugacuuauua

SEQ ID NO: 290071 - RNA, 19 nt, Homo sapiens
  misc_RNA (1)...(19): siRNA sense strand
gaaacccucucaucaaagg

SEQ ID NO: 290072 - RNA, 19 nt, Homo sapiens
  misc_RNA (1)...(19): siRNA sense strand
gcaugaaaccagauuuaaa

SEQ ID NO: 290073 - RNA, 19 nt, Homo sapiens
  misc_RNA (1)...(19): siRNA sense strand
ggacagaggcagagaaucu

SEQ ID NO: 290074 - RNA, 19 nt, Homo sapiens
  misc_RNA (1)...(19): siRNA sense strand
ucagccagauauugacuua

SEQ ID NO: 290075 - RNA, 19 nt, Homo sapiens
  misc_RNA (1)...(19): siRNA sense strand
ucaaagccaucauaagugu

SEQ ID NO: 290076 - RNA, 19 nt, Homo sapiens
  misc_RNA (1)...(19): siRNA sense strand
gaaaguaaagccuccugaa

SEQ ID NO: 290077 - RNA, 19 nt, Homo sapiens
  misc_RNA (1)...(19): siRNA sense strand
uaacauguccacuguaaug

SEQ ID NO: 290078 - RNA, 19 nt, Homo sapiens
  misc_RNA (1)...(19): siRNA sense strand
ggaggaaacaagaaugaaa

SEQ ID NO: 290079 - RNA, 19 nt, Homo sapiens
  misc_RNA (1)...(19): siRNA sense strand
gagauggauucuuacauuc

SEQ ID NO: 290080 - RNA, 19 nt, Homo sapiens
  misc_RNA (1)...(19): siRNA sense strand
gguguugccuuuuauuuua

SEQ ID NO: 290081 - RNA, 19 nt, Homo sapiens
  misc_RNA (1)...(19): siRNA sense strand
ggaguacaguauaaacaau

SEQ ID NO: 290082 - RNA, 19 nt, Homo sapiens
  misc_RNA (1)...(19): siRNA sense strand
caacuuagucgccauugaa

SEQ ID NO: 290083 - RNA, 19 nt, Homo sapiens
  misc_RNA (1)...(19): siRNA sense strand
cagaaggcauuguuucaga

SEQ ID NO: 290084 - RNA, 19 nt, Homo sapiens
  misc_RNA (1)...(19): siRNA sense strand
ugagauuucuucaaccauu

SEQ ID NO: 290085 - RNA, 19 nt, Homo sapiens
  misc_RNA (1)...(19): siRNA sense strand
gugaacaguuuccugacua

SEQ ID NO: 290086 - RNA, 19 nt, Homo sapiens
  misc_RNA (1)...(19): siRNA sense strand
ggaggaagaugaggaugau

SEQ ID NO: 290087 - RNA, 19 nt, Homo sapiens
  misc_RNA (1)...(19): siRNA sense strand
aaaguucacuggagcaaug

SEQ ID NO: 290088 - RNA, 19 nt, Homo sapiens
  misc_RNA (1)...(19): siRNA sense strand
gaguuucucuugagugaug

SEQ ID NO: 290089 - RNA, 19 nt, Homo sapiens
  misc_RNA (1)...(19): siRNA sense strand
gcgugauucugcucuauaa

SEQ ID NO: 290090 - RNA, 19 nt, Homo sapiens
  misc_RNA (1)...(19): siRNA sense strand
ggugaaaguucgcuuccuu

SEQ ID NO: 290091 - RNA, 19 nt, Homo sapiens
  misc_RNA (1)...(19): siRNA sense strand
uagaugcgguugucacuga

SEQ ID NO: 290092 - RNA, 19 nt, Homo sapiens
  misc_RNA (1)...(19): siRNA sense strand
cacuuacgauaaccaauua

SEQ ID NO: 290093 - RNA, 19 nt, Homo sapiens
  misc_RNA (1)...(19): siRNA sense strand
ggucuucuguaugcacuua

SEQ ID NO: 290094 - RNA, 19 nt, Homo sapiens
  misc_RNA (1)...(19): siRNA sense strand
gcaucuauagcauccauua

SEQ ID NO: 290095 - RNA, 19 nt, Homo sapiens
  misc_RNA (1)...(19): siRNA sense strand
caccacaaccuucucaaua

SEQ ID NO: 290096 - RNA, 19 nt, Homo sapiens
  misc_RNA (1)...(19): siRNA sense strand
gcacgagcgcuguaucaaa

SEQ ID NO: 290097 - RNA, 19 nt, Homo sapiens
  misc_RNA (1)...(19): siRNA sense strand
gaagcaaccagaaguagga

SEQ ID NO: 290098 - RNA, 19 nt, Homo sapiens
  misc_RNA (1)...(19): siRNA sense strand
uugcucagcugaagaauau

SEQ ID NO: 290099 - RNA, 19 nt, Homo sapiens
  misc_RNA (1)...(19): siRNA sense strand
gaacauuggccacaagaag

SEQ ID NO: 290100 - RNA, 19 nt, Homo sapiens
  misc_RNA (1)...(19): siRNA sense strand
ggacuaaaaugccauggaa

SEQ ID NO: 290101 - RNA, 19 nt, Homo sapiens
  misc_RNA (1)...(19): siRNA sense strand
ggccauguauucaagagaa

SEQ ID NO: 290102 - RNA, 19 nt, Homo sapiens
  misc_RNA (1)...(19): siRNA sense strand
caugaauccucagaaagua

SEQ ID NO: 290103 - RNA, 19 nt, Homo sapiens
  misc_RNA (1)...(19): siRNA sense strand
ggacagagacagcuauuuu

SEQ ID NO: 290104 - RNA, 19 nt, Homo sapiens
  misc_RNA (1)...(19): siRNA sense strand
ggaaaacacuuaugaaucg

SEQ ID NO: 290105 - RNA, 19 nt, Homo sapiens
  misc_RNA (1)...(19): siRNA sense strand
gagaaggaacuuugaagga

SEQ ID NO: 290106 - RNA, 19 nt, Homo sapiens
  misc_RNA (1)...(19): siRNA sense strand
cagcuguucuugcuacauu

SEQ ID NO: 290107 - RNA, 19 nt, Homo sapiens
  misc_RNA (1)...(19): siRNA sense strand
acaaauaacacaacuggaa

SEQ ID NO: 290108 - RNA, 19 nt, Homo sapiens
  misc_RNA (1)...(19): siRNA sense strand
gugcaugucugugaaauag

SEQ ID NO: 290109 - RNA, 19 nt, Homo sapiens
  misc_RNA (1)...(19): siRNA sense strand
cacaacacauggcuucauu

SEQ ID NO: 290110 - RNA, 19 nt, Homo sapiens
  misc_RNA (1)...(19): siRNA sense strand
gaacugacggauacaaaca

SEQ ID NO: 290111 - RNA, 19 nt, Homo sapiens
  misc_RNA (1)...(19): siRNA sense strand
ggaaguguccuaagagaag

SEQ ID NO: 290112 - RNA, 19 nt, Homo sapiens
  misc_RNA (1)...(19): siRNA sense strand
gcagugguuuagcuacauu

SEQ ID NO: 290113 - RNA, 19 nt, Homo sapiens
  misc_RNA (1)...(19): siRNA sense strand
gcagucaaagccaucauaa

SEQ ID NO: 290114 - RNA, 19 nt, Homo sapiens
  misc_RNA (1)...(19): siRNA sense strand
gcaaugagagcaguaacaa

SEQ ID NO: 290115 - RNA, 19 nt, Homo sapiens
  misc_RNA (1)...(19): siRNA sense strand
gcagcauucuuauuaugga

SEQ ID NO: 290116 - RNA, 19 nt, Homo sapiens
  misc_RNA (1)...(19): siRNA sense strand
accacaaccuucucaauaa

SEQ ID NO: 290117 - RNA, 19 nt, Homo sapiens
  misc_RNA (1)...(19): siRNA sense strand
ccacauggacaucggagua

SEQ ID NO: 290118 - RNA, 19 nt, Homo sapiens
  misc_RNA (1)...(19): siRNA sense strand
ggagcaauguaaaugaauc

SEQ ID NO: 290119 - RNA, 19 nt, Homo sapiens
  misc_RNA (1)...(19): siRNA sense strand
gaaacaagaaugaaagaac

SEQ ID NO: 290120 - RNA, 19 nt, Homo sapiens
  misc_RNA (1)...(19): siRNA sense strand
gacauaaccugagauggau

SEQ ID NO: 290121 - RNA, 19 nt, Homo sapiens
  misc_RNA (1)...(19): siRNA sense strand
ccuggucccucaugucuuu

SEQ ID NO: 290122 - RNA, 19 nt, Homo sapiens
  misc_RNA (1)...(19): siRNA sense strand
caaaugcacagaugacaga

SEQ ID NO: 290123 - RNA, 19 nt, Homo sapiens
  misc_RNA (1)...(19): siRNA sense strand
gaacuaugaaggcacaaug

SEQ ID NO: 290124 - RNA, 19 nt, Homo sapiens
  misc_RNA (1)...(19): siRNA sense strand
gaaggacucaccaccauuc

SEQ ID NO: 290125 - RNA, 19 nt, Homo sapiens
  misc_RNA (1)...(19): siRNA sense strand
uauggaagcugaccaaacu

SEQ ID NO: 290126 - RNA, 19 nt, Homo sapiens
  misc_RNA (1)...(19): siRNA sense strand
ccucaugucuuucuguugu

SEQ ID NO: 290127 - RNA, 19 nt, Homo sapiens
  misc_RNA (1)...(19): siRNA sense strand
gaaaggcaucaaacuucua

SEQ ID NO: 290128 - RNA, 19 nt, Homo sapiens
  misc_RNA (1)...(19): siRNA sense strand
aaaucggacuccaucuaua

SEQ ID NO: 290129 - RNA, 19 nt, Homo sapiens
  misc_RNA (1)...(19): siRNA sense strand
caaaucggacuccaucuau

SEQ ID NO: 290130 - RNA, 19 nt, Homo sapiens
  misc_RNA (1)...(19): siRNA sense strand
caacguaugcuggaacuga

SEQ ID NO: 290131 - RNA, 19 nt, Homo sapiens
  misc_RNA (1)...(19): siRNA sense strand
ccagaugggugcagugaag

SEQ ID NO: 290132 - RNA, 19 nt, Homo sapiens
  misc_RNA (1)...(19): siRNA sense strand
ucucucagcugccaacaga

SEQ ID NO: 290133 - RNA, 19 nt, Homo sapiens
  misc_RNA (1)...(19): siRNA sense strand
gaagacaucugcaaauauu

SEQ ID NO: 290134 - RNA, 19 nt, Homo sapiens
  misc_RNA (1)...(19): siRNA sense strand
gaauauaacugcuuggaaa

SEQ ID NO: 290135 - RNA, 19 nt, Homo sapiens
  misc_RNA (1)...(19): siRNA sense strand
gguauuauuuggagucuua

SEQ ID NO: 290136 - RNA, 19 nt, Homo sapiens
  misc_RNA (1)...(19): siRNA sense strand
gaaggaagauacagcuuug

SEQ ID NO: 290137 - RNA, 19 nt, Homo sapiens
  misc_RNA (1)...(19): siRNA sense strand
gcaaauauuucugcauuga

SEQ ID NO: 290138 - RNA, 19 nt, Homo sapiens
  misc_RNA (1)...(19): siRNA sense strand
ggaaauacuuggcaaaaua

SEQ ID NO: 290139 - RNA, 19 nt, Homo sapiens
  misc_RNA (1)...(19): siRNA sense strand
gaagaguuauguagaaaug

SEQ ID NO: 290140 - RNA, 19 nt, Homo sapiens
  misc_RNA (1)...(19): siRNA sense strand
gcucggaagugaaauucua

SEQ ID NO: 290141 - RNA, 19 nt, Homo sapiens
  misc_RNA (1)...(19): siRNA sense strand
ggaauuccauacauuacuu

SEQ ID NO: 290142 - RNA, 19 nt, Homo sapiens
  misc_RNA (1)...(19): siRNA sense strand
aagagguacucaccaauua

SEQ ID NO: 290143 - RNA, 19 nt, Homo sapiens
  misc_RNA (1)...(19): siRNA sense strand
ggaaacaucugugcucagu

SEQ ID NO: 290144 - RNA, 19 nt, Homo sapiens
  misc_RNA (1)...(19): siRNA sense strand
uauuauaccuggucugaaa

SEQ ID NO: 290145 - RNA, 19 nt, Homo sapiens
  misc_RNA (1)...(19): siRNA sense strand
aaacauacguagaaacugu

SEQ ID NO: 290146 - RNA, 19 nt, Homo sapiens
  misc_RNA (1)...(19): siRNA sense strand
uggaagacaucugcaaaua

SEQ ID NO: 290147 - RNA, 19 nt, Homo sapiens
  misc_RNA (1)...(19): siRNA sense strand
ggaaggaagauacagcuuu

SEQ ID NO: 290148 - RNA, 19 nt, Homo sapiens
  misc_RNA (1)...(19): siRNA sense strand
ggaaaagguuguagauauu

SEQ ID NO: 290149 - RNA, 19 nt, Homo sapiens
  misc_RNA (1)...(19): siRNA sense strand
aaagcaacauggagaguuu

SEQ ID NO: 290150 - RNA, 19 nt, Homo sapiens
  misc_RNA (1)...(19): siRNA sense strand
cauuauaccuucugcauca

SEQ ID NO: 290151 - RNA, 19 nt, Homo sapiens
  misc_RNA (1)...(19): siRNA sense strand
uuaaagaucuccuuacaac

SEQ ID NO: 290152 - RNA, 19 nt, Homo sapiens
  misc_RNA (1)...(19): siRNA sense strand
gcccauaucuacuuauaca

SEQ ID NO: 290153 - RNA, 19 nt, Homo sapiens
  misc_RNA (1)...(19): siRNA sense strand
ggaagacaucugcaaauau

SEQ ID NO: 290154 - RNA, 19 nt, Homo sapiens
  misc_RNA (1)...(19): siRNA sense strand
aaagcaagaucaccaaauc

SEQ ID NO: 290155 - RNA, 19 nt, Homo sapiens
  misc_RNA (1)...(19): siRNA sense strand
caagagguacucaccaauu

SEQ ID NO: 290156 - RNA, 19 nt, Homo sapiens
  misc_RNA (1)...(19): siRNA sense strand
uguaccaucucauaaauug

SEQ ID NO: 290157 - RNA, 19 nt, Homo sapiens
  misc_RNA (1)...(19): siRNA sense strand
ccaauuaugcauaugauga

SEQ ID NO: 290158 - RNA, 19 nt, Homo sapiens
  misc_RNA (1)...(19): siRNA sense strand
uuccuuggcuucaaacaua

SEQ ID NO: 290159 - RNA, 19 nt, Homo sapiens
  misc_RNA (1)...(19): siRNA sense strand
ugugacagaugaugaagaa

SEQ ID NO: 290160 - RNA, 19 nt, Homo sapiens
  misc_RNA (1)...(19): siRNA sense strand
auauuggcgucaugaauua

SEQ ID NO: 290161 - RNA, 19 nt, Homo sapiens
  misc_RNA (1)...(19): siRNA sense strand
gcucaguggugcaggaaug

SEQ ID NO: 290162 - RNA, 19 nt, Homo sapiens
  misc_RNA (1)...(19): siRNA sense strand
caaaugcccauaucuacuu

SEQ ID NO: 290163 - RNA, 19 nt, Homo sapiens
  misc_RNA (1)...(19): siRNA sense strand
gugaagaguuauguagaaa

SEQ ID NO: 290164 - RNA, 19 nt, Homo sapiens
  misc_RNA (1)...(19): siRNA sense strand
gacagaugaugaagaagug

SEQ ID NO: 290165 - RNA, 19 nt, Homo sapiens
  misc_RNA (1)...(19): siRNA sense strand
gauuguaccaucucauaaa

SEQ ID NO: 290166 - RNA, 19 nt, Homo sapiens
  misc_RNA (1)...(19): siRNA sense strand
gaagcucggaagugaaauu

SEQ ID NO: 290167 - RNA, 19 nt, Homo sapiens
  misc_RNA (1)...(19): siRNA sense strand
cggaugcacuaagaauaua

SEQ ID NO: 290168 - RNA, 19 nt, Homo sapiens
  misc_RNA (1)...(19): siRNA sense strand
ugugaagaguuauguagaa

SEQ ID NO: 290169 - RNA, 19 nt, Homo sapiens
  misc_RNA (1)...(19): siRNA sense strand
caacauggagaguuucaau

SEQ ID NO: 290170 - RNA, 19 nt, Homo sapiens
  misc_RNA (1)...(19): siRNA sense strand
gaugaagagaucugugaaa

SEQ ID NO: 290171 - RNA, 19 nt, Homo sapiens
  misc_RNA (1)...(19): siRNA sense strand
aaaugcccauaucuacuua

SEQ ID NO: 290172 - RNA, 19 nt, Homo sapiens
  misc_RNA (1)...(19): siRNA sense strand
ggaugauuaugcuuacaau

SEQ ID NO: 290173 - RNA, 19 nt, Homo sapiens
  misc_RNA (1)...(19): siRNA sense strand
uggagaguuucaauacuuu

SEQ ID NO: 290174 - RNA, 19 nt, Homo sapiens
  misc_RNA (1)...(19): siRNA sense strand
agauggagcccaagaggua

SEQ ID NO: 290175 - RNA, 19 nt, Homo sapiens
  misc_RNA (1)...(19): siRNA sense strand
gaagauggaauugucaaag

SEQ ID NO: 290176 - RNA, 19 nt, Homo sapiens
  misc_RNA (1)...(19): siRNA sense strand
aauauuggcgucaugaauu

SEQ ID NO: 290177 - RNA, 19 nt, Homo sapiens
  misc_RNA (1)...(19): siRNA sense strand
gaaaugcuggaauucuaug

SEQ ID NO: 290178 - RNA, 19 nt, Homo sapiens
  misc_RNA (1)...(19): siRNA sense strand
aaagaucuccuuacaacau

SEQ ID NO: 290179 - RNA, 19 nt, Homo sapiens
  misc_RNA (1)...(19): siRNA sense strand
gaugcuaagagaaaucuga

SEQ ID NO: 290180 - RNA, 19 nt, Homo sapiens
  misc_RNA (1)...(19): siRNA sense strand
gagguacucaccaauuaug

SEQ ID NO: 290181 - RNA, 19 nt, Homo sapiens
  misc_RNA (1)...(19): siRNA sense strand
caucauggaaugcuuaaag

SEQ ID NO: 290182 - RNA, 19 nt, Homo sapiens
  misc_RNA (1)...(19): siRNA sense strand
uguggcugguuuacuguua

SEQ ID NO: 290183 - RNA, 19 nt, Homo sapiens
  misc_RNA (1)...(19): siRNA sense strand
gguuggagguauuauuugg

SEQ ID NO: 290184 - RNA, 19 nt, Homo sapiens
  misc_RNA (1)...(19): siRNA sense strand
cuucaaacauacguagaaa

SEQ ID NO: 290185 - RNA, 19 nt, Homo sapiens
  misc_RNA (1)...(19): siRNA sense strand
uuuggaagcucggaaguga

SEQ ID NO: 290186 - RNA, 19 nt, Homo sapiens
  misc_RNA (1)...(19): siRNA sense strand
uauaacugcuuggaaauac

SEQ ID NO: 290187 - RNA, 19 nt, Homo sapiens
  misc_RNA (1)...(19): siRNA sense strand
cccaagagguacucaccaa

SEQ ID NO: 290188 - RNA, 19 nt, Homo sapiens
  misc_RNA (1)...(19): siRNA sense strand
gcuggaagacaucugcaaa

SEQ ID NO: 290189 - RNA, 19 nt, Homo sapiens
  misc_RNA (1)...(19): siRNA sense strand
ccuuacaacaugcauuaua

SEQ ID NO: 290190 - RNA, 19 nt, Homo sapiens
  misc_RNA (1)...(19): siRNA sense strand
cauggaaugcuuaaagaug

SEQ ID NO: 290191 - RNA, 19 nt, Homo sapiens
  misc_RNA (1)...(19): siRNA sense strand
ggaugcacuaagaauauaa

SEQ ID NO: 290192 - RNA, 19 nt, Homo sapiens
  misc_RNA (1)...(19): siRNA sense strand
caaauccaaaugcccauau

SEQ ID NO: 290193 - RNA, 19 nt, Homo sapiens
  misc_RNA (1)...(19): siRNA sense strand
ucaccaauuaugcauauga

SEQ ID NO: 290194 - RNA, 19 nt, Homo sapiens
  misc_RNA (1)...(19): siRNA sense strand
acucaccaauuaugcauau

SEQ ID NO: 290195 - RNA, 19 nt, Homo sapiens
  misc_RNA (1)...(19): siRNA sense strand
ugacagaugaugaagaagu

SEQ ID NO: 290196 - RNA, 19 nt, Homo sapiens
  misc_RNA (1)...(19): siRNA sense strand
aaaagaagauggaauuguc

SEQ ID NO: 290197 - RNA, 19 nt, Homo sapiens
  misc_RNA (1)...(19): siRNA sense strand
aaccacagcuggaagacau

SEQ ID NO: 290198 - RNA, 19 nt, Homo sapiens
  misc_RNA (1)...(19): siRNA sense strand
ucaaacauacguagaaacu

SEQ ID NO: 290199 - RNA, 19 nt, Homo sapiens
  misc_RNA (1)...(19): siRNA sense strand
uaaagcaagaucaccaaau

SEQ ID NO: 290200 - RNA, 19 nt, Homo sapiens
  misc_RNA (1)...(19): siRNA sense strand
aggaaaagguuguagauau

SEQ ID NO: 290201 - RNA, 19 nt, Homo sapiens
  misc_RNA (1)...(19): siRNA sense strand
acagaaggcaccaagauca

SEQ ID NO: 290202 - RNA, 19 nt, Homo sapiens
  misc_RNA (1)...(19): siRNA sense strand
ugauuaugcuuacaaugca

SEQ ID NO: 290203 - RNA, 19 nt, Homo sapiens
  misc_RNA (1)...(19): siRNA sense strand
uuaagcggaugaagagauc

SEQ ID NO: 290204 - RNA, 19 nt, Homo sapiens
  misc_RNA (1)...(19): siRNA sense strand
cuuacaacaugcauuauac

SEQ ID NO: 290205 - RNA, 19 nt, Homo sapiens
  misc_RNA (1)...(19): siRNA sense strand
ggaugaagagaucugugaa

SEQ ID NO: 290206 - RNA, 19 nt, Homo sapiens
  misc_RNA (1)...(19): siRNA sense strand
aaauuaagcggaugaagag

SEQ ID NO: 290207 - RNA, 19 nt, Homo sapiens
  misc_RNA (1)...(19): siRNA sense strand
auggagaguuucaauacuu

SEQ ID NO: 290208 - RNA, 19 nt, Homo sapiens
  misc_RNA (1)...(19): siRNA sense strand
gccggaugcacuaagaaua

SEQ ID NO: 290209 - RNA, 19 nt, Homo sapiens
  misc_RNA (1)...(19): siRNA sense strand
cuaagagaaaucugaguga

SEQ ID NO: 290210 - RNA, 19 nt, Homo sapiens
  misc_RNA (1)...(19): siRNA sense strand
gaagaaguggaaacaucug

SEQ ID NO: 290211 - RNA, 19 nt, Homo sapiens
  misc_RNA (1)...(19): siRNA sense strand
gcuucaaacauacguagaa

SEQ ID NO: 290212 - RNA, 19 nt, Homo sapiens
  misc_RNA (1)...(19): siRNA sense strand
ccggaugcacuaagaauau

SEQ ID NO: 290213 - RNA, 19 nt, Homo sapiens
  misc_RNA (1)...(19): siRNA sense strand
gacagaaggcaccaagauc

SEQ ID NO: 290214 - RNA, 19 nt, Homo sapiens
  misc_RNA (1)...(19): siRNA sense strand
gauuaaaauuccuggaguu

SEQ ID NO: 290215 - RNA, 19 nt, Homo sapiens
  misc_RNA (1)...(19): siRNA sense strand
augaagaaguggaaacauc

SEQ ID NO: 290216 - RNA, 19 nt, Homo sapiens
  misc_RNA (1)...(19): siRNA sense strand
gaaaagaagauggaauugu

SEQ ID NO: 290217 - RNA, 19 nt, Homo sapiens
  misc_RNA (1)...(19): siRNA sense strand
uugcguggguucaagaaga

SEQ ID NO: 290218 - RNA, 19 nt, Homo sapiens
  misc_RNA (1)...(19): siRNA sense strand
agaagaacaccguaaacug

SEQ ID NO: 290219 - RNA, 19 nt, Homo sapiens
  misc_RNA (1)...(19): siRNA sense strand
agacagaaggcaccaagau

SEQ ID NO: 290220 - RNA, 19 nt, Homo sapiens
  misc_RNA (1)...(19): siRNA sense strand
caccaauuaugcauaugau

SEQ ID NO: 290221 - RNA, 19 nt, Homo sapiens
  misc_RNA (1)...(19): siRNA sense strand
uggaagcucggaagugaaa

SEQ ID NO: 290222 - RNA, 19 nt, Homo sapiens
  misc_RNA (1)...(19): siRNA sense strand
uaaaauuccuggaguuugg

SEQ ID NO: 290223 - RNA, 19 nt, Homo sapiens
  misc_RNA (1)...(19): siRNA sense strand
agacaucugcaaauauuuc

SEQ ID NO: 290224 - RNA, 19 nt, Homo sapiens
  misc_RNA (1)...(19): siRNA sense strand
auguagaaaugcuggaauu

SEQ ID NO: 290225 - RNA, 19 nt, Homo sapiens
  misc_RNA (1)...(19): siRNA sense strand
uguagauauuuccgguaua

SEQ ID NO: 290226 - RNA, 19 nt, Homo sapiens
  misc_RNA (1)...(19): siRNA sense strand
uaacugcuuggaaauacuu

SEQ ID NO: 290227 - RNA, 19 nt, Homo sapiens
  misc_RNA (1)...(19): siRNA sense strand
augcccauaucuacuuaua

SEQ ID NO: 290228 - RNA, 19 nt, Homo sapiens
  misc_RNA (1)...(19): siRNA sense strand
cuccuuacaacaugcauua

SEQ ID NO: 290229 - RNA, 19 nt, Homo sapiens
  misc_RNA (1)...(19): siRNA sense strand
caaagcuugauaaggauga

SEQ ID NO: 290230 - RNA, 19 nt, Homo sapiens
  misc_RNA (1)...(19): siRNA sense strand
cggaugaagagaucuguga

SEQ ID NO: 290231 - RNA, 19 nt, Homo sapiens
  misc_RNA (1)...(19): siRNA sense strand
cagaaggcaccaagaucaa

SEQ ID NO: 290232 - RNA, 19 nt, Homo sapiens
  misc_RNA (1)...(19): siRNA sense strand
aagaucuccuuacaacaug

SEQ ID NO: 290233 - RNA, 19 nt, Homo sapiens
  misc_RNA (1)...(19): siRNA sense strand
gaagacaucugcaaauauu

SEQ ID NO: 290234 - RNA, 19 nt, Homo sapiens
  misc_RNA (1)...(19): siRNA sense strand
gaauauaacugcuuggaaa

SEQ ID NO: 290235 - RNA, 19 nt, Homo sapiens
  misc_RNA (1)...(19): siRNA sense strand
gguauuauuuggagucuua

SEQ ID NO: 290236 - RNA, 19 nt, Homo sapiens
  misc_RNA (1)...(19): siRNA sense strand
gaaggaagauacagcuuug

SEQ ID NO: 290237 - RNA, 19 nt, Homo sapiens
  misc_RNA (1)...(19): siRNA sense strand
gcaaauauuucugcauuga

SEQ ID NO: 290238 - RNA, 19 nt, Homo sapiens
  misc_RNA (1)...(19): siRNA sense strand
ggaaauacuuggcaaaaua

SEQ ID NO: 290239 - RNA, 19 nt, Homo sapiens
  misc_RNA (1)...(19): siRNA sense strand
gaagaguuauguagaaaug

SEQ ID NO: 290240 - RNA, 19 nt, Homo sapiens
  misc_RNA (1)...(19): siRNA sense strand
ggaauuccauacauuacuu

SEQ ID NO: 290241 - RNA, 19 nt, Homo sapiens
  misc_RNA (1)...(19): siRNA sense strand
aagagguacucaccaauua

SEQ ID NO: 290242 - RNA, 19 nt, Homo sapiens
  misc_RNA (1)...(19): siRNA sense strand
uauuauaccuggucugaaa

SEQ ID NO: 290243 - RNA, 19 nt, Homo sapiens
  misc_RNA (1)...(19): siRNA sense strand
uggaagacaucugcaaaua

SEQ ID NO: 290244 - RNA, 19 nt, Homo sapiens
  misc_RNA (1)...(19): siRNA sense strand
ggaaggaagauacagcuuu

SEQ ID NO: 290245 - RNA, 19 nt, Homo sapiens
  misc_RNA (1)...(19): siRNA sense strand
ggaaaagguuguagauauu

SEQ ID NO: 290246 - RNA, 19 nt, Homo sapiens
  misc_RNA (1)...(19): siRNA sense strand
cauuauaccuucugcauca

SEQ ID NO: 290247 - RNA, 19 nt, Homo sapiens
  misc_RNA (1)...(19): siRNA sense strand
uuaaagaucuccuuacaac

SEQ ID NO: 290248 - RNA, 19 nt, Homo sapiens
  misc_RNA (1)...(19): siRNA sense strand
gcccauaucuacuuauaca

SEQ ID NO: 290249 - RNA, 19 nt, Homo sapiens
  misc_RNA (1)...(19): siRNA sense strand
ggaagacaucugcaaauau

SEQ ID NO: 290250 - RNA, 19 nt, Homo sapiens
  misc_RNA (1)...(19): siRNA sense strand
aaagcaagaucaccaaauc

SEQ ID NO: 290251 - RNA, 19 nt, Homo sapiens
  misc_RNA (1)...(19): siRNA sense strand
caagagguacucaccaauu

SEQ ID NO: 290252 - RNA, 19 nt, Homo sapiens
  misc_RNA (1)...(19): siRNA sense strand
uguaccaucucauaaauug

SEQ ID NO: 290253 - RNA, 19 nt, Homo sapiens
  misc_RNA (1)...(19): siRNA sense strand
ccaauuaugcauaugauga

SEQ ID NO: 290254 - RNA, 19 nt, Homo sapiens
  misc_RNA (1)...(19): siRNA sense strand
auauuggcgucaugaauua

SEQ ID NO: 290255 - RNA, 19 nt, Homo sapiens
  misc_RNA (1)...(19): siRNA sense strand
gugaagaguuauguagaaa

SEQ ID NO: 290256 - RNA, 19 nt, Homo sapiens
  misc_RNA (1)...(19): siRNA sense strand
caaaugcccauaucuacuu

SEQ ID NO: 290257 - RNA, 19 nt, Homo sapiens
  misc_RNA (1)...(19): siRNA sense strand
gauuguaccaucucauaaa

SEQ ID NO: 290258 - RNA, 19 nt, Homo sapiens
  misc_RNA (1)...(19): siRNA sense strand
ugugaagaguuauguagaa

SEQ ID NO: 290259 - RNA, 19 nt, Homo sapiens
  misc_RNA (1)...(19): siRNA sense strand
cggaugcacuaagaauaua

SEQ ID NO: 290260 - RNA, 19 nt, Homo sapiens
  misc_RNA (1)...(19): siRNA sense strand
ggaugauuaugcuuacaau

SEQ ID NO: 290261 - RNA, 19 nt, Homo sapiens
  misc_RNA (1)...(19): siRNA sense strand
gaugaagagaucugugaaa

SEQ ID NO: 290262 - RNA, 19 nt, Homo sapiens
  misc_RNA (1)...(19): siRNA sense strand
aaaugcccauaucuacuua

SEQ ID NO: 290263 - RNA, 19 nt, Homo sapiens
  misc_RNA (1)...(19): siRNA sense strand
agauggagcccaagaggua

SEQ ID NO: 290264 - RNA, 19 nt, Homo sapiens
  misc_RNA (1)...(19): siRNA sense strand
gaagauggaauugucaaag

SEQ ID NO: 290265 - RNA, 19 nt, Homo sapiens
  misc_RNA (1)...(19): siRNA sense strand
gaaaugcuggaauucuaug

SEQ ID NO: 290266 - RNA, 19 nt, Homo sapiens
  misc_RNA (1)...(19): siRNA sense strand
aauauuggcgucaugaauu

SEQ ID NO: 290267 - RNA, 19 nt, Homo sapiens
  misc_RNA (1)...(19): siRNA sense strand
aaagaucuccuuacaacau

SEQ ID NO: 290268 - RNA, 19 nt, Homo sapiens
  misc_RNA (1)...(19): siRNA sense strand
gaugcuaagagaaaucuga

SEQ ID NO: 290269 - RNA, 19 nt, Homo sapiens
  misc_RNA (1)...(19): siRNA sense strand
gagguacucaccaauuaug

SEQ ID NO: 290270 - RNA, 19 nt, Homo sapiens
  misc_RNA (1)...(19): siRNA sense strand
caucauggaaugcuuaaag

SEQ ID NO: 290271 - RNA, 19 nt, Homo sapiens
  misc_RNA (1)...(19): siRNA sense strand
uguggcugguuuacuguua

SEQ ID NO: 290272 - RNA, 19 nt, Homo sapiens
  misc_RNA (1)...(19): siRNA sense strand
gguuggagguauuauuugg

SEQ ID NO: 290273 - RNA, 19 nt, Homo sapiens
  misc_RNA (1)...(19): siRNA sense strand
gcuggaagacaucugcaaa

SEQ ID NO: 290274 - RNA, 19 nt, Homo sapiens
  misc_RNA (1)...(19): siRNA sense strand
ccuuacaacaugcauuaua

SEQ ID NO: 290275 - RNA, 19 nt, Homo sapiens
  misc_RNA (1)...(19): siRNA sense strand
uauaacugcuuggaaauac

SEQ ID NO: 290276 - RNA, 19 nt, Homo sapiens
  misc_RNA (1)...(19): siRNA sense strand
cccaagagguacucaccaa

SEQ ID NO: 290277 - RNA, 19 nt, Homo sapiens
  misc_RNA (1)...(19): siRNA sense strand
aaaagaagauggaauuguc

SEQ ID NO: 290278 - RNA, 19 nt, Homo sapiens
  misc_RNA (1)...(19): siRNA sense strand
ggaugcacuaagaauauaa

SEQ ID NO: 290279 - RNA, 19 nt, Homo sapiens
  misc_RNA (1)...(19): siRNA sense strand
cauggaaugcuuaaagaug

SEQ ID NO: 290280 - RNA, 19 nt, Homo sapiens
  misc_RNA (1)...(19): siRNA sense strand
caaauccaaaugcccauau

SEQ ID NO: 290281 - RNA, 19 nt, Homo sapiens
  misc_RNA (1)...(19): siRNA sense strand
ucaccaauuaugcauauga

SEQ ID NO: 290282 - RNA, 19 nt, Homo sapiens
  misc_RNA (1)...(19): siRNA sense strand
acucaccaauuaugcauau

SEQ ID NO: 290283 - RNA, 19 nt, Homo sapiens
  misc_RNA (1)...(19): siRNA sense strand
aaccacagcuggaagacau

SEQ ID NO: 290284 - RNA, 19 nt, Homo sapiens
  misc_RNA (1)...(19): siRNA sense strand
uaaagcaagaucaccaaau

SEQ ID NO: 290285 - RNA, 19 nt, Homo sapiens
  misc_RNA (1)...(19): siRNA sense strand
aggaaaagguuguagauau

SEQ ID NO: 290286 - RNA, 19 nt, Homo sapiens
  misc_RNA (1)...(19): siRNA sense strand
acagaaggcaccaagauca

SEQ ID NO: 290287 - RNA, 19 nt, Homo sapiens
  misc_RNA (1)...(19): siRNA sense strand
ugauuaugcuuacaaugca

SEQ ID NO: 290288 - RNA, 19 nt, Homo sapiens
  misc_RNA (1)...(19): siRNA sense strand
uuaagcggaugaagagauc

SEQ ID NO: 290289 - RNA, 19 nt, Homo sapiens
  misc_RNA (1)...(19): siRNA sense strand
cuuacaacaugcauuauac

SEQ ID NO: 290290 - RNA, 19 nt, Homo sapiens
  misc_RNA (1)...(19): siRNA sense strand
ggaugaagagaucugugaa

SEQ ID NO: 290291 - RNA, 19 nt, Homo sapiens
  misc_RNA (1)...(19): siRNA sense strand
aaauuaagcggaugaagag

SEQ ID NO: 290292 - RNA, 19 nt, Homo sapiens
  misc_RNA (1)...(19): siRNA sense strand
gccggaugcacuaagaaua

SEQ ID NO: 290293 - RNA, 19 nt, Homo sapiens
  misc_RNA (1)...(19): siRNA sense strand
gauuaaaauuccuggaguu

SEQ ID NO: 290294 - RNA, 19 nt, Homo sapiens
  misc_RNA (1)...(19): siRNA sense strand
cuaagagaaaucugaguga

SEQ ID NO: 290295 - RNA, 19 nt, Homo sapiens
  misc_RNA (1)...(19): siRNA sense strand
ccggaugcacuaagaauau

SEQ ID NO: 290296 - RNA, 19 nt, Homo sapiens
  misc_RNA (1)...(19): siRNA sense strand
gacagaaggcaccaagauc

SEQ ID NO: 290297 - RNA, 19 nt, Homo sapiens
  misc_RNA (1)...(19): siRNA sense strand
gaaaagaagauggaauugu

SEQ ID NO: 290298 - RNA, 19 nt, Homo sapiens
  misc_RNA (1)...(19): siRNA sense strand
uugcguggguucaagaaga

SEQ ID NO: 290299 - RNA, 19 nt, Homo sapiens
  misc_RNA (1)...(19): siRNA sense strand
agaagaacaccguaaacug

SEQ ID NO: 290300 - RNA, 19 nt, Homo sapiens
  misc_RNA (1)...(19): siRNA sense strand
agacagaaggcaccaagau

SEQ ID NO: 290301 - RNA, 19 nt, Homo sapiens
  misc_RNA (1)...(19): siRNA sense strand
caccaauuaugcauaugau

SEQ ID NO: 290302 - RNA, 19 nt, Homo sapiens
  misc_RNA (1)...(19): siRNA sense strand
uaaaauuccuggaguuugg

SEQ ID NO: 290303 - RNA, 19 nt, Homo sapiens
  misc_RNA (1)...(19): siRNA sense strand
agacaucugcaaauauuuc

SEQ ID NO: 290304 - RNA, 19 nt, Homo sapiens
  misc_RNA (1)...(19): siRNA sense strand
auguagaaaugcuggaauu

SEQ ID NO: 290305 - RNA, 19 nt, Homo sapiens
  misc_RNA (1)...(19): siRNA sense strand
uguagauauuuccgguaua

SEQ ID NO: 290306 - RNA, 19 nt, Homo sapiens
  misc_RNA (1)...(19): siRNA sense strand
uaacugcuuggaaauacuu

SEQ ID NO: 290307 - RNA, 19 nt, Homo sapiens
  misc_RNA (1)...(19): siRNA sense strand
cuccuuacaacaugcauua

SEQ ID NO: 290308 - RNA, 19 nt, Homo sapiens
  misc_RNA (1)...(19): siRNA sense strand
augcccauaucuacuuaua

SEQ ID NO: 290309 - RNA, 19 nt, Homo sapiens
  misc_RNA (1)...(19): siRNA sense strand
caaagcuugauaaggauga

SEQ ID NO: 290310 - RNA, 19 nt, Homo sapiens
  misc_RNA (1)...(19): siRNA sense strand
cggaugaagagaucuguga

SEQ ID NO: 290311 - RNA, 19 nt, Homo sapiens
  misc_RNA (1)...(19): siRNA sense strand
aagaucuccuuacaacaug

SEQ ID NO: 290312 - RNA, 19 nt, Homo sapiens
  misc_RNA (1)...(19): siRNA sense strand
cagaaggcaccaagaucaa

SEQ ID NO: 290313 - RNA, 19 nt, Homo sapiens
  misc_RNA (1)...(19): siRNA sense strand
ugagugaggcagagacaug

SEQ ID NO: 290314 - RNA, 19 nt, Homo sapiens
  misc_RNA (1)...(19): siRNA sense strand
gauggaauugucaaagcuu

SEQ ID NO: 290315 - RNA, 19 nt, Homo sapiens
  misc_RNA (1)...(19): siRNA sense strand
uuguagauauuuccgguau

SEQ ID NO: 290316 - RNA, 19 nt, Homo sapiens
  misc_RNA (1)...(19): siRNA sense strand
cugguuuacuguuaggaaa

SEQ ID NO: 290317 - RNA, 19 nt, Homo sapiens
  misc_RNA (1)...(19): siRNA sense strand
aaauauuggcgucaugaau

SEQ ID NO: 290318 - RNA, 19 nt, Homo sapiens
  misc_RNA (1)...(19): siRNA sense strand
aaagugauuggaaggaaga

SEQ ID NO: 290319 - RNA, 19 nt, Homo sapiens
  misc_RNA (1)...(19): siRNA sense strand
gaaggcaccaagaucaaaa

SEQ ID NO: 290320 - RNA, 19 nt, Homo sapiens
  misc_RNA (1)...(19): siRNA sense strand
aaagaagauggaauuguca

SEQ ID NO: 290321 - RNA, 19 nt, Homo sapiens
  misc_RNA (1)...(19): siRNA sense strand
ccaaaugcccauaucuacu

SEQ ID NO: 290322 - RNA, 19 nt, Homo sapiens
  misc_RNA (1)...(19): siRNA sense strand
gaugauuaugcuuacaaug

SEQ ID NO: 290323 - RNA, 19 nt, Homo sapiens
  misc_RNA (1)...(19): siRNA sense strand
aaaauuaagcggaugaaga

SEQ ID NO: 290324 - RNA, 19 nt, Homo sapiens
  misc_RNA (1)...(19): siRNA sense strand
agaauauaacugcuuggaa

SEQ ID NO: 290325 - RNA, 19 nt, Homo sapiens
  misc_RNA (1)...(19): siRNA sense strand
gagacagaaggcaccaaga

SEQ ID NO: 290326 - RNA, 19 nt, Homo sapiens
  misc_RNA (1)...(19): siRNA sense strand
ucaaauccaaaugcccaua

SEQ ID NO: 290327 - RNA, 19 nt, Homo sapiens
  misc_RNA (1)...(19): siRNA sense strand
guacucaccaauuaugcau

SEQ ID NO: 290328 - RNA, 19 nt, Homo sapiens
  misc_RNA (1)...(19): siRNA sense strand
aagauggaauugucaaagc

SEQ ID NO: 290329 - RNA, 19 nt, Homo sapiens
  misc_RNA (1)...(19): siRNA sense strand
gcaguagcccaggaugugu

SEQ ID NO: 290330 - RNA, 19 nt, Homo sapiens
  misc_RNA (1)...(19): siRNA sense strand
cucauaaauugauguugga

SEQ ID NO: 290331 - RNA, 19 nt, Homo sapiens
  misc_RNA (1)...(19): siRNA sense strand
gagguauuauuuggagucu

SEQ ID NO: 290332 - RNA, 19 nt, Homo sapiens
  misc_RNA (1)...(19): siRNA sense strand
aaaagaagaacaccguaaa

SEQ ID NO: 290333 - RNA, 19 nt, Homo sapiens
  misc_RNA (1)...(19): siRNA sense strand
gaagugagcuuaguugaga

SEQ ID NO: 290334 - RNA, 19 nt, Homo sapiens
  misc_RNA (1)...(19): siRNA sense strand
acacugaucuuauuccuaa

SEQ ID NO: 290335 - RNA, 19 nt, Homo sapiens
  misc_RNA (1)...(19): siRNA sense strand
gauaagccaugguuugauu

SEQ ID NO: 290336 - RNA, 19 nt, Homo sapiens
  misc_RNA (1)...(19): siRNA sense strand
agaaagugguaccaaauua

SEQ ID NO: 290337 - RNA, 19 nt, Homo sapiens
  misc_RNA (1)...(19): siRNA sense strand
gccaaucacugcugacuaa

SEQ ID NO: 290338 - RNA, 19 nt, Homo sapiens
  misc_RNA (1)...(19): siRNA sense strand
gaaggaaaccuacgguauu

SEQ ID NO: 290339 - RNA, 19 nt, Homo sapiens
  misc_RNA (1)...(19): siRNA sense strand
guacacaugugacaaccua

SEQ ID NO: 290340 - RNA, 19 nt, Homo sapiens
  misc_RNA (1)...(19): siRNA sense strand
caaccucccugaugaaaug

SEQ ID NO: 290341 - RNA, 19 nt, Homo sapiens
  misc_RNA (1)...(19): siRNA sense strand
gagcuuaguugagaagaaa

SEQ ID NO: 290342 - RNA, 19 nt, Homo sapiens
  misc_RNA (1)...(19): siRNA sense strand
gcaagcaggcauauuguaa

SEQ ID NO: 290343 - RNA, 19 nt, Homo sapiens
  misc_RNA (1)...(19): siRNA sense strand
gaagaaagcuuuugaugag

SEQ ID NO: 290344 - RNA, 19 nt, Homo sapiens
  misc_RNA (1)...(19): siRNA sense strand
gaaaucaagauccaagaaa

SEQ ID NO: 290345 - RNA, 19 nt, Homo sapiens
  misc_RNA (1)...(19): siRNA sense strand
aaggaaaccuacgguauua

SEQ ID NO: 290346 - RNA, 19 nt, Homo sapiens
  misc_RNA (1)...(19): siRNA sense strand
aaagaacgcuguacucagu

SEQ ID NO: 290347 - RNA, 19 nt, Homo sapiens
  misc_RNA (1)...(19): siRNA sense strand
gaccauauuccuuacauaa

SEQ ID NO: 290348 - RNA, 19 nt, Homo sapiens
  misc_RNA (1)...(19): siRNA sense strand
cagcaaagcaucacaauca

SEQ ID NO: 290349 - RNA, 19 nt, Homo sapiens
  misc_RNA (1)...(19): siRNA sense strand
gaugucagcuguccuccuu

SEQ ID NO: 290350 - RNA, 19 nt, Homo sapiens
  misc_RNA (1)...(19): siRNA sense strand
gagaaaugguggugaaucu

SEQ ID NO: 290351 - RNA, 19 nt, Homo sapiens
  misc_RNA (1)...(19): siRNA sense strand
cgacaaaccaguagcauau

SEQ ID NO: 290352 - RNA, 19 nt, Homo sapiens
  misc_RNA (1)...(19): siRNA sense strand
ggaccauauuccuuacaua

SEQ ID NO: 290353 - RNA, 19 nt, Homo sapiens
  misc_RNA (1)...(19): siRNA sense strand
gcagagagaagcaauaaca

SEQ ID NO: 290354 - RNA, 19 nt, Homo sapiens
  misc_RNA (1)...(19): siRNA sense strand
ucaacaagcagaagccuua

SEQ ID NO: 290355 - RNA, 19 nt, Homo sapiens
  misc_RNA (1)...(19): siRNA sense strand
agacuucccuucuccauga

SEQ ID NO: 290356 - RNA, 19 nt, Homo sapiens
  misc_RNA (1)...(19): siRNA sense strand
gaaagugguaccaaauuau

SEQ ID NO: 290357 - RNA, 19 nt, Homo sapiens
  misc_RNA (1)...(19): siRNA sense strand
caauaacacuuucagaucu

SEQ ID NO: 290358 - RNA, 19 nt, Homo sapiens
  misc_RNA (1)...(19): siRNA sense strand
gcaauaacacuuucagauc

SEQ ID NO: 290359 - RNA, 19 nt, Homo sapiens
  misc_RNA (1)...(19): siRNA sense strand
gaaagugagacgacauuga

SEQ ID NO: 290360 - RNA, 19 nt, Homo sapiens
  misc_RNA (1)...(19): siRNA sense strand
gaagaagugagcuuaguug

SEQ ID NO: 290361 - RNA, 19 nt, Homo sapiens
  misc_RNA (1)...(19): siRNA sense strand
aaagagaaaugguggugaa

SEQ ID NO: 290362 - RNA, 19 nt, Homo sapiens
  misc_RNA (1)...(19): siRNA sense strand
gaagucaaccucccugaug

SEQ ID NO: 290363 - RNA, 19 nt, Homo sapiens
  misc_RNA (1)...(19): siRNA sense strand
gacaaccuaugaagaauca

SEQ ID NO: 290364 - RNA, 19 nt, Homo sapiens
  misc_RNA (1)...(19): siRNA sense strand
acaaaccaguagcauauaa

SEQ ID NO: 290365 - RNA, 19 nt, Homo sapiens
  misc_RNA (1)...(19): siRNA sense strand
ggaaggaaaccuacgguau

SEQ ID NO: 290366 - RNA, 19 nt, Homo sapiens
  misc_RNA (1)...(19): siRNA sense strand
gaaagagaaaggccaauca

SEQ ID NO: 290367 - RNA, 19 nt, Homo sapiens
  misc_RNA (1)...(19): siRNA sense strand
gguaccaaauuaugaagaa

SEQ ID NO: 290368 - RNA, 19 nt, Homo sapiens
  misc_RNA (1)...(19): siRNA sense strand
gagaagcaauaacacuuuc

SEQ ID NO: 290369 - RNA, 19 nt, Homo sapiens
  misc_RNA (1)...(19): siRNA sense strand
gaagaggacacugauagaa

SEQ ID NO: 290370 - RNA, 19 nt, Homo sapiens
  misc_RNA (1)...(19): siRNA sense strand
ggacugaagaggacacuga

SEQ ID NO: 290371 - RNA, 19 nt, Homo sapiens
  misc_RNA (1)...(19): siRNA sense strand
aaacugcucuuucuauugg

SEQ ID NO: 290372 - RNA, 19 nt, Homo sapiens
  misc_RNA (1)...(19): siRNA sense strand
gaugaaaugcauagcuuaa

SEQ ID NO: 290373 - RNA, 19 nt, Homo sapiens
  misc_RNA (1)...(19): siRNA sense strand
gugaagguuuccaguauau

SEQ ID NO: 290374 - RNA, 19 nt, Homo sapiens
  misc_RNA (1)...(19): siRNA sense strand
gaauaaagacuucccuucu

SEQ ID NO: 290375 - RNA, 19 nt, Homo sapiens
  misc_RNA (1)...(19): siRNA sense strand
gguggugaaucuacagaaa

SEQ ID NO: 290376 - RNA, 19 nt, Homo sapiens
  misc_RNA (1)...(19): siRNA sense strand
ggaguaggcccagaguuaa

SEQ ID NO: 290377 - RNA, 19 nt, Homo sapiens
  misc_RNA (1)...(19): siRNA sense strand
caaagcaucacaaucagaa

SEQ ID NO: 290378 - RNA, 19 nt, Homo sapiens
  misc_RNA (1)...(19): siRNA sense strand
guaagaacccaguuuauac

SEQ ID NO: 290379 - RNA, 19 nt, Homo sapiens
  misc_RNA (1)...(19): siRNA sense strand
gaagguuuccaguauauuc

SEQ ID NO: 290380 - RNA, 19 nt, Homo sapiens
  misc_RNA (1)...(19): siRNA sense strand
gaaauucugcagaugcuau

SEQ ID NO: 290381 - RNA, 19 nt, Homo sapiens
  misc_RNA (1)...(19): siRNA sense strand
ggaaaccuacgguauuaga

SEQ ID NO: 290382 - RNA, 19 nt, Homo sapiens
  misc_RNA (1)...(19): siRNA sense strand
uggaguaggcccagaguua

SEQ ID NO: 290383 - RNA, 19 nt, Homo sapiens
  misc_RNA (1)...(19): siRNA sense strand
aaucacugcugacuaagaa

SEQ ID NO: 290384 - RNA, 19 nt, Homo sapiens
  misc_RNA (1)...(19): siRNA sense strand
gagagaagcaauaacacuu

SEQ ID NO: 290385 - RNA, 19 nt, Homo sapiens
  misc_RNA (1)...(19): siRNA sense strand
uguaagaacccaguuuaua

SEQ ID NO: 290386 - RNA, 19 nt, Homo sapiens
  misc_RNA (1)...(19): siRNA sense strand
agagagauaucaggaaguu

SEQ ID NO: 290387 - RNA, 19 nt, Homo sapiens
  misc_RNA (1)...(19): siRNA sense strand
agaggaaucuuugguauag

SEQ ID NO: 290388 - RNA, 19 nt, Homo sapiens
  misc_RNA (1)...(19): siRNA sense strand
agccugagcugcuaaguga

SEQ ID NO: 290389 - RNA, 19 nt, Homo sapiens
  misc_RNA (1)...(19): siRNA sense strand
gaaaugcauagcuuaacuu

SEQ ID NO: 290390 - RNA, 19 nt, Homo sapiens
  misc_RNA (1)...(19): siRNA sense strand
gugugaagguuuccaguau

SEQ ID NO: 290391 - RNA, 19 nt, Homo sapiens
  misc_RNA (1)...(19): siRNA sense strand
cugaugaaggcaaauauua

SEQ ID NO: 290392 - RNA, 19 nt, Homo sapiens
  misc_RNA (1)...(19): siRNA sense strand
acacuugccuucuguuauc

SEQ ID NO: 290393 - RNA, 19 nt, Homo sapiens
  misc_RNA (1)...(19): siRNA sense strand
gcaggcauauuguaagaac

SEQ ID NO: 290394 - RNA, 19 nt, Homo sapiens
  misc_RNA (1)...(19): siRNA sense strand
gauaucaggaaguuacaaa

SEQ ID NO: 290395 - RNA, 19 nt, Homo sapiens
  misc_RNA (1)...(19): siRNA sense strand
agaaagaaaucaagaucca

SEQ ID NO: 290396 - RNA, 19 nt, Homo sapiens
  misc_RNA (1)...(19): siRNA sense strand
aaagauaagccaugguuug

SEQ ID NO: 290397 - RNA, 19 nt, Homo sapiens
  misc_RNA (1)...(19): siRNA sense strand
ugugaagguuuccaguaua

SEQ ID NO: 290398 - RNA, 19 nt, Homo sapiens
  misc_RNA (1)...(19): siRNA sense strand
ccacaauguuacagagaga

SEQ ID NO: 290399 - RNA, 19 nt, Homo sapiens
  misc_RNA (1)...(19): siRNA sense strand
uauauuggcuuaguacaca

SEQ ID NO: 290400 - RNA, 19 nt, Homo sapiens
  misc_RNA (1)...(19): siRNA sense strand
acagaggaaucuuugguau

SEQ ID NO: 290401 - RNA, 19 nt, Homo sapiens
  misc_RNA (1)...(19): siRNA sense strand
gacagaggaaucuuuggua

SEQ ID NO: 290402 - RNA, 19 nt, Homo sapiens
  misc_RNA (1)...(19): siRNA sense strand
aagcagaagccuuaaagaa

SEQ ID NO: 290403 - RNA, 19 nt, Homo sapiens
  misc_RNA (1)...(19): siRNA sense strand
gaaaugguggugaaucuac

SEQ ID NO: 290404 - RNA, 19 nt, Homo sapiens
  misc_RNA (1)...(19): siRNA sense strand
cagaaagugguaccaaauu

SEQ ID NO: 290405 - RNA, 19 nt, Homo sapiens
  misc_RNA (1)...(19): siRNA sense strand
gcaaagcaucacaaucaga

SEQ ID NO: 290406 - RNA, 19 nt, Homo sapiens
  misc_RNA (1)...(19): siRNA sense strand
ucagugugcugcugucuca

SEQ ID NO: 290407 - RNA, 19 nt, Homo sapiens
  misc_RNA (1)...(19): siRNA sense strand
gcccagaguuaaagaacga

SEQ ID NO: 290408 - RNA, 19 nt, Homo sapiens
  misc_RNA (1)...(19): siRNA sense strand
aagcaggcauauuguaaga

SEQ ID NO: 290409 - RNA, 19 nt, Homo sapiens
  misc_RNA (1)...(19): siRNA sense strand
ccacucuacuacucauuug

SEQ ID NO: 290410 - RNA, 19 nt, Homo sapiens
  misc_RNA (1)...(19): siRNA sense strand
guuacaaacacugaucuua

SEQ ID NO: 290411 - RNA, 19 nt, Homo sapiens
  misc_RNA (1)...(19): siRNA sense strand
cagaggaaucuuugguaua

SEQ ID NO: 290412 - RNA, 19 nt, Homo sapiens
  misc_RNA (1)...(19): siRNA sense strand
gaaaccuacgguauuagaa

SEQ ID NO: 290413 - RNA, 19 nt, Homo sapiens
  misc_RNA (1)...(19): siRNA sense strand
uguuaucuguccuuacuuu

SEQ ID NO: 290414 - RNA, 19 nt, Homo sapiens
  misc_RNA (1)...(19): siRNA sense strand
gcacacuggucgagucaac

SEQ ID NO: 290415 - RNA, 19 nt, Homo sapiens
  misc_RNA (1)...(19): siRNA sense strand
uaacuugccacgugguaaa

SEQ ID NO: 290416 - RNA, 19 nt, Homo sapiens
  misc_RNA (1)...(19): siRNA sense strand
ugaaaugcauagcuuaacu

SEQ ID NO: 290417 - RNA, 19 nt, Homo sapiens
  misc_RNA (1)...(19): siRNA sense strand
gaaguuacaaacacugauc

SEQ ID NO: 290418 - RNA, 19 nt, Homo sapiens
  misc_RNA (1)...(19): siRNA sense strand
uacuaaaucucuucuccuu

SEQ ID NO: 290419 - RNA, 19 nt, Homo sapiens
  misc_RNA (1)...(19): siRNA sense strand
caaccuaugaagaaucaaa

SEQ ID NO: 290420 - RNA, 19 nt, Homo sapiens
  misc_RNA (1)...(19): siRNA sense strand
cgaggagucggaagaguuu

SEQ ID NO: 290421 - RNA, 19 nt, Homo sapiens
  misc_RNA (1)...(19): siRNA sense strand
agaagggaaucgugaagau

SEQ ID NO: 290422 - RNA, 19 nt, Homo sapiens
  misc_RNA (1)...(19): siRNA sense strand
gaagagcaagcaggcauau

SEQ ID NO: 290423 - RNA, 19 nt, Homo sapiens
  misc_RNA (1)...(19): siRNA sense strand
aaaucaagauccaagaaag

SEQ ID NO: 290424 - RNA, 19 nt, Homo sapiens
  misc_RNA (1)...(19): siRNA sense strand
caaaccaguagcauauaaa

SEQ ID NO: 290425 - RNA, 19 nt, Homo sapiens
  misc_RNA (1)...(19): siRNA sense strand
ucugacauuugauccuaua

SEQ ID NO: 290426 - RNA, 19 nt, Homo sapiens
  misc_RNA (1)...(19): siRNA sense strand
agagcaagcaggcauauug

SEQ ID NO: 290427 - RNA, 19 nt, Homo sapiens
  misc_RNA (1)...(19): siRNA sense strand
gaaagaaaucaagauccaa

SEQ ID NO: 290428 - RNA, 19 nt, Homo sapiens
  misc_RNA (1)...(19): siRNA sense strand
gacaaaccaguagcauaua

SEQ ID NO: 290429 - RNA, 19 nt, Homo sapiens
  misc_RNA (1)...(19): siRNA sense strand
gaagggaaucgugaagaug

SEQ ID NO: 290430 - RNA, 19 nt, Homo sapiens
  misc_RNA (1)...(19): siRNA sense strand
ucuauuggaugacaguuuc

SEQ ID NO: 290431 - RNA, 19 nt, Homo sapiens
  misc_RNA (1)...(19): siRNA sense strand
gaaugggagaaguggauuu

SEQ ID NO: 290432 - RNA, 19 nt, Homo sapiens
  misc_RNA (1)...(19): siRNA sense strand
ccagaacagaugaaauuau

SEQ ID NO: 290433 - RNA, 19 nt, Homo sapiens
  misc_RNA (1)...(19): siRNA sense strand
ccaguucucucucuaccua

SEQ ID NO: 290434 - RNA, 19 nt, Homo sapiens
  misc_RNA (1)...(19): siRNA sense strand
ggaagcugaugcuggagaa

SEQ ID NO: 290435 - RNA, 19 nt, Homo sapiens
  misc_RNA (1)...(19): siRNA sense strand
ugaagaugcuggacacuca

SEQ ID NO: 290436 - RNA, 19 nt, Homo sapiens
  misc_RNA (1)...(19): siRNA sense strand
gcacuaagaagaagacagu

SEQ ID NO: 290437 - RNA, 19 nt, Homo sapiens
  misc_RNA (1)...(19): siRNA sense strand
gcacacacccguccucucu

SEQ ID NO: 290438 - RNA, 19 nt, Homo sapiens
  misc_RNA (1)...(19): siRNA sense strand
guacccaguucucucucua

SEQ ID NO: 290439 - RNA, 19 nt, Homo sapiens
  misc_RNA (1)...(19): siRNA sense strand
gaucagccgguuccucuug

SEQ ID NO: 290440 - RNA, 19 nt, Homo sapiens
  misc_RNA (1)...(19): siRNA sense strand
gaggaugggcugcggcaaa

SEQ ID NO: 290441 - RNA, 19 nt, Homo sapiens
  misc_RNA (1)...(19): siRNA sense strand
gacaccagcuccccucaua

SEQ ID NO: 290442 - RNA, 19 nt, Homo sapiens
  misc_RNA (1)...(19): siRNA sense strand
ggaugugacugagcagauc

SEQ ID NO: 290443 - RNA, 19 nt, Homo sapiens
  misc_RNA (1)...(19): siRNA sense strand
gaaagcaccgaccauaggu

SEQ ID NO: 290444 - RNA, 19 nt, Homo sapiens
  misc_RNA (1)...(19): siRNA sense strand
agaagacaguggucagugu

SEQ ID NO: 290445 - RNA, 19 nt, Homo sapiens
  misc_RNA (1)...(19): siRNA sense strand
ucauggagacguagccuuu

SEQ ID NO: 290446 - RNA, 19 nt, Homo sapiens
  misc_RNA (1)...(19): siRNA sense strand
ggcgggagaugucuucuac

SEQ ID NO: 290447 - RNA, 19 nt, Homo sapiens
  misc_RNA (1)...(19): siRNA sense strand
gaagaagacaguggucagu

SEQ ID NO: 290448 - RNA, 19 nt, Homo sapiens
  misc_RNA (1)...(19): siRNA sense strand
ggacaggcugcauuuccaa

SEQ ID NO: 290449 - RNA, 19 nt, Homo sapiens
  misc_RNA (1)...(19): siRNA sense strand
ccugaaagcaccgaccaua

SEQ ID NO: 290450 - RNA, 19 nt, Homo sapiens
  misc_RNA (1)...(19): siRNA sense strand
gcuguggucuguugcuuuu

SEQ ID NO: 290451 - RNA, 19 nt, Homo sapiens
  misc_RNA (1)...(19): siRNA sense strand
acacacccguccucucuag

SEQ ID NO: 290452 - RNA, 19 nt, Homo sapiens
  misc_RNA (1)...(19): siRNA sense strand
ggacagcacccaccuucac

SEQ ID NO: 290453 - RNA, 19 nt, Homo sapiens
  misc_RNA (1)...(19): siRNA sense strand
gggagccgcacuaagaaga

SEQ ID NO: 290454 - RNA, 19 nt, Homo sapiens
  misc_RNA (1)...(19): siRNA sense strand
cgggagaugucuucuacca

SEQ ID NO: 290455 - RNA, 19 nt, Homo sapiens
  misc_RNA (1)...(19): siRNA sense strand
gcaccggagugaagaugcu

SEQ ID NO: 290456 - RNA, 19 nt, Homo sapiens
  misc_RNA (1)...(19): siRNA sense strand
uagaggacaagcucaguga

SEQ ID NO: 290457 - RNA, 19 nt, Homo sapiens
  misc_RNA (1)...(19): siRNA sense strand
ugaaagcaccgaccauagg

SEQ ID NO: 290458 - RNA, 19 nt, Homo sapiens
  misc_RNA (1)...(19): siRNA sense strand
ggagccgcacuaagaagaa

SEQ ID NO: 290459 - RNA, 19 nt, Homo sapiens
  misc_RNA (1)...(19): siRNA sense strand
gggaacguguccugcuuac

SEQ ID NO: 290460 - RNA, 19 nt, Homo sapiens
  misc_RNA (1)...(19): siRNA sense strand
agacaguggucagugugaa

SEQ ID NO: 290461 - RNA, 19 nt, Homo sapiens
  misc_RNA (1)...(19): siRNA sense strand
gccgguuccucuuggauca

SEQ ID NO: 290462 - RNA, 19 nt, Homo sapiens
  misc_RNA (1)...(19): siRNA sense strand
gcggagggaggaagaggaa

SEQ ID NO: 290463 - RNA, 19 nt, Homo sapiens
  misc_RNA (1)...(19): siRNA sense strand
ugccgaugcugaaguggaa

SEQ ID NO: 290464 - RNA, 19 nt, Homo sapiens
  misc_RNA (1)...(19): siRNA sense strand
agcugaugcuggagaauuu

SEQ ID NO: 290465 - RNA, 19 nt, Homo sapiens
  misc_RNA (1)...(19): siRNA sense strand
ucgacucccucccugcauu

SEQ ID NO: 290466 - RNA, 19 nt, Homo sapiens
  misc_RNA (1)...(19): siRNA sense strand
caucagagcagcggcagau

SEQ ID NO: 290467 - RNA, 19 nt, Homo sapiens
  misc_RNA (1)...(19): siRNA sense strand
ugaaggcccugcuaaaagu

SEQ ID NO: 290468 - RNA, 19 nt, Homo sapiens
  misc_RNA (1)...(19): siRNA sense strand
gagccgcacuaagaagaag

SEQ ID NO: 290469 - RNA, 19 nt, Homo sapiens
  misc_RNA (1)...(19): siRNA sense strand
agucaggccuagaggacaa

SEQ ID NO: 290470 - RNA, 19 nt, Homo sapiens
  misc_RNA (1)...(19): siRNA sense strand
cgacucccucccugcauuu

SEQ ID NO: 290471 - RNA, 19 nt, Homo sapiens
  misc_RNA (1)...(19): siRNA sense strand
gcccaggacaggcugcauu

SEQ ID NO: 290472 - RNA, 19 nt, Homo sapiens
  misc_RNA (1)...(19): siRNA sense strand
gggcuguggucuguugcuu

SEQ ID NO: 290473 - RNA, 19 nt, Homo sapiens
  misc_RNA (1)...(19): siRNA sense strand
gcucaguggccauguggau

SEQ ID NO: 290474 - RNA, 19 nt, Homo sapiens
  misc_RNA (1)...(19): siRNA sense strand
gaugggcugcggcaaaucu

SEQ ID NO: 290475 - RNA, 19 nt, Homo sapiens
  misc_RNA (1)...(19): siRNA sense strand
aggaugggcugcggcaaau

SEQ ID NO: 290476 - RNA, 19 nt, Homo sapiens
  misc_RNA (1)...(19): siRNA sense strand
guguccugcuuacccagua

SEQ ID NO: 290477 - RNA, 19 nt, Homo sapiens
  misc_RNA (1)...(19): siRNA sense strand
gcugaaggcccugcuaaaa

SEQ ID NO: 290478 - RNA, 19 nt, Homo sapiens
  misc_RNA (1)...(19): siRNA sense strand
ccaguucucucucuaccua

SEQ ID NO: 290479 - RNA, 19 nt, Homo sapiens
  misc_RNA (1)...(19): siRNA sense strand
ggaagcugaugcuggagaa

SEQ ID NO: 290480 - RNA, 19 nt, Homo sapiens
  misc_RNA (1)...(19): siRNA sense strand
ugaagaugcuggacacuca

SEQ ID NO: 290481 - RNA, 19 nt, Homo sapiens
  misc_RNA (1)...(19): siRNA sense strand
gcacuaagaagaagacagu

SEQ ID NO: 290482 - RNA, 19 nt, Homo sapiens
  misc_RNA (1)...(19): siRNA sense strand
gcacacacccguccucucu

SEQ ID NO: 290483 - RNA, 19 nt, Homo sapiens
  misc_RNA (1)...(19): siRNA sense strand
guacccaguucucucucua

SEQ ID NO: 290484 - RNA, 19 nt, Homo sapiens
  misc_RNA (1)...(19): siRNA sense strand
gaucagccgguuccucuug

SEQ ID NO: 290485 - RNA, 19 nt, Homo sapiens
  misc_RNA (1)...(19): siRNA sense strand
gaggaugggcugcggcaaa

SEQ ID NO: 290486 - RNA, 19 nt, Homo sapiens
  misc_RNA (1)...(19): siRNA sense strand
gacaccagcuccccucaua

SEQ ID NO: 290487 - RNA, 19 nt, Homo sapiens
  misc_RNA (1)...(19): siRNA sense strand
agaagacaguggucagugu

SEQ ID NO: 290488 - RNA, 19 nt, Homo sapiens
  misc_RNA (1)...(19): siRNA sense strand
gaaagcaccgaccauaggu

SEQ ID NO: 290489 - RNA, 19 nt, Homo sapiens
  misc_RNA (1)...(19): siRNA sense strand
ggaugugacugagcagauc

SEQ ID NO: 290490 - RNA, 19 nt, Homo sapiens
  misc_RNA (1)...(19): siRNA sense strand
ucauggagacguagccuuu

SEQ ID NO: 290491 - RNA, 19 nt, Homo sapiens
  misc_RNA (1)...(19): siRNA sense strand
ggcgggagaugucuucuac

SEQ ID NO: 290492 - RNA, 19 nt, Homo sapiens
  misc_RNA (1)...(19): siRNA sense strand
gaagaagacaguggucagu

SEQ ID NO: 290493 - RNA, 19 nt, Homo sapiens
  misc_RNA (1)...(19): siRNA sense strand
ggacaggcugcauuuccaa

SEQ ID NO: 290494 - RNA, 19 nt, Homo sapiens
  misc_RNA (1)...(19): siRNA sense strand
ccugaaagcaccgaccaua

SEQ ID NO: 290495 - RNA, 19 nt, Homo sapiens
  misc_RNA (1)...(19): siRNA sense strand
gcuguggucuguugcuuuu

SEQ ID NO: 290496 - RNA, 19 nt, Homo sapiens
  misc_RNA (1)...(19): siRNA sense strand
acacacccguccucucuag

SEQ ID NO: 290497 - RNA, 19 nt, Homo sapiens
  misc_RNA (1)...(19): siRNA sense strand
ggacagcacccaccuucac

SEQ ID NO: 290498 - RNA, 19 nt, Homo sapiens
  misc_RNA (1)...(19): siRNA sense strand
gggagccgcacuaagaaga

SEQ ID NO: 290499 - RNA, 19 nt, Homo sapiens
  misc_RNA (1)...(19): siRNA sense strand
cgggagaugucuucuacca

SEQ ID NO: 290500 - RNA, 19 nt, Homo sapiens
  misc_RNA (1)...(19): siRNA sense strand
gcaccggagugaagaugcu

SEQ ID NO: 290501 - RNA, 19 nt, Homo sapiens
  misc_RNA (1)...(19): siRNA sense strand
uagaggacaagcucaguga

SEQ ID NO: 290502 - RNA, 19 nt, Homo sapiens
  misc_RNA (1)...(19): siRNA sense strand
ugaaagcaccgaccauagg

SEQ ID NO: 290503 - RNA, 19 nt, Homo sapiens
  misc_RNA (1)...(19): siRNA sense strand
ggagccgcacuaagaagaa

SEQ ID NO: 290504 - RNA, 19 nt, Homo sapiens
  misc_RNA (1)...(19): siRNA sense strand
gggaacguguccugcuuac

SEQ ID NO: 290505 - RNA, 19 nt, Homo sapiens
  misc_RNA (1)...(19): siRNA sense strand
agacaguggucagugugaa

SEQ ID NO: 290506 - RNA, 19 nt, Homo sapiens
  misc_RNA (1)...(19): siRNA sense strand
gccgguuccucuuggauca

SEQ ID NO: 290507 - RNA, 19 nt, Homo sapiens
  misc_RNA (1)...(19): siRNA sense strand
gcggagggaggaagaggaa

SEQ ID NO: 290508 - RNA, 19 nt, Homo sapiens
  misc_RNA (1)...(19): siRNA sense strand
ugccgaugcugaaguggaa

SEQ ID NO: 290509 - RNA, 19 nt, Homo sapiens
  misc_RNA (1)...(19): siRNA sense strand
agcugaugcuggagaauuu

SEQ ID NO: 290510 - RNA, 19 nt, Homo sapiens
  misc_RNA (1)...(19): siRNA sense strand
ucgacucccucccugcauu

SEQ ID NO: 290511 - RNA, 19 nt, Homo sapiens
  misc_RNA (1)...(19): siRNA sense strand
caucagagcagcggcagau

SEQ ID NO: 290512 - RNA, 19 nt, Homo sapiens
  misc_RNA (1)...(19): siRNA sense strand
ugaaggcccugcuaaaagu

SEQ ID NO: 290513 - RNA, 19 nt, Homo sapiens
  misc_RNA (1)...(19): siRNA sense strand
gcccaggacaggcugcauu

SEQ ID NO: 290514 - RNA, 19 nt, Homo sapiens
  misc_RNA (1)...(19): siRNA sense strand
agucaggccuagaggacaa

SEQ ID NO: 290515 - RNA, 19 nt, Homo sapiens
  misc_RNA (1)...(19): siRNA sense strand
gagccgcacuaagaagaag

SEQ ID NO: 290516 - RNA, 19 nt, Homo sapiens
  misc_RNA (1)...(19): siRNA sense strand
cgacucccucccugcauuu

SEQ ID NO: 290517 - RNA, 19 nt, Homo sapiens
  misc_RNA (1)...(19): siRNA sense strand
gggcuguggucuguugcuu

SEQ ID NO: 290518 - RNA, 19 nt, Homo sapiens
  misc_RNA (1)...(19): siRNA sense strand
gcucaguggccauguggau

SEQ ID NO: 290519 - RNA, 19 nt, Homo sapiens
  misc_RNA (1)...(19): siRNA sense strand
gaugggcugcggcaaaucu

SEQ ID NO: 290520 - RNA, 19 nt, Homo sapiens
  misc_RNA (1)...(19): siRNA sense strand
aggaugggcugcggcaaau

SEQ ID NO: 290521 - RNA, 19 nt, Homo sapiens
  misc_RNA (1)...(19): siRNA sense strand
guguccugcuuacccagua

SEQ ID NO: 290522 - RNA, 19 nt, Homo sapiens
  misc_RNA (1)...(19): siRNA sense strand
gcugaaggcccugcuaaaa

SEQ ID NO: 290523 - RNA, 19 nt, Homo sapiens
  misc_RNA (1)...(19): siRNA sense strand
gaccagauguggacaauca

SEQ ID NO: 290524 - RNA, 19 nt, Homo sapiens
  misc_RNA (1)...(19): siRNA sense strand
ugaaagcgcugauggacaa

SEQ ID NO: 290525 - RNA, 19 nt, Homo sapiens
  misc_RNA (1)...(19): siRNA sense strand
gcccagaucugcaagcauu

SEQ ID NO: 290526 - RNA, 19 nt, Homo sapiens
  misc_RNA (1)...(19): siRNA sense strand
ccaaccaaguuuauuguaa

SEQ ID NO: 290527 - RNA, 19 nt, Homo sapiens
  misc_RNA (1)...(19): siRNA sense strand
gccgggagcuuuacuucua

SEQ ID NO: 290528 - RNA, 19 nt, Homo sapiens
  misc_RNA (1)...(19): siRNA sense strand
gcaaagggaaagagaagaa

SEQ ID NO: 290529 - RNA, 19 nt, Homo sapiens
  misc_RNA (1)...(19): siRNA sense strand
gagcaacauugaccggauu

SEQ ID NO: 290530 - RNA, 19 nt, Homo sapiens
  misc_RNA (1)...(19): siRNA sense strand
gaucugagcgacaucauca

SEQ ID NO: 290531 - RNA, 19 nt, Homo sapiens
  misc_RNA (1)...(19): siRNA sense strand
gcacaaccacuaacaacau

SEQ ID NO: 290532 - RNA, 19 nt, Homo sapiens
  misc_RNA (1)...(19): siRNA sense strand
gacuacgccuugaagcuaa

SEQ ID NO: 290533 - RNA, 19 nt, Homo sapiens
  misc_RNA (1)...(19): siRNA sense strand
gauguuaucaagacucuga

SEQ ID NO: 290534 - RNA, 19 nt, Homo sapiens
  misc_RNA (1)...(19): siRNA sense strand
ccuugaagcuaaagaaugu

SEQ ID NO: 290535 - RNA, 19 nt, Homo sapiens
  misc_RNA (1)...(19): siRNA sense strand
gagcugggacacgauguua

SEQ ID NO: 290536 - RNA, 19 nt, Homo sapiens
  misc_RNA (1)...(19): siRNA sense strand
gaaugucgagccacucuau

SEQ ID NO: 290537 - RNA, 19 nt, Homo sapiens
  misc_RNA (1)...(19): siRNA sense strand
accaagaccuucaccaaga

SEQ ID NO: 290538 - RNA, 19 nt, Homo sapiens
  misc_RNA (1)...(19): siRNA sense strand
ccacgguucaguaccuuua

SEQ ID NO: 290539 - RNA, 19 nt, Homo sapiens
  misc_RNA (1)...(19): siRNA sense strand
caaccuggcccuacucauc

SEQ ID NO: 290540 - RNA, 19 nt, Homo sapiens
  misc_RNA (1)...(19): siRNA sense strand
gggacacgauguuaucaag

SEQ ID NO: 290541 - RNA, 19 nt, Homo sapiens
  misc_RNA (1)...(19): siRNA sense strand
ugacuacgccuugaagcua

SEQ ID NO: 290542 - RNA, 19 nt, Homo sapiens
  misc_RNA (1)...(19): siRNA sense strand
ugagcgacaucaucaauac

SEQ ID NO: 290543 - RNA, 19 nt, Homo sapiens
  misc_RNA (1)...(19): siRNA sense strand
gacauugacuacgccuuga

SEQ ID NO: 290544 - RNA, 19 nt, Homo sapiens
  misc_RNA (1)...(19): siRNA sense strand
ccaaguuuauuguaauguc

SEQ ID NO: 290545 - RNA, 19 nt, Homo sapiens
  misc_RNA (1)...(19): siRNA sense strand
ggacgccuaucgggcagaa

SEQ ID NO: 290546 - RNA, 19 nt, Homo sapiens
  misc_RNA (1)...(19): siRNA sense strand
ccacggacccuggacugua

SEQ ID NO: 290547 - RNA, 19 nt, Homo sapiens
  misc_RNA (1)...(19): siRNA sense strand
gcccaccgccugacaauca

SEQ ID NO: 290548 - RNA, 19 nt, Homo sapiens
  misc_RNA (1)...(19): siRNA sense strand
ggacacgauguuaucaaga

SEQ ID NO: 290549 - RNA, 19 nt, Homo sapiens
  misc_RNA (1)...(19): siRNA sense strand
gacacgauguuaucaagac

SEQ ID NO: 290550 - RNA, 19 nt, Homo sapiens
  misc_RNA (1)...(19): siRNA sense strand
ugaaggugguggcugaauc

SEQ ID NO: 290551 - RNA, 19 nt, Homo sapiens
  misc_RNA (1)...(19): siRNA sense strand
cacggacccuggacuguau

SEQ ID NO: 290552 - RNA, 19 nt, Homo sapiens
  misc_RNA (1)...(19): siRNA sense strand
gagaaggagguugaucuga

SEQ ID NO: 290553 - RNA, 19 nt, Homo sapiens
  misc_RNA (1)...(19): siRNA sense strand
ggagaaggagguugaucug

SEQ ID NO: 290554 - RNA, 19 nt, Homo sapiens
  misc_RNA (1)...(19): siRNA sense strand
agcagcagcucuacuacaa

SEQ ID NO: 290555 - RNA, 19 nt, Homo sapiens
  misc_RNA (1)...(19): siRNA sense strand
gauuggagcagaccaugug

SEQ ID NO: 290556 - RNA, 19 nt, Homo sapiens
  misc_RNA (1)...(19): siRNA sense strand
cggaagcccugcaaagcau

SEQ ID NO: 290557 - RNA, 19 nt, Homo sapiens
  misc_RNA (1)...(19): siRNA sense strand
guacaucguggucucacuu

SEQ ID NO: 290558 - RNA, 19 nt, Homo sapiens
  misc_RNA (1)...(19): siRNA sense strand
acacugugcuccuguucug

SEQ ID NO: 290559 - RNA, 19 nt, Homo sapiens
  misc_RNA (1)...(19): siRNA sense strand
ccaagaccuucaccaagag

SEQ ID NO: 290560 - RNA, 19 nt, Homo sapiens
  misc_RNA (1)...(19): siRNA sense strand
gccagcugcuaacggauga

SEQ ID NO: 290561 - RNA, 19 nt, Homo sapiens
  misc_RNA (1)...(19): siRNA sense strand
ucaccaagaccuucaccaa

SEQ ID NO: 290562 - RNA, 19 nt, Homo sapiens
  misc_RNA (1)...(19): siRNA sense strand
gaacaaccuggcccuacuc

SEQ ID NO: 290563 - RNA, 19 nt, Homo sapiens
  misc_RNA (1)...(19): siRNA sense strand
cacaaccacuaacaacauc

SEQ ID NO: 290564 - RNA, 19 nt, Homo sapiens
  misc_RNA (1)...(19): siRNA sense strand
gcgaccagauguggacaau

SEQ ID NO: 290565 - RNA, 19 nt, Homo sapiens
  misc_RNA (1)...(19): siRNA sense strand
caacauugaccggauugga

SEQ ID NO: 290566 - RNA, 19 nt, Homo sapiens
  misc_RNA (1)...(19): siRNA sense strand
gugcuccuguucuggcaaa

SEQ ID NO: 290567 - RNA, 19 nt, Homo sapiens
  misc_RNA (1)...(19): siRNA sense strand
gacccuggacuguaucaga

SEQ ID NO: 290568 - RNA, 19 nt, Homo sapiens
  misc_RNA (1)...(19): siRNA sense strand
agagcuggguggacgagaa

SEQ ID NO: 290569 - RNA, 19 nt, Homo sapiens
  misc_RNA (1)...(19): siRNA sense strand
gcggaagcccugcaaagca

SEQ ID NO: 290570 - RNA, 19 nt, Homo sapiens
  misc_RNA (1)...(19): siRNA sense strand
gaaguacaucguggucuca

SEQ ID NO: 290571 - RNA, 19 nt, Homo sapiens
  misc_RNA (1)...(19): siRNA sense strand
ggacgucugccucaaagcu

SEQ ID NO: 290572 - RNA, 19 nt, Homo sapiens
  misc_RNA (1)...(19): siRNA sense strand
ccuccaaccaaguuuauug

SEQ ID NO: 290573 - RNA, 19 nt, Homo sapiens
  misc_RNA (1)...(19): siRNA sense strand
auacguccaugagcugauu

SEQ ID NO: 290574 - RNA, 19 nt, Homo sapiens
  misc_RNA (1)...(19): siRNA sense strand
gaagcccugcaaagcauug

SEQ ID NO: 290575 - RNA, 19 nt, Homo sapiens
  misc_RNA (1)...(19): siRNA sense strand
agaacaaccuggcccuacu

SEQ ID NO: 290576 - RNA, 19 nt, Homo sapiens
  misc_RNA (1)...(19): siRNA sense strand
gcugggacacgauguuauc

SEQ ID NO: 290577 - RNA, 19 nt, Homo sapiens
  misc_RNA (1)...(19): siRNA sense strand
ccgggagcuuuacuucuau

SEQ ID NO: 290578 - RNA, 19 nt, Homo sapiens
  misc_RNA (1)...(19): siRNA sense strand
ccacagaaccccugaaguc

SEQ ID NO: 290579 - RNA, 19 nt, Homo sapiens
  misc_RNA (1)...(19): siRNA sense strand
ggaguguccagaaguacau

SEQ ID NO: 290580 - RNA, 19 nt, Homo sapiens
  misc_RNA (1)...(19): siRNA sense strand
cagcugugaugaccugcau

SEQ ID NO: 290581 - RNA, 19 nt, Homo sapiens
  misc_RNA (1)...(19): siRNA sense strand
ggagaccugccagcugcua

SEQ ID NO: 290582 - RNA, 19 nt, Homo sapiens
  misc_RNA (1)...(19): siRNA sense strand
ggaagcccugcaaagcauu

SEQ ID NO: 290583 - RNA, 19 nt, Homo sapiens
  misc_RNA (1)...(19): siRNA sense strand
ccaccagugacauugacua

SEQ ID NO: 290584 - RNA, 19 nt, Homo sapiens
  misc_RNA (1)...(19): siRNA sense strand
gagaccugccagcugcuaa

SEQ ID NO: 290585 - RNA, 19 nt, Homo sapiens
  misc_RNA (1)...(19): siRNA sense strand
gagcauccacgaguugucu

SEQ ID NO: 290586 - RNA, 19 nt, Homo sapiens
  misc_RNA (1)...(19): siRNA sense strand
caucgugagcagacaguug

SEQ ID NO: 290587 - RNA, 19 nt, Homo sapiens
  misc_RNA (1)...(19): siRNA sense strand
ccugaugcguauggugaaa

SEQ ID NO: 290588 - RNA, 19 nt, Homo sapiens
  misc_RNA (1)...(19): siRNA sense strand
cugagcgacaucaucaaua

SEQ ID NO: 290589 - RNA, 19 nt, Homo sapiens
  misc_RNA (1)...(19): siRNA sense strand
gaccagauguggacaauca

SEQ ID NO: 290590 - RNA, 19 nt, Homo sapiens
  misc_RNA (1)...(19): siRNA sense strand
ugaaagcgcugauggacaa

SEQ ID NO: 290591 - RNA, 19 nt, Homo sapiens
  misc_RNA (1)...(19): siRNA sense strand
gcccagaucugcaagcauu

SEQ ID NO: 290592 - RNA, 19 nt, Homo sapiens
  misc_RNA (1)...(19): siRNA sense strand
ccaaccaaguuuauuguaa

SEQ ID NO: 290593 - RNA, 19 nt, Homo sapiens
  misc_RNA (1)...(19): siRNA sense strand
gccgggagcuuuacuucua

SEQ ID NO: 290594 - RNA, 19 nt, Homo sapiens
  misc_RNA (1)...(19): siRNA sense strand
gcaaagggaaagagaagaa

SEQ ID NO: 290595 - RNA, 19 nt, Homo sapiens
  misc_RNA (1)...(19): siRNA sense strand
gagcaacauugaccggauu

SEQ ID NO: 290596 - RNA, 19 nt, Homo sapiens
  misc_RNA (1)...(19): siRNA sense strand
gaucugagcgacaucauca

SEQ ID NO: 290597 - RNA, 19 nt, Homo sapiens
  misc_RNA (1)...(19): siRNA sense strand
gcacaaccacuaacaacau

SEQ ID NO: 290598 - RNA, 19 nt, Homo sapiens
  misc_RNA (1)...(19): siRNA sense strand
gacuacgccuugaagcuaa

SEQ ID NO: 290599 - RNA, 19 nt, Homo sapiens
  misc_RNA (1)...(19): siRNA sense strand
gauguuaucaagacucuga

SEQ ID NO: 290600 - RNA, 19 nt, Homo sapiens
  misc_RNA (1)...(19): siRNA sense strand
ccuugaagcuaaagaaugu

SEQ ID NO: 290601 - RNA, 19 nt, Homo sapiens
  misc_RNA (1)...(19): siRNA sense strand
gagcugggacacgauguua

SEQ ID NO: 290602 - RNA, 19 nt, Homo sapiens
  misc_RNA (1)...(19): siRNA sense strand
gaaugucgagccacucuau

SEQ ID NO: 290603 - RNA, 19 nt, Homo sapiens
  misc_RNA (1)...(19): siRNA sense strand
accaagaccuucaccaaga

SEQ ID NO: 290604 - RNA, 19 nt, Homo sapiens
  misc_RNA (1)...(19): siRNA sense strand
ccacgguucaguaccuuua

SEQ ID NO: 290605 - RNA, 19 nt, Homo sapiens
  misc_RNA (1)...(19): siRNA sense strand
caaccuggcccuacucauc

SEQ ID NO: 290606 - RNA, 19 nt, Homo sapiens
  misc_RNA (1)...(19): siRNA sense strand
gggacacgauguuaucaag

SEQ ID NO: 290607 - RNA, 19 nt, Homo sapiens
  misc_RNA (1)...(19): siRNA sense strand
ugacuacgccuugaagcua

SEQ ID NO: 290608 - RNA, 19 nt, Homo sapiens
  misc_RNA (1)...(19): siRNA sense strand
ugagcgacaucaucaauac

SEQ ID NO: 290609 - RNA, 19 nt, Homo sapiens
  misc_RNA (1)...(19): siRNA sense strand
gacauugacuacgccuuga

SEQ ID NO: 290610 - RNA, 19 nt, Homo sapiens
  misc_RNA (1)...(19): siRNA sense strand
ccaaguuuauuguaauguc

SEQ ID NO: 290611 - RNA, 19 nt, Homo sapiens
  misc_RNA (1)...(19): siRNA sense strand
ggacgccuaucgggcagaa

SEQ ID NO: 290612 - RNA, 19 nt, Homo sapiens
  misc_RNA (1)...(19): siRNA sense strand
ccacggacccuggacugua

SEQ ID NO: 290613 - RNA, 19 nt, Homo sapiens
  misc_RNA (1)...(19): siRNA sense strand
gcccaccgccugacaauca

SEQ ID NO: 290614 - RNA, 19 nt, Homo sapiens
  misc_RNA (1)...(19): siRNA sense strand
ggacacgauguuaucaaga

SEQ ID NO: 290615 - RNA, 19 nt, Homo sapiens
  misc_RNA (1)...(19): siRNA sense strand
gacacgauguuaucaagac

SEQ ID NO: 290616 - RNA, 19 nt, Homo sapiens
  misc_RNA (1)...(19): siRNA sense strand
ugaaggugguggcugaauc

SEQ ID NO: 290617 - RNA, 19 nt, Homo sapiens
  misc_RNA (1)...(19): siRNA sense strand
cacggacccuggacuguau

SEQ ID NO: 290618 - RNA, 19 nt, Homo sapiens
  misc_RNA (1)...(19): siRNA sense strand
gagaaggagguugaucuga

SEQ ID NO: 290619 - RNA, 19 nt, Homo sapiens
  misc_RNA (1)...(19): siRNA sense strand
ggagaaggagguugaucug

SEQ ID NO: 290620 - RNA, 19 nt, Homo sapiens
  misc_RNA (1)...(19): siRNA sense strand
agcagcagcucuacuacaa

SEQ ID NO: 290621 - RNA, 19 nt, Homo sapiens
  misc_RNA (1)...(19): siRNA sense strand
gauuggagcagaccaugug

SEQ ID NO: 290622 - RNA, 19 nt, Homo sapiens
  misc_RNA (1)...(19): siRNA sense strand
cggaagcccugcaaagcau

SEQ ID NO: 290623 - RNA, 19 nt, Homo sapiens
  misc_RNA (1)...(19): siRNA sense strand
guacaucguggucucacuu

SEQ ID NO: 290624 - RNA, 19 nt, Homo sapiens
  misc_RNA (1)...(19): siRNA sense strand
acacugugcuccuguucug

SEQ ID NO: 290625 - RNA, 19 nt, Homo sapiens
  misc_RNA (1)...(19): siRNA sense strand
ccaagaccuucaccaagag

SEQ ID NO: 290626 - RNA, 19 nt, Homo sapiens
  misc_RNA (1)...(19): siRNA sense strand
gccagcugcuaacggauga

SEQ ID NO: 290627 - RNA, 19 nt, Homo sapiens
  misc_RNA (1)...(19): siRNA sense strand
ucaccaagaccuucaccaa

SEQ ID NO: 290628 - RNA, 19 nt, Homo sapiens
  misc_RNA (1)...(19): siRNA sense strand
gaacaaccuggcccuacuc

SEQ ID NO: 290629 - RNA, 19 nt, Homo sapiens
  misc_RNA (1)...(19): siRNA sense strand
cacaaccacuaacaacauc

SEQ ID NO: 290630 - RNA, 19 nt, Homo sapiens
  misc_RNA (1)...(19): siRNA sense strand
gcgaccagauguggacaau

SEQ ID NO: 290631 - RNA, 19 nt, Homo sapiens
  misc_RNA (1)...(19): siRNA sense strand
caacauugaccggauugga

SEQ ID NO: 290632 - RNA, 19 nt, Homo sapiens
  misc_RNA (1)...(19): siRNA sense strand
gugcuccuguucuggcaaa

SEQ ID NO: 290633 - RNA, 19 nt, Homo sapiens
  misc_RNA (1)...(19): siRNA sense strand
gacccuggacuguaucaga

SEQ ID NO: 290634 - RNA, 19 nt, Homo sapiens
  misc_RNA (1)...(19): siRNA sense strand
agagcuggguggacgagaa

SEQ ID NO: 290635 - RNA, 19 nt, Homo sapiens
  misc_RNA (1)...(19): siRNA sense strand
gcggaagcccugcaaagca

SEQ ID NO: 290636 - RNA, 19 nt, Homo sapiens
  misc_RNA (1)...(19): siRNA sense strand
gaaguacaucguggucuca

SEQ ID NO: 290637 - RNA, 19 nt, Homo sapiens
  misc_RNA (1)...(19): siRNA sense strand
ggacgucugccucaaagcu

SEQ ID NO: 290638 - RNA, 19 nt, Homo sapiens
  misc_RNA (1)...(19): siRNA sense strand
ccuccaaccaaguuuauug

SEQ ID NO: 290639 - RNA, 19 nt, Homo sapiens
  misc_RNA (1)...(19): siRNA sense strand
auacguccaugagcugauu

SEQ ID NO: 290640 - RNA, 19 nt, Homo sapiens
  misc_RNA (1)...(19): siRNA sense strand
gaagcccugcaaagcauug

SEQ ID NO: 290641 - RNA, 19 nt, Homo sapiens
  misc_RNA (1)...(19): siRNA sense strand
agaacaaccuggcccuacu

SEQ ID NO: 290642 - RNA, 19 nt, Homo sapiens
  misc_RNA (1)...(19): siRNA sense strand
gcugggacacgauguuauc

SEQ ID NO: 290643 - RNA, 19 nt, Homo sapiens
  misc_RNA (1)...(19): siRNA sense strand
ccgggagcuuuacuucuau

SEQ ID NO: 290644 - RNA, 19 nt, Homo sapiens
  misc_RNA (1)...(19): siRNA sense strand
ccacagaaccccugaaguc

SEQ ID NO: 290645 - RNA, 19 nt, Homo sapiens
  misc_RNA (1)...(19): siRNA sense strand
ggaguguccagaaguacau

SEQ ID NO: 290646 - RNA, 19 nt, Homo sapiens
  misc_RNA (1)...(19): siRNA sense strand
cagcugugaugaccugcau

SEQ ID NO: 290647 - RNA, 19 nt, Homo sapiens
  misc_RNA (1)...(19): siRNA sense strand
ggagaccugccagcugcua

SEQ ID NO: 290648 - RNA, 19 nt, Homo sapiens
  misc_RNA (1)...(19): siRNA sense strand
ggaagcccugcaaagcauu

SEQ ID NO: 290649 - RNA, 19 nt, Homo sapiens
  misc_RNA (1)...(19): siRNA sense strand
ccaccagugacauugacua

SEQ ID NO: 290650 - RNA, 19 nt, Homo sapiens
  misc_RNA (1)...(19): siRNA sense strand
gagaccugccagcugcuaa

SEQ ID NO: 290651 - RNA, 19 nt, Homo sapiens
  misc_RNA (1)...(19): siRNA sense strand
gagcauccacgaguugucu

SEQ ID NO: 290652 - RNA, 19 nt, Homo sapiens
  misc_RNA (1)...(19): siRNA sense strand
caucgugagcagacaguug

SEQ ID NO: 290653 - RNA, 19 nt, Homo sapiens
  misc_RNA (1)...(19): siRNA sense strand
ccugaugcguauggugaaa

SEQ ID NO: 290654 - RNA, 19 nt, Homo sapiens
  misc_RNA (1)...(19): siRNA sense strand
cugagcgacaucaucaaua

SEQ ID NO: 290655 - RNA, 19 nt, Homo sapiens
  misc_RNA (1)...(19): siRNA sense strand
gaccagauguggacaauca

SEQ ID NO: 290656 - RNA, 19 nt, Homo sapiens
  misc_RNA (1)...(19): siRNA sense strand
ugaaagcgcugauggacaa

SEQ ID NO: 290657 - RNA, 19 nt, Homo sapiens
  misc_RNA (1)...(19): siRNA sense strand
gcccagaucugcaagcauu

SEQ ID NO: 290658 - RNA, 19 nt, Homo sapiens
  misc_RNA (1)...(19): siRNA sense strand
ccaaccaaguuuauuguaa

SEQ ID NO: 290659 - RNA, 19 nt, Homo sapiens
  misc_RNA (1)...(19): siRNA sense strand
gccgggagcuuuacuucua

SEQ ID NO: 290660 - RNA, 19 nt, Homo sapiens
  misc_RNA (1)...(19): siRNA sense strand
gcaaagggaaagagaagaa

SEQ ID NO: 290661 - RNA, 19 nt, Homo sapiens
  misc_RNA (1)...(19): siRNA sense strand
gagcaacauugaccggauu

SEQ ID NO: 290662 - RNA, 19 nt, Homo sapiens
  misc_RNA (1)...(19): siRNA sense strand
gaucugagcgacaucauca

SEQ ID NO: 290663 - RNA, 19 nt, Homo sapiens
  misc_RNA (1)...(19): siRNA sense strand
gcacaaccacuaacaacau

SEQ ID NO: 290664 - RNA, 19 nt, Homo sapiens
  misc_RNA (1)...(19): siRNA sense strand
gacuacgccuugaagcuaa

SEQ ID NO: 290665 - RNA, 19 nt, Homo sapiens
  misc_RNA (1)...(19): siRNA sense strand
gauguuaucaagacucuga

SEQ ID NO: 290666 - RNA, 19 nt, Homo sapiens
  misc_RNA (1)...(19): siRNA sense strand
ccuugaagcuaaagaaugu

SEQ ID NO: 290667 - RNA, 19 nt, Homo sapiens
  misc_RNA (1)...(19): siRNA sense strand
gagcugggacacgauguua

SEQ ID NO: 290668 - RNA, 19 nt, Homo sapiens
  misc_RNA (1)...(19): siRNA sense strand
gaaugucgagccacucuau

SEQ ID NO: 290669 - RNA, 19 nt, Homo sapiens
  misc_RNA (1)...(19): siRNA sense strand
accaagaccuucaccaaga

SEQ ID NO: 290670 - RNA, 19 nt, Homo sapiens
  misc_RNA (1)...(19): siRNA sense strand
ccacgguucaguaccuuua

SEQ ID NO: 290671 - RNA, 19 nt, Homo sapiens
  misc_RNA (1)...(19): siRNA sense strand
caaccuggcccuacucauc

SEQ ID NO: 290672 - RNA, 19 nt, Homo sapiens
  misc_RNA (1)...(19): siRNA sense strand
gggacacgauguuaucaag

SEQ ID NO: 290673 - RNA, 19 nt, Homo sapiens
  misc_RNA (1)...(19): siRNA sense strand
ugacuacgccuugaagcua

SEQ ID NO: 290674 - RNA, 19 nt, Homo sapiens
  misc_RNA (1)...(19): siRNA sense strand
ugagcgacaucaucaauac

SEQ ID NO: 290675 - RNA, 19 nt, Homo sapiens
  misc_RNA (1)...(19): siRNA sense strand
gacauugacuacgccuuga

SEQ ID NO: 290676 - RNA, 19 nt, Homo sapiens
  misc_RNA (1)...(19): siRNA sense strand
ccaaguuuauuguaauguc

SEQ ID NO: 290677 - RNA, 19 nt, Homo sapiens
  misc_RNA (1)...(19): siRNA sense strand
ggacgccuaucgggcagaa

SEQ ID NO: 290678 - RNA, 19 nt, Homo sapiens
  misc_RNA (1)...(19): siRNA sense strand
ccacggacccuggacugua

SEQ ID NO: 290679 - RNA, 19 nt, Homo sapiens
  misc_RNA (1)...(19): siRNA sense strand
gcccaccgccugacaauca

SEQ ID NO: 290680 - RNA, 19 nt, Homo sapiens
  misc_RNA (1)...(19): siRNA sense strand
ggacacgauguuaucaaga

SEQ ID NO: 290681 - RNA, 19 nt, Homo sapiens
  misc_RNA (1)...(19): siRNA sense strand
gacacgauguuaucaagac

SEQ ID NO: 290682 - RNA, 19 nt, Homo sapiens
  misc_RNA (1)...(19): siRNA sense strand
ugaaggugguggcugaauc

SEQ ID NO: 290683 - RNA, 19 nt, Homo sapiens
  misc_RNA (1)...(19): siRNA sense strand
cacggacccuggacuguau

SEQ ID NO: 290684 - RNA, 19 nt, Homo sapiens
  misc_RNA (1)...(19): siRNA sense strand
gagaaggagguugaucuga

SEQ ID NO: 290685 - RNA, 19 nt, Homo sapiens
  misc_RNA (1)...(19): siRNA sense strand
ggagaaggagguugaucug

SEQ ID NO: 290686 - RNA, 19 nt, Homo sapiens
  misc_RNA (1)...(19): siRNA sense strand
agcagcagcucuacuacaa

SEQ ID NO: 290687 - RNA, 19 nt, Homo sapiens
  misc_RNA (1)...(19): siRNA sense strand
gauuggagcagaccaugug

SEQ ID NO: 290688 - RNA, 19 nt, Homo sapiens
  misc_RNA (1)...(19): siRNA sense strand
cggaagcccugcaaagcau

SEQ ID NO: 290689 - RNA, 19 nt, Homo sapiens
  misc_RNA (1)...(19): siRNA sense strand
guacaucguggucucacuu

SEQ ID NO: 290690 - RNA, 19 nt, Homo sapiens
  misc_RNA (1)...(19): siRNA sense strand
acacugugcuccuguucug

SEQ ID NO: 290691 - RNA, 19 nt, Homo sapiens
  misc_RNA (1)...(19): siRNA sense strand
ccaagaccuucaccaagag

SEQ ID NO: 290692 - RNA, 19 nt, Homo sapiens
  misc_RNA (1)...(19): siRNA sense strand
gccagcugcuaacggauga

SEQ ID NO: 290693 - RNA, 19 nt, Homo sapiens
  misc_RNA (1)...(19): siRNA sense strand
ucaccaagaccuucaccaa

SEQ ID NO: 290694 - RNA, 19 nt, Homo sapiens
  misc_RNA (1)...(19): siRNA sense strand
gaacaaccuggcccuacuc

SEQ ID NO: 290695 - RNA, 19 nt, Homo sapiens
  misc_RNA (1)...(19): siRNA sense strand
cacaaccacuaacaacauc

SEQ ID NO: 290696 - RNA, 19 nt, Homo sapiens
  misc_RNA (1)...(19): siRNA sense strand
gcgaccagauguggacaau

SEQ ID NO: 290697 - RNA, 19 nt, Homo sapiens
  misc_RNA (1)...(19): siRNA sense strand
caacauugaccggauugga

SEQ ID NO: 290698 - RNA, 19 nt, Homo sapiens
  misc_RNA (1)...(19): siRNA sense strand
gugcuccuguucuggcaaa

SEQ ID NO: 290699 - RNA, 19 nt, Homo sapiens
  misc_RNA (1)...(19): siRNA sense strand
gacccuggacuguaucaga

SEQ ID NO: 290700 - RNA, 19 nt, Homo sapiens
  misc_RNA (1)...(19): siRNA sense strand
agagcuggguggacgagaa

SEQ ID NO: 290701 - RNA, 19 nt, Homo sapiens
  misc_RNA (1)...(19): siRNA sense strand
gcggaagcccugcaaagca

SEQ ID NO: 290702 - RNA, 19 nt, Homo sapiens
  misc_RNA (1)...(19): siRNA sense strand
gaaguacaucguggucuca

SEQ ID NO: 290703 - RNA, 19 nt, Homo sapiens
  misc_RNA (1)...(19): siRNA sense strand
ggacgucugccucaaagcu

SEQ ID NO: 290704 - RNA, 19 nt, Homo sapiens
  misc_RNA (1)...(19): siRNA sense strand
ccuccaaccaaguuuauug

SEQ ID NO: 290705 - RNA, 19 nt, Homo sapiens
  misc_RNA (1)...(19): siRNA sense strand
auacguccaugagcugauu

SEQ ID NO: 290706 - RNA, 19 nt, Homo sapiens
  misc_RNA (1)...(19): siRNA sense strand
gaagcccugcaaagcauug

SEQ ID NO: 290707 - RNA, 19 nt, Homo sapiens
  misc_RNA (1)...(19): siRNA sense strand
agaacaaccuggcccuacu

SEQ ID NO: 290708 - RNA, 19 nt, Homo sapiens
  misc_RNA (1)...(19): siRNA sense strand
gcugggacacgauguuauc

SEQ ID NO: 290709 - RNA, 19 nt, Homo sapiens
  misc_RNA (1)...(19): siRNA sense strand
ccgggagcuuuacuucuau

SEQ ID NO: 290710 - RNA, 19 nt, Homo sapiens
  misc_RNA (1)...(19): siRNA sense strand
ccacagaaccccugaaguc

SEQ ID NO: 290711 - RNA, 19 nt, Homo sapiens
  misc_RNA (1)...(19): siRNA sense strand
ggaguguccagaaguacau

SEQ ID NO: 290712 - RNA, 19 nt, Homo sapiens
  misc_RNA (1)...(19): siRNA sense strand
cagcugugaugaccugcau

SEQ ID NO: 290713 - RNA, 19 nt, Homo sapiens
  misc_RNA (1)...(19): siRNA sense strand
ggagaccugccagcugcua

SEQ ID NO: 290714 - RNA, 19 nt, Homo sapiens
  misc_RNA (1)...(19): siRNA sense strand
ggaagcccugcaaagcauu

SEQ ID NO: 290715 - RNA, 19 nt, Homo sapiens
  misc_RNA (1)...(19): siRNA sense strand
ccaccagugacauugacua

SEQ ID NO: 290716 - RNA, 19 nt, Homo sapiens
  misc_RNA (1)...(19): siRNA sense strand
gagaccugccagcugcuaa

SEQ ID NO: 290717 - RNA, 19 nt, Homo sapiens
  misc_RNA (1)...(19): siRNA sense strand
gagcauccacgaguugucu

SEQ ID NO: 290718 - RNA, 19 nt, Homo sapiens
  misc_RNA (1)...(19): siRNA sense strand
caucgugagcagacaguug

SEQ ID NO: 290719 - RNA, 19 nt, Homo sapiens
  misc_RNA (1)...(19): siRNA sense strand
ccugaugcguauggugaaa

SEQ ID NO: 290720 - RNA, 19 nt, Homo sapiens
  misc_RNA (1)...(19): siRNA sense strand
cugagcgacaucaucaaua

SEQ ID NO: 290721 - RNA, 19 nt, Homo sapiens
  misc_RNA (1)...(19): siRNA sense strand
gaccagauguggacaauca

SEQ ID NO: 290722 - RNA, 19 nt, Homo sapiens
  misc_RNA (1)...(19): siRNA sense strand
ugaaagcgcugauggacaa

SEQ ID NO: 290723 - RNA, 19 nt, Homo sapiens
  misc_RNA (1)...(19): siRNA sense strand
gcccagaucugcaagcauu

SEQ ID NO: 290724 - RNA, 19 nt, Homo sapiens
  misc_RNA (1)...(19): siRNA sense strand
ccaaccaaguuuauuguaa

SEQ ID NO: 290725 - RNA, 19 nt, Homo sapiens
  misc_RNA (1)...(19): siRNA sense strand
gccgggagcuuuacuucua

SEQ ID NO: 290726 - RNA, 19 nt, Homo sapiens
  misc_RNA (1)...(19): siRNA sense strand
gcaaagggaaagagaagaa

SEQ ID NO: 290727 - RNA, 19 nt, Homo sapiens
  misc_RNA (1)...(19): siRNA sense strand
gagcaacauugaccggauu

SEQ ID NO: 290728 - RNA, 19 nt, Homo sapiens
  misc_RNA (1)...(19): siRNA sense strand
gaucugagcgacaucauca

SEQ ID NO: 290729 - RNA, 19 nt, Homo sapiens
  misc_RNA (1)...(19): siRNA sense strand
gcacaaccacuaacaacau

SEQ ID NO: 290730 - RNA, 19 nt, Homo sapiens
  misc_RNA (1)...(19): siRNA sense strand
gacuacgccuugaagcuaa

SEQ ID NO: 290731 - RNA, 19 nt, Homo sapiens
  misc_RNA (1)...(19): siRNA sense strand
gauguuaucaagacucuga

SEQ ID NO: 290732 - RNA, 19 nt, Homo sapiens
  misc_RNA (1)...(19): siRNA sense strand
ccuugaagcuaaagaaugu

SEQ ID NO: 290733 - RNA, 19 nt, Homo sapiens
  misc_RNA (1)...(19): siRNA sense strand
gagcugggacacgauguua

SEQ ID NO: 290734 - RNA, 19 nt, Homo sapiens
  misc_RNA (1)...(19): siRNA sense strand
gaaugucgagccacucuau

SEQ ID NO: 290735 - RNA, 19 nt, Homo sapiens
  misc_RNA (1)...(19): siRNA sense strand
accaagaccuucaccaaga

SEQ ID NO: 290736 - RNA, 19 nt, Homo sapiens
  misc_RNA (1)...(19): siRNA sense strand
ccacgguucaguaccuuua

SEQ ID NO: 290737 - RNA, 19 nt, Homo sapiens
  misc_RNA (1)...(19): siRNA sense strand
caaccuggcccuacucauc

SEQ ID NO: 290738 - RNA, 19 nt, Homo sapiens
  misc_RNA (1)...(19): siRNA sense strand
gggacacgauguuaucaag

SEQ ID NO: 290739 - RNA, 19 nt, Homo sapiens
  misc_RNA (1)...(19): siRNA sense strand
ugacuacgccuugaagcua

SEQ ID NO: 290740 - RNA, 19 nt, Homo sapiens
  misc_RNA (1)...(19): siRNA sense strand
ugagcgacaucaucaauac

SEQ ID NO: 290741 - RNA, 19 nt, Homo sapiens
  misc_RNA (1)...(19): siRNA sense strand
gacauugacuacgccuuga

SEQ ID NO: 290742 - RNA, 19 nt, Homo sapiens
  misc_RNA (1)...(19): siRNA sense strand
ccaaguuuauuguaauguc

SEQ ID NO: 290743 - RNA, 19 nt, Homo sapiens
  misc_RNA (1)...(19): siRNA sense strand
ggacgccuaucgggcagaa

SEQ ID NO: 290744 - RNA, 19 nt, Homo sapiens
  misc_RNA (1)...(19): siRNA sense strand
ccacggacccuggacugua

SEQ ID NO: 290745 - RNA, 19 nt, Homo sapiens
  misc_RNA (1)...(19): siRNA sense strand
gcccaccgccugacaauca

SEQ ID NO: 290746 - RNA, 19 nt, Homo sapiens
  misc_RNA (1)...(19): siRNA sense strand
ggacacgauguuaucaaga

SEQ ID NO: 290747 - RNA, 19 nt, Homo sapiens
  misc_RNA (1)...(19): siRNA sense strand
gacacgauguuaucaagac

SEQ ID NO: 290748 - RNA, 19 nt, Homo sapiens
  misc_RNA (1)...(19): siRNA sense strand
ugaaggugguggcugaauc

SEQ ID NO: 290749 - RNA, 19 nt, Homo sapiens
  misc_RNA (1)...(19): siRNA sense strand
cacggacccuggacuguau

SEQ ID NO: 290750 - RNA, 19 nt, Homo sapiens
  misc_RNA (1)...(19): siRNA sense strand
gagaaggagguugaucuga

SEQ ID NO: 290751 - RNA, 19 nt, Homo sapiens
  misc_RNA (1)...(19): siRNA sense strand
ggagaaggagguugaucug

SEQ ID NO: 290752 - RNA, 19 nt, Homo sapiens
  misc_RNA (1)...(19): siRNA sense strand
agcagcagcucuacuacaa

SEQ ID NO: 290753 - RNA, 19 nt, Homo sapiens
  misc_RNA (1)...(19): siRNA sense strand
gauuggagcagaccaugug

SEQ ID NO: 290754 - RNA, 19 nt, Homo sapiens
  misc_RNA (1)...(19): siRNA sense strand
cggaagcccugcaaagcau

SEQ ID NO: 290755 - RNA, 19 nt, Homo sapiens
  misc_RNA (1)...(19): siRNA sense strand
guacaucguggucucacuu

SEQ ID NO: 290756 - RNA, 19 nt, Homo sapiens
  misc_RNA (1)...(19): siRNA sense strand
acacugugcuccuguucug

SEQ ID NO: 290757 - RNA, 19 nt, Homo sapiens
  misc_RNA (1)...(19): siRNA sense strand
ccaagaccuucaccaagag

SEQ ID NO: 290758 - RNA, 19 nt, Homo sapiens
  misc_RNA (1)...(19): siRNA sense strand
gccagcugcuaacggauga

SEQ ID NO: 290759 - RNA, 19 nt, Homo sapiens
  misc_RNA (1)...(19): siRNA sense strand
ucaccaagaccuucaccaa

SEQ ID NO: 290760 - RNA, 19 nt, Homo sapiens
  misc_RNA (1)...(19): siRNA sense strand
gaacaaccuggcccuacuc

SEQ ID NO: 290761 - RNA, 19 nt, Homo sapiens
  misc_RNA (1)...(19): siRNA sense strand
cacaaccacuaacaacauc

SEQ ID NO: 290762 - RNA, 19 nt, Homo sapiens
  misc_RNA (1)...(19): siRNA sense strand
gcgaccagauguggacaau

SEQ ID NO: 290763 - RNA, 19 nt, Homo sapiens
  misc_RNA (1)...(19): siRNA sense strand
caacauugaccggauugga

SEQ ID NO: 290764 - RNA, 19 nt, Homo sapiens
  misc_RNA (1)...(19): siRNA sense strand
gugcuccuguucuggcaaa

SEQ ID NO: 290765 - RNA, 19 nt, Homo sapiens
  misc_RNA (1)...(19): siRNA sense strand
gacccuggacuguaucaga

SEQ ID NO: 290766 - RNA, 19 nt, Homo sapiens
  misc_RNA (1)...(19): siRNA sense strand
agagcuggguggacgagaa

SEQ ID NO: 290767 - RNA, 19 nt, Homo sapiens
  misc_RNA (1)...(19): siRNA sense strand
gcggaagcccugcaaagca

SEQ ID NO: 290768 - RNA, 19 nt, Homo sapiens
  misc_RNA (1)...(19): siRNA sense strand
gaaguacaucguggucuca

SEQ ID NO: 290769 - RNA, 19 nt, Homo sapiens
  misc_RNA (1)...(19): siRNA sense strand
ggacgucugccucaaagcu

SEQ ID NO: 290770 - RNA, 19 nt, Homo sapiens
  misc_RNA (1)...(19): siRNA sense strand
ccuccaaccaaguuuauug

SEQ ID NO: 290771 - RNA, 19 nt, Homo sapiens
  misc_RNA (1)...(19): siRNA sense strand
auacguccaugagcugauu

SEQ ID NO: 290772 - RNA, 19 nt, Homo sapiens
  misc_RNA (1)...(19): siRNA sense strand
gaagcccugcaaagcauug

SEQ ID NO: 290773 - RNA, 19 nt, Homo sapiens
  misc_RNA (1)...(19): siRNA sense strand
agaacaaccuggcccuacu

SEQ ID NO: 290774 - RNA, 19 nt, Homo sapiens
  misc_RNA (1)...(19): siRNA sense strand
gcugggacacgauguuauc

SEQ ID NO: 290775 - RNA, 19 nt, Homo sapiens
  misc_RNA (1)...(19): siRNA sense strand
ccgggagcuuuacuucuau

SEQ ID NO: 290776 - RNA, 19 nt, Homo sapiens
  misc_RNA (1)...(19): siRNA sense strand
ccacagaaccccugaaguc

SEQ ID NO: 290777 - RNA, 19 nt, Homo sapiens
  misc_RNA (1)...(19): siRNA sense strand
ggaguguccagaaguacau

SEQ ID NO: 290778 - RNA, 19 nt, Homo sapiens
  misc_RNA (1)...(19): siRNA sense strand
cagcugugaugaccugcau

SEQ ID NO: 290779 - RNA, 19 nt, Homo sapiens
  misc_RNA (1)...(19): siRNA sense strand
ggagaccugccagcugcua

SEQ ID NO: 290780 - RNA, 19 nt, Homo sapiens
  misc_RNA (1)...(19): siRNA sense strand
ggaagcccugcaaagcauu

SEQ ID NO: 290781 - RNA, 19 nt, Homo sapiens
  misc_RNA (1)...(19): siRNA sense strand
ccaccagugacauugacua

SEQ ID NO: 290782 - RNA, 19 nt, Homo sapiens
  misc_RNA (1)...(19): siRNA sense strand
gagaccugccagcugcuaa

SEQ ID NO: 290783 - RNA, 19 nt, Homo sapiens
  misc_RNA (1)...(19): siRNA sense strand
gagcauccacgaguugucu

SEQ ID NO: 290784 - RNA, 19 nt, Homo sapiens
  misc_RNA (1)...(19): siRNA sense strand
caucgugagcagacaguug

SEQ ID NO: 290785 - RNA, 19 nt, Homo sapiens
  misc_RNA (1)...(19): siRNA sense strand
ccugaugcguauggugaaa

SEQ ID NO: 290786 - RNA, 19 nt, Homo sapiens
  misc_RNA (1)...(19): siRNA sense strand
cugagcgacaucaucaaua

SEQ ID NO: 290787 - RNA, 19 nt, Homo sapiens
  misc_RNA (1)...(19): siRNA sense strand
gaagacucaucauuacuua

SEQ ID NO: 290788 - RNA, 19 nt, Homo sapiens
  misc_RNA (1)...(19): siRNA sense strand
gaaaguagaugaagaugag

SEQ ID NO: 290789 - RNA, 19 nt, Homo sapiens
  misc_RNA (1)...(19): siRNA sense strand
cgacaaagguggagagaca

SEQ ID NO: 290790 - RNA, 19 nt, Homo sapiens
  misc_RNA (1)...(19): siRNA sense strand
gaaccguuaugaaauguau

SEQ ID NO: 290791 - RNA, 19 nt, Homo sapiens
  misc_RNA (1)...(19): siRNA sense strand
ggaagccguuagaagguua

SEQ ID NO: 290792 - RNA, 19 nt, Homo sapiens
  misc_RNA (1)...(19): siRNA sense strand
caggaugucucagauuuaa

SEQ ID NO: 290793 - RNA, 19 nt, Homo sapiens
  misc_RNA (1)...(19): siRNA sense strand
gcugaaccguuaugaaaug

SEQ ID NO: 290794 - RNA, 19 nt, Homo sapiens
  misc_RNA (1)...(19): siRNA sense strand
aggagcagcugaaccguua

SEQ ID NO: 290795 - RNA, 19 nt, Homo sapiens
  misc_RNA (1)...(19): siRNA sense strand
ggaagacucaucauuacuu

SEQ ID NO: 290796 - RNA, 19 nt, Homo sapiens
  misc_RNA (1)...(19): siRNA sense strand
gucaggaugucucagauuu

SEQ ID NO: 290797 - RNA, 19 nt, Homo sapiens
  misc_RNA (1)...(19): siRNA sense strand
cagcugaaccguuaugaaa

SEQ ID NO: 290798 - RNA, 19 nt, Homo sapiens
  misc_RNA (1)...(19): siRNA sense strand
gaagaugagauucagaaga

SEQ ID NO: 290799 - RNA, 19 nt, Homo sapiens
  misc_RNA (1)...(19): siRNA sense strand
gauguggacuugaaagaag

SEQ ID NO: 290800 - RNA, 19 nt, Homo sapiens
  misc_RNA (1)...(19): siRNA sense strand
guuagaagguuaaagucaa

SEQ ID NO: 290801 - RNA, 19 nt, Homo sapiens
  misc_RNA (1)...(19): siRNA sense strand
ccacuacaacccaaacaua

SEQ ID NO: 290802 - RNA, 19 nt, Homo sapiens
  misc_RNA (1)...(19): siRNA sense strand
aagaugagauucagaagau

SEQ ID NO: 290803 - RNA, 19 nt, Homo sapiens
  misc_RNA (1)...(19): siRNA sense strand
aagggaagacucaucauua

SEQ ID NO: 290804 - RNA, 19 nt, Homo sapiens
  misc_RNA (1)...(19): siRNA sense strand
gcagaaaguagaugaagau

SEQ ID NO: 290805 - RNA, 19 nt, Homo sapiens
  misc_RNA (1)...(19): siRNA sense strand
ggagaaaugccaccacuac

SEQ ID NO: 290806 - RNA, 19 nt, Homo sapiens
  misc_RNA (1)...(19): siRNA sense strand
cuacaacccaaacauauga

SEQ ID NO: 290807 - RNA, 19 nt, Homo sapiens
  misc_RNA (1)...(19): siRNA sense strand
gaagaugcaaauccugguu

SEQ ID NO: 290808 - RNA, 19 nt, Homo sapiens
  misc_RNA (1)...(19): siRNA sense strand
gggaagccguuagaagguu

SEQ ID NO: 290809 - RNA, 19 nt, Homo sapiens
  misc_RNA (1)...(19): siRNA sense strand
acgcagauguggacuugaa

SEQ ID NO: 290810 - RNA, 19 nt, Homo sapiens
  misc_RNA (1)...(19): siRNA sense strand
gaaaugccaccacuacaac

SEQ ID NO: 290811 - RNA, 19 nt, Homo sapiens
  misc_RNA (1)...(19): siRNA sense strand
gaagaagcacuggaugugu

SEQ ID NO: 290812 - RNA, 19 nt, Homo sapiens
  misc_RNA (1)...(19): siRNA sense strand
gauggaaucccagaggaaa

SEQ ID NO: 290813 - RNA, 19 nt, Homo sapiens
  misc_RNA (1)...(19): siRNA sense strand
agacgcagauguggacuug

SEQ ID NO: 290814 - RNA, 19 nt, Homo sapiens
  misc_RNA (1)...(19): siRNA sense strand
gaauguuguuauugcuaug

SEQ ID NO: 290815 - RNA, 19 nt, Homo sapiens
  misc_RNA (1)...(19): siRNA sense strand
ggaugucucagauuuaaca

SEQ ID NO: 290816 - RNA, 19 nt, Homo sapiens
  misc_RNA (1)...(19): siRNA sense strand
ugaaagggaagacucauca

SEQ ID NO: 290817 - RNA, 19 nt, Homo sapiens
  misc_RNA (1)...(19): siRNA sense strand
ucaggaugucucagauuua

SEQ ID NO: 290818 - RNA, 19 nt, Homo sapiens
  misc_RNA (1)...(19): siRNA sense strand
aaggcgagcucgagaguca

SEQ ID NO: 290819 - RNA, 19 nt, Homo sapiens
  misc_RNA (1)...(19): siRNA sense strand
aaagggaagacucaucauu

SEQ ID NO: 290820 - RNA, 19 nt, Homo sapiens
  misc_RNA (1)...(19): siRNA sense strand
agaaaugccaccacuacaa

SEQ ID NO: 290821 - RNA, 19 nt, Homo sapiens
  misc_RNA (1)...(19): siRNA sense strand
ucugguauuuccaagguuu

SEQ ID NO: 290822 - RNA, 19 nt, Homo sapiens
  misc_RNA (1)...(19): siRNA sense strand
ugacggagacgcagaugug

SEQ ID NO: 290823 - RNA, 19 nt, Homo sapiens
  misc_RNA (1)...(19): siRNA sense strand
caaaaggacagaucccuaa

SEQ ID NO: 290824 - RNA, 19 nt, Homo sapiens
  misc_RNA (1)...(19): siRNA sense strand
ccgcucagcuuucccuaag

SEQ ID NO: 290825 - RNA, 19 nt, Homo sapiens
  misc_RNA (1)...(19): siRNA sense strand
gcagcugaaccguuaugaa

SEQ ID NO: 290826 - RNA, 19 nt, Homo sapiens
  misc_RNA (1)...(19): siRNA sense strand
ggaaggcgagcucgagagu

SEQ ID NO: 290827 - RNA, 19 nt, Homo sapiens
  misc_RNA (1)...(19): siRNA sense strand
gguagaagaagcacuggau

SEQ ID NO: 290828 - RNA, 19 nt, Homo sapiens
  misc_RNA (1)...(19): siRNA sense strand
gcacuggaugugugugaga

SEQ ID NO: 290829 - RNA, 19 nt, Homo sapiens
  misc_RNA (1)...(19): siRNA sense strand
gagaaaugccaccacuaca

SEQ ID NO: 290830 - RNA, 19 nt, Homo sapiens
  misc_RNA (1)...(19): siRNA sense strand
aaauccugguuucuucuuu

SEQ ID NO: 290831 - RNA, 19 nt, Homo sapiens
  misc_RNA (1)...(19): siRNA sense strand
gacagaucccuaacucgaa

SEQ ID NO: 290832 - RNA, 19 nt, Homo sapiens
  misc_RNA (1)...(19): siRNA sense strand
cauaugagggaagccguua

SEQ ID NO: 290833 - RNA, 19 nt, Homo sapiens
  misc_RNA (1)...(19): siRNA sense strand
gagucaggaugucucagau

SEQ ID NO: 290834 - RNA, 19 nt, Homo sapiens
  misc_RNA (1)...(19): siRNA sense strand
ugcaaauccugguuucuuc

SEQ ID NO: 290835 - RNA, 19 nt, Homo sapiens
  misc_RNA (1)...(19): siRNA sense strand
cagaauguuguuauugcua

SEQ ID NO: 290836 - RNA, 19 nt, Homo sapiens
  misc_RNA (1)...(19): siRNA sense strand
gagauucagaagaugcaaa

SEQ ID NO: 290837 - RNA, 19 nt, Homo sapiens
  misc_RNA (1)...(19): siRNA sense strand
agggaagacucaucauuac

SEQ ID NO: 290838 - RNA, 19 nt, Homo sapiens
  misc_RNA (1)...(19): siRNA sense strand
aaggacagaucccuaacuc

SEQ ID NO: 290839 - RNA, 19 nt, Homo sapiens
  misc_RNA (1)...(19): siRNA sense strand
gggagaaaugccaccacua

SEQ ID NO: 290840 - RNA, 19 nt, Homo sapiens
  misc_RNA (1)...(19): siRNA sense strand
uagaagaagcacuggaugu

SEQ ID NO: 290841 - RNA, 19 nt, Homo sapiens
  misc_RNA (1)...(19): siRNA sense strand
agaaaguagaugaagauga

SEQ ID NO: 290842 - RNA, 19 nt, Homo sapiens
  misc_RNA (1)...(19): siRNA sense strand
gcaaauccugguuucuucu

SEQ ID NO: 290843 - RNA, 19 nt, Homo sapiens
  misc_RNA (1)...(19): siRNA sense strand
gaaagggaagacucaucau

SEQ ID NO: 290844 - RNA, 19 nt, Homo sapiens
  misc_RNA (1)...(19): siRNA sense strand
cacuacaacccaaacauau

SEQ ID NO: 290845 - RNA, 19 nt, Homo sapiens
  misc_RNA (1)...(19): siRNA sense strand
gagcagcugaaccguuaug

SEQ ID NO: 290846 - RNA, 19 nt, Homo sapiens
  misc_RNA (1)...(19): siRNA sense strand
ccaaagaaaagaaagagaa

SEQ ID NO: 290847 - RNA, 19 nt, Homo sapiens
  misc_RNA (1)...(19): siRNA sense strand
uuauugcuaugucugguau

SEQ ID NO: 290848 - RNA, 19 nt, Homo sapiens
  misc_RNA (1)...(19): siRNA sense strand
caaauccugguuucuucuu

SEQ ID NO: 290849 - RNA, 19 nt, Homo sapiens
  misc_RNA (1)...(19): siRNA sense strand
gccguuagaagguuaaagu

SEQ ID NO: 290850 - RNA, 19 nt, Homo sapiens
  misc_RNA (1)...(19): siRNA sense strand
cagauguggacuugaaaga

SEQ ID NO: 290851 - RNA, 19 nt, Homo sapiens
  misc_RNA (1)...(19): siRNA sense strand
gcagauguggacuugaaag

SEQ ID NO: 290852 - RNA, 19 nt, Homo sapiens
  misc_RNA (1)...(19): siRNA sense strand
gaagccguuagaagguuaa

SEQ ID NO: 290853 - RNA, 19 nt, Homo sapiens
  misc_RNA (1)...(19): siRNA sense strand
agaagaagcacuggaugug

SEQ ID NO: 290854 - RNA, 19 nt, Homo sapiens
  misc_RNA (1)...(19): siRNA sense strand
ggaggugguagaagaagca

SEQ ID NO: 290855 - RNA, 19 nt, Homo sapiens
  misc_RNA (1)...(19): siRNA sense strand
ugucugguauuuccaaggu

SEQ ID NO: 290856 - RNA, 19 nt, Homo sapiens
  misc_RNA (1)...(19): siRNA sense strand
guuauugcuaugucuggua

SEQ ID NO: 290857 - RNA, 19 nt, Homo sapiens
  misc_RNA (1)...(19): siRNA sense strand
agcagaaaguagaugaaga

SEQ ID NO: 290858 - RNA, 19 nt, Homo sapiens
  misc_RNA (1)...(19): siRNA sense strand
gaaucccagaggaaacuga

SEQ ID NO: 290859 - RNA, 19 nt, Homo sapiens
  misc_RNA (1)...(19): siRNA sense strand
ucucagaauguuguuauug

SEQ ID NO: 290860 - RNA, 19 nt, Homo sapiens
  misc_RNA (1)...(19): siRNA sense strand
agaugcaaauccugguuuc

SEQ ID NO: 290861 - RNA, 19 nt, Homo sapiens
  misc_RNA (1)...(19): siRNA sense strand
ucagaauguuguuauugcu

SEQ ID NO: 290862 - RNA, 19 nt, Homo sapiens
  misc_RNA (1)...(19): siRNA sense strand
uaugagggaagccguuaga

SEQ ID NO: 290863 - RNA, 19 nt, Homo sapiens
  misc_RNA (1)...(19): siRNA sense strand
auugcuaugucugguauuu

SEQ ID NO: 290864 - RNA, 19 nt, Homo sapiens
  misc_RNA (1)...(19): siRNA sense strand
gaaauuacaggacuuagua

SEQ ID NO: 290865 - RNA, 19 nt, Homo sapiens
  misc_RNA (1)...(19): siRNA sense strand
uaagagaaguggauccuaa

SEQ ID NO: 290866 - RNA, 19 nt, Homo sapiens
  misc_RNA (1)...(19): siRNA sense strand
uaaucaaccucuccaauuu

SEQ ID NO: 290867 - RNA, 19 nt, Homo sapiens
  misc_RNA (1)...(19): siRNA sense strand
gaagaaauuacaggacuua

SEQ ID NO: 290868 - RNA, 19 nt, Homo sapiens
  misc_RNA (1)...(19): siRNA sense strand
caauaguacugcaguggua

SEQ ID NO: 290869 - RNA, 19 nt, Homo sapiens
  misc_RNA (1)...(19): siRNA sense strand
gcagauugcugaugauuuu

SEQ ID NO: 290870 - RNA, 19 nt, Homo sapiens
  misc_RNA (1)...(19): siRNA sense strand
gaagaaauccgacccuaca

SEQ ID NO: 290871 - RNA, 19 nt, Homo sapiens
  misc_RNA (1)...(19): siRNA sense strand
gcaguuggaugaagaugug

SEQ ID NO: 290872 - RNA, 19 nt, Homo sapiens
  misc_RNA (1)...(19): siRNA sense strand
ggaaaacaaccaagaaaua

SEQ ID NO: 290873 - RNA, 19 nt, Homo sapiens
  misc_RNA (1)...(19): siRNA sense strand
guacugcagugguaaagau

SEQ ID NO: 290874 - RNA, 19 nt, Homo sapiens
  misc_RNA (1)...(19): siRNA sense strand
cuaaugagcaguuggauga

SEQ ID NO: 290875 - RNA, 19 nt, Homo sapiens
  misc_RNA (1)...(19): siRNA sense strand
gagaaguggauccuaauga

SEQ ID NO: 290876 - RNA, 19 nt, Homo sapiens
  misc_RNA (1)...(19): siRNA sense strand
ccacagaagcucacaaaca

SEQ ID NO: 290877 - RNA, 19 nt, Homo sapiens
  misc_RNA (1)...(19): siRNA sense strand
uccaauuucucauccauaa

SEQ ID NO: 290878 - RNA, 19 nt, Homo sapiens
  misc_RNA (1)...(19): siRNA sense strand
cuaaucaaccucuccaauu

SEQ ID NO: 290879 - RNA, 19 nt, Homo sapiens
  misc_RNA (1)...(19): siRNA sense strand
cacagaagcucacaaacag

SEQ ID NO: 290880 - RNA, 19 nt, Homo sapiens
  misc_RNA (1)...(19): siRNA sense strand
aaucagguauugaccaaga

SEQ ID NO: 290881 - RNA, 19 nt, Homo sapiens
  misc_RNA (1)...(19): siRNA sense strand
gagcgccaguggaacaugu

SEQ ID NO: 290882 - RNA, 19 nt, Homo sapiens
  misc_RNA (1)...(19): siRNA sense strand
gaaauccgacccuacaaaa

SEQ ID NO: 290883 - RNA, 19 nt, Homo sapiens
  misc_RNA (1)...(19): siRNA sense strand
agaaguggauccuaaugag

SEQ ID NO: 290884 - RNA, 19 nt, Homo sapiens
  misc_RNA (1)...(19): siRNA sense strand
gaagcucacaaacagagaa

SEQ ID NO: 290885 - RNA, 19 nt, Homo sapiens
  misc_RNA (1)...(19): siRNA sense strand
caaccucuccaauuucuca

SEQ ID NO: 290886 - RNA, 19 nt, Homo sapiens
  misc_RNA (1)...(19): siRNA sense strand
agaagaaauuacaggacuu

SEQ ID NO: 290887 - RNA, 19 nt, Homo sapiens
  misc_RNA (1)...(19): siRNA sense strand
aaagauguccagcugcauu

SEQ ID NO: 290888 - RNA, 19 nt, Homo sapiens
  misc_RNA (1)...(19): siRNA sense strand
gguauugaccaagaagaaa

SEQ ID NO: 290889 - RNA, 19 nt, Homo sapiens
  misc_RNA (1)...(19): siRNA sense strand
agaaauccgacccuacaaa

SEQ ID NO: 290890 - RNA, 19 nt, Homo sapiens
  misc_RNA (1)...(19): siRNA sense strand
caccacagaagcucacaaa

SEQ ID NO: 290891 - RNA, 19 nt, Homo sapiens
  misc_RNA (1)...(19): siRNA sense strand
guauugaccaagaagaaau

SEQ ID NO: 290892 - RNA, 19 nt, Homo sapiens
  misc_RNA (1)...(19): siRNA sense strand
ugaccaagaagaaauuaca

SEQ ID NO: 290893 - RNA, 19 nt, Homo sapiens
  misc_RNA (1)...(19): siRNA sense strand
ggcaggaggucgucuuagc

SEQ ID NO: 290894 - RNA, 19 nt, Homo sapiens
  misc_RNA (1)...(19): siRNA sense strand
gcucacaaacagagaaugg

SEQ ID NO: 290895 - RNA, 19 nt, Homo sapiens
  misc_RNA (1)...(19): siRNA sense strand
gcauugauccggaaaacaa

SEQ ID NO: 290896 - RNA, 19 nt, Homo sapiens
  misc_RNA (1)...(19): siRNA sense strand
guaagagaaguggauccua

SEQ ID NO: 290897 - RNA, 19 nt, Homo sapiens
  misc_RNA (1)...(19): siRNA sense strand
augaagauguggaggagau

SEQ ID NO: 290898 - RNA, 19 nt, Homo sapiens
  misc_RNA (1)...(19): siRNA sense strand
cccuggaggugaaagaugu

SEQ ID NO: 290899 - RNA, 19 nt, Homo sapiens
  misc_RNA (1)...(19): siRNA sense strand
cccaggauuugguucugaa

SEQ ID NO: 290900 - RNA, 19 nt, Homo sapiens
  misc_RNA (1)...(19): siRNA sense strand
ccaauuucucauccauaaa

SEQ ID NO: 290901 - RNA, 19 nt, Homo sapiens
  misc_RNA (1)...(19): siRNA sense strand
agaaauuacaggacuuagu

SEQ ID NO: 290902 - RNA, 19 nt, Homo sapiens
  misc_RNA (1)...(19): siRNA sense strand
ccuaaucaaccucuccaau

SEQ ID NO: 290903 - RNA, 19 nt, Homo sapiens
  misc_RNA (1)...(19): siRNA sense strand
gauguccagcugcauuuag

SEQ ID NO: 290904 - RNA, 19 nt, Homo sapiens
  misc_RNA (1)...(19): siRNA sense strand
aagauguccagcugcauuu

SEQ ID NO: 290905 - RNA, 19 nt, Homo sapiens
  misc_RNA (1)...(19): siRNA sense strand
ggucgucuuagcccugaaa

SEQ ID NO: 290906 - RNA, 19 nt, Homo sapiens
  misc_RNA (1)...(19): siRNA sense strand
ugcugcagauugcugauga

SEQ ID NO: 290907 - RNA, 19 nt, Homo sapiens
  misc_RNA (1)...(19): siRNA sense strand
guuaaagacuugcuuacua

SEQ ID NO: 290908 - RNA, 19 nt, Homo sapiens
  misc_RNA (1)...(19): siRNA sense strand
gaauugcgauguaugaugu

SEQ ID NO: 290909 - RNA, 19 nt, Homo sapiens
  misc_RNA (1)...(19): siRNA sense strand
gauaucgucuucuugauuc

SEQ ID NO: 290910 - RNA, 19 nt, Homo sapiens
  misc_RNA (1)...(19): siRNA sense strand
ucauagaguuuaucacuga

SEQ ID NO: 290911 - RNA, 19 nt, Homo sapiens
  misc_RNA (1)...(19): siRNA sense strand
gaguacaaguugaagauau

SEQ ID NO: 290912 - RNA, 19 nt, Homo sapiens
  misc_RNA (1)...(19): siRNA sense strand
gaaaggacccaaggaaguu

SEQ ID NO: 290913 - RNA, 19 nt, Homo sapiens
  misc_RNA (1)...(19): siRNA sense strand
ucacugaaaugacucacaa

SEQ ID NO: 290914 - RNA, 19 nt, Homo sapiens
  misc_RNA (1)...(19): siRNA sense strand
ucuaaagaauugcgaugua

SEQ ID NO: 290915 - RNA, 19 nt, Homo sapiens
  misc_RNA (1)...(19): siRNA sense strand
uugaagaucuugucauaga

SEQ ID NO: 290916 - RNA, 19 nt, Homo sapiens
  misc_RNA (1)...(19): siRNA sense strand
gaucuugucauagaguuua

SEQ ID NO: 290917 - RNA, 19 nt, Homo sapiens
  misc_RNA (1)...(19): siRNA sense strand
gaaacgagcuagaaaagca

SEQ ID NO: 290918 - RNA, 19 nt, Homo sapiens
  misc_RNA (1)...(19): siRNA sense strand
cuaaagaauugcgauguau

SEQ ID NO: 290919 - RNA, 19 nt, Homo sapiens
  misc_RNA (1)...(19): siRNA sense strand
gaauugaaacgagcuagaa

SEQ ID NO: 290920 - RNA, 19 nt, Homo sapiens
  misc_RNA (1)...(19): siRNA sense strand
ugaagcaaauuauggaucu

SEQ ID NO: 290921 - RNA, 19 nt, Homo sapiens
  misc_RNA (1)...(19): siRNA sense strand
gaguuuaucacugaaauga

SEQ ID NO: 290922 - RNA, 19 nt, Homo sapiens
  misc_RNA (1)...(19): siRNA sense strand
gaaguuugccaggguuaaa

SEQ ID NO: 290923 - RNA, 19 nt, Homo sapiens
  misc_RNA (1)...(19): siRNA sense strand
ggaagaagaccccacguuu

SEQ ID NO: 290924 - RNA, 19 nt, Homo sapiens
  misc_RNA (1)...(19): siRNA sense strand
caaggucgaguacaaguug

SEQ ID NO: 290925 - RNA, 19 nt, Homo sapiens
  misc_RNA (1)...(19): siRNA sense strand
aagacaaggucgaguacaa

SEQ ID NO: 290926 - RNA, 19 nt, Homo sapiens
  misc_RNA (1)...(19): siRNA sense strand
aaagaauugcgauguauga

SEQ ID NO: 290927 - RNA, 19 nt, Homo sapiens
  misc_RNA (1)...(19): siRNA sense strand
cgaaaggacccaaggaagu

SEQ ID NO: 290928 - RNA, 19 nt, Homo sapiens
  misc_RNA (1)...(19): siRNA sense strand
gaaugaagaauugaaacga

SEQ ID NO: 290929 - RNA, 19 nt, Homo sapiens
  misc_RNA (1)...(19): siRNA sense strand
aagacuugcuuacuaugaa

SEQ ID NO: 290930 - RNA, 19 nt, Homo sapiens
  misc_RNA (1)...(19): siRNA sense strand
gaagaucuugucauagagu

SEQ ID NO: 290931 - RNA, 19 nt, Homo sapiens
  misc_RNA (1)...(19): siRNA sense strand
gaagcaaauuauggaucuu

SEQ ID NO: 290932 - RNA, 19 nt, Homo sapiens
  misc_RNA (1)...(19): siRNA sense strand
gaagaauugaaacgagcua

SEQ ID NO: 290933 - RNA, 19 nt, Homo sapiens
  misc_RNA (1)...(19): siRNA sense strand
gaagaagaccccacguuug

SEQ ID NO: 290934 - RNA, 19 nt, Homo sapiens
  misc_RNA (1)...(19): siRNA sense strand
gaccagaauccuuauacug

SEQ ID NO: 290935 - RNA, 19 nt, Homo sapiens
  misc_RNA (1)...(19): siRNA sense strand
ucacaaggcaaugucaauu

SEQ ID NO: 290936 - RNA, 19 nt, Homo sapiens
  misc_RNA (1)...(19): siRNA sense strand
gucaguggauauucuugaa

SEQ ID NO: 290937 - RNA, 19 nt, Homo sapiens
  misc_RNA (1)...(19): siRNA sense strand
gaugaccagaauccuuaua

SEQ ID NO: 290938 - RNA, 19 nt, Homo sapiens
  misc_RNA (1)...(19): siRNA sense strand
uggaggaggugcagaaggu

SEQ ID NO: 290939 - RNA, 19 nt, Homo sapiens
  misc_RNA (1)...(19): siRNA sense strand
uaaagaauugcgauguaug

SEQ ID NO: 290940 - RNA, 19 nt, Homo sapiens
  misc_RNA (1)...(19): siRNA sense strand
aaagacuugcuuacuauga

SEQ ID NO: 290941 - RNA, 19 nt, Homo sapiens
  misc_RNA (1)...(19): siRNA sense strand
ggaaguuugccaggguuaa

SEQ ID NO: 290942 - RNA, 19 nt, Homo sapiens
  misc_RNA (1)...(19): siRNA sense strand
guuuaucacugaaaugacu

SEQ ID NO: 290943 - RNA, 19 nt, Homo sapiens
  misc_RNA (1)...(19): siRNA sense strand
uggaagacaaggucgagua

SEQ ID NO: 290944 - RNA, 19 nt, Homo sapiens
  misc_RNA (1)...(19): siRNA sense strand
accagaauccuuauacuga

SEQ ID NO: 290945 - RNA, 19 nt, Homo sapiens
  misc_RNA (1)...(19): siRNA sense strand
ggaagacaaggucgaguac

SEQ ID NO: 290946 - RNA, 19 nt, Homo sapiens
  misc_RNA (1)...(19): siRNA sense strand
cagaauccuuauacugagu

SEQ ID NO: 290947 - RNA, 19 nt, Homo sapiens
  misc_RNA (1)...(19): siRNA sense strand
cauagaguuuaucacugaa

SEQ ID NO: 290948 - RNA, 19 nt, Homo sapiens
  misc_RNA (1)...(19): siRNA sense strand
cgaguacaaguugaagaua

SEQ ID NO: 290949 - RNA, 19 nt, Homo sapiens
  misc_RNA (1)...(19): siRNA sense strand
agauaucgucuucuugauu

SEQ ID NO: 290950 - RNA, 19 nt, Homo sapiens
  misc_RNA (1)...(19): siRNA sense strand
agacuugcuuacuaugaau

SEQ ID NO: 290951 - RNA, 19 nt, Homo sapiens
  misc_RNA (1)...(19): siRNA sense strand
aguacaaguugaagauauc

SEQ ID NO: 290952 - RNA, 19 nt, Homo sapiens
  misc_RNA (1)...(19): siRNA sense strand
ugaugaagcaaauuaugga

SEQ ID NO: 290953 - RNA, 19 nt, Homo sapiens
  misc_RNA (1)...(19): siRNA sense strand
ugccaggguuaaagacuug

SEQ ID NO: 290954 - RNA, 19 nt, Homo sapiens
  misc_RNA (1)...(19): siRNA sense strand
ugaccagaauccuuauacu

SEQ ID NO: 290955 - RNA, 19 nt, Homo sapiens
  misc_RNA (1)...(19): siRNA sense strand
gaauccuuauacugaguca

SEQ ID NO: 290956 - RNA, 19 nt, Homo sapiens
  misc_RNA (1)...(19): siRNA sense strand
ugaagaucuugucauagag

SEQ ID NO: 290957 - RNA, 19 nt, Homo sapiens
  misc_RNA (1)...(19): siRNA sense strand
uguaugauguauggcuuug

SEQ ID NO: 290958 - RNA, 19 nt, Homo sapiens
  misc_RNA (1)...(19): siRNA sense strand
uaaagacuugcuuacuaug

SEQ ID NO: 290959 - RNA, 19 nt, Homo sapiens
  misc_RNA (1)...(19): siRNA sense strand
gacaaggucgaguacaagu

SEQ ID NO: 290960 - RNA, 19 nt, Homo sapiens
  misc_RNA (1)...(19): siRNA sense strand
gaagacaaggucgaguaca

SEQ ID NO: 290961 - RNA, 19 nt, Homo sapiens
  misc_RNA (1)...(19): siRNA sense strand
cagaagguggacaggguaa

SEQ ID NO: 290962 - RNA, 19 nt, Homo sapiens
  misc_RNA (1)...(19): siRNA sense strand
gaugaagcaaauuauggau

SEQ ID NO: 290963 - RNA, 19 nt, Homo sapiens
  misc_RNA (1)...(19): siRNA sense strand
ugucauagaguuuaucacu

SEQ ID NO: 290964 - RNA, 19 nt, Homo sapiens
  misc_RNA (1)...(19): siRNA sense strand
agcaaauuauggaucuuga

SEQ ID NO: 290965 - RNA, 19 nt, Homo sapiens
  misc_RNA (1)...(19): siRNA sense strand
ggacaggguaaaagaaaga

SEQ ID NO: 290966 - RNA, 19 nt, Homo sapiens
  misc_RNA (1)...(19): siRNA sense strand
ugcgauguaugauguaugg

SEQ ID NO: 290967 - RNA, 19 nt, Homo sapiens
  misc_RNA (1)...(19): siRNA sense strand
agaauugcgauguaugaug

SEQ ID NO: 290968 - RNA, 19 nt, Homo sapiens
  misc_RNA (1)...(19): siRNA sense strand
aagaucuugucauagaguu

SEQ ID NO: 290969 - RNA, 19 nt, Homo sapiens
  misc_RNA (1)...(19): siRNA sense strand
gaagguggacaggguaaaa

SEQ ID NO: 290970 - RNA, 19 nt, Homo sapiens
  misc_RNA (1)...(19): siRNA sense strand
aagaagaccccacguuuga

SEQ ID NO: 290971 - RNA, 19 nt, Homo sapiens
  misc_RNA (1)...(19): siRNA sense strand
guacagaccuucauagaaa

SEQ ID NO: 290972 - RNA, 19 nt, Homo sapiens
  misc_RNA (1)...(19): siRNA sense strand
ggaaaucagauacauguua

SEQ ID NO: 290973 - RNA, 19 nt, Homo sapiens
  misc_RNA (1)...(19): siRNA sense strand
gaagcaagcccuuauaguu

SEQ ID NO: 290974 - RNA, 19 nt, Homo sapiens
  misc_RNA (1)...(19): siRNA sense strand
aagaugagcuucuaaaguu

SEQ ID NO: 290975 - RNA, 19 nt, Homo sapiens
  misc_RNA (1)...(19): siRNA sense strand
gcaaucaagcuauuagaua

SEQ ID NO: 290976 - RNA, 19 nt, Homo sapiens
  misc_RNA (1)...(19): siRNA sense strand
gagaauguauugcggauau

SEQ ID NO: 290977 - RNA, 19 nt, Homo sapiens
  misc_RNA (1)...(19): siRNA sense strand
ggacugaaauuacagaagu

SEQ ID NO: 290978 - RNA, 19 nt, Homo sapiens
  misc_RNA (1)...(19): siRNA sense strand
aagaguagcuuccuauuga

SEQ ID NO: 290979 - RNA, 19 nt, Homo sapiens
  misc_RNA (1)...(19): siRNA sense strand
ugaaugagcuaaauagugu

SEQ ID NO: 290980 - RNA, 19 nt, Homo sapiens
  misc_RNA (1)...(19): siRNA sense strand
agacauagguacuaauuug

SEQ ID NO: 290981 - RNA, 19 nt, Homo sapiens
  misc_RNA (1)...(19): siRNA sense strand
gguguuaacugagcuuaua

SEQ ID NO: 290982 - RNA, 19 nt, Homo sapiens
  misc_RNA (1)...(19): siRNA sense strand
cgacaaaccgaccaauuua

SEQ ID NO: 290983 - RNA, 19 nt, Homo sapiens
  misc_RNA (1)...(19): siRNA sense strand
gauagugucugcuucaaau

SEQ ID NO: 290984 - RNA, 19 nt, Homo sapiens
  misc_RNA (1)...(19): siRNA sense strand
gaagucagauucagagagu

SEQ ID NO: 290985 - RNA, 19 nt, Homo sapiens
  misc_RNA (1)...(19): siRNA sense strand
ccaaggaucuuuaucaagu

SEQ ID NO: 290986 - RNA, 19 nt, Homo sapiens
  misc_RNA (1)...(19): siRNA sense strand
ugaaaugucugcuauaaag

SEQ ID NO: 290987 - RNA, 19 nt, Homo sapiens
  misc_RNA (1)...(19): siRNA sense strand
caaagaagguguuauccau

SEQ ID NO: 290988 - RNA, 19 nt, Homo sapiens
  misc_RNA (1)...(19): siRNA sense strand
gaaugaagacucaguauag

SEQ ID NO: 290989 - RNA, 19 nt, Homo sapiens
  misc_RNA (1)...(19): siRNA sense strand
cagcaaaucugauccaaca

SEQ ID NO: 290990 - RNA, 19 nt, Homo sapiens
  misc_RNA (1)...(19): siRNA sense strand
ucacaguucuuucuucuga

SEQ ID NO: 290991 - RNA, 19 nt, Homo sapiens
  misc_RNA (1)...(19): siRNA sense strand
gagagcauuucugaauuua

SEQ ID NO: 290992 - RNA, 19 nt, Homo sapiens
  misc_RNA (1)...(19): siRNA sense strand
ggaaugaagacucaguaua

SEQ ID NO: 290993 - RNA, 19 nt, Homo sapiens
  misc_RNA (1)...(19): siRNA sense strand
caauauugcuuuccugaga

SEQ ID NO: 290994 - RNA, 19 nt, Homo sapiens
  misc_RNA (1)...(19): siRNA sense strand
ucagaagacuuacuaugaa

SEQ ID NO: 290995 - RNA, 19 nt, Homo sapiens
  misc_RNA (1)...(19): siRNA sense strand
uaaagagcauuguucaaga

SEQ ID NO: 290996 - RNA, 19 nt, Homo sapiens
  misc_RNA (1)...(19): siRNA sense strand
agaaaucucugcucuuguu

SEQ ID NO: 290997 - RNA, 19 nt, Homo sapiens
  misc_RNA (1)...(19): siRNA sense strand
uuagauggcuccaauaugu

SEQ ID NO: 290998 - RNA, 19 nt, Homo sapiens
  misc_RNA (1)...(19): siRNA sense strand
gagcauuguucaagaguau

SEQ ID NO: 290999 - RNA, 19 nt, Homo sapiens
  misc_RNA (1)...(19): siRNA sense strand
gaaaugaacgugagggaau

SEQ ID NO: 291000 - RNA, 19 nt, Homo sapiens
  misc_RNA (1)...(19): siRNA sense strand
gauauucugggcuaauuua

SEQ ID NO: 291001 - RNA, 19 nt, Homo sapiens
  misc_RNA (1)...(19): siRNA sense strand
ccuugaggcuuguauauuu

SEQ ID NO: 291002 - RNA, 19 nt, Homo sapiens
  misc_RNA (1)...(19): siRNA sense strand
ucagggauguuauucauug

SEQ ID NO: 291003 - RNA, 19 nt, Homo sapiens
  misc_RNA (1)...(19): siRNA sense strand
aagaagguguuauccauuu

SEQ ID NO: 291004 - RNA, 19 nt, Homo sapiens
  misc_RNA (1)...(19): siRNA sense strand
ggauuucagugguaccuuu

SEQ ID NO: 291005 - RNA, 19 nt, Homo sapiens
  misc_RNA (1)...(19): siRNA sense strand
gcagagaacagagaaugua

SEQ ID NO: 291006 - RNA, 19 nt, Homo sapiens
  misc_RNA (1)...(19): siRNA sense strand
agagagcauuucugaauuu

SEQ ID NO: 291007 - RNA, 19 nt, Homo sapiens
  misc_RNA (1)...(19): siRNA sense strand
ggaaacggcccaagucugu

SEQ ID NO: 291008 - RNA, 19 nt, Homo sapiens
  misc_RNA (1)...(19): siRNA sense strand
aacccuaucuggagaguua

SEQ ID NO: 291009 - RNA, 19 nt, Homo sapiens
  misc_RNA (1)...(19): siRNA sense strand
gaagacuuacuaugaauga

SEQ ID NO: 291010 - RNA, 19 nt, Homo sapiens
  misc_RNA (1)...(19): siRNA sense strand
gaugaggugucuacuguuc

SEQ ID NO: 291011 - RNA, 19 nt, Homo sapiens
  misc_RNA (1)...(19): siRNA sense strand
uaccaaagcuaaacaaucu

SEQ ID NO: 291012 - RNA, 19 nt, Homo sapiens
  misc_RNA (1)...(19): siRNA sense strand
ggacguuuguguggaaauu

SEQ ID NO: 291013 - RNA, 19 nt, Homo sapiens
  misc_RNA (1)...(19): siRNA sense strand
gagaacagagaauguauug

SEQ ID NO: 291014 - RNA, 19 nt, Homo sapiens
  misc_RNA (1)...(19): siRNA sense strand
gaacuucauuguggacaga

SEQ ID NO: 291015 - RNA, 19 nt, Homo sapiens
  misc_RNA (1)...(19): siRNA sense strand
gcuaugaauuugcuagaug

SEQ ID NO: 291016 - RNA, 19 nt, Homo sapiens
  misc_RNA (1)...(19): siRNA sense strand
cagaagaaauaaagaguag

SEQ ID NO: 291017 - RNA, 19 nt, Homo sapiens
  misc_RNA (1)...(19): siRNA sense strand
uaagagagaagaccauuau

SEQ ID NO: 291018 - RNA, 19 nt, Homo sapiens
  misc_RNA (1)...(19): siRNA sense strand
gaacaguggcuuccucuag

SEQ ID NO: 291019 - RNA, 19 nt, Homo sapiens
  misc_RNA (1)...(19): siRNA sense strand
ggaaugccaagaagaauug

SEQ ID NO: 291020 - RNA, 19 nt, Homo sapiens
  misc_RNA (1)...(19): siRNA sense strand
gaaacuaauucugaagcaa

SEQ ID NO: 291021 - RNA, 19 nt, Homo sapiens
  misc_RNA (1)...(19): siRNA sense strand
aagcaacacucagcugaua

SEQ ID NO: 291022 - RNA, 19 nt, Homo sapiens
  misc_RNA (1)...(19): siRNA sense strand
caagacauagguacuaauu

SEQ ID NO: 291023 - RNA, 19 nt, Homo sapiens
  misc_RNA (1)...(19): siRNA sense strand
ucaagaguauguuaaguca

SEQ ID NO: 291024 - RNA, 19 nt, Homo sapiens
  misc_RNA (1)...(19): siRNA sense strand
caaaucugauccaacaguu

SEQ ID NO: 291025 - RNA, 19 nt, Homo sapiens
  misc_RNA (1)...(19): siRNA sense strand
ggaauuauugacaggauuu

SEQ ID NO: 291026 - RNA, 19 nt, Homo sapiens
  misc_RNA (1)...(19): siRNA sense strand
gagagaagaccauuaugug

SEQ ID NO: 291027 - RNA, 19 nt, Homo sapiens
  misc_RNA (1)...(19): siRNA sense strand
cggcaaauauuguuaugga

SEQ ID NO: 291028 - RNA, 19 nt, Homo sapiens
  misc_RNA (1)...(19): siRNA sense strand
caauaugucccacaaguug

SEQ ID NO: 291029 - RNA, 19 nt, Homo sapiens
  misc_RNA (1)...(19): siRNA sense strand
ggagaaaacugcuuuaugc

SEQ ID NO: 291030 - RNA, 19 nt, Homo sapiens
  misc_RNA (1)...(19): siRNA sense strand
ggaauuccagcaaaucuga

SEQ ID NO: 291031 - RNA, 19 nt, Homo sapiens
  misc_RNA (1)...(19): siRNA sense strand
uguaaaguguuaaguguug

SEQ ID NO: 291032 - RNA, 19 nt, Homo sapiens
  misc_RNA (1)...(19): siRNA sense strand
cagaggagcagagcaguua

SEQ ID NO: 291033 - RNA, 19 nt, Homo sapiens
  misc_RNA (1)...(19): siRNA sense strand
gaaagcagagaacagagaa

SEQ ID NO: 291034 - RNA, 19 nt, Homo sapiens
  misc_RNA (1)...(19): siRNA sense strand
gaacacaugcagguugaaa

SEQ ID NO: 291035 - RNA, 19 nt, Homo sapiens
  misc_RNA (1)...(19): siRNA sense strand
gagcagggaaugccaagaa

SEQ ID NO: 291036 - RNA, 19 nt, Homo sapiens
  misc_RNA (1)...(19): siRNA sense strand
ucaaagacuuguucaggau

SEQ ID NO: 291037 - RNA, 19 nt, Homo sapiens
  misc_RNA (1)...(19): siRNA sense strand
gacauggcguggaaaauua

SEQ ID NO: 291038 - RNA, 19 nt, Homo sapiens
  misc_RNA (1)...(19): siRNA sense strand
gacuguguguaaaguguua

SEQ ID NO: 291039 - RNA, 19 nt, Homo sapiens
  misc_RNA (1)...(19): siRNA sense strand
uuucugaugucucaacuuu

SEQ ID NO: 291040 - RNA, 19 nt, Homo sapiens
  misc_RNA (1)...(19): siRNA sense strand
aagaaacucuggacugugu

SEQ ID NO: 291041 - RNA, 19 nt, Homo sapiens
  misc_RNA (1)...(19): siRNA sense strand
gaaggaaacggcccaaguc

SEQ ID NO: 291042 - RNA, 19 nt, Homo sapiens
  misc_RNA (1)...(19): siRNA sense strand
acacucagcugauauucug

SEQ ID NO: 291043 - RNA, 19 nt, Homo sapiens
  misc_RNA (1)...(19): siRNA sense strand
gcaacacucagcugauauu

SEQ ID NO: 291044 - RNA, 19 nt, Homo sapiens
  misc_RNA (1)...(19): siRNA sense strand
ggaaagcagagaacagaga

SEQ ID NO: 291045 - RNA, 19 nt, Homo sapiens
  misc_RNA (1)...(19): siRNA sense strand
guaaagagcauuguucaag

SEQ ID NO: 291046 - RNA, 19 nt, Homo sapiens
  misc_RNA (1)...(19): siRNA sense strand
uggaugugcuuaugaaguu

SEQ ID NO: 291047 - RNA, 19 nt, Homo sapiens
  misc_RNA (1)...(19): siRNA sense strand
ggaacaaacugccaaaagu

SEQ ID NO: 291048 - RNA, 19 nt, Homo sapiens
  misc_RNA (1)...(19): siRNA sense strand
ccaaaguucugggauuguu

SEQ ID NO: 291049 - RNA, 19 nt, Homo sapiens
  misc_RNA (1)...(19): siRNA sense strand
ucaagggccaggcauauuu

SEQ ID NO: 291050 - RNA, 19 nt, Homo sapiens
  misc_RNA (1)...(19): siRNA sense strand
cagaagacuuacuaugaau

SEQ ID NO: 291051 - RNA, 19 nt, Homo sapiens
  misc_RNA (1)...(19): siRNA sense strand
cuucauaaauucccucaau

SEQ ID NO: 291052 - RNA, 19 nt, Homo sapiens
  misc_RNA (1)...(19): siRNA sense strand
agaagaccauuaugugaga

SEQ ID NO: 291053 - RNA, 19 nt, Homo sapiens
  misc_RNA (1)...(19): siRNA sense strand
ucaaaugugucccaaggau

SEQ ID NO: 291054 - RNA, 19 nt, Homo sapiens
  misc_RNA (1)...(19): siRNA sense strand
uauggagacuuuagaagga

SEQ ID NO: 291055 - RNA, 19 nt, Homo sapiens
  misc_RNA (1)...(19): siRNA sense strand
gaaggaaaucagauacaug

SEQ ID NO: 291056 - RNA, 19 nt, Homo sapiens
  misc_RNA (1)...(19): siRNA sense strand
caacaaucaagcauccaua

SEQ ID NO: 291057 - RNA, 19 nt, Homo sapiens
  misc_RNA (1)...(19): siRNA sense strand
ccagaagaaauaaagagua

SEQ ID NO: 291058 - RNA, 19 nt, Homo sapiens
  misc_RNA (1)...(19): siRNA sense strand
acucaaggauuauugucua

SEQ ID NO: 291059 - RNA, 19 nt, Homo sapiens
  misc_RNA (1)...(19): siRNA sense strand
uuaagaaacucuggacugu

SEQ ID NO: 291060 - RNA, 19 nt, Homo sapiens
  misc_RNA (1)...(19): siRNA sense strand
aaauggauguuggcucuuu

SEQ ID NO: 291061 - RNA, 19 nt, Homo sapiens
  misc_RNA (1)...(19): siRNA sense strand
gcuaaauaguguuucagau

SEQ ID NO: 291062 - RNA, 19 nt, Homo sapiens
  misc_RNA (1)...(19): siRNA sense strand
ggacgaggaacuucauugu

SEQ ID NO: 291063 - RNA, 19 nt, Homo sapiens
  misc_RNA (1)...(19): siRNA sense strand
gugccucucuuuccuguug

SEQ ID NO: 291064 - RNA, 19 nt, Homo sapiens
  misc_RNA (1)...(19): siRNA sense strand
gaagaaaacagaagguuau

SEQ ID NO: 291065 - RNA, 19 nt, Homo sapiens
  misc_RNA (1)...(19): siRNA sense strand
gcuacuaugugaauucucu

SEQ ID NO: 291066 - RNA, 19 nt, Homo sapiens
  misc_RNA (1)...(19): siRNA sense strand
gcuccaauaugucccacaa

SEQ ID NO: 291067 - RNA, 19 nt, Homo sapiens
  misc_RNA (1)...(19): siRNA sense strand
gaaaugucugcuauaaaga

SEQ ID NO: 291068 - RNA, 19 nt, Homo sapiens
  misc_RNA (1)...(19): siRNA sense strand
gcccaaugcuaccuucuuc

SEQ ID NO: 291069 - RNA, 19 nt, Homo sapiens
  misc_RNA (1)...(19): siRNA sense strand
ggauguacagaccuucaua

SEQ ID NO: 291070 - RNA, 19 nt, Homo sapiens
  misc_RNA (1)...(19): siRNA sense strand
ggaaggaaacggcccaagu

SEQ ID NO: 291071 - RNA, 19 nt, Homo sapiens
  misc_RNA (1)...(19): siRNA sense strand
ggaaauagauggagagguu

SEQ ID NO: 291072 - RNA, 19 nt, Homo sapiens
  misc_RNA (1)...(19): siRNA sense strand
gcaagugcuucguuugauu

SEQ ID NO: 291073 - RNA, 19 nt, Homo sapiens
  misc_RNA (1)...(19): siRNA sense strand
ccacucggcuuucacguuu

SEQ ID NO: 291074 - RNA, 19 nt, Homo sapiens
  misc_RNA (1)...(19): siRNA sense strand
agacucaacugcaaggaua

SEQ ID NO: 291075 - RNA, 19 nt, Homo sapiens
  misc_RNA (1)...(19): siRNA sense strand
gaagagaacagagcacauu

SEQ ID NO: 291076 - RNA, 19 nt, Homo sapiens
  misc_RNA (1)...(19): siRNA sense strand
aaagagaucuacaccauca

SEQ ID NO: 291077 - RNA, 19 nt, Homo sapiens
  misc_RNA (1)...(19): siRNA sense strand
gaaaucuuguccacagcua

SEQ ID NO: 291078 - RNA, 19 nt, Homo sapiens
  misc_RNA (1)...(19): siRNA sense strand
gccaugacgucccgaguaa

SEQ ID NO: 291079 - RNA, 19 nt, Homo sapiens
  misc_RNA (1)...(19): siRNA sense strand
uugaagaucuggagcauga

SEQ ID NO: 291080 - RNA, 19 nt, Homo sapiens
  misc_RNA (1)...(19): siRNA sense strand
ggauauggaaccugaauga

SEQ ID NO: 291081 - RNA, 19 nt, Homo sapiens
  misc_RNA (1)...(19): siRNA sense strand
uauggaaccugaaugagaa

SEQ ID NO: 291082 - RNA, 19 nt, Homo sapiens
  misc_RNA (1)...(19): siRNA sense strand
gagcacauucagucaauaa

SEQ ID NO: 291083 - RNA, 19 nt, Homo sapiens
  misc_RNA (1)...(19): siRNA sense strand
gaagcucgcucagcagcaa

SEQ ID NO: 291084 - RNA, 19 nt, Homo sapiens
  misc_RNA (1)...(19): siRNA sense strand
gacaugacauugaagaucu

SEQ ID NO: 291085 - RNA, 19 nt, Homo sapiens
  misc_RNA (1)...(19): siRNA sense strand
ggacuggaauaccaaugga

SEQ ID NO: 291086 - RNA, 19 nt, Homo sapiens
  misc_RNA (1)...(19): siRNA sense strand
agaagggccugcaguaugu

SEQ ID NO: 291087 - RNA, 19 nt, Homo sapiens
  misc_RNA (1)...(19): siRNA sense strand
gaucuucaggcucacaaua

SEQ ID NO: 291088 - RNA, 19 nt, Homo sapiens
  misc_RNA (1)...(19): siRNA sense strand
agucugagguguucauuug

SEQ ID NO: 291089 - RNA, 19 nt, Homo sapiens
  misc_RNA (1)...(19): siRNA sense strand
gauguggacuggcagaaca

SEQ ID NO: 291090 - RNA, 19 nt, Homo sapiens
  misc_RNA (1)...(19): siRNA sense strand
uaaccuggccagcaccuua

SEQ ID NO: 291091 - RNA, 19 nt, Homo sapiens
  misc_RNA (1)...(19): siRNA sense strand
gcaccacuuucaacguuug

SEQ ID NO: 291092 - RNA, 19 nt, Homo sapiens
  misc_RNA (1)...(19): siRNA sense strand
gaagaucuggagcaugaaa

SEQ ID NO: 291093 - RNA, 19 nt, Homo sapiens
  misc_RNA (1)...(19): siRNA sense strand
gagauuccauccagcaaag

SEQ ID NO: 291094 - RNA, 19 nt, Homo sapiens
  misc_RNA (1)...(19): siRNA sense strand
auaaagagaucuacaccau

SEQ ID NO: 291095 - RNA, 19 nt, Homo sapiens
  misc_RNA (1)...(19): siRNA sense strand
cggaugacaugacauugaa

SEQ ID NO: 291096 - RNA, 19 nt, Homo sapiens
  misc_RNA (1)...(19): siRNA sense strand
gaaaggggaauuacauuuu

SEQ ID NO: 291097 - RNA, 19 nt, Homo sapiens
  misc_RNA (1)...(19): siRNA sense strand
cacauucagucaauaauca

SEQ ID NO: 291098 - RNA, 19 nt, Homo sapiens
  misc_RNA (1)...(19): siRNA sense strand
cagcaggcauuccgagaga

SEQ ID NO: 291099 - RNA, 19 nt, Homo sapiens
  misc_RNA (1)...(19): siRNA sense strand
cgaagccaauggaaauaga

SEQ ID NO: 291100 - RNA, 19 nt, Homo sapiens
  misc_RNA (1)...(19): siRNA sense strand
ucaccucacuggacuggaa

SEQ ID NO: 291101 - RNA, 19 nt, Homo sapiens
  misc_RNA (1)...(19): siRNA sense strand
ggauccgucuggaauguug

SEQ ID NO: 291102 - RNA, 19 nt, Homo sapiens
  misc_RNA (1)...(19): siRNA sense strand
cagagcacauucagucaau

SEQ ID NO: 291103 - RNA, 19 nt, Homo sapiens
  misc_RNA (1)...(19): siRNA sense strand
caccuuaggccaacauaaa

SEQ ID NO: 291104 - RNA, 19 nt, Homo sapiens
  misc_RNA (1)...(19): siRNA sense strand
ucacuggacuggaauacca

SEQ ID NO: 291105 - RNA, 19 nt, Homo sapiens
  misc_RNA (1)...(19): siRNA sense strand
cagcaaagccacaguccuu

SEQ ID NO: 291106 - RNA, 19 nt, Homo sapiens
  misc_RNA (1)...(19): siRNA sense strand
gcacauucagucaauaauc

SEQ ID NO: 291107 - RNA, 19 nt, Homo sapiens
  misc_RNA (1)...(19): siRNA sense strand
ccacacaggagaagccaaa

SEQ ID NO: 291108 - RNA, 19 nt, Homo sapiens
  misc_RNA (1)...(19): siRNA sense strand
cagaagggccugcaguaug

SEQ ID NO: 291109 - RNA, 19 nt, Homo sapiens
  misc_RNA (1)...(19): siRNA sense strand
gaacgcccgaggagacaaa

SEQ ID NO: 291110 - RNA, 19 nt, Homo sapiens
  misc_RNA (1)...(19): siRNA sense strand
acaaagacgucaccucacu

SEQ ID NO: 291111 - RNA, 19 nt, Homo sapiens
  misc_RNA (1)...(19): siRNA sense strand
gaggcuaagaugagcauaa

SEQ ID NO: 291112 - RNA, 19 nt, Homo sapiens
  misc_RNA (1)...(19): siRNA sense strand
guagaggccgagaucagua

SEQ ID NO: 291113 - RNA, 19 nt, Homo sapiens
  misc_RNA (1)...(19): siRNA sense strand
caacugcaaggauauggaa

SEQ ID NO: 291114 - RNA, 19 nt, Homo sapiens
  misc_RNA (1)...(19): siRNA sense strand
guuggcaagugcuucguuu

SEQ ID NO: 291115 - RNA, 19 nt, Homo sapiens
  misc_RNA (1)...(19): siRNA sense strand
gcucggaugacaugacauu

SEQ ID NO: 291116 - RNA, 19 nt, Homo sapiens
  misc_RNA (1)...(19): siRNA sense strand
caaaauccaucgaagaaca

SEQ ID NO: 291117 - RNA, 19 nt, Homo sapiens
  misc_RNA (1)...(19): siRNA sense strand
cgacggcucuguguguguu

SEQ ID NO: 291118 - RNA, 19 nt, Homo sapiens
  misc_RNA (1)...(19): siRNA sense strand
gaugacaugacauugaaga

SEQ ID NO: 291119 - RNA, 19 nt, Homo sapiens
  misc_RNA (1)...(19): siRNA sense strand
ccacccagcucguguugag

SEQ ID NO: 291120 - RNA, 19 nt, Homo sapiens
  misc_RNA (1)...(19): siRNA sense strand
gugacgaggugaacuuucu

SEQ ID NO: 291121 - RNA, 19 nt, Homo sapiens
  misc_RNA (1)...(19): siRNA sense strand
ccuggaauccugucaguga

SEQ ID NO: 291122 - RNA, 19 nt, Homo sapiens
  misc_RNA (1)...(19): siRNA sense strand
cagaacaacacgaccuuug

SEQ ID NO: 291123 - RNA, 19 nt, Homo sapiens
  misc_RNA (1)...(19): siRNA sense strand
gagugcugguguagacaaa

SEQ ID NO: 291124 - RNA, 19 nt, Homo sapiens
  misc_RNA (1)...(19): siRNA sense strand
ggccaugacgucccgagua

SEQ ID NO: 291125 - RNA, 19 nt, Homo sapiens
  misc_RNA (1)...(19): siRNA sense strand
ggugaacuuucugguguau

SEQ ID NO: 291126 - RNA, 19 nt, Homo sapiens
  misc_RNA (1)...(19): siRNA sense strand
aacccaaacuccaacauca

SEQ ID NO: 291127 - RNA, 19 nt, Homo sapiens
  misc_RNA (1)...(19): siRNA sense strand
gcaguuuccuuuucauuca

SEQ ID NO: 291128 - RNA, 19 nt, Homo sapiens
  misc_RNA (1)...(19): siRNA sense strand
gcaccuuaggccaacauaa

SEQ ID NO: 291129 - RNA, 19 nt, Homo sapiens
  misc_RNA (1)...(19): siRNA sense strand
gcagaacaacacgaccuuu

SEQ ID NO: 291130 - RNA, 19 nt, Homo sapiens
  misc_RNA (1)...(19): siRNA sense strand
gugcuucguuugauucuac

SEQ ID NO: 291131 - RNA, 19 nt, Homo sapiens
  misc_RNA (1)...(19): siRNA sense strand
ucuucaggcucacaauaaa

SEQ ID NO: 291132 - RNA, 19 nt, Homo sapiens
  misc_RNA (1)...(19): siRNA sense strand
gaaccugaaugagaauagc

SEQ ID NO: 291133 - RNA, 19 nt, Homo sapiens
  misc_RNA (1)...(19): siRNA sense strand
gacaagugcguccauaucu

SEQ ID NO: 291134 - RNA, 19 nt, Homo sapiens
  misc_RNA (1)...(19): siRNA sense strand
cgacaagugcguccauauc

SEQ ID NO: 291135 - RNA, 19 nt, Homo sapiens
  misc_RNA (1)...(19): siRNA sense strand
gcacccacacgcucacgaa

SEQ ID NO: 291136 - RNA, 19 nt, Homo sapiens
  misc_RNA (1)...(19): siRNA sense strand
ggcaagugcuucguuugau

SEQ ID NO: 291137 - RNA, 19 nt, Homo sapiens
  misc_RNA (1)...(19): siRNA sense strand
uagagucccugucacugau

SEQ ID NO: 291138 - RNA, 19 nt, Homo sapiens
  misc_RNA (1)...(19): siRNA sense strand
gaggucaacgccaucaaau

SEQ ID NO: 291139 - RNA, 19 nt, Homo sapiens
  misc_RNA (1)...(19): siRNA sense strand
cgaggucaacgccaucaaa

SEQ ID NO: 291140 - RNA, 19 nt, Homo sapiens
  misc_RNA (1)...(19): siRNA sense strand
gaggugaggcuaagaugag

SEQ ID NO: 291141 - RNA, 19 nt, Homo sapiens
  misc_RNA (1)...(19): siRNA sense strand
uugcaccacuuucaacguu

SEQ ID NO: 291142 - RNA, 19 nt, Homo sapiens
  misc_RNA (1)...(19): siRNA sense strand
ccaugagucugagguguuc

SEQ ID NO: 291143 - RNA, 19 nt, Homo sapiens
  misc_RNA (1)...(19): siRNA sense strand
acagagaggccacggugaa

SEQ ID NO: 291144 - RNA, 19 nt, Homo sapiens
  misc_RNA (1)...(19): siRNA sense strand
gcuaagaugagcauaacca

SEQ ID NO: 291145 - RNA, 19 nt, Homo sapiens
  misc_RNA (1)...(19): siRNA sense strand
caagugcuucguuugauuc

SEQ ID NO: 291146 - RNA, 19 nt, Homo sapiens
  misc_RNA (1)...(19): siRNA sense strand
gagaagccaaacagcaguu

SEQ ID NO: 291147 - RNA, 19 nt, Homo sapiens
  misc_RNA (1)...(19): siRNA sense strand
guucauuugugccuggaau

SEQ ID NO: 291148 - RNA, 19 nt, Homo sapiens
  misc_RNA (1)...(19): siRNA sense strand
gagaggccacggugaaugg

SEQ ID NO: 291149 - RNA, 19 nt, Homo sapiens
  misc_RNA (1)...(19): siRNA sense strand
guggauccuucgacaagug

SEQ ID NO: 291150 - RNA, 19 nt, Homo sapiens
  misc_RNA (1)...(19): siRNA sense strand
ugacgucccgaguaacaaa

SEQ ID NO: 291151 - RNA, 19 nt, Homo sapiens
  misc_RNA (1)...(19): siRNA sense strand
ccagaagggccugcaguau

SEQ ID NO: 291152 - RNA, 19 nt, Homo sapiens
  misc_RNA (1)...(19): siRNA sense strand
acaagugcguccauaucug

SEQ ID NO: 291153 - RNA, 19 nt, Homo sapiens
  misc_RNA (1)...(19): siRNA sense strand
ugaacuuucugguguaucg

SEQ ID NO: 291154 - RNA, 19 nt, Homo sapiens
  misc_RNA (1)...(19): siRNA sense strand
gaagggccugcaguaugua

SEQ ID NO: 291155 - RNA, 19 nt, Homo sapiens
  misc_RNA (1)...(19): siRNA sense strand
gcuuucacguuugggauug

SEQ ID NO: 291156 - RNA, 19 nt, Homo sapiens
  misc_RNA (1)...(19): siRNA sense strand
caacccaaacuccaacauc

SEQ ID NO: 291157 - RNA, 19 nt, Homo sapiens
  misc_RNA (1)...(19): siRNA sense strand
aaaggggaauuacauuuug

SEQ ID NO: 291158 - RNA, 19 nt, Homo sapiens
  misc_RNA (1)...(19): siRNA sense strand
ucuggagacucaacugcaa

SEQ ID NO: 291159 - RNA, 19 nt, Homo sapiens
  misc_RNA (1)...(19): siRNA sense strand
gagaacagagcacauucag

SEQ ID NO: 291160 - RNA, 19 nt, Homo sapiens
  misc_RNA (1)...(19): siRNA sense strand
uggcaagugcuucguuuga

SEQ ID NO: 291161 - RNA, 19 nt, Homo sapiens
  misc_RNA (1)...(19): siRNA sense strand
uggcuacggguucauauga

SEQ ID NO: 291162 - RNA, 19 nt, Homo sapiens
  misc_RNA (1)...(19): siRNA sense strand
ucugagguguucauuugug

SEQ ID NO: 291163 - RNA, 19 nt, Homo sapiens
  misc_RNA (1)...(19): siRNA sense strand
gaagccaauggaaauagau

SEQ ID NO: 291164 - RNA, 19 nt, Homo sapiens
  misc_RNA (1)...(19): siRNA sense strand
agauggagagguugagauu

SEQ ID NO: 291165 - RNA, 19 nt, Homo sapiens
  misc_RNA (1)...(19): siRNA sense strand
ccagugacgaggugaacuu

SEQ ID NO: 291166 - RNA, 19 nt, Homo sapiens
  misc_RNA (1)...(19): siRNA sense strand
gugcauccaugaucuucag

SEQ ID NO: 291167 - RNA, 19 nt, Homo sapiens
  misc_RNA (1)...(19): siRNA sense strand
cgaggugaggcuaagauga

SEQ ID NO: 291168 - RNA, 19 nt, Homo sapiens
  misc_RNA (1)...(19): siRNA sense strand
agaugagcauaaccaguga

SEQ ID NO: 291169 - RNA, 19 nt, Homo sapiens
  misc_RNA (1)...(19): siRNA sense strand
ggaaccugaaugagaauag

SEQ ID NO: 291170 - RNA, 19 nt, Homo sapiens
  misc_RNA (1)...(19): siRNA sense strand
ggccaugcagucagucuug

SEQ ID NO: 291171 - RNA, 19 nt, Homo sapiens
  misc_RNA (1)...(19): siRNA sense strand
ggccaugaauuuauuguaa

SEQ ID NO: 291172 - RNA, 19 nt, Homo sapiens
  misc_RNA (1)...(19): siRNA sense strand
gaacaugcauuaacaucag

SEQ ID NO: 291173 - RNA, 19 nt, Homo sapiens
  misc_RNA (1)...(19): siRNA sense strand
gcugcgaacuucuuagauu

SEQ ID NO: 291174 - RNA, 19 nt, Homo sapiens
  misc_RNA (1)...(19): siRNA sense strand
agagauaccuucacaugug

SEQ ID NO: 291175 - RNA, 19 nt, Homo sapiens
  misc_RNA (1)...(19): siRNA sense strand
uaacagcuccaccgagauu

SEQ ID NO: 291176 - RNA, 19 nt, Homo sapiens
  misc_RNA (1)...(19): siRNA sense strand
gcugauggcugcgaacuuc

SEQ ID NO: 291177 - RNA, 19 nt, Homo sapiens
  misc_RNA (1)...(19): siRNA sense strand
aaaccaaugaggucaauuu

SEQ ID NO: 291178 - RNA, 19 nt, Homo sapiens
  misc_RNA (1)...(19): siRNA sense strand
aagagaacaugcauuaaca

SEQ ID NO: 291179 - RNA, 19 nt, Homo sapiens
  misc_RNA (1)...(19): siRNA sense strand
uaacaucaggcacgauaaa

SEQ ID NO: 291180 - RNA, 19 nt, Homo sapiens
  misc_RNA (1)...(19): siRNA sense strand
guacaagguucgcuacacu

SEQ ID NO: 291181 - RNA, 19 nt, Homo sapiens
  misc_RNA (1)...(19): siRNA sense strand
ugccauguaugucaaauug

SEQ ID NO: 291182 - RNA, 19 nt, Homo sapiens
  misc_RNA (1)...(19): siRNA sense strand
cgaacuucuuagauuguua

SEQ ID NO: 291183 - RNA, 19 nt, Homo sapiens
  misc_RNA (1)...(19): siRNA sense strand
ccaaugaggucaauuuuag

SEQ ID NO: 291184 - RNA, 19 nt, Homo sapiens
  misc_RNA (1)...(19): siRNA sense strand
ucgaaaguaugcauguauu

SEQ ID NO: 291185 - RNA, 19 nt, Homo sapiens
  misc_RNA (1)...(19): siRNA sense strand
caugugcuaucgaaaguau

SEQ ID NO: 291186 - RNA, 19 nt, Homo sapiens
  misc_RNA (1)...(19): siRNA sense strand
gaccugaugccauguaugu

SEQ ID NO: 291187 - RNA, 19 nt, Homo sapiens
  misc_RNA (1)...(19): siRNA sense strand
uuagagagauaccuucaca

SEQ ID NO: 291188 - RNA, 19 nt, Homo sapiens
  misc_RNA (1)...(19): siRNA sense strand
ugauggccaugaauuuauu

SEQ ID NO: 291189 - RNA, 19 nt, Homo sapiens
  misc_RNA (1)...(19): siRNA sense strand
uaucgaaaguaugcaugua

SEQ ID NO: 291190 - RNA, 19 nt, Homo sapiens
  misc_RNA (1)...(19): siRNA sense strand
cgaaaguaugcauguauuu

SEQ ID NO: 291191 - RNA, 19 nt, Homo sapiens
  misc_RNA (1)...(19): siRNA sense strand
gagagauaccuucacaugu

SEQ ID NO: 291192 - RNA, 19 nt, Homo sapiens
  misc_RNA (1)...(19): siRNA sense strand
gcgaacuucuuagauuguu

SEQ ID NO: 291193 - RNA, 19 nt, Homo sapiens
  misc_RNA (1)...(19): siRNA sense strand
gagaacaugcauuaacauc

SEQ ID NO: 291194 - RNA, 19 nt, Homo sapiens
  misc_RNA (1)...(19): siRNA sense strand
cuucacaugugcuaucgaa

SEQ ID NO: 291195 - RNA, 19 nt, Homo sapiens
  misc_RNA (1)...(19): siRNA sense strand
cgaaaccaaugaggucaau

SEQ ID NO: 291196 - RNA, 19 nt, Homo sapiens
  misc_RNA (1)...(19): siRNA sense strand
gauggcugcgaacuucuua

SEQ ID NO: 291197 - RNA, 19 nt, Homo sapiens
  misc_RNA (1)...(19): siRNA sense strand
cugcgaacuucuuagauug

SEQ ID NO: 291198 - RNA, 19 nt, Homo sapiens
  misc_RNA (1)...(19): siRNA sense strand
gcugagaacgaaaccaaug

SEQ ID NO: 291199 - RNA, 19 nt, Homo sapiens
  misc_RNA (1)...(19): siRNA sense strand
ucugauggccaugaauuua

SEQ ID NO: 291200 - RNA, 19 nt, Homo sapiens
  misc_RNA (1)...(19): siRNA sense strand
agagagauaccuucacaug

SEQ ID NO: 291201 - RNA, 19 nt, Homo sapiens
  misc_RNA (1)...(19): siRNA sense strand
aagguucgcuacacuaaca

SEQ ID NO: 291202 - RNA, 19 nt, Homo sapiens
  misc_RNA (1)...(19): siRNA sense strand
aaagagaacaugcauuaac

SEQ ID NO: 291203 - RNA, 19 nt, Homo sapiens
  misc_RNA (1)...(19): siRNA sense strand
gaguggcccaggucaguuu

SEQ ID NO: 291204 - RNA, 19 nt, Homo sapiens
  misc_RNA (1)...(19): siRNA sense strand
cacaugugcuaucgaaagu

SEQ ID NO: 291205 - RNA, 19 nt, Homo sapiens
  misc_RNA (1)...(19): siRNA sense strand
acaagguucgcuacacuaa

SEQ ID NO: 291206 - RNA, 19 nt, Homo sapiens
  misc_RNA (1)...(19): siRNA sense strand
ucacaugugcuaucgaaag

SEQ ID NO: 291207 - RNA, 19 nt, Homo sapiens
  misc_RNA (1)...(19): siRNA sense strand
ggucaauuuuagagagaua

SEQ ID NO: 291208 - RNA, 19 nt, Homo sapiens
  misc_RNA (1)...(19): siRNA sense strand
auuaacaucaggcacgaua

SEQ ID NO: 291209 - RNA, 19 nt, Homo sapiens
  misc_RNA (1)...(19): siRNA sense strand
gauaaaagccauguugagu

SEQ ID NO: 291210 - RNA, 19 nt, Homo sapiens
  misc_RNA (1)...(19): siRNA sense strand
agaacaugcauuaacauca

SEQ ID NO: 291211 - RNA, 19 nt, Homo sapiens
  misc_RNA (1)...(19): siRNA sense strand
gaugccauguaugucaaau

SEQ ID NO: 291212 - RNA, 19 nt, Homo sapiens
  misc_RNA (1)...(19): siRNA sense strand
gaggucaauuuuagagaga

SEQ ID NO: 291213 - RNA, 19 nt, Homo sapiens
  misc_RNA (1)...(19): siRNA sense strand
gaaaccaaugaggucaauu

SEQ ID NO: 291214 - RNA, 19 nt, Homo sapiens
  misc_RNA (1)...(19): siRNA sense strand
ccugaugccauguauguca

SEQ ID NO: 291215 - RNA, 19 nt, Homo sapiens
  misc_RNA (1)...(19): siRNA sense strand
gaacaugggugaccucuuu

SEQ ID NO: 291216 - RNA, 19 nt, Homo sapiens
  misc_RNA (1)...(19): siRNA sense strand
gauaacaacuccaaccaua

SEQ ID NO: 291217 - RNA, 19 nt, Homo sapiens
  misc_RNA (1)...(19): siRNA sense strand
gaaagaggcuggagauuuu

SEQ ID NO: 291218 - RNA, 19 nt, Homo sapiens
  misc_RNA (1)...(19): siRNA sense strand
gaacagaccaaauuaguga

SEQ ID NO: 291219 - RNA, 19 nt, Homo sapiens
  misc_RNA (1)...(19): siRNA sense strand
ugacaaagaugguaugaug

SEQ ID NO: 291220 - RNA, 19 nt, Homo sapiens
  misc_RNA (1)...(19): siRNA sense strand
gaaaugcagagcaaaguua

SEQ ID NO: 291221 - RNA, 19 nt, Homo sapiens
  misc_RNA (1)...(19): siRNA sense strand
ggaaauagccagagagaug

SEQ ID NO: 291222 - RNA, 19 nt, Homo sapiens
  misc_RNA (1)...(19): siRNA sense strand
ggaaagaggcuggagauuu

SEQ ID NO: 291223 - RNA, 19 nt, Homo sapiens
  misc_RNA (1)...(19): siRNA sense strand
ccagagagaugaaauguuc

SEQ ID NO: 291224 - RNA, 19 nt, Homo sapiens
  misc_RNA (1)...(19): siRNA sense strand
cagcacagcuccugaaaug

SEQ ID NO: 291225 - RNA, 19 nt, Homo sapiens
  misc_RNA (1)...(19): siRNA sense strand
gaacagcaccuuuaaucuu

SEQ ID NO: 291226 - RNA, 19 nt, Homo sapiens
  misc_RNA (1)...(19): siRNA sense strand
ucagugaucugugauauuu

SEQ ID NO: 291227 - RNA, 19 nt, Homo sapiens
  misc_RNA (1)...(19): siRNA sense strand
gaacugagccuagcaaauc

SEQ ID NO: 291228 - RNA, 19 nt, Homo sapiens
  misc_RNA (1)...(19): siRNA sense strand
gaaauuggaagcuauaguu

SEQ ID NO: 291229 - RNA, 19 nt, Homo sapiens
  misc_RNA (1)...(19): siRNA sense strand
ccagaaaguuugaaauaga

SEQ ID NO: 291230 - RNA, 19 nt, Homo sapiens
  misc_RNA (1)...(19): siRNA sense strand
ccaagaaccugagaucaaa

SEQ ID NO: 291231 - RNA, 19 nt, Homo sapiens
  misc_RNA (1)...(19): siRNA sense strand
gcaucaagcaugagucuua

SEQ ID NO: 291232 - RNA, 19 nt, Homo sapiens
  misc_RNA (1)...(19): siRNA sense strand
gcaggaagcgcuggaaaua

SEQ ID NO: 291233 - RNA, 19 nt, Homo sapiens
  misc_RNA (1)...(19): siRNA sense strand
gaacgaaaggguagaaaug

SEQ ID NO: 291234 - RNA, 19 nt, Homo sapiens
  misc_RNA (1)...(19): siRNA sense strand
gcacagcuccugaaaugaa

SEQ ID NO: 291235 - RNA, 19 nt, Homo sapiens
  misc_RNA (1)...(19): siRNA sense strand
gaagucugcgcuauaguua

SEQ ID NO: 291236 - RNA, 19 nt, Homo sapiens
  misc_RNA (1)...(19): siRNA sense strand
gcaaacuucuccagccaaa

SEQ ID NO: 291237 - RNA, 19 nt, Homo sapiens
  misc_RNA (1)...(19): siRNA sense strand
ggaaaccagucaugcauca

SEQ ID NO: 291238 - RNA, 19 nt, Homo sapiens
  misc_RNA (1)...(19): siRNA sense strand
ccacagaaaugcagagcaa

SEQ ID NO: 291239 - RNA, 19 nt, Homo sapiens
  misc_RNA (1)...(19): siRNA sense strand
gaugauauacugucuuuga

SEQ ID NO: 291240 - RNA, 19 nt, Homo sapiens
  misc_RNA (1)...(19): siRNA sense strand
gcccagauguuccagaauu

SEQ ID NO: 291241 - RNA, 19 nt, Homo sapiens
  misc_RNA (1)...(19): siRNA sense strand
gaagagugguccuccugaa

SEQ ID NO: 291242 - RNA, 19 nt, Homo sapiens
  misc_RNA (1)...(19): siRNA sense strand
uaacaagggcauggaauua

SEQ ID NO: 291243 - RNA, 19 nt, Homo sapiens
  misc_RNA (1)...(19): siRNA sense strand
gauccuggguugaguaguu

SEQ ID NO: 291244 - RNA, 19 nt, Homo sapiens
  misc_RNA (1)...(19): siRNA sense strand
gaagagaaggagaacgaua

SEQ ID NO: 291245 - RNA, 19 nt, Homo sapiens
  misc_RNA (1)...(19): siRNA sense strand
gaaacaagaauggcgauaa

SEQ ID NO: 291246 - RNA, 19 nt, Homo sapiens
  misc_RNA (1)...(19): siRNA sense strand
ccaggaauguccagucaaa

SEQ ID NO: 291247 - RNA, 19 nt, Homo sapiens
  misc_RNA (1)...(19): siRNA sense strand
gaggaucauucuucucaaa

SEQ ID NO: 291248 - RNA, 19 nt, Homo sapiens
  misc_RNA (1)...(19): siRNA sense strand
gacaggagauauucuagga

SEQ ID NO: 291249 - RNA, 19 nt, Homo sapiens
  misc_RNA (1)...(19): siRNA sense strand
auucucagcugcauuauaa

SEQ ID NO: 291250 - RNA, 19 nt, Homo sapiens
  misc_RNA (1)...(19): siRNA sense strand
ugaauucucagcugcauua

SEQ ID NO: 291251 - RNA, 19 nt, Homo sapiens
  misc_RNA (1)...(19): siRNA sense strand
gcagauuguuugcuacaug

SEQ ID NO: 291252 - RNA, 19 nt, Homo sapiens
  misc_RNA (1)...(19): siRNA sense strand
uagcaaaucuccuggaagu

SEQ ID NO: 291253 - RNA, 19 nt, Homo sapiens
  misc_RNA (1)...(19): siRNA sense strand
gcuaucagccucaaucuau

SEQ ID NO: 291254 - RNA, 19 nt, Homo sapiens
  misc_RNA (1)...(19): siRNA sense strand
uaucaugacuuugcagaaa

SEQ ID NO: 291255 - RNA, 19 nt, Homo sapiens
  misc_RNA (1)...(19): siRNA sense strand
cacauuaucagcaggauua

SEQ ID NO: 291256 - RNA, 19 nt, Homo sapiens
  misc_RNA (1)...(19): siRNA sense strand
gaaauagccagagagauga

SEQ ID NO: 291257 - RNA, 19 nt, Homo sapiens
  misc_RNA (1)...(19): siRNA sense strand
caaacaagcaguucccauu

SEQ ID NO: 291258 - RNA, 19 nt, Homo sapiens
  misc_RNA (1)...(19): siRNA sense strand
ggauugaaauuggaagcua

SEQ ID NO: 291259 - RNA, 19 nt, Homo sapiens
  misc_RNA (1)...(19): siRNA sense strand
gcugggcgcugccuaaugu

SEQ ID NO: 291260 - RNA, 19 nt, Homo sapiens
  misc_RNA (1)...(19): siRNA sense strand
ggaacacaauccaauuaca

SEQ ID NO: 291261 - RNA, 19 nt, Homo sapiens
  misc_RNA (1)...(19): siRNA sense strand
gcccugagcuggaguuaca

SEQ ID NO: 291262 - RNA, 19 nt, Homo sapiens
  misc_RNA (1)...(19): siRNA sense strand
caucaaugcugaggaagaa

SEQ ID NO: 291263 - RNA, 19 nt, Homo sapiens
  misc_RNA (1)...(19): siRNA sense strand
gagacacgguuacgcuuga

SEQ ID NO: 291264 - RNA, 19 nt, Homo sapiens
  misc_RNA (1)...(19): siRNA sense strand
gggagacccucaucacaug

SEQ ID NO: 291265 - RNA, 19 nt, Homo sapiens
  misc_RNA (1)...(19): siRNA sense strand
ggaagucugcgcuauaguu

SEQ ID NO: 291266 - RNA, 19 nt, Homo sapiens
  misc_RNA (1)...(19): siRNA sense strand
ucuccaagcuguaguucua

SEQ ID NO: 291267 - RNA, 19 nt, Homo sapiens
  misc_RNA (1)...(19): siRNA sense strand
gcagagcaaaguuaaggua

SEQ ID NO: 291268 - RNA, 19 nt, Homo sapiens
  misc_RNA (1)...(19): siRNA sense strand
gaacuuggagccguuugua

SEQ ID NO: 291269 - RNA, 19 nt, Homo sapiens
  misc_RNA (1)...(19): siRNA sense strand
caaaaccccuuaaucauga

SEQ ID NO: 291270 - RNA, 19 nt, Homo sapiens
  misc_RNA (1)...(19): siRNA sense strand
gcaguuucuugacagagua

SEQ ID NO: 291271 - RNA, 19 nt, Homo sapiens
  misc_RNA (1)...(19): siRNA sense strand
cgaagaauccaccuccuaa

SEQ ID NO: 291272 - RNA, 19 nt, Homo sapiens
  misc_RNA (1)...(19): siRNA sense strand
aacagcaccuuuaaucuuu

SEQ ID NO: 291273 - RNA, 19 nt, Homo sapiens
  misc_RNA (1)...(19): siRNA sense strand
ugugauauuucuccacuaa

SEQ ID NO: 291274 - RNA, 19 nt, Homo sapiens
  misc_RNA (1)...(19): siRNA sense strand
agaagaacagaccaaauua

SEQ ID NO: 291275 - RNA, 19 nt, Homo sapiens
  misc_RNA (1)...(19): siRNA sense strand
aagaagaacagaccaaauu

SEQ ID NO: 291276 - RNA, 19 nt, Homo sapiens
  misc_RNA (1)...(19): siRNA sense strand
agaaggcgcugauaaagca

SEQ ID NO: 291277 - RNA, 19 nt, Homo sapiens
  misc_RNA (1)...(19): siRNA sense strand
acaagggcauggaauuaaa

SEQ ID NO: 291278 - RNA, 19 nt, Homo sapiens
  misc_RNA (1)...(19): siRNA sense strand
gauggcaguuacaauguga

SEQ ID NO: 291279 - RNA, 19 nt, Homo sapiens
  misc_RNA (1)...(19): siRNA sense strand
uaagagggccacagaaaug

SEQ ID NO: 291280 - RNA, 19 nt, Homo sapiens
  misc_RNA (1)...(19): siRNA sense strand
caagcuaguuucaacaaca

SEQ ID NO: 291281 - RNA, 19 nt, Homo sapiens
  misc_RNA (1)...(19): siRNA sense strand
ugauauuucuccacuaaga

SEQ ID NO: 291282 - RNA, 19 nt, Homo sapiens
  misc_RNA (1)...(19): siRNA sense strand
guacucaaguggccaaucu

SEQ ID NO: 291283 - RNA, 19 nt, Homo sapiens
  misc_RNA (1)...(19): siRNA sense strand
guuaaugccucaacucagu

SEQ ID NO: 291284 - RNA, 19 nt, Homo sapiens
  misc_RNA (1)...(19): siRNA sense strand
gagagagugcggcaacuaa

SEQ ID NO: 291285 - RNA, 19 nt, Homo sapiens
  misc_RNA (1)...(19): siRNA sense strand
gaagaacagaccaaauuag

SEQ ID NO: 291286 - RNA, 19 nt, Homo sapiens
  misc_RNA (1)...(19): siRNA sense strand
gugauggucugccuaacaa

SEQ ID NO: 291287 - RNA, 19 nt, Homo sapiens
  misc_RNA (1)...(19): siRNA sense strand
acaaagaugguaugaugua

SEQ ID NO: 291288 - RNA, 19 nt, Homo sapiens
  misc_RNA (1)...(19): siRNA sense strand
gagcaaaggaaacaagaau

SEQ ID NO: 291289 - RNA, 19 nt, Homo sapiens
  misc_RNA (1)...(19): siRNA sense strand
ccaccuagcagcacugaaa

SEQ ID NO: 291290 - RNA, 19 nt, Homo sapiens
  misc_RNA (1)...(19): siRNA sense strand
gaagaagaacagaccaaau

SEQ ID NO: 291291 - RNA, 19 nt, Homo sapiens
  misc_RNA (1)...(19): siRNA sense strand
ggaagaagaacagaccaaa

SEQ ID NO: 291292 - RNA, 19 nt, Homo sapiens
  misc_RNA (1)...(19): siRNA sense strand
cagcguggaugacaaagug

SEQ ID NO: 291293 - RNA, 19 nt, Homo sapiens
  misc_RNA (1)...(19): siRNA sense strand
gcauggcucccagaaguua

SEQ ID NO: 291294 - RNA, 19 nt, Homo sapiens
  misc_RNA (1)...(19): siRNA sense strand
cuacauggcaggcaacaaa

SEQ ID NO: 291295 - RNA, 19 nt, Homo sapiens
  misc_RNA (1)...(19): siRNA sense strand
gcaaaggaaaccagucaug

SEQ ID NO: 291296 - RNA, 19 nt, Homo sapiens
  misc_RNA (1)...(19): siRNA sense strand
cagauuguuugcuacauga

SEQ ID NO: 291297 - RNA, 19 nt, Homo sapiens
  misc_RNA (1)...(19): siRNA sense strand
ucacagaagccugguagua

SEQ ID NO: 291298 - RNA, 19 nt, Homo sapiens
  misc_RNA (1)...(19): siRNA sense strand
ggaguugcacguagagaaa

SEQ ID NO: 291299 - RNA, 19 nt, Homo sapiens
  misc_RNA (1)...(19): siRNA sense strand
gaagcuauaguucagaaga

SEQ ID NO: 291300 - RNA, 19 nt, Homo sapiens
  misc_RNA (1)...(19): siRNA sense strand
gucaggauaucaagucuau

SEQ ID NO: 291301 - RNA, 19 nt, Homo sapiens
  misc_RNA (1)...(19): siRNA sense strand
gcugauaaagcauucaauu

SEQ ID NO: 291302 - RNA, 19 nt, Homo sapiens
  misc_RNA (1)...(19): siRNA sense strand
gaggaagacuuugaacagu

SEQ ID NO: 291303 - RNA, 19 nt, Homo sapiens
  misc_RNA (1)...(19): siRNA sense strand
ugaaauagagccucaguca

SEQ ID NO: 291304 - RNA, 19 nt, Homo sapiens
  misc_RNA (1)...(19): siRNA sense strand
uaacaacuccaaccauaau

SEQ ID NO: 291305 - RNA, 19 nt, Homo sapiens
  misc_RNA (1)...(19): siRNA sense strand
gcaaaggaaacaagaaugg

SEQ ID NO: 291306 - RNA, 19 nt, Homo sapiens
  misc_RNA (1)...(19): siRNA sense strand
gauugaaauuggaagcuau

SEQ ID NO: 291307 - RNA, 19 nt, Homo sapiens
  misc_RNA (1)...(19): siRNA sense strand
ugaugcagauuguuugcua

SEQ ID NO: 291308 - RNA, 19 nt, Homo sapiens
  misc_RNA (1)...(19): siRNA sense strand
gugacagagucuucgguua

SEQ ID NO: 291309 - RNA, 19 nt, Homo sapiens
  misc_RNA (1)...(19): siRNA sense strand
guuaagagugggucaguuu

SEQ ID NO: 291310 - RNA, 19 nt, Homo sapiens
  misc_RNA (1)...(19): siRNA sense strand
aauggaaucuaccugguuu

SEQ ID NO: 291311 - RNA, 19 nt, Homo sapiens
  misc_RNA (1)...(19): siRNA sense strand
ggaggcguguucguucuuu

SEQ ID NO: 291312 - RNA, 19 nt, Homo sapiens
  misc_RNA (1)...(19): siRNA sense strand
caaagaugguaugauguau

SEQ ID NO: 291313 - RNA, 19 nt, Homo sapiens
  misc_RNA (1)...(19): siRNA sense strand
cgaaaggguagaaaugaaa

SEQ ID NO: 291314 - RNA, 19 nt, Homo sapiens
  misc_RNA (1)...(19): siRNA sense strand
acccaaagguuaaugagaa

SEQ ID NO: 291315 - RNA, 19 nt, Homo sapiens
  misc_RNA (1)...(19): siRNA sense strand
gaacaugggugaccucuuu

SEQ ID NO: 291316 - RNA, 19 nt, Homo sapiens
  misc_RNA (1)...(19): siRNA sense strand
gauaacaacuccaaccaua

SEQ ID NO: 291317 - RNA, 19 nt, Homo sapiens
  misc_RNA (1)...(19): siRNA sense strand
gaaagaggcuggagauuuu

SEQ ID NO: 291318 - RNA, 19 nt, Homo sapiens
  misc_RNA (1)...(19): siRNA sense strand
gaacagaccaaauuaguga

SEQ ID NO: 291319 - RNA, 19 nt, Homo sapiens
  misc_RNA (1)...(19): siRNA sense strand
ugacaaagaugguaugaug

SEQ ID NO: 291320 - RNA, 19 nt, Homo sapiens
  misc_RNA (1)...(19): siRNA sense strand
gaaaugcagagcaaaguua

SEQ ID NO: 291321 - RNA, 19 nt, Homo sapiens
  misc_RNA (1)...(19): siRNA sense strand
ggaaauagccagagagaug

SEQ ID NO: 291322 - RNA, 19 nt, Homo sapiens
  misc_RNA (1)...(19): siRNA sense strand
ggaaagaggcuggagauuu

SEQ ID NO: 291323 - RNA, 19 nt, Homo sapiens
  misc_RNA (1)...(19): siRNA sense strand
ccagagagaugaaauguuc

SEQ ID NO: 291324 - RNA, 19 nt, Homo sapiens
  misc_RNA (1)...(19): siRNA sense strand
cagcacagcuccugaaaug

SEQ ID NO: 291325 - RNA, 19 nt, Homo sapiens
  misc_RNA (1)...(19): siRNA sense strand
gaacagcaccuuuaaucuu

SEQ ID NO: 291326 - RNA, 19 nt, Homo sapiens
  misc_RNA (1)...(19): siRNA sense strand
ucagugaucugugauauuu

SEQ ID NO: 291327 - RNA, 19 nt, Homo sapiens
  misc_RNA (1)...(19): siRNA sense strand
gaacugagccuagcaaauc

SEQ ID NO: 291328 - RNA, 19 nt, Homo sapiens
  misc_RNA (1)...(19): siRNA sense strand
gaaauuggaagcuauaguu

SEQ ID NO: 291329 - RNA, 19 nt, Homo sapiens
  misc_RNA (1)...(19): siRNA sense strand
ccagaaaguuugaaauaga

SEQ ID NO: 291330 - RNA, 19 nt, Homo sapiens
  misc_RNA (1)...(19): siRNA sense strand
ccaagaaccugagaucaaa

SEQ ID NO: 291331 - RNA, 19 nt, Homo sapiens
  misc_RNA (1)...(19): siRNA sense strand
gcaucaagcaugagucuua

SEQ ID NO: 291332 - RNA, 19 nt, Homo sapiens
  misc_RNA (1)...(19): siRNA sense strand
gcaggaagcgcuggaaaua

SEQ ID NO: 291333 - RNA, 19 nt, Homo sapiens
  misc_RNA (1)...(19): siRNA sense strand
gaacgaaaggguagaaaug

SEQ ID NO: 291334 - RNA, 19 nt, Homo sapiens
  misc_RNA (1)...(19): siRNA sense strand
gcacagcuccugaaaugaa

SEQ ID NO: 291335 - RNA, 19 nt, Homo sapiens
  misc_RNA (1)...(19): siRNA sense strand
gaagucugcgcuauaguua

SEQ ID NO: 291336 - RNA, 19 nt, Homo sapiens
  misc_RNA (1)...(19): siRNA sense strand
gcaaacuucuccagccaaa

SEQ ID NO: 291337 - RNA, 19 nt, Homo sapiens
  misc_RNA (1)...(19): siRNA sense strand
ggaaaccagucaugcauca

SEQ ID NO: 291338 - RNA, 19 nt, Homo sapiens
  misc_RNA (1)...(19): siRNA sense strand
ccacagaaaugcagagcaa

SEQ ID NO: 291339 - RNA, 19 nt, Homo sapiens
  misc_RNA (1)...(19): siRNA sense strand
gaugauauacugucuuuga

SEQ ID NO: 291340 - RNA, 19 nt, Homo sapiens
  misc_RNA (1)...(19): siRNA sense strand
gcccagauguuccagaauu

SEQ ID NO: 291341 - RNA, 19 nt, Homo sapiens
  misc_RNA (1)...(19): siRNA sense strand
gaagagugguccuccugaa

SEQ ID NO: 291342 - RNA, 19 nt, Homo sapiens
  misc_RNA (1)...(19): siRNA sense strand
uaacaagggcauggaauua

SEQ ID NO: 291343 - RNA, 19 nt, Homo sapiens
  misc_RNA (1)...(19): siRNA sense strand
gauccuggguugaguaguu

SEQ ID NO: 291344 - RNA, 19 nt, Homo sapiens
  misc_RNA (1)...(19): siRNA sense strand
gaagagaaggagaacgaua

SEQ ID NO: 291345 - RNA, 19 nt, Homo sapiens
  misc_RNA (1)...(19): siRNA sense strand
gaaacaagaauggcgauaa

SEQ ID NO: 291346 - RNA, 19 nt, Homo sapiens
  misc_RNA (1)...(19): siRNA sense strand
ccaggaauguccagucaaa

SEQ ID NO: 291347 - RNA, 19 nt, Homo sapiens
  misc_RNA (1)...(19): siRNA sense strand
gaggaucauucuucucaaa

SEQ ID NO: 291348 - RNA, 19 nt, Homo sapiens
  misc_RNA (1)...(19): siRNA sense strand
gacaggagauauucuagga

SEQ ID NO: 291349 - RNA, 19 nt, Homo sapiens
  misc_RNA (1)...(19): siRNA sense strand
auucucagcugcauuauaa

SEQ ID NO: 291350 - RNA, 19 nt, Homo sapiens
  misc_RNA (1)...(19): siRNA sense strand
ugaauucucagcugcauua

SEQ ID NO: 291351 - RNA, 19 nt, Homo sapiens
  misc_RNA (1)...(19): siRNA sense strand
gcagauuguuugcuacaug

SEQ ID NO: 291352 - RNA, 19 nt, Homo sapiens
  misc_RNA (1)...(19): siRNA sense strand
uagcaaaucuccuggaagu

SEQ ID NO: 291353 - RNA, 19 nt, Homo sapiens
  misc_RNA (1)...(19): siRNA sense strand
gcuaucagccucaaucuau

SEQ ID NO: 291354 - RNA, 19 nt, Homo sapiens
  misc_RNA (1)...(19): siRNA sense strand
uaucaugacuuugcagaaa

SEQ ID NO: 291355 - RNA, 19 nt, Homo sapiens
  misc_RNA (1)...(19): siRNA sense strand
cacauuaucagcaggauua

SEQ ID NO: 291356 - RNA, 19 nt, Homo sapiens
  misc_RNA (1)...(19): siRNA sense strand
gaaauagccagagagauga

SEQ ID NO: 291357 - RNA, 19 nt, Homo sapiens
  misc_RNA (1)...(19): siRNA sense strand
caaacaagcaguucccauu

SEQ ID NO: 291358 - RNA, 19 nt, Homo sapiens
  misc_RNA (1)...(19): siRNA sense strand
ggauugaaauuggaagcua

SEQ ID NO: 291359 - RNA, 19 nt, Homo sapiens
  misc_RNA (1)...(19): siRNA sense strand
gcugggcgcugccuaaugu

SEQ ID NO: 291360 - RNA, 19 nt, Homo sapiens
  misc_RNA (1)...(19): siRNA sense strand
ggaacacaauccaauuaca

SEQ ID NO: 291361 - RNA, 19 nt, Homo sapiens
  misc_RNA (1)...(19): siRNA sense strand
gcccugagcuggaguuaca

SEQ ID NO: 291362 - RNA, 19 nt, Homo sapiens
  misc_RNA (1)...(19): siRNA sense strand
caucaaugcugaggaagaa

SEQ ID NO: 291363 - RNA, 19 nt, Homo sapiens
  misc_RNA (1)...(19): siRNA sense strand
gagacacgguuacgcuuga

SEQ ID NO: 291364 - RNA, 19 nt, Homo sapiens
  misc_RNA (1)...(19): siRNA sense strand
gggagacccucaucacaug

SEQ ID NO: 291365 - RNA, 19 nt, Homo sapiens
  misc_RNA (1)...(19): siRNA sense strand
ggaagucugcgcuauaguu

SEQ ID NO: 291366 - RNA, 19 nt, Homo sapiens
  misc_RNA (1)...(19): siRNA sense strand
ucuccaagcuguaguucua

SEQ ID NO: 291367 - RNA, 19 nt, Homo sapiens
  misc_RNA (1)...(19): siRNA sense strand
gcagagcaaaguuaaggua

SEQ ID NO: 291368 - RNA, 19 nt, Homo sapiens
  misc_RNA (1)...(19): siRNA sense strand
gaacuuggagccguuugua

SEQ ID NO: 291369 - RNA, 19 nt, Homo sapiens
  misc_RNA (1)...(19): siRNA sense strand
caaaaccccuuaaucauga

SEQ ID NO: 291370 - RNA, 19 nt, Homo sapiens
  misc_RNA (1)...(19): siRNA sense strand
gcaguuucuugacagagua

SEQ ID NO: 291371 - RNA, 19 nt, Homo sapiens
  misc_RNA (1)...(19): siRNA sense strand
cgaagaauccaccuccuaa

SEQ ID NO: 291372 - RNA, 19 nt, Homo sapiens
  misc_RNA (1)...(19): siRNA sense strand
aacagcaccuuuaaucuuu

SEQ ID NO: 291373 - RNA, 19 nt, Homo sapiens
  misc_RNA (1)...(19): siRNA sense strand
ugugauauuucuccacuaa

SEQ ID NO: 291374 - RNA, 19 nt, Homo sapiens
  misc_RNA (1)...(19): siRNA sense strand
agaagaacagaccaaauua

SEQ ID NO: 291375 - RNA, 19 nt, Homo sapiens
  misc_RNA (1)...(19): siRNA sense strand
aagaagaacagaccaaauu

SEQ ID NO: 291376 - RNA, 19 nt, Homo sapiens
  misc_RNA (1)...(19): siRNA sense strand
agaaggcgcugauaaagca

SEQ ID NO: 291377 - RNA, 19 nt, Homo sapiens
  misc_RNA (1)...(19): siRNA sense strand
acaagggcauggaauuaaa

SEQ ID NO: 291378 - RNA, 19 nt, Homo sapiens
  misc_RNA (1)...(19): siRNA sense strand
gauggcaguuacaauguga

SEQ ID NO: 291379 - RNA, 19 nt, Homo sapiens
  misc_RNA (1)...(19): siRNA sense strand
uaagagggccacagaaaug

SEQ ID NO: 291380 - RNA, 19 nt, Homo sapiens
  misc_RNA (1)...(19): siRNA sense strand
caagcuaguuucaacaaca

SEQ ID NO: 291381 - RNA, 19 nt, Homo sapiens
  misc_RNA (1)...(19): siRNA sense strand
ugauauuucuccacuaaga

SEQ ID NO: 291382 - RNA, 19 nt, Homo sapiens
  misc_RNA (1)...(19): siRNA sense strand
guacucaaguggccaaucu

SEQ ID NO: 291383 - RNA, 19 nt, Homo sapiens
  misc_RNA (1)...(19): siRNA sense strand
guuaaugccucaacucagu

SEQ ID NO: 291384 - RNA, 19 nt, Homo sapiens
  misc_RNA (1)...(19): siRNA sense strand
gagagagugcggcaacuaa

SEQ ID NO: 291385 - RNA, 19 nt, Homo sapiens
  misc_RNA (1)...(19): siRNA sense strand
gaagaacagaccaaauuag

SEQ ID NO: 291386 - RNA, 19 nt, Homo sapiens
  misc_RNA (1)...(19): siRNA sense strand
gugauggucugccuaacaa

SEQ ID NO: 291387 - RNA, 19 nt, Homo sapiens
  misc_RNA (1)...(19): siRNA sense strand
acaaagaugguaugaugua

SEQ ID NO: 291388 - RNA, 19 nt, Homo sapiens
  misc_RNA (1)...(19): siRNA sense strand
gagcaaaggaaacaagaau

SEQ ID NO: 291389 - RNA, 19 nt, Homo sapiens
  misc_RNA (1)...(19): siRNA sense strand
ccaccuagcagcacugaaa

SEQ ID NO: 291390 - RNA, 19 nt, Homo sapiens
  misc_RNA (1)...(19): siRNA sense strand
gaagaagaacagaccaaau

SEQ ID NO: 291391 - RNA, 19 nt, Homo sapiens
  misc_RNA (1)...(19): siRNA sense strand
ggaagaagaacagaccaaa

SEQ ID NO: 291392 - RNA, 19 nt, Homo sapiens
  misc_RNA (1)...(19): siRNA sense strand
cagcguggaugacaaagug

SEQ ID NO: 291393 - RNA, 19 nt, Homo sapiens
  misc_RNA (1)...(19): siRNA sense strand
gcauggcucccagaaguua

SEQ ID NO: 291394 - RNA, 19 nt, Homo sapiens
  misc_RNA (1)...(19): siRNA sense strand
cuacauggcaggcaacaaa

SEQ ID NO: 291395 - RNA, 19 nt, Homo sapiens
  misc_RNA (1)...(19): siRNA sense strand
gcaaaggaaaccagucaug

SEQ ID NO: 291396 - RNA, 19 nt, Homo sapiens
  misc_RNA (1)...(19): siRNA sense strand
cagauuguuugcuacauga

SEQ ID NO: 291397 - RNA, 19 nt, Homo sapiens
  misc_RNA (1)...(19): siRNA sense strand
ucacagaagccugguagua

SEQ ID NO: 291398 - RNA, 19 nt, Homo sapiens
  misc_RNA (1)...(19): siRNA sense strand
ggaguugcacguagagaaa

SEQ ID NO: 291399 - RNA, 19 nt, Homo sapiens
  misc_RNA (1)...(19): siRNA sense strand
gaagcuauaguucagaaga

SEQ ID NO: 291400 - RNA, 19 nt, Homo sapiens
  misc_RNA (1)...(19): siRNA sense strand
gucaggauaucaagucuau

SEQ ID NO: 291401 - RNA, 19 nt, Homo sapiens
  misc_RNA (1)...(19): siRNA sense strand
gcugauaaagcauucaauu

SEQ ID NO: 291402 - RNA, 19 nt, Homo sapiens
  misc_RNA (1)...(19): siRNA sense strand
gaggaagacuuugaacagu

SEQ ID NO: 291403 - RNA, 19 nt, Homo sapiens
  misc_RNA (1)...(19): siRNA sense strand
ugaaauagagccucaguca

SEQ ID NO: 291404 - RNA, 19 nt, Homo sapiens
  misc_RNA (1)...(19): siRNA sense strand
uaacaacuccaaccauaau

SEQ ID NO: 291405 - RNA, 19 nt, Homo sapiens
  misc_RNA (1)...(19): siRNA sense strand
gcaaaggaaacaagaaugg

SEQ ID NO: 291406 - RNA, 19 nt, Homo sapiens
  misc_RNA (1)...(19): siRNA sense strand
gauugaaauuggaagcuau

SEQ ID NO: 291407 - RNA, 19 nt, Homo sapiens
  misc_RNA (1)...(19): siRNA sense strand
ugaugcagauuguuugcua

SEQ ID NO: 291408 - RNA, 19 nt, Homo sapiens
  misc_RNA (1)...(19): siRNA sense strand
gugacagagucuucgguua

SEQ ID NO: 291409 - RNA, 19 nt, Homo sapiens
  misc_RNA (1)...(19): siRNA sense strand
guuaagagugggucaguuu

SEQ ID NO: 291410 - RNA, 19 nt, Homo sapiens
  misc_RNA (1)...(19): siRNA sense strand
aauggaaucuaccugguuu

SEQ ID NO: 291411 - RNA, 19 nt, Homo sapiens
  misc_RNA (1)...(19): siRNA sense strand
ggaggcguguucguucuuu

SEQ ID NO: 291412 - RNA, 19 nt, Homo sapiens
  misc_RNA (1)...(19): siRNA sense strand
caaagaugguaugauguau

SEQ ID NO: 291413 - RNA, 19 nt, Homo sapiens
  misc_RNA (1)...(19): siRNA sense strand
cgaaaggguagaaaugaaa

SEQ ID NO: 291414 - RNA, 19 nt, Homo sapiens
  misc_RNA (1)...(19): siRNA sense strand
acccaaagguuaaugagaa

SEQ ID NO: 291415 - RNA, 19 nt, Homo sapiens
  misc_RNA (1)...(19): siRNA sense strand
gaaaugaucuccugaauau

SEQ ID NO: 291416 - RNA, 19 nt, Homo sapiens
  misc_RNA (1)...(19): siRNA sense strand
gaacagcugugaugauuaa

SEQ ID NO: 291417 - RNA, 19 nt, Homo sapiens
  misc_RNA (1)...(19): siRNA sense strand
ggaagaggaugaacuguuu

SEQ ID NO: 291418 - RNA, 19 nt, Homo sapiens
  misc_RNA (1)...(19): siRNA sense strand
caaggaagcugcugucauu

SEQ ID NO: 291419 - RNA, 19 nt, Homo sapiens
  misc_RNA (1)...(19): siRNA sense strand
gaaguggacuguagaagaa

SEQ ID NO: 291420 - RNA, 19 nt, Homo sapiens
  misc_RNA (1)...(19): siRNA sense strand
ggaaucagcuaucaaugug

SEQ ID NO: 291421 - RNA, 19 nt, Homo sapiens
  misc_RNA (1)...(19): siRNA sense strand
ggaagcugcugucauuauu

SEQ ID NO: 291422 - RNA, 19 nt, Homo sapiens
  misc_RNA (1)...(19): siRNA sense strand
gaagacaguacaaccaaua

SEQ ID NO: 291423 - RNA, 19 nt, Homo sapiens
  misc_RNA (1)...(19): siRNA sense strand
gaacuuggcccauccuguu

SEQ ID NO: 291424 - RNA, 19 nt, Homo sapiens
  misc_RNA (1)...(19): siRNA sense strand
guacagggaaggaagauaa

SEQ ID NO: 291425 - RNA, 19 nt, Homo sapiens
  misc_RNA (1)...(19): siRNA sense strand
agagaagaaucccaaagua

SEQ ID NO: 291426 - RNA, 19 nt, Homo sapiens
  misc_RNA (1)...(19): siRNA sense strand
gaacaagcgcaugacaaua

SEQ ID NO: 291427 - RNA, 19 nt, Homo sapiens
  misc_RNA (1)...(19): siRNA sense strand
gacaguacaaccaauauaa

SEQ ID NO: 291428 - RNA, 19 nt, Homo sapiens
  misc_RNA (1)...(19): siRNA sense strand
aaacugggcugccauuucu

SEQ ID NO: 291429 - RNA, 19 nt, Homo sapiens
  misc_RNA (1)...(19): siRNA sense strand
ccgaacagcugugaugauu

SEQ ID NO: 291430 - RNA, 19 nt, Homo sapiens
  misc_RNA (1)...(19): siRNA sense strand
guagaaaacuggucaagga

SEQ ID NO: 291431 - RNA, 19 nt, Homo sapiens
  misc_RNA (1)...(19): siRNA sense strand
cagaaaagaugaaaacgaa

SEQ ID NO: 291432 - RNA, 19 nt, Homo sapiens
  misc_RNA (1)...(19): siRNA sense strand
gcugggugcucaaguucua

SEQ ID NO: 291433 - RNA, 19 nt, Homo sapiens
  misc_RNA (1)...(19): siRNA sense strand
gcaaguggaacagcucuaa

SEQ ID NO: 291434 - RNA, 19 nt, Homo sapiens
  misc_RNA (1)...(19): siRNA sense strand
gagagaagaaucccaaagu

SEQ ID NO: 291435 - RNA, 19 nt, Homo sapiens
  misc_RNA (1)...(19): siRNA sense strand
gaagcugcugucauuauuu

SEQ ID NO: 291436 - RNA, 19 nt, Homo sapiens
  misc_RNA (1)...(19): siRNA sense strand
ucaaugugcuggagaugau

SEQ ID NO: 291437 - RNA, 19 nt, Homo sapiens
  misc_RNA (1)...(19): siRNA sense strand
gaggaggacagccagagua

SEQ ID NO: 291438 - RNA, 19 nt, Homo sapiens
  misc_RNA (1)...(19): siRNA sense strand
aacaagcgcaugacaauaa

SEQ ID NO: 291439 - RNA, 19 nt, Homo sapiens
  misc_RNA (1)...(19): siRNA sense strand
gaacugcagcccaagaaca

SEQ ID NO: 291440 - RNA, 19 nt, Homo sapiens
  misc_RNA (1)...(19): siRNA sense strand
agaaaugaucuccugaaua

SEQ ID NO: 291441 - RNA, 19 nt, Homo sapiens
  misc_RNA (1)...(19): siRNA sense strand
gaauuuacacugacagaag

SEQ ID NO: 291442 - RNA, 19 nt, Homo sapiens
  misc_RNA (1)...(19): siRNA sense strand
aggcuggagugcagaaaua

SEQ ID NO: 291443 - RNA, 19 nt, Homo sapiens
  misc_RNA (1)...(19): siRNA sense strand
aagcagaaguggacuguag

SEQ ID NO: 291444 - RNA, 19 nt, Homo sapiens
  misc_RNA (1)...(19): siRNA sense strand
ccacuggaaucagcuauca

SEQ ID NO: 291445 - RNA, 19 nt, Homo sapiens
  misc_RNA (1)...(19): siRNA sense strand
cagcugugaugauuaagga

SEQ ID NO: 291446 - RNA, 19 nt, Homo sapiens
  misc_RNA (1)...(19): siRNA sense strand
ggaaugaugacucugaaag

SEQ ID NO: 291447 - RNA, 19 nt, Homo sapiens
  misc_RNA (1)...(19): siRNA sense strand
gcaguggucgaauccagua

SEQ ID NO: 291448 - RNA, 19 nt, Homo sapiens
  misc_RNA (1)...(19): siRNA sense strand
aagcugcugucauuauuug

SEQ ID NO: 291449 - RNA, 19 nt, Homo sapiens
  misc_RNA (1)...(19): siRNA sense strand
cagaagcaguggucgaauc

SEQ ID NO: 291450 - RNA, 19 nt, Homo sapiens
  misc_RNA (1)...(19): siRNA sense strand
gaaaagacuuggcaugaac

SEQ ID NO: 291451 - RNA, 19 nt, Homo sapiens
  misc_RNA (1)...(19): siRNA sense strand
gagaagaaucccaaaguac

SEQ ID NO: 291452 - RNA, 19 nt, Homo sapiens
  misc_RNA (1)...(19): siRNA sense strand
ugaagaaggggaaaauuua

SEQ ID NO: 291453 - RNA, 19 nt, Homo sapiens
  misc_RNA (1)...(19): siRNA sense strand
uuagacuguuccuuugaua

SEQ ID NO: 291454 - RNA, 19 nt, Homo sapiens
  misc_RNA (1)...(19): siRNA sense strand
gcaugacaauaagcagauu

SEQ ID NO: 291455 - RNA, 19 nt, Homo sapiens
  misc_RNA (1)...(19): siRNA sense strand
gcagaaguggacuguagaa

SEQ ID NO: 291456 - RNA, 19 nt, Homo sapiens
  misc_RNA (1)...(19): siRNA sense strand
aaaggagacuuggguggaa

SEQ ID NO: 291457 - RNA, 19 nt, Homo sapiens
  misc_RNA (1)...(19): siRNA sense strand
uaaccgaacagcugugaug

SEQ ID NO: 291458 - RNA, 19 nt, Homo sapiens
  misc_RNA (1)...(19): siRNA sense strand
gcaaggcagcuacggaauc

SEQ ID NO: 291459 - RNA, 19 nt, Homo sapiens
  misc_RNA (1)...(19): siRNA sense strand
gaggacagccagaguacug

SEQ ID NO: 291460 - RNA, 19 nt, Homo sapiens
  misc_RNA (1)...(19): siRNA sense strand
gcagaaauauggggaagga

SEQ ID NO: 291461 - RNA, 19 nt, Homo sapiens
  misc_RNA (1)...(19): siRNA sense strand
gacagaagcaguggucgaa

SEQ ID NO: 291462 - RNA, 19 nt, Homo sapiens
  misc_RNA (1)...(19): siRNA sense strand
cgaacagcugugaugauua

SEQ ID NO: 291463 - RNA, 19 nt, Homo sapiens
  misc_RNA (1)...(19): siRNA sense strand
agaaguggacuguagaaga

SEQ ID NO: 291464 - RNA, 19 nt, Homo sapiens
  misc_RNA (1)...(19): siRNA sense strand
agacaguacaaccaauaua

SEQ ID NO: 291465 - RNA, 19 nt, Homo sapiens
  misc_RNA (1)...(19): siRNA sense strand
cuaaugggguugaagaaaa

SEQ ID NO: 291466 - RNA, 19 nt, Homo sapiens
  misc_RNA (1)...(19): siRNA sense strand
aauuuagacuguuccuuug

SEQ ID NO: 291467 - RNA, 19 nt, Homo sapiens
  misc_RNA (1)...(19): siRNA sense strand
ggaaacugggcugccauuu

SEQ ID NO: 291468 - RNA, 19 nt, Homo sapiens
  misc_RNA (1)...(19): siRNA sense strand
ugaagacaguacaaccaau

SEQ ID NO: 291469 - RNA, 19 nt, Homo sapiens
  misc_RNA (1)...(19): siRNA sense strand
agaacaagcgcaugacaau

SEQ ID NO: 291470 - RNA, 19 nt, Homo sapiens
  misc_RNA (1)...(19): siRNA sense strand
agacagauccgggacauca

SEQ ID NO: 291471 - RNA, 19 nt, Homo sapiens
  misc_RNA (1)...(19): siRNA sense strand
gggacaucaugcaggcuuu

SEQ ID NO: 291472 - RNA, 19 nt, Homo sapiens
  misc_RNA (1)...(19): siRNA sense strand
ggaauuuacacugacagaa

SEQ ID NO: 291473 - RNA, 19 nt, Homo sapiens
  misc_RNA (1)...(19): siRNA sense strand
gcugcugucauuauuugua

SEQ ID NO: 291474 - RNA, 19 nt, Homo sapiens
  misc_RNA (1)...(19): siRNA sense strand
ggagagaagaaucccaaag

SEQ ID NO: 291475 - RNA, 19 nt, Homo sapiens
  misc_RNA (1)...(19): siRNA sense strand
gcucacaccacuggaauca

SEQ ID NO: 291476 - RNA, 19 nt, Homo sapiens
  misc_RNA (1)...(19): siRNA sense strand
gaugaagacaguacaacca

SEQ ID NO: 291477 - RNA, 19 nt, Homo sapiens
  misc_RNA (1)...(19): siRNA sense strand
guggucgaauccaguagaa

SEQ ID NO: 291478 - RNA, 19 nt, Homo sapiens
  misc_RNA (1)...(19): siRNA sense strand
caaguacagggaaggaaga

SEQ ID NO: 291479 - RNA, 19 nt, Homo sapiens
  misc_RNA (1)...(19): siRNA sense strand
ugaaaagacuuggcaugaa

SEQ ID NO: 291480 - RNA, 19 nt, Homo sapiens
  misc_RNA (1)...(19): siRNA sense strand
ucaggcagcaccagaugaa

SEQ ID NO: 291481 - RNA, 19 nt, Homo sapiens
  misc_RNA (1)...(19): siRNA sense strand
gcuggaagaggcagucaau

SEQ ID NO: 291482 - RNA, 19 nt, Homo sapiens
  misc_RNA (1)...(19): siRNA sense strand
ggaaaagccacccagagaa

SEQ ID NO: 291483 - RNA, 19 nt, Homo sapiens
  misc_RNA (1)...(19): siRNA sense strand
gagcucacaccacuggaau

SEQ ID NO: 291484 - RNA, 19 nt, Homo sapiens
  misc_RNA (1)...(19): siRNA sense strand
cagugucugucgcggauug

SEQ ID NO: 291485 - RNA, 19 nt, Homo sapiens
  misc_RNA (1)...(19): siRNA sense strand
gaagaggaugaacuguuuc

SEQ ID NO: 291486 - RNA, 19 nt, Homo sapiens
  misc_RNA (1)...(19): siRNA sense strand
gcccaccguucucaaccaa

SEQ ID NO: 291487 - RNA, 19 nt, Homo sapiens
  misc_RNA (1)...(19): siRNA sense strand
caagaacaagcgcaugaca

SEQ ID NO: 291488 - RNA, 19 nt, Homo sapiens
  misc_RNA (1)...(19): siRNA sense strand
uggaaucagcuaucaaugu

SEQ ID NO: 291489 - RNA, 19 nt, Homo sapiens
  misc_RNA (1)...(19): siRNA sense strand
aaaacggaauuuacacuga

SEQ ID NO: 291490 - RNA, 19 nt, Homo sapiens
  misc_RNA (1)...(19): siRNA sense strand
gaucgcuggcggaccauga

SEQ ID NO: 291491 - RNA, 19 nt, Homo sapiens
  misc_RNA (1)...(19): siRNA sense strand
agacuguuccuuugauaug

SEQ ID NO: 291492 - RNA, 19 nt, Homo sapiens
  misc_RNA (1)...(19): siRNA sense strand
gggaaaauuuagacuguuc

SEQ ID NO: 291493 - RNA, 19 nt, Homo sapiens
  misc_RNA (1)...(19): siRNA sense strand
gaaaagaugaaaacgaaag

SEQ ID NO: 291494 - RNA, 19 nt, Homo sapiens
  misc_RNA (1)...(19): siRNA sense strand
aaugaugacucugaaagca

SEQ ID NO: 291495 - RNA, 19 nt, Homo sapiens
  misc_RNA (1)...(19): siRNA sense strand
cugcugucauuauuuguau

SEQ ID NO: 291496 - RNA, 19 nt, Homo sapiens
  misc_RNA (1)...(19): siRNA sense strand
gguggaagaggaugaacug

SEQ ID NO: 291497 - RNA, 19 nt, Homo sapiens
  misc_RNA (1)...(19): siRNA sense strand
uaagcagauuggucuugga

SEQ ID NO: 291498 - RNA, 19 nt, Homo sapiens
  misc_RNA (1)...(19): siRNA sense strand
caaggcagcuacggaaucc

SEQ ID NO: 291499 - RNA, 19 nt, Homo sapiens
  misc_RNA (1)...(19): siRNA sense strand
uauggaggcugagcucaca

SEQ ID NO: 291500 - RNA, 19 nt, Homo sapiens
  misc_RNA (1)...(19): siRNA sense strand
ggacaucaugcaggcuuug

SEQ ID NO: 291501 - RNA, 19 nt, Homo sapiens
  misc_RNA (1)...(19): siRNA sense strand
uggaagaggaugaacuguu

SEQ ID NO: 291502 - RNA, 19 nt, Homo sapiens
  misc_RNA (1)...(19): siRNA sense strand
ggucgaauccaguagaaaa

SEQ ID NO: 291503 - RNA, 19 nt, Homo sapiens
  misc_RNA (1)...(19): siRNA sense strand
caguacaaccaauauaaca

SEQ ID NO: 291504 - RNA, 19 nt, Homo sapiens
  misc_RNA (1)...(19): siRNA sense strand
acaagcgcaugacaauaag

SEQ ID NO: 291505 - RNA, 19 nt, Homo sapiens
  misc_RNA (1)...(19): siRNA sense strand
caagagacccagaaaagau

SEQ ID NO: 291506 - RNA, 19 nt, Homo sapiens
  misc_RNA (1)...(19): siRNA sense strand
gaaugaugacucugaaagc

SEQ ID NO: 291507 - RNA, 19 nt, Homo sapiens
  misc_RNA (1)...(19): siRNA sense strand
cccaagaacaagcgcauga

SEQ ID NO: 291508 - RNA, 19 nt, Homo sapiens
  misc_RNA (1)...(19): siRNA sense strand
ggaggaggacagccagagu

SEQ ID NO: 291509 - RNA, 19 nt, Homo sapiens
  misc_RNA (1)...(19): siRNA sense strand
ucagacagauccgggacau

SEQ ID NO: 291510 - RNA, 19 nt, Homo sapiens
  misc_RNA (1)...(19): siRNA sense strand
gaagaaggggaaaauuuag

SEQ ID NO: 291511 - RNA, 19 nt, Homo sapiens
  misc_RNA (1)...(19): siRNA sense strand
ggaauccuccaaccaccau

SEQ ID NO: 291512 - RNA, 19 nt, Homo sapiens
  misc_RNA (1)...(19): siRNA sense strand
cagaagcugagaaaugauc

SEQ ID NO: 291513 - RNA, 19 nt, Homo sapiens
  misc_RNA (1)...(19): siRNA sense strand
ccagaugaagacaguacaa

SEQ ID NO: 291514 - RNA, 19 nt, Homo sapiens
  misc_RNA (1)...(19): siRNA sense strand
cauccaagcccaccguucu

SEQ ID NO: 291515 - RNA, 19 nt, Homo sapiens
  misc_RNA (1)...(19): siRNA sense strand
gcgcagccgugacaucuuu

SEQ ID NO: 291516 - RNA, 19 nt, Homo sapiens
  misc_RNA (1)...(19): siRNA sense strand
gugcagccauuccaucuga

SEQ ID NO: 291517 - RNA, 19 nt, Homo sapiens
  misc_RNA (1)...(19): siRNA sense strand
ggcaugagcuccaccuucu

SEQ ID NO: 291518 - RNA, 19 nt, Homo sapiens
  misc_RNA (1)...(19): siRNA sense strand
cgagaccacuuccggaaca

SEQ ID NO: 291519 - RNA, 19 nt, Homo sapiens
  misc_RNA (1)...(19): siRNA sense strand
ggagggucaucuucaccaa

SEQ ID NO: 291520 - RNA, 19 nt, Homo sapiens
  misc_RNA (1)...(19): siRNA sense strand
ccaaguacagccuggaaga

SEQ ID NO: 291521 - RNA, 19 nt, Homo sapiens
  misc_RNA (1)...(19): siRNA sense strand
cagccacggugcagccauu

SEQ ID NO: 291522 - RNA, 19 nt, Homo sapiens
  misc_RNA (1)...(19): siRNA sense strand
cgacacagucucccucagu

SEQ ID NO: 291523 - RNA, 19 nt, Homo sapiens
  misc_RNA (1)...(19): siRNA sense strand
gaccaaguacagccuggaa

SEQ ID NO: 291524 - RNA, 19 nt, Homo sapiens
  misc_RNA (1)...(19): siRNA sense strand
gaccacuuccggaacaaga

SEQ ID NO: 291525 - RNA, 19 nt, Homo sapiens
  misc_RNA (1)...(19): siRNA sense strand
gagggucaucuucaccaaa

SEQ ID NO: 291526 - RNA, 19 nt, Homo sapiens
  misc_RNA (1)...(19): siRNA sense strand
ugacaacggaggcuucaag

SEQ ID NO: 291527 - RNA, 19 nt, Homo sapiens
  misc_RNA (1)...(19): siRNA sense strand
gagaccacuuccggaacaa

SEQ ID NO: 291528 - RNA, 19 nt, Homo sapiens
  misc_RNA (1)...(19): siRNA sense strand
gcagccauuccaucugaga

SEQ ID NO: 291529 - RNA, 19 nt, Homo sapiens
  misc_RNA (1)...(19): siRNA sense strand
cgguggugcugaaguggaa

SEQ ID NO: 291530 - RNA, 19 nt, Homo sapiens
  misc_RNA (1)...(19): siRNA sense strand
aguacagccuggaagaugu

SEQ ID NO: 291531 - RNA, 19 nt, Homo sapiens
  misc_RNA (1)...(19): siRNA sense strand
guacagccuggaagaugug

SEQ ID NO: 291532 - RNA, 19 nt, Homo sapiens
  misc_RNA (1)...(19): siRNA sense strand
ucagcgagcagagcaauca

SEQ ID NO: 291533 - RNA, 19 nt, Homo sapiens
  misc_RNA (1)...(19): siRNA sense strand
cccaggugcugaggucuga

SEQ ID NO: 291534 - RNA, 19 nt, Homo sapiens
  misc_RNA (1)...(19): siRNA sense strand
ggacaucucugagcuggau

SEQ ID NO: 291535 - RNA, 19 nt, Homo sapiens
  misc_RNA (1)...(19): siRNA sense strand
aaacuugggucccugaaca

SEQ ID NO: 291536 - RNA, 19 nt, Homo sapiens
  misc_RNA (1)...(19): siRNA sense strand
ggagcagaaucccaacguu

SEQ ID NO: 291537 - RNA, 19 nt, Homo sapiens
  misc_RNA (1)...(19): siRNA sense strand
ucaaaggcaucccgaagca

SEQ ID NO: 291538 - RNA, 19 nt, Homo sapiens
  misc_RNA (1)...(19): siRNA sense strand
ucucugagcuggauauggu

SEQ ID NO: 291539 - RNA, 19 nt, Homo sapiens
  misc_RNA (1)...(19): siRNA sense strand
guucaagacggccaacaaa

SEQ ID NO: 291540 - RNA, 19 nt, Homo sapiens
  misc_RNA (1)...(19): siRNA sense strand
gaaggaacgaggugugaag

SEQ ID NO: 291541 - RNA, 19 nt, Homo sapiens
  misc_RNA (1)...(19): siRNA sense strand
aggaaacggugguggagaa

SEQ ID NO: 291542 - RNA, 19 nt, Homo sapiens
  misc_RNA (1)...(19): siRNA sense strand
gcgaagcggagaaggaaga

SEQ ID NO: 291543 - RNA, 19 nt, Homo sapiens
  misc_RNA (1)...(19): siRNA sense strand
uugggucccugaacaauga

SEQ ID NO: 291544 - RNA, 19 nt, Homo sapiens
  misc_RNA (1)...(19): siRNA sense strand
acaagcccaugaccaaugu

SEQ ID NO: 291545 - RNA, 19 nt, Homo sapiens
  misc_RNA (1)...(19): siRNA sense strand
ucaagacggccaacaaagu

SEQ ID NO: 291546 - RNA, 19 nt, Homo sapiens
  misc_RNA (1)...(19): siRNA sense strand
caagacggccaacaaaguc

SEQ ID NO: 291547 - RNA, 19 nt, Homo sapiens
  misc_RNA (1)...(19): siRNA sense strand
gcacgguggacgagaugaa

SEQ ID NO: 291548 - RNA, 19 nt, Homo sapiens
  misc_RNA (1)...(19): siRNA sense strand
gugugaagcugcuggacau

SEQ ID NO: 291549 - RNA, 19 nt, Homo sapiens
  misc_RNA (1)...(19): siRNA sense strand
gcucagcagcagccuaaga

SEQ ID NO: 291550 - RNA, 19 nt, Homo sapiens
  misc_RNA (1)...(19): siRNA sense strand
cagcagcagccuaagaaga

SEQ ID NO: 291551 - RNA, 19 nt, Homo sapiens
  misc_RNA (1)...(19): siRNA sense strand
cagugaagcucaaguugcu

SEQ ID NO: 291552 - RNA, 19 nt, Homo sapiens
  misc_RNA (1)...(19): siRNA sense strand
ggaaggaacgaggugugaa

SEQ ID NO: 291553 - RNA, 19 nt, Homo sapiens
  misc_RNA (1)...(19): siRNA sense strand
aaaggugggugagugugaa

SEQ ID NO: 291554 - RNA, 19 nt, Homo sapiens
  misc_RNA (1)...(19): siRNA sense strand
ggacacaggcucgcuuaac

SEQ ID NO: 291555 - RNA, 19 nt, Homo sapiens
  misc_RNA (1)...(19): siRNA sense strand
gacacaggcucgcuuaacc

SEQ ID NO: 291556 - RNA, 19 nt, Homo sapiens
  misc_RNA (1)...(19): siRNA sense strand
augcggaggugguggagaa

SEQ ID NO: 291557 - RNA, 19 nt, Homo sapiens
  misc_RNA (1)...(19): siRNA sense strand
uguuugagaugaacuaugc

SEQ ID NO: 291558 - RNA, 19 nt, Homo sapiens
  misc_RNA (1)...(19): siRNA sense strand
cccaggagauguucaagac

SEQ ID NO: 291559 - RNA, 19 nt, Homo sapiens
  misc_RNA (1)...(19): siRNA sense strand
gaggcgaagcggagaagga

SEQ ID NO: 291560 - RNA, 19 nt, Homo sapiens
  misc_RNA (1)...(19): siRNA sense strand
guacaagcccaugaccaau

SEQ ID NO: 291561 - RNA, 19 nt, Homo sapiens
  misc_RNA (1)...(19): siRNA sense strand
ucccaacguucaggauauu

SEQ ID NO: 291562 - RNA, 19 nt, Homo sapiens
  misc_RNA (1)...(19): siRNA sense strand
agcagcagccuaagaagaa

SEQ ID NO: 291563 - RNA, 19 nt, Homo sapiens
  misc_RNA (1)...(19): siRNA sense strand
ugaagcugcuggacaucuc

SEQ ID NO: 291564 - RNA, 19 nt, Homo sapiens
  misc_RNA (1)...(19): siRNA sense strand
ugggagaacuuagagaaaa

SEQ ID NO: 291565 - RNA, 19 nt, Homo sapiens
  misc_RNA (1)...(19): siRNA sense strand
gcccaggagauguucaaga

SEQ ID NO: 291566 - RNA, 19 nt, Homo sapiens
  misc_RNA (1)...(19): siRNA sense strand
ucgccgacaucuugaaguc

SEQ ID NO: 291567 - RNA, 19 nt, Homo sapiens
  misc_RNA (1)...(19): siRNA sense strand
uuaaagcggaaacccaaga

SEQ ID NO: 291568 - RNA, 19 nt, Homo sapiens
  misc_RNA (1)...(19): siRNA sense strand
ggcagugaagcucaaguug

SEQ ID NO: 291569 - RNA, 19 nt, Homo sapiens
  misc_RNA (1)...(19): siRNA sense strand
uacaagcccaugaccaaug

SEQ ID NO: 291570 - RNA, 19 nt, Homo sapiens
  misc_RNA (1)...(19): siRNA sense strand
aguacaagcccaugaccaa

SEQ ID NO: 291571 - RNA, 19 nt, Homo sapiens
  misc_RNA (1)...(19): siRNA sense strand
ucacgagagagcagauguu

SEQ ID NO: 291572 - RNA, 19 nt, Homo sapiens
  misc_RNA (1)...(19): siRNA sense strand
ccggacacaggcucgcuua

SEQ ID NO: 291573 - RNA, 19 nt, Homo sapiens
  misc_RNA (1)...(19): siRNA sense strand
ggagaagccucaucauuga

SEQ ID NO: 291574 - RNA, 19 nt, Homo sapiens
  misc_RNA (1)...(19): siRNA sense strand
gcucagcauuuggaaguua

SEQ ID NO: 291575 - RNA, 19 nt, Homo sapiens
  misc_RNA (1)...(19): siRNA sense strand
ggaaguuacuguuggagau

SEQ ID NO: 291576 - RNA, 19 nt, Homo sapiens
  misc_RNA (1)...(19): siRNA sense strand
gcagguuacucagcaguuu

SEQ ID NO: 291577 - RNA, 19 nt, Homo sapiens
  misc_RNA (1)...(19): siRNA sense strand
uuacagacuuuaaggagaa

SEQ ID NO: 291578 - RNA, 19 nt, Homo sapiens
  misc_RNA (1)...(19): siRNA sense strand
gcagaucaacacagucaaa

SEQ ID NO: 291579 - RNA, 19 nt, Homo sapiens
  misc_RNA (1)...(19): siRNA sense strand
aggagaagccucaucauug

SEQ ID NO: 291580 - RNA, 19 nt, Homo sapiens
  misc_RNA (1)...(19): siRNA sense strand
uaacacagagagaggaaug

SEQ ID NO: 291581 - RNA, 19 nt, Homo sapiens
  misc_RNA (1)...(19): siRNA sense strand
gaggguuacugggacugua

SEQ ID NO: 291582 - RNA, 19 nt, Homo sapiens
  misc_RNA (1)...(19): siRNA sense strand
cuacacagucaaagaaaga

SEQ ID NO: 291583 - RNA, 19 nt, Homo sapiens
  misc_RNA (1)...(19): siRNA sense strand
aaaggaaacaacuagcaaa

SEQ ID NO: 291584 - RNA, 19 nt, Homo sapiens
  misc_RNA (1)...(19): siRNA sense strand
gauaacacagagagaggaa

SEQ ID NO: 291585 - RNA, 19 nt, Homo sapiens
  misc_RNA (1)...(19): siRNA sense strand
ggaauguccaggucaucuu

SEQ ID NO: 291586 - RNA, 19 nt, Homo sapiens
  misc_RNA (1)...(19): siRNA sense strand
gagaagccucaucauugaa

SEQ ID NO: 291587 - RNA, 19 nt, Homo sapiens
  misc_RNA (1)...(19): siRNA sense strand
gaauguccaggucaucuuc

SEQ ID NO: 291588 - RNA, 19 nt, Homo sapiens
  misc_RNA (1)...(19): siRNA sense strand
gcauuuggaaguuacuguu

SEQ ID NO: 291589 - RNA, 19 nt, Homo sapiens
  misc_RNA (1)...(19): siRNA sense strand
ggcucuagcucugauaaca

SEQ ID NO: 291590 - RNA, 19 nt, Homo sapiens
  misc_RNA (1)...(19): siRNA sense strand
gaaaaggaaacaacuagca

SEQ ID NO: 291591 - RNA, 19 nt, Homo sapiens
  misc_RNA (1)...(19): siRNA sense strand
gaaguuacuguuggagauc

SEQ ID NO: 291592 - RNA, 19 nt, Homo sapiens
  misc_RNA (1)...(19): siRNA sense strand
gaaaaccaggccaagauug

SEQ ID NO: 291593 - RNA, 19 nt, Homo sapiens
  misc_RNA (1)...(19): siRNA sense strand
gccuucaagugcaugaugu

SEQ ID NO: 291594 - RNA, 19 nt, Homo sapiens
  misc_RNA (1)...(19): siRNA sense strand
ccuacacagucaaagaaag

SEQ ID NO: 291595 - RNA, 19 nt, Homo sapiens
  misc_RNA (1)...(19): siRNA sense strand
agaggaauguccaggucau

SEQ ID NO: 291596 - RNA, 19 nt, Homo sapiens
  misc_RNA (1)...(19): siRNA sense strand
aaaccaggccaagauugaa

SEQ ID NO: 291597 - RNA, 19 nt, Homo sapiens
  misc_RNA (1)...(19): siRNA sense strand
ggaaacaacuccucuguga

SEQ ID NO: 291598 - RNA, 19 nt, Homo sapiens
  misc_RNA (1)...(19): siRNA sense strand
gaaauucgccuuauugauu

SEQ ID NO: 291599 - RNA, 19 nt, Homo sapiens
  misc_RNA (1)...(19): siRNA sense strand
gcucauaacuacaggaaua

SEQ ID NO: 291600 - RNA, 19 nt, Homo sapiens
  misc_RNA (1)...(19): siRNA sense strand
gaaggaagcuguucuuaag

SEQ ID NO: 291601 - RNA, 19 nt, Homo sapiens
  misc_RNA (1)...(19): siRNA sense strand
ggagaucuauggaccaaua

SEQ ID NO: 291602 - RNA, 19 nt, Homo sapiens
  misc_RNA (1)...(19): siRNA sense strand
gcagaaggcauuauauaua

SEQ ID NO: 291603 - RNA, 19 nt, Homo sapiens
  misc_RNA (1)...(19): siRNA sense strand
gaucugacaugaagaauca

SEQ ID NO: 291604 - RNA, 19 nt, Homo sapiens
  misc_RNA (1)...(19): siRNA sense strand
gagacaugcuuuacccuua

SEQ ID NO: 291605 - RNA, 19 nt, Homo sapiens
  misc_RNA (1)...(19): siRNA sense strand
cgauugaucuuguggcuua

SEQ ID NO: 291606 - RNA, 19 nt, Homo sapiens
  misc_RNA (1)...(19): siRNA sense strand
ggugagagaugcagugauu

SEQ ID NO: 291607 - RNA, 19 nt, Homo sapiens
  misc_RNA (1)...(19): siRNA sense strand
caggaagacuuaugcauuu

SEQ ID NO: 291608 - RNA, 19 nt, Homo sapiens
  misc_RNA (1)...(19): siRNA sense strand
gaacugguaauguuucuaa

SEQ ID NO: 291609 - RNA, 19 nt, Homo sapiens
  misc_RNA (1)...(19): siRNA sense strand
ugaaauaucuuuggguuug

SEQ ID NO: 291610 - RNA, 19 nt, Homo sapiens
  misc_RNA (1)...(19): siRNA sense strand
uuaaugagcuaccuuguga

SEQ ID NO: 291611 - RNA, 19 nt, Homo sapiens
  misc_RNA (1)...(19): siRNA sense strand
ggaaggcuauccuaacaga

SEQ ID NO: 291612 - RNA, 19 nt, Homo sapiens
  misc_RNA (1)...(19): siRNA sense strand
ggaaggcugcccugcauua

SEQ ID NO: 291613 - RNA, 19 nt, Homo sapiens
  misc_RNA (1)...(19): siRNA sense strand
ugucaaagcugguggcauu

SEQ ID NO: 291614 - RNA, 19 nt, Homo sapiens
  misc_RNA (1)...(19): siRNA sense strand
gcaauggaaacaauagaua

SEQ ID NO: 291615 - RNA, 19 nt, Homo sapiens
  misc_RNA (1)...(19): siRNA sense strand
ugagcuaccuugugaauau

SEQ ID NO: 291616 - RNA, 19 nt, Homo sapiens
  misc_RNA (1)...(19): siRNA sense strand
cggcacagcucccaauuga

SEQ ID NO: 291617 - RNA, 19 nt, Homo sapiens
  misc_RNA (1)...(19): siRNA sense strand
uaaagcagaaggcauuaua

SEQ ID NO: 291618 - RNA, 19 nt, Homo sapiens
  misc_RNA (1)...(19): siRNA sense strand
cuauagaguuuaugacuga

SEQ ID NO: 291619 - RNA, 19 nt, Homo sapiens
  misc_RNA (1)...(19): siRNA sense strand
uaacagagacaguacgaaa

SEQ ID NO: 291620 - RNA, 19 nt, Homo sapiens
  misc_RNA (1)...(19): siRNA sense strand
ucaugaagcuuuccuaugg

SEQ ID NO: 291621 - RNA, 19 nt, Homo sapiens
  misc_RNA (1)...(19): siRNA sense strand
gaaauaucuuuggguuuga

SEQ ID NO: 291622 - RNA, 19 nt, Homo sapiens
  misc_RNA (1)...(19): siRNA sense strand
cacaggaacugguaauguu

SEQ ID NO: 291623 - RNA, 19 nt, Homo sapiens
  misc_RNA (1)...(19): siRNA sense strand
cagaaggcauuauauauac

SEQ ID NO: 291624 - RNA, 19 nt, Homo sapiens
  misc_RNA (1)...(19): siRNA sense strand
gaaacuaggaggagacaau

SEQ ID NO: 291625 - RNA, 19 nt, Homo sapiens
  misc_RNA (1)...(19): siRNA sense strand
ggacaucacacaccuuuua

SEQ ID NO: 291626 - RNA, 19 nt, Homo sapiens
  misc_RNA (1)...(19): siRNA sense strand
ccaagggucuucaccacaa

SEQ ID NO: 291627 - RNA, 19 nt, Homo sapiens
  misc_RNA (1)...(19): siRNA sense strand
uaugaaagcuuugaaugga

SEQ ID NO: 291628 - RNA, 19 nt, Homo sapiens
  misc_RNA (1)...(19): siRNA sense strand
gcacagcucccaauugaag

SEQ ID NO: 291629 - RNA, 19 nt, Homo sapiens
  misc_RNA (1)...(19): siRNA sense strand
caauaggacccuuaacauu

SEQ ID NO: 291630 - RNA, 19 nt, Homo sapiens
  misc_RNA (1)...(19): siRNA sense strand
aauaggacccuuaacauuu

SEQ ID NO: 291631 - RNA, 19 nt, Homo sapiens
  misc_RNA (1)...(19): siRNA sense strand
cuacacagaguacaauuaa

SEQ ID NO: 291632 - RNA, 19 nt, Homo sapiens
  misc_RNA (1)...(19): siRNA sense strand
agagacagcuuuggaauca

SEQ ID NO: 291633 - RNA, 19 nt, Homo sapiens
  misc_RNA (1)...(19): siRNA sense strand
ugaaagcuuugaauggauu

SEQ ID NO: 291634 - RNA, 19 nt, Homo sapiens
  misc_RNA (1)...(19): siRNA sense strand
ggauauuucugaagcuugu

SEQ ID NO: 291635 - RNA, 19 nt, Homo sapiens
  misc_RNA (1)...(19): siRNA sense strand
caaacaaaguuaacauggu

SEQ ID NO: 291636 - RNA, 19 nt, Homo sapiens
  misc_RNA (1)...(19): siRNA sense strand
aucaagagauggcaauaua

SEQ ID NO: 291637 - RNA, 19 nt, Homo sapiens
  misc_RNA (1)...(19): siRNA sense strand
uaucugagccuguauuaga

SEQ ID NO: 291638 - RNA, 19 nt, Homo sapiens
  misc_RNA (1)...(19): siRNA sense strand
ggaaucuacugggaacaaa

SEQ ID NO: 291639 - RNA, 19 nt, Homo sapiens
  misc_RNA (1)...(19): siRNA sense strand
cccaagcaaucuuuaauga

SEQ ID NO: 291640 - RNA, 19 nt, Homo sapiens
  misc_RNA (1)...(19): siRNA sense strand
aaacaggaaauucgccuua

SEQ ID NO: 291641 - RNA, 19 nt, Homo sapiens
  misc_RNA (1)...(19): siRNA sense strand
acagagacaguacgaaaua

SEQ ID NO: 291642 - RNA, 19 nt, Homo sapiens
  misc_RNA (1)...(19): siRNA sense strand
gaucacauguuagcaaugg

SEQ ID NO: 291643 - RNA, 19 nt, Homo sapiens
  misc_RNA (1)...(19): siRNA sense strand
gaugcuggcuaugaaauau

SEQ ID NO: 291644 - RNA, 19 nt, Homo sapiens
  misc_RNA (1)...(19): siRNA sense strand
uacgaaauaugcugagauu

SEQ ID NO: 291645 - RNA, 19 nt, Homo sapiens
  misc_RNA (1)...(19): siRNA sense strand
ucuuggaucuggcuacaua

SEQ ID NO: 291646 - RNA, 19 nt, Homo sapiens
  misc_RNA (1)...(19): siRNA sense strand
gaacgugcucagucacuuu

SEQ ID NO: 291647 - RNA, 19 nt, Homo sapiens
  misc_RNA (1)...(19): siRNA sense strand
ucaaaggcaucaccaaucu

SEQ ID NO: 291648 - RNA, 19 nt, Homo sapiens
  misc_RNA (1)...(19): siRNA sense strand
aaauuaauguccaggaaga

SEQ ID NO: 291649 - RNA, 19 nt, Homo sapiens
  misc_RNA (1)...(19): siRNA sense strand
ugaaggaagcuguucuuaa

SEQ ID NO: 291650 - RNA, 19 nt, Homo sapiens
  misc_RNA (1)...(19): siRNA sense strand
ggaaagguugugaauguug

SEQ ID NO: 291651 - RNA, 19 nt, Homo sapiens
  misc_RNA (1)...(19): siRNA sense strand
gcauggacauuuguaaaca

SEQ ID NO: 291652 - RNA, 19 nt, Homo sapiens
  misc_RNA (1)...(19): siRNA sense strand
caagagauggcaauauaga

SEQ ID NO: 291653 - RNA, 19 nt, Homo sapiens
  misc_RNA (1)...(19): siRNA sense strand
gcuuuacccuuauguugaa

SEQ ID NO: 291654 - RNA, 19 nt, Homo sapiens
  misc_RNA (1)...(19): siRNA sense strand
gauaaggacuaugucaaag

SEQ ID NO: 291655 - RNA, 19 nt, Homo sapiens
  misc_RNA (1)...(19): siRNA sense strand
cgacacagccucuugaaag

SEQ ID NO: 291656 - RNA, 19 nt, Homo sapiens
  misc_RNA (1)...(19): siRNA sense strand
ccaggaagacuuaugcauu

SEQ ID NO: 291657 - RNA, 19 nt, Homo sapiens
  misc_RNA (1)...(19): siRNA sense strand
agggauauaugaaagcuuu

SEQ ID NO: 291658 - RNA, 19 nt, Homo sapiens
  misc_RNA (1)...(19): siRNA sense strand
gagggucuauagaguuuau

SEQ ID NO: 291659 - RNA, 19 nt, Homo sapiens
  misc_RNA (1)...(19): siRNA sense strand
caacuugcuuaauuaaugg

SEQ ID NO: 291660 - RNA, 19 nt, Homo sapiens
  misc_RNA (1)...(19): siRNA sense strand
ucugaagcuugucuaauuu

SEQ ID NO: 291661 - RNA, 19 nt, Homo sapiens
  misc_RNA (1)...(19): siRNA sense strand
ggacaucaauggcuuuuca

SEQ ID NO: 291662 - RNA, 19 nt, Homo sapiens
  misc_RNA (1)...(19): siRNA sense strand
ggauuucacccuccucuga

SEQ ID NO: 291663 - RNA, 19 nt, Homo sapiens
  misc_RNA (1)...(19): siRNA sense strand
gccaaggccugcaucacaa

SEQ ID NO: 291664 - RNA, 19 nt, Homo sapiens
  misc_RNA (1)...(19): siRNA sense strand
gaacaguuaggcaagaaau

SEQ ID NO: 291665 - RNA, 19 nt, Homo sapiens
  misc_RNA (1)...(19): siRNA sense strand
uaagggagcccaagcaauc

SEQ ID NO: 291666 - RNA, 19 nt, Homo sapiens
  misc_RNA (1)...(19): siRNA sense strand
ucaccaaucugggauacaa

SEQ ID NO: 291667 - RNA, 19 nt, Homo sapiens
  misc_RNA (1)...(19): siRNA sense strand
aagcagaaggcauuauaua

SEQ ID NO: 291668 - RNA, 19 nt, Homo sapiens
  misc_RNA (1)...(19): siRNA sense strand
gaucuauggaccaauauug

SEQ ID NO: 291669 - RNA, 19 nt, Homo sapiens
  misc_RNA (1)...(19): siRNA sense strand
gcugagauuuauggcauuu

SEQ ID NO: 291670 - RNA, 19 nt, Homo sapiens
  misc_RNA (1)...(19): siRNA sense strand
cuuguugccuuauguauug

SEQ ID NO: 291671 - RNA, 19 nt, Homo sapiens
  misc_RNA (1)...(19): siRNA sense strand
aaacacuccucgccuccua

SEQ ID NO: 291672 - RNA, 19 nt, Homo sapiens
  misc_RNA (1)...(19): siRNA sense strand
uggcauggcucauaacuac

SEQ ID NO: 291673 - RNA, 19 nt, Homo sapiens
  misc_RNA (1)...(19): siRNA sense strand
gauauugcacccuauacaa

SEQ ID NO: 291674 - RNA, 19 nt, Homo sapiens
  misc_RNA (1)...(19): siRNA sense strand
ggagcgaauuaaagcagaa

SEQ ID NO: 291675 - RNA, 19 nt, Homo sapiens
  misc_RNA (1)...(19): siRNA sense strand
gacacagccucuugaaagu

SEQ ID NO: 291676 - RNA, 19 nt, Homo sapiens
  misc_RNA (1)...(19): siRNA sense strand
acaggaaauucgccuuauu

SEQ ID NO: 291677 - RNA, 19 nt, Homo sapiens
  misc_RNA (1)...(19): siRNA sense strand
gaggauauuucugaagcuu

SEQ ID NO: 291678 - RNA, 19 nt, Homo sapiens
  misc_RNA (1)...(19): siRNA sense strand
gagcaucccuuuugcaugu

SEQ ID NO: 291679 - RNA, 19 nt, Homo sapiens
  misc_RNA (1)...(19): siRNA sense strand
guaugauccugcagaguau

SEQ ID NO: 291680 - RNA, 19 nt, Homo sapiens
  misc_RNA (1)...(19): siRNA sense strand
uguaugauccugcagagua

SEQ ID NO: 291681 - RNA, 19 nt, Homo sapiens
  misc_RNA (1)...(19): siRNA sense strand
auaggacccuuaacauuug

SEQ ID NO: 291682 - RNA, 19 nt, Homo sapiens
  misc_RNA (1)...(19): siRNA sense strand
gacugaguguacaacaaua

SEQ ID NO: 291683 - RNA, 19 nt, Homo sapiens
  misc_RNA (1)...(19): siRNA sense strand
agacagcuuuggaaucaga

SEQ ID NO: 291684 - RNA, 19 nt, Homo sapiens
  misc_RNA (1)...(19): siRNA sense strand
ugauaaggacuaugucaaa

SEQ ID NO: 291685 - RNA, 19 nt, Homo sapiens
  misc_RNA (1)...(19): siRNA sense strand
gaugagagacagcuuugga

SEQ ID NO: 291686 - RNA, 19 nt, Homo sapiens
  misc_RNA (1)...(19): siRNA sense strand
guuggaggcugcugaaugg

SEQ ID NO: 291687 - RNA, 19 nt, Homo sapiens
  misc_RNA (1)...(19): siRNA sense strand
gacaugaagaaucaaauug

SEQ ID NO: 291688 - RNA, 19 nt, Homo sapiens
  misc_RNA (1)...(19): siRNA sense strand
ggaacgugcucagucacuu

SEQ ID NO: 291689 - RNA, 19 nt, Homo sapiens
  misc_RNA (1)...(19): siRNA sense strand
caggaaauucgccuuauug

SEQ ID NO: 291690 - RNA, 19 nt, Homo sapiens
  misc_RNA (1)...(19): siRNA sense strand
agacaugcuuuacccuuau

SEQ ID NO: 291691 - RNA, 19 nt, Homo sapiens
  misc_RNA (1)...(19): siRNA sense strand
ggaaauucgccuuauugau

SEQ ID NO: 291692 - RNA, 19 nt, Homo sapiens
  misc_RNA (1)...(19): siRNA sense strand
gaggagacaauacccaguu

SEQ ID NO: 291693 - RNA, 19 nt, Homo sapiens
  misc_RNA (1)...(19): siRNA sense strand
caaagcugguggcauucuu

SEQ ID NO: 291694 - RNA, 19 nt, Homo sapiens
  misc_RNA (1)...(19): siRNA sense strand
caauugaagcuacagaaug

SEQ ID NO: 291695 - RNA, 19 nt, Homo sapiens
  misc_RNA (1)...(19): siRNA sense strand
uucugaagcuugucuaauu

SEQ ID NO: 291696 - RNA, 19 nt, Homo sapiens
  misc_RNA (1)...(19): siRNA sense strand
caagggucuucaccacaaa

SEQ ID NO: 291697 - RNA, 19 nt, Homo sapiens
  misc_RNA (1)...(19): siRNA sense strand
uuacauagcuggagucuuu

SEQ ID NO: 291698 - RNA, 19 nt, Homo sapiens
  misc_RNA (1)...(19): siRNA sense strand
gaaguucgccugcuuugaa

SEQ ID NO: 291699 - RNA, 19 nt, Homo sapiens
  misc_RNA (1)...(19): siRNA sense strand
gcagcugguuguaacauuu

SEQ ID NO: 291700 - RNA, 19 nt, Homo sapiens
  misc_RNA (1)...(19): siRNA sense strand
uauggaagcugcuaagguu

SEQ ID NO: 291701 - RNA, 19 nt, Homo sapiens
  misc_RNA (1)...(19): siRNA sense strand
gggcauauuuaacggauuc

SEQ ID NO: 291702 - RNA, 19 nt, Homo sapiens
  misc_RNA (1)...(19): siRNA sense strand
ugaauucuuugcugacauu

SEQ ID NO: 291703 - RNA, 19 nt, Homo sapiens
  misc_RNA (1)...(19): siRNA sense strand
gaagcacuguacaaguuug

SEQ ID NO: 291704 - RNA, 19 nt, Homo sapiens
  misc_RNA (1)...(19): siRNA sense strand
gcgcacaucacuauauuug

SEQ ID NO: 291705 - RNA, 19 nt, Homo sapiens
  misc_RNA (1)...(19): siRNA sense strand
ugccagugcugaauucuuu

SEQ ID NO: 291706 - RNA, 19 nt, Homo sapiens
  misc_RNA (1)...(19): siRNA sense strand
gagaggagaauacuuaucu

SEQ ID NO: 291707 - RNA, 19 nt, Homo sapiens
  misc_RNA (1)...(19): siRNA sense strand
uacagugguuuaucuauga

SEQ ID NO: 291708 - RNA, 19 nt, Homo sapiens
  misc_RNA (1)...(19): siRNA sense strand
uugaagcacuguacaaguu

SEQ ID NO: 291709 - RNA, 19 nt, Homo sapiens
  misc_RNA (1)...(19): siRNA sense strand
ggaugagacagauaccaua

SEQ ID NO: 291710 - RNA, 19 nt, Homo sapiens
  misc_RNA (1)...(19): siRNA sense strand
ugguaucuguguugaauaa

SEQ ID NO: 291711 - RNA, 19 nt, Homo sapiens
  misc_RNA (1)...(19): siRNA sense strand
gauucucaguuacacuuaa

SEQ ID NO: 291712 - RNA, 19 nt, Homo sapiens
  misc_RNA (1)...(19): siRNA sense strand
cuacagugguuuaucuaug

SEQ ID NO: 291713 - RNA, 19 nt, Homo sapiens
  misc_RNA (1)...(19): siRNA sense strand
cauacaccaugaugaaguu

SEQ ID NO: 291714 - RNA, 19 nt, Homo sapiens
  misc_RNA (1)...(19): siRNA sense strand
cagauaccauacaccauga

SEQ ID NO: 291715 - RNA, 19 nt, Homo sapiens
  misc_RNA (1)...(19): siRNA sense strand
cagggacucugcaaguuug

SEQ ID NO: 291716 - RNA, 19 nt, Homo sapiens
  misc_RNA (1)...(19): siRNA sense strand
ggaugcagcucccaaaaug

SEQ ID NO: 291717 - RNA, 19 nt, Homo sapiens
  misc_RNA (1)...(19): siRNA sense strand
gcuaagguucgaauucaaa

SEQ ID NO: 291718 - RNA, 19 nt, Homo sapiens
  misc_RNA (1)...(19): siRNA sense strand
ugaagucuuuaaagucuug

SEQ ID NO: 291719 - RNA, 19 nt, Homo sapiens
  misc_RNA (1)...(19): siRNA sense strand
uaaagaggaugguguucgu

SEQ ID NO: 291720 - RNA, 19 nt, Homo sapiens
  misc_RNA (1)...(19): siRNA sense strand
cagguuaugccaacacuuu

SEQ ID NO: 291721 - RNA, 19 nt, Homo sapiens
  misc_RNA (1)...(19): siRNA sense strand
aaaguacaagggcauauuu

SEQ ID NO: 291722 - RNA, 19 nt, Homo sapiens
  misc_RNA (1)...(19): siRNA sense strand
uuggagaggagaauacuua

SEQ ID NO: 291723 - RNA, 19 nt, Homo sapiens
  misc_RNA (1)...(19): siRNA sense strand
gaugaaguucgccugcuuu

SEQ ID NO: 291724 - RNA, 19 nt, Homo sapiens
  misc_RNA (1)...(19): siRNA sense strand
uggcgcacaucacuauauu

SEQ ID NO: 291725 - RNA, 19 nt, Homo sapiens
  misc_RNA (1)...(19): siRNA sense strand
cagagcagcugguuguaac

SEQ ID NO: 291726 - RNA, 19 nt, Homo sapiens
  misc_RNA (1)...(19): siRNA sense strand
ggaugguguucgugguuug

SEQ ID NO: 291727 - RNA, 19 nt, Homo sapiens
  misc_RNA (1)...(19): siRNA sense strand
guaucuguguugaauaaag

SEQ ID NO: 291728 - RNA, 19 nt, Homo sapiens
  misc_RNA (1)...(19): siRNA sense strand
gugcuucucugguccucaa

SEQ ID NO: 291729 - RNA, 19 nt, Homo sapiens
  misc_RNA (1)...(19): siRNA sense strand
gaagaaggccuaaaagcau

SEQ ID NO: 291730 - RNA, 19 nt, Homo sapiens
  misc_RNA (1)...(19): siRNA sense strand
gauuuaaagguguauggaa

SEQ ID NO: 291731 - RNA, 19 nt, Homo sapiens
  misc_RNA (1)...(19): siRNA sense strand
guacaagggcauauuuaac

SEQ ID NO: 291732 - RNA, 19 nt, Homo sapiens
  misc_RNA (1)...(19): siRNA sense strand
aagcuuggguuaacucagu

SEQ ID NO: 291733 - RNA, 19 nt, Homo sapiens
  misc_RNA (1)...(19): siRNA sense strand
ggauucucaguuacacuua

SEQ ID NO: 291734 - RNA, 19 nt, Homo sapiens
  misc_RNA (1)...(19): siRNA sense strand
ugaugaaguucgccugcuu

SEQ ID NO: 291735 - RNA, 19 nt, Homo sapiens
  misc_RNA (1)...(19): siRNA sense strand
uaccauacaccaugaugaa

SEQ ID NO: 291736 - RNA, 19 nt, Homo sapiens
  misc_RNA (1)...(19): siRNA sense strand
aaggaugggcuccgacuuu

SEQ ID NO: 291737 - RNA, 19 nt, Homo sapiens
  misc_RNA (1)...(19): siRNA sense strand
ugaacguacuguugaagca

SEQ ID NO: 291738 - RNA, 19 nt, Homo sapiens
  misc_RNA (1)...(19): siRNA sense strand
gcuuugaacguacuguuga

SEQ ID NO: 291739 - RNA, 19 nt, Homo sapiens
  misc_RNA (1)...(19): siRNA sense strand
ggaagaaggccuaaaagca

SEQ ID NO: 291740 - RNA, 19 nt, Homo sapiens
  misc_RNA (1)...(19): siRNA sense strand
cugcuaagguucgaauuca

SEQ ID NO: 291741 - RNA, 19 nt, Homo sapiens
  misc_RNA (1)...(19): siRNA sense strand
gcugaauucuuugcugaca

SEQ ID NO: 291742 - RNA, 19 nt, Homo sapiens
  misc_RNA (1)...(19): siRNA sense strand
ugaagcacuguacaaguuu

SEQ ID NO: 291743 - RNA, 19 nt, Homo sapiens
  misc_RNA (1)...(19): siRNA sense strand
ugugguaucuguguugaau

SEQ ID NO: 291744 - RNA, 19 nt, Homo sapiens
  misc_RNA (1)...(19): siRNA sense strand
gaggaugguguucgugguu

SEQ ID NO: 291745 - RNA, 19 nt, Homo sapiens
  misc_RNA (1)...(19): siRNA sense strand
acauugcccuggcuccuau

SEQ ID NO: 291746 - RNA, 19 nt, Homo sapiens
  misc_RNA (1)...(19): siRNA sense strand
ggaagcugcuaagguucga

SEQ ID NO: 291747 - RNA, 19 nt, Homo sapiens
  misc_RNA (1)...(19): siRNA sense strand
aguacaagggcauauuuaa

SEQ ID NO: 291748 - RNA, 19 nt, Homo sapiens
  misc_RNA (1)...(19): siRNA sense strand
uaaggaagaaggccuaaaa

SEQ ID NO: 291749 - RNA, 19 nt, Homo sapiens
  misc_RNA (1)...(19): siRNA sense strand
ggagaggagaauacuuauc

SEQ ID NO: 291750 - RNA, 19 nt, Homo sapiens
  misc_RNA (1)...(19): siRNA sense strand
aaguacaagggcauauuua

SEQ ID NO: 291751 - RNA, 19 nt, Homo sapiens
  misc_RNA (1)...(19): siRNA sense strand
gacauugcccuggcuccua

SEQ ID NO: 291752 - RNA, 19 nt, Homo sapiens
  misc_RNA (1)...(19): siRNA sense strand
cugauucugugguaucugu

SEQ ID NO: 291753 - RNA, 19 nt, Homo sapiens
  misc_RNA (1)...(19): siRNA sense strand
ugagacagauaccauacac

SEQ ID NO: 291754 - RNA, 19 nt, Homo sapiens
  misc_RNA (1)...(19): siRNA sense strand
gaugagacagauaccauac

SEQ ID NO: 291755 - RNA, 19 nt, Homo sapiens
  misc_RNA (1)...(19): siRNA sense strand
ugcccuggcuccuauggaa

SEQ ID NO: 291756 - RNA, 19 nt, Homo sapiens
  misc_RNA (1)...(19): siRNA sense strand
gguuguaacauuuguagca

SEQ ID NO: 291757 - RNA, 19 nt, Homo sapiens
  misc_RNA (1)...(19): siRNA sense strand
gguuaugccaacacuuuga

SEQ ID NO: 291758 - RNA, 19 nt, Homo sapiens
  misc_RNA (1)...(19): siRNA sense strand
gauaccauacaccaugaug

SEQ ID NO: 291759 - RNA, 19 nt, Homo sapiens
  misc_RNA (1)...(19): siRNA sense strand
ggacuguuugcccguauca

SEQ ID NO: 291760 - RNA, 19 nt, Homo sapiens
  misc_RNA (1)...(19): siRNA sense strand
guauggaagggacuguuug

SEQ ID NO: 291761 - RNA, 19 nt, Homo sapiens
  misc_RNA (1)...(19): siRNA sense strand
gcugcuaagguucgaauuc

SEQ ID NO: 291762 - RNA, 19 nt, Homo sapiens
  misc_RNA (1)...(19): siRNA sense strand
cgacuuuccuuggcuacuc

SEQ ID NO: 291763 - RNA, 19 nt, Homo sapiens
  misc_RNA (1)...(19): siRNA sense strand
guucgugguuuggcuaaag

SEQ ID NO: 291764 - RNA, 19 nt, Homo sapiens
  misc_RNA (1)...(19): siRNA sense strand
agucuuguauagcaauaug

SEQ ID NO: 291765 - RNA, 19 nt, Homo sapiens
  misc_RNA (1)...(19): siRNA sense strand
cauauuuaacggauucuca

SEQ ID NO: 291766 - RNA, 19 nt, Homo sapiens
  misc_RNA (1)...(19): siRNA sense strand
gcaaguuuggcuuuuauga

SEQ ID NO: 291767 - RNA, 19 nt, Homo sapiens
  misc_RNA (1)...(19): siRNA sense strand
ggauuuaaagguguaugga

SEQ ID NO: 291768 - RNA, 19 nt, Homo sapiens
  misc_RNA (1)...(19): siRNA sense strand
ccauacaccaugaugaagu

SEQ ID NO: 291769 - RNA, 19 nt, Homo sapiens
  misc_RNA (1)...(19): siRNA sense strand
gcuggagucuuuugugcaa

SEQ ID NO: 291770 - RNA, 19 nt, Homo sapiens
  misc_RNA (1)...(19): siRNA sense strand
uguauggaagggacuguuu

SEQ ID NO: 291771 - RNA, 19 nt, Homo sapiens
  misc_RNA (1)...(19): siRNA sense strand
uuugugcaauuguuucuca

SEQ ID NO: 291772 - RNA, 19 nt, Homo sapiens
  misc_RNA (1)...(19): siRNA sense strand
uuacauagcuggagucuuu

SEQ ID NO: 291773 - RNA, 19 nt, Homo sapiens
  misc_RNA (1)...(19): siRNA sense strand
gaaguucgccugcuuugaa

SEQ ID NO: 291774 - RNA, 19 nt, Homo sapiens
  misc_RNA (1)...(19): siRNA sense strand
gcagcugguuguaacauuu

SEQ ID NO: 291775 - RNA, 19 nt, Homo sapiens
  misc_RNA (1)...(19): siRNA sense strand
uauggaagcugcuaagguu

SEQ ID NO: 291776 - RNA, 19 nt, Homo sapiens
  misc_RNA (1)...(19): siRNA sense strand
gggcauauuuaacggauuc

SEQ ID NO: 291777 - RNA, 19 nt, Homo sapiens
  misc_RNA (1)...(19): siRNA sense strand
ugaauucuuugcugacauu

SEQ ID NO: 291778 - RNA, 19 nt, Homo sapiens
  misc_RNA (1)...(19): siRNA sense strand
gaagcacuguacaaguuug

SEQ ID NO: 291779 - RNA, 19 nt, Homo sapiens
  misc_RNA (1)...(19): siRNA sense strand
gcgcacaucacuauauuug

SEQ ID NO: 291780 - RNA, 19 nt, Homo sapiens
  misc_RNA (1)...(19): siRNA sense strand
ugccagugcugaauucuuu

SEQ ID NO: 291781 - RNA, 19 nt, Homo sapiens
  misc_RNA (1)...(19): siRNA sense strand
gagaggagaauacuuaucu

SEQ ID NO: 291782 - RNA, 19 nt, Homo sapiens
  misc_RNA (1)...(19): siRNA sense strand
uacagugguuuaucuauga

SEQ ID NO: 291783 - RNA, 19 nt, Homo sapiens
  misc_RNA (1)...(19): siRNA sense strand
uugaagcacuguacaaguu

SEQ ID NO: 291784 - RNA, 19 nt, Homo sapiens
  misc_RNA (1)...(19): siRNA sense strand
ggaugagacagauaccaua

SEQ ID NO: 291785 - RNA, 19 nt, Homo sapiens
  misc_RNA (1)...(19): siRNA sense strand
ugguaucuguguugaauaa

SEQ ID NO: 291786 - RNA, 19 nt, Homo sapiens
  misc_RNA (1)...(19): siRNA sense strand
gauucucaguuacacuuaa

SEQ ID NO: 291787 - RNA, 19 nt, Homo sapiens
  misc_RNA (1)...(19): siRNA sense strand
cuacagugguuuaucuaug

SEQ ID NO: 291788 - RNA, 19 nt, Homo sapiens
  misc_RNA (1)...(19): siRNA sense strand
cauacaccaugaugaaguu

SEQ ID NO: 291789 - RNA, 19 nt, Homo sapiens
  misc_RNA (1)...(19): siRNA sense strand
cagauaccauacaccauga

SEQ ID NO: 291790 - RNA, 19 nt, Homo sapiens
  misc_RNA (1)...(19): siRNA sense strand
cagggacucugcaaguuug

SEQ ID NO: 291791 - RNA, 19 nt, Homo sapiens
  misc_RNA (1)...(19): siRNA sense strand
ggaugcagcucccaaaaug

SEQ ID NO: 291792 - RNA, 19 nt, Homo sapiens
  misc_RNA (1)...(19): siRNA sense strand
gcuaagguucgaauucaaa

SEQ ID NO: 291793 - RNA, 19 nt, Homo sapiens
  misc_RNA (1)...(19): siRNA sense strand
ugaagucuuuaaagucuug

SEQ ID NO: 291794 - RNA, 19 nt, Homo sapiens
  misc_RNA (1)...(19): siRNA sense strand
uaaagaggaugguguucgu

SEQ ID NO: 291795 - RNA, 19 nt, Homo sapiens
  misc_RNA (1)...(19): siRNA sense strand
cagguuaugccaacacuuu

SEQ ID NO: 291796 - RNA, 19 nt, Homo sapiens
  misc_RNA (1)...(19): siRNA sense strand
aaaguacaagggcauauuu

SEQ ID NO: 291797 - RNA, 19 nt, Homo sapiens
  misc_RNA (1)...(19): siRNA sense strand
uuggagaggagaauacuua

SEQ ID NO: 291798 - RNA, 19 nt, Homo sapiens
  misc_RNA (1)...(19): siRNA sense strand
gaugaaguucgccugcuuu

SEQ ID NO: 291799 - RNA, 19 nt, Homo sapiens
  misc_RNA (1)...(19): siRNA sense strand
uggcgcacaucacuauauu

SEQ ID NO: 291800 - RNA, 19 nt, Homo sapiens
  misc_RNA (1)...(19): siRNA sense strand
cagagcagcugguuguaac

SEQ ID NO: 291801 - RNA, 19 nt, Homo sapiens
  misc_RNA (1)...(19): siRNA sense strand
ggaugguguucgugguuug

SEQ ID NO: 291802 - RNA, 19 nt, Homo sapiens
  misc_RNA (1)...(19): siRNA sense strand
guaucuguguugaauaaag

SEQ ID NO: 291803 - RNA, 19 nt, Homo sapiens
  misc_RNA (1)...(19): siRNA sense strand
gugcuucucugguccucaa

SEQ ID NO: 291804 - RNA, 19 nt, Homo sapiens
  misc_RNA (1)...(19): siRNA sense strand
gaagaaggccuaaaagcau

SEQ ID NO: 291805 - RNA, 19 nt, Homo sapiens
  misc_RNA (1)...(19): siRNA sense strand
gauuuaaagguguauggaa

SEQ ID NO: 291806 - RNA, 19 nt, Homo sapiens
  misc_RNA (1)...(19): siRNA sense strand
guacaagggcauauuuaac

SEQ ID NO: 291807 - RNA, 19 nt, Homo sapiens
  misc_RNA (1)...(19): siRNA sense strand
aagcuuggguuaacucagu

SEQ ID NO: 291808 - RNA, 19 nt, Homo sapiens
  misc_RNA (1)...(19): siRNA sense strand
ggauucucaguuacacuua

SEQ ID NO: 291809 - RNA, 19 nt, Homo sapiens
  misc_RNA (1)...(19): siRNA sense strand
ugaugaaguucgccugcuu

SEQ ID NO: 291810 - RNA, 19 nt, Homo sapiens
  misc_RNA (1)...(19): siRNA sense strand
uaccauacaccaugaugaa

SEQ ID NO: 291811 - RNA, 19 nt, Homo sapiens
  misc_RNA (1)...(19): siRNA sense strand
aaggaugggcuccgacuuu

SEQ ID NO: 291812 - RNA, 19 nt, Homo sapiens
  misc_RNA (1)...(19): siRNA sense strand
ugaacguacuguugaagca

SEQ ID NO: 291813 - RNA, 19 nt, Homo sapiens
  misc_RNA (1)...(19): siRNA sense strand
gcuuugaacguacuguuga

SEQ ID NO: 291814 - RNA, 19 nt, Homo sapiens
  misc_RNA (1)...(19): siRNA sense strand
ggaagaaggccuaaaagca

SEQ ID NO: 291815 - RNA, 19 nt, Homo sapiens
  misc_RNA (1)...(19): siRNA sense strand
cugcuaagguucgaauuca

SEQ ID NO: 291816 - RNA, 19 nt, Homo sapiens
  misc_RNA (1)...(19): siRNA sense strand
gcugaauucuuugcugaca

SEQ ID NO: 291817 - RNA, 19 nt, Homo sapiens
  misc_RNA (1)...(19): siRNA sense strand
ugaagcacuguacaaguuu

SEQ ID NO: 291818 - RNA, 19 nt, Homo sapiens
  misc_RNA (1)...(19): siRNA sense strand
ugugguaucuguguugaau

SEQ ID NO: 291819 - RNA, 19 nt, Homo sapiens
  misc_RNA (1)...(19): siRNA sense strand
gaggaugguguucgugguu

SEQ ID NO: 291820 - RNA, 19 nt, Homo sapiens
  misc_RNA (1)...(19): siRNA sense strand
acauugcccuggcuccuau

SEQ ID NO: 291821 - RNA, 19 nt, Homo sapiens
  misc_RNA (1)...(19): siRNA sense strand
ggaagcugcuaagguucga

SEQ ID NO: 291822 - RNA, 19 nt, Homo sapiens
  misc_RNA (1)...(19): siRNA sense strand
aguacaagggcauauuuaa

SEQ ID NO: 291823 - RNA, 19 nt, Homo sapiens
  misc_RNA (1)...(19): siRNA sense strand
uaaggaagaaggccuaaaa

SEQ ID NO: 291824 - RNA, 19 nt, Homo sapiens
  misc_RNA (1)...(19): siRNA sense strand
ggagaggagaauacuuauc

SEQ ID NO: 291825 - RNA, 19 nt, Homo sapiens
  misc_RNA (1)...(19): siRNA sense strand
aaguacaagggcauauuua

SEQ ID NO: 291826 - RNA, 19 nt, Homo sapiens
  misc_RNA (1)...(19): siRNA sense strand
gacauugcccuggcuccua

SEQ ID NO: 291827 - RNA, 19 nt, Homo sapiens
  misc_RNA (1)...(19): siRNA sense strand
cugauucugugguaucugu

SEQ ID NO: 291828 - RNA, 19 nt, Homo sapiens
  misc_RNA (1)...(19): siRNA sense strand
ugagacagauaccauacac

SEQ ID NO: 291829 - RNA, 19 nt, Homo sapiens
  misc_RNA (1)...(19): siRNA sense strand
gaugagacagauaccauac

SEQ ID NO: 291830 - RNA, 19 nt, Homo sapiens
  misc_RNA (1)...(19): siRNA sense strand
ugcccuggcuccuauggaa

SEQ ID NO: 291831 - RNA, 19 nt, Homo sapiens
  misc_RNA (1)...(19): siRNA sense strand
gguuguaacauuuguagca

SEQ ID NO: 291832 - RNA, 19 nt, Homo sapiens
  misc_RNA (1)...(19): siRNA sense strand
gguuaugccaacacuuuga

SEQ ID NO: 291833 - RNA, 19 nt, Homo sapiens
  misc_RNA (1)...(19): siRNA sense strand
gauaccauacaccaugaug

SEQ ID NO: 291834 - RNA, 19 nt, Homo sapiens
  misc_RNA (1)...(19): siRNA sense strand
ggacuguuugcccguauca

SEQ ID NO: 291835 - RNA, 19 nt, Homo sapiens
  misc_RNA (1)...(19): siRNA sense strand
guauggaagggacuguuug

SEQ ID NO: 291836 - RNA, 19 nt, Homo sapiens
  misc_RNA (1)...(19): siRNA sense strand
gcugcuaagguucgaauuc

SEQ ID NO: 291837 - RNA, 19 nt, Homo sapiens
  misc_RNA (1)...(19): siRNA sense strand
cgacuuuccuuggcuacuc

SEQ ID NO: 291838 - RNA, 19 nt, Homo sapiens
  misc_RNA (1)...(19): siRNA sense strand
guucgugguuuggcuaaag

SEQ ID NO: 291839 - RNA, 19 nt, Homo sapiens
  misc_RNA (1)...(19): siRNA sense strand
agucuuguauagcaauaug

SEQ ID NO: 291840 - RNA, 19 nt, Homo sapiens
  misc_RNA (1)...(19): siRNA sense strand
cauauuuaacggauucuca

SEQ ID NO: 291841 - RNA, 19 nt, Homo sapiens
  misc_RNA (1)...(19): siRNA sense strand
gcaaguuuggcuuuuauga

SEQ ID NO: 291842 - RNA, 19 nt, Homo sapiens
  misc_RNA (1)...(19): siRNA sense strand
ggauuuaaagguguaugga

SEQ ID NO: 291843 - RNA, 19 nt, Homo sapiens
  misc_RNA (1)...(19): siRNA sense strand
ccauacaccaugaugaagu

SEQ ID NO: 291844 - RNA, 19 nt, Homo sapiens
  misc_RNA (1)...(19): siRNA sense strand
gcuggagucuuuugugcaa

SEQ ID NO: 291845 - RNA, 19 nt, Homo sapiens
  misc_RNA (1)...(19): siRNA sense strand
uguauggaagggacuguuu

SEQ ID NO: 291846 - RNA, 19 nt, Homo sapiens
  misc_RNA (1)...(19): siRNA sense strand
uuugugcaauuguuucuca

SEQ ID NO: 291847 - RNA, 19 nt, Homo sapiens
  misc_RNA (1)...(19): siRNA sense strand
ccagagaacuucguaaaga

SEQ ID NO: 291848 - RNA, 19 nt, Homo sapiens
  misc_RNA (1)...(19): siRNA sense strand
ggaguaacuauucagauua

SEQ ID NO: 291849 - RNA, 19 nt, Homo sapiens
  misc_RNA (1)...(19): siRNA sense strand
ccaaucacguggaaguuaa

SEQ ID NO: 291850 - RNA, 19 nt, Homo sapiens
  misc_RNA (1)...(19): siRNA sense strand
gcacauggaucaacaaaau

SEQ ID NO: 291851 - RNA, 19 nt, Homo sapiens
  misc_RNA (1)...(19): siRNA sense strand
gaagcucacuggccacaau

SEQ ID NO: 291852 - RNA, 19 nt, Homo sapiens
  misc_RNA (1)...(19): siRNA sense strand
uggaguaacuauucagauu

SEQ ID NO: 291853 - RNA, 19 nt, Homo sapiens
  misc_RNA (1)...(19): siRNA sense strand
uaucacugcuggaggaauu

SEQ ID NO: 291854 - RNA, 19 nt, Homo sapiens
  misc_RNA (1)...(19): siRNA sense strand
gagcaucagaguauuauca

SEQ ID NO: 291855 - RNA, 19 nt, Homo sapiens
  misc_RNA (1)...(19): siRNA sense strand
uaugagagcaucagaguau

SEQ ID NO: 291856 - RNA, 19 nt, Homo sapiens
  misc_RNA (1)...(19): siRNA sense strand
ggaggaauuuugucaacua

SEQ ID NO: 291857 - RNA, 19 nt, Homo sapiens
  misc_RNA (1)...(19): siRNA sense strand
gcuauuagagaguuucuga

SEQ ID NO: 291858 - RNA, 19 nt, Homo sapiens
  misc_RNA (1)...(19): siRNA sense strand
ggaguuugacgucuucuau

SEQ ID NO: 291859 - RNA, 19 nt, Homo sapiens
  misc_RNA (1)...(19): siRNA sense strand
ugagagcaucagaguauua

SEQ ID NO: 291860 - RNA, 19 nt, Homo sapiens
  misc_RNA (1)...(19): siRNA sense strand
ggaaugcucccaggcuauu

SEQ ID NO: 291861 - RNA, 19 nt, Homo sapiens
  misc_RNA (1)...(19): siRNA sense strand
ucagggaccuuguuaacag

SEQ ID NO: 291862 - RNA, 19 nt, Homo sapiens
  misc_RNA (1)...(19): siRNA sense strand
gaaaucaaguggggcauga

SEQ ID NO: 291863 - RNA, 19 nt, Homo sapiens
  misc_RNA (1)...(19): siRNA sense strand
ucaagaagauggcaaaauc

SEQ ID NO: 291864 - RNA, 19 nt, Homo sapiens
  misc_RNA (1)...(19): siRNA sense strand
ccacccuguuuaaagauuu

SEQ ID NO: 291865 - RNA, 19 nt, Homo sapiens
  misc_RNA (1)...(19): siRNA sense strand
cggaagaucuggcgaagcu

SEQ ID NO: 291866 - RNA, 19 nt, Homo sapiens
  misc_RNA (1)...(19): siRNA sense strand
uaacaguggaguaacuauu

SEQ ID NO: 291867 - RNA, 19 nt, Homo sapiens
  misc_RNA (1)...(19): siRNA sense strand
cagagaacuucguaaagag

SEQ ID NO: 291868 - RNA, 19 nt, Homo sapiens
  misc_RNA (1)...(19): siRNA sense strand
gagagcaucagaguauuau

SEQ ID NO: 291869 - RNA, 19 nt, Homo sapiens
  misc_RNA (1)...(19): siRNA sense strand
cuuccacccuguuuaaaga

SEQ ID NO: 291870 - RNA, 19 nt, Homo sapiens
  misc_RNA (1)...(19): siRNA sense strand
ccacaauacccaccucugu

SEQ ID NO: 291871 - RNA, 19 nt, Homo sapiens
  misc_RNA (1)...(19): siRNA sense strand
uccaucagcugcuccauca

SEQ ID NO: 291872 - RNA, 19 nt, Homo sapiens
  misc_RNA (1)...(19): siRNA sense strand
aguuugacgucuucuauga

SEQ ID NO: 291873 - RNA, 19 nt, Homo sapiens
  misc_RNA (1)...(19): siRNA sense strand
gaaugcucccaggcuauua

SEQ ID NO: 291874 - RNA, 19 nt, Homo sapiens
  misc_RNA (1)...(19): siRNA sense strand
ggcaugagccggaagaucu

SEQ ID NO: 291875 - RNA, 19 nt, Homo sapiens
  misc_RNA (1)...(19): siRNA sense strand
gaaucgaacccugggaguu

SEQ ID NO: 291876 - RNA, 19 nt, Homo sapiens
  misc_RNA (1)...(19): siRNA sense strand
aaacugccauuaccaaacg

SEQ ID NO: 291877 - RNA, 19 nt, Homo sapiens
  misc_RNA (1)...(19): siRNA sense strand
aaucgaacccugggaguuu

SEQ ID NO: 291878 - RNA, 19 nt, Homo sapiens
  misc_RNA (1)...(19): siRNA sense strand
ccacacauccuuuuagcua

SEQ ID NO: 291879 - RNA, 19 nt, Homo sapiens
  misc_RNA (1)...(19): siRNA sense strand
gcucccaggcuauuagaga

SEQ ID NO: 291880 - RNA, 19 nt, Homo sapiens
  misc_RNA (1)...(19): siRNA sense strand
uuucagacuucaucuucaa

SEQ ID NO: 291881 - RNA, 19 nt, Homo sapiens
  misc_RNA (1)...(19): siRNA sense strand
cugcauaauucuaagucuu

SEQ ID NO: 291882 - RNA, 19 nt, Homo sapiens
  misc_RNA (1)...(19): siRNA sense strand
gugugacucuagugaucua

SEQ ID NO: 291883 - RNA, 19 nt, Homo sapiens
  misc_RNA (1)...(19): siRNA sense strand
gcugcuccaucaccugguu

SEQ ID NO: 291884 - RNA, 19 nt, Homo sapiens
  misc_RNA (1)...(19): siRNA sense strand
ggcaaaaucaucuuacauu

SEQ ID NO: 291885 - RNA, 19 nt, Homo sapiens
  misc_RNA (1)...(19): siRNA sense strand
acaguggaguaacuauuca

SEQ ID NO: 291886 - RNA, 19 nt, Homo sapiens
  misc_RNA (1)...(19): siRNA sense strand
aaauuuacgucagaaagag

SEQ ID NO: 291887 - RNA, 19 nt, Homo sapiens
  misc_RNA (1)...(19): siRNA sense strand
ugucugcucuacgaaauca

SEQ ID NO: 291888 - RNA, 19 nt, Homo sapiens
  misc_RNA (1)...(19): siRNA sense strand
gcacugcauaauucuaagu

SEQ ID NO: 291889 - RNA, 19 nt, Homo sapiens
  misc_RNA (1)...(19): siRNA sense strand
uaagucuuccacccuguuu

SEQ ID NO: 291890 - RNA, 19 nt, Homo sapiens
  misc_RNA (1)...(19): siRNA sense strand
caaacgauuccgccacaca

SEQ ID NO: 291891 - RNA, 19 nt, Homo sapiens
  misc_RNA (1)...(19): siRNA sense strand
ccugucugcucuacgaaau

SEQ ID NO: 291892 - RNA, 19 nt, Homo sapiens
  misc_RNA (1)...(19): siRNA sense strand
ccaggcuauuagagaguuu

SEQ ID NO: 291893 - RNA, 19 nt, Homo sapiens
  misc_RNA (1)...(19): siRNA sense strand
gcuacagggcugauacauc

SEQ ID NO: 291894 - RNA, 19 nt, Homo sapiens
  misc_RNA (1)...(19): siRNA sense strand
ccugggaguuugacgucuu

SEQ ID NO: 291895 - RNA, 19 nt, Homo sapiens
  misc_RNA (1)...(19): siRNA sense strand
gaguuugacgucuucuaug

SEQ ID NO: 291896 - RNA, 19 nt, Homo sapiens
  misc_RNA (1)...(19): siRNA sense strand
uccaucaccugguucuugu

SEQ ID NO: 291897 - RNA, 19 nt, Homo sapiens
  misc_RNA (1)...(19): siRNA sense strand
agucuuccacccuguuuaa

SEQ ID NO: 291898 - RNA, 19 nt, Homo sapiens
  misc_RNA (1)...(19): siRNA sense strand
cucuguggaugauguugua

SEQ ID NO: 291899 - RNA, 19 nt, Homo sapiens
  misc_RNA (1)...(19): siRNA sense strand
uggcgaagcucaggcaaaa

SEQ ID NO: 291900 - RNA, 19 nt, Homo sapiens
  misc_RNA (1)...(19): siRNA sense strand
ucacguggaaguuaauuuu

SEQ ID NO: 291901 - RNA, 19 nt, Homo sapiens
  misc_RNA (1)...(19): siRNA sense strand
uauuagagaguuucugagu

SEQ ID NO: 291902 - RNA, 19 nt, Homo sapiens
  misc_RNA (1)...(19): siRNA sense strand
gcaucagaguauuaucacu

SEQ ID NO: 291903 - RNA, 19 nt, Homo sapiens
  misc_RNA (1)...(19): siRNA sense strand
accaaucacguggaaguua

SEQ ID NO: 291904 - RNA, 19 nt, Homo sapiens
  misc_RNA (1)...(19): siRNA sense strand
ccagagaacuucguaaaga

SEQ ID NO: 291905 - RNA, 19 nt, Homo sapiens
  misc_RNA (1)...(19): siRNA sense strand
ggaguuugacgucuucuau

SEQ ID NO: 291906 - RNA, 19 nt, Homo sapiens
  misc_RNA (1)...(19): siRNA sense strand
gaaaucaaguggggcauga

SEQ ID NO: 291907 - RNA, 19 nt, Homo sapiens
  misc_RNA (1)...(19): siRNA sense strand
cagagaacuucguaaagag

SEQ ID NO: 291908 - RNA, 19 nt, Homo sapiens
  misc_RNA (1)...(19): siRNA sense strand
aguuugacgucuucuauga

SEQ ID NO: 291909 - RNA, 19 nt, Homo sapiens
  misc_RNA (1)...(19): siRNA sense strand
gaaucgaacccugggaguu

SEQ ID NO: 291910 - RNA, 19 nt, Homo sapiens
  misc_RNA (1)...(19): siRNA sense strand
aaucgaacccugggaguuu

SEQ ID NO: 291911 - RNA, 19 nt, Homo sapiens
  misc_RNA (1)...(19): siRNA sense strand
ugucugcucuacgaaauca

SEQ ID NO: 291912 - RNA, 19 nt, Homo sapiens
  misc_RNA (1)...(19): siRNA sense strand
ccugucugcucuacgaaau

SEQ ID NO: 291913 - RNA, 19 nt, Homo sapiens
  misc_RNA (1)...(19): siRNA sense strand
gaguuugacgucuucuaug

SEQ ID NO: 291914 - RNA, 19 nt, Homo sapiens
  misc_RNA (1)...(19): siRNA sense strand
ccugggaguuugacgucuu

SEQ ID NO: 291915 - RNA, 19 nt, Homo sapiens
  misc_RNA (1)...(19): siRNA sense strand
gcucgaaugugacaaguug

SEQ ID NO: 291916 - RNA, 19 nt, Homo sapiens
  misc_RNA (1)...(19): siRNA sense strand
caaagacgaauuucagcua

SEQ ID NO: 291917 - RNA, 19 nt, Homo sapiens
  misc_RNA (1)...(19): siRNA sense strand
gcacaaacaggcugagauc

SEQ ID NO: 291918 - RNA, 19 nt, Homo sapiens
  misc_RNA (1)...(19): siRNA sense strand
gccucaagcucgaauguga

SEQ ID NO: 291919 - RNA, 19 nt, Homo sapiens
  misc_RNA (1)...(19): siRNA sense strand
gugacaaguuggccaguga

SEQ ID NO: 291920 - RNA, 19 nt, Homo sapiens
  misc_RNA (1)...(19): siRNA sense strand
ggaggaugauggcgagaag

SEQ ID NO: 291921 - RNA, 19 nt, Homo sapiens
  misc_RNA (1)...(19): siRNA sense strand
ccgcaucaaagacgaauuu

SEQ ID NO: 291922 - RNA, 19 nt, Homo sapiens
  misc_RNA (1)...(19): siRNA sense strand
cucccgagcugaacucuau

SEQ ID NO: 291923 - RNA, 19 nt, Homo sapiens
  misc_RNA (1)...(19): siRNA sense strand
caucaaagacgaauuucag

SEQ ID NO: 291924 - RNA, 19 nt, Homo sapiens
  misc_RNA (1)...(19): siRNA sense strand
caaguuggccagugagaag

SEQ ID NO: 291925 - RNA, 19 nt, Homo sapiens
  misc_RNA (1)...(19): siRNA sense strand
gagauguccuacggcuuga

SEQ ID NO: 291926 - RNA, 19 nt, Homo sapiens
  misc_RNA (1)...(19): siRNA sense strand
gaugcagcgucacuaugug

SEQ ID NO: 291927 - RNA, 19 nt, Homo sapiens
  misc_RNA (1)...(19): siRNA sense strand
gagaugcagcgucacuaug

SEQ ID NO: 291928 - RNA, 19 nt, Homo sapiens
  misc_RNA (1)...(19): siRNA sense strand
gcaucaaagacgaauuuca

SEQ ID NO: 291929 - RNA, 19 nt, Homo sapiens
  misc_RNA (1)...(19): siRNA sense strand
ccagugagaagucagagau

SEQ ID NO: 291930 - RNA, 19 nt, Homo sapiens
  misc_RNA (1)...(19): siRNA sense strand
ugcccuaccucucccaaga

SEQ ID NO: 291931 - RNA, 19 nt, Homo sapiens
  misc_RNA (1)...(19): siRNA sense strand
agacgaauuucagcuacug

SEQ ID NO: 291932 - RNA, 19 nt, Homo sapiens
  misc_RNA (1)...(19): siRNA sense strand
caagaacgggcacgauggu

SEQ ID NO: 291933 - RNA, 19 nt, Homo sapiens
  misc_RNA (1)...(19): siRNA sense strand
acuaugugauguacuacga

SEQ ID NO: 291934 - RNA, 19 nt, Homo sapiens
  misc_RNA (1)...(19): siRNA sense strand
agaugcagcgucacuaugu

SEQ ID NO: 291935 - RNA, 19 nt, Homo sapiens
  misc_RNA (1)...(19): siRNA sense strand
gcaggucuugggagccauu

SEQ ID NO: 291936 - RNA, 19 nt, Homo sapiens
  misc_RNA (1)...(19): siRNA sense strand
gcucgaaugugacaaguug

SEQ ID NO: 291937 - RNA, 19 nt, Homo sapiens
  misc_RNA (1)...(19): siRNA sense strand
caaagacgaauuucagcua

SEQ ID NO: 291938 - RNA, 19 nt, Homo sapiens
  misc_RNA (1)...(19): siRNA sense strand
gcacaaacaggcugagauc

SEQ ID NO: 291939 - RNA, 19 nt, Homo sapiens
  misc_RNA (1)...(19): siRNA sense strand
gccucaagcucgaauguga

SEQ ID NO: 291940 - RNA, 19 nt, Homo sapiens
  misc_RNA (1)...(19): siRNA sense strand
gugacaaguuggccaguga

SEQ ID NO: 291941 - RNA, 19 nt, Homo sapiens
  misc_RNA (1)...(19): siRNA sense strand
ggaggaugauggcgagaag

SEQ ID NO: 291942 - RNA, 19 nt, Homo sapiens
  misc_RNA (1)...(19): siRNA sense strand
ccgcaucaaagacgaauuu

SEQ ID NO: 291943 - RNA, 19 nt, Homo sapiens
  misc_RNA (1)...(19): siRNA sense strand
cucccgagcugaacucuau

SEQ ID NO: 291944 - RNA, 19 nt, Homo sapiens
  misc_RNA (1)...(19): siRNA sense strand
caucaaagacgaauuucag

SEQ ID NO: 291945 - RNA, 19 nt, Homo sapiens
  misc_RNA (1)...(19): siRNA sense strand
caaguuggccagugagaag

SEQ ID NO: 291946 - RNA, 19 nt, Homo sapiens
  misc_RNA (1)...(19): siRNA sense strand
gagauguccuacggcuuga

SEQ ID NO: 291947 - RNA, 19 nt, Homo sapiens
  misc_RNA (1)...(19): siRNA sense strand
gaugcagcgucacuaugug

SEQ ID NO: 291948 - RNA, 19 nt, Homo sapiens
  misc_RNA (1)...(19): siRNA sense strand
gagaugcagcgucacuaug

SEQ ID NO: 291949 - RNA, 19 nt, Homo sapiens
  misc_RNA (1)...(19): siRNA sense strand
gcaucaaagacgaauuuca

SEQ ID NO: 291950 - RNA, 19 nt, Homo sapiens
  misc_RNA (1)...(19): siRNA sense strand
ccagugagaagucagagau

SEQ ID NO: 291951 - RNA, 19 nt, Homo sapiens
  misc_RNA (1)...(19): siRNA sense strand
ugcccuaccucucccaaga

SEQ ID NO: 291952 - RNA, 19 nt, Homo sapiens
  misc_RNA (1)...(19): siRNA sense strand
agacgaauuucagcuacug

SEQ ID NO: 291953 - RNA, 19 nt, Homo sapiens
  misc_RNA (1)...(19): siRNA sense strand
caagaacgggcacgauggu

SEQ ID NO: 291954 - RNA, 19 nt, Homo sapiens
  misc_RNA (1)...(19): siRNA sense strand
acuaugugauguacuacga

SEQ ID NO: 291955 - RNA, 19 nt, Homo sapiens
  misc_RNA (1)...(19): siRNA sense strand
agaugcagcgucacuaugu

SEQ ID NO: 291956 - RNA, 19 nt, Homo sapiens
  misc_RNA (1)...(19): siRNA sense strand
gcaggucuugggagccauu

SEQ ID NO: 291957 - RNA, 19 nt, Homo sapiens
  misc_RNA (1)...(19): siRNA sense strand
gcucgaaugugacaaguug

SEQ ID NO: 291958 - RNA, 19 nt, Homo sapiens
  misc_RNA (1)...(19): siRNA sense strand
caaagacgaauuucagcua

SEQ ID NO: 291959 - RNA, 19 nt, Homo sapiens
  misc_RNA (1)...(19): siRNA sense strand
gcacaaacaggcugagauc

SEQ ID NO: 291960 - RNA, 19 nt, Homo sapiens
  misc_RNA (1)...(19): siRNA sense strand
gccucaagcucgaauguga

SEQ ID NO: 291961 - RNA, 19 nt, Homo sapiens
  misc_RNA (1)...(19): siRNA sense strand
gugacaaguuggccaguga

SEQ ID NO: 291962 - RNA, 19 nt, Homo sapiens
  misc_RNA (1)...(19): siRNA sense strand
ggaggaugauggcgagaag

SEQ ID NO: 291963 - RNA, 19 nt, Homo sapiens
  misc_RNA (1)...(19): siRNA sense strand
ccgcaucaaagacgaauuu

SEQ ID NO: 291964 - RNA, 19 nt, Homo sapiens
  misc_RNA (1)...(19): siRNA sense strand
cucccgagcugaacucuau

SEQ ID NO: 291965 - RNA, 19 nt, Homo sapiens
  misc_RNA (1)...(19): siRNA sense strand
caucaaagacgaauuucag

SEQ ID NO: 291966 - RNA, 19 nt, Homo sapiens
  misc_RNA (1)...(19): siRNA sense strand
caaguuggccagugagaag

SEQ ID NO: 291967 - RNA, 19 nt, Homo sapiens
  misc_RNA (1)...(19): siRNA sense strand
gagauguccuacggcuuga

SEQ ID NO: 291968 - RNA, 19 nt, Homo sapiens
  misc_RNA (1)...(19): siRNA sense strand
gaugcagcgucacuaugug

SEQ ID NO: 291969 - RNA, 19 nt, Homo sapiens
  misc_RNA (1)...(19): siRNA sense strand
gagaugcagcgucacuaug

SEQ ID NO: 291970 - RNA, 19 nt, Homo sapiens
  misc_RNA (1)...(19): siRNA sense strand
gcaucaaagacgaauuuca

SEQ ID NO: 291971 - RNA, 19 nt, Homo sapiens
  misc_RNA (1)...(19): siRNA sense strand
ccagugagaagucagagau

SEQ ID NO: 291972 - RNA, 19 nt, Homo sapiens
  misc_RNA (1)...(19): siRNA sense strand
ugcccuaccucucccaaga

SEQ ID NO: 291973 - RNA, 19 nt, Homo sapiens
  misc_RNA (1)...(19): siRNA sense strand
agacgaauuucagcuacug

SEQ ID NO: 291974 - RNA, 19 nt, Homo sapiens
  misc_RNA (1)...(19): siRNA sense strand
caagaacgggcacgauggu

SEQ ID NO: 291975 - RNA, 19 nt, Homo sapiens
  misc_RNA (1)...(19): siRNA sense strand
acuaugugauguacuacga

SEQ ID NO: 291976 - RNA, 19 nt, Homo sapiens
  misc_RNA (1)...(19): siRNA sense strand
agaugcagcgucacuaugu

SEQ ID NO: 291977 - RNA, 19 nt, Homo sapiens
  misc_RNA (1)...(19): siRNA sense strand
gcaggucuugggagccauu

SEQ ID NO: 291978 - RNA, 19 nt, Homo sapiens
  misc_RNA (1)...(19): siRNA sense strand
ggauaaagauugaagaaga

SEQ ID NO: 291979 - RNA, 19 nt, Homo sapiens
  misc_RNA (1)...(19): siRNA sense strand
gcaaacaaaugcagaagga

SEQ ID NO: 291980 - RNA, 19 nt, Homo sapiens
  misc_RNA (1)...(19): siRNA sense strand
gggaaaggauaaagauuga

SEQ ID NO: 291981 - RNA, 19 nt, Homo sapiens
  misc_RNA (1)...(19): siRNA sense strand
gaagaagacuaugcgaaga

SEQ ID NO: 291982 - RNA, 19 nt, Homo sapiens
  misc_RNA (1)...(19): siRNA sense strand
gaaaacaccaucacaauaa

SEQ ID NO: 291983 - RNA, 19 nt, Homo sapiens
  misc_RNA (1)...(19): siRNA sense strand
agaaggaaaugucagaauu

SEQ ID NO: 291984 - RNA, 19 nt, Homo sapiens
  misc_RNA (1)...(19): siRNA sense strand
agaaagacaugaagaagug

SEQ ID NO: 291985 - RNA, 19 nt, Homo sapiens
  misc_RNA (1)...(19): siRNA sense strand
gaacuuccgugagaacuuc

SEQ ID NO: 291986 - RNA, 19 nt, Homo sapiens
  misc_RNA (1)...(19): siRNA sense strand
gaagugcgaccaccacauu

SEQ ID NO: 291987 - RNA, 19 nt, Homo sapiens
  misc_RNA (1)...(19): siRNA sense strand
agagagaccuggagaugaa

SEQ ID NO: 291988 - RNA, 19 nt, Homo sapiens
  misc_RNA (1)...(19): siRNA sense strand
ggaaaugucagaauucauc

SEQ ID NO: 291989 - RNA, 19 nt, Homo sapiens
  misc_RNA (1)...(19): siRNA sense strand
caaguucucugccaagcuu

SEQ ID NO: 291990 - RNA, 19 nt, Homo sapiens
  misc_RNA (1)...(19): siRNA sense strand
gaaggaaaugucagaauuc

SEQ ID NO: 291991 - RNA, 19 nt, Homo sapiens
  misc_RNA (1)...(19): siRNA sense strand
gugagaacuucaagaaaga

SEQ ID NO: 291992 - RNA, 19 nt, Homo sapiens
  misc_RNA (1)...(19): siRNA sense strand
ucacagagcggcagagaga

SEQ ID NO: 291993 - RNA, 19 nt, Homo sapiens
  misc_RNA (1)...(19): siRNA sense strand
ggaaaacaccaucacaaua

SEQ ID NO: 291994 - RNA, 19 nt, Homo sapiens
  misc_RNA (1)...(19): siRNA sense strand
gcuaagcucucucagaacu

SEQ ID NO: 291995 - RNA, 19 nt, Homo sapiens
  misc_RNA (1)...(19): siRNA sense strand
gauaaagauugaagaagac

SEQ ID NO: 291996 - RNA, 19 nt, Homo sapiens
  misc_RNA (1)...(19): siRNA sense strand
uggaucagcugcuucgaaa

SEQ ID NO: 291997 - RNA, 19 nt, Homo sapiens
  misc_RNA (1)...(19): siRNA sense strand
cgugagaacuucaagaaag

SEQ ID NO: 291998 - RNA, 19 nt, Homo sapiens
  misc_RNA (1)...(19): siRNA sense strand
gcagagagaccuggagaug

SEQ ID NO: 291999 - RNA, 19 nt, Homo sapiens
  misc_RNA (1)...(19): siRNA sense strand
aaacaaaugcagaaggaaa

SEQ ID NO: 292000 - RNA, 19 nt, Homo sapiens
  misc_RNA (1)...(19): siRNA sense strand
gcacaagacgggcaacauc

SEQ ID NO: 292001 - RNA, 19 nt, Homo sapiens
  misc_RNA (1)...(19): siRNA sense strand
acagacauguucaaccaaa

SEQ ID NO: 292002 - RNA, 19 nt, Homo sapiens
  misc_RNA (1)...(19): siRNA sense strand
gaaaggauaaagauugaag

SEQ ID NO: 292003 - RNA, 19 nt, Homo sapiens
  misc_RNA (1)...(19): siRNA sense strand
cugaugaacuuccgugaga

SEQ ID NO: 292004 - RNA, 19 nt, Homo sapiens
  misc_RNA (1)...(19): siRNA sense strand
gaacuucaagaaagacaug

SEQ ID NO: 292005 - RNA, 19 nt, Homo sapiens
  misc_RNA (1)...(19): siRNA sense strand
gaaguucaccucaaguucu

SEQ ID NO: 292006 - RNA, 19 nt, Homo sapiens
  misc_RNA (1)...(19): siRNA sense strand
ucaagaaagacaugaagaa

SEQ ID NO: 292007 - RNA, 19 nt, Homo sapiens
  misc_RNA (1)...(19): siRNA sense strand
cagaggaggacaucaagaa

SEQ ID NO: 292008 - RNA, 19 nt, Homo sapiens
  misc_RNA (1)...(19): siRNA sense strand
gaacuacugcuccagaaac

SEQ ID NO: 292009 - RNA, 19 nt, Homo sapiens
  misc_RNA (1)...(19): siRNA sense strand
aagcagaaguucaccucaa

SEQ ID NO: 292010 - RNA, 19 nt, Homo sapiens
  misc_RNA (1)...(19): siRNA sense strand
gaauucauccgggaaagga

SEQ ID NO: 292011 - RNA, 19 nt, Homo sapiens
  misc_RNA (1)...(19): siRNA sense strand
gcugaagggcaaacaaaug

SEQ ID NO: 292012 - RNA, 19 nt, Homo sapiens
  misc_RNA (1)...(19): siRNA sense strand
ggacgaagcagaaguucac

SEQ ID NO: 292013 - RNA, 19 nt, Homo sapiens
  misc_RNA (1)...(19): siRNA sense strand
cgggaaaggauaaagauug

SEQ ID NO: 292014 - RNA, 19 nt, Homo sapiens
  misc_RNA (1)...(19): siRNA sense strand
gagcuacugcgacuacuuc

SEQ ID NO: 292015 - RNA, 19 nt, Homo sapiens
  misc_RNA (1)...(19): siRNA sense strand
cagcugaagggcaaacaaa

SEQ ID NO: 292016 - RNA, 19 nt, Homo sapiens
  misc_RNA (1)...(19): siRNA sense strand
caaccaggcccaguccaaa

SEQ ID NO: 292017 - RNA, 19 nt, Homo sapiens
  misc_RNA (1)...(19): siRNA sense strand
caagaaagacaugaagaag

SEQ ID NO: 292018 - RNA, 19 nt, Homo sapiens
  misc_RNA (1)...(19): siRNA sense strand
aaggaaaugucagaauuca

SEQ ID NO: 292019 - RNA, 19 nt, Homo sapiens
  misc_RNA (1)...(19): siRNA sense strand
agacagaggaggacaucaa

SEQ ID NO: 292020 - RNA, 19 nt, Homo sapiens
  misc_RNA (1)...(19): siRNA sense strand
cagaaguucaccucaaguu

SEQ ID NO: 292021 - RNA, 19 nt, Homo sapiens
  misc_RNA (1)...(19): siRNA sense strand
caauaaacugugugacguu

SEQ ID NO: 292022 - RNA, 19 nt, Homo sapiens
  misc_RNA (1)...(19): siRNA sense strand
agaucaagcugagcaacaa

SEQ ID NO: 292023 - RNA, 19 nt, Homo sapiens
  misc_RNA (1)...(19): siRNA sense strand
gagaucaagcugagcaaca

SEQ ID NO: 292024 - RNA, 19 nt, Homo sapiens
  misc_RNA (1)...(19): siRNA sense strand
gggcccaggugaagaagag

SEQ ID NO: 292025 - RNA, 19 nt, Homo sapiens
  misc_RNA (1)...(19): siRNA sense strand
gacuacuucugggcugaua

SEQ ID NO: 292026 - RNA, 19 nt, Homo sapiens
  misc_RNA (1)...(19): siRNA sense strand
gcagaaggaaaugucagaa

SEQ ID NO: 292027 - RNA, 19 nt, Homo sapiens
  misc_RNA (1)...(19): siRNA sense strand
cagacacgaugccggaaca

SEQ ID NO: 292028 - RNA, 19 nt, Homo sapiens
  misc_RNA (1)...(19): siRNA sense strand
agacuaugcgaagaacuua

SEQ ID NO: 292029 - RNA, 19 nt, Homo sapiens
  misc_RNA (1)...(19): siRNA sense strand
guguggaucucuacaacca

SEQ ID NO: 292030 - RNA, 19 nt, Homo sapiens
  misc_RNA (1)...(19): siRNA sense strand
cagagagaccuggagauga

SEQ ID NO: 292031 - RNA, 19 nt, Homo sapiens
  misc_RNA (1)...(19): siRNA sense strand
cagaaggaaaugucagaau

SEQ ID NO: 292032 - RNA, 19 nt, Homo sapiens
  misc_RNA (1)...(19): siRNA sense strand
ccaccacauuggagcuaga

SEQ ID NO: 292033 - RNA, 19 nt, Homo sapiens
  misc_RNA (1)...(19): siRNA sense strand
ggaaaggauaaagauugaa

SEQ ID NO: 292034 - RNA, 19 nt, Homo sapiens
  misc_RNA (1)...(19): siRNA sense strand
aagaagacuaugcgaagaa

SEQ ID NO: 292035 - RNA, 19 nt, Homo sapiens
  misc_RNA (1)...(19): siRNA sense strand
guggagaggguagagauga

SEQ ID NO: 292036 - RNA, 19 nt, Homo sapiens
  misc_RNA (1)...(19): siRNA sense strand
ucagaauucauccgggaaa

SEQ ID NO: 292037 - RNA, 19 nt, Homo sapiens
  misc_RNA (1)...(19): siRNA sense strand
cauccgcccuguggacaug

SEQ ID NO: 292038 - RNA, 19 nt, Homo sapiens
  misc_RNA (1)...(19): siRNA sense strand
ccaccacauugccgaccuu

SEQ ID NO: 292039 - RNA, 19 nt, Homo sapiens
  misc_RNA (1)...(19): siRNA sense strand
ugaacuacugcuccagaaa

SEQ ID NO: 292040 - RNA, 19 nt, Homo sapiens
  misc_RNA (1)...(19): siRNA sense strand
aagaaagacaugaagaagu

SEQ ID NO: 292041 - RNA, 19 nt, Homo sapiens
  misc_RNA (1)...(19): siRNA sense strand
gcagaaguucaccucaagu

SEQ ID NO: 292042 - RNA, 19 nt, Homo sapiens
  misc_RNA (1)...(19): siRNA sense strand
ggagcuacugcgacuacuu

SEQ ID NO: 292043 - RNA, 19 nt, Homo sapiens
  misc_RNA (1)...(19): siRNA sense strand
ugaugaacuuccgugagaa

SEQ ID NO: 292044 - RNA, 19 nt, Homo sapiens
  misc_RNA (1)...(19): siRNA sense strand
cuguggacauggagaucua

SEQ ID NO: 292045 - RNA, 19 nt, Homo sapiens
  misc_RNA (1)...(19): siRNA sense strand
gcccguggaucagcugcuu

SEQ ID NO: 292046 - RNA, 19 nt, Homo sapiens
  misc_RNA (1)...(19): siRNA sense strand
caagacagaggaggacauc

SEQ ID NO: 292047 - RNA, 19 nt, Homo sapiens
  misc_RNA (1)...(19): siRNA sense strand
gaagagccuggcggacgaa

SEQ ID NO: 292048 - RNA, 19 nt, Homo sapiens
  misc_RNA (1)...(19): siRNA sense strand
caaacaaaugcagaaggaa

SEQ ID NO: 292049 - RNA, 19 nt, Homo sapiens
  misc_RNA (1)...(19): siRNA sense strand
caaaugcagaaggaaaugu

SEQ ID NO: 292050 - RNA, 19 nt, Homo sapiens
  misc_RNA (1)...(19): siRNA sense strand
guggaucagcugcuucgaa

SEQ ID NO: 292051 - RNA, 19 nt, Homo sapiens
  misc_RNA (1)...(19): siRNA sense strand
uugaacuacugcuccagaa

SEQ ID NO: 292052 - RNA, 19 nt, Homo sapiens
  misc_RNA (1)...(19): siRNA sense strand
gcuaugccucgguggagaa

SEQ ID NO: 292053 - RNA, 19 nt, Homo sapiens
  misc_RNA (1)...(19): siRNA sense strand
caccaucacaauaaacugu

SEQ ID NO: 292054 - RNA, 19 nt, Homo sapiens
  misc_RNA (1)...(19): siRNA sense strand
gacagaggaggacaucaag

SEQ ID NO: 292055 - RNA, 19 nt, Homo sapiens
  misc_RNA (1)...(19): siRNA sense strand
ggauaaagauugaagaaga

SEQ ID NO: 292056 - RNA, 19 nt, Homo sapiens
  misc_RNA (1)...(19): siRNA sense strand
gcaaacaaaugcagaagga

SEQ ID NO: 292057 - RNA, 19 nt, Homo sapiens
  misc_RNA (1)...(19): siRNA sense strand
gggaaaggauaaagauuga

SEQ ID NO: 292058 - RNA, 19 nt, Homo sapiens
  misc_RNA (1)...(19): siRNA sense strand
gaagaagacuaugcgaaga

SEQ ID NO: 292059 - RNA, 19 nt, Homo sapiens
  misc_RNA (1)...(19): siRNA sense strand
gaaaacaccaucacaauaa

SEQ ID NO: 292060 - RNA, 19 nt, Homo sapiens
  misc_RNA (1)...(19): siRNA sense strand
agaaggaaaugucagaauu

SEQ ID NO: 292061 - RNA, 19 nt, Homo sapiens
  misc_RNA (1)...(19): siRNA sense strand
agaaagacaugaagaagug

SEQ ID NO: 292062 - RNA, 19 nt, Homo sapiens
  misc_RNA (1)...(19): siRNA sense strand
gaacuuccgugagaacuuc

SEQ ID NO: 292063 - RNA, 19 nt, Homo sapiens
  misc_RNA (1)...(19): siRNA sense strand
gaagugcgaccaccacauu

SEQ ID NO: 292064 - RNA, 19 nt, Homo sapiens
  misc_RNA (1)...(19): siRNA sense strand
agagagaccuggagaugaa

SEQ ID NO: 292065 - RNA, 19 nt, Homo sapiens
  misc_RNA (1)...(19): siRNA sense strand
ggaaaugucagaauucauc

SEQ ID NO: 292066 - RNA, 19 nt, Homo sapiens
  misc_RNA (1)...(19): siRNA sense strand
caaguucucugccaagcuu

SEQ ID NO: 292067 - RNA, 19 nt, Homo sapiens
  misc_RNA (1)...(19): siRNA sense strand
gaaggaaaugucagaauuc

SEQ ID NO: 292068 - RNA, 19 nt, Homo sapiens
  misc_RNA (1)...(19): siRNA sense strand
gugagaacuucaagaaaga

SEQ ID NO: 292069 - RNA, 19 nt, Homo sapiens
  misc_RNA (1)...(19): siRNA sense strand
ucacagagcggcagagaga

SEQ ID NO: 292070 - RNA, 19 nt, Homo sapiens
  misc_RNA (1)...(19): siRNA sense strand
ggaaaacaccaucacaaua

SEQ ID NO: 292071 - RNA, 19 nt, Homo sapiens
  misc_RNA (1)...(19): siRNA sense strand
gcuaagcucucucagaacu

SEQ ID NO: 292072 - RNA, 19 nt, Homo sapiens
  misc_RNA (1)...(19): siRNA sense strand
gauaaagauugaagaagac

SEQ ID NO: 292073 - RNA, 19 nt, Homo sapiens
  misc_RNA (1)...(19): siRNA sense strand
uggaucagcugcuucgaaa

SEQ ID NO: 292074 - RNA, 19 nt, Homo sapiens
  misc_RNA (1)...(19): siRNA sense strand
cgugagaacuucaagaaag

SEQ ID NO: 292075 - RNA, 19 nt, Homo sapiens
  misc_RNA (1)...(19): siRNA sense strand
gcagagagaccuggagaug

SEQ ID NO: 292076 - RNA, 19 nt, Homo sapiens
  misc_RNA (1)...(19): siRNA sense strand
aaacaaaugcagaaggaaa

SEQ ID NO: 292077 - RNA, 19 nt, Homo sapiens
  misc_RNA (1)...(19): siRNA sense strand
gcacaagacgggcaacauc

SEQ ID NO: 292078 - RNA, 19 nt, Homo sapiens
  misc_RNA (1)...(19): siRNA sense strand
acagacauguucaaccaaa

SEQ ID NO: 292079 - RNA, 19 nt, Homo sapiens
  misc_RNA (1)...(19): siRNA sense strand
gaaaggauaaagauugaag

SEQ ID NO: 292080 - RNA, 19 nt, Homo sapiens
  misc_RNA (1)...(19): siRNA sense strand
cugaugaacuuccgugaga

SEQ ID NO: 292081 - RNA, 19 nt, Homo sapiens
  misc_RNA (1)...(19): siRNA sense strand
gaacuucaagaaagacaug

SEQ ID NO: 292082 - RNA, 19 nt, Homo sapiens
  misc_RNA (1)...(19): siRNA sense strand
gaaguucaccucaaguucu

SEQ ID NO: 292083 - RNA, 19 nt, Homo sapiens
  misc_RNA (1)...(19): siRNA sense strand
ucaagaaagacaugaagaa

SEQ ID NO: 292084 - RNA, 19 nt, Homo sapiens
  misc_RNA (1)...(19): siRNA sense strand
cagaggaggacaucaagaa

SEQ ID NO: 292085 - RNA, 19 nt, Homo sapiens
  misc_RNA (1)...(19): siRNA sense strand
gaacuacugcuccagaaac

SEQ ID NO: 292086 - RNA, 19 nt, Homo sapiens
  misc_RNA (1)...(19): siRNA sense strand
aagcagaaguucaccucaa

SEQ ID NO: 292087 - RNA, 19 nt, Homo sapiens
  misc_RNA (1)...(19): siRNA sense strand
gaauucauccgggaaagga

SEQ ID NO: 292088 - RNA, 19 nt, Homo sapiens
  misc_RNA (1)...(19): siRNA sense strand
gcugaagggcaaacaaaug

SEQ ID NO: 292089 - RNA, 19 nt, Homo sapiens
  misc_RNA (1)...(19): siRNA sense strand
ggacgaagcagaaguucac

SEQ ID NO: 292090 - RNA, 19 nt, Homo sapiens
  misc_RNA (1)...(19): siRNA sense strand
cgggaaaggauaaagauug

SEQ ID NO: 292091 - RNA, 19 nt, Homo sapiens
  misc_RNA (1)...(19): siRNA sense strand
gagcuacugcgacuacuuc

SEQ ID NO: 292092 - RNA, 19 nt, Homo sapiens
  misc_RNA (1)...(19): siRNA sense strand
cagcugaagggcaaacaaa

SEQ ID NO: 292093 - RNA, 19 nt, Homo sapiens
  misc_RNA (1)...(19): siRNA sense strand
caaccaggcccaguccaaa

SEQ ID NO: 292094 - RNA, 19 nt, Homo sapiens
  misc_RNA (1)...(19): siRNA sense strand
caagaaagacaugaagaag

SEQ ID NO: 292095 - RNA, 19 nt, Homo sapiens
  misc_RNA (1)...(19): siRNA sense strand
aaggaaaugucagaauuca

SEQ ID NO: 292096 - RNA, 19 nt, Homo sapiens
  misc_RNA (1)...(19): siRNA sense strand
agacagaggaggacaucaa

SEQ ID NO: 292097 - RNA, 19 nt, Homo sapiens
  misc_RNA (1)...(19): siRNA sense strand
cagaaguucaccucaaguu

SEQ ID NO: 292098 - RNA, 19 nt, Homo sapiens
  misc_RNA (1)...(19): siRNA sense strand
caauaaacugugugacguu

SEQ ID NO: 292099 - RNA, 19 nt, Homo sapiens
  misc_RNA (1)...(19): siRNA sense strand
agaucaagcugagcaacaa

SEQ ID NO: 292100 - RNA, 19 nt, Homo sapiens
  misc_RNA (1)...(19): siRNA sense strand
gagaucaagcugagcaaca

SEQ ID NO: 292101 - RNA, 19 nt, Homo sapiens
  misc_RNA (1)...(19): siRNA sense strand
gggcccaggugaagaagag

SEQ ID NO: 292102 - RNA, 19 nt, Homo sapiens
  misc_RNA (1)...(19): siRNA sense strand
gacuacuucugggcugaua

SEQ ID NO: 292103 - RNA, 19 nt, Homo sapiens
  misc_RNA (1)...(19): siRNA sense strand
gcagaaggaaaugucagaa

SEQ ID NO: 292104 - RNA, 19 nt, Homo sapiens
  misc_RNA (1)...(19): siRNA sense strand
cagacacgaugccggaaca

SEQ ID NO: 292105 - RNA, 19 nt, Homo sapiens
  misc_RNA (1)...(19): siRNA sense strand
agacuaugcgaagaacuua

SEQ ID NO: 292106 - RNA, 19 nt, Homo sapiens
  misc_RNA (1)...(19): siRNA sense strand
guguggaucucuacaacca

SEQ ID NO: 292107 - RNA, 19 nt, Homo sapiens
  misc_RNA (1)...(19): siRNA sense strand
cagagagaccuggagauga

SEQ ID NO: 292108 - RNA, 19 nt, Homo sapiens
  misc_RNA (1)...(19): siRNA sense strand
cagaaggaaaugucagaau

SEQ ID NO: 292109 - RNA, 19 nt, Homo sapiens
  misc_RNA (1)...(19): siRNA sense strand
ccaccacauuggagcuaga

SEQ ID NO: 292110 - RNA, 19 nt, Homo sapiens
  misc_RNA (1)...(19): siRNA sense strand
ggaaaggauaaagauugaa

SEQ ID NO: 292111 - RNA, 19 nt, Homo sapiens
  misc_RNA (1)...(19): siRNA sense strand
aagaagacuaugcgaagaa

SEQ ID NO: 292112 - RNA, 19 nt, Homo sapiens
  misc_RNA (1)...(19): siRNA sense strand
guggagaggguagagauga

SEQ ID NO: 292113 - RNA, 19 nt, Homo sapiens
  misc_RNA (1)...(19): siRNA sense strand
ucagaauucauccgggaaa

SEQ ID NO: 292114 - RNA, 19 nt, Homo sapiens
  misc_RNA (1)...(19): siRNA sense strand
cauccgcccuguggacaug

SEQ ID NO: 292115 - RNA, 19 nt, Homo sapiens
  misc_RNA (1)...(19): siRNA sense strand
ccaccacauugccgaccuu

SEQ ID NO: 292116 - RNA, 19 nt, Homo sapiens
  misc_RNA (1)...(19): siRNA sense strand
ugaacuacugcuccagaaa

SEQ ID NO: 292117 - RNA, 19 nt, Homo sapiens
  misc_RNA (1)...(19): siRNA sense strand
aagaaagacaugaagaagu

SEQ ID NO: 292118 - RNA, 19 nt, Homo sapiens
  misc_RNA (1)...(19): siRNA sense strand
gcagaaguucaccucaagu

SEQ ID NO: 292119 - RNA, 19 nt, Homo sapiens
  misc_RNA (1)...(19): siRNA sense strand
ggagcuacugcgacuacuu

SEQ ID NO: 292120 - RNA, 19 nt, Homo sapiens
  misc_RNA (1)...(19): siRNA sense strand
ugaugaacuuccgugagaa

SEQ ID NO: 292121 - RNA, 19 nt, Homo sapiens
  misc_RNA (1)...(19): siRNA sense strand
cuguggacauggagaucua

SEQ ID NO: 292122 - RNA, 19 nt, Homo sapiens
  misc_RNA (1)...(19): siRNA sense strand
gcccguggaucagcugcuu

SEQ ID NO: 292123 - RNA, 19 nt, Homo sapiens
  misc_RNA (1)...(19): siRNA sense strand
caagacagaggaggacauc

SEQ ID NO: 292124 - RNA, 19 nt, Homo sapiens
  misc_RNA (1)...(19): siRNA sense strand
gaagagccuggcggacgaa

SEQ ID NO: 292125 - RNA, 19 nt, Homo sapiens
  misc_RNA (1)...(19): siRNA sense strand
caaacaaaugcagaaggaa

SEQ ID NO: 292126 - RNA, 19 nt, Homo sapiens
  misc_RNA (1)...(19): siRNA sense strand
caaaugcagaaggaaaugu

SEQ ID NO: 292127 - RNA, 19 nt, Homo sapiens
  misc_RNA (1)...(19): siRNA sense strand
guggaucagcugcuucgaa

SEQ ID NO: 292128 - RNA, 19 nt, Homo sapiens
  misc_RNA (1)...(19): siRNA sense strand
uugaacuacugcuccagaa

SEQ ID NO: 292129 - RNA, 19 nt, Homo sapiens
  misc_RNA (1)...(19): siRNA sense strand
gcuaugccucgguggagaa

SEQ ID NO: 292130 - RNA, 19 nt, Homo sapiens
  misc_RNA (1)...(19): siRNA sense strand
caccaucacaauaaacugu

SEQ ID NO: 292131 - RNA, 19 nt, Homo sapiens
  misc_RNA (1)...(19): siRNA sense strand
gacagaggaggacaucaag

SEQ ID NO: 292132 - RNA, 19 nt, Homo sapiens
  misc_RNA (1)...(19): siRNA sense strand
gcaaagaguuccugaggua

SEQ ID NO: 292133 - RNA, 19 nt, Homo sapiens
  misc_RNA (1)...(19): siRNA sense strand
gaaacagugccuuaaguua

SEQ ID NO: 292134 - RNA, 19 nt, Homo sapiens
  misc_RNA (1)...(19): siRNA sense strand
ccagaaaccuaauguaugu

SEQ ID NO: 292135 - RNA, 19 nt, Homo sapiens
  misc_RNA (1)...(19): siRNA sense strand
gcacaguggugacaucaug

SEQ ID NO: 292136 - RNA, 19 nt, Homo sapiens
  misc_RNA (1)...(19): siRNA sense strand
caaaggcuauccuggguuu

SEQ ID NO: 292137 - RNA, 19 nt, Homo sapiens
  misc_RNA (1)...(19): siRNA sense strand
gcaagccuauggacucaaa

SEQ ID NO: 292138 - RNA, 19 nt, Homo sapiens
  misc_RNA (1)...(19): siRNA sense strand
gaagaccgcucguguuaac

SEQ ID NO: 292139 - RNA, 19 nt, Homo sapiens
  misc_RNA (1)...(19): siRNA sense strand
acacacacaugucuaaaga

SEQ ID NO: 292140 - RNA, 19 nt, Homo sapiens
  misc_RNA (1)...(19): siRNA sense strand
aacagugccuuaaguuaua

SEQ ID NO: 292141 - RNA, 19 nt, Homo sapiens
  misc_RNA (1)...(19): siRNA sense strand
cccgagagauucaauggua

SEQ ID NO: 292142 - RNA, 19 nt, Homo sapiens
  misc_RNA (1)...(19): siRNA sense strand
gaccagaauuucccucuag

SEQ ID NO: 292143 - RNA, 19 nt, Homo sapiens
  misc_RNA (1)...(19): siRNA sense strand
gaagagacccaagaucugu

SEQ ID NO: 292144 - RNA, 19 nt, Homo sapiens
  misc_RNA (1)...(19): siRNA sense strand
aaagagacaucaguacaga

SEQ ID NO: 292145 - RNA, 19 nt, Homo sapiens
  misc_RNA (1)...(19): siRNA sense strand
ugagcuagaucacuccaaa

SEQ ID NO: 292146 - RNA, 19 nt, Homo sapiens
  misc_RNA (1)...(19): siRNA sense strand
aaacagugccuuaaguuau

SEQ ID NO: 292147 - RNA, 19 nt, Homo sapiens
  misc_RNA (1)...(19): siRNA sense strand
ccaaacccuugcugucauu

SEQ ID NO: 292148 - RNA, 19 nt, Homo sapiens
  misc_RNA (1)...(19): siRNA sense strand
gaaauacucagcagaucau

SEQ ID NO: 292149 - RNA, 19 nt, Homo sapiens
  misc_RNA (1)...(19): siRNA sense strand
gugaaacagugccuuaagu

SEQ ID NO: 292150 - RNA, 19 nt, Homo sapiens
  misc_RNA (1)...(19): siRNA sense strand
acacaugucuaaagaagag

SEQ ID NO: 292151 - RNA, 19 nt, Homo sapiens
  misc_RNA (1)...(19): siRNA sense strand
gcagaucauuacacaccuu

SEQ ID NO: 292152 - RNA, 19 nt, Homo sapiens
  misc_RNA (1)...(19): siRNA sense strand
uauguaaccuggacacaca

SEQ ID NO: 292153 - RNA, 19 nt, Homo sapiens
  misc_RNA (1)...(19): siRNA sense strand
uaagaaauacucagcagau

SEQ ID NO: 292154 - RNA, 19 nt, Homo sapiens
  misc_RNA (1)...(19): siRNA sense strand
aaagaguuccugagguaua

SEQ ID NO: 292155 - RNA, 19 nt, Homo sapiens
  misc_RNA (1)...(19): siRNA sense strand
acacacaugucuaaagaag

SEQ ID NO: 292156 - RNA, 19 nt, Homo sapiens
  misc_RNA (1)...(19): siRNA sense strand
uugaagaccgcucguguua

SEQ ID NO: 292157 - RNA, 19 nt, Homo sapiens
  misc_RNA (1)...(19): siRNA sense strand
gguauaaagaagcgacuaa

SEQ ID NO: 292158 - RNA, 19 nt, Homo sapiens
  misc_RNA (1)...(19): siRNA sense strand
guggugacaucaugauaau

SEQ ID NO: 292159 - RNA, 19 nt, Homo sapiens
  misc_RNA (1)...(19): siRNA sense strand
gcaaguggcaagccuaugg

SEQ ID NO: 292160 - RNA, 19 nt, Homo sapiens
  misc_RNA (1)...(19): siRNA sense strand
ugaccuggguuuccucuca

SEQ ID NO: 292161 - RNA, 19 nt, Homo sapiens
  misc_RNA (1)...(19): siRNA sense strand
aagaguuccugagguauaa

SEQ ID NO: 292162 - RNA, 19 nt, Homo sapiens
  misc_RNA (1)...(19): siRNA sense strand
gggaacagagcaaagaguu

SEQ ID NO: 292163 - RNA, 19 nt, Homo sapiens
  misc_RNA (1)...(19): siRNA sense strand
ugaaacagugccuuaaguu

SEQ ID NO: 292164 - RNA, 19 nt, Homo sapiens
  misc_RNA (1)...(19): siRNA sense strand
uaaagaagagacccaagau

SEQ ID NO: 292165 - RNA, 19 nt, Homo sapiens
  misc_RNA (1)...(19): siRNA sense strand
uuacacaccuuucccuucu

SEQ ID NO: 292166 - RNA, 19 nt, Homo sapiens
  misc_RNA (1)...(19): siRNA sense strand
acacaccuuucccuucuga

SEQ ID NO: 292167 - RNA, 19 nt, Homo sapiens
  misc_RNA (1)...(19): siRNA sense strand
gggaauccacguagacaga

SEQ ID NO: 292168 - RNA, 19 nt, Homo sapiens
  misc_RNA (1)...(19): siRNA sense strand
uauauucccagaaaccuaa

SEQ ID NO: 292169 - RNA, 19 nt, Homo sapiens
  misc_RNA (1)...(19): siRNA sense strand
gcauauagagcaggucuuc

SEQ ID NO: 292170 - RNA, 19 nt, Homo sapiens
  misc_RNA (1)...(19): siRNA sense strand
cuaaagaagagacccaaga

SEQ ID NO: 292171 - RNA, 19 nt, Homo sapiens
  misc_RNA (1)...(19): siRNA sense strand
ccuguggauuugaggauuu

SEQ ID NO: 292172 - RNA, 19 nt, Homo sapiens
  misc_RNA (1)...(19): siRNA sense strand
guauaaagaagcgacuaaa

SEQ ID NO: 292173 - RNA, 19 nt, Homo sapiens
  misc_RNA (1)...(19): siRNA sense strand
gaauccacguagacagauc

SEQ ID NO: 292174 - RNA, 19 nt, Homo sapiens
  misc_RNA (1)...(19): siRNA sense strand
agacaucaguacagaaggu

SEQ ID NO: 292175 - RNA, 19 nt, Homo sapiens
  misc_RNA (1)...(19): siRNA sense strand
agaccagaauuucccucua

SEQ ID NO: 292176 - RNA, 19 nt, Homo sapiens
  misc_RNA (1)...(19): siRNA sense strand
gaaaccuaauguauguaac

SEQ ID NO: 292177 - RNA, 19 nt, Homo sapiens
  misc_RNA (1)...(19): siRNA sense strand
ucaugauaaugucggguuu

SEQ ID NO: 292178 - RNA, 19 nt, Homo sapiens
  misc_RNA (1)...(19): siRNA sense strand
aagaagagacccaagaucu

SEQ ID NO: 292179 - RNA, 19 nt, Homo sapiens
  misc_RNA (1)...(19): siRNA sense strand
gguuucagccgccucuuga

SEQ ID NO: 292180 - RNA, 19 nt, Homo sapiens
  misc_RNA (1)...(19): siRNA sense strand
ucauucagcuuuggacagu

SEQ ID NO: 292181 - RNA, 19 nt, Homo sapiens
  misc_RNA (1)...(19): siRNA sense strand
ucccagaaaccuaauguau

SEQ ID NO: 292182 - RNA, 19 nt, Homo sapiens
  misc_RNA (1)...(19): siRNA sense strand
agaaauacucagcagauca

SEQ ID NO: 292183 - RNA, 19 nt, Homo sapiens
  misc_RNA (1)...(19): siRNA sense strand
uaaccuggacacacacaug

SEQ ID NO: 292184 - RNA, 19 nt, Homo sapiens
  misc_RNA (1)...(19): siRNA sense strand
gcuguccucccgagagauu

SEQ ID NO: 292185 - RNA, 19 nt, Homo sapiens
  misc_RNA (1)...(19): siRNA sense strand
aauacucagcagaucauua

SEQ ID NO: 292186 - RNA, 19 nt, Homo sapiens
  misc_RNA (1)...(19): siRNA sense strand
ccucguguccuuccaaauc

SEQ ID NO: 292187 - RNA, 19 nt, Homo sapiens
  misc_RNA (1)...(19): siRNA sense strand
ccagaauuucccucuagaa

SEQ ID NO: 292188 - RNA, 19 nt, Homo sapiens
  misc_RNA (1)...(19): siRNA sense strand
cccagaaaccuaauguaug

SEQ ID NO: 292189 - RNA, 19 nt, Homo sapiens
  misc_RNA (1)...(19): siRNA sense strand
gaccgcucguguuaacaug

SEQ ID NO: 292190 - RNA, 19 nt, Homo sapiens
  misc_RNA (1)...(19): siRNA sense strand
aagaaauacucagcagauc

SEQ ID NO: 292191 - RNA, 19 nt, Homo sapiens
  misc_RNA (1)...(19): siRNA sense strand
cgagagauucaaugguaga

SEQ ID NO: 292192 - RNA, 19 nt, Homo sapiens
  misc_RNA (1)...(19): siRNA sense strand
ggugaaacagugccuuaag

SEQ ID NO: 292193 - RNA, 19 nt, Homo sapiens
  misc_RNA (1)...(19): siRNA sense strand
aaacggagaccccgaaguu

SEQ ID NO: 292194 - RNA, 19 nt, Homo sapiens
  misc_RNA (1)...(19): siRNA sense strand
cgcagucccucguguccuu

SEQ ID NO: 292195 - RNA, 19 nt, Homo sapiens
  misc_RNA (1)...(19): siRNA sense strand
ggccacagaccagaauuuc

SEQ ID NO: 292196 - RNA, 19 nt, Homo sapiens
  misc_RNA (1)...(19): siRNA sense strand
ugaagaccgcucguguuaa

SEQ ID NO: 292197 - RNA, 19 nt, Homo sapiens
  misc_RNA (1)...(19): siRNA sense strand
caaagaguuccugagguau

SEQ ID NO: 292198 - RNA, 19 nt, Homo sapiens
  misc_RNA (1)...(19): siRNA sense strand
uggcaagccuauggacuca

SEQ ID NO: 292199 - RNA, 19 nt, Homo sapiens
  misc_RNA (1)...(19): siRNA sense strand
ugggugaaacagugccuua

SEQ ID NO: 292200 - RNA, 19 nt, Homo sapiens
  misc_RNA (1)...(19): siRNA sense strand
cagaucauuacacaccuuu

SEQ ID NO: 292201 - RNA, 19 nt, Homo sapiens
  misc_RNA (1)...(19): siRNA sense strand
gggugaaacagugccuuaa

SEQ ID NO: 292202 - RNA, 19 nt, Homo sapiens
  misc_RNA (1)...(19): siRNA sense strand
caucaguacagaagguuuc

SEQ ID NO: 292203 - RNA, 19 nt, Homo sapiens
  misc_RNA (1)...(19): siRNA sense strand
cagcaaguggcaagccuau

SEQ ID NO: 292204 - RNA, 19 nt, Homo sapiens
  misc_RNA (1)...(19): siRNA sense strand
ggaauccacguagacagau

SEQ ID NO: 292205 - RNA, 19 nt, Homo sapiens
  misc_RNA (1)...(19): siRNA sense strand
cucagcagaucauuacaca

SEQ ID NO: 292206 - RNA, 19 nt, Homo sapiens
  misc_RNA (1)...(19): siRNA sense strand
agaagagacccaagaucug

SEQ ID NO: 292207 - RNA, 19 nt, Homo sapiens
  misc_RNA (1)...(19): siRNA sense strand
acagugccuuaaguuauau

SEQ ID NO: 292208 - RNA, 19 nt, Homo sapiens
  misc_RNA (1)...(19): siRNA sense strand
cagaauuucccucuagaac

SEQ ID NO: 292209 - RNA, 19 nt, Homo sapiens
  misc_RNA (1)...(19): siRNA sense strand
aguggugacaucaugauaa

SEQ ID NO: 292210 - RNA, 19 nt, Homo sapiens
  misc_RNA (1)...(19): siRNA sense strand
ucuccuggguggucuucaa

SEQ ID NO: 292211 - RNA, 19 nt, Homo sapiens
  misc_RNA (1)...(19): siRNA sense strand
gccuguggauuugaggauu

SEQ ID NO: 292212 - RNA, 19 nt, Homo sapiens
  misc_RNA (1)...(19): siRNA sense strand
gcauggagcugccagauga

SEQ ID NO: 292213 - RNA, 19 nt, Homo sapiens
  misc_RNA (1)...(19): siRNA sense strand
caucauagguuccuucaau

SEQ ID NO: 292214 - RNA, 19 nt, Homo sapiens
  misc_RNA (1)...(19): siRNA sense strand
ucacuuggcuuacuugaga

SEQ ID NO: 292215 - RNA, 19 nt, Homo sapiens
  misc_RNA (1)...(19): siRNA sense strand
ugaaaucaaugaagccuuu

SEQ ID NO: 292216 - RNA, 19 nt, Homo sapiens
  misc_RNA (1)...(19): siRNA sense strand
gagaacaggaguaaagaua

SEQ ID NO: 292217 - RNA, 19 nt, Homo sapiens
  misc_RNA (1)...(19): siRNA sense strand
ggaauucccuacucuguuc

SEQ ID NO: 292218 - RNA, 19 nt, Homo sapiens
  misc_RNA (1)...(19): siRNA sense strand
ggacagagaaugcacagaa

SEQ ID NO: 292219 - RNA, 19 nt, Homo sapiens
  misc_RNA (1)...(19): siRNA sense strand
gaagccauguccaagcuaa

SEQ ID NO: 292220 - RNA, 19 nt, Homo sapiens
  misc_RNA (1)...(19): siRNA sense strand
gcagaauccuguuagacaa

SEQ ID NO: 292221 - RNA, 19 nt, Homo sapiens
  misc_RNA (1)...(19): siRNA sense strand
gcaucuggcugucgaauuc

SEQ ID NO: 292222 - RNA, 19 nt, Homo sapiens
  misc_RNA (1)...(19): siRNA sense strand
gaacaggaguaaagauagg

SEQ ID NO: 292223 - RNA, 19 nt, Homo sapiens
  misc_RNA (1)...(19): siRNA sense strand
ggacaagguugcaguucug

SEQ ID NO: 292224 - RNA, 19 nt, Homo sapiens
  misc_RNA (1)...(19): siRNA sense strand
uguccaagcuaaagccuua

SEQ ID NO: 292225 - RNA, 19 nt, Homo sapiens
  misc_RNA (1)...(19): siRNA sense strand
gaccugggcuccacuguca

SEQ ID NO: 292226 - RNA, 19 nt, Homo sapiens
  misc_RNA (1)...(19): siRNA sense strand
caaagagauuguaccaguu

SEQ ID NO: 292227 - RNA, 19 nt, Homo sapiens
  misc_RNA (1)...(19): siRNA sense strand
gacagagaaugcacagaaa

SEQ ID NO: 292228 - RNA, 19 nt, Homo sapiens
  misc_RNA (1)...(19): siRNA sense strand
gcaagugaguagagaagau

SEQ ID NO: 292229 - RNA, 19 nt, Homo sapiens
  misc_RNA (1)...(19): siRNA sense strand
gggcuccacugucaucaaa

SEQ ID NO: 292230 - RNA, 19 nt, Homo sapiens
  misc_RNA (1)...(19): siRNA sense strand
gggcagaagucgugguguu

SEQ ID NO: 292231 - RNA, 19 nt, Homo sapiens
  misc_RNA (1)...(19): siRNA sense strand
acagaaagcuggccauuuu

SEQ ID NO: 292232 - RNA, 19 nt, Homo sapiens
  misc_RNA (1)...(19): siRNA sense strand
ccagagaaggucaauauug

SEQ ID NO: 292233 - RNA, 19 nt, Homo sapiens
  misc_RNA (1)...(19): siRNA sense strand
uaaagcaagcuguuacaaa

SEQ ID NO: 292234 - RNA, 19 nt, Homo sapiens
  misc_RNA (1)...(19): siRNA sense strand
gaauagcaauguguguuca

SEQ ID NO: 292235 - RNA, 19 nt, Homo sapiens
  misc_RNA (1)...(19): siRNA sense strand
gagaagaucaggacaaggu

SEQ ID NO: 292236 - RNA, 19 nt, Homo sapiens
  misc_RNA (1)...(19): siRNA sense strand
agccaaugcuucaggaaua

SEQ ID NO: 292237 - RNA, 19 nt, Homo sapiens
  misc_RNA (1)...(19): siRNA sense strand
gccaaugcuucaggaauaa

SEQ ID NO: 292238 - RNA, 19 nt, Homo sapiens
  misc_RNA (1)...(19): siRNA sense strand
gcuccacugucaucaaaga

SEQ ID NO: 292239 - RNA, 19 nt, Homo sapiens
  misc_RNA (1)...(19): siRNA sense strand
caauguguguucagagaga

SEQ ID NO: 292240 - RNA, 19 nt, Homo sapiens
  misc_RNA (1)...(19): siRNA sense strand
gaggucaucuuuggacaug

SEQ ID NO: 292241 - RNA, 19 nt, Homo sapiens
  misc_RNA (1)...(19): siRNA sense strand
gcauuucacaacugucaua

SEQ ID NO: 292242 - RNA, 19 nt, Homo sapiens
  misc_RNA (1)...(19): siRNA sense strand
aaagcaagcuguuacaaaa

SEQ ID NO: 292243 - RNA, 19 nt, Homo sapiens
  misc_RNA (1)...(19): siRNA sense strand
aaagagauuguaccaguuu

SEQ ID NO: 292244 - RNA, 19 nt, Homo sapiens
  misc_RNA (1)...(19): siRNA sense strand
ggaauagcaauguguguuc

SEQ ID NO: 292245 - RNA, 19 nt, Homo sapiens
  misc_RNA (1)...(19): siRNA sense strand
gcacagaaagcuggccauu

SEQ ID NO: 292246 - RNA, 19 nt, Homo sapiens
  misc_RNA (1)...(19): siRNA sense strand
ggaccaauuccagccauaa

SEQ ID NO: 292247 - RNA, 19 nt, Homo sapiens
  misc_RNA (1)...(19): siRNA sense strand
gaguaaagauaggugagau

SEQ ID NO: 292248 - RNA, 19 nt, Homo sapiens
  misc_RNA (1)...(19): siRNA sense strand
guuggucacuggaagaugu

SEQ ID NO: 292249 - RNA, 19 nt, Homo sapiens
  misc_RNA (1)...(19): siRNA sense strand
uuucacaacugucauaugg

SEQ ID NO: 292250 - RNA, 19 nt, Homo sapiens
  misc_RNA (1)...(19): siRNA sense strand
gaaaauguagccacaaaau

SEQ ID NO: 292251 - RNA, 19 nt, Homo sapiens
  misc_RNA (1)...(19): siRNA sense strand
gaacaggacagagaaugca

SEQ ID NO: 292252 - RNA, 19 nt, Homo sapiens
  misc_RNA (1)...(19): siRNA sense strand
ugucugaggucaucuuugg

SEQ ID NO: 292253 - RNA, 19 nt, Homo sapiens
  misc_RNA (1)...(19): siRNA sense strand
gcgcggaccaucauagguu

SEQ ID NO: 292254 - RNA, 19 nt, Homo sapiens
  misc_RNA (1)...(19): siRNA sense strand
cagugugggugcaggaauu

SEQ ID NO: 292255 - RNA, 19 nt, Homo sapiens
  misc_RNA (1)...(19): siRNA sense strand
guagagaagaucaggacaa

SEQ ID NO: 292256 - RNA, 19 nt, Homo sapiens
  misc_RNA (1)...(19): siRNA sense strand
ggucaucuuuggacauguc

SEQ ID NO: 292257 - RNA, 19 nt, Homo sapiens
  misc_RNA (1)...(19): siRNA sense strand
ugucucugcugcaauaguu

SEQ ID NO: 292258 - RNA, 19 nt, Homo sapiens
  misc_RNA (1)...(19): siRNA sense strand
gaccaauuccagccauaaa

SEQ ID NO: 292259 - RNA, 19 nt, Homo sapiens
  misc_RNA (1)...(19): siRNA sense strand
ggcagaauccuguuagaca

SEQ ID NO: 292260 - RNA, 19 nt, Homo sapiens
  misc_RNA (1)...(19): siRNA sense strand
gccauaaagcaagcuguua

SEQ ID NO: 292261 - RNA, 19 nt, Homo sapiens
  misc_RNA (1)...(19): siRNA sense strand
ccacugucaucaaagaagu

SEQ ID NO: 292262 - RNA, 19 nt, Homo sapiens
  misc_RNA (1)...(19): siRNA sense strand
uagagaagaucaggacaag

SEQ ID NO: 292263 - RNA, 19 nt, Homo sapiens
  misc_RNA (1)...(19): siRNA sense strand
gauuaaacccagagaaggu

SEQ ID NO: 292264 - RNA, 19 nt, Homo sapiens
  misc_RNA (1)...(19): siRNA sense strand
ggaugggaauagcaaugug

SEQ ID NO: 292265 - RNA, 19 nt, Homo sapiens
  misc_RNA (1)...(19): siRNA sense strand
gcucagauccuguggucau

SEQ ID NO: 292266 - RNA, 19 nt, Homo sapiens
  misc_RNA (1)...(19): siRNA sense strand
ggaguaaagauaggugaga

SEQ ID NO: 292267 - RNA, 19 nt, Homo sapiens
  misc_RNA (1)...(19): siRNA sense strand
gggaauagcaauguguguu

SEQ ID NO: 292268 - RNA, 19 nt, Homo sapiens
  misc_RNA (1)...(19): siRNA sense strand
gaauucuugugacccuguu

SEQ ID NO: 292269 - RNA, 19 nt, Homo sapiens
  misc_RNA (1)...(19): siRNA sense strand
gcaggaggcauggaaaaua

SEQ ID NO: 292270 - RNA, 19 nt, Homo sapiens
  misc_RNA (1)...(19): siRNA sense strand
gagagaaugggcagaaguc

SEQ ID NO: 292271 - RNA, 19 nt, Homo sapiens
  misc_RNA (1)...(19): siRNA sense strand
gugcaggaauucccuacuc

SEQ ID NO: 292272 - RNA, 19 nt, Homo sapiens
  misc_RNA (1)...(19): siRNA sense strand
caacugucauauggguauu

SEQ ID NO: 292273 - RNA, 19 nt, Homo sapiens
  misc_RNA (1)...(19): siRNA sense strand
cagaugcauuucacaacug

SEQ ID NO: 292274 - RNA, 19 nt, Homo sapiens
  misc_RNA (1)...(19): siRNA sense strand
gauggaacgggaacaguca

SEQ ID NO: 292275 - RNA, 19 nt, Homo sapiens
  misc_RNA (1)...(19): siRNA sense strand
ggagagaaugggcagaagu

SEQ ID NO: 292276 - RNA, 19 nt, Homo sapiens
  misc_RNA (1)...(19): siRNA sense strand
gagaugccacugacugaca

SEQ ID NO: 292277 - RNA, 19 nt, Homo sapiens
  misc_RNA (1)...(19): siRNA sense strand
uuccuucaauggugccuua

SEQ ID NO: 292278 - RNA, 19 nt, Homo sapiens
  misc_RNA (1)...(19): siRNA sense strand
uuacagaugcauuucacaa

SEQ ID NO: 292279 - RNA, 19 nt, Homo sapiens
  misc_RNA (1)...(19): siRNA sense strand
cugcugcaauaguuaaaga

SEQ ID NO: 292280 - RNA, 19 nt, Homo sapiens
  misc_RNA (1)...(19): siRNA sense strand
agccuuacuuucuuacuga

SEQ ID NO: 292281 - RNA, 19 nt, Homo sapiens
  misc_RNA (1)...(19): siRNA sense strand
acagaugcauuucacaacu

SEQ ID NO: 292282 - RNA, 19 nt, Homo sapiens
  misc_RNA (1)...(19): siRNA sense strand
uacacacacuggagagaau

SEQ ID NO: 292283 - RNA, 19 nt, Homo sapiens
  misc_RNA (1)...(19): siRNA sense strand
caggaggcauggaaaauau

SEQ ID NO: 292284 - RNA, 19 nt, Homo sapiens
  misc_RNA (1)...(19): siRNA sense strand
uagaagccauguccaagcu

SEQ ID NO: 292285 - RNA, 19 nt, Homo sapiens
  misc_RNA (1)...(19): siRNA sense strand
agcaauguguguucagaga

SEQ ID NO: 292286 - RNA, 19 nt, Homo sapiens
  misc_RNA (1)...(19): siRNA sense strand
gugagaugccacugacuga

SEQ ID NO: 292287 - RNA, 19 nt, Homo sapiens
  misc_RNA (1)...(19): siRNA sense strand
gaugggaauagcaaugugu

SEQ ID NO: 292288 - RNA, 19 nt, Homo sapiens
  misc_RNA (1)...(19): siRNA sense strand
acccagagaaggucaauau

SEQ ID NO: 292289 - RNA, 19 nt, Homo sapiens
  misc_RNA (1)...(19): siRNA sense strand
cacagaaagcuggccauuu

SEQ ID NO: 292290 - RNA, 19 nt, Homo sapiens
  misc_RNA (1)...(19): siRNA sense strand
gaaaucaaugaagccuuug

SEQ ID NO: 292291 - RNA, 19 nt, Homo sapiens
  misc_RNA (1)...(19): siRNA sense strand
caucuuuggacaugucuug

SEQ ID NO: 292292 - RNA, 19 nt, Homo sapiens
  misc_RNA (1)...(19): siRNA sense strand
agcugucucugcugcaaua

SEQ ID NO: 292293 - RNA, 19 nt, Homo sapiens
  misc_RNA (1)...(19): siRNA sense strand
caaaauggcaagugaguag

SEQ ID NO: 292294 - RNA, 19 nt, Homo sapiens
  misc_RNA (1)...(19): siRNA sense strand
cagaagucgugguguugca

SEQ ID NO: 292295 - RNA, 19 nt, Homo sapiens
  misc_RNA (1)...(19): siRNA sense strand
ccauaaagcaagcuguuac

SEQ ID NO: 292296 - RNA, 19 nt, Homo sapiens
  misc_RNA (1)...(19): siRNA sense strand
cauaaagcaagcuguuaca

SEQ ID NO: 292297 - RNA, 19 nt, Homo sapiens
  misc_RNA (1)...(19): siRNA sense strand
gggaugggaauagcaaugu

SEQ ID NO: 292298 - RNA, 19 nt, Homo sapiens
  misc_RNA (1)...(19): siRNA sense strand
caggaauucccuacucugu

SEQ ID NO: 292299 - RNA, 19 nt, Homo sapiens
  misc_RNA (1)...(19): siRNA sense strand
gccaugggagcaacauaga

SEQ ID NO: 292300 - RNA, 19 nt, Homo sapiens
  misc_RNA (1)...(19): siRNA sense strand
uauacucugugauggucuu

SEQ ID NO: 292301 - RNA, 19 nt, Homo sapiens
  misc_RNA (1)...(19): siRNA sense strand
ggcagaagucgugguguug

SEQ ID NO: 292302 - RNA, 19 nt, Homo sapiens
  misc_RNA (1)...(19): siRNA sense strand
aagccuuacuuucuuacug

SEQ ID NO: 292303 - RNA, 19 nt, Homo sapiens
  misc_RNA (1)...(19): siRNA sense strand
cagaacaggacagagaaug

SEQ ID NO: 292304 - RNA, 19 nt, Homo sapiens
  misc_RNA (1)...(19): siRNA sense strand
caagugaguagagaagauc

SEQ ID NO: 292305 - RNA, 19 nt, Homo sapiens
  misc_RNA (1)...(19): siRNA sense strand
caugggagcaacauagaag

SEQ ID NO: 292306 - RNA, 19 nt, Homo sapiens
  misc_RNA (1)...(19): siRNA sense strand
ucccagaacaggacagaga

SEQ ID NO: 292307 - RNA, 19 nt, Homo sapiens
  misc_RNA (1)...(19): siRNA sense strand
gaagauaaaugaacugaug

SEQ ID NO: 292308 - RNA, 19 nt, Homo sapiens
  misc_RNA (1)...(19): siRNA sense strand
uaaaugaacugaugccuaa

SEQ ID NO: 292309 - RNA, 19 nt, Homo sapiens
  misc_RNA (1)...(19): siRNA sense strand
gugagaagcuuaagaagaa

SEQ ID NO: 292310 - RNA, 19 nt, Homo sapiens
  misc_RNA (1)...(19): siRNA sense strand
uaugugagcuuaaguauga

SEQ ID NO: 292311 - RNA, 19 nt, Homo sapiens
  misc_RNA (1)...(19): siRNA sense strand
uuaaagagcugaagaagau

SEQ ID NO: 292312 - RNA, 19 nt, Homo sapiens
  misc_RNA (1)...(19): siRNA sense strand
gaagaaggacagccagaua

SEQ ID NO: 292313 - RNA, 19 nt, Homo sapiens
  misc_RNA (1)...(19): siRNA sense strand
ugaagaagcuccgaguuaa

SEQ ID NO: 292314 - RNA, 19 nt, Homo sapiens
  misc_RNA (1)...(19): siRNA sense strand
gaacugaugccuaaauaug

SEQ ID NO: 292315 - RNA, 19 nt, Homo sapiens
  misc_RNA (1)...(19): siRNA sense strand
gaagaucugugagaagcuu

SEQ ID NO: 292316 - RNA, 19 nt, Homo sapiens
  misc_RNA (1)...(19): siRNA sense strand
gaagaagcuccgaguuaaa

SEQ ID NO: 292317 - RNA, 19 nt, Homo sapiens
  misc_RNA (1)...(19): siRNA sense strand
gaagcaagaggcaaagaga

SEQ ID NO: 292318 - RNA, 19 nt, Homo sapiens
  misc_RNA (1)...(19): siRNA sense strand
gagaaucgguugugcuacu

SEQ ID NO: 292319 - RNA, 19 nt, Homo sapiens
  misc_RNA (1)...(19): siRNA sense strand
gcacaguggaccugaagaa

SEQ ID NO: 292320 - RNA, 19 nt, Homo sapiens
  misc_RNA (1)...(19): siRNA sense strand
cugaagaagcuccgaguua

SEQ ID NO: 292321 - RNA, 19 nt, Homo sapiens
  misc_RNA (1)...(19): siRNA sense strand
gacuacauccggaagauaa

SEQ ID NO: 292322 - RNA, 19 nt, Homo sapiens
  misc_RNA (1)...(19): siRNA sense strand
gcaaagagaaucgguugug

SEQ ID NO: 292323 - RNA, 19 nt, Homo sapiens
  misc_RNA (1)...(19): siRNA sense strand
ccagugcaccgaccgauuu

SEQ ID NO: 292324 - RNA, 19 nt, Homo sapiens
  misc_RNA (1)...(19): siRNA sense strand
gcgaaguuuguauuucuua

SEQ ID NO: 292325 - RNA, 19 nt, Homo sapiens
  misc_RNA (1)...(19): siRNA sense strand
ccagauaugugagcuuaag

SEQ ID NO: 292326 - RNA, 19 nt, Homo sapiens
  misc_RNA (1)...(19): siRNA sense strand
gauaugugagcuuaaguau

SEQ ID NO: 292327 - RNA, 19 nt, Homo sapiens
  misc_RNA (1)...(19): siRNA sense strand
ggaggaggaugaggaggau

SEQ ID NO: 292328 - RNA, 19 nt, Homo sapiens
  misc_RNA (1)...(19): siRNA sense strand
gaaggacagccagauaugu

SEQ ID NO: 292329 - RNA, 19 nt, Homo sapiens
  misc_RNA (1)...(19): siRNA sense strand
augaacugaugccuaaaua

SEQ ID NO: 292330 - RNA, 19 nt, Homo sapiens
  misc_RNA (1)...(19): siRNA sense strand
uggagaagaucugugagaa

SEQ ID NO: 292331 - RNA, 19 nt, Homo sapiens
  misc_RNA (1)...(19): siRNA sense strand
agccagauaugugagcuua

SEQ ID NO: 292332 - RNA, 19 nt, Homo sapiens
  misc_RNA (1)...(19): siRNA sense strand
cgacugcgaaguuuguauu

SEQ ID NO: 292333 - RNA, 19 nt, Homo sapiens
  misc_RNA (1)...(19): siRNA sense strand
gaguuaaagagcugaagaa

SEQ ID NO: 292334 - RNA, 19 nt, Homo sapiens
  misc_RNA (1)...(19): siRNA sense strand
guuaaagagcugaagaaga

SEQ ID NO: 292335 - RNA, 19 nt, Homo sapiens
  misc_RNA (1)...(19): siRNA sense strand
aaucgguugugcuacuaua

SEQ ID NO: 292336 - RNA, 19 nt, Homo sapiens
  misc_RNA (1)...(19): siRNA sense strand
gugcaccgaccgauuugua

SEQ ID NO: 292337 - RNA, 19 nt, Homo sapiens
  misc_RNA (1)...(19): siRNA sense strand
aagagaaucgguugugcua

SEQ ID NO: 292338 - RNA, 19 nt, Homo sapiens
  misc_RNA (1)...(19): siRNA sense strand
ggagaagaucugugagaag

SEQ ID NO: 292339 - RNA, 19 nt, Homo sapiens
  misc_RNA (1)...(19): siRNA sense strand
ucaccagccacuauugaaa

SEQ ID NO: 292340 - RNA, 19 nt, Homo sapiens
  misc_RNA (1)...(19): siRNA sense strand
agaaucgguugugcuacua

SEQ ID NO: 292341 - RNA, 19 nt, Homo sapiens
  misc_RNA (1)...(19): siRNA sense strand
gcaagaggcaaagagaauc

SEQ ID NO: 292342 - RNA, 19 nt, Homo sapiens
  misc_RNA (1)...(19): siRNA sense strand
agauaugugagcuuaagua

SEQ ID NO: 292343 - RNA, 19 nt, Homo sapiens
  misc_RNA (1)...(19): siRNA sense strand
ggaagcaagaggcaaagag

SEQ ID NO: 292344 - RNA, 19 nt, Homo sapiens
  misc_RNA (1)...(19): siRNA sense strand
cugcgaaguuuguauuucu

SEQ ID NO: 292345 - RNA, 19 nt, Homo sapiens
  misc_RNA (1)...(19): siRNA sense strand
caaaggcugugcagaaaag

SEQ ID NO: 292346 - RNA, 19 nt, Homo sapiens
  misc_RNA (1)...(19): siRNA sense strand
aagaaggacagccagauau

SEQ ID NO: 292347 - RNA, 19 nt, Homo sapiens
  misc_RNA (1)...(19): siRNA sense strand
ugugagaagcuuaagaaga

SEQ ID NO: 292348 - RNA, 19 nt, Homo sapiens
  misc_RNA (1)...(19): siRNA sense strand
ucugugagaagcuuaagaa

SEQ ID NO: 292349 - RNA, 19 nt, Homo sapiens
  misc_RNA (1)...(19): siRNA sense strand
ugacuacauccggaagaua

SEQ ID NO: 292350 - RNA, 19 nt, Homo sapiens
  misc_RNA (1)...(19): siRNA sense strand
caguggaccugaagaagcu

SEQ ID NO: 292351 - RNA, 19 nt, Homo sapiens
  misc_RNA (1)...(19): siRNA sense strand
gagcacaguggaccugaag

SEQ ID NO: 292352 - RNA, 19 nt, Homo sapiens
  misc_RNA (1)...(19): siRNA sense strand
guggagaagaucugugaga

SEQ ID NO: 292353 - RNA, 19 nt, Homo sapiens
  misc_RNA (1)...(19): siRNA sense strand
cgaguuaaagagcugaaga

SEQ ID NO: 292354 - RNA, 19 nt, Homo sapiens
  misc_RNA (1)...(19): siRNA sense strand
agaaggacagccagauaug

SEQ ID NO: 292355 - RNA, 19 nt, Homo sapiens
  misc_RNA (1)...(19): siRNA sense strand
gggcgacugcgaaguuugu

SEQ ID NO: 292356 - RNA, 19 nt, Homo sapiens
  misc_RNA (1)...(19): siRNA sense strand
gaagcuccgaguuaaagag

SEQ ID NO: 292357 - RNA, 19 nt, Homo sapiens
  misc_RNA (1)...(19): siRNA sense strand
ugaggaggaugaggaggau

SEQ ID NO: 292358 - RNA, 19 nt, Homo sapiens
  misc_RNA (1)...(19): siRNA sense strand
ggaagauaaaugaacugau

SEQ ID NO: 292359 - RNA, 19 nt, Homo sapiens
  misc_RNA (1)...(19): siRNA sense strand
ggaccucaaagacagagau

SEQ ID NO: 292360 - RNA, 19 nt, Homo sapiens
  misc_RNA (1)...(19): siRNA sense strand
ugagcacaguggaccugaa

SEQ ID NO: 292361 - RNA, 19 nt, Homo sapiens
  misc_RNA (1)...(19): siRNA sense strand
gaaucgguugugcuacuau

SEQ ID NO: 292362 - RNA, 19 nt, Homo sapiens
  misc_RNA (1)...(19): siRNA sense strand
ugaacugaugccuaaauau

SEQ ID NO: 292363 - RNA, 19 nt, Homo sapiens
  misc_RNA (1)...(19): siRNA sense strand
gacugcgaaguuuguauuu

SEQ ID NO: 292364 - RNA, 19 nt, Homo sapiens
  misc_RNA (1)...(19): siRNA sense strand
uaccaggaccucaaagaca

SEQ ID NO: 292365 - RNA, 19 nt, Homo sapiens
  misc_RNA (1)...(19): siRNA sense strand
caucaaugagguaucaaag

SEQ ID NO: 292366 - RNA, 19 nt, Homo sapiens
  misc_RNA (1)...(19): siRNA sense strand
gcaaaggcugugcagaaaa

SEQ ID NO: 292367 - RNA, 19 nt, Homo sapiens
  misc_RNA (1)...(19): siRNA sense strand
gcaaauaccugauguguca

SEQ ID NO: 292368 - RNA, 19 nt, Homo sapiens
  misc_RNA (1)...(19): siRNA sense strand
caaaggagcugacacugua

SEQ ID NO: 292369 - RNA, 19 nt, Homo sapiens
  misc_RNA (1)...(19): siRNA sense strand
gaagacagaugauguuuca

SEQ ID NO: 292370 - RNA, 19 nt, Homo sapiens
  misc_RNA (1)...(19): siRNA sense strand
ggacagauccucuuugaaa

SEQ ID NO: 292371 - RNA, 19 nt, Homo sapiens
  misc_RNA (1)...(19): siRNA sense strand
caacagccauugaggauaa

SEQ ID NO: 292372 - RNA, 19 nt, Homo sapiens
  misc_RNA (1)...(19): siRNA sense strand
caacuuagauggugaaaca

SEQ ID NO: 292373 - RNA, 19 nt, Homo sapiens
  misc_RNA (1)...(19): siRNA sense strand
cagaagagcugcuaauuca

SEQ ID NO: 292374 - RNA, 19 nt, Homo sapiens
  misc_RNA (1)...(19): siRNA sense strand
gaaguacccugaauuauac

SEQ ID NO: 292375 - RNA, 19 nt, Homo sapiens
  misc_RNA (1)...(19): siRNA sense strand
ccuaucagcuuauugguua

SEQ ID NO: 292376 - RNA, 19 nt, Homo sapiens
  misc_RNA (1)...(19): siRNA sense strand
gaacaucuaaucugaauga

SEQ ID NO: 292377 - RNA, 19 nt, Homo sapiens
  misc_RNA (1)...(19): siRNA sense strand
gcaauguaaugcaguuuaa

SEQ ID NO: 292378 - RNA, 19 nt, Homo sapiens
  misc_RNA (1)...(19): siRNA sense strand
gagcugacacuguaauuua

SEQ ID NO: 292379 - RNA, 19 nt, Homo sapiens
  misc_RNA (1)...(19): siRNA sense strand
gaaacuuuguguacacuuu

SEQ ID NO: 292380 - RNA, 19 nt, Homo sapiens
  misc_RNA (1)...(19): siRNA sense strand
gcgagaaggugacaagauu

SEQ ID NO: 292381 - RNA, 19 nt, Homo sapiens
  misc_RNA (1)...(19): siRNA sense strand
gcaagaaacugccauuaac

SEQ ID NO: 292382 - RNA, 19 nt, Homo sapiens
  misc_RNA (1)...(19): siRNA sense strand
ugaaguacccugaauuaua

SEQ ID NO: 292383 - RNA, 19 nt, Homo sapiens
  misc_RNA (1)...(19): siRNA sense strand
ggaagaaagauaugaauug

SEQ ID NO: 292384 - RNA, 19 nt, Homo sapiens
  misc_RNA (1)...(19): siRNA sense strand
gcucgaacaucuaaucuga

SEQ ID NO: 292385 - RNA, 19 nt, Homo sapiens
  misc_RNA (1)...(19): siRNA sense strand
ucaagugccugaaaccaua

SEQ ID NO: 292386 - RNA, 19 nt, Homo sapiens
  misc_RNA (1)...(19): siRNA sense strand
acagacaucucuacgauuu

SEQ ID NO: 292387 - RNA, 19 nt, Homo sapiens
  misc_RNA (1)...(19): siRNA sense strand
gaggauaaauuacaagauc

SEQ ID NO: 292388 - RNA, 19 nt, Homo sapiens
  misc_RNA (1)...(19): siRNA sense strand
gaagagcugcuaauucauu

SEQ ID NO: 292389 - RNA, 19 nt, Homo sapiens
  misc_RNA (1)...(19): siRNA sense strand
gaagagaguuaugaguuga

SEQ ID NO: 292390 - RNA, 19 nt, Homo sapiens
  misc_RNA (1)...(19): siRNA sense strand
gaaggugacaagauuauuu

SEQ ID NO: 292391 - RNA, 19 nt, Homo sapiens
  misc_RNA (1)...(19): siRNA sense strand
gcaaacuguugaagaagaa

SEQ ID NO: 292392 - RNA, 19 nt, Homo sapiens
  misc_RNA (1)...(19): siRNA sense strand
caaauaugccuuaaccuuu

SEQ ID NO: 292393 - RNA, 19 nt, Homo sapiens
  misc_RNA (1)...(19): siRNA sense strand
aagagaacauguugaagua

SEQ ID NO: 292394 - RNA, 19 nt, Homo sapiens
  misc_RNA (1)...(19): siRNA sense strand
ucacauuccuuccaagauu

SEQ ID NO: 292395 - RNA, 19 nt, Homo sapiens
  misc_RNA (1)...(19): siRNA sense strand
caagauuucucuacucuca

SEQ ID NO: 292396 - RNA, 19 nt, Homo sapiens
  misc_RNA (1)...(19): siRNA sense strand
gaaacaagucaaagucgua

SEQ ID NO: 292397 - RNA, 19 nt, Homo sapiens
  misc_RNA (1)...(19): siRNA sense strand
ucaacaaucucauuccuau

SEQ ID NO: 292398 - RNA, 19 nt, Homo sapiens
  misc_RNA (1)...(19): siRNA sense strand
cgaagagaguuaugaguug

SEQ ID NO: 292399 - RNA, 19 nt, Homo sapiens
  misc_RNA (1)...(19): siRNA sense strand
gaagaaagauaugaauugc

SEQ ID NO: 292400 - RNA, 19 nt, Homo sapiens
  misc_RNA (1)...(19): siRNA sense strand
gaaauuguccacugggaaa

SEQ ID NO: 292401 - RNA, 19 nt, Homo sapiens
  misc_RNA (1)...(19): siRNA sense strand
gggcgcaacugcucaagaa

SEQ ID NO: 292402 - RNA, 19 nt, Homo sapiens
  misc_RNA (1)...(19): siRNA sense strand
guucaguucuggagucuuu

SEQ ID NO: 292403 - RNA, 19 nt, Homo sapiens
  misc_RNA (1)...(19): siRNA sense strand
ccacucaguuauucuguuu

SEQ ID NO: 292404 - RNA, 19 nt, Homo sapiens
  misc_RNA (1)...(19): siRNA sense strand
aaacagacaucucuacgau

SEQ ID NO: 292405 - RNA, 19 nt, Homo sapiens
  misc_RNA (1)...(19): siRNA sense strand
acaccaagcugaugcagaa

SEQ ID NO: 292406 - RNA, 19 nt, Homo sapiens
  misc_RNA (1)...(19): siRNA sense strand
gaugugguguacaagguua

SEQ ID NO: 292407 - RNA, 19 nt, Homo sapiens
  misc_RNA (1)...(19): siRNA sense strand
cagcagaucucaucagucu

SEQ ID NO: 292408 - RNA, 19 nt, Homo sapiens
  misc_RNA (1)...(19): siRNA sense strand
ggugauaacuguguguuug

SEQ ID NO: 292409 - RNA, 19 nt, Homo sapiens
  misc_RNA (1)...(19): siRNA sense strand
cagaugauguuucagagaa

SEQ ID NO: 292410 - RNA, 19 nt, Homo sapiens
  misc_RNA (1)...(19): siRNA sense strand
agacagggcuuaccagcaa

SEQ ID NO: 292411 - RNA, 19 nt, Homo sapiens
  misc_RNA (1)...(19): siRNA sense strand
ggacacuccugcaaacugu

SEQ ID NO: 292412 - RNA, 19 nt, Homo sapiens
  misc_RNA (1)...(19): siRNA sense strand
ggaaaagacugguaucuca

SEQ ID NO: 292413 - RNA, 19 nt, Homo sapiens
  misc_RNA (1)...(19): siRNA sense strand
gaacuuggccagguuaaau

SEQ ID NO: 292414 - RNA, 19 nt, Homo sapiens
  misc_RNA (1)...(19): siRNA sense strand
aaauaugccuuaaccuuug

SEQ ID NO: 292415 - RNA, 19 nt, Homo sapiens
  misc_RNA (1)...(19): siRNA sense strand
caacugcaccuauaauaug

SEQ ID NO: 292416 - RNA, 19 nt, Homo sapiens
  misc_RNA (1)...(19): siRNA sense strand
caacaucagauaucaaaga

SEQ ID NO: 292417 - RNA, 19 nt, Homo sapiens
  misc_RNA (1)...(19): siRNA sense strand
gugauaagagcauaugaua

SEQ ID NO: 292418 - RNA, 19 nt, Homo sapiens
  misc_RNA (1)...(19): siRNA sense strand
ggaaucuacucaucucugu

SEQ ID NO: 292419 - RNA, 19 nt, Homo sapiens
  misc_RNA (1)...(19): siRNA sense strand
gcagugaacaagaaacaaa

SEQ ID NO: 292420 - RNA, 19 nt, Homo sapiens
  misc_RNA (1)...(19): siRNA sense strand
guugaaguacccugaauua

SEQ ID NO: 292421 - RNA, 19 nt, Homo sapiens
  misc_RNA (1)...(19): siRNA sense strand
cauggugccuggaacuaua

SEQ ID NO: 292422 - RNA, 19 nt, Homo sapiens
  misc_RNA (1)...(19): siRNA sense strand
guaaugcaguuuaagaagu

SEQ ID NO: 292423 - RNA, 19 nt, Homo sapiens
  misc_RNA (1)...(19): siRNA sense strand
ccauagcucaguucaaaua

SEQ ID NO: 292424 - RNA, 19 nt, Homo sapiens
  misc_RNA (1)...(19): siRNA sense strand
gaggaaguaaggacuauuu

SEQ ID NO: 292425 - RNA, 19 nt, Homo sapiens
  misc_RNA (1)...(19): siRNA sense strand
acauaaagcugauaaugca

SEQ ID NO: 292426 - RNA, 19 nt, Homo sapiens
  misc_RNA (1)...(19): siRNA sense strand
caagaggacugcuuuuaaa

SEQ ID NO: 292427 - RNA, 19 nt, Homo sapiens
  misc_RNA (1)...(19): siRNA sense strand
gaaaagagaacauguugaa

SEQ ID NO: 292428 - RNA, 19 nt, Homo sapiens
  misc_RNA (1)...(19): siRNA sense strand
acagaaggguuaagaacuu

SEQ ID NO: 292429 - RNA, 19 nt, Homo sapiens
  misc_RNA (1)...(19): siRNA sense strand
cacuuaagcucucaaaugu

SEQ ID NO: 292430 - RNA, 19 nt, Homo sapiens
  misc_RNA (1)...(19): siRNA sense strand
ccacuuaagcucucaaaug

SEQ ID NO: 292431 - RNA, 19 nt, Homo sapiens
  misc_RNA (1)...(19): siRNA sense strand
uuacagcaaugccuccuuu

SEQ ID NO: 292432 - RNA, 19 nt, Homo sapiens
  misc_RNA (1)...(19): siRNA sense strand
aaugaaggcucucuugaug

SEQ ID NO: 292433 - RNA, 19 nt, Homo sapiens
  misc_RNA (1)...(19): siRNA sense strand
aggcauacuucauaaauug

SEQ ID NO: 292434 - RNA, 19 nt, Homo sapiens
  misc_RNA (1)...(19): siRNA sense strand
acaguggguucauggaaua

SEQ ID NO: 292435 - RNA, 19 nt, Homo sapiens
  misc_RNA (1)...(19): siRNA sense strand
gagcauaugauaccacgaa

SEQ ID NO: 292436 - RNA, 19 nt, Homo sapiens
  misc_RNA (1)...(19): siRNA sense strand
caaaugaugucagcaugau

SEQ ID NO: 292437 - RNA, 19 nt, Homo sapiens
  misc_RNA (1)...(19): siRNA sense strand
gaagaacaugggaaugauu

SEQ ID NO: 292438 - RNA, 19 nt, Homo sapiens
  misc_RNA (1)...(19): siRNA sense strand
cauugaaacauccaacuua

SEQ ID NO: 292439 - RNA, 19 nt, Homo sapiens
  misc_RNA (1)...(19): siRNA sense strand
gguaugcguucucucaaga

SEQ ID NO: 292440 - RNA, 19 nt, Homo sapiens
  misc_RNA (1)...(19): siRNA sense strand
gaacuuguaccgcucugaa

SEQ ID NO: 292441 - RNA, 19 nt, Homo sapiens
  misc_RNA (1)...(19): siRNA sense strand
gaucugguuugccuuuguu

SEQ ID NO: 292442 - RNA, 19 nt, Homo sapiens
  misc_RNA (1)...(19): siRNA sense strand
gcaaaugaugucagcauga

SEQ ID NO: 292443 - RNA, 19 nt, Homo sapiens
  misc_RNA (1)...(19): siRNA sense strand
ugaaggcucucuugaugga

SEQ ID NO: 292444 - RNA, 19 nt, Homo sapiens
  misc_RNA (1)...(19): siRNA sense strand
gcaaaggagcugacacugu

SEQ ID NO: 292445 - RNA, 19 nt, Homo sapiens
  misc_RNA (1)...(19): siRNA sense strand
ggaaacauaaggcuugaug

SEQ ID NO: 292446 - RNA, 19 nt, Homo sapiens
  misc_RNA (1)...(19): siRNA sense strand
cagcuuauugguuacauua

SEQ ID NO: 292447 - RNA, 19 nt, Homo sapiens
  misc_RNA (1)...(19): siRNA sense strand
gaagaaccacgugaacuug

SEQ ID NO: 292448 - RNA, 19 nt, Homo sapiens
  misc_RNA (1)...(19): siRNA sense strand
gcagccauguuguucaguu

SEQ ID NO: 292449 - RNA, 19 nt, Homo sapiens
  misc_RNA (1)...(19): siRNA sense strand
ggaaaacccucaaauaugc

SEQ ID NO: 292450 - RNA, 19 nt, Homo sapiens
  misc_RNA (1)...(19): siRNA sense strand
agacugguaucucaaucua

SEQ ID NO: 292451 - RNA, 19 nt, Homo sapiens
  misc_RNA (1)...(19): siRNA sense strand
aaacauuggucgaugaagu

SEQ ID NO: 292452 - RNA, 19 nt, Homo sapiens
  misc_RNA (1)...(19): siRNA sense strand
uggaugggcuuguuauuca

SEQ ID NO: 292453 - RNA, 19 nt, Homo sapiens
  misc_RNA (1)...(19): siRNA sense strand
gauuggagacaucauauug

SEQ ID NO: 292454 - RNA, 19 nt, Homo sapiens
  misc_RNA (1)...(19): siRNA sense strand
ccaagugcaucuuauacug

SEQ ID NO: 292455 - RNA, 19 nt, Homo sapiens
  misc_RNA (1)...(19): siRNA sense strand
ucucauuccuaucagcuua

SEQ ID NO: 292456 - RNA, 19 nt, Homo sapiens
  misc_RNA (1)...(19): siRNA sense strand
ggucagagcagccaagcaa

SEQ ID NO: 292457 - RNA, 19 nt, Homo sapiens
  misc_RNA (1)...(19): siRNA sense strand
gagcaguuguacuuggaaa

SEQ ID NO: 292458 - RNA, 19 nt, Homo sapiens
  misc_RNA (1)...(19): siRNA sense strand
uuugaaagaugguguauag

SEQ ID NO: 292459 - RNA, 19 nt, Homo sapiens
  misc_RNA (1)...(19): siRNA sense strand
cuccauagcucaguucaaa

SEQ ID NO: 292460 - RNA, 19 nt, Homo sapiens
  misc_RNA (1)...(19): siRNA sense strand
gcacguugguguugguauc

SEQ ID NO: 292461 - RNA, 19 nt, Homo sapiens
  misc_RNA (1)...(19): siRNA sense strand
ccugcaaacuguugaagaa

SEQ ID NO: 292462 - RNA, 19 nt, Homo sapiens
  misc_RNA (1)...(19): siRNA sense strand
aaugaaagcagacaucaaa

SEQ ID NO: 292463 - RNA, 19 nt, Homo sapiens
  misc_RNA (1)...(19): siRNA sense strand
gcagaacaggcuacucaaa

SEQ ID NO: 292464 - RNA, 19 nt, Homo sapiens
  misc_RNA (1)...(19): siRNA sense strand
gcaggaagaaagauaugaa

SEQ ID NO: 292465 - RNA, 19 nt, Homo sapiens
  misc_RNA (1)...(19): siRNA sense strand
uccuuuaacucuuggaaua

SEQ ID NO: 292466 - RNA, 19 nt, Homo sapiens
  misc_RNA (1)...(19): siRNA sense strand
ucaaauaugccuuaaccuu

SEQ ID NO: 292467 - RNA, 19 nt, Homo sapiens
  misc_RNA (1)...(19): siRNA sense strand
gaaagcagcugaagacauu

SEQ ID NO: 292468 - RNA, 19 nt, Homo sapiens
  misc_RNA (1)...(19): siRNA sense strand
gcaagugguuugucaguaa

SEQ ID NO: 292469 - RNA, 19 nt, Homo sapiens
  misc_RNA (1)...(19): siRNA sense strand
ugacugaacugcuucugaa

SEQ ID NO: 292470 - RNA, 19 nt, Homo sapiens
  misc_RNA (1)...(19): siRNA sense strand
cgagucagguguacaaugu

SEQ ID NO: 292471 - RNA, 19 nt, Homo sapiens
  misc_RNA (1)...(19): siRNA sense strand
ucagacauguucaucaaug

SEQ ID NO: 292472 - RNA, 19 nt, Homo sapiens
  misc_RNA (1)...(19): siRNA sense strand
ggacagguacccaccauuc

SEQ ID NO: 292473 - RNA, 19 nt, Homo sapiens
  misc_RNA (1)...(19): siRNA sense strand
caagugguuugucaguaaa

SEQ ID NO: 292474 - RNA, 19 nt, Homo sapiens
  misc_RNA (1)...(19): siRNA sense strand
gagcgucccauacauuaaa

SEQ ID NO: 292475 - RNA, 19 nt, Homo sapiens
  misc_RNA (1)...(19): siRNA sense strand
caagagcgucccauacauu

SEQ ID NO: 292476 - RNA, 19 nt, Homo sapiens
  misc_RNA (1)...(19): siRNA sense strand
caagaaagacgggaacuuc

SEQ ID NO: 292477 - RNA, 19 nt, Homo sapiens
  misc_RNA (1)...(19): siRNA sense strand
gaaaacagacucagacaug

SEQ ID NO: 292478 - RNA, 19 nt, Homo sapiens
  misc_RNA (1)...(19): siRNA sense strand
gaagaugagauugauguau

SEQ ID NO: 292479 - RNA, 19 nt, Homo sapiens
  misc_RNA (1)...(19): siRNA sense strand
ggcaggcucuagagaauuc

SEQ ID NO: 292480 - RNA, 19 nt, Homo sapiens
  misc_RNA (1)...(19): siRNA sense strand
cagucuaaauccuuucaaa

SEQ ID NO: 292481 - RNA, 19 nt, Homo sapiens
  misc_RNA (1)...(19): siRNA sense strand
ggaaagcagcugaagacau

SEQ ID NO: 292482 - RNA, 19 nt, Homo sapiens
  misc_RNA (1)...(19): siRNA sense strand
acucagacauguucaucaa

SEQ ID NO: 292483 - RNA, 19 nt, Homo sapiens
  misc_RNA (1)...(19): siRNA sense strand
aagagcgucccauacauua

SEQ ID NO: 292484 - RNA, 19 nt, Homo sapiens
  misc_RNA (1)...(19): siRNA sense strand
ccaagagcgucccauacau

SEQ ID NO: 292485 - RNA, 19 nt, Homo sapiens
  misc_RNA (1)...(19): siRNA sense strand
uguacagucuaaauccuuu

SEQ ID NO: 292486 - RNA, 19 nt, Homo sapiens
  misc_RNA (1)...(19): siRNA sense strand
ucaaugaguuucccaucag

SEQ ID NO: 292487 - RNA, 19 nt, Homo sapiens
  misc_RNA (1)...(19): siRNA sense strand
agacgucuauuacaaucug

SEQ ID NO: 292488 - RNA, 19 nt, Homo sapiens
  misc_RNA (1)...(19): siRNA sense strand
gaagauuguccgccugucu

SEQ ID NO: 292489 - RNA, 19 nt, Homo sapiens
  misc_RNA (1)...(19): siRNA sense strand
gggacauuauccagaagga

SEQ ID NO: 292490 - RNA, 19 nt, Homo sapiens
  misc_RNA (1)...(19): siRNA sense strand
cgaagaugagauugaugua

SEQ ID NO: 292491 - RNA, 19 nt, Homo sapiens
  misc_RNA (1)...(19): siRNA sense strand
ggugaccucaucccacaaa

SEQ ID NO: 292492 - RNA, 19 nt, Homo sapiens
  misc_RNA (1)...(19): siRNA sense strand
ggacucucuuggacuacug

SEQ ID NO: 292493 - RNA, 19 nt, Homo sapiens
  misc_RNA (1)...(19): siRNA sense strand
cggcaccggcuacguguuu

SEQ ID NO: 292494 - RNA, 19 nt, Homo sapiens
  misc_RNA (1)...(19): siRNA sense strand
ucacuggcuucuugaaacu

SEQ ID NO: 292495 - RNA, 19 nt, Homo sapiens
  misc_RNA (1)...(19): siRNA sense strand
ccucaucccacaaacaguu

SEQ ID NO: 292496 - RNA, 19 nt, Homo sapiens
  misc_RNA (1)...(19): siRNA sense strand
uagcauguacagucuaaau

SEQ ID NO: 292497 - RNA, 19 nt, Homo sapiens
  misc_RNA (1)...(19): siRNA sense strand
ccgaagaugagauugaugu

SEQ ID NO: 292498 - RNA, 19 nt, Homo sapiens
  misc_RNA (1)...(19): siRNA sense strand
gaagggaaagcagcugaag

SEQ ID NO: 292499 - RNA, 19 nt, Homo sapiens
  misc_RNA (1)...(19): siRNA sense strand
guauauuugccuucugguu

SEQ ID NO: 292500 - RNA, 19 nt, Homo sapiens
  misc_RNA (1)...(19): siRNA sense strand
auuacaaucugacccugaa

SEQ ID NO: 292501 - RNA, 19 nt, Homo sapiens
  misc_RNA (1)...(19): siRNA sense strand
cuaucugacugaacugcuu

SEQ ID NO: 292502 - RNA, 19 nt, Homo sapiens
  misc_RNA (1)...(19): siRNA sense strand
gauguauauuugccuucug

SEQ ID NO: 292503 - RNA, 19 nt, Homo sapiens
  misc_RNA (1)...(19): siRNA sense strand
uguacaaugucuccaagag

SEQ ID NO: 292504 - RNA, 19 nt, Homo sapiens
  misc_RNA (1)...(19): siRNA sense strand
gaccucaucccacaaacag

SEQ ID NO: 292505 - RNA, 19 nt, Homo sapiens
  misc_RNA (1)...(19): siRNA sense strand
gcgagucagguguacaaug

SEQ ID NO: 292506 - RNA, 19 nt, Homo sapiens
  misc_RNA (1)...(19): siRNA sense strand
uccuuaagcucccagauac

SEQ ID NO: 292507 - RNA, 19 nt, Homo sapiens
  misc_RNA (1)...(19): siRNA sense strand
caugaugggcauagaaugg

SEQ ID NO: 292508 - RNA, 19 nt, Homo sapiens
  misc_RNA (1)...(19): siRNA sense strand
cuggcaggcucuagagaau

SEQ ID NO: 292509 - RNA, 19 nt, Homo sapiens
  misc_RNA (1)...(19): siRNA sense strand
uuccuuaagcucccagaua

SEQ ID NO: 292510 - RNA, 19 nt, Homo sapiens
  misc_RNA (1)...(19): siRNA sense strand
ggacuacuggcaggcucua

SEQ ID NO: 292511 - RNA, 19 nt, Homo sapiens
  misc_RNA (1)...(19): siRNA sense strand
cucggacucucuuggacua

SEQ ID NO: 292512 - RNA, 19 nt, Homo sapiens
  misc_RNA (1)...(19): siRNA sense strand
ucuccaagagcgucccaua

SEQ ID NO: 292513 - RNA, 19 nt, Homo sapiens
  misc_RNA (1)...(19): siRNA sense strand
gggcucuuuguuuguauuu

SEQ ID NO: 292514 - RNA, 19 nt, Homo sapiens
  misc_RNA (1)...(19): siRNA sense strand
gcauguacagucuaaaucc

SEQ ID NO: 292515 - RNA, 19 nt, Homo sapiens
  misc_RNA (1)...(19): siRNA sense strand
uccaagagcgucccauaca

SEQ ID NO: 292516 - RNA, 19 nt, Homo sapiens
  misc_RNA (1)...(19): siRNA sense strand
agcaagugguuugucagua

SEQ ID NO: 292517 - RNA, 19 nt, Homo sapiens
  misc_RNA (1)...(19): siRNA sense strand
ccauucagcaagugguuug

SEQ ID NO: 292518 - RNA, 19 nt, Homo sapiens
  misc_RNA (1)...(19): siRNA sense strand
gaaagcagcugaagacauu

SEQ ID NO: 292519 - RNA, 19 nt, Homo sapiens
  misc_RNA (1)...(19): siRNA sense strand
gcaagugguuugucaguaa

SEQ ID NO: 292520 - RNA, 19 nt, Homo sapiens
  misc_RNA (1)...(19): siRNA sense strand
ugacugaacugcuucugaa

SEQ ID NO: 292521 - RNA, 19 nt, Homo sapiens
  misc_RNA (1)...(19): siRNA sense strand
cgagucagguguacaaugu

SEQ ID NO: 292522 - RNA, 19 nt, Homo sapiens
  misc_RNA (1)...(19): siRNA sense strand
ucagacauguucaucaaug

SEQ ID NO: 292523 - RNA, 19 nt, Homo sapiens
  misc_RNA (1)...(19): siRNA sense strand
ggacagguacccaccauuc

SEQ ID NO: 292524 - RNA, 19 nt, Homo sapiens
  misc_RNA (1)...(19): siRNA sense strand
caagugguuugucaguaaa

SEQ ID NO: 292525 - RNA, 19 nt, Homo sapiens
  misc_RNA (1)...(19): siRNA sense strand
gagcgucccauacauuaaa

SEQ ID NO: 292526 - RNA, 19 nt, Homo sapiens
  misc_RNA (1)...(19): siRNA sense strand
caagagcgucccauacauu

SEQ ID NO: 292527 - RNA, 19 nt, Homo sapiens
  misc_RNA (1)...(19): siRNA sense strand
caagaaagacgggaacuuc

SEQ ID NO: 292528 - RNA, 19 nt, Homo sapiens
  misc_RNA (1)...(19): siRNA sense strand
gaaaacagacucagacaug

SEQ ID NO: 292529 - RNA, 19 nt, Homo sapiens
  misc_RNA (1)...(19): siRNA sense strand
gaagaugagauugauguau

SEQ ID NO: 292530 - RNA, 19 nt, Homo sapiens
  misc_RNA (1)...(19): siRNA sense strand
ggcaggcucuagagaauuc

SEQ ID NO: 292531 - RNA, 19 nt, Homo sapiens
  misc_RNA (1)...(19): siRNA sense strand
cagucuaaauccuuucaaa

SEQ ID NO: 292532 - RNA, 19 nt, Homo sapiens
  misc_RNA (1)...(19): siRNA sense strand
ggaaagcagcugaagacau

SEQ ID NO: 292533 - RNA, 19 nt, Homo sapiens
  misc_RNA (1)...(19): siRNA sense strand
acucagacauguucaucaa

SEQ ID NO: 292534 - RNA, 19 nt, Homo sapiens
  misc_RNA (1)...(19): siRNA sense strand
aagagcgucccauacauua

SEQ ID NO: 292535 - RNA, 19 nt, Homo sapiens
  misc_RNA (1)...(19): siRNA sense strand
ccaagagcgucccauacau

SEQ ID NO: 292536 - RNA, 19 nt, Homo sapiens
  misc_RNA (1)...(19): siRNA sense strand
uguacagucuaaauccuuu

SEQ ID NO: 292537 - RNA, 19 nt, Homo sapiens
  misc_RNA (1)...(19): siRNA sense strand
ucaaugaguuucccaucag

SEQ ID NO: 292538 - RNA, 19 nt, Homo sapiens
  misc_RNA (1)...(19): siRNA sense strand
agacgucuauuacaaucug

SEQ ID NO: 292539 - RNA, 19 nt, Homo sapiens
  misc_RNA (1)...(19): siRNA sense strand
gaagauuguccgccugucu

SEQ ID NO: 292540 - RNA, 19 nt, Homo sapiens
  misc_RNA (1)...(19): siRNA sense strand
gggacauuauccagaagga

SEQ ID NO: 292541 - RNA, 19 nt, Homo sapiens
  misc_RNA (1)...(19): siRNA sense strand
cgaagaugagauugaugua

SEQ ID NO: 292542 - RNA, 19 nt, Homo sapiens
  misc_RNA (1)...(19): siRNA sense strand
ggugaccucaucccacaaa

SEQ ID NO: 292543 - RNA, 19 nt, Homo sapiens
  misc_RNA (1)...(19): siRNA sense strand
ggacucucuuggacuacug

SEQ ID NO: 292544 - RNA, 19 nt, Homo sapiens
  misc_RNA (1)...(19): siRNA sense strand
cggcaccggcuacguguuu

SEQ ID NO: 292545 - RNA, 19 nt, Homo sapiens
  misc_RNA (1)...(19): siRNA sense strand
ucacuggcuucuugaaacu

SEQ ID NO: 292546 - RNA, 19 nt, Homo sapiens
  misc_RNA (1)...(19): siRNA sense strand
ccucaucccacaaacaguu

SEQ ID NO: 292547 - RNA, 19 nt, Homo sapiens
  misc_RNA (1)...(19): siRNA sense strand
uagcauguacagucuaaau

SEQ ID NO: 292548 - RNA, 19 nt, Homo sapiens
  misc_RNA (1)...(19): siRNA sense strand
ccgaagaugagauugaugu

SEQ ID NO: 292549 - RNA, 19 nt, Homo sapiens
  misc_RNA (1)...(19): siRNA sense strand
gaagggaaagcagcugaag

SEQ ID NO: 292550 - RNA, 19 nt, Homo sapiens
  misc_RNA (1)...(19): siRNA sense strand
guauauuugccuucugguu

SEQ ID NO: 292551 - RNA, 19 nt, Homo sapiens
  misc_RNA (1)...(19): siRNA sense strand
auuacaaucugacccugaa

SEQ ID NO: 292552 - RNA, 19 nt, Homo sapiens
  misc_RNA (1)...(19): siRNA sense strand
cuaucugacugaacugcuu

SEQ ID NO: 292553 - RNA, 19 nt, Homo sapiens
  misc_RNA (1)...(19): siRNA sense strand
gauguauauuugccuucug

SEQ ID NO: 292554 - RNA, 19 nt, Homo sapiens
  misc_RNA (1)...(19): siRNA sense strand
uguacaaugucuccaagag

SEQ ID NO: 292555 - RNA, 19 nt, Homo sapiens
  misc_RNA (1)...(19): siRNA sense strand
gaccucaucccacaaacag

SEQ ID NO: 292556 - RNA, 19 nt, Homo sapiens
  misc_RNA (1)...(19): siRNA sense strand
gcgagucagguguacaaug

SEQ ID NO: 292557 - RNA, 19 nt, Homo sapiens
  misc_RNA (1)...(19): siRNA sense strand
uccuuaagcucccagauac

SEQ ID NO: 292558 - RNA, 19 nt, Homo sapiens
  misc_RNA (1)...(19): siRNA sense strand
caugaugggcauagaaugg

SEQ ID NO: 292559 - RNA, 19 nt, Homo sapiens
  misc_RNA (1)...(19): siRNA sense strand
cuggcaggcucuagagaau

SEQ ID NO: 292560 - RNA, 19 nt, Homo sapiens
  misc_RNA (1)...(19): siRNA sense strand
uuccuuaagcucccagaua

SEQ ID NO: 292561 - RNA, 19 nt, Homo sapiens
  misc_RNA (1)...(19): siRNA sense strand
ggacuacuggcaggcucua

SEQ ID NO: 292562 - RNA, 19 nt, Homo sapiens
  misc_RNA (1)...(19): siRNA sense strand
cucggacucucuuggacua

SEQ ID NO: 292563 - RNA, 19 nt, Homo sapiens
  misc_RNA (1)...(19): siRNA sense strand
ucuccaagagcgucccaua

SEQ ID NO: 292564 - RNA, 19 nt, Homo sapiens
  misc_RNA (1)...(19): siRNA sense strand
gggcucuuuguuuguauuu

SEQ ID NO: 292565 - RNA, 19 nt, Homo sapiens
  misc_RNA (1)...(19): siRNA sense strand
gcauguacagucuaaaucc

SEQ ID NO: 292566 - RNA, 19 nt, Homo sapiens
  misc_RNA (1)...(19): siRNA sense strand
uccaagagcgucccauaca

SEQ ID NO: 292567 - RNA, 19 nt, Homo sapiens
  misc_RNA (1)...(19): siRNA sense strand
agcaagugguuugucagua

SEQ ID NO: 292568 - RNA, 19 nt, Homo sapiens
  misc_RNA (1)...(19): siRNA sense strand
ccauucagcaagugguuug

SEQ ID NO: 292569 - RNA, 19 nt, Homo sapiens
  misc_RNA (1)...(19): siRNA sense strand
gaaagcagcugaagacauu

SEQ ID NO: 292570 - RNA, 19 nt, Homo sapiens
  misc_RNA (1)...(19): siRNA sense strand
gcaagugguuugucaguaa

SEQ ID NO: 292571 - RNA, 19 nt, Homo sapiens
  misc_RNA (1)...(19): siRNA sense strand
ugacugaacugcuucugaa

SEQ ID NO: 292572 - RNA, 19 nt, Homo sapiens
  misc_RNA (1)...(19): siRNA sense strand
cgagucagguguacaaugu

SEQ ID NO: 292573 - RNA, 19 nt, Homo sapiens
  misc_RNA (1)...(19): siRNA sense strand
ucagacauguucaucaaug

SEQ ID NO: 292574 - RNA, 19 nt, Homo sapiens
  misc_RNA (1)...(19): siRNA sense strand
ggacagguacccaccauuc

SEQ ID NO: 292575 - RNA, 19 nt, Homo sapiens
  misc_RNA (1)...(19): siRNA sense strand
caagugguuugucaguaaa

SEQ ID NO: 292576 - RNA, 19 nt, Homo sapiens
  misc_RNA (1)...(19): siRNA sense strand
gagcgucccauacauuaaa

SEQ ID NO: 292577 - RNA, 19 nt, Homo sapiens
  misc_RNA (1)...(19): siRNA sense strand
caagagcgucccauacauu

SEQ ID NO: 292578 - RNA, 19 nt, Homo sapiens
  misc_RNA (1)...(19): siRNA sense strand
caagaaagacgggaacuuc

SEQ ID NO: 292579 - RNA, 19 nt, Homo sapiens
  misc_RNA (1)...(19): siRNA sense strand
gaaaacagacucagacaug

SEQ ID NO: 292580 - RNA, 19 nt, Homo sapiens
  misc_RNA (1)...(19): siRNA sense strand
gaagaugagauugauguau

SEQ ID NO: 292581 - RNA, 19 nt, Homo sapiens
  misc_RNA (1)...(19): siRNA sense strand
ggcaggcucuagagaauuc

SEQ ID NO: 292582 - RNA, 19 nt, Homo sapiens
  misc_RNA (1)...(19): siRNA sense strand
cagucuaaauccuuucaaa

SEQ ID NO: 292583 - RNA, 19 nt, Homo sapiens
  misc_RNA (1)...(19): siRNA sense strand
ggaaagcagcugaagacau

SEQ ID NO: 292584 - RNA, 19 nt, Homo sapiens
  misc_RNA (1)...(19): siRNA sense strand
acucagacauguucaucaa

SEQ ID NO: 292585 - RNA, 19 nt, Homo sapiens
  misc_RNA (1)...(19): siRNA sense strand
aagagcgucccauacauua

SEQ ID NO: 292586 - RNA, 19 nt, Homo sapiens
  misc_RNA (1)...(19): siRNA sense strand
ccaagagcgucccauacau

SEQ ID NO: 292587 - RNA, 19 nt, Homo sapiens
  misc_RNA (1)...(19): siRNA sense strand
uguacagucuaaauccuuu

SEQ ID NO: 292588 - RNA, 19 nt, Homo sapiens
  misc_RNA (1)...(19): siRNA sense strand
ucaaugaguuucccaucag

SEQ ID NO: 292589 - RNA, 19 nt, Homo sapiens
  misc_RNA (1)...(19): siRNA sense strand
agacgucuauuacaaucug

SEQ ID NO: 292590 - RNA, 19 nt, Homo sapiens
  misc_RNA (1)...(19): siRNA sense strand
gaagauuguccgccugucu

SEQ ID NO: 292591 - RNA, 19 nt, Homo sapiens
  misc_RNA (1)...(19): siRNA sense strand
gggacauuauccagaagga

SEQ ID NO: 292592 - RNA, 19 nt, Homo sapiens
  misc_RNA (1)...(19): siRNA sense strand
cgaagaugagauugaugua

SEQ ID NO: 292593 - RNA, 19 nt, Homo sapiens
  misc_RNA (1)...(19): siRNA sense strand
ggugaccucaucccacaaa

SEQ ID NO: 292594 - RNA, 19 nt, Homo sapiens
  misc_RNA (1)...(19): siRNA sense strand
ggacucucuuggacuacug

SEQ ID NO: 292595 - RNA, 19 nt, Homo sapiens
  misc_RNA (1)...(19): siRNA sense strand
cggcaccggcuacguguuu

SEQ ID NO: 292596 - RNA, 19 nt, Homo sapiens
  misc_RNA (1)...(19): siRNA sense strand
ucacuggcuucuugaaacu

SEQ ID NO: 292597 - RNA, 19 nt, Homo sapiens
  misc_RNA (1)...(19): siRNA sense strand
ccucaucccacaaacaguu

SEQ ID NO: 292598 - RNA, 19 nt, Homo sapiens
  misc_RNA (1)...(19): siRNA sense strand
uagcauguacagucuaaau

SEQ ID NO: 292599 - RNA, 19 nt, Homo sapiens
  misc_RNA (1)...(19): siRNA sense strand
ccgaagaugagauugaugu

SEQ ID NO: 292600 - RNA, 19 nt, Homo sapiens
  misc_RNA (1)...(19): siRNA sense strand
gaagggaaagcagcugaag

SEQ ID NO: 292601 - RNA, 19 nt, Homo sapiens
  misc_RNA (1)...(19): siRNA sense strand
guauauuugccuucugguu

SEQ ID NO: 292602 - RNA, 19 nt, Homo sapiens
  misc_RNA (1)...(19): siRNA sense strand
auuacaaucugacccugaa

SEQ ID NO: 292603 - RNA, 19 nt, Homo sapiens
  misc_RNA (1)...(19): siRNA sense strand
cuaucugacugaacugcuu

SEQ ID NO: 292604 - RNA, 19 nt, Homo sapiens
  misc_RNA (1)...(19): siRNA sense strand
gauguauauuugccuucug

SEQ ID NO: 292605 - RNA, 19 nt, Homo sapiens
  misc_RNA (1)...(19): siRNA sense strand
uguacaaugucuccaagag

SEQ ID NO: 292606 - RNA, 19 nt, Homo sapiens
  misc_RNA (1)...(19): siRNA sense strand
gaccucaucccacaaacag

SEQ ID NO: 292607 - RNA, 19 nt, Homo sapiens
  misc_RNA (1)...(19): siRNA sense strand
gcgagucagguguacaaug

SEQ ID NO: 292608 - RNA, 19 nt, Homo sapiens
  misc_RNA (1)...(19): siRNA sense strand
uccuuaagcucccagauac

SEQ ID NO: 292609 - RNA, 19 nt, Homo sapiens
  misc_RNA (1)...(19): siRNA sense strand
caugaugggcauagaaugg

SEQ ID NO: 292610 - RNA, 19 nt, Homo sapiens
  misc_RNA (1)...(19): siRNA sense strand
cuggcaggcucuagagaau

SEQ ID NO: 292611 - RNA, 19 nt, Homo sapiens
  misc_RNA (1)...(19): siRNA sense strand
uuccuuaagcucccagaua

SEQ ID NO: 292612 - RNA, 19 nt, Homo sapiens
  misc_RNA (1)...(19): siRNA sense strand
ggacuacuggcaggcucua

SEQ ID NO: 292613 - RNA, 19 nt, Homo sapiens
  misc_RNA (1)...(19): siRNA sense strand
cucggacucucuuggacua

SEQ ID NO: 292614 - RNA, 19 nt, Homo sapiens
  misc_RNA (1)...(19): siRNA sense strand
ucuccaagagcgucccaua

SEQ ID NO: 292615 - RNA, 19 nt, Homo sapiens
  misc_RNA (1)...(19): siRNA sense strand
gggcucuuuguuuguauuu

SEQ ID NO: 292616 - RNA, 19 nt, Homo sapiens
  misc_RNA (1)...(19): siRNA sense strand
gcauguacagucuaaaucc

SEQ ID NO: 292617 - RNA, 19 nt, Homo sapiens
  misc_RNA (1)...(19): siRNA sense strand
uccaagagcgucccauaca

SEQ ID NO: 292618 - RNA, 19 nt, Homo sapiens
  misc_RNA (1)...(19): siRNA sense strand
agcaagugguuugucagua

SEQ ID NO: 292619 - RNA, 19 nt, Homo sapiens
  misc_RNA (1)...(19): siRNA sense strand
ccauucagcaagugguuug

SEQ ID NO: 292620 - RNA, 19 nt, Homo sapiens
  misc_RNA (1)...(19): siRNA sense strand
gaaagcagcugaagacauu

SEQ ID NO: 292621 - RNA, 19 nt, Homo sapiens
  misc_RNA (1)...(19): siRNA sense strand
gcaagugguuugucaguaa

SEQ ID NO: 292622 - RNA, 19 nt, Homo sapiens
  misc_RNA (1)...(19): siRNA sense strand
ugacugaacugcuucugaa

SEQ ID NO: 292623 - RNA, 19 nt, Homo sapiens
  misc_RNA (1)...(19): siRNA sense strand
cgagucagguguacaaugu

SEQ ID NO: 292624 - RNA, 19 nt, Homo sapiens
  misc_RNA (1)...(19): siRNA sense strand
ucagacauguucaucaaug

SEQ ID NO: 292625 - RNA, 19 nt, Homo sapiens
  misc_RNA (1)...(19): siRNA sense strand
ggacagguacccaccauuc

SEQ ID NO: 292626 - RNA, 19 nt, Homo sapiens
  misc_RNA (1)...(19): siRNA sense strand
caagugguuugucaguaaa

SEQ ID NO: 292627 - RNA, 19 nt, Homo sapiens
  misc_RNA (1)...(19): siRNA sense strand
gagcgucccauacauuaaa

SEQ ID NO: 292628 - RNA, 19 nt, Homo sapiens
  misc_RNA (1)...(19): siRNA sense strand
caagagcgucccauacauu

SEQ ID NO: 292629 - RNA, 19 nt, Homo sapiens
  misc_RNA (1)...(19): siRNA sense strand
caagaaagacgggaacuuc

SEQ ID NO: 292630 - RNA, 19 nt, Homo sapiens
  misc_RNA (1)...(19): siRNA sense strand
gaaaacagacucagacaug

SEQ ID NO: 292631 - RNA, 19 nt, Homo sapiens
  misc_RNA (1)...(19): siRNA sense strand
gaagaugagauugauguau

SEQ ID NO: 292632 - RNA, 19 nt, Homo sapiens
  misc_RNA (1)...(19): siRNA sense strand
ggcaggcucuagagaauuc

SEQ ID NO: 292633 - RNA, 19 nt, Homo sapiens
  misc_RNA (1)...(19): siRNA sense strand
cagucuaaauccuuucaaa

SEQ ID NO: 292634 - RNA, 19 nt, Homo sapiens
  misc_RNA (1)...(19): siRNA sense strand
ggaaagcagcugaagacau

SEQ ID NO: 292635 - RNA, 19 nt, Homo sapiens
  misc_RNA (1)...(19): siRNA sense strand
acucagacauguucaucaa

SEQ ID NO: 292636 - RNA, 19 nt, Homo sapiens
  misc_RNA (1)...(19): siRNA sense strand
aagagcgucccauacauua

SEQ ID NO: 292637 - RNA, 19 nt, Homo sapiens
  misc_RNA (1)...(19): siRNA sense strand
ccaagagcgucccauacau

SEQ ID NO: 292638 - RNA, 19 nt, Homo sapiens
  misc_RNA (1)...(19): siRNA sense strand
uguacagucuaaauccuuu

SEQ ID NO: 292639 - RNA, 19 nt, Homo sapiens
  misc_RNA (1)...(19): siRNA sense strand
ucaaugaguuucccaucag

SEQ ID NO: 292640 - RNA, 19 nt, Homo sapiens
  misc_RNA (1)...(19): siRNA sense strand
agacgucuauuacaaucug

SEQ ID NO: 292641 - RNA, 19 nt, Homo sapiens
  misc_RNA (1)...(19): siRNA sense strand
gaagauuguccgccugucu

SEQ ID NO: 292642 - RNA, 19 nt, Homo sapiens
  misc_RNA (1)...(19): siRNA sense strand
gggacauuauccagaagga

SEQ ID NO: 292643 - RNA, 19 nt, Homo sapiens
  misc_RNA (1)...(19): siRNA sense strand
cgaagaugagauugaugua

SEQ ID NO: 292644 - RNA, 19 nt, Homo sapiens
  misc_RNA (1)...(19): siRNA sense strand
ggugaccucaucccacaaa

SEQ ID NO: 292645 - RNA, 19 nt, Homo sapiens
  misc_RNA (1)...(19): siRNA sense strand
ggacucucuuggacuacug

SEQ ID NO: 292646 - RNA, 19 nt, Homo sapiens
  misc_RNA (1)...(19): siRNA sense strand
cggcaccggcuacguguuu

SEQ ID NO: 292647 - RNA, 19 nt, Homo sapiens
  misc_RNA (1)...(19): siRNA sense strand
ucacuggcuucuugaaacu

SEQ ID NO: 292648 - RNA, 19 nt, Homo sapiens
  misc_RNA (1)...(19): siRNA sense strand
ccucaucccacaaacaguu

SEQ ID NO: 292649 - RNA, 19 nt, Homo sapiens
  misc_RNA (1)...(19): siRNA sense strand
uagcauguacagucuaaau

SEQ ID NO: 292650 - RNA, 19 nt, Homo sapiens
  misc_RNA (1)...(19): siRNA sense strand
ccgaagaugagauugaugu

SEQ ID NO: 292651 - RNA, 19 nt, Homo sapiens
  misc_RNA (1)...(19): siRNA sense strand
gaagggaaagcagcugaag

SEQ ID NO: 292652 - RNA, 19 nt, Homo sapiens
  misc_RNA (1)...(19): siRNA sense strand
guauauuugccuucugguu

SEQ ID NO: 292653 - RNA, 19 nt, Homo sapiens
  misc_RNA (1)...(19): siRNA sense strand
auuacaaucugacccugaa

SEQ ID NO: 292654 - RNA, 19 nt, Homo sapiens
  misc_RNA (1)...(19): siRNA sense strand
cuaucugacugaacugcuu

SEQ ID NO: 292655 - RNA, 19 nt, Homo sapiens
  misc_RNA (1)...(19): siRNA sense strand
gauguauauuugccuucug

SEQ ID NO: 292656 - RNA, 19 nt, Homo sapiens
  misc_RNA (1)...(19): siRNA sense strand
uguacaaugucuccaagag

SEQ ID NO: 292657 - RNA, 19 nt, Homo sapiens
  misc_RNA (1)...(19): siRNA sense strand
gaccucaucccacaaacag

SEQ ID NO: 292658 - RNA, 19 nt, Homo sapiens
  misc_RNA (1)...(19): siRNA sense strand
gcgagucagguguacaaug

SEQ ID NO: 292659 - RNA, 19 nt, Homo sapiens
  misc_RNA (1)...(19): siRNA sense strand
uccuuaagcucccagauac

SEQ ID NO: 292660 - RNA, 19 nt, Homo sapiens
  misc_RNA (1)...(19): siRNA sense strand
caugaugggcauagaaugg

SEQ ID NO: 292661 - RNA, 19 nt, Homo sapiens
  misc_RNA (1)...(19): siRNA sense strand
cuggcaggcucuagagaau

SEQ ID NO: 292662 - RNA, 19 nt, Homo sapiens
  misc_RNA (1)...(19): siRNA sense strand
uuccuuaagcucccagaua

SEQ ID NO: 292663 - RNA, 19 nt, Homo sapiens
  misc_RNA (1)...(19): siRNA sense strand
ggacuacuggcaggcucua

SEQ ID NO: 292664 - RNA, 19 nt, Homo sapiens
  misc_RNA (1)...(19): siRNA sense strand
cucggacucucuuggacua

SEQ ID NO: 292665 - RNA, 19 nt, Homo sapiens
  misc_RNA (1)...(19): siRNA sense strand
ucuccaagagcgucccaua

SEQ ID NO: 292666 - RNA, 19 nt, Homo sapiens
  misc_RNA (1)...(19): siRNA sense strand
gggcucuuuguuuguauuu

SEQ ID NO: 292667 - RNA, 19 nt, Homo sapiens
  misc_RNA (1)...(19): siRNA sense strand
gcauguacagucuaaaucc

SEQ ID NO: 292668 - RNA, 19 nt, Homo sapiens
  misc_RNA (1)...(19): siRNA sense strand
uccaagagcgucccauaca

SEQ ID NO: 292669 - RNA, 19 nt, Homo sapiens
  misc_RNA (1)...(19): siRNA sense strand
agcaagugguuugucagua

SEQ ID NO: 292670 - RNA, 19 nt, Homo sapiens
  misc_RNA (1)...(19): siRNA sense strand
ccauucagcaagugguuug

SEQ ID NO: 292671 - RNA, 19 nt, Homo sapiens
  misc_RNA (1)...(19): siRNA sense strand
gaaagcagcugaagacauu

SEQ ID NO: 292672 - RNA, 19 nt, Homo sapiens
  misc_RNA (1)...(19): siRNA sense strand
gcaagugguuugucaguaa

SEQ ID NO: 292673 - RNA, 19 nt, Homo sapiens
  misc_RNA (1)...(19): siRNA sense strand
ugacugaacugcuucugaa

SEQ ID NO: 292674 - RNA, 19 nt, Homo sapiens
  misc_RNA (1)...(19): siRNA sense strand
cgagucagguguacaaugu

SEQ ID NO: 292675 - RNA, 19 nt, Homo sapiens
  misc_RNA (1)...(19): siRNA sense strand
ucagacauguucaucaaug

SEQ ID NO: 292676 - RNA, 19 nt, Homo sapiens
  misc_RNA (1)...(19): siRNA sense strand
ggacagguacccaccauuc

SEQ ID NO: 292677 - RNA, 19 nt, Homo sapiens
  misc_RNA (1)...(19): siRNA sense strand
caagugguuugucaguaaa

SEQ ID NO: 292678 - RNA, 19 nt, Homo sapiens
  misc_RNA (1)...(19): siRNA sense strand
gagcgucccauacauuaaa

SEQ ID NO: 292679 - RNA, 19 nt, Homo sapiens
  misc_RNA (1)...(19): siRNA sense strand
caagagcgucccauacauu

SEQ ID NO: 292680 - RNA, 19 nt, Homo sapiens
  misc_RNA (1)...(19): siRNA sense strand
caagaaagacgggaacuuc

SEQ ID NO: 292681 - RNA, 19 nt, Homo sapiens
  misc_RNA (1)...(19): siRNA sense strand
gaaaacagacucagacaug

SEQ ID NO: 292682 - RNA, 19 nt, Homo sapiens
  misc_RNA (1)...(19): siRNA sense strand
gaagaugagauugauguau

SEQ ID NO: 292683 - RNA, 19 nt, Homo sapiens
  misc_RNA (1)...(19): siRNA sense strand
ggcaggcucuagagaauuc

SEQ ID NO: 292684 - RNA, 19 nt, Homo sapiens
  misc_RNA (1)...(19): siRNA sense strand
cagucuaaauccuuucaaa

SEQ ID NO: 292685 - RNA, 19 nt, Homo sapiens
  misc_RNA (1)...(19): siRNA sense strand
ggaaagcagcugaagacau

SEQ ID NO: 292686 - RNA, 19 nt, Homo sapiens
  misc_RNA (1)...(19): siRNA sense strand
acucagacauguucaucaa

SEQ ID NO: 292687 - RNA, 19 nt, Homo sapiens
  misc_RNA (1)...(19): siRNA sense strand
aagagcgucccauacauua

SEQ ID NO: 292688 - RNA, 19 nt, Homo sapiens
  misc_RNA (1)...(19): siRNA sense strand
ccaagagcgucccauacau

SEQ ID NO: 292689 - RNA, 19 nt, Homo sapiens
  misc_RNA (1)...(19): siRNA sense strand
uguacagucuaaauccuuu

SEQ ID NO: 292690 - RNA, 19 nt, Homo sapiens
  misc_RNA (1)...(19): siRNA sense strand
ucaaugaguuucccaucag

SEQ ID NO: 292691 - RNA, 19 nt, Homo sapiens
  misc_RNA (1)...(19): siRNA sense strand
agacgucuauuacaaucug

SEQ ID NO: 292692 - RNA, 19 nt, Homo sapiens
  misc_RNA (1)...(19): siRNA sense strand
gaagauuguccgccugucu

SEQ ID NO: 292693 - RNA, 19 nt, Homo sapiens
  misc_RNA (1)...(19): siRNA sense strand
gggacauuauccagaagga

SEQ ID NO: 292694 - RNA, 19 nt, Homo sapiens
  misc_RNA (1)...(19): siRNA sense strand
cgaagaugagauugaugua

SEQ ID NO: 292695 - RNA, 19 nt, Homo sapiens
  misc_RNA (1)...(19): siRNA sense strand
ggugaccucaucccacaaa

SEQ ID NO: 292696 - RNA, 19 nt, Homo sapiens
  misc_RNA (1)...(19): siRNA sense strand
ggacucucuuggacuacug

SEQ ID NO: 292697 - RNA, 19 nt, Homo sapiens
  misc_RNA (1)...(19): siRNA sense strand
cggcaccggcuacguguuu

SEQ ID NO: 292698 - RNA, 19 nt, Homo sapiens
  misc_RNA (1)...(19): siRNA sense strand
ucacuggcuucuugaaacu

SEQ ID NO: 292699 - RNA, 19 nt, Homo sapiens
  misc_RNA (1)...(19): siRNA sense strand
ccucaucccacaaacaguu

SEQ ID NO: 292700 - RNA, 19 nt, Homo sapiens
  misc_RNA (1)...(19): siRNA sense strand
uagcauguacagucuaaau

SEQ ID NO: 292701 - RNA, 19 nt, Homo sapiens
  misc_RNA (1)...(19): siRNA sense strand
ccgaagaugagauugaugu

SEQ ID NO: 292702 - RNA, 19 nt, Homo sapiens
  misc_RNA (1)...(19): siRNA sense strand
gaagggaaagcagcugaag

SEQ ID NO: 292703 - RNA, 19 nt, Homo sapiens
  misc_RNA (1)...(19): siRNA sense strand
guauauuugccuucugguu

SEQ ID NO: 292704 - RNA, 19 nt, Homo sapiens
  misc_RNA (1)...(19): siRNA sense strand
auuacaaucugacccugaa

SEQ ID NO: 292705 - RNA, 19 nt, Homo sapiens
  misc_RNA (1)...(19): siRNA sense strand
cuaucugacugaacugcuu

SEQ ID NO: 292706 - RNA, 19 nt, Homo sapiens
  misc_RNA (1)...(19): siRNA sense strand
gauguauauuugccuucug

SEQ ID NO: 292707 - RNA, 19 nt, Homo sapiens
  misc_RNA (1)...(19): siRNA sense strand
uguacaaugucuccaagag

SEQ ID NO: 292708 - RNA, 19 nt, Homo sapiens
  misc_RNA (1)...(19): siRNA sense strand
gaccucaucccacaaacag

SEQ ID NO: 292709 - RNA, 19 nt, Homo sapiens
  misc_RNA (1)...(19): siRNA sense strand
gcgagucagguguacaaug

SEQ ID NO: 292710 - RNA, 19 nt, Homo sapiens
  misc_RNA (1)...(19): siRNA sense strand
uccuuaagcucccagauac

SEQ ID NO: 292711 - RNA, 19 nt, Homo sapiens
  misc_RNA (1)...(19): siRNA sense strand
caugaugggcauagaaugg

SEQ ID NO: 292712 - RNA, 19 nt, Homo sapiens
  misc_RNA (1)...(19): siRNA sense strand
cuggcaggcucuagagaau

SEQ ID NO: 292713 - RNA, 19 nt, Homo sapiens
  misc_RNA (1)...(19): siRNA sense strand
uuccuuaagcucccagaua

SEQ ID NO: 292714 - RNA, 19 nt, Homo sapiens
  misc_RNA (1)...(19): siRNA sense strand
ggacuacuggcaggcucua

SEQ ID NO: 292715 - RNA, 19 nt, Homo sapiens
  misc_RNA (1)...(19): siRNA sense strand
cucggacucucuuggacua

SEQ ID NO: 292716 - RNA, 19 nt, Homo sapiens
  misc_RNA (1)...(19): siRNA sense strand
ucuccaagagcgucccaua

SEQ ID NO: 292717 - RNA, 19 nt, Homo sapiens
  misc_RNA (1)...(19): siRNA sense strand
gggcucuuuguuuguauuu

SEQ ID NO: 292718 - RNA, 19 nt, Homo sapiens
  misc_RNA (1)...(19): siRNA sense strand
gcauguacagucuaaaucc

SEQ ID NO: 292719 - RNA, 19 nt, Homo sapiens
  misc_RNA (1)...(19): siRNA sense strand
uccaagagcgucccauaca

SEQ ID NO: 292720 - RNA, 19 nt, Homo sapiens
  misc_RNA (1)...(19): siRNA sense strand
agcaagugguuugucagua

SEQ ID NO: 292721 - RNA, 19 nt, Homo sapiens
  misc_RNA (1)...(19): siRNA sense strand
ccauucagcaagugguuug

SEQ ID NO: 292722 - RNA, 19 nt, Homo sapiens
  misc_RNA (1)...(19): siRNA sense strand
uaacaucauuggcaucaua

SEQ ID NO: 292723 - RNA, 19 nt, Homo sapiens
  misc_RNA (1)...(19): siRNA sense strand
gcaagcaaauugaucacuu

SEQ ID NO: 292724 - RNA, 19 nt, Homo sapiens
  misc_RNA (1)...(19): siRNA sense strand
uaugacccauuccggauua

SEQ ID NO: 292725 - RNA, 19 nt, Homo sapiens
  misc_RNA (1)...(19): siRNA sense strand
ugacacagcagaauauuuc

SEQ ID NO: 292726 - RNA, 19 nt, Homo sapiens
  misc_RNA (1)...(19): siRNA sense strand
caagcaaauugaucacuuc

SEQ ID NO: 292727 - RNA, 19 nt, Homo sapiens
  misc_RNA (1)...(19): siRNA sense strand
ugaucgagguguucaaaug

SEQ ID NO: 292728 - RNA, 19 nt, Homo sapiens
  misc_RNA (1)...(19): siRNA sense strand
aaaggucugugcaagcaaa

SEQ ID NO: 292729 - RNA, 19 nt, Homo sapiens
  misc_RNA (1)...(19): siRNA sense strand
ucaaaggucugugcaagca

SEQ ID NO: 292730 - RNA, 19 nt, Homo sapiens
  misc_RNA (1)...(19): siRNA sense strand
gagaaccugcugccuagaa

SEQ ID NO: 292731 - RNA, 19 nt, Homo sapiens
  misc_RNA (1)...(19): siRNA sense strand
ucccagaggaugcagauua

SEQ ID NO: 292732 - RNA, 19 nt, Homo sapiens
  misc_RNA (1)...(19): siRNA sense strand
ggaugcagauuacgaagcu

SEQ ID NO: 292733 - RNA, 19 nt, Homo sapiens
  misc_RNA (1)...(19): siRNA sense strand
ucauuggcaucauagugua

SEQ ID NO: 292734 - RNA, 19 nt, Homo sapiens
  misc_RNA (1)...(19): siRNA sense strand
caucauaguguacauaucu

SEQ ID NO: 292735 - RNA, 19 nt, Homo sapiens
  misc_RNA (1)...(19): siRNA sense strand
ucacaacuguauccagaag

SEQ ID NO: 292736 - RNA, 19 nt, Homo sapiens
  misc_RNA (1)...(19): siRNA sense strand
agaagggaauuucaaaggu

SEQ ID NO: 292737 - RNA, 19 nt, Homo sapiens
  misc_RNA (1)...(19): siRNA sense strand
aaagaacgaggaaguuaug

SEQ ID NO: 292738 - RNA, 19 nt, Homo sapiens
  misc_RNA (1)...(19): siRNA sense strand
uaacagcuuccuccagguu

SEQ ID NO: 292739 - RNA, 19 nt, Homo sapiens
  misc_RNA (1)...(19): siRNA sense strand
acaacuguauccagaagga

SEQ ID NO: 292740 - RNA, 19 nt, Homo sapiens
  misc_RNA (1)...(19): siRNA sense strand
ggucugugcaagcaaauug

SEQ ID NO: 292741 - RNA, 19 nt, Homo sapiens
  misc_RNA (1)...(19): siRNA sense strand
ggucugaguaacaucauug

SEQ ID NO: 292742 - RNA, 19 nt, Homo sapiens
  misc_RNA (1)...(19): siRNA sense strand
gcuguuugaucgagguguu

SEQ ID NO: 292743 - RNA, 19 nt, Homo sapiens
  misc_RNA (1)...(19): siRNA sense strand
gcaggucugaguaacauca

SEQ ID NO: 292744 - RNA, 19 nt, Homo sapiens
  misc_RNA (1)...(19): siRNA sense strand
ccuagaagggaauuucaaa

SEQ ID NO: 292745 - RNA, 19 nt, Homo sapiens
  misc_RNA (1)...(19): siRNA sense strand
cuacaaaacucgacacaac

SEQ ID NO: 292746 - RNA, 19 nt, Homo sapiens
  misc_RNA (1)...(19): siRNA sense strand
gcaucauaguguacauauc

SEQ ID NO: 292747 - RNA, 19 nt, Homo sapiens
  misc_RNA (1)...(19): siRNA sense strand
gaggaaguuaugacccauu

SEQ ID NO: 292748 - RNA, 19 nt, Homo sapiens
  misc_RNA (1)...(19): siRNA sense strand
ucauacggcugguccuucu

SEQ ID NO: 292749 - RNA, 19 nt, Homo sapiens
  misc_RNA (1)...(19): siRNA sense strand
gaaccgacuauuggcucua

SEQ ID NO: 292750 - RNA, 19 nt, Homo sapiens
  misc_RNA (1)...(19): siRNA sense strand
ggcaucauaguguacauau

SEQ ID NO: 292751 - RNA, 19 nt, Homo sapiens
  misc_RNA (1)...(19): siRNA sense strand
caucauuggcaucauagug

SEQ ID NO: 292752 - RNA, 19 nt, Homo sapiens
  misc_RNA (1)...(19): siRNA sense strand
ccaaaagugucagugagaa

SEQ ID NO: 292753 - RNA, 19 nt, Homo sapiens
  misc_RNA (1)...(19): siRNA sense strand
cggcugguccuucuacuuc

SEQ ID NO: 292754 - RNA, 19 nt, Homo sapiens
  misc_RNA (1)...(19): siRNA sense strand
aagaauaguuacucauacg

SEQ ID NO: 292755 - RNA, 19 nt, Homo sapiens
  misc_RNA (1)...(19): siRNA sense strand
gaucgagguguucaaaugc

SEQ ID NO: 292756 - RNA, 19 nt, Homo sapiens
  misc_RNA (1)...(19): siRNA sense strand
uagaagggaauuucaaagg

SEQ ID NO: 292757 - RNA, 19 nt, Homo sapiens
  misc_RNA (1)...(19): siRNA sense strand
aggaaguuaugacccauuc

SEQ ID NO: 292758 - RNA, 19 nt, Homo sapiens
  misc_RNA (1)...(19): siRNA sense strand
gagaaugaaaccagcaaaa

SEQ ID NO: 292759 - RNA, 19 nt, Homo sapiens
  misc_RNA (1)...(19): siRNA sense strand
aaagugucagugagaauga

SEQ ID NO: 292760 - RNA, 19 nt, Homo sapiens
  misc_RNA (1)...(19): siRNA sense strand
cccagaggaugcagauuac

SEQ ID NO: 292761 - RNA, 19 nt, Homo sapiens
  misc_RNA (1)...(19): siRNA sense strand
ccuccagguucacaacugu

SEQ ID NO: 292762 - RNA, 19 nt, Homo sapiens
  misc_RNA (1)...(19): siRNA sense strand
cauuccggauuauggagaa

SEQ ID NO: 292763 - RNA, 19 nt, Homo sapiens
  misc_RNA (1)...(19): siRNA sense strand
guguacauaucugccaaug

SEQ ID NO: 292764 - RNA, 19 nt, Homo sapiens
  misc_RNA (1)...(19): siRNA sense strand
cugcaggucugaguaacau

SEQ ID NO: 292765 - RNA, 19 nt, Homo sapiens
  misc_RNA (1)...(19): siRNA sense strand
cagaggaugcagauuacga

SEQ ID NO: 292766 - RNA, 19 nt, Homo sapiens
  misc_RNA (1)...(19): siRNA sense strand
cgagguguucaaaugcuuu

SEQ ID NO: 292767 - RNA, 19 nt, Homo sapiens
  misc_RNA (1)...(19): siRNA sense strand
ugagugugauucugcuuuu

SEQ ID NO: 292768 - RNA, 19 nt, Homo sapiens
  misc_RNA (1)...(19): siRNA sense strand
gagaacaccucaucccaua

SEQ ID NO: 292769 - RNA, 19 nt, Homo sapiens
  misc_RNA (1)...(19): siRNA sense strand
gaagaccgcugaugagcuu

SEQ ID NO: 292770 - RNA, 19 nt, Homo sapiens
  misc_RNA (1)...(19): siRNA sense strand
uguaacgacuuccuuauua

SEQ ID NO: 292771 - RNA, 19 nt, Homo sapiens
  misc_RNA (1)...(19): siRNA sense strand
ucaaugcugucuccaauaa

SEQ ID NO: 292772 - RNA, 19 nt, Homo sapiens
  misc_RNA (1)...(19): siRNA sense strand
ggacaaccacgucuucuuu

SEQ ID NO: 292773 - RNA, 19 nt, Homo sapiens
  misc_RNA (1)...(19): siRNA sense strand
guaacgacuuccuuauuaa

SEQ ID NO: 292774 - RNA, 19 nt, Homo sapiens
  misc_RNA (1)...(19): siRNA sense strand
gcaccgccgugaucacuaa

SEQ ID NO: 292775 - RNA, 19 nt, Homo sapiens
  misc_RNA (1)...(19): siRNA sense strand
ggagaaguauuucaagaag

SEQ ID NO: 292776 - RNA, 19 nt, Homo sapiens
  misc_RNA (1)...(19): siRNA sense strand
caacaucuaucgcuaugau

SEQ ID NO: 292777 - RNA, 19 nt, Homo sapiens
  misc_RNA (1)...(19): siRNA sense strand
guucaaugauggaguguuu

SEQ ID NO: 292778 - RNA, 19 nt, Homo sapiens
  misc_RNA (1)...(19): siRNA sense strand
ggaugaagcucucagacau

SEQ ID NO: 292779 - RNA, 19 nt, Homo sapiens
  misc_RNA (1)...(19): siRNA sense strand
gauggaguguuugcuuaua

SEQ ID NO: 292780 - RNA, 19 nt, Homo sapiens
  misc_RNA (1)...(19): siRNA sense strand
gguaugacauggaugacaa

SEQ ID NO: 292781 - RNA, 19 nt, Homo sapiens
  misc_RNA (1)...(19): siRNA sense strand
ggugguuggugaaagguua

SEQ ID NO: 292782 - RNA, 19 nt, Homo sapiens
  misc_RNA (1)...(19): siRNA sense strand
ggaaaucaaucugcagaag

SEQ ID NO: 292783 - RNA, 19 nt, Homo sapiens
  misc_RNA (1)...(19): siRNA sense strand
gaagacagccuggcgguau

SEQ ID NO: 292784 - RNA, 19 nt, Homo sapiens
  misc_RNA (1)...(19): siRNA sense strand
ucagcgcacucaucaauug

SEQ ID NO: 292785 - RNA, 19 nt, Homo sapiens
  misc_RNA (1)...(19): siRNA sense strand
ggaugugucccaugcuaua

SEQ ID NO: 292786 - RNA, 19 nt, Homo sapiens
  misc_RNA (1)...(19): siRNA sense strand
guaguggacugcuuugaca

SEQ ID NO: 292787 - RNA, 19 nt, Homo sapiens
  misc_RNA (1)...(19): siRNA sense strand
acaaaggacuacaccauca

SEQ ID NO: 292788 - RNA, 19 nt, Homo sapiens
  misc_RNA (1)...(19): siRNA sense strand
gaacaccucaucccauaca

SEQ ID NO: 292789 - RNA, 19 nt, Homo sapiens
  misc_RNA (1)...(19): siRNA sense strand
caaagagguaucagacgua

SEQ ID NO: 292790 - RNA, 19 nt, Homo sapiens
  misc_RNA (1)...(19): siRNA sense strand
gaaggaggaucgggagaag

SEQ ID NO: 292791 - RNA, 19 nt, Homo sapiens
  misc_RNA (1)...(19): siRNA sense strand
ccaauaagacgcugguguu

SEQ ID NO: 292792 - RNA, 19 nt, Homo sapiens
  misc_RNA (1)...(19): siRNA sense strand
gggagaaguauuucaagaa

SEQ ID NO: 292793 - RNA, 19 nt, Homo sapiens
  misc_RNA (1)...(19): siRNA sense strand
caugcuauaugcuccauug

SEQ ID NO: 292794 - RNA, 19 nt, Homo sapiens
  misc_RNA (1)...(19): siRNA sense strand
gagaaguauuucaagaagu

SEQ ID NO: 292795 - RNA, 19 nt, Homo sapiens
  misc_RNA (1)...(19): siRNA sense strand
cuucuuggcugagcuguuu

SEQ ID NO: 292796 - RNA, 19 nt, Homo sapiens
  misc_RNA (1)...(19): siRNA sense strand
caauccaaaugccuucuug

SEQ ID NO: 292797 - RNA, 19 nt, Homo sapiens
  misc_RNA (1)...(19): siRNA sense strand
gcucagcgcacucaucaau

SEQ ID NO: 292798 - RNA, 19 nt, Homo sapiens
  misc_RNA (1)...(19): siRNA sense strand
gcaagacgaccaccucagu

SEQ ID NO: 292799 - RNA, 19 nt, Homo sapiens
  misc_RNA (1)...(19): siRNA sense strand
cuucuggacuacuucuaua

SEQ ID NO: 292800 - RNA, 19 nt, Homo sapiens
  misc_RNA (1)...(19): siRNA sense strand
agaggaaacgcaaagagua

SEQ ID NO: 292801 - RNA, 19 nt, Homo sapiens
  misc_RNA (1)...(19): siRNA sense strand
gauugagaguguccugaug

SEQ ID NO: 292802 - RNA, 19 nt, Homo sapiens
  misc_RNA (1)...(19): siRNA sense strand
ggaaggaggaucgggagaa

SEQ ID NO: 292803 - RNA, 19 nt, Homo sapiens
  misc_RNA (1)...(19): siRNA sense strand
cgggagaaguauuucaaga

SEQ ID NO: 292804 - RNA, 19 nt, Homo sapiens
  misc_RNA (1)...(19): siRNA sense strand
cauacaacccugauugaga

SEQ ID NO: 292805 - RNA, 19 nt, Homo sapiens
  misc_RNA (1)...(19): siRNA sense strand
ucucaaugcugucuccaau

SEQ ID NO: 292806 - RNA, 19 nt, Homo sapiens
  misc_RNA (1)...(19): siRNA sense strand
acagcaagguguuuguaug

SEQ ID NO: 292807 - RNA, 19 nt, Homo sapiens
  misc_RNA (1)...(19): siRNA sense strand
aaaucaaucugcagaaggu

SEQ ID NO: 292808 - RNA, 19 nt, Homo sapiens
  misc_RNA (1)...(19): siRNA sense strand
caauaagacgcugguguuu

SEQ ID NO: 292809 - RNA, 19 nt, Homo sapiens
  misc_RNA (1)...(19): siRNA sense strand
guggugaucuccgagcaaa

SEQ ID NO: 292810 - RNA, 19 nt, Homo sapiens
  misc_RNA (1)...(19): siRNA sense strand
aaugcugucuccaauaaga

SEQ ID NO: 292811 - RNA, 19 nt, Homo sapiens
  misc_RNA (1)...(19): siRNA sense strand
caacccugauugagagugu

SEQ ID NO: 292812 - RNA, 19 nt, Homo sapiens
  misc_RNA (1)...(19): siRNA sense strand
ggacggugguuggugaaag

SEQ ID NO: 292813 - RNA, 19 nt, Homo sapiens
  misc_RNA (1)...(19): siRNA sense strand
augauggaguguuugcuua

SEQ ID NO: 292814 - RNA, 19 nt, Homo sapiens
  misc_RNA (1)...(19): siRNA sense strand
gcuggucgcuacaucuaca

SEQ ID NO: 292815 - RNA, 19 nt, Homo sapiens
  misc_RNA (1)...(19): siRNA sense strand
caacacaccacgccuucga

SEQ ID NO: 292816 - RNA, 19 nt, Homo sapiens
  misc_RNA (1)...(19): siRNA sense strand
ggagacagcaagguguuug

SEQ ID NO: 292817 - RNA, 19 nt, Homo sapiens
  misc_RNA (1)...(19): siRNA sense strand
uaucagacguagcuuacuc

SEQ ID NO: 292818 - RNA, 19 nt, Homo sapiens
  misc_RNA (1)...(19): siRNA sense strand
auaagacgcugguguuugc

SEQ ID NO: 292819 - RNA, 19 nt, Homo sapiens
  misc_RNA (1)...(19): siRNA sense strand
gacaacuccuggaccaagu

SEQ ID NO: 292820 - RNA, 19 nt, Homo sapiens
  misc_RNA (1)...(19): siRNA sense strand
gggacaacuuccacuacug

SEQ ID NO: 292821 - RNA, 19 nt, Homo sapiens
  misc_RNA (1)...(19): siRNA sense strand
ucucagacaugcccuaucg

SEQ ID NO: 292822 - RNA, 19 nt, Homo sapiens
  misc_RNA (1)...(19): siRNA sense strand
ugcagaaccugaacagaca

SEQ ID NO: 292823 - RNA, 19 nt, Homo sapiens
  misc_RNA (1)...(19): siRNA sense strand
gcauggagaacaccucauc

SEQ ID NO: 292824 - RNA, 19 nt, Homo sapiens
  misc_RNA (1)...(19): siRNA sense strand
aggaggaucgggagaagua

SEQ ID NO: 292825 - RNA, 19 nt, Homo sapiens
  misc_RNA (1)...(19): siRNA sense strand
caaaggacuacaccaucaa

SEQ ID NO: 292826 - RNA, 19 nt, Homo sapiens
  misc_RNA (1)...(19): siRNA sense strand
cagcaagguguuuguaugu

SEQ ID NO: 292827 - RNA, 19 nt, Homo sapiens
  misc_RNA (1)...(19): siRNA sense strand
gaugaagcucucagacaug

SEQ ID NO: 292828 - RNA, 19 nt, Homo sapiens
  misc_RNA (1)...(19): siRNA sense strand
gacaaccacgucuucuuug

SEQ ID NO: 292829 - RNA, 19 nt, Homo sapiens
  misc_RNA (1)...(19): siRNA sense strand
acaugaagaccgcugauga

SEQ ID NO: 292830 - RNA, 19 nt, Homo sapiens
  misc_RNA (1)...(19): siRNA sense strand
gaggaucgggagaaguauu

SEQ ID NO: 292831 - RNA, 19 nt, Homo sapiens
  misc_RNA (1)...(19): siRNA sense strand
aggagaaccuguggaugaa

SEQ ID NO: 292832 - RNA, 19 nt, Homo sapiens
  misc_RNA (1)...(19): siRNA sense strand
gaggaaacgcaaagaguac

SEQ ID NO: 292833 - RNA, 19 nt, Homo sapiens
  misc_RNA (1)...(19): siRNA sense strand
ggacuacaccaucaaucca

SEQ ID NO: 292834 - RNA, 19 nt, Homo sapiens
  misc_RNA (1)...(19): siRNA sense strand
caaagaguacugggacaug

SEQ ID NO: 292835 - RNA, 19 nt, Homo sapiens
  misc_RNA (1)...(19): siRNA sense strand
gcaaagaguacugggacau

SEQ ID NO: 292836 - RNA, 19 nt, Homo sapiens
  misc_RNA (1)...(19): siRNA sense strand
gacagcaagguguuuguau

SEQ ID NO: 292837 - RNA, 19 nt, Homo sapiens
  misc_RNA (1)...(19): siRNA sense strand
gccuucgaguucacuguaa

SEQ ID NO: 292838 - RNA, 19 nt, Homo sapiens
  misc_RNA (1)...(19): siRNA sense strand
gugccugucuugcccaaca

SEQ ID NO: 292839 - RNA, 19 nt, Homo sapiens
  misc_RNA (1)...(19): siRNA sense strand
gcaccacugagcagauuuc

SEQ ID NO: 292840 - RNA, 19 nt, Homo sapiens
  misc_RNA (1)...(19): siRNA sense strand
uggcaccacugagcagauu

SEQ ID NO: 292841 - RNA, 19 nt, Homo sapiens
  misc_RNA (1)...(19): siRNA sense strand
uuacaucaaucucaaugcu

SEQ ID NO: 292842 - RNA, 19 nt, Homo sapiens
  misc_RNA (1)...(19): siRNA sense strand
acaccacgccuucgaguuc

SEQ ID NO: 292843 - RNA, 19 nt, Homo sapiens
  misc_RNA (1)...(19): siRNA sense strand
agacaaaggacuacaccau

SEQ ID NO: 292844 - RNA, 19 nt, Homo sapiens
  misc_RNA (1)...(19): siRNA sense strand
guagcuuacucuggcauuc

SEQ ID NO: 292845 - RNA, 19 nt, Homo sapiens
  misc_RNA (1)...(19): siRNA sense strand
aagcuaccuugcaagauuc

SEQ ID NO: 292846 - RNA, 19 nt, Homo sapiens
  misc_RNA (1)...(19): siRNA sense strand
gacgugguccaguguauca

SEQ ID NO: 292847 - RNA, 19 nt, Homo sapiens
  misc_RNA (1)...(19): siRNA sense strand
gacggugguuggugaaagg

SEQ ID NO: 292848 - RNA, 19 nt, Homo sapiens
  misc_RNA (1)...(19): siRNA sense strand
aguguuugcuuauaucauc

SEQ ID NO: 292849 - RNA, 19 nt, Homo sapiens
  misc_RNA (1)...(19): siRNA sense strand
cagaggaaacgcaaagagu

SEQ ID NO: 292850 - RNA, 19 nt, Homo sapiens
  misc_RNA (1)...(19): siRNA sense strand
gguaucagacguagcuuac

SEQ ID NO: 292851 - RNA, 19 nt, Homo sapiens
  misc_RNA (1)...(19): siRNA sense strand
ccaccucagugccugucuu

SEQ ID NO: 292852 - RNA, 19 nt, Homo sapiens
  misc_RNA (1)...(19): siRNA sense strand
uccaacaucuaucgcuaug

SEQ ID NO: 292853 - RNA, 19 nt, Homo sapiens
  misc_RNA (1)...(19): siRNA sense strand
ggaguguuugcuuauauca

SEQ ID NO: 292854 - RNA, 19 nt, Homo sapiens
  misc_RNA (1)...(19): siRNA sense strand
cauccucgguggccagaag

SEQ ID NO: 292855 - RNA, 19 nt, Homo sapiens
  misc_RNA (1)...(19): siRNA sense strand
ucaccauugacaccaguua

SEQ ID NO: 292856 - RNA, 19 nt, Homo sapiens
  misc_RNA (1)...(19): siRNA sense strand
cuguccaccuguuaucuuu

SEQ ID NO: 292857 - RNA, 19 nt, Homo sapiens
  misc_RNA (1)...(19): siRNA sense strand
aggcaucuguacauuguca

SEQ ID NO: 292858 - RNA, 19 nt, Homo sapiens
  misc_RNA (1)...(19): siRNA sense strand
gaucgggagaaguauuuca

SEQ ID NO: 292859 - RNA, 19 nt, Homo sapiens
  misc_RNA (1)...(19): siRNA sense strand
uuggaugugucccaugcua

SEQ ID NO: 292860 - RNA, 19 nt, Homo sapiens
  misc_RNA (1)...(19): siRNA sense strand
gcggcaagguggugaucuc

SEQ ID NO: 292861 - RNA, 19 nt, Homo sapiens
  misc_RNA (1)...(19): siRNA sense strand
ggaaacgcaaagaguacug

SEQ ID NO: 292862 - RNA, 19 nt, Homo sapiens
  misc_RNA (1)...(19): siRNA sense strand
cacuguaacgacuuccuua

SEQ ID NO: 292863 - RNA, 19 nt, Homo sapiens
  misc_RNA (1)...(19): siRNA sense strand
uguccugccugcugucuag

SEQ ID NO: 292864 - RNA, 19 nt, Homo sapiens
  misc_RNA (1)...(19): siRNA sense strand
agacagcaagguguuugua

SEQ ID NO: 292865 - RNA, 19 nt, Homo sapiens
  misc_RNA (1)...(19): siRNA sense strand
agccucaucuccagcaaug

SEQ ID NO: 292866 - RNA, 19 nt, Homo sapiens
  misc_RNA (1)...(19): siRNA sense strand
gcccacggccaguucaaug

SEQ ID NO: 292867 - RNA, 19 nt, Homo sapiens
  misc_RNA (1)...(19): siRNA sense strand
acuacaccaucaauccaaa

SEQ ID NO: 292868 - RNA, 19 nt, Homo sapiens
  misc_RNA (1)...(19): siRNA sense strand
gcacaugaccugacauuua

SEQ ID NO: 292869 - RNA, 19 nt, Homo sapiens
  misc_RNA (1)...(19): siRNA sense strand
gaagaauacugaacgaauu

SEQ ID NO: 292870 - RNA, 19 nt, Homo sapiens
  misc_RNA (1)...(19): siRNA sense strand
gagaaacacggaaauauua

SEQ ID NO: 292871 - RNA, 19 nt, Homo sapiens
  misc_RNA (1)...(19): siRNA sense strand
cgagaagacuuugaaauaa

SEQ ID NO: 292872 - RNA, 19 nt, Homo sapiens
  misc_RNA (1)...(19): siRNA sense strand
gaacgaauuuaugcaauga

SEQ ID NO: 292873 - RNA, 19 nt, Homo sapiens
  misc_RNA (1)...(19): siRNA sense strand
gaucgaggcucucugaaga

SEQ ID NO: 292874 - RNA, 19 nt, Homo sapiens
  misc_RNA (1)...(19): siRNA sense strand
gagcgaugcuguuugauga

SEQ ID NO: 292875 - RNA, 19 nt, Homo sapiens
  misc_RNA (1)...(19): siRNA sense strand
ccgaagagcucgaggcuuu

SEQ ID NO: 292876 - RNA, 19 nt, Homo sapiens
  misc_RNA (1)...(19): siRNA sense strand
uuacacagcuggugaaaga

SEQ ID NO: 292877 - RNA, 19 nt, Homo sapiens
  misc_RNA (1)...(19): siRNA sense strand
gaaggcagcuuugacauca

SEQ ID NO: 292878 - RNA, 19 nt, Homo sapiens
  misc_RNA (1)...(19): siRNA sense strand
ggaaucaggucgugcaugu

SEQ ID NO: 292879 - RNA, 19 nt, Homo sapiens
  misc_RNA (1)...(19): siRNA sense strand
gaauugagauccaaaauga

SEQ ID NO: 292880 - RNA, 19 nt, Homo sapiens
  misc_RNA (1)...(19): siRNA sense strand
cgagugggcuaaaccauuu

SEQ ID NO: 292881 - RNA, 19 nt, Homo sapiens
  misc_RNA (1)...(19): siRNA sense strand
aaagagcgaugcuguuuga

SEQ ID NO: 292882 - RNA, 19 nt, Homo sapiens
  misc_RNA (1)...(19): siRNA sense strand
gaaagcaaacuaaaggauu

SEQ ID NO: 292883 - RNA, 19 nt, Homo sapiens
  misc_RNA (1)...(19): siRNA sense strand
gaagaagggcucuauguca

SEQ ID NO: 292884 - RNA, 19 nt, Homo sapiens
  misc_RNA (1)...(19): siRNA sense strand
gaagaaaucgaacgcuuga

SEQ ID NO: 292885 - RNA, 19 nt, Homo sapiens
  misc_RNA (1)...(19): siRNA sense strand
ugaaacggcugauccuuug

SEQ ID NO: 292886 - RNA, 19 nt, Homo sapiens
  misc_RNA (1)...(19): siRNA sense strand
ggaggugcaugauucagaa

SEQ ID NO: 292887 - RNA, 19 nt, Homo sapiens
  misc_RNA (1)...(19): siRNA sense strand
ucgagaagacuuugaaaua

SEQ ID NO: 292888 - RNA, 19 nt, Homo sapiens
  misc_RNA (1)...(19): siRNA sense strand
ggacgugaauggucauauc

SEQ ID NO: 292889 - RNA, 19 nt, Homo sapiens
  misc_RNA (1)...(19): siRNA sense strand
cuauguggguggugauuua

SEQ ID NO: 292890 - RNA, 19 nt, Homo sapiens
  misc_RNA (1)...(19): siRNA sense strand
guaagaagguacaccagau

SEQ ID NO: 292891 - RNA, 19 nt, Homo sapiens
  misc_RNA (1)...(19): siRNA sense strand
ggugacggccucucucuua

SEQ ID NO: 292892 - RNA, 19 nt, Homo sapiens
  misc_RNA (1)...(19): siRNA sense strand
agaaggaggugcaugauuc

SEQ ID NO: 292893 - RNA, 19 nt, Homo sapiens
  misc_RNA (1)...(19): siRNA sense strand
guuugaagaugaaugauga

SEQ ID NO: 292894 - RNA, 19 nt, Homo sapiens
  misc_RNA (1)...(19): siRNA sense strand
ggcgagagaugcuuagaga

SEQ ID NO: 292895 - RNA, 19 nt, Homo sapiens
  misc_RNA (1)...(19): siRNA sense strand
gaaguggguugggauucua

SEQ ID NO: 292896 - RNA, 19 nt, Homo sapiens
  misc_RNA (1)...(19): siRNA sense strand
auagacagcuggaggauga

SEQ ID NO: 292897 - RNA, 19 nt, Homo sapiens
  misc_RNA (1)...(19): siRNA sense strand
gaagcuaacugcugaaaau

SEQ ID NO: 292898 - RNA, 19 nt, Homo sapiens
  misc_RNA (1)...(19): siRNA sense strand
aauccgagcuggagaagaa

SEQ ID NO: 292899 - RNA, 19 nt, Homo sapiens
  misc_RNA (1)...(19): siRNA sense strand
ugagguugcuguugucaaa

SEQ ID NO: 292900 - RNA, 19 nt, Homo sapiens
  misc_RNA (1)...(19): siRNA sense strand
gccgagauauuccauguau

SEQ ID NO: 292901 - RNA, 19 nt, Homo sapiens
  misc_RNA (1)...(19): siRNA sense strand
gggcacaccugacuacauc

SEQ ID NO: 292902 - RNA, 19 nt, Homo sapiens
  misc_RNA (1)...(19): siRNA sense strand
gagaugcucuauggagaaa

SEQ ID NO: 292903 - RNA, 19 nt, Homo sapiens
  misc_RNA (1)...(19): siRNA sense strand
aaaccgagauaaagaaauc

SEQ ID NO: 292904 - RNA, 19 nt, Homo sapiens
  misc_RNA (1)...(19): siRNA sense strand
cacaugaccugacauuuag

SEQ ID NO: 292905 - RNA, 19 nt, Homo sapiens
  misc_RNA (1)...(19): siRNA sense strand
gcuuagagacccagaauug

SEQ ID NO: 292906 - RNA, 19 nt, Homo sapiens
  misc_RNA (1)...(19): siRNA sense strand
gacuuuggaucauguuuga

SEQ ID NO: 292907 - RNA, 19 nt, Homo sapiens
  misc_RNA (1)...(19): siRNA sense strand
gcuaugagauccagagaac

SEQ ID NO: 292908 - RNA, 19 nt, Homo sapiens
  misc_RNA (1)...(19): siRNA sense strand
agaauggaauagaggauuu

SEQ ID NO: 292909 - RNA, 19 nt, Homo sapiens
  misc_RNA (1)...(19): siRNA sense strand
ugagaaacacggaaauauu

SEQ ID NO: 292910 - RNA, 19 nt, Homo sapiens
  misc_RNA (1)...(19): siRNA sense strand
gcaagcucuuccuguauga

SEQ ID NO: 292911 - RNA, 19 nt, Homo sapiens
  misc_RNA (1)...(19): siRNA sense strand
cauaugcagucgucuguga

SEQ ID NO: 292912 - RNA, 19 nt, Homo sapiens
  misc_RNA (1)...(19): siRNA sense strand
uaaauacgaacgagaaaga

SEQ ID NO: 292913 - RNA, 19 nt, Homo sapiens
  misc_RNA (1)...(19): siRNA sense strand
gaaaucgaacgcuugaaga

SEQ ID NO: 292914 - RNA, 19 nt, Homo sapiens
  misc_RNA (1)...(19): siRNA sense strand
gaaauauuaccuccugguu

SEQ ID NO: 292915 - RNA, 19 nt, Homo sapiens
  misc_RNA (1)...(19): siRNA sense strand
cggaagauauggcgagguu

SEQ ID NO: 292916 - RNA, 19 nt, Homo sapiens
  misc_RNA (1)...(19): siRNA sense strand
cacagaaaguucaaugaga

SEQ ID NO: 292917 - RNA, 19 nt, Homo sapiens
  misc_RNA (1)...(19): siRNA sense strand
aaagcaaacuaaaggauuc

SEQ ID NO: 292918 - RNA, 19 nt, Homo sapiens
  misc_RNA (1)...(19): siRNA sense strand
ucacggauguaucugaaga

SEQ ID NO: 292919 - RNA, 19 nt, Homo sapiens
  misc_RNA (1)...(19): siRNA sense strand
ggaggcaguagguacaaua

SEQ ID NO: 292920 - RNA, 19 nt, Homo sapiens
  misc_RNA (1)...(19): siRNA sense strand
acagaaaguucaaugagau

SEQ ID NO: 292921 - RNA, 19 nt, Homo sapiens
  misc_RNA (1)...(19): siRNA sense strand
gcucaguccuggccucaga

SEQ ID NO: 292922 - RNA, 19 nt, Homo sapiens
  misc_RNA (1)...(19): siRNA sense strand
caacacugcuccucuugca

SEQ ID NO: 292923 - RNA, 19 nt, Homo sapiens
  misc_RNA (1)...(19): siRNA sense strand
ggcucaaacuuccagauuu

SEQ ID NO: 292924 - RNA, 19 nt, Homo sapiens
  misc_RNA (1)...(19): siRNA sense strand
cagcaaauuugaagacaag

SEQ ID NO: 292925 - RNA, 19 nt, Homo sapiens
  misc_RNA (1)...(19): siRNA sense strand
gauaaacucacagcucaaa

SEQ ID NO: 292926 - RNA, 19 nt, Homo sapiens
  misc_RNA (1)...(19): siRNA sense strand
gaaagagcgaugcuguuug

SEQ ID NO: 292927 - RNA, 19 nt, Homo sapiens
  misc_RNA (1)...(19): siRNA sense strand
ccuagaagcaccuuauauu

SEQ ID NO: 292928 - RNA, 19 nt, Homo sapiens
  misc_RNA (1)...(19): siRNA sense strand
uguaugagaugcucuaugg

SEQ ID NO: 292929 - RNA, 19 nt, Homo sapiens
  misc_RNA (1)...(19): siRNA sense strand
ggaaguggguugggauucu

SEQ ID NO: 292930 - RNA, 19 nt, Homo sapiens
  misc_RNA (1)...(19): siRNA sense strand
gcucaaacuuccagauuuu

SEQ ID NO: 292931 - RNA, 19 nt, Homo sapiens
  misc_RNA (1)...(19): siRNA sense strand
acaaguacguggccgaguu

SEQ ID NO: 292932 - RNA, 19 nt, Homo sapiens
  misc_RNA (1)...(19): siRNA sense strand
ugaacgaauuuaugcaaug

SEQ ID NO: 292933 - RNA, 19 nt, Homo sapiens
  misc_RNA (1)...(19): siRNA sense strand
gaccugacauuuagaacca

SEQ ID NO: 292934 - RNA, 19 nt, Homo sapiens
  misc_RNA (1)...(19): siRNA sense strand
gcgaugcuguuugaugaaa

SEQ ID NO: 292935 - RNA, 19 nt, Homo sapiens
  misc_RNA (1)...(19): siRNA sense strand
gcaauucaaaccgagauaa

SEQ ID NO: 292936 - RNA, 19 nt, Homo sapiens
  misc_RNA (1)...(19): siRNA sense strand
gccugcagauggaagcuua

SEQ ID NO: 292937 - RNA, 19 nt, Homo sapiens
  misc_RNA (1)...(19): siRNA sense strand
caccuuauauuccugaugu

SEQ ID NO: 292938 - RNA, 19 nt, Homo sapiens
  misc_RNA (1)...(19): siRNA sense strand
ggauuacauuugccauuca

SEQ ID NO: 292939 - RNA, 19 nt, Homo sapiens
  misc_RNA (1)...(19): siRNA sense strand
ggaacaagcccuacaucuc

SEQ ID NO: 292940 - RNA, 19 nt, Homo sapiens
  misc_RNA (1)...(19): siRNA sense strand
gccaaaagcucaccaguuc

SEQ ID NO: 292941 - RNA, 19 nt, Homo sapiens
  misc_RNA (1)...(19): siRNA sense strand
ugaagaaggaggugcauga

SEQ ID NO: 292942 - RNA, 19 nt, Homo sapiens
  misc_RNA (1)...(19): siRNA sense strand
cgagaaccaccuguacuua

SEQ ID NO: 292943 - RNA, 19 nt, Homo sapiens
  misc_RNA (1)...(19): siRNA sense strand
acacucaacuccaucgaau

SEQ ID NO: 292944 - RNA, 19 nt, Homo sapiens
  misc_RNA (1)...(19): siRNA sense strand
gugaaacggcugauccuuu

SEQ ID NO: 292945 - RNA, 19 nt, Homo sapiens
  misc_RNA (1)...(19): siRNA sense strand
gcucaccaguucagcauca

SEQ ID NO: 292946 - RNA, 19 nt, Homo sapiens
  misc_RNA (1)...(19): siRNA sense strand
ggaaagcaaacuaaaggau

SEQ ID NO: 292947 - RNA, 19 nt, Homo sapiens
  misc_RNA (1)...(19): siRNA sense strand
gauaaauacgaacgagaaa

SEQ ID NO: 292948 - RNA, 19 nt, Homo sapiens
  misc_RNA (1)...(19): siRNA sense strand
aucgaacgcuugaagaaua

SEQ ID NO: 292949 - RNA, 19 nt, Homo sapiens
  misc_RNA (1)...(19): siRNA sense strand
uggaauagaggauuucaaa

SEQ ID NO: 292950 - RNA, 19 nt, Homo sapiens
  misc_RNA (1)...(19): siRNA sense strand
gcacagagacauuaaaccu

SEQ ID NO: 292951 - RNA, 19 nt, Homo sapiens
  misc_RNA (1)...(19): siRNA sense strand
caucggaacagccuacaaa

SEQ ID NO: 292952 - RNA, 19 nt, Homo sapiens
  misc_RNA (1)...(19): siRNA sense strand
agaaagagcgaugcuguuu

SEQ ID NO: 292953 - RNA, 19 nt, Homo sapiens
  misc_RNA (1)...(19): siRNA sense strand
ucgaacgcuugaagaauaa

SEQ ID NO: 292954 - RNA, 19 nt, Homo sapiens
  misc_RNA (1)...(19): siRNA sense strand
gcugagaaacacggaaaua

SEQ ID NO: 292955 - RNA, 19 nt, Homo sapiens
  misc_RNA (1)...(19): siRNA sense strand
ccucagagcgguugaaauc

SEQ ID NO: 292956 - RNA, 19 nt, Homo sapiens
  misc_RNA (1)...(19): siRNA sense strand
gaacuucugcaagcaaaug

SEQ ID NO: 292957 - RNA, 19 nt, Homo sapiens
  misc_RNA (1)...(19): siRNA sense strand
gaaaugcggagagcugaga

SEQ ID NO: 292958 - RNA, 19 nt, Homo sapiens
  misc_RNA (1)...(19): siRNA sense strand
cgaagccauuccacagaaa

SEQ ID NO: 292959 - RNA, 19 nt, Homo sapiens
  misc_RNA (1)...(19): siRNA sense strand
gaagauauggcgagguucu

SEQ ID NO: 292960 - RNA, 19 nt, Homo sapiens
  misc_RNA (1)...(19): siRNA sense strand
cuacaaaggccaugucaag

SEQ ID NO: 292961 - RNA, 19 nt, Homo sapiens
  misc_RNA (1)...(19): siRNA sense strand
gaagagcucgaggcuuuga

SEQ ID NO: 292962 - RNA, 19 nt, Homo sapiens
  misc_RNA (1)...(19): siRNA sense strand
gagaaagagcgaugcuguu

SEQ ID NO: 292963 - RNA, 19 nt, Homo sapiens
  misc_RNA (1)...(19): siRNA sense strand
ggucuaaauugggaaaaua

SEQ ID NO: 292964 - RNA, 19 nt, Homo sapiens
  misc_RNA (1)...(19): siRNA sense strand
ggaaggcagcuuugacauc

SEQ ID NO: 292965 - RNA, 19 nt, Homo sapiens
  misc_RNA (1)...(19): siRNA sense strand
ucagaugucauucaugcua

SEQ ID NO: 292966 - RNA, 19 nt, Homo sapiens
  misc_RNA (1)...(19): siRNA sense strand
gaaggaggugcaugauuca

SEQ ID NO: 292967 - RNA, 19 nt, Homo sapiens
  misc_RNA (1)...(19): siRNA sense strand
caauucaaaccgagauaaa

SEQ ID NO: 292968 - RNA, 19 nt, Homo sapiens
  misc_RNA (1)...(19): siRNA sense strand
gaacacagauaucaaagug

SEQ ID NO: 292969 - RNA, 19 nt, Homo sapiens
  misc_RNA (1)...(19): siRNA sense strand
gcaaugaucuacaagaaau

SEQ ID NO: 292970 - RNA, 19 nt, Homo sapiens
  misc_RNA (1)...(19): siRNA sense strand
gcaagaagaaccaauagua

SEQ ID NO: 292971 - RNA, 19 nt, Homo sapiens
  misc_RNA (1)...(19): siRNA sense strand
gaagaacacagauaucaaa

SEQ ID NO: 292972 - RNA, 19 nt, Homo sapiens
  misc_RNA (1)...(19): siRNA sense strand
aagcaucccugucuuuaua

SEQ ID NO: 292973 - RNA, 19 nt, Homo sapiens
  misc_RNA (1)...(19): siRNA sense strand
ggacaaacccugauuggau

SEQ ID NO: 292974 - RNA, 19 nt, Homo sapiens
  misc_RNA (1)...(19): siRNA sense strand
gggcaucgaucaacaagga

SEQ ID NO: 292975 - RNA, 19 nt, Homo sapiens
  misc_RNA (1)...(19): siRNA sense strand
gggaauggcucguuagaag

SEQ ID NO: 292976 - RNA, 19 nt, Homo sapiens
  misc_RNA (1)...(19): siRNA sense strand
caaguguccuuucuccuuu

SEQ ID NO: 292977 - RNA, 19 nt, Homo sapiens
  misc_RNA (1)...(19): siRNA sense strand
auacaugucuucagaauca

SEQ ID NO: 292978 - RNA, 19 nt, Homo sapiens
  misc_RNA (1)...(19): siRNA sense strand
caagaaaucugcaguucag

SEQ ID NO: 292979 - RNA, 19 nt, Homo sapiens
  misc_RNA (1)...(19): siRNA sense strand
gaaaagauguggagauucu

SEQ ID NO: 292980 - RNA, 19 nt, Homo sapiens
  misc_RNA (1)...(19): siRNA sense strand
gcaccucugugggcauaua

SEQ ID NO: 292981 - RNA, 19 nt, Homo sapiens
  misc_RNA (1)...(19): siRNA sense strand
ugacugaagugcaaaucuu

SEQ ID NO: 292982 - RNA, 19 nt, Homo sapiens
  misc_RNA (1)...(19): siRNA sense strand
ccagugggcuucgggcaua

SEQ ID NO: 292983 - RNA, 19 nt, Homo sapiens
  misc_RNA (1)...(19): siRNA sense strand
gauucacuaucaacaguuu

SEQ ID NO: 292984 - RNA, 19 nt, Homo sapiens
  misc_RNA (1)...(19): siRNA sense strand
gcaucccugucuuuauaua

SEQ ID NO: 292985 - RNA, 19 nt, Homo sapiens
  misc_RNA (1)...(19): siRNA sense strand
gaacauugcgauuuggaau

SEQ ID NO: 292986 - RNA, 19 nt, Homo sapiens
  misc_RNA (1)...(19): siRNA sense strand
gcuagaagaacacagauau

SEQ ID NO: 292987 - RNA, 19 nt, Homo sapiens
  misc_RNA (1)...(19): siRNA sense strand
uaaagcggcuagaagaaca

SEQ ID NO: 292988 - RNA, 19 nt, Homo sapiens
  misc_RNA (1)...(19): siRNA sense strand
gcaaggguauugggaaugg

SEQ ID NO: 292989 - RNA, 19 nt, Homo sapiens
  misc_RNA (1)...(19): siRNA sense strand
agaguucccuccuggauug

SEQ ID NO: 292990 - RNA, 19 nt, Homo sapiens
  misc_RNA (1)...(19): siRNA sense strand
ccaaaucucaucaccauca

SEQ ID NO: 292991 - RNA, 19 nt, Homo sapiens
  misc_RNA (1)...(19): siRNA sense strand
acauugcgauuuggaauaa

SEQ ID NO: 292992 - RNA, 19 nt, Homo sapiens
  misc_RNA (1)...(19): siRNA sense strand
caagaagaaccaauaguag

SEQ ID NO: 292993 - RNA, 19 nt, Homo sapiens
  misc_RNA (1)...(19): siRNA sense strand
uaauugaugugacugaagu

SEQ ID NO: 292994 - RNA, 19 nt, Homo sapiens
  misc_RNA (1)...(19): siRNA sense strand
cuacagcucauucuaauca

SEQ ID NO: 292995 - RNA, 19 nt, Homo sapiens
  misc_RNA (1)...(19): siRNA sense strand
gaagaguucccuccuggau

SEQ ID NO: 292996 - RNA, 19 nt, Homo sapiens
  misc_RNA (1)...(19): siRNA sense strand
gaauaauugaugugacuga

SEQ ID NO: 292997 - RNA, 19 nt, Homo sapiens
  misc_RNA (1)...(19): siRNA sense strand
caacuaaagcggcuagaag

SEQ ID NO: 292998 - RNA, 19 nt, Homo sapiens
  misc_RNA (1)...(19): siRNA sense strand
gaaaucugcaguucagcuu

SEQ ID NO: 292999 - RNA, 19 nt, Homo sapiens
  misc_RNA (1)...(19): siRNA sense strand
cugcaaugaucuacaagaa

SEQ ID NO: 293000 - RNA, 19 nt, Homo sapiens
  misc_RNA (1)...(19): siRNA sense strand
uagcugcaaugaucuacaa

SEQ ID NO: 293001 - RNA, 19 nt, Homo sapiens
  misc_RNA (1)...(19): siRNA sense strand
ggaauggcucguuagaaga

SEQ ID NO: 293002 - RNA, 19 nt, Homo sapiens
  misc_RNA (1)...(19): siRNA sense strand
uauugggaauggcucguua

SEQ ID NO: 293003 - RNA, 19 nt, Homo sapiens
  misc_RNA (1)...(19): siRNA sense strand
ugacacagcauucauaggu

SEQ ID NO: 293004 - RNA, 19 nt, Homo sapiens
  misc_RNA (1)...(19): siRNA sense strand
ucuggaacauugcgauuug

SEQ ID NO: 293005 - RNA, 19 nt, Homo sapiens
  misc_RNA (1)...(19): siRNA sense strand
caauaaacaucuguacaac

SEQ ID NO: 293006 - RNA, 19 nt, Homo sapiens
  misc_RNA (1)...(19): siRNA sense strand
gggaaacaggcaagaagaa

SEQ ID NO: 293007 - RNA, 19 nt, Homo sapiens
  misc_RNA (1)...(19): siRNA sense strand
agaagaaccaauaguaguu

SEQ ID NO: 293008 - RNA, 19 nt, Homo sapiens
  misc_RNA (1)...(19): siRNA sense strand
uagaagaacacagauauca

SEQ ID NO: 293009 - RNA, 19 nt, Homo sapiens
  misc_RNA (1)...(19): siRNA sense strand
caggcaagaagaaccaaua

SEQ ID NO: 293010 - RNA, 19 nt, Homo sapiens
  misc_RNA (1)...(19): siRNA sense strand
uacaagaaaucugcaguuc

SEQ ID NO: 293011 - RNA, 19 nt, Homo sapiens
  misc_RNA (1)...(19): siRNA sense strand
ugaugugacugaagugcaa

SEQ ID NO: 293012 - RNA, 19 nt, Homo sapiens
  misc_RNA (1)...(19): siRNA sense strand
gugauuacauuagcugcaa

SEQ ID NO: 293013 - RNA, 19 nt, Homo sapiens
  misc_RNA (1)...(19): siRNA sense strand
ccuguggccuuuucauuua

SEQ ID NO: 293014 - RNA, 19 nt, Homo sapiens
  misc_RNA (1)...(19): siRNA sense strand
cgucucaccugcacauaca

SEQ ID NO: 293015 - RNA, 19 nt, Homo sapiens
  misc_RNA (1)...(19): siRNA sense strand
gaauggcucguuagaagag

SEQ ID NO: 293016 - RNA, 19 nt, Homo sapiens
  misc_RNA (1)...(19): siRNA sense strand
caccaucauuggacuguca

SEQ ID NO: 293017 - RNA, 19 nt, Homo sapiens
  misc_RNA (1)...(19): siRNA sense strand
caacaccaccauugucaag

SEQ ID NO: 293018 - RNA, 19 nt, Homo sapiens
  misc_RNA (1)...(19): siRNA sense strand
ggaacauugcgauuuggaa

SEQ ID NO: 293019 - RNA, 19 nt, Homo sapiens
  misc_RNA (1)...(19): siRNA sense strand
gcuugugccuguggccuuu

SEQ ID NO: 293020 - RNA, 19 nt, Homo sapiens
  misc_RNA (1)...(19): siRNA sense strand
caaggucucuacagcucau

SEQ ID NO: 293021 - RNA, 19 nt, Homo sapiens
  misc_RNA (1)...(19): siRNA sense strand
gagugggcaucgaucaaca

SEQ ID NO: 293022 - RNA, 19 nt, Homo sapiens
  misc_RNA (1)...(19): siRNA sense strand
ucucuacagcucauucuaa

SEQ ID NO: 293023 - RNA, 19 nt, Homo sapiens
  misc_RNA (1)...(19): siRNA sense strand
cacaggugguguuggcaaa

SEQ ID NO: 293024 - RNA, 19 nt, Homo sapiens
  misc_RNA (1)...(19): siRNA sense strand
cuacaagaaaucugcaguu

SEQ ID NO: 293025 - RNA, 19 nt, Homo sapiens
  misc_RNA (1)...(19): siRNA sense strand
uaugaguacuacaggaugu

SEQ ID NO: 293026 - RNA, 19 nt, Homo sapiens
  misc_RNA (1)...(19): siRNA sense strand
acaaguguccuuucuccuu

SEQ ID NO: 293027 - RNA, 19 nt, Homo sapiens
  misc_RNA (1)...(19): siRNA sense strand
caaaucucaucaccaucau

SEQ ID NO: 293028 - RNA, 19 nt, Homo sapiens
  misc_RNA (1)...(19): siRNA sense strand
gucaagacaccaacuaaag

SEQ ID NO: 293029 - RNA, 19 nt, Homo sapiens
  misc_RNA (1)...(19): siRNA sense strand
uggaauaauugaugugacu

SEQ ID NO: 293030 - RNA, 19 nt, Homo sapiens
  misc_RNA (1)...(19): siRNA sense strand
gcaucgaucaacaaggaaa

SEQ ID NO: 293031 - RNA, 19 nt, Homo sapiens
  misc_RNA (1)...(19): siRNA sense strand
aaucucaucaccaucauug

SEQ ID NO: 293032 - RNA, 19 nt, Homo sapiens
  misc_RNA (1)...(19): siRNA sense strand
aacaauagcaggaacaagu

SEQ ID NO: 293033 - RNA, 19 nt, Homo sapiens
  misc_RNA (1)...(19): siRNA sense strand
cuacugcccuacagcuaca

SEQ ID NO: 293034 - RNA, 19 nt, Homo sapiens
  misc_RNA (1)...(19): siRNA sense strand
cgauuuggaauaauugaug

SEQ ID NO: 293035 - RNA, 19 nt, Homo sapiens
  misc_RNA (1)...(19): siRNA sense strand
ggaaacaggcaagaagaac

SEQ ID NO: 293036 - RNA, 19 nt, Homo sapiens
  misc_RNA (1)...(19): siRNA sense strand
gaugggaaacaggcaagaa

SEQ ID NO: 293037 - RNA, 19 nt, Homo sapiens
  misc_RNA (1)...(19): siRNA sense strand
gucaguguuugcaaucaga

SEQ ID NO: 293038 - RNA, 19 nt, Homo sapiens
  misc_RNA (1)...(19): siRNA sense strand
ggaugcuauugaugggaaa

SEQ ID NO: 293039 - RNA, 19 nt, Homo sapiens
  misc_RNA (1)...(19): siRNA sense strand
gggcauaugaguacuacag

SEQ ID NO: 293040 - RNA, 19 nt, Homo sapiens
  misc_RNA (1)...(19): siRNA sense strand
agaagaacacagauaucaa

SEQ ID NO: 293041 - RNA, 19 nt, Homo sapiens
  misc_RNA (1)...(19): siRNA sense strand
ggacugucaauaaacaucu

SEQ ID NO: 293042 - RNA, 19 nt, Homo sapiens
  misc_RNA (1)...(19): siRNA sense strand
ggcuagaagaacacagaua

SEQ ID NO: 293043 - RNA, 19 nt, Homo sapiens
  misc_RNA (1)...(19): siRNA sense strand
uguagcagggaccauauuu

SEQ ID NO: 293044 - RNA, 19 nt, Homo sapiens
  misc_RNA (1)...(19): siRNA sense strand
ucuuggaacuuguauugca

SEQ ID NO: 293045 - RNA, 19 nt, Homo sapiens
  misc_RNA (1)...(19): siRNA sense strand
aagaagaaccaauaguagu

SEQ ID NO: 293046 - RNA, 19 nt, Homo sapiens
  misc_RNA (1)...(19): siRNA sense strand
aggcaccucugugggcaua

SEQ ID NO: 293047 - RNA, 19 nt, Homo sapiens
  misc_RNA (1)...(19): siRNA sense strand
ucauuuaccagucuuugga

SEQ ID NO: 293048 - RNA, 19 nt, Homo sapiens
  misc_RNA (1)...(19): siRNA sense strand
gcggcuagaagaacacaga

SEQ ID NO: 293049 - RNA, 19 nt, Homo sapiens
  misc_RNA (1)...(19): siRNA sense strand
cauaugaguacuacaggau

SEQ ID NO: 293050 - RNA, 19 nt, Homo sapiens
  misc_RNA (1)...(19): siRNA sense strand
gcauuugcuggcagugauu

SEQ ID NO: 293051 - RNA, 19 nt, Homo sapiens
  misc_RNA (1)...(19): siRNA sense strand
cagcucauucuaaucauca

SEQ ID NO: 293052 - RNA, 19 nt, Homo sapiens
  misc_RNA (1)...(19): siRNA sense strand
acaagaaaucugcaguuca

SEQ ID NO: 293053 - RNA, 19 nt, Homo sapiens
  misc_RNA (1)...(19): siRNA sense strand
ggaacaaguguccuuucuc

SEQ ID NO: 293054 - RNA, 19 nt, Homo sapiens
  misc_RNA (1)...(19): siRNA sense strand
guuaccaacaccaccauug

SEQ ID NO: 293055 - RNA, 19 nt, Homo sapiens
  misc_RNA (1)...(19): siRNA sense strand
cucuacagcucauucuaau

SEQ ID NO: 293056 - RNA, 19 nt, Homo sapiens
  misc_RNA (1)...(19): siRNA sense strand
ccaacuaaagcggcuagaa

SEQ ID NO: 293057 - RNA, 19 nt, Homo sapiens
  misc_RNA (1)...(19): siRNA sense strand
gggacaaacccugauugga

SEQ ID NO: 293058 - RNA, 19 nt, Homo sapiens
  misc_RNA (1)...(19): siRNA sense strand
ccucugugggcauauauug

SEQ ID NO: 293059 - RNA, 19 nt, Homo sapiens
  misc_RNA (1)...(19): siRNA sense strand
gcacacaugacgaaaagug

SEQ ID NO: 293060 - RNA, 19 nt, Homo sapiens
  misc_RNA (1)...(19): siRNA sense strand
gcugcaaugaucuacaaga

SEQ ID NO: 293061 - RNA, 19 nt, Homo sapiens
  misc_RNA (1)...(19): siRNA sense strand
gaccauauuuuccuguaca

SEQ ID NO: 293062 - RNA, 19 nt, Homo sapiens
  misc_RNA (1)...(19): siRNA sense strand
aacauugcgauuuggaaua

SEQ ID NO: 293063 - RNA, 19 nt, Homo sapiens
  misc_RNA (1)...(19): siRNA sense strand
gcuugagcccuuaaugcaa

SEQ ID NO: 293064 - RNA, 19 nt, Homo sapiens
  misc_RNA (1)...(19): siRNA sense strand
aggaaaagauguggagauu

SEQ ID NO: 293065 - RNA, 19 nt, Homo sapiens
  misc_RNA (1)...(19): siRNA sense strand
auucauagguccggcacuu

SEQ ID NO: 293066 - RNA, 19 nt, Homo sapiens
  misc_RNA (1)...(19): siRNA sense strand
gacgaaaagugaaaugcau

SEQ ID NO: 293067 - RNA, 19 nt, Homo sapiens
  misc_RNA (1)...(19): siRNA sense strand
gggaccauauuuuccugua

SEQ ID NO: 293068 - RNA, 19 nt, Homo sapiens
  misc_RNA (1)...(19): siRNA sense strand
ucaagaagcagcucuauaa

SEQ ID NO: 293069 - RNA, 19 nt, Homo sapiens
  misc_RNA (1)...(19): siRNA sense strand
gaaggagccuguagaagca

SEQ ID NO: 293070 - RNA, 19 nt, Homo sapiens
  misc_RNA (1)...(19): siRNA sense strand
ccaggaguuuggcaucuua

SEQ ID NO: 293071 - RNA, 19 nt, Homo sapiens
  misc_RNA (1)...(19): siRNA sense strand
agaagcagcucuauaacau

SEQ ID NO: 293072 - RNA, 19 nt, Homo sapiens
  misc_RNA (1)...(19): siRNA sense strand
gcagaaggagccuguagaa

SEQ ID NO: 293073 - RNA, 19 nt, Homo sapiens
  misc_RNA (1)...(19): siRNA sense strand
ucaugaagcucaagaagca

SEQ ID NO: 293074 - RNA, 19 nt, Homo sapiens
  misc_RNA (1)...(19): siRNA sense strand
gagagggaccgcuacauga

SEQ ID NO: 293075 - RNA, 19 nt, Homo sapiens
  misc_RNA (1)...(19): siRNA sense strand
ggagagggaccgcuacaug

SEQ ID NO: 293076 - RNA, 19 nt, Homo sapiens
  misc_RNA (1)...(19): siRNA sense strand
ccacagacauugccaucca

SEQ ID NO: 293077 - RNA, 19 nt, Homo sapiens
  misc_RNA (1)...(19): siRNA sense strand
cagaggagaucaugaagcu

SEQ ID NO: 293078 - RNA, 19 nt, Homo sapiens
  misc_RNA (1)...(19): siRNA sense strand
gggccaagccacagacauu

SEQ ID NO: 293079 - RNA, 19 nt, Homo sapiens
  misc_RNA (1)...(19): siRNA sense strand
caagaagcccauccacaug

SEQ ID NO: 293080 - RNA, 19 nt, Homo sapiens
  misc_RNA (1)...(19): siRNA sense strand
agaagcccauccacaugua

SEQ ID NO: 293081 - RNA, 19 nt, Homo sapiens
  misc_RNA (1)...(19): siRNA sense strand
acaagaagcccauccacau

SEQ ID NO: 293082 - RNA, 19 nt, Homo sapiens
  misc_RNA (1)...(19): siRNA sense strand
caacucccguaucaugauc

SEQ ID NO: 293083 - RNA, 19 nt, Homo sapiens
  misc_RNA (1)...(19): siRNA sense strand
aagcagcucuauaacaucu

SEQ ID NO: 293084 - RNA, 19 nt, Homo sapiens
  misc_RNA (1)...(19): siRNA sense strand
gcagcucuauaacaucuac

SEQ ID NO: 293085 - RNA, 19 nt, Homo sapiens
  misc_RNA (1)...(19): siRNA sense strand
gaucaugaagcucaagaag

SEQ ID NO: 293086 - RNA, 19 nt, Homo sapiens
  misc_RNA (1)...(19): siRNA sense strand
ccacgcuggugcagaagga

SEQ ID NO: 293087 - RNA, 19 nt, Homo sapiens
  misc_RNA (1)...(19): siRNA sense strand
cagcuccucuuccugcaau

SEQ ID NO: 293088 - RNA, 19 nt, Homo sapiens
  misc_RNA (1)...(19): siRNA sense strand
gcagaaccugucccagcua

SEQ ID NO: 293089 - RNA, 19 nt, Homo sapiens
  misc_RNA (1)...(19): siRNA sense strand
gaaccugucccagcuagca

SEQ ID NO: 293090 - RNA, 19 nt, Homo sapiens
  misc_RNA (1)...(19): siRNA sense strand
gccaagcacaccaaacaga

SEQ ID NO: 293091 - RNA, 19 nt, Homo sapiens
  misc_RNA (1)...(19): siRNA sense strand
cauggaggcccaggaguuu

SEQ ID NO: 293092 - RNA, 19 nt, Homo sapiens
  misc_RNA (1)...(19): siRNA sense strand
gaguuuggcaucuuagaca

SEQ ID NO: 293093 - RNA, 19 nt, Homo sapiens
  misc_RNA (1)...(19): siRNA sense strand
gaagcagcucuauaacauc

SEQ ID NO: 293094 - RNA, 19 nt, Homo sapiens
  misc_RNA (1)...(19): siRNA sense strand
ccauggaggcccaggaguu

SEQ ID NO: 293095 - RNA, 19 nt, Homo sapiens
  misc_RNA (1)...(19): siRNA sense strand
gcaacaagaagcccaucca

SEQ ID NO: 293096 - RNA, 19 nt, Homo sapiens
  misc_RNA (1)...(19): siRNA sense strand
gagaucaugaagcucaaga

SEQ ID NO: 293097 - RNA, 19 nt, Homo sapiens
  misc_RNA (1)...(19): siRNA sense strand
aagaagcagcucuauaaca

SEQ ID NO: 293098 - RNA, 19 nt, Homo sapiens
  misc_RNA (1)...(19): siRNA sense strand
ucgccucgccgcucacuuu

SEQ ID NO: 293099 - RNA, 19 nt, Homo sapiens
  misc_RNA (1)...(19): siRNA sense strand
aauccgagagcaacaagaa

SEQ ID NO: 293100 - RNA, 19 nt, Homo sapiens
  misc_RNA (1)...(19): siRNA sense strand
ccauccacauguacaucaa

SEQ ID NO: 293101 - RNA, 19 nt, Homo sapiens
  misc_RNA (1)...(19): siRNA sense strand
aggcagaggagaucaugaa

SEQ ID NO: 293102 - RNA, 19 nt, Homo sapiens
  misc_RNA (1)...(19): siRNA sense strand
ucuacgacacgaugcagua

SEQ ID NO: 293103 - RNA, 19 nt, Homo sapiens
  misc_RNA (1)...(19): siRNA sense strand
gcucaagaagcagcucuau

SEQ ID NO: 293104 - RNA, 19 nt, Homo sapiens
  misc_RNA (1)...(19): siRNA sense strand
caagaagcagcucuauaac

SEQ ID NO: 293105 - RNA, 19 nt, Homo sapiens
  misc_RNA (1)...(19): siRNA sense strand
ggccaagccacagacauug

SEQ ID NO: 293106 - RNA, 19 nt, Homo sapiens
  misc_RNA (1)...(19): siRNA sense strand
aagaagcccauccacaugu

SEQ ID NO: 293107 - RNA, 19 nt, Homo sapiens
  misc_RNA (1)...(19): siRNA sense strand
ucgcacagcuccucuuccu

SEQ ID NO: 293108 - RNA, 19 nt, Homo sapiens
  misc_RNA (1)...(19): siRNA sense strand
gcaauccgagagcaacaag

SEQ ID NO: 293109 - RNA, 19 nt, Homo sapiens
  misc_RNA (1)...(19): siRNA sense strand
gaacugagguggugaagaa

SEQ ID NO: 293110 - RNA, 19 nt, Homo sapiens
  misc_RNA (1)...(19): siRNA sense strand
caaggucacuaagccauua

SEQ ID NO: 293111 - RNA, 19 nt, Homo sapiens
  misc_RNA (1)...(19): siRNA sense strand
gggacaagaagaagaauua

SEQ ID NO: 293112 - RNA, 19 nt, Homo sapiens
  misc_RNA (1)...(19): siRNA sense strand
ugacuuugcuaucaacuuu

SEQ ID NO: 293113 - RNA, 19 nt, Homo sapiens
  misc_RNA (1)...(19): siRNA sense strand
ucaaguuccugguguauga

SEQ ID NO: 293114 - RNA, 19 nt, Homo sapiens
  misc_RNA (1)...(19): siRNA sense strand
acaaggaucuguucagcaa

SEQ ID NO: 293115 - RNA, 19 nt, Homo sapiens
  misc_RNA (1)...(19): siRNA sense strand
ccuacaagcuggacaacaa

SEQ ID NO: 293116 - RNA, 19 nt, Homo sapiens
  misc_RNA (1)...(19): siRNA sense strand
gugcacaccuuccuggauu

SEQ ID NO: 293117 - RNA, 19 nt, Homo sapiens
  misc_RNA (1)...(19): siRNA sense strand
ucaccgaccucucaaguuc

SEQ ID NO: 293118 - RNA, 19 nt, Homo sapiens
  misc_RNA (1)...(19): siRNA sense strand
ccaaguaucgggacaagaa

SEQ ID NO: 293119 - RNA, 19 nt, Homo sapiens
  misc_RNA (1)...(19): siRNA sense strand
cagcaagucugacccuuuc

SEQ ID NO: 293120 - RNA, 19 nt, Homo sapiens
  misc_RNA (1)...(19): siRNA sense strand
gggcaaugcugacuucucu

SEQ ID NO: 293121 - RNA, 19 nt, Homo sapiens
  misc_RNA (1)...(19): siRNA sense strand
gcaaugcugacuucucuga

SEQ ID NO: 293122 - RNA, 19 nt, Homo sapiens
  misc_RNA (1)...(19): siRNA sense strand
gaucguggccgaggaggua

SEQ ID NO: 293123 - RNA, 19 nt, Homo sapiens
  misc_RNA (1)...(19): siRNA sense strand
cgaggugucccaugacuuu

SEQ ID NO: 293124 - RNA, 19 nt, Homo sapiens
  misc_RNA (1)...(19): siRNA sense strand
ugacuucacugccuccaau

SEQ ID NO: 293125 - RNA, 19 nt, Homo sapiens
  misc_RNA (1)...(19): siRNA sense strand
ggaaaauccugaaugugaa

SEQ ID NO: 293126 - RNA, 19 nt, Homo sapiens
  misc_RNA (1)...(19): siRNA sense strand
cagcuggucuggagaacug

SEQ ID NO: 293127 - RNA, 19 nt, Homo sapiens
  misc_RNA (1)...(19): siRNA sense strand
ggcaggugguggaguacua

SEQ ID NO: 293128 - RNA, 19 nt, Homo sapiens
  misc_RNA (1)...(19): siRNA sense strand
ccaacgaggaccaaaguga

SEQ ID NO: 293129 - RNA, 19 nt, Homo sapiens
  misc_RNA (1)...(19): siRNA sense strand
gauguucaccgaccucuca

SEQ ID NO: 293130 - RNA, 19 nt, Homo sapiens
  misc_RNA (1)...(19): siRNA sense strand
gaucagcuggucuggagaa

SEQ ID NO: 293131 - RNA, 19 nt, Homo sapiens
  misc_RNA (1)...(19): siRNA sense strand
gcaaguccaccaucacgau

SEQ ID NO: 293132 - RNA, 19 nt, Homo sapiens
  misc_RNA (1)...(19): siRNA sense strand
cacggcaggugguggagua

SEQ ID NO: 293133 - RNA, 19 nt, Homo sapiens
  misc_RNA (1)...(19): siRNA sense strand
gaggagguaucaggcacaa

SEQ ID NO: 293134 - RNA, 19 nt, Homo sapiens
  misc_RNA (1)...(19): siRNA sense strand
caacgaggaccaaagugau

SEQ ID NO: 293135 - RNA, 19 nt, Homo sapiens
  misc_RNA (1)...(19): siRNA sense strand
gcaucugccaggacuauga

SEQ ID NO: 293136 - RNA, 19 nt, Homo sapiens
  misc_RNA (1)...(19): siRNA sense strand
ggagguaucaggcacaaac

SEQ ID NO: 293137 - RNA, 19 nt, Homo sapiens
  misc_RNA (1)...(19): siRNA sense strand
gcgggcaaguccaccauca

SEQ ID NO: 293138 - RNA, 19 nt, Homo sapiens
  misc_RNA (1)...(19): siRNA sense strand
gcuucacgguggccauuga

SEQ ID NO: 293139 - RNA, 19 nt, Homo sapiens
  misc_RNA (1)...(19): siRNA sense strand
gugcuucgcuccuguucca

SEQ ID NO: 293140 - RNA, 19 nt, Homo sapiens
  misc_RNA (1)...(19): siRNA sense strand
ucccaugacuuugcuauca

SEQ ID NO: 293141 - RNA, 19 nt, Homo sapiens
  misc_RNA (1)...(19): siRNA sense strand
ggagaacugagguggugaa

SEQ ID NO: 293142 - RNA, 19 nt, Homo sapiens
  misc_RNA (1)...(19): siRNA sense strand
gaccaacgaggaccaaagu

SEQ ID NO: 293143 - RNA, 19 nt, Homo sapiens
  misc_RNA (1)...(19): siRNA sense strand
ucacaaaccaaggucacua

SEQ ID NO: 293144 - RNA, 19 nt, Homo sapiens
  misc_RNA (1)...(19): siRNA sense strand
gcugagacucgcacugcua

SEQ ID NO: 293145 - RNA, 19 nt, Homo sapiens
  misc_RNA (1)...(19): siRNA sense strand
agaagaagaauuacaagag

SEQ ID NO: 293146 - RNA, 19 nt, Homo sapiens
  misc_RNA (1)...(19): siRNA sense strand
cuaugcagcugugauguuc

SEQ ID NO: 293147 - RNA, 19 nt, Homo sapiens
  misc_RNA (1)...(19): siRNA sense strand
ggugcuggcccuugaguau

SEQ ID NO: 293148 - RNA, 19 nt, Homo sapiens
  misc_RNA (1)...(19): siRNA sense strand
ucauggaaaucuauaagac

SEQ ID NO: 293149 - RNA, 19 nt, Homo sapiens
  misc_RNA (1)...(19): siRNA sense strand
ugcuggcccuugaguauuu

SEQ ID NO: 293150 - RNA, 19 nt, Homo sapiens
  misc_RNA (1)...(19): siRNA sense strand
cacaaaccaaggucacuaa

SEQ ID NO: 293151 - RNA, 19 nt, Homo sapiens
  misc_RNA (1)...(19): siRNA sense strand
gacaagaagaagaauuaca

SEQ ID NO: 293152 - RNA, 19 nt, Homo sapiens
  misc_RNA (1)...(19): siRNA sense strand
ugcucaagcucuacucuga

SEQ ID NO: 293153 - RNA, 19 nt, Homo sapiens
  misc_RNA (1)...(19): siRNA sense strand
ggacuaugacagugauaag

SEQ ID NO: 293154 - RNA, 19 nt, Homo sapiens
  misc_RNA (1)...(19): siRNA sense strand
ccaggacuaugacagugau

SEQ ID NO: 293155 - RNA, 19 nt, Homo sapiens
  misc_RNA (1)...(19): siRNA sense strand
ucacuaagccauuauugcu

SEQ ID NO: 293156 - RNA, 19 nt, Homo sapiens
  misc_RNA (1)...(19): siRNA sense strand
cuuccuggauuacaucaug

SEQ ID NO: 293157 - RNA, 19 nt, Homo sapiens
  misc_RNA (1)...(19): siRNA sense strand
cggaaaauccugaauguga

SEQ ID NO: 293158 - RNA, 19 nt, Homo sapiens
  misc_RNA (1)...(19): siRNA sense strand
guucccagcuuuuggcuuu

SEQ ID NO: 293159 - RNA, 19 nt, Homo sapiens
  misc_RNA (1)...(19): siRNA sense strand
ggucacuaagccauuauug

SEQ ID NO: 293160 - RNA, 19 nt, Homo sapiens
  misc_RNA (1)...(19): siRNA sense strand
cucaagcucuacucugaug

SEQ ID NO: 293161 - RNA, 19 nt, Homo sapiens
  misc_RNA (1)...(19): siRNA sense strand
ugcacaccuuccuggauua

SEQ ID NO: 293162 - RNA, 19 nt, Homo sapiens
  misc_RNA (1)...(19): siRNA sense strand
caagaagaagaauuacaag

SEQ ID NO: 293163 - RNA, 19 nt, Homo sapiens
  misc_RNA (1)...(19): siRNA sense strand
gucugacccuuucauggaa

SEQ ID NO: 293164 - RNA, 19 nt, Homo sapiens
  misc_RNA (1)...(19): siRNA sense strand
aaggaucuguucagcaagu

SEQ ID NO: 293165 - RNA, 19 nt, Homo sapiens
  misc_RNA (1)...(19): siRNA sense strand
aaacgacuaugugcaacuc

SEQ ID NO: 293166 - RNA, 19 nt, Homo sapiens
  misc_RNA (1)...(19): siRNA sense strand
uaucaggcacaaacgacua

SEQ ID NO: 293167 - RNA, 19 nt, Homo sapiens
  misc_RNA (1)...(19): siRNA sense strand
cccaugacuuugcuaucaa

SEQ ID NO: 293168 - RNA, 19 nt, Homo sapiens
  misc_RNA (1)...(19): siRNA sense strand
gcaagucugacccuuucau

SEQ ID NO: 293169 - RNA, 19 nt, Homo sapiens
  misc_RNA (1)...(19): siRNA sense strand
ccaaggucacuaagccauu

SEQ ID NO: 293170 - RNA, 19 nt, Homo sapiens
  misc_RNA (1)...(19): siRNA sense strand
gagccuacaagcuggacaa

SEQ ID NO: 293171 - RNA, 19 nt, Homo sapiens
  misc_RNA (1)...(19): siRNA sense strand
cgugggcaaugcugacuuc

SEQ ID NO: 293172 - RNA, 19 nt, Homo sapiens
  misc_RNA (1)...(19): siRNA sense strand
cccgacagcccaaccacua

SEQ ID NO: 293173 - RNA, 19 nt, Homo sapiens
  misc_RNA (1)...(19): siRNA sense strand
acaccuuccuggauuacau

SEQ ID NO: 293174 - RNA, 19 nt, Homo sapiens
  misc_RNA (1)...(19): siRNA sense strand
gcgugcugcucaagcucua

SEQ ID NO: 293175 - RNA, 19 nt, Homo sapiens
  misc_RNA (1)...(19): siRNA sense strand
gcacuuuccaggagaugca

SEQ ID NO: 293176 - RNA, 19 nt, Homo sapiens
  misc_RNA (1)...(19): siRNA sense strand
cugagguggugaagaacaa

SEQ ID NO: 293177 - RNA, 19 nt, Homo sapiens
  misc_RNA (1)...(19): siRNA sense strand
caagucugacccuuucaug

SEQ ID NO: 293178 - RNA, 19 nt, Homo sapiens
  misc_RNA (1)...(19): siRNA sense strand
ggacaagaagaagaauuac

SEQ ID NO: 293179 - RNA, 19 nt, Homo sapiens
  misc_RNA (1)...(19): siRNA sense strand
gccugcagcccgagacauu

SEQ ID NO: 293180 - RNA, 19 nt, Homo sapiens
  misc_RNA (1)...(19): siRNA sense strand
gcccauguccaucaucauc

SEQ ID NO: 293181 - RNA, 19 nt, Homo sapiens
  misc_RNA (1)...(19): siRNA sense strand
gggacacacucaccaaacc

SEQ ID NO: 293182 - RNA, 19 nt, Homo sapiens
  misc_RNA (1)...(19): siRNA sense strand
agucugacccuuucaugga

SEQ ID NO: 293183 - RNA, 19 nt, Homo sapiens
  misc_RNA (1)...(19): siRNA sense strand
aaugcugacuucucugaca

SEQ ID NO: 293184 - RNA, 19 nt, Homo sapiens
  misc_RNA (1)...(19): siRNA sense strand
gcaccuugggccagauugu

SEQ ID NO: 293185 - RNA, 19 nt, Homo sapiens
  misc_RNA (1)...(19): siRNA sense strand
acuucgaggugucccauga

SEQ ID NO: 293186 - RNA, 19 nt, Homo sapiens
  misc_RNA (1)...(19): siRNA sense strand
gccaggacuaugacaguga

SEQ ID NO: 293187 - RNA, 19 nt, Homo sapiens
  misc_RNA (1)...(19): siRNA sense strand
cgaguucaccagcacuuuc

SEQ ID NO: 293188 - RNA, 19 nt, Homo sapiens
  misc_RNA (1)...(19): siRNA sense strand
gcugaagaaugggaagacu

SEQ ID NO: 293189 - RNA, 19 nt, Homo sapiens
  misc_RNA (1)...(19): siRNA sense strand
acaaagaccugugaauuua

SEQ ID NO: 293190 - RNA, 19 nt, Homo sapiens
  misc_RNA (1)...(19): siRNA sense strand
gauuacaccugaaaccuua

SEQ ID NO: 293191 - RNA, 19 nt, Homo sapiens
  misc_RNA (1)...(19): siRNA sense strand
guaacaaaguucuguauga

SEQ ID NO: 293192 - RNA, 19 nt, Homo sapiens
  misc_RNA (1)...(19): siRNA sense strand
gacaaagaccugugaauuu

SEQ ID NO: 293193 - RNA, 19 nt, Homo sapiens
  misc_RNA (1)...(19): siRNA sense strand
ccacggagauucagaacau

SEQ ID NO: 293194 - RNA, 19 nt, Homo sapiens
  misc_RNA (1)...(19): siRNA sense strand
caacagcaccauagaaaug

SEQ ID NO: 293195 - RNA, 19 nt, Homo sapiens
  misc_RNA (1)...(19): siRNA sense strand
gaguaaggauucaguccaa

SEQ ID NO: 293196 - RNA, 19 nt, Homo sapiens
  misc_RNA (1)...(19): siRNA sense strand
ggaccgcccuggacaucaa

SEQ ID NO: 293197 - RNA, 19 nt, Homo sapiens
  misc_RNA (1)...(19): siRNA sense strand
aaaguggaauuugagguua

SEQ ID NO: 293198 - RNA, 19 nt, Homo sapiens
  misc_RNA (1)...(19): siRNA sense strand
aaacagaaaucccuuuuga

SEQ ID NO: 293199 - RNA, 19 nt, Homo sapiens
  misc_RNA (1)...(19): siRNA sense strand
ggacaucucaacucaacaa

SEQ ID NO: 293200 - RNA, 19 nt, Homo sapiens
  misc_RNA (1)...(19): siRNA sense strand
gaggacaucucaacucaac

SEQ ID NO: 293201 - RNA, 19 nt, Homo sapiens
  misc_RNA (1)...(19): siRNA sense strand
ugacaaagaccugugaauu

SEQ ID NO: 293202 - RNA, 19 nt, Homo sapiens
  misc_RNA (1)...(19): siRNA sense strand
gcacuugaaggguaacaaa

SEQ ID NO: 293203 - RNA, 19 nt, Homo sapiens
  misc_RNA (1)...(19): siRNA sense strand
acacugcgcugugacauga

SEQ ID NO: 293204 - RNA, 19 nt, Homo sapiens
  misc_RNA (1)...(19): siRNA sense strand
uaacaaaguucuguaugag

SEQ ID NO: 293205 - RNA, 19 nt, Homo sapiens
  misc_RNA (1)...(19): siRNA sense strand
ucaacaaacugugucauca

SEQ ID NO: 293206 - RNA, 19 nt, Homo sapiens
  misc_RNA (1)...(19): siRNA sense strand
gcccuggacaucaagauua

SEQ ID NO: 293207 - RNA, 19 nt, Homo sapiens
  misc_RNA (1)...(19): siRNA sense strand
ggagaccaccaacuucaaa

SEQ ID NO: 293208 - RNA, 19 nt, Homo sapiens
  misc_RNA (1)...(19): siRNA sense strand
caucucaacucaacaaacu

SEQ ID NO: 293209 - RNA, 19 nt, Homo sapiens
  misc_RNA (1)...(19): siRNA sense strand
gaaauuucccagcggcaaa

SEQ ID NO: 293210 - RNA, 19 nt, Homo sapiens
  misc_RNA (1)...(19): siRNA sense strand
cugaagcucugcaggauau

SEQ ID NO: 293211 - RNA, 19 nt, Homo sapiens
  misc_RNA (1)...(19): siRNA sense strand
uuacagaacgucaaagaga

SEQ ID NO: 293212 - RNA, 19 nt, Homo sapiens
  misc_RNA (1)...(19): siRNA sense strand
gaccauggaaggaacugua

SEQ ID NO: 293213 - RNA, 19 nt, Homo sapiens
  misc_RNA (1)...(19): siRNA sense strand
gacguaucauggcguguuu

SEQ ID NO: 293214 - RNA, 19 nt, Homo sapiens
  misc_RNA (1)...(19): siRNA sense strand
ugaauuuccucugcacuug

SEQ ID NO: 293215 - RNA, 19 nt, Homo sapiens
  misc_RNA (1)...(19): siRNA sense strand
guuaagccuauccagauua

SEQ ID NO: 293216 - RNA, 19 nt, Homo sapiens
  misc_RNA (1)...(19): siRNA sense strand
ucacuccgcuccucagaag

SEQ ID NO: 293217 - RNA, 19 nt, Homo sapiens
  misc_RNA (1)...(19): siRNA sense strand
uaucauggcguguuuguca

SEQ ID NO: 293218 - RNA, 19 nt, Homo sapiens
  misc_RNA (1)...(19): siRNA sense strand
aaagaccugugaauuuauc

SEQ ID NO: 293219 - RNA, 19 nt, Homo sapiens
  misc_RNA (1)...(19): siRNA sense strand
ucgaggacaucucaacuca

SEQ ID NO: 293220 - RNA, 19 nt, Homo sapiens
  misc_RNA (1)...(19): siRNA sense strand
ggaauuugagguuaacauc

SEQ ID NO: 293221 - RNA, 19 nt, Homo sapiens
  misc_RNA (1)...(19): siRNA sense strand
uuaagccuauccagauuau

SEQ ID NO: 293222 - RNA, 19 nt, Homo sapiens
  misc_RNA (1)...(19): siRNA sense strand
caaagaccugugaauuuau

SEQ ID NO: 293223 - RNA, 19 nt, Homo sapiens
  misc_RNA (1)...(19): siRNA sense strand
gauuaucaacagcaccaua

SEQ ID NO: 293224 - RNA, 19 nt, Homo sapiens
  misc_RNA (1)...(19): siRNA sense strand
ggucauaucgaguaaggau

SEQ ID NO: 293225 - RNA, 19 nt, Homo sapiens
  misc_RNA (1)...(19): siRNA sense strand
cuugaaggguaacaaaguu

SEQ ID NO: 293226 - RNA, 19 nt, Homo sapiens
  misc_RNA (1)...(19): siRNA sense strand
gaauuuccucugcacuuga

SEQ ID NO: 293227 - RNA, 19 nt, Homo sapiens
  misc_RNA (1)...(19): siRNA sense strand
gacaugaagcggucucugu

SEQ ID NO: 293228 - RNA, 19 nt, Homo sapiens
  misc_RNA (1)...(19): siRNA sense strand
cccuggacaucaagauuaa

SEQ ID NO: 293229 - RNA, 19 nt, Homo sapiens
  misc_RNA (1)...(19): siRNA sense strand
uguuaagccuauccagauu

SEQ ID NO: 293230 - RNA, 19 nt, Homo sapiens
  misc_RNA (1)...(19): siRNA sense strand
ggucuucccuaggcuguuc

SEQ ID NO: 293231 - RNA, 19 nt, Homo sapiens
  misc_RNA (1)...(19): siRNA sense strand
gguaacaaaguucuguaug

SEQ ID NO: 293232 - RNA, 19 nt, Homo sapiens
  misc_RNA (1)...(19): siRNA sense strand
gcugaagcucugcaggaua

SEQ ID NO: 293233 - RNA, 19 nt, Homo sapiens
  misc_RNA (1)...(19): siRNA sense strand
aaguggaauuugagguuaa

SEQ ID NO: 293234 - RNA, 19 nt, Homo sapiens
  misc_RNA (1)...(19): siRNA sense strand
uaucaacagcaccauagaa

SEQ ID NO: 293235 - RNA, 19 nt, Homo sapiens
  misc_RNA (1)...(19): siRNA sense strand
caccugaaaccuuacagaa

SEQ ID NO: 293236 - RNA, 19 nt, Homo sapiens
  misc_RNA (1)...(19): siRNA sense strand
caccagggagugucuuuga

SEQ ID NO: 293237 - RNA, 19 nt, Homo sapiens
  misc_RNA (1)...(19): siRNA sense strand
gagauucagaacauucaga

SEQ ID NO: 293238 - RNA, 19 nt, Homo sapiens
  misc_RNA (1)...(19): siRNA sense strand
aguauacacugcgcuguga

SEQ ID NO: 293239 - RNA, 19 nt, Homo sapiens
  misc_RNA (1)...(19): siRNA sense strand
gugguggucauaucgagua

SEQ ID NO: 293240 - RNA, 19 nt, Homo sapiens
  misc_RNA (1)...(19): siRNA sense strand
ggacaucaagauuaaaaga

SEQ ID NO: 293241 - RNA, 19 nt, Homo sapiens
  misc_RNA (1)...(19): siRNA sense strand
gagugucuuugaccaugga

SEQ ID NO: 293242 - RNA, 19 nt, Homo sapiens
  misc_RNA (1)...(19): siRNA sense strand
ucauaucgaguaaggauuc

SEQ ID NO: 293243 - RNA, 19 nt, Homo sapiens
  misc_RNA (1)...(19): siRNA sense strand
cggagaacuucccgcugaa

SEQ ID NO: 293244 - RNA, 19 nt, Homo sapiens
  misc_RNA (1)...(19): siRNA sense strand
guaaggauucaguccaaca

SEQ ID NO: 293245 - RNA, 19 nt, Homo sapiens
  misc_RNA (1)...(19): siRNA sense strand
aagccuauccagauuauca

SEQ ID NO: 293246 - RNA, 19 nt, Homo sapiens
  misc_RNA (1)...(19): siRNA sense strand
cgauuacaccugaaaccuu

SEQ ID NO: 293247 - RNA, 19 nt, Homo sapiens
  misc_RNA (1)...(19): siRNA sense strand
gaccugugaauuuaucguu

SEQ ID NO: 293248 - RNA, 19 nt, Homo sapiens
  misc_RNA (1)...(19): siRNA sense strand
ggucucuguuggccaagga

SEQ ID NO: 293249 - RNA, 19 nt, Homo sapiens
  misc_RNA (1)...(19): siRNA sense strand
gcaaaacagaaaucccuuu

SEQ ID NO: 293250 - RNA, 19 nt, Homo sapiens
  misc_RNA (1)...(19): siRNA sense strand
guggucauaucgaguaagg

SEQ ID NO: 293251 - RNA, 19 nt, Homo sapiens
  misc_RNA (1)...(19): siRNA sense strand
ggguaacaaaguucuguau

SEQ ID NO: 293252 - RNA, 19 nt, Homo sapiens
  misc_RNA (1)...(19): siRNA sense strand
caugaagcggucucuguug

SEQ ID NO: 293253 - RNA, 19 nt, Homo sapiens
  misc_RNA (1)...(19): siRNA sense strand
aaaguguggguguguuuga

SEQ ID NO: 293254 - RNA, 19 nt, Homo sapiens
  misc_RNA (1)...(19): siRNA sense strand
ucaacagcaccauagaaau

SEQ ID NO: 293255 - RNA, 19 nt, Homo sapiens
  misc_RNA (1)...(19): siRNA sense strand
aauuuccucugcacuugaa

SEQ ID NO: 293256 - RNA, 19 nt, Homo sapiens
  misc_RNA (1)...(19): siRNA sense strand
uggguguguuugaagcuuu

SEQ ID NO: 293257 - RNA, 19 nt, Homo sapiens
  misc_RNA (1)...(19): siRNA sense strand
gaagcucugcaggauauag

SEQ ID NO: 293258 - RNA, 19 nt, Homo sapiens
  misc_RNA (1)...(19): siRNA sense strand
acaugaagcggucucuguu

SEQ ID NO: 293259 - RNA, 19 nt, Homo sapiens
  misc_RNA (1)...(19): siRNA sense strand
acagaaaucccuuuugaau

SEQ ID NO: 293260 - RNA, 19 nt, Homo sapiens
  misc_RNA (1)...(19): siRNA sense strand
ucccaaauuucuccuucga

SEQ ID NO: 293261 - RNA, 19 nt, Homo sapiens
  misc_RNA (1)...(19): siRNA sense strand
uaaagaagcugaaguuguu

SEQ ID NO: 293262 - RNA, 19 nt, Homo sapiens
  misc_RNA (1)...(19): siRNA sense strand
caagaaagauggaacuguu

SEQ ID NO: 293263 - RNA, 19 nt, Homo sapiens
  misc_RNA (1)...(19): siRNA sense strand
gaaacuuccuccaguauuc

SEQ ID NO: 293264 - RNA, 19 nt, Homo sapiens
  misc_RNA (1)...(19): siRNA sense strand
gaauggaugucaggaaauu

SEQ ID NO: 293265 - RNA, 19 nt, Homo sapiens
  misc_RNA (1)...(19): siRNA sense strand
gaguuuggaucuugacaua

SEQ ID NO: 293266 - RNA, 19 nt, Homo sapiens
  misc_RNA (1)...(19): siRNA sense strand
gagaagaaugugacaaaua

SEQ ID NO: 293267 - RNA, 19 nt, Homo sapiens
  misc_RNA (1)...(19): siRNA sense strand
ugaagaugcuguuaagaaa

SEQ ID NO: 293268 - RNA, 19 nt, Homo sapiens
  misc_RNA (1)...(19): siRNA sense strand
caauugaagugaagacaaa

SEQ ID NO: 293269 - RNA, 19 nt, Homo sapiens
  misc_RNA (1)...(19): siRNA sense strand
uaucauagcuagugaagau

SEQ ID NO: 293270 - RNA, 19 nt, Homo sapiens
  misc_RNA (1)...(19): siRNA sense strand
gaagaaagcaggacugagu

SEQ ID NO: 293271 - RNA, 19 nt, Homo sapiens
  misc_RNA (1)...(19): siRNA sense strand
ggcaaagucucaccugaaa

SEQ ID NO: 293272 - RNA, 19 nt, Homo sapiens
  misc_RNA (1)...(19): siRNA sense strand
gcaauguccugcagaguuc

SEQ ID NO: 293273 - RNA, 19 nt, Homo sapiens
  misc_RNA (1)...(19): siRNA sense strand
uaaugaugcuggcuacuuu

SEQ ID NO: 293274 - RNA, 19 nt, Homo sapiens
  misc_RNA (1)...(19): siRNA sense strand
acaccugguucacgaauua

SEQ ID NO: 293275 - RNA, 19 nt, Homo sapiens
  misc_RNA (1)...(19): siRNA sense strand
ggacauggauuugguagag

SEQ ID NO: 293276 - RNA, 19 nt, Homo sapiens
  misc_RNA (1)...(19): siRNA sense strand
gagaggaguuuggaucuug

SEQ ID NO: 293277 - RNA, 19 nt, Homo sapiens
  misc_RNA (1)...(19): siRNA sense strand
gugaauggaugucaggaaa

SEQ ID NO: 293278 - RNA, 19 nt, Homo sapiens
  misc_RNA (1)...(19): siRNA sense strand
gaugcuggcuacuuuaaug

SEQ ID NO: 293279 - RNA, 19 nt, Homo sapiens
  misc_RNA (1)...(19): siRNA sense strand
gaacgcccuuuggagcuua

SEQ ID NO: 293280 - RNA, 19 nt, Homo sapiens
  misc_RNA (1)...(19): siRNA sense strand
gauggaaagcugcuaauga

SEQ ID NO: 293281 - RNA, 19 nt, Homo sapiens
  misc_RNA (1)...(19): siRNA sense strand
gaugaaauggcaccaauug

SEQ ID NO: 293282 - RNA, 19 nt, Homo sapiens
  misc_RNA (1)...(19): siRNA sense strand
cuacugacuugucugaauu

SEQ ID NO: 293283 - RNA, 19 nt, Homo sapiens
  misc_RNA (1)...(19): siRNA sense strand
acagaaacuuccuccagua

SEQ ID NO: 293284 - RNA, 19 nt, Homo sapiens
  misc_RNA (1)...(19): siRNA sense strand
ggcaaugacugcagagaau

SEQ ID NO: 293285 - RNA, 19 nt, Homo sapiens
  misc_RNA (1)...(19): siRNA sense strand
gcuccgagguguguuugua

SEQ ID NO: 293286 - RNA, 19 nt, Homo sapiens
  misc_RNA (1)...(19): siRNA sense strand
ugaaauggcaccaauugaa

SEQ ID NO: 293287 - RNA, 19 nt, Homo sapiens
  misc_RNA (1)...(19): siRNA sense strand
gugaagaugcuguuaagaa

SEQ ID NO: 293288 - RNA, 19 nt, Homo sapiens
  misc_RNA (1)...(19): siRNA sense strand
ucacaccacuggcaagaau

SEQ ID NO: 293289 - RNA, 19 nt, Homo sapiens
  misc_RNA (1)...(19): siRNA sense strand
gcuacugacuugucugaau

SEQ ID NO: 293290 - RNA, 19 nt, Homo sapiens
  misc_RNA (1)...(19): siRNA sense strand
ugcuggagcuguuaucaua

SEQ ID NO: 293291 - RNA, 19 nt, Homo sapiens
  misc_RNA (1)...(19): siRNA sense strand
gaaauggcaccaauugaag

SEQ ID NO: 293292 - RNA, 19 nt, Homo sapiens
  misc_RNA (1)...(19): siRNA sense strand
ggaggaaccgaaagcauga

SEQ ID NO: 293293 - RNA, 19 nt, Homo sapiens
  misc_RNA (1)...(19): siRNA sense strand
aaaccacccuggaacaguu

SEQ ID NO: 293294 - RNA, 19 nt, Homo sapiens
  misc_RNA (1)...(19): siRNA sense strand
cagagaagaaugugacaaa

SEQ ID NO: 293295 - RNA, 19 nt, Homo sapiens
  misc_RNA (1)...(19): siRNA sense strand
gaagugaagacaaagaaag

SEQ ID NO: 293296 - RNA, 19 nt, Homo sapiens
  misc_RNA (1)...(19): siRNA sense strand
caaagucucaccugaaaca

SEQ ID NO: 293297 - RNA, 19 nt, Homo sapiens
  misc_RNA (1)...(19): siRNA sense strand
ggcaaggcauguugguuug

SEQ ID NO: 293298 - RNA, 19 nt, Homo sapiens
  misc_RNA (1)...(19): siRNA sense strand
ccagcucucacgauuaaua

SEQ ID NO: 293299 - RNA, 19 nt, Homo sapiens
  misc_RNA (1)...(19): siRNA sense strand
ggagguggccaagguauug

SEQ ID NO: 293300 - RNA, 19 nt, Homo sapiens
  misc_RNA (1)...(19): siRNA sense strand
guauugcugucaucauuca

SEQ ID NO: 293301 - RNA, 19 nt, Homo sapiens
  misc_RNA (1)...(19): siRNA sense strand
cugcagaguucuucagaug

SEQ ID NO: 293302 - RNA, 19 nt, Homo sapiens
  misc_RNA (1)...(19): siRNA sense strand
uggaucagcuugcauugga

SEQ ID NO: 293303 - RNA, 19 nt, Homo sapiens
  misc_RNA (1)...(19): siRNA sense strand
uuacggaggccuucugaaa

SEQ ID NO: 293304 - RNA, 19 nt, Homo sapiens
  misc_RNA (1)...(19): siRNA sense strand
gcagaguucuucagaugcu

SEQ ID NO: 293305 - RNA, 19 nt, Homo sapiens
  misc_RNA (1)...(19): siRNA sense strand
gaaagcugcuaaugaugcu

SEQ ID NO: 293306 - RNA, 19 nt, Homo sapiens
  misc_RNA (1)...(19): siRNA sense strand
gucaggaaauuuguguuaa

SEQ ID NO: 293307 - RNA, 19 nt, Homo sapiens
  misc_RNA (1)...(19): siRNA sense strand
ugucaggaaauuuguguua

SEQ ID NO: 293308 - RNA, 19 nt, Homo sapiens
  misc_RNA (1)...(19): siRNA sense strand
caagcucccuacuguguca

SEQ ID NO: 293309 - RNA, 19 nt, Homo sapiens
  misc_RNA (1)...(19): siRNA sense strand
cgagguguguuuguaguug

SEQ ID NO: 293310 - RNA, 19 nt, Homo sapiens
  misc_RNA (1)...(19): siRNA sense strand
ggcaauguccugcagaguu

SEQ ID NO: 293311 - RNA, 19 nt, Homo sapiens
  misc_RNA (1)...(19): siRNA sense strand
guuuggaucuugacauaag

SEQ ID NO: 293312 - RNA, 19 nt, Homo sapiens
  misc_RNA (1)...(19): siRNA sense strand
caagaauugugggcuacuu

SEQ ID NO: 293313 - RNA, 19 nt, Homo sapiens
  misc_RNA (1)...(19): siRNA sense strand
ugacuugucugaauuugcu

SEQ ID NO: 293314 - RNA, 19 nt, Homo sapiens
  misc_RNA (1)...(19): siRNA sense strand
acggaggccuucugaaaga

SEQ ID NO: 293315 - RNA, 19 nt, Homo sapiens
  misc_RNA (1)...(19): siRNA sense strand
auaucaagcuggaagauuc

SEQ ID NO: 293316 - RNA, 19 nt, Homo sapiens
  misc_RNA (1)...(19): siRNA sense strand
gauaucaagcuggaagauu

SEQ ID NO: 293317 - RNA, 19 nt, Homo sapiens
  misc_RNA (1)...(19): siRNA sense strand
agucucaccugaaacaguu

SEQ ID NO: 293318 - RNA, 19 nt, Homo sapiens
  misc_RNA (1)...(19): siRNA sense strand
auggaaagcugcuaaugau

SEQ ID NO: 293319 - RNA, 19 nt, Homo sapiens
  misc_RNA (1)...(19): siRNA sense strand
caaaauaagcagagaagaa

SEQ ID NO: 293320 - RNA, 19 nt, Homo sapiens
  misc_RNA (1)...(19): siRNA sense strand
aagcuuggaucagauauca

SEQ ID NO: 293321 - RNA, 19 nt, Homo sapiens
  misc_RNA (1)...(19): siRNA sense strand
guucuucagaugcuauaua

SEQ ID NO: 293322 - RNA, 19 nt, Homo sapiens
  misc_RNA (1)...(19): siRNA sense strand
uggcaaggcauguugguuu

SEQ ID NO: 293323 - RNA, 19 nt, Homo sapiens
  misc_RNA (1)...(19): siRNA sense strand
gggaaugcaucggguguag

SEQ ID NO: 293324 - RNA, 19 nt, Homo sapiens
  misc_RNA (1)...(19): siRNA sense strand
aagaaagauggaacuguua

SEQ ID NO: 293325 - RNA, 19 nt, Homo sapiens
  misc_RNA (1)...(19): siRNA sense strand
caaauaugcccugcaguca

SEQ ID NO: 293326 - RNA, 19 nt, Homo sapiens
  misc_RNA (1)...(19): siRNA sense strand
gaagaaugugacaaauaug

SEQ ID NO: 293327 - RNA, 19 nt, Homo sapiens
  misc_RNA (1)...(19): siRNA sense strand
caggaaauuuguguuaaag

SEQ ID NO: 293328 - RNA, 19 nt, Homo sapiens
  misc_RNA (1)...(19): siRNA sense strand
gcuggcuacuuuaaugaug

SEQ ID NO: 293329 - RNA, 19 nt, Homo sapiens
  misc_RNA (1)...(19): siRNA sense strand
uuaaggacauggauuuggu

SEQ ID NO: 293330 - RNA, 19 nt, Homo sapiens
  misc_RNA (1)...(19): siRNA sense strand
gcuaagcgaacgcccuuug

SEQ ID NO: 293331 - RNA, 19 nt, Homo sapiens
  misc_RNA (1)...(19): siRNA sense strand
aauaugcccugcagucaca

SEQ ID NO: 293332 - RNA, 19 nt, Homo sapiens
  misc_RNA (1)...(19): siRNA sense strand
uuaaagaagcugaaguugu

SEQ ID NO: 293333 - RNA, 19 nt, Homo sapiens
  misc_RNA (1)...(19): siRNA sense strand
cugaaacaguugacagugu

SEQ ID NO: 293334 - RNA, 19 nt, Homo sapiens
  misc_RNA (1)...(19): siRNA sense strand
agguauugcugucaucauu

SEQ ID NO: 293335 - RNA, 19 nt, Homo sapiens
  misc_RNA (1)...(19): siRNA sense strand
uagugaagaugcuguuaag

SEQ ID NO: 293336 - RNA, 19 nt, Homo sapiens
  misc_RNA (1)...(19): siRNA sense strand
gccaagcucccuacugugu

SEQ ID NO: 293337 - RNA, 19 nt, Homo sapiens
  misc_RNA (1)...(19): siRNA sense strand
acaguugacagugugauua

SEQ ID NO: 293338 - RNA, 19 nt, Homo sapiens
  misc_RNA (1)...(19): siRNA sense strand
gaaacaguugacaguguga

SEQ ID NO: 293339 - RNA, 19 nt, Homo sapiens
  misc_RNA (1)...(19): siRNA sense strand
agagaagaaugugacaaau

SEQ ID NO: 293340 - RNA, 19 nt, Homo sapiens
  misc_RNA (1)...(19): siRNA sense strand
cagaaacuuccuccaguau

SEQ ID NO: 293341 - RNA, 19 nt, Homo sapiens
  misc_RNA (1)...(19): siRNA sense strand
gaagaugcuguuaagaaac

SEQ ID NO: 293342 - RNA, 19 nt, Homo sapiens
  misc_RNA (1)...(19): siRNA sense strand
cuagugaagaugcuguuaa

SEQ ID NO: 293343 - RNA, 19 nt, Homo sapiens
  misc_RNA (1)...(19): siRNA sense strand
ugcagagaaucuuacugua

SEQ ID NO: 293344 - RNA, 19 nt, Homo sapiens
  misc_RNA (1)...(19): siRNA sense strand
ugaagacaaagaaaggaaa

SEQ ID NO: 293345 - RNA, 19 nt, Homo sapiens
  misc_RNA (1)...(19): siRNA sense strand
cgaacgcccuuuggagcuu

SEQ ID NO: 293346 - RNA, 19 nt, Homo sapiens
  misc_RNA (1)...(19): siRNA sense strand
cuucacugcuacugacuug

SEQ ID NO: 293347 - RNA, 19 nt, Homo sapiens
  misc_RNA (1)...(19): siRNA sense strand
agaggaguuuggaucuuga

SEQ ID NO: 293348 - RNA, 19 nt, Homo sapiens
  misc_RNA (1)...(19): siRNA sense strand
ugagaggaguuuggaucuu

SEQ ID NO: 293349 - RNA, 19 nt, Homo sapiens
  misc_RNA (1)...(19): siRNA sense strand
uaaggacauggauuuggua

SEQ ID NO: 293350 - RNA, 19 nt, Homo sapiens
  misc_RNA (1)...(19): siRNA sense strand
gaauugugggcuacuuugu

SEQ ID NO: 293351 - RNA, 19 nt, Homo sapiens
  misc_RNA (1)...(19): siRNA sense strand
ggguaucauuaacagauca

SEQ ID NO: 293352 - RNA, 19 nt, Homo sapiens
  misc_RNA (1)...(19): siRNA sense strand
gcacaccugguucacgaau

SEQ ID NO: 293353 - RNA, 19 nt, Homo sapiens
  misc_RNA (1)...(19): siRNA sense strand
uggaggagccauugcuuug

SEQ ID NO: 293354 - RNA, 19 nt, Homo sapiens
  misc_RNA (1)...(19): siRNA sense strand
gcuagugaagaugcuguua

SEQ ID NO: 293355 - RNA, 19 nt, Homo sapiens
  misc_RNA (1)...(19): siRNA sense strand
ugauggugcuggagcuguu

SEQ ID NO: 293356 - RNA, 19 nt, Homo sapiens
  misc_RNA (1)...(19): siRNA sense strand
gugaagacaaagaaaggaa

SEQ ID NO: 293357 - RNA, 19 nt, Homo sapiens
  misc_RNA (1)...(19): siRNA sense strand
ccaauugaagugaagacaa

SEQ ID NO: 293358 - RNA, 19 nt, Homo sapiens
  misc_RNA (1)...(19): siRNA sense strand
ugaagugaagacaaagaaa

SEQ ID NO: 293359 - RNA, 19 nt, Homo sapiens
  misc_RNA (1)...(19): siRNA sense strand
ccaagguauugcugucauc

SEQ ID NO: 293360 - RNA, 19 nt, Homo sapiens
  misc_RNA (1)...(19): siRNA sense strand
gaagacaaagaaaggaaaa

SEQ ID NO: 293361 - RNA, 19 nt, Homo sapiens
  misc_RNA (1)...(19): siRNA sense strand
gcaccaagcugcagaacaa

SEQ ID NO: 293362 - RNA, 19 nt, Homo sapiens
  misc_RNA (1)...(19): siRNA sense strand
gaacaaggagcaugugauu

SEQ ID NO: 293363 - RNA, 19 nt, Homo sapiens
  misc_RNA (1)...(19): siRNA sense strand
gccaauaaguacaugguaa

SEQ ID NO: 293364 - RNA, 19 nt, Homo sapiens
  misc_RNA (1)...(19): siRNA sense strand
acaaggagcaugugauuga

SEQ ID NO: 293365 - RNA, 19 nt, Homo sapiens
  misc_RNA (1)...(19): siRNA sense strand
gagcagcuguccucugaag

SEQ ID NO: 293366 - RNA, 19 nt, Homo sapiens
  misc_RNA (1)...(19): siRNA sense strand
guggaugaguuuccgcuuu

SEQ ID NO: 293367 - RNA, 19 nt, Homo sapiens
  misc_RNA (1)...(19): siRNA sense strand
ccuggaggcugcccgaauu

SEQ ID NO: 293368 - RNA, 19 nt, Homo sapiens
  misc_RNA (1)...(19): siRNA sense strand
ccaauaaguacaugguaaa

SEQ ID NO: 293369 - RNA, 19 nt, Homo sapiens
  misc_RNA (1)...(19): siRNA sense strand
gaagacaugguggcugaaa

SEQ ID NO: 293370 - RNA, 19 nt, Homo sapiens
  misc_RNA (1)...(19): siRNA sense strand
caaugcugaugaauuugaa

SEQ ID NO: 293371 - RNA, 19 nt, Homo sapiens
  misc_RNA (1)...(19): siRNA sense strand
uggaugaguuuccgcuuug

SEQ ID NO: 293372 - RNA, 19 nt, Homo sapiens
  misc_RNA (1)...(19): siRNA sense strand
ugaugaauuugaagacaug

SEQ ID NO: 293373 - RNA, 19 nt, Homo sapiens
  misc_RNA (1)...(19): siRNA sense strand
guucacauuggccaaguua

SEQ ID NO: 293374 - RNA, 19 nt, Homo sapiens
  misc_RNA (1)...(19): siRNA sense strand
ggugucagaugaauaugag

SEQ ID NO: 293375 - RNA, 19 nt, Homo sapiens
  misc_RNA (1)...(19): siRNA sense strand
augagcagcuguccucuga

SEQ ID NO: 293376 - RNA, 19 nt, Homo sapiens
  misc_RNA (1)...(19): siRNA sense strand
gcagggccaaguucaaguu

SEQ ID NO: 293377 - RNA, 19 nt, Homo sapiens
  misc_RNA (1)...(19): siRNA sense strand
gcugaugaauuugaagaca

SEQ ID NO: 293378 - RNA, 19 nt, Homo sapiens
  misc_RNA (1)...(19): siRNA sense strand
cauggugucagaugaauau

SEQ ID NO: 293379 - RNA, 19 nt, Homo sapiens
  misc_RNA (1)...(19): siRNA sense strand
ucacauuggccaaguuauc

SEQ ID NO: 293380 - RNA, 19 nt, Homo sapiens
  misc_RNA (1)...(19): siRNA sense strand
ccaaguucaaugcugauga

SEQ ID NO: 293381 - RNA, 19 nt, Homo sapiens
  misc_RNA (1)...(19): siRNA sense strand
ggaugaguuuccgcuuugu

SEQ ID NO: 293382 - RNA, 19 nt, Homo sapiens
  misc_RNA (1)...(19): siRNA sense strand
gccaaguuaucauguccau

SEQ ID NO: 293383 - RNA, 19 nt, Homo sapiens
  misc_RNA (1)...(19): siRNA sense strand
caaggagcaugugauugag

SEQ ID NO: 293384 - RNA, 19 nt, Homo sapiens
  misc_RNA (1)...(19): siRNA sense strand
cagaacaaggagcauguga

SEQ ID NO: 293385 - RNA, 19 nt, Homo sapiens
  misc_RNA (1)...(19): siRNA sense strand
ccaagcugcagaacaagga

SEQ ID NO: 293386 - RNA, 19 nt, Homo sapiens
  misc_RNA (1)...(19): siRNA sense strand
gggccaaguucaaguuucc

SEQ ID NO: 293387 - RNA, 19 nt, Homo sapiens
  misc_RNA (1)...(19): siRNA sense strand
gguucacauuggccaaguu

SEQ ID NO: 293388 - RNA, 19 nt, Homo sapiens
  misc_RNA (1)...(19): siRNA sense strand
cacauuggccaaguuauca

SEQ ID NO: 293389 - RNA, 19 nt, Homo sapiens
  misc_RNA (1)...(19): siRNA sense strand
gcugacaggcuccaaacag

SEQ ID NO: 293390 - RNA, 19 nt, Homo sapiens
  misc_RNA (1)...(19): siRNA sense strand
cugaugaauuugaagacau

SEQ ID NO: 293391 - RNA, 19 nt, Homo sapiens
  misc_RNA (1)...(19): siRNA sense strand
gcagaacaaggagcaugug

SEQ ID NO: 293392 - RNA, 19 nt, Homo sapiens
  misc_RNA (1)...(19): siRNA sense strand
ggcaaaaguggaugaguuu

SEQ ID NO: 293393 - RNA, 19 nt, Homo sapiens
  misc_RNA (1)...(19): siRNA sense strand
gaaguuggcucuugaauua

SEQ ID NO: 293394 - RNA, 19 nt, Homo sapiens
  misc_RNA (1)...(19): siRNA sense strand
gagcagggcuuccaaagaa

SEQ ID NO: 293395 - RNA, 19 nt, Homo sapiens
  misc_RNA (1)...(19): siRNA sense strand
gaacagaagcagaagauga

SEQ ID NO: 293396 - RNA, 19 nt, Homo sapiens
  misc_RNA (1)...(19): siRNA sense strand
ggaagaagguaccgaggaa

SEQ ID NO: 293397 - RNA, 19 nt, Homo sapiens
  misc_RNA (1)...(19): siRNA sense strand
gcaaacagcccgugggaaa

SEQ ID NO: 293398 - RNA, 19 nt, Homo sapiens
  misc_RNA (1)...(19): siRNA sense strand
ggaaacgucggaaacuuua

SEQ ID NO: 293399 - RNA, 19 nt, Homo sapiens
  misc_RNA (1)...(19): siRNA sense strand
ggagacugcugcucugaaa

SEQ ID NO: 293400 - RNA, 19 nt, Homo sapiens
  misc_RNA (1)...(19): siRNA sense strand
gcacauggcggaccuugaa

SEQ ID NO: 293401 - RNA, 19 nt, Homo sapiens
  misc_RNA (1)...(19): siRNA sense strand
gagaugaagaccaaacaua

SEQ ID NO: 293402 - RNA, 19 nt, Homo sapiens
  misc_RNA (1)...(19): siRNA sense strand
gcaagacgcugcuggaaaa

SEQ ID NO: 293403 - RNA, 19 nt, Homo sapiens
  misc_RNA (1)...(19): siRNA sense strand
ggagguggaucagaaagaa

SEQ ID NO: 293404 - RNA, 19 nt, Homo sapiens
  misc_RNA (1)...(19): siRNA sense strand
gaaacaaaucgaagaguug

SEQ ID NO: 293405 - RNA, 19 nt, Homo sapiens
  misc_RNA (1)...(19): siRNA sense strand
gagaagaauuagcuaucaa

SEQ ID NO: 293406 - RNA, 19 nt, Homo sapiens
  misc_RNA (1)...(19): siRNA sense strand
gagacgagauggaaacaca

SEQ ID NO: 293407 - RNA, 19 nt, Homo sapiens
  misc_RNA (1)...(19): siRNA sense strand
ugagugaggugaagaagga

SEQ ID NO: 293408 - RNA, 19 nt, Homo sapiens
  misc_RNA (1)...(19): siRNA sense strand
ugucggagcugaagaacaa

SEQ ID NO: 293409 - RNA, 19 nt, Homo sapiens
  misc_RNA (1)...(19): siRNA sense strand
gaacaguuucuccaacaaa

SEQ ID NO: 293410 - RNA, 19 nt, Homo sapiens
  misc_RNA (1)...(19): siRNA sense strand
aaagagaaauccaguccuu

SEQ ID NO: 293411 - RNA, 19 nt, Homo sapiens
  misc_RNA (1)...(19): siRNA sense strand
agaaacaaaucgaagaguu

SEQ ID NO: 293412 - RNA, 19 nt, Homo sapiens
  misc_RNA (1)...(19): siRNA sense strand
ccaaugaggcgcugaagaa

SEQ ID NO: 293413 - RNA, 19 nt, Homo sapiens
  misc_RNA (1)...(19): siRNA sense strand
ugacugaccugcagaacau

SEQ ID NO: 293414 - RNA, 19 nt, Homo sapiens
  misc_RNA (1)...(19): siRNA sense strand
gaacgucaagucugaguug

SEQ ID NO: 293415 - RNA, 19 nt, Homo sapiens
  misc_RNA (1)...(19): siRNA sense strand
agaaggagaugaagaccaa

SEQ ID NO: 293416 - RNA, 19 nt, Homo sapiens
  misc_RNA (1)...(19): siRNA sense strand
gaucagaaagaaagagaaa

SEQ ID NO: 293417 - RNA, 19 nt, Homo sapiens
  misc_RNA (1)...(19): siRNA sense strand
ggcaggagcugaugcaagu

SEQ ID NO: 293418 - RNA, 19 nt, Homo sapiens
  misc_RNA (1)...(19): siRNA sense strand
ggaaggccaucacggaaca

SEQ ID NO: 293419 - RNA, 19 nt, Homo sapiens
  misc_RNA (1)...(19): siRNA sense strand
gaggaaacgucggaaacuu

SEQ ID NO: 293420 - RNA, 19 nt, Homo sapiens
  misc_RNA (1)...(19): siRNA sense strand
cauugaggcugacauguug

SEQ ID NO: 293421 - RNA, 19 nt, Homo sapiens
  misc_RNA (1)...(19): siRNA sense strand
gaaacauucccaggagaua

SEQ ID NO: 293422 - RNA, 19 nt, Homo sapiens
  misc_RNA (1)...(19): siRNA sense strand
ggaacaguuucuccaacaa

SEQ ID NO: 293423 - RNA, 19 nt, Homo sapiens
  misc_RNA (1)...(19): siRNA sense strand
gagcaguaccagaggcuua

SEQ ID NO: 293424 - RNA, 19 nt, Homo sapiens
  misc_RNA (1)...(19): siRNA sense strand
ugaauuagagcacgagaaa

SEQ ID NO: 293425 - RNA, 19 nt, Homo sapiens
  misc_RNA (1)...(19): siRNA sense strand
ugaaacagcucaccuugac

SEQ ID NO: 293426 - RNA, 19 nt, Homo sapiens
  misc_RNA (1)...(19): siRNA sense strand
gcaaggagccccucaagaa

SEQ ID NO: 293427 - RNA, 19 nt, Homo sapiens
  misc_RNA (1)...(19): siRNA sense strand
ggagauagcacaguuccaa

SEQ ID NO: 293428 - RNA, 19 nt, Homo sapiens
  misc_RNA (1)...(19): siRNA sense strand
aaacacacuugcagucguu

SEQ ID NO: 293429 - RNA, 19 nt, Homo sapiens
  misc_RNA (1)...(19): siRNA sense strand
agaauuagcuaucaaaucc

SEQ ID NO: 293430 - RNA, 19 nt, Homo sapiens
  misc_RNA (1)...(19): siRNA sense strand
gcauugaggcugacauguu

SEQ ID NO: 293431 - RNA, 19 nt, Homo sapiens
  misc_RNA (1)...(19): siRNA sense strand
ccacagagacacagucaga

SEQ ID NO: 293432 - RNA, 19 nt, Homo sapiens
  misc_RNA (1)...(19): siRNA sense strand
agaggaggcuggaagaguu

SEQ ID NO: 293433 - RNA, 19 nt, Homo sapiens
  misc_RNA (1)...(19): siRNA sense strand
ugucugagguggauggaaa

SEQ ID NO: 293434 - RNA, 19 nt, Homo sapiens
  misc_RNA (1)...(19): siRNA sense strand
ucaagaauccagaggcuuu

SEQ ID NO: 293435 - RNA, 19 nt, Homo sapiens
  misc_RNA (1)...(19): siRNA sense strand
aagaccagcucaucaguga

SEQ ID NO: 293436 - RNA, 19 nt, Homo sapiens
  misc_RNA (1)...(19): siRNA sense strand
ggaggacgagcuucaagaa

SEQ ID NO: 293437 - RNA, 19 nt, Homo sapiens
  misc_RNA (1)...(19): siRNA sense strand
agaugaagaccaaacauaa

SEQ ID NO: 293438 - RNA, 19 nt, Homo sapiens
  misc_RNA (1)...(19): siRNA sense strand
gaaacgcaacugugcucua

SEQ ID NO: 293439 - RNA, 19 nt, Homo sapiens
  misc_RNA (1)...(19): siRNA sense strand
gaaacagcuuuggccaaga

SEQ ID NO: 293440 - RNA, 19 nt, Homo sapiens
  misc_RNA (1)...(19): siRNA sense strand
gaagaaacaaaucgaagag

SEQ ID NO: 293441 - RNA, 19 nt, Homo sapiens
  misc_RNA (1)...(19): siRNA sense strand
uuagagaaguuaagagaag

SEQ ID NO: 293442 - RNA, 19 nt, Homo sapiens
  misc_RNA (1)...(19): siRNA sense strand
gucaggcacuuaaagagaa

SEQ ID NO: 293443 - RNA, 19 nt, Homo sapiens
  misc_RNA (1)...(19): siRNA sense strand
auccugagcucauguuaaa

SEQ ID NO: 293444 - RNA, 19 nt, Homo sapiens
  misc_RNA (1)...(19): siRNA sense strand
cacaacagcauccuagaaa

SEQ ID NO: 293445 - RNA, 19 nt, Homo sapiens
  misc_RNA (1)...(19): siRNA sense strand
caacagcauccuagaaaca

SEQ ID NO: 293446 - RNA, 19 nt, Homo sapiens
  misc_RNA (1)...(19): siRNA sense strand
aaugggagguggaucagaa

SEQ ID NO: 293447 - RNA, 19 nt, Homo sapiens
  misc_RNA (1)...(19): siRNA sense strand
caagagggaggcagaccua

SEQ ID NO: 293448 - RNA, 19 nt, Homo sapiens
  misc_RNA (1)...(19): siRNA sense strand
gagcugaagaacaacauga

SEQ ID NO: 293449 - RNA, 19 nt, Homo sapiens
  misc_RNA (1)...(19): siRNA sense strand
agagaagaauuagcuauca

SEQ ID NO: 293450 - RNA, 19 nt, Homo sapiens
  misc_RNA (1)...(19): siRNA sense strand
gagaaauccaguccuugaa

SEQ ID NO: 293451 - RNA, 19 nt, Homo sapiens
  misc_RNA (1)...(19): siRNA sense strand
ucacggaacagaagcagaa

SEQ ID NO: 293452 - RNA, 19 nt, Homo sapiens
  misc_RNA (1)...(19): siRNA sense strand
caggagagguccagucaac

SEQ ID NO: 293453 - RNA, 19 nt, Homo sapiens
  misc_RNA (1)...(19): siRNA sense strand
uccagaggcuuuaggaaga

SEQ ID NO: 293454 - RNA, 19 nt, Homo sapiens
  misc_RNA (1)...(19): siRNA sense strand
ugaagaaacaaaucgaaga

SEQ ID NO: 293455 - RNA, 19 nt, Homo sapiens
  misc_RNA (1)...(19): siRNA sense strand
uccggucucuggccgauua

SEQ ID NO: 293456 - RNA, 19 nt, Homo sapiens
  misc_RNA (1)...(19): siRNA sense strand
gauccugagcucauguuaa

SEQ ID NO: 293457 - RNA, 19 nt, Homo sapiens
  misc_RNA (1)...(19): siRNA sense strand
gcaccuggaccugaugaaa

SEQ ID NO: 293458 - RNA, 19 nt, Homo sapiens
  misc_RNA (1)...(19): siRNA sense strand
cugcaggccucacuagaga

SEQ ID NO: 293459 - RNA, 19 nt, Homo sapiens
  misc_RNA (1)...(19): siRNA sense strand
aggcagaccuaguccaguu

SEQ ID NO: 293460 - RNA, 19 nt, Homo sapiens
  misc_RNA (1)...(19): siRNA sense strand
caagaauccagaggcuuua

SEQ ID NO: 293461 - RNA, 19 nt, Homo sapiens
  misc_RNA (1)...(19): siRNA sense strand
cagucaaccugcaaccaaa

SEQ ID NO: 293462 - RNA, 19 nt, Homo sapiens
  misc_RNA (1)...(19): siRNA sense strand
aaacagcuuuggccaagag

SEQ ID NO: 293463 - RNA, 19 nt, Homo sapiens
  misc_RNA (1)...(19): siRNA sense strand
ccagaggcuuuaggaagaa

SEQ ID NO: 293464 - RNA, 19 nt, Homo sapiens
  misc_RNA (1)...(19): siRNA sense strand
ggacgagcuucaagaaucc

SEQ ID NO: 293465 - RNA, 19 nt, Homo sapiens
  misc_RNA (1)...(19): siRNA sense strand
cgagggaccuauggcauuc

SEQ ID NO: 293466 - RNA, 19 nt, Homo sapiens
  misc_RNA (1)...(19): siRNA sense strand
gacccagaaggauaaauuu

SEQ ID NO: 293467 - RNA, 19 nt, Homo sapiens
  misc_RNA (1)...(19): siRNA sense strand
agagaaauccaguccuuga

SEQ ID NO: 293468 - RNA, 19 nt, Homo sapiens
  misc_RNA (1)...(19): siRNA sense strand
accagcagcuugaggcuuu

SEQ ID NO: 293469 - RNA, 19 nt, Homo sapiens
  misc_RNA (1)...(19): siRNA sense strand
ccuauggcauucugucgaa

SEQ ID NO: 293470 - RNA, 19 nt, Homo sapiens
  misc_RNA (1)...(19): siRNA sense strand
aaacgcaacugugcucuac

SEQ ID NO: 293471 - RNA, 19 nt, Homo sapiens
  misc_RNA (1)...(19): siRNA sense strand
ugacccagaaggauaaauu

SEQ ID NO: 293472 - RNA, 19 nt, Homo sapiens
  misc_RNA (1)...(19): siRNA sense strand
ucagaaagaaagagaaauc

SEQ ID NO: 293473 - RNA, 19 nt, Homo sapiens
  misc_RNA (1)...(19): siRNA sense strand
agaggaggaucgccagaug

SEQ ID NO: 293474 - RNA, 19 nt, Homo sapiens
  misc_RNA (1)...(19): siRNA sense strand
aggacgagcuucaagaauc

SEQ ID NO: 293475 - RNA, 19 nt, Homo sapiens
  misc_RNA (1)...(19): siRNA sense strand
gaugaagaccaaacauaag

SEQ ID NO: 293476 - RNA, 19 nt, Homo sapiens
  misc_RNA (1)...(19): siRNA sense strand
gucggaaacuuuagagaag

SEQ ID NO: 293477 - RNA, 19 nt, Homo sapiens
  misc_RNA (1)...(19): siRNA sense strand
gaagaagguaccgaggaaa

SEQ ID NO: 293478 - RNA, 19 nt, Homo sapiens
  misc_RNA (1)...(19): siRNA sense strand
gcagcagcguguccuugga

SEQ ID NO: 293479 - RNA, 19 nt, Homo sapiens
  misc_RNA (1)...(19): siRNA sense strand
cggcguccguugugucuga

SEQ ID NO: 293480 - RNA, 19 nt, Homo sapiens
  misc_RNA (1)...(19): siRNA sense strand
ucaaaugggagguggauca

SEQ ID NO: 293481 - RNA, 19 nt, Homo sapiens
  misc_RNA (1)...(19): siRNA sense strand
cacgagaaagggaagcuua

SEQ ID NO: 293482 - RNA, 19 nt, Homo sapiens
  misc_RNA (1)...(19): siRNA sense strand
gaaggagcgagacgagaug

SEQ ID NO: 293483 - RNA, 19 nt, Homo sapiens
  misc_RNA (1)...(19): siRNA sense strand
ggucaacggccaggagauu

SEQ ID NO: 293484 - RNA, 19 nt, Homo sapiens
  misc_RNA (1)...(19): siRNA sense strand
guuaaacccagaaaacuua

SEQ ID NO: 293485 - RNA, 19 nt, Homo sapiens
  misc_RNA (1)...(19): siRNA sense strand
gauggaaaaucucaaaugg

SEQ ID NO: 293486 - RNA, 19 nt, Homo sapiens
  misc_RNA (1)...(19): siRNA sense strand
ggaaaccaagagauggaaa

SEQ ID NO: 293487 - RNA, 19 nt, Homo sapiens
  misc_RNA (1)...(19): siRNA sense strand
ggaacacaacagcauccua

SEQ ID NO: 293488 - RNA, 19 nt, Homo sapiens
  misc_RNA (1)...(19): siRNA sense strand
cggcugggcucagacuuga

SEQ ID NO: 293489 - RNA, 19 nt, Homo sapiens
  misc_RNA (1)...(19): siRNA sense strand
acagguccaugaaggagaa

SEQ ID NO: 293490 - RNA, 19 nt, Homo sapiens
  misc_RNA (1)...(19): siRNA sense strand
gcugagggcaguguuagaa

SEQ ID NO: 293491 - RNA, 19 nt, Homo sapiens
  misc_RNA (1)...(19): siRNA sense strand
ccaugacccagaaggauaa

SEQ ID NO: 293492 - RNA, 19 nt, Homo sapiens
  misc_RNA (1)...(19): siRNA sense strand
gaggaggaucgccagauga

SEQ ID NO: 293493 - RNA, 19 nt, Homo sapiens
  misc_RNA (1)...(19): siRNA sense strand
ucacaacgcuugaccaaua

SEQ ID NO: 293494 - RNA, 19 nt, Homo sapiens
  misc_RNA (1)...(19): siRNA sense strand
gaaauucccuucuggcaau

SEQ ID NO: 293495 - RNA, 19 nt, Homo sapiens
  misc_RNA (1)...(19): siRNA sense strand
gcaauuacccuccauguau

SEQ ID NO: 293496 - RNA, 19 nt, Homo sapiens
  misc_RNA (1)...(19): siRNA sense strand
caagggaaguuacauaguu

SEQ ID NO: 293497 - RNA, 19 nt, Homo sapiens
  misc_RNA (1)...(19): siRNA sense strand
caaaugaaaugcucuaugg

SEQ ID NO: 293498 - RNA, 19 nt, Homo sapiens
  misc_RNA (1)...(19): siRNA sense strand
gaugugaucuggcaauaug

SEQ ID NO: 293499 - RNA, 19 nt, Homo sapiens
  misc_RNA (1)...(19): siRNA sense strand
caauuacccuccauguaua

SEQ ID NO: 293500 - RNA, 19 nt, Homo sapiens
  misc_RNA (1)...(19): siRNA sense strand
aggaauggcuggaacaaua

SEQ ID NO: 293501 - RNA, 19 nt, Homo sapiens
  misc_RNA (1)...(19): siRNA sense strand
gaacauggaugcagaacac

SEQ ID NO: 293502 - RNA, 19 nt, Homo sapiens
  misc_RNA (1)...(19): siRNA sense strand
caauauggguugcugaaga

SEQ ID NO: 293503 - RNA, 19 nt, Homo sapiens
  misc_RNA (1)...(19): siRNA sense strand
guauagggccuguaaguuu

SEQ ID NO: 293504 - RNA, 19 nt, Homo sapiens
  misc_RNA (1)...(19): siRNA sense strand
gacaugaaguaccuguaua

SEQ ID NO: 293505 - RNA, 19 nt, Homo sapiens
  misc_RNA (1)...(19): siRNA sense strand
gagaucugcuuguccauug

SEQ ID NO: 293506 - RNA, 19 nt, Homo sapiens
  misc_RNA (1)...(19): siRNA sense strand
gugcuuuacuuacaucuuu

SEQ ID NO: 293507 - RNA, 19 nt, Homo sapiens
  misc_RNA (1)...(19): siRNA sense strand
ggagagaggccugaaauca

SEQ ID NO: 293508 - RNA, 19 nt, Homo sapiens
  misc_RNA (1)...(19): siRNA sense strand
caaagucuccacugaugua

SEQ ID NO: 293509 - RNA, 19 nt, Homo sapiens
  misc_RNA (1)...(19): siRNA sense strand
ggcaaagucuccacugaug

SEQ ID NO: 293510 - RNA, 19 nt, Homo sapiens
  misc_RNA (1)...(19): siRNA sense strand
ucacacaggacaugaagua

SEQ ID NO: 293511 - RNA, 19 nt, Homo sapiens
  misc_RNA (1)...(19): siRNA sense strand
ggacaugaaguaccuguau

SEQ ID NO: 293512 - RNA, 19 nt, Homo sapiens
  misc_RNA (1)...(19): siRNA sense strand
aaugguaccaggaauauua

SEQ ID NO: 293513 - RNA, 19 nt, Homo sapiens
  misc_RNA (1)...(19): siRNA sense strand
uaagaacuuuggaguggaa

SEQ ID NO: 293514 - RNA, 19 nt, Homo sapiens
  misc_RNA (1)...(19): siRNA sense strand
ggcagaagauugcaucaca

SEQ ID NO: 293515 - RNA, 19 nt, Homo sapiens
  misc_RNA (1)...(19): siRNA sense strand
ccuauaagguauucagaga

SEQ ID NO: 293516 - RNA, 19 nt, Homo sapiens
  misc_RNA (1)...(19): siRNA sense strand
uauagggccuguaaguuug

SEQ ID NO: 293517 - RNA, 19 nt, Homo sapiens
  misc_RNA (1)...(19): siRNA sense strand
cuacaucuaugcucuucuu

SEQ ID NO: 293518 - RNA, 19 nt, Homo sapiens
  misc_RNA (1)...(19): siRNA sense strand
gaauggugcuuagaguaug

SEQ ID NO: 293519 - RNA, 19 nt, Homo sapiens
  misc_RNA (1)...(19): siRNA sense strand
gccgaaggcuacuuugaug

SEQ ID NO: 293520 - RNA, 19 nt, Homo sapiens
  misc_RNA (1)...(19): siRNA sense strand
uggcuggaauuuauuacua

SEQ ID NO: 293521 - RNA, 19 nt, Homo sapiens
  misc_RNA (1)...(19): siRNA sense strand
guaccaggaauauuaugua

SEQ ID NO: 293522 - RNA, 19 nt, Homo sapiens
  misc_RNA (1)...(19): siRNA sense strand
cacaacgcuugaccaauaa

SEQ ID NO: 293523 - RNA, 19 nt, Homo sapiens
  misc_RNA (1)...(19): siRNA sense strand
cauccaggccuauaaggua

SEQ ID NO: 293524 - RNA, 19 nt, Homo sapiens
  misc_RNA (1)...(19): siRNA sense strand
agagaaacuucacggcaaa

SEQ ID NO: 293525 - RNA, 19 nt, Homo sapiens
  misc_RNA (1)...(19): siRNA sense strand
guauugcugugcuuuacuu

SEQ ID NO: 293526 - RNA, 19 nt, Homo sapiens
  misc_RNA (1)...(19): siRNA sense strand
ggaauggcuggaacaauau

SEQ ID NO: 293527 - RNA, 19 nt, Homo sapiens
  misc_RNA (1)...(19): siRNA sense strand
aagggaaguuacauaguuu

SEQ ID NO: 293528 - RNA, 19 nt, Homo sapiens
  misc_RNA (1)...(19): siRNA sense strand
aauauggguugcugaagaa

SEQ ID NO: 293529 - RNA, 19 nt, Homo sapiens
  misc_RNA (1)...(19): siRNA sense strand
gaauggcuggaacaauaua

SEQ ID NO: 293530 - RNA, 19 nt, Homo sapiens
  misc_RNA (1)...(19): siRNA sense strand
agucuccacugauguauga

SEQ ID NO: 293531 - RNA, 19 nt, Homo sapiens
  misc_RNA (1)...(19): siRNA sense strand
ccuguaaguuugcugaaug

SEQ ID NO: 293532 - RNA, 19 nt, Homo sapiens
  misc_RNA (1)...(19): siRNA sense strand
uggccuggcuggaauuuau

SEQ ID NO: 293533 - RNA, 19 nt, Homo sapiens
  misc_RNA (1)...(19): siRNA sense strand
gcaaagucugaacugcuua

SEQ ID NO: 293534 - RNA, 19 nt, Homo sapiens
  misc_RNA (1)...(19): siRNA sense strand
cagcugaaauucccuucug

SEQ ID NO: 293535 - RNA, 19 nt, Homo sapiens
  misc_RNA (1)...(19): siRNA sense strand
ggcaauuacccuccaugua

SEQ ID NO: 293536 - RNA, 19 nt, Homo sapiens
  misc_RNA (1)...(19): siRNA sense strand
gcucauggccuggcuggaa

SEQ ID NO: 293537 - RNA, 19 nt, Homo sapiens
  misc_RNA (1)...(19): siRNA sense strand
gaaggaauggcuggaacaa

SEQ ID NO: 293538 - RNA, 19 nt, Homo sapiens
  misc_RNA (1)...(19): siRNA sense strand
gcugaauggugcuuagagu

SEQ ID NO: 293539 - RNA, 19 nt, Homo sapiens
  misc_RNA (1)...(19): siRNA sense strand
caaagucugaacugcuuaa

SEQ ID NO: 293540 - RNA, 19 nt, Homo sapiens
  misc_RNA (1)...(19): siRNA sense strand
ugaauggugcuuagaguau

SEQ ID NO: 293541 - RNA, 19 nt, Homo sapiens
  misc_RNA (1)...(19): siRNA sense strand
ccacgguucugcagggaau

SEQ ID NO: 293542 - RNA, 19 nt, Homo sapiens
  misc_RNA (1)...(19): siRNA sense strand
cagcccagccuucaaguga

SEQ ID NO: 293543 - RNA, 19 nt, Homo sapiens
  misc_RNA (1)...(19): siRNA sense strand
cggcuaauucaccuaaaua

SEQ ID NO: 293544 - RNA, 19 nt, Homo sapiens
  misc_RNA (1)...(19): siRNA sense strand
gggagcuucuucagcaaau

SEQ ID NO: 293545 - RNA, 19 nt, Homo sapiens
  misc_RNA (1)...(19): siRNA sense strand
gugcuuagaguauggagaa

SEQ ID NO: 293546 - RNA, 19 nt, Homo sapiens
  misc_RNA (1)...(19): siRNA sense strand
ggaaaaguaucucugugau

SEQ ID NO: 293547 - RNA, 19 nt, Homo sapiens
  misc_RNA (1)...(19): siRNA sense strand
aucacaagaugaacaauga

SEQ ID NO: 293548 - RNA, 19 nt, Homo sapiens
  misc_RNA (1)...(19): siRNA sense strand
ggagaacauggaugcagaa

SEQ ID NO: 293549 - RNA, 19 nt, Homo sapiens
  misc_RNA (1)...(19): siRNA sense strand
gcaaagucuccacugaugu

SEQ ID NO: 293550 - RNA, 19 nt, Homo sapiens
  misc_RNA (1)...(19): siRNA sense strand
ccaaaugaaaugcucuaug

SEQ ID NO: 293551 - RNA, 19 nt, Homo sapiens
  misc_RNA (1)...(19): siRNA sense strand
gggccuucccgaauccuua

SEQ ID NO: 293552 - RNA, 19 nt, Homo sapiens
  misc_RNA (1)...(19): siRNA sense strand
agucugaacugcuuaacca

SEQ ID NO: 293553 - RNA, 19 nt, Homo sapiens
  misc_RNA (1)...(19): siRNA sense strand
uaagauugauccucaugcu

SEQ ID NO: 293554 - RNA, 19 nt, Homo sapiens
  misc_RNA (1)...(19): siRNA sense strand
gauugcaucacacggcuaa

SEQ ID NO: 293555 - RNA, 19 nt, Homo sapiens
  misc_RNA (1)...(19): siRNA sense strand
gagaagcaggcagaagauu

SEQ ID NO: 293556 - RNA, 19 nt, Homo sapiens
  misc_RNA (1)...(19): siRNA sense strand
gaagcaggcagaagauugc

SEQ ID NO: 293557 - RNA, 19 nt, Homo sapiens
  misc_RNA (1)...(19): siRNA sense strand
uaccaggaauauuauguag

SEQ ID NO: 293558 - RNA, 19 nt, Homo sapiens
  misc_RNA (1)...(19): siRNA sense strand
ggcuaauucaccuaaauaa

SEQ ID NO: 293559 - RNA, 19 nt, Homo sapiens
  misc_RNA (1)...(19): siRNA sense strand
guaucucugugaugccuau

SEQ ID NO: 293560 - RNA, 19 nt, Homo sapiens
  misc_RNA (1)...(19): siRNA sense strand
caagaugaacaaugagaag

SEQ ID NO: 293561 - RNA, 19 nt, Homo sapiens
  misc_RNA (1)...(19): siRNA sense strand
uuuccuggcugaccugcua

SEQ ID NO: 293562 - RNA, 19 nt, Homo sapiens
  misc_RNA (1)...(19): siRNA sense strand
ugaaugguaccaggaauau

SEQ ID NO: 293563 - RNA, 19 nt, Homo sapiens
  misc_RNA (1)...(19): siRNA sense strand
agaagcaggcagaagauug

SEQ ID NO: 293564 - RNA, 19 nt, Homo sapiens
  misc_RNA (1)...(19): siRNA sense strand
uggcuggaacaauauauuu

SEQ ID NO: 293565 - RNA, 19 nt, Homo sapiens
  misc_RNA (1)...(19): siRNA sense strand
cugaugugaucuggcaaua

SEQ ID NO: 293566 - RNA, 19 nt, Homo sapiens
  misc_RNA (1)...(19): siRNA sense strand
caagugagccaagggaagu

SEQ ID NO: 293567 - RNA, 19 nt, Homo sapiens
  misc_RNA (1)...(19): siRNA sense strand
uacacuggcugggcaggua

SEQ ID NO: 293568 - RNA, 19 nt, Homo sapiens
  misc_RNA (1)...(19): siRNA sense strand
gcagguauugcugugcuuu

SEQ ID NO: 293569 - RNA, 19 nt, Homo sapiens
  misc_RNA (1)...(19): siRNA sense strand
uauguaaagcaaagucuga

SEQ ID NO: 293570 - RNA, 19 nt, Homo sapiens
  misc_RNA (1)...(19): siRNA sense strand
ggccgaaggcuacuuugau

SEQ ID NO: 293571 - RNA, 19 nt, Homo sapiens
  misc_RNA (1)...(19): siRNA sense strand
gccaagggaaguuacauag

SEQ ID NO: 293572 - RNA, 19 nt, Homo sapiens
  misc_RNA (1)...(19): siRNA sense strand
guaugaaugguaccaggaa

SEQ ID NO: 293573 - RNA, 19 nt, Homo sapiens
  misc_RNA (1)...(19): siRNA sense strand
aaagccauauucagcagau

SEQ ID NO: 293574 - RNA, 19 nt, Homo sapiens
  misc_RNA (1)...(19): siRNA sense strand
uaaagcaaagucugaacug

SEQ ID NO: 293575 - RNA, 19 nt, Homo sapiens
  misc_RNA (1)...(19): siRNA sense strand
uaucacaagaugaacaaug

SEQ ID NO: 293576 - RNA, 19 nt, Homo sapiens
  misc_RNA (1)...(19): siRNA sense strand
uaagguauucagagaggaa

SEQ ID NO: 293577 - RNA, 19 nt, Homo sapiens
  misc_RNA (1)...(19): siRNA sense strand
gaaugguaccaggaauauu

SEQ ID NO: 293578 - RNA, 19 nt, Homo sapiens
  misc_RNA (1)...(19): siRNA sense strand
ccacugauguaugaauggu

SEQ ID NO: 293579 - RNA, 19 nt, Homo sapiens
  misc_RNA (1)...(19): siRNA sense strand
gcuaauucaccuaaauaag

SEQ ID NO: 293580 - RNA, 19 nt, Homo sapiens
  misc_RNA (1)...(19): siRNA sense strand
guaaagcaaagucugaacu

SEQ ID NO: 293581 - RNA, 19 nt, Homo sapiens
  misc_RNA (1)...(19): siRNA sense strand
caauaagauucgggagcuu

SEQ ID NO: 293582 - RNA, 19 nt, Homo sapiens
  misc_RNA (1)...(19): siRNA sense strand
cagguauugcugugcuuua

SEQ ID NO: 293583 - RNA, 19 nt, Homo sapiens
  misc_RNA (1)...(19): siRNA sense strand
acacggcuaauucaccuaa

SEQ ID NO: 293584 - RNA, 19 nt, Homo sapiens
  misc_RNA (1)...(19): siRNA sense strand
gacccugccuaccuacagu

SEQ ID NO: 293585 - RNA, 19 nt, Homo sapiens
  misc_RNA (1)...(19): siRNA sense strand
ucagcagauuugugaaaca

SEQ ID NO: 293586 - RNA, 19 nt, Homo sapiens
  misc_RNA (1)...(19): siRNA sense strand
uccaucaccuuccuuugug

SEQ ID NO: 293587 - RNA, 19 nt, Homo sapiens
  misc_RNA (1)...(19): siRNA sense strand
uauaggugauaaucgagau

SEQ ID NO: 293588 - RNA, 19 nt, Homo sapiens
  misc_RNA (1)...(19): siRNA sense strand
gcaucacacggcuaauuca

SEQ ID NO: 293589 - RNA, 19 nt, Homo sapiens
  misc_RNA (1)...(19): siRNA sense strand
uugcugugcuuuacuuaca

SEQ ID NO: 293590 - RNA, 19 nt, Homo sapiens
  misc_RNA (1)...(19): siRNA sense strand
caacgcuugaccaauaaga

SEQ ID NO: 293591 - RNA, 19 nt, Homo sapiens
  misc_RNA (1)...(19): siRNA sense strand
cccuuucucucucuuugaa

SEQ ID NO: 293592 - RNA, 19 nt, Homo sapiens
  misc_RNA (1)...(19): siRNA sense strand
ggagcuucuucagcaaaug

SEQ ID NO: 293593 - RNA, 19 nt, Homo sapiens
  misc_RNA (1)...(19): siRNA sense strand
ccaagaagguuccgugguu

SEQ ID NO: 293594 - RNA, 19 nt, Homo sapiens
  misc_RNA (1)...(19): siRNA sense strand
ggaagaauagcaagaagaa

SEQ ID NO: 293595 - RNA, 19 nt, Homo sapiens
  misc_RNA (1)...(19): siRNA sense strand
gcaccuaccucaaguacuc

SEQ ID NO: 293596 - RNA, 19 nt, Homo sapiens
  misc_RNA (1)...(19): siRNA sense strand
ucaaggcgcuggugcagaa

SEQ ID NO: 293597 - RNA, 19 nt, Homo sapiens
  misc_RNA (1)...(19): siRNA sense strand
gcucgucgcuggccaagau

SEQ ID NO: 293598 - RNA, 19 nt, Homo sapiens
  misc_RNA (1)...(19): siRNA sense strand
ucuaagaagaggaagaaua

SEQ ID NO: 293599 - RNA, 19 nt, Homo sapiens
  misc_RNA (1)...(19): siRNA sense strand
cuaagaagaggaagaauag

SEQ ID NO: 293600 - RNA, 19 nt, Homo sapiens
  misc_RNA (1)...(19): siRNA sense strand
gaggaagaauagcaagaag

SEQ ID NO: 293601 - RNA, 19 nt, Homo sapiens
  misc_RNA (1)...(19): siRNA sense strand
aagaauagcaagaagaaga

SEQ ID NO: 293602 - RNA, 19 nt, Homo sapiens
  misc_RNA (1)...(19): siRNA sense strand
ccgagggaauggccaagaa

SEQ ID NO: 293603 - RNA, 19 nt, Homo sapiens
  misc_RNA (1)...(19): siRNA sense strand
caucuaagaagaggaagaa

SEQ ID NO: 293604 - RNA, 19 nt, Homo sapiens
  misc_RNA (1)...(19): siRNA sense strand
gggcgcaccuaccucaagu

SEQ ID NO: 293605 - RNA, 19 nt, Homo sapiens
  misc_RNA (1)...(19): siRNA sense strand
agaauagcaagaagaagaa

SEQ ID NO: 293606 - RNA, 19 nt, Homo sapiens
  misc_RNA (1)...(19): siRNA sense strand
cgccaacgguuccuucaag

SEQ ID NO: 293607 - RNA, 19 nt, Homo sapiens
  misc_RNA (1)...(19): siRNA sense strand
agaggaagaauagcaagaa

SEQ ID NO: 293608 - RNA, 19 nt, Homo sapiens
  misc_RNA (1)...(19): siRNA sense strand
agaagaggaagaauagcaa

SEQ ID NO: 293609 - RNA, 19 nt, Homo sapiens
  misc_RNA (1)...(19): siRNA sense strand
acacgcuucugcaggugaa

SEQ ID NO: 293610 - RNA, 19 nt, Homo sapiens
  misc_RNA (1)...(19): siRNA sense strand
uaccucaaguacucgauca

SEQ ID NO: 293611 - RNA, 19 nt, Homo sapiens
  misc_RNA (1)...(19): siRNA sense strand
aagaagaggaagaauagca

SEQ ID NO: 293612 - RNA, 19 nt, Homo sapiens
  misc_RNA (1)...(19): siRNA sense strand
gaagaauagcaagaagaag

SEQ ID NO: 293613 - RNA, 19 nt, Homo sapiens
  misc_RNA (1)...(19): siRNA sense strand
gggauacguuuccacgaua

SEQ ID NO: 293614 - RNA, 19 nt, Homo sapiens
  misc_RNA (1)...(19): siRNA sense strand
gggacucaaugcuuaagua

SEQ ID NO: 293615 - RNA, 19 nt, Homo sapiens
  misc_RNA (1)...(19): siRNA sense strand
aauagcaucuucagcgaua

SEQ ID NO: 293616 - RNA, 19 nt, Homo sapiens
  misc_RNA (1)...(19): siRNA sense strand
caagaucacuaaaccagau

SEQ ID NO: 293617 - RNA, 19 nt, Homo sapiens
  misc_RNA (1)...(19): siRNA sense strand
gaauuuggcuucggcuuca

SEQ ID NO: 293618 - RNA, 19 nt, Homo sapiens
  misc_RNA (1)...(19): siRNA sense strand
ggauacguuuccacgauaa

SEQ ID NO: 293619 - RNA, 19 nt, Homo sapiens
  misc_RNA (1)...(19): siRNA sense strand
ggagagugaugcaagaagu

SEQ ID NO: 293620 - RNA, 19 nt, Homo sapiens
  misc_RNA (1)...(19): siRNA sense strand
gaugauguauggccuaugg

SEQ ID NO: 293621 - RNA, 19 nt, Homo sapiens
  misc_RNA (1)...(19): siRNA sense strand
gagaugaagaugaugauga

SEQ ID NO: 293622 - RNA, 19 nt, Homo sapiens
  misc_RNA (1)...(19): siRNA sense strand
cuucgggacucaaugcuua

SEQ ID NO: 293623 - RNA, 19 nt, Homo sapiens
  misc_RNA (1)...(19): siRNA sense strand
ggacagagacuacaguaac

SEQ ID NO: 293624 - RNA, 19 nt, Homo sapiens
  misc_RNA (1)...(19): siRNA sense strand
ugaagaugaugaugaggaa

SEQ ID NO: 293625 - RNA, 19 nt, Homo sapiens
  misc_RNA (1)...(19): siRNA sense strand
cggcuuugaugaccuagua

SEQ ID NO: 293626 - RNA, 19 nt, Homo sapiens
  misc_RNA (1)...(19): siRNA sense strand
guacgagauuucaauagca

SEQ ID NO: 293627 - RNA, 19 nt, Homo sapiens
  misc_RNA (1)...(19): siRNA sense strand
ucccagaggccauuucaua

SEQ ID NO: 293628 - RNA, 19 nt, Homo sapiens
  misc_RNA (1)...(19): siRNA sense strand
ugaggaagaagaagaagaa

SEQ ID NO: 293629 - RNA, 19 nt, Homo sapiens
  misc_RNA (1)...(19): siRNA sense strand
uaaaccagaugggauagug

SEQ ID NO: 293630 - RNA, 19 nt, Homo sapiens
  misc_RNA (1)...(19): siRNA sense strand
ggacucaaugcuuaaguau

SEQ ID NO: 293631 - RNA, 19 nt, Homo sapiens
  misc_RNA (1)...(19): siRNA sense strand
gaggccauuucauagguuu

SEQ ID NO: 293632 - RNA, 19 nt, Homo sapiens
  misc_RNA (1)...(19): siRNA sense strand
cacgauaacuucggcuuug

SEQ ID NO: 293633 - RNA, 19 nt, Homo sapiens
  misc_RNA (1)...(19): siRNA sense strand
gagccucuuugaucucuuc

SEQ ID NO: 293634 - RNA, 19 nt, Homo sapiens
  misc_RNA (1)...(19): siRNA sense strand
ggagggaugacucgagaug

SEQ ID NO: 293635 - RNA, 19 nt, Homo sapiens
  misc_RNA (1)...(19): siRNA sense strand
cagaggccauuucauaggu

SEQ ID NO: 293636 - RNA, 19 nt, Homo sapiens
  misc_RNA (1)...(19): siRNA sense strand
agggaugacucgagaugaa

SEQ ID NO: 293637 - RNA, 19 nt, Homo sapiens
  misc_RNA (1)...(19): siRNA sense strand
cuaguacgagauuucaaua

SEQ ID NO: 293638 - RNA, 19 nt, Homo sapiens
  misc_RNA (1)...(19): siRNA sense strand
ugaccaagaucacuaaacc

SEQ ID NO: 293639 - RNA, 19 nt, Homo sapiens
  misc_RNA (1)...(19): siRNA sense strand
gacucgagaugaagaugau

SEQ ID NO: 293640 - RNA, 19 nt, Homo sapiens
  misc_RNA (1)...(19): siRNA sense strand
gauccagaaucaccaagac

SEQ ID NO: 293641 - RNA, 19 nt, Homo sapiens
  misc_RNA (1)...(19): siRNA sense strand
gauaacuucggcuuugaug

SEQ ID NO: 293642 - RNA, 19 nt, Homo sapiens
  misc_RNA (1)...(19): siRNA sense strand
gaugaccuaguacgagauu

SEQ ID NO: 293643 - RNA, 19 nt, Homo sapiens
  misc_RNA (1)...(19): siRNA sense strand
agaugaagaugaugaugag

SEQ ID NO: 293644 - RNA, 19 nt, Homo sapiens
  misc_RNA (1)...(19): siRNA sense strand
cacuaaaccagaugggaua

SEQ ID NO: 293645 - RNA, 19 nt, Homo sapiens
  misc_RNA (1)...(19): siRNA sense strand
ccacgauaacuucggcuuu

SEQ ID NO: 293646 - RNA, 19 nt, Homo sapiens
  misc_RNA (1)...(19): siRNA sense strand
uacaguaacccgacacgaa

SEQ ID NO: 293647 - RNA, 19 nt, Homo sapiens
  misc_RNA (1)...(19): siRNA sense strand
uagguuugaugauguaugg

SEQ ID NO: 293648 - RNA, 19 nt, Homo sapiens
  misc_RNA (1)...(19): siRNA sense strand
ggaugacucgagaugaaga

SEQ ID NO: 293649 - RNA, 19 nt, Homo sapiens
  misc_RNA (1)...(19): siRNA sense strand
gaagcagauagcaguccua

SEQ ID NO: 293650 - RNA, 19 nt, Homo sapiens
  misc_RNA (1)...(19): siRNA sense strand
acucaaugcuuaaguaucc

SEQ ID NO: 293651 - RNA, 19 nt, Homo sapiens
  misc_RNA (1)...(19): siRNA sense strand
gagccacagagaucccuuu

SEQ ID NO: 293652 - RNA, 19 nt, Homo sapiens
  misc_RNA (1)...(19): siRNA sense strand
uaacuucggcuuugaugac

SEQ ID NO: 293653 - RNA, 19 nt, Homo sapiens
  misc_RNA (1)...(19): siRNA sense strand
gacagagacuacaguaacc

SEQ ID NO: 293654 - RNA, 19 nt, Homo sapiens
  misc_RNA (1)...(19): siRNA sense strand
agggauacguuuccacgau

SEQ ID NO: 293655 - RNA, 19 nt, Homo sapiens
  misc_RNA (1)...(19): siRNA sense strand
gagagugaugcaagaagug

SEQ ID NO: 293656 - RNA, 19 nt, Homo sapiens
  misc_RNA (1)...(19): siRNA sense strand
ugaugaggaagaagaagaa

SEQ ID NO: 293657 - RNA, 19 nt, Homo sapiens
  misc_RNA (1)...(19): siRNA sense strand
ccaggaggagggauacguu

SEQ ID NO: 293658 - RNA, 19 nt, Homo sapiens
  misc_RNA (1)...(19): siRNA sense strand
ccucggagccacagagauc

SEQ ID NO: 293659 - RNA, 19 nt, Homo sapiens
  misc_RNA (1)...(19): siRNA sense strand
gaccuugccuucccauccu

SEQ ID NO: 293660 - RNA, 19 nt, Homo sapiens
  misc_RNA (1)...(19): siRNA sense strand
caggaggagggauacguuu

SEQ ID NO: 293661 - RNA, 19 nt, Homo sapiens
  misc_RNA (1)...(19): siRNA sense strand
ugaccuaguacgagauuuc

SEQ ID NO: 293662 - RNA, 19 nt, Homo sapiens
  misc_RNA (1)...(19): siRNA sense strand
acgauaacuucggcuuuga

SEQ ID NO: 293663 - RNA, 19 nt, Homo sapiens
  misc_RNA (1)...(19): siRNA sense strand
ugacucgagaugaagauga

SEQ ID NO: 293664 - RNA, 19 nt, Homo sapiens
  misc_RNA (1)...(19): siRNA sense strand
aagaugaugaugaggaaga

SEQ ID NO: 293665 - RNA, 19 nt, Homo sapiens
  misc_RNA (1)...(19): siRNA sense strand
gagggaugacucgagauga

SEQ ID NO: 293666 - RNA, 19 nt, Homo sapiens
  misc_RNA (1)...(19): siRNA sense strand
uacgagauuucaauagcau

SEQ ID NO: 293667 - RNA, 19 nt, Homo sapiens
  misc_RNA (1)...(19): siRNA sense strand
ccuaguacgagauuucaau

SEQ ID NO: 293668 - RNA, 19 nt, Homo sapiens
  misc_RNA (1)...(19): siRNA sense strand
cuucggcuuugaugaccua

SEQ ID NO: 293669 - RNA, 19 nt, Homo sapiens
  misc_RNA (1)...(19): siRNA sense strand
agaugaugaugaggaagaa

SEQ ID NO: 293670 - RNA, 19 nt, Homo sapiens
  misc_RNA (1)...(19): siRNA sense strand
ggcuucggcuucagcuuca

SEQ ID NO: 293671 - RNA, 19 nt, Homo sapiens
  misc_RNA (1)...(19): siRNA sense strand
caccagcccaggaucuuug

SEQ ID NO: 293672 - RNA, 19 nt, Homo sapiens
  misc_RNA (1)...(19): siRNA sense strand
gaggagggauacguuucca

SEQ ID NO: 293673 - RNA, 19 nt, Homo sapiens
  misc_RNA (1)...(19): siRNA sense strand
gaacucauguacagauuga

SEQ ID NO: 293674 - RNA, 19 nt, Homo sapiens
  misc_RNA (1)...(19): siRNA sense strand
gacaagcacuucuauuuca

SEQ ID NO: 293675 - RNA, 19 nt, Homo sapiens
  misc_RNA (1)...(19): siRNA sense strand
gcacuucuauuucaacaag

SEQ ID NO: 293676 - RNA, 19 nt, Homo sapiens
  misc_RNA (1)...(19): siRNA sense strand
gauugauccugaagugaua

SEQ ID NO: 293677 - RNA, 19 nt, Homo sapiens
  misc_RNA (1)...(19): siRNA sense strand
cgacgcaucuucaacaugu

SEQ ID NO: 293678 - RNA, 19 nt, Homo sapiens
  misc_RNA (1)...(19): siRNA sense strand
ggacaagcacuucuauuuc

SEQ ID NO: 293679 - RNA, 19 nt, Homo sapiens
  misc_RNA (1)...(19): siRNA sense strand
gaagacgcccagcuacuuu

SEQ ID NO: 293680 - RNA, 19 nt, Homo sapiens
  misc_RNA (1)...(19): siRNA sense strand
gagaacucauguacagauu

SEQ ID NO: 293681 - RNA, 19 nt, Homo sapiens
  misc_RNA (1)...(19): siRNA sense strand
caacaagaccaaaggauuc

SEQ ID NO: 293682 - RNA, 19 nt, Homo sapiens
  misc_RNA (1)...(19): siRNA sense strand
gcgagcgacucaucacuga

SEQ ID NO: 293683 - RNA, 19 nt, Homo sapiens
  misc_RNA (1)...(19): siRNA sense strand
cggacaagcacuucuauuu

SEQ ID NO: 293684 - RNA, 19 nt, Homo sapiens
  misc_RNA (1)...(19): siRNA sense strand
ggacuucaggugggaauaa

SEQ ID NO: 293685 - RNA, 19 nt, Homo sapiens
  misc_RNA (1)...(19): siRNA sense strand
gggccgugcuggaguuuau

SEQ ID NO: 293686 - RNA, 19 nt, Homo sapiens
  misc_RNA (1)...(19): siRNA sense strand
ggagaacucauguacagau

SEQ ID NO: 293687 - RNA, 19 nt, Homo sapiens
  misc_RNA (1)...(19): siRNA sense strand
aggauucccuugcuugaaa

SEQ ID NO: 293688 - RNA, 19 nt, Homo sapiens
  misc_RNA (1)...(19): siRNA sense strand
ucaacaagaccaaaggauu

SEQ ID NO: 293689 - RNA, 19 nt, Homo sapiens
  misc_RNA (1)...(19): siRNA sense strand
cgcagacacucuccaagaa

SEQ ID NO: 293690 - RNA, 19 nt, Homo sapiens
  misc_RNA (1)...(19): siRNA sense strand
acagauugauccugaagug

SEQ ID NO: 293691 - RNA, 19 nt, Homo sapiens
  misc_RNA (1)...(19): siRNA sense strand
cccgugccaucucugauua

SEQ ID NO: 293692 - RNA, 19 nt, Homo sapiens
  misc_RNA (1)...(19): siRNA sense strand
uagaccagcuccgagaauu

SEQ ID NO: 293693 - RNA, 19 nt, Homo sapiens
  misc_RNA (1)...(19): siRNA sense strand
agagcuggcugcaguacuu

SEQ ID NO: 293694 - RNA, 19 nt, Homo sapiens
  misc_RNA (1)...(19): siRNA sense strand
ccagcuacuuugucacuca

SEQ ID NO: 293695 - RNA, 19 nt, Homo sapiens
  misc_RNA (1)...(19): siRNA sense strand
acaagcacuucuauuucaa

SEQ ID NO: 293696 - RNA, 19 nt, Homo sapiens
  misc_RNA (1)...(19): siRNA sense strand
gcuacuuugucacucaaga

SEQ ID NO: 293697 - RNA, 19 nt, Homo sapiens
  misc_RNA (1)...(19): siRNA sense strand
ucacggacaagcacuucua

SEQ ID NO: 293698 - RNA, 19 nt, Homo sapiens
  misc_RNA (1)...(19): siRNA sense strand
gaaccccacuucuuugaca

SEQ ID NO: 293699 - RNA, 19 nt, Homo sapiens
  misc_RNA (1)...(19): siRNA sense strand
gauagaccagcuccgagaa

SEQ ID NO: 293700 - RNA, 19 nt, Homo sapiens
  misc_RNA (1)...(19): siRNA sense strand
ccaagcugaucgugguugu

SEQ ID NO: 293701 - RNA, 19 nt, Homo sapiens
  misc_RNA (1)...(19): siRNA sense strand
ggcauuaagagauucauca

SEQ ID NO: 293702 - RNA, 19 nt, Homo sapiens
  misc_RNA (1)...(19): siRNA sense strand
gcagacacucuccaagaag

SEQ ID NO: 293703 - RNA, 19 nt, Homo sapiens
  misc_RNA (1)...(19): siRNA sense strand
uggagaagacgcccagcua

SEQ ID NO: 293704 - RNA, 19 nt, Homo sapiens
  misc_RNA (1)...(19): siRNA sense strand
agggagaacucauguacag

SEQ ID NO: 293705 - RNA, 19 nt, Homo sapiens
  misc_RNA (1)...(19): siRNA sense strand
gcacggaaccccacuucuu

SEQ ID NO: 293706 - RNA, 19 nt, Homo sapiens
  misc_RNA (1)...(19): siRNA sense strand
gagaagacgcccagcuacu

SEQ ID NO: 293707 - RNA, 19 nt, Homo sapiens
  misc_RNA (1)...(19): siRNA sense strand
agagauucaucacggacaa

SEQ ID NO: 293708 - RNA, 19 nt, Homo sapiens
  misc_RNA (1)...(19): siRNA sense strand
cagcuacuuugucacucaa

SEQ ID NO: 293709 - RNA, 19 nt, Homo sapiens
  misc_RNA (1)...(19): siRNA sense strand
aaagggagaacucauguac

SEQ ID NO: 293710 - RNA, 19 nt, Homo sapiens
  misc_RNA (1)...(19): siRNA sense strand
uagcucagauucacuucgu

SEQ ID NO: 293711 - RNA, 19 nt, Homo sapiens
  misc_RNA (1)...(19): siRNA sense strand
agaagacgcccagcuacuu

SEQ ID NO: 293712 - RNA, 19 nt, Homo sapiens
  misc_RNA (1)...(19): siRNA sense strand
ccucgaugcuugggcaaau

SEQ ID NO: 293713 - RNA, 19 nt, Homo sapiens
  misc_RNA (1)...(19): siRNA sense strand
guacagauugauccugaag

SEQ ID NO: 293714 - RNA, 19 nt, Homo sapiens
  misc_RNA (1)...(19): siRNA sense strand
agaccagcuccgagaauuu

SEQ ID NO: 293715 - RNA, 19 nt, Homo sapiens
  misc_RNA (1)...(19): siRNA sense strand
gaugcuugggcaaaucaaa

SEQ ID NO: 293716 - RNA, 19 nt, Homo sapiens
  misc_RNA (1)...(19): siRNA sense strand
cuccugcacuuaccugugu

SEQ ID NO: 293717 - RNA, 19 nt, Homo sapiens
  misc_RNA (1)...(19): siRNA sense strand
acgcagacacucuccaaga

SEQ ID NO: 293718 - RNA, 19 nt, Homo sapiens
  misc_RNA (1)...(19): siRNA sense strand
acgcccagcuacuuuguca

SEQ ID NO: 293719 - RNA, 19 nt, Homo sapiens
  misc_RNA (1)...(19): siRNA sense strand
aagcacuucuauuucaaca

SEQ ID NO: 293720 - RNA, 19 nt, Homo sapiens
  misc_RNA (1)...(19): siRNA sense strand
ggacuuccugggcauuaag

SEQ ID NO: 293721 - RNA, 19 nt, Homo sapiens
  misc_RNA (1)...(19): siRNA sense strand
ugguggacgugucauggaa

SEQ ID NO: 293722 - RNA, 19 nt, Homo sapiens
  misc_RNA (1)...(19): siRNA sense strand
gacaagcacuucuacuuca

SEQ ID NO: 293723 - RNA, 19 nt, Homo sapiens
  misc_RNA (1)...(19): siRNA sense strand
ggacaagcacuucuacuuc

SEQ ID NO: 293724 - RNA, 19 nt, Homo sapiens
  misc_RNA (1)...(19): siRNA sense strand
acaagggccucgccuggua

SEQ ID NO: 293725 - RNA, 19 nt, Homo sapiens
  misc_RNA (1)...(19): siRNA sense strand
gaaagcgccuccugcaacu

SEQ ID NO: 293726 - RNA, 19 nt, Homo sapiens
  misc_RNA (1)...(19): siRNA sense strand
uggagaagacgcccaguua

SEQ ID NO: 293727 - RNA, 19 nt, Homo sapiens
  misc_RNA (1)...(19): siRNA sense strand
gcacuucuacuucaacaag

SEQ ID NO: 293728 - RNA, 19 nt, Homo sapiens
  misc_RNA (1)...(19): siRNA sense strand
ccagggccaucucggacua

SEQ ID NO: 293729 - RNA, 19 nt, Homo sapiens
  misc_RNA (1)...(19): siRNA sense strand
gaugaccgggcacgacuuu

SEQ ID NO: 293730 - RNA, 19 nt, Homo sapiens
  misc_RNA (1)...(19): siRNA sense strand
gagaaagcgccuccugcaa

SEQ ID NO: 293731 - RNA, 19 nt, Homo sapiens
  misc_RNA (1)...(19): siRNA sense strand
gagaagacgcccaguuacu

SEQ ID NO: 293732 - RNA, 19 nt, Homo sapiens
  misc_RNA (1)...(19): siRNA sense strand
ucacggacaagcacuucua

SEQ ID NO: 293733 - RNA, 19 nt, Homo sapiens
  misc_RNA (1)...(19): siRNA sense strand
ggacccauccugagaucga

SEQ ID NO: 293734 - RNA, 19 nt, Homo sapiens
  misc_RNA (1)...(19): siRNA sense strand
acaagcacuucuacuucaa

SEQ ID NO: 293735 - RNA, 19 nt, Homo sapiens
  misc_RNA (1)...(19): siRNA sense strand
ggagaagacgcccaguuac

SEQ ID NO: 293736 - RNA, 19 nt, Homo sapiens
  misc_RNA (1)...(19): siRNA sense strand
uucgagagcuugacguuca

SEQ ID NO: 293737 - RNA, 19 nt, Homo sapiens
  misc_RNA (1)...(19): siRNA sense strand
agaagacgcccaguuacuu

SEQ ID NO: 293738 - RNA, 19 nt, Homo sapiens
  misc_RNA (1)...(19): siRNA sense strand
cuuucaaccucaaguucua

SEQ ID NO: 293739 - RNA, 19 nt, Homo sapiens
  misc_RNA (1)...(19): siRNA sense strand
cggacaagcacuucuacuu

SEQ ID NO: 293740 - RNA, 19 nt, Homo sapiens
  misc_RNA (1)...(19): siRNA sense strand
gcagaucaccauggagaag

SEQ ID NO: 293741 - RNA, 19 nt, Homo sapiens
  misc_RNA (1)...(19): siRNA sense strand
gacuuuggcugggauggau

SEQ ID NO: 293742 - RNA, 19 nt, Homo sapiens
  misc_RNA (1)...(19): siRNA sense strand
ucucggccauguccaagga

SEQ ID NO: 293743 - RNA, 19 nt, Homo sapiens
  misc_RNA (1)...(19): siRNA sense strand
cucaaguucuaccagauga

SEQ ID NO: 293744 - RNA, 19 nt, Homo sapiens
  misc_RNA (1)...(19): siRNA sense strand
ggaaguucuugcugaugcu

SEQ ID NO: 293745 - RNA, 19 nt, Homo sapiens
  misc_RNA (1)...(19): siRNA sense strand
gcaucucggccauguccaa

SEQ ID NO: 293746 - RNA, 19 nt, Homo sapiens
  misc_RNA (1)...(19): siRNA sense strand
acacgcagacgcuguccaa

SEQ ID NO: 293747 - RNA, 19 nt, Homo sapiens
  misc_RNA (1)...(19): siRNA sense strand
ccaaggacaccaagcucau

SEQ ID NO: 293748 - RNA, 19 nt, Homo sapiens
  misc_RNA (1)...(19): siRNA sense strand
gacaagcacuucuacuuca

SEQ ID NO: 293749 - RNA, 19 nt, Homo sapiens
  misc_RNA (1)...(19): siRNA sense strand
ggacaagcacuucuacuuc

SEQ ID NO: 293750 - RNA, 19 nt, Homo sapiens
  misc_RNA (1)...(19): siRNA sense strand
uggagaagacgcccaguua

SEQ ID NO: 293751 - RNA, 19 nt, Homo sapiens
  misc_RNA (1)...(19): siRNA sense strand
gcacuucuacuucaacaag

SEQ ID NO: 293752 - RNA, 19 nt, Homo sapiens
  misc_RNA (1)...(19): siRNA sense strand
gcgucuggcucuauauguu

SEQ ID NO: 293753 - RNA, 19 nt, Homo sapiens
  misc_RNA (1)...(19): siRNA sense strand
ccagggccaucucggacua

SEQ ID NO: 293754 - RNA, 19 nt, Homo sapiens
  misc_RNA (1)...(19): siRNA sense strand
gaugaccgggcacgacuuu

SEQ ID NO: 293755 - RNA, 19 nt, Homo sapiens
  misc_RNA (1)...(19): siRNA sense strand
gagaagacgcccaguuacu

SEQ ID NO: 293756 - RNA, 19 nt, Homo sapiens
  misc_RNA (1)...(19): siRNA sense strand
ucacggacaagcacuucua

SEQ ID NO: 293757 - RNA, 19 nt, Homo sapiens
  misc_RNA (1)...(19): siRNA sense strand
ggacccauccugagaucga

SEQ ID NO: 293758 - RNA, 19 nt, Homo sapiens
  misc_RNA (1)...(19): siRNA sense strand
acaagcacuucuacuucaa

SEQ ID NO: 293759 - RNA, 19 nt, Homo sapiens
  misc_RNA (1)...(19): siRNA sense strand
ggcucuauauguuccugua

SEQ ID NO: 293760 - RNA, 19 nt, Homo sapiens
  misc_RNA (1)...(19): siRNA sense strand
uucgagagcuugacguuca

SEQ ID NO: 293761 - RNA, 19 nt, Homo sapiens
  misc_RNA (1)...(19): siRNA sense strand
ggagaagacgcccaguuac

SEQ ID NO: 293762 - RNA, 19 nt, Homo sapiens
  misc_RNA (1)...(19): siRNA sense strand
gggcgcugcuggaguuucu

SEQ ID NO: 293763 - RNA, 19 nt, Homo sapiens
  misc_RNA (1)...(19): siRNA sense strand
cuuucaaccucaaguucua

SEQ ID NO: 293764 - RNA, 19 nt, Homo sapiens
  misc_RNA (1)...(19): siRNA sense strand
gcagaucuugccucgaugu

SEQ ID NO: 293765 - RNA, 19 nt, Homo sapiens
  misc_RNA (1)...(19): siRNA sense strand
cggacaagcacuucuacuu

SEQ ID NO: 293766 - RNA, 19 nt, Homo sapiens
  misc_RNA (1)...(19): siRNA sense strand
agaagacgcccaguuacuu

SEQ ID NO: 293767 - RNA, 19 nt, Homo sapiens
  misc_RNA (1)...(19): siRNA sense strand
gcagaucaccauggagaag

SEQ ID NO: 293768 - RNA, 19 nt, Homo sapiens
  misc_RNA (1)...(19): siRNA sense strand
ucucggccauguccaagga

SEQ ID NO: 293769 - RNA, 19 nt, Homo sapiens
  misc_RNA (1)...(19): siRNA sense strand
cucaaguucuaccagauga

SEQ ID NO: 293770 - RNA, 19 nt, Homo sapiens
  misc_RNA (1)...(19): siRNA sense strand
cgacuuuggcugggauuga

SEQ ID NO: 293771 - RNA, 19 nt, Homo sapiens
  misc_RNA (1)...(19): siRNA sense strand
gcaucucggccauguccaa

SEQ ID NO: 293772 - RNA, 19 nt, Homo sapiens
  misc_RNA (1)...(19): siRNA sense strand
acacgcagacgcuguccaa

SEQ ID NO: 293773 - RNA, 19 nt, Homo sapiens
  misc_RNA (1)...(19): siRNA sense strand
ccaaggacaccaagcucau

SEQ ID NO: 293774 - RNA, 19 nt, Homo sapiens
  misc_RNA (1)...(19): siRNA sense strand
gagcaaagcuugauaacaa

SEQ ID NO: 293775 - RNA, 19 nt, Homo sapiens
  misc_RNA (1)...(19): siRNA sense strand
ggacuuggcugcuugcauu

SEQ ID NO: 293776 - RNA, 19 nt, Homo sapiens
  misc_RNA (1)...(19): siRNA sense strand
gcaaggagaugaaaugaca

SEQ ID NO: 293777 - RNA, 19 nt, Homo sapiens
  misc_RNA (1)...(19): siRNA sense strand
gcacacaguuccuuccaaa

SEQ ID NO: 293778 - RNA, 19 nt, Homo sapiens
  misc_RNA (1)...(19): siRNA sense strand
guacauaacuuugaagaag

SEQ ID NO: 293779 - RNA, 19 nt, Homo sapiens
  misc_RNA (1)...(19): siRNA sense strand
caagauaagucaauugaag

SEQ ID NO: 293780 - RNA, 19 nt, Homo sapiens
  misc_RNA (1)...(19): siRNA sense strand
caaacuagcucaggccaaa

SEQ ID NO: 293781 - RNA, 19 nt, Homo sapiens
  misc_RNA (1)...(19): siRNA sense strand
gagauaaccuacacaccaa

SEQ ID NO: 293782 - RNA, 19 nt, Homo sapiens
  misc_RNA (1)...(19): siRNA sense strand
gggaauugauuaaagagaa

SEQ ID NO: 293783 - RNA, 19 nt, Homo sapiens
  misc_RNA (1)...(19): siRNA sense strand
gguaaaaccuaucaucaua

SEQ ID NO: 293784 - RNA, 19 nt, Homo sapiens
  misc_RNA (1)...(19): siRNA sense strand
gagaugaaaugacacgaau

SEQ ID NO: 293785 - RNA, 19 nt, Homo sapiens
  misc_RNA (1)...(19): siRNA sense strand
ggagaaaacuugaagauca

SEQ ID NO: 293786 - RNA, 19 nt, Homo sapiens
  misc_RNA (1)...(19): siRNA sense strand
gcaacguucugacuacuug

SEQ ID NO: 293787 - RNA, 19 nt, Homo sapiens
  misc_RNA (1)...(19): siRNA sense strand
gagaagccauuaucugcaa

SEQ ID NO: 293788 - RNA, 19 nt, Homo sapiens
  misc_RNA (1)...(19): siRNA sense strand
gaagaggguugaggaguuc

SEQ ID NO: 293789 - RNA, 19 nt, Homo sapiens
  misc_RNA (1)...(19): siRNA sense strand
uggaagaagucucuauuga

SEQ ID NO: 293790 - RNA, 19 nt, Homo sapiens
  misc_RNA (1)...(19): siRNA sense strand
ugaagaagguggugguguu

SEQ ID NO: 293791 - RNA, 19 nt, Homo sapiens
  misc_RNA (1)...(19): siRNA sense strand
cauuugaguucauggauaa

SEQ ID NO: 293792 - RNA, 19 nt, Homo sapiens
  misc_RNA (1)...(19): siRNA sense strand
ggaauuggaucuacauagc

SEQ ID NO: 293793 - RNA, 19 nt, Homo sapiens
  misc_RNA (1)...(19): siRNA sense strand
gcaaagcuugauaacaaua

SEQ ID NO: 293794 - RNA, 19 nt, Homo sapiens
  misc_RNA (1)...(19): siRNA sense strand
gcauaauguuggcgucaaa

SEQ ID NO: 293795 - RNA, 19 nt, Homo sapiens
  misc_RNA (1)...(19): siRNA sense strand
gaauacauuugaguucaug

SEQ ID NO: 293796 - RNA, 19 nt, Homo sapiens
  misc_RNA (1)...(19): siRNA sense strand
gaugaaaugacacgaauca

SEQ ID NO: 293797 - RNA, 19 nt, Homo sapiens
  misc_RNA (1)...(19): siRNA sense strand
gaagcuauaaagaagcaua

SEQ ID NO: 293798 - RNA, 19 nt, Homo sapiens
  misc_RNA (1)...(19): siRNA sense strand
ccaaauggcucugucuaag

SEQ ID NO: 293799 - RNA, 19 nt, Homo sapiens
  misc_RNA (1)...(19): siRNA sense strand
agaagaggguugaggaguu

SEQ ID NO: 293800 - RNA, 19 nt, Homo sapiens
  misc_RNA (1)...(19): siRNA sense strand
caccaaggaugcugcagaa

SEQ ID NO: 293801 - RNA, 19 nt, Homo sapiens
  misc_RNA (1)...(19): siRNA sense strand
ugaaacaaauguggaaauc

SEQ ID NO: 293802 - RNA, 19 nt, Homo sapiens
  misc_RNA (1)...(19): siRNA sense strand
gcaguacaagucccaguuu

SEQ ID NO: 293803 - RNA, 19 nt, Homo sapiens
  misc_RNA (1)...(19): siRNA sense strand
uagcucaggccaaacuuua

SEQ ID NO: 293804 - RNA, 19 nt, Homo sapiens
  misc_RNA (1)...(19): siRNA sense strand
guucauggauaaacuugga

SEQ ID NO: 293805 - RNA, 19 nt, Homo sapiens
  misc_RNA (1)...(19): siRNA sense strand
guacaagucccaguuugaa

SEQ ID NO: 293806 - RNA, 19 nt, Homo sapiens
  misc_RNA (1)...(19): siRNA sense strand
caauacagagcaacugauu

SEQ ID NO: 293807 - RNA, 19 nt, Homo sapiens
  misc_RNA (1)...(19): siRNA sense strand
ggaagaagucucuauugag

SEQ ID NO: 293808 - RNA, 19 nt, Homo sapiens
  misc_RNA (1)...(19): siRNA sense strand
aaacaaauguggaaaucac

SEQ ID NO: 293809 - RNA, 19 nt, Homo sapiens
  misc_RNA (1)...(19): siRNA sense strand
ggagaugaaaugacacgaa

SEQ ID NO: 293810 - RNA, 19 nt, Homo sapiens
  misc_RNA (1)...(19): siRNA sense strand
caucauaggucgucaugcu

SEQ ID NO: 293811 - RNA, 19 nt, Homo sapiens
  misc_RNA (1)...(19): siRNA sense strand
cgaaucauuugggaauuga

SEQ ID NO: 293812 - RNA, 19 nt, Homo sapiens
  misc_RNA (1)...(19): siRNA sense strand
acauuugaguucauggaua

SEQ ID NO: 293813 - RNA, 19 nt, Homo sapiens
  misc_RNA (1)...(19): siRNA sense strand
ucauaggucgucaugcuua

SEQ ID NO: 293814 - RNA, 19 nt, Homo sapiens
  misc_RNA (1)...(19): siRNA sense strand
ggcccaagcuaugaaauca

SEQ ID NO: 293815 - RNA, 19 nt, Homo sapiens
  misc_RNA (1)...(19): siRNA sense strand
gaaauaugaugggcguuuu

SEQ ID NO: 293816 - RNA, 19 nt, Homo sapiens
  misc_RNA (1)...(19): siRNA sense strand
gaaacaaauguggaaauca

SEQ ID NO: 293817 - RNA, 19 nt, Homo sapiens
  misc_RNA (1)...(19): siRNA sense strand
caggagacguccaccaauc

SEQ ID NO: 293818 - RNA, 19 nt, Homo sapiens
  misc_RNA (1)...(19): siRNA sense strand
gaugcaaggagaugaaaug

SEQ ID NO: 293819 - RNA, 19 nt, Homo sapiens
  misc_RNA (1)...(19): siRNA sense strand
caaggaugcugcagaagcu

SEQ ID NO: 293820 - RNA, 19 nt, Homo sapiens
  misc_RNA (1)...(19): siRNA sense strand
caguggcgguucuguggua

SEQ ID NO: 293821 - RNA, 19 nt, Homo sapiens
  misc_RNA (1)...(19): siRNA sense strand
gaagaagguggugguguug

SEQ ID NO: 293822 - RNA, 19 nt, Homo sapiens
  misc_RNA (1)...(19): siRNA sense strand
cgucaaaugugccacuauc

SEQ ID NO: 293823 - RNA, 19 nt, Homo sapiens
  misc_RNA (1)...(19): siRNA sense strand
cagaagcuauaaagaagca

SEQ ID NO: 293824 - RNA, 19 nt, Homo sapiens
  misc_RNA (1)...(19): siRNA sense strand
gcuauaaagaagcauaaug

SEQ ID NO: 293825 - RNA, 19 nt, Homo sapiens
  misc_RNA (1)...(19): siRNA sense strand
cugcuugcauuaaagguuu

SEQ ID NO: 293826 - RNA, 19 nt, Homo sapiens
  misc_RNA (1)...(19): siRNA sense strand
cccaagcuaugaaaucaga

SEQ ID NO: 293827 - RNA, 19 nt, Homo sapiens
  misc_RNA (1)...(19): siRNA sense strand
acacaguuccuuccaaaug

SEQ ID NO: 293828 - RNA, 19 nt, Homo sapiens
  misc_RNA (1)...(19): siRNA sense strand
cugcagaagcuauaaagaa

SEQ ID NO: 293829 - RNA, 19 nt, Homo sapiens
  misc_RNA (1)...(19): siRNA sense strand
aauuggaucuacauagcua

SEQ ID NO: 293830 - RNA, 19 nt, Homo sapiens
  misc_RNA (1)...(19): siRNA sense strand
gacaggagacguccaccaa

SEQ ID NO: 293831 - RNA, 19 nt, Homo sapiens
  misc_RNA (1)...(19): siRNA sense strand
uaaccuacacaccaaguga

SEQ ID NO: 293832 - RNA, 19 nt, Homo sapiens
  misc_RNA (1)...(19): siRNA sense strand
ccaagugacggaacccaaa

SEQ ID NO: 293833 - RNA, 19 nt, Homo sapiens
  misc_RNA (1)...(19): siRNA sense strand
ugcagaagcuauaaagaag

SEQ ID NO: 293834 - RNA, 19 nt, Homo sapiens
  misc_RNA (1)...(19): siRNA sense strand
ccugguacauaacuuugaa

SEQ ID NO: 293835 - RNA, 19 nt, Homo sapiens
  misc_RNA (1)...(19): siRNA sense strand
caguacaagucccaguuug

SEQ ID NO: 293836 - RNA, 19 nt, Homo sapiens
  misc_RNA (1)...(19): siRNA sense strand
agauauaugacaagcagua

SEQ ID NO: 293837 - RNA, 19 nt, Homo sapiens
  misc_RNA (1)...(19): siRNA sense strand
aauugaggcuggcuucaug

SEQ ID NO: 293838 - RNA, 19 nt, Homo sapiens
  misc_RNA (1)...(19): siRNA sense strand
acagagcaaagcuugauaa

SEQ ID NO: 293839 - RNA, 19 nt, Homo sapiens
  misc_RNA (1)...(19): siRNA sense strand
gguuggccuuuguaucuga

SEQ ID NO: 293840 - RNA, 19 nt, Homo sapiens
  misc_RNA (1)...(19): siRNA sense strand
cguucugacuacuugaaua

SEQ ID NO: 293841 - RNA, 19 nt, Homo sapiens
  misc_RNA (1)...(19): siRNA sense strand
cauaggucgucaugcuuau

SEQ ID NO: 293842 - RNA, 19 nt, Homo sapiens
  misc_RNA (1)...(19): siRNA sense strand
cugacuacuugaauacauu

SEQ ID NO: 293843 - RNA, 19 nt, Homo sapiens
  misc_RNA (1)...(19): siRNA sense strand
ggaugcugcagaagcuaua

SEQ ID NO: 293844 - RNA, 19 nt, Homo sapiens
  misc_RNA (1)...(19): siRNA sense strand
acacgaaucauuugggaau

SEQ ID NO: 293845 - RNA, 19 nt, Homo sapiens
  misc_RNA (1)...(19): siRNA sense strand
gcgguucugugguagagau

SEQ ID NO: 293846 - RNA, 19 nt, Homo sapiens
  misc_RNA (1)...(19): siRNA sense strand
ccagauggcaagacaguag

SEQ ID NO: 293847 - RNA, 19 nt, Homo sapiens
  misc_RNA (1)...(19): siRNA sense strand
agaaauaugaugggcguuu

SEQ ID NO: 293848 - RNA, 19 nt, Homo sapiens
  misc_RNA (1)...(19): siRNA sense strand
cacaguuccuuccaaaugg

SEQ ID NO: 293849 - RNA, 19 nt, Homo sapiens
  misc_RNA (1)...(19): siRNA sense strand
cagagcaacugauuuuguu

SEQ ID NO: 293850 - RNA, 19 nt, Homo sapiens
  misc_RNA (1)...(19): siRNA sense strand
gaacccaaaaggugacaua

SEQ ID NO: 293851 - RNA, 19 nt, Homo sapiens
  misc_RNA (1)...(19): siRNA sense strand
ccacagagcaaagcuugau

SEQ ID NO: 293852 - RNA, 19 nt, Homo sapiens
  misc_RNA (1)...(19): siRNA sense strand
gagaugcaaggagaugaaa

SEQ ID NO: 293853 - RNA, 19 nt, Homo sapiens
  misc_RNA (1)...(19): siRNA sense strand
uauaugacaagcaguacaa

SEQ ID NO: 293854 - RNA, 19 nt, Homo sapiens
  misc_RNA (1)...(19): siRNA sense strand
gaaaaguagagauaaccua

SEQ ID NO: 293855 - RNA, 19 nt, Homo sapiens
  misc_RNA (1)...(19): siRNA sense strand
acgaaucauuugggaauug

SEQ ID NO: 293856 - RNA, 19 nt, Homo sapiens
  misc_RNA (1)...(19): siRNA sense strand
guggcacggucuucagaga

SEQ ID NO: 293857 - RNA, 19 nt, Homo sapiens
  misc_RNA (1)...(19): siRNA sense strand
gguacauaacuuugaagaa

SEQ ID NO: 293858 - RNA, 19 nt, Homo sapiens
  misc_RNA (1)...(19): siRNA sense strand
guagagaugcaaggagaug

SEQ ID NO: 293859 - RNA, 19 nt, Homo sapiens
  misc_RNA (1)...(19): siRNA sense strand
ggauaaacuuggagaaaac

SEQ ID NO: 293860 - RNA, 19 nt, Homo sapiens
  misc_RNA (1)...(19): siRNA sense strand
cuacuugaauacauuugag

SEQ ID NO: 293861 - RNA, 19 nt, Homo sapiens
  misc_RNA (1)...(19): siRNA sense strand
ggacuguaacccgucacua

SEQ ID NO: 293862 - RNA, 19 nt, Homo sapiens
  misc_RNA (1)...(19): siRNA sense strand
caaaugugccacuaucacu

SEQ ID NO: 293863 - RNA, 19 nt, Homo sapiens
  misc_RNA (1)...(19): siRNA sense strand
uaauguuggcgucaaaugu

SEQ ID NO: 293864 - RNA, 19 nt, Homo sapiens
  misc_RNA (1)...(19): siRNA sense strand
cuuggcugcuugcauuaaa

SEQ ID NO: 293865 - RNA, 19 nt, Homo sapiens
  misc_RNA (1)...(19): siRNA sense strand
caugguggcccaagcuaug

SEQ ID NO: 293866 - RNA, 19 nt, Homo sapiens
  misc_RNA (1)...(19): siRNA sense strand
ugauuuaggcauagagaau

SEQ ID NO: 293867 - RNA, 19 nt, Homo sapiens
  misc_RNA (1)...(19): siRNA sense strand
caaauggcucugucuaagg

SEQ ID NO: 293868 - RNA, 19 nt, Homo sapiens
  misc_RNA (1)...(19): siRNA sense strand
ccauggggauguauaauca

SEQ ID NO: 293869 - RNA, 19 nt, Homo sapiens
  misc_RNA (1)...(19): siRNA sense strand
uccaaauggcucugucuaa

SEQ ID NO: 293870 - RNA, 19 nt, Homo sapiens
  misc_RNA (1)...(19): siRNA sense strand
uggauaaacuuggagaaaa

SEQ ID NO: 293871 - RNA, 19 nt, Homo sapiens
  misc_RNA (1)...(19): siRNA sense strand
caaauguggaaaucaccaa

SEQ ID NO: 293872 - RNA, 19 nt, Homo sapiens
  misc_RNA (1)...(19): siRNA sense strand
acauaacuuugaagaaggu

SEQ ID NO: 293873 - RNA, 19 nt, Homo sapiens
  misc_RNA (1)...(19): siRNA sense strand
gauaaccuacacaccaagu

SEQ ID NO: 293874 - RNA, 19 nt, Homo sapiens
  misc_RNA (1)...(19): siRNA sense strand
gaacauaggugugaauaau

SEQ ID NO: 293875 - RNA, 19 nt, Homo sapiens
  misc_RNA (1)...(19): siRNA sense strand
gaacaccauugaacgauuu

SEQ ID NO: 293876 - RNA, 19 nt, Homo sapiens
  misc_RNA (1)...(19): siRNA sense strand
ggaaguaguugguaacaug

SEQ ID NO: 293877 - RNA, 19 nt, Homo sapiens
  misc_RNA (1)...(19): siRNA sense strand
gcaaugcaauggauucuga

SEQ ID NO: 293878 - RNA, 19 nt, Homo sapiens
  misc_RNA (1)...(19): siRNA sense strand
ggacucaguugaaguuuau

SEQ ID NO: 293879 - RNA, 19 nt, Homo sapiens
  misc_RNA (1)...(19): siRNA sense strand
ccacugaacugcauuggaa

SEQ ID NO: 293880 - RNA, 19 nt, Homo sapiens
  misc_RNA (1)...(19): siRNA sense strand
caucagcaaugaaggaaua

SEQ ID NO: 293881 - RNA, 19 nt, Homo sapiens
  misc_RNA (1)...(19): siRNA sense strand
gugaagagcuuagcauuga

SEQ ID NO: 293882 - RNA, 19 nt, Homo sapiens
  misc_RNA (1)...(19): siRNA sense strand
gaaguugccucaaugaaag

SEQ ID NO: 293883 - RNA, 19 nt, Homo sapiens
  misc_RNA (1)...(19): siRNA sense strand
gccaugaucucuuggaauu

SEQ ID NO: 293884 - RNA, 19 nt, Homo sapiens
  misc_RNA (1)...(19): siRNA sense strand
ccaauucgauucccuuuau

SEQ ID NO: 293885 - RNA, 19 nt, Homo sapiens
  misc_RNA (1)...(19): siRNA sense strand
ucagauacauggacagaaa

SEQ ID NO: 293886 - RNA, 19 nt, Homo sapiens
  misc_RNA (1)...(19): siRNA sense strand
ggacagaaauugguaacau

SEQ ID NO: 293887 - RNA, 19 nt, Homo sapiens
  misc_RNA (1)...(19): siRNA sense strand
gaagaguuccuggcacuua

SEQ ID NO: 293888 - RNA, 19 nt, Homo sapiens
  misc_RNA (1)...(19): siRNA sense strand
ucaauggucuucuguaugu

SEQ ID NO: 293889 - RNA, 19 nt, Homo sapiens
  misc_RNA (1)...(19): siRNA sense strand
caaauugccugccaugauc

SEQ ID NO: 293890 - RNA, 19 nt, Homo sapiens
  misc_RNA (1)...(19): siRNA sense strand
aaacacuucugaaagagua

SEQ ID NO: 293891 - RNA, 19 nt, Homo sapiens
  misc_RNA (1)...(19): siRNA sense strand
gaagaaagcaagaaaguac

SEQ ID NO: 293892 - RNA, 19 nt, Homo sapiens
  misc_RNA (1)...(19): siRNA sense strand
gcaagaaaguaccuguaug

SEQ ID NO: 293893 - RNA, 19 nt, Homo sapiens
  misc_RNA (1)...(19): siRNA sense strand
ugaauaauguccaggaguu

SEQ ID NO: 293894 - RNA, 19 nt, Homo sapiens
  misc_RNA (1)...(19): siRNA sense strand
gcugugaaaugcaagguuu

SEQ ID NO: 293895 - RNA, 19 nt, Homo sapiens
  misc_RNA (1)...(19): siRNA sense strand
gcuaugauccaguuacuaa

SEQ ID NO: 293896 - RNA, 19 nt, Homo sapiens
  misc_RNA (1)...(19): siRNA sense strand
ggaacaccauugaacgauu

SEQ ID NO: 293897 - RNA, 19 nt, Homo sapiens
  misc_RNA (1)...(19): siRNA sense strand
ggaagaaagcaagaaagua

SEQ ID NO: 293898 - RNA, 19 nt, Homo sapiens
  misc_RNA (1)...(19): siRNA sense strand
ucaauaagaugagaaaugg

SEQ ID NO: 293899 - RNA, 19 nt, Homo sapiens
  misc_RNA (1)...(19): siRNA sense strand
ggacaacuguagcuucgau

SEQ ID NO: 293900 - RNA, 19 nt, Homo sapiens
  misc_RNA (1)...(19): siRNA sense strand
gaaaauaaaugggaaguag

SEQ ID NO: 293901 - RNA, 19 nt, Homo sapiens
  misc_RNA (1)...(19): siRNA sense strand
ucagauacuucuagauuuc

SEQ ID NO: 293902 - RNA, 19 nt, Homo sapiens
  misc_RNA (1)...(19): siRNA sense strand
gacagaaauugguaacaug

SEQ ID NO: 293903 - RNA, 19 nt, Homo sapiens
  misc_RNA (1)...(19): siRNA sense strand
gaugagaaauggacagcau

SEQ ID NO: 293904 - RNA, 19 nt, Homo sapiens
  misc_RNA (1)...(19): siRNA sense strand
gaaugaaagaguccucaaa

SEQ ID NO: 293905 - RNA, 19 nt, Homo sapiens
  misc_RNA (1)...(19): siRNA sense strand
gcagagcccucagcugugu

SEQ ID NO: 293906 - RNA, 19 nt, Homo sapiens
  misc_RNA (1)...(19): siRNA sense strand
gaaggaguauccgauuuua

SEQ ID NO: 293907 - RNA, 19 nt, Homo sapiens
  misc_RNA (1)...(19): siRNA sense strand
uagaaggaguauccgauuu

SEQ ID NO: 293908 - RNA, 19 nt, Homo sapiens
  misc_RNA (1)...(19): siRNA sense strand
guccaggaguugauuauug

SEQ ID NO: 293909 - RNA, 19 nt, Homo sapiens
  misc_RNA (1)...(19): siRNA sense strand
ugaaugcuaugauccaguu

SEQ ID NO: 293910 - RNA, 19 nt, Homo sapiens
  misc_RNA (1)...(19): siRNA sense strand
gggcguugcugugcuauga

SEQ ID NO: 293911 - RNA, 19 nt, Homo sapiens
  misc_RNA (1)...(19): siRNA sense strand
ggacaaauugauccacuga

SEQ ID NO: 293912 - RNA, 19 nt, Homo sapiens
  misc_RNA (1)...(19): siRNA sense strand
gcagacaugcuacaguuga

SEQ ID NO: 293913 - RNA, 19 nt, Homo sapiens
  misc_RNA (1)...(19): siRNA sense strand
ugcaaacacuucugaaaga

SEQ ID NO: 293914 - RNA, 19 nt, Homo sapiens
  misc_RNA (1)...(19): siRNA sense strand
ugaauaccaggucuucuua

SEQ ID NO: 293915 - RNA, 19 nt, Homo sapiens
  misc_RNA (1)...(19): siRNA sense strand
ugcaauggauucugaaaga

SEQ ID NO: 293916 - RNA, 19 nt, Homo sapiens
  misc_RNA (1)...(19): siRNA sense strand
ugaaguugccucaaugaaa

SEQ ID NO: 293917 - RNA, 19 nt, Homo sapiens
  misc_RNA (1)...(19): siRNA sense strand
gcaauggauucugaaagau

SEQ ID NO: 293918 - RNA, 19 nt, Homo sapiens
  misc_RNA (1)...(19): siRNA sense strand
gaucuuccagccaugauuu

SEQ ID NO: 293919 - RNA, 19 nt, Homo sapiens
  misc_RNA (1)...(19): siRNA sense strand
ccaaaucaauaagaugaga

SEQ ID NO: 293920 - RNA, 19 nt, Homo sapiens
  misc_RNA (1)...(19): siRNA sense strand
gggauggucuacgcuauug

SEQ ID NO: 293921 - RNA, 19 nt, Homo sapiens
  misc_RNA (1)...(19): siRNA sense strand
gaaaacaugugguggaagu

SEQ ID NO: 293922 - RNA, 19 nt, Homo sapiens
  misc_RNA (1)...(19): siRNA sense strand
gcaaacacuucugaaagag

SEQ ID NO: 293923 - RNA, 19 nt, Homo sapiens
  misc_RNA (1)...(19): siRNA sense strand
gaaauugguaacaugauca

SEQ ID NO: 293924 - RNA, 19 nt, Homo sapiens
  misc_RNA (1)...(19): siRNA sense strand
uuuauuaccuccucagaga

SEQ ID NO: 293925 - RNA, 19 nt, Homo sapiens
  misc_RNA (1)...(19): siRNA sense strand
gcccaaaucaauaagauga

SEQ ID NO: 293926 - RNA, 19 nt, Homo sapiens
  misc_RNA (1)...(19): siRNA sense strand
gaagugggcugggaguaac

SEQ ID NO: 293927 - RNA, 19 nt, Homo sapiens
  misc_RNA (1)...(19): siRNA sense strand
gaagcaggaaucuuucaga

SEQ ID NO: 293928 - RNA, 19 nt, Homo sapiens
  misc_RNA (1)...(19): siRNA sense strand
ucuaugauccacuuucuaa

SEQ ID NO: 293929 - RNA, 19 nt, Homo sapiens
  misc_RNA (1)...(19): siRNA sense strand
caucuuugcugugaauuuc

SEQ ID NO: 293930 - RNA, 19 nt, Homo sapiens
  misc_RNA (1)...(19): siRNA sense strand
gcagacaucuaagguucga

SEQ ID NO: 293931 - RNA, 19 nt, Homo sapiens
  misc_RNA (1)...(19): siRNA sense strand
gauuucauuuacacaggua

SEQ ID NO: 293932 - RNA, 19 nt, Homo sapiens
  misc_RNA (1)...(19): siRNA sense strand
uggacucaguugaaguuua

SEQ ID NO: 293933 - RNA, 19 nt, Homo sapiens
  misc_RNA (1)...(19): siRNA sense strand
guuggaggauggaaugaga

SEQ ID NO: 293934 - RNA, 19 nt, Homo sapiens
  misc_RNA (1)...(19): siRNA sense strand
gacugcaucuauucuguug

SEQ ID NO: 293935 - RNA, 19 nt, Homo sapiens
  misc_RNA (1)...(19): siRNA sense strand
gagggauggucuacgcuau

SEQ ID NO: 293936 - RNA, 19 nt, Homo sapiens
  misc_RNA (1)...(19): siRNA sense strand
gaaagaguccucaaaagau

SEQ ID NO: 293937 - RNA, 19 nt, Homo sapiens
  misc_RNA (1)...(19): siRNA sense strand
guccuuacuuugcagcuuu

SEQ ID NO: 293938 - RNA, 19 nt, Homo sapiens
  misc_RNA (1)...(19): siRNA sense strand
gcugcaaguuggacaggaa

SEQ ID NO: 293939 - RNA, 19 nt, Homo sapiens
  misc_RNA (1)...(19): siRNA sense strand
caauggauucugaaagauu

SEQ ID NO: 293940 - RNA, 19 nt, Homo sapiens
  misc_RNA (1)...(19): siRNA sense strand
ggagguucauaguggagaa

SEQ ID NO: 293941 - RNA, 19 nt, Homo sapiens
  misc_RNA (1)...(19): siRNA sense strand
ugccagcaguccuuacuuu

SEQ ID NO: 293942 - RNA, 19 nt, Homo sapiens
  misc_RNA (1)...(19): siRNA sense strand
gagcaggcauguguguugu

SEQ ID NO: 293943 - RNA, 19 nt, Homo sapiens
  misc_RNA (1)...(19): siRNA sense strand
caauucgauucccuuuauu

SEQ ID NO: 293944 - RNA, 19 nt, Homo sapiens
  misc_RNA (1)...(19): siRNA sense strand
cucaaugacugcaucuauu

SEQ ID NO: 293945 - RNA, 19 nt, Homo sapiens
  misc_RNA (1)...(19): siRNA sense strand
ggucuccacuuccuccaau

SEQ ID NO: 293946 - RNA, 19 nt, Homo sapiens
  misc_RNA (1)...(19): siRNA sense strand
ggaagugcuagacccaauu

SEQ ID NO: 293947 - RNA, 19 nt, Homo sapiens
  misc_RNA (1)...(19): siRNA sense strand
agaaauugguaacaugauc

SEQ ID NO: 293948 - RNA, 19 nt, Homo sapiens
  misc_RNA (1)...(19): siRNA sense strand
cgaagugggcugggaguaa

SEQ ID NO: 293949 - RNA, 19 nt, Homo sapiens
  misc_RNA (1)...(19): siRNA sense strand
gaagugcuagacccaauuc

SEQ ID NO: 293950 - RNA, 19 nt, Homo sapiens
  misc_RNA (1)...(19): siRNA sense strand
aauugaagcaggaaucuuu

SEQ ID NO: 293951 - RNA, 19 nt, Homo sapiens
  misc_RNA (1)...(19): siRNA sense strand
agucaauggucuucuguau

SEQ ID NO: 293952 - RNA, 19 nt, Homo sapiens
  misc_RNA (1)...(19): siRNA sense strand
aaugggaaguaguugguaa

SEQ ID NO: 293953 - RNA, 19 nt, Homo sapiens
  misc_RNA (1)...(19): siRNA sense strand
gagauagggaacaccauug

SEQ ID NO: 293954 - RNA, 19 nt, Homo sapiens
  misc_RNA (1)...(19): siRNA sense strand
ggaccacugugucuucacu

SEQ ID NO: 293955 - RNA, 19 nt, Homo sapiens
  misc_RNA (1)...(19): siRNA sense strand
caagaaaguaccuguaugc

SEQ ID NO: 293956 - RNA, 19 nt, Homo sapiens
  misc_RNA (1)...(19): siRNA sense strand
gaagugaagagcuuagcau

SEQ ID NO: 293957 - RNA, 19 nt, Homo sapiens
  misc_RNA (1)...(19): siRNA sense strand
ucagaaaacuacauucaug

SEQ ID NO: 293958 - RNA, 19 nt, Homo sapiens
  misc_RNA (1)...(19): siRNA sense strand
cagcaguccuuacuuugca

SEQ ID NO: 293959 - RNA, 19 nt, Homo sapiens
  misc_RNA (1)...(19): siRNA sense strand
uuauaacccucauucagau

SEQ ID NO: 293960 - RNA, 19 nt, Homo sapiens
  misc_RNA (1)...(19): siRNA sense strand
acaaauugauccacugaac

SEQ ID NO: 293961 - RNA, 19 nt, Homo sapiens
  misc_RNA (1)...(19): siRNA sense strand
acacagguauagugaacau

SEQ ID NO: 293962 - RNA, 19 nt, Homo sapiens
  misc_RNA (1)...(19): siRNA sense strand
gauggaaugagacccaaga

SEQ ID NO: 293963 - RNA, 19 nt, Homo sapiens
  misc_RNA (1)...(19): siRNA sense strand
cagcaaugaaggaauagaa

SEQ ID NO: 293964 - RNA, 19 nt, Homo sapiens
  misc_RNA (1)...(19): siRNA sense strand
caacuguagcuucgaugaa

SEQ ID NO: 293965 - RNA, 19 nt, Homo sapiens
  misc_RNA (1)...(19): siRNA sense strand
ugauuguacugaaugcuau

SEQ ID NO: 293966 - RNA, 19 nt, Homo sapiens
  misc_RNA (1)...(19): siRNA sense strand
gguucgaccucggaagaaa

SEQ ID NO: 293967 - RNA, 19 nt, Homo sapiens
  misc_RNA (1)...(19): siRNA sense strand
augcaaaucucccaaagag

SEQ ID NO: 293968 - RNA, 19 nt, Homo sapiens
  misc_RNA (1)...(19): siRNA sense strand
gcauugcaaacacuucuga

SEQ ID NO: 293969 - RNA, 19 nt, Homo sapiens
  misc_RNA (1)...(19): siRNA sense strand
caugaucucuuggaauucu

SEQ ID NO: 293970 - RNA, 19 nt, Homo sapiens
  misc_RNA (1)...(19): siRNA sense strand
gauagggaacaccauugaa

SEQ ID NO: 293971 - RNA, 19 nt, Homo sapiens
  misc_RNA (1)...(19): siRNA sense strand
ucaaugacugcaucuauuc

SEQ ID NO: 293972 - RNA, 19 nt, Homo sapiens
  misc_RNA (1)...(19): siRNA sense strand
gaaccaggagagcauaucu

SEQ ID NO: 293973 - RNA, 19 nt, Homo sapiens
  misc_RNA (1)...(19): siRNA sense strand
caaugaaggaauagaacuu

SEQ ID NO: 293974 - RNA, 19 nt, Homo sapiens
  misc_RNA (1)...(19): siRNA sense strand
gaauuuccgucaucaacuu

SEQ ID NO: 293975 - RNA, 19 nt, Homo sapiens
  misc_RNA (1)...(19): siRNA sense strand
cuggaaagcugaagacugu

SEQ ID NO: 293976 - RNA, 19 nt, Homo sapiens
  misc_RNA (1)...(19): siRNA sense strand
caacuuucuugaccagcuu

SEQ ID NO: 293977 - RNA, 19 nt, Homo sapiens
  misc_RNA (1)...(19): siRNA sense strand
gcuccgaauuuccgucauc

SEQ ID NO: 293978 - RNA, 19 nt, Homo sapiens
  misc_RNA (1)...(19): siRNA sense strand
aaagggugguugggaagga

SEQ ID NO: 293979 - RNA, 19 nt, Homo sapiens
  misc_RNA (1)...(19): siRNA sense strand
gaaacggacuggaaaguua

SEQ ID NO: 293980 - RNA, 19 nt, Homo sapiens
  misc_RNA (1)...(19): siRNA sense strand
gcaaagaacugucugcaaa

SEQ ID NO: 293981 - RNA, 19 nt, Homo sapiens
  misc_RNA (1)...(19): siRNA sense strand
gaugaaaggugacuuagaa

SEQ ID NO: 293982 - RNA, 19 nt, Homo sapiens
  misc_RNA (1)...(19): siRNA sense strand
guaaagagaucaccgagaa

SEQ ID NO: 293983 - RNA, 19 nt, Homo sapiens
  misc_RNA (1)...(19): siRNA sense strand
ggacgaagcuugcucacuu

SEQ ID NO: 293984 - RNA, 19 nt, Homo sapiens
  misc_RNA (1)...(19): siRNA sense strand
gaaacacucuccaugauug

SEQ ID NO: 293985 - RNA, 19 nt, Homo sapiens
  misc_RNA (1)...(19): siRNA sense strand
ggagaaagaugucgaagau

SEQ ID NO: 293986 - RNA, 19 nt, Homo sapiens
  misc_RNA (1)...(19): siRNA sense strand
gaagaaauacuacaucuga

SEQ ID NO: 293987 - RNA, 19 nt, Homo sapiens
  misc_RNA (1)...(19): siRNA sense strand
gaaaggagcucuggcacaa

SEQ ID NO: 293988 - RNA, 19 nt, Homo sapiens
  misc_RNA (1)...(19): siRNA sense strand
ggaagaagcacgccaaauu

SEQ ID NO: 293989 - RNA, 19 nt, Homo sapiens
  misc_RNA (1)...(19): siRNA sense strand
gaggagaaguuaacauuga

SEQ ID NO: 293990 - RNA, 19 nt, Homo sapiens
  misc_RNA (1)...(19): siRNA sense strand
agaaagaugucgaagauuu

SEQ ID NO: 293991 - RNA, 19 nt, Homo sapiens
  misc_RNA (1)...(19): siRNA sense strand
gaaauuagcagccacaugu

SEQ ID NO: 293992 - RNA, 19 nt, Homo sapiens
  misc_RNA (1)...(19): siRNA sense strand
gaacauuccuugacagagu

SEQ ID NO: 293993 - RNA, 19 nt, Homo sapiens
  misc_RNA (1)...(19): siRNA sense strand
cagaguauauucaccauuu

SEQ ID NO: 293994 - RNA, 19 nt, Homo sapiens
  misc_RNA (1)...(19): siRNA sense strand
agacugagcucaaagaaga

SEQ ID NO: 293995 - RNA, 19 nt, Homo sapiens
  misc_RNA (1)...(19): siRNA sense strand
aaacaggaauuccaaagaa

SEQ ID NO: 293996 - RNA, 19 nt, Homo sapiens
  misc_RNA (1)...(19): siRNA sense strand
gagagcagcuggagugaug

SEQ ID NO: 293997 - RNA, 19 nt, Homo sapiens
  misc_RNA (1)...(19): siRNA sense strand
ugaauuggcuauacagaaa

SEQ ID NO: 293998 - RNA, 19 nt, Homo sapiens
  misc_RNA (1)...(19): siRNA sense strand
agacugagcugaugaaaca

SEQ ID NO: 293999 - RNA, 19 nt, Homo sapiens
  misc_RNA (1)...(19): siRNA sense strand
ggagaaagcagaggaaauu

SEQ ID NO: 294000 - RNA, 19 nt, Homo sapiens
  misc_RNA (1)...(19): siRNA sense strand
ucagagaacuugaggaaga

SEQ ID NO: 294001 - RNA, 19 nt, Homo sapiens
  misc_RNA (1)...(19): siRNA sense strand
gaagagaacacgagcuuga

SEQ ID NO: 294002 - RNA, 19 nt, Homo sapiens
  misc_RNA (1)...(19): siRNA sense strand
ugucuaagcuugagaaguu

SEQ ID NO: 294003 - RNA, 19 nt, Homo sapiens
  misc_RNA (1)...(19): siRNA sense strand
gaagagagaggacuuggaa

SEQ ID NO: 294004 - RNA, 19 nt, Homo sapiens
  misc_RNA (1)...(19): siRNA sense strand
gguggucauugcaauauua

SEQ ID NO: 294005 - RNA, 19 nt, Homo sapiens
  misc_RNA (1)...(19): siRNA sense strand
ggacggcuguggagaaaga

SEQ ID NO: 294006 - RNA, 19 nt, Homo sapiens
  misc_RNA (1)...(19): siRNA sense strand
gagaagagccugacauauc

SEQ ID NO: 294007 - RNA, 19 nt, Homo sapiens
  misc_RNA (1)...(19): siRNA sense strand
uaacauugaugcuacuuga

SEQ ID NO: 294008 - RNA, 19 nt, Homo sapiens
  misc_RNA (1)...(19): siRNA sense strand
uaaagacccugaaggaaga

SEQ ID NO: 294009 - RNA, 19 nt, Homo sapiens
  misc_RNA (1)...(19): siRNA sense strand
gagcagagagcuuuagaaa

SEQ ID NO: 294010 - RNA, 19 nt, Homo sapiens
  misc_RNA (1)...(19): siRNA sense strand
guuaagggaugcugagaaa

SEQ ID NO: 294011 - RNA, 19 nt, Homo sapiens
  misc_RNA (1)...(19): siRNA sense strand
gcaggaagaagaaauuaaa

SEQ ID NO: 294012 - RNA, 19 nt, Homo sapiens
  misc_RNA (1)...(19): siRNA sense strand
gaaguuacaaucagaaaug

SEQ ID NO: 294013 - RNA, 19 nt, Homo sapiens
  misc_RNA (1)...(19): siRNA sense strand
ugagagaccuggagucgaa

SEQ ID NO: 294014 - RNA, 19 nt, Homo sapiens
  misc_RNA (1)...(19): siRNA sense strand
caacauccuuugauucuca

SEQ ID NO: 294015 - RNA, 19 nt, Homo sapiens
  misc_RNA (1)...(19): siRNA sense strand
aaauugggauuccuugaua

SEQ ID NO: 294016 - RNA, 19 nt, Homo sapiens
  misc_RNA (1)...(19): siRNA sense strand
gaggagauguggucugaug

SEQ ID NO: 294017 - RNA, 19 nt, Homo sapiens
  misc_RNA (1)...(19): siRNA sense strand
gaaauucagugcggaacaa

SEQ ID NO: 294018 - RNA, 19 nt, Homo sapiens
  misc_RNA (1)...(19): siRNA sense strand
gagcugaguuggagaagau

SEQ ID NO: 294019 - RNA, 19 nt, Homo sapiens
  misc_RNA (1)...(19): siRNA sense strand
gaaagcagaggaaauugaa

SEQ ID NO: 294020 - RNA, 19 nt, Homo sapiens
  misc_RNA (1)...(19): siRNA sense strand
gaagaagcacgccaaauuc

SEQ ID NO: 294021 - RNA, 19 nt, Homo sapiens
  misc_RNA (1)...(19): siRNA sense strand
uaagaaauggcaagaagua

SEQ ID NO: 294022 - RNA, 19 nt, Homo sapiens
  misc_RNA (1)...(19): siRNA sense strand
caagaaacacucuccauga

SEQ ID NO: 294023 - RNA, 19 nt, Homo sapiens
  misc_RNA (1)...(19): siRNA sense strand
uggaggagcugaagucuga

SEQ ID NO: 294024 - RNA, 19 nt, Homo sapiens
  misc_RNA (1)...(19): siRNA sense strand
ggaaggaaguggaggaucu

SEQ ID NO: 294025 - RNA, 19 nt, Homo sapiens
  misc_RNA (1)...(19): siRNA sense strand
gaacaucaacaucaggaaa

SEQ ID NO: 294026 - RNA, 19 nt, Homo sapiens
  misc_RNA (1)...(19): siRNA sense strand
ggagaagcugcgagaauua

SEQ ID NO: 294027 - RNA, 19 nt, Homo sapiens
  misc_RNA (1)...(19): siRNA sense strand
gcaugaaacucgucugaag

SEQ ID NO: 294028 - RNA, 19 nt, Homo sapiens
  misc_RNA (1)...(19): siRNA sense strand
cagcgugacuugcauaaga

SEQ ID NO: 294029 - RNA, 19 nt, Homo sapiens
  misc_RNA (1)...(19): siRNA sense strand
gagaaaaguuggaugaauu

SEQ ID NO: 294030 - RNA, 19 nt, Homo sapiens
  misc_RNA (1)...(19): siRNA sense strand
gaaacaggaauuccaaaga

SEQ ID NO: 294031 - RNA, 19 nt, Homo sapiens
  misc_RNA (1)...(19): siRNA sense strand
gaaagagucggcagauaga

SEQ ID NO: 294032 - RNA, 19 nt, Homo sapiens
  misc_RNA (1)...(19): siRNA sense strand
gaaccgaagugagcacaga

SEQ ID NO: 294033 - RNA, 19 nt, Homo sapiens
  misc_RNA (1)...(19): siRNA sense strand
gaaguuaacauugaugcua

SEQ ID NO: 294034 - RNA, 19 nt, Homo sapiens
  misc_RNA (1)...(19): siRNA sense strand
gagcagacuuugaggaaca

SEQ ID NO: 294035 - RNA, 19 nt, Homo sapiens
  misc_RNA (1)...(19): siRNA sense strand
gaagugauccagcaaagau

SEQ ID NO: 294036 - RNA, 19 nt, Homo sapiens
  misc_RNA (1)...(19): siRNA sense strand
gugcauugcuggugacuug

SEQ ID NO: 294037 - RNA, 19 nt, Homo sapiens
  misc_RNA (1)...(19): siRNA sense strand
agaagagccugacauauca

SEQ ID NO: 294038 - RNA, 19 nt, Homo sapiens
  misc_RNA (1)...(19): siRNA sense strand
gagaaacagaccaucauaa

SEQ ID NO: 294039 - RNA, 19 nt, Homo sapiens
  misc_RNA (1)...(19): siRNA sense strand
cagcacagguugucaggaa

SEQ ID NO: 294040 - RNA, 19 nt, Homo sapiens
  misc_RNA (1)...(19): siRNA sense strand
gaagcacgccaaauucauu

SEQ ID NO: 294041 - RNA, 19 nt, Homo sapiens
  misc_RNA (1)...(19): siRNA sense strand
gaagaaauugaacuccuaa

SEQ ID NO: 294042 - RNA, 19 nt, Homo sapiens
  misc_RNA (1)...(19): siRNA sense strand
gcagauagacaaguguuaa

SEQ ID NO: 294043 - RNA, 19 nt, Homo sapiens
  misc_RNA (1)...(19): siRNA sense strand
ucaaagagagcgagaaaga

SEQ ID NO: 294044 - RNA, 19 nt, Homo sapiens
  misc_RNA (1)...(19): siRNA sense strand
cagaugaaaugccagauuc

SEQ ID NO: 294045 - RNA, 19 nt, Homo sapiens
  misc_RNA (1)...(19): siRNA sense strand
uggaggaucugaccaaaga

SEQ ID NO: 294046 - RNA, 19 nt, Homo sapiens
  misc_RNA (1)...(19): siRNA sense strand
gcgcaaaccuccucuccau

SEQ ID NO: 294047 - RNA, 19 nt, Homo sapiens
  misc_RNA (1)...(19): siRNA sense strand
aaacagaccaucauaaaca

SEQ ID NO: 294048 - RNA, 19 nt, Homo sapiens
  misc_RNA (1)...(19): siRNA sense strand
gaagagaucaggcgcuugu

SEQ ID NO: 294049 - RNA, 19 nt, Homo sapiens
  misc_RNA (1)...(19): siRNA sense strand
gauaaagagguguuaaaga

SEQ ID NO: 294050 - RNA, 19 nt, Homo sapiens
  misc_RNA (1)...(19): siRNA sense strand
gcacacaccagcaauguca

SEQ ID NO: 294051 - RNA, 19 nt, Homo sapiens
  misc_RNA (1)...(19): siRNA sense strand
cgaaacggcuccacagagu

SEQ ID NO: 294052 - RNA, 19 nt, Homo sapiens
  misc_RNA (1)...(19): siRNA sense strand
gagcugcaguuccaguuug

SEQ ID NO: 294053 - RNA, 19 nt, Homo sapiens
  misc_RNA (1)...(19): siRNA sense strand
gaggacggcuguggagaaa

SEQ ID NO: 294054 - RNA, 19 nt, Homo sapiens
  misc_RNA (1)...(19): siRNA sense strand
gaaggucgaucucguagcu

SEQ ID NO: 294055 - RNA, 19 nt, Homo sapiens
  misc_RNA (1)...(19): siRNA sense strand
aaagagagcgagaaagaaa

SEQ ID NO: 294056 - RNA, 19 nt, Homo sapiens
  misc_RNA (1)...(19): siRNA sense strand
gcaagaaguagaucggaaa

SEQ ID NO: 294057 - RNA, 19 nt, Homo sapiens
  misc_RNA (1)...(19): siRNA sense strand
gaacaacuccaugaaguca

SEQ ID NO: 294058 - RNA, 19 nt, Homo sapiens
  misc_RNA (1)...(19): siRNA sense strand
gcugaaagccacuauugaa

SEQ ID NO: 294059 - RNA, 19 nt, Homo sapiens
  misc_RNA (1)...(19): siRNA sense strand
gagcugaaagccacuauug

SEQ ID NO: 294060 - RNA, 19 nt, Homo sapiens
  misc_RNA (1)...(19): siRNA sense strand
ggucauauauaccagaagu

SEQ ID NO: 294061 - RNA, 19 nt, Homo sapiens
  misc_RNA (1)...(19): siRNA sense strand
cagaaagagucggcagaua

SEQ ID NO: 294062 - RNA, 19 nt, Homo sapiens
  misc_RNA (1)...(19): siRNA sense strand
agaagaaauugaacuccua

SEQ ID NO: 294063 - RNA, 19 nt, Homo sapiens
  misc_RNA (1)...(19): siRNA sense strand
cgugggaucuucacaauca

SEQ ID NO: 294064 - RNA, 19 nt, Homo sapiens
  misc_RNA (1)...(19): siRNA sense strand
guuaagaaauggcaagaag

SEQ ID NO: 294065 - RNA, 19 nt, Homo sapiens
  misc_RNA (1)...(19): siRNA sense strand
gcaaaggaagcgacgauug

SEQ ID NO: 294066 - RNA, 19 nt, Homo sapiens
  misc_RNA (1)...(19): siRNA sense strand
gcuugaaggucauauauac

SEQ ID NO: 294067 - RNA, 19 nt, Homo sapiens
  misc_RNA (1)...(19): siRNA sense strand
aaagaugaaaggugacuua

SEQ ID NO: 294068 - RNA, 19 nt, Homo sapiens
  misc_RNA (1)...(19): siRNA sense strand
ggaagcaggcugagaagga

SEQ ID NO: 294069 - RNA, 19 nt, Homo sapiens
  misc_RNA (1)...(19): siRNA sense strand
agaaacagaccaucauaaa

SEQ ID NO: 294070 - RNA, 19 nt, Homo sapiens
  misc_RNA (1)...(19): siRNA sense strand
gaaggacgauuuggagaag

SEQ ID NO: 294071 - RNA, 19 nt, Homo sapiens
  misc_RNA (1)...(19): siRNA sense strand
cguagagacuucagcauug

SEQ ID NO: 294072 - RNA, 19 nt, Homo sapiens
  misc_RNA (1)...(19): siRNA sense strand
ugagaaaacuuaccaagaa

SEQ ID NO: 294073 - RNA, 19 nt, Homo sapiens
  misc_RNA (1)...(19): siRNA sense strand
gcucagguguggacaggaa

SEQ ID NO: 294074 - RNA, 19 nt, Homo sapiens
  misc_RNA (1)...(19): siRNA sense strand
aaaggagugugaacaagaa

SEQ ID NO: 294075 - RNA, 19 nt, Homo sapiens
  misc_RNA (1)...(19): siRNA sense strand
gaaggagaaguuacaauca

SEQ ID NO: 294076 - RNA, 19 nt, Homo sapiens
  misc_RNA (1)...(19): siRNA sense strand
ucgaaaggcuggagaagau

SEQ ID NO: 294077 - RNA, 19 nt, Homo sapiens
  misc_RNA (1)...(19): siRNA sense strand
ggacugugauggagagaag

SEQ ID NO: 294078 - RNA, 19 nt, Homo sapiens
  misc_RNA (1)...(19): siRNA sense strand
guaccugcauuacuugaga

SEQ ID NO: 294079 - RNA, 19 nt, Homo sapiens
  misc_RNA (1)...(19): siRNA sense strand
gcacagaagugaagaugaa

SEQ ID NO: 294080 - RNA, 19 nt, Homo sapiens
  misc_RNA (1)...(19): siRNA sense strand
cgacaggccucguguauga

SEQ ID NO: 294081 - RNA, 19 nt, Homo sapiens
  misc_RNA (1)...(19): siRNA sense strand
gaagaugaaguuacaagaa

SEQ ID NO: 294082 - RNA, 19 nt, Homo sapiens
  misc_RNA (1)...(19): siRNA sense strand
ggacccagcucacccaaca

SEQ ID NO: 294083 - RNA, 19 nt, Homo sapiens
  misc_RNA (1)...(19): siRNA sense strand
gggagacgcugaguacuug

SEQ ID NO: 294084 - RNA, 19 nt, Homo sapiens
  misc_RNA (1)...(19): siRNA sense strand
gcagaaaguggccgaaaga

SEQ ID NO: 294085 - RNA, 19 nt, Homo sapiens
  misc_RNA (1)...(19): siRNA sense strand
ugaaccgaaucugaaauua

SEQ ID NO: 294086 - RNA, 19 nt, Homo sapiens
  misc_RNA (1)...(19): siRNA sense strand
gcaaagacccaaugcaaac

SEQ ID NO: 294087 - RNA, 19 nt, Homo sapiens
  misc_RNA (1)...(19): siRNA sense strand
gagugucgaccuccuauaa

SEQ ID NO: 294088 - RNA, 19 nt, Homo sapiens
  misc_RNA (1)...(19): siRNA sense strand
aaauuacgguccaggcuaa

SEQ ID NO: 294089 - RNA, 19 nt, Homo sapiens
  misc_RNA (1)...(19): siRNA sense strand
gguccaggcuaaagcagaa

SEQ ID NO: 294090 - RNA, 19 nt, Homo sapiens
  misc_RNA (1)...(19): siRNA sense strand
gaauguacgacgccaaaga

SEQ ID NO: 294091 - RNA, 19 nt, Homo sapiens
  misc_RNA (1)...(19): siRNA sense strand
ggacccagcaggcuuucua

SEQ ID NO: 294092 - RNA, 19 nt, Homo sapiens
  misc_RNA (1)...(19): siRNA sense strand
gcagcagcaucagcaguuu

SEQ ID NO: 294093 - RNA, 19 nt, Homo sapiens
  misc_RNA (1)...(19): siRNA sense strand
cagcaaagacccaaugcaa

SEQ ID NO: 294094 - RNA, 19 nt, Homo sapiens
  misc_RNA (1)...(19): siRNA sense strand
gaacaaggagaagggcaaa

SEQ ID NO: 294095 - RNA, 19 nt, Homo sapiens
  misc_RNA (1)...(19): siRNA sense strand
gaaccgaaucugaaauuac

SEQ ID NO: 294096 - RNA, 19 nt, Homo sapiens
  misc_RNA (1)...(19): siRNA sense strand
aaucugaaccacugcauuu

SEQ ID NO: 294097 - RNA, 19 nt, Homo sapiens
  misc_RNA (1)...(19): siRNA sense strand
ugguagagcuggucuucaa

SEQ ID NO: 294098 - RNA, 19 nt, Homo sapiens
  misc_RNA (1)...(19): siRNA sense strand
gaagugaagaugaaguuac

SEQ ID NO: 294099 - RNA, 19 nt, Homo sapiens
  misc_RNA (1)...(19): siRNA sense strand
caagaauuuguccucaaua

SEQ ID NO: 294100 - RNA, 19 nt, Homo sapiens
  misc_RNA (1)...(19): siRNA sense strand
ugcagcagcucaagaacaa

SEQ ID NO: 294101 - RNA, 19 nt, Homo sapiens
  misc_RNA (1)...(19): siRNA sense strand
ggacagugacaccauaugg

SEQ ID NO: 294102 - RNA, 19 nt, Homo sapiens
  misc_RNA (1)...(19): siRNA sense strand
gggaauguacgacgccaaa

SEQ ID NO: 294103 - RNA, 19 nt, Homo sapiens
  misc_RNA (1)...(19): siRNA sense strand
caacugcagaugaacaaga

SEQ ID NO: 294104 - RNA, 19 nt, Homo sapiens
  misc_RNA (1)...(19): siRNA sense strand
ggagaagggcaaagagagu

SEQ ID NO: 294105 - RNA, 19 nt, Homo sapiens
  misc_RNA (1)...(19): siRNA sense strand
ggaaaacgcagcacaguuc

SEQ ID NO: 294106 - RNA, 19 nt, Homo sapiens
  misc_RNA (1)...(19): siRNA sense strand
cuacgacgaugggaacuuc

SEQ ID NO: 294107 - RNA, 19 nt, Homo sapiens
  misc_RNA (1)...(19): siRNA sense strand
cagaagugaagaugaaguu

SEQ ID NO: 294108 - RNA, 19 nt, Homo sapiens
  misc_RNA (1)...(19): siRNA sense strand
gcacaucaagcaacaacag

SEQ ID NO: 294109 - RNA, 19 nt, Homo sapiens
  misc_RNA (1)...(19): siRNA sense strand
gaaucugaaccacugcauu

SEQ ID NO: 294110 - RNA, 19 nt, Homo sapiens
  misc_RNA (1)...(19): siRNA sense strand
aagugaagaugaaguuaca

SEQ ID NO: 294111 - RNA, 19 nt, Homo sapiens
  misc_RNA (1)...(19): siRNA sense strand
uggagaaagucauggagau

SEQ ID NO: 294112 - RNA, 19 nt, Homo sapiens
  misc_RNA (1)...(19): siRNA sense strand
ugaagcaggagcccauuga

SEQ ID NO: 294113 - RNA, 19 nt, Homo sapiens
  misc_RNA (1)...(19): siRNA sense strand
caguggagcugcugaaucc

SEQ ID NO: 294114 - RNA, 19 nt, Homo sapiens
  misc_RNA (1)...(19): siRNA sense strand
gaugacuucccucuuagga

SEQ ID NO: 294115 - RNA, 19 nt, Homo sapiens
  misc_RNA (1)...(19): siRNA sense strand
gcuugauccucucccagaa

SEQ ID NO: 294116 - RNA, 19 nt, Homo sapiens
  misc_RNA (1)...(19): siRNA sense strand
agcaggagcuggagaagca

SEQ ID NO: 294117 - RNA, 19 nt, Homo sapiens
  misc_RNA (1)...(19): siRNA sense strand
ggagaaagucauggagauc

SEQ ID NO: 294118 - RNA, 19 nt, Homo sapiens
  misc_RNA (1)...(19): siRNA sense strand
ggaacuaccaggcguccau

SEQ ID NO: 294119 - RNA, 19 nt, Homo sapiens
  misc_RNA (1)...(19): siRNA sense strand
ugagagcgaugaggaagag

SEQ ID NO: 294120 - RNA, 19 nt, Homo sapiens
  misc_RNA (1)...(19): siRNA sense strand
aggagaugcuggccaugaa

SEQ ID NO: 294121 - RNA, 19 nt, Homo sapiens
  misc_RNA (1)...(19): siRNA sense strand
ucggguaccugacgaagca

SEQ ID NO: 294122 - RNA, 19 nt, Homo sapiens
  misc_RNA (1)...(19): siRNA sense strand
acagugacaccauauggaa

SEQ ID NO: 294123 - RNA, 19 nt, Homo sapiens
  misc_RNA (1)...(19): siRNA sense strand
caggggagcugaagaaugg

SEQ ID NO: 294124 - RNA, 19 nt, Homo sapiens
  misc_RNA (1)...(19): siRNA sense strand
ggagauccacagcaaguac

SEQ ID NO: 294125 - RNA, 19 nt, Homo sapiens
  misc_RNA (1)...(19): siRNA sense strand
ggacgugcaccauggaaac

SEQ ID NO: 294126 - RNA, 19 nt, Homo sapiens
  misc_RNA (1)...(19): siRNA sense strand
ugaagaugaaguuacaaga

SEQ ID NO: 294127 - RNA, 19 nt, Homo sapiens
  misc_RNA (1)...(19): siRNA sense strand
gacagugacaccauaugga

SEQ ID NO: 294128 - RNA, 19 nt, Homo sapiens
  misc_RNA (1)...(19): siRNA sense strand
gaaacacaagcagcaguuc

SEQ ID NO: 294129 - RNA, 19 nt, Homo sapiens
  misc_RNA (1)...(19): siRNA sense strand
acaaggagaagggcaaaga

SEQ ID NO: 294130 - RNA, 19 nt, Homo sapiens
  misc_RNA (1)...(19): siRNA sense strand
gcugaagaauggcuuugcu

SEQ ID NO: 294131 - RNA, 19 nt, Homo sapiens
  misc_RNA (1)...(19): siRNA sense strand
gcccacacccuccuguaug

SEQ ID NO: 294132 - RNA, 19 nt, Homo sapiens
  misc_RNA (1)...(19): siRNA sense strand
gggaggauccagagcaucu

SEQ ID NO: 294133 - RNA, 19 nt, Homo sapiens
  misc_RNA (1)...(19): siRNA sense strand
cagugcaccugcgggagua

SEQ ID NO: 294134 - RNA, 19 nt, Homo sapiens
  misc_RNA (1)...(19): siRNA sense strand
cuucugaaccgaaucugaa

SEQ ID NO: 294135 - RNA, 19 nt, Homo sapiens
  misc_RNA (1)...(19): siRNA sense strand
agaaacacaagcagcaguu

SEQ ID NO: 294136 - RNA, 19 nt, Homo sapiens
  misc_RNA (1)...(19): siRNA sense strand
gaguuuggcgcacagacuu

SEQ ID NO: 294137 - RNA, 19 nt, Homo sapiens
  misc_RNA (1)...(19): siRNA sense strand
agaagugaagaugaaguua

SEQ ID NO: 294138 - RNA, 19 nt, Homo sapiens
  misc_RNA (1)...(19): siRNA sense strand
cagaugaggagcccaugga

SEQ ID NO: 294139 - RNA, 19 nt, Homo sapiens
  misc_RNA (1)...(19): siRNA sense strand
ugaucgaggcucagacuug

SEQ ID NO: 294140 - RNA, 19 nt, Homo sapiens
  misc_RNA (1)...(19): siRNA sense strand
caggagaugcuggccauga

SEQ ID NO: 294141 - RNA, 19 nt, Homo sapiens
  misc_RNA (1)...(19): siRNA sense strand
gagcacaucaagcaacaac

SEQ ID NO: 294142 - RNA, 19 nt, Homo sapiens
  misc_RNA (1)...(19): siRNA sense strand
guacgacgccaaagaugac

SEQ ID NO: 294143 - RNA, 19 nt, Homo sapiens
  misc_RNA (1)...(19): siRNA sense strand
uccaccagcugaggaacua

SEQ ID NO: 294144 - RNA, 19 nt, Homo sapiens
  misc_RNA (1)...(19): siRNA sense strand
aaccgaaucugaaauuacg

SEQ ID NO: 294145 - RNA, 19 nt, Homo sapiens
  misc_RNA (1)...(19): siRNA sense strand
cugaaccgaaucugaaauu

SEQ ID NO: 294146 - RNA, 19 nt, Homo sapiens
  misc_RNA (1)...(19): siRNA sense strand
gcagcacaguucccuugac

SEQ ID NO: 294147 - RNA, 19 nt, Homo sapiens
  misc_RNA (1)...(19): siRNA sense strand
augaggagcccauggaaga

SEQ ID NO: 294148 - RNA, 19 nt, Homo sapiens
  misc_RNA (1)...(19): siRNA sense strand
gacccuagcguccuguaca

SEQ ID NO: 294149 - RNA, 19 nt, Homo sapiens
  misc_RNA (1)...(19): siRNA sense strand
ggagcugaagaauggcuuu

SEQ ID NO: 294150 - RNA, 19 nt, Homo sapiens
  misc_RNA (1)...(19): siRNA sense strand
ccacgcacaguccuugguu

SEQ ID NO: 294151 - RNA, 19 nt, Homo sapiens
  misc_RNA (1)...(19): siRNA sense strand
caugggagacgcugaguac

SEQ ID NO: 294152 - RNA, 19 nt, Homo sapiens
  misc_RNA (1)...(19): siRNA sense strand
cagcacagaagugaagaug

SEQ ID NO: 294153 - RNA, 19 nt, Homo sapiens
  misc_RNA (1)...(19): siRNA sense strand
uuacagcaaagacccaaug

SEQ ID NO: 294154 - RNA, 19 nt, Homo sapiens
  misc_RNA (1)...(19): siRNA sense strand
ggacugggacgugcaccau

SEQ ID NO: 294155 - RNA, 19 nt, Homo sapiens
  misc_RNA (1)...(19): siRNA sense strand
ggauccaccagcugaggaa

SEQ ID NO: 294156 - RNA, 19 nt, Homo sapiens
  misc_RNA (1)...(19): siRNA sense strand
uguacgacgccaaagauga

SEQ ID NO: 294157 - RNA, 19 nt, Homo sapiens
  misc_RNA (1)...(19): siRNA sense strand
ucaagcagaagcagcagau

SEQ ID NO: 294158 - RNA, 19 nt, Homo sapiens
  misc_RNA (1)...(19): siRNA sense strand
aagcaggagcccauugaga

SEQ ID NO: 294159 - RNA, 19 nt, Homo sapiens
  misc_RNA (1)...(19): siRNA sense strand
gaagcaggagcccauugag

SEQ ID NO: 294160 - RNA, 19 nt, Homo sapiens
  misc_RNA (1)...(19): siRNA sense strand
gcacagggcuggucuauga

SEQ ID NO: 294161 - RNA, 19 nt, Homo sapiens
  misc_RNA (1)...(19): siRNA sense strand
gaaggacccuccaguucua

SEQ ID NO: 294162 - RNA, 19 nt, Homo sapiens
  misc_RNA (1)...(19): siRNA sense strand
gaacucagcacauguuuga

SEQ ID NO: 294163 - RNA, 19 nt, Homo sapiens
  misc_RNA (1)...(19): siRNA sense strand
ggauggaucugaaccuuga

SEQ ID NO: 294164 - RNA, 19 nt, Homo sapiens
  misc_RNA (1)...(19): siRNA sense strand
gaaacaacccaguacauga

SEQ ID NO: 294165 - RNA, 19 nt, Homo sapiens
  misc_RNA (1)...(19): siRNA sense strand
gcaccgagcugauccaaac

SEQ ID NO: 294166 - RNA, 19 nt, Homo sapiens
  misc_RNA (1)...(19): siRNA sense strand
gaugagcaguuaaaugaau

SEQ ID NO: 294167 - RNA, 19 nt, Homo sapiens
  misc_RNA (1)...(19): siRNA sense strand
gaagguagaagacagagaa

SEQ ID NO: 294168 - RNA, 19 nt, Homo sapiens
  misc_RNA (1)...(19): siRNA sense strand
gcaguuaaaugaauuccau

SEQ ID NO: 294169 - RNA, 19 nt, Homo sapiens
  misc_RNA (1)...(19): siRNA sense strand
gaacaucgcccaccagaac

SEQ ID NO: 294170 - RNA, 19 nt, Homo sapiens
  misc_RNA (1)...(19): siRNA sense strand
gguguuggaugagcaguua

SEQ ID NO: 294171 - RNA, 19 nt, Homo sapiens
  misc_RNA (1)...(19): siRNA sense strand
ccagauaucucccaguaca

SEQ ID NO: 294172 - RNA, 19 nt, Homo sapiens
  misc_RNA (1)...(19): siRNA sense strand
gcuauaaccugacauccau

SEQ ID NO: 294173 - RNA, 19 nt, Homo sapiens
  misc_RNA (1)...(19): siRNA sense strand
guucacagccuagaauaua

SEQ ID NO: 294174 - RNA, 19 nt, Homo sapiens
  misc_RNA (1)...(19): siRNA sense strand
ggucucagcuggcuuugau

SEQ ID NO: 294175 - RNA, 19 nt, Homo sapiens
  misc_RNA (1)...(19): siRNA sense strand
caggagagguucugaaugg

SEQ ID NO: 294176 - RNA, 19 nt, Homo sapiens
  misc_RNA (1)...(19): siRNA sense strand
uagcggagguaaagaagaa

SEQ ID NO: 294177 - RNA, 19 nt, Homo sapiens
  misc_RNA (1)...(19): siRNA sense strand
ccaaggauauaccaucaau

SEQ ID NO: 294178 - RNA, 19 nt, Homo sapiens
  misc_RNA (1)...(19): siRNA sense strand
guacaugaaugagggagaa

SEQ ID NO: 294179 - RNA, 19 nt, Homo sapiens
  misc_RNA (1)...(19): siRNA sense strand
ggaaacaacccaguacaug

SEQ ID NO: 294180 - RNA, 19 nt, Homo sapiens
  misc_RNA (1)...(19): siRNA sense strand
ccugguggcugcuggauuu

SEQ ID NO: 294181 - RNA, 19 nt, Homo sapiens
  misc_RNA (1)...(19): siRNA sense strand
gcaccacggucaaggaaca

SEQ ID NO: 294182 - RNA, 19 nt, Homo sapiens
  misc_RNA (1)...(19): siRNA sense strand
ccaccaggcucuccuagau

SEQ ID NO: 294183 - RNA, 19 nt, Homo sapiens
  misc_RNA (1)...(19): siRNA sense strand
gcgggaugcugacuacauu

SEQ ID NO: 294184 - RNA, 19 nt, Homo sapiens
  misc_RNA (1)...(19): siRNA sense strand
gagaaggacccuccaguuc

SEQ ID NO: 294185 - RNA, 19 nt, Homo sapiens
  misc_RNA (1)...(19): siRNA sense strand
uggaugagcaguuaaauga

SEQ ID NO: 294186 - RNA, 19 nt, Homo sapiens
  misc_RNA (1)...(19): siRNA sense strand
gaaagucaccucggcauca

SEQ ID NO: 294187 - RNA, 19 nt, Homo sapiens
  misc_RNA (1)...(19): siRNA sense strand
ggaggguccuuaucguaga

SEQ ID NO: 294188 - RNA, 19 nt, Homo sapiens
  misc_RNA (1)...(19): siRNA sense strand
ccgcuaugcucaacagaaa

SEQ ID NO: 294189 - RNA, 19 nt, Homo sapiens
  misc_RNA (1)...(19): siRNA sense strand
ggauggcuauugcauguuc

SEQ ID NO: 294190 - RNA, 19 nt, Homo sapiens
  misc_RNA (1)...(19): siRNA sense strand
gccaagcaauggaagaaga

SEQ ID NO: 294191 - RNA, 19 nt, Homo sapiens
  misc_RNA (1)...(19): siRNA sense strand
gcauuauccuuauccuaga

SEQ ID NO: 294192 - RNA, 19 nt, Homo sapiens
  misc_RNA (1)...(19): siRNA sense strand
caacuuugacuccaucuau

SEQ ID NO: 294193 - RNA, 19 nt, Homo sapiens
  misc_RNA (1)...(19): siRNA sense strand
ggaacaauccaagagaauu

SEQ ID NO: 294194 - RNA, 19 nt, Homo sapiens
  misc_RNA (1)...(19): siRNA sense strand
gcacaggcuucaccgucaa

SEQ ID NO: 294195 - RNA, 19 nt, Homo sapiens
  misc_RNA (1)...(19): siRNA sense strand
gcacuggcuugguguugga

SEQ ID NO: 294196 - RNA, 19 nt, Homo sapiens
  misc_RNA (1)...(19): siRNA sense strand
ucacugaucaggccauauu

SEQ ID NO: 294197 - RNA, 19 nt, Homo sapiens
  misc_RNA (1)...(19): siRNA sense strand
ccucaggacuccaguguca

SEQ ID NO: 294198 - RNA, 19 nt, Homo sapiens
  misc_RNA (1)...(19): siRNA sense strand
gagcugauguugguucaca

SEQ ID NO: 294199 - RNA, 19 nt, Homo sapiens
  misc_RNA (1)...(19): siRNA sense strand
uuacaucaauggccacaug

SEQ ID NO: 294200 - RNA, 19 nt, Homo sapiens
  misc_RNA (1)...(19): siRNA sense strand
uaauggaacucagcacaug

SEQ ID NO: 294201 - RNA, 19 nt, Homo sapiens
  misc_RNA (1)...(19): siRNA sense strand
ggccaaggauauaccauca

SEQ ID NO: 294202 - RNA, 19 nt, Homo sapiens
  misc_RNA (1)...(19): siRNA sense strand
aaacaacccaguacaugaa

SEQ ID NO: 294203 - RNA, 19 nt, Homo sapiens
  misc_RNA (1)...(19): siRNA sense strand
gggugugucucucuugcua

SEQ ID NO: 294204 - RNA, 19 nt, Homo sapiens
  misc_RNA (1)...(19): siRNA sense strand
aggaagagcugauguuggu

SEQ ID NO: 294205 - RNA, 19 nt, Homo sapiens
  misc_RNA (1)...(19): siRNA sense strand
ggaugcagcuugcgguuuu

SEQ ID NO: 294206 - RNA, 19 nt, Homo sapiens
  misc_RNA (1)...(19): siRNA sense strand
gggcugagauccggaaugg

SEQ ID NO: 294207 - RNA, 19 nt, Homo sapiens
  misc_RNA (1)...(19): siRNA sense strand
gaagcucggccaagcaaug

SEQ ID NO: 294208 - RNA, 19 nt, Homo sapiens
  misc_RNA (1)...(19): siRNA sense strand
gggugaugcugacuaccua

SEQ ID NO: 294209 - RNA, 19 nt, Homo sapiens
  misc_RNA (1)...(19): siRNA sense strand
gguagaagacagagaagga

SEQ ID NO: 294210 - RNA, 19 nt, Homo sapiens
  misc_RNA (1)...(19): siRNA sense strand
caacccaguacaugaauga

SEQ ID NO: 294211 - RNA, 19 nt, Homo sapiens
  misc_RNA (1)...(19): siRNA sense strand
ccaaguccaucgcagauac

SEQ ID NO: 294212 - RNA, 19 nt, Homo sapiens
  misc_RNA (1)...(19): siRNA sense strand
gcaagcugauccugucucu

SEQ ID NO: 294213 - RNA, 19 nt, Homo sapiens
  misc_RNA (1)...(19): siRNA sense strand
cgacucaguuuaucugcau

SEQ ID NO: 294214 - RNA, 19 nt, Homo sapiens
  misc_RNA (1)...(19): siRNA sense strand
cuugugagaucaacugaga

SEQ ID NO: 294215 - RNA, 19 nt, Homo sapiens
  misc_RNA (1)...(19): siRNA sense strand
gggagguucuugugagauc

SEQ ID NO: 294216 - RNA, 19 nt, Homo sapiens
  misc_RNA (1)...(19): siRNA sense strand
gcuauugcauguucaacca

SEQ ID NO: 294217 - RNA, 19 nt, Homo sapiens
  misc_RNA (1)...(19): siRNA sense strand
gguggaggcugugcucuca

SEQ ID NO: 294218 - RNA, 19 nt, Homo sapiens
  misc_RNA (1)...(19): siRNA sense strand
uaucguagauugggaugug

SEQ ID NO: 294219 - RNA, 19 nt, Homo sapiens
  misc_RNA (1)...(19): siRNA sense strand
gaugaaucacugcaacuug

SEQ ID NO: 294220 - RNA, 19 nt, Homo sapiens
  misc_RNA (1)...(19): siRNA sense strand
ccaucaaugugccuuggaa

SEQ ID NO: 294221 - RNA, 19 nt, Homo sapiens
  misc_RNA (1)...(19): siRNA sense strand
ucacugagaccauccaagu

SEQ ID NO: 294222 - RNA, 19 nt, Homo sapiens
  misc_RNA (1)...(19): siRNA sense strand
gaagaagcucggccaagca

SEQ ID NO: 294223 - RNA, 19 nt, Homo sapiens
  misc_RNA (1)...(19): siRNA sense strand
cugacuacauugcugcuuu

SEQ ID NO: 294224 - RNA, 19 nt, Homo sapiens
  misc_RNA (1)...(19): siRNA sense strand
aaggauauaccaucaaugu

SEQ ID NO: 294225 - RNA, 19 nt, Homo sapiens
  misc_RNA (1)...(19): siRNA sense strand
ccaacaccauggaaauucu

SEQ ID NO: 294226 - RNA, 19 nt, Homo sapiens
  misc_RNA (1)...(19): siRNA sense strand
caacauggaggaggacaau

SEQ ID NO: 294227 - RNA, 19 nt, Homo sapiens
  misc_RNA (1)...(19): siRNA sense strand
ugacuacauugcugcuuuc

SEQ ID NO: 294228 - RNA, 19 nt, Homo sapiens
  misc_RNA (1)...(19): siRNA sense strand
gaugcgggaugcugacuac

SEQ ID NO: 294229 - RNA, 19 nt, Homo sapiens
  misc_RNA (1)...(19): siRNA sense strand
gaagaaaggcaaaaugaag

SEQ ID NO: 294230 - RNA, 19 nt, Homo sapiens
  misc_RNA (1)...(19): siRNA sense strand
cuacuguggucguuacauc

SEQ ID NO: 294231 - RNA, 19 nt, Homo sapiens
  misc_RNA (1)...(19): siRNA sense strand
cggaugaccacacgagaaa

SEQ ID NO: 294232 - RNA, 19 nt, Homo sapiens
  misc_RNA (1)...(19): siRNA sense strand
aacuuugacuccaucuaua

SEQ ID NO: 294233 - RNA, 19 nt, Homo sapiens
  misc_RNA (1)...(19): siRNA sense strand
acaccuacgacucaguuua

SEQ ID NO: 294234 - RNA, 19 nt, Homo sapiens
  misc_RNA (1)...(19): siRNA sense strand
ucacagccuagaauauauu

SEQ ID NO: 294235 - RNA, 19 nt, Homo sapiens
  misc_RNA (1)...(19): siRNA sense strand
cagauacuggcgcagcuua

SEQ ID NO: 294236 - RNA, 19 nt, Homo sapiens
  misc_RNA (1)...(19): siRNA sense strand
gcaggguucgcccagcuaa

SEQ ID NO: 294237 - RNA, 19 nt, Homo sapiens
  misc_RNA (1)...(19): siRNA sense strand
ccuagaauauauugaucug

SEQ ID NO: 294238 - RNA, 19 nt, Homo sapiens
  misc_RNA (1)...(19): siRNA sense strand
ggucuacuguggucguuac

SEQ ID NO: 294239 - RNA, 19 nt, Homo sapiens
  misc_RNA (1)...(19): siRNA sense strand
gaacuacaccccagauauc

SEQ ID NO: 294240 - RNA, 19 nt, Homo sapiens
  misc_RNA (1)...(19): siRNA sense strand
gagcugcaccgugagaguu

SEQ ID NO: 294241 - RNA, 19 nt, Homo sapiens
  misc_RNA (1)...(19): siRNA sense strand
ggaugagcaguuaaaugaa

SEQ ID NO: 294242 - RNA, 19 nt, Homo sapiens
  misc_RNA (1)...(19): siRNA sense strand
ugcaagggauggaucugaa

SEQ ID NO: 294243 - RNA, 19 nt, Homo sapiens
  misc_RNA (1)...(19): siRNA sense strand
uaaccugacauccaucuca

SEQ ID NO: 294244 - RNA, 19 nt, Homo sapiens
  misc_RNA (1)...(19): siRNA sense strand
cccauugccuacgaguuua

SEQ ID NO: 294245 - RNA, 19 nt, Homo sapiens
  misc_RNA (1)...(19): siRNA sense strand
gcacauguuugaggaugac

SEQ ID NO: 294246 - RNA, 19 nt, Homo sapiens
  misc_RNA (1)...(19): siRNA sense strand
ggaacucagcacauguuug

SEQ ID NO: 294247 - RNA, 19 nt, Homo sapiens
  misc_RNA (1)...(19): siRNA sense strand
aaaggaagagcugauguug

SEQ ID NO: 294248 - RNA, 19 nt, Homo sapiens
  misc_RNA (1)...(19): siRNA sense strand
ggagcuaggcagcgaaucu

SEQ ID NO: 294249 - RNA, 19 nt, Homo sapiens
  misc_RNA (1)...(19): siRNA sense strand
ucccauugccuacgaguuu

SEQ ID NO: 294250 - RNA, 19 nt, Homo sapiens
  misc_RNA (1)...(19): siRNA sense strand
ggagagcgaggaggaagga

SEQ ID NO: 294251 - RNA, 19 nt, Homo sapiens
  misc_RNA (1)...(19): siRNA sense strand
gcaauggaagaagaccuaa

SEQ ID NO: 294252 - RNA, 19 nt, Homo sapiens
  misc_RNA (1)...(19): siRNA sense strand
caccuacgacucaguuuau

SEQ ID NO: 294253 - RNA, 19 nt, Homo sapiens
  misc_RNA (1)...(19): siRNA sense strand
gguaaagaagaaaggcaaa

SEQ ID NO: 294254 - RNA, 19 nt, Homo sapiens
  misc_RNA (1)...(19): siRNA sense strand
ggaggaggacaauguagag

SEQ ID NO: 294255 - RNA, 19 nt, Homo sapiens
  misc_RNA (1)...(19): siRNA sense strand
ggccaggauuccaccacaa

SEQ ID NO: 294256 - RNA, 19 nt, Homo sapiens
  misc_RNA (1)...(19): siRNA sense strand
gcggaugaccacacgagaa

SEQ ID NO: 294257 - RNA, 19 nt, Homo sapiens
  misc_RNA (1)...(19): siRNA sense strand
agagaaggacccuccaguu

SEQ ID NO: 294258 - RNA, 19 nt, Homo sapiens
  misc_RNA (1)...(19): siRNA sense strand
cuacgaguuuaacccagaa

SEQ ID NO: 294259 - RNA, 19 nt, Homo sapiens
  misc_RNA (1)...(19): siRNA sense strand
ugacauggccagugcuaca

SEQ ID NO: 294260 - RNA, 19 nt, Homo sapiens
  misc_RNA (1)...(19): siRNA sense strand
gaaugaagcugcaguuucc

SEQ ID NO: 294261 - RNA, 19 nt, Homo sapiens
  misc_RNA (1)...(19): siRNA sense strand
caaccuaugugacagaugu

SEQ ID NO: 294262 - RNA, 19 nt, Homo sapiens
  misc_RNA (1)...(19): siRNA sense strand
ccaaggugcuccaguccua

SEQ ID NO: 294263 - RNA, 19 nt, Homo sapiens
  misc_RNA (1)...(19): siRNA sense strand
gcuacgcgcuucucuggaa

SEQ ID NO: 294264 - RNA, 19 nt, Homo sapiens
  misc_RNA (1)...(19): siRNA sense strand
ggucugugaugauggcuuu

SEQ ID NO: 294265 - RNA, 19 nt, Homo sapiens
  misc_RNA (1)...(19): siRNA sense strand
cuuaugagaucacguaugu

SEQ ID NO: 294266 - RNA, 19 nt, Homo sapiens
  misc_RNA (1)...(19): siRNA sense strand
ggaaugaagcugcaguuuc

SEQ ID NO: 294267 - RNA, 19 nt, Homo sapiens
  misc_RNA (1)...(19): siRNA sense strand
gcugugaggucugugauga

SEQ ID NO: 294268 - RNA, 19 nt, Homo sapiens
  misc_RNA (1)...(19): siRNA sense strand
gaccagcgguucagcuaug

SEQ ID NO: 294269 - RNA, 19 nt, Homo sapiens
  misc_RNA (1)...(19): siRNA sense strand
gaaggcaaccuaugugaca

SEQ ID NO: 294270 - RNA, 19 nt, Homo sapiens
  misc_RNA (1)...(19): siRNA sense strand
gcaccgaacuccucaucuc

SEQ ID NO: 294271 - RNA, 19 nt, Homo sapiens
  misc_RNA (1)...(19): siRNA sense strand
gaacgcuguuugccagguu

SEQ ID NO: 294272 - RNA, 19 nt, Homo sapiens
  misc_RNA (1)...(19): siRNA sense strand
ggagaagacaguugcauca

SEQ ID NO: 294273 - RNA, 19 nt, Homo sapiens
  misc_RNA (1)...(19): siRNA sense strand
gggacgacaucuucaagga

SEQ ID NO: 294274 - RNA, 19 nt, Homo sapiens
  misc_RNA (1)...(19): siRNA sense strand
ggacucugcuggcugaucu

SEQ ID NO: 294275 - RNA, 19 nt, Homo sapiens
  misc_RNA (1)...(19): siRNA sense strand
gaacuccucaucucucuag

SEQ ID NO: 294276 - RNA, 19 nt, Homo sapiens
  misc_RNA (1)...(19): siRNA sense strand
ccagucagccgaccaaaug

SEQ ID NO: 294277 - RNA, 19 nt, Homo sapiens
  misc_RNA (1)...(19): siRNA sense strand
gaagaagggcagagaagca

SEQ ID NO: 294278 - RNA, 19 nt, Homo sapiens
  misc_RNA (1)...(19): siRNA sense strand
gcagcaaguuggcgcagau

SEQ ID NO: 294279 - RNA, 19 nt, Homo sapiens
  misc_RNA (1)...(19): siRNA sense strand
gaauguggaaggcaaccua

SEQ ID NO: 294280 - RNA, 19 nt, Homo sapiens
  misc_RNA (1)...(19): siRNA sense strand
caaggacagugccaagcuu

SEQ ID NO: 294281 - RNA, 19 nt, Homo sapiens
  misc_RNA (1)...(19): siRNA sense strand
agaagacaguugcaucaug

SEQ ID NO: 294282 - RNA, 19 nt, Homo sapiens
  misc_RNA (1)...(19): siRNA sense strand
gcaugcagcugccauucuc

SEQ ID NO: 294283 - RNA, 19 nt, Homo sapiens
  misc_RNA (1)...(19): siRNA sense strand
gcuacgcccuggugaagga

SEQ ID NO: 294284 - RNA, 19 nt, Homo sapiens
  misc_RNA (1)...(19): siRNA sense strand
caucacauccucagcgauu

SEQ ID NO: 294285 - RNA, 19 nt, Homo sapiens
  misc_RNA (1)...(19): siRNA sense strand
gaaggcagacuccgucagu

SEQ ID NO: 294286 - RNA, 19 nt, Homo sapiens
  misc_RNA (1)...(19): siRNA sense strand
gcagacacgagaaagaaga

SEQ ID NO: 294287 - RNA, 19 nt, Homo sapiens
  misc_RNA (1)...(19): siRNA sense strand
caugggagcccuaccaguu

SEQ ID NO: 294288 - RNA, 19 nt, Homo sapiens
  misc_RNA (1)...(19): siRNA sense strand
gacccaggcuuccucaucu

SEQ ID NO: 294289 - RNA, 19 nt, Homo sapiens
  misc_RNA (1)...(19): siRNA sense strand
gcccagcgccuacaacuuc

SEQ ID NO: 294290 - RNA, 19 nt, Homo sapiens
  misc_RNA (1)...(19): siRNA sense strand
gagaccagcgguucagcua

SEQ ID NO: 294291 - RNA, 19 nt, Homo sapiens
  misc_RNA (1)...(19): siRNA sense strand
gcagagaagcagagguguu

SEQ ID NO: 294292 - RNA, 19 nt, Homo sapiens
  misc_RNA (1)...(19): siRNA sense strand
cggagaggaugcugggaaa

SEQ ID NO: 294293 - RNA, 19 nt, Homo sapiens
  misc_RNA (1)...(19): siRNA sense strand
uggcugaucuggaaggaau

SEQ ID NO: 294294 - RNA, 19 nt, Homo sapiens
  misc_RNA (1)...(19): siRNA sense strand
ggcagcacauggccacuga

SEQ ID NO: 294295 - RNA, 19 nt, Homo sapiens
  misc_RNA (1)...(19): siRNA sense strand
gcuccugccugccucaugu

SEQ ID NO: 294296 - RNA, 19 nt, Homo sapiens
  misc_RNA (1)...(19): siRNA sense strand
cgaaggcccuggagaagac

SEQ ID NO: 294297 - RNA, 19 nt, Homo sapiens
  misc_RNA (1)...(19): siRNA sense strand
aaacagaaccccucacaaa

SEQ ID NO: 294298 - RNA, 19 nt, Homo sapiens
  misc_RNA (1)...(19): siRNA sense strand
gcuccaguccuacuauuau

SEQ ID NO: 294299 - RNA, 19 nt, Homo sapiens
  misc_RNA (1)...(19): siRNA sense strand
ccaaggaccaggcggcauu

SEQ ID NO: 294300 - RNA, 19 nt, Homo sapiens
  misc_RNA (1)...(19): siRNA sense strand
ggguggagauuuguucaug

SEQ ID NO: 294301 - RNA, 19 nt, Homo sapiens
  misc_RNA (1)...(19): siRNA sense strand
ccacugccgugaccacaca

SEQ ID NO: 294302 - RNA, 19 nt, Homo sapiens
  misc_RNA (1)...(19): siRNA sense strand
cgagaaagaagaccaagca

SEQ ID NO: 294303 - RNA, 19 nt, Homo sapiens
  misc_RNA (1)...(19): siRNA sense strand
ccugagagcuuugccaucu

SEQ ID NO: 294304 - RNA, 19 nt, Homo sapiens
  misc_RNA (1)...(19): siRNA sense strand
caagaagaagggcagagaa

SEQ ID NO: 294305 - RNA, 19 nt, Homo sapiens
  misc_RNA (1)...(19): siRNA sense strand
cagagaagcagagguguug

SEQ ID NO: 294306 - RNA, 19 nt, Homo sapiens
  misc_RNA (1)...(19): siRNA sense strand
agggaaggcuuaugagauc

SEQ ID NO: 294307 - RNA, 19 nt, Homo sapiens
  misc_RNA (1)...(19): siRNA sense strand
gcacacacugccagcaaug

SEQ ID NO: 294308 - RNA, 19 nt, Homo sapiens
  misc_RNA (1)...(19): siRNA sense strand
gcaaguuggcgcagauaca

SEQ ID NO: 294309 - RNA, 19 nt, Homo sapiens
  misc_RNA (1)...(19): siRNA sense strand
uagaccggcucaacacguu

SEQ ID NO: 294310 - RNA, 19 nt, Homo sapiens
  misc_RNA (1)...(19): siRNA sense strand
ccuccuaccucaccgacuu

SEQ ID NO: 294311 - RNA, 19 nt, Homo sapiens
  misc_RNA (1)...(19): siRNA sense strand
gguggagauuuguucaugu

SEQ ID NO: 294312 - RNA, 19 nt, Homo sapiens
  misc_RNA (1)...(19): siRNA sense strand
ccacaauggagcccaaaug

SEQ ID NO: 294313 - RNA, 19 nt, Homo sapiens
  misc_RNA (1)...(19): siRNA sense strand
gaggaaugcacguuugauc

SEQ ID NO: 294314 - RNA, 19 nt, Homo sapiens
  misc_RNA (1)...(19): siRNA sense strand
gaccagugccaucccaaga

SEQ ID NO: 294315 - RNA, 19 nt, Homo sapiens
  misc_RNA (1)...(19): siRNA sense strand
guggagauuuguucauguc

SEQ ID NO: 294316 - RNA, 19 nt, Homo sapiens
  misc_RNA (1)...(19): siRNA sense strand
gggaaucgcguaucucacu

SEQ ID NO: 294317 - RNA, 19 nt, Homo sapiens
  misc_RNA (1)...(19): siRNA sense strand
cugcuacccuggcuucuuc

SEQ ID NO: 294318 - RNA, 19 nt, Homo sapiens
  misc_RNA (1)...(19): siRNA sense strand
gugcuccaguccuacuauu

SEQ ID NO: 294319 - RNA, 19 nt, Homo sapiens
  misc_RNA (1)...(19): siRNA sense strand
gaaccuggaggccauucug

SEQ ID NO: 294320 - RNA, 19 nt, Homo sapiens
  misc_RNA (1)...(19): siRNA sense strand
ccaagaagaagggcagaga

SEQ ID NO: 294321 - RNA, 19 nt, Homo sapiens
  misc_RNA (1)...(19): siRNA sense strand
ucugcuggcugaucuggaa

SEQ ID NO: 294322 - RNA, 19 nt, Homo sapiens
  misc_RNA (1)...(19): siRNA sense strand
gcgaaggcccuggagaaga

SEQ ID NO: 294323 - RNA, 19 nt, Homo sapiens
  misc_RNA (1)...(19): siRNA sense strand
gagcuuugccaucuacaag

SEQ ID NO: 294324 - RNA, 19 nt, Homo sapiens
  misc_RNA (1)...(19): siRNA sense strand
ugagagcuuugccaucuac

SEQ ID NO: 294325 - RNA, 19 nt, Homo sapiens
  misc_RNA (1)...(19): siRNA sense strand
cugaagaccugggccugaa

SEQ ID NO: 294326 - RNA, 19 nt, Homo sapiens
  misc_RNA (1)...(19): siRNA sense strand
cagagguguuggccaagga

SEQ ID NO: 294327 - RNA, 19 nt, Homo sapiens
  misc_RNA (1)...(19): siRNA sense strand
gugcugggcugagcgagau

SEQ ID NO: 294328 - RNA, 19 nt, Homo sapiens
  misc_RNA (1)...(19): siRNA sense strand
ucacagcaccagggaaguu

SEQ ID NO: 294329 - RNA, 19 nt, Homo sapiens
  misc_RNA (1)...(19): siRNA sense strand
ccucgagggugcugucaag

SEQ ID NO: 294330 - RNA, 19 nt, Homo sapiens
  misc_RNA (1)...(19): siRNA sense strand
ugugaggucugugaugaug

SEQ ID NO: 294331 - RNA, 19 nt, Homo sapiens
  misc_RNA (1)...(19): siRNA sense strand
acacgggccaguucuguga

SEQ ID NO: 294332 - RNA, 19 nt, Homo sapiens
  misc_RNA (1)...(19): siRNA sense strand
ccacgggugaccacuguga

SEQ ID NO: 294333 - RNA, 19 nt, Homo sapiens
  misc_RNA (1)...(19): siRNA sense strand
ccaagcaggcggagaggau

SEQ ID NO: 294334 - RNA, 19 nt, Homo sapiens
  misc_RNA (1)...(19): siRNA sense strand
gggaaggcuuaugagauca

SEQ ID NO: 294335 - RNA, 19 nt, Homo sapiens
  misc_RNA (1)...(19): siRNA sense strand
gccaggagccacagagaca

SEQ ID NO: 294336 - RNA, 19 nt, Homo sapiens
  misc_RNA (1)...(19): siRNA sense strand
ggugccagcuggguuucuu

SEQ ID NO: 294337 - RNA, 19 nt, Homo sapiens
  misc_RNA (1)...(19): siRNA sense strand
ggaagaggagauucugcau

SEQ ID NO: 294338 - RNA, 19 nt, Homo sapiens
  misc_RNA (1)...(19): siRNA sense strand
ugaaggccagacugacuuu

SEQ ID NO: 294339 - RNA, 19 nt, Homo sapiens
  misc_RNA (1)...(19): siRNA sense strand
gauccagggcuucgagagu

SEQ ID NO: 294340 - RNA, 19 nt, Homo sapiens
  misc_RNA (1)...(19): siRNA sense strand
gagcagcagauccgggaau

SEQ ID NO: 294341 - RNA, 19 nt, Homo sapiens
  misc_RNA (1)...(19): siRNA sense strand
acgagugucugcccugcaa

SEQ ID NO: 294342 - RNA, 19 nt, Homo sapiens
  misc_RNA (1)...(19): siRNA sense strand
uagggaaggcuuaugagau

SEQ ID NO: 294343 - RNA, 19 nt, Homo sapiens
  misc_RNA (1)...(19): siRNA sense strand
ccagugccaucccaagacu

SEQ ID NO: 294344 - RNA, 19 nt, Homo sapiens
  misc_RNA (1)...(19): siRNA sense strand
gagaagacaguugcaucau

SEQ ID NO: 294345 - RNA, 19 nt, Homo sapiens
  misc_RNA (1)...(19): siRNA sense strand
gcuccaaggguccgacugu

SEQ ID NO: 294346 - RNA, 19 nt, Homo sapiens
  misc_RNA (1)...(19): siRNA sense strand
acagagacaccgccaccaa

SEQ ID NO: 294347 - RNA, 19 nt, Homo sapiens
  misc_RNA (1)...(19): siRNA sense strand
gagacaccgccaccaagau

SEQ ID NO: 294348 - RNA, 19 nt, Homo sapiens
  misc_RNA (1)...(19): siRNA sense strand
agagacaccgccaccaaga

SEQ ID NO: 294349 - RNA, 19 nt, Homo sapiens
  misc_RNA (1)...(19): siRNA sense strand
cugcaaagagaauguggaa

SEQ ID NO: 294350 - RNA, 19 nt, Homo sapiens
  misc_RNA (1)...(19): siRNA sense strand
cugagagcuuugccaucua

SEQ ID NO: 294351 - RNA, 19 nt, Homo sapiens
  misc_RNA (1)...(19): siRNA sense strand
aggcuuaugagaucacgua

SEQ ID NO: 294352 - RNA, 19 nt, Homo sapiens
  misc_RNA (1)...(19): siRNA sense strand
cuagggaaggcuuaugaga

SEQ ID NO: 294353 - RNA, 19 nt, Homo sapiens
  misc_RNA (1)...(19): siRNA sense strand
aagcugaaggccagacuga

SEQ ID NO: 294354 - RNA, 19 nt, Homo sapiens
  misc_RNA (1)...(19): siRNA sense strand
gcuauggccacuccaaggu

SEQ ID NO: 294355 - RNA, 19 nt, Homo sapiens
  misc_RNA (1)...(19): siRNA sense strand
ccgaacuccucaucucucu

SEQ ID NO: 294356 - RNA, 19 nt, Homo sapiens
  misc_RNA (1)...(19): siRNA sense strand
cuucgagggcuacaaaugu

SEQ ID NO: 294357 - RNA, 19 nt, Homo sapiens
  misc_RNA (1)...(19): siRNA sense strand
gcuucgagggcuacaaaug

SEQ ID NO: 294358 - RNA, 19 nt, Homo sapiens
  misc_RNA (1)...(19): siRNA sense strand
cacaauggagcccaaaugg

SEQ ID NO: 294359 - RNA, 19 nt, Homo sapiens
  misc_RNA (1)...(19): siRNA sense strand
gaaagacgccaauguaguu

SEQ ID NO: 294360 - RNA, 19 nt, Homo sapiens
  misc_RNA (1)...(19): siRNA sense strand
ggaaggaguuucgcagcua

SEQ ID NO: 294361 - RNA, 19 nt, Homo sapiens
  misc_RNA (1)...(19): siRNA sense strand
cgcaagaaccguuguaaua

SEQ ID NO: 294362 - RNA, 19 nt, Homo sapiens
  misc_RNA (1)...(19): siRNA sense strand
gaugagcgguaucuuugaa

SEQ ID NO: 294363 - RNA, 19 nt, Homo sapiens
  misc_RNA (1)...(19): siRNA sense strand
gagcauugguauucagaug

SEQ ID NO: 294364 - RNA, 19 nt, Homo sapiens
  misc_RNA (1)...(19): siRNA sense strand
gcaagaaccguuguaauag

SEQ ID NO: 294365 - RNA, 19 nt, Homo sapiens
  misc_RNA (1)...(19): siRNA sense strand
cgggauggcuggaggauga

SEQ ID NO: 294366 - RNA, 19 nt, Homo sapiens
  misc_RNA (1)...(19): siRNA sense strand
gaagauaagcuccacaaac

SEQ ID NO: 294367 - RNA, 19 nt, Homo sapiens
  misc_RNA (1)...(19): siRNA sense strand
aaauccaugucuucaguua

SEQ ID NO: 294368 - RNA, 19 nt, Homo sapiens
  misc_RNA (1)...(19): siRNA sense strand
ugucugagcugccgcaaga

SEQ ID NO: 294369 - RNA, 19 nt, Homo sapiens
  misc_RNA (1)...(19): siRNA sense strand
agagaaagacgccaaugua

SEQ ID NO: 294370 - RNA, 19 nt, Homo sapiens
  misc_RNA (1)...(19): siRNA sense strand
ucacagaggugguaaaaug

SEQ ID NO: 294371 - RNA, 19 nt, Homo sapiens
  misc_RNA (1)...(19): siRNA sense strand
acacggaugcggucaauaa

SEQ ID NO: 294372 - RNA, 19 nt, Homo sapiens
  misc_RNA (1)...(19): siRNA sense strand
ggacgggagcugaauauca

SEQ ID NO: 294373 - RNA, 19 nt, Homo sapiens
  misc_RNA (1)...(19): siRNA sense strand
gaacaugggagaaauugag

SEQ ID NO: 294374 - RNA, 19 nt, Homo sapiens
  misc_RNA (1)...(19): siRNA sense strand
gaacaagaggaacagcaaa

SEQ ID NO: 294375 - RNA, 19 nt, Homo sapiens
  misc_RNA (1)...(19): siRNA sense strand
uuagaagacugcaguuuca

SEQ ID NO: 294376 - RNA, 19 nt, Homo sapiens
  misc_RNA (1)...(19): siRNA sense strand
ggacuugggagaccucuug

SEQ ID NO: 294377 - RNA, 19 nt, Homo sapiens
  misc_RNA (1)...(19): siRNA sense strand
gaaaauccaugucuucagu

SEQ ID NO: 294378 - RNA, 19 nt, Homo sapiens
  misc_RNA (1)...(19): siRNA sense strand
gaaccguuguaauagcauu

SEQ ID NO: 294379 - RNA, 19 nt, Homo sapiens
  misc_RNA (1)...(19): siRNA sense strand
guacagaagacccugagaa

SEQ ID NO: 294380 - RNA, 19 nt, Homo sapiens
  misc_RNA (1)...(19): siRNA sense strand
ccaaggacccagagcauga

SEQ ID NO: 294381 - RNA, 19 nt, Homo sapiens
  misc_RNA (1)...(19): siRNA sense strand
gcuguggacucaacgaugu

SEQ ID NO: 294382 - RNA, 19 nt, Homo sapiens
  misc_RNA (1)...(19): siRNA sense strand
gagaaagacgccaauguag

SEQ ID NO: 294383 - RNA, 19 nt, Homo sapiens
  misc_RNA (1)...(19): siRNA sense strand
ugacuccaaucgcuucaaa

SEQ ID NO: 294384 - RNA, 19 nt, Homo sapiens
  misc_RNA (1)...(19): siRNA sense strand
ccaauguaguugugguuga

SEQ ID NO: 294385 - RNA, 19 nt, Homo sapiens
  misc_RNA (1)...(19): siRNA sense strand
gguacaaccuguggaagga

SEQ ID NO: 294386 - RNA, 19 nt, Homo sapiens
  misc_RNA (1)...(19): siRNA sense strand
gcaggcaacuucgugaaag

SEQ ID NO: 294387 - RNA, 19 nt, Homo sapiens
  misc_RNA (1)...(19): siRNA sense strand
ggcaugccuuucagaguuu

SEQ ID NO: 294388 - RNA, 19 nt, Homo sapiens
  misc_RNA (1)...(19): siRNA sense strand
ggaacaagaggaacagcaa

SEQ ID NO: 294389 - RNA, 19 nt, Homo sapiens
  misc_RNA (1)...(19): siRNA sense strand
agggacggcuggaagauaa

SEQ ID NO: 294390 - RNA, 19 nt, Homo sapiens
  misc_RNA (1)...(19): siRNA sense strand
caagaacaugggagaaauu

SEQ ID NO: 294391 - RNA, 19 nt, Homo sapiens
  misc_RNA (1)...(19): siRNA sense strand
gagagaaagacgccaaugu

SEQ ID NO: 294392 - RNA, 19 nt, Homo sapiens
  misc_RNA (1)...(19): siRNA sense strand
agacugcaguuucaacaug

SEQ ID NO: 294393 - RNA, 19 nt, Homo sapiens
  misc_RNA (1)...(19): siRNA sense strand
gacgaugagcgguaucuuu

SEQ ID NO: 294394 - RNA, 19 nt, Homo sapiens
  misc_RNA (1)...(19): siRNA sense strand
gaaacccagcggaaacuga

SEQ ID NO: 294395 - RNA, 19 nt, Homo sapiens
  misc_RNA (1)...(19): siRNA sense strand
gaagacugcaguuucaaca

SEQ ID NO: 294396 - RNA, 19 nt, Homo sapiens
  misc_RNA (1)...(19): siRNA sense strand
gacugcaguuucaacauga

SEQ ID NO: 294397 - RNA, 19 nt, Homo sapiens
  misc_RNA (1)...(19): siRNA sense strand
ccaaagcuacacagacuga

SEQ ID NO: 294398 - RNA, 19 nt, Homo sapiens
  misc_RNA (1)...(19): siRNA sense strand
aaauugagcccaccuuuua

SEQ ID NO: 294399 - RNA, 19 nt, Homo sapiens
  misc_RNA (1)...(19): siRNA sense strand
caagaaccguuguaauagc

SEQ ID NO: 294400 - RNA, 19 nt, Homo sapiens
  misc_RNA (1)...(19): siRNA sense strand
cggaugcggucaauaauac

SEQ ID NO: 294401 - RNA, 19 nt, Homo sapiens
  misc_RNA (1)...(19): siRNA sense strand
gaggucaaaccaucuguga

SEQ ID NO: 294402 - RNA, 19 nt, Homo sapiens
  misc_RNA (1)...(19): siRNA sense strand
ggaagauaagcuccacaaa

SEQ ID NO: 294403 - RNA, 19 nt, Homo sapiens
  misc_RNA (1)...(19): siRNA sense strand
gauggacgaugagcgguau

SEQ ID NO: 294404 - RNA, 19 nt, Homo sapiens
  misc_RNA (1)...(19): siRNA sense strand
ccacaaacccaaagcuaca

SEQ ID NO: 294405 - RNA, 19 nt, Homo sapiens
  misc_RNA (1)...(19): siRNA sense strand
acaagaacaugggagaaau

SEQ ID NO: 294406 - RNA, 19 nt, Homo sapiens
  misc_RNA (1)...(19): siRNA sense strand
gggaucaauugcauaugga

SEQ ID NO: 294407 - RNA, 19 nt, Homo sapiens
  misc_RNA (1)...(19): siRNA sense strand
gagggacggcuggaagaua

SEQ ID NO: 294408 - RNA, 19 nt, Homo sapiens
  misc_RNA (1)...(19): siRNA sense strand
gcaugccuuucagaguuua

SEQ ID NO: 294409 - RNA, 19 nt, Homo sapiens
  misc_RNA (1)...(19): siRNA sense strand
aagauaagcuccacaaacc

SEQ ID NO: 294410 - RNA, 19 nt, Homo sapiens
  misc_RNA (1)...(19): siRNA sense strand
caugacagcuaaaaccuuu

SEQ ID NO: 294411 - RNA, 19 nt, Homo sapiens
  misc_RNA (1)...(19): siRNA sense strand
gagcggaucgagcagaaug

SEQ ID NO: 294412 - RNA, 19 nt, Homo sapiens
  misc_RNA (1)...(19): siRNA sense strand
gaaauugagcccaccuuuu

SEQ ID NO: 294413 - RNA, 19 nt, Homo sapiens
  misc_RNA (1)...(19): siRNA sense strand
gagccucugcuauugcuuu

SEQ ID NO: 294414 - RNA, 19 nt, Homo sapiens
  misc_RNA (1)...(19): siRNA sense strand
ggacccagagcaugaagga

SEQ ID NO: 294415 - RNA, 19 nt, Homo sapiens
  misc_RNA (1)...(19): siRNA sense strand
gcucugguuucgcaagugu

SEQ ID NO: 294416 - RNA, 19 nt, Homo sapiens
  misc_RNA (1)...(19): siRNA sense strand
guuucaacaugacagcuaa

SEQ ID NO: 294417 - RNA, 19 nt, Homo sapiens
  misc_RNA (1)...(19): siRNA sense strand
ccacagccagcccuuagaa

SEQ ID NO: 294418 - RNA, 19 nt, Homo sapiens
  misc_RNA (1)...(19): siRNA sense strand
ucgacuggcugcaggagaa

SEQ ID NO: 294419 - RNA, 19 nt, Homo sapiens
  misc_RNA (1)...(19): siRNA sense strand
ucucgggaauguccacuug

SEQ ID NO: 294420 - RNA, 19 nt, Homo sapiens
  misc_RNA (1)...(19): siRNA sense strand
gagcucugguuucgcaagu

SEQ ID NO: 294421 - RNA, 19 nt, Homo sapiens
  misc_RNA (1)...(19): siRNA sense strand
gaguuuaccauuaucagau

SEQ ID NO: 294422 - RNA, 19 nt, Homo sapiens
  misc_RNA (1)...(19): siRNA sense strand
ugucagcccugcacacaag

SEQ ID NO: 294423 - RNA, 19 nt, Homo sapiens
  misc_RNA (1)...(19): siRNA sense strand
ccugagaacaccagcauau

SEQ ID NO: 294424 - RNA, 19 nt, Homo sapiens
  misc_RNA (1)...(19): siRNA sense strand
ucaauugcauauggaacaa

SEQ ID NO: 294425 - RNA, 19 nt, Homo sapiens
  misc_RNA (1)...(19): siRNA sense strand
gggccgacauccacaagag

SEQ ID NO: 294426 - RNA, 19 nt, Homo sapiens
  misc_RNA (1)...(19): siRNA sense strand
cuuucagaguuuaccauua

SEQ ID NO: 294427 - RNA, 19 nt, Homo sapiens
  misc_RNA (1)...(19): siRNA sense strand
gagcagaaugccaccaaca

SEQ ID NO: 294428 - RNA, 19 nt, Homo sapiens
  misc_RNA (1)...(19): siRNA sense strand
uaaugcagauucccagacu

SEQ ID NO: 294429 - RNA, 19 nt, Homo sapiens
  misc_RNA (1)...(19): siRNA sense strand
ugggaucaauugcauaugg

SEQ ID NO: 294430 - RNA, 19 nt, Homo sapiens
  misc_RNA (1)...(19): siRNA sense strand
gggccucucagucuuggua

SEQ ID NO: 294431 - RNA, 19 nt, Homo sapiens
  misc_RNA (1)...(19): siRNA sense strand
ccaacaccuuccuggucua

SEQ ID NO: 294432 - RNA, 19 nt, Homo sapiens
  misc_RNA (1)...(19): siRNA sense strand
agaaauugagcccaccuuu

SEQ ID NO: 294433 - RNA, 19 nt, Homo sapiens
  misc_RNA (1)...(19): siRNA sense strand
ccguuccucugcucuguuu

SEQ ID NO: 294434 - RNA, 19 nt, Homo sapiens
  misc_RNA (1)...(19): siRNA sense strand
ucuggagccucugcuauug

SEQ ID NO: 294435 - RNA, 19 nt, Homo sapiens
  misc_RNA (1)...(19): siRNA sense strand
ggaacggugggccgaauca

SEQ ID NO: 294436 - RNA, 19 nt, Homo sapiens
  misc_RNA (1)...(19): siRNA sense strand
cuacacagacugaggucaa

SEQ ID NO: 294437 - RNA, 19 nt, Homo sapiens
  misc_RNA (1)...(19): siRNA sense strand
auucacggauggacgauga

SEQ ID NO: 294438 - RNA, 19 nt, Homo sapiens
  misc_RNA (1)...(19): siRNA sense strand
cagaagacccugagaacac

SEQ ID NO: 294439 - RNA, 19 nt, Homo sapiens
  misc_RNA (1)...(19): siRNA sense strand
uacaagaacaugggagaaa

SEQ ID NO: 294440 - RNA, 19 nt, Homo sapiens
  misc_RNA (1)...(19): siRNA sense strand
aagaaccguuguaauagca

SEQ ID NO: 294441 - RNA, 19 nt, Homo sapiens
  misc_RNA (1)...(19): siRNA sense strand
uugacucucuggugaauca

SEQ ID NO: 294442 - RNA, 19 nt, Homo sapiens
  misc_RNA (1)...(19): siRNA sense strand
acgaugagcgguaucuuug

SEQ ID NO: 294443 - RNA, 19 nt, Homo sapiens
  misc_RNA (1)...(19): siRNA sense strand
ccaagaaaaugaggaacaa

SEQ ID NO: 294444 - RNA, 19 nt, Homo sapiens
  misc_RNA (1)...(19): siRNA sense strand
gcgagccguccaccucuuu

SEQ ID NO: 294445 - RNA, 19 nt, Homo sapiens
  misc_RNA (1)...(19): siRNA sense strand
gacacagcauugccaggau

SEQ ID NO: 294446 - RNA, 19 nt, Homo sapiens
  misc_RNA (1)...(19): siRNA sense strand
agaaagacgccaauguagu

SEQ ID NO: 294447 - RNA, 19 nt, Homo sapiens
  misc_RNA (1)...(19): siRNA sense strand
uuacacggaugcggucaau

SEQ ID NO: 294448 - RNA, 19 nt, Homo sapiens
  misc_RNA (1)...(19): siRNA sense strand
agacgccaauguaguugug

SEQ ID NO: 294449 - RNA, 19 nt, Homo sapiens
  misc_RNA (1)...(19): siRNA sense strand
uacacagacugaggucaaa

SEQ ID NO: 294450 - RNA, 19 nt, Homo sapiens
  misc_RNA (1)...(19): siRNA sense strand
ugcaggagaaggacgauuu

SEQ ID NO: 294451 - RNA, 19 nt, Homo sapiens
  misc_RNA (1)...(19): siRNA sense strand
uggagcggaucgagcagaa

SEQ ID NO: 294452 - RNA, 19 nt, Homo sapiens
  misc_RNA (1)...(19): siRNA sense strand
ccaccucuuuguugacucu

SEQ ID NO: 294453 - RNA, 19 nt, Homo sapiens
  misc_RNA (1)...(19): siRNA sense strand
acggaugcggucaauaaua

SEQ ID NO: 294454 - RNA, 19 nt, Homo sapiens
  misc_RNA (1)...(19): siRNA sense strand
acagccagcccuuagaaga

SEQ ID NO: 294455 - RNA, 19 nt, Homo sapiens
  misc_RNA (1)...(19): siRNA sense strand
acccaaagcuacacagacu

SEQ ID NO: 294456 - RNA, 19 nt, Homo sapiens
  misc_RNA (1)...(19): siRNA sense strand
cauauggaacaaucacaga

SEQ ID NO: 294457 - RNA, 19 nt, Homo sapiens
  misc_RNA (1)...(19): siRNA sense strand
ggaucaauugcauauggaa

SEQ ID NO: 294458 - RNA, 19 nt, Homo sapiens
  misc_RNA (1)...(19): siRNA sense strand
aaacugacauuuuguacag

SEQ ID NO: 294459 - RNA, 19 nt, Homo sapiens
  misc_RNA (1)...(19): siRNA sense strand
caaaucaucuggaaucaaa

SEQ ID NO: 294460 - RNA, 19 nt, Homo sapiens
  misc_RNA (1)...(19): siRNA sense strand
gaauauaccuggaacacaa

SEQ ID NO: 294461 - RNA, 19 nt, Homo sapiens
  misc_RNA (1)...(19): siRNA sense strand
gaaagaaguuaucagagaa

SEQ ID NO: 294462 - RNA, 19 nt, Homo sapiens
  misc_RNA (1)...(19): siRNA sense strand
gaaguuaagucucugaaga

SEQ ID NO: 294463 - RNA, 19 nt, Homo sapiens
  misc_RNA (1)...(19): siRNA sense strand
caggaaaucuuggaaguua

SEQ ID NO: 294464 - RNA, 19 nt, Homo sapiens
  misc_RNA (1)...(19): siRNA sense strand
ugaaagaaguuaucagaga

SEQ ID NO: 294465 - RNA, 19 nt, Homo sapiens
  misc_RNA (1)...(19): siRNA sense strand
uaucauggcugaacucuau

SEQ ID NO: 294466 - RNA, 19 nt, Homo sapiens
  misc_RNA (1)...(19): siRNA sense strand
gggcagaacuugcuuucaa

SEQ ID NO: 294467 - RNA, 19 nt, Homo sapiens
  misc_RNA (1)...(19): siRNA sense strand
caagugaggucgaugaaau

SEQ ID NO: 294468 - RNA, 19 nt, Homo sapiens
  misc_RNA (1)...(19): siRNA sense strand
ggagauagcugggaagagu

SEQ ID NO: 294469 - RNA, 19 nt, Homo sapiens
  misc_RNA (1)...(19): siRNA sense strand
gggaagaguuggaggacua

SEQ ID NO: 294470 - RNA, 19 nt, Homo sapiens
  misc_RNA (1)...(19): siRNA sense strand
ggacguacuuauaauccua

SEQ ID NO: 294471 - RNA, 19 nt, Homo sapiens
  misc_RNA (1)...(19): siRNA sense strand
gaucuucaguuuauaguuc

SEQ ID NO: 294472 - RNA, 19 nt, Homo sapiens
  misc_RNA (1)...(19): siRNA sense strand
gcugaacucuauauguuaa

SEQ ID NO: 294473 - RNA, 19 nt, Homo sapiens
  misc_RNA (1)...(19): siRNA sense strand
ugaggucgaugaaaucuuu

SEQ ID NO: 294474 - RNA, 19 nt, Homo sapiens
  misc_RNA (1)...(19): siRNA sense strand
ugaccgaaauguugaauug

SEQ ID NO: 294475 - RNA, 19 nt, Homo sapiens
  misc_RNA (1)...(19): siRNA sense strand
ucaaguuggucagguauua

SEQ ID NO: 294476 - RNA, 19 nt, Homo sapiens
  misc_RNA (1)...(19): siRNA sense strand
gaaucagucaucagaaaua

SEQ ID NO: 294477 - RNA, 19 nt, Homo sapiens
  misc_RNA (1)...(19): siRNA sense strand
ccagaaaacuugcuuugua

SEQ ID NO: 294478 - RNA, 19 nt, Homo sapiens
  misc_RNA (1)...(19): siRNA sense strand
gagcuuaccugcuguuacu

SEQ ID NO: 294479 - RNA, 19 nt, Homo sapiens
  misc_RNA (1)...(19): siRNA sense strand
gcucaugaccgaaauguug

SEQ ID NO: 294480 - RNA, 19 nt, Homo sapiens
  misc_RNA (1)...(19): siRNA sense strand
caacugcuccaaccucuaa

SEQ ID NO: 294481 - RNA, 19 nt, Homo sapiens
  misc_RNA (1)...(19): siRNA sense strand
uggcugaacucuauauguu

SEQ ID NO: 294482 - RNA, 19 nt, Homo sapiens
  misc_RNA (1)...(19): siRNA sense strand
gcaacggcuucagaauaua

SEQ ID NO: 294483 - RNA, 19 nt, Homo sapiens
  misc_RNA (1)...(19): siRNA sense strand
cagcuggcauccucuauga

SEQ ID NO: 294484 - RNA, 19 nt, Homo sapiens
  misc_RNA (1)...(19): siRNA sense strand
gaaacuuaaucaugccaau

SEQ ID NO: 294485 - RNA, 19 nt, Homo sapiens
  misc_RNA (1)...(19): siRNA sense strand
cagacuggguggccaagua

SEQ ID NO: 294486 - RNA, 19 nt, Homo sapiens
  misc_RNA (1)...(19): siRNA sense strand
ggacaagugaggucgauga

SEQ ID NO: 294487 - RNA, 19 nt, Homo sapiens
  misc_RNA (1)...(19): siRNA sense strand
guuuauaguucucccauug

SEQ ID NO: 294488 - RNA, 19 nt, Homo sapiens
  misc_RNA (1)...(19): siRNA sense strand
auaagcagcugcaaccauu

SEQ ID NO: 294489 - RNA, 19 nt, Homo sapiens
  misc_RNA (1)...(19): siRNA sense strand
gaaagacagaaacaaguug

SEQ ID NO: 294490 - RNA, 19 nt, Homo sapiens
  misc_RNA (1)...(19): siRNA sense strand
ccacuuagcaccucucaau

SEQ ID NO: 294491 - RNA, 19 nt, Homo sapiens
  misc_RNA (1)...(19): siRNA sense strand
ggcagaacuugcuuucaaa

SEQ ID NO: 294492 - RNA, 19 nt, Homo sapiens
  misc_RNA (1)...(19): siRNA sense strand
gcuccaaccucuaaacagu

SEQ ID NO: 294493 - RNA, 19 nt, Homo sapiens
  misc_RNA (1)...(19): siRNA sense strand
gcaacagagucaggagaaa

SEQ ID NO: 294494 - RNA, 19 nt, Homo sapiens
  misc_RNA (1)...(19): siRNA sense strand
ucaaaaggaugaagagaaa

SEQ ID NO: 294495 - RNA, 19 nt, Homo sapiens
  misc_RNA (1)...(19): siRNA sense strand
gauagccaguggaaaggaa

SEQ ID NO: 294496 - RNA, 19 nt, Homo sapiens
  misc_RNA (1)...(19): siRNA sense strand
ugcaacggcuucagaauau

SEQ ID NO: 294497 - RNA, 19 nt, Homo sapiens
  misc_RNA (1)...(19): siRNA sense strand
uauaaucgaucagguuguu

SEQ ID NO: 294498 - RNA, 19 nt, Homo sapiens
  misc_RNA (1)...(19): siRNA sense strand
ccagcaaccuccaaagcaa

SEQ ID NO: 294499 - RNA, 19 nt, Homo sapiens
  misc_RNA (1)...(19): siRNA sense strand
cauugaaacacccauauuu

SEQ ID NO: 294500 - RNA, 19 nt, Homo sapiens
  misc_RNA (1)...(19): siRNA sense strand
ggauauaaucgaucagguu

SEQ ID NO: 294501 - RNA, 19 nt, Homo sapiens
  misc_RNA (1)...(19): siRNA sense strand
gaugaaugcaugaacuuga

SEQ ID NO: 294502 - RNA, 19 nt, Homo sapiens
  misc_RNA (1)...(19): siRNA sense strand
uacaaucagucaggauaua

SEQ ID NO: 294503 - RNA, 19 nt, Homo sapiens
  misc_RNA (1)...(19): siRNA sense strand
ggaaaucuuggaaguuaug

SEQ ID NO: 294504 - RNA, 19 nt, Homo sapiens
  misc_RNA (1)...(19): siRNA sense strand
ggacuugcaagagaauuaa

SEQ ID NO: 294505 - RNA, 19 nt, Homo sapiens
  misc_RNA (1)...(19): siRNA sense strand
gagaaaaugaccaucuuua

SEQ ID NO: 294506 - RNA, 19 nt, Homo sapiens
  misc_RNA (1)...(19): siRNA sense strand
guguguuccuauaaacuua

SEQ ID NO: 294507 - RNA, 19 nt, Homo sapiens
  misc_RNA (1)...(19): siRNA sense strand
cuaagccucugccggauau

SEQ ID NO: 294508 - RNA, 19 nt, Homo sapiens
  misc_RNA (1)...(19): siRNA sense strand
uuaagucucugaagaaacu

SEQ ID NO: 294509 - RNA, 19 nt, Homo sapiens
  misc_RNA (1)...(19): siRNA sense strand
gcauugaaacacccauauu

SEQ ID NO: 294510 - RNA, 19 nt, Homo sapiens
  misc_RNA (1)...(19): siRNA sense strand
guccagagcuugugaaaau

SEQ ID NO: 294511 - RNA, 19 nt, Homo sapiens
  misc_RNA (1)...(19): siRNA sense strand
ugaaagacagaaacaaguu

SEQ ID NO: 294512 - RNA, 19 nt, Homo sapiens
  misc_RNA (1)...(19): siRNA sense strand
gagcaaugcaggaaaucuu

SEQ ID NO: 294513 - RNA, 19 nt, Homo sapiens
  misc_RNA (1)...(19): siRNA sense strand
uaaggucacagccaccaua

SEQ ID NO: 294514 - RNA, 19 nt, Homo sapiens
  misc_RNA (1)...(19): siRNA sense strand
gaaguaucauggcugaacu

SEQ ID NO: 294515 - RNA, 19 nt, Homo sapiens
  misc_RNA (1)...(19): siRNA sense strand
gaaagaaaaccucuaucaa

SEQ ID NO: 294516 - RNA, 19 nt, Homo sapiens
  misc_RNA (1)...(19): siRNA sense strand
ggauauauuccuuccuuuc

SEQ ID NO: 294517 - RNA, 19 nt, Homo sapiens
  misc_RNA (1)...(19): siRNA sense strand
uaguugagguagagccuaa

SEQ ID NO: 294518 - RNA, 19 nt, Homo sapiens
  misc_RNA (1)...(19): siRNA sense strand
uuucaggacguacuuauaa

SEQ ID NO: 294519 - RNA, 19 nt, Homo sapiens
  misc_RNA (1)...(19): siRNA sense strand
caggagaaaccgccacaaa

SEQ ID NO: 294520 - RNA, 19 nt, Homo sapiens
  misc_RNA (1)...(19): siRNA sense strand
acacaaccaugagacaguu

SEQ ID NO: 294521 - RNA, 19 nt, Homo sapiens
  misc_RNA (1)...(19): siRNA sense strand
gcaggaaaucuuggaaguu

SEQ ID NO: 294522 - RNA, 19 nt, Homo sapiens
  misc_RNA (1)...(19): siRNA sense strand
ggagaaaccgccacaaacg

SEQ ID NO: 294523 - RNA, 19 nt, Homo sapiens
  misc_RNA (1)...(19): siRNA sense strand
caagagaauuaaggucaca

SEQ ID NO: 294524 - RNA, 19 nt, Homo sapiens
  misc_RNA (1)...(19): siRNA sense strand
cuuauaauccuacagcaaa

SEQ ID NO: 294525 - RNA, 19 nt, Homo sapiens
  misc_RNA (1)...(19): siRNA sense strand
gaaccugagcguccagcaa

SEQ ID NO: 294526 - RNA, 19 nt, Homo sapiens
  misc_RNA (1)...(19): siRNA sense strand
uauauuccuuccuuucuca

SEQ ID NO: 294527 - RNA, 19 nt, Homo sapiens
  misc_RNA (1)...(19): siRNA sense strand
gagccucccauuccaagaa

SEQ ID NO: 294528 - RNA, 19 nt, Homo sapiens
  misc_RNA (1)...(19): siRNA sense strand
cagaaaacuugcuuuguau

SEQ ID NO: 294529 - RNA, 19 nt, Homo sapiens
  misc_RNA (1)...(19): siRNA sense strand
gauauauuccuuccuuucu

SEQ ID NO: 294530 - RNA, 19 nt, Homo sapiens
  misc_RNA (1)...(19): siRNA sense strand
guuaugcuacuuacaauca

SEQ ID NO: 294531 - RNA, 19 nt, Homo sapiens
  misc_RNA (1)...(19): siRNA sense strand
cccaguguguuccuauaaa

SEQ ID NO: 294532 - RNA, 19 nt, Homo sapiens
  misc_RNA (1)...(19): siRNA sense strand
ggcugaacucuauauguua

SEQ ID NO: 294533 - RNA, 19 nt, Homo sapiens
  misc_RNA (1)...(19): siRNA sense strand
caaguuguucccugaauca

SEQ ID NO: 294534 - RNA, 19 nt, Homo sapiens
  misc_RNA (1)...(19): siRNA sense strand
gcugcaaccauuagaauca

SEQ ID NO: 294535 - RNA, 19 nt, Homo sapiens
  misc_RNA (1)...(19): siRNA sense strand
gugcuuaugggcaagagua

SEQ ID NO: 294536 - RNA, 19 nt, Homo sapiens
  misc_RNA (1)...(19): siRNA sense strand
ugcaugaacuugagagaag

SEQ ID NO: 294537 - RNA, 19 nt, Homo sapiens
  misc_RNA (1)...(19): siRNA sense strand
gaaguuaucagagaaaaug

SEQ ID NO: 294538 - RNA, 19 nt, Homo sapiens
  misc_RNA (1)...(19): siRNA sense strand
cugaagaaacuuaaucaug

SEQ ID NO: 294539 - RNA, 19 nt, Homo sapiens
  misc_RNA (1)...(19): siRNA sense strand
cgucaaaucaucuggaauc

SEQ ID NO: 294540 - RNA, 19 nt, Homo sapiens
  misc_RNA (1)...(19): siRNA sense strand
cagcaagccaggcauugaa

SEQ ID NO: 294541 - RNA, 19 nt, Homo sapiens
  misc_RNA (1)...(19): siRNA sense strand
caaauggcacacugaguca

SEQ ID NO: 294542 - RNA, 19 nt, Homo sapiens
  misc_RNA (1)...(19): siRNA sense strand
ccauucagccgccacagaa

SEQ ID NO: 294543 - RNA, 19 nt, Homo sapiens
  misc_RNA (1)...(19): siRNA sense strand
caucuuuaguugagguaga

SEQ ID NO: 294544 - RNA, 19 nt, Homo sapiens
  misc_RNA (1)...(19): siRNA sense strand
ggaaguaucauggcugaac

SEQ ID NO: 294545 - RNA, 19 nt, Homo sapiens
  misc_RNA (1)...(19): siRNA sense strand
caaucagucaggauauauu

SEQ ID NO: 294546 - RNA, 19 nt, Homo sapiens
  misc_RNA (1)...(19): siRNA sense strand
guucuauucuugggaugaa

SEQ ID NO: 294547 - RNA, 19 nt, Homo sapiens
  misc_RNA (1)...(19): siRNA sense strand
cagccaccauacacugauu

SEQ ID NO: 294548 - RNA, 19 nt, Homo sapiens
  misc_RNA (1)...(19): siRNA sense strand
augcaacggcuucagaaua

SEQ ID NO: 294549 - RNA, 19 nt, Homo sapiens
  misc_RNA (1)...(19): siRNA sense strand
aaggagcaaugcaggaaau

SEQ ID NO: 294550 - RNA, 19 nt, Homo sapiens
  misc_RNA (1)...(19): siRNA sense strand
ccaguggaaaggaaauaaa

SEQ ID NO: 294551 - RNA, 19 nt, Homo sapiens
  misc_RNA (1)...(19): siRNA sense strand
caaccucuaaacaguacua

SEQ ID NO: 294552 - RNA, 19 nt, Homo sapiens
  misc_RNA (1)...(19): siRNA sense strand
cuuaaucaugccaauguua

SEQ ID NO: 294553 - RNA, 19 nt, Homo sapiens
  misc_RNA (1)...(19): siRNA sense strand
gcagcugcaaccauuagaa

SEQ ID NO: 294554 - RNA, 19 nt, Homo sapiens
  misc_RNA (1)...(19): siRNA sense strand
gggcaagaguaaugaaucc

SEQ ID NO: 294555 - RNA, 19 nt, Homo sapiens
  misc_RNA (1)...(19): siRNA sense strand
cgacagcaagccaggcauu

SEQ ID NO: 294556 - RNA, 19 nt, Homo sapiens
  misc_RNA (1)...(19): siRNA sense strand
caaugcaacggcuucagaa

SEQ ID NO: 294557 - RNA, 19 nt, Homo sapiens
  misc_RNA (1)...(19): siRNA sense strand
ucaaugcaacggcuucaga

SEQ ID NO: 294558 - RNA, 19 nt, Homo sapiens
  misc_RNA (1)...(19): siRNA sense strand
uauuaggcccuucgucaaa

SEQ ID NO: 294559 - RNA, 19 nt, Homo sapiens
  misc_RNA (1)...(19): siRNA sense strand
gcagagacauugaaauauu

SEQ ID NO: 294560 - RNA, 19 nt, Homo sapiens
  misc_RNA (1)...(19): siRNA sense strand
ucaaagagaugaugaaaca

SEQ ID NO: 294561 - RNA, 19 nt, Homo sapiens
  misc_RNA (1)...(19): siRNA sense strand
agacagaucuggaagcuaa

SEQ ID NO: 294562 - RNA, 19 nt, Homo sapiens
  misc_RNA (1)...(19): siRNA sense strand
ggagacagcuucuaugagu

SEQ ID NO: 294563 - RNA, 19 nt, Homo sapiens
  misc_RNA (1)...(19): siRNA sense strand
gggauuaaaugaacucaaa

SEQ ID NO: 294564 - RNA, 19 nt, Homo sapiens
  misc_RNA (1)...(19): siRNA sense strand
gaacaguacugaacaaacu

SEQ ID NO: 294565 - RNA, 19 nt, Homo sapiens
  misc_RNA (1)...(19): siRNA sense strand
caaaggagcaacuauagua

SEQ ID NO: 294566 - RNA, 19 nt, Homo sapiens
  misc_RNA (1)...(19): siRNA sense strand
guaaauauacgcuuuguug

SEQ ID NO: 294567 - RNA, 19 nt, Homo sapiens
  misc_RNA (1)...(19): siRNA sense strand
gggcaaagaucaaagagau

SEQ ID NO: 294568 - RNA, 19 nt, Homo sapiens
  misc_RNA (1)...(19): siRNA sense strand
gggcauugcugaauaugaa

SEQ ID NO: 294569 - RNA, 19 nt, Homo sapiens
  misc_RNA (1)...(19): siRNA sense strand
ccacaaggccuuuauccua

SEQ ID NO: 294570 - RNA, 19 nt, Homo sapiens
  misc_RNA (1)...(19): siRNA sense strand
gaugaaacaugcuuggaau

SEQ ID NO: 294571 - RNA, 19 nt, Homo sapiens
  misc_RNA (1)...(19): siRNA sense strand
gaaacaugcuuggaauaau

SEQ ID NO: 294572 - RNA, 19 nt, Homo sapiens
  misc_RNA (1)...(19): siRNA sense strand
ucaagcaguuuguuuggua

SEQ ID NO: 294573 - RNA, 19 nt, Homo sapiens
  misc_RNA (1)...(19): siRNA sense strand
gcagcggacuaacuuauau

SEQ ID NO: 294574 - RNA, 19 nt, Homo sapiens
  misc_RNA (1)...(19): siRNA sense strand
cacaaggccuuuauccuaa

SEQ ID NO: 294575 - RNA, 19 nt, Homo sapiens
  misc_RNA (1)...(19): siRNA sense strand
accagaagcuuucagauuu

SEQ ID NO: 294576 - RNA, 19 nt, Homo sapiens
  misc_RNA (1)...(19): siRNA sense strand
aaaggaaguugaaaucaga

SEQ ID NO: 294577 - RNA, 19 nt, Homo sapiens
  misc_RNA (1)...(19): siRNA sense strand
gcaaagaucaaagagauga

SEQ ID NO: 294578 - RNA, 19 nt, Homo sapiens
  misc_RNA (1)...(19): siRNA sense strand
gaacucaaaccuauaucaa

SEQ ID NO: 294579 - RNA, 19 nt, Homo sapiens
  misc_RNA (1)...(19): siRNA sense strand
caucaaaggagcaacuaua

SEQ ID NO: 294580 - RNA, 19 nt, Homo sapiens
  misc_RNA (1)...(19): siRNA sense strand
gaccagaagcuuucagauu

SEQ ID NO: 294581 - RNA, 19 nt, Homo sapiens
  misc_RNA (1)...(19): siRNA sense strand
uggcagagacauugaaaua

SEQ ID NO: 294582 - RNA, 19 nt, Homo sapiens
  misc_RNA (1)...(19): siRNA sense strand
gcacuugagccacuuauca

SEQ ID NO: 294583 - RNA, 19 nt, Homo sapiens
  misc_RNA (1)...(19): siRNA sense strand
gaaauugcccguacuuguc

SEQ ID NO: 294584 - RNA, 19 nt, Homo sapiens
  misc_RNA (1)...(19): siRNA sense strand
gagacagcuucuaugagua

SEQ ID NO: 294585 - RNA, 19 nt, Homo sapiens
  misc_RNA (1)...(19): siRNA sense strand
ccagaagcuuucagauuug

SEQ ID NO: 294586 - RNA, 19 nt, Homo sapiens
  misc_RNA (1)...(19): siRNA sense strand
ccgaggagauccaaagaga

SEQ ID NO: 294587 - RNA, 19 nt, Homo sapiens
  misc_RNA (1)...(19): siRNA sense strand
uauggagacuuacauguau

SEQ ID NO: 294588 - RNA, 19 nt, Homo sapiens
  misc_RNA (1)...(19): siRNA sense strand
ugaaacaugcuuggaauaa

SEQ ID NO: 294589 - RNA, 19 nt, Homo sapiens
  misc_RNA (1)...(19): siRNA sense strand
gauccaaaguacaggaaau

SEQ ID NO: 294590 - RNA, 19 nt, Homo sapiens
  misc_RNA (1)...(19): siRNA sense strand
uggaauaccuugggcauug

SEQ ID NO: 294591 - RNA, 19 nt, Homo sapiens
  misc_RNA (1)...(19): siRNA sense strand
gaaguaaauauacgcuuug

SEQ ID NO: 294592 - RNA, 19 nt, Homo sapiens
  misc_RNA (1)...(19): siRNA sense strand
gguaaugaauauucgaaca

SEQ ID NO: 294593 - RNA, 19 nt, Homo sapiens
  misc_RNA (1)...(19): siRNA sense strand
caagcaguuuguuugguaa

SEQ ID NO: 294594 - RNA, 19 nt, Homo sapiens
  misc_RNA (1)...(19): siRNA sense strand
ccaaggagacccugcagaa

SEQ ID NO: 294595 - RNA, 19 nt, Homo sapiens
  misc_RNA (1)...(19): siRNA sense strand
uauaguagaugcccuggau

SEQ ID NO: 294596 - RNA, 19 nt, Homo sapiens
  misc_RNA (1)...(19): siRNA sense strand
guacugaacaaacuggaaa

SEQ ID NO: 294597 - RNA, 19 nt, Homo sapiens
  misc_RNA (1)...(19): siRNA sense strand
cugaaggccugguuaaugu

SEQ ID NO: 294598 - RNA, 19 nt, Homo sapiens
  misc_RNA (1)...(19): siRNA sense strand
gaaaaccauugcagaguga

SEQ ID NO: 294599 - RNA, 19 nt, Homo sapiens
  misc_RNA (1)...(19): siRNA sense strand
uaucgagacucauuugauc

SEQ ID NO: 294600 - RNA, 19 nt, Homo sapiens
  misc_RNA (1)...(19): siRNA sense strand
ccaaagagacauccuacug

SEQ ID NO: 294601 - RNA, 19 nt, Homo sapiens
  misc_RNA (1)...(19): siRNA sense strand
gcugaaauuucugucuuug

SEQ ID NO: 294602 - RNA, 19 nt, Homo sapiens
  misc_RNA (1)...(19): siRNA sense strand
gaggagauccaaagagaca

SEQ ID NO: 294603 - RNA, 19 nt, Homo sapiens
  misc_RNA (1)...(19): siRNA sense strand
gaauuuggaacccugcauu

SEQ ID NO: 294604 - RNA, 19 nt, Homo sapiens
  misc_RNA (1)...(19): siRNA sense strand
gaaagaaagcaguggaacu

SEQ ID NO: 294605 - RNA, 19 nt, Homo sapiens
  misc_RNA (1)...(19): siRNA sense strand
ugaaaucagagaggaauaa

SEQ ID NO: 294606 - RNA, 19 nt, Homo sapiens
  misc_RNA (1)...(19): siRNA sense strand
ugacucaugauccaaagua

SEQ ID NO: 294607 - RNA, 19 nt, Homo sapiens
  misc_RNA (1)...(19): siRNA sense strand
cagaagcuuucagauuuga

SEQ ID NO: 294608 - RNA, 19 nt, Homo sapiens
  misc_RNA (1)...(19): siRNA sense strand
ugacaagacagaucuggaa

SEQ ID NO: 294609 - RNA, 19 nt, Homo sapiens
  misc_RNA (1)...(19): siRNA sense strand
cagcuucuaugaguauuug

SEQ ID NO: 294610 - RNA, 19 nt, Homo sapiens
  misc_RNA (1)...(19): siRNA sense strand
aaagaaagcaguggaacuu

SEQ ID NO: 294611 - RNA, 19 nt, Homo sapiens
  misc_RNA (1)...(19): siRNA sense strand
gcugaaggccugguuaaug

SEQ ID NO: 294612 - RNA, 19 nt, Homo sapiens
  misc_RNA (1)...(19): siRNA sense strand
cagagugaauggaggcuau

SEQ ID NO: 294613 - RNA, 19 nt, Homo sapiens
  misc_RNA (1)...(19): siRNA sense strand
aaagagaugaugaaacaug

SEQ ID NO: 294614 - RNA, 19 nt, Homo sapiens
  misc_RNA (1)...(19): siRNA sense strand
uguggagacugacucauga

SEQ ID NO: 294615 - RNA, 19 nt, Homo sapiens
  misc_RNA (1)...(19): siRNA sense strand
uauccuaacuaucugaauc

SEQ ID NO: 294616 - RNA, 19 nt, Homo sapiens
  misc_RNA (1)...(19): siRNA sense strand
uaaaauugcuaccugcauu

SEQ ID NO: 294617 - RNA, 19 nt, Homo sapiens
  misc_RNA (1)...(19): siRNA sense strand
ggaggccauucaagcaguu

SEQ ID NO: 294618 - RNA, 19 nt, Homo sapiens
  misc_RNA (1)...(19): siRNA sense strand
aggcacaucuucucccuau

SEQ ID NO: 294619 - RNA, 19 nt, Homo sapiens
  misc_RNA (1)...(19): siRNA sense strand
gaagcuaagaagauguauu

SEQ ID NO: 294620 - RNA, 19 nt, Homo sapiens
  misc_RNA (1)...(19): siRNA sense strand
gagacauccuacuggagaa

SEQ ID NO: 294621 - RNA, 19 nt, Homo sapiens
  misc_RNA (1)...(19): siRNA sense strand
caagacagaucuggaagcu

SEQ ID NO: 294622 - RNA, 19 nt, Homo sapiens
  misc_RNA (1)...(19): siRNA sense strand
gauccaaagagacauccua

SEQ ID NO: 294623 - RNA, 19 nt, Homo sapiens
  misc_RNA (1)...(19): siRNA sense strand
gagacugacucaugaucca

SEQ ID NO: 294624 - RNA, 19 nt, Homo sapiens
  misc_RNA (1)...(19): siRNA sense strand
gcccguacuugucaugaau

SEQ ID NO: 294625 - RNA, 19 nt, Homo sapiens
  misc_RNA (1)...(19): siRNA sense strand
ggacuacucucagccuacu

SEQ ID NO: 294626 - RNA, 19 nt, Homo sapiens
  misc_RNA (1)...(19): siRNA sense strand
gauguuuaccuucuucaug

SEQ ID NO: 294627 - RNA, 19 nt, Homo sapiens
  misc_RNA (1)...(19): siRNA sense strand
uuauggagacuuacaugua

SEQ ID NO: 294628 - RNA, 19 nt, Homo sapiens
  misc_RNA (1)...(19): siRNA sense strand
cagauuugauggugguguu

SEQ ID NO: 294629 - RNA, 19 nt, Homo sapiens
  misc_RNA (1)...(19): siRNA sense strand
ugaaauugcccguacuugu

SEQ ID NO: 294630 - RNA, 19 nt, Homo sapiens
  misc_RNA (1)...(19): siRNA sense strand
gaacccugcauuuggaguu

SEQ ID NO: 294631 - RNA, 19 nt, Homo sapiens
  misc_RNA (1)...(19): siRNA sense strand
gaaaagggcaaagaucaaa

SEQ ID NO: 294632 - RNA, 19 nt, Homo sapiens
  misc_RNA (1)...(19): siRNA sense strand
caugagaguuaugaugaug

SEQ ID NO: 294633 - RNA, 19 nt, Homo sapiens
  misc_RNA (1)...(19): siRNA sense strand
gaagcuuucagauuugaug

SEQ ID NO: 294634 - RNA, 19 nt, Homo sapiens
  misc_RNA (1)...(19): siRNA sense strand
gaucuggaagcuaagaaga

SEQ ID NO: 294635 - RNA, 19 nt, Homo sapiens
  misc_RNA (1)...(19): siRNA sense strand
ccuugggcauugcugaaua

SEQ ID NO: 294636 - RNA, 19 nt, Homo sapiens
  misc_RNA (1)...(19): siRNA sense strand
aaucauggguugaagaaaa

SEQ ID NO: 294637 - RNA, 19 nt, Homo sapiens
  misc_RNA (1)...(19): siRNA sense strand
ugacgacgaucuucuucca

SEQ ID NO: 294638 - RNA, 19 nt, Homo sapiens
  misc_RNA (1)...(19): siRNA sense strand
ugagaguuaugaugaugug

SEQ ID NO: 294639 - RNA, 19 nt, Homo sapiens
  misc_RNA (1)...(19): siRNA sense strand
aaagugguauuggaaggaa

SEQ ID NO: 294640 - RNA, 19 nt, Homo sapiens
  misc_RNA (1)...(19): siRNA sense strand
ugugaaugcugaaauuucu

SEQ ID NO: 294641 - RNA, 19 nt, Homo sapiens
  misc_RNA (1)...(19): siRNA sense strand
caucuuacggccagaaguu

SEQ ID NO: 294642 - RNA, 19 nt, Homo sapiens
  misc_RNA (1)...(19): siRNA sense strand
guauucagcgccuucauca

SEQ ID NO: 294643 - RNA, 19 nt, Homo sapiens
  misc_RNA (1)...(19): siRNA sense strand
auguuuaccuucuucauga

SEQ ID NO: 294644 - RNA, 19 nt, Homo sapiens
  misc_RNA (1)...(19): siRNA sense strand
gagaaaagggcaaagauca

SEQ ID NO: 294645 - RNA, 19 nt, Homo sapiens
  misc_RNA (1)...(19): siRNA sense strand
gcugaaaagguaaugaaua

SEQ ID NO: 294646 - RNA, 19 nt, Homo sapiens
  misc_RNA (1)...(19): siRNA sense strand
gaugaugugcagcagaguu

SEQ ID NO: 294647 - RNA, 19 nt, Homo sapiens
  misc_RNA (1)...(19): siRNA sense strand
gagaugaugaaacaugcuu

SEQ ID NO: 294648 - RNA, 19 nt, Homo sapiens
  misc_RNA (1)...(19): siRNA sense strand
gcccaacacuaccuugaac

SEQ ID NO: 294649 - RNA, 19 nt, Homo sapiens
  misc_RNA (1)...(19): siRNA sense strand
gaagauguauuuugaugcu

SEQ ID NO: 294650 - RNA, 19 nt, Homo sapiens
  misc_RNA (1)...(19): siRNA sense strand
ucuggaagcuaagaagaug

SEQ ID NO: 294651 - RNA, 19 nt, Homo sapiens
  misc_RNA (1)...(19): siRNA sense strand
agacagcuucuaugaguau

SEQ ID NO: 294652 - RNA, 19 nt, Homo sapiens
  misc_RNA (1)...(19): siRNA sense strand
uagaugcccuggauacacu

SEQ ID NO: 294653 - RNA, 19 nt, Homo sapiens
  misc_RNA (1)...(19): siRNA sense strand
ugaugaaacaugcuuggaa

SEQ ID NO: 294654 - RNA, 19 nt, Homo sapiens
  misc_RNA (1)...(19): siRNA sense strand
gaaauuucugucuuugaag

SEQ ID NO: 294655 - RNA, 19 nt, Homo sapiens
  misc_RNA (1)...(19): siRNA sense strand
cauuugauccgcaagucua

SEQ ID NO: 294656 - RNA, 19 nt, Homo sapiens
  misc_RNA (1)...(19): siRNA sense strand
cauacucccucuggaauac

SEQ ID NO: 294657 - RNA, 19 nt, Homo sapiens
  misc_RNA (1)...(19): siRNA sense strand
gcacaucuucucccuaucc

SEQ ID NO: 294658 - RNA, 19 nt, Homo sapiens
  misc_RNA (1)...(19): siRNA sense strand
ccgaaggcauggcccaaca

SEQ ID NO: 294659 - RNA, 19 nt, Homo sapiens
  misc_RNA (1)...(19): siRNA sense strand
gauggaggcuuaaauauug

SEQ ID NO: 294660 - RNA, 19 nt, Homo sapiens
  misc_RNA (1)...(19): siRNA sense strand
ggaaagauguuagaauuga

SEQ ID NO: 294661 - RNA, 19 nt, Homo sapiens
  misc_RNA (1)...(19): siRNA sense strand
gcaagaauauuacuguaga

SEQ ID NO: 294662 - RNA, 19 nt, Homo sapiens
  misc_RNA (1)...(19): siRNA sense strand
caacagacauacagcauug

SEQ ID NO: 294663 - RNA, 19 nt, Homo sapiens
  misc_RNA (1)...(19): siRNA sense strand
gaaauuagcaaauggcaaa

SEQ ID NO: 294664 - RNA, 19 nt, Homo sapiens
  misc_RNA (1)...(19): siRNA sense strand
gaagacacgaacuauauua

SEQ ID NO: 294665 - RNA, 19 nt, Homo sapiens
  misc_RNA (1)...(19): siRNA sense strand
ucacgaaggugguaacaaa

SEQ ID NO: 294666 - RNA, 19 nt, Homo sapiens
  misc_RNA (1)...(19): siRNA sense strand
ggaguggaaucuggaaaua

SEQ ID NO: 294667 - RNA, 19 nt, Homo sapiens
  misc_RNA (1)...(19): siRNA sense strand
gagaagacacgaacuauau

SEQ ID NO: 294668 - RNA, 19 nt, Homo sapiens
  misc_RNA (1)...(19): siRNA sense strand
ucagcaaggugacauauuu

SEQ ID NO: 294669 - RNA, 19 nt, Homo sapiens
  misc_RNA (1)...(19): siRNA sense strand
ccaaagcacagauccauua

SEQ ID NO: 294670 - RNA, 19 nt, Homo sapiens
  misc_RNA (1)...(19): siRNA sense strand
gaaguugccuaccagauca

SEQ ID NO: 294671 - RNA, 19 nt, Homo sapiens
  misc_RNA (1)...(19): siRNA sense strand
gacaaugguuuccucauga

SEQ ID NO: 294672 - RNA, 19 nt, Homo sapiens
  misc_RNA (1)...(19): siRNA sense strand
gagcaauguuccuuuaguu

SEQ ID NO: 294673 - RNA, 19 nt, Homo sapiens
  misc_RNA (1)...(19): siRNA sense strand
gaucuucacucggauuauu

SEQ ID NO: 294674 - RNA, 19 nt, Homo sapiens
  misc_RNA (1)...(19): siRNA sense strand
ugaaugccaugucaacuuu

SEQ ID NO: 294675 - RNA, 19 nt, Homo sapiens
  misc_RNA (1)...(19): siRNA sense strand
gaggacuggucuuucaaua

SEQ ID NO: 294676 - RNA, 19 nt, Homo sapiens
  misc_RNA (1)...(19): siRNA sense strand
ugaacuggauggaggcuua

SEQ ID NO: 294677 - RNA, 19 nt, Homo sapiens
  misc_RNA (1)...(19): siRNA sense strand
gaacuaggaauaaugguau

SEQ ID NO: 294678 - RNA, 19 nt, Homo sapiens
  misc_RNA (1)...(19): siRNA sense strand
ggauggaggcuuaaauauu

SEQ ID NO: 294679 - RNA, 19 nt, Homo sapiens
  misc_RNA (1)...(19): siRNA sense strand
gaaacuugguggccucaug

SEQ ID NO: 294680 - RNA, 19 nt, Homo sapiens
  misc_RNA (1)...(19): siRNA sense strand
cuggaaagauguuagaauu

SEQ ID NO: 294681 - RNA, 19 nt, Homo sapiens
  misc_RNA (1)...(19): siRNA sense strand
caaggugacauauuuguuu

SEQ ID NO: 294682 - RNA, 19 nt, Homo sapiens
  misc_RNA (1)...(19): siRNA sense strand
gaauugguaucauaucagu

SEQ ID NO: 294683 - RNA, 19 nt, Homo sapiens
  misc_RNA (1)...(19): siRNA sense strand
gaaaacacguucuauaucu

SEQ ID NO: 294684 - RNA, 19 nt, Homo sapiens
  misc_RNA (1)...(19): siRNA sense strand
ggauuucccauauuucuaa

SEQ ID NO: 294685 - RNA, 19 nt, Homo sapiens
  misc_RNA (1)...(19): siRNA sense strand
ccagggagauuuagugaca

SEQ ID NO: 294686 - RNA, 19 nt, Homo sapiens
  misc_RNA (1)...(19): siRNA sense strand
cagacaauauguucaauag

SEQ ID NO: 294687 - RNA, 19 nt, Homo sapiens
  misc_RNA (1)...(19): siRNA sense strand
cgggaaagcugugugguuu

SEQ ID NO: 294688 - RNA, 19 nt, Homo sapiens
  misc_RNA (1)...(19): siRNA sense strand
gcagcgagauaguggauca

SEQ ID NO: 294689 - RNA, 19 nt, Homo sapiens
  misc_RNA (1)...(19): siRNA sense strand
ggacuggucuuucaauagc

SEQ ID NO: 294690 - RNA, 19 nt, Homo sapiens
  misc_RNA (1)...(19): siRNA sense strand
gaaaaggauuguugagcua

SEQ ID NO: 294691 - RNA, 19 nt, Homo sapiens
  misc_RNA (1)...(19): siRNA sense strand
uuggauaacuggaccuaua

SEQ ID NO: 294692 - RNA, 19 nt, Homo sapiens
  misc_RNA (1)...(19): siRNA sense strand
ugacaaugguuuccucaug

SEQ ID NO: 294693 - RNA, 19 nt, Homo sapiens
  misc_RNA (1)...(19): siRNA sense strand
gaauuuaugagcaggauga

SEQ ID NO: 294694 - RNA, 19 nt, Homo sapiens
  misc_RNA (1)...(19): siRNA sense strand
uaacuggaccuauagcaaa

SEQ ID NO: 294695 - RNA, 19 nt, Homo sapiens
  misc_RNA (1)...(19): siRNA sense strand
caaucuacaucaaggacua

SEQ ID NO: 294696 - RNA, 19 nt, Homo sapiens
  misc_RNA (1)...(19): siRNA sense strand
caguggaacuuauagaaga

SEQ ID NO: 294697 - RNA, 19 nt, Homo sapiens
  misc_RNA (1)...(19): siRNA sense strand
ggaccuauagcaaagaauu

SEQ ID NO: 294698 - RNA, 19 nt, Homo sapiens
  misc_RNA (1)...(19): siRNA sense strand
ggagcaauguuccuuuagu

SEQ ID NO: 294699 - RNA, 19 nt, Homo sapiens
  misc_RNA (1)...(19): siRNA sense strand
ugaacucugugaugaacua

SEQ ID NO: 294700 - RNA, 19 nt, Homo sapiens
  misc_RNA (1)...(19): siRNA sense strand
ugaauucuaugaacucugu

SEQ ID NO: 294701 - RNA, 19 nt, Homo sapiens
  misc_RNA (1)...(19): siRNA sense strand
gcacuuuauuggcaguuga

SEQ ID NO: 294702 - RNA, 19 nt, Homo sapiens
  misc_RNA (1)...(19): siRNA sense strand
ccaguaggcuuugagaaug

SEQ ID NO: 294703 - RNA, 19 nt, Homo sapiens
  misc_RNA (1)...(19): siRNA sense strand
gguuugaguuucuauuuca

SEQ ID NO: 294704 - RNA, 19 nt, Homo sapiens
  misc_RNA (1)...(19): siRNA sense strand
acagaggacuggucuuuca

SEQ ID NO: 294705 - RNA, 19 nt, Homo sapiens
  misc_RNA (1)...(19): siRNA sense strand
ugaaaucucauccuucuau

SEQ ID NO: 294706 - RNA, 19 nt, Homo sapiens
  misc_RNA (1)...(19): siRNA sense strand
agacugaaaucucauccuu

SEQ ID NO: 294707 - RNA, 19 nt, Homo sapiens
  misc_RNA (1)...(19): siRNA sense strand
ucuaugaacucugugauga

SEQ ID NO: 294708 - RNA, 19 nt, Homo sapiens
  misc_RNA (1)...(19): siRNA sense strand
gaaaaggucucgucuacag

SEQ ID NO: 294709 - RNA, 19 nt, Homo sapiens
  misc_RNA (1)...(19): siRNA sense strand
ccaggauucuuacuacaga

SEQ ID NO: 294710 - RNA, 19 nt, Homo sapiens
  misc_RNA (1)...(19): siRNA sense strand
agaugggucucuuuggaua

SEQ ID NO: 294711 - RNA, 19 nt, Homo sapiens
  misc_RNA (1)...(19): siRNA sense strand
ugaauacucuucggguuug

SEQ ID NO: 294712 - RNA, 19 nt, Homo sapiens
  misc_RNA (1)...(19): siRNA sense strand
agaaugaguuggagcaauc

SEQ ID NO: 294713 - RNA, 19 nt, Homo sapiens
  misc_RNA (1)...(19): siRNA sense strand
gauccauuacgcacauuua

SEQ ID NO: 294714 - RNA, 19 nt, Homo sapiens
  misc_RNA (1)...(19): siRNA sense strand
gaaaucucauccuucuauc

SEQ ID NO: 294715 - RNA, 19 nt, Homo sapiens
  misc_RNA (1)...(19): siRNA sense strand
ugagcaggaugaauucuau

SEQ ID NO: 294716 - RNA, 19 nt, Homo sapiens
  misc_RNA (1)...(19): siRNA sense strand
gguaacaaacaaaugcuuu

SEQ ID NO: 294717 - RNA, 19 nt, Homo sapiens
  misc_RNA (1)...(19): siRNA sense strand
ugagaagacacgaacuaua

SEQ ID NO: 294718 - RNA, 19 nt, Homo sapiens
  misc_RNA (1)...(19): siRNA sense strand
ucacugccaucaucucuca

SEQ ID NO: 294719 - RNA, 19 nt, Homo sapiens
  misc_RNA (1)...(19): siRNA sense strand
cauauggaguggcaauaau

SEQ ID NO: 294720 - RNA, 19 nt, Homo sapiens
  misc_RNA (1)...(19): siRNA sense strand
gaccaacuaccacuucuug

SEQ ID NO: 294721 - RNA, 19 nt, Homo sapiens
  misc_RNA (1)...(19): siRNA sense strand
ggcugaaacuguugcagaa

SEQ ID NO: 294722 - RNA, 19 nt, Homo sapiens
  misc_RNA (1)...(19): siRNA sense strand
gagcuauuugugaacauua

SEQ ID NO: 294723 - RNA, 19 nt, Homo sapiens
  misc_RNA (1)...(19): siRNA sense strand
gaaggugguaacaaacaaa

SEQ ID NO: 294724 - RNA, 19 nt, Homo sapiens
  misc_RNA (1)...(19): siRNA sense strand
cgaaggugguaacaaacaa

SEQ ID NO: 294725 - RNA, 19 nt, Homo sapiens
  misc_RNA (1)...(19): siRNA sense strand
gacaagagucguccuuuua

SEQ ID NO: 294726 - RNA, 19 nt, Homo sapiens
  misc_RNA (1)...(19): siRNA sense strand
cagcagaaguugccuacca

SEQ ID NO: 294727 - RNA, 19 nt, Homo sapiens
  misc_RNA (1)...(19): siRNA sense strand
cuacagauuuaaugaccuu

SEQ ID NO: 294728 - RNA, 19 nt, Homo sapiens
  misc_RNA (1)...(19): siRNA sense strand
acagaugggucucuuugga

SEQ ID NO: 294729 - RNA, 19 nt, Homo sapiens
  misc_RNA (1)...(19): siRNA sense strand
gacaguggaacuuauagaa

SEQ ID NO: 294730 - RNA, 19 nt, Homo sapiens
  misc_RNA (1)...(19): siRNA sense strand
cgaguaaccucugaguugu

SEQ ID NO: 294731 - RNA, 19 nt, Homo sapiens
  misc_RNA (1)...(19): siRNA sense strand
aguggaaucuggaaauaga

SEQ ID NO: 294732 - RNA, 19 nt, Homo sapiens
  misc_RNA (1)...(19): siRNA sense strand
gcaaggugacauauuuguu

SEQ ID NO: 294733 - RNA, 19 nt, Homo sapiens
  misc_RNA (1)...(19): siRNA sense strand
gaguggauacgguuucaaa

SEQ ID NO: 294734 - RNA, 19 nt, Homo sapiens
  misc_RNA (1)...(19): siRNA sense strand
caguaggcuuugagaauga

SEQ ID NO: 294735 - RNA, 19 nt, Homo sapiens
  misc_RNA (1)...(19): siRNA sense strand
gaggaggcgcugaugauga

SEQ ID NO: 294736 - RNA, 19 nt, Homo sapiens
  misc_RNA (1)...(19): siRNA sense strand
ccgaguaaccucugaguug

SEQ ID NO: 294737 - RNA, 19 nt, Homo sapiens
  misc_RNA (1)...(19): siRNA sense strand
cagacuggguacaacauga

SEQ ID NO: 294738 - RNA, 19 nt, Homo sapiens
  misc_RNA (1)...(19): siRNA sense strand
caacaucacgaagguggua

SEQ ID NO: 294739 - RNA, 19 nt, Homo sapiens
  misc_RNA (1)...(19): siRNA sense strand
cuacagaggacuggucuuu

SEQ ID NO: 294740 - RNA, 19 nt, Homo sapiens
  misc_RNA (1)...(19): siRNA sense strand
ucacugaccggccaaucua

SEQ ID NO: 294741 - RNA, 19 nt, Homo sapiens
  misc_RNA (1)...(19): siRNA sense strand
gugaugaacuaggaauaau

SEQ ID NO: 294742 - RNA, 19 nt, Homo sapiens
  misc_RNA (1)...(19): siRNA sense strand
gaucccagcagauucauuc

SEQ ID NO: 294743 - RNA, 19 nt, Homo sapiens
  misc_RNA (1)...(19): siRNA sense strand
cccaauauaugguaagagu

SEQ ID NO: 294744 - RNA, 19 nt, Homo sapiens
  misc_RNA (1)...(19): siRNA sense strand
caugugaccuccuuaacag

SEQ ID NO: 294745 - RNA, 19 nt, Homo sapiens
  misc_RNA (1)...(19): siRNA sense strand
aggaggcgcugaugaugaa

SEQ ID NO: 294746 - RNA, 19 nt, Homo sapiens
  misc_RNA (1)...(19): siRNA sense strand
gcuaauaugaauacucuuc

SEQ ID NO: 294747 - RNA, 19 nt, Homo sapiens
  misc_RNA (1)...(19): siRNA sense strand
agacugcccuccacuugug

SEQ ID NO: 294748 - RNA, 19 nt, Homo sapiens
  misc_RNA (1)...(19): siRNA sense strand
gugaccuccuuaacagaua

SEQ ID NO: 294749 - RNA, 19 nt, Homo sapiens
  misc_RNA (1)...(19): siRNA sense strand
caucaucucucagcaaggu

SEQ ID NO: 294750 - RNA, 19 nt, Homo sapiens
  misc_RNA (1)...(19): siRNA sense strand
gauaccaucuaccuuacuc

SEQ ID NO: 294751 - RNA, 19 nt, Homo sapiens
  misc_RNA (1)...(19): siRNA sense strand
ggacaguggaacuuauaga

SEQ ID NO: 294752 - RNA, 19 nt, Homo sapiens
  misc_RNA (1)...(19): siRNA sense strand
ugaacuaggaauaauggua

SEQ ID NO: 294753 - RNA, 19 nt, Homo sapiens
  misc_RNA (1)...(19): siRNA sense strand
ggagcaaucuuuucaugug

SEQ ID NO: 294754 - RNA, 19 nt, Homo sapiens
  misc_RNA (1)...(19): siRNA sense strand
cuauaucuaugguguguca

SEQ ID NO: 294755 - RNA, 19 nt, Homo sapiens
  misc_RNA (1)...(19): siRNA sense strand
uuacuuugcucagaauuuc

SEQ ID NO: 294756 - RNA, 19 nt, Homo sapiens
  misc_RNA (1)...(19): siRNA sense strand
uuuauuacguccaguccua

SEQ ID NO: 294757 - RNA, 19 nt, Homo sapiens
  misc_RNA (1)...(19): siRNA sense strand
gccaguaggcuuugagaau

SEQ ID NO: 294758 - RNA, 19 nt, Homo sapiens
  misc_RNA (1)...(19): siRNA sense strand
gggaauugcacacgggaaa

SEQ ID NO: 294759 - RNA, 19 nt, Homo sapiens
  misc_RNA (1)...(19): siRNA sense strand
gggcaaagcucuaaagaaa

SEQ ID NO: 294760 - RNA, 19 nt, Homo sapiens
  misc_RNA (1)...(19): siRNA sense strand
gcaaagcucuaaagaaaga

SEQ ID NO: 294761 - RNA, 19 nt, Homo sapiens
  misc_RNA (1)...(19): siRNA sense strand
ggaagagucugucaagaaa

SEQ ID NO: 294762 - RNA, 19 nt, Homo sapiens
  misc_RNA (1)...(19): siRNA sense strand
gcucaaacaucuagacuuu

SEQ ID NO: 294763 - RNA, 19 nt, Homo sapiens
  misc_RNA (1)...(19): siRNA sense strand
gaagacacguacucucaua

SEQ ID NO: 294764 - RNA, 19 nt, Homo sapiens
  misc_RNA (1)...(19): siRNA sense strand
ggaaggacuuucugaguuu

SEQ ID NO: 294765 - RNA, 19 nt, Homo sapiens
  misc_RNA (1)...(19): siRNA sense strand
ccagagauauguccuuaua

SEQ ID NO: 294766 - RNA, 19 nt, Homo sapiens
  misc_RNA (1)...(19): siRNA sense strand
agaaagagguuaagaaaga

SEQ ID NO: 294767 - RNA, 19 nt, Homo sapiens
  misc_RNA (1)...(19): siRNA sense strand
gaacaguccucaaugucua

SEQ ID NO: 294768 - RNA, 19 nt, Homo sapiens
  misc_RNA (1)...(19): siRNA sense strand
gaagagccaucuccaguga

SEQ ID NO: 294769 - RNA, 19 nt, Homo sapiens
  misc_RNA (1)...(19): siRNA sense strand
agacaaggcugaauucauu

SEQ ID NO: 294770 - RNA, 19 nt, Homo sapiens
  misc_RNA (1)...(19): siRNA sense strand
agaaagaucugaaagagaa

SEQ ID NO: 294771 - RNA, 19 nt, Homo sapiens
  misc_RNA (1)...(19): siRNA sense strand
uuaagaagcucccuaaaga

SEQ ID NO: 294772 - RNA, 19 nt, Homo sapiens
  misc_RNA (1)...(19): siRNA sense strand
gaaaggaaauuaggagaug

SEQ ID NO: 294773 - RNA, 19 nt, Homo sapiens
  misc_RNA (1)...(19): siRNA sense strand
gcaaagaaaucaucuacuc

SEQ ID NO: 294774 - RNA, 19 nt, Homo sapiens
  misc_RNA (1)...(19): siRNA sense strand
gcaaacaccuaccacauuc

SEQ ID NO: 294775 - RNA, 19 nt, Homo sapiens
  misc_RNA (1)...(19): siRNA sense strand
caauucagcuucuaucuug

SEQ ID NO: 294776 - RNA, 19 nt, Homo sapiens
  misc_RNA (1)...(19): siRNA sense strand
uaacuucagucucaucuuu

SEQ ID NO: 294777 - RNA, 19 nt, Homo sapiens
  misc_RNA (1)...(19): siRNA sense strand
caaaggaagucaagaagga

SEQ ID NO: 294778 - RNA, 19 nt, Homo sapiens
  misc_RNA (1)...(19): siRNA sense strand
gaaccugcaucuucaauuc

SEQ ID NO: 294779 - RNA, 19 nt, Homo sapiens
  misc_RNA (1)...(19): siRNA sense strand
caaggacuuugaagaguua

SEQ ID NO: 294780 - RNA, 19 nt, Homo sapiens
  misc_RNA (1)...(19): siRNA sense strand
gcacagugguuaugcaaga

SEQ ID NO: 294781 - RNA, 19 nt, Homo sapiens
  misc_RNA (1)...(19): siRNA sense strand
gaagaaagaaucuguggaa

SEQ ID NO: 294782 - RNA, 19 nt, Homo sapiens
  misc_RNA (1)...(19): siRNA sense strand
gaagagaaacugaaggaaa

SEQ ID NO: 294783 - RNA, 19 nt, Homo sapiens
  misc_RNA (1)...(19): siRNA sense strand
gaagacaaauucagcagau

SEQ ID NO: 294784 - RNA, 19 nt, Homo sapiens
  misc_RNA (1)...(19): siRNA sense strand
gauagcaucucagcuguuu

SEQ ID NO: 294785 - RNA, 19 nt, Homo sapiens
  misc_RNA (1)...(19): siRNA sense strand
gaacuccaaucuugacaga

SEQ ID NO: 294786 - RNA, 19 nt, Homo sapiens
  misc_RNA (1)...(19): siRNA sense strand
ggacaagacucuggaagug

SEQ ID NO: 294787 - RNA, 19 nt, Homo sapiens
  misc_RNA (1)...(19): siRNA sense strand
gaagagaagcauagaagaa

SEQ ID NO: 294788 - RNA, 19 nt, Homo sapiens
  misc_RNA (1)...(19): siRNA sense strand
gaaccucuguuuagaagug

SEQ ID NO: 294789 - RNA, 19 nt, Homo sapiens
  misc_RNA (1)...(19): siRNA sense strand
gaauguugauguggaauuu

SEQ ID NO: 294790 - RNA, 19 nt, Homo sapiens
  misc_RNA (1)...(19): siRNA sense strand
gaggugcgcuuaaugauca

SEQ ID NO: 294791 - RNA, 19 nt, Homo sapiens
  misc_RNA (1)...(19): siRNA sense strand
gcugagaggucccuuaugu

SEQ ID NO: 294792 - RNA, 19 nt, Homo sapiens
  misc_RNA (1)...(19): siRNA sense strand
caagaaagagguuaagaaa

SEQ ID NO: 294793 - RNA, 19 nt, Homo sapiens
  misc_RNA (1)...(19): siRNA sense strand
gaaggacuuucugaguuua

SEQ ID NO: 294794 - RNA, 19 nt, Homo sapiens
  misc_RNA (1)...(19): siRNA sense strand
ccaagaaucuccugagcaa

SEQ ID NO: 294795 - RNA, 19 nt, Homo sapiens
  misc_RNA (1)...(19): siRNA sense strand
agaaaugucuccaucuaaa

SEQ ID NO: 294796 - RNA, 19 nt, Homo sapiens
  misc_RNA (1)...(19): siRNA sense strand
gaaaggagaggcugaacaa

SEQ ID NO: 294797 - RNA, 19 nt, Homo sapiens
  misc_RNA (1)...(19): siRNA sense strand
gaaagagguuaagaaagaa

SEQ ID NO: 294798 - RNA, 19 nt, Homo sapiens
  misc_RNA (1)...(19): siRNA sense strand
cuacuuaacuucagucuca

SEQ ID NO: 294799 - RNA, 19 nt, Homo sapiens
  misc_RNA (1)...(19): siRNA sense strand
uagguaaacuugagaugua

SEQ ID NO: 294800 - RNA, 19 nt, Homo sapiens
  misc_RNA (1)...(19): siRNA sense strand
gcacagacuuugcaccaau

SEQ ID NO: 294801 - RNA, 19 nt, Homo sapiens
  misc_RNA (1)...(19): siRNA sense strand
ggaguuguauuucucaaug

SEQ ID NO: 294802 - RNA, 19 nt, Homo sapiens
  misc_RNA (1)...(19): siRNA sense strand
ugacuuaggaguuguauuu

SEQ ID NO: 294803 - RNA, 19 nt, Homo sapiens
  misc_RNA (1)...(19): siRNA sense strand
ucacacaccuuacuaucaa

SEQ ID NO: 294804 - RNA, 19 nt, Homo sapiens
  misc_RNA (1)...(19): siRNA sense strand
acacuaagauguccauuuc

SEQ ID NO: 294805 - RNA, 19 nt, Homo sapiens
  misc_RNA (1)...(19): siRNA sense strand
agaaguagaucucccgauu

SEQ ID NO: 294806 - RNA, 19 nt, Homo sapiens
  misc_RNA (1)...(19): siRNA sense strand
uaugagacaucuacaaaga

SEQ ID NO: 294807 - RNA, 19 nt, Homo sapiens
  misc_RNA (1)...(19): siRNA sense strand
ggacacccguucaagauca

SEQ ID NO: 294808 - RNA, 19 nt, Homo sapiens
  misc_RNA (1)...(19): siRNA sense strand
caagaccgaugucaauuuc

SEQ ID NO: 294809 - RNA, 19 nt, Homo sapiens
  misc_RNA (1)...(19): siRNA sense strand
gaaggaaguuaagaaggaa

SEQ ID NO: 294810 - RNA, 19 nt, Homo sapiens
  misc_RNA (1)...(19): siRNA sense strand
guacaaagaccaagucauc

SEQ ID NO: 294811 - RNA, 19 nt, Homo sapiens
  misc_RNA (1)...(19): siRNA sense strand
aauggaagcugaagacuau

SEQ ID NO: 294812 - RNA, 19 nt, Homo sapiens
  misc_RNA (1)...(19): siRNA sense strand
ggagagagaagucaccaaa

SEQ ID NO: 294813 - RNA, 19 nt, Homo sapiens
  misc_RNA (1)...(19): siRNA sense strand
ccacugauggcaaggauua

SEQ ID NO: 294814 - RNA, 19 nt, Homo sapiens
  misc_RNA (1)...(19): siRNA sense strand
gggcgauucugccuuguuu

SEQ ID NO: 294815 - RNA, 19 nt, Homo sapiens
  misc_RNA (1)...(19): siRNA sense strand
acagaaaugucuccaucua

SEQ ID NO: 294816 - RNA, 19 nt, Homo sapiens
  misc_RNA (1)...(19): siRNA sense strand
uuacugcucugaagugaaa

SEQ ID NO: 294817 - RNA, 19 nt, Homo sapiens
  misc_RNA (1)...(19): siRNA sense strand
gguaaagccugaagacaag

SEQ ID NO: 294818 - RNA, 19 nt, Homo sapiens
  misc_RNA (1)...(19): siRNA sense strand
gaccaaaccuucagugacu

SEQ ID NO: 294819 - RNA, 19 nt, Homo sapiens
  misc_RNA (1)...(19): siRNA sense strand
gaucccaacucaugacuca

SEQ ID NO: 294820 - RNA, 19 nt, Homo sapiens
  misc_RNA (1)...(19): siRNA sense strand
ccagagaggaggaauauga

SEQ ID NO: 294821 - RNA, 19 nt, Homo sapiens
  misc_RNA (1)...(19): siRNA sense strand
ucaauaugcucaucaaugg

SEQ ID NO: 294822 - RNA, 19 nt, Homo sapiens
  misc_RNA (1)...(19): siRNA sense strand
cuacgagacuucagaccua

SEQ ID NO: 294823 - RNA, 19 nt, Homo sapiens
  misc_RNA (1)...(19): siRNA sense strand
ugaaaugacuucuacuagu

SEQ ID NO: 294824 - RNA, 19 nt, Homo sapiens
  misc_RNA (1)...(19): siRNA sense strand
ccaaggacuuugaagaguu

SEQ ID NO: 294825 - RNA, 19 nt, Homo sapiens
  misc_RNA (1)...(19): siRNA sense strand
agaaggaaguuaagaagga

SEQ ID NO: 294826 - RNA, 19 nt, Homo sapiens
  misc_RNA (1)...(19): siRNA sense strand
gcaaauccgugcgcaagga

SEQ ID NO: 294827 - RNA, 19 nt, Homo sapiens
  misc_RNA (1)...(19): siRNA sense strand
cuccaagacuucaucaaua

SEQ ID NO: 294828 - RNA, 19 nt, Homo sapiens
  misc_RNA (1)...(19): siRNA sense strand
uuacgagacugcagagaaa

SEQ ID NO: 294829 - RNA, 19 nt, Homo sapiens
  misc_RNA (1)...(19): siRNA sense strand
caagucagcuacuccuguu

SEQ ID NO: 294830 - RNA, 19 nt, Homo sapiens
  misc_RNA (1)...(19): siRNA sense strand
caucucagcuguuucaagu

SEQ ID NO: 294831 - RNA, 19 nt, Homo sapiens
  misc_RNA (1)...(19): siRNA sense strand
gugaugagaccaacaauga

SEQ ID NO: 294832 - RNA, 19 nt, Homo sapiens
  misc_RNA (1)...(19): siRNA sense strand
gaaguagaucucccgauuu

SEQ ID NO: 294833 - RNA, 19 nt, Homo sapiens
  misc_RNA (1)...(19): siRNA sense strand
ggacugguaccaacaaaga

SEQ ID NO: 294834 - RNA, 19 nt, Homo sapiens
  misc_RNA (1)...(19): siRNA sense strand
gacacaaucuccaagacuu

SEQ ID NO: 294835 - RNA, 19 nt, Homo sapiens
  misc_RNA (1)...(19): siRNA sense strand
gaaagaaucuguggaaaag

SEQ ID NO: 294836 - RNA, 19 nt, Homo sapiens
  misc_RNA (1)...(19): siRNA sense strand
gaagucccaucucccuuug

SEQ ID NO: 294837 - RNA, 19 nt, Homo sapiens
  misc_RNA (1)...(19): siRNA sense strand
ggaagucccaucucccuuu

SEQ ID NO: 294838 - RNA, 19 nt, Homo sapiens
  misc_RNA (1)...(19): siRNA sense strand
gcucaucaauggcggauca

SEQ ID NO: 294839 - RNA, 19 nt, Homo sapiens
  misc_RNA (1)...(19): siRNA sense strand
caugcaagauugaacugua

SEQ ID NO: 294840 - RNA, 19 nt, Homo sapiens
  misc_RNA (1)...(19): siRNA sense strand
gaucucaacaucaugguuu

SEQ ID NO: 294841 - RNA, 19 nt, Homo sapiens
  misc_RNA (1)...(19): siRNA sense strand
ccaauccucuugagugguu

SEQ ID NO: 294842 - RNA, 19 nt, Homo sapiens
  misc_RNA (1)...(19): siRNA sense strand
gaagguuauuccuaugaga

SEQ ID NO: 294843 - RNA, 19 nt, Homo sapiens
  misc_RNA (1)...(19): siRNA sense strand
caacugaaguggacuacag

SEQ ID NO: 294844 - RNA, 19 nt, Homo sapiens
  misc_RNA (1)...(19): siRNA sense strand
ccagucaucucccuacaga

SEQ ID NO: 294845 - RNA, 19 nt, Homo sapiens
  misc_RNA (1)...(19): siRNA sense strand
ucucaggaauucguaaaua

SEQ ID NO: 294846 - RNA, 19 nt, Homo sapiens
  misc_RNA (1)...(19): siRNA sense strand
gaucaagaaagaagagaaa

SEQ ID NO: 294847 - RNA, 19 nt, Homo sapiens
  misc_RNA (1)...(19): siRNA sense strand
gaagcucauccgacacuua

SEQ ID NO: 294848 - RNA, 19 nt, Homo sapiens
  misc_RNA (1)...(19): siRNA sense strand
uccaagcccugcuguuaua

SEQ ID NO: 294849 - RNA, 19 nt, Homo sapiens
  misc_RNA (1)...(19): siRNA sense strand
ccacagcaauaguaagaau

SEQ ID NO: 294850 - RNA, 19 nt, Homo sapiens
  misc_RNA (1)...(19): siRNA sense strand
uaaagaagacacuaagaug

SEQ ID NO: 294851 - RNA, 19 nt, Homo sapiens
  misc_RNA (1)...(19): siRNA sense strand
ccaaguaaguccaguuucu

SEQ ID NO: 294852 - RNA, 19 nt, Homo sapiens
  misc_RNA (1)...(19): siRNA sense strand
gauccgagucugcuuauga

SEQ ID NO: 294853 - RNA, 19 nt, Homo sapiens
  misc_RNA (1)...(19): siRNA sense strand
ugaauucagugaugccaaa

SEQ ID NO: 294854 - RNA, 19 nt, Homo sapiens
  misc_RNA (1)...(19): siRNA sense strand
aaacaccuaucaagaagga

SEQ ID NO: 294855 - RNA, 19 nt, Homo sapiens
  misc_RNA (1)...(19): siRNA sense strand
uugcagagcucgaggaaga

SEQ ID NO: 294856 - RNA, 19 nt, Homo sapiens
  misc_RNA (1)...(19): siRNA sense strand
gaugacaauuugccuggaa

SEQ ID NO: 294857 - RNA, 19 nt, Homo sapiens
  misc_RNA (1)...(19): siRNA sense strand
aaagaaagaucugaaagag

SEQ ID NO: 294858 - RNA, 19 nt, Homo sapiens
  misc_RNA (1)...(19): siRNA sense strand
uaagaauguugauguggaa

SEQ ID NO: 294859 - RNA, 19 nt, Homo sapiens
  misc_RNA (1)...(19): siRNA sense strand
gggcaaagcucuaaagaaa

SEQ ID NO: 294860 - RNA, 19 nt, Homo sapiens
  misc_RNA (1)...(19): siRNA sense strand
gcaaagcucuaaagaaaga

SEQ ID NO: 294861 - RNA, 19 nt, Homo sapiens
  misc_RNA (1)...(19): siRNA sense strand
ggaagagucugucaagaaa

SEQ ID NO: 294862 - RNA, 19 nt, Homo sapiens
  misc_RNA (1)...(19): siRNA sense strand
gcucaaacaucuagacuuu

SEQ ID NO: 294863 - RNA, 19 nt, Homo sapiens
  misc_RNA (1)...(19): siRNA sense strand
gaagacacguacucucaua

SEQ ID NO: 294864 - RNA, 19 nt, Homo sapiens
  misc_RNA (1)...(19): siRNA sense strand
ggaaggacuuucugaguuu

SEQ ID NO: 294865 - RNA, 19 nt, Homo sapiens
  misc_RNA (1)...(19): siRNA sense strand
ccagagauauguccuuaua

SEQ ID NO: 294866 - RNA, 19 nt, Homo sapiens
  misc_RNA (1)...(19): siRNA sense strand
agaaagagguuaagaaaga

SEQ ID NO: 294867 - RNA, 19 nt, Homo sapiens
  misc_RNA (1)...(19): siRNA sense strand
gaacaguccucaaugucua

SEQ ID NO: 294868 - RNA, 19 nt, Homo sapiens
  misc_RNA (1)...(19): siRNA sense strand
gaagagccaucuccaguga

SEQ ID NO: 294869 - RNA, 19 nt, Homo sapiens
  misc_RNA (1)...(19): siRNA sense strand
agacaaggcugaauucauu

SEQ ID NO: 294870 - RNA, 19 nt, Homo sapiens
  misc_RNA (1)...(19): siRNA sense strand
agaaagaucugaaagagaa

SEQ ID NO: 294871 - RNA, 19 nt, Homo sapiens
  misc_RNA (1)...(19): siRNA sense strand
uuaagaagcucccuaaaga

SEQ ID NO: 294872 - RNA, 19 nt, Homo sapiens
  misc_RNA (1)...(19): siRNA sense strand
gaaaggaaauuaggagaug

SEQ ID NO: 294873 - RNA, 19 nt, Homo sapiens
  misc_RNA (1)...(19): siRNA sense strand
gcaaagaaaucaucuacuc

SEQ ID NO: 294874 - RNA, 19 nt, Homo sapiens
  misc_RNA (1)...(19): siRNA sense strand
gcaaacaccuaccacauuc

SEQ ID NO: 294875 - RNA, 19 nt, Homo sapiens
  misc_RNA (1)...(19): siRNA sense strand
caauucagcuucuaucuug

SEQ ID NO: 294876 - RNA, 19 nt, Homo sapiens
  misc_RNA (1)...(19): siRNA sense strand
uaacuucagucucaucuuu

SEQ ID NO: 294877 - RNA, 19 nt, Homo sapiens
  misc_RNA (1)...(19): siRNA sense strand
caaaggaagucaagaagga

SEQ ID NO: 294878 - RNA, 19 nt, Homo sapiens
  misc_RNA (1)...(19): siRNA sense strand
gaaccugcaucuucaauuc

SEQ ID NO: 294879 - RNA, 19 nt, Homo sapiens
  misc_RNA (1)...(19): siRNA sense strand
caaggacuuugaagaguua

SEQ ID NO: 294880 - RNA, 19 nt, Homo sapiens
  misc_RNA (1)...(19): siRNA sense strand
gcacagugguuaugcaaga

SEQ ID NO: 294881 - RNA, 19 nt, Homo sapiens
  misc_RNA (1)...(19): siRNA sense strand
gaagaaagaaucuguggaa

SEQ ID NO: 294882 - RNA, 19 nt, Homo sapiens
  misc_RNA (1)...(19): siRNA sense strand
gaagagaaacugaaggaaa

SEQ ID NO: 294883 - RNA, 19 nt, Homo sapiens
  misc_RNA (1)...(19): siRNA sense strand
gaagacaaauucagcagau

SEQ ID NO: 294884 - RNA, 19 nt, Homo sapiens
  misc_RNA (1)...(19): siRNA sense strand
gauagcaucucagcuguuu

SEQ ID NO: 294885 - RNA, 19 nt, Homo sapiens
  misc_RNA (1)...(19): siRNA sense strand
gaacuccaaucuugacaga

SEQ ID NO: 294886 - RNA, 19 nt, Homo sapiens
  misc_RNA (1)...(19): siRNA sense strand
ggacaagacucuggaagug

SEQ ID NO: 294887 - RNA, 19 nt, Homo sapiens
  misc_RNA (1)...(19): siRNA sense strand
gaagagaagcauagaagaa

SEQ ID NO: 294888 - RNA, 19 nt, Homo sapiens
  misc_RNA (1)...(19): siRNA sense strand
gaaccucuguuuagaagug

SEQ ID NO: 294889 - RNA, 19 nt, Homo sapiens
  misc_RNA (1)...(19): siRNA sense strand
gaauguugauguggaauuu

SEQ ID NO: 294890 - RNA, 19 nt, Homo sapiens
  misc_RNA (1)...(19): siRNA sense strand
gcugagaggucccuuaugu

SEQ ID NO: 294891 - RNA, 19 nt, Homo sapiens
  misc_RNA (1)...(19): siRNA sense strand
caagaaagagguuaagaaa

SEQ ID NO: 294892 - RNA, 19 nt, Homo sapiens
  misc_RNA (1)...(19): siRNA sense strand
gaaggacuuucugaguuua

SEQ ID NO: 294893 - RNA, 19 nt, Homo sapiens
  misc_RNA (1)...(19): siRNA sense strand
ccaagaaucuccugagcaa

SEQ ID NO: 294894 - RNA, 19 nt, Homo sapiens
  misc_RNA (1)...(19): siRNA sense strand
agaaaugucuccaucuaaa

SEQ ID NO: 294895 - RNA, 19 nt, Homo sapiens
  misc_RNA (1)...(19): siRNA sense strand
gaaaggagaggcugaacaa

SEQ ID NO: 294896 - RNA, 19 nt, Homo sapiens
  misc_RNA (1)...(19): siRNA sense strand
gaaagagguuaagaaagaa

SEQ ID NO: 294897 - RNA, 19 nt, Homo sapiens
  misc_RNA (1)...(19): siRNA sense strand
cuacuuaacuucagucuca

SEQ ID NO: 294898 - RNA, 19 nt, Homo sapiens
  misc_RNA (1)...(19): siRNA sense strand
uagguaaacuugagaugua

SEQ ID NO: 294899 - RNA, 19 nt, Homo sapiens
  misc_RNA (1)...(19): siRNA sense strand
gcacagacuuugcaccaau

SEQ ID NO: 294900 - RNA, 19 nt, Homo sapiens
  misc_RNA (1)...(19): siRNA sense strand
ggaguuguauuucucaaug

SEQ ID NO: 294901 - RNA, 19 nt, Homo sapiens
  misc_RNA (1)...(19): siRNA sense strand
ugacuuaggaguuguauuu

SEQ ID NO: 294902 - RNA, 19 nt, Homo sapiens
  misc_RNA (1)...(19): siRNA sense strand
ucacacaccuuacuaucaa

SEQ ID NO: 294903 - RNA, 19 nt, Homo sapiens
  misc_RNA (1)...(19): siRNA sense strand
acacuaagauguccauuuc

SEQ ID NO: 294904 - RNA, 19 nt, Homo sapiens
  misc_RNA (1)...(19): siRNA sense strand
agaaguagaucucccgauu

SEQ ID NO: 294905 - RNA, 19 nt, Homo sapiens
  misc_RNA (1)...(19): siRNA sense strand
uaugagacaucuacaaaga

SEQ ID NO: 294906 - RNA, 19 nt, Homo sapiens
  misc_RNA (1)...(19): siRNA sense strand
ggacacccguucaagauca

SEQ ID NO: 294907 - RNA, 19 nt, Homo sapiens
  misc_RNA (1)...(19): siRNA sense strand
caagaccgaugucaauuuc

SEQ ID NO: 294908 - RNA, 19 nt, Homo sapiens
  misc_RNA (1)...(19): siRNA sense strand
gaaggaaguuaagaaggaa

SEQ ID NO: 294909 - RNA, 19 nt, Homo sapiens
  misc_RNA (1)...(19): siRNA sense strand
guacaaagaccaagucauc

SEQ ID NO: 294910 - RNA, 19 nt, Homo sapiens
  misc_RNA (1)...(19): siRNA sense strand
aauggaagcugaagacuau

SEQ ID NO: 294911 - RNA, 19 nt, Homo sapiens
  misc_RNA (1)...(19): siRNA sense strand
ggagagagaagucaccaaa

SEQ ID NO: 294912 - RNA, 19 nt, Homo sapiens
  misc_RNA (1)...(19): siRNA sense strand
ccacugauggcaaggauua

SEQ ID NO: 294913 - RNA, 19 nt, Homo sapiens
  misc_RNA (1)...(19): siRNA sense strand
gggcgauucugccuuguuu

SEQ ID NO: 294914 - RNA, 19 nt, Homo sapiens
  misc_RNA (1)...(19): siRNA sense strand
acagaaaugucuccaucua

SEQ ID NO: 294915 - RNA, 19 nt, Homo sapiens
  misc_RNA (1)...(19): siRNA sense strand
uuacugcucugaagugaaa

SEQ ID NO: 294916 - RNA, 19 nt, Homo sapiens
  misc_RNA (1)...(19): siRNA sense strand
gguaaagccugaagacaag

SEQ ID NO: 294917 - RNA, 19 nt, Homo sapiens
  misc_RNA (1)...(19): siRNA sense strand
gaccaaaccuucagugacu

SEQ ID NO: 294918 - RNA, 19 nt, Homo sapiens
  misc_RNA (1)...(19): siRNA sense strand
gaucccaacucaugacuca

SEQ ID NO: 294919 - RNA, 19 nt, Homo sapiens
  misc_RNA (1)...(19): siRNA sense strand
ccagagaggaggaauauga

SEQ ID NO: 294920 - RNA, 19 nt, Homo sapiens
  misc_RNA (1)...(19): siRNA sense strand
ucaauaugcucaucaaugg

SEQ ID NO: 294921 - RNA, 19 nt, Homo sapiens
  misc_RNA (1)...(19): siRNA sense strand
cuacgagacuucagaccua

SEQ ID NO: 294922 - RNA, 19 nt, Homo sapiens
  misc_RNA (1)...(19): siRNA sense strand
ugaaaugacuucuacuagu

SEQ ID NO: 294923 - RNA, 19 nt, Homo sapiens
  misc_RNA (1)...(19): siRNA sense strand
ccaaggacuuugaagaguu

SEQ ID NO: 294924 - RNA, 19 nt, Homo sapiens
  misc_RNA (1)...(19): siRNA sense strand
agaaggaaguuaagaagga

SEQ ID NO: 294925 - RNA, 19 nt, Homo sapiens
  misc_RNA (1)...(19): siRNA sense strand
gcaaauccgugcgcaagga

SEQ ID NO: 294926 - RNA, 19 nt, Homo sapiens
  misc_RNA (1)...(19): siRNA sense strand
cuccaagacuucaucaaua

SEQ ID NO: 294927 - RNA, 19 nt, Homo sapiens
  misc_RNA (1)...(19): siRNA sense strand
uuacgagacugcagagaaa

SEQ ID NO: 294928 - RNA, 19 nt, Homo sapiens
  misc_RNA (1)...(19): siRNA sense strand
caagucagcuacuccuguu

SEQ ID NO: 294929 - RNA, 19 nt, Homo sapiens
  misc_RNA (1)...(19): siRNA sense strand
caucucagcuguuucaagu

SEQ ID NO: 294930 - RNA, 19 nt, Homo sapiens
  misc_RNA (1)...(19): siRNA sense strand
gugaugagaccaacaauga

SEQ ID NO: 294931 - RNA, 19 nt, Homo sapiens
  misc_RNA (1)...(19): siRNA sense strand
gaaguagaucucccgauuu

SEQ ID NO: 294932 - RNA, 19 nt, Homo sapiens
  misc_RNA (1)...(19): siRNA sense strand
ggacugguaccaacaaaga

SEQ ID NO: 294933 - RNA, 19 nt, Homo sapiens
  misc_RNA (1)...(19): siRNA sense strand
ggaagucccaucucccuuu

SEQ ID NO: 294934 - RNA, 19 nt, Homo sapiens
  misc_RNA (1)...(19): siRNA sense strand
gaaagaaucuguggaaaag

SEQ ID NO: 294935 - RNA, 19 nt, Homo sapiens
  misc_RNA (1)...(19): siRNA sense strand
gaagucccaucucccuuug

SEQ ID NO: 294936 - RNA, 19 nt, Homo sapiens
  misc_RNA (1)...(19): siRNA sense strand
gacacaaucuccaagacuu

SEQ ID NO: 294937 - RNA, 19 nt, Homo sapiens
  misc_RNA (1)...(19): siRNA sense strand
gcucaucaauggcggauca

SEQ ID NO: 294938 - RNA, 19 nt, Homo sapiens
  misc_RNA (1)...(19): siRNA sense strand
caugcaagauugaacugua

SEQ ID NO: 294939 - RNA, 19 nt, Homo sapiens
  misc_RNA (1)...(19): siRNA sense strand
gaucucaacaucaugguuu

SEQ ID NO: 294940 - RNA, 19 nt, Homo sapiens
  misc_RNA (1)...(19): siRNA sense strand
ccaauccucuugagugguu

SEQ ID NO: 294941 - RNA, 19 nt, Homo sapiens
  misc_RNA (1)...(19): siRNA sense strand
gaagguuauuccuaugaga

SEQ ID NO: 294942 - RNA, 19 nt, Homo sapiens
  misc_RNA (1)...(19): siRNA sense strand
caacugaaguggacuacag

SEQ ID NO: 294943 - RNA, 19 nt, Homo sapiens
  misc_RNA (1)...(19): siRNA sense strand
ccagucaucucccuacaga

SEQ ID NO: 294944 - RNA, 19 nt, Homo sapiens
  misc_RNA (1)...(19): siRNA sense strand
ucucaggaauucguaaaua

SEQ ID NO: 294945 - RNA, 19 nt, Homo sapiens
  misc_RNA (1)...(19): siRNA sense strand
gaucaagaaagaagagaaa

SEQ ID NO: 294946 - RNA, 19 nt, Homo sapiens
  misc_RNA (1)...(19): siRNA sense strand
gaagcucauccgacacuua

SEQ ID NO: 294947 - RNA, 19 nt, Homo sapiens
  misc_RNA (1)...(19): siRNA sense strand
uccaagcccugcuguuaua

SEQ ID NO: 294948 - RNA, 19 nt, Homo sapiens
  misc_RNA (1)...(19): siRNA sense strand
ccacagcaauaguaagaau

SEQ ID NO: 294949 - RNA, 19 nt, Homo sapiens
  misc_RNA (1)...(19): siRNA sense strand
uaaagaagacacuaagaug

SEQ ID NO: 294950 - RNA, 19 nt, Homo sapiens
  misc_RNA (1)...(19): siRNA sense strand
ccaaguaaguccaguuucu

SEQ ID NO: 294951 - RNA, 19 nt, Homo sapiens
  misc_RNA (1)...(19): siRNA sense strand
gauccgagucugcuuauga

SEQ ID NO: 294952 - RNA, 19 nt, Homo sapiens
  misc_RNA (1)...(19): siRNA sense strand
ugaauucagugaugccaaa

SEQ ID NO: 294953 - RNA, 19 nt, Homo sapiens
  misc_RNA (1)...(19): siRNA sense strand
aaacaccuaucaagaagga

SEQ ID NO: 294954 - RNA, 19 nt, Homo sapiens
  misc_RNA (1)...(19): siRNA sense strand
uugcagagcucgaggaaga

SEQ ID NO: 294955 - RNA, 19 nt, Homo sapiens
  misc_RNA (1)...(19): siRNA sense strand
gaugacaauuugccuggaa

SEQ ID NO: 294956 - RNA, 19 nt, Homo sapiens
  misc_RNA (1)...(19): siRNA sense strand
uaaagaagaaugcccaaga

SEQ ID NO: 294957 - RNA, 19 nt, Homo sapiens
  misc_RNA (1)...(19): siRNA sense strand
uaagaauguugauguggaa

SEQ ID NO: 294958 - RNA, 19 nt, Homo sapiens
  misc_RNA (1)...(19): siRNA sense strand
aaagaaagaucugaaagag

SEQ ID NO: 294959 - RNA, 19 nt, Homo sapiens
  misc_RNA (1)...(19): siRNA sense strand
agaauuagcugaagcauug

SEQ ID NO: 294960 - RNA, 19 nt, Homo sapiens
  misc_RNA (1)...(19): siRNA sense strand
acagacaacucaucucuua

SEQ ID NO: 294961 - RNA, 19 nt, Homo sapiens
  misc_RNA (1)...(19): siRNA sense strand
uaacaaaguugaagccauu

SEQ ID NO: 294962 - RNA, 19 nt, Homo sapiens
  misc_RNA (1)...(19): siRNA sense strand
gaacaucagauucaaguaa

SEQ ID NO: 294963 - RNA, 19 nt, Homo sapiens
  misc_RNA (1)...(19): siRNA sense strand
ggacauaucuauucuuacu

SEQ ID NO: 294964 - RNA, 19 nt, Homo sapiens
  misc_RNA (1)...(19): siRNA sense strand
guggacauaucuauucuua

SEQ ID NO: 294965 - RNA, 19 nt, Homo sapiens
  misc_RNA (1)...(19): siRNA sense strand
gauguuaguucaccacuga

SEQ ID NO: 294966 - RNA, 19 nt, Homo sapiens
  misc_RNA (1)...(19): siRNA sense strand
caagaucgguauugcauga

SEQ ID NO: 294967 - RNA, 19 nt, Homo sapiens
  misc_RNA (1)...(19): siRNA sense strand
gaaagaagaauuagcugaa

SEQ ID NO: 294968 - RNA, 19 nt, Homo sapiens
  misc_RNA (1)...(19): siRNA sense strand
gggaacagauguaaaugug

SEQ ID NO: 294969 - RNA, 19 nt, Homo sapiens
  misc_RNA (1)...(19): siRNA sense strand
ccagcugccucauacuuua

SEQ ID NO: 294970 - RNA, 19 nt, Homo sapiens
  misc_RNA (1)...(19): siRNA sense strand
ccaggaaaccagacauuua

SEQ ID NO: 294971 - RNA, 19 nt, Homo sapiens
  misc_RNA (1)...(19): siRNA sense strand
caaaugcauucuucagcua

SEQ ID NO: 294972 - RNA, 19 nt, Homo sapiens
  misc_RNA (1)...(19): siRNA sense strand
gugaacacaucaaaucauu

SEQ ID NO: 294973 - RNA, 19 nt, Homo sapiens
  misc_RNA (1)...(19): siRNA sense strand
ccucuugacuuugauguua

SEQ ID NO: 294974 - RNA, 19 nt, Homo sapiens
  misc_RNA (1)...(19): siRNA sense strand
acaaugaucucguugacaa

SEQ ID NO: 294975 - RNA, 19 nt, Homo sapiens
  misc_RNA (1)...(19): siRNA sense strand
gaaaguacaagaucgguau

SEQ ID NO: 294976 - RNA, 19 nt, Homo sapiens
  misc_RNA (1)...(19): siRNA sense strand
ugaagaagcagaacagaaa

SEQ ID NO: 294977 - RNA, 19 nt, Homo sapiens
  misc_RNA (1)...(19): siRNA sense strand
gcauugaagacuaagaaua

SEQ ID NO: 294978 - RNA, 19 nt, Homo sapiens
  misc_RNA (1)...(19): siRNA sense strand
ggaaaccagacauuuauga

SEQ ID NO: 294979 - RNA, 19 nt, Homo sapiens
  misc_RNA (1)...(19): siRNA sense strand
caagaugaaugaaaguaca

SEQ ID NO: 294980 - RNA, 19 nt, Homo sapiens
  misc_RNA (1)...(19): siRNA sense strand
gggacaaucugacauagca

SEQ ID NO: 294981 - RNA, 19 nt, Homo sapiens
  misc_RNA (1)...(19): siRNA sense strand
agagauuucuucagcguuu

SEQ ID NO: 294982 - RNA, 19 nt, Homo sapiens
  misc_RNA (1)...(19): siRNA sense strand
agagaaacguguggaauug

SEQ ID NO: 294983 - RNA, 19 nt, Homo sapiens
  misc_RNA (1)...(19): siRNA sense strand
ugugaagucugucuacaaa

SEQ ID NO: 294984 - RNA, 19 nt, Homo sapiens
  misc_RNA (1)...(19): siRNA sense strand
gcauggcacucauccacaa

SEQ ID NO: 294985 - RNA, 19 nt, Homo sapiens
  misc_RNA (1)...(19): siRNA sense strand
ugaguaaugugaagucugu

SEQ ID NO: 294986 - RNA, 19 nt, Homo sapiens
  misc_RNA (1)...(19): siRNA sense strand
gaucaucugucagcucaau

SEQ ID NO: 294987 - RNA, 19 nt, Homo sapiens
  misc_RNA (1)...(19): siRNA sense strand
agaagcccaugcuaaagua

SEQ ID NO: 294988 - RNA, 19 nt, Homo sapiens
  misc_RNA (1)...(19): siRNA sense strand
gaugauuuccugacaguga

SEQ ID NO: 294989 - RNA, 19 nt, Homo sapiens
  misc_RNA (1)...(19): siRNA sense strand
gcaaguggaucugcagucu

SEQ ID NO: 294990 - RNA, 19 nt, Homo sapiens
  misc_RNA (1)...(19): siRNA sense strand
gggaaugguuucugcauac

SEQ ID NO: 294991 - RNA, 19 nt, Homo sapiens
  misc_RNA (1)...(19): siRNA sense strand
gaagcagaacagaaacuuu

SEQ ID NO: 294992 - RNA, 19 nt, Homo sapiens
  misc_RNA (1)...(19): siRNA sense strand
gcauggccuugaugaagaa

SEQ ID NO: 294993 - RNA, 19 nt, Homo sapiens
  misc_RNA (1)...(19): siRNA sense strand
gcagacaccacacacaguu

SEQ ID NO: 294994 - RNA, 19 nt, Homo sapiens
  misc_RNA (1)...(19): siRNA sense strand
ggagauuaauguuauuggu

SEQ ID NO: 294995 - RNA, 19 nt, Homo sapiens
  misc_RNA (1)...(19): siRNA sense strand
uggcauagauauuacugaa

SEQ ID NO: 294996 - RNA, 19 nt, Homo sapiens
  misc_RNA (1)...(19): siRNA sense strand
gaagauauaguggcaagug

SEQ ID NO: 294997 - RNA, 19 nt, Homo sapiens
  misc_RNA (1)...(19): siRNA sense strand
ggcagcagcagaagauaua

SEQ ID NO: 294998 - RNA, 19 nt, Homo sapiens
  misc_RNA (1)...(19): siRNA sense strand
cagagaaacguguggaauu

SEQ ID NO: 294999 - RNA, 19 nt, Homo sapiens
  misc_RNA (1)...(19): siRNA sense strand
caucgaggcuuauguagac

SEQ ID NO: 295000 - RNA, 19 nt, Homo sapiens
  misc_RNA (1)...(19): siRNA sense strand
ugaaagacccugagacaag

SEQ ID NO: 295001 - RNA, 19 nt, Homo sapiens
  misc_RNA (1)...(19): siRNA sense strand
ggacauggcggugcuaaag

SEQ ID NO: 295002 - RNA, 19 nt, Homo sapiens
  misc_RNA (1)...(19): siRNA sense strand
ggacuggcaucguggacau

SEQ ID NO: 295003 - RNA, 19 nt, Homo sapiens
  misc_RNA (1)...(19): siRNA sense strand
gaaaauguuggcauagaua

SEQ ID NO: 295004 - RNA, 19 nt, Homo sapiens
  misc_RNA (1)...(19): siRNA sense strand
gaagggcuccagugcaguu

SEQ ID NO: 295005 - RNA, 19 nt, Homo sapiens
  misc_RNA (1)...(19): siRNA sense strand
ugacuuugauguuaguuca

SEQ ID NO: 295006 - RNA, 19 nt, Homo sapiens
  misc_RNA (1)...(19): siRNA sense strand
caggaaaccagacauuuau

SEQ ID NO: 295007 - RNA, 19 nt, Homo sapiens
  misc_RNA (1)...(19): siRNA sense strand
ggacagagugaauguuaca

SEQ ID NO: 295008 - RNA, 19 nt, Homo sapiens
  misc_RNA (1)...(19): siRNA sense strand
aaguggaucugcagucuga

SEQ ID NO: 295009 - RNA, 19 nt, Homo sapiens
  misc_RNA (1)...(19): siRNA sense strand
caaucugacauagcaauua

SEQ ID NO: 295010 - RNA, 19 nt, Homo sapiens
  misc_RNA (1)...(19): siRNA sense strand
caaaacaccagcucuaaaa

SEQ ID NO: 295011 - RNA, 19 nt, Homo sapiens
  misc_RNA (1)...(19): siRNA sense strand
guaaacggaaagaagaauu

SEQ ID NO: 295012 - RNA, 19 nt, Homo sapiens
  misc_RNA (1)...(19): siRNA sense strand
uaagaccauucaacgcauu

SEQ ID NO: 295013 - RNA, 19 nt, Homo sapiens
  misc_RNA (1)...(19): siRNA sense strand
agaagaaaauguuggcaua

SEQ ID NO: 295014 - RNA, 19 nt, Homo sapiens
  misc_RNA (1)...(19): siRNA sense strand
cgacagcuagagucauuaa

SEQ ID NO: 295015 - RNA, 19 nt, Homo sapiens
  misc_RNA (1)...(19): siRNA sense strand
ugaggaagauuggcaguag

SEQ ID NO: 295016 - RNA, 19 nt, Homo sapiens
  misc_RNA (1)...(19): siRNA sense strand
gacaagaugaaugaaagua

SEQ ID NO: 295017 - RNA, 19 nt, Homo sapiens
  misc_RNA (1)...(19): siRNA sense strand
ggaauugcuuaaggaacuu

SEQ ID NO: 295018 - RNA, 19 nt, Homo sapiens
  misc_RNA (1)...(19): siRNA sense strand
gaaaacggaugcaaaacgu

SEQ ID NO: 295019 - RNA, 19 nt, Homo sapiens
  misc_RNA (1)...(19): siRNA sense strand
guagacaugaggaagauug

SEQ ID NO: 295020 - RNA, 19 nt, Homo sapiens
  misc_RNA (1)...(19): siRNA sense strand
gacaacggcaucugcugua

SEQ ID NO: 295021 - RNA, 19 nt, Homo sapiens
  misc_RNA (1)...(19): siRNA sense strand
guacagacaacucaucucu

SEQ ID NO: 295022 - RNA, 19 nt, Homo sapiens
  misc_RNA (1)...(19): siRNA sense strand
gcaaauuucgggcugagau

SEQ ID NO: 295023 - RNA, 19 nt, Homo sapiens
  misc_RNA (1)...(19): siRNA sense strand
gaauguuacaggcaucuau

SEQ ID NO: 295024 - RNA, 19 nt, Homo sapiens
  misc_RNA (1)...(19): siRNA sense strand
ccaagagugaguaauguga

SEQ ID NO: 295025 - RNA, 19 nt, Homo sapiens
  misc_RNA (1)...(19): siRNA sense strand
gcuaaaguaagauugucua

SEQ ID NO: 295026 - RNA, 19 nt, Homo sapiens
  misc_RNA (1)...(19): siRNA sense strand
gcugccucauacuuuauua

SEQ ID NO: 295027 - RNA, 19 nt, Homo sapiens
  misc_RNA (1)...(19): siRNA sense strand
agauauuacugaaccucua

SEQ ID NO: 295028 - RNA, 19 nt, Homo sapiens
  misc_RNA (1)...(19): siRNA sense strand
ccuggcagaugaugauuuc

SEQ ID NO: 295029 - RNA, 19 nt, Homo sapiens
  misc_RNA (1)...(19): siRNA sense strand
gaaaccagacauuuaugag

SEQ ID NO: 295030 - RNA, 19 nt, Homo sapiens
  misc_RNA (1)...(19): siRNA sense strand
aaacguguggaauugcuua

SEQ ID NO: 295031 - RNA, 19 nt, Homo sapiens
  misc_RNA (1)...(19): siRNA sense strand
gaccagcucaucaccauca

SEQ ID NO: 295032 - RNA, 19 nt, Homo sapiens
  misc_RNA (1)...(19): siRNA sense strand
uacugaaccucuauacaug

SEQ ID NO: 295033 - RNA, 19 nt, Homo sapiens
  misc_RNA (1)...(19): siRNA sense strand
uuacugaaccucuauacau

SEQ ID NO: 295034 - RNA, 19 nt, Homo sapiens
  misc_RNA (1)...(19): siRNA sense strand
gauauuacugaaccucuau

SEQ ID NO: 295035 - RNA, 19 nt, Homo sapiens
  misc_RNA (1)...(19): siRNA sense strand
gagucucaguggaauccua

SEQ ID NO: 295036 - RNA, 19 nt, Homo sapiens
  misc_RNA (1)...(19): siRNA sense strand
guaaugaaagacccugaga

SEQ ID NO: 295037 - RNA, 19 nt, Homo sapiens
  misc_RNA (1)...(19): siRNA sense strand
cugcguacguaaugaaaga

SEQ ID NO: 295038 - RNA, 19 nt, Homo sapiens
  misc_RNA (1)...(19): siRNA sense strand
ugucauucauuaucggaaa

SEQ ID NO: 295039 - RNA, 19 nt, Homo sapiens
  misc_RNA (1)...(19): siRNA sense strand
gaauaugagaaaccugaau

SEQ ID NO: 295040 - RNA, 19 nt, Homo sapiens
  misc_RNA (1)...(19): siRNA sense strand
aaagaagaauuagcugaag

SEQ ID NO: 295041 - RNA, 19 nt, Homo sapiens
  misc_RNA (1)...(19): siRNA sense strand
cuucagcuaucccucuuga

SEQ ID NO: 295042 - RNA, 19 nt, Homo sapiens
  misc_RNA (1)...(19): siRNA sense strand
ucgacaagaugaaugaaag

SEQ ID NO: 295043 - RNA, 19 nt, Homo sapiens
  misc_RNA (1)...(19): siRNA sense strand
acaagcagaugaucaagcu

SEQ ID NO: 295044 - RNA, 19 nt, Homo sapiens
  misc_RNA (1)...(19): siRNA sense strand
ccacaaccgcucccucuuc

SEQ ID NO: 295045 - RNA, 19 nt, Homo sapiens
  misc_RNA (1)...(19): siRNA sense strand
gcaagugagcagucucuag

SEQ ID NO: 295046 - RNA, 19 nt, Homo sapiens
  misc_RNA (1)...(19): siRNA sense strand
gcauuuaugaacaugaaga

SEQ ID NO: 295047 - RNA, 19 nt, Homo sapiens
  misc_RNA (1)...(19): siRNA sense strand
uuaguucaccacugacaua

SEQ ID NO: 295048 - RNA, 19 nt, Homo sapiens
  misc_RNA (1)...(19): siRNA sense strand
aagauauaguggcaaguga

SEQ ID NO: 295049 - RNA, 19 nt, Homo sapiens
  misc_RNA (1)...(19): siRNA sense strand
gaucaagcuucaggagucu

SEQ ID NO: 295050 - RNA, 19 nt, Homo sapiens
  misc_RNA (1)...(19): siRNA sense strand
gcaaaacaccagcucuaaa

SEQ ID NO: 295051 - RNA, 19 nt, Homo sapiens
  misc_RNA (1)...(19): siRNA sense strand
ugaagccauugauguggaa

SEQ ID NO: 295052 - RNA, 19 nt, Homo sapiens
  misc_RNA (1)...(19): siRNA sense strand
ucucaucgaggcuuaugua

SEQ ID NO: 295053 - RNA, 19 nt, Homo sapiens
  misc_RNA (1)...(19): siRNA sense strand
gcuggacccucaggacgaa

SEQ ID NO: 295054 - RNA, 19 nt, Homo sapiens
  misc_RNA (1)...(19): siRNA sense strand
ugaaugaaaguacaagauc

SEQ ID NO: 295055 - RNA, 19 nt, Homo sapiens
  misc_RNA (1)...(19): siRNA sense strand
gaugaguucgacaagauga

SEQ ID NO: 295056 - RNA, 19 nt, Homo sapiens
  misc_RNA (1)...(19): siRNA sense strand
aaaccagacauuuaugaga

SEQ ID NO: 295057 - RNA, 19 nt, Homo sapiens
  misc_RNA (1)...(19): siRNA sense strand
uggaauugcuuaaggaacu

SEQ ID NO: 295058 - RNA, 19 nt, Homo sapiens
  misc_RNA (1)...(19): siRNA sense strand
caagagugaguaaugugaa

SEQ ID NO: 295059 - RNA, 19 nt, Homo sapiens
  misc_RNA (1)...(19): siRNA sense strand
agaauuagcugaagcauug

SEQ ID NO: 295060 - RNA, 19 nt, Homo sapiens
  misc_RNA (1)...(19): siRNA sense strand
acagacaacucaucucuua

SEQ ID NO: 295061 - RNA, 19 nt, Homo sapiens
  misc_RNA (1)...(19): siRNA sense strand
uaacaaaguugaagccauu

SEQ ID NO: 295062 - RNA, 19 nt, Homo sapiens
  misc_RNA (1)...(19): siRNA sense strand
gaacaucagauucaaguaa

SEQ ID NO: 295063 - RNA, 19 nt, Homo sapiens
  misc_RNA (1)...(19): siRNA sense strand
ggacauaucuauucuuacu

SEQ ID NO: 295064 - RNA, 19 nt, Homo sapiens
  misc_RNA (1)...(19): siRNA sense strand
guggacauaucuauucuua

SEQ ID NO: 295065 - RNA, 19 nt, Homo sapiens
  misc_RNA (1)...(19): siRNA sense strand
gauguuaguucaccacuga

SEQ ID NO: 295066 - RNA, 19 nt, Homo sapiens
  misc_RNA (1)...(19): siRNA sense strand
caagaucgguauugcauga

SEQ ID NO: 295067 - RNA, 19 nt, Homo sapiens
  misc_RNA (1)...(19): siRNA sense strand
gaaagaagaauuagcugaa

SEQ ID NO: 295068 - RNA, 19 nt, Homo sapiens
  misc_RNA (1)...(19): siRNA sense strand
gggaacagauguaaaugug

SEQ ID NO: 295069 - RNA, 19 nt, Homo sapiens
  misc_RNA (1)...(19): siRNA sense strand
ccagcugccucauacuuua

SEQ ID NO: 295070 - RNA, 19 nt, Homo sapiens
  misc_RNA (1)...(19): siRNA sense strand
ccaggaaaccagacauuua

SEQ ID NO: 295071 - RNA, 19 nt, Homo sapiens
  misc_RNA (1)...(19): siRNA sense strand
caaaugcauucuucagcua

SEQ ID NO: 295072 - RNA, 19 nt, Homo sapiens
  misc_RNA (1)...(19): siRNA sense strand
gugaacacaucaaaucauu

SEQ ID NO: 295073 - RNA, 19 nt, Homo sapiens
  misc_RNA (1)...(19): siRNA sense strand
ccucuugacuuugauguua

SEQ ID NO: 295074 - RNA, 19 nt, Homo sapiens
  misc_RNA (1)...(19): siRNA sense strand
acaaugaucucguugacaa

SEQ ID NO: 295075 - RNA, 19 nt, Homo sapiens
  misc_RNA (1)...(19): siRNA sense strand
gaaaguacaagaucgguau

SEQ ID NO: 295076 - RNA, 19 nt, Homo sapiens
  misc_RNA (1)...(19): siRNA sense strand
ugaagaagcagaacagaaa

SEQ ID NO: 295077 - RNA, 19 nt, Homo sapiens
  misc_RNA (1)...(19): siRNA sense strand
gcauugaagacuaagaaua

SEQ ID NO: 295078 - RNA, 19 nt, Homo sapiens
  misc_RNA (1)...(19): siRNA sense strand
ggaaaccagacauuuauga

SEQ ID NO: 295079 - RNA, 19 nt, Homo sapiens
  misc_RNA (1)...(19): siRNA sense strand
caagaugaaugaaaguaca

SEQ ID NO: 295080 - RNA, 19 nt, Homo sapiens
  misc_RNA (1)...(19): siRNA sense strand
gggacaaucugacauagca

SEQ ID NO: 295081 - RNA, 19 nt, Homo sapiens
  misc_RNA (1)...(19): siRNA sense strand
agagauuucuucagcguuu

SEQ ID NO: 295082 - RNA, 19 nt, Homo sapiens
  misc_RNA (1)...(19): siRNA sense strand
agagaaacguguggaauug

SEQ ID NO: 295083 - RNA, 19 nt, Homo sapiens
  misc_RNA (1)...(19): siRNA sense strand
ugugaagucugucuacaaa

SEQ ID NO: 295084 - RNA, 19 nt, Homo sapiens
  misc_RNA (1)...(19): siRNA sense strand
gcauggcacucauccacaa

SEQ ID NO: 295085 - RNA, 19 nt, Homo sapiens
  misc_RNA (1)...(19): siRNA sense strand
ugaguaaugugaagucugu

SEQ ID NO: 295086 - RNA, 19 nt, Homo sapiens
  misc_RNA (1)...(19): siRNA sense strand
gaucaucugucagcucaau

SEQ ID NO: 295087 - RNA, 19 nt, Homo sapiens
  misc_RNA (1)...(19): siRNA sense strand
agaagcccaugcuaaagua

SEQ ID NO: 295088 - RNA, 19 nt, Homo sapiens
  misc_RNA (1)...(19): siRNA sense strand
gaugauuuccugacaguga

SEQ ID NO: 295089 - RNA, 19 nt, Homo sapiens
  misc_RNA (1)...(19): siRNA sense strand
gcaaguggaucugcagucu

SEQ ID NO: 295090 - RNA, 19 nt, Homo sapiens
  misc_RNA (1)...(19): siRNA sense strand
gggaaugguuucugcauac

SEQ ID NO: 295091 - RNA, 19 nt, Homo sapiens
  misc_RNA (1)...(19): siRNA sense strand
gaagcagaacagaaacuuu

SEQ ID NO: 295092 - RNA, 19 nt, Homo sapiens
  misc_RNA (1)...(19): siRNA sense strand
gcauggccuugaugaagaa

SEQ ID NO: 295093 - RNA, 19 nt, Homo sapiens
  misc_RNA (1)...(19): siRNA sense strand
gcagacaccacacacaguu

SEQ ID NO: 295094 - RNA, 19 nt, Homo sapiens
  misc_RNA (1)...(19): siRNA sense strand
ggagauuaauguuauuggu

SEQ ID NO: 295095 - RNA, 19 nt, Homo sapiens
  misc_RNA (1)...(19): siRNA sense strand
uggcauagauauuacugaa

SEQ ID NO: 295096 - RNA, 19 nt, Homo sapiens
  misc_RNA (1)...(19): siRNA sense strand
gaagauauaguggcaagug

SEQ ID NO: 295097 - RNA, 19 nt, Homo sapiens
  misc_RNA (1)...(19): siRNA sense strand
ggcagcagcagaagauaua

SEQ ID NO: 295098 - RNA, 19 nt, Homo sapiens
  misc_RNA (1)...(19): siRNA sense strand
cagagaaacguguggaauu

SEQ ID NO: 295099 - RNA, 19 nt, Homo sapiens
  misc_RNA (1)...(19): siRNA sense strand
caucgaggcuuauguagac

SEQ ID NO: 295100 - RNA, 19 nt, Homo sapiens
  misc_RNA (1)...(19): siRNA sense strand
ugaaagacccugagacaag

SEQ ID NO: 295101 - RNA, 19 nt, Homo sapiens
  misc_RNA (1)...(19): siRNA sense strand
ggacauggcggugcuaaag

SEQ ID NO: 295102 - RNA, 19 nt, Homo sapiens
  misc_RNA (1)...(19): siRNA sense strand
ggacuggcaucguggacau

SEQ ID NO: 295103 - RNA, 19 nt, Homo sapiens
  misc_RNA (1)...(19): siRNA sense strand
gaaaauguuggcauagaua

SEQ ID NO: 295104 - RNA, 19 nt, Homo sapiens
  misc_RNA (1)...(19): siRNA sense strand
gaagggcuccagugcaguu

SEQ ID NO: 295105 - RNA, 19 nt, Homo sapiens
  misc_RNA (1)...(19): siRNA sense strand
ugacuuugauguuaguuca

SEQ ID NO: 295106 - RNA, 19 nt, Homo sapiens
  misc_RNA (1)...(19): siRNA sense strand
caggaaaccagacauuuau

SEQ ID NO: 295107 - RNA, 19 nt, Homo sapiens
  misc_RNA (1)...(19): siRNA sense strand
ggacagagugaauguuaca

SEQ ID NO: 295108 - RNA, 19 nt, Homo sapiens
  misc_RNA (1)...(19): siRNA sense strand
aaguggaucugcagucuga

SEQ ID NO: 295109 - RNA, 19 nt, Homo sapiens
  misc_RNA (1)...(19): siRNA sense strand
caaucugacauagcaauua

SEQ ID NO: 295110 - RNA, 19 nt, Homo sapiens
  misc_RNA (1)...(19): siRNA sense strand
caaaacaccagcucuaaaa

SEQ ID NO: 295111 - RNA, 19 nt, Homo sapiens
  misc_RNA (1)...(19): siRNA sense strand
guaaacggaaagaagaauu

SEQ ID NO: 295112 - RNA, 19 nt, Homo sapiens
  misc_RNA (1)...(19): siRNA sense strand
uaagaccauucaacgcauu

SEQ ID NO: 295113 - RNA, 19 nt, Homo sapiens
  misc_RNA (1)...(19): siRNA sense strand
agaagaaaauguuggcaua

SEQ ID NO: 295114 - RNA, 19 nt, Homo sapiens
  misc_RNA (1)...(19): siRNA sense strand
cgacagcuagagucauuaa

SEQ ID NO: 295115 - RNA, 19 nt, Homo sapiens
  misc_RNA (1)...(19): siRNA sense strand
ugaggaagauuggcaguag

SEQ ID NO: 295116 - RNA, 19 nt, Homo sapiens
  misc_RNA (1)...(19): siRNA sense strand
gacaagaugaaugaaagua

SEQ ID NO: 295117 - RNA, 19 nt, Homo sapiens
  misc_RNA (1)...(19): siRNA sense strand
ggaauugcuuaaggaacuu

SEQ ID NO: 295118 - RNA, 19 nt, Homo sapiens
  misc_RNA (1)...(19): siRNA sense strand
gaaaacggaugcaaaacgu

SEQ ID NO: 295119 - RNA, 19 nt, Homo sapiens
  misc_RNA (1)...(19): siRNA sense strand
guagacaugaggaagauug

SEQ ID NO: 295120 - RNA, 19 nt, Homo sapiens
  misc_RNA (1)...(19): siRNA sense strand
gacaacggcaucugcugua

SEQ ID NO: 295121 - RNA, 19 nt, Homo sapiens
  misc_RNA (1)...(19): siRNA sense strand
guacagacaacucaucucu

SEQ ID NO: 295122 - RNA, 19 nt, Homo sapiens
  misc_RNA (1)...(19): siRNA sense strand
gcaaauuucgggcugagau

SEQ ID NO: 295123 - RNA, 19 nt, Homo sapiens
  misc_RNA (1)...(19): siRNA sense strand
gaauguuacaggcaucuau

SEQ ID NO: 295124 - RNA, 19 nt, Homo sapiens
  misc_RNA (1)...(19): siRNA sense strand
ccaagagugaguaauguga

SEQ ID NO: 295125 - RNA, 19 nt, Homo sapiens
  misc_RNA (1)...(19): siRNA sense strand
gcuaaaguaagauugucua

SEQ ID NO: 295126 - RNA, 19 nt, Homo sapiens
  misc_RNA (1)...(19): siRNA sense strand
gcugccucauacuuuauua

SEQ ID NO: 295127 - RNA, 19 nt, Homo sapiens
  misc_RNA (1)...(19): siRNA sense strand
agauauuacugaaccucua

SEQ ID NO: 295128 - RNA, 19 nt, Homo sapiens
  misc_RNA (1)...(19): siRNA sense strand
ccuggcagaugaugauuuc

SEQ ID NO: 295129 - RNA, 19 nt, Homo sapiens
  misc_RNA (1)...(19): siRNA sense strand
gaaaccagacauuuaugag

SEQ ID NO: 295130 - RNA, 19 nt, Homo sapiens
  misc_RNA (1)...(19): siRNA sense strand
aaacguguggaauugcuua

SEQ ID NO: 295131 - RNA, 19 nt, Homo sapiens
  misc_RNA (1)...(19): siRNA sense strand
gaccagcucaucaccauca

SEQ ID NO: 295132 - RNA, 19 nt, Homo sapiens
  misc_RNA (1)...(19): siRNA sense strand
uacugaaccucuauacaug

SEQ ID NO: 295133 - RNA, 19 nt, Homo sapiens
  misc_RNA (1)...(19): siRNA sense strand
uuacugaaccucuauacau

SEQ ID NO: 295134 - RNA, 19 nt, Homo sapiens
  misc_RNA (1)...(19): siRNA sense strand
gauauuacugaaccucuau

SEQ ID NO: 295135 - RNA, 19 nt, Homo sapiens
  misc_RNA (1)...(19): siRNA sense strand
gagucucaguggaauccua

SEQ ID NO: 295136 - RNA, 19 nt, Homo sapiens
  misc_RNA (1)...(19): siRNA sense strand
guaaugaaagacccugaga

SEQ ID NO: 295137 - RNA, 19 nt, Homo sapiens
  misc_RNA (1)...(19): siRNA sense strand
cugcguacguaaugaaaga

SEQ ID NO: 295138 - RNA, 19 nt, Homo sapiens
  misc_RNA (1)...(19): siRNA sense strand
ugucauucauuaucggaaa

SEQ ID NO: 295139 - RNA, 19 nt, Homo sapiens
  misc_RNA (1)...(19): siRNA sense strand
gaauaugagaaaccugaau

SEQ ID NO: 295140 - RNA, 19 nt, Homo sapiens
  misc_RNA (1)...(19): siRNA sense strand
aaagaagaauuagcugaag

SEQ ID NO: 295141 - RNA, 19 nt, Homo sapiens
  misc_RNA (1)...(19): siRNA sense strand
cuucagcuaucccucuuga

SEQ ID NO: 295142 - RNA, 19 nt, Homo sapiens
  misc_RNA (1)...(19): siRNA sense strand
ucgacaagaugaaugaaag

SEQ ID NO: 295143 - RNA, 19 nt, Homo sapiens
  misc_RNA (1)...(19): siRNA sense strand
acaagcagaugaucaagcu

SEQ ID NO: 295144 - RNA, 19 nt, Homo sapiens
  misc_RNA (1)...(19): siRNA sense strand
ccacaaccgcucccucuuc

SEQ ID NO: 295145 - RNA, 19 nt, Homo sapiens
  misc_RNA (1)...(19): siRNA sense strand
gcaagugagcagucucuag

SEQ ID NO: 295146 - RNA, 19 nt, Homo sapiens
  misc_RNA (1)...(19): siRNA sense strand
gcauuuaugaacaugaaga

SEQ ID NO: 295147 - RNA, 19 nt, Homo sapiens
  misc_RNA (1)...(19): siRNA sense strand
uuaguucaccacugacaua

SEQ ID NO: 295148 - RNA, 19 nt, Homo sapiens
  misc_RNA (1)...(19): siRNA sense strand
aagauauaguggcaaguga

SEQ ID NO: 295149 - RNA, 19 nt, Homo sapiens
  misc_RNA (1)...(19): siRNA sense strand
gaucaagcuucaggagucu

SEQ ID NO: 295150 - RNA, 19 nt, Homo sapiens
  misc_RNA (1)...(19): siRNA sense strand
gcaaaacaccagcucuaaa

SEQ ID NO: 295151 - RNA, 19 nt, Homo sapiens
  misc_RNA (1)...(19): siRNA sense strand
ugaagccauugauguggaa

SEQ ID NO: 295152 - RNA, 19 nt, Homo sapiens
  misc_RNA (1)...(19): siRNA sense strand
ucucaucgaggcuuaugua

SEQ ID NO: 295153 - RNA, 19 nt, Homo sapiens
  misc_RNA (1)...(19): siRNA sense strand
gcuggacccucaggacgaa

SEQ ID NO: 295154 - RNA, 19 nt, Homo sapiens
  misc_RNA (1)...(19): siRNA sense strand
ugaaugaaaguacaagauc

SEQ ID NO: 295155 - RNA, 19 nt, Homo sapiens
  misc_RNA (1)...(19): siRNA sense strand
gaugaguucgacaagauga

SEQ ID NO: 295156 - RNA, 19 nt, Homo sapiens
  misc_RNA (1)...(19): siRNA sense strand
aaaccagacauuuaugaga

SEQ ID NO: 295157 - RNA, 19 nt, Homo sapiens
  misc_RNA (1)...(19): siRNA sense strand
uggaauugcuuaaggaacu

SEQ ID NO: 295158 - RNA, 19 nt, Homo sapiens
  misc_RNA (1)...(19): siRNA sense strand
caagagugaguaaugugaa

SEQ ID NO: 295159 - RNA, 19 nt, Homo sapiens
  misc_RNA (1)...(19): siRNA sense strand
gaaaggaaguugguguuua

SEQ ID NO: 295160 - RNA, 19 nt, Homo sapiens
  misc_RNA (1)...(19): siRNA sense strand
caaaggaacugacagaaga

SEQ ID NO: 295161 - RNA, 19 nt, Homo sapiens
  misc_RNA (1)...(19): siRNA sense strand
ggaaauggaucugucuuug

SEQ ID NO: 295162 - RNA, 19 nt, Homo sapiens
  misc_RNA (1)...(19): siRNA sense strand
ggaaguugguguuuaugaa

SEQ ID NO: 295163 - RNA, 19 nt, Homo sapiens
  misc_RNA (1)...(19): siRNA sense strand
gaaggucucccuauuaaug

SEQ ID NO: 295164 - RNA, 19 nt, Homo sapiens
  misc_RNA (1)...(19): siRNA sense strand
aauaagaccuggaaguuug

SEQ ID NO: 295165 - RNA, 19 nt, Homo sapiens
  misc_RNA (1)...(19): siRNA sense strand
gaauaagaccuggaaguuu

SEQ ID NO: 295166 - RNA, 19 nt, Homo sapiens
  misc_RNA (1)...(19): siRNA sense strand
guaaagaucagccuauaau

SEQ ID NO: 295167 - RNA, 19 nt, Homo sapiens
  misc_RNA (1)...(19): siRNA sense strand
gggaaggcauggagagaaa

SEQ ID NO: 295168 - RNA, 19 nt, Homo sapiens
  misc_RNA (1)...(19): siRNA sense strand
aaaggaaguugguguuuau

SEQ ID NO: 295169 - RNA, 19 nt, Homo sapiens
  misc_RNA (1)...(19): siRNA sense strand
uggagcagcuggucaaauu

SEQ ID NO: 295170 - RNA, 19 nt, Homo sapiens
  misc_RNA (1)...(19): siRNA sense strand
gaagucaguuaagguuauu

SEQ ID NO: 295171 - RNA, 19 nt, Homo sapiens
  misc_RNA (1)...(19): siRNA sense strand
gugcagccuuagauaaaua

SEQ ID NO: 295172 - RNA, 19 nt, Homo sapiens
  misc_RNA (1)...(19): siRNA sense strand
gaaauugcaaggaaaggaa

SEQ ID NO: 295173 - RNA, 19 nt, Homo sapiens
  misc_RNA (1)...(19): siRNA sense strand
uugaaggucucccuauuaa

SEQ ID NO: 295174 - RNA, 19 nt, Homo sapiens
  misc_RNA (1)...(19): siRNA sense strand
gagaauuugucacgacugu

SEQ ID NO: 295175 - RNA, 19 nt, Homo sapiens
  misc_RNA (1)...(19): siRNA sense strand
caucaaggcucgaaaacua

SEQ ID NO: 295176 - RNA, 19 nt, Homo sapiens
  misc_RNA (1)...(19): siRNA sense strand
guugaaggucucccuauua

SEQ ID NO: 295177 - RNA, 19 nt, Homo sapiens
  misc_RNA (1)...(19): siRNA sense strand
ggaaaggaaguugguguuu

SEQ ID NO: 295178 - RNA, 19 nt, Homo sapiens
  misc_RNA (1)...(19): siRNA sense strand
caagaagucaguuaagguu

SEQ ID NO: 295179 - RNA, 19 nt, Homo sapiens
  misc_RNA (1)...(19): siRNA sense strand
caaauugcucuuaaacuug

SEQ ID NO: 295180 - RNA, 19 nt, Homo sapiens
  misc_RNA (1)...(19): siRNA sense strand
gcaaaggaacugacagaag

SEQ ID NO: 295181 - RNA, 19 nt, Homo sapiens
  misc_RNA (1)...(19): siRNA sense strand
gguaaagaucagccuauaa

SEQ ID NO: 295182 - RNA, 19 nt, Homo sapiens
  misc_RNA (1)...(19): siRNA sense strand
aagcucaaauugcucuuaa

SEQ ID NO: 295183 - RNA, 19 nt, Homo sapiens
  misc_RNA (1)...(19): siRNA sense strand
agaagucaguuaagguuau

SEQ ID NO: 295184 - RNA, 19 nt, Homo sapiens
  misc_RNA (1)...(19): siRNA sense strand
aaagaucagccuauaauuc

SEQ ID NO: 295185 - RNA, 19 nt, Homo sapiens
  misc_RNA (1)...(19): siRNA sense strand
augaagcucugaaagauga

SEQ ID NO: 295186 - RNA, 19 nt, Homo sapiens
  misc_RNA (1)...(19): siRNA sense strand
guacaguauuggaaaugga

SEQ ID NO: 295187 - RNA, 19 nt, Homo sapiens
  misc_RNA (1)...(19): siRNA sense strand
caguuaagguuauuguugu

SEQ ID NO: 295188 - RNA, 19 nt, Homo sapiens
  misc_RNA (1)...(19): siRNA sense strand
ggaucuuacugcaaaggaa

SEQ ID NO: 295189 - RNA, 19 nt, Homo sapiens
  misc_RNA (1)...(19): siRNA sense strand
ccuaugguguuccugauga

SEQ ID NO: 295190 - RNA, 19 nt, Homo sapiens
  misc_RNA (1)...(19): siRNA sense strand
ccauggguguuaucucuga

SEQ ID NO: 295191 - RNA, 19 nt, Homo sapiens
  misc_RNA (1)...(19): siRNA sense strand
ccaaucagaguccuuguga

SEQ ID NO: 295192 - RNA, 19 nt, Homo sapiens
  misc_RNA (1)...(19): siRNA sense strand
gaucagccuauaauucuug

SEQ ID NO: 295193 - RNA, 19 nt, Homo sapiens
  misc_RNA (1)...(19): siRNA sense strand
gaaauggaucugucuuugg

SEQ ID NO: 295194 - RNA, 19 nt, Homo sapiens
  misc_RNA (1)...(19): siRNA sense strand
gaaagcaaaugugaaaauc

SEQ ID NO: 295195 - RNA, 19 nt, Homo sapiens
  misc_RNA (1)...(19): siRNA sense strand
aaauggaucugucuuuggu

SEQ ID NO: 295196 - RNA, 19 nt, Homo sapiens
  misc_RNA (1)...(19): siRNA sense strand
gaucacaaccgagcuaaag

SEQ ID NO: 295197 - RNA, 19 nt, Homo sapiens
  misc_RNA (1)...(19): siRNA sense strand
caucgcaacagauaaagaa

SEQ ID NO: 295198 - RNA, 19 nt, Homo sapiens
  misc_RNA (1)...(19): siRNA sense strand
ugguaaagaucagccuaua

SEQ ID NO: 295199 - RNA, 19 nt, Homo sapiens
  misc_RNA (1)...(19): siRNA sense strand
aaggugaaauugcaaggaa

SEQ ID NO: 295200 - RNA, 19 nt, Homo sapiens
  misc_RNA (1)...(19): siRNA sense strand
ucaguugcuugacucguuu

SEQ ID NO: 295201 - RNA, 19 nt, Homo sapiens
  misc_RNA (1)...(19): siRNA sense strand
gggugcagccuuagauaaa

SEQ ID NO: 295202 - RNA, 19 nt, Homo sapiens
  misc_RNA (1)...(19): siRNA sense strand
gcucuuaaacuugguguga

SEQ ID NO: 295203 - RNA, 19 nt, Homo sapiens
  misc_RNA (1)...(19): siRNA sense strand
agaauaagaccuggaaguu

SEQ ID NO: 295204 - RNA, 19 nt, Homo sapiens
  misc_RNA (1)...(19): siRNA sense strand
uuaugaagcucugaaagau

SEQ ID NO: 295205 - RNA, 19 nt, Homo sapiens
  misc_RNA (1)...(19): siRNA sense strand
gaaaagauuuacugaaagc

SEQ ID NO: 295206 - RNA, 19 nt, Homo sapiens
  misc_RNA (1)...(19): siRNA sense strand
gaaguugguguuuaugaag

SEQ ID NO: 295207 - RNA, 19 nt, Homo sapiens
  misc_RNA (1)...(19): siRNA sense strand
gaaaccauuccucgacuca

SEQ ID NO: 295208 - RNA, 19 nt, Homo sapiens
  misc_RNA (1)...(19): siRNA sense strand
ucaguuaagguuauuguug

SEQ ID NO: 295209 - RNA, 19 nt, Homo sapiens
  misc_RNA (1)...(19): siRNA sense strand
uaaauacgccaagaaguca

SEQ ID NO: 295210 - RNA, 19 nt, Homo sapiens
  misc_RNA (1)...(19): siRNA sense strand
uuacugaaagcaaauguga

SEQ ID NO: 295211 - RNA, 19 nt, Homo sapiens
  misc_RNA (1)...(19): siRNA sense strand
ucaagaauaagaccuggaa

SEQ ID NO: 295212 - RNA, 19 nt, Homo sapiens
  misc_RNA (1)...(19): siRNA sense strand
ggugcagccuuagauaaau

SEQ ID NO: 295213 - RNA, 19 nt, Homo sapiens
  misc_RNA (1)...(19): siRNA sense strand
guccauggguguuaucucu

SEQ ID NO: 295214 - RNA, 19 nt, Homo sapiens
  misc_RNA (1)...(19): siRNA sense strand
agggacaucugguuuggaa

SEQ ID NO: 295215 - RNA, 19 nt, Homo sapiens
  misc_RNA (1)...(19): siRNA sense strand
gcaaggaaaggaaguuggu

SEQ ID NO: 295216 - RNA, 19 nt, Homo sapiens
  misc_RNA (1)...(19): siRNA sense strand
gccaagaagucaguuaagg

SEQ ID NO: 295217 - RNA, 19 nt, Homo sapiens
  misc_RNA (1)...(19): siRNA sense strand
gauaaauacgccaagaagu

SEQ ID NO: 295218 - RNA, 19 nt, Homo sapiens
  misc_RNA (1)...(19): siRNA sense strand
cuauaauucuugugcuguu

SEQ ID NO: 295219 - RNA, 19 nt, Homo sapiens
  misc_RNA (1)...(19): siRNA sense strand
gaucugcucuacucauucc

SEQ ID NO: 295220 - RNA, 19 nt, Homo sapiens
  misc_RNA (1)...(19): siRNA sense strand
ugugacugcuaaugaugua

SEQ ID NO: 295221 - RNA, 19 nt, Homo sapiens
  misc_RNA (1)...(19): siRNA sense strand
ggauguggccauucuugug

SEQ ID NO: 295222 - RNA, 19 nt, Homo sapiens
  misc_RNA (1)...(19): siRNA sense strand
uguugaaggucucccuauu

SEQ ID NO: 295223 - RNA, 19 nt, Homo sapiens
  misc_RNA (1)...(19): siRNA sense strand
cugaugaucugcucuacuc

SEQ ID NO: 295224 - RNA, 19 nt, Homo sapiens
  misc_RNA (1)...(19): siRNA sense strand
gcuaaugauguaaagaaug

SEQ ID NO: 295225 - RNA, 19 nt, Homo sapiens
  misc_RNA (1)...(19): siRNA sense strand
uuagauaaauacgccaaga

SEQ ID NO: 295226 - RNA, 19 nt, Homo sapiens
  misc_RNA (1)...(19): siRNA sense strand
ugucaucgcaacagauaaa

SEQ ID NO: 295227 - RNA, 19 nt, Homo sapiens
  misc_RNA (1)...(19): siRNA sense strand
cagcuggucaaauugcaua

SEQ ID NO: 295228 - RNA, 19 nt, Homo sapiens
  misc_RNA (1)...(19): siRNA sense strand
acugaaagcaaaugugaaa

SEQ ID NO: 295229 - RNA, 19 nt, Homo sapiens
  misc_RNA (1)...(19): siRNA sense strand
aaacuuggugugacugcua

SEQ ID NO: 295230 - RNA, 19 nt, Homo sapiens
  misc_RNA (1)...(19): siRNA sense strand
cuggucaaauugcauauuc

SEQ ID NO: 295231 - RNA, 19 nt, Homo sapiens
  misc_RNA (1)...(19): siRNA sense strand
auaaauacgccaagaaguc

SEQ ID NO: 295232 - RNA, 19 nt, Homo sapiens
  misc_RNA (1)...(19): siRNA sense strand
cucauucccuguuguaauc

SEQ ID NO: 295233 - RNA, 19 nt, Homo sapiens
  misc_RNA (1)...(19): siRNA sense strand
cuacucauucccuguugua

SEQ ID NO: 295234 - RNA, 19 nt, Homo sapiens
  misc_RNA (1)...(19): siRNA sense strand
cgucagggacaucugguuu

SEQ ID NO: 295235 - RNA, 19 nt, Homo sapiens
  misc_RNA (1)...(19): siRNA sense strand
aagaucagccuauaauucu

SEQ ID NO: 295236 - RNA, 19 nt, Homo sapiens
  misc_RNA (1)...(19): siRNA sense strand
ugacugcuaaugauguaaa

SEQ ID NO: 295237 - RNA, 19 nt, Homo sapiens
  misc_RNA (1)...(19): siRNA sense strand
gcucaaauugcucuuaaac

SEQ ID NO: 295238 - RNA, 19 nt, Homo sapiens
  misc_RNA (1)...(19): siRNA sense strand
ccaagaagucaguuaaggu

SEQ ID NO: 295239 - RNA, 19 nt, Homo sapiens
  misc_RNA (1)...(19): siRNA sense strand
aagaagucaguuaagguua

SEQ ID NO: 295240 - RNA, 19 nt, Homo sapiens
  misc_RNA (1)...(19): siRNA sense strand
gcucuacucauucccuguu

SEQ ID NO: 295241 - RNA, 19 nt, Homo sapiens
  misc_RNA (1)...(19): siRNA sense strand
uagauaaauacgccaagaa

SEQ ID NO: 295242 - RNA, 19 nt, Homo sapiens
  misc_RNA (1)...(19): siRNA sense strand
ccuguuguaaucaagaaua

SEQ ID NO: 295243 - RNA, 19 nt, Homo sapiens
  misc_RNA (1)...(19): siRNA sense strand
gcucaagggagaauuuguc

SEQ ID NO: 295244 - RNA, 19 nt, Homo sapiens
  misc_RNA (1)...(19): siRNA sense strand
uauaauucuugugcuguug

SEQ ID NO: 295245 - RNA, 19 nt, Homo sapiens
  misc_RNA (1)...(19): siRNA sense strand
guaauccagccaauaccaa

SEQ ID NO: 295246 - RNA, 19 nt, Homo sapiens
  misc_RNA (1)...(19): siRNA sense strand
auggaucugucuuugguaa

SEQ ID NO: 295247 - RNA, 19 nt, Homo sapiens
  misc_RNA (1)...(19): siRNA sense strand
ggagcagcuggucaaauug

SEQ ID NO: 295248 - RNA, 19 nt, Homo sapiens
  misc_RNA (1)...(19): siRNA sense strand
gaccuggaaguuuguugaa

SEQ ID NO: 295249 - RNA, 19 nt, Homo sapiens
  misc_RNA (1)...(19): siRNA sense strand
uggaaauggaucugucuuu

SEQ ID NO: 295250 - RNA, 19 nt, Homo sapiens
  misc_RNA (1)...(19): siRNA sense strand
uuuaugaagcucugaaaga

SEQ ID NO: 295251 - RNA, 19 nt, Homo sapiens
  misc_RNA (1)...(19): siRNA sense strand
guauccagaugucaaccau

SEQ ID NO: 295252 - RNA, 19 nt, Homo sapiens
  misc_RNA (1)...(19): siRNA sense strand
ugacucguuuggaucacaa

SEQ ID NO: 295253 - RNA, 19 nt, Homo sapiens
  misc_RNA (1)...(19): siRNA sense strand
caaccaugccaaggugaaa

SEQ ID NO: 295254 - RNA, 19 nt, Homo sapiens
  misc_RNA (1)...(19): siRNA sense strand
cagggugcagccuuagaua

SEQ ID NO: 295255 - RNA, 19 nt, Homo sapiens
  misc_RNA (1)...(19): siRNA sense strand
cgacucaguauccagaugu

SEQ ID NO: 295256 - RNA, 19 nt, Homo sapiens
  misc_RNA (1)...(19): siRNA sense strand
cugcuaaugauguaaagaa

SEQ ID NO: 295257 - RNA, 19 nt, Homo sapiens
  misc_RNA (1)...(19): siRNA sense strand
agaccuggauguggccauu

SEQ ID NO: 295258 - RNA, 19 nt, Homo sapiens
  misc_RNA (1)...(19): siRNA sense strand
uggcaacuccuaugguguu

SEQ ID NO: 295259 - RNA, 19 nt, Homo sapiens
  misc_RNA (1)...(19): siRNA sense strand
gaaagguugugauguggua

SEQ ID NO: 295260 - RNA, 19 nt, Homo sapiens
  misc_RNA (1)...(19): siRNA sense strand
ccagaacaaugcuaaagua

SEQ ID NO: 295261 - RNA, 19 nt, Homo sapiens
  misc_RNA (1)...(19): siRNA sense strand
gaccaaagccgcugugaaa

SEQ ID NO: 295262 - RNA, 19 nt, Homo sapiens
  misc_RNA (1)...(19): siRNA sense strand
aaaggaagguguuguggaa

SEQ ID NO: 295263 - RNA, 19 nt, Homo sapiens
  misc_RNA (1)...(19): siRNA sense strand
uugcagagcugaaggguuu

SEQ ID NO: 295264 - RNA, 19 nt, Homo sapiens
  misc_RNA (1)...(19): siRNA sense strand
caacaccaaugccacgauu

SEQ ID NO: 295265 - RNA, 19 nt, Homo sapiens
  misc_RNA (1)...(19): siRNA sense strand
caacgucccugucauuggu

SEQ ID NO: 295266 - RNA, 19 nt, Homo sapiens
  misc_RNA (1)...(19): siRNA sense strand
caagaagcauggaguguac

SEQ ID NO: 295267 - RNA, 19 nt, Homo sapiens
  misc_RNA (1)...(19): siRNA sense strand
cgucagagccaacaccuuu

SEQ ID NO: 295268 - RNA, 19 nt, Homo sapiens
  misc_RNA (1)...(19): siRNA sense strand
ccugaaagguugugaugug

SEQ ID NO: 295269 - RNA, 19 nt, Homo sapiens
  misc_RNA (1)...(19): siRNA sense strand
ggaagguguuguggaaugu

SEQ ID NO: 295270 - RNA, 19 nt, Homo sapiens
  misc_RNA (1)...(19): siRNA sense strand
gaauguuccuucguuaagu

SEQ ID NO: 295271 - RNA, 19 nt, Homo sapiens
  misc_RNA (1)...(19): siRNA sense strand
cagcagaaguuuucaagaa

SEQ ID NO: 295272 - RNA, 19 nt, Homo sapiens
  misc_RNA (1)...(19): siRNA sense strand
guugugaugugguaguuau

SEQ ID NO: 295273 - RNA, 19 nt, Homo sapiens
  misc_RNA (1)...(19): siRNA sense strand
gaaacggaauguaccuacu

SEQ ID NO: 295274 - RNA, 19 nt, Homo sapiens
  misc_RNA (1)...(19): siRNA sense strand
gggaagauuucgugaagac

SEQ ID NO: 295275 - RNA, 19 nt, Homo sapiens
  misc_RNA (1)...(19): siRNA sense strand
cgccugacccucuaugaua

SEQ ID NO: 295276 - RNA, 19 nt, Homo sapiens
  misc_RNA (1)...(19): siRNA sense strand
cugaaggccuccaucaaga

SEQ ID NO: 295277 - RNA, 19 nt, Homo sapiens
  misc_RNA (1)...(19): siRNA sense strand
gaaccugggcaucggcaaa

SEQ ID NO: 295278 - RNA, 19 nt, Homo sapiens
  misc_RNA (1)...(19): siRNA sense strand
ucaagaagcauggagugua

SEQ ID NO: 295279 - RNA, 19 nt, Homo sapiens
  misc_RNA (1)...(19): siRNA sense strand
ggauccagcucgagucaac

SEQ ID NO: 295280 - RNA, 19 nt, Homo sapiens
  misc_RNA (1)...(19): siRNA sense strand
gaauggaaaggaagguguu

SEQ ID NO: 295281 - RNA, 19 nt, Homo sapiens
  misc_RNA (1)...(19): siRNA sense strand
gccugacccucuaugauau

SEQ ID NO: 295282 - RNA, 19 nt, Homo sapiens
  misc_RNA (1)...(19): siRNA sense strand
uggaugcaaugaauggaaa

SEQ ID NO: 295283 - RNA, 19 nt, Homo sapiens
  misc_RNA (1)...(19): siRNA sense strand
gcugaaggccuccaucaag

SEQ ID NO: 295284 - RNA, 19 nt, Homo sapiens
  misc_RNA (1)...(19): siRNA sense strand
cggagguggucaaggcuaa

SEQ ID NO: 295285 - RNA, 19 nt, Homo sapiens
  misc_RNA (1)...(19): siRNA sense strand
gagcugaaggccuccauca

SEQ ID NO: 295286 - RNA, 19 nt, Homo sapiens
  misc_RNA (1)...(19): siRNA sense strand
ugcaaugaauggaaaggaa

SEQ ID NO: 295287 - RNA, 19 nt, Homo sapiens
  misc_RNA (1)...(19): siRNA sense strand
gggcagccacuuucacuuc

SEQ ID NO: 295288 - RNA, 19 nt, Homo sapiens
  misc_RNA (1)...(19): siRNA sense strand
aggaagguguuguggaaug

SEQ ID NO: 295289 - RNA, 19 nt, Homo sapiens
  misc_RNA (1)...(19): siRNA sense strand
ggaguggccgcagaucuga

SEQ ID NO: 295290 - RNA, 19 nt, Homo sapiens
  misc_RNA (1)...(19): siRNA sense strand
ccgcagaucugagccacau

SEQ ID NO: 295291 - RNA, 19 nt, Homo sapiens
  misc_RNA (1)...(19): siRNA sense strand
gaaggccuccaucaagaag

SEQ ID NO: 295292 - RNA, 19 nt, Homo sapiens
  misc_RNA (1)...(19): siRNA sense strand
aaacggaauguaccuacuu

SEQ ID NO: 295293 - RNA, 19 nt, Homo sapiens
  misc_RNA (1)...(19): siRNA sense strand
ccaaagccgcugugaaagg

SEQ ID NO: 295294 - RNA, 19 nt, Homo sapiens
  misc_RNA (1)...(19): siRNA sense strand
ccuuguggaugcaaugaau

SEQ ID NO: 295295 - RNA, 19 nt, Homo sapiens
  misc_RNA (1)...(19): siRNA sense strand
ugaaggccuccaucaagaa

SEQ ID NO: 295296 - RNA, 19 nt, Homo sapiens
  misc_RNA (1)...(19): siRNA sense strand
ucacaggaaacggaaugua

SEQ ID NO: 295297 - RNA, 19 nt, Homo sapiens
  misc_RNA (1)...(19): siRNA sense strand
cgagucaacgucccuguca

SEQ ID NO: 295298 - RNA, 19 nt, Homo sapiens
  misc_RNA (1)...(19): siRNA sense strand
gcugaaggguuuggaucca

SEQ ID NO: 295299 - RNA, 19 nt, Homo sapiens
  misc_RNA (1)...(19): siRNA sense strand
gaagguguuguggaauguu

SEQ ID NO: 295300 - RNA, 19 nt, Homo sapiens
  misc_RNA (1)...(19): siRNA sense strand
ggcagccacuuucacuucu

SEQ ID NO: 295301 - RNA, 19 nt, Homo sapiens
  misc_RNA (1)...(19): siRNA sense strand
ugagccacaucgagaccaa

SEQ ID NO: 295302 - RNA, 19 nt, Homo sapiens
  misc_RNA (1)...(19): siRNA sense strand
guacaaccccaacaaaauc

SEQ ID NO: 295303 - RNA, 19 nt, Homo sapiens
  misc_RNA (1)...(19): siRNA sense strand
uugccaauccgguuaauuc

SEQ ID NO: 295304 - RNA, 19 nt, Homo sapiens
  misc_RNA (1)...(19): siRNA sense strand
cgugaagacccugaaguga

SEQ ID NO: 295305 - RNA, 19 nt, Homo sapiens
  misc_RNA (1)...(19): siRNA sense strand
cagaacaaugcuaaaguag

SEQ ID NO: 295306 - RNA, 19 nt, Homo sapiens
  misc_RNA (1)...(19): siRNA sense strand
agucaacgucccugucauu

SEQ ID NO: 295307 - RNA, 19 nt, Homo sapiens
  misc_RNA (1)...(19): siRNA sense strand
ugagccgccugacccucua

SEQ ID NO: 295308 - RNA, 19 nt, Homo sapiens
  misc_RNA (1)...(19): siRNA sense strand
gcagccacuuucacuucuc

SEQ ID NO: 295309 - RNA, 19 nt, Homo sapiens
  misc_RNA (1)...(19): siRNA sense strand
gagcacaacuuucaaauua

SEQ ID NO: 295310 - RNA, 19 nt, Homo sapiens
  misc_RNA (1)...(19): siRNA sense strand
gaacaaaucucugauccua

SEQ ID NO: 295311 - RNA, 19 nt, Homo sapiens
  misc_RNA (1)...(19): siRNA sense strand
gaaaugaggagaaagaaua

SEQ ID NO: 295312 - RNA, 19 nt, Homo sapiens
  misc_RNA (1)...(19): siRNA sense strand
caacagagcgugaucauaa

SEQ ID NO: 295313 - RNA, 19 nt, Homo sapiens
  misc_RNA (1)...(19): siRNA sense strand
gaaaucaucaggucuguua

SEQ ID NO: 295314 - RNA, 19 nt, Homo sapiens
  misc_RNA (1)...(19): siRNA sense strand
ggagagcugugcugaauuu

SEQ ID NO: 295315 - RNA, 19 nt, Homo sapiens
  misc_RNA (1)...(19): siRNA sense strand
ggaaauagcagcagaauuc

SEQ ID NO: 295316 - RNA, 19 nt, Homo sapiens
  misc_RNA (1)...(19): siRNA sense strand
ggaaguggaugaauuaugu

SEQ ID NO: 295317 - RNA, 19 nt, Homo sapiens
  misc_RNA (1)...(19): siRNA sense strand
gaagauaggagacaaauau

SEQ ID NO: 295318 - RNA, 19 nt, Homo sapiens
  misc_RNA (1)...(19): siRNA sense strand
gaagaagaauggaauuuca

SEQ ID NO: 295319 - RNA, 19 nt, Homo sapiens
  misc_RNA (1)...(19): siRNA sense strand
guaaugagccggaguauga

SEQ ID NO: 295320 - RNA, 19 nt, Homo sapiens
  misc_RNA (1)...(19): siRNA sense strand
uaauggagcugcuagagua

SEQ ID NO: 295321 - RNA, 19 nt, Homo sapiens
  misc_RNA (1)...(19): siRNA sense strand
caaaucagccuccacauaa

SEQ ID NO: 295322 - RNA, 19 nt, Homo sapiens
  misc_RNA (1)...(19): siRNA sense strand
guaaagauacugcuucuaa

SEQ ID NO: 295323 - RNA, 19 nt, Homo sapiens
  misc_RNA (1)...(19): siRNA sense strand
ugaauuauguccugacuaa

SEQ ID NO: 295324 - RNA, 19 nt, Homo sapiens
  misc_RNA (1)...(19): siRNA sense strand
ggauuuaccuucauucgaa

SEQ ID NO: 295325 - RNA, 19 nt, Homo sapiens
  misc_RNA (1)...(19): siRNA sense strand
gagauucgauuucaaccua

SEQ ID NO: 295326 - RNA, 19 nt, Homo sapiens
  misc_RNA (1)...(19): siRNA sense strand
caaggaaacugcagacgaa

SEQ ID NO: 295327 - RNA, 19 nt, Homo sapiens
  misc_RNA (1)...(19): siRNA sense strand
gcacaacuuucaaauuaug

SEQ ID NO: 295328 - RNA, 19 nt, Homo sapiens
  misc_RNA (1)...(19): siRNA sense strand
guacagugcucauucaugu

SEQ ID NO: 295329 - RNA, 19 nt, Homo sapiens
  misc_RNA (1)...(19): siRNA sense strand
gaaaagagguaccgagaaa

SEQ ID NO: 295330 - RNA, 19 nt, Homo sapiens
  misc_RNA (1)...(19): siRNA sense strand
uaaagaaguuguucguuug

SEQ ID NO: 295331 - RNA, 19 nt, Homo sapiens
  misc_RNA (1)...(19): siRNA sense strand
gaaaggaccuggaaauagc

SEQ ID NO: 295332 - RNA, 19 nt, Homo sapiens
  misc_RNA (1)...(19): siRNA sense strand
ccaucucucuugaguauua

SEQ ID NO: 295333 - RNA, 19 nt, Homo sapiens
  misc_RNA (1)...(19): siRNA sense strand
gaauaucauuggucaaguu

SEQ ID NO: 295334 - RNA, 19 nt, Homo sapiens
  misc_RNA (1)...(19): siRNA sense strand
ugacacagaaggagaauua

SEQ ID NO: 295335 - RNA, 19 nt, Homo sapiens
  misc_RNA (1)...(19): siRNA sense strand
gcaaauuccuggguuagaa

SEQ ID NO: 295336 - RNA, 19 nt, Homo sapiens
  misc_RNA (1)...(19): siRNA sense strand
ugaagaggaucuacauaaa

SEQ ID NO: 295337 - RNA, 19 nt, Homo sapiens
  misc_RNA (1)...(19): siRNA sense strand
gagcaaagaggacaagaaa

SEQ ID NO: 295338 - RNA, 19 nt, Homo sapiens
  misc_RNA (1)...(19): siRNA sense strand
gaggagaagaguauuauuu

SEQ ID NO: 295339 - RNA, 19 nt, Homo sapiens
  misc_RNA (1)...(19): siRNA sense strand
gcaagaguccugaaucuga

SEQ ID NO: 295340 - RNA, 19 nt, Homo sapiens
  misc_RNA (1)...(19): siRNA sense strand
gagaaaggaccuggaaaua

SEQ ID NO: 295341 - RNA, 19 nt, Homo sapiens
  misc_RNA (1)...(19): siRNA sense strand
guacauagaagcacuuuau

SEQ ID NO: 295342 - RNA, 19 nt, Homo sapiens
  misc_RNA (1)...(19): siRNA sense strand
uaaaggaguuggaaaguag

SEQ ID NO: 295343 - RNA, 19 nt, Homo sapiens
  misc_RNA (1)...(19): siRNA sense strand
gaacuucggacacuaauca

SEQ ID NO: 295344 - RNA, 19 nt, Homo sapiens
  misc_RNA (1)...(19): siRNA sense strand
gaagucaguccgauuguuu

SEQ ID NO: 295345 - RNA, 19 nt, Homo sapiens
  misc_RNA (1)...(19): siRNA sense strand
ucagacagcccauagauaa

SEQ ID NO: 295346 - RNA, 19 nt, Homo sapiens
  misc_RNA (1)...(19): siRNA sense strand
ugauuaggcuguauucaaa

SEQ ID NO: 295347 - RNA, 19 nt, Homo sapiens
  misc_RNA (1)...(19): siRNA sense strand
ggacaccaccuucaucuga

SEQ ID NO: 295348 - RNA, 19 nt, Homo sapiens
  misc_RNA (1)...(19): siRNA sense strand
gcacguauagcauugguaa

SEQ ID NO: 295349 - RNA, 19 nt, Homo sapiens
  misc_RNA (1)...(19): siRNA sense strand
uggagaauguggaagaaua

SEQ ID NO: 295350 - RNA, 19 nt, Homo sapiens
  misc_RNA (1)...(19): siRNA sense strand
uuccauagcugcugaauug

SEQ ID NO: 295351 - RNA, 19 nt, Homo sapiens
  misc_RNA (1)...(19): siRNA sense strand
ggaugagagugaagaagaa

SEQ ID NO: 295352 - RNA, 19 nt, Homo sapiens
  misc_RNA (1)...(19): siRNA sense strand
ccaaaucagccuccacaua

SEQ ID NO: 295353 - RNA, 19 nt, Homo sapiens
  misc_RNA (1)...(19): siRNA sense strand
ggaaacugcagacgaauug

SEQ ID NO: 295354 - RNA, 19 nt, Homo sapiens
  misc_RNA (1)...(19): siRNA sense strand
gagcuucgccuuuguuaga

SEQ ID NO: 295355 - RNA, 19 nt, Homo sapiens
  misc_RNA (1)...(19): siRNA sense strand
gcagguggauaaucuuuua

SEQ ID NO: 295356 - RNA, 19 nt, Homo sapiens
  misc_RNA (1)...(19): siRNA sense strand
gagagugacccaaagauga

SEQ ID NO: 295357 - RNA, 19 nt, Homo sapiens
  misc_RNA (1)...(19): siRNA sense strand
cagcagaucguuuaaaguu

SEQ ID NO: 295358 - RNA, 19 nt, Homo sapiens
  misc_RNA (1)...(19): siRNA sense strand
gcagcagaauucaggcuuu

SEQ ID NO: 295359 - RNA, 19 nt, Homo sapiens
  misc_RNA (1)...(19): siRNA sense strand
gcaaagggcacguauagca

SEQ ID NO: 295360 - RNA, 19 nt, Homo sapiens
  misc_RNA (1)...(19): siRNA sense strand
gauuguagguuacucaaca

SEQ ID NO: 295361 - RNA, 19 nt, Homo sapiens
  misc_RNA (1)...(19): siRNA sense strand
ccaaacaucagaggaauaa

SEQ ID NO: 295362 - RNA, 19 nt, Homo sapiens
  misc_RNA (1)...(19): siRNA sense strand
gaaccugccuuuauuucag

SEQ ID NO: 295363 - RNA, 19 nt, Homo sapiens
  misc_RNA (1)...(19): siRNA sense strand
ggaaaggacuguucaaaag

SEQ ID NO: 295364 - RNA, 19 nt, Homo sapiens
  misc_RNA (1)...(19): siRNA sense strand
uuaagcagcuggugagaga

SEQ ID NO: 295365 - RNA, 19 nt, Homo sapiens
  misc_RNA (1)...(19): siRNA sense strand
gcacucuguuugugguuaa

SEQ ID NO: 295366 - RNA, 19 nt, Homo sapiens
  misc_RNA (1)...(19): siRNA sense strand
cuaacgaacugaucugguu

SEQ ID NO: 295367 - RNA, 19 nt, Homo sapiens
  misc_RNA (1)...(19): siRNA sense strand
cagcacaccucgacagaug

SEQ ID NO: 295368 - RNA, 19 nt, Homo sapiens
  misc_RNA (1)...(19): siRNA sense strand
gccagucggucuaauuuga

SEQ ID NO: 295369 - RNA, 19 nt, Homo sapiens
  misc_RNA (1)...(19): siRNA sense strand
uuaaaggaguuggaaagua

SEQ ID NO: 295370 - RNA, 19 nt, Homo sapiens
  misc_RNA (1)...(19): siRNA sense strand
ggagaaagaauaucauugg

SEQ ID NO: 295371 - RNA, 19 nt, Homo sapiens
  misc_RNA (1)...(19): siRNA sense strand
gcaauugaaccugccuuua

SEQ ID NO: 295372 - RNA, 19 nt, Homo sapiens
  misc_RNA (1)...(19): siRNA sense strand
caucaggucuguuauagag

SEQ ID NO: 295373 - RNA, 19 nt, Homo sapiens
  misc_RNA (1)...(19): siRNA sense strand
ggaaugcugcugaaaucua

SEQ ID NO: 295374 - RNA, 19 nt, Homo sapiens
  misc_RNA (1)...(19): siRNA sense strand
gaauggaauuucaccaaag

SEQ ID NO: 295375 - RNA, 19 nt, Homo sapiens
  misc_RNA (1)...(19): siRNA sense strand
caagccaucccagauauua

SEQ ID NO: 295376 - RNA, 19 nt, Homo sapiens
  misc_RNA (1)...(19): siRNA sense strand
uugcacagaugaagaauga

SEQ ID NO: 295377 - RNA, 19 nt, Homo sapiens
  misc_RNA (1)...(19): siRNA sense strand
gcugaaaucuacaggaagu

SEQ ID NO: 295378 - RNA, 19 nt, Homo sapiens
  misc_RNA (1)...(19): siRNA sense strand
guauagcauugguaaagaa

SEQ ID NO: 295379 - RNA, 19 nt, Homo sapiens
  misc_RNA (1)...(19): siRNA sense strand
gcagaucguuuaaaguuuu

SEQ ID NO: 295380 - RNA, 19 nt, Homo sapiens
  misc_RNA (1)...(19): siRNA sense strand
caaagcagaucaccauugc

SEQ ID NO: 295381 - RNA, 19 nt, Homo sapiens
  misc_RNA (1)...(19): siRNA sense strand
guaccucgaugccauagug

SEQ ID NO: 295382 - RNA, 19 nt, Homo sapiens
  misc_RNA (1)...(19): siRNA sense strand
caauugaaccugccuuuau

SEQ ID NO: 295383 - RNA, 19 nt, Homo sapiens
  misc_RNA (1)...(19): siRNA sense strand
gcccggaaguggaugaauu

SEQ ID NO: 295384 - RNA, 19 nt, Homo sapiens
  misc_RNA (1)...(19): siRNA sense strand
gcaugcagguggauaaucu

SEQ ID NO: 295385 - RNA, 19 nt, Homo sapiens
  misc_RNA (1)...(19): siRNA sense strand
uuagagaccuccuggaugu

SEQ ID NO: 295386 - RNA, 19 nt, Homo sapiens
  misc_RNA (1)...(19): siRNA sense strand
ucaagcaucgcauaguuua

SEQ ID NO: 295387 - RNA, 19 nt, Homo sapiens
  misc_RNA (1)...(19): siRNA sense strand
gaaaucagacagcccauag

SEQ ID NO: 295388 - RNA, 19 nt, Homo sapiens
  misc_RNA (1)...(19): siRNA sense strand
gccagagggucucauuuga

SEQ ID NO: 295389 - RNA, 19 nt, Homo sapiens
  misc_RNA (1)...(19): siRNA sense strand
acaaagcacugaagcagau

SEQ ID NO: 295390 - RNA, 19 nt, Homo sapiens
  misc_RNA (1)...(19): siRNA sense strand
gaagcaugcagguggauaa

SEQ ID NO: 295391 - RNA, 19 nt, Homo sapiens
  misc_RNA (1)...(19): siRNA sense strand
gcacuuggauuugcuaaaa

SEQ ID NO: 295392 - RNA, 19 nt, Homo sapiens
  misc_RNA (1)...(19): siRNA sense strand
caggagagcugugcugaau

SEQ ID NO: 295393 - RNA, 19 nt, Homo sapiens
  misc_RNA (1)...(19): siRNA sense strand
uaaccgaucuaacgaacug

SEQ ID NO: 295394 - RNA, 19 nt, Homo sapiens
  misc_RNA (1)...(19): siRNA sense strand
ccauaagacuaucaaggaa

SEQ ID NO: 295395 - RNA, 19 nt, Homo sapiens
  misc_RNA (1)...(19): siRNA sense strand
ggugcaaauuccuggguua

SEQ ID NO: 295396 - RNA, 19 nt, Homo sapiens
  misc_RNA (1)...(19): siRNA sense strand
caaagccacuccuggaaca

SEQ ID NO: 295397 - RNA, 19 nt, Homo sapiens
  misc_RNA (1)...(19): siRNA sense strand
gcugaaggccauggauuua

SEQ ID NO: 295398 - RNA, 19 nt, Homo sapiens
  misc_RNA (1)...(19): siRNA sense strand
cauuaaaggugccaauauc

SEQ ID NO: 295399 - RNA, 19 nt, Homo sapiens
  misc_RNA (1)...(19): siRNA sense strand
caggaaugcugcugaaauc

SEQ ID NO: 295400 - RNA, 19 nt, Homo sapiens
  misc_RNA (1)...(19): siRNA sense strand
agaauggaauuucaccaaa

SEQ ID NO: 295401 - RNA, 19 nt, Homo sapiens
  misc_RNA (1)...(19): siRNA sense strand
ggccauggauuuaccuuca

SEQ ID NO: 295402 - RNA, 19 nt, Homo sapiens
  misc_RNA (1)...(19): siRNA sense strand
gaaugcugcugaaaucuac

SEQ ID NO: 295403 - RNA, 19 nt, Homo sapiens
  misc_RNA (1)...(19): siRNA sense strand
ccucaagcaucgcauaguu

SEQ ID NO: 295404 - RNA, 19 nt, Homo sapiens
  misc_RNA (1)...(19): siRNA sense strand
caaccaaacaucagaggaa

SEQ ID NO: 295405 - RNA, 19 nt, Homo sapiens
  misc_RNA (1)...(19): siRNA sense strand
ccaaucugguucgguauuu

SEQ ID NO: 295406 - RNA, 19 nt, Homo sapiens
  misc_RNA (1)...(19): siRNA sense strand
gcaaagaggaaacaaaauu

SEQ ID NO: 295407 - RNA, 19 nt, Homo sapiens
  misc_RNA (1)...(19): siRNA sense strand
gagaaagaauaucauuggu

SEQ ID NO: 295408 - RNA, 19 nt, Homo sapiens
  misc_RNA (1)...(19): siRNA sense strand
uaaacuaggacccauagaa

SEQ ID NO: 295409 - RNA, 19 nt, Homo sapiens
  misc_RNA (1)...(19): siRNA sense strand
gagcacaacuuucaaauua

SEQ ID NO: 295410 - RNA, 19 nt, Homo sapiens
  misc_RNA (1)...(19): siRNA sense strand
gaacaaaucucugauccua

SEQ ID NO: 295411 - RNA, 19 nt, Homo sapiens
  misc_RNA (1)...(19): siRNA sense strand
gaaaugaggagaaagaaua

SEQ ID NO: 295412 - RNA, 19 nt, Homo sapiens
  misc_RNA (1)...(19): siRNA sense strand
caacagagcgugaucauaa

SEQ ID NO: 295413 - RNA, 19 nt, Homo sapiens
  misc_RNA (1)...(19): siRNA sense strand
gaaaucaucaggucuguua

SEQ ID NO: 295414 - RNA, 19 nt, Homo sapiens
  misc_RNA (1)...(19): siRNA sense strand
ggagagcugugcugaauuu

SEQ ID NO: 295415 - RNA, 19 nt, Homo sapiens
  misc_RNA (1)...(19): siRNA sense strand
ggaaauagcagcagaauuc

SEQ ID NO: 295416 - RNA, 19 nt, Homo sapiens
  misc_RNA (1)...(19): siRNA sense strand
ggaaguggaugaauuaugu

SEQ ID NO: 295417 - RNA, 19 nt, Homo sapiens
  misc_RNA (1)...(19): siRNA sense strand
gaagauaggagacaaauau

SEQ ID NO: 295418 - RNA, 19 nt, Homo sapiens
  misc_RNA (1)...(19): siRNA sense strand
gaagaagaauggaauuuca

SEQ ID NO: 295419 - RNA, 19 nt, Homo sapiens
  misc_RNA (1)...(19): siRNA sense strand
guaaugagccggaguauga

SEQ ID NO: 295420 - RNA, 19 nt, Homo sapiens
  misc_RNA (1)...(19): siRNA sense strand
uaauggagcugcuagagua

SEQ ID NO: 295421 - RNA, 19 nt, Homo sapiens
  misc_RNA (1)...(19): siRNA sense strand
caaaucagccuccacauaa

SEQ ID NO: 295422 - RNA, 19 nt, Homo sapiens
  misc_RNA (1)...(19): siRNA sense strand
guaaagauacugcuucuaa

SEQ ID NO: 295423 - RNA, 19 nt, Homo sapiens
  misc_RNA (1)...(19): siRNA sense strand
ugaauuauguccugacuaa

SEQ ID NO: 295424 - RNA, 19 nt, Homo sapiens
  misc_RNA (1)...(19): siRNA sense strand
ggauuuaccuucauucgaa

SEQ ID NO: 295425 - RNA, 19 nt, Homo sapiens
  misc_RNA (1)...(19): siRNA sense strand
gagauucgauuucaaccua

SEQ ID NO: 295426 - RNA, 19 nt, Homo sapiens
  misc_RNA (1)...(19): siRNA sense strand
caaggaaacugcagacgaa

SEQ ID NO: 295427 - RNA, 19 nt, Homo sapiens
  misc_RNA (1)...(19): siRNA sense strand
gcacaacuuucaaauuaug

SEQ ID NO: 295428 - RNA, 19 nt, Homo sapiens
  misc_RNA (1)...(19): siRNA sense strand
guacagugcucauucaugu

SEQ ID NO: 295429 - RNA, 19 nt, Homo sapiens
  misc_RNA (1)...(19): siRNA sense strand
gaaaagagguaccgagaaa

SEQ ID NO: 295430 - RNA, 19 nt, Homo sapiens
  misc_RNA (1)...(19): siRNA sense strand
uaaagaaguuguucguuug

SEQ ID NO: 295431 - RNA, 19 nt, Homo sapiens
  misc_RNA (1)...(19): siRNA sense strand
gaaaggaccuggaaauagc

SEQ ID NO: 295432 - RNA, 19 nt, Homo sapiens
  misc_RNA (1)...(19): siRNA sense strand
ccaucucucuugaguauua

SEQ ID NO: 295433 - RNA, 19 nt, Homo sapiens
  misc_RNA (1)...(19): siRNA sense strand
gaauaucauuggucaaguu

SEQ ID NO: 295434 - RNA, 19 nt, Homo sapiens
  misc_RNA (1)...(19): siRNA sense strand
ugacacagaaggagaauua

SEQ ID NO: 295435 - RNA, 19 nt, Homo sapiens
  misc_RNA (1)...(19): siRNA sense strand
gcaaauuccuggguuagaa

SEQ ID NO: 295436 - RNA, 19 nt, Homo sapiens
  misc_RNA (1)...(19): siRNA sense strand
ugaagaggaucuacauaaa

SEQ ID NO: 295437 - RNA, 19 nt, Homo sapiens
  misc_RNA (1)...(19): siRNA sense strand
gagcaaagaggacaagaaa

SEQ ID NO: 295438 - RNA, 19 nt, Homo sapiens
  misc_RNA (1)...(19): siRNA sense strand
gaggagaagaguauuauuu

SEQ ID NO: 295439 - RNA, 19 nt, Homo sapiens
  misc_RNA (1)...(19): siRNA sense strand
gcaagaguccugaaucuga

SEQ ID NO: 295440 - RNA, 19 nt, Homo sapiens
  misc_RNA (1)...(19): siRNA sense strand
gagaaaggaccuggaaaua

SEQ ID NO: 295441 - RNA, 19 nt, Homo sapiens
  misc_RNA (1)...(19): siRNA sense strand
guacauagaagcacuuuau

SEQ ID NO: 295442 - RNA, 19 nt, Homo sapiens
  misc_RNA (1)...(19): siRNA sense strand
uaaaggaguuggaaaguag

SEQ ID NO: 295443 - RNA, 19 nt, Homo sapiens
  misc_RNA (1)...(19): siRNA sense strand
gaacuucggacacuaauca

SEQ ID NO: 295444 - RNA, 19 nt, Homo sapiens
  misc_RNA (1)...(19): siRNA sense strand
gaagucaguccgauuguuu

SEQ ID NO: 295445 - RNA, 19 nt, Homo sapiens
  misc_RNA (1)...(19): siRNA sense strand
ucagacagcccauagauaa

SEQ ID NO: 295446 - RNA, 19 nt, Homo sapiens
  misc_RNA (1)...(19): siRNA sense strand
ugauuaggcuguauucaaa

SEQ ID NO: 295447 - RNA, 19 nt, Homo sapiens
  misc_RNA (1)...(19): siRNA sense strand
ggacaccaccuucaucuga

SEQ ID NO: 295448 - RNA, 19 nt, Homo sapiens
  misc_RNA (1)...(19): siRNA sense strand
gcacguauagcauugguaa

SEQ ID NO: 295449 - RNA, 19 nt, Homo sapiens
  misc_RNA (1)...(19): siRNA sense strand
uggagaauguggaagaaua

SEQ ID NO: 295450 - RNA, 19 nt, Homo sapiens
  misc_RNA (1)...(19): siRNA sense strand
uuccauagcugcugaauug

SEQ ID NO: 295451 - RNA, 19 nt, Homo sapiens
  misc_RNA (1)...(19): siRNA sense strand
ggaugagagugaagaagaa

SEQ ID NO: 295452 - RNA, 19 nt, Homo sapiens
  misc_RNA (1)...(19): siRNA sense strand
ccaaaucagccuccacaua

SEQ ID NO: 295453 - RNA, 19 nt, Homo sapiens
  misc_RNA (1)...(19): siRNA sense strand
ggaaacugcagacgaauug

SEQ ID NO: 295454 - RNA, 19 nt, Homo sapiens
  misc_RNA (1)...(19): siRNA sense strand
gagcuucgccuuuguuaga

SEQ ID NO: 295455 - RNA, 19 nt, Homo sapiens
  misc_RNA (1)...(19): siRNA sense strand
gcagguggauaaucuuuua

SEQ ID NO: 295456 - RNA, 19 nt, Homo sapiens
  misc_RNA (1)...(19): siRNA sense strand
gagagugacccaaagauga

SEQ ID NO: 295457 - RNA, 19 nt, Homo sapiens
  misc_RNA (1)...(19): siRNA sense strand
cagcagaucguuuaaaguu

SEQ ID NO: 295458 - RNA, 19 nt, Homo sapiens
  misc_RNA (1)...(19): siRNA sense strand
gcagcagaauucaggcuuu

SEQ ID NO: 295459 - RNA, 19 nt, Homo sapiens
  misc_RNA (1)...(19): siRNA sense strand
gcaaagggcacguauagca

SEQ ID NO: 295460 - RNA, 19 nt, Homo sapiens
  misc_RNA (1)...(19): siRNA sense strand
gauuguagguuacucaaca

SEQ ID NO: 295461 - RNA, 19 nt, Homo sapiens
  misc_RNA (1)...(19): siRNA sense strand
ccaaacaucagaggaauaa

SEQ ID NO: 295462 - RNA, 19 nt, Homo sapiens
  misc_RNA (1)...(19): siRNA sense strand
gaaccugccuuuauuucag

SEQ ID NO: 295463 - RNA, 19 nt, Homo sapiens
  misc_RNA (1)...(19): siRNA sense strand
ggaaaggacuguucaaaag

SEQ ID NO: 295464 - RNA, 19 nt, Homo sapiens
  misc_RNA (1)...(19): siRNA sense strand
uuaagcagcuggugagaga

SEQ ID NO: 295465 - RNA, 19 nt, Homo sapiens
  misc_RNA (1)...(19): siRNA sense strand
gcacucuguuugugguuaa

SEQ ID NO: 295466 - RNA, 19 nt, Homo sapiens
  misc_RNA (1)...(19): siRNA sense strand
cuaacgaacugaucugguu

SEQ ID NO: 295467 - RNA, 19 nt, Homo sapiens
  misc_RNA (1)...(19): siRNA sense strand
cagcacaccucgacagaug

SEQ ID NO: 295468 - RNA, 19 nt, Homo sapiens
  misc_RNA (1)...(19): siRNA sense strand
gccagucggucuaauuuga

SEQ ID NO: 295469 - RNA, 19 nt, Homo sapiens
  misc_RNA (1)...(19): siRNA sense strand
uuaaaggaguuggaaagua

SEQ ID NO: 295470 - RNA, 19 nt, Homo sapiens
  misc_RNA (1)...(19): siRNA sense strand
ggagaaagaauaucauugg

SEQ ID NO: 295471 - RNA, 19 nt, Homo sapiens
  misc_RNA (1)...(19): siRNA sense strand
gcaauugaaccugccuuua

SEQ ID NO: 295472 - RNA, 19 nt, Homo sapiens
  misc_RNA (1)...(19): siRNA sense strand
caucaggucuguuauagag

SEQ ID NO: 295473 - RNA, 19 nt, Homo sapiens
  misc_RNA (1)...(19): siRNA sense strand
ggaaugcugcugaaaucua

SEQ ID NO: 295474 - RNA, 19 nt, Homo sapiens
  misc_RNA (1)...(19): siRNA sense strand
gaauggaauuucaccaaag

SEQ ID NO: 295475 - RNA, 19 nt, Homo sapiens
  misc_RNA (1)...(19): siRNA sense strand
caagccaucccagauauua

SEQ ID NO: 295476 - RNA, 19 nt, Homo sapiens
  misc_RNA (1)...(19): siRNA sense strand
uugcacagaugaagaauga

SEQ ID NO: 295477 - RNA, 19 nt, Homo sapiens
  misc_RNA (1)...(19): siRNA sense strand
gcugaaaucuacaggaagu

SEQ ID NO: 295478 - RNA, 19 nt, Homo sapiens
  misc_RNA (1)...(19): siRNA sense strand
guauagcauugguaaagaa

SEQ ID NO: 295479 - RNA, 19 nt, Homo sapiens
  misc_RNA (1)...(19): siRNA sense strand
gcagaucguuuaaaguuuu

SEQ ID NO: 295480 - RNA, 19 nt, Homo sapiens
  misc_RNA (1)...(19): siRNA sense strand
caaagcagaucaccauugc

SEQ ID NO: 295481 - RNA, 19 nt, Homo sapiens
  misc_RNA (1)...(19): siRNA sense strand
guaccucgaugccauagug

SEQ ID NO: 295482 - RNA, 19 nt, Homo sapiens
  misc_RNA (1)...(19): siRNA sense strand
caauugaaccugccuuuau

SEQ ID NO: 295483 - RNA, 19 nt, Homo sapiens
  misc_RNA (1)...(19): siRNA sense strand
gcccggaaguggaugaauu

SEQ ID NO: 295484 - RNA, 19 nt, Homo sapiens
  misc_RNA (1)...(19): siRNA sense strand
gcaugcagguggauaaucu

SEQ ID NO: 295485 - RNA, 19 nt, Homo sapiens
  misc_RNA (1)...(19): siRNA sense strand
uuagagaccuccuggaugu

SEQ ID NO: 295486 - RNA, 19 nt, Homo sapiens
  misc_RNA (1)...(19): siRNA sense strand
ucaagcaucgcauaguuua

SEQ ID NO: 295487 - RNA, 19 nt, Homo sapiens
  misc_RNA (1)...(19): siRNA sense strand
gaaaucagacagcccauag

SEQ ID NO: 295488 - RNA, 19 nt, Homo sapiens
  misc_RNA (1)...(19): siRNA sense strand
gccagagggucucauuuga

SEQ ID NO: 295489 - RNA, 19 nt, Homo sapiens
  misc_RNA (1)...(19): siRNA sense strand
acaaagcacugaagcagau

SEQ ID NO: 295490 - RNA, 19 nt, Homo sapiens
  misc_RNA (1)...(19): siRNA sense strand
gaagcaugcagguggauaa

SEQ ID NO: 295491 - RNA, 19 nt, Homo sapiens
  misc_RNA (1)...(19): siRNA sense strand
gcacuuggauuugcuaaaa

SEQ ID NO: 295492 - RNA, 19 nt, Homo sapiens
  misc_RNA (1)...(19): siRNA sense strand
caggagagcugugcugaau

SEQ ID NO: 295493 - RNA, 19 nt, Homo sapiens
  misc_RNA (1)...(19): siRNA sense strand
uaaccgaucuaacgaacug

SEQ ID NO: 295494 - RNA, 19 nt, Homo sapiens
  misc_RNA (1)...(19): siRNA sense strand
ccauaagacuaucaaggaa

SEQ ID NO: 295495 - RNA, 19 nt, Homo sapiens
  misc_RNA (1)...(19): siRNA sense strand
ggugcaaauuccuggguua

SEQ ID NO: 295496 - RNA, 19 nt, Homo sapiens
  misc_RNA (1)...(19): siRNA sense strand
caaagccacuccuggaaca

SEQ ID NO: 295497 - RNA, 19 nt, Homo sapiens
  misc_RNA (1)...(19): siRNA sense strand
gcugaaggccauggauuua

SEQ ID NO: 295498 - RNA, 19 nt, Homo sapiens
  misc_RNA (1)...(19): siRNA sense strand
cauuaaaggugccaauauc

SEQ ID NO: 295499 - RNA, 19 nt, Homo sapiens
  misc_RNA (1)...(19): siRNA sense strand
caggaaugcugcugaaauc

SEQ ID NO: 295500 - RNA, 19 nt, Homo sapiens
  misc_RNA (1)...(19): siRNA sense strand
agaauggaauuucaccaaa

SEQ ID NO: 295501 - RNA, 19 nt, Homo sapiens
  misc_RNA (1)...(19): siRNA sense strand
ggccauggauuuaccuuca

SEQ ID NO: 295502 - RNA, 19 nt, Homo sapiens
  misc_RNA (1)...(19): siRNA sense strand
gaaugcugcugaaaucuac

SEQ ID NO: 295503 - RNA, 19 nt, Homo sapiens
  misc_RNA (1)...(19): siRNA sense strand
ccucaagcaucgcauaguu

SEQ ID NO: 295504 - RNA, 19 nt, Homo sapiens
  misc_RNA (1)...(19): siRNA sense strand
caaccaaacaucagaggaa

SEQ ID NO: 295505 - RNA, 19 nt, Homo sapiens
  misc_RNA (1)...(19): siRNA sense strand
ccaaucugguucgguauuu

SEQ ID NO: 295506 - RNA, 19 nt, Homo sapiens
  misc_RNA (1)...(19): siRNA sense strand
gcaaagaggaaacaaaauu

SEQ ID NO: 295507 - RNA, 19 nt, Homo sapiens
  misc_RNA (1)...(19): siRNA sense strand
gagaaagaauaucauuggu

SEQ ID NO: 295508 - RNA, 19 nt, Homo sapiens
  misc_RNA (1)...(19): siRNA sense strand
uaaacuaggacccauagaa

SEQ ID NO: 295509 - RNA, 19 nt, Homo sapiens
  misc_RNA (1)...(19): siRNA sense strand
caggaaagcucguaauuua

SEQ ID NO: 295510 - RNA, 19 nt, Homo sapiens
  misc_RNA (1)...(19): siRNA sense strand
gaacagccuucaaaucaaa

SEQ ID NO: 295511 - RNA, 19 nt, Homo sapiens
  misc_RNA (1)...(19): siRNA sense strand
ggaaagcucguaauuuaua

SEQ ID NO: 295512 - RNA, 19 nt, Homo sapiens
  misc_RNA (1)...(19): siRNA sense strand
gauguucucuacuauguua

SEQ ID NO: 295513 - RNA, 19 nt, Homo sapiens
  misc_RNA (1)...(19): siRNA sense strand
gcaaauacuggaaggauua

SEQ ID NO: 295514 - RNA, 19 nt, Homo sapiens
  misc_RNA (1)...(19): siRNA sense strand
gaagaaauagcauugcaua

SEQ ID NO: 295515 - RNA, 19 nt, Homo sapiens
  misc_RNA (1)...(19): siRNA sense strand
gaacuaaggccacauuuca

SEQ ID NO: 295516 - RNA, 19 nt, Homo sapiens
  misc_RNA (1)...(19): siRNA sense strand
cagcagauauugucauaaa

SEQ ID NO: 295517 - RNA, 19 nt, Homo sapiens
  misc_RNA (1)...(19): siRNA sense strand
uaaguagucuucuugguaa

SEQ ID NO: 295518 - RNA, 19 nt, Homo sapiens
  misc_RNA (1)...(19): siRNA sense strand
gaaauagcauugcauaaac

SEQ ID NO: 295519 - RNA, 19 nt, Homo sapiens
  misc_RNA (1)...(19): siRNA sense strand
gcacaaauacugaagauuc

SEQ ID NO: 295520 - RNA, 19 nt, Homo sapiens
  misc_RNA (1)...(19): siRNA sense strand
gaauggagcugaugaagac

SEQ ID NO: 295521 - RNA, 19 nt, Homo sapiens
  misc_RNA (1)...(19): siRNA sense strand
ucaagaugcugucaauaaa

SEQ ID NO: 295522 - RNA, 19 nt, Homo sapiens
  misc_RNA (1)...(19): siRNA sense strand
gggaaucuauacucaauga

SEQ ID NO: 295523 - RNA, 19 nt, Homo sapiens
  misc_RNA (1)...(19): siRNA sense strand
guauauggcaccagaaaua

SEQ ID NO: 295524 - RNA, 19 nt, Homo sapiens
  misc_RNA (1)...(19): siRNA sense strand
gguuagguuuccaguauua

SEQ ID NO: 295525 - RNA, 19 nt, Homo sapiens
  misc_RNA (1)...(19): siRNA sense strand
gcuaacgacuugcuuguug

SEQ ID NO: 295526 - RNA, 19 nt, Homo sapiens
  misc_RNA (1)...(19): siRNA sense strand
gaaaccuaauggaaucuuu

SEQ ID NO: 295527 - RNA, 19 nt, Homo sapiens
  misc_RNA (1)...(19): siRNA sense strand
gaaggagacugugaaagug

SEQ ID NO: 295528 - RNA, 19 nt, Homo sapiens
  misc_RNA (1)...(19): siRNA sense strand
ggaacagccuucaaaucaa

SEQ ID NO: 295529 - RNA, 19 nt, Homo sapiens
  misc_RNA (1)...(19): siRNA sense strand
ggacuaugauucuauugug

SEQ ID NO: 295530 - RNA, 19 nt, Homo sapiens
  misc_RNA (1)...(19): siRNA sense strand
ggaaggcuaucauugacuu

SEQ ID NO: 295531 - RNA, 19 nt, Homo sapiens
  misc_RNA (1)...(19): siRNA sense strand
ggaaggagacugugaaagu

SEQ ID NO: 295532 - RNA, 19 nt, Homo sapiens
  misc_RNA (1)...(19): siRNA sense strand
gcaaagcgaaggacaaguu

SEQ ID NO: 295533 - RNA, 19 nt, Homo sapiens
  misc_RNA (1)...(19): siRNA sense strand
acacuacagucaggaauua

SEQ ID NO: 295534 - RNA, 19 nt, Homo sapiens
  misc_RNA (1)...(19): siRNA sense strand
caugguaccucaagucuau

SEQ ID NO: 295535 - RNA, 19 nt, Homo sapiens
  misc_RNA (1)...(19): siRNA sense strand
ucacaauucugaugauuuc

SEQ ID NO: 295536 - RNA, 19 nt, Homo sapiens
  misc_RNA (1)...(19): siRNA sense strand
gugacaauguguugauuaa

SEQ ID NO: 295537 - RNA, 19 nt, Homo sapiens
  misc_RNA (1)...(19): siRNA sense strand
gaaacucgacuuuggagaa

SEQ ID NO: 295538 - RNA, 19 nt, Homo sapiens
  misc_RNA (1)...(19): siRNA sense strand
caauaaaguucuucggaau

SEQ ID NO: 295539 - RNA, 19 nt, Homo sapiens
  misc_RNA (1)...(19): siRNA sense strand
ggacaaguugcuucagaua

SEQ ID NO: 295540 - RNA, 19 nt, Homo sapiens
  misc_RNA (1)...(19): siRNA sense strand
caagaaagguauacaugag

SEQ ID NO: 295541 - RNA, 19 nt, Homo sapiens
  misc_RNA (1)...(19): siRNA sense strand
cagaauugcuauuaaggaa

SEQ ID NO: 295542 - RNA, 19 nt, Homo sapiens
  misc_RNA (1)...(19): siRNA sense strand
caagucagaauugcuauua

SEQ ID NO: 295543 - RNA, 19 nt, Homo sapiens
  misc_RNA (1)...(19): siRNA sense strand
ggacauaaagggugacaau

SEQ ID NO: 295544 - RNA, 19 nt, Homo sapiens
  misc_RNA (1)...(19): siRNA sense strand
acagagauauccaggacua

SEQ ID NO: 295545 - RNA, 19 nt, Homo sapiens
  misc_RNA (1)...(19): siRNA sense strand
ggaaagagaaagaauuaca

SEQ ID NO: 295546 - RNA, 19 nt, Homo sapiens
  misc_RNA (1)...(19): siRNA sense strand
gugguuagguuuccaguau

SEQ ID NO: 295547 - RNA, 19 nt, Homo sapiens
  misc_RNA (1)...(19): siRNA sense strand
ugagaaaccuaauggaauc

SEQ ID NO: 295548 - RNA, 19 nt, Homo sapiens
  misc_RNA (1)...(19): siRNA sense strand
gagcuacccuucacaggau

SEQ ID NO: 295549 - RNA, 19 nt, Homo sapiens
  misc_RNA (1)...(19): siRNA sense strand
gccaaggcauucauacuga

SEQ ID NO: 295550 - RNA, 19 nt, Homo sapiens
  misc_RNA (1)...(19): siRNA sense strand
gcaccagaaauaauagaua

SEQ ID NO: 295551 - RNA, 19 nt, Homo sapiens
  misc_RNA (1)...(19): siRNA sense strand
cauaaagggugacaaugug

SEQ ID NO: 295552 - RNA, 19 nt, Homo sapiens
  misc_RNA (1)...(19): siRNA sense strand
ggaguaugacuaugaauau

SEQ ID NO: 295553 - RNA, 19 nt, Homo sapiens
  misc_RNA (1)...(19): siRNA sense strand
aaagagaugucaagggaau

SEQ ID NO: 295554 - RNA, 19 nt, Homo sapiens
  misc_RNA (1)...(19): siRNA sense strand
ccaacaacaucauccucua

SEQ ID NO: 295555 - RNA, 19 nt, Homo sapiens
  misc_RNA (1)...(19): siRNA sense strand
ucucugggcuguacaauca

SEQ ID NO: 295556 - RNA, 19 nt, Homo sapiens
  misc_RNA (1)...(19): siRNA sense strand
acaaguugcuucagauaug

SEQ ID NO: 295557 - RNA, 19 nt, Homo sapiens
  misc_RNA (1)...(19): siRNA sense strand
caugauaacuccacauaac

SEQ ID NO: 295558 - RNA, 19 nt, Homo sapiens
  misc_RNA (1)...(19): siRNA sense strand
gugacuugcuggaguauga

SEQ ID NO: 295559 - RNA, 19 nt, Homo sapiens
  misc_RNA (1)...(19): siRNA sense strand
ggcugaagauuauacacua

SEQ ID NO: 295560 - RNA, 19 nt, Homo sapiens
  misc_RNA (1)...(19): siRNA sense strand
ucaucgagcuauugaagaa

SEQ ID NO: 295561 - RNA, 19 nt, Homo sapiens
  misc_RNA (1)...(19): siRNA sense strand
gcucaccggucacugaaug

SEQ ID NO: 295562 - RNA, 19 nt, Homo sapiens
  misc_RNA (1)...(19): siRNA sense strand
agacuuggauguagaagau

SEQ ID NO: 295563 - RNA, 19 nt, Homo sapiens
  misc_RNA (1)...(19): siRNA sense strand
gcacuuaugggauagucua

SEQ ID NO: 295564 - RNA, 19 nt, Homo sapiens
  misc_RNA (1)...(19): siRNA sense strand
gcagauauugucauaaauc

SEQ ID NO: 295565 - RNA, 19 nt, Homo sapiens
  misc_RNA (1)...(19): siRNA sense strand
guucuacugugucucauga

SEQ ID NO: 295566 - RNA, 19 nt, Homo sapiens
  misc_RNA (1)...(19): siRNA sense strand
gcacuggauguuugccuua

SEQ ID NO: 295567 - RNA, 19 nt, Homo sapiens
  misc_RNA (1)...(19): siRNA sense strand
aaagaggcuugcuggcaua

SEQ ID NO: 295568 - RNA, 19 nt, Homo sapiens
  misc_RNA (1)...(19): siRNA sense strand
cuaucaaccuucuuauuug

SEQ ID NO: 295569 - RNA, 19 nt, Homo sapiens
  misc_RNA (1)...(19): siRNA sense strand
cuaaguagucuucuuggua

SEQ ID NO: 295570 - RNA, 19 nt, Homo sapiens
  misc_RNA (1)...(19): siRNA sense strand
gauauguauugccuaguug

SEQ ID NO: 295571 - RNA, 19 nt, Homo sapiens
  misc_RNA (1)...(19): siRNA sense strand
ccaggacuaugauucuauu

SEQ ID NO: 295572 - RNA, 19 nt, Homo sapiens
  misc_RNA (1)...(19): siRNA sense strand
uuacuuuccuacagagaua

SEQ ID NO: 295573 - RNA, 19 nt, Homo sapiens
  misc_RNA (1)...(19): siRNA sense strand
gaaagcucguaauuuauac

SEQ ID NO: 295574 - RNA, 19 nt, Homo sapiens
  misc_RNA (1)...(19): siRNA sense strand
ucggaaagagaaagaauua

SEQ ID NO: 295575 - RNA, 19 nt, Homo sapiens
  misc_RNA (1)...(19): siRNA sense strand
gacaagagagccugugcua

SEQ ID NO: 295576 - RNA, 19 nt, Homo sapiens
  misc_RNA (1)...(19): siRNA sense strand
cagcugaguuggcaagaau

SEQ ID NO: 295577 - RNA, 19 nt, Homo sapiens
  misc_RNA (1)...(19): siRNA sense strand
aaacucgacuuuggagaaa

SEQ ID NO: 295578 - RNA, 19 nt, Homo sapiens
  misc_RNA (1)...(19): siRNA sense strand
uguuacacgugaugacuua

SEQ ID NO: 295579 - RNA, 19 nt, Homo sapiens
  misc_RNA (1)...(19): siRNA sense strand
aaaucaaacuguccgaaga

SEQ ID NO: 295580 - RNA, 19 nt, Homo sapiens
  misc_RNA (1)...(19): siRNA sense strand
gcugaagaaccgaaacuaa

SEQ ID NO: 295581 - RNA, 19 nt, Homo sapiens
  misc_RNA (1)...(19): siRNA sense strand
gcaaacaauuggcuuuuau

SEQ ID NO: 295582 - RNA, 19 nt, Homo sapiens
  misc_RNA (1)...(19): siRNA sense strand
auaaacaccugaagcacaa

SEQ ID NO: 295583 - RNA, 19 nt, Homo sapiens
  misc_RNA (1)...(19): siRNA sense strand
gaagguggcacaagcaagu

SEQ ID NO: 295584 - RNA, 19 nt, Homo sapiens
  misc_RNA (1)...(19): siRNA sense strand
uauuggauguucucuacua

SEQ ID NO: 295585 - RNA, 19 nt, Homo sapiens
  misc_RNA (1)...(19): siRNA sense strand
gacggaagaccaagacaaa

SEQ ID NO: 295586 - RNA, 19 nt, Homo sapiens
  misc_RNA (1)...(19): siRNA sense strand
gagcaaccaagucagaauu

SEQ ID NO: 295587 - RNA, 19 nt, Homo sapiens
  misc_RNA (1)...(19): siRNA sense strand
ggacaccaguuugaaucuu

SEQ ID NO: 295588 - RNA, 19 nt, Homo sapiens
  misc_RNA (1)...(19): siRNA sense strand
gagauauccaggacuauga

SEQ ID NO: 295589 - RNA, 19 nt, Homo sapiens
  misc_RNA (1)...(19): siRNA sense strand
ggaagaauugguucggaaa

SEQ ID NO: 295590 - RNA, 19 nt, Homo sapiens
  misc_RNA (1)...(19): siRNA sense strand
ucagagaauuugugagauc

SEQ ID NO: 295591 - RNA, 19 nt, Homo sapiens
  misc_RNA (1)...(19): siRNA sense strand
aaaaggcacuuaugggaua

SEQ ID NO: 295592 - RNA, 19 nt, Homo sapiens
  misc_RNA (1)...(19): siRNA sense strand
gggagugaguauuucuaaa

SEQ ID NO: 295593 - RNA, 19 nt, Homo sapiens
  misc_RNA (1)...(19): siRNA sense strand
gacuaugauucuauuguga

SEQ ID NO: 295594 - RNA, 19 nt, Homo sapiens
  misc_RNA (1)...(19): siRNA sense strand
agauauguauugccuaguu

SEQ ID NO: 295595 - RNA, 19 nt, Homo sapiens
  misc_RNA (1)...(19): siRNA sense strand
caagagagccugugcuaac

SEQ ID NO: 295596 - RNA, 19 nt, Homo sapiens
  misc_RNA (1)...(19): siRNA sense strand
gcuggaguaugacuaugaa

SEQ ID NO: 295597 - RNA, 19 nt, Homo sapiens
  misc_RNA (1)...(19): siRNA sense strand
gaacaccauuaccgaagag

SEQ ID NO: 295598 - RNA, 19 nt, Homo sapiens
  misc_RNA (1)...(19): siRNA sense strand
gacaagaaagguauacaug

SEQ ID NO: 295599 - RNA, 19 nt, Homo sapiens
  misc_RNA (1)...(19): siRNA sense strand
gcaugaagaaauagcauug

SEQ ID NO: 295600 - RNA, 19 nt, Homo sapiens
  misc_RNA (1)...(19): siRNA sense strand
ggugacaauguguugauua

SEQ ID NO: 295601 - RNA, 19 nt, Homo sapiens
  misc_RNA (1)...(19): siRNA sense strand
gauaacuccacauaacaaa

SEQ ID NO: 295602 - RNA, 19 nt, Homo sapiens
  misc_RNA (1)...(19): siRNA sense strand
gcugaagauuauacacuau

SEQ ID NO: 295603 - RNA, 19 nt, Homo sapiens
  misc_RNA (1)...(19): siRNA sense strand
gcuuaagucccaacccaua

SEQ ID NO: 295604 - RNA, 19 nt, Homo sapiens
  misc_RNA (1)...(19): siRNA sense strand
uauggcaccagaaauaaua

SEQ ID NO: 295605 - RNA, 19 nt, Homo sapiens
  misc_RNA (1)...(19): siRNA sense strand
uggcauaugugaucaacga

SEQ ID NO: 295606 - RNA, 19 nt, Homo sapiens
  misc_RNA (1)...(19): siRNA sense strand
gaguaugacuaugaauaug

SEQ ID NO: 295607 - RNA, 19 nt, Homo sapiens
  misc_RNA (1)...(19): siRNA sense strand
gcaaaagcucuugauauua

SEQ ID NO: 295608 - RNA, 19 nt, Homo sapiens
  misc_RNA (1)...(19): siRNA sense strand
gcacugaauaggagaaauc

SEQ ID NO: 295609 - RNA, 19 nt, Homo sapiens
  misc_RNA (1)...(19): siRNA sense strand
ggaaggaaauuacaaguca

SEQ ID NO: 295610 - RNA, 19 nt, Homo sapiens
  misc_RNA (1)...(19): siRNA sense strand
gaucugaccauaugucuua

SEQ ID NO: 295611 - RNA, 19 nt, Homo sapiens
  misc_RNA (1)...(19): siRNA sense strand
ggacagcauuuaccaaaga

SEQ ID NO: 295612 - RNA, 19 nt, Homo sapiens
  misc_RNA (1)...(19): siRNA sense strand
gaacacuucucccaucaga

SEQ ID NO: 295613 - RNA, 19 nt, Homo sapiens
  misc_RNA (1)...(19): siRNA sense strand
gaaagaaaggacagcauuu

SEQ ID NO: 295614 - RNA, 19 nt, Homo sapiens
  misc_RNA (1)...(19): siRNA sense strand
caucagagcugucgggaau

SEQ ID NO: 295615 - RNA, 19 nt, Homo sapiens
  misc_RNA (1)...(19): siRNA sense strand
caacgaagagggcauguuu

SEQ ID NO: 295616 - RNA, 19 nt, Homo sapiens
  misc_RNA (1)...(19): siRNA sense strand
ggaaagaaaggacagcauu

SEQ ID NO: 295617 - RNA, 19 nt, Homo sapiens
  misc_RNA (1)...(19): siRNA sense strand
gugaaagucugguuccaaa

SEQ ID NO: 295618 - RNA, 19 nt, Homo sapiens
  misc_RNA (1)...(19): siRNA sense strand
uggaagaucugaccauaug

SEQ ID NO: 295619 - RNA, 19 nt, Homo sapiens
  misc_RNA (1)...(19): siRNA sense strand
gguaaaggguggacagcaa

SEQ ID NO: 295620 - RNA, 19 nt, Homo sapiens
  misc_RNA (1)...(19): siRNA sense strand
gaaauuacaagucagaagu

SEQ ID NO: 295621 - RNA, 19 nt, Homo sapiens
  misc_RNA (1)...(19): siRNA sense strand
ccaaagagcaaaucagaga

SEQ ID NO: 295622 - RNA, 19 nt, Homo sapiens
  misc_RNA (1)...(19): siRNA sense strand
aaagaaaggacagcauuua

SEQ ID NO: 295623 - RNA, 19 nt, Homo sapiens
  misc_RNA (1)...(19): siRNA sense strand
gagcaaaucagagaacuug

SEQ ID NO: 295624 - RNA, 19 nt, Homo sapiens
  misc_RNA (1)...(19): siRNA sense strand
gcaaaucagagaacuugaa

SEQ ID NO: 295625 - RNA, 19 nt, Homo sapiens
  misc_RNA (1)...(19): siRNA sense strand
gaaucuggaucucacugaa

SEQ ID NO: 295626 - RNA, 19 nt, Homo sapiens
  misc_RNA (1)...(19): siRNA sense strand
gauacgagauagcagugaa

SEQ ID NO: 295627 - RNA, 19 nt, Homo sapiens
  misc_RNA (1)...(19): siRNA sense strand
cagagaacuugaagcagaa

SEQ ID NO: 295628 - RNA, 19 nt, Homo sapiens
  misc_RNA (1)...(19): siRNA sense strand
aaaaggaacuggugaaugu

SEQ ID NO: 295629 - RNA, 19 nt, Homo sapiens
  misc_RNA (1)...(19): siRNA sense strand
gaaaggacagcauuuacca

SEQ ID NO: 295630 - RNA, 19 nt, Homo sapiens
  misc_RNA (1)...(19): siRNA sense strand
gggacucuauagcaaauga

SEQ ID NO: 295631 - RNA, 19 nt, Homo sapiens
  misc_RNA (1)...(19): siRNA sense strand
gaacuugaagcagaauuug

SEQ ID NO: 295632 - RNA, 19 nt, Homo sapiens
  misc_RNA (1)...(19): siRNA sense strand
caacagcaaacccaggaaa

SEQ ID NO: 295633 - RNA, 19 nt, Homo sapiens
  misc_RNA (1)...(19): siRNA sense strand
ucagagcugucgggaauug

SEQ ID NO: 295634 - RNA, 19 nt, Homo sapiens
  misc_RNA (1)...(19): siRNA sense strand
aagcagaauuugcccauca

SEQ ID NO: 295635 - RNA, 19 nt, Homo sapiens
  misc_RNA (1)...(19): siRNA sense strand
ucaccagacugaggcgaua

SEQ ID NO: 295636 - RNA, 19 nt, Homo sapiens
  misc_RNA (1)...(19): siRNA sense strand
gcagaauuugcccaucaua

SEQ ID NO: 295637 - RNA, 19 nt, Homo sapiens
  misc_RNA (1)...(19): siRNA sense strand
auaauuaucucaccagacu

SEQ ID NO: 295638 - RNA, 19 nt, Homo sapiens
  misc_RNA (1)...(19): siRNA sense strand
cagaauuugcccaucauaa

SEQ ID NO: 295639 - RNA, 19 nt, Homo sapiens
  misc_RNA (1)...(19): siRNA sense strand
gcaaacaggggacucuaua

SEQ ID NO: 295640 - RNA, 19 nt, Homo sapiens
  misc_RNA (1)...(19): siRNA sense strand
agucagaagucaacagcaa

SEQ ID NO: 295641 - RNA, 19 nt, Homo sapiens
  misc_RNA (1)...(19): siRNA sense strand
gaagaucugaccauauguc

SEQ ID NO: 295642 - RNA, 19 nt, Homo sapiens
  misc_RNA (1)...(19): siRNA sense strand
cagcaaacccaggaaagaa

SEQ ID NO: 295643 - RNA, 19 nt, Homo sapiens
  misc_RNA (1)...(19): siRNA sense strand
ugaagacagucacgacagu

SEQ ID NO: 295644 - RNA, 19 nt, Homo sapiens
  misc_RNA (1)...(19): siRNA sense strand
uauagcaaaugaagacagu

SEQ ID NO: 295645 - RNA, 19 nt, Homo sapiens
  misc_RNA (1)...(19): siRNA sense strand
gcagccacccuccagcaaa

SEQ ID NO: 295646 - RNA, 19 nt, Homo sapiens
  misc_RNA (1)...(19): siRNA sense strand
ggaaauuacaagucagaag

SEQ ID NO: 295647 - RNA, 19 nt, Homo sapiens
  misc_RNA (1)...(19): siRNA sense strand
agaauuugcccaucauaau

SEQ ID NO: 295648 - RNA, 19 nt, Homo sapiens
  misc_RNA (1)...(19): siRNA sense strand
uaccaaagagcaaaucaga

SEQ ID NO: 295649 - RNA, 19 nt, Homo sapiens
  misc_RNA (1)...(19): siRNA sense strand
ggaacuggugaaugugaaa

SEQ ID NO: 295650 - RNA, 19 nt, Homo sapiens
  misc_RNA (1)...(19): siRNA sense strand
caaagagcaaaucagagaa

SEQ ID NO: 295651 - RNA, 19 nt, Homo sapiens
  misc_RNA (1)...(19): siRNA sense strand
gcaccaggcucugcaaacc

SEQ ID NO: 295652 - RNA, 19 nt, Homo sapiens
  misc_RNA (1)...(19): siRNA sense strand
acaggcggaugaaguggaa

SEQ ID NO: 295653 - RNA, 19 nt, Homo sapiens
  misc_RNA (1)...(19): siRNA sense strand
caaaucagagaacuugaag

SEQ ID NO: 295654 - RNA, 19 nt, Homo sapiens
  misc_RNA (1)...(19): siRNA sense strand
aaggacagcauuuaccaaa

SEQ ID NO: 295655 - RNA, 19 nt, Homo sapiens
  misc_RNA (1)...(19): siRNA sense strand
gcaaacccaggaaagaaag

SEQ ID NO: 295656 - RNA, 19 nt, Homo sapiens
  misc_RNA (1)...(19): siRNA sense strand
cagcucagacucccaggaa

SEQ ID NO: 295657 - RNA, 19 nt, Homo sapiens
  misc_RNA (1)...(19): siRNA sense strand
aaucagagaacuugaagca

SEQ ID NO: 295658 - RNA, 19 nt, Homo sapiens
  misc_RNA (1)...(19): siRNA sense strand
gcagugaaucuggaucuca

SEQ ID NO: 295659 - RNA, 19 nt, Homo sapiens
  misc_RNA (1)...(19): siRNA sense strand
agaacuugaagcagaauuu

SEQ ID NO: 295660 - RNA, 19 nt, Homo sapiens
  misc_RNA (1)...(19): siRNA sense strand
gcauuuaccaaagagcaaa

SEQ ID NO: 295661 - RNA, 19 nt, Homo sapiens
  misc_RNA (1)...(19): siRNA sense strand
cccgagcucucuacuucuu

SEQ ID NO: 295662 - RNA, 19 nt, Homo sapiens
  misc_RNA (1)...(19): siRNA sense strand
cuacuucuuccucaucuug

SEQ ID NO: 295663 - RNA, 19 nt, Homo sapiens
  misc_RNA (1)...(19): siRNA sense strand
gaaaaggaacuggugaaug

SEQ ID NO: 295664 - RNA, 19 nt, Homo sapiens
  misc_RNA (1)...(19): siRNA sense strand
uuccucaucuugcauaauc

SEQ ID NO: 295665 - RNA, 19 nt, Homo sapiens
  misc_RNA (1)...(19): siRNA sense strand
gacagcauuuaccaaagag

SEQ ID NO: 295666 - RNA, 19 nt, Homo sapiens
  misc_RNA (1)...(19): siRNA sense strand
ggugaaagucugguuccaa

SEQ ID NO: 295667 - RNA, 19 nt, Homo sapiens
  misc_RNA (1)...(19): siRNA sense strand
cucagagcaugcgcacuua

SEQ ID NO: 295668 - RNA, 19 nt, Homo sapiens
  misc_RNA (1)...(19): siRNA sense strand
uagcaaaugaagacaguca

SEQ ID NO: 295669 - RNA, 19 nt, Homo sapiens
  misc_RNA (1)...(19): siRNA sense strand
ccaccaccaucaccaccau

SEQ ID NO: 295670 - RNA, 19 nt, Homo sapiens
  misc_RNA (1)...(19): siRNA sense strand
cagagcaugcgcacuuaug

SEQ ID NO: 295671 - RNA, 19 nt, Homo sapiens
  misc_RNA (1)...(19): siRNA sense strand
guccugugcuccaacucuu

SEQ ID NO: 295672 - RNA, 19 nt, Homo sapiens
  misc_RNA (1)...(19): siRNA sense strand
ccaggaaggaaauuacaag

SEQ ID NO: 295673 - RNA, 19 nt, Homo sapiens
  misc_RNA (1)...(19): siRNA sense strand
caaaacaggcggaugaagu

SEQ ID NO: 295674 - RNA, 19 nt, Homo sapiens
  misc_RNA (1)...(19): siRNA sense strand
ugaaagacaggugaaaguc

SEQ ID NO: 295675 - RNA, 19 nt, Homo sapiens
  misc_RNA (1)...(19): siRNA sense strand
gagaacuugaagcagaauu

SEQ ID NO: 295676 - RNA, 19 nt, Homo sapiens
  misc_RNA (1)...(19): siRNA sense strand
cagccacccuccagcaaac

SEQ ID NO: 295677 - RNA, 19 nt, Homo sapiens
  misc_RNA (1)...(19): siRNA sense strand
acagcaaacccaggaaaga

SEQ ID NO: 295678 - RNA, 19 nt, Homo sapiens
  misc_RNA (1)...(19): siRNA sense strand
agagcaugcgcacuuauga

SEQ ID NO: 295679 - RNA, 19 nt, Homo sapiens
  misc_RNA (1)...(19): siRNA sense strand
aauuaucucaccagacuga

SEQ ID NO: 295680 - RNA, 19 nt, Homo sapiens
  misc_RNA (1)...(19): siRNA sense strand
gggcugcgauguacucaaa

SEQ ID NO: 295681 - RNA, 19 nt, Homo sapiens
  misc_RNA (1)...(19): siRNA sense strand
gaaaggagcacggccugaa

SEQ ID NO: 295682 - RNA, 19 nt, Homo sapiens
  misc_RNA (1)...(19): siRNA sense strand
ggagagauacuacgacuac

SEQ ID NO: 295683 - RNA, 19 nt, Homo sapiens
  misc_RNA (1)...(19): siRNA sense strand
gggcaggagagaccaguua

SEQ ID NO: 295684 - RNA, 19 nt, Homo sapiens
  misc_RNA (1)...(19): siRNA sense strand
ggacguggcuuuugugaag

SEQ ID NO: 295685 - RNA, 19 nt, Homo sapiens
  misc_RNA (1)...(19): siRNA sense strand
gcucccaugugaccauuga

SEQ ID NO: 295686 - RNA, 19 nt, Homo sapiens
  misc_RNA (1)...(19): siRNA sense strand
ggugaugggcugcgaugua

SEQ ID NO: 295687 - RNA, 19 nt, Homo sapiens
  misc_RNA (1)...(19): siRNA sense strand
gcacgguacuggagaacac

SEQ ID NO: 295688 - RNA, 19 nt, Homo sapiens
  misc_RNA (1)...(19): siRNA sense strand
gagcucccaugugaccauu

SEQ ID NO: 295689 - RNA, 19 nt, Homo sapiens
  misc_RNA (1)...(19): siRNA sense strand
gaccauugacacccugaaa

SEQ ID NO: 295690 - RNA, 19 nt, Homo sapiens
  misc_RNA (1)...(19): siRNA sense strand
gugaugggcugcgauguac

SEQ ID NO: 295691 - RNA, 19 nt, Homo sapiens
  misc_RNA (1)...(19): siRNA sense strand
cacaagugcggcaacauga

SEQ ID NO: 295692 - RNA, 19 nt, Homo sapiens
  misc_RNA (1)...(19): siRNA sense strand
cgaaguguacgaucaagag

SEQ ID NO: 295693 - RNA, 19 nt, Homo sapiens
  misc_RNA (1)...(19): siRNA sense strand
gggcgaaguguacgaucaa

SEQ ID NO: 295694 - RNA, 19 nt, Homo sapiens
  misc_RNA (1)...(19): siRNA sense strand
gaaggggugugugacaaga

SEQ ID NO: 295695 - RNA, 19 nt, Homo sapiens
  misc_RNA (1)...(19): siRNA sense strand
gagagauacuacgacuaca

SEQ ID NO: 295696 - RNA, 19 nt, Homo sapiens
  misc_RNA (1)...(19): siRNA sense strand
gcgaaguguacgaucaaga

SEQ ID NO: 295697 - RNA, 19 nt, Homo sapiens
  misc_RNA (1)...(19): siRNA sense strand
acagcacgguacuggagaa

SEQ ID NO: 295698 - RNA, 19 nt, Homo sapiens
  misc_RNA (1)...(19): siRNA sense strand
gggcugcgauguacucaaa

SEQ ID NO: 295699 - RNA, 19 nt, Homo sapiens
  misc_RNA (1)...(19): siRNA sense strand
gaaaggagcacggccugaa

SEQ ID NO: 295700 - RNA, 19 nt, Homo sapiens
  misc_RNA (1)...(19): siRNA sense strand
ggagagauacuacgacuac

SEQ ID NO: 295701 - RNA, 19 nt, Homo sapiens
  misc_RNA (1)...(19): siRNA sense strand
gggcaggagagaccaguua

SEQ ID NO: 295702 - RNA, 19 nt, Homo sapiens
  misc_RNA (1)...(19): siRNA sense strand
ggacguggcuuuugugaag

SEQ ID NO: 295703 - RNA, 19 nt, Homo sapiens
  misc_RNA (1)...(19): siRNA sense strand
gcucccaugugaccauuga

SEQ ID NO: 295704 - RNA, 19 nt, Homo sapiens
  misc_RNA (1)...(19): siRNA sense strand
ggugaugggcugcgaugua

SEQ ID NO: 295705 - RNA, 19 nt, Homo sapiens
  misc_RNA (1)...(19): siRNA sense strand
gcacgguacuggagaacac

SEQ ID NO: 295706 - RNA, 19 nt, Homo sapiens
  misc_RNA (1)...(19): siRNA sense strand
gagcucccaugugaccauu

SEQ ID NO: 295707 - RNA, 19 nt, Homo sapiens
  misc_RNA (1)...(19): siRNA sense strand
gaccauugacacccugaaa

SEQ ID NO: 295708 - RNA, 19 nt, Homo sapiens
  misc_RNA (1)...(19): siRNA sense strand
gugaugggcugcgauguac

SEQ ID NO: 295709 - RNA, 19 nt, Homo sapiens
  misc_RNA (1)...(19): siRNA sense strand
cacaagugcggcaacauga

SEQ ID NO: 295710 - RNA, 19 nt, Homo sapiens
  misc_RNA (1)...(19): siRNA sense strand
cgaaguguacgaucaagag

SEQ ID NO: 295711 - RNA, 19 nt, Homo sapiens
  misc_RNA (1)...(19): siRNA sense strand
gggcgaaguguacgaucaa

SEQ ID NO: 295712 - RNA, 19 nt, Homo sapiens
  misc_RNA (1)...(19): siRNA sense strand
gaaggggugugugacaaga

SEQ ID NO: 295713 - RNA, 19 nt, Homo sapiens
  misc_RNA (1)...(19): siRNA sense strand
gagagauacuacgacuaca

SEQ ID NO: 295714 - RNA, 19 nt, Homo sapiens
  misc_RNA (1)...(19): siRNA sense strand
gcgaaguguacgaucaaga

SEQ ID NO: 295715 - RNA, 19 nt, Homo sapiens
  misc_RNA (1)...(19): siRNA sense strand
acagcacgguacuggagaa

SEQ ID NO: 295716 - RNA, 19 nt, Homo sapiens
  misc_RNA (1)...(19): siRNA sense strand
ggacagacuuuccauaugu

SEQ ID NO: 295717 - RNA, 19 nt, Homo sapiens
  misc_RNA (1)...(19): siRNA sense strand
gaaggaagaugccaugaag

SEQ ID NO: 295718 - RNA, 19 nt, Homo sapiens
  misc_RNA (1)...(19): siRNA sense strand
gcucagaccuuggcuauga

SEQ ID NO: 295719 - RNA, 19 nt, Homo sapiens
  misc_RNA (1)...(19): siRNA sense strand
ggaggacccugacucauau

SEQ ID NO: 295720 - RNA, 19 nt, Homo sapiens
  misc_RNA (1)...(19): siRNA sense strand
gcuaugaacgucacaaauu

SEQ ID NO: 295721 - RNA, 19 nt, Homo sapiens
  misc_RNA (1)...(19): siRNA sense strand
cuaugaacgucacaaauuu

SEQ ID NO: 295722 - RNA, 19 nt, Homo sapiens
  misc_RNA (1)...(19): siRNA sense strand
ggauggaucugugcaguca

SEQ ID NO: 295723 - RNA, 19 nt, Homo sapiens
  misc_RNA (1)...(19): siRNA sense strand
gagauuagggucugugaga

SEQ ID NO: 295724 - RNA, 19 nt, Homo sapiens
  misc_RNA (1)...(19): siRNA sense strand
cuacagcgauaucugaaau

SEQ ID NO: 295725 - RNA, 19 nt, Homo sapiens
  misc_RNA (1)...(19): siRNA sense strand
ggaaggaagaugccaugaa

SEQ ID NO: 295726 - RNA, 19 nt, Homo sapiens
  misc_RNA (1)...(19): siRNA sense strand
gcuaugccauguuuuguua

SEQ ID NO: 295727 - RNA, 19 nt, Homo sapiens
  misc_RNA (1)...(19): siRNA sense strand
ucacaaauuucuggaagga

SEQ ID NO: 295728 - RNA, 19 nt, Homo sapiens
  misc_RNA (1)...(19): siRNA sense strand
gacagacuuuccauauguu

SEQ ID NO: 295729 - RNA, 19 nt, Homo sapiens
  misc_RNA (1)...(19): siRNA sense strand
ucugugagauccaugaaga

SEQ ID NO: 295730 - RNA, 19 nt, Homo sapiens
  misc_RNA (1)...(19): siRNA sense strand
gcuacuggguccacugguu

SEQ ID NO: 295731 - RNA, 19 nt, Homo sapiens
  misc_RNA (1)...(19): siRNA sense strand
aaacuacagcgauaucuga

SEQ ID NO: 295732 - RNA, 19 nt, Homo sapiens
  misc_RNA (1)...(19): siRNA sense strand
ugcagaaacuacagcgaua

SEQ ID NO: 295733 - RNA, 19 nt, Homo sapiens
  misc_RNA (1)...(19): siRNA sense strand
gagcucagaccuuggcuau

SEQ ID NO: 295734 - RNA, 19 nt, Homo sapiens
  misc_RNA (1)...(19): siRNA sense strand
gacccugacucauaucaag

SEQ ID NO: 295735 - RNA, 19 nt, Homo sapiens
  misc_RNA (1)...(19): siRNA sense strand
acacagagaccgaggacuu

SEQ ID NO: 295736 - RNA, 19 nt, Homo sapiens
  misc_RNA (1)...(19): siRNA sense strand
gaaacuacagcgauaucug

SEQ ID NO: 295737 - RNA, 19 nt, Homo sapiens
  misc_RNA (1)...(19): siRNA sense strand
aggaggacccugacucaua

SEQ ID NO: 295738 - RNA, 19 nt, Homo sapiens
  misc_RNA (1)...(19): siRNA sense strand
cugcugcuaugccauguuu

SEQ ID NO: 295739 - RNA, 19 nt, Homo sapiens
  misc_RNA (1)...(19): siRNA sense strand
gaagaccaagacacacuau

SEQ ID NO: 295740 - RNA, 19 nt, Homo sapiens
  misc_RNA (1)...(19): siRNA sense strand
cggacagacuuuccauaug

SEQ ID NO: 295741 - RNA, 19 nt, Homo sapiens
  misc_RNA (1)...(19): siRNA sense strand
ccgaggacuugacagagaa

SEQ ID NO: 295742 - RNA, 19 nt, Homo sapiens
  misc_RNA (1)...(19): siRNA sense strand
cagaaaggaggcuugcauu

SEQ ID NO: 295743 - RNA, 19 nt, Homo sapiens
  misc_RNA (1)...(19): siRNA sense strand
ggcagaggguccagagcuu

SEQ ID NO: 295744 - RNA, 19 nt, Homo sapiens
  misc_RNA (1)...(19): siRNA sense strand
gcagaaacuacagcgauau

SEQ ID NO: 295745 - RNA, 19 nt, Homo sapiens
  misc_RNA (1)...(19): siRNA sense strand
gaaaggaggcuugcauucc

SEQ ID NO: 295746 - RNA, 19 nt, Homo sapiens
  misc_RNA (1)...(19): siRNA sense strand
ugacagagaaugggcaaga

SEQ ID NO: 295747 - RNA, 19 nt, Homo sapiens
  misc_RNA (1)...(19): siRNA sense strand
gcucccggcauuucuacua

SEQ ID NO: 295748 - RNA, 19 nt, Homo sapiens
  misc_RNA (1)...(19): siRNA sense strand
gacacacuaucgcgcuaug

SEQ ID NO: 295749 - RNA, 19 nt, Homo sapiens
  misc_RNA (1)...(19): siRNA sense strand
aagaugccaugaagaccaa

SEQ ID NO: 295750 - RNA, 19 nt, Homo sapiens
  misc_RNA (1)...(19): siRNA sense strand
ccauauguuucugcugcua

SEQ ID NO: 295751 - RNA, 19 nt, Homo sapiens
  misc_RNA (1)...(19): siRNA sense strand
caccaggauucgccaagga

SEQ ID NO: 295752 - RNA, 19 nt, Homo sapiens
  misc_RNA (1)...(19): siRNA sense strand
ccaugaagaccaagacaca

SEQ ID NO: 295753 - RNA, 19 nt, Homo sapiens
  misc_RNA (1)...(19): siRNA sense strand
ggacagugggcagaagaug

SEQ ID NO: 295754 - RNA, 19 nt, Homo sapiens
  misc_RNA (1)...(19): siRNA sense strand
gagcucuuccucucccaaa

SEQ ID NO: 295755 - RNA, 19 nt, Homo sapiens
  misc_RNA (1)...(19): siRNA sense strand
ugaagaccaagacacacua

SEQ ID NO: 295756 - RNA, 19 nt, Homo sapiens
  misc_RNA (1)...(19): siRNA sense strand
ggagaggagcagagguuca

SEQ ID NO: 295757 - RNA, 19 nt, Homo sapiens
  misc_RNA (1)...(19): siRNA sense strand
uaucaaggaccagaaagga

SEQ ID NO: 295758 - RNA, 19 nt, Homo sapiens
  misc_RNA (1)...(19): siRNA sense strand
ccagaaaggaggcuugcau

SEQ ID NO: 295759 - RNA, 19 nt, Homo sapiens
  misc_RNA (1)...(19): siRNA sense strand
ccuggagacucaagaaucg

SEQ ID NO: 295760 - RNA, 19 nt, Homo sapiens
  misc_RNA (1)...(19): siRNA sense strand
ccacagucuucguuacaac

SEQ ID NO: 295761 - RNA, 19 nt, Homo sapiens
  misc_RNA (1)...(19): siRNA sense strand
gacagugggcagaagaugu

SEQ ID NO: 295762 - RNA, 19 nt, Homo sapiens
  misc_RNA (1)...(19): siRNA sense strand
gauuagggucugugagauc

SEQ ID NO: 295763 - RNA, 19 nt, Homo sapiens
  misc_RNA (1)...(19): siRNA sense strand
ucauaucaaggaccagaaa

SEQ ID NO: 295764 - RNA, 19 nt, Homo sapiens
  misc_RNA (1)...(19): siRNA sense strand
accgaggacuugacagaga

SEQ ID NO: 295765 - RNA, 19 nt, Homo sapiens
  misc_RNA (1)...(19): siRNA sense strand
agaaaggaggcuugcauuc

SEQ ID NO: 295766 - RNA, 19 nt, Homo sapiens
  misc_RNA (1)...(19): siRNA sense strand
cccaaaaccuggagacuca

SEQ ID NO: 295767 - RNA, 19 nt, Homo sapiens
  misc_RNA (1)...(19): siRNA sense strand
caaauuucuggaaggaaga

SEQ ID NO: 295768 - RNA, 19 nt, Homo sapiens
  misc_RNA (1)...(19): siRNA sense strand
aaaccuggagacucaagaa

SEQ ID NO: 295769 - RNA, 19 nt, Homo sapiens
  misc_RNA (1)...(19): siRNA sense strand
agaccgaggacuugacaga

SEQ ID NO: 295770 - RNA, 19 nt, Homo sapiens
  misc_RNA (1)...(19): siRNA sense strand
guucaccugcuacauggaa

SEQ ID NO: 295771 - RNA, 19 nt, Homo sapiens
  misc_RNA (1)...(19): siRNA sense strand
ggucucagagggcaacauc

SEQ ID NO: 295772 - RNA, 19 nt, Homo sapiens
  misc_RNA (1)...(19): siRNA sense strand
gcagaaacgcagggcaaag

SEQ ID NO: 295773 - RNA, 19 nt, Homo sapiens
  misc_RNA (1)...(19): siRNA sense strand
ggacccugacucauaucaa

SEQ ID NO: 295774 - RNA, 19 nt, Homo sapiens
  misc_RNA (1)...(19): siRNA sense strand
aaggagaggagcagagguu

SEQ ID NO: 295775 - RNA, 19 nt, Homo sapiens
  misc_RNA (1)...(19): siRNA sense strand
acggacagacuuuccauau

SEQ ID NO: 295776 - RNA, 19 nt, Homo sapiens
  misc_RNA (1)...(19): siRNA sense strand
cagaaacuacagcgauauc

SEQ ID NO: 295777 - RNA, 19 nt, Homo sapiens
  misc_RNA (1)...(19): siRNA sense strand
caacggacagacuuuccau

SEQ ID NO: 295778 - RNA, 19 nt, Homo sapiens
  misc_RNA (1)...(19): siRNA sense strand
cauauucgcugaguucuuu

SEQ ID NO: 295779 - RNA, 19 nt, Homo sapiens
  misc_RNA (1)...(19): siRNA sense strand
gcagguggcuauggcauuu

SEQ ID NO: 295780 - RNA, 19 nt, Homo sapiens
  misc_RNA (1)...(19): siRNA sense strand
gaggaaaccuagcacucaa

SEQ ID NO: 295781 - RNA, 19 nt, Homo sapiens
  misc_RNA (1)...(19): siRNA sense strand
ccucuucuaugucuucuuu

SEQ ID NO: 295782 - RNA, 19 nt, Homo sapiens
  misc_RNA (1)...(19): siRNA sense strand
guacgacuuucuucucuuc

SEQ ID NO: 295783 - RNA, 19 nt, Homo sapiens
  misc_RNA (1)...(19): siRNA sense strand
gcugugcuguauagcguua

SEQ ID NO: 295784 - RNA, 19 nt, Homo sapiens
  misc_RNA (1)...(19): siRNA sense strand
caagaguauuucugagaga

SEQ ID NO: 295785 - RNA, 19 nt, Homo sapiens
  misc_RNA (1)...(19): siRNA sense strand
ucacugggaacuucacuaa

SEQ ID NO: 295786 - RNA, 19 nt, Homo sapiens
  misc_RNA (1)...(19): siRNA sense strand
gggaaccuguugaacugaa

SEQ ID NO: 295787 - RNA, 19 nt, Homo sapiens
  misc_RNA (1)...(19): siRNA sense strand
caaacccgaugucuccaau

SEQ ID NO: 295788 - RNA, 19 nt, Homo sapiens
  misc_RNA (1)...(19): siRNA sense strand
gcaccucuuugggauguau

SEQ ID NO: 295789 - RNA, 19 nt, Homo sapiens
  misc_RNA (1)...(19): siRNA sense strand
gggcaccucuuugggaugu

SEQ ID NO: 295790 - RNA, 19 nt, Homo sapiens
  misc_RNA (1)...(19): siRNA sense strand
cuccgugccuucugcuaua

SEQ ID NO: 295791 - RNA, 19 nt, Homo sapiens
  misc_RNA (1)...(19): siRNA sense strand
ggaaaccuagcacucaaca

SEQ ID NO: 295792 - RNA, 19 nt, Homo sapiens
  misc_RNA (1)...(19): siRNA sense strand
cgaggaaaccuagcacuca

SEQ ID NO: 295793 - RNA, 19 nt, Homo sapiens
  misc_RNA (1)...(19): siRNA sense strand
ucacuaaccacugggugua

SEQ ID NO: 295794 - RNA, 19 nt, Homo sapiens
  misc_RNA (1)...(19): siRNA sense strand
gaauccugcccgcuccuuu

SEQ ID NO: 295795 - RNA, 19 nt, Homo sapiens
  misc_RNA (1)...(19): siRNA sense strand
ggccauauucgcugaguuc

SEQ ID NO: 295796 - RNA, 19 nt, Homo sapiens
  misc_RNA (1)...(19): siRNA sense strand
gcagccuccuguacgacuu

SEQ ID NO: 295797 - RNA, 19 nt, Homo sapiens
  misc_RNA (1)...(19): siRNA sense strand
guucgugcucugcaucuuu

SEQ ID NO: 295798 - RNA, 19 nt, Homo sapiens
  misc_RNA (1)...(19): siRNA sense strand
gaggcggaauggccaacug

SEQ ID NO: 295799 - RNA, 19 nt, Homo sapiens
  misc_RNA (1)...(19): siRNA sense strand
ucaauccugcagucacuuu

SEQ ID NO: 295800 - RNA, 19 nt, Homo sapiens
  misc_RNA (1)...(19): siRNA sense strand
uugccacccucuucuaugu

SEQ ID NO: 295801 - RNA, 19 nt, Homo sapiens
  misc_RNA (1)...(19): siRNA sense strand
cgucaauccugcagucacu

SEQ ID NO: 295802 - RNA, 19 nt, Homo sapiens
  misc_RNA (1)...(19): siRNA sense strand
gcuccgugccuucugcuau

SEQ ID NO: 295803 - RNA, 19 nt, Homo sapiens
  misc_RNA (1)...(19): siRNA sense strand
cuccuuugcuccugccauu

SEQ ID NO: 295804 - RNA, 19 nt, Homo sapiens
  misc_RNA (1)...(19): siRNA sense strand
ggaaccuguugaacugaac

SEQ ID NO: 295805 - RNA, 19 nt, Homo sapiens
  misc_RNA (1)...(19): siRNA sense strand
gcagaaagguauaauauug

SEQ ID NO: 295806 - RNA, 19 nt, Homo sapiens
  misc_RNA (1)...(19): siRNA sense strand
ggaagaagcuuguagaagu

SEQ ID NO: 295807 - RNA, 19 nt, Homo sapiens
  misc_RNA (1)...(19): siRNA sense strand
gaagaagcuuguagaagua

SEQ ID NO: 295808 - RNA, 19 nt, Homo sapiens
  misc_RNA (1)...(19): siRNA sense strand
ccagaaggauuucauauug

SEQ ID NO: 295809 - RNA, 19 nt, Homo sapiens
  misc_RNA (1)...(19): siRNA sense strand
gcgaguggcugaacuguuu

SEQ ID NO: 295810 - RNA, 19 nt, Homo sapiens
  misc_RNA (1)...(19): siRNA sense strand
gcaguggaccucaauguua

SEQ ID NO: 295811 - RNA, 19 nt, Homo sapiens
  misc_RNA (1)...(19): siRNA sense strand
gaaagaacucugaaagauu

SEQ ID NO: 295812 - RNA, 19 nt, Homo sapiens
  misc_RNA (1)...(19): siRNA sense strand
ccacagacauucucaagga

SEQ ID NO: 295813 - RNA, 19 nt, Homo sapiens
  misc_RNA (1)...(19): siRNA sense strand
ucacagggcucuccaagga

SEQ ID NO: 295814 - RNA, 19 nt, Homo sapiens
  misc_RNA (1)...(19): siRNA sense strand
aaaggaagauggagacuau

SEQ ID NO: 295815 - RNA, 19 nt, Homo sapiens
  misc_RNA (1)...(19): siRNA sense strand
guagagaaguugaacacaa

SEQ ID NO: 295816 - RNA, 19 nt, Homo sapiens
  misc_RNA (1)...(19): siRNA sense strand
gggaucauaucauaauuga

SEQ ID NO: 295817 - RNA, 19 nt, Homo sapiens
  misc_RNA (1)...(19): siRNA sense strand
ugaaagaacucugaaagau

SEQ ID NO: 295818 - RNA, 19 nt, Homo sapiens
  misc_RNA (1)...(19): siRNA sense strand
gaaauucuauggccuacca

SEQ ID NO: 295819 - RNA, 19 nt, Homo sapiens
  misc_RNA (1)...(19): siRNA sense strand
cagagaagcugcggaagaa

SEQ ID NO: 295820 - RNA, 19 nt, Homo sapiens
  misc_RNA (1)...(19): siRNA sense strand
uagagaaguugaacacaaa

SEQ ID NO: 295821 - RNA, 19 nt, Homo sapiens
  misc_RNA (1)...(19): siRNA sense strand
ggauuugaguaguacauuu

SEQ ID NO: 295822 - RNA, 19 nt, Homo sapiens
  misc_RNA (1)...(19): siRNA sense strand
gcaaaugauuaucgaguag

SEQ ID NO: 295823 - RNA, 19 nt, Homo sapiens
  misc_RNA (1)...(19): siRNA sense strand
caaggaaacacaagagaaa

SEQ ID NO: 295824 - RNA, 19 nt, Homo sapiens
  misc_RNA (1)...(19): siRNA sense strand
ccaacaagauugagaagca

SEQ ID NO: 295825 - RNA, 19 nt, Homo sapiens
  misc_RNA (1)...(19): siRNA sense strand
gaucuggacuucgaaacuu

SEQ ID NO: 295826 - RNA, 19 nt, Homo sapiens
  misc_RNA (1)...(19): siRNA sense strand
gcugaacuguuuauguuug

SEQ ID NO: 295827 - RNA, 19 nt, Homo sapiens
  misc_RNA (1)...(19): siRNA sense strand
ucgaguaguuaaccaauuu

SEQ ID NO: 295828 - RNA, 19 nt, Homo sapiens
  misc_RNA (1)...(19): siRNA sense strand
gagaucuucuggcaaaguu

SEQ ID NO: 295829 - RNA, 19 nt, Homo sapiens
  misc_RNA (1)...(19): siRNA sense strand
caguggaccucaauguuaa

SEQ ID NO: 295830 - RNA, 19 nt, Homo sapiens
  misc_RNA (1)...(19): siRNA sense strand
ucgaugagcucucggauuc

SEQ ID NO: 295831 - RNA, 19 nt, Homo sapiens
  misc_RNA (1)...(19): siRNA sense strand
acacauucgucguaacuuu

SEQ ID NO: 295832 - RNA, 19 nt, Homo sapiens
  misc_RNA (1)...(19): siRNA sense strand
uggcugaacuguuuauguu

SEQ ID NO: 295833 - RNA, 19 nt, Homo sapiens
  misc_RNA (1)...(19): siRNA sense strand
gagcgaagauguccgaaaa

SEQ ID NO: 295834 - RNA, 19 nt, Homo sapiens
  misc_RNA (1)...(19): siRNA sense strand
gaauccaucuagacaaaca

SEQ ID NO: 295835 - RNA, 19 nt, Homo sapiens
  misc_RNA (1)...(19): siRNA sense strand
aaacuuuccucauggauuc

SEQ ID NO: 295836 - RNA, 19 nt, Homo sapiens
  misc_RNA (1)...(19): siRNA sense strand
gguauggugcuagauauua

SEQ ID NO: 295837 - RNA, 19 nt, Homo sapiens
  misc_RNA (1)...(19): siRNA sense strand
gagguuccuucuauucuga

SEQ ID NO: 295838 - RNA, 19 nt, Homo sapiens
  misc_RNA (1)...(19): siRNA sense strand
gaauucaaccacagacauu

SEQ ID NO: 295839 - RNA, 19 nt, Homo sapiens
  misc_RNA (1)...(19): siRNA sense strand
gcaccaugguagagaaguu

SEQ ID NO: 295840 - RNA, 19 nt, Homo sapiens
  misc_RNA (1)...(19): siRNA sense strand
gcucaugguugaagguaug

SEQ ID NO: 295841 - RNA, 19 nt, Homo sapiens
  misc_RNA (1)...(19): siRNA sense strand
gauuucauauugcacaaga

SEQ ID NO: 295842 - RNA, 19 nt, Homo sapiens
  misc_RNA (1)...(19): siRNA sense strand
cagccuauauugcccguuu

SEQ ID NO: 295843 - RNA, 19 nt, Homo sapiens
  misc_RNA (1)...(19): siRNA sense strand
uggaguacuuugcaaauga

SEQ ID NO: 295844 - RNA, 19 nt, Homo sapiens
  misc_RNA (1)...(19): siRNA sense strand
uaccauauguuccaaauac

SEQ ID NO: 295845 - RNA, 19 nt, Homo sapiens
  misc_RNA (1)...(19): siRNA sense strand
aauauggugucucgucuuu

SEQ ID NO: 295846 - RNA, 19 nt, Homo sapiens
  misc_RNA (1)...(19): siRNA sense strand
cagaacacauucgucguaa

SEQ ID NO: 295847 - RNA, 19 nt, Homo sapiens
  misc_RNA (1)...(19): siRNA sense strand
gagaaagacagaauugcuu

SEQ ID NO: 295848 - RNA, 19 nt, Homo sapiens
  misc_RNA (1)...(19): siRNA sense strand
cagcugauaugcaacuuca

SEQ ID NO: 295849 - RNA, 19 nt, Homo sapiens
  misc_RNA (1)...(19): siRNA sense strand
gugcagaaagguauaauau

SEQ ID NO: 295850 - RNA, 19 nt, Homo sapiens
  misc_RNA (1)...(19): siRNA sense strand
ccagaacacauucgucgua

SEQ ID NO: 295851 - RNA, 19 nt, Homo sapiens
  misc_RNA (1)...(19): siRNA sense strand
ccaggugcccuacugauuu

SEQ ID NO: 295852 - RNA, 19 nt, Homo sapiens
  misc_RNA (1)...(19): siRNA sense strand
uuacuacaguggugugauu

SEQ ID NO: 295853 - RNA, 19 nt, Homo sapiens
  misc_RNA (1)...(19): siRNA sense strand
gaaacugaaugcucaaaau

SEQ ID NO: 295854 - RNA, 19 nt, Homo sapiens
  misc_RNA (1)...(19): siRNA sense strand
gcuggucaauugaaauguu

SEQ ID NO: 295855 - RNA, 19 nt, Homo sapiens
  misc_RNA (1)...(19): siRNA sense strand
gaacacauucgucguaacu

SEQ ID NO: 295856 - RNA, 19 nt, Homo sapiens
  misc_RNA (1)...(19): siRNA sense strand
ggaaacacaagagaaauuc

SEQ ID NO: 295857 - RNA, 19 nt, Homo sapiens
  misc_RNA (1)...(19): siRNA sense strand
ggaguacuuugcaaaugau

SEQ ID NO: 295858 - RNA, 19 nt, Homo sapiens
  misc_RNA (1)...(19): siRNA sense strand
cgacuuggaucuggacuuc

SEQ ID NO: 295859 - RNA, 19 nt, Homo sapiens
  misc_RNA (1)...(19): siRNA sense strand
gcuaacuccuggcaugaug

SEQ ID NO: 295860 - RNA, 19 nt, Homo sapiens
  misc_RNA (1)...(19): siRNA sense strand
gaaccaauuuucccaacaa

SEQ ID NO: 295861 - RNA, 19 nt, Homo sapiens
  misc_RNA (1)...(19): siRNA sense strand
ugcaaaugauuaucgagua

SEQ ID NO: 295862 - RNA, 19 nt, Homo sapiens
  misc_RNA (1)...(19): siRNA sense strand
caucaggauugccauuuca

SEQ ID NO: 295863 - RNA, 19 nt, Homo sapiens
  misc_RNA (1)...(19): siRNA sense strand
gagaugauacgagggauga

SEQ ID NO: 295864 - RNA, 19 nt, Homo sapiens
  misc_RNA (1)...(19): siRNA sense strand
gcauggaaggccugaauau

SEQ ID NO: 295865 - RNA, 19 nt, Homo sapiens
  misc_RNA (1)...(19): siRNA sense strand
uugcugagguuccuucuau

SEQ ID NO: 295866 - RNA, 19 nt, Homo sapiens
  misc_RNA (1)...(19): siRNA sense strand
gaggcagacuaaaggaaga

SEQ ID NO: 295867 - RNA, 19 nt, Homo sapiens
  misc_RNA (1)...(19): siRNA sense strand
gcggucgccuccaugguuu

SEQ ID NO: 295868 - RNA, 19 nt, Homo sapiens
  misc_RNA (1)...(19): siRNA sense strand
ccaaggaacgauagcuaaa

SEQ ID NO: 295869 - RNA, 19 nt, Homo sapiens
  misc_RNA (1)...(19): siRNA sense strand
ccaauuugccagacauuau

SEQ ID NO: 295870 - RNA, 19 nt, Homo sapiens
  misc_RNA (1)...(19): siRNA sense strand
cuucuauucugauggagua

SEQ ID NO: 295871 - RNA, 19 nt, Homo sapiens
  misc_RNA (1)...(19): siRNA sense strand
gucaugcaguuccuugaaa

SEQ ID NO: 295872 - RNA, 19 nt, Homo sapiens
  misc_RNA (1)...(19): siRNA sense strand
ggauugccauuucacuauc

SEQ ID NO: 295873 - RNA, 19 nt, Homo sapiens
  misc_RNA (1)...(19): siRNA sense strand
aguaguacauuucuuaugg

SEQ ID NO: 295874 - RNA, 19 nt, Homo sapiens
  misc_RNA (1)...(19): siRNA sense strand
uauggugucucgucuuugu

SEQ ID NO: 295875 - RNA, 19 nt, Homo sapiens
  misc_RNA (1)...(19): siRNA sense strand
gaagcuuguagaaguauug

SEQ ID NO: 295876 - RNA, 19 nt, Homo sapiens
  misc_RNA (1)...(19): siRNA sense strand
gagcagacaaaccacauca

SEQ ID NO: 295877 - RNA, 19 nt, Homo sapiens
  misc_RNA (1)...(19): siRNA sense strand
auggaaggccugaauauuu

SEQ ID NO: 295878 - RNA, 19 nt, Homo sapiens
  misc_RNA (1)...(19): siRNA sense strand
cacauucgucguaacuuua

SEQ ID NO: 295879 - RNA, 19 nt, Homo sapiens
  misc_RNA (1)...(19): siRNA sense strand
gaugauacgagggaugaaa

SEQ ID NO: 295880 - RNA, 19 nt, Homo sapiens
  misc_RNA (1)...(19): siRNA sense strand
cgacuuggcugauuuugug

SEQ ID NO: 295881 - RNA, 19 nt, Homo sapiens
  misc_RNA (1)...(19): siRNA sense strand
gcucucggauuccuuaugc

SEQ ID NO: 295882 - RNA, 19 nt, Homo sapiens
  misc_RNA (1)...(19): siRNA sense strand
guucuuaugcugaaucuuc

SEQ ID NO: 295883 - RNA, 19 nt, Homo sapiens
  misc_RNA (1)...(19): siRNA sense strand
uaucaacucccacuuguag

SEQ ID NO: 295884 - RNA, 19 nt, Homo sapiens
  misc_RNA (1)...(19): siRNA sense strand
aaagagcaguggaccucaa

SEQ ID NO: 295885 - RNA, 19 nt, Homo sapiens
  misc_RNA (1)...(19): siRNA sense strand
gugcuagauauuacucuua

SEQ ID NO: 295886 - RNA, 19 nt, Homo sapiens
  misc_RNA (1)...(19): siRNA sense strand
ggaauucaaccacagacau

SEQ ID NO: 295887 - RNA, 19 nt, Homo sapiens
  misc_RNA (1)...(19): siRNA sense strand
agaaggauuucauauugca

SEQ ID NO: 295888 - RNA, 19 nt, Homo sapiens
  misc_RNA (1)...(19): siRNA sense strand
uggaaggccugaauauuuu

SEQ ID NO: 295889 - RNA, 19 nt, Homo sapiens
  misc_RNA (1)...(19): siRNA sense strand
ucagagaagcugcggaaga

SEQ ID NO: 295890 - RNA, 19 nt, Homo sapiens
  misc_RNA (1)...(19): siRNA sense strand
gcucaaaauuccgaaguaa

SEQ ID NO: 295891 - RNA, 19 nt, Homo sapiens
  misc_RNA (1)...(19): siRNA sense strand
aagcaucucuuaccagaac

SEQ ID NO: 295892 - RNA, 19 nt, Homo sapiens
  misc_RNA (1)...(19): siRNA sense strand
caacaagauugagaagcau

SEQ ID NO: 295893 - RNA, 19 nt, Homo sapiens
  misc_RNA (1)...(19): siRNA sense strand
gagccagcauucagagaag

SEQ ID NO: 295894 - RNA, 19 nt, Homo sapiens
  misc_RNA (1)...(19): siRNA sense strand
gagcaguggaccucaaugu

SEQ ID NO: 295895 - RNA, 19 nt, Homo sapiens
  misc_RNA (1)...(19): siRNA sense strand
agacaaaccacaucaggau

SEQ ID NO: 295896 - RNA, 19 nt, Homo sapiens
  misc_RNA (1)...(19): siRNA sense strand
gaaagacagaauugcuugu

SEQ ID NO: 295897 - RNA, 19 nt, Homo sapiens
  misc_RNA (1)...(19): siRNA sense strand
ucaaggaaacacaagagaa

SEQ ID NO: 295898 - RNA, 19 nt, Homo sapiens
  misc_RNA (1)...(19): siRNA sense strand
uaaccaauuugccagacau

SEQ ID NO: 295899 - RNA, 19 nt, Homo sapiens
  misc_RNA (1)...(19): siRNA sense strand
gaagauggagacuaucaac

SEQ ID NO: 295900 - RNA, 19 nt, Homo sapiens
  misc_RNA (1)...(19): siRNA sense strand
ggaugaaaaugaaacugaa

SEQ ID NO: 295901 - RNA, 19 nt, Homo sapiens
  misc_RNA (1)...(19): siRNA sense strand
ggugcuagauauuacucuu

SEQ ID NO: 295902 - RNA, 19 nt, Homo sapiens
  misc_RNA (1)...(19): siRNA sense strand
gauggaguacuuugcaaau

SEQ ID NO: 295903 - RNA, 19 nt, Homo sapiens
  misc_RNA (1)...(19): siRNA sense strand
ggaagauggagacuaucaa

SEQ ID NO: 295904 - RNA, 19 nt, Homo sapiens
  misc_RNA (1)...(19): siRNA sense strand
ggguacauuuacugugauu

SEQ ID NO: 295905 - RNA, 19 nt, Homo sapiens
  misc_RNA (1)...(19): siRNA sense strand
gaugagaccuggacuaucg

SEQ ID NO: 295906 - RNA, 19 nt, Homo sapiens
  misc_RNA (1)...(19): siRNA sense strand
cagaagagguucgugcuuu

SEQ ID NO: 295907 - RNA, 19 nt, Homo sapiens
  misc_RNA (1)...(19): siRNA sense strand
gggacgaccugccguuuga

SEQ ID NO: 295908 - RNA, 19 nt, Homo sapiens
  misc_RNA (1)...(19): siRNA sense strand
gguggcagcccaugaauuu

SEQ ID NO: 295909 - RNA, 19 nt, Homo sapiens
  misc_RNA (1)...(19): siRNA sense strand
gcagaggcccuaaagguau

SEQ ID NO: 295910 - RNA, 19 nt, Homo sapiens
  misc_RNA (1)...(19): siRNA sense strand
gauagacaccaaugagauu

SEQ ID NO: 295911 - RNA, 19 nt, Homo sapiens
  misc_RNA (1)...(19): siRNA sense strand
ccaggaugcugauggcuau

SEQ ID NO: 295912 - RNA, 19 nt, Homo sapiens
  misc_RNA (1)...(19): siRNA sense strand
ggcagaggcccuaaaggua

SEQ ID NO: 295913 - RNA, 19 nt, Homo sapiens
  misc_RNA (1)...(19): siRNA sense strand
ugccaacacuuuccucuga

SEQ ID NO: 295914 - RNA, 19 nt, Homo sapiens
  misc_RNA (1)...(19): siRNA sense strand
gcagguggcagcccaugaa

SEQ ID NO: 295915 - RNA, 19 nt, Homo sapiens
  misc_RNA (1)...(19): siRNA sense strand
ggauagacaccaaugagau

SEQ ID NO: 295916 - RNA, 19 nt, Homo sapiens
  misc_RNA (1)...(19): siRNA sense strand
gggccgugcugacaucaug

SEQ ID NO: 295917 - RNA, 19 nt, Homo sapiens
  misc_RNA (1)...(19): siRNA sense strand
gaaggugaaggcucuggaa

SEQ ID NO: 295918 - RNA, 19 nt, Homo sapiens
  misc_RNA (1)...(19): siRNA sense strand
agacggaccucaccuacag

SEQ ID NO: 295919 - RNA, 19 nt, Homo sapiens
  misc_RNA (1)...(19): siRNA sense strand
gugcugacaucaugaucga

SEQ ID NO: 295920 - RNA, 19 nt, Homo sapiens
  misc_RNA (1)...(19): siRNA sense strand
cguggguccugacuucuuu

SEQ ID NO: 295921 - RNA, 19 nt, Homo sapiens
  misc_RNA (1)...(19): siRNA sense strand
gaaguuugacccugugaag

SEQ ID NO: 295922 - RNA, 19 nt, Homo sapiens
  misc_RNA (1)...(19): siRNA sense strand
cagaggcccuaaagguaug

SEQ ID NO: 295923 - RNA, 19 nt, Homo sapiens
  misc_RNA (1)...(19): siRNA sense strand
gggauagacaccaaugaga

SEQ ID NO: 295924 - RNA, 19 nt, Homo sapiens
  misc_RNA (1)...(19): siRNA sense strand
ggauguccacuucgacuau

SEQ ID NO: 295925 - RNA, 19 nt, Homo sapiens
  misc_RNA (1)...(19): siRNA sense strand
ugacgccacucaccuuuac

SEQ ID NO: 295926 - RNA, 19 nt, Homo sapiens
  misc_RNA (1)...(19): siRNA sense strand
agaagagguucgugcuuuc

SEQ ID NO: 295927 - RNA, 19 nt, Homo sapiens
  misc_RNA (1)...(19): siRNA sense strand
ccgagaagaacaagaucua

SEQ ID NO: 295928 - RNA, 19 nt, Homo sapiens
  misc_RNA (1)...(19): siRNA sense strand
ucucguggguccugacuuc

SEQ ID NO: 295929 - RNA, 19 nt, Homo sapiens
  misc_RNA (1)...(19): siRNA sense strand
gauguccacuucgacuaug

SEQ ID NO: 295930 - RNA, 19 nt, Homo sapiens
  misc_RNA (1)...(19): siRNA sense strand
agaagaacaagaucuacuu

SEQ ID NO: 295931 - RNA, 19 nt, Homo sapiens
  misc_RNA (1)...(19): siRNA sense strand
gagaagaacaagaucuacu

SEQ ID NO: 295932 - RNA, 19 nt, Homo sapiens
  misc_RNA (1)...(19): siRNA sense strand
ccugugaggccuccuuuga

SEQ ID NO: 295933 - RNA, 19 nt, Homo sapiens
  misc_RNA (1)...(19): siRNA sense strand
ugauggcuaugccuacuuc

SEQ ID NO: 295934 - RNA, 19 nt, Homo sapiens
  misc_RNA (1)...(19): siRNA sense strand
ggacgcugccuucgaggau

SEQ ID NO: 295935 - RNA, 19 nt, Homo sapiens
  misc_RNA (1)...(19): siRNA sense strand
ugaucgacuucgccaggua

SEQ ID NO: 295936 - RNA, 19 nt, Homo sapiens
  misc_RNA (1)...(19): siRNA sense strand
ccacuucgacuaugaugag

SEQ ID NO: 295937 - RNA, 19 nt, Homo sapiens
  misc_RNA (1)...(19): siRNA sense strand
cauccgaggcgagcucuuu

SEQ ID NO: 295938 - RNA, 19 nt, Homo sapiens
  misc_RNA (1)...(19): siRNA sense strand
gcccgcaaccgacagaaga

SEQ ID NO: 295939 - RNA, 19 nt, Homo sapiens
  misc_RNA (1)...(19): siRNA sense strand
ggacguccaccaccuccau

SEQ ID NO: 295940 - RNA, 19 nt, Homo sapiens
  misc_RNA (1)...(19): siRNA sense strand
gggauguccacuucgacua

SEQ ID NO: 295941 - RNA, 19 nt, Homo sapiens
  misc_RNA (1)...(19): siRNA sense strand
agaagacggaccucaccua

SEQ ID NO: 295942 - RNA, 19 nt, Homo sapiens
  misc_RNA (1)...(19): siRNA sense strand
ggaaguuugacccugugaa

SEQ ID NO: 295943 - RNA, 19 nt, Homo sapiens
  misc_RNA (1)...(19): siRNA sense strand
gauggcagaggcccuaaag

SEQ ID NO: 295944 - RNA, 19 nt, Homo sapiens
  misc_RNA (1)...(19): siRNA sense strand
gggaugaccagggcacaga

SEQ ID NO: 295945 - RNA, 19 nt, Homo sapiens
  misc_RNA (1)...(19): siRNA sense strand
gaagagguucgugcuuucu

SEQ ID NO: 295946 - RNA, 19 nt, Homo sapiens
  misc_RNA (1)...(19): siRNA sense strand
cuuccaaggugcucaguac

SEQ ID NO: 295947 - RNA, 19 nt, Homo sapiens
  misc_RNA (1)...(19): siRNA sense strand
uggcagaggcccuaaaggu

SEQ ID NO: 295948 - RNA, 19 nt, Homo sapiens
  misc_RNA (1)...(19): siRNA sense strand
gcagggacuacuggcguuu

SEQ ID NO: 295949 - RNA, 19 nt, Homo sapiens
  misc_RNA (1)...(19): siRNA sense strand
gggcguucaacaccuauau

SEQ ID NO: 295950 - RNA, 19 nt, Homo sapiens
  misc_RNA (1)...(19): siRNA sense strand
gcugauggcuaugccuacu

SEQ ID NO: 295951 - RNA, 19 nt, Homo sapiens
  misc_RNA (1)...(19): siRNA sense strand
gcacaucacuuacaguaua

SEQ ID NO: 295952 - RNA, 19 nt, Homo sapiens
  misc_RNA (1)...(19): siRNA sense strand
gaacguaacuccaaaagua

SEQ ID NO: 295953 - RNA, 19 nt, Homo sapiens
  misc_RNA (1)...(19): siRNA sense strand
gaacggagcaguauuucaa

SEQ ID NO: 295954 - RNA, 19 nt, Homo sapiens
  misc_RNA (1)...(19): siRNA sense strand
gaauguaacuccucugaca

SEQ ID NO: 295955 - RNA, 19 nt, Homo sapiens
  misc_RNA (1)...(19): siRNA sense strand
ggacagcucucccuuugau

SEQ ID NO: 295956 - RNA, 19 nt, Homo sapiens
  misc_RNA (1)...(19): siRNA sense strand
ggaaacagacaacuucaaa

SEQ ID NO: 295957 - RNA, 19 nt, Homo sapiens
  misc_RNA (1)...(19): siRNA sense strand
uaacuccucugacauuuga

SEQ ID NO: 295958 - RNA, 19 nt, Homo sapiens
  misc_RNA (1)...(19): siRNA sense strand
gaaguucccuacagugaau

SEQ ID NO: 295959 - RNA, 19 nt, Homo sapiens
  misc_RNA (1)...(19): siRNA sense strand
gcauuaacaugacaggaaa

SEQ ID NO: 295960 - RNA, 19 nt, Homo sapiens
  misc_RNA (1)...(19): siRNA sense strand
gacaagagguagcuccaaa

SEQ ID NO: 295961 - RNA, 19 nt, Homo sapiens
  misc_RNA (1)...(19): siRNA sense strand
agagguagcuccaaauuuc

SEQ ID NO: 295962 - RNA, 19 nt, Homo sapiens
  misc_RNA (1)...(19): siRNA sense strand
uaaagaacguaacuccaaa

SEQ ID NO: 295963 - RNA, 19 nt, Homo sapiens
  misc_RNA (1)...(19): siRNA sense strand
gaaacacaauugacuggau

SEQ ID NO: 295964 - RNA, 19 nt, Homo sapiens
  misc_RNA (1)...(19): siRNA sense strand
caaacuaccuaaugaugau

SEQ ID NO: 295965 - RNA, 19 nt, Homo sapiens
  misc_RNA (1)...(19): siRNA sense strand
acaauugacuggaugaaga

SEQ ID NO: 295966 - RNA, 19 nt, Homo sapiens
  misc_RNA (1)...(19): siRNA sense strand
cgaaagcgauaugcauuga

SEQ ID NO: 295967 - RNA, 19 nt, Homo sapiens
  misc_RNA (1)...(19): siRNA sense strand
ggauacccaaugcaaauua

SEQ ID NO: 295968 - RNA, 19 nt, Homo sapiens
  misc_RNA (1)...(19): siRNA sense strand
caaacgugauguggauaua

SEQ ID NO: 295969 - RNA, 19 nt, Homo sapiens
  misc_RNA (1)...(19): siRNA sense strand
cagcaguucuauggcauua

SEQ ID NO: 295970 - RNA, 19 nt, Homo sapiens
  misc_RNA (1)...(19): siRNA sense strand
gaugagccauggacacuag

SEQ ID NO: 295971 - RNA, 19 nt, Homo sapiens
  misc_RNA (1)...(19): siRNA sense strand
caagagguagcuccaaauu

SEQ ID NO: 295972 - RNA, 19 nt, Homo sapiens
  misc_RNA (1)...(19): siRNA sense strand
ugaagaaguucccuacagu

SEQ ID NO: 295973 - RNA, 19 nt, Homo sapiens
  misc_RNA (1)...(19): siRNA sense strand
ugacuuauuucuuguagca

SEQ ID NO: 295974 - RNA, 19 nt, Homo sapiens
  misc_RNA (1)...(19): siRNA sense strand
gcggaacggagcaguauuu

SEQ ID NO: 295975 - RNA, 19 nt, Homo sapiens
  misc_RNA (1)...(19): siRNA sense strand
acagacaacuucaaacuac

SEQ ID NO: 295976 - RNA, 19 nt, Homo sapiens
  misc_RNA (1)...(19): siRNA sense strand
ggagcaguauuucaaugug

SEQ ID NO: 295977 - RNA, 19 nt, Homo sapiens
  misc_RNA (1)...(19): siRNA sense strand
uaguaucgaugcaguuuau

SEQ ID NO: 295978 - RNA, 19 nt, Homo sapiens
  misc_RNA (1)...(19): siRNA sense strand
gauguggauauaaccauua

SEQ ID NO: 295979 - RNA, 19 nt, Homo sapiens
  misc_RNA (1)...(19): siRNA sense strand
caauguggagguuugguua

SEQ ID NO: 295980 - RNA, 19 nt, Homo sapiens
  misc_RNA (1)...(19): siRNA sense strand
gcaguucuauggcauuaac

SEQ ID NO: 295981 - RNA, 19 nt, Homo sapiens
  misc_RNA (1)...(19): siRNA sense strand
caagauuccuccaccuaca

SEQ ID NO: 295982 - RNA, 19 nt, Homo sapiens
  misc_RNA (1)...(19): siRNA sense strand
gcaaacgugauguggauau

SEQ ID NO: 295983 - RNA, 19 nt, Homo sapiens
  misc_RNA (1)...(19): siRNA sense strand
cacaucacuuacaguauaa

SEQ ID NO: 295984 - RNA, 19 nt, Homo sapiens
  misc_RNA (1)...(19): siRNA sense strand
gaaacaacagggugaugga

SEQ ID NO: 295985 - RNA, 19 nt, Homo sapiens
  misc_RNA (1)...(19): siRNA sense strand
gaagacgguuggauuucgu

SEQ ID NO: 295986 - RNA, 19 nt, Homo sapiens
  misc_RNA (1)...(19): siRNA sense strand
gaaaauagcgacgggaauu

SEQ ID NO: 295987 - RNA, 19 nt, Homo sapiens
  misc_RNA (1)...(19): siRNA sense strand
gacaagauuccuccaccua

SEQ ID NO: 295988 - RNA, 19 nt, Homo sapiens
  misc_RNA (1)...(19): siRNA sense strand
ggaagacgguuggauuucg

SEQ ID NO: 295989 - RNA, 19 nt, Homo sapiens
  misc_RNA (1)...(19): siRNA sense strand
gggcuugccuccuaguauc

SEQ ID NO: 295990 - RNA, 19 nt, Homo sapiens
  misc_RNA (1)...(19): siRNA sense strand
ucaaacuaccuaaugauga

SEQ ID NO: 295991 - RNA, 19 nt, Homo sapiens
  misc_RNA (1)...(19): siRNA sense strand
acagggugauggauggaua

SEQ ID NO: 295992 - RNA, 19 nt, Homo sapiens
  misc_RNA (1)...(19): siRNA sense strand
gaaaauggcaaacgugaug

SEQ ID NO: 295993 - RNA, 19 nt, Homo sapiens
  misc_RNA (1)...(19): siRNA sense strand
caagaccucuaccgacagu

SEQ ID NO: 295994 - RNA, 19 nt, Homo sapiens
  misc_RNA (1)...(19): siRNA sense strand
aaagcgauaugcauugaca

SEQ ID NO: 295995 - RNA, 19 nt, Homo sapiens
  misc_RNA (1)...(19): siRNA sense strand
aagcacaucacuuacagua

SEQ ID NO: 295996 - RNA, 19 nt, Homo sapiens
  misc_RNA (1)...(19): siRNA sense strand
ggcauuaacaugacaggaa

SEQ ID NO: 295997 - RNA, 19 nt, Homo sapiens
  misc_RNA (1)...(19): siRNA sense strand
ggacagaaacacaauugac

SEQ ID NO: 295998 - RNA, 19 nt, Homo sapiens
  misc_RNA (1)...(19): siRNA sense strand
gacaugcucugggauugga

SEQ ID NO: 295999 - RNA, 19 nt, Homo sapiens
  misc_RNA (1)...(19): siRNA sense strand
ugauguggauauaaccauu

SEQ ID NO: 296000 - RNA, 19 nt, Homo sapiens
  misc_RNA (1)...(19): siRNA sense strand
uggcaaacgugauguggau

SEQ ID NO: 296001 - RNA, 19 nt, Homo sapiens
  misc_RNA (1)...(19): siRNA sense strand
gauguguggcagaauguaa

SEQ ID NO: 296002 - RNA, 19 nt, Homo sapiens
  misc_RNA (1)...(19): siRNA sense strand
ggauggauacccaaugcaa

SEQ ID NO: 296003 - RNA, 19 nt, Homo sapiens
  misc_RNA (1)...(19): siRNA sense strand
gggacaugcucugggauug

SEQ ID NO: 296004 - RNA, 19 nt, Homo sapiens
  misc_RNA (1)...(19): siRNA sense strand
ggaaauccuaaucaugaug

SEQ ID NO: 296005 - RNA, 19 nt, Homo sapiens
  misc_RNA (1)...(19): siRNA sense strand
auaaagaacguaacuccaa

SEQ ID NO: 296006 - RNA, 19 nt, Homo sapiens
  misc_RNA (1)...(19): siRNA sense strand
gauggauacccaaugcaaa

SEQ ID NO: 296007 - RNA, 19 nt, Homo sapiens
  misc_RNA (1)...(19): siRNA sense strand
aaacagacaacuucaaacu

SEQ ID NO: 296008 - RNA, 19 nt, Homo sapiens
  misc_RNA (1)...(19): siRNA sense strand
ucugacauuugaagaaguu

SEQ ID NO: 296009 - RNA, 19 nt, Homo sapiens
  misc_RNA (1)...(19): siRNA sense strand
caggaaaaguggacagaaa

SEQ ID NO: 296010 - RNA, 19 nt, Homo sapiens
  misc_RNA (1)...(19): siRNA sense strand
gauacccaaugcaaauuac

SEQ ID NO: 296011 - RNA, 19 nt, Homo sapiens
  misc_RNA (1)...(19): siRNA sense strand
cuuuaacacucuagcuauu

SEQ ID NO: 296012 - RNA, 19 nt, Homo sapiens
  misc_RNA (1)...(19): siRNA sense strand
gagccaaacccaacaucug

SEQ ID NO: 296013 - RNA, 19 nt, Homo sapiens
  misc_RNA (1)...(19): siRNA sense strand
ugauggagagggaggauuu

SEQ ID NO: 296014 - RNA, 19 nt, Homo sapiens
  misc_RNA (1)...(19): siRNA sense strand
gguuggauuucgugcauca

SEQ ID NO: 296015 - RNA, 19 nt, Homo sapiens
  misc_RNA (1)...(19): siRNA sense strand
agaaauggcagcacaagca

SEQ ID NO: 296016 - RNA, 19 nt, Homo sapiens
  misc_RNA (1)...(19): siRNA sense strand
gcauugacaggacagaaau

SEQ ID NO: 296017 - RNA, 19 nt, Homo sapiens
  misc_RNA (1)...(19): siRNA sense strand
guauuucaauguggagguu

SEQ ID NO: 296018 - RNA, 19 nt, Homo sapiens
  misc_RNA (1)...(19): siRNA sense strand
ccaaacccaacaucuguga

SEQ ID NO: 296019 - RNA, 19 nt, Homo sapiens
  misc_RNA (1)...(19): siRNA sense strand
caacuucaaacuaccuaau

SEQ ID NO: 296020 - RNA, 19 nt, Homo sapiens
  misc_RNA (1)...(19): siRNA sense strand
cauggaaacagacaacuuc

SEQ ID NO: 296021 - RNA, 19 nt, Homo sapiens
  misc_RNA (1)...(19): siRNA sense strand
ucccuacagugaauuagaa

SEQ ID NO: 296022 - RNA, 19 nt, Homo sapiens
  misc_RNA (1)...(19): siRNA sense strand
gcuauucgccgugccuuug

SEQ ID NO: 296023 - RNA, 19 nt, Homo sapiens
  misc_RNA (1)...(19): siRNA sense strand
agcacaagcacaucacuua

SEQ ID NO: 296024 - RNA, 19 nt, Homo sapiens
  misc_RNA (1)...(19): siRNA sense strand
caauugacuggaugaagaa

SEQ ID NO: 296025 - RNA, 19 nt, Homo sapiens
  misc_RNA (1)...(19): siRNA sense strand
guaucgaugcaguuuauga

SEQ ID NO: 296026 - RNA, 19 nt, Homo sapiens
  misc_RNA (1)...(19): siRNA sense strand
uguaacuccucugacauuu

SEQ ID NO: 296027 - RNA, 19 nt, Homo sapiens
  misc_RNA (1)...(19): siRNA sense strand
gcacaagcacaucacuuac

SEQ ID NO: 296028 - RNA, 19 nt, Homo sapiens
  misc_RNA (1)...(19): siRNA sense strand
aagaaguucccuacaguga

SEQ ID NO: 296029 - RNA, 19 nt, Homo sapiens
  misc_RNA (1)...(19): siRNA sense strand
gaggagauacccauuuuga

SEQ ID NO: 296030 - RNA, 19 nt, Homo sapiens
  misc_RNA (1)...(19): siRNA sense strand
gacagaaacacaauugacu

SEQ ID NO: 296031 - RNA, 19 nt, Homo sapiens
  misc_RNA (1)...(19): siRNA sense strand
acuucaaacuaccuaauga

SEQ ID NO: 296032 - RNA, 19 nt, Homo sapiens
  misc_RNA (1)...(19): siRNA sense strand
gaaacagacaacuucaaac

SEQ ID NO: 296033 - RNA, 19 nt, Homo sapiens
  misc_RNA (1)...(19): siRNA sense strand
guaacuccucugacauuug

SEQ ID NO: 296034 - RNA, 19 nt, Homo sapiens
  misc_RNA (1)...(19): siRNA sense strand
gcuccaaauuucauauucg

SEQ ID NO: 296035 - RNA, 19 nt, Homo sapiens
  misc_RNA (1)...(19): siRNA sense strand
aaacgugauguggauauaa

SEQ ID NO: 296036 - RNA, 19 nt, Homo sapiens
  misc_RNA (1)...(19): siRNA sense strand
ggaacggagcaguauuuca

SEQ ID NO: 296037 - RNA, 19 nt, Homo sapiens
  misc_RNA (1)...(19): siRNA sense strand
acaagcacaucacuuacag

SEQ ID NO: 296038 - RNA, 19 nt, Homo sapiens
  misc_RNA (1)...(19): siRNA sense strand
accaguacauggaaacaga

SEQ ID NO: 296039 - RNA, 19 nt, Homo sapiens
  misc_RNA (1)...(19): siRNA sense strand
guggacagaaacacaauug

SEQ ID NO: 296040 - RNA, 19 nt, Homo sapiens
  misc_RNA (1)...(19): siRNA sense strand
gucgaaagcgauaugcauu

SEQ ID NO: 296041 - RNA, 19 nt, Homo sapiens
  misc_RNA (1)...(19): siRNA sense strand
uaucgaugcaguuuaugaa

SEQ ID NO: 296042 - RNA, 19 nt, Homo sapiens
  misc_RNA (1)...(19): siRNA sense strand
cgguguaccugaccagaca

SEQ ID NO: 296043 - RNA, 19 nt, Homo sapiens
  misc_RNA (1)...(19): siRNA sense strand
ccucugacauuugaagaag

SEQ ID NO: 296044 - RNA, 19 nt, Homo sapiens
  misc_RNA (1)...(19): siRNA sense strand
gguagcuccaaauuucaua

SEQ ID NO: 296045 - RNA, 19 nt, Homo sapiens
  misc_RNA (1)...(19): siRNA sense strand
aagagguagcuccaaauuu

SEQ ID NO: 296046 - RNA, 19 nt, Homo sapiens
  misc_RNA (1)...(19): siRNA sense strand
gcuauucuucgucgugaga

SEQ ID NO: 296047 - RNA, 19 nt, Homo sapiens
  misc_RNA (1)...(19): siRNA sense strand
cgacgggaauuuuguguuc

SEQ ID NO: 296048 - RNA, 19 nt, Homo sapiens
  misc_RNA (1)...(19): siRNA sense strand
acccaaugcaaauuacuua

SEQ ID NO: 296049 - RNA, 19 nt, Homo sapiens
  misc_RNA (1)...(19): siRNA sense strand
gagaaacaacagggugaug

SEQ ID NO: 296050 - RNA, 19 nt, Homo sapiens
  misc_RNA (1)...(19): siRNA sense strand
cgucgugagauguuuguuu

SEQ ID NO: 296051 - RNA, 19 nt, Homo sapiens
  misc_RNA (1)...(19): siRNA sense strand
gcacaucacuuacaguaua

SEQ ID NO: 296052 - RNA, 19 nt, Homo sapiens
  misc_RNA (1)...(19): siRNA sense strand
gaacguaacuccaaaagua

SEQ ID NO: 296053 - RNA, 19 nt, Homo sapiens
  misc_RNA (1)...(19): siRNA sense strand
gaacggagcaguauuucaa

SEQ ID NO: 296054 - RNA, 19 nt, Homo sapiens
  misc_RNA (1)...(19): siRNA sense strand
gaauguaacuccucugaca

SEQ ID NO: 296055 - RNA, 19 nt, Homo sapiens
  misc_RNA (1)...(19): siRNA sense strand
ggacagcucucccuuugau

SEQ ID NO: 296056 - RNA, 19 nt, Homo sapiens
  misc_RNA (1)...(19): siRNA sense strand
ggaaacagacaacuucaaa

SEQ ID NO: 296057 - RNA, 19 nt, Homo sapiens
  misc_RNA (1)...(19): siRNA sense strand
uaacuccucugacauuuga

SEQ ID NO: 296058 - RNA, 19 nt, Homo sapiens
  misc_RNA (1)...(19): siRNA sense strand
gaaguucccuacagugaau

SEQ ID NO: 296059 - RNA, 19 nt, Homo sapiens
  misc_RNA (1)...(19): siRNA sense strand
gcauuaacaugacaggaaa

SEQ ID NO: 296060 - RNA, 19 nt, Homo sapiens
  misc_RNA (1)...(19): siRNA sense strand
gacaagagguagcuccaaa

SEQ ID NO: 296061 - RNA, 19 nt, Homo sapiens
  misc_RNA (1)...(19): siRNA sense strand
agagguagcuccaaauuuc

SEQ ID NO: 296062 - RNA, 19 nt, Homo sapiens
  misc_RNA (1)...(19): siRNA sense strand
uaaagaacguaacuccaaa

SEQ ID NO: 296063 - RNA, 19 nt, Homo sapiens
  misc_RNA (1)...(19): siRNA sense strand
gaaacacaauugacuggau

SEQ ID NO: 296064 - RNA, 19 nt, Homo sapiens
  misc_RNA (1)...(19): siRNA sense strand
caaacuaccuaaugaugau

SEQ ID NO: 296065 - RNA, 19 nt, Homo sapiens
  misc_RNA (1)...(19): siRNA sense strand
acaauugacuggaugaaga

SEQ ID NO: 296066 - RNA, 19 nt, Homo sapiens
  misc_RNA (1)...(19): siRNA sense strand
cgaaagcgauaugcauuga

SEQ ID NO: 296067 - RNA, 19 nt, Homo sapiens
  misc_RNA (1)...(19): siRNA sense strand
ggauacccaaugcaaauua

SEQ ID NO: 296068 - RNA, 19 nt, Homo sapiens
  misc_RNA (1)...(19): siRNA sense strand
caaacgugauguggauaua

SEQ ID NO: 296069 - RNA, 19 nt, Homo sapiens
  misc_RNA (1)...(19): siRNA sense strand
cagcaguucuauggcauua

SEQ ID NO: 296070 - RNA, 19 nt, Homo sapiens
  misc_RNA (1)...(19): siRNA sense strand
gaugagccauggacacuag

SEQ ID NO: 296071 - RNA, 19 nt, Homo sapiens
  misc_RNA (1)...(19): siRNA sense strand
caagagguagcuccaaauu

SEQ ID NO: 296072 - RNA, 19 nt, Homo sapiens
  misc_RNA (1)...(19): siRNA sense strand
ugaagaaguucccuacagu

SEQ ID NO: 296073 - RNA, 19 nt, Homo sapiens
  misc_RNA (1)...(19): siRNA sense strand
ugacuuauuucuuguagca

SEQ ID NO: 296074 - RNA, 19 nt, Homo sapiens
  misc_RNA (1)...(19): siRNA sense strand
gcggaacggagcaguauuu

SEQ ID NO: 296075 - RNA, 19 nt, Homo sapiens
  misc_RNA (1)...(19): siRNA sense strand
acagacaacuucaaacuac

SEQ ID NO: 296076 - RNA, 19 nt, Homo sapiens
  misc_RNA (1)...(19): siRNA sense strand
ggagcaguauuucaaugug

SEQ ID NO: 296077 - RNA, 19 nt, Homo sapiens
  misc_RNA (1)...(19): siRNA sense strand
uaguaucgaugcaguuuau

SEQ ID NO: 296078 - RNA, 19 nt, Homo sapiens
  misc_RNA (1)...(19): siRNA sense strand
gauguggauauaaccauua

SEQ ID NO: 296079 - RNA, 19 nt, Homo sapiens
  misc_RNA (1)...(19): siRNA sense strand
caauguggagguuugguua

SEQ ID NO: 296080 - RNA, 19 nt, Homo sapiens
  misc_RNA (1)...(19): siRNA sense strand
gcaguucuauggcauuaac

SEQ ID NO: 296081 - RNA, 19 nt, Homo sapiens
  misc_RNA (1)...(19): siRNA sense strand
caagauuccuccaccuaca

SEQ ID NO: 296082 - RNA, 19 nt, Homo sapiens
  misc_RNA (1)...(19): siRNA sense strand
gcaaacgugauguggauau

SEQ ID NO: 296083 - RNA, 19 nt, Homo sapiens
  misc_RNA (1)...(19): siRNA sense strand
cacaucacuuacaguauaa

SEQ ID NO: 296084 - RNA, 19 nt, Homo sapiens
  misc_RNA (1)...(19): siRNA sense strand
gaaacaacagggugaugga

SEQ ID NO: 296085 - RNA, 19 nt, Homo sapiens
  misc_RNA (1)...(19): siRNA sense strand
gaagacgguuggauuucgu

SEQ ID NO: 296086 - RNA, 19 nt, Homo sapiens
  misc_RNA (1)...(19): siRNA sense strand
gaaaauagcgacgggaauu

SEQ ID NO: 296087 - RNA, 19 nt, Homo sapiens
  misc_RNA (1)...(19): siRNA sense strand
gacaagauuccuccaccua

SEQ ID NO: 296088 - RNA, 19 nt, Homo sapiens
  misc_RNA (1)...(19): siRNA sense strand
ggaagacgguuggauuucg

SEQ ID NO: 296089 - RNA, 19 nt, Homo sapiens
  misc_RNA (1)...(19): siRNA sense strand
gggcuugccuccuaguauc

SEQ ID NO: 296090 - RNA, 19 nt, Homo sapiens
  misc_RNA (1)...(19): siRNA sense strand
ucaaacuaccuaaugauga

SEQ ID NO: 296091 - RNA, 19 nt, Homo sapiens
  misc_RNA (1)...(19): siRNA sense strand
acagggugauggauggaua

SEQ ID NO: 296092 - RNA, 19 nt, Homo sapiens
  misc_RNA (1)...(19): siRNA sense strand
gaaaauggcaaacgugaug

SEQ ID NO: 296093 - RNA, 19 nt, Homo sapiens
  misc_RNA (1)...(19): siRNA sense strand
caagaccucuaccgacagu

SEQ ID NO: 296094 - RNA, 19 nt, Homo sapiens
  misc_RNA (1)...(19): siRNA sense strand
aaagcgauaugcauugaca

SEQ ID NO: 296095 - RNA, 19 nt, Homo sapiens
  misc_RNA (1)...(19): siRNA sense strand
aagcacaucacuuacagua

SEQ ID NO: 296096 - RNA, 19 nt, Homo sapiens
  misc_RNA (1)...(19): siRNA sense strand
ggcauuaacaugacaggaa

SEQ ID NO: 296097 - RNA, 19 nt, Homo sapiens
  misc_RNA (1)...(19): siRNA sense strand
ggacagaaacacaauugac

SEQ ID NO: 296098 - RNA, 19 nt, Homo sapiens
  misc_RNA (1)...(19): siRNA sense strand
gacaugcucugggauugga

SEQ ID NO: 296099 - RNA, 19 nt, Homo sapiens
  misc_RNA (1)...(19): siRNA sense strand
ugauguggauauaaccauu

SEQ ID NO: 296100 - RNA, 19 nt, Homo sapiens
  misc_RNA (1)...(19): siRNA sense strand
uggcaaacgugauguggau

SEQ ID NO: 296101 - RNA, 19 nt, Homo sapiens
  misc_RNA (1)...(19): siRNA sense strand
gauguguggcagaauguaa

SEQ ID NO: 296102 - RNA, 19 nt, Homo sapiens
  misc_RNA (1)...(19): siRNA sense strand
ggauggauacccaaugcaa

SEQ ID NO: 296103 - RNA, 19 nt, Homo sapiens
  misc_RNA (1)...(19): siRNA sense strand
gggacaugcucugggauug

SEQ ID NO: 296104 - RNA, 19 nt, Homo sapiens
  misc_RNA (1)...(19): siRNA sense strand
ggaaauccuaaucaugaug

SEQ ID NO: 296105 - RNA, 19 nt, Homo sapiens
  misc_RNA (1)...(19): siRNA sense strand
auaaagaacguaacuccaa

SEQ ID NO: 296106 - RNA, 19 nt, Homo sapiens
  misc_RNA (1)...(19): siRNA sense strand
gauggauacccaaugcaaa

SEQ ID NO: 296107 - RNA, 19 nt, Homo sapiens
  misc_RNA (1)...(19): siRNA sense strand
aaacagacaacuucaaacu

SEQ ID NO: 296108 - RNA, 19 nt, Homo sapiens
  misc_RNA (1)...(19): siRNA sense strand
ucugacauuugaagaaguu

SEQ ID NO: 296109 - RNA, 19 nt, Homo sapiens
  misc_RNA (1)...(19): siRNA sense strand
caggaaaaguggacagaaa

SEQ ID NO: 296110 - RNA, 19 nt, Homo sapiens
  misc_RNA (1)...(19): siRNA sense strand
gauacccaaugcaaauuac

SEQ ID NO: 296111 - RNA, 19 nt, Homo sapiens
  misc_RNA (1)...(19): siRNA sense strand
cuuuaacacucuagcuauu

SEQ ID NO: 296112 - RNA, 19 nt, Homo sapiens
  misc_RNA (1)...(19): siRNA sense strand
gagccaaacccaacaucug

SEQ ID NO: 296113 - RNA, 19 nt, Homo sapiens
  misc_RNA (1)...(19): siRNA sense strand
ugauggagagggaggauuu

SEQ ID NO: 296114 - RNA, 19 nt, Homo sapiens
  misc_RNA (1)...(19): siRNA sense strand
gguuggauuucgugcauca

SEQ ID NO: 296115 - RNA, 19 nt, Homo sapiens
  misc_RNA (1)...(19): siRNA sense strand
agaaauggcagcacaagca

SEQ ID NO: 296116 - RNA, 19 nt, Homo sapiens
  misc_RNA (1)...(19): siRNA sense strand
gcauugacaggacagaaau

SEQ ID NO: 296117 - RNA, 19 nt, Homo sapiens
  misc_RNA (1)...(19): siRNA sense strand
guauuucaauguggagguu

SEQ ID NO: 296118 - RNA, 19 nt, Homo sapiens
  misc_RNA (1)...(19): siRNA sense strand
ccaaacccaacaucuguga

SEQ ID NO: 296119 - RNA, 19 nt, Homo sapiens
  misc_RNA (1)...(19): siRNA sense strand
caacuucaaacuaccuaau

SEQ ID NO: 296120 - RNA, 19 nt, Homo sapiens
  misc_RNA (1)...(19): siRNA sense strand
cauggaaacagacaacuuc

SEQ ID NO: 296121 - RNA, 19 nt, Homo sapiens
  misc_RNA (1)...(19): siRNA sense strand
ucccuacagugaauuagaa

SEQ ID NO: 296122 - RNA, 19 nt, Homo sapiens
  misc_RNA (1)...(19): siRNA sense strand
gcuauucgccgugccuuug

SEQ ID NO: 296123 - RNA, 19 nt, Homo sapiens
  misc_RNA (1)...(19): siRNA sense strand
agcacaagcacaucacuua

SEQ ID NO: 296124 - RNA, 19 nt, Homo sapiens
  misc_RNA (1)...(19): siRNA sense strand
caauugacuggaugaagaa

SEQ ID NO: 296125 - RNA, 19 nt, Homo sapiens
  misc_RNA (1)...(19): siRNA sense strand
guaucgaugcaguuuauga

SEQ ID NO: 296126 - RNA, 19 nt, Homo sapiens
  misc_RNA (1)...(19): siRNA sense strand
uguaacuccucugacauuu

SEQ ID NO: 296127 - RNA, 19 nt, Homo sapiens
  misc_RNA (1)...(19): siRNA sense strand
gcacaagcacaucacuuac

SEQ ID NO: 296128 - RNA, 19 nt, Homo sapiens
  misc_RNA (1)...(19): siRNA sense strand
aagaaguucccuacaguga

SEQ ID NO: 296129 - RNA, 19 nt, Homo sapiens
  misc_RNA (1)...(19): siRNA sense strand
gaggagauacccauuuuga

SEQ ID NO: 296130 - RNA, 19 nt, Homo sapiens
  misc_RNA (1)...(19): siRNA sense strand
gacagaaacacaauugacu

SEQ ID NO: 296131 - RNA, 19 nt, Homo sapiens
  misc_RNA (1)...(19): siRNA sense strand
acuucaaacuaccuaauga

SEQ ID NO: 296132 - RNA, 19 nt, Homo sapiens
  misc_RNA (1)...(19): siRNA sense strand
gaaacagacaacuucaaac

SEQ ID NO: 296133 - RNA, 19 nt, Homo sapiens
  misc_RNA (1)...(19): siRNA sense strand
guaacuccucugacauuug

SEQ ID NO: 296134 - RNA, 19 nt, Homo sapiens
  misc_RNA (1)...(19): siRNA sense strand
gcuccaaauuucauauucg

SEQ ID NO: 296135 - RNA, 19 nt, Homo sapiens
  misc_RNA (1)...(19): siRNA sense strand
aaacgugauguggauauaa

SEQ ID NO: 296136 - RNA, 19 nt, Homo sapiens
  misc_RNA (1)...(19): siRNA sense strand
ggaacggagcaguauuuca

SEQ ID NO: 296137 - RNA, 19 nt, Homo sapiens
  misc_RNA (1)...(19): siRNA sense strand
acaagcacaucacuuacag

SEQ ID NO: 296138 - RNA, 19 nt, Homo sapiens
  misc_RNA (1)...(19): siRNA sense strand
accaguacauggaaacaga

SEQ ID NO: 296139 - RNA, 19 nt, Homo sapiens
  misc_RNA (1)...(19): siRNA sense strand
guggacagaaacacaauug

SEQ ID NO: 296140 - RNA, 19 nt, Homo sapiens
  misc_RNA (1)...(19): siRNA sense strand
gucgaaagcgauaugcauu

SEQ ID NO: 296141 - RNA, 19 nt, Homo sapiens
  misc_RNA (1)...(19): siRNA sense strand
uaucgaugcaguuuaugaa

SEQ ID NO: 296142 - RNA, 19 nt, Homo sapiens
  misc_RNA (1)...(19): siRNA sense strand
cgguguaccugaccagaca

SEQ ID NO: 296143 - RNA, 19 nt, Homo sapiens
  misc_RNA (1)...(19): siRNA sense strand
ccucugacauuugaagaag

SEQ ID NO: 296144 - RNA, 19 nt, Homo sapiens
  misc_RNA (1)...(19): siRNA sense strand
gguagcuccaaauuucaua

SEQ ID NO: 296145 - RNA, 19 nt, Homo sapiens
  misc_RNA (1)...(19): siRNA sense strand
aagagguagcuccaaauuu

SEQ ID NO: 296146 - RNA, 19 nt, Homo sapiens
  misc_RNA (1)...(19): siRNA sense strand
gcuauucuucgucgugaga

SEQ ID NO: 296147 - RNA, 19 nt, Homo sapiens
  misc_RNA (1)...(19): siRNA sense strand
cgacgggaauuuuguguuc

SEQ ID NO: 296148 - RNA, 19 nt, Homo sapiens
  misc_RNA (1)...(19): siRNA sense strand
acccaaugcaaauuacuua

SEQ ID NO: 296149 - RNA, 19 nt, Homo sapiens
  misc_RNA (1)...(19): siRNA sense strand
gagaaacaacagggugaug

SEQ ID NO: 296150 - RNA, 19 nt, Homo sapiens
  misc_RNA (1)...(19): siRNA sense strand
cgucgugagauguuuguuu

SEQ ID NO: 296151 - RNA, 19 nt, Homo sapiens
  misc_RNA (1)...(19): siRNA sense strand
gaaaggagaugcccuagug

SEQ ID NO: 296152 - RNA, 19 nt, Homo sapiens
  misc_RNA (1)...(19): siRNA sense strand
ucaagaagauggucagcua

SEQ ID NO: 296153 - RNA, 19 nt, Homo sapiens
  misc_RNA (1)...(19): siRNA sense strand
gaggagaucaagcucauua

SEQ ID NO: 296154 - RNA, 19 nt, Homo sapiens
  misc_RNA (1)...(19): siRNA sense strand
ccgcacagaugucagagua

SEQ ID NO: 296155 - RNA, 19 nt, Homo sapiens
  misc_RNA (1)...(19): siRNA sense strand
gaugugcgcuucauagagu

SEQ ID NO: 296156 - RNA, 19 nt, Homo sapiens
  misc_RNA (1)...(19): siRNA sense strand
uagaguauaugcccuuuga

SEQ ID NO: 296157 - RNA, 19 nt, Homo sapiens
  misc_RNA (1)...(19): siRNA sense strand
gcacagccaaggccuuuaa

SEQ ID NO: 296158 - RNA, 19 nt, Homo sapiens
  misc_RNA (1)...(19): siRNA sense strand
gcagggacaucguguugga

SEQ ID NO: 296159 - RNA, 19 nt, Homo sapiens
  misc_RNA (1)...(19): siRNA sense strand
gcaggaagccagacacaga

SEQ ID NO: 296160 - RNA, 19 nt, Homo sapiens
  misc_RNA (1)...(19): siRNA sense strand
gcacagaugucagaguaag

SEQ ID NO: 296161 - RNA, 19 nt, Homo sapiens
  misc_RNA (1)...(19): siRNA sense strand
cagaacaacuaacucaugu

SEQ ID NO: 296162 - RNA, 19 nt, Homo sapiens
  misc_RNA (1)...(19): siRNA sense strand
ucagaaggcuggucucagu

SEQ ID NO: 296163 - RNA, 19 nt, Homo sapiens
  misc_RNA (1)...(19): siRNA sense strand
gggcagcuaugguagaugu

SEQ ID NO: 296164 - RNA, 19 nt, Homo sapiens
  misc_RNA (1)...(19): siRNA sense strand
agaagauggucagcuauaa

SEQ ID NO: 296165 - RNA, 19 nt, Homo sapiens
  misc_RNA (1)...(19): siRNA sense strand
cagaucagcuucaucacau

SEQ ID NO: 296166 - RNA, 19 nt, Homo sapiens
  misc_RNA (1)...(19): siRNA sense strand
agacucagaugccaacuca

SEQ ID NO: 296167 - RNA, 19 nt, Homo sapiens
  misc_RNA (1)...(19): siRNA sense strand
gcagaaccagcucaagaaa

SEQ ID NO: 296168 - RNA, 19 nt, Homo sapiens
  misc_RNA (1)...(19): siRNA sense strand
gaagugcaaccucagaugu

SEQ ID NO: 296169 - RNA, 19 nt, Homo sapiens
  misc_RNA (1)...(19): siRNA sense strand
gaaggaaggcaucgacaag

SEQ ID NO: 296170 - RNA, 19 nt, Homo sapiens
  misc_RNA (1)...(19): siRNA sense strand
ccuggugccugccaaguuu

SEQ ID NO: 296171 - RNA, 19 nt, Homo sapiens
  misc_RNA (1)...(19): siRNA sense strand
gguggccacuuuauggaaa

SEQ ID NO: 296172 - RNA, 19 nt, Homo sapiens
  misc_RNA (1)...(19): siRNA sense strand
gcuaaccucagaacaacua

SEQ ID NO: 296173 - RNA, 19 nt, Homo sapiens
  misc_RNA (1)...(19): siRNA sense strand
gaguauaugcccuuugaug

SEQ ID NO: 296174 - RNA, 19 nt, Homo sapiens
  misc_RNA (1)...(19): siRNA sense strand
agaucaagcucauuagcaa

SEQ ID NO: 296175 - RNA, 19 nt, Homo sapiens
  misc_RNA (1)...(19): siRNA sense strand
guuggaagcuccgcacaga

SEQ ID NO: 296176 - RNA, 19 nt, Homo sapiens
  misc_RNA (1)...(19): siRNA sense strand
cagcagaaccagcucaaga

SEQ ID NO: 296177 - RNA, 19 nt, Homo sapiens
  misc_RNA (1)...(19): siRNA sense strand
uaaaaucccuggcuuccaa

SEQ ID NO: 296178 - RNA, 19 nt, Homo sapiens
  misc_RNA (1)...(19): siRNA sense strand
agaaccagcucaagaaagg

SEQ ID NO: 296179 - RNA, 19 nt, Homo sapiens
  misc_RNA (1)...(19): siRNA sense strand
gaagauggucagcuauaag

SEQ ID NO: 296180 - RNA, 19 nt, Homo sapiens
  misc_RNA (1)...(19): siRNA sense strand
gcuauaaggagaugcuaga

SEQ ID NO: 296181 - RNA, 19 nt, Homo sapiens
  misc_RNA (1)...(19): siRNA sense strand
ggacuuccaucgggcuuag

SEQ ID NO: 296182 - RNA, 19 nt, Homo sapiens
  misc_RNA (1)...(19): siRNA sense strand
aagaagauggucagcuaua

SEQ ID NO: 296183 - RNA, 19 nt, Homo sapiens
  misc_RNA (1)...(19): siRNA sense strand
ccagcuaaccucagaacaa

SEQ ID NO: 296184 - RNA, 19 nt, Homo sapiens
  misc_RNA (1)...(19): siRNA sense strand
gagcugcugagaaucauug

SEQ ID NO: 296185 - RNA, 19 nt, Homo sapiens
  misc_RNA (1)...(19): siRNA sense strand
ggccagaucagcuucauca

SEQ ID NO: 296186 - RNA, 19 nt, Homo sapiens
  misc_RNA (1)...(19): siRNA sense strand
ccaaccugcugaccacaga

SEQ ID NO: 296187 - RNA, 19 nt, Homo sapiens
  misc_RNA (1)...(19): siRNA sense strand
gaugaacuccuggacuuug

SEQ ID NO: 296188 - RNA, 19 nt, Homo sapiens
  misc_RNA (1)...(19): siRNA sense strand
gcugagaaccauagguguu

SEQ ID NO: 296189 - RNA, 19 nt, Homo sapiens
  misc_RNA (1)...(19): siRNA sense strand
ggaaggacgggcagcuaug

SEQ ID NO: 296190 - RNA, 19 nt, Homo sapiens
  misc_RNA (1)...(19): siRNA sense strand
ccaucgagcugggcuacaa

SEQ ID NO: 296191 - RNA, 19 nt, Homo sapiens
  misc_RNA (1)...(19): siRNA sense strand
gaagggcugagaaccauag

SEQ ID NO: 296192 - RNA, 19 nt, Homo sapiens
  misc_RNA (1)...(19): siRNA sense strand
gagaucaagcucauuagca

SEQ ID NO: 296193 - RNA, 19 nt, Homo sapiens
  misc_RNA (1)...(19): siRNA sense strand
ccucaaggucugccucuuu

SEQ ID NO: 296194 - RNA, 19 nt, Homo sapiens
  misc_RNA (1)...(19): siRNA sense strand
gcaggcgguucuccuugug

SEQ ID NO: 296195 - RNA, 19 nt, Homo sapiens
  misc_RNA (1)...(19): siRNA sense strand
ggucagcuauaaggagaug

SEQ ID NO: 296196 - RNA, 19 nt, Homo sapiens
  misc_RNA (1)...(19): siRNA sense strand
ggugaacuguguggugaug

SEQ ID NO: 296197 - RNA, 19 nt, Homo sapiens
  misc_RNA (1)...(19): siRNA sense strand
ucagaacaacuaacucaug

SEQ ID NO: 296198 - RNA, 19 nt, Homo sapiens
  misc_RNA (1)...(19): siRNA sense strand
cagcuaaccucagaacaac

SEQ ID NO: 296199 - RNA, 19 nt, Homo sapiens
  misc_RNA (1)...(19): siRNA sense strand
gggacccgcuccauguuca

SEQ ID NO: 296200 - RNA, 19 nt, Homo sapiens
  misc_RNA (1)...(19): siRNA sense strand
gaaggugccagaggaggaa

SEQ ID NO: 296201 - RNA, 19 nt, Homo sapiens
  misc_RNA (1)...(19): siRNA sense strand
cagcagggacaucguguug

SEQ ID NO: 296202 - RNA, 19 nt, Homo sapiens
  misc_RNA (1)...(19): siRNA sense strand
ggaugaacuccuggacuuu

SEQ ID NO: 296203 - RNA, 19 nt, Homo sapiens
  misc_RNA (1)...(19): siRNA sense strand
acucagaugccaacucaaa

SEQ ID NO: 296204 - RNA, 19 nt, Homo sapiens
  misc_RNA (1)...(19): siRNA sense strand
ggaagggcugagaaccaua

SEQ ID NO: 296205 - RNA, 19 nt, Homo sapiens
  misc_RNA (1)...(19): siRNA sense strand
ggcaggcgguucuccuugu

SEQ ID NO: 296206 - RNA, 19 nt, Homo sapiens
  misc_RNA (1)...(19): siRNA sense strand
ggaaggcaucgacaagauc

SEQ ID NO: 296207 - RNA, 19 nt, Homo sapiens
  misc_RNA (1)...(19): siRNA sense strand
cucaaggucugccucuuug

SEQ ID NO: 296208 - RNA, 19 nt, Homo sapiens
  misc_RNA (1)...(19): siRNA sense strand
cugagaaccauagguguua

SEQ ID NO: 296209 - RNA, 19 nt, Homo sapiens
  misc_RNA (1)...(19): siRNA sense strand
gcuacaacccugugaaggu

SEQ ID NO: 296210 - RNA, 19 nt, Homo sapiens
  misc_RNA (1)...(19): siRNA sense strand
cagcacagccaaggccuuu

SEQ ID NO: 296211 - RNA, 19 nt, Homo sapiens
  misc_RNA (1)...(19): siRNA sense strand
cuaagacccagaaugaguu

SEQ ID NO: 296212 - RNA, 19 nt, Homo sapiens
  misc_RNA (1)...(19): siRNA sense strand
ccucagaacaacuaacuca

SEQ ID NO: 296213 - RNA, 19 nt, Homo sapiens
  misc_RNA (1)...(19): siRNA sense strand
ggacgugguggacauugug

SEQ ID NO: 296214 - RNA, 19 nt, Homo sapiens
  misc_RNA (1)...(19): siRNA sense strand
ccagguggccacuuuaugg

SEQ ID NO: 296215 - RNA, 19 nt, Homo sapiens
  misc_RNA (1)...(19): siRNA sense strand
gagaagugcaaccucagau

SEQ ID NO: 296216 - RNA, 19 nt, Homo sapiens
  misc_RNA (1)...(19): siRNA sense strand
uaagacccagaaugaguuu

SEQ ID NO: 296217 - RNA, 19 nt, Homo sapiens
  misc_RNA (1)...(19): siRNA sense strand
caggagcugcugagaauca

SEQ ID NO: 296218 - RNA, 19 nt, Homo sapiens
  misc_RNA (1)...(19): siRNA sense strand
ccagaucagcuucaucaca

SEQ ID NO: 296219 - RNA, 19 nt, Homo sapiens
  misc_RNA (1)...(19): siRNA sense strand
aggaaggcaucgacaagau

SEQ ID NO: 296220 - RNA, 19 nt, Homo sapiens
  misc_RNA (1)...(19): siRNA sense strand
caagaagauggucagcuau

SEQ ID NO: 296221 - RNA, 19 nt, Homo sapiens
  misc_RNA (1)...(19): siRNA sense strand
ucaagcuuguccagcagaa

SEQ ID NO: 296222 - RNA, 19 nt, Homo sapiens
  misc_RNA (1)...(19): siRNA sense strand
caaggucugccucuuugga

SEQ ID NO: 296223 - RNA, 19 nt, Homo sapiens
  misc_RNA (1)...(19): siRNA sense strand
ggacuuugcggccuugacu

SEQ ID NO: 296224 - RNA, 19 nt, Homo sapiens
  misc_RNA (1)...(19): siRNA sense strand
gaaggacgggcagcuaugg

SEQ ID NO: 296225 - RNA, 19 nt, Homo sapiens
  misc_RNA (1)...(19): siRNA sense strand
gcccuuugauggcaacaag

SEQ ID NO: 296226 - RNA, 19 nt, Homo sapiens
  misc_RNA (1)...(19): siRNA sense strand
ugaaggaaggcaucgacaa

SEQ ID NO: 296227 - RNA, 19 nt, Homo sapiens
  misc_RNA (1)...(19): siRNA sense strand
uggaggagaucaagcucau

SEQ ID NO: 296228 - RNA, 19 nt, Homo sapiens
  misc_RNA (1)...(19): siRNA sense strand
cugugaaggugaacugugu

SEQ ID NO: 296229 - RNA, 19 nt, Homo sapiens
  misc_RNA (1)...(19): siRNA sense strand
uggaagcuccgcacagaug

SEQ ID NO: 296230 - RNA, 19 nt, Homo sapiens
  misc_RNA (1)...(19): siRNA sense strand
uggaagggcugagaaccau

SEQ ID NO: 296231 - RNA, 19 nt, Homo sapiens
  misc_RNA (1)...(19): siRNA sense strand
ggaagcuccgcacagaugu

SEQ ID NO: 296232 - RNA, 19 nt, Homo sapiens
  misc_RNA (1)...(19): siRNA sense strand
gcuggggucuggcuccuuu

SEQ ID NO: 296233 - RNA, 19 nt, Homo sapiens
  misc_RNA (1)...(19): siRNA sense strand
ucuaagacccagaaugagu

SEQ ID NO: 296234 - RNA, 19 nt, Homo sapiens
  misc_RNA (1)...(19): siRNA sense strand
guggugaugcgaggccuua

SEQ ID NO: 296235 - RNA, 19 nt, Homo sapiens
  misc_RNA (1)...(19): siRNA sense strand
ccagccaauccaagcauuu

SEQ ID NO: 296236 - RNA, 19 nt, Homo sapiens
  misc_RNA (1)...(19): siRNA sense strand
uuuggaaacucugagguau

SEQ ID NO: 296237 - RNA, 19 nt, Homo sapiens
  misc_RNA (1)...(19): siRNA sense strand
ggaugugcgcuucauagag

SEQ ID NO: 296238 - RNA, 19 nt, Homo sapiens
  misc_RNA (1)...(19): siRNA sense strand
gcuccgcacagaugucaga

SEQ ID NO: 296239 - RNA, 19 nt, Homo sapiens
  misc_RNA (1)...(19): siRNA sense strand
gcccucacccuguaugaca

SEQ ID NO: 296240 - RNA, 19 nt, Homo sapiens
  misc_RNA (1)...(19): siRNA sense strand
ucagaugccaacucaaagu

SEQ ID NO: 296241 - RNA, 19 nt, Homo sapiens
  misc_RNA (1)...(19): siRNA sense strand
cauccaugucugagcauuu

SEQ ID NO: 296242 - RNA, 19 nt, Homo sapiens
  misc_RNA (1)...(19): siRNA sense strand
guucauuguccgcaggaaa

SEQ ID NO: 296243 - RNA, 19 nt, Homo sapiens
  misc_RNA (1)...(19): siRNA sense strand
ggagaucaagcucauuagc

SEQ ID NO: 296244 - RNA, 19 nt, Homo sapiens
  misc_RNA (1)...(19): siRNA sense strand
aggagaugcuagacacugu

SEQ ID NO: 296245 - RNA, 19 nt, Homo sapiens
  misc_RNA (1)...(19): siRNA sense strand
ucaagaagauggucagcua

SEQ ID NO: 296246 - RNA, 19 nt, Homo sapiens
  misc_RNA (1)...(19): siRNA sense strand
ccgcacagaugucagagua

SEQ ID NO: 296247 - RNA, 19 nt, Homo sapiens
  misc_RNA (1)...(19): siRNA sense strand
gaugugcgcuucauagagu

SEQ ID NO: 296248 - RNA, 19 nt, Homo sapiens
  misc_RNA (1)...(19): siRNA sense strand
uagaguauaugcccuuuga

SEQ ID NO: 296249 - RNA, 19 nt, Homo sapiens
  misc_RNA (1)...(19): siRNA sense strand
gcacagccaaggccuuuaa

SEQ ID NO: 296250 - RNA, 19 nt, Homo sapiens
  misc_RNA (1)...(19): siRNA sense strand
gcacagaugucagaguaag

SEQ ID NO: 296251 - RNA, 19 nt, Homo sapiens
  misc_RNA (1)...(19): siRNA sense strand
ucagaaggcuggucucagu

SEQ ID NO: 296252 - RNA, 19 nt, Homo sapiens
  misc_RNA (1)...(19): siRNA sense strand
agaagauggucagcuauaa

SEQ ID NO: 296253 - RNA, 19 nt, Homo sapiens
  misc_RNA (1)...(19): siRNA sense strand
cagaucagcuucaucacau

SEQ ID NO: 296254 - RNA, 19 nt, Homo sapiens
  misc_RNA (1)...(19): siRNA sense strand
gaagugcaaccucagaugu

SEQ ID NO: 296255 - RNA, 19 nt, Homo sapiens
  misc_RNA (1)...(19): siRNA sense strand
gaaggaaggcaucgacaag

SEQ ID NO: 296256 - RNA, 19 nt, Homo sapiens
  misc_RNA (1)...(19): siRNA sense strand
ccuggugccugccaaguuu

SEQ ID NO: 296257 - RNA, 19 nt, Homo sapiens
  misc_RNA (1)...(19): siRNA sense strand
gaguauaugcccuuugaug

SEQ ID NO: 296258 - RNA, 19 nt, Homo sapiens
  misc_RNA (1)...(19): siRNA sense strand
guuggaagcuccgcacaga

SEQ ID NO: 296259 - RNA, 19 nt, Homo sapiens
  misc_RNA (1)...(19): siRNA sense strand
uaaaaucccuggcuuccaa

SEQ ID NO: 296260 - RNA, 19 nt, Homo sapiens
  misc_RNA (1)...(19): siRNA sense strand
gaagauggucagcuauaag

SEQ ID NO: 296261 - RNA, 19 nt, Homo sapiens
  misc_RNA (1)...(19): siRNA sense strand
gcuauaaggagaugcuaga

SEQ ID NO: 296262 - RNA, 19 nt, Homo sapiens
  misc_RNA (1)...(19): siRNA sense strand
aagaagauggucagcuaua

SEQ ID NO: 296263 - RNA, 19 nt, Homo sapiens
  misc_RNA (1)...(19): siRNA sense strand
gagcugcugagaaucauug

SEQ ID NO: 296264 - RNA, 19 nt, Homo sapiens
  misc_RNA (1)...(19): siRNA sense strand
ggccagaucagcuucauca

SEQ ID NO: 296265 - RNA, 19 nt, Homo sapiens
  misc_RNA (1)...(19): siRNA sense strand
ccaaccugcugaccacaga

SEQ ID NO: 296266 - RNA, 19 nt, Homo sapiens
  misc_RNA (1)...(19): siRNA sense strand
gaugaacuccuggacuuug

SEQ ID NO: 296267 - RNA, 19 nt, Homo sapiens
  misc_RNA (1)...(19): siRNA sense strand
gcugagaaccauagguguu

SEQ ID NO: 296268 - RNA, 19 nt, Homo sapiens
  misc_RNA (1)...(19): siRNA sense strand
ccaucgagcugggcuacaa

SEQ ID NO: 296269 - RNA, 19 nt, Homo sapiens
  misc_RNA (1)...(19): siRNA sense strand
gaagggcugagaaccauag

SEQ ID NO: 296270 - RNA, 19 nt, Homo sapiens
  misc_RNA (1)...(19): siRNA sense strand
ccucaaggucugccucuuu

SEQ ID NO: 296271 - RNA, 19 nt, Homo sapiens
  misc_RNA (1)...(19): siRNA sense strand
ggucagcuauaaggagaug

SEQ ID NO: 296272 - RNA, 19 nt, Homo sapiens
  misc_RNA (1)...(19): siRNA sense strand
gcaggcgguucuccuugug

SEQ ID NO: 296273 - RNA, 19 nt, Homo sapiens
  misc_RNA (1)...(19): siRNA sense strand
ggugaacuguguggugaug

SEQ ID NO: 296274 - RNA, 19 nt, Homo sapiens
  misc_RNA (1)...(19): siRNA sense strand
gaaggugccagaggaggaa

SEQ ID NO: 296275 - RNA, 19 nt, Homo sapiens
  misc_RNA (1)...(19): siRNA sense strand
ggaugaacuccuggacuuu

SEQ ID NO: 296276 - RNA, 19 nt, Homo sapiens
  misc_RNA (1)...(19): siRNA sense strand
ggaaggcaucgacaagauc

SEQ ID NO: 296277 - RNA, 19 nt, Homo sapiens
  misc_RNA (1)...(19): siRNA sense strand
cucaaggucugccucuuug

SEQ ID NO: 296278 - RNA, 19 nt, Homo sapiens
  misc_RNA (1)...(19): siRNA sense strand
ggcaggcgguucuccuugu

SEQ ID NO: 296279 - RNA, 19 nt, Homo sapiens
  misc_RNA (1)...(19): siRNA sense strand
cugagaaccauagguguua

SEQ ID NO: 296280 - RNA, 19 nt, Homo sapiens
  misc_RNA (1)...(19): siRNA sense strand
ggaagggcugagaaccaua

SEQ ID NO: 296281 - RNA, 19 nt, Homo sapiens
  misc_RNA (1)...(19): siRNA sense strand
gcuacaacccugugaaggu

SEQ ID NO: 296282 - RNA, 19 nt, Homo sapiens
  misc_RNA (1)...(19): siRNA sense strand
cagcacagccaaggccuuu

SEQ ID NO: 296283 - RNA, 19 nt, Homo sapiens
  misc_RNA (1)...(19): siRNA sense strand
ggacgugguggacauugug

SEQ ID NO: 296284 - RNA, 19 nt, Homo sapiens
  misc_RNA (1)...(19): siRNA sense strand
aggaaggcaucgacaagau

SEQ ID NO: 296285 - RNA, 19 nt, Homo sapiens
  misc_RNA (1)...(19): siRNA sense strand
caggagcugcugagaauca

SEQ ID NO: 296286 - RNA, 19 nt, Homo sapiens
  misc_RNA (1)...(19): siRNA sense strand
ccagaucagcuucaucaca

SEQ ID NO: 296287 - RNA, 19 nt, Homo sapiens
  misc_RNA (1)...(19): siRNA sense strand
gagaagugcaaccucagau

SEQ ID NO: 296288 - RNA, 19 nt, Homo sapiens
  misc_RNA (1)...(19): siRNA sense strand
caagaagauggucagcuau

SEQ ID NO: 296289 - RNA, 19 nt, Homo sapiens
  misc_RNA (1)...(19): siRNA sense strand
caaggucugccucuuugga

SEQ ID NO: 296290 - RNA, 19 nt, Homo sapiens
  misc_RNA (1)...(19): siRNA sense strand
ggacuuugcggccuugacu

SEQ ID NO: 296291 - RNA, 19 nt, Homo sapiens
  misc_RNA (1)...(19): siRNA sense strand
gcccuuugauggcaacaag

SEQ ID NO: 296292 - RNA, 19 nt, Homo sapiens
  misc_RNA (1)...(19): siRNA sense strand
ugaaggaaggcaucgacaa

SEQ ID NO: 296293 - RNA, 19 nt, Homo sapiens
  misc_RNA (1)...(19): siRNA sense strand
uggaagggcugagaaccau

SEQ ID NO: 296294 - RNA, 19 nt, Homo sapiens
  misc_RNA (1)...(19): siRNA sense strand
uggaagcuccgcacagaug

SEQ ID NO: 296295 - RNA, 19 nt, Homo sapiens
  misc_RNA (1)...(19): siRNA sense strand
cugugaaggugaacugugu

SEQ ID NO: 296296 - RNA, 19 nt, Homo sapiens
  misc_RNA (1)...(19): siRNA sense strand
ggaagcuccgcacagaugu

SEQ ID NO: 296297 - RNA, 19 nt, Homo sapiens
  misc_RNA (1)...(19): siRNA sense strand
guggugaugcgaggccuua

SEQ ID NO: 296298 - RNA, 19 nt, Homo sapiens
  misc_RNA (1)...(19): siRNA sense strand
uuuggaaacucugagguau

SEQ ID NO: 296299 - RNA, 19 nt, Homo sapiens
  misc_RNA (1)...(19): siRNA sense strand
gcuccgcacagaugucaga

SEQ ID NO: 296300 - RNA, 19 nt, Homo sapiens
  misc_RNA (1)...(19): siRNA sense strand
cauccaugucugagcauuu

SEQ ID NO: 296301 - RNA, 19 nt, Homo sapiens
  misc_RNA (1)...(19): siRNA sense strand
ggaugugcgcuucauagag

SEQ ID NO: 296302 - RNA, 19 nt, Homo sapiens
  misc_RNA (1)...(19): siRNA sense strand
guucauuguccgcaggaaa

SEQ ID NO: 296303 - RNA, 19 nt, Homo sapiens
  misc_RNA (1)...(19): siRNA sense strand
aggagaugcuagacacugu

SEQ ID NO: 296304 - RNA, 19 nt, Homo sapiens
  misc_RNA (1)...(19): siRNA sense strand
gaaaggagaugcccuagug

SEQ ID NO: 296305 - RNA, 19 nt, Homo sapiens
  misc_RNA (1)...(19): siRNA sense strand
ucaagaagauggucagcua

SEQ ID NO: 296306 - RNA, 19 nt, Homo sapiens
  misc_RNA (1)...(19): siRNA sense strand
gaggagaucaagcucauua

SEQ ID NO: 296307 - RNA, 19 nt, Homo sapiens
  misc_RNA (1)...(19): siRNA sense strand
ccgcacagaugucagagua

SEQ ID NO: 296308 - RNA, 19 nt, Homo sapiens
  misc_RNA (1)...(19): siRNA sense strand
gaugugcgcuucauagagu

SEQ ID NO: 296309 - RNA, 19 nt, Homo sapiens
  misc_RNA (1)...(19): siRNA sense strand
uagaguauaugcccuuuga

SEQ ID NO: 296310 - RNA, 19 nt, Homo sapiens
  misc_RNA (1)...(19): siRNA sense strand
gcacagccaaggccuuuaa

SEQ ID NO: 296311 - RNA, 19 nt, Homo sapiens
  misc_RNA (1)...(19): siRNA sense strand
gcagggacaucguguugga

SEQ ID NO: 296312 - RNA, 19 nt, Homo sapiens
  misc_RNA (1)...(19): siRNA sense strand
gcaggaagccagacacaga

SEQ ID NO: 296313 - RNA, 19 nt, Homo sapiens
  misc_RNA (1)...(19): siRNA sense strand
gcacagaugucagaguaag

SEQ ID NO: 296314 - RNA, 19 nt, Homo sapiens
  misc_RNA (1)...(19): siRNA sense strand
cagaacaacuaacucaugu

SEQ ID NO: 296315 - RNA, 19 nt, Homo sapiens
  misc_RNA (1)...(19): siRNA sense strand
ucagaaggcuggucucagu

SEQ ID NO: 296316 - RNA, 19 nt, Homo sapiens
  misc_RNA (1)...(19): siRNA sense strand
gggcagcuaugguagaugu

SEQ ID NO: 296317 - RNA, 19 nt, Homo sapiens
  misc_RNA (1)...(19): siRNA sense strand
agaagauggucagcuauaa

SEQ ID NO: 296318 - RNA, 19 nt, Homo sapiens
  misc_RNA (1)...(19): siRNA sense strand
cagaucagcuucaucacau

SEQ ID NO: 296319 - RNA, 19 nt, Homo sapiens
  misc_RNA (1)...(19): siRNA sense strand
agacucagaugccaacuca

SEQ ID NO: 296320 - RNA, 19 nt, Homo sapiens
  misc_RNA (1)...(19): siRNA sense strand
gcagaaccagcucaagaaa

SEQ ID NO: 296321 - RNA, 19 nt, Homo sapiens
  misc_RNA (1)...(19): siRNA sense strand
gaagugcaaccucagaugu

SEQ ID NO: 296322 - RNA, 19 nt, Homo sapiens
  misc_RNA (1)...(19): siRNA sense strand
gaaggaaggcaucgacaag

SEQ ID NO: 296323 - RNA, 19 nt, Homo sapiens
  misc_RNA (1)...(19): siRNA sense strand
ccuggugccugccaaguuu

SEQ ID NO: 296324 - RNA, 19 nt, Homo sapiens
  misc_RNA (1)...(19): siRNA sense strand
gguggccacuuuauggaaa

SEQ ID NO: 296325 - RNA, 19 nt, Homo sapiens
  misc_RNA (1)...(19): siRNA sense strand
gcuaaccucagaacaacua

SEQ ID NO: 296326 - RNA, 19 nt, Homo sapiens
  misc_RNA (1)...(19): siRNA sense strand
gaguauaugcccuuugaug

SEQ ID NO: 296327 - RNA, 19 nt, Homo sapiens
  misc_RNA (1)...(19): siRNA sense strand
agaucaagcucauuagcaa

SEQ ID NO: 296328 - RNA, 19 nt, Homo sapiens
  misc_RNA (1)...(19): siRNA sense strand
guuggaagcuccgcacaga

SEQ ID NO: 296329 - RNA, 19 nt, Homo sapiens
  misc_RNA (1)...(19): siRNA sense strand
cagcagaaccagcucaaga

SEQ ID NO: 296330 - RNA, 19 nt, Homo sapiens
  misc_RNA (1)...(19): siRNA sense strand
uaaaaucccuggcuuccaa

SEQ ID NO: 296331 - RNA, 19 nt, Homo sapiens
  misc_RNA (1)...(19): siRNA sense strand
agaaccagcucaagaaagg

SEQ ID NO: 296332 - RNA, 19 nt, Homo sapiens
  misc_RNA (1)...(19): siRNA sense strand
gaagauggucagcuauaag

SEQ ID NO: 296333 - RNA, 19 nt, Homo sapiens
  misc_RNA (1)...(19): siRNA sense strand
gcuauaaggagaugcuaga

SEQ ID NO: 296334 - RNA, 19 nt, Homo sapiens
  misc_RNA (1)...(19): siRNA sense strand
ggacuuccaucgggcuuag

SEQ ID NO: 296335 - RNA, 19 nt, Homo sapiens
  misc_RNA (1)...(19): siRNA sense strand
aagaagauggucagcuaua

SEQ ID NO: 296336 - RNA, 19 nt, Homo sapiens
  misc_RNA (1)...(19): siRNA sense strand
ccagcuaaccucagaacaa

SEQ ID NO: 296337 - RNA, 19 nt, Homo sapiens
  misc_RNA (1)...(19): siRNA sense strand
gagcugcugagaaucauug

SEQ ID NO: 296338 - RNA, 19 nt, Homo sapiens
  misc_RNA (1)...(19): siRNA sense strand
ggccagaucagcuucauca

SEQ ID NO: 296339 - RNA, 19 nt, Homo sapiens
  misc_RNA (1)...(19): siRNA sense strand
ccaaccugcugaccacaga

SEQ ID NO: 296340 - RNA, 19 nt, Homo sapiens
  misc_RNA (1)...(19): siRNA sense strand
gaugaacuccuggacuuug

SEQ ID NO: 296341 - RNA, 19 nt, Homo sapiens
  misc_RNA (1)...(19): siRNA sense strand
gcugagaaccauagguguu

SEQ ID NO: 296342 - RNA, 19 nt, Homo sapiens
  misc_RNA (1)...(19): siRNA sense strand
ggaaggacgggcagcuaug

SEQ ID NO: 296343 - RNA, 19 nt, Homo sapiens
  misc_RNA (1)...(19): siRNA sense strand
ccaucgagcugggcuacaa

SEQ ID NO: 296344 - RNA, 19 nt, Homo sapiens
  misc_RNA (1)...(19): siRNA sense strand
gaagggcugagaaccauag

SEQ ID NO: 296345 - RNA, 19 nt, Homo sapiens
  misc_RNA (1)...(19): siRNA sense strand
gagaucaagcucauuagca

SEQ ID NO: 296346 - RNA, 19 nt, Homo sapiens
  misc_RNA (1)...(19): siRNA sense strand
ccucaaggucugccucuuu

SEQ ID NO: 296347 - RNA, 19 nt, Homo sapiens
  misc_RNA (1)...(19): siRNA sense strand
gcaggcgguucuccuugug

SEQ ID NO: 296348 - RNA, 19 nt, Homo sapiens
  misc_RNA (1)...(19): siRNA sense strand
ggucagcuauaaggagaug

SEQ ID NO: 296349 - RNA, 19 nt, Homo sapiens
  misc_RNA (1)...(19): siRNA sense strand
ggugaacuguguggugaug

SEQ ID NO: 296350 - RNA, 19 nt, Homo sapiens
  misc_RNA (1)...(19): siRNA sense strand
ucagaacaacuaacucaug

SEQ ID NO: 296351 - RNA, 19 nt, Homo sapiens
  misc_RNA (1)...(19): siRNA sense strand
cagcuaaccucagaacaac

SEQ ID NO: 296352 - RNA, 19 nt, Homo sapiens
  misc_RNA (1)...(19): siRNA sense strand
gggacccgcuccauguuca

SEQ ID NO: 296353 - RNA, 19 nt, Homo sapiens
  misc_RNA (1)...(19): siRNA sense strand
gaaggugccagaggaggaa

SEQ ID NO: 296354 - RNA, 19 nt, Homo sapiens
  misc_RNA (1)...(19): siRNA sense strand
cagcagggacaucguguug

SEQ ID NO: 296355 - RNA, 19 nt, Homo sapiens
  misc_RNA (1)...(19): siRNA sense strand
ggaugaacuccuggacuuu

SEQ ID NO: 296356 - RNA, 19 nt, Homo sapiens
  misc_RNA (1)...(19): siRNA sense strand
acucagaugccaacucaaa

SEQ ID NO: 296357 - RNA, 19 nt, Homo sapiens
  misc_RNA (1)...(19): siRNA sense strand
ggaagggcugagaaccaua

SEQ ID NO: 296358 - RNA, 19 nt, Homo sapiens
  misc_RNA (1)...(19): siRNA sense strand
ggcaggcgguucuccuugu

SEQ ID NO: 296359 - RNA, 19 nt, Homo sapiens
  misc_RNA (1)...(19): siRNA sense strand
ggaaggcaucgacaagauc

SEQ ID NO: 296360 - RNA, 19 nt, Homo sapiens
  misc_RNA (1)...(19): siRNA sense strand
cucaaggucugccucuuug

SEQ ID NO: 296361 - RNA, 19 nt, Homo sapiens
  misc_RNA (1)...(19): siRNA sense strand
cugagaaccauagguguua

SEQ ID NO: 296362 - RNA, 19 nt, Homo sapiens
  misc_RNA (1)...(19): siRNA sense strand
gcuacaacccugugaaggu

SEQ ID NO: 296363 - RNA, 19 nt, Homo sapiens
  misc_RNA (1)...(19): siRNA sense strand
cagcacagccaaggccuuu

SEQ ID NO: 296364 - RNA, 19 nt, Homo sapiens
  misc_RNA (1)...(19): siRNA sense strand
cuaagacccagaaugaguu

SEQ ID NO: 296365 - RNA, 19 nt, Homo sapiens
  misc_RNA (1)...(19): siRNA sense strand
ccucagaacaacuaacuca

SEQ ID NO: 296366 - RNA, 19 nt, Homo sapiens
  misc_RNA (1)...(19): siRNA sense strand
ggacgugguggacauugug

SEQ ID NO: 296367 - RNA, 19 nt, Homo sapiens
  misc_RNA (1)...(19): siRNA sense strand
ccagguggccacuuuaugg

SEQ ID NO: 296368 - RNA, 19 nt, Homo sapiens
  misc_RNA (1)...(19): siRNA sense strand
gagaagugcaaccucagau

SEQ ID NO: 296369 - RNA, 19 nt, Homo sapiens
  misc_RNA (1)...(19): siRNA sense strand
uaagacccagaaugaguuu

SEQ ID NO: 296370 - RNA, 19 nt, Homo sapiens
  misc_RNA (1)...(19): siRNA sense strand
caggagcugcugagaauca

SEQ ID NO: 296371 - RNA, 19 nt, Homo sapiens
  misc_RNA (1)...(19): siRNA sense strand
ccagaucagcuucaucaca

SEQ ID NO: 296372 - RNA, 19 nt, Homo sapiens
  misc_RNA (1)...(19): siRNA sense strand
aggaaggcaucgacaagau

SEQ ID NO: 296373 - RNA, 19 nt, Homo sapiens
  misc_RNA (1)...(19): siRNA sense strand
caagaagauggucagcuau

SEQ ID NO: 296374 - RNA, 19 nt, Homo sapiens
  misc_RNA (1)...(19): siRNA sense strand
ucaagcuuguccagcagaa

SEQ ID NO: 296375 - RNA, 19 nt, Homo sapiens
  misc_RNA (1)...(19): siRNA sense strand
caaggucugccucuuugga

SEQ ID NO: 296376 - RNA, 19 nt, Homo sapiens
  misc_RNA (1)...(19): siRNA sense strand
ggacuuugcggccuugacu

SEQ ID NO: 296377 - RNA, 19 nt, Homo sapiens
  misc_RNA (1)...(19): siRNA sense strand
gaaggacgggcagcuaugg

SEQ ID NO: 296378 - RNA, 19 nt, Homo sapiens
  misc_RNA (1)...(19): siRNA sense strand
gcccuuugauggcaacaag

SEQ ID NO: 296379 - RNA, 19 nt, Homo sapiens
  misc_RNA (1)...(19): siRNA sense strand
ugaaggaaggcaucgacaa

SEQ ID NO: 296380 - RNA, 19 nt, Homo sapiens
  misc_RNA (1)...(19): siRNA sense strand
uggaggagaucaagcucau

SEQ ID NO: 296381 - RNA, 19 nt, Homo sapiens
  misc_RNA (1)...(19): siRNA sense strand
cugugaaggugaacugugu

SEQ ID NO: 296382 - RNA, 19 nt, Homo sapiens
  misc_RNA (1)...(19): siRNA sense strand
uggaagcuccgcacagaug

SEQ ID NO: 296383 - RNA, 19 nt, Homo sapiens
  misc_RNA (1)...(19): siRNA sense strand
uggaagggcugagaaccau

SEQ ID NO: 296384 - RNA, 19 nt, Homo sapiens
  misc_RNA (1)...(19): siRNA sense strand
ggaagcuccgcacagaugu

SEQ ID NO: 296385 - RNA, 19 nt, Homo sapiens
  misc_RNA (1)...(19): siRNA sense strand
gcuggggucuggcuccuuu

SEQ ID NO: 296386 - RNA, 19 nt, Homo sapiens
  misc_RNA (1)...(19): siRNA sense strand
ucuaagacccagaaugagu

SEQ ID NO: 296387 - RNA, 19 nt, Homo sapiens
  misc_RNA (1)...(19): siRNA sense strand
guggugaugcgaggccuua

SEQ ID NO: 296388 - RNA, 19 nt, Homo sapiens
  misc_RNA (1)...(19): siRNA sense strand
ccagccaauccaagcauuu

SEQ ID NO: 296389 - RNA, 19 nt, Homo sapiens
  misc_RNA (1)...(19): siRNA sense strand
uuuggaaacucugagguau

SEQ ID NO: 296390 - RNA, 19 nt, Homo sapiens
  misc_RNA (1)...(19): siRNA sense strand
ggaugugcgcuucauagag

SEQ ID NO: 296391 - RNA, 19 nt, Homo sapiens
  misc_RNA (1)...(19): siRNA sense strand
gcuccgcacagaugucaga

SEQ ID NO: 296392 - RNA, 19 nt, Homo sapiens
  misc_RNA (1)...(19): siRNA sense strand
gcccucacccuguaugaca

SEQ ID NO: 296393 - RNA, 19 nt, Homo sapiens
  misc_RNA (1)...(19): siRNA sense strand
ucagaugccaacucaaagu

SEQ ID NO: 296394 - RNA, 19 nt, Homo sapiens
  misc_RNA (1)...(19): siRNA sense strand
cauccaugucugagcauuu

SEQ ID NO: 296395 - RNA, 19 nt, Homo sapiens
  misc_RNA (1)...(19): siRNA sense strand
guucauuguccgcaggaaa

SEQ ID NO: 296396 - RNA, 19 nt, Homo sapiens
  misc_RNA (1)...(19): siRNA sense strand
ggagaucaagcucauuagc

SEQ ID NO: 296397 - RNA, 19 nt, Homo sapiens
  misc_RNA (1)...(19): siRNA sense strand
aggagaugcuagacacugu

SEQ ID NO: 296398 - RNA, 19 nt, Homo sapiens
  misc_RNA (1)...(19): siRNA sense strand
guacacaccugcuuccuua

SEQ ID NO: 296399 - RNA, 19 nt, Homo sapiens
  misc_RNA (1)...(19): siRNA sense strand
caacaaaggcuauugguuu

SEQ ID NO: 296400 - RNA, 19 nt, Homo sapiens
  misc_RNA (1)...(19): siRNA sense strand
gaagaccaccuaaauauca

SEQ ID NO: 296401 - RNA, 19 nt, Homo sapiens
  misc_RNA (1)...(19): siRNA sense strand
gaugaaggguguuacaugu

SEQ ID NO: 296402 - RNA, 19 nt, Homo sapiens
  misc_RNA (1)...(19): siRNA sense strand
ucaaagacccuaagaauca

SEQ ID NO: 296403 - RNA, 19 nt, Homo sapiens
  misc_RNA (1)...(19): siRNA sense strand
ggacugugaccgacuuuaa

SEQ ID NO: 296404 - RNA, 19 nt, Homo sapiens
  misc_RNA (1)...(19): siRNA sense strand
uaagcaaaccgucaacaaa

SEQ ID NO: 296405 - RNA, 19 nt, Homo sapiens
  misc_RNA (1)...(19): siRNA sense strand
uaucaaagacccuaagaau

SEQ ID NO: 296406 - RNA, 19 nt, Homo sapiens
  misc_RNA (1)...(19): siRNA sense strand
uuacaugugucucuucaau

SEQ ID NO: 296407 - RNA, 19 nt, Homo sapiens
  misc_RNA (1)...(19): siRNA sense strand
ugaaggguguuacaugugu

SEQ ID NO: 296408 - RNA, 19 nt, Homo sapiens
  misc_RNA (1)...(19): siRNA sense strand
gauccagccugccuauaag

SEQ ID NO: 296409 - RNA, 19 nt, Homo sapiens
  misc_RNA (1)...(19): siRNA sense strand
gguaauucuucucguccua

SEQ ID NO: 296410 - RNA, 19 nt, Homo sapiens
  misc_RNA (1)...(19): siRNA sense strand
ccaggaagcccucauugug

SEQ ID NO: 296411 - RNA, 19 nt, Homo sapiens
  misc_RNA (1)...(19): siRNA sense strand
ggucagggauugaaaauag

SEQ ID NO: 296412 - RNA, 19 nt, Homo sapiens
  misc_RNA (1)...(19): siRNA sense strand
accaucaccuucuggaaua

SEQ ID NO: 296413 - RNA, 19 nt, Homo sapiens
  misc_RNA (1)...(19): siRNA sense strand
ggaugaaggguguuacaug

SEQ ID NO: 296414 - RNA, 19 nt, Homo sapiens
  misc_RNA (1)...(19): siRNA sense strand
ccuauaaggacaagauaaa

SEQ ID NO: 296415 - RNA, 19 nt, Homo sapiens
  misc_RNA (1)...(19): siRNA sense strand
caggaagcccucauuguga

SEQ ID NO: 296416 - RNA, 19 nt, Homo sapiens
  misc_RNA (1)...(19): siRNA sense strand
aagcauuguuucccuggua

SEQ ID NO: 296417 - RNA, 19 nt, Homo sapiens
  misc_RNA (1)...(19): siRNA sense strand
cugaagaccaccuaaauau

SEQ ID NO: 296418 - RNA, 19 nt, Homo sapiens
  misc_RNA (1)...(19): siRNA sense strand
ugauccagccugccuauaa

SEQ ID NO: 296419 - RNA, 19 nt, Homo sapiens
  misc_RNA (1)...(19): siRNA sense strand
caaucuuacuguacuggaa

SEQ ID NO: 296420 - RNA, 19 nt, Homo sapiens
  misc_RNA (1)...(19): siRNA sense strand
guccuaaucucaaucuuac

SEQ ID NO: 296421 - RNA, 19 nt, Homo sapiens
  misc_RNA (1)...(19): siRNA sense strand
ucugaagaccaccuaaaua

SEQ ID NO: 296422 - RNA, 19 nt, Homo sapiens
  misc_RNA (1)...(19): siRNA sense strand
ucugucaucugucuaccua

SEQ ID NO: 296423 - RNA, 19 nt, Homo sapiens
  misc_RNA (1)...(19): siRNA sense strand
cguccuaaucucaaucuua

SEQ ID NO: 296424 - RNA, 19 nt, Homo sapiens
  misc_RNA (1)...(19): siRNA sense strand
ggaaacgucaccggaauca

SEQ ID NO: 296425 - RNA, 19 nt, Homo sapiens
  misc_RNA (1)...(19): siRNA sense strand
acaugugucucuucaauac

SEQ ID NO: 296426 - RNA, 19 nt, Homo sapiens
  misc_RNA (1)...(19): siRNA sense strand
gaauaucacccuggaggau

SEQ ID NO: 296427 - RNA, 19 nt, Homo sapiens
  misc_RNA (1)...(19): siRNA sense strand
gugaccgacuuuaagcaaa

SEQ ID NO: 296428 - RNA, 19 nt, Homo sapiens
  misc_RNA (1)...(19): siRNA sense strand
cagcauccuccauaucaaa

SEQ ID NO: 296429 - RNA, 19 nt, Homo sapiens
  misc_RNA (1)...(19): siRNA sense strand
gaaagagagcagcuguaca

SEQ ID NO: 296430 - RNA, 19 nt, Homo sapiens
  misc_RNA (1)...(19): siRNA sense strand
guuaccagcauccuccaua

SEQ ID NO: 296431 - RNA, 19 nt, Homo sapiens
  misc_RNA (1)...(19): siRNA sense strand
uuaaaaugcucucugcaaa

SEQ ID NO: 296432 - RNA, 19 nt, Homo sapiens
  misc_RNA (1)...(19): siRNA sense strand
uuaccagcauccuccauau

SEQ ID NO: 296433 - RNA, 19 nt, Homo sapiens
  misc_RNA (1)...(19): siRNA sense strand
ucaguuccgcuauugcuaa

SEQ ID NO: 296434 - RNA, 19 nt, Homo sapiens
  misc_RNA (1)...(19): siRNA sense strand
guaauucuucucguccuaa

SEQ ID NO: 296435 - RNA, 19 nt, Homo sapiens
  misc_RNA (1)...(19): siRNA sense strand
acacaccugcuuccuuaaa

SEQ ID NO: 296436 - RNA, 19 nt, Homo sapiens
  misc_RNA (1)...(19): siRNA sense strand
cagaaaacauggucaccuu

SEQ ID NO: 296437 - RNA, 19 nt, Homo sapiens
  misc_RNA (1)...(19): siRNA sense strand
caaagacccuaagaaucag

SEQ ID NO: 296438 - RNA, 19 nt, Homo sapiens
  misc_RNA (1)...(19): siRNA sense strand
ccagcauccuccauaucaa

SEQ ID NO: 296439 - RNA, 19 nt, Homo sapiens
  misc_RNA (1)...(19): siRNA sense strand
gacucugucucacccaaau

SEQ ID NO: 296440 - RNA, 19 nt, Homo sapiens
  misc_RNA (1)...(19): siRNA sense strand
gguguuacaugugucucuu

SEQ ID NO: 296441 - RNA, 19 nt, Homo sapiens
  misc_RNA (1)...(19): siRNA sense strand
aaaaugcucucugcaaaau

SEQ ID NO: 296442 - RNA, 19 nt, Homo sapiens
  misc_RNA (1)...(19): siRNA sense strand
aaagagagcagcuguacac

SEQ ID NO: 296443 - RNA, 19 nt, Homo sapiens
  misc_RNA (1)...(19): siRNA sense strand
ugaagaccaccuaaauauc

SEQ ID NO: 296444 - RNA, 19 nt, Homo sapiens
  misc_RNA (1)...(19): siRNA sense strand
ucaacaaaggcuauugguu

SEQ ID NO: 296445 - RNA, 19 nt, Homo sapiens
  misc_RNA (1)...(19): siRNA sense strand
aagcaaaccgucaacaaag

SEQ ID NO: 296446 - RNA, 19 nt, Homo sapiens
  misc_RNA (1)...(19): siRNA sense strand
gcccuucugucaucugucu

SEQ ID NO: 296447 - RNA, 19 nt, Homo sapiens
  misc_RNA (1)...(19): siRNA sense strand
ugucaucugucuaccuaca

SEQ ID NO: 296448 - RNA, 19 nt, Homo sapiens
  misc_RNA (1)...(19): siRNA sense strand
gaucaggaugcccuucugu

SEQ ID NO: 296449 - RNA, 19 nt, Homo sapiens
  misc_RNA (1)...(19): siRNA sense strand
gccuauaaggacaagauaa

SEQ ID NO: 296450 - RNA, 19 nt, Homo sapiens
  misc_RNA (1)...(19): siRNA sense strand
uaauucuucucguccuaau

SEQ ID NO: 296451 - RNA, 19 nt, Homo sapiens
  misc_RNA (1)...(19): siRNA sense strand
aacaaaggcuauugguuuu

SEQ ID NO: 296452 - RNA, 19 nt, Homo sapiens
  misc_RNA (1)...(19): siRNA sense strand
ugaccgacuuuaagcaaac

SEQ ID NO: 296453 - RNA, 19 nt, Homo sapiens
  misc_RNA (1)...(19): siRNA sense strand
acuacaaauucucugaaga

SEQ ID NO: 296454 - RNA, 19 nt, Homo sapiens
  misc_RNA (1)...(19): siRNA sense strand
ucaggaugcccuucuguca

SEQ ID NO: 296455 - RNA, 19 nt, Homo sapiens
  misc_RNA (1)...(19): siRNA sense strand
gaaaacauggucaccuuca

SEQ ID NO: 296456 - RNA, 19 nt, Homo sapiens
  misc_RNA (1)...(19): siRNA sense strand
uuaagcaaaccgucaacaa

SEQ ID NO: 296457 - RNA, 19 nt, Homo sapiens
  misc_RNA (1)...(19): siRNA sense strand
ugaaagagagcagcuguac

SEQ ID NO: 296458 - RNA, 19 nt, Homo sapiens
  misc_RNA (1)...(19): siRNA sense strand
gaggaugaaggguguuaca

SEQ ID NO: 296459 - RNA, 19 nt, Homo sapiens
  misc_RNA (1)...(19): siRNA sense strand
caaccaucaccuucuggaa

SEQ ID NO: 296460 - RNA, 19 nt, Homo sapiens
  misc_RNA (1)...(19): siRNA sense strand
cuggaaacgucaccggaau

SEQ ID NO: 296461 - RNA, 19 nt, Homo sapiens
  misc_RNA (1)...(19): siRNA sense strand
caaaggcuauugguuuuca

SEQ ID NO: 296462 - RNA, 19 nt, Homo sapiens
  misc_RNA (1)...(19): siRNA sense strand
cuacaaauucucugaagac

SEQ ID NO: 296463 - RNA, 19 nt, Homo sapiens
  misc_RNA (1)...(19): siRNA sense strand
ucacuacaaauucucugaa

SEQ ID NO: 296464 - RNA, 19 nt, Homo sapiens
  misc_RNA (1)...(19): siRNA sense strand
uacaugugucucuucaaua

SEQ ID NO: 296465 - RNA, 19 nt, Homo sapiens
  misc_RNA (1)...(19): siRNA sense strand
auaucacccuggaggauga

SEQ ID NO: 296466 - RNA, 19 nt, Homo sapiens
  misc_RNA (1)...(19): siRNA sense strand
uaaaaugcucucugcaaaa

SEQ ID NO: 296467 - RNA, 19 nt, Homo sapiens
  misc_RNA (1)...(19): siRNA sense strand
aggacaagauaaacauuac

SEQ ID NO: 296468 - RNA, 19 nt, Homo sapiens
  misc_RNA (1)...(19): siRNA sense strand
gcccaggaagcccucauug

SEQ ID NO: 296469 - RNA, 19 nt, Homo sapiens
  misc_RNA (1)...(19): siRNA sense strand
cauaucaaagacccuaaga

SEQ ID NO: 296470 - RNA, 19 nt, Homo sapiens
  misc_RNA (1)...(19): siRNA sense strand
cacuacaaauucucugaag

SEQ ID NO: 296471 - RNA, 19 nt, Homo sapiens
  misc_RNA (1)...(19): siRNA sense strand
ugacccaggaugaaagaga

SEQ ID NO: 296472 - RNA, 19 nt, Homo sapiens
  misc_RNA (1)...(19): siRNA sense strand
gaaagcuguaagcccagaa

SEQ ID NO: 296473 - RNA, 19 nt, Homo sapiens
  misc_RNA (1)...(19): siRNA sense strand
ggugacccaggaugaaaga

SEQ ID NO: 296474 - RNA, 19 nt, Homo sapiens
  misc_RNA (1)...(19): siRNA sense strand
gaaaguggaugauucagua

SEQ ID NO: 296475 - RNA, 19 nt, Homo sapiens
  misc_RNA (1)...(19): siRNA sense strand
caacagagaugauuccaau

SEQ ID NO: 296476 - RNA, 19 nt, Homo sapiens
  misc_RNA (1)...(19): siRNA sense strand
gcaaguaccugguuucaca

SEQ ID NO: 296477 - RNA, 19 nt, Homo sapiens
  misc_RNA (1)...(19): siRNA sense strand
gaucaaagccacucacauu

SEQ ID NO: 296478 - RNA, 19 nt, Homo sapiens
  misc_RNA (1)...(19): siRNA sense strand
aaacagauuugcaagauug

SEQ ID NO: 296479 - RNA, 19 nt, Homo sapiens
  misc_RNA (1)...(19): siRNA sense strand
gaaggcugcugaagagauu

SEQ ID NO: 296480 - RNA, 19 nt, Homo sapiens
  misc_RNA (1)...(19): siRNA sense strand
gcagcuaccuuuagauuca

SEQ ID NO: 296481 - RNA, 19 nt, Homo sapiens
  misc_RNA (1)...(19): siRNA sense strand
aaucugaggugaugaagua

SEQ ID NO: 296482 - RNA, 19 nt, Homo sapiens
  misc_RNA (1)...(19): siRNA sense strand
uaagcuggcucgagaaauu

SEQ ID NO: 296483 - RNA, 19 nt, Homo sapiens
  misc_RNA (1)...(19): siRNA sense strand
acacaaagcugaagucuac

SEQ ID NO: 296484 - RNA, 19 nt, Homo sapiens
  misc_RNA (1)...(19): siRNA sense strand
ucaauuaugucccagauga

SEQ ID NO: 296485 - RNA, 19 nt, Homo sapiens
  misc_RNA (1)...(19): siRNA sense strand
agacaaggcucucuuuaau

SEQ ID NO: 296486 - RNA, 19 nt, Homo sapiens
  misc_RNA (1)...(19): siRNA sense strand
gaaugaagacucuacugua

SEQ ID NO: 296487 - RNA, 19 nt, Homo sapiens
  misc_RNA (1)...(19): siRNA sense strand
cugaagagguagaauuaua

SEQ ID NO: 296488 - RNA, 19 nt, Homo sapiens
  misc_RNA (1)...(19): siRNA sense strand
ugacagugcuuaugaagga

SEQ ID NO: 296489 - RNA, 19 nt, Homo sapiens
  misc_RNA (1)...(19): siRNA sense strand
caagugacauugauauauc

SEQ ID NO: 296490 - RNA, 19 nt, Homo sapiens
  misc_RNA (1)...(19): siRNA sense strand
gcuuggaacucaucaaaga

SEQ ID NO: 296491 - RNA, 19 nt, Homo sapiens
  misc_RNA (1)...(19): siRNA sense strand
cagaacaggugaauggauu

SEQ ID NO: 296492 - RNA, 19 nt, Homo sapiens
  misc_RNA (1)...(19): siRNA sense strand
gaagagauaaacagauuug

SEQ ID NO: 296493 - RNA, 19 nt, Homo sapiens
  misc_RNA (1)...(19): siRNA sense strand
caagacaccuguuccaagu

SEQ ID NO: 296494 - RNA, 19 nt, Homo sapiens
  misc_RNA (1)...(19): siRNA sense strand
caaauaagggcgagacuga

SEQ ID NO: 296495 - RNA, 19 nt, Homo sapiens
  misc_RNA (1)...(19): siRNA sense strand
gcaccggccugaugggaaa

SEQ ID NO: 296496 - RNA, 19 nt, Homo sapiens
  misc_RNA (1)...(19): siRNA sense strand
gaucaaaccuggggcaaua

SEQ ID NO: 296497 - RNA, 19 nt, Homo sapiens
  misc_RNA (1)...(19): siRNA sense strand
gagcagaugacauugaauu

SEQ ID NO: 296498 - RNA, 19 nt, Homo sapiens
  misc_RNA (1)...(19): siRNA sense strand
cacauuaaguuaccaagaa

SEQ ID NO: 296499 - RNA, 19 nt, Homo sapiens
  misc_RNA (1)...(19): siRNA sense strand
gaaguacauuacaucuuug

SEQ ID NO: 296500 - RNA, 19 nt, Homo sapiens
  misc_RNA (1)...(19): siRNA sense strand
gaagaagugaucaaugcua

SEQ ID NO: 296501 - RNA, 19 nt, Homo sapiens
  misc_RNA (1)...(19): siRNA sense strand
agaauuccauuaacacuga

SEQ ID NO: 296502 - RNA, 19 nt, Homo sapiens
  misc_RNA (1)...(19): siRNA sense strand
gaacugacccagacagaca

SEQ ID NO: 296503 - RNA, 19 nt, Homo sapiens
  misc_RNA (1)...(19): siRNA sense strand
ccagaaggguuuguaguga

SEQ ID NO: 296504 - RNA, 19 nt, Homo sapiens
  misc_RNA (1)...(19): siRNA sense strand
gcuuccagcuccuuuauga

SEQ ID NO: 296505 - RNA, 19 nt, Homo sapiens
  misc_RNA (1)...(19): siRNA sense strand
ccaggaaaguggaugauuc

SEQ ID NO: 296506 - RNA, 19 nt, Homo sapiens
  misc_RNA (1)...(19): siRNA sense strand
ucccgaagcucaacacaaa

SEQ ID NO: 296507 - RNA, 19 nt, Homo sapiens
  misc_RNA (1)...(19): siRNA sense strand
gcugaaggcugcugaagag

SEQ ID NO: 296508 - RNA, 19 nt, Homo sapiens
  misc_RNA (1)...(19): siRNA sense strand
ggauaccaaugauagauuc

SEQ ID NO: 296509 - RNA, 19 nt, Homo sapiens
  misc_RNA (1)...(19): siRNA sense strand
gagauaaacagauuugcaa

SEQ ID NO: 296510 - RNA, 19 nt, Homo sapiens
  misc_RNA (1)...(19): siRNA sense strand
acugacagaugaagagaua

SEQ ID NO: 296511 - RNA, 19 nt, Homo sapiens
  misc_RNA (1)...(19): siRNA sense strand
uaaagagacuaggcauuga

SEQ ID NO: 296512 - RNA, 19 nt, Homo sapiens
  misc_RNA (1)...(19): siRNA sense strand
ucagagaauuccauuaaca

SEQ ID NO: 296513 - RNA, 19 nt, Homo sapiens
  misc_RNA (1)...(19): siRNA sense strand
caaagccacucacauuaag

SEQ ID NO: 296514 - RNA, 19 nt, Homo sapiens
  misc_RNA (1)...(19): siRNA sense strand
ucaaagccacucacauuaa

SEQ ID NO: 296515 - RNA, 19 nt, Homo sapiens
  misc_RNA (1)...(19): siRNA sense strand
agaaggauguggauggauu

SEQ ID NO: 296516 - RNA, 19 nt, Homo sapiens
  misc_RNA (1)...(19): siRNA sense strand
ugucagggcucucaagaug

SEQ ID NO: 296517 - RNA, 19 nt, Homo sapiens
  misc_RNA (1)...(19): siRNA sense strand
ggccauugaugcucggaua

SEQ ID NO: 296518 - RNA, 19 nt, Homo sapiens
  misc_RNA (1)...(19): siRNA sense strand
gaggugaugaaguacauua

SEQ ID NO: 296519 - RNA, 19 nt, Homo sapiens
  misc_RNA (1)...(19): siRNA sense strand
gaaaggagagcccgucagu

SEQ ID NO: 296520 - RNA, 19 nt, Homo sapiens
  misc_RNA (1)...(19): siRNA sense strand
gaaacaaaggccaaaguuc

SEQ ID NO: 296521 - RNA, 19 nt, Homo sapiens
  misc_RNA (1)...(19): siRNA sense strand
aaauuggucugcugucuga

SEQ ID NO: 296522 - RNA, 19 nt, Homo sapiens
  misc_RNA (1)...(19): siRNA sense strand
cuaccacacugacagauga

SEQ ID NO: 296523 - RNA, 19 nt, Homo sapiens
  misc_RNA (1)...(19): siRNA sense strand
caacaucgcacauggcaau

SEQ ID NO: 296524 - RNA, 19 nt, Homo sapiens
  misc_RNA (1)...(19): siRNA sense strand
ggacggcccaguuugauau

SEQ ID NO: 296525 - RNA, 19 nt, Homo sapiens
  misc_RNA (1)...(19): siRNA sense strand
cagacaaggcucucuuuaa

SEQ ID NO: 296526 - RNA, 19 nt, Homo sapiens
  misc_RNA (1)...(19): siRNA sense strand
aaacagaacaggugaaugg

SEQ ID NO: 296527 - RNA, 19 nt, Homo sapiens
  misc_RNA (1)...(19): siRNA sense strand
gauaaacagauuugcaaga

SEQ ID NO: 296528 - RNA, 19 nt, Homo sapiens
  misc_RNA (1)...(19): siRNA sense strand
gcaaucaagcccaaucuca

SEQ ID NO: 296529 - RNA, 19 nt, Homo sapiens
  misc_RNA (1)...(19): siRNA sense strand
aaccauaacuuggcaaaga

SEQ ID NO: 296530 - RNA, 19 nt, Homo sapiens
  misc_RNA (1)...(19): siRNA sense strand
gaagagguagaauuauaug

SEQ ID NO: 296531 - RNA, 19 nt, Homo sapiens
  misc_RNA (1)...(19): siRNA sense strand
ugaggaagaucacgauugg

SEQ ID NO: 296532 - RNA, 19 nt, Homo sapiens
  misc_RNA (1)...(19): siRNA sense strand
ggacauugauccagaaacc

SEQ ID NO: 296533 - RNA, 19 nt, Homo sapiens
  misc_RNA (1)...(19): siRNA sense strand
agacaccuguuccaaguga

SEQ ID NO: 296534 - RNA, 19 nt, Homo sapiens
  misc_RNA (1)...(19): siRNA sense strand
ucaguaacuugaagaaaca

SEQ ID NO: 296535 - RNA, 19 nt, Homo sapiens
  misc_RNA (1)...(19): siRNA sense strand
uaaauggagugagaagguu

SEQ ID NO: 296536 - RNA, 19 nt, Homo sapiens
  misc_RNA (1)...(19): siRNA sense strand
gcucggauauuucaugaac

SEQ ID NO: 296537 - RNA, 19 nt, Homo sapiens
  misc_RNA (1)...(19): siRNA sense strand
gcccaucucuaccagaaug

SEQ ID NO: 296538 - RNA, 19 nt, Homo sapiens
  misc_RNA (1)...(19): siRNA sense strand
gauauaucacgaucuugua

SEQ ID NO: 296539 - RNA, 19 nt, Homo sapiens
  misc_RNA (1)...(19): siRNA sense strand
uggaugaggagguaaauaa

SEQ ID NO: 296540 - RNA, 19 nt, Homo sapiens
  misc_RNA (1)...(19): siRNA sense strand
gauaaaaucaggaucauug

SEQ ID NO: 296541 - RNA, 19 nt, Homo sapiens
  misc_RNA (1)...(19): siRNA sense strand
gaaaccauaacuuggcaaa

SEQ ID NO: 296542 - RNA, 19 nt, Homo sapiens
  misc_RNA (1)...(19): siRNA sense strand
caaauccgaagguuaaaga

SEQ ID NO: 296543 - RNA, 19 nt, Homo sapiens
  misc_RNA (1)...(19): siRNA sense strand
ggaugaggagguaaauaaa

SEQ ID NO: 296544 - RNA, 19 nt, Homo sapiens
  misc_RNA (1)...(19): siRNA sense strand
aagcugaagucuacacgaa

SEQ ID NO: 296545 - RNA, 19 nt, Homo sapiens
  misc_RNA (1)...(19): siRNA sense strand
caccacgccuggcaauauu

SEQ ID NO: 296546 - RNA, 19 nt, Homo sapiens
  misc_RNA (1)...(19): siRNA sense strand
cauugaugcucggauauuu

SEQ ID NO: 296547 - RNA, 19 nt, Homo sapiens
  misc_RNA (1)...(19): siRNA sense strand
aaacaaaggccaaaguucu

SEQ ID NO: 296548 - RNA, 19 nt, Homo sapiens
  misc_RNA (1)...(19): siRNA sense strand
gaaaaugccagaauguuug

SEQ ID NO: 296549 - RNA, 19 nt, Homo sapiens
  misc_RNA (1)...(19): siRNA sense strand
gaagagauugggaucaaag

SEQ ID NO: 296550 - RNA, 19 nt, Homo sapiens
  misc_RNA (1)...(19): siRNA sense strand
ugaagacucuacuguacau

SEQ ID NO: 296551 - RNA, 19 nt, Homo sapiens
  misc_RNA (1)...(19): siRNA sense strand
cagaugacauugaauuacu

SEQ ID NO: 296552 - RNA, 19 nt, Homo sapiens
  misc_RNA (1)...(19): siRNA sense strand
uggcaaagaguguuggaua

SEQ ID NO: 296553 - RNA, 19 nt, Homo sapiens
  misc_RNA (1)...(19): siRNA sense strand
uuaaagagacuaggcauug

SEQ ID NO: 296554 - RNA, 19 nt, Homo sapiens
  misc_RNA (1)...(19): siRNA sense strand
acaaggcucucuuuaaucg

SEQ ID NO: 296555 - RNA, 19 nt, Homo sapiens
  misc_RNA (1)...(19): siRNA sense strand
caucgacuguggaaucaau

SEQ ID NO: 296556 - RNA, 19 nt, Homo sapiens
  misc_RNA (1)...(19): siRNA sense strand
aagaagugaucaaugcuau

SEQ ID NO: 296557 - RNA, 19 nt, Homo sapiens
  misc_RNA (1)...(19): siRNA sense strand
ccagagagcagcacaagca

SEQ ID NO: 296558 - RNA, 19 nt, Homo sapiens
  misc_RNA (1)...(19): siRNA sense strand
ugacagaugaagagauaaa

SEQ ID NO: 296559 - RNA, 19 nt, Homo sapiens
  misc_RNA (1)...(19): siRNA sense strand
gagaucuccgcgcaaauaa

SEQ ID NO: 296560 - RNA, 19 nt, Homo sapiens
  misc_RNA (1)...(19): siRNA sense strand
gaacaggugaauggauuau

SEQ ID NO: 296561 - RNA, 19 nt, Homo sapiens
  misc_RNA (1)...(19): siRNA sense strand
uggagcagaugacauugaa

SEQ ID NO: 296562 - RNA, 19 nt, Homo sapiens
  misc_RNA (1)...(19): siRNA sense strand
guaaauggagugagaaggu

SEQ ID NO: 296563 - RNA, 19 nt, Homo sapiens
  misc_RNA (1)...(19): siRNA sense strand
gguggugacuggaauaacu

SEQ ID NO: 296564 - RNA, 19 nt, Homo sapiens
  misc_RNA (1)...(19): siRNA sense strand
ggccaaaguucugcuguca

SEQ ID NO: 296565 - RNA, 19 nt, Homo sapiens
  misc_RNA (1)...(19): siRNA sense strand
aaaccgaagcccauuggua

SEQ ID NO: 296566 - RNA, 19 nt, Homo sapiens
  misc_RNA (1)...(19): siRNA sense strand
ccaagugacauugauauau

SEQ ID NO: 296567 - RNA, 19 nt, Homo sapiens
  misc_RNA (1)...(19): siRNA sense strand
aguggaugauucaguauaa

SEQ ID NO: 296568 - RNA, 19 nt, Homo sapiens
  misc_RNA (1)...(19): siRNA sense strand
ccaaagagagggcgagcuu

SEQ ID NO: 296569 - RNA, 19 nt, Homo sapiens
  misc_RNA (1)...(19): siRNA sense strand
guggauggauugacuagca

SEQ ID NO: 296570 - RNA, 19 nt, Homo sapiens
  misc_RNA (1)...(19): siRNA sense strand
ggauguggauggauugacu

SEQ ID NO: 296571 - RNA, 19 nt, Homo sapiens
  misc_RNA (1)...(19): siRNA sense strand
gucugaagagguagaauua

SEQ ID NO: 296572 - RNA, 19 nt, Homo sapiens
  misc_RNA (1)...(19): siRNA sense strand
aaacacacuugucuuuguc

SEQ ID NO: 296573 - RNA, 19 nt, Homo sapiens
  misc_RNA (1)...(19): siRNA sense strand
ugaaacaaaggccaaaguu

SEQ ID NO: 296574 - RNA, 19 nt, Homo sapiens
  misc_RNA (1)...(19): siRNA sense strand
gugcugaugucgauauuua

SEQ ID NO: 296575 - RNA, 19 nt, Homo sapiens
  misc_RNA (1)...(19): siRNA sense strand
ccacaggacuucaggaauu

SEQ ID NO: 296576 - RNA, 19 nt, Homo sapiens
  misc_RNA (1)...(19): siRNA sense strand
gaccaacaauaauguagua

SEQ ID NO: 296577 - RNA, 19 nt, Homo sapiens
  misc_RNA (1)...(19): siRNA sense strand
ggugaaaccugaccgcaaa

SEQ ID NO: 296578 - RNA, 19 nt, Homo sapiens
  misc_RNA (1)...(19): siRNA sense strand
guuacuacauggcguauuu

SEQ ID NO: 296579 - RNA, 19 nt, Homo sapiens
  misc_RNA (1)...(19): siRNA sense strand
gaaaccgucuccacugaug

SEQ ID NO: 296580 - RNA, 19 nt, Homo sapiens
  misc_RNA (1)...(19): siRNA sense strand
gaacgcaggaaacaucuuu

SEQ ID NO: 296581 - RNA, 19 nt, Homo sapiens
  misc_RNA (1)...(19): siRNA sense strand
gaauauggauccugguucu

SEQ ID NO: 296582 - RNA, 19 nt, Homo sapiens
  misc_RNA (1)...(19): siRNA sense strand
ucauagucaucuucuguua

SEQ ID NO: 296583 - RNA, 19 nt, Homo sapiens
  misc_RNA (1)...(19): siRNA sense strand
ccacugaugaccaacaaua

SEQ ID NO: 296584 - RNA, 19 nt, Homo sapiens
  misc_RNA (1)...(19): siRNA sense strand
gcaagaacucccucugcua

SEQ ID NO: 296585 - RNA, 19 nt, Homo sapiens
  misc_RNA (1)...(19): siRNA sense strand
ggaacaagaagcucaggaa

SEQ ID NO: 296586 - RNA, 19 nt, Homo sapiens
  misc_RNA (1)...(19): siRNA sense strand
gaucauagucaucuucugu

SEQ ID NO: 296587 - RNA, 19 nt, Homo sapiens
  misc_RNA (1)...(19): siRNA sense strand
ccgauaggguuaaauggaa

SEQ ID NO: 296588 - RNA, 19 nt, Homo sapiens
  misc_RNA (1)...(19): siRNA sense strand
caucuucuguuaccugaga

SEQ ID NO: 296589 - RNA, 19 nt, Homo sapiens
  misc_RNA (1)...(19): siRNA sense strand
uaucugcacugccaaguca

SEQ ID NO: 296590 - RNA, 19 nt, Homo sapiens
  misc_RNA (1)...(19): siRNA sense strand
aaagguggacuccguuuaa

SEQ ID NO: 296591 - RNA, 19 nt, Homo sapiens
  misc_RNA (1)...(19): siRNA sense strand
gcuacgugcuccucauaug

SEQ ID NO: 296592 - RNA, 19 nt, Homo sapiens
  misc_RNA (1)...(19): siRNA sense strand
gugcagggacucuccagua

SEQ ID NO: 296593 - RNA, 19 nt, Homo sapiens
  misc_RNA (1)...(19): siRNA sense strand
cacaggacuucaggaauuu

SEQ ID NO: 296594 - RNA, 19 nt, Homo sapiens
  misc_RNA (1)...(19): siRNA sense strand
ccgcaaacccaaacugaaa

SEQ ID NO: 296595 - RNA, 19 nt, Homo sapiens
  misc_RNA (1)...(19): siRNA sense strand
gagaauauggauccugguu

SEQ ID NO: 296596 - RNA, 19 nt, Homo sapiens
  misc_RNA (1)...(19): siRNA sense strand
cgauaggguuaaauggaaa

SEQ ID NO: 296597 - RNA, 19 nt, Homo sapiens
  misc_RNA (1)...(19): siRNA sense strand
ucaaguacgacaaacugua

SEQ ID NO: 296598 - RNA, 19 nt, Homo sapiens
  misc_RNA (1)...(19): siRNA sense strand
gaugaccaacaauaaugua

SEQ ID NO: 296599 - RNA, 19 nt, Homo sapiens
  misc_RNA (1)...(19): siRNA sense strand
gguggaaccugggcuaucu

SEQ ID NO: 296600 - RNA, 19 nt, Homo sapiens
  misc_RNA (1)...(19): siRNA sense strand
gucaucggcuccauauuca

SEQ ID NO: 296601 - RNA, 19 nt, Homo sapiens
  misc_RNA (1)...(19): siRNA sense strand
cgucaucggcuccauauuc

SEQ ID NO: 296602 - RNA, 19 nt, Homo sapiens
  misc_RNA (1)...(19): siRNA sense strand
uucaacagcugccucaaug

SEQ ID NO: 296603 - RNA, 19 nt, Homo sapiens
  misc_RNA (1)...(19): siRNA sense strand
guaaagguggacuccguuu

SEQ ID NO: 296604 - RNA, 19 nt, Homo sapiens
  misc_RNA (1)...(19): siRNA sense strand
cagggacucuccaguacga

SEQ ID NO: 296605 - RNA, 19 nt, Homo sapiens
  misc_RNA (1)...(19): siRNA sense strand
gaccgcaaacccaaacuga

SEQ ID NO: 296606 - RNA, 19 nt, Homo sapiens
  misc_RNA (1)...(19): siRNA sense strand
cuaacgacguggccgauag

SEQ ID NO: 296607 - RNA, 19 nt, Homo sapiens
  misc_RNA (1)...(19): siRNA sense strand
gccacagucucaaguacga

SEQ ID NO: 296608 - RNA, 19 nt, Homo sapiens
  misc_RNA (1)...(19): siRNA sense strand
auuauagucucgcucugua

SEQ ID NO: 296609 - RNA, 19 nt, Homo sapiens
  misc_RNA (1)...(19): siRNA sense strand
ucuguuaccugagaauaug

SEQ ID NO: 296610 - RNA, 19 nt, Homo sapiens
  misc_RNA (1)...(19): siRNA sense strand
ggaauuuugucaccauguu

SEQ ID NO: 296611 - RNA, 19 nt, Homo sapiens
  misc_RNA (1)...(19): siRNA sense strand
ggcuguuuguggccaguua

SEQ ID NO: 296612 - RNA, 19 nt, Homo sapiens
  misc_RNA (1)...(19): siRNA sense strand
cuacauggcguauuucaac

SEQ ID NO: 296613 - RNA, 19 nt, Homo sapiens
  misc_RNA (1)...(19): siRNA sense strand
gcugggcuccucugaacuu

SEQ ID NO: 296614 - RNA, 19 nt, Homo sapiens
  misc_RNA (1)...(19): siRNA sense strand
cgucuccacugaugaccaa

SEQ ID NO: 296615 - RNA, 19 nt, Homo sapiens
  misc_RNA (1)...(19): siRNA sense strand
ggaaaccgucuccacugau

SEQ ID NO: 296616 - RNA, 19 nt, Homo sapiens
  misc_RNA (1)...(19): siRNA sense strand
gaucccagaguggcuguuu

SEQ ID NO: 296617 - RNA, 19 nt, Homo sapiens
  misc_RNA (1)...(19): siRNA sense strand
gccgauaggguuaaaugga

SEQ ID NO: 296618 - RNA, 19 nt, Homo sapiens
  misc_RNA (1)...(19): siRNA sense strand
gacguggccgauaggguua

SEQ ID NO: 296619 - RNA, 19 nt, Homo sapiens
  misc_RNA (1)...(19): siRNA sense strand
caggaacgcaggaaacauc

SEQ ID NO: 296620 - RNA, 19 nt, Homo sapiens
  misc_RNA (1)...(19): siRNA sense strand
ucaccggcaucgccaucaa

SEQ ID NO: 296621 - RNA, 19 nt, Homo sapiens
  misc_RNA (1)...(19): siRNA sense strand
aaacuguacagcagcaaga

SEQ ID NO: 296622 - RNA, 19 nt, Homo sapiens
  misc_RNA (1)...(19): siRNA sense strand
caaccgcuacugcuacauc

SEQ ID NO: 296623 - RNA, 19 nt, Homo sapiens
  misc_RNA (1)...(19): siRNA sense strand
ggucagacagagggugaaa

SEQ ID NO: 296624 - RNA, 19 nt, Homo sapiens
  misc_RNA (1)...(19): siRNA sense strand
uauacgggcuacugaacca

SEQ ID NO: 296625 - RNA, 19 nt, Homo sapiens
  misc_RNA (1)...(19): siRNA sense strand
ccaucaaccgcuacugcua

SEQ ID NO: 296626 - RNA, 19 nt, Homo sapiens
  misc_RNA (1)...(19): siRNA sense strand
cacugaugaccaacaauaa

SEQ ID NO: 296627 - RNA, 19 nt, Homo sapiens
  misc_RNA (1)...(19): siRNA sense strand
cugaugaccaacaauaaug

SEQ ID NO: 296628 - RNA, 19 nt, Homo sapiens
  misc_RNA (1)...(19): siRNA sense strand
gcuacuuacuggcuuauuu

SEQ ID NO: 296629 - RNA, 19 nt, Homo sapiens
  misc_RNA (1)...(19): siRNA sense strand
ucacugccaucgccauuaa

SEQ ID NO: 296630 - RNA, 19 nt, Homo sapiens
  misc_RNA (1)...(19): siRNA sense strand
caucggcucugucuucaau

SEQ ID NO: 296631 - RNA, 19 nt, Homo sapiens
  misc_RNA (1)...(19): siRNA sense strand
ccacggcacugcauucaag

SEQ ID NO: 296632 - RNA, 19 nt, Homo sapiens
  misc_RNA (1)...(19): siRNA sense strand
ccaggcagaugcucucuag

SEQ ID NO: 296633 - RNA, 19 nt, Homo sapiens
  misc_RNA (1)...(19): siRNA sense strand
uaugggcucuugaaccaaa

SEQ ID NO: 296634 - RNA, 19 nt, Homo sapiens
  misc_RNA (1)...(19): siRNA sense strand
ggagcuuucuaaccauguu

SEQ ID NO: 296635 - RNA, 19 nt, Homo sapiens
  misc_RNA (1)...(19): siRNA sense strand
ggccagcgccuuugugaug

SEQ ID NO: 296636 - RNA, 19 nt, Homo sapiens
  misc_RNA (1)...(19): siRNA sense strand
guacgacccacgcaucuau

SEQ ID NO: 296637 - RNA, 19 nt, Homo sapiens
  misc_RNA (1)...(19): siRNA sense strand
cuagcuacuuacuggcuua

SEQ ID NO: 296638 - RNA, 19 nt, Homo sapiens
  misc_RNA (1)...(19): siRNA sense strand
ggaacgcagguaauuuguu

SEQ ID NO: 296639 - RNA, 19 nt, Homo sapiens
  misc_RNA (1)...(19): siRNA sense strand
gaacccacggcacugcauu

SEQ ID NO: 296640 - RNA, 19 nt, Homo sapiens
  misc_RNA (1)...(19): siRNA sense strand
ucuaugggcucuugaacca

SEQ ID NO: 296641 - RNA, 19 nt, Homo sapiens
  misc_RNA (1)...(19): siRNA sense strand
ccauuaaccgcuacugcua

SEQ ID NO: 296642 - RNA, 19 nt, Homo sapiens
  misc_RNA (1)...(19): siRNA sense strand
uugcggagcuuucuaacca

SEQ ID NO: 296643 - RNA, 19 nt, Homo sapiens
  misc_RNA (1)...(19): siRNA sense strand
ggcucugucuucaauauca

SEQ ID NO: 296644 - RNA, 19 nt, Homo sapiens
  misc_RNA (1)...(19): siRNA sense strand
gggcuccacuuaacugcau

SEQ ID NO: 296645 - RNA, 19 nt, Homo sapiens
  misc_RNA (1)...(19): siRNA sense strand
ccggaacgcagguaauuug

SEQ ID NO: 296646 - RNA, 19 nt, Homo sapiens
  misc_RNA (1)...(19): siRNA sense strand
cugcacaucugccucaucu

SEQ ID NO: 296647 - RNA, 19 nt, Homo sapiens
  misc_RNA (1)...(19): siRNA sense strand
agaaauggcuccccagauc

SEQ ID NO: 296648 - RNA, 19 nt, Homo sapiens
  misc_RNA (1)...(19): siRNA sense strand
cgucaucggcucugucuuc

SEQ ID NO: 296649 - RNA, 19 nt, Homo sapiens
  misc_RNA (1)...(19): siRNA sense strand
auuugucacuagcuacuua

SEQ ID NO: 296650 - RNA, 19 nt, Homo sapiens
  misc_RNA (1)...(19): siRNA sense strand
ccucguggccaucuucuau

SEQ ID NO: 296651 - RNA, 19 nt, Homo sapiens
  misc_RNA (1)...(19): siRNA sense strand
cagguaauuuguucuuggu

SEQ ID NO: 296652 - RNA, 19 nt, Homo sapiens
  misc_RNA (1)...(19): siRNA sense strand
gacuugcggagcuuucuaa

SEQ ID NO: 296653 - RNA, 19 nt, Homo sapiens
  misc_RNA (1)...(19): siRNA sense strand
ucguggccaucuucuauga

SEQ ID NO: 296654 - RNA, 19 nt, Homo sapiens
  misc_RNA (1)...(19): siRNA sense strand
cuuacuggcuuauuucaac

SEQ ID NO: 296655 - RNA, 19 nt, Homo sapiens
  misc_RNA (1)...(19): siRNA sense strand
gcagggaauacaagaggau

SEQ ID NO: 296656 - RNA, 19 nt, Homo sapiens
  misc_RNA (1)...(19): siRNA sense strand
ucggcucugucuucaauau

SEQ ID NO: 296657 - RNA, 19 nt, Homo sapiens
  misc_RNA (1)...(19): siRNA sense strand
ccauguuugugguguuugu

SEQ ID NO: 296658 - RNA, 19 nt, Homo sapiens
  misc_RNA (1)...(19): siRNA sense strand
cuacuuacuggcuuauuuc

SEQ ID NO: 296659 - RNA, 19 nt, Homo sapiens
  misc_RNA (1)...(19): siRNA sense strand
cugcugggcuccacuuaac

SEQ ID NO: 296660 - RNA, 19 nt, Homo sapiens
  misc_RNA (1)...(19): siRNA sense strand
uggccuugcugcccaacuu

SEQ ID NO: 296661 - RNA, 19 nt, Homo sapiens
  misc_RNA (1)...(19): siRNA sense strand
uaaccgcuacugcuacauc

SEQ ID NO: 296662 - RNA, 19 nt, Homo sapiens
  misc_RNA (1)...(19): siRNA sense strand
cauugucuaugggcucuug

SEQ ID NO: 296663 - RNA, 19 nt, Homo sapiens
  misc_RNA (1)...(19): siRNA sense strand
gagcuuucuaaccauguuu

SEQ ID NO: 296664 - RNA, 19 nt, Homo sapiens
  misc_RNA (1)...(19): siRNA sense strand
gcacaccccucugcacauc

SEQ ID NO: 296665 - RNA, 19 nt, Homo sapiens
  misc_RNA (1)...(19): siRNA sense strand
ccagcuccacccaucauug

SEQ ID NO: 296666 - RNA, 19 nt, Homo sapiens
  misc_RNA (1)...(19): siRNA sense strand
uuacuggcuuauuucaaca

SEQ ID NO: 296667 - RNA, 19 nt, Homo sapiens
  misc_RNA (1)...(19): siRNA sense strand
gaucaacuauuucuucaga

SEQ ID NO: 296668 - RNA, 19 nt, Homo sapiens
  misc_RNA (1)...(19): siRNA sense strand
gaaguggacaauauaagua

SEQ ID NO: 296669 - RNA, 19 nt, Homo sapiens
  misc_RNA (1)...(19): siRNA sense strand
gaacauggcuacgccucuu

SEQ ID NO: 296670 - RNA, 19 nt, Homo sapiens
  misc_RNA (1)...(19): siRNA sense strand
ugaagaagcugaaagaaaa

SEQ ID NO: 296671 - RNA, 19 nt, Homo sapiens
  misc_RNA (1)...(19): siRNA sense strand
gcacacaacacuugguuug

SEQ ID NO: 296672 - RNA, 19 nt, Homo sapiens
  misc_RNA (1)...(19): siRNA sense strand
ggagaaguggacaauauaa

SEQ ID NO: 296673 - RNA, 19 nt, Homo sapiens
  misc_RNA (1)...(19): siRNA sense strand
ccaaagcacacaucaagaa

SEQ ID NO: 296674 - RNA, 19 nt, Homo sapiens
  misc_RNA (1)...(19): siRNA sense strand
ggaacgagaacagagauuu

SEQ ID NO: 296675 - RNA, 19 nt, Homo sapiens
  misc_RNA (1)...(19): siRNA sense strand
gagcucaucugcgccuuug

SEQ ID NO: 296676 - RNA, 19 nt, Homo sapiens
  misc_RNA (1)...(19): siRNA sense strand
caccagcacugccaacaga

SEQ ID NO: 296677 - RNA, 19 nt, Homo sapiens
  misc_RNA (1)...(19): siRNA sense strand
caaagcacacaucaagaaa

SEQ ID NO: 296678 - RNA, 19 nt, Homo sapiens
  misc_RNA (1)...(19): siRNA sense strand
ggagauggaacgaauacga

SEQ ID NO: 296679 - RNA, 19 nt, Homo sapiens
  misc_RNA (1)...(19): siRNA sense strand
gagauggaacgaauacgaa

SEQ ID NO: 296680 - RNA, 19 nt, Homo sapiens
  misc_RNA (1)...(19): siRNA sense strand
agcaccagcucgagaauuu

SEQ ID NO: 296681 - RNA, 19 nt, Homo sapiens
  misc_RNA (1)...(19): siRNA sense strand
ugaaguggauguugaaagc

SEQ ID NO: 296682 - RNA, 19 nt, Homo sapiens
  misc_RNA (1)...(19): siRNA sense strand
caucugcgccuuuguuuag

SEQ ID NO: 296683 - RNA, 19 nt, Homo sapiens
  misc_RNA (1)...(19): siRNA sense strand
ucaacuauuucuucagauc

SEQ ID NO: 296684 - RNA, 19 nt, Homo sapiens
  misc_RNA (1)...(19): siRNA sense strand
agauugaaguggauguuga

SEQ ID NO: 296685 - RNA, 19 nt, Homo sapiens
  misc_RNA (1)...(19): siRNA sense strand
auggagaaguggacaauau

SEQ ID NO: 296686 - RNA, 19 nt, Homo sapiens
  misc_RNA (1)...(19): siRNA sense strand
acacuugguuugcucaaca

SEQ ID NO: 296687 - RNA, 19 nt, Homo sapiens
  misc_RNA (1)...(19): siRNA sense strand
gaacgagaacagagauuuu

SEQ ID NO: 296688 - RNA, 19 nt, Homo sapiens
  misc_RNA (1)...(19): siRNA sense strand
gaaacuugaagaagcugaa

SEQ ID NO: 296689 - RNA, 19 nt, Homo sapiens
  misc_RNA (1)...(19): siRNA sense strand
gcucaucugcgccuuuguu

SEQ ID NO: 296690 - RNA, 19 nt, Homo sapiens
  misc_RNA (1)...(19): siRNA sense strand
uggagaaguggacaauaua

SEQ ID NO: 296691 - RNA, 19 nt, Homo sapiens
  misc_RNA (1)...(19): siRNA sense strand
uugaagaagcugaaagaaa

SEQ ID NO: 296692 - RNA, 19 nt, Homo sapiens
  misc_RNA (1)...(19): siRNA sense strand
aagcacacaucaagaaacu

SEQ ID NO: 296693 - RNA, 19 nt, Homo sapiens
  misc_RNA (1)...(19): siRNA sense strand
gcucgagaauuuggaacga

SEQ ID NO: 296694 - RNA, 19 nt, Homo sapiens
  misc_RNA (1)...(19): siRNA sense strand
gucaaacuuucauucacuu

SEQ ID NO: 296695 - RNA, 19 nt, Homo sapiens
  misc_RNA (1)...(19): siRNA sense strand
gagaaguggacaauauaag

SEQ ID NO: 296696 - RNA, 19 nt, Homo sapiens
  misc_RNA (1)...(19): siRNA sense strand
uggaucaacuauuucuuca

SEQ ID NO: 296697 - RNA, 19 nt, Homo sapiens
  misc_RNA (1)...(19): siRNA sense strand
uaaaguggcgacuggaaca

SEQ ID NO: 296698 - RNA, 19 nt, Homo sapiens
  misc_RNA (1)...(19): siRNA sense strand
gauugaaguggauguugaa

SEQ ID NO: 296699 - RNA, 19 nt, Homo sapiens
  misc_RNA (1)...(19): siRNA sense strand
gagauugaaguggauguug

SEQ ID NO: 296700 - RNA, 19 nt, Homo sapiens
  misc_RNA (1)...(19): siRNA sense strand
ugucaaacuuucauucacu

SEQ ID NO: 296701 - RNA, 19 nt, Homo sapiens
  misc_RNA (1)...(19): siRNA sense strand
uggcuacgccucuucauuc

SEQ ID NO: 296702 - RNA, 19 nt, Homo sapiens
  misc_RNA (1)...(19): siRNA sense strand
gaauuuggaacgagaacag

SEQ ID NO: 296703 - RNA, 19 nt, Homo sapiens
  misc_RNA (1)...(19): siRNA sense strand
guaccaccagcaucaguga

SEQ ID NO: 296704 - RNA, 19 nt, Homo sapiens
  misc_RNA (1)...(19): siRNA sense strand
agaaguggacaauauaagu

SEQ ID NO: 296705 - RNA, 19 nt, Homo sapiens
  misc_RNA (1)...(19): siRNA sense strand
ggagauugaaguggauguu

SEQ ID NO: 296706 - RNA, 19 nt, Homo sapiens
  misc_RNA (1)...(19): siRNA sense strand
gauggaacgaauacgaaug

SEQ ID NO: 296707 - RNA, 19 nt, Homo sapiens
  misc_RNA (1)...(19): siRNA sense strand
auaaguaccaccagcauca

SEQ ID NO: 296708 - RNA, 19 nt, Homo sapiens
  misc_RNA (1)...(19): siRNA sense strand
cucaggagauggaacgaau

SEQ ID NO: 296709 - RNA, 19 nt, Homo sapiens
  misc_RNA (1)...(19): siRNA sense strand
caaacuuucauucacuuca

SEQ ID NO: 296710 - RNA, 19 nt, Homo sapiens
  misc_RNA (1)...(19): siRNA sense strand
acacaacacuugguuugcu

SEQ ID NO: 296711 - RNA, 19 nt, Homo sapiens
  misc_RNA (1)...(19): siRNA sense strand
gugccagugucaaacuuuc

SEQ ID NO: 296712 - RNA, 19 nt, Homo sapiens
  misc_RNA (1)...(19): siRNA sense strand
ucaggagauggaacgaaua

SEQ ID NO: 296713 - RNA, 19 nt, Homo sapiens
  misc_RNA (1)...(19): siRNA sense strand
gcucaacaaagccaaagca

SEQ ID NO: 296714 - RNA, 19 nt, Homo sapiens
  misc_RNA (1)...(19): siRNA sense strand
gccaaagcacacaucaaga

SEQ ID NO: 296715 - RNA, 19 nt, Homo sapiens
  misc_RNA (1)...(19): siRNA sense strand
ucaucugcgccuuuguuua

SEQ ID NO: 296716 - RNA, 19 nt, Homo sapiens
  misc_RNA (1)...(19): siRNA sense strand
gcgagaggagauugaagug

SEQ ID NO: 296717 - RNA, 19 nt, Homo sapiens
  misc_RNA (1)...(19): siRNA sense strand
gcaccagcucgagaauuug

SEQ ID NO: 296718 - RNA, 19 nt, Homo sapiens
  misc_RNA (1)...(19): siRNA sense strand
gaucaacuauuucuucaga

SEQ ID NO: 296719 - RNA, 19 nt, Homo sapiens
  misc_RNA (1)...(19): siRNA sense strand
gaaguggacaauauaagua

SEQ ID NO: 296720 - RNA, 19 nt, Homo sapiens
  misc_RNA (1)...(19): siRNA sense strand
ugaagaagcugaaagaaaa

SEQ ID NO: 296721 - RNA, 19 nt, Homo sapiens
  misc_RNA (1)...(19): siRNA sense strand
gcacacaacacuugguuug

SEQ ID NO: 296722 - RNA, 19 nt, Homo sapiens
  misc_RNA (1)...(19): siRNA sense strand
ggagaaguggacaauauaa

SEQ ID NO: 296723 - RNA, 19 nt, Homo sapiens
  misc_RNA (1)...(19): siRNA sense strand
ccaaagcacacaucaagaa

SEQ ID NO: 296724 - RNA, 19 nt, Homo sapiens
  misc_RNA (1)...(19): siRNA sense strand
ggaacgagaacagagauuu

SEQ ID NO: 296725 - RNA, 19 nt, Homo sapiens
  misc_RNA (1)...(19): siRNA sense strand
gagcucaucugcgccuuug

SEQ ID NO: 296726 - RNA, 19 nt, Homo sapiens
  misc_RNA (1)...(19): siRNA sense strand
caccagcacugccaacaga

SEQ ID NO: 296727 - RNA, 19 nt, Homo sapiens
  misc_RNA (1)...(19): siRNA sense strand
caaagcacacaucaagaaa

SEQ ID NO: 296728 - RNA, 19 nt, Homo sapiens
  misc_RNA (1)...(19): siRNA sense strand
ggagauggaacgaauacga

SEQ ID NO: 296729 - RNA, 19 nt, Homo sapiens
  misc_RNA (1)...(19): siRNA sense strand
gagauggaacgaauacgaa

SEQ ID NO: 296730 - RNA, 19 nt, Homo sapiens
  misc_RNA (1)...(19): siRNA sense strand
agcaccagcucgagaauuu

SEQ ID NO: 296731 - RNA, 19 nt, Homo sapiens
  misc_RNA (1)...(19): siRNA sense strand
ugaaguggauguugaaagc

SEQ ID NO: 296732 - RNA, 19 nt, Homo sapiens
  misc_RNA (1)...(19): siRNA sense strand
caucugcgccuuuguuuag

SEQ ID NO: 296733 - RNA, 19 nt, Homo sapiens
  misc_RNA (1)...(19): siRNA sense strand
ucaacuauuucuucagauc

SEQ ID NO: 296734 - RNA, 19 nt, Homo sapiens
  misc_RNA (1)...(19): siRNA sense strand
agauugaaguggauguuga

SEQ ID NO: 296735 - RNA, 19 nt, Homo sapiens
  misc_RNA (1)...(19): siRNA sense strand
auggagaaguggacaauau

SEQ ID NO: 296736 - RNA, 19 nt, Homo sapiens
  misc_RNA (1)...(19): siRNA sense strand
acacuugguuugcucaaca

SEQ ID NO: 296737 - RNA, 19 nt, Homo sapiens
  misc_RNA (1)...(19): siRNA sense strand
gcucaucugcgccuuuguu

SEQ ID NO: 296738 - RNA, 19 nt, Homo sapiens
  misc_RNA (1)...(19): siRNA sense strand
gaacgagaacagagauuuu

SEQ ID NO: 296739 - RNA, 19 nt, Homo sapiens
  misc_RNA (1)...(19): siRNA sense strand
gaaacuugaagaagcugaa

SEQ ID NO: 296740 - RNA, 19 nt, Homo sapiens
  misc_RNA (1)...(19): siRNA sense strand
uggagaaguggacaauaua

SEQ ID NO: 296741 - RNA, 19 nt, Homo sapiens
  misc_RNA (1)...(19): siRNA sense strand
uugaagaagcugaaagaaa

SEQ ID NO: 296742 - RNA, 19 nt, Homo sapiens
  misc_RNA (1)...(19): siRNA sense strand
aagcacacaucaagaaacu

SEQ ID NO: 296743 - RNA, 19 nt, Homo sapiens
  misc_RNA (1)...(19): siRNA sense strand
gcucgagaauuuggaacga

SEQ ID NO: 296744 - RNA, 19 nt, Homo sapiens
  misc_RNA (1)...(19): siRNA sense strand
gucaaacuuucauucacuu

SEQ ID NO: 296745 - RNA, 19 nt, Homo sapiens
  misc_RNA (1)...(19): siRNA sense strand
gagaaguggacaauauaag

SEQ ID NO: 296746 - RNA, 19 nt, Homo sapiens
  misc_RNA (1)...(19): siRNA sense strand
uggaucaacuauuucuuca

SEQ ID NO: 296747 - RNA, 19 nt, Homo sapiens
  misc_RNA (1)...(19): siRNA sense strand
uaaaguggcgacuggaaca

SEQ ID NO: 296748 - RNA, 19 nt, Homo sapiens
  misc_RNA (1)...(19): siRNA sense strand
gauugaaguggauguugaa

SEQ ID NO: 296749 - RNA, 19 nt, Homo sapiens
  misc_RNA (1)...(19): siRNA sense strand
gagauugaaguggauguug

SEQ ID NO: 296750 - RNA, 19 nt, Homo sapiens
  misc_RNA (1)...(19): siRNA sense strand
ugucaaacuuucauucacu

SEQ ID NO: 296751 - RNA, 19 nt, Homo sapiens
  misc_RNA (1)...(19): siRNA sense strand
gaauuuggaacgagaacag

SEQ ID NO: 296752 - RNA, 19 nt, Homo sapiens
  misc_RNA (1)...(19): siRNA sense strand
guaccaccagcaucaguga

SEQ ID NO: 296753 - RNA, 19 nt, Homo sapiens
  misc_RNA (1)...(19): siRNA sense strand
agaaguggacaauauaagu

SEQ ID NO: 296754 - RNA, 19 nt, Homo sapiens
  misc_RNA (1)...(19): siRNA sense strand
ggagauugaaguggauguu

SEQ ID NO: 296755 - RNA, 19 nt, Homo sapiens
  misc_RNA (1)...(19): siRNA sense strand
gauggaacgaauacgaaug

SEQ ID NO: 296756 - RNA, 19 nt, Homo sapiens
  misc_RNA (1)...(19): siRNA sense strand
auaaguaccaccagcauca

SEQ ID NO: 296757 - RNA, 19 nt, Homo sapiens
  misc_RNA (1)...(19): siRNA sense strand
cucaggagauggaacgaau

SEQ ID NO: 296758 - RNA, 19 nt, Homo sapiens
  misc_RNA (1)...(19): siRNA sense strand
caaacuuucauucacuuca

SEQ ID NO: 296759 - RNA, 19 nt, Homo sapiens
  misc_RNA (1)...(19): siRNA sense strand
acacaacacuugguuugcu

SEQ ID NO: 296760 - RNA, 19 nt, Homo sapiens
  misc_RNA (1)...(19): siRNA sense strand
gugccagugucaaacuuuc

SEQ ID NO: 296761 - RNA, 19 nt, Homo sapiens
  misc_RNA (1)...(19): siRNA sense strand
ucaggagauggaacgaaua

SEQ ID NO: 296762 - RNA, 19 nt, Homo sapiens
  misc_RNA (1)...(19): siRNA sense strand
gcucaacaaagccaaagca

SEQ ID NO: 296763 - RNA, 19 nt, Homo sapiens
  misc_RNA (1)...(19): siRNA sense strand
gccaaagcacacaucaaga

SEQ ID NO: 296764 - RNA, 19 nt, Homo sapiens
  misc_RNA (1)...(19): siRNA sense strand
gcaccagcucgagaauuug

SEQ ID NO: 296765 - RNA, 19 nt, Homo sapiens
  misc_RNA (1)...(19): siRNA sense strand
ucaucugcgccuuuguuua

SEQ ID NO: 296766 - RNA, 19 nt, Homo sapiens
  misc_RNA (1)...(19): siRNA sense strand
gcgagaggagauugaagug

SEQ ID NO: 296767 - RNA, 19 nt, Homo sapiens
  misc_RNA (1)...(19): siRNA sense strand
gggaacugcucuuuaauua

SEQ ID NO: 296768 - RNA, 19 nt, Homo sapiens
  misc_RNA (1)...(19): siRNA sense strand
ggaaaagccucauguaaaa

SEQ ID NO: 296769 - RNA, 19 nt, Homo sapiens
  misc_RNA (1)...(19): siRNA sense strand
gacgggaacugcucuuuaa

SEQ ID NO: 296770 - RNA, 19 nt, Homo sapiens
  misc_RNA (1)...(19): siRNA sense strand
gaagaugugucccaagcuu

SEQ ID NO: 296771 - RNA, 19 nt, Homo sapiens
  misc_RNA (1)...(19): siRNA sense strand
uaagaccauucgcgauuua

SEQ ID NO: 296772 - RNA, 19 nt, Homo sapiens
  misc_RNA (1)...(19): siRNA sense strand
ggacgggaacugcucuuua

SEQ ID NO: 296773 - RNA, 19 nt, Homo sapiens
  misc_RNA (1)...(19): siRNA sense strand
ggaagacuguccucuaugg

SEQ ID NO: 296774 - RNA, 19 nt, Homo sapiens
  misc_RNA (1)...(19): siRNA sense strand
ggaagaggaagaagaguga

SEQ ID NO: 296775 - RNA, 19 nt, Homo sapiens
  misc_RNA (1)...(19): siRNA sense strand
agauuugacugcaagauug

SEQ ID NO: 296776 - RNA, 19 nt, Homo sapiens
  misc_RNA (1)...(19): siRNA sense strand
ggaugacgaugccaaguac

SEQ ID NO: 296777 - RNA, 19 nt, Homo sapiens
  misc_RNA (1)...(19): siRNA sense strand
gggaugacgaugccaagua

SEQ ID NO: 296778 - RNA, 19 nt, Homo sapiens
  misc_RNA (1)...(19): siRNA sense strand
cuaagaccauucgcgauuu

SEQ ID NO: 296779 - RNA, 19 nt, Homo sapiens
  misc_RNA (1)...(19): siRNA sense strand
guaaaacccuauuucucua

SEQ ID NO: 296780 - RNA, 19 nt, Homo sapiens
  misc_RNA (1)...(19): siRNA sense strand
ggaacugcucuuuaauuau

SEQ ID NO: 296781 - RNA, 19 nt, Homo sapiens
  misc_RNA (1)...(19): siRNA sense strand
acugcaagauugaaggaua

SEQ ID NO: 296782 - RNA, 19 nt, Homo sapiens
  misc_RNA (1)...(19): siRNA sense strand
ugucaacagucuuggagaa

SEQ ID NO: 296783 - RNA, 19 nt, Homo sapiens
  misc_RNA (1)...(19): siRNA sense strand
cauucgcgauuuagaaguu

SEQ ID NO: 296784 - RNA, 19 nt, Homo sapiens
  misc_RNA (1)...(19): siRNA sense strand
ccagauagacuacgaugag

SEQ ID NO: 296785 - RNA, 19 nt, Homo sapiens
  misc_RNA (1)...(19): siRNA sense strand
ccaaccagcccgcucaaug

SEQ ID NO: 296786 - RNA, 19 nt, Homo sapiens
  misc_RNA (1)...(19): siRNA sense strand
gaccauucgcgauuuagaa

SEQ ID NO: 296787 - RNA, 19 nt, Homo sapiens
  misc_RNA (1)...(19): siRNA sense strand
uuggaagacuguccucuau

SEQ ID NO: 296788 - RNA, 19 nt, Homo sapiens
  misc_RNA (1)...(19): siRNA sense strand
ucuaagaccauucgcgauu

SEQ ID NO: 296789 - RNA, 19 nt, Homo sapiens
  misc_RNA (1)...(19): siRNA sense strand
gcugugagagccauuggaa

SEQ ID NO: 296790 - RNA, 19 nt, Homo sapiens
  misc_RNA (1)...(19): siRNA sense strand
cgggaacugcucuuuaauu

SEQ ID NO: 296791 - RNA, 19 nt, Homo sapiens
  misc_RNA (1)...(19): siRNA sense strand
ugugagagccauuggaaga

SEQ ID NO: 296792 - RNA, 19 nt, Homo sapiens
  misc_RNA (1)...(19): siRNA sense strand
uagauuugacugcaagauu

SEQ ID NO: 296793 - RNA, 19 nt, Homo sapiens
  misc_RNA (1)...(19): siRNA sense strand
ucaacagggucaccaacca

SEQ ID NO: 296794 - RNA, 19 nt, Homo sapiens
  misc_RNA (1)...(19): siRNA sense strand
gauuugacugcaagauuga

SEQ ID NO: 296795 - RNA, 19 nt, Homo sapiens
  misc_RNA (1)...(19): siRNA sense strand
caaccagcccgcucaaugc

SEQ ID NO: 296796 - RNA, 19 nt, Homo sapiens
  misc_RNA (1)...(19): siRNA sense strand
aaacccuauuucucuaaga

SEQ ID NO: 296797 - RNA, 19 nt, Homo sapiens
  misc_RNA (1)...(19): siRNA sense strand
cuauuucucuaagaccauu

SEQ ID NO: 296798 - RNA, 19 nt, Homo sapiens
  misc_RNA (1)...(19): siRNA sense strand
aggaaaagccucauguaaa

SEQ ID NO: 296799 - RNA, 19 nt, Homo sapiens
  misc_RNA (1)...(19): siRNA sense strand
gggaacugcucuuuaauua

SEQ ID NO: 296800 - RNA, 19 nt, Homo sapiens
  misc_RNA (1)...(19): siRNA sense strand
ggaaaagccucauguaaaa

SEQ ID NO: 296801 - RNA, 19 nt, Homo sapiens
  misc_RNA (1)...(19): siRNA sense strand
gacgggaacugcucuuuaa

SEQ ID NO: 296802 - RNA, 19 nt, Homo sapiens
  misc_RNA (1)...(19): siRNA sense strand
gaagaugugucccaagcuu

SEQ ID NO: 296803 - RNA, 19 nt, Homo sapiens
  misc_RNA (1)...(19): siRNA sense strand
uaagaccauucgcgauuua

SEQ ID NO: 296804 - RNA, 19 nt, Homo sapiens
  misc_RNA (1)...(19): siRNA sense strand
ggacgggaacugcucuuua

SEQ ID NO: 296805 - RNA, 19 nt, Homo sapiens
  misc_RNA (1)...(19): siRNA sense strand
ggaagacuguccucuaugg

SEQ ID NO: 296806 - RNA, 19 nt, Homo sapiens
  misc_RNA (1)...(19): siRNA sense strand
ggaagaggaagaagaguga

SEQ ID NO: 296807 - RNA, 19 nt, Homo sapiens
  misc_RNA (1)...(19): siRNA sense strand
agauuugacugcaagauug

SEQ ID NO: 296808 - RNA, 19 nt, Homo sapiens
  misc_RNA (1)...(19): siRNA sense strand
ggaugacgaugccaaguac

SEQ ID NO: 296809 - RNA, 19 nt, Homo sapiens
  misc_RNA (1)...(19): siRNA sense strand
gggaugacgaugccaagua

SEQ ID NO: 296810 - RNA, 19 nt, Homo sapiens
  misc_RNA (1)...(19): siRNA sense strand
cuaagaccauucgcgauuu

SEQ ID NO: 296811 - RNA, 19 nt, Homo sapiens
  misc_RNA (1)...(19): siRNA sense strand
guaaaacccuauuucucua

SEQ ID NO: 296812 - RNA, 19 nt, Homo sapiens
  misc_RNA (1)...(19): siRNA sense strand
ggaacugcucuuuaauuau

SEQ ID NO: 296813 - RNA, 19 nt, Homo sapiens
  misc_RNA (1)...(19): siRNA sense strand
acugcaagauugaaggaua

SEQ ID NO: 296814 - RNA, 19 nt, Homo sapiens
  misc_RNA (1)...(19): siRNA sense strand
ugucaacagucuuggagaa

SEQ ID NO: 296815 - RNA, 19 nt, Homo sapiens
  misc_RNA (1)...(19): siRNA sense strand
cauucgcgauuuagaaguu

SEQ ID NO: 296816 - RNA, 19 nt, Homo sapiens
  misc_RNA (1)...(19): siRNA sense strand
ccagauagacuacgaugag

SEQ ID NO: 296817 - RNA, 19 nt, Homo sapiens
  misc_RNA (1)...(19): siRNA sense strand
ccaaccagcccgcucaaug

SEQ ID NO: 296818 - RNA, 19 nt, Homo sapiens
  misc_RNA (1)...(19): siRNA sense strand
gaccauucgcgauuuagaa

SEQ ID NO: 296819 - RNA, 19 nt, Homo sapiens
  misc_RNA (1)...(19): siRNA sense strand
uuggaagacuguccucuau

SEQ ID NO: 296820 - RNA, 19 nt, Homo sapiens
  misc_RNA (1)...(19): siRNA sense strand
ucuaagaccauucgcgauu

SEQ ID NO: 296821 - RNA, 19 nt, Homo sapiens
  misc_RNA (1)...(19): siRNA sense strand
gcugugagagccauuggaa

SEQ ID NO: 296822 - RNA, 19 nt, Homo sapiens
  misc_RNA (1)...(19): siRNA sense strand
cgggaacugcucuuuaauu

SEQ ID NO: 296823 - RNA, 19 nt, Homo sapiens
  misc_RNA (1)...(19): siRNA sense strand
ugugagagccauuggaaga

SEQ ID NO: 296824 - RNA, 19 nt, Homo sapiens
  misc_RNA (1)...(19): siRNA sense strand
uagauuugacugcaagauu

SEQ ID NO: 296825 - RNA, 19 nt, Homo sapiens
  misc_RNA (1)...(19): siRNA sense strand
ucaacagggucaccaacca

SEQ ID NO: 296826 - RNA, 19 nt, Homo sapiens
  misc_RNA (1)...(19): siRNA sense strand
gauuugacugcaagauuga

SEQ ID NO: 296827 - RNA, 19 nt, Homo sapiens
  misc_RNA (1)...(19): siRNA sense strand
caaccagcccgcucaaugc

SEQ ID NO: 296828 - RNA, 19 nt, Homo sapiens
  misc_RNA (1)...(19): siRNA sense strand
aaacccuauuucucuaaga

SEQ ID NO: 296829 - RNA, 19 nt, Homo sapiens
  misc_RNA (1)...(19): siRNA sense strand
cuauuucucuaagaccauu

SEQ ID NO: 296830 - RNA, 19 nt, Homo sapiens
  misc_RNA (1)...(19): siRNA sense strand
aggaaaagccucauguaaa

SEQ ID NO: 296831 - RNA, 19 nt, Homo sapiens
  misc_RNA (1)...(19): siRNA sense strand
gggaacugcucuuuaauua

SEQ ID NO: 296832 - RNA, 19 nt, Homo sapiens
  misc_RNA (1)...(19): siRNA sense strand
ggaaaagccucauguaaaa

SEQ ID NO: 296833 - RNA, 19 nt, Homo sapiens
  misc_RNA (1)...(19): siRNA sense strand
gacgggaacugcucuuuaa

SEQ ID NO: 296834 - RNA, 19 nt, Homo sapiens
  misc_RNA (1)...(19): siRNA sense strand
gaagaugugucccaagcuu

SEQ ID NO: 296835 - RNA, 19 nt, Homo sapiens
  misc_RNA (1)...(19): siRNA sense strand
uaagaccauucgcgauuua

SEQ ID NO: 296836 - RNA, 19 nt, Homo sapiens
  misc_RNA (1)...(19): siRNA sense strand
ggacgggaacugcucuuua

SEQ ID NO: 296837 - RNA, 19 nt, Homo sapiens
  misc_RNA (1)...(19): siRNA sense strand
ggaagacuguccucuaugg

SEQ ID NO: 296838 - RNA, 19 nt, Homo sapiens
  misc_RNA (1)...(19): siRNA sense strand
ggaagaggaagaagaguga

SEQ ID NO: 296839 - RNA, 19 nt, Homo sapiens
  misc_RNA (1)...(19): siRNA sense strand
agauuugacugcaagauug

SEQ ID NO: 296840 - RNA, 19 nt, Homo sapiens
  misc_RNA (1)...(19): siRNA sense strand
ggaugacgaugccaaguac

SEQ ID NO: 296841 - RNA, 19 nt, Homo sapiens
  misc_RNA (1)...(19): siRNA sense strand
gggaugacgaugccaagua

SEQ ID NO: 296842 - RNA, 19 nt, Homo sapiens
  misc_RNA (1)...(19): siRNA sense strand
cuaagaccauucgcgauuu

SEQ ID NO: 296843 - RNA, 19 nt, Homo sapiens
  misc_RNA (1)...(19): siRNA sense strand
guaaaacccuauuucucua

SEQ ID NO: 296844 - RNA, 19 nt, Homo sapiens
  misc_RNA (1)...(19): siRNA sense strand
ggaacugcucuuuaauuau

SEQ ID NO: 296845 - RNA, 19 nt, Homo sapiens
  misc_RNA (1)...(19): siRNA sense strand
acugcaagauugaaggaua

SEQ ID NO: 296846 - RNA, 19 nt, Homo sapiens
  misc_RNA (1)...(19): siRNA sense strand
ugucaacagucuuggagaa

SEQ ID NO: 296847 - RNA, 19 nt, Homo sapiens
  misc_RNA (1)...(19): siRNA sense strand
cauucgcgauuuagaaguu

SEQ ID NO: 296848 - RNA, 19 nt, Homo sapiens
  misc_RNA (1)...(19): siRNA sense strand
ccagauagacuacgaugag

SEQ ID NO: 296849 - RNA, 19 nt, Homo sapiens
  misc_RNA (1)...(19): siRNA sense strand
ccaaccagcccgcucaaug

SEQ ID NO: 296850 - RNA, 19 nt, Homo sapiens
  misc_RNA (1)...(19): siRNA sense strand
gaccauucgcgauuuagaa

SEQ ID NO: 296851 - RNA, 19 nt, Homo sapiens
  misc_RNA (1)...(19): siRNA sense strand
uuggaagacuguccucuau

SEQ ID NO: 296852 - RNA, 19 nt, Homo sapiens
  misc_RNA (1)...(19): siRNA sense strand
ucuaagaccauucgcgauu

SEQ ID NO: 296853 - RNA, 19 nt, Homo sapiens
  misc_RNA (1)...(19): siRNA sense strand
gcugugagagccauuggaa

SEQ ID NO: 296854 - RNA, 19 nt, Homo sapiens
  misc_RNA (1)...(19): siRNA sense strand
cgggaacugcucuuuaauu

SEQ ID NO: 296855 - RNA, 19 nt, Homo sapiens
  misc_RNA (1)...(19): siRNA sense strand
ugugagagccauuggaaga

SEQ ID NO: 296856 - RNA, 19 nt, Homo sapiens
  misc_RNA (1)...(19): siRNA sense strand
uagauuugacugcaagauu

SEQ ID NO: 296857 - RNA, 19 nt, Homo sapiens
  misc_RNA (1)...(19): siRNA sense strand
ucaacagggucaccaacca

SEQ ID NO: 296858 - RNA, 19 nt, Homo sapiens
  misc_RNA (1)...(19): siRNA sense strand
gauuugacugcaagauuga

SEQ ID NO: 296859 - RNA, 19 nt, Homo sapiens
  misc_RNA (1)...(19): siRNA sense strand
caaccagcccgcucaaugc

SEQ ID NO: 296860 - RNA, 19 nt, Homo sapiens
  misc_RNA (1)...(19): siRNA sense strand
aaacccuauuucucuaaga

SEQ ID NO: 296861 - RNA, 19 nt, Homo sapiens
  misc_RNA (1)...(19): siRNA sense strand
cuauuucucuaagaccauu

SEQ ID NO: 296862 - RNA, 19 nt, Homo sapiens
  misc_RNA (1)...(19): siRNA sense strand
aggaaaagccucauguaaa

SEQ ID NO: 296863 - RNA, 19 nt, Homo sapiens
  misc_RNA (1)...(19): siRNA sense strand
gggaacugcucuuuaauua

SEQ ID NO: 296864 - RNA, 19 nt, Homo sapiens
  misc_RNA (1)...(19): siRNA sense strand
ggaaaagccucauguaaaa

SEQ ID NO: 296865 - RNA, 19 nt, Homo sapiens
  misc_RNA (1)...(19): siRNA sense strand
gacgggaacugcucuuuaa

SEQ ID NO: 296866 - RNA, 19 nt, Homo sapiens
  misc_RNA (1)...(19): siRNA sense strand
gaagaugugucccaagcuu

SEQ ID NO: 296867 - RNA, 19 nt, Homo sapiens
  misc_RNA (1)...(19): siRNA sense strand
uaagaccauucgcgauuua

SEQ ID NO: 296868 - RNA, 19 nt, Homo sapiens
  misc_RNA (1)...(19): siRNA sense strand
ggacgggaacugcucuuua

SEQ ID NO: 296869 - RNA, 19 nt, Homo sapiens
  misc_RNA (1)...(19): siRNA sense strand
ggaagacuguccucuaugg

SEQ ID NO: 296870 - RNA, 19 nt, Homo sapiens
  misc_RNA (1)...(19): siRNA sense strand
ggaagaggaagaagaguga

SEQ ID NO: 296871 - RNA, 19 nt, Homo sapiens
  misc_RNA (1)...(19): siRNA sense strand
agauuugacugcaagauug

SEQ ID NO: 296872 - RNA, 19 nt, Homo sapiens
  misc_RNA (1)...(19): siRNA sense strand
ggaugacgaugccaaguac

SEQ ID NO: 296873 - RNA, 19 nt, Homo sapiens
  misc_RNA (1)...(19): siRNA sense strand
gggaugacgaugccaagua

SEQ ID NO: 296874 - RNA, 19 nt, Homo sapiens
  misc_RNA (1)...(19): siRNA sense strand
cuaagaccauucgcgauuu

SEQ ID NO: 296875 - RNA, 19 nt, Homo sapiens
  misc_RNA (1)...(19): siRNA sense strand
guaaaacccuauuucucua

SEQ ID NO: 296876 - RNA, 19 nt, Homo sapiens
  misc_RNA (1)...(19): siRNA sense strand
ggaacugcucuuuaauuau

SEQ ID NO: 296877 - RNA, 19 nt, Homo sapiens
  misc_RNA (1)...(19): siRNA sense strand
acugcaagauugaaggaua

SEQ ID NO: 296878 - RNA, 19 nt, Homo sapiens
  misc_RNA (1)...(19): siRNA sense strand
ugucaacagucuuggagaa

SEQ ID NO: 296879 - RNA, 19 nt, Homo sapiens
  misc_RNA (1)...(19): siRNA sense strand
cauucgcgauuuagaaguu

SEQ ID NO: 296880 - RNA, 19 nt, Homo sapiens
  misc_RNA (1)...(19): siRNA sense strand
ccagauagacuacgaugag

SEQ ID NO: 296881 - RNA, 19 nt, Homo sapiens
  misc_RNA (1)...(19): siRNA sense strand
ccaaccagcccgcucaaug

SEQ ID NO: 296882 - RNA, 19 nt, Homo sapiens
  misc_RNA (1)...(19): siRNA sense strand
gaccauucgcgauuuagaa

SEQ ID NO: 296883 - RNA, 19 nt, Homo sapiens
  misc_RNA (1)...(19): siRNA sense strand
uuggaagacuguccucuau

SEQ ID NO: 296884 - RNA, 19 nt, Homo sapiens
  misc_RNA (1)...(19): siRNA sense strand
ucuaagaccauucgcgauu

SEQ ID NO: 296885 - RNA, 19 nt, Homo sapiens
  misc_RNA (1)...(19): siRNA sense strand
gcugugagagccauuggaa

SEQ ID NO: 296886 - RNA, 19 nt, Homo sapiens
  misc_RNA (1)...(19): siRNA sense strand
cgggaacugcucuuuaauu

SEQ ID NO: 296887 - RNA, 19 nt, Homo sapiens
  misc_RNA (1)...(19): siRNA sense strand
ugugagagccauuggaaga

SEQ ID NO: 296888 - RNA, 19 nt, Homo sapiens
  misc_RNA (1)...(19): siRNA sense strand
uagauuugacugcaagauu

SEQ ID NO: 296889 - RNA, 19 nt, Homo sapiens
  misc_RNA (1)...(19): siRNA sense strand
ucaacagggucaccaacca

SEQ ID NO: 296890 - RNA, 19 nt, Homo sapiens
  misc_RNA (1)...(19): siRNA sense strand
gauuugacugcaagauuga

SEQ ID NO: 296891 - RNA, 19 nt, Homo sapiens
  misc_RNA (1)...(19): siRNA sense strand
caaccagcccgcucaaugc

SEQ ID NO: 296892 - RNA, 19 nt, Homo sapiens
  misc_RNA (1)...(19): siRNA sense strand
aaacccuauuucucuaaga

SEQ ID NO: 296893 - RNA, 19 nt, Homo sapiens
  misc_RNA (1)...(19): siRNA sense strand
cuauuucucuaagaccauu

SEQ ID NO: 296894 - RNA, 19 nt, Homo sapiens
  misc_RNA (1)...(19): siRNA sense strand
aggaaaagccucauguaaa

SEQ ID NO: 296895 - RNA, 19 nt, Homo sapiens
  misc_RNA (1)...(19): siRNA sense strand
gggaacugcucuuuaauua

SEQ ID NO: 296896 - RNA, 19 nt, Homo sapiens
  misc_RNA (1)...(19): siRNA sense strand
ggaaaagccucauguaaaa

SEQ ID NO: 296897 - RNA, 19 nt, Homo sapiens
  misc_RNA (1)...(19): siRNA sense strand
gacgggaacugcucuuuaa

SEQ ID NO: 296898 - RNA, 19 nt, Homo sapiens
  misc_RNA (1)...(19): siRNA sense strand
gaagaugugucccaagcuu

SEQ ID NO: 296899 - RNA, 19 nt, Homo sapiens
  misc_RNA (1)...(19): siRNA sense strand
uaagaccauucgcgauuua

SEQ ID NO: 296900 - RNA, 19 nt, Homo sapiens
  misc_RNA (1)...(19): siRNA sense strand
ggacgggaacugcucuuua

SEQ ID NO: 296901 - RNA, 19 nt, Homo sapiens
  misc_RNA (1)...(19): siRNA sense strand
ggaagacuguccucuaugg

SEQ ID NO: 296902 - RNA, 19 nt, Homo sapiens
  misc_RNA (1)...(19): siRNA sense strand
ggaagaggaagaagaguga

SEQ ID NO: 296903 - RNA, 19 nt, Homo sapiens
  misc_RNA (1)...(19): siRNA sense strand
agauuugacugcaagauug

SEQ ID NO: 296904 - RNA, 19 nt, Homo sapiens
  misc_RNA (1)...(19): siRNA sense strand
ggaugacgaugccaaguac

SEQ ID NO: 296905 - RNA, 19 nt, Homo sapiens
  misc_RNA (1)...(19): siRNA sense strand
gggaugacgaugccaagua

SEQ ID NO: 296906 - RNA, 19 nt, Homo sapiens
  misc_RNA (1)...(19): siRNA sense strand
cuaagaccauucgcgauuu

SEQ ID NO: 296907 - RNA, 19 nt, Homo sapiens
  misc_RNA (1)...(19): siRNA sense strand
guaaaacccuauuucucua

SEQ ID NO: 296908 - RNA, 19 nt, Homo sapiens
  misc_RNA (1)...(19): siRNA sense strand
ggaacugcucuuuaauuau

SEQ ID NO: 296909 - RNA, 19 nt, Homo sapiens
  misc_RNA (1)...(19): siRNA sense strand
acugcaagauugaaggaua

SEQ ID NO: 296910 - RNA, 19 nt, Homo sapiens
  misc_RNA (1)...(19): siRNA sense strand
ugucaacagucuuggagaa

SEQ ID NO: 296911 - RNA, 19 nt, Homo sapiens
  misc_RNA (1)...(19): siRNA sense strand
cauucgcgauuuagaaguu

SEQ ID NO: 296912 - RNA, 19 nt, Homo sapiens
  misc_RNA (1)...(19): siRNA sense strand
ccagauagacuacgaugag

SEQ ID NO: 296913 - RNA, 19 nt, Homo sapiens
  misc_RNA (1)...(19): siRNA sense strand
ccaaccagcccgcucaaug

SEQ ID NO: 296914 - RNA, 19 nt, Homo sapiens
  misc_RNA (1)...(19): siRNA sense strand
gaccauucgcgauuuagaa

SEQ ID NO: 296915 - RNA, 19 nt, Homo sapiens
  misc_RNA (1)...(19): siRNA sense strand
uuggaagacuguccucuau

SEQ ID NO: 296916 - RNA, 19 nt, Homo sapiens
  misc_RNA (1)...(19): siRNA sense strand
ucuaagaccauucgcgauu

SEQ ID NO: 296917 - RNA, 19 nt, Homo sapiens
  misc_RNA (1)...(19): siRNA sense strand
gcugugagagccauuggaa

SEQ ID NO: 296918 - RNA, 19 nt, Homo sapiens
  misc_RNA (1)...(19): siRNA sense strand
cgggaacugcucuuuaauu

SEQ ID NO: 296919 - RNA, 19 nt, Homo sapiens
  misc_RNA (1)...(19): siRNA sense strand
ugugagagccauuggaaga

SEQ ID NO: 296920 - RNA, 19 nt, Homo sapiens
  misc_RNA (1)...(19): siRNA sense strand
uagauuugacugcaagauu

SEQ ID NO: 296921 - RNA, 19 nt, Homo sapiens
  misc_RNA (1)...(19): siRNA sense strand
ucaacagggucaccaacca

SEQ ID NO: 296922 - RNA, 19 nt, Homo sapiens
  misc_RNA (1)...(19): siRNA sense strand
gauuugacugcaagauuga

SEQ ID NO: 296923 - RNA, 19 nt, Homo sapiens
  misc_RNA (1)...(19): siRNA sense strand
caaccagcccgcucaaugc

SEQ ID NO: 296924 - RNA, 19 nt, Homo sapiens
  misc_RNA (1)...(19): siRNA sense strand
aaacccuauuucucuaaga

SEQ ID NO: 296925 - RNA, 19 nt, Homo sapiens
  misc_RNA (1)...(19): siRNA sense strand
cuauuucucuaagaccauu

SEQ ID NO: 296926 - RNA, 19 nt, Homo sapiens
  misc_RNA (1)...(19): siRNA sense strand
aggaaaagccucauguaaa

SEQ ID NO: 296927 - RNA, 19 nt, Homo sapiens
  misc_RNA (1)...(19): siRNA sense strand
gggaacugcucuuuaauua

SEQ ID NO: 296928 - RNA, 19 nt, Homo sapiens
  misc_RNA (1)...(19): siRNA sense strand
ggaaaagccucauguaaaa

SEQ ID NO: 296929 - RNA, 19 nt, Homo sapiens
  misc_RNA (1)...(19): siRNA sense strand
gacgggaacugcucuuuaa

SEQ ID NO: 296930 - RNA, 19 nt, Homo sapiens
  misc_RNA (1)...(19): siRNA sense strand
gaagaugugucccaagcuu

SEQ ID NO: 296931 - RNA, 19 nt, Homo sapiens
  misc_RNA (1)...(19): siRNA sense strand
uaagaccauucgcgauuua

SEQ ID NO: 296932 - RNA, 19 nt, Homo sapiens
  misc_RNA (1)...(19): siRNA sense strand
ggacgggaacugcucuuua

SEQ ID NO: 296933 - RNA, 19 nt, Homo sapiens
  misc_RNA (1)...(19): siRNA sense strand
ggaagacuguccucuaugg

SEQ ID NO: 296934 - RNA, 19 nt, Homo sapiens
  misc_RNA (1)...(19): siRNA sense strand
ggaagaggaagaagaguga

SEQ ID NO: 296935 - RNA, 19 nt, Homo sapiens
  misc_RNA (1)...(19): siRNA sense strand
agauuugacugcaagauug

SEQ ID NO: 296936 - RNA, 19 nt, Homo sapiens
  misc_RNA (1)...(19): siRNA sense strand
ggaugacgaugccaaguac

SEQ ID NO: 296937 - RNA, 19 nt, Homo sapiens
  misc_RNA (1)...(19): siRNA sense strand
gggaugacgaugccaagua

SEQ ID NO: 296938 - RNA, 19 nt, Homo sapiens
  misc_RNA (1)...(19): siRNA sense strand
cuaagaccauucgcgauuu

SEQ ID NO: 296939 - RNA, 19 nt, Homo sapiens
  misc_RNA (1)...(19): siRNA sense strand
guaaaacccuauuucucua

SEQ ID NO: 296940 - RNA, 19 nt, Homo sapiens
  misc_RNA (1)...(19): siRNA sense strand
ggaacugcucuuuaauuau

SEQ ID NO: 296941 - RNA, 19 nt, Homo sapiens
  misc_RNA (1)...(19): siRNA sense strand
acugcaagauugaaggaua

SEQ ID NO: 296942 - RNA, 19 nt, Homo sapiens
  misc_RNA (1)...(19): siRNA sense strand
ugucaacagucuuggagaa

SEQ ID NO: 296943 - RNA, 19 nt, Homo sapiens
  misc_RNA (1)...(19): siRNA sense strand
cauucgcgauuuagaaguu

SEQ ID NO: 296944 - RNA, 19 nt, Homo sapiens
  misc_RNA (1)...(19): siRNA sense strand
ccagauagacuacgaugag

SEQ ID NO: 296945 - RNA, 19 nt, Homo sapiens
  misc_RNA (1)...(19): siRNA sense strand
ccaaccagcccgcucaaug

SEQ ID NO: 296946 - RNA, 19 nt, Homo sapiens
  misc_RNA (1)...(19): siRNA sense strand
gaccauucgcgauuuagaa

SEQ ID NO: 296947 - RNA, 19 nt, Homo sapiens
  misc_RNA (1)...(19): siRNA sense strand
uuggaagacuguccucuau

SEQ ID NO: 296948 - RNA, 19 nt, Homo sapiens
  misc_RNA (1)...(19): siRNA sense strand
ucuaagaccauucgcgauu

SEQ ID NO: 296949 - RNA, 19 nt, Homo sapiens
  misc_RNA (1)...(19): siRNA sense strand
gcugugagagccauuggaa

SEQ ID NO: 296950 - RNA, 19 nt, Homo sapiens
  misc_RNA (1)...(19): siRNA sense strand
cgggaacugcucuuuaauu

SEQ ID NO: 296951 - RNA, 19 nt, Homo sapiens
  misc_RNA (1)...(19): siRNA sense strand
ugugagagccauuggaaga

SEQ ID NO: 296952 - RNA, 19 nt, Homo sapiens
  misc_RNA (1)...(19): siRNA sense strand
uagauuugacugcaagauu

SEQ ID NO: 296953 - RNA, 19 nt, Homo sapiens
  misc_RNA (1)...(19): siRNA sense strand
ucaacagggucaccaacca

SEQ ID NO: 296954 - RNA, 19 nt, Homo sapiens
  misc_RNA (1)...(19): siRNA sense strand
gauuugacugcaagauuga

SEQ ID NO: 296955 - RNA, 19 nt, Homo sapiens
  misc_RNA (1)...(19): siRNA sense strand
caaccagcccgcucaaugc

SEQ ID NO: 296956 - RNA, 19 nt, Homo sapiens
  misc_RNA (1)...(19): siRNA sense strand
aaacccuauuucucuaaga

SEQ ID NO: 296957 - RNA, 19 nt, Homo sapiens
  misc_RNA (1)...(19): siRNA sense strand
cuauuucucuaagaccauu

SEQ ID NO: 296958 - RNA, 19 nt, Homo sapiens
  misc_RNA (1)...(19): siRNA sense strand
aggaaaagccucauguaaa

SEQ ID NO: 296959 - RNA, 19 nt, Homo sapiens
  misc_RNA (1)...(19): siRNA sense strand
gggaacugcucuuuaauua

SEQ ID NO: 296960 - RNA, 19 nt, Homo sapiens
  misc_RNA (1)...(19): siRNA sense strand
ggaaaagccucauguaaaa

SEQ ID NO: 296961 - RNA, 19 nt, Homo sapiens
  misc_RNA (1)...(19): siRNA sense strand
gacgggaacugcucuuuaa

SEQ ID NO: 296962 - RNA, 19 nt, Homo sapiens
  misc_RNA (1)...(19): siRNA sense strand
gaagaugugucccaagcuu

SEQ ID NO: 296963 - RNA, 19 nt, Homo sapiens
  misc_RNA (1)...(19): siRNA sense strand
uaagaccauucgcgauuua

SEQ ID NO: 296964 - RNA, 19 nt, Homo sapiens
  misc_RNA (1)...(19): siRNA sense strand
ggacgggaacugcucuuua

SEQ ID NO: 296965 - RNA, 19 nt, Homo sapiens
  misc_RNA (1)...(19): siRNA sense strand
ggaagacuguccucuaugg

SEQ ID NO: 296966 - RNA, 19 nt, Homo sapiens
  misc_RNA (1)...(19): siRNA sense strand
ggaagaggaagaagaguga

SEQ ID NO: 296967 - RNA, 19 nt, Homo sapiens
  misc_RNA (1)...(19): siRNA sense strand
agauuugacugcaagauug

SEQ ID NO: 296968 - RNA, 19 nt, Homo sapiens
  misc_RNA (1)...(19): siRNA sense strand
ggaugacgaugccaaguac

SEQ ID NO: 296969 - RNA, 19 nt, Homo sapiens
  misc_RNA (1)...(19): siRNA sense strand
gggaugacgaugccaagua

SEQ ID NO: 296970 - RNA, 19 nt, Homo sapiens
  misc_RNA (1)...(19): siRNA sense strand
cuaagaccauucgcgauuu

SEQ ID NO: 296971 - RNA, 19 nt, Homo sapiens
  misc_RNA (1)...(19): siRNA sense strand
guaaaacccuauuucucua

SEQ ID NO: 296972 - RNA, 19 nt, Homo sapiens
  misc_RNA (1)...(19): siRNA sense strand
ggaacugcucuuuaauuau

SEQ ID NO: 296973 - RNA, 19 nt, Homo sapiens
  misc_RNA (1)...(19): siRNA sense strand
acugcaagauugaaggaua

SEQ ID NO: 296974 - RNA, 19 nt, Homo sapiens
  misc_RNA (1)...(19): siRNA sense strand
ugucaacagucuuggagaa

SEQ ID NO: 296975 - RNA, 19 nt, Homo sapiens
  misc_RNA (1)...(19): siRNA sense strand
cauucgcgauuuagaaguu

SEQ ID NO: 296976 - RNA, 19 nt, Homo sapiens
  misc_RNA (1)...(19): siRNA sense strand
ccagauagacuacgaugag

SEQ ID NO: 296977 - RNA, 19 nt, Homo sapiens
  misc_RNA (1)...(19): siRNA sense strand
ccaaccagcccgcucaaug

SEQ ID NO: 296978 - RNA, 19 nt, Homo sapiens
  misc_RNA (1)...(19): siRNA sense strand
gaccauucgcgauuuagaa

SEQ ID NO: 296979 - RNA, 19 nt, Homo sapiens
  misc_RNA (1)...(19): siRNA sense strand
uuggaagacuguccucuau

SEQ ID NO: 296980 - RNA, 19 nt, Homo sapiens
  misc_RNA (1)...(19): siRNA sense strand
ucuaagaccauucgcgauu

SEQ ID NO: 296981 - RNA, 19 nt, Homo sapiens
  misc_RNA (1)...(19): siRNA sense strand
gcugugagagccauuggaa

SEQ ID NO: 296982 - RNA, 19 nt, Homo sapiens
  misc_RNA (1)...(19): siRNA sense strand
cgggaacugcucuuuaauu

SEQ ID NO: 296983 - RNA, 19 nt, Homo sapiens
  misc_RNA (1)...(19): siRNA sense strand
ugugagagccauuggaaga

SEQ ID NO: 296984 - RNA, 19 nt, Homo sapiens
  misc_RNA (1)...(19): siRNA sense strand
uagauuugacugcaagauu

SEQ ID NO: 296985 - RNA, 19 nt, Homo sapiens
  misc_RNA (1)...(19): siRNA sense strand
ucaacagggucaccaacca

SEQ ID NO: 296986 - RNA, 19 nt, Homo sapiens
  misc_RNA (1)...(19): siRNA sense strand
gauuugacugcaagauuga

SEQ ID NO: 296987 - RNA, 19 nt, Homo sapiens
  misc_RNA (1)...(19): siRNA sense strand
caaccagcccgcucaaugc

SEQ ID NO: 296988 - RNA, 19 nt, Homo sapiens
  misc_RNA (1)...(19): siRNA sense strand
aaacccuauuucucuaaga

SEQ ID NO: 296989 - RNA, 19 nt, Homo sapiens
  misc_RNA (1)...(19): siRNA sense strand
cuauuucucuaagaccauu

SEQ ID NO: 296990 - RNA, 19 nt, Homo sapiens
  misc_RNA (1)...(19): siRNA sense strand
aggaaaagccucauguaaa

SEQ ID NO: 296991 - RNA, 19 nt, Homo sapiens
  misc_RNA (1)...(19): siRNA sense strand
gggaacugcucuuuaauua

SEQ ID NO: 296992 - RNA, 19 nt, Homo sapiens
  misc_RNA (1)...(19): siRNA sense strand
ggaaaagccucauguaaaa

SEQ ID NO: 296993 - RNA, 19 nt, Homo sapiens
  misc_RNA (1)...(19): siRNA sense strand
gacgggaacugcucuuuaa

SEQ ID NO: 296994 - RNA, 19 nt, Homo sapiens
  misc_RNA (1)...(19): siRNA sense strand
gaagaugugucccaagcuu

SEQ ID NO: 296995 - RNA, 19 nt, Homo sapiens
  misc_RNA (1)...(19): siRNA sense strand
uaagaccauucgcgauuua

SEQ ID NO: 296996 - RNA, 19 nt, Homo sapiens
  misc_RNA (1)...(19): siRNA sense strand
ggacgggaacugcucuuua

SEQ ID NO: 296997 - RNA, 19 nt, Homo sapiens
  misc_RNA (1)...(19): siRNA sense strand
ggaagaggaagaagaguga

SEQ ID NO: 296998 - RNA, 19 nt, Homo sapiens
  misc_RNA (1)...(19): siRNA sense strand
agauuugacugcaagauug

SEQ ID NO: 296999 - RNA, 19 nt, Homo sapiens
  misc_RNA (1)...(19): siRNA sense strand
ggaugacgaugccaaguac

SEQ ID NO: 297000 - RNA, 19 nt, Homo sapiens
  misc_RNA (1)...(19): siRNA sense strand
gggaugacgaugccaagua

SEQ ID NO: 297001 - RNA, 19 nt, Homo sapiens
  misc_RNA (1)...(19): siRNA sense strand
cuaagaccauucgcgauuu

SEQ ID NO: 297002 - RNA, 19 nt, Homo sapiens
  misc_RNA (1)...(19): siRNA sense strand
guaaaacccuauuucucua

SEQ ID NO: 297003 - RNA, 19 nt, Homo sapiens
  misc_RNA (1)...(19): siRNA sense strand
ggaacugcucuuuaauuau

SEQ ID NO: 297004 - RNA, 19 nt, Homo sapiens
  misc_RNA (1)...(19): siRNA sense strand
acugcaagauugaaggaua

SEQ ID NO: 297005 - RNA, 19 nt, Homo sapiens
  misc_RNA (1)...(19): siRNA sense strand
ugucaacagucuuggagaa

SEQ ID NO: 297006 - RNA, 19 nt, Homo sapiens
  misc_RNA (1)...(19): siRNA sense strand
cauucgcgauuuagaaguu

SEQ ID NO: 297007 - RNA, 19 nt, Homo sapiens
  misc_RNA (1)...(19): siRNA sense strand
ccagauagacuacgaugag

SEQ ID NO: 297008 - RNA, 19 nt, Homo sapiens
  misc_RNA (1)...(19): siRNA sense strand
ccaaccagcccgcucaaug

SEQ ID NO: 297009 - RNA, 19 nt, Homo sapiens
  misc_RNA (1)...(19): siRNA sense strand
gaccauucgcgauuuagaa

SEQ ID NO: 297010 - RNA, 19 nt, Homo sapiens
  misc_RNA (1)...(19): siRNA sense strand
ucuaagaccauucgcgauu

SEQ ID NO: 297011 - RNA, 19 nt, Homo sapiens
  misc_RNA (1)...(19): siRNA sense strand
cgggaacugcucuuuaauu

SEQ ID NO: 297012 - RNA, 19 nt, Homo sapiens
  misc_RNA (1)...(19): siRNA sense strand
uagauuugacugcaagauu

SEQ ID NO: 297013 - RNA, 19 nt, Homo sapiens
  misc_RNA (1)...(19): siRNA sense strand
gauuugacugcaagauuga

SEQ ID NO: 297014 - RNA, 19 nt, Homo sapiens
  misc_RNA (1)...(19): siRNA sense strand
ucaacagggucaccaacca

SEQ ID NO: 297015 - RNA, 19 nt, Homo sapiens
  misc_RNA (1)...(19): siRNA sense strand
caaccagcccgcucaaugc

SEQ ID NO: 297016 - RNA, 19 nt, Homo sapiens
  misc_RNA (1)...(19): siRNA sense strand
aaacccuauuucucuaaga

SEQ ID NO: 297017 - RNA, 19 nt, Homo sapiens
  misc_RNA (1)...(19): siRNA sense strand
cuauuucucuaagaccauu

SEQ ID NO: 297018 - RNA, 19 nt, Homo sapiens
  misc_RNA (1)...(19): siRNA sense strand
aggaaaagccucauguaaa

SEQ ID NO: 297019 - RNA, 19 nt, Homo sapiens
  misc_RNA (1)...(19): siRNA sense strand
gggaacugcucuuuaauua

SEQ ID NO: 297020 - RNA, 19 nt, Homo sapiens
  misc_RNA (1)...(19): siRNA sense strand
ggaaaagccucauguaaaa

SEQ ID NO: 297021 - RNA, 19 nt, Homo sapiens
  misc_RNA (1)...(19): siRNA sense strand
gacgggaacugcucuuuaa

SEQ ID NO: 297022 - RNA, 19 nt, Homo sapiens
  misc_RNA (1)...(19): siRNA sense strand
gaagaugugucccaagcuu

SEQ ID NO: 297023 - RNA, 19 nt, Homo sapiens
  misc_RNA (1)...(19): siRNA sense strand
uaagaccauucgcgauuua

SEQ ID NO: 297024 - RNA, 19 nt, Homo sapiens
  misc_RNA (1)...(19): siRNA sense strand
ggacgggaacugcucuuua

SEQ ID NO: 297025 - RNA, 19 nt, Homo sapiens
  misc_RNA (1)...(19): siRNA sense strand
ggaagaggaagaagaguga

SEQ ID NO: 297026 - RNA, 19 nt, Homo sapiens
  misc_RNA (1)...(19): siRNA sense strand
agauuugacugcaagauug

SEQ ID NO: 297027 - RNA, 19 nt, Homo sapiens
  misc_RNA (1)...(19): siRNA sense strand
ggaugacgaugccaaguac

SEQ ID NO: 297028 - RNA, 19 nt, Homo sapiens
  misc_RNA (1)...(19): siRNA sense strand
gggaugacgaugccaagua

SEQ ID NO: 297029 - RNA, 19 nt, Homo sapiens
  misc_RNA (1)...(19): siRNA sense strand
cuaagaccauucgcgauuu

SEQ ID NO: 297030 - RNA, 19 nt, Homo sapiens
  misc_RNA (1)...(19): siRNA sense strand
guaaaacccuauuucucua

SEQ ID NO: 297031 - RNA, 19 nt, Homo sapiens
  misc_RNA (1)...(19): siRNA sense strand
ggaacugcucuuuaauuau

SEQ ID NO: 297032 - RNA, 19 nt, Homo sapiens
  misc_RNA (1)...(19): siRNA sense strand
acugcaagauugaaggaua

SEQ ID NO: 297033 - RNA, 19 nt, Homo sapiens
  misc_RNA (1)...(19): siRNA sense strand
ugucaacagucuuggagaa

SEQ ID NO: 297034 - RNA, 19 nt, Homo sapiens
  misc_RNA (1)...(19): siRNA sense strand
cauucgcgauuuagaaguu

SEQ ID NO: 297035 - RNA, 19 nt, Homo sapiens
  misc_RNA (1)...(19): siRNA sense strand
ccagauagacuacgaugag

SEQ ID NO: 297036 - RNA, 19 nt, Homo sapiens
  misc_RNA (1)...(19): siRNA sense strand
ccaaccagcccgcucaaug

SEQ ID NO: 297037 - RNA, 19 nt, Homo sapiens
  misc_RNA (1)...(19): siRNA sense strand
gaccauucgcgauuuagaa

SEQ ID NO: 297038 - RNA, 19 nt, Homo sapiens
  misc_RNA (1)...(19): siRNA sense strand
ucuaagaccauucgcgauu

SEQ ID NO: 297039 - RNA, 19 nt, Homo sapiens
  misc_RNA (1)...(19): siRNA sense strand
cgggaacugcucuuuaauu

SEQ ID NO: 297040 - RNA, 19 nt, Homo sapiens
  misc_RNA (1)...(19): siRNA sense strand
uagauuugacugcaagauu

SEQ ID NO: 297041 - RNA, 19 nt, Homo sapiens
  misc_RNA (1)...(19): siRNA sense strand
gauuugacugcaagauuga

SEQ ID NO: 297042 - RNA, 19 nt, Homo sapiens
  misc_RNA (1)...(19): siRNA sense strand
ucaacagggucaccaacca

SEQ ID NO: 297043 - RNA, 19 nt, Homo sapiens
  misc_RNA (1)...(19): siRNA sense strand
caaccagcccgcucaaugc

SEQ ID NO: 297044 - RNA, 19 nt, Homo sapiens
  misc_RNA (1)...(19): siRNA sense strand
aaacccuauuucucuaaga

SEQ ID NO: 297045 - RNA, 19 nt, Homo sapiens
  misc_RNA (1)...(19): siRNA sense strand
cuauuucucuaagaccauu

SEQ ID NO: 297046 - RNA, 19 nt, Homo sapiens
  misc_RNA (1)...(19): siRNA sense strand
aggaaaagccucauguaaa

SEQ ID NO: 297047 - RNA, 19 nt, Homo sapiens
  misc_RNA (1)...(19): siRNA sense strand
gaacugcgauugaguauuc

SEQ ID NO: 297048 - RNA, 19 nt, Homo sapiens
  misc_RNA (1)...(19): siRNA sense strand
agucaaagcuagcauauua

SEQ ID NO: 297049 - RNA, 19 nt, Homo sapiens
  misc_RNA (1)...(19): siRNA sense strand
gcaaggagcugucagaauc

SEQ ID NO: 297050 - RNA, 19 nt, Homo sapiens
  misc_RNA (1)...(19): siRNA sense strand
gaaagaaaguuugcugaaa

SEQ ID NO: 297051 - RNA, 19 nt, Homo sapiens
  misc_RNA (1)...(19): siRNA sense strand
gaagaggaaugugaauaua

SEQ ID NO: 297052 - RNA, 19 nt, Homo sapiens
  misc_RNA (1)...(19): siRNA sense strand
ggaaucaccucaaauggaa

SEQ ID NO: 297053 - RNA, 19 nt, Homo sapiens
  misc_RNA (1)...(19): siRNA sense strand
ggacuuaucgguuauguuu

SEQ ID NO: 297054 - RNA, 19 nt, Homo sapiens
  misc_RNA (1)...(19): siRNA sense strand
uagaagacauugaucguua

SEQ ID NO: 297055 - RNA, 19 nt, Homo sapiens
  misc_RNA (1)...(19): siRNA sense strand
gaucaucaaugcaaucuau

SEQ ID NO: 297056 - RNA, 19 nt, Homo sapiens
  misc_RNA (1)...(19): siRNA sense strand
ggaacaauccgaacuguaa

SEQ ID NO: 297057 - RNA, 19 nt, Homo sapiens
  misc_RNA (1)...(19): siRNA sense strand
caaaaggacuuaucgguua

SEQ ID NO: 297058 - RNA, 19 nt, Homo sapiens
  misc_RNA (1)...(19): siRNA sense strand
gaagagauguaugguaaug

SEQ ID NO: 297059 - RNA, 19 nt, Homo sapiens
  misc_RNA (1)...(19): siRNA sense strand
ggaaaugugucaugaagag

SEQ ID NO: 297060 - RNA, 19 nt, Homo sapiens
  misc_RNA (1)...(19): siRNA sense strand
gagaagagaauaaagaaga

SEQ ID NO: 297061 - RNA, 19 nt, Homo sapiens
  misc_RNA (1)...(19): siRNA sense strand
gaacuguaacugaagauuu

SEQ ID NO: 297062 - RNA, 19 nt, Homo sapiens
  misc_RNA (1)...(19): siRNA sense strand
ggacugugaugaugaggaa

SEQ ID NO: 297063 - RNA, 19 nt, Homo sapiens
  misc_RNA (1)...(19): siRNA sense strand
gaaaguuugcugaaaugua

SEQ ID NO: 297064 - RNA, 19 nt, Homo sapiens
  misc_RNA (1)...(19): siRNA sense strand
gagggaauuucaugacauu

SEQ ID NO: 297065 - RNA, 19 nt, Homo sapiens
  misc_RNA (1)...(19): siRNA sense strand
gauacagacuuuguugaaa

SEQ ID NO: 297066 - RNA, 19 nt, Homo sapiens
  misc_RNA (1)...(19): siRNA sense strand
cuaagggaauuccugauuu

SEQ ID NO: 297067 - RNA, 19 nt, Homo sapiens
  misc_RNA (1)...(19): siRNA sense strand
gaggaaaugugucaugaag

SEQ ID NO: 297068 - RNA, 19 nt, Homo sapiens
  misc_RNA (1)...(19): siRNA sense strand
ugagauagauuggaaugaa

SEQ ID NO: 297069 - RNA, 19 nt, Homo sapiens
  misc_RNA (1)...(19): siRNA sense strand
ugaaauguaccaacccuua

SEQ ID NO: 297070 - RNA, 19 nt, Homo sapiens
  misc_RNA (1)...(19): siRNA sense strand
gaagugcggugaagaagcu

SEQ ID NO: 297071 - RNA, 19 nt, Homo sapiens
  misc_RNA (1)...(19): siRNA sense strand
gcugugagauagauuggaa

SEQ ID NO: 297072 - RNA, 19 nt, Homo sapiens
  misc_RNA (1)...(19): siRNA sense strand
augaagagauguaugguaa

SEQ ID NO: 297073 - RNA, 19 nt, Homo sapiens
  misc_RNA (1)...(19): siRNA sense strand
ggucacaauuuacguacuu

SEQ ID NO: 297074 - RNA, 19 nt, Homo sapiens
  misc_RNA (1)...(19): siRNA sense strand
ccuaugugcugaagucaaa

SEQ ID NO: 297075 - RNA, 19 nt, Homo sapiens
  misc_RNA (1)...(19): siRNA sense strand
gaagggauggaaaugauga

SEQ ID NO: 297076 - RNA, 19 nt, Homo sapiens
  misc_RNA (1)...(19): siRNA sense strand
aaacuagagcggccaauuu

SEQ ID NO: 297077 - RNA, 19 nt, Homo sapiens
  misc_RNA (1)...(19): siRNA sense strand
guaccaacccuuacuggaa

SEQ ID NO: 297078 - RNA, 19 nt, Homo sapiens
  misc_RNA (1)...(19): siRNA sense strand
ggaaugaaggaaagaaugu

SEQ ID NO: 297079 - RNA, 19 nt, Homo sapiens
  misc_RNA (1)...(19): siRNA sense strand
gaagucaaagcuagcauau

SEQ ID NO: 297080 - RNA, 19 nt, Homo sapiens
  misc_RNA (1)...(19): siRNA sense strand
uaccaacccuuacuggaaa

SEQ ID NO: 297081 - RNA, 19 nt, Homo sapiens
  misc_RNA (1)...(19): siRNA sense strand
gugaugcacuggaaucuca

SEQ ID NO: 297082 - RNA, 19 nt, Homo sapiens
  misc_RNA (1)...(19): siRNA sense strand
caaacccaaugaauauuuc

SEQ ID NO: 297083 - RNA, 19 nt, Homo sapiens
  misc_RNA (1)...(19): siRNA sense strand
ccugacagauauuaaaguu

SEQ ID NO: 297084 - RNA, 19 nt, Homo sapiens
  misc_RNA (1)...(19): siRNA sense strand
aaaguuugcugaaauguac

SEQ ID NO: 297085 - RNA, 19 nt, Homo sapiens
  misc_RNA (1)...(19): siRNA sense strand
gagauagauuggaaugaag

SEQ ID NO: 297086 - RNA, 19 nt, Homo sapiens
  misc_RNA (1)...(19): siRNA sense strand
aagaaaguuugcugaaaug

SEQ ID NO: 297087 - RNA, 19 nt, Homo sapiens
  misc_RNA (1)...(19): siRNA sense strand
aaaguuaaguaccgugugu

SEQ ID NO: 297088 - RNA, 19 nt, Homo sapiens
  misc_RNA (1)...(19): siRNA sense strand
ucacuccuuugauuaagaa

SEQ ID NO: 297089 - RNA, 19 nt, Homo sapiens
  misc_RNA (1)...(19): siRNA sense strand
cuacagaagaggaauguga

SEQ ID NO: 297090 - RNA, 19 nt, Homo sapiens
  misc_RNA (1)...(19): siRNA sense strand
gggaauuucaugacauuga

SEQ ID NO: 297091 - RNA, 19 nt, Homo sapiens
  misc_RNA (1)...(19): siRNA sense strand
acacucacuccuuugauua

SEQ ID NO: 297092 - RNA, 19 nt, Homo sapiens
  misc_RNA (1)...(19): siRNA sense strand
ggaggaggaggacgacauu

SEQ ID NO: 297093 - RNA, 19 nt, Homo sapiens
  misc_RNA (1)...(19): siRNA sense strand
guugaaagucuaccuguga

SEQ ID NO: 297094 - RNA, 19 nt, Homo sapiens
  misc_RNA (1)...(19): siRNA sense strand
aauccgaacuguaacugaa

SEQ ID NO: 297095 - RNA, 19 nt, Homo sapiens
  misc_RNA (1)...(19): siRNA sense strand
acacuagaauuucacuuca

SEQ ID NO: 297096 - RNA, 19 nt, Homo sapiens
  misc_RNA (1)...(19): siRNA sense strand
ugaagcuccugacagauau

SEQ ID NO: 297097 - RNA, 19 nt, Homo sapiens
  misc_RNA (1)...(19): siRNA sense strand
cugaagcuccugacagaua

SEQ ID NO: 297098 - RNA, 19 nt, Homo sapiens
  misc_RNA (1)...(19): siRNA sense strand
gauacacucacuccuuuga

SEQ ID NO: 297099 - RNA, 19 nt, Homo sapiens
  misc_RNA (1)...(19): siRNA sense strand
uugauacacucacuccuuu

SEQ ID NO: 297100 - RNA, 19 nt, Homo sapiens
  misc_RNA (1)...(19): siRNA sense strand
ggaggauccuaagggaauu

SEQ ID NO: 297101 - RNA, 19 nt, Homo sapiens
  misc_RNA (1)...(19): siRNA sense strand
cagaagaggaaugugaaua

SEQ ID NO: 297102 - RNA, 19 nt, Homo sapiens
  misc_RNA (1)...(19): siRNA sense strand
gaagaggcugguaaucaga

SEQ ID NO: 297103 - RNA, 19 nt, Homo sapiens
  misc_RNA (1)...(19): siRNA sense strand
ugaaagaaaguuugcugaa

SEQ ID NO: 297104 - RNA, 19 nt, Homo sapiens
  misc_RNA (1)...(19): siRNA sense strand
ugaaaaccaucaagaagaa

SEQ ID NO: 297105 - RNA, 19 nt, Homo sapiens
  misc_RNA (1)...(19): siRNA sense strand
aacuagagcggccaauuua

SEQ ID NO: 297106 - RNA, 19 nt, Homo sapiens
  misc_RNA (1)...(19): siRNA sense strand
uacacucacuccuuugauu

SEQ ID NO: 297107 - RNA, 19 nt, Homo sapiens
  misc_RNA (1)...(19): siRNA sense strand
gaauaaagaagaggaggau

SEQ ID NO: 297108 - RNA, 19 nt, Homo sapiens
  misc_RNA (1)...(19): siRNA sense strand
agaagaggaaugugaauau

SEQ ID NO: 297109 - RNA, 19 nt, Homo sapiens
  misc_RNA (1)...(19): siRNA sense strand
gacgucagaucaucaaugc

SEQ ID NO: 297110 - RNA, 19 nt, Homo sapiens
  misc_RNA (1)...(19): siRNA sense strand
ggaaaacggugaagauacu

SEQ ID NO: 297111 - RNA, 19 nt, Homo sapiens
  misc_RNA (1)...(19): siRNA sense strand
caaauggaagggauggaaa

SEQ ID NO: 297112 - RNA, 19 nt, Homo sapiens
  misc_RNA (1)...(19): siRNA sense strand
uaagggaauuccugauuuu

SEQ ID NO: 297113 - RNA, 19 nt, Homo sapiens
  misc_RNA (1)...(19): siRNA sense strand
ucuaugaaccuacagaaga

SEQ ID NO: 297114 - RNA, 19 nt, Homo sapiens
  misc_RNA (1)...(19): siRNA sense strand
uggaagggauggaaaugau

SEQ ID NO: 297115 - RNA, 19 nt, Homo sapiens
  misc_RNA (1)...(19): siRNA sense strand
cauggaaucaccucaaaug

SEQ ID NO: 297116 - RNA, 19 nt, Homo sapiens
  misc_RNA (1)...(19): siRNA sense strand
uggaugaggacgaugguua

SEQ ID NO: 297117 - RNA, 19 nt, Homo sapiens
  misc_RNA (1)...(19): siRNA sense strand
gaaagucuaccugugaaag

SEQ ID NO: 297118 - RNA, 19 nt, Homo sapiens
  misc_RNA (1)...(19): siRNA sense strand
agaagaggcugguaaucag

SEQ ID NO: 297119 - RNA, 19 nt, Homo sapiens
  misc_RNA (1)...(19): siRNA sense strand
caguuucacacuagaauuu

SEQ ID NO: 297120 - RNA, 19 nt, Homo sapiens
  misc_RNA (1)...(19): siRNA sense strand
agaaauaugaugagccuau

SEQ ID NO: 297121 - RNA, 19 nt, Homo sapiens
  misc_RNA (1)...(19): siRNA sense strand
cauugaggcuacuggagaa

SEQ ID NO: 297122 - RNA, 19 nt, Homo sapiens
  misc_RNA (1)...(19): siRNA sense strand
ggaugaggacgaugguuau

SEQ ID NO: 297123 - RNA, 19 nt, Homo sapiens
  misc_RNA (1)...(19): siRNA sense strand
caaacuagagcggccaauu

SEQ ID NO: 297124 - RNA, 19 nt, Homo sapiens
  misc_RNA (1)...(19): siRNA sense strand
ugaagucaaagcuagcaua

SEQ ID NO: 297125 - RNA, 19 nt, Homo sapiens
  misc_RNA (1)...(19): siRNA sense strand
gcuccugacagauauuaaa

SEQ ID NO: 297126 - RNA, 19 nt, Homo sapiens
  misc_RNA (1)...(19): siRNA sense strand
ucaagaagaaacagaaaca

SEQ ID NO: 297127 - RNA, 19 nt, Homo sapiens
  misc_RNA (1)...(19): siRNA sense strand
ggcauuaguagaagacauu

SEQ ID NO: 297128 - RNA, 19 nt, Homo sapiens
  misc_RNA (1)...(19): siRNA sense strand
gggaacaauccgaacugua

SEQ ID NO: 297129 - RNA, 19 nt, Homo sapiens
  misc_RNA (1)...(19): siRNA sense strand
cgucagaucaucaaugcaa

SEQ ID NO: 297130 - RNA, 19 nt, Homo sapiens
  misc_RNA (1)...(19): siRNA sense strand
agaccuaugugcugaaguc

SEQ ID NO: 297131 - RNA, 19 nt, Homo sapiens
  misc_RNA (1)...(19): siRNA sense strand
ccuaagggaauuccugauu

SEQ ID NO: 297132 - RNA, 19 nt, Homo sapiens
  misc_RNA (1)...(19): siRNA sense strand
cuagagcggccaauuuaga

SEQ ID NO: 297133 - RNA, 19 nt, Homo sapiens
  misc_RNA (1)...(19): siRNA sense strand
guagaagacauugaucguu

SEQ ID NO: 297134 - RNA, 19 nt, Homo sapiens
  misc_RNA (1)...(19): siRNA sense strand
guaguuagagaaguuaaug

SEQ ID NO: 297135 - RNA, 19 nt, Homo sapiens
  misc_RNA (1)...(19): siRNA sense strand
cauaauuccaagaucagua

SEQ ID NO: 297136 - RNA, 19 nt, Homo sapiens
  misc_RNA (1)...(19): siRNA sense strand
ggaagggauggaaaugaug

SEQ ID NO: 297137 - RNA, 19 nt, Homo sapiens
  misc_RNA (1)...(19): siRNA sense strand
gaggguaugguacaugaau

SEQ ID NO: 297138 - RNA, 19 nt, Homo sapiens
  misc_RNA (1)...(19): siRNA sense strand
uaaugaggaggguauggua

SEQ ID NO: 297139 - RNA, 19 nt, Homo sapiens
  misc_RNA (1)...(19): siRNA sense strand
caugaagagauguauggua

SEQ ID NO: 297140 - RNA, 19 nt, Homo sapiens
  misc_RNA (1)...(19): siRNA sense strand
gaaauguaccaacccuuac

SEQ ID NO: 297141 - RNA, 19 nt, Homo sapiens
  misc_RNA (1)...(19): siRNA sense strand
aagaagaggcugguaauca

SEQ ID NO: 297142 - RNA, 19 nt, Homo sapiens
  misc_RNA (1)...(19): siRNA sense strand
gucagaauccagucaagaa

SEQ ID NO: 297143 - RNA, 19 nt, Homo sapiens
  misc_RNA (1)...(19): siRNA sense strand
aaaccuugaggcauuagua

SEQ ID NO: 297144 - RNA, 19 nt, Homo sapiens
  misc_RNA (1)...(19): siRNA sense strand
aaacagaaacaucggaucu

SEQ ID NO: 297145 - RNA, 19 nt, Homo sapiens
  misc_RNA (1)...(19): siRNA sense strand
uaugaugagccuauucuga

SEQ ID NO: 297146 - RNA, 19 nt, Homo sapiens
  misc_RNA (1)...(19): siRNA sense strand
uagagaaguuaaugaugca

SEQ ID NO: 297147 - RNA, 19 nt, Homo sapiens
  misc_RNA (1)...(19): siRNA sense strand
gaaauuggcuggagacaug

SEQ ID NO: 297148 - RNA, 19 nt, Homo sapiens
  misc_RNA (1)...(19): siRNA sense strand
gaaagaauguuacugucaa

SEQ ID NO: 297149 - RNA, 19 nt, Homo sapiens
  misc_RNA (1)...(19): siRNA sense strand
guacaugacuuggaaagaa

SEQ ID NO: 297150 - RNA, 19 nt, Homo sapiens
  misc_RNA (1)...(19): siRNA sense strand
caaguucuaugaagaggua

SEQ ID NO: 297151 - RNA, 19 nt, Homo sapiens
  misc_RNA (1)...(19): siRNA sense strand
gaaaguaugcagcgcuaua

SEQ ID NO: 297152 - RNA, 19 nt, Homo sapiens
  misc_RNA (1)...(19): siRNA sense strand
ugaagaaggugaagaagga

SEQ ID NO: 297153 - RNA, 19 nt, Homo sapiens
  misc_RNA (1)...(19): siRNA sense strand
cgaaacaaguacccaauga

SEQ ID NO: 297154 - RNA, 19 nt, Homo sapiens
  misc_RNA (1)...(19): siRNA sense strand
cauagaagaugaugacaau

SEQ ID NO: 297155 - RNA, 19 nt, Homo sapiens
  misc_RNA (1)...(19): siRNA sense strand
gacaagagaagagaauuua

SEQ ID NO: 297156 - RNA, 19 nt, Homo sapiens
  misc_RNA (1)...(19): siRNA sense strand
caaaggaauuccagaguuc

SEQ ID NO: 297157 - RNA, 19 nt, Homo sapiens
  misc_RNA (1)...(19): siRNA sense strand
ccaaaggaauuccagaguu

SEQ ID NO: 297158 - RNA, 19 nt, Homo sapiens
  misc_RNA (1)...(19): siRNA sense strand
ggaauaugaugaaccaauc

SEQ ID NO: 297159 - RNA, 19 nt, Homo sapiens
  misc_RNA (1)...(19): siRNA sense strand
ccagcuacaucgaaacuuu

SEQ ID NO: 297160 - RNA, 19 nt, Homo sapiens
  misc_RNA (1)...(19): siRNA sense strand
gagaagaggaggaauuaga

SEQ ID NO: 297161 - RNA, 19 nt, Homo sapiens
  misc_RNA (1)...(19): siRNA sense strand
gugaauuaguccaggaaua

SEQ ID NO: 297162 - RNA, 19 nt, Homo sapiens
  misc_RNA (1)...(19): siRNA sense strand
gaaacaacuucaggugaga

SEQ ID NO: 297163 - RNA, 19 nt, Homo sapiens
  misc_RNA (1)...(19): siRNA sense strand
guaaaguagucgucacaga

SEQ ID NO: 297164 - RNA, 19 nt, Homo sapiens
  misc_RNA (1)...(19): siRNA sense strand
ggaaagaauguuacuguca

SEQ ID NO: 297165 - RNA, 19 nt, Homo sapiens
  misc_RNA (1)...(19): siRNA sense strand
cagaaaagcucacagauca

SEQ ID NO: 297166 - RNA, 19 nt, Homo sapiens
  misc_RNA (1)...(19): siRNA sense strand
uaaaguagucgucacagaa

SEQ ID NO: 297167 - RNA, 19 nt, Homo sapiens
  misc_RNA (1)...(19): siRNA sense strand
gaacaauuacgaaacaagu

SEQ ID NO: 297168 - RNA, 19 nt, Homo sapiens
  misc_RNA (1)...(19): siRNA sense strand
gaaaucagaaccagauaag

SEQ ID NO: 297169 - RNA, 19 nt, Homo sapiens
  misc_RNA (1)...(19): siRNA sense strand
gaagccaaguucuaugaag

SEQ ID NO: 297170 - RNA, 19 nt, Homo sapiens
  misc_RNA (1)...(19): siRNA sense strand
gaagaaaggaaagaauguu

SEQ ID NO: 297171 - RNA, 19 nt, Homo sapiens
  misc_RNA (1)...(19): siRNA sense strand
ccuacaagaugaaaucaga

SEQ ID NO: 297172 - RNA, 19 nt, Homo sapiens
  misc_RNA (1)...(19): siRNA sense strand
ggaagaaaggaaagaaugu

SEQ ID NO: 297173 - RNA, 19 nt, Homo sapiens
  misc_RNA (1)...(19): siRNA sense strand
ucacauagaagccaaguuc

SEQ ID NO: 297174 - RNA, 19 nt, Homo sapiens
  misc_RNA (1)...(19): siRNA sense strand
gaugaaaucagaaccagau

SEQ ID NO: 297175 - RNA, 19 nt, Homo sapiens
  misc_RNA (1)...(19): siRNA sense strand
agagguacaugacuuggaa

SEQ ID NO: 297176 - RNA, 19 nt, Homo sapiens
  misc_RNA (1)...(19): siRNA sense strand
gguguacuauugacuggaa

SEQ ID NO: 297177 - RNA, 19 nt, Homo sapiens
  misc_RNA (1)...(19): siRNA sense strand
gguuuaccaucuucagaaa

SEQ ID NO: 297178 - RNA, 19 nt, Homo sapiens
  misc_RNA (1)...(19): siRNA sense strand
gggaggccauagaagauga

SEQ ID NO: 297179 - RNA, 19 nt, Homo sapiens
  misc_RNA (1)...(19): siRNA sense strand
ugacaagagaagagaauuu

SEQ ID NO: 297180 - RNA, 19 nt, Homo sapiens
  misc_RNA (1)...(19): siRNA sense strand
caagagaagagaauuuauc

SEQ ID NO: 297181 - RNA, 19 nt, Homo sapiens
  misc_RNA (1)...(19): siRNA sense strand
uacaugacuuggaaagaaa

SEQ ID NO: 297182 - RNA, 19 nt, Homo sapiens
  misc_RNA (1)...(19): siRNA sense strand
ccaggaauaugaugaacca

SEQ ID NO: 297183 - RNA, 19 nt, Homo sapiens
  misc_RNA (1)...(19): siRNA sense strand
ucacauuagccucugauuu

SEQ ID NO: 297184 - RNA, 19 nt, Homo sapiens
  misc_RNA (1)...(19): siRNA sense strand
ugaauuaguccaggaauau

SEQ ID NO: 297185 - RNA, 19 nt, Homo sapiens
  misc_RNA (1)...(19): siRNA sense strand
gaggaugaugcggaaauua

SEQ ID NO: 297186 - RNA, 19 nt, Homo sapiens
  misc_RNA (1)...(19): siRNA sense strand
gaugcagaauccucgaguu

SEQ ID NO: 297187 - RNA, 19 nt, Homo sapiens
  misc_RNA (1)...(19): siRNA sense strand
cgaggaugaugcggaaauu

SEQ ID NO: 297188 - RNA, 19 nt, Homo sapiens
  misc_RNA (1)...(19): siRNA sense strand
ugugacggguguacuauug

SEQ ID NO: 297189 - RNA, 19 nt, Homo sapiens
  misc_RNA (1)...(19): siRNA sense strand
ugaaaucagaaccagauaa

SEQ ID NO: 297190 - RNA, 19 nt, Homo sapiens
  misc_RNA (1)...(19): siRNA sense strand
cagcuacaucgaaacuuua

SEQ ID NO: 297191 - RNA, 19 nt, Homo sapiens
  misc_RNA (1)...(19): siRNA sense strand
gaaaggaaagaauguuacu

SEQ ID NO: 297192 - RNA, 19 nt, Homo sapiens
  misc_RNA (1)...(19): siRNA sense strand
aaaugaagaggaagagaaa

SEQ ID NO: 297193 - RNA, 19 nt, Homo sapiens
  misc_RNA (1)...(19): siRNA sense strand
aagccaaguucuaugaaga

SEQ ID NO: 297194 - RNA, 19 nt, Homo sapiens
  misc_RNA (1)...(19): siRNA sense strand
aaaguagucgucacagaaa

SEQ ID NO: 297195 - RNA, 19 nt, Homo sapiens
  misc_RNA (1)...(19): siRNA sense strand
uauaccagccucucuuuga

SEQ ID NO: 297196 - RNA, 19 nt, Homo sapiens
  misc_RNA (1)...(19): siRNA sense strand
gcuauaccagccucucuuu

SEQ ID NO: 297197 - RNA, 19 nt, Homo sapiens
  misc_RNA (1)...(19): siRNA sense strand
agaagaggaggaauuagaa

SEQ ID NO: 297198 - RNA, 19 nt, Homo sapiens
  misc_RNA (1)...(19): siRNA sense strand
ggagggagaagacgaggau

SEQ ID NO: 297199 - RNA, 19 nt, Homo sapiens
  misc_RNA (1)...(19): siRNA sense strand
gaaacaaguacccaaugag

SEQ ID NO: 297200 - RNA, 19 nt, Homo sapiens
  misc_RNA (1)...(19): siRNA sense strand
uuuaccaucuucagaaaug

SEQ ID NO: 297201 - RNA, 19 nt, Homo sapiens
  misc_RNA (1)...(19): siRNA sense strand
aggagaagaggaggaauua

SEQ ID NO: 297202 - RNA, 19 nt, Homo sapiens
  misc_RNA (1)...(19): siRNA sense strand
aaacaaguacccaaugagu

SEQ ID NO: 297203 - RNA, 19 nt, Homo sapiens
  misc_RNA (1)...(19): siRNA sense strand
ugaagaggaagagaaauug

SEQ ID NO: 297204 - RNA, 19 nt, Homo sapiens
  misc_RNA (1)...(19): siRNA sense strand
aggaugaugcggaaauuaa

SEQ ID NO: 297205 - RNA, 19 nt, Homo sapiens
  misc_RNA (1)...(19): siRNA sense strand
gaagaggaggaauuagaag

SEQ ID NO: 297206 - RNA, 19 nt, Homo sapiens
  misc_RNA (1)...(19): siRNA sense strand
cacauuagccucugauuuu

SEQ ID NO: 297207 - RNA, 19 nt, Homo sapiens
  misc_RNA (1)...(19): siRNA sense strand
ggucgaggcacuguuagaa

SEQ ID NO: 297208 - RNA, 19 nt, Homo sapiens
  misc_RNA (1)...(19): siRNA sense strand
gaagaggaagagaaauugg

SEQ ID NO: 297209 - RNA, 19 nt, Homo sapiens
  misc_RNA (1)...(19): siRNA sense strand
gaauuaguccaggaauaug

SEQ ID NO: 297210 - RNA, 19 nt, Homo sapiens
  misc_RNA (1)...(19): siRNA sense strand
ugcaggauauuaaagugaa

SEQ ID NO: 297211 - RNA, 19 nt, Homo sapiens
  misc_RNA (1)...(19): siRNA sense strand
ugaagagccagaucccaaa

SEQ ID NO: 297212 - RNA, 19 nt, Homo sapiens
  misc_RNA (1)...(19): siRNA sense strand
aaaugcaaguaacacagaa

SEQ ID NO: 297213 - RNA, 19 nt, Homo sapiens
  misc_RNA (1)...(19): siRNA sense strand
agagccagaucccaaagga

SEQ ID NO: 297214 - RNA, 19 nt, Homo sapiens
  misc_RNA (1)...(19): siRNA sense strand
acuauugacuggaagaaag

SEQ ID NO: 297215 - RNA, 19 nt, Homo sapiens
  misc_RNA (1)...(19): siRNA sense strand
ugaagagguacaugacuug

SEQ ID NO: 297216 - RNA, 19 nt, Homo sapiens
  misc_RNA (1)...(19): siRNA sense strand
aaaccuacaagaugaaauc

SEQ ID NO: 297217 - RNA, 19 nt, Homo sapiens
  misc_RNA (1)...(19): siRNA sense strand
augaagagguacaugacuu

SEQ ID NO: 297218 - RNA, 19 nt, Homo sapiens
  misc_RNA (1)...(19): siRNA sense strand
aaggaaagaauguuacugu

SEQ ID NO: 297219 - RNA, 19 nt, Homo sapiens
  misc_RNA (1)...(19): siRNA sense strand
ugaugaaccaaucuugaaa

SEQ ID NO: 297220 - RNA, 19 nt, Homo sapiens
  misc_RNA (1)...(19): siRNA sense strand
uaugaugaaccaaucuuga

SEQ ID NO: 297221 - RNA, 19 nt, Homo sapiens
  misc_RNA (1)...(19): siRNA sense strand
caacuucaggugagaugug

SEQ ID NO: 297222 - RNA, 19 nt, Homo sapiens
  misc_RNA (1)...(19): siRNA sense strand
gaagagccagaucccaaag

SEQ ID NO: 297223 - RNA, 19 nt, Homo sapiens
  misc_RNA (1)...(19): siRNA sense strand
aggagcgacuugacaaugu

SEQ ID NO: 297224 - RNA, 19 nt, Homo sapiens
  misc_RNA (1)...(19): siRNA sense strand
uggaagaaaggaaagaaug

SEQ ID NO: 297225 - RNA, 19 nt, Homo sapiens
  misc_RNA (1)...(19): siRNA sense strand
ggagaagacgaggaugaug

SEQ ID NO: 297226 - RNA, 19 nt, Homo sapiens
  misc_RNA (1)...(19): siRNA sense strand
ccauagaagaugaugacaa

SEQ ID NO: 297227 - RNA, 19 nt, Homo sapiens
  misc_RNA (1)...(19): siRNA sense strand
aagggucgaggcacuguua

SEQ ID NO: 297228 - RNA, 19 nt, Homo sapiens
  misc_RNA (1)...(19): siRNA sense strand
uaucaccggcgauguugaa

SEQ ID NO: 297229 - RNA, 19 nt, Homo sapiens
  misc_RNA (1)...(19): siRNA sense strand
ucuaugaagagguacauga

SEQ ID NO: 297230 - RNA, 19 nt, Homo sapiens
  misc_RNA (1)...(19): siRNA sense strand
ucaacuucuucaauccauu

SEQ ID NO: 297231 - RNA, 19 nt, Homo sapiens
  misc_RNA (1)...(19): siRNA sense strand
caagaugaaaucagaacca

SEQ ID NO: 297232 - RNA, 19 nt, Homo sapiens
  misc_RNA (1)...(19): siRNA sense strand
cuggagacaugaaaaguaa

SEQ ID NO: 297233 - RNA, 19 nt, Homo sapiens
  misc_RNA (1)...(19): siRNA sense strand
gaauaugaugaaccaaucu

SEQ ID NO: 297234 - RNA, 19 nt, Homo sapiens
  misc_RNA (1)...(19): siRNA sense strand
gggagaagacgaggaugau

SEQ ID NO: 297235 - RNA, 19 nt, Homo sapiens
  misc_RNA (1)...(19): siRNA sense strand
caccggcgauguugaacca

SEQ ID NO: 297236 - RNA, 19 nt, Homo sapiens
  misc_RNA (1)...(19): siRNA sense strand
aaggagaagaggaggaauu

SEQ ID NO: 297237 - RNA, 19 nt, Homo sapiens
  misc_RNA (1)...(19): siRNA sense strand
gggcugugcuguacuucac

SEQ ID NO: 297238 - RNA, 19 nt, Homo sapiens
  misc_RNA (1)...(19): siRNA sense strand
gacugugacggguguacua

SEQ ID NO: 297239 - RNA, 19 nt, Homo sapiens
  misc_RNA (1)...(19): siRNA sense strand
augaagaggaagagaaauu

SEQ ID NO: 297240 - RNA, 19 nt, Homo sapiens
  misc_RNA (1)...(19): siRNA sense strand
cagaugggguuccuucaga

SEQ ID NO: 297241 - RNA, 19 nt, Homo sapiens
  misc_RNA (1)...(19): siRNA sense strand
acaucgaaacuuuaccuaa

SEQ ID NO: 297242 - RNA, 19 nt, Homo sapiens
  misc_RNA (1)...(19): siRNA sense strand
ccugcaggauauuaaagug

SEQ ID NO: 297243 - RNA, 19 nt, Homo sapiens
  misc_RNA (1)...(19): siRNA sense strand
gagccagaucccaaaggaa

SEQ ID NO: 297244 - RNA, 19 nt, Homo sapiens
  misc_RNA (1)...(19): siRNA sense strand
agaaggagaagaggaggaa

SEQ ID NO: 297245 - RNA, 19 nt, Homo sapiens
  misc_RNA (1)...(19): siRNA sense strand
ccuuccagcuacaucgaaa

SEQ ID NO: 297246 - RNA, 19 nt, Homo sapiens
  misc_RNA (1)...(19): siRNA sense strand
ccagaucccaaaggaauuc

SEQ ID NO: 297247 - RNA, 19 nt, Homo sapiens
  misc_RNA (1)...(19): siRNA sense strand
ggacagaggcacuuccuua

SEQ ID NO: 297248 - RNA, 19 nt, Homo sapiens
  misc_RNA (1)...(19): siRNA sense strand
ggacagcuaugguguuuca

SEQ ID NO: 297249 - RNA, 19 nt, Homo sapiens
  misc_RNA (1)...(19): siRNA sense strand
guauacagcuaucuuagaa

SEQ ID NO: 297250 - RNA, 19 nt, Homo sapiens
  misc_RNA (1)...(19): siRNA sense strand
gaaauuaauucagcuguuc

SEQ ID NO: 297251 - RNA, 19 nt, Homo sapiens
  misc_RNA (1)...(19): siRNA sense strand
gcacaagguugcacuguca

SEQ ID NO: 297252 - RNA, 19 nt, Homo sapiens
  misc_RNA (1)...(19): siRNA sense strand
cgagaaagauauugaugaa

SEQ ID NO: 297253 - RNA, 19 nt, Homo sapiens
  misc_RNA (1)...(19): siRNA sense strand
ggagacaauuggacccaua

SEQ ID NO: 297254 - RNA, 19 nt, Homo sapiens
  misc_RNA (1)...(19): siRNA sense strand
gcagaaggccagcggauuu

SEQ ID NO: 297255 - RNA, 19 nt, Homo sapiens
  misc_RNA (1)...(19): siRNA sense strand
ggaagagucuguuguucug

SEQ ID NO: 297256 - RNA, 19 nt, Homo sapiens
  misc_RNA (1)...(19): siRNA sense strand
ggaccuaaauguggugaaa

SEQ ID NO: 297257 - RNA, 19 nt, Homo sapiens
  misc_RNA (1)...(19): siRNA sense strand
gaacaccacccuuggaguu

SEQ ID NO: 297258 - RNA, 19 nt, Homo sapiens
  misc_RNA (1)...(19): siRNA sense strand
aaacuugccuggacagcua

SEQ ID NO: 297259 - RNA, 19 nt, Homo sapiens
  misc_RNA (1)...(19): siRNA sense strand
guggaugacuucucuugua

SEQ ID NO: 297260 - RNA, 19 nt, Homo sapiens
  misc_RNA (1)...(19): siRNA sense strand
guacagaacacgaugaaug

SEQ ID NO: 297261 - RNA, 19 nt, Homo sapiens
  misc_RNA (1)...(19): siRNA sense strand
guagauugcuggccacuca

SEQ ID NO: 297262 - RNA, 19 nt, Homo sapiens
  misc_RNA (1)...(19): siRNA sense strand
gggaugagauucgguauca

SEQ ID NO: 297263 - RNA, 19 nt, Homo sapiens
  misc_RNA (1)...(19): siRNA sense strand
ggacugcucuaucgagauc

SEQ ID NO: 297264 - RNA, 19 nt, Homo sapiens
  misc_RNA (1)...(19): siRNA sense strand
gcaaggauggcaagauauu

SEQ ID NO: 297265 - RNA, 19 nt, Homo sapiens
  misc_RNA (1)...(19): siRNA sense strand
caagaugacugcaaaacua

SEQ ID NO: 297266 - RNA, 19 nt, Homo sapiens
  misc_RNA (1)...(19): siRNA sense strand
cugcaaggauggcaagaua

SEQ ID NO: 297267 - RNA, 19 nt, Homo sapiens
  misc_RNA (1)...(19): siRNA sense strand
gaaugugccuuaagaacuc

SEQ ID NO: 297268 - RNA, 19 nt, Homo sapiens
  misc_RNA (1)...(19): siRNA sense strand
gaugggaccuauucacugu

SEQ ID NO: 297269 - RNA, 19 nt, Homo sapiens
  misc_RNA (1)...(19): siRNA sense strand
cagcuaagaugcauuacug

SEQ ID NO: 297270 - RNA, 19 nt, Homo sapiens
  misc_RNA (1)...(19): siRNA sense strand
gugcugaccuauucuguug

SEQ ID NO: 297271 - RNA, 19 nt, Homo sapiens
  misc_RNA (1)...(19): siRNA sense strand
gcaguggccugagggauga

SEQ ID NO: 297272 - RNA, 19 nt, Homo sapiens
  misc_RNA (1)...(19): siRNA sense strand
agucacaagucaauguuua

SEQ ID NO: 297273 - RNA, 19 nt, Homo sapiens
  misc_RNA (1)...(19): siRNA sense strand
gaaauguguccuccuuuga

SEQ ID NO: 297274 - RNA, 19 nt, Homo sapiens
  misc_RNA (1)...(19): siRNA sense strand
ucaugugagugagaaauua

SEQ ID NO: 297275 - RNA, 19 nt, Homo sapiens
  misc_RNA (1)...(19): siRNA sense strand
uaacaucaccuaugacauc

SEQ ID NO: 297276 - RNA, 19 nt, Homo sapiens
  misc_RNA (1)...(19): siRNA sense strand
ucaccgagcuugaccuugu

SEQ ID NO: 297277 - RNA, 19 nt, Homo sapiens
  misc_RNA (1)...(19): siRNA sense strand
gauucgguaucacuacaua

SEQ ID NO: 297278 - RNA, 19 nt, Homo sapiens
  misc_RNA (1)...(19): siRNA sense strand
cuguagaggucauaacuuu

SEQ ID NO: 297279 - RNA, 19 nt, Homo sapiens
  misc_RNA (1)...(19): siRNA sense strand
gaauccaagugcugaccua

SEQ ID NO: 297280 - RNA, 19 nt, Homo sapiens
  misc_RNA (1)...(19): siRNA sense strand
gggagacucugccuacugu

SEQ ID NO: 297281 - RNA, 19 nt, Homo sapiens
  misc_RNA (1)...(19): siRNA sense strand
ggagugauacuguccauuc

SEQ ID NO: 297282 - RNA, 19 nt, Homo sapiens
  misc_RNA (1)...(19): siRNA sense strand
ugaugaaugugccuuaaga

SEQ ID NO: 297283 - RNA, 19 nt, Homo sapiens
  misc_RNA (1)...(19): siRNA sense strand
gcagaaggaccuaaaugug

SEQ ID NO: 297284 - RNA, 19 nt, Homo sapiens
  misc_RNA (1)...(19): siRNA sense strand
agaaauguguccuccuuug

SEQ ID NO: 297285 - RNA, 19 nt, Homo sapiens
  misc_RNA (1)...(19): siRNA sense strand
aaccugcagugauuucuua

SEQ ID NO: 297286 - RNA, 19 nt, Homo sapiens
  misc_RNA (1)...(19): siRNA sense strand
gcaaggaauaauggauuua

SEQ ID NO: 297287 - RNA, 19 nt, Homo sapiens
  misc_RNA (1)...(19): siRNA sense strand
ggaguccuguauugacauu

SEQ ID NO: 297288 - RNA, 19 nt, Homo sapiens
  misc_RNA (1)...(19): siRNA sense strand
gugauagacccuccagaua

SEQ ID NO: 297289 - RNA, 19 nt, Homo sapiens
  misc_RNA (1)...(19): siRNA sense strand
caacuugagcugugaguau

SEQ ID NO: 297290 - RNA, 19 nt, Homo sapiens
  misc_RNA (1)...(19): siRNA sense strand
ccuuugaacugcucagaaa

SEQ ID NO: 297291 - RNA, 19 nt, Homo sapiens
  misc_RNA (1)...(19): siRNA sense strand
uaagaacucacaccuguug

SEQ ID NO: 297292 - RNA, 19 nt, Homo sapiens
  misc_RNA (1)...(19): siRNA sense strand
gauaacaucaccuaugaca

SEQ ID NO: 297293 - RNA, 19 nt, Homo sapiens
  misc_RNA (1)...(19): siRNA sense strand
gaacuggagcacagcuauu

SEQ ID NO: 297294 - RNA, 19 nt, Homo sapiens
  misc_RNA (1)...(19): siRNA sense strand
gcagaagcgguuuccauga

SEQ ID NO: 297295 - RNA, 19 nt, Homo sapiens
  misc_RNA (1)...(19): siRNA sense strand
gcgagaaagauauugauga

SEQ ID NO: 297296 - RNA, 19 nt, Homo sapiens
  misc_RNA (1)...(19): siRNA sense strand
acagaaauguguccuccuu

SEQ ID NO: 297297 - RNA, 19 nt, Homo sapiens
  misc_RNA (1)...(19): siRNA sense strand
gagauucgguaucacuaca

SEQ ID NO: 297298 - RNA, 19 nt, Homo sapiens
  misc_RNA (1)...(19): siRNA sense strand
caucaccuaugacaucaga

SEQ ID NO: 297299 - RNA, 19 nt, Homo sapiens
  misc_RNA (1)...(19): siRNA sense strand
guguguggcucccaacaaa

SEQ ID NO: 297300 - RNA, 19 nt, Homo sapiens
  misc_RNA (1)...(19): siRNA sense strand
gcacaaugccagcaaagca

SEQ ID NO: 297301 - RNA, 19 nt, Homo sapiens
  misc_RNA (1)...(19): siRNA sense strand
gaacucacaccuguuggaa

SEQ ID NO: 297302 - RNA, 19 nt, Homo sapiens
  misc_RNA (1)...(19): siRNA sense strand
gcacagcuauuuugaacug

SEQ ID NO: 297303 - RNA, 19 nt, Homo sapiens
  misc_RNA (1)...(19): siRNA sense strand
ugaguauacagcuaucuua

SEQ ID NO: 297304 - RNA, 19 nt, Homo sapiens
  misc_RNA (1)...(19): siRNA sense strand
gaucacauucuuccugaga

SEQ ID NO: 297305 - RNA, 19 nt, Homo sapiens
  misc_RNA (1)...(19): siRNA sense strand
ggacaguggugggcuuugg

SEQ ID NO: 297306 - RNA, 19 nt, Homo sapiens
  misc_RNA (1)...(19): siRNA sense strand
uaugguguuucacggcuua

SEQ ID NO: 297307 - RNA, 19 nt, Homo sapiens
  misc_RNA (1)...(19): siRNA sense strand
ggaaggagagguagauugc

SEQ ID NO: 297308 - RNA, 19 nt, Homo sapiens
  misc_RNA (1)...(19): siRNA sense strand
ggucacaagcuguaucgaa

SEQ ID NO: 297309 - RNA, 19 nt, Homo sapiens
  misc_RNA (1)...(19): siRNA sense strand
uccaagugcugaccuauuc

SEQ ID NO: 297310 - RNA, 19 nt, Homo sapiens
  misc_RNA (1)...(19): siRNA sense strand
gugcaagagugguuacauc

SEQ ID NO: 297311 - RNA, 19 nt, Homo sapiens
  misc_RNA (1)...(19): siRNA sense strand
ggaauaauggauuuacaag

SEQ ID NO: 297312 - RNA, 19 nt, Homo sapiens
  misc_RNA (1)...(19): siRNA sense strand
uaagaugcauuacugucau

SEQ ID NO: 297313 - RNA, 19 nt, Homo sapiens
  misc_RNA (1)...(19): siRNA sense strand
cgacggacagcuugugauu

SEQ ID NO: 297314 - RNA, 19 nt, Homo sapiens
  misc_RNA (1)...(19): siRNA sense strand
guucagagggaaucauuga

SEQ ID NO: 297315 - RNA, 19 nt, Homo sapiens
  misc_RNA (1)...(19): siRNA sense strand
ggaagccacugcgagaaag

SEQ ID NO: 297316 - RNA, 19 nt, Homo sapiens
  misc_RNA (1)...(19): siRNA sense strand
gugaagagggcugcagaua

SEQ ID NO: 297317 - RNA, 19 nt, Homo sapiens
  misc_RNA (1)...(19): siRNA sense strand
ggauggacccugaccuuca

SEQ ID NO: 297318 - RNA, 19 nt, Homo sapiens
  misc_RNA (1)...(19): siRNA sense strand
guaucgaaguggagacaau

SEQ ID NO: 297319 - RNA, 19 nt, Homo sapiens
  misc_RNA (1)...(19): siRNA sense strand
gggaccaucugcagagcuu

SEQ ID NO: 297320 - RNA, 19 nt, Homo sapiens
  misc_RNA (1)...(19): siRNA sense strand
uggccaagaugacugcaaa

SEQ ID NO: 297321 - RNA, 19 nt, Homo sapiens
  misc_RNA (1)...(19): siRNA sense strand
ugcaaggaauaauggauuu

SEQ ID NO: 297322 - RNA, 19 nt, Homo sapiens
  misc_RNA (1)...(19): siRNA sense strand
cauggcagauggacaaugg

SEQ ID NO: 297323 - RNA, 19 nt, Homo sapiens
  misc_RNA (1)...(19): siRNA sense strand
aaauguaucuauggaggaa

SEQ ID NO: 297324 - RNA, 19 nt, Homo sapiens
  misc_RNA (1)...(19): siRNA sense strand
gcacaaccuguaaaugcaa

SEQ ID NO: 297325 - RNA, 19 nt, Homo sapiens
  misc_RNA (1)...(19): siRNA sense strand
cugccuagcugauaacauc

SEQ ID NO: 297326 - RNA, 19 nt, Homo sapiens
  misc_RNA (1)...(19): siRNA sense strand
gugacugugucccaggaua

SEQ ID NO: 297327 - RNA, 19 nt, Homo sapiens
  misc_RNA (1)...(19): siRNA sense strand
accaagagcugucgggaau

SEQ ID NO: 297328 - RNA, 19 nt, Homo sapiens
  misc_RNA (1)...(19): siRNA sense strand
gccgauggauuugauuuua

SEQ ID NO: 297329 - RNA, 19 nt, Homo sapiens
  misc_RNA (1)...(19): siRNA sense strand
aacuugagcugugaguaua

SEQ ID NO: 297330 - RNA, 19 nt, Homo sapiens
  misc_RNA (1)...(19): siRNA sense strand
gagacucugccuacuguga

SEQ ID NO: 297331 - RNA, 19 nt, Homo sapiens
  misc_RNA (1)...(19): siRNA sense strand
ggaaugccgagguggaguu

SEQ ID NO: 297332 - RNA, 19 nt, Homo sapiens
  misc_RNA (1)...(19): siRNA sense strand
caaaaguggugccguggaa

SEQ ID NO: 297333 - RNA, 19 nt, Homo sapiens
  misc_RNA (1)...(19): siRNA sense strand
ugaguggacugcucuaucg

SEQ ID NO: 297334 - RNA, 19 nt, Homo sapiens
  misc_RNA (1)...(19): siRNA sense strand
uaaauuaugcagagacaag

SEQ ID NO: 297335 - RNA, 19 nt, Homo sapiens
  misc_RNA (1)...(19): siRNA sense strand
gauacuguccauucgagaa

SEQ ID NO: 297336 - RNA, 19 nt, Homo sapiens
  misc_RNA (1)...(19): siRNA sense strand
gugcaaggaauaauggauu

SEQ ID NO: 297337 - RNA, 19 nt, Homo sapiens
  misc_RNA (1)...(19): siRNA sense strand
gauuuaugagcgugugaua

SEQ ID NO: 297338 - RNA, 19 nt, Homo sapiens
  misc_RNA (1)...(19): siRNA sense strand
gaauggaagagucuguugu

SEQ ID NO: 297339 - RNA, 19 nt, Homo sapiens
  misc_RNA (1)...(19): siRNA sense strand
cuggacagcuaugguguuu

SEQ ID NO: 297340 - RNA, 19 nt, Homo sapiens
  misc_RNA (1)...(19): siRNA sense strand
cagaagcgguuuccaugac

SEQ ID NO: 297341 - RNA, 19 nt, Homo sapiens
  misc_RNA (1)...(19): siRNA sense strand
ccacugcgagaaagauauu

SEQ ID NO: 297342 - RNA, 19 nt, Homo sapiens
  misc_RNA (1)...(19): siRNA sense strand
gaugacuucucuuguacag

SEQ ID NO: 297343 - RNA, 19 nt, Homo sapiens
  misc_RNA (1)...(19): siRNA sense strand
uaugccgaauggauauaua

SEQ ID NO: 297344 - RNA, 19 nt, Homo sapiens
  misc_RNA (1)...(19): siRNA sense strand
gauagacccuccagauacc

SEQ ID NO: 297345 - RNA, 19 nt, Homo sapiens
  misc_RNA (1)...(19): siRNA sense strand
gaugaaugugccuuaagaa

SEQ ID NO: 297346 - RNA, 19 nt, Homo sapiens
  misc_RNA (1)...(19): siRNA sense strand
guguggaccuugaaagaag

SEQ ID NO: 297347 - RNA, 19 nt, Homo sapiens
  misc_RNA (1)...(19): siRNA sense strand
gaaaggacuugcaccauga

SEQ ID NO: 297348 - RNA, 19 nt, Homo sapiens
  misc_RNA (1)...(19): siRNA sense strand
gaaauaaugcgcauggaua

SEQ ID NO: 297349 - RNA, 19 nt, Homo sapiens
  misc_RNA (1)...(19): siRNA sense strand
gaucagugcuauugugaaa

SEQ ID NO: 297350 - RNA, 19 nt, Homo sapiens
  misc_RNA (1)...(19): siRNA sense strand
gcaaaucgauaugccaauu

SEQ ID NO: 297351 - RNA, 19 nt, Homo sapiens
  misc_RNA (1)...(19): siRNA sense strand
aaagauggcuguaggaaug

SEQ ID NO: 297352 - RNA, 19 nt, Homo sapiens
  misc_RNA (1)...(19): siRNA sense strand
aaugcaagauguccaauua

SEQ ID NO: 297353 - RNA, 19 nt, Homo sapiens
  misc_RNA (1)...(19): siRNA sense strand
aaacagacccacuuaaauu

SEQ ID NO: 297354 - RNA, 19 nt, Homo sapiens
  misc_RNA (1)...(19): siRNA sense strand
ggacgaaccuacuuugaag

SEQ ID NO: 297355 - RNA, 19 nt, Homo sapiens
  misc_RNA (1)...(19): siRNA sense strand
ccacuuaaauucaggaguu

SEQ ID NO: 297356 - RNA, 19 nt, Homo sapiens
  misc_RNA (1)...(19): siRNA sense strand
gaguauguguucucuauga

SEQ ID NO: 297357 - RNA, 19 nt, Homo sapiens
  misc_RNA (1)...(19): siRNA sense strand
gaaugugacccaaggcuua

SEQ ID NO: 297358 - RNA, 19 nt, Homo sapiens
  misc_RNA (1)...(19): siRNA sense strand
gaacagcgaaugaauagau

SEQ ID NO: 297359 - RNA, 19 nt, Homo sapiens
  misc_RNA (1)...(19): siRNA sense strand
caucagugcuucccauuug

SEQ ID NO: 297360 - RNA, 19 nt, Homo sapiens
  misc_RNA (1)...(19): siRNA sense strand
ucacagcuguugcaaaguu

SEQ ID NO: 297361 - RNA, 19 nt, Homo sapiens
  misc_RNA (1)...(19): siRNA sense strand
ggagaaucgugugaagaua

SEQ ID NO: 297362 - RNA, 19 nt, Homo sapiens
  misc_RNA (1)...(19): siRNA sense strand
gcaaugacaucaccaagac

SEQ ID NO: 297363 - RNA, 19 nt, Homo sapiens
  misc_RNA (1)...(19): siRNA sense strand
gauaaugccuacugugaag

SEQ ID NO: 297364 - RNA, 19 nt, Homo sapiens
  misc_RNA (1)...(19): siRNA sense strand
gcccagauguggaguguga

SEQ ID NO: 297365 - RNA, 19 nt, Homo sapiens
  misc_RNA (1)...(19): siRNA sense strand
gcugagaaauaaacaugaa

SEQ ID NO: 297366 - RNA, 19 nt, Homo sapiens
  misc_RNA (1)...(19): siRNA sense strand
cagauaaccuugucucaca

SEQ ID NO: 297367 - RNA, 19 nt, Homo sapiens
  misc_RNA (1)...(19): siRNA sense strand
gaauuugaguccuggauag

SEQ ID NO: 297368 - RNA, 19 nt, Homo sapiens
  misc_RNA (1)...(19): siRNA sense strand
caauuuggauggcggauau

SEQ ID NO: 297369 - RNA, 19 nt, Homo sapiens
  misc_RNA (1)...(19): siRNA sense strand
gcaaggaccagaccaugaa

SEQ ID NO: 297370 - RNA, 19 nt, Homo sapiens
  misc_RNA (1)...(19): siRNA sense strand
gaccagaccaugaaacuug

SEQ ID NO: 297371 - RNA, 19 nt, Homo sapiens
  misc_RNA (1)...(19): siRNA sense strand
gaacugcacaugccugaau

SEQ ID NO: 297372 - RNA, 19 nt, Homo sapiens
  misc_RNA (1)...(19): siRNA sense strand
gaugaaugcucugaugguu

SEQ ID NO: 297373 - RNA, 19 nt, Homo sapiens
  misc_RNA (1)...(19): siRNA sense strand
aauccugacugcccacuua

SEQ ID NO: 297374 - RNA, 19 nt, Homo sapiens
  misc_RNA (1)...(19): siRNA sense strand
ggaguuauucucucaauuc

SEQ ID NO: 297375 - RNA, 19 nt, Homo sapiens
  misc_RNA (1)...(19): siRNA sense strand
gauaccauuugcuucaauu

SEQ ID NO: 297376 - RNA, 19 nt, Homo sapiens
  misc_RNA (1)...(19): siRNA sense strand
ucauggagcuacaggauau

SEQ ID NO: 297377 - RNA, 19 nt, Homo sapiens
  misc_RNA (1)...(19): siRNA sense strand
gcucagugcccagaucuua

SEQ ID NO: 297378 - RNA, 19 nt, Homo sapiens
  misc_RNA (1)...(19): siRNA sense strand
ccacuuaagucggcucuug

SEQ ID NO: 297379 - RNA, 19 nt, Homo sapiens
  misc_RNA (1)...(19): siRNA sense strand
gagccuguauugccgcuaa

SEQ ID NO: 297380 - RNA, 19 nt, Homo sapiens
  misc_RNA (1)...(19): siRNA sense strand
uaagucggcucuugcguau

SEQ ID NO: 297381 - RNA, 19 nt, Homo sapiens
  misc_RNA (1)...(19): siRNA sense strand
ggaaccaccuaccgagaau

SEQ ID NO: 297382 - RNA, 19 nt, Homo sapiens
  misc_RNA (1)...(19): siRNA sense strand
guuuguagcugucgagaug

SEQ ID NO: 297383 - RNA, 19 nt, Homo sapiens
  misc_RNA (1)...(19): siRNA sense strand
gaaguguuuccuuacauuu

SEQ ID NO: 297384 - RNA, 19 nt, Homo sapiens
  misc_RNA (1)...(19): siRNA sense strand
ggcaaaugcuguaaggaau

SEQ ID NO: 297385 - RNA, 19 nt, Homo sapiens
  misc_RNA (1)...(19): siRNA sense strand
gcacaauggucagauuugg

SEQ ID NO: 297386 - RNA, 19 nt, Homo sapiens
  misc_RNA (1)...(19): siRNA sense strand
uccagagucucaucagaua

SEQ ID NO: 297387 - RNA, 19 nt, Homo sapiens
  misc_RNA (1)...(19): siRNA sense strand
gaauggaggagccuguauu

SEQ ID NO: 297388 - RNA, 19 nt, Homo sapiens
  misc_RNA (1)...(19): siRNA sense strand
gauacucccagaagcauaa

SEQ ID NO: 297389 - RNA, 19 nt, Homo sapiens
  misc_RNA (1)...(19): siRNA sense strand
uaagcacaauggucagauu

SEQ ID NO: 297390 - RNA, 19 nt, Homo sapiens
  misc_RNA (1)...(19): siRNA sense strand
gagaaucgugugaagauau

SEQ ID NO: 297391 - RNA, 19 nt, Homo sapiens
  misc_RNA (1)...(19): siRNA sense strand
ggaaccauccagugugaaa

SEQ ID NO: 297392 - RNA, 19 nt, Homo sapiens
  misc_RNA (1)...(19): siRNA sense strand
agacuugccuggacgaaau

SEQ ID NO: 297393 - RNA, 19 nt, Homo sapiens
  misc_RNA (1)...(19): siRNA sense strand
uggaguauguguucucuau

SEQ ID NO: 297394 - RNA, 19 nt, Homo sapiens
  misc_RNA (1)...(19): siRNA sense strand
uaaggaaugcaaaucgaua

SEQ ID NO: 297395 - RNA, 19 nt, Homo sapiens
  misc_RNA (1)...(19): siRNA sense strand
gaguuauucucucaauuca

SEQ ID NO: 297396 - RNA, 19 nt, Homo sapiens
  misc_RNA (1)...(19): siRNA sense strand
gcaaagauggcuguaggaa

SEQ ID NO: 297397 - RNA, 19 nt, Homo sapiens
  misc_RNA (1)...(19): siRNA sense strand
gaauggaacgacaugcaaa

SEQ ID NO: 297398 - RNA, 19 nt, Homo sapiens
  misc_RNA (1)...(19): siRNA sense strand
gaaaaugcuuuaugcuuca

SEQ ID NO: 297399 - RNA, 19 nt, Homo sapiens
  misc_RNA (1)...(19): siRNA sense strand
ucucacagcuguugcaaag

SEQ ID NO: 297400 - RNA, 19 nt, Homo sapiens
  misc_RNA (1)...(19): siRNA sense strand
agaaguguuuccuuacauu

SEQ ID NO: 297401 - RNA, 19 nt, Homo sapiens
  misc_RNA (1)...(19): siRNA sense strand
gauguccaauuacuuguca

SEQ ID NO: 297402 - RNA, 19 nt, Homo sapiens
  misc_RNA (1)...(19): siRNA sense strand
acucuaaucugcccaaauc

SEQ ID NO: 297403 - RNA, 19 nt, Homo sapiens
  misc_RNA (1)...(19): siRNA sense strand
gcgaaugaauagauuggau

SEQ ID NO: 297404 - RNA, 19 nt, Homo sapiens
  misc_RNA (1)...(19): siRNA sense strand
gcucaugucagaauggauu

SEQ ID NO: 297405 - RNA, 19 nt, Homo sapiens
  misc_RNA (1)...(19): siRNA sense strand
agaaucgugugaagauauu

SEQ ID NO: 297406 - RNA, 19 nt, Homo sapiens
  misc_RNA (1)...(19): siRNA sense strand
ugcuacagcugaacaguuu

SEQ ID NO: 297407 - RNA, 19 nt, Homo sapiens
  misc_RNA (1)...(19): siRNA sense strand
gaaaauacaauguguguca

SEQ ID NO: 297408 - RNA, 19 nt, Homo sapiens
  misc_RNA (1)...(19): siRNA sense strand
ggauaaugccuacugugaa

SEQ ID NO: 297409 - RNA, 19 nt, Homo sapiens
  misc_RNA (1)...(19): siRNA sense strand
gagaaagaaauacagucua

SEQ ID NO: 297410 - RNA, 19 nt, Homo sapiens
  misc_RNA (1)...(19): siRNA sense strand
gaaaagcccuccacagacu

SEQ ID NO: 297411 - RNA, 19 nt, Homo sapiens
  misc_RNA (1)...(19): siRNA sense strand
ccuacagauugacgucuua

SEQ ID NO: 297412 - RNA, 19 nt, Homo sapiens
  misc_RNA (1)...(19): siRNA sense strand
ggaauggaacgacaugcaa

SEQ ID NO: 297413 - RNA, 19 nt, Homo sapiens
  misc_RNA (1)...(19): siRNA sense strand
ucacaaaucagcacaacug

SEQ ID NO: 297414 - RNA, 19 nt, Homo sapiens
  misc_RNA (1)...(19): siRNA sense strand
ggagaaagaaauacagucu

SEQ ID NO: 297415 - RNA, 19 nt, Homo sapiens
  misc_RNA (1)...(19): siRNA sense strand
gcaaaugcuguaaggaaug

SEQ ID NO: 297416 - RNA, 19 nt, Homo sapiens
  misc_RNA (1)...(19): siRNA sense strand
ucaccgcccucacacagaa

SEQ ID NO: 297417 - RNA, 19 nt, Homo sapiens
  misc_RNA (1)...(19): siRNA sense strand
gugagaaucccacaguuga

SEQ ID NO: 297418 - RNA, 19 nt, Homo sapiens
  misc_RNA (1)...(19): siRNA sense strand
gcaagauguccaauuacuu

SEQ ID NO: 297419 - RNA, 19 nt, Homo sapiens
  misc_RNA (1)...(19): siRNA sense strand
gagaauuccaucugcagaa

SEQ ID NO: 297420 - RNA, 19 nt, Homo sapiens
  misc_RNA (1)...(19): siRNA sense strand
aaucgcaccuguccaacuu

SEQ ID NO: 297421 - RNA, 19 nt, Homo sapiens
  misc_RNA (1)...(19): siRNA sense strand
gcugugaaacggacauuga

SEQ ID NO: 297422 - RNA, 19 nt, Homo sapiens
  misc_RNA (1)...(19): siRNA sense strand
caugaaacuuguugagagu

SEQ ID NO: 297423 - RNA, 19 nt, Homo sapiens
  misc_RNA (1)...(19): siRNA sense strand
gauggcaaaugcuguaagg

SEQ ID NO: 297424 - RNA, 19 nt, Homo sapiens
  misc_RNA (1)...(19): siRNA sense strand
ugacuuccauggacuugug

SEQ ID NO: 297425 - RNA, 19 nt, Homo sapiens
  misc_RNA (1)...(19): siRNA sense strand
ugaaugcucugaugguuuu

SEQ ID NO: 297426 - RNA, 19 nt, Homo sapiens
  misc_RNA (1)...(19): siRNA sense strand
gugaaacggacauugauga

SEQ ID NO: 297427 - RNA, 19 nt, Homo sapiens
  misc_RNA (1)...(19): siRNA sense strand
uacagaacaugaugagugu

SEQ ID NO: 297428 - RNA, 19 nt, Homo sapiens
  misc_RNA (1)...(19): siRNA sense strand
cgccauuacugucgugaaa

SEQ ID NO: 297429 - RNA, 19 nt, Homo sapiens
  misc_RNA (1)...(19): siRNA sense strand
agaauuccaucugcagaaa

SEQ ID NO: 297430 - RNA, 19 nt, Homo sapiens
  misc_RNA (1)...(19): siRNA sense strand
cuauuccucuucuggagua

SEQ ID NO: 297431 - RNA, 19 nt, Homo sapiens
  misc_RNA (1)...(19): siRNA sense strand
agauugacgucuuaacaga

SEQ ID NO: 297432 - RNA, 19 nt, Homo sapiens
  misc_RNA (1)...(19): siRNA sense strand
gaaugaauagauuggauca

SEQ ID NO: 297433 - RNA, 19 nt, Homo sapiens
  misc_RNA (1)...(19): siRNA sense strand
guauguggauggcaaaugc

SEQ ID NO: 297434 - RNA, 19 nt, Homo sapiens
  misc_RNA (1)...(19): siRNA sense strand
gggaaacuuuguauaacag

SEQ ID NO: 297435 - RNA, 19 nt, Homo sapiens
  misc_RNA (1)...(19): siRNA sense strand
ggauaugauugucgauguc

SEQ ID NO: 297436 - RNA, 19 nt, Homo sapiens
  misc_RNA (1)...(19): siRNA sense strand
acagaaguguuuccuuaca

SEQ ID NO: 297437 - RNA, 19 nt, Homo sapiens
  misc_RNA (1)...(19): siRNA sense strand
gugcaagaauggccacauc

SEQ ID NO: 297438 - RNA, 19 nt, Homo sapiens
  misc_RNA (1)...(19): siRNA sense strand
gauguggagugugaauuca

SEQ ID NO: 297439 - RNA, 19 nt, Homo sapiens
  misc_RNA (1)...(19): siRNA sense strand
gaaacggacauugaugaau

SEQ ID NO: 297440 - RNA, 19 nt, Homo sapiens
  misc_RNA (1)...(19): siRNA sense strand
uaaaacagacccacuuaaa

SEQ ID NO: 297441 - RNA, 19 nt, Homo sapiens
  misc_RNA (1)...(19): siRNA sense strand
gauaugccaauuucaagga

SEQ ID NO: 297442 - RNA, 19 nt, Homo sapiens
  misc_RNA (1)...(19): siRNA sense strand
gagaaauaaugcgcaugga

SEQ ID NO: 297443 - RNA, 19 nt, Homo sapiens
  misc_RNA (1)...(19): siRNA sense strand
caagaauggccacaucugu

SEQ ID NO: 297444 - RNA, 19 nt, Homo sapiens
  misc_RNA (1)...(19): siRNA sense strand
caagauacucccagaagca

SEQ ID NO: 297445 - RNA, 19 nt, Homo sapiens
  misc_RNA (1)...(19): siRNA sense strand
ggacgaaaugaaugugguu

SEQ ID NO: 297446 - RNA, 19 nt, Homo sapiens
  misc_RNA (1)...(19): siRNA sense strand
cacuuaaauucaggaguua

SEQ ID NO: 297447 - RNA, 19 nt, Homo sapiens
  misc_RNA (1)...(19): siRNA sense strand
caaagaauguguucaagaa

SEQ ID NO: 297448 - RNA, 19 nt, Homo sapiens
  misc_RNA (1)...(19): siRNA sense strand
uaagugaguucaucaguuu

SEQ ID NO: 297449 - RNA, 19 nt, Homo sapiens
  misc_RNA (1)...(19): siRNA sense strand
guuaccagcuggcuuaaua

SEQ ID NO: 297450 - RNA, 19 nt, Homo sapiens
  misc_RNA (1)...(19): siRNA sense strand
ggaggaagucauuauguua

SEQ ID NO: 297451 - RNA, 19 nt, Homo sapiens
  misc_RNA (1)...(19): siRNA sense strand
gauauucucuuugcuaugu

SEQ ID NO: 297452 - RNA, 19 nt, Homo sapiens
  misc_RNA (1)...(19): siRNA sense strand
guaagugaguucaucaguu

SEQ ID NO: 297453 - RNA, 19 nt, Homo sapiens
  misc_RNA (1)...(19): siRNA sense strand
uguggaaccucugaaauua

SEQ ID NO: 297454 - RNA, 19 nt, Homo sapiens
  misc_RNA (1)...(19): siRNA sense strand
uggaaccucugaaauuaua

SEQ ID NO: 297455 - RNA, 19 nt, Homo sapiens
  misc_RNA (1)...(19): siRNA sense strand
gaaaggugccaucaagaga

SEQ ID NO: 297456 - RNA, 19 nt, Homo sapiens
  misc_RNA (1)...(19): siRNA sense strand
uauaacaucugaagcaagu

SEQ ID NO: 297457 - RNA, 19 nt, Homo sapiens
  misc_RNA (1)...(19): siRNA sense strand
gcaaacguggcuaggauaa

SEQ ID NO: 297458 - RNA, 19 nt, Homo sapiens
  misc_RNA (1)...(19): siRNA sense strand
aaacguggcuaggauaaug

SEQ ID NO: 297459 - RNA, 19 nt, Homo sapiens
  misc_RNA (1)...(19): siRNA sense strand
cagaggaggcauuuacuaa

SEQ ID NO: 297460 - RNA, 19 nt, Homo sapiens
  misc_RNA (1)...(19): siRNA sense strand
aggaaucucugcagacuau

SEQ ID NO: 297461 - RNA, 19 nt, Homo sapiens
  misc_RNA (1)...(19): siRNA sense strand
aagaauguguucaagaaug

SEQ ID NO: 297462 - RNA, 19 nt, Homo sapiens
  misc_RNA (1)...(19): siRNA sense strand
gaggaagucauuauguuau

SEQ ID NO: 297463 - RNA, 19 nt, Homo sapiens
  misc_RNA (1)...(19): siRNA sense strand
gaaugaucaugaagacaca

SEQ ID NO: 297464 - RNA, 19 nt, Homo sapiens
  misc_RNA (1)...(19): siRNA sense strand
aacagaugcuucucaacua

SEQ ID NO: 297465 - RNA, 19 nt, Homo sapiens
  misc_RNA (1)...(19): siRNA sense strand
caacagaugcuucucaacu

SEQ ID NO: 297466 - RNA, 19 nt, Homo sapiens
  misc_RNA (1)...(19): siRNA sense strand
uggaggaagucauuauguu

SEQ ID NO: 297467 - RNA, 19 nt, Homo sapiens
  misc_RNA (1)...(19): siRNA sense strand
gaggacagcaugaaugauc

SEQ ID NO: 297468 - RNA, 19 nt, Homo sapiens
  misc_RNA (1)...(19): siRNA sense strand
ccaaagaauguguucaaga

SEQ ID NO: 297469 - RNA, 19 nt, Homo sapiens
  misc_RNA (1)...(19): siRNA sense strand
caucauaucaacagauuuc

SEQ ID NO: 297470 - RNA, 19 nt, Homo sapiens
  misc_RNA (1)...(19): siRNA sense strand
cacagacggucaacaacaa

SEQ ID NO: 297471 - RNA, 19 nt, Homo sapiens
  misc_RNA (1)...(19): siRNA sense strand
gaucaugaagacacaaaug

SEQ ID NO: 297472 - RNA, 19 nt, Homo sapiens
  misc_RNA (1)...(19): siRNA sense strand
ggaagucauuauguuauac

SEQ ID NO: 297473 - RNA, 19 nt, Homo sapiens
  misc_RNA (1)...(19): siRNA sense strand
ccagcuggcuuaauaacca

SEQ ID NO: 297474 - RNA, 19 nt, Homo sapiens
  misc_RNA (1)...(19): siRNA sense strand
cagagaggcuaugaaagga

SEQ ID NO: 297475 - RNA, 19 nt, Homo sapiens
  misc_RNA (1)...(19): siRNA sense strand
agaauguguucaagaaugu

SEQ ID NO: 297476 - RNA, 19 nt, Homo sapiens
  misc_RNA (1)...(19): siRNA sense strand
guucaagaauguguaagug

SEQ ID NO: 297477 - RNA, 19 nt, Homo sapiens
  misc_RNA (1)...(19): siRNA sense strand
uaacaucugaagcaaguga

SEQ ID NO: 297478 - RNA, 19 nt, Homo sapiens
  misc_RNA (1)...(19): siRNA sense strand
caaaagaugccaaagaaug

SEQ ID NO: 297479 - RNA, 19 nt, Homo sapiens
  misc_RNA (1)...(19): siRNA sense strand
uacaacagaugcuucucaa

SEQ ID NO: 297480 - RNA, 19 nt, Homo sapiens
  misc_RNA (1)...(19): siRNA sense strand
ucagagaggcuaugaaagg

SEQ ID NO: 297481 - RNA, 19 nt, Homo sapiens
  misc_RNA (1)...(19): siRNA sense strand
cuuuaggcuuugacaguua

SEQ ID NO: 297482 - RNA, 19 nt, Homo sapiens
  misc_RNA (1)...(19): siRNA sense strand
gaaucucugcagacuauau

SEQ ID NO: 297483 - RNA, 19 nt, Homo sapiens
  misc_RNA (1)...(19): siRNA sense strand
cagauggacuaagugaaga

SEQ ID NO: 297484 - RNA, 19 nt, Homo sapiens
  misc_RNA (1)...(19): siRNA sense strand
cuacagauggacuaaguga

SEQ ID NO: 297485 - RNA, 19 nt, Homo sapiens
  misc_RNA (1)...(19): siRNA sense strand
agucacagcuacagaugga

SEQ ID NO: 297486 - RNA, 19 nt, Homo sapiens
  misc_RNA (1)...(19): siRNA sense strand
cgggaaagauugcaaaaga

SEQ ID NO: 297487 - RNA, 19 nt, Homo sapiens
  misc_RNA (1)...(19): siRNA sense strand
agacacaaaugguucaaaa

SEQ ID NO: 297488 - RNA, 19 nt, Homo sapiens
  misc_RNA (1)...(19): siRNA sense strand
ccucaaacgggaaagauug

SEQ ID NO: 297489 - RNA, 19 nt, Homo sapiens
  misc_RNA (1)...(19): siRNA sense strand
ccacagacggucaacaaca

SEQ ID NO: 297490 - RNA, 19 nt, Homo sapiens
  misc_RNA (1)...(19): siRNA sense strand
uaugucuacuuuaggcuuu

SEQ ID NO: 297491 - RNA, 19 nt, Homo sapiens
  misc_RNA (1)...(19): siRNA sense strand
aacaaucaauggagaagau

SEQ ID NO: 297492 - RNA, 19 nt, Homo sapiens
  misc_RNA (1)...(19): siRNA sense strand
uauauuggaggaagucauu

SEQ ID NO: 297493 - RNA, 19 nt, Homo sapiens
  misc_RNA (1)...(19): siRNA sense strand
caugaagacacaaaugguu

SEQ ID NO: 297494 - RNA, 19 nt, Homo sapiens
  misc_RNA (1)...(19): siRNA sense strand
gaggaggcauuuacuaacc

SEQ ID NO: 297495 - RNA, 19 nt, Homo sapiens
  misc_RNA (1)...(19): siRNA sense strand
ucuuugcuaugucuacuuu

SEQ ID NO: 297496 - RNA, 19 nt, Homo sapiens
  misc_RNA (1)...(19): siRNA sense strand
aaggugccaucaagagaaa

SEQ ID NO: 297497 - RNA, 19 nt, Homo sapiens
  misc_RNA (1)...(19): siRNA sense strand
acagaugcuucucaacuag

SEQ ID NO: 297498 - RNA, 19 nt, Homo sapiens
  misc_RNA (1)...(19): siRNA sense strand
caacaucauaucaacagau

SEQ ID NO: 297499 - RNA, 19 nt, Homo sapiens
  misc_RNA (1)...(19): siRNA sense strand
agugaaaggugccaucaag

SEQ ID NO: 297500 - RNA, 19 nt, Homo sapiens
  misc_RNA (1)...(19): siRNA sense strand
gaaauucagagaggcuaug

SEQ ID NO: 297501 - RNA, 19 nt, Homo sapiens
  misc_RNA (1)...(19): siRNA sense strand
gcagucacagcuacagaug

SEQ ID NO: 297502 - RNA, 19 nt, Homo sapiens
  misc_RNA (1)...(19): siRNA sense strand
ugcaaaagaugccaaagaa

SEQ ID NO: 297503 - RNA, 19 nt, Homo sapiens
  misc_RNA (1)...(19): siRNA sense strand
caagagaaacggaaaacaa

SEQ ID NO: 297504 - RNA, 19 nt, Homo sapiens
  misc_RNA (1)...(19): siRNA sense strand
aaacgggaaagauugcaaa

SEQ ID NO: 297505 - RNA, 19 nt, Homo sapiens
  misc_RNA (1)...(19): siRNA sense strand
aaaggugccaucaagagaa

SEQ ID NO: 297506 - RNA, 19 nt, Homo sapiens
  misc_RNA (1)...(19): siRNA sense strand
gccaaagaauguguucaag

SEQ ID NO: 297507 - RNA, 19 nt, Homo sapiens
  misc_RNA (1)...(19): siRNA sense strand
ggaaagauugcaaaagaug

SEQ ID NO: 297508 - RNA, 19 nt, Homo sapiens
  misc_RNA (1)...(19): siRNA sense strand
acagaggaggcauuuacua

SEQ ID NO: 297509 - RNA, 19 nt, Homo sapiens
  misc_RNA (1)...(19): siRNA sense strand
uuacagaggaggcauuuac

SEQ ID NO: 297510 - RNA, 19 nt, Homo sapiens
  misc_RNA (1)...(19): siRNA sense strand
gaaaacaaucaauggagaa

SEQ ID NO: 297511 - RNA, 19 nt, Homo sapiens
  misc_RNA (1)...(19): siRNA sense strand
ugaaaggugccaucaagag

SEQ ID NO: 297512 - RNA, 19 nt, Homo sapiens
  misc_RNA (1)...(19): siRNA sense strand
gaaaggagaaaagggaauu

SEQ ID NO: 297513 - RNA, 19 nt, Homo sapiens
  misc_RNA (1)...(19): siRNA sense strand
cacaaaugguucaaaagaa

SEQ ID NO: 297514 - RNA, 19 nt, Homo sapiens
  misc_RNA (1)...(19): siRNA sense strand
gcaaauucaguuuucauga

SEQ ID NO: 297515 - RNA, 19 nt, Homo sapiens
  misc_RNA (1)...(19): siRNA sense strand
uggacuaagugaagagcuu

SEQ ID NO: 297516 - RNA, 19 nt, Homo sapiens
  misc_RNA (1)...(19): siRNA sense strand
cuacaacagaugcuucuca

SEQ ID NO: 297517 - RNA, 19 nt, Homo sapiens
  misc_RNA (1)...(19): siRNA sense strand
aagaauguguaagugaguu

SEQ ID NO: 297518 - RNA, 19 nt, Homo sapiens
  misc_RNA (1)...(19): siRNA sense strand
acagauggacuaagugaag

SEQ ID NO: 297519 - RNA, 19 nt, Homo sapiens
  misc_RNA (1)...(19): siRNA sense strand
gaagacacaaaugguucaa

SEQ ID NO: 297520 - RNA, 19 nt, Homo sapiens
  misc_RNA (1)...(19): siRNA sense strand
gagcagucacagcuacaga

SEQ ID NO: 297521 - RNA, 19 nt, Homo sapiens
  misc_RNA (1)...(19): siRNA sense strand
ggaauugguggagcaguca

SEQ ID NO: 297522 - RNA, 19 nt, Homo sapiens
  misc_RNA (1)...(19): siRNA sense strand
cuaggaaucucugcagacu

SEQ ID NO: 297523 - RNA, 19 nt, Homo sapiens
  misc_RNA (1)...(19): siRNA sense strand
gggaaagauugcaaaagau

SEQ ID NO: 297524 - RNA, 19 nt, Homo sapiens
  misc_RNA (1)...(19): siRNA sense strand
cugaggacagcaugaauga

SEQ ID NO: 297525 - RNA, 19 nt, Homo sapiens
  misc_RNA (1)...(19): siRNA sense strand
gcuuacagaggaggcauuu

SEQ ID NO: 297526 - RNA, 19 nt, Homo sapiens
  misc_RNA (1)...(19): siRNA sense strand
gugaaaggugccaucaaga

SEQ ID NO: 297527 - RNA, 19 nt, Homo sapiens
  misc_RNA (1)...(19): siRNA sense strand
caagugaaaggugccauca

SEQ ID NO: 297528 - RNA, 19 nt, Homo sapiens
  misc_RNA (1)...(19): siRNA sense strand
caaacgggaaagauugcaa

SEQ ID NO: 297529 - RNA, 19 nt, Homo sapiens
  misc_RNA (1)...(19): siRNA sense strand
gauacugaggacagcauga

SEQ ID NO: 297530 - RNA, 19 nt, Homo sapiens
  misc_RNA (1)...(19): siRNA sense strand
guggaaccucugaaauuau

SEQ ID NO: 297531 - RNA, 19 nt, Homo sapiens
  misc_RNA (1)...(19): siRNA sense strand
caagaauguguaagugagu

SEQ ID NO: 297532 - RNA, 19 nt, Homo sapiens
  misc_RNA (1)...(19): siRNA sense strand
acaacaucauaucaacaga

SEQ ID NO: 297533 - RNA, 19 nt, Homo sapiens
  misc_RNA (1)...(19): siRNA sense strand
uacacaacaucauaucaac

SEQ ID NO: 297534 - RNA, 19 nt, Homo sapiens
  misc_RNA (1)...(19): siRNA sense strand
guuaugguuuacacaacau

SEQ ID NO: 297535 - RNA, 19 nt, Homo sapiens
  misc_RNA (1)...(19): siRNA sense strand
aaccacagacggucaacaa

SEQ ID NO: 297536 - RNA, 19 nt, Homo sapiens
  misc_RNA (1)...(19): siRNA sense strand
caaucaauggagaagauau

SEQ ID NO: 297537 - RNA, 19 nt, Homo sapiens
  misc_RNA (1)...(19): siRNA sense strand
gagaaacggaaaacaauca

SEQ ID NO: 297538 - RNA, 19 nt, Homo sapiens
  misc_RNA (1)...(19): siRNA sense strand
acacaaaugguucaaaaga

SEQ ID NO: 297539 - RNA, 19 nt, Homo sapiens
  misc_RNA (1)...(19): siRNA sense strand
gguuuacacaacaucauau

SEQ ID NO: 297540 - RNA, 19 nt, Homo sapiens
  misc_RNA (1)...(19): siRNA sense strand
ugguuuacacaacaucaua

SEQ ID NO: 297541 - RNA, 19 nt, Homo sapiens
  misc_RNA (1)...(19): siRNA sense strand
cgacgacauucuagacauc

SEQ ID NO: 297542 - RNA, 19 nt, Homo sapiens
  misc_RNA (1)...(19): siRNA sense strand
gcgcggaagaagauaaaga

SEQ ID NO: 297543 - RNA, 19 nt, Homo sapiens
  misc_RNA (1)...(19): siRNA sense strand
ggacgacgacauucuagac

SEQ ID NO: 297544 - RNA, 19 nt, Homo sapiens
  misc_RNA (1)...(19): siRNA sense strand
caagccggacgacgacauu

SEQ ID NO: 297545 - RNA, 19 nt, Homo sapiens
  misc_RNA (1)...(19): siRNA sense strand
gccggacgacgacauucua

SEQ ID NO: 297546 - RNA, 19 nt, Homo sapiens
  misc_RNA (1)...(19): siRNA sense strand
caaagccacucuucacuua

SEQ ID NO: 297547 - RNA, 19 nt, Homo sapiens
  misc_RNA (1)...(19): siRNA sense strand
gaagacaucguucucaaua

SEQ ID NO: 297548 - RNA, 19 nt, Homo sapiens
  misc_RNA (1)...(19): siRNA sense strand
ccacagcagugaugccaua

SEQ ID NO: 297549 - RNA, 19 nt, Homo sapiens
  misc_RNA (1)...(19): siRNA sense strand
gaagugggcucugcuuuca

SEQ ID NO: 297550 - RNA, 19 nt, Homo sapiens
  misc_RNA (1)...(19): siRNA sense strand
caacaaagcccagaaggaa

SEQ ID NO: 297551 - RNA, 19 nt, Homo sapiens
  misc_RNA (1)...(19): siRNA sense strand
ucacuuaugucaaugagaa

SEQ ID NO: 297552 - RNA, 19 nt, Homo sapiens
  misc_RNA (1)...(19): siRNA sense strand
cauagugucuuccaccuaa

SEQ ID NO: 297553 - RNA, 19 nt, Homo sapiens
  misc_RNA (1)...(19): siRNA sense strand
gcagugaugccauaacaaa

SEQ ID NO: 297554 - RNA, 19 nt, Homo sapiens
  misc_RNA (1)...(19): siRNA sense strand
gaagacagcagucaugaag

SEQ ID NO: 297555 - RNA, 19 nt, Homo sapiens
  misc_RNA (1)...(19): siRNA sense strand
ggacucgaguggcuuugaa

SEQ ID NO: 297556 - RNA, 19 nt, Homo sapiens
  misc_RNA (1)...(19): siRNA sense strand
gggaacugcugcaaggauu

SEQ ID NO: 297557 - RNA, 19 nt, Homo sapiens
  misc_RNA (1)...(19): siRNA sense strand
ucagagagaucaugaagac

SEQ ID NO: 297558 - RNA, 19 nt, Homo sapiens
  misc_RNA (1)...(19): siRNA sense strand
caacugggacggcuacuau

SEQ ID NO: 297559 - RNA, 19 nt, Homo sapiens
  misc_RNA (1)...(19): siRNA sense strand
ggacggcuacuauaaggaa

SEQ ID NO: 297560 - RNA, 19 nt, Homo sapiens
  misc_RNA (1)...(19): siRNA sense strand
agacagcagucaugaagga

SEQ ID NO: 297561 - RNA, 19 nt, Homo sapiens
  misc_RNA (1)...(19): siRNA sense strand
ggacauauaccugggacaa

SEQ ID NO: 297562 - RNA, 19 nt, Homo sapiens
  misc_RNA (1)...(19): siRNA sense strand
cagcagugaugccauaaca

SEQ ID NO: 297563 - RNA, 19 nt, Homo sapiens
  misc_RNA (1)...(19): siRNA sense strand
ggaagugggcucugcuuuc

SEQ ID NO: 297564 - RNA, 19 nt, Homo sapiens
  misc_RNA (1)...(19): siRNA sense strand
ggagaaggagggucugguu

SEQ ID NO: 297565 - RNA, 19 nt, Homo sapiens
  misc_RNA (1)...(19): siRNA sense strand
cuacgaagccuuugacaag

SEQ ID NO: 297566 - RNA, 19 nt, Homo sapiens
  misc_RNA (1)...(19): siRNA sense strand
gcagcagcccugaguuuga

SEQ ID NO: 297567 - RNA, 19 nt, Homo sapiens
  misc_RNA (1)...(19): siRNA sense strand
ccaccaaugucacugcaau

SEQ ID NO: 297568 - RNA, 19 nt, Homo sapiens
  misc_RNA (1)...(19): siRNA sense strand
ucaucaaccuccucaacaa

SEQ ID NO: 297569 - RNA, 19 nt, Homo sapiens
  misc_RNA (1)...(19): siRNA sense strand
gggcugaggaccacaaaga

SEQ ID NO: 297570 - RNA, 19 nt, Homo sapiens
  misc_RNA (1)...(19): siRNA sense strand
gguuugggcucuauucaag

SEQ ID NO: 297571 - RNA, 19 nt, Homo sapiens
  misc_RNA (1)...(19): siRNA sense strand
agcaagaguuugucgauga

SEQ ID NO: 297572 - RNA, 19 nt, Homo sapiens
  misc_RNA (1)...(19): siRNA sense strand
ggaagacaucguucucaau

SEQ ID NO: 297573 - RNA, 19 nt, Homo sapiens
  misc_RNA (1)...(19): siRNA sense strand
ugacaagcaccaccaaugu

SEQ ID NO: 297574 - RNA, 19 nt, Homo sapiens
  misc_RNA (1)...(19): siRNA sense strand
ucaaccuccucaacaacua

SEQ ID NO: 297575 - RNA, 19 nt, Homo sapiens
  misc_RNA (1)...(19): siRNA sense strand
acucuucacuuaugucaau

SEQ ID NO: 297576 - RNA, 19 nt, Homo sapiens
  misc_RNA (1)...(19): siRNA sense strand
gaaggaagacaucguucuc

SEQ ID NO: 297577 - RNA, 19 nt, Homo sapiens
  misc_RNA (1)...(19): siRNA sense strand
caaagagucagagccauug

SEQ ID NO: 297578 - RNA, 19 nt, Homo sapiens
  misc_RNA (1)...(19): siRNA sense strand
gaccagaaaccaaguggau

SEQ ID NO: 297579 - RNA, 19 nt, Homo sapiens
  misc_RNA (1)...(19): siRNA sense strand
ggaacugcugcaaggauuu

SEQ ID NO: 297580 - RNA, 19 nt, Homo sapiens
  misc_RNA (1)...(19): siRNA sense strand
caagguuacuggcuuccau

SEQ ID NO: 297581 - RNA, 19 nt, Homo sapiens
  misc_RNA (1)...(19): siRNA sense strand
ugaagaacaugugguuugg

SEQ ID NO: 297582 - RNA, 19 nt, Homo sapiens
  misc_RNA (1)...(19): siRNA sense strand
gucgaugacuugaagaaca

SEQ ID NO: 297583 - RNA, 19 nt, Homo sapiens
  misc_RNA (1)...(19): siRNA sense strand
gcaagaguuugucgaugac

SEQ ID NO: 297584 - RNA, 19 nt, Homo sapiens
  misc_RNA (1)...(19): siRNA sense strand
ccaaagccacucuucacuu

SEQ ID NO: 297585 - RNA, 19 nt, Homo sapiens
  misc_RNA (1)...(19): siRNA sense strand
aagaggagauucagagcau

SEQ ID NO: 297586 - RNA, 19 nt, Homo sapiens
  misc_RNA (1)...(19): siRNA sense strand
ccagaaggaagacaucguu

SEQ ID NO: 297587 - RNA, 19 nt, Homo sapiens
  misc_RNA (1)...(19): siRNA sense strand
agggucugguugacuauua

SEQ ID NO: 297588 - RNA, 19 nt, Homo sapiens
  misc_RNA (1)...(19): siRNA sense strand
aggagggucugguugacua

SEQ ID NO: 297589 - RNA, 19 nt, Homo sapiens
  misc_RNA (1)...(19): siRNA sense strand
ucgaguggcuuugaacaug

SEQ ID NO: 297590 - RNA, 19 nt, Homo sapiens
  misc_RNA (1)...(19): siRNA sense strand
guggaucgcugcccaaagc

SEQ ID NO: 297591 - RNA, 19 nt, Homo sapiens
  misc_RNA (1)...(19): siRNA sense strand
cagccuacauagugucuuc

SEQ ID NO: 297592 - RNA, 19 nt, Homo sapiens
  misc_RNA (1)...(19): siRNA sense strand
gaaggagggucugguugac

SEQ ID NO: 297593 - RNA, 19 nt, Homo sapiens
  misc_RNA (1)...(19): siRNA sense strand
cgaguggcuuugaacaugu

SEQ ID NO: 297594 - RNA, 19 nt, Homo sapiens
  misc_RNA (1)...(19): siRNA sense strand
aagccacucuucacuuaug

SEQ ID NO: 297595 - RNA, 19 nt, Homo sapiens
  misc_RNA (1)...(19): siRNA sense strand
ccaacaaagcccagaagga

SEQ ID NO: 297596 - RNA, 19 nt, Homo sapiens
  misc_RNA (1)...(19): siRNA sense strand
ggaauggcaagaaguacau

SEQ ID NO: 297597 - RNA, 19 nt, Homo sapiens
  misc_RNA (1)...(19): siRNA sense strand
acaaagagucagagccauu

SEQ ID NO: 297598 - RNA, 19 nt, Homo sapiens
  misc_RNA (1)...(19): siRNA sense strand
acaaagcccagaaggaaga

SEQ ID NO: 297599 - RNA, 19 nt, Homo sapiens
  misc_RNA (1)...(19): siRNA sense strand
aggaagacaucguucucaa

SEQ ID NO: 297600 - RNA, 19 nt, Homo sapiens
  misc_RNA (1)...(19): siRNA sense strand
caucgccacagccuacaua

SEQ ID NO: 297601 - RNA, 19 nt, Homo sapiens
  misc_RNA (1)...(19): siRNA sense strand
acauauaccugggacaagu

SEQ ID NO: 297602 - RNA, 19 nt, Homo sapiens
  misc_RNA (1)...(19): siRNA sense strand
gcccugaguuugaguuugc

SEQ ID NO: 297603 - RNA, 19 nt, Homo sapiens
  misc_RNA (1)...(19): siRNA sense strand
gcaaugcccgcugccaaga

SEQ ID NO: 297604 - RNA, 19 nt, Homo sapiens
  misc_RNA (1)...(19): siRNA sense strand
agaaggagggucugguuga

SEQ ID NO: 297605 - RNA, 19 nt, Homo sapiens
  misc_RNA (1)...(19): siRNA sense strand
gguauuggccgugcugugu

SEQ ID NO: 297606 - RNA, 19 nt, Homo sapiens
  misc_RNA (1)...(19): siRNA sense strand
cgccacagccuacauagug

SEQ ID NO: 297607 - RNA, 19 nt, Homo sapiens
  misc_RNA (1)...(19): siRNA sense strand
cggcagcagcccugaguuu

SEQ ID NO: 297608 - RNA, 19 nt, Homo sapiens
  misc_RNA (1)...(19): siRNA sense strand
uuugagagccuguguagug

SEQ ID NO: 297609 - RNA, 19 nt, Homo sapiens
  misc_RNA (1)...(19): siRNA sense strand
agacaucguucucaauagc

SEQ ID NO: 297610 - RNA, 19 nt, Homo sapiens
  misc_RNA (1)...(19): siRNA sense strand
gggcagacaccaacaaagc

SEQ ID NO: 297611 - RNA, 19 nt, Homo sapiens
  misc_RNA (1)...(19): siRNA sense strand
gcaaagugugccaguuaag

SEQ ID NO: 297612 - RNA, 19 nt, Homo sapiens
  misc_RNA (1)...(19): siRNA sense strand
gcuacgaagccuuugacaa

SEQ ID NO: 297613 - RNA, 19 nt, Homo sapiens
  misc_RNA (1)...(19): siRNA sense strand
gccacagccuacauagugu

SEQ ID NO: 297614 - RNA, 19 nt, Homo sapiens
  misc_RNA (1)...(19): siRNA sense strand
gggaauggcaagaaguaca

SEQ ID NO: 297615 - RNA, 19 nt, Homo sapiens
  misc_RNA (1)...(19): siRNA sense strand
caaguccaccuaugggaau

SEQ ID NO: 297616 - RNA, 19 nt, Homo sapiens
  misc_RNA (1)...(19): siRNA sense strand
cagcagcccugaguuugag

SEQ ID NO: 297617 - RNA, 19 nt, Homo sapiens
  misc_RNA (1)...(19): siRNA sense strand
gccugcaucucccugguau

SEQ ID NO: 297618 - RNA, 19 nt, Homo sapiens
  misc_RNA (1)...(19): siRNA sense strand
uugaagaacaugugguuug

SEQ ID NO: 297619 - RNA, 19 nt, Homo sapiens
  misc_RNA (1)...(19): siRNA sense strand
ucgaugacuugaagaacau

SEQ ID NO: 297620 - RNA, 19 nt, Homo sapiens
  misc_RNA (1)...(19): siRNA sense strand
guuugucgaugacuugaag

SEQ ID NO: 297621 - RNA, 19 nt, Homo sapiens
  misc_RNA (1)...(19): siRNA sense strand
acaagcaccaccaauguca

SEQ ID NO: 297622 - RNA, 19 nt, Homo sapiens
  misc_RNA (1)...(19): siRNA sense strand
uugagagccuguguaguga

SEQ ID NO: 297623 - RNA, 19 nt, Homo sapiens
  misc_RNA (1)...(19): siRNA sense strand
ccgaugugcuggcaaugca

SEQ ID NO: 297624 - RNA, 19 nt, Homo sapiens
  misc_RNA (1)...(19): siRNA sense strand
uuacuggcuuccauaacug

SEQ ID NO: 297625 - RNA, 19 nt, Homo sapiens
  misc_RNA (1)...(19): siRNA sense strand
uaacaaaagaggagauuca

SEQ ID NO: 297626 - RNA, 19 nt, Homo sapiens
  misc_RNA (1)...(19): siRNA sense strand
cuuugaacaugucuucuca

SEQ ID NO: 297627 - RNA, 19 nt, Homo sapiens
  misc_RNA (1)...(19): siRNA sense strand
cugcaucucccugguauug

SEQ ID NO: 297628 - RNA, 19 nt, Homo sapiens
  misc_RNA (1)...(19): siRNA sense strand
aguuaagccugggaggaua

SEQ ID NO: 297629 - RNA, 19 nt, Homo sapiens
  misc_RNA (1)...(19): siRNA sense strand
cuauuacagucacaucuac

SEQ ID NO: 297630 - RNA, 19 nt, Homo sapiens
  misc_RNA (1)...(19): siRNA sense strand
auaacuggauccgcuucua

SEQ ID NO: 297631 - RNA, 19 nt, Homo sapiens
  misc_RNA (1)...(19): siRNA sense strand
ugaagacagcagucaugaa

SEQ ID NO: 297632 - RNA, 19 nt, Homo sapiens
  misc_RNA (1)...(19): siRNA sense strand
cagggcagacaccaacaaa

SEQ ID NO: 297633 - RNA, 19 nt, Homo sapiens
  misc_RNA (1)...(19): siRNA sense strand
gcugaggaccacaaagagu

SEQ ID NO: 297634 - RNA, 19 nt, Homo sapiens
  misc_RNA (1)...(19): siRNA sense strand
gaacugcugcaaggauuuu

SEQ ID NO: 297635 - RNA, 19 nt, Homo sapiens
  misc_RNA (1)...(19): siRNA sense strand
ggcagcagcccugaguuug

SEQ ID NO: 297636 - RNA, 19 nt, Homo sapiens
  misc_RNA (1)...(19): siRNA sense strand
aagacaucguucucaauag

SEQ ID NO: 297637 - RNA, 19 nt, Homo sapiens
  misc_RNA (1)...(19): siRNA sense strand
acugggacggcuacuauaa

SEQ ID NO: 297638 - RNA, 19 nt, Homo sapiens
  misc_RNA (1)...(19): siRNA sense strand
acuauuacagucacaucua

SEQ ID NO: 297639 - RNA, 19 nt, Homo sapiens
  misc_RNA (1)...(19): siRNA sense strand
gaguggcuuugaacauguc

SEQ ID NO: 297640 - RNA, 19 nt, Homo sapiens
  misc_RNA (1)...(19): siRNA sense strand
ccgcugcuacgaagccuuu

SEQ ID NO: 297641 - RNA, 19 nt, Homo sapiens
  misc_RNA (1)...(19): siRNA sense strand
aagaguuugucgaugacuu

SEQ ID NO: 297642 - RNA, 19 nt, Homo sapiens
  misc_RNA (1)...(19): siRNA sense strand
gagaaacacugcagaaauu

SEQ ID NO: 297643 - RNA, 19 nt, Homo sapiens
  misc_RNA (1)...(19): siRNA sense strand
gaaagagccuccuauguga

SEQ ID NO: 297644 - RNA, 19 nt, Homo sapiens
  misc_RNA (1)...(19): siRNA sense strand
gaagagaaauucauuguca

SEQ ID NO: 297645 - RNA, 19 nt, Homo sapiens
  misc_RNA (1)...(19): siRNA sense strand
gcaauuggcuggaugagaa

SEQ ID NO: 297646 - RNA, 19 nt, Homo sapiens
  misc_RNA (1)...(19): siRNA sense strand
gcauaucucugcacucuuu

SEQ ID NO: 297647 - RNA, 19 nt, Homo sapiens
  misc_RNA (1)...(19): siRNA sense strand
gcacgucccucuuacauau

SEQ ID NO: 297648 - RNA, 19 nt, Homo sapiens
  misc_RNA (1)...(19): siRNA sense strand
gacagaacauuucacguua

SEQ ID NO: 297649 - RNA, 19 nt, Homo sapiens
  misc_RNA (1)...(19): siRNA sense strand
gagaagagcacuccuguuu

SEQ ID NO: 297650 - RNA, 19 nt, Homo sapiens
  misc_RNA (1)...(19): siRNA sense strand
gaacuacaguaacuugauu

SEQ ID NO: 297651 - RNA, 19 nt, Homo sapiens
  misc_RNA (1)...(19): siRNA sense strand
gaacagcagcgguuuaauu

SEQ ID NO: 297652 - RNA, 19 nt, Homo sapiens
  misc_RNA (1)...(19): siRNA sense strand
gcagaaaucuacuuguaug

SEQ ID NO: 297653 - RNA, 19 nt, Homo sapiens
  misc_RNA (1)...(19): siRNA sense strand
ggaaauacaugagaucaau

SEQ ID NO: 297654 - RNA, 19 nt, Homo sapiens
  misc_RNA (1)...(19): siRNA sense strand
cagcagaaaucuacuugua

SEQ ID NO: 297655 - RNA, 19 nt, Homo sapiens
  misc_RNA (1)...(19): siRNA sense strand
acacaauacuggcuaauaa

SEQ ID NO: 297656 - RNA, 19 nt, Homo sapiens
  misc_RNA (1)...(19): siRNA sense strand
gaacgcaauggcuauauua

SEQ ID NO: 297657 - RNA, 19 nt, Homo sapiens
  misc_RNA (1)...(19): siRNA sense strand
ggaaugaaguugauaagca

SEQ ID NO: 297658 - RNA, 19 nt, Homo sapiens
  misc_RNA (1)...(19): siRNA sense strand
gcagguuacuuacuguaua

SEQ ID NO: 297659 - RNA, 19 nt, Homo sapiens
  misc_RNA (1)...(19): siRNA sense strand
ucaauaggcuccagagauu

SEQ ID NO: 297660 - RNA, 19 nt, Homo sapiens
  misc_RNA (1)...(19): siRNA sense strand
gauaaacgcuuucgaucug

SEQ ID NO: 297661 - RNA, 19 nt, Homo sapiens
  misc_RNA (1)...(19): siRNA sense strand
guucauugcugucuacuuu

SEQ ID NO: 297662 - RNA, 19 nt, Homo sapiens
  misc_RNA (1)...(19): siRNA sense strand
ucaaagaacuucaagaaag

SEQ ID NO: 297663 - RNA, 19 nt, Homo sapiens
  misc_RNA (1)...(19): siRNA sense strand
gaagagcacuccuguuucu

SEQ ID NO: 297664 - RNA, 19 nt, Homo sapiens
  misc_RNA (1)...(19): siRNA sense strand
gaacagcacccuucccaaa

SEQ ID NO: 297665 - RNA, 19 nt, Homo sapiens
  misc_RNA (1)...(19): siRNA sense strand
gagagaaacuucauugucu

SEQ ID NO: 297666 - RNA, 19 nt, Homo sapiens
  misc_RNA (1)...(19): siRNA sense strand
gagauuguccuguuguuua

SEQ ID NO: 297667 - RNA, 19 nt, Homo sapiens
  misc_RNA (1)...(19): siRNA sense strand
caaagacaguguugaauca

SEQ ID NO: 297668 - RNA, 19 nt, Homo sapiens
  misc_RNA (1)...(19): siRNA sense strand
gcauuucggucauauuuga

SEQ ID NO: 297669 - RNA, 19 nt, Homo sapiens
  misc_RNA (1)...(19): siRNA sense strand
ggacagaacauuucacguu

SEQ ID NO: 297670 - RNA, 19 nt, Homo sapiens
  misc_RNA (1)...(19): siRNA sense strand
gaucuacgguuaaacauca

SEQ ID NO: 297671 - RNA, 19 nt, Homo sapiens
  misc_RNA (1)...(19): siRNA sense strand
ugacaggaguugcagauaa

SEQ ID NO: 297672 - RNA, 19 nt, Homo sapiens
  misc_RNA (1)...(19): siRNA sense strand
gaacgaauaaacccaagua

SEQ ID NO: 297673 - RNA, 19 nt, Homo sapiens
  misc_RNA (1)...(19): siRNA sense strand
caacauaacagcuaauuuc

SEQ ID NO: 297674 - RNA, 19 nt, Homo sapiens
  misc_RNA (1)...(19): siRNA sense strand
gagagaggguuauugcauu

SEQ ID NO: 297675 - RNA, 19 nt, Homo sapiens
  misc_RNA (1)...(19): siRNA sense strand
caucaacacuuuccuccua

SEQ ID NO: 297676 - RNA, 19 nt, Homo sapiens
  misc_RNA (1)...(19): siRNA sense strand
gaaacuucauugucucuga

SEQ ID NO: 297677 - RNA, 19 nt, Homo sapiens
  misc_RNA (1)...(19): siRNA sense strand
ggaauugcacuuauuacua

SEQ ID NO: 297678 - RNA, 19 nt, Homo sapiens
  misc_RNA (1)...(19): siRNA sense strand
gaaaacaccucaucgauca

SEQ ID NO: 297679 - RNA, 19 nt, Homo sapiens
  misc_RNA (1)...(19): siRNA sense strand
uacaaucccugugcaauua

SEQ ID NO: 297680 - RNA, 19 nt, Homo sapiens
  misc_RNA (1)...(19): siRNA sense strand
ucaaccagcucuucagaaa

SEQ ID NO: 297681 - RNA, 19 nt, Homo sapiens
  misc_RNA (1)...(19): siRNA sense strand
ggaacgcaauggcuauauu

SEQ ID NO: 297682 - RNA, 19 nt, Homo sapiens
  misc_RNA (1)...(19): siRNA sense strand
uugcuuagcucucuucuuu

SEQ ID NO: 297683 - RNA, 19 nt, Homo sapiens
  misc_RNA (1)...(19): siRNA sense strand
gagguagcaucaacacuuu

SEQ ID NO: 297684 - RNA, 19 nt, Homo sapiens
  misc_RNA (1)...(19): siRNA sense strand
ccacuguacuguauccaua

SEQ ID NO: 297685 - RNA, 19 nt, Homo sapiens
  misc_RNA (1)...(19): siRNA sense strand
gaagaaggcccguguaguc

SEQ ID NO: 297686 - RNA, 19 nt, Homo sapiens
  misc_RNA (1)...(19): siRNA sense strand
gagccugaguucuuuauug

SEQ ID NO: 297687 - RNA, 19 nt, Homo sapiens
  misc_RNA (1)...(19): siRNA sense strand
gaggauaugcacucuauuu

SEQ ID NO: 297688 - RNA, 19 nt, Homo sapiens
  misc_RNA (1)...(19): siRNA sense strand
ucgccuagcugguauuuaa

SEQ ID NO: 297689 - RNA, 19 nt, Homo sapiens
  misc_RNA (1)...(19): siRNA sense strand
caacuuagaggaacuguga

SEQ ID NO: 297690 - RNA, 19 nt, Homo sapiens
  misc_RNA (1)...(19): siRNA sense strand
ggacagcguuuucugauaa

SEQ ID NO: 297691 - RNA, 19 nt, Homo sapiens
  misc_RNA (1)...(19): siRNA sense strand
gcacaguguuggugaaauc

SEQ ID NO: 297692 - RNA, 19 nt, Homo sapiens
  misc_RNA (1)...(19): siRNA sense strand
cauaacagcuaauuucaca

SEQ ID NO: 297693 - RNA, 19 nt, Homo sapiens
  misc_RNA (1)...(19): siRNA sense strand
gaaaaugguuuaccuuguu

SEQ ID NO: 297694 - RNA, 19 nt, Homo sapiens
  misc_RNA (1)...(19): siRNA sense strand
gaauggaacuacaguaacu

SEQ ID NO: 297695 - RNA, 19 nt, Homo sapiens
  misc_RNA (1)...(19): siRNA sense strand
ucagguagaucacauuaug

SEQ ID NO: 297696 - RNA, 19 nt, Homo sapiens
  misc_RNA (1)...(19): siRNA sense strand
gcucaaagaacuucaagaa

SEQ ID NO: 297697 - RNA, 19 nt, Homo sapiens
  misc_RNA (1)...(19): siRNA sense strand
ugacuaagcuggaagacau

SEQ ID NO: 297698 - RNA, 19 nt, Homo sapiens
  misc_RNA (1)...(19): siRNA sense strand
ggucaaccaaguauaaaua

SEQ ID NO: 297699 - RNA, 19 nt, Homo sapiens
  misc_RNA (1)...(19): siRNA sense strand
gaaaguggcaugcuuacga

SEQ ID NO: 297700 - RNA, 19 nt, Homo sapiens
  misc_RNA (1)...(19): siRNA sense strand
gguagaaauuggccaggua

SEQ ID NO: 297701 - RNA, 19 nt, Homo sapiens
  misc_RNA (1)...(19): siRNA sense strand
gaggauacaugaccagauc

SEQ ID NO: 297702 - RNA, 19 nt, Homo sapiens
  misc_RNA (1)...(19): siRNA sense strand
uggaagcaaugaccuauuu

SEQ ID NO: 297703 - RNA, 19 nt, Homo sapiens
  misc_RNA (1)...(19): siRNA sense strand
gaaagaagaggaucaagag

SEQ ID NO: 297704 - RNA, 19 nt, Homo sapiens
  misc_RNA (1)...(19): siRNA sense strand
guggugagaugcuauuuga

SEQ ID NO: 297705 - RNA, 19 nt, Homo sapiens
  misc_RNA (1)...(19): siRNA sense strand
ccacagaucccagaaacua

SEQ ID NO: 297706 - RNA, 19 nt, Homo sapiens
  misc_RNA (1)...(19): siRNA sense strand
cauugucucugauagauuu

SEQ ID NO: 297707 - RNA, 19 nt, Homo sapiens
  misc_RNA (1)...(19): siRNA sense strand
ugaagcagcccguguauga

SEQ ID NO: 297708 - RNA, 19 nt, Homo sapiens
  misc_RNA (1)...(19): siRNA sense strand
caacuuauuucaggcugua

SEQ ID NO: 297709 - RNA, 19 nt, Homo sapiens
  misc_RNA (1)...(19): siRNA sense strand
gcccuucuguugauccuua

SEQ ID NO: 297710 - RNA, 19 nt, Homo sapiens
  misc_RNA (1)...(19): siRNA sense strand
cauagaagaugaucaggau

SEQ ID NO: 297711 - RNA, 19 nt, Homo sapiens
  misc_RNA (1)...(19): siRNA sense strand
gaaauggaccagcaucuuc

SEQ ID NO: 297712 - RNA, 19 nt, Homo sapiens
  misc_RNA (1)...(19): siRNA sense strand
ugaaucaguuacucaguuu

SEQ ID NO: 297713 - RNA, 19 nt, Homo sapiens
  misc_RNA (1)...(19): siRNA sense strand
ccacguguauuucuucaga

SEQ ID NO: 297714 - RNA, 19 nt, Homo sapiens
  misc_RNA (1)...(19): siRNA sense strand
gaccagggccaaugucuuu

SEQ ID NO: 297715 - RNA, 19 nt, Homo sapiens
  misc_RNA (1)...(19): siRNA sense strand
gaauggugcuuaucugucu

SEQ ID NO: 297716 - RNA, 19 nt, Homo sapiens
  misc_RNA (1)...(19): siRNA sense strand
uauguuggcuagucaauau

SEQ ID NO: 297717 - RNA, 19 nt, Homo sapiens
  misc_RNA (1)...(19): siRNA sense strand
gagaguaccaauggauuua

SEQ ID NO: 297718 - RNA, 19 nt, Homo sapiens
  misc_RNA (1)...(19): siRNA sense strand
gcacugggaagaauacuug

SEQ ID NO: 297719 - RNA, 19 nt, Homo sapiens
  misc_RNA (1)...(19): siRNA sense strand
gcuaaaggaauugcacuua

SEQ ID NO: 297720 - RNA, 19 nt, Homo sapiens
  misc_RNA (1)...(19): siRNA sense strand
cagaaaagcuucagcagaa

SEQ ID NO: 297721 - RNA, 19 nt, Homo sapiens
  misc_RNA (1)...(19): siRNA sense strand
cgcaauggcuauauuauuc

SEQ ID NO: 297722 - RNA, 19 nt, Homo sapiens
  misc_RNA (1)...(19): siRNA sense strand
ugaccugaauccaacauuu

SEQ ID NO: 297723 - RNA, 19 nt, Homo sapiens
  misc_RNA (1)...(19): siRNA sense strand
uacagaagaugaaaucaga

SEQ ID NO: 297724 - RNA, 19 nt, Homo sapiens
  misc_RNA (1)...(19): siRNA sense strand
caaacugagucaagagaga

SEQ ID NO: 297725 - RNA, 19 nt, Homo sapiens
  misc_RNA (1)...(19): siRNA sense strand
cacaugugguucucuauuu

SEQ ID NO: 297726 - RNA, 19 nt, Homo sapiens
  misc_RNA (1)...(19): siRNA sense strand
ccagcgacgugcauuguuu

SEQ ID NO: 297727 - RNA, 19 nt, Homo sapiens
  misc_RNA (1)...(19): siRNA sense strand
cuaaaggaauugcacuuau

SEQ ID NO: 297728 - RNA, 19 nt, Homo sapiens
  misc_RNA (1)...(19): siRNA sense strand
gacaagcuagugagaauuu

SEQ ID NO: 297729 - RNA, 19 nt, Homo sapiens
  misc_RNA (1)...(19): siRNA sense strand
gaacuucaagaaagcaauu

SEQ ID NO: 297730 - RNA, 19 nt, Homo sapiens
  misc_RNA (1)...(19): siRNA sense strand
cagaagaaaugcagaggau

SEQ ID NO: 297731 - RNA, 19 nt, Homo sapiens
  misc_RNA (1)...(19): siRNA sense strand
gagaucagguuggauggaa

SEQ ID NO: 297732 - RNA, 19 nt, Homo sapiens
  misc_RNA (1)...(19): siRNA sense strand
gagaggaaauacaugagau

SEQ ID NO: 297733 - RNA, 19 nt, Homo sapiens
  misc_RNA (1)...(19): siRNA sense strand
ggugagaugcuauuugauu

SEQ ID NO: 297734 - RNA, 19 nt, Homo sapiens
  misc_RNA (1)...(19): siRNA sense strand
gaagaacagccaccguuau

SEQ ID NO: 297735 - RNA, 19 nt, Homo sapiens
  misc_RNA (1)...(19): siRNA sense strand
ggucauauuugaagucucu

SEQ ID NO: 297736 - RNA, 19 nt, Homo sapiens
  misc_RNA (1)...(19): siRNA sense strand
guaccaauggauuuacuua

SEQ ID NO: 297737 - RNA, 19 nt, Homo sapiens
  misc_RNA (1)...(19): siRNA sense strand
gugcagccaucuaaaauua

SEQ ID NO: 297738 - RNA, 19 nt, Homo sapiens
  misc_RNA (1)...(19): siRNA sense strand
gaagacgacagguggguuu

SEQ ID NO: 297739 - RNA, 19 nt, Homo sapiens
  misc_RNA (1)...(19): siRNA sense strand
uagcauauccucauucuuc

SEQ ID NO: 297740 - RNA, 19 nt, Homo sapiens
  misc_RNA (1)...(19): siRNA sense strand
agaaagagccuccuaugug

SEQ ID NO: 297741 - RNA, 19 nt, Homo sapiens
  misc_RNA (1)...(19): siRNA sense strand
ucaauagaauggcucuuug

SEQ ID NO: 297742 - RNA, 19 nt, Homo sapiens
  misc_RNA (1)...(19): siRNA sense strand
ccaaugaccuagaagauaa

SEQ ID NO: 297743 - RNA, 19 nt, Homo sapiens
  misc_RNA (1)...(19): siRNA sense strand
aaacaguccuuucuacuau

SEQ ID NO: 297744 - RNA, 19 nt, Homo sapiens
  misc_RNA (1)...(19): siRNA sense strand
ggacgccaaugaccuagaa

SEQ ID NO: 297745 - RNA, 19 nt, Homo sapiens
  misc_RNA (1)...(19): siRNA sense strand
gccaaugaccuagaagaua

SEQ ID NO: 297746 - RNA, 19 nt, Homo sapiens
  misc_RNA (1)...(19): siRNA sense strand
acaguccuuucuacuauga

SEQ ID NO: 297747 - RNA, 19 nt, Homo sapiens
  misc_RNA (1)...(19): siRNA sense strand
caaugaccuagaagauaaa

SEQ ID NO: 297748 - RNA, 19 nt, Homo sapiens
  misc_RNA (1)...(19): siRNA sense strand
aaaacaguccuuucuacua

SEQ ID NO: 297749 - RNA, 19 nt, Homo sapiens
  misc_RNA (1)...(19): siRNA sense strand
gcaaguuuggccagaaguc

SEQ ID NO: 297750 - RNA, 19 nt, Homo sapiens
  misc_RNA (1)...(19): siRNA sense strand
gggcaucaucaucgucaug

SEQ ID NO: 297751 - RNA, 19 nt, Homo sapiens
  misc_RNA (1)...(19): siRNA sense strand
ccaaugaccuagaagauaa

SEQ ID NO: 297752 - RNA, 19 nt, Homo sapiens
  misc_RNA (1)...(19): siRNA sense strand
aaacaguccuuucuacuau

SEQ ID NO: 297753 - RNA, 19 nt, Homo sapiens
  misc_RNA (1)...(19): siRNA sense strand
ggacgccaaugaccuagaa

SEQ ID NO: 297754 - RNA, 19 nt, Homo sapiens
  misc_RNA (1)...(19): siRNA sense strand
gccaaugaccuagaagaua

SEQ ID NO: 297755 - RNA, 19 nt, Homo sapiens
  misc_RNA (1)...(19): siRNA sense strand
acaguccuuucuacuauga

SEQ ID NO: 297756 - RNA, 19 nt, Homo sapiens
  misc_RNA (1)...(19): siRNA sense strand
caaugaccuagaagauaaa

SEQ ID NO: 297757 - RNA, 19 nt, Homo sapiens
  misc_RNA (1)...(19): siRNA sense strand
aaaacaguccuuucuacua

SEQ ID NO: 297758 - RNA, 19 nt, Homo sapiens
  misc_RNA (1)...(19): siRNA sense strand
gcaaguuuggccagaaguc

SEQ ID NO: 297759 - RNA, 19 nt, Homo sapiens
  misc_RNA (1)...(19): siRNA sense strand
gggcaucaucaucgucaug

SEQ ID NO: 297760 - RNA, 19 nt, Homo sapiens
  misc_RNA (1)...(19): siRNA sense strand
gaaacccucucaauaacua

SEQ ID NO: 297761 - RNA, 19 nt, Homo sapiens
  misc_RNA (1)...(19): siRNA sense strand
guaagaagcugaagauuuu

SEQ ID NO: 297762 - RNA, 19 nt, Homo sapiens
  misc_RNA (1)...(19): siRNA sense strand
ggaauuccaucuccauauc

SEQ ID NO: 297763 - RNA, 19 nt, Homo sapiens
  misc_RNA (1)...(19): siRNA sense strand
gaaagugaagcgaaagaaa

SEQ ID NO: 297764 - RNA, 19 nt, Homo sapiens
  misc_RNA (1)...(19): siRNA sense strand
gaaggugccugugaugaau

SEQ ID NO: 297765 - RNA, 19 nt, Homo sapiens
  misc_RNA (1)...(19): siRNA sense strand
guacuacgccugugcugua

SEQ ID NO: 297766 - RNA, 19 nt, Homo sapiens
  misc_RNA (1)...(19): siRNA sense strand
gcaaugcccaugcaggaua

SEQ ID NO: 297767 - RNA, 19 nt, Homo sapiens
  misc_RNA (1)...(19): siRNA sense strand
ccaugcaucuuccuacauu

SEQ ID NO: 297768 - RNA, 19 nt, Homo sapiens
  misc_RNA (1)...(19): siRNA sense strand
gggccagucuguacucauu

SEQ ID NO: 297769 - RNA, 19 nt, Homo sapiens
  misc_RNA (1)...(19): siRNA sense strand
ggaaggugccugugaugaa

SEQ ID NO: 297770 - RNA, 19 nt, Homo sapiens
  misc_RNA (1)...(19): siRNA sense strand
ucagggaguugcuguguga

SEQ ID NO: 297771 - RNA, 19 nt, Homo sapiens
  misc_RNA (1)...(19): siRNA sense strand
caaggaaggugccugugau

SEQ ID NO: 297772 - RNA, 19 nt, Homo sapiens
  misc_RNA (1)...(19): siRNA sense strand
cuaaguguccugagucuaa

SEQ ID NO: 297773 - RNA, 19 nt, Homo sapiens
  misc_RNA (1)...(19): siRNA sense strand
gugaugaauuguucuccua

SEQ ID NO: 297774 - RNA, 19 nt, Homo sapiens
  misc_RNA (1)...(19): siRNA sense strand
gcucccagcuuacaaccuu

SEQ ID NO: 297775 - RNA, 19 nt, Homo sapiens
  misc_RNA (1)...(19): siRNA sense strand
auaacuaacugccggcuuu

SEQ ID NO: 297776 - RNA, 19 nt, Homo sapiens
  misc_RNA (1)...(19): siRNA sense strand
uguaagaagcugaagauuu

SEQ ID NO: 297777 - RNA, 19 nt, Homo sapiens
  misc_RNA (1)...(19): siRNA sense strand
ggacucuauugaagauuug

SEQ ID NO: 297778 - RNA, 19 nt, Homo sapiens
  misc_RNA (1)...(19): siRNA sense strand
uuggaaacccucucaauaa

SEQ ID NO: 297779 - RNA, 19 nt, Homo sapiens
  misc_RNA (1)...(19): siRNA sense strand
cagcuggacucuauugaag

SEQ ID NO: 297780 - RNA, 19 nt, Homo sapiens
  misc_RNA (1)...(19): siRNA sense strand
gcagagcagcccuucauuc

SEQ ID NO: 297781 - RNA, 19 nt, Homo sapiens
  misc_RNA (1)...(19): siRNA sense strand
caguagaggugcucguaga

SEQ ID NO: 297782 - RNA, 19 nt, Homo sapiens
  misc_RNA (1)...(19): siRNA sense strand
gcuggacucuauugaagau

SEQ ID NO: 297783 - RNA, 19 nt, Homo sapiens
  misc_RNA (1)...(19): siRNA sense strand
cuauguggacucuuuauuu

SEQ ID NO: 297784 - RNA, 19 nt, Homo sapiens
  misc_RNA (1)...(19): siRNA sense strand
gagaaggaagagcaguaua

SEQ ID NO: 297785 - RNA, 19 nt, Homo sapiens
  misc_RNA (1)...(19): siRNA sense strand
gaaggaagagcaguauauc

SEQ ID NO: 297786 - RNA, 19 nt, Homo sapiens
  misc_RNA (1)...(19): siRNA sense strand
gggaguugcugugugaguu

SEQ ID NO: 297787 - RNA, 19 nt, Homo sapiens
  misc_RNA (1)...(19): siRNA sense strand
gaacucucaucaggacuuc

SEQ ID NO: 297788 - RNA, 19 nt, Homo sapiens
  misc_RNA (1)...(19): siRNA sense strand
uggacucuauugaagauuu

SEQ ID NO: 297789 - RNA, 19 nt, Homo sapiens
  misc_RNA (1)...(19): siRNA sense strand
gcagcuggacucuauugaa

SEQ ID NO: 297790 - RNA, 19 nt, Homo sapiens
  misc_RNA (1)...(19): siRNA sense strand
cccaggagguggaaacuuc

SEQ ID NO: 297791 - RNA, 19 nt, Homo sapiens
  misc_RNA (1)...(19): siRNA sense strand
cuuggaaacccucucaaua

SEQ ID NO: 297792 - RNA, 19 nt, Homo sapiens
  misc_RNA (1)...(19): siRNA sense strand
ggagaaggaagagcaguau

SEQ ID NO: 297793 - RNA, 19 nt, Homo sapiens
  misc_RNA (1)...(19): siRNA sense strand
gagaaagugaagcgaaaga

SEQ ID NO: 297794 - RNA, 19 nt, Homo sapiens
  misc_RNA (1)...(19): siRNA sense strand
agaaggaagagcaguauau

SEQ ID NO: 297795 - RNA, 19 nt, Homo sapiens
  misc_RNA (1)...(19): siRNA sense strand
cuacgccugugcuguaaga

SEQ ID NO: 297796 - RNA, 19 nt, Homo sapiens
  misc_RNA (1)...(19): siRNA sense strand
caaugcccaugcaggauau

SEQ ID NO: 297797 - RNA, 19 nt, Homo sapiens
  misc_RNA (1)...(19): siRNA sense strand
caggacuucuggacuguau

SEQ ID NO: 297798 - RNA, 19 nt, Homo sapiens
  misc_RNA (1)...(19): siRNA sense strand
ggagaguuaugaggacauc

SEQ ID NO: 297799 - RNA, 19 nt, Homo sapiens
  misc_RNA (1)...(19): siRNA sense strand
gggaauuccaucuccauau

SEQ ID NO: 297800 - RNA, 19 nt, Homo sapiens
  misc_RNA (1)...(19): siRNA sense strand
gccagacccugaaggcaau

SEQ ID NO: 297801 - RNA, 19 nt, Homo sapiens
  misc_RNA (1)...(19): siRNA sense strand
ucaaggaaggugccuguga

SEQ ID NO: 297802 - RNA, 19 nt, Homo sapiens
  misc_RNA (1)...(19): siRNA sense strand
ccaguucaccucucaguuc

SEQ ID NO: 297803 - RNA, 19 nt, Homo sapiens
  misc_RNA (1)...(19): siRNA sense strand
ccuggaagcuacccaccuu

SEQ ID NO: 297804 - RNA, 19 nt, Homo sapiens
  misc_RNA (1)...(19): siRNA sense strand
uugagaaagugaagcgaaa

SEQ ID NO: 297805 - RNA, 19 nt, Homo sapiens
  misc_RNA (1)...(19): siRNA sense strand
uaugaggacauccauggua

SEQ ID NO: 297806 - RNA, 19 nt, Homo sapiens
  misc_RNA (1)...(19): siRNA sense strand
gcuguaagaagcugaagau

SEQ ID NO: 297807 - RNA, 19 nt, Homo sapiens
  misc_RNA (1)...(19): siRNA sense strand
uggaaacccucucaauaac

SEQ ID NO: 297808 - RNA, 19 nt, Homo sapiens
  misc_RNA (1)...(19): siRNA sense strand
gaugauuaaucugcguaga

SEQ ID NO: 297809 - RNA, 19 nt, Homo sapiens
  misc_RNA (1)...(19): siRNA sense strand
uauugaagauuuggaagug

SEQ ID NO: 297810 - RNA, 19 nt, Homo sapiens
  misc_RNA (1)...(19): siRNA sense strand
auucagagccgauacauca

SEQ ID NO: 297811 - RNA, 19 nt, Homo sapiens
  misc_RNA (1)...(19): siRNA sense strand
gugcuggauuuacggaaga

SEQ ID NO: 297812 - RNA, 19 nt, Homo sapiens
  misc_RNA (1)...(19): siRNA sense strand
uggugcagcuggacucuau

SEQ ID NO: 297813 - RNA, 19 nt, Homo sapiens
  misc_RNA (1)...(19): siRNA sense strand
agccacugcucccagcuua

SEQ ID NO: 297814 - RNA, 19 nt, Homo sapiens
  misc_RNA (1)...(19): siRNA sense strand
gccagucuguacucauuuc

SEQ ID NO: 297815 - RNA, 19 nt, Homo sapiens
  misc_RNA (1)...(19): siRNA sense strand
ggaaacccucucaauaacu

SEQ ID NO: 297816 - RNA, 19 nt, Homo sapiens
  misc_RNA (1)...(19): siRNA sense strand
ggaguugcugugugaguug

SEQ ID NO: 297817 - RNA, 19 nt, Homo sapiens
  misc_RNA (1)...(19): siRNA sense strand
agugugggaucacggauga

SEQ ID NO: 297818 - RNA, 19 nt, Homo sapiens
  misc_RNA (1)...(19): siRNA sense strand
caugcaggauaucaagaug

SEQ ID NO: 297819 - RNA, 19 nt, Homo sapiens
  misc_RNA (1)...(19): siRNA sense strand
ucguagaccuguuccucaa

SEQ ID NO: 297820 - RNA, 19 nt, Homo sapiens
  misc_RNA (1)...(19): siRNA sense strand
ggacuucuggacuguaugg

SEQ ID NO: 297821 - RNA, 19 nt, Homo sapiens
  misc_RNA (1)...(19): siRNA sense strand
agagccugcugaaggauga

SEQ ID NO: 297822 - RNA, 19 nt, Homo sapiens
  misc_RNA (1)...(19): siRNA sense strand
gcucuucccgccacucuuc

SEQ ID NO: 297823 - RNA, 19 nt, Homo sapiens
  misc_RNA (1)...(19): siRNA sense strand
caaagaagcgaaaaguaga

SEQ ID NO: 297824 - RNA, 19 nt, Homo sapiens
  misc_RNA (1)...(19): siRNA sense strand
ccugcaggcucucuaugug

SEQ ID NO: 297825 - RNA, 19 nt, Homo sapiens
  misc_RNA (1)...(19): siRNA sense strand
cggagaaggaagagcagua

SEQ ID NO: 297826 - RNA, 19 nt, Homo sapiens
  misc_RNA (1)...(19): siRNA sense strand
ucaagaugauccugaaaau

SEQ ID NO: 297827 - RNA, 19 nt, Homo sapiens
  misc_RNA (1)...(19): siRNA sense strand
caugcaucuuccuacauuu

SEQ ID NO: 297828 - RNA, 19 nt, Homo sapiens
  misc_RNA (1)...(19): siRNA sense strand
gcaugaguguguggacaag

SEQ ID NO: 297829 - RNA, 19 nt, Homo sapiens
  misc_RNA (1)...(19): siRNA sense strand
gacaaagaagcgaaaagua

SEQ ID NO: 297830 - RNA, 19 nt, Homo sapiens
  misc_RNA (1)...(19): siRNA sense strand
uuacaaccuuaagcuucua

SEQ ID NO: 297831 - RNA, 19 nt, Homo sapiens
  misc_RNA (1)...(19): siRNA sense strand
cagcgucagucagcuaagu

SEQ ID NO: 297832 - RNA, 19 nt, Homo sapiens
  misc_RNA (1)...(19): siRNA sense strand
agcaguauaucgcccaguu

SEQ ID NO: 297833 - RNA, 19 nt, Homo sapiens
  misc_RNA (1)...(19): siRNA sense strand
ugauuaaucugcguagacu

SEQ ID NO: 297834 - RNA, 19 nt, Homo sapiens
  misc_RNA (1)...(19): siRNA sense strand
cuacccaccuuggcgaaau

SEQ ID NO: 297835 - RNA, 19 nt, Homo sapiens
  misc_RNA (1)...(19): siRNA sense strand
ggacuguauggucuggaaa

SEQ ID NO: 297836 - RNA, 19 nt, Homo sapiens
  misc_RNA (1)...(19): siRNA sense strand
gugcagcuggacucuauug

SEQ ID NO: 297837 - RNA, 19 nt, Homo sapiens
  misc_RNA (1)...(19): siRNA sense strand
agcauggucuggcuuagug

SEQ ID NO: 297838 - RNA, 19 nt, Homo sapiens
  misc_RNA (1)...(19): siRNA sense strand
ccucucaguuccucagucu

SEQ ID NO: 297839 - RNA, 19 nt, Homo sapiens
  misc_RNA (1)...(19): siRNA sense strand
ccucugggagugcugauga

SEQ ID NO: 297840 - RNA, 19 nt, Homo sapiens
  misc_RNA (1)...(19): siRNA sense strand
caguauaucgcccaguuca

SEQ ID NO: 297841 - RNA, 19 nt, Homo sapiens
  misc_RNA (1)...(19): siRNA sense strand
uacccaccuuggcgaaauu

SEQ ID NO: 297842 - RNA, 19 nt, Homo sapiens
  misc_RNA (1)...(19): siRNA sense strand
uggacuguauggucuggaa

SEQ ID NO: 297843 - RNA, 19 nt, Homo sapiens
  misc_RNA (1)...(19): siRNA sense strand
gcccuucauuccaguagag

SEQ ID NO: 297844 - RNA, 19 nt, Homo sapiens
  misc_RNA (1)...(19): siRNA sense strand
uacaucagcaugagugugu

SEQ ID NO: 297845 - RNA, 19 nt, Homo sapiens
  misc_RNA (1)...(19): siRNA sense strand
ugccugugaugaauuguuc

SEQ ID NO: 297846 - RNA, 19 nt, Homo sapiens
  misc_RNA (1)...(19): siRNA sense strand
uagaugguuugagcacaga

SEQ ID NO: 297847 - RNA, 19 nt, Homo sapiens
  misc_RNA (1)...(19): siRNA sense strand
gcucagggaguugcugugu

SEQ ID NO: 297848 - RNA, 19 nt, Homo sapiens
  misc_RNA (1)...(19): siRNA sense strand
uaaguguccugagucuaag

SEQ ID NO: 297849 - RNA, 19 nt, Homo sapiens
  misc_RNA (1)...(19): siRNA sense strand
gcaguauaucgcccaguuc

SEQ ID NO: 297850 - RNA, 19 nt, Homo sapiens
  misc_RNA (1)...(19): siRNA sense strand
uacuacgccugugcuguaa

SEQ ID NO: 297851 - RNA, 19 nt, Homo sapiens
  misc_RNA (1)...(19): siRNA sense strand
aaagugaagcgaaagaaaa

SEQ ID NO: 297852 - RNA, 19 nt, Homo sapiens
  misc_RNA (1)...(19): siRNA sense strand
gaaaugaaccuaaggaauu

SEQ ID NO: 297853 - RNA, 19 nt, Homo sapiens
  misc_RNA (1)...(19): siRNA sense strand
uaucgaagcugaugaagua

SEQ ID NO: 297854 - RNA, 19 nt, Homo sapiens
  misc_RNA (1)...(19): siRNA sense strand
uaacuucgcugcuuucauu

SEQ ID NO: 297855 - RNA, 19 nt, Homo sapiens
  misc_RNA (1)...(19): siRNA sense strand
caaauuauauugccagaga

SEQ ID NO: 297856 - RNA, 19 nt, Homo sapiens
  misc_RNA (1)...(19): siRNA sense strand
gagaauggauccaccacua

SEQ ID NO: 297857 - RNA, 19 nt, Homo sapiens
  misc_RNA (1)...(19): siRNA sense strand
caagacaccuucauggaaa

SEQ ID NO: 297858 - RNA, 19 nt, Homo sapiens
  misc_RNA (1)...(19): siRNA sense strand
gacaacaucuuccgaaaug

SEQ ID NO: 297859 - RNA, 19 nt, Homo sapiens
  misc_RNA (1)...(19): siRNA sense strand
aaaaggacaugcacuauua

SEQ ID NO: 297860 - RNA, 19 nt, Homo sapiens
  misc_RNA (1)...(19): siRNA sense strand
caugaggucuauuaucuuu

SEQ ID NO: 297861 - RNA, 19 nt, Homo sapiens
  misc_RNA (1)...(19): siRNA sense strand
gggaugaaacccucuauaa

SEQ ID NO: 297862 - RNA, 19 nt, Homo sapiens
  misc_RNA (1)...(19): siRNA sense strand
gcaagacaccuucauggaa

SEQ ID NO: 297863 - RNA, 19 nt, Homo sapiens
  misc_RNA (1)...(19): siRNA sense strand
ccaaagcagugucuucuca

SEQ ID NO: 297864 - RNA, 19 nt, Homo sapiens
  misc_RNA (1)...(19): siRNA sense strand
caaauacagccaugaagaa

SEQ ID NO: 297865 - RNA, 19 nt, Homo sapiens
  misc_RNA (1)...(19): siRNA sense strand
gcaacauuauuaagcaguu

SEQ ID NO: 297866 - RNA, 19 nt, Homo sapiens
  misc_RNA (1)...(19): siRNA sense strand
ggacaugcacuauuaccaa

SEQ ID NO: 297867 - RNA, 19 nt, Homo sapiens
  misc_RNA (1)...(19): siRNA sense strand
gaugaaacccucuauaagg

SEQ ID NO: 297868 - RNA, 19 nt, Homo sapiens
  misc_RNA (1)...(19): siRNA sense strand
ggaaaugaaccuaaggaau

SEQ ID NO: 297869 - RNA, 19 nt, Homo sapiens
  misc_RNA (1)...(19): siRNA sense strand
ugggaaaccugguauugaa

SEQ ID NO: 297870 - RNA, 19 nt, Homo sapiens
  misc_RNA (1)...(19): siRNA sense strand
gaaauuaucgaagcugaug

SEQ ID NO: 297871 - RNA, 19 nt, Homo sapiens
  misc_RNA (1)...(19): siRNA sense strand
gggacaacaucuuccgaaa

SEQ ID NO: 297872 - RNA, 19 nt, Homo sapiens
  misc_RNA (1)...(19): siRNA sense strand
caagcuggcugccucuuuc

SEQ ID NO: 297873 - RNA, 19 nt, Homo sapiens
  misc_RNA (1)...(19): siRNA sense strand
ccaaauacagccaugaaga

SEQ ID NO: 297874 - RNA, 19 nt, Homo sapiens
  misc_RNA (1)...(19): siRNA sense strand
ggucuauuaucuuugcaaa

SEQ ID NO: 297875 - RNA, 19 nt, Homo sapiens
  misc_RNA (1)...(19): siRNA sense strand
ggacaacaucuuccgaaau

SEQ ID NO: 297876 - RNA, 19 nt, Homo sapiens
  misc_RNA (1)...(19): siRNA sense strand
acacuuaugugaugguugu

SEQ ID NO: 297877 - RNA, 19 nt, Homo sapiens
  misc_RNA (1)...(19): siRNA sense strand
cagcuacucugaucaacau

SEQ ID NO: 297878 - RNA, 19 nt, Homo sapiens
  misc_RNA (1)...(19): siRNA sense strand
gacaugcacuauuaccaau

SEQ ID NO: 297879 - RNA, 19 nt, Homo sapiens
  misc_RNA (1)...(19): siRNA sense strand
guauugaaccugugggauu

SEQ ID NO: 297880 - RNA, 19 nt, Homo sapiens
  misc_RNA (1)...(19): siRNA sense strand
ggaugaaacccucuauaag

SEQ ID NO: 297881 - RNA, 19 nt, Homo sapiens
  misc_RNA (1)...(19): siRNA sense strand
gcguuugucucgcccauug

SEQ ID NO: 297882 - RNA, 19 nt, Homo sapiens
  misc_RNA (1)...(19): siRNA sense strand
uuaaagagcgagaagaaga

SEQ ID NO: 297883 - RNA, 19 nt, Homo sapiens
  misc_RNA (1)...(19): siRNA sense strand
gcaagcuggcugccucuuu

SEQ ID NO: 297884 - RNA, 19 nt, Homo sapiens
  misc_RNA (1)...(19): siRNA sense strand
gaaaaggacaugcacuauu

SEQ ID NO: 297885 - RNA, 19 nt, Homo sapiens
  misc_RNA (1)...(19): siRNA sense strand
cgaagcugaugaaguacuu

SEQ ID NO: 297886 - RNA, 19 nt, Homo sapiens
  misc_RNA (1)...(19): siRNA sense strand
auguggagguucugauuua

SEQ ID NO: 297887 - RNA, 19 nt, Homo sapiens
  misc_RNA (1)...(19): siRNA sense strand
gcagcgugaugcccauaga

SEQ ID NO: 297888 - RNA, 19 nt, Homo sapiens
  misc_RNA (1)...(19): siRNA sense strand
ggagagccgcgaacuggaa

SEQ ID NO: 297889 - RNA, 19 nt, Homo sapiens
  misc_RNA (1)...(19): siRNA sense strand
ucauugacaucuuuacauc

SEQ ID NO: 297890 - RNA, 19 nt, Homo sapiens
  misc_RNA (1)...(19): siRNA sense strand
gguaauuucucacuaucag

SEQ ID NO: 297891 - RNA, 19 nt, Homo sapiens
  misc_RNA (1)...(19): siRNA sense strand
caacacuuaugugaugguu

SEQ ID NO: 297892 - RNA, 19 nt, Homo sapiens
  misc_RNA (1)...(19): siRNA sense strand
aagaagauuugaggcguuu

SEQ ID NO: 297893 - RNA, 19 nt, Homo sapiens
  misc_RNA (1)...(19): siRNA sense strand
gguccagcauaguuuauca

SEQ ID NO: 297894 - RNA, 19 nt, Homo sapiens
  misc_RNA (1)...(19): siRNA sense strand
uggagguucugauuuaugu

SEQ ID NO: 297895 - RNA, 19 nt, Homo sapiens
  misc_RNA (1)...(19): siRNA sense strand
ggaccaaagcagugucuuc

SEQ ID NO: 297896 - RNA, 19 nt, Homo sapiens
  misc_RNA (1)...(19): siRNA sense strand
gcccauagauuugagaaaa

SEQ ID NO: 297897 - RNA, 19 nt, Homo sapiens
  misc_RNA (1)...(19): siRNA sense strand
caugcacuauuaccaauca

SEQ ID NO: 297898 - RNA, 19 nt, Homo sapiens
  misc_RNA (1)...(19): siRNA sense strand
uauugaaccugugggauug

SEQ ID NO: 297899 - RNA, 19 nt, Homo sapiens
  misc_RNA (1)...(19): siRNA sense strand
gaagauuugaggcguuugu

SEQ ID NO: 297900 - RNA, 19 nt, Homo sapiens
  misc_RNA (1)...(19): siRNA sense strand
gguucugauuuaugucuuu

SEQ ID NO: 297901 - RNA, 19 nt, Homo sapiens
  misc_RNA (1)...(19): siRNA sense strand
gcgugaugcccauagauuu

SEQ ID NO: 297902 - RNA, 19 nt, Homo sapiens
  misc_RNA (1)...(19): siRNA sense strand
gcaaugccaggaaacacuu

SEQ ID NO: 297903 - RNA, 19 nt, Homo sapiens
  misc_RNA (1)...(19): siRNA sense strand
ggugggugcuaccaaauac

SEQ ID NO: 297904 - RNA, 19 nt, Homo sapiens
  misc_RNA (1)...(19): siRNA sense strand
aaagcagugucuucucaug

SEQ ID NO: 297905 - RNA, 19 nt, Homo sapiens
  misc_RNA (1)...(19): siRNA sense strand
gggugggugcuaccaaaua

SEQ ID NO: 297906 - RNA, 19 nt, Homo sapiens
  misc_RNA (1)...(19): siRNA sense strand
acucuaacuucgcugcuuu

SEQ ID NO: 297907 - RNA, 19 nt, Homo sapiens
  misc_RNA (1)...(19): siRNA sense strand
caacauuauuaagcaguuc

SEQ ID NO: 297908 - RNA, 19 nt, Homo sapiens
  misc_RNA (1)...(19): siRNA sense strand
ucugguaauuucucacuau

SEQ ID NO: 297909 - RNA, 19 nt, Homo sapiens
  misc_RNA (1)...(19): siRNA sense strand
cugcagaauucuccagaug

SEQ ID NO: 297910 - RNA, 19 nt, Homo sapiens
  misc_RNA (1)...(19): siRNA sense strand
gaaauguggagguucugau

SEQ ID NO: 297911 - RNA, 19 nt, Homo sapiens
  misc_RNA (1)...(19): siRNA sense strand
gccaggaaacacuuugaaa

SEQ ID NO: 297912 - RNA, 19 nt, Homo sapiens
  misc_RNA (1)...(19): siRNA sense strand
agcaugaggucuauuaucu

SEQ ID NO: 297913 - RNA, 19 nt, Homo sapiens
  misc_RNA (1)...(19): siRNA sense strand
cauccgcaaugccaggaaa

SEQ ID NO: 297914 - RNA, 19 nt, Homo sapiens
  misc_RNA (1)...(19): siRNA sense strand
aaauacagccaugaagaaa

SEQ ID NO: 297915 - RNA, 19 nt, Homo sapiens
  misc_RNA (1)...(19): siRNA sense strand
gagagcuacuuuucuggua

SEQ ID NO: 297916 - RNA, 19 nt, Homo sapiens
  misc_RNA (1)...(19): siRNA sense strand
ggcaagacaccuucaugga

SEQ ID NO: 297917 - RNA, 19 nt, Homo sapiens
  misc_RNA (1)...(19): siRNA sense strand
gcaugaggucuauuaucuu

SEQ ID NO: 297918 - RNA, 19 nt, Homo sapiens
  misc_RNA (1)...(19): siRNA sense strand
aagaguggauggaccaaag

SEQ ID NO: 297919 - RNA, 19 nt, Homo sapiens
  misc_RNA (1)...(19): siRNA sense strand
gaagucaggaacucuaacu

SEQ ID NO: 297920 - RNA, 19 nt, Homo sapiens
  misc_RNA (1)...(19): siRNA sense strand
gaaucugacucugagaaaa

SEQ ID NO: 297921 - RNA, 19 nt, Homo sapiens
  misc_RNA (1)...(19): siRNA sense strand
uaaagagcgagaagaagau

SEQ ID NO: 297922 - RNA, 19 nt, Homo sapiens
  misc_RNA (1)...(19): siRNA sense strand
acaccuucauggaaaauua

SEQ ID NO: 297923 - RNA, 19 nt, Homo sapiens
  misc_RNA (1)...(19): siRNA sense strand
ugaggucuauuaucuuugc

SEQ ID NO: 297924 - RNA, 19 nt, Homo sapiens
  misc_RNA (1)...(19): siRNA sense strand
gagagccgcgaacuggaaa

SEQ ID NO: 297925 - RNA, 19 nt, Homo sapiens
  misc_RNA (1)...(19): siRNA sense strand
auccaacacuuaugugaug

SEQ ID NO: 297926 - RNA, 19 nt, Homo sapiens
  misc_RNA (1)...(19): siRNA sense strand
cagcuggaaaugaaccuaa

SEQ ID NO: 297927 - RNA, 19 nt, Homo sapiens
  misc_RNA (1)...(19): siRNA sense strand
guucugauuuaugucuuug

SEQ ID NO: 297928 - RNA, 19 nt, Homo sapiens
  misc_RNA (1)...(19): siRNA sense strand
gaccaaagcagugucuucu

SEQ ID NO: 297929 - RNA, 19 nt, Homo sapiens
  misc_RNA (1)...(19): siRNA sense strand
ugagagagcuacuuuucug

SEQ ID NO: 297930 - RNA, 19 nt, Homo sapiens
  misc_RNA (1)...(19): siRNA sense strand
cagcugauucccaauguuc

SEQ ID NO: 297931 - RNA, 19 nt, Homo sapiens
  misc_RNA (1)...(19): siRNA sense strand
aaauguggagguucugauu

SEQ ID NO: 297932 - RNA, 19 nt, Homo sapiens
  misc_RNA (1)...(19): siRNA sense strand
gaaaacgacggagaaagaa

SEQ ID NO: 297933 - RNA, 19 nt, Homo sapiens
  misc_RNA (1)...(19): siRNA sense strand
gcagcuacucugaucaaca

SEQ ID NO: 297934 - RNA, 19 nt, Homo sapiens
  misc_RNA (1)...(19): siRNA sense strand
aaaagugggucugguaaga

SEQ ID NO: 297935 - RNA, 19 nt, Homo sapiens
  misc_RNA (1)...(19): siRNA sense strand
cgugaugcccauagauuug

SEQ ID NO: 297936 - RNA, 19 nt, Homo sapiens
  misc_RNA (1)...(19): siRNA sense strand
gaauucuccagaugccaaa

SEQ ID NO: 297937 - RNA, 19 nt, Homo sapiens
  misc_RNA (1)...(19): siRNA sense strand
agagcgagaagaagauuug

SEQ ID NO: 297938 - RNA, 19 nt, Homo sapiens
  misc_RNA (1)...(19): siRNA sense strand
gguaaaagugggucuggua

SEQ ID NO: 297939 - RNA, 19 nt, Homo sapiens
  misc_RNA (1)...(19): siRNA sense strand
gaagaaucugacucugaga

SEQ ID NO: 297940 - RNA, 19 nt, Homo sapiens
  misc_RNA (1)...(19): siRNA sense strand
ucagcugauucccaauguu

SEQ ID NO: 297941 - RNA, 19 nt, Homo sapiens
  misc_RNA (1)...(19): siRNA sense strand
uugaaaagcuggaaagagu

SEQ ID NO: 297942 - RNA, 19 nt, Homo sapiens
  misc_RNA (1)...(19): siRNA sense strand
ccaggaaacacuuugaaaa

SEQ ID NO: 297943 - RNA, 19 nt, Homo sapiens
  misc_RNA (1)...(19): siRNA sense strand
ucugauccguccauuccuu

SEQ ID NO: 297944 - RNA, 19 nt, Homo sapiens
  misc_RNA (1)...(19): siRNA sense strand
agaaucugacucugagaaa

SEQ ID NO: 297945 - RNA, 19 nt, Homo sapiens
  misc_RNA (1)...(19): siRNA sense strand
guauggaagucaggaacuc

SEQ ID NO: 297946 - RNA, 19 nt, Homo sapiens
  misc_RNA (1)...(19): siRNA sense strand
uaccaaauacagccaugaa

SEQ ID NO: 297947 - RNA, 19 nt, Homo sapiens
  misc_RNA (1)...(19): siRNA sense strand
caaaauggaucugguacag

SEQ ID NO: 297948 - RNA, 19 nt, Homo sapiens
  misc_RNA (1)...(19): siRNA sense strand
ccaacgggacaacaucuuc

SEQ ID NO: 297949 - RNA, 19 nt, Homo sapiens
  misc_RNA (1)...(19): siRNA sense strand
gagcagcgugaugcccaua

SEQ ID NO: 297950 - RNA, 19 nt, Homo sapiens
  misc_RNA (1)...(19): siRNA sense strand
gaaaccugguauugaaccu

SEQ ID NO: 297951 - RNA, 19 nt, Homo sapiens
  misc_RNA (1)...(19): siRNA sense strand
gaaagaguggauggaccaa

SEQ ID NO: 297952 - RNA, 19 nt, Homo sapiens
  misc_RNA (1)...(19): siRNA sense strand
gaaaugaaccuaaggaauu

SEQ ID NO: 297953 - RNA, 19 nt, Homo sapiens
  misc_RNA (1)...(19): siRNA sense strand
uaucgaagcugaugaagua

SEQ ID NO: 297954 - RNA, 19 nt, Homo sapiens
  misc_RNA (1)...(19): siRNA sense strand
uaacuucgcugcuuucauu

SEQ ID NO: 297955 - RNA, 19 nt, Homo sapiens
  misc_RNA (1)...(19): siRNA sense strand
caaauuauauugccagaga

SEQ ID NO: 297956 - RNA, 19 nt, Homo sapiens
  misc_RNA (1)...(19): siRNA sense strand
gagaauggauccaccacua

SEQ ID NO: 297957 - RNA, 19 nt, Homo sapiens
  misc_RNA (1)...(19): siRNA sense strand
caagacaccuucauggaaa

SEQ ID NO: 297958 - RNA, 19 nt, Homo sapiens
  misc_RNA (1)...(19): siRNA sense strand
gacaacaucuuccgaaaug

SEQ ID NO: 297959 - RNA, 19 nt, Homo sapiens
  misc_RNA (1)...(19): siRNA sense strand
aaaaggacaugcacuauua

SEQ ID NO: 297960 - RNA, 19 nt, Homo sapiens
  misc_RNA (1)...(19): siRNA sense strand
caugaggucuauuaucuuu

SEQ ID NO: 297961 - RNA, 19 nt, Homo sapiens
  misc_RNA (1)...(19): siRNA sense strand
gggaugaaacccucuauaa

SEQ ID NO: 297962 - RNA, 19 nt, Homo sapiens
  misc_RNA (1)...(19): siRNA sense strand
gcaagacaccuucauggaa

SEQ ID NO: 297963 - RNA, 19 nt, Homo sapiens
  misc_RNA (1)...(19): siRNA sense strand
ccaaagcagugucuucuca

SEQ ID NO: 297964 - RNA, 19 nt, Homo sapiens
  misc_RNA (1)...(19): siRNA sense strand
caaauacagccaugaagaa

SEQ ID NO: 297965 - RNA, 19 nt, Homo sapiens
  misc_RNA (1)...(19): siRNA sense strand
gcaacauuauuaagcaguu

SEQ ID NO: 297966 - RNA, 19 nt, Homo sapiens
  misc_RNA (1)...(19): siRNA sense strand
ggacaugcacuauuaccaa

SEQ ID NO: 297967 - RNA, 19 nt, Homo sapiens
  misc_RNA (1)...(19): siRNA sense strand
gaugaaacccucuauaagg

SEQ ID NO: 297968 - RNA, 19 nt, Homo sapiens
  misc_RNA (1)...(19): siRNA sense strand
ggaaaugaaccuaaggaau

SEQ ID NO: 297969 - RNA, 19 nt, Homo sapiens
  misc_RNA (1)...(19): siRNA sense strand
ugggaaaccugguauugaa

SEQ ID NO: 297970 - RNA, 19 nt, Homo sapiens
  misc_RNA (1)...(19): siRNA sense strand
gaaauuaucgaagcugaug

SEQ ID NO: 297971 - RNA, 19 nt, Homo sapiens
  misc_RNA (1)...(19): siRNA sense strand
gggacaacaucuuccgaaa

SEQ ID NO: 297972 - RNA, 19 nt, Homo sapiens
  misc_RNA (1)...(19): siRNA sense strand
caagcuggcugccucuuuc

SEQ ID NO: 297973 - RNA, 19 nt, Homo sapiens
  misc_RNA (1)...(19): siRNA sense strand
ccaaauacagccaugaaga

SEQ ID NO: 297974 - RNA, 19 nt, Homo sapiens
  misc_RNA (1)...(19): siRNA sense strand
ggucuauuaucuuugcaaa

SEQ ID NO: 297975 - RNA, 19 nt, Homo sapiens
  misc_RNA (1)...(19): siRNA sense strand
ggacaacaucuuccgaaau

SEQ ID NO: 297976 - RNA, 19 nt, Homo sapiens
  misc_RNA (1)...(19): siRNA sense strand
acacuuaugugaugguugu

SEQ ID NO: 297977 - RNA, 19 nt, Homo sapiens
  misc_RNA (1)...(19): siRNA sense strand
cagcuacucugaucaacau

SEQ ID NO: 297978 - RNA, 19 nt, Homo sapiens
  misc_RNA (1)...(19): siRNA sense strand
gacaugcacuauuaccaau

SEQ ID NO: 297979 - RNA, 19 nt, Homo sapiens
  misc_RNA (1)...(19): siRNA sense strand
guauugaaccugugggauu

SEQ ID NO: 297980 - RNA, 19 nt, Homo sapiens
  misc_RNA (1)...(19): siRNA sense strand
ggaugaaacccucuauaag

SEQ ID NO: 297981 - RNA, 19 nt, Homo sapiens
  misc_RNA (1)...(19): siRNA sense strand
gcguuugucucgcccauug

SEQ ID NO: 297982 - RNA, 19 nt, Homo sapiens
  misc_RNA (1)...(19): siRNA sense strand
uuaaagagcgagaagaaga

SEQ ID NO: 297983 - RNA, 19 nt, Homo sapiens
  misc_RNA (1)...(19): siRNA sense strand
gcaagcuggcugccucuuu

SEQ ID NO: 297984 - RNA, 19 nt, Homo sapiens
  misc_RNA (1)...(19): siRNA sense strand
gaaaaggacaugcacuauu

SEQ ID NO: 297985 - RNA, 19 nt, Homo sapiens
  misc_RNA (1)...(19): siRNA sense strand
cgaagcugaugaaguacuu

SEQ ID NO: 297986 - RNA, 19 nt, Homo sapiens
  misc_RNA (1)...(19): siRNA sense strand
auguggagguucugauuua

SEQ ID NO: 297987 - RNA, 19 nt, Homo sapiens
  misc_RNA (1)...(19): siRNA sense strand
gcagcgugaugcccauaga

SEQ ID NO: 297988 - RNA, 19 nt, Homo sapiens
  misc_RNA (1)...(19): siRNA sense strand
ggagagccgcgaacuggaa

SEQ ID NO: 297989 - RNA, 19 nt, Homo sapiens
  misc_RNA (1)...(19): siRNA sense strand
ucauugacaucuuuacauc

SEQ ID NO: 297990 - RNA, 19 nt, Homo sapiens
  misc_RNA (1)...(19): siRNA sense strand
gguaauuucucacuaucag

SEQ ID NO: 297991 - RNA, 19 nt, Homo sapiens
  misc_RNA (1)...(19): siRNA sense strand
caacacuuaugugaugguu

SEQ ID NO: 297992 - RNA, 19 nt, Homo sapiens
  misc_RNA (1)...(19): siRNA sense strand
aagaagauuugaggcguuu

SEQ ID NO: 297993 - RNA, 19 nt, Homo sapiens
  misc_RNA (1)...(19): siRNA sense strand
gguccagcauaguuuauca

SEQ ID NO: 297994 - RNA, 19 nt, Homo sapiens
  misc_RNA (1)...(19): siRNA sense strand
uggagguucugauuuaugu

SEQ ID NO: 297995 - RNA, 19 nt, Homo sapiens
  misc_RNA (1)...(19): siRNA sense strand
ggaccaaagcagugucuuc

SEQ ID NO: 297996 - RNA, 19 nt, Homo sapiens
  misc_RNA (1)...(19): siRNA sense strand
gcccauagauuugagaaaa

SEQ ID NO: 297997 - RNA, 19 nt, Homo sapiens
  misc_RNA (1)...(19): siRNA sense strand
caugcacuauuaccaauca

SEQ ID NO: 297998 - RNA, 19 nt, Homo sapiens
  misc_RNA (1)...(19): siRNA sense strand
uauugaaccugugggauug

SEQ ID NO: 297999 - RNA, 19 nt, Homo sapiens
  misc_RNA (1)...(19): siRNA sense strand
gaagauuugaggcguuugu

SEQ ID NO: 298000 - RNA, 19 nt, Homo sapiens
  misc_RNA (1)...(19): siRNA sense strand
gguucugauuuaugucuuu

SEQ ID NO: 298001 - RNA, 19 nt, Homo sapiens
  misc_RNA (1)...(19): siRNA sense strand
gcgugaugcccauagauuu

SEQ ID NO: 298002 - RNA, 19 nt, Homo sapiens
  misc_RNA (1)...(19): siRNA sense strand
gcaaugccaggaaacacuu

SEQ ID NO: 298003 - RNA, 19 nt, Homo sapiens
  misc_RNA (1)...(19): siRNA sense strand
ggugggugcuaccaaauac

SEQ ID NO: 298004 - RNA, 19 nt, Homo sapiens
  misc_RNA (1)...(19): siRNA sense strand
aaagcagugucuucucaug

SEQ ID NO: 298005 - RNA, 19 nt, Homo sapiens
  misc_RNA (1)...(19): siRNA sense strand
gggugggugcuaccaaaua

SEQ ID NO: 298006 - RNA, 19 nt, Homo sapiens
  misc_RNA (1)...(19): siRNA sense strand
acucuaacuucgcugcuuu

SEQ ID NO: 298007 - RNA, 19 nt, Homo sapiens
  misc_RNA (1)...(19): siRNA sense strand
caacauuauuaagcaguuc

SEQ ID NO: 298008 - RNA, 19 nt, Homo sapiens
  misc_RNA (1)...(19): siRNA sense strand
ucugguaauuucucacuau

SEQ ID NO: 298009 - RNA, 19 nt, Homo sapiens
  misc_RNA (1)...(19): siRNA sense strand
cugcagaauucuccagaug

SEQ ID NO: 298010 - RNA, 19 nt, Homo sapiens
  misc_RNA (1)...(19): siRNA sense strand
gaaauguggagguucugau

SEQ ID NO: 298011 - RNA, 19 nt, Homo sapiens
  misc_RNA (1)...(19): siRNA sense strand
gccaggaaacacuuugaaa

SEQ ID NO: 298012 - RNA, 19 nt, Homo sapiens
  misc_RNA (1)...(19): siRNA sense strand
agcaugaggucuauuaucu

SEQ ID NO: 298013 - RNA, 19 nt, Homo sapiens
  misc_RNA (1)...(19): siRNA sense strand
cauccgcaaugccaggaaa

SEQ ID NO: 298014 - RNA, 19 nt, Homo sapiens
  misc_RNA (1)...(19): siRNA sense strand
aaauacagccaugaagaaa

SEQ ID NO: 298015 - RNA, 19 nt, Homo sapiens
  misc_RNA (1)...(19): siRNA sense strand
gagagcuacuuuucuggua

SEQ ID NO: 298016 - RNA, 19 nt, Homo sapiens
  misc_RNA (1)...(19): siRNA sense strand
ggcaagacaccuucaugga

SEQ ID NO: 298017 - RNA, 19 nt, Homo sapiens
  misc_RNA (1)...(19): siRNA sense strand
gcaugaggucuauuaucuu

SEQ ID NO: 298018 - RNA, 19 nt, Homo sapiens
  misc_RNA (1)...(19): siRNA sense strand
aagaguggauggaccaaag

SEQ ID NO: 298019 - RNA, 19 nt, Homo sapiens
  misc_RNA (1)...(19): siRNA sense strand
gaagucaggaacucuaacu

SEQ ID NO: 298020 - RNA, 19 nt, Homo sapiens
  misc_RNA (1)...(19): siRNA sense strand
gaaucugacucugagaaaa

SEQ ID NO: 298021 - RNA, 19 nt, Homo sapiens
  misc_RNA (1)...(19): siRNA sense strand
uaaagagcgagaagaagau

SEQ ID NO: 298022 - RNA, 19 nt, Homo sapiens
  misc_RNA (1)...(19): siRNA sense strand
acaccuucauggaaaauua

SEQ ID NO: 298023 - RNA, 19 nt, Homo sapiens
  misc_RNA (1)...(19): siRNA sense strand
ugaggucuauuaucuuugc

SEQ ID NO: 298024 - RNA, 19 nt, Homo sapiens
  misc_RNA (1)...(19): siRNA sense strand
gagagccgcgaacuggaaa

SEQ ID NO: 298025 - RNA, 19 nt, Homo sapiens
  misc_RNA (1)...(19): siRNA sense strand
auccaacacuuaugugaug

SEQ ID NO: 298026 - RNA, 19 nt, Homo sapiens
  misc_RNA (1)...(19): siRNA sense strand
cagcuggaaaugaaccuaa

SEQ ID NO: 298027 - RNA, 19 nt, Homo sapiens
  misc_RNA (1)...(19): siRNA sense strand
guucugauuuaugucuuug

SEQ ID NO: 298028 - RNA, 19 nt, Homo sapiens
  misc_RNA (1)...(19): siRNA sense strand
gaccaaagcagugucuucu

SEQ ID NO: 298029 - RNA, 19 nt, Homo sapiens
  misc_RNA (1)...(19): siRNA sense strand
ugagagagcuacuuuucug

SEQ ID NO: 298030 - RNA, 19 nt, Homo sapiens
  misc_RNA (1)...(19): siRNA sense strand
cagcugauucccaauguuc

SEQ ID NO: 298031 - RNA, 19 nt, Homo sapiens
  misc_RNA (1)...(19): siRNA sense strand
aaauguggagguucugauu

SEQ ID NO: 298032 - RNA, 19 nt, Homo sapiens
  misc_RNA (1)...(19): siRNA sense strand
gaaaacgacggagaaagaa

SEQ ID NO: 298033 - RNA, 19 nt, Homo sapiens
  misc_RNA (1)...(19): siRNA sense strand
gcagcuacucugaucaaca

SEQ ID NO: 298034 - RNA, 19 nt, Homo sapiens
  misc_RNA (1)...(19): siRNA sense strand
aaaagugggucugguaaga

SEQ ID NO: 298035 - RNA, 19 nt, Homo sapiens
  misc_RNA (1)...(19): siRNA sense strand
cgugaugcccauagauuug

SEQ ID NO: 298036 - RNA, 19 nt, Homo sapiens
  misc_RNA (1)...(19): siRNA sense strand
gaauucuccagaugccaaa

SEQ ID NO: 298037 - RNA, 19 nt, Homo sapiens
  misc_RNA (1)...(19): siRNA sense strand
agagcgagaagaagauuug

SEQ ID NO: 298038 - RNA, 19 nt, Homo sapiens
  misc_RNA (1)...(19): siRNA sense strand
gguaaaagugggucuggua

SEQ ID NO: 298039 - RNA, 19 nt, Homo sapiens
  misc_RNA (1)...(19): siRNA sense strand
gaagaaucugacucugaga

SEQ ID NO: 298040 - RNA, 19 nt, Homo sapiens
  misc_RNA (1)...(19): siRNA sense strand
ucagcugauucccaauguu

SEQ ID NO: 298041 - RNA, 19 nt, Homo sapiens
  misc_RNA (1)...(19): siRNA sense strand
uugaaaagcuggaaagagu

SEQ ID NO: 298042 - RNA, 19 nt, Homo sapiens
  misc_RNA (1)...(19): siRNA sense strand
ccaggaaacacuuugaaaa

SEQ ID NO: 298043 - RNA, 19 nt, Homo sapiens
  misc_RNA (1)...(19): siRNA sense strand
ucugauccguccauuccuu

SEQ ID NO: 298044 - RNA, 19 nt, Homo sapiens
  misc_RNA (1)...(19): siRNA sense strand
agaaucugacucugagaaa

SEQ ID NO: 298045 - RNA, 19 nt, Homo sapiens
  misc_RNA (1)...(19): siRNA sense strand
guauggaagucaggaacuc

SEQ ID NO: 298046 - RNA, 19 nt, Homo sapiens
  misc_RNA (1)...(19): siRNA sense strand
uaccaaauacagccaugaa

SEQ ID NO: 298047 - RNA, 19 nt, Homo sapiens
  misc_RNA (1)...(19): siRNA sense strand
caaaauggaucugguacag

SEQ ID NO: 298048 - RNA, 19 nt, Homo sapiens
  misc_RNA (1)...(19): siRNA sense strand
ccaacgggacaacaucuuc

SEQ ID NO: 298049 - RNA, 19 nt, Homo sapiens
  misc_RNA (1)...(19): siRNA sense strand
gagcagcgugaugcccaua

SEQ ID NO: 298050 - RNA, 19 nt, Homo sapiens
  misc_RNA (1)...(19): siRNA sense strand
gaaaccugguauugaaccu

SEQ ID NO: 298051 - RNA, 19 nt, Homo sapiens
  misc_RNA (1)...(19): siRNA sense strand
gaaagaguggauggaccaa

SEQ ID NO: 298052 - RNA, 19 nt, Homo sapiens
  misc_RNA (1)...(19): siRNA sense strand
acaagaagcuuaagaagaa

SEQ ID NO: 298053 - RNA, 19 nt, Homo sapiens
  misc_RNA (1)...(19): siRNA sense strand
gaagagacacaguuacuuu

SEQ ID NO: 298054 - RNA, 19 nt, Homo sapiens
  misc_RNA (1)...(19): siRNA sense strand
ggagguggauuauagcaaa

SEQ ID NO: 298055 - RNA, 19 nt, Homo sapiens
  misc_RNA (1)...(19): siRNA sense strand
caaaucagcugcagagaag

SEQ ID NO: 298056 - RNA, 19 nt, Homo sapiens
  misc_RNA (1)...(19): siRNA sense strand
gaagaagccagaagacaaa

SEQ ID NO: 298057 - RNA, 19 nt, Homo sapiens
  misc_RNA (1)...(19): siRNA sense strand
ggaagaagauuagugcaau

SEQ ID NO: 298058 - RNA, 19 nt, Homo sapiens
  misc_RNA (1)...(19): siRNA sense strand
gagauggagugaacaaaga

SEQ ID NO: 298059 - RNA, 19 nt, Homo sapiens
  misc_RNA (1)...(19): siRNA sense strand
gaagaaaccgagcuuauca

SEQ ID NO: 298060 - RNA, 19 nt, Homo sapiens
  misc_RNA (1)...(19): siRNA sense strand
gcgaguauaugaacaacaa

SEQ ID NO: 298061 - RNA, 19 nt, Homo sapiens
  misc_RNA (1)...(19): siRNA sense strand
ugacccagauccuuucaua

SEQ ID NO: 298062 - RNA, 19 nt, Homo sapiens
  misc_RNA (1)...(19): siRNA sense strand
gcacagaaucgcugaagaa

SEQ ID NO: 298063 - RNA, 19 nt, Homo sapiens
  misc_RNA (1)...(19): siRNA sense strand
gcaaagauaaggaggaaga

SEQ ID NO: 298064 - RNA, 19 nt, Homo sapiens
  misc_RNA (1)...(19): siRNA sense strand
agagagagcuagcagagaa

SEQ ID NO: 298065 - RNA, 19 nt, Homo sapiens
  misc_RNA (1)...(19): siRNA sense strand
ggaaaccaaugacaaagca

SEQ ID NO: 298066 - RNA, 19 nt, Homo sapiens
  misc_RNA (1)...(19): siRNA sense strand
agacuacacugaccacaaa

SEQ ID NO: 298067 - RNA, 19 nt, Homo sapiens
  misc_RNA (1)...(19): siRNA sense strand
gaagaggaacugauggaaa

SEQ ID NO: 298068 - RNA, 19 nt, Homo sapiens
  misc_RNA (1)...(19): siRNA sense strand
gagaagagaagacaguuga

SEQ ID NO: 298069 - RNA, 19 nt, Homo sapiens
  misc_RNA (1)...(19): siRNA sense strand
gaaagaaaccaagaaagau

SEQ ID NO: 298070 - RNA, 19 nt, Homo sapiens
  misc_RNA (1)...(19): siRNA sense strand
caaggaaaccaaugacaaa

SEQ ID NO: 298071 - RNA, 19 nt, Homo sapiens
  misc_RNA (1)...(19): siRNA sense strand
acaaggagcgggagagaua

SEQ ID NO: 298072 - RNA, 19 nt, Homo sapiens
  misc_RNA (1)...(19): siRNA sense strand
ccaaggaguugaucaaguc

SEQ ID NO: 298073 - RNA, 19 nt, Homo sapiens
  misc_RNA (1)...(19): siRNA sense strand
ggacuuugauacccaggaa

SEQ ID NO: 298074 - RNA, 19 nt, Homo sapiens
  misc_RNA (1)...(19): siRNA sense strand
agaaagaaaccaagaaaga

SEQ ID NO: 298075 - RNA, 19 nt, Homo sapiens
  misc_RNA (1)...(19): siRNA sense strand
guaacaagaagcuuaagaa

SEQ ID NO: 298076 - RNA, 19 nt, Homo sapiens
  misc_RNA (1)...(19): siRNA sense strand
gugaugaggagguggauua

SEQ ID NO: 298077 - RNA, 19 nt, Homo sapiens
  misc_RNA (1)...(19): siRNA sense strand
gaucaaguccaucaaugaa

SEQ ID NO: 298078 - RNA, 19 nt, Homo sapiens
  misc_RNA (1)...(19): siRNA sense strand
aagggaagcuggaagagaa

SEQ ID NO: 298079 - RNA, 19 nt, Homo sapiens
  misc_RNA (1)...(19): siRNA sense strand
ggagauuucuuuggcaugu

SEQ ID NO: 298080 - RNA, 19 nt, Homo sapiens
  misc_RNA (1)...(19): siRNA sense strand
aaucaaaacucaccaauga

SEQ ID NO: 298081 - RNA, 19 nt, Homo sapiens
  misc_RNA (1)...(19): siRNA sense strand
cagcaaagauaaggaggaa

SEQ ID NO: 298082 - RNA, 19 nt, Homo sapiens
  misc_RNA (1)...(19): siRNA sense strand
ggaguacaaugaggaugaa

SEQ ID NO: 298083 - RNA, 19 nt, Homo sapiens
  misc_RNA (1)...(19): siRNA sense strand
ugacauggcuguggauagu

SEQ ID NO: 298084 - RNA, 19 nt, Homo sapiens
  misc_RNA (1)...(19): siRNA sense strand
ccgcauggccuauguggua

SEQ ID NO: 298085 - RNA, 19 nt, Homo sapiens
  misc_RNA (1)...(19): siRNA sense strand
cauaugagcggaaugaguu

SEQ ID NO: 298086 - RNA, 19 nt, Homo sapiens
  misc_RNA (1)...(19): siRNA sense strand
ggaggaagaggaacugaug

SEQ ID NO: 298087 - RNA, 19 nt, Homo sapiens
  misc_RNA (1)...(19): siRNA sense strand
gaacggagagauggaguga

SEQ ID NO: 298088 - RNA, 19 nt, Homo sapiens
  misc_RNA (1)...(19): siRNA sense strand
aacaagaaauugagagaga

SEQ ID NO: 298089 - RNA, 19 nt, Homo sapiens
  misc_RNA (1)...(19): siRNA sense strand
gaggcugacaugaauauuu

SEQ ID NO: 298090 - RNA, 19 nt, Homo sapiens
  misc_RNA (1)...(19): siRNA sense strand
ccagaaagaaaccaagaaa

SEQ ID NO: 298091 - RNA, 19 nt, Homo sapiens
  misc_RNA (1)...(19): siRNA sense strand
ugguagaccuggaugauga

SEQ ID NO: 298092 - RNA, 19 nt, Homo sapiens
  misc_RNA (1)...(19): siRNA sense strand
gaaaagccccagaaagaaa

SEQ ID NO: 298093 - RNA, 19 nt, Homo sapiens
  misc_RNA (1)...(19): siRNA sense strand
gaucgccaguggaagaaga

SEQ ID NO: 298094 - RNA, 19 nt, Homo sapiens
  misc_RNA (1)...(19): siRNA sense strand
gcagggaacccguaacaag

SEQ ID NO: 298095 - RNA, 19 nt, Homo sapiens
  misc_RNA (1)...(19): siRNA sense strand
agaccuggaugaugaguau

SEQ ID NO: 298096 - RNA, 19 nt, Homo sapiens
  misc_RNA (1)...(19): siRNA sense strand
agacacaguuacuuugaga

SEQ ID NO: 298097 - RNA, 19 nt, Homo sapiens
  misc_RNA (1)...(19): siRNA sense strand
ugaagaagccagaagacaa

SEQ ID NO: 298098 - RNA, 19 nt, Homo sapiens
  misc_RNA (1)...(19): siRNA sense strand
ggaccaggguaacaagaag

SEQ ID NO: 298099 - RNA, 19 nt, Homo sapiens
  misc_RNA (1)...(19): siRNA sense strand
gcagcugggagauuucuuu

SEQ ID NO: 298100 - RNA, 19 nt, Homo sapiens
  misc_RNA (1)...(19): siRNA sense strand
gaaagaugaggauccugaa

SEQ ID NO: 298101 - RNA, 19 nt, Homo sapiens
  misc_RNA (1)...(19): siRNA sense strand
gcaccacagcuaacuauag

SEQ ID NO: 298102 - RNA, 19 nt, Homo sapiens
  misc_RNA (1)...(19): siRNA sense strand
gaaaagaagagacacaguu

SEQ ID NO: 298103 - RNA, 19 nt, Homo sapiens
  misc_RNA (1)...(19): siRNA sense strand
caagacaccucgggacaag

SEQ ID NO: 298104 - RNA, 19 nt, Homo sapiens
  misc_RNA (1)...(19): siRNA sense strand
caagcuacgccaacaagaa

SEQ ID NO: 298105 - RNA, 19 nt, Homo sapiens
  misc_RNA (1)...(19): siRNA sense strand
ggagagauggagugaacaa

SEQ ID NO: 298106 - RNA, 19 nt, Homo sapiens
  misc_RNA (1)...(19): siRNA sense strand
gcagagaagagaagacagu

SEQ ID NO: 298107 - RNA, 19 nt, Homo sapiens
  misc_RNA (1)...(19): siRNA sense strand
aaaagcagcugggagauuu

SEQ ID NO: 298108 - RNA, 19 nt, Homo sapiens
  misc_RNA (1)...(19): siRNA sense strand
caaagcauaugagcggaau

SEQ ID NO: 298109 - RNA, 19 nt, Homo sapiens
  misc_RNA (1)...(19): siRNA sense strand
aaagaaaccaagaaagaug

SEQ ID NO: 298110 - RNA, 19 nt, Homo sapiens
  misc_RNA (1)...(19): siRNA sense strand
gggaguacaaugaggauga

SEQ ID NO: 298111 - RNA, 19 nt, Homo sapiens
  misc_RNA (1)...(19): siRNA sense strand
gaagagaagacaguugauc

SEQ ID NO: 298112 - RNA, 19 nt, Homo sapiens
  misc_RNA (1)...(19): siRNA sense strand
ugaguaugcugacacagau

SEQ ID NO: 298113 - RNA, 19 nt, Homo sapiens
  misc_RNA (1)...(19): siRNA sense strand
ucaggaaacuucucaugac

SEQ ID NO: 298114 - RNA, 19 nt, Homo sapiens
  misc_RNA (1)...(19): siRNA sense strand
uuagcaagcugacccagau

SEQ ID NO: 298115 - RNA, 19 nt, Homo sapiens
  misc_RNA (1)...(19): siRNA sense strand
ucaaggaaaccaaugacaa

SEQ ID NO: 298116 - RNA, 19 nt, Homo sapiens
  misc_RNA (1)...(19): siRNA sense strand
gauccaggaguccaaauuc

SEQ ID NO: 298117 - RNA, 19 nt, Homo sapiens
  misc_RNA (1)...(19): siRNA sense strand
augaggagguggauuauag

SEQ ID NO: 298118 - RNA, 19 nt, Homo sapiens
  misc_RNA (1)...(19): siRNA sense strand
gaugaggagguggauuaua

SEQ ID NO: 298119 - RNA, 19 nt, Homo sapiens
  misc_RNA (1)...(19): siRNA sense strand
ggacaaggagcgggagaga

SEQ ID NO: 298120 - RNA, 19 nt, Homo sapiens
  misc_RNA (1)...(19): siRNA sense strand
caagaaagaugaggauccu

SEQ ID NO: 298121 - RNA, 19 nt, Homo sapiens
  misc_RNA (1)...(19): siRNA sense strand
ggaagaggaacugauggaa

SEQ ID NO: 298122 - RNA, 19 nt, Homo sapiens
  misc_RNA (1)...(19): siRNA sense strand
gagugaacaaagauuauga

SEQ ID NO: 298123 - RNA, 19 nt, Homo sapiens
  misc_RNA (1)...(19): siRNA sense strand
gaagcuggaagagaagaaa

SEQ ID NO: 298124 - RNA, 19 nt, Homo sapiens
  misc_RNA (1)...(19): siRNA sense strand
cagggaacccguaacaaga

SEQ ID NO: 298125 - RNA, 19 nt, Homo sapiens
  misc_RNA (1)...(19): siRNA sense strand
cuacacugaccacaaauga

SEQ ID NO: 298126 - RNA, 19 nt, Homo sapiens
  misc_RNA (1)...(19): siRNA sense strand
ggagugaacaaagauuaug

SEQ ID NO: 298127 - RNA, 19 nt, Homo sapiens
  misc_RNA (1)...(19): siRNA sense strand
gagacacaguuacuuugag

SEQ ID NO: 298128 - RNA, 19 nt, Homo sapiens
  misc_RNA (1)...(19): siRNA sense strand
ggagcgugaucgggaaaga

SEQ ID NO: 298129 - RNA, 19 nt, Homo sapiens
  misc_RNA (1)...(19): siRNA sense strand
uaacaagaagcuuaagaag

SEQ ID NO: 298130 - RNA, 19 nt, Homo sapiens
  misc_RNA (1)...(19): siRNA sense strand
cuaagucacgucaccauga

SEQ ID NO: 298131 - RNA, 19 nt, Homo sapiens
  misc_RNA (1)...(19): siRNA sense strand
aagaggaacugauggaaaa

SEQ ID NO: 298132 - RNA, 19 nt, Homo sapiens
  misc_RNA (1)...(19): siRNA sense strand
aaagguacgacuugagauu

SEQ ID NO: 298133 - RNA, 19 nt, Homo sapiens
  misc_RNA (1)...(19): siRNA sense strand
ccaggaguccaaauucuug

SEQ ID NO: 298134 - RNA, 19 nt, Homo sapiens
  misc_RNA (1)...(19): siRNA sense strand
caccacagcuaacuauagg

SEQ ID NO: 298135 - RNA, 19 nt, Homo sapiens
  misc_RNA (1)...(19): siRNA sense strand
acaaaucagcugcagagaa

SEQ ID NO: 298136 - RNA, 19 nt, Homo sapiens
  misc_RNA (1)...(19): siRNA sense strand
aaaagaagagacacaguua

SEQ ID NO: 298137 - RNA, 19 nt, Homo sapiens
  misc_RNA (1)...(19): siRNA sense strand
caaagauuaugaagaaacc

SEQ ID NO: 298138 - RNA, 19 nt, Homo sapiens
  misc_RNA (1)...(19): siRNA sense strand
ccaaggcugcauuccagua

SEQ ID NO: 298139 - RNA, 19 nt, Homo sapiens
  misc_RNA (1)...(19): siRNA sense strand
ucaaguccaucaaugaaaa

SEQ ID NO: 298140 - RNA, 19 nt, Homo sapiens
  misc_RNA (1)...(19): siRNA sense strand
caagaaauugagagagaga

SEQ ID NO: 298141 - RNA, 19 nt, Homo sapiens
  misc_RNA (1)...(19): siRNA sense strand
gugaaaggcuuggauuuug

SEQ ID NO: 298142 - RNA, 19 nt, Homo sapiens
  misc_RNA (1)...(19): siRNA sense strand
ugagagagagagagagcua

SEQ ID NO: 298143 - RNA, 19 nt, Homo sapiens
  misc_RNA (1)...(19): siRNA sense strand
aagcuacgccaacaagaaa

SEQ ID NO: 298144 - RNA, 19 nt, Homo sapiens
  misc_RNA (1)...(19): siRNA sense strand
ccaacaagaaauugagaga

SEQ ID NO: 298145 - RNA, 19 nt, Homo sapiens
  misc_RNA (1)...(19): siRNA sense strand
ccgcaauguuuaccgaaug

SEQ ID NO: 298146 - RNA, 19 nt, Homo sapiens
  misc_RNA (1)...(19): siRNA sense strand
ggaaaagccccagaaagaa

SEQ ID NO: 298147 - RNA, 19 nt, Homo sapiens
  misc_RNA (1)...(19): siRNA sense strand
acauggcuguggauaguga

SEQ ID NO: 298148 - RNA, 19 nt, Homo sapiens
  misc_RNA (1)...(19): siRNA sense strand
accaggcgcuucaaggaaa

SEQ ID NO: 298149 - RNA, 19 nt, Homo sapiens
  misc_RNA (1)...(19): siRNA sense strand
guccaucaaugaaaaguuu

SEQ ID NO: 298150 - RNA, 19 nt, Homo sapiens
  misc_RNA (1)...(19): siRNA sense strand
gaagaggaagaagauggaa

SEQ ID NO: 298151 - RNA, 19 nt, Homo sapiens
  misc_RNA (1)...(19): siRNA sense strand
aaaccaggcgcuucaagga

SEQ ID NO: 298152 - RNA, 19 nt, Homo sapiens
  misc_RNA (1)...(19): siRNA sense strand
ucacuaccuuccacaagua

SEQ ID NO: 298153 - RNA, 19 nt, Homo sapiens
  misc_RNA (1)...(19): siRNA sense strand
gccaagagggcgacaaguu

SEQ ID NO: 298154 - RNA, 19 nt, Homo sapiens
  misc_RNA (1)...(19): siRNA sense strand
caugugcaaugacuucuuc

SEQ ID NO: 298155 - RNA, 19 nt, Homo sapiens
  misc_RNA (1)...(19): siRNA sense strand
ccaagagggcgacaaguuc

SEQ ID NO: 298156 - RNA, 19 nt, Homo sapiens
  misc_RNA (1)...(19): siRNA sense strand
gcacucaucacugucaugu

SEQ ID NO: 298157 - RNA, 19 nt, Homo sapiens
  misc_RNA (1)...(19): siRNA sense strand
caagagggcgacaaguuca

SEQ ID NO: 298158 - RNA, 19 nt, Homo sapiens
  misc_RNA (1)...(19): siRNA sense strand
caaguacuccugccaagag

SEQ ID NO: 298159 - RNA, 19 nt, Homo sapiens
  misc_RNA (1)...(19): siRNA sense strand
gacaaguucaagcugagua

SEQ ID NO: 298160 - RNA, 19 nt, Homo sapiens
  misc_RNA (1)...(19): siRNA sense strand
gucacuaccuuccacaagu

SEQ ID NO: 298161 - RNA, 19 nt, Homo sapiens
  misc_RNA (1)...(19): siRNA sense strand
acaaguucaagcugaguaa

SEQ ID NO: 298162 - RNA, 19 nt, Homo sapiens
  misc_RNA (1)...(19): siRNA sense strand
uggcugugcuggucacuac

SEQ ID NO: 298163 - RNA, 19 nt, Homo sapiens
  misc_RNA (1)...(19): siRNA sense strand
aggaacuucugcacaagga

SEQ ID NO: 298164 - RNA, 19 nt, Homo sapiens
  misc_RNA (1)...(19): siRNA sense strand
gaaggcaggacucaaauga

SEQ ID NO: 298165 - RNA, 19 nt, Homo sapiens
  misc_RNA (1)...(19): siRNA sense strand
ggacuucagugaguucauc

SEQ ID NO: 298166 - RNA, 19 nt, Homo sapiens
  misc_RNA (1)...(19): siRNA sense strand
acaaggaugccguggauaa

SEQ ID NO: 298167 - RNA, 19 nt, Homo sapiens
  misc_RNA (1)...(19): siRNA sense strand
agacaaggaugccguggau

SEQ ID NO: 298168 - RNA, 19 nt, Homo sapiens
  misc_RNA (1)...(19): siRNA sense strand
ucagugaguucaucguguu

SEQ ID NO: 298169 - RNA, 19 nt, Homo sapiens
  misc_RNA (1)...(19): siRNA sense strand
gcacgcagacccugaccaa

SEQ ID NO: 298170 - RNA, 19 nt, Homo sapiens
  misc_RNA (1)...(19): siRNA sense strand
aggaugccguggauaaauu

SEQ ID NO: 298171 - RNA, 19 nt, Homo sapiens
  misc_RNA (1)...(19): siRNA sense strand
uggauaaauugcucaagga

SEQ ID NO: 298172 - RNA, 19 nt, Homo sapiens
  misc_RNA (1)...(19): siRNA sense strand
gagaaggcaggacucaaau

SEQ ID NO: 298173 - RNA, 19 nt, Homo sapiens
  misc_RNA (1)...(19): siRNA sense strand
caaggaugccguggauaaa

SEQ ID NO: 298174 - RNA, 19 nt, Homo sapiens
  misc_RNA (1)...(19): siRNA sense strand
ggaccuggacgccaaugga

SEQ ID NO: 298175 - RNA, 19 nt, Homo sapiens
  misc_RNA (1)...(19): siRNA sense strand
ugucacaaguacuuugaga

SEQ ID NO: 298176 - RNA, 19 nt, Homo sapiens
  misc_RNA (1)...(19): siRNA sense strand
cagguggacuucagugagu

SEQ ID NO: 298177 - RNA, 19 nt, Homo sapiens
  misc_RNA (1)...(19): siRNA sense strand
ucacaaguacuuugagaag

SEQ ID NO: 298178 - RNA, 19 nt, Homo sapiens
  misc_RNA (1)...(19): siRNA sense strand
gagaugcccagguggacuu

SEQ ID NO: 298179 - RNA, 19 nt, Homo sapiens
  misc_RNA (1)...(19): siRNA sense strand
ggaugccguggauaaauug

SEQ ID NO: 298180 - RNA, 19 nt, Homo sapiens
  misc_RNA (1)...(19): siRNA sense strand
caugaucauagacgucuuu

SEQ ID NO: 298181 - RNA, 19 nt, Homo sapiens
  misc_RNA (1)...(19): siRNA sense strand
gcaugaucauagacgucuu

SEQ ID NO: 298182 - RNA, 19 nt, Homo sapiens
  misc_RNA (1)...(19): siRNA sense strand
uaauagagcugaaguugua

SEQ ID NO: 298183 - RNA, 19 nt, Homo sapiens
  misc_RNA (1)...(19): siRNA sense strand
gagcugaaguuguaauaaa

SEQ ID NO: 298184 - RNA, 19 nt, Homo sapiens
  misc_RNA (1)...(19): siRNA sense strand
gcaaacaaaucuaccucua

SEQ ID NO: 298185 - RNA, 19 nt, Homo sapiens
  misc_RNA (1)...(19): siRNA sense strand
caacaaaguccacaucaaa

SEQ ID NO: 298186 - RNA, 19 nt, Homo sapiens
  misc_RNA (1)...(19): siRNA sense strand
gauacuggcugaccaacaa

SEQ ID NO: 298187 - RNA, 19 nt, Homo sapiens
  misc_RNA (1)...(19): siRNA sense strand
ucaacgagcuuauccugaa

SEQ ID NO: 298188 - RNA, 19 nt, Homo sapiens
  misc_RNA (1)...(19): siRNA sense strand
gugaacagcuuacauagca

SEQ ID NO: 298189 - RNA, 19 nt, Homo sapiens
  misc_RNA (1)...(19): siRNA sense strand
ucaaguaccacuauuauga

SEQ ID NO: 298190 - RNA, 19 nt, Homo sapiens
  misc_RNA (1)...(19): siRNA sense strand
ggaagcagauuuuaaaguu

SEQ ID NO: 298191 - RNA, 19 nt, Homo sapiens
  misc_RNA (1)...(19): siRNA sense strand
ccaccggccucuugaugua

SEQ ID NO: 298192 - RNA, 19 nt, Homo sapiens
  misc_RNA (1)...(19): siRNA sense strand
gaacagcuuacauagcaaa

SEQ ID NO: 298193 - RNA, 19 nt, Homo sapiens
  misc_RNA (1)...(19): siRNA sense strand
ccugaagccuggagauauu

SEQ ID NO: 298194 - RNA, 19 nt, Homo sapiens
  misc_RNA (1)...(19): siRNA sense strand
gcucaagacagaccuggua

SEQ ID NO: 298195 - RNA, 19 nt, Homo sapiens
  misc_RNA (1)...(19): siRNA sense strand
ccaacaaaguccacaucaa

SEQ ID NO: 298196 - RNA, 19 nt, Homo sapiens
  misc_RNA (1)...(19): siRNA sense strand
gcccacagcuucgucauca

SEQ ID NO: 298197 - RNA, 19 nt, Homo sapiens
  misc_RNA (1)...(19): siRNA sense strand
gaagaagaaaucgggaauu

SEQ ID NO: 298198 - RNA, 19 nt, Homo sapiens
  misc_RNA (1)...(19): siRNA sense strand
ggccacacguuucugcaaa

SEQ ID NO: 298199 - RNA, 19 nt, Homo sapiens
  misc_RNA (1)...(19): siRNA sense strand
ccaugaaugugucccagaa

SEQ ID NO: 298200 - RNA, 19 nt, Homo sapiens
  misc_RNA (1)...(19): siRNA sense strand
gaucgagacagcaccauga

SEQ ID NO: 298201 - RNA, 19 nt, Homo sapiens
  misc_RNA (1)...(19): siRNA sense strand
acaaucagaucagcuguga

SEQ ID NO: 298202 - RNA, 19 nt, Homo sapiens
  misc_RNA (1)...(19): siRNA sense strand
aagaagaaaucgggaauuc

SEQ ID NO: 298203 - RNA, 19 nt, Homo sapiens
  misc_RNA (1)...(19): siRNA sense strand
ggaggcagagguacaauca

SEQ ID NO: 298204 - RNA, 19 nt, Homo sapiens
  misc_RNA (1)...(19): siRNA sense strand
guggaucccugccuucaug

SEQ ID NO: 298205 - RNA, 19 nt, Homo sapiens
  misc_RNA (1)...(19): siRNA sense strand
gaaagcaucaagcacaaca

SEQ ID NO: 298206 - RNA, 19 nt, Homo sapiens
  misc_RNA (1)...(19): siRNA sense strand
cagcuuacauagcaaaucu

SEQ ID NO: 298207 - RNA, 19 nt, Homo sapiens
  misc_RNA (1)...(19): siRNA sense strand
ugacagaaguaaugaaagc

SEQ ID NO: 298208 - RNA, 19 nt, Homo sapiens
  misc_RNA (1)...(19): siRNA sense strand
cgagacagcaccaugaaug

SEQ ID NO: 298209 - RNA, 19 nt, Homo sapiens
  misc_RNA (1)...(19): siRNA sense strand
aggcagagguacaaucaga

SEQ ID NO: 298210 - RNA, 19 nt, Homo sapiens
  misc_RNA (1)...(19): siRNA sense strand
guaaugaaagcaucaagca

SEQ ID NO: 298211 - RNA, 19 nt, Homo sapiens
  misc_RNA (1)...(19): siRNA sense strand
ccagucaaguaccacuauu

SEQ ID NO: 298212 - RNA, 19 nt, Homo sapiens
  misc_RNA (1)...(19): siRNA sense strand
gcuuacauagcaaaucuaa

SEQ ID NO: 298213 - RNA, 19 nt, Homo sapiens
  misc_RNA (1)...(19): siRNA sense strand
guugacagaaguaaugaaa

SEQ ID NO: 298214 - RNA, 19 nt, Homo sapiens
  misc_RNA (1)...(19): siRNA sense strand
gcugugggcaggagauuga

SEQ ID NO: 298215 - RNA, 19 nt, Homo sapiens
  misc_RNA (1)...(19): siRNA sense strand
cagccagccucguccaaau

SEQ ID NO: 298216 - RNA, 19 nt, Homo sapiens
  misc_RNA (1)...(19): siRNA sense strand
gaaccagaacccagucaag

SEQ ID NO: 298217 - RNA, 19 nt, Homo sapiens
  misc_RNA (1)...(19): siRNA sense strand
caucuucgcagacaucuca

SEQ ID NO: 298218 - RNA, 19 nt, Homo sapiens
  misc_RNA (1)...(19): siRNA sense strand
aauaagcacuuugggacuu

SEQ ID NO: 298219 - RNA, 19 nt, Homo sapiens
  misc_RNA (1)...(19): siRNA sense strand
cagucaaguaccacuauua

SEQ ID NO: 298220 - RNA, 19 nt, Homo sapiens
  misc_RNA (1)...(19): siRNA sense strand
uaugacagccucaaguaug

SEQ ID NO: 298221 - RNA, 19 nt, Homo sapiens
  misc_RNA (1)...(19): siRNA sense strand
gagacagcaccaugaaugu

SEQ ID NO: 298222 - RNA, 19 nt, Homo sapiens
  misc_RNA (1)...(19): siRNA sense strand
gcagagguacaaucagauc

SEQ ID NO: 298223 - RNA, 19 nt, Homo sapiens
  misc_RNA (1)...(19): siRNA sense strand
caacgagcuuauccugaag

SEQ ID NO: 298224 - RNA, 19 nt, Homo sapiens
  misc_RNA (1)...(19): siRNA sense strand
guaauaaacggcuccucau

SEQ ID NO: 298225 - RNA, 19 nt, Homo sapiens
  misc_RNA (1)...(19): siRNA sense strand
aauaaacggcuccucauca

SEQ ID NO: 298226 - RNA, 19 nt, Homo sapiens
  misc_RNA (1)...(19): siRNA sense strand
ucagagaucgaagaagaaa

SEQ ID NO: 298227 - RNA, 19 nt, Homo sapiens
  misc_RNA (1)...(19): siRNA sense strand
ccaugcccuuggaguuuaa

SEQ ID NO: 298228 - RNA, 19 nt, Homo sapiens
  misc_RNA (1)...(19): siRNA sense strand
caaacaaaucuaccucuac

SEQ ID NO: 298229 - RNA, 19 nt, Homo sapiens
  misc_RNA (1)...(19): siRNA sense strand
gaaguaaugaaagcaucaa

SEQ ID NO: 298230 - RNA, 19 nt, Homo sapiens
  misc_RNA (1)...(19): siRNA sense strand
gacagcaccaugaaugugu

SEQ ID NO: 298231 - RNA, 19 nt, Homo sapiens
  misc_RNA (1)...(19): siRNA sense strand
gaagccuggagauauuauu

SEQ ID NO: 298232 - RNA, 19 nt, Homo sapiens
  misc_RNA (1)...(19): siRNA sense strand
gaagcagauuuuaaaguuc

SEQ ID NO: 298233 - RNA, 19 nt, Homo sapiens
  misc_RNA (1)...(19): siRNA sense strand
uagagcugaaguuguaaua

SEQ ID NO: 298234 - RNA, 19 nt, Homo sapiens
  misc_RNA (1)...(19): siRNA sense strand
cgaagaagaaaucgggaau

SEQ ID NO: 298235 - RNA, 19 nt, Homo sapiens
  misc_RNA (1)...(19): siRNA sense strand
guuguugacagaaguaaug

SEQ ID NO: 298236 - RNA, 19 nt, Homo sapiens
  misc_RNA (1)...(19): siRNA sense strand
accaugcccuuggaguuua

SEQ ID NO: 298237 - RNA, 19 nt, Homo sapiens
  misc_RNA (1)...(19): siRNA sense strand
agagaucgaagaagaaauc

SEQ ID NO: 298238 - RNA, 19 nt, Homo sapiens
  misc_RNA (1)...(19): siRNA sense strand
ucaggaagcagauuuuaaa

SEQ ID NO: 298239 - RNA, 19 nt, Homo sapiens
  misc_RNA (1)...(19): siRNA sense strand
uaccaugcccuuggaguuu

SEQ ID NO: 298240 - RNA, 19 nt, Homo sapiens
  misc_RNA (1)...(19): siRNA sense strand
ccuuuccgcuggaucagaa

SEQ ID NO: 298241 - RNA, 19 nt, Homo sapiens
  misc_RNA (1)...(19): siRNA sense strand
ucaacgugcgcacugcaua

SEQ ID NO: 298242 - RNA, 19 nt, Homo sapiens
  misc_RNA (1)...(19): siRNA sense strand
cccaggacuucgccacuga

SEQ ID NO: 298243 - RNA, 19 nt, Homo sapiens
  misc_RNA (1)...(19): siRNA sense strand
gaucaggaagcagauuuua

SEQ ID NO: 298244 - RNA, 19 nt, Homo sapiens
  misc_RNA (1)...(19): siRNA sense strand
gaguuuaaggcccucaaga

SEQ ID NO: 298245 - RNA, 19 nt, Homo sapiens
  misc_RNA (1)...(19): siRNA sense strand
ugaagaauaagcacuuugg

SEQ ID NO: 298246 - RNA, 19 nt, Homo sapiens
  misc_RNA (1)...(19): siRNA sense strand
caucaccagcuguuguuga

SEQ ID NO: 298247 - RNA, 19 nt, Homo sapiens
  misc_RNA (1)...(19): siRNA sense strand
ccagaacccagucaaguac

SEQ ID NO: 298248 - RNA, 19 nt, Homo sapiens
  misc_RNA (1)...(19): siRNA sense strand
uaauaaacggcuccucauc

SEQ ID NO: 298249 - RNA, 19 nt, Homo sapiens
  misc_RNA (1)...(19): siRNA sense strand
agucaaguaccacuauuau

SEQ ID NO: 298250 - RNA, 19 nt, Homo sapiens
  misc_RNA (1)...(19): siRNA sense strand
ccaaauggagacauaacca

SEQ ID NO: 298251 - RNA, 19 nt, Homo sapiens
  misc_RNA (1)...(19): siRNA sense strand
accagaacccagucaagua

SEQ ID NO: 298252 - RNA, 19 nt, Homo sapiens
  misc_RNA (1)...(19): siRNA sense strand
gaccaacaaaguccacauc

SEQ ID NO: 298253 - RNA, 19 nt, Homo sapiens
  misc_RNA (1)...(19): siRNA sense strand
gcaucaagcacaacaucca

SEQ ID NO: 298254 - RNA, 19 nt, Homo sapiens
  misc_RNA (1)...(19): siRNA sense strand
acugaagaauaagcacuuu

SEQ ID NO: 298255 - RNA, 19 nt, Homo sapiens
  misc_RNA (1)...(19): siRNA sense strand
augaaagcaucaagcacaa

SEQ ID NO: 298256 - RNA, 19 nt, Homo sapiens
  misc_RNA (1)...(19): siRNA sense strand
gccuggagauauuauucau

SEQ ID NO: 298257 - RNA, 19 nt, Homo sapiens
  misc_RNA (1)...(19): siRNA sense strand
cuaauagagcugaaguugu

SEQ ID NO: 298258 - RNA, 19 nt, Homo sapiens
  misc_RNA (1)...(19): siRNA sense strand
gcucguggucuuccucauc

SEQ ID NO: 298259 - RNA, 19 nt, Homo sapiens
  misc_RNA (1)...(19): siRNA sense strand
ugaacagcuuacauagcaa

SEQ ID NO: 298260 - RNA, 19 nt, Homo sapiens
  misc_RNA (1)...(19): siRNA sense strand
auuaugacagccucaagua

SEQ ID NO: 298261 - RNA, 19 nt, Homo sapiens
  misc_RNA (1)...(19): siRNA sense strand
aaucagaucagcugugaac

SEQ ID NO: 298262 - RNA, 19 nt, Homo sapiens
  misc_RNA (1)...(19): siRNA sense strand
guucuuggaugcugaaaag

SEQ ID NO: 298263 - RNA, 19 nt, Homo sapiens
  misc_RNA (1)...(19): siRNA sense strand
gcucagauaucacccauga

SEQ ID NO: 298264 - RNA, 19 nt, Homo sapiens
  misc_RNA (1)...(19): siRNA sense strand
gggaauuaaucuacaauca

SEQ ID NO: 298265 - RNA, 19 nt, Homo sapiens
  misc_RNA (1)...(19): siRNA sense strand
gacuacagcugaccugguu

SEQ ID NO: 298266 - RNA, 19 nt, Homo sapiens
  misc_RNA (1)...(19): siRNA sense strand
ccagagacaucacccugaa

SEQ ID NO: 298267 - RNA, 19 nt, Homo sapiens
  misc_RNA (1)...(19): siRNA sense strand
gagaaacaaccugaacuuu

SEQ ID NO: 298268 - RNA, 19 nt, Homo sapiens
  misc_RNA (1)...(19): siRNA sense strand
gacguucacucucaaguca

SEQ ID NO: 298269 - RNA, 19 nt, Homo sapiens
  misc_RNA (1)...(19): siRNA sense strand
gcagcaagcagucagcaaa

SEQ ID NO: 298270 - RNA, 19 nt, Homo sapiens
  misc_RNA (1)...(19): siRNA sense strand
ggacugccaacuugucuga

SEQ ID NO: 298271 - RNA, 19 nt, Homo sapiens
  misc_RNA (1)...(19): siRNA sense strand
gggcagagaaccaggcaaa

SEQ ID NO: 298272 - RNA, 19 nt, Homo sapiens
  misc_RNA (1)...(19): siRNA sense strand
uuucagaacucacaaagag

SEQ ID NO: 298273 - RNA, 19 nt, Homo sapiens
  misc_RNA (1)...(19): siRNA sense strand
gaacucacaaagagaaaca

SEQ ID NO: 298274 - RNA, 19 nt, Homo sapiens
  misc_RNA (1)...(19): siRNA sense strand
acucugcgcugugcuauga

SEQ ID NO: 298275 - RNA, 19 nt, Homo sapiens
  misc_RNA (1)...(19): siRNA sense strand
gggcccaucaugugguuua

SEQ ID NO: 298276 - RNA, 19 nt, Homo sapiens
  misc_RNA (1)...(19): siRNA sense strand
gaucucagcacaccagaag

SEQ ID NO: 298277 - RNA, 19 nt, Homo sapiens
  misc_RNA (1)...(19): siRNA sense strand
cugacgacguggaguuuaa

SEQ ID NO: 298278 - RNA, 19 nt, Homo sapiens
  misc_RNA (1)...(19): siRNA sense strand
gaaaaguccguaucaguug

SEQ ID NO: 298279 - RNA, 19 nt, Homo sapiens
  misc_RNA (1)...(19): siRNA sense strand
cuucgacccucauagagaa

SEQ ID NO: 298280 - RNA, 19 nt, Homo sapiens
  misc_RNA (1)...(19): siRNA sense strand
ucagaacucacaaagagaa

SEQ ID NO: 298281 - RNA, 19 nt, Homo sapiens
  misc_RNA (1)...(19): siRNA sense strand
ggaauuaaucuacaaucag

SEQ ID NO: 298282 - RNA, 19 nt, Homo sapiens
  misc_RNA (1)...(19): siRNA sense strand
gcuaugcccuggagaucuc

SEQ ID NO: 298283 - RNA, 19 nt, Homo sapiens
  misc_RNA (1)...(19): siRNA sense strand
caaagagaaacaaccugaa

SEQ ID NO: 298284 - RNA, 19 nt, Homo sapiens
  misc_RNA (1)...(19): siRNA sense strand
cuacuacugugugaaguuc

SEQ ID NO: 298285 - RNA, 19 nt, Homo sapiens
  misc_RNA (1)...(19): siRNA sense strand
ucucagacuuccagaccaa

SEQ ID NO: 298286 - RNA, 19 nt, Homo sapiens
  misc_RNA (1)...(19): siRNA sense strand
ugaccugguuggagaaugg

SEQ ID NO: 298287 - RNA, 19 nt, Homo sapiens
  misc_RNA (1)...(19): siRNA sense strand
cagcuucgacccucauaga

SEQ ID NO: 298288 - RNA, 19 nt, Homo sapiens
  misc_RNA (1)...(19): siRNA sense strand
ggccacaccugagcacaca

SEQ ID NO: 298289 - RNA, 19 nt, Homo sapiens
  misc_RNA (1)...(19): siRNA sense strand
ccuuggagguuacucaaca

SEQ ID NO: 298290 - RNA, 19 nt, Homo sapiens
  misc_RNA (1)...(19): siRNA sense strand
gagcacacagugagcuuca

SEQ ID NO: 298291 - RNA, 19 nt, Homo sapiens
  misc_RNA (1)...(19): siRNA sense strand
agagaaacaaccugaacuu

SEQ ID NO: 298292 - RNA, 19 nt, Homo sapiens
  misc_RNA (1)...(19): siRNA sense strand
guuggagaauggaaaugug

SEQ ID NO: 298293 - RNA, 19 nt, Homo sapiens
  misc_RNA (1)...(19): siRNA sense strand
ggacguucacucucaaguc

SEQ ID NO: 298294 - RNA, 19 nt, Homo sapiens
  misc_RNA (1)...(19): siRNA sense strand
gccgggaauuaaucuacaa

SEQ ID NO: 298295 - RNA, 19 nt, Homo sapiens
  misc_RNA (1)...(19): siRNA sense strand
acaucacccugaaaugguu

SEQ ID NO: 298296 - RNA, 19 nt, Homo sapiens
  misc_RNA (1)...(19): siRNA sense strand
agaaacaaccugaacuuuu

SEQ ID NO: 298297 - RNA, 19 nt, Homo sapiens
  misc_RNA (1)...(19): siRNA sense strand
ucagauaucacccaugaac

SEQ ID NO: 298298 - RNA, 19 nt, Homo sapiens
  misc_RNA (1)...(19): siRNA sense strand
cgacguggaguuuaagucu

SEQ ID NO: 298299 - RNA, 19 nt, Homo sapiens
  misc_RNA (1)...(19): siRNA sense strand
acaaggauggcaccuacaa

SEQ ID NO: 298300 - RNA, 19 nt, Homo sapiens
  misc_RNA (1)...(19): siRNA sense strand
gacaucacccugaaauggu

SEQ ID NO: 298301 - RNA, 19 nt, Homo sapiens
  misc_RNA (1)...(19): siRNA sense strand
agacaucacccugaaaugg

SEQ ID NO: 298302 - RNA, 19 nt, Homo sapiens
  misc_RNA (1)...(19): siRNA sense strand
gagacaucacccugaaaug

SEQ ID NO: 298303 - RNA, 19 nt, Homo sapiens
  misc_RNA (1)...(19): siRNA sense strand
agagacaucacccugaaau

SEQ ID NO: 298304 - RNA, 19 nt, Homo sapiens
  misc_RNA (1)...(19): siRNA sense strand
ccaucuacaucugcuggaa

SEQ ID NO: 298305 - RNA, 19 nt, Homo sapiens
  misc_RNA (1)...(19): siRNA sense strand
ccaccuuccuaguccuuuc

SEQ ID NO: 298306 - RNA, 19 nt, Homo sapiens
  misc_RNA (1)...(19): siRNA sense strand
gcuucgacccucauagaga

SEQ ID NO: 298307 - RNA, 19 nt, Homo sapiens
  misc_RNA (1)...(19): siRNA sense strand
ugaaaaguccguaucaguu

SEQ ID NO: 298308 - RNA, 19 nt, Homo sapiens
  misc_RNA (1)...(19): siRNA sense strand
ucgugggacugccaacuug

SEQ ID NO: 298309 - RNA, 19 nt, Homo sapiens
  misc_RNA (1)...(19): siRNA sense strand
gcagagaaccaggcaaacg

SEQ ID NO: 298310 - RNA, 19 nt, Homo sapiens
  misc_RNA (1)...(19): siRNA sense strand
ggagcaugaugggcagcaa

SEQ ID NO: 298311 - RNA, 19 nt, Homo sapiens
  misc_RNA (1)...(19): siRNA sense strand
ugugugaaguuccggaaag

SEQ ID NO: 298312 - RNA, 19 nt, Homo sapiens
  misc_RNA (1)...(19): siRNA sense strand
ggacgagcuacaggugauu

SEQ ID NO: 298313 - RNA, 19 nt, Homo sapiens
  misc_RNA (1)...(19): siRNA sense strand
caucuacaucugcuggaaa

SEQ ID NO: 298314 - RNA, 19 nt, Homo sapiens
  misc_RNA (1)...(19): siRNA sense strand
aaagagaaacaaccugaac

SEQ ID NO: 298315 - RNA, 19 nt, Homo sapiens
  misc_RNA (1)...(19): siRNA sense strand
ccucauagagaacaaggau

SEQ ID NO: 298316 - RNA, 19 nt, Homo sapiens
  misc_RNA (1)...(19): siRNA sense strand
cgagucccauggcuucucu

SEQ ID NO: 298317 - RNA, 19 nt, Homo sapiens
  misc_RNA (1)...(19): siRNA sense strand
ggccacuucccacggguaa

SEQ ID NO: 298318 - RNA, 19 nt, Homo sapiens
  misc_RNA (1)...(19): siRNA sense strand
ucucagcacaccagaagga

SEQ ID NO: 298319 - RNA, 19 nt, Homo sapiens
  misc_RNA (1)...(19): siRNA sense strand
gaaagaaucuccagaaauc

SEQ ID NO: 298320 - RNA, 19 nt, Homo sapiens
  misc_RNA (1)...(19): siRNA sense strand
aaucagaucucucuacuuu

SEQ ID NO: 298321 - RNA, 19 nt, Homo sapiens
  misc_RNA (1)...(19): siRNA sense strand
caucuagacuuaagugaua

SEQ ID NO: 298322 - RNA, 19 nt, Homo sapiens
  misc_RNA (1)...(19): siRNA sense strand
ggaaacggcugaagagcaa

SEQ ID NO: 298323 - RNA, 19 nt, Homo sapiens
  misc_RNA (1)...(19): siRNA sense strand
gcaaagggagugacaaaga

SEQ ID NO: 298324 - RNA, 19 nt, Homo sapiens
  misc_RNA (1)...(19): siRNA sense strand
gaaaucagaucucucuacu

SEQ ID NO: 298325 - RNA, 19 nt, Homo sapiens
  misc_RNA (1)...(19): siRNA sense strand
cagaaagaaucuccagaaa

SEQ ID NO: 298326 - RNA, 19 nt, Homo sapiens
  misc_RNA (1)...(19): siRNA sense strand
cuaaaggucucugguguuu

SEQ ID NO: 298327 - RNA, 19 nt, Homo sapiens
  misc_RNA (1)...(19): siRNA sense strand
ucagaucucucuacuuuag

SEQ ID NO: 298328 - RNA, 19 nt, Homo sapiens
  misc_RNA (1)...(19): siRNA sense strand
cagcaagacuucugaacug

SEQ ID NO: 298329 - RNA, 19 nt, Homo sapiens
  misc_RNA (1)...(19): siRNA sense strand
gagcaaagggagugacaaa

SEQ ID NO: 298330 - RNA, 19 nt, Homo sapiens
  misc_RNA (1)...(19): siRNA sense strand
gauagugucaugcuaaaga

SEQ ID NO: 298331 - RNA, 19 nt, Homo sapiens
  misc_RNA (1)...(19): siRNA sense strand
ucggugcuaugauauaaua

SEQ ID NO: 298332 - RNA, 19 nt, Homo sapiens
  misc_RNA (1)...(19): siRNA sense strand
caaauuuagugcgacuuaa

SEQ ID NO: 298333 - RNA, 19 nt, Homo sapiens
  misc_RNA (1)...(19): siRNA sense strand
cccaggaacugcucucaaa

SEQ ID NO: 298334 - RNA, 19 nt, Homo sapiens
  misc_RNA (1)...(19): siRNA sense strand
aaaggucucugguguuugu

SEQ ID NO: 298335 - RNA, 19 nt, Homo sapiens
  misc_RNA (1)...(19): siRNA sense strand
gaacuuuccagguguuuca

SEQ ID NO: 298336 - RNA, 19 nt, Homo sapiens
  misc_RNA (1)...(19): siRNA sense strand
ugacugcuuucaggaauuu

SEQ ID NO: 298337 - RNA, 19 nt, Homo sapiens
  misc_RNA (1)...(19): siRNA sense strand
ucaaauuuagugcgacuua

SEQ ID NO: 298338 - RNA, 19 nt, Homo sapiens
  misc_RNA (1)...(19): siRNA sense strand
ucacccagcugaaucuuag

SEQ ID NO: 298339 - RNA, 19 nt, Homo sapiens
  misc_RNA (1)...(19): siRNA sense strand
gugauagugucaugcuaaa

SEQ ID NO: 298340 - RNA, 19 nt, Homo sapiens
  misc_RNA (1)...(19): siRNA sense strand
caaagggagugacaaagac

SEQ ID NO: 298341 - RNA, 19 nt, Homo sapiens
  misc_RNA (1)...(19): siRNA sense strand
aagaggagcccgacaguga

SEQ ID NO: 298342 - RNA, 19 nt, Homo sapiens
  misc_RNA (1)...(19): siRNA sense strand
gaaugacugcuuucaggaa

SEQ ID NO: 298343 - RNA, 19 nt, Homo sapiens
  misc_RNA (1)...(19): siRNA sense strand
gaauuugcccugcagacuu

SEQ ID NO: 298344 - RNA, 19 nt, Homo sapiens
  misc_RNA (1)...(19): siRNA sense strand
gguaucgccuagcgucuga

SEQ ID NO: 298345 - RNA, 19 nt, Homo sapiens
  misc_RNA (1)...(19): siRNA sense strand
gaaagaggagcccgacagu

SEQ ID NO: 298346 - RNA, 19 nt, Homo sapiens
  misc_RNA (1)...(19): siRNA sense strand
ucuuguccaucuagacuua

SEQ ID NO: 298347 - RNA, 19 nt, Homo sapiens
  misc_RNA (1)...(19): siRNA sense strand
cucagucggugcuaugaua

SEQ ID NO: 298348 - RNA, 19 nt, Homo sapiens
  misc_RNA (1)...(19): siRNA sense strand
ccacggaaacggcugaaga

SEQ ID NO: 298349 - RNA, 19 nt, Homo sapiens
  misc_RNA (1)...(19): siRNA sense strand
aauuugcccugcagacuuu

SEQ ID NO: 298350 - RNA, 19 nt, Homo sapiens
  misc_RNA (1)...(19): siRNA sense strand
ggaugggauuccagcaaga

SEQ ID NO: 298351 - RNA, 19 nt, Homo sapiens
  misc_RNA (1)...(19): siRNA sense strand
acagaaagaaucuccagaa

SEQ ID NO: 298352 - RNA, 19 nt, Homo sapiens
  misc_RNA (1)...(19): siRNA sense strand
ccagaaaucagaucucucu

SEQ ID NO: 298353 - RNA, 19 nt, Homo sapiens
  misc_RNA (1)...(19): siRNA sense strand
caacuaccuccaacaccua

SEQ ID NO: 298354 - RNA, 19 nt, Homo sapiens
  misc_RNA (1)...(19): siRNA sense strand
guuccaaguugcagaaucu

SEQ ID NO: 298355 - RNA, 19 nt, Homo sapiens
  misc_RNA (1)...(19): siRNA sense strand
uaagcuaaaucgagagaac

SEQ ID NO: 298356 - RNA, 19 nt, Homo sapiens
  misc_RNA (1)...(19): siRNA sense strand
agaaagaaucuccagaaau

SEQ ID NO: 298357 - RNA, 19 nt, Homo sapiens
  misc_RNA (1)...(19): siRNA sense strand
ucccugagcugcuaaaggu

SEQ ID NO: 298358 - RNA, 19 nt, Homo sapiens
  misc_RNA (1)...(19): siRNA sense strand
accauuggcugaacauuuc

SEQ ID NO: 298359 - RNA, 19 nt, Homo sapiens
  misc_RNA (1)...(19): siRNA sense strand
gcuaaaggucucugguguu

SEQ ID NO: 298360 - RNA, 19 nt, Homo sapiens
  misc_RNA (1)...(19): siRNA sense strand
agucggugcuaugauauaa

SEQ ID NO: 298361 - RNA, 19 nt, Homo sapiens
  misc_RNA (1)...(19): siRNA sense strand
gaucucucuacuuuaguua

SEQ ID NO: 298362 - RNA, 19 nt, Homo sapiens
  misc_RNA (1)...(19): siRNA sense strand
gagauuccagaccugagua

SEQ ID NO: 298363 - RNA, 19 nt, Homo sapiens
  misc_RNA (1)...(19): siRNA sense strand
guacagcacauggaccuau

SEQ ID NO: 298364 - RNA, 19 nt, Homo sapiens
  misc_RNA (1)...(19): siRNA sense strand
uuagugcgacuuaaccuuu

SEQ ID NO: 298365 - RNA, 19 nt, Homo sapiens
  misc_RNA (1)...(19): siRNA sense strand
ccgcaggccuaagcuaaau

SEQ ID NO: 298366 - RNA, 19 nt, Homo sapiens
  misc_RNA (1)...(19): siRNA sense strand
agaucucucuacuuuaguu

SEQ ID NO: 298367 - RNA, 19 nt, Homo sapiens
  misc_RNA (1)...(19): siRNA sense strand
ccaaucuuguccaucuaga

SEQ ID NO: 298368 - RNA, 19 nt, Homo sapiens
  misc_RNA (1)...(19): siRNA sense strand
agagaacuuuccagguguu

SEQ ID NO: 298369 - RNA, 19 nt, Homo sapiens
  misc_RNA (1)...(19): siRNA sense strand
gaccaucacccagcugaau

SEQ ID NO: 298370 - RNA, 19 nt, Homo sapiens
  misc_RNA (1)...(19): siRNA sense strand
gaacauuucagcccuuuuc

SEQ ID NO: 298371 - RNA, 19 nt, Homo sapiens
  misc_RNA (1)...(19): siRNA sense strand
ggagauuccagaccugagu

SEQ ID NO: 298372 - RNA, 19 nt, Homo sapiens
  misc_RNA (1)...(19): siRNA sense strand
ccgcugcccacgaucauuu

SEQ ID NO: 298373 - RNA, 19 nt, Homo sapiens
  misc_RNA (1)...(19): siRNA sense strand
auagugucaugcuaaagaa

SEQ ID NO: 298374 - RNA, 19 nt, Homo sapiens
  misc_RNA (1)...(19): siRNA sense strand
cuuaagugauagugucaug

SEQ ID NO: 298375 - RNA, 19 nt, Homo sapiens
  misc_RNA (1)...(19): siRNA sense strand
cuacuuuaguuagaagaug

SEQ ID NO: 298376 - RNA, 19 nt, Homo sapiens
  misc_RNA (1)...(19): siRNA sense strand
aaccauuggcugaacauuu

SEQ ID NO: 298377 - RNA, 19 nt, Homo sapiens
  misc_RNA (1)...(19): siRNA sense strand
gaggagcccgacagugaga

SEQ ID NO: 298378 - RNA, 19 nt, Homo sapiens
  misc_RNA (1)...(19): siRNA sense strand
aaugacugcuuucaggaau

SEQ ID NO: 298379 - RNA, 19 nt, Homo sapiens
  misc_RNA (1)...(19): siRNA sense strand
gcuaaaucgagagaacuuu

SEQ ID NO: 298380 - RNA, 19 nt, Homo sapiens
  misc_RNA (1)...(19): siRNA sense strand
cugaaccucuccugguguu

SEQ ID NO: 298381 - RNA, 19 nt, Homo sapiens
  misc_RNA (1)...(19): siRNA sense strand
cuggaaggccugcggcuuu

SEQ ID NO: 298382 - RNA, 19 nt, Homo sapiens
  misc_RNA (1)...(19): siRNA sense strand
guccgcaggccuaagcuaa

SEQ ID NO: 298383 - RNA, 19 nt, Homo sapiens
  misc_RNA (1)...(19): siRNA sense strand
guuagaagaugccccaauc

SEQ ID NO: 298384 - RNA, 19 nt, Homo sapiens
  misc_RNA (1)...(19): siRNA sense strand
ccuagcgucugaugagucu

SEQ ID NO: 298385 - RNA, 19 nt, Homo sapiens
  misc_RNA (1)...(19): siRNA sense strand
gugccucccugagcugcua

SEQ ID NO: 298386 - RNA, 19 nt, Homo sapiens
  misc_RNA (1)...(19): siRNA sense strand
cuaaaucgagagaacuuuc

SEQ ID NO: 298387 - RNA, 19 nt, Homo sapiens
  misc_RNA (1)...(19): siRNA sense strand
gggauuccagcaagacuuc

SEQ ID NO: 298388 - RNA, 19 nt, Homo sapiens
  misc_RNA (1)...(19): siRNA sense strand
agaccugaguagcaacguu

SEQ ID NO: 298389 - RNA, 19 nt, Homo sapiens
  misc_RNA (1)...(19): siRNA sense strand
gaaccucuccugguguuuu

SEQ ID NO: 298390 - RNA, 19 nt, Homo sapiens
  misc_RNA (1)...(19): siRNA sense strand
ggucucugguguuuguaag

SEQ ID NO: 298391 - RNA, 19 nt, Homo sapiens
  misc_RNA (1)...(19): siRNA sense strand
acauggaccuaucgaacuc

SEQ ID NO: 298392 - RNA, 19 nt, Homo sapiens
  misc_RNA (1)...(19): siRNA sense strand
agugauagugucaugcuaa

SEQ ID NO: 298393 - RNA, 19 nt, Homo sapiens
  misc_RNA (1)...(19): siRNA sense strand
ccaaguugcagaaucuaag

SEQ ID NO: 298394 - RNA, 19 nt, Homo sapiens
  misc_RNA (1)...(19): siRNA sense strand
gagaacuuuccagguguuu

SEQ ID NO: 298395 - RNA, 19 nt, Homo sapiens
  misc_RNA (1)...(19): siRNA sense strand
ugucaauacucucgcaaaa

SEQ ID NO: 298396 - RNA, 19 nt, Homo sapiens
  misc_RNA (1)...(19): siRNA sense strand
uggaaggccugcggcuuuc

SEQ ID NO: 298397 - RNA, 19 nt, Homo sapiens
  misc_RNA (1)...(19): siRNA sense strand
ucacucagucggugcuaug

SEQ ID NO: 298398 - RNA, 19 nt, Homo sapiens
  misc_RNA (1)...(19): siRNA sense strand
gcccugcagacuuugcuaa

SEQ ID NO: 298399 - RNA, 19 nt, Homo sapiens
  misc_RNA (1)...(19): siRNA sense strand
gaaagaaucuccagaaauc

SEQ ID NO: 298400 - RNA, 19 nt, Homo sapiens
  misc_RNA (1)...(19): siRNA sense strand
aaucagaucucucuacuuu

SEQ ID NO: 298401 - RNA, 19 nt, Homo sapiens
  misc_RNA (1)...(19): siRNA sense strand
caucuagacuuaagugaua

SEQ ID NO: 298402 - RNA, 19 nt, Homo sapiens
  misc_RNA (1)...(19): siRNA sense strand
ggaaacggcugaagagcaa

SEQ ID NO: 298403 - RNA, 19 nt, Homo sapiens
  misc_RNA (1)...(19): siRNA sense strand
gcaaagggagugacaaaga

SEQ ID NO: 298404 - RNA, 19 nt, Homo sapiens
  misc_RNA (1)...(19): siRNA sense strand
gaaaucagaucucucuacu

SEQ ID NO: 298405 - RNA, 19 nt, Homo sapiens
  misc_RNA (1)...(19): siRNA sense strand
cagaaagaaucuccagaaa

SEQ ID NO: 298406 - RNA, 19 nt, Homo sapiens
  misc_RNA (1)...(19): siRNA sense strand
cuaaaggucucugguguuu

SEQ ID NO: 298407 - RNA, 19 nt, Homo sapiens
  misc_RNA (1)...(19): siRNA sense strand
ucagaucucucuacuuuag

SEQ ID NO: 298408 - RNA, 19 nt, Homo sapiens
  misc_RNA (1)...(19): siRNA sense strand
cagcaagacuucugaacug

SEQ ID NO: 298409 - RNA, 19 nt, Homo sapiens
  misc_RNA (1)...(19): siRNA sense strand
gagcaaagggagugacaaa

SEQ ID NO: 298410 - RNA, 19 nt, Homo sapiens
  misc_RNA (1)...(19): siRNA sense strand
gauagugucaugcuaaaga

SEQ ID NO: 298411 - RNA, 19 nt, Homo sapiens
  misc_RNA (1)...(19): siRNA sense strand
ucggugcuaugauauaaua

SEQ ID NO: 298412 - RNA, 19 nt, Homo sapiens
  misc_RNA (1)...(19): siRNA sense strand
caaauuuagugcgacuuaa

SEQ ID NO: 298413 - RNA, 19 nt, Homo sapiens
  misc_RNA (1)...(19): siRNA sense strand
cccaggaacugcucucaaa

SEQ ID NO: 298414 - RNA, 19 nt, Homo sapiens
  misc_RNA (1)...(19): siRNA sense strand
aaaggucucugguguuugu

SEQ ID NO: 298415 - RNA, 19 nt, Homo sapiens
  misc_RNA (1)...(19): siRNA sense strand
gaacuuuccagguguuuca

SEQ ID NO: 298416 - RNA, 19 nt, Homo sapiens
  misc_RNA (1)...(19): siRNA sense strand
ugacugcuuucaggaauuu

SEQ ID NO: 298417 - RNA, 19 nt, Homo sapiens
  misc_RNA (1)...(19): siRNA sense strand
ucaaauuuagugcgacuua

SEQ ID NO: 298418 - RNA, 19 nt, Homo sapiens
  misc_RNA (1)...(19): siRNA sense strand
ucacccagcugaaucuuag

SEQ ID NO: 298419 - RNA, 19 nt, Homo sapiens
  misc_RNA (1)...(19): siRNA sense strand
gugauagugucaugcuaaa

SEQ ID NO: 298420 - RNA, 19 nt, Homo sapiens
  misc_RNA (1)...(19): siRNA sense strand
caaagggagugacaaagac

SEQ ID NO: 298421 - RNA, 19 nt, Homo sapiens
  misc_RNA (1)...(19): siRNA sense strand
aagaggagcccgacaguga

SEQ ID NO: 298422 - RNA, 19 nt, Homo sapiens
  misc_RNA (1)...(19): siRNA sense strand
gaaugacugcuuucaggaa

SEQ ID NO: 298423 - RNA, 19 nt, Homo sapiens
  misc_RNA (1)...(19): siRNA sense strand
gaauuugcccugcagacuu

SEQ ID NO: 298424 - RNA, 19 nt, Homo sapiens
  misc_RNA (1)...(19): siRNA sense strand
gguaucgccuagcgucuga

SEQ ID NO: 298425 - RNA, 19 nt, Homo sapiens
  misc_RNA (1)...(19): siRNA sense strand
gaaagaggagcccgacagu

SEQ ID NO: 298426 - RNA, 19 nt, Homo sapiens
  misc_RNA (1)...(19): siRNA sense strand
ucuuguccaucuagacuua

SEQ ID NO: 298427 - RNA, 19 nt, Homo sapiens
  misc_RNA (1)...(19): siRNA sense strand
cucagucggugcuaugaua

SEQ ID NO: 298428 - RNA, 19 nt, Homo sapiens
  misc_RNA (1)...(19): siRNA sense strand
ccacggaaacggcugaaga

SEQ ID NO: 298429 - RNA, 19 nt, Homo sapiens
  misc_RNA (1)...(19): siRNA sense strand
aauuugcccugcagacuuu

SEQ ID NO: 298430 - RNA, 19 nt, Homo sapiens
  misc_RNA (1)...(19): siRNA sense strand
ggaugggauuccagcaaga

SEQ ID NO: 298431 - RNA, 19 nt, Homo sapiens
  misc_RNA (1)...(19): siRNA sense strand
acagaaagaaucuccagaa

SEQ ID NO: 298432 - RNA, 19 nt, Homo sapiens
  misc_RNA (1)...(19): siRNA sense strand
ccagaaaucagaucucucu

SEQ ID NO: 298433 - RNA, 19 nt, Homo sapiens
  misc_RNA (1)...(19): siRNA sense strand
caacuaccuccaacaccua

SEQ ID NO: 298434 - RNA, 19 nt, Homo sapiens
  misc_RNA (1)...(19): siRNA sense strand
guuccaaguugcagaaucu

SEQ ID NO: 298435 - RNA, 19 nt, Homo sapiens
  misc_RNA (1)...(19): siRNA sense strand
uaagcuaaaucgagagaac

SEQ ID NO: 298436 - RNA, 19 nt, Homo sapiens
  misc_RNA (1)...(19): siRNA sense strand
agaaagaaucuccagaaau

SEQ ID NO: 298437 - RNA, 19 nt, Homo sapiens
  misc_RNA (1)...(19): siRNA sense strand
ucccugagcugcuaaaggu

SEQ ID NO: 298438 - RNA, 19 nt, Homo sapiens
  misc_RNA (1)...(19): siRNA sense strand
accauuggcugaacauuuc

SEQ ID NO: 298439 - RNA, 19 nt, Homo sapiens
  misc_RNA (1)...(19): siRNA sense strand
gcuaaaggucucugguguu

SEQ ID NO: 298440 - RNA, 19 nt, Homo sapiens
  misc_RNA (1)...(19): siRNA sense strand
agucggugcuaugauauaa

SEQ ID NO: 298441 - RNA, 19 nt, Homo sapiens
  misc_RNA (1)...(19): siRNA sense strand
gaucucucuacuuuaguua

SEQ ID NO: 298442 - RNA, 19 nt, Homo sapiens
  misc_RNA (1)...(19): siRNA sense strand
gagauuccagaccugagua

SEQ ID NO: 298443 - RNA, 19 nt, Homo sapiens
  misc_RNA (1)...(19): siRNA sense strand
guacagcacauggaccuau

SEQ ID NO: 298444 - RNA, 19 nt, Homo sapiens
  misc_RNA (1)...(19): siRNA sense strand
uuagugcgacuuaaccuuu

SEQ ID NO: 298445 - RNA, 19 nt, Homo sapiens
  misc_RNA (1)...(19): siRNA sense strand
ccgcaggccuaagcuaaau

SEQ ID NO: 298446 - RNA, 19 nt, Homo sapiens
  misc_RNA (1)...(19): siRNA sense strand
agaucucucuacuuuaguu

SEQ ID NO: 298447 - RNA, 19 nt, Homo sapiens
  misc_RNA (1)...(19): siRNA sense strand
ccaaucuuguccaucuaga

SEQ ID NO: 298448 - RNA, 19 nt, Homo sapiens
  misc_RNA (1)...(19): siRNA sense strand
agagaacuuuccagguguu

SEQ ID NO: 298449 - RNA, 19 nt, Homo sapiens
  misc_RNA (1)...(19): siRNA sense strand
gaccaucacccagcugaau

SEQ ID NO: 298450 - RNA, 19 nt, Homo sapiens
  misc_RNA (1)...(19): siRNA sense strand
gaacauuucagcccuuuuc

SEQ ID NO: 298451 - RNA, 19 nt, Homo sapiens
  misc_RNA (1)...(19): siRNA sense strand
ggagauuccagaccugagu

SEQ ID NO: 298452 - RNA, 19 nt, Homo sapiens
  misc_RNA (1)...(19): siRNA sense strand
ccgcugcccacgaucauuu

SEQ ID NO: 298453 - RNA, 19 nt, Homo sapiens
  misc_RNA (1)...(19): siRNA sense strand
auagugucaugcuaaagaa

SEQ ID NO: 298454 - RNA, 19 nt, Homo sapiens
  misc_RNA (1)...(19): siRNA sense strand
cuuaagugauagugucaug

SEQ ID NO: 298455 - RNA, 19 nt, Homo sapiens
  misc_RNA (1)...(19): siRNA sense strand
cuacuuuaguuagaagaug

SEQ ID NO: 298456 - RNA, 19 nt, Homo sapiens
  misc_RNA (1)...(19): siRNA sense strand
aaccauuggcugaacauuu

SEQ ID NO: 298457 - RNA, 19 nt, Homo sapiens
  misc_RNA (1)...(19): siRNA sense strand
gaggagcccgacagugaga

SEQ ID NO: 298458 - RNA, 19 nt, Homo sapiens
  misc_RNA (1)...(19): siRNA sense strand
aaugacugcuuucaggaau

SEQ ID NO: 298459 - RNA, 19 nt, Homo sapiens
  misc_RNA (1)...(19): siRNA sense strand
gcuaaaucgagagaacuuu

SEQ ID NO: 298460 - RNA, 19 nt, Homo sapiens
  misc_RNA (1)...(19): siRNA sense strand
cugaaccucuccugguguu

SEQ ID NO: 298461 - RNA, 19 nt, Homo sapiens
  misc_RNA (1)...(19): siRNA sense strand
cuggaaggccugcggcuuu

SEQ ID NO: 298462 - RNA, 19 nt, Homo sapiens
  misc_RNA (1)...(19): siRNA sense strand
guccgcaggccuaagcuaa

SEQ ID NO: 298463 - RNA, 19 nt, Homo sapiens
  misc_RNA (1)...(19): siRNA sense strand
guuagaagaugccccaauc

SEQ ID NO: 298464 - RNA, 19 nt, Homo sapiens
  misc_RNA (1)...(19): siRNA sense strand
ccuagcgucugaugagucu

SEQ ID NO: 298465 - RNA, 19 nt, Homo sapiens
  misc_RNA (1)...(19): siRNA sense strand
gugccucccugagcugcua

SEQ ID NO: 298466 - RNA, 19 nt, Homo sapiens
  misc_RNA (1)...(19): siRNA sense strand
cuaaaucgagagaacuuuc

SEQ ID NO: 298467 - RNA, 19 nt, Homo sapiens
  misc_RNA (1)...(19): siRNA sense strand
gggauuccagcaagacuuc

SEQ ID NO: 298468 - RNA, 19 nt, Homo sapiens
  misc_RNA (1)...(19): siRNA sense strand
agaccugaguagcaacguu

SEQ ID NO: 298469 - RNA, 19 nt, Homo sapiens
  misc_RNA (1)...(19): siRNA sense strand
gaaccucuccugguguuuu

SEQ ID NO: 298470 - RNA, 19 nt, Homo sapiens
  misc_RNA (1)...(19): siRNA sense strand
ggucucugguguuuguaag

SEQ ID NO: 298471 - RNA, 19 nt, Homo sapiens
  misc_RNA (1)...(19): siRNA sense strand
acauggaccuaucgaacuc

SEQ ID NO: 298472 - RNA, 19 nt, Homo sapiens
  misc_RNA (1)...(19): siRNA sense strand
agugauagugucaugcuaa

SEQ ID NO: 298473 - RNA, 19 nt, Homo sapiens
  misc_RNA (1)...(19): siRNA sense strand
ccaaguugcagaaucuaag

SEQ ID NO: 298474 - RNA, 19 nt, Homo sapiens
  misc_RNA (1)...(19): siRNA sense strand
gagaacuuuccagguguuu

SEQ ID NO: 298475 - RNA, 19 nt, Homo sapiens
  misc_RNA (1)...(19): siRNA sense strand
ugucaauacucucgcaaaa

SEQ ID NO: 298476 - RNA, 19 nt, Homo sapiens
  misc_RNA (1)...(19): siRNA sense strand
uggaaggccugcggcuuuc

SEQ ID NO: 298477 - RNA, 19 nt, Homo sapiens
  misc_RNA (1)...(19): siRNA sense strand
ucacucagucggugcuaug

SEQ ID NO: 298478 - RNA, 19 nt, Homo sapiens
  misc_RNA (1)...(19): siRNA sense strand
gcccugcagacuuugcuaa

SEQ ID NO: 298479 - RNA, 19 nt, Homo sapiens
  misc_RNA (1)...(19): siRNA sense strand
ccaagacgcugcucaagaa

SEQ ID NO: 298480 - RNA, 19 nt, Homo sapiens
  misc_RNA (1)...(19): siRNA sense strand
ugaaggagcacccggauua

SEQ ID NO: 298481 - RNA, 19 nt, Homo sapiens
  misc_RNA (1)...(19): siRNA sense strand
gcacccggauuacaaguac

SEQ ID NO: 298482 - RNA, 19 nt, Homo sapiens
  misc_RNA (1)...(19): siRNA sense strand
gcgagaugaucagcaugua

SEQ ID NO: 298483 - RNA, 19 nt, Homo sapiens
  misc_RNA (1)...(19): siRNA sense strand
gcaagauggcccaggagaa

SEQ ID NO: 298484 - RNA, 19 nt, Homo sapiens
  misc_RNA (1)...(19): siRNA sense strand
agacgcugcucaagaagga

SEQ ID NO: 298485 - RNA, 19 nt, Homo sapiens
  misc_RNA (1)...(19): siRNA sense strand
gagaugaucagcauguacu

SEQ ID NO: 298486 - RNA, 19 nt, Homo sapiens
  misc_RNA (1)...(19): siRNA sense strand
ucaagaaggacaaguacuc

SEQ ID NO: 298487 - RNA, 19 nt, Homo sapiens
  misc_RNA (1)...(19): siRNA sense strand
caagauggcccaggagaac

SEQ ID NO: 298488 - RNA, 19 nt, Homo sapiens
  misc_RNA (1)...(19): siRNA sense strand
gaugaucagcauguacuug

SEQ ID NO: 298489 - RNA, 19 nt, Homo sapiens
  misc_RNA (1)...(19): siRNA sense strand
gaccugcgcgagaugauca

SEQ ID NO: 298490 - RNA, 19 nt, Homo sapiens
  misc_RNA (1)...(19): siRNA sense strand
gcucaagaaggacaaguac

SEQ ID NO: 298491 - RNA, 19 nt, Homo sapiens
  misc_RNA (1)...(19): siRNA sense strand
gcugggcucucuggugaag

SEQ ID NO: 298492 - RNA, 19 nt, Homo sapiens
  misc_RNA (1)...(19): siRNA sense strand
gaaggagcacccggauuac

SEQ ID NO: 298493 - RNA, 19 nt, Homo sapiens
  misc_RNA (1)...(19): siRNA sense strand
caacucgcagggcuacaug

SEQ ID NO: 298494 - RNA, 19 nt, Homo sapiens
  misc_RNA (1)...(19): siRNA sense strand
ggucaaacggcccaugaac

SEQ ID NO: 298495 - RNA, 19 nt, Homo sapiens
  misc_RNA (1)...(19): siRNA sense strand
ggagcacccggauuacaag

SEQ ID NO: 298496 - RNA, 19 nt, Homo sapiens
  misc_RNA (1)...(19): siRNA sense strand
gaacaagccaggacucaaa

SEQ ID NO: 298497 - RNA, 19 nt, Homo sapiens
  misc_RNA (1)...(19): siRNA sense strand
gaagauagcagaaggaaag

SEQ ID NO: 298498 - RNA, 19 nt, Homo sapiens
  misc_RNA (1)...(19): siRNA sense strand
gacagcagcucaaauuguu

SEQ ID NO: 298499 - RNA, 19 nt, Homo sapiens
  misc_RNA (1)...(19): siRNA sense strand
gcaaaugguuauaucacaa

SEQ ID NO: 298500 - RNA, 19 nt, Homo sapiens
  misc_RNA (1)...(19): siRNA sense strand
guuaaaggaugcacuucua

SEQ ID NO: 298501 - RNA, 19 nt, Homo sapiens
  misc_RNA (1)...(19): siRNA sense strand
uaagacagcagcucaaauu

SEQ ID NO: 298502 - RNA, 19 nt, Homo sapiens
  misc_RNA (1)...(19): siRNA sense strand
gauggaagcuugcaaagac

SEQ ID NO: 298503 - RNA, 19 nt, Homo sapiens
  misc_RNA (1)...(19): siRNA sense strand
ggaaagcuaugggcuacaa

SEQ ID NO: 298504 - RNA, 19 nt, Homo sapiens
  misc_RNA (1)...(19): siRNA sense strand
gaauacccauuucaugaug

SEQ ID NO: 298505 - RNA, 19 nt, Homo sapiens
  misc_RNA (1)...(19): siRNA sense strand
gaaauauacccuagagaug

SEQ ID NO: 298506 - RNA, 19 nt, Homo sapiens
  misc_RNA (1)...(19): siRNA sense strand
gaagguugcuauugacaca

SEQ ID NO: 298507 - RNA, 19 nt, Homo sapiens
  misc_RNA (1)...(19): siRNA sense strand
gccaggagaugaaauauac

SEQ ID NO: 298508 - RNA, 19 nt, Homo sapiens
  misc_RNA (1)...(19): siRNA sense strand
caaaucaugucccagagau

SEQ ID NO: 298509 - RNA, 19 nt, Homo sapiens
  misc_RNA (1)...(19): siRNA sense strand
gaugaaauauacccuagag

SEQ ID NO: 298510 - RNA, 19 nt, Homo sapiens
  misc_RNA (1)...(19): siRNA sense strand
gaaguacccauggccuuua

SEQ ID NO: 298511 - RNA, 19 nt, Homo sapiens
  misc_RNA (1)...(19): siRNA sense strand
gaaacagcauucccaucau

SEQ ID NO: 298512 - RNA, 19 nt, Homo sapiens
  misc_RNA (1)...(19): siRNA sense strand
gacacaggguaccgacaua

SEQ ID NO: 298513 - RNA, 19 nt, Homo sapiens
  misc_RNA (1)...(19): siRNA sense strand
gagaauggcaaaugguuau

SEQ ID NO: 298514 - RNA, 19 nt, Homo sapiens
  misc_RNA (1)...(19): siRNA sense strand
gggaaaagguacaauaaga

SEQ ID NO: 298515 - RNA, 19 nt, Homo sapiens
  misc_RNA (1)...(19): siRNA sense strand
uaucacaagucaaaucugu

SEQ ID NO: 298516 - RNA, 19 nt, Homo sapiens
  misc_RNA (1)...(19): siRNA sense strand
gguuauaucacaagucaaa

SEQ ID NO: 298517 - RNA, 19 nt, Homo sapiens
  misc_RNA (1)...(19): siRNA sense strand
ccagcuagauuauguggau

SEQ ID NO: 298518 - RNA, 19 nt, Homo sapiens
  misc_RNA (1)...(19): siRNA sense strand
ccgcauaccucuaagugau

SEQ ID NO: 298519 - RNA, 19 nt, Homo sapiens
  misc_RNA (1)...(19): siRNA sense strand
uaagggagccugugcaaca

SEQ ID NO: 298520 - RNA, 19 nt, Homo sapiens
  misc_RNA (1)...(19): siRNA sense strand
uaagccaggagaugaaaua

SEQ ID NO: 298521 - RNA, 19 nt, Homo sapiens
  misc_RNA (1)...(19): siRNA sense strand
gcuaugggcuacaaaucau

SEQ ID NO: 298522 - RNA, 19 nt, Homo sapiens
  misc_RNA (1)...(19): siRNA sense strand
gauaucuucuacuguggaa

SEQ ID NO: 298523 - RNA, 19 nt, Homo sapiens
  misc_RNA (1)...(19): siRNA sense strand
gacauugaagccuugaaua

SEQ ID NO: 298524 - RNA, 19 nt, Homo sapiens
  misc_RNA (1)...(19): siRNA sense strand
ggacauugaagccuugaau

SEQ ID NO: 298525 - RNA, 19 nt, Homo sapiens
  misc_RNA (1)...(19): siRNA sense strand
uaaaggaugcacuucuaaa

SEQ ID NO: 298526 - RNA, 19 nt, Homo sapiens
  misc_RNA (1)...(19): siRNA sense strand
gagaugagaauggcaaaug

SEQ ID NO: 298527 - RNA, 19 nt, Homo sapiens
  misc_RNA (1)...(19): siRNA sense strand
ugaaauauacccuagagau

SEQ ID NO: 298528 - RNA, 19 nt, Homo sapiens
  misc_RNA (1)...(19): siRNA sense strand
cggugaagguugcuauuga

SEQ ID NO: 298529 - RNA, 19 nt, Homo sapiens
  misc_RNA (1)...(19): siRNA sense strand
ggaugcacuucuaaacuca

SEQ ID NO: 298530 - RNA, 19 nt, Homo sapiens
  misc_RNA (1)...(19): siRNA sense strand
ggcaaaugguuauaucaca

SEQ ID NO: 298531 - RNA, 19 nt, Homo sapiens
  misc_RNA (1)...(19): siRNA sense strand
aaauauacccuagagauga

SEQ ID NO: 298532 - RNA, 19 nt, Homo sapiens
  misc_RNA (1)...(19): siRNA sense strand
aaacagcauucccaucauc

SEQ ID NO: 298533 - RNA, 19 nt, Homo sapiens
  misc_RNA (1)...(19): siRNA sense strand
acauugaagccuugaauaa

SEQ ID NO: 298534 - RNA, 19 nt, Homo sapiens
  misc_RNA (1)...(19): siRNA sense strand
aagaagaaaugaaggacau

SEQ ID NO: 298535 - RNA, 19 nt, Homo sapiens
  misc_RNA (1)...(19): siRNA sense strand
gagaagauagcagaaggaa

SEQ ID NO: 298536 - RNA, 19 nt, Homo sapiens
  misc_RNA (1)...(19): siRNA sense strand
gaaaggugcggagggaaga

SEQ ID NO: 298537 - RNA, 19 nt, Homo sapiens
  misc_RNA (1)...(19): siRNA sense strand
caaucugggugaauguuuc

SEQ ID NO: 298538 - RNA, 19 nt, Homo sapiens
  misc_RNA (1)...(19): siRNA sense strand
ggaauccaaucugggugaa

SEQ ID NO: 298539 - RNA, 19 nt, Homo sapiens
  misc_RNA (1)...(19): siRNA sense strand
ugagaauggcaaaugguua

SEQ ID NO: 298540 - RNA, 19 nt, Homo sapiens
  misc_RNA (1)...(19): siRNA sense strand
cauugaagccuugaauaaa

SEQ ID NO: 298541 - RNA, 19 nt, Homo sapiens
  misc_RNA (1)...(19): siRNA sense strand
ucaaaucugugugccacuu

SEQ ID NO: 298542 - RNA, 19 nt, Homo sapiens
  misc_RNA (1)...(19): siRNA sense strand
gaauggcaaaugguuauau

SEQ ID NO: 298543 - RNA, 19 nt, Homo sapiens
  misc_RNA (1)...(19): siRNA sense strand
guggaucuuuacaucauug

SEQ ID NO: 298544 - RNA, 19 nt, Homo sapiens
  misc_RNA (1)...(19): siRNA sense strand
ggagaagauagcagaagga

SEQ ID NO: 298545 - RNA, 19 nt, Homo sapiens
  misc_RNA (1)...(19): siRNA sense strand
agccaaaacucuugaaauu

SEQ ID NO: 298546 - RNA, 19 nt, Homo sapiens
  misc_RNA (1)...(19): siRNA sense strand
cuucuacuguggaaagcua

SEQ ID NO: 298547 - RNA, 19 nt, Homo sapiens
  misc_RNA (1)...(19): siRNA sense strand
gcgcgaucauccugaauac

SEQ ID NO: 298548 - RNA, 19 nt, Homo sapiens
  misc_RNA (1)...(19): siRNA sense strand
ugaaguacccauggccuuu

SEQ ID NO: 298549 - RNA, 19 nt, Homo sapiens
  misc_RNA (1)...(19): siRNA sense strand
gcaaagacgcuggcuuggu

SEQ ID NO: 298550 - RNA, 19 nt, Homo sapiens
  misc_RNA (1)...(19): siRNA sense strand
uuaaaggaugcacuucuaa

SEQ ID NO: 298551 - RNA, 19 nt, Homo sapiens
  misc_RNA (1)...(19): siRNA sense strand
guaccuacucagaaccuaa

SEQ ID NO: 298552 - RNA, 19 nt, Homo sapiens
  misc_RNA (1)...(19): siRNA sense strand
aauccaaucugggugaaug

SEQ ID NO: 298553 - RNA, 19 nt, Homo sapiens
  misc_RNA (1)...(19): siRNA sense strand
acauugucauuacugcaua

SEQ ID NO: 298554 - RNA, 19 nt, Homo sapiens
  misc_RNA (1)...(19): siRNA sense strand
gacgcuggcuuggugaaau

SEQ ID NO: 298555 - RNA, 19 nt, Homo sapiens
  misc_RNA (1)...(19): siRNA sense strand
ggcgcgaucauccugaaua

SEQ ID NO: 298556 - RNA, 19 nt, Homo sapiens
  misc_RNA (1)...(19): siRNA sense strand
ccaaucugggugaauguuu

SEQ ID NO: 298557 - RNA, 19 nt, Homo sapiens
  misc_RNA (1)...(19): siRNA sense strand
gggaggccaucagggagaa

SEQ ID NO: 298558 - RNA, 19 nt, Homo sapiens
  misc_RNA (1)...(19): siRNA sense strand
gggugguugucauuccuaa

SEQ ID NO: 298559 - RNA, 19 nt, Homo sapiens
  misc_RNA (1)...(19): siRNA sense strand
agacagcagcucaaauugu

SEQ ID NO: 298560 - RNA, 19 nt, Homo sapiens
  misc_RNA (1)...(19): siRNA sense strand
gaucuuuacaucauugaag

SEQ ID NO: 298561 - RNA, 19 nt, Homo sapiens
  misc_RNA (1)...(19): siRNA sense strand
gaaagcuaugggcuacaaa

SEQ ID NO: 298562 - RNA, 19 nt, Homo sapiens
  misc_RNA (1)...(19): siRNA sense strand
gggccuacaucuaccaaaa

SEQ ID NO: 298563 - RNA, 19 nt, Homo sapiens
  misc_RNA (1)...(19): siRNA sense strand
ucacugaagaagaaaugaa

SEQ ID NO: 298564 - RNA, 19 nt, Homo sapiens
  misc_RNA (1)...(19): siRNA sense strand
ggaucucagugcugcaagu

SEQ ID NO: 298565 - RNA, 19 nt, Homo sapiens
  misc_RNA (1)...(19): siRNA sense strand
ggugaagguugcuauugac

SEQ ID NO: 298566 - RNA, 19 nt, Homo sapiens
  misc_RNA (1)...(19): siRNA sense strand
gaaaagguacaauaagaca

SEQ ID NO: 298567 - RNA, 19 nt, Homo sapiens
  misc_RNA (1)...(19): siRNA sense strand
agucaccgcauaccucuaa

SEQ ID NO: 298568 - RNA, 19 nt, Homo sapiens
  misc_RNA (1)...(19): siRNA sense strand
aaguacccauggccuuuaa

SEQ ID NO: 298569 - RNA, 19 nt, Homo sapiens
  misc_RNA (1)...(19): siRNA sense strand
caggguaccgacauauuga

SEQ ID NO: 298570 - RNA, 19 nt, Homo sapiens
  misc_RNA (1)...(19): siRNA sense strand
ucaggguccuccagcuaga

SEQ ID NO: 298571 - RNA, 19 nt, Homo sapiens
  misc_RNA (1)...(19): siRNA sense strand
cauccugaauacccauuuc

SEQ ID NO: 298572 - RNA, 19 nt, Homo sapiens
  misc_RNA (1)...(19): siRNA sense strand
uguccgcuuuguagaauug

SEQ ID NO: 298573 - RNA, 19 nt, Homo sapiens
  misc_RNA (1)...(19): siRNA sense strand
agccaggacucaaacacaa

SEQ ID NO: 298574 - RNA, 19 nt, Homo sapiens
  misc_RNA (1)...(19): siRNA sense strand
acaggguaccgacauauug

SEQ ID NO: 298575 - RNA, 19 nt, Homo sapiens
  misc_RNA (1)...(19): siRNA sense strand
caauaagacagcagcucaa

SEQ ID NO: 298576 - RNA, 19 nt, Homo sapiens
  misc_RNA (1)...(19): siRNA sense strand
aaauguccgcuuuguagaa

SEQ ID NO: 298577 - RNA, 19 nt, Homo sapiens
  misc_RNA (1)...(19): siRNA sense strand
aauggcaaaugguuauauc

SEQ ID NO: 298578 - RNA, 19 nt, Homo sapiens
  misc_RNA (1)...(19): siRNA sense strand
gcacuucuaaacucauugg

SEQ ID NO: 298579 - RNA, 19 nt, Homo sapiens
  misc_RNA (1)...(19): siRNA sense strand
ugagugccauccguauuuc

SEQ ID NO: 298580 - RNA, 19 nt, Homo sapiens
  misc_RNA (1)...(19): siRNA sense strand
cccugggaguguccaauuu

SEQ ID NO: 298581 - RNA, 19 nt, Homo sapiens
  misc_RNA (1)...(19): siRNA sense strand
caaaugguuauaucacaag

SEQ ID NO: 298582 - RNA, 19 nt, Homo sapiens
  misc_RNA (1)...(19): siRNA sense strand
agaugagaauggcaaaugg

SEQ ID NO: 298583 - RNA, 19 nt, Homo sapiens
  misc_RNA (1)...(19): siRNA sense strand
aggaugcacuucuaaacuc

SEQ ID NO: 298584 - RNA, 19 nt, Homo sapiens
  misc_RNA (1)...(19): siRNA sense strand
uugagugccauccguauuu

SEQ ID NO: 298585 - RNA, 19 nt, Homo sapiens
  misc_RNA (1)...(19): siRNA sense strand
ggccaucagggagaagaua

SEQ ID NO: 298586 - RNA, 19 nt, Homo sapiens
  misc_RNA (1)...(19): siRNA sense strand
ggaccaguaggaauccaau

SEQ ID NO: 298587 - RNA, 19 nt, Homo sapiens
  misc_RNA (1)...(19): siRNA sense strand
augguuauaucacaaguca

SEQ ID NO: 298588 - RNA, 19 nt, Homo sapiens
  misc_RNA (1)...(19): siRNA sense strand
aauauacccuagagaugag

SEQ ID NO: 298589 - RNA, 19 nt, Homo sapiens
  misc_RNA (1)...(19): siRNA sense strand
aauguccgcuuuguagaau

SEQ ID NO: 298590 - RNA, 19 nt, Homo sapiens
  misc_RNA (1)...(19): siRNA sense strand
aauaagacagcagcucaaa

SEQ ID NO: 298591 - RNA, 19 nt, Homo sapiens
  misc_RNA (1)...(19): siRNA sense strand
ccacuugggaggcgaugga

SEQ ID NO: 298592 - RNA, 19 nt, Homo sapiens
  misc_RNA (1)...(19): siRNA sense strand
cacaggguaccgacauauu

SEQ ID NO: 298593 - RNA, 19 nt, Homo sapiens
  misc_RNA (1)...(19): siRNA sense strand
cuaccaaaaugaacacgaa

SEQ ID NO: 298594 - RNA, 19 nt, Homo sapiens
  misc_RNA (1)...(19): siRNA sense strand
cgauggaagcuugcaaaga

SEQ ID NO: 298595 - RNA, 19 nt, Homo sapiens
  misc_RNA (1)...(19): siRNA sense strand
ggcgauggaagcuugcaaa

SEQ ID NO: 298596 - RNA, 19 nt, Homo sapiens
  misc_RNA (1)...(19): siRNA sense strand
guacgcaccugcacauuua

SEQ ID NO: 298597 - RNA, 19 nt, Homo sapiens
  misc_RNA (1)...(19): siRNA sense strand
gaaagcagcuguccugugu

SEQ ID NO: 298598 - RNA, 19 nt, Homo sapiens
  misc_RNA (1)...(19): siRNA sense strand
caauauggcuacuggguua

SEQ ID NO: 298599 - RNA, 19 nt, Homo sapiens
  misc_RNA (1)...(19): siRNA sense strand
uuaaagagcugacagaugu

SEQ ID NO: 298600 - RNA, 19 nt, Homo sapiens
  misc_RNA (1)...(19): siRNA sense strand
caccaaacauuccgcauaa

SEQ ID NO: 298601 - RNA, 19 nt, Homo sapiens
  misc_RNA (1)...(19): siRNA sense strand
ccaagaaacuaaagagugu

SEQ ID NO: 298602 - RNA, 19 nt, Homo sapiens
  misc_RNA (1)...(19): siRNA sense strand
uaaacgagguggucaagga

SEQ ID NO: 298603 - RNA, 19 nt, Homo sapiens
  misc_RNA (1)...(19): siRNA sense strand
cugagaagcuggaagauga

SEQ ID NO: 298604 - RNA, 19 nt, Homo sapiens
  misc_RNA (1)...(19): siRNA sense strand
cuacuggguuauaggauua

SEQ ID NO: 298605 - RNA, 19 nt, Homo sapiens
  misc_RNA (1)...(19): siRNA sense strand
agugaaagcuggacauuga

SEQ ID NO: 298606 - RNA, 19 nt, Homo sapiens
  misc_RNA (1)...(19): siRNA sense strand
ucaaagaggucaagaugag

SEQ ID NO: 298607 - RNA, 19 nt, Homo sapiens
  misc_RNA (1)...(19): siRNA sense strand
ggaggaaggugaggugaau

SEQ ID NO: 298608 - RNA, 19 nt, Homo sapiens
  misc_RNA (1)...(19): siRNA sense strand
caaaaucuguuuccaagaa

SEQ ID NO: 298609 - RNA, 19 nt, Homo sapiens
  misc_RNA (1)...(19): siRNA sense strand
gaaacuaaagaguguauuc

SEQ ID NO: 298610 - RNA, 19 nt, Homo sapiens
  misc_RNA (1)...(19): siRNA sense strand
guagaugugucuggaaaga

SEQ ID NO: 298611 - RNA, 19 nt, Homo sapiens
  misc_RNA (1)...(19): siRNA sense strand
gcuacuggguuauaggauu

SEQ ID NO: 298612 - RNA, 19 nt, Homo sapiens
  misc_RNA (1)...(19): siRNA sense strand
ggauuucucaguaaaggua

SEQ ID NO: 298613 - RNA, 19 nt, Homo sapiens
  misc_RNA (1)...(19): siRNA sense strand
gaauucaaauccaugugau

SEQ ID NO: 298614 - RNA, 19 nt, Homo sapiens
  misc_RNA (1)...(19): siRNA sense strand
ggacauugaagaagccaaa

SEQ ID NO: 298615 - RNA, 19 nt, Homo sapiens
  misc_RNA (1)...(19): siRNA sense strand
ccagauauagaccucaaua

SEQ ID NO: 298616 - RNA, 19 nt, Homo sapiens
  misc_RNA (1)...(19): siRNA sense strand
gaacaccaaggucaccaaa

SEQ ID NO: 298617 - RNA, 19 nt, Homo sapiens
  misc_RNA (1)...(19): siRNA sense strand
caguaaagguagacauaga

SEQ ID NO: 298618 - RNA, 19 nt, Homo sapiens
  misc_RNA (1)...(19): siRNA sense strand
acaccaaggucaccaaaca

SEQ ID NO: 298619 - RNA, 19 nt, Homo sapiens
  misc_RNA (1)...(19): siRNA sense strand
gagagaaccgccuggaaga

SEQ ID NO: 298620 - RNA, 19 nt, Homo sapiens
  misc_RNA (1)...(19): siRNA sense strand
gauuacagaauacauguga

SEQ ID NO: 298621 - RNA, 19 nt, Homo sapiens
  misc_RNA (1)...(19): siRNA sense strand
agaugugucuggaaagauu

SEQ ID NO: 298622 - RNA, 19 nt, Homo sapiens
  misc_RNA (1)...(19): siRNA sense strand
aaagucauuugcuggguuu

SEQ ID NO: 298623 - RNA, 19 nt, Homo sapiens
  misc_RNA (1)...(19): siRNA sense strand
gaagagcucuggguuugcu

SEQ ID NO: 298624 - RNA, 19 nt, Homo sapiens
  misc_RNA (1)...(19): siRNA sense strand
gccuggagcuccugacaga

SEQ ID NO: 298625 - RNA, 19 nt, Homo sapiens
  misc_RNA (1)...(19): siRNA sense strand
gaaccucugagccuagauu

SEQ ID NO: 298626 - RNA, 19 nt, Homo sapiens
  misc_RNA (1)...(19): siRNA sense strand
ucaccaaacauuccgcaua

SEQ ID NO: 298627 - RNA, 19 nt, Homo sapiens
  misc_RNA (1)...(19): siRNA sense strand
aggaagagcucuggguuug

SEQ ID NO: 298628 - RNA, 19 nt, Homo sapiens
  misc_RNA (1)...(19): siRNA sense strand
gucaaggaaugucaggaaa

SEQ ID NO: 298629 - RNA, 19 nt, Homo sapiens
  misc_RNA (1)...(19): siRNA sense strand
ggaugugauugacgucaug

SEQ ID NO: 298630 - RNA, 19 nt, Homo sapiens
  misc_RNA (1)...(19): siRNA sense strand
uagagaugcugcaggaugu

SEQ ID NO: 298631 - RNA, 19 nt, Homo sapiens
  misc_RNA (1)...(19): siRNA sense strand
gauaaaggaggaucaagag

SEQ ID NO: 298632 - RNA, 19 nt, Homo sapiens
  misc_RNA (1)...(19): siRNA sense strand
ggucaaggaaugucaggaa

SEQ ID NO: 298633 - RNA, 19 nt, Homo sapiens
  misc_RNA (1)...(19): siRNA sense strand
ugcagaggcugauaaagga

SEQ ID NO: 298634 - RNA, 19 nt, Homo sapiens
  misc_RNA (1)...(19): siRNA sense strand
gcaccugcacauuuaagaa

SEQ ID NO: 298635 - RNA, 19 nt, Homo sapiens
  misc_RNA (1)...(19): siRNA sense strand
cuucgaauguugcuauuuc

SEQ ID NO: 298636 - RNA, 19 nt, Homo sapiens
  misc_RNA (1)...(19): siRNA sense strand
gaaagcuggacauugaaga

SEQ ID NO: 298637 - RNA, 19 nt, Homo sapiens
  misc_RNA (1)...(19): siRNA sense strand
gaagaucgagagacagaag

SEQ ID NO: 298638 - RNA, 19 nt, Homo sapiens
  misc_RNA (1)...(19): siRNA sense strand
gcaucuggccaacauaguu

SEQ ID NO: 298639 - RNA, 19 nt, Homo sapiens
  misc_RNA (1)...(19): siRNA sense strand
aaguagaugugucuggaaa

SEQ ID NO: 298640 - RNA, 19 nt, Homo sapiens
  misc_RNA (1)...(19): siRNA sense strand
gaaguagaugugucuggaa

SEQ ID NO: 298641 - RNA, 19 nt, Homo sapiens
  misc_RNA (1)...(19): siRNA sense strand
gguuauaggauuacagaau

SEQ ID NO: 298642 - RNA, 19 nt, Homo sapiens
  misc_RNA (1)...(19): siRNA sense strand
guaaagguagacauagaga

SEQ ID NO: 298643 - RNA, 19 nt, Homo sapiens
  misc_RNA (1)...(19): siRNA sense strand
ggagugaaagcuggacauu

SEQ ID NO: 298644 - RNA, 19 nt, Homo sapiens
  misc_RNA (1)...(19): siRNA sense strand
ccuggaagaucgagagaca

SEQ ID NO: 298645 - RNA, 19 nt, Homo sapiens
  misc_RNA (1)...(19): siRNA sense strand
gcagcuguccuguguguca

SEQ ID NO: 298646 - RNA, 19 nt, Homo sapiens
  misc_RNA (1)...(19): siRNA sense strand
ugagugggaugcugcaagu

SEQ ID NO: 298647 - RNA, 19 nt, Homo sapiens
  misc_RNA (1)...(19): siRNA sense strand
ccacuucgaauguugcuau

SEQ ID NO: 298648 - RNA, 19 nt, Homo sapiens
  misc_RNA (1)...(19): siRNA sense strand
gggaaccuccgaccuaauc

SEQ ID NO: 298649 - RNA, 19 nt, Homo sapiens
  misc_RNA (1)...(19): siRNA sense strand
cuggaaagauugccuggau

SEQ ID NO: 298650 - RNA, 19 nt, Homo sapiens
  misc_RNA (1)...(19): siRNA sense strand
agagucaucuuggacaaug

SEQ ID NO: 298651 - RNA, 19 nt, Homo sapiens
  misc_RNA (1)...(19): siRNA sense strand
aagcagcuguccugugugu

SEQ ID NO: 298652 - RNA, 19 nt, Homo sapiens
  misc_RNA (1)...(19): siRNA sense strand
acaaugaggagcagagaga

SEQ ID NO: 298653 - RNA, 19 nt, Homo sapiens
  misc_RNA (1)...(19): siRNA sense strand
ugagagucaucuuggacaa

SEQ ID NO: 298654 - RNA, 19 nt, Homo sapiens
  misc_RNA (1)...(19): siRNA sense strand
ugugcucccugucguauug

SEQ ID NO: 298655 - RNA, 19 nt, Homo sapiens
  misc_RNA (1)...(19): siRNA sense strand
ggaaauauuacugggaagu

SEQ ID NO: 298656 - RNA, 19 nt, Homo sapiens
  misc_RNA (1)...(19): siRNA sense strand
gggaugcugcaaguucuua

SEQ ID NO: 298657 - RNA, 19 nt, Homo sapiens
  misc_RNA (1)...(19): siRNA sense strand
ugacaucagacaagagaga

SEQ ID NO: 298658 - RNA, 19 nt, Homo sapiens
  misc_RNA (1)...(19): siRNA sense strand
ggacuccuccucuucugau

SEQ ID NO: 298659 - RNA, 19 nt, Homo sapiens
  misc_RNA (1)...(19): siRNA sense strand
ggguggacgugaugcugaa

SEQ ID NO: 298660 - RNA, 19 nt, Homo sapiens
  misc_RNA (1)...(19): siRNA sense strand
ggacaaugaggagcagaga

SEQ ID NO: 298661 - RNA, 19 nt, Homo sapiens
  misc_RNA (1)...(19): siRNA sense strand
gagaaccgccuggaagauc

SEQ ID NO: 298662 - RNA, 19 nt, Homo sapiens
  misc_RNA (1)...(19): siRNA sense strand
agaauucaaauccauguga

SEQ ID NO: 298663 - RNA, 19 nt, Homo sapiens
  misc_RNA (1)...(19): siRNA sense strand
aaacauuccgcauaaacga

SEQ ID NO: 298664 - RNA, 19 nt, Homo sapiens
  misc_RNA (1)...(19): siRNA sense strand
gaucuucuguaaggaggau

SEQ ID NO: 298665 - RNA, 19 nt, Homo sapiens
  misc_RNA (1)...(19): siRNA sense strand
gcucuggguuugcuuuuga

SEQ ID NO: 298666 - RNA, 19 nt, Homo sapiens
  misc_RNA (1)...(19): siRNA sense strand
gggcguacacaguaaaaua

SEQ ID NO: 298667 - RNA, 19 nt, Homo sapiens
  misc_RNA (1)...(19): siRNA sense strand
ugucuucggcugccaauau

SEQ ID NO: 298668 - RNA, 19 nt, Homo sapiens
  misc_RNA (1)...(19): siRNA sense strand
gcauaaacgagguggucaa

SEQ ID NO: 298669 - RNA, 19 nt, Homo sapiens
  misc_RNA (1)...(19): siRNA sense strand
aaagguagacauagagaag

SEQ ID NO: 298670 - RNA, 19 nt, Homo sapiens
  misc_RNA (1)...(19): siRNA sense strand
gucuucggcugccaauauu

SEQ ID NO: 298671 - RNA, 19 nt, Homo sapiens
  misc_RNA (1)...(19): siRNA sense strand
ccaaacauuccgcauaaac

SEQ ID NO: 298672 - RNA, 19 nt, Homo sapiens
  misc_RNA (1)...(19): siRNA sense strand
agucaaagaggucaagaug

SEQ ID NO: 298673 - RNA, 19 nt, Homo sapiens
  misc_RNA (1)...(19): siRNA sense strand
gaucagagacaagugaaaa

SEQ ID NO: 298674 - RNA, 19 nt, Homo sapiens
  misc_RNA (1)...(19): siRNA sense strand
cgaauguugcuauuucugu

SEQ ID NO: 298675 - RNA, 19 nt, Homo sapiens
  misc_RNA (1)...(19): siRNA sense strand
aaagaguguauuccgagua

SEQ ID NO: 298676 - RNA, 19 nt, Homo sapiens
  misc_RNA (1)...(19): siRNA sense strand
cugggaaccuccgaccuaa

SEQ ID NO: 298677 - RNA, 19 nt, Homo sapiens
  misc_RNA (1)...(19): siRNA sense strand
gaucgagagacagaagauu

SEQ ID NO: 298678 - RNA, 19 nt, Homo sapiens
  misc_RNA (1)...(19): siRNA sense strand
uaaagguagacauagagaa

SEQ ID NO: 298679 - RNA, 19 nt, Homo sapiens
  misc_RNA (1)...(19): siRNA sense strand
gaugcugcaaguucuuaaa

SEQ ID NO: 298680 - RNA, 19 nt, Homo sapiens
  misc_RNA (1)...(19): siRNA sense strand
gagugaaagcuggacauug

SEQ ID NO: 298681 - RNA, 19 nt, Homo sapiens
  misc_RNA (1)...(19): siRNA sense strand
ccugggaaccuccgaccua

SEQ ID NO: 298682 - RNA, 19 nt, Homo sapiens
  misc_RNA (1)...(19): siRNA sense strand
gcugagaagcuggaagaug

SEQ ID NO: 298683 - RNA, 19 nt, Homo sapiens
  misc_RNA (1)...(19): siRNA sense strand
ucagugaucaucucaagag

SEQ ID NO: 298684 - RNA, 19 nt, Homo sapiens
  misc_RNA (1)...(19): siRNA sense strand
ucugugagcaccauggaaa

SEQ ID NO: 298685 - RNA, 19 nt, Homo sapiens
  misc_RNA (1)...(19): siRNA sense strand
uguacgcaccugcacauuu

SEQ ID NO: 298686 - RNA, 19 nt, Homo sapiens
  misc_RNA (1)...(19): siRNA sense strand
agaagagagaugucuguga

SEQ ID NO: 298687 - RNA, 19 nt, Homo sapiens
  misc_RNA (1)...(19): siRNA sense strand
aagaguguauuccgaguac

SEQ ID NO: 298688 - RNA, 19 nt, Homo sapiens
  misc_RNA (1)...(19): siRNA sense strand
caagaaacuaaagagugua

SEQ ID NO: 298689 - RNA, 19 nt, Homo sapiens
  misc_RNA (1)...(19): siRNA sense strand
aaagcuggacauugaagaa

SEQ ID NO: 298690 - RNA, 19 nt, Homo sapiens
  misc_RNA (1)...(19): siRNA sense strand
ggagucagugaucaucuca

SEQ ID NO: 298691 - RNA, 19 nt, Homo sapiens
  misc_RNA (1)...(19): siRNA sense strand
gauccugggcguacacagu

SEQ ID NO: 298692 - RNA, 19 nt, Homo sapiens
  misc_RNA (1)...(19): siRNA sense strand
ggaucagagacaagugaaa

SEQ ID NO: 298693 - RNA, 19 nt, Homo sapiens
  misc_RNA (1)...(19): siRNA sense strand
ucacugcaaagaucaagga

SEQ ID NO: 298694 - RNA, 19 nt, Homo sapiens
  misc_RNA (1)...(19): siRNA sense strand
gaucgucaguagagaugcu

SEQ ID NO: 298695 - RNA, 19 nt, Homo sapiens
  misc_RNA (1)...(19): siRNA sense strand
ccucugagccuagauugug

SEQ ID NO: 298696 - RNA, 19 nt, Homo sapiens
  misc_RNA (1)...(19): siRNA sense strand
gaugagcucuuccgucuuu

SEQ ID NO: 298697 - RNA, 19 nt, Homo sapiens
  misc_RNA (1)...(19): siRNA sense strand
gaacaacugcuuccuguau

SEQ ID NO: 298698 - RNA, 19 nt, Homo sapiens
  misc_RNA (1)...(19): siRNA sense strand
gaacgaggaugagcucuuc

SEQ ID NO: 298699 - RNA, 19 nt, Homo sapiens
  misc_RNA (1)...(19): siRNA sense strand
ggagauugcugcgaugauu

SEQ ID NO: 298700 - RNA, 19 nt, Homo sapiens
  misc_RNA (1)...(19): siRNA sense strand
gggauuacaagguuaaaua

SEQ ID NO: 298701 - RNA, 19 nt, Homo sapiens
  misc_RNA (1)...(19): siRNA sense strand
gaggacagcuggcucaagu

SEQ ID NO: 298702 - RNA, 19 nt, Homo sapiens
  misc_RNA (1)...(19): siRNA sense strand
ggagcuugcugcagaguga

SEQ ID NO: 298703 - RNA, 19 nt, Homo sapiens
  misc_RNA (1)...(19): siRNA sense strand
ccacagagaacgaggauga

SEQ ID NO: 298704 - RNA, 19 nt, Homo sapiens
  misc_RNA (1)...(19): siRNA sense strand
gacaugacccugcuaguga

SEQ ID NO: 298705 - RNA, 19 nt, Homo sapiens
  misc_RNA (1)...(19): siRNA sense strand
ggacgaguguacccugugu

SEQ ID NO: 298706 - RNA, 19 nt, Homo sapiens
  misc_RNA (1)...(19): siRNA sense strand
ggacaugacccugcuagug

SEQ ID NO: 298707 - RNA, 19 nt, Homo sapiens
  misc_RNA (1)...(19): siRNA sense strand
aaccaaagcccgaccuuaa

SEQ ID NO: 298708 - RNA, 19 nt, Homo sapiens
  misc_RNA (1)...(19): siRNA sense strand
gaugauugacacugaguuu

SEQ ID NO: 298709 - RNA, 19 nt, Homo sapiens
  misc_RNA (1)...(19): siRNA sense strand
ggagugagaacaacugcuu

SEQ ID NO: 298710 - RNA, 19 nt, Homo sapiens
  misc_RNA (1)...(19): siRNA sense strand
gcaaccgagugaccaacuu

SEQ ID NO: 298711 - RNA, 19 nt, Homo sapiens
  misc_RNA (1)...(19): siRNA sense strand
ggacagcuggcucaaguuc

SEQ ID NO: 298712 - RNA, 19 nt, Homo sapiens
  misc_RNA (1)...(19): siRNA sense strand
caaccaaagcccgaccuua

SEQ ID NO: 298713 - RNA, 19 nt, Homo sapiens
  misc_RNA (1)...(19): siRNA sense strand
gggcuuggaugcuggaaag

SEQ ID NO: 298714 - RNA, 19 nt, Homo sapiens
  misc_RNA (1)...(19): siRNA sense strand
ccagcugccuccucaguau

SEQ ID NO: 298715 - RNA, 19 nt, Homo sapiens
  misc_RNA (1)...(19): siRNA sense strand
acacugaguuugccaagca

SEQ ID NO: 298716 - RNA, 19 nt, Homo sapiens
  misc_RNA (1)...(19): siRNA sense strand
gcccagagcaccagcaaga

SEQ ID NO: 298717 - RNA, 19 nt, Homo sapiens
  misc_RNA (1)...(19): siRNA sense strand
gguacaaaccgugcacuuu

SEQ ID NO: 298718 - RNA, 19 nt, Homo sapiens
  misc_RNA (1)...(19): siRNA sense strand
guacaaaccgugcacuuuu

SEQ ID NO: 298719 - RNA, 19 nt, Homo sapiens
  misc_RNA (1)...(19): siRNA sense strand
gaucggggauuacaagguu

SEQ ID NO: 298720 - RNA, 19 nt, Homo sapiens
  misc_RNA (1)...(19): siRNA sense strand
gaguguacccugugucugu

SEQ ID NO: 298721 - RNA, 19 nt, Homo sapiens
  misc_RNA (1)...(19): siRNA sense strand
uaucagaagauccuugaga

SEQ ID NO: 298722 - RNA, 19 nt, Homo sapiens
  misc_RNA (1)...(19): siRNA sense strand
uacaaaccgugcacuuuua

SEQ ID NO: 298723 - RNA, 19 nt, Homo sapiens
  misc_RNA (1)...(19): siRNA sense strand
acacggacauugaccuucu

SEQ ID NO: 298724 - RNA, 19 nt, Homo sapiens
  misc_RNA (1)...(19): siRNA sense strand
gagauugcugcgaugauug

SEQ ID NO: 298725 - RNA, 19 nt, Homo sapiens
  misc_RNA (1)...(19): siRNA sense strand
cugcgaugauugacacuga

SEQ ID NO: 298726 - RNA, 19 nt, Homo sapiens
  misc_RNA (1)...(19): siRNA sense strand
cgaggacggucguguugag

SEQ ID NO: 298727 - RNA, 19 nt, Homo sapiens
  misc_RNA (1)...(19): siRNA sense strand
gacgacgccuuggcugaga

SEQ ID NO: 298728 - RNA, 19 nt, Homo sapiens
  misc_RNA (1)...(19): siRNA sense strand
uguggacuuugcugaguuu

SEQ ID NO: 298729 - RNA, 19 nt, Homo sapiens
  misc_RNA (1)...(19): siRNA sense strand
uaugauggcaaccgaguga

SEQ ID NO: 298730 - RNA, 19 nt, Homo sapiens
  misc_RNA (1)...(19): siRNA sense strand
gcaagccuccagucgcaau

SEQ ID NO: 298731 - RNA, 19 nt, Homo sapiens
  misc_RNA (1)...(19): siRNA sense strand
ggacuuugcugaguuuuac

SEQ ID NO: 298732 - RNA, 19 nt, Homo sapiens
  misc_RNA (1)...(19): siRNA sense strand
gacccucucccuugucaug

SEQ ID NO: 298733 - RNA, 19 nt, Homo sapiens
  misc_RNA (1)...(19): siRNA sense strand
gcgugacccucucccuugu

SEQ ID NO: 298734 - RNA, 19 nt, Homo sapiens
  misc_RNA (1)...(19): siRNA sense strand
uggcgguccuucucaacaa

SEQ ID NO: 298735 - RNA, 19 nt, Homo sapiens
  misc_RNA (1)...(19): siRNA sense strand
agaagauccuugagagacu

SEQ ID NO: 298736 - RNA, 19 nt, Homo sapiens
  misc_RNA (1)...(19): siRNA sense strand
gcuacccgcugggcgaaau

SEQ ID NO: 298737 - RNA, 19 nt, Homo sapiens
  misc_RNA (1)...(19): siRNA sense strand
gcugccaaguccaaaccaa

SEQ ID NO: 298738 - RNA, 19 nt, Homo sapiens
  misc_RNA (1)...(19): siRNA sense strand
gacguuagagagggaaauu

SEQ ID NO: 298739 - RNA, 19 nt, Homo sapiens
  misc_RNA (1)...(19): siRNA sense strand
ucagaagauccuugagaga

SEQ ID NO: 298740 - RNA, 19 nt, Homo sapiens
  misc_RNA (1)...(19): siRNA sense strand
ugacccugcuagugaggaa

SEQ ID NO: 298741 - RNA, 19 nt, Homo sapiens
  misc_RNA (1)...(19): siRNA sense strand
aacaacugcuuccuguaug

SEQ ID NO: 298742 - RNA, 19 nt, Homo sapiens
  misc_RNA (1)...(19): siRNA sense strand
caaccgagugaccaacuuc

SEQ ID NO: 298743 - RNA, 19 nt, Homo sapiens
  misc_RNA (1)...(19): siRNA sense strand
caucgcagagccagaaauc

SEQ ID NO: 298744 - RNA, 19 nt, Homo sapiens
  misc_RNA (1)...(19): siRNA sense strand
ucgccaaugucgguacaaa

SEQ ID NO: 298745 - RNA, 19 nt, Homo sapiens
  misc_RNA (1)...(19): siRNA sense strand
gagagacucaagacguuag

SEQ ID NO: 298746 - RNA, 19 nt, Homo sapiens
  misc_RNA (1)...(19): siRNA sense strand
ggucuucaacggcuaugau

SEQ ID NO: 298747 - RNA, 19 nt, Homo sapiens
  misc_RNA (1)...(19): siRNA sense strand
cguuagagagggaaauuuc

SEQ ID NO: 298748 - RNA, 19 nt, Homo sapiens
  misc_RNA (1)...(19): siRNA sense strand
gcacuuuuaugcaaaucga

SEQ ID NO: 298749 - RNA, 19 nt, Homo sapiens
  misc_RNA (1)...(19): siRNA sense strand
gauggcaagggcacugaga

SEQ ID NO: 298750 - RNA, 19 nt, Homo sapiens
  misc_RNA (1)...(19): siRNA sense strand
uauguggacuuugcugagu

SEQ ID NO: 298751 - RNA, 19 nt, Homo sapiens
  misc_RNA (1)...(19): siRNA sense strand
acaacugcuuccuguaugg

SEQ ID NO: 298752 - RNA, 19 nt, Homo sapiens
  misc_RNA (1)...(19): siRNA sense strand
gcugcaggccuucgaugug

SEQ ID NO: 298753 - RNA, 19 nt, Homo sapiens
  misc_RNA (1)...(19): siRNA sense strand
ugagcccuauguggacuuu

SEQ ID NO: 298754 - RNA, 19 nt, Homo sapiens
  misc_RNA (1)...(19): siRNA sense strand
acagaugaccugccucucu

SEQ ID NO: 298755 - RNA, 19 nt, Homo sapiens
  misc_RNA (1)...(19): siRNA sense strand
gcaggccaaccaggagauu

SEQ ID NO: 298756 - RNA, 19 nt, Homo sapiens
  misc_RNA (1)...(19): siRNA sense strand
aaucaucgcagagccagaa

SEQ ID NO: 298757 - RNA, 19 nt, Homo sapiens
  misc_RNA (1)...(19): siRNA sense strand
cuuggaugcuggaaagauc

SEQ ID NO: 298758 - RNA, 19 nt, Homo sapiens
  misc_RNA (1)...(19): siRNA sense strand
ggaccacaccacagagaac

SEQ ID NO: 298759 - RNA, 19 nt, Homo sapiens
  misc_RNA (1)...(19): siRNA sense strand
gcaaagauagcgagaaaua

SEQ ID NO: 298760 - RNA, 19 nt, Homo sapiens
  misc_RNA (1)...(19): siRNA sense strand
ugaauuccaugcacagaua

SEQ ID NO: 298761 - RNA, 19 nt, Homo sapiens
  misc_RNA (1)...(19): siRNA sense strand
cgacaacggccacauuauu

SEQ ID NO: 298762 - RNA, 19 nt, Homo sapiens
  misc_RNA (1)...(19): siRNA sense strand
gacgacaacggccacauua

SEQ ID NO: 298763 - RNA, 19 nt, Homo sapiens
  misc_RNA (1)...(19): siRNA sense strand
ggacgacaacggccacauu

SEQ ID NO: 298764 - RNA, 19 nt, Homo sapiens
  misc_RNA (1)...(19): siRNA sense strand
aaagauagcgagaaauaug

SEQ ID NO: 298765 - RNA, 19 nt, Homo sapiens
  misc_RNA (1)...(19): siRNA sense strand
acgcaaagauagcgagaaa

SEQ ID NO: 298766 - RNA, 19 nt, Homo sapiens
  misc_RNA (1)...(19): siRNA sense strand
ucacgcagcucaagauugc

SEQ ID NO: 298767 - RNA, 19 nt, Homo sapiens
  misc_RNA (1)...(19): siRNA sense strand
gacaacggccacauuauuc

SEQ ID NO: 298768 - RNA, 19 nt, Homo sapiens
  misc_RNA (1)...(19): siRNA sense strand
agaaauaugccgaggagaa

SEQ ID NO: 298769 - RNA, 19 nt, Homo sapiens
  misc_RNA (1)...(19): siRNA sense strand
ugaagcaaaucguguccuu

SEQ ID NO: 298770 - RNA, 19 nt, Homo sapiens
  misc_RNA (1)...(19): siRNA sense strand
gcgugcagcuagagaugaa

SEQ ID NO: 298771 - RNA, 19 nt, Homo sapiens
  misc_RNA (1)...(19): siRNA sense strand
gaucacgcagcucaagauu

SEQ ID NO: 298772 - RNA, 19 nt, Homo sapiens
  misc_RNA (1)...(19): siRNA sense strand
caaagauagcgagaaauau

SEQ ID NO: 298773 - RNA, 19 nt, Homo sapiens
  misc_RNA (1)...(19): siRNA sense strand
gaaauaugccgaggagaac

SEQ ID NO: 298774 - RNA, 19 nt, Homo sapiens
  misc_RNA (1)...(19): siRNA sense strand
cgcaguggaugaagcaaau

SEQ ID NO: 298775 - RNA, 19 nt, Homo sapiens
  misc_RNA (1)...(19): siRNA sense strand
caagcugaccaacaaccua

SEQ ID NO: 298776 - RNA, 19 nt, Homo sapiens
  misc_RNA (1)...(19): siRNA sense strand
cagcaaucccuucgcgaaa

SEQ ID NO: 298777 - RNA, 19 nt, Homo sapiens
  misc_RNA (1)...(19): siRNA sense strand
acuauaugcugcucaugga

SEQ ID NO: 298778 - RNA, 19 nt, Homo sapiens
  misc_RNA (1)...(19): siRNA sense strand
ugaagaagaacgcgaaggu

SEQ ID NO: 298779 - RNA, 19 nt, Homo sapiens
  misc_RNA (1)...(19): siRNA sense strand
uuucccaccuuccaaguga

SEQ ID NO: 298780 - RNA, 19 nt, Homo sapiens
  misc_RNA (1)...(19): siRNA sense strand
gaggagaacuucaaaaccu

SEQ ID NO: 298781 - RNA, 19 nt, Homo sapiens
  misc_RNA (1)...(19): siRNA sense strand
gcgcaguggaugaagcaaa

SEQ ID NO: 298782 - RNA, 19 nt, Homo sapiens
  misc_RNA (1)...(19): siRNA sense strand
gaaaggcuuccgggacugu

SEQ ID NO: 298783 - RNA, 19 nt, Homo sapiens
  misc_RNA (1)...(19): siRNA sense strand
ggaucacgcagcucaagau

SEQ ID NO: 298784 - RNA, 19 nt, Homo sapiens
  misc_RNA (1)...(19): siRNA sense strand
uaccagaaccaucggauca

SEQ ID NO: 298785 - RNA, 19 nt, Homo sapiens
  misc_RNA (1)...(19): siRNA sense strand
gagcgugcagcuagagaug

SEQ ID NO: 298786 - RNA, 19 nt, Homo sapiens
  misc_RNA (1)...(19): siRNA sense strand
ucccauggccgacuauaug

SEQ ID NO: 298787 - RNA, 19 nt, Homo sapiens
  misc_RNA (1)...(19): siRNA sense strand
ccgagaugaucgucaccaa

SEQ ID NO: 298788 - RNA, 19 nt, Homo sapiens
  misc_RNA (1)...(19): siRNA sense strand
gcuuccacguggucuaugu

SEQ ID NO: 298789 - RNA, 19 nt, Homo sapiens
  misc_RNA (1)...(19): siRNA sense strand
cagcugggcaccgagauga

SEQ ID NO: 298790 - RNA, 19 nt, Homo sapiens
  misc_RNA (1)...(19): siRNA sense strand
caacggccacauuauucug

SEQ ID NO: 298791 - RNA, 19 nt, Homo sapiens
  misc_RNA (1)...(19): siRNA sense strand
gcaaagauagcgagaaaua

SEQ ID NO: 298792 - RNA, 19 nt, Homo sapiens
  misc_RNA (1)...(19): siRNA sense strand
ugaauuccaugcacagaua

SEQ ID NO: 298793 - RNA, 19 nt, Homo sapiens
  misc_RNA (1)...(19): siRNA sense strand
cgacaacggccacauuauu

SEQ ID NO: 298794 - RNA, 19 nt, Homo sapiens
  misc_RNA (1)...(19): siRNA sense strand
gacgacaacggccacauua

SEQ ID NO: 298795 - RNA, 19 nt, Homo sapiens
  misc_RNA (1)...(19): siRNA sense strand
ggacgacaacggccacauu

SEQ ID NO: 298796 - RNA, 19 nt, Homo sapiens
  misc_RNA (1)...(19): siRNA sense strand
aaagauagcgagaaauaug

SEQ ID NO: 298797 - RNA, 19 nt, Homo sapiens
  misc_RNA (1)...(19): siRNA sense strand
acgcaaagauagcgagaaa

SEQ ID NO: 298798 - RNA, 19 nt, Homo sapiens
  misc_RNA (1)...(19): siRNA sense strand
ucacgcagcucaagauugc

SEQ ID NO: 298799 - RNA, 19 nt, Homo sapiens
  misc_RNA (1)...(19): siRNA sense strand
gacaacggccacauuauuc

SEQ ID NO: 298800 - RNA, 19 nt, Homo sapiens
  misc_RNA (1)...(19): siRNA sense strand
agaaauaugccgaggagaa

SEQ ID NO: 298801 - RNA, 19 nt, Homo sapiens
  misc_RNA (1)...(19): siRNA sense strand
ugaagcaaaucguguccuu

SEQ ID NO: 298802 - RNA, 19 nt, Homo sapiens
  misc_RNA (1)...(19): siRNA sense strand
gcgugcagcuagagaugaa

SEQ ID NO: 298803 - RNA, 19 nt, Homo sapiens
  misc_RNA (1)...(19): siRNA sense strand
gaucacgcagcucaagauu

SEQ ID NO: 298804 - RNA, 19 nt, Homo sapiens
  misc_RNA (1)...(19): siRNA sense strand
caaagauagcgagaaauau

SEQ ID NO: 298805 - RNA, 19 nt, Homo sapiens
  misc_RNA (1)...(19): siRNA sense strand
gaaauaugccgaggagaac

SEQ ID NO: 298806 - RNA, 19 nt, Homo sapiens
  misc_RNA (1)...(19): siRNA sense strand
cgcaguggaugaagcaaau

SEQ ID NO: 298807 - RNA, 19 nt, Homo sapiens
  misc_RNA (1)...(19): siRNA sense strand
caagcugaccaacaaccua

SEQ ID NO: 298808 - RNA, 19 nt, Homo sapiens
  misc_RNA (1)...(19): siRNA sense strand
cagcaaucccuucgcgaaa

SEQ ID NO: 298809 - RNA, 19 nt, Homo sapiens
  misc_RNA (1)...(19): siRNA sense strand
acuauaugcugcucaugga

SEQ ID NO: 298810 - RNA, 19 nt, Homo sapiens
  misc_RNA (1)...(19): siRNA sense strand
ugaagaagaacgcgaaggu

SEQ ID NO: 298811 - RNA, 19 nt, Homo sapiens
  misc_RNA (1)...(19): siRNA sense strand
uuucccaccuuccaaguga

SEQ ID NO: 298812 - RNA, 19 nt, Homo sapiens
  misc_RNA (1)...(19): siRNA sense strand
gaggagaacuucaaaaccu

SEQ ID NO: 298813 - RNA, 19 nt, Homo sapiens
  misc_RNA (1)...(19): siRNA sense strand
gcgcaguggaugaagcaaa

SEQ ID NO: 298814 - RNA, 19 nt, Homo sapiens
  misc_RNA (1)...(19): siRNA sense strand
gaaaggcuuccgggacugu

SEQ ID NO: 298815 - RNA, 19 nt, Homo sapiens
  misc_RNA (1)...(19): siRNA sense strand
ggaucacgcagcucaagau

SEQ ID NO: 298816 - RNA, 19 nt, Homo sapiens
  misc_RNA (1)...(19): siRNA sense strand
uaccagaaccaucggauca

SEQ ID NO: 298817 - RNA, 19 nt, Homo sapiens
  misc_RNA (1)...(19): siRNA sense strand
gagcgugcagcuagagaug

SEQ ID NO: 298818 - RNA, 19 nt, Homo sapiens
  misc_RNA (1)...(19): siRNA sense strand
ucccauggccgacuauaug

SEQ ID NO: 298819 - RNA, 19 nt, Homo sapiens
  misc_RNA (1)...(19): siRNA sense strand
ccgagaugaucgucaccaa

SEQ ID NO: 298820 - RNA, 19 nt, Homo sapiens
  misc_RNA (1)...(19): siRNA sense strand
gcuuccacguggucuaugu

SEQ ID NO: 298821 - RNA, 19 nt, Homo sapiens
  misc_RNA (1)...(19): siRNA sense strand
cagcugggcaccgagauga

SEQ ID NO: 298822 - RNA, 19 nt, Homo sapiens
  misc_RNA (1)...(19): siRNA sense strand
caacggccacauuauucug

SEQ ID NO: 298823 - RNA, 19 nt, Homo sapiens
  misc_RNA (1)...(19): siRNA sense strand
gcaaagauagcgagaaaua

SEQ ID NO: 298824 - RNA, 19 nt, Homo sapiens
  misc_RNA (1)...(19): siRNA sense strand
ugaauuccaugcacagaua

SEQ ID NO: 298825 - RNA, 19 nt, Homo sapiens
  misc_RNA (1)...(19): siRNA sense strand
cgacaacggccacauuauu

SEQ ID NO: 298826 - RNA, 19 nt, Homo sapiens
  misc_RNA (1)...(19): siRNA sense strand
gacgacaacggccacauua

SEQ ID NO: 298827 - RNA, 19 nt, Homo sapiens
  misc_RNA (1)...(19): siRNA sense strand
ggacgacaacggccacauu

SEQ ID NO: 298828 - RNA, 19 nt, Homo sapiens
  misc_RNA (1)...(19): siRNA sense strand
aaagauagcgagaaauaug

SEQ ID NO: 298829 - RNA, 19 nt, Homo sapiens
  misc_RNA (1)...(19): siRNA sense strand
acgcaaagauagcgagaaa

SEQ ID NO: 298830 - RNA, 19 nt, Homo sapiens
  misc_RNA (1)...(19): siRNA sense strand
ucacgcagcucaagauugc

SEQ ID NO: 298831 - RNA, 19 nt, Homo sapiens
  misc_RNA (1)...(19): siRNA sense strand
gacaacggccacauuauuc

SEQ ID NO: 298832 - RNA, 19 nt, Homo sapiens
  misc_RNA (1)...(19): siRNA sense strand
agaaauaugccgaggagaa

SEQ ID NO: 298833 - RNA, 19 nt, Homo sapiens
  misc_RNA (1)...(19): siRNA sense strand
ugaagcaaaucguguccuu

SEQ ID NO: 298834 - RNA, 19 nt, Homo sapiens
  misc_RNA (1)...(19): siRNA sense strand
gcgugcagcuagagaugaa

SEQ ID NO: 298835 - RNA, 19 nt, Homo sapiens
  misc_RNA (1)...(19): siRNA sense strand
gaucacgcagcucaagauu

SEQ ID NO: 298836 - RNA, 19 nt, Homo sapiens
  misc_RNA (1)...(19): siRNA sense strand
caaagauagcgagaaauau

SEQ ID NO: 298837 - RNA, 19 nt, Homo sapiens
  misc_RNA (1)...(19): siRNA sense strand
gaaauaugccgaggagaac

SEQ ID NO: 298838 - RNA, 19 nt, Homo sapiens
  misc_RNA (1)...(19): siRNA sense strand
cgcaguggaugaagcaaau

SEQ ID NO: 298839 - RNA, 19 nt, Homo sapiens
  misc_RNA (1)...(19): siRNA sense strand
caagcugaccaacaaccua

SEQ ID NO: 298840 - RNA, 19 nt, Homo sapiens
  misc_RNA (1)...(19): siRNA sense strand
cagcaaucccuucgcgaaa

SEQ ID NO: 298841 - RNA, 19 nt, Homo sapiens
  misc_RNA (1)...(19): siRNA sense strand
acuauaugcugcucaugga

SEQ ID NO: 298842 - RNA, 19 nt, Homo sapiens
  misc_RNA (1)...(19): siRNA sense strand
ugaagaagaacgcgaaggu

SEQ ID NO: 298843 - RNA, 19 nt, Homo sapiens
  misc_RNA (1)...(19): siRNA sense strand
uuucccaccuuccaaguga

SEQ ID NO: 298844 - RNA, 19 nt, Homo sapiens
  misc_RNA (1)...(19): siRNA sense strand
gaggagaacuucaaaaccu

SEQ ID NO: 298845 - RNA, 19 nt, Homo sapiens
  misc_RNA (1)...(19): siRNA sense strand
gcgcaguggaugaagcaaa

SEQ ID NO: 298846 - RNA, 19 nt, Homo sapiens
  misc_RNA (1)...(19): siRNA sense strand
gaaaggcuuccgggacugu

SEQ ID NO: 298847 - RNA, 19 nt, Homo sapiens
  misc_RNA (1)...(19): siRNA sense strand
ggaucacgcagcucaagau

SEQ ID NO: 298848 - RNA, 19 nt, Homo sapiens
  misc_RNA (1)...(19): siRNA sense strand
uaccagaaccaucggauca

SEQ ID NO: 298849 - RNA, 19 nt, Homo sapiens
  misc_RNA (1)...(19): siRNA sense strand
gagcgugcagcuagagaug

SEQ ID NO: 298850 - RNA, 19 nt, Homo sapiens
  misc_RNA (1)...(19): siRNA sense strand
ucccauggccgacuauaug

SEQ ID NO: 298851 - RNA, 19 nt, Homo sapiens
  misc_RNA (1)...(19): siRNA sense strand
ccgagaugaucgucaccaa

SEQ ID NO: 298852 - RNA, 19 nt, Homo sapiens
  misc_RNA (1)...(19): siRNA sense strand
gcuuccacguggucuaugu

SEQ ID NO: 298853 - RNA, 19 nt, Homo sapiens
  misc_RNA (1)...(19): siRNA sense strand
cagcugggcaccgagauga

SEQ ID NO: 298854 - RNA, 19 nt, Homo sapiens
  misc_RNA (1)...(19): siRNA sense strand
caacggccacauuauucug

SEQ ID NO: 298855 - RNA, 19 nt, Homo sapiens
  misc_RNA (1)...(19): siRNA sense strand
uaaacuccaugcacaagua

SEQ ID NO: 298856 - RNA, 19 nt, Homo sapiens
  misc_RNA (1)...(19): siRNA sense strand
gaauuccaaugcccacuuu

SEQ ID NO: 298857 - RNA, 19 nt, Homo sapiens
  misc_RNA (1)...(19): siRNA sense strand
ucacacagcugaagaucga

SEQ ID NO: 298858 - RNA, 19 nt, Homo sapiens
  misc_RNA (1)...(19): siRNA sense strand
caucugcgcucccucaaga

SEQ ID NO: 298859 - RNA, 19 nt, Homo sapiens
  misc_RNA (1)...(19): siRNA sense strand
acaagaaggccaaguauau

SEQ ID NO: 298860 - RNA, 19 nt, Homo sapiens
  misc_RNA (1)...(19): siRNA sense strand
ggacaagaaggccaaguau

SEQ ID NO: 298861 - RNA, 19 nt, Homo sapiens
  misc_RNA (1)...(19): siRNA sense strand
gacaagaaggccaaguaua

SEQ ID NO: 298862 - RNA, 19 nt, Homo sapiens
  misc_RNA (1)...(19): siRNA sense strand
gggcaugggucaccuacug

SEQ ID NO: 298863 - RNA, 19 nt, Homo sapiens
  misc_RNA (1)...(19): siRNA sense strand
ccaacaacaucucugacaa

SEQ ID NO: 298864 - RNA, 19 nt, Homo sapiens
  misc_RNA (1)...(19): siRNA sense strand
ccaaguauauccugcugau

SEQ ID NO: 298865 - RNA, 19 nt, Homo sapiens
  misc_RNA (1)...(19): siRNA sense strand
ugaggagccuggagaagga

SEQ ID NO: 298866 - RNA, 19 nt, Homo sapiens
  misc_RNA (1)...(19): siRNA sense strand
gcuggcaucucagggaauu

SEQ ID NO: 298867 - RNA, 19 nt, Homo sapiens
  misc_RNA (1)...(19): siRNA sense strand
ucagcggccuggacaagaa

SEQ ID NO: 298868 - RNA, 19 nt, Homo sapiens
  misc_RNA (1)...(19): siRNA sense strand
gcugacgauugccgcuaua

SEQ ID NO: 298869 - RNA, 19 nt, Homo sapiens
  misc_RNA (1)...(19): siRNA sense strand
guacgaggagcacugcaaa

SEQ ID NO: 298870 - RNA, 19 nt, Homo sapiens
  misc_RNA (1)...(19): siRNA sense strand
caaggccgcugguggaaac

SEQ ID NO: 298871 - RNA, 19 nt, Homo sapiens
  misc_RNA (1)...(19): siRNA sense strand
gaucgacaacaacccguuu

SEQ ID NO: 298872 - RNA, 19 nt, Homo sapiens
  misc_RNA (1)...(19): siRNA sense strand
caacaacaucucugacaag

SEQ ID NO: 298873 - RNA, 19 nt, Homo sapiens
  misc_RNA (1)...(19): siRNA sense strand
gcacgggcagcaguucuuu

SEQ ID NO: 298874 - RNA, 19 nt, Homo sapiens
  misc_RNA (1)...(19): siRNA sense strand
caagaaggccaaguauauc

SEQ ID NO: 298875 - RNA, 19 nt, Homo sapiens
  misc_RNA (1)...(19): siRNA sense strand
ggaauuccaaugcccacuu

SEQ ID NO: 298876 - RNA, 19 nt, Homo sapiens
  misc_RNA (1)...(19): siRNA sense strand
gaagcugaccaacaacauc

SEQ ID NO: 298877 - RNA, 19 nt, Homo sapiens
  misc_RNA (1)...(19): siRNA sense strand
gacgauugccgcuauaagu

SEQ ID NO: 298878 - RNA, 19 nt, Homo sapiens
  misc_RNA (1)...(19): siRNA sense strand
ggaccaguuccacaagcua

SEQ ID NO: 298879 - RNA, 19 nt, Homo sapiens
  misc_RNA (1)...(19): siRNA sense strand
ccaacgacauccugaagcu

SEQ ID NO: 298880 - RNA, 19 nt, Homo sapiens
  misc_RNA (1)...(19): siRNA sense strand
ccaaacgcauguacaucca

SEQ ID NO: 298881 - RNA, 19 nt, Homo sapiens
  misc_RNA (1)...(19): siRNA sense strand
ugaccaacaacaucucuga

SEQ ID NO: 298882 - RNA, 19 nt, Homo sapiens
  misc_RNA (1)...(19): siRNA sense strand
gcacggcuucaccauccua

SEQ ID NO: 298883 - RNA, 19 nt, Homo sapiens
  misc_RNA (1)...(19): siRNA sense strand
cuaccagaaugacaagauc

SEQ ID NO: 298884 - RNA, 19 nt, Homo sapiens
  misc_RNA (1)...(19): siRNA sense strand
uggacaagaaggccaagua

SEQ ID NO: 298885 - RNA, 19 nt, Homo sapiens
  misc_RNA (1)...(19): siRNA sense strand
gggagcaguggauggcuaa

SEQ ID NO: 298886 - RNA, 19 nt, Homo sapiens
  misc_RNA (1)...(19): siRNA sense strand
caaggccgacccugagaug

SEQ ID NO: 298887 - RNA, 19 nt, Homo sapiens
  misc_RNA (1)...(19): siRNA sense strand
cauuguagccgcugacgau

SEQ ID NO: 298888 - RNA, 19 nt, Homo sapiens
  misc_RNA (1)...(19): siRNA sense strand
ucacugccuaccagaauga

SEQ ID NO: 298889 - RNA, 19 nt, Homo sapiens
  misc_RNA (1)...(19): siRNA sense strand
gcaaggccgacccugagau

SEQ ID NO: 298890 - RNA, 19 nt, Homo sapiens
  misc_RNA (1)...(19): siRNA sense strand
gagccaacgacauccugaa

SEQ ID NO: 298891 - RNA, 19 nt, Homo sapiens
  misc_RNA (1)...(19): siRNA sense strand
agaaugacaagaucacaca

SEQ ID NO: 298892 - RNA, 19 nt, Homo sapiens
  misc_RNA (1)...(19): siRNA sense strand
caagaucacacagcugaag

SEQ ID NO: 298893 - RNA, 19 nt, Homo sapiens
  misc_RNA (1)...(19): siRNA sense strand
ccugcacccuggacaguuc

SEQ ID NO: 298894 - RNA, 19 nt, Homo sapiens
  misc_RNA (1)...(19): siRNA sense strand
aguauauccugcugaugga

SEQ ID NO: 298895 - RNA, 19 nt, Homo sapiens
  misc_RNA (1)...(19): siRNA sense strand
gucacugccuaccagaaug

SEQ ID NO: 298896 - RNA, 19 nt, Homo sapiens
  misc_RNA (1)...(19): siRNA sense strand
ggaaauggccgaagagaaa

SEQ ID NO: 298897 - RNA, 19 nt, Homo sapiens
  misc_RNA (1)...(19): siRNA sense strand
caucgaaccucaaagauuu

SEQ ID NO: 298898 - RNA, 19 nt, Homo sapiens
  misc_RNA (1)...(19): siRNA sense strand
gcugaugacugucguuaua

SEQ ID NO: 298899 - RNA, 19 nt, Homo sapiens
  misc_RNA (1)...(19): siRNA sense strand
caacaacauuucagacaaa

SEQ ID NO: 298900 - RNA, 19 nt, Homo sapiens
  misc_RNA (1)...(19): siRNA sense strand
caaagaggauguacauuca

SEQ ID NO: 298901 - RNA, 19 nt, Homo sapiens
  misc_RNA (1)...(19): siRNA sense strand
gaaacucccuuauaguaca

SEQ ID NO: 298902 - RNA, 19 nt, Homo sapiens
  misc_RNA (1)...(19): siRNA sense strand
ugaacuccaugcacaaaua

SEQ ID NO: 298903 - RNA, 19 nt, Homo sapiens
  misc_RNA (1)...(19): siRNA sense strand
ggacaucgaaccucaaaga

SEQ ID NO: 298904 - RNA, 19 nt, Homo sapiens
  misc_RNA (1)...(19): siRNA sense strand
gcaccgagauggucauuac

SEQ ID NO: 298905 - RNA, 19 nt, Homo sapiens
  misc_RNA (1)...(19): siRNA sense strand
gaaacucaccaacaacauu

SEQ ID NO: 298906 - RNA, 19 nt, Homo sapiens
  misc_RNA (1)...(19): siRNA sense strand
ccaaugacaucuugaaacu

SEQ ID NO: 298907 - RNA, 19 nt, Homo sapiens
  misc_RNA (1)...(19): siRNA sense strand
ccaaagaggauguacauuc

SEQ ID NO: 298908 - RNA, 19 nt, Homo sapiens
  misc_RNA (1)...(19): siRNA sense strand
ggacaagcauggccuacca

SEQ ID NO: 298909 - RNA, 19 nt, Homo sapiens
  misc_RNA (1)...(19): siRNA sense strand
ccaacaacauuucagacaa

SEQ ID NO: 298910 - RNA, 19 nt, Homo sapiens
  misc_RNA (1)...(19): siRNA sense strand
ccaugaggguguuugauga

SEQ ID NO: 298911 - RNA, 19 nt, Homo sapiens
  misc_RNA (1)...(19): siRNA sense strand
gaggguguuugaugaaaga

SEQ ID NO: 298912 - RNA, 19 nt, Homo sapiens
  misc_RNA (1)...(19): siRNA sense strand
gaaccucaaagauuuaugu

SEQ ID NO: 298913 - RNA, 19 nt, Homo sapiens
  misc_RNA (1)...(19): siRNA sense strand
agacaaacauggauuuacu

SEQ ID NO: 298914 - RNA, 19 nt, Homo sapiens
  misc_RNA (1)...(19): siRNA sense strand
cugcauaccagaaugauaa

SEQ ID NO: 298915 - RNA, 19 nt, Homo sapiens
  misc_RNA (1)...(19): siRNA sense strand
caucugaggccuuugaaga

SEQ ID NO: 298916 - RNA, 19 nt, Homo sapiens
  misc_RNA (1)...(19): siRNA sense strand
gagaaugggaccucugaug

SEQ ID NO: 298917 - RNA, 19 nt, Homo sapiens
  misc_RNA (1)...(19): siRNA sense strand
gcaccuggaggcuaaagaa

SEQ ID NO: 298918 - RNA, 19 nt, Homo sapiens
  misc_RNA (1)...(19): siRNA sense strand
ugaugacugucguuauaaa

SEQ ID NO: 298919 - RNA, 19 nt, Homo sapiens
  misc_RNA (1)...(19): siRNA sense strand
uugaaacucccuuauagua

SEQ ID NO: 298920 - RNA, 19 nt, Homo sapiens
  misc_RNA (1)...(19): siRNA sense strand
aaacucaccaacaacauuu

SEQ ID NO: 298921 - RNA, 19 nt, Homo sapiens
  misc_RNA (1)...(19): siRNA sense strand
agucgucacuuuccacaaa

SEQ ID NO: 298922 - RNA, 19 nt, Homo sapiens
  misc_RNA (1)...(19): siRNA sense strand
cauuauagcugcugaugac

SEQ ID NO: 298923 - RNA, 19 nt, Homo sapiens
  misc_RNA (1)...(19): siRNA sense strand
guacauuucggacauacuu

SEQ ID NO: 298924 - RNA, 19 nt, Homo sapiens
  misc_RNA (1)...(19): siRNA sense strand
ccauggagcccgaagaaga

SEQ ID NO: 298925 - RNA, 19 nt, Homo sapiens
  misc_RNA (1)...(19): siRNA sense strand
gguggaugguggcugguaa

SEQ ID NO: 298926 - RNA, 19 nt, Homo sapiens
  misc_RNA (1)...(19): siRNA sense strand
ucuugaaacucccuuauag

SEQ ID NO: 298927 - RNA, 19 nt, Homo sapiens
  misc_RNA (1)...(19): siRNA sense strand
gaccauggagcccgaagaa

SEQ ID NO: 298928 - RNA, 19 nt, Homo sapiens
  misc_RNA (1)...(19): siRNA sense strand
gaaaugccaaagaggaugu

SEQ ID NO: 298929 - RNA, 19 nt, Homo sapiens
  misc_RNA (1)...(19): siRNA sense strand
agaaugggaccucugauga

SEQ ID NO: 298930 - RNA, 19 nt, Homo sapiens
  misc_RNA (1)...(19): siRNA sense strand
uauaguacauuucggacau

SEQ ID NO: 298931 - RNA, 19 nt, Homo sapiens
  misc_RNA (1)...(19): siRNA sense strand
caacauuucagacaaacau

SEQ ID NO: 298932 - RNA, 19 nt, Homo sapiens
  misc_RNA (1)...(19): siRNA sense strand
gauguucugggcuggauaa

SEQ ID NO: 298933 - RNA, 19 nt, Homo sapiens
  misc_RNA (1)...(19): siRNA sense strand
gaugaguccuccagugaac

SEQ ID NO: 298934 - RNA, 19 nt, Homo sapiens
  misc_RNA (1)...(19): siRNA sense strand
aaacugaaacucaccaaca

SEQ ID NO: 298935 - RNA, 19 nt, Homo sapiens
  misc_RNA (1)...(19): siRNA sense strand
aaauagacaacaacccuuu

SEQ ID NO: 298936 - RNA, 19 nt, Homo sapiens
  misc_RNA (1)...(19): siRNA sense strand
ccuggaggcuaaagaacuu

SEQ ID NO: 298937 - RNA, 19 nt, Homo sapiens
  misc_RNA (1)...(19): siRNA sense strand
ucagacaaacauggauuua

SEQ ID NO: 298938 - RNA, 19 nt, Homo sapiens
  misc_RNA (1)...(19): siRNA sense strand
uauagcugcugaugacugu

SEQ ID NO: 298939 - RNA, 19 nt, Homo sapiens
  misc_RNA (1)...(19): siRNA sense strand
uguaagagccaaugacauc

SEQ ID NO: 298940 - RNA, 19 nt, Homo sapiens
  misc_RNA (1)...(19): siRNA sense strand
ccagcgaacugcagagcau

SEQ ID NO: 298941 - RNA, 19 nt, Homo sapiens
  misc_RNA (1)...(19): siRNA sense strand
gagccaaugacaucuugaa

SEQ ID NO: 298942 - RNA, 19 nt, Homo sapiens
  misc_RNA (1)...(19): siRNA sense strand
gcgcaucugaggccuuuga

SEQ ID NO: 298943 - RNA, 19 nt, Homo sapiens
  misc_RNA (1)...(19): siRNA sense strand
cauuuaaagugagauguuc

SEQ ID NO: 298944 - RNA, 19 nt, Homo sapiens
  misc_RNA (1)...(19): siRNA sense strand
gaaugggaccucugaugag

SEQ ID NO: 298945 - RNA, 19 nt, Homo sapiens
  misc_RNA (1)...(19): siRNA sense strand
gagauguucugggcuggau

SEQ ID NO: 298946 - RNA, 19 nt, Homo sapiens
  misc_RNA (1)...(19): siRNA sense strand
aacugaaacucaccaacaa

SEQ ID NO: 298947 - RNA, 19 nt, Homo sapiens
  misc_RNA (1)...(19): siRNA sense strand
augauaagauaacccaguu

SEQ ID NO: 298948 - RNA, 19 nt, Homo sapiens
  misc_RNA (1)...(19): siRNA sense strand
ucaucgcugugacugcaua

SEQ ID NO: 298949 - RNA, 19 nt, Homo sapiens
  misc_RNA (1)...(19): siRNA sense strand
gaacuccaugcacaaauac

SEQ ID NO: 298950 - RNA, 19 nt, Homo sapiens
  misc_RNA (1)...(19): siRNA sense strand
gaugacugucguuauaaau

SEQ ID NO: 298951 - RNA, 19 nt, Homo sapiens
  misc_RNA (1)...(19): siRNA sense strand
gacugucguuauaaauuuc

SEQ ID NO: 298952 - RNA, 19 nt, Homo sapiens
  misc_RNA (1)...(19): siRNA sense strand
ccauuuaaagugagauguu

SEQ ID NO: 298953 - RNA, 19 nt, Homo sapiens
  misc_RNA (1)...(19): siRNA sense strand
acaucgaaccucaaagauu

SEQ ID NO: 298954 - RNA, 19 nt, Homo sapiens
  misc_RNA (1)...(19): siRNA sense strand
ugacugcauaccagaauga

SEQ ID NO: 298955 - RNA, 19 nt, Homo sapiens
  misc_RNA (1)...(19): siRNA sense strand
ucaccaacaacauuucaga

SEQ ID NO: 298956 - RNA, 19 nt, Homo sapiens
  misc_RNA (1)...(19): siRNA sense strand
ggacucgggcucugaacuc

SEQ ID NO: 298957 - RNA, 19 nt, Homo sapiens
  misc_RNA (1)...(19): siRNA sense strand
ggccuaccauccguuccua

SEQ ID NO: 298958 - RNA, 19 nt, Homo sapiens
  misc_RNA (1)...(19): siRNA sense strand
uuuccuccauuuaaaguga

SEQ ID NO: 298959 - RNA, 19 nt, Homo sapiens
  misc_RNA (1)...(19): siRNA sense strand
auaguacauuucggacaua

SEQ ID NO: 298960 - RNA, 19 nt, Homo sapiens
  misc_RNA (1)...(19): siRNA sense strand
cacuggaaauggccgaaga

SEQ ID NO: 298961 - RNA, 19 nt, Homo sapiens
  misc_RNA (1)...(19): siRNA sense strand
caaacucugcgcggagaaa

SEQ ID NO: 298962 - RNA, 19 nt, Homo sapiens
  misc_RNA (1)...(19): siRNA sense strand
ucgcccgacucacgccaua

SEQ ID NO: 298963 - RNA, 19 nt, Homo sapiens
  misc_RNA (1)...(19): siRNA sense strand
gacauuauagcugcugaug

SEQ ID NO: 298964 - RNA, 19 nt, Homo sapiens
  misc_RNA (1)...(19): siRNA sense strand
cugaugaguccuccaguga

SEQ ID NO: 298965 - RNA, 19 nt, Homo sapiens
  misc_RNA (1)...(19): siRNA sense strand
ugaaacucccuuauaguac

SEQ ID NO: 298966 - RNA, 19 nt, Homo sapiens
  misc_RNA (1)...(19): siRNA sense strand
gugacugcauaccagaaug

SEQ ID NO: 298967 - RNA, 19 nt, Homo sapiens
  misc_RNA (1)...(19): siRNA sense strand
gagcauccagcgguugguu

SEQ ID NO: 298968 - RNA, 19 nt, Homo sapiens
  misc_RNA (1)...(19): siRNA sense strand
gacucgggcucugaacuca

SEQ ID NO: 298969 - RNA, 19 nt, Homo sapiens
  misc_RNA (1)...(19): siRNA sense strand
aaugggaccucugaugagu

SEQ ID NO: 298970 - RNA, 19 nt, Homo sapiens
  misc_RNA (1)...(19): siRNA sense strand
ugaggguguuugaugaaag

SEQ ID NO: 298971 - RNA, 19 nt, Homo sapiens
  misc_RNA (1)...(19): siRNA sense strand
caugaggguguuugaugaa

SEQ ID NO: 298972 - RNA, 19 nt, Homo sapiens
  misc_RNA (1)...(19): siRNA sense strand
ugagagauccggucauucc

SEQ ID NO: 298973 - RNA, 19 nt, Homo sapiens
  misc_RNA (1)...(19): siRNA sense strand
cauaccagaaugauaagau

SEQ ID NO: 298974 - RNA, 19 nt, Homo sapiens
  misc_RNA (1)...(19): siRNA sense strand
gacaucgaaccucaaagau

SEQ ID NO: 298975 - RNA, 19 nt, Homo sapiens
  misc_RNA (1)...(19): siRNA sense strand
uggccaagccgaucaugga

SEQ ID NO: 298976 - RNA, 19 nt, Homo sapiens
  misc_RNA (1)...(19): siRNA sense strand
gcauccagcgguugguuag

SEQ ID NO: 298977 - RNA, 19 nt, Homo sapiens
  misc_RNA (1)...(19): siRNA sense strand
aaacucccuuauaguacau

SEQ ID NO: 298978 - RNA, 19 nt, Homo sapiens
  misc_RNA (1)...(19): siRNA sense strand
caucuugaaacucccuuau

SEQ ID NO: 298979 - RNA, 19 nt, Homo sapiens
  misc_RNA (1)...(19): siRNA sense strand
gccaaugacaucuugaaac

SEQ ID NO: 298980 - RNA, 19 nt, Homo sapiens
  misc_RNA (1)...(19): siRNA sense strand
ucacuuuccacaaacugaa

SEQ ID NO: 298981 - RNA, 19 nt, Homo sapiens
  misc_RNA (1)...(19): siRNA sense strand
ggaaauggccgaagagaaa

SEQ ID NO: 298982 - RNA, 19 nt, Homo sapiens
  misc_RNA (1)...(19): siRNA sense strand
caucgaaccucaaagauuu

SEQ ID NO: 298983 - RNA, 19 nt, Homo sapiens
  misc_RNA (1)...(19): siRNA sense strand
gcugaugacugucguuaua

SEQ ID NO: 298984 - RNA, 19 nt, Homo sapiens
  misc_RNA (1)...(19): siRNA sense strand
caacaacauuucagacaaa

SEQ ID NO: 298985 - RNA, 19 nt, Homo sapiens
  misc_RNA (1)...(19): siRNA sense strand
caaagaggauguacauuca

SEQ ID NO: 298986 - RNA, 19 nt, Homo sapiens
  misc_RNA (1)...(19): siRNA sense strand
gaaacucccuuauaguaca

SEQ ID NO: 298987 - RNA, 19 nt, Homo sapiens
  misc_RNA (1)...(19): siRNA sense strand
ugaacuccaugcacaaaua

SEQ ID NO: 298988 - RNA, 19 nt, Homo sapiens
  misc_RNA (1)...(19): siRNA sense strand
ggacaucgaaccucaaaga

SEQ ID NO: 298989 - RNA, 19 nt, Homo sapiens
  misc_RNA (1)...(19): siRNA sense strand
gcaccgagauggucauuac

SEQ ID NO: 298990 - RNA, 19 nt, Homo sapiens
  misc_RNA (1)...(19): siRNA sense strand
gaaacucaccaacaacauu

SEQ ID NO: 298991 - RNA, 19 nt, Homo sapiens
  misc_RNA (1)...(19): siRNA sense strand
ccaaugacaucuugaaacu

SEQ ID NO: 298992 - RNA, 19 nt, Homo sapiens
  misc_RNA (1)...(19): siRNA sense strand
ccaaagaggauguacauuc

SEQ ID NO: 298993 - RNA, 19 nt, Homo sapiens
  misc_RNA (1)...(19): siRNA sense strand
ggacaagcauggccuacca

SEQ ID NO: 298994 - RNA, 19 nt, Homo sapiens
  misc_RNA (1)...(19): siRNA sense strand
ccaacaacauuucagacaa

SEQ ID NO: 298995 - RNA, 19 nt, Homo sapiens
  misc_RNA (1)...(19): siRNA sense strand
ccaugaggguguuugauga

SEQ ID NO: 298996 - RNA, 19 nt, Homo sapiens
  misc_RNA (1)...(19): siRNA sense strand
gaggguguuugaugaaaga

SEQ ID NO: 298997 - RNA, 19 nt, Homo sapiens
  misc_RNA (1)...(19): siRNA sense strand
gaaccucaaagauuuaugu

SEQ ID NO: 298998 - RNA, 19 nt, Homo sapiens
  misc_RNA (1)...(19): siRNA sense strand
agacaaacauggauuuacu

SEQ ID NO: 298999 - RNA, 19 nt, Homo sapiens
  misc_RNA (1)...(19): siRNA sense strand
cugcauaccagaaugauaa

SEQ ID NO: 299000 - RNA, 19 nt, Homo sapiens
  misc_RNA (1)...(19): siRNA sense strand
caucugaggccuuugaaga

SEQ ID NO: 299001 - RNA, 19 nt, Homo sapiens
  misc_RNA (1)...(19): siRNA sense strand
gagaaugggaccucugaug

SEQ ID NO: 299002 - RNA, 19 nt, Homo sapiens
  misc_RNA (1)...(19): siRNA sense strand
gcaccuggaggcuaaagaa

SEQ ID NO: 299003 - RNA, 19 nt, Homo sapiens
  misc_RNA (1)...(19): siRNA sense strand
ugaugacugucguuauaaa

SEQ ID NO: 299004 - RNA, 19 nt, Homo sapiens
  misc_RNA (1)...(19): siRNA sense strand
uugaaacucccuuauagua

SEQ ID NO: 299005 - RNA, 19 nt, Homo sapiens
  misc_RNA (1)...(19): siRNA sense strand
aaacucaccaacaacauuu

SEQ ID NO: 299006 - RNA, 19 nt, Homo sapiens
  misc_RNA (1)...(19): siRNA sense strand
agucgucacuuuccacaaa

SEQ ID NO: 299007 - RNA, 19 nt, Homo sapiens
  misc_RNA (1)...(19): siRNA sense strand
cauuauagcugcugaugac

SEQ ID NO: 299008 - RNA, 19 nt, Homo sapiens
  misc_RNA (1)...(19): siRNA sense strand
guacauuucggacauacuu

SEQ ID NO: 299009 - RNA, 19 nt, Homo sapiens
  misc_RNA (1)...(19): siRNA sense strand
ccauggagcccgaagaaga

SEQ ID NO: 299010 - RNA, 19 nt, Homo sapiens
  misc_RNA (1)...(19): siRNA sense strand
gguggaugguggcugguaa

SEQ ID NO: 299011 - RNA, 19 nt, Homo sapiens
  misc_RNA (1)...(19): siRNA sense strand
ucuugaaacucccuuauag

SEQ ID NO: 299012 - RNA, 19 nt, Homo sapiens
  misc_RNA (1)...(19): siRNA sense strand
gaccauggagcccgaagaa

SEQ ID NO: 299013 - RNA, 19 nt, Homo sapiens
  misc_RNA (1)...(19): siRNA sense strand
gaaaugccaaagaggaugu

SEQ ID NO: 299014 - RNA, 19 nt, Homo sapiens
  misc_RNA (1)...(19): siRNA sense strand
agaaugggaccucugauga

SEQ ID NO: 299015 - RNA, 19 nt, Homo sapiens
  misc_RNA (1)...(19): siRNA sense strand
uauaguacauuucggacau

SEQ ID NO: 299016 - RNA, 19 nt, Homo sapiens
  misc_RNA (1)...(19): siRNA sense strand
caacauuucagacaaacau

SEQ ID NO: 299017 - RNA, 19 nt, Homo sapiens
  misc_RNA (1)...(19): siRNA sense strand
gauguucugggcuggauaa

SEQ ID NO: 299018 - RNA, 19 nt, Homo sapiens
  misc_RNA (1)...(19): siRNA sense strand
gaugaguccuccagugaac

SEQ ID NO: 299019 - RNA, 19 nt, Homo sapiens
  misc_RNA (1)...(19): siRNA sense strand
aaacugaaacucaccaaca

SEQ ID NO: 299020 - RNA, 19 nt, Homo sapiens
  misc_RNA (1)...(19): siRNA sense strand
aaauagacaacaacccuuu

SEQ ID NO: 299021 - RNA, 19 nt, Homo sapiens
  misc_RNA (1)...(19): siRNA sense strand
ccuggaggcuaaagaacuu

SEQ ID NO: 299022 - RNA, 19 nt, Homo sapiens
  misc_RNA (1)...(19): siRNA sense strand
ucagacaaacauggauuua

SEQ ID NO: 299023 - RNA, 19 nt, Homo sapiens
  misc_RNA (1)...(19): siRNA sense strand
uauagcugcugaugacugu

SEQ ID NO: 299024 - RNA, 19 nt, Homo sapiens
  misc_RNA (1)...(19): siRNA sense strand
uguaagagccaaugacauc

SEQ ID NO: 299025 - RNA, 19 nt, Homo sapiens
  misc_RNA (1)...(19): siRNA sense strand
ccagcgaacugcagagcau

SEQ ID NO: 299026 - RNA, 19 nt, Homo sapiens
  misc_RNA (1)...(19): siRNA sense strand
gagccaaugacaucuugaa

SEQ ID NO: 299027 - RNA, 19 nt, Homo sapiens
  misc_RNA (1)...(19): siRNA sense strand
gcgcaucugaggccuuuga

SEQ ID NO: 299028 - RNA, 19 nt, Homo sapiens
  misc_RNA (1)...(19): siRNA sense strand
cauuuaaagugagauguuc

SEQ ID NO: 299029 - RNA, 19 nt, Homo sapiens
  misc_RNA (1)...(19): siRNA sense strand
gaaugggaccucugaugag

SEQ ID NO: 299030 - RNA, 19 nt, Homo sapiens
  misc_RNA (1)...(19): siRNA sense strand
gagauguucugggcuggau

SEQ ID NO: 299031 - RNA, 19 nt, Homo sapiens
  misc_RNA (1)...(19): siRNA sense strand
aacugaaacucaccaacaa

SEQ ID NO: 299032 - RNA, 19 nt, Homo sapiens
  misc_RNA (1)...(19): siRNA sense strand
augauaagauaacccaguu

SEQ ID NO: 299033 - RNA, 19 nt, Homo sapiens
  misc_RNA (1)...(19): siRNA sense strand
ucaucgcugugacugcaua

SEQ ID NO: 299034 - RNA, 19 nt, Homo sapiens
  misc_RNA (1)...(19): siRNA sense strand
gaacuccaugcacaaauac

SEQ ID NO: 299035 - RNA, 19 nt, Homo sapiens
  misc_RNA (1)...(19): siRNA sense strand
gaugacugucguuauaaau

SEQ ID NO: 299036 - RNA, 19 nt, Homo sapiens
  misc_RNA (1)...(19): siRNA sense strand
gacugucguuauaaauuuc

SEQ ID NO: 299037 - RNA, 19 nt, Homo sapiens
  misc_RNA (1)...(19): siRNA sense strand
ccauuuaaagugagauguu

SEQ ID NO: 299038 - RNA, 19 nt, Homo sapiens
  misc_RNA (1)...(19): siRNA sense strand
acaucgaaccucaaagauu

SEQ ID NO: 299039 - RNA, 19 nt, Homo sapiens
  misc_RNA (1)...(19): siRNA sense strand
ugacugcauaccagaauga

SEQ ID NO: 299040 - RNA, 19 nt, Homo sapiens
  misc_RNA (1)...(19): siRNA sense strand
ucaccaacaacauuucaga

SEQ ID NO: 299041 - RNA, 19 nt, Homo sapiens
  misc_RNA (1)...(19): siRNA sense strand
ggacucgggcucugaacuc

SEQ ID NO: 299042 - RNA, 19 nt, Homo sapiens
  misc_RNA (1)...(19): siRNA sense strand
ggccuaccauccguuccua

SEQ ID NO: 299043 - RNA, 19 nt, Homo sapiens
  misc_RNA (1)...(19): siRNA sense strand
uuuccuccauuuaaaguga

SEQ ID NO: 299044 - RNA, 19 nt, Homo sapiens
  misc_RNA (1)...(19): siRNA sense strand
auaguacauuucggacaua

SEQ ID NO: 299045 - RNA, 19 nt, Homo sapiens
  misc_RNA (1)...(19): siRNA sense strand
cacuggaaauggccgaaga

SEQ ID NO: 299046 - RNA, 19 nt, Homo sapiens
  misc_RNA (1)...(19): siRNA sense strand
caaacucugcgcggagaaa

SEQ ID NO: 299047 - RNA, 19 nt, Homo sapiens
  misc_RNA (1)...(19): siRNA sense strand
ucgcccgacucacgccaua

SEQ ID NO: 299048 - RNA, 19 nt, Homo sapiens
  misc_RNA (1)...(19): siRNA sense strand
gacauuauagcugcugaug

SEQ ID NO: 299049 - RNA, 19 nt, Homo sapiens
  misc_RNA (1)...(19): siRNA sense strand
cugaugaguccuccaguga

SEQ ID NO: 299050 - RNA, 19 nt, Homo sapiens
  misc_RNA (1)...(19): siRNA sense strand
ugaaacucccuuauaguac

SEQ ID NO: 299051 - RNA, 19 nt, Homo sapiens
  misc_RNA (1)...(19): siRNA sense strand
gugacugcauaccagaaug

SEQ ID NO: 299052 - RNA, 19 nt, Homo sapiens
  misc_RNA (1)...(19): siRNA sense strand
gagcauccagcgguugguu

SEQ ID NO: 299053 - RNA, 19 nt, Homo sapiens
  misc_RNA (1)...(19): siRNA sense strand
gacucgggcucugaacuca

SEQ ID NO: 299054 - RNA, 19 nt, Homo sapiens
  misc_RNA (1)...(19): siRNA sense strand
aaugggaccucugaugagu

SEQ ID NO: 299055 - RNA, 19 nt, Homo sapiens
  misc_RNA (1)...(19): siRNA sense strand
ugaggguguuugaugaaag

SEQ ID NO: 299056 - RNA, 19 nt, Homo sapiens
  misc_RNA (1)...(19): siRNA sense strand
caugaggguguuugaugaa

SEQ ID NO: 299057 - RNA, 19 nt, Homo sapiens
  misc_RNA (1)...(19): siRNA sense strand
ugagagauccggucauucc

SEQ ID NO: 299058 - RNA, 19 nt, Homo sapiens
  misc_RNA (1)...(19): siRNA sense strand
cauaccagaaugauaagau

SEQ ID NO: 299059 - RNA, 19 nt, Homo sapiens
  misc_RNA (1)...(19): siRNA sense strand
gacaucgaaccucaaagau

SEQ ID NO: 299060 - RNA, 19 nt, Homo sapiens
  misc_RNA (1)...(19): siRNA sense strand
uggccaagccgaucaugga

SEQ ID NO: 299061 - RNA, 19 nt, Homo sapiens
  misc_RNA (1)...(19): siRNA sense strand
gcauccagcgguugguuag

SEQ ID NO: 299062 - RNA, 19 nt, Homo sapiens
  misc_RNA (1)...(19): siRNA sense strand
aaacucccuuauaguacau

SEQ ID NO: 299063 - RNA, 19 nt, Homo sapiens
  misc_RNA (1)...(19): siRNA sense strand
caucuugaaacucccuuau

SEQ ID NO: 299064 - RNA, 19 nt, Homo sapiens
  misc_RNA (1)...(19): siRNA sense strand
gccaaugacaucuugaaac

SEQ ID NO: 299065 - RNA, 19 nt, Homo sapiens
  misc_RNA (1)...(19): siRNA sense strand
ucacuuuccacaaacugaa

SEQ ID NO: 299066 - RNA, 19 nt, Homo sapiens
  misc_RNA (1)...(19): siRNA sense strand
gagcagaucggacagaaga

SEQ ID NO: 299067 - RNA, 19 nt, Homo sapiens
  misc_RNA (1)...(19): siRNA sense strand
ggacagaagauccgcaaga

SEQ ID NO: 299068 - RNA, 19 nt, Homo sapiens
  misc_RNA (1)...(19): siRNA sense strand
gacagaagauccgcaagau

SEQ ID NO: 299069 - RNA, 19 nt, Homo sapiens
  misc_RNA (1)...(19): siRNA sense strand
ggaccugccugacgcaucu

SEQ ID NO: 299070 - RNA, 19 nt, Homo sapiens
  misc_RNA (1)...(19): siRNA sense strand
caacgucaccggugucuuc

SEQ ID NO: 299071 - RNA, 19 nt, Homo sapiens
  misc_RNA (1)...(19): siRNA sense strand
gccacgggcugcucauguu

SEQ ID NO: 299072 - RNA, 19 nt, Homo sapiens
  misc_RNA (1)...(19): siRNA sense strand
ugaccuuccucaucuccua

SEQ ID NO: 299073 - RNA, 19 nt, Homo sapiens
  misc_RNA (1)...(19): siRNA sense strand
caccuucgcugccacagau

SEQ ID NO: 299074 - RNA, 19 nt, Homo sapiens
  misc_RNA (1)...(19): siRNA sense strand
uggcaucgauccuauuugg

SEQ ID NO: 299075 - RNA, 19 nt, Homo sapiens
  misc_RNA (1)...(19): siRNA sense strand
ccucaacuccuucaagaug

SEQ ID NO: 299076 - RNA, 19 nt, Homo sapiens
  misc_RNA (1)...(19): siRNA sense strand
gugcagguccacaagauga

SEQ ID NO: 299077 - RNA, 19 nt, Homo sapiens
  misc_RNA (1)...(19): siRNA sense strand
gggccuggaugaugaagag

SEQ ID NO: 299078 - RNA, 19 nt, Homo sapiens
  misc_RNA (1)...(19): siRNA sense strand
gugagcagaucggacagaa

SEQ ID NO: 299079 - RNA, 19 nt, Homo sapiens
  misc_RNA (1)...(19): siRNA sense strand
gagaaccgaccggcuguga

SEQ ID NO: 299080 - RNA, 19 nt, Homo sapiens
  misc_RNA (1)...(19): siRNA sense strand
gcuaccugcuccugcuuau

SEQ ID NO: 299081 - RNA, 19 nt, Homo sapiens
  misc_RNA (1)...(19): siRNA sense strand
gagccagccacguggauga

SEQ ID NO: 299082 - RNA, 19 nt, Homo sapiens
  misc_RNA (1)...(19): siRNA sense strand
ccaugguccuugcggagaa

SEQ ID NO: 299083 - RNA, 19 nt, Homo sapiens
  misc_RNA (1)...(19): siRNA sense strand
cagucuggcuggagugaug

SEQ ID NO: 299084 - RNA, 19 nt, Homo sapiens
  misc_RNA (1)...(19): siRNA sense strand
gcaagaucacggacugcuu

SEQ ID NO: 299085 - RNA, 19 nt, Homo sapiens
  misc_RNA (1)...(19): siRNA sense strand
ugcugggacucuucgguua

SEQ ID NO: 299086 - RNA, 19 nt, Homo sapiens
  misc_RNA (1)...(19): siRNA sense strand
caucuacaccggcuucauc

SEQ ID NO: 299087 - RNA, 19 nt, Homo sapiens
  misc_RNA (1)...(19): siRNA sense strand
ggugauggagggacucuca

SEQ ID NO: 299088 - RNA, 19 nt, Homo sapiens
  misc_RNA (1)...(19): siRNA sense strand
uggcuggagugaugcauuc

SEQ ID NO: 299089 - RNA, 19 nt, Homo sapiens
  misc_RNA (1)...(19): siRNA sense strand
ccagcauccucauccacuu

SEQ ID NO: 299090 - RNA, 19 nt, Homo sapiens
  misc_RNA (1)...(19): siRNA sense strand
ccguguaccuggcccugaa

SEQ ID NO: 299091 - RNA, 19 nt, Homo sapiens
  misc_RNA (1)...(19): siRNA sense strand
ccacguggaugaccuuccu

SEQ ID NO: 299092 - RNA, 19 nt, Homo sapiens
  misc_RNA (1)...(19): siRNA sense strand
ucaaccacgugcacuuugg

SEQ ID NO: 299093 - RNA, 19 nt, Homo sapiens
  misc_RNA (1)...(19): siRNA sense strand
cuacaacgagugcuucagu

SEQ ID NO: 299094 - RNA, 19 nt, Homo sapiens
  misc_RNA (1)...(19): siRNA sense strand
cucaacuccuucaagauga

SEQ ID NO: 299095 - RNA, 19 nt, Homo sapiens
  misc_RNA (1)...(19): siRNA sense strand
uuccucaacuccuucaaga

SEQ ID NO: 299096 - RNA, 19 nt, Homo sapiens
  misc_RNA (1)...(19): siRNA sense strand
caagaugaaggccguguac

SEQ ID NO: 299097 - RNA, 19 nt, Homo sapiens
  misc_RNA (1)...(19): siRNA sense strand
acaccggcuucaucuacaa

SEQ ID NO: 299098 - RNA, 19 nt, Homo sapiens
  misc_RNA (1)...(19): siRNA sense strand
ggccuguucuccaucuaca

SEQ ID NO: 299099 - RNA, 19 nt, Homo sapiens
  misc_RNA (1)...(19): siRNA sense strand
ccuguuugcugugauguuc

SEQ ID NO: 299100 - RNA, 19 nt, Homo sapiens
  misc_RNA (1)...(19): siRNA sense strand
ucaucaacauguuccucuu

SEQ ID NO: 299101 - RNA, 19 nt, Homo sapiens
  misc_RNA (1)...(19): siRNA sense strand
ccuacaccaucaucaccuu

SEQ ID NO: 299102 - RNA, 19 nt, Homo sapiens
  misc_RNA (1)...(19): siRNA sense strand
caucaacauguuccucuuc

SEQ ID NO: 299103 - RNA, 19 nt, Homo sapiens
  misc_RNA (1)...(19): siRNA sense strand
ccacuucaucaacauguuc

SEQ ID NO: 299104 - RNA, 19 nt, Homo sapiens
  misc_RNA (1)...(19): siRNA sense strand
cuacaccggcuucaucuac

SEQ ID NO: 299105 - RNA, 19 nt, Homo sapiens
  misc_RNA (1)...(19): siRNA sense strand
gagcagaucggacagaaga

SEQ ID NO: 299106 - RNA, 19 nt, Homo sapiens
  misc_RNA (1)...(19): siRNA sense strand
ggacagaagauccgcaaga

SEQ ID NO: 299107 - RNA, 19 nt, Homo sapiens
  misc_RNA (1)...(19): siRNA sense strand
gacagaagauccgcaagau

SEQ ID NO: 299108 - RNA, 19 nt, Homo sapiens
  misc_RNA (1)...(19): siRNA sense strand
ggaccugccugacgcaucu

SEQ ID NO: 299109 - RNA, 19 nt, Homo sapiens
  misc_RNA (1)...(19): siRNA sense strand
caacgucaccggugucuuc

SEQ ID NO: 299110 - RNA, 19 nt, Homo sapiens
  misc_RNA (1)...(19): siRNA sense strand
gccacgggcugcucauguu

SEQ ID NO: 299111 - RNA, 19 nt, Homo sapiens
  misc_RNA (1)...(19): siRNA sense strand
caccuucgcugccacagau

SEQ ID NO: 299112 - RNA, 19 nt, Homo sapiens
  misc_RNA (1)...(19): siRNA sense strand
uggcaucgauccuauuugg

SEQ ID NO: 299113 - RNA, 19 nt, Homo sapiens
  misc_RNA (1)...(19): siRNA sense strand
ccucaacuccuucaagaug

SEQ ID NO: 299114 - RNA, 19 nt, Homo sapiens
  misc_RNA (1)...(19): siRNA sense strand
gugcagguccacaagauga

SEQ ID NO: 299115 - RNA, 19 nt, Homo sapiens
  misc_RNA (1)...(19): siRNA sense strand
gggccuggaugaugaagag

SEQ ID NO: 299116 - RNA, 19 nt, Homo sapiens
  misc_RNA (1)...(19): siRNA sense strand
gugagcagaucggacagaa

SEQ ID NO: 299117 - RNA, 19 nt, Homo sapiens
  misc_RNA (1)...(19): siRNA sense strand
gagaaccgaccggcuguga

SEQ ID NO: 299118 - RNA, 19 nt, Homo sapiens
  misc_RNA (1)...(19): siRNA sense strand
gcuaccugcuccugcuuau

SEQ ID NO: 299119 - RNA, 19 nt, Homo sapiens
  misc_RNA (1)...(19): siRNA sense strand
ccaugguccuugcggagaa

SEQ ID NO: 299120 - RNA, 19 nt, Homo sapiens
  misc_RNA (1)...(19): siRNA sense strand
cagucuggcuggagugaug

SEQ ID NO: 299121 - RNA, 19 nt, Homo sapiens
  misc_RNA (1)...(19): siRNA sense strand
gcaagaucacggacugcuu

SEQ ID NO: 299122 - RNA, 19 nt, Homo sapiens
  misc_RNA (1)...(19): siRNA sense strand
ugcugggacucuucgguua

SEQ ID NO: 299123 - RNA, 19 nt, Homo sapiens
  misc_RNA (1)...(19): siRNA sense strand
caucuacaccggcuucauc

SEQ ID NO: 299124 - RNA, 19 nt, Homo sapiens
  misc_RNA (1)...(19): siRNA sense strand
ggugauggagggacucuca

SEQ ID NO: 299125 - RNA, 19 nt, Homo sapiens
  misc_RNA (1)...(19): siRNA sense strand
uggcuggagugaugcauuc

SEQ ID NO: 299126 - RNA, 19 nt, Homo sapiens
  misc_RNA (1)...(19): siRNA sense strand
ccagcauccucauccacuu

SEQ ID NO: 299127 - RNA, 19 nt, Homo sapiens
  misc_RNA (1)...(19): siRNA sense strand
ccguguaccuggcccugaa

SEQ ID NO: 299128 - RNA, 19 nt, Homo sapiens
  misc_RNA (1)...(19): siRNA sense strand
ucaaccacgugcacuuugg

SEQ ID NO: 299129 - RNA, 19 nt, Homo sapiens
  misc_RNA (1)...(19): siRNA sense strand
cuacaacgagugcuucagu

SEQ ID NO: 299130 - RNA, 19 nt, Homo sapiens
  misc_RNA (1)...(19): siRNA sense strand
cucaacuccuucaagauga

SEQ ID NO: 299131 - RNA, 19 nt, Homo sapiens
  misc_RNA (1)...(19): siRNA sense strand
uuccucaacuccuucaaga

SEQ ID NO: 299132 - RNA, 19 nt, Homo sapiens
  misc_RNA (1)...(19): siRNA sense strand
caagaugaaggccguguac

SEQ ID NO: 299133 - RNA, 19 nt, Homo sapiens
  misc_RNA (1)...(19): siRNA sense strand
acaccggcuucaucuacaa

SEQ ID NO: 299134 - RNA, 19 nt, Homo sapiens
  misc_RNA (1)...(19): siRNA sense strand
ggccuguucuccaucuaca

SEQ ID NO: 299135 - RNA, 19 nt, Homo sapiens
  misc_RNA (1)...(19): siRNA sense strand
ccuguuugcugugauguuc

SEQ ID NO: 299136 - RNA, 19 nt, Homo sapiens
  misc_RNA (1)...(19): siRNA sense strand
ucaucaacauguuccucuu

SEQ ID NO: 299137 - RNA, 19 nt, Homo sapiens
  misc_RNA (1)...(19): siRNA sense strand
ccuacaccaucaucaccuu

SEQ ID NO: 299138 - RNA, 19 nt, Homo sapiens
  misc_RNA (1)...(19): siRNA sense strand
caucaacauguuccucuuc

SEQ ID NO: 299139 - RNA, 19 nt, Homo sapiens
  misc_RNA (1)...(19): siRNA sense strand
ccacuucaucaacauguuc

SEQ ID NO: 299140 - RNA, 19 nt, Homo sapiens
  misc_RNA (1)...(19): siRNA sense strand
cuacaccggcuucaucuac

SEQ ID NO: 299141 - RNA, 19 nt, Homo sapiens
  misc_RNA (1)...(19): siRNA sense strand
gaacauacccuuagaagaa

SEQ ID NO: 299142 - RNA, 19 nt, Homo sapiens
  misc_RNA (1)...(19): siRNA sense strand
uagaagaacuccaaagaaa

SEQ ID NO: 299143 - RNA, 19 nt, Homo sapiens
  misc_RNA (1)...(19): siRNA sense strand
gacagaaagucuacaaauu

SEQ ID NO: 299144 - RNA, 19 nt, Homo sapiens
  misc_RNA (1)...(19): siRNA sense strand
caagugaacauaucaguua

SEQ ID NO: 299145 - RNA, 19 nt, Homo sapiens
  misc_RNA (1)...(19): siRNA sense strand
caaccaggauuuagaauau

SEQ ID NO: 299146 - RNA, 19 nt, Homo sapiens
  misc_RNA (1)...(19): siRNA sense strand
gauguuagcuggaauucuu

SEQ ID NO: 299147 - RNA, 19 nt, Homo sapiens
  misc_RNA (1)...(19): siRNA sense strand
gcauuuagaucucucauuc

SEQ ID NO: 299148 - RNA, 19 nt, Homo sapiens
  misc_RNA (1)...(19): siRNA sense strand
ggaaaugccuggucagagu

SEQ ID NO: 299149 - RNA, 19 nt, Homo sapiens
  misc_RNA (1)...(19): siRNA sense strand
ugaauuauccugcaacaua

SEQ ID NO: 299150 - RNA, 19 nt, Homo sapiens
  misc_RNA (1)...(19): siRNA sense strand
ggucagagucuuucaauuu

SEQ ID NO: 299151 - RNA, 19 nt, Homo sapiens
  misc_RNA (1)...(19): siRNA sense strand
ggauaugccuucuuuggaa

SEQ ID NO: 299152 - RNA, 19 nt, Homo sapiens
  misc_RNA (1)...(19): siRNA sense strand
caacauaacucugcugauc

SEQ ID NO: 299153 - RNA, 19 nt, Homo sapiens
  misc_RNA (1)...(19): siRNA sense strand
gcuuacaacugacuaauau

SEQ ID NO: 299154 - RNA, 19 nt, Homo sapiens
  misc_RNA (1)...(19): siRNA sense strand
aaagugaauugguaccuua

SEQ ID NO: 299155 - RNA, 19 nt, Homo sapiens
  misc_RNA (1)...(19): siRNA sense strand
gaucugcccugguaucuca

SEQ ID NO: 299156 - RNA, 19 nt, Homo sapiens
  misc_RNA (1)...(19): siRNA sense strand
gaacagcauucccaacaag

SEQ ID NO: 299157 - RNA, 19 nt, Homo sapiens
  misc_RNA (1)...(19): siRNA sense strand
gcccaaaccuguggaauau

SEQ ID NO: 299158 - RNA, 19 nt, Homo sapiens
  misc_RNA (1)...(19): siRNA sense strand
caacuuaucacaacugaau

SEQ ID NO: 299159 - RNA, 19 nt, Homo sapiens
  misc_RNA (1)...(19): siRNA sense strand
gaaauuaacacuagucacu

SEQ ID NO: 299160 - RNA, 19 nt, Homo sapiens
  misc_RNA (1)...(19): siRNA sense strand
cagaagaugaggucaauaa

SEQ ID NO: 299161 - RNA, 19 nt, Homo sapiens
  misc_RNA (1)...(19): siRNA sense strand
cuucaaauaugcuuacuga

SEQ ID NO: 299162 - RNA, 19 nt, Homo sapiens
  misc_RNA (1)...(19): siRNA sense strand
ugaaagcauucgugaagaa

SEQ ID NO: 299163 - RNA, 19 nt, Homo sapiens
  misc_RNA (1)...(19): siRNA sense strand
uuagagggcuggccugauu

SEQ ID NO: 299164 - RNA, 19 nt, Homo sapiens
  misc_RNA (1)...(19): siRNA sense strand
gacaugagcuuucuaucag

SEQ ID NO: 299165 - RNA, 19 nt, Homo sapiens
  misc_RNA (1)...(19): siRNA sense strand
gauaugccuucuuuggaaa

SEQ ID NO: 299166 - RNA, 19 nt, Homo sapiens
  misc_RNA (1)...(19): siRNA sense strand
ggagacacuuaucuuacaa

SEQ ID NO: 299167 - RNA, 19 nt, Homo sapiens
  misc_RNA (1)...(19): siRNA sense strand
aguaucaagugaaguguua

SEQ ID NO: 299168 - RNA, 19 nt, Homo sapiens
  misc_RNA (1)...(19): siRNA sense strand
caauagaacauaucacgaa

SEQ ID NO: 299169 - RNA, 19 nt, Homo sapiens
  misc_RNA (1)...(19): siRNA sense strand
gggcuggccugauucuuau

SEQ ID NO: 299170 - RNA, 19 nt, Homo sapiens
  misc_RNA (1)...(19): siRNA sense strand
gcaucuaaguuauauccuu

SEQ ID NO: 299171 - RNA, 19 nt, Homo sapiens
  misc_RNA (1)...(19): siRNA sense strand
gaagauauacagauuuguc

SEQ ID NO: 299172 - RNA, 19 nt, Homo sapiens
  misc_RNA (1)...(19): siRNA sense strand
ucacaugucugaauuaucc

SEQ ID NO: 299173 - RNA, 19 nt, Homo sapiens
  misc_RNA (1)...(19): siRNA sense strand
uagcagccuuucuguauug

SEQ ID NO: 299174 - RNA, 19 nt, Homo sapiens
  misc_RNA (1)...(19): siRNA sense strand
gcaccaagcacauucaagu

SEQ ID NO: 299175 - RNA, 19 nt, Homo sapiens
  misc_RNA (1)...(19): siRNA sense strand
caaguucaaccaggauuua

SEQ ID NO: 299176 - RNA, 19 nt, Homo sapiens
  misc_RNA (1)...(19): siRNA sense strand
gaccaaguaucaagugaag

SEQ ID NO: 299177 - RNA, 19 nt, Homo sapiens
  misc_RNA (1)...(19): siRNA sense strand
ucacccaacuaguuuauuc

SEQ ID NO: 299178 - RNA, 19 nt, Homo sapiens
  misc_RNA (1)...(19): siRNA sense strand
guaaggaauuuggcaacuu

SEQ ID NO: 299179 - RNA, 19 nt, Homo sapiens
  misc_RNA (1)...(19): siRNA sense strand
caacuaguuuauucgcuau

SEQ ID NO: 299180 - RNA, 19 nt, Homo sapiens
  misc_RNA (1)...(19): siRNA sense strand
cacaaucucuuucaugaag

SEQ ID NO: 299181 - RNA, 19 nt, Homo sapiens
  misc_RNA (1)...(19): siRNA sense strand
gcaagagcauuguggaaaa

SEQ ID NO: 299182 - RNA, 19 nt, Homo sapiens
  misc_RNA (1)...(19): siRNA sense strand
aaacgacauugaaagcauu

SEQ ID NO: 299183 - RNA, 19 nt, Homo sapiens
  misc_RNA (1)...(19): siRNA sense strand
ccaaaccuguggaauaucu

SEQ ID NO: 299184 - RNA, 19 nt, Homo sapiens
  misc_RNA (1)...(19): siRNA sense strand
ggaauuuggcaacuuauca

SEQ ID NO: 299185 - RNA, 19 nt, Homo sapiens
  misc_RNA (1)...(19): siRNA sense strand
aagcaaacgugggcucuuu

SEQ ID NO: 299186 - RNA, 19 nt, Homo sapiens
  misc_RNA (1)...(19): siRNA sense strand
auacagauuugucuucaug

SEQ ID NO: 299187 - RNA, 19 nt, Homo sapiens
  misc_RNA (1)...(19): siRNA sense strand
ggugaaaagugaauuggua

SEQ ID NO: 299188 - RNA, 19 nt, Homo sapiens
  misc_RNA (1)...(19): siRNA sense strand
caauguugcuuucaauucu

SEQ ID NO: 299189 - RNA, 19 nt, Homo sapiens
  misc_RNA (1)...(19): siRNA sense strand
ugacaugagcuuucuauca

SEQ ID NO: 299190 - RNA, 19 nt, Homo sapiens
  misc_RNA (1)...(19): siRNA sense strand
ggcccaaaccuguggaaua

SEQ ID NO: 299191 - RNA, 19 nt, Homo sapiens
  misc_RNA (1)...(19): siRNA sense strand
uuagggugcuuacaacuga

SEQ ID NO: 299192 - RNA, 19 nt, Homo sapiens
  misc_RNA (1)...(19): siRNA sense strand
acagaaagucuacaaauuc

SEQ ID NO: 299193 - RNA, 19 nt, Homo sapiens
  misc_RNA (1)...(19): siRNA sense strand
gcccaucuguaaggaauuu

SEQ ID NO: 299194 - RNA, 19 nt, Homo sapiens
  misc_RNA (1)...(19): siRNA sense strand
gucagagucuuucaauuuc

SEQ ID NO: 299195 - RNA, 19 nt, Homo sapiens
  misc_RNA (1)...(19): siRNA sense strand
ccaggaacauacccuuaga

SEQ ID NO: 299196 - RNA, 19 nt, Homo sapiens
  misc_RNA (1)...(19): siRNA sense strand
gagcuaagagaauuuguca

SEQ ID NO: 299197 - RNA, 19 nt, Homo sapiens
  misc_RNA (1)...(19): siRNA sense strand
caaaagaccuaccgcugaa

SEQ ID NO: 299198 - RNA, 19 nt, Homo sapiens
  misc_RNA (1)...(19): siRNA sense strand
ucaaccaggauuuagaaua

SEQ ID NO: 299199 - RNA, 19 nt, Homo sapiens
  misc_RNA (1)...(19): siRNA sense strand
gcgcagggccaggaacaua

SEQ ID NO: 299200 - RNA, 19 nt, Homo sapiens
  misc_RNA (1)...(19): siRNA sense strand
uuccagagcugccagaaga

SEQ ID NO: 299201 - RNA, 19 nt, Homo sapiens
  misc_RNA (1)...(19): siRNA sense strand
uagcuggaauucuuuggaa

SEQ ID NO: 299202 - RNA, 19 nt, Homo sapiens
  misc_RNA (1)...(19): siRNA sense strand
gcugaaaaccaaagucuua

SEQ ID NO: 299203 - RNA, 19 nt, Homo sapiens
  misc_RNA (1)...(19): siRNA sense strand
ggaacauacccuuagaaga

SEQ ID NO: 299204 - RNA, 19 nt, Homo sapiens
  misc_RNA (1)...(19): siRNA sense strand
gaagcccacuaaaggacuu

SEQ ID NO: 299205 - RNA, 19 nt, Homo sapiens
  misc_RNA (1)...(19): siRNA sense strand
ccugugagcuaagagaauu

SEQ ID NO: 299206 - RNA, 19 nt, Homo sapiens
  misc_RNA (1)...(19): siRNA sense strand
caaagacaaagaaccuauu

SEQ ID NO: 299207 - RNA, 19 nt, Homo sapiens
  misc_RNA (1)...(19): siRNA sense strand
gaagaugaggucaauaaaa

SEQ ID NO: 299208 - RNA, 19 nt, Homo sapiens
  misc_RNA (1)...(19): siRNA sense strand
gccagaagaugaggucaau

SEQ ID NO: 299209 - RNA, 19 nt, Homo sapiens
  misc_RNA (1)...(19): siRNA sense strand
gauguuaaccauuucagau

SEQ ID NO: 299210 - RNA, 19 nt, Homo sapiens
  misc_RNA (1)...(19): siRNA sense strand
gaacuacaucgcugagcuu

SEQ ID NO: 299211 - RNA, 19 nt, Homo sapiens
  misc_RNA (1)...(19): siRNA sense strand
gggauugagugcuaugaag

SEQ ID NO: 299212 - RNA, 19 nt, Homo sapiens
  misc_RNA (1)...(19): siRNA sense strand
cagagugaguggugccauu

SEQ ID NO: 299213 - RNA, 19 nt, Homo sapiens
  misc_RNA (1)...(19): siRNA sense strand
gagaguauagugguguuaa

SEQ ID NO: 299214 - RNA, 19 nt, Homo sapiens
  misc_RNA (1)...(19): siRNA sense strand
ccuguggaauaucucaaua

SEQ ID NO: 299215 - RNA, 19 nt, Homo sapiens
  misc_RNA (1)...(19): siRNA sense strand
uaucagaguugacaguuuu

SEQ ID NO: 299216 - RNA, 19 nt, Homo sapiens
  misc_RNA (1)...(19): siRNA sense strand
ccaacuuuguccagaguga

SEQ ID NO: 299217 - RNA, 19 nt, Homo sapiens
  misc_RNA (1)...(19): siRNA sense strand
gauauacagauuugucuuc

SEQ ID NO: 299218 - RNA, 19 nt, Homo sapiens
  misc_RNA (1)...(19): siRNA sense strand
ccaaguaucaagugaagug

SEQ ID NO: 299219 - RNA, 19 nt, Homo sapiens
  misc_RNA (1)...(19): siRNA sense strand
gguguuaaauuugucuuca

SEQ ID NO: 299220 - RNA, 19 nt, Homo sapiens
  misc_RNA (1)...(19): siRNA sense strand
gccaauugcucacuugcau

SEQ ID NO: 299221 - RNA, 19 nt, Homo sapiens
  misc_RNA (1)...(19): siRNA sense strand
gaggaagcccacuaaagga

SEQ ID NO: 299222 - RNA, 19 nt, Homo sapiens
  misc_RNA (1)...(19): siRNA sense strand
aauuaacacuagucacuga

SEQ ID NO: 299223 - RNA, 19 nt, Homo sapiens
  misc_RNA (1)...(19): siRNA sense strand
ucuuagauaugucucagaa

SEQ ID NO: 299224 - RNA, 19 nt, Homo sapiens
  misc_RNA (1)...(19): siRNA sense strand
cauaaucaguugcaaaaga

SEQ ID NO: 299225 - RNA, 19 nt, Homo sapiens
  misc_RNA (1)...(19): siRNA sense strand
gccauuacgaacucuauuu

SEQ ID NO: 299226 - RNA, 19 nt, Homo sapiens
  misc_RNA (1)...(19): siRNA sense strand
ggcaagagcauuguggaaa

SEQ ID NO: 299227 - RNA, 19 nt, Homo sapiens
  misc_RNA (1)...(19): siRNA sense strand
ggcaacuuaucacaacuga

SEQ ID NO: 299228 - RNA, 19 nt, Homo sapiens
  misc_RNA (1)...(19): siRNA sense strand
aagauauccugccauccua

SEQ ID NO: 299229 - RNA, 19 nt, Homo sapiens
  misc_RNA (1)...(19): siRNA sense strand
uggagacacuuaucuuaca

SEQ ID NO: 299230 - RNA, 19 nt, Homo sapiens
  misc_RNA (1)...(19): siRNA sense strand
ccaaagacaaagaaccuau

SEQ ID NO: 299231 - RNA, 19 nt, Homo sapiens
  misc_RNA (1)...(19): siRNA sense strand
uaacagaauccagcuacuu

SEQ ID NO: 299232 - RNA, 19 nt, Homo sapiens
  misc_RNA (1)...(19): siRNA sense strand
cagaacagcauucccaaca

SEQ ID NO: 299233 - RNA, 19 nt, Homo sapiens
  misc_RNA (1)...(19): siRNA sense strand
gaagaacuccaaagaaacc

SEQ ID NO: 299234 - RNA, 19 nt, Homo sapiens
  misc_RNA (1)...(19): siRNA sense strand
uuagauaugucucagaacu

SEQ ID NO: 299235 - RNA, 19 nt, Homo sapiens
  misc_RNA (1)...(19): siRNA sense strand
ucaaauaugcuuacugacu

SEQ ID NO: 299236 - RNA, 19 nt, Homo sapiens
  misc_RNA (1)...(19): siRNA sense strand
agaguauagugguguuaaa

SEQ ID NO: 299237 - RNA, 19 nt, Homo sapiens
  misc_RNA (1)...(19): siRNA sense strand
aaguaggucucaugacgaa

SEQ ID NO: 299238 - RNA, 19 nt, Homo sapiens
  misc_RNA (1)...(19): siRNA sense strand
ccaagcacauucaaguuuu

SEQ ID NO: 299239 - RNA, 19 nt, Homo sapiens
  misc_RNA (1)...(19): siRNA sense strand
uagaacauaucacgaacca

SEQ ID NO: 299240 - RNA, 19 nt, Homo sapiens
  misc_RNA (1)...(19): siRNA sense strand
cagagucuuucaauuucuu

SEQ ID NO: 299241 - RNA, 19 nt, Homo sapiens
  misc_RNA (1)...(19): siRNA sense strand
ugacuuaacuggagaauug

SEQ ID NO: 299242 - RNA, 19 nt, Homo sapiens
  misc_RNA (1)...(19): siRNA sense strand
ggauauaacuguugaaagu

SEQ ID NO: 299243 - RNA, 19 nt, Homo sapiens
  misc_RNA (1)...(19): siRNA sense strand
gggaagauaugcaucaguu

SEQ ID NO: 299244 - RNA, 19 nt, Homo sapiens
  misc_RNA (1)...(19): siRNA sense strand
cuaagaagcuguauaccuu

SEQ ID NO: 299245 - RNA, 19 nt, Homo sapiens
  misc_RNA (1)...(19): siRNA sense strand
cuacaggacuacaggaaua

SEQ ID NO: 299246 - RNA, 19 nt, Homo sapiens
  misc_RNA (1)...(19): siRNA sense strand
aaaggaagcaugacaauuu

SEQ ID NO: 299247 - RNA, 19 nt, Homo sapiens
  misc_RNA (1)...(19): siRNA sense strand
uaaauuggauggugucaga

SEQ ID NO: 299248 - RNA, 19 nt, Homo sapiens
  misc_RNA (1)...(19): siRNA sense strand
gcagauguguuuucaguua

SEQ ID NO: 299249 - RNA, 19 nt, Homo sapiens
  misc_RNA (1)...(19): siRNA sense strand
gauguuggccuuuaaauca

SEQ ID NO: 299250 - RNA, 19 nt, Homo sapiens
  misc_RNA (1)...(19): siRNA sense strand
gaaacuuagucgggauaua

SEQ ID NO: 299251 - RNA, 19 nt, Homo sapiens
  misc_RNA (1)...(19): siRNA sense strand
gaagcuguauaccuugaaa

SEQ ID NO: 299252 - RNA, 19 nt, Homo sapiens
  misc_RNA (1)...(19): siRNA sense strand
caugacaauuucccacaua

SEQ ID NO: 299253 - RNA, 19 nt, Homo sapiens
  misc_RNA (1)...(19): siRNA sense strand
gauaagcaguuugguacuu

SEQ ID NO: 299254 - RNA, 19 nt, Homo sapiens
  misc_RNA (1)...(19): siRNA sense strand
gagaagggaaggauguuaa

SEQ ID NO: 299255 - RNA, 19 nt, Homo sapiens
  misc_RNA (1)...(19): siRNA sense strand
gaagagaagggaaggaugu

SEQ ID NO: 299256 - RNA, 19 nt, Homo sapiens
  misc_RNA (1)...(19): siRNA sense strand
gaauugaugcggaugugua

SEQ ID NO: 299257 - RNA, 19 nt, Homo sapiens
  misc_RNA (1)...(19): siRNA sense strand
aaacuuagucgggauauaa

SEQ ID NO: 299258 - RNA, 19 nt, Homo sapiens
  misc_RNA (1)...(19): siRNA sense strand
gggaguggcugacuuaacu

SEQ ID NO: 299259 - RNA, 19 nt, Homo sapiens
  misc_RNA (1)...(19): siRNA sense strand
uggaagauauauugacuga

SEQ ID NO: 299260 - RNA, 19 nt, Homo sapiens
  misc_RNA (1)...(19): siRNA sense strand
ggauguguauuaacagugu

SEQ ID NO: 299261 - RNA, 19 nt, Homo sapiens
  misc_RNA (1)...(19): siRNA sense strand
gaagacaaugggaaagaaa

SEQ ID NO: 299262 - RNA, 19 nt, Homo sapiens
  misc_RNA (1)...(19): siRNA sense strand
ugacaaauaugagagacuu

SEQ ID NO: 299263 - RNA, 19 nt, Homo sapiens
  misc_RNA (1)...(19): siRNA sense strand
gagagacuugugaaacuua

SEQ ID NO: 299264 - RNA, 19 nt, Homo sapiens
  misc_RNA (1)...(19): siRNA sense strand
cuguauaccuugaaacaaa

SEQ ID NO: 299265 - RNA, 19 nt, Homo sapiens
  misc_RNA (1)...(19): siRNA sense strand
caucaaaacacgaucauua

SEQ ID NO: 299266 - RNA, 19 nt, Homo sapiens
  misc_RNA (1)...(19): siRNA sense strand
ccacauaaccaaagaagag

SEQ ID NO: 299267 - RNA, 19 nt, Homo sapiens
  misc_RNA (1)...(19): siRNA sense strand
gagucacaccugucgauua

SEQ ID NO: 299268 - RNA, 19 nt, Homo sapiens
  misc_RNA (1)...(19): siRNA sense strand
gaagggaaggauguuaauu

SEQ ID NO: 299269 - RNA, 19 nt, Homo sapiens
  misc_RNA (1)...(19): siRNA sense strand
ugaagacaaugggaaagaa

SEQ ID NO: 299270 - RNA, 19 nt, Homo sapiens
  misc_RNA (1)...(19): siRNA sense strand
caaggcaugacaaauauga

SEQ ID NO: 299271 - RNA, 19 nt, Homo sapiens
  misc_RNA (1)...(19): siRNA sense strand
uacaagugcuccugauaug

SEQ ID NO: 299272 - RNA, 19 nt, Homo sapiens
  misc_RNA (1)...(19): siRNA sense strand
gagaauugaugcggaugug

SEQ ID NO: 299273 - RNA, 19 nt, Homo sapiens
  misc_RNA (1)...(19): siRNA sense strand
ggucagaaauuccaaaaca

SEQ ID NO: 299274 - RNA, 19 nt, Homo sapiens
  misc_RNA (1)...(19): siRNA sense strand
ugcaaggcaugacaaauau

SEQ ID NO: 299275 - RNA, 19 nt, Homo sapiens
  misc_RNA (1)...(19): siRNA sense strand
gagcaacaaagaaggauca

SEQ ID NO: 299276 - RNA, 19 nt, Homo sapiens
  misc_RNA (1)...(19): siRNA sense strand
caagugcuccugauaugga

SEQ ID NO: 299277 - RNA, 19 nt, Homo sapiens
  misc_RNA (1)...(19): siRNA sense strand
uauguuggcagauguguuu

SEQ ID NO: 299278 - RNA, 19 nt, Homo sapiens
  misc_RNA (1)...(19): siRNA sense strand
ucagguuuaugauggguuu

SEQ ID NO: 299279 - RNA, 19 nt, Homo sapiens
  misc_RNA (1)...(19): siRNA sense strand
ugagagacuugugaaacuu

SEQ ID NO: 299280 - RNA, 19 nt, Homo sapiens
  misc_RNA (1)...(19): siRNA sense strand
caggauaagcaguuuggua

SEQ ID NO: 299281 - RNA, 19 nt, Homo sapiens
  misc_RNA (1)...(19): siRNA sense strand
ucaguuccaucgagccauu

SEQ ID NO: 299282 - RNA, 19 nt, Homo sapiens
  misc_RNA (1)...(19): siRNA sense strand
gaucaggaggguucaggaa

SEQ ID NO: 299283 - RNA, 19 nt, Homo sapiens
  misc_RNA (1)...(19): siRNA sense strand
agucagagggucagaaauu

SEQ ID NO: 299284 - RNA, 19 nt, Homo sapiens
  misc_RNA (1)...(19): siRNA sense strand
gcaugacaauuucccacau

SEQ ID NO: 299285 - RNA, 19 nt, Homo sapiens
  misc_RNA (1)...(19): siRNA sense strand
agggaaggauguuaauuca

SEQ ID NO: 299286 - RNA, 19 nt, Homo sapiens
  misc_RNA (1)...(19): siRNA sense strand
gaaagucagagggucagaa

SEQ ID NO: 299287 - RNA, 19 nt, Homo sapiens
  misc_RNA (1)...(19): siRNA sense strand
aagaagcuguauaccuuga

SEQ ID NO: 299288 - RNA, 19 nt, Homo sapiens
  misc_RNA (1)...(19): siRNA sense strand
aaggaagcaugacaauuuc

SEQ ID NO: 299289 - RNA, 19 nt, Homo sapiens
  misc_RNA (1)...(19): siRNA sense strand
gauuacaagugcuccugau

SEQ ID NO: 299290 - RNA, 19 nt, Homo sapiens
  misc_RNA (1)...(19): siRNA sense strand
uguuaugccuugaaaguca

SEQ ID NO: 299291 - RNA, 19 nt, Homo sapiens
  misc_RNA (1)...(19): siRNA sense strand
uugaugcggauguguauua

SEQ ID NO: 299292 - RNA, 19 nt, Homo sapiens
  misc_RNA (1)...(19): siRNA sense strand
uuacaagugcuccugauau

SEQ ID NO: 299293 - RNA, 19 nt, Homo sapiens
  misc_RNA (1)...(19): siRNA sense strand
aaguggagaaugcuuguua

SEQ ID NO: 299294 - RNA, 19 nt, Homo sapiens
  misc_RNA (1)...(19): siRNA sense strand
gcggauguguauuaacagu

SEQ ID NO: 299295 - RNA, 19 nt, Homo sapiens
  misc_RNA (1)...(19): siRNA sense strand
ugaugcggauguguauuaa

SEQ ID NO: 299296 - RNA, 19 nt, Homo sapiens
  misc_RNA (1)...(19): siRNA sense strand
aaagucagagggucagaaa

SEQ ID NO: 299297 - RNA, 19 nt, Homo sapiens
  misc_RNA (1)...(19): siRNA sense strand
gaucaagaagagggcauuu

SEQ ID NO: 299298 - RNA, 19 nt, Homo sapiens
  misc_RNA (1)...(19): siRNA sense strand
ccucugaugcacaggauaa

SEQ ID NO: 299299 - RNA, 19 nt, Homo sapiens
  misc_RNA (1)...(19): siRNA sense strand
gucagagggucagaaauuc

SEQ ID NO: 299300 - RNA, 19 nt, Homo sapiens
  misc_RNA (1)...(19): siRNA sense strand
agucacaccugucgauuac

SEQ ID NO: 299301 - RNA, 19 nt, Homo sapiens
  misc_RNA (1)...(19): siRNA sense strand
gcaugacaaauaugagaga

SEQ ID NO: 299302 - RNA, 19 nt, Homo sapiens
  misc_RNA (1)...(19): siRNA sense strand
gcacaggauaagcaguuug

SEQ ID NO: 299303 - RNA, 19 nt, Homo sapiens
  misc_RNA (1)...(19): siRNA sense strand
uguggaagcugucucuuuu

SEQ ID NO: 299304 - RNA, 19 nt, Homo sapiens
  misc_RNA (1)...(19): siRNA sense strand
gaaaaggaagcaugacaau

SEQ ID NO: 299305 - RNA, 19 nt, Homo sapiens
  misc_RNA (1)...(19): siRNA sense strand
auaagcaguuugguacuug

SEQ ID NO: 299306 - RNA, 19 nt, Homo sapiens
  misc_RNA (1)...(19): siRNA sense strand
gagagucacaccugucgau

SEQ ID NO: 299307 - RNA, 19 nt, Homo sapiens
  misc_RNA (1)...(19): siRNA sense strand
aaauaugagagacuuguga

SEQ ID NO: 299308 - RNA, 19 nt, Homo sapiens
  misc_RNA (1)...(19): siRNA sense strand
uggcaacacuggaccuuac

SEQ ID NO: 299309 - RNA, 19 nt, Homo sapiens
  misc_RNA (1)...(19): siRNA sense strand
cccgugauguuggccuuua

SEQ ID NO: 299310 - RNA, 19 nt, Homo sapiens
  misc_RNA (1)...(19): siRNA sense strand
caauuucccacauaaccaa

SEQ ID NO: 299311 - RNA, 19 nt, Homo sapiens
  misc_RNA (1)...(19): siRNA sense strand
caaaguggagaaugcuugu

SEQ ID NO: 299312 - RNA, 19 nt, Homo sapiens
  misc_RNA (1)...(19): siRNA sense strand
gucgggauauaacuguuga

SEQ ID NO: 299313 - RNA, 19 nt, Homo sapiens
  misc_RNA (1)...(19): siRNA sense strand
augacaauuucccacauaa

SEQ ID NO: 299314 - RNA, 19 nt, Homo sapiens
  misc_RNA (1)...(19): siRNA sense strand
augcggauguguauuaaca

SEQ ID NO: 299315 - RNA, 19 nt, Homo sapiens
  misc_RNA (1)...(19): siRNA sense strand
ggagaauugaugcggaugu

SEQ ID NO: 299316 - RNA, 19 nt, Homo sapiens
  misc_RNA (1)...(19): siRNA sense strand
gaagcugucucuuuucaac

SEQ ID NO: 299317 - RNA, 19 nt, Homo sapiens
  misc_RNA (1)...(19): siRNA sense strand
aagggaaggauguuaauuc

SEQ ID NO: 299318 - RNA, 19 nt, Homo sapiens
  misc_RNA (1)...(19): siRNA sense strand
gugaaacuuagucgggaua

SEQ ID NO: 299319 - RNA, 19 nt, Homo sapiens
  misc_RNA (1)...(19): siRNA sense strand
ggaaaaggaagcaugacaa

SEQ ID NO: 299320 - RNA, 19 nt, Homo sapiens
  misc_RNA (1)...(19): siRNA sense strand
ucugggaguggcugacuua

SEQ ID NO: 299321 - RNA, 19 nt, Homo sapiens
  misc_RNA (1)...(19): siRNA sense strand
ucaggaggguucaggaaaa

SEQ ID NO: 299322 - RNA, 19 nt, Homo sapiens
  misc_RNA (1)...(19): siRNA sense strand
gacugaagacaaugggaaa

SEQ ID NO: 299323 - RNA, 19 nt, Homo sapiens
  misc_RNA (1)...(19): siRNA sense strand
agagaagggaaggauguua

SEQ ID NO: 299324 - RNA, 19 nt, Homo sapiens
  misc_RNA (1)...(19): siRNA sense strand
gcaaggcaugacaaauaug

SEQ ID NO: 299325 - RNA, 19 nt, Homo sapiens
  misc_RNA (1)...(19): siRNA sense strand
ggaagauaugcaucaguuc

SEQ ID NO: 299326 - RNA, 19 nt, Homo sapiens
  misc_RNA (1)...(19): siRNA sense strand
cauuucagcaggaacuuga

SEQ ID NO: 299327 - RNA, 19 nt, Homo sapiens
  misc_RNA (1)...(19): siRNA sense strand
uuugguacuuggagacuga

SEQ ID NO: 299328 - RNA, 19 nt, Homo sapiens
  misc_RNA (1)...(19): siRNA sense strand
caaauaugagagacuugug

SEQ ID NO: 299329 - RNA, 19 nt, Homo sapiens
  misc_RNA (1)...(19): siRNA sense strand
aaaacucccuccucugaug

SEQ ID NO: 299330 - RNA, 19 nt, Homo sapiens
  misc_RNA (1)...(19): siRNA sense strand
guacuuggagacugagagu

SEQ ID NO: 299331 - RNA, 19 nt, Homo sapiens
  misc_RNA (1)...(19): siRNA sense strand
ucacaccugucgauuaccu

SEQ ID NO: 299332 - RNA, 19 nt, Homo sapiens
  misc_RNA (1)...(19): siRNA sense strand
ccgugauguuggccuuuaa

SEQ ID NO: 299333 - RNA, 19 nt, Homo sapiens
  misc_RNA (1)...(19): siRNA sense strand
uguauaccuugaaacaaag

SEQ ID NO: 299334 - RNA, 19 nt, Homo sapiens
  misc_RNA (1)...(19): siRNA sense strand
cagauguguuuucaguuaa

SEQ ID NO: 299335 - RNA, 19 nt, Homo sapiens
  misc_RNA (1)...(19): siRNA sense strand
caaauugucuccuccauca

SEQ ID NO: 299336 - RNA, 19 nt, Homo sapiens
  misc_RNA (1)...(19): siRNA sense strand
ggacaacgaagcaaucuau

SEQ ID NO: 299337 - RNA, 19 nt, Homo sapiens
  misc_RNA (1)...(19): siRNA sense strand
gaucaccaaugccugcuuu

SEQ ID NO: 299338 - RNA, 19 nt, Homo sapiens
  misc_RNA (1)...(19): siRNA sense strand
gcugggagcucuauugcuu

SEQ ID NO: 299339 - RNA, 19 nt, Homo sapiens
  misc_RNA (1)...(19): siRNA sense strand
gcaggcagguguccagaug

SEQ ID NO: 299340 - RNA, 19 nt, Homo sapiens
  misc_RNA (1)...(19): siRNA sense strand
ugacagaguuccagaccaa

SEQ ID NO: 299341 - RNA, 19 nt, Homo sapiens
  misc_RNA (1)...(19): siRNA sense strand
caaccucaaucgccucauu

SEQ ID NO: 299342 - RNA, 19 nt, Homo sapiens
  misc_RNA (1)...(19): siRNA sense strand
ggagcucuauugcuuggaa

SEQ ID NO: 299343 - RNA, 19 nt, Homo sapiens
  misc_RNA (1)...(19): siRNA sense strand
gagauguggugcccaagga

SEQ ID NO: 299344 - RNA, 19 nt, Homo sapiens
  misc_RNA (1)...(19): siRNA sense strand
gaagcaaucuaugacaucu

SEQ ID NO: 299345 - RNA, 19 nt, Homo sapiens
  misc_RNA (1)...(19): siRNA sense strand
ccagucaucucugcagaaa

SEQ ID NO: 299346 - RNA, 19 nt, Homo sapiens
  misc_RNA (1)...(19): siRNA sense strand
gcggcucucuguugacuau

SEQ ID NO: 299347 - RNA, 19 nt, Homo sapiens
  misc_RNA (1)...(19): siRNA sense strand
gggcguuugugcacuggua

SEQ ID NO: 299348 - RNA, 19 nt, Homo sapiens
  misc_RNA (1)...(19): siRNA sense strand
gcucaucacugggaaagag

SEQ ID NO: 299349 - RNA, 19 nt, Homo sapiens
  misc_RNA (1)...(19): siRNA sense strand
uggcagagaucaccaaugc

SEQ ID NO: 299350 - RNA, 19 nt, Homo sapiens
  misc_RNA (1)...(19): siRNA sense strand
ucaccucacuccugaugga

SEQ ID NO: 299351 - RNA, 19 nt, Homo sapiens
  misc_RNA (1)...(19): siRNA sense strand
caaguucgaccugauguau

SEQ ID NO: 299352 - RNA, 19 nt, Homo sapiens
  misc_RNA (1)...(19): siRNA sense strand
gaccugauguaugccaaga

SEQ ID NO: 299353 - RNA, 19 nt, Homo sapiens
  misc_RNA (1)...(19): siRNA sense strand
gcagaugcccagugacaag

SEQ ID NO: 299354 - RNA, 19 nt, Homo sapiens
  misc_RNA (1)...(19): siRNA sense strand
caacgaagcaaucuaugac

SEQ ID NO: 299355 - RNA, 19 nt, Homo sapiens
  misc_RNA (1)...(19): siRNA sense strand
acaacgaagcaaucuauga

SEQ ID NO: 299356 - RNA, 19 nt, Homo sapiens
  misc_RNA (1)...(19): siRNA sense strand
ccacaaguucgaccugaug

SEQ ID NO: 299357 - RNA, 19 nt, Homo sapiens
  misc_RNA (1)...(19): siRNA sense strand
caaccuacaccaaccucaa

SEQ ID NO: 299358 - RNA, 19 nt, Homo sapiens
  misc_RNA (1)...(19): siRNA sense strand
gcuguaccguggagaugug

SEQ ID NO: 299359 - RNA, 19 nt, Homo sapiens
  misc_RNA (1)...(19): siRNA sense strand
gagccuacggucauugaug

SEQ ID NO: 299360 - RNA, 19 nt, Homo sapiens
  misc_RNA (1)...(19): siRNA sense strand
ggaugucaacgcugccauu

SEQ ID NO: 299361 - RNA, 19 nt, Homo sapiens
  misc_RNA (1)...(19): siRNA sense strand
caagcgcagcauucaguuu

SEQ ID NO: 299362 - RNA, 19 nt, Homo sapiens
  misc_RNA (1)...(19): siRNA sense strand
gcgcagcauucaguuugug

SEQ ID NO: 299363 - RNA, 19 nt, Homo sapiens
  misc_RNA (1)...(19): siRNA sense strand
gggcaucgacuccuaugag

SEQ ID NO: 299364 - RNA, 19 nt, Homo sapiens
  misc_RNA (1)...(19): siRNA sense strand
ggucgagcccuacaacucu

SEQ ID NO: 299365 - RNA, 19 nt, Homo sapiens
  misc_RNA (1)...(19): siRNA sense strand
gaugucaacgcugccauug

SEQ ID NO: 299366 - RNA, 19 nt, Homo sapiens
  misc_RNA (1)...(19): siRNA sense strand
gucgagcccuacaacucua

SEQ ID NO: 299367 - RNA, 19 nt, Homo sapiens
  misc_RNA (1)...(19): siRNA sense strand
uguugacuauggcaagaaa

SEQ ID NO: 299368 - RNA, 19 nt, Homo sapiens
  misc_RNA (1)...(19): siRNA sense strand
gcuucaagguugguaucaa

SEQ ID NO: 299369 - RNA, 19 nt, Homo sapiens
  misc_RNA (1)...(19): siRNA sense strand
uugaugagauccgaaaugg

SEQ ID NO: 299370 - RNA, 19 nt, Homo sapiens
  misc_RNA (1)...(19): siRNA sense strand
aagcgcagcauucaguuug

SEQ ID NO: 299371 - RNA, 19 nt, Homo sapiens
  misc_RNA (1)...(19): siRNA sense strand
gcuuugagccugccaacca

SEQ ID NO: 299372 - RNA, 19 nt, Homo sapiens
  misc_RNA (1)...(19): siRNA sense strand
ggaugcugccaacaacuau

SEQ ID NO: 299373 - RNA, 19 nt, Homo sapiens
  misc_RNA (1)...(19): siRNA sense strand
gugaaacuggugcuggaaa

SEQ ID NO: 299374 - RNA, 19 nt, Homo sapiens
  misc_RNA (1)...(19): siRNA sense strand
gcauggaggagggugaguu

SEQ ID NO: 299375 - RNA, 19 nt, Homo sapiens
  misc_RNA (1)...(19): siRNA sense strand
caagaccaagcgcagcauu

SEQ ID NO: 299376 - RNA, 19 nt, Homo sapiens
  misc_RNA (1)...(19): siRNA sense strand
cgaagcaaucuaugacauc

SEQ ID NO: 299377 - RNA, 19 nt, Homo sapiens
  misc_RNA (1)...(19): siRNA sense strand
aagaggaugcugccaacaa

SEQ ID NO: 299378 - RNA, 19 nt, Homo sapiens
  misc_RNA (1)...(19): siRNA sense strand
ugaaacuggugcuggaaaa

SEQ ID NO: 299379 - RNA, 19 nt, Homo sapiens
  misc_RNA (1)...(19): siRNA sense strand
agaggaugcugccaacaac

SEQ ID NO: 299380 - RNA, 19 nt, Homo sapiens
  misc_RNA (1)...(19): siRNA sense strand
ucaccaaugccugcuuuga

SEQ ID NO: 299381 - RNA, 19 nt, Homo sapiens
  misc_RNA (1)...(19): siRNA sense strand
ggcacuggcucuggcuuca

SEQ ID NO: 299382 - RNA, 19 nt, Homo sapiens
  misc_RNA (1)...(19): siRNA sense strand
gccauugccgccaucaaga

SEQ ID NO: 299383 - RNA, 19 nt, Homo sapiens
  misc_RNA (1)...(19): siRNA sense strand
gccaaauugucuccuccau

SEQ ID NO: 299384 - RNA, 19 nt, Homo sapiens
  misc_RNA (1)...(19): siRNA sense strand
aaccucaaucgccucauua

SEQ ID NO: 299385 - RNA, 19 nt, Homo sapiens
  misc_RNA (1)...(19): siRNA sense strand
acgaagcaaucuaugacau

SEQ ID NO: 299386 - RNA, 19 nt, Homo sapiens
  misc_RNA (1)...(19): siRNA sense strand
ggucagaugccaagugaua

SEQ ID NO: 299387 - RNA, 19 nt, Homo sapiens
  misc_RNA (1)...(19): siRNA sense strand
gaagaugcggccaauaauu

SEQ ID NO: 299388 - RNA, 19 nt, Homo sapiens
  misc_RNA (1)...(19): siRNA sense strand
ccaaucagauggucaagug

SEQ ID NO: 299389 - RNA, 19 nt, Homo sapiens
  misc_RNA (1)...(19): siRNA sense strand
gaaggaagaugcggccaau

SEQ ID NO: 299390 - RNA, 19 nt, Homo sapiens
  misc_RNA (1)...(19): siRNA sense strand
aagaugcggccaauaauua

SEQ ID NO: 299391 - RNA, 19 nt, Homo sapiens
  misc_RNA (1)...(19): siRNA sense strand
gcaagaaguccaagcuaga

SEQ ID NO: 299392 - RNA, 19 nt, Homo sapiens
  misc_RNA (1)...(19): siRNA sense strand
acaaugaagccaucuauga

SEQ ID NO: 299393 - RNA, 19 nt, Homo sapiens
  misc_RNA (1)...(19): siRNA sense strand
ucaacacguucuucaguga

SEQ ID NO: 299394 - RNA, 19 nt, Homo sapiens
  misc_RNA (1)...(19): siRNA sense strand
ggauuuaaggugggcauua

SEQ ID NO: 299395 - RNA, 19 nt, Homo sapiens
  misc_RNA (1)...(19): siRNA sense strand
ggaagaugcggccaauaau

SEQ ID NO: 299396 - RNA, 19 nt, Homo sapiens
  misc_RNA (1)...(19): siRNA sense strand
aggaagaugcggccaauaa

SEQ ID NO: 299397 - RNA, 19 nt, Homo sapiens
  misc_RNA (1)...(19): siRNA sense strand
ugacggaauuccagaccaa

SEQ ID NO: 299398 - RNA, 19 nt, Homo sapiens
  misc_RNA (1)...(19): siRNA sense strand
ucgcaucucugcucaugga

SEQ ID NO: 299399 - RNA, 19 nt, Homo sapiens
  misc_RNA (1)...(19): siRNA sense strand
ggaacuguacugccuggaa

SEQ ID NO: 299400 - RNA, 19 nt, Homo sapiens
  misc_RNA (1)...(19): siRNA sense strand
gaugaagugcgcacaggaa

SEQ ID NO: 299401 - RNA, 19 nt, Homo sapiens
  misc_RNA (1)...(19): siRNA sense strand
cgacaaugaagccaucuau

SEQ ID NO: 299402 - RNA, 19 nt, Homo sapiens
  misc_RNA (1)...(19): siRNA sense strand
gaaccuauaggcagcucuu

SEQ ID NO: 299403 - RNA, 19 nt, Homo sapiens
  misc_RNA (1)...(19): siRNA sense strand
cugcagggcuuccucaucu

SEQ ID NO: 299404 - RNA, 19 nt, Homo sapiens
  misc_RNA (1)...(19): siRNA sense strand
guucgcaucucugcucaug

SEQ ID NO: 299405 - RNA, 19 nt, Homo sapiens
  misc_RNA (1)...(19): siRNA sense strand
gcucuggguucgcaucucu

SEQ ID NO: 299406 - RNA, 19 nt, Homo sapiens
  misc_RNA (1)...(19): siRNA sense strand
ucagaugccaagugauaaa

SEQ ID NO: 299407 - RNA, 19 nt, Homo sapiens
  misc_RNA (1)...(19): siRNA sense strand
cagaucguguccuccauca

SEQ ID NO: 299408 - RNA, 19 nt, Homo sapiens
  misc_RNA (1)...(19): siRNA sense strand
gaagaggugggcguggauu

SEQ ID NO: 299409 - RNA, 19 nt, Homo sapiens
  misc_RNA (1)...(19): siRNA sense strand
ccacguacaccaaccucaa

SEQ ID NO: 299410 - RNA, 19 nt, Homo sapiens
  misc_RNA (1)...(19): siRNA sense strand
gcagggcuuccucaucuuc

SEQ ID NO: 299411 - RNA, 19 nt, Homo sapiens
  misc_RNA (1)...(19): siRNA sense strand
aauguggacuugacggaau

SEQ ID NO: 299412 - RNA, 19 nt, Homo sapiens
  misc_RNA (1)...(19): siRNA sense strand
gcaggcaggaguccagauc

SEQ ID NO: 299413 - RNA, 19 nt, Homo sapiens
  misc_RNA (1)...(19): siRNA sense strand
gacaaugaagccaucuaug

SEQ ID NO: 299414 - RNA, 19 nt, Homo sapiens
  misc_RNA (1)...(19): siRNA sense strand
gcccagagcaguguuugug

SEQ ID NO: 299415 - RNA, 19 nt, Homo sapiens
  misc_RNA (1)...(19): siRNA sense strand
caaugaagccaucuaugac

SEQ ID NO: 299416 - RNA, 19 nt, Homo sapiens
  misc_RNA (1)...(19): siRNA sense strand
gcugaucaccgggaaggaa

SEQ ID NO: 299417 - RNA, 19 nt, Homo sapiens
  misc_RNA (1)...(19): siRNA sense strand
gcuucgagccagccaauca

SEQ ID NO: 299418 - RNA, 19 nt, Homo sapiens
  misc_RNA (1)...(19): siRNA sense strand
ucagcccgauggucagaug

SEQ ID NO: 299419 - RNA, 19 nt, Homo sapiens
  misc_RNA (1)...(19): siRNA sense strand
ggcgcaaccuggacaucga

SEQ ID NO: 299420 - RNA, 19 nt, Homo sapiens
  misc_RNA (1)...(19): siRNA sense strand
uuccucaucuuccacaguu

SEQ ID NO: 299421 - RNA, 19 nt, Homo sapiens
  misc_RNA (1)...(19): siRNA sense strand
auggucagaugccaaguga

SEQ ID NO: 299422 - RNA, 19 nt, Homo sapiens
  misc_RNA (1)...(19): siRNA sense strand
gugaguguaucucuaucca

SEQ ID NO: 299423 - RNA, 19 nt, Homo sapiens
  misc_RNA (1)...(19): siRNA sense strand
cgagccagccaaucagaug

SEQ ID NO: 299424 - RNA, 19 nt, Homo sapiens
  misc_RNA (1)...(19): siRNA sense strand
acaucgagcgucccacgua

SEQ ID NO: 299425 - RNA, 19 nt, Homo sapiens
  misc_RNA (1)...(19): siRNA sense strand
gugcgcacaggaaccuaua

SEQ ID NO: 299426 - RNA, 19 nt, Homo sapiens
  misc_RNA (1)...(19): siRNA sense strand
uaaggugggcauuaacuac

SEQ ID NO: 299427 - RNA, 19 nt, Homo sapiens
  misc_RNA (1)...(19): siRNA sense strand
gauggucagaugccaagug

SEQ ID NO: 299428 - RNA, 19 nt, Homo sapiens
  misc_RNA (1)...(19): siRNA sense strand
cggcaagaaguccaagcua

SEQ ID NO: 299429 - RNA, 19 nt, Homo sapiens
  misc_RNA (1)...(19): siRNA sense strand
ggcccugaauguggacuug

SEQ ID NO: 299430 - RNA, 19 nt, Homo sapiens
  misc_RNA (1)...(19): siRNA sense strand
ggagaaggauuaugaagag

SEQ ID NO: 299431 - RNA, 19 nt, Homo sapiens
  misc_RNA (1)...(19): siRNA sense strand
ggucagaugccaagugaua

SEQ ID NO: 299432 - RNA, 19 nt, Homo sapiens
  misc_RNA (1)...(19): siRNA sense strand
gaagaugcggccaauaauu

SEQ ID NO: 299433 - RNA, 19 nt, Homo sapiens
  misc_RNA (1)...(19): siRNA sense strand
ccaaucagauggucaagug

SEQ ID NO: 299434 - RNA, 19 nt, Homo sapiens
  misc_RNA (1)...(19): siRNA sense strand
gaaggaagaugcggccaau

SEQ ID NO: 299435 - RNA, 19 nt, Homo sapiens
  misc_RNA (1)...(19): siRNA sense strand
aagaugcggccaauaauua

SEQ ID NO: 299436 - RNA, 19 nt, Homo sapiens
  misc_RNA (1)...(19): siRNA sense strand
gcaagaaguccaagcuaga

SEQ ID NO: 299437 - RNA, 19 nt, Homo sapiens
  misc_RNA (1)...(19): siRNA sense strand
acaaugaagccaucuauga

SEQ ID NO: 299438 - RNA, 19 nt, Homo sapiens
  misc_RNA (1)...(19): siRNA sense strand
ucaacacguucuucaguga

SEQ ID NO: 299439 - RNA, 19 nt, Homo sapiens
  misc_RNA (1)...(19): siRNA sense strand
ggauuuaaggugggcauua

SEQ ID NO: 299440 - RNA, 19 nt, Homo sapiens
  misc_RNA (1)...(19): siRNA sense strand
ggaagaugcggccaauaau

SEQ ID NO: 299441 - RNA, 19 nt, Homo sapiens
  misc_RNA (1)...(19): siRNA sense strand
uggcagcucuggagaagga

SEQ ID NO: 299442 - RNA, 19 nt, Homo sapiens
  misc_RNA (1)...(19): siRNA sense strand
aggaagaugcggccaauaa

SEQ ID NO: 299443 - RNA, 19 nt, Homo sapiens
  misc_RNA (1)...(19): siRNA sense strand
ugacggaauuccagaccaa

SEQ ID NO: 299444 - RNA, 19 nt, Homo sapiens
  misc_RNA (1)...(19): siRNA sense strand
ucgcaucucugcucaugga

SEQ ID NO: 299445 - RNA, 19 nt, Homo sapiens
  misc_RNA (1)...(19): siRNA sense strand
ggaacuguacugccuggaa

SEQ ID NO: 299446 - RNA, 19 nt, Homo sapiens
  misc_RNA (1)...(19): siRNA sense strand
gaugaagugcgcacaggaa

SEQ ID NO: 299447 - RNA, 19 nt, Homo sapiens
  misc_RNA (1)...(19): siRNA sense strand
cgacaaugaagccaucuau

SEQ ID NO: 299448 - RNA, 19 nt, Homo sapiens
  misc_RNA (1)...(19): siRNA sense strand
gaaccuauaggcagcucuu

SEQ ID NO: 299449 - RNA, 19 nt, Homo sapiens
  misc_RNA (1)...(19): siRNA sense strand
cugcagggcuuccucaucu

SEQ ID NO: 299450 - RNA, 19 nt, Homo sapiens
  misc_RNA (1)...(19): siRNA sense strand
guucgcaucucugcucaug

SEQ ID NO: 299451 - RNA, 19 nt, Homo sapiens
  misc_RNA (1)...(19): siRNA sense strand
gcucuggguucgcaucucu

SEQ ID NO: 299452 - RNA, 19 nt, Homo sapiens
  misc_RNA (1)...(19): siRNA sense strand
ucagaugccaagugauaaa

SEQ ID NO: 299453 - RNA, 19 nt, Homo sapiens
  misc_RNA (1)...(19): siRNA sense strand
cagaucguguccuccauca

SEQ ID NO: 299454 - RNA, 19 nt, Homo sapiens
  misc_RNA (1)...(19): siRNA sense strand
gaagaggugggcguggauu

SEQ ID NO: 299455 - RNA, 19 nt, Homo sapiens
  misc_RNA (1)...(19): siRNA sense strand
ccacguacaccaaccucaa

SEQ ID NO: 299456 - RNA, 19 nt, Homo sapiens
  misc_RNA (1)...(19): siRNA sense strand
gcagggcuuccucaucuuc

SEQ ID NO: 299457 - RNA, 19 nt, Homo sapiens
  misc_RNA (1)...(19): siRNA sense strand
uggagaaggauuaugaaga

SEQ ID NO: 299458 - RNA, 19 nt, Homo sapiens
  misc_RNA (1)...(19): siRNA sense strand
cagcucuggagaaggauua

SEQ ID NO: 299459 - RNA, 19 nt, Homo sapiens
  misc_RNA (1)...(19): siRNA sense strand
aauguggacuugacggaau

SEQ ID NO: 299460 - RNA, 19 nt, Homo sapiens
  misc_RNA (1)...(19): siRNA sense strand
gcaggcaggaguccagauc

SEQ ID NO: 299461 - RNA, 19 nt, Homo sapiens
  misc_RNA (1)...(19): siRNA sense strand
gacaaugaagccaucuaug

SEQ ID NO: 299462 - RNA, 19 nt, Homo sapiens
  misc_RNA (1)...(19): siRNA sense strand
gcccagagcaguguuugug

SEQ ID NO: 299463 - RNA, 19 nt, Homo sapiens
  misc_RNA (1)...(19): siRNA sense strand
caaugaagccaucuaugac

SEQ ID NO: 299464 - RNA, 19 nt, Homo sapiens
  misc_RNA (1)...(19): siRNA sense strand
gcugaucaccgggaaggaa

SEQ ID NO: 299465 - RNA, 19 nt, Homo sapiens
  misc_RNA (1)...(19): siRNA sense strand
gcuucgagccagccaauca

SEQ ID NO: 299466 - RNA, 19 nt, Homo sapiens
  misc_RNA (1)...(19): siRNA sense strand
ucagcccgauggucagaug

SEQ ID NO: 299467 - RNA, 19 nt, Homo sapiens
  misc_RNA (1)...(19): siRNA sense strand
ggcgcaaccuggacaucga

SEQ ID NO: 299468 - RNA, 19 nt, Homo sapiens
  misc_RNA (1)...(19): siRNA sense strand
uuccucaucuuccacaguu

SEQ ID NO: 299469 - RNA, 19 nt, Homo sapiens
  misc_RNA (1)...(19): siRNA sense strand
gugaguguaucucuaucca

SEQ ID NO: 299470 - RNA, 19 nt, Homo sapiens
  misc_RNA (1)...(19): siRNA sense strand
cgagccagccaaucagaug

SEQ ID NO: 299471 - RNA, 19 nt, Homo sapiens
  misc_RNA (1)...(19): siRNA sense strand
acaucgagcgucccacgua

SEQ ID NO: 299472 - RNA, 19 nt, Homo sapiens
  misc_RNA (1)...(19): siRNA sense strand
auggucagaugccaaguga

SEQ ID NO: 299473 - RNA, 19 nt, Homo sapiens
  misc_RNA (1)...(19): siRNA sense strand
gugcgcacaggaaccuaua

SEQ ID NO: 299474 - RNA, 19 nt, Homo sapiens
  misc_RNA (1)...(19): siRNA sense strand
uaaggugggcauuaacuac

SEQ ID NO: 299475 - RNA, 19 nt, Homo sapiens
  misc_RNA (1)...(19): siRNA sense strand
gauggucagaugccaagug

SEQ ID NO: 299476 - RNA, 19 nt, Homo sapiens
  misc_RNA (1)...(19): siRNA sense strand
cggcaagaaguccaagcua

SEQ ID NO: 299477 - RNA, 19 nt, Homo sapiens
  misc_RNA (1)...(19): siRNA sense strand
ggcccugaauguggacuug

SEQ ID NO: 299478 - RNA, 19 nt, Homo sapiens
  misc_RNA (1)...(19): siRNA sense strand
gaggagcucugucgccuua

SEQ ID NO: 299479 - RNA, 19 nt, Homo sapiens
  misc_RNA (1)...(19): siRNA sense strand
ucauggagaucaaggagua

SEQ ID NO: 299480 - RNA, 19 nt, Homo sapiens
  misc_RNA (1)...(19): siRNA sense strand
uggcacagcugaggaauuu

SEQ ID NO: 299481 - RNA, 19 nt, Homo sapiens
  misc_RNA (1)...(19): siRNA sense strand
gcaugaaggucuacaacuc

SEQ ID NO: 299482 - RNA, 19 nt, Homo sapiens
  misc_RNA (1)...(19): siRNA sense strand
gcgcucaucuucuucuuca

SEQ ID NO: 299483 - RNA, 19 nt, Homo sapiens
  misc_RNA (1)...(19): siRNA sense strand
uggcggagcugcuggagaa

SEQ ID NO: 299484 - RNA, 19 nt, Homo sapiens
  misc_RNA (1)...(19): siRNA sense strand
gcaaguggccugucuucga

SEQ ID NO: 299485 - RNA, 19 nt, Homo sapiens
  misc_RNA (1)...(19): siRNA sense strand
ccaagucccugcagaagca

SEQ ID NO: 299486 - RNA, 19 nt, Homo sapiens
  misc_RNA (1)...(19): siRNA sense strand
ggaaauccccuuugaagaa

SEQ ID NO: 299487 - RNA, 19 nt, Homo sapiens
  misc_RNA (1)...(19): siRNA sense strand
ucaacgcgcucaucuucuu

SEQ ID NO: 299488 - RNA, 19 nt, Homo sapiens
  misc_RNA (1)...(19): siRNA sense strand
ggagaucacuaagaaguac

SEQ ID NO: 299489 - RNA, 19 nt, Homo sapiens
  misc_RNA (1)...(19): siRNA sense strand
gcagcgaguccaagaacua

SEQ ID NO: 299490 - RNA, 19 nt, Homo sapiens
  misc_RNA (1)...(19): siRNA sense strand
gucugaagguggucaagua

SEQ ID NO: 299491 - RNA, 19 nt, Homo sapiens
  misc_RNA (1)...(19): siRNA sense strand
gcacagcugaggaauuuca

SEQ ID NO: 299492 - RNA, 19 nt, Homo sapiens
  misc_RNA (1)...(19): siRNA sense strand
aggcagcccuggucaugua

SEQ ID NO: 299493 - RNA, 19 nt, Homo sapiens
  misc_RNA (1)...(19): siRNA sense strand
cgacacggaugaagaacuc

SEQ ID NO: 299494 - RNA, 19 nt, Homo sapiens
  misc_RNA (1)...(19): siRNA sense strand
caucaacgcgcucaucuuc

SEQ ID NO: 299495 - RNA, 19 nt, Homo sapiens
  misc_RNA (1)...(19): siRNA sense strand
ugaauuggcccuaccugaa

SEQ ID NO: 299496 - RNA, 19 nt, Homo sapiens
  misc_RNA (1)...(19): siRNA sense strand
ugucaucaccggcuucuuu

SEQ ID NO: 299497 - RNA, 19 nt, Homo sapiens
  misc_RNA (1)...(19): siRNA sense strand
ugacugacaucgacaacag

SEQ ID NO: 299498 - RNA, 19 nt, Homo sapiens
  misc_RNA (1)...(19): siRNA sense strand
gucuacaacuccacacuga

SEQ ID NO: 299499 - RNA, 19 nt, Homo sapiens
  misc_RNA (1)...(19): siRNA sense strand
gaauuggcccuaccugaag

SEQ ID NO: 299500 - RNA, 19 nt, Homo sapiens
  misc_RNA (1)...(19): siRNA sense strand
cagagggcaugaaggucua

SEQ ID NO: 299501 - RNA, 19 nt, Homo sapiens
  misc_RNA (1)...(19): siRNA sense strand
gcaggacgacgaagaugau

SEQ ID NO: 299502 - RNA, 19 nt, Homo sapiens
  misc_RNA (1)...(19): siRNA sense strand
ucaacaugcucccguucuu

SEQ ID NO: 299503 - RNA, 19 nt, Homo sapiens
  misc_RNA (1)...(19): siRNA sense strand
gccaucagcugccucaacu

SEQ ID NO: 299504 - RNA, 19 nt, Homo sapiens
  misc_RNA (1)...(19): siRNA sense strand
gcucagagggcaugaaggu

SEQ ID NO: 299505 - RNA, 19 nt, Homo sapiens
  misc_RNA (1)...(19): siRNA sense strand
gagcaggagaggagcgaaa

SEQ ID NO: 299506 - RNA, 19 nt, Homo sapiens
  misc_RNA (1)...(19): siRNA sense strand
ggagcucugucgccuuaag

SEQ ID NO: 299507 - RNA, 19 nt, Homo sapiens
  misc_RNA (1)...(19): siRNA sense strand
ggagcccuaugcccauuuc

SEQ ID NO: 299508 - RNA, 19 nt, Homo sapiens
  misc_RNA (1)...(19): siRNA sense strand
ucagcaaccucaccaucga

SEQ ID NO: 299509 - RNA, 19 nt, Homo sapiens
  misc_RNA (1)...(19): siRNA sense strand
caaagggagacauggaaau

SEQ ID NO: 299510 - RNA, 19 nt, Homo sapiens
  misc_RNA (1)...(19): siRNA sense strand
caaggcagcccuggucaug

SEQ ID NO: 299511 - RNA, 19 nt, Homo sapiens
  misc_RNA (1)...(19): siRNA sense strand
uuguggagaucacuaagaa

SEQ ID NO: 299512 - RNA, 19 nt, Homo sapiens
  misc_RNA (1)...(19): siRNA sense strand
cggagcugcuggagaaugu

SEQ ID NO: 299513 - RNA, 19 nt, Homo sapiens
  misc_RNA (1)...(19): siRNA sense strand
cuacuuccucuuccucuuu

SEQ ID NO: 299514 - RNA, 19 nt, Homo sapiens
  misc_RNA (1)...(19): siRNA sense strand
gucaucaccggcuucuuua

SEQ ID NO: 299515 - RNA, 19 nt, Homo sapiens
  misc_RNA (1)...(19): siRNA sense strand
caaccucaccaucgacuuc

SEQ ID NO: 299516 - RNA, 19 nt, Homo sapiens
  misc_RNA (1)...(19): siRNA sense strand
gaagcacuaccugcaguug

SEQ ID NO: 299517 - RNA, 19 nt, Homo sapiens
  misc_RNA (1)...(19): siRNA sense strand
gaccaaggccagcuucucu

SEQ ID NO: 299518 - RNA, 19 nt, Homo sapiens
  misc_RNA (1)...(19): siRNA sense strand
aggaguaccugauugacau

SEQ ID NO: 299519 - RNA, 19 nt, Homo sapiens
  misc_RNA (1)...(19): siRNA sense strand
ggucaacgagcacgaugga

SEQ ID NO: 299520 - RNA, 19 nt, Homo sapiens
  misc_RNA (1)...(19): siRNA sense strand
ucaagggcaccuacugcua

SEQ ID NO: 299521 - RNA, 19 nt, Homo sapiens
  misc_RNA (1)...(19): siRNA sense strand
gcauggcacagcugaggaa

SEQ ID NO: 299522 - RNA, 19 nt, Homo sapiens
  misc_RNA (1)...(19): siRNA sense strand
gaccugccacugcgucuga

SEQ ID NO: 299523 - RNA, 19 nt, Homo sapiens
  misc_RNA (1)...(19): siRNA sense strand
ggaagcacuaccugcaguu

SEQ ID NO: 299524 - RNA, 19 nt, Homo sapiens
  misc_RNA (1)...(19): siRNA sense strand
gugcuuggcggacagaaga

SEQ ID NO: 299525 - RNA, 19 nt, Homo sapiens
  misc_RNA (1)...(19): siRNA sense strand
gcucaucuucuucuucauc

SEQ ID NO: 299526 - RNA, 19 nt, Homo sapiens
  misc_RNA (1)...(19): siRNA sense strand
ucccgugccugcucuaugu

SEQ ID NO: 299527 - RNA, 19 nt, Homo sapiens
  misc_RNA (1)...(19): siRNA sense strand
cuacaaagggagacaugga

SEQ ID NO: 299528 - RNA, 19 nt, Homo sapiens
  misc_RNA (1)...(19): siRNA sense strand
gaaauccccuuugaagaag

SEQ ID NO: 299529 - RNA, 19 nt, Homo sapiens
  misc_RNA (1)...(19): siRNA sense strand
guggagaucacuaagaagu

SEQ ID NO: 299530 - RNA, 19 nt, Homo sapiens
  misc_RNA (1)...(19): siRNA sense strand
gcuacuuccucuuccucuu

SEQ ID NO: 299531 - RNA, 19 nt, Homo sapiens
  misc_RNA (1)...(19): siRNA sense strand
ccugcucucugucuucuuc

SEQ ID NO: 299532 - RNA, 19 nt, Homo sapiens
  misc_RNA (1)...(19): siRNA sense strand
gcaaggccugggagaacuu

SEQ ID NO: 299533 - RNA, 19 nt, Homo sapiens
  misc_RNA (1)...(19): siRNA sense strand
acaaagggagacauggaaa

SEQ ID NO: 299534 - RNA, 19 nt, Homo sapiens
  misc_RNA (1)...(19): siRNA sense strand
caacaugcucccguucuuc

SEQ ID NO: 299535 - RNA, 19 nt, Homo sapiens
  misc_RNA (1)...(19): siRNA sense strand
ccuccaugcccuugaauug

SEQ ID NO: 299536 - RNA, 19 nt, Homo sapiens
  misc_RNA (1)...(19): siRNA sense strand
uaccuggugugcuucaugu

SEQ ID NO: 299537 - RNA, 19 nt, Homo sapiens
  misc_RNA (1)...(19): siRNA sense strand
ccugccacaucaagaaguu

SEQ ID NO: 299538 - RNA, 19 nt, Homo sapiens
  misc_RNA (1)...(19): siRNA sense strand
uggaugacuuuguggagau

SEQ ID NO: 299539 - RNA, 19 nt, Homo sapiens
  misc_RNA (1)...(19): siRNA sense strand
cgacuucuucgccuucuuc

SEQ ID NO: 299540 - RNA, 19 nt, Homo sapiens
  misc_RNA (1)...(19): siRNA sense strand
ggacgacgaagaugaugac

SEQ ID NO: 299541 - RNA, 19 nt, Homo sapiens
  misc_RNA (1)...(19): siRNA sense strand
gaacuacaucgcgcuggau

SEQ ID NO: 299542 - RNA, 19 nt, Homo sapiens
  misc_RNA (1)...(19): siRNA sense strand
cgacaacagcgccgagucu

SEQ ID NO: 299543 - RNA, 19 nt, Homo sapiens
  misc_RNA (1)...(19): siRNA sense strand
caucggcuacuuccucuuc

SEQ ID NO: 299544 - RNA, 19 nt, Homo sapiens
  misc_RNA (1)...(19): siRNA sense strand
gcgcguucccgacucaaug

SEQ ID NO: 299545 - RNA, 19 nt, Homo sapiens
  misc_RNA (1)...(19): siRNA sense strand
ggaugacuuuguggagauc

SEQ ID NO: 299546 - RNA, 19 nt, Homo sapiens
  misc_RNA (1)...(19): siRNA sense strand
cggcgacacggaugaagaa

SEQ ID NO: 299547 - RNA, 19 nt, Homo sapiens
  misc_RNA (1)...(19): siRNA sense strand
uggagaucacuaagaagua

SEQ ID NO: 299548 - RNA, 19 nt, Homo sapiens
  misc_RNA (1)...(19): siRNA sense strand
gcaccuacugcuaccuugu

SEQ ID NO: 299549 - RNA, 19 nt, Homo sapiens
  misc_RNA (1)...(19): siRNA sense strand
ucagcugccucaacugcau

SEQ ID NO: 299550 - RNA, 19 nt, Homo sapiens
  misc_RNA (1)...(19): siRNA sense strand
ggcagcaaguggccugucu

SEQ ID NO: 299551 - RNA, 19 nt, Homo sapiens
  misc_RNA (1)...(19): siRNA sense strand
uacaaagggagacauggaa

SEQ ID NO: 299552 - RNA, 19 nt, Homo sapiens
  misc_RNA (1)...(19): siRNA sense strand
ugaccuggcagcaguaugg

SEQ ID NO: 299553 - RNA, 19 nt, Homo sapiens
  misc_RNA (1)...(19): siRNA sense strand
cucuggagcucaccaagau

SEQ ID NO: 299554 - RNA, 19 nt, Homo sapiens
  misc_RNA (1)...(19): siRNA sense strand
cuucuucgccuucuucauc

SEQ ID NO: 299555 - RNA, 19 nt, Homo sapiens
  misc_RNA (1)...(19): siRNA sense strand
cagcaaguggccugucuuc

SEQ ID NO: 299556 - RNA, 19 nt, Homo sapiens
  misc_RNA (1)...(19): siRNA sense strand
aaagggagacauggaaauc

SEQ ID NO: 299557 - RNA, 19 nt, Homo sapiens
  misc_RNA (1)...(19): siRNA sense strand
ggaauuucaagggcaccua

SEQ ID NO: 299558 - RNA, 19 nt, Homo sapiens
  misc_RNA (1)...(19): siRNA sense strand
cccauuuccugcucucugu

SEQ ID NO: 299559 - RNA, 19 nt, Homo sapiens
  misc_RNA (1)...(19): siRNA sense strand
caucacguccgagaacgaa

SEQ ID NO: 299560 - RNA, 19 nt, Homo sapiens
  misc_RNA (1)...(19): siRNA sense strand
ucugcugguucuaugugua

SEQ ID NO: 299561 - RNA, 19 nt, Homo sapiens
  misc_RNA (1)...(19): siRNA sense strand
ccaaggccagcuucucugu

SEQ ID NO: 299562 - RNA, 19 nt, Homo sapiens
  misc_RNA (1)...(19): siRNA sense strand
ccugcucuaucucuucuuc

SEQ ID NO: 299563 - RNA, 19 nt, Homo sapiens
  misc_RNA (1)...(19): siRNA sense strand
ucaucccgcuggucaucuu

SEQ ID NO: 299564 - RNA, 19 nt, Homo sapiens
  misc_RNA (1)...(19): siRNA sense strand
ugagauaccugaugaugua

SEQ ID NO: 299565 - RNA, 19 nt, Homo sapiens
  misc_RNA (1)...(19): siRNA sense strand
ggucagagauacuucuuaa

SEQ ID NO: 299566 - RNA, 19 nt, Homo sapiens
  misc_RNA (1)...(19): siRNA sense strand
ccaccaagcuagauaaaga

SEQ ID NO: 299567 - RNA, 19 nt, Homo sapiens
  misc_RNA (1)...(19): siRNA sense strand
gcucagauccuuuccuuaa

SEQ ID NO: 299568 - RNA, 19 nt, Homo sapiens
  misc_RNA (1)...(19): siRNA sense strand
ggaaggagauggaaugaac

SEQ ID NO: 299569 - RNA, 19 nt, Homo sapiens
  misc_RNA (1)...(19): siRNA sense strand
guucugacauccuuaauga

SEQ ID NO: 299570 - RNA, 19 nt, Homo sapiens
  misc_RNA (1)...(19): siRNA sense strand
gaacaaugacgaccaauag

SEQ ID NO: 299571 - RNA, 19 nt, Homo sapiens
  misc_RNA (1)...(19): siRNA sense strand
gagauggaaugaacauaga

SEQ ID NO: 299572 - RNA, 19 nt, Homo sapiens
  misc_RNA (1)...(19): siRNA sense strand
ucagagugcuccagugaaa

SEQ ID NO: 299573 - RNA, 19 nt, Homo sapiens
  misc_RNA (1)...(19): siRNA sense strand
gcaggaagcuuugaguucu

SEQ ID NO: 299574 - RNA, 19 nt, Homo sapiens
  misc_RNA (1)...(19): siRNA sense strand
ccagaugacuuccugaaca

SEQ ID NO: 299575 - RNA, 19 nt, Homo sapiens
  misc_RNA (1)...(19): siRNA sense strand
cagagauacuucuuaaauc

SEQ ID NO: 299576 - RNA, 19 nt, Homo sapiens
  misc_RNA (1)...(19): siRNA sense strand
ggagauggaaugaacauag

SEQ ID NO: 299577 - RNA, 19 nt, Homo sapiens
  misc_RNA (1)...(19): siRNA sense strand
uuaaugacauggagucugu

SEQ ID NO: 299578 - RNA, 19 nt, Homo sapiens
  misc_RNA (1)...(19): siRNA sense strand
gcucauuccucuccagcuu

SEQ ID NO: 299579 - RNA, 19 nt, Homo sapiens
  misc_RNA (1)...(19): siRNA sense strand
gacaguggacuaagcauga

SEQ ID NO: 299580 - RNA, 19 nt, Homo sapiens
  misc_RNA (1)...(19): siRNA sense strand
gaacaguguggaugagaug

SEQ ID NO: 299581 - RNA, 19 nt, Homo sapiens
  misc_RNA (1)...(19): siRNA sense strand
ucacaucgaucagacaaca

SEQ ID NO: 299582 - RNA, 19 nt, Homo sapiens
  misc_RNA (1)...(19): siRNA sense strand
ugagaacaaugacgaccaa

SEQ ID NO: 299583 - RNA, 19 nt, Homo sapiens
  misc_RNA (1)...(19): siRNA sense strand
gccaugcugucccagauga

SEQ ID NO: 299584 - RNA, 19 nt, Homo sapiens
  misc_RNA (1)...(19): siRNA sense strand
cgggaugucucaggaauug

SEQ ID NO: 299585 - RNA, 19 nt, Homo sapiens
  misc_RNA (1)...(19): siRNA sense strand
uagcucagauccuuuccuu

SEQ ID NO: 299586 - RNA, 19 nt, Homo sapiens
  misc_RNA (1)...(19): siRNA sense strand
caagcuagauaaagaaagc

SEQ ID NO: 299587 - RNA, 19 nt, Homo sapiens
  misc_RNA (1)...(19): siRNA sense strand
ugacauccuuaaugacaug

SEQ ID NO: 299588 - RNA, 19 nt, Homo sapiens
  misc_RNA (1)...(19): siRNA sense strand
ucagauccuuuccuuaaca

SEQ ID NO: 299589 - RNA, 19 nt, Homo sapiens
  misc_RNA (1)...(19): siRNA sense strand
ccucacagcagaaccguuu

SEQ ID NO: 299590 - RNA, 19 nt, Homo sapiens
  misc_RNA (1)...(19): siRNA sense strand
cgacaggccaguacugaug

SEQ ID NO: 299591 - RNA, 19 nt, Homo sapiens
  misc_RNA (1)...(19): siRNA sense strand
aaagcuuucuuacaugguu

SEQ ID NO: 299592 - RNA, 19 nt, Homo sapiens
  misc_RNA (1)...(19): siRNA sense strand
gccaugaaccagagaauca

SEQ ID NO: 299593 - RNA, 19 nt, Homo sapiens
  misc_RNA (1)...(19): siRNA sense strand
ggugaggccacaggaguua

SEQ ID NO: 299594 - RNA, 19 nt, Homo sapiens
  misc_RNA (1)...(19): siRNA sense strand
agaacaaugacgaccaaua

SEQ ID NO: 299595 - RNA, 19 nt, Homo sapiens
  misc_RNA (1)...(19): siRNA sense strand
agacuaccuugaagccauu

SEQ ID NO: 299596 - RNA, 19 nt, Homo sapiens
  misc_RNA (1)...(19): siRNA sense strand
cuucuuaaaucacaucgau

SEQ ID NO: 299597 - RNA, 19 nt, Homo sapiens
  misc_RNA (1)...(19): siRNA sense strand
accaauagcucagauccuu

SEQ ID NO: 299598 - RNA, 19 nt, Homo sapiens
  misc_RNA (1)...(19): siRNA sense strand
gaguacagacaguggacua

SEQ ID NO: 299599 - RNA, 19 nt, Homo sapiens
  misc_RNA (1)...(19): siRNA sense strand
ggaagcugcccgacuccuu

SEQ ID NO: 299600 - RNA, 19 nt, Homo sapiens
  misc_RNA (1)...(19): siRNA sense strand
ugagauggauacaggugau

SEQ ID NO: 299601 - RNA, 19 nt, Homo sapiens
  misc_RNA (1)...(19): siRNA sense strand
guugggagauggcaaagac

SEQ ID NO: 299602 - RNA, 19 nt, Homo sapiens
  misc_RNA (1)...(19): siRNA sense strand
caagucugcaggaagcuuu

SEQ ID NO: 299603 - RNA, 19 nt, Homo sapiens
  misc_RNA (1)...(19): siRNA sense strand
caauagcucagauccuuuc

SEQ ID NO: 299604 - RNA, 19 nt, Homo sapiens
  misc_RNA (1)...(19): siRNA sense strand
ccagugcagcagaauauga

SEQ ID NO: 299605 - RNA, 19 nt, Homo sapiens
  misc_RNA (1)...(19): siRNA sense strand
caccagugcagcagaauau

SEQ ID NO: 299606 - RNA, 19 nt, Homo sapiens
  misc_RNA (1)...(19): siRNA sense strand
ugaacaguguggaugagau

SEQ ID NO: 299607 - RNA, 19 nt, Homo sapiens
  misc_RNA (1)...(19): siRNA sense strand
ccaccagugcagcagaaua

SEQ ID NO: 299608 - RNA, 19 nt, Homo sapiens
  misc_RNA (1)...(19): siRNA sense strand
gacuaagcaugagcagcua

SEQ ID NO: 299609 - RNA, 19 nt, Homo sapiens
  misc_RNA (1)...(19): siRNA sense strand
cagaugacuuccugaacag

SEQ ID NO: 299610 - RNA, 19 nt, Homo sapiens
  misc_RNA (1)...(19): siRNA sense strand
gaaggagauggaaugaaca

SEQ ID NO: 299611 - RNA, 19 nt, Homo sapiens
  misc_RNA (1)...(19): siRNA sense strand
aaagcacccugcccucaca

SEQ ID NO: 299612 - RNA, 19 nt, Homo sapiens
  misc_RNA (1)...(19): siRNA sense strand
gagauggauacaggugaua

SEQ ID NO: 299613 - RNA, 19 nt, Homo sapiens
  misc_RNA (1)...(19): siRNA sense strand
gccagcagguugggagaug

SEQ ID NO: 299614 - RNA, 19 nt, Homo sapiens
  misc_RNA (1)...(19): siRNA sense strand
aagcuuucuuacaugguua

SEQ ID NO: 299615 - RNA, 19 nt, Homo sapiens
  misc_RNA (1)...(19): siRNA sense strand
gcaguugggagcuguuucu

SEQ ID NO: 299616 - RNA, 19 nt, Homo sapiens
  misc_RNA (1)...(19): siRNA sense strand
gcucuucaacgccgucaug

SEQ ID NO: 299617 - RNA, 19 nt, Homo sapiens
  misc_RNA (1)...(19): siRNA sense strand
ccaauagcucagauccuuu

SEQ ID NO: 299618 - RNA, 19 nt, Homo sapiens
  misc_RNA (1)...(19): siRNA sense strand
gcaggauggugggacucaa

SEQ ID NO: 299619 - RNA, 19 nt, Homo sapiens
  misc_RNA (1)...(19): siRNA sense strand
gaugccaagucugcaggaa

SEQ ID NO: 299620 - RNA, 19 nt, Homo sapiens
  misc_RNA (1)...(19): siRNA sense strand
aaccagagaaucagucaga

SEQ ID NO: 299621 - RNA, 19 nt, Homo sapiens
  misc_RNA (1)...(19): siRNA sense strand
ugaguucugacauccuuaa

SEQ ID NO: 299622 - RNA, 19 nt, Homo sapiens
  misc_RNA (1)...(19): siRNA sense strand
uuaaaucacaucgaucaga

SEQ ID NO: 299623 - RNA, 19 nt, Homo sapiens
  misc_RNA (1)...(19): siRNA sense strand
ccuuaacaguggcaccuau

SEQ ID NO: 299624 - RNA, 19 nt, Homo sapiens
  misc_RNA (1)...(19): siRNA sense strand
ccaaccagcagcaacagau

SEQ ID NO: 299625 - RNA, 19 nt, Homo sapiens
  misc_RNA (1)...(19): siRNA sense strand
guccaccagugcagcagaa

SEQ ID NO: 299626 - RNA, 19 nt, Homo sapiens
  misc_RNA (1)...(19): siRNA sense strand
caaccagcagcaacagaug

SEQ ID NO: 299627 - RNA, 19 nt, Homo sapiens
  misc_RNA (1)...(19): siRNA sense strand
gugcagcagaauaugauga

SEQ ID NO: 299628 - RNA, 19 nt, Homo sapiens
  misc_RNA (1)...(19): siRNA sense strand
caggaagcuuugaguucug

SEQ ID NO: 299629 - RNA, 19 nt, Homo sapiens
  misc_RNA (1)...(19): siRNA sense strand
caggauggugggacucaaa

SEQ ID NO: 299630 - RNA, 19 nt, Homo sapiens
  misc_RNA (1)...(19): siRNA sense strand
ucuuaaaucacaucgauca

SEQ ID NO: 299631 - RNA, 19 nt, Homo sapiens
  misc_RNA (1)...(19): siRNA sense strand
gcugccaccaagcuagaua

SEQ ID NO: 299632 - RNA, 19 nt, Homo sapiens
  misc_RNA (1)...(19): siRNA sense strand
cagaaccguuucccagacu

SEQ ID NO: 299633 - RNA, 19 nt, Homo sapiens
  misc_RNA (1)...(19): siRNA sense strand
agucagagugcuccaguga

SEQ ID NO: 299634 - RNA, 19 nt, Homo sapiens
  misc_RNA (1)...(19): siRNA sense strand
ucugacauccuuaaugaca

SEQ ID NO: 299635 - RNA, 19 nt, Homo sapiens
  misc_RNA (1)...(19): siRNA sense strand
aggaagcuuugaguucuga

SEQ ID NO: 299636 - RNA, 19 nt, Homo sapiens
  misc_RNA (1)...(19): siRNA sense strand
gauggaaugaacauagaag

SEQ ID NO: 299637 - RNA, 19 nt, Homo sapiens
  misc_RNA (1)...(19): siRNA sense strand
gacgaccaauagcucagau

SEQ ID NO: 299638 - RNA, 19 nt, Homo sapiens
  misc_RNA (1)...(19): siRNA sense strand
caucuucgacagucuucuu

SEQ ID NO: 299639 - RNA, 19 nt, Homo sapiens
  misc_RNA (1)...(19): siRNA sense strand
cgagaugagaguacagaca

SEQ ID NO: 299640 - RNA, 19 nt, Homo sapiens
  misc_RNA (1)...(19): siRNA sense strand
caccaagcuagauaaagaa

SEQ ID NO: 299641 - RNA, 19 nt, Homo sapiens
  misc_RNA (1)...(19): siRNA sense strand
gcucagcaucuucgacagu

SEQ ID NO: 299642 - RNA, 19 nt, Homo sapiens
  misc_RNA (1)...(19): siRNA sense strand
gaggagcugaugccaaguc

SEQ ID NO: 299643 - RNA, 19 nt, Homo sapiens
  misc_RNA (1)...(19): siRNA sense strand
acagucuucuuuugagaua

SEQ ID NO: 299644 - RNA, 19 nt, Homo sapiens
  misc_RNA (1)...(19): siRNA sense strand
gcaugagcagcuacagugu

SEQ ID NO: 299645 - RNA, 19 nt, Homo sapiens
  misc_RNA (1)...(19): siRNA sense strand
guacagacaguggacuaag

SEQ ID NO: 299646 - RNA, 19 nt, Homo sapiens
  misc_RNA (1)...(19): siRNA sense strand
gcaacgugcucaucuuuga

SEQ ID NO: 299647 - RNA, 19 nt, Homo sapiens
  misc_RNA (1)...(19): siRNA sense strand
gagaucgacucccuguuug

SEQ ID NO: 299648 - RNA, 19 nt, Homo sapiens
  misc_RNA (1)...(19): siRNA sense strand
agaagaaggugcuggacaa

SEQ ID NO: 299649 - RNA, 19 nt, Homo sapiens
  misc_RNA (1)...(19): siRNA sense strand
ugaccaagaugaaggagau

SEQ ID NO: 299650 - RNA, 19 nt, Homo sapiens
  misc_RNA (1)...(19): siRNA sense strand
uggaggaguucaagagaaa

SEQ ID NO: 299651 - RNA, 19 nt, Homo sapiens
  misc_RNA (1)...(19): siRNA sense strand
agaaggugcuggacaagug

SEQ ID NO: 299652 - RNA, 19 nt, Homo sapiens
  misc_RNA (1)...(19): siRNA sense strand
gaagagcgccguggaggau

SEQ ID NO: 299653 - RNA, 19 nt, Homo sapiens
  misc_RNA (1)...(19): siRNA sense strand
gaucaacgacggagacaag

SEQ ID NO: 299654 - RNA, 19 nt, Homo sapiens
  misc_RNA (1)...(19): siRNA sense strand
gaucgacgacggcaucuuc

SEQ ID NO: 299655 - RNA, 19 nt, Homo sapiens
  misc_RNA (1)...(19): siRNA sense strand
gcgcaacgugcucaucuuu

SEQ ID NO: 299656 - RNA, 19 nt, Homo sapiens
  misc_RNA (1)...(19): siRNA sense strand
guggaggaguucaagagaa

SEQ ID NO: 299657 - RNA, 19 nt, Homo sapiens
  misc_RNA (1)...(19): siRNA sense strand
gagagggugucagccaaga

SEQ ID NO: 299658 - RNA, 19 nt, Homo sapiens
  misc_RNA (1)...(19): siRNA sense strand
agaacgcccuggaguccua

SEQ ID NO: 299659 - RNA, 19 nt, Homo sapiens
  misc_RNA (1)...(19): siRNA sense strand
agaaggacaucagccagaa

SEQ ID NO: 299660 - RNA, 19 nt, Homo sapiens
  misc_RNA (1)...(19): siRNA sense strand
agagggccaugacgaaaga

SEQ ID NO: 299661 - RNA, 19 nt, Homo sapiens
  misc_RNA (1)...(19): siRNA sense strand
gcgcugaacccgcagaaca

SEQ ID NO: 299662 - RNA, 19 nt, Homo sapiens
  misc_RNA (1)...(19): siRNA sense strand
cgugaugacugcccugauc

SEQ ID NO: 299663 - RNA, 19 nt, Homo sapiens
  misc_RNA (1)...(19): siRNA sense strand
ccaagcagacgcagaucuu

SEQ ID NO: 299664 - RNA, 19 nt, Homo sapiens
  misc_RNA (1)...(19): siRNA sense strand
ggacgaguuugagcacaag

SEQ ID NO: 299665 - RNA, 19 nt, Homo sapiens
  misc_RNA (1)...(19): siRNA sense strand
gcgagagggccaugacgaa

SEQ ID NO: 299666 - RNA, 19 nt, Homo sapiens
  misc_RNA (1)...(19): siRNA sense strand
ccaaggugcaggugagcua

SEQ ID NO: 299667 - RNA, 19 nt, Homo sapiens
  misc_RNA (1)...(19): siRNA sense strand
gggaggacuuugacaacag

SEQ ID NO: 299668 - RNA, 19 nt, Homo sapiens
  misc_RNA (1)...(19): siRNA sense strand
ggacaucagccagaacaag

SEQ ID NO: 299669 - RNA, 19 nt, Homo sapiens
  misc_RNA (1)...(19): siRNA sense strand
ccgagaaggacgaguuuga

SEQ ID NO: 299670 - RNA, 19 nt, Homo sapiens
  misc_RNA (1)...(19): siRNA sense strand
gaccugaacaagagcauca

SEQ ID NO: 299671 - RNA, 19 nt, Homo sapiens
  misc_RNA (1)...(19): siRNA sense strand
ccaccaagcagacgcagau

SEQ ID NO: 299672 - RNA, 19 nt, Homo sapiens
  misc_RNA (1)...(19): siRNA sense strand
ugcaggaggcggagaagua

SEQ ID NO: 299673 - RNA, 19 nt, Homo sapiens
  misc_RNA (1)...(19): siRNA sense strand
ugacgaaagacaacaaucu

SEQ ID NO: 299674 - RNA, 19 nt, Homo sapiens
  misc_RNA (1)...(19): siRNA sense strand
agaaccagguggcgcugaa

SEQ ID NO: 299675 - RNA, 19 nt, Homo sapiens
  misc_RNA (1)...(19): siRNA sense strand
guccuacgccuucaacaug

SEQ ID NO: 299676 - RNA, 19 nt, Homo sapiens
  misc_RNA (1)...(19): siRNA sense strand
gacgaaagacaacaaucug

SEQ ID NO: 299677 - RNA, 19 nt, Homo sapiens
  misc_RNA (1)...(19): siRNA sense strand
ggacaccaaggcauucuac

SEQ ID NO: 299678 - RNA, 19 nt, Homo sapiens
  misc_RNA (1)...(19): siRNA sense strand
gaaggugcuggacaagugu

SEQ ID NO: 299679 - RNA, 19 nt, Homo sapiens
  misc_RNA (1)...(19): siRNA sense strand
ggacaaggcccagauucac

SEQ ID NO: 299680 - RNA, 19 nt, Homo sapiens
  misc_RNA (1)...(19): siRNA sense strand
gcugugcuccgaccuguuc

SEQ ID NO: 299681 - RNA, 19 nt, Homo sapiens
  misc_RNA (1)...(19): siRNA sense strand
gagagggccaugacgaaag

SEQ ID NO: 299682 - RNA, 19 nt, Homo sapiens
  misc_RNA (1)...(19): siRNA sense strand
cgagagggccaugacgaaa

SEQ ID NO: 299683 - RNA, 19 nt, Homo sapiens
  misc_RNA (1)...(19): siRNA sense strand
ggcgcgaccugaacaagag

SEQ ID NO: 299684 - RNA, 19 nt, Homo sapiens
  misc_RNA (1)...(19): siRNA sense strand
gaagaaggugcuggacaag

SEQ ID NO: 299685 - RNA, 19 nt, Homo sapiens
  misc_RNA (1)...(19): siRNA sense strand
caaggaugcgggugugauc

SEQ ID NO: 299686 - RNA, 19 nt, Homo sapiens
  misc_RNA (1)...(19): siRNA sense strand
agagcgccguggaggauga

SEQ ID NO: 299687 - RNA, 19 nt, Homo sapiens
  misc_RNA (1)...(19): siRNA sense strand
uugagggcaucgacuucua

SEQ ID NO: 299688 - RNA, 19 nt, Homo sapiens
  misc_RNA (1)...(19): siRNA sense strand
ggccgagaaggacgaguuu

SEQ ID NO: 299689 - RNA, 19 nt, Homo sapiens
  misc_RNA (1)...(19): siRNA sense strand
gcaggaggcggagaaguac

SEQ ID NO: 299690 - RNA, 19 nt, Homo sapiens
  misc_RNA (1)...(19): siRNA sense strand
ccaacggcauccugaacgu

SEQ ID NO: 299691 - RNA, 19 nt, Homo sapiens
  misc_RNA (1)...(19): siRNA sense strand
guggugcagucggacauga

SEQ ID NO: 299692 - RNA, 19 nt, Homo sapiens
  misc_RNA (1)...(19): siRNA sense strand
caucaucagcggacuguac

SEQ ID NO: 299693 - RNA, 19 nt, Homo sapiens
  misc_RNA (1)...(19): siRNA sense strand
gggugcugauccaggugua

SEQ ID NO: 299694 - RNA, 19 nt, Homo sapiens
  misc_RNA (1)...(19): siRNA sense strand
uccuacgccuucaacauga

SEQ ID NO: 299695 - RNA, 19 nt, Homo sapiens
  misc_RNA (1)...(19): siRNA sense strand
acaugaagcacuggccuuu

SEQ ID NO: 299696 - RNA, 19 nt, Homo sapiens
  misc_RNA (1)...(19): siRNA sense strand
gaaaggagaugcccuagug

SEQ ID NO: 299697 - RNA, 19 nt, Homo sapiens
  misc_RNA (1)...(19): siRNA sense strand
ucaagaagauggucagcua

SEQ ID NO: 299698 - RNA, 19 nt, Homo sapiens
  misc_RNA (1)...(19): siRNA sense strand
gaggagaucaagcucauua

SEQ ID NO: 299699 - RNA, 19 nt, Homo sapiens
  misc_RNA (1)...(19): siRNA sense strand
ccgcacagaugucagagua

SEQ ID NO: 299700 - RNA, 19 nt, Homo sapiens
  misc_RNA (1)...(19): siRNA sense strand
gaugugcgcuucauagagu

SEQ ID NO: 299701 - RNA, 19 nt, Homo sapiens
  misc_RNA (1)...(19): siRNA sense strand
uagaguauaugcccuuuga

SEQ ID NO: 299702 - RNA, 19 nt, Homo sapiens
  misc_RNA (1)...(19): siRNA sense strand
gcacagccaaggccuuuaa

SEQ ID NO: 299703 - RNA, 19 nt, Homo sapiens
  misc_RNA (1)...(19): siRNA sense strand
gcagggacaucguguugga

SEQ ID NO: 299704 - RNA, 19 nt, Homo sapiens
  misc_RNA (1)...(19): siRNA sense strand
gcaggaagccagacacaga

SEQ ID NO: 299705 - RNA, 19 nt, Homo sapiens
  misc_RNA (1)...(19): siRNA sense strand
gcacagaugucagaguaag

SEQ ID NO: 299706 - RNA, 19 nt, Homo sapiens
  misc_RNA (1)...(19): siRNA sense strand
cagaacaacuaacucaugu

SEQ ID NO: 299707 - RNA, 19 nt, Homo sapiens
  misc_RNA (1)...(19): siRNA sense strand
ucagaaggcuggucucagu

SEQ ID NO: 299708 - RNA, 19 nt, Homo sapiens
  misc_RNA (1)...(19): siRNA sense strand
gggcagcuaugguagaugu

SEQ ID NO: 299709 - RNA, 19 nt, Homo sapiens
  misc_RNA (1)...(19): siRNA sense strand
agaagauggucagcuauaa

SEQ ID NO: 299710 - RNA, 19 nt, Homo sapiens
  misc_RNA (1)...(19): siRNA sense strand
cagaucagcuucaucacau

SEQ ID NO: 299711 - RNA, 19 nt, Homo sapiens
  misc_RNA (1)...(19): siRNA sense strand
agacucagaugccaacuca

SEQ ID NO: 299712 - RNA, 19 nt, Homo sapiens
  misc_RNA (1)...(19): siRNA sense strand
gcagaaccagcucaagaaa

SEQ ID NO: 299713 - RNA, 19 nt, Homo sapiens
  misc_RNA (1)...(19): siRNA sense strand
gaagugcaaccucagaugu

SEQ ID NO: 299714 - RNA, 19 nt, Homo sapiens
  misc_RNA (1)...(19): siRNA sense strand
gaaggaaggcaucgacaag

SEQ ID NO: 299715 - RNA, 19 nt, Homo sapiens
  misc_RNA (1)...(19): siRNA sense strand
ccuggugccugccaaguuu

SEQ ID NO: 299716 - RNA, 19 nt, Homo sapiens
  misc_RNA (1)...(19): siRNA sense strand
gguggccacuuuauggaaa

SEQ ID NO: 299717 - RNA, 19 nt, Homo sapiens
  misc_RNA (1)...(19): siRNA sense strand
gcuaaccucagaacaacua

SEQ ID NO: 299718 - RNA, 19 nt, Homo sapiens
  misc_RNA (1)...(19): siRNA sense strand
gaguauaugcccuuugaug

SEQ ID NO: 299719 - RNA, 19 nt, Homo sapiens
  misc_RNA (1)...(19): siRNA sense strand
agaucaagcucauuagcaa

SEQ ID NO: 299720 - RNA, 19 nt, Homo sapiens
  misc_RNA (1)...(19): siRNA sense strand
guuggaagcuccgcacaga

SEQ ID NO: 299721 - RNA, 19 nt, Homo sapiens
  misc_RNA (1)...(19): siRNA sense strand
cagcagaaccagcucaaga

SEQ ID NO: 299722 - RNA, 19 nt, Homo sapiens
  misc_RNA (1)...(19): siRNA sense strand
uaaaaucccuggcuuccaa

SEQ ID NO: 299723 - RNA, 19 nt, Homo sapiens
  misc_RNA (1)...(19): siRNA sense strand
agaaccagcucaagaaagg

SEQ ID NO: 299724 - RNA, 19 nt, Homo sapiens
  misc_RNA (1)...(19): siRNA sense strand
gaagauggucagcuauaag

SEQ ID NO: 299725 - RNA, 19 nt, Homo sapiens
  misc_RNA (1)...(19): siRNA sense strand
gcuauaaggagaugcuaga

SEQ ID NO: 299726 - RNA, 19 nt, Homo sapiens
  misc_RNA (1)...(19): siRNA sense strand
ggacuuccaucgggcuuag

SEQ ID NO: 299727 - RNA, 19 nt, Homo sapiens
  misc_RNA (1)...(19): siRNA sense strand
aagaagauggucagcuaua

SEQ ID NO: 299728 - RNA, 19 nt, Homo sapiens
  misc_RNA (1)...(19): siRNA sense strand
ccagcuaaccucagaacaa

SEQ ID NO: 299729 - RNA, 19 nt, Homo sapiens
  misc_RNA (1)...(19): siRNA sense strand
gagcugcugagaaucauug

SEQ ID NO: 299730 - RNA, 19 nt, Homo sapiens
  misc_RNA (1)...(19): siRNA sense strand
ggccagaucagcuucauca

SEQ ID NO: 299731 - RNA, 19 nt, Homo sapiens
  misc_RNA (1)...(19): siRNA sense strand
ccaaccugcugaccacaga

SEQ ID NO: 299732 - RNA, 19 nt, Homo sapiens
  misc_RNA (1)...(19): siRNA sense strand
gaugaacuccuggacuuug

SEQ ID NO: 299733 - RNA, 19 nt, Homo sapiens
  misc_RNA (1)...(19): siRNA sense strand
gcugagaaccauagguguu

SEQ ID NO: 299734 - RNA, 19 nt, Homo sapiens
  misc_RNA (1)...(19): siRNA sense strand
ggaaggacgggcagcuaug

SEQ ID NO: 299735 - RNA, 19 nt, Homo sapiens
  misc_RNA (1)...(19): siRNA sense strand
ccaucgagcugggcuacaa

SEQ ID NO: 299736 - RNA, 19 nt, Homo sapiens
  misc_RNA (1)...(19): siRNA sense strand
gaagggcugagaaccauag

SEQ ID NO: 299737 - RNA, 19 nt, Homo sapiens
  misc_RNA (1)...(19): siRNA sense strand
gagaucaagcucauuagca

SEQ ID NO: 299738 - RNA, 19 nt, Homo sapiens
  misc_RNA (1)...(19): siRNA sense strand
ccucaaggucugccucuuu

SEQ ID NO: 299739 - RNA, 19 nt, Homo sapiens
  misc_RNA (1)...(19): siRNA sense strand
gcaggcgguucuccuugug

SEQ ID NO: 299740 - RNA, 19 nt, Homo sapiens
  misc_RNA (1)...(19): siRNA sense strand
ggucagcuauaaggagaug

SEQ ID NO: 299741 - RNA, 19 nt, Homo sapiens
  misc_RNA (1)...(19): siRNA sense strand
ggugaacuguguggugaug

SEQ ID NO: 299742 - RNA, 19 nt, Homo sapiens
  misc_RNA (1)...(19): siRNA sense strand
ucagaacaacuaacucaug

SEQ ID NO: 299743 - RNA, 19 nt, Homo sapiens
  misc_RNA (1)...(19): siRNA sense strand
cagcuaaccucagaacaac

SEQ ID NO: 299744 - RNA, 19 nt, Homo sapiens
  misc_RNA (1)...(19): siRNA sense strand
gggacccgcuccauguuca

SEQ ID NO: 299745 - RNA, 19 nt, Homo sapiens
  misc_RNA (1)...(19): siRNA sense strand
gaaggugccagaggaggaa

SEQ ID NO: 299746 - RNA, 19 nt, Homo sapiens
  misc_RNA (1)...(19): siRNA sense strand
cagcagggacaucguguug

SEQ ID NO: 299747 - RNA, 19 nt, Homo sapiens
  misc_RNA (1)...(19): siRNA sense strand
ggaugaacuccuggacuuu

SEQ ID NO: 299748 - RNA, 19 nt, Homo sapiens
  misc_RNA (1)...(19): siRNA sense strand
acucagaugccaacucaaa

SEQ ID NO: 299749 - RNA, 19 nt, Homo sapiens
  misc_RNA (1)...(19): siRNA sense strand
ggaagggcugagaaccaua

SEQ ID NO: 299750 - RNA, 19 nt, Homo sapiens
  misc_RNA (1)...(19): siRNA sense strand
ggcaggcgguucuccuugu

SEQ ID NO: 299751 - RNA, 19 nt, Homo sapiens
  misc_RNA (1)...(19): siRNA sense strand
ggaaggcaucgacaagauc

SEQ ID NO: 299752 - RNA, 19 nt, Homo sapiens
  misc_RNA (1)...(19): siRNA sense strand
cucaaggucugccucuuug

SEQ ID NO: 299753 - RNA, 19 nt, Homo sapiens
  misc_RNA (1)...(19): siRNA sense strand
cugagaaccauagguguua

SEQ ID NO: 299754 - RNA, 19 nt, Homo sapiens
  misc_RNA (1)...(19): siRNA sense strand
gcuacaacccugugaaggu

SEQ ID NO: 299755 - RNA, 19 nt, Homo sapiens
  misc_RNA (1)...(19): siRNA sense strand
cagcacagccaaggccuuu

SEQ ID NO: 299756 - RNA, 19 nt, Homo sapiens
  misc_RNA (1)...(19): siRNA sense strand
cuaagacccagaaugaguu

SEQ ID NO: 299757 - RNA, 19 nt, Homo sapiens
  misc_RNA (1)...(19): siRNA sense strand
ccucagaacaacuaacuca

SEQ ID NO: 299758 - RNA, 19 nt, Homo sapiens
  misc_RNA (1)...(19): siRNA sense strand
ggacgugguggacauugug

SEQ ID NO: 299759 - RNA, 19 nt, Homo sapiens
  misc_RNA (1)...(19): siRNA sense strand
ccagguggccacuuuaugg

SEQ ID NO: 299760 - RNA, 19 nt, Homo sapiens
  misc_RNA (1)...(19): siRNA sense strand
gagaagugcaaccucagau

SEQ ID NO: 299761 - RNA, 19 nt, Homo sapiens
  misc_RNA (1)...(19): siRNA sense strand
uaagacccagaaugaguuu

SEQ ID NO: 299762 - RNA, 19 nt, Homo sapiens
  misc_RNA (1)...(19): siRNA sense strand
caggagcugcugagaauca

SEQ ID NO: 299763 - RNA, 19 nt, Homo sapiens
  misc_RNA (1)...(19): siRNA sense strand
ccagaucagcuucaucaca

SEQ ID NO: 299764 - RNA, 19 nt, Homo sapiens
  misc_RNA (1)...(19): siRNA sense strand
aggaaggcaucgacaagau

SEQ ID NO: 299765 - RNA, 19 nt, Homo sapiens
  misc_RNA (1)...(19): siRNA sense strand
caagaagauggucagcuau

SEQ ID NO: 299766 - RNA, 19 nt, Homo sapiens
  misc_RNA (1)...(19): siRNA sense strand
ucaagcuuguccagcagaa

SEQ ID NO: 299767 - RNA, 19 nt, Homo sapiens
  misc_RNA (1)...(19): siRNA sense strand
caaggucugccucuuugga

SEQ ID NO: 299768 - RNA, 19 nt, Homo sapiens
  misc_RNA (1)...(19): siRNA sense strand
ggacuuugcggccuugacu

SEQ ID NO: 299769 - RNA, 19 nt, Homo sapiens
  misc_RNA (1)...(19): siRNA sense strand
gaaggacgggcagcuaugg

SEQ ID NO: 299770 - RNA, 19 nt, Homo sapiens
  misc_RNA (1)...(19): siRNA sense strand
gcccuuugauggcaacaag

SEQ ID NO: 299771 - RNA, 19 nt, Homo sapiens
  misc_RNA (1)...(19): siRNA sense strand
ugaaggaaggcaucgacaa

SEQ ID NO: 299772 - RNA, 19 nt, Homo sapiens
  misc_RNA (1)...(19): siRNA sense strand
uggaggagaucaagcucau

SEQ ID NO: 299773 - RNA, 19 nt, Homo sapiens
  misc_RNA (1)...(19): siRNA sense strand
cugugaaggugaacugugu

SEQ ID NO: 299774 - RNA, 19 nt, Homo sapiens
  misc_RNA (1)...(19): siRNA sense strand
uggaagcuccgcacagaug

SEQ ID NO: 299775 - RNA, 19 nt, Homo sapiens
  misc_RNA (1)...(19): siRNA sense strand
uggaagggcugagaaccau

SEQ ID NO: 299776 - RNA, 19 nt, Homo sapiens
  misc_RNA (1)...(19): siRNA sense strand
ggaagcuccgcacagaugu

SEQ ID NO: 299777 - RNA, 19 nt, Homo sapiens
  misc_RNA (1)...(19): siRNA sense strand
gcuggggucuggcuccuuu

SEQ ID NO: 299778 - RNA, 19 nt, Homo sapiens
  misc_RNA (1)...(19): siRNA sense strand
ucuaagacccagaaugagu

SEQ ID NO: 299779 - RNA, 19 nt, Homo sapiens
  misc_RNA (1)...(19): siRNA sense strand
guggugaugcgaggccuua

SEQ ID NO: 299780 - RNA, 19 nt, Homo sapiens
  misc_RNA (1)...(19): siRNA sense strand
ccagccaauccaagcauuu

SEQ ID NO: 299781 - RNA, 19 nt, Homo sapiens
  misc_RNA (1)...(19): siRNA sense strand
uuuggaaacucugagguau

SEQ ID NO: 299782 - RNA, 19 nt, Homo sapiens
  misc_RNA (1)...(19): siRNA sense strand
ggaugugcgcuucauagag

SEQ ID NO: 299783 - RNA, 19 nt, Homo sapiens
  misc_RNA (1)...(19): siRNA sense strand
gcuccgcacagaugucaga

SEQ ID NO: 299784 - RNA, 19 nt, Homo sapiens
  misc_RNA (1)...(19): siRNA sense strand
gcccucacccuguaugaca

SEQ ID NO: 299785 - RNA, 19 nt, Homo sapiens
  misc_RNA (1)...(19): siRNA sense strand
ucagaugccaacucaaagu

SEQ ID NO: 299786 - RNA, 19 nt, Homo sapiens
  misc_RNA (1)...(19): siRNA sense strand
cauccaugucugagcauuu

SEQ ID NO: 299787 - RNA, 19 nt, Homo sapiens
  misc_RNA (1)...(19): siRNA sense strand
guucauuguccgcaggaaa

SEQ ID NO: 299788 - RNA, 19 nt, Homo sapiens
  misc_RNA (1)...(19): siRNA sense strand
ggagaucaagcucauuagc

SEQ ID NO: 299789 - RNA, 19 nt, Homo sapiens
  misc_RNA (1)...(19): siRNA sense strand
aggagaugcuagacacugu

SEQ ID NO: 299790 - RNA, 19 nt, Homo sapiens
  misc_RNA (1)...(19): siRNA sense strand
ucaagaagauggucagcua

SEQ ID NO: 299791 - RNA, 19 nt, Homo sapiens
  misc_RNA (1)...(19): siRNA sense strand
ccgcacagaugucagagua

SEQ ID NO: 299792 - RNA, 19 nt, Homo sapiens
  misc_RNA (1)...(19): siRNA sense strand
gaugugcgcuucauagagu

SEQ ID NO: 299793 - RNA, 19 nt, Homo sapiens
  misc_RNA (1)...(19): siRNA sense strand
uagaguauaugcccuuuga

SEQ ID NO: 299794 - RNA, 19 nt, Homo sapiens
  misc_RNA (1)...(19): siRNA sense strand
gcacagccaaggccuuuaa

SEQ ID NO: 299795 - RNA, 19 nt, Homo sapiens
  misc_RNA (1)...(19): siRNA sense strand
gcacagaugucagaguaag

SEQ ID NO: 299796 - RNA, 19 nt, Homo sapiens
  misc_RNA (1)...(19): siRNA sense strand
ucagaaggcuggucucagu

SEQ ID NO: 299797 - RNA, 19 nt, Homo sapiens
  misc_RNA (1)...(19): siRNA sense strand
agaagauggucagcuauaa

SEQ ID NO: 299798 - RNA, 19 nt, Homo sapiens
  misc_RNA (1)...(19): siRNA sense strand
cagaucagcuucaucacau

SEQ ID NO: 299799 - RNA, 19 nt, Homo sapiens
  misc_RNA (1)...(19): siRNA sense strand
gaagugcaaccucagaugu

SEQ ID NO: 299800 - RNA, 19 nt, Homo sapiens
  misc_RNA (1)...(19): siRNA sense strand
gaaggaaggcaucgacaag

SEQ ID NO: 299801 - RNA, 19 nt, Homo sapiens
  misc_RNA (1)...(19): siRNA sense strand
ccuggugccugccaaguuu

SEQ ID NO: 299802 - RNA, 19 nt, Homo sapiens
  misc_RNA (1)...(19): siRNA sense strand
gaguauaugcccuuugaug

SEQ ID NO: 299803 - RNA, 19 nt, Homo sapiens
  misc_RNA (1)...(19): siRNA sense strand
guuggaagcuccgcacaga

SEQ ID NO: 299804 - RNA, 19 nt, Homo sapiens
  misc_RNA (1)...(19): siRNA sense strand
uaaaaucccuggcuuccaa

SEQ ID NO: 299805 - RNA, 19 nt, Homo sapiens
  misc_RNA (1)...(19): siRNA sense strand
gaagauggucagcuauaag

SEQ ID NO: 299806 - RNA, 19 nt, Homo sapiens
  misc_RNA (1)...(19): siRNA sense strand
gcuauaaggagaugcuaga

SEQ ID NO: 299807 - RNA, 19 nt, Homo sapiens
  misc_RNA (1)...(19): siRNA sense strand
aagaagauggucagcuaua

SEQ ID NO: 299808 - RNA, 19 nt, Homo sapiens
  misc_RNA (1)...(19): siRNA sense strand
gagcugcugagaaucauug

SEQ ID NO: 299809 - RNA, 19 nt, Homo sapiens
  misc_RNA (1)...(19): siRNA sense strand
ggccagaucagcuucauca

SEQ ID NO: 299810 - RNA, 19 nt, Homo sapiens
  misc_RNA (1)...(19): siRNA sense strand
ccaaccugcugaccacaga

SEQ ID NO: 299811 - RNA, 19 nt, Homo sapiens
  misc_RNA (1)...(19): siRNA sense strand
gaugaacuccuggacuuug

SEQ ID NO: 299812 - RNA, 19 nt, Homo sapiens
  misc_RNA (1)...(19): siRNA sense strand
gcugagaaccauagguguu

SEQ ID NO: 299813 - RNA, 19 nt, Homo sapiens
  misc_RNA (1)...(19): siRNA sense strand
ccaucgagcugggcuacaa

SEQ ID NO: 299814 - RNA, 19 nt, Homo sapiens
  misc_RNA (1)...(19): siRNA sense strand
gaagggcugagaaccauag

SEQ ID NO: 299815 - RNA, 19 nt, Homo sapiens
  misc_RNA (1)...(19): siRNA sense strand
ccucaaggucugccucuuu

SEQ ID NO: 299816 - RNA, 19 nt, Homo sapiens
  misc_RNA (1)...(19): siRNA sense strand
ggucagcuauaaggagaug

SEQ ID NO: 299817 - RNA, 19 nt, Homo sapiens
  misc_RNA (1)...(19): siRNA sense strand
gcaggcgguucuccuugug

SEQ ID NO: 299818 - RNA, 19 nt, Homo sapiens
  misc_RNA (1)...(19): siRNA sense strand
ggugaacuguguggugaug

SEQ ID NO: 299819 - RNA, 19 nt, Homo sapiens
  misc_RNA (1)...(19): siRNA sense strand
gaaggugccagaggaggaa

SEQ ID NO: 299820 - RNA, 19 nt, Homo sapiens
  misc_RNA (1)...(19): siRNA sense strand
ggaugaacuccuggacuuu

SEQ ID NO: 299821 - RNA, 19 nt, Homo sapiens
  misc_RNA (1)...(19): siRNA sense strand
ggaaggcaucgacaagauc

SEQ ID NO: 299822 - RNA, 19 nt, Homo sapiens
  misc_RNA (1)...(19): siRNA sense strand
cucaaggucugccucuuug

SEQ ID NO: 299823 - RNA, 19 nt, Homo sapiens
  misc_RNA (1)...(19): siRNA sense strand
ggcaggcgguucuccuugu

SEQ ID NO: 299824 - RNA, 19 nt, Homo sapiens
  misc_RNA (1)...(19): siRNA sense strand
cugagaaccauagguguua

SEQ ID NO: 299825 - RNA, 19 nt, Homo sapiens
  misc_RNA (1)...(19): siRNA sense strand
ggaagggcugagaaccaua

SEQ ID NO: 299826 - RNA, 19 nt, Homo sapiens
  misc_RNA (1)...(19): siRNA sense strand
gcuacaacccugugaaggu

SEQ ID NO: 299827 - RNA, 19 nt, Homo sapiens
  misc_RNA (1)...(19): siRNA sense strand
cagcacagccaaggccuuu

SEQ ID NO: 299828 - RNA, 19 nt, Homo sapiens
  misc_RNA (1)...(19): siRNA sense strand
ggacgugguggacauugug

SEQ ID NO: 299829 - RNA, 19 nt, Homo sapiens
  misc_RNA (1)...(19): siRNA sense strand
aggaaggcaucgacaagau

SEQ ID NO: 299830 - RNA, 19 nt, Homo sapiens
  misc_RNA (1)...(19): siRNA sense strand
caggagcugcugagaauca

SEQ ID NO: 299831 - RNA, 19 nt, Homo sapiens
  misc_RNA (1)...(19): siRNA sense strand
ccagaucagcuucaucaca

SEQ ID NO: 299832 - RNA, 19 nt, Homo sapiens
  misc_RNA (1)...(19): siRNA sense strand
gagaagugcaaccucagau

SEQ ID NO: 299833 - RNA, 19 nt, Homo sapiens
  misc_RNA (1)...(19): siRNA sense strand
caagaagauggucagcuau

SEQ ID NO: 299834 - RNA, 19 nt, Homo sapiens
  misc_RNA (1)...(19): siRNA sense strand
caaggucugccucuuugga

SEQ ID NO: 299835 - RNA, 19 nt, Homo sapiens
  misc_RNA (1)...(19): siRNA sense strand
ggacuuugcggccuugacu

SEQ ID NO: 299836 - RNA, 19 nt, Homo sapiens
  misc_RNA (1)...(19): siRNA sense strand
gcccuuugauggcaacaag

SEQ ID NO: 299837 - RNA, 19 nt, Homo sapiens
  misc_RNA (1)...(19): siRNA sense strand
ugaaggaaggcaucgacaa

SEQ ID NO: 299838 - RNA, 19 nt, Homo sapiens
  misc_RNA (1)...(19): siRNA sense strand
uggaagggcugagaaccau

SEQ ID NO: 299839 - RNA, 19 nt, Homo sapiens
  misc_RNA (1)...(19): siRNA sense strand
uggaagcuccgcacagaug

SEQ ID NO: 299840 - RNA, 19 nt, Homo sapiens
  misc_RNA (1)...(19): siRNA sense strand
cugugaaggugaacugugu

SEQ ID NO: 299841 - RNA, 19 nt, Homo sapiens
  misc_RNA (1)...(19): siRNA sense strand
ggaagcuccgcacagaugu

SEQ ID NO: 299842 - RNA, 19 nt, Homo sapiens
  misc_RNA (1)...(19): siRNA sense strand
guggugaugcgaggccuua

SEQ ID NO: 299843 - RNA, 19 nt, Homo sapiens
  misc_RNA (1)...(19): siRNA sense strand
uuuggaaacucugagguau

SEQ ID NO: 299844 - RNA, 19 nt, Homo sapiens
  misc_RNA (1)...(19): siRNA sense strand
gcuccgcacagaugucaga

SEQ ID NO: 299845 - RNA, 19 nt, Homo sapiens
  misc_RNA (1)...(19): siRNA sense strand
cauccaugucugagcauuu

SEQ ID NO: 299846 - RNA, 19 nt, Homo sapiens
  misc_RNA (1)...(19): siRNA sense strand
ggaugugcgcuucauagag

SEQ ID NO: 299847 - RNA, 19 nt, Homo sapiens
  misc_RNA (1)...(19): siRNA sense strand
guucauuguccgcaggaaa

SEQ ID NO: 299848 - RNA, 19 nt, Homo sapiens
  misc_RNA (1)...(19): siRNA sense strand
aggagaugcuagacacugu

SEQ ID NO: 299849 - RNA, 19 nt, Homo sapiens
  misc_RNA (1)...(19): siRNA sense strand
gaaaggagaugcccuagug

SEQ ID NO: 299850 - RNA, 19 nt, Homo sapiens
  misc_RNA (1)...(19): siRNA sense strand
ucaagaagauggucagcua

SEQ ID NO: 299851 - RNA, 19 nt, Homo sapiens
  misc_RNA (1)...(19): siRNA sense strand
gaggagaucaagcucauua

SEQ ID NO: 299852 - RNA, 19 nt, Homo sapiens
  misc_RNA (1)...(19): siRNA sense strand
ccgcacagaugucagagua

SEQ ID NO: 299853 - RNA, 19 nt, Homo sapiens
  misc_RNA (1)...(19): siRNA sense strand
gaugugcgcuucauagagu

SEQ ID NO: 299854 - RNA, 19 nt, Homo sapiens
  misc_RNA (1)...(19): siRNA sense strand
uagaguauaugcccuuuga

SEQ ID NO: 299855 - RNA, 19 nt, Homo sapiens
  misc_RNA (1)...(19): siRNA sense strand
gcacagccaaggccuuuaa

SEQ ID NO: 299856 - RNA, 19 nt, Homo sapiens
  misc_RNA (1)...(19): siRNA sense strand
gcagggacaucguguugga

SEQ ID NO: 299857 - RNA, 19 nt, Homo sapiens
  misc_RNA (1)...(19): siRNA sense strand
gcaggaagccagacacaga

SEQ ID NO: 299858 - RNA, 19 nt, Homo sapiens
  misc_RNA (1)...(19): siRNA sense strand
gcacagaugucagaguaag

SEQ ID NO: 299859 - RNA, 19 nt, Homo sapiens
  misc_RNA (1)...(19): siRNA sense strand
cagaacaacuaacucaugu

SEQ ID NO: 299860 - RNA, 19 nt, Homo sapiens
  misc_RNA (1)...(19): siRNA sense strand
ucagaaggcuggucucagu

SEQ ID NO: 299861 - RNA, 19 nt, Homo sapiens
  misc_RNA (1)...(19): siRNA sense strand
gggcagcuaugguagaugu

SEQ ID NO: 299862 - RNA, 19 nt, Homo sapiens
  misc_RNA (1)...(19): siRNA sense strand
agaagauggucagcuauaa

SEQ ID NO: 299863 - RNA, 19 nt, Homo sapiens
  misc_RNA (1)...(19): siRNA sense strand
cagaucagcuucaucacau

SEQ ID NO: 299864 - RNA, 19 nt, Homo sapiens
  misc_RNA (1)...(19): siRNA sense strand
agacucagaugccaacuca

SEQ ID NO: 299865 - RNA, 19 nt, Homo sapiens
  misc_RNA (1)...(19): siRNA sense strand
gcagaaccagcucaagaaa

SEQ ID NO: 299866 - RNA, 19 nt, Homo sapiens
  misc_RNA (1)...(19): siRNA sense strand
gaagugcaaccucagaugu

SEQ ID NO: 299867 - RNA, 19 nt, Homo sapiens
  misc_RNA (1)...(19): siRNA sense strand
gaaggaaggcaucgacaag

SEQ ID NO: 299868 - RNA, 19 nt, Homo sapiens
  misc_RNA (1)...(19): siRNA sense strand
ccuggugccugccaaguuu

SEQ ID NO: 299869 - RNA, 19 nt, Homo sapiens
  misc_RNA (1)...(19): siRNA sense strand
gguggccacuuuauggaaa

SEQ ID NO: 299870 - RNA, 19 nt, Homo sapiens
  misc_RNA (1)...(19): siRNA sense strand
gcuaaccucagaacaacua

SEQ ID NO: 299871 - RNA, 19 nt, Homo sapiens
  misc_RNA (1)...(19): siRNA sense strand
gaguauaugcccuuugaug

SEQ ID NO: 299872 - RNA, 19 nt, Homo sapiens
  misc_RNA (1)...(19): siRNA sense strand
agaucaagcucauuagcaa

SEQ ID NO: 299873 - RNA, 19 nt, Homo sapiens
  misc_RNA (1)...(19): siRNA sense strand
guuggaagcuccgcacaga

SEQ ID NO: 299874 - RNA, 19 nt, Homo sapiens
  misc_RNA (1)...(19): siRNA sense strand
cagcagaaccagcucaaga

SEQ ID NO: 299875 - RNA, 19 nt, Homo sapiens
  misc_RNA (1)...(19): siRNA sense strand
uaaaaucccuggcuuccaa

SEQ ID NO: 299876 - RNA, 19 nt, Homo sapiens
  misc_RNA (1)...(19): siRNA sense strand
agaaccagcucaagaaagg

SEQ ID NO: 299877 - RNA, 19 nt, Homo sapiens
  misc_RNA (1)...(19): siRNA sense strand
gaagauggucagcuauaag

SEQ ID NO: 299878 - RNA, 19 nt, Homo sapiens
  misc_RNA (1)...(19): siRNA sense strand
gcuauaaggagaugcuaga

SEQ ID NO: 299879 - RNA, 19 nt, Homo sapiens
  misc_RNA (1)...(19): siRNA sense strand
ggacuuccaucgggcuuag

SEQ ID NO: 299880 - RNA, 19 nt, Homo sapiens
  misc_RNA (1)...(19): siRNA sense strand
aagaagauggucagcuaua

SEQ ID NO: 299881 - RNA, 19 nt, Homo sapiens
  misc_RNA (1)...(19): siRNA sense strand
ccagcuaaccucagaacaa

SEQ ID NO: 299882 - RNA, 19 nt, Homo sapiens
  misc_RNA (1)...(19): siRNA sense strand
gagcugcugagaaucauug

SEQ ID NO: 299883 - RNA, 19 nt, Homo sapiens
  misc_RNA (1)...(19): siRNA sense strand
ggccagaucagcuucauca

SEQ ID NO: 299884 - RNA, 19 nt, Homo sapiens
  misc_RNA (1)...(19): siRNA sense strand
ccaaccugcugaccacaga

SEQ ID NO: 299885 - RNA, 19 nt, Homo sapiens
  misc_RNA (1)...(19): siRNA sense strand
gaugaacuccuggacuuug

SEQ ID NO: 299886 - RNA, 19 nt, Homo sapiens
  misc_RNA (1)...(19): siRNA sense strand
gcugagaaccauagguguu

SEQ ID NO: 299887 - RNA, 19 nt, Homo sapiens
  misc_RNA (1)...(19): siRNA sense strand
ggaaggacgggcagcuaug

SEQ ID NO: 299888 - RNA, 19 nt, Homo sapiens
  misc_RNA (1)...(19): siRNA sense strand
ccaucgagcugggcuacaa

SEQ ID NO: 299889 - RNA, 19 nt, Homo sapiens
  misc_RNA (1)...(19): siRNA sense strand
gaagggcugagaaccauag

SEQ ID NO: 299890 - RNA, 19 nt, Homo sapiens
  misc_RNA (1)...(19): siRNA sense strand
gagaucaagcucauuagca

SEQ ID NO: 299891 - RNA, 19 nt, Homo sapiens
  misc_RNA (1)...(19): siRNA sense strand
ccucaaggucugccucuuu

SEQ ID NO: 299892 - RNA, 19 nt, Homo sapiens
  misc_RNA (1)...(19): siRNA sense strand
gcaggcgguucuccuugug

SEQ ID NO: 299893 - RNA, 19 nt, Homo sapiens
  misc_RNA (1)...(19): siRNA sense strand
ggucagcuauaaggagaug

SEQ ID NO: 299894 - RNA, 19 nt, Homo sapiens
  misc_RNA (1)...(19): siRNA sense strand
ggugaacuguguggugaug

SEQ ID NO: 299895 - RNA, 19 nt, Homo sapiens
  misc_RNA (1)...(19): siRNA sense strand
ucagaacaacuaacucaug

SEQ ID NO: 299896 - RNA, 19 nt, Homo sapiens
  misc_RNA (1)...(19): siRNA sense strand
cagcuaaccucagaacaac

SEQ ID NO: 299897 - RNA, 19 nt, Homo sapiens
  misc_RNA (1)...(19): siRNA sense strand
gggacccgcuccauguuca

SEQ ID NO: 299898 - RNA, 19 nt, Homo sapiens
  misc_RNA (1)...(19): siRNA sense strand
gaaggugccagaggaggaa

SEQ ID NO: 299899 - RNA, 19 nt, Homo sapiens
  misc_RNA (1)...(19): siRNA sense strand
cagcagggacaucguguug

SEQ ID NO: 299900 - RNA, 19 nt, Homo sapiens
  misc_RNA (1)...(19): siRNA sense strand
ggaugaacuccuggacuuu

SEQ ID NO: 299901 - RNA, 19 nt, Homo sapiens
  misc_RNA (1)...(19): siRNA sense strand
acucagaugccaacucaaa

SEQ ID NO: 299902 - RNA, 19 nt, Homo sapiens
  misc_RNA (1)...(19): siRNA sense strand
ggaagggcugagaaccaua

SEQ ID NO: 299903 - RNA, 19 nt, Homo sapiens
  misc_RNA (1)...(19): siRNA sense strand
ggcaggcgguucuccuugu

SEQ ID NO: 299904 - RNA, 19 nt, Homo sapiens
  misc_RNA (1)...(19): siRNA sense strand
ggaaggcaucgacaagauc

SEQ ID NO: 299905 - RNA, 19 nt, Homo sapiens
  misc_RNA (1)...(19): siRNA sense strand
cucaaggucugccucuuug

SEQ ID NO: 299906 - RNA, 19 nt, Homo sapiens
  misc_RNA (1)...(19): siRNA sense strand
cugagaaccauagguguua

SEQ ID NO: 299907 - RNA, 19 nt, Homo sapiens
  misc_RNA (1)...(19): siRNA sense strand
gcuacaacccugugaaggu

SEQ ID NO: 299908 - RNA, 19 nt, Homo sapiens
  misc_RNA (1)...(19): siRNA sense strand
cagcacagccaaggccuuu

SEQ ID NO: 299909 - RNA, 19 nt, Homo sapiens
  misc_RNA (1)...(19): siRNA sense strand
cuaagacccagaaugaguu

SEQ ID NO: 299910 - RNA, 19 nt, Homo sapiens
  misc_RNA (1)...(19): siRNA sense strand
ccucagaacaacuaacuca

SEQ ID NO: 299911 - RNA, 19 nt, Homo sapiens
  misc_RNA (1)...(19): siRNA sense strand
ggacgugguggacauugug

SEQ ID NO: 299912 - RNA, 19 nt, Homo sapiens
  misc_RNA (1)...(19): siRNA sense strand
ccagguggccacuuuaugg

SEQ ID NO: 299913 - RNA, 19 nt, Homo sapiens
  misc_RNA (1)...(19): siRNA sense strand
gagaagugcaaccucagau

SEQ ID NO: 299914 - RNA, 19 nt, Homo sapiens
  misc_RNA (1)...(19): siRNA sense strand
uaagacccagaaugaguuu

SEQ ID NO: 299915 - RNA, 19 nt, Homo sapiens
  misc_RNA (1)...(19): siRNA sense strand
caggagcugcugagaauca

SEQ ID NO: 299916 - RNA, 19 nt, Homo sapiens
  misc_RNA (1)...(19): siRNA sense strand
ccagaucagcuucaucaca

SEQ ID NO: 299917 - RNA, 19 nt, Homo sapiens
  misc_RNA (1)...(19): siRNA sense strand
aggaaggcaucgacaagau

SEQ ID NO: 299918 - RNA, 19 nt, Homo sapiens
  misc_RNA (1)...(19): siRNA sense strand
caagaagauggucagcuau

SEQ ID NO: 299919 - RNA, 19 nt, Homo sapiens
  misc_RNA (1)...(19): siRNA sense strand
ucaagcuuguccagcagaa

SEQ ID NO: 299920 - RNA, 19 nt, Homo sapiens
  misc_RNA (1)...(19): siRNA sense strand
caaggucugccucuuugga

SEQ ID NO: 299921 - RNA, 19 nt, Homo sapiens
  misc_RNA (1)...(19): siRNA sense strand
ggacuuugcggccuugacu

SEQ ID NO: 299922 - RNA, 19 nt, Homo sapiens
  misc_RNA (1)...(19): siRNA sense strand
gaaggacgggcagcuaugg

SEQ ID NO: 299923 - RNA, 19 nt, Homo sapiens
  misc_RNA (1)...(19): siRNA sense strand
gcccuuugauggcaacaag

SEQ ID NO: 299924 - RNA, 19 nt, Homo sapiens
  misc_RNA (1)...(19): siRNA sense strand
ugaaggaaggcaucgacaa

SEQ ID NO: 299925 - RNA, 19 nt, Homo sapiens
  misc_RNA (1)...(19): siRNA sense strand
uggaggagaucaagcucau

SEQ ID NO: 299926 - RNA, 19 nt, Homo sapiens
  misc_RNA (1)...(19): siRNA sense strand
cugugaaggugaacugugu

SEQ ID NO: 299927 - RNA, 19 nt, Homo sapiens
  misc_RNA (1)...(19): siRNA sense strand
uggaagcuccgcacagaug

SEQ ID NO: 299928 - RNA, 19 nt, Homo sapiens
  misc_RNA (1)...(19): siRNA sense strand
uggaagggcugagaaccau

SEQ ID NO: 299929 - RNA, 19 nt, Homo sapiens
  misc_RNA (1)...(19): siRNA sense strand
ggaagcuccgcacagaugu

SEQ ID NO: 299930 - RNA, 19 nt, Homo sapiens
  misc_RNA (1)...(19): siRNA sense strand
gcuggggucuggcuccuuu

SEQ ID NO: 299931 - RNA, 19 nt, Homo sapiens
  misc_RNA (1)...(19): siRNA sense strand
ucuaagacccagaaugagu

SEQ ID NO: 299932 - RNA, 19 nt, Homo sapiens
  misc_RNA (1)...(19): siRNA sense strand
guggugaugcgaggccuua

SEQ ID NO: 299933 - RNA, 19 nt, Homo sapiens
  misc_RNA (1)...(19): siRNA sense strand
ccagccaauccaagcauuu

SEQ ID NO: 299934 - RNA, 19 nt, Homo sapiens
  misc_RNA (1)...(19): siRNA sense strand
uuuggaaacucugagguau

SEQ ID NO: 299935 - RNA, 19 nt, Homo sapiens
  misc_RNA (1)...(19): siRNA sense strand
ggaugugcgcuucauagag

SEQ ID NO: 299936 - RNA, 19 nt, Homo sapiens
  misc_RNA (1)...(19): siRNA sense strand
gcuccgcacagaugucaga

SEQ ID NO: 299937 - RNA, 19 nt, Homo sapiens
  misc_RNA (1)...(19): siRNA sense strand
gcccucacccuguaugaca

SEQ ID NO: 299938 - RNA, 19 nt, Homo sapiens
  misc_RNA (1)...(19): siRNA sense strand
ucagaugccaacucaaagu

SEQ ID NO: 299939 - RNA, 19 nt, Homo sapiens
  misc_RNA (1)...(19): siRNA sense strand
cauccaugucugagcauuu

SEQ ID NO: 299940 - RNA, 19 nt, Homo sapiens
  misc_RNA (1)...(19): siRNA sense strand
guucauuguccgcaggaaa

SEQ ID NO: 299941 - RNA, 19 nt, Homo sapiens
  misc_RNA (1)...(19): siRNA sense strand
ggagaucaagcucauuagc

SEQ ID NO: 299942 - RNA, 19 nt, Homo sapiens
  misc_RNA (1)...(19): siRNA sense strand
aggagaugcuagacacugu

SEQ ID NO: 299943 - RNA, 19 nt, Homo sapiens
  misc_RNA (1)...(19): siRNA sense strand
ccaaggaauuucagaaguu

SEQ ID NO: 299944 - RNA, 19 nt, Homo sapiens
  misc_RNA (1)...(19): siRNA sense strand
gcauuuaccucggaucaug

SEQ ID NO: 299945 - RNA, 19 nt, Homo sapiens
  misc_RNA (1)...(19): siRNA sense strand
caaggaauuucagaaguug

SEQ ID NO: 299946 - RNA, 19 nt, Homo sapiens
  misc_RNA (1)...(19): siRNA sense strand
gaacguucuucucaucauc

SEQ ID NO: 299947 - RNA, 19 nt, Homo sapiens
  misc_RNA (1)...(19): siRNA sense strand
guccaagccuuaaacauca

SEQ ID NO: 299948 - RNA, 19 nt, Homo sapiens
  misc_RNA (1)...(19): siRNA sense strand
gcacugagcaagccauaca

SEQ ID NO: 299949 - RNA, 19 nt, Homo sapiens
  misc_RNA (1)...(19): siRNA sense strand
ggugcacgcuggaaacuuc

SEQ ID NO: 299950 - RNA, 19 nt, Homo sapiens
  misc_RNA (1)...(19): siRNA sense strand
gggauaucuucuaaccaua

SEQ ID NO: 299951 - RNA, 19 nt, Homo sapiens
  misc_RNA (1)...(19): siRNA sense strand
caaggagaauggcuaugug

SEQ ID NO: 299952 - RNA, 19 nt, Homo sapiens
  misc_RNA (1)...(19): siRNA sense strand
gccauacaguuguuggaaa

SEQ ID NO: 299953 - RNA, 19 nt, Homo sapiens
  misc_RNA (1)...(19): siRNA sense strand
gccaacagcaccaucauug

SEQ ID NO: 299954 - RNA, 19 nt, Homo sapiens
  misc_RNA (1)...(19): siRNA sense strand
gcucugaacguucuucuca

SEQ ID NO: 299955 - RNA, 19 nt, Homo sapiens
  misc_RNA (1)...(19): siRNA sense strand
gcaccuugccugacaaaca

SEQ ID NO: 299956 - RNA, 19 nt, Homo sapiens
  misc_RNA (1)...(19): siRNA sense strand
aaacaucagugugccguau

SEQ ID NO: 299957 - RNA, 19 nt, Homo sapiens
  misc_RNA (1)...(19): siRNA sense strand
uaucauccuuccucugaga

SEQ ID NO: 299958 - RNA, 19 nt, Homo sapiens
  misc_RNA (1)...(19): siRNA sense strand
gagcaagccauacaguugu

SEQ ID NO: 299959 - RNA, 19 nt, Homo sapiens
  misc_RNA (1)...(19): siRNA sense strand
ugggauaucuucuaaccau

SEQ ID NO: 299960 - RNA, 19 nt, Homo sapiens
  misc_RNA (1)...(19): siRNA sense strand
gcaccaucauugcauuuac

SEQ ID NO: 299961 - RNA, 19 nt, Homo sapiens
  misc_RNA (1)...(19): siRNA sense strand
ugucauauuuggauacaca

SEQ ID NO: 299962 - RNA, 19 nt, Homo sapiens
  misc_RNA (1)...(19): siRNA sense strand
ugagcaagccauacaguug

SEQ ID NO: 299963 - RNA, 19 nt, Homo sapiens
  misc_RNA (1)...(19): siRNA sense strand
caacagcaccaucauugca

SEQ ID NO: 299964 - RNA, 19 nt, Homo sapiens
  misc_RNA (1)...(19): siRNA sense strand
gagcacugagcaagccaua

SEQ ID NO: 299965 - RNA, 19 nt, Homo sapiens
  misc_RNA (1)...(19): siRNA sense strand
caauuccuguggacuuuca

SEQ ID NO: 299966 - RNA, 19 nt, Homo sapiens
  misc_RNA (1)...(19): siRNA sense strand
ggagggugcacgcuggaaa

SEQ ID NO: 299967 - RNA, 19 nt, Homo sapiens
  misc_RNA (1)...(19): siRNA sense strand
uugccucugugucauauuu

SEQ ID NO: 299968 - RNA, 19 nt, Homo sapiens
  misc_RNA (1)...(19): siRNA sense strand
cuacuuugccucuguguca

SEQ ID NO: 299969 - RNA, 19 nt, Homo sapiens
  misc_RNA (1)...(19): siRNA sense strand
ucaaggagaauggcuaugu

SEQ ID NO: 299970 - RNA, 19 nt, Homo sapiens
  misc_RNA (1)...(19): siRNA sense strand
cguccaagccuuaaacauc

SEQ ID NO: 299971 - RNA, 19 nt, Homo sapiens
  misc_RNA (1)...(19): siRNA sense strand
ccacccgccuguacgacuu

SEQ ID NO: 299972 - RNA, 19 nt, Homo sapiens
  misc_RNA (1)...(19): siRNA sense strand
acccugggauaucuucuaa

SEQ ID NO: 299973 - RNA, 19 nt, Homo sapiens
  misc_RNA (1)...(19): siRNA sense strand
cccaguacuucaaggagaa

SEQ ID NO: 299974 - RNA, 19 nt, Homo sapiens
  misc_RNA (1)...(19): siRNA sense strand
ucagauaccccaaggaauu

SEQ ID NO: 299975 - RNA, 19 nt, Homo sapiens
  misc_RNA (1)...(19): siRNA sense strand
cuuaucauccuuccucuga

SEQ ID NO: 299976 - RNA, 19 nt, Homo sapiens
  misc_RNA (1)...(19): siRNA sense strand
uguacgacuucaacuccua

SEQ ID NO: 299977 - RNA, 19 nt, Homo sapiens
  misc_RNA (1)...(19): siRNA sense strand
cccaaggaauuucagaagu

SEQ ID NO: 299978 - RNA, 19 nt, Homo sapiens
  misc_RNA (1)...(19): siRNA sense strand
ccauacaguuguuggaaaa

SEQ ID NO: 299979 - RNA, 19 nt, Homo sapiens
  misc_RNA (1)...(19): siRNA sense strand
ggauaucuucuaaccauac

SEQ ID NO: 299980 - RNA, 19 nt, Homo sapiens
  misc_RNA (1)...(19): siRNA sense strand
cuggugagguccccaaaua

SEQ ID NO: 299981 - RNA, 19 nt, Homo sapiens
  misc_RNA (1)...(19): siRNA sense strand
acagcaccaucauugcauu

SEQ ID NO: 299982 - RNA, 19 nt, Homo sapiens
  misc_RNA (1)...(19): siRNA sense strand
caccuugccugacaaacag

SEQ ID NO: 299983 - RNA, 19 nt, Homo sapiens
  misc_RNA (1)...(19): siRNA sense strand
ucugaacguucuucucauc

SEQ ID NO: 299984 - RNA, 19 nt, Homo sapiens
  misc_RNA (1)...(19): siRNA sense strand
ugaacguucuucucaucau

SEQ ID NO: 299985 - RNA, 19 nt, Homo sapiens
  misc_RNA (1)...(19): siRNA sense strand
aaacgucagccaguccuuu

SEQ ID NO: 299986 - RNA, 19 nt, Homo sapiens
  misc_RNA (1)...(19): siRNA sense strand
ggccaacagcaccaucauu

SEQ ID NO: 299987 - RNA, 19 nt, Homo sapiens
  misc_RNA (1)...(19): siRNA sense strand
aggaauuucagaaguugua

SEQ ID NO: 299988 - RNA, 19 nt, Homo sapiens
  misc_RNA (1)...(19): siRNA sense strand
ggaaaauccgccagagcua

SEQ ID NO: 299989 - RNA, 19 nt, Homo sapiens
  misc_RNA (1)...(19): siRNA sense strand
cagcaccaucauugcauuu

SEQ ID NO: 299990 - RNA, 19 nt, Homo sapiens
  misc_RNA (1)...(19): siRNA sense strand
ucugugucauauuuggaua

SEQ ID NO: 299991 - RNA, 19 nt, Homo sapiens
  misc_RNA (1)...(19): siRNA sense strand
ugacaccacccgccuguac

SEQ ID NO: 299992 - RNA, 19 nt, Homo sapiens
  misc_RNA (1)...(19): siRNA sense strand
ugagugcuuuggacgaucu

SEQ ID NO: 299993 - RNA, 19 nt, Homo sapiens
  misc_RNA (1)...(19): siRNA sense strand
ggaauuucagaaguuguau

SEQ ID NO: 299994 - RNA, 19 nt, Homo sapiens
  misc_RNA (1)...(19): siRNA sense strand
ggugagguccccaaauauu

SEQ ID NO: 299995 - RNA, 19 nt, Homo sapiens
  misc_RNA (1)...(19): siRNA sense strand
ugaaaacacuaagacaugu

SEQ ID NO: 299996 - RNA, 19 nt, Homo sapiens
  misc_RNA (1)...(19): siRNA sense strand
ccaaggaauuucagaaguu

SEQ ID NO: 299997 - RNA, 19 nt, Homo sapiens
  misc_RNA (1)...(19): siRNA sense strand
gcauuuaccucggaucaug

SEQ ID NO: 299998 - RNA, 19 nt, Homo sapiens
  misc_RNA (1)...(19): siRNA sense strand
caaggaauuucagaaguug

SEQ ID NO: 299999 - RNA, 19 nt, Homo sapiens
  misc_RNA (1)...(19): siRNA sense strand
gaacguucuucucaucauc

SEQ ID NO: 300000 - RNA, 19 nt, Homo sapiens
  misc_RNA (1)...(19): siRNA sense strand
guccaagccuuaaacauca

SEQ ID NO: 300001 - RNA, 19 nt, Homo sapiens
  misc_RNA (1)...(19): siRNA sense strand
gcacugagcaagccauaca

SEQ ID NO: 300002 - RNA, 19 nt, Homo sapiens
  misc_RNA (1)...(19): siRNA sense strand
ggugcacgcuggaaacuuc

SEQ ID NO: 300003 - RNA, 19 nt, Homo sapiens
  misc_RNA (1)...(19): siRNA sense strand
gggauaucuucuaaccaua

SEQ ID NO: 300004 - RNA, 19 nt, Homo sapiens
  misc_RNA (1)...(19): siRNA sense strand
caaggagaauggcuaugug

SEQ ID NO: 300005 - RNA, 19 nt, Homo sapiens
  misc_RNA (1)...(19): siRNA sense strand
gccauacaguuguuggaaa

SEQ ID NO: 300006 - RNA, 19 nt, Homo sapiens
  misc_RNA (1)...(19): siRNA sense strand
gccaacagcaccaucauug

SEQ ID NO: 300007 - RNA, 19 nt, Homo sapiens
  misc_RNA (1)...(19): siRNA sense strand
gcucugaacguucuucuca

SEQ ID NO: 300008 - RNA, 19 nt, Homo sapiens
  misc_RNA (1)...(19): siRNA sense strand
gcaccuugccugacaaaca

SEQ ID NO: 300009 - RNA, 19 nt, Homo sapiens
  misc_RNA (1)...(19): siRNA sense strand
aaacaucagugugccguau

SEQ ID NO: 300010 - RNA, 19 nt, Homo sapiens
  misc_RNA (1)...(19): siRNA sense strand
uaucauccuuccucugaga

SEQ ID NO: 300011 - RNA, 19 nt, Homo sapiens
  misc_RNA (1)...(19): siRNA sense strand
gagcaagccauacaguugu

SEQ ID NO: 300012 - RNA, 19 nt, Homo sapiens
  misc_RNA (1)...(19): siRNA sense strand
ugggauaucuucuaaccau

SEQ ID NO: 300013 - RNA, 19 nt, Homo sapiens
  misc_RNA (1)...(19): siRNA sense strand
gcaccaucauugcauuuac

SEQ ID NO: 300014 - RNA, 19 nt, Homo sapiens
  misc_RNA (1)...(19): siRNA sense strand
ugucauauuuggauacaca

SEQ ID NO: 300015 - RNA, 19 nt, Homo sapiens
  misc_RNA (1)...(19): siRNA sense strand
ugagcaagccauacaguug

SEQ ID NO: 300016 - RNA, 19 nt, Homo sapiens
  misc_RNA (1)...(19): siRNA sense strand
caacagcaccaucauugca

SEQ ID NO: 300017 - RNA, 19 nt, Homo sapiens
  misc_RNA (1)...(19): siRNA sense strand
gagcacugagcaagccaua

SEQ ID NO: 300018 - RNA, 19 nt, Homo sapiens
  misc_RNA (1)...(19): siRNA sense strand
caauuccuguggacuuuca

SEQ ID NO: 300019 - RNA, 19 nt, Homo sapiens
  misc_RNA (1)...(19): siRNA sense strand
ggagggugcacgcuggaaa

SEQ ID NO: 300020 - RNA, 19 nt, Homo sapiens
  misc_RNA (1)...(19): siRNA sense strand
uugccucugugucauauuu

SEQ ID NO: 300021 - RNA, 19 nt, Homo sapiens
  misc_RNA (1)...(19): siRNA sense strand
cuacuuugccucuguguca

SEQ ID NO: 300022 - RNA, 19 nt, Homo sapiens
  misc_RNA (1)...(19): siRNA sense strand
ucaaggagaauggcuaugu

SEQ ID NO: 300023 - RNA, 19 nt, Homo sapiens
  misc_RNA (1)...(19): siRNA sense strand
cguccaagccuuaaacauc

SEQ ID NO: 300024 - RNA, 19 nt, Homo sapiens
  misc_RNA (1)...(19): siRNA sense strand
ccacccgccuguacgacuu

SEQ ID NO: 300025 - RNA, 19 nt, Homo sapiens
  misc_RNA (1)...(19): siRNA sense strand
acccugggauaucuucuaa

SEQ ID NO: 300026 - RNA, 19 nt, Homo sapiens
  misc_RNA (1)...(19): siRNA sense strand
cccaguacuucaaggagaa

SEQ ID NO: 300027 - RNA, 19 nt, Homo sapiens
  misc_RNA (1)...(19): siRNA sense strand
ucagauaccccaaggaauu

SEQ ID NO: 300028 - RNA, 19 nt, Homo sapiens
  misc_RNA (1)...(19): siRNA sense strand
cuuaucauccuuccucuga

SEQ ID NO: 300029 - RNA, 19 nt, Homo sapiens
  misc_RNA (1)...(19): siRNA sense strand
uguacgacuucaacuccua

SEQ ID NO: 300030 - RNA, 19 nt, Homo sapiens
  misc_RNA (1)...(19): siRNA sense strand
cccaaggaauuucagaagu

SEQ ID NO: 300031 - RNA, 19 nt, Homo sapiens
  misc_RNA (1)...(19): siRNA sense strand
ccauacaguuguuggaaaa

SEQ ID NO: 300032 - RNA, 19 nt, Homo sapiens
  misc_RNA (1)...(19): siRNA sense strand
ggauaucuucuaaccauac

SEQ ID NO: 300033 - RNA, 19 nt, Homo sapiens
  misc_RNA (1)...(19): siRNA sense strand
cuggugagguccccaaaua

SEQ ID NO: 300034 - RNA, 19 nt, Homo sapiens
  misc_RNA (1)...(19): siRNA sense strand
acagcaccaucauugcauu

SEQ ID NO: 300035 - RNA, 19 nt, Homo sapiens
  misc_RNA (1)...(19): siRNA sense strand
caccuugccugacaaacag

SEQ ID NO: 300036 - RNA, 19 nt, Homo sapiens
  misc_RNA (1)...(19): siRNA sense strand
ucugaacguucuucucauc

SEQ ID NO: 300037 - RNA, 19 nt, Homo sapiens
  misc_RNA (1)...(19): siRNA sense strand
ugaacguucuucucaucau

SEQ ID NO: 300038 - RNA, 19 nt, Homo sapiens
  misc_RNA (1)...(19): siRNA sense strand
aaacgucagccaguccuuu

SEQ ID NO: 300039 - RNA, 19 nt, Homo sapiens
  misc_RNA (1)...(19): siRNA sense strand
ggccaacagcaccaucauu

SEQ ID NO: 300040 - RNA, 19 nt, Homo sapiens
  misc_RNA (1)...(19): siRNA sense strand
aggaauuucagaaguugua

SEQ ID NO: 300041 - RNA, 19 nt, Homo sapiens
  misc_RNA (1)...(19): siRNA sense strand
ggaaaauccgccagagcua

SEQ ID NO: 300042 - RNA, 19 nt, Homo sapiens
  misc_RNA (1)...(19): siRNA sense strand
cagcaccaucauugcauuu

SEQ ID NO: 300043 - RNA, 19 nt, Homo sapiens
  misc_RNA (1)...(19): siRNA sense strand
ucugugucauauuuggaua

SEQ ID NO: 300044 - RNA, 19 nt, Homo sapiens
  misc_RNA (1)...(19): siRNA sense strand
ugacaccacccgccuguac

SEQ ID NO: 300045 - RNA, 19 nt, Homo sapiens
  misc_RNA (1)...(19): siRNA sense strand
ugagugcuuuggacgaucu

SEQ ID NO: 300046 - RNA, 19 nt, Homo sapiens
  misc_RNA (1)...(19): siRNA sense strand
ggaauuucagaaguuguau

SEQ ID NO: 300047 - RNA, 19 nt, Homo sapiens
  misc_RNA (1)...(19): siRNA sense strand
ggugagguccccaaauauu

SEQ ID NO: 300048 - RNA, 19 nt, Homo sapiens
  misc_RNA (1)...(19): siRNA sense strand
ugaaaacacuaagacaugu

SEQ ID NO: 300049 - RNA, 19 nt, Homo sapiens
  misc_RNA (1)...(19): siRNA sense strand
ccacagcgcccacuucuuu

SEQ ID NO: 300050 - RNA, 19 nt, Homo sapiens
  misc_RNA (1)...(19): siRNA sense strand
ggccaggaccggauacuua

SEQ ID NO: 300051 - RNA, 19 nt, Homo sapiens
  misc_RNA (1)...(19): siRNA sense strand
uagggacggucaugacuuu

SEQ ID NO: 300052 - RNA, 19 nt, Homo sapiens
  misc_RNA (1)...(19): siRNA sense strand
gcgcccacuucuuugaguu

SEQ ID NO: 300053 - RNA, 19 nt, Homo sapiens
  misc_RNA (1)...(19): siRNA sense strand
gccaggaccggauacuuau

SEQ ID NO: 300054 - RNA, 19 nt, Homo sapiens
  misc_RNA (1)...(19): siRNA sense strand
caagauagggacggucaug

SEQ ID NO: 300055 - RNA, 19 nt, Homo sapiens
  misc_RNA (1)...(19): siRNA sense strand
uccuggagcuggacacgaa

SEQ ID NO: 300056 - RNA, 19 nt, Homo sapiens
  misc_RNA (1)...(19): siRNA sense strand
gagcuggacacgaauuugc

SEQ ID NO: 300057 - RNA, 19 nt, Homo sapiens
  misc_RNA (1)...(19): siRNA sense strand
uuggaguccuggcagauug

SEQ ID NO: 300058 - RNA, 19 nt, Homo sapiens
  misc_RNA (1)...(19): siRNA sense strand
gauagggacggucaugacu

SEQ ID NO: 300059 - RNA, 19 nt, Homo sapiens
  misc_RNA (1)...(19): siRNA sense strand
ggagcuggacacgaauuug

SEQ ID NO: 300060 - RNA, 19 nt, Homo sapiens
  misc_RNA (1)...(19): siRNA sense strand
gaaagaaacuggauucacu

SEQ ID NO: 300061 - RNA, 19 nt, Homo sapiens
  misc_RNA (1)...(19): siRNA sense strand
gaaacuggauucacuagga

SEQ ID NO: 300062 - RNA, 19 nt, Homo sapiens
  misc_RNA (1)...(19): siRNA sense strand
aaacuuagccaccauauuu

SEQ ID NO: 300063 - RNA, 19 nt, Homo sapiens
  misc_RNA (1)...(19): siRNA sense strand
aaagaacucucaagcagua

SEQ ID NO: 300064 - RNA, 19 nt, Homo sapiens
  misc_RNA (1)...(19): siRNA sense strand
guacacagcuuucaucaac

SEQ ID NO: 300065 - RNA, 19 nt, Homo sapiens
  misc_RNA (1)...(19): siRNA sense strand
aagaaaggcuucccaauca

SEQ ID NO: 300066 - RNA, 19 nt, Homo sapiens
  misc_RNA (1)...(19): siRNA sense strand
caucaucgcuguugugcaa

SEQ ID NO: 300067 - RNA, 19 nt, Homo sapiens
  misc_RNA (1)...(19): siRNA sense strand
gaagucaucagacaaagaa

SEQ ID NO: 300068 - RNA, 19 nt, Homo sapiens
  misc_RNA (1)...(19): siRNA sense strand
gacaaagaauucucaguuc

SEQ ID NO: 300069 - RNA, 19 nt, Homo sapiens
  misc_RNA (1)...(19): siRNA sense strand
gcagaagucaucagacaaa

SEQ ID NO: 300070 - RNA, 19 nt, Homo sapiens
  misc_RNA (1)...(19): siRNA sense strand
acuagaagcuuuacaacuu

SEQ ID NO: 300071 - RNA, 19 nt, Homo sapiens
  misc_RNA (1)...(19): siRNA sense strand
aaagagagugagacaauua

SEQ ID NO: 300072 - RNA, 19 nt, Homo sapiens
  misc_RNA (1)...(19): siRNA sense strand
cgaaugacagggccuauaa

SEQ ID NO: 300073 - RNA, 19 nt, Homo sapiens
  misc_RNA (1)...(19): siRNA sense strand
cuagaagcuuuacaacuuu

SEQ ID NO: 300074 - RNA, 19 nt, Homo sapiens
  misc_RNA (1)...(19): siRNA sense strand
ucaccgaucuugaugacaa

SEQ ID NO: 300075 - RNA, 19 nt, Homo sapiens
  misc_RNA (1)...(19): siRNA sense strand
ccuugcagcuccucauaua

SEQ ID NO: 300076 - RNA, 19 nt, Homo sapiens
  misc_RNA (1)...(19): siRNA sense strand
acaaagaauucucaguuca

SEQ ID NO: 300077 - RNA, 19 nt, Homo sapiens
  misc_RNA (1)...(19): siRNA sense strand
gcccuuaucccaagucauu

SEQ ID NO: 300078 - RNA, 19 nt, Homo sapiens
  misc_RNA (1)...(19): siRNA sense strand
agacaaagaauucucaguu

SEQ ID NO: 300079 - RNA, 19 nt, Homo sapiens
  misc_RNA (1)...(19): siRNA sense strand
gacagggccuauaaacuca

SEQ ID NO: 300080 - RNA, 19 nt, Homo sapiens
  misc_RNA (1)...(19): siRNA sense strand
caagaggucacugggaaua

SEQ ID NO: 300081 - RNA, 19 nt, Homo sapiens
  misc_RNA (1)...(19): siRNA sense strand
gacccaaccugcugcacaa

SEQ ID NO: 300082 - RNA, 19 nt, Homo sapiens
  misc_RNA (1)...(19): siRNA sense strand
aaacuggauucacuaggaa

SEQ ID NO: 300083 - RNA, 19 nt, Homo sapiens
  misc_RNA (1)...(19): siRNA sense strand
gaucaccauucccaaagau

SEQ ID NO: 300084 - RNA, 19 nt, Homo sapiens
  misc_RNA (1)...(19): siRNA sense strand
ggaauuugaccgugggauu

SEQ ID NO: 300085 - RNA, 19 nt, Homo sapiens
  misc_RNA (1)...(19): siRNA sense strand
gcagagggacgagcagaaa

SEQ ID NO: 300086 - RNA, 19 nt, Homo sapiens
  misc_RNA (1)...(19): siRNA sense strand
ggaauaaaaugacaucucu

SEQ ID NO: 300087 - RNA, 19 nt, Homo sapiens
  misc_RNA (1)...(19): siRNA sense strand
uaagaaagaaacuggauuc

SEQ ID NO: 300088 - RNA, 19 nt, Homo sapiens
  misc_RNA (1)...(19): siRNA sense strand
gaauuugaccgugggauug

SEQ ID NO: 300089 - RNA, 19 nt, Homo sapiens
  misc_RNA (1)...(19): siRNA sense strand
aaagaauucucaguucaga

SEQ ID NO: 300090 - RNA, 19 nt, Homo sapiens
  misc_RNA (1)...(19): siRNA sense strand
aagcagaagucaucagaca

SEQ ID NO: 300091 - RNA, 19 nt, Homo sapiens
  misc_RNA (1)...(19): siRNA sense strand
cagcaaagaugggcaagag

SEQ ID NO: 300092 - RNA, 19 nt, Homo sapiens
  misc_RNA (1)...(19): siRNA sense strand
ugacagggccuauaaacuc

SEQ ID NO: 300093 - RNA, 19 nt, Homo sapiens
  misc_RNA (1)...(19): siRNA sense strand
gaaaggcuucccaaucauc

SEQ ID NO: 300094 - RNA, 19 nt, Homo sapiens
  misc_RNA (1)...(19): siRNA sense strand
ccaugucaguggauucuau

SEQ ID NO: 300095 - RNA, 19 nt, Homo sapiens
  misc_RNA (1)...(19): siRNA sense strand
gaaugacagggccuauaaa

SEQ ID NO: 300096 - RNA, 19 nt, Homo sapiens
  misc_RNA (1)...(19): siRNA sense strand
ggagcacaguguucaugau

SEQ ID NO: 300097 - RNA, 19 nt, Homo sapiens
  misc_RNA (1)...(19): siRNA sense strand
gagcacaguguucaugaug

SEQ ID NO: 300098 - RNA, 19 nt, Homo sapiens
  misc_RNA (1)...(19): siRNA sense strand
ccucagaaacaccgaauga

SEQ ID NO: 300099 - RNA, 19 nt, Homo sapiens
  misc_RNA (1)...(19): siRNA sense strand
agaggucacugggaauaaa

SEQ ID NO: 300100 - RNA, 19 nt, Homo sapiens
  misc_RNA (1)...(19): siRNA sense strand
ugaauccuauuuacagaca

SEQ ID NO: 300101 - RNA, 19 nt, Homo sapiens
  misc_RNA (1)...(19): siRNA sense strand
gaggagagcacggccauca

SEQ ID NO: 300102 - RNA, 19 nt, Homo sapiens
  misc_RNA (1)...(19): siRNA sense strand
ggagagcacggccaucauc

SEQ ID NO: 300103 - RNA, 19 nt, Homo sapiens
  misc_RNA (1)...(19): siRNA sense strand
caaagacaaagaauucauc

SEQ ID NO: 300104 - RNA, 19 nt, Homo sapiens
  misc_RNA (1)...(19): siRNA sense strand
aaagaaacuggauucacua

SEQ ID NO: 300105 - RNA, 19 nt, Homo sapiens
  misc_RNA (1)...(19): siRNA sense strand
agcaguaacucaucucuca

SEQ ID NO: 300106 - RNA, 19 nt, Homo sapiens
  misc_RNA (1)...(19): siRNA sense strand
gcgaaugacagggccuaua

SEQ ID NO: 300107 - RNA, 19 nt, Homo sapiens
  misc_RNA (1)...(19): siRNA sense strand
cugaugucguggacuauuu

SEQ ID NO: 300108 - RNA, 19 nt, Homo sapiens
  misc_RNA (1)...(19): siRNA sense strand
uggcuucccuccucccauu

SEQ ID NO: 300109 - RNA, 19 nt, Homo sapiens
  misc_RNA (1)...(19): siRNA sense strand
ggacaaaagagaaagaaau

SEQ ID NO: 300110 - RNA, 19 nt, Homo sapiens
  misc_RNA (1)...(19): siRNA sense strand
gagauaagaaacucagucu

SEQ ID NO: 300111 - RNA, 19 nt, Homo sapiens
  misc_RNA (1)...(19): siRNA sense strand
cagcucaaccucagaaaca

SEQ ID NO: 300112 - RNA, 19 nt, Homo sapiens
  misc_RNA (1)...(19): siRNA sense strand
ucagaucaccauucccaaa

SEQ ID NO: 300113 - RNA, 19 nt, Homo sapiens
  misc_RNA (1)...(19): siRNA sense strand
cguggacuauuuacucaga

SEQ ID NO: 300114 - RNA, 19 nt, Homo sapiens
  misc_RNA (1)...(19): siRNA sense strand
ucagaaacaccgaaugagu

SEQ ID NO: 300115 - RNA, 19 nt, Homo sapiens
  misc_RNA (1)...(19): siRNA sense strand
ugaugucguggacuauuua

SEQ ID NO: 300116 - RNA, 19 nt, Homo sapiens
  misc_RNA (1)...(19): siRNA sense strand
ggaggaggagcacaguguu

SEQ ID NO: 300117 - RNA, 19 nt, Homo sapiens
  misc_RNA (1)...(19): siRNA sense strand
gaggaggggugccauguca

SEQ ID NO: 300118 - RNA, 19 nt, Homo sapiens
  misc_RNA (1)...(19): siRNA sense strand
uaaacuuagccaccauauu

SEQ ID NO: 300119 - RNA, 19 nt, Homo sapiens
  misc_RNA (1)...(19): siRNA sense strand
uagaagcuuuacaacuuuc

SEQ ID NO: 300120 - RNA, 19 nt, Homo sapiens
  misc_RNA (1)...(19): siRNA sense strand
gcaagaggucacugggaau

SEQ ID NO: 300121 - RNA, 19 nt, Homo sapiens
  misc_RNA (1)...(19): siRNA sense strand
ggacuauuuacucagaaga

SEQ ID NO: 300122 - RNA, 19 nt, Homo sapiens
  misc_RNA (1)...(19): siRNA sense strand
cugaucagccuguuagaga

SEQ ID NO: 300123 - RNA, 19 nt, Homo sapiens
  misc_RNA (1)...(19): siRNA sense strand
gagacaauuacgugaggaa

SEQ ID NO: 300124 - RNA, 19 nt, Homo sapiens
  misc_RNA (1)...(19): siRNA sense strand
caaagaauucucaguucag

SEQ ID NO: 300125 - RNA, 19 nt, Homo sapiens
  misc_RNA (1)...(19): siRNA sense strand
acaagcagaagucaucaga

SEQ ID NO: 300126 - RNA, 19 nt, Homo sapiens
  misc_RNA (1)...(19): siRNA sense strand
agaaacaccgaaugaguca

SEQ ID NO: 300127 - RNA, 19 nt, Homo sapiens
  misc_RNA (1)...(19): siRNA sense strand
agaaaggcuucccaaucau

SEQ ID NO: 300128 - RNA, 19 nt, Homo sapiens
  misc_RNA (1)...(19): siRNA sense strand
gucguggacuauuuacuca

SEQ ID NO: 300129 - RNA, 19 nt, Homo sapiens
  misc_RNA (1)...(19): siRNA sense strand
gcacaagcagaagucauca

SEQ ID NO: 300130 - RNA, 19 nt, Homo sapiens
  misc_RNA (1)...(19): siRNA sense strand
gaggagcacaguguucaug

SEQ ID NO: 300131 - RNA, 19 nt, Homo sapiens
  misc_RNA (1)...(19): siRNA sense strand
gaggaggagcacaguguuc

SEQ ID NO: 300132 - RNA, 19 nt, Homo sapiens
  misc_RNA (1)...(19): siRNA sense strand
gacuauuuacucagaagaa

SEQ ID NO: 300133 - RNA, 19 nt, Homo sapiens
  misc_RNA (1)...(19): siRNA sense strand
aggaacagcugggcaccuu

SEQ ID NO: 300134 - RNA, 19 nt, Homo sapiens
  misc_RNA (1)...(19): siRNA sense strand
agaucaccauucccaaaga

SEQ ID NO: 300135 - RNA, 19 nt, Homo sapiens
  misc_RNA (1)...(19): siRNA sense strand
agagaccgauccugauguc

SEQ ID NO: 300136 - RNA, 19 nt, Homo sapiens
  misc_RNA (1)...(19): siRNA sense strand
cagcuuucaucaacacucu

SEQ ID NO: 300137 - RNA, 19 nt, Homo sapiens
  misc_RNA (1)...(19): siRNA sense strand
gcugucagaucaccauucc

SEQ ID NO: 300138 - RNA, 19 nt, Homo sapiens
  misc_RNA (1)...(19): siRNA sense strand
gucaucagacaaagaauuc

SEQ ID NO: 300139 - RNA, 19 nt, Homo sapiens
  misc_RNA (1)...(19): siRNA sense strand
caccuugcagcuccucaua

SEQ ID NO: 300140 - RNA, 19 nt, Homo sapiens
  misc_RNA (1)...(19): siRNA sense strand
uggauucuaucaccgaucu

SEQ ID NO: 300141 - RNA, 19 nt, Homo sapiens
  misc_RNA (1)...(19): siRNA sense strand
uuagagaccgauccugaug

SEQ ID NO: 300142 - RNA, 19 nt, Homo sapiens
  misc_RNA (1)...(19): siRNA sense strand
agaauucucaguucagagu

SEQ ID NO: 300143 - RNA, 19 nt, Homo sapiens
  misc_RNA (1)...(19): siRNA sense strand
uggauucacuaggaaagga

SEQ ID NO: 300144 - RNA, 19 nt, Homo sapiens
  misc_RNA (1)...(19): siRNA sense strand
gaaugcccuuaucccaagu

SEQ ID NO: 300145 - RNA, 19 nt, Homo sapiens
  misc_RNA (1)...(19): siRNA sense strand
aaaagagagugagacaauu

SEQ ID NO: 300146 - RNA, 19 nt, Homo sapiens
  misc_RNA (1)...(19): siRNA sense strand
gauucuaucaccgaucuug

SEQ ID NO: 300147 - RNA, 19 nt, Homo sapiens
  misc_RNA (1)...(19): siRNA sense strand
aacauggccuccagacagu

SEQ ID NO: 300148 - RNA, 19 nt, Homo sapiens
  misc_RNA (1)...(19): siRNA sense strand
cagaagucaucagacaaag

SEQ ID NO: 300149 - RNA, 19 nt, Homo sapiens
  misc_RNA (1)...(19): siRNA sense strand
ugacaacaucagcaaagau

SEQ ID NO: 300150 - RNA, 19 nt, Homo sapiens
  misc_RNA (1)...(19): siRNA sense strand
agagggacgagcagaaaga

SEQ ID NO: 300151 - RNA, 19 nt, Homo sapiens
  misc_RNA (1)...(19): siRNA sense strand
acacagcuuucaucaacac

SEQ ID NO: 300152 - RNA, 19 nt, Homo sapiens
  misc_RNA (1)...(19): siRNA sense strand
agucaucagacaaagaauu

SEQ ID NO: 300153 - RNA, 19 nt, Homo sapiens
  misc_RNA (1)...(19): siRNA sense strand
gaaagaaacuggauucacu

SEQ ID NO: 300154 - RNA, 19 nt, Homo sapiens
  misc_RNA (1)...(19): siRNA sense strand
gaaacuggauucacuagga

SEQ ID NO: 300155 - RNA, 19 nt, Homo sapiens
  misc_RNA (1)...(19): siRNA sense strand
aaacuuagccaccauauuu

SEQ ID NO: 300156 - RNA, 19 nt, Homo sapiens
  misc_RNA (1)...(19): siRNA sense strand
aaagaacucucaagcagua

SEQ ID NO: 300157 - RNA, 19 nt, Homo sapiens
  misc_RNA (1)...(19): siRNA sense strand
guacacagcuuucaucaac

SEQ ID NO: 300158 - RNA, 19 nt, Homo sapiens
  misc_RNA (1)...(19): siRNA sense strand
aagaaaggcuucccaauca

SEQ ID NO: 300159 - RNA, 19 nt, Homo sapiens
  misc_RNA (1)...(19): siRNA sense strand
caucaucgcuguugugcaa

SEQ ID NO: 300160 - RNA, 19 nt, Homo sapiens
  misc_RNA (1)...(19): siRNA sense strand
gaagucaucagacaaagaa

SEQ ID NO: 300161 - RNA, 19 nt, Homo sapiens
  misc_RNA (1)...(19): siRNA sense strand
gacaaagaauucucaguuc

SEQ ID NO: 300162 - RNA, 19 nt, Homo sapiens
  misc_RNA (1)...(19): siRNA sense strand
gcagaagucaucagacaaa

SEQ ID NO: 300163 - RNA, 19 nt, Homo sapiens
  misc_RNA (1)...(19): siRNA sense strand
acuagaagcuuuacaacuu

SEQ ID NO: 300164 - RNA, 19 nt, Homo sapiens
  misc_RNA (1)...(19): siRNA sense strand
aaagagagugagacaauua

SEQ ID NO: 300165 - RNA, 19 nt, Homo sapiens
  misc_RNA (1)...(19): siRNA sense strand
cgaaugacagggccuauaa

SEQ ID NO: 300166 - RNA, 19 nt, Homo sapiens
  misc_RNA (1)...(19): siRNA sense strand
cuagaagcuuuacaacuuu

SEQ ID NO: 300167 - RNA, 19 nt, Homo sapiens
  misc_RNA (1)...(19): siRNA sense strand
cggagaagcuuuacagagu

SEQ ID NO: 300168 - RNA, 19 nt, Homo sapiens
  misc_RNA (1)...(19): siRNA sense strand
ucaccgaucuugaugacaa

SEQ ID NO: 300169 - RNA, 19 nt, Homo sapiens
  misc_RNA (1)...(19): siRNA sense strand
ccuugcagcuccucauaua

SEQ ID NO: 300170 - RNA, 19 nt, Homo sapiens
  misc_RNA (1)...(19): siRNA sense strand
acaaagaauucucaguuca

SEQ ID NO: 300171 - RNA, 19 nt, Homo sapiens
  misc_RNA (1)...(19): siRNA sense strand
ggagggaggcauucaucua

SEQ ID NO: 300172 - RNA, 19 nt, Homo sapiens
  misc_RNA (1)...(19): siRNA sense strand
gcccuuaucccaagucauu

SEQ ID NO: 300173 - RNA, 19 nt, Homo sapiens
  misc_RNA (1)...(19): siRNA sense strand
agacaaagaauucucaguu

SEQ ID NO: 300174 - RNA, 19 nt, Homo sapiens
  misc_RNA (1)...(19): siRNA sense strand
gacagggccuauaaacuca

SEQ ID NO: 300175 - RNA, 19 nt, Homo sapiens
  misc_RNA (1)...(19): siRNA sense strand
caagaggucacugggaaua

SEQ ID NO: 300176 - RNA, 19 nt, Homo sapiens
  misc_RNA (1)...(19): siRNA sense strand
gacccaaccugcugcacaa

SEQ ID NO: 300177 - RNA, 19 nt, Homo sapiens
  misc_RNA (1)...(19): siRNA sense strand
aaacuggauucacuaggaa

SEQ ID NO: 300178 - RNA, 19 nt, Homo sapiens
  misc_RNA (1)...(19): siRNA sense strand
ggaauuugaccgugggauu

SEQ ID NO: 300179 - RNA, 19 nt, Homo sapiens
  misc_RNA (1)...(19): siRNA sense strand
gaucaccauucccaaagau

SEQ ID NO: 300180 - RNA, 19 nt, Homo sapiens
  misc_RNA (1)...(19): siRNA sense strand
gcagagggacgagcagaaa

SEQ ID NO: 300181 - RNA, 19 nt, Homo sapiens
  misc_RNA (1)...(19): siRNA sense strand
ggaauaaaaugacaucucu

SEQ ID NO: 300182 - RNA, 19 nt, Homo sapiens
  misc_RNA (1)...(19): siRNA sense strand
uaagaaagaaacuggauuc

SEQ ID NO: 300183 - RNA, 19 nt, Homo sapiens
  misc_RNA (1)...(19): siRNA sense strand
gaauuugaccgugggauug

SEQ ID NO: 300184 - RNA, 19 nt, Homo sapiens
  misc_RNA (1)...(19): siRNA sense strand
aaagaauucucaguucaga

SEQ ID NO: 300185 - RNA, 19 nt, Homo sapiens
  misc_RNA (1)...(19): siRNA sense strand
aagcagaagucaucagaca

SEQ ID NO: 300186 - RNA, 19 nt, Homo sapiens
  misc_RNA (1)...(19): siRNA sense strand
cagcaaagaugggcaagag

SEQ ID NO: 300187 - RNA, 19 nt, Homo sapiens
  misc_RNA (1)...(19): siRNA sense strand
ugacagggccuauaaacuc

SEQ ID NO: 300188 - RNA, 19 nt, Homo sapiens
  misc_RNA (1)...(19): siRNA sense strand
gaaaggcuucccaaucauc

SEQ ID NO: 300189 - RNA, 19 nt, Homo sapiens
  misc_RNA (1)...(19): siRNA sense strand
ccaugucaguggauucuau

SEQ ID NO: 300190 - RNA, 19 nt, Homo sapiens
  misc_RNA (1)...(19): siRNA sense strand
gaaugacagggccuauaaa

SEQ ID NO: 300191 - RNA, 19 nt, Homo sapiens
  misc_RNA (1)...(19): siRNA sense strand
ggagcacaguguucaugau

SEQ ID NO: 300192 - RNA, 19 nt, Homo sapiens
  misc_RNA (1)...(19): siRNA sense strand
gagcacaguguucaugaug

SEQ ID NO: 300193 - RNA, 19 nt, Homo sapiens
  misc_RNA (1)...(19): siRNA sense strand
ccucagaaacaccgaauga

SEQ ID NO: 300194 - RNA, 19 nt, Homo sapiens
  misc_RNA (1)...(19): siRNA sense strand
agaggucacugggaauaaa

SEQ ID NO: 300195 - RNA, 19 nt, Homo sapiens
  misc_RNA (1)...(19): siRNA sense strand
ugaauccuauuuacagaca

SEQ ID NO: 300196 - RNA, 19 nt, Homo sapiens
  misc_RNA (1)...(19): siRNA sense strand
caaagucaagggaaaguuc

SEQ ID NO: 300197 - RNA, 19 nt, Homo sapiens
  misc_RNA (1)...(19): siRNA sense strand
gaggagagcacggccauca

SEQ ID NO: 300198 - RNA, 19 nt, Homo sapiens
  misc_RNA (1)...(19): siRNA sense strand
ggagagcacggccaucauc

SEQ ID NO: 300199 - RNA, 19 nt, Homo sapiens
  misc_RNA (1)...(19): siRNA sense strand
caaagacaaagaauucauc

SEQ ID NO: 300200 - RNA, 19 nt, Homo sapiens
  misc_RNA (1)...(19): siRNA sense strand
agcaguaacucaucucuca

SEQ ID NO: 300201 - RNA, 19 nt, Homo sapiens
  misc_RNA (1)...(19): siRNA sense strand
aaagaaacuggauucacua

SEQ ID NO: 300202 - RNA, 19 nt, Homo sapiens
  misc_RNA (1)...(19): siRNA sense strand
gcgaaugacagggccuaua

SEQ ID NO: 300203 - RNA, 19 nt, Homo sapiens
  misc_RNA (1)...(19): siRNA sense strand
cugaugucguggacuauuu

SEQ ID NO: 300204 - RNA, 19 nt, Homo sapiens
  misc_RNA (1)...(19): siRNA sense strand
uggcuucccuccucccauu

SEQ ID NO: 300205 - RNA, 19 nt, Homo sapiens
  misc_RNA (1)...(19): siRNA sense strand
ggacaaaagagaaagaaau

SEQ ID NO: 300206 - RNA, 19 nt, Homo sapiens
  misc_RNA (1)...(19): siRNA sense strand
gagauaagaaacucagucu

SEQ ID NO: 300207 - RNA, 19 nt, Homo sapiens
  misc_RNA (1)...(19): siRNA sense strand
cagcucaaccucagaaaca

SEQ ID NO: 300208 - RNA, 19 nt, Homo sapiens
  misc_RNA (1)...(19): siRNA sense strand
ucagaucaccauucccaaa

SEQ ID NO: 300209 - RNA, 19 nt, Homo sapiens
  misc_RNA (1)...(19): siRNA sense strand
cguggacuauuuacucaga

SEQ ID NO: 300210 - RNA, 19 nt, Homo sapiens
  misc_RNA (1)...(19): siRNA sense strand
ucagaaacaccgaaugagu

SEQ ID NO: 300211 - RNA, 19 nt, Homo sapiens
  misc_RNA (1)...(19): siRNA sense strand
ugaugucguggacuauuua

SEQ ID NO: 300212 - RNA, 19 nt, Homo sapiens
  misc_RNA (1)...(19): siRNA sense strand
ggaggaggagcacaguguu

SEQ ID NO: 300213 - RNA, 19 nt, Homo sapiens
  misc_RNA (1)...(19): siRNA sense strand
gagggaggcauucaucuac

SEQ ID NO: 300214 - RNA, 19 nt, Homo sapiens
  misc_RNA (1)...(19): siRNA sense strand
gaggaggggugccauguca

SEQ ID NO: 300215 - RNA, 19 nt, Homo sapiens
  misc_RNA (1)...(19): siRNA sense strand
uaaacuuagccaccauauu

SEQ ID NO: 300216 - RNA, 19 nt, Homo sapiens
  misc_RNA (1)...(19): siRNA sense strand
uagaagcuuuacaacuuuc

SEQ ID NO: 300217 - RNA, 19 nt, Homo sapiens
  misc_RNA (1)...(19): siRNA sense strand
gcaagaggucacugggaau

SEQ ID NO: 300218 - RNA, 19 nt, Homo sapiens
  misc_RNA (1)...(19): siRNA sense strand
ggacuauuuacucagaaga

SEQ ID NO: 300219 - RNA, 19 nt, Homo sapiens
  misc_RNA (1)...(19): siRNA sense strand
cugaucagccuguuagaga

SEQ ID NO: 300220 - RNA, 19 nt, Homo sapiens
  misc_RNA (1)...(19): siRNA sense strand
gagacaauuacgugaggaa

SEQ ID NO: 300221 - RNA, 19 nt, Homo sapiens
  misc_RNA (1)...(19): siRNA sense strand
caaagaauucucaguucag

SEQ ID NO: 300222 - RNA, 19 nt, Homo sapiens
  misc_RNA (1)...(19): siRNA sense strand
acaagcagaagucaucaga

SEQ ID NO: 300223 - RNA, 19 nt, Homo sapiens
  misc_RNA (1)...(19): siRNA sense strand
agaaacaccgaaugaguca

SEQ ID NO: 300224 - RNA, 19 nt, Homo sapiens
  misc_RNA (1)...(19): siRNA sense strand
agaaaggcuucccaaucau

SEQ ID NO: 300225 - RNA, 19 nt, Homo sapiens
  misc_RNA (1)...(19): siRNA sense strand
gucguggacuauuuacuca

SEQ ID NO: 300226 - RNA, 19 nt, Homo sapiens
  misc_RNA (1)...(19): siRNA sense strand
gcacaagcagaagucauca

SEQ ID NO: 300227 - RNA, 19 nt, Homo sapiens
  misc_RNA (1)...(19): siRNA sense strand
gaggagcacaguguucaug

SEQ ID NO: 300228 - RNA, 19 nt, Homo sapiens
  misc_RNA (1)...(19): siRNA sense strand
gaggaggagcacaguguuc

SEQ ID NO: 300229 - RNA, 19 nt, Homo sapiens
  misc_RNA (1)...(19): siRNA sense strand
ggaggcauucaucuacaga

SEQ ID NO: 300230 - RNA, 19 nt, Homo sapiens
  misc_RNA (1)...(19): siRNA sense strand
gacuauuuacucagaagaa

SEQ ID NO: 300231 - RNA, 19 nt, Homo sapiens
  misc_RNA (1)...(19): siRNA sense strand
aggaacagcugggcaccuu

SEQ ID NO: 300232 - RNA, 19 nt, Homo sapiens
  misc_RNA (1)...(19): siRNA sense strand
gcugucagaucaccauucc

SEQ ID NO: 300233 - RNA, 19 nt, Homo sapiens
  misc_RNA (1)...(19): siRNA sense strand
agagaccgauccugauguc

SEQ ID NO: 300234 - RNA, 19 nt, Homo sapiens
  misc_RNA (1)...(19): siRNA sense strand
cagcuuucaucaacacucu

SEQ ID NO: 300235 - RNA, 19 nt, Homo sapiens
  misc_RNA (1)...(19): siRNA sense strand
agaucaccauucccaaaga

SEQ ID NO: 300236 - RNA, 19 nt, Homo sapiens
  misc_RNA (1)...(19): siRNA sense strand
gucaucagacaaagaauuc

SEQ ID NO: 300237 - RNA, 19 nt, Homo sapiens
  misc_RNA (1)...(19): siRNA sense strand
gcucggagaagcuuuacag

SEQ ID NO: 300238 - RNA, 19 nt, Homo sapiens
  misc_RNA (1)...(19): siRNA sense strand
gggaggcauucaucuacag

SEQ ID NO: 300239 - RNA, 19 nt, Homo sapiens
  misc_RNA (1)...(19): siRNA sense strand
caccuugcagcuccucaua

SEQ ID NO: 300240 - RNA, 19 nt, Homo sapiens
  misc_RNA (1)...(19): siRNA sense strand
uggauucuaucaccgaucu

SEQ ID NO: 300241 - RNA, 19 nt, Homo sapiens
  misc_RNA (1)...(19): siRNA sense strand
gaaugcccuuaucccaagu

SEQ ID NO: 300242 - RNA, 19 nt, Homo sapiens
  misc_RNA (1)...(19): siRNA sense strand
uuagagaccgauccugaug

SEQ ID NO: 300243 - RNA, 19 nt, Homo sapiens
  misc_RNA (1)...(19): siRNA sense strand
agaauucucaguucagagu

SEQ ID NO: 300244 - RNA, 19 nt, Homo sapiens
  misc_RNA (1)...(19): siRNA sense strand
aaaagagagugagacaauu

SEQ ID NO: 300245 - RNA, 19 nt, Homo sapiens
  misc_RNA (1)...(19): siRNA sense strand
uggauucacuaggaaagga

SEQ ID NO: 300246 - RNA, 19 nt, Homo sapiens
  misc_RNA (1)...(19): siRNA sense strand
gauucuaucaccgaucuug

SEQ ID NO: 300247 - RNA, 19 nt, Homo sapiens
  misc_RNA (1)...(19): siRNA sense strand
aacauggccuccagacagu

SEQ ID NO: 300248 - RNA, 19 nt, Homo sapiens
  misc_RNA (1)...(19): siRNA sense strand
caucuacagacuccaacaa

SEQ ID NO: 300249 - RNA, 19 nt, Homo sapiens
  misc_RNA (1)...(19): siRNA sense strand
agagggacgagcagaaaga

SEQ ID NO: 300250 - RNA, 19 nt, Homo sapiens
  misc_RNA (1)...(19): siRNA sense strand
cagaagucaucagacaaag

SEQ ID NO: 300251 - RNA, 19 nt, Homo sapiens
  misc_RNA (1)...(19): siRNA sense strand
ugacaacaucagcaaagau

SEQ ID NO: 300252 - RNA, 19 nt, Homo sapiens
  misc_RNA (1)...(19): siRNA sense strand
acacagcuuucaucaacac

SEQ ID NO: 300253 - RNA, 19 nt, Homo sapiens
  misc_RNA (1)...(19): siRNA sense strand
gaaagaaacuggauucacu

SEQ ID NO: 300254 - RNA, 19 nt, Homo sapiens
  misc_RNA (1)...(19): siRNA sense strand
gaaacuggauucacuagga

SEQ ID NO: 300255 - RNA, 19 nt, Homo sapiens
  misc_RNA (1)...(19): siRNA sense strand
aaacuuagccaccauauuu

SEQ ID NO: 300256 - RNA, 19 nt, Homo sapiens
  misc_RNA (1)...(19): siRNA sense strand
aaagaacucucaagcagua

SEQ ID NO: 300257 - RNA, 19 nt, Homo sapiens
  misc_RNA (1)...(19): siRNA sense strand
guacacagcuuucaucaac

SEQ ID NO: 300258 - RNA, 19 nt, Homo sapiens
  misc_RNA (1)...(19): siRNA sense strand
aagaaaggcuucccaauca

SEQ ID NO: 300259 - RNA, 19 nt, Homo sapiens
  misc_RNA (1)...(19): siRNA sense strand
caucaucgcuguugugcaa

SEQ ID NO: 300260 - RNA, 19 nt, Homo sapiens
  misc_RNA (1)...(19): siRNA sense strand
gaagucaucagacaaagaa

SEQ ID NO: 300261 - RNA, 19 nt, Homo sapiens
  misc_RNA (1)...(19): siRNA sense strand
gacaaagaauucucaguuc

SEQ ID NO: 300262 - RNA, 19 nt, Homo sapiens
  misc_RNA (1)...(19): siRNA sense strand
gcagaagucaucagacaaa

SEQ ID NO: 300263 - RNA, 19 nt, Homo sapiens
  misc_RNA (1)...(19): siRNA sense strand
acuagaagcuuuacaacuu

SEQ ID NO: 300264 - RNA, 19 nt, Homo sapiens
  misc_RNA (1)...(19): siRNA sense strand
aaagagagugagacaauua

SEQ ID NO: 300265 - RNA, 19 nt, Homo sapiens
  misc_RNA (1)...(19): siRNA sense strand
cgaaugacagggccuauaa

SEQ ID NO: 300266 - RNA, 19 nt, Homo sapiens
  misc_RNA (1)...(19): siRNA sense strand
cuagaagcuuuacaacuuu

SEQ ID NO: 300267 - RNA, 19 nt, Homo sapiens
  misc_RNA (1)...(19): siRNA sense strand
cggagaagcuuuacagagu

SEQ ID NO: 300268 - RNA, 19 nt, Homo sapiens
  misc_RNA (1)...(19): siRNA sense strand
ucaccgaucuugaugacaa

SEQ ID NO: 300269 - RNA, 19 nt, Homo sapiens
  misc_RNA (1)...(19): siRNA sense strand
ccuugcagcuccucauaua

SEQ ID NO: 300270 - RNA, 19 nt, Homo sapiens
  misc_RNA (1)...(19): siRNA sense strand
acaaagaauucucaguuca

SEQ ID NO: 300271 - RNA, 19 nt, Homo sapiens
  misc_RNA (1)...(19): siRNA sense strand
ggagggaggcauucaucua

SEQ ID NO: 300272 - RNA, 19 nt, Homo sapiens
  misc_RNA (1)...(19): siRNA sense strand
gcccuuaucccaagucauu

SEQ ID NO: 300273 - RNA, 19 nt, Homo sapiens
  misc_RNA (1)...(19): siRNA sense strand
agacaaagaauucucaguu

SEQ ID NO: 300274 - RNA, 19 nt, Homo sapiens
  misc_RNA (1)...(19): siRNA sense strand
gacagggccuauaaacuca

SEQ ID NO: 300275 - RNA, 19 nt, Homo sapiens
  misc_RNA (1)...(19): siRNA sense strand
caagaggucacugggaaua

SEQ ID NO: 300276 - RNA, 19 nt, Homo sapiens
  misc_RNA (1)...(19): siRNA sense strand
gacccaaccugcugcacaa

SEQ ID NO: 300277 - RNA, 19 nt, Homo sapiens
  misc_RNA (1)...(19): siRNA sense strand
aaacuggauucacuaggaa

SEQ ID NO: 300278 - RNA, 19 nt, Homo sapiens
  misc_RNA (1)...(19): siRNA sense strand
ggaauuugaccgugggauu

SEQ ID NO: 300279 - RNA, 19 nt, Homo sapiens
  misc_RNA (1)...(19): siRNA sense strand
gaucaccauucccaaagau

SEQ ID NO: 300280 - RNA, 19 nt, Homo sapiens
  misc_RNA (1)...(19): siRNA sense strand
gcagagggacgagcagaaa

SEQ ID NO: 300281 - RNA, 19 nt, Homo sapiens
  misc_RNA (1)...(19): siRNA sense strand
ggaauaaaaugacaucucu

SEQ ID NO: 300282 - RNA, 19 nt, Homo sapiens
  misc_RNA (1)...(19): siRNA sense strand
uaagaaagaaacuggauuc

SEQ ID NO: 300283 - RNA, 19 nt, Homo sapiens
  misc_RNA (1)...(19): siRNA sense strand
gaauuugaccgugggauug

SEQ ID NO: 300284 - RNA, 19 nt, Homo sapiens
  misc_RNA (1)...(19): siRNA sense strand
aaagaauucucaguucaga

SEQ ID NO: 300285 - RNA, 19 nt, Homo sapiens
  misc_RNA (1)...(19): siRNA sense strand
aagcagaagucaucagaca

SEQ ID NO: 300286 - RNA, 19 nt, Homo sapiens
  misc_RNA (1)...(19): siRNA sense strand
cagcaaagaugggcaagag

SEQ ID NO: 300287 - RNA, 19 nt, Homo sapiens
  misc_RNA (1)...(19): siRNA sense strand
ugacagggccuauaaacuc

SEQ ID NO: 300288 - RNA, 19 nt, Homo sapiens
  misc_RNA (1)...(19): siRNA sense strand
gaaaggcuucccaaucauc

SEQ ID NO: 300289 - RNA, 19 nt, Homo sapiens
  misc_RNA (1)...(19): siRNA sense strand
ccaugucaguggauucuau

SEQ ID NO: 300290 - RNA, 19 nt, Homo sapiens
  misc_RNA (1)...(19): siRNA sense strand
gaaugacagggccuauaaa

SEQ ID NO: 300291 - RNA, 19 nt, Homo sapiens
  misc_RNA (1)...(19): siRNA sense strand
ggagcacaguguucaugau

SEQ ID NO: 300292 - RNA, 19 nt, Homo sapiens
  misc_RNA (1)...(19): siRNA sense strand
gagcacaguguucaugaug

SEQ ID NO: 300293 - RNA, 19 nt, Homo sapiens
  misc_RNA (1)...(19): siRNA sense strand
ccucagaaacaccgaauga

SEQ ID NO: 300294 - RNA, 19 nt, Homo sapiens
  misc_RNA (1)...(19): siRNA sense strand
agaggucacugggaauaaa

SEQ ID NO: 300295 - RNA, 19 nt, Homo sapiens
  misc_RNA (1)...(19): siRNA sense strand
ugaauccuauuuacagaca

SEQ ID NO: 300296 - RNA, 19 nt, Homo sapiens
  misc_RNA (1)...(19): siRNA sense strand
caaagucaagggaaaguuc

SEQ ID NO: 300297 - RNA, 19 nt, Homo sapiens
  misc_RNA (1)...(19): siRNA sense strand
gaggagagcacggccauca

SEQ ID NO: 300298 - RNA, 19 nt, Homo sapiens
  misc_RNA (1)...(19): siRNA sense strand
ggagagcacggccaucauc

SEQ ID NO: 300299 - RNA, 19 nt, Homo sapiens
  misc_RNA (1)...(19): siRNA sense strand
agcaguaacucaucucuca

SEQ ID NO: 300300 - RNA, 19 nt, Homo sapiens
  misc_RNA (1)...(19): siRNA sense strand
caaagacaaagaauucauc

SEQ ID NO: 300301 - RNA, 19 nt, Homo sapiens
  misc_RNA (1)...(19): siRNA sense strand
aaagaaacuggauucacua

SEQ ID NO: 300302 - RNA, 19 nt, Homo sapiens
  misc_RNA (1)...(19): siRNA sense strand
gcgaaugacagggccuaua

SEQ ID NO: 300303 - RNA, 19 nt, Homo sapiens
  misc_RNA (1)...(19): siRNA sense strand
cugaugucguggacuauuu

SEQ ID NO: 300304 - RNA, 19 nt, Homo sapiens
  misc_RNA (1)...(19): siRNA sense strand
uggcuucccuccucccauu

SEQ ID NO: 300305 - RNA, 19 nt, Homo sapiens
  misc_RNA (1)...(19): siRNA sense strand
ggacaaaagagaaagaaau

SEQ ID NO: 300306 - RNA, 19 nt, Homo sapiens
  misc_RNA (1)...(19): siRNA sense strand
gagauaagaaacucagucu

SEQ ID NO: 300307 - RNA, 19 nt, Homo sapiens
  misc_RNA (1)...(19): siRNA sense strand
cagcucaaccucagaaaca

SEQ ID NO: 300308 - RNA, 19 nt, Homo sapiens
  misc_RNA (1)...(19): siRNA sense strand
ucagaucaccauucccaaa

SEQ ID NO: 300309 - RNA, 19 nt, Homo sapiens
  misc_RNA (1)...(19): siRNA sense strand
cguggacuauuuacucaga

SEQ ID NO: 300310 - RNA, 19 nt, Homo sapiens
  misc_RNA (1)...(19): siRNA sense strand
ucagaaacaccgaaugagu

SEQ ID NO: 300311 - RNA, 19 nt, Homo sapiens
  misc_RNA (1)...(19): siRNA sense strand
ugaugucguggacuauuua

SEQ ID NO: 300312 - RNA, 19 nt, Homo sapiens
  misc_RNA (1)...(19): siRNA sense strand
ggaggaggagcacaguguu

SEQ ID NO: 300313 - RNA, 19 nt, Homo sapiens
  misc_RNA (1)...(19): siRNA sense strand
gagggaggcauucaucuac

SEQ ID NO: 300314 - RNA, 19 nt, Homo sapiens
  misc_RNA (1)...(19): siRNA sense strand
gaggaggggugccauguca

SEQ ID NO: 300315 - RNA, 19 nt, Homo sapiens
  misc_RNA (1)...(19): siRNA sense strand
uaaacuuagccaccauauu

SEQ ID NO: 300316 - RNA, 19 nt, Homo sapiens
  misc_RNA (1)...(19): siRNA sense strand
uagaagcuuuacaacuuuc

SEQ ID NO: 300317 - RNA, 19 nt, Homo sapiens
  misc_RNA (1)...(19): siRNA sense strand
gcaagaggucacugggaau

SEQ ID NO: 300318 - RNA, 19 nt, Homo sapiens
  misc_RNA (1)...(19): siRNA sense strand
ggacuauuuacucagaaga

SEQ ID NO: 300319 - RNA, 19 nt, Homo sapiens
  misc_RNA (1)...(19): siRNA sense strand
cugaucagccuguuagaga

SEQ ID NO: 300320 - RNA, 19 nt, Homo sapiens
  misc_RNA (1)...(19): siRNA sense strand
gagacaauuacgugaggaa

SEQ ID NO: 300321 - RNA, 19 nt, Homo sapiens
  misc_RNA (1)...(19): siRNA sense strand
caaagaauucucaguucag

SEQ ID NO: 300322 - RNA, 19 nt, Homo sapiens
  misc_RNA (1)...(19): siRNA sense strand
acaagcagaagucaucaga

SEQ ID NO: 300323 - RNA, 19 nt, Homo sapiens
  misc_RNA (1)...(19): siRNA sense strand
agaaacaccgaaugaguca

SEQ ID NO: 300324 - RNA, 19 nt, Homo sapiens
  misc_RNA (1)...(19): siRNA sense strand
agaaaggcuucccaaucau

SEQ ID NO: 300325 - RNA, 19 nt, Homo sapiens
  misc_RNA (1)...(19): siRNA sense strand
gucguggacuauuuacuca

SEQ ID NO: 300326 - RNA, 19 nt, Homo sapiens
  misc_RNA (1)...(19): siRNA sense strand
gcacaagcagaagucauca

SEQ ID NO: 300327 - RNA, 19 nt, Homo sapiens
  misc_RNA (1)...(19): siRNA sense strand
gaggagcacaguguucaug

SEQ ID NO: 300328 - RNA, 19 nt, Homo sapiens
  misc_RNA (1)...(19): siRNA sense strand
gaggaggagcacaguguuc

SEQ ID NO: 300329 - RNA, 19 nt, Homo sapiens
  misc_RNA (1)...(19): siRNA sense strand
ggaggcauucaucuacaga

SEQ ID NO: 300330 - RNA, 19 nt, Homo sapiens
  misc_RNA (1)...(19): siRNA sense strand
gacuauuuacucagaagaa

SEQ ID NO: 300331 - RNA, 19 nt, Homo sapiens
  misc_RNA (1)...(19): siRNA sense strand
aggaacagcugggcaccuu

SEQ ID NO: 300332 - RNA, 19 nt, Homo sapiens
  misc_RNA (1)...(19): siRNA sense strand
cagcuuucaucaacacucu

SEQ ID NO: 300333 - RNA, 19 nt, Homo sapiens
  misc_RNA (1)...(19): siRNA sense strand
agagaccgauccugauguc

SEQ ID NO: 300334 - RNA, 19 nt, Homo sapiens
  misc_RNA (1)...(19): siRNA sense strand
gcugucagaucaccauucc

SEQ ID NO: 300335 - RNA, 19 nt, Homo sapiens
  misc_RNA (1)...(19): siRNA sense strand
agaucaccauucccaaaga

SEQ ID NO: 300336 - RNA, 19 nt, Homo sapiens
  misc_RNA (1)...(19): siRNA sense strand
gucaucagacaaagaauuc

SEQ ID NO: 300337 - RNA, 19 nt, Homo sapiens
  misc_RNA (1)...(19): siRNA sense strand
gcucggagaagcuuuacag

SEQ ID NO: 300338 - RNA, 19 nt, Homo sapiens
  misc_RNA (1)...(19): siRNA sense strand
gggaggcauucaucuacag

SEQ ID NO: 300339 - RNA, 19 nt, Homo sapiens
  misc_RNA (1)...(19): siRNA sense strand
caccuugcagcuccucaua

SEQ ID NO: 300340 - RNA, 19 nt, Homo sapiens
  misc_RNA (1)...(19): siRNA sense strand
uggauucuaucaccgaucu

SEQ ID NO: 300341 - RNA, 19 nt, Homo sapiens
  misc_RNA (1)...(19): siRNA sense strand
uuagagaccgauccugaug

SEQ ID NO: 300342 - RNA, 19 nt, Homo sapiens
  misc_RNA (1)...(19): siRNA sense strand
agaauucucaguucagagu

SEQ ID NO: 300343 - RNA, 19 nt, Homo sapiens
  misc_RNA (1)...(19): siRNA sense strand
uggauucacuaggaaagga

SEQ ID NO: 300344 - RNA, 19 nt, Homo sapiens
  misc_RNA (1)...(19): siRNA sense strand
gaaugcccuuaucccaagu

SEQ ID NO: 300345 - RNA, 19 nt, Homo sapiens
  misc_RNA (1)...(19): siRNA sense strand
aaaagagagugagacaauu

SEQ ID NO: 300346 - RNA, 19 nt, Homo sapiens
  misc_RNA (1)...(19): siRNA sense strand
gauucuaucaccgaucuug

SEQ ID NO: 300347 - RNA, 19 nt, Homo sapiens
  misc_RNA (1)...(19): siRNA sense strand
agagggacgagcagaaaga

SEQ ID NO: 300348 - RNA, 19 nt, Homo sapiens
  misc_RNA (1)...(19): siRNA sense strand
caucuacagacuccaacaa

SEQ ID NO: 300349 - RNA, 19 nt, Homo sapiens
  misc_RNA (1)...(19): siRNA sense strand
cagaagucaucagacaaag

SEQ ID NO: 300350 - RNA, 19 nt, Homo sapiens
  misc_RNA (1)...(19): siRNA sense strand
ugacaacaucagcaaagau

SEQ ID NO: 300351 - RNA, 19 nt, Homo sapiens
  misc_RNA (1)...(19): siRNA sense strand
acacagcuuucaucaacac

SEQ ID NO: 300352 - RNA, 19 nt, Homo sapiens
  misc_RNA (1)...(19): siRNA sense strand
aacauggccuccagacagu

SEQ ID NO: 300353 - RNA, 19 nt, Homo sapiens
  misc_RNA (1)...(19): siRNA sense strand
gaaagaaacuggauucacu

SEQ ID NO: 300354 - RNA, 19 nt, Homo sapiens
  misc_RNA (1)...(19): siRNA sense strand
gaaacuggauucacuagga

SEQ ID NO: 300355 - RNA, 19 nt, Homo sapiens
  misc_RNA (1)...(19): siRNA sense strand
aaacuuagccaccauauuu

SEQ ID NO: 300356 - RNA, 19 nt, Homo sapiens
  misc_RNA (1)...(19): siRNA sense strand
aaagaacucucaagcagua

SEQ ID NO: 300357 - RNA, 19 nt, Homo sapiens
  misc_RNA (1)...(19): siRNA sense strand
guacacagcuuucaucaac

SEQ ID NO: 300358 - RNA, 19 nt, Homo sapiens
  misc_RNA (1)...(19): siRNA sense strand
aagaaaggcuucccaauca

SEQ ID NO: 300359 - RNA, 19 nt, Homo sapiens
  misc_RNA (1)...(19): siRNA sense strand
caucaucgcuguugugcaa

SEQ ID NO: 300360 - RNA, 19 nt, Homo sapiens
  misc_RNA (1)...(19): siRNA sense strand
gaagucaucagacaaagaa

SEQ ID NO: 300361 - RNA, 19 nt, Homo sapiens
  misc_RNA (1)...(19): siRNA sense strand
gacaaagaauucucaguuc

SEQ ID NO: 300362 - RNA, 19 nt, Homo sapiens
  misc_RNA (1)...(19): siRNA sense strand
gcagaagucaucagacaaa

SEQ ID NO: 300363 - RNA, 19 nt, Homo sapiens
  misc_RNA (1)...(19): siRNA sense strand
acuagaagcuuuacaacuu

SEQ ID NO: 300364 - RNA, 19 nt, Homo sapiens
  misc_RNA (1)...(19): siRNA sense strand
aaagagagugagacaauua

SEQ ID NO: 300365 - RNA, 19 nt, Homo sapiens
  misc_RNA (1)...(19): siRNA sense strand
cgaaugacagggccuauaa

SEQ ID NO: 300366 - RNA, 19 nt, Homo sapiens
  misc_RNA (1)...(19): siRNA sense strand
cuagaagcuuuacaacuuu

SEQ ID NO: 300367 - RNA, 19 nt, Homo sapiens
  misc_RNA (1)...(19): siRNA sense strand
cggagaagcuuuacagagu

SEQ ID NO: 300368 - RNA, 19 nt, Homo sapiens
  misc_RNA (1)...(19): siRNA sense strand
ucaccgaucuugaugacaa

SEQ ID NO: 300369 - RNA, 19 nt, Homo sapiens
  misc_RNA (1)...(19): siRNA sense strand
ccuugcagcuccucauaua

SEQ ID NO: 300370 - RNA, 19 nt, Homo sapiens
  misc_RNA (1)...(19): siRNA sense strand
acaaagaauucucaguuca

SEQ ID NO: 300371 - RNA, 19 nt, Homo sapiens
  misc_RNA (1)...(19): siRNA sense strand
ggagggaggcauucaucua

SEQ ID NO: 300372 - RNA, 19 nt, Homo sapiens
  misc_RNA (1)...(19): siRNA sense strand
gcccuuaucccaagucauu

SEQ ID NO: 300373 - RNA, 19 nt, Homo sapiens
  misc_RNA (1)...(19): siRNA sense strand
agacaaagaauucucaguu

SEQ ID NO: 300374 - RNA, 19 nt, Homo sapiens
  misc_RNA (1)...(19): siRNA sense strand
gacagggccuauaaacuca

SEQ ID NO: 300375 - RNA, 19 nt, Homo sapiens
  misc_RNA (1)...(19): siRNA sense strand
caagaggucacugggaaua

SEQ ID NO: 300376 - RNA, 19 nt, Homo sapiens
  misc_RNA (1)...(19): siRNA sense strand
gacccaaccugcugcacaa

SEQ ID NO: 300377 - RNA, 19 nt, Homo sapiens
  misc_RNA (1)...(19): siRNA sense strand
aaacuggauucacuaggaa

SEQ ID NO: 300378 - RNA, 19 nt, Homo sapiens
  misc_RNA (1)...(19): siRNA sense strand
ggaauuugaccgugggauu

SEQ ID NO: 300379 - RNA, 19 nt, Homo sapiens
  misc_RNA (1)...(19): siRNA sense strand
gaucaccauucccaaagau

SEQ ID NO: 300380 - RNA, 19 nt, Homo sapiens
  misc_RNA (1)...(19): siRNA sense strand
gcagagggacgagcagaaa

SEQ ID NO: 300381 - RNA, 19 nt, Homo sapiens
  misc_RNA (1)...(19): siRNA sense strand
ggaauaaaaugacaucucu

SEQ ID NO: 300382 - RNA, 19 nt, Homo sapiens
  misc_RNA (1)...(19): siRNA sense strand
uaagaaagaaacuggauuc

SEQ ID NO: 300383 - RNA, 19 nt, Homo sapiens
  misc_RNA (1)...(19): siRNA sense strand
gaauuugaccgugggauug

SEQ ID NO: 300384 - RNA, 19 nt, Homo sapiens
  misc_RNA (1)...(19): siRNA sense strand
aaagaauucucaguucaga

SEQ ID NO: 300385 - RNA, 19 nt, Homo sapiens
  misc_RNA (1)...(19): siRNA sense strand
aagcagaagucaucagaca

SEQ ID NO: 300386 - RNA, 19 nt, Homo sapiens
  misc_RNA (1)...(19): siRNA sense strand
cagcaaagaugggcaagag

SEQ ID NO: 300387 - RNA, 19 nt, Homo sapiens
  misc_RNA (1)...(19): siRNA sense strand
ugacagggccuauaaacuc

SEQ ID NO: 300388 - RNA, 19 nt, Homo sapiens
  misc_RNA (1)...(19): siRNA sense strand
gaaaggcuucccaaucauc

SEQ ID NO: 300389 - RNA, 19 nt, Homo sapiens
  misc_RNA (1)...(19): siRNA sense strand
ccaugucaguggauucuau

SEQ ID NO: 300390 - RNA, 19 nt, Homo sapiens
  misc_RNA (1)...(19): siRNA sense strand
gaaugacagggccuauaaa

SEQ ID NO: 300391 - RNA, 19 nt, Homo sapiens
  misc_RNA (1)...(19): siRNA sense strand
ggagcacaguguucaugau

SEQ ID NO: 300392 - RNA, 19 nt, Homo sapiens
  misc_RNA (1)...(19): siRNA sense strand
gagcacaguguucaugaug

SEQ ID NO: 300393 - RNA, 19 nt, Homo sapiens
  misc_RNA (1)...(19): siRNA sense strand
ccucagaaacaccgaauga

SEQ ID NO: 300394 - RNA, 19 nt, Homo sapiens
  misc_RNA (1)...(19): siRNA sense strand
agaggucacugggaauaaa

SEQ ID NO: 300395 - RNA, 19 nt, Homo sapiens
  misc_RNA (1)...(19): siRNA sense strand
ugaauccuauuuacagaca

SEQ ID NO: 300396 - RNA, 19 nt, Homo sapiens
  misc_RNA (1)...(19): siRNA sense strand
caaagucaagggaaaguuc

SEQ ID NO: 300397 - RNA, 19 nt, Homo sapiens
  misc_RNA (1)...(19): siRNA sense strand
gaggagagcacggccauca

SEQ ID NO: 300398 - RNA, 19 nt, Homo sapiens
  misc_RNA (1)...(19): siRNA sense strand
ggagagcacggccaucauc

SEQ ID NO: 300399 - RNA, 19 nt, Homo sapiens
  misc_RNA (1)...(19): siRNA sense strand
agcaguaacucaucucuca

SEQ ID NO: 300400 - RNA, 19 nt, Homo sapiens
  misc_RNA (1)...(19): siRNA sense strand
caaagacaaagaauucauc

SEQ ID NO: 300401 - RNA, 19 nt, Homo sapiens
  misc_RNA (1)...(19): siRNA sense strand
aaagaaacuggauucacua

SEQ ID NO: 300402 - RNA, 19 nt, Homo sapiens
  misc_RNA (1)...(19): siRNA sense strand
gcgaaugacagggccuaua

SEQ ID NO: 300403 - RNA, 19 nt, Homo sapiens
  misc_RNA (1)...(19): siRNA sense strand
cugaugucguggacuauuu

SEQ ID NO: 300404 - RNA, 19 nt, Homo sapiens
  misc_RNA (1)...(19): siRNA sense strand
uggcuucccuccucccauu

SEQ ID NO: 300405 - RNA, 19 nt, Homo sapiens
  misc_RNA (1)...(19): siRNA sense strand
ggacaaaagagaaagaaau

SEQ ID NO: 300406 - RNA, 19 nt, Homo sapiens
  misc_RNA (1)...(19): siRNA sense strand
gagauaagaaacucagucu

SEQ ID NO: 300407 - RNA, 19 nt, Homo sapiens
  misc_RNA (1)...(19): siRNA sense strand
cagcucaaccucagaaaca

SEQ ID NO: 300408 - RNA, 19 nt, Homo sapiens
  misc_RNA (1)...(19): siRNA sense strand
ucagaucaccauucccaaa

SEQ ID NO: 300409 - RNA, 19 nt, Homo sapiens
  misc_RNA (1)...(19): siRNA sense strand
cguggacuauuuacucaga

SEQ ID NO: 300410 - RNA, 19 nt, Homo sapiens
  misc_RNA (1)...(19): siRNA sense strand
ucagaaacaccgaaugagu

SEQ ID NO: 300411 - RNA, 19 nt, Homo sapiens
  misc_RNA (1)...(19): siRNA sense strand
ugaugucguggacuauuua

SEQ ID NO: 300412 - RNA, 19 nt, Homo sapiens
  misc_RNA (1)...(19): siRNA sense strand
ggaggaggagcacaguguu

SEQ ID NO: 300413 - RNA, 19 nt, Homo sapiens
  misc_RNA (1)...(19): siRNA sense strand
gagggaggcauucaucuac

SEQ ID NO: 300414 - RNA, 19 nt, Homo sapiens
  misc_RNA (1)...(19): siRNA sense strand
gaggaggggugccauguca

SEQ ID NO: 300415 - RNA, 19 nt, Homo sapiens
  misc_RNA (1)...(19): siRNA sense strand
uaaacuuagccaccauauu

SEQ ID NO: 300416 - RNA, 19 nt, Homo sapiens
  misc_RNA (1)...(19): siRNA sense strand
uagaagcuuuacaacuuuc

SEQ ID NO: 300417 - RNA, 19 nt, Homo sapiens
  misc_RNA (1)...(19): siRNA sense strand
gcaagaggucacugggaau

SEQ ID NO: 300418 - RNA, 19 nt, Homo sapiens
  misc_RNA (1)...(19): siRNA sense strand
ggacuauuuacucagaaga

SEQ ID NO: 300419 - RNA, 19 nt, Homo sapiens
  misc_RNA (1)...(19): siRNA sense strand
cugaucagccuguuagaga

SEQ ID NO: 300420 - RNA, 19 nt, Homo sapiens
  misc_RNA (1)...(19): siRNA sense strand
gagacaauuacgugaggaa

SEQ ID NO: 300421 - RNA, 19 nt, Homo sapiens
  misc_RNA (1)...(19): siRNA sense strand
caaagaauucucaguucag

SEQ ID NO: 300422 - RNA, 19 nt, Homo sapiens
  misc_RNA (1)...(19): siRNA sense strand
acaagcagaagucaucaga

SEQ ID NO: 300423 - RNA, 19 nt, Homo sapiens
  misc_RNA (1)...(19): siRNA sense strand
agaaacaccgaaugaguca

SEQ ID NO: 300424 - RNA, 19 nt, Homo sapiens
  misc_RNA (1)...(19): siRNA sense strand
agaaaggcuucccaaucau

SEQ ID NO: 300425 - RNA, 19 nt, Homo sapiens
  misc_RNA (1)...(19): siRNA sense strand
gucguggacuauuuacuca

SEQ ID NO: 300426 - RNA, 19 nt, Homo sapiens
  misc_RNA (1)...(19): siRNA sense strand
gcacaagcagaagucauca

SEQ ID NO: 300427 - RNA, 19 nt, Homo sapiens
  misc_RNA (1)...(19): siRNA sense strand
gaggagcacaguguucaug

SEQ ID NO: 300428 - RNA, 19 nt, Homo sapiens
  misc_RNA (1)...(19): siRNA sense strand
gaggaggagcacaguguuc

SEQ ID NO: 300429 - RNA, 19 nt, Homo sapiens
  misc_RNA (1)...(19): siRNA sense strand
ggaggcauucaucuacaga

SEQ ID NO: 300430 - RNA, 19 nt, Homo sapiens
  misc_RNA (1)...(19): siRNA sense strand
gacuauuuacucagaagaa

SEQ ID NO: 300431 - RNA, 19 nt, Homo sapiens
  misc_RNA (1)...(19): siRNA sense strand
aggaacagcugggcaccuu

SEQ ID NO: 300432 - RNA, 19 nt, Homo sapiens
  misc_RNA (1)...(19): siRNA sense strand
cagcuuucaucaacacucu

SEQ ID NO: 300433 - RNA, 19 nt, Homo sapiens
  misc_RNA (1)...(19): siRNA sense strand
agagaccgauccugauguc

SEQ ID NO: 300434 - RNA, 19 nt, Homo sapiens
  misc_RNA (1)...(19): siRNA sense strand
gcugucagaucaccauucc

SEQ ID NO: 300435 - RNA, 19 nt, Homo sapiens
  misc_RNA (1)...(19): siRNA sense strand
agaucaccauucccaaaga

SEQ ID NO: 300436 - RNA, 19 nt, Homo sapiens
  misc_RNA (1)...(19): siRNA sense strand
gucaucagacaaagaauuc

SEQ ID NO: 300437 - RNA, 19 nt, Homo sapiens
  misc_RNA (1)...(19): siRNA sense strand
gcucggagaagcuuuacag

SEQ ID NO: 300438 - RNA, 19 nt, Homo sapiens
  misc_RNA (1)...(19): siRNA sense strand
gggaggcauucaucuacag

SEQ ID NO: 300439 - RNA, 19 nt, Homo sapiens
  misc_RNA (1)...(19): siRNA sense strand
caccuugcagcuccucaua

SEQ ID NO: 300440 - RNA, 19 nt, Homo sapiens
  misc_RNA (1)...(19): siRNA sense strand
uggauucuaucaccgaucu

SEQ ID NO: 300441 - RNA, 19 nt, Homo sapiens
  misc_RNA (1)...(19): siRNA sense strand
uuagagaccgauccugaug

SEQ ID NO: 300442 - RNA, 19 nt, Homo sapiens
  misc_RNA (1)...(19): siRNA sense strand
agaauucucaguucagagu

SEQ ID NO: 300443 - RNA, 19 nt, Homo sapiens
  misc_RNA (1)...(19): siRNA sense strand
uggauucacuaggaaagga

SEQ ID NO: 300444 - RNA, 19 nt, Homo sapiens
  misc_RNA (1)...(19): siRNA sense strand
gaaugcccuuaucccaagu

SEQ ID NO: 300445 - RNA, 19 nt, Homo sapiens
  misc_RNA (1)...(19): siRNA sense strand
aaaagagagugagacaauu

SEQ ID NO: 300446 - RNA, 19 nt, Homo sapiens
  misc_RNA (1)...(19): siRNA sense strand
gauucuaucaccgaucuug

SEQ ID NO: 300447 - RNA, 19 nt, Homo sapiens
  misc_RNA (1)...(19): siRNA sense strand
agagggacgagcagaaaga

SEQ ID NO: 300448 - RNA, 19 nt, Homo sapiens
  misc_RNA (1)...(19): siRNA sense strand
caucuacagacuccaacaa

SEQ ID NO: 300449 - RNA, 19 nt, Homo sapiens
  misc_RNA (1)...(19): siRNA sense strand
cagaagucaucagacaaag

SEQ ID NO: 300450 - RNA, 19 nt, Homo sapiens
  misc_RNA (1)...(19): siRNA sense strand
ugacaacaucagcaaagau

SEQ ID NO: 300451 - RNA, 19 nt, Homo sapiens
  misc_RNA (1)...(19): siRNA sense strand
acacagcuuucaucaacac

SEQ ID NO: 300452 - RNA, 19 nt, Homo sapiens
  misc_RNA (1)...(19): siRNA sense strand
aacauggccuccagacagu

SEQ ID NO: 300453 - RNA, 19 nt, Homo sapiens
  misc_RNA (1)...(19): siRNA sense strand
gaaagaaacuggauucacu

SEQ ID NO: 300454 - RNA, 19 nt, Homo sapiens
  misc_RNA (1)...(19): siRNA sense strand
gaaacuggauucacuagga

SEQ ID NO: 300455 - RNA, 19 nt, Homo sapiens
  misc_RNA (1)...(19): siRNA sense strand
aaacuuagccaccauauuu

SEQ ID NO: 300456 - RNA, 19 nt, Homo sapiens
  misc_RNA (1)...(19): siRNA sense strand
aaagaacucucaagcagua

SEQ ID NO: 300457 - RNA, 19 nt, Homo sapiens
  misc_RNA (1)...(19): siRNA sense strand
guacacagcuuucaucaac

SEQ ID NO: 300458 - RNA, 19 nt, Homo sapiens
  misc_RNA (1)...(19): siRNA sense strand
aagaaaggcuucccaauca

SEQ ID NO: 300459 - RNA, 19 nt, Homo sapiens
  misc_RNA (1)...(19): siRNA sense strand
caucaucgcuguugugcaa

SEQ ID NO: 300460 - RNA, 19 nt, Homo sapiens
  misc_RNA (1)...(19): siRNA sense strand
gaagucaucagacaaagaa

SEQ ID NO: 300461 - RNA, 19 nt, Homo sapiens
  misc_RNA (1)...(19): siRNA sense strand
gacaaagaauucucaguuc

SEQ ID NO: 300462 - RNA, 19 nt, Homo sapiens
  misc_RNA (1)...(19): siRNA sense strand
gcagaagucaucagacaaa

SEQ ID NO: 300463 - RNA, 19 nt, Homo sapiens
  misc_RNA (1)...(19): siRNA sense strand
acuagaagcuuuacaacuu

SEQ ID NO: 300464 - RNA, 19 nt, Homo sapiens
  misc_RNA (1)...(19): siRNA sense strand
aaagagagugagacaauua

SEQ ID NO: 300465 - RNA, 19 nt, Homo sapiens
  misc_RNA (1)...(19): siRNA sense strand
cgaaugacagggccuauaa

SEQ ID NO: 300466 - RNA, 19 nt, Homo sapiens
  misc_RNA (1)...(19): siRNA sense strand
cuagaagcuuuacaacuuu

SEQ ID NO: 300467 - RNA, 19 nt, Homo sapiens
  misc_RNA (1)...(19): siRNA sense strand
cggagaagcuuuacagagu

SEQ ID NO: 300468 - RNA, 19 nt, Homo sapiens
  misc_RNA (1)...(19): siRNA sense strand
ucaccgaucuugaugacaa

SEQ ID NO: 300469 - RNA, 19 nt, Homo sapiens
  misc_RNA (1)...(19): siRNA sense strand
ccuugcagcuccucauaua

SEQ ID NO: 300470 - RNA, 19 nt, Homo sapiens
  misc_RNA (1)...(19): siRNA sense strand
acaaagaauucucaguuca

SEQ ID NO: 300471 - RNA, 19 nt, Homo sapiens
  misc_RNA (1)...(19): siRNA sense strand
ggagggaggcauucaucua

SEQ ID NO: 300472 - RNA, 19 nt, Homo sapiens
  misc_RNA (1)...(19): siRNA sense strand
gcccuuaucccaagucauu

SEQ ID NO: 300473 - RNA, 19 nt, Homo sapiens
  misc_RNA (1)...(19): siRNA sense strand
agacaaagaauucucaguu

SEQ ID NO: 300474 - RNA, 19 nt, Homo sapiens
  misc_RNA (1)...(19): siRNA sense strand
gacagggccuauaaacuca

SEQ ID NO: 300475 - RNA, 19 nt, Homo sapiens
  misc_RNA (1)...(19): siRNA sense strand
caagaggucacugggaaua

SEQ ID NO: 300476 - RNA, 19 nt, Homo sapiens
  misc_RNA (1)...(19): siRNA sense strand
gacccaaccugcugcacaa

SEQ ID NO: 300477 - RNA, 19 nt, Homo sapiens
  misc_RNA (1)...(19): siRNA sense strand
aaacuggauucacuaggaa

SEQ ID NO: 300478 - RNA, 19 nt, Homo sapiens
  misc_RNA (1)...(19): siRNA sense strand
ggaauuugaccgugggauu

SEQ ID NO: 300479 - RNA, 19 nt, Homo sapiens
  misc_RNA (1)...(19): siRNA sense strand
gaucaccauucccaaagau

SEQ ID NO: 300480 - RNA, 19 nt, Homo sapiens
  misc_RNA (1)...(19): siRNA sense strand
gcagagggacgagcagaaa

SEQ ID NO: 300481 - RNA, 19 nt, Homo sapiens
  misc_RNA (1)...(19): siRNA sense strand
ggaauaaaaugacaucucu

SEQ ID NO: 300482 - RNA, 19 nt, Homo sapiens
  misc_RNA (1)...(19): siRNA sense strand
uaagaaagaaacuggauuc

SEQ ID NO: 300483 - RNA, 19 nt, Homo sapiens
  misc_RNA (1)...(19): siRNA sense strand
gaauuugaccgugggauug

SEQ ID NO: 300484 - RNA, 19 nt, Homo sapiens
  misc_RNA (1)...(19): siRNA sense strand
aaagaauucucaguucaga

SEQ ID NO: 300485 - RNA, 19 nt, Homo sapiens
  misc_RNA (1)...(19): siRNA sense strand
aagcagaagucaucagaca

SEQ ID NO: 300486 - RNA, 19 nt, Homo sapiens
  misc_RNA (1)...(19): siRNA sense strand
cagcaaagaugggcaagag

SEQ ID NO: 300487 - RNA, 19 nt, Homo sapiens
  misc_RNA (1)...(19): siRNA sense strand
ugacagggccuauaaacuc

SEQ ID NO: 300488 - RNA, 19 nt, Homo sapiens
  misc_RNA (1)...(19): siRNA sense strand
gaaaggcuucccaaucauc

SEQ ID NO: 300489 - RNA, 19 nt, Homo sapiens
  misc_RNA (1)...(19): siRNA sense strand
ccaugucaguggauucuau

SEQ ID NO: 300490 - RNA, 19 nt, Homo sapiens
  misc_RNA (1)...(19): siRNA sense strand
gaaugacagggccuauaaa

SEQ ID NO: 300491 - RNA, 19 nt, Homo sapiens
  misc_RNA (1)...(19): siRNA sense strand
ggagcacaguguucaugau

SEQ ID NO: 300492 - RNA, 19 nt, Homo sapiens
  misc_RNA (1)...(19): siRNA sense strand
gagcacaguguucaugaug

SEQ ID NO: 300493 - RNA, 19 nt, Homo sapiens
  misc_RNA (1)...(19): siRNA sense strand
ccucagaaacaccgaauga

SEQ ID NO: 300494 - RNA, 19 nt, Homo sapiens
  misc_RNA (1)...(19): siRNA sense strand
agaggucacugggaauaaa

SEQ ID NO: 300495 - RNA, 19 nt, Homo sapiens
  misc_RNA (1)...(19): siRNA sense strand
ugaauccuauuuacagaca

SEQ ID NO: 300496 - RNA, 19 nt, Homo sapiens
  misc_RNA (1)...(19): siRNA sense strand
caaagucaagggaaaguuc

SEQ ID NO: 300497 - RNA, 19 nt, Homo sapiens
  misc_RNA (1)...(19): siRNA sense strand
gaggagagcacggccauca

SEQ ID NO: 300498 - RNA, 19 nt, Homo sapiens
  misc_RNA (1)...(19): siRNA sense strand
ggagagcacggccaucauc

SEQ ID NO: 300499 - RNA, 19 nt, Homo sapiens
  misc_RNA (1)...(19): siRNA sense strand
caaagacaaagaauucauc

SEQ ID NO: 300500 - RNA, 19 nt, Homo sapiens
  misc_RNA (1)...(19): siRNA sense strand
agcaguaacucaucucuca

SEQ ID NO: 300501 - RNA, 19 nt, Homo sapiens
  misc_RNA (1)...(19): siRNA sense strand
aaagaaacuggauucacua

SEQ ID NO: 300502 - RNA, 19 nt, Homo sapiens
  misc_RNA (1)...(19): siRNA sense strand
gcgaaugacagggccuaua

SEQ ID NO: 300503 - RNA, 19 nt, Homo sapiens
  misc_RNA (1)...(19): siRNA sense strand
cugaugucguggacuauuu

SEQ ID NO: 300504 - RNA, 19 nt, Homo sapiens
  misc_RNA (1)...(19): siRNA sense strand
uggcuucccuccucccauu

SEQ ID NO: 300505 - RNA, 19 nt, Homo sapiens
  misc_RNA (1)...(19): siRNA sense strand
ggacaaaagagaaagaaau

SEQ ID NO: 300506 - RNA, 19 nt, Homo sapiens
  misc_RNA (1)...(19): siRNA sense strand
gagauaagaaacucagucu

SEQ ID NO: 300507 - RNA, 19 nt, Homo sapiens
  misc_RNA (1)...(19): siRNA sense strand
cagcucaaccucagaaaca

SEQ ID NO: 300508 - RNA, 19 nt, Homo sapiens
  misc_RNA (1)...(19): siRNA sense strand
ucagaucaccauucccaaa

SEQ ID NO: 300509 - RNA, 19 nt, Homo sapiens
  misc_RNA (1)...(19): siRNA sense strand
cguggacuauuuacucaga

SEQ ID NO: 300510 - RNA, 19 nt, Homo sapiens
  misc_RNA (1)...(19): siRNA sense strand
ucagaaacaccgaaugagu

SEQ ID NO: 300511 - RNA, 19 nt, Homo sapiens
  misc_RNA (1)...(19): siRNA sense strand
ugaugucguggacuauuua

SEQ ID NO: 300512 - RNA, 19 nt, Homo sapiens
  misc_RNA (1)...(19): siRNA sense strand
ggaggaggagcacaguguu

SEQ ID NO: 300513 - RNA, 19 nt, Homo sapiens
  misc_RNA (1)...(19): siRNA sense strand
gagggaggcauucaucuac

SEQ ID NO: 300514 - RNA, 19 nt, Homo sapiens
  misc_RNA (1)...(19): siRNA sense strand
gaggaggggugccauguca

SEQ ID NO: 300515 - RNA, 19 nt, Homo sapiens
  misc_RNA (1)...(19): siRNA sense strand
uaaacuuagccaccauauu

SEQ ID NO: 300516 - RNA, 19 nt, Homo sapiens
  misc_RNA (1)...(19): siRNA sense strand
uagaagcuuuacaacuuuc

SEQ ID NO: 300517 - RNA, 19 nt, Homo sapiens
  misc_RNA (1)...(19): siRNA sense strand
gcaagaggucacugggaau

SEQ ID NO: 300518 - RNA, 19 nt, Homo sapiens
  misc_RNA (1)...(19): siRNA sense strand
ggacuauuuacucagaaga

SEQ ID NO: 300519 - RNA, 19 nt, Homo sapiens
  misc_RNA (1)...(19): siRNA sense strand
cugaucagccuguuagaga

SEQ ID NO: 300520 - RNA, 19 nt, Homo sapiens
  misc_RNA (1)...(19): siRNA sense strand
gagacaauuacgugaggaa

SEQ ID NO: 300521 - RNA, 19 nt, Homo sapiens
  misc_RNA (1)...(19): siRNA sense strand
caaagaauucucaguucag

SEQ ID NO: 300522 - RNA, 19 nt, Homo sapiens
  misc_RNA (1)...(19): siRNA sense strand
acaagcagaagucaucaga

SEQ ID NO: 300523 - RNA, 19 nt, Homo sapiens
  misc_RNA (1)...(19): siRNA sense strand
agaaacaccgaaugaguca

SEQ ID NO: 300524 - RNA, 19 nt, Homo sapiens
  misc_RNA (1)...(19): siRNA sense strand
agaaaggcuucccaaucau

SEQ ID NO: 300525 - RNA, 19 nt, Homo sapiens
  misc_RNA (1)...(19): siRNA sense strand
gucguggacuauuuacuca

SEQ ID NO: 300526 - RNA, 19 nt, Homo sapiens
  misc_RNA (1)...(19): siRNA sense strand
gcacaagcagaagucauca

SEQ ID NO: 300527 - RNA, 19 nt, Homo sapiens
  misc_RNA (1)...(19): siRNA sense strand
gaggagcacaguguucaug

SEQ ID NO: 300528 - RNA, 19 nt, Homo sapiens
  misc_RNA (1)...(19): siRNA sense strand
gaggaggagcacaguguuc

SEQ ID NO: 300529 - RNA, 19 nt, Homo sapiens
  misc_RNA (1)...(19): siRNA sense strand
ggaggcauucaucuacaga

SEQ ID NO: 300530 - RNA, 19 nt, Homo sapiens
  misc_RNA (1)...(19): siRNA sense strand
gacuauuuacucagaagaa

SEQ ID NO: 300531 - RNA, 19 nt, Homo sapiens
  misc_RNA (1)...(19): siRNA sense strand
aggaacagcugggcaccuu

SEQ ID NO: 300532 - RNA, 19 nt, Homo sapiens
  misc_RNA (1)...(19): siRNA sense strand
gcugucagaucaccauucc

SEQ ID NO: 300533 - RNA, 19 nt, Homo sapiens
  misc_RNA (1)...(19): siRNA sense strand
agagaccgauccugauguc

SEQ ID NO: 300534 - RNA, 19 nt, Homo sapiens
  misc_RNA (1)...(19): siRNA sense strand
cagcuuucaucaacacucu

SEQ ID NO: 300535 - RNA, 19 nt, Homo sapiens
  misc_RNA (1)...(19): siRNA sense strand
agaucaccauucccaaaga

SEQ ID NO: 300536 - RNA, 19 nt, Homo sapiens
  misc_RNA (1)...(19): siRNA sense strand
gucaucagacaaagaauuc

SEQ ID NO: 300537 - RNA, 19 nt, Homo sapiens
  misc_RNA (1)...(19): siRNA sense strand
gcucggagaagcuuuacag

SEQ ID NO: 300538 - RNA, 19 nt, Homo sapiens
  misc_RNA (1)...(19): siRNA sense strand
gggaggcauucaucuacag

SEQ ID NO: 300539 - RNA, 19 nt, Homo sapiens
  misc_RNA (1)...(19): siRNA sense strand
caccuugcagcuccucaua

SEQ ID NO: 300540 - RNA, 19 nt, Homo sapiens
  misc_RNA (1)...(19): siRNA sense strand
uggauucuaucaccgaucu

SEQ ID NO: 300541 - RNA, 19 nt, Homo sapiens
  misc_RNA (1)...(19): siRNA sense strand
gaaugcccuuaucccaagu

SEQ ID NO: 300542 - RNA, 19 nt, Homo sapiens
  misc_RNA (1)...(19): siRNA sense strand
uuagagaccgauccugaug

SEQ ID NO: 300543 - RNA, 19 nt, Homo sapiens
  misc_RNA (1)...(19): siRNA sense strand
agaauucucaguucagagu

SEQ ID NO: 300544 - RNA, 19 nt, Homo sapiens
  misc_RNA (1)...(19): siRNA sense strand
aaaagagagugagacaauu

SEQ ID NO: 300545 - RNA, 19 nt, Homo sapiens
  misc_RNA (1)...(19): siRNA sense strand
uggauucacuaggaaagga

SEQ ID NO: 300546 - RNA, 19 nt, Homo sapiens
  misc_RNA (1)...(19): siRNA sense strand
gauucuaucaccgaucuug

SEQ ID NO: 300547 - RNA, 19 nt, Homo sapiens
  misc_RNA (1)...(19): siRNA sense strand
aacauggccuccagacagu

SEQ ID NO: 300548 - RNA, 19 nt, Homo sapiens
  misc_RNA (1)...(19): siRNA sense strand
caucuacagacuccaacaa

SEQ ID NO: 300549 - RNA, 19 nt, Homo sapiens
  misc_RNA (1)...(19): siRNA sense strand
agagggacgagcagaaaga

SEQ ID NO: 300550 - RNA, 19 nt, Homo sapiens
  misc_RNA (1)...(19): siRNA sense strand
cagaagucaucagacaaag

SEQ ID NO: 300551 - RNA, 19 nt, Homo sapiens
  misc_RNA (1)...(19): siRNA sense strand
ugacaacaucagcaaagau

SEQ ID NO: 300552 - RNA, 19 nt, Homo sapiens
  misc_RNA (1)...(19): siRNA sense strand
acacagcuuucaucaacac

SEQ ID NO: 300553 - RNA, 19 nt, Homo sapiens
  misc_RNA (1)...(19): siRNA sense strand
uuacaaaucugcugucauu

SEQ ID NO: 300554 - RNA, 19 nt, Homo sapiens
  misc_RNA (1)...(19): siRNA sense strand
acacugggcuggauucaua

SEQ ID NO: 300555 - RNA, 19 nt, Homo sapiens
  misc_RNA (1)...(19): siRNA sense strand
gaaagacacaguaaagaaa

SEQ ID NO: 300556 - RNA, 19 nt, Homo sapiens
  misc_RNA (1)...(19): siRNA sense strand
gagaagcccuccuuagaug

SEQ ID NO: 300557 - RNA, 19 nt, Homo sapiens
  misc_RNA (1)...(19): siRNA sense strand
gaaacuggauucuuuaaac

SEQ ID NO: 300558 - RNA, 19 nt, Homo sapiens
  misc_RNA (1)...(19): siRNA sense strand
gaaggaagcagaggaauug

SEQ ID NO: 300559 - RNA, 19 nt, Homo sapiens
  misc_RNA (1)...(19): siRNA sense strand
gaacauggccauccagcaa

SEQ ID NO: 300560 - RNA, 19 nt, Homo sapiens
  misc_RNA (1)...(19): siRNA sense strand
uaaacuaacugaccaugga

SEQ ID NO: 300561 - RNA, 19 nt, Homo sapiens
  misc_RNA (1)...(19): siRNA sense strand
gaagaaggaagcagaggaa

SEQ ID NO: 300562 - RNA, 19 nt, Homo sapiens
  misc_RNA (1)...(19): siRNA sense strand
ucacugcucuuaccagaug

SEQ ID NO: 300563 - RNA, 19 nt, Homo sapiens
  misc_RNA (1)...(19): siRNA sense strand
gcucuggaguugagauuau

SEQ ID NO: 300564 - RNA, 19 nt, Homo sapiens
  misc_RNA (1)...(19): siRNA sense strand
gaguugagauuauccgaau

SEQ ID NO: 300565 - RNA, 19 nt, Homo sapiens
  misc_RNA (1)...(19): siRNA sense strand
gagcaacucagaaaguauu

SEQ ID NO: 300566 - RNA, 19 nt, Homo sapiens
  misc_RNA (1)...(19): siRNA sense strand
uaaaggagauugcauuucc

SEQ ID NO: 300567 - RNA, 19 nt, Homo sapiens
  misc_RNA (1)...(19): siRNA sense strand
cagaaaguauucccacaau

SEQ ID NO: 300568 - RNA, 19 nt, Homo sapiens
  misc_RNA (1)...(19): siRNA sense strand
ggagauugcauuucccaaa

SEQ ID NO: 300569 - RNA, 19 nt, Homo sapiens
  misc_RNA (1)...(19): siRNA sense strand
gagauugcauuucccaaag

SEQ ID NO: 300570 - RNA, 19 nt, Homo sapiens
  misc_RNA (1)...(19): siRNA sense strand
caacacagagaacgaagaa

SEQ ID NO: 300571 - RNA, 19 nt, Homo sapiens
  misc_RNA (1)...(19): siRNA sense strand
gaaaagaaagacacaguaa

SEQ ID NO: 300572 - RNA, 19 nt, Homo sapiens
  misc_RNA (1)...(19): siRNA sense strand
gcaaggauccaccucuguu

SEQ ID NO: 300573 - RNA, 19 nt, Homo sapiens
  misc_RNA (1)...(19): siRNA sense strand
ggaaacuggauucuuuaaa

SEQ ID NO: 300574 - RNA, 19 nt, Homo sapiens
  misc_RNA (1)...(19): siRNA sense strand
gcaaagugcugggucugau

SEQ ID NO: 300575 - RNA, 19 nt, Homo sapiens
  misc_RNA (1)...(19): siRNA sense strand
gcugaaggcagagcuguua

SEQ ID NO: 300576 - RNA, 19 nt, Homo sapiens
  misc_RNA (1)...(19): siRNA sense strand
gaaaguauucccacaaucg

SEQ ID NO: 300577 - RNA, 19 nt, Homo sapiens
  misc_RNA (1)...(19): siRNA sense strand
uggcauccauuuacucuga

SEQ ID NO: 300578 - RNA, 19 nt, Homo sapiens
  misc_RNA (1)...(19): siRNA sense strand
gaaaacugaugaggaauga

SEQ ID NO: 300579 - RNA, 19 nt, Homo sapiens
  misc_RNA (1)...(19): siRNA sense strand
guauaucacgcucuuuauu

SEQ ID NO: 300580 - RNA, 19 nt, Homo sapiens
  misc_RNA (1)...(19): siRNA sense strand
gcucuuaccagaugauguu

SEQ ID NO: 300581 - RNA, 19 nt, Homo sapiens
  misc_RNA (1)...(19): siRNA sense strand
gcccacaguuucuccaguu

SEQ ID NO: 300582 - RNA, 19 nt, Homo sapiens
  misc_RNA (1)...(19): siRNA sense strand
agaaagacacaguaaagaa

SEQ ID NO: 300583 - RNA, 19 nt, Homo sapiens
  misc_RNA (1)...(19): siRNA sense strand
cgguagaggugaaugaaga

SEQ ID NO: 300584 - RNA, 19 nt, Homo sapiens
  misc_RNA (1)...(19): siRNA sense strand
aaagaaagacacaguaaag

SEQ ID NO: 300585 - RNA, 19 nt, Homo sapiens
  misc_RNA (1)...(19): siRNA sense strand
cagaugauguugccagagu

SEQ ID NO: 300586 - RNA, 19 nt, Homo sapiens
  misc_RNA (1)...(19): siRNA sense strand
acacagagaacgaagaaga

SEQ ID NO: 300587 - RNA, 19 nt, Homo sapiens
  misc_RNA (1)...(19): siRNA sense strand
acaaguauaucacgcucuu

SEQ ID NO: 300588 - RNA, 19 nt, Homo sapiens
  misc_RNA (1)...(19): siRNA sense strand
gaacgaagaagaacuuuuc

SEQ ID NO: 300589 - RNA, 19 nt, Homo sapiens
  misc_RNA (1)...(19): siRNA sense strand
guggagacauguggaauuc

SEQ ID NO: 300590 - RNA, 19 nt, Homo sapiens
  misc_RNA (1)...(19): siRNA sense strand
gaaggcaacauugaacaug

SEQ ID NO: 300591 - RNA, 19 nt, Homo sapiens
  misc_RNA (1)...(19): siRNA sense strand
caggaaacuggauucuuua

SEQ ID NO: 300592 - RNA, 19 nt, Homo sapiens
  misc_RNA (1)...(19): siRNA sense strand
aaagugcugggucugauua

SEQ ID NO: 300593 - RNA, 19 nt, Homo sapiens
  misc_RNA (1)...(19): siRNA sense strand
caacagaagcagcagcaau

SEQ ID NO: 300594 - RNA, 19 nt, Homo sapiens
  misc_RNA (1)...(19): siRNA sense strand
aaguauaucacgcucuuua

SEQ ID NO: 300595 - RNA, 19 nt, Homo sapiens
  misc_RNA (1)...(19): siRNA sense strand
guagugcgguagaggugaa

SEQ ID NO: 300596 - RNA, 19 nt, Homo sapiens
  misc_RNA (1)...(19): siRNA sense strand
gaggguagcacaacagaag

SEQ ID NO: 300597 - RNA, 19 nt, Homo sapiens
  misc_RNA (1)...(19): siRNA sense strand
gaaauuaaaggagauugca

SEQ ID NO: 300598 - RNA, 19 nt, Homo sapiens
  misc_RNA (1)...(19): siRNA sense strand
uauaucacgcucuuuauug

SEQ ID NO: 300599 - RNA, 19 nt, Homo sapiens
  misc_RNA (1)...(19): siRNA sense strand
auaucacgcucuuuauuga

SEQ ID NO: 300600 - RNA, 19 nt, Homo sapiens
  misc_RNA (1)...(19): siRNA sense strand
agaagaacuuuuccucaua

SEQ ID NO: 300601 - RNA, 19 nt, Homo sapiens
  misc_RNA (1)...(19): siRNA sense strand
cauccucuauaacaaguau

SEQ ID NO: 300602 - RNA, 19 nt, Homo sapiens
  misc_RNA (1)...(19): siRNA sense strand
aaacugaugaggaaugaau

SEQ ID NO: 300603 - RNA, 19 nt, Homo sapiens
  misc_RNA (1)...(19): siRNA sense strand
guacuuccgcucuggaguu

SEQ ID NO: 300604 - RNA, 19 nt, Homo sapiens
  misc_RNA (1)...(19): siRNA sense strand
gcucuuuauugagaaacua

SEQ ID NO: 300605 - RNA, 19 nt, Homo sapiens
  misc_RNA (1)...(19): siRNA sense strand
gcagccacgugacuguugu

SEQ ID NO: 300606 - RNA, 19 nt, Homo sapiens
  misc_RNA (1)...(19): siRNA sense strand
guggaaaacugaugaggaa

SEQ ID NO: 300607 - RNA, 19 nt, Homo sapiens
  misc_RNA (1)...(19): siRNA sense strand
gaagaacuuuuccucauac

SEQ ID NO: 300608 - RNA, 19 nt, Homo sapiens
  misc_RNA (1)...(19): siRNA sense strand
gaagcagcagcaauuggaa

SEQ ID NO: 300609 - RNA, 19 nt, Homo sapiens
  misc_RNA (1)...(19): siRNA sense strand
gacuagaggagauuucuuc

SEQ ID NO: 300610 - RNA, 19 nt, Homo sapiens
  misc_RNA (1)...(19): siRNA sense strand
ccacacagaccgcguuucu

SEQ ID NO: 300611 - RNA, 19 nt, Homo sapiens
  misc_RNA (1)...(19): siRNA sense strand
gaucagcagggccucauca

SEQ ID NO: 300612 - RNA, 19 nt, Homo sapiens
  misc_RNA (1)...(19): siRNA sense strand
uuaacagucucauccauac

SEQ ID NO: 300613 - RNA, 19 nt, Homo sapiens
  misc_RNA (1)...(19): siRNA sense strand
gcagagcuguuaaaacgau

SEQ ID NO: 300614 - RNA, 19 nt, Homo sapiens
  misc_RNA (1)...(19): siRNA sense strand
ggauccaccucuguucugu

SEQ ID NO: 300615 - RNA, 19 nt, Homo sapiens
  misc_RNA (1)...(19): siRNA sense strand
gcaacacagagaacgaaga

SEQ ID NO: 300616 - RNA, 19 nt, Homo sapiens
  misc_RNA (1)...(19): siRNA sense strand
caaagugcugggucugauu

SEQ ID NO: 300617 - RNA, 19 nt, Homo sapiens
  misc_RNA (1)...(19): siRNA sense strand
gaugaggaaugaauuuacc

SEQ ID NO: 300618 - RNA, 19 nt, Homo sapiens
  misc_RNA (1)...(19): siRNA sense strand
aacagaagcagcagcaauu

SEQ ID NO: 300619 - RNA, 19 nt, Homo sapiens
  misc_RNA (1)...(19): siRNA sense strand
ugaggaaggcaacauugaa

SEQ ID NO: 300620 - RNA, 19 nt, Homo sapiens
  misc_RNA (1)...(19): siRNA sense strand
ggaaggcaacauugaacau

SEQ ID NO: 300621 - RNA, 19 nt, Homo sapiens
  misc_RNA (1)...(19): siRNA sense strand
agaaggaagcagaggaauu

SEQ ID NO: 300622 - RNA, 19 nt, Homo sapiens
  misc_RNA (1)...(19): siRNA sense strand
uaacugaccauggacuaga

SEQ ID NO: 300623 - RNA, 19 nt, Homo sapiens
  misc_RNA (1)...(19): siRNA sense strand
gauguugccagagucagua

SEQ ID NO: 300624 - RNA, 19 nt, Homo sapiens
  misc_RNA (1)...(19): siRNA sense strand
ggaguggagacauguggaa

SEQ ID NO: 300625 - RNA, 19 nt, Homo sapiens
  misc_RNA (1)...(19): siRNA sense strand
cccacaguuucuccaguua

SEQ ID NO: 300626 - RNA, 19 nt, Homo sapiens
  misc_RNA (1)...(19): siRNA sense strand
caacuguaaggccagcuaa

SEQ ID NO: 300627 - RNA, 19 nt, Homo sapiens
  misc_RNA (1)...(19): siRNA sense strand
gacugucacacaacuguaa

SEQ ID NO: 300628 - RNA, 19 nt, Homo sapiens
  misc_RNA (1)...(19): siRNA sense strand
cuuaacagucucauccaua

SEQ ID NO: 300629 - RNA, 19 nt, Homo sapiens
  misc_RNA (1)...(19): siRNA sense strand
gaagcccuccuuagaugug

SEQ ID NO: 300630 - RNA, 19 nt, Homo sapiens
  misc_RNA (1)...(19): siRNA sense strand
caaaucugcugucauuccu

SEQ ID NO: 300631 - RNA, 19 nt, Homo sapiens
  misc_RNA (1)...(19): siRNA sense strand
cagagucaguagccauugu

SEQ ID NO: 300632 - RNA, 19 nt, Homo sapiens
  misc_RNA (1)...(19): siRNA sense strand
ucagaaaguauucccacaa

SEQ ID NO: 300633 - RNA, 19 nt, Homo sapiens
  misc_RNA (1)...(19): siRNA sense strand
guggaauucucuguggaaa

SEQ ID NO: 300634 - RNA, 19 nt, Homo sapiens
  misc_RNA (1)...(19): siRNA sense strand
ugaaggcagagcuguuaaa

SEQ ID NO: 300635 - RNA, 19 nt, Homo sapiens
  misc_RNA (1)...(19): siRNA sense strand
acacagaccgcguuucucu

SEQ ID NO: 300636 - RNA, 19 nt, Homo sapiens
  misc_RNA (1)...(19): siRNA sense strand
ggaauucucuguggaaaac

SEQ ID NO: 300637 - RNA, 19 nt, Homo sapiens
  misc_RNA (1)...(19): siRNA sense strand
aaagagcgacugaaaauug

SEQ ID NO: 300638 - RNA, 19 nt, Homo sapiens
  misc_RNA (1)...(19): siRNA sense strand
gauugcauuucccaaagca

SEQ ID NO: 300639 - RNA, 19 nt, Homo sapiens
  misc_RNA (1)...(19): siRNA sense strand
ggacuagaggagauuucuu

SEQ ID NO: 300640 - RNA, 19 nt, Homo sapiens
  misc_RNA (1)...(19): siRNA sense strand
agagaacgaagaagaacuu

SEQ ID NO: 300641 - RNA, 19 nt, Homo sapiens
  misc_RNA (1)...(19): siRNA sense strand
agaaaguauucccacaauc

SEQ ID NO: 300642 - RNA, 19 nt, Homo sapiens
  misc_RNA (1)...(19): siRNA sense strand
agaagcagcagcaauugga

SEQ ID NO: 300643 - RNA, 19 nt, Homo sapiens
  misc_RNA (1)...(19): siRNA sense strand
gcagcaauuggaacaggaa

SEQ ID NO: 300644 - RNA, 19 nt, Homo sapiens
  misc_RNA (1)...(19): siRNA sense strand
ccgcguuucucuccagugu

SEQ ID NO: 300645 - RNA, 19 nt, Homo sapiens
  misc_RNA (1)...(19): siRNA sense strand
cacagagaacgaagaagaa

SEQ ID NO: 300646 - RNA, 19 nt, Homo sapiens
  misc_RNA (1)...(19): siRNA sense strand
gauccaccucuguucugua

SEQ ID NO: 300647 - RNA, 19 nt, Homo sapiens
  misc_RNA (1)...(19): siRNA sense strand
gagaacgaagaagaacuuu

SEQ ID NO: 300648 - RNA, 19 nt, Homo sapiens
  misc_RNA (1)...(19): siRNA sense strand
aagaaagacacaguaaaga

SEQ ID NO: 300649 - RNA, 19 nt, Homo sapiens
  misc_RNA (1)...(19): siRNA sense strand
gaccaucacagaccuucga

SEQ ID NO: 300650 - RNA, 19 nt, Homo sapiens
  misc_RNA (1)...(19): siRNA sense strand
cugaugaggaaugaauuua

SEQ ID NO: 300651 - RNA, 19 nt, Homo sapiens
  misc_RNA (1)...(19): siRNA sense strand
gaggaaggcaacauugaac

SEQ ID NO: 300652 - RNA, 19 nt, Homo sapiens
  misc_RNA (1)...(19): siRNA sense strand
caaaacaucgagauuacaa

SEQ ID NO: 300653 - RNA, 19 nt, Homo sapiens
  misc_RNA (1)...(19): siRNA sense strand
gaugggcacugaacucacu

SEQ ID NO: 300654 - RNA, 19 nt, Homo sapiens
  misc_RNA (1)...(19): siRNA sense strand
gaugggcacugaacucacu

SEQ ID NO: 300655 - RNA, 19 nt, Homo sapiens
  misc_RNA (1)...(19): siRNA sense strand
gaugggcacugaacucacu

SEQ ID NO: 300656 - RNA, 19 nt, Homo sapiens
  misc_RNA (1)...(19): siRNA sense strand
caacugaaauuaucgcuuu

SEQ ID NO: 300657 - RNA, 19 nt, Homo sapiens
  misc_RNA (1)...(19): siRNA sense strand
gagcugaaguuaacugauu

SEQ ID NO: 300658 - RNA, 19 nt, Homo sapiens
  misc_RNA (1)...(19): siRNA sense strand
cuggaaagcugaaguauuu

SEQ ID NO: 300659 - RNA, 19 nt, Homo sapiens
  misc_RNA (1)...(19): siRNA sense strand
gaaguuaacugauuaucgu

SEQ ID NO: 300660 - RNA, 19 nt, Homo sapiens
  misc_RNA (1)...(19): siRNA sense strand
ggacuaugguguauaccua

SEQ ID NO: 300661 - RNA, 19 nt, Homo sapiens
  misc_RNA (1)...(19): siRNA sense strand
cgacagacuugaagaauuc

SEQ ID NO: 300662 - RNA, 19 nt, Homo sapiens
  misc_RNA (1)...(19): siRNA sense strand
ggaauccuaagacaaauua

SEQ ID NO: 300663 - RNA, 19 nt, Homo sapiens
  misc_RNA (1)...(19): siRNA sense strand
cauuuggccuggauuaaua

SEQ ID NO: 300664 - RNA, 19 nt, Homo sapiens
  misc_RNA (1)...(19): siRNA sense strand
gcugaaguauuucgauaaa

SEQ ID NO: 300665 - RNA, 19 nt, Homo sapiens
  misc_RNA (1)...(19): siRNA sense strand
ugugaucgauggagaauuu

SEQ ID NO: 300666 - RNA, 19 nt, Homo sapiens
  misc_RNA (1)...(19): siRNA sense strand
gcgacagacuugaagaauu

SEQ ID NO: 300667 - RNA, 19 nt, Homo sapiens
  misc_RNA (1)...(19): siRNA sense strand
ggagaggcaucccggguau

SEQ ID NO: 300668 - RNA, 19 nt, Homo sapiens
  misc_RNA (1)...(19): siRNA sense strand
ccacuugauuucacauuug

SEQ ID NO: 300669 - RNA, 19 nt, Homo sapiens
  misc_RNA (1)...(19): siRNA sense strand
ggauuccacuucuuucaga

SEQ ID NO: 300670 - RNA, 19 nt, Homo sapiens
  misc_RNA (1)...(19): siRNA sense strand
ggaaggaacagcugugauc

SEQ ID NO: 300671 - RNA, 19 nt, Homo sapiens
  misc_RNA (1)...(19): siRNA sense strand
ucaaaggacuaugguguau

SEQ ID NO: 300672 - RNA, 19 nt, Homo sapiens
  misc_RNA (1)...(19): siRNA sense strand
aagcugaaguauuucgaua

SEQ ID NO: 300673 - RNA, 19 nt, Homo sapiens
  misc_RNA (1)...(19): siRNA sense strand
gacaaauuacucugaauga

SEQ ID NO: 300674 - RNA, 19 nt, Homo sapiens
  misc_RNA (1)...(19): siRNA sense strand
ccaauaaggauuccacuuc

SEQ ID NO: 300675 - RNA, 19 nt, Homo sapiens
  misc_RNA (1)...(19): siRNA sense strand
gaaacaauaaucccagauc

SEQ ID NO: 300676 - RNA, 19 nt, Homo sapiens
  misc_RNA (1)...(19): siRNA sense strand
caauaaggauuccacuucu

SEQ ID NO: 300677 - RNA, 19 nt, Homo sapiens
  misc_RNA (1)...(19): siRNA sense strand
caaauuacucugaaugauc

SEQ ID NO: 300678 - RNA, 19 nt, Homo sapiens
  misc_RNA (1)...(19): siRNA sense strand
gaaaccugguagugaaaca

SEQ ID NO: 300679 - RNA, 19 nt, Homo sapiens
  misc_RNA (1)...(19): siRNA sense strand
ccacuucuuucagauuuga

SEQ ID NO: 300680 - RNA, 19 nt, Homo sapiens
  misc_RNA (1)...(19): siRNA sense strand
guagcaugcucuguugauu

SEQ ID NO: 300681 - RNA, 19 nt, Homo sapiens
  misc_RNA (1)...(19): siRNA sense strand
aaaggacuaugguguauac

SEQ ID NO: 300682 - RNA, 19 nt, Homo sapiens
  misc_RNA (1)...(19): siRNA sense strand
auucacaguuuacccauuu

SEQ ID NO: 300683 - RNA, 19 nt, Homo sapiens
  misc_RNA (1)...(19): siRNA sense strand
cauuauugaugacaaagga

SEQ ID NO: 300684 - RNA, 19 nt, Homo sapiens
  misc_RNA (1)...(19): siRNA sense strand
gaugagacacuacguuugg

SEQ ID NO: 300685 - RNA, 19 nt, Homo sapiens
  misc_RNA (1)...(19): siRNA sense strand
cuggaaaccugguagugaa

SEQ ID NO: 300686 - RNA, 19 nt, Homo sapiens
  misc_RNA (1)...(19): siRNA sense strand
ggacucaggccacacucuu

SEQ ID NO: 300687 - RNA, 19 nt, Homo sapiens
  misc_RNA (1)...(19): siRNA sense strand
ugacaaacacggagaaguc

SEQ ID NO: 300688 - RNA, 19 nt, Homo sapiens
  misc_RNA (1)...(19): siRNA sense strand
cgugggaaauacuugguuu

SEQ ID NO: 300689 - RNA, 19 nt, Homo sapiens
  misc_RNA (1)...(19): siRNA sense strand
gauucacaguuuacccauu

SEQ ID NO: 300690 - RNA, 19 nt, Homo sapiens
  misc_RNA (1)...(19): siRNA sense strand
caaaggacuaugguguaua

SEQ ID NO: 300691 - RNA, 19 nt, Homo sapiens
  misc_RNA (1)...(19): siRNA sense strand
gugguagcaugcucuguug

SEQ ID NO: 300692 - RNA, 19 nt, Homo sapiens
  misc_RNA (1)...(19): siRNA sense strand
gcuggaaagcugaaguauu

SEQ ID NO: 300693 - RNA, 19 nt, Homo sapiens
  misc_RNA (1)...(19): siRNA sense strand
gcuggaaaccugguaguga

SEQ ID NO: 300694 - RNA, 19 nt, Homo sapiens
  misc_RNA (1)...(19): siRNA sense strand
guucaagcauuccaguaca

SEQ ID NO: 300695 - RNA, 19 nt, Homo sapiens
  misc_RNA (1)...(19): siRNA sense strand
cccaucagaucucaaagga

SEQ ID NO: 300696 - RNA, 19 nt, Homo sapiens
  misc_RNA (1)...(19): siRNA sense strand
cugauuaucgugggaaaua

SEQ ID NO: 300697 - RNA, 19 nt, Homo sapiens
  misc_RNA (1)...(19): siRNA sense strand
ggaugagacacuacguuug

SEQ ID NO: 300698 - RNA, 19 nt, Homo sapiens
  misc_RNA (1)...(19): siRNA sense strand
auaaggauuccacuucuuu

SEQ ID NO: 300699 - RNA, 19 nt, Homo sapiens
  misc_RNA (1)...(19): siRNA sense strand
cuacgcggguggacaagug

SEQ ID NO: 300700 - RNA, 19 nt, Homo sapiens
  misc_RNA (1)...(19): siRNA sense strand
gaggucucuucauuauuga

SEQ ID NO: 300701 - RNA, 19 nt, Homo sapiens
  misc_RNA (1)...(19): siRNA sense strand
gacucaggccacacucuua

SEQ ID NO: 300702 - RNA, 19 nt, Homo sapiens
  misc_RNA (1)...(19): siRNA sense strand
cccacuugauuucacauuu

SEQ ID NO: 300703 - RNA, 19 nt, Homo sapiens
  misc_RNA (1)...(19): siRNA sense strand
cuaagacaaauuacucuga

SEQ ID NO: 300704 - RNA, 19 nt, Homo sapiens
  misc_RNA (1)...(19): siRNA sense strand
uuucagauuugacccauca

SEQ ID NO: 300705 - RNA, 19 nt, Homo sapiens
  misc_RNA (1)...(19): siRNA sense strand
aauaaggauuccacuucuu

SEQ ID NO: 300706 - RNA, 19 nt, Homo sapiens
  misc_RNA (1)...(19): siRNA sense strand
gaaguauuucgauaaacug

SEQ ID NO: 300707 - RNA, 19 nt, Homo sapiens
  misc_RNA (1)...(19): siRNA sense strand
gacacuacguuugguucaa

SEQ ID NO: 300708 - RNA, 19 nt, Homo sapiens
  misc_RNA (1)...(19): siRNA sense strand
agacaaauuacucugaaug

SEQ ID NO: 300709 - RNA, 19 nt, Homo sapiens
  misc_RNA (1)...(19): siRNA sense strand
ugacccaucagaucucaaa

SEQ ID NO: 300710 - RNA, 19 nt, Homo sapiens
  misc_RNA (1)...(19): siRNA sense strand
gaccacucccugcaccuaa

SEQ ID NO: 300711 - RNA, 19 nt, Homo sapiens
  misc_RNA (1)...(19): siRNA sense strand
uggaugagacacuacguuu

SEQ ID NO: 300712 - RNA, 19 nt, Homo sapiens
  misc_RNA (1)...(19): siRNA sense strand
gaauuuaaggagcugaagu

SEQ ID NO: 300713 - RNA, 19 nt, Homo sapiens
  misc_RNA (1)...(19): siRNA sense strand
agcugaaguuaacugauua

SEQ ID NO: 300714 - RNA, 19 nt, Homo sapiens
  misc_RNA (1)...(19): siRNA sense strand
gagaauuuaaggagcugaa

SEQ ID NO: 300715 - RNA, 19 nt, Homo sapiens
  misc_RNA (1)...(19): siRNA sense strand
ccugguagugaaacaauaa

SEQ ID NO: 300716 - RNA, 19 nt, Homo sapiens
  misc_RNA (1)...(19): siRNA sense strand
aggaacagcugugaucgau

SEQ ID NO: 300717 - RNA, 19 nt, Homo sapiens
  misc_RNA (1)...(19): siRNA sense strand
uuccacuucuuucagauuu

SEQ ID NO: 300718 - RNA, 19 nt, Homo sapiens
  misc_RNA (1)...(19): siRNA sense strand
agcaugcucuguugauuca

SEQ ID NO: 300719 - RNA, 19 nt, Homo sapiens
  misc_RNA (1)...(19): siRNA sense strand
gauuugacccaucagaucu

SEQ ID NO: 300720 - RNA, 19 nt, Homo sapiens
  misc_RNA (1)...(19): siRNA sense strand
gaucgauggagaauuuaag

SEQ ID NO: 300721 - RNA, 19 nt, Homo sapiens
  misc_RNA (1)...(19): siRNA sense strand
cacuugauuucacauuugu

SEQ ID NO: 300722 - RNA, 19 nt, Homo sapiens
  misc_RNA (1)...(19): siRNA sense strand
uacguuugguucaagcauu

SEQ ID NO: 300723 - RNA, 19 nt, Homo sapiens
  misc_RNA (1)...(19): siRNA sense strand
guguccaacugaaauuauc

SEQ ID NO: 300724 - RNA, 19 nt, Homo sapiens
  misc_RNA (1)...(19): siRNA sense strand
ccauuuggccuggauuaau

SEQ ID NO: 300725 - RNA, 19 nt, Homo sapiens
  misc_RNA (1)...(19): siRNA sense strand
caugcucuguugauucaca

SEQ ID NO: 300726 - RNA, 19 nt, Homo sapiens
  misc_RNA (1)...(19): siRNA sense strand
gguagcaugcucuguugau

SEQ ID NO: 300727 - RNA, 19 nt, Homo sapiens
  misc_RNA (1)...(19): siRNA sense strand
uagcaugcucuguugauuc

SEQ ID NO: 300728 - RNA, 19 nt, Homo sapiens
  misc_RNA (1)...(19): siRNA sense strand
acacuacguuugguucaag

SEQ ID NO: 300729 - RNA, 19 nt, Homo sapiens
  misc_RNA (1)...(19): siRNA sense strand
cucaaaggacuauggugua

SEQ ID NO: 300730 - RNA, 19 nt, Homo sapiens
  misc_RNA (1)...(19): siRNA sense strand
cuacccacuugauuucaca

SEQ ID NO: 300731 - RNA, 19 nt, Homo sapiens
  misc_RNA (1)...(19): siRNA sense strand
aauuuaaggagcugaaguu

SEQ ID NO: 300732 - RNA, 19 nt, Homo sapiens
  misc_RNA (1)...(19): siRNA sense strand
acauuuguguguccaacug

SEQ ID NO: 300733 - RNA, 19 nt, Homo sapiens
  misc_RNA (1)...(19): siRNA sense strand
gccaauaaggauuccacuu

SEQ ID NO: 300734 - RNA, 19 nt, Homo sapiens
  misc_RNA (1)...(19): siRNA sense strand
ggucucuucauuauugaug

SEQ ID NO: 300735 - RNA, 19 nt, Homo sapiens
  misc_RNA (1)...(19): siRNA sense strand
gaucucaaaggacuauggu

SEQ ID NO: 300736 - RNA, 19 nt, Homo sapiens
  misc_RNA (1)...(19): siRNA sense strand
gauuccacuucuuucagau

SEQ ID NO: 300737 - RNA, 19 nt, Homo sapiens
  misc_RNA (1)...(19): siRNA sense strand
gaaagaagcugaacuugaa

SEQ ID NO: 300738 - RNA, 19 nt, Homo sapiens
  misc_RNA (1)...(19): siRNA sense strand
gaacagcaguccuaucaaa

SEQ ID NO: 300739 - RNA, 19 nt, Homo sapiens
  misc_RNA (1)...(19): siRNA sense strand
ggaaaugucugaugaugaa

SEQ ID NO: 300740 - RNA, 19 nt, Homo sapiens
  misc_RNA (1)...(19): siRNA sense strand
caaacaagcugaggaaauu

SEQ ID NO: 300741 - RNA, 19 nt, Homo sapiens
  misc_RNA (1)...(19): siRNA sense strand
gaaauucgcaacauucaua

SEQ ID NO: 300742 - RNA, 19 nt, Homo sapiens
  misc_RNA (1)...(19): siRNA sense strand
acucaaagaugacaaguua

SEQ ID NO: 300743 - RNA, 19 nt, Homo sapiens
  misc_RNA (1)...(19): siRNA sense strand
ggaaaugacuggaguugga

SEQ ID NO: 300744 - RNA, 19 nt, Homo sapiens
  misc_RNA (1)...(19): siRNA sense strand
ggaaucagccuuaguauca

SEQ ID NO: 300745 - RNA, 19 nt, Homo sapiens
  misc_RNA (1)...(19): siRNA sense strand
gaaaagagauggaaauucu

SEQ ID NO: 300746 - RNA, 19 nt, Homo sapiens
  misc_RNA (1)...(19): siRNA sense strand
gcaacagcaucuacucaaa

SEQ ID NO: 300747 - RNA, 19 nt, Homo sapiens
  misc_RNA (1)...(19): siRNA sense strand
uaucaaaucugaacgugaa

SEQ ID NO: 300748 - RNA, 19 nt, Homo sapiens
  misc_RNA (1)...(19): siRNA sense strand
ggacagagcaaaucauugu

SEQ ID NO: 300749 - RNA, 19 nt, Homo sapiens
  misc_RNA (1)...(19): siRNA sense strand
gcaaaucauuguggaaguu

SEQ ID NO: 300750 - RNA, 19 nt, Homo sapiens
  misc_RNA (1)...(19): siRNA sense strand
guagaagaauggaagaaga

SEQ ID NO: 300751 - RNA, 19 nt, Homo sapiens
  misc_RNA (1)...(19): siRNA sense strand
aauaguaccuccaccaauu

SEQ ID NO: 300752 - RNA, 19 nt, Homo sapiens
  misc_RNA (1)...(19): siRNA sense strand
gaaagcugcccaugagaaa

SEQ ID NO: 300753 - RNA, 19 nt, Homo sapiens
  misc_RNA (1)...(19): siRNA sense strand
gaagaugacccuaacaaag

SEQ ID NO: 300754 - RNA, 19 nt, Homo sapiens
  misc_RNA (1)...(19): siRNA sense strand
gagcaagcauugaauacau

SEQ ID NO: 300755 - RNA, 19 nt, Homo sapiens
  misc_RNA (1)...(19): siRNA sense strand
ccacagcaaugaauaaucu

SEQ ID NO: 300756 - RNA, 19 nt, Homo sapiens
  misc_RNA (1)...(19): siRNA sense strand
gcaguccuaucaaaucuga

SEQ ID NO: 300757 - RNA, 19 nt, Homo sapiens
  misc_RNA (1)...(19): siRNA sense strand
gcgaauacccucuugagaa

SEQ ID NO: 300758 - RNA, 19 nt, Homo sapiens
  misc_RNA (1)...(19): siRNA sense strand
guacagaccuugcuuaccu

SEQ ID NO: 300759 - RNA, 19 nt, Homo sapiens
  misc_RNA (1)...(19): siRNA sense strand
cgagaaagcugcccaugag

SEQ ID NO: 300760 - RNA, 19 nt, Homo sapiens
  misc_RNA (1)...(19): siRNA sense strand
caacaagcccugcaaggaa

SEQ ID NO: 300761 - RNA, 19 nt, Homo sapiens
  misc_RNA (1)...(19): siRNA sense strand
ugagaaagauauggaagaa

SEQ ID NO: 300762 - RNA, 19 nt, Homo sapiens
  misc_RNA (1)...(19): siRNA sense strand
gaauacaucuguuccuacu

SEQ ID NO: 300763 - RNA, 19 nt, Homo sapiens
  misc_RNA (1)...(19): siRNA sense strand
aaauggaaaugucugauga

SEQ ID NO: 300764 - RNA, 19 nt, Homo sapiens
  misc_RNA (1)...(19): siRNA sense strand
ggacaaagcccuguaucug

SEQ ID NO: 300765 - RNA, 19 nt, Homo sapiens
  misc_RNA (1)...(19): siRNA sense strand
gcaaacaagcugaggaaau

SEQ ID NO: 300766 - RNA, 19 nt, Homo sapiens
  misc_RNA (1)...(19): siRNA sense strand
gaaauggaaaugucugaug

SEQ ID NO: 300767 - RNA, 19 nt, Homo sapiens
  misc_RNA (1)...(19): siRNA sense strand
cgaauacccucuugagaag

SEQ ID NO: 300768 - RNA, 19 nt, Homo sapiens
  misc_RNA (1)...(19): siRNA sense strand
gaagaaaugacagaaacaa

SEQ ID NO: 300769 - RNA, 19 nt, Homo sapiens
  misc_RNA (1)...(19): siRNA sense strand
ugaggaaauucgcaacauu

SEQ ID NO: 300770 - RNA, 19 nt, Homo sapiens
  misc_RNA (1)...(19): siRNA sense strand
gagaagaugacccuaacaa

SEQ ID NO: 300771 - RNA, 19 nt, Homo sapiens
  misc_RNA (1)...(19): siRNA sense strand
ugaggaaucagccuuagua

SEQ ID NO: 300772 - RNA, 19 nt, Homo sapiens
  misc_RNA (1)...(19): siRNA sense strand
gaggagcgccaucguagaa

SEQ ID NO: 300773 - RNA, 19 nt, Homo sapiens
  misc_RNA (1)...(19): siRNA sense strand
auacaucuguuccuacuug

SEQ ID NO: 300774 - RNA, 19 nt, Homo sapiens
  misc_RNA (1)...(19): siRNA sense strand
gcaacaagcccugcaagga

SEQ ID NO: 300775 - RNA, 19 nt, Homo sapiens
  misc_RNA (1)...(19): siRNA sense strand
accaauaacuccaaugaug

SEQ ID NO: 300776 - RNA, 19 nt, Homo sapiens
  misc_RNA (1)...(19): siRNA sense strand
aaagaaagaagcugaacuu

SEQ ID NO: 300777 - RNA, 19 nt, Homo sapiens
  misc_RNA (1)...(19): siRNA sense strand
gauaguggcuguguaccau

SEQ ID NO: 300778 - RNA, 19 nt, Homo sapiens
  misc_RNA (1)...(19): siRNA sense strand
caaaggagaaguucaagca

SEQ ID NO: 300779 - RNA, 19 nt, Homo sapiens
  misc_RNA (1)...(19): siRNA sense strand
ggagagaucauugccauuc

SEQ ID NO: 300780 - RNA, 19 nt, Homo sapiens
  misc_RNA (1)...(19): siRNA sense strand
ccagauaugccaguaguaa

SEQ ID NO: 300781 - RNA, 19 nt, Homo sapiens
  misc_RNA (1)...(19): siRNA sense strand
cccuguaucugucugguua

SEQ ID NO: 300782 - RNA, 19 nt, Homo sapiens
  misc_RNA (1)...(19): siRNA sense strand
agaaagaagcugaacuuga

SEQ ID NO: 300783 - RNA, 19 nt, Homo sapiens
  misc_RNA (1)...(19): siRNA sense strand
uagaagaaaugacagaaac

SEQ ID NO: 300784 - RNA, 19 nt, Homo sapiens
  misc_RNA (1)...(19): siRNA sense strand
gaagaagaaauggaaaugu

SEQ ID NO: 300785 - RNA, 19 nt, Homo sapiens
  misc_RNA (1)...(19): siRNA sense strand
ggagaggucaaccgucgua

SEQ ID NO: 300786 - RNA, 19 nt, Homo sapiens
  misc_RNA (1)...(19): siRNA sense strand
gacaaagcccuguaucugu

SEQ ID NO: 300787 - RNA, 19 nt, Homo sapiens
  misc_RNA (1)...(19): siRNA sense strand
gggauuaucuccacauucc

SEQ ID NO: 300788 - RNA, 19 nt, Homo sapiens
  misc_RNA (1)...(19): siRNA sense strand
gauagcgaauacccucuug

SEQ ID NO: 300789 - RNA, 19 nt, Homo sapiens
  misc_RNA (1)...(19): siRNA sense strand
aagaugacccuaacaaaga

SEQ ID NO: 300790 - RNA, 19 nt, Homo sapiens
  misc_RNA (1)...(19): siRNA sense strand
gcgagaagaagaaauggaa

SEQ ID NO: 300791 - RNA, 19 nt, Homo sapiens
  misc_RNA (1)...(19): siRNA sense strand
gaauggaagaagaaagauu

SEQ ID NO: 300792 - RNA, 19 nt, Homo sapiens
  misc_RNA (1)...(19): siRNA sense strand
ggagcgccaucguagaaga

SEQ ID NO: 300793 - RNA, 19 nt, Homo sapiens
  misc_RNA (1)...(19): siRNA sense strand
gcaggcccuuucuggaauu

SEQ ID NO: 300794 - RNA, 19 nt, Homo sapiens
  misc_RNA (1)...(19): siRNA sense strand
ggaauaguaccuccaccaa

SEQ ID NO: 300795 - RNA, 19 nt, Homo sapiens
  misc_RNA (1)...(19): siRNA sense strand
ggaauugccggacaaccaa

SEQ ID NO: 300796 - RNA, 19 nt, Homo sapiens
  misc_RNA (1)...(19): siRNA sense strand
gcaagaacaaggcaaaguc

SEQ ID NO: 300797 - RNA, 19 nt, Homo sapiens
  misc_RNA (1)...(19): siRNA sense strand
aagaagaaauggaaauguc

SEQ ID NO: 300798 - RNA, 19 nt, Homo sapiens
  misc_RNA (1)...(19): siRNA sense strand
gagaagaagaaauggaaau

SEQ ID NO: 300799 - RNA, 19 nt, Homo sapiens
  misc_RNA (1)...(19): siRNA sense strand
gaggaaauucgcaacauuc

SEQ ID NO: 300800 - RNA, 19 nt, Homo sapiens
  misc_RNA (1)...(19): siRNA sense strand
ccaauaacuucuacuccau

SEQ ID NO: 300801 - RNA, 19 nt, Homo sapiens
  misc_RNA (1)...(19): siRNA sense strand
ccaccaauuccuccagaua

SEQ ID NO: 300802 - RNA, 19 nt, Homo sapiens
  misc_RNA (1)...(19): siRNA sense strand
ccaccaauaacuccaauga

SEQ ID NO: 300803 - RNA, 19 nt, Homo sapiens
  misc_RNA (1)...(19): siRNA sense strand
gcagacuccacguugauuu

SEQ ID NO: 300804 - RNA, 19 nt, Homo sapiens
  misc_RNA (1)...(19): siRNA sense strand
gcaagagcaagaagaacuu

SEQ ID NO: 300805 - RNA, 19 nt, Homo sapiens
  misc_RNA (1)...(19): siRNA sense strand
gcucuaguacugacaagaa

SEQ ID NO: 300806 - RNA, 19 nt, Homo sapiens
  misc_RNA (1)...(19): siRNA sense strand
gcaaugaauaaucuuggaa

SEQ ID NO: 300807 - RNA, 19 nt, Homo sapiens
  misc_RNA (1)...(19): siRNA sense strand
cgagaaagaccaccaggau

SEQ ID NO: 300808 - RNA, 19 nt, Homo sapiens
  misc_RNA (1)...(19): siRNA sense strand
gaccuugcuuaccuggaua

SEQ ID NO: 300809 - RNA, 19 nt, Homo sapiens
  misc_RNA (1)...(19): siRNA sense strand
gaauaguaccuccaccaau

SEQ ID NO: 300810 - RNA, 19 nt, Homo sapiens
  misc_RNA (1)...(19): siRNA sense strand
aaaagaaacugaggaauca

SEQ ID NO: 300811 - RNA, 19 nt, Homo sapiens
  misc_RNA (1)...(19): siRNA sense strand
gcagauaguggcuguguac

SEQ ID NO: 300812 - RNA, 19 nt, Homo sapiens
  misc_RNA (1)...(19): siRNA sense strand
ggaauuccaccaauaacuc

SEQ ID NO: 300813 - RNA, 19 nt, Homo sapiens
  misc_RNA (1)...(19): siRNA sense strand
caaaccaggauagcgaaua

SEQ ID NO: 300814 - RNA, 19 nt, Homo sapiens
  misc_RNA (1)...(19): siRNA sense strand
ucaaaguccaagaggaaua

SEQ ID NO: 300815 - RNA, 19 nt, Homo sapiens
  misc_RNA (1)...(19): siRNA sense strand
cagagaagaugacccuaac

SEQ ID NO: 300816 - RNA, 19 nt, Homo sapiens
  misc_RNA (1)...(19): siRNA sense strand
caagcaagaacaaggcaaa

SEQ ID NO: 300817 - RNA, 19 nt, Homo sapiens
  misc_RNA (1)...(19): siRNA sense strand
cagcaguccuaucaaaucu

SEQ ID NO: 300818 - RNA, 19 nt, Homo sapiens
  misc_RNA (1)...(19): siRNA sense strand
gcucuucccuccaaaucca

SEQ ID NO: 300819 - RNA, 19 nt, Homo sapiens
  misc_RNA (1)...(19): siRNA sense strand
aaaccaggauagcgaauac

SEQ ID NO: 300820 - RNA, 19 nt, Homo sapiens
  misc_RNA (1)...(19): siRNA sense strand
ucaaagaugacaaguuaca

SEQ ID NO: 300821 - RNA, 19 nt, Homo sapiens
  misc_RNA (1)...(19): siRNA sense strand
agaugacccuaacaaagaa

SEQ ID NO: 300822 - RNA, 19 nt, Homo sapiens
  misc_RNA (1)...(19): siRNA sense strand
ggaagaagcaaaggagaag

SEQ ID NO: 300823 - RNA, 19 nt, Homo sapiens
  misc_RNA (1)...(19): siRNA sense strand
cgagaugaccuguaugagu

SEQ ID NO: 300824 - RNA, 19 nt, Homo sapiens
  misc_RNA (1)...(19): siRNA sense strand
ugcaccgucuugauaauaa

SEQ ID NO: 300825 - RNA, 19 nt, Homo sapiens
  misc_RNA (1)...(19): siRNA sense strand
gggaaucaggcgagaagaa

SEQ ID NO: 300826 - RNA, 19 nt, Homo sapiens
  misc_RNA (1)...(19): siRNA sense strand
caugggaccacuucacaaa

SEQ ID NO: 300827 - RNA, 19 nt, Homo sapiens
  misc_RNA (1)...(19): siRNA sense strand
aagaauggaagaagaaaga

SEQ ID NO: 300828 - RNA, 19 nt, Homo sapiens
  misc_RNA (1)...(19): siRNA sense strand
uagaagaauggaagaagaa

SEQ ID NO: 300829 - RNA, 19 nt, Homo sapiens
  misc_RNA (1)...(19): siRNA sense strand
uugaauacaucuguuccua

SEQ ID NO: 300830 - RNA, 19 nt, Homo sapiens
  misc_RNA (1)...(19): siRNA sense strand
caacagcaucuacucaaag

SEQ ID NO: 300831 - RNA, 19 nt, Homo sapiens
  misc_RNA (1)...(19): siRNA sense strand
gcaaaguccacagagaaga

SEQ ID NO: 300832 - RNA, 19 nt, Homo sapiens
  misc_RNA (1)...(19): siRNA sense strand
uaacuucuacuccaugauc

SEQ ID NO: 300833 - RNA, 19 nt, Homo sapiens
  misc_RNA (1)...(19): siRNA sense strand
aauaacuucuacuccauga

SEQ ID NO: 300834 - RNA, 19 nt, Homo sapiens
  misc_RNA (1)...(19): siRNA sense strand
gaauggcaccgcugggaau

SEQ ID NO: 300835 - RNA, 19 nt, Homo sapiens
  misc_RNA (1)...(19): siRNA sense strand
cagaagcuguacagaccuu

SEQ ID NO: 300836 - RNA, 19 nt, Homo sapiens
  misc_RNA (1)...(19): siRNA sense strand
acagagaagaugacccuaa

SEQ ID NO: 300837 - RNA, 19 nt, Homo sapiens
  misc_RNA (1)...(19): siRNA sense strand
gaaagaagcugaacuugaa

SEQ ID NO: 300838 - RNA, 19 nt, Homo sapiens
  misc_RNA (1)...(19): siRNA sense strand
gaacagcaguccuaucaaa

SEQ ID NO: 300839 - RNA, 19 nt, Homo sapiens
  misc_RNA (1)...(19): siRNA sense strand
ggaaaugucugaugaugaa

SEQ ID NO: 300840 - RNA, 19 nt, Homo sapiens
  misc_RNA (1)...(19): siRNA sense strand
caaacaagcugaggaaauu

SEQ ID NO: 300841 - RNA, 19 nt, Homo sapiens
  misc_RNA (1)...(19): siRNA sense strand
gaaauucgcaacauucaua

SEQ ID NO: 300842 - RNA, 19 nt, Homo sapiens
  misc_RNA (1)...(19): siRNA sense strand
acucaaagaugacaaguua

SEQ ID NO: 300843 - RNA, 19 nt, Homo sapiens
  misc_RNA (1)...(19): siRNA sense strand
ggaaaugacuggaguugga

SEQ ID NO: 300844 - RNA, 19 nt, Homo sapiens
  misc_RNA (1)...(19): siRNA sense strand
ggaaucagccuuaguauca

SEQ ID NO: 300845 - RNA, 19 nt, Homo sapiens
  misc_RNA (1)...(19): siRNA sense strand
gaaaagagauggaaauucu

SEQ ID NO: 300846 - RNA, 19 nt, Homo sapiens
  misc_RNA (1)...(19): siRNA sense strand
gcaacagcaucuacucaaa

SEQ ID NO: 300847 - RNA, 19 nt, Homo sapiens
  misc_RNA (1)...(19): siRNA sense strand
uaucaaaucugaacgugaa

SEQ ID NO: 300848 - RNA, 19 nt, Homo sapiens
  misc_RNA (1)...(19): siRNA sense strand
ggacagagcaaaucauugu

SEQ ID NO: 300849 - RNA, 19 nt, Homo sapiens
  misc_RNA (1)...(19): siRNA sense strand
gcaaugacacuaccuaugu

SEQ ID NO: 300850 - RNA, 19 nt, Homo sapiens
  misc_RNA (1)...(19): siRNA sense strand
gcaaaucauuguggaaguu

SEQ ID NO: 300851 - RNA, 19 nt, Homo sapiens
  misc_RNA (1)...(19): siRNA sense strand
guagaagaauggaagaaga

SEQ ID NO: 300852 - RNA, 19 nt, Homo sapiens
  misc_RNA (1)...(19): siRNA sense strand
aauaguaccuccaccaauu

SEQ ID NO: 300853 - RNA, 19 nt, Homo sapiens
  misc_RNA (1)...(19): siRNA sense strand
gaaagcugcccaugagaaa

SEQ ID NO: 300854 - RNA, 19 nt, Homo sapiens
  misc_RNA (1)...(19): siRNA sense strand
ccacagcaaugaauaaucu

SEQ ID NO: 300855 - RNA, 19 nt, Homo sapiens
  misc_RNA (1)...(19): siRNA sense strand
gagcaagcauugaauacau

SEQ ID NO: 300856 - RNA, 19 nt, Homo sapiens
  misc_RNA (1)...(19): siRNA sense strand
gcaguccuaucaaaucuga

SEQ ID NO: 300857 - RNA, 19 nt, Homo sapiens
  misc_RNA (1)...(19): siRNA sense strand
gcgaauacccucuugagaa

SEQ ID NO: 300858 - RNA, 19 nt, Homo sapiens
  misc_RNA (1)...(19): siRNA sense strand
gaagaugacccuaacaaag

SEQ ID NO: 300859 - RNA, 19 nt, Homo sapiens
  misc_RNA (1)...(19): siRNA sense strand
guacagaccuugcuuaccu

SEQ ID NO: 300860 - RNA, 19 nt, Homo sapiens
  misc_RNA (1)...(19): siRNA sense strand
cgagaaagcugcccaugag

SEQ ID NO: 300861 - RNA, 19 nt, Homo sapiens
  misc_RNA (1)...(19): siRNA sense strand
caacaagcccugcaaggaa

SEQ ID NO: 300862 - RNA, 19 nt, Homo sapiens
  misc_RNA (1)...(19): siRNA sense strand
ugagaaagauauggaagaa

SEQ ID NO: 300863 - RNA, 19 nt, Homo sapiens
  misc_RNA (1)...(19): siRNA sense strand
gaauacaucuguuccuacu

SEQ ID NO: 300864 - RNA, 19 nt, Homo sapiens
  misc_RNA (1)...(19): siRNA sense strand
aaauggaaaugucugauga

SEQ ID NO: 300865 - RNA, 19 nt, Homo sapiens
  misc_RNA (1)...(19): siRNA sense strand
ggacaaagcccuguaucug

SEQ ID NO: 300866 - RNA, 19 nt, Homo sapiens
  misc_RNA (1)...(19): siRNA sense strand
gcaaacaagcugaggaaau

SEQ ID NO: 300867 - RNA, 19 nt, Homo sapiens
  misc_RNA (1)...(19): siRNA sense strand
gaaauggaaaugucugaug

SEQ ID NO: 300868 - RNA, 19 nt, Homo sapiens
  misc_RNA (1)...(19): siRNA sense strand
cgaauacccucuugagaag

SEQ ID NO: 300869 - RNA, 19 nt, Homo sapiens
  misc_RNA (1)...(19): siRNA sense strand
gaagaaaugacagaaacaa

SEQ ID NO: 300870 - RNA, 19 nt, Homo sapiens
  misc_RNA (1)...(19): siRNA sense strand
gauaacaguagaacucuga

SEQ ID NO: 300871 - RNA, 19 nt, Homo sapiens
  misc_RNA (1)...(19): siRNA sense strand
ugaggaaauucgcaacauu

SEQ ID NO: 300872 - RNA, 19 nt, Homo sapiens
  misc_RNA (1)...(19): siRNA sense strand
gagaagaugacccuaacaa

SEQ ID NO: 300873 - RNA, 19 nt, Homo sapiens
  misc_RNA (1)...(19): siRNA sense strand
ugaggaaucagccuuagua

SEQ ID NO: 300874 - RNA, 19 nt, Homo sapiens
  misc_RNA (1)...(19): siRNA sense strand
gaggagcgccaucguagaa

SEQ ID NO: 300875 - RNA, 19 nt, Homo sapiens
  misc_RNA (1)...(19): siRNA sense strand
auacaucuguuccuacuug

SEQ ID NO: 300876 - RNA, 19 nt, Homo sapiens
  misc_RNA (1)...(19): siRNA sense strand
gcaacaagcccugcaagga

SEQ ID NO: 300877 - RNA, 19 nt, Homo sapiens
  misc_RNA (1)...(19): siRNA sense strand
accaauaacuccaaugaug

SEQ ID NO: 300878 - RNA, 19 nt, Homo sapiens
  misc_RNA (1)...(19): siRNA sense strand
aaagaaagaagcugaacuu

SEQ ID NO: 300879 - RNA, 19 nt, Homo sapiens
  misc_RNA (1)...(19): siRNA sense strand
gauaguggcuguguaccau

SEQ ID NO: 300880 - RNA, 19 nt, Homo sapiens
  misc_RNA (1)...(19): siRNA sense strand
caaaggagaaguucaagca

SEQ ID NO: 300881 - RNA, 19 nt, Homo sapiens
  misc_RNA (1)...(19): siRNA sense strand
ggagagaucauugccauuc

SEQ ID NO: 300882 - RNA, 19 nt, Homo sapiens
  misc_RNA (1)...(19): siRNA sense strand
ccagauaugccaguaguaa

SEQ ID NO: 300883 - RNA, 19 nt, Homo sapiens
  misc_RNA (1)...(19): siRNA sense strand
cccuguaucugucugguua

SEQ ID NO: 300884 - RNA, 19 nt, Homo sapiens
  misc_RNA (1)...(19): siRNA sense strand
agaaagaagcugaacuuga

SEQ ID NO: 300885 - RNA, 19 nt, Homo sapiens
  misc_RNA (1)...(19): siRNA sense strand
uagaagaaaugacagaaac

SEQ ID NO: 300886 - RNA, 19 nt, Homo sapiens
  misc_RNA (1)...(19): siRNA sense strand
gaagaagaaauggaaaugu

SEQ ID NO: 300887 - RNA, 19 nt, Homo sapiens
  misc_RNA (1)...(19): siRNA sense strand
ggagaggucaaccgucgua

SEQ ID NO: 300888 - RNA, 19 nt, Homo sapiens
  misc_RNA (1)...(19): siRNA sense strand
gacaaagcccuguaucugu

SEQ ID NO: 300889 - RNA, 19 nt, Homo sapiens
  misc_RNA (1)...(19): siRNA sense strand
gggauuaucuccacauucc

SEQ ID NO: 300890 - RNA, 19 nt, Homo sapiens
  misc_RNA (1)...(19): siRNA sense strand
gauagcgaauacccucuug

SEQ ID NO: 300891 - RNA, 19 nt, Homo sapiens
  misc_RNA (1)...(19): siRNA sense strand
aagaugacccuaacaaaga

SEQ ID NO: 300892 - RNA, 19 nt, Homo sapiens
  misc_RNA (1)...(19): siRNA sense strand
gcgagaagaagaaauggaa

SEQ ID NO: 300893 - RNA, 19 nt, Homo sapiens
  misc_RNA (1)...(19): siRNA sense strand
gaauggaagaagaaagauu

SEQ ID NO: 300894 - RNA, 19 nt, Homo sapiens
  misc_RNA (1)...(19): siRNA sense strand
ggagcgccaucguagaaga

SEQ ID NO: 300895 - RNA, 19 nt, Homo sapiens
  misc_RNA (1)...(19): siRNA sense strand
gcaggcccuuucuggaauu

SEQ ID NO: 300896 - RNA, 19 nt, Homo sapiens
  misc_RNA (1)...(19): siRNA sense strand
ggaauaguaccuccaccaa

SEQ ID NO: 300897 - RNA, 19 nt, Homo sapiens
  misc_RNA (1)...(19): siRNA sense strand
gcaagaacaaggcaaaguc

SEQ ID NO: 300898 - RNA, 19 nt, Homo sapiens
  misc_RNA (1)...(19): siRNA sense strand
aagaagaaauggaaauguc

SEQ ID NO: 300899 - RNA, 19 nt, Homo sapiens
  misc_RNA (1)...(19): siRNA sense strand
gagaagaagaaauggaaau

SEQ ID NO: 300900 - RNA, 19 nt, Homo sapiens
  misc_RNA (1)...(19): siRNA sense strand
gaggaaauucgcaacauuc

SEQ ID NO: 300901 - RNA, 19 nt, Homo sapiens
  misc_RNA (1)...(19): siRNA sense strand
ccaauaacuucuacuccau

SEQ ID NO: 300902 - RNA, 19 nt, Homo sapiens
  misc_RNA (1)...(19): siRNA sense strand
ggaauugccggacaaccaa

SEQ ID NO: 300903 - RNA, 19 nt, Homo sapiens
  misc_RNA (1)...(19): siRNA sense strand
ggauuccacugcaaugaca

SEQ ID NO: 300904 - RNA, 19 nt, Homo sapiens
  misc_RNA (1)...(19): siRNA sense strand
ccaccaauaacuccaauga

SEQ ID NO: 300905 - RNA, 19 nt, Homo sapiens
  misc_RNA (1)...(19): siRNA sense strand
gcagacuccacguugauuu

SEQ ID NO: 300906 - RNA, 19 nt, Homo sapiens
  misc_RNA (1)...(19): siRNA sense strand
gcaagagcaagaagaacuu

SEQ ID NO: 300907 - RNA, 19 nt, Homo sapiens
  misc_RNA (1)...(19): siRNA sense strand
ccaccaauuccuccagaua

SEQ ID NO: 300908 - RNA, 19 nt, Homo sapiens
  misc_RNA (1)...(19): siRNA sense strand
gcucuaguacugacaagaa

SEQ ID NO: 300909 - RNA, 19 nt, Homo sapiens
  misc_RNA (1)...(19): siRNA sense strand
gcaaugaauaaucuuggaa

SEQ ID NO: 300910 - RNA, 19 nt, Homo sapiens
  misc_RNA (1)...(19): siRNA sense strand
cgagaaagaccaccaggau

SEQ ID NO: 300911 - RNA, 19 nt, Homo sapiens
  misc_RNA (1)...(19): siRNA sense strand
gaccuugcuuaccuggaua

SEQ ID NO: 300912 - RNA, 19 nt, Homo sapiens
  misc_RNA (1)...(19): siRNA sense strand
gaauaguaccuccaccaau

SEQ ID NO: 300913 - RNA, 19 nt, Homo sapiens
  misc_RNA (1)...(19): siRNA sense strand
aaaagaaacugaggaauca

SEQ ID NO: 300914 - RNA, 19 nt, Homo sapiens
  misc_RNA (1)...(19): siRNA sense strand
gcagauaguggcuguguac

SEQ ID NO: 300915 - RNA, 19 nt, Homo sapiens
  misc_RNA (1)...(19): siRNA sense strand
caaaccaggauagcgaaua

SEQ ID NO: 300916 - RNA, 19 nt, Homo sapiens
  misc_RNA (1)...(19): siRNA sense strand
ucaaaguccaagaggaaua

SEQ ID NO: 300917 - RNA, 19 nt, Homo sapiens
  misc_RNA (1)...(19): siRNA sense strand
ggaauuccaccaauaacuc

SEQ ID NO: 300918 - RNA, 19 nt, Homo sapiens
  misc_RNA (1)...(19): siRNA sense strand
cagagaagaugacccuaac

SEQ ID NO: 300919 - RNA, 19 nt, Homo sapiens
  misc_RNA (1)...(19): siRNA sense strand
caagcaagaacaaggcaaa

SEQ ID NO: 300920 - RNA, 19 nt, Homo sapiens
  misc_RNA (1)...(19): siRNA sense strand
cagcaguccuaucaaaucu

SEQ ID NO: 300921 - RNA, 19 nt, Homo sapiens
  misc_RNA (1)...(19): siRNA sense strand
gcucuucccuccaaaucca

SEQ ID NO: 300922 - RNA, 19 nt, Homo sapiens
  misc_RNA (1)...(19): siRNA sense strand
aaaccaggauagcgaauac

SEQ ID NO: 300923 - RNA, 19 nt, Homo sapiens
  misc_RNA (1)...(19): siRNA sense strand
ucaaagaugacaaguuaca

SEQ ID NO: 300924 - RNA, 19 nt, Homo sapiens
  misc_RNA (1)...(19): siRNA sense strand
agaugacccuaacaaagaa

SEQ ID NO: 300925 - RNA, 19 nt, Homo sapiens
  misc_RNA (1)...(19): siRNA sense strand
ggaagaagcaaaggagaag

SEQ ID NO: 300926 - RNA, 19 nt, Homo sapiens
  misc_RNA (1)...(19): siRNA sense strand
cgagaugaccuguaugagu

SEQ ID NO: 300927 - RNA, 19 nt, Homo sapiens
  misc_RNA (1)...(19): siRNA sense strand
ugcaccgucuugauaauaa

SEQ ID NO: 300928 - RNA, 19 nt, Homo sapiens
  misc_RNA (1)...(19): siRNA sense strand
gaacucugaacguggauuc

SEQ ID NO: 300929 - RNA, 19 nt, Homo sapiens
  misc_RNA (1)...(19): siRNA sense strand
gggaaucaggcgagaagaa

SEQ ID NO: 300930 - RNA, 19 nt, Homo sapiens
  misc_RNA (1)...(19): siRNA sense strand
caugggaccacuucacaaa

SEQ ID NO: 300931 - RNA, 19 nt, Homo sapiens
  misc_RNA (1)...(19): siRNA sense strand
aagaauggaagaagaaaga

SEQ ID NO: 300932 - RNA, 19 nt, Homo sapiens
  misc_RNA (1)...(19): siRNA sense strand
aauaacuucuacuccauga

SEQ ID NO: 300933 - RNA, 19 nt, Homo sapiens
  misc_RNA (1)...(19): siRNA sense strand
uugaauacaucuguuccua

SEQ ID NO: 300934 - RNA, 19 nt, Homo sapiens
  misc_RNA (1)...(19): siRNA sense strand
caacagcaucuacucaaag

SEQ ID NO: 300935 - RNA, 19 nt, Homo sapiens
  misc_RNA (1)...(19): siRNA sense strand
gcaaaguccacagagaaga

SEQ ID NO: 300936 - RNA, 19 nt, Homo sapiens
  misc_RNA (1)...(19): siRNA sense strand
uaacuucuacuccaugauc

SEQ ID NO: 300937 - RNA, 19 nt, Homo sapiens
  misc_RNA (1)...(19): siRNA sense strand
gcaacaaaguggauauuaa

SEQ ID NO: 300938 - RNA, 19 nt, Homo sapiens
  misc_RNA (1)...(19): siRNA sense strand
gaaauucgguggacugaga

SEQ ID NO: 300939 - RNA, 19 nt, Homo sapiens
  misc_RNA (1)...(19): siRNA sense strand
caacugcucucccggauga

SEQ ID NO: 300940 - RNA, 19 nt, Homo sapiens
  misc_RNA (1)...(19): siRNA sense strand
ucauuugacuggugaauuu

SEQ ID NO: 300941 - RNA, 19 nt, Homo sapiens
  misc_RNA (1)...(19): siRNA sense strand
guucaaacuuguauugguu

SEQ ID NO: 300942 - RNA, 19 nt, Homo sapiens
  misc_RNA (1)...(19): siRNA sense strand
gcauagagaucugguacga

SEQ ID NO: 300943 - RNA, 19 nt, Homo sapiens
  misc_RNA (1)...(19): siRNA sense strand
cagaggaccuauuaaguuc

SEQ ID NO: 300944 - RNA, 19 nt, Homo sapiens
  misc_RNA (1)...(19): siRNA sense strand
gacccuaacuuggaauuug

SEQ ID NO: 300945 - RNA, 19 nt, Homo sapiens
  misc_RNA (1)...(19): siRNA sense strand
caacagaggaccuauuaag

SEQ ID NO: 300946 - RNA, 19 nt, Homo sapiens
  misc_RNA (1)...(19): siRNA sense strand
caacaaaguggauauuaag

SEQ ID NO: 300947 - RNA, 19 nt, Homo sapiens
  misc_RNA (1)...(19): siRNA sense strand
acugagagauggcuauuau

SEQ ID NO: 300948 - RNA, 19 nt, Homo sapiens
  misc_RNA (1)...(19): siRNA sense strand
gaggaccuauuaaguucaa

SEQ ID NO: 300949 - RNA, 19 nt, Homo sapiens
  misc_RNA (1)...(19): siRNA sense strand
ugagagauggcuauuauau

SEQ ID NO: 300950 - RNA, 19 nt, Homo sapiens
  misc_RNA (1)...(19): siRNA sense strand
acaagaaugugccuaacug

SEQ ID NO: 300951 - RNA, 19 nt, Homo sapiens
  misc_RNA (1)...(19): siRNA sense strand
gaaaacauccccauugugu

SEQ ID NO: 300952 - RNA, 19 nt, Homo sapiens
  misc_RNA (1)...(19): siRNA sense strand
acagaggaccuauuaaguu

SEQ ID NO: 300953 - RNA, 19 nt, Homo sapiens
  misc_RNA (1)...(19): siRNA sense strand
ggaaagugaaggcgaaauc

SEQ ID NO: 300954 - RNA, 19 nt, Homo sapiens
  misc_RNA (1)...(19): siRNA sense strand
ggcaacaaaguggauauua

SEQ ID NO: 300955 - RNA, 19 nt, Homo sapiens
  misc_RNA (1)...(19): siRNA sense strand
ugaggaugaugaccuguga

SEQ ID NO: 300956 - RNA, 19 nt, Homo sapiens
  misc_RNA (1)...(19): siRNA sense strand
cgaaauccauugucuucca

SEQ ID NO: 300957 - RNA, 19 nt, Homo sapiens
  misc_RNA (1)...(19): siRNA sense strand
agagauggcuauuauaucc

SEQ ID NO: 300958 - RNA, 19 nt, Homo sapiens
  misc_RNA (1)...(19): siRNA sense strand
cuacgacauuucugccaaa

SEQ ID NO: 300959 - RNA, 19 nt, Homo sapiens
  misc_RNA (1)...(19): siRNA sense strand
agaaguauguagccaccuu

SEQ ID NO: 300960 - RNA, 19 nt, Homo sapiens
  misc_RNA (1)...(19): siRNA sense strand
accaacagaggaccuauua

SEQ ID NO: 300961 - RNA, 19 nt, Homo sapiens
  misc_RNA (1)...(19): siRNA sense strand
ggacugagagauggcuauu

SEQ ID NO: 300962 - RNA, 19 nt, Homo sapiens
  misc_RNA (1)...(19): siRNA sense strand
gagagauggcuauuauauc

SEQ ID NO: 300963 - RNA, 19 nt, Homo sapiens
  misc_RNA (1)...(19): siRNA sense strand
gugaauuugagaagaagua

SEQ ID NO: 300964 - RNA, 19 nt, Homo sapiens
  misc_RNA (1)...(19): siRNA sense strand
uaacuggcauagagaucug

SEQ ID NO: 300965 - RNA, 19 nt, Homo sapiens
  misc_RNA (1)...(19): siRNA sense strand
gagaaauucgguggacuga

SEQ ID NO: 300966 - RNA, 19 nt, Homo sapiens
  misc_RNA (1)...(19): siRNA sense strand
cauuggagacccuaacuug

SEQ ID NO: 300967 - RNA, 19 nt, Homo sapiens
  misc_RNA (1)...(19): siRNA sense strand
ggcgaaauccauugucuuc

SEQ ID NO: 300968 - RNA, 19 nt, Homo sapiens
  misc_RNA (1)...(19): siRNA sense strand
agaguuacuuacaagaaug

SEQ ID NO: 300969 - RNA, 19 nt, Homo sapiens
  misc_RNA (1)...(19): siRNA sense strand
cuggugaauuugagaagaa

SEQ ID NO: 300970 - RNA, 19 nt, Homo sapiens
  misc_RNA (1)...(19): siRNA sense strand
uggagacccuaacuuggaa

SEQ ID NO: 300971 - RNA, 19 nt, Homo sapiens
  misc_RNA (1)...(19): siRNA sense strand
ccagugugccaucauaaug

SEQ ID NO: 300972 - RNA, 19 nt, Homo sapiens
  misc_RNA (1)...(19): siRNA sense strand
cgacauuucugccaaaagu

SEQ ID NO: 300973 - RNA, 19 nt, Homo sapiens
  misc_RNA (1)...(19): siRNA sense strand
acaguaugagcacgacuua

SEQ ID NO: 300974 - RNA, 19 nt, Homo sapiens
  misc_RNA (1)...(19): siRNA sense strand
ggaccuauuaaguucaaug

SEQ ID NO: 300975 - RNA, 19 nt, Homo sapiens
  misc_RNA (1)...(19): siRNA sense strand
aguaugagcacgacuuaga

SEQ ID NO: 300976 - RNA, 19 nt, Homo sapiens
  misc_RNA (1)...(19): siRNA sense strand
gauauuaaggacaggaaag

SEQ ID NO: 300977 - RNA, 19 nt, Homo sapiens
  misc_RNA (1)...(19): siRNA sense strand
acaaaguggauauuaagga

SEQ ID NO: 300978 - RNA, 19 nt, Homo sapiens
  misc_RNA (1)...(19): siRNA sense strand
gugaaaacauccccauugu

SEQ ID NO: 300979 - RNA, 19 nt, Homo sapiens
  misc_RNA (1)...(19): siRNA sense strand
cuucaguacuacgacauuu

SEQ ID NO: 300980 - RNA, 19 nt, Homo sapiens
  misc_RNA (1)...(19): siRNA sense strand
ggauauuaaggacaggaaa

SEQ ID NO: 300981 - RNA, 19 nt, Homo sapiens
  misc_RNA (1)...(19): siRNA sense strand
agauggcuauuauauccaa

SEQ ID NO: 300982 - RNA, 19 nt, Homo sapiens
  misc_RNA (1)...(19): siRNA sense strand
ugucauggacccagcuuug

SEQ ID NO: 300983 - RNA, 19 nt, Homo sapiens
  misc_RNA (1)...(19): siRNA sense strand
gaauuugagaagaaguaug

SEQ ID NO: 300984 - RNA, 19 nt, Homo sapiens
  misc_RNA (1)...(19): siRNA sense strand
ccaacagaggaccuauuaa

SEQ ID NO: 300985 - RNA, 19 nt, Homo sapiens
  misc_RNA (1)...(19): siRNA sense strand
gacugagagauggcuauua

SEQ ID NO: 300986 - RNA, 19 nt, Homo sapiens
  misc_RNA (1)...(19): siRNA sense strand
ggugauggugguacuggaa

SEQ ID NO: 300987 - RNA, 19 nt, Homo sapiens
  misc_RNA (1)...(19): siRNA sense strand
gcccagugugccaucauaa

SEQ ID NO: 300988 - RNA, 19 nt, Homo sapiens
  misc_RNA (1)...(19): siRNA sense strand
gaccuauuaaguucaaugu

SEQ ID NO: 300989 - RNA, 19 nt, Homo sapiens
  misc_RNA (1)...(19): siRNA sense strand
gugccaucauaauguuuga

SEQ ID NO: 300990 - RNA, 19 nt, Homo sapiens
  misc_RNA (1)...(19): siRNA sense strand
agugugccaucauaauguu

SEQ ID NO: 300991 - RNA, 19 nt, Homo sapiens
  misc_RNA (1)...(19): siRNA sense strand
cagcuuuggcagcacagua

SEQ ID NO: 300992 - RNA, 19 nt, Homo sapiens
  misc_RNA (1)...(19): siRNA sense strand
gagacccuaacuuggaauu

SEQ ID NO: 300993 - RNA, 19 nt, Homo sapiens
  misc_RNA (1)...(19): siRNA sense strand
cuuacaagaaugugccuaa

SEQ ID NO: 300994 - RNA, 19 nt, Homo sapiens
  misc_RNA (1)...(19): siRNA sense strand
uuaaggacaggaaagugaa

SEQ ID NO: 300995 - RNA, 19 nt, Homo sapiens
  misc_RNA (1)...(19): siRNA sense strand
ugagcacgacuuagagguu

SEQ ID NO: 300996 - RNA, 19 nt, Homo sapiens
  misc_RNA (1)...(19): siRNA sense strand
gcgaagaccuggagaaaca

SEQ ID NO: 300997 - RNA, 19 nt, Homo sapiens
  misc_RNA (1)...(19): siRNA sense strand
gcaaacaggacucaucuga

SEQ ID NO: 300998 - RNA, 19 nt, Homo sapiens
  misc_RNA (1)...(19): siRNA sense strand
guacagcgcccacgcauuc

SEQ ID NO: 300999 - RNA, 19 nt, Homo sapiens
  misc_RNA (1)...(19): siRNA sense strand
gagcgaagaccuggagaaa

SEQ ID NO: 301000 - RNA, 19 nt, Homo sapiens
  misc_RNA (1)...(19): siRNA sense strand
cgacagaggcagacacaga

SEQ ID NO: 301001 - RNA, 19 nt, Homo sapiens
  misc_RNA (1)...(19): siRNA sense strand
gacagaggcagacacagaa

SEQ ID NO: 301002 - RNA, 19 nt, Homo sapiens
  misc_RNA (1)...(19): siRNA sense strand
gaugaugugagaagaguuc

SEQ ID NO: 301003 - RNA, 19 nt, Homo sapiens
  misc_RNA (1)...(19): siRNA sense strand
ucacgucggugcugaacag

SEQ ID NO: 301004 - RNA, 19 nt, Homo sapiens
  misc_RNA (1)...(19): siRNA sense strand
gaugugagaagaguucaga

SEQ ID NO: 301005 - RNA, 19 nt, Homo sapiens
  misc_RNA (1)...(19): siRNA sense strand
gaagaccuggagaaacaga

SEQ ID NO: 301006 - RNA, 19 nt, Homo sapiens
  misc_RNA (1)...(19): siRNA sense strand
caaacaggacucaucugau

SEQ ID NO: 301007 - RNA, 19 nt, Homo sapiens
  misc_RNA (1)...(19): siRNA sense strand
gaaacagaacgcggcucua

SEQ ID NO: 301008 - RNA, 19 nt, Homo sapiens
  misc_RNA (1)...(19): siRNA sense strand
aaacagaacgcggcucuac

SEQ ID NO: 301009 - RNA, 19 nt, Homo sapiens
  misc_RNA (1)...(19): siRNA sense strand
gcccagaagagccgacaga

SEQ ID NO: 301010 - RNA, 19 nt, Homo sapiens
  misc_RNA (1)...(19): siRNA sense strand
gcauuccaccaaccucaug

SEQ ID NO: 301011 - RNA, 19 nt, Homo sapiens
  misc_RNA (1)...(19): siRNA sense strand
gcaagaauccucagaagua

SEQ ID NO: 301012 - RNA, 19 nt, Homo sapiens
  misc_RNA (1)...(19): siRNA sense strand
gugcugcgcugaagaaaua

SEQ ID NO: 301013 - RNA, 19 nt, Homo sapiens
  misc_RNA (1)...(19): siRNA sense strand
agaaucagcuggaagaaau

SEQ ID NO: 301014 - RNA, 19 nt, Homo sapiens
  misc_RNA (1)...(19): siRNA sense strand
agggcgagcuggagaauua

SEQ ID NO: 301015 - RNA, 19 nt, Homo sapiens
  misc_RNA (1)...(19): siRNA sense strand
acaaggagcugcaguacau

SEQ ID NO: 301016 - RNA, 19 nt, Homo sapiens
  misc_RNA (1)...(19): siRNA sense strand
uuacgcagcuggagcagaa

SEQ ID NO: 301017 - RNA, 19 nt, Homo sapiens
  misc_RNA (1)...(19): siRNA sense strand
acaggcagauccagaauca

SEQ ID NO: 301018 - RNA, 19 nt, Homo sapiens
  misc_RNA (1)...(19): siRNA sense strand
ggagagcacacccaucaug

SEQ ID NO: 301019 - RNA, 19 nt, Homo sapiens
  misc_RNA (1)...(19): siRNA sense strand
gagagcacacccaucauga

SEQ ID NO: 301020 - RNA, 19 nt, Homo sapiens
  misc_RNA (1)...(19): siRNA sense strand
caaagaacucggagacguu

SEQ ID NO: 301021 - RNA, 19 nt, Homo sapiens
  misc_RNA (1)...(19): siRNA sense strand
uggaagaaaugcugaaguc

SEQ ID NO: 301022 - RNA, 19 nt, Homo sapiens
  misc_RNA (1)...(19): siRNA sense strand
gcagcaagaauccucagaa

SEQ ID NO: 301023 - RNA, 19 nt, Homo sapiens
  misc_RNA (1)...(19): siRNA sense strand
cagcaagaauccucagaag

SEQ ID NO: 301024 - RNA, 19 nt, Homo sapiens
  misc_RNA (1)...(19): siRNA sense strand
caagaauccucagaaguac

SEQ ID NO: 301025 - RNA, 19 nt, Homo sapiens
  misc_RNA (1)...(19): siRNA sense strand
caggagagcacacccauca

SEQ ID NO: 301026 - RNA, 19 nt, Homo sapiens
  misc_RNA (1)...(19): siRNA sense strand
gggccuggaugacuaugga

SEQ ID NO: 301027 - RNA, 19 nt, Homo sapiens
  misc_RNA (1)...(19): siRNA sense strand
gaaauaccagacugagcaa

SEQ ID NO: 301028 - RNA, 19 nt, Homo sapiens
  misc_RNA (1)...(19): siRNA sense strand
ggagcgcaauggccguaug

SEQ ID NO: 301029 - RNA, 19 nt, Homo sapiens
  misc_RNA (1)...(19): siRNA sense strand
ugaagaaauaccagacuga

SEQ ID NO: 301030 - RNA, 19 nt, Homo sapiens
  misc_RNA (1)...(19): siRNA sense strand
gcaagagcgugaccccaaa

SEQ ID NO: 301031 - RNA, 19 nt, Homo sapiens
  misc_RNA (1)...(19): siRNA sense strand
aguccaaccuggucauuuc

SEQ ID NO: 301032 - RNA, 19 nt, Homo sapiens
  misc_RNA (1)...(19): siRNA sense strand
cuacaagaccgcacugaca

SEQ ID NO: 301033 - RNA, 19 nt, Homo sapiens
  misc_RNA (1)...(19): siRNA sense strand
gcacaugagccugcagcaa

SEQ ID NO: 301034 - RNA, 19 nt, Homo sapiens
  misc_RNA (1)...(19): siRNA sense strand
cagaaucagcuggaagaaa

SEQ ID NO: 301035 - RNA, 19 nt, Homo sapiens
  misc_RNA (1)...(19): siRNA sense strand
gagcacacccaucaugaac

SEQ ID NO: 301036 - RNA, 19 nt, Homo sapiens
  misc_RNA (1)...(19): siRNA sense strand
ggacaaggagcugcaguac

SEQ ID NO: 301037 - RNA, 19 nt, Homo sapiens
  misc_RNA (1)...(19): siRNA sense strand
ucacggaaaaugucuauaa

SEQ ID NO: 301038 - RNA, 19 nt, Homo sapiens
  misc_RNA (1)...(19): siRNA sense strand
gcuaugccaccaccgagaa

SEQ ID NO: 301039 - RNA, 19 nt, Homo sapiens
  misc_RNA (1)...(19): siRNA sense strand
gugacaggcugcacaugag

SEQ ID NO: 301040 - RNA, 19 nt, Homo sapiens
  misc_RNA (1)...(19): siRNA sense strand
gagagagugagaagaccaa

SEQ ID NO: 301041 - RNA, 19 nt, Homo sapiens
  misc_RNA (1)...(19): siRNA sense strand
ugagugcugcgcugaagaa

SEQ ID NO: 301042 - RNA, 19 nt, Homo sapiens
  misc_RNA (1)...(19): siRNA sense strand
cgggcaaccuccuggacaa

SEQ ID NO: 301043 - RNA, 19 nt, Homo sapiens
  misc_RNA (1)...(19): siRNA sense strand
gcugguuucccuucuccua

SEQ ID NO: 301044 - RNA, 19 nt, Homo sapiens
  misc_RNA (1)...(19): siRNA sense strand
agaaguacucggacaagga

SEQ ID NO: 301045 - RNA, 19 nt, Homo sapiens
  misc_RNA (1)...(19): siRNA sense strand
agagugagaagaccaagau

SEQ ID NO: 301046 - RNA, 19 nt, Homo sapiens
  misc_RNA (1)...(19): siRNA sense strand
gaaucagcuggaagaaaug

SEQ ID NO: 301047 - RNA, 19 nt, Homo sapiens
  misc_RNA (1)...(19): siRNA sense strand
gagagugagaagaccaaga

SEQ ID NO: 301048 - RNA, 19 nt, Homo sapiens
  misc_RNA (1)...(19): siRNA sense strand
caucaugaacggcgucaca

SEQ ID NO: 301049 - RNA, 19 nt, Homo sapiens
  misc_RNA (1)...(19): siRNA sense strand
cggacaaggagcugcagua

SEQ ID NO: 301050 - RNA, 19 nt, Homo sapiens
  misc_RNA (1)...(19): siRNA sense strand
uuucacaacgagcugcuua

SEQ ID NO: 301051 - RNA, 19 nt, Homo sapiens
  misc_RNA (1)...(19): siRNA sense strand
uggcaggugugacguaugc

SEQ ID NO: 301052 - RNA, 19 nt, Homo sapiens
  misc_RNA (1)...(19): siRNA sense strand
gcacccuccugagcuucaa

SEQ ID NO: 301053 - RNA, 19 nt, Homo sapiens
  misc_RNA (1)...(19): siRNA sense strand
acagcacccuccugagcuu

SEQ ID NO: 301054 - RNA, 19 nt, Homo sapiens
  misc_RNA (1)...(19): siRNA sense strand
ggaagaaaugcugaagucu

SEQ ID NO: 301055 - RNA, 19 nt, Homo sapiens
  misc_RNA (1)...(19): siRNA sense strand
ccaccgagaacaagacucu

SEQ ID NO: 301056 - RNA, 19 nt, Homo sapiens
  misc_RNA (1)...(19): siRNA sense strand
gacaaggagcugcaguaca

SEQ ID NO: 301057 - RNA, 19 nt, Homo sapiens
  misc_RNA (1)...(19): siRNA sense strand
ugugacguaugcagccaaa

SEQ ID NO: 301058 - RNA, 19 nt, Homo sapiens
  misc_RNA (1)...(19): siRNA sense strand
gagccagggcagcaagaau

SEQ ID NO: 301059 - RNA, 19 nt, Homo sapiens
  misc_RNA (1)...(19): siRNA sense strand
ccacaggcagauccagaau

SEQ ID NO: 301060 - RNA, 19 nt, Homo sapiens
  misc_RNA (1)...(19): siRNA sense strand
agugacaggcugcacauga

SEQ ID NO: 301061 - RNA, 19 nt, Homo sapiens
  misc_RNA (1)...(19): siRNA sense strand
gcaagcucagcgacuccua

SEQ ID NO: 301062 - RNA, 19 nt, Homo sapiens
  misc_RNA (1)...(19): siRNA sense strand
gcaagaauccucagaagua

SEQ ID NO: 301063 - RNA, 19 nt, Homo sapiens
  misc_RNA (1)...(19): siRNA sense strand
gugcugcgcugaagaaaua

SEQ ID NO: 301064 - RNA, 19 nt, Homo sapiens
  misc_RNA (1)...(19): siRNA sense strand
agaaucagcuggaagaaau

SEQ ID NO: 301065 - RNA, 19 nt, Homo sapiens
  misc_RNA (1)...(19): siRNA sense strand
agggcgagcuggagaauua

SEQ ID NO: 301066 - RNA, 19 nt, Homo sapiens
  misc_RNA (1)...(19): siRNA sense strand
acaaggagcugcaguacau

SEQ ID NO: 301067 - RNA, 19 nt, Homo sapiens
  misc_RNA (1)...(19): siRNA sense strand
uuacgcagcuggagcagaa

SEQ ID NO: 301068 - RNA, 19 nt, Homo sapiens
  misc_RNA (1)...(19): siRNA sense strand
acaggcagauccagaauca

SEQ ID NO: 301069 - RNA, 19 nt, Homo sapiens
  misc_RNA (1)...(19): siRNA sense strand
ggagagcacacccaucaug

SEQ ID NO: 301070 - RNA, 19 nt, Homo sapiens
  misc_RNA (1)...(19): siRNA sense strand
gagagcacacccaucauga

SEQ ID NO: 301071 - RNA, 19 nt, Homo sapiens
  misc_RNA (1)...(19): siRNA sense strand
caaagaacucggagacguu

SEQ ID NO: 301072 - RNA, 19 nt, Homo sapiens
  misc_RNA (1)...(19): siRNA sense strand
uggaagaaaugcugaaguc

SEQ ID NO: 301073 - RNA, 19 nt, Homo sapiens
  misc_RNA (1)...(19): siRNA sense strand
gcagcaagaauccucagaa

SEQ ID NO: 301074 - RNA, 19 nt, Homo sapiens
  misc_RNA (1)...(19): siRNA sense strand
cagcaagaauccucagaag

SEQ ID NO: 301075 - RNA, 19 nt, Homo sapiens
  misc_RNA (1)...(19): siRNA sense strand
caagaauccucagaaguac

SEQ ID NO: 301076 - RNA, 19 nt, Homo sapiens
  misc_RNA (1)...(19): siRNA sense strand
caggagagcacacccauca

SEQ ID NO: 301077 - RNA, 19 nt, Homo sapiens
  misc_RNA (1)...(19): siRNA sense strand
gggccuggaugacuaugga

SEQ ID NO: 301078 - RNA, 19 nt, Homo sapiens
  misc_RNA (1)...(19): siRNA sense strand
gaaauaccagacugagcaa

SEQ ID NO: 301079 - RNA, 19 nt, Homo sapiens
  misc_RNA (1)...(19): siRNA sense strand
ggagcgcaauggccguaug

SEQ ID NO: 301080 - RNA, 19 nt, Homo sapiens
  misc_RNA (1)...(19): siRNA sense strand
ugaagaaauaccagacuga

SEQ ID NO: 301081 - RNA, 19 nt, Homo sapiens
  misc_RNA (1)...(19): siRNA sense strand
gcaagagcgugaccccaaa

SEQ ID NO: 301082 - RNA, 19 nt, Homo sapiens
  misc_RNA (1)...(19): siRNA sense strand
aguccaaccuggucauuuc

SEQ ID NO: 301083 - RNA, 19 nt, Homo sapiens
  misc_RNA (1)...(19): siRNA sense strand
cuacaagaccgcacugaca

SEQ ID NO: 301084 - RNA, 19 nt, Homo sapiens
  misc_RNA (1)...(19): siRNA sense strand
gcacaugagccugcagcaa

SEQ ID NO: 301085 - RNA, 19 nt, Homo sapiens
  misc_RNA (1)...(19): siRNA sense strand
cagaaucagcuggaagaaa

SEQ ID NO: 301086 - RNA, 19 nt, Homo sapiens
  misc_RNA (1)...(19): siRNA sense strand
gagcacacccaucaugaac

SEQ ID NO: 301087 - RNA, 19 nt, Homo sapiens
  misc_RNA (1)...(19): siRNA sense strand
ggacaaggagcugcaguac

SEQ ID NO: 301088 - RNA, 19 nt, Homo sapiens
  misc_RNA (1)...(19): siRNA sense strand
ucacggaaaaugucuauaa

SEQ ID NO: 301089 - RNA, 19 nt, Homo sapiens
  misc_RNA (1)...(19): siRNA sense strand
gcuaugccaccaccgagaa

SEQ ID NO: 301090 - RNA, 19 nt, Homo sapiens
  misc_RNA (1)...(19): siRNA sense strand
gugacaggcugcacaugag

SEQ ID NO: 301091 - RNA, 19 nt, Homo sapiens
  misc_RNA (1)...(19): siRNA sense strand
gagagagugagaagaccaa

SEQ ID NO: 301092 - RNA, 19 nt, Homo sapiens
  misc_RNA (1)...(19): siRNA sense strand
ugagugcugcgcugaagaa

SEQ ID NO: 301093 - RNA, 19 nt, Homo sapiens
  misc_RNA (1)...(19): siRNA sense strand
cgggcaaccuccuggacaa

SEQ ID NO: 301094 - RNA, 19 nt, Homo sapiens
  misc_RNA (1)...(19): siRNA sense strand
gcugguuucccuucuccua

SEQ ID NO: 301095 - RNA, 19 nt, Homo sapiens
  misc_RNA (1)...(19): siRNA sense strand
agaaguacucggacaagga

SEQ ID NO: 301096 - RNA, 19 nt, Homo sapiens
  misc_RNA (1)...(19): siRNA sense strand
agagugagaagaccaagau

SEQ ID NO: 301097 - RNA, 19 nt, Homo sapiens
  misc_RNA (1)...(19): siRNA sense strand
gaaucagcuggaagaaaug

SEQ ID NO: 301098 - RNA, 19 nt, Homo sapiens
  misc_RNA (1)...(19): siRNA sense strand
gagagugagaagaccaaga

SEQ ID NO: 301099 - RNA, 19 nt, Homo sapiens
  misc_RNA (1)...(19): siRNA sense strand
caucaugaacggcgucaca

SEQ ID NO: 301100 - RNA, 19 nt, Homo sapiens
  misc_RNA (1)...(19): siRNA sense strand
cggacaaggagcugcagua

SEQ ID NO: 301101 - RNA, 19 nt, Homo sapiens
  misc_RNA (1)...(19): siRNA sense strand
uuucacaacgagcugcuua

SEQ ID NO: 301102 - RNA, 19 nt, Homo sapiens
  misc_RNA (1)...(19): siRNA sense strand
uggcaggugugacguaugc

SEQ ID NO: 301103 - RNA, 19 nt, Homo sapiens
  misc_RNA (1)...(19): siRNA sense strand
gcacccuccugagcuucaa

SEQ ID NO: 301104 - RNA, 19 nt, Homo sapiens
  misc_RNA (1)...(19): siRNA sense strand
acagcacccuccugagcuu

SEQ ID NO: 301105 - RNA, 19 nt, Homo sapiens
  misc_RNA (1)...(19): siRNA sense strand
ggaagaaaugcugaagucu

SEQ ID NO: 301106 - RNA, 19 nt, Homo sapiens
  misc_RNA (1)...(19): siRNA sense strand
ccaccgagaacaagacucu

SEQ ID NO: 301107 - RNA, 19 nt, Homo sapiens
  misc_RNA (1)...(19): siRNA sense strand
gacaaggagcugcaguaca

SEQ ID NO: 301108 - RNA, 19 nt, Homo sapiens
  misc_RNA (1)...(19): siRNA sense strand
ugugacguaugcagccaaa

SEQ ID NO: 301109 - RNA, 19 nt, Homo sapiens
  misc_RNA (1)...(19): siRNA sense strand
gagccagggcagcaagaau

SEQ ID NO: 301110 - RNA, 19 nt, Homo sapiens
  misc_RNA (1)...(19): siRNA sense strand
ccacaggcagauccagaau

SEQ ID NO: 301111 - RNA, 19 nt, Homo sapiens
  misc_RNA (1)...(19): siRNA sense strand
agugacaggcugcacauga

SEQ ID NO: 301112 - RNA, 19 nt, Homo sapiens
  misc_RNA (1)...(19): siRNA sense strand
gcaagcucagcgacuccua

SEQ ID NO: 301113 - RNA, 19 nt, Homo sapiens
  misc_RNA (1)...(19): siRNA sense strand
gcaagaauccucagaagua

SEQ ID NO: 301114 - RNA, 19 nt, Homo sapiens
  misc_RNA (1)...(19): siRNA sense strand
gugcugcgcugaagaaaua

SEQ ID NO: 301115 - RNA, 19 nt, Homo sapiens
  misc_RNA (1)...(19): siRNA sense strand
agaaucagcuggaagaaau

SEQ ID NO: 301116 - RNA, 19 nt, Homo sapiens
  misc_RNA (1)...(19): siRNA sense strand
agggcgagcuggagaauua

SEQ ID NO: 301117 - RNA, 19 nt, Homo sapiens
  misc_RNA (1)...(19): siRNA sense strand
acaaggagcugcaguacau

SEQ ID NO: 301118 - RNA, 19 nt, Homo sapiens
  misc_RNA (1)...(19): siRNA sense strand
uuacgcagcuggagcagaa

SEQ ID NO: 301119 - RNA, 19 nt, Homo sapiens
  misc_RNA (1)...(19): siRNA sense strand
acaggcagauccagaauca

SEQ ID NO: 301120 - RNA, 19 nt, Homo sapiens
  misc_RNA (1)...(19): siRNA sense strand
ggagagcacacccaucaug

SEQ ID NO: 301121 - RNA, 19 nt, Homo sapiens
  misc_RNA (1)...(19): siRNA sense strand
gagagcacacccaucauga

SEQ ID NO: 301122 - RNA, 19 nt, Homo sapiens
  misc_RNA (1)...(19): siRNA sense strand
caaagaacucggagacguu

SEQ ID NO: 301123 - RNA, 19 nt, Homo sapiens
  misc_RNA (1)...(19): siRNA sense strand
uggaagaaaugcugaaguc

SEQ ID NO: 301124 - RNA, 19 nt, Homo sapiens
  misc_RNA (1)...(19): siRNA sense strand
gcagcaagaauccucagaa

SEQ ID NO: 301125 - RNA, 19 nt, Homo sapiens
  misc_RNA (1)...(19): siRNA sense strand
cagcaagaauccucagaag

SEQ ID NO: 301126 - RNA, 19 nt, Homo sapiens
  misc_RNA (1)...(19): siRNA sense strand
caagaauccucagaaguac

SEQ ID NO: 301127 - RNA, 19 nt, Homo sapiens
  misc_RNA (1)...(19): siRNA sense strand
caggagagcacacccauca

SEQ ID NO: 301128 - RNA, 19 nt, Homo sapiens
  misc_RNA (1)...(19): siRNA sense strand
gggccuggaugacuaugga

SEQ ID NO: 301129 - RNA, 19 nt, Homo sapiens
  misc_RNA (1)...(19): siRNA sense strand
gaaauaccagacugagcaa

SEQ ID NO: 301130 - RNA, 19 nt, Homo sapiens
  misc_RNA (1)...(19): siRNA sense strand
ggagcgcaauggccguaug

SEQ ID NO: 301131 - RNA, 19 nt, Homo sapiens
  misc_RNA (1)...(19): siRNA sense strand
ugaagaaauaccagacuga

SEQ ID NO: 301132 - RNA, 19 nt, Homo sapiens
  misc_RNA (1)...(19): siRNA sense strand
gcaagagcgugaccccaaa

SEQ ID NO: 301133 - RNA, 19 nt, Homo sapiens
  misc_RNA (1)...(19): siRNA sense strand
aguccaaccuggucauuuc

SEQ ID NO: 301134 - RNA, 19 nt, Homo sapiens
  misc_RNA (1)...(19): siRNA sense strand
cuacaagaccgcacugaca

SEQ ID NO: 301135 - RNA, 19 nt, Homo sapiens
  misc_RNA (1)...(19): siRNA sense strand
gcacaugagccugcagcaa

SEQ ID NO: 301136 - RNA, 19 nt, Homo sapiens
  misc_RNA (1)...(19): siRNA sense strand
cagaaucagcuggaagaaa

SEQ ID NO: 301137 - RNA, 19 nt, Homo sapiens
  misc_RNA (1)...(19): siRNA sense strand
gagcacacccaucaugaac

SEQ ID NO: 301138 - RNA, 19 nt, Homo sapiens
  misc_RNA (1)...(19): siRNA sense strand
ggacaaggagcugcaguac

SEQ ID NO: 301139 - RNA, 19 nt, Homo sapiens
  misc_RNA (1)...(19): siRNA sense strand
ucacggaaaaugucuauaa

SEQ ID NO: 301140 - RNA, 19 nt, Homo sapiens
  misc_RNA (1)...(19): siRNA sense strand
gcuaugccaccaccgagaa

SEQ ID NO: 301141 - RNA, 19 nt, Homo sapiens
  misc_RNA (1)...(19): siRNA sense strand
gugacaggcugcacaugag

SEQ ID NO: 301142 - RNA, 19 nt, Homo sapiens
  misc_RNA (1)...(19): siRNA sense strand
gagagagugagaagaccaa

SEQ ID NO: 301143 - RNA, 19 nt, Homo sapiens
  misc_RNA (1)...(19): siRNA sense strand
ugagugcugcgcugaagaa

SEQ ID NO: 301144 - RNA, 19 nt, Homo sapiens
  misc_RNA (1)...(19): siRNA sense strand
cgggcaaccuccuggacaa

SEQ ID NO: 301145 - RNA, 19 nt, Homo sapiens
  misc_RNA (1)...(19): siRNA sense strand
gcugguuucccuucuccua

SEQ ID NO: 301146 - RNA, 19 nt, Homo sapiens
  misc_RNA (1)...(19): siRNA sense strand
agaaguacucggacaagga

SEQ ID NO: 301147 - RNA, 19 nt, Homo sapiens
  misc_RNA (1)...(19): siRNA sense strand
agagugagaagaccaagau

SEQ ID NO: 301148 - RNA, 19 nt, Homo sapiens
  misc_RNA (1)...(19): siRNA sense strand
gaaucagcuggaagaaaug

SEQ ID NO: 301149 - RNA, 19 nt, Homo sapiens
  misc_RNA (1)...(19): siRNA sense strand
gagagugagaagaccaaga

SEQ ID NO: 301150 - RNA, 19 nt, Homo sapiens
  misc_RNA (1)...(19): siRNA sense strand
caucaugaacggcgucaca

SEQ ID NO: 301151 - RNA, 19 nt, Homo sapiens
  misc_RNA (1)...(19): siRNA sense strand
cggacaaggagcugcagua

SEQ ID NO: 301152 - RNA, 19 nt, Homo sapiens
  misc_RNA (1)...(19): siRNA sense strand
uuucacaacgagcugcuua

SEQ ID NO: 301153 - RNA, 19 nt, Homo sapiens
  misc_RNA (1)...(19): siRNA sense strand
uggcaggugugacguaugc

SEQ ID NO: 301154 - RNA, 19 nt, Homo sapiens
  misc_RNA (1)...(19): siRNA sense strand
gcacccuccugagcuucaa

SEQ ID NO: 301155 - RNA, 19 nt, Homo sapiens
  misc_RNA (1)...(19): siRNA sense strand
acagcacccuccugagcuu

SEQ ID NO: 301156 - RNA, 19 nt, Homo sapiens
  misc_RNA (1)...(19): siRNA sense strand
ggaagaaaugcugaagucu

SEQ ID NO: 301157 - RNA, 19 nt, Homo sapiens
  misc_RNA (1)...(19): siRNA sense strand
ccaccgagaacaagacucu

SEQ ID NO: 301158 - RNA, 19 nt, Homo sapiens
  misc_RNA (1)...(19): siRNA sense strand
gacaaggagcugcaguaca

SEQ ID NO: 301159 - RNA, 19 nt, Homo sapiens
  misc_RNA (1)...(19): siRNA sense strand
ugugacguaugcagccaaa

SEQ ID NO: 301160 - RNA, 19 nt, Homo sapiens
  misc_RNA (1)...(19): siRNA sense strand
gagccagggcagcaagaau

SEQ ID NO: 301161 - RNA, 19 nt, Homo sapiens
  misc_RNA (1)...(19): siRNA sense strand
ccacaggcagauccagaau

SEQ ID NO: 301162 - RNA, 19 nt, Homo sapiens
  misc_RNA (1)...(19): siRNA sense strand
agugacaggcugcacauga

SEQ ID NO: 301163 - RNA, 19 nt, Homo sapiens
  misc_RNA (1)...(19): siRNA sense strand
gcaagcucagcgacuccua

SEQ ID NO: 301164 - RNA, 19 nt, Homo sapiens
  misc_RNA (1)...(19): siRNA sense strand
ggacaccaauggagacaua

SEQ ID NO: 301165 - RNA, 19 nt, Homo sapiens
  misc_RNA (1)...(19): siRNA sense strand
gcaagacgauggaguuuua

SEQ ID NO: 301166 - RNA, 19 nt, Homo sapiens
  misc_RNA (1)...(19): siRNA sense strand
gaaaggacaacccaauuga

SEQ ID NO: 301167 - RNA, 19 nt, Homo sapiens
  misc_RNA (1)...(19): siRNA sense strand
ccacaagaauggcacauau

SEQ ID NO: 301168 - RNA, 19 nt, Homo sapiens
  misc_RNA (1)...(19): siRNA sense strand
gcacauaugagcuagugua

SEQ ID NO: 301169 - RNA, 19 nt, Homo sapiens
  misc_RNA (1)...(19): siRNA sense strand
caacacaucugcagaacca

SEQ ID NO: 301170 - RNA, 19 nt, Homo sapiens
  misc_RNA (1)...(19): siRNA sense strand
gagcucgucuuccguguug

SEQ ID NO: 301171 - RNA, 19 nt, Homo sapiens
  misc_RNA (1)...(19): siRNA sense strand
gagagcggcuggcugcauu

SEQ ID NO: 301172 - RNA, 19 nt, Homo sapiens
  misc_RNA (1)...(19): siRNA sense strand
ggacuuccauaaccauuca

SEQ ID NO: 301173 - RNA, 19 nt, Homo sapiens
  misc_RNA (1)...(19): siRNA sense strand
gagcgccacugcacacgaa

SEQ ID NO: 301174 - RNA, 19 nt, Homo sapiens
  misc_RNA (1)...(19): siRNA sense strand
gaaugaaauuguaguaacg

SEQ ID NO: 301175 - RNA, 19 nt, Homo sapiens
  misc_RNA (1)...(19): siRNA sense strand
gaauggcacauaugagcua

SEQ ID NO: 301176 - RNA, 19 nt, Homo sapiens
  misc_RNA (1)...(19): siRNA sense strand
gcuccuuccuguccuauau

SEQ ID NO: 301177 - RNA, 19 nt, Homo sapiens
  misc_RNA (1)...(19): siRNA sense strand
gcccagagguccagccaau

SEQ ID NO: 301178 - RNA, 19 nt, Homo sapiens
  misc_RNA (1)...(19): siRNA sense strand
gcccagagccugacgcuau

SEQ ID NO: 301179 - RNA, 19 nt, Homo sapiens
  misc_RNA (1)...(19): siRNA sense strand
gcaaugggcaguucaaugc

SEQ ID NO: 301180 - RNA, 19 nt, Homo sapiens
  misc_RNA (1)...(19): siRNA sense strand
cgaaaggacaacccaauug

SEQ ID NO: 301181 - RNA, 19 nt, Homo sapiens
  misc_RNA (1)...(19): siRNA sense strand
gaacacaucggcaguagcu

SEQ ID NO: 301182 - RNA, 19 nt, Homo sapiens
  misc_RNA (1)...(19): siRNA sense strand
caacagccgcauccaggua

SEQ ID NO: 301183 - RNA, 19 nt, Homo sapiens
  misc_RNA (1)...(19): siRNA sense strand
ggcaaccacugcuuuaaag

SEQ ID NO: 301184 - RNA, 19 nt, Homo sapiens
  misc_RNA (1)...(19): siRNA sense strand
gcacaggcggcaaacgaaa

SEQ ID NO: 301185 - RNA, 19 nt, Homo sapiens
  misc_RNA (1)...(19): siRNA sense strand
gaguuccucuucaaguuug

SEQ ID NO: 301186 - RNA, 19 nt, Homo sapiens
  misc_RNA (1)...(19): siRNA sense strand
gaagggagaaaggugaauu

SEQ ID NO: 301187 - RNA, 19 nt, Homo sapiens
  misc_RNA (1)...(19): siRNA sense strand
acaagaauggcacauauga

SEQ ID NO: 301188 - RNA, 19 nt, Homo sapiens
  misc_RNA (1)...(19): siRNA sense strand
uaacggacuuccauaacca

SEQ ID NO: 301189 - RNA, 19 nt, Homo sapiens
  misc_RNA (1)...(19): siRNA sense strand
guacagcacaggcggcaaa

SEQ ID NO: 301190 - RNA, 19 nt, Homo sapiens
  misc_RNA (1)...(19): siRNA sense strand
cauaugagcuaguguacac

SEQ ID NO: 301191 - RNA, 19 nt, Homo sapiens
  misc_RNA (1)...(19): siRNA sense strand
gacgcuauccuguccagua

SEQ ID NO: 301192 - RNA, 19 nt, Homo sapiens
  misc_RNA (1)...(19): siRNA sense strand
ggacaacccaauugaggau

SEQ ID NO: 301193 - RNA, 19 nt, Homo sapiens
  misc_RNA (1)...(19): siRNA sense strand
gcaacaaccaguguauuca

SEQ ID NO: 301194 - RNA, 19 nt, Homo sapiens
  misc_RNA (1)...(19): siRNA sense strand
gcuggcaaccacugcuuua

SEQ ID NO: 301195 - RNA, 19 nt, Homo sapiens
  misc_RNA (1)...(19): siRNA sense strand
ccaagggaguggccguaga

SEQ ID NO: 301196 - RNA, 19 nt, Homo sapiens
  misc_RNA (1)...(19): siRNA sense strand
ggcgaucggugcucaaucu

SEQ ID NO: 301197 - RNA, 19 nt, Homo sapiens
  misc_RNA (1)...(19): siRNA sense strand
ucucggcacugcagaacaa

SEQ ID NO: 301198 - RNA, 19 nt, Homo sapiens
  misc_RNA (1)...(19): siRNA sense strand
guaguaacggacuuccaua

SEQ ID NO: 301199 - RNA, 19 nt, Homo sapiens
  misc_RNA (1)...(19): siRNA sense strand
gugaacaacaagaaugaaa

SEQ ID NO: 301200 - RNA, 19 nt, Homo sapiens
  misc_RNA (1)...(19): siRNA sense strand
ccaaugagggccaguucaa

SEQ ID NO: 301201 - RNA, 19 nt, Homo sapiens
  misc_RNA (1)...(19): siRNA sense strand
gaugugaagcgccguguca

SEQ ID NO: 301202 - RNA, 19 nt, Homo sapiens
  misc_RNA (1)...(19): siRNA sense strand
uaucaacacaucugcagaa

SEQ ID NO: 301203 - RNA, 19 nt, Homo sapiens
  misc_RNA (1)...(19): siRNA sense strand
guaacggacuuccauaacc

SEQ ID NO: 301204 - RNA, 19 nt, Homo sapiens
  misc_RNA (1)...(19): siRNA sense strand
acaacccaauugaggauga

SEQ ID NO: 301205 - RNA, 19 nt, Homo sapiens
  misc_RNA (1)...(19): siRNA sense strand
gaccucggauggccaugug

SEQ ID NO: 301206 - RNA, 19 nt, Homo sapiens
  misc_RNA (1)...(19): siRNA sense strand
gguguacagugccgaugga

SEQ ID NO: 301207 - RNA, 19 nt, Homo sapiens
  misc_RNA (1)...(19): siRNA sense strand
ccgcagcaauugccuuagu

SEQ ID NO: 301208 - RNA, 19 nt, Homo sapiens
  misc_RNA (1)...(19): siRNA sense strand
gcagccaugugcgccagaa

SEQ ID NO: 301209 - RNA, 19 nt, Homo sapiens
  misc_RNA (1)...(19): siRNA sense strand
gcugugaacaacaagaaug

SEQ ID NO: 301210 - RNA, 19 nt, Homo sapiens
  misc_RNA (1)...(19): siRNA sense strand
caaguucaagaccaagauu

SEQ ID NO: 301211 - RNA, 19 nt, Homo sapiens
  misc_RNA (1)...(19): siRNA sense strand
acauaauuguggcagacua

SEQ ID NO: 301212 - RNA, 19 nt, Homo sapiens
  misc_RNA (1)...(19): siRNA sense strand
caccaauggagacauaauu

SEQ ID NO: 301213 - RNA, 19 nt, Homo sapiens
  misc_RNA (1)...(19): siRNA sense strand
gcuauccuguccaguaugc

SEQ ID NO: 301214 - RNA, 19 nt, Homo sapiens
  misc_RNA (1)...(19): siRNA sense strand
uguccuauaucaacacauc

SEQ ID NO: 301215 - RNA, 19 nt, Homo sapiens
  misc_RNA (1)...(19): siRNA sense strand
uaguaacggacuuccauaa

SEQ ID NO: 301216 - RNA, 19 nt, Homo sapiens
  misc_RNA (1)...(19): siRNA sense strand
gaccggaauggacauauca

SEQ ID NO: 301217 - RNA, 19 nt, Homo sapiens
  misc_RNA (1)...(19): siRNA sense strand
gcaaguucaagaccaagau

SEQ ID NO: 301218 - RNA, 19 nt, Homo sapiens
  misc_RNA (1)...(19): siRNA sense strand
cgauggaguuuuacuguga

SEQ ID NO: 301219 - RNA, 19 nt, Homo sapiens
  misc_RNA (1)...(19): siRNA sense strand
uggcaaccacugcuuuaaa

SEQ ID NO: 301220 - RNA, 19 nt, Homo sapiens
  misc_RNA (1)...(19): siRNA sense strand
cagcacaggcggcaaacga

SEQ ID NO: 301221 - RNA, 19 nt, Homo sapiens
  misc_RNA (1)...(19): siRNA sense strand
ucagcgaccuggagaccau

SEQ ID NO: 301222 - RNA, 19 nt, Homo sapiens
  misc_RNA (1)...(19): siRNA sense strand
guccgcagcaauugccuua

SEQ ID NO: 301223 - RNA, 19 nt, Homo sapiens
  misc_RNA (1)...(19): siRNA sense strand
gacagcaacaaccagugua

SEQ ID NO: 301224 - RNA, 19 nt, Homo sapiens
  misc_RNA (1)...(19): siRNA sense strand
ggcaaugggcaguucaaug

SEQ ID NO: 301225 - RNA, 19 nt, Homo sapiens
  misc_RNA (1)...(19): siRNA sense strand
uaauuguggcagacuauga

SEQ ID NO: 301226 - RNA, 19 nt, Homo sapiens
  misc_RNA (1)...(19): siRNA sense strand
acgcuauccuguccaguau

SEQ ID NO: 301227 - RNA, 19 nt, Homo sapiens
  misc_RNA (1)...(19): siRNA sense strand
ggagcggccacaugagaau

SEQ ID NO: 301228 - RNA, 19 nt, Homo sapiens
  misc_RNA (1)...(19): siRNA sense strand
ccagagguccagccaaugg

SEQ ID NO: 301229 - RNA, 19 nt, Homo sapiens
  misc_RNA (1)...(19): siRNA sense strand
uggcacauaugagcuagug

SEQ ID NO: 301230 - RNA, 19 nt, Homo sapiens
  misc_RNA (1)...(19): siRNA sense strand
cgagggcaaugggcaguuc

SEQ ID NO: 301231 - RNA, 19 nt, Homo sapiens
  misc_RNA (1)...(19): siRNA sense strand
agaccggaauggacauauc

SEQ ID NO: 301232 - RNA, 19 nt, Homo sapiens
  misc_RNA (1)...(19): siRNA sense strand
caacaaccaguguauucag

SEQ ID NO: 301233 - RNA, 19 nt, Homo sapiens
  misc_RNA (1)...(19): siRNA sense strand
uuccauaaccauucaguga

SEQ ID NO: 301234 - RNA, 19 nt, Homo sapiens
  misc_RNA (1)...(19): siRNA sense strand
ccacugaccgccacuuugc

SEQ ID NO: 301235 - RNA, 19 nt, Homo sapiens
  misc_RNA (1)...(19): siRNA sense strand
guagaccggaauggacaua

SEQ ID NO: 301236 - RNA, 19 nt, Homo sapiens
  misc_RNA (1)...(19): siRNA sense strand
cauaauuguggcagacuau

SEQ ID NO: 301237 - RNA, 19 nt, Homo sapiens
  misc_RNA (1)...(19): siRNA sense strand
caggaacacaucggcagua

SEQ ID NO: 301238 - RNA, 19 nt, Homo sapiens
  misc_RNA (1)...(19): siRNA sense strand
ggccacugaccgccacuuu

SEQ ID NO: 301239 - RNA, 19 nt, Homo sapiens
  misc_RNA (1)...(19): siRNA sense strand
cagcaacaaccaguguauu

SEQ ID NO: 301240 - RNA, 19 nt, Homo sapiens
  misc_RNA (1)...(19): siRNA sense strand
acgaaaggacaacccaauu

SEQ ID NO: 301241 - RNA, 19 nt, Homo sapiens
  misc_RNA (1)...(19): siRNA sense strand
gugaagcgccgugucaagu

SEQ ID NO: 301242 - RNA, 19 nt, Homo sapiens
  misc_RNA (1)...(19): siRNA sense strand
cugcagaaccacuguaugg

SEQ ID NO: 301243 - RNA, 19 nt, Homo sapiens
  misc_RNA (1)...(19): siRNA sense strand
cagugccgauggagaguuc

SEQ ID NO: 301244 - RNA, 19 nt, Homo sapiens
  misc_RNA (1)...(19): siRNA sense strand
guauucagguuuucuccaa

SEQ ID NO: 301245 - RNA, 19 nt, Homo sapiens
  misc_RNA (1)...(19): siRNA sense strand
cacaagaauggcacauaug

SEQ ID NO: 301246 - RNA, 19 nt, Homo sapiens
  misc_RNA (1)...(19): siRNA sense strand
ggacaccaauggagacaua

SEQ ID NO: 301247 - RNA, 19 nt, Homo sapiens
  misc_RNA (1)...(19): siRNA sense strand
gcaagacgauggaguuuua

SEQ ID NO: 301248 - RNA, 19 nt, Homo sapiens
  misc_RNA (1)...(19): siRNA sense strand
gaaaggacaacccaauuga

SEQ ID NO: 301249 - RNA, 19 nt, Homo sapiens
  misc_RNA (1)...(19): siRNA sense strand
ccacaagaauggcacauau

SEQ ID NO: 301250 - RNA, 19 nt, Homo sapiens
  misc_RNA (1)...(19): siRNA sense strand
gcacauaugagcuagugua

SEQ ID NO: 301251 - RNA, 19 nt, Homo sapiens
  misc_RNA (1)...(19): siRNA sense strand
caacacaucugcagaacca

SEQ ID NO: 301252 - RNA, 19 nt, Homo sapiens
  misc_RNA (1)...(19): siRNA sense strand
gagcucgucuuccguguug

SEQ ID NO: 301253 - RNA, 19 nt, Homo sapiens
  misc_RNA (1)...(19): siRNA sense strand
gagagcggcuggcugcauu

SEQ ID NO: 301254 - RNA, 19 nt, Homo sapiens
  misc_RNA (1)...(19): siRNA sense strand
ggacuuccauaaccauuca

SEQ ID NO: 301255 - RNA, 19 nt, Homo sapiens
  misc_RNA (1)...(19): siRNA sense strand
gagcgccacugcacacgaa

SEQ ID NO: 301256 - RNA, 19 nt, Homo sapiens
  misc_RNA (1)...(19): siRNA sense strand
gaaugaaauuguaguaacg

SEQ ID NO: 301257 - RNA, 19 nt, Homo sapiens
  misc_RNA (1)...(19): siRNA sense strand
gaauggcacauaugagcua

SEQ ID NO: 301258 - RNA, 19 nt, Homo sapiens
  misc_RNA (1)...(19): siRNA sense strand
gcuccuuccuguccuauau

SEQ ID NO: 301259 - RNA, 19 nt, Homo sapiens
  misc_RNA (1)...(19): siRNA sense strand
gcccagagguccagccaau

SEQ ID NO: 301260 - RNA, 19 nt, Homo sapiens
  misc_RNA (1)...(19): siRNA sense strand
gcccagagccugacgcuau

SEQ ID NO: 301261 - RNA, 19 nt, Homo sapiens
  misc_RNA (1)...(19): siRNA sense strand
gcaaugggcaguucaaugc

SEQ ID NO: 301262 - RNA, 19 nt, Homo sapiens
  misc_RNA (1)...(19): siRNA sense strand
cgaaaggacaacccaauug

SEQ ID NO: 301263 - RNA, 19 nt, Homo sapiens
  misc_RNA (1)...(19): siRNA sense strand
gaacacaucggcaguagcu

SEQ ID NO: 301264 - RNA, 19 nt, Homo sapiens
  misc_RNA (1)...(19): siRNA sense strand
caacagccgcauccaggua

SEQ ID NO: 301265 - RNA, 19 nt, Homo sapiens
  misc_RNA (1)...(19): siRNA sense strand
ggcaaccacugcuuuaaag

SEQ ID NO: 301266 - RNA, 19 nt, Homo sapiens
  misc_RNA (1)...(19): siRNA sense strand
gcacaggcggcaaacgaaa

SEQ ID NO: 301267 - RNA, 19 nt, Homo sapiens
  misc_RNA (1)...(19): siRNA sense strand
gaguuccucuucaaguuug

SEQ ID NO: 301268 - RNA, 19 nt, Homo sapiens
  misc_RNA (1)...(19): siRNA sense strand
gaagggagaaaggugaauu

SEQ ID NO: 301269 - RNA, 19 nt, Homo sapiens
  misc_RNA (1)...(19): siRNA sense strand
acaagaauggcacauauga

SEQ ID NO: 301270 - RNA, 19 nt, Homo sapiens
  misc_RNA (1)...(19): siRNA sense strand
uaacggacuuccauaacca

SEQ ID NO: 301271 - RNA, 19 nt, Homo sapiens
  misc_RNA (1)...(19): siRNA sense strand
guacagcacaggcggcaaa

SEQ ID NO: 301272 - RNA, 19 nt, Homo sapiens
  misc_RNA (1)...(19): siRNA sense strand
cauaugagcuaguguacac

SEQ ID NO: 301273 - RNA, 19 nt, Homo sapiens
  misc_RNA (1)...(19): siRNA sense strand
gacgcuauccuguccagua

SEQ ID NO: 301274 - RNA, 19 nt, Homo sapiens
  misc_RNA (1)...(19): siRNA sense strand
ggacaacccaauugaggau

SEQ ID NO: 301275 - RNA, 19 nt, Homo sapiens
  misc_RNA (1)...(19): siRNA sense strand
gcaacaaccaguguauuca

SEQ ID NO: 301276 - RNA, 19 nt, Homo sapiens
  misc_RNA (1)...(19): siRNA sense strand
gcuggcaaccacugcuuua

SEQ ID NO: 301277 - RNA, 19 nt, Homo sapiens
  misc_RNA (1)...(19): siRNA sense strand
ccaagggaguggccguaga

SEQ ID NO: 301278 - RNA, 19 nt, Homo sapiens
  misc_RNA (1)...(19): siRNA sense strand
ggcgaucggugcucaaucu

SEQ ID NO: 301279 - RNA, 19 nt, Homo sapiens
  misc_RNA (1)...(19): siRNA sense strand
ucucggcacugcagaacaa

SEQ ID NO: 301280 - RNA, 19 nt, Homo sapiens
  misc_RNA (1)...(19): siRNA sense strand
guaguaacggacuuccaua

SEQ ID NO: 301281 - RNA, 19 nt, Homo sapiens
  misc_RNA (1)...(19): siRNA sense strand
gugaacaacaagaaugaaa

SEQ ID NO: 301282 - RNA, 19 nt, Homo sapiens
  misc_RNA (1)...(19): siRNA sense strand
ccaaugagggccaguucaa

SEQ ID NO: 301283 - RNA, 19 nt, Homo sapiens
  misc_RNA (1)...(19): siRNA sense strand
gaugugaagcgccguguca

SEQ ID NO: 301284 - RNA, 19 nt, Homo sapiens
  misc_RNA (1)...(19): siRNA sense strand
uaucaacacaucugcagaa

SEQ ID NO: 301285 - RNA, 19 nt, Homo sapiens
  misc_RNA (1)...(19): siRNA sense strand
guaacggacuuccauaacc

SEQ ID NO: 301286 - RNA, 19 nt, Homo sapiens
  misc_RNA (1)...(19): siRNA sense strand
acaacccaauugaggauga

SEQ ID NO: 301287 - RNA, 19 nt, Homo sapiens
  misc_RNA (1)...(19): siRNA sense strand
gaccucggauggccaugug

SEQ ID NO: 301288 - RNA, 19 nt, Homo sapiens
  misc_RNA (1)...(19): siRNA sense strand
gguguacagugccgaugga

SEQ ID NO: 301289 - RNA, 19 nt, Homo sapiens
  misc_RNA (1)...(19): siRNA sense strand
ccgcagcaauugccuuagu

SEQ ID NO: 301290 - RNA, 19 nt, Homo sapiens
  misc_RNA (1)...(19): siRNA sense strand
gcagccaugugcgccagaa

SEQ ID NO: 301291 - RNA, 19 nt, Homo sapiens
  misc_RNA (1)...(19): siRNA sense strand
gcugugaacaacaagaaug

SEQ ID NO: 301292 - RNA, 19 nt, Homo sapiens
  misc_RNA (1)...(19): siRNA sense strand
caaguucaagaccaagauu

SEQ ID NO: 301293 - RNA, 19 nt, Homo sapiens
  misc_RNA (1)...(19): siRNA sense strand
acauaauuguggcagacua

SEQ ID NO: 301294 - RNA, 19 nt, Homo sapiens
  misc_RNA (1)...(19): siRNA sense strand
caccaauggagacauaauu

SEQ ID NO: 301295 - RNA, 19 nt, Homo sapiens
  misc_RNA (1)...(19): siRNA sense strand
gcuauccuguccaguaugc

SEQ ID NO: 301296 - RNA, 19 nt, Homo sapiens
  misc_RNA (1)...(19): siRNA sense strand
uguccuauaucaacacauc

SEQ ID NO: 301297 - RNA, 19 nt, Homo sapiens
  misc_RNA (1)...(19): siRNA sense strand
uaguaacggacuuccauaa

SEQ ID NO: 301298 - RNA, 19 nt, Homo sapiens
  misc_RNA (1)...(19): siRNA sense strand
gaccggaauggacauauca

SEQ ID NO: 301299 - RNA, 19 nt, Homo sapiens
  misc_RNA (1)...(19): siRNA sense strand
gcaaguucaagaccaagau

SEQ ID NO: 301300 - RNA, 19 nt, Homo sapiens
  misc_RNA (1)...(19): siRNA sense strand
cgauggaguuuuacuguga

SEQ ID NO: 301301 - RNA, 19 nt, Homo sapiens
  misc_RNA (1)...(19): siRNA sense strand
uggcaaccacugcuuuaaa

SEQ ID NO: 301302 - RNA, 19 nt, Homo sapiens
  misc_RNA (1)...(19): siRNA sense strand
cagcacaggcggcaaacga

SEQ ID NO: 301303 - RNA, 19 nt, Homo sapiens
  misc_RNA (1)...(19): siRNA sense strand
ucagcgaccuggagaccau

SEQ ID NO: 301304 - RNA, 19 nt, Homo sapiens
  misc_RNA (1)...(19): siRNA sense strand
guccgcagcaauugccuua

SEQ ID NO: 301305 - RNA, 19 nt, Homo sapiens
  misc_RNA (1)...(19): siRNA sense strand
gacagcaacaaccagugua

SEQ ID NO: 301306 - RNA, 19 nt, Homo sapiens
  misc_RNA (1)...(19): siRNA sense strand
ggcaaugggcaguucaaug

SEQ ID NO: 301307 - RNA, 19 nt, Homo sapiens
  misc_RNA (1)...(19): siRNA sense strand
uaauuguggcagacuauga

SEQ ID NO: 301308 - RNA, 19 nt, Homo sapiens
  misc_RNA (1)...(19): siRNA sense strand
acgcuauccuguccaguau

SEQ ID NO: 301309 - RNA, 19 nt, Homo sapiens
  misc_RNA (1)...(19): siRNA sense strand
ggagcggccacaugagaau

SEQ ID NO: 301310 - RNA, 19 nt, Homo sapiens
  misc_RNA (1)...(19): siRNA sense strand
ccagagguccagccaaugg

SEQ ID NO: 301311 - RNA, 19 nt, Homo sapiens
  misc_RNA (1)...(19): siRNA sense strand
uggcacauaugagcuagug

SEQ ID NO: 301312 - RNA, 19 nt, Homo sapiens
  misc_RNA (1)...(19): siRNA sense strand
cgagggcaaugggcaguuc

SEQ ID NO: 301313 - RNA, 19 nt, Homo sapiens
  misc_RNA (1)...(19): siRNA sense strand
agaccggaauggacauauc

SEQ ID NO: 301314 - RNA, 19 nt, Homo sapiens
  misc_RNA (1)...(19): siRNA sense strand
caacaaccaguguauucag

SEQ ID NO: 301315 - RNA, 19 nt, Homo sapiens
  misc_RNA (1)...(19): siRNA sense strand
uuccauaaccauucaguga

SEQ ID NO: 301316 - RNA, 19 nt, Homo sapiens
  misc_RNA (1)...(19): siRNA sense strand
ccacugaccgccacuuugc

SEQ ID NO: 301317 - RNA, 19 nt, Homo sapiens
  misc_RNA (1)...(19): siRNA sense strand
guagaccggaauggacaua

SEQ ID NO: 301318 - RNA, 19 nt, Homo sapiens
  misc_RNA (1)...(19): siRNA sense strand
cauaauuguggcagacuau

SEQ ID NO: 301319 - RNA, 19 nt, Homo sapiens
  misc_RNA (1)...(19): siRNA sense strand
caggaacacaucggcagua

SEQ ID NO: 301320 - RNA, 19 nt, Homo sapiens
  misc_RNA (1)...(19): siRNA sense strand
ggccacugaccgccacuuu

SEQ ID NO: 301321 - RNA, 19 nt, Homo sapiens
  misc_RNA (1)...(19): siRNA sense strand
cagcaacaaccaguguauu

SEQ ID NO: 301322 - RNA, 19 nt, Homo sapiens
  misc_RNA (1)...(19): siRNA sense strand
acgaaaggacaacccaauu

SEQ ID NO: 301323 - RNA, 19 nt, Homo sapiens
  misc_RNA (1)...(19): siRNA sense strand
gugaagcgccgugucaagu

SEQ ID NO: 301324 - RNA, 19 nt, Homo sapiens
  misc_RNA (1)...(19): siRNA sense strand
cugcagaaccacuguaugg

SEQ ID NO: 301325 - RNA, 19 nt, Homo sapiens
  misc_RNA (1)...(19): siRNA sense strand
cagugccgauggagaguuc

SEQ ID NO: 301326 - RNA, 19 nt, Homo sapiens
  misc_RNA (1)...(19): siRNA sense strand
guauucagguuuucuccaa

SEQ ID NO: 301327 - RNA, 19 nt, Homo sapiens
  misc_RNA (1)...(19): siRNA sense strand
cacaagaauggcacauaug

SEQ ID NO: 301328 - RNA, 19 nt, Homo sapiens
  misc_RNA (1)...(19): siRNA sense strand
gaacaggucuccaacaauu

SEQ ID NO: 301329 - RNA, 19 nt, Homo sapiens
  misc_RNA (1)...(19): siRNA sense strand
gaucacaaauggaugguua

SEQ ID NO: 301330 - RNA, 19 nt, Homo sapiens
  misc_RNA (1)...(19): siRNA sense strand
gaacuacgauccaagauuc

SEQ ID NO: 301331 - RNA, 19 nt, Homo sapiens
  misc_RNA (1)...(19): siRNA sense strand
gaacaggaacuugguauua

SEQ ID NO: 301332 - RNA, 19 nt, Homo sapiens
  misc_RNA (1)...(19): siRNA sense strand
ggaaacagauagcaaguau

SEQ ID NO: 301333 - RNA, 19 nt, Homo sapiens
  misc_RNA (1)...(19): siRNA sense strand
gaacuugcauuccaaacaa

SEQ ID NO: 301334 - RNA, 19 nt, Homo sapiens
  misc_RNA (1)...(19): siRNA sense strand
gcaagacaaugagcaguua

SEQ ID NO: 301335 - RNA, 19 nt, Homo sapiens
  misc_RNA (1)...(19): siRNA sense strand
gugagaacauguuacaaua

SEQ ID NO: 301336 - RNA, 19 nt, Homo sapiens
  misc_RNA (1)...(19): siRNA sense strand
ggagagagaugcauauguc

SEQ ID NO: 301337 - RNA, 19 nt, Homo sapiens
  misc_RNA (1)...(19): siRNA sense strand
ggagaagggacuacuauaa

SEQ ID NO: 301338 - RNA, 19 nt, Homo sapiens
  misc_RNA (1)...(19): siRNA sense strand
caagauaccuagaaugcaa

SEQ ID NO: 301339 - RNA, 19 nt, Homo sapiens
  misc_RNA (1)...(19): siRNA sense strand
gaugauagauugucagucu

SEQ ID NO: 301340 - RNA, 19 nt, Homo sapiens
  misc_RNA (1)...(19): siRNA sense strand
gagaugcgguggacuuuga

SEQ ID NO: 301341 - RNA, 19 nt, Homo sapiens
  misc_RNA (1)...(19): siRNA sense strand
ggaauaggcagcuacagua

SEQ ID NO: 301342 - RNA, 19 nt, Homo sapiens
  misc_RNA (1)...(19): siRNA sense strand
uauaggaacuggagugaaa

SEQ ID NO: 301343 - RNA, 19 nt, Homo sapiens
  misc_RNA (1)...(19): siRNA sense strand
ggaagcaauucgacuuauu

SEQ ID NO: 301344 - RNA, 19 nt, Homo sapiens
  misc_RNA (1)...(19): siRNA sense strand
caaauguccucgcauaguu

SEQ ID NO: 301345 - RNA, 19 nt, Homo sapiens
  misc_RNA (1)...(19): siRNA sense strand
aaacauauggccacacuua

SEQ ID NO: 301346 - RNA, 19 nt, Homo sapiens
  misc_RNA (1)...(19): siRNA sense strand
gaggaaauguggacuggaa

SEQ ID NO: 301347 - RNA, 19 nt, Homo sapiens
  misc_RNA (1)...(19): siRNA sense strand
ggacaaaugagauguuuau

SEQ ID NO: 301348 - RNA, 19 nt, Homo sapiens
  misc_RNA (1)...(19): siRNA sense strand
gagaagggacuacuauaaa

SEQ ID NO: 301349 - RNA, 19 nt, Homo sapiens
  misc_RNA (1)...(19): siRNA sense strand
gaagaagucagcaaaauua

SEQ ID NO: 301350 - RNA, 19 nt, Homo sapiens
  misc_RNA (1)...(19): siRNA sense strand
gcauucagcuggagagaga

SEQ ID NO: 301351 - RNA, 19 nt, Homo sapiens
  misc_RNA (1)...(19): siRNA sense strand
caaacacccugagacaaua

SEQ ID NO: 301352 - RNA, 19 nt, Homo sapiens
  misc_RNA (1)...(19): siRNA sense strand
gagaacauguuacaauauc

SEQ ID NO: 301353 - RNA, 19 nt, Homo sapiens
  misc_RNA (1)...(19): siRNA sense strand
caaccaaggucuguggaua

SEQ ID NO: 301354 - RNA, 19 nt, Homo sapiens
  misc_RNA (1)...(19): siRNA sense strand
gauagaauauucacaggau

SEQ ID NO: 301355 - RNA, 19 nt, Homo sapiens
  misc_RNA (1)...(19): siRNA sense strand
uaucagccaucuauaauga

SEQ ID NO: 301356 - RNA, 19 nt, Homo sapiens
  misc_RNA (1)...(19): siRNA sense strand
gcaguuacuucuauccauu

SEQ ID NO: 301357 - RNA, 19 nt, Homo sapiens
  misc_RNA (1)...(19): siRNA sense strand
gguauaagaugugcaauca

SEQ ID NO: 301358 - RNA, 19 nt, Homo sapiens
  misc_RNA (1)...(19): siRNA sense strand
ucaaugaaguucuuagaga

SEQ ID NO: 301359 - RNA, 19 nt, Homo sapiens
  misc_RNA (1)...(19): siRNA sense strand
gcaguaacaucacaacaca

SEQ ID NO: 301360 - RNA, 19 nt, Homo sapiens
  misc_RNA (1)...(19): siRNA sense strand
uagcacagaugguuaauuc

SEQ ID NO: 301361 - RNA, 19 nt, Homo sapiens
  misc_RNA (1)...(19): siRNA sense strand
uuacaguggucucgaauuu

SEQ ID NO: 301362 - RNA, 19 nt, Homo sapiens
  misc_RNA (1)...(19): siRNA sense strand
gaucauauaucccaagaac

SEQ ID NO: 301363 - RNA, 19 nt, Homo sapiens
  misc_RNA (1)...(19): siRNA sense strand
gcagcaucaucaucuguua

SEQ ID NO: 301364 - RNA, 19 nt, Homo sapiens
  misc_RNA (1)...(19): siRNA sense strand
ucacucagaugcuaaaugu

SEQ ID NO: 301365 - RNA, 19 nt, Homo sapiens
  misc_RNA (1)...(19): siRNA sense strand
guuuaaagcucaugcauca

SEQ ID NO: 301366 - RNA, 19 nt, Homo sapiens
  misc_RNA (1)...(19): siRNA sense strand
cuacaaggcuagauggaaa

SEQ ID NO: 301367 - RNA, 19 nt, Homo sapiens
  misc_RNA (1)...(19): siRNA sense strand
uauaagaugugcaaucaga

SEQ ID NO: 301368 - RNA, 19 nt, Homo sapiens
  misc_RNA (1)...(19): siRNA sense strand
gaacuaacaaucccuacaa

SEQ ID NO: 301369 - RNA, 19 nt, Homo sapiens
  misc_RNA (1)...(19): siRNA sense strand
acaaauggaugguuauuca

SEQ ID NO: 301370 - RNA, 19 nt, Homo sapiens
  misc_RNA (1)...(19): siRNA sense strand
ugaaucaccucaacuuaga

SEQ ID NO: 301371 - RNA, 19 nt, Homo sapiens
  misc_RNA (1)...(19): siRNA sense strand
gcuacuggacugcuuauua

SEQ ID NO: 301372 - RNA, 19 nt, Homo sapiens
  misc_RNA (1)...(19): siRNA sense strand
uuaauaagguuggguguaa

SEQ ID NO: 301373 - RNA, 19 nt, Homo sapiens
  misc_RNA (1)...(19): siRNA sense strand
ugaguaauguucaggaauu

SEQ ID NO: 301374 - RNA, 19 nt, Homo sapiens
  misc_RNA (1)...(19): siRNA sense strand
gaacaagggauagauuuau

SEQ ID NO: 301375 - RNA, 19 nt, Homo sapiens
  misc_RNA (1)...(19): siRNA sense strand
acagugaguuccgguauua

SEQ ID NO: 301376 - RNA, 19 nt, Homo sapiens
  misc_RNA (1)...(19): siRNA sense strand
ggaacuugguauuaacaaa

SEQ ID NO: 301377 - RNA, 19 nt, Homo sapiens
  misc_RNA (1)...(19): siRNA sense strand
caaauugagguguucuuua

SEQ ID NO: 301378 - RNA, 19 nt, Homo sapiens
  misc_RNA (1)...(19): siRNA sense strand
gaaagaagaugcagaaaac

SEQ ID NO: 301379 - RNA, 19 nt, Homo sapiens
  misc_RNA (1)...(19): siRNA sense strand
ggaagaagacgaagaacau

SEQ ID NO: 301380 - RNA, 19 nt, Homo sapiens
  misc_RNA (1)...(19): siRNA sense strand
gauauuggccgacaaggaa

SEQ ID NO: 301381 - RNA, 19 nt, Homo sapiens
  misc_RNA (1)...(19): siRNA sense strand
ggauacagcuuauguuuug

SEQ ID NO: 301382 - RNA, 19 nt, Homo sapiens
  misc_RNA (1)...(19): siRNA sense strand
caccacaccugaagauauu

SEQ ID NO: 301383 - RNA, 19 nt, Homo sapiens
  misc_RNA (1)...(19): siRNA sense strand
gaacuugguaugaguaaug

SEQ ID NO: 301384 - RNA, 19 nt, Homo sapiens
  misc_RNA (1)...(19): siRNA sense strand
aaacuaugacugugacuua

SEQ ID NO: 301385 - RNA, 19 nt, Homo sapiens
  misc_RNA (1)...(19): siRNA sense strand
cuacuacccucucuuaugu

SEQ ID NO: 301386 - RNA, 19 nt, Homo sapiens
  misc_RNA (1)...(19): siRNA sense strand
cagcgaccauugauucuuu

SEQ ID NO: 301387 - RNA, 19 nt, Homo sapiens
  misc_RNA (1)...(19): siRNA sense strand
ccaagaauguuuagucuac

SEQ ID NO: 301388 - RNA, 19 nt, Homo sapiens
  misc_RNA (1)...(19): siRNA sense strand
ggcaugagauucugaagug

SEQ ID NO: 301389 - RNA, 19 nt, Homo sapiens
  misc_RNA (1)...(19): siRNA sense strand
guccaaauguccucgcaua

SEQ ID NO: 301390 - RNA, 19 nt, Homo sapiens
  misc_RNA (1)...(19): siRNA sense strand
gaacguagcaccugaagac

SEQ ID NO: 301391 - RNA, 19 nt, Homo sapiens
  misc_RNA (1)...(19): siRNA sense strand
gaaaugaaacagaagaaca

SEQ ID NO: 301392 - RNA, 19 nt, Homo sapiens
  misc_RNA (1)...(19): siRNA sense strand
guauucaggucauugugua

SEQ ID NO: 301393 - RNA, 19 nt, Homo sapiens
  misc_RNA (1)...(19): siRNA sense strand
caccucaacuuagauauuu

SEQ ID NO: 301394 - RNA, 19 nt, Homo sapiens
  misc_RNA (1)...(19): siRNA sense strand
gaguucagcugcagauaau

SEQ ID NO: 301395 - RNA, 19 nt, Homo sapiens
  misc_RNA (1)...(19): siRNA sense strand
ucagacagaugaaggaguu

SEQ ID NO: 301396 - RNA, 19 nt, Homo sapiens
  misc_RNA (1)...(19): siRNA sense strand
ggaguaaggaucaguaugu

SEQ ID NO: 301397 - RNA, 19 nt, Homo sapiens
  misc_RNA (1)...(19): siRNA sense strand
ugaucaagaugaaagcaua

SEQ ID NO: 301398 - RNA, 19 nt, Homo sapiens
  misc_RNA (1)...(19): siRNA sense strand
gaauagagguaucaaugac

SEQ ID NO: 301399 - RNA, 19 nt, Homo sapiens
  misc_RNA (1)...(19): siRNA sense strand
caacaugacuuuucaggaa

SEQ ID NO: 301400 - RNA, 19 nt, Homo sapiens
  misc_RNA (1)...(19): siRNA sense strand
cgaaguguaugguugaaug

SEQ ID NO: 301401 - RNA, 19 nt, Homo sapiens
  misc_RNA (1)...(19): siRNA sense strand
agagaugagugaaaucaaa

SEQ ID NO: 301402 - RNA, 19 nt, Homo sapiens
  misc_RNA (1)...(19): siRNA sense strand
ggaguucagcugcagauaa

SEQ ID NO: 301403 - RNA, 19 nt, Homo sapiens
  misc_RNA (1)...(19): siRNA sense strand
uaagaaagaagaugcagaa

SEQ ID NO: 301404 - RNA, 19 nt, Homo sapiens
  misc_RNA (1)...(19): siRNA sense strand
gacaacaacuugcaaucau

SEQ ID NO: 301405 - RNA, 19 nt, Homo sapiens
  misc_RNA (1)...(19): siRNA sense strand
ccagugaaaucaaagacaa

SEQ ID NO: 301406 - RNA, 19 nt, Homo sapiens
  misc_RNA (1)...(19): siRNA sense strand
ccaauucucuuugaguuau

SEQ ID NO: 301407 - RNA, 19 nt, Homo sapiens
  misc_RNA (1)...(19): siRNA sense strand
caaaauaugugucugauag

SEQ ID NO: 301408 - RNA, 19 nt, Homo sapiens
  misc_RNA (1)...(19): siRNA sense strand
gauagcaaguauucaggaa

SEQ ID NO: 301409 - RNA, 19 nt, Homo sapiens
  misc_RNA (1)...(19): siRNA sense strand
agugaaaccucgauacauu

SEQ ID NO: 301410 - RNA, 19 nt, Homo sapiens
  misc_RNA (1)...(19): siRNA sense strand
acucagaugcuaaauguua

SEQ ID NO: 301411 - RNA, 19 nt, Homo sapiens
  misc_RNA (1)...(19): siRNA sense strand
ccaccuccaucuccuguaa

SEQ ID NO: 301412 - RNA, 19 nt, Homo sapiens
  misc_RNA (1)...(19): siRNA sense strand
aaacagauagcaaguauuc

SEQ ID NO: 301413 - RNA, 19 nt, Homo sapiens
  misc_RNA (1)...(19): siRNA sense strand
acaaagaagucauguaugc

SEQ ID NO: 301414 - RNA, 19 nt, Homo sapiens
  misc_RNA (1)...(19): siRNA sense strand
gaagggacuacuauaaaug

SEQ ID NO: 301415 - RNA, 19 nt, Homo sapiens
  misc_RNA (1)...(19): siRNA sense strand
caacaugggaagaauaaga

SEQ ID NO: 301416 - RNA, 19 nt, Homo sapiens
  misc_RNA (1)...(19): siRNA sense strand
gcaccacaccugaagauau

SEQ ID NO: 301417 - RNA, 19 nt, Homo sapiens
  misc_RNA (1)...(19): siRNA sense strand
gcuauuaagcaguaucuuu

SEQ ID NO: 301418 - RNA, 19 nt, Homo sapiens
  misc_RNA (1)...(19): siRNA sense strand
uccaaagucucaugaacua

SEQ ID NO: 301419 - RNA, 19 nt, Homo sapiens
  misc_RNA (1)...(19): siRNA sense strand
agaagggacuacuauaaau

SEQ ID NO: 301420 - RNA, 19 nt, Homo sapiens
  misc_RNA (1)...(19): siRNA sense strand
uggacuaacuuacugcuuu

SEQ ID NO: 301421 - RNA, 19 nt, Homo sapiens
  misc_RNA (1)...(19): siRNA sense strand
cuacuggacugcuuauuag

SEQ ID NO: 301422 - RNA, 19 nt, Homo sapiens
  misc_RNA (1)...(19): siRNA sense strand
gaagcaauucgacuuauuc

SEQ ID NO: 301423 - RNA, 19 nt, Homo sapiens
  misc_RNA (1)...(19): siRNA sense strand
ugaaguguuugucugaauu

SEQ ID NO: 301424 - RNA, 19 nt, Homo sapiens
  misc_RNA (1)...(19): siRNA sense strand
gacaaaggaacaauacauu

SEQ ID NO: 301425 - RNA, 19 nt, Homo sapiens
  misc_RNA (1)...(19): siRNA sense strand
gaaaccaaagagaggaaua

SEQ ID NO: 301426 - RNA, 19 nt, Homo sapiens
  misc_RNA (1)...(19): siRNA sense strand
ugacuuaaaugcagccaau

SEQ ID NO: 301427 - RNA, 19 nt, Homo sapiens
  misc_RNA (1)...(19): siRNA sense strand
agaguguaguggauauuua

SEQ ID NO: 301428 - RNA, 19 nt, Homo sapiens
  misc_RNA (1)...(19): siRNA sense strand
gcaaagaccuguaugugaa

SEQ ID NO: 301429 - RNA, 19 nt, Homo sapiens
  misc_RNA (1)...(19): siRNA sense strand
gaaagaggcucaucacugu

SEQ ID NO: 301430 - RNA, 19 nt, Homo sapiens
  misc_RNA (1)...(19): siRNA sense strand
gaacucuccugcaucauua

SEQ ID NO: 301431 - RNA, 19 nt, Homo sapiens
  misc_RNA (1)...(19): siRNA sense strand
ggauaaguguuguguauaa

SEQ ID NO: 301432 - RNA, 19 nt, Homo sapiens
  misc_RNA (1)...(19): siRNA sense strand
gaugaaaccugcaacugua

SEQ ID NO: 301433 - RNA, 19 nt, Homo sapiens
  misc_RNA (1)...(19): siRNA sense strand
caacuugacuucugugaaa

SEQ ID NO: 301434 - RNA, 19 nt, Homo sapiens
  misc_RNA (1)...(19): siRNA sense strand
cgaaagagcaguauauuaa

SEQ ID NO: 301435 - RNA, 19 nt, Homo sapiens
  misc_RNA (1)...(19): siRNA sense strand
ggaggaagauucaucagaa

SEQ ID NO: 301436 - RNA, 19 nt, Homo sapiens
  misc_RNA (1)...(19): siRNA sense strand
gcaagacgguguaguguga

SEQ ID NO: 301437 - RNA, 19 nt, Homo sapiens
  misc_RNA (1)...(19): siRNA sense strand
caacuacgacugugauuua

SEQ ID NO: 301438 - RNA, 19 nt, Homo sapiens
  misc_RNA (1)...(19): siRNA sense strand
gugaagcucuugccuauuu

SEQ ID NO: 301439 - RNA, 19 nt, Homo sapiens
  misc_RNA (1)...(19): siRNA sense strand
gaauguauguugaugagaa

SEQ ID NO: 301440 - RNA, 19 nt, Homo sapiens
  misc_RNA (1)...(19): siRNA sense strand
gcacaucccuugacugcuu

SEQ ID NO: 301441 - RNA, 19 nt, Homo sapiens
  misc_RNA (1)...(19): siRNA sense strand
ggaacgagaugccuauguu

SEQ ID NO: 301442 - RNA, 19 nt, Homo sapiens
  misc_RNA (1)...(19): siRNA sense strand
gugagaacauguuacaaua

SEQ ID NO: 301443 - RNA, 19 nt, Homo sapiens
  misc_RNA (1)...(19): siRNA sense strand
ggacauuccuagaagguuu

SEQ ID NO: 301444 - RNA, 19 nt, Homo sapiens
  misc_RNA (1)...(19): siRNA sense strand
gaacaugccaggagugauu

SEQ ID NO: 301445 - RNA, 19 nt, Homo sapiens
  misc_RNA (1)...(19): siRNA sense strand
ucaaugcaaucaagcaaua

SEQ ID NO: 301446 - RNA, 19 nt, Homo sapiens
  misc_RNA (1)...(19): siRNA sense strand
ggagaucacuucaauaagg

SEQ ID NO: 301447 - RNA, 19 nt, Homo sapiens
  misc_RNA (1)...(19): siRNA sense strand
ggauggaaaugcaauaguu

SEQ ID NO: 301448 - RNA, 19 nt, Homo sapiens
  misc_RNA (1)...(19): siRNA sense strand
gcacaaagcaaaccaacaa

SEQ ID NO: 301449 - RNA, 19 nt, Homo sapiens
  misc_RNA (1)...(19): siRNA sense strand
gcaacuaccuugggaauuc

SEQ ID NO: 301450 - RNA, 19 nt, Homo sapiens
  misc_RNA (1)...(19): siRNA sense strand
gaacugugaugacacugaa

SEQ ID NO: 301451 - RNA, 19 nt, Homo sapiens
  misc_RNA (1)...(19): siRNA sense strand
caaguuagauguacgaaca

SEQ ID NO: 301452 - RNA, 19 nt, Homo sapiens
  misc_RNA (1)...(19): siRNA sense strand
gaaguggccuccuuguguu

SEQ ID NO: 301453 - RNA, 19 nt, Homo sapiens
  misc_RNA (1)...(19): siRNA sense strand
ggcaugagaucuugaaaug

SEQ ID NO: 301454 - RNA, 19 nt, Homo sapiens
  misc_RNA (1)...(19): siRNA sense strand
gaaaugcaauaguugacuu

SEQ ID NO: 301455 - RNA, 19 nt, Homo sapiens
  misc_RNA (1)...(19): siRNA sense strand
gagaacauguuacaauauc

SEQ ID NO: 301456 - RNA, 19 nt, Homo sapiens
  misc_RNA (1)...(19): siRNA sense strand
gcucacggaucaggaaaua

SEQ ID NO: 301457 - RNA, 19 nt, Homo sapiens
  misc_RNA (1)...(19): siRNA sense strand
gaaauacagcagagacuuu

SEQ ID NO: 301458 - RNA, 19 nt, Homo sapiens
  misc_RNA (1)...(19): siRNA sense strand
ggaugacccugagcaauuu

SEQ ID NO: 301459 - RNA, 19 nt, Homo sapiens
  misc_RNA (1)...(19): siRNA sense strand
ggaaucggaugcacaagga

SEQ ID NO: 301460 - RNA, 19 nt, Homo sapiens
  misc_RNA (1)...(19): siRNA sense strand
gcagaagauuguggagaua

SEQ ID NO: 301461 - RNA, 19 nt, Homo sapiens
  misc_RNA (1)...(19): siRNA sense strand
cauugaagcugacaaguau

SEQ ID NO: 301462 - RNA, 19 nt, Homo sapiens
  misc_RNA (1)...(19): siRNA sense strand
gcagauauccacauagaga

SEQ ID NO: 301463 - RNA, 19 nt, Homo sapiens
  misc_RNA (1)...(19): siRNA sense strand
caagauacauagaaugcaa

SEQ ID NO: 301464 - RNA, 19 nt, Homo sapiens
  misc_RNA (1)...(19): siRNA sense strand
gaaaccauuugcaguuguu

SEQ ID NO: 301465 - RNA, 19 nt, Homo sapiens
  misc_RNA (1)...(19): siRNA sense strand
gaggaagauucaucagaaa

SEQ ID NO: 301466 - RNA, 19 nt, Homo sapiens
  misc_RNA (1)...(19): siRNA sense strand
gaacgucaguugaagacau

SEQ ID NO: 301467 - RNA, 19 nt, Homo sapiens
  misc_RNA (1)...(19): siRNA sense strand
guagucacaucugccauua

SEQ ID NO: 301468 - RNA, 19 nt, Homo sapiens
  misc_RNA (1)...(19): siRNA sense strand
ggagauagcgcaagguuca

SEQ ID NO: 301469 - RNA, 19 nt, Homo sapiens
  misc_RNA (1)...(19): siRNA sense strand
gcaguggugugucaaacaa

SEQ ID NO: 301470 - RNA, 19 nt, Homo sapiens
  misc_RNA (1)...(19): siRNA sense strand
uaaggcaacucuccaugaa

SEQ ID NO: 301471 - RNA, 19 nt, Homo sapiens
  misc_RNA (1)...(19): siRNA sense strand
agacaacuguucaggauga

SEQ ID NO: 301472 - RNA, 19 nt, Homo sapiens
  misc_RNA (1)...(19): siRNA sense strand
cuacaguggucucgaauau

SEQ ID NO: 301473 - RNA, 19 nt, Homo sapiens
  misc_RNA (1)...(19): siRNA sense strand
ccagaccacuugccacauu

SEQ ID NO: 301474 - RNA, 19 nt, Homo sapiens
  misc_RNA (1)...(19): siRNA sense strand
gaugagaaccgcagggauu

SEQ ID NO: 301475 - RNA, 19 nt, Homo sapiens
  misc_RNA (1)...(19): siRNA sense strand
gaucagggcauguauaagu

SEQ ID NO: 301476 - RNA, 19 nt, Homo sapiens
  misc_RNA (1)...(19): siRNA sense strand
gguacaaauugcuuagaaa

SEQ ID NO: 301477 - RNA, 19 nt, Homo sapiens
  misc_RNA (1)...(19): siRNA sense strand
gcgcaagguucaacaagga

SEQ ID NO: 301478 - RNA, 19 nt, Homo sapiens
  misc_RNA (1)...(19): siRNA sense strand
aaacaaccaucccacaugu

SEQ ID NO: 301479 - RNA, 19 nt, Homo sapiens
  misc_RNA (1)...(19): siRNA sense strand
ggaccaacuugacuucugu

SEQ ID NO: 301480 - RNA, 19 nt, Homo sapiens
  misc_RNA (1)...(19): siRNA sense strand
gacagaaccugagagaguu

SEQ ID NO: 301481 - RNA, 19 nt, Homo sapiens
  misc_RNA (1)...(19): siRNA sense strand
caugagaucuugaaaugca

SEQ ID NO: 301482 - RNA, 19 nt, Homo sapiens
  misc_RNA (1)...(19): siRNA sense strand
gggaauuccuggcaugaga

SEQ ID NO: 301483 - RNA, 19 nt, Homo sapiens
  misc_RNA (1)...(19): siRNA sense strand
ccacucaccuggaccaugu

SEQ ID NO: 301484 - RNA, 19 nt, Homo sapiens
  misc_RNA (1)...(19): siRNA sense strand
guccuagcguauucaauua

SEQ ID NO: 301485 - RNA, 19 nt, Homo sapiens
  misc_RNA (1)...(19): siRNA sense strand
ggacaugagcugggaauga

SEQ ID NO: 301486 - RNA, 19 nt, Homo sapiens
  misc_RNA (1)...(19): siRNA sense strand
ccgaaucgccugcaucuuu

SEQ ID NO: 301487 - RNA, 19 nt, Homo sapiens
  misc_RNA (1)...(19): siRNA sense strand
ccagacaacuguucaggau

SEQ ID NO: 301488 - RNA, 19 nt, Homo sapiens
  misc_RNA (1)...(19): siRNA sense strand
ugcagaaacucaucgcaua

SEQ ID NO: 301489 - RNA, 19 nt, Homo sapiens
  misc_RNA (1)...(19): siRNA sense strand
gcucuugccuauuucauca

SEQ ID NO: 301490 - RNA, 19 nt, Homo sapiens
  misc_RNA (1)...(19): siRNA sense strand
gaaacucccugagcaacug

SEQ ID NO: 301491 - RNA, 19 nt, Homo sapiens
  misc_RNA (1)...(19): siRNA sense strand
cuacgacugugauuuaaau

SEQ ID NO: 301492 - RNA, 19 nt, Homo sapiens
  misc_RNA (1)...(19): siRNA sense strand
ugagagaguucuaggugaa

SEQ ID NO: 301493 - RNA, 19 nt, Homo sapiens
  misc_RNA (1)...(19): siRNA sense strand
agucacaucugccauuaaa

SEQ ID NO: 301494 - RNA, 19 nt, Homo sapiens
  misc_RNA (1)...(19): siRNA sense strand
ccaaaagauugaccgauua

SEQ ID NO: 301495 - RNA, 19 nt, Homo sapiens
  misc_RNA (1)...(19): siRNA sense strand
cagugaagcucuugccuau

SEQ ID NO: 301496 - RNA, 19 nt, Homo sapiens
  misc_RNA (1)...(19): siRNA sense strand
gaauugauacagaccauug

SEQ ID NO: 301497 - RNA, 19 nt, Homo sapiens
  misc_RNA (1)...(19): siRNA sense strand
caaacaagauaaugaacag

SEQ ID NO: 301498 - RNA, 19 nt, Homo sapiens
  misc_RNA (1)...(19): siRNA sense strand
gcagaugcccaguguguug

SEQ ID NO: 301499 - RNA, 19 nt, Homo sapiens
  misc_RNA (1)...(19): siRNA sense strand
gugaaauuaugcaguuuga

SEQ ID NO: 301500 - RNA, 19 nt, Homo sapiens
  misc_RNA (1)...(19): siRNA sense strand
ugauguauuugcacaauug

SEQ ID NO: 301501 - RNA, 19 nt, Homo sapiens
  misc_RNA (1)...(19): siRNA sense strand
gagcaacugucagagaaau

SEQ ID NO: 301502 - RNA, 19 nt, Homo sapiens
  misc_RNA (1)...(19): siRNA sense strand
gaauauggcaugugauugg

SEQ ID NO: 301503 - RNA, 19 nt, Homo sapiens
  misc_RNA (1)...(19): siRNA sense strand
cgacuacaguggucucgaa

SEQ ID NO: 301504 - RNA, 19 nt, Homo sapiens
  misc_RNA (1)...(19): siRNA sense strand
cgaaucgccugcaucuuug

SEQ ID NO: 301505 - RNA, 19 nt, Homo sapiens
  misc_RNA (1)...(19): siRNA sense strand
gaguaucucucaagcaucu

SEQ ID NO: 301506 - RNA, 19 nt, Homo sapiens
  misc_RNA (1)...(19): siRNA sense strand
cuacuugugugaaauuaug

SEQ ID NO: 301507 - RNA, 19 nt, Homo sapiens
  misc_RNA (1)...(19): siRNA sense strand
ggagauaucauacuacaac

SEQ ID NO: 301508 - RNA, 19 nt, Homo sapiens
  misc_RNA (1)...(19): siRNA sense strand
aaagacagauggccagcuu

SEQ ID NO: 301509 - RNA, 19 nt, Homo sapiens
  misc_RNA (1)...(19): siRNA sense strand
gaauguagcuagugaaaag

SEQ ID NO: 301510 - RNA, 19 nt, Homo sapiens
  misc_RNA (1)...(19): siRNA sense strand
acaaggaggugauguaugc

SEQ ID NO: 301511 - RNA, 19 nt, Homo sapiens
  misc_RNA (1)...(19): siRNA sense strand
gggcaagucuaaacccaau

SEQ ID NO: 301512 - RNA, 19 nt, Homo sapiens
  misc_RNA (1)...(19): siRNA sense strand
ggaugaaaccugcaacugu

SEQ ID NO: 301513 - RNA, 19 nt, Homo sapiens
  misc_RNA (1)...(19): siRNA sense strand
uaucuuugcuguugacuca

SEQ ID NO: 301514 - RNA, 19 nt, Homo sapiens
  misc_RNA (1)...(19): siRNA sense strand
ucucgaauauggcauguga

SEQ ID NO: 301515 - RNA, 19 nt, Homo sapiens
  misc_RNA (1)...(19): siRNA sense strand
gaucugggcgugaaagaga

SEQ ID NO: 301516 - RNA, 19 nt, Homo sapiens
  misc_RNA (1)...(19): siRNA sense strand
ccaaaucuacuaagcagaa

SEQ ID NO: 301517 - RNA, 19 nt, Homo sapiens
  misc_RNA (1)...(19): siRNA sense strand
ucacaucugccauuaaaga

SEQ ID NO: 301518 - RNA, 19 nt, Homo sapiens
  misc_RNA (1)...(19): siRNA sense strand
gauccuguuucgaauguau

SEQ ID NO: 301519 - RNA, 19 nt, Homo sapiens
  misc_RNA (1)...(19): siRNA sense strand
uaucagaguucgccugcaa

SEQ ID NO: 301520 - RNA, 19 nt, Homo sapiens
  misc_RNA (1)...(19): siRNA sense strand
gugaagugcuuaucagagu

SEQ ID NO: 301521 - RNA, 19 nt, Homo sapiens
  misc_RNA (1)...(19): siRNA sense strand
ucaauaagguuggcugcaa

SEQ ID NO: 301522 - RNA, 19 nt, Homo sapiens
  misc_RNA (1)...(19): siRNA sense strand
cagaauuguugaaaccauu

SEQ ID NO: 301523 - RNA, 19 nt, Homo sapiens
  misc_RNA (1)...(19): siRNA sense strand
gauaucauacuacaacaug

SEQ ID NO: 301524 - RNA, 19 nt, Homo sapiens
  misc_RNA (1)...(19): siRNA sense strand
gggaagaaguggacaugag

SEQ ID NO: 301525 - RNA, 19 nt, Homo sapiens
  misc_RNA (1)...(19): siRNA sense strand
gauaggaaccggugugaag

SEQ ID NO: 301526 - RNA, 19 nt, Homo sapiens
  misc_RNA (1)...(19): siRNA sense strand
ucaagugugugguccaguu

SEQ ID NO: 301527 - RNA, 19 nt, Homo sapiens
  misc_RNA (1)...(19): siRNA sense strand
caaaggccuucaacuccaa

SEQ ID NO: 301528 - RNA, 19 nt, Homo sapiens
  misc_RNA (1)...(19): siRNA sense strand
gcagacagcuccuggaugu

SEQ ID NO: 301529 - RNA, 19 nt, Homo sapiens
  misc_RNA (1)...(19): siRNA sense strand
gaaaucgccuaccucuuug

SEQ ID NO: 301530 - RNA, 19 nt, Homo sapiens
  misc_RNA (1)...(19): siRNA sense strand
acaaagaggucugcuacua

SEQ ID NO: 301531 - RNA, 19 nt, Homo sapiens
  misc_RNA (1)...(19): siRNA sense strand
agaaaucgccuaccucuuu

SEQ ID NO: 301532 - RNA, 19 nt, Homo sapiens
  misc_RNA (1)...(19): siRNA sense strand
gacaagauccggacuucua

SEQ ID NO: 301533 - RNA, 19 nt, Homo sapiens
  misc_RNA (1)...(19): siRNA sense strand
ggcaaacaaugacaucuug

SEQ ID NO: 301534 - RNA, 19 nt, Homo sapiens
  misc_RNA (1)...(19): siRNA sense strand
acaaggugcuggagaacua

SEQ ID NO: 301535 - RNA, 19 nt, Homo sapiens
  misc_RNA (1)...(19): siRNA sense strand
ccaaguaccucgaccucaa

SEQ ID NO: 301536 - RNA, 19 nt, Homo sapiens
  misc_RNA (1)...(19): siRNA sense strand
ucagaugccuacucagaaa

SEQ ID NO: 301537 - RNA, 19 nt, Homo sapiens
  misc_RNA (1)...(19): siRNA sense strand
ucaacaaggugcuggagaa

SEQ ID NO: 301538 - RNA, 19 nt, Homo sapiens
  misc_RNA (1)...(19): siRNA sense strand
agaaaguggugaucaguau

SEQ ID NO: 301539 - RNA, 19 nt, Homo sapiens
  misc_RNA (1)...(19): siRNA sense strand
gaagaccgcucugcucucu

SEQ ID NO: 301540 - RNA, 19 nt, Homo sapiens
  misc_RNA (1)...(19): siRNA sense strand
caacaaggccuucaaugag

SEQ ID NO: 301541 - RNA, 19 nt, Homo sapiens
  misc_RNA (1)...(19): siRNA sense strand
ggccaccucuucuacauug

SEQ ID NO: 301542 - RNA, 19 nt, Homo sapiens
  misc_RNA (1)...(19): siRNA sense strand
ggaggagcccacauacuuu

SEQ ID NO: 301543 - RNA, 19 nt, Homo sapiens
  misc_RNA (1)...(19): siRNA sense strand
ccagucagaugccuacuca

SEQ ID NO: 301544 - RNA, 19 nt, Homo sapiens
  misc_RNA (1)...(19): siRNA sense strand
caacugcuguggcuguaau

SEQ ID NO: 301545 - RNA, 19 nt, Homo sapiens
  misc_RNA (1)...(19): siRNA sense strand
ggaugccggugaccagaaa

SEQ ID NO: 301546 - RNA, 19 nt, Homo sapiens
  misc_RNA (1)...(19): siRNA sense strand
ggagcugccugaggaggua

SEQ ID NO: 301547 - RNA, 19 nt, Homo sapiens
  misc_RNA (1)...(19): siRNA sense strand
ccacauacuuugccaucug

SEQ ID NO: 301548 - RNA, 19 nt, Homo sapiens
  misc_RNA (1)...(19): siRNA sense strand
cgaccucacugccaagaau

SEQ ID NO: 301549 - RNA, 19 nt, Homo sapiens
  misc_RNA (1)...(19): siRNA sense strand
acaacaaggccuucaauga

SEQ ID NO: 301550 - RNA, 19 nt, Homo sapiens
  misc_RNA (1)...(19): siRNA sense strand
guucgugacugcugugguu

SEQ ID NO: 301551 - RNA, 19 nt, Homo sapiens
  misc_RNA (1)...(19): siRNA sense strand
cugaguacaucaagaagaa

SEQ ID NO: 301552 - RNA, 19 nt, Homo sapiens
  misc_RNA (1)...(19): siRNA sense strand
aaagaggucugcuacuaca

SEQ ID NO: 301553 - RNA, 19 nt, Homo sapiens
  misc_RNA (1)...(19): siRNA sense strand
gaaugucacccucggaaug

SEQ ID NO: 301554 - RNA, 19 nt, Homo sapiens
  misc_RNA (1)...(19): siRNA sense strand
ccaaggaugcccugacuga

SEQ ID NO: 301555 - RNA, 19 nt, Homo sapiens
  misc_RNA (1)...(19): siRNA sense strand
ggaauucgccgaguucauc

SEQ ID NO: 301556 - RNA, 19 nt, Homo sapiens
  misc_RNA (1)...(19): siRNA sense strand
ggagcaagucccagucuga

SEQ ID NO: 301557 - RNA, 19 nt, Homo sapiens
  misc_RNA (1)...(19): siRNA sense strand
gccaugaugcggucuauga

SEQ ID NO: 301558 - RNA, 19 nt, Homo sapiens
  misc_RNA (1)...(19): siRNA sense strand
gacaacugcuguggcugua

SEQ ID NO: 301559 - RNA, 19 nt, Homo sapiens
  misc_RNA (1)...(19): siRNA sense strand
guccucaggugcuggaauu

SEQ ID NO: 301560 - RNA, 19 nt, Homo sapiens
  misc_RNA (1)...(19): siRNA sense strand
guagucauccucagugugu

SEQ ID NO: 301561 - RNA, 19 nt, Homo sapiens
  misc_RNA (1)...(19): siRNA sense strand
gcaagucccagucugagau

SEQ ID NO: 301562 - RNA, 19 nt, Homo sapiens
  misc_RNA (1)...(19): siRNA sense strand
gaggagcccacauacuuug

SEQ ID NO: 301563 - RNA, 19 nt, Homo sapiens
  misc_RNA (1)...(19): siRNA sense strand
gugaggaugcgauggagua

SEQ ID NO: 301564 - RNA, 19 nt, Homo sapiens
  misc_RNA (1)...(19): siRNA sense strand
caaacacuacggccugauu

SEQ ID NO: 301565 - RNA, 19 nt, Homo sapiens
  misc_RNA (1)...(19): siRNA sense strand
gaagaaaguggugaucagu

SEQ ID NO: 301566 - RNA, 19 nt, Homo sapiens
  misc_RNA (1)...(19): siRNA sense strand
caagaauucacaagagaug

SEQ ID NO: 301567 - RNA, 19 nt, Homo sapiens
  misc_RNA (1)...(19): siRNA sense strand
ccaagaggaggcagcguaa

SEQ ID NO: 301568 - RNA, 19 nt, Homo sapiens
  misc_RNA (1)...(19): siRNA sense strand
aggaugcgauggaguauuc

SEQ ID NO: 301569 - RNA, 19 nt, Homo sapiens
  misc_RNA (1)...(19): siRNA sense strand
gagaugcuccgcuacaaag

SEQ ID NO: 301570 - RNA, 19 nt, Homo sapiens
  misc_RNA (1)...(19): siRNA sense strand
ccucaagaauucacaagag

SEQ ID NO: 301571 - RNA, 19 nt, Homo sapiens
  misc_RNA (1)...(19): siRNA sense strand
cagcugaguacaucaagaa

SEQ ID NO: 301572 - RNA, 19 nt, Homo sapiens
  misc_RNA (1)...(19): siRNA sense strand
caagagaugcuccgcuaca

SEQ ID NO: 301573 - RNA, 19 nt, Homo sapiens
  misc_RNA (1)...(19): siRNA sense strand
guaccucgaccucaagaau

SEQ ID NO: 301574 - RNA, 19 nt, Homo sapiens
  misc_RNA (1)...(19): siRNA sense strand
ccaaugacgaggaggaaga

SEQ ID NO: 301575 - RNA, 19 nt, Homo sapiens
  misc_RNA (1)...(19): siRNA sense strand
gaagcaccaagcccaaaug

SEQ ID NO: 301576 - RNA, 19 nt, Homo sapiens
  misc_RNA (1)...(19): siRNA sense strand
gcucgguccugcucguguu

SEQ ID NO: 301577 - RNA, 19 nt, Homo sapiens
  misc_RNA (1)...(19): siRNA sense strand
gcuacuacaugcucuuugc

SEQ ID NO: 301578 - RNA, 19 nt, Homo sapiens
  misc_RNA (1)...(19): siRNA sense strand
caaagaggucugcuacuac

SEQ ID NO: 301579 - RNA, 19 nt, Homo sapiens
  misc_RNA (1)...(19): siRNA sense strand
ucuucggccuggucuauaa

SEQ ID NO: 301580 - RNA, 19 nt, Homo sapiens
  misc_RNA (1)...(19): siRNA sense strand
ccagugcugcggccaauga

SEQ ID NO: 301581 - RNA, 19 nt, Homo sapiens
  misc_RNA (1)...(19): siRNA sense strand
gaaacuggagcaggagaug

SEQ ID NO: 301582 - RNA, 19 nt, Homo sapiens
  misc_RNA (1)...(19): siRNA sense strand
cucaagaauucacaagaga

SEQ ID NO: 301583 - RNA, 19 nt, Homo sapiens
  misc_RNA (1)...(19): siRNA sense strand
uccaagaccucuacugcau

SEQ ID NO: 301584 - RNA, 19 nt, Homo sapiens
  misc_RNA (1)...(19): siRNA sense strand
gagcuggcgcugcacaaug

SEQ ID NO: 301585 - RNA, 19 nt, Homo sapiens
  misc_RNA (1)...(19): siRNA sense strand
gagcugcugcugcugucua

SEQ ID NO: 301586 - RNA, 19 nt, Homo sapiens
  misc_RNA (1)...(19): siRNA sense strand
cgacaacaaggccuucaau

SEQ ID NO: 301587 - RNA, 19 nt, Homo sapiens
  misc_RNA (1)...(19): siRNA sense strand
caucuuggccuuccugucu

SEQ ID NO: 301588 - RNA, 19 nt, Homo sapiens
  misc_RNA (1)...(19): siRNA sense strand
gacaacaaggccuucaaug

SEQ ID NO: 301589 - RNA, 19 nt, Homo sapiens
  misc_RNA (1)...(19): siRNA sense strand
aggaggagcccacauacuu

SEQ ID NO: 301590 - RNA, 19 nt, Homo sapiens
  misc_RNA (1)...(19): siRNA sense strand
agaagaaaguggugaucag

SEQ ID NO: 301591 - RNA, 19 nt, Homo sapiens
  misc_RNA (1)...(19): siRNA sense strand
gguggaccaugacaagaag

SEQ ID NO: 301592 - RNA, 19 nt, Homo sapiens
  misc_RNA (1)...(19): siRNA sense strand
ugaccagaaacaccaagua

SEQ ID NO: 301593 - RNA, 19 nt, Homo sapiens
  misc_RNA (1)...(19): siRNA sense strand
gaaaguggugaucaguauc

SEQ ID NO: 301594 - RNA, 19 nt, Homo sapiens
  misc_RNA (1)...(19): siRNA sense strand
aagaaaguggugaucagua

SEQ ID NO: 301595 - RNA, 19 nt, Homo sapiens
  misc_RNA (1)...(19): siRNA sense strand
ucgucuggcucacucagua

SEQ ID NO: 301596 - RNA, 19 nt, Homo sapiens
  misc_RNA (1)...(19): siRNA sense strand
gagucaccaucgaggaaga

SEQ ID NO: 301597 - RNA, 19 nt, Homo sapiens
  misc_RNA (1)...(19): siRNA sense strand
gaccagaaacaccaaguac

SEQ ID NO: 301598 - RNA, 19 nt, Homo sapiens
  misc_RNA (1)...(19): siRNA sense strand
ccaaauggcggaucaucgu

SEQ ID NO: 301599 - RNA, 19 nt, Homo sapiens
  misc_RNA (1)...(19): siRNA sense strand
gcuggucugugggcaguga

SEQ ID NO: 301600 - RNA, 19 nt, Homo sapiens
  misc_RNA (1)...(19): siRNA sense strand
gcuacaaagaggucugcua

SEQ ID NO: 301601 - RNA, 19 nt, Homo sapiens
  misc_RNA (1)...(19): siRNA sense strand
caugaugcggucuaugaaa

SEQ ID NO: 301602 - RNA, 19 nt, Homo sapiens
  misc_RNA (1)...(19): siRNA sense strand
ugacugcgguggacaucgu

SEQ ID NO: 301603 - RNA, 19 nt, Homo sapiens
  misc_RNA (1)...(19): siRNA sense strand
ugacgaggaggaagagguu

SEQ ID NO: 301604 - RNA, 19 nt, Homo sapiens
  misc_RNA (1)...(19): siRNA sense strand
cugagucccuguacagcuu

SEQ ID NO: 301605 - RNA, 19 nt, Homo sapiens
  misc_RNA (1)...(19): siRNA sense strand
aaacacuacggccugauug

SEQ ID NO: 301606 - RNA, 19 nt, Homo sapiens
  misc_RNA (1)...(19): siRNA sense strand
gcugaguacaucaagaaga

SEQ ID NO: 301607 - RNA, 19 nt, Homo sapiens
  misc_RNA (1)...(19): siRNA sense strand
ucuaugaaacgcccuucua

SEQ ID NO: 301608 - RNA, 19 nt, Homo sapiens
  misc_RNA (1)...(19): siRNA sense strand
uccgggaccuugacauugu

SEQ ID NO: 301609 - RNA, 19 nt, Homo sapiens
  misc_RNA (1)...(19): siRNA sense strand
guucaucgacagccucuuc

SEQ ID NO: 301610 - RNA, 19 nt, Homo sapiens
  misc_RNA (1)...(19): siRNA sense strand
gccacuuccuggacgagaa

SEQ ID NO: 301611 - RNA, 19 nt, Homo sapiens
  misc_RNA (1)...(19): siRNA sense strand
aagagaugcuccgcuacaa

SEQ ID NO: 301612 - RNA, 19 nt, Homo sapiens
  misc_RNA (1)...(19): siRNA sense strand
ggacgaggcaaacaaugac

SEQ ID NO: 301613 - RNA, 19 nt, Homo sapiens
  misc_RNA (1)...(19): siRNA sense strand
gcaggaggagcccacauac

SEQ ID NO: 301614 - RNA, 19 nt, Homo sapiens
  misc_RNA (1)...(19): siRNA sense strand
ucaagugcuuugccuacuc

SEQ ID NO: 301615 - RNA, 19 nt, Homo sapiens
  misc_RNA (1)...(19): siRNA sense strand
gcucuucggccuggucuau

SEQ ID NO: 301616 - RNA, 19 nt, Homo sapiens
  misc_RNA (1)...(19): siRNA sense strand
agucagaugccuacucaga

SEQ ID NO: 301617 - RNA, 19 nt, Homo sapiens
  misc_RNA (1)...(19): siRNA sense strand
gggccucaguagccaggaa

SEQ ID NO: 301618 - RNA, 19 nt, Homo sapiens
  misc_RNA (1)...(19): siRNA sense strand
ggugaucgaguucaucuac

SEQ ID NO: 301619 - RNA, 19 nt, Homo sapiens
  misc_RNA (1)...(19): siRNA sense strand
augagcaccugcccuaugu

SEQ ID NO: 301620 - RNA, 19 nt, Homo sapiens
  misc_RNA (1)...(19): siRNA sense strand
caugagcaccugcccuaug

SEQ ID NO: 301621 - RNA, 19 nt, Homo sapiens
  misc_RNA (1)...(19): siRNA sense strand
ucagcugaguacaucaaga

SEQ ID NO: 301622 - RNA, 19 nt, Homo sapiens
  misc_RNA (1)...(19): siRNA sense strand
gaccaugacaagaagaaag

SEQ ID NO: 301623 - RNA, 19 nt, Homo sapiens
  misc_RNA (1)...(19): siRNA sense strand
ggaccaugacaagaagaaa

SEQ ID NO: 301624 - RNA, 19 nt, Homo sapiens
  misc_RNA (1)...(19): siRNA sense strand
ggguagucauccucagugu

SEQ ID NO: 301625 - RNA, 19 nt, Homo sapiens
  misc_RNA (1)...(19): siRNA sense strand
uggacgaggcaaacaauga

SEQ ID NO: 301626 - RNA, 19 nt, Homo sapiens
  misc_RNA (1)...(19): siRNA sense strand
ccaaaugcauccccaaguc

SEQ ID NO: 301627 - RNA, 19 nt, Homo sapiens
  misc_RNA (1)...(19): siRNA sense strand
ccuggcggcugacaagauc

SEQ ID NO: 301628 - RNA, 19 nt, Homo sapiens
  misc_RNA (1)...(19): siRNA sense strand
ggacagagcugcaggcuua

SEQ ID NO: 301629 - RNA, 19 nt, Homo sapiens
  misc_RNA (1)...(19): siRNA sense strand
gaagaucaguaaagagauu

SEQ ID NO: 301630 - RNA, 19 nt, Homo sapiens
  misc_RNA (1)...(19): siRNA sense strand
ugacagaaauugcuggaua

SEQ ID NO: 301631 - RNA, 19 nt, Homo sapiens
  misc_RNA (1)...(19): siRNA sense strand
acaaagauguggauaagaa

SEQ ID NO: 301632 - RNA, 19 nt, Homo sapiens
  misc_RNA (1)...(19): siRNA sense strand
gcagcaaguuguuuaauca

SEQ ID NO: 301633 - RNA, 19 nt, Homo sapiens
  misc_RNA (1)...(19): siRNA sense strand
guagauaacuguaagaaac

SEQ ID NO: 301634 - RNA, 19 nt, Homo sapiens
  misc_RNA (1)...(19): siRNA sense strand
gcagaguacuugaagauca

SEQ ID NO: 301635 - RNA, 19 nt, Homo sapiens
  misc_RNA (1)...(19): siRNA sense strand
gacagaaauugcuggauaa

SEQ ID NO: 301636 - RNA, 19 nt, Homo sapiens
  misc_RNA (1)...(19): siRNA sense strand
uaagaaacuuggccuggua

SEQ ID NO: 301637 - RNA, 19 nt, Homo sapiens
  misc_RNA (1)...(19): siRNA sense strand
ggagccagcuguacuugaa

SEQ ID NO: 301638 - RNA, 19 nt, Homo sapiens
  misc_RNA (1)...(19): siRNA sense strand
ucaaagaagugauaaccuu

SEQ ID NO: 301639 - RNA, 19 nt, Homo sapiens
  misc_RNA (1)...(19): siRNA sense strand
guacaaagauguggauaag

SEQ ID NO: 301640 - RNA, 19 nt, Homo sapiens
  misc_RNA (1)...(19): siRNA sense strand
guaaggaugucaaaguuca

SEQ ID NO: 301641 - RNA, 19 nt, Homo sapiens
  misc_RNA (1)...(19): siRNA sense strand
ccacacagguuugaaguug

SEQ ID NO: 301642 - RNA, 19 nt, Homo sapiens
  misc_RNA (1)...(19): siRNA sense strand
agaauucccuggauuguga

SEQ ID NO: 301643 - RNA, 19 nt, Homo sapiens
  misc_RNA (1)...(19): siRNA sense strand
gcagaaacaugcggagaug

SEQ ID NO: 301644 - RNA, 19 nt, Homo sapiens
  misc_RNA (1)...(19): siRNA sense strand
ugaaacauguaucugauga

SEQ ID NO: 301645 - RNA, 19 nt, Homo sapiens
  misc_RNA (1)...(19): siRNA sense strand
gcacuguucgcgcagauua

SEQ ID NO: 301646 - RNA, 19 nt, Homo sapiens
  misc_RNA (1)...(19): siRNA sense strand
gaaugaugccgccauguuu

SEQ ID NO: 301647 - RNA, 19 nt, Homo sapiens
  misc_RNA (1)...(19): siRNA sense strand
gaaacagguggcuuacaua

SEQ ID NO: 301648 - RNA, 19 nt, Homo sapiens
  misc_RNA (1)...(19): siRNA sense strand
gguuacagcuucucagugu

SEQ ID NO: 301649 - RNA, 19 nt, Homo sapiens
  misc_RNA (1)...(19): siRNA sense strand
gcaagaauucccuggauug

SEQ ID NO: 301650 - RNA, 19 nt, Homo sapiens
  misc_RNA (1)...(19): siRNA sense strand
gaaccgaggcagcaaguug

SEQ ID NO: 301651 - RNA, 19 nt, Homo sapiens
  misc_RNA (1)...(19): siRNA sense strand
uagacugggucaaagcuua

SEQ ID NO: 301652 - RNA, 19 nt, Homo sapiens
  misc_RNA (1)...(19): siRNA sense strand
gagcaagaauucccuggau

SEQ ID NO: 301653 - RNA, 19 nt, Homo sapiens
  misc_RNA (1)...(19): siRNA sense strand
caagaacccugcccugaag

SEQ ID NO: 301654 - RNA, 19 nt, Homo sapiens
  misc_RNA (1)...(19): siRNA sense strand
gagcugcaggcuuacauua

SEQ ID NO: 301655 - RNA, 19 nt, Homo sapiens
  misc_RNA (1)...(19): siRNA sense strand
gcggugacuuuaaugaauu

SEQ ID NO: 301656 - RNA, 19 nt, Homo sapiens
  misc_RNA (1)...(19): siRNA sense strand
ugaaacagguggcuuacau

SEQ ID NO: 301657 - RNA, 19 nt, Homo sapiens
  misc_RNA (1)...(19): siRNA sense strand
caguaaggaugucaaaguu

SEQ ID NO: 301658 - RNA, 19 nt, Homo sapiens
  misc_RNA (1)...(19): siRNA sense strand
gcccuuaugugaaagaaau

SEQ ID NO: 301659 - RNA, 19 nt, Homo sapiens
  misc_RNA (1)...(19): siRNA sense strand
acagguggcuuacauauac

SEQ ID NO: 301660 - RNA, 19 nt, Homo sapiens
  misc_RNA (1)...(19): siRNA sense strand
ggacuggccuggagcaaaa

SEQ ID NO: 301661 - RNA, 19 nt, Homo sapiens
  misc_RNA (1)...(19): siRNA sense strand
ucucagagcagaucaaaga

SEQ ID NO: 301662 - RNA, 19 nt, Homo sapiens
  misc_RNA (1)...(19): siRNA sense strand
caaaccgaguccucaaaga

SEQ ID NO: 301663 - RNA, 19 nt, Homo sapiens
  misc_RNA (1)...(19): siRNA sense strand
gaaggagccagcuguacuu

SEQ ID NO: 301664 - RNA, 19 nt, Homo sapiens
  misc_RNA (1)...(19): siRNA sense strand
agaaggcggugacuuuaau

SEQ ID NO: 301665 - RNA, 19 nt, Homo sapiens
  misc_RNA (1)...(19): siRNA sense strand
gaaauagucagugccaaau

SEQ ID NO: 301666 - RNA, 19 nt, Homo sapiens
  misc_RNA (1)...(19): siRNA sense strand
gagcagaucaaagaaguga

SEQ ID NO: 301667 - RNA, 19 nt, Homo sapiens
  misc_RNA (1)...(19): siRNA sense strand
cagagcagaucaaagaagu

SEQ ID NO: 301668 - RNA, 19 nt, Homo sapiens
  misc_RNA (1)...(19): siRNA sense strand
gguaaagugccaaccauau

SEQ ID NO: 301669 - RNA, 19 nt, Homo sapiens
  misc_RNA (1)...(19): siRNA sense strand
cgaggcagcaaguuguuua

SEQ ID NO: 301670 - RNA, 19 nt, Homo sapiens
  misc_RNA (1)...(19): siRNA sense strand
ugucaaaguucagguaaug

SEQ ID NO: 301671 - RNA, 19 nt, Homo sapiens
  misc_RNA (1)...(19): siRNA sense strand
gcauguagacugggucaaa

SEQ ID NO: 301672 - RNA, 19 nt, Homo sapiens
  misc_RNA (1)...(19): siRNA sense strand
caacaguaaggaugucaaa

SEQ ID NO: 301673 - RNA, 19 nt, Homo sapiens
  misc_RNA (1)...(19): siRNA sense strand
caaaucaagggcaaaauua

SEQ ID NO: 301674 - RNA, 19 nt, Homo sapiens
  misc_RNA (1)...(19): siRNA sense strand
aaacauguaucugaugaca

SEQ ID NO: 301675 - RNA, 19 nt, Homo sapiens
  misc_RNA (1)...(19): siRNA sense strand
cauuacacaugcccugaaa

SEQ ID NO: 301676 - RNA, 19 nt, Homo sapiens
  misc_RNA (1)...(19): siRNA sense strand
ggcagcaaguuguuuaauc

SEQ ID NO: 301677 - RNA, 19 nt, Homo sapiens
  misc_RNA (1)...(19): siRNA sense strand
ggcggugacuuuaaugaau

SEQ ID NO: 301678 - RNA, 19 nt, Homo sapiens
  misc_RNA (1)...(19): siRNA sense strand
ugaaauagucagugccaaa

SEQ ID NO: 301679 - RNA, 19 nt, Homo sapiens
  misc_RNA (1)...(19): siRNA sense strand
caaacgagccacaaagaag

SEQ ID NO: 301680 - RNA, 19 nt, Homo sapiens
  misc_RNA (1)...(19): siRNA sense strand
ucaaagaguacaaagaugu

SEQ ID NO: 301681 - RNA, 19 nt, Homo sapiens
  misc_RNA (1)...(19): siRNA sense strand
caugaagacucacaagaac

SEQ ID NO: 301682 - RNA, 19 nt, Homo sapiens
  misc_RNA (1)...(19): siRNA sense strand
ccaaacgagccacaaagaa

SEQ ID NO: 301683 - RNA, 19 nt, Homo sapiens
  misc_RNA (1)...(19): siRNA sense strand
uacagaaggcggugacuuu

SEQ ID NO: 301684 - RNA, 19 nt, Homo sapiens
  misc_RNA (1)...(19): siRNA sense strand
guaaagugccaaccauauc

SEQ ID NO: 301685 - RNA, 19 nt, Homo sapiens
  misc_RNA (1)...(19): siRNA sense strand
uggagauaaucaacaguaa

SEQ ID NO: 301686 - RNA, 19 nt, Homo sapiens
  misc_RNA (1)...(19): siRNA sense strand
uuuccaaccuggugauuga

SEQ ID NO: 301687 - RNA, 19 nt, Homo sapiens
  misc_RNA (1)...(19): siRNA sense strand
ccaaccauauccaucaaca

SEQ ID NO: 301688 - RNA, 19 nt, Homo sapiens
  misc_RNA (1)...(19): siRNA sense strand
guggagauaaucaacagua

SEQ ID NO: 301689 - RNA, 19 nt, Homo sapiens
  misc_RNA (1)...(19): siRNA sense strand
aaacagguggcuuacauau

SEQ ID NO: 301690 - RNA, 19 nt, Homo sapiens
  misc_RNA (1)...(19): siRNA sense strand
gccuggcccuuaugugaaa

SEQ ID NO: 301691 - RNA, 19 nt, Homo sapiens
  misc_RNA (1)...(19): siRNA sense strand
cagaaggcggugacuuuaa

SEQ ID NO: 301692 - RNA, 19 nt, Homo sapiens
  misc_RNA (1)...(19): siRNA sense strand
gaugucaaaguucagguaa

SEQ ID NO: 301693 - RNA, 19 nt, Homo sapiens
  misc_RNA (1)...(19): siRNA sense strand
gagauaaucaacaguaagg

SEQ ID NO: 301694 - RNA, 19 nt, Homo sapiens
  misc_RNA (1)...(19): siRNA sense strand
gagaugguccacacagguu

SEQ ID NO: 301695 - RNA, 19 nt, Homo sapiens
  misc_RNA (1)...(19): siRNA sense strand
gcaaaucaagggcaaaauu

SEQ ID NO: 301696 - RNA, 19 nt, Homo sapiens
  misc_RNA (1)...(19): siRNA sense strand
ccucaaagaguacaaagau

SEQ ID NO: 301697 - RNA, 19 nt, Homo sapiens
  misc_RNA (1)...(19): siRNA sense strand
ugaaugaugccgccauguu

SEQ ID NO: 301698 - RNA, 19 nt, Homo sapiens
  misc_RNA (1)...(19): siRNA sense strand
acagaaggcggugacuuua

SEQ ID NO: 301699 - RNA, 19 nt, Homo sapiens
  misc_RNA (1)...(19): siRNA sense strand
aaccauauccaucaacaaa

SEQ ID NO: 301700 - RNA, 19 nt, Homo sapiens
  misc_RNA (1)...(19): siRNA sense strand
ggaugucaaaguucaggua

SEQ ID NO: 301701 - RNA, 19 nt, Homo sapiens
  misc_RNA (1)...(19): siRNA sense strand
gauaaucaacaguaaggau

SEQ ID NO: 301702 - RNA, 19 nt, Homo sapiens
  misc_RNA (1)...(19): siRNA sense strand
acacagguuugaaguugga

SEQ ID NO: 301703 - RNA, 19 nt, Homo sapiens
  misc_RNA (1)...(19): siRNA sense strand
gaaacuuggccugguauuc

SEQ ID NO: 301704 - RNA, 19 nt, Homo sapiens
  misc_RNA (1)...(19): siRNA sense strand
gaacuggagggcaagaagu

SEQ ID NO: 301705 - RNA, 19 nt, Homo sapiens
  misc_RNA (1)...(19): siRNA sense strand
cugaugacaugaagacuca

SEQ ID NO: 301706 - RNA, 19 nt, Homo sapiens
  misc_RNA (1)...(19): siRNA sense strand
acaugaagacucacaagaa

SEQ ID NO: 301707 - RNA, 19 nt, Homo sapiens
  misc_RNA (1)...(19): siRNA sense strand
uucccuggauugugaaaua

SEQ ID NO: 301708 - RNA, 19 nt, Homo sapiens
  misc_RNA (1)...(19): siRNA sense strand
ccugaaacauguaucugau

SEQ ID NO: 301709 - RNA, 19 nt, Homo sapiens
  misc_RNA (1)...(19): siRNA sense strand
uuuaaugaauucccaguuc

SEQ ID NO: 301710 - RNA, 19 nt, Homo sapiens
  misc_RNA (1)...(19): siRNA sense strand
ggguaaagugccaaccaua

SEQ ID NO: 301711 - RNA, 19 nt, Homo sapiens
  misc_RNA (1)...(19): siRNA sense strand
uggcuuacauauacaagug

SEQ ID NO: 301712 - RNA, 19 nt, Homo sapiens
  misc_RNA (1)...(19): siRNA sense strand
aaagaaggagccagcugua

SEQ ID NO: 301713 - RNA, 19 nt, Homo sapiens
  misc_RNA (1)...(19): siRNA sense strand
gacaugaagacucacaaga

SEQ ID NO: 301714 - RNA, 19 nt, Homo sapiens
  misc_RNA (1)...(19): siRNA sense strand
acaagaacccugcccugaa

SEQ ID NO: 301715 - RNA, 19 nt, Homo sapiens
  misc_RNA (1)...(19): siRNA sense strand
ggugggcauuguggagaua

SEQ ID NO: 301716 - RNA, 19 nt, Homo sapiens
  misc_RNA (1)...(19): siRNA sense strand
caaagaguacaaagaugug

SEQ ID NO: 301717 - RNA, 19 nt, Homo sapiens
  misc_RNA (1)...(19): siRNA sense strand
aacacgacauugcaaauca

SEQ ID NO: 301718 - RNA, 19 nt, Homo sapiens
  misc_RNA (1)...(19): siRNA sense strand
aaaccauucucugcaccua

SEQ ID NO: 301719 - RNA, 19 nt, Homo sapiens
  misc_RNA (1)...(19): siRNA sense strand
aauagucagugccaaaucu

SEQ ID NO: 301720 - RNA, 19 nt, Homo sapiens
  misc_RNA (1)...(19): siRNA sense strand
uaacuccauuacaguagau

SEQ ID NO: 301721 - RNA, 19 nt, Homo sapiens
  misc_RNA (1)...(19): siRNA sense strand
acacgacauugcaaaucaa

SEQ ID NO: 301722 - RNA, 19 nt, Homo sapiens
  misc_RNA (1)...(19): siRNA sense strand
caacacgacauugcaaauc

SEQ ID NO: 301723 - RNA, 19 nt, Homo sapiens
  misc_RNA (1)...(19): siRNA sense strand
uaagcuuuccgauuuguug

SEQ ID NO: 301724 - RNA, 19 nt, Homo sapiens
  misc_RNA (1)...(19): siRNA sense strand
ggagauaaucaacaguaag

SEQ ID NO: 301725 - RNA, 19 nt, Homo sapiens
  misc_RNA (1)...(19): siRNA sense strand
ugacaugcaccguggguau

SEQ ID NO: 301726 - RNA, 19 nt, Homo sapiens
  misc_RNA (1)...(19): siRNA sense strand
uugaagaucaguaaagaga

SEQ ID NO: 301727 - RNA, 19 nt, Homo sapiens
  misc_RNA (1)...(19): siRNA sense strand
uuaacuccauuacaguaga

SEQ ID NO: 301728 - RNA, 19 nt, Homo sapiens
  misc_RNA (1)...(19): siRNA sense strand
ggaaugaccuugugauuuc

SEQ ID NO: 301729 - RNA, 19 nt, Homo sapiens
  misc_RNA (1)...(19): siRNA sense strand
ggaguaacauguuuaauca

SEQ ID NO: 301730 - RNA, 19 nt, Homo sapiens
  misc_RNA (1)...(19): siRNA sense strand
gacagaagguugccacaua

SEQ ID NO: 301731 - RNA, 19 nt, Homo sapiens
  misc_RNA (1)...(19): siRNA sense strand
ccacaucuccuaaaucuua

SEQ ID NO: 301732 - RNA, 19 nt, Homo sapiens
  misc_RNA (1)...(19): siRNA sense strand
gaaugacgcugccaccuuu

SEQ ID NO: 301733 - RNA, 19 nt, Homo sapiens
  misc_RNA (1)...(19): siRNA sense strand
ggacaggaaugaccuugug

SEQ ID NO: 301734 - RNA, 19 nt, Homo sapiens
  misc_RNA (1)...(19): siRNA sense strand
agacugagcugaaacaagu

SEQ ID NO: 301735 - RNA, 19 nt, Homo sapiens
  misc_RNA (1)...(19): siRNA sense strand
gauccaaguuaaucacuga

SEQ ID NO: 301736 - RNA, 19 nt, Homo sapiens
  misc_RNA (1)...(19): siRNA sense strand
ggagacccaugcagaaaug

SEQ ID NO: 301737 - RNA, 19 nt, Homo sapiens
  misc_RNA (1)...(19): siRNA sense strand
gaaacaaguggcuuacauu

SEQ ID NO: 301738 - RNA, 19 nt, Homo sapiens
  misc_RNA (1)...(19): siRNA sense strand
gaaaugaacauacuuaucc

SEQ ID NO: 301739 - RNA, 19 nt, Homo sapiens
  misc_RNA (1)...(19): siRNA sense strand
uggauugggugaagucaua

SEQ ID NO: 301740 - RNA, 19 nt, Homo sapiens
  misc_RNA (1)...(19): siRNA sense strand
cagaugaccagaagacaua

SEQ ID NO: 301741 - RNA, 19 nt, Homo sapiens
  misc_RNA (1)...(19): siRNA sense strand
gaacuucaagcauacauca

SEQ ID NO: 301742 - RNA, 19 nt, Homo sapiens
  misc_RNA (1)...(19): siRNA sense strand
ggauggugauuauagagaa

SEQ ID NO: 301743 - RNA, 19 nt, Homo sapiens
  misc_RNA (1)...(19): siRNA sense strand
ggaguuggaaggaaagaaa

SEQ ID NO: 301744 - RNA, 19 nt, Homo sapiens
  misc_RNA (1)...(19): siRNA sense strand
cacugaaccugcagaaauu

SEQ ID NO: 301745 - RNA, 19 nt, Homo sapiens
  misc_RNA (1)...(19): siRNA sense strand
aaacaaguggcuuacauuu

SEQ ID NO: 301746 - RNA, 19 nt, Homo sapiens
  misc_RNA (1)...(19): siRNA sense strand
gggaaaguaaacuccauua

SEQ ID NO: 301747 - RNA, 19 nt, Homo sapiens
  misc_RNA (1)...(19): siRNA sense strand
gggagagugccaacaauuu

SEQ ID NO: 301748 - RNA, 19 nt, Homo sapiens
  misc_RNA (1)...(19): siRNA sense strand
gaucaacucccaggacauu

SEQ ID NO: 301749 - RNA, 19 nt, Homo sapiens
  misc_RNA (1)...(19): siRNA sense strand
ugaaacaaguggcuuacau

SEQ ID NO: 301750 - RNA, 19 nt, Homo sapiens
  misc_RNA (1)...(19): siRNA sense strand
ccacauauaccucagugaa

SEQ ID NO: 301751 - RNA, 19 nt, Homo sapiens
  misc_RNA (1)...(19): siRNA sense strand
gggaguaacauguuuaauc

SEQ ID NO: 301752 - RNA, 19 nt, Homo sapiens
  misc_RNA (1)...(19): siRNA sense strand
ugccaacaauuuccauuaa

SEQ ID NO: 301753 - RNA, 19 nt, Homo sapiens
  misc_RNA (1)...(19): siRNA sense strand
ggaaaguaaacuccauuau

SEQ ID NO: 301754 - RNA, 19 nt, Homo sapiens
  misc_RNA (1)...(19): siRNA sense strand
ucacugaaccugcagaaau

SEQ ID NO: 301755 - RNA, 19 nt, Homo sapiens
  misc_RNA (1)...(19): siRNA sense strand
ggucuuaaaggacuacaaa

SEQ ID NO: 301756 - RNA, 19 nt, Homo sapiens
  misc_RNA (1)...(19): siRNA sense strand
acagaagguugccacauau

SEQ ID NO: 301757 - RNA, 19 nt, Homo sapiens
  misc_RNA (1)...(19): siRNA sense strand
ggagagugccaacaauuuc

SEQ ID NO: 301758 - RNA, 19 nt, Homo sapiens
  misc_RNA (1)...(19): siRNA sense strand
aagcauacaucaaggaaca

SEQ ID NO: 301759 - RNA, 19 nt, Homo sapiens
  misc_RNA (1)...(19): siRNA sense strand
cuaacagggucuuaaagga

SEQ ID NO: 301760 - RNA, 19 nt, Homo sapiens
  misc_RNA (1)...(19): siRNA sense strand
uuaaaggacuacaaacaca

SEQ ID NO: 301761 - RNA, 19 nt, Homo sapiens
  misc_RNA (1)...(19): siRNA sense strand
acauauaccucagugaaga

SEQ ID NO: 301762 - RNA, 19 nt, Homo sapiens
  misc_RNA (1)...(19): siRNA sense strand
ucccaaaccugguccuuau

SEQ ID NO: 301763 - RNA, 19 nt, Homo sapiens
  misc_RNA (1)...(19): siRNA sense strand
gccaacaauuuccauuaau

SEQ ID NO: 301764 - RNA, 19 nt, Homo sapiens
  misc_RNA (1)...(19): siRNA sense strand
ugggugaagucauauuuga

SEQ ID NO: 301765 - RNA, 19 nt, Homo sapiens
  misc_RNA (1)...(19): siRNA sense strand
caucugaaaugaacauacu

SEQ ID NO: 301766 - RNA, 19 nt, Homo sapiens
  misc_RNA (1)...(19): siRNA sense strand
gugccaacaauuuccauua

SEQ ID NO: 301767 - RNA, 19 nt, Homo sapiens
  misc_RNA (1)...(19): siRNA sense strand
ucaggauggugauuauaga

SEQ ID NO: 301768 - RNA, 19 nt, Homo sapiens
  misc_RNA (1)...(19): siRNA sense strand
gaacauuuggagugaacuu

SEQ ID NO: 301769 - RNA, 19 nt, Homo sapiens
  misc_RNA (1)...(19): siRNA sense strand
ggacauucaaauccaggua

SEQ ID NO: 301770 - RNA, 19 nt, Homo sapiens
  misc_RNA (1)...(19): siRNA sense strand
uucaggaaauccaaacuuu

SEQ ID NO: 301771 - RNA, 19 nt, Homo sapiens
  misc_RNA (1)...(19): siRNA sense strand
ccucagugaagaugcauua

SEQ ID NO: 301772 - RNA, 19 nt, Homo sapiens
  misc_RNA (1)...(19): siRNA sense strand
gaaugaccuugugauuuca

SEQ ID NO: 301773 - RNA, 19 nt, Homo sapiens
  misc_RNA (1)...(19): siRNA sense strand
aagcaucccugcccuugga

SEQ ID NO: 301774 - RNA, 19 nt, Homo sapiens
  misc_RNA (1)...(19): siRNA sense strand
ccaagucccacaucuccua

SEQ ID NO: 301775 - RNA, 19 nt, Homo sapiens
  misc_RNA (1)...(19): siRNA sense strand
cagcgggcuuuccuucuga

SEQ ID NO: 301776 - RNA, 19 nt, Homo sapiens
  misc_RNA (1)...(19): siRNA sense strand
gauggugauuauagagaau

SEQ ID NO: 301777 - RNA, 19 nt, Homo sapiens
  misc_RNA (1)...(19): siRNA sense strand
caaaagggcuccgccaugu

SEQ ID NO: 301778 - RNA, 19 nt, Homo sapiens
  misc_RNA (1)...(19): siRNA sense strand
gcacuucugaaacccauau

SEQ ID NO: 301779 - RNA, 19 nt, Homo sapiens
  misc_RNA (1)...(19): siRNA sense strand
acacuaacagggucuuaaa

SEQ ID NO: 301780 - RNA, 19 nt, Homo sapiens
  misc_RNA (1)...(19): siRNA sense strand
acaaguggcuuacauuuuc

SEQ ID NO: 301781 - RNA, 19 nt, Homo sapiens
  misc_RNA (1)...(19): siRNA sense strand
ggagaguggaguaccaaga

SEQ ID NO: 301782 - RNA, 19 nt, Homo sapiens
  misc_RNA (1)...(19): siRNA sense strand
cggaaaagauucaggaaau

SEQ ID NO: 301783 - RNA, 19 nt, Homo sapiens
  misc_RNA (1)...(19): siRNA sense strand
cagaagguugccacauaua

SEQ ID NO: 301784 - RNA, 19 nt, Homo sapiens
  misc_RNA (1)...(19): siRNA sense strand
gacauucaaauccagguaa

SEQ ID NO: 301785 - RNA, 19 nt, Homo sapiens
  misc_RNA (1)...(19): siRNA sense strand
agaaauggagaguggagua

SEQ ID NO: 301786 - RNA, 19 nt, Homo sapiens
  misc_RNA (1)...(19): siRNA sense strand
ucccacaucuccuaaaucu

SEQ ID NO: 301787 - RNA, 19 nt, Homo sapiens
  misc_RNA (1)...(19): siRNA sense strand
uaaccagggagaagcaauu

SEQ ID NO: 301788 - RNA, 19 nt, Homo sapiens
  misc_RNA (1)...(19): siRNA sense strand
acaagcugauggacaguau

SEQ ID NO: 301789 - RNA, 19 nt, Homo sapiens
  misc_RNA (1)...(19): siRNA sense strand
gagaagcaauuacaaaagg

SEQ ID NO: 301790 - RNA, 19 nt, Homo sapiens
  misc_RNA (1)...(19): siRNA sense strand
ccagcgggcuuuccuucug

SEQ ID NO: 301791 - RNA, 19 nt, Homo sapiens
  misc_RNA (1)...(19): siRNA sense strand
ccagggccaccuccacuuu

SEQ ID NO: 301792 - RNA, 19 nt, Homo sapiens
  misc_RNA (1)...(19): siRNA sense strand
caagacagcaugggaugga

SEQ ID NO: 301793 - RNA, 19 nt, Homo sapiens
  misc_RNA (1)...(19): siRNA sense strand
cagugaagaugcauuagac

SEQ ID NO: 301794 - RNA, 19 nt, Homo sapiens
  misc_RNA (1)...(19): siRNA sense strand
caggaaugaccuugugauu

SEQ ID NO: 301795 - RNA, 19 nt, Homo sapiens
  misc_RNA (1)...(19): siRNA sense strand
ucuccuaaaucuuauccuu

SEQ ID NO: 301796 - RNA, 19 nt, Homo sapiens
  misc_RNA (1)...(19): siRNA sense strand
caacuuaaccagggagaag

SEQ ID NO: 301797 - RNA, 19 nt, Homo sapiens
  misc_RNA (1)...(19): siRNA sense strand
gaaccugcagaaauuaugg

SEQ ID NO: 301798 - RNA, 19 nt, Homo sapiens
  misc_RNA (1)...(19): siRNA sense strand
ugaagaugcauuagacugu

SEQ ID NO: 301799 - RNA, 19 nt, Homo sapiens
  misc_RNA (1)...(19): siRNA sense strand
guaccaagaggacaggaau

SEQ ID NO: 301800 - RNA, 19 nt, Homo sapiens
  misc_RNA (1)...(19): siRNA sense strand
caaggagggcaaacucaau

SEQ ID NO: 301801 - RNA, 19 nt, Homo sapiens
  misc_RNA (1)...(19): siRNA sense strand
gauggccucucaguaccaa

SEQ ID NO: 301802 - RNA, 19 nt, Homo sapiens
  misc_RNA (1)...(19): siRNA sense strand
ccaaaccugguccuuaugu

SEQ ID NO: 301803 - RNA, 19 nt, Homo sapiens
  misc_RNA (1)...(19): siRNA sense strand
aggaaugaccuugugauuu

SEQ ID NO: 301804 - RNA, 19 nt, Homo sapiens
  misc_RNA (1)...(19): siRNA sense strand
gagaguggaguaccaagag

SEQ ID NO: 301805 - RNA, 19 nt, Homo sapiens
  misc_RNA (1)...(19): siRNA sense strand
ccagggagaagcaauuaca

SEQ ID NO: 301806 - RNA, 19 nt, Homo sapiens
  misc_RNA (1)...(19): siRNA sense strand
ugaaugacgcugccaccuu

SEQ ID NO: 301807 - RNA, 19 nt, Homo sapiens
  misc_RNA (1)...(19): siRNA sense strand
ggacuacaaacacagugau

SEQ ID NO: 301808 - RNA, 19 nt, Homo sapiens
  misc_RNA (1)...(19): siRNA sense strand
acaguaugguggccgaguu

SEQ ID NO: 301809 - RNA, 19 nt, Homo sapiens
  misc_RNA (1)...(19): siRNA sense strand
ucagugaagaugcauuaga

SEQ ID NO: 301810 - RNA, 19 nt, Homo sapiens
  misc_RNA (1)...(19): siRNA sense strand
gugaagucauauuugaaca

SEQ ID NO: 301811 - RNA, 19 nt, Homo sapiens
  misc_RNA (1)...(19): siRNA sense strand
gggagaagcaauuacaaaa

SEQ ID NO: 301812 - RNA, 19 nt, Homo sapiens
  misc_RNA (1)...(19): siRNA sense strand
aagaugcauuagacuguga

SEQ ID NO: 301813 - RNA, 19 nt, Homo sapiens
  misc_RNA (1)...(19): siRNA sense strand
gacaagcugauggacagua

SEQ ID NO: 301814 - RNA, 19 nt, Homo sapiens
  misc_RNA (1)...(19): siRNA sense strand
cguggaagccuuugacaag

SEQ ID NO: 301815 - RNA, 19 nt, Homo sapiens
  misc_RNA (1)...(19): siRNA sense strand
ccauuauaauugacaacug

SEQ ID NO: 301816 - RNA, 19 nt, Homo sapiens
  misc_RNA (1)...(19): siRNA sense strand
ucaaggagggcaaacucaa

SEQ ID NO: 301817 - RNA, 19 nt, Homo sapiens
  misc_RNA (1)...(19): siRNA sense strand
aaagggcuccgccauguca

SEQ ID NO: 301818 - RNA, 19 nt, Homo sapiens
  misc_RNA (1)...(19): siRNA sense strand
caaaccugguccuuauguc

SEQ ID NO: 301819 - RNA, 19 nt, Homo sapiens
  misc_RNA (1)...(19): siRNA sense strand
ugacguggccgcacuucug

SEQ ID NO: 301820 - RNA, 19 nt, Homo sapiens
  misc_RNA (1)...(19): siRNA sense strand
gaccuugugauuucagaga

SEQ ID NO: 301821 - RNA, 19 nt, Homo sapiens
  misc_RNA (1)...(19): siRNA sense strand
gaaauggagaguggaguac

SEQ ID NO: 301822 - RNA, 19 nt, Homo sapiens
  misc_RNA (1)...(19): siRNA sense strand
uguuggaguuggaaggaaa

SEQ ID NO: 301823 - RNA, 19 nt, Homo sapiens
  misc_RNA (1)...(19): siRNA sense strand
gcuccgccaugucacagau

SEQ ID NO: 301824 - RNA, 19 nt, Homo sapiens
  misc_RNA (1)...(19): siRNA sense strand
uuucgagaaugaaggcaaa

SEQ ID NO: 301825 - RNA, 19 nt, Homo sapiens
  misc_RNA (1)...(19): siRNA sense strand
ucaagcauacaucaaggaa

SEQ ID NO: 301826 - RNA, 19 nt, Homo sapiens
  misc_RNA (1)...(19): siRNA sense strand
cacagugauuugcgucaug

SEQ ID NO: 301827 - RNA, 19 nt, Homo sapiens
  misc_RNA (1)...(19): siRNA sense strand
gacguggccgcacuucuga

SEQ ID NO: 301828 - RNA, 19 nt, Homo sapiens
  misc_RNA (1)...(19): siRNA sense strand
gcaaagaaaugcagaaugc

SEQ ID NO: 301829 - RNA, 19 nt, Homo sapiens
  misc_RNA (1)...(19): siRNA sense strand
gaagauagaaggauaugaa

SEQ ID NO: 301830 - RNA, 19 nt, Homo sapiens
  misc_RNA (1)...(19): siRNA sense strand
ggaacaagauacucagcua

SEQ ID NO: 301831 - RNA, 19 nt, Homo sapiens
  misc_RNA (1)...(19): siRNA sense strand
agauucagguucacuauua

SEQ ID NO: 301832 - RNA, 19 nt, Homo sapiens
  misc_RNA (1)...(19): siRNA sense strand
gaucaggucuuaauuacag

SEQ ID NO: 301833 - RNA, 19 nt, Homo sapiens
  misc_RNA (1)...(19): siRNA sense strand
gcuacaagauuggcaaaga

SEQ ID NO: 301834 - RNA, 19 nt, Homo sapiens
  misc_RNA (1)...(19): siRNA sense strand
gacguucggcuacuacuua

SEQ ID NO: 301835 - RNA, 19 nt, Homo sapiens
  misc_RNA (1)...(19): siRNA sense strand
cuacaagauuggcaaagaa

SEQ ID NO: 301836 - RNA, 19 nt, Homo sapiens
  misc_RNA (1)...(19): siRNA sense strand
ucauaaagauguacaggau

SEQ ID NO: 301837 - RNA, 19 nt, Homo sapiens
  misc_RNA (1)...(19): siRNA sense strand
gaugggcaacagacuauua

SEQ ID NO: 301838 - RNA, 19 nt, Homo sapiens
  misc_RNA (1)...(19): siRNA sense strand
gauagaaggauaugaagau

SEQ ID NO: 301839 - RNA, 19 nt, Homo sapiens
  misc_RNA (1)...(19): siRNA sense strand
uuuaagagccuaugugaaa

SEQ ID NO: 301840 - RNA, 19 nt, Homo sapiens
  misc_RNA (1)...(19): siRNA sense strand
auacucagcuacaagauug

SEQ ID NO: 301841 - RNA, 19 nt, Homo sapiens
  misc_RNA (1)...(19): siRNA sense strand
guacaggauucacuaacug

SEQ ID NO: 301842 - RNA, 19 nt, Homo sapiens
  misc_RNA (1)...(19): siRNA sense strand
ugaaagaccauuauuccaa

SEQ ID NO: 301843 - RNA, 19 nt, Homo sapiens
  misc_RNA (1)...(19): siRNA sense strand
guucggcuacuacuuaaua

SEQ ID NO: 301844 - RNA, 19 nt, Homo sapiens
  misc_RNA (1)...(19): siRNA sense strand
gaguggaaguucaccauca

SEQ ID NO: 301845 - RNA, 19 nt, Homo sapiens
  misc_RNA (1)...(19): siRNA sense strand
gggcaacagacuauuauug

SEQ ID NO: 301846 - RNA, 19 nt, Homo sapiens
  misc_RNA (1)...(19): siRNA sense strand
auaaagauguacaggauuc

SEQ ID NO: 301847 - RNA, 19 nt, Homo sapiens
  misc_RNA (1)...(19): siRNA sense strand
aagaaaugcagaaugcuua

SEQ ID NO: 301848 - RNA, 19 nt, Homo sapiens
  misc_RNA (1)...(19): siRNA sense strand
uuaugaagauggcaauguu

SEQ ID NO: 301849 - RNA, 19 nt, Homo sapiens
  misc_RNA (1)...(19): siRNA sense strand
ucaguugguuagucauaaa

SEQ ID NO: 301850 - RNA, 19 nt, Homo sapiens
  misc_RNA (1)...(19): siRNA sense strand
cacuaacuguuucgaauga

SEQ ID NO: 301851 - RNA, 19 nt, Homo sapiens
  misc_RNA (1)...(19): siRNA sense strand
ggcuacuacuuaauaauga

SEQ ID NO: 301852 - RNA, 19 nt, Homo sapiens
  misc_RNA (1)...(19): siRNA sense strand
gaguaucagacagcaauua

SEQ ID NO: 301853 - RNA, 19 nt, Homo sapiens
  misc_RNA (1)...(19): siRNA sense strand
aguauaacauggaucaguu

SEQ ID NO: 301854 - RNA, 19 nt, Homo sapiens
  misc_RNA (1)...(19): siRNA sense strand
caagauuggcaaagaaaug

SEQ ID NO: 301855 - RNA, 19 nt, Homo sapiens
  misc_RNA (1)...(19): siRNA sense strand
gauacucagcuacaagauu

SEQ ID NO: 301856 - RNA, 19 nt, Homo sapiens
  misc_RNA (1)...(19): siRNA sense strand
gauucagguucacuauuau

SEQ ID NO: 301857 - RNA, 19 nt, Homo sapiens
  misc_RNA (1)...(19): siRNA sense strand
caaugacguucggcuacua

SEQ ID NO: 301858 - RNA, 19 nt, Homo sapiens
  misc_RNA (1)...(19): siRNA sense strand
gcaccaaaaucgacuggaa

SEQ ID NO: 301859 - RNA, 19 nt, Homo sapiens
  misc_RNA (1)...(19): siRNA sense strand
caaacaaugucagauacca

SEQ ID NO: 301860 - RNA, 19 nt, Homo sapiens
  misc_RNA (1)...(19): siRNA sense strand
ucuguacuguuuaugcuaa

SEQ ID NO: 301861 - RNA, 19 nt, Homo sapiens
  misc_RNA (1)...(19): siRNA sense strand
gguuagucauaaagaugua

SEQ ID NO: 301862 - RNA, 19 nt, Homo sapiens
  misc_RNA (1)...(19): siRNA sense strand
gaagauggcaauguucagu

SEQ ID NO: 301863 - RNA, 19 nt, Homo sapiens
  misc_RNA (1)...(19): siRNA sense strand
cacaugcauuugcccagua

SEQ ID NO: 301864 - RNA, 19 nt, Homo sapiens
  misc_RNA (1)...(19): siRNA sense strand
gaggagaagguacgcauag

SEQ ID NO: 301865 - RNA, 19 nt, Homo sapiens
  misc_RNA (1)...(19): siRNA sense strand
gccaccaguuucagccuaa

SEQ ID NO: 301866 - RNA, 19 nt, Homo sapiens
  misc_RNA (1)...(19): siRNA sense strand
gcuaaauucaucacucaug

SEQ ID NO: 301867 - RNA, 19 nt, Homo sapiens
  misc_RNA (1)...(19): siRNA sense strand
gcuuuaagagccuauguga

SEQ ID NO: 301868 - RNA, 19 nt, Homo sapiens
  misc_RNA (1)...(19): siRNA sense strand
caacagacuauuauugcau

SEQ ID NO: 301869 - RNA, 19 nt, Homo sapiens
  misc_RNA (1)...(19): siRNA sense strand
gcauuugcccaguauaaca

SEQ ID NO: 301870 - RNA, 19 nt, Homo sapiens
  misc_RNA (1)...(19): siRNA sense strand
uaucagacagcaauuagug

SEQ ID NO: 301871 - RNA, 19 nt, Homo sapiens
  misc_RNA (1)...(19): siRNA sense strand
gauguacaggauucacuaa

SEQ ID NO: 301872 - RNA, 19 nt, Homo sapiens
  misc_RNA (1)...(19): siRNA sense strand
cugugaagauagaaggaua

SEQ ID NO: 301873 - RNA, 19 nt, Homo sapiens
  misc_RNA (1)...(19): siRNA sense strand
gcaauguucaguugguuag

SEQ ID NO: 301874 - RNA, 19 nt, Homo sapiens
  misc_RNA (1)...(19): siRNA sense strand
agauggcaauguucaguug

SEQ ID NO: 301875 - RNA, 19 nt, Homo sapiens
  misc_RNA (1)...(19): siRNA sense strand
ggagaucagaguggaaguu

SEQ ID NO: 301876 - RNA, 19 nt, Homo sapiens
  misc_RNA (1)...(19): siRNA sense strand
agaaggauaugaagaucag

SEQ ID NO: 301877 - RNA, 19 nt, Homo sapiens
  misc_RNA (1)...(19): siRNA sense strand
gaauggucguuggagauca

SEQ ID NO: 301878 - RNA, 19 nt, Homo sapiens
  misc_RNA (1)...(19): siRNA sense strand
aaagaaaugcagaaugcuu

SEQ ID NO: 301879 - RNA, 19 nt, Homo sapiens
  misc_RNA (1)...(19): siRNA sense strand
acaagauacucagcuacaa

SEQ ID NO: 301880 - RNA, 19 nt, Homo sapiens
  misc_RNA (1)...(19): siRNA sense strand
caggauucacuaacuguuu

SEQ ID NO: 301881 - RNA, 19 nt, Homo sapiens
  misc_RNA (1)...(19): siRNA sense strand
guucaguugguuagucaua

SEQ ID NO: 301882 - RNA, 19 nt, Homo sapiens
  misc_RNA (1)...(19): siRNA sense strand
ggcaauguucaguugguua

SEQ ID NO: 301883 - RNA, 19 nt, Homo sapiens
  misc_RNA (1)...(19): siRNA sense strand
uaagagccuaugugaaaga

SEQ ID NO: 301884 - RNA, 19 nt, Homo sapiens
  misc_RNA (1)...(19): siRNA sense strand
cugcuaaauucaucacuca

SEQ ID NO: 301885 - RNA, 19 nt, Homo sapiens
  misc_RNA (1)...(19): siRNA sense strand
aaucauagagaaugcagaa

SEQ ID NO: 301886 - RNA, 19 nt, Homo sapiens
  misc_RNA (1)...(19): siRNA sense strand
cggcuucuguacuguuuau

SEQ ID NO: 301887 - RNA, 19 nt, Homo sapiens
  misc_RNA (1)...(19): siRNA sense strand
auggaggucugaagucuug

SEQ ID NO: 301888 - RNA, 19 nt, Homo sapiens
  misc_RNA (1)...(19): siRNA sense strand
ccaggugguuggcgugcuu

SEQ ID NO: 301889 - RNA, 19 nt, Homo sapiens
  misc_RNA (1)...(19): siRNA sense strand
ucugaagucuuggagagaa

SEQ ID NO: 301890 - RNA, 19 nt, Homo sapiens
  misc_RNA (1)...(19): siRNA sense strand
uauugaaagccaccaguuu

SEQ ID NO: 301891 - RNA, 19 nt, Homo sapiens
  misc_RNA (1)...(19): siRNA sense strand
cggcuacuacuuaauaaug

SEQ ID NO: 301892 - RNA, 19 nt, Homo sapiens
  misc_RNA (1)...(19): siRNA sense strand
ucagacagcaauuagugaa

SEQ ID NO: 301893 - RNA, 19 nt, Homo sapiens
  misc_RNA (1)...(19): siRNA sense strand
gugguuggcgugcuuaaga

SEQ ID NO: 301894 - RNA, 19 nt, Homo sapiens
  misc_RNA (1)...(19): siRNA sense strand
ggaauggucguuggagauc

SEQ ID NO: 301895 - RNA, 19 nt, Homo sapiens
  misc_RNA (1)...(19): siRNA sense strand
uaagauucagguucacuau

SEQ ID NO: 301896 - RNA, 19 nt, Homo sapiens
  misc_RNA (1)...(19): siRNA sense strand
agaaaugcagaaugcuuaa

SEQ ID NO: 301897 - RNA, 19 nt, Homo sapiens
  misc_RNA (1)...(19): siRNA sense strand
uccaacggcuucuguacug

SEQ ID NO: 301898 - RNA, 19 nt, Homo sapiens
  misc_RNA (1)...(19): siRNA sense strand
caagauacucagcuacaag

SEQ ID NO: 301899 - RNA, 19 nt, Homo sapiens
  misc_RNA (1)...(19): siRNA sense strand
aaaaucgacuggaacaaga

SEQ ID NO: 301900 - RNA, 19 nt, Homo sapiens
  misc_RNA (1)...(19): siRNA sense strand
ugucagauaccacauucaa

SEQ ID NO: 301901 - RNA, 19 nt, Homo sapiens
  misc_RNA (1)...(19): siRNA sense strand
ucacuaacuguuucgaaug

SEQ ID NO: 301902 - RNA, 19 nt, Homo sapiens
  misc_RNA (1)...(19): siRNA sense strand
gagaucagaguggaaguuc

SEQ ID NO: 301903 - RNA, 19 nt, Homo sapiens
  misc_RNA (1)...(19): siRNA sense strand
caacggcuucuguacuguu

SEQ ID NO: 301904 - RNA, 19 nt, Homo sapiens
  misc_RNA (1)...(19): siRNA sense strand
guauugaaagccaccaguu

SEQ ID NO: 301905 - RNA, 19 nt, Homo sapiens
  misc_RNA (1)...(19): siRNA sense strand
ccuaugugaaagaccauua

SEQ ID NO: 301906 - RNA, 19 nt, Homo sapiens
  misc_RNA (1)...(19): siRNA sense strand
uacaagauuggcaaagaaa

SEQ ID NO: 301907 - RNA, 19 nt, Homo sapiens
  misc_RNA (1)...(19): siRNA sense strand
cauagagaaugcagaaaau

SEQ ID NO: 301908 - RNA, 19 nt, Homo sapiens
  misc_RNA (1)...(19): siRNA sense strand
cugccaaggaguuuauuaa

SEQ ID NO: 301909 - RNA, 19 nt, Homo sapiens
  misc_RNA (1)...(19): siRNA sense strand
cauaaagauguacaggauu

SEQ ID NO: 301910 - RNA, 19 nt, Homo sapiens
  misc_RNA (1)...(19): siRNA sense strand
guugguuagucauaaagau

SEQ ID NO: 301911 - RNA, 19 nt, Homo sapiens
  misc_RNA (1)...(19): siRNA sense strand
cacggugaccuggguaaua

SEQ ID NO: 301912 - RNA, 19 nt, Homo sapiens
  misc_RNA (1)...(19): siRNA sense strand
ggcaaagaaaugcagaaug

SEQ ID NO: 301913 - RNA, 19 nt, Homo sapiens
  misc_RNA (1)...(19): siRNA sense strand
aggauucacuaacuguuuc

SEQ ID NO: 301914 - RNA, 19 nt, Homo sapiens
  misc_RNA (1)...(19): siRNA sense strand
ugaggagaagguacgcaua

SEQ ID NO: 301915 - RNA, 19 nt, Homo sapiens
  misc_RNA (1)...(19): siRNA sense strand
acggugaccuggguaauag

SEQ ID NO: 301916 - RNA, 19 nt, Homo sapiens
  misc_RNA (1)...(19): siRNA sense strand
ccuggguaauagcagauuu

SEQ ID NO: 301917 - RNA, 19 nt, Homo sapiens
  misc_RNA (1)...(19): siRNA sense strand
ccaguuacccgcaccaaaa

SEQ ID NO: 301918 - RNA, 19 nt, Homo sapiens
  misc_RNA (1)...(19): siRNA sense strand
uggagagaauccugugaca

SEQ ID NO: 301919 - RNA, 19 nt, Homo sapiens
  misc_RNA (1)...(19): siRNA sense strand
ccuuuaaauuugaccacuu

SEQ ID NO: 301920 - RNA, 19 nt, Homo sapiens
  misc_RNA (1)...(19): siRNA sense strand
aagauacucagcuacaaga

SEQ ID NO: 301921 - RNA, 19 nt, Homo sapiens
  misc_RNA (1)...(19): siRNA sense strand
agacagcaauuagugaaaa

SEQ ID NO: 301922 - RNA, 19 nt, Homo sapiens
  misc_RNA (1)...(19): siRNA sense strand
uguacaggauucacuaacu

SEQ ID NO: 301923 - RNA, 19 nt, Homo sapiens
  misc_RNA (1)...(19): siRNA sense strand
ccaccaguuucagccuaaa

SEQ ID NO: 301924 - RNA, 19 nt, Homo sapiens
  misc_RNA (1)...(19): siRNA sense strand
acaugcauuugcccaguau

SEQ ID NO: 301925 - RNA, 19 nt, Homo sapiens
  misc_RNA (1)...(19): siRNA sense strand
cuaacuguuucgaaugaag

SEQ ID NO: 301926 - RNA, 19 nt, Homo sapiens
  misc_RNA (1)...(19): siRNA sense strand
uuaagauucagguucacua

SEQ ID NO: 301927 - RNA, 19 nt, Homo sapiens
  misc_RNA (1)...(19): siRNA sense strand
ggagaagguacgcauagcu

SEQ ID NO: 301928 - RNA, 19 nt, Homo sapiens
  misc_RNA (1)...(19): siRNA sense strand
gcacuaagauugauuggaa

SEQ ID NO: 301929 - RNA, 19 nt, Homo sapiens
  misc_RNA (1)...(19): siRNA sense strand
gcaaagagaugcagaaugc

SEQ ID NO: 301930 - RNA, 19 nt, Homo sapiens
  misc_RNA (1)...(19): siRNA sense strand
ggaacaagauccuuagcua

SEQ ID NO: 301931 - RNA, 19 nt, Homo sapiens
  misc_RNA (1)...(19): siRNA sense strand
gaauggaaguuuacaauca

SEQ ID NO: 301932 - RNA, 19 nt, Homo sapiens
  misc_RNA (1)...(19): siRNA sense strand
gauguucgguuacugcuua

SEQ ID NO: 301933 - RNA, 19 nt, Homo sapiens
  misc_RNA (1)...(19): siRNA sense strand
ggaggcaacugauccaaga

SEQ ID NO: 301934 - RNA, 19 nt, Homo sapiens
  misc_RNA (1)...(19): siRNA sense strand
gcaguugaaucauggagaa

SEQ ID NO: 301935 - RNA, 19 nt, Homo sapiens
  misc_RNA (1)...(19): siRNA sense strand
ggacagcaaaccauuauug

SEQ ID NO: 301936 - RNA, 19 nt, Homo sapiens
  misc_RNA (1)...(19): siRNA sense strand
gaagagaaggugcguauag

SEQ ID NO: 301937 - RNA, 19 nt, Homo sapiens
  misc_RNA (1)...(19): siRNA sense strand
gcaguugucugaugaagag

SEQ ID NO: 301938 - RNA, 19 nt, Homo sapiens
  misc_RNA (1)...(19): siRNA sense strand
gguuacugcuuaauaauga

SEQ ID NO: 301939 - RNA, 19 nt, Homo sapiens
  misc_RNA (1)...(19): siRNA sense strand
gcaaacagcaaaagaauuu

SEQ ID NO: 301940 - RNA, 19 nt, Homo sapiens
  misc_RNA (1)...(19): siRNA sense strand
cgucgacaguugccaguua

SEQ ID NO: 301941 - RNA, 19 nt, Homo sapiens
  misc_RNA (1)...(19): siRNA sense strand
gaggagcaguugucugaug

SEQ ID NO: 301942 - RNA, 19 nt, Homo sapiens
  misc_RNA (1)...(19): siRNA sense strand
gcuacaagauuggcaaaga

SEQ ID NO: 301943 - RNA, 19 nt, Homo sapiens
  misc_RNA (1)...(19): siRNA sense strand
gcuagugagucauaaagau

SEQ ID NO: 301944 - RNA, 19 nt, Homo sapiens
  misc_RNA (1)...(19): siRNA sense strand
uauacaagauucccuaaca

SEQ ID NO: 301945 - RNA, 19 nt, Homo sapiens
  misc_RNA (1)...(19): siRNA sense strand
aguagaaacugcucugaga

SEQ ID NO: 301946 - RNA, 19 nt, Homo sapiens
  misc_RNA (1)...(19): siRNA sense strand
gauuggaacaagauccuua

SEQ ID NO: 301947 - RNA, 19 nt, Homo sapiens
  misc_RNA (1)...(19): siRNA sense strand
ucugagagcuuacguaaaa

SEQ ID NO: 301948 - RNA, 19 nt, Homo sapiens
  misc_RNA (1)...(19): siRNA sense strand
ggaaggagcagcccaugca

SEQ ID NO: 301949 - RNA, 19 nt, Homo sapiens
  misc_RNA (1)...(19): siRNA sense strand
cuugggaaauggaaaguuu

SEQ ID NO: 301950 - RNA, 19 nt, Homo sapiens
  misc_RNA (1)...(19): siRNA sense strand
auggagaacuucaguagaa

SEQ ID NO: 301951 - RNA, 19 nt, Homo sapiens
  misc_RNA (1)...(19): siRNA sense strand
uccaagacccugugaagua

SEQ ID NO: 301952 - RNA, 19 nt, Homo sapiens
  misc_RNA (1)...(19): siRNA sense strand
uaaggaaggaggcaacuga

SEQ ID NO: 301953 - RNA, 19 nt, Homo sapiens
  misc_RNA (1)...(19): siRNA sense strand
uuaugaagaucagguauug

SEQ ID NO: 301954 - RNA, 19 nt, Homo sapiens
  misc_RNA (1)...(19): siRNA sense strand
gcauagaaagccaucaguu

SEQ ID NO: 301955 - RNA, 19 nt, Homo sapiens
  misc_RNA (1)...(19): siRNA sense strand
ccaagacccugugaaguag

SEQ ID NO: 301956 - RNA, 19 nt, Homo sapiens
  misc_RNA (1)...(19): siRNA sense strand
ccaguuacacgcacuaaga

SEQ ID NO: 301957 - RNA, 19 nt, Homo sapiens
  misc_RNA (1)...(19): siRNA sense strand
gccaucaguuccaagcaaa

SEQ ID NO: 301958 - RNA, 19 nt, Homo sapiens
  misc_RNA (1)...(19): siRNA sense strand
caagauucccuaacagugu

SEQ ID NO: 301959 - RNA, 19 nt, Homo sapiens
  misc_RNA (1)...(19): siRNA sense strand
cuagugagucauaaagaua

SEQ ID NO: 301960 - RNA, 19 nt, Homo sapiens
  misc_RNA (1)...(19): siRNA sense strand
guucagcuagugagucaua

SEQ ID NO: 301961 - RNA, 19 nt, Homo sapiens
  misc_RNA (1)...(19): siRNA sense strand
gauauacaagauucccuaa

SEQ ID NO: 301962 - RNA, 19 nt, Homo sapiens
  misc_RNA (1)...(19): siRNA sense strand
guucgguuacugcuuaaua

SEQ ID NO: 301963 - RNA, 19 nt, Homo sapiens
  misc_RNA (1)...(19): siRNA sense strand
cagaauggaaguuuacaau

SEQ ID NO: 301964 - RNA, 19 nt, Homo sapiens
  misc_RNA (1)...(19): siRNA sense strand
cauagaaagccaucaguuc

SEQ ID NO: 301965 - RNA, 19 nt, Homo sapiens
  misc_RNA (1)...(19): siRNA sense strand
aacagaacauggcgacuug

SEQ ID NO: 301966 - RNA, 19 nt, Homo sapiens
  misc_RNA (1)...(19): siRNA sense strand
uaacagaacauggcgacuu

SEQ ID NO: 301967 - RNA, 19 nt, Homo sapiens
  misc_RNA (1)...(19): siRNA sense strand
gcagcaaaauucaucauuc

SEQ ID NO: 301968 - RNA, 19 nt, Homo sapiens
  misc_RNA (1)...(19): siRNA sense strand
uaagauugauuggaacaag

SEQ ID NO: 301969 - RNA, 19 nt, Homo sapiens
  misc_RNA (1)...(19): siRNA sense strand
uguagaagcugcagaaaau

SEQ ID NO: 301970 - RNA, 19 nt, Homo sapiens
  misc_RNA (1)...(19): siRNA sense strand
uggaggagcaguugucuga

SEQ ID NO: 301971 - RNA, 19 nt, Homo sapiens
  misc_RNA (1)...(19): siRNA sense strand
caagauccuuagcuacaag

SEQ ID NO: 301972 - RNA, 19 nt, Homo sapiens
  misc_RNA (1)...(19): siRNA sense strand
gauuguagaagcugcagaa

SEQ ID NO: 301973 - RNA, 19 nt, Homo sapiens
  misc_RNA (1)...(19): siRNA sense strand
gauccaagacccugugaag

SEQ ID NO: 301974 - RNA, 19 nt, Homo sapiens
  misc_RNA (1)...(19): siRNA sense strand
auccuuagcuacaagauug

SEQ ID NO: 301975 - RNA, 19 nt, Homo sapiens
  misc_RNA (1)...(19): siRNA sense strand
cuacaagauuggcaaagag

SEQ ID NO: 301976 - RNA, 19 nt, Homo sapiens
  misc_RNA (1)...(19): siRNA sense strand
aggagcagcccaugcauuu

SEQ ID NO: 301977 - RNA, 19 nt, Homo sapiens
  misc_RNA (1)...(19): siRNA sense strand
gaggucagaauggaaguuu

SEQ ID NO: 301978 - RNA, 19 nt, Homo sapiens
  misc_RNA (1)...(19): siRNA sense strand
cgaauggagucugcacugu

SEQ ID NO: 301979 - RNA, 19 nt, Homo sapiens
  misc_RNA (1)...(19): siRNA sense strand
guugaaucauggagaacuu

SEQ ID NO: 301980 - RNA, 19 nt, Homo sapiens
  misc_RNA (1)...(19): siRNA sense strand
caagauuggcaaagagaug

SEQ ID NO: 301981 - RNA, 19 nt, Homo sapiens
  misc_RNA (1)...(19): siRNA sense strand
gucggacacuacuuucaaa

SEQ ID NO: 301982 - RNA, 19 nt, Homo sapiens
  misc_RNA (1)...(19): siRNA sense strand
cccuaacagugucuaauga

SEQ ID NO: 301983 - RNA, 19 nt, Homo sapiens
  misc_RNA (1)...(19): siRNA sense strand
agaaagccaucaguuccaa

SEQ ID NO: 301984 - RNA, 19 nt, Homo sapiens
  misc_RNA (1)...(19): siRNA sense strand
acaagauccuuagcuacaa

SEQ ID NO: 301985 - RNA, 19 nt, Homo sapiens
  misc_RNA (1)...(19): siRNA sense strand
aagauugauuggaacaaga

SEQ ID NO: 301986 - RNA, 19 nt, Homo sapiens
  misc_RNA (1)...(19): siRNA sense strand
guuacacgcacuaagauug

SEQ ID NO: 301987 - RNA, 19 nt, Homo sapiens
  misc_RNA (1)...(19): siRNA sense strand
gguaauguucagcuaguga

SEQ ID NO: 301988 - RNA, 19 nt, Homo sapiens
  misc_RNA (1)...(19): siRNA sense strand
aggagcaguugucugauga

SEQ ID NO: 301989 - RNA, 19 nt, Homo sapiens
  misc_RNA (1)...(19): siRNA sense strand
gagcaguugucugaugaag

SEQ ID NO: 301990 - RNA, 19 nt, Homo sapiens
  misc_RNA (1)...(19): siRNA sense strand
uaacagugucuaaugaagu

SEQ ID NO: 301991 - RNA, 19 nt, Homo sapiens
  misc_RNA (1)...(19): siRNA sense strand
aauggagucugcacugugu

SEQ ID NO: 301992 - RNA, 19 nt, Homo sapiens
  misc_RNA (1)...(19): siRNA sense strand
cauuauugcaugcauagaa

SEQ ID NO: 301993 - RNA, 19 nt, Homo sapiens
  misc_RNA (1)...(19): siRNA sense strand
gauccuuagcuacaagauu

SEQ ID NO: 301994 - RNA, 19 nt, Homo sapiens
  misc_RNA (1)...(19): siRNA sense strand
guuaugaagaucagguauu

SEQ ID NO: 301995 - RNA, 19 nt, Homo sapiens
  misc_RNA (1)...(19): siRNA sense strand
ugagaauuaucagacaaug

SEQ ID NO: 301996 - RNA, 19 nt, Homo sapiens
  misc_RNA (1)...(19): siRNA sense strand
cagcaaaauucaucauuca

SEQ ID NO: 301997 - RNA, 19 nt, Homo sapiens
  misc_RNA (1)...(19): siRNA sense strand
uggagaacuucaguagaaa

SEQ ID NO: 301998 - RNA, 19 nt, Homo sapiens
  misc_RNA (1)...(19): siRNA sense strand
gagaauuaucagacaaugu

SEQ ID NO: 301999 - RNA, 19 nt, Homo sapiens
  misc_RNA (1)...(19): siRNA sense strand
cuaacagugucuaaugaag

SEQ ID NO: 302000 - RNA, 19 nt, Homo sapiens
  misc_RNA (1)...(19): siRNA sense strand
aaaaugcaguugaaucaug

SEQ ID NO: 302001 - RNA, 19 nt, Homo sapiens
  misc_RNA (1)...(19): siRNA sense strand
uuacacgcacuaagauuga

SEQ ID NO: 302002 - RNA, 19 nt, Homo sapiens
  misc_RNA (1)...(19): siRNA sense strand
uucgguuacugcuuaauaa

SEQ ID NO: 302003 - RNA, 19 nt, Homo sapiens
  misc_RNA (1)...(19): siRNA sense strand
aacagugucuaaugaagug

SEQ ID NO: 302004 - RNA, 19 nt, Homo sapiens
  misc_RNA (1)...(19): siRNA sense strand
aaccauuauugcaugcaua

SEQ ID NO: 302005 - RNA, 19 nt, Homo sapiens
  misc_RNA (1)...(19): siRNA sense strand
aaaagaacauuacccgaau

SEQ ID NO: 302006 - RNA, 19 nt, Homo sapiens
  misc_RNA (1)...(19): siRNA sense strand
gagcagcccaugcauuugc

SEQ ID NO: 302007 - RNA, 19 nt, Homo sapiens
  misc_RNA (1)...(19): siRNA sense strand
agccuuacgucgacaguug

SEQ ID NO: 302008 - RNA, 19 nt, Homo sapiens
  misc_RNA (1)...(19): siRNA sense strand
gcaaaauucaucauucaug

SEQ ID NO: 302009 - RNA, 19 nt, Homo sapiens
  misc_RNA (1)...(19): siRNA sense strand
gagcuuacguaaaagaaca

SEQ ID NO: 302010 - RNA, 19 nt, Homo sapiens
  misc_RNA (1)...(19): siRNA sense strand
gaaggaggcaacugaucca

SEQ ID NO: 302011 - RNA, 19 nt, Homo sapiens
  misc_RNA (1)...(19): siRNA sense strand
cauggcgacuugggaaaug

SEQ ID NO: 302012 - RNA, 19 nt, Homo sapiens
  misc_RNA (1)...(19): siRNA sense strand
ggucagaauggaaguuuac

SEQ ID NO: 302013 - RNA, 19 nt, Homo sapiens
  misc_RNA (1)...(19): siRNA sense strand
guuggcaucuugaaaauuc

SEQ ID NO: 302014 - RNA, 19 nt, Homo sapiens
  misc_RNA (1)...(19): siRNA sense strand
cagugagaauuaucagaca

SEQ ID NO: 302015 - RNA, 19 nt, Homo sapiens
  misc_RNA (1)...(19): siRNA sense strand
ccuaacagugucuaaugaa

SEQ ID NO: 302016 - RNA, 19 nt, Homo sapiens
  misc_RNA (1)...(19): siRNA sense strand
aacaagauccuuagcuaca

SEQ ID NO: 302017 - RNA, 19 nt, Homo sapiens
  misc_RNA (1)...(19): siRNA sense strand
gcguauagcagcaaaauuc

SEQ ID NO: 302018 - RNA, 19 nt, Homo sapiens
  misc_RNA (1)...(19): siRNA sense strand
aagacccugugaaguagaa

SEQ ID NO: 302019 - RNA, 19 nt, Homo sapiens
  misc_RNA (1)...(19): siRNA sense strand
ggcaaagagaugcagaaug

SEQ ID NO: 302020 - RNA, 19 nt, Homo sapiens
  misc_RNA (1)...(19): siRNA sense strand
gauccaaagaacagaaucu

SEQ ID NO: 302021 - RNA, 19 nt, Homo sapiens
  misc_RNA (1)...(19): siRNA sense strand
ugccaucagugagaauuau

SEQ ID NO: 302022 - RNA, 19 nt, Homo sapiens
  misc_RNA (1)...(19): siRNA sense strand
agaugguaauguucagcua

SEQ ID NO: 302023 - RNA, 19 nt, Homo sapiens
  misc_RNA (1)...(19): siRNA sense strand
gagaacuucaguagaaacu

SEQ ID NO: 302024 - RNA, 19 nt, Homo sapiens
  misc_RNA (1)...(19): siRNA sense strand
ucauggagaacuucaguag

SEQ ID NO: 302025 - RNA, 19 nt, Homo sapiens
  misc_RNA (1)...(19): siRNA sense strand
aaaccauuauugcaugcau

SEQ ID NO: 302026 - RNA, 19 nt, Homo sapiens
  misc_RNA (1)...(19): siRNA sense strand
gaaggagcagcccaugcau

SEQ ID NO: 302027 - RNA, 19 nt, Homo sapiens
  misc_RNA (1)...(19): siRNA sense strand
ggagcagcccaugcauuug

SEQ ID NO: 302028 - RNA, 19 nt, Homo sapiens
  misc_RNA (1)...(19): siRNA sense strand
gaaaccaagucauaugaaa

SEQ ID NO: 302029 - RNA, 19 nt, Homo sapiens
  misc_RNA (1)...(19): siRNA sense strand
agaggaacauggcauauua

SEQ ID NO: 302030 - RNA, 19 nt, Homo sapiens
  misc_RNA (1)...(19): siRNA sense strand
gcucacaccuuucuacuga

SEQ ID NO: 302031 - RNA, 19 nt, Homo sapiens
  misc_RNA (1)...(19): siRNA sense strand
gaacauggcauauuauaag

SEQ ID NO: 302032 - RNA, 19 nt, Homo sapiens
  misc_RNA (1)...(19): siRNA sense strand
gcaguucaguucuuuaaug

SEQ ID NO: 302033 - RNA, 19 nt, Homo sapiens
  misc_RNA (1)...(19): siRNA sense strand
gcaguucgcuuacuucaag

SEQ ID NO: 302034 - RNA, 19 nt, Homo sapiens
  misc_RNA (1)...(19): siRNA sense strand
gaacauccaucacagacau

SEQ ID NO: 302035 - RNA, 19 nt, Homo sapiens
  misc_RNA (1)...(19): siRNA sense strand
ucaaggacuucaaggauuu

SEQ ID NO: 302036 - RNA, 19 nt, Homo sapiens
  misc_RNA (1)...(19): siRNA sense strand
agaaggagcuguaugacuu

SEQ ID NO: 302037 - RNA, 19 nt, Homo sapiens
  misc_RNA (1)...(19): siRNA sense strand
agcagaaccugguguauua

SEQ ID NO: 302038 - RNA, 19 nt, Homo sapiens
  misc_RNA (1)...(19): siRNA sense strand
uuaaagaccuggaaaccaa

SEQ ID NO: 302039 - RNA, 19 nt, Homo sapiens
  misc_RNA (1)...(19): siRNA sense strand
gcuauccgguugagaaauu

SEQ ID NO: 302040 - RNA, 19 nt, Homo sapiens
  misc_RNA (1)...(19): siRNA sense strand
gcccagaccugaagcaguu

SEQ ID NO: 302041 - RNA, 19 nt, Homo sapiens
  misc_RNA (1)...(19): siRNA sense strand
gagaaguuguggaauaugu

SEQ ID NO: 302042 - RNA, 19 nt, Homo sapiens
  misc_RNA (1)...(19): siRNA sense strand
guucaguucuuuaauguga

SEQ ID NO: 302043 - RNA, 19 nt, Homo sapiens
  misc_RNA (1)...(19): siRNA sense strand
ggugagaacuggagaacau

SEQ ID NO: 302044 - RNA, 19 nt, Homo sapiens
  misc_RNA (1)...(19): siRNA sense strand
ucagcuaucugcucuuuga

SEQ ID NO: 302045 - RNA, 19 nt, Homo sapiens
  misc_RNA (1)...(19): siRNA sense strand
ggcacgcgcuggacaagua

SEQ ID NO: 302046 - RNA, 19 nt, Homo sapiens
  misc_RNA (1)...(19): siRNA sense strand
gggagaaguuguggaauau

SEQ ID NO: 302047 - RNA, 19 nt, Homo sapiens
  misc_RNA (1)...(19): siRNA sense strand
ggaacauggcauauuauaa

SEQ ID NO: 302048 - RNA, 19 nt, Homo sapiens
  misc_RNA (1)...(19): siRNA sense strand
ccagggagaucaaggacuu

SEQ ID NO: 302049 - RNA, 19 nt, Homo sapiens
  misc_RNA (1)...(19): siRNA sense strand
uaucauuacuugcaguuug

SEQ ID NO: 302050 - RNA, 19 nt, Homo sapiens
  misc_RNA (1)...(19): siRNA sense strand
agggagaaguuguggaaua

SEQ ID NO: 302051 - RNA, 19 nt, Homo sapiens
  misc_RNA (1)...(19): siRNA sense strand
gcuaucugcucuuugauca

SEQ ID NO: 302052 - RNA, 19 nt, Homo sapiens
  misc_RNA (1)...(19): siRNA sense strand
gaucaaggacuucaaggau

SEQ ID NO: 302053 - RNA, 19 nt, Homo sapiens
  misc_RNA (1)...(19): siRNA sense strand
ggauuucuaccuuuccaua

SEQ ID NO: 302054 - RNA, 19 nt, Homo sapiens
  misc_RNA (1)...(19): siRNA sense strand
gaaggagcuguaugacuuu

SEQ ID NO: 302055 - RNA, 19 nt, Homo sapiens
  misc_RNA (1)...(19): siRNA sense strand
ugaacgaccugaagaaugc

SEQ ID NO: 302056 - RNA, 19 nt, Homo sapiens
  misc_RNA (1)...(19): siRNA sense strand
gaaaugaugaagaggaaca

SEQ ID NO: 302057 - RNA, 19 nt, Homo sapiens
  misc_RNA (1)...(19): siRNA sense strand
ggaaaccaagucauaugaa

SEQ ID NO: 302058 - RNA, 19 nt, Homo sapiens
  misc_RNA (1)...(19): siRNA sense strand
uauaauggaugaugaugag

SEQ ID NO: 302059 - RNA, 19 nt, Homo sapiens
  misc_RNA (1)...(19): siRNA sense strand
ugaccacacuccagaagga

SEQ ID NO: 302060 - RNA, 19 nt, Homo sapiens
  misc_RNA (1)...(19): siRNA sense strand
gaaccucaccccaguuaua

SEQ ID NO: 302061 - RNA, 19 nt, Homo sapiens
  misc_RNA (1)...(19): siRNA sense strand
gcaguuugccuauuauaag

SEQ ID NO: 302062 - RNA, 19 nt, Homo sapiens
  misc_RNA (1)...(19): siRNA sense strand
gaagcaguucaguucuuua

SEQ ID NO: 302063 - RNA, 19 nt, Homo sapiens
  misc_RNA (1)...(19): siRNA sense strand
ugaagaggaacauggcaua

SEQ ID NO: 302064 - RNA, 19 nt, Homo sapiens
  misc_RNA (1)...(19): siRNA sense strand
ggagaacauccaucacaga

SEQ ID NO: 302065 - RNA, 19 nt, Homo sapiens
  misc_RNA (1)...(19): siRNA sense strand
gagcagugcgggcauacaa

SEQ ID NO: 302066 - RNA, 19 nt, Homo sapiens
  misc_RNA (1)...(19): siRNA sense strand
uagcagaucauuauguaga

SEQ ID NO: 302067 - RNA, 19 nt, Homo sapiens
  misc_RNA (1)...(19): siRNA sense strand
acuugcaguuugccuauua

SEQ ID NO: 302068 - RNA, 19 nt, Homo sapiens
  misc_RNA (1)...(19): siRNA sense strand
gaggcuauccgguugagaa

SEQ ID NO: 302069 - RNA, 19 nt, Homo sapiens
  misc_RNA (1)...(19): siRNA sense strand
gaagaggaacauggcauau

SEQ ID NO: 302070 - RNA, 19 nt, Homo sapiens
  misc_RNA (1)...(19): siRNA sense strand
caaauaaucuccccaaagc

SEQ ID NO: 302071 - RNA, 19 nt, Homo sapiens
  misc_RNA (1)...(19): siRNA sense strand
cagcagaaccugguguauu

SEQ ID NO: 302072 - RNA, 19 nt, Homo sapiens
  misc_RNA (1)...(19): siRNA sense strand
gccgaggacuacauuaaag

SEQ ID NO: 302073 - RNA, 19 nt, Homo sapiens
  misc_RNA (1)...(19): siRNA sense strand
guaugacuuugcuaaggaa

SEQ ID NO: 302074 - RNA, 19 nt, Homo sapiens
  misc_RNA (1)...(19): siRNA sense strand
caguucaguucuuuaaugu

SEQ ID NO: 302075 - RNA, 19 nt, Homo sapiens
  misc_RNA (1)...(19): siRNA sense strand
uguaugacuuugcuaagga

SEQ ID NO: 302076 - RNA, 19 nt, Homo sapiens
  misc_RNA (1)...(19): siRNA sense strand
ccuacaaguuccugcaguu

SEQ ID NO: 302077 - RNA, 19 nt, Homo sapiens
  misc_RNA (1)...(19): siRNA sense strand
acgaaaugaugaagaggaa

SEQ ID NO: 302078 - RNA, 19 nt, Homo sapiens
  misc_RNA (1)...(19): siRNA sense strand
ggaugaugaugagggagaa

SEQ ID NO: 302079 - RNA, 19 nt, Homo sapiens
  misc_RNA (1)...(19): siRNA sense strand
ggacuucaaggauuucuac

SEQ ID NO: 302080 - RNA, 19 nt, Homo sapiens
  misc_RNA (1)...(19): siRNA sense strand
gugccgaggacuacauuaa

SEQ ID NO: 302081 - RNA, 19 nt, Homo sapiens
  misc_RNA (1)...(19): siRNA sense strand
ucgcuuacuucaaggcaaa

SEQ ID NO: 302082 - RNA, 19 nt, Homo sapiens
  misc_RNA (1)...(19): siRNA sense strand
agucagcuaucugcucuuu

SEQ ID NO: 302083 - RNA, 19 nt, Homo sapiens
  misc_RNA (1)...(19): siRNA sense strand
ggagaucaaggacuucaag

SEQ ID NO: 302084 - RNA, 19 nt, Homo sapiens
  misc_RNA (1)...(19): siRNA sense strand
aagcaguucaguucuuuaa

SEQ ID NO: 302085 - RNA, 19 nt, Homo sapiens
  misc_RNA (1)...(19): siRNA sense strand
caguuugccuauuauaagu

SEQ ID NO: 302086 - RNA, 19 nt, Homo sapiens
  misc_RNA (1)...(19): siRNA sense strand
gcagaucauuauguagaag

SEQ ID NO: 302087 - RNA, 19 nt, Homo sapiens
  misc_RNA (1)...(19): siRNA sense strand
gaggaacauggcauauuau

SEQ ID NO: 302088 - RNA, 19 nt, Homo sapiens
  misc_RNA (1)...(19): siRNA sense strand
uggaugaccucuuggaacu

SEQ ID NO: 302089 - RNA, 19 nt, Homo sapiens
  misc_RNA (1)...(19): siRNA sense strand
auauguggaugaccucuug

SEQ ID NO: 302090 - RNA, 19 nt, Homo sapiens
  misc_RNA (1)...(19): siRNA sense strand
gccgcgagcccuacaaguu

SEQ ID NO: 302091 - RNA, 19 nt, Homo sapiens
  misc_RNA (1)...(19): siRNA sense strand
ugagggagaaguuguggaa

SEQ ID NO: 302092 - RNA, 19 nt, Homo sapiens
  misc_RNA (1)...(19): siRNA sense strand
gagaaccucaccccaguua

SEQ ID NO: 302093 - RNA, 19 nt, Homo sapiens
  misc_RNA (1)...(19): siRNA sense strand
acaaggucaugcagcagaa

SEQ ID NO: 302094 - RNA, 19 nt, Homo sapiens
  misc_RNA (1)...(19): siRNA sense strand
aggaacauggcauauuaua

SEQ ID NO: 302095 - RNA, 19 nt, Homo sapiens
  misc_RNA (1)...(19): siRNA sense strand
uuccauagcagaucauuau

SEQ ID NO: 302096 - RNA, 19 nt, Homo sapiens
  misc_RNA (1)...(19): siRNA sense strand
ucacaccuuucuacugaag

SEQ ID NO: 302097 - RNA, 19 nt, Homo sapiens
  misc_RNA (1)...(19): siRNA sense strand
uggaaaccaagucauauga

SEQ ID NO: 302098 - RNA, 19 nt, Homo sapiens
  misc_RNA (1)...(19): siRNA sense strand
guuugccuauuauaaguug

SEQ ID NO: 302099 - RNA, 19 nt, Homo sapiens
  misc_RNA (1)...(19): siRNA sense strand
gaugacgaaaugaugaaga

SEQ ID NO: 302100 - RNA, 19 nt, Homo sapiens
  misc_RNA (1)...(19): siRNA sense strand
aucaaggacuucaaggauu

SEQ ID NO: 302101 - RNA, 19 nt, Homo sapiens
  misc_RNA (1)...(19): siRNA sense strand
gggcauacaacggugagaa

SEQ ID NO: 302102 - RNA, 19 nt, Homo sapiens
  misc_RNA (1)...(19): siRNA sense strand
gaugaugagggagaaguug

SEQ ID NO: 302103 - RNA, 19 nt, Homo sapiens
  misc_RNA (1)...(19): siRNA sense strand
ggagcuguaugacuuugcu

SEQ ID NO: 302104 - RNA, 19 nt, Homo sapiens
  misc_RNA (1)...(19): siRNA sense strand
uccagaaggagcuguauga

SEQ ID NO: 302105 - RNA, 19 nt, Homo sapiens
  misc_RNA (1)...(19): siRNA sense strand
cgccgcugcucacaccuuu

SEQ ID NO: 302106 - RNA, 19 nt, Homo sapiens
  misc_RNA (1)...(19): siRNA sense strand
gcaaauaaucuccccaaag

SEQ ID NO: 302107 - RNA, 19 nt, Homo sapiens
  misc_RNA (1)...(19): siRNA sense strand
aaauacagugugaagagaa

SEQ ID NO: 302108 - RNA, 19 nt, Homo sapiens
  misc_RNA (1)...(19): siRNA sense strand
aagaggaacauggcauauu

SEQ ID NO: 302109 - RNA, 19 nt, Homo sapiens
  misc_RNA (1)...(19): siRNA sense strand
ggagaaguuguggaauaug

SEQ ID NO: 302110 - RNA, 19 nt, Homo sapiens
  misc_RNA (1)...(19): siRNA sense strand
uaaguugaacgaccugaag

SEQ ID NO: 302111 - RNA, 19 nt, Homo sapiens
  misc_RNA (1)...(19): siRNA sense strand
ccuauuauaaguugaacga

SEQ ID NO: 302112 - RNA, 19 nt, Homo sapiens
  misc_RNA (1)...(19): siRNA sense strand
ccugaugacgaaaugauga

SEQ ID NO: 302113 - RNA, 19 nt, Homo sapiens
  misc_RNA (1)...(19): siRNA sense strand
aaaccaagucauaugaaag

SEQ ID NO: 302114 - RNA, 19 nt, Homo sapiens
  misc_RNA (1)...(19): siRNA sense strand
ccgcgagcccuacaaguuc

SEQ ID NO: 302115 - RNA, 19 nt, Homo sapiens
  misc_RNA (1)...(19): siRNA sense strand
caaaauacagugugaagag

SEQ ID NO: 302116 - RNA, 19 nt, Homo sapiens
  misc_RNA (1)...(19): siRNA sense strand
ccgaggacuacauuaaaga

SEQ ID NO: 302117 - RNA, 19 nt, Homo sapiens
  misc_RNA (1)...(19): siRNA sense strand
ugccgaggacuacauuaaa

SEQ ID NO: 302118 - RNA, 19 nt, Homo sapiens
  misc_RNA (1)...(19): siRNA sense strand
cuacauuaaagaccuggaa

SEQ ID NO: 302119 - RNA, 19 nt, Homo sapiens
  misc_RNA (1)...(19): siRNA sense strand
gcagcagaaccugguguau

SEQ ID NO: 302120 - RNA, 19 nt, Homo sapiens
  misc_RNA (1)...(19): siRNA sense strand
uaacauaguucuccuguca

SEQ ID NO: 302121 - RNA, 19 nt, Homo sapiens
  misc_RNA (1)...(19): siRNA sense strand
gcucacacaccauauauua

SEQ ID NO: 302122 - RNA, 19 nt, Homo sapiens
  misc_RNA (1)...(19): siRNA sense strand
acgcaaagcuucuucauga

SEQ ID NO: 302123 - RNA, 19 nt, Homo sapiens
  misc_RNA (1)...(19): siRNA sense strand
gaaaggcccuauugcuaug

SEQ ID NO: 302124 - RNA, 19 nt, Homo sapiens
  misc_RNA (1)...(19): siRNA sense strand
uguaauagcuggcaucguu

SEQ ID NO: 302125 - RNA, 19 nt, Homo sapiens
  misc_RNA (1)...(19): siRNA sense strand
ggaggcauuauguauauua

SEQ ID NO: 302126 - RNA, 19 nt, Homo sapiens
  misc_RNA (1)...(19): siRNA sense strand
ccaagaagaggaagaagaa

SEQ ID NO: 302127 - RNA, 19 nt, Homo sapiens
  misc_RNA (1)...(19): siRNA sense strand
cauacaaucucuguucuug

SEQ ID NO: 302128 - RNA, 19 nt, Homo sapiens
  misc_RNA (1)...(19): siRNA sense strand
ugaaacaucuucccaacca

SEQ ID NO: 302129 - RNA, 19 nt, Homo sapiens
  misc_RNA (1)...(19): siRNA sense strand
gagaaugaauggaaaagaa

SEQ ID NO: 302130 - RNA, 19 nt, Homo sapiens
  misc_RNA (1)...(19): siRNA sense strand
gagacgaacuuuccagaac

SEQ ID NO: 302131 - RNA, 19 nt, Homo sapiens
  misc_RNA (1)...(19): siRNA sense strand
ggaauccucaccaauagaa

SEQ ID NO: 302132 - RNA, 19 nt, Homo sapiens
  misc_RNA (1)...(19): siRNA sense strand
gagggaaucuaagacuuug

SEQ ID NO: 302133 - RNA, 19 nt, Homo sapiens
  misc_RNA (1)...(19): siRNA sense strand
ugaaugggcucuuccacau

SEQ ID NO: 302134 - RNA, 19 nt, Homo sapiens
  misc_RNA (1)...(19): siRNA sense strand
ugaaaggcccuauugcuau

SEQ ID NO: 302135 - RNA, 19 nt, Homo sapiens
  misc_RNA (1)...(19): siRNA sense strand
gaagaagaagaaacagaga

SEQ ID NO: 302136 - RNA, 19 nt, Homo sapiens
  misc_RNA (1)...(19): siRNA sense strand
acccaaaucuaacauaguu

SEQ ID NO: 302137 - RNA, 19 nt, Homo sapiens
  misc_RNA (1)...(19): siRNA sense strand
gcuccagacccaaaucuaa

SEQ ID NO: 302138 - RNA, 19 nt, Homo sapiens
  misc_RNA (1)...(19): siRNA sense strand
caucuacccaauacuguua

SEQ ID NO: 302139 - RNA, 19 nt, Homo sapiens
  misc_RNA (1)...(19): siRNA sense strand
cagcuaaucccucugagaa

SEQ ID NO: 302140 - RNA, 19 nt, Homo sapiens
  misc_RNA (1)...(19): siRNA sense strand
gaagaagugguugggcuaa

SEQ ID NO: 302141 - RNA, 19 nt, Homo sapiens
  misc_RNA (1)...(19): siRNA sense strand
ucaaucauggacauacuua

SEQ ID NO: 302142 - RNA, 19 nt, Homo sapiens
  misc_RNA (1)...(19): siRNA sense strand
gaaacaucuucccaaccaa

SEQ ID NO: 302143 - RNA, 19 nt, Homo sapiens
  misc_RNA (1)...(19): siRNA sense strand
gagcucacacaccauauau

SEQ ID NO: 302144 - RNA, 19 nt, Homo sapiens
  misc_RNA (1)...(19): siRNA sense strand
acccagaaauucaguaaau

SEQ ID NO: 302145 - RNA, 19 nt, Homo sapiens
  misc_RNA (1)...(19): siRNA sense strand
gcugaucuuugccuucuuc

SEQ ID NO: 302146 - RNA, 19 nt, Homo sapiens
  misc_RNA (1)...(19): siRNA sense strand
ugagggaaucuaagacuuu

SEQ ID NO: 302147 - RNA, 19 nt, Homo sapiens
  misc_RNA (1)...(19): siRNA sense strand
gacaacacccagaaauuca

SEQ ID NO: 302148 - RNA, 19 nt, Homo sapiens
  misc_RNA (1)...(19): siRNA sense strand
gaagaggaagaagaagaaa

SEQ ID NO: 302149 - RNA, 19 nt, Homo sapiens
  misc_RNA (1)...(19): siRNA sense strand
gauuaugaaugggcucuuc

SEQ ID NO: 302150 - RNA, 19 nt, Homo sapiens
  misc_RNA (1)...(19): siRNA sense strand
uagcuggcaucguugagaa

SEQ ID NO: 302151 - RNA, 19 nt, Homo sapiens
  misc_RNA (1)...(19): siRNA sense strand
gagccucuuugcugccauu

SEQ ID NO: 302152 - RNA, 19 nt, Homo sapiens
  misc_RNA (1)...(19): siRNA sense strand
cagcauacaaucucuguuc

SEQ ID NO: 302153 - RNA, 19 nt, Homo sapiens
  misc_RNA (1)...(19): siRNA sense strand
gaucuaugcacccaucugu

SEQ ID NO: 302154 - RNA, 19 nt, Homo sapiens
  misc_RNA (1)...(19): siRNA sense strand
aaacaucuucccaaccaaa

SEQ ID NO: 302155 - RNA, 19 nt, Homo sapiens
  misc_RNA (1)...(19): siRNA sense strand
gcuaaucccucugagaaaa

SEQ ID NO: 302156 - RNA, 19 nt, Homo sapiens
  misc_RNA (1)...(19): siRNA sense strand
guauauuauuuccggauca

SEQ ID NO: 302157 - RNA, 19 nt, Homo sapiens
  misc_RNA (1)...(19): siRNA sense strand
agaagaggaagaagaagaa

SEQ ID NO: 302158 - RNA, 19 nt, Homo sapiens
  misc_RNA (1)...(19): siRNA sense strand
agacccaaaucuaacauag

SEQ ID NO: 302159 - RNA, 19 nt, Homo sapiens
  misc_RNA (1)...(19): siRNA sense strand
gaaaaugacagcucuccuu

SEQ ID NO: 302160 - RNA, 19 nt, Homo sapiens
  misc_RNA (1)...(19): siRNA sense strand
aaacagagacgaacuuucc

SEQ ID NO: 302161 - RNA, 19 nt, Homo sapiens
  misc_RNA (1)...(19): siRNA sense strand
gaagaaacagagacgaacu

SEQ ID NO: 302162 - RNA, 19 nt, Homo sapiens
  misc_RNA (1)...(19): siRNA sense strand
ggggaggcauuauguauau

SEQ ID NO: 302163 - RNA, 19 nt, Homo sapiens
  misc_RNA (1)...(19): siRNA sense strand
uuagagcucacacaccaua

SEQ ID NO: 302164 - RNA, 19 nt, Homo sapiens
  misc_RNA (1)...(19): siRNA sense strand
gaauucauugagccucuuu

SEQ ID NO: 302165 - RNA, 19 nt, Homo sapiens
  misc_RNA (1)...(19): siRNA sense strand
ccucuuugcugccauuucu

SEQ ID NO: 302166 - RNA, 19 nt, Homo sapiens
  misc_RNA (1)...(19): siRNA sense strand
gcuaugcaaucugguccaa

SEQ ID NO: 302167 - RNA, 19 nt, Homo sapiens
  misc_RNA (1)...(19): siRNA sense strand
ccaggaacuuguaauagcu

SEQ ID NO: 302168 - RNA, 19 nt, Homo sapiens
  misc_RNA (1)...(19): siRNA sense strand
ucucuguucuugggcauuu

SEQ ID NO: 302169 - RNA, 19 nt, Homo sapiens
  misc_RNA (1)...(19): siRNA sense strand
aaccaaagaaugaagaaga

SEQ ID NO: 302170 - RNA, 19 nt, Homo sapiens
  misc_RNA (1)...(19): siRNA sense strand
ucaggaggaugucuucacu

SEQ ID NO: 302171 - RNA, 19 nt, Homo sapiens
  misc_RNA (1)...(19): siRNA sense strand
gugguugggcuaacugaaa

SEQ ID NO: 302172 - RNA, 19 nt, Homo sapiens
  misc_RNA (1)...(19): siRNA sense strand
cggcagagccaaugaaagg

SEQ ID NO: 302173 - RNA, 19 nt, Homo sapiens
  misc_RNA (1)...(19): siRNA sense strand
ccagaaauucaguaaaugg

SEQ ID NO: 302174 - RNA, 19 nt, Homo sapiens
  misc_RNA (1)...(19): siRNA sense strand
gcauacaaucucuguucuu

SEQ ID NO: 302175 - RNA, 19 nt, Homo sapiens
  misc_RNA (1)...(19): siRNA sense strand
ucacacaccauauauuaac

SEQ ID NO: 302176 - RNA, 19 nt, Homo sapiens
  misc_RNA (1)...(19): siRNA sense strand
gggaggcauuauguauauu

SEQ ID NO: 302177 - RNA, 19 nt, Homo sapiens
  misc_RNA (1)...(19): siRNA sense strand
augaaaggcccuauugcua

SEQ ID NO: 302178 - RNA, 19 nt, Homo sapiens
  misc_RNA (1)...(19): siRNA sense strand
agaggaagaagaagaaaca

SEQ ID NO: 302179 - RNA, 19 nt, Homo sapiens
  misc_RNA (1)...(19): siRNA sense strand
aagaagaggaagaagaaga

SEQ ID NO: 302180 - RNA, 19 nt, Homo sapiens
  misc_RNA (1)...(19): siRNA sense strand
aagaagaaacagagacgaa

SEQ ID NO: 302181 - RNA, 19 nt, Homo sapiens
  misc_RNA (1)...(19): siRNA sense strand
uggcaucguugagaaugaa

SEQ ID NO: 302182 - RNA, 19 nt, Homo sapiens
  misc_RNA (1)...(19): siRNA sense strand
aaaaugacagcucuccuua

SEQ ID NO: 302183 - RNA, 19 nt, Homo sapiens
  misc_RNA (1)...(19): siRNA sense strand
agaaacagagacgaacuuu

SEQ ID NO: 302184 - RNA, 19 nt, Homo sapiens
  misc_RNA (1)...(19): siRNA sense strand
caaagaaugaagaagacau

SEQ ID NO: 302185 - RNA, 19 nt, Homo sapiens
  misc_RNA (1)...(19): siRNA sense strand
agagcucacacaccauaua

SEQ ID NO: 302186 - RNA, 19 nt, Homo sapiens
  misc_RNA (1)...(19): siRNA sense strand
aaaugacagcucuccuuaa

SEQ ID NO: 302187 - RNA, 19 nt, Homo sapiens
  misc_RNA (1)...(19): siRNA sense strand
cccagaaauucaguaaaug

SEQ ID NO: 302188 - RNA, 19 nt, Homo sapiens
  misc_RNA (1)...(19): siRNA sense strand
cguugagaaugaauggaaa

SEQ ID NO: 302189 - RNA, 19 nt, Homo sapiens
  misc_RNA (1)...(19): siRNA sense strand
ccaaaucuaacauaguucu

SEQ ID NO: 302190 - RNA, 19 nt, Homo sapiens
  misc_RNA (1)...(19): siRNA sense strand
caacugugaaccagcuaau

SEQ ID NO: 302191 - RNA, 19 nt, Homo sapiens
  misc_RNA (1)...(19): siRNA sense strand
ugggcuaacugaaacaucu

SEQ ID NO: 302192 - RNA, 19 nt, Homo sapiens
  misc_RNA (1)...(19): siRNA sense strand
gaagugguugggcuaacug

SEQ ID NO: 302193 - RNA, 19 nt, Homo sapiens
  misc_RNA (1)...(19): siRNA sense strand
uaugcaaucugguccaaaa

SEQ ID NO: 302194 - RNA, 19 nt, Homo sapiens
  misc_RNA (1)...(19): siRNA sense strand
acacccagaaauucaguaa

SEQ ID NO: 302195 - RNA, 19 nt, Homo sapiens
  misc_RNA (1)...(19): siRNA sense strand
gggcuguccagauuaugaa

SEQ ID NO: 302196 - RNA, 19 nt, Homo sapiens
  misc_RNA (1)...(19): siRNA sense strand
uaauagcuggcaucguuga

SEQ ID NO: 302197 - RNA, 19 nt, Homo sapiens
  misc_RNA (1)...(19): siRNA sense strand
uggagagucugaauuuuau

SEQ ID NO: 302198 - RNA, 19 nt, Homo sapiens
  misc_RNA (1)...(19): siRNA sense strand
gaauccucaccaauagaaa

SEQ ID NO: 302199 - RNA, 19 nt, Homo sapiens
  misc_RNA (1)...(19): siRNA sense strand
cacacaccauauauuaaca

SEQ ID NO: 302200 - RNA, 19 nt, Homo sapiens
  misc_RNA (1)...(19): siRNA sense strand
gccaaugaaaggcccuauu

SEQ ID NO: 302201 - RNA, 19 nt, Homo sapiens
  misc_RNA (1)...(19): siRNA sense strand
ccaaccaaagaaugaagaa

SEQ ID NO: 302202 - RNA, 19 nt, Homo sapiens
  misc_RNA (1)...(19): siRNA sense strand
caaucauggacauacuuaa

SEQ ID NO: 302203 - RNA, 19 nt, Homo sapiens
  misc_RNA (1)...(19): siRNA sense strand
cagacccaaaucuaacaua

SEQ ID NO: 302204 - RNA, 19 nt, Homo sapiens
  misc_RNA (1)...(19): siRNA sense strand
uccaggaacuuguaauagc

SEQ ID NO: 302205 - RNA, 19 nt, Homo sapiens
  misc_RNA (1)...(19): siRNA sense strand
ucuaugcacccaucugugu

SEQ ID NO: 302206 - RNA, 19 nt, Homo sapiens
  misc_RNA (1)...(19): siRNA sense strand
uuauuccaauccaagaaga

SEQ ID NO: 302207 - RNA, 19 nt, Homo sapiens
  misc_RNA (1)...(19): siRNA sense strand
uaacauaguucuccuguca

SEQ ID NO: 302208 - RNA, 19 nt, Homo sapiens
  misc_RNA (1)...(19): siRNA sense strand
gcucacacaccauauauua

SEQ ID NO: 302209 - RNA, 19 nt, Homo sapiens
  misc_RNA (1)...(19): siRNA sense strand
acgcaaagcuucuucauga

SEQ ID NO: 302210 - RNA, 19 nt, Homo sapiens
  misc_RNA (1)...(19): siRNA sense strand
gaaaggcccuauugcuaug

SEQ ID NO: 302211 - RNA, 19 nt, Homo sapiens
  misc_RNA (1)...(19): siRNA sense strand
uguaauagcuggcaucguu

SEQ ID NO: 302212 - RNA, 19 nt, Homo sapiens
  misc_RNA (1)...(19): siRNA sense strand
ggaggcauuauguauauua

SEQ ID NO: 302213 - RNA, 19 nt, Homo sapiens
  misc_RNA (1)...(19): siRNA sense strand
ccaagaagaggaagaagaa

SEQ ID NO: 302214 - RNA, 19 nt, Homo sapiens
  misc_RNA (1)...(19): siRNA sense strand
cauacaaucucuguucuug

SEQ ID NO: 302215 - RNA, 19 nt, Homo sapiens
  misc_RNA (1)...(19): siRNA sense strand
ugaaacaucuucccaacca

SEQ ID NO: 302216 - RNA, 19 nt, Homo sapiens
  misc_RNA (1)...(19): siRNA sense strand
gagaaugaauggaaaagaa

SEQ ID NO: 302217 - RNA, 19 nt, Homo sapiens
  misc_RNA (1)...(19): siRNA sense strand
gagacgaacuuuccagaac

SEQ ID NO: 302218 - RNA, 19 nt, Homo sapiens
  misc_RNA (1)...(19): siRNA sense strand
ggaauccucaccaauagaa

SEQ ID NO: 302219 - RNA, 19 nt, Homo sapiens
  misc_RNA (1)...(19): siRNA sense strand
gagggaaucuaagacuuug

SEQ ID NO: 302220 - RNA, 19 nt, Homo sapiens
  misc_RNA (1)...(19): siRNA sense strand
ugaaugggcucuuccacau

SEQ ID NO: 302221 - RNA, 19 nt, Homo sapiens
  misc_RNA (1)...(19): siRNA sense strand
ugaaaggcccuauugcuau

SEQ ID NO: 302222 - RNA, 19 nt, Homo sapiens
  misc_RNA (1)...(19): siRNA sense strand
gaagaagaagaaacagaga

SEQ ID NO: 302223 - RNA, 19 nt, Homo sapiens
  misc_RNA (1)...(19): siRNA sense strand
acccaaaucuaacauaguu

SEQ ID NO: 302224 - RNA, 19 nt, Homo sapiens
  misc_RNA (1)...(19): siRNA sense strand
gcuccagacccaaaucuaa

SEQ ID NO: 302225 - RNA, 19 nt, Homo sapiens
  misc_RNA (1)...(19): siRNA sense strand
caucuacccaauacuguua

SEQ ID NO: 302226 - RNA, 19 nt, Homo sapiens
  misc_RNA (1)...(19): siRNA sense strand
cagcuaaucccucugagaa

SEQ ID NO: 302227 - RNA, 19 nt, Homo sapiens
  misc_RNA (1)...(19): siRNA sense strand
gaagaagugguugggcuaa

SEQ ID NO: 302228 - RNA, 19 nt, Homo sapiens
  misc_RNA (1)...(19): siRNA sense strand
ucaaucauggacauacuua

SEQ ID NO: 302229 - RNA, 19 nt, Homo sapiens
  misc_RNA (1)...(19): siRNA sense strand
gaaacaucuucccaaccaa

SEQ ID NO: 302230 - RNA, 19 nt, Homo sapiens
  misc_RNA (1)...(19): siRNA sense strand
gagcucacacaccauauau

SEQ ID NO: 302231 - RNA, 19 nt, Homo sapiens
  misc_RNA (1)...(19): siRNA sense strand
acccagaaauucaguaaau

SEQ ID NO: 302232 - RNA, 19 nt, Homo sapiens
  misc_RNA (1)...(19): siRNA sense strand
gcugaucuuugccuucuuc

SEQ ID NO: 302233 - RNA, 19 nt, Homo sapiens
  misc_RNA (1)...(19): siRNA sense strand
ugagggaaucuaagacuuu

SEQ ID NO: 302234 - RNA, 19 nt, Homo sapiens
  misc_RNA (1)...(19): siRNA sense strand
gacaacacccagaaauuca

SEQ ID NO: 302235 - RNA, 19 nt, Homo sapiens
  misc_RNA (1)...(19): siRNA sense strand
gaagaggaagaagaagaaa

SEQ ID NO: 302236 - RNA, 19 nt, Homo sapiens
  misc_RNA (1)...(19): siRNA sense strand
gauuaugaaugggcucuuc

SEQ ID NO: 302237 - RNA, 19 nt, Homo sapiens
  misc_RNA (1)...(19): siRNA sense strand
uagcuggcaucguugagaa

SEQ ID NO: 302238 - RNA, 19 nt, Homo sapiens
  misc_RNA (1)...(19): siRNA sense strand
gagccucuuugcugccauu

SEQ ID NO: 302239 - RNA, 19 nt, Homo sapiens
  misc_RNA (1)...(19): siRNA sense strand
cagcauacaaucucuguuc

SEQ ID NO: 302240 - RNA, 19 nt, Homo sapiens
  misc_RNA (1)...(19): siRNA sense strand
gaucuaugcacccaucugu

SEQ ID NO: 302241 - RNA, 19 nt, Homo sapiens
  misc_RNA (1)...(19): siRNA sense strand
aaacaucuucccaaccaaa

SEQ ID NO: 302242 - RNA, 19 nt, Homo sapiens
  misc_RNA (1)...(19): siRNA sense strand
gcuaaucccucugagaaaa

SEQ ID NO: 302243 - RNA, 19 nt, Homo sapiens
  misc_RNA (1)...(19): siRNA sense strand
guauauuauuuccggauca

SEQ ID NO: 302244 - RNA, 19 nt, Homo sapiens
  misc_RNA (1)...(19): siRNA sense strand
agaagaggaagaagaagaa

SEQ ID NO: 302245 - RNA, 19 nt, Homo sapiens
  misc_RNA (1)...(19): siRNA sense strand
agacccaaaucuaacauag

SEQ ID NO: 302246 - RNA, 19 nt, Homo sapiens
  misc_RNA (1)...(19): siRNA sense strand
gaaaaugacagcucuccuu

SEQ ID NO: 302247 - RNA, 19 nt, Homo sapiens
  misc_RNA (1)...(19): siRNA sense strand
aaacagagacgaacuuucc

SEQ ID NO: 302248 - RNA, 19 nt, Homo sapiens
  misc_RNA (1)...(19): siRNA sense strand
gaagaaacagagacgaacu

SEQ ID NO: 302249 - RNA, 19 nt, Homo sapiens
  misc_RNA (1)...(19): siRNA sense strand
ggggaggcauuauguauau

SEQ ID NO: 302250 - RNA, 19 nt, Homo sapiens
  misc_RNA (1)...(19): siRNA sense strand
uuagagcucacacaccaua

SEQ ID NO: 302251 - RNA, 19 nt, Homo sapiens
  misc_RNA (1)...(19): siRNA sense strand
gaauucauugagccucuuu

SEQ ID NO: 302252 - RNA, 19 nt, Homo sapiens
  misc_RNA (1)...(19): siRNA sense strand
ccucuuugcugccauuucu

SEQ ID NO: 302253 - RNA, 19 nt, Homo sapiens
  misc_RNA (1)...(19): siRNA sense strand
gcuaugcaaucugguccaa

SEQ ID NO: 302254 - RNA, 19 nt, Homo sapiens
  misc_RNA (1)...(19): siRNA sense strand
ccaggaacuuguaauagcu

SEQ ID NO: 302255 - RNA, 19 nt, Homo sapiens
  misc_RNA (1)...(19): siRNA sense strand
ucucuguucuugggcauuu

SEQ ID NO: 302256 - RNA, 19 nt, Homo sapiens
  misc_RNA (1)...(19): siRNA sense strand
aaccaaagaaugaagaaga

SEQ ID NO: 302257 - RNA, 19 nt, Homo sapiens
  misc_RNA (1)...(19): siRNA sense strand
ucaggaggaugucuucacu

SEQ ID NO: 302258 - RNA, 19 nt, Homo sapiens
  misc_RNA (1)...(19): siRNA sense strand
gugguugggcuaacugaaa

SEQ ID NO: 302259 - RNA, 19 nt, Homo sapiens
  misc_RNA (1)...(19): siRNA sense strand
cggcagagccaaugaaagg

SEQ ID NO: 302260 - RNA, 19 nt, Homo sapiens
  misc_RNA (1)...(19): siRNA sense strand
ccagaaauucaguaaaugg

SEQ ID NO: 302261 - RNA, 19 nt, Homo sapiens
  misc_RNA (1)...(19): siRNA sense strand
gcauacaaucucuguucuu

SEQ ID NO: 302262 - RNA, 19 nt, Homo sapiens
  misc_RNA (1)...(19): siRNA sense strand
ucacacaccauauauuaac

SEQ ID NO: 302263 - RNA, 19 nt, Homo sapiens
  misc_RNA (1)...(19): siRNA sense strand
gggaggcauuauguauauu

SEQ ID NO: 302264 - RNA, 19 nt, Homo sapiens
  misc_RNA (1)...(19): siRNA sense strand
augaaaggcccuauugcua

SEQ ID NO: 302265 - RNA, 19 nt, Homo sapiens
  misc_RNA (1)...(19): siRNA sense strand
agaggaagaagaagaaaca

SEQ ID NO: 302266 - RNA, 19 nt, Homo sapiens
  misc_RNA (1)...(19): siRNA sense strand
aagaagaggaagaagaaga

SEQ ID NO: 302267 - RNA, 19 nt, Homo sapiens
  misc_RNA (1)...(19): siRNA sense strand
aagaagaaacagagacgaa

SEQ ID NO: 302268 - RNA, 19 nt, Homo sapiens
  misc_RNA (1)...(19): siRNA sense strand
uggcaucguugagaaugaa

SEQ ID NO: 302269 - RNA, 19 nt, Homo sapiens
  misc_RNA (1)...(19): siRNA sense strand
aaaaugacagcucuccuua

SEQ ID NO: 302270 - RNA, 19 nt, Homo sapiens
  misc_RNA (1)...(19): siRNA sense strand
agaaacagagacgaacuuu

SEQ ID NO: 302271 - RNA, 19 nt, Homo sapiens
  misc_RNA (1)...(19): siRNA sense strand
caaagaaugaagaagacau

SEQ ID NO: 302272 - RNA, 19 nt, Homo sapiens
  misc_RNA (1)...(19): siRNA sense strand
agagcucacacaccauaua

SEQ ID NO: 302273 - RNA, 19 nt, Homo sapiens
  misc_RNA (1)...(19): siRNA sense strand
aaaugacagcucuccuuaa

SEQ ID NO: 302274 - RNA, 19 nt, Homo sapiens
  misc_RNA (1)...(19): siRNA sense strand
cccagaaauucaguaaaug

SEQ ID NO: 302275 - RNA, 19 nt, Homo sapiens
  misc_RNA (1)...(19): siRNA sense strand
cguugagaaugaauggaaa

SEQ ID NO: 302276 - RNA, 19 nt, Homo sapiens
  misc_RNA (1)...(19): siRNA sense strand
ccaaaucuaacauaguucu

SEQ ID NO: 302277 - RNA, 19 nt, Homo sapiens
  misc_RNA (1)...(19): siRNA sense strand
caacugugaaccagcuaau

SEQ ID NO: 302278 - RNA, 19 nt, Homo sapiens
  misc_RNA (1)...(19): siRNA sense strand
ugggcuaacugaaacaucu

SEQ ID NO: 302279 - RNA, 19 nt, Homo sapiens
  misc_RNA (1)...(19): siRNA sense strand
gaagugguugggcuaacug

SEQ ID NO: 302280 - RNA, 19 nt, Homo sapiens
  misc_RNA (1)...(19): siRNA sense strand
uaugcaaucugguccaaaa

SEQ ID NO: 302281 - RNA, 19 nt, Homo sapiens
  misc_RNA (1)...(19): siRNA sense strand
acacccagaaauucaguaa

SEQ ID NO: 302282 - RNA, 19 nt, Homo sapiens
  misc_RNA (1)...(19): siRNA sense strand
gggcuguccagauuaugaa

SEQ ID NO: 302283 - RNA, 19 nt, Homo sapiens
  misc_RNA (1)...(19): siRNA sense strand
uaauagcuggcaucguuga

SEQ ID NO: 302284 - RNA, 19 nt, Homo sapiens
  misc_RNA (1)...(19): siRNA sense strand
uggagagucugaauuuuau

SEQ ID NO: 302285 - RNA, 19 nt, Homo sapiens
  misc_RNA (1)...(19): siRNA sense strand
gaauccucaccaauagaaa

SEQ ID NO: 302286 - RNA, 19 nt, Homo sapiens
  misc_RNA (1)...(19): siRNA sense strand
cacacaccauauauuaaca

SEQ ID NO: 302287 - RNA, 19 nt, Homo sapiens
  misc_RNA (1)...(19): siRNA sense strand
gccaaugaaaggcccuauu

SEQ ID NO: 302288 - RNA, 19 nt, Homo sapiens
  misc_RNA (1)...(19): siRNA sense strand
ccaaccaaagaaugaagaa

SEQ ID NO: 302289 - RNA, 19 nt, Homo sapiens
  misc_RNA (1)...(19): siRNA sense strand
caaucauggacauacuuaa

SEQ ID NO: 302290 - RNA, 19 nt, Homo sapiens
  misc_RNA (1)...(19): siRNA sense strand
cagacccaaaucuaacaua

SEQ ID NO: 302291 - RNA, 19 nt, Homo sapiens
  misc_RNA (1)...(19): siRNA sense strand
uccaggaacuuguaauagc

SEQ ID NO: 302292 - RNA, 19 nt, Homo sapiens
  misc_RNA (1)...(19): siRNA sense strand
ucuaugcacccaucugugu

SEQ ID NO: 302293 - RNA, 19 nt, Homo sapiens
  misc_RNA (1)...(19): siRNA sense strand
uuauuccaauccaagaaga

SEQ ID NO: 302294 - RNA, 19 nt, Homo sapiens
  misc_RNA (1)...(19): siRNA sense strand
uaacauaguucuccuguca

SEQ ID NO: 302295 - RNA, 19 nt, Homo sapiens
  misc_RNA (1)...(19): siRNA sense strand
gcucacacaccauauauua

SEQ ID NO: 302296 - RNA, 19 nt, Homo sapiens
  misc_RNA (1)...(19): siRNA sense strand
acgcaaagcuucuucauga

SEQ ID NO: 302297 - RNA, 19 nt, Homo sapiens
  misc_RNA (1)...(19): siRNA sense strand
gaaaggcccuauugcuaug

SEQ ID NO: 302298 - RNA, 19 nt, Homo sapiens
  misc_RNA (1)...(19): siRNA sense strand
uguaauagcuggcaucguu

SEQ ID NO: 302299 - RNA, 19 nt, Homo sapiens
  misc_RNA (1)...(19): siRNA sense strand
ggaggcauuauguauauua

SEQ ID NO: 302300 - RNA, 19 nt, Homo sapiens
  misc_RNA (1)...(19): siRNA sense strand
ccaagaagaggaagaagaa

SEQ ID NO: 302301 - RNA, 19 nt, Homo sapiens
  misc_RNA (1)...(19): siRNA sense strand
cauacaaucucuguucuug

SEQ ID NO: 302302 - RNA, 19 nt, Homo sapiens
  misc_RNA (1)...(19): siRNA sense strand
ugaaacaucuucccaacca

SEQ ID NO: 302303 - RNA, 19 nt, Homo sapiens
  misc_RNA (1)...(19): siRNA sense strand
gagaaugaauggaaaagaa

SEQ ID NO: 302304 - RNA, 19 nt, Homo sapiens
  misc_RNA (1)...(19): siRNA sense strand
gagacgaacuuuccagaac

SEQ ID NO: 302305 - RNA, 19 nt, Homo sapiens
  misc_RNA (1)...(19): siRNA sense strand
ggaauccucaccaauagaa

SEQ ID NO: 302306 - RNA, 19 nt, Homo sapiens
  misc_RNA (1)...(19): siRNA sense strand
gagggaaucuaagacuuug

SEQ ID NO: 302307 - RNA, 19 nt, Homo sapiens
  misc_RNA (1)...(19): siRNA sense strand
ugaaugggcucuuccacau

SEQ ID NO: 302308 - RNA, 19 nt, Homo sapiens
  misc_RNA (1)...(19): siRNA sense strand
ugaaaggcccuauugcuau

SEQ ID NO: 302309 - RNA, 19 nt, Homo sapiens
  misc_RNA (1)...(19): siRNA sense strand
gaagaagaagaaacagaga

SEQ ID NO: 302310 - RNA, 19 nt, Homo sapiens
  misc_RNA (1)...(19): siRNA sense strand
acccaaaucuaacauaguu

SEQ ID NO: 302311 - RNA, 19 nt, Homo sapiens
  misc_RNA (1)...(19): siRNA sense strand
gcuccagacccaaaucuaa

SEQ ID NO: 302312 - RNA, 19 nt, Homo sapiens
  misc_RNA (1)...(19): siRNA sense strand
caucuacccaauacuguua

SEQ ID NO: 302313 - RNA, 19 nt, Homo sapiens
  misc_RNA (1)...(19): siRNA sense strand
cagcuaaucccucugagaa

SEQ ID NO: 302314 - RNA, 19 nt, Homo sapiens
  misc_RNA (1)...(19): siRNA sense strand
gaagaagugguugggcuaa

SEQ ID NO: 302315 - RNA, 19 nt, Homo sapiens
  misc_RNA (1)...(19): siRNA sense strand
ucaaucauggacauacuua

SEQ ID NO: 302316 - RNA, 19 nt, Homo sapiens
  misc_RNA (1)...(19): siRNA sense strand
gaaacaucuucccaaccaa

SEQ ID NO: 302317 - RNA, 19 nt, Homo sapiens
  misc_RNA (1)...(19): siRNA sense strand
gagcucacacaccauauau

SEQ ID NO: 302318 - RNA, 19 nt, Homo sapiens
  misc_RNA (1)...(19): siRNA sense strand
acccagaaauucaguaaau

SEQ ID NO: 302319 - RNA, 19 nt, Homo sapiens
  misc_RNA (1)...(19): siRNA sense strand
gcugaucuuugccuucuuc

SEQ ID NO: 302320 - RNA, 19 nt, Homo sapiens
  misc_RNA (1)...(19): siRNA sense strand
ugagggaaucuaagacuuu

SEQ ID NO: 302321 - RNA, 19 nt, Homo sapiens
  misc_RNA (1)...(19): siRNA sense strand
gacaacacccagaaauuca

SEQ ID NO: 302322 - RNA, 19 nt, Homo sapiens
  misc_RNA (1)...(19): siRNA sense strand
gaagaggaagaagaagaaa

SEQ ID NO: 302323 - RNA, 19 nt, Homo sapiens
  misc_RNA (1)...(19): siRNA sense strand
gauuaugaaugggcucuuc

SEQ ID NO: 302324 - RNA, 19 nt, Homo sapiens
  misc_RNA (1)...(19): siRNA sense strand
uagcuggcaucguugagaa

SEQ ID NO: 302325 - RNA, 19 nt, Homo sapiens
  misc_RNA (1)...(19): siRNA sense strand
gagccucuuugcugccauu

SEQ ID NO: 302326 - RNA, 19 nt, Homo sapiens
  misc_RNA (1)...(19): siRNA sense strand
cagcauacaaucucuguuc

SEQ ID NO: 302327 - RNA, 19 nt, Homo sapiens
  misc_RNA (1)...(19): siRNA sense strand
gaucuaugcacccaucugu

SEQ ID NO: 302328 - RNA, 19 nt, Homo sapiens
  misc_RNA (1)...(19): siRNA sense strand
aaacaucuucccaaccaaa

SEQ ID NO: 302329 - RNA, 19 nt, Homo sapiens
  misc_RNA (1)...(19): siRNA sense strand
gcuaaucccucugagaaaa

SEQ ID NO: 302330 - RNA, 19 nt, Homo sapiens
  misc_RNA (1)...(19): siRNA sense strand
guauauuauuuccggauca

SEQ ID NO: 302331 - RNA, 19 nt, Homo sapiens
  misc_RNA (1)...(19): siRNA sense strand
agaagaggaagaagaagaa

SEQ ID NO: 302332 - RNA, 19 nt, Homo sapiens
  misc_RNA (1)...(19): siRNA sense strand
agacccaaaucuaacauag

SEQ ID NO: 302333 - RNA, 19 nt, Homo sapiens
  misc_RNA (1)...(19): siRNA sense strand
gaaaaugacagcucuccuu

SEQ ID NO: 302334 - RNA, 19 nt, Homo sapiens
  misc_RNA (1)...(19): siRNA sense strand
aaacagagacgaacuuucc

SEQ ID NO: 302335 - RNA, 19 nt, Homo sapiens
  misc_RNA (1)...(19): siRNA sense strand
gaagaaacagagacgaacu

SEQ ID NO: 302336 - RNA, 19 nt, Homo sapiens
  misc_RNA (1)...(19): siRNA sense strand
ggggaggcauuauguauau

SEQ ID NO: 302337 - RNA, 19 nt, Homo sapiens
  misc_RNA (1)...(19): siRNA sense strand
uuagagcucacacaccaua

SEQ ID NO: 302338 - RNA, 19 nt, Homo sapiens
  misc_RNA (1)...(19): siRNA sense strand
gaauucauugagccucuuu

SEQ ID NO: 302339 - RNA, 19 nt, Homo sapiens
  misc_RNA (1)...(19): siRNA sense strand
ccucuuugcugccauuucu

SEQ ID NO: 302340 - RNA, 19 nt, Homo sapiens
  misc_RNA (1)...(19): siRNA sense strand
gcuaugcaaucugguccaa

SEQ ID NO: 302341 - RNA, 19 nt, Homo sapiens
  misc_RNA (1)...(19): siRNA sense strand
ccaggaacuuguaauagcu

SEQ ID NO: 302342 - RNA, 19 nt, Homo sapiens
  misc_RNA (1)...(19): siRNA sense strand
ucucuguucuugggcauuu

SEQ ID NO: 302343 - RNA, 19 nt, Homo sapiens
  misc_RNA (1)...(19): siRNA sense strand
aaccaaagaaugaagaaga

SEQ ID NO: 302344 - RNA, 19 nt, Homo sapiens
  misc_RNA (1)...(19): siRNA sense strand
ucaggaggaugucuucacu

SEQ ID NO: 302345 - RNA, 19 nt, Homo sapiens
  misc_RNA (1)...(19): siRNA sense strand
gugguugggcuaacugaaa

SEQ ID NO: 302346 - RNA, 19 nt, Homo sapiens
  misc_RNA (1)...(19): siRNA sense strand
cggcagagccaaugaaagg

SEQ ID NO: 302347 - RNA, 19 nt, Homo sapiens
  misc_RNA (1)...(19): siRNA sense strand
ccagaaauucaguaaaugg

SEQ ID NO: 302348 - RNA, 19 nt, Homo sapiens
  misc_RNA (1)...(19): siRNA sense strand
gcauacaaucucuguucuu

SEQ ID NO: 302349 - RNA, 19 nt, Homo sapiens
  misc_RNA (1)...(19): siRNA sense strand
ucacacaccauauauuaac

SEQ ID NO: 302350 - RNA, 19 nt, Homo sapiens
  misc_RNA (1)...(19): siRNA sense strand
gggaggcauuauguauauu

SEQ ID NO: 302351 - RNA, 19 nt, Homo sapiens
  misc_RNA (1)...(19): siRNA sense strand
augaaaggcccuauugcua

SEQ ID NO: 302352 - RNA, 19 nt, Homo sapiens
  misc_RNA (1)...(19): siRNA sense strand
agaggaagaagaagaaaca

SEQ ID NO: 302353 - RNA, 19 nt, Homo sapiens
  misc_RNA (1)...(19): siRNA sense strand
aagaagaggaagaagaaga

SEQ ID NO: 302354 - RNA, 19 nt, Homo sapiens
  misc_RNA (1)...(19): siRNA sense strand
aagaagaaacagagacgaa

SEQ ID NO: 302355 - RNA, 19 nt, Homo sapiens
  misc_RNA (1)...(19): siRNA sense strand
uggcaucguugagaaugaa

SEQ ID NO: 302356 - RNA, 19 nt, Homo sapiens
  misc_RNA (1)...(19): siRNA sense strand
aaaaugacagcucuccuua

SEQ ID NO: 302357 - RNA, 19 nt, Homo sapiens
  misc_RNA (1)...(19): siRNA sense strand
agaaacagagacgaacuuu

SEQ ID NO: 302358 - RNA, 19 nt, Homo sapiens
  misc_RNA (1)...(19): siRNA sense strand
caaagaaugaagaagacau

SEQ ID NO: 302359 - RNA, 19 nt, Homo sapiens
  misc_RNA (1)...(19): siRNA sense strand
agagcucacacaccauaua

SEQ ID NO: 302360 - RNA, 19 nt, Homo sapiens
  misc_RNA (1)...(19): siRNA sense strand
aaaugacagcucuccuuaa

SEQ ID NO: 302361 - RNA, 19 nt, Homo sapiens
  misc_RNA (1)...(19): siRNA sense strand
cccagaaauucaguaaaug

SEQ ID NO: 302362 - RNA, 19 nt, Homo sapiens
  misc_RNA (1)...(19): siRNA sense strand
cguugagaaugaauggaaa

SEQ ID NO: 302363 - RNA, 19 nt, Homo sapiens
  misc_RNA (1)...(19): siRNA sense strand
ccaaaucuaacauaguucu

SEQ ID NO: 302364 - RNA, 19 nt, Homo sapiens
  misc_RNA (1)...(19): siRNA sense strand
caacugugaaccagcuaau

SEQ ID NO: 302365 - RNA, 19 nt, Homo sapiens
  misc_RNA (1)...(19): siRNA sense strand
ugggcuaacugaaacaucu

SEQ ID NO: 302366 - RNA, 19 nt, Homo sapiens
  misc_RNA (1)...(19): siRNA sense strand
gaagugguugggcuaacug

SEQ ID NO: 302367 - RNA, 19 nt, Homo sapiens
  misc_RNA (1)...(19): siRNA sense strand
uaugcaaucugguccaaaa

SEQ ID NO: 302368 - RNA, 19 nt, Homo sapiens
  misc_RNA (1)...(19): siRNA sense strand
acacccagaaauucaguaa

SEQ ID NO: 302369 - RNA, 19 nt, Homo sapiens
  misc_RNA (1)...(19): siRNA sense strand
gggcuguccagauuaugaa

SEQ ID NO: 302370 - RNA, 19 nt, Homo sapiens
  misc_RNA (1)...(19): siRNA sense strand
uaauagcuggcaucguuga

SEQ ID NO: 302371 - RNA, 19 nt, Homo sapiens
  misc_RNA (1)...(19): siRNA sense strand
uggagagucugaauuuuau

SEQ ID NO: 302372 - RNA, 19 nt, Homo sapiens
  misc_RNA (1)...(19): siRNA sense strand
gaauccucaccaauagaaa

SEQ ID NO: 302373 - RNA, 19 nt, Homo sapiens
  misc_RNA (1)...(19): siRNA sense strand
cacacaccauauauuaaca

SEQ ID NO: 302374 - RNA, 19 nt, Homo sapiens
  misc_RNA (1)...(19): siRNA sense strand
gccaaugaaaggcccuauu

SEQ ID NO: 302375 - RNA, 19 nt, Homo sapiens
  misc_RNA (1)...(19): siRNA sense strand
ccaaccaaagaaugaagaa

SEQ ID NO: 302376 - RNA, 19 nt, Homo sapiens
  misc_RNA (1)...(19): siRNA sense strand
caaucauggacauacuuaa

SEQ ID NO: 302377 - RNA, 19 nt, Homo sapiens
  misc_RNA (1)...(19): siRNA sense strand
cagacccaaaucuaacaua

SEQ ID NO: 302378 - RNA, 19 nt, Homo sapiens
  misc_RNA (1)...(19): siRNA sense strand
uccaggaacuuguaauagc

SEQ ID NO: 302379 - RNA, 19 nt, Homo sapiens
  misc_RNA (1)...(19): siRNA sense strand
ucuaugcacccaucugugu

SEQ ID NO: 302380 - RNA, 19 nt, Homo sapiens
  misc_RNA (1)...(19): siRNA sense strand
uuauuccaauccaagaaga

SEQ ID NO: 302381 - RNA, 19 nt, Homo sapiens
  misc_RNA (1)...(19): siRNA sense strand
guggacaucuggaggauuc

SEQ ID NO: 302382 - RNA, 19 nt, Homo sapiens
  misc_RNA (1)...(19): siRNA sense strand
ggacuuccgccacaccauu

SEQ ID NO: 302383 - RNA, 19 nt, Homo sapiens
  misc_RNA (1)...(19): siRNA sense strand
gcaugcagauccccacaua

SEQ ID NO: 302384 - RNA, 19 nt, Homo sapiens
  misc_RNA (1)...(19): siRNA sense strand
gcaagggcaagaaggagaa

SEQ ID NO: 302385 - RNA, 19 nt, Homo sapiens
  misc_RNA (1)...(19): siRNA sense strand
ccaaggugcccaucuaucu

SEQ ID NO: 302386 - RNA, 19 nt, Homo sapiens
  misc_RNA (1)...(19): siRNA sense strand
ggaggggccugaagaagau

SEQ ID NO: 302387 - RNA, 19 nt, Homo sapiens
  misc_RNA (1)...(19): siRNA sense strand
gagggaguguggacaucug

SEQ ID NO: 302388 - RNA, 19 nt, Homo sapiens
  misc_RNA (1)...(19): siRNA sense strand
uggaugauguccugcagau

SEQ ID NO: 302389 - RNA, 19 nt, Homo sapiens
  misc_RNA (1)...(19): siRNA sense strand
ccaucucccucccgguuau

SEQ ID NO: 302390 - RNA, 19 nt, Homo sapiens
  misc_RNA (1)...(19): siRNA sense strand
gggagggaguguggacauc

SEQ ID NO: 302391 - RNA, 19 nt, Homo sapiens
  misc_RNA (1)...(19): siRNA sense strand
gccaucucccucccgguua

SEQ ID NO: 302392 - RNA, 19 nt, Homo sapiens
  misc_RNA (1)...(19): siRNA sense strand
caaggugcccaucuaucug

SEQ ID NO: 302393 - RNA, 19 nt, Homo sapiens
  misc_RNA (1)...(19): siRNA sense strand
caaaggagaugauggugaa

SEQ ID NO: 302394 - RNA, 19 nt, Homo sapiens
  misc_RNA (1)...(19): siRNA sense strand
gaaaggaauuaaaggagaa

SEQ ID NO: 302395 - RNA, 19 nt, Homo sapiens
  misc_RNA (1)...(19): siRNA sense strand
gaagauaccggaaauuugu

SEQ ID NO: 302396 - RNA, 19 nt, Homo sapiens
  misc_RNA (1)...(19): siRNA sense strand
caagacaucuaugaaguuu

SEQ ID NO: 302397 - RNA, 19 nt, Homo sapiens
  misc_RNA (1)...(19): siRNA sense strand
gagaagaacuacagggaau

SEQ ID NO: 302398 - RNA, 19 nt, Homo sapiens
  misc_RNA (1)...(19): siRNA sense strand
ggaugaagcugccaacaca

SEQ ID NO: 302399 - RNA, 19 nt, Homo sapiens
  misc_RNA (1)...(19): siRNA sense strand
ggacaacuggauauuagua

SEQ ID NO: 302400 - RNA, 19 nt, Homo sapiens
  misc_RNA (1)...(19): siRNA sense strand
gacacagagugccaucuua

SEQ ID NO: 302401 - RNA, 19 nt, Homo sapiens
  misc_RNA (1)...(19): siRNA sense strand
gacaguacauguucacaga

SEQ ID NO: 302402 - RNA, 19 nt, Homo sapiens
  misc_RNA (1)...(19): siRNA sense strand
uagggaaacugaagagaaa

SEQ ID NO: 302403 - RNA, 19 nt, Homo sapiens
  misc_RNA (1)...(19): siRNA sense strand
caaagcagguacugucugu

SEQ ID NO: 302404 - RNA, 19 nt, Homo sapiens
  misc_RNA (1)...(19): siRNA sense strand
ggaagauaccggaaauuug

SEQ ID NO: 302405 - RNA, 19 nt, Homo sapiens
  misc_RNA (1)...(19): siRNA sense strand
gggaaagcauggcaaagug

SEQ ID NO: 302406 - RNA, 19 nt, Homo sapiens
  misc_RNA (1)...(19): siRNA sense strand
agacaucuaugaaguuugu

SEQ ID NO: 302407 - RNA, 19 nt, Homo sapiens
  misc_RNA (1)...(19): siRNA sense strand
acucaucgcugacuauguu

SEQ ID NO: 302408 - RNA, 19 nt, Homo sapiens
  misc_RNA (1)...(19): siRNA sense strand
acacuccacugcagaacua

SEQ ID NO: 302409 - RNA, 19 nt, Homo sapiens
  misc_RNA (1)...(19): siRNA sense strand
cuaugaaguuugucaagaa

SEQ ID NO: 302410 - RNA, 19 nt, Homo sapiens
  misc_RNA (1)...(19): siRNA sense strand
gcagauggaaugacacaga

SEQ ID NO: 302411 - RNA, 19 nt, Homo sapiens
  misc_RNA (1)...(19): siRNA sense strand
ggaagaagggugacaaagg

SEQ ID NO: 302412 - RNA, 19 nt, Homo sapiens
  misc_RNA (1)...(19): siRNA sense strand
ccauguacuuugucuguga

SEQ ID NO: 302413 - RNA, 19 nt, Homo sapiens
  misc_RNA (1)...(19): siRNA sense strand
caacuggauauuaguauug

SEQ ID NO: 302414 - RNA, 19 nt, Homo sapiens
  misc_RNA (1)...(19): siRNA sense strand
ugaaguuugucaagaaugu

SEQ ID NO: 302415 - RNA, 19 nt, Homo sapiens
  misc_RNA (1)...(19): siRNA sense strand
aaggagaacugggugauau

SEQ ID NO: 302416 - RNA, 19 nt, Homo sapiens
  misc_RNA (1)...(19): siRNA sense strand
ucugugaguucaucaagaa

SEQ ID NO: 302417 - RNA, 19 nt, Homo sapiens
  misc_RNA (1)...(19): siRNA sense strand
caucuuaccauguacuuug

SEQ ID NO: 302418 - RNA, 19 nt, Homo sapiens
  misc_RNA (1)...(19): siRNA sense strand
aaaaggagauccaggagaa

SEQ ID NO: 302419 - RNA, 19 nt, Homo sapiens
  misc_RNA (1)...(19): siRNA sense strand
gcagguacugucugugauu

SEQ ID NO: 302420 - RNA, 19 nt, Homo sapiens
  misc_RNA (1)...(19): siRNA sense strand
gugaguucaucaagaagaa

SEQ ID NO: 302421 - RNA, 19 nt, Homo sapiens
  misc_RNA (1)...(19): siRNA sense strand
ggagggacaguacauguuc

SEQ ID NO: 302422 - RNA, 19 nt, Homo sapiens
  misc_RNA (1)...(19): siRNA sense strand
uggaagauaccggaaauuu

SEQ ID NO: 302423 - RNA, 19 nt, Homo sapiens
  misc_RNA (1)...(19): siRNA sense strand
gggaaacugaagagaaauu

SEQ ID NO: 302424 - RNA, 19 nt, Homo sapiens
  misc_RNA (1)...(19): siRNA sense strand
cuucgaagaaaccaauuua

SEQ ID NO: 302425 - RNA, 19 nt, Homo sapiens
  misc_RNA (1)...(19): siRNA sense strand
cauccuugcuucgaagaaa

SEQ ID NO: 302426 - RNA, 19 nt, Homo sapiens
  misc_RNA (1)...(19): siRNA sense strand
gaagaaaccaauuuauccu

SEQ ID NO: 302427 - RNA, 19 nt, Homo sapiens
  misc_RNA (1)...(19): siRNA sense strand
gcucaagacaucuaugaag

SEQ ID NO: 302428 - RNA, 19 nt, Homo sapiens
  misc_RNA (1)...(19): siRNA sense strand
ucuaugaaguuugucaaga

SEQ ID NO: 302429 - RNA, 19 nt, Homo sapiens
  misc_RNA (1)...(19): siRNA sense strand
ucaagacaucuaugaaguu

SEQ ID NO: 302430 - RNA, 19 nt, Homo sapiens
  misc_RNA (1)...(19): siRNA sense strand
ggaaacugaagagaaauuc

SEQ ID NO: 302431 - RNA, 19 nt, Homo sapiens
  misc_RNA (1)...(19): siRNA sense strand
gagggacaguacauguuca

SEQ ID NO: 302432 - RNA, 19 nt, Homo sapiens
  misc_RNA (1)...(19): siRNA sense strand
cgaagaaaccaauuuaucc

SEQ ID NO: 302433 - RNA, 19 nt, Homo sapiens
  misc_RNA (1)...(19): siRNA sense strand
gaaagggagggacaguaca

SEQ ID NO: 302434 - RNA, 19 nt, Homo sapiens
  misc_RNA (1)...(19): siRNA sense strand
gaacuauagcaacuggaau

SEQ ID NO: 302435 - RNA, 19 nt, Homo sapiens
  misc_RNA (1)...(19): siRNA sense strand
ggagaucggggcaauauug

SEQ ID NO: 302436 - RNA, 19 nt, Homo sapiens
  misc_RNA (1)...(19): siRNA sense strand
acacacucaucgcugacua

SEQ ID NO: 302437 - RNA, 19 nt, Homo sapiens
  misc_RNA (1)...(19): siRNA sense strand
cuaacccacugcaggauuc

SEQ ID NO: 302438 - RNA, 19 nt, Homo sapiens
  misc_RNA (1)...(19): siRNA sense strand
gagucugggucuggauauu

SEQ ID NO: 302439 - RNA, 19 nt, Homo sapiens
  misc_RNA (1)...(19): siRNA sense strand
uuggacaacuggauauuag

SEQ ID NO: 302440 - RNA, 19 nt, Homo sapiens
  misc_RNA (1)...(19): siRNA sense strand
gguacugucugugauugug

SEQ ID NO: 302441 - RNA, 19 nt, Homo sapiens
  misc_RNA (1)...(19): siRNA sense strand
ugucugugauuguggaaga

SEQ ID NO: 302442 - RNA, 19 nt, Homo sapiens
  misc_RNA (1)...(19): siRNA sense strand
guacuuugucugugaguuc

SEQ ID NO: 302443 - RNA, 19 nt, Homo sapiens
  misc_RNA (1)...(19): siRNA sense strand
gucugggucuggauauuga

SEQ ID NO: 302444 - RNA, 19 nt, Homo sapiens
  misc_RNA (1)...(19): siRNA sense strand
gggagggacaguacauguu

SEQ ID NO: 302445 - RNA, 19 nt, Homo sapiens
  misc_RNA (1)...(19): siRNA sense strand
cagguacugucugugauug

SEQ ID NO: 302446 - RNA, 19 nt, Homo sapiens
  misc_RNA (1)...(19): siRNA sense strand
agugccaucuuaccaugua

SEQ ID NO: 302447 - RNA, 19 nt, Homo sapiens
  misc_RNA (1)...(19): siRNA sense strand
ugacacagagugccaucuu

SEQ ID NO: 302448 - RNA, 19 nt, Homo sapiens
  misc_RNA (1)...(19): siRNA sense strand
ucgaagaaaccaauuuauc

SEQ ID NO: 302449 - RNA, 19 nt, Homo sapiens
  misc_RNA (1)...(19): siRNA sense strand
caguacauguucacagaca

SEQ ID NO: 302450 - RNA, 19 nt, Homo sapiens
  misc_RNA (1)...(19): siRNA sense strand
uggcgugaaugaccuugaa

SEQ ID NO: 302451 - RNA, 19 nt, Homo sapiens
  misc_RNA (1)...(19): siRNA sense strand
gauauugauagccguccua

SEQ ID NO: 302452 - RNA, 19 nt, Homo sapiens
  misc_RNA (1)...(19): siRNA sense strand
cucaagacaucuaugaagu

SEQ ID NO: 302453 - RNA, 19 nt, Homo sapiens
  misc_RNA (1)...(19): siRNA sense strand
uguggaagauaccggaaau

SEQ ID NO: 302454 - RNA, 19 nt, Homo sapiens
  misc_RNA (1)...(19): siRNA sense strand
aaaggagaacugggugaua

SEQ ID NO: 302455 - RNA, 19 nt, Homo sapiens
  misc_RNA (1)...(19): siRNA sense strand
ccaauuuauccuccuggua

SEQ ID NO: 302456 - RNA, 19 nt, Homo sapiens
  misc_RNA (1)...(19): siRNA sense strand
cugcagaacuauagcaacu

SEQ ID NO: 302457 - RNA, 19 nt, Homo sapiens
  misc_RNA (1)...(19): siRNA sense strand
ugacuauguugccaagagu

SEQ ID NO: 302458 - RNA, 19 nt, Homo sapiens
  misc_RNA (1)...(19): siRNA sense strand
gaagcugccaacacacuca

SEQ ID NO: 302459 - RNA, 19 nt, Homo sapiens
  misc_RNA (1)...(19): siRNA sense strand
gacaacuggauauuaguau

SEQ ID NO: 302460 - RNA, 19 nt, Homo sapiens
  misc_RNA (1)...(19): siRNA sense strand
aagcagguacugucuguga

SEQ ID NO: 302461 - RNA, 19 nt, Homo sapiens
  misc_RNA (1)...(19): siRNA sense strand
uggcaagacugggcccauu

SEQ ID NO: 302462 - RNA, 19 nt, Homo sapiens
  misc_RNA (1)...(19): siRNA sense strand
gccgaaaggaauuaaagga

SEQ ID NO: 302463 - RNA, 19 nt, Homo sapiens
  misc_RNA (1)...(19): siRNA sense strand
uuagggaaacugaagagaa

SEQ ID NO: 302464 - RNA, 19 nt, Homo sapiens
  misc_RNA (1)...(19): siRNA sense strand
ggauuagggaaacugaaga

SEQ ID NO: 302465 - RNA, 19 nt, Homo sapiens
  misc_RNA (1)...(19): siRNA sense strand
gaaugugauagcagggauu

SEQ ID NO: 302466 - RNA, 19 nt, Homo sapiens
  misc_RNA (1)...(19): siRNA sense strand
ugaaagggagggacaguac

SEQ ID NO: 302467 - RNA, 19 nt, Homo sapiens
  misc_RNA (1)...(19): siRNA sense strand
gcaagacugggcccauugg

SEQ ID NO: 302468 - RNA, 19 nt, Homo sapiens
  misc_RNA (1)...(19): siRNA sense strand
gggauuagggaaacugaag

SEQ ID NO: 302469 - RNA, 19 nt, Homo sapiens
  misc_RNA (1)...(19): siRNA sense strand
uagcagggauuagggaaac

SEQ ID NO: 302470 - RNA, 19 nt, Homo sapiens
  misc_RNA (1)...(19): siRNA sense strand
ggagaacugggugauaugg

SEQ ID NO: 302471 - RNA, 19 nt, Homo sapiens
  misc_RNA (1)...(19): siRNA sense strand
ugaggacuguguggagaug

SEQ ID NO: 302472 - RNA, 19 nt, Homo sapiens
  misc_RNA (1)...(19): siRNA sense strand
aaugugauagcagggauua

SEQ ID NO: 302473 - RNA, 19 nt, Homo sapiens
  misc_RNA (1)...(19): siRNA sense strand
cggcucaagacaucuauga

SEQ ID NO: 302474 - RNA, 19 nt, Homo sapiens
  misc_RNA (1)...(19): siRNA sense strand
ggcaagacugggcccauug

SEQ ID NO: 302475 - RNA, 19 nt, Homo sapiens
  misc_RNA (1)...(19): siRNA sense strand
agaacuauagcaacuggaa

SEQ ID NO: 302476 - RNA, 19 nt, Homo sapiens
  misc_RNA (1)...(19): siRNA sense strand
uagccaugcccaaggauga

SEQ ID NO: 302477 - RNA, 19 nt, Homo sapiens
  misc_RNA (1)...(19): siRNA sense strand
ugucaagaaugugauagca

SEQ ID NO: 302478 - RNA, 19 nt, Homo sapiens
  misc_RNA (1)...(19): siRNA sense strand
gggccgaaaggaauuaaag

SEQ ID NO: 302479 - RNA, 19 nt, Homo sapiens
  misc_RNA (1)...(19): siRNA sense strand
gcuucgaagaaaccaauuu

SEQ ID NO: 302480 - RNA, 19 nt, Homo sapiens
  misc_RNA (1)...(19): siRNA sense strand
gggcaauauuggcaagacu

SEQ ID NO: 302481 - RNA, 19 nt, Homo sapiens
  misc_RNA (1)...(19): siRNA sense strand
uaccauguacuuugucugu

SEQ ID NO: 302482 - RNA, 19 nt, Homo sapiens
  misc_RNA (1)...(19): siRNA sense strand
gcaggaagagaagaacuac

SEQ ID NO: 302483 - RNA, 19 nt, Homo sapiens
  misc_RNA (1)...(19): siRNA sense strand
uaaaggagaacugggugau

SEQ ID NO: 302484 - RNA, 19 nt, Homo sapiens
  misc_RNA (1)...(19): siRNA sense strand
guacaaacccuucaucuuc

SEQ ID NO: 302485 - RNA, 19 nt, Homo sapiens
  misc_RNA (1)...(19): siRNA sense strand
gaaggcagcucccacaucu

SEQ ID NO: 302486 - RNA, 19 nt, Homo sapiens
  misc_RNA (1)...(19): siRNA sense strand
ccaaggagcugcuggaaca

SEQ ID NO: 302487 - RNA, 19 nt, Homo sapiens
  misc_RNA (1)...(19): siRNA sense strand
gacacacgcucuacuggua

SEQ ID NO: 302488 - RNA, 19 nt, Homo sapiens
  misc_RNA (1)...(19): siRNA sense strand
ccggaaagguggcaacuug

SEQ ID NO: 302489 - RNA, 19 nt, Homo sapiens
  misc_RNA (1)...(19): siRNA sense strand
gagacgagguuguccagau

SEQ ID NO: 302490 - RNA, 19 nt, Homo sapiens
  misc_RNA (1)...(19): siRNA sense strand
ugacagaucugagcaugug

SEQ ID NO: 302491 - RNA, 19 nt, Homo sapiens
  misc_RNA (1)...(19): siRNA sense strand
gacaugaucagaagaagaa

SEQ ID NO: 302492 - RNA, 19 nt, Homo sapiens
  misc_RNA (1)...(19): siRNA sense strand
gcugggaucugccacaaca

SEQ ID NO: 302493 - RNA, 19 nt, Homo sapiens
  misc_RNA (1)...(19): siRNA sense strand
gcaauugccagcacuuugu

SEQ ID NO: 302494 - RNA, 19 nt, Homo sapiens
  misc_RNA (1)...(19): siRNA sense strand
gcuuagugcugaagaagau

SEQ ID NO: 302495 - RNA, 19 nt, Homo sapiens
  misc_RNA (1)...(19): siRNA sense strand
gaaaguggacaugaucaga

SEQ ID NO: 302496 - RNA, 19 nt, Homo sapiens
  misc_RNA (1)...(19): siRNA sense strand
gaucagaagaagaaauaug

SEQ ID NO: 302497 - RNA, 19 nt, Homo sapiens
  misc_RNA (1)...(19): siRNA sense strand
gcuccaggcuacagacaga

SEQ ID NO: 302498 - RNA, 19 nt, Homo sapiens
  misc_RNA (1)...(19): siRNA sense strand
uuaccugcaucuccaagua

SEQ ID NO: 302499 - RNA, 19 nt, Homo sapiens
  misc_RNA (1)...(19): siRNA sense strand
cagaggagcccaucacugu

SEQ ID NO: 302500 - RNA, 19 nt, Homo sapiens
  misc_RNA (1)...(19): siRNA sense strand
ggagauccgagacuuguug

SEQ ID NO: 302501 - RNA, 19 nt, Homo sapiens
  misc_RNA (1)...(19): siRNA sense strand
cagaggacccggacgauga

SEQ ID NO: 302502 - RNA, 19 nt, Homo sapiens
  misc_RNA (1)...(19): siRNA sense strand
ucaucaaugucuccaacua

SEQ ID NO: 302503 - RNA, 19 nt, Homo sapiens
  misc_RNA (1)...(19): siRNA sense strand
guaccucuucucccacuua

SEQ ID NO: 302504 - RNA, 19 nt, Homo sapiens
  misc_RNA (1)...(19): siRNA sense strand
ugagccaggucuugcauga

SEQ ID NO: 302505 - RNA, 19 nt, Homo sapiens
  misc_RNA (1)...(19): siRNA sense strand
gaacaguggcggagcucuu

SEQ ID NO: 302506 - RNA, 19 nt, Homo sapiens
  misc_RNA (1)...(19): siRNA sense strand
gcugauacccugacagauc

SEQ ID NO: 302507 - RNA, 19 nt, Homo sapiens
  misc_RNA (1)...(19): siRNA sense strand
ggacaugaucagaagaaga

SEQ ID NO: 302508 - RNA, 19 nt, Homo sapiens
  misc_RNA (1)...(19): siRNA sense strand
cuguggagcuguugcauga

SEQ ID NO: 302509 - RNA, 19 nt, Homo sapiens
  misc_RNA (1)...(19): siRNA sense strand
gaagaggcacuggaaggaa

SEQ ID NO: 302510 - RNA, 19 nt, Homo sapiens
  misc_RNA (1)...(19): siRNA sense strand
acacccagguucccacuga

SEQ ID NO: 302511 - RNA, 19 nt, Homo sapiens
  misc_RNA (1)...(19): siRNA sense strand
gcaggacuaucccuuugag

SEQ ID NO: 302512 - RNA, 19 nt, Homo sapiens
  misc_RNA (1)...(19): siRNA sense strand
aucaaugucuccaacuaua

SEQ ID NO: 302513 - RNA, 19 nt, Homo sapiens
  misc_RNA (1)...(19): siRNA sense strand
uguuucagcucacccauga

SEQ ID NO: 302514 - RNA, 19 nt, Homo sapiens
  misc_RNA (1)...(19): siRNA sense strand
ugacaagaguccuguuggu

SEQ ID NO: 302515 - RNA, 19 nt, Homo sapiens
  misc_RNA (1)...(19): siRNA sense strand
caacuauagucuggaaagu

SEQ ID NO: 302516 - RNA, 19 nt, Homo sapiens
  misc_RNA (1)...(19): siRNA sense strand
gcucacccaugauguguac

SEQ ID NO: 302517 - RNA, 19 nt, Homo sapiens
  misc_RNA (1)...(19): siRNA sense strand
gguggcaacuuggcugaga

SEQ ID NO: 302518 - RNA, 19 nt, Homo sapiens
  misc_RNA (1)...(19): siRNA sense strand
agagcacacucaaggcaaa

SEQ ID NO: 302519 - RNA, 19 nt, Homo sapiens
  misc_RNA (1)...(19): siRNA sense strand
gugggugcgucaucucauu

SEQ ID NO: 302520 - RNA, 19 nt, Homo sapiens
  misc_RNA (1)...(19): siRNA sense strand
ccucuucucccacuuaaau

SEQ ID NO: 302521 - RNA, 19 nt, Homo sapiens
  misc_RNA (1)...(19): siRNA sense strand
gagacccucagcucaauga

SEQ ID NO: 302522 - RNA, 19 nt, Homo sapiens
  misc_RNA (1)...(19): siRNA sense strand
ugaagaagaucccgauacc

SEQ ID NO: 302523 - RNA, 19 nt, Homo sapiens
  misc_RNA (1)...(19): siRNA sense strand
gccaggagauccgagacuu

SEQ ID NO: 302524 - RNA, 19 nt, Homo sapiens
  misc_RNA (1)...(19): siRNA sense strand
aagaggcacuggaaggaau

SEQ ID NO: 302525 - RNA, 19 nt, Homo sapiens
  misc_RNA (1)...(19): siRNA sense strand
agacgagguuguccagauc

SEQ ID NO: 302526 - RNA, 19 nt, Homo sapiens
  misc_RNA (1)...(19): siRNA sense strand
cugcaggacuaucccuuug

SEQ ID NO: 302527 - RNA, 19 nt, Homo sapiens
  misc_RNA (1)...(19): siRNA sense strand
aaaguggacaugaucagaa

SEQ ID NO: 302528 - RNA, 19 nt, Homo sapiens
  misc_RNA (1)...(19): siRNA sense strand
caucaaugucuccaacuau

SEQ ID NO: 302529 - RNA, 19 nt, Homo sapiens
  misc_RNA (1)...(19): siRNA sense strand
accgggagcuguacucaga

SEQ ID NO: 302530 - RNA, 19 nt, Homo sapiens
  misc_RNA (1)...(19): siRNA sense strand
cagaagaagaaauaugugu

SEQ ID NO: 302531 - RNA, 19 nt, Homo sapiens
  misc_RNA (1)...(19): siRNA sense strand
agacagagaaccugcaaag

SEQ ID NO: 302532 - RNA, 19 nt, Homo sapiens
  misc_RNA (1)...(19): siRNA sense strand
ccauugggccuagaaauuc

SEQ ID NO: 302533 - RNA, 19 nt, Homo sapiens
  misc_RNA (1)...(19): siRNA sense strand
cauugggccuagaaauuca

SEQ ID NO: 302534 - RNA, 19 nt, Homo sapiens
  misc_RNA (1)...(19): siRNA sense strand
gaaccgggagcuguacuca

SEQ ID NO: 302535 - RNA, 19 nt, Homo sapiens
  misc_RNA (1)...(19): siRNA sense strand
gcaugugggugcgucaucu

SEQ ID NO: 302536 - RNA, 19 nt, Homo sapiens
  misc_RNA (1)...(19): siRNA sense strand
caucuucgcugcugauacc

SEQ ID NO: 302537 - RNA, 19 nt, Homo sapiens
  misc_RNA (1)...(19): siRNA sense strand
ccaaguggacacccagguu

SEQ ID NO: 302538 - RNA, 19 nt, Homo sapiens
  misc_RNA (1)...(19): siRNA sense strand
guggagcuguugcaugaag

SEQ ID NO: 302539 - RNA, 19 nt, Homo sapiens
  misc_RNA (1)...(19): siRNA sense strand
gcuggcuccuguugcgaaa

SEQ ID NO: 302540 - RNA, 19 nt, Homo sapiens
  misc_RNA (1)...(19): siRNA sense strand
gcucagcagguaccucuuc

SEQ ID NO: 302541 - RNA, 19 nt, Homo sapiens
  misc_RNA (1)...(19): siRNA sense strand
uaccucuucucccacuuaa

SEQ ID NO: 302542 - RNA, 19 nt, Homo sapiens
  misc_RNA (1)...(19): siRNA sense strand
gcugaagaagaucccgaua

SEQ ID NO: 302543 - RNA, 19 nt, Homo sapiens
  misc_RNA (1)...(19): siRNA sense strand
ggagcugcagguccuagaa

SEQ ID NO: 302544 - RNA, 19 nt, Homo sapiens
  misc_RNA (1)...(19): siRNA sense strand
ugacagacagcagugaaga

SEQ ID NO: 302545 - RNA, 19 nt, Homo sapiens
  misc_RNA (1)...(19): siRNA sense strand
uccauugggccuagaaauu

SEQ ID NO: 302546 - RNA, 19 nt, Homo sapiens
  misc_RNA (1)...(19): siRNA sense strand
aggcagcucccacaucuug

SEQ ID NO: 302547 - RNA, 19 nt, Homo sapiens
  misc_RNA (1)...(19): siRNA sense strand
cugauacccugacagaucu

SEQ ID NO: 302548 - RNA, 19 nt, Homo sapiens
  misc_RNA (1)...(19): siRNA sense strand
ucaagggacacacgcucua

SEQ ID NO: 302549 - RNA, 19 nt, Homo sapiens
  misc_RNA (1)...(19): siRNA sense strand
gaggagcccaucacugucu

SEQ ID NO: 302550 - RNA, 19 nt, Homo sapiens
  misc_RNA (1)...(19): siRNA sense strand
gaacauggugagggaacug

SEQ ID NO: 302551 - RNA, 19 nt, Homo sapiens
  misc_RNA (1)...(19): siRNA sense strand
ucuggaaaguggacaugau

SEQ ID NO: 302552 - RNA, 19 nt, Homo sapiens
  misc_RNA (1)...(19): siRNA sense strand
ccgagacccucagcucaau

SEQ ID NO: 302553 - RNA, 19 nt, Homo sapiens
  misc_RNA (1)...(19): siRNA sense strand
ugaagaggcacuggaagga

SEQ ID NO: 302554 - RNA, 19 nt, Homo sapiens
  misc_RNA (1)...(19): siRNA sense strand
acgacucccugcaggacua

SEQ ID NO: 302555 - RNA, 19 nt, Homo sapiens
  misc_RNA (1)...(19): siRNA sense strand
guggacaugaucagaagaa

SEQ ID NO: 302556 - RNA, 19 nt, Homo sapiens
  misc_RNA (1)...(19): siRNA sense strand
ggaaaguggacaugaucag

SEQ ID NO: 302557 - RNA, 19 nt, Homo sapiens
  misc_RNA (1)...(19): siRNA sense strand
gccagccggacucagcuua

SEQ ID NO: 302558 - RNA, 19 nt, Homo sapiens
  misc_RNA (1)...(19): siRNA sense strand
gcagguccuagaagaagug

SEQ ID NO: 302559 - RNA, 19 nt, Homo sapiens
  misc_RNA (1)...(19): siRNA sense strand
caaugucuccaacuauagu

SEQ ID NO: 302560 - RNA, 19 nt, Homo sapiens
  misc_RNA (1)...(19): siRNA sense strand
cagcaauugccagcacuuu

SEQ ID NO: 302561 - RNA, 19 nt, Homo sapiens
  misc_RNA (1)...(19): siRNA sense strand
cugaagagcacucccaucu

SEQ ID NO: 302562 - RNA, 19 nt, Homo sapiens
  misc_RNA (1)...(19): siRNA sense strand
ggcacuggaaggaauggua

SEQ ID NO: 302563 - RNA, 19 nt, Homo sapiens
  misc_RNA (1)...(19): siRNA sense strand
ccaacuauagucuggaaag

SEQ ID NO: 302564 - RNA, 19 nt, Homo sapiens
  misc_RNA (1)...(19): siRNA sense strand
aggagcugcuggaacagaa

SEQ ID NO: 302565 - RNA, 19 nt, Homo sapiens
  misc_RNA (1)...(19): siRNA sense strand
caggagauccgagacuugu

SEQ ID NO: 302566 - RNA, 19 nt, Homo sapiens
  misc_RNA (1)...(19): siRNA sense strand
uguacaaacccuucaucuu

SEQ ID NO: 302567 - RNA, 19 nt, Homo sapiens
  misc_RNA (1)...(19): siRNA sense strand
ccaggagauccgagacuug

SEQ ID NO: 302568 - RNA, 19 nt, Homo sapiens
  misc_RNA (1)...(19): siRNA sense strand
ugacggcuggcuccuguug

SEQ ID NO: 302569 - RNA, 19 nt, Homo sapiens
  misc_RNA (1)...(19): siRNA sense strand
gcugcagguccuagaagaa

SEQ ID NO: 302570 - RNA, 19 nt, Homo sapiens
  misc_RNA (1)...(19): siRNA sense strand
ggaccuccuuuggcucucu

SEQ ID NO: 302571 - RNA, 19 nt, Homo sapiens
  misc_RNA (1)...(19): siRNA sense strand
gaaccugcaaagccugaca

SEQ ID NO: 302572 - RNA, 19 nt, Homo sapiens
  misc_RNA (1)...(19): siRNA sense strand
gccaagaccccuauugaug

SEQ ID NO: 302573 - RNA, 19 nt, Homo sapiens
  misc_RNA (1)...(19): siRNA sense strand
ggaaugagccagauguuua

SEQ ID NO: 302574 - RNA, 19 nt, Homo sapiens
  misc_RNA (1)...(19): siRNA sense strand
gcauaaagccucuguagaa

SEQ ID NO: 302575 - RNA, 19 nt, Homo sapiens
  misc_RNA (1)...(19): siRNA sense strand
ggagacagcuguacguugu

SEQ ID NO: 302576 - RNA, 19 nt, Homo sapiens
  misc_RNA (1)...(19): siRNA sense strand
ggacaaagggacuugauuu

SEQ ID NO: 302577 - RNA, 19 nt, Homo sapiens
  misc_RNA (1)...(19): siRNA sense strand
uccaagagcugacaacuga

SEQ ID NO: 302578 - RNA, 19 nt, Homo sapiens
  misc_RNA (1)...(19): siRNA sense strand
ugaagaagcugggaaagug

SEQ ID NO: 302579 - RNA, 19 nt, Homo sapiens
  misc_RNA (1)...(19): siRNA sense strand
uaaagccucuguagaagau

SEQ ID NO: 302580 - RNA, 19 nt, Homo sapiens
  misc_RNA (1)...(19): siRNA sense strand
ggacuugauuucucagauc

SEQ ID NO: 302581 - RNA, 19 nt, Homo sapiens
  misc_RNA (1)...(19): siRNA sense strand
gcaaggugcaccagcuaua

SEQ ID NO: 302582 - RNA, 19 nt, Homo sapiens
  misc_RNA (1)...(19): siRNA sense strand
caaagggacuugauuucuc

SEQ ID NO: 302583 - RNA, 19 nt, Homo sapiens
  misc_RNA (1)...(19): siRNA sense strand
gauaugaaucuggagaaua

SEQ ID NO: 302584 - RNA, 19 nt, Homo sapiens
  misc_RNA (1)...(19): siRNA sense strand
gaagaugcagauacacaaa

SEQ ID NO: 302585 - RNA, 19 nt, Homo sapiens
  misc_RNA (1)...(19): siRNA sense strand
ccagauagcagccuuguca

SEQ ID NO: 302586 - RNA, 19 nt, Homo sapiens
  misc_RNA (1)...(19): siRNA sense strand
gaacgagauugccaagcau

SEQ ID NO: 302587 - RNA, 19 nt, Homo sapiens
  misc_RNA (1)...(19): siRNA sense strand
gacaauaccacccucuuga

SEQ ID NO: 302588 - RNA, 19 nt, Homo sapiens
  misc_RNA (1)...(19): siRNA sense strand
ggacaauaccacccucuug

SEQ ID NO: 302589 - RNA, 19 nt, Homo sapiens
  misc_RNA (1)...(19): siRNA sense strand
auagcagccuugucacuua

SEQ ID NO: 302590 - RNA, 19 nt, Homo sapiens
  misc_RNA (1)...(19): siRNA sense strand
gaaugagccagauguuuau

SEQ ID NO: 302591 - RNA, 19 nt, Homo sapiens
  misc_RNA (1)...(19): siRNA sense strand
gaagaagcugggaaaguga

SEQ ID NO: 302592 - RNA, 19 nt, Homo sapiens
  misc_RNA (1)...(19): siRNA sense strand
caagaggacaggauaugaa

SEQ ID NO: 302593 - RNA, 19 nt, Homo sapiens
  misc_RNA (1)...(19): siRNA sense strand
gaacuuugccagcauugau

SEQ ID NO: 302594 - RNA, 19 nt, Homo sapiens
  misc_RNA (1)...(19): siRNA sense strand
ugaacgagauugccaagca

SEQ ID NO: 302595 - RNA, 19 nt, Homo sapiens
  misc_RNA (1)...(19): siRNA sense strand
aaagggacuugauuucuca

SEQ ID NO: 302596 - RNA, 19 nt, Homo sapiens
  misc_RNA (1)...(19): siRNA sense strand
gagcaagccaugcaguuug

SEQ ID NO: 302597 - RNA, 19 nt, Homo sapiens
  misc_RNA (1)...(19): siRNA sense strand
ggauaugaaucuggagaau

SEQ ID NO: 302598 - RNA, 19 nt, Homo sapiens
  misc_RNA (1)...(19): siRNA sense strand
aaaccaagaggacaggaua

SEQ ID NO: 302599 - RNA, 19 nt, Homo sapiens
  misc_RNA (1)...(19): siRNA sense strand
ccuugucacuuaugaacua

SEQ ID NO: 302600 - RNA, 19 nt, Homo sapiens
  misc_RNA (1)...(19): siRNA sense strand
gagagggucugggagugaa

SEQ ID NO: 302601 - RNA, 19 nt, Homo sapiens
  misc_RNA (1)...(19): siRNA sense strand
ugagccagauguuuaugaa

SEQ ID NO: 302602 - RNA, 19 nt, Homo sapiens
  misc_RNA (1)...(19): siRNA sense strand
gcagccuugucacuuauga

SEQ ID NO: 302603 - RNA, 19 nt, Homo sapiens
  misc_RNA (1)...(19): siRNA sense strand
ggaugaagaagcugggaaa

SEQ ID NO: 302604 - RNA, 19 nt, Homo sapiens
  misc_RNA (1)...(19): siRNA sense strand
cauaaagccucuguagaag

SEQ ID NO: 302605 - RNA, 19 nt, Homo sapiens
  misc_RNA (1)...(19): siRNA sense strand
gaccagaugcugcaaucaa

SEQ ID NO: 302606 - RNA, 19 nt, Homo sapiens
  misc_RNA (1)...(19): siRNA sense strand
gacaaagggacuugauuuc

SEQ ID NO: 302607 - RNA, 19 nt, Homo sapiens
  misc_RNA (1)...(19): siRNA sense strand
caacaaagaacagcaaagg

SEQ ID NO: 302608 - RNA, 19 nt, Homo sapiens
  misc_RNA (1)...(19): siRNA sense strand
uuaugaaacuagcgaccua

SEQ ID NO: 302609 - RNA, 19 nt, Homo sapiens
  misc_RNA (1)...(19): siRNA sense strand
gauagcagccuugucacuu

SEQ ID NO: 302610 - RNA, 19 nt, Homo sapiens
  misc_RNA (1)...(19): siRNA sense strand
ucucagaucguauuggaaa

SEQ ID NO: 302611 - RNA, 19 nt, Homo sapiens
  misc_RNA (1)...(19): siRNA sense strand
ugggaaaggugaacgagau

SEQ ID NO: 302612 - RNA, 19 nt, Homo sapiens
  misc_RNA (1)...(19): siRNA sense strand
gagcugacaagcacaagug

SEQ ID NO: 302613 - RNA, 19 nt, Homo sapiens
  misc_RNA (1)...(19): siRNA sense strand
ggaguucgaugcguuugca

SEQ ID NO: 302614 - RNA, 19 nt, Homo sapiens
  misc_RNA (1)...(19): siRNA sense strand
gaggacaggauaugaaucu

SEQ ID NO: 302615 - RNA, 19 nt, Homo sapiens
  misc_RNA (1)...(19): siRNA sense strand
gcagaugauugcuaauucc

SEQ ID NO: 302616 - RNA, 19 nt, Homo sapiens
  misc_RNA (1)...(19): siRNA sense strand
cgaccuaccugaggaugau

SEQ ID NO: 302617 - RNA, 19 nt, Homo sapiens
  misc_RNA (1)...(19): siRNA sense strand
gggaccagaugcugcaauc

SEQ ID NO: 302618 - RNA, 19 nt, Homo sapiens
  misc_RNA (1)...(19): siRNA sense strand
gauaccacccagcagauga

SEQ ID NO: 302619 - RNA, 19 nt, Homo sapiens
  misc_RNA (1)...(19): siRNA sense strand
ggagagggucugggaguga

SEQ ID NO: 302620 - RNA, 19 nt, Homo sapiens
  misc_RNA (1)...(19): siRNA sense strand
uagcagccuugucacuuau

SEQ ID NO: 302621 - RNA, 19 nt, Homo sapiens
  misc_RNA (1)...(19): siRNA sense strand
ccaagaggacaggauauga

SEQ ID NO: 302622 - RNA, 19 nt, Homo sapiens
  misc_RNA (1)...(19): siRNA sense strand
cagacaaccaugcgugaaa

SEQ ID NO: 302623 - RNA, 19 nt, Homo sapiens
  misc_RNA (1)...(19): siRNA sense strand
caccagcuauaugaaacua

SEQ ID NO: 302624 - RNA, 19 nt, Homo sapiens
  misc_RNA (1)...(19): siRNA sense strand
caggacaaguucucucaag

SEQ ID NO: 302625 - RNA, 19 nt, Homo sapiens
  misc_RNA (1)...(19): siRNA sense strand
gaugcugcaaucaaccuua

SEQ ID NO: 302626 - RNA, 19 nt, Homo sapiens
  misc_RNA (1)...(19): siRNA sense strand
agacagcuguacguuguga

SEQ ID NO: 302627 - RNA, 19 nt, Homo sapiens
  misc_RNA (1)...(19): siRNA sense strand
cgagcaagccaugcaguuu

SEQ ID NO: 302628 - RNA, 19 nt, Homo sapiens
  misc_RNA (1)...(19): siRNA sense strand
ggaaaggugaacgagauug

SEQ ID NO: 302629 - RNA, 19 nt, Homo sapiens
  misc_RNA (1)...(19): siRNA sense strand
caaguucaaggacaagaga

SEQ ID NO: 302630 - RNA, 19 nt, Homo sapiens
  misc_RNA (1)...(19): siRNA sense strand
gagcuggugcagagacuug

SEQ ID NO: 302631 - RNA, 19 nt, Homo sapiens
  misc_RNA (1)...(19): siRNA sense strand
gagauugccaagcauaaag

SEQ ID NO: 302632 - RNA, 19 nt, Homo sapiens
  misc_RNA (1)...(19): siRNA sense strand
gggacuugauuucucagau

SEQ ID NO: 302633 - RNA, 19 nt, Homo sapiens
  misc_RNA (1)...(19): siRNA sense strand
gggacaaagggacuugauu

SEQ ID NO: 302634 - RNA, 19 nt, Homo sapiens
  misc_RNA (1)...(19): siRNA sense strand
caaggugcaccagcuauau

SEQ ID NO: 302635 - RNA, 19 nt, Homo sapiens
  misc_RNA (1)...(19): siRNA sense strand
ucgaugcguuugcacaaga

SEQ ID NO: 302636 - RNA, 19 nt, Homo sapiens
  misc_RNA (1)...(19): siRNA sense strand
ggacaaguucucucaagcu

SEQ ID NO: 302637 - RNA, 19 nt, Homo sapiens
  misc_RNA (1)...(19): siRNA sense strand
uggaacacaucauugucaa

SEQ ID NO: 302638 - RNA, 19 nt, Homo sapiens
  misc_RNA (1)...(19): siRNA sense strand
gcccuagaccuugcaguuu

SEQ ID NO: 302639 - RNA, 19 nt, Homo sapiens
  misc_RNA (1)...(19): siRNA sense strand
gugcaccagcuauaugaaa

SEQ ID NO: 302640 - RNA, 19 nt, Homo sapiens
  misc_RNA (1)...(19): siRNA sense strand
gaaaggugaacgagauugc

SEQ ID NO: 302641 - RNA, 19 nt, Homo sapiens
  misc_RNA (1)...(19): siRNA sense strand
gaaucuggagaauaugaga

SEQ ID NO: 302642 - RNA, 19 nt, Homo sapiens
  misc_RNA (1)...(19): siRNA sense strand
gcagacaaccaugcgugaa

SEQ ID NO: 302643 - RNA, 19 nt, Homo sapiens
  misc_RNA (1)...(19): siRNA sense strand
cgagauugccaagcauaaa

SEQ ID NO: 302644 - RNA, 19 nt, Homo sapiens
  misc_RNA (1)...(19): siRNA sense strand
gggaaaggugaacgagauu

SEQ ID NO: 302645 - RNA, 19 nt, Homo sapiens
  misc_RNA (1)...(19): siRNA sense strand
uacagaguguccugggaaa

SEQ ID NO: 302646 - RNA, 19 nt, Homo sapiens
  misc_RNA (1)...(19): siRNA sense strand
ucacuuaugaacuacauuc

SEQ ID NO: 302647 - RNA, 19 nt, Homo sapiens
  misc_RNA (1)...(19): siRNA sense strand
ucaagacgacagugaagga

SEQ ID NO: 302648 - RNA, 19 nt, Homo sapiens
  misc_RNA (1)...(19): siRNA sense strand
cuugauuucucagaucgua

SEQ ID NO: 302649 - RNA, 19 nt, Homo sapiens
  misc_RNA (1)...(19): siRNA sense strand
ugaucaggaugcucagaau

SEQ ID NO: 302650 - RNA, 19 nt, Homo sapiens
  misc_RNA (1)...(19): siRNA sense strand
uuucucagaucguauugga

SEQ ID NO: 302651 - RNA, 19 nt, Homo sapiens
  misc_RNA (1)...(19): siRNA sense strand
gagccagauguuuaugaaa

SEQ ID NO: 302652 - RNA, 19 nt, Homo sapiens
  misc_RNA (1)...(19): siRNA sense strand
gugaaaaccuggccacagu

SEQ ID NO: 302653 - RNA, 19 nt, Homo sapiens
  misc_RNA (1)...(19): siRNA sense strand
ugaaggagucagccacaga

SEQ ID NO: 302654 - RNA, 19 nt, Homo sapiens
  misc_RNA (1)...(19): siRNA sense strand
guggaacacaucauuguca

SEQ ID NO: 302655 - RNA, 19 nt, Homo sapiens
  misc_RNA (1)...(19): siRNA sense strand
uugaugaacggaugaagaa

SEQ ID NO: 302656 - RNA, 19 nt, Homo sapiens
  misc_RNA (1)...(19): siRNA sense strand
uggagaauaugagaugcuu

SEQ ID NO: 302657 - RNA, 19 nt, Homo sapiens
  misc_RNA (1)...(19): siRNA sense strand
uagaagaugcagauacaca

SEQ ID NO: 302658 - RNA, 19 nt, Homo sapiens
  misc_RNA (1)...(19): siRNA sense strand
gaucaggaugcucagaauc

SEQ ID NO: 302659 - RNA, 19 nt, Homo sapiens
  misc_RNA (1)...(19): siRNA sense strand
gcaacaaagaacagcaaag

SEQ ID NO: 302660 - RNA, 19 nt, Homo sapiens
  misc_RNA (1)...(19): siRNA sense strand
cagcuggaagcaacaaaga

SEQ ID NO: 302661 - RNA, 19 nt, Homo sapiens
  misc_RNA (1)...(19): siRNA sense strand
caagagcugacaacugaag

SEQ ID NO: 302662 - RNA, 19 nt, Homo sapiens
  misc_RNA (1)...(19): siRNA sense strand
ugacccaggugcagacaac

SEQ ID NO: 302663 - RNA, 19 nt, Homo sapiens
  misc_RNA (1)...(19): siRNA sense strand
gaagcugaccccuguguug

SEQ ID NO: 302664 - RNA, 19 nt, Homo sapiens
  misc_RNA (1)...(19): siRNA sense strand
gaaaaccuggccacaguug

SEQ ID NO: 302665 - RNA, 19 nt, Homo sapiens
  misc_RNA (1)...(19): siRNA sense strand
aagcauaaagccucuguag

SEQ ID NO: 302666 - RNA, 19 nt, Homo sapiens
  misc_RNA (1)...(19): siRNA sense strand
ccaggaaugagccagaugu

SEQ ID NO: 302667 - RNA, 19 nt, Homo sapiens
  misc_RNA (1)...(19): siRNA sense strand
gaggagcugacaagcacaa

SEQ ID NO: 302668 - RNA, 19 nt, Homo sapiens
  misc_RNA (1)...(19): siRNA sense strand
gugaucaggaugcucagaa

SEQ ID NO: 302669 - RNA, 19 nt, Homo sapiens
  misc_RNA (1)...(19): siRNA sense strand
ccuaugacaaguucaagga

SEQ ID NO: 302670 - RNA, 19 nt, Homo sapiens
  misc_RNA (1)...(19): siRNA sense strand
agaagaugcagauacacaa

SEQ ID NO: 302671 - RNA, 19 nt, Homo sapiens
  misc_RNA (1)...(19): siRNA sense strand
ggaacuuugccagcauuga

SEQ ID NO: 302672 - RNA, 19 nt, Homo sapiens
  misc_RNA (1)...(19): siRNA sense strand
ggauaccacccagcagaug

SEQ ID NO: 302673 - RNA, 19 nt, Homo sapiens
  misc_RNA (1)...(19): siRNA sense strand
caaauuagcucuacuccua

SEQ ID NO: 302674 - RNA, 19 nt, Homo sapiens
  misc_RNA (1)...(19): siRNA sense strand
cuaaagagcugauauccuu

SEQ ID NO: 302675 - RNA, 19 nt, Homo sapiens
  misc_RNA (1)...(19): siRNA sense strand
cgacaugacuuggaagaua

SEQ ID NO: 302676 - RNA, 19 nt, Homo sapiens
  misc_RNA (1)...(19): siRNA sense strand
cagcauaucuuuaaaugga

SEQ ID NO: 302677 - RNA, 19 nt, Homo sapiens
  misc_RNA (1)...(19): siRNA sense strand
acaagucucugcccaguua

SEQ ID NO: 302678 - RNA, 19 nt, Homo sapiens
  misc_RNA (1)...(19): siRNA sense strand
gcagaaaugaguauuauga

SEQ ID NO: 302679 - RNA, 19 nt, Homo sapiens
  misc_RNA (1)...(19): siRNA sense strand
gaagauaagacuacuguga

SEQ ID NO: 302680 - RNA, 19 nt, Homo sapiens
  misc_RNA (1)...(19): siRNA sense strand
ggacagacuuaucuucaga

SEQ ID NO: 302681 - RNA, 19 nt, Homo sapiens
  misc_RNA (1)...(19): siRNA sense strand
ccacaugccugacaccaaa

SEQ ID NO: 302682 - RNA, 19 nt, Homo sapiens
  misc_RNA (1)...(19): siRNA sense strand
gaaagagaccuuggaguuu

SEQ ID NO: 302683 - RNA, 19 nt, Homo sapiens
  misc_RNA (1)...(19): siRNA sense strand
gaaauggaaucccaagaag

SEQ ID NO: 302684 - RNA, 19 nt, Homo sapiens
  misc_RNA (1)...(19): siRNA sense strand
ggagaagacugaacaagag

SEQ ID NO: 302685 - RNA, 19 nt, Homo sapiens
  misc_RNA (1)...(19): siRNA sense strand
gacaugacuuggaagauaa

SEQ ID NO: 302686 - RNA, 19 nt, Homo sapiens
  misc_RNA (1)...(19): siRNA sense strand
caacaagacaugauauuug

SEQ ID NO: 302687 - RNA, 19 nt, Homo sapiens
  misc_RNA (1)...(19): siRNA sense strand
gcugagcucucuugucauu

SEQ ID NO: 302688 - RNA, 19 nt, Homo sapiens
  misc_RNA (1)...(19): siRNA sense strand
gcacaguacuucugagaca

SEQ ID NO: 302689 - RNA, 19 nt, Homo sapiens
  misc_RNA (1)...(19): siRNA sense strand
gcaacuggauuauacaaca

SEQ ID NO: 302690 - RNA, 19 nt, Homo sapiens
  misc_RNA (1)...(19): siRNA sense strand
ccaauuggauccaggagaa

SEQ ID NO: 302691 - RNA, 19 nt, Homo sapiens
  misc_RNA (1)...(19): siRNA sense strand
gcaacaagacaugauauuu

SEQ ID NO: 302692 - RNA, 19 nt, Homo sapiens
  misc_RNA (1)...(19): siRNA sense strand
gaagauccuagaacagaua

SEQ ID NO: 302693 - RNA, 19 nt, Homo sapiens
  misc_RNA (1)...(19): siRNA sense strand
gagccugacucucuuucua

SEQ ID NO: 302694 - RNA, 19 nt, Homo sapiens
  misc_RNA (1)...(19): siRNA sense strand
ggagcaagaucuggagaaa

SEQ ID NO: 302695 - RNA, 19 nt, Homo sapiens
  misc_RNA (1)...(19): siRNA sense strand
cuacauugcuccaaggaaa

SEQ ID NO: 302696 - RNA, 19 nt, Homo sapiens
  misc_RNA (1)...(19): siRNA sense strand
acagugggauaacuaauaa

SEQ ID NO: 302697 - RNA, 19 nt, Homo sapiens
  misc_RNA (1)...(19): siRNA sense strand
caugggugcuuaucucuaa

SEQ ID NO: 302698 - RNA, 19 nt, Homo sapiens
  misc_RNA (1)...(19): siRNA sense strand
cuaauaaacuucagcaucu

SEQ ID NO: 302699 - RNA, 19 nt, Homo sapiens
  misc_RNA (1)...(19): siRNA sense strand
agacuuaucuucagaacau

SEQ ID NO: 302700 - RNA, 19 nt, Homo sapiens
  misc_RNA (1)...(19): siRNA sense strand
ugacagcaguggcagauga

SEQ ID NO: 302701 - RNA, 19 nt, Homo sapiens
  misc_RNA (1)...(19): siRNA sense strand
ccagaaaugucaugcaauc

SEQ ID NO: 302702 - RNA, 19 nt, Homo sapiens
  misc_RNA (1)...(19): siRNA sense strand
aaaccuaucuuucaggaau

SEQ ID NO: 302703 - RNA, 19 nt, Homo sapiens
  misc_RNA (1)...(19): siRNA sense strand
gagaagauccuagaacaga

SEQ ID NO: 302704 - RNA, 19 nt, Homo sapiens
  misc_RNA (1)...(19): siRNA sense strand
uagagaaccuaacggcuaa

SEQ ID NO: 302705 - RNA, 19 nt, Homo sapiens
  misc_RNA (1)...(19): siRNA sense strand
aaagagaccuuggaguuug

SEQ ID NO: 302706 - RNA, 19 nt, Homo sapiens
  misc_RNA (1)...(19): siRNA sense strand
gcuagaaacuugucagcau

SEQ ID NO: 302707 - RNA, 19 nt, Homo sapiens
  misc_RNA (1)...(19): siRNA sense strand
acaagagucuaaagaagaa

SEQ ID NO: 302708 - RNA, 19 nt, Homo sapiens
  misc_RNA (1)...(19): siRNA sense strand
ugaaagagaccuuggaguu

SEQ ID NO: 302709 - RNA, 19 nt, Homo sapiens
  misc_RNA (1)...(19): siRNA sense strand
uaaaagagcuacagaguca

SEQ ID NO: 302710 - RNA, 19 nt, Homo sapiens
  misc_RNA (1)...(19): siRNA sense strand
ggaaagagaaaugagguuu

SEQ ID NO: 302711 - RNA, 19 nt, Homo sapiens
  misc_RNA (1)...(19): siRNA sense strand
gaggagagccuggcagaaa

SEQ ID NO: 302712 - RNA, 19 nt, Homo sapiens
  misc_RNA (1)...(19): siRNA sense strand
gcacacagacugacacauc

SEQ ID NO: 302713 - RNA, 19 nt, Homo sapiens
  misc_RNA (1)...(19): siRNA sense strand
ccacuggccuggcuggaaa

SEQ ID NO: 302714 - RNA, 19 nt, Homo sapiens
  misc_RNA (1)...(19): siRNA sense strand
uaacaagaggacagacuua

SEQ ID NO: 302715 - RNA, 19 nt, Homo sapiens
  misc_RNA (1)...(19): siRNA sense strand
cgaguagcaucaaugguuu

SEQ ID NO: 302716 - RNA, 19 nt, Homo sapiens
  misc_RNA (1)...(19): siRNA sense strand
gcauggagcuauggaggaa

SEQ ID NO: 302717 - RNA, 19 nt, Homo sapiens
  misc_RNA (1)...(19): siRNA sense strand
cagagaaacucacagucaa

SEQ ID NO: 302718 - RNA, 19 nt, Homo sapiens
  misc_RNA (1)...(19): siRNA sense strand
agacaaacagcauaucuuu

SEQ ID NO: 302719 - RNA, 19 nt, Homo sapiens
  misc_RNA (1)...(19): siRNA sense strand
gaaccuaacggcuaaacug

SEQ ID NO: 302720 - RNA, 19 nt, Homo sapiens
  misc_RNA (1)...(19): siRNA sense strand
ggaaaaccaucuaugagaa

SEQ ID NO: 302721 - RNA, 19 nt, Homo sapiens
  misc_RNA (1)...(19): siRNA sense strand
gacaaacagcauaucuuua

SEQ ID NO: 302722 - RNA, 19 nt, Homo sapiens
  misc_RNA (1)...(19): siRNA sense strand
ucagaacauuucagucauu

SEQ ID NO: 302723 - RNA, 19 nt, Homo sapiens
  misc_RNA (1)...(19): siRNA sense strand
gaagugauacagcagaaug

SEQ ID NO: 302724 - RNA, 19 nt, Homo sapiens
  misc_RNA (1)...(19): siRNA sense strand
ggaagaacagcaucaggaa

SEQ ID NO: 302725 - RNA, 19 nt, Homo sapiens
  misc_RNA (1)...(19): siRNA sense strand
aggaagagauggcacuaaa

SEQ ID NO: 302726 - RNA, 19 nt, Homo sapiens
  misc_RNA (1)...(19): siRNA sense strand
ggccagaaaugucaugcaa

SEQ ID NO: 302727 - RNA, 19 nt, Homo sapiens
  misc_RNA (1)...(19): siRNA sense strand
aaggaaagccugagcagua

SEQ ID NO: 302728 - RNA, 19 nt, Homo sapiens
  misc_RNA (1)...(19): siRNA sense strand
gcagcaacaagacaugaua

SEQ ID NO: 302729 - RNA, 19 nt, Homo sapiens
  misc_RNA (1)...(19): siRNA sense strand
cugcugagcucucuuguca

SEQ ID NO: 302730 - RNA, 19 nt, Homo sapiens
  misc_RNA (1)...(19): siRNA sense strand
caacauggacagccagcua

SEQ ID NO: 302731 - RNA, 19 nt, Homo sapiens
  misc_RNA (1)...(19): siRNA sense strand
gaacacccucugccuaaug

SEQ ID NO: 302732 - RNA, 19 nt, Homo sapiens
  misc_RNA (1)...(19): siRNA sense strand
gauauuugaggcccguuua

SEQ ID NO: 302733 - RNA, 19 nt, Homo sapiens
  misc_RNA (1)...(19): siRNA sense strand
gcaguacucucaaaagcua

SEQ ID NO: 302734 - RNA, 19 nt, Homo sapiens
  misc_RNA (1)...(19): siRNA sense strand
gugcaaaggccaaacagaa

SEQ ID NO: 302735 - RNA, 19 nt, Homo sapiens
  misc_RNA (1)...(19): siRNA sense strand
caaggaugcggcagagaua

SEQ ID NO: 302736 - RNA, 19 nt, Homo sapiens
  misc_RNA (1)...(19): siRNA sense strand
gauacagagucuuggaugu

SEQ ID NO: 302737 - RNA, 19 nt, Homo sapiens
  misc_RNA (1)...(19): siRNA sense strand
ggacuuaguaccuucugaa

SEQ ID NO: 302738 - RNA, 19 nt, Homo sapiens
  misc_RNA (1)...(19): siRNA sense strand
ucaggacucugcagcgaaa

SEQ ID NO: 302739 - RNA, 19 nt, Homo sapiens
  misc_RNA (1)...(19): siRNA sense strand
caaggacacuguagagaac

SEQ ID NO: 302740 - RNA, 19 nt, Homo sapiens
  misc_RNA (1)...(19): siRNA sense strand
ggaacgugauguggcaauu

SEQ ID NO: 302741 - RNA, 19 nt, Homo sapiens
  misc_RNA (1)...(19): siRNA sense strand
gaagauauucuguccacau

SEQ ID NO: 302742 - RNA, 19 nt, Homo sapiens
  misc_RNA (1)...(19): siRNA sense strand
ggaggaaauuguagagcau

SEQ ID NO: 302743 - RNA, 19 nt, Homo sapiens
  misc_RNA (1)...(19): siRNA sense strand
cuuaguaccuucugaaagu

SEQ ID NO: 302744 - RNA, 19 nt, Homo sapiens
  misc_RNA (1)...(19): siRNA sense strand
gcagagacaaacagcauau

SEQ ID NO: 302745 - RNA, 19 nt, Homo sapiens
  misc_RNA (1)...(19): siRNA sense strand
cuacaagagucuaaagaag

SEQ ID NO: 302746 - RNA, 19 nt, Homo sapiens
  misc_RNA (1)...(19): siRNA sense strand
gaagugacaagagugcuuu

SEQ ID NO: 302747 - RNA, 19 nt, Homo sapiens
  misc_RNA (1)...(19): siRNA sense strand
uaaacuggccagcaccaua

SEQ ID NO: 302748 - RNA, 19 nt, Homo sapiens
  misc_RNA (1)...(19): siRNA sense strand
agaaguugcugcuguaucu

SEQ ID NO: 302749 - RNA, 19 nt, Homo sapiens
  misc_RNA (1)...(19): siRNA sense strand
gcuacaagagucuaaagaa

SEQ ID NO: 302750 - RNA, 19 nt, Homo sapiens
  misc_RNA (1)...(19): siRNA sense strand
ccaugcaacuggauuauac

SEQ ID NO: 302751 - RNA, 19 nt, Homo sapiens
  misc_RNA (1)...(19): siRNA sense strand
ucucaaguguggaagauau

SEQ ID NO: 302752 - RNA, 19 nt, Homo sapiens
  misc_RNA (1)...(19): siRNA sense strand
gaaagccugagcaguagaa

SEQ ID NO: 302753 - RNA, 19 nt, Homo sapiens
  misc_RNA (1)...(19): siRNA sense strand
uuaaauggaccuuugagaa

SEQ ID NO: 302754 - RNA, 19 nt, Homo sapiens
  misc_RNA (1)...(19): siRNA sense strand
uggcagaaaugaguauuau

SEQ ID NO: 302755 - RNA, 19 nt, Homo sapiens
  misc_RNA (1)...(19): siRNA sense strand
caucaaugguuucccuuca

SEQ ID NO: 302756 - RNA, 19 nt, Homo sapiens
  misc_RNA (1)...(19): siRNA sense strand
uaaaggagaagacugaaca

SEQ ID NO: 302757 - RNA, 19 nt, Homo sapiens
  misc_RNA (1)...(19): siRNA sense strand
gaaccucaaggacacugua

SEQ ID NO: 302758 - RNA, 19 nt, Homo sapiens
  misc_RNA (1)...(19): siRNA sense strand
cggcagagauaguguugga

SEQ ID NO: 302759 - RNA, 19 nt, Homo sapiens
  misc_RNA (1)...(19): siRNA sense strand
gcaaggaugcggcagagau

SEQ ID NO: 302760 - RNA, 19 nt, Homo sapiens
  misc_RNA (1)...(19): siRNA sense strand
cacagugggauaacuaaua

SEQ ID NO: 302761 - RNA, 19 nt, Homo sapiens
  misc_RNA (1)...(19): siRNA sense strand
gcaccaagcacaguacuuc

SEQ ID NO: 302762 - RNA, 19 nt, Homo sapiens
  misc_RNA (1)...(19): siRNA sense strand
gaagauguugguaggauuc

SEQ ID NO: 302763 - RNA, 19 nt, Homo sapiens
  misc_RNA (1)...(19): siRNA sense strand
gaggacagacuuaucuuca

SEQ ID NO: 302764 - RNA, 19 nt, Homo sapiens
  misc_RNA (1)...(19): siRNA sense strand
agaaauggaaucccaagaa

SEQ ID NO: 302765 - RNA, 19 nt, Homo sapiens
  misc_RNA (1)...(19): siRNA sense strand
aaacauucgucuagcaaca

SEQ ID NO: 302766 - RNA, 19 nt, Homo sapiens
  misc_RNA (1)...(19): siRNA sense strand
guaggauucuuggcucuga

SEQ ID NO: 302767 - RNA, 19 nt, Homo sapiens
  misc_RNA (1)...(19): siRNA sense strand
gcaaaggccaaacagaaca

SEQ ID NO: 302768 - RNA, 19 nt, Homo sapiens
  misc_RNA (1)...(19): siRNA sense strand
gaacuccucuccgugaacu

SEQ ID NO: 302769 - RNA, 19 nt, Homo sapiens
  misc_RNA (1)...(19): siRNA sense strand
ggaacacccucugccuaau

SEQ ID NO: 302770 - RNA, 19 nt, Homo sapiens
  misc_RNA (1)...(19): siRNA sense strand
ucaaggacacuguagagaa

SEQ ID NO: 302771 - RNA, 19 nt, Homo sapiens
  misc_RNA (1)...(19): siRNA sense strand
ggaccuggcuaugaaggau

SEQ ID NO: 302772 - RNA, 19 nt, Homo sapiens
  misc_RNA (1)...(19): siRNA sense strand
gagcuacagagucagcaua

SEQ ID NO: 302773 - RNA, 19 nt, Homo sapiens
  misc_RNA (1)...(19): siRNA sense strand
gaaaguagcucgccaagau

SEQ ID NO: 302774 - RNA, 19 nt, Homo sapiens
  misc_RNA (1)...(19): siRNA sense strand
ggacggagguuuggaagau

SEQ ID NO: 302775 - RNA, 19 nt, Homo sapiens
  misc_RNA (1)...(19): siRNA sense strand
gaugaccucuucgucuuua

SEQ ID NO: 302776 - RNA, 19 nt, Homo sapiens
  misc_RNA (1)...(19): siRNA sense strand
uaaagaagaccauaccaaa

SEQ ID NO: 302777 - RNA, 19 nt, Homo sapiens
  misc_RNA (1)...(19): siRNA sense strand
ggagggagaucaccaaagg

SEQ ID NO: 302778 - RNA, 19 nt, Homo sapiens
  misc_RNA (1)...(19): siRNA sense strand
ggacgcaguacaugaagua

SEQ ID NO: 302779 - RNA, 19 nt, Homo sapiens
  misc_RNA (1)...(19): siRNA sense strand
ggaagaggacggagguuug

SEQ ID NO: 302780 - RNA, 19 nt, Homo sapiens
  misc_RNA (1)...(19): siRNA sense strand
cuacagcuccucccucuuu

SEQ ID NO: 302781 - RNA, 19 nt, Homo sapiens
  misc_RNA (1)...(19): siRNA sense strand
gagaagaaagccuugaguu

SEQ ID NO: 302782 - RNA, 19 nt, Homo sapiens
  misc_RNA (1)...(19): siRNA sense strand
cagcagcucucacuguuca

SEQ ID NO: 302783 - RNA, 19 nt, Homo sapiens
  misc_RNA (1)...(19): siRNA sense strand
ggacggugauccugaaagg

SEQ ID NO: 302784 - RNA, 19 nt, Homo sapiens
  misc_RNA (1)...(19): siRNA sense strand
gaugagagaagcccaguuc

SEQ ID NO: 302785 - RNA, 19 nt, Homo sapiens
  misc_RNA (1)...(19): siRNA sense strand
agagguggcugagaaagaa

SEQ ID NO: 302786 - RNA, 19 nt, Homo sapiens
  misc_RNA (1)...(19): siRNA sense strand
gaacuggaaucuggaugag

SEQ ID NO: 302787 - RNA, 19 nt, Homo sapiens
  misc_RNA (1)...(19): siRNA sense strand
ccacauggacaacaagcua

SEQ ID NO: 302788 - RNA, 19 nt, Homo sapiens
  misc_RNA (1)...(19): siRNA sense strand
gcacccauguccaaucuac

SEQ ID NO: 302789 - RNA, 19 nt, Homo sapiens
  misc_RNA (1)...(19): siRNA sense strand
gacaacaagcuaaagaaga

SEQ ID NO: 302790 - RNA, 19 nt, Homo sapiens
  misc_RNA (1)...(19): siRNA sense strand
aagaagaccauaccaaaga

SEQ ID NO: 302791 - RNA, 19 nt, Homo sapiens
  misc_RNA (1)...(19): siRNA sense strand
caagcagaauggugguuug

SEQ ID NO: 302792 - RNA, 19 nt, Homo sapiens
  misc_RNA (1)...(19): siRNA sense strand
uugcagagguggcugagaa

SEQ ID NO: 302793 - RNA, 19 nt, Homo sapiens
  misc_RNA (1)...(19): siRNA sense strand
ggacaacaagcuaaagaag

SEQ ID NO: 302794 - RNA, 19 nt, Homo sapiens
  misc_RNA (1)...(19): siRNA sense strand
gaagcccaguucuuguaug

SEQ ID NO: 302795 - RNA, 19 nt, Homo sapiens
  misc_RNA (1)...(19): siRNA sense strand
acaacaagcuaaagaagac

SEQ ID NO: 302796 - RNA, 19 nt, Homo sapiens
  misc_RNA (1)...(19): siRNA sense strand
caggacagccgaacuggaa

SEQ ID NO: 302797 - RNA, 19 nt, Homo sapiens
  misc_RNA (1)...(19): siRNA sense strand
gagaucaucaacaagaaga

SEQ ID NO: 302798 - RNA, 19 nt, Homo sapiens
  misc_RNA (1)...(19): siRNA sense strand
gccuaaaccugcccacauc

SEQ ID NO: 302799 - RNA, 19 nt, Homo sapiens
  misc_RNA (1)...(19): siRNA sense strand
gguuuggccuggagugaug

SEQ ID NO: 302800 - RNA, 19 nt, Homo sapiens
  misc_RNA (1)...(19): siRNA sense strand
guggagaucaucaacaaga

SEQ ID NO: 302801 - RNA, 19 nt, Homo sapiens
  misc_RNA (1)...(19): siRNA sense strand
ggauggggaugaugaaguu

SEQ ID NO: 302802 - RNA, 19 nt, Homo sapiens
  misc_RNA (1)...(19): siRNA sense strand
caaccacucucaggaaagg

SEQ ID NO: 302803 - RNA, 19 nt, Homo sapiens
  misc_RNA (1)...(19): siRNA sense strand
caucauggccaaacagauc

SEQ ID NO: 302804 - RNA, 19 nt, Homo sapiens
  misc_RNA (1)...(19): siRNA sense strand
ggaugaccucuucgucuuu

SEQ ID NO: 302805 - RNA, 19 nt, Homo sapiens
  misc_RNA (1)...(19): siRNA sense strand
uggaugaccucuucgucuu

SEQ ID NO: 302806 - RNA, 19 nt, Homo sapiens
  misc_RNA (1)...(19): siRNA sense strand
guuccuggaugaccucuuc

SEQ ID NO: 302807 - RNA, 19 nt, Homo sapiens
  misc_RNA (1)...(19): siRNA sense strand
aaacccaggcugcuucaaa

SEQ ID NO: 302808 - RNA, 19 nt, Homo sapiens
  misc_RNA (1)...(19): siRNA sense strand
agaagaaagccuugaguuc

SEQ ID NO: 302809 - RNA, 19 nt, Homo sapiens
  misc_RNA (1)...(19): siRNA sense strand
cuaaagaagaccauaccaa

SEQ ID NO: 302810 - RNA, 19 nt, Homo sapiens
  misc_RNA (1)...(19): siRNA sense strand
cuaugcaggugugcuguuu

SEQ ID NO: 302811 - RNA, 19 nt, Homo sapiens
  misc_RNA (1)...(19): siRNA sense strand
cgcaguacaugaaguaucu

SEQ ID NO: 302812 - RNA, 19 nt, Homo sapiens
  misc_RNA (1)...(19): siRNA sense strand
ugguggagaucaucaacaa

SEQ ID NO: 302813 - RNA, 19 nt, Homo sapiens
  misc_RNA (1)...(19): siRNA sense strand
cgaacuggaaucuggauga

SEQ ID NO: 302814 - RNA, 19 nt, Homo sapiens
  misc_RNA (1)...(19): siRNA sense strand
gaagaccauaccaaagaug

SEQ ID NO: 302815 - RNA, 19 nt, Homo sapiens
  misc_RNA (1)...(19): siRNA sense strand
agaagaccauaccaaagau

SEQ ID NO: 302816 - RNA, 19 nt, Homo sapiens
  misc_RNA (1)...(19): siRNA sense strand
aagcagggccagcagauga

SEQ ID NO: 302817 - RNA, 19 nt, Homo sapiens
  misc_RNA (1)...(19): siRNA sense strand
uggcagcacucccuuaggu

SEQ ID NO: 302818 - RNA, 19 nt, Homo sapiens
  misc_RNA (1)...(19): siRNA sense strand
gagugaugaugcagaugga

SEQ ID NO: 302819 - RNA, 19 nt, Homo sapiens
  misc_RNA (1)...(19): siRNA sense strand
gaagaggacggagguuugg

SEQ ID NO: 302820 - RNA, 19 nt, Homo sapiens
  misc_RNA (1)...(19): siRNA sense strand
cagcaaccacucucaggaa

SEQ ID NO: 302821 - RNA, 19 nt, Homo sapiens
  misc_RNA (1)...(19): siRNA sense strand
ucaggacgcaguacaugaa

SEQ ID NO: 302822 - RNA, 19 nt, Homo sapiens
  misc_RNA (1)...(19): siRNA sense strand
uggagaucaucaacaagaa

SEQ ID NO: 302823 - RNA, 19 nt, Homo sapiens
  misc_RNA (1)...(19): siRNA sense strand
caacggcagggaagacaga

SEQ ID NO: 302824 - RNA, 19 nt, Homo sapiens
  misc_RNA (1)...(19): siRNA sense strand
gauccgcuuucccauccuu

SEQ ID NO: 302825 - RNA, 19 nt, Homo sapiens
  misc_RNA (1)...(19): siRNA sense strand
ccuaugagugugagaagaa

SEQ ID NO: 302826 - RNA, 19 nt, Homo sapiens
  misc_RNA (1)...(19): siRNA sense strand
aaagaagaccauaccaaag

SEQ ID NO: 302827 - RNA, 19 nt, Homo sapiens
  misc_RNA (1)...(19): siRNA sense strand
cagagguggcugagaaaga

SEQ ID NO: 302828 - RNA, 19 nt, Homo sapiens
  misc_RNA (1)...(19): siRNA sense strand
gaguagcauugggagcauu

SEQ ID NO: 302829 - RNA, 19 nt, Homo sapiens
  misc_RNA (1)...(19): siRNA sense strand
gagaucaccaaaggccuaa

SEQ ID NO: 302830 - RNA, 19 nt, Homo sapiens
  misc_RNA (1)...(19): siRNA sense strand
gaagcagggccagcagaug

SEQ ID NO: 302831 - RNA, 19 nt, Homo sapiens
  misc_RNA (1)...(19): siRNA sense strand
ggacagccgaacuggaauc

SEQ ID NO: 302832 - RNA, 19 nt, Homo sapiens
  misc_RNA (1)...(19): siRNA sense strand
ccaggcugcuucaaaauau

SEQ ID NO: 302833 - RNA, 19 nt, Homo sapiens
  misc_RNA (1)...(19): siRNA sense strand
gcauugggagcauuaacau

SEQ ID NO: 302834 - RNA, 19 nt, Homo sapiens
  misc_RNA (1)...(19): siRNA sense strand
agcaguggcccaaguguuu

SEQ ID NO: 302835 - RNA, 19 nt, Homo sapiens
  misc_RNA (1)...(19): siRNA sense strand
caccaaguccuaccucauc

SEQ ID NO: 302836 - RNA, 19 nt, Homo sapiens
  misc_RNA (1)...(19): siRNA sense strand
accaguagcccucggauau

SEQ ID NO: 302837 - RNA, 19 nt, Homo sapiens
  misc_RNA (1)...(19): siRNA sense strand
cuaugagugugagaagaaa

SEQ ID NO: 302838 - RNA, 19 nt, Homo sapiens
  misc_RNA (1)...(19): siRNA sense strand
gacggagguuuggaagaug

SEQ ID NO: 302839 - RNA, 19 nt, Homo sapiens
  misc_RNA (1)...(19): siRNA sense strand
gaaguaucuguaugccuau

SEQ ID NO: 302840 - RNA, 19 nt, Homo sapiens
  misc_RNA (1)...(19): siRNA sense strand
ggagaucaucaacaagaag

SEQ ID NO: 302841 - RNA, 19 nt, Homo sapiens
  misc_RNA (1)...(19): siRNA sense strand
ucaagcagaauggugguuu

SEQ ID NO: 302842 - RNA, 19 nt, Homo sapiens
  misc_RNA (1)...(19): siRNA sense strand
gcaguggcccaaguguuug

SEQ ID NO: 302843 - RNA, 19 nt, Homo sapiens
  misc_RNA (1)...(19): siRNA sense strand
gggagccugcugagaagaa

SEQ ID NO: 302844 - RNA, 19 nt, Homo sapiens
  misc_RNA (1)...(19): siRNA sense strand
agcaaccacucucaggaaa

SEQ ID NO: 302845 - RNA, 19 nt, Homo sapiens
  misc_RNA (1)...(19): siRNA sense strand
gaccauaccaaagaugcuu

SEQ ID NO: 302846 - RNA, 19 nt, Homo sapiens
  misc_RNA (1)...(19): siRNA sense strand
acggagguuuggaagauga

SEQ ID NO: 302847 - RNA, 19 nt, Homo sapiens
  misc_RNA (1)...(19): siRNA sense strand
gauccuggaccuguacaug

SEQ ID NO: 302848 - RNA, 19 nt, Homo sapiens
  misc_RNA (1)...(19): siRNA sense strand
uugccaagcuguaugaacu

SEQ ID NO: 302849 - RNA, 19 nt, Homo sapiens
  misc_RNA (1)...(19): siRNA sense strand
gaguggcacccauguccaa

SEQ ID NO: 302850 - RNA, 19 nt, Homo sapiens
  misc_RNA (1)...(19): siRNA sense strand
ggccuuccagcgcaacuuu

SEQ ID NO: 302851 - RNA, 19 nt, Homo sapiens
  misc_RNA (1)...(19): siRNA sense strand
aaagaaacccaggcugcuu

SEQ ID NO: 302852 - RNA, 19 nt, Homo sapiens
  misc_RNA (1)...(19): siRNA sense strand
ggccuaaaccugcccacau

SEQ ID NO: 302853 - RNA, 19 nt, Homo sapiens
  misc_RNA (1)...(19): siRNA sense strand
ggccuggagugaugaugca

SEQ ID NO: 302854 - RNA, 19 nt, Homo sapiens
  misc_RNA (1)...(19): siRNA sense strand
caagcuaaagaagaccaua

SEQ ID NO: 302855 - RNA, 19 nt, Homo sapiens
  misc_RNA (1)...(19): siRNA sense strand
cagcaggacagccgaacug

SEQ ID NO: 302856 - RNA, 19 nt, Homo sapiens
  misc_RNA (1)...(19): siRNA sense strand
ggagccugcugagaagaag

SEQ ID NO: 302857 - RNA, 19 nt, Homo sapiens
  misc_RNA (1)...(19): siRNA sense strand
gcuccaggcagcaauugau

SEQ ID NO: 302858 - RNA, 19 nt, Homo sapiens
  misc_RNA (1)...(19): siRNA sense strand
uggcacccauguccaaucu

SEQ ID NO: 302859 - RNA, 19 nt, Homo sapiens
  misc_RNA (1)...(19): siRNA sense strand
gcaaccacucucaggaaag

SEQ ID NO: 302860 - RNA, 19 nt, Homo sapiens
  misc_RNA (1)...(19): siRNA sense strand
gccuaugagugugagaaga

SEQ ID NO: 302861 - RNA, 19 nt, Homo sapiens
  misc_RNA (1)...(19): siRNA sense strand
gaucaccaaaggccuaaac

SEQ ID NO: 302862 - RNA, 19 nt, Homo sapiens
  misc_RNA (1)...(19): siRNA sense strand
auaagcuggugaccgagaa

SEQ ID NO: 302863 - RNA, 19 nt, Homo sapiens
  misc_RNA (1)...(19): siRNA sense strand
uggcuccucugcagaugga

SEQ ID NO: 302864 - RNA, 19 nt, Homo sapiens
  misc_RNA (1)...(19): siRNA sense strand
cacauggacaacaagcuaa

SEQ ID NO: 302865 - RNA, 19 nt, Homo sapiens
  misc_RNA (1)...(19): siRNA sense strand
ggaaagagguccuguguga

SEQ ID NO: 302866 - RNA, 19 nt, Homo sapiens
  misc_RNA (1)...(19): siRNA sense strand
ggaauccacuguacacuua

SEQ ID NO: 302867 - RNA, 19 nt, Homo sapiens
  misc_RNA (1)...(19): siRNA sense strand
gcagugaaguccugucuaa

SEQ ID NO: 302868 - RNA, 19 nt, Homo sapiens
  misc_RNA (1)...(19): siRNA sense strand
uaaccugcauggugaauua

SEQ ID NO: 302869 - RNA, 19 nt, Homo sapiens
  misc_RNA (1)...(19): siRNA sense strand
gaggaguacugcaaguuua

SEQ ID NO: 302870 - RNA, 19 nt, Homo sapiens
  misc_RNA (1)...(19): siRNA sense strand
ggacacagcacacaaguau

SEQ ID NO: 302871 - RNA, 19 nt, Homo sapiens
  misc_RNA (1)...(19): siRNA sense strand
uaagaacacugaagacauc

SEQ ID NO: 302872 - RNA, 19 nt, Homo sapiens
  misc_RNA (1)...(19): siRNA sense strand
caucagaacucaagugucu

SEQ ID NO: 302873 - RNA, 19 nt, Homo sapiens
  misc_RNA (1)...(19): siRNA sense strand
gcaaaguuaucacggaauc

SEQ ID NO: 302874 - RNA, 19 nt, Homo sapiens
  misc_RNA (1)...(19): siRNA sense strand
gcacaguggccacaccaua

SEQ ID NO: 302875 - RNA, 19 nt, Homo sapiens
  misc_RNA (1)...(19): siRNA sense strand
guacaggagugccgagaug

SEQ ID NO: 302876 - RNA, 19 nt, Homo sapiens
  misc_RNA (1)...(19): siRNA sense strand
ucaaagcgguggcugaaau

SEQ ID NO: 302877 - RNA, 19 nt, Homo sapiens
  misc_RNA (1)...(19): siRNA sense strand
gacaucaccuucccuagug

SEQ ID NO: 302878 - RNA, 19 nt, Homo sapiens
  misc_RNA (1)...(19): siRNA sense strand
ucaagugucugccguuguu

SEQ ID NO: 302879 - RNA, 19 nt, Homo sapiens
  misc_RNA (1)...(19): siRNA sense strand
cguaugacaucacguuuga

SEQ ID NO: 302880 - RNA, 19 nt, Homo sapiens
  misc_RNA (1)...(19): siRNA sense strand
ggaggaguacugcaaguuu

SEQ ID NO: 302881 - RNA, 19 nt, Homo sapiens
  misc_RNA (1)...(19): siRNA sense strand
gaagaggaguaugacauca

SEQ ID NO: 302882 - RNA, 19 nt, Homo sapiens
  misc_RNA (1)...(19): siRNA sense strand
gagggauccuuuccuucua

SEQ ID NO: 302883 - RNA, 19 nt, Homo sapiens
  misc_RNA (1)...(19): siRNA sense strand
gaugacaccagaagaguga

SEQ ID NO: 302884 - RNA, 19 nt, Homo sapiens
  misc_RNA (1)...(19): siRNA sense strand
ccaaggaagaggaguauga

SEQ ID NO: 302885 - RNA, 19 nt, Homo sapiens
  misc_RNA (1)...(19): siRNA sense strand
acguagggcugaaggauaa

SEQ ID NO: 302886 - RNA, 19 nt, Homo sapiens
  misc_RNA (1)...(19): siRNA sense strand
gaccacaacuggcgauacu

SEQ ID NO: 302887 - RNA, 19 nt, Homo sapiens
  misc_RNA (1)...(19): siRNA sense strand
ggaagaggaguaugacauc

SEQ ID NO: 302888 - RNA, 19 nt, Homo sapiens
  misc_RNA (1)...(19): siRNA sense strand
gcagggagacggaggaaca

SEQ ID NO: 302889 - RNA, 19 nt, Homo sapiens
  misc_RNA (1)...(19): siRNA sense strand
gcaaguuuaagaacacuga

SEQ ID NO: 302890 - RNA, 19 nt, Homo sapiens
  misc_RNA (1)...(19): siRNA sense strand
ucuccaggcuccaggcuaa

SEQ ID NO: 302891 - RNA, 19 nt, Homo sapiens
  misc_RNA (1)...(19): siRNA sense strand
ccaugacucugguucacaa

SEQ ID NO: 302892 - RNA, 19 nt, Homo sapiens
  misc_RNA (1)...(19): siRNA sense strand
ggagggauccuuuccuucu

SEQ ID NO: 302893 - RNA, 19 nt, Homo sapiens
  misc_RNA (1)...(19): siRNA sense strand
gaagagugaaggcagugaa

SEQ ID NO: 302894 - RNA, 19 nt, Homo sapiens
  misc_RNA (1)...(19): siRNA sense strand
gcacccaguuagacuugga

SEQ ID NO: 302895 - RNA, 19 nt, Homo sapiens
  misc_RNA (1)...(19): siRNA sense strand
ggacaaggaggcugaacuc

SEQ ID NO: 302896 - RNA, 19 nt, Homo sapiens
  misc_RNA (1)...(19): siRNA sense strand
gcuggagaacuauaagaaa

SEQ ID NO: 302897 - RNA, 19 nt, Homo sapiens
  misc_RNA (1)...(19): siRNA sense strand
uaugcugccuucuggcuuu

SEQ ID NO: 302898 - RNA, 19 nt, Homo sapiens
  misc_RNA (1)...(19): siRNA sense strand
agaggaguaugacaucaga

SEQ ID NO: 302899 - RNA, 19 nt, Homo sapiens
  misc_RNA (1)...(19): siRNA sense strand
cauggugaauuacugugaa

SEQ ID NO: 302900 - RNA, 19 nt, Homo sapiens
  misc_RNA (1)...(19): siRNA sense strand
ggucaaagcgguggcugaa

SEQ ID NO: 302901 - RNA, 19 nt, Homo sapiens
  misc_RNA (1)...(19): siRNA sense strand
ucaaggcccaccuggagua

SEQ ID NO: 302902 - RNA, 19 nt, Homo sapiens
  misc_RNA (1)...(19): siRNA sense strand
ucgggcauccgcaaaguua

SEQ ID NO: 302903 - RNA, 19 nt, Homo sapiens
  misc_RNA (1)...(19): siRNA sense strand
gugccgagauggagaagag

SEQ ID NO: 302904 - RNA, 19 nt, Homo sapiens
  misc_RNA (1)...(19): siRNA sense strand
caauaugcguaugacauca

SEQ ID NO: 302905 - RNA, 19 nt, Homo sapiens
  misc_RNA (1)...(19): siRNA sense strand
caaaggcaucgaccggaaa

SEQ ID NO: 302906 - RNA, 19 nt, Homo sapiens
  misc_RNA (1)...(19): siRNA sense strand
cgggagggauccuuuccuu

SEQ ID NO: 302907 - RNA, 19 nt, Homo sapiens
  misc_RNA (1)...(19): siRNA sense strand
gcauggugaauuacuguga

SEQ ID NO: 302908 - RNA, 19 nt, Homo sapiens
  misc_RNA (1)...(19): siRNA sense strand
ccaauaugcguaugacauc

SEQ ID NO: 302909 - RNA, 19 nt, Homo sapiens
  misc_RNA (1)...(19): siRNA sense strand
gacaucagaacucaagugu

SEQ ID NO: 302910 - RNA, 19 nt, Homo sapiens
  misc_RNA (1)...(19): siRNA sense strand
cagcgcaaauauuggacuu

SEQ ID NO: 302911 - RNA, 19 nt, Homo sapiens
  misc_RNA (1)...(19): siRNA sense strand
gaacaucaaacugcaaagc

SEQ ID NO: 302912 - RNA, 19 nt, Homo sapiens
  misc_RNA (1)...(19): siRNA sense strand
acacagcacacaaguaucu

SEQ ID NO: 302913 - RNA, 19 nt, Homo sapiens
  misc_RNA (1)...(19): siRNA sense strand
uggcugaaaugcaguuugg

SEQ ID NO: 302914 - RNA, 19 nt, Homo sapiens
  misc_RNA (1)...(19): siRNA sense strand
cgcaucaggugaacaucaa

SEQ ID NO: 302915 - RNA, 19 nt, Homo sapiens
  misc_RNA (1)...(19): siRNA sense strand
ggagugccgagauggagaa

SEQ ID NO: 302916 - RNA, 19 nt, Homo sapiens
  misc_RNA (1)...(19): siRNA sense strand
caaagcgguggcugaaaug

SEQ ID NO: 302917 - RNA, 19 nt, Homo sapiens
  misc_RNA (1)...(19): siRNA sense strand
gugaacaucaaacugcaaa

SEQ ID NO: 302918 - RNA, 19 nt, Homo sapiens
  misc_RNA (1)...(19): siRNA sense strand
agcaggagcuggagaggau

SEQ ID NO: 302919 - RNA, 19 nt, Homo sapiens
  misc_RNA (1)...(19): siRNA sense strand
guucagcgcaaauauugga

SEQ ID NO: 302920 - RNA, 19 nt, Homo sapiens
  misc_RNA (1)...(19): siRNA sense strand
gaauccacuguacacuuaa

SEQ ID NO: 302921 - RNA, 19 nt, Homo sapiens
  misc_RNA (1)...(19): siRNA sense strand
gcaucugccaggacuguug

SEQ ID NO: 302922 - RNA, 19 nt, Homo sapiens
  misc_RNA (1)...(19): siRNA sense strand
gggauccuuuccuucuaug

SEQ ID NO: 302923 - RNA, 19 nt, Homo sapiens
  misc_RNA (1)...(19): siRNA sense strand
agacaucaccuucccuagu

SEQ ID NO: 302924 - RNA, 19 nt, Homo sapiens
  misc_RNA (1)...(19): siRNA sense strand
gcguaugacaucacguuug

SEQ ID NO: 302925 - RNA, 19 nt, Homo sapiens
  misc_RNA (1)...(19): siRNA sense strand
guuguucagcgcaaauauu

SEQ ID NO: 302926 - RNA, 19 nt, Homo sapiens
  misc_RNA (1)...(19): siRNA sense strand
aguaugacaucagaacuca

SEQ ID NO: 302927 - RNA, 19 nt, Homo sapiens
  misc_RNA (1)...(19): siRNA sense strand
caccuucccuaguguuuac

SEQ ID NO: 302928 - RNA, 19 nt, Homo sapiens
  misc_RNA (1)...(19): siRNA sense strand
ucaccuucccuaguguuua

SEQ ID NO: 302929 - RNA, 19 nt, Homo sapiens
  misc_RNA (1)...(19): siRNA sense strand
uaucacggaauccacugua

SEQ ID NO: 302930 - RNA, 19 nt, Homo sapiens
  misc_RNA (1)...(19): siRNA sense strand
aaagagguccugugugacu

SEQ ID NO: 302931 - RNA, 19 nt, Homo sapiens
  misc_RNA (1)...(19): siRNA sense strand
cuggagaacuauaagaaaa

SEQ ID NO: 302932 - RNA, 19 nt, Homo sapiens
  misc_RNA (1)...(19): siRNA sense strand
gaguacugcaaguuuaaga

SEQ ID NO: 302933 - RNA, 19 nt, Homo sapiens
  misc_RNA (1)...(19): siRNA sense strand
gaacuccuugcugcuguga

SEQ ID NO: 302934 - RNA, 19 nt, Homo sapiens
  misc_RNA (1)...(19): siRNA sense strand
gugaaguccugucuaaccu

SEQ ID NO: 302935 - RNA, 19 nt, Homo sapiens
  misc_RNA (1)...(19): siRNA sense strand
ggaacaggacagcgacucu

SEQ ID NO: 302936 - RNA, 19 nt, Homo sapiens
  misc_RNA (1)...(19): siRNA sense strand
gagugaaggcagugaaguc

SEQ ID NO: 302937 - RNA, 19 nt, Homo sapiens
  misc_RNA (1)...(19): siRNA sense strand
ccagcccaguggaagaaga

SEQ ID NO: 302938 - RNA, 19 nt, Homo sapiens
  misc_RNA (1)...(19): siRNA sense strand
caccauagucucccuggau

SEQ ID NO: 302939 - RNA, 19 nt, Homo sapiens
  misc_RNA (1)...(19): siRNA sense strand
agggauccuuuccuucuau

SEQ ID NO: 302940 - RNA, 19 nt, Homo sapiens
  misc_RNA (1)...(19): siRNA sense strand
ugacaucagaacucaagug

SEQ ID NO: 302941 - RNA, 19 nt, Homo sapiens
  misc_RNA (1)...(19): siRNA sense strand
uacguagggcugaaggaua

SEQ ID NO: 302942 - RNA, 19 nt, Homo sapiens
  misc_RNA (1)...(19): siRNA sense strand
guacugcaaguuuaagaac

SEQ ID NO: 302943 - RNA, 19 nt, Homo sapiens
  misc_RNA (1)...(19): siRNA sense strand
uuaagaacacugaagacau

SEQ ID NO: 302944 - RNA, 19 nt, Homo sapiens
  misc_RNA (1)...(19): siRNA sense strand
gggcauccgcaaaguuauc

SEQ ID NO: 302945 - RNA, 19 nt, Homo sapiens
  misc_RNA (1)...(19): siRNA sense strand
acacugaagacaucaccuu

SEQ ID NO: 302946 - RNA, 19 nt, Homo sapiens
  misc_RNA (1)...(19): siRNA sense strand
gcuuucugcugcccugauc

SEQ ID NO: 302947 - RNA, 19 nt, Homo sapiens
  misc_RNA (1)...(19): siRNA sense strand
cggaauccacuguacacuu

SEQ ID NO: 302948 - RNA, 19 nt, Homo sapiens
  misc_RNA (1)...(19): siRNA sense strand
ugugacuucugccuugaug

SEQ ID NO: 302949 - RNA, 19 nt, Homo sapiens
  misc_RNA (1)...(19): siRNA sense strand
gcaaaguccugugaagaua

SEQ ID NO: 302950 - RNA, 19 nt, Homo sapiens
  misc_RNA (1)...(19): siRNA sense strand
ggacgugaaugacaacaca

SEQ ID NO: 302951 - RNA, 19 nt, Homo sapiens
  misc_RNA (1)...(19): siRNA sense strand
caaugaaugugcacuccua

SEQ ID NO: 302952 - RNA, 19 nt, Homo sapiens
  misc_RNA (1)...(19): siRNA sense strand
guaaagcacuccggaucuu

SEQ ID NO: 302953 - RNA, 19 nt, Homo sapiens
  misc_RNA (1)...(19): siRNA sense strand
aauaaugccuacuguguga

SEQ ID NO: 302954 - RNA, 19 nt, Homo sapiens
  misc_RNA (1)...(19): siRNA sense strand
caauaucucugugggaaug

SEQ ID NO: 302955 - RNA, 19 nt, Homo sapiens
  misc_RNA (1)...(19): siRNA sense strand
guaaagaaacgugugagaa

SEQ ID NO: 302956 - RNA, 19 nt, Homo sapiens
  misc_RNA (1)...(19): siRNA sense strand
ccaggcagcuccacaugug

SEQ ID NO: 302957 - RNA, 19 nt, Homo sapiens
  misc_RNA (1)...(19): siRNA sense strand
gaaugaacaagaagaacaa

SEQ ID NO: 302958 - RNA, 19 nt, Homo sapiens
  misc_RNA (1)...(19): siRNA sense strand
guaaagagcagccagaacu

SEQ ID NO: 302959 - RNA, 19 nt, Homo sapiens
  misc_RNA (1)...(19): siRNA sense strand
ggaaugauggagucaccua

SEQ ID NO: 302960 - RNA, 19 nt, Homo sapiens
  misc_RNA (1)...(19): siRNA sense strand
gaccaauaaugccuacugu

SEQ ID NO: 302961 - RNA, 19 nt, Homo sapiens
  misc_RNA (1)...(19): siRNA sense strand
gaugagcugugcccugaca

SEQ ID NO: 302962 - RNA, 19 nt, Homo sapiens
  misc_RNA (1)...(19): siRNA sense strand
gguguucccucugugauga

SEQ ID NO: 302963 - RNA, 19 nt, Homo sapiens
  misc_RNA (1)...(19): siRNA sense strand
ccaauaaugccuacugugu

SEQ ID NO: 302964 - RNA, 19 nt, Homo sapiens
  misc_RNA (1)...(19): siRNA sense strand
guaccaaggcagauguaaa

SEQ ID NO: 302965 - RNA, 19 nt, Homo sapiens
  misc_RNA (1)...(19): siRNA sense strand
ccuacugugugaccuguaa

SEQ ID NO: 302966 - RNA, 19 nt, Homo sapiens
  misc_RNA (1)...(19): siRNA sense strand
uaaagaaacgugugagaac

SEQ ID NO: 302967 - RNA, 19 nt, Homo sapiens
  misc_RNA (1)...(19): siRNA sense strand
gggaaaaccuaccgcaaug

SEQ ID NO: 302968 - RNA, 19 nt, Homo sapiens
  misc_RNA (1)...(19): siRNA sense strand
aaaccuaccgcaaugaaug

SEQ ID NO: 302969 - RNA, 19 nt, Homo sapiens
  misc_RNA (1)...(19): siRNA sense strand
uuuaugggauuucaagguu

SEQ ID NO: 302970 - RNA, 19 nt, Homo sapiens
  misc_RNA (1)...(19): siRNA sense strand
agaccgaacugagcaagga

SEQ ID NO: 302971 - RNA, 19 nt, Homo sapiens
  misc_RNA (1)...(19): siRNA sense strand
cgaaugaacaagaagaaca

SEQ ID NO: 302972 - RNA, 19 nt, Homo sapiens
  misc_RNA (1)...(19): siRNA sense strand
ccgaggaggacgugaauga

SEQ ID NO: 302973 - RNA, 19 nt, Homo sapiens
  misc_RNA (1)...(19): siRNA sense strand
caaaguccugugaagauau

SEQ ID NO: 302974 - RNA, 19 nt, Homo sapiens
  misc_RNA (1)...(19): siRNA sense strand
ggaccgaggaggacgugaa

SEQ ID NO: 302975 - RNA, 19 nt, Homo sapiens
  misc_RNA (1)...(19): siRNA sense strand
aaagcaaaguccugugaag

SEQ ID NO: 302976 - RNA, 19 nt, Homo sapiens
  misc_RNA (1)...(19): siRNA sense strand
gaaugacaacacacucuuc

SEQ ID NO: 302977 - RNA, 19 nt, Homo sapiens
  misc_RNA (1)...(19): siRNA sense strand
ggacuguggaccugggaaa

SEQ ID NO: 302978 - RNA, 19 nt, Homo sapiens
  misc_RNA (1)...(19): siRNA sense strand
gaggaggacgugaaugaca

SEQ ID NO: 302979 - RNA, 19 nt, Homo sapiens
  misc_RNA (1)...(19): siRNA sense strand
caaagcaaaguccugugaa

SEQ ID NO: 302980 - RNA, 19 nt, Homo sapiens
  misc_RNA (1)...(19): siRNA sense strand
ccuaaaggcaagauguaaa

SEQ ID NO: 302981 - RNA, 19 nt, Homo sapiens
  misc_RNA (1)...(19): siRNA sense strand
ugacaacacacucuucaag

SEQ ID NO: 302982 - RNA, 19 nt, Homo sapiens
  misc_RNA (1)...(19): siRNA sense strand
gaacugcuggcuccgucaa

SEQ ID NO: 302983 - RNA, 19 nt, Homo sapiens
  misc_RNA (1)...(19): siRNA sense strand
gacaacacacucuucaagu

SEQ ID NO: 302984 - RNA, 19 nt, Homo sapiens
  misc_RNA (1)...(19): siRNA sense strand
gaaugugcacuccuaaagg

SEQ ID NO: 302985 - RNA, 19 nt, Homo sapiens
  misc_RNA (1)...(19): siRNA sense strand
gaaaaccuaccgcaaugaa

SEQ ID NO: 302986 - RNA, 19 nt, Homo sapiens
  misc_RNA (1)...(19): siRNA sense strand
aaaguccugugaagauauc

SEQ ID NO: 302987 - RNA, 19 nt, Homo sapiens
  misc_RNA (1)...(19): siRNA sense strand
ucaaguggaugauuuucaa

SEQ ID NO: 302988 - RNA, 19 nt, Homo sapiens
  misc_RNA (1)...(19): siRNA sense strand
cagcgagugugccaugaag

SEQ ID NO: 302989 - RNA, 19 nt, Homo sapiens
  misc_RNA (1)...(19): siRNA sense strand
aggaggacgugaaugacaa

SEQ ID NO: 302990 - RNA, 19 nt, Homo sapiens
  misc_RNA (1)...(19): siRNA sense strand
gcgagugugccaugaagga

SEQ ID NO: 302991 - RNA, 19 nt, Homo sapiens
  misc_RNA (1)...(19): siRNA sense strand
ugaaugugcacuccuaaag

SEQ ID NO: 302992 - RNA, 19 nt, Homo sapiens
  misc_RNA (1)...(19): siRNA sense strand
ccaacugcauccccuguaa

SEQ ID NO: 302993 - RNA, 19 nt, Homo sapiens
  misc_RNA (1)...(19): siRNA sense strand
cuaaaggcaagauguaaag

SEQ ID NO: 302994 - RNA, 19 nt, Homo sapiens
  misc_RNA (1)...(19): siRNA sense strand
gcaauaucucugugggaau

SEQ ID NO: 302995 - RNA, 19 nt, Homo sapiens
  misc_RNA (1)...(19): siRNA sense strand
cugcugcucugccaguuca

SEQ ID NO: 302996 - RNA, 19 nt, Homo sapiens
  misc_RNA (1)...(19): siRNA sense strand
gaccgaggaggacgugaau

SEQ ID NO: 302997 - RNA, 19 nt, Homo sapiens
  misc_RNA (1)...(19): siRNA sense strand
caggugugcuacuggaagu

SEQ ID NO: 302998 - RNA, 19 nt, Homo sapiens
  misc_RNA (1)...(19): siRNA sense strand
ugaaugacaacacacucuu

SEQ ID NO: 302999 - RNA, 19 nt, Homo sapiens
  misc_RNA (1)...(19): siRNA sense strand
uaaagagcagccagaacug

SEQ ID NO: 303000 - RNA, 19 nt, Homo sapiens
  misc_RNA (1)...(19): siRNA sense strand
gccgaaugaacaagaagaa

SEQ ID NO: 303001 - RNA, 19 nt, Homo sapiens
  misc_RNA (1)...(19): siRNA sense strand
uaaagcacuccggaucuug

SEQ ID NO: 303002 - RNA, 19 nt, Homo sapiens
  misc_RNA (1)...(19): siRNA sense strand
aagcaaaguccugugaaga

SEQ ID NO: 303003 - RNA, 19 nt, Homo sapiens
  misc_RNA (1)...(19): siRNA sense strand
uaaaggcaagauguaaaga

SEQ ID NO: 303004 - RNA, 19 nt, Homo sapiens
  misc_RNA (1)...(19): siRNA sense strand
gcaaaguccugugaagaua

SEQ ID NO: 303005 - RNA, 19 nt, Homo sapiens
  misc_RNA (1)...(19): siRNA sense strand
gacuacagcuuuccuauau

SEQ ID NO: 303006 - RNA, 19 nt, Homo sapiens
  misc_RNA (1)...(19): siRNA sense strand
ggacuacagcuuuccuaua

SEQ ID NO: 303007 - RNA, 19 nt, Homo sapiens
  misc_RNA (1)...(19): siRNA sense strand
ggacgugaaugacaacaca

SEQ ID NO: 303008 - RNA, 19 nt, Homo sapiens
  misc_RNA (1)...(19): siRNA sense strand
caaugaaugugcacuccua

SEQ ID NO: 303009 - RNA, 19 nt, Homo sapiens
  misc_RNA (1)...(19): siRNA sense strand
guaaagcacuccggaucuu

SEQ ID NO: 303010 - RNA, 19 nt, Homo sapiens
  misc_RNA (1)...(19): siRNA sense strand
aauaaugccuacuguguga

SEQ ID NO: 303011 - RNA, 19 nt, Homo sapiens
  misc_RNA (1)...(19): siRNA sense strand
caauaucucugugggaaug

SEQ ID NO: 303012 - RNA, 19 nt, Homo sapiens
  misc_RNA (1)...(19): siRNA sense strand
ggaagaggaggaagaugaa

SEQ ID NO: 303013 - RNA, 19 nt, Homo sapiens
  misc_RNA (1)...(19): siRNA sense strand
guaaagaaacgugugagaa

SEQ ID NO: 303014 - RNA, 19 nt, Homo sapiens
  misc_RNA (1)...(19): siRNA sense strand
ccaggcagcuccacaugug

SEQ ID NO: 303015 - RNA, 19 nt, Homo sapiens
  misc_RNA (1)...(19): siRNA sense strand
gaaugaacaagaagaacaa

SEQ ID NO: 303016 - RNA, 19 nt, Homo sapiens
  misc_RNA (1)...(19): siRNA sense strand
guaaagagcagccagaacu

SEQ ID NO: 303017 - RNA, 19 nt, Homo sapiens
  misc_RNA (1)...(19): siRNA sense strand
gaccaggacuacagcuuuc

SEQ ID NO: 303018 - RNA, 19 nt, Homo sapiens
  misc_RNA (1)...(19): siRNA sense strand
ggaaugauggagucaccua

SEQ ID NO: 303019 - RNA, 19 nt, Homo sapiens
  misc_RNA (1)...(19): siRNA sense strand
gaccaauaaugccuacugu

SEQ ID NO: 303020 - RNA, 19 nt, Homo sapiens
  misc_RNA (1)...(19): siRNA sense strand
gaugagcugugcccugaca

SEQ ID NO: 303021 - RNA, 19 nt, Homo sapiens
  misc_RNA (1)...(19): siRNA sense strand
gguguucccucugugauga

SEQ ID NO: 303022 - RNA, 19 nt, Homo sapiens
  misc_RNA (1)...(19): siRNA sense strand
ccaauaaugccuacugugu

SEQ ID NO: 303023 - RNA, 19 nt, Homo sapiens
  misc_RNA (1)...(19): siRNA sense strand
cuacagcuuuccuauaucu

SEQ ID NO: 303024 - RNA, 19 nt, Homo sapiens
  misc_RNA (1)...(19): siRNA sense strand
guaccaaggcagauguaaa

SEQ ID NO: 303025 - RNA, 19 nt, Homo sapiens
  misc_RNA (1)...(19): siRNA sense strand
ccuacugugugaccuguaa

SEQ ID NO: 303026 - RNA, 19 nt, Homo sapiens
  misc_RNA (1)...(19): siRNA sense strand
uaaagaaacgugugagaac

SEQ ID NO: 303027 - RNA, 19 nt, Homo sapiens
  misc_RNA (1)...(19): siRNA sense strand
gggaaaaccuaccgcaaug

SEQ ID NO: 303028 - RNA, 19 nt, Homo sapiens
  misc_RNA (1)...(19): siRNA sense strand
aaaccuaccgcaaugaaug

SEQ ID NO: 303029 - RNA, 19 nt, Homo sapiens
  misc_RNA (1)...(19): siRNA sense strand
agaccgaacugagcaagga

SEQ ID NO: 303030 - RNA, 19 nt, Homo sapiens
  misc_RNA (1)...(19): siRNA sense strand
uuuaugggauuucaagguu

SEQ ID NO: 303031 - RNA, 19 nt, Homo sapiens
  misc_RNA (1)...(19): siRNA sense strand
cgaaugaacaagaagaaca

SEQ ID NO: 303032 - RNA, 19 nt, Homo sapiens
  misc_RNA (1)...(19): siRNA sense strand
ccgaggaggacgugaauga

SEQ ID NO: 303033 - RNA, 19 nt, Homo sapiens
  misc_RNA (1)...(19): siRNA sense strand
ggaccgaggaggacgugaa

SEQ ID NO: 303034 - RNA, 19 nt, Homo sapiens
  misc_RNA (1)...(19): siRNA sense strand
caaaguccugugaagauau

SEQ ID NO: 303035 - RNA, 19 nt, Homo sapiens
  misc_RNA (1)...(19): siRNA sense strand
aaagcaaaguccugugaag

SEQ ID NO: 303036 - RNA, 19 nt, Homo sapiens
  misc_RNA (1)...(19): siRNA sense strand
ggacuguggaccugggaaa

SEQ ID NO: 303037 - RNA, 19 nt, Homo sapiens
  misc_RNA (1)...(19): siRNA sense strand
gaaugacaacacacucuuc

SEQ ID NO: 303038 - RNA, 19 nt, Homo sapiens
  misc_RNA (1)...(19): siRNA sense strand
ccuaaaggcaagauguaaa

SEQ ID NO: 303039 - RNA, 19 nt, Homo sapiens
  misc_RNA (1)...(19): siRNA sense strand
caaagcaaaguccugugaa

SEQ ID NO: 303040 - RNA, 19 nt, Homo sapiens
  misc_RNA (1)...(19): siRNA sense strand
gaggaggacgugaaugaca

SEQ ID NO: 303041 - RNA, 19 nt, Homo sapiens
  misc_RNA (1)...(19): siRNA sense strand
ugacaacacacucuucaag

SEQ ID NO: 303042 - RNA, 19 nt, Homo sapiens
  misc_RNA (1)...(19): siRNA sense strand
ggaagacaccgaggaagag

SEQ ID NO: 303043 - RNA, 19 nt, Homo sapiens
  misc_RNA (1)...(19): siRNA sense strand
gacaacacacucuucaagu

SEQ ID NO: 303044 - RNA, 19 nt, Homo sapiens
  misc_RNA (1)...(19): siRNA sense strand
gaacugcuggcuccgucaa

SEQ ID NO: 303045 - RNA, 19 nt, Homo sapiens
  misc_RNA (1)...(19): siRNA sense strand
gaaugugcacuccuaaagg

SEQ ID NO: 303046 - RNA, 19 nt, Homo sapiens
  misc_RNA (1)...(19): siRNA sense strand
aggaagaggaggaagauga

SEQ ID NO: 303047 - RNA, 19 nt, Homo sapiens
  misc_RNA (1)...(19): siRNA sense strand
cggaagacaccgaggaaga

SEQ ID NO: 303048 - RNA, 19 nt, Homo sapiens
  misc_RNA (1)...(19): siRNA sense strand
gaaaaccuaccgcaaugaa

SEQ ID NO: 303049 - RNA, 19 nt, Homo sapiens
  misc_RNA (1)...(19): siRNA sense strand
aaaguccugugaagauauc

SEQ ID NO: 303050 - RNA, 19 nt, Homo sapiens
  misc_RNA (1)...(19): siRNA sense strand
ucaaguggaugauuuucaa

SEQ ID NO: 303051 - RNA, 19 nt, Homo sapiens
  misc_RNA (1)...(19): siRNA sense strand
agaccaggacuacagcuuu

SEQ ID NO: 303052 - RNA, 19 nt, Homo sapiens
  misc_RNA (1)...(19): siRNA sense strand
cagcgagugugccaugaag

SEQ ID NO: 303053 - RNA, 19 nt, Homo sapiens
  misc_RNA (1)...(19): siRNA sense strand
aggaggacgugaaugacaa

SEQ ID NO: 303054 - RNA, 19 nt, Homo sapiens
  misc_RNA (1)...(19): siRNA sense strand
gcgagugugccaugaagga

SEQ ID NO: 303055 - RNA, 19 nt, Homo sapiens
  misc_RNA (1)...(19): siRNA sense strand
ugaaugugcacuccuaaag

SEQ ID NO: 303056 - RNA, 19 nt, Homo sapiens
  misc_RNA (1)...(19): siRNA sense strand
ccaacugcauccccuguaa

SEQ ID NO: 303057 - RNA, 19 nt, Homo sapiens
  misc_RNA (1)...(19): siRNA sense strand
gcuuuccuauaucuucuau

SEQ ID NO: 303058 - RNA, 19 nt, Homo sapiens
  misc_RNA (1)...(19): siRNA sense strand
cuaaaggcaagauguaaag

SEQ ID NO: 303059 - RNA, 19 nt, Homo sapiens
  misc_RNA (1)...(19): siRNA sense strand
gcaauaucucugugggaau

SEQ ID NO: 303060 - RNA, 19 nt, Homo sapiens
  misc_RNA (1)...(19): siRNA sense strand
cugcugcucugccaguuca

SEQ ID NO: 303061 - RNA, 19 nt, Homo sapiens
  misc_RNA (1)...(19): siRNA sense strand
uaaagagcagccagaacug

SEQ ID NO: 303062 - RNA, 19 nt, Homo sapiens
  misc_RNA (1)...(19): siRNA sense strand
ccuauaucuucuauucuag

SEQ ID NO: 303063 - RNA, 19 nt, Homo sapiens
  misc_RNA (1)...(19): siRNA sense strand
caggugugcuacuggaagu

SEQ ID NO: 303064 - RNA, 19 nt, Homo sapiens
  misc_RNA (1)...(19): siRNA sense strand
ugaaugacaacacacucuu

SEQ ID NO: 303065 - RNA, 19 nt, Homo sapiens
  misc_RNA (1)...(19): siRNA sense strand
gaccgaggaggacgugaau

SEQ ID NO: 303066 - RNA, 19 nt, Homo sapiens
  misc_RNA (1)...(19): siRNA sense strand
uaaaggcaagauguaaaga

SEQ ID NO: 303067 - RNA, 19 nt, Homo sapiens
  misc_RNA (1)...(19): siRNA sense strand
cagcuuuccuauaucuucu

SEQ ID NO: 303068 - RNA, 19 nt, Homo sapiens
  misc_RNA (1)...(19): siRNA sense strand
aagaugaagaccaggacua

SEQ ID NO: 303069 - RNA, 19 nt, Homo sapiens
  misc_RNA (1)...(19): siRNA sense strand
uaaagcacuccggaucuug

SEQ ID NO: 303070 - RNA, 19 nt, Homo sapiens
  misc_RNA (1)...(19): siRNA sense strand
gccgaaugaacaagaagaa

SEQ ID NO: 303071 - RNA, 19 nt, Homo sapiens
  misc_RNA (1)...(19): siRNA sense strand
aagcaaaguccugugaaga

SEQ ID NO: 303072 - RNA, 19 nt, Homo sapiens
  misc_RNA (1)...(19): siRNA sense strand
ggacugcaaugaccuauuc

SEQ ID NO: 303073 - RNA, 19 nt, Homo sapiens
  misc_RNA (1)...(19): siRNA sense strand
ggaggaagcugcccagauc

SEQ ID NO: 303074 - RNA, 19 nt, Homo sapiens
  misc_RNA (1)...(19): siRNA sense strand
ccaguuggcuuguguaugg

SEQ ID NO: 303075 - RNA, 19 nt, Homo sapiens
  misc_RNA (1)...(19): siRNA sense strand
ccaacaugcugcaccuuaa

SEQ ID NO: 303076 - RNA, 19 nt, Homo sapiens
  misc_RNA (1)...(19): siRNA sense strand
acccacagcuacaacauua

SEQ ID NO: 303077 - RNA, 19 nt, Homo sapiens
  misc_RNA (1)...(19): siRNA sense strand
caaguggccuuugcugaug

SEQ ID NO: 303078 - RNA, 19 nt, Homo sapiens
  misc_RNA (1)...(19): siRNA sense strand
uuaaggagcugggacugaa

SEQ ID NO: 303079 - RNA, 19 nt, Homo sapiens
  misc_RNA (1)...(19): siRNA sense strand
gccaacaugcugcaccuua

SEQ ID NO: 303080 - RNA, 19 nt, Homo sapiens
  misc_RNA (1)...(19): siRNA sense strand
ggagaugacggaccacugu

SEQ ID NO: 303081 - RNA, 19 nt, Homo sapiens
  misc_RNA (1)...(19): siRNA sense strand
guacugggccugccugcaa

SEQ ID NO: 303082 - RNA, 19 nt, Homo sapiens
  misc_RNA (1)...(19): siRNA sense strand
gcaugaaccugcgggagau

SEQ ID NO: 303083 - RNA, 19 nt, Homo sapiens
  misc_RNA (1)...(19): siRNA sense strand
gcacaggccaacccaggaa

SEQ ID NO: 303084 - RNA, 19 nt, Homo sapiens
  misc_RNA (1)...(19): siRNA sense strand
uacaggaacucuaucucaa

SEQ ID NO: 303085 - RNA, 19 nt, Homo sapiens
  misc_RNA (1)...(19): siRNA sense strand
caacaacaacgcucucagu

SEQ ID NO: 303086 - RNA, 19 nt, Homo sapiens
  misc_RNA (1)...(19): siRNA sense strand
uccuagaccucaacaagaa

SEQ ID NO: 303087 - RNA, 19 nt, Homo sapiens
  misc_RNA (1)...(19): siRNA sense strand
caacauuacccgccuccuu

SEQ ID NO: 303088 - RNA, 19 nt, Homo sapiens
  misc_RNA (1)...(19): siRNA sense strand
gagcugggacugaacaaca

SEQ ID NO: 303089 - RNA, 19 nt, Homo sapiens
  misc_RNA (1)...(19): siRNA sense strand
uaagacgguuagugugguu

SEQ ID NO: 303090 - RNA, 19 nt, Homo sapiens
  misc_RNA (1)...(19): siRNA sense strand
gaagaggcagggcuauaca

SEQ ID NO: 303091 - RNA, 19 nt, Homo sapiens
  misc_RNA (1)...(19): siRNA sense strand
caacuuggagauacucaug

SEQ ID NO: 303092 - RNA, 19 nt, Homo sapiens
  misc_RNA (1)...(19): siRNA sense strand
gugguacccuggcauguuc

SEQ ID NO: 303093 - RNA, 19 nt, Homo sapiens
  misc_RNA (1)...(19): siRNA sense strand
uugaaaugcugcccaacuu

SEQ ID NO: 303094 - RNA, 19 nt, Homo sapiens
  misc_RNA (1)...(19): siRNA sense strand
gaugacggaccacuguuug

SEQ ID NO: 303095 - RNA, 19 nt, Homo sapiens
  misc_RNA (1)...(19): siRNA sense strand
cagaagaggcagggcuaua

SEQ ID NO: 303096 - RNA, 19 nt, Homo sapiens
  misc_RNA (1)...(19): siRNA sense strand
ggaccaaagaggccacuuc

SEQ ID NO: 303097 - RNA, 19 nt, Homo sapiens
  misc_RNA (1)...(19): siRNA sense strand
uaucacauccugcuaucuu

SEQ ID NO: 303098 - RNA, 19 nt, Homo sapiens
  misc_RNA (1)...(19): siRNA sense strand
cuacaggaacucuaucuca

SEQ ID NO: 303099 - RNA, 19 nt, Homo sapiens
  misc_RNA (1)...(19): siRNA sense strand
aagcuggacaucaccaaua

SEQ ID NO: 303100 - RNA, 19 nt, Homo sapiens
  misc_RNA (1)...(19): siRNA sense strand
ugaccaagcuggacaucac

SEQ ID NO: 303101 - RNA, 19 nt, Homo sapiens
  misc_RNA (1)...(19): siRNA sense strand
ggccacuucuugccacaga

SEQ ID NO: 303102 - RNA, 19 nt, Homo sapiens
  misc_RNA (1)...(19): siRNA sense strand
gauuggcggcaacaaggua

SEQ ID NO: 303103 - RNA, 19 nt, Homo sapiens
  misc_RNA (1)...(19): siRNA sense strand
gagacacuguugccaccau

SEQ ID NO: 303104 - RNA, 19 nt, Homo sapiens
  misc_RNA (1)...(19): siRNA sense strand
gaacccacagcuacaacau

SEQ ID NO: 303105 - RNA, 19 nt, Homo sapiens
  misc_RNA (1)...(19): siRNA sense strand
cugcagagcaacagcauug

SEQ ID NO: 303106 - RNA, 19 nt, Homo sapiens
  misc_RNA (1)...(19): siRNA sense strand
agcuggacaucaccaauaa

SEQ ID NO: 303107 - RNA, 19 nt, Homo sapiens
  misc_RNA (1)...(19): siRNA sense strand
gaccaaagaggccacuucu

SEQ ID NO: 303108 - RNA, 19 nt, Homo sapiens
  misc_RNA (1)...(19): siRNA sense strand
agacacuguugccaccauu

SEQ ID NO: 303109 - RNA, 19 nt, Homo sapiens
  misc_RNA (1)...(19): siRNA sense strand
ugaaaugcugcccaacuug

SEQ ID NO: 303110 - RNA, 19 nt, Homo sapiens
  misc_RNA (1)...(19): siRNA sense strand
ggucuccaucgacaaguuu

SEQ ID NO: 303111 - RNA, 19 nt, Homo sapiens
  misc_RNA (1)...(19): siRNA sense strand
ucaaguuccuagaccucaa

SEQ ID NO: 303112 - RNA, 19 nt, Homo sapiens
  misc_RNA (1)...(19): siRNA sense strand
ccagcugggcuucgacuga

SEQ ID NO: 303113 - RNA, 19 nt, Homo sapiens
  misc_RNA (1)...(19): siRNA sense strand
uggagacccucaugcucaa

SEQ ID NO: 303114 - RNA, 19 nt, Homo sapiens
  misc_RNA (1)...(19): siRNA sense strand
ggagggugacagcagaaga

SEQ ID NO: 303115 - RNA, 19 nt, Homo sapiens
  misc_RNA (1)...(19): siRNA sense strand
caacaugcugcaccuuaag

SEQ ID NO: 303116 - RNA, 19 nt, Homo sapiens
  misc_RNA (1)...(19): siRNA sense strand
gggaggaagcugcccagau

SEQ ID NO: 303117 - RNA, 19 nt, Homo sapiens
  misc_RNA (1)...(19): siRNA sense strand
gcagagcaacagcauuguc

SEQ ID NO: 303118 - RNA, 19 nt, Homo sapiens
  misc_RNA (1)...(19): siRNA sense strand
ggcugcaccucaacuccaa

SEQ ID NO: 303119 - RNA, 19 nt, Homo sapiens
  misc_RNA (1)...(19): siRNA sense strand
ccuaucacauccugcuauc

SEQ ID NO: 303120 - RNA, 19 nt, Homo sapiens
  misc_RNA (1)...(19): siRNA sense strand
gcugacacuaagacgguua

SEQ ID NO: 303121 - RNA, 19 nt, Homo sapiens
  misc_RNA (1)...(19): siRNA sense strand
gagaugacggaccacuguu

SEQ ID NO: 303122 - RNA, 19 nt, Homo sapiens
  misc_RNA (1)...(19): siRNA sense strand
uuggagauacucaugauug

SEQ ID NO: 303123 - RNA, 19 nt, Homo sapiens
  misc_RNA (1)...(19): siRNA sense strand
uggagauacucaugauugg

SEQ ID NO: 303124 - RNA, 19 nt, Homo sapiens
  misc_RNA (1)...(19): siRNA sense strand
ggaacccacagcuacaaca

SEQ ID NO: 303125 - RNA, 19 nt, Homo sapiens
  misc_RNA (1)...(19): siRNA sense strand
guuccuagaccucaacaag

SEQ ID NO: 303126 - RNA, 19 nt, Homo sapiens
  misc_RNA (1)...(19): siRNA sense strand
ccaccauugucucaaaauu

SEQ ID NO: 303127 - RNA, 19 nt, Homo sapiens
  misc_RNA (1)...(19): siRNA sense strand
ugggcuaccuggccaaucu

SEQ ID NO: 303128 - RNA, 19 nt, Homo sapiens
  misc_RNA (1)...(19): siRNA sense strand
cagccuacaggaacucuau

SEQ ID NO: 303129 - RNA, 19 nt, Homo sapiens
  misc_RNA (1)...(19): siRNA sense strand
ccagauggagacccucaug

SEQ ID NO: 303130 - RNA, 19 nt, Homo sapiens
  misc_RNA (1)...(19): siRNA sense strand
ccgagacugugauuuccau

SEQ ID NO: 303131 - RNA, 19 nt, Homo sapiens
  misc_RNA (1)...(19): siRNA sense strand
gcagaagaggcagggcuau

SEQ ID NO: 303132 - RNA, 19 nt, Homo sapiens
  misc_RNA (1)...(19): siRNA sense strand
gccugcaccuagaggagaa

SEQ ID NO: 303133 - RNA, 19 nt, Homo sapiens
  misc_RNA (1)...(19): siRNA sense strand
gagggugacagcagaagag

SEQ ID NO: 303134 - RNA, 19 nt, Homo sapiens
  misc_RNA (1)...(19): siRNA sense strand
uugccaccauugucucaaa

SEQ ID NO: 303135 - RNA, 19 nt, Homo sapiens
  misc_RNA (1)...(19): siRNA sense strand
guaaagagucgccuaaaua

SEQ ID NO: 303136 - RNA, 19 nt, Homo sapiens
  misc_RNA (1)...(19): siRNA sense strand
ugacagagaugguaaagag

SEQ ID NO: 303137 - RNA, 19 nt, Homo sapiens
  misc_RNA (1)...(19): siRNA sense strand
ccauagaguuuguguuuga

SEQ ID NO: 303138 - RNA, 19 nt, Homo sapiens
  misc_RNA (1)...(19): siRNA sense strand
gguaaagagucgccuaaau

SEQ ID NO: 303139 - RNA, 19 nt, Homo sapiens
  misc_RNA (1)...(19): siRNA sense strand
gacuggagcuggagaguga

SEQ ID NO: 303140 - RNA, 19 nt, Homo sapiens
  misc_RNA (1)...(19): siRNA sense strand
ggugacagauggcaaggaa

SEQ ID NO: 303141 - RNA, 19 nt, Homo sapiens
  misc_RNA (1)...(19): siRNA sense strand
cuugguaacuuccgcuuua

SEQ ID NO: 303142 - RNA, 19 nt, Homo sapiens
  misc_RNA (1)...(19): siRNA sense strand
ccucugggcuggaugacua

SEQ ID NO: 303143 - RNA, 19 nt, Homo sapiens
  misc_RNA (1)...(19): siRNA sense strand
ccuuaaggcucaccacuga

SEQ ID NO: 303144 - RNA, 19 nt, Homo sapiens
  misc_RNA (1)...(19): siRNA sense strand
ccacugaguucgucaagag

SEQ ID NO: 303145 - RNA, 19 nt, Homo sapiens
  misc_RNA (1)...(19): siRNA sense strand
uaaagagucgccuaaauag

SEQ ID NO: 303146 - RNA, 19 nt, Homo sapiens
  misc_RNA (1)...(19): siRNA sense strand
agagagcgcuuugagaaga

SEQ ID NO: 303147 - RNA, 19 nt, Homo sapiens
  misc_RNA (1)...(19): siRNA sense strand
ggaccagccuugucuuacu

SEQ ID NO: 303148 - RNA, 19 nt, Homo sapiens
  misc_RNA (1)...(19): siRNA sense strand
cagcagagagccuggauga

SEQ ID NO: 303149 - RNA, 19 nt, Homo sapiens
  misc_RNA (1)...(19): siRNA sense strand
caacgugguaggcaaugua

SEQ ID NO: 303150 - RNA, 19 nt, Homo sapiens
  misc_RNA (1)...(19): siRNA sense strand
guacuucugcccucccuuu

SEQ ID NO: 303151 - RNA, 19 nt, Homo sapiens
  misc_RNA (1)...(19): siRNA sense strand
uuagagagcgcuuugagaa

SEQ ID NO: 303152 - RNA, 19 nt, Homo sapiens
  misc_RNA (1)...(19): siRNA sense strand
caacugcaguauguagaug

SEQ ID NO: 303153 - RNA, 19 nt, Homo sapiens
  misc_RNA (1)...(19): siRNA sense strand
uagaugcucuuggcuaugu

SEQ ID NO: 303154 - RNA, 19 nt, Homo sapiens
  misc_RNA (1)...(19): siRNA sense strand
guaccaggccacaggcuuu

SEQ ID NO: 303155 - RNA, 19 nt, Homo sapiens
  misc_RNA (1)...(19): siRNA sense strand
gcccacugccacuaucuua

SEQ ID NO: 303156 - RNA, 19 nt, Homo sapiens
  misc_RNA (1)...(19): siRNA sense strand
aaccucaacugcaguaugu

SEQ ID NO: 303157 - RNA, 19 nt, Homo sapiens
  misc_RNA (1)...(19): siRNA sense strand
gaccagccuugucuuacug

SEQ ID NO: 303158 - RNA, 19 nt, Homo sapiens
  misc_RNA (1)...(19): siRNA sense strand
ccucaggacucagguacuu

SEQ ID NO: 303159 - RNA, 19 nt, Homo sapiens
  misc_RNA (1)...(19): siRNA sense strand
uguagaugcucuuggcuau

SEQ ID NO: 303160 - RNA, 19 nt, Homo sapiens
  misc_RNA (1)...(19): siRNA sense strand
ccgggugccuccagaauuc

SEQ ID NO: 303161 - RNA, 19 nt, Homo sapiens
  misc_RNA (1)...(19): siRNA sense strand
uaacuuccgcuuuacacuu

SEQ ID NO: 303162 - RNA, 19 nt, Homo sapiens
  misc_RNA (1)...(19): siRNA sense strand
gcuggagagugacuguaga

SEQ ID NO: 303163 - RNA, 19 nt, Homo sapiens
  misc_RNA (1)...(19): siRNA sense strand
aacuuccgcuuuacacuuu

SEQ ID NO: 303164 - RNA, 19 nt, Homo sapiens
  misc_RNA (1)...(19): siRNA sense strand
gaggcuuccuuugggauga

SEQ ID NO: 303165 - RNA, 19 nt, Homo sapiens
  misc_RNA (1)...(19): siRNA sense strand
gcaguugaaguuuaucagu

SEQ ID NO: 303166 - RNA, 19 nt, Homo sapiens
  misc_RNA (1)...(19): siRNA sense strand
gaagacccgcagcccgaaa

SEQ ID NO: 303167 - RNA, 19 nt, Homo sapiens
  misc_RNA (1)...(19): siRNA sense strand
gguggacccagcccucuuu

SEQ ID NO: 303168 - RNA, 19 nt, Homo sapiens
  misc_RNA (1)...(19): siRNA sense strand
ggacaagggcugguauugc

SEQ ID NO: 303169 - RNA, 19 nt, Homo sapiens
  misc_RNA (1)...(19): siRNA sense strand
cauagaguuuguguuugaa

SEQ ID NO: 303170 - RNA, 19 nt, Homo sapiens
  misc_RNA (1)...(19): siRNA sense strand
uuccauagaguuuguguuu

SEQ ID NO: 303171 - RNA, 19 nt, Homo sapiens
  misc_RNA (1)...(19): siRNA sense strand
uauggcagcuacaaugucu

SEQ ID NO: 303172 - RNA, 19 nt, Homo sapiens
  misc_RNA (1)...(19): siRNA sense strand
ucgccuaaauagcugguuu

SEQ ID NO: 303173 - RNA, 19 nt, Homo sapiens
  misc_RNA (1)...(19): siRNA sense strand
gcuucacacccuucaguaa

SEQ ID NO: 303174 - RNA, 19 nt, Homo sapiens
  misc_RNA (1)...(19): siRNA sense strand
ggacccagcccucuuucca

SEQ ID NO: 303175 - RNA, 19 nt, Homo sapiens
  misc_RNA (1)...(19): siRNA sense strand
ugacagauggcaaggaagu

SEQ ID NO: 303176 - RNA, 19 nt, Homo sapiens
  misc_RNA (1)...(19): siRNA sense strand
uagaguuuguguuugaauc

SEQ ID NO: 303177 - RNA, 19 nt, Homo sapiens
  misc_RNA (1)...(19): siRNA sense strand
ggugcuguguggcucaaug

SEQ ID NO: 303178 - RNA, 19 nt, Homo sapiens
  misc_RNA (1)...(19): siRNA sense strand
caaaagcaguacagcugaa

SEQ ID NO: 303179 - RNA, 19 nt, Homo sapiens
  misc_RNA (1)...(19): siRNA sense strand
caaccucaacugcaguaug

SEQ ID NO: 303180 - RNA, 19 nt, Homo sapiens
  misc_RNA (1)...(19): siRNA sense strand
cuaccgcccucacgucuac

SEQ ID NO: 303181 - RNA, 19 nt, Homo sapiens
  misc_RNA (1)...(19): siRNA sense strand
ccgccugcaugccugguuu

SEQ ID NO: 303182 - RNA, 19 nt, Homo sapiens
  misc_RNA (1)...(19): siRNA sense strand
gaaccacacaaaagcagua

SEQ ID NO: 303183 - RNA, 19 nt, Homo sapiens
  misc_RNA (1)...(19): siRNA sense strand
ccaaguauggcagcuacaa

SEQ ID NO: 303184 - RNA, 19 nt, Homo sapiens
  misc_RNA (1)...(19): siRNA sense strand
ggccacaggcuuucuuugg

SEQ ID NO: 303185 - RNA, 19 nt, Homo sapiens
  misc_RNA (1)...(19): siRNA sense strand
gcaccuggaccugcgaugu

SEQ ID NO: 303186 - RNA, 19 nt, Homo sapiens
  misc_RNA (1)...(19): siRNA sense strand
uggugacccugacgacuug

SEQ ID NO: 303187 - RNA, 19 nt, Homo sapiens
  misc_RNA (1)...(19): siRNA sense strand
uguagagccucaggacuca

SEQ ID NO: 303188 - RNA, 19 nt, Homo sapiens
  misc_RNA (1)...(19): siRNA sense strand
gcuccgugccaacguggua

SEQ ID NO: 303189 - RNA, 19 nt, Homo sapiens
  misc_RNA (1)...(19): siRNA sense strand
guucuucuauguggugaca

SEQ ID NO: 303190 - RNA, 19 nt, Homo sapiens
  misc_RNA (1)...(19): siRNA sense strand
aaaugcugauggcuggauu

SEQ ID NO: 303191 - RNA, 19 nt, Homo sapiens
  misc_RNA (1)...(19): siRNA sense strand
uaccucggcuugccaggau

SEQ ID NO: 303192 - RNA, 19 nt, Homo sapiens
  misc_RNA (1)...(19): siRNA sense strand
caaguauggcagcuacaau

SEQ ID NO: 303193 - RNA, 19 nt, Homo sapiens
  misc_RNA (1)...(19): siRNA sense strand
gagagcgcuuugagaagac

SEQ ID NO: 303194 - RNA, 19 nt, Homo sapiens
  misc_RNA (1)...(19): siRNA sense strand
uuugggagcaguacaguga

SEQ ID NO: 303195 - RNA, 19 nt, Homo sapiens
  misc_RNA (1)...(19): siRNA sense strand
ccaaggggcaguugaaguu

SEQ ID NO: 303196 - RNA, 19 nt, Homo sapiens
  misc_RNA (1)...(19): siRNA sense strand
gagcacuccaccacuaugg

SEQ ID NO: 303197 - RNA, 19 nt, Homo sapiens
  misc_RNA (1)...(19): siRNA sense strand
caccuggaccugcgauguu

SEQ ID NO: 303198 - RNA, 19 nt, Homo sapiens
  misc_RNA (1)...(19): siRNA sense strand
aaaucaagcccugccaaga

SEQ ID NO: 303199 - RNA, 19 nt, Homo sapiens
  misc_RNA (1)...(19): siRNA sense strand
gcagcuacaaugucuucug

SEQ ID NO: 303200 - RNA, 19 nt, Homo sapiens
  misc_RNA (1)...(19): siRNA sense strand
gcaggggcaguucuugaua

SEQ ID NO: 303201 - RNA, 19 nt, Homo sapiens
  misc_RNA (1)...(19): siRNA sense strand
gggcuucacacccuucagu

SEQ ID NO: 303202 - RNA, 19 nt, Homo sapiens
  misc_RNA (1)...(19): siRNA sense strand
gacccugccuuaccaaccu

SEQ ID NO: 303203 - RNA, 19 nt, Homo sapiens
  misc_RNA (1)...(19): siRNA sense strand
gagcuggagagugacugua

SEQ ID NO: 303204 - RNA, 19 nt, Homo sapiens
  misc_RNA (1)...(19): siRNA sense strand
gagggaauauguccaauua

SEQ ID NO: 303205 - RNA, 19 nt, Homo sapiens
  misc_RNA (1)...(19): siRNA sense strand
gagaauggauuguggguua

SEQ ID NO: 303206 - RNA, 19 nt, Homo sapiens
  misc_RNA (1)...(19): siRNA sense strand
ggagacuguuggaguauua

SEQ ID NO: 303207 - RNA, 19 nt, Homo sapiens
  misc_RNA (1)...(19): siRNA sense strand
gaauugacaucauggagaa

SEQ ID NO: 303208 - RNA, 19 nt, Homo sapiens
  misc_RNA (1)...(19): siRNA sense strand
gggaauauguccaauuaau

SEQ ID NO: 303209 - RNA, 19 nt, Homo sapiens
  misc_RNA (1)...(19): siRNA sense strand
aaaccuaacuguccgaauu

SEQ ID NO: 303210 - RNA, 19 nt, Homo sapiens
  misc_RNA (1)...(19): siRNA sense strand
guacagcaguuuacaacaa

SEQ ID NO: 303211 - RNA, 19 nt, Homo sapiens
  misc_RNA (1)...(19): siRNA sense strand
gguggaagcucagaaauug

SEQ ID NO: 303212 - RNA, 19 nt, Homo sapiens
  misc_RNA (1)...(19): siRNA sense strand
aaauaugacucucuuggua

SEQ ID NO: 303213 - RNA, 19 nt, Homo sapiens
  misc_RNA (1)...(19): siRNA sense strand
guaacauggugauuaguaa

SEQ ID NO: 303214 - RNA, 19 nt, Homo sapiens
  misc_RNA (1)...(19): siRNA sense strand
ccagaaacuuuaugucuau

SEQ ID NO: 303215 - RNA, 19 nt, Homo sapiens
  misc_RNA (1)...(19): siRNA sense strand
uauaaaugcucgagaguug

SEQ ID NO: 303216 - RNA, 19 nt, Homo sapiens
  misc_RNA (1)...(19): siRNA sense strand
gugcagagcauuaacuaua

SEQ ID NO: 303217 - RNA, 19 nt, Homo sapiens
  misc_RNA (1)...(19): siRNA sense strand
gauuguggguuauuuauuc

SEQ ID NO: 303218 - RNA, 19 nt, Homo sapiens
  misc_RNA (1)...(19): siRNA sense strand
augguuaccuucugaauua

SEQ ID NO: 303219 - RNA, 19 nt, Homo sapiens
  misc_RNA (1)...(19): siRNA sense strand
ggaaagagggcaaacuaga

SEQ ID NO: 303220 - RNA, 19 nt, Homo sapiens
  misc_RNA (1)...(19): siRNA sense strand
acaacacacuggaugauuu

SEQ ID NO: 303221 - RNA, 19 nt, Homo sapiens
  misc_RNA (1)...(19): siRNA sense strand
gggaauauugccagaguua

SEQ ID NO: 303222 - RNA, 19 nt, Homo sapiens
  misc_RNA (1)...(19): siRNA sense strand
gaguuaaccugaccaccaa

SEQ ID NO: 303223 - RNA, 19 nt, Homo sapiens
  misc_RNA (1)...(19): siRNA sense strand
gguaacauggugauuagua

SEQ ID NO: 303224 - RNA, 19 nt, Homo sapiens
  misc_RNA (1)...(19): siRNA sense strand
ggaauucacagcucauguu

SEQ ID NO: 303225 - RNA, 19 nt, Homo sapiens
  misc_RNA (1)...(19): siRNA sense strand
ccagggagcuguggucaug

SEQ ID NO: 303226 - RNA, 19 nt, Homo sapiens
  misc_RNA (1)...(19): siRNA sense strand
cuaaugcugccuauaauaa

SEQ ID NO: 303227 - RNA, 19 nt, Homo sapiens
  misc_RNA (1)...(19): siRNA sense strand
gagguggagauaagaaaua

SEQ ID NO: 303228 - RNA, 19 nt, Homo sapiens
  misc_RNA (1)...(19): siRNA sense strand
guacaacaccgggaauauu

SEQ ID NO: 303229 - RNA, 19 nt, Homo sapiens
  misc_RNA (1)...(19): siRNA sense strand
uagagaagcuugagacacu

SEQ ID NO: 303230 - RNA, 19 nt, Homo sapiens
  misc_RNA (1)...(19): siRNA sense strand
acacugaacuggacuucga

SEQ ID NO: 303231 - RNA, 19 nt, Homo sapiens
  misc_RNA (1)...(19): siRNA sense strand
gugcuaaacacuugguaua

SEQ ID NO: 303232 - RNA, 19 nt, Homo sapiens
  misc_RNA (1)...(19): siRNA sense strand
uggaugauuugcuauugua

SEQ ID NO: 303233 - RNA, 19 nt, Homo sapiens
  misc_RNA (1)...(19): siRNA sense strand
gagaaaucguggcucugaa

SEQ ID NO: 303234 - RNA, 19 nt, Homo sapiens
  misc_RNA (1)...(19): siRNA sense strand
gagguucugugucccaguu

SEQ ID NO: 303235 - RNA, 19 nt, Homo sapiens
  misc_RNA (1)...(19): siRNA sense strand
ugcagagcauuaacuauaa

SEQ ID NO: 303236 - RNA, 19 nt, Homo sapiens
  misc_RNA (1)...(19): siRNA sense strand
cagcucauguucuuucuca

SEQ ID NO: 303237 - RNA, 19 nt, Homo sapiens
  misc_RNA (1)...(19): siRNA sense strand
gaagugaaggagauggaaa

SEQ ID NO: 303238 - RNA, 19 nt, Homo sapiens
  misc_RNA (1)...(19): siRNA sense strand
guggagauaagaaauauga

SEQ ID NO: 303239 - RNA, 19 nt, Homo sapiens
  misc_RNA (1)...(19): siRNA sense strand
gggcaaacuagacauugua

SEQ ID NO: 303240 - RNA, 19 nt, Homo sapiens
  misc_RNA (1)...(19): siRNA sense strand
guggaacgcuuggaauuca

SEQ ID NO: 303241 - RNA, 19 nt, Homo sapiens
  misc_RNA (1)...(19): siRNA sense strand
caccagaacagaagagauu

SEQ ID NO: 303242 - RNA, 19 nt, Homo sapiens
  misc_RNA (1)...(19): siRNA sense strand
gaugugggaccuccaauuc

SEQ ID NO: 303243 - RNA, 19 nt, Homo sapiens
  misc_RNA (1)...(19): siRNA sense strand
gcucgagaguugcggauca

SEQ ID NO: 303244 - RNA, 19 nt, Homo sapiens
  misc_RNA (1)...(19): siRNA sense strand
caaacaaaggacuguauug

SEQ ID NO: 303245 - RNA, 19 nt, Homo sapiens
  misc_RNA (1)...(19): siRNA sense strand
gaaauaugacucucuuggu

SEQ ID NO: 303246 - RNA, 19 nt, Homo sapiens
  misc_RNA (1)...(19): siRNA sense strand
caacacacuggaugauuug

SEQ ID NO: 303247 - RNA, 19 nt, Homo sapiens
  misc_RNA (1)...(19): siRNA sense strand
gaugguuaccuucugaauu

SEQ ID NO: 303248 - RNA, 19 nt, Homo sapiens
  misc_RNA (1)...(19): siRNA sense strand
uauaaaccaucugcuucua

SEQ ID NO: 303249 - RNA, 19 nt, Homo sapiens
  misc_RNA (1)...(19): siRNA sense strand
gaccagaaacuuuaugucu

SEQ ID NO: 303250 - RNA, 19 nt, Homo sapiens
  misc_RNA (1)...(19): siRNA sense strand
guuaccuucugaauuauga

SEQ ID NO: 303251 - RNA, 19 nt, Homo sapiens
  misc_RNA (1)...(19): siRNA sense strand
gaguggaacgcuuggaauu

SEQ ID NO: 303252 - RNA, 19 nt, Homo sapiens
  misc_RNA (1)...(19): siRNA sense strand
guagugguacagcaguuua

SEQ ID NO: 303253 - RNA, 19 nt, Homo sapiens
  misc_RNA (1)...(19): siRNA sense strand
gagaguugcggaucaccua

SEQ ID NO: 303254 - RNA, 19 nt, Homo sapiens
  misc_RNA (1)...(19): siRNA sense strand
gaaaucguggcucugaaga

SEQ ID NO: 303255 - RNA, 19 nt, Homo sapiens
  misc_RNA (1)...(19): siRNA sense strand
ucagaaguuugagaaagaa

SEQ ID NO: 303256 - RNA, 19 nt, Homo sapiens
  misc_RNA (1)...(19): siRNA sense strand
accagaaacuuuaugucua

SEQ ID NO: 303257 - RNA, 19 nt, Homo sapiens
  misc_RNA (1)...(19): siRNA sense strand
gcauuaacuauaacccuuu

SEQ ID NO: 303258 - RNA, 19 nt, Homo sapiens
  misc_RNA (1)...(19): siRNA sense strand
gaaagagggcaaacuagac

SEQ ID NO: 303259 - RNA, 19 nt, Homo sapiens
  misc_RNA (1)...(19): siRNA sense strand
cacacuggaugauuugcua

SEQ ID NO: 303260 - RNA, 19 nt, Homo sapiens
  misc_RNA (1)...(19): siRNA sense strand
ccaaacaaaggacuguauu

SEQ ID NO: 303261 - RNA, 19 nt, Homo sapiens
  misc_RNA (1)...(19): siRNA sense strand
cgagaaaucguggcucuga

SEQ ID NO: 303262 - RNA, 19 nt, Homo sapiens
  misc_RNA (1)...(19): siRNA sense strand
ugacucaaacucucccuaa

SEQ ID NO: 303263 - RNA, 19 nt, Homo sapiens
  misc_RNA (1)...(19): siRNA sense strand
auucacagcucauguucuu

SEQ ID NO: 303264 - RNA, 19 nt, Homo sapiens
  misc_RNA (1)...(19): siRNA sense strand
gcagagcauuaacuauaac

SEQ ID NO: 303265 - RNA, 19 nt, Homo sapiens
  misc_RNA (1)...(19): siRNA sense strand
ucuaacgccuucaugguau

SEQ ID NO: 303266 - RNA, 19 nt, Homo sapiens
  misc_RNA (1)...(19): siRNA sense strand
uaaaccaucugcuucuaac

SEQ ID NO: 303267 - RNA, 19 nt, Homo sapiens
  misc_RNA (1)...(19): siRNA sense strand
ccaaagugagggaauaugu

SEQ ID NO: 303268 - RNA, 19 nt, Homo sapiens
  misc_RNA (1)...(19): siRNA sense strand
uaccauuucuuacacugaa

SEQ ID NO: 303269 - RNA, 19 nt, Homo sapiens
  misc_RNA (1)...(19): siRNA sense strand
ccuaaugcugccuauaaua

SEQ ID NO: 303270 - RNA, 19 nt, Homo sapiens
  misc_RNA (1)...(19): siRNA sense strand
ggaauauugccagaguuaa

SEQ ID NO: 303271 - RNA, 19 nt, Homo sapiens
  misc_RNA (1)...(19): siRNA sense strand
ggagaggguuuucuuaucu

SEQ ID NO: 303272 - RNA, 19 nt, Homo sapiens
  misc_RNA (1)...(19): siRNA sense strand
gggagacuguuggaguauu

SEQ ID NO: 303273 - RNA, 19 nt, Homo sapiens
  misc_RNA (1)...(19): siRNA sense strand
gcucauguucuuucucaga

SEQ ID NO: 303274 - RNA, 19 nt, Homo sapiens
  misc_RNA (1)...(19): siRNA sense strand
ggauuguggguuauuuauu

SEQ ID NO: 303275 - RNA, 19 nt, Homo sapiens
  misc_RNA (1)...(19): siRNA sense strand
ggaugugggaccuccaauu

SEQ ID NO: 303276 - RNA, 19 nt, Homo sapiens
  misc_RNA (1)...(19): siRNA sense strand
uacaacaccgggaauauug

SEQ ID NO: 303277 - RNA, 19 nt, Homo sapiens
  misc_RNA (1)...(19): siRNA sense strand
ggaguauuauagacuguac

SEQ ID NO: 303278 - RNA, 19 nt, Homo sapiens
  misc_RNA (1)...(19): siRNA sense strand
uguauuggguggcgccauu

SEQ ID NO: 303279 - RNA, 19 nt, Homo sapiens
  misc_RNA (1)...(19): siRNA sense strand
gaauucacagcucauguuc

SEQ ID NO: 303280 - RNA, 19 nt, Homo sapiens
  misc_RNA (1)...(19): siRNA sense strand
acaacaacauguacgucaa

SEQ ID NO: 303281 - RNA, 19 nt, Homo sapiens
  misc_RNA (1)...(19): siRNA sense strand
ggugauuaguaaacucaau

SEQ ID NO: 303282 - RNA, 19 nt, Homo sapiens
  misc_RNA (1)...(19): siRNA sense strand
gacucaaacucucccuaau

SEQ ID NO: 303283 - RNA, 19 nt, Homo sapiens
  misc_RNA (1)...(19): siRNA sense strand
ucacagcucauguucuuuc

SEQ ID NO: 303284 - RNA, 19 nt, Homo sapiens
  misc_RNA (1)...(19): siRNA sense strand
gaauauugccagaguuaac

SEQ ID NO: 303285 - RNA, 19 nt, Homo sapiens
  misc_RNA (1)...(19): siRNA sense strand
ugugaggccucuaaagauc

SEQ ID NO: 303286 - RNA, 19 nt, Homo sapiens
  misc_RNA (1)...(19): siRNA sense strand
ucaaugacaccacacuuca

SEQ ID NO: 303287 - RNA, 19 nt, Homo sapiens
  misc_RNA (1)...(19): siRNA sense strand
ucccuaaugcugccuauaa

SEQ ID NO: 303288 - RNA, 19 nt, Homo sapiens
  misc_RNA (1)...(19): siRNA sense strand
gaucaagguagaagugaag

SEQ ID NO: 303289 - RNA, 19 nt, Homo sapiens
  misc_RNA (1)...(19): siRNA sense strand
ggcaaacuagacauuguaa

SEQ ID NO: 303290 - RNA, 19 nt, Homo sapiens
  misc_RNA (1)...(19): siRNA sense strand
caacacgauugcugugacu

SEQ ID NO: 303291 - RNA, 19 nt, Homo sapiens
  misc_RNA (1)...(19): siRNA sense strand
ggagguggagauaagaaau

SEQ ID NO: 303292 - RNA, 19 nt, Homo sapiens
  misc_RNA (1)...(19): siRNA sense strand
ggagauaagaaauaugacu

SEQ ID NO: 303293 - RNA, 19 nt, Homo sapiens
  misc_RNA (1)...(19): siRNA sense strand
uuggcaagauauugacuuu

SEQ ID NO: 303294 - RNA, 19 nt, Homo sapiens
  misc_RNA (1)...(19): siRNA sense strand
aaacaaaggacuguauugg

SEQ ID NO: 303295 - RNA, 19 nt, Homo sapiens
  misc_RNA (1)...(19): siRNA sense strand
ugacacaaacacagggaaa

SEQ ID NO: 303296 - RNA, 19 nt, Homo sapiens
  misc_RNA (1)...(19): siRNA sense strand
gaauggauuguggguuauu

SEQ ID NO: 303297 - RNA, 19 nt, Homo sapiens
  misc_RNA (1)...(19): siRNA sense strand
gaaaagaaacuguuaaacc

SEQ ID NO: 303298 - RNA, 19 nt, Homo sapiens
  misc_RNA (1)...(19): siRNA sense strand
gagaggguuuucuuaucua

SEQ ID NO: 303299 - RNA, 19 nt, Homo sapiens
  misc_RNA (1)...(19): siRNA sense strand
ugaagaccaagcugaaaga

SEQ ID NO: 303300 - RNA, 19 nt, Homo sapiens
  misc_RNA (1)...(19): siRNA sense strand
ugaucaagguagaagugaa

SEQ ID NO: 303301 - RNA, 19 nt, Homo sapiens
  misc_RNA (1)...(19): siRNA sense strand
guauaaaccaucugcuucu

SEQ ID NO: 303302 - RNA, 19 nt, Homo sapiens
  misc_RNA (1)...(19): siRNA sense strand
caagcaguauaaaccaucu

SEQ ID NO: 303303 - RNA, 19 nt, Homo sapiens
  misc_RNA (1)...(19): siRNA sense strand
gaagcucagaaauuguuga

SEQ ID NO: 303304 - RNA, 19 nt, Homo sapiens
  misc_RNA (1)...(19): siRNA sense strand
caccucaacuggauaauua

SEQ ID NO: 303305 - RNA, 19 nt, Homo sapiens
  misc_RNA (1)...(19): siRNA sense strand
ggaagagacucgugcaaug

SEQ ID NO: 303306 - RNA, 19 nt, Homo sapiens
  misc_RNA (1)...(19): siRNA sense strand
gcagcucacuguaacuuga

SEQ ID NO: 303307 - RNA, 19 nt, Homo sapiens
  misc_RNA (1)...(19): siRNA sense strand
ggaaccaugugccaaguug

SEQ ID NO: 303308 - RNA, 19 nt, Homo sapiens
  misc_RNA (1)...(19): siRNA sense strand
agaaacaccucaacuggau

SEQ ID NO: 303309 - RNA, 19 nt, Homo sapiens
  misc_RNA (1)...(19): siRNA sense strand
caaagaaacaccucaacug

SEQ ID NO: 303310 - RNA, 19 nt, Homo sapiens
  misc_RNA (1)...(19): siRNA sense strand
gaaguaacuccucauucaa

SEQ ID NO: 303311 - RNA, 19 nt, Homo sapiens
  misc_RNA (1)...(19): siRNA sense strand
gaacuccuauagauuucug

SEQ ID NO: 303312 - RNA, 19 nt, Homo sapiens
  misc_RNA (1)...(19): siRNA sense strand
gcuaauuccugaagauguc

SEQ ID NO: 303313 - RNA, 19 nt, Homo sapiens
  misc_RNA (1)...(19): siRNA sense strand
gcaaaagacuggguguuga

SEQ ID NO: 303314 - RNA, 19 nt, Homo sapiens
  misc_RNA (1)...(19): siRNA sense strand
uaucaagggagcaguuuaa

SEQ ID NO: 303315 - RNA, 19 nt, Homo sapiens
  misc_RNA (1)...(19): siRNA sense strand
gaaacaccucaacuggaua

SEQ ID NO: 303316 - RNA, 19 nt, Homo sapiens
  misc_RNA (1)...(19): siRNA sense strand
ugacugcagcucacuguaa

SEQ ID NO: 303317 - RNA, 19 nt, Homo sapiens
  misc_RNA (1)...(19): siRNA sense strand
aaacaccucaacuggauaa

SEQ ID NO: 303318 - RNA, 19 nt, Homo sapiens
  misc_RNA (1)...(19): siRNA sense strand
ggcauccucucucucaguu

SEQ ID NO: 303319 - RNA, 19 nt, Homo sapiens
  misc_RNA (1)...(19): siRNA sense strand
gaagagacucgugcaaugg

SEQ ID NO: 303320 - RNA, 19 nt, Homo sapiens
  misc_RNA (1)...(19): siRNA sense strand
caaaacagauaaugcuugu

SEQ ID NO: 303321 - RNA, 19 nt, Homo sapiens
  misc_RNA (1)...(19): siRNA sense strand
cagauaaugcuuguuaaga

SEQ ID NO: 303322 - RNA, 19 nt, Homo sapiens
  misc_RNA (1)...(19): siRNA sense strand
gaagucaauaucaccauca

SEQ ID NO: 303323 - RNA, 19 nt, Homo sapiens
  misc_RNA (1)...(19): siRNA sense strand
uacuuagucuugacagaaa

SEQ ID NO: 303324 - RNA, 19 nt, Homo sapiens
  misc_RNA (1)...(19): siRNA sense strand
acaaauaugugacuauccu

SEQ ID NO: 303325 - RNA, 19 nt, Homo sapiens
  misc_RNA (1)...(19): siRNA sense strand
cauccucucucucaguugu

SEQ ID NO: 303326 - RNA, 19 nt, Homo sapiens
  misc_RNA (1)...(19): siRNA sense strand
gucaauaucaccaucauag

SEQ ID NO: 303327 - RNA, 19 nt, Homo sapiens
  misc_RNA (1)...(19): siRNA sense strand
uggaggaaaugaaguaacu

SEQ ID NO: 303328 - RNA, 19 nt, Homo sapiens
  misc_RNA (1)...(19): siRNA sense strand
ccuggugucuauauucuuc

SEQ ID NO: 303329 - RNA, 19 nt, Homo sapiens
  misc_RNA (1)...(19): siRNA sense strand
ugucguuucucuccugcua

SEQ ID NO: 303330 - RNA, 19 nt, Homo sapiens
  misc_RNA (1)...(19): siRNA sense strand
ugagagaagucaauaucac

SEQ ID NO: 303331 - RNA, 19 nt, Homo sapiens
  misc_RNA (1)...(19): siRNA sense strand
ccagggaagagccaacaaa

SEQ ID NO: 303332 - RNA, 19 nt, Homo sapiens
  misc_RNA (1)...(19): siRNA sense strand
agaaaagucugcaaugauc

SEQ ID NO: 303333 - RNA, 19 nt, Homo sapiens
  misc_RNA (1)...(19): siRNA sense strand
gggaagagccaacaaaaca

SEQ ID NO: 303334 - RNA, 19 nt, Homo sapiens
  misc_RNA (1)...(19): siRNA sense strand
ggccuggugucuauauucu

SEQ ID NO: 303335 - RNA, 19 nt, Homo sapiens
  misc_RNA (1)...(19): siRNA sense strand
ucaccaucauagacagaaa

SEQ ID NO: 303336 - RNA, 19 nt, Homo sapiens
  misc_RNA (1)...(19): siRNA sense strand
aguaacuccucauucaaga

SEQ ID NO: 303337 - RNA, 19 nt, Homo sapiens
  misc_RNA (1)...(19): siRNA sense strand
ggaaugaauaugguuugug

SEQ ID NO: 303338 - RNA, 19 nt, Homo sapiens
  misc_RNA (1)...(19): siRNA sense strand
cuacuuagucuugacagaa

SEQ ID NO: 303339 - RNA, 19 nt, Homo sapiens
  misc_RNA (1)...(19): siRNA sense strand
uauuggaggaaaugaagua

SEQ ID NO: 303340 - RNA, 19 nt, Homo sapiens
  misc_RNA (1)...(19): siRNA sense strand
gugacuauccuucaucuac

SEQ ID NO: 303341 - RNA, 19 nt, Homo sapiens
  misc_RNA (1)...(19): siRNA sense strand
ccuuuggccuugaaaauaa

SEQ ID NO: 303342 - RNA, 19 nt, Homo sapiens
  misc_RNA (1)...(19): siRNA sense strand
ucacuuccuuuggccuuga

SEQ ID NO: 303343 - RNA, 19 nt, Homo sapiens
  misc_RNA (1)...(19): siRNA sense strand
ccugugauuggaaugaaua

SEQ ID NO: 303344 - RNA, 19 nt, Homo sapiens
  misc_RNA (1)...(19): siRNA sense strand
agucugcaaugaucgaaau

SEQ ID NO: 303345 - RNA, 19 nt, Homo sapiens
  misc_RNA (1)...(19): siRNA sense strand
ucaauaucaccaucauaga

SEQ ID NO: 303346 - RNA, 19 nt, Homo sapiens
  misc_RNA (1)...(19): siRNA sense strand
gaugaugugaaaccaggaa

SEQ ID NO: 303347 - RNA, 19 nt, Homo sapiens
  misc_RNA (1)...(19): siRNA sense strand
cuacaugguccuacuuagu

SEQ ID NO: 303348 - RNA, 19 nt, Homo sapiens
  misc_RNA (1)...(19): siRNA sense strand
gugauuggaaugaauaugg

SEQ ID NO: 303349 - RNA, 19 nt, Homo sapiens
  misc_RNA (1)...(19): siRNA sense strand
uauccuucaucuaccuaaa

SEQ ID NO: 303350 - RNA, 19 nt, Homo sapiens
  misc_RNA (1)...(19): siRNA sense strand
caaaaggucccaggucauu

SEQ ID NO: 303351 - RNA, 19 nt, Homo sapiens
  misc_RNA (1)...(19): siRNA sense strand
gacugcagcucacuguaac

SEQ ID NO: 303352 - RNA, 19 nt, Homo sapiens
  misc_RNA (1)...(19): siRNA sense strand
cacuguaacuugaacaaaa

SEQ ID NO: 303353 - RNA, 19 nt, Homo sapiens
  misc_RNA (1)...(19): siRNA sense strand
ucaaagaaacaccucaacu

SEQ ID NO: 303354 - RNA, 19 nt, Homo sapiens
  misc_RNA (1)...(19): siRNA sense strand
caauaucaccaucauagac

SEQ ID NO: 303355 - RNA, 19 nt, Homo sapiens
  misc_RNA (1)...(19): siRNA sense strand
gaagagccaacaaaacaga

SEQ ID NO: 303356 - RNA, 19 nt, Homo sapiens
  misc_RNA (1)...(19): siRNA sense strand
ucuggaagcccuuuguugu

SEQ ID NO: 303357 - RNA, 19 nt, Homo sapiens
  misc_RNA (1)...(19): siRNA sense strand
ugauuggaaugaauauggu

SEQ ID NO: 303358 - RNA, 19 nt, Homo sapiens
  misc_RNA (1)...(19): siRNA sense strand
ucaacuggauaauuaugac

SEQ ID NO: 303359 - RNA, 19 nt, Homo sapiens
  misc_RNA (1)...(19): siRNA sense strand
ucucucaguugucguuucu

SEQ ID NO: 303360 - RNA, 19 nt, Homo sapiens
  misc_RNA (1)...(19): siRNA sense strand
ucgugggccuggugucuau

SEQ ID NO: 303361 - RNA, 19 nt, Homo sapiens
  misc_RNA (1)...(19): siRNA sense strand
ccuacuuagucuugacaga

SEQ ID NO: 303362 - RNA, 19 nt, Homo sapiens
  misc_RNA (1)...(19): siRNA sense strand
uggaaugaauaugguuugu

SEQ ID NO: 303363 - RNA, 19 nt, Homo sapiens
  misc_RNA (1)...(19): siRNA sense strand
ucugagagaagucaauauc

SEQ ID NO: 303364 - RNA, 19 nt, Homo sapiens
  misc_RNA (1)...(19): siRNA sense strand
gugaaaccaggaaccaugu

SEQ ID NO: 303365 - RNA, 19 nt, Homo sapiens
  misc_RNA (1)...(19): siRNA sense strand
ccugcuaauuccugaagau

SEQ ID NO: 303366 - RNA, 19 nt, Homo sapiens
  misc_RNA (1)...(19): siRNA sense strand
ucuuggggcucacucaaua

SEQ ID NO: 303367 - RNA, 19 nt, Homo sapiens
  misc_RNA (1)...(19): siRNA sense strand
ucacuguaacuugaacaaa

SEQ ID NO: 303368 - RNA, 19 nt, Homo sapiens
  misc_RNA (1)...(19): siRNA sense strand
aaacagagccuucgagcuu

SEQ ID NO: 303369 - RNA, 19 nt, Homo sapiens
  misc_RNA (1)...(19): siRNA sense strand
gacaguagguggcaaucga

SEQ ID NO: 303370 - RNA, 19 nt, Homo sapiens
  misc_RNA (1)...(19): siRNA sense strand
caacaccagccucaaacua

SEQ ID NO: 303371 - RNA, 19 nt, Homo sapiens
  misc_RNA (1)...(19): siRNA sense strand
gaagaagcggcauuggaaa

SEQ ID NO: 303372 - RNA, 19 nt, Homo sapiens
  misc_RNA (1)...(19): siRNA sense strand
agaagaagcggcauuggaa

SEQ ID NO: 303373 - RNA, 19 nt, Homo sapiens
  misc_RNA (1)...(19): siRNA sense strand
caccagcgaugacgacuuc

SEQ ID NO: 303374 - RNA, 19 nt, Homo sapiens
  misc_RNA (1)...(19): siRNA sense strand
ccacgcaguuccucaugga

SEQ ID NO: 303375 - RNA, 19 nt, Homo sapiens
  misc_RNA (1)...(19): siRNA sense strand
aaaccggccuguacuccaa

SEQ ID NO: 303376 - RNA, 19 nt, Homo sapiens
  misc_RNA (1)...(19): siRNA sense strand
agcaggagcucaucaagga

SEQ ID NO: 303377 - RNA, 19 nt, Homo sapiens
  misc_RNA (1)...(19): siRNA sense strand
gauccgagccgagauguuc

SEQ ID NO: 303378 - RNA, 19 nt, Homo sapiens
  misc_RNA (1)...(19): siRNA sense strand
gcaagcaggagcucaucaa

SEQ ID NO: 303379 - RNA, 19 nt, Homo sapiens
  misc_RNA (1)...(19): siRNA sense strand
gcauggaggacgagaacaa

SEQ ID NO: 303380 - RNA, 19 nt, Homo sapiens
  misc_RNA (1)...(19): siRNA sense strand
uaucaacaccagccucaaa

SEQ ID NO: 303381 - RNA, 19 nt, Homo sapiens
  misc_RNA (1)...(19): siRNA sense strand
aagcugaccugggaagaga

SEQ ID NO: 303382 - RNA, 19 nt, Homo sapiens
  misc_RNA (1)...(19): siRNA sense strand
ccaagaagaagcggcauug

SEQ ID NO: 303383 - RNA, 19 nt, Homo sapiens
  misc_RNA (1)...(19): siRNA sense strand
caucaaggaguaccuggaa

SEQ ID NO: 303384 - RNA, 19 nt, Homo sapiens
  misc_RNA (1)...(19): siRNA sense strand
gacccaggccuguccagaa

SEQ ID NO: 303385 - RNA, 19 nt, Homo sapiens
  misc_RNA (1)...(19): siRNA sense strand
gcgagaagggccagaaugg

SEQ ID NO: 303386 - RNA, 19 nt, Homo sapiens
  misc_RNA (1)...(19): siRNA sense strand
caaacuagcaacuguacag

SEQ ID NO: 303387 - RNA, 19 nt, Homo sapiens
  misc_RNA (1)...(19): siRNA sense strand
cggagagccugcagaacau

SEQ ID NO: 303388 - RNA, 19 nt, Homo sapiens
  misc_RNA (1)...(19): siRNA sense strand
acacggagagccugcagaa

SEQ ID NO: 303389 - RNA, 19 nt, Homo sapiens
  misc_RNA (1)...(19): siRNA sense strand
ccuauaacaccacgcaguu

SEQ ID NO: 303390 - RNA, 19 nt, Homo sapiens
  misc_RNA (1)...(19): siRNA sense strand
gggaagggagccuggaauc

SEQ ID NO: 303391 - RNA, 19 nt, Homo sapiens
  misc_RNA (1)...(19): siRNA sense strand
gagagccugcagaacauga

SEQ ID NO: 303392 - RNA, 19 nt, Homo sapiens
  misc_RNA (1)...(19): siRNA sense strand
ccaggccuguccagaaucu

SEQ ID NO: 303393 - RNA, 19 nt, Homo sapiens
  misc_RNA (1)...(19): siRNA sense strand
aagaagaagcggcauugga

SEQ ID NO: 303394 - RNA, 19 nt, Homo sapiens
  misc_RNA (1)...(19): siRNA sense strand
ccucaaacuagcaacugua

SEQ ID NO: 303395 - RNA, 19 nt, Homo sapiens
  misc_RNA (1)...(19): siRNA sense strand
gaccugggaagagaagaaa

SEQ ID NO: 303396 - RNA, 19 nt, Homo sapiens
  misc_RNA (1)...(19): siRNA sense strand
acccaggccuguccagaau

SEQ ID NO: 303397 - RNA, 19 nt, Homo sapiens
  misc_RNA (1)...(19): siRNA sense strand
ggcauuggaaaccguacua

SEQ ID NO: 303398 - RNA, 19 nt, Homo sapiens
  misc_RNA (1)...(19): siRNA sense strand
agagacagcuggggaagaa

SEQ ID NO: 303399 - RNA, 19 nt, Homo sapiens
  misc_RNA (1)...(19): siRNA sense strand
gccucaaacuagcaacugu

SEQ ID NO: 303400 - RNA, 19 nt, Homo sapiens
  misc_RNA (1)...(19): siRNA sense strand
acagagccuucgagcuuca

SEQ ID NO: 303401 - RNA, 19 nt, Homo sapiens
  misc_RNA (1)...(19): siRNA sense strand
ggaaaccguacuacaagcu

SEQ ID NO: 303402 - RNA, 19 nt, Homo sapiens
  misc_RNA (1)...(19): siRNA sense strand
acggagagccugcagaaca

SEQ ID NO: 303403 - RNA, 19 nt, Homo sapiens
  misc_RNA (1)...(19): siRNA sense strand
cugcugcuguccaggaaga

SEQ ID NO: 303404 - RNA, 19 nt, Homo sapiens
  misc_RNA (1)...(19): siRNA sense strand
gaggacaguagguggcaau

SEQ ID NO: 303405 - RNA, 19 nt, Homo sapiens
  misc_RNA (1)...(19): siRNA sense strand
gaacagcgcuaccccuuaa

SEQ ID NO: 303406 - RNA, 19 nt, Homo sapiens
  misc_RNA (1)...(19): siRNA sense strand
ccacugaguuugccuucua

SEQ ID NO: 303407 - RNA, 19 nt, Homo sapiens
  misc_RNA (1)...(19): siRNA sense strand
gcaauuaugccaccuugga

SEQ ID NO: 303408 - RNA, 19 nt, Homo sapiens
  misc_RNA (1)...(19): siRNA sense strand
gaacccaccaggucccuuu

SEQ ID NO: 303409 - RNA, 19 nt, Homo sapiens
  misc_RNA (1)...(19): siRNA sense strand
cuaacaaguucaucaccaa

SEQ ID NO: 303410 - RNA, 19 nt, Homo sapiens
  misc_RNA (1)...(19): siRNA sense strand
gaugccugcugucaacuau

SEQ ID NO: 303411 - RNA, 19 nt, Homo sapiens
  misc_RNA (1)...(19): siRNA sense strand
gacaagaggcgcaagaucu

SEQ ID NO: 303412 - RNA, 19 nt, Homo sapiens
  misc_RNA (1)...(19): siRNA sense strand
guaugcggcuaacaaguuc

SEQ ID NO: 303413 - RNA, 19 nt, Homo sapiens
  misc_RNA (1)...(19): siRNA sense strand
gcugaugccugcugucaac

SEQ ID NO: 303414 - RNA, 19 nt, Homo sapiens
  misc_RNA (1)...(19): siRNA sense strand
gggaguaugcggcuaacaa

SEQ ID NO: 303415 - RNA, 19 nt, Homo sapiens
  misc_RNA (1)...(19): siRNA sense strand
ggacaagaggcgcaagauc

SEQ ID NO: 303416 - RNA, 19 nt, Homo sapiens
  misc_RNA (1)...(19): siRNA sense strand
acaaguucaucaccaagga

SEQ ID NO: 303417 - RNA, 19 nt, Homo sapiens
  misc_RNA (1)...(19): siRNA sense strand
ggucaaagagaagaagguu

SEQ ID NO: 303418 - RNA, 19 nt, Homo sapiens
  misc_RNA (1)...(19): siRNA sense strand
ggaguaugcggcuaacaag

SEQ ID NO: 303419 - RNA, 19 nt, Homo sapiens
  misc_RNA (1)...(19): siRNA sense strand
ggauggagccaaggauauc

SEQ ID NO: 303420 - RNA, 19 nt, Homo sapiens
  misc_RNA (1)...(19): siRNA sense strand
ggagaaccgcgacaugacu

SEQ ID NO: 303421 - RNA, 19 nt, Homo sapiens
  misc_RNA (1)...(19): siRNA sense strand
accacgcuauggccaguua

SEQ ID NO: 303422 - RNA, 19 nt, Homo sapiens
  misc_RNA (1)...(19): siRNA sense strand
ucccggagcucgcugaaac

SEQ ID NO: 303423 - RNA, 19 nt, Homo sapiens
  misc_RNA (1)...(19): siRNA sense strand
cagcucccgugccuuaugg

SEQ ID NO: 303424 - RNA, 19 nt, Homo sapiens
  misc_RNA (1)...(19): siRNA sense strand
aguaugcggcuaacaaguu

SEQ ID NO: 303425 - RNA, 19 nt, Homo sapiens
  misc_RNA (1)...(19): siRNA sense strand
agaaacgcauuccguacag

SEQ ID NO: 303426 - RNA, 19 nt, Homo sapiens
  misc_RNA (1)...(19): siRNA sense strand
cgggauauccgggaaccua

SEQ ID NO: 303427 - RNA, 19 nt, Homo sapiens
  misc_RNA (1)...(19): siRNA sense strand
gcgacaugacucccuguug

SEQ ID NO: 303428 - RNA, 19 nt, Homo sapiens
  misc_RNA (1)...(19): siRNA sense strand
aagaaacgcauuccguaca

SEQ ID NO: 303429 - RNA, 19 nt, Homo sapiens
  misc_RNA (1)...(19): siRNA sense strand
ucgccaaggugaagaacag

SEQ ID NO: 303430 - RNA, 19 nt, Homo sapiens
  misc_RNA (1)...(19): siRNA sense strand
gaagauauaucaagugugu

SEQ ID NO: 303431 - RNA, 19 nt, Homo sapiens
  misc_RNA (1)...(19): siRNA sense strand
gcauagcccucaacaagaa

SEQ ID NO: 303432 - RNA, 19 nt, Homo sapiens
  misc_RNA (1)...(19): siRNA sense strand
gaucagcucucucccaaug

SEQ ID NO: 303433 - RNA, 19 nt, Homo sapiens
  misc_RNA (1)...(19): siRNA sense strand
ccaaggaggugcccaugaa

SEQ ID NO: 303434 - RNA, 19 nt, Homo sapiens
  misc_RNA (1)...(19): siRNA sense strand
ggucagcggucaugccauu

SEQ ID NO: 303435 - RNA, 19 nt, Homo sapiens
  misc_RNA (1)...(19): siRNA sense strand
ggaaaccauuggaaaggaa

SEQ ID NO: 303436 - RNA, 19 nt, Homo sapiens
  misc_RNA (1)...(19): siRNA sense strand
ugacugaccuggacaucaa

SEQ ID NO: 303437 - RNA, 19 nt, Homo sapiens
  misc_RNA (1)...(19): siRNA sense strand
ucuaaacgcuuccagauuc

SEQ ID NO: 303438 - RNA, 19 nt, Homo sapiens
  misc_RNA (1)...(19): siRNA sense strand
gggaugagaaggauaauga

SEQ ID NO: 303439 - RNA, 19 nt, Homo sapiens
  misc_RNA (1)...(19): siRNA sense strand
ggaaaggaaacucaucuug

SEQ ID NO: 303440 - RNA, 19 nt, Homo sapiens
  misc_RNA (1)...(19): siRNA sense strand
caucaaggauaacaucguu

SEQ ID NO: 303441 - RNA, 19 nt, Homo sapiens
  misc_RNA (1)...(19): siRNA sense strand
gcagagaauucaaccugau

SEQ ID NO: 303442 - RNA, 19 nt, Homo sapiens
  misc_RNA (1)...(19): siRNA sense strand
gugaagauauaucaagugu

SEQ ID NO: 303443 - RNA, 19 nt, Homo sapiens
  misc_RNA (1)...(19): siRNA sense strand
gagaucuacuuaugcuuug

SEQ ID NO: 303444 - RNA, 19 nt, Homo sapiens
  misc_RNA (1)...(19): siRNA sense strand
ugaagaagaugaggaagau

SEQ ID NO: 303445 - RNA, 19 nt, Homo sapiens
  misc_RNA (1)...(19): siRNA sense strand
gaaggauaaugauguggau

SEQ ID NO: 303446 - RNA, 19 nt, Homo sapiens
  misc_RNA (1)...(19): siRNA sense strand
aaaggaaacucaucuuggu

SEQ ID NO: 303447 - RNA, 19 nt, Homo sapiens
  misc_RNA (1)...(19): siRNA sense strand
gaauucaaccugauguaug

SEQ ID NO: 303448 - RNA, 19 nt, Homo sapiens
  misc_RNA (1)...(19): siRNA sense strand
ggaaacucaucuugguuca

SEQ ID NO: 303449 - RNA, 19 nt, Homo sapiens
  misc_RNA (1)...(19): siRNA sense strand
auaaugauguggaugaaga

SEQ ID NO: 303450 - RNA, 19 nt, Homo sapiens
  misc_RNA (1)...(19): siRNA sense strand
ugaacccagugaagauaua

SEQ ID NO: 303451 - RNA, 19 nt, Homo sapiens
  misc_RNA (1)...(19): siRNA sense strand
gggcucaucuggcuacaca

SEQ ID NO: 303452 - RNA, 19 nt, Homo sapiens
  misc_RNA (1)...(19): siRNA sense strand
ggauaaugauguggaugaa

SEQ ID NO: 303453 - RNA, 19 nt, Homo sapiens
  misc_RNA (1)...(19): siRNA sense strand
aauucaaccugauguauga

SEQ ID NO: 303454 - RNA, 19 nt, Homo sapiens
  misc_RNA (1)...(19): siRNA sense strand
gagcauauuaccaaugaga

SEQ ID NO: 303455 - RNA, 19 nt, Homo sapiens
  misc_RNA (1)...(19): siRNA sense strand
ggaugaagaagaugaggaa

SEQ ID NO: 303456 - RNA, 19 nt, Homo sapiens
  misc_RNA (1)...(19): siRNA sense strand
gggaaaccauuggaaagga

SEQ ID NO: 303457 - RNA, 19 nt, Homo sapiens
  misc_RNA (1)...(19): siRNA sense strand
aaaagaaggucaagcuauu

SEQ ID NO: 303458 - RNA, 19 nt, Homo sapiens
  misc_RNA (1)...(19): siRNA sense strand
guacuggucugggccaugu

SEQ ID NO: 303459 - RNA, 19 nt, Homo sapiens
  misc_RNA (1)...(19): siRNA sense strand
gcgcugugcucucaauaag

SEQ ID NO: 303460 - RNA, 19 nt, Homo sapiens
  misc_RNA (1)...(19): siRNA sense strand
cugagcauauuaccaauga

SEQ ID NO: 303461 - RNA, 19 nt, Homo sapiens
  misc_RNA (1)...(19): siRNA sense strand
ugagaaggauaaugaugug

SEQ ID NO: 303462 - RNA, 19 nt, Homo sapiens
  misc_RNA (1)...(19): siRNA sense strand
ggccugggcuguagagaca

SEQ ID NO: 303463 - RNA, 19 nt, Homo sapiens
  misc_RNA (1)...(19): siRNA sense strand
ugagaucuacuuaugcuuu

SEQ ID NO: 303464 - RNA, 19 nt, Homo sapiens
  misc_RNA (1)...(19): siRNA sense strand
cagaagcuguucacuagca

SEQ ID NO: 303465 - RNA, 19 nt, Homo sapiens
  misc_RNA (1)...(19): siRNA sense strand
gagaauucaaccugaugua

SEQ ID NO: 303466 - RNA, 19 nt, Homo sapiens
  misc_RNA (1)...(19): siRNA sense strand
gaaaggacagauagagaag

SEQ ID NO: 303467 - RNA, 19 nt, Homo sapiens
  misc_RNA (1)...(19): siRNA sense strand
ggacaucaaguuucaguac

SEQ ID NO: 303468 - RNA, 19 nt, Homo sapiens
  misc_RNA (1)...(19): siRNA sense strand
ccccagggcucgaucauua

SEQ ID NO: 303469 - RNA, 19 nt, Homo sapiens
  misc_RNA (1)...(19): siRNA sense strand
cguuugagaucuacuuaug

SEQ ID NO: 303470 - RNA, 19 nt, Homo sapiens
  misc_RNA (1)...(19): siRNA sense strand
gagaagcagccaccguuug

SEQ ID NO: 303471 - RNA, 19 nt, Homo sapiens
  misc_RNA (1)...(19): siRNA sense strand
ucaauaagagcagagaauu

SEQ ID NO: 303472 - RNA, 19 nt, Homo sapiens
  misc_RNA (1)...(19): siRNA sense strand
agcagaagcuguucacuag

SEQ ID NO: 303473 - RNA, 19 nt, Homo sapiens
  misc_RNA (1)...(19): siRNA sense strand
ugauguggaugaagaagau

SEQ ID NO: 303474 - RNA, 19 nt, Homo sapiens
  misc_RNA (1)...(19): siRNA sense strand
cggcauagcccucaacaag

SEQ ID NO: 303475 - RNA, 19 nt, Homo sapiens
  misc_RNA (1)...(19): siRNA sense strand
caucuugguucaggucauu

SEQ ID NO: 303476 - RNA, 19 nt, Homo sapiens
  misc_RNA (1)...(19): siRNA sense strand
agaaaggacagauagagaa

SEQ ID NO: 303477 - RNA, 19 nt, Homo sapiens
  misc_RNA (1)...(19): siRNA sense strand
gaugagaaggauaaugaug

SEQ ID NO: 303478 - RNA, 19 nt, Homo sapiens
  misc_RNA (1)...(19): siRNA sense strand
gaaaccauuggaaaggaaa

SEQ ID NO: 303479 - RNA, 19 nt, Homo sapiens
  misc_RNA (1)...(19): siRNA sense strand
cuauagcucuccagaacug

SEQ ID NO: 303480 - RNA, 19 nt, Homo sapiens
  misc_RNA (1)...(19): siRNA sense strand
gcaagcugcuggacgucau

SEQ ID NO: 303481 - RNA, 19 nt, Homo sapiens
  misc_RNA (1)...(19): siRNA sense strand
aagcagaagcuguucacua

SEQ ID NO: 303482 - RNA, 19 nt, Homo sapiens
  misc_RNA (1)...(19): siRNA sense strand
aaacauuccuuagcgaucu

SEQ ID NO: 303483 - RNA, 19 nt, Homo sapiens
  misc_RNA (1)...(19): siRNA sense strand
agaagcagccaccguuuga

SEQ ID NO: 303484 - RNA, 19 nt, Homo sapiens
  misc_RNA (1)...(19): siRNA sense strand
cagaaaggacagauagaga

SEQ ID NO: 303485 - RNA, 19 nt, Homo sapiens
  misc_RNA (1)...(19): siRNA sense strand
caauaagagcagagaauuc

SEQ ID NO: 303486 - RNA, 19 nt, Homo sapiens
  misc_RNA (1)...(19): siRNA sense strand
ucagcggucaugccauuua

SEQ ID NO: 303487 - RNA, 19 nt, Homo sapiens
  misc_RNA (1)...(19): siRNA sense strand
aagaagaugaggaagauga

SEQ ID NO: 303488 - RNA, 19 nt, Homo sapiens
  misc_RNA (1)...(19): siRNA sense strand
aauaagagcagagaauuca

SEQ ID NO: 303489 - RNA, 19 nt, Homo sapiens
  misc_RNA (1)...(19): siRNA sense strand
aaagaaggucaagcuauuu

SEQ ID NO: 303490 - RNA, 19 nt, Homo sapiens
  misc_RNA (1)...(19): siRNA sense strand
cagcggucaugccauuuau

SEQ ID NO: 303491 - RNA, 19 nt, Homo sapiens
  misc_RNA (1)...(19): siRNA sense strand
gaagaugagcuggaucagu

SEQ ID NO: 303492 - RNA, 19 nt, Homo sapiens
  misc_RNA (1)...(19): siRNA sense strand
ugaggaagaugagcuggau

SEQ ID NO: 303493 - RNA, 19 nt, Homo sapiens
  misc_RNA (1)...(19): siRNA sense strand
cagugaagauauaucaagu

SEQ ID NO: 303494 - RNA, 19 nt, Homo sapiens
  misc_RNA (1)...(19): siRNA sense strand
caugaacccagugaagaua

SEQ ID NO: 303495 - RNA, 19 nt, Homo sapiens
  misc_RNA (1)...(19): siRNA sense strand
ccaccagaaaggacagaua

SEQ ID NO: 303496 - RNA, 19 nt, Homo sapiens
  misc_RNA (1)...(19): siRNA sense strand
ucucauugcccaccagaaa

SEQ ID NO: 303497 - RNA, 19 nt, Homo sapiens
  misc_RNA (1)...(19): siRNA sense strand
ugaccuggacaucaaguuu

SEQ ID NO: 303498 - RNA, 19 nt, Homo sapiens
  misc_RNA (1)...(19): siRNA sense strand
auacagcccuucuauagcu

SEQ ID NO: 303499 - RNA, 19 nt, Homo sapiens
  misc_RNA (1)...(19): siRNA sense strand
ggcauagcccucaacaaga

SEQ ID NO: 303500 - RNA, 19 nt, Homo sapiens
  misc_RNA (1)...(19): siRNA sense strand
gcucccaaccugauugaga

SEQ ID NO: 303501 - RNA, 19 nt, Homo sapiens
  misc_RNA (1)...(19): siRNA sense strand
agauauaucaaguguguga

SEQ ID NO: 303502 - RNA, 19 nt, Homo sapiens
  misc_RNA (1)...(19): siRNA sense strand
gaacccagugaagauauau

SEQ ID NO: 303503 - RNA, 19 nt, Homo sapiens
  misc_RNA (1)...(19): siRNA sense strand
ucaggucauuccaguagug

SEQ ID NO: 303504 - RNA, 19 nt, Homo sapiens
  misc_RNA (1)...(19): siRNA sense strand
uucacacgauccuuugaua

SEQ ID NO: 303505 - RNA, 19 nt, Homo sapiens
  misc_RNA (1)...(19): siRNA sense strand
guccugagcauauuaccaa

SEQ ID NO: 303506 - RNA, 19 nt, Homo sapiens
  misc_RNA (1)...(19): siRNA sense strand
acacgauccuuugauagug

SEQ ID NO: 303507 - RNA, 19 nt, Homo sapiens
  misc_RNA (1)...(19): siRNA sense strand
guucaggucauuccaguag

SEQ ID NO: 303508 - RNA, 19 nt, Homo sapiens
  misc_RNA (1)...(19): siRNA sense strand
ccccagacaucaaggauaa

SEQ ID NO: 303509 - RNA, 19 nt, Homo sapiens
  misc_RNA (1)...(19): siRNA sense strand
cagccagugugggcaauug

SEQ ID NO: 303510 - RNA, 19 nt, Homo sapiens
  misc_RNA (1)...(19): siRNA sense strand
ccaaugagaagcagaagcu

SEQ ID NO: 303511 - RNA, 19 nt, Homo sapiens
  misc_RNA (1)...(19): siRNA sense strand
caaaagaaggucaagcuau

SEQ ID NO: 303512 - RNA, 19 nt, Homo sapiens
  misc_RNA (1)...(19): siRNA sense strand
caaccugauugagagacaa

SEQ ID NO: 303513 - RNA, 19 nt, Homo sapiens
  misc_RNA (1)...(19): siRNA sense strand
gaccuggacaucaaguuuc

SEQ ID NO: 303514 - RNA, 19 nt, Homo sapiens
  misc_RNA (1)...(19): siRNA sense strand
caucguugcucagcugaag

SEQ ID NO: 303515 - RNA, 19 nt, Homo sapiens
  misc_RNA (1)...(19): siRNA sense strand
gauuucacacgauccuuug

SEQ ID NO: 303516 - RNA, 19 nt, Homo sapiens
  misc_RNA (1)...(19): siRNA sense strand
ugauuucacacgauccuuu

SEQ ID NO: 303517 - RNA, 19 nt, Homo sapiens
  misc_RNA (1)...(19): siRNA sense strand
gauguuuucuggugauuuc

SEQ ID NO: 303518 - RNA, 19 nt, Homo sapiens
  misc_RNA (1)...(19): siRNA sense strand
agaauggccagaugggaaa

SEQ ID NO: 303519 - RNA, 19 nt, Homo sapiens
  misc_RNA (1)...(19): siRNA sense strand
aaggacagauagagaagca

SEQ ID NO: 303520 - RNA, 19 nt, Homo sapiens
  misc_RNA (1)...(19): siRNA sense strand
gcauauuaccaaugagaag

SEQ ID NO: 303521 - RNA, 19 nt, Homo sapiens
  misc_RNA (1)...(19): siRNA sense strand
gcugccgacucuucuaugg

SEQ ID NO: 303522 - RNA, 19 nt, Homo sapiens
  misc_RNA (1)...(19): siRNA sense strand
ccaugaacccagugaagau

SEQ ID NO: 303523 - RNA, 19 nt, Homo sapiens
  misc_RNA (1)...(19): siRNA sense strand
ccugggaugagaaggauaa

SEQ ID NO: 303524 - RNA, 19 nt, Homo sapiens
  misc_RNA (1)...(19): siRNA sense strand
ccagugaagauauaucaag

SEQ ID NO: 303525 - RNA, 19 nt, Homo sapiens
  misc_RNA (1)...(19): siRNA sense strand
ccaaccugauugagagaca

SEQ ID NO: 303526 - RNA, 19 nt, Homo sapiens
  misc_RNA (1)...(19): siRNA sense strand
gcugcgcugugcucucaau

SEQ ID NO: 303527 - RNA, 19 nt, Homo sapiens
  misc_RNA (1)...(19): siRNA sense strand
caagcuauuuugucuggaa

SEQ ID NO: 303528 - RNA, 19 nt, Homo sapiens
  misc_RNA (1)...(19): siRNA sense strand
gcagccaccguuugagauc

SEQ ID NO: 303529 - RNA, 19 nt, Homo sapiens
  misc_RNA (1)...(19): siRNA sense strand
caccagaaaggacagauag

SEQ ID NO: 303530 - RNA, 19 nt, Homo sapiens
  misc_RNA (1)...(19): siRNA sense strand
gaacauugcacguuucuug

SEQ ID NO: 303531 - RNA, 19 nt, Homo sapiens
  misc_RNA (1)...(19): siRNA sense strand
ccaaugcgcuggacuugaa

SEQ ID NO: 303532 - RNA, 19 nt, Homo sapiens
  misc_RNA (1)...(19): siRNA sense strand
cagcugggauucacuuuaa

SEQ ID NO: 303533 - RNA, 19 nt, Homo sapiens
  misc_RNA (1)...(19): siRNA sense strand
auagauagcuggguagaua

SEQ ID NO: 303534 - RNA, 19 nt, Homo sapiens
  misc_RNA (1)...(19): siRNA sense strand
ggacuugaauucagugcuu

SEQ ID NO: 303535 - RNA, 19 nt, Homo sapiens
  misc_RNA (1)...(19): siRNA sense strand
ugaaagacaucgugaucaa

SEQ ID NO: 303536 - RNA, 19 nt, Homo sapiens
  misc_RNA (1)...(19): siRNA sense strand
gagggaagcaguaaagaaa

SEQ ID NO: 303537 - RNA, 19 nt, Homo sapiens
  misc_RNA (1)...(19): siRNA sense strand
guugaaagcugcaguugau

SEQ ID NO: 303538 - RNA, 19 nt, Homo sapiens
  misc_RNA (1)...(19): siRNA sense strand
cgaagacgcagaugaaauu

SEQ ID NO: 303539 - RNA, 19 nt, Homo sapiens
  misc_RNA (1)...(19): siRNA sense strand
ggaagaaugugccgaagac

SEQ ID NO: 303540 - RNA, 19 nt, Homo sapiens
  misc_RNA (1)...(19): siRNA sense strand
ggaagagucuaaccugucu

SEQ ID NO: 303541 - RNA, 19 nt, Homo sapiens
  misc_RNA (1)...(19): siRNA sense strand
uggaugaggucuugugaaa

SEQ ID NO: 303542 - RNA, 19 nt, Homo sapiens
  misc_RNA (1)...(19): siRNA sense strand
gggauucacuuuaauuugg

SEQ ID NO: 303543 - RNA, 19 nt, Homo sapiens
  misc_RNA (1)...(19): siRNA sense strand
gauggccucuccaagauga

SEQ ID NO: 303544 - RNA, 19 nt, Homo sapiens
  misc_RNA (1)...(19): siRNA sense strand
gaugcagacuuggauguaa

SEQ ID NO: 303545 - RNA, 19 nt, Homo sapiens
  misc_RNA (1)...(19): siRNA sense strand
gaugagcccacgacuuuaa

SEQ ID NO: 303546 - RNA, 19 nt, Homo sapiens
  misc_RNA (1)...(19): siRNA sense strand
cggaugagcccacgacuuu

SEQ ID NO: 303547 - RNA, 19 nt, Homo sapiens
  misc_RNA (1)...(19): siRNA sense strand
caacgcaacccuuauagau

SEQ ID NO: 303548 - RNA, 19 nt, Homo sapiens
  misc_RNA (1)...(19): siRNA sense strand
gaagggaacauugcacguu

SEQ ID NO: 303549 - RNA, 19 nt, Homo sapiens
  misc_RNA (1)...(19): siRNA sense strand
gugaaaaccuggcuccuuu

SEQ ID NO: 303550 - RNA, 19 nt, Homo sapiens
  misc_RNA (1)...(19): siRNA sense strand
gucaagagcgugccugaaa

SEQ ID NO: 303551 - RNA, 19 nt, Homo sapiens
  misc_RNA (1)...(19): siRNA sense strand
ggauucacuuuaauuugga

SEQ ID NO: 303552 - RNA, 19 nt, Homo sapiens
  misc_RNA (1)...(19): siRNA sense strand
ccgccaagaugauauuuua

SEQ ID NO: 303553 - RNA, 19 nt, Homo sapiens
  misc_RNA (1)...(19): siRNA sense strand
uaaaacgucuguaugaguu

SEQ ID NO: 303554 - RNA, 19 nt, Homo sapiens
  misc_RNA (1)...(19): siRNA sense strand
aagggaacauugcacguuu

SEQ ID NO: 303555 - RNA, 19 nt, Homo sapiens
  misc_RNA (1)...(19): siRNA sense strand
gcugucaacgcaacccuua

SEQ ID NO: 303556 - RNA, 19 nt, Homo sapiens
  misc_RNA (1)...(19): siRNA sense strand
acgcaacccuuauagauag

SEQ ID NO: 303557 - RNA, 19 nt, Homo sapiens
  misc_RNA (1)...(19): siRNA sense strand
guugauggccucuccaaga

SEQ ID NO: 303558 - RNA, 19 nt, Homo sapiens
  misc_RNA (1)...(19): siRNA sense strand
ggguagauauugcgauuuu

SEQ ID NO: 303559 - RNA, 19 nt, Homo sapiens
  misc_RNA (1)...(19): siRNA sense strand
ugucaacgcaacccuuaua

SEQ ID NO: 303560 - RNA, 19 nt, Homo sapiens
  misc_RNA (1)...(19): siRNA sense strand
gaaggcgaagggaacauug

SEQ ID NO: 303561 - RNA, 19 nt, Homo sapiens
  misc_RNA (1)...(19): siRNA sense strand
gcgcuggacuugaauucag

SEQ ID NO: 303562 - RNA, 19 nt, Homo sapiens
  misc_RNA (1)...(19): siRNA sense strand
gcugaaagacaucgugauc

SEQ ID NO: 303563 - RNA, 19 nt, Homo sapiens
  misc_RNA (1)...(19): siRNA sense strand
ugacagugccagccaaugu

SEQ ID NO: 303564 - RNA, 19 nt, Homo sapiens
  misc_RNA (1)...(19): siRNA sense strand
ggaugagcccacgacuuua

SEQ ID NO: 303565 - RNA, 19 nt, Homo sapiens
  misc_RNA (1)...(19): siRNA sense strand
uccaugaacucugcucuug

SEQ ID NO: 303566 - RNA, 19 nt, Homo sapiens
  misc_RNA (1)...(19): siRNA sense strand
gcugggauucacuuuaauu

SEQ ID NO: 303567 - RNA, 19 nt, Homo sapiens
  misc_RNA (1)...(19): siRNA sense strand
gagcuucccaccugcaugu

SEQ ID NO: 303568 - RNA, 19 nt, Homo sapiens
  misc_RNA (1)...(19): siRNA sense strand
aaacgucuguaugaguuga

SEQ ID NO: 303569 - RNA, 19 nt, Homo sapiens
  misc_RNA (1)...(19): siRNA sense strand
gaugaggucuugugaaaac

SEQ ID NO: 303570 - RNA, 19 nt, Homo sapiens
  misc_RNA (1)...(19): siRNA sense strand
agagguggaugaggucuug

SEQ ID NO: 303571 - RNA, 19 nt, Homo sapiens
  misc_RNA (1)...(19): siRNA sense strand
gagcgugccugaaaaccuu

SEQ ID NO: 303572 - RNA, 19 nt, Homo sapiens
  misc_RNA (1)...(19): siRNA sense strand
ucagcugggauucacuuua

SEQ ID NO: 303573 - RNA, 19 nt, Homo sapiens
  misc_RNA (1)...(19): siRNA sense strand
ccacgacuuuaaccaccaa

SEQ ID NO: 303574 - RNA, 19 nt, Homo sapiens
  misc_RNA (1)...(19): siRNA sense strand
aaagagggaagcaguaaag

SEQ ID NO: 303575 - RNA, 19 nt, Homo sapiens
  misc_RNA (1)...(19): siRNA sense strand
cuggguagauauugcgauu

SEQ ID NO: 303576 - RNA, 19 nt, Homo sapiens
  misc_RNA (1)...(19): siRNA sense strand
cauugcacguuucuuguuc

SEQ ID NO: 303577 - RNA, 19 nt, Homo sapiens
  misc_RNA (1)...(19): siRNA sense strand
caagugcuuuggagaacag

SEQ ID NO: 303578 - RNA, 19 nt, Homo sapiens
  misc_RNA (1)...(19): siRNA sense strand
aacgcaacccuuauagaua

SEQ ID NO: 303579 - RNA, 19 nt, Homo sapiens
  misc_RNA (1)...(19): siRNA sense strand
ucuccaagaugauucaaac

SEQ ID NO: 303580 - RNA, 19 nt, Homo sapiens
  misc_RNA (1)...(19): siRNA sense strand
cugaaaaccuucucaagug

SEQ ID NO: 303581 - RNA, 19 nt, Homo sapiens
  misc_RNA (1)...(19): siRNA sense strand
aacaccagaugcagacuug

SEQ ID NO: 303582 - RNA, 19 nt, Homo sapiens
  misc_RNA (1)...(19): siRNA sense strand
gaagacgcagaugaaauuc

SEQ ID NO: 303583 - RNA, 19 nt, Homo sapiens
  misc_RNA (1)...(19): siRNA sense strand
cccucaagcuccuuaagug

SEQ ID NO: 303584 - RNA, 19 nt, Homo sapiens
  misc_RNA (1)...(19): siRNA sense strand
uugauggccucuccaagau

SEQ ID NO: 303585 - RNA, 19 nt, Homo sapiens
  misc_RNA (1)...(19): siRNA sense strand
ucaagagcgugccugaaaa

SEQ ID NO: 303586 - RNA, 19 nt, Homo sapiens
  misc_RNA (1)...(19): siRNA sense strand
ccucaagcuccuuaaguga

SEQ ID NO: 303587 - RNA, 19 nt, Homo sapiens
  misc_RNA (1)...(19): siRNA sense strand
agagggaagcaguaaagaa

SEQ ID NO: 303588 - RNA, 19 nt, Homo sapiens
  misc_RNA (1)...(19): siRNA sense strand
cgaaggcgaagggaacauu

SEQ ID NO: 303589 - RNA, 19 nt, Homo sapiens
  misc_RNA (1)...(19): siRNA sense strand
gaaugaacucaccguagca

SEQ ID NO: 303590 - RNA, 19 nt, Homo sapiens
  misc_RNA (1)...(19): siRNA sense strand
uaaccugucucugcaagcu

SEQ ID NO: 303591 - RNA, 19 nt, Homo sapiens
  misc_RNA (1)...(19): siRNA sense strand
ccaccaaugcgcuggacuu

SEQ ID NO: 303592 - RNA, 19 nt, Homo sapiens
  misc_RNA (1)...(19): siRNA sense strand
gaaagacaucgugaucaac

SEQ ID NO: 303593 - RNA, 19 nt, Homo sapiens
  misc_RNA (1)...(19): siRNA sense strand
uaaaagagggaagcaguaa

SEQ ID NO: 303594 - RNA, 19 nt, Homo sapiens
  misc_RNA (1)...(19): siRNA sense strand
gauagcuggguagauauug

SEQ ID NO: 303595 - RNA, 19 nt, Homo sapiens
  misc_RNA (1)...(19): siRNA sense strand
ucaacgcaacccuuauaga

SEQ ID NO: 303596 - RNA, 19 nt, Homo sapiens
  misc_RNA (1)...(19): siRNA sense strand
ccgaagacgcagaugaaau

SEQ ID NO: 303597 - RNA, 19 nt, Homo sapiens
  misc_RNA (1)...(19): siRNA sense strand
gcuuuggagaacagaauaa

SEQ ID NO: 303598 - RNA, 19 nt, Homo sapiens
  misc_RNA (1)...(19): siRNA sense strand
ucaagugcuuuggagaaca

SEQ ID NO: 303599 - RNA, 19 nt, Homo sapiens
  misc_RNA (1)...(19): siRNA sense strand
gacagugccagccaaugug

SEQ ID NO: 303600 - RNA, 19 nt, Homo sapiens
  misc_RNA (1)...(19): siRNA sense strand
gguggaugaggucuuguga

SEQ ID NO: 303601 - RNA, 19 nt, Homo sapiens
  misc_RNA (1)...(19): siRNA sense strand
agaacaaacuggagaauaa

SEQ ID NO: 303602 - RNA, 19 nt, Homo sapiens
  misc_RNA (1)...(19): siRNA sense strand
ucagcaaagugaaggaaua

SEQ ID NO: 303603 - RNA, 19 nt, Homo sapiens
  misc_RNA (1)...(19): siRNA sense strand
gaacaaacuggagaauaaa

SEQ ID NO: 303604 - RNA, 19 nt, Homo sapiens
  misc_RNA (1)...(19): siRNA sense strand
ggaagaaggcaucaacaga

SEQ ID NO: 303605 - RNA, 19 nt, Homo sapiens
  misc_RNA (1)...(19): siRNA sense strand
ucaacagacucacugacua

SEQ ID NO: 303606 - RNA, 19 nt, Homo sapiens
  misc_RNA (1)...(19): siRNA sense strand
ggacaccgaugggcauugu

SEQ ID NO: 303607 - RNA, 19 nt, Homo sapiens
  misc_RNA (1)...(19): siRNA sense strand
caacagacucacugacuau

SEQ ID NO: 303608 - RNA, 19 nt, Homo sapiens
  misc_RNA (1)...(19): siRNA sense strand
gacuauaucagcaaaguga

SEQ ID NO: 303609 - RNA, 19 nt, Homo sapiens
  misc_RNA (1)...(19): siRNA sense strand
cugagucccuucaacauga

SEQ ID NO: 303610 - RNA, 19 nt, Homo sapiens
  misc_RNA (1)...(19): siRNA sense strand
gaggagucauggucuuugu

SEQ ID NO: 303611 - RNA, 19 nt, Homo sapiens
  misc_RNA (1)...(19): siRNA sense strand
gcaaccugcucuauuacca

SEQ ID NO: 303612 - RNA, 19 nt, Homo sapiens
  misc_RNA (1)...(19): siRNA sense strand
uuggcgagcuauuuccuua

SEQ ID NO: 303613 - RNA, 19 nt, Homo sapiens
  misc_RNA (1)...(19): siRNA sense strand
gaaggcaucaacagacuca

SEQ ID NO: 303614 - RNA, 19 nt, Homo sapiens
  misc_RNA (1)...(19): siRNA sense strand
ccuuugcuguugauguuua

SEQ ID NO: 303615 - RNA, 19 nt, Homo sapiens
  misc_RNA (1)...(19): siRNA sense strand
cagacucacugacuauauc

SEQ ID NO: 303616 - RNA, 19 nt, Homo sapiens
  misc_RNA (1)...(19): siRNA sense strand
ucuauuaccagaccaacua

SEQ ID NO: 303617 - RNA, 19 nt, Homo sapiens
  misc_RNA (1)...(19): siRNA sense strand
cagcaaagugaaggaauaa

SEQ ID NO: 303618 - RNA, 19 nt, Homo sapiens
  misc_RNA (1)...(19): siRNA sense strand
ccaugaugauuuccauugu

SEQ ID NO: 303619 - RNA, 19 nt, Homo sapiens
  misc_RNA (1)...(19): siRNA sense strand
caugaugauuuccauugug

SEQ ID NO: 303620 - RNA, 19 nt, Homo sapiens
  misc_RNA (1)...(19): siRNA sense strand
gccaugaugauuuccauug

SEQ ID NO: 303621 - RNA, 19 nt, Homo sapiens
  misc_RNA (1)...(19): siRNA sense strand
aagaacaaacuggagaaua

SEQ ID NO: 303622 - RNA, 19 nt, Homo sapiens
  misc_RNA (1)...(19): siRNA sense strand
gcaggaagaaggcaucaac

SEQ ID NO: 303623 - RNA, 19 nt, Homo sapiens
  misc_RNA (1)...(19): siRNA sense strand
uguccuggaugcccuagaa

SEQ ID NO: 303624 - RNA, 19 nt, Homo sapiens
  misc_RNA (1)...(19): siRNA sense strand
ggagucauggucuuugugu

SEQ ID NO: 303625 - RNA, 19 nt, Homo sapiens
  misc_RNA (1)...(19): siRNA sense strand
agucauggucuuuguguuu

SEQ ID NO: 303626 - RNA, 19 nt, Homo sapiens
  misc_RNA (1)...(19): siRNA sense strand
gucauggucuuuguguuug

SEQ ID NO: 303627 - RNA, 19 nt, Homo sapiens
  misc_RNA (1)...(19): siRNA sense strand
gaugggcauuguccuggau

SEQ ID NO: 303628 - RNA, 19 nt, Homo sapiens
  misc_RNA (1)...(19): siRNA sense strand
gucuuuguguuuggcauua

SEQ ID NO: 303629 - RNA, 19 nt, Homo sapiens
  misc_RNA (1)...(19): siRNA sense strand
ggaggagucauggucuuug

SEQ ID NO: 303630 - RNA, 19 nt, Homo sapiens
  misc_RNA (1)...(19): siRNA sense strand
gaaccucaagaacaaacug

SEQ ID NO: 303631 - RNA, 19 nt, Homo sapiens
  misc_RNA (1)...(19): siRNA sense strand
ucaagaacaaacuggagaa

SEQ ID NO: 303632 - RNA, 19 nt, Homo sapiens
  misc_RNA (1)...(19): siRNA sense strand
gagucauggucuuuguguu

SEQ ID NO: 303633 - RNA, 19 nt, Homo sapiens
  misc_RNA (1)...(19): siRNA sense strand
uucggaaccucaagaacaa

SEQ ID NO: 303634 - RNA, 19 nt, Homo sapiens
  misc_RNA (1)...(19): siRNA sense strand
aagaaggcaucaacagacu

SEQ ID NO: 303635 - RNA, 19 nt, Homo sapiens
  misc_RNA (1)...(19): siRNA sense strand
caagaacaaacuggagaau

SEQ ID NO: 303636 - RNA, 19 nt, Homo sapiens
  misc_RNA (1)...(19): siRNA sense strand
gcaucaacagacucacuga

SEQ ID NO: 303637 - RNA, 19 nt, Homo sapiens
  misc_RNA (1)...(19): siRNA sense strand
uuccuuugcuguugauguu

SEQ ID NO: 303638 - RNA, 19 nt, Homo sapiens
  misc_RNA (1)...(19): siRNA sense strand
uggaacaaccgcguaguga

SEQ ID NO: 303639 - RNA, 19 nt, Homo sapiens
  misc_RNA (1)...(19): siRNA sense strand
cuucggaaccucaagaaca

SEQ ID NO: 303640 - RNA, 19 nt, Homo sapiens
  misc_RNA (1)...(19): siRNA sense strand
ccacaauaaagacguccuu

SEQ ID NO: 303641 - RNA, 19 nt, Homo sapiens
  misc_RNA (1)...(19): siRNA sense strand
cauguuggcgagcuauuuc

SEQ ID NO: 303642 - RNA, 19 nt, Homo sapiens
  misc_RNA (1)...(19): siRNA sense strand
gagaaucccuucaaagaaa

SEQ ID NO: 303643 - RNA, 19 nt, Homo sapiens
  misc_RNA (1)...(19): siRNA sense strand
gacugcaccuucuucaaua

SEQ ID NO: 303644 - RNA, 19 nt, Homo sapiens
  misc_RNA (1)...(19): siRNA sense strand
ggagaaucccuucaaagaa

SEQ ID NO: 303645 - RNA, 19 nt, Homo sapiens
  misc_RNA (1)...(19): siRNA sense strand
ggacugcaccuucuucaau

SEQ ID NO: 303646 - RNA, 19 nt, Homo sapiens
  misc_RNA (1)...(19): siRNA sense strand
ccaauggacuacaggaaga

SEQ ID NO: 303647 - RNA, 19 nt, Homo sapiens
  misc_RNA (1)...(19): siRNA sense strand
aagagcagcuagacaacua

SEQ ID NO: 303648 - RNA, 19 nt, Homo sapiens
  misc_RNA (1)...(19): siRNA sense strand
ggaacaagcagaccaucuu

SEQ ID NO: 303649 - RNA, 19 nt, Homo sapiens
  misc_RNA (1)...(19): siRNA sense strand
cccgagagcucaaggcaaa

SEQ ID NO: 303650 - RNA, 19 nt, Homo sapiens
  misc_RNA (1)...(19): siRNA sense strand
caagaucuaugacuucaac

SEQ ID NO: 303651 - RNA, 19 nt, Homo sapiens
  misc_RNA (1)...(19): siRNA sense strand
gaacaagcagaccaucuuc

SEQ ID NO: 303652 - RNA, 19 nt, Homo sapiens
  misc_RNA (1)...(19): siRNA sense strand
cuucaacacugacaacuuc

SEQ ID NO: 303653 - RNA, 19 nt, Homo sapiens
  misc_RNA (1)...(19): siRNA sense strand
caaacuaugccuucaagau

SEQ ID NO: 303654 - RNA, 19 nt, Homo sapiens
  misc_RNA (1)...(19): siRNA sense strand
ccucagcacuuuccacauc

SEQ ID NO: 303655 - RNA, 19 nt, Homo sapiens
  misc_RNA (1)...(19): siRNA sense strand
ucuaugacuucaacacuga

SEQ ID NO: 303656 - RNA, 19 nt, Homo sapiens
  misc_RNA (1)...(19): siRNA sense strand
caacgacuuuguggacaug

SEQ ID NO: 303657 - RNA, 19 nt, Homo sapiens
  misc_RNA (1)...(19): siRNA sense strand
ugacuucgaggacaugauu

SEQ ID NO: 303658 - RNA, 19 nt, Homo sapiens
  misc_RNA (1)...(19): siRNA sense strand
ccgaagagcagcuagacaa

SEQ ID NO: 303659 - RNA, 19 nt, Homo sapiens
  misc_RNA (1)...(19): siRNA sense strand
aaacuaugccuucaagauc

SEQ ID NO: 303660 - RNA, 19 nt, Homo sapiens
  misc_RNA (1)...(19): siRNA sense strand
cgacuuuguggacauguuu

SEQ ID NO: 303661 - RNA, 19 nt, Homo sapiens
  misc_RNA (1)...(19): siRNA sense strand
gcugggcuuugcugacuuc

SEQ ID NO: 303662 - RNA, 19 nt, Homo sapiens
  misc_RNA (1)...(19): siRNA sense strand
caagcugcauucgcgauuc

SEQ ID NO: 303663 - RNA, 19 nt, Homo sapiens
  misc_RNA (1)...(19): siRNA sense strand
ccuucaagaucuaugacuu

SEQ ID NO: 303664 - RNA, 19 nt, Homo sapiens
  misc_RNA (1)...(19): siRNA sense strand
aggaggagguggugcuugu

SEQ ID NO: 303665 - RNA, 19 nt, Homo sapiens
  misc_RNA (1)...(19): siRNA sense strand
gagcucaaggcaaacuaug

SEQ ID NO: 303666 - RNA, 19 nt, Homo sapiens
  misc_RNA (1)...(19): siRNA sense strand
gaagagcagcuagacaacu

SEQ ID NO: 303667 - RNA, 19 nt, Homo sapiens
  misc_RNA (1)...(19): siRNA sense strand
ucaacgacuuuguggacau

SEQ ID NO: 303668 - RNA, 19 nt, Homo sapiens
  misc_RNA (1)...(19): siRNA sense strand
uaccaggacugcaccuucu

SEQ ID NO: 303669 - RNA, 19 nt, Homo sapiens
  misc_RNA (1)...(19): siRNA sense strand
caacacugacaacuucauc

SEQ ID NO: 303670 - RNA, 19 nt, Homo sapiens
  misc_RNA (1)...(19): siRNA sense strand
gaucuaugacuucaacacu

SEQ ID NO: 303671 - RNA, 19 nt, Homo sapiens
  misc_RNA (1)...(19): siRNA sense strand
gcaaacuaugccuucaaga

SEQ ID NO: 303672 - RNA, 19 nt, Homo sapiens
  misc_RNA (1)...(19): siRNA sense strand
gaggagguggugcuugugu

SEQ ID NO: 303673 - RNA, 19 nt, Homo sapiens
  misc_RNA (1)...(19): siRNA sense strand
cuaagucagagcuggauga

SEQ ID NO: 303674 - RNA, 19 nt, Homo sapiens
  misc_RNA (1)...(19): siRNA sense strand
acuaugccuucaagaucua

SEQ ID NO: 303675 - RNA, 19 nt, Homo sapiens
  misc_RNA (1)...(19): siRNA sense strand
acugcaccuucuucaauaa

SEQ ID NO: 303676 - RNA, 19 nt, Homo sapiens
  misc_RNA (1)...(19): siRNA sense strand
ugcauucgcgauucuauga

SEQ ID NO: 303677 - RNA, 19 nt, Homo sapiens
  misc_RNA (1)...(19): siRNA sense strand
gagagcucaaggcaaacua

SEQ ID NO: 303678 - RNA, 19 nt, Homo sapiens
  misc_RNA (1)...(19): siRNA sense strand
agaaucccuucaaagaaag

SEQ ID NO: 303679 - RNA, 19 nt, Homo sapiens
  misc_RNA (1)...(19): siRNA sense strand
gauaaguucuggcauaaag

SEQ ID NO: 303680 - RNA, 19 nt, Homo sapiens
  misc_RNA (1)...(19): siRNA sense strand
agagugagcuccagaguca

SEQ ID NO: 303681 - RNA, 19 nt, Homo sapiens
  misc_RNA (1)...(19): siRNA sense strand
aaggugaacugucuggaua

SEQ ID NO: 303682 - RNA, 19 nt, Homo sapiens
  misc_RNA (1)...(19): siRNA sense strand
gaacaagggcaaagguuuc

SEQ ID NO: 303683 - RNA, 19 nt, Homo sapiens
  misc_RNA (1)...(19): siRNA sense strand
cuggauaaguucuggcaua

SEQ ID NO: 303684 - RNA, 19 nt, Homo sapiens
  misc_RNA (1)...(19): siRNA sense strand
agaagaagcccuacugcaa

SEQ ID NO: 303685 - RNA, 19 nt, Homo sapiens
  misc_RNA (1)...(19): siRNA sense strand
gcagcagccucaccacauc

SEQ ID NO: 303686 - RNA, 19 nt, Homo sapiens
  misc_RNA (1)...(19): siRNA sense strand
uggauaaguucuggcauaa

SEQ ID NO: 303687 - RNA, 19 nt, Homo sapiens
  misc_RNA (1)...(19): siRNA sense strand
ugcgagaccugcaagauga

SEQ ID NO: 303688 - RNA, 19 nt, Homo sapiens
  misc_RNA (1)...(19): siRNA sense strand
gaacaugaagaacuacaag

SEQ ID NO: 303689 - RNA, 19 nt, Homo sapiens
  misc_RNA (1)...(19): siRNA sense strand
aggaggaguuugagaagaa

SEQ ID NO: 303690 - RNA, 19 nt, Homo sapiens
  misc_RNA (1)...(19): siRNA sense strand
cacugaacaugaagaacua

SEQ ID NO: 303691 - RNA, 19 nt, Homo sapiens
  misc_RNA (1)...(19): siRNA sense strand
agaugacacugaacaugaa

SEQ ID NO: 303692 - RNA, 19 nt, Homo sapiens
  misc_RNA (1)...(19): siRNA sense strand
gaagaacaagggcaaaggu

SEQ ID NO: 303693 - RNA, 19 nt, Homo sapiens
  misc_RNA (1)...(19): siRNA sense strand
cggagaaggugaacugucu

SEQ ID NO: 303694 - RNA, 19 nt, Homo sapiens
  misc_RNA (1)...(19): siRNA sense strand
gaaggugaacugucuggau

SEQ ID NO: 303695 - RNA, 19 nt, Homo sapiens
  misc_RNA (1)...(19): siRNA sense strand
gcuacaaggaggaguuuga

SEQ ID NO: 303696 - RNA, 19 nt, Homo sapiens
  misc_RNA (1)...(19): siRNA sense strand
gcaaagguuucagcguagu

SEQ ID NO: 303697 - RNA, 19 nt, Homo sapiens
  misc_RNA (1)...(19): siRNA sense strand
aagaugacacugaacauga

SEQ ID NO: 303698 - RNA, 19 nt, Homo sapiens
  misc_RNA (1)...(19): siRNA sense strand
acaaggaggaguuugagaa

SEQ ID NO: 303699 - RNA, 19 nt, Homo sapiens
  misc_RNA (1)...(19): siRNA sense strand
uaaaauaccaugaggaguu

SEQ ID NO: 303700 - RNA, 19 nt, Homo sapiens
  misc_RNA (1)...(19): siRNA sense strand
caagaugacacugaacaug

SEQ ID NO: 303701 - RNA, 19 nt, Homo sapiens
  misc_RNA (1)...(19): siRNA sense strand
caugaggaguuugagaaga

SEQ ID NO: 303702 - RNA, 19 nt, Homo sapiens
  misc_RNA (1)...(19): siRNA sense strand
agaacaagggcaaagguuu

SEQ ID NO: 303703 - RNA, 19 nt, Homo sapiens
  misc_RNA (1)...(19): siRNA sense strand
cgcccgagcuccagagaau

SEQ ID NO: 303704 - RNA, 19 nt, Homo sapiens
  misc_RNA (1)...(19): siRNA sense strand
uacaagggcuacgagaaga

SEQ ID NO: 303705 - RNA, 19 nt, Homo sapiens
  misc_RNA (1)...(19): siRNA sense strand
ccacggagaaggugaacug

SEQ ID NO: 303706 - RNA, 19 nt, Homo sapiens
  misc_RNA (1)...(19): siRNA sense strand
ccugcaagaugacacugaa

SEQ ID NO: 303707 - RNA, 19 nt, Homo sapiens
  misc_RNA (1)...(19): siRNA sense strand
cccaggaccagaucaguaa

SEQ ID NO: 303708 - RNA, 19 nt, Homo sapiens
  misc_RNA (1)...(19): siRNA sense strand
gcaagaugacacugaacau

SEQ ID NO: 303709 - RNA, 19 nt, Homo sapiens
  misc_RNA (1)...(19): siRNA sense strand
ggauaaguucuggcauaaa

SEQ ID NO: 303710 - RNA, 19 nt, Homo sapiens
  misc_RNA (1)...(19): siRNA sense strand
cuacaagggcuacgagaag

SEQ ID NO: 303711 - RNA, 19 nt, Homo sapiens
  misc_RNA (1)...(19): siRNA sense strand
ugacacugaacaugaagaa

SEQ ID NO: 303712 - RNA, 19 nt, Homo sapiens
  misc_RNA (1)...(19): siRNA sense strand
cuacguggaggccaucuga

SEQ ID NO: 303713 - RNA, 19 nt, Homo sapiens
  misc_RNA (1)...(19): siRNA sense strand
aaaauaccaugaggaguuu

SEQ ID NO: 303714 - RNA, 19 nt, Homo sapiens
  misc_RNA (1)...(19): siRNA sense strand
gaagacccaggaccagauc

SEQ ID NO: 303715 - RNA, 19 nt, Homo sapiens
  misc_RNA (1)...(19): siRNA sense strand
gcggcaagaucguguaucc

SEQ ID NO: 303716 - RNA, 19 nt, Homo sapiens
  misc_RNA (1)...(19): siRNA sense strand
ggugaacugucuggauaag

SEQ ID NO: 303717 - RNA, 19 nt, Homo sapiens
  misc_RNA (1)...(19): siRNA sense strand
gagaagaacaagggcaaag

SEQ ID NO: 303718 - RNA, 19 nt, Homo sapiens
  misc_RNA (1)...(19): siRNA sense strand
caaggaggaguuugagaag

SEQ ID NO: 303719 - RNA, 19 nt, Homo sapiens
  misc_RNA (1)...(19): siRNA sense strand
ggaaaaccuucgccucaag

SEQ ID NO: 303720 - RNA, 19 nt, Homo sapiens
  misc_RNA (1)...(19): siRNA sense strand
agagucaggugcgcuacaa

SEQ ID NO: 303721 - RNA, 19 nt, Homo sapiens
  misc_RNA (1)...(19): siRNA sense strand
gagcuccagagaaucaaga

SEQ ID NO: 303722 - RNA, 19 nt, Homo sapiens
  misc_RNA (1)...(19): siRNA sense strand
acacugaacaugaagaacu

SEQ ID NO: 303723 - RNA, 19 nt, Homo sapiens
  misc_RNA (1)...(19): siRNA sense strand
gagccagagcgucgggauu

SEQ ID NO: 303724 - RNA, 19 nt, Homo sapiens
  misc_RNA (1)...(19): siRNA sense strand
ggaggaguuugagaagaac

SEQ ID NO: 303725 - RNA, 19 nt, Homo sapiens
  misc_RNA (1)...(19): siRNA sense strand
aaggaggaguuugagaaga

SEQ ID NO: 303726 - RNA, 19 nt, Homo sapiens
  misc_RNA (1)...(19): siRNA sense strand
gcgcuacaaggaggaguuu

SEQ ID NO: 303727 - RNA, 19 nt, Homo sapiens
  misc_RNA (1)...(19): siRNA sense strand
cuccagagaaucaagaaga

SEQ ID NO: 303728 - RNA, 19 nt, Homo sapiens
  misc_RNA (1)...(19): siRNA sense strand
uaaguucuggcauaaagca

SEQ ID NO: 303729 - RNA, 19 nt, Homo sapiens
  misc_RNA (1)...(19): siRNA sense strand
ggacauagcucugcacauu

SEQ ID NO: 303730 - RNA, 19 nt, Homo sapiens
  misc_RNA (1)...(19): siRNA sense strand
ggaaaucccuucuaugagu

SEQ ID NO: 303731 - RNA, 19 nt, Homo sapiens
  misc_RNA (1)...(19): siRNA sense strand
gaagaaccaucaucaucaa

SEQ ID NO: 303732 - RNA, 19 nt, Homo sapiens
  misc_RNA (1)...(19): siRNA sense strand
gaaaucccuucuaugagua

SEQ ID NO: 303733 - RNA, 19 nt, Homo sapiens
  misc_RNA (1)...(19): siRNA sense strand
ggaacagccuucugaaugg

SEQ ID NO: 303734 - RNA, 19 nt, Homo sapiens
  misc_RNA (1)...(19): siRNA sense strand
acauagcucugcacauuaa

SEQ ID NO: 303735 - RNA, 19 nt, Homo sapiens
  misc_RNA (1)...(19): siRNA sense strand
gagcuuugcuaucaacuuc

SEQ ID NO: 303736 - RNA, 19 nt, Homo sapiens
  misc_RNA (1)...(19): siRNA sense strand
agaagaagaucacccacaa

SEQ ID NO: 303737 - RNA, 19 nt, Homo sapiens
  misc_RNA (1)...(19): siRNA sense strand
gaugucaccuuguccuaug

SEQ ID NO: 303738 - RNA, 19 nt, Homo sapiens
  misc_RNA (1)...(19): siRNA sense strand
aaauggaaaucccuucuau

SEQ ID NO: 303739 - RNA, 19 nt, Homo sapiens
  misc_RNA (1)...(19): siRNA sense strand
caacuucaaucaaucaacu

SEQ ID NO: 303740 - RNA, 19 nt, Homo sapiens
  misc_RNA (1)...(19): siRNA sense strand
gggacaagguggucuucaa

SEQ ID NO: 303741 - RNA, 19 nt, Homo sapiens
  misc_RNA (1)...(19): siRNA sense strand
cgaagaaccaucaucauca

SEQ ID NO: 303742 - RNA, 19 nt, Homo sapiens
  misc_RNA (1)...(19): siRNA sense strand
gacauagcucugcacauua

SEQ ID NO: 303743 - RNA, 19 nt, Homo sapiens
  misc_RNA (1)...(19): siRNA sense strand
uuggaucgcuucaagguuu

SEQ ID NO: 303744 - RNA, 19 nt, Homo sapiens
  misc_RNA (1)...(19): siRNA sense strand
ccacuucaauccgcgguuu

SEQ ID NO: 303745 - RNA, 19 nt, Homo sapiens
  misc_RNA (1)...(19): siRNA sense strand
cggaacagccuucugaaug

SEQ ID NO: 303746 - RNA, 19 nt, Homo sapiens
  misc_RNA (1)...(19): siRNA sense strand
gccagcaccucuuugacuu

SEQ ID NO: 303747 - RNA, 19 nt, Homo sapiens
  misc_RNA (1)...(19): siRNA sense strand
gcucgaagaaccaucauca

SEQ ID NO: 303748 - RNA, 19 nt, Homo sapiens
  misc_RNA (1)...(19): siRNA sense strand
gaucacccacaacccauuu

SEQ ID NO: 303749 - RNA, 19 nt, Homo sapiens
  misc_RNA (1)...(19): siRNA sense strand
uaaauggaaaucccuucua

SEQ ID NO: 303750 - RNA, 19 nt, Homo sapiens
  misc_RNA (1)...(19): siRNA sense strand
cagcaccucuuugacuuug

SEQ ID NO: 303751 - RNA, 19 nt, Homo sapiens
  misc_RNA (1)...(19): siRNA sense strand
caagagcuuugcuaucaac

SEQ ID NO: 303752 - RNA, 19 nt, Homo sapiens
  misc_RNA (1)...(19): siRNA sense strand
gaucugcaacuucaaucaa

SEQ ID NO: 303753 - RNA, 19 nt, Homo sapiens
  misc_RNA (1)...(19): siRNA sense strand
gcucagacgucgccuucca

SEQ ID NO: 303754 - RNA, 19 nt, Homo sapiens
  misc_RNA (1)...(19): siRNA sense strand
acccgacgcugccuuacua

SEQ ID NO: 303755 - RNA, 19 nt, Homo sapiens
  misc_RNA (1)...(19): siRNA sense strand
agacgucgccuuccacuuc

SEQ ID NO: 303756 - RNA, 19 nt, Homo sapiens
  misc_RNA (1)...(19): siRNA sense strand
gauccgaggagaagaagau

SEQ ID NO: 303757 - RNA, 19 nt, Homo sapiens
  misc_RNA (1)...(19): siRNA sense strand
gcuaccagcccaccuacaa

SEQ ID NO: 303758 - RNA, 19 nt, Homo sapiens
  misc_RNA (1)...(19): siRNA sense strand
caacccgccugugccauau

SEQ ID NO: 303759 - RNA, 19 nt, Homo sapiens
  misc_RNA (1)...(19): siRNA sense strand
gcacuacaaggugguggua

SEQ ID NO: 303760 - RNA, 19 nt, Homo sapiens
  misc_RNA (1)...(19): siRNA sense strand
acuacaagguggugguaaa

SEQ ID NO: 303761 - RNA, 19 nt, Homo sapiens
  misc_RNA (1)...(19): siRNA sense strand
uguccuauguccagaucua

SEQ ID NO: 303762 - RNA, 19 nt, Homo sapiens
  misc_RNA (1)...(19): siRNA sense strand
acaagguggugguaaaugg

SEQ ID NO: 303763 - RNA, 19 nt, Homo sapiens
  misc_RNA (1)...(19): siRNA sense strand
auggaaaucccuucuauga

SEQ ID NO: 303764 - RNA, 19 nt, Homo sapiens
  misc_RNA (1)...(19): siRNA sense strand
ucaacccgccugugccaua

SEQ ID NO: 303765 - RNA, 19 nt, Homo sapiens
  misc_RNA (1)...(19): siRNA sense strand
ggaaauccagggugauguc

SEQ ID NO: 303766 - RNA, 19 nt, Homo sapiens
  misc_RNA (1)...(19): siRNA sense strand
gcuuugcuaucaacuucaa

SEQ ID NO: 303767 - RNA, 19 nt, Homo sapiens
  misc_RNA (1)...(19): siRNA sense strand
gauggucacccaccugcaa

SEQ ID NO: 303768 - RNA, 19 nt, Homo sapiens
  misc_RNA (1)...(19): siRNA sense strand
ggacaagguggucuucaac

SEQ ID NO: 303769 - RNA, 19 nt, Homo sapiens
  misc_RNA (1)...(19): siRNA sense strand
uggaucgcuucaagguuua

SEQ ID NO: 303770 - RNA, 19 nt, Homo sapiens
  misc_RNA (1)...(19): siRNA sense strand
ccuuugagcuggucuucau

SEQ ID NO: 303771 - RNA, 19 nt, Homo sapiens
  misc_RNA (1)...(19): siRNA sense strand
guucuuugaucuguccauu

SEQ ID NO: 303772 - RNA, 19 nt, Homo sapiens
  misc_RNA (1)...(19): siRNA sense strand
gaggguggacacauuggaa

SEQ ID NO: 303773 - RNA, 19 nt, Homo sapiens
  misc_RNA (1)...(19): siRNA sense strand
gacgucgccuuccacuuca

SEQ ID NO: 303774 - RNA, 19 nt, Homo sapiens
  misc_RNA (1)...(19): siRNA sense strand
ccagaggguggacacauug

SEQ ID NO: 303775 - RNA, 19 nt, Homo sapiens
  misc_RNA (1)...(19): siRNA sense strand
gaggagcaugcccuucaaa

SEQ ID NO: 303776 - RNA, 19 nt, Homo sapiens
  misc_RNA (1)...(19): siRNA sense strand
caauggccagcaccucuuu

SEQ ID NO: 303777 - RNA, 19 nt, Homo sapiens
  misc_RNA (1)...(19): siRNA sense strand
cuucaagguuuacgccaau

SEQ ID NO: 303778 - RNA, 19 nt, Homo sapiens
  misc_RNA (1)...(19): siRNA sense strand
ugaacagccugcccaccau

SEQ ID NO: 303779 - RNA, 19 nt, Homo sapiens
  misc_RNA (1)...(19): siRNA sense strand
gaaauccagggugauguca

SEQ ID NO: 303780 - RNA, 19 nt, Homo sapiens
  misc_RNA (1)...(19): siRNA sense strand
acgugggaaugucuguuua

SEQ ID NO: 303781 - RNA, 19 nt, Homo sapiens
  misc_RNA (1)...(19): siRNA sense strand
guccggaacagccuucuga

SEQ ID NO: 303782 - RNA, 19 nt, Homo sapiens
  misc_RNA (1)...(19): siRNA sense strand
ucgaagaaccaucaucauc

SEQ ID NO: 303783 - RNA, 19 nt, Homo sapiens
  misc_RNA (1)...(19): siRNA sense strand
gggcucacagcucgaagaa

SEQ ID NO: 303784 - RNA, 19 nt, Homo sapiens
  misc_RNA (1)...(19): siRNA sense strand
guaaauggaaaucccuucu

SEQ ID NO: 303785 - RNA, 19 nt, Homo sapiens
  misc_RNA (1)...(19): siRNA sense strand
ccggacaguucuuugaucu

SEQ ID NO: 303786 - RNA, 19 nt, Homo sapiens
  misc_RNA (1)...(19): siRNA sense strand
agaggagcaugcccuucaa

SEQ ID NO: 303787 - RNA, 19 nt, Homo sapiens
  misc_RNA (1)...(19): siRNA sense strand
acaacccgacgcugccuua

SEQ ID NO: 303788 - RNA, 19 nt, Homo sapiens
  misc_RNA (1)...(19): siRNA sense strand
ggagggcucacagcucgaa

SEQ ID NO: 303789 - RNA, 19 nt, Homo sapiens
  misc_RNA (1)...(19): siRNA sense strand
gacaagguggucuucaaca

SEQ ID NO: 303790 - RNA, 19 nt, Homo sapiens
  misc_RNA (1)...(19): siRNA sense strand
gugggaaugucuguuuaca

SEQ ID NO: 303791 - RNA, 19 nt, Homo sapiens
  misc_RNA (1)...(19): siRNA sense strand
gaagaagaucacccacaac

SEQ ID NO: 303792 - RNA, 19 nt, Homo sapiens
  misc_RNA (1)...(19): siRNA sense strand
aagaggagcaugcccuuca

SEQ ID NO: 303793 - RNA, 19 nt, Homo sapiens
  misc_RNA (1)...(19): siRNA sense strand
caagguggugguaaaugga

SEQ ID NO: 303794 - RNA, 19 nt, Homo sapiens
  misc_RNA (1)...(19): siRNA sense strand
ccagcaccucuuugacuuu

SEQ ID NO: 303795 - RNA, 19 nt, Homo sapiens
  misc_RNA (1)...(19): siRNA sense strand
ggaucugcaacuucaauca

SEQ ID NO: 303796 - RNA, 19 nt, Homo sapiens
  misc_RNA (1)...(19): siRNA sense strand
ucccggacauugccaucaa

SEQ ID NO: 303797 - RNA, 19 nt, Homo sapiens
  misc_RNA (1)...(19): siRNA sense strand
acccgccugugccauauuu

SEQ ID NO: 303798 - RNA, 19 nt, Homo sapiens
  misc_RNA (1)...(19): siRNA sense strand
gggcucaacgugggaaugu

SEQ ID NO: 303799 - RNA, 19 nt, Homo sapiens
  misc_RNA (1)...(19): siRNA sense strand
caucaucaagggcuaugug

SEQ ID NO: 303800 - RNA, 19 nt, Homo sapiens
  misc_RNA (1)...(19): siRNA sense strand
uggcugagcacuacaaggu

SEQ ID NO: 303801 - RNA, 19 nt, Homo sapiens
  misc_RNA (1)...(19): siRNA sense strand
caagauggccuucuacaau

SEQ ID NO: 303802 - RNA, 19 nt, Homo sapiens
  misc_RNA (1)...(19): siRNA sense strand
augaagaucuugcgucuaa

SEQ ID NO: 303803 - RNA, 19 nt, Homo sapiens
  misc_RNA (1)...(19): siRNA sense strand
cgggaaaucuccacugaug

SEQ ID NO: 303804 - RNA, 19 nt, Homo sapiens
  misc_RNA (1)...(19): siRNA sense strand
gaagaucuugcgucuaaug

SEQ ID NO: 303805 - RNA, 19 nt, Homo sapiens
  misc_RNA (1)...(19): siRNA sense strand
gaacgagaaaccacaaugg

SEQ ID NO: 303806 - RNA, 19 nt, Homo sapiens
  misc_RNA (1)...(19): siRNA sense strand
aagauggccuucuacaaug

SEQ ID NO: 303807 - RNA, 19 nt, Homo sapiens
  misc_RNA (1)...(19): siRNA sense strand
gguggugacuaucugaaga

SEQ ID NO: 303808 - RNA, 19 nt, Homo sapiens
  misc_RNA (1)...(19): siRNA sense strand
caagacuucuacugcaaga

SEQ ID NO: 303809 - RNA, 19 nt, Homo sapiens
  misc_RNA (1)...(19): siRNA sense strand
ggaacgagaaaccacaaug

SEQ ID NO: 303810 - RNA, 19 nt, Homo sapiens
  misc_RNA (1)...(19): siRNA sense strand
ucgagaacaugaagaucuu

SEQ ID NO: 303811 - RNA, 19 nt, Homo sapiens
  misc_RNA (1)...(19): siRNA sense strand
gcuccaugcugcccuucaa

SEQ ID NO: 303812 - RNA, 19 nt, Homo sapiens
  misc_RNA (1)...(19): siRNA sense strand
ccauagucauguccuccua

SEQ ID NO: 303813 - RNA, 19 nt, Homo sapiens
  misc_RNA (1)...(19): siRNA sense strand
gaagggcugacaccagaug

SEQ ID NO: 303814 - RNA, 19 nt, Homo sapiens
  misc_RNA (1)...(19): siRNA sense strand
uaaugcugcuccacaucaa

SEQ ID NO: 303815 - RNA, 19 nt, Homo sapiens
  misc_RNA (1)...(19): siRNA sense strand
ucaagauggccuucuacaa

SEQ ID NO: 303816 - RNA, 19 nt, Homo sapiens
  misc_RNA (1)...(19): siRNA sense strand
ucgcagcccuauguuguug

SEQ ID NO: 303817 - RNA, 19 nt, Homo sapiens
  misc_RNA (1)...(19): siRNA sense strand
ccacaucaaauaccuguac

SEQ ID NO: 303818 - RNA, 19 nt, Homo sapiens
  misc_RNA (1)...(19): siRNA sense strand
cguggcgccuuccaucuug

SEQ ID NO: 303819 - RNA, 19 nt, Homo sapiens
  misc_RNA (1)...(19): siRNA sense strand
uccgggaaaucuccacuga

SEQ ID NO: 303820 - RNA, 19 nt, Homo sapiens
  misc_RNA (1)...(19): siRNA sense strand
caacgucgagaacaugaag

SEQ ID NO: 303821 - RNA, 19 nt, Homo sapiens
  misc_RNA (1)...(19): siRNA sense strand
gugagggucuggguguuuc

SEQ ID NO: 303822 - RNA, 19 nt, Homo sapiens
  misc_RNA (1)...(19): siRNA sense strand
gcagcccuauguuguuguc

SEQ ID NO: 303823 - RNA, 19 nt, Homo sapiens
  misc_RNA (1)...(19): siRNA sense strand
cuaaugcugcuccacauca

SEQ ID NO: 303824 - RNA, 19 nt, Homo sapiens
  misc_RNA (1)...(19): siRNA sense strand
ggcacuccaugcucacugu

SEQ ID NO: 303825 - RNA, 19 nt, Homo sapiens
  misc_RNA (1)...(19): siRNA sense strand
ccucgcagcccuauguugu

SEQ ID NO: 303826 - RNA, 19 nt, Homo sapiens
  misc_RNA (1)...(19): siRNA sense strand
ccuauguuguugucuccaa

SEQ ID NO: 303827 - RNA, 19 nt, Homo sapiens
  misc_RNA (1)...(19): siRNA sense strand
gccaagcgcgagcuacugu

SEQ ID NO: 303828 - RNA, 19 nt, Homo sapiens
  misc_RNA (1)...(19): siRNA sense strand
gcaacgucgagaacaugaa

SEQ ID NO: 303829 - RNA, 19 nt, Homo sapiens
  misc_RNA (1)...(19): siRNA sense strand
accaagacuucuacugcaa

SEQ ID NO: 303830 - RNA, 19 nt, Homo sapiens
  misc_RNA (1)...(19): siRNA sense strand
caggagucaucuucaucga

SEQ ID NO: 303831 - RNA, 19 nt, Homo sapiens
  misc_RNA (1)...(19): siRNA sense strand
uggcaggagucaucuucau

SEQ ID NO: 303832 - RNA, 19 nt, Homo sapiens
  misc_RNA (1)...(19): siRNA sense strand
gcuggcaggagucaucuuc

SEQ ID NO: 303833 - RNA, 19 nt, Homo sapiens
  misc_RNA (1)...(19): siRNA sense strand
caagauggccuucuacaau

SEQ ID NO: 303834 - RNA, 19 nt, Homo sapiens
  misc_RNA (1)...(19): siRNA sense strand
augaagaucuugcgucuaa

SEQ ID NO: 303835 - RNA, 19 nt, Homo sapiens
  misc_RNA (1)...(19): siRNA sense strand
cgggaaaucuccacugaug

SEQ ID NO: 303836 - RNA, 19 nt, Homo sapiens
  misc_RNA (1)...(19): siRNA sense strand
gaagaucuugcgucuaaug

SEQ ID NO: 303837 - RNA, 19 nt, Homo sapiens
  misc_RNA (1)...(19): siRNA sense strand
gaacgagaaaccacaaugg

SEQ ID NO: 303838 - RNA, 19 nt, Homo sapiens
  misc_RNA (1)...(19): siRNA sense strand
aagauggccuucuacaaug

SEQ ID NO: 303839 - RNA, 19 nt, Homo sapiens
  misc_RNA (1)...(19): siRNA sense strand
gguggugacuaucugaaga

SEQ ID NO: 303840 - RNA, 19 nt, Homo sapiens
  misc_RNA (1)...(19): siRNA sense strand
caagacuucuacugcaaga

SEQ ID NO: 303841 - RNA, 19 nt, Homo sapiens
  misc_RNA (1)...(19): siRNA sense strand
ggaacgagaaaccacaaug

SEQ ID NO: 303842 - RNA, 19 nt, Homo sapiens
  misc_RNA (1)...(19): siRNA sense strand
ucgagaacaugaagaucuu

SEQ ID NO: 303843 - RNA, 19 nt, Homo sapiens
  misc_RNA (1)...(19): siRNA sense strand
gcuccaugcugcccuucaa

SEQ ID NO: 303844 - RNA, 19 nt, Homo sapiens
  misc_RNA (1)...(19): siRNA sense strand
ccauagucauguccuccua

SEQ ID NO: 303845 - RNA, 19 nt, Homo sapiens
  misc_RNA (1)...(19): siRNA sense strand
gaagggcugacaccagaug

SEQ ID NO: 303846 - RNA, 19 nt, Homo sapiens
  misc_RNA (1)...(19): siRNA sense strand
uaaugcugcuccacaucaa

SEQ ID NO: 303847 - RNA, 19 nt, Homo sapiens
  misc_RNA (1)...(19): siRNA sense strand
ucaagauggccuucuacaa

SEQ ID NO: 303848 - RNA, 19 nt, Homo sapiens
  misc_RNA (1)...(19): siRNA sense strand
ucgcagcccuauguuguug

SEQ ID NO: 303849 - RNA, 19 nt, Homo sapiens
  misc_RNA (1)...(19): siRNA sense strand
ccacaucaaauaccuguac

SEQ ID NO: 303850 - RNA, 19 nt, Homo sapiens
  misc_RNA (1)...(19): siRNA sense strand
cguggcgccuuccaucuug

SEQ ID NO: 303851 - RNA, 19 nt, Homo sapiens
  misc_RNA (1)...(19): siRNA sense strand
uccgggaaaucuccacuga

SEQ ID NO: 303852 - RNA, 19 nt, Homo sapiens
  misc_RNA (1)...(19): siRNA sense strand
caacgucgagaacaugaag

SEQ ID NO: 303853 - RNA, 19 nt, Homo sapiens
  misc_RNA (1)...(19): siRNA sense strand
gugagggucuggguguuuc

SEQ ID NO: 303854 - RNA, 19 nt, Homo sapiens
  misc_RNA (1)...(19): siRNA sense strand
gcagcccuauguuguuguc

SEQ ID NO: 303855 - RNA, 19 nt, Homo sapiens
  misc_RNA (1)...(19): siRNA sense strand
cuaaugcugcuccacauca

SEQ ID NO: 303856 - RNA, 19 nt, Homo sapiens
  misc_RNA (1)...(19): siRNA sense strand
ggcacuccaugcucacugu

SEQ ID NO: 303857 - RNA, 19 nt, Homo sapiens
  misc_RNA (1)...(19): siRNA sense strand
ccucgcagcccuauguugu

SEQ ID NO: 303858 - RNA, 19 nt, Homo sapiens
  misc_RNA (1)...(19): siRNA sense strand
ccuauguuguugucuccaa

SEQ ID NO: 303859 - RNA, 19 nt, Homo sapiens
  misc_RNA (1)...(19): siRNA sense strand
gccaagcgcgagcuacugu

SEQ ID NO: 303860 - RNA, 19 nt, Homo sapiens
  misc_RNA (1)...(19): siRNA sense strand
gcaacgucgagaacaugaa

SEQ ID NO: 303861 - RNA, 19 nt, Homo sapiens
  misc_RNA (1)...(19): siRNA sense strand
accaagacuucuacugcaa

SEQ ID NO: 303862 - RNA, 19 nt, Homo sapiens
  misc_RNA (1)...(19): siRNA sense strand
caggagucaucuucaucga

SEQ ID NO: 303863 - RNA, 19 nt, Homo sapiens
  misc_RNA (1)...(19): siRNA sense strand
uggcaggagucaucuucau

SEQ ID NO: 303864 - RNA, 19 nt, Homo sapiens
  misc_RNA (1)...(19): siRNA sense strand
gcuggcaggagucaucuuc

SEQ ID NO: 303865 - RNA, 19 nt, Homo sapiens
  misc_RNA (1)...(19): siRNA sense strand
gggaggagcuuuaucuuua

SEQ ID NO: 303866 - RNA, 19 nt, Homo sapiens
  misc_RNA (1)...(19): siRNA sense strand
gcagaagccuuugcaggua

SEQ ID NO: 303867 - RNA, 19 nt, Homo sapiens
  misc_RNA (1)...(19): siRNA sense strand
gaggagcuuuaucuuuaua

SEQ ID NO: 303868 - RNA, 19 nt, Homo sapiens
  misc_RNA (1)...(19): siRNA sense strand
gaacguggcuaugccuuca

SEQ ID NO: 303869 - RNA, 19 nt, Homo sapiens
  misc_RNA (1)...(19): siRNA sense strand
uguuaggccuguuacauua

SEQ ID NO: 303870 - RNA, 19 nt, Homo sapiens
  misc_RNA (1)...(19): siRNA sense strand
cagccaaugugaccuuuaa

SEQ ID NO: 303871 - RNA, 19 nt, Homo sapiens
  misc_RNA (1)...(19): siRNA sense strand
ggaggagcuuuaucuuuau

SEQ ID NO: 303872 - RNA, 19 nt, Homo sapiens
  misc_RNA (1)...(19): siRNA sense strand
uaucagaaguucacauauc

SEQ ID NO: 303873 - RNA, 19 nt, Homo sapiens
  misc_RNA (1)...(19): siRNA sense strand
gauaaacuccuaccuccaa

SEQ ID NO: 303874 - RNA, 19 nt, Homo sapiens
  misc_RNA (1)...(19): siRNA sense strand
gguaucagaaguucacaua

SEQ ID NO: 303875 - RNA, 19 nt, Homo sapiens
  misc_RNA (1)...(19): siRNA sense strand
gaagguaugaugcacaguu

SEQ ID NO: 303876 - RNA, 19 nt, Homo sapiens
  misc_RNA (1)...(19): siRNA sense strand
ugauggaugucaagcaauu

SEQ ID NO: 303877 - RNA, 19 nt, Homo sapiens
  misc_RNA (1)...(19): siRNA sense strand
ggcuaugccuucaugguuu

SEQ ID NO: 303878 - RNA, 19 nt, Homo sapiens
  misc_RNA (1)...(19): siRNA sense strand
gaucaagaagugaagaaug

SEQ ID NO: 303879 - RNA, 19 nt, Homo sapiens
  misc_RNA (1)...(19): siRNA sense strand
cugcauggauugggagaua

SEQ ID NO: 303880 - RNA, 19 nt, Homo sapiens
  misc_RNA (1)...(19): siRNA sense strand
gcuaugccuucaugguuug

SEQ ID NO: 303881 - RNA, 19 nt, Homo sapiens
  misc_RNA (1)...(19): siRNA sense strand
cagaagccuuugcagguau

SEQ ID NO: 303882 - RNA, 19 nt, Homo sapiens
  misc_RNA (1)...(19): siRNA sense strand
aaugauggaugucaagcaa

SEQ ID NO: 303883 - RNA, 19 nt, Homo sapiens
  misc_RNA (1)...(19): siRNA sense strand
uggcauuccuucuaacaga

SEQ ID NO: 303884 - RNA, 19 nt, Homo sapiens
  misc_RNA (1)...(19): siRNA sense strand
cagaaguucacauaucaaa

SEQ ID NO: 303885 - RNA, 19 nt, Homo sapiens
  misc_RNA (1)...(19): siRNA sense strand
gaaacuggcaggugucacu

SEQ ID NO: 303886 - RNA, 19 nt, Homo sapiens
  misc_RNA (1)...(19): siRNA sense strand
uaucgguggugcuaauaga

SEQ ID NO: 303887 - RNA, 19 nt, Homo sapiens
  misc_RNA (1)...(19): siRNA sense strand
gauuaaacaggcagcagaa

SEQ ID NO: 303888 - RNA, 19 nt, Homo sapiens
  misc_RNA (1)...(19): siRNA sense strand
aaacuccuaccuccaauug

SEQ ID NO: 303889 - RNA, 19 nt, Homo sapiens
  misc_RNA (1)...(19): siRNA sense strand
ggaugucaagcaauucauu

SEQ ID NO: 303890 - RNA, 19 nt, Homo sapiens
  misc_RNA (1)...(19): siRNA sense strand
cagauucacaggaggauga

SEQ ID NO: 303891 - RNA, 19 nt, Homo sapiens
  misc_RNA (1)...(19): siRNA sense strand
aacaggaaaugauggaugu

SEQ ID NO: 303892 - RNA, 19 nt, Homo sapiens
  misc_RNA (1)...(19): siRNA sense strand
ggaaaugauggaugucaag

SEQ ID NO: 303893 - RNA, 19 nt, Homo sapiens
  misc_RNA (1)...(19): siRNA sense strand
uuaggccuguuacauuaaa

SEQ ID NO: 303894 - RNA, 19 nt, Homo sapiens
  misc_RNA (1)...(19): siRNA sense strand
auacugcccuuaccacaca

SEQ ID NO: 303895 - RNA, 19 nt, Homo sapiens
  misc_RNA (1)...(19): siRNA sense strand
uaaauaugaacguggcuau

SEQ ID NO: 303896 - RNA, 19 nt, Homo sapiens
  misc_RNA (1)...(19): siRNA sense strand
ccuucaugguuugauauua

SEQ ID NO: 303897 - RNA, 19 nt, Homo sapiens
  misc_RNA (1)...(19): siRNA sense strand
cggaugggcagaagccuuu

SEQ ID NO: 303898 - RNA, 19 nt, Homo sapiens
  misc_RNA (1)...(19): siRNA sense strand
gcacaguucgugucaacag

SEQ ID NO: 303899 - RNA, 19 nt, Homo sapiens
  misc_RNA (1)...(19): siRNA sense strand
gugaauccagccaauguga

SEQ ID NO: 303900 - RNA, 19 nt, Homo sapiens
  misc_RNA (1)...(19): siRNA sense strand
ggauugugacccuuugguu

SEQ ID NO: 303901 - RNA, 19 nt, Homo sapiens
  misc_RNA (1)...(19): siRNA sense strand
gugcggcaauaacauguca

SEQ ID NO: 303902 - RNA, 19 nt, Homo sapiens
  misc_RNA (1)...(19): siRNA sense strand
aucagaaguucacauauca

SEQ ID NO: 303903 - RNA, 19 nt, Homo sapiens
  misc_RNA (1)...(19): siRNA sense strand
acuccuaccuccaauugau

SEQ ID NO: 303904 - RNA, 19 nt, Homo sapiens
  misc_RNA (1)...(19): siRNA sense strand
gauguuugguucucuuacg

SEQ ID NO: 303905 - RNA, 19 nt, Homo sapiens
  misc_RNA (1)...(19): siRNA sense strand
ucagggaggagcuuuaucu

SEQ ID NO: 303906 - RNA, 19 nt, Homo sapiens
  misc_RNA (1)...(19): siRNA sense strand
guuaggccuguuacauuaa

SEQ ID NO: 303907 - RNA, 19 nt, Homo sapiens
  misc_RNA (1)...(19): siRNA sense strand
aagguaugaugcacaguuc

SEQ ID NO: 303908 - RNA, 19 nt, Homo sapiens
  misc_RNA (1)...(19): siRNA sense strand
ccacuucgggcuuccuuuc

SEQ ID NO: 303909 - RNA, 19 nt, Homo sapiens
  misc_RNA (1)...(19): siRNA sense strand
aucaagaagugaagaaugg

SEQ ID NO: 303910 - RNA, 19 nt, Homo sapiens
  misc_RNA (1)...(19): siRNA sense strand
gcagguaucagaaguucac

SEQ ID NO: 303911 - RNA, 19 nt, Homo sapiens
  misc_RNA (1)...(19): siRNA sense strand
aggaaaugauggaugucaa

SEQ ID NO: 303912 - RNA, 19 nt, Homo sapiens
  misc_RNA (1)...(19): siRNA sense strand
agggaggagcuuuaucuuu

SEQ ID NO: 303913 - RNA, 19 nt, Homo sapiens
  misc_RNA (1)...(19): siRNA sense strand
uaaacuccuaccuccaauu

SEQ ID NO: 303914 - RNA, 19 nt, Homo sapiens
  misc_RNA (1)...(19): siRNA sense strand
gguccuaucgguggugcua

SEQ ID NO: 303915 - RNA, 19 nt, Homo sapiens
  misc_RNA (1)...(19): siRNA sense strand
uggcuaugccuucaugguu

SEQ ID NO: 303916 - RNA, 19 nt, Homo sapiens
  misc_RNA (1)...(19): siRNA sense strand
ggccuguuacauuaaauau

SEQ ID NO: 303917 - RNA, 19 nt, Homo sapiens
  misc_RNA (1)...(19): siRNA sense strand
gaugaugacugccaaauua

SEQ ID NO: 303918 - RNA, 19 nt, Homo sapiens
  misc_RNA (1)...(19): siRNA sense strand
gaaacucgcucuguaagaa

SEQ ID NO: 303919 - RNA, 19 nt, Homo sapiens
  misc_RNA (1)...(19): siRNA sense strand
ggagaagaguauaaaguuu

SEQ ID NO: 303920 - RNA, 19 nt, Homo sapiens
  misc_RNA (1)...(19): siRNA sense strand
caaagagcacgcugaauua

SEQ ID NO: 303921 - RNA, 19 nt, Homo sapiens
  misc_RNA (1)...(19): siRNA sense strand
ggacgucucuagaacauau

SEQ ID NO: 303922 - RNA, 19 nt, Homo sapiens
  misc_RNA (1)...(19): siRNA sense strand
ggaagagaaugguguugaa

SEQ ID NO: 303923 - RNA, 19 nt, Homo sapiens
  misc_RNA (1)...(19): siRNA sense strand
gaagagaggucccgugacu

SEQ ID NO: 303924 - RNA, 19 nt, Homo sapiens
  misc_RNA (1)...(19): siRNA sense strand
ccaaagagcacgcugaauu

SEQ ID NO: 303925 - RNA, 19 nt, Homo sapiens
  misc_RNA (1)...(19): siRNA sense strand
ggaugucucuucaguuuau

SEQ ID NO: 303926 - RNA, 19 nt, Homo sapiens
  misc_RNA (1)...(19): siRNA sense strand
ucaagcaguuggcguauuu

SEQ ID NO: 303927 - RNA, 19 nt, Homo sapiens
  misc_RNA (1)...(19): siRNA sense strand
gcccacauauggagaagua

SEQ ID NO: 303928 - RNA, 19 nt, Homo sapiens
  misc_RNA (1)...(19): siRNA sense strand
gcacaaguccagcucauga

SEQ ID NO: 303929 - RNA, 19 nt, Homo sapiens
  misc_RNA (1)...(19): siRNA sense strand
gaaagaggaggauacaaga

SEQ ID NO: 303930 - RNA, 19 nt, Homo sapiens
  misc_RNA (1)...(19): siRNA sense strand
gaaaucgguuaacguuaga

SEQ ID NO: 303931 - RNA, 19 nt, Homo sapiens
  misc_RNA (1)...(19): siRNA sense strand
gaacgcguguguccugaga

SEQ ID NO: 303932 - RNA, 19 nt, Homo sapiens
  misc_RNA (1)...(19): siRNA sense strand
gcacaggaaaucauuaaga

SEQ ID NO: 303933 - RNA, 19 nt, Homo sapiens
  misc_RNA (1)...(19): siRNA sense strand
uaaagcaguugaagugaug

SEQ ID NO: 303934 - RNA, 19 nt, Homo sapiens
  misc_RNA (1)...(19): siRNA sense strand
ugaacaccgucccucauua

SEQ ID NO: 303935 - RNA, 19 nt, Homo sapiens
  misc_RNA (1)...(19): siRNA sense strand
ugaaaucgguuaacguuag

SEQ ID NO: 303936 - RNA, 19 nt, Homo sapiens
  misc_RNA (1)...(19): siRNA sense strand
cacaggaaaucauuaagaa

SEQ ID NO: 303937 - RNA, 19 nt, Homo sapiens
  misc_RNA (1)...(19): siRNA sense strand
gaacacuucugcuaaugag

SEQ ID NO: 303938 - RNA, 19 nt, Homo sapiens
  misc_RNA (1)...(19): siRNA sense strand
ggagguggaggcagaauuu

SEQ ID NO: 303939 - RNA, 19 nt, Homo sapiens
  misc_RNA (1)...(19): siRNA sense strand
uuaagaagcuggagaagag

SEQ ID NO: 303940 - RNA, 19 nt, Homo sapiens
  misc_RNA (1)...(19): siRNA sense strand
aaugaucgauucaguagaa

SEQ ID NO: 303941 - RNA, 19 nt, Homo sapiens
  misc_RNA (1)...(19): siRNA sense strand
ugggaugucucuucaguuu

SEQ ID NO: 303942 - RNA, 19 nt, Homo sapiens
  misc_RNA (1)...(19): siRNA sense strand
gaagccaagucuuucugaa

SEQ ID NO: 303943 - RNA, 19 nt, Homo sapiens
  misc_RNA (1)...(19): siRNA sense strand
ggcagaugcugaagaagaa

SEQ ID NO: 303944 - RNA, 19 nt, Homo sapiens
  misc_RNA (1)...(19): siRNA sense strand
caggaaagccggguuagua

SEQ ID NO: 303945 - RNA, 19 nt, Homo sapiens
  misc_RNA (1)...(19): siRNA sense strand
ggauggugcuuuggaugua

SEQ ID NO: 303946 - RNA, 19 nt, Homo sapiens
  misc_RNA (1)...(19): siRNA sense strand
guaaagcaguugaagugau

SEQ ID NO: 303947 - RNA, 19 nt, Homo sapiens
  misc_RNA (1)...(19): siRNA sense strand
agaaagaaaucacuaacuc

SEQ ID NO: 303948 - RNA, 19 nt, Homo sapiens
  misc_RNA (1)...(19): siRNA sense strand
ggaaucaacaccuuucuca

SEQ ID NO: 303949 - RNA, 19 nt, Homo sapiens
  misc_RNA (1)...(19): siRNA sense strand
agagcacgcugaauuagaa

SEQ ID NO: 303950 - RNA, 19 nt, Homo sapiens
  misc_RNA (1)...(19): siRNA sense strand
gaagaaacaguagaaagga

SEQ ID NO: 303951 - RNA, 19 nt, Homo sapiens
  misc_RNA (1)...(19): siRNA sense strand
gagaagaguauaaaguuuc

SEQ ID NO: 303952 - RNA, 19 nt, Homo sapiens
  misc_RNA (1)...(19): siRNA sense strand
cauaucuuguggccauuua

SEQ ID NO: 303953 - RNA, 19 nt, Homo sapiens
  misc_RNA (1)...(19): siRNA sense strand
cuacgaagagugacuauug

SEQ ID NO: 303954 - RNA, 19 nt, Homo sapiens
  misc_RNA (1)...(19): siRNA sense strand
ggaaagccggguuaguaaa

SEQ ID NO: 303955 - RNA, 19 nt, Homo sapiens
  misc_RNA (1)...(19): siRNA sense strand
cucauuaccucgauuuauu

SEQ ID NO: 303956 - RNA, 19 nt, Homo sapiens
  misc_RNA (1)...(19): siRNA sense strand
gaugaaugaugacccaagu

SEQ ID NO: 303957 - RNA, 19 nt, Homo sapiens
  misc_RNA (1)...(19): siRNA sense strand
caagccaucuucucuacga

SEQ ID NO: 303958 - RNA, 19 nt, Homo sapiens
  misc_RNA (1)...(19): siRNA sense strand
gaggauguaugccaaagag

SEQ ID NO: 303959 - RNA, 19 nt, Homo sapiens
  misc_RNA (1)...(19): siRNA sense strand
agaggaaccagaaacaaua

SEQ ID NO: 303960 - RNA, 19 nt, Homo sapiens
  misc_RNA (1)...(19): siRNA sense strand
cuugugaccuugacagaaa

SEQ ID NO: 303961 - RNA, 19 nt, Homo sapiens
  misc_RNA (1)...(19): siRNA sense strand
acaaggaagccaagucuuu

SEQ ID NO: 303962 - RNA, 19 nt, Homo sapiens
  misc_RNA (1)...(19): siRNA sense strand
gggcagaugcugaagaaga

SEQ ID NO: 303963 - RNA, 19 nt, Homo sapiens
  misc_RNA (1)...(19): siRNA sense strand
gaaagaaaucacuaacucu

SEQ ID NO: 303964 - RNA, 19 nt, Homo sapiens
  misc_RNA (1)...(19): siRNA sense strand
ccagaaauauuggaaaugc

SEQ ID NO: 303965 - RNA, 19 nt, Homo sapiens
  misc_RNA (1)...(19): siRNA sense strand
agaagagagugaagcuuga

SEQ ID NO: 303966 - RNA, 19 nt, Homo sapiens
  misc_RNA (1)...(19): siRNA sense strand
aaagugggaugucucuuca

SEQ ID NO: 303967 - RNA, 19 nt, Homo sapiens
  misc_RNA (1)...(19): siRNA sense strand
aguagaaggucaagcaguu

SEQ ID NO: 303968 - RNA, 19 nt, Homo sapiens
  misc_RNA (1)...(19): siRNA sense strand
gauggugcuuuggauguaa

SEQ ID NO: 303969 - RNA, 19 nt, Homo sapiens
  misc_RNA (1)...(19): siRNA sense strand
gaagaggauguaugccaaa

SEQ ID NO: 303970 - RNA, 19 nt, Homo sapiens
  misc_RNA (1)...(19): siRNA sense strand
gaaagccggguuaguaaag

SEQ ID NO: 303971 - RNA, 19 nt, Homo sapiens
  misc_RNA (1)...(19): siRNA sense strand
caaagaggaaccagaaaca

SEQ ID NO: 303972 - RNA, 19 nt, Homo sapiens
  misc_RNA (1)...(19): siRNA sense strand
gagaagaaacaguagaaag

SEQ ID NO: 303973 - RNA, 19 nt, Homo sapiens
  misc_RNA (1)...(19): siRNA sense strand
ggaaaauaaugaucgauuc

SEQ ID NO: 303974 - RNA, 19 nt, Homo sapiens
  misc_RNA (1)...(19): siRNA sense strand
caguagggcugagauguug

SEQ ID NO: 303975 - RNA, 19 nt, Homo sapiens
  misc_RNA (1)...(19): siRNA sense strand
gugaaaggcccacauaugg

SEQ ID NO: 303976 - RNA, 19 nt, Homo sapiens
  misc_RNA (1)...(19): siRNA sense strand
caaagugggaugucucuuc

SEQ ID NO: 303977 - RNA, 19 nt, Homo sapiens
  misc_RNA (1)...(19): siRNA sense strand
ggacaaggaagccaagucu

SEQ ID NO: 303978 - RNA, 19 nt, Homo sapiens
  misc_RNA (1)...(19): siRNA sense strand
gaagaaagaaaucacuaac

SEQ ID NO: 303979 - RNA, 19 nt, Homo sapiens
  misc_RNA (1)...(19): siRNA sense strand
ucaggagacucugugguuu

SEQ ID NO: 303980 - RNA, 19 nt, Homo sapiens
  misc_RNA (1)...(19): siRNA sense strand
gaacaugcuucaggagacu

SEQ ID NO: 303981 - RNA, 19 nt, Homo sapiens
  misc_RNA (1)...(19): siRNA sense strand
cagaaacaauagaagaaca

SEQ ID NO: 303982 - RNA, 19 nt, Homo sapiens
  misc_RNA (1)...(19): siRNA sense strand
ggaaccagaaacaauagaa

SEQ ID NO: 303983 - RNA, 19 nt, Homo sapiens
  misc_RNA (1)...(19): siRNA sense strand
caaguccagcucaugauaa

SEQ ID NO: 303984 - RNA, 19 nt, Homo sapiens
  misc_RNA (1)...(19): siRNA sense strand
gaacaccgucccucauuac

SEQ ID NO: 303985 - RNA, 19 nt, Homo sapiens
  misc_RNA (1)...(19): siRNA sense strand
cagcuucucuaaacuccaa

SEQ ID NO: 303986 - RNA, 19 nt, Homo sapiens
  misc_RNA (1)...(19): siRNA sense strand
ccacauauggagaaguaaa

SEQ ID NO: 303987 - RNA, 19 nt, Homo sapiens
  misc_RNA (1)...(19): siRNA sense strand
agagccaucuggagaagaa

SEQ ID NO: 303988 - RNA, 19 nt, Homo sapiens
  misc_RNA (1)...(19): siRNA sense strand
aaacuaaagaugacucaga

SEQ ID NO: 303989 - RNA, 19 nt, Homo sapiens
  misc_RNA (1)...(19): siRNA sense strand
ggagaagaaacaguagaaa

SEQ ID NO: 303990 - RNA, 19 nt, Homo sapiens
  misc_RNA (1)...(19): siRNA sense strand
ccucacaggccaauuauuc

SEQ ID NO: 303991 - RNA, 19 nt, Homo sapiens
  misc_RNA (1)...(19): siRNA sense strand
ggaagccaagucuuucuga

SEQ ID NO: 303992 - RNA, 19 nt, Homo sapiens
  misc_RNA (1)...(19): siRNA sense strand
ugaauauggcuucuuguga

SEQ ID NO: 303993 - RNA, 19 nt, Homo sapiens
  misc_RNA (1)...(19): siRNA sense strand
ggucaaagcagagugaaca

SEQ ID NO: 303994 - RNA, 19 nt, Homo sapiens
  misc_RNA (1)...(19): siRNA sense strand
gaagagagugaagcuugaa

SEQ ID NO: 303995 - RNA, 19 nt, Homo sapiens
  misc_RNA (1)...(19): siRNA sense strand
gacagacgguacuauaacu

SEQ ID NO: 303996 - RNA, 19 nt, Homo sapiens
  misc_RNA (1)...(19): siRNA sense strand
ugaaugaugacccaaguau

SEQ ID NO: 303997 - RNA, 19 nt, Homo sapiens
  misc_RNA (1)...(19): siRNA sense strand
gcacgcugaauuagaagaa

SEQ ID NO: 303998 - RNA, 19 nt, Homo sapiens
  misc_RNA (1)...(19): siRNA sense strand
gaguaaggauaaaaccaua

SEQ ID NO: 303999 - RNA, 19 nt, Homo sapiens
  misc_RNA (1)...(19): siRNA sense strand
gaggauacaagaucagcuu

SEQ ID NO: 304000 - RNA, 19 nt, Homo sapiens
  misc_RNA (1)...(19): siRNA sense strand
gcaguugaagugaugauuc

SEQ ID NO: 304001 - RNA, 19 nt, Homo sapiens
  misc_RNA (1)...(19): siRNA sense strand
gauacaagaucagcuucuc

SEQ ID NO: 304002 - RNA, 19 nt, Homo sapiens
  misc_RNA (1)...(19): siRNA sense strand
uuaccucgauuuauuagca

SEQ ID NO: 304003 - RNA, 19 nt, Homo sapiens
  misc_RNA (1)...(19): siRNA sense strand
uggagaagaguauaaaguu

SEQ ID NO: 304004 - RNA, 19 nt, Homo sapiens
  misc_RNA (1)...(19): siRNA sense strand
guccagcucaugauaauau

SEQ ID NO: 304005 - RNA, 19 nt, Homo sapiens
  misc_RNA (1)...(19): siRNA sense strand
gaaccagaaacaauagaag

SEQ ID NO: 304006 - RNA, 19 nt, Homo sapiens
  misc_RNA (1)...(19): siRNA sense strand
gugaacaccgucccucauu

SEQ ID NO: 304007 - RNA, 19 nt, Homo sapiens
  misc_RNA (1)...(19): siRNA sense strand
uauuggaaaugcaggaaug

SEQ ID NO: 304008 - RNA, 19 nt, Homo sapiens
  misc_RNA (1)...(19): siRNA sense strand
uaguaaagcaguugaagug

SEQ ID NO: 304009 - RNA, 19 nt, Homo sapiens
  misc_RNA (1)...(19): siRNA sense strand
agaggaggauacaagauca

SEQ ID NO: 304010 - RNA, 19 nt, Homo sapiens
  misc_RNA (1)...(19): siRNA sense strand
caaggaagccaagucuuuc

SEQ ID NO: 304011 - RNA, 19 nt, Homo sapiens
  misc_RNA (1)...(19): siRNA sense strand
acaaguccagcucaugaua

SEQ ID NO: 304012 - RNA, 19 nt, Homo sapiens
  misc_RNA (1)...(19): siRNA sense strand
cagcuucucccacgauaga

SEQ ID NO: 304013 - RNA, 19 nt, Homo sapiens
  misc_RNA (1)...(19): siRNA sense strand
aaucucaaguccuccauca

SEQ ID NO: 304014 - RNA, 19 nt, Homo sapiens
  misc_RNA (1)...(19): siRNA sense strand
gaaugaugacccaaguaug

SEQ ID NO: 304015 - RNA, 19 nt, Homo sapiens
  misc_RNA (1)...(19): siRNA sense strand
gguuaacguuagacaaagu

SEQ ID NO: 304016 - RNA, 19 nt, Homo sapiens
  misc_RNA (1)...(19): siRNA sense strand
gugaaaucgguuaacguua

SEQ ID NO: 304017 - RNA, 19 nt, Homo sapiens
  misc_RNA (1)...(19): siRNA sense strand
gaagaaugauguggagaaa

SEQ ID NO: 304018 - RNA, 19 nt, Homo sapiens
  misc_RNA (1)...(19): siRNA sense strand
gacaagaccucaacuuugg

SEQ ID NO: 304019 - RNA, 19 nt, Homo sapiens
  misc_RNA (1)...(19): siRNA sense strand
gaaauucgucuuugagauc

SEQ ID NO: 304020 - RNA, 19 nt, Homo sapiens
  misc_RNA (1)...(19): siRNA sense strand
cgacaagaccucaacuuug

SEQ ID NO: 304021 - RNA, 19 nt, Homo sapiens
  misc_RNA (1)...(19): siRNA sense strand
agaaugauguggagaaagu

SEQ ID NO: 304022 - RNA, 19 nt, Homo sapiens
  misc_RNA (1)...(19): siRNA sense strand
gagaaauucgucuuugaga

SEQ ID NO: 304023 - RNA, 19 nt, Homo sapiens
  misc_RNA (1)...(19): siRNA sense strand
gagaagauccaggucauca

SEQ ID NO: 304024 - RNA, 19 nt, Homo sapiens
  misc_RNA (1)...(19): siRNA sense strand
uggagaaauucgucuuuga

SEQ ID NO: 304025 - RNA, 19 nt, Homo sapiens
  misc_RNA (1)...(19): siRNA sense strand
gaaaguggugguggugauu

SEQ ID NO: 304026 - RNA, 19 nt, Homo sapiens
  misc_RNA (1)...(19): siRNA sense strand
gaagauccaggucaucaag

SEQ ID NO: 304027 - RNA, 19 nt, Homo sapiens
  misc_RNA (1)...(19): siRNA sense strand
guggagaaauucgucuuug

SEQ ID NO: 304028 - RNA, 19 nt, Homo sapiens
  misc_RNA (1)...(19): siRNA sense strand
ggagguggcugugcaucuc

SEQ ID NO: 304029 - RNA, 19 nt, Homo sapiens
  misc_RNA (1)...(19): siRNA sense strand
ggagaaauucgucuuugag

SEQ ID NO: 304030 - RNA, 19 nt, Homo sapiens
  misc_RNA (1)...(19): siRNA sense strand
caacgugccgguccagaug

SEQ ID NO: 304031 - RNA, 19 nt, Homo sapiens
  misc_RNA (1)...(19): siRNA sense strand
agaaauucgucuuugagau

SEQ ID NO: 304032 - RNA, 19 nt, Homo sapiens
  misc_RNA (1)...(19): siRNA sense strand
uccagaaacgcaagaagua

SEQ ID NO: 304033 - RNA, 19 nt, Homo sapiens
  misc_RNA (1)...(19): siRNA sense strand
gaugcagcuuuacguggaa

SEQ ID NO: 304034 - RNA, 19 nt, Homo sapiens
  misc_RNA (1)...(19): siRNA sense strand
agaagaaugauguggagaa

SEQ ID NO: 304035 - RNA, 19 nt, Homo sapiens
  misc_RNA (1)...(19): siRNA sense strand
agaaaguggugguggugau

SEQ ID NO: 304036 - RNA, 19 nt, Homo sapiens
  misc_RNA (1)...(19): siRNA sense strand
acgacaagaccucaacuuu

SEQ ID NO: 304037 - RNA, 19 nt, Homo sapiens
  misc_RNA (1)...(19): siRNA sense strand
gcaccgcccaguggagaaa

SEQ ID NO: 304038 - RNA, 19 nt, Homo sapiens
  misc_RNA (1)...(19): siRNA sense strand
aaauucgucuuugagauca

SEQ ID NO: 304039 - RNA, 19 nt, Homo sapiens
  misc_RNA (1)...(19): siRNA sense strand
gugggcaucuuccagaaac

SEQ ID NO: 304040 - RNA, 19 nt, Homo sapiens
  misc_RNA (1)...(19): siRNA sense strand
uccaggucaucaaggauuu

SEQ ID NO: 304041 - RNA, 19 nt, Homo sapiens
  misc_RNA (1)...(19): siRNA sense strand
agauccaggucaucaagga

SEQ ID NO: 304042 - RNA, 19 nt, Homo sapiens
  misc_RNA (1)...(19): siRNA sense strand
cagaaacgcaagaaguaca

SEQ ID NO: 304043 - RNA, 19 nt, Homo sapiens
  misc_RNA (1)...(19): siRNA sense strand
accaugacgucggacauuu

SEQ ID NO: 304044 - RNA, 19 nt, Homo sapiens
  misc_RNA (1)...(19): siRNA sense strand
ccgcugugcucugcgaguu

SEQ ID NO: 304045 - RNA, 19 nt, Homo sapiens
  misc_RNA (1)...(19): siRNA sense strand
gcucagacucgcuguuguc

SEQ ID NO: 304046 - RNA, 19 nt, Homo sapiens
  misc_RNA (1)...(19): siRNA sense strand
gacucgcuguugucucaug

SEQ ID NO: 304047 - RNA, 19 nt, Homo sapiens
  misc_RNA (1)...(19): siRNA sense strand
cgucggacauuuuaaagau

SEQ ID NO: 304048 - RNA, 19 nt, Homo sapiens
  misc_RNA (1)...(19): siRNA sense strand
ggcaauugcuugucauuaa

SEQ ID NO: 304049 - RNA, 19 nt, Homo sapiens
  misc_RNA (1)...(19): siRNA sense strand
gcaauugcuugucauuaaa

SEQ ID NO: 304050 - RNA, 19 nt, Homo sapiens
  misc_RNA (1)...(19): siRNA sense strand
gaacaagaccucuggaugu

SEQ ID NO: 304051 - RNA, 19 nt, Homo sapiens
  misc_RNA (1)...(19): siRNA sense strand
caagaccucuggauguuuc

SEQ ID NO: 304052 - RNA, 19 nt, Homo sapiens
  misc_RNA (1)...(19): siRNA sense strand
ggagaccgaugcuucuaac

SEQ ID NO: 304053 - RNA, 19 nt, Homo sapiens
  misc_RNA (1)...(19): siRNA sense strand
gguugcuccuguguaauua

SEQ ID NO: 304054 - RNA, 19 nt, Homo sapiens
  misc_RNA (1)...(19): siRNA sense strand
gcuccuguguaauuacgaa

SEQ ID NO: 304055 - RNA, 19 nt, Homo sapiens
  misc_RNA (1)...(19): siRNA sense strand
gggagaccgaugcuucuaa

SEQ ID NO: 304056 - RNA, 19 nt, Homo sapiens
  misc_RNA (1)...(19): siRNA sense strand
ggauguuuccaguuucaaa

SEQ ID NO: 304057 - RNA, 19 nt, Homo sapiens
  misc_RNA (1)...(19): siRNA sense strand
ccuguguaauuacgaaaga

SEQ ID NO: 304058 - RNA, 19 nt, Homo sapiens
  misc_RNA (1)...(19): siRNA sense strand
gauguuuccaguuucaaau

SEQ ID NO: 304059 - RNA, 19 nt, Homo sapiens
  misc_RNA (1)...(19): siRNA sense strand
uguuuccaguuucaaauug

SEQ ID NO: 304060 - RNA, 19 nt, Homo sapiens
  misc_RNA (1)...(19): siRNA sense strand
guccgaaggugcaaaauag

SEQ ID NO: 304061 - RNA, 19 nt, Homo sapiens
  misc_RNA (1)...(19): siRNA sense strand
uggcaauugcuugucauua

SEQ ID NO: 304062 - RNA, 19 nt, Homo sapiens
  misc_RNA (1)...(19): siRNA sense strand
gccuggcaauugcuuguca

SEQ ID NO: 304063 - RNA, 19 nt, Homo sapiens
  misc_RNA (1)...(19): siRNA sense strand
ccugcgagccuggcaauug

SEQ ID NO: 304064 - RNA, 19 nt, Homo sapiens
  misc_RNA (1)...(19): siRNA sense strand
gagccuggcaauugcuugu

SEQ ID NO: 304065 - RNA, 19 nt, Homo sapiens
  misc_RNA (1)...(19): siRNA sense strand
guauacagcucaccaauga

SEQ ID NO: 304066 - RNA, 19 nt, Homo sapiens
  misc_RNA (1)...(19): siRNA sense strand
gcaaagagucaccaaauuu

SEQ ID NO: 304067 - RNA, 19 nt, Homo sapiens
  misc_RNA (1)...(19): siRNA sense strand
gcacucagcuccucuaucu

SEQ ID NO: 304068 - RNA, 19 nt, Homo sapiens
  misc_RNA (1)...(19): siRNA sense strand
gaagucagcugcuaugaag

SEQ ID NO: 304069 - RNA, 19 nt, Homo sapiens
  misc_RNA (1)...(19): siRNA sense strand
ggagaugacugcagugaga

SEQ ID NO: 304070 - RNA, 19 nt, Homo sapiens
  misc_RNA (1)...(19): siRNA sense strand
gaagcuaaccuaauuggua

SEQ ID NO: 304071 - RNA, 19 nt, Homo sapiens
  misc_RNA (1)...(19): siRNA sense strand
caaggaaccugcuuugaug

SEQ ID NO: 304072 - RNA, 19 nt, Homo sapiens
  misc_RNA (1)...(19): siRNA sense strand
ggagguggcuggcucuaaa

SEQ ID NO: 304073 - RNA, 19 nt, Homo sapiens
  misc_RNA (1)...(19): siRNA sense strand
gcaacugccuuccagguuu

SEQ ID NO: 304074 - RNA, 19 nt, Homo sapiens
  misc_RNA (1)...(19): siRNA sense strand
gcagguagcucagaccauu

SEQ ID NO: 304075 - RNA, 19 nt, Homo sapiens
  misc_RNA (1)...(19): siRNA sense strand
gaugcuaccugucuggaua

SEQ ID NO: 304076 - RNA, 19 nt, Homo sapiens
  misc_RNA (1)...(19): siRNA sense strand
gaacgauggucgcugcauu

SEQ ID NO: 304077 - RNA, 19 nt, Homo sapiens
  misc_RNA (1)...(19): siRNA sense strand
ggaggcagcucagauuuga

SEQ ID NO: 304078 - RNA, 19 nt, Homo sapiens
  misc_RNA (1)...(19): siRNA sense strand
gcacugagagcuccuguuu

SEQ ID NO: 304079 - RNA, 19 nt, Homo sapiens
  misc_RNA (1)...(19): siRNA sense strand
gaauggagguuccuguaug

SEQ ID NO: 304080 - RNA, 19 nt, Homo sapiens
  misc_RNA (1)...(19): siRNA sense strand
uaacaugccugaugguuuc

SEQ ID NO: 304081 - RNA, 19 nt, Homo sapiens
  misc_RNA (1)...(19): siRNA sense strand
gaagguacccugguuauug

SEQ ID NO: 304082 - RNA, 19 nt, Homo sapiens
  misc_RNA (1)...(19): siRNA sense strand
gugagugucugaaggguua

SEQ ID NO: 304083 - RNA, 19 nt, Homo sapiens
  misc_RNA (1)...(19): siRNA sense strand
ggucagcgguguaccauug

SEQ ID NO: 304084 - RNA, 19 nt, Homo sapiens
  misc_RNA (1)...(19): siRNA sense strand
ggaagaagucucugaguga

SEQ ID NO: 304085 - RNA, 19 nt, Homo sapiens
  misc_RNA (1)...(19): siRNA sense strand
ggagaggugugcuuguuga

SEQ ID NO: 304086 - RNA, 19 nt, Homo sapiens
  misc_RNA (1)...(19): siRNA sense strand
gaagggagcaccugugaga

SEQ ID NO: 304087 - RNA, 19 nt, Homo sapiens
  misc_RNA (1)...(19): siRNA sense strand
acaaugagauguuugguau

SEQ ID NO: 304088 - RNA, 19 nt, Homo sapiens
  misc_RNA (1)...(19): siRNA sense strand
ucaaaggugugcauuguga

SEQ ID NO: 304089 - RNA, 19 nt, Homo sapiens
  misc_RNA (1)...(19): siRNA sense strand
gcaaauggaaguaccugua

SEQ ID NO: 304090 - RNA, 19 nt, Homo sapiens
  misc_RNA (1)...(19): siRNA sense strand
caaggugucuuccagauuc

SEQ ID NO: 304091 - RNA, 19 nt, Homo sapiens
  misc_RNA (1)...(19): siRNA sense strand
ggacugugcugcugaccaa

SEQ ID NO: 304092 - RNA, 19 nt, Homo sapiens
  misc_RNA (1)...(19): siRNA sense strand
cagaagauguggaugaaug

SEQ ID NO: 304093 - RNA, 19 nt, Homo sapiens
  misc_RNA (1)...(19): siRNA sense strand
ggacacagcagcaccuuga

SEQ ID NO: 304094 - RNA, 19 nt, Homo sapiens
  misc_RNA (1)...(19): siRNA sense strand
acaacaacaugcagguuua

SEQ ID NO: 304095 - RNA, 19 nt, Homo sapiens
  misc_RNA (1)...(19): siRNA sense strand
gcagugagaacauugauga

SEQ ID NO: 304096 - RNA, 19 nt, Homo sapiens
  misc_RNA (1)...(19): siRNA sense strand
gugagaacauugaugauug

SEQ ID NO: 304097 - RNA, 19 nt, Homo sapiens
  misc_RNA (1)...(19): siRNA sense strand
gcagugaccagauugauga

SEQ ID NO: 304098 - RNA, 19 nt, Homo sapiens
  misc_RNA (1)...(19): siRNA sense strand
gaaaguaaaggcugaagau

SEQ ID NO: 304099 - RNA, 19 nt, Homo sapiens
  misc_RNA (1)...(19): siRNA sense strand
gcagaccacuucaaagaca

SEQ ID NO: 304100 - RNA, 19 nt, Homo sapiens
  misc_RNA (1)...(19): siRNA sense strand
gaaugcagcucucauccau

SEQ ID NO: 304101 - RNA, 19 nt, Homo sapiens
  misc_RNA (1)...(19): siRNA sense strand
gaaugcugcuguuugcaaa

SEQ ID NO: 304102 - RNA, 19 nt, Homo sapiens
  misc_RNA (1)...(19): siRNA sense strand
gagcagcuguggacaagug

SEQ ID NO: 304103 - RNA, 19 nt, Homo sapiens
  misc_RNA (1)...(19): siRNA sense strand
gggauuaacuccuucucuu

SEQ ID NO: 304104 - RNA, 19 nt, Homo sapiens
  misc_RNA (1)...(19): siRNA sense strand
ggagaacauugacaacugu

SEQ ID NO: 304105 - RNA, 19 nt, Homo sapiens
  misc_RNA (1)...(19): siRNA sense strand
gagcaacccuugugugaac

SEQ ID NO: 304106 - RNA, 19 nt, Homo sapiens
  misc_RNA (1)...(19): siRNA sense strand
gauauaagugucucuguga

SEQ ID NO: 304107 - RNA, 19 nt, Homo sapiens
  misc_RNA (1)...(19): siRNA sense strand
ccgaguaacugaucuagau

SEQ ID NO: 304108 - RNA, 19 nt, Homo sapiens
  misc_RNA (1)...(19): siRNA sense strand
gcagaagguacccugguua

SEQ ID NO: 304109 - RNA, 19 nt, Homo sapiens
  misc_RNA (1)...(19): siRNA sense strand
gaaugugccucaaauccau

SEQ ID NO: 304110 - RNA, 19 nt, Homo sapiens
  misc_RNA (1)...(19): siRNA sense strand
uggauaaagucaaucguuu

SEQ ID NO: 304111 - RNA, 19 nt, Homo sapiens
  misc_RNA (1)...(19): siRNA sense strand
gcaggagguggauguguua

SEQ ID NO: 304112 - RNA, 19 nt, Homo sapiens
  misc_RNA (1)...(19): siRNA sense strand
gaaccaaggaaccugcuuu

SEQ ID NO: 304113 - RNA, 19 nt, Homo sapiens
  misc_RNA (1)...(19): siRNA sense strand
gcauuaaucgcuacaguug

SEQ ID NO: 304114 - RNA, 19 nt, Homo sapiens
  misc_RNA (1)...(19): siRNA sense strand
cagaggauguggaugaaug

SEQ ID NO: 304115 - RNA, 19 nt, Homo sapiens
  misc_RNA (1)...(19): siRNA sense strand
ggagggaccugcucugacu

SEQ ID NO: 304116 - RNA, 19 nt, Homo sapiens
  misc_RNA (1)...(19): siRNA sense strand
gguguaccauugacauuga

SEQ ID NO: 304117 - RNA, 19 nt, Homo sapiens
  misc_RNA (1)...(19): siRNA sense strand
cagccaagauccuguuaga

SEQ ID NO: 304118 - RNA, 19 nt, Homo sapiens
  misc_RNA (1)...(19): siRNA sense strand
cucagaagcuaaccuaauu

SEQ ID NO: 304119 - RNA, 19 nt, Homo sapiens
  misc_RNA (1)...(19): siRNA sense strand
gugaagagaacauugauga

SEQ ID NO: 304120 - RNA, 19 nt, Homo sapiens
  misc_RNA (1)...(19): siRNA sense strand
gugaaugguuuccgcugua

SEQ ID NO: 304121 - RNA, 19 nt, Homo sapiens
  misc_RNA (1)...(19): siRNA sense strand
ggagguggauguguuagau

SEQ ID NO: 304122 - RNA, 19 nt, Homo sapiens
  misc_RNA (1)...(19): siRNA sense strand
gggauuauaucaacaacca

SEQ ID NO: 304123 - RNA, 19 nt, Homo sapiens
  misc_RNA (1)...(19): siRNA sense strand
gcagaaaugugagacugau

SEQ ID NO: 304124 - RNA, 19 nt, Homo sapiens
  misc_RNA (1)...(19): siRNA sense strand
gggcacccauccuggcaua

SEQ ID NO: 304125 - RNA, 19 nt, Homo sapiens
  misc_RNA (1)...(19): siRNA sense strand
ccaguacaaugagauguuu

SEQ ID NO: 304126 - RNA, 19 nt, Homo sapiens
  misc_RNA (1)...(19): siRNA sense strand
uagaaucuccucacacgua

SEQ ID NO: 304127 - RNA, 19 nt, Homo sapiens
  misc_RNA (1)...(19): siRNA sense strand
uggcagaacugaucaacug

SEQ ID NO: 304128 - RNA, 19 nt, Homo sapiens
  misc_RNA (1)...(19): siRNA sense strand
ggacucuucugcuaacauc

SEQ ID NO: 304129 - RNA, 19 nt, Homo sapiens
  misc_RNA (1)...(19): siRNA sense strand
acaccaaccugcgcauuaa

SEQ ID NO: 304130 - RNA, 19 nt, Homo sapiens
  misc_RNA (1)...(19): siRNA sense strand
gguggucagugcauggaua

SEQ ID NO: 304131 - RNA, 19 nt, Homo sapiens
  misc_RNA (1)...(19): siRNA sense strand
acugagagcuccuguuuca

SEQ ID NO: 304132 - RNA, 19 nt, Homo sapiens
  misc_RNA (1)...(19): siRNA sense strand
gaagaaccgcugccagaau

SEQ ID NO: 304133 - RNA, 19 nt, Homo sapiens
  misc_RNA (1)...(19): siRNA sense strand
gcaagaagggcuuuaaagg

SEQ ID NO: 304134 - RNA, 19 nt, Homo sapiens
  misc_RNA (1)...(19): siRNA sense strand
gguaaggagugccaaugga

SEQ ID NO: 304135 - RNA, 19 nt, Homo sapiens
  misc_RNA (1)...(19): siRNA sense strand
ugaaugagacccaguacaa

SEQ ID NO: 304136 - RNA, 19 nt, Homo sapiens
  misc_RNA (1)...(19): siRNA sense strand
ggaauauugucaacaucga

SEQ ID NO: 304137 - RNA, 19 nt, Homo sapiens
  misc_RNA (1)...(19): siRNA sense strand
gcaagacaugcaaguauga

SEQ ID NO: 304138 - RNA, 19 nt, Homo sapiens
  misc_RNA (1)...(19): siRNA sense strand
gcaacacgcauuacuguca

SEQ ID NO: 304139 - RNA, 19 nt, Homo sapiens
  misc_RNA (1)...(19): siRNA sense strand
ucaggugucugcaucaaug

SEQ ID NO: 304140 - RNA, 19 nt, Homo sapiens
  misc_RNA (1)...(19): siRNA sense strand
gaagggcuuuaaaggcuau

SEQ ID NO: 304141 - RNA, 19 nt, Homo sapiens
  misc_RNA (1)...(19): siRNA sense strand
caacaucucauccaugcuu

SEQ ID NO: 304142 - RNA, 19 nt, Homo sapiens
  misc_RNA (1)...(19): siRNA sense strand
gugcaagucucagaagcua

SEQ ID NO: 304143 - RNA, 19 nt, Homo sapiens
  misc_RNA (1)...(19): siRNA sense strand
ucagaccacugcuucaaga

SEQ ID NO: 304144 - RNA, 19 nt, Homo sapiens
  misc_RNA (1)...(19): siRNA sense strand
cagaugcccugccugaaug

SEQ ID NO: 304145 - RNA, 19 nt, Homo sapiens
  misc_RNA (1)...(19): siRNA sense strand
guauugaccuugugaacca

SEQ ID NO: 304146 - RNA, 19 nt, Homo sapiens
  misc_RNA (1)...(19): siRNA sense strand
gcaccuguauugaccuugu

SEQ ID NO: 304147 - RNA, 19 nt, Homo sapiens
  misc_RNA (1)...(19): siRNA sense strand
gugacaaucuggugaaugg

SEQ ID NO: 304148 - RNA, 19 nt, Homo sapiens
  misc_RNA (1)...(19): siRNA sense strand
guaccagauuccagaaaug

SEQ ID NO: 304149 - RNA, 19 nt, Homo sapiens
  misc_RNA (1)...(19): siRNA sense strand
ggugagaagucagcugcua

SEQ ID NO: 304150 - RNA, 19 nt, Homo sapiens
  misc_RNA (1)...(19): siRNA sense strand
ucaaagacaaccacuguga

SEQ ID NO: 304151 - RNA, 19 nt, Homo sapiens
  misc_RNA (1)...(19): siRNA sense strand
gugcagaccacuucaaaga

SEQ ID NO: 304152 - RNA, 19 nt, Homo sapiens
  misc_RNA (1)...(19): siRNA sense strand
gcauugcagugucgagaug

SEQ ID NO: 304153 - RNA, 19 nt, Homo sapiens
  misc_RNA (1)...(19): siRNA sense strand
gaauggaggcaccuguauu

SEQ ID NO: 304154 - RNA, 19 nt, Homo sapiens
  misc_RNA (1)...(19): siRNA sense strand
gagagcuccuguuucaaug

SEQ ID NO: 304155 - RNA, 19 nt, Homo sapiens
  misc_RNA (1)...(19): siRNA sense strand
uggauggagugaauacuuu

SEQ ID NO: 304156 - RNA, 19 nt, Homo sapiens
  misc_RNA (1)...(19): siRNA sense strand
cgaugugccucaggguuua

SEQ ID NO: 304157 - RNA, 19 nt, Homo sapiens
  misc_RNA (1)...(19): siRNA sense strand
gaugaaugaugguacuaca

SEQ ID NO: 304158 - RNA, 19 nt, Homo sapiens
  misc_RNA (1)...(19): siRNA sense strand
gaauguguguuaccuacca

SEQ ID NO: 304159 - RNA, 19 nt, Homo sapiens
  misc_RNA (1)...(19): siRNA sense strand
gaccacugcuucaagaaca

SEQ ID NO: 304160 - RNA, 19 nt, Homo sapiens
  misc_RNA (1)...(19): siRNA sense strand
guaacaugccugaugguuu

SEQ ID NO: 304161 - RNA, 19 nt, Homo sapiens
  misc_RNA (1)...(19): siRNA sense strand
aaucagcccugccagaaug

SEQ ID NO: 304162 - RNA, 19 nt, Homo sapiens
  misc_RNA (1)...(19): siRNA sense strand
gcagcuacaugugugaaug

SEQ ID NO: 304163 - RNA, 19 nt, Homo sapiens
  misc_RNA (1)...(19): siRNA sense strand
ucaacggugugaaugguuu

SEQ ID NO: 304164 - RNA, 19 nt, Homo sapiens
  misc_RNA (1)...(19): siRNA sense strand
ucacagggcagagauguaa

SEQ ID NO: 304165 - RNA, 19 nt, Homo sapiens
  misc_RNA (1)...(19): siRNA sense strand
cgccaguacuucuuugaaa

SEQ ID NO: 304166 - RNA, 19 nt, Homo sapiens
  misc_RNA (1)...(19): siRNA sense strand
ggcgauggauucgaauuga

SEQ ID NO: 304167 - RNA, 19 nt, Homo sapiens
  misc_RNA (1)...(19): siRNA sense strand
gcaaggccaagcaguccua

SEQ ID NO: 304168 - RNA, 19 nt, Homo sapiens
  misc_RNA (1)...(19): siRNA sense strand
ugauaacgcugaggaaggu

SEQ ID NO: 304169 - RNA, 19 nt, Homo sapiens
  misc_RNA (1)...(19): siRNA sense strand
gacaggaggcacuggguau

SEQ ID NO: 304170 - RNA, 19 nt, Homo sapiens
  misc_RNA (1)...(19): siRNA sense strand
gccaguacuucuuugaaac

SEQ ID NO: 304171 - RNA, 19 nt, Homo sapiens
  misc_RNA (1)...(19): siRNA sense strand
ggaggcacuggguaucuga

SEQ ID NO: 304172 - RNA, 19 nt, Homo sapiens
  misc_RNA (1)...(19): siRNA sense strand
ggcuggcgauggauucgaa

SEQ ID NO: 304173 - RNA, 19 nt, Homo sapiens
  misc_RNA (1)...(19): siRNA sense strand
gcgauggauucgaauugac

SEQ ID NO: 304174 - RNA, 19 nt, Homo sapiens
  misc_RNA (1)...(19): siRNA sense strand
caagauagcugacuuugga

SEQ ID NO: 304175 - RNA, 19 nt, Homo sapiens
  misc_RNA (1)...(19): siRNA sense strand
gcagauaccuggaugaugu

SEQ ID NO: 304176 - RNA, 19 nt, Homo sapiens
  misc_RNA (1)...(19): siRNA sense strand
gguaagaacuacacaauca

SEQ ID NO: 304177 - RNA, 19 nt, Homo sapiens
  misc_RNA (1)...(19): siRNA sense strand
gaacuacacaaucaagaua

SEQ ID NO: 304178 - RNA, 19 nt, Homo sapiens
  misc_RNA (1)...(19): siRNA sense strand
ggaggaugcuggaugauga

SEQ ID NO: 304179 - RNA, 19 nt, Homo sapiens
  misc_RNA (1)...(19): siRNA sense strand
gaagaaccgucccucauuc

SEQ ID NO: 304180 - RNA, 19 nt, Homo sapiens
  misc_RNA (1)...(19): siRNA sense strand
guccacagcugccaaauau

SEQ ID NO: 304181 - RNA, 19 nt, Homo sapiens
  misc_RNA (1)...(19): siRNA sense strand
gagcagaugccaacaagaa

SEQ ID NO: 304182 - RNA, 19 nt, Homo sapiens
  misc_RNA (1)...(19): siRNA sense strand
gaacgagagugccaccaau

SEQ ID NO: 304183 - RNA, 19 nt, Homo sapiens
  misc_RNA (1)...(19): siRNA sense strand
ccaaucagaugcugcaaug

SEQ ID NO: 304184 - RNA, 19 nt, Homo sapiens
  misc_RNA (1)...(19): siRNA sense strand
acaccaaucugaaguuuau

SEQ ID NO: 304185 - RNA, 19 nt, Homo sapiens
  misc_RNA (1)...(19): siRNA sense strand
caacaagaaugccaggaau

SEQ ID NO: 304186 - RNA, 19 nt, Homo sapiens
  misc_RNA (1)...(19): siRNA sense strand
gaagaucuuuaaggaggua

SEQ ID NO: 304187 - RNA, 19 nt, Homo sapiens
  misc_RNA (1)...(19): siRNA sense strand
guaugagaguggagcuuua

SEQ ID NO: 304188 - RNA, 19 nt, Homo sapiens
  misc_RNA (1)...(19): siRNA sense strand
gagaucauguuugaauuug

SEQ ID NO: 304189 - RNA, 19 nt, Homo sapiens
  misc_RNA (1)...(19): siRNA sense strand
gaugcuggaugaugaaaug

SEQ ID NO: 304190 - RNA, 19 nt, Homo sapiens
  misc_RNA (1)...(19): siRNA sense strand
ugaaguaccuuuccucucu

SEQ ID NO: 304191 - RNA, 19 nt, Homo sapiens
  misc_RNA (1)...(19): siRNA sense strand
guuuauggcuacccaaauu

SEQ ID NO: 304192 - RNA, 19 nt, Homo sapiens
  misc_RNA (1)...(19): siRNA sense strand
ccauguacaagaucaauua

SEQ ID NO: 304193 - RNA, 19 nt, Homo sapiens
  misc_RNA (1)...(19): siRNA sense strand
gaauggagaucucaaucag

SEQ ID NO: 304194 - RNA, 19 nt, Homo sapiens
  misc_RNA (1)...(19): siRNA sense strand
uaugaucacugaauacaug

SEQ ID NO: 304195 - RNA, 19 nt, Homo sapiens
  misc_RNA (1)...(19): siRNA sense strand
caacauguuugcuaaaggu

SEQ ID NO: 304196 - RNA, 19 nt, Homo sapiens
  misc_RNA (1)...(19): siRNA sense strand
gacuuacgaucgcaucuuu

SEQ ID NO: 304197 - RNA, 19 nt, Homo sapiens
  misc_RNA (1)...(19): siRNA sense strand
gaggccagauuccagauga

SEQ ID NO: 304198 - RNA, 19 nt, Homo sapiens
  misc_RNA (1)...(19): siRNA sense strand
guacaguggugacuauuac

SEQ ID NO: 304199 - RNA, 19 nt, Homo sapiens
  misc_RNA (1)...(19): siRNA sense strand
caucauccaucuauuaucu

SEQ ID NO: 304200 - RNA, 19 nt, Homo sapiens
  misc_RNA (1)...(19): siRNA sense strand
cauccaggcugauacgaaa

SEQ ID NO: 304201 - RNA, 19 nt, Homo sapiens
  misc_RNA (1)...(19): siRNA sense strand
uagauggcuuggugucuua

SEQ ID NO: 304202 - RNA, 19 nt, Homo sapiens
  misc_RNA (1)...(19): siRNA sense strand
gaaggaguuucugcagauu

SEQ ID NO: 304203 - RNA, 19 nt, Homo sapiens
  misc_RNA (1)...(19): siRNA sense strand
ccaaacaucauccaucuau

SEQ ID NO: 304204 - RNA, 19 nt, Homo sapiens
  misc_RNA (1)...(19): siRNA sense strand
gauccaaugcuuaaaguug

SEQ ID NO: 304205 - RNA, 19 nt, Homo sapiens
  misc_RNA (1)...(19): siRNA sense strand
uuaaggagguacagugcua

SEQ ID NO: 304206 - RNA, 19 nt, Homo sapiens
  misc_RNA (1)...(19): siRNA sense strand
gagguuccaucauuuaucu

SEQ ID NO: 304207 - RNA, 19 nt, Homo sapiens
  misc_RNA (1)...(19): siRNA sense strand
cgaagaaccgucccucauu

SEQ ID NO: 304208 - RNA, 19 nt, Homo sapiens
  misc_RNA (1)...(19): siRNA sense strand
ggagaagagauacgaagaa

SEQ ID NO: 304209 - RNA, 19 nt, Homo sapiens
  misc_RNA (1)...(19): siRNA sense strand
gaucaugucucggcucaag

SEQ ID NO: 304210 - RNA, 19 nt, Homo sapiens
  misc_RNA (1)...(19): siRNA sense strand
cagaagggcuaggccaauu

SEQ ID NO: 304211 - RNA, 19 nt, Homo sapiens
  misc_RNA (1)...(19): siRNA sense strand
ugaaggaguuucugcagau

SEQ ID NO: 304212 - RNA, 19 nt, Homo sapiens
  misc_RNA (1)...(19): siRNA sense strand
cagaugaacagguuauuga

SEQ ID NO: 304213 - RNA, 19 nt, Homo sapiens
  misc_RNA (1)...(19): siRNA sense strand
gugggagacuuucaccuuu

SEQ ID NO: 304214 - RNA, 19 nt, Homo sapiens
  misc_RNA (1)...(19): siRNA sense strand
ggaaugauuuucuuaagga

SEQ ID NO: 304215 - RNA, 19 nt, Homo sapiens
  misc_RNA (1)...(19): siRNA sense strand
ugucuggccuggacgauuu

SEQ ID NO: 304216 - RNA, 19 nt, Homo sapiens
  misc_RNA (1)...(19): siRNA sense strand
ugauggagcuguuggauac

SEQ ID NO: 304217 - RNA, 19 nt, Homo sapiens
  misc_RNA (1)...(19): siRNA sense strand
ugagaauacuggagaguuc

SEQ ID NO: 304218 - RNA, 19 nt, Homo sapiens
  misc_RNA (1)...(19): siRNA sense strand
gaaguaccuuuccucucuu

SEQ ID NO: 304219 - RNA, 19 nt, Homo sapiens
  misc_RNA (1)...(19): siRNA sense strand
gacccucucuguaugauca

SEQ ID NO: 304220 - RNA, 19 nt, Homo sapiens
  misc_RNA (1)...(19): siRNA sense strand
cuaaaggugugaagaucuu

SEQ ID NO: 304221 - RNA, 19 nt, Homo sapiens
  misc_RNA (1)...(19): siRNA sense strand
gugugaagaucuuuaagga

SEQ ID NO: 304222 - RNA, 19 nt, Homo sapiens
  misc_RNA (1)...(19): siRNA sense strand
gagaagagauacgaagaac

SEQ ID NO: 304223 - RNA, 19 nt, Homo sapiens
  misc_RNA (1)...(19): siRNA sense strand
caaguucacuacagcaagu

SEQ ID NO: 304224 - RNA, 19 nt, Homo sapiens
  misc_RNA (1)...(19): siRNA sense strand
caaacaucauccaucuauu

SEQ ID NO: 304225 - RNA, 19 nt, Homo sapiens
  misc_RNA (1)...(19): siRNA sense strand
ugagaucaccuuccaauca

SEQ ID NO: 304226 - RNA, 19 nt, Homo sapiens
  misc_RNA (1)...(19): siRNA sense strand
uaccuuuccucucuuaauu

SEQ ID NO: 304227 - RNA, 19 nt, Homo sapiens
  misc_RNA (1)...(19): siRNA sense strand
cugaugaccugaaggaguu

SEQ ID NO: 304228 - RNA, 19 nt, Homo sapiens
  misc_RNA (1)...(19): siRNA sense strand
aaucagaugcugcaaugua

SEQ ID NO: 304229 - RNA, 19 nt, Homo sapiens
  misc_RNA (1)...(19): siRNA sense strand
gagaucaccuuccaaucag

SEQ ID NO: 304230 - RNA, 19 nt, Homo sapiens
  misc_RNA (1)...(19): siRNA sense strand
ccaugaagguccacugcaa

SEQ ID NO: 304231 - RNA, 19 nt, Homo sapiens
  misc_RNA (1)...(19): siRNA sense strand
gaagggcuaggccaauuga

SEQ ID NO: 304232 - RNA, 19 nt, Homo sapiens
  misc_RNA (1)...(19): siRNA sense strand
gcggaaccgucaugggaaa

SEQ ID NO: 304233 - RNA, 19 nt, Homo sapiens
  misc_RNA (1)...(19): siRNA sense strand
ccaagugauucuagcaugu

SEQ ID NO: 304234 - RNA, 19 nt, Homo sapiens
  misc_RNA (1)...(19): siRNA sense strand
ugacaggaggcaacacaua

SEQ ID NO: 304235 - RNA, 19 nt, Homo sapiens
  misc_RNA (1)...(19): siRNA sense strand
ucacccagacccaugaaua

SEQ ID NO: 304236 - RNA, 19 nt, Homo sapiens
  misc_RNA (1)...(19): siRNA sense strand
ucuguaugaucacugaaua

SEQ ID NO: 304237 - RNA, 19 nt, Homo sapiens
  misc_RNA (1)...(19): siRNA sense strand
gcugggagaaggacaguuu

SEQ ID NO: 304238 - RNA, 19 nt, Homo sapiens
  misc_RNA (1)...(19): siRNA sense strand
gaucauguuugaauuugac

SEQ ID NO: 304239 - RNA, 19 nt, Homo sapiens
  misc_RNA (1)...(19): siRNA sense strand
gaucucaaucaguuucuuu

SEQ ID NO: 304240 - RNA, 19 nt, Homo sapiens
  misc_RNA (1)...(19): siRNA sense strand
cugaauacauggagaaugg

SEQ ID NO: 304241 - RNA, 19 nt, Homo sapiens
  misc_RNA (1)...(19): siRNA sense strand
gaaguggagggaauggaaa

SEQ ID NO: 304242 - RNA, 19 nt, Homo sapiens
  misc_RNA (1)...(19): siRNA sense strand
uggaugauguucagugaga

SEQ ID NO: 304243 - RNA, 19 nt, Homo sapiens
  misc_RNA (1)...(19): siRNA sense strand
ucagguuaauccagcuaua

SEQ ID NO: 304244 - RNA, 19 nt, Homo sapiens
  misc_RNA (1)...(19): siRNA sense strand
ccagugccaucaaguguca

SEQ ID NO: 304245 - RNA, 19 nt, Homo sapiens
  misc_RNA (1)...(19): siRNA sense strand
caaucaagauagcugacuu

SEQ ID NO: 304246 - RNA, 19 nt, Homo sapiens
  misc_RNA (1)...(19): siRNA sense strand
uuacaccaaucugaaguuu

SEQ ID NO: 304247 - RNA, 19 nt, Homo sapiens
  misc_RNA (1)...(19): siRNA sense strand
gcagaugccaacaagaaug

SEQ ID NO: 304248 - RNA, 19 nt, Homo sapiens
  misc_RNA (1)...(19): siRNA sense strand
ucaagugucaauaccauuu

SEQ ID NO: 304249 - RNA, 19 nt, Homo sapiens
  misc_RNA (1)...(19): siRNA sense strand
ggauacagcaugacagaag

SEQ ID NO: 304250 - RNA, 19 nt, Homo sapiens
  misc_RNA (1)...(19): siRNA sense strand
ccuaugauccaaugcuuaa

SEQ ID NO: 304251 - RNA, 19 nt, Homo sapiens
  misc_RNA (1)...(19): siRNA sense strand
caucaagugucaauaccau

SEQ ID NO: 304252 - RNA, 19 nt, Homo sapiens
  misc_RNA (1)...(19): siRNA sense strand
ggagguacagugcuacuuc

SEQ ID NO: 304253 - RNA, 19 nt, Homo sapiens
  misc_RNA (1)...(19): siRNA sense strand
caauguacaacaacucuga

SEQ ID NO: 304254 - RNA, 19 nt, Homo sapiens
  misc_RNA (1)...(19): siRNA sense strand
ggaacgagagugccaccaa

SEQ ID NO: 304255 - RNA, 19 nt, Homo sapiens
  misc_RNA (1)...(19): siRNA sense strand
augaacagguuauugagaa

SEQ ID NO: 304256 - RNA, 19 nt, Homo sapiens
  misc_RNA (1)...(19): siRNA sense strand
gaugaacagguuauugaga

SEQ ID NO: 304257 - RNA, 19 nt, Homo sapiens
  misc_RNA (1)...(19): siRNA sense strand
auggagaucucaaucaguu

SEQ ID NO: 304258 - RNA, 19 nt, Homo sapiens
  misc_RNA (1)...(19): siRNA sense strand
gcucaaggacccaaacauc

SEQ ID NO: 304259 - RNA, 19 nt, Homo sapiens
  misc_RNA (1)...(19): siRNA sense strand
ggagaucucaaucaguuuc

SEQ ID NO: 304260 - RNA, 19 nt, Homo sapiens
  misc_RNA (1)...(19): siRNA sense strand
gaaccgucccucauuccaa

SEQ ID NO: 304261 - RNA, 19 nt, Homo sapiens
  misc_RNA (1)...(19): siRNA sense strand
ccacagcugccaaauaugg

SEQ ID NO: 304262 - RNA, 19 nt, Homo sapiens
  misc_RNA (1)...(19): siRNA sense strand
gucaagaacagcccuauuc

SEQ ID NO: 304263 - RNA, 19 nt, Homo sapiens
  misc_RNA (1)...(19): siRNA sense strand
gccuuucccugccaaguga

SEQ ID NO: 304264 - RNA, 19 nt, Homo sapiens
  misc_RNA (1)...(19): siRNA sense strand
ggagauaaagaucaugucu

SEQ ID NO: 304265 - RNA, 19 nt, Homo sapiens
  misc_RNA (1)...(19): siRNA sense strand
ccaacaagaaugccaggaa

SEQ ID NO: 304266 - RNA, 19 nt, Homo sapiens
  misc_RNA (1)...(19): siRNA sense strand
ugcagaggcugacauagug

SEQ ID NO: 304267 - RNA, 19 nt, Homo sapiens
  misc_RNA (1)...(19): siRNA sense strand
cuagauggcuuggugucuu

SEQ ID NO: 304268 - RNA, 19 nt, Homo sapiens
  misc_RNA (1)...(19): siRNA sense strand
guccugacucuguguauaa

SEQ ID NO: 304269 - RNA, 19 nt, Homo sapiens
  misc_RNA (1)...(19): siRNA sense strand
gaugacccucucuguauga

SEQ ID NO: 304270 - RNA, 19 nt, Homo sapiens
  misc_RNA (1)...(19): siRNA sense strand
acaagaaugccaggaauga

SEQ ID NO: 304271 - RNA, 19 nt, Homo sapiens
  misc_RNA (1)...(19): siRNA sense strand
gcuggaugaugaaaugaca

SEQ ID NO: 304272 - RNA, 19 nt, Homo sapiens
  misc_RNA (1)...(19): siRNA sense strand
cacaaccuaugauccaaug

SEQ ID NO: 304273 - RNA, 19 nt, Homo sapiens
  misc_RNA (1)...(19): siRNA sense strand
aagaaugccaggaaugauu

SEQ ID NO: 304274 - RNA, 19 nt, Homo sapiens
  misc_RNA (1)...(19): siRNA sense strand
ccacgugacuuucaacaau

SEQ ID NO: 304275 - RNA, 19 nt, Homo sapiens
  misc_RNA (1)...(19): siRNA sense strand
ggagaugacacccagcaua

SEQ ID NO: 304276 - RNA, 19 nt, Homo sapiens
  misc_RNA (1)...(19): siRNA sense strand
ggacaagcgucgccggaau

SEQ ID NO: 304277 - RNA, 19 nt, Homo sapiens
  misc_RNA (1)...(19): siRNA sense strand
ccaccuugcuuguaccaaa

SEQ ID NO: 304278 - RNA, 19 nt, Homo sapiens
  misc_RNA (1)...(19): siRNA sense strand
gaauaugaacaucgacauu

SEQ ID NO: 304279 - RNA, 19 nt, Homo sapiens
  misc_RNA (1)...(19): siRNA sense strand
gagaugacacccagcauau

SEQ ID NO: 304280 - RNA, 19 nt, Homo sapiens
  misc_RNA (1)...(19): siRNA sense strand
guaccuuuauggacaacua

SEQ ID NO: 304281 - RNA, 19 nt, Homo sapiens
  misc_RNA (1)...(19): siRNA sense strand
acauucagaugcacaacua

SEQ ID NO: 304282 - RNA, 19 nt, Homo sapiens
  misc_RNA (1)...(19): siRNA sense strand
uagaagacauucagaugca

SEQ ID NO: 304283 - RNA, 19 nt, Homo sapiens
  misc_RNA (1)...(19): siRNA sense strand
gcaguccuccauuaaggua

SEQ ID NO: 304284 - RNA, 19 nt, Homo sapiens
  misc_RNA (1)...(19): siRNA sense strand
gaacccugacuaucaaaug

SEQ ID NO: 304285 - RNA, 19 nt, Homo sapiens
  misc_RNA (1)...(19): siRNA sense strand
gguagaagacauucagaug

SEQ ID NO: 304286 - RNA, 19 nt, Homo sapiens
  misc_RNA (1)...(19): siRNA sense strand
gacagcaguccuccauuaa

SEQ ID NO: 304287 - RNA, 19 nt, Homo sapiens
  misc_RNA (1)...(19): siRNA sense strand
cgggaucucuccacaacuu

SEQ ID NO: 304288 - RNA, 19 nt, Homo sapiens
  misc_RNA (1)...(19): siRNA sense strand
ggcgaacccugacuaucaa

SEQ ID NO: 304289 - RNA, 19 nt, Homo sapiens
  misc_RNA (1)...(19): siRNA sense strand
gcauauccagcaauucuau

SEQ ID NO: 304290 - RNA, 19 nt, Homo sapiens
  misc_RNA (1)...(19): siRNA sense strand
ucaaggaacccaagagagu

SEQ ID NO: 304291 - RNA, 19 nt, Homo sapiens
  misc_RNA (1)...(19): siRNA sense strand
cagcaguccuccauuaagg

SEQ ID NO: 304292 - RNA, 19 nt, Homo sapiens
  misc_RNA (1)...(19): siRNA sense strand
ggacacuuuaccuuucuaa

SEQ ID NO: 304293 - RNA, 19 nt, Homo sapiens
  misc_RNA (1)...(19): siRNA sense strand
caagagaguggaagaacug

SEQ ID NO: 304294 - RNA, 19 nt, Homo sapiens
  misc_RNA (1)...(19): siRNA sense strand
gcucaaggaacccaagaga

SEQ ID NO: 304295 - RNA, 19 nt, Homo sapiens
  misc_RNA (1)...(19): siRNA sense strand
auacguguguuuagcaaau

SEQ ID NO: 304296 - RNA, 19 nt, Homo sapiens
  misc_RNA (1)...(19): siRNA sense strand
ccaagagaguggaagaacu

SEQ ID NO: 304297 - RNA, 19 nt, Homo sapiens
  misc_RNA (1)...(19): siRNA sense strand
ugucaguacugccgauuuc

SEQ ID NO: 304298 - RNA, 19 nt, Homo sapiens
  misc_RNA (1)...(19): siRNA sense strand
cggaaucgcugucaguacu

SEQ ID NO: 304299 - RNA, 19 nt, Homo sapiens
  misc_RNA (1)...(19): siRNA sense strand
ccgggucgguuuacuacaa

SEQ ID NO: 304300 - RNA, 19 nt, Homo sapiens
  misc_RNA (1)...(19): siRNA sense strand
gaacuucguacccuuugca

SEQ ID NO: 304301 - RNA, 19 nt, Homo sapiens
  misc_RNA (1)...(19): siRNA sense strand
uggaagaacugcaaaacaa

SEQ ID NO: 304302 - RNA, 19 nt, Homo sapiens
  misc_RNA (1)...(19): siRNA sense strand
gagaguggaagaacugcaa

SEQ ID NO: 304303 - RNA, 19 nt, Homo sapiens
  misc_RNA (1)...(19): siRNA sense strand
gcccaaagccgaccaagac

SEQ ID NO: 304304 - RNA, 19 nt, Homo sapiens
  misc_RNA (1)...(19): siRNA sense strand
cagcauauccagcaauucu

SEQ ID NO: 304305 - RNA, 19 nt, Homo sapiens
  misc_RNA (1)...(19): siRNA sense strand
ucaaaugaguggagaugac

SEQ ID NO: 304306 - RNA, 19 nt, Homo sapiens
  misc_RNA (1)...(19): siRNA sense strand
ccauuaagguagaagacau

SEQ ID NO: 304307 - RNA, 19 nt, Homo sapiens
  misc_RNA (1)...(19): siRNA sense strand
ccagaacuucguacccuuu

SEQ ID NO: 304308 - RNA, 19 nt, Homo sapiens
  misc_RNA (1)...(19): siRNA sense strand
aaauacguguguuuagcaa

SEQ ID NO: 304309 - RNA, 19 nt, Homo sapiens
  misc_RNA (1)...(19): siRNA sense strand
ccuggacacuuuaccuuuc

SEQ ID NO: 304310 - RNA, 19 nt, Homo sapiens
  misc_RNA (1)...(19): siRNA sense strand
cccagcauauccagcaauu

SEQ ID NO: 304311 - RNA, 19 nt, Homo sapiens
  misc_RNA (1)...(19): siRNA sense strand
aacccugacuaucaaauga

SEQ ID NO: 304312 - RNA, 19 nt, Homo sapiens
  misc_RNA (1)...(19): siRNA sense strand
ccacuacgcacaugaucga

SEQ ID NO: 304313 - RNA, 19 nt, Homo sapiens
  misc_RNA (1)...(19): siRNA sense strand
cacgugacuuucaacaaug

SEQ ID NO: 304314 - RNA, 19 nt, Homo sapiens
  misc_RNA (1)...(19): siRNA sense strand
auaugaacaucgacauuuc

SEQ ID NO: 304315 - RNA, 19 nt, Homo sapiens
  misc_RNA (1)...(19): siRNA sense strand
gaagugguucgcacagaca

SEQ ID NO: 304316 - RNA, 19 nt, Homo sapiens
  misc_RNA (1)...(19): siRNA sense strand
ucaguaccuuuauggacaa

SEQ ID NO: 304317 - RNA, 19 nt, Homo sapiens
  misc_RNA (1)...(19): siRNA sense strand
agaacuacguggccacuac

SEQ ID NO: 304318 - RNA, 19 nt, Homo sapiens
  misc_RNA (1)...(19): siRNA sense strand
cagaagugccuggcuguug

SEQ ID NO: 304319 - RNA, 19 nt, Homo sapiens
  misc_RNA (1)...(19): siRNA sense strand
aggcgaacccugacuauca

SEQ ID NO: 304320 - RNA, 19 nt, Homo sapiens
  misc_RNA (1)...(19): siRNA sense strand
gauggucaaagaagugguu

SEQ ID NO: 304321 - RNA, 19 nt, Homo sapiens
  misc_RNA (1)...(19): siRNA sense strand
gagacacgggcucaaggaa

SEQ ID NO: 304322 - RNA, 19 nt, Homo sapiens
  misc_RNA (1)...(19): siRNA sense strand
caaaugaguggagaugaca

SEQ ID NO: 304323 - RNA, 19 nt, Homo sapiens
  misc_RNA (1)...(19): siRNA sense strand
gggcccaugucgacuccaa

SEQ ID NO: 304324 - RNA, 19 nt, Homo sapiens
  misc_RNA (1)...(19): siRNA sense strand
ccucuucuccuuuaagcaa

SEQ ID NO: 304325 - RNA, 19 nt, Homo sapiens
  misc_RNA (1)...(19): siRNA sense strand
gaagaacugcaaaacaaga

SEQ ID NO: 304326 - RNA, 19 nt, Homo sapiens
  misc_RNA (1)...(19): siRNA sense strand
uacguguguuuagcaaaua

SEQ ID NO: 304327 - RNA, 19 nt, Homo sapiens
  misc_RNA (1)...(19): siRNA sense strand
caccuugcuuguaccaaau

SEQ ID NO: 304328 - RNA, 19 nt, Homo sapiens
  misc_RNA (1)...(19): siRNA sense strand
cuguugggauggucaaaga

SEQ ID NO: 304329 - RNA, 19 nt, Homo sapiens
  misc_RNA (1)...(19): siRNA sense strand
gcauugcugcccuggcuau

SEQ ID NO: 304330 - RNA, 19 nt, Homo sapiens
  misc_RNA (1)...(19): siRNA sense strand
gcacagacaguuuaaaagg

SEQ ID NO: 304331 - RNA, 19 nt, Homo sapiens
  misc_RNA (1)...(19): siRNA sense strand
gguucgcacagacaguuua

SEQ ID NO: 304332 - RNA, 19 nt, Homo sapiens
  misc_RNA (1)...(19): siRNA sense strand
aagaagugguucgcacaga

SEQ ID NO: 304333 - RNA, 19 nt, Homo sapiens
  misc_RNA (1)...(19): siRNA sense strand
gacaagcgucgccggaauc

SEQ ID NO: 304334 - RNA, 19 nt, Homo sapiens
  misc_RNA (1)...(19): siRNA sense strand
gaacugcaaaacaagauug

SEQ ID NO: 304335 - RNA, 19 nt, Homo sapiens
  misc_RNA (1)...(19): siRNA sense strand
gaacuguuuguccuucgau

SEQ ID NO: 304336 - RNA, 19 nt, Homo sapiens
  misc_RNA (1)...(19): siRNA sense strand
gcaaaauacguguguuuag

SEQ ID NO: 304337 - RNA, 19 nt, Homo sapiens
  misc_RNA (1)...(19): siRNA sense strand
cauuaagguagaagacauu

SEQ ID NO: 304338 - RNA, 19 nt, Homo sapiens
  misc_RNA (1)...(19): siRNA sense strand
gcacaggcuacgacgucaa

SEQ ID NO: 304339 - RNA, 19 nt, Homo sapiens
  misc_RNA (1)...(19): siRNA sense strand
guacugccgauuucagaag

SEQ ID NO: 304340 - RNA, 19 nt, Homo sapiens
  misc_RNA (1)...(19): siRNA sense strand
uaagguagaagacauucag

SEQ ID NO: 304341 - RNA, 19 nt, Homo sapiens
  misc_RNA (1)...(19): siRNA sense strand
ccugaaauuggaagacuug

SEQ ID NO: 304342 - RNA, 19 nt, Homo sapiens
  misc_RNA (1)...(19): siRNA sense strand
guucgcacagacaguuuaa

SEQ ID NO: 304343 - RNA, 19 nt, Homo sapiens
  misc_RNA (1)...(19): siRNA sense strand
guccuucgauuagcauaca

SEQ ID NO: 304344 - RNA, 19 nt, Homo sapiens
  misc_RNA (1)...(19): siRNA sense strand
gaugacacccagcauaucc

SEQ ID NO: 304345 - RNA, 19 nt, Homo sapiens
  misc_RNA (1)...(19): siRNA sense strand
uaucaaaugaguggagaug

SEQ ID NO: 304346 - RNA, 19 nt, Homo sapiens
  misc_RNA (1)...(19): siRNA sense strand
caacuuccaccagaacuac

SEQ ID NO: 304347 - RNA, 19 nt, Homo sapiens
  misc_RNA (1)...(19): siRNA sense strand
ggugucuaguugccagaug

SEQ ID NO: 304348 - RNA, 19 nt, Homo sapiens
  misc_RNA (1)...(19): siRNA sense strand
ucucaaagaccacgugacu

SEQ ID NO: 304349 - RNA, 19 nt, Homo sapiens
  misc_RNA (1)...(19): siRNA sense strand
gccggaaucgcugucagua

SEQ ID NO: 304350 - RNA, 19 nt, Homo sapiens
  misc_RNA (1)...(19): siRNA sense strand
caaaauacguguguuuagc

SEQ ID NO: 304351 - RNA, 19 nt, Homo sapiens
  misc_RNA (1)...(19): siRNA sense strand
ccacgugacuuucaacaau

SEQ ID NO: 304352 - RNA, 19 nt, Homo sapiens
  misc_RNA (1)...(19): siRNA sense strand
ggagaugacacccagcaua

SEQ ID NO: 304353 - RNA, 19 nt, Homo sapiens
  misc_RNA (1)...(19): siRNA sense strand
ggacaagcgucgccggaau

SEQ ID NO: 304354 - RNA, 19 nt, Homo sapiens
  misc_RNA (1)...(19): siRNA sense strand
ccaccuugcuuguaccaaa

SEQ ID NO: 304355 - RNA, 19 nt, Homo sapiens
  misc_RNA (1)...(19): siRNA sense strand
gaauaugaacaucgacauu

SEQ ID NO: 304356 - RNA, 19 nt, Homo sapiens
  misc_RNA (1)...(19): siRNA sense strand
gagaugacacccagcauau

SEQ ID NO: 304357 - RNA, 19 nt, Homo sapiens
  misc_RNA (1)...(19): siRNA sense strand
guaccuuuauggacaacua

SEQ ID NO: 304358 - RNA, 19 nt, Homo sapiens
  misc_RNA (1)...(19): siRNA sense strand
acauucagaugcacaacua

SEQ ID NO: 304359 - RNA, 19 nt, Homo sapiens
  misc_RNA (1)...(19): siRNA sense strand
uagaagacauucagaugca

SEQ ID NO: 304360 - RNA, 19 nt, Homo sapiens
  misc_RNA (1)...(19): siRNA sense strand
gcaguccuccauuaaggua

SEQ ID NO: 304361 - RNA, 19 nt, Homo sapiens
  misc_RNA (1)...(19): siRNA sense strand
gaacccugacuaucaaaug

SEQ ID NO: 304362 - RNA, 19 nt, Homo sapiens
  misc_RNA (1)...(19): siRNA sense strand
gguagaagacauucagaug

SEQ ID NO: 304363 - RNA, 19 nt, Homo sapiens
  misc_RNA (1)...(19): siRNA sense strand
gacagcaguccuccauuaa

SEQ ID NO: 304364 - RNA, 19 nt, Homo sapiens
  misc_RNA (1)...(19): siRNA sense strand
cgggaucucuccacaacuu

SEQ ID NO: 304365 - RNA, 19 nt, Homo sapiens
  misc_RNA (1)...(19): siRNA sense strand
ggcgaacccugacuaucaa

SEQ ID NO: 304366 - RNA, 19 nt, Homo sapiens
  misc_RNA (1)...(19): siRNA sense strand
gcauauccagcaauucuau

SEQ ID NO: 304367 - RNA, 19 nt, Homo sapiens
  misc_RNA (1)...(19): siRNA sense strand
ucaaggaacccaagagagu

SEQ ID NO: 304368 - RNA, 19 nt, Homo sapiens
  misc_RNA (1)...(19): siRNA sense strand
cagcaguccuccauuaagg

SEQ ID NO: 304369 - RNA, 19 nt, Homo sapiens
  misc_RNA (1)...(19): siRNA sense strand
ggacacuuuaccuuucuaa

SEQ ID NO: 304370 - RNA, 19 nt, Homo sapiens
  misc_RNA (1)...(19): siRNA sense strand
caagagaguggaagaacug

SEQ ID NO: 304371 - RNA, 19 nt, Homo sapiens
  misc_RNA (1)...(19): siRNA sense strand
gcucaaggaacccaagaga

SEQ ID NO: 304372 - RNA, 19 nt, Homo sapiens
  misc_RNA (1)...(19): siRNA sense strand
auacguguguuuagcaaau

SEQ ID NO: 304373 - RNA, 19 nt, Homo sapiens
  misc_RNA (1)...(19): siRNA sense strand
ccaagagaguggaagaacu

SEQ ID NO: 304374 - RNA, 19 nt, Homo sapiens
  misc_RNA (1)...(19): siRNA sense strand
ugucaguacugccgauuuc

SEQ ID NO: 304375 - RNA, 19 nt, Homo sapiens
  misc_RNA (1)...(19): siRNA sense strand
cggaaucgcugucaguacu

SEQ ID NO: 304376 - RNA, 19 nt, Homo sapiens
  misc_RNA (1)...(19): siRNA sense strand
ccgggucgguuuacuacaa

SEQ ID NO: 304377 - RNA, 19 nt, Homo sapiens
  misc_RNA (1)...(19): siRNA sense strand
gaacuucguacccuuugca

SEQ ID NO: 304378 - RNA, 19 nt, Homo sapiens
  misc_RNA (1)...(19): siRNA sense strand
uggaagaacugcaaaacaa

SEQ ID NO: 304379 - RNA, 19 nt, Homo sapiens
  misc_RNA (1)...(19): siRNA sense strand
gagaguggaagaacugcaa

SEQ ID NO: 304380 - RNA, 19 nt, Homo sapiens
  misc_RNA (1)...(19): siRNA sense strand
gcccaaagccgaccaagac

SEQ ID NO: 304381 - RNA, 19 nt, Homo sapiens
  misc_RNA (1)...(19): siRNA sense strand
cagcauauccagcaauucu

SEQ ID NO: 304382 - RNA, 19 nt, Homo sapiens
  misc_RNA (1)...(19): siRNA sense strand
ucaaaugaguggagaugac

SEQ ID NO: 304383 - RNA, 19 nt, Homo sapiens
  misc_RNA (1)...(19): siRNA sense strand
ccauuaagguagaagacau

SEQ ID NO: 304384 - RNA, 19 nt, Homo sapiens
  misc_RNA (1)...(19): siRNA sense strand
ccagaacuucguacccuuu

SEQ ID NO: 304385 - RNA, 19 nt, Homo sapiens
  misc_RNA (1)...(19): siRNA sense strand
aaauacguguguuuagcaa

SEQ ID NO: 304386 - RNA, 19 nt, Homo sapiens
  misc_RNA (1)...(19): siRNA sense strand
ccuggacacuuuaccuuuc

SEQ ID NO: 304387 - RNA, 19 nt, Homo sapiens
  misc_RNA (1)...(19): siRNA sense strand
cccagcauauccagcaauu

SEQ ID NO: 304388 - RNA, 19 nt, Homo sapiens
  misc_RNA (1)...(19): siRNA sense strand
aacccugacuaucaaauga

SEQ ID NO: 304389 - RNA, 19 nt, Homo sapiens
  misc_RNA (1)...(19): siRNA sense strand
ccacuacgcacaugaucga

SEQ ID NO: 304390 - RNA, 19 nt, Homo sapiens
  misc_RNA (1)...(19): siRNA sense strand
cacgugacuuucaacaaug

SEQ ID NO: 304391 - RNA, 19 nt, Homo sapiens
  misc_RNA (1)...(19): siRNA sense strand
auaugaacaucgacauuuc

SEQ ID NO: 304392 - RNA, 19 nt, Homo sapiens
  misc_RNA (1)...(19): siRNA sense strand
gaagugguucgcacagaca

SEQ ID NO: 304393 - RNA, 19 nt, Homo sapiens
  misc_RNA (1)...(19): siRNA sense strand
ucaguaccuuuauggacaa

SEQ ID NO: 304394 - RNA, 19 nt, Homo sapiens
  misc_RNA (1)...(19): siRNA sense strand
agaacuacguggccacuac

SEQ ID NO: 304395 - RNA, 19 nt, Homo sapiens
  misc_RNA (1)...(19): siRNA sense strand
cagaagugccuggcuguug

SEQ ID NO: 304396 - RNA, 19 nt, Homo sapiens
  misc_RNA (1)...(19): siRNA sense strand
aggcgaacccugacuauca

SEQ ID NO: 304397 - RNA, 19 nt, Homo sapiens
  misc_RNA (1)...(19): siRNA sense strand
gauggucaaagaagugguu

SEQ ID NO: 304398 - RNA, 19 nt, Homo sapiens
  misc_RNA (1)...(19): siRNA sense strand
gagacacgggcucaaggaa

SEQ ID NO: 304399 - RNA, 19 nt, Homo sapiens
  misc_RNA (1)...(19): siRNA sense strand
caaaugaguggagaugaca

SEQ ID NO: 304400 - RNA, 19 nt, Homo sapiens
  misc_RNA (1)...(19): siRNA sense strand
gggcccaugucgacuccaa

SEQ ID NO: 304401 - RNA, 19 nt, Homo sapiens
  misc_RNA (1)...(19): siRNA sense strand
ccucuucuccuuuaagcaa

SEQ ID NO: 304402 - RNA, 19 nt, Homo sapiens
  misc_RNA (1)...(19): siRNA sense strand
gaagaacugcaaaacaaga

SEQ ID NO: 304403 - RNA, 19 nt, Homo sapiens
  misc_RNA (1)...(19): siRNA sense strand
uacguguguuuagcaaaua

SEQ ID NO: 304404 - RNA, 19 nt, Homo sapiens
  misc_RNA (1)...(19): siRNA sense strand
caccuugcuuguaccaaau

SEQ ID NO: 304405 - RNA, 19 nt, Homo sapiens
  misc_RNA (1)...(19): siRNA sense strand
cuguugggauggucaaaga

SEQ ID NO: 304406 - RNA, 19 nt, Homo sapiens
  misc_RNA (1)...(19): siRNA sense strand
gcauugcugcccuggcuau

SEQ ID NO: 304407 - RNA, 19 nt, Homo sapiens
  misc_RNA (1)...(19): siRNA sense strand
gcacagacaguuuaaaagg

SEQ ID NO: 304408 - RNA, 19 nt, Homo sapiens
  misc_RNA (1)...(19): siRNA sense strand
gguucgcacagacaguuua

SEQ ID NO: 304409 - RNA, 19 nt, Homo sapiens
  misc_RNA (1)...(19): siRNA sense strand
aagaagugguucgcacaga

SEQ ID NO: 304410 - RNA, 19 nt, Homo sapiens
  misc_RNA (1)...(19): siRNA sense strand
gacaagcgucgccggaauc

SEQ ID NO: 304411 - RNA, 19 nt, Homo sapiens
  misc_RNA (1)...(19): siRNA sense strand
gaacugcaaaacaagauug

SEQ ID NO: 304412 - RNA, 19 nt, Homo sapiens
  misc_RNA (1)...(19): siRNA sense strand
gaacuguuuguccuucgau

SEQ ID NO: 304413 - RNA, 19 nt, Homo sapiens
  misc_RNA (1)...(19): siRNA sense strand
gcaaaauacguguguuuag

SEQ ID NO: 304414 - RNA, 19 nt, Homo sapiens
  misc_RNA (1)...(19): siRNA sense strand
cauuaagguagaagacauu

SEQ ID NO: 304415 - RNA, 19 nt, Homo sapiens
  misc_RNA (1)...(19): siRNA sense strand
gcacaggcuacgacgucaa

SEQ ID NO: 304416 - RNA, 19 nt, Homo sapiens
  misc_RNA (1)...(19): siRNA sense strand
guacugccgauuucagaag

SEQ ID NO: 304417 - RNA, 19 nt, Homo sapiens
  misc_RNA (1)...(19): siRNA sense strand
uaagguagaagacauucag

SEQ ID NO: 304418 - RNA, 19 nt, Homo sapiens
  misc_RNA (1)...(19): siRNA sense strand
ccugaaauuggaagacuug

SEQ ID NO: 304419 - RNA, 19 nt, Homo sapiens
  misc_RNA (1)...(19): siRNA sense strand
guucgcacagacaguuuaa

SEQ ID NO: 304420 - RNA, 19 nt, Homo sapiens
  misc_RNA (1)...(19): siRNA sense strand
guccuucgauuagcauaca

SEQ ID NO: 304421 - RNA, 19 nt, Homo sapiens
  misc_RNA (1)...(19): siRNA sense strand
gaugacacccagcauaucc

SEQ ID NO: 304422 - RNA, 19 nt, Homo sapiens
  misc_RNA (1)...(19): siRNA sense strand
uaucaaaugaguggagaug

SEQ ID NO: 304423 - RNA, 19 nt, Homo sapiens
  misc_RNA (1)...(19): siRNA sense strand
caacuuccaccagaacuac

SEQ ID NO: 304424 - RNA, 19 nt, Homo sapiens
  misc_RNA (1)...(19): siRNA sense strand
ggugucuaguugccagaug

SEQ ID NO: 304425 - RNA, 19 nt, Homo sapiens
  misc_RNA (1)...(19): siRNA sense strand
ucucaaagaccacgugacu

SEQ ID NO: 304426 - RNA, 19 nt, Homo sapiens
  misc_RNA (1)...(19): siRNA sense strand
gccggaaucgcugucagua

SEQ ID NO: 304427 - RNA, 19 nt, Homo sapiens
  misc_RNA (1)...(19): siRNA sense strand
caaaauacguguguuuagc

SEQ ID NO: 304428 - RNA, 19 nt, Homo sapiens
  misc_RNA (1)...(19): siRNA sense strand
ggagaugacacccagcaua

SEQ ID NO: 304429 - RNA, 19 nt, Homo sapiens
  misc_RNA (1)...(19): siRNA sense strand
ggacaagcgucgccggaau

SEQ ID NO: 304430 - RNA, 19 nt, Homo sapiens
  misc_RNA (1)...(19): siRNA sense strand
ccaccuugcuuguaccaaa

SEQ ID NO: 304431 - RNA, 19 nt, Homo sapiens
  misc_RNA (1)...(19): siRNA sense strand
gagaugacacccagcauau

SEQ ID NO: 304432 - RNA, 19 nt, Homo sapiens
  misc_RNA (1)...(19): siRNA sense strand
guaccuuuauggacaacua

SEQ ID NO: 304433 - RNA, 19 nt, Homo sapiens
  misc_RNA (1)...(19): siRNA sense strand
acauucagaugcacaacua

SEQ ID NO: 304434 - RNA, 19 nt, Homo sapiens
  misc_RNA (1)...(19): siRNA sense strand
uagaagacauucagaugca

SEQ ID NO: 304435 - RNA, 19 nt, Homo sapiens
  misc_RNA (1)...(19): siRNA sense strand
gcaguccuccauuaaggua

SEQ ID NO: 304436 - RNA, 19 nt, Homo sapiens
  misc_RNA (1)...(19): siRNA sense strand
gaacccugacuaucaaaug

SEQ ID NO: 304437 - RNA, 19 nt, Homo sapiens
  misc_RNA (1)...(19): siRNA sense strand
gguagaagacauucagaug

SEQ ID NO: 304438 - RNA, 19 nt, Homo sapiens
  misc_RNA (1)...(19): siRNA sense strand
gacagcaguccuccauuaa

SEQ ID NO: 304439 - RNA, 19 nt, Homo sapiens
  misc_RNA (1)...(19): siRNA sense strand
cgggaucucuccacaacuu

SEQ ID NO: 304440 - RNA, 19 nt, Homo sapiens
  misc_RNA (1)...(19): siRNA sense strand
ggcgaacccugacuaucaa

SEQ ID NO: 304441 - RNA, 19 nt, Homo sapiens
  misc_RNA (1)...(19): siRNA sense strand
gcauauccagcaauucuau

SEQ ID NO: 304442 - RNA, 19 nt, Homo sapiens
  misc_RNA (1)...(19): siRNA sense strand
cagcaguccuccauuaagg

SEQ ID NO: 304443 - RNA, 19 nt, Homo sapiens
  misc_RNA (1)...(19): siRNA sense strand
auacguguguuuagcaaau

SEQ ID NO: 304444 - RNA, 19 nt, Homo sapiens
  misc_RNA (1)...(19): siRNA sense strand
ugucaguacugccgauuuc

SEQ ID NO: 304445 - RNA, 19 nt, Homo sapiens
  misc_RNA (1)...(19): siRNA sense strand
cggaaucgcugucaguacu

SEQ ID NO: 304446 - RNA, 19 nt, Homo sapiens
  misc_RNA (1)...(19): siRNA sense strand
ccauuaagguagaagacau

SEQ ID NO: 304447 - RNA, 19 nt, Homo sapiens
  misc_RNA (1)...(19): siRNA sense strand
gcccaaagccgaccaagac

SEQ ID NO: 304448 - RNA, 19 nt, Homo sapiens
  misc_RNA (1)...(19): siRNA sense strand
cagcauauccagcaauucu

SEQ ID NO: 304449 - RNA, 19 nt, Homo sapiens
  misc_RNA (1)...(19): siRNA sense strand
ucaaaugaguggagaugac

SEQ ID NO: 304450 - RNA, 19 nt, Homo sapiens
  misc_RNA (1)...(19): siRNA sense strand
ccgggucgguuuacuacaa

SEQ ID NO: 304451 - RNA, 19 nt, Homo sapiens
  misc_RNA (1)...(19): siRNA sense strand
aaauacguguguuuagcaa

SEQ ID NO: 304452 - RNA, 19 nt, Homo sapiens
  misc_RNA (1)...(19): siRNA sense strand
cccagcauauccagcaauu

SEQ ID NO: 304453 - RNA, 19 nt, Homo sapiens
  misc_RNA (1)...(19): siRNA sense strand
aacccugacuaucaaauga

SEQ ID NO: 304454 - RNA, 19 nt, Homo sapiens
  misc_RNA (1)...(19): siRNA sense strand
ccacuacgcacaugaucga

SEQ ID NO: 304455 - RNA, 19 nt, Homo sapiens
  misc_RNA (1)...(19): siRNA sense strand
ucaguaccuuuauggacaa

SEQ ID NO: 304456 - RNA, 19 nt, Homo sapiens
  misc_RNA (1)...(19): siRNA sense strand
gaagugguucgcacagaca

SEQ ID NO: 304457 - RNA, 19 nt, Homo sapiens
  misc_RNA (1)...(19): siRNA sense strand
agaacuacguggccacuac

SEQ ID NO: 304458 - RNA, 19 nt, Homo sapiens
  misc_RNA (1)...(19): siRNA sense strand
cagaagugccuggcuguug

SEQ ID NO: 304459 - RNA, 19 nt, Homo sapiens
  misc_RNA (1)...(19): siRNA sense strand
aggcgaacccugacuauca

SEQ ID NO: 304460 - RNA, 19 nt, Homo sapiens
  misc_RNA (1)...(19): siRNA sense strand
gauggucaaagaagugguu

SEQ ID NO: 304461 - RNA, 19 nt, Homo sapiens
  misc_RNA (1)...(19): siRNA sense strand
caaaugaguggagaugaca

SEQ ID NO: 304462 - RNA, 19 nt, Homo sapiens
  misc_RNA (1)...(19): siRNA sense strand
gggcccaugucgacuccaa

SEQ ID NO: 304463 - RNA, 19 nt, Homo sapiens
  misc_RNA (1)...(19): siRNA sense strand
ccucuucuccuuuaagcaa

SEQ ID NO: 304464 - RNA, 19 nt, Homo sapiens
  misc_RNA (1)...(19): siRNA sense strand
uacguguguuuagcaaaua

SEQ ID NO: 304465 - RNA, 19 nt, Homo sapiens
  misc_RNA (1)...(19): siRNA sense strand
caccuugcuuguaccaaau

SEQ ID NO: 304466 - RNA, 19 nt, Homo sapiens
  misc_RNA (1)...(19): siRNA sense strand
cuguugggauggucaaaga

SEQ ID NO: 304467 - RNA, 19 nt, Homo sapiens
  misc_RNA (1)...(19): siRNA sense strand
gcacagacaguuuaaaagg

SEQ ID NO: 304468 - RNA, 19 nt, Homo sapiens
  misc_RNA (1)...(19): siRNA sense strand
gguucgcacagacaguuua

SEQ ID NO: 304469 - RNA, 19 nt, Homo sapiens
  misc_RNA (1)...(19): siRNA sense strand
aagaagugguucgcacaga

SEQ ID NO: 304470 - RNA, 19 nt, Homo sapiens
  misc_RNA (1)...(19): siRNA sense strand
gacaagcgucgccggaauc

SEQ ID NO: 304471 - RNA, 19 nt, Homo sapiens
  misc_RNA (1)...(19): siRNA sense strand
gaacuguuuguccuucgau

SEQ ID NO: 304472 - RNA, 19 nt, Homo sapiens
  misc_RNA (1)...(19): siRNA sense strand
gcacaggcuacgacgucaa

SEQ ID NO: 304473 - RNA, 19 nt, Homo sapiens
  misc_RNA (1)...(19): siRNA sense strand
cauuaagguagaagacauu

SEQ ID NO: 304474 - RNA, 19 nt, Homo sapiens
  misc_RNA (1)...(19): siRNA sense strand
gcaaaauacguguguuuag

SEQ ID NO: 304475 - RNA, 19 nt, Homo sapiens
  misc_RNA (1)...(19): siRNA sense strand
guacugccgauuucagaag

SEQ ID NO: 304476 - RNA, 19 nt, Homo sapiens
  misc_RNA (1)...(19): siRNA sense strand
uaagguagaagacauucag

SEQ ID NO: 304477 - RNA, 19 nt, Homo sapiens
  misc_RNA (1)...(19): siRNA sense strand
caacuuccaccagaacuac

SEQ ID NO: 304478 - RNA, 19 nt, Homo sapiens
  misc_RNA (1)...(19): siRNA sense strand
guccuucgauuagcauaca

SEQ ID NO: 304479 - RNA, 19 nt, Homo sapiens
  misc_RNA (1)...(19): siRNA sense strand
gaugacacccagcauaucc

SEQ ID NO: 304480 - RNA, 19 nt, Homo sapiens
  misc_RNA (1)...(19): siRNA sense strand
uaucaaaugaguggagaug

SEQ ID NO: 304481 - RNA, 19 nt, Homo sapiens
  misc_RNA (1)...(19): siRNA sense strand
guucgcacagacaguuuaa

SEQ ID NO: 304482 - RNA, 19 nt, Homo sapiens
  misc_RNA (1)...(19): siRNA sense strand
ggugucuaguugccagaug

SEQ ID NO: 304483 - RNA, 19 nt, Homo sapiens
  misc_RNA (1)...(19): siRNA sense strand
gccggaaucgcugucagua

SEQ ID NO: 304484 - RNA, 19 nt, Homo sapiens
  misc_RNA (1)...(19): siRNA sense strand
caaaauacguguguuuagc

SEQ ID NO: 304485 - RNA, 19 nt, Homo sapiens
  misc_RNA (1)...(19): siRNA sense strand
ccacgugacuuucaacaau

SEQ ID NO: 304486 - RNA, 19 nt, Homo sapiens
  misc_RNA (1)...(19): siRNA sense strand
ggagaugacacccagcaua

SEQ ID NO: 304487 - RNA, 19 nt, Homo sapiens
  misc_RNA (1)...(19): siRNA sense strand
ggacaagcgucgccggaau

SEQ ID NO: 304488 - RNA, 19 nt, Homo sapiens
  misc_RNA (1)...(19): siRNA sense strand
ccaccuugcuuguaccaaa

SEQ ID NO: 304489 - RNA, 19 nt, Homo sapiens
  misc_RNA (1)...(19): siRNA sense strand
gaauaugaacaucgacauu

SEQ ID NO: 304490 - RNA, 19 nt, Homo sapiens
  misc_RNA (1)...(19): siRNA sense strand
gagaugacacccagcauau

SEQ ID NO: 304491 - RNA, 19 nt, Homo sapiens
  misc_RNA (1)...(19): siRNA sense strand
acauucagaugcacaacua

SEQ ID NO: 304492 - RNA, 19 nt, Homo sapiens
  misc_RNA (1)...(19): siRNA sense strand
uagaagacauucagaugca

SEQ ID NO: 304493 - RNA, 19 nt, Homo sapiens
  misc_RNA (1)...(19): siRNA sense strand
gcaguccuccauuaaggua

SEQ ID NO: 304494 - RNA, 19 nt, Homo sapiens
  misc_RNA (1)...(19): siRNA sense strand
gaacccugacuaucaaaug

SEQ ID NO: 304495 - RNA, 19 nt, Homo sapiens
  misc_RNA (1)...(19): siRNA sense strand
gguagaagacauucagaug

SEQ ID NO: 304496 - RNA, 19 nt, Homo sapiens
  misc_RNA (1)...(19): siRNA sense strand
gacagcaguccuccauuaa

SEQ ID NO: 304497 - RNA, 19 nt, Homo sapiens
  misc_RNA (1)...(19): siRNA sense strand
cgggaucucuccacaacuu

SEQ ID NO: 304498 - RNA, 19 nt, Homo sapiens
  misc_RNA (1)...(19): siRNA sense strand
ggcgaacccugacuaucaa

SEQ ID NO: 304499 - RNA, 19 nt, Homo sapiens
  misc_RNA (1)...(19): siRNA sense strand
gcauauccagcaauucuau

SEQ ID NO: 304500 - RNA, 19 nt, Homo sapiens
  misc_RNA (1)...(19): siRNA sense strand
ucaaggaacccaagagagu

SEQ ID NO: 304501 - RNA, 19 nt, Homo sapiens
  misc_RNA (1)...(19): siRNA sense strand
cagcaguccuccauuaagg

SEQ ID NO: 304502 - RNA, 19 nt, Homo sapiens
  misc_RNA (1)...(19): siRNA sense strand
ggacacuuuaccuuucuaa

SEQ ID NO: 304503 - RNA, 19 nt, Homo sapiens
  misc_RNA (1)...(19): siRNA sense strand
caagagaguggaagaacug

SEQ ID NO: 304504 - RNA, 19 nt, Homo sapiens
  misc_RNA (1)...(19): siRNA sense strand
gcucaaggaacccaagaga

SEQ ID NO: 304505 - RNA, 19 nt, Homo sapiens
  misc_RNA (1)...(19): siRNA sense strand
auacguguguuuagcaaau

SEQ ID NO: 304506 - RNA, 19 nt, Homo sapiens
  misc_RNA (1)...(19): siRNA sense strand
ccaagagaguggaagaacu

SEQ ID NO: 304507 - RNA, 19 nt, Homo sapiens
  misc_RNA (1)...(19): siRNA sense strand
ugucaguacugccgauuuc

SEQ ID NO: 304508 - RNA, 19 nt, Homo sapiens
  misc_RNA (1)...(19): siRNA sense strand
cggaaucgcugucaguacu

SEQ ID NO: 304509 - RNA, 19 nt, Homo sapiens
  misc_RNA (1)...(19): siRNA sense strand
ccgggucgguuuacuacaa

SEQ ID NO: 304510 - RNA, 19 nt, Homo sapiens
  misc_RNA (1)...(19): siRNA sense strand
gaacuucguacccuuugca

SEQ ID NO: 304511 - RNA, 19 nt, Homo sapiens
  misc_RNA (1)...(19): siRNA sense strand
uggaagaacugcaaaacaa

SEQ ID NO: 304512 - RNA, 19 nt, Homo sapiens
  misc_RNA (1)...(19): siRNA sense strand
gagaguggaagaacugcaa

SEQ ID NO: 304513 - RNA, 19 nt, Homo sapiens
  misc_RNA (1)...(19): siRNA sense strand
gcccaaagccgaccaagac

SEQ ID NO: 304514 - RNA, 19 nt, Homo sapiens
  misc_RNA (1)...(19): siRNA sense strand
cagcauauccagcaauucu

SEQ ID NO: 304515 - RNA, 19 nt, Homo sapiens
  misc_RNA (1)...(19): siRNA sense strand
ucaaaugaguggagaugac

SEQ ID NO: 304516 - RNA, 19 nt, Homo sapiens
  misc_RNA (1)...(19): siRNA sense strand
ccauuaagguagaagacau

SEQ ID NO: 304517 - RNA, 19 nt, Homo sapiens
  misc_RNA (1)...(19): siRNA sense strand
ccagaacuucguacccuuu

SEQ ID NO: 304518 - RNA, 19 nt, Homo sapiens
  misc_RNA (1)...(19): siRNA sense strand
aaauacguguguuuagcaa

SEQ ID NO: 304519 - RNA, 19 nt, Homo sapiens
  misc_RNA (1)...(19): siRNA sense strand
ccuggacacuuuaccuuuc

SEQ ID NO: 304520 - RNA, 19 nt, Homo sapiens
  misc_RNA (1)...(19): siRNA sense strand
cccagcauauccagcaauu

SEQ ID NO: 304521 - RNA, 19 nt, Homo sapiens
  misc_RNA (1)...(19): siRNA sense strand
aacccugacuaucaaauga

SEQ ID NO: 304522 - RNA, 19 nt, Homo sapiens
  misc_RNA (1)...(19): siRNA sense strand
ccacuacgcacaugaucga

SEQ ID NO: 304523 - RNA, 19 nt, Homo sapiens
  misc_RNA (1)...(19): siRNA sense strand
cacgugacuuucaacaaug

SEQ ID NO: 304524 - RNA, 19 nt, Homo sapiens
  misc_RNA (1)...(19): siRNA sense strand
auaugaacaucgacauuuc

SEQ ID NO: 304525 - RNA, 19 nt, Homo sapiens
  misc_RNA (1)...(19): siRNA sense strand
gaagugguucgcacagaca

SEQ ID NO: 304526 - RNA, 19 nt, Homo sapiens
  misc_RNA (1)...(19): siRNA sense strand
agaacuacguggccacuac

SEQ ID NO: 304527 - RNA, 19 nt, Homo sapiens
  misc_RNA (1)...(19): siRNA sense strand
cagaagugccuggcuguug

SEQ ID NO: 304528 - RNA, 19 nt, Homo sapiens
  misc_RNA (1)...(19): siRNA sense strand
aggcgaacccugacuauca

SEQ ID NO: 304529 - RNA, 19 nt, Homo sapiens
  misc_RNA (1)...(19): siRNA sense strand
gauggucaaagaagugguu

SEQ ID NO: 304530 - RNA, 19 nt, Homo sapiens
  misc_RNA (1)...(19): siRNA sense strand
gagacacgggcucaaggaa

SEQ ID NO: 304531 - RNA, 19 nt, Homo sapiens
  misc_RNA (1)...(19): siRNA sense strand
caaaugaguggagaugaca

SEQ ID NO: 304532 - RNA, 19 nt, Homo sapiens
  misc_RNA (1)...(19): siRNA sense strand
gggcccaugucgacuccaa

SEQ ID NO: 304533 - RNA, 19 nt, Homo sapiens
  misc_RNA (1)...(19): siRNA sense strand
ccucuucuccuuuaagcaa

SEQ ID NO: 304534 - RNA, 19 nt, Homo sapiens
  misc_RNA (1)...(19): siRNA sense strand
gaagaacugcaaaacaaga

SEQ ID NO: 304535 - RNA, 19 nt, Homo sapiens
  misc_RNA (1)...(19): siRNA sense strand
uacguguguuuagcaaaua

SEQ ID NO: 304536 - RNA, 19 nt, Homo sapiens
  misc_RNA (1)...(19): siRNA sense strand
caccuugcuuguaccaaau

SEQ ID NO: 304537 - RNA, 19 nt, Homo sapiens
  misc_RNA (1)...(19): siRNA sense strand
cuguugggauggucaaaga

SEQ ID NO: 304538 - RNA, 19 nt, Homo sapiens
  misc_RNA (1)...(19): siRNA sense strand
gcauugcugcccuggcuau

SEQ ID NO: 304539 - RNA, 19 nt, Homo sapiens
  misc_RNA (1)...(19): siRNA sense strand
gcacagacaguuuaaaagg

SEQ ID NO: 304540 - RNA, 19 nt, Homo sapiens
  misc_RNA (1)...(19): siRNA sense strand
gguucgcacagacaguuua

SEQ ID NO: 304541 - RNA, 19 nt, Homo sapiens
  misc_RNA (1)...(19): siRNA sense strand
aagaagugguucgcacaga

SEQ ID NO: 304542 - RNA, 19 nt, Homo sapiens
  misc_RNA (1)...(19): siRNA sense strand
gacaagcgucgccggaauc

SEQ ID NO: 304543 - RNA, 19 nt, Homo sapiens
  misc_RNA (1)...(19): siRNA sense strand
gaacugcaaaacaagauug

SEQ ID NO: 304544 - RNA, 19 nt, Homo sapiens
  misc_RNA (1)...(19): siRNA sense strand
gaacuguuuguccuucgau

SEQ ID NO: 304545 - RNA, 19 nt, Homo sapiens
  misc_RNA (1)...(19): siRNA sense strand
gcaaaauacguguguuuag

SEQ ID NO: 304546 - RNA, 19 nt, Homo sapiens
  misc_RNA (1)...(19): siRNA sense strand
gcacaggcuacgacgucaa

SEQ ID NO: 304547 - RNA, 19 nt, Homo sapiens
  misc_RNA (1)...(19): siRNA sense strand
cauuaagguagaagacauu

SEQ ID NO: 304548 - RNA, 19 nt, Homo sapiens
  misc_RNA (1)...(19): siRNA sense strand
guacugccgauuucagaag

SEQ ID NO: 304549 - RNA, 19 nt, Homo sapiens
  misc_RNA (1)...(19): siRNA sense strand
ccugaaauuggaagacuug

SEQ ID NO: 304550 - RNA, 19 nt, Homo sapiens
  misc_RNA (1)...(19): siRNA sense strand
uaagguagaagacauucag

SEQ ID NO: 304551 - RNA, 19 nt, Homo sapiens
  misc_RNA (1)...(19): siRNA sense strand
caacuuccaccagaacuac

SEQ ID NO: 304552 - RNA, 19 nt, Homo sapiens
  misc_RNA (1)...(19): siRNA sense strand
guccuucgauuagcauaca

SEQ ID NO: 304553 - RNA, 19 nt, Homo sapiens
  misc_RNA (1)...(19): siRNA sense strand
gaugacacccagcauaucc

SEQ ID NO: 304554 - RNA, 19 nt, Homo sapiens
  misc_RNA (1)...(19): siRNA sense strand
uaucaaaugaguggagaug

SEQ ID NO: 304555 - RNA, 19 nt, Homo sapiens
  misc_RNA (1)...(19): siRNA sense strand
guucgcacagacaguuuaa

SEQ ID NO: 304556 - RNA, 19 nt, Homo sapiens
  misc_RNA (1)...(19): siRNA sense strand
ggugucuaguugccagaug

SEQ ID NO: 304557 - RNA, 19 nt, Homo sapiens
  misc_RNA (1)...(19): siRNA sense strand
ucucaaagaccacgugacu

SEQ ID NO: 304558 - RNA, 19 nt, Homo sapiens
  misc_RNA (1)...(19): siRNA sense strand
gccggaaucgcugucagua

SEQ ID NO: 304559 - RNA, 19 nt, Homo sapiens
  misc_RNA (1)...(19): siRNA sense strand
caaaauacguguguuuagc

SEQ ID NO: 304560 - RNA, 19 nt, Homo sapiens
  misc_RNA (1)...(19): siRNA sense strand
gcgcagagauccuugauga

SEQ ID NO: 304561 - RNA, 19 nt, Homo sapiens
  misc_RNA (1)...(19): siRNA sense strand
ggaaggaguucguagagaa

SEQ ID NO: 304562 - RNA, 19 nt, Homo sapiens
  misc_RNA (1)...(19): siRNA sense strand
gugcagagauccucaguga

SEQ ID NO: 304563 - RNA, 19 nt, Homo sapiens
  misc_RNA (1)...(19): siRNA sense strand
ucacagagcugcggaggaa

SEQ ID NO: 304564 - RNA, 19 nt, Homo sapiens
  misc_RNA (1)...(19): siRNA sense strand
gaaaacugcuuccggaauu

SEQ ID NO: 304565 - RNA, 19 nt, Homo sapiens
  misc_RNA (1)...(19): siRNA sense strand
caacgggacuucaucaucu

SEQ ID NO: 304566 - RNA, 19 nt, Homo sapiens
  misc_RNA (1)...(19): siRNA sense strand
ggaauucucccaucaaagu

SEQ ID NO: 304567 - RNA, 19 nt, Homo sapiens
  misc_RNA (1)...(19): siRNA sense strand
gcagagauccuugaugaga

SEQ ID NO: 304568 - RNA, 19 nt, Homo sapiens
  misc_RNA (1)...(19): siRNA sense strand
caucagcaccuguguguuu

SEQ ID NO: 304569 - RNA, 19 nt, Homo sapiens
  misc_RNA (1)...(19): siRNA sense strand
gcucaguucuggcaccaaa

SEQ ID NO: 304570 - RNA, 19 nt, Homo sapiens
  misc_RNA (1)...(19): siRNA sense strand
gcaguucgaggucaaguuu

SEQ ID NO: 304571 - RNA, 19 nt, Homo sapiens
  misc_RNA (1)...(19): siRNA sense strand
ggaccagaguguggacuuu

SEQ ID NO: 304572 - RNA, 19 nt, Homo sapiens
  misc_RNA (1)...(19): siRNA sense strand
ggaggaacuuugugaacau

SEQ ID NO: 304573 - RNA, 19 nt, Homo sapiens
  misc_RNA (1)...(19): siRNA sense strand
ggucaaggguggcucuuca

SEQ ID NO: 304574 - RNA, 19 nt, Homo sapiens
  misc_RNA (1)...(19): siRNA sense strand
ggaggaacuucaugaacau

SEQ ID NO: 304575 - RNA, 19 nt, Homo sapiens
  misc_RNA (1)...(19): siRNA sense strand
gaccacccaugcuuucuga

SEQ ID NO: 304576 - RNA, 19 nt, Homo sapiens
  misc_RNA (1)...(19): siRNA sense strand
ggauggcugugauguugaa

SEQ ID NO: 304577 - RNA, 19 nt, Homo sapiens
  misc_RNA (1)...(19): siRNA sense strand
gauaccaucuguucauuuu

SEQ ID NO: 304578 - RNA, 19 nt, Homo sapiens
  misc_RNA (1)...(19): siRNA sense strand
gaacaaggccguugauacc

SEQ ID NO: 304579 - RNA, 19 nt, Homo sapiens
  misc_RNA (1)...(19): siRNA sense strand
ugacauccguagaucuuga

SEQ ID NO: 304580 - RNA, 19 nt, Homo sapiens
  misc_RNA (1)...(19): siRNA sense strand
cggaggaacuucaugaaca

SEQ ID NO: 304581 - RNA, 19 nt, Homo sapiens
  misc_RNA (1)...(19): siRNA sense strand
cacaaggccucaagaguca

SEQ ID NO: 304582 - RNA, 19 nt, Homo sapiens
  misc_RNA (1)...(19): siRNA sense strand
gaggaacuuugugaacauu

SEQ ID NO: 304583 - RNA, 19 nt, Homo sapiens
  misc_RNA (1)...(19): siRNA sense strand
agugaaggcugcuguguga

SEQ ID NO: 304584 - RNA, 19 nt, Homo sapiens
  misc_RNA (1)...(19): siRNA sense strand
gcuguaagaaggaugcuuu

SEQ ID NO: 304585 - RNA, 19 nt, Homo sapiens
  misc_RNA (1)...(19): siRNA sense strand
gcccagcucucaagucuac

SEQ ID NO: 304586 - RNA, 19 nt, Homo sapiens
  misc_RNA (1)...(19): siRNA sense strand
gugcagcccugggauguga

SEQ ID NO: 304587 - RNA, 19 nt, Homo sapiens
  misc_RNA (1)...(19): siRNA sense strand
gcgaaggccuccgaacugu

SEQ ID NO: 304588 - RNA, 19 nt, Homo sapiens
  misc_RNA (1)...(19): siRNA sense strand
ccggaauucucccaucaaa

SEQ ID NO: 304589 - RNA, 19 nt, Homo sapiens
  misc_RNA (1)...(19): siRNA sense strand
ccauccagcuagacccuaa

SEQ ID NO: 304590 - RNA, 19 nt, Homo sapiens
  misc_RNA (1)...(19): siRNA sense strand
ggaaggacucccaguucaa

SEQ ID NO: 304591 - RNA, 19 nt, Homo sapiens
  misc_RNA (1)...(19): siRNA sense strand
gaacauucgcccugucaag

SEQ ID NO: 304592 - RNA, 19 nt, Homo sapiens
  misc_RNA (1)...(19): siRNA sense strand
uggaauugcugaccaucuu

SEQ ID NO: 304593 - RNA, 19 nt, Homo sapiens
  misc_RNA (1)...(19): siRNA sense strand
caagacuguuggagacuuc

SEQ ID NO: 304594 - RNA, 19 nt, Homo sapiens
  misc_RNA (1)...(19): siRNA sense strand
gaacuguccugggccugau

SEQ ID NO: 304595 - RNA, 19 nt, Homo sapiens
  misc_RNA (1)...(19): siRNA sense strand
gcuagacccuaaccagaag

SEQ ID NO: 304596 - RNA, 19 nt, Homo sapiens
  misc_RNA (1)...(19): siRNA sense strand
uuucuggacugucaacuau

SEQ ID NO: 304597 - RNA, 19 nt, Homo sapiens
  misc_RNA (1)...(19): siRNA sense strand
gccaggagggcgagcauaa

SEQ ID NO: 304598 - RNA, 19 nt, Homo sapiens
  misc_RNA (1)...(19): siRNA sense strand
ggucuaugcccuggaauug

SEQ ID NO: 304599 - RNA, 19 nt, Homo sapiens
  misc_RNA (1)...(19): siRNA sense strand
uaccagcaguguaccaaga

SEQ ID NO: 304600 - RNA, 19 nt, Homo sapiens
  misc_RNA (1)...(19): siRNA sense strand
cagagauccuugaugagau

SEQ ID NO: 304601 - RNA, 19 nt, Homo sapiens
  misc_RNA (1)...(19): siRNA sense strand
gagccucaaugcuguguac

SEQ ID NO: 304602 - RNA, 19 nt, Homo sapiens
  misc_RNA (1)...(19): siRNA sense strand
cggaggaacuuugugaaca

SEQ ID NO: 304603 - RNA, 19 nt, Homo sapiens
  misc_RNA (1)...(19): siRNA sense strand
ggcuggaacuccugacugu

SEQ ID NO: 304604 - RNA, 19 nt, Homo sapiens
  misc_RNA (1)...(19): siRNA sense strand
guagagacgggacaucugu

SEQ ID NO: 304605 - RNA, 19 nt, Homo sapiens
  misc_RNA (1)...(19): siRNA sense strand
agagauccuugaugagaug

SEQ ID NO: 304606 - RNA, 19 nt, Homo sapiens
  misc_RNA (1)...(19): siRNA sense strand
gagcugcggaggaacuuug

SEQ ID NO: 304607 - RNA, 19 nt, Homo sapiens
  misc_RNA (1)...(19): siRNA sense strand
cagaagcccaggccuauca

SEQ ID NO: 304608 - RNA, 19 nt, Homo sapiens
  misc_RNA (1)...(19): siRNA sense strand
auucugaacuugucaucuu

SEQ ID NO: 304609 - RNA, 19 nt, Homo sapiens
  misc_RNA (1)...(19): siRNA sense strand
gcuaugaccacccaugcuu

SEQ ID NO: 304610 - RNA, 19 nt, Homo sapiens
  misc_RNA (1)...(19): siRNA sense strand
ggccaucgacaucaucuug

SEQ ID NO: 304611 - RNA, 19 nt, Homo sapiens
  misc_RNA (1)...(19): siRNA sense strand
gguugcggcucagaacaaa

SEQ ID NO: 304612 - RNA, 19 nt, Homo sapiens
  misc_RNA (1)...(19): siRNA sense strand
agggauggcugugauguug

SEQ ID NO: 304613 - RNA, 19 nt, Homo sapiens
  misc_RNA (1)...(19): siRNA sense strand
ccuaagggauggcugugau

SEQ ID NO: 304614 - RNA, 19 nt, Homo sapiens
  misc_RNA (1)...(19): siRNA sense strand
gcugugauguugaacucau

SEQ ID NO: 304615 - RNA, 19 nt, Homo sapiens
  misc_RNA (1)...(19): siRNA sense strand
ucacugagcagggcaacaa

SEQ ID NO: 304616 - RNA, 19 nt, Homo sapiens
  misc_RNA (1)...(19): siRNA sense strand
uugacaaguucaucaguga

SEQ ID NO: 304617 - RNA, 19 nt, Homo sapiens
  misc_RNA (1)...(19): siRNA sense strand
caggccugcuuucugagua

SEQ ID NO: 304618 - RNA, 19 nt, Homo sapiens
  misc_RNA (1)...(19): siRNA sense strand
ucaacugcuucacggacua

SEQ ID NO: 304619 - RNA, 19 nt, Homo sapiens
  misc_RNA (1)...(19): siRNA sense strand
ggaacuuugugaacauucg

SEQ ID NO: 304620 - RNA, 19 nt, Homo sapiens
  misc_RNA (1)...(19): siRNA sense strand
ggaacuucaugaacauucg

SEQ ID NO: 304621 - RNA, 19 nt, Homo sapiens
  misc_RNA (1)...(19): siRNA sense strand
gaaggaguucguagagaag

SEQ ID NO: 304622 - RNA, 19 nt, Homo sapiens
  misc_RNA (1)...(19): siRNA sense strand
cuacuggacggucaacuau

SEQ ID NO: 304623 - RNA, 19 nt, Homo sapiens
  misc_RNA (1)...(19): siRNA sense strand
uggaacuccugacugugua

SEQ ID NO: 304624 - RNA, 19 nt, Homo sapiens
  misc_RNA (1)...(19): siRNA sense strand
ccgcugaucccaccuggaa

SEQ ID NO: 304625 - RNA, 19 nt, Homo sapiens
  misc_RNA (1)...(19): siRNA sense strand
ggacccagccaugagaaug

SEQ ID NO: 304626 - RNA, 19 nt, Homo sapiens
  misc_RNA (1)...(19): siRNA sense strand
ccuggugccugccuucaau

SEQ ID NO: 304627 - RNA, 19 nt, Homo sapiens
  misc_RNA (1)...(19): siRNA sense strand
ggacucccaguucaacaug

SEQ ID NO: 304628 - RNA, 19 nt, Homo sapiens
  misc_RNA (1)...(19): siRNA sense strand
guacuccaccugcuucaca

SEQ ID NO: 304629 - RNA, 19 nt, Homo sapiens
  misc_RNA (1)...(19): siRNA sense strand
gagcuccucaccaucuuug

SEQ ID NO: 304630 - RNA, 19 nt, Homo sapiens
  misc_RNA (1)...(19): siRNA sense strand
gggacccagugcagucuug

SEQ ID NO: 304631 - RNA, 19 nt, Homo sapiens
  misc_RNA (1)...(19): siRNA sense strand
ggucaaacccaagccacaa

SEQ ID NO: 304632 - RNA, 19 nt, Homo sapiens
  misc_RNA (1)...(19): siRNA sense strand
uggcugugauucugaacuu

SEQ ID NO: 304633 - RNA, 19 nt, Homo sapiens
  misc_RNA (1)...(19): siRNA sense strand
gaggacuggauggauguua

SEQ ID NO: 304634 - RNA, 19 nt, Homo sapiens
  misc_RNA (1)...(19): siRNA sense strand
cggaaggaguucguagaga

SEQ ID NO: 304635 - RNA, 19 nt, Homo sapiens
  misc_RNA (1)...(19): siRNA sense strand
cugcggagccagcaucgua

SEQ ID NO: 304636 - RNA, 19 nt, Homo sapiens
  misc_RNA (1)...(19): siRNA sense strand
guaagaaggaugcuuucag

SEQ ID NO: 304637 - RNA, 19 nt, Homo sapiens
  misc_RNA (1)...(19): siRNA sense strand
gcagcggcacguuaagaga

SEQ ID NO: 304638 - RNA, 19 nt, Homo sapiens
  misc_RNA (1)...(19): siRNA sense strand
gaaggacucccaguucaac

SEQ ID NO: 304639 - RNA, 19 nt, Homo sapiens
  misc_RNA (1)...(19): siRNA sense strand
ugaacaaggccguugauac

SEQ ID NO: 304640 - RNA, 19 nt, Homo sapiens
  misc_RNA (1)...(19): siRNA sense strand
acuggacggucaacuauag

SEQ ID NO: 304641 - RNA, 19 nt, Homo sapiens
  misc_RNA (1)...(19): siRNA sense strand
ccuuggaccugucucagau

SEQ ID NO: 304642 - RNA, 19 nt, Homo sapiens
  misc_RNA (1)...(19): siRNA sense strand
guuggagacuuccugaaac

SEQ ID NO: 304643 - RNA, 19 nt, Homo sapiens
  misc_RNA (1)...(19): siRNA sense strand
gccaaggacaagacuguug

SEQ ID NO: 304644 - RNA, 19 nt, Homo sapiens
  misc_RNA (1)...(19): siRNA sense strand
ucucaaggguggcugugau

SEQ ID NO: 304645 - RNA, 19 nt, Homo sapiens
  misc_RNA (1)...(19): siRNA sense strand
gagcugcggaggaacuuca

SEQ ID NO: 304646 - RNA, 19 nt, Homo sapiens
  misc_RNA (1)...(19): siRNA sense strand
gcaugcggccugcuucaca

SEQ ID NO: 304647 - RNA, 19 nt, Homo sapiens
  misc_RNA (1)...(19): siRNA sense strand
gaugccagcccuccuuuac

SEQ ID NO: 304648 - RNA, 19 nt, Homo sapiens
  misc_RNA (1)...(19): siRNA sense strand
gcaccuucuuggccagcuu

SEQ ID NO: 304649 - RNA, 19 nt, Homo sapiens
  misc_RNA (1)...(19): siRNA sense strand
ggagcuggaccgcuucauc

SEQ ID NO: 304650 - RNA, 19 nt, Homo sapiens
  misc_RNA (1)...(19): siRNA sense strand
ggagcagggcuguaagaag

SEQ ID NO: 304651 - RNA, 19 nt, Homo sapiens
  misc_RNA (1)...(19): siRNA sense strand
gcccagccaaguugaagaa

SEQ ID NO: 304652 - RNA, 19 nt, Homo sapiens
  misc_RNA (1)...(19): siRNA sense strand
gcagggcuguaagaaggau

SEQ ID NO: 304653 - RNA, 19 nt, Homo sapiens
  misc_RNA (1)...(19): siRNA sense strand
gaguguggacuuugaugug

SEQ ID NO: 304654 - RNA, 19 nt, Homo sapiens
  misc_RNA (1)...(19): siRNA sense strand
acaaggccguugauaccau

SEQ ID NO: 304655 - RNA, 19 nt, Homo sapiens
  misc_RNA (1)...(19): siRNA sense strand
gugaacaaggccguugaua

SEQ ID NO: 304656 - RNA, 19 nt, Homo sapiens
  misc_RNA (1)...(19): siRNA sense strand
ggguggcugugauucugaa

SEQ ID NO: 304657 - RNA, 19 nt, Homo sapiens
  misc_RNA (1)...(19): siRNA sense strand
ggagcuccucaccaucuuu

SEQ ID NO: 304658 - RNA, 19 nt, Homo sapiens
  misc_RNA (1)...(19): siRNA sense strand
acaagacuguuggagacuu

SEQ ID NO: 304659 - RNA, 19 nt, Homo sapiens
  misc_RNA (1)...(19): siRNA sense strand
gaccagaguguggacuuug

SEQ ID NO: 304660 - RNA, 19 nt, Homo sapiens
  misc_RNA (1)...(19): siRNA sense strand
cagcagcgcuccaggaaug

SEQ ID NO: 304661 - RNA, 19 nt, Homo sapiens
  misc_RNA (1)...(19): siRNA sense strand
ugaagaagagcuuaaguuu

SEQ ID NO: 304662 - RNA, 19 nt, Homo sapiens
  misc_RNA (1)...(19): siRNA sense strand
ccaaucaggugaaggaugu

SEQ ID NO: 304663 - RNA, 19 nt, Homo sapiens
  misc_RNA (1)...(19): siRNA sense strand
gcggguaccuggaugaaga

SEQ ID NO: 304664 - RNA, 19 nt, Homo sapiens
  misc_RNA (1)...(19): siRNA sense strand
caucaggccucuccaagau

SEQ ID NO: 304665 - RNA, 19 nt, Homo sapiens
  misc_RNA (1)...(19): siRNA sense strand
gccaagacccagacacuuu

SEQ ID NO: 304666 - RNA, 19 nt, Homo sapiens
  misc_RNA (1)...(19): siRNA sense strand
guaccuggaugaagaagag

SEQ ID NO: 304667 - RNA, 19 nt, Homo sapiens
  misc_RNA (1)...(19): siRNA sense strand
gaagaagagcuuaaguuuu

SEQ ID NO: 304668 - RNA, 19 nt, Homo sapiens
  misc_RNA (1)...(19): siRNA sense strand
ugagaguggugccagagaa

SEQ ID NO: 304669 - RNA, 19 nt, Homo sapiens
  misc_RNA (1)...(19): siRNA sense strand
ucaggccucuccaagaugu

SEQ ID NO: 304670 - RNA, 19 nt, Homo sapiens
  misc_RNA (1)...(19): siRNA sense strand
gaaaauuggagcagaggaa

SEQ ID NO: 304671 - RNA, 19 nt, Homo sapiens
  misc_RNA (1)...(19): siRNA sense strand
cagccaaucaggugaagga

SEQ ID NO: 304672 - RNA, 19 nt, Homo sapiens
  misc_RNA (1)...(19): siRNA sense strand
gaugaagaagagcuuaagu

SEQ ID NO: 304673 - RNA, 19 nt, Homo sapiens
  misc_RNA (1)...(19): siRNA sense strand
ugauggagaugggaaaauu

SEQ ID NO: 304674 - RNA, 19 nt, Homo sapiens
  misc_RNA (1)...(19): siRNA sense strand
caagaugucagccaaucag

SEQ ID NO: 304675 - RNA, 19 nt, Homo sapiens
  misc_RNA (1)...(19): siRNA sense strand
gagcggguaccuggaugaa

SEQ ID NO: 304676 - RNA, 19 nt, Homo sapiens
  misc_RNA (1)...(19): siRNA sense strand
ggaugaagaagagcuuaag

SEQ ID NO: 304677 - RNA, 19 nt, Homo sapiens
  misc_RNA (1)...(19): siRNA sense strand
ccaagaugucagccaauca

SEQ ID NO: 304678 - RNA, 19 nt, Homo sapiens
  misc_RNA (1)...(19): siRNA sense strand
agucagaaaccaaguccuu

SEQ ID NO: 304679 - RNA, 19 nt, Homo sapiens
  misc_RNA (1)...(19): siRNA sense strand
ggacucggaugccauagau

SEQ ID NO: 304680 - RNA, 19 nt, Homo sapiens
  misc_RNA (1)...(19): siRNA sense strand
ggaggacucggaugccaua

SEQ ID NO: 304681 - RNA, 19 nt, Homo sapiens
  misc_RNA (1)...(19): siRNA sense strand
ugucggaccuggccaagau

SEQ ID NO: 304682 - RNA, 19 nt, Homo sapiens
  misc_RNA (1)...(19): siRNA sense strand
guacuuccucgucaccuuu

SEQ ID NO: 304683 - RNA, 19 nt, Homo sapiens
  misc_RNA (1)...(19): siRNA sense strand
ccucaaggccuccgugguu

SEQ ID NO: 304684 - RNA, 19 nt, Homo sapiens
  misc_RNA (1)...(19): siRNA sense strand
ucacaggcaccucgcagaa

SEQ ID NO: 304685 - RNA, 19 nt, Homo sapiens
  misc_RNA (1)...(19): siRNA sense strand
gaccucaccaaccucauga

SEQ ID NO: 304686 - RNA, 19 nt, Homo sapiens
  misc_RNA (1)...(19): siRNA sense strand
cggaugccauagauuggaa

SEQ ID NO: 304687 - RNA, 19 nt, Homo sapiens
  misc_RNA (1)...(19): siRNA sense strand
gcaaggucauguacuuccu

SEQ ID NO: 304688 - RNA, 19 nt, Homo sapiens
  misc_RNA (1)...(19): siRNA sense strand
ggaccccacugccaucuuc

SEQ ID NO: 304689 - RNA, 19 nt, Homo sapiens
  misc_RNA (1)...(19): siRNA sense strand
cucaaggccuccgugguuu

SEQ ID NO: 304690 - RNA, 19 nt, Homo sapiens
  misc_RNA (1)...(19): siRNA sense strand
acucggaugccauagauug

SEQ ID NO: 304691 - RNA, 19 nt, Homo sapiens
  misc_RNA (1)...(19): siRNA sense strand
acaggcaccucgcagaacu

SEQ ID NO: 304692 - RNA, 19 nt, Homo sapiens
  misc_RNA (1)...(19): siRNA sense strand
uccgcaaggucauguacuu

SEQ ID NO: 304693 - RNA, 19 nt, Homo sapiens
  misc_RNA (1)...(19): siRNA sense strand
ugccauagauuggaaugag

SEQ ID NO: 304694 - RNA, 19 nt, Homo sapiens
  misc_RNA (1)...(19): siRNA sense strand
gaagaacgacgaacuauaa

SEQ ID NO: 304695 - RNA, 19 nt, Homo sapiens
  misc_RNA (1)...(19): siRNA sense strand
gaaauugucuugaauaagg

SEQ ID NO: 304696 - RNA, 19 nt, Homo sapiens
  misc_RNA (1)...(19): siRNA sense strand
gagcagaaccugaacagaa

SEQ ID NO: 304697 - RNA, 19 nt, Homo sapiens
  misc_RNA (1)...(19): siRNA sense strand
ggacagaagcggccuuuga

SEQ ID NO: 304698 - RNA, 19 nt, Homo sapiens
  misc_RNA (1)...(19): siRNA sense strand
gaagguggccauugucaaa

SEQ ID NO: 304699 - RNA, 19 nt, Homo sapiens
  misc_RNA (1)...(19): siRNA sense strand
caaaagacauugaagcuaa

SEQ ID NO: 304700 - RNA, 19 nt, Homo sapiens
  misc_RNA (1)...(19): siRNA sense strand
cagcaagcauggcgauuaa

SEQ ID NO: 304701 - RNA, 19 nt, Homo sapiens
  misc_RNA (1)...(19): siRNA sense strand
gauaaucuccucaaccauu

SEQ ID NO: 304702 - RNA, 19 nt, Homo sapiens
  misc_RNA (1)...(19): siRNA sense strand
ggaguugugugcagacuug

SEQ ID NO: 304703 - RNA, 19 nt, Homo sapiens
  misc_RNA (1)...(19): siRNA sense strand
gggcaugguucucaauuau

SEQ ID NO: 304704 - RNA, 19 nt, Homo sapiens
  misc_RNA (1)...(19): siRNA sense strand
ggacagcgcagaagaggaa

SEQ ID NO: 304705 - RNA, 19 nt, Homo sapiens
  misc_RNA (1)...(19): siRNA sense strand
gcagaaacuucaggacuug

SEQ ID NO: 304706 - RNA, 19 nt, Homo sapiens
  misc_RNA (1)...(19): siRNA sense strand
ccaccuggcuggaggauga

SEQ ID NO: 304707 - RNA, 19 nt, Homo sapiens
  misc_RNA (1)...(19): siRNA sense strand
gcaugguucucaauuauuc

SEQ ID NO: 304708 - RNA, 19 nt, Homo sapiens
  misc_RNA (1)...(19): siRNA sense strand
ggaaucuacucucaccaaa

SEQ ID NO: 304709 - RNA, 19 nt, Homo sapiens
  misc_RNA (1)...(19): siRNA sense strand
caaaggcuacgcuacguua

SEQ ID NO: 304710 - RNA, 19 nt, Homo sapiens
  misc_RNA (1)...(19): siRNA sense strand
gcagcaagcauggcgauua

SEQ ID NO: 304711 - RNA, 19 nt, Homo sapiens
  misc_RNA (1)...(19): siRNA sense strand
ccacagugauguugaagga

SEQ ID NO: 304712 - RNA, 19 nt, Homo sapiens
  misc_RNA (1)...(19): siRNA sense strand
uaacaccacugcccagaau

SEQ ID NO: 304713 - RNA, 19 nt, Homo sapiens
  misc_RNA (1)...(19): siRNA sense strand
uaaggaaucucggaggaaa

SEQ ID NO: 304714 - RNA, 19 nt, Homo sapiens
  misc_RNA (1)...(19): siRNA sense strand
gaaaugagucuggaugaga

SEQ ID NO: 304715 - RNA, 19 nt, Homo sapiens
  misc_RNA (1)...(19): siRNA sense strand
caaaggaugugcgggagaa

SEQ ID NO: 304716 - RNA, 19 nt, Homo sapiens
  misc_RNA (1)...(19): siRNA sense strand
gaugacaacguuagagaaa

SEQ ID NO: 304717 - RNA, 19 nt, Homo sapiens
  misc_RNA (1)...(19): siRNA sense strand
caagaaguauccugacuac

SEQ ID NO: 304718 - RNA, 19 nt, Homo sapiens
  misc_RNA (1)...(19): siRNA sense strand
caucaaggcucacuucaac

SEQ ID NO: 304719 - RNA, 19 nt, Homo sapiens
  misc_RNA (1)...(19): siRNA sense strand
guauuuggcucccagaauc

SEQ ID NO: 304720 - RNA, 19 nt, Homo sapiens
  misc_RNA (1)...(19): siRNA sense strand
gaagaugcagagcccauuu

SEQ ID NO: 304721 - RNA, 19 nt, Homo sapiens
  misc_RNA (1)...(19): siRNA sense strand
ccauggaaauugucuugaa

SEQ ID NO: 304722 - RNA, 19 nt, Homo sapiens
  misc_RNA (1)...(19): siRNA sense strand
acacugagccuuuggaguu

SEQ ID NO: 304723 - RNA, 19 nt, Homo sapiens
  misc_RNA (1)...(19): siRNA sense strand
gaacagaaagaacaaucga

SEQ ID NO: 304724 - RNA, 19 nt, Homo sapiens
  misc_RNA (1)...(19): siRNA sense strand
aaacuuggcaacaccauuu

SEQ ID NO: 304725 - RNA, 19 nt, Homo sapiens
  misc_RNA (1)...(19): siRNA sense strand
gcaagcauggcgauuaaga

SEQ ID NO: 304726 - RNA, 19 nt, Homo sapiens
  misc_RNA (1)...(19): siRNA sense strand
gacagaagcggccuuugaa

SEQ ID NO: 304727 - RNA, 19 nt, Homo sapiens
  misc_RNA (1)...(19): siRNA sense strand
caauuauucucguucucua

SEQ ID NO: 304728 - RNA, 19 nt, Homo sapiens
  misc_RNA (1)...(19): siRNA sense strand
ccaugaagguggccauugu

SEQ ID NO: 304729 - RNA, 19 nt, Homo sapiens
  misc_RNA (1)...(19): siRNA sense strand
gaggcagacugugcacuuu

SEQ ID NO: 304730 - RNA, 19 nt, Homo sapiens
  misc_RNA (1)...(19): siRNA sense strand
ugacucguguggaauuuga

SEQ ID NO: 304731 - RNA, 19 nt, Homo sapiens
  misc_RNA (1)...(19): siRNA sense strand
ugacaacguuagagaaagu

SEQ ID NO: 304732 - RNA, 19 nt, Homo sapiens
  misc_RNA (1)...(19): siRNA sense strand
gagaaaaggccacagaaaa

SEQ ID NO: 304733 - RNA, 19 nt, Homo sapiens
  misc_RNA (1)...(19): siRNA sense strand
gcccuacccucaacgcaaa

SEQ ID NO: 304734 - RNA, 19 nt, Homo sapiens
  misc_RNA (1)...(19): siRNA sense strand
gcagaccuguuggcacuga

SEQ ID NO: 304735 - RNA, 19 nt, Homo sapiens
  misc_RNA (1)...(19): siRNA sense strand
uugaaggccugauggauga

SEQ ID NO: 304736 - RNA, 19 nt, Homo sapiens
  misc_RNA (1)...(19): siRNA sense strand
ugaagaacgacgaacuaua

SEQ ID NO: 304737 - RNA, 19 nt, Homo sapiens
  misc_RNA (1)...(19): siRNA sense strand
gagaugacaacguuagaga

SEQ ID NO: 304738 - RNA, 19 nt, Homo sapiens
  misc_RNA (1)...(19): siRNA sense strand
gaucgugacccugaaagaa

SEQ ID NO: 304739 - RNA, 19 nt, Homo sapiens
  misc_RNA (1)...(19): siRNA sense strand
agcagaaccugaacagaaa

SEQ ID NO: 304740 - RNA, 19 nt, Homo sapiens
  misc_RNA (1)...(19): siRNA sense strand
gcucuuggcagaccuguug

SEQ ID NO: 304741 - RNA, 19 nt, Homo sapiens
  misc_RNA (1)...(19): siRNA sense strand
ccaccacagugauguugaa

SEQ ID NO: 304742 - RNA, 19 nt, Homo sapiens
  misc_RNA (1)...(19): siRNA sense strand
ucguauggcuggccucaaa

SEQ ID NO: 304743 - RNA, 19 nt, Homo sapiens
  misc_RNA (1)...(19): siRNA sense strand
cauggaaauugucuugaau

SEQ ID NO: 304744 - RNA, 19 nt, Homo sapiens
  misc_RNA (1)...(19): siRNA sense strand
ucaauaaggccaaguuuac

SEQ ID NO: 304745 - RNA, 19 nt, Homo sapiens
  misc_RNA (1)...(19): siRNA sense strand
gcucgcagcugcaguucuc

SEQ ID NO: 304746 - RNA, 19 nt, Homo sapiens
  misc_RNA (1)...(19): siRNA sense strand
ugccaacgcugaccacaug

SEQ ID NO: 304747 - RNA, 19 nt, Homo sapiens
  misc_RNA (1)...(19): siRNA sense strand
ccucagcuauggugucuuc

SEQ ID NO: 304748 - RNA, 19 nt, Homo sapiens
  misc_RNA (1)...(19): siRNA sense strand
ugggcaugguucucaauua

SEQ ID NO: 304749 - RNA, 19 nt, Homo sapiens
  misc_RNA (1)...(19): siRNA sense strand
cagagcagcccaucaagga

SEQ ID NO: 304750 - RNA, 19 nt, Homo sapiens
  misc_RNA (1)...(19): siRNA sense strand
cagaagcggccuuugaaga

SEQ ID NO: 304751 - RNA, 19 nt, Homo sapiens
  misc_RNA (1)...(19): siRNA sense strand
ggagugcccauggaaauug

SEQ ID NO: 304752 - RNA, 19 nt, Homo sapiens
  misc_RNA (1)...(19): siRNA sense strand
caaggagaaugguacugau

SEQ ID NO: 304753 - RNA, 19 nt, Homo sapiens
  misc_RNA (1)...(19): siRNA sense strand
agaaguauccugacuacga

SEQ ID NO: 304754 - RNA, 19 nt, Homo sapiens
  misc_RNA (1)...(19): siRNA sense strand
ugaccacagugaagcuaaa

SEQ ID NO: 304755 - RNA, 19 nt, Homo sapiens
  misc_RNA (1)...(19): siRNA sense strand
ccacauggcacagauugaa

SEQ ID NO: 304756 - RNA, 19 nt, Homo sapiens
  misc_RNA (1)...(19): siRNA sense strand
gcagugaguccaugaaggu

SEQ ID NO: 304757 - RNA, 19 nt, Homo sapiens
  misc_RNA (1)...(19): siRNA sense strand
agaagcggccuuugaagaa

SEQ ID NO: 304758 - RNA, 19 nt, Homo sapiens
  misc_RNA (1)...(19): siRNA sense strand
caggagacacugagccuuu

SEQ ID NO: 304759 - RNA, 19 nt, Homo sapiens
  misc_RNA (1)...(19): siRNA sense strand
ucacugagguggagaugac

SEQ ID NO: 304760 - RNA, 19 nt, Homo sapiens
  misc_RNA (1)...(19): siRNA sense strand
ggagaaugguacugauacu

SEQ ID NO: 304761 - RNA, 19 nt, Homo sapiens
  misc_RNA (1)...(19): siRNA sense strand
ccaaggagaaugguacuga

SEQ ID NO: 304762 - RNA, 19 nt, Homo sapiens
  misc_RNA (1)...(19): siRNA sense strand
ucaagaaguauccugacua

SEQ ID NO: 304763 - RNA, 19 nt, Homo sapiens
  misc_RNA (1)...(19): siRNA sense strand
ccacugcccucagcuaugg

SEQ ID NO: 304764 - RNA, 19 nt, Homo sapiens
  misc_RNA (1)...(19): siRNA sense strand
ucaaagugcugcagcucau

SEQ ID NO: 304765 - RNA, 19 nt, Homo sapiens
  misc_RNA (1)...(19): siRNA sense strand
aaaugagucuggaugagau

SEQ ID NO: 304766 - RNA, 19 nt, Homo sapiens
  misc_RNA (1)...(19): siRNA sense strand
cauugaagcuaagaugaug

SEQ ID NO: 304767 - RNA, 19 nt, Homo sapiens
  misc_RNA (1)...(19): siRNA sense strand
ucgauaaucuccucaacca

SEQ ID NO: 304768 - RNA, 19 nt, Homo sapiens
  misc_RNA (1)...(19): siRNA sense strand
ggguggagcugguuguucu

SEQ ID NO: 304769 - RNA, 19 nt, Homo sapiens
  misc_RNA (1)...(19): siRNA sense strand
gcccagaaaccaagugaga

SEQ ID NO: 304770 - RNA, 19 nt, Homo sapiens
  misc_RNA (1)...(19): siRNA sense strand
caauaaacggguacucuuc

SEQ ID NO: 304771 - RNA, 19 nt, Homo sapiens
  misc_RNA (1)...(19): siRNA sense strand
caggguggagucuguauuu

SEQ ID NO: 304772 - RNA, 19 nt, Homo sapiens
  misc_RNA (1)...(19): siRNA sense strand
cacugagccuuuggaguua

SEQ ID NO: 304773 - RNA, 19 nt, Homo sapiens
  misc_RNA (1)...(19): siRNA sense strand
uagaggagcgcaagaagug

SEQ ID NO: 304774 - RNA, 19 nt, Homo sapiens
  misc_RNA (1)...(19): siRNA sense strand
gguggagucuguauuugag

SEQ ID NO: 304775 - RNA, 19 nt, Homo sapiens
  misc_RNA (1)...(19): siRNA sense strand
ggcagacugugcacuuuca

SEQ ID NO: 304776 - RNA, 19 nt, Homo sapiens
  misc_RNA (1)...(19): siRNA sense strand
gaagcggccuuugaagaac

SEQ ID NO: 304777 - RNA, 19 nt, Homo sapiens
  misc_RNA (1)...(19): siRNA sense strand
gcucaauaaggccaaguuu

SEQ ID NO: 304778 - RNA, 19 nt, Homo sapiens
  misc_RNA (1)...(19): siRNA sense strand
gacauugaagcuaagauga

SEQ ID NO: 304779 - RNA, 19 nt, Homo sapiens
  misc_RNA (1)...(19): siRNA sense strand
uggaccagaucuucacuga

SEQ ID NO: 304780 - RNA, 19 nt, Homo sapiens
  misc_RNA (1)...(19): siRNA sense strand
ugcagaaacuucaggacuu

SEQ ID NO: 304781 - RNA, 19 nt, Homo sapiens
  misc_RNA (1)...(19): siRNA sense strand
gcaagggucagagagcaaa

SEQ ID NO: 304782 - RNA, 19 nt, Homo sapiens
  misc_RNA (1)...(19): siRNA sense strand
uggaugauguggacuucaa

SEQ ID NO: 304783 - RNA, 19 nt, Homo sapiens
  misc_RNA (1)...(19): siRNA sense strand
aaucuacucucaccaaacu

SEQ ID NO: 304784 - RNA, 19 nt, Homo sapiens
  misc_RNA (1)...(19): siRNA sense strand
gaagaacaucaaugcagau

SEQ ID NO: 304785 - RNA, 19 nt, Homo sapiens
  misc_RNA (1)...(19): siRNA sense strand
gaccacauggcacagauug

SEQ ID NO: 304786 - RNA, 19 nt, Homo sapiens
  misc_RNA (1)...(19): siRNA sense strand
ggaccgagaggugcaguau

SEQ ID NO: 304787 - RNA, 19 nt, Homo sapiens
  misc_RNA (1)...(19): siRNA sense strand
ugucugcccucgauaaucu

SEQ ID NO: 304788 - RNA, 19 nt, Homo sapiens
  misc_RNA (1)...(19): siRNA sense strand
gcaucaaggcucacuucaa

SEQ ID NO: 304789 - RNA, 19 nt, Homo sapiens
  misc_RNA (1)...(19): siRNA sense strand
ggaggaggagccugggauu

SEQ ID NO: 304790 - RNA, 19 nt, Homo sapiens
  misc_RNA (1)...(19): siRNA sense strand
ccuuuaaagugaagccauu

SEQ ID NO: 304791 - RNA, 19 nt, Homo sapiens
  misc_RNA (1)...(19): siRNA sense strand
aaaagugacucguguggaa

SEQ ID NO: 304792 - RNA, 19 nt, Homo sapiens
  misc_RNA (1)...(19): siRNA sense strand
gauggaugauguggacuuc

SEQ ID NO: 304793 - RNA, 19 nt, Homo sapiens
  misc_RNA (1)...(19): siRNA sense strand
ucccagagauggaccagau

SEQ ID NO: 304794 - RNA, 19 nt, Homo sapiens
  misc_RNA (1)...(19): siRNA sense strand
gcacggagccuauuucgua

SEQ ID NO: 304795 - RNA, 19 nt, Homo sapiens
  misc_RNA (1)...(19): siRNA sense strand
cagaugaccuucucaagua

SEQ ID NO: 304796 - RNA, 19 nt, Homo sapiens
  misc_RNA (1)...(19): siRNA sense strand
gcacuuucguuucaucaua

SEQ ID NO: 304797 - RNA, 19 nt, Homo sapiens
  misc_RNA (1)...(19): siRNA sense strand
cagaauagcucucaguuca

SEQ ID NO: 304798 - RNA, 19 nt, Homo sapiens
  misc_RNA (1)...(19): siRNA sense strand
gaauagcucucaguucaug

SEQ ID NO: 304799 - RNA, 19 nt, Homo sapiens
  misc_RNA (1)...(19): siRNA sense strand
cagacgaacuccaagauug

SEQ ID NO: 304800 - RNA, 19 nt, Homo sapiens
  misc_RNA (1)...(19): siRNA sense strand
ggacagccuucucuuucaa

SEQ ID NO: 304801 - RNA, 19 nt, Homo sapiens
  misc_RNA (1)...(19): siRNA sense strand
gcuggaugauuauucagua

SEQ ID NO: 304802 - RNA, 19 nt, Homo sapiens
  misc_RNA (1)...(19): siRNA sense strand
gccggaagcugacgguuga

SEQ ID NO: 304803 - RNA, 19 nt, Homo sapiens
  misc_RNA (1)...(19): siRNA sense strand
aggcugugcuggaugauua

SEQ ID NO: 304804 - RNA, 19 nt, Homo sapiens
  misc_RNA (1)...(19): siRNA sense strand
gaaccuggcaccucaagga

SEQ ID NO: 304805 - RNA, 19 nt, Homo sapiens
  misc_RNA (1)...(19): siRNA sense strand
caaaggcugugcugagaca

SEQ ID NO: 304806 - RNA, 19 nt, Homo sapiens
  misc_RNA (1)...(19): siRNA sense strand
gggacagccuucucuuuca

SEQ ID NO: 304807 - RNA, 19 nt, Homo sapiens
  misc_RNA (1)...(19): siRNA sense strand
ggaggacccuucucuuucg

SEQ ID NO: 304808 - RNA, 19 nt, Homo sapiens
  misc_RNA (1)...(19): siRNA sense strand
gcagacgaacuccaagauu

SEQ ID NO: 304809 - RNA, 19 nt, Homo sapiens
  misc_RNA (1)...(19): siRNA sense strand
guagagcgacugcugaaga

SEQ ID NO: 304810 - RNA, 19 nt, Homo sapiens
  misc_RNA (1)...(19): siRNA sense strand
ugaaaucuguaagccauga

SEQ ID NO: 304811 - RNA, 19 nt, Homo sapiens
  misc_RNA (1)...(19): siRNA sense strand
gagcgacugcugaagauga

SEQ ID NO: 304812 - RNA, 19 nt, Homo sapiens
  misc_RNA (1)...(19): siRNA sense strand
gcucucaguucaugaagca

SEQ ID NO: 304813 - RNA, 19 nt, Homo sapiens
  misc_RNA (1)...(19): siRNA sense strand
ggacuacucgcuguacuug

SEQ ID NO: 304814 - RNA, 19 nt, Homo sapiens
  misc_RNA (1)...(19): siRNA sense strand
ggagggugaacucuacuuu

SEQ ID NO: 304815 - RNA, 19 nt, Homo sapiens
  misc_RNA (1)...(19): siRNA sense strand
ugagagaggccacgcagaa

SEQ ID NO: 304816 - RNA, 19 nt, Homo sapiens
  misc_RNA (1)...(19): siRNA sense strand
ggaugauuauucaguaucu

SEQ ID NO: 304817 - RNA, 19 nt, Homo sapiens
  misc_RNA (1)...(19): siRNA sense strand
gcagaauagcucucaguuc

SEQ ID NO: 304818 - RNA, 19 nt, Homo sapiens
  misc_RNA (1)...(19): siRNA sense strand
gccuggagcugagcgauga

SEQ ID NO: 304819 - RNA, 19 nt, Homo sapiens
  misc_RNA (1)...(19): siRNA sense strand
agagaggccacgcagaaua

SEQ ID NO: 304820 - RNA, 19 nt, Homo sapiens
  misc_RNA (1)...(19): siRNA sense strand
gaugauccgcaacugauga

SEQ ID NO: 304821 - RNA, 19 nt, Homo sapiens
  misc_RNA (1)...(19): siRNA sense strand
gcacuccugccuuacuuug

SEQ ID NO: 304822 - RNA, 19 nt, Homo sapiens
  misc_RNA (1)...(19): siRNA sense strand
gagaggccacgcagaauag

SEQ ID NO: 304823 - RNA, 19 nt, Homo sapiens
  misc_RNA (1)...(19): siRNA sense strand
gccaugaccuggagcaacu

SEQ ID NO: 304824 - RNA, 19 nt, Homo sapiens
  misc_RNA (1)...(19): siRNA sense strand
cagcuuggccacacgcuuu

SEQ ID NO: 304825 - RNA, 19 nt, Homo sapiens
  misc_RNA (1)...(19): siRNA sense strand
cccaaaggcugugcugaga

SEQ ID NO: 304826 - RNA, 19 nt, Homo sapiens
  misc_RNA (1)...(19): siRNA sense strand
ccggaggacccuucucuuu

SEQ ID NO: 304827 - RNA, 19 nt, Homo sapiens
  misc_RNA (1)...(19): siRNA sense strand
cacggagccuauuucguaa

SEQ ID NO: 304828 - RNA, 19 nt, Homo sapiens
  misc_RNA (1)...(19): siRNA sense strand
uagagcgacugcugaagau

SEQ ID NO: 304829 - RNA, 19 nt, Homo sapiens
  misc_RNA (1)...(19): siRNA sense strand
gcagaggacgugugcuauc

SEQ ID NO: 304830 - RNA, 19 nt, Homo sapiens
  misc_RNA (1)...(19): siRNA sense strand
ugccuuacuuuguuuaugu

SEQ ID NO: 304831 - RNA, 19 nt, Homo sapiens
  misc_RNA (1)...(19): siRNA sense strand
ccuuguaaguggccucuau

SEQ ID NO: 304832 - RNA, 19 nt, Homo sapiens
  misc_RNA (1)...(19): siRNA sense strand
uggaggcugugugugguua

SEQ ID NO: 304833 - RNA, 19 nt, Homo sapiens
  misc_RNA (1)...(19): siRNA sense strand
acccacaccuguccaccua

SEQ ID NO: 304834 - RNA, 19 nt, Homo sapiens
  misc_RNA (1)...(19): siRNA sense strand
ccagggagggugaacucua

SEQ ID NO: 304835 - RNA, 19 nt, Homo sapiens
  misc_RNA (1)...(19): siRNA sense strand
gcccagugcugugucuuca

SEQ ID NO: 304836 - RNA, 19 nt, Homo sapiens
  misc_RNA (1)...(19): siRNA sense strand
cagggagggugaacucuac

SEQ ID NO: 304837 - RNA, 19 nt, Homo sapiens
  misc_RNA (1)...(19): siRNA sense strand
ugacagaugaccuucucaa

SEQ ID NO: 304838 - RNA, 19 nt, Homo sapiens
  misc_RNA (1)...(19): siRNA sense strand
ggugacucgugcugugcua

SEQ ID NO: 304839 - RNA, 19 nt, Homo sapiens
  misc_RNA (1)...(19): siRNA sense strand
cgugugcuaucgucugaga

SEQ ID NO: 304840 - RNA, 19 nt, Homo sapiens
  misc_RNA (1)...(19): siRNA sense strand
ucgcagaggacgugugcua

SEQ ID NO: 304841 - RNA, 19 nt, Homo sapiens
  misc_RNA (1)...(19): siRNA sense strand
ggagcucuacgccuucuuc

SEQ ID NO: 304842 - RNA, 19 nt, Homo sapiens
  misc_RNA (1)...(19): siRNA sense strand
gagagaggccacgcagaau

SEQ ID NO: 304843 - RNA, 19 nt, Homo sapiens
  misc_RNA (1)...(19): siRNA sense strand
acuccugccuuacuuuguu

SEQ ID NO: 304844 - RNA, 19 nt, Homo sapiens
  misc_RNA (1)...(19): siRNA sense strand
acagaugaccuucucaagu

SEQ ID NO: 304845 - RNA, 19 nt, Homo sapiens
  misc_RNA (1)...(19): siRNA sense strand
ggcccuggcuaccaacauc

SEQ ID NO: 304846 - RNA, 19 nt, Homo sapiens
  misc_RNA (1)...(19): siRNA sense strand
gcugacggcaagcgccaua

SEQ ID NO: 304847 - RNA, 19 nt, Homo sapiens
  misc_RNA (1)...(19): siRNA sense strand
cggaggacccuucucuuuc

SEQ ID NO: 304848 - RNA, 19 nt, Homo sapiens
  misc_RNA (1)...(19): siRNA sense strand
cggagccuauuucguaauc

SEQ ID NO: 304849 - RNA, 19 nt, Homo sapiens
  misc_RNA (1)...(19): siRNA sense strand
guucaugaagcacaccaaa

SEQ ID NO: 304850 - RNA, 19 nt, Homo sapiens
  misc_RNA (1)...(19): siRNA sense strand
gagggugaacucuacuuuc

SEQ ID NO: 304851 - RNA, 19 nt, Homo sapiens
  misc_RNA (1)...(19): siRNA sense strand
ucagaguucaugucuccua

SEQ ID NO: 304852 - RNA, 19 nt, Homo sapiens
  misc_RNA (1)...(19): siRNA sense strand
ggugggcaguguccucuac

SEQ ID NO: 304853 - RNA, 19 nt, Homo sapiens
  misc_RNA (1)...(19): siRNA sense strand
ugugcuggaugauuauuca

SEQ ID NO: 304854 - RNA, 19 nt, Homo sapiens
  misc_RNA (1)...(19): siRNA sense strand
cacaucuucuggacucaug

SEQ ID NO: 304855 - RNA, 19 nt, Homo sapiens
  misc_RNA (1)...(19): siRNA sense strand
caguagaacgaguccugua

SEQ ID NO: 304856 - RNA, 19 nt, Homo sapiens
  misc_RNA (1)...(19): siRNA sense strand
cagaggacgugugcuaucg

SEQ ID NO: 304857 - RNA, 19 nt, Homo sapiens
  misc_RNA (1)...(19): siRNA sense strand
ucaacagggcccucagaug

SEQ ID NO: 304858 - RNA, 19 nt, Homo sapiens
  misc_RNA (1)...(19): siRNA sense strand
gacccuggccgacaucuac

SEQ ID NO: 304859 - RNA, 19 nt, Homo sapiens
  misc_RNA (1)...(19): siRNA sense strand
ugcaggcugugcuggauga

SEQ ID NO: 304860 - RNA, 19 nt, Homo sapiens
  misc_RNA (1)...(19): siRNA sense strand
gcugacgguugaggacuuc

SEQ ID NO: 304861 - RNA, 19 nt, Homo sapiens
  misc_RNA (1)...(19): siRNA sense strand
gcucugcugccacuaugga

SEQ ID NO: 304862 - RNA, 19 nt, Homo sapiens
  misc_RNA (1)...(19): siRNA sense strand
gugcagaacccagcuuugg

SEQ ID NO: 304863 - RNA, 19 nt, Homo sapiens
  misc_RNA (1)...(19): siRNA sense strand
ugggacagccuucucuuuc

SEQ ID NO: 304864 - RNA, 19 nt, Homo sapiens
  misc_RNA (1)...(19): siRNA sense strand
ccacaccuguccaccuacu

SEQ ID NO: 304865 - RNA, 19 nt, Homo sapiens
  misc_RNA (1)...(19): siRNA sense strand
gguggcacggagccuauuu

SEQ ID NO: 304866 - RNA, 19 nt, Homo sapiens
  misc_RNA (1)...(19): siRNA sense strand
cacuuucguuucaucauag

SEQ ID NO: 304867 - RNA, 19 nt, Homo sapiens
  misc_RNA (1)...(19): siRNA sense strand
uccaggacuugcagacgaa

SEQ ID NO: 304868 - RNA, 19 nt, Homo sapiens
  misc_RNA (1)...(19): siRNA sense strand
uaucuaaugcccaggucaa

SEQ ID NO: 304869 - RNA, 19 nt, Homo sapiens
  misc_RNA (1)...(19): siRNA sense strand
cuggaugauuauucaguau

SEQ ID NO: 304870 - RNA, 19 nt, Homo sapiens
  misc_RNA (1)...(19): siRNA sense strand
ccgcucugcugccacuaug

SEQ ID NO: 304871 - RNA, 19 nt, Homo sapiens
  misc_RNA (1)...(19): siRNA sense strand
gcaagauccuagggcguua

SEQ ID NO: 304872 - RNA, 19 nt, Homo sapiens
  misc_RNA (1)...(19): siRNA sense strand
cagaggcacuggagaaaga

SEQ ID NO: 304873 - RNA, 19 nt, Homo sapiens
  misc_RNA (1)...(19): siRNA sense strand
gaaauccaacgccagcuuu

SEQ ID NO: 304874 - RNA, 19 nt, Homo sapiens
  misc_RNA (1)...(19): siRNA sense strand
ggacugcuuugccuuccuu

SEQ ID NO: 304875 - RNA, 19 nt, Homo sapiens
  misc_RNA (1)...(19): siRNA sense strand
ucacggauccuuaagguau

SEQ ID NO: 304876 - RNA, 19 nt, Homo sapiens
  misc_RNA (1)...(19): siRNA sense strand
caacagaagagccaaaugg

SEQ ID NO: 304877 - RNA, 19 nt, Homo sapiens
  misc_RNA (1)...(19): siRNA sense strand
gagaagcucaagugggaaa

SEQ ID NO: 304878 - RNA, 19 nt, Homo sapiens
  misc_RNA (1)...(19): siRNA sense strand
ggaaauccaacgccagcuu

SEQ ID NO: 304879 - RNA, 19 nt, Homo sapiens
  misc_RNA (1)...(19): siRNA sense strand
ggcaagagaagcucaagug

SEQ ID NO: 304880 - RNA, 19 nt, Homo sapiens
  misc_RNA (1)...(19): siRNA sense strand
ccaaauggcgucggcaaga

SEQ ID NO: 304881 - RNA, 19 nt, Homo sapiens
  misc_RNA (1)...(19): siRNA sense strand
caaauggcgucggcaagag

SEQ ID NO: 304882 - RNA, 19 nt, Homo sapiens
  misc_RNA (1)...(19): siRNA sense strand
cccagugucuccuccauca

SEQ ID NO: 304883 - RNA, 19 nt, Homo sapiens
  misc_RNA (1)...(19): siRNA sense strand
gcucaggucaccagcuguu

SEQ ID NO: 304884 - RNA, 19 nt, Homo sapiens
  misc_RNA (1)...(19): siRNA sense strand
gauccuagggcguuacuac

SEQ ID NO: 304885 - RNA, 19 nt, Homo sapiens
  misc_RNA (1)...(19): siRNA sense strand
ggaaucggacuaucuucuc

SEQ ID NO: 304886 - RNA, 19 nt, Homo sapiens
  misc_RNA (1)...(19): siRNA sense strand
ucucacggauccuuaaggu

SEQ ID NO: 304887 - RNA, 19 nt, Homo sapiens
  misc_RNA (1)...(19): siRNA sense strand
gacaucucacggauccuua

SEQ ID NO: 304888 - RNA, 19 nt, Homo sapiens
  misc_RNA (1)...(19): siRNA sense strand
ggcaacagcaccagaaagg

SEQ ID NO: 304889 - RNA, 19 nt, Homo sapiens
  misc_RNA (1)...(19): siRNA sense strand
gaagcucaagugggaaaug

SEQ ID NO: 304890 - RNA, 19 nt, Homo sapiens
  misc_RNA (1)...(19): siRNA sense strand
ccaccuaaagccugucuca

SEQ ID NO: 304891 - RNA, 19 nt, Homo sapiens
  misc_RNA (1)...(19): siRNA sense strand
cgugggcaguauccugauu

SEQ ID NO: 304892 - RNA, 19 nt, Homo sapiens
  misc_RNA (1)...(19): siRNA sense strand
ugaguguccagcccucuuu

SEQ ID NO: 304893 - RNA, 19 nt, Homo sapiens
  misc_RNA (1)...(19): siRNA sense strand
gcagaggcacuggagaaag

SEQ ID NO: 304894 - RNA, 19 nt, Homo sapiens
  misc_RNA (1)...(19): siRNA sense strand
gauacccggcagcagauug

SEQ ID NO: 304895 - RNA, 19 nt, Homo sapiens
  misc_RNA (1)...(19): siRNA sense strand
gcuagcagucaguggaaug

SEQ ID NO: 304896 - RNA, 19 nt, Homo sapiens
  misc_RNA (1)...(19): siRNA sense strand
caagagagacgaagguauu

SEQ ID NO: 304897 - RNA, 19 nt, Homo sapiens
  misc_RNA (1)...(19): siRNA sense strand
gcacuacucagacaucuuc

SEQ ID NO: 304898 - RNA, 19 nt, Homo sapiens
  misc_RNA (1)...(19): siRNA sense strand
gcaaaauucuuggcaggua

SEQ ID NO: 304899 - RNA, 19 nt, Homo sapiens
  misc_RNA (1)...(19): siRNA sense strand
ccaacaagcgcaagagaga

SEQ ID NO: 304900 - RNA, 19 nt, Homo sapiens
  misc_RNA (1)...(19): siRNA sense strand
gagcagaccacagaguauu

SEQ ID NO: 304901 - RNA, 19 nt, Homo sapiens
  misc_RNA (1)...(19): siRNA sense strand
uaguggaacuugcucauca

SEQ ID NO: 304902 - RNA, 19 nt, Homo sapiens
  misc_RNA (1)...(19): siRNA sense strand
uggcagagcggguguguga

SEQ ID NO: 304903 - RNA, 19 nt, Homo sapiens
  misc_RNA (1)...(19): siRNA sense strand
gagcgggugugugacaaug

SEQ ID NO: 304904 - RNA, 19 nt, Homo sapiens
  misc_RNA (1)...(19): siRNA sense strand
gcaagagagacgaagguau

SEQ ID NO: 304905 - RNA, 19 nt, Homo sapiens
  misc_RNA (1)...(19): siRNA sense strand
gaauauaaacgccaaaauc

SEQ ID NO: 304906 - RNA, 19 nt, Homo sapiens
  misc_RNA (1)...(19): siRNA sense strand
ggacauggaggagugaauc

SEQ ID NO: 304907 - RNA, 19 nt, Homo sapiens
  misc_RNA (1)...(19): siRNA sense strand
gcagagcgggugugugaca

SEQ ID NO: 304908 - RNA, 19 nt, Homo sapiens
  misc_RNA (1)...(19): siRNA sense strand
uggcagguauuaugagaca

SEQ ID NO: 304909 - RNA, 19 nt, Homo sapiens
  misc_RNA (1)...(19): siRNA sense strand
cuacagccacccucaguau

SEQ ID NO: 304910 - RNA, 19 nt, Homo sapiens
  misc_RNA (1)...(19): siRNA sense strand
ucaguuccaucaacaggau

SEQ ID NO: 304911 - RNA, 19 nt, Homo sapiens
  misc_RNA (1)...(19): siRNA sense strand
caucaagccugggguaauu

SEQ ID NO: 304912 - RNA, 19 nt, Homo sapiens
  misc_RNA (1)...(19): siRNA sense strand
ccgagcagaccacagagua

SEQ ID NO: 304913 - RNA, 19 nt, Homo sapiens
  misc_RNA (1)...(19): siRNA sense strand
aaaggucgccacacccaaa

SEQ ID NO: 304914 - RNA, 19 nt, Homo sapiens
  misc_RNA (1)...(19): siRNA sense strand
ggugcuggaccgcguguuu

SEQ ID NO: 304915 - RNA, 19 nt, Homo sapiens
  misc_RNA (1)...(19): siRNA sense strand
gcagaccacagaguauuca

SEQ ID NO: 304916 - RNA, 19 nt, Homo sapiens
  misc_RNA (1)...(19): siRNA sense strand
ccaugguugugucagcaaa

SEQ ID NO: 304917 - RNA, 19 nt, Homo sapiens
  misc_RNA (1)...(19): siRNA sense strand
ggauggugccugggaguga

SEQ ID NO: 304918 - RNA, 19 nt, Homo sapiens
  misc_RNA (1)...(19): siRNA sense strand
cagcaggacaggacaugga

SEQ ID NO: 304919 - RNA, 19 nt, Homo sapiens
  misc_RNA (1)...(19): siRNA sense strand
agaggcagcacuacucaga

SEQ ID NO: 304920 - RNA, 19 nt, Homo sapiens
  misc_RNA (1)...(19): siRNA sense strand
caaaauucuuggcagguau

SEQ ID NO: 304921 - RNA, 19 nt, Homo sapiens
  misc_RNA (1)...(19): siRNA sense strand
guaguccgccagaggauag

SEQ ID NO: 304922 - RNA, 19 nt, Homo sapiens
  misc_RNA (1)...(19): siRNA sense strand
gcagcacuacucagacauc

SEQ ID NO: 304923 - RNA, 19 nt, Homo sapiens
  misc_RNA (1)...(19): siRNA sense strand
uaugagacaggaagcauca

SEQ ID NO: 304924 - RNA, 19 nt, Homo sapiens
  misc_RNA (1)...(19): siRNA sense strand
aggcagcacuacucagaca

SEQ ID NO: 304925 - RNA, 19 nt, Homo sapiens
  misc_RNA (1)...(19): siRNA sense strand
cagaggauaguggaacuug

SEQ ID NO: 304926 - RNA, 19 nt, Homo sapiens
  misc_RNA (1)...(19): siRNA sense strand
cagccgccacugccuauga

SEQ ID NO: 304927 - RNA, 19 nt, Homo sapiens
  misc_RNA (1)...(19): siRNA sense strand
ugugacaggccgugacuug

SEQ ID NO: 304928 - RNA, 19 nt, Homo sapiens
  misc_RNA (1)...(19): siRNA sense strand
gaucauccggacaaaagua

SEQ ID NO: 304929 - RNA, 19 nt, Homo sapiens
  misc_RNA (1)...(19): siRNA sense strand
uagcgucaguuccaucaac

SEQ ID NO: 304930 - RNA, 19 nt, Homo sapiens
  misc_RNA (1)...(19): siRNA sense strand
gccaaaaucccaccauguu

SEQ ID NO: 304931 - RNA, 19 nt, Homo sapiens
  misc_RNA (1)...(19): siRNA sense strand
cuuggcagguauuaugaga

SEQ ID NO: 304932 - RNA, 19 nt, Homo sapiens
  misc_RNA (1)...(19): siRNA sense strand
gauaguggaacuugcucau

SEQ ID NO: 304933 - RNA, 19 nt, Homo sapiens
  misc_RNA (1)...(19): siRNA sense strand
ccaaaaucccaccauguuu

SEQ ID NO: 304934 - RNA, 19 nt, Homo sapiens
  misc_RNA (1)...(19): siRNA sense strand
acagccacccucaguauuc

SEQ ID NO: 304935 - RNA, 19 nt, Homo sapiens
  misc_RNA (1)...(19): siRNA sense strand
cgacaugaaggccaaucug

SEQ ID NO: 304936 - RNA, 19 nt, Homo sapiens
  misc_RNA (1)...(19): siRNA sense strand
gccagaggauaguggaacu

SEQ ID NO: 304937 - RNA, 19 nt, Homo sapiens
  misc_RNA (1)...(19): siRNA sense strand
cgagcagaccacagaguau

SEQ ID NO: 304938 - RNA, 19 nt, Homo sapiens
  misc_RNA (1)...(19): siRNA sense strand
gcaagauccuggcgcgaua

SEQ ID NO: 304939 - RNA, 19 nt, Homo sapiens
  misc_RNA (1)...(19): siRNA sense strand
gcaacaagaucggcaacuu

SEQ ID NO: 304940 - RNA, 19 nt, Homo sapiens
  misc_RNA (1)...(19): siRNA sense strand
gaagguagucauucuguca

SEQ ID NO: 304941 - RNA, 19 nt, Homo sapiens
  misc_RNA (1)...(19): siRNA sense strand
cauccagcauggcuccuua

SEQ ID NO: 304942 - RNA, 19 nt, Homo sapiens
  misc_RNA (1)...(19): siRNA sense strand
cggcaucgcuggcguucaa

SEQ ID NO: 304943 - RNA, 19 nt, Homo sapiens
  misc_RNA (1)...(19): siRNA sense strand
gugcugcuccuucugguua

SEQ ID NO: 304944 - RNA, 19 nt, Homo sapiens
  misc_RNA (1)...(19): siRNA sense strand
cagcccaagugucgccuua

SEQ ID NO: 304945 - RNA, 19 nt, Homo sapiens
  misc_RNA (1)...(19): siRNA sense strand
ugaaacacauccggaccua

SEQ ID NO: 304946 - RNA, 19 nt, Homo sapiens
  misc_RNA (1)...(19): siRNA sense strand
acaaccacaucuacucgua

SEQ ID NO: 304947 - RNA, 19 nt, Homo sapiens
  misc_RNA (1)...(19): siRNA sense strand
gcagggucauuacgacuca

SEQ ID NO: 304948 - RNA, 19 nt, Homo sapiens
  misc_RNA (1)...(19): siRNA sense strand
ggaccuacaagcagagaga

SEQ ID NO: 304949 - RNA, 19 nt, Homo sapiens
  misc_RNA (1)...(19): siRNA sense strand
cuacagugcugcuccuucu

SEQ ID NO: 304950 - RNA, 19 nt, Homo sapiens
  misc_RNA (1)...(19): siRNA sense strand
ccaagugucgccuuacaug

SEQ ID NO: 304951 - RNA, 19 nt, Homo sapiens
  misc_RNA (1)...(19): siRNA sense strand
ugacaucagccgccagcua

SEQ ID NO: 304952 - RNA, 19 nt, Homo sapiens
  misc_RNA (1)...(19): siRNA sense strand
gaaugcaggcagccagaga

SEQ ID NO: 304953 - RNA, 19 nt, Homo sapiens
  misc_RNA (1)...(19): siRNA sense strand
gcccaagugucgccuuaca

SEQ ID NO: 304954 - RNA, 19 nt, Homo sapiens
  misc_RNA (1)...(19): siRNA sense strand
aaacacauccggaccuaca

SEQ ID NO: 304955 - RNA, 19 nt, Homo sapiens
  misc_RNA (1)...(19): siRNA sense strand
gcaggcagccagagaaggu

SEQ ID NO: 304956 - RNA, 19 nt, Homo sapiens
  misc_RNA (1)...(19): siRNA sense strand
agccagcgcugcccuacaa

SEQ ID NO: 304957 - RNA, 19 nt, Homo sapiens
  misc_RNA (1)...(19): siRNA sense strand
caagugucgccuuacauga

SEQ ID NO: 304958 - RNA, 19 nt, Homo sapiens
  misc_RNA (1)...(19): siRNA sense strand
ccagagaagguagucauuc

SEQ ID NO: 304959 - RNA, 19 nt, Homo sapiens
  misc_RNA (1)...(19): siRNA sense strand
ugggaggaguguucgugaa

SEQ ID NO: 304960 - RNA, 19 nt, Homo sapiens
  misc_RNA (1)...(19): siRNA sense strand
gccagagaagguagucauu

SEQ ID NO: 304961 - RNA, 19 nt, Homo sapiens
  misc_RNA (1)...(19): siRNA sense strand
gauccuggcgcgauacaac

SEQ ID NO: 304962 - RNA, 19 nt, Homo sapiens
  misc_RNA (1)...(19): siRNA sense strand
gcauucugcgcaacaagau

SEQ ID NO: 304963 - RNA, 19 nt, Homo sapiens
  misc_RNA (1)...(19): siRNA sense strand
gucauuacgacucauacaa

SEQ ID NO: 304964 - RNA, 19 nt, Homo sapiens
  misc_RNA (1)...(19): siRNA sense strand
gaacucaccauuccaaaua

SEQ ID NO: 304965 - RNA, 19 nt, Homo sapiens
  misc_RNA (1)...(19): siRNA sense strand
gaaaguggacuaaauguga

SEQ ID NO: 304966 - RNA, 19 nt, Homo sapiens
  misc_RNA (1)...(19): siRNA sense strand
uaacuuaauuggcugcaua

SEQ ID NO: 304967 - RNA, 19 nt, Homo sapiens
  misc_RNA (1)...(19): siRNA sense strand
guggaaggcuccucuggua

SEQ ID NO: 304968 - RNA, 19 nt, Homo sapiens
  misc_RNA (1)...(19): siRNA sense strand
gaaguaggaagcaucauug

SEQ ID NO: 304969 - RNA, 19 nt, Homo sapiens
  misc_RNA (1)...(19): siRNA sense strand
ggaaguaggaagcaucauu

SEQ ID NO: 304970 - RNA, 19 nt, Homo sapiens
  misc_RNA (1)...(19): siRNA sense strand
gguguaagaucaaagagau

SEQ ID NO: 304971 - RNA, 19 nt, Homo sapiens
  misc_RNA (1)...(19): siRNA sense strand
ggaauuguccggagagaau

SEQ ID NO: 304972 - RNA, 19 nt, Homo sapiens
  misc_RNA (1)...(19): siRNA sense strand
gauaucaacagcuccauga

SEQ ID NO: 304973 - RNA, 19 nt, Homo sapiens
  misc_RNA (1)...(19): siRNA sense strand
gaaaggcuauugggcaagu

SEQ ID NO: 304974 - RNA, 19 nt, Homo sapiens
  misc_RNA (1)...(19): siRNA sense strand
gggaaaggcggguguaaga

SEQ ID NO: 304975 - RNA, 19 nt, Homo sapiens
  misc_RNA (1)...(19): siRNA sense strand
ccaccaaugccaucuuuaa

SEQ ID NO: 304976 - RNA, 19 nt, Homo sapiens
  misc_RNA (1)...(19): siRNA sense strand
gcacggaaaggaaguagga

SEQ ID NO: 304977 - RNA, 19 nt, Homo sapiens
  misc_RNA (1)...(19): siRNA sense strand
uuaauuggcugcauaaucg

SEQ ID NO: 304978 - RNA, 19 nt, Homo sapiens
  misc_RNA (1)...(19): siRNA sense strand
gaaaggaaguaggaagcau

SEQ ID NO: 304979 - RNA, 19 nt, Homo sapiens
  misc_RNA (1)...(19): siRNA sense strand
gacugaaaguggacuaaau

SEQ ID NO: 304980 - RNA, 19 nt, Homo sapiens
  misc_RNA (1)...(19): siRNA sense strand
gaaaggcggguguaagauc

SEQ ID NO: 304981 - RNA, 19 nt, Homo sapiens
  misc_RNA (1)...(19): siRNA sense strand
aaagagauccgcgagagua

SEQ ID NO: 304982 - RNA, 19 nt, Homo sapiens
  misc_RNA (1)...(19): siRNA sense strand
gggagucgguuaagaggau

SEQ ID NO: 304983 - RNA, 19 nt, Homo sapiens
  misc_RNA (1)...(19): siRNA sense strand
ucgacaagcuggaggaaga

SEQ ID NO: 304984 - RNA, 19 nt, Homo sapiens
  misc_RNA (1)...(19): siRNA sense strand
ggacuaaaugugacucuca

SEQ ID NO: 304985 - RNA, 19 nt, Homo sapiens
  misc_RNA (1)...(19): siRNA sense strand
cuagaugccuacucgauuc

SEQ ID NO: 304986 - RNA, 19 nt, Homo sapiens
  misc_RNA (1)...(19): siRNA sense strand
gcgccaacauuaaugagau

SEQ ID NO: 304987 - RNA, 19 nt, Homo sapiens
  misc_RNA (1)...(19): siRNA sense strand
gaagcaucauugggaagaa

SEQ ID NO: 304988 - RNA, 19 nt, Homo sapiens
  misc_RNA (1)...(19): siRNA sense strand
caaggacaacacaccauuu

SEQ ID NO: 304989 - RNA, 19 nt, Homo sapiens
  misc_RNA (1)...(19): siRNA sense strand
ggaagcaucauugggaaga

SEQ ID NO: 304990 - RNA, 19 nt, Homo sapiens
  misc_RNA (1)...(19): siRNA sense strand
ggacaacacaccauuucuc

SEQ ID NO: 304991 - RNA, 19 nt, Homo sapiens
  misc_RNA (1)...(19): siRNA sense strand
gggauaugcugcccaacuc

SEQ ID NO: 304992 - RNA, 19 nt, Homo sapiens
  misc_RNA (1)...(19): siRNA sense strand
aaaggcggguguaagauca

SEQ ID NO: 304993 - RNA, 19 nt, Homo sapiens
  misc_RNA (1)...(19): siRNA sense strand
caccauuccaaauaacuua

SEQ ID NO: 304994 - RNA, 19 nt, Homo sapiens
  misc_RNA (1)...(19): siRNA sense strand
ugaaccagguggcaagaca

SEQ ID NO: 304995 - RNA, 19 nt, Homo sapiens
  misc_RNA (1)...(19): siRNA sense strand
cagugcggcucccugauug

SEQ ID NO: 304996 - RNA, 19 nt, Homo sapiens
  misc_RNA (1)...(19): siRNA sense strand
uuaaugagauccgccagau

SEQ ID NO: 304997 - RNA, 19 nt, Homo sapiens
  misc_RNA (1)...(19): siRNA sense strand
ccagugcggcucccugauu

SEQ ID NO: 304998 - RNA, 19 nt, Homo sapiens
  misc_RNA (1)...(19): siRNA sense strand
ucaaggacaacacaccauu

SEQ ID NO: 304999 - RNA, 19 nt, Homo sapiens
  misc_RNA (1)...(19): siRNA sense strand
cuacucaaaccacccauga

SEQ ID NO: 305000 - RNA, 19 nt, Homo sapiens
  misc_RNA (1)...(19): siRNA sense strand
cuuuaaggcuuucgcuaug

SEQ ID NO: 305001 - RNA, 19 nt, Homo sapiens
  misc_RNA (1)...(19): siRNA sense strand
uuggaugcaucuacucaaa

SEQ ID NO: 305002 - RNA, 19 nt, Homo sapiens
  misc_RNA (1)...(19): siRNA sense strand
gaaccagguggcaagacaa

SEQ ID NO: 305003 - RNA, 19 nt, Homo sapiens
  misc_RNA (1)...(19): siRNA sense strand
ccauucggcuucuuaugca

SEQ ID NO: 305004 - RNA, 19 nt, Homo sapiens
  misc_RNA (1)...(19): siRNA sense strand
gggagagucaugaccauuc

SEQ ID NO: 305005 - RNA, 19 nt, Homo sapiens
  misc_RNA (1)...(19): siRNA sense strand
gagugugucaagcagauuu

SEQ ID NO: 305006 - RNA, 19 nt, Homo sapiens
  misc_RNA (1)...(19): siRNA sense strand
cccaguaucuaaucaaugc

SEQ ID NO: 305007 - RNA, 19 nt, Homo sapiens
  misc_RNA (1)...(19): siRNA sense strand
ggcccaguaucuaaucaau

SEQ ID NO: 305008 - RNA, 19 nt, Homo sapiens
  misc_RNA (1)...(19): siRNA sense strand
aaugagauccgccagaugu

SEQ ID NO: 305009 - RNA, 19 nt, Homo sapiens
  misc_RNA (1)...(19): siRNA sense strand
ggaaaggcggguguaagau

SEQ ID NO: 305010 - RNA, 19 nt, Homo sapiens
  misc_RNA (1)...(19): siRNA sense strand
aagcaucauugggaagaaa

SEQ ID NO: 305011 - RNA, 19 nt, Homo sapiens
  misc_RNA (1)...(19): siRNA sense strand
gguaggcagguuacuauca

SEQ ID NO: 305012 - RNA, 19 nt, Homo sapiens
  misc_RNA (1)...(19): siRNA sense strand
ggaaaggaaguaggaagca

SEQ ID NO: 305013 - RNA, 19 nt, Homo sapiens
  misc_RNA (1)...(19): siRNA sense strand
guaggcagguuacuaucac

SEQ ID NO: 305014 - RNA, 19 nt, Homo sapiens
  misc_RNA (1)...(19): siRNA sense strand
ggagagucaugaccauucc

SEQ ID NO: 305015 - RNA, 19 nt, Homo sapiens
  misc_RNA (1)...(19): siRNA sense strand
augccaggcuuuccucuga

SEQ ID NO: 305016 - RNA, 19 nt, Homo sapiens
  misc_RNA (1)...(19): siRNA sense strand
gccaggcuuuccucugaga

SEQ ID NO: 305017 - RNA, 19 nt, Homo sapiens
  misc_RNA (1)...(19): siRNA sense strand
ggaugcaucuacucaaacc

SEQ ID NO: 305018 - RNA, 19 nt, Homo sapiens
  misc_RNA (1)...(19): siRNA sense strand
caugaacucaccauuccaa

SEQ ID NO: 305019 - RNA, 19 nt, Homo sapiens
  misc_RNA (1)...(19): siRNA sense strand
ggaugccggugugacugaa

SEQ ID NO: 305020 - RNA, 19 nt, Homo sapiens
  misc_RNA (1)...(19): siRNA sense strand
ugaaaguggacuaaaugug

SEQ ID NO: 305021 - RNA, 19 nt, Homo sapiens
  misc_RNA (1)...(19): siRNA sense strand
ucaaaccacccaugaacuc

SEQ ID NO: 305022 - RNA, 19 nt, Homo sapiens
  misc_RNA (1)...(19): siRNA sense strand
ccgagugugucaagcagau

SEQ ID NO: 305023 - RNA, 19 nt, Homo sapiens
  misc_RNA (1)...(19): siRNA sense strand
gacaagcuggaggaagaua

SEQ ID NO: 305024 - RNA, 19 nt, Homo sapiens
  misc_RNA (1)...(19): siRNA sense strand
ucgcuaugaucaucgacaa

SEQ ID NO: 305025 - RNA, 19 nt, Homo sapiens
  misc_RNA (1)...(19): siRNA sense strand
uuuaaggcuuucgcuauga

SEQ ID NO: 305026 - RNA, 19 nt, Homo sapiens
  misc_RNA (1)...(19): siRNA sense strand
uuaaggcuuucgcuaugau

SEQ ID NO: 305027 - RNA, 19 nt, Homo sapiens
  misc_RNA (1)...(19): siRNA sense strand
aacucaccauuccaaauaa

SEQ ID NO: 305028 - RNA, 19 nt, Homo sapiens
  misc_RNA (1)...(19): siRNA sense strand
gcggguguaagaucaaaga

SEQ ID NO: 305029 - RNA, 19 nt, Homo sapiens
  misc_RNA (1)...(19): siRNA sense strand
ugacugaaaguggacuaaa

SEQ ID NO: 305030 - RNA, 19 nt, Homo sapiens
  misc_RNA (1)...(19): siRNA sense strand
caaagagauccgcgagagu

SEQ ID NO: 305031 - RNA, 19 nt, Homo sapiens
  misc_RNA (1)...(19): siRNA sense strand
ugaacucaccauuccaaau

SEQ ID NO: 305032 - RNA, 19 nt, Homo sapiens
  misc_RNA (1)...(19): siRNA sense strand
cagucucacuuugccauga

SEQ ID NO: 305033 - RNA, 19 nt, Homo sapiens
  misc_RNA (1)...(19): siRNA sense strand
gacaacagucucacuuugc

SEQ ID NO: 305034 - RNA, 19 nt, Homo sapiens
  misc_RNA (1)...(19): siRNA sense strand
cuacucgauucaaggacaa

SEQ ID NO: 305035 - RNA, 19 nt, Homo sapiens
  misc_RNA (1)...(19): siRNA sense strand
ucuagaugccuacucgauu

SEQ ID NO: 305036 - RNA, 19 nt, Homo sapiens
  misc_RNA (1)...(19): siRNA sense strand
gcagauuugccuggucaug

SEQ ID NO: 305037 - RNA, 19 nt, Homo sapiens
  misc_RNA (1)...(19): siRNA sense strand
gaugccuacucgauucaag

SEQ ID NO: 305038 - RNA, 19 nt, Homo sapiens
  misc_RNA (1)...(19): siRNA sense strand
ggguguaagaucaaagaga

SEQ ID NO: 305039 - RNA, 19 nt, Homo sapiens
  misc_RNA (1)...(19): siRNA sense strand
caaaccacccaugaacuca

SEQ ID NO: 305040 - RNA, 19 nt, Homo sapiens
  misc_RNA (1)...(19): siRNA sense strand
caagcuggaggaagauauc

SEQ ID NO: 305041 - RNA, 19 nt, Homo sapiens
  misc_RNA (1)...(19): siRNA sense strand
cccaugaacucaccauucc

SEQ ID NO: 305042 - RNA, 19 nt, Homo sapiens
  misc_RNA (1)...(19): siRNA sense strand
acugaaaguggacuaaaug

SEQ ID NO: 305043 - RNA, 19 nt, Homo sapiens
  misc_RNA (1)...(19): siRNA sense strand
acaaggaccugaagcagua

SEQ ID NO: 305044 - RNA, 19 nt, Homo sapiens
  misc_RNA (1)...(19): siRNA sense strand
ucaccaagcuguugcaguu

SEQ ID NO: 305045 - RNA, 19 nt, Homo sapiens
  misc_RNA (1)...(19): siRNA sense strand
uaaaggagauucagcuaca

SEQ ID NO: 305046 - RNA, 19 nt, Homo sapiens
  misc_RNA (1)...(19): siRNA sense strand
ccaagucaaucccaacaaa

SEQ ID NO: 305047 - RNA, 19 nt, Homo sapiens
  misc_RNA (1)...(19): siRNA sense strand
caacaaagacauacuccaa

SEQ ID NO: 305048 - RNA, 19 nt, Homo sapiens
  misc_RNA (1)...(19): siRNA sense strand
caugaaacauccauucuuc

SEQ ID NO: 305049 - RNA, 19 nt, Homo sapiens
  misc_RNA (1)...(19): siRNA sense strand
aaagcaagcucacagacaa

SEQ ID NO: 305050 - RNA, 19 nt, Homo sapiens
  misc_RNA (1)...(19): siRNA sense strand
ggacuacuccacucagauu

SEQ ID NO: 305051 - RNA, 19 nt, Homo sapiens
  misc_RNA (1)...(19): siRNA sense strand
gagaagcugacccucaaua

SEQ ID NO: 305052 - RNA, 19 nt, Homo sapiens
  misc_RNA (1)...(19): siRNA sense strand
ccacucagauugacaugug

SEQ ID NO: 305053 - RNA, 19 nt, Homo sapiens
  misc_RNA (1)...(19): siRNA sense strand
caacaagcgccuaucacua

SEQ ID NO: 305054 - RNA, 19 nt, Homo sapiens
  misc_RNA (1)...(19): siRNA sense strand
acaaagacauacuccaaug

SEQ ID NO: 305055 - RNA, 19 nt, Homo sapiens
  misc_RNA (1)...(19): siRNA sense strand
gaggugcagucuccaguga

SEQ ID NO: 305056 - RNA, 19 nt, Homo sapiens
  misc_RNA (1)...(19): siRNA sense strand
acgaggaguucaagacaua

SEQ ID NO: 305057 - RNA, 19 nt, Homo sapiens
  misc_RNA (1)...(19): siRNA sense strand
aaacuggagaccuacauua

SEQ ID NO: 305058 - RNA, 19 nt, Homo sapiens
  misc_RNA (1)...(19): siRNA sense strand
ccaaugagguggugacacu

SEQ ID NO: 305059 - RNA, 19 nt, Homo sapiens
  misc_RNA (1)...(19): siRNA sense strand
caacaugcacaacgugaaa

SEQ ID NO: 305060 - RNA, 19 nt, Homo sapiens
  misc_RNA (1)...(19): siRNA sense strand
gagauuggcuuugggaaac

SEQ ID NO: 305061 - RNA, 19 nt, Homo sapiens
  misc_RNA (1)...(19): siRNA sense strand
gagcggauccacaaacuuc

SEQ ID NO: 305062 - RNA, 19 nt, Homo sapiens
  misc_RNA (1)...(19): siRNA sense strand
gaaacuggagaccuacauu

SEQ ID NO: 305063 - RNA, 19 nt, Homo sapiens
  misc_RNA (1)...(19): siRNA sense strand
gaacagcuacacuucaucu

SEQ ID NO: 305064 - RNA, 19 nt, Homo sapiens
  misc_RNA (1)...(19): siRNA sense strand
acauuaagcuggacaaacu

SEQ ID NO: 305065 - RNA, 19 nt, Homo sapiens
  misc_RNA (1)...(19): siRNA sense strand
ccacugaggacaucaacaa

SEQ ID NO: 305066 - RNA, 19 nt, Homo sapiens
  misc_RNA (1)...(19): siRNA sense strand
caaagacauacuccaauga

SEQ ID NO: 305067 - RNA, 19 nt, Homo sapiens
  misc_RNA (1)...(19): siRNA sense strand
gaucagacuggaacaugaa

SEQ ID NO: 305068 - RNA, 19 nt, Homo sapiens
  misc_RNA (1)...(19): siRNA sense strand
aaacggcagcugucaauga

SEQ ID NO: 305069 - RNA, 19 nt, Homo sapiens
  misc_RNA (1)...(19): siRNA sense strand
uggagaagcugacccucaa

SEQ ID NO: 305070 - RNA, 19 nt, Homo sapiens
  misc_RNA (1)...(19): siRNA sense strand
caaacacgccaacaucguu

SEQ ID NO: 305071 - RNA, 19 nt, Homo sapiens
  misc_RNA (1)...(19): siRNA sense strand
gcacgaggacuugaagaug

SEQ ID NO: 305072 - RNA, 19 nt, Homo sapiens
  misc_RNA (1)...(19): siRNA sense strand
aaacacgccaacaucguua

SEQ ID NO: 305073 - RNA, 19 nt, Homo sapiens
  misc_RNA (1)...(19): siRNA sense strand
ggaggaacagcuacacuuc

SEQ ID NO: 305074 - RNA, 19 nt, Homo sapiens
  misc_RNA (1)...(19): siRNA sense strand
uugaguaccuggacaagga

SEQ ID NO: 305075 - RNA, 19 nt, Homo sapiens
  misc_RNA (1)...(19): siRNA sense strand
gcacaacgugaaacuguuc

SEQ ID NO: 305076 - RNA, 19 nt, Homo sapiens
  misc_RNA (1)...(19): siRNA sense strand
cacgcaagaucuccacuga

SEQ ID NO: 305077 - RNA, 19 nt, Homo sapiens
  misc_RNA (1)...(19): siRNA sense strand
agaagucccucacccuugu

SEQ ID NO: 305078 - RNA, 19 nt, Homo sapiens
  misc_RNA (1)...(19): siRNA sense strand
cgcagaggaugccaugaaa

SEQ ID NO: 305079 - RNA, 19 nt, Homo sapiens
  misc_RNA (1)...(19): siRNA sense strand
ccaagcuguugcaguuuga

SEQ ID NO: 305080 - RNA, 19 nt, Homo sapiens
  misc_RNA (1)...(19): siRNA sense strand
caacaucguuacgcuacau

SEQ ID NO: 305081 - RNA, 19 nt, Homo sapiens
  misc_RNA (1)...(19): siRNA sense strand
caucuuccguaucuuagga

SEQ ID NO: 305082 - RNA, 19 nt, Homo sapiens
  misc_RNA (1)...(19): siRNA sense strand
ggugugggcugcaucuucu

SEQ ID NO: 305083 - RNA, 19 nt, Homo sapiens
  misc_RNA (1)...(19): siRNA sense strand
cccagaaccugcucaucaa

SEQ ID NO: 305084 - RNA, 19 nt, Homo sapiens
  misc_RNA (1)...(19): siRNA sense strand
gaucuccacugaggacauc

SEQ ID NO: 305085 - RNA, 19 nt, Homo sapiens
  misc_RNA (1)...(19): siRNA sense strand
caacgaggaguucaagaca

SEQ ID NO: 305086 - RNA, 19 nt, Homo sapiens
  misc_RNA (1)...(19): siRNA sense strand
uugggaaacuggagaccua

SEQ ID NO: 305087 - RNA, 19 nt, Homo sapiens
  misc_RNA (1)...(19): siRNA sense strand
cuucaucuuccguaucuua

SEQ ID NO: 305088 - RNA, 19 nt, Homo sapiens
  misc_RNA (1)...(19): siRNA sense strand
ggcugcaucuucuaugaga

SEQ ID NO: 305089 - RNA, 19 nt, Homo sapiens
  misc_RNA (1)...(19): siRNA sense strand
ggaacaucaucaacaugca

SEQ ID NO: 305090 - RNA, 19 nt, Homo sapiens
  misc_RNA (1)...(19): siRNA sense strand
agaucagacuggaacauga

SEQ ID NO: 305091 - RNA, 19 nt, Homo sapiens
  misc_RNA (1)...(19): siRNA sense strand
gagaucagacuggaacaug

SEQ ID NO: 305092 - RNA, 19 nt, Homo sapiens
  misc_RNA (1)...(19): siRNA sense strand
gugggaacaucaucaacau

SEQ ID NO: 305093 - RNA, 19 nt, Homo sapiens
  misc_RNA (1)...(19): siRNA sense strand
guaccuaugccaccgucua

SEQ ID NO: 305094 - RNA, 19 nt, Homo sapiens
  misc_RNA (1)...(19): siRNA sense strand
cagaggaugccaugaaaca

SEQ ID NO: 305095 - RNA, 19 nt, Homo sapiens
  misc_RNA (1)...(19): siRNA sense strand
gcucaagcuggcugacuuu

SEQ ID NO: 305096 - RNA, 19 nt, Homo sapiens
  misc_RNA (1)...(19): siRNA sense strand
ucaaacggcagcugucaau

SEQ ID NO: 305097 - RNA, 19 nt, Homo sapiens
  misc_RNA (1)...(19): siRNA sense strand
gaggaacagcuacacuuca

SEQ ID NO: 305098 - RNA, 19 nt, Homo sapiens
  misc_RNA (1)...(19): siRNA sense strand
gaucaaacggcagcuguca

SEQ ID NO: 305099 - RNA, 19 nt, Homo sapiens
  misc_RNA (1)...(19): siRNA sense strand
ggaagugucccugcucaag

SEQ ID NO: 305100 - RNA, 19 nt, Homo sapiens
  misc_RNA (1)...(19): siRNA sense strand
gggagcggauccacaaacu

SEQ ID NO: 305101 - RNA, 19 nt, Homo sapiens
  misc_RNA (1)...(19): siRNA sense strand
caucaacaagcgccuauca

SEQ ID NO: 305102 - RNA, 19 nt, Homo sapiens
  misc_RNA (1)...(19): siRNA sense strand
ugagauuggcuuugggaaa

SEQ ID NO: 305103 - RNA, 19 nt, Homo sapiens
  misc_RNA (1)...(19): siRNA sense strand
ccgcagaggaugccaugaa

SEQ ID NO: 305104 - RNA, 19 nt, Homo sapiens
  misc_RNA (1)...(19): siRNA sense strand
ucacccuugucuuugagua

SEQ ID NO: 305105 - RNA, 19 nt, Homo sapiens
  misc_RNA (1)...(19): siRNA sense strand
ugaagcaguaccuggauga

SEQ ID NO: 305106 - RNA, 19 nt, Homo sapiens
  misc_RNA (1)...(19): siRNA sense strand
ccaugaaacauccauucuu

SEQ ID NO: 305107 - RNA, 19 nt, Homo sapiens
  misc_RNA (1)...(19): siRNA sense strand
gcaguuugagggucgaaau

SEQ ID NO: 305108 - RNA, 19 nt, Homo sapiens
  misc_RNA (1)...(19): siRNA sense strand
guucaagacauacaacuac

SEQ ID NO: 305109 - RNA, 19 nt, Homo sapiens
  misc_RNA (1)...(19): siRNA sense strand
ggaugaagaagaucaaacg

SEQ ID NO: 305110 - RNA, 19 nt, Homo sapiens
  misc_RNA (1)...(19): siRNA sense strand
aggaacagcuacacuucau

SEQ ID NO: 305111 - RNA, 19 nt, Homo sapiens
  misc_RNA (1)...(19): siRNA sense strand
ggaaacuggagaccuacau

SEQ ID NO: 305112 - RNA, 19 nt, Homo sapiens
  misc_RNA (1)...(19): siRNA sense strand
ugggcugcaucuucuauga

SEQ ID NO: 305113 - RNA, 19 nt, Homo sapiens
  misc_RNA (1)...(19): siRNA sense strand
ccucaaacacgccaacauc

SEQ ID NO: 305114 - RNA, 19 nt, Homo sapiens
  misc_RNA (1)...(19): siRNA sense strand
gaagcugacccucaauagc

SEQ ID NO: 305115 - RNA, 19 nt, Homo sapiens
  misc_RNA (1)...(19): siRNA sense strand
aaaggagauucagcuacaa

SEQ ID NO: 305116 - RNA, 19 nt, Homo sapiens
  misc_RNA (1)...(19): siRNA sense strand
cacuucaucuuccguaucu

SEQ ID NO: 305117 - RNA, 19 nt, Homo sapiens
  misc_RNA (1)...(19): siRNA sense strand
agaaccugcucaucaacga

SEQ ID NO: 305118 - RNA, 19 nt, Homo sapiens
  misc_RNA (1)...(19): siRNA sense strand
aacuggagaccuacauuaa

SEQ ID NO: 305119 - RNA, 19 nt, Homo sapiens
  misc_RNA (1)...(19): siRNA sense strand
uuccauauuugcacuaaag

SEQ ID NO: 305120 - RNA, 19 nt, Homo sapiens
  misc_RNA (1)...(19): siRNA sense strand
acgugaaacuguuccuguu

SEQ ID NO: 305121 - RNA, 19 nt, Homo sapiens
  misc_RNA (1)...(19): siRNA sense strand
gucccucacccuugucuuu

SEQ ID NO: 305122 - RNA, 19 nt, Homo sapiens
  misc_RNA (1)...(19): siRNA sense strand
ccagugagagugcguaugc

SEQ ID NO: 305123 - RNA, 19 nt, Homo sapiens
  misc_RNA (1)...(19): siRNA sense strand
gcucaaggaccucaaacac

SEQ ID NO: 305124 - RNA, 19 nt, Homo sapiens
  misc_RNA (1)...(19): siRNA sense strand
aagugucccugcucaagga

SEQ ID NO: 305125 - RNA, 19 nt, Homo sapiens
  misc_RNA (1)...(19): siRNA sense strand
ucaacaagcgccuaucacu

SEQ ID NO: 305126 - RNA, 19 nt, Homo sapiens
  misc_RNA (1)...(19): siRNA sense strand
accaagcuguugcaguuug

SEQ ID NO: 305127 - RNA, 19 nt, Homo sapiens
  misc_RNA (1)...(19): siRNA sense strand
gcaaaagcaagcucacaga

SEQ ID NO: 305128 - RNA, 19 nt, Homo sapiens
  misc_RNA (1)...(19): siRNA sense strand
ccacggacuacuccacuca

SEQ ID NO: 305129 - RNA, 19 nt, Homo sapiens
  misc_RNA (1)...(19): siRNA sense strand
aacaagcgccuaucacuac

SEQ ID NO: 305130 - RNA, 19 nt, Homo sapiens
  misc_RNA (1)...(19): siRNA sense strand
caagcucacagacaaccuu

SEQ ID NO: 305131 - RNA, 19 nt, Homo sapiens
  misc_RNA (1)...(19): siRNA sense strand
gacaucaacaagcgccuau

SEQ ID NO: 305132 - RNA, 19 nt, Homo sapiens
  misc_RNA (1)...(19): siRNA sense strand
uauuugcacuaaaggagau

SEQ ID NO: 305133 - RNA, 19 nt, Homo sapiens
  misc_RNA (1)...(19): siRNA sense strand
ggagcggauccacaaacuu

SEQ ID NO: 305134 - RNA, 19 nt, Homo sapiens
  misc_RNA (1)...(19): siRNA sense strand
cuggagaccuacauuaagc

SEQ ID NO: 305135 - RNA, 19 nt, Homo sapiens
  misc_RNA (1)...(19): siRNA sense strand
aaagacauacuccaaugag

SEQ ID NO: 305136 - RNA, 19 nt, Homo sapiens
  misc_RNA (1)...(19): siRNA sense strand
ggagagugaccaggcuuca

SEQ ID NO: 305137 - RNA, 19 nt, Homo sapiens
  misc_RNA (1)...(19): siRNA sense strand
caagucaaucccaacaaag

SEQ ID NO: 305138 - RNA, 19 nt, Homo sapiens
  misc_RNA (1)...(19): siRNA sense strand
aagucaaucccaacaaaga

SEQ ID NO: 305139 - RNA, 19 nt, Homo sapiens
  misc_RNA (1)...(19): siRNA sense strand
caaucccaacaaagacaua

SEQ ID NO: 305140 - RNA, 19 nt, Homo sapiens
  misc_RNA (1)...(19): siRNA sense strand
acaaggaccugaagcagua

SEQ ID NO: 305141 - RNA, 19 nt, Homo sapiens
  misc_RNA (1)...(19): siRNA sense strand
ucaccaagcuguugcaguu

SEQ ID NO: 305142 - RNA, 19 nt, Homo sapiens
  misc_RNA (1)...(19): siRNA sense strand
uaaaggagauucagcuaca

SEQ ID NO: 305143 - RNA, 19 nt, Homo sapiens
  misc_RNA (1)...(19): siRNA sense strand
ccaagucaaucccaacaaa

SEQ ID NO: 305144 - RNA, 19 nt, Homo sapiens
  misc_RNA (1)...(19): siRNA sense strand
caacaaagacauacuccaa

SEQ ID NO: 305145 - RNA, 19 nt, Homo sapiens
  misc_RNA (1)...(19): siRNA sense strand
caugaaacauccauucuuc

SEQ ID NO: 305146 - RNA, 19 nt, Homo sapiens
  misc_RNA (1)...(19): siRNA sense strand
aaagcaagcucacagacaa

SEQ ID NO: 305147 - RNA, 19 nt, Homo sapiens
  misc_RNA (1)...(19): siRNA sense strand
ggacuacuccacucagauu

SEQ ID NO: 305148 - RNA, 19 nt, Homo sapiens
  misc_RNA (1)...(19): siRNA sense strand
gagaagcugacccucaaua

SEQ ID NO: 305149 - RNA, 19 nt, Homo sapiens
  misc_RNA (1)...(19): siRNA sense strand
ccacucagauugacaugug

SEQ ID NO: 305150 - RNA, 19 nt, Homo sapiens
  misc_RNA (1)...(19): siRNA sense strand
caacaagcgccuaucacua

SEQ ID NO: 305151 - RNA, 19 nt, Homo sapiens
  misc_RNA (1)...(19): siRNA sense strand
acaaagacauacuccaaug

SEQ ID NO: 305152 - RNA, 19 nt, Homo sapiens
  misc_RNA (1)...(19): siRNA sense strand
gaggugcagucuccaguga

SEQ ID NO: 305153 - RNA, 19 nt, Homo sapiens
  misc_RNA (1)...(19): siRNA sense strand
acgaggaguucaagacaua

SEQ ID NO: 305154 - RNA, 19 nt, Homo sapiens
  misc_RNA (1)...(19): siRNA sense strand
aaacuggagaccuacauua

SEQ ID NO: 305155 - RNA, 19 nt, Homo sapiens
  misc_RNA (1)...(19): siRNA sense strand
ccaaugagguggugacacu

SEQ ID NO: 305156 - RNA, 19 nt, Homo sapiens
  misc_RNA (1)...(19): siRNA sense strand
caacaugcacaacgugaaa

SEQ ID NO: 305157 - RNA, 19 nt, Homo sapiens
  misc_RNA (1)...(19): siRNA sense strand
gagauuggcuuugggaaac

SEQ ID NO: 305158 - RNA, 19 nt, Homo sapiens
  misc_RNA (1)...(19): siRNA sense strand
gagcggauccacaaacuuc

SEQ ID NO: 305159 - RNA, 19 nt, Homo sapiens
  misc_RNA (1)...(19): siRNA sense strand
gaaacuggagaccuacauu

SEQ ID NO: 305160 - RNA, 19 nt, Homo sapiens
  misc_RNA (1)...(19): siRNA sense strand
gaacagcuacacuucaucu

SEQ ID NO: 305161 - RNA, 19 nt, Homo sapiens
  misc_RNA (1)...(19): siRNA sense strand
acauuaagcuggacaaacu

SEQ ID NO: 305162 - RNA, 19 nt, Homo sapiens
  misc_RNA (1)...(19): siRNA sense strand
ccacugaggacaucaacaa

SEQ ID NO: 305163 - RNA, 19 nt, Homo sapiens
  misc_RNA (1)...(19): siRNA sense strand
caaagacauacuccaauga

SEQ ID NO: 305164 - RNA, 19 nt, Homo sapiens
  misc_RNA (1)...(19): siRNA sense strand
gaucagacuggaacaugaa

SEQ ID NO: 305165 - RNA, 19 nt, Homo sapiens
  misc_RNA (1)...(19): siRNA sense strand
aaacggcagcugucaauga

SEQ ID NO: 305166 - RNA, 19 nt, Homo sapiens
  misc_RNA (1)...(19): siRNA sense strand
uggagaagcugacccucaa

SEQ ID NO: 305167 - RNA, 19 nt, Homo sapiens
  misc_RNA (1)...(19): siRNA sense strand
caaacacgccaacaucguu

SEQ ID NO: 305168 - RNA, 19 nt, Homo sapiens
  misc_RNA (1)...(19): siRNA sense strand
gcacgaggacuugaagaug

SEQ ID NO: 305169 - RNA, 19 nt, Homo sapiens
  misc_RNA (1)...(19): siRNA sense strand
aaacacgccaacaucguua

SEQ ID NO: 305170 - RNA, 19 nt, Homo sapiens
  misc_RNA (1)...(19): siRNA sense strand
ggaggaacagcuacacuuc

SEQ ID NO: 305171 - RNA, 19 nt, Homo sapiens
  misc_RNA (1)...(19): siRNA sense strand
uugaguaccuggacaagga

SEQ ID NO: 305172 - RNA, 19 nt, Homo sapiens
  misc_RNA (1)...(19): siRNA sense strand
gcacaacgugaaacuguuc

SEQ ID NO: 305173 - RNA, 19 nt, Homo sapiens
  misc_RNA (1)...(19): siRNA sense strand
cacgcaagaucuccacuga

SEQ ID NO: 305174 - RNA, 19 nt, Homo sapiens
  misc_RNA (1)...(19): siRNA sense strand
agaagucccucacccuugu

SEQ ID NO: 305175 - RNA, 19 nt, Homo sapiens
  misc_RNA (1)...(19): siRNA sense strand
cgcagaggaugccaugaaa

SEQ ID NO: 305176 - RNA, 19 nt, Homo sapiens
  misc_RNA (1)...(19): siRNA sense strand
ccaagcuguugcaguuuga

SEQ ID NO: 305177 - RNA, 19 nt, Homo sapiens
  misc_RNA (1)...(19): siRNA sense strand
caacaucguuacgcuacau

SEQ ID NO: 305178 - RNA, 19 nt, Homo sapiens
  misc_RNA (1)...(19): siRNA sense strand
caucuuccguaucuuagga

SEQ ID NO: 305179 - RNA, 19 nt, Homo sapiens
  misc_RNA (1)...(19): siRNA sense strand
ggugugggcugcaucuucu

SEQ ID NO: 305180 - RNA, 19 nt, Homo sapiens
  misc_RNA (1)...(19): siRNA sense strand
cccagaaccugcucaucaa

SEQ ID NO: 305181 - RNA, 19 nt, Homo sapiens
  misc_RNA (1)...(19): siRNA sense strand
gaucuccacugaggacauc

SEQ ID NO: 305182 - RNA, 19 nt, Homo sapiens
  misc_RNA (1)...(19): siRNA sense strand
caacgaggaguucaagaca

SEQ ID NO: 305183 - RNA, 19 nt, Homo sapiens
  misc_RNA (1)...(19): siRNA sense strand
uugggaaacuggagaccua

SEQ ID NO: 305184 - RNA, 19 nt, Homo sapiens
  misc_RNA (1)...(19): siRNA sense strand
cuucaucuuccguaucuua

SEQ ID NO: 305185 - RNA, 19 nt, Homo sapiens
  misc_RNA (1)...(19): siRNA sense strand
ggcugcaucuucuaugaga

SEQ ID NO: 305186 - RNA, 19 nt, Homo sapiens
  misc_RNA (1)...(19): siRNA sense strand
ggaacaucaucaacaugca

SEQ ID NO: 305187 - RNA, 19 nt, Homo sapiens
  misc_RNA (1)...(19): siRNA sense strand
agaucagacuggaacauga

SEQ ID NO: 305188 - RNA, 19 nt, Homo sapiens
  misc_RNA (1)...(19): siRNA sense strand
gagaucagacuggaacaug

SEQ ID NO: 305189 - RNA, 19 nt, Homo sapiens
  misc_RNA (1)...(19): siRNA sense strand
gugggaacaucaucaacau

SEQ ID NO: 305190 - RNA, 19 nt, Homo sapiens
  misc_RNA (1)...(19): siRNA sense strand
guaccuaugccaccgucua

SEQ ID NO: 305191 - RNA, 19 nt, Homo sapiens
  misc_RNA (1)...(19): siRNA sense strand
cagaggaugccaugaaaca

SEQ ID NO: 305192 - RNA, 19 nt, Homo sapiens
  misc_RNA (1)...(19): siRNA sense strand
gcucaagcuggcugacuuu

SEQ ID NO: 305193 - RNA, 19 nt, Homo sapiens
  misc_RNA (1)...(19): siRNA sense strand
ucaaacggcagcugucaau

SEQ ID NO: 305194 - RNA, 19 nt, Homo sapiens
  misc_RNA (1)...(19): siRNA sense strand
gaggaacagcuacacuuca

SEQ ID NO: 305195 - RNA, 19 nt, Homo sapiens
  misc_RNA (1)...(19): siRNA sense strand
gaucaaacggcagcuguca

SEQ ID NO: 305196 - RNA, 19 nt, Homo sapiens
  misc_RNA (1)...(19): siRNA sense strand
ggaagugucccugcucaag

SEQ ID NO: 305197 - RNA, 19 nt, Homo sapiens
  misc_RNA (1)...(19): siRNA sense strand
gggagcggauccacaaacu

SEQ ID NO: 305198 - RNA, 19 nt, Homo sapiens
  misc_RNA (1)...(19): siRNA sense strand
caucaacaagcgccuauca

SEQ ID NO: 305199 - RNA, 19 nt, Homo sapiens
  misc_RNA (1)...(19): siRNA sense strand
ugagauuggcuuugggaaa

SEQ ID NO: 305200 - RNA, 19 nt, Homo sapiens
  misc_RNA (1)...(19): siRNA sense strand
ccgcagaggaugccaugaa

SEQ ID NO: 305201 - RNA, 19 nt, Homo sapiens
  misc_RNA (1)...(19): siRNA sense strand
ucacccuugucuuugagua

SEQ ID NO: 305202 - RNA, 19 nt, Homo sapiens
  misc_RNA (1)...(19): siRNA sense strand
ugaagcaguaccuggauga

SEQ ID NO: 305203 - RNA, 19 nt, Homo sapiens
  misc_RNA (1)...(19): siRNA sense strand
ccaugaaacauccauucuu

SEQ ID NO: 305204 - RNA, 19 nt, Homo sapiens
  misc_RNA (1)...(19): siRNA sense strand
gcaguuugagggucgaaau

SEQ ID NO: 305205 - RNA, 19 nt, Homo sapiens
  misc_RNA (1)...(19): siRNA sense strand
guucaagacauacaacuac

SEQ ID NO: 305206 - RNA, 19 nt, Homo sapiens
  misc_RNA (1)...(19): siRNA sense strand
ggaugaagaagaucaaacg

SEQ ID NO: 305207 - RNA, 19 nt, Homo sapiens
  misc_RNA (1)...(19): siRNA sense strand
aggaacagcuacacuucau

SEQ ID NO: 305208 - RNA, 19 nt, Homo sapiens
  misc_RNA (1)...(19): siRNA sense strand
ggaaacuggagaccuacau

SEQ ID NO: 305209 - RNA, 19 nt, Homo sapiens
  misc_RNA (1)...(19): siRNA sense strand
ugggcugcaucuucuauga

SEQ ID NO: 305210 - RNA, 19 nt, Homo sapiens
  misc_RNA (1)...(19): siRNA sense strand
ccucaaacacgccaacauc

SEQ ID NO: 305211 - RNA, 19 nt, Homo sapiens
  misc_RNA (1)...(19): siRNA sense strand
gaagcugacccucaauagc

SEQ ID NO: 305212 - RNA, 19 nt, Homo sapiens
  misc_RNA (1)...(19): siRNA sense strand
aaaggagauucagcuacaa

SEQ ID NO: 305213 - RNA, 19 nt, Homo sapiens
  misc_RNA (1)...(19): siRNA sense strand
cacuucaucuuccguaucu

SEQ ID NO: 305214 - RNA, 19 nt, Homo sapiens
  misc_RNA (1)...(19): siRNA sense strand
agaaccugcucaucaacga

SEQ ID NO: 305215 - RNA, 19 nt, Homo sapiens
  misc_RNA (1)...(19): siRNA sense strand
aacuggagaccuacauuaa

SEQ ID NO: 305216 - RNA, 19 nt, Homo sapiens
  misc_RNA (1)...(19): siRNA sense strand
uuccauauuugcacuaaag

SEQ ID NO: 305217 - RNA, 19 nt, Homo sapiens
  misc_RNA (1)...(19): siRNA sense strand
acgugaaacuguuccuguu

SEQ ID NO: 305218 - RNA, 19 nt, Homo sapiens
  misc_RNA (1)...(19): siRNA sense strand
gucccucacccuugucuuu

SEQ ID NO: 305219 - RNA, 19 nt, Homo sapiens
  misc_RNA (1)...(19): siRNA sense strand
ccagugagagugcguaugc

SEQ ID NO: 305220 - RNA, 19 nt, Homo sapiens
  misc_RNA (1)...(19): siRNA sense strand
gcucaaggaccucaaacac

SEQ ID NO: 305221 - RNA, 19 nt, Homo sapiens
  misc_RNA (1)...(19): siRNA sense strand
aagugucccugcucaagga

SEQ ID NO: 305222 - RNA, 19 nt, Homo sapiens
  misc_RNA (1)...(19): siRNA sense strand
ucaacaagcgccuaucacu

SEQ ID NO: 305223 - RNA, 19 nt, Homo sapiens
  misc_RNA (1)...(19): siRNA sense strand
accaagcuguugcaguuug

SEQ ID NO: 305224 - RNA, 19 nt, Homo sapiens
  misc_RNA (1)...(19): siRNA sense strand
gcaaaagcaagcucacaga

SEQ ID NO: 305225 - RNA, 19 nt, Homo sapiens
  misc_RNA (1)...(19): siRNA sense strand
ccacggacuacuccacuca

SEQ ID NO: 305226 - RNA, 19 nt, Homo sapiens
  misc_RNA (1)...(19): siRNA sense strand
aacaagcgccuaucacuac

SEQ ID NO: 305227 - RNA, 19 nt, Homo sapiens
  misc_RNA (1)...(19): siRNA sense strand
caagcucacagacaaccuu

SEQ ID NO: 305228 - RNA, 19 nt, Homo sapiens
  misc_RNA (1)...(19): siRNA sense strand
gacaucaacaagcgccuau

SEQ ID NO: 305229 - RNA, 19 nt, Homo sapiens
  misc_RNA (1)...(19): siRNA sense strand
uauuugcacuaaaggagau

SEQ ID NO: 305230 - RNA, 19 nt, Homo sapiens
  misc_RNA (1)...(19): siRNA sense strand
ggagcggauccacaaacuu

SEQ ID NO: 305231 - RNA, 19 nt, Homo sapiens
  misc_RNA (1)...(19): siRNA sense strand
cuggagaccuacauuaagc

SEQ ID NO: 305232 - RNA, 19 nt, Homo sapiens
  misc_RNA (1)...(19): siRNA sense strand
aaagacauacuccaaugag

SEQ ID NO: 305233 - RNA, 19 nt, Homo sapiens
  misc_RNA (1)...(19): siRNA sense strand
ggagagugaccaggcuuca

SEQ ID NO: 305234 - RNA, 19 nt, Homo sapiens
  misc_RNA (1)...(19): siRNA sense strand
caagucaaucccaacaaag

SEQ ID NO: 305235 - RNA, 19 nt, Homo sapiens
  misc_RNA (1)...(19): siRNA sense strand
aagucaaucccaacaaaga

SEQ ID NO: 305236 - RNA, 19 nt, Homo sapiens
  misc_RNA (1)...(19): siRNA sense strand
caaucccaacaaagacaua

SEQ ID NO: 305237 - RNA, 19 nt, Homo sapiens
  misc_RNA (1)...(19): siRNA sense strand
acaaggaccugaagcagua

SEQ ID NO: 305238 - RNA, 19 nt, Homo sapiens
  misc_RNA (1)...(19): siRNA sense strand
ucaccaagcuguugcaguu

SEQ ID NO: 305239 - RNA, 19 nt, Homo sapiens
  misc_RNA (1)...(19): siRNA sense strand
uaaaggagauucagcuaca

SEQ ID NO: 305240 - RNA, 19 nt, Homo sapiens
  misc_RNA (1)...(19): siRNA sense strand
ccaagucaaucccaacaaa

SEQ ID NO: 305241 - RNA, 19 nt, Homo sapiens
  misc_RNA (1)...(19): siRNA sense strand
caacaaagacauacuccaa

SEQ ID NO: 305242 - RNA, 19 nt, Homo sapiens
  misc_RNA (1)...(19): siRNA sense strand
caugaaacauccauucuuc

SEQ ID NO: 305243 - RNA, 19 nt, Homo sapiens
  misc_RNA (1)...(19): siRNA sense strand
aaagcaagcucacagacaa

SEQ ID NO: 305244 - RNA, 19 nt, Homo sapiens
  misc_RNA (1)...(19): siRNA sense strand
ggacuacuccacucagauu

SEQ ID NO: 305245 - RNA, 19 nt, Homo sapiens
  misc_RNA (1)...(19): siRNA sense strand
gagaagcugacccucaaua

SEQ ID NO: 305246 - RNA, 19 nt, Homo sapiens
  misc_RNA (1)...(19): siRNA sense strand
ccacucagauugacaugug

SEQ ID NO: 305247 - RNA, 19 nt, Homo sapiens
  misc_RNA (1)...(19): siRNA sense strand
caacaagcgccuaucacua

SEQ ID NO: 305248 - RNA, 19 nt, Homo sapiens
  misc_RNA (1)...(19): siRNA sense strand
acaaagacauacuccaaug

SEQ ID NO: 305249 - RNA, 19 nt, Homo sapiens
  misc_RNA (1)...(19): siRNA sense strand
gaggugcagucuccaguga

SEQ ID NO: 305250 - RNA, 19 nt, Homo sapiens
  misc_RNA (1)...(19): siRNA sense strand
acgaggaguucaagacaua

SEQ ID NO: 305251 - RNA, 19 nt, Homo sapiens
  misc_RNA (1)...(19): siRNA sense strand
aaacuggagaccuacauua

SEQ ID NO: 305252 - RNA, 19 nt, Homo sapiens
  misc_RNA (1)...(19): siRNA sense strand
ccaaugagguggugacacu

SEQ ID NO: 305253 - RNA, 19 nt, Homo sapiens
  misc_RNA (1)...(19): siRNA sense strand
caacaugcacaacgugaaa

SEQ ID NO: 305254 - RNA, 19 nt, Homo sapiens
  misc_RNA (1)...(19): siRNA sense strand
gagauuggcuuugggaaac

SEQ ID NO: 305255 - RNA, 19 nt, Homo sapiens
  misc_RNA (1)...(19): siRNA sense strand
gagcggauccacaaacuuc

SEQ ID NO: 305256 - RNA, 19 nt, Homo sapiens
  misc_RNA (1)...(19): siRNA sense strand
gaaacuggagaccuacauu

SEQ ID NO: 305257 - RNA, 19 nt, Homo sapiens
  misc_RNA (1)...(19): siRNA sense strand
gaacagcuacacuucaucu

SEQ ID NO: 305258 - RNA, 19 nt, Homo sapiens
  misc_RNA (1)...(19): siRNA sense strand
acauuaagcuggacaaacu

SEQ ID NO: 305259 - RNA, 19 nt, Homo sapiens
  misc_RNA (1)...(19): siRNA sense strand
ccacugaggacaucaacaa

SEQ ID NO: 305260 - RNA, 19 nt, Homo sapiens
  misc_RNA (1)...(19): siRNA sense strand
caaagacauacuccaauga

SEQ ID NO: 305261 - RNA, 19 nt, Homo sapiens
  misc_RNA (1)...(19): siRNA sense strand
gaucagacuggaacaugaa

SEQ ID NO: 305262 - RNA, 19 nt, Homo sapiens
  misc_RNA (1)...(19): siRNA sense strand
aaacggcagcugucaauga

SEQ ID NO: 305263 - RNA, 19 nt, Homo sapiens
  misc_RNA (1)...(19): siRNA sense strand
uggagaagcugacccucaa

SEQ ID NO: 305264 - RNA, 19 nt, Homo sapiens
  misc_RNA (1)...(19): siRNA sense strand
caaacacgccaacaucguu

SEQ ID NO: 305265 - RNA, 19 nt, Homo sapiens
  misc_RNA (1)...(19): siRNA sense strand
gcacgaggacuugaagaug

SEQ ID NO: 305266 - RNA, 19 nt, Homo sapiens
  misc_RNA (1)...(19): siRNA sense strand
aaacacgccaacaucguua

SEQ ID NO: 305267 - RNA, 19 nt, Homo sapiens
  misc_RNA (1)...(19): siRNA sense strand
ggaggaacagcuacacuuc

SEQ ID NO: 305268 - RNA, 19 nt, Homo sapiens
  misc_RNA (1)...(19): siRNA sense strand
uugaguaccuggacaagga

SEQ ID NO: 305269 - RNA, 19 nt, Homo sapiens
  misc_RNA (1)...(19): siRNA sense strand
gcacaacgugaaacuguuc

SEQ ID NO: 305270 - RNA, 19 nt, Homo sapiens
  misc_RNA (1)...(19): siRNA sense strand
cacgcaagaucuccacuga

SEQ ID NO: 305271 - RNA, 19 nt, Homo sapiens
  misc_RNA (1)...(19): siRNA sense strand
agaagucccucacccuugu

SEQ ID NO: 305272 - RNA, 19 nt, Homo sapiens
  misc_RNA (1)...(19): siRNA sense strand
cgcagaggaugccaugaaa

SEQ ID NO: 305273 - RNA, 19 nt, Homo sapiens
  misc_RNA (1)...(19): siRNA sense strand
ccaagcuguugcaguuuga

SEQ ID NO: 305274 - RNA, 19 nt, Homo sapiens
  misc_RNA (1)...(19): siRNA sense strand
caacaucguuacgcuacau

SEQ ID NO: 305275 - RNA, 19 nt, Homo sapiens
  misc_RNA (1)...(19): siRNA sense strand
caucuuccguaucuuagga

SEQ ID NO: 305276 - RNA, 19 nt, Homo sapiens
  misc_RNA (1)...(19): siRNA sense strand
ggugugggcugcaucuucu

SEQ ID NO: 305277 - RNA, 19 nt, Homo sapiens
  misc_RNA (1)...(19): siRNA sense strand
cccagaaccugcucaucaa

SEQ ID NO: 305278 - RNA, 19 nt, Homo sapiens
  misc_RNA (1)...(19): siRNA sense strand
gaucuccacugaggacauc

SEQ ID NO: 305279 - RNA, 19 nt, Homo sapiens
  misc_RNA (1)...(19): siRNA sense strand
caacgaggaguucaagaca

SEQ ID NO: 305280 - RNA, 19 nt, Homo sapiens
  misc_RNA (1)...(19): siRNA sense strand
uugggaaacuggagaccua

SEQ ID NO: 305281 - RNA, 19 nt, Homo sapiens
  misc_RNA (1)...(19): siRNA sense strand
cuucaucuuccguaucuua

SEQ ID NO: 305282 - RNA, 19 nt, Homo sapiens
  misc_RNA (1)...(19): siRNA sense strand
ggcugcaucuucuaugaga

SEQ ID NO: 305283 - RNA, 19 nt, Homo sapiens
  misc_RNA (1)...(19): siRNA sense strand
ggaacaucaucaacaugca

SEQ ID NO: 305284 - RNA, 19 nt, Homo sapiens
  misc_RNA (1)...(19): siRNA sense strand
agaucagacuggaacauga

SEQ ID NO: 305285 - RNA, 19 nt, Homo sapiens
  misc_RNA (1)...(19): siRNA sense strand
gagaucagacuggaacaug

SEQ ID NO: 305286 - RNA, 19 nt, Homo sapiens
  misc_RNA (1)...(19): siRNA sense strand
gugggaacaucaucaacau

SEQ ID NO: 305287 - RNA, 19 nt, Homo sapiens
  misc_RNA (1)...(19): siRNA sense strand
guaccuaugccaccgucua

SEQ ID NO: 305288 - RNA, 19 nt, Homo sapiens
  misc_RNA (1)...(19): siRNA sense strand
cagaggaugccaugaaaca

SEQ ID NO: 305289 - RNA, 19 nt, Homo sapiens
  misc_RNA (1)...(19): siRNA sense strand
gcucaagcuggcugacuuu

SEQ ID NO: 305290 - RNA, 19 nt, Homo sapiens
  misc_RNA (1)...(19): siRNA sense strand
ucaaacggcagcugucaau

SEQ ID NO: 305291 - RNA, 19 nt, Homo sapiens
  misc_RNA (1)...(19): siRNA sense strand
gaggaacagcuacacuuca

SEQ ID NO: 305292 - RNA, 19 nt, Homo sapiens
  misc_RNA (1)...(19): siRNA sense strand
gaucaaacggcagcuguca

SEQ ID NO: 305293 - RNA, 19 nt, Homo sapiens
  misc_RNA (1)...(19): siRNA sense strand
ggaagugucccugcucaag

SEQ ID NO: 305294 - RNA, 19 nt, Homo sapiens
  misc_RNA (1)...(19): siRNA sense strand
gggagcggauccacaaacu

SEQ ID NO: 305295 - RNA, 19 nt, Homo sapiens
  misc_RNA (1)...(19): siRNA sense strand
caucaacaagcgccuauca

SEQ ID NO: 305296 - RNA, 19 nt, Homo sapiens
  misc_RNA (1)...(19): siRNA sense strand
ugagauuggcuuugggaaa

SEQ ID NO: 305297 - RNA, 19 nt, Homo sapiens
  misc_RNA (1)...(19): siRNA sense strand
ccgcagaggaugccaugaa

SEQ ID NO: 305298 - RNA, 19 nt, Homo sapiens
  misc_RNA (1)...(19): siRNA sense strand
ucacccuugucuuugagua

SEQ ID NO: 305299 - RNA, 19 nt, Homo sapiens
  misc_RNA (1)...(19): siRNA sense strand
ugaagcaguaccuggauga

SEQ ID NO: 305300 - RNA, 19 nt, Homo sapiens
  misc_RNA (1)...(19): siRNA sense strand
ccaugaaacauccauucuu

SEQ ID NO: 305301 - RNA, 19 nt, Homo sapiens
  misc_RNA (1)...(19): siRNA sense strand
gcaguuugagggucgaaau

SEQ ID NO: 305302 - RNA, 19 nt, Homo sapiens
  misc_RNA (1)...(19): siRNA sense strand
guucaagacauacaacuac

SEQ ID NO: 305303 - RNA, 19 nt, Homo sapiens
  misc_RNA (1)...(19): siRNA sense strand
ggaugaagaagaucaaacg

SEQ ID NO: 305304 - RNA, 19 nt, Homo sapiens
  misc_RNA (1)...(19): siRNA sense strand
aggaacagcuacacuucau

SEQ ID NO: 305305 - RNA, 19 nt, Homo sapiens
  misc_RNA (1)...(19): siRNA sense strand
ggaaacuggagaccuacau

SEQ ID NO: 305306 - RNA, 19 nt, Homo sapiens
  misc_RNA (1)...(19): siRNA sense strand
ugggcugcaucuucuauga

SEQ ID NO: 305307 - RNA, 19 nt, Homo sapiens
  misc_RNA (1)...(19): siRNA sense strand
ccucaaacacgccaacauc

SEQ ID NO: 305308 - RNA, 19 nt, Homo sapiens
  misc_RNA (1)...(19): siRNA sense strand
gaagcugacccucaauagc

SEQ ID NO: 305309 - RNA, 19 nt, Homo sapiens
  misc_RNA (1)...(19): siRNA sense strand
aaaggagauucagcuacaa

SEQ ID NO: 305310 - RNA, 19 nt, Homo sapiens
  misc_RNA (1)...(19): siRNA sense strand
cacuucaucuuccguaucu

SEQ ID NO: 305311 - RNA, 19 nt, Homo sapiens
  misc_RNA (1)...(19): siRNA sense strand
agaaccugcucaucaacga

SEQ ID NO: 305312 - RNA, 19 nt, Homo sapiens
  misc_RNA (1)...(19): siRNA sense strand
aacuggagaccuacauuaa

SEQ ID NO: 305313 - RNA, 19 nt, Homo sapiens
  misc_RNA (1)...(19): siRNA sense strand
uuccauauuugcacuaaag

SEQ ID NO: 305314 - RNA, 19 nt, Homo sapiens
  misc_RNA (1)...(19): siRNA sense strand
acgugaaacuguuccuguu

SEQ ID NO: 305315 - RNA, 19 nt, Homo sapiens
  misc_RNA (1)...(19): siRNA sense strand
gucccucacccuugucuuu

SEQ ID NO: 305316 - RNA, 19 nt, Homo sapiens
  misc_RNA (1)...(19): siRNA sense strand
ccagugagagugcguaugc

SEQ ID NO: 305317 - RNA, 19 nt, Homo sapiens
  misc_RNA (1)...(19): siRNA sense strand
gcucaaggaccucaaacac

SEQ ID NO: 305318 - RNA, 19 nt, Homo sapiens
  misc_RNA (1)...(19): siRNA sense strand
aagugucccugcucaagga

SEQ ID NO: 305319 - RNA, 19 nt, Homo sapiens
  misc_RNA (1)...(19): siRNA sense strand
ucaacaagcgccuaucacu

SEQ ID NO: 305320 - RNA, 19 nt, Homo sapiens
  misc_RNA (1)...(19): siRNA sense strand
accaagcuguugcaguuug

SEQ ID NO: 305321 - RNA, 19 nt, Homo sapiens
  misc_RNA (1)...(19): siRNA sense strand
gcaaaagcaagcucacaga

SEQ ID NO: 305322 - RNA, 19 nt, Homo sapiens
  misc_RNA (1)...(19): siRNA sense strand
ccacggacuacuccacuca

SEQ ID NO: 305323 - RNA, 19 nt, Homo sapiens
  misc_RNA (1)...(19): siRNA sense strand
aacaagcgccuaucacuac

SEQ ID NO: 305324 - RNA, 19 nt, Homo sapiens
  misc_RNA (1)...(19): siRNA sense strand
caagcucacagacaaccuu

SEQ ID NO: 305325 - RNA, 19 nt, Homo sapiens
  misc_RNA (1)...(19): siRNA sense strand
gacaucaacaagcgccuau

SEQ ID NO: 305326 - RNA, 19 nt, Homo sapiens
  misc_RNA (1)...(19): siRNA sense strand
uauuugcacuaaaggagau

SEQ ID NO: 305327 - RNA, 19 nt, Homo sapiens
  misc_RNA (1)...(19): siRNA sense strand
ggagcggauccacaaacuu

SEQ ID NO: 305328 - RNA, 19 nt, Homo sapiens
  misc_RNA (1)...(19): siRNA sense strand
cuggagaccuacauuaagc

SEQ ID NO: 305329 - RNA, 19 nt, Homo sapiens
  misc_RNA (1)...(19): siRNA sense strand
aaagacauacuccaaugag

SEQ ID NO: 305330 - RNA, 19 nt, Homo sapiens
  misc_RNA (1)...(19): siRNA sense strand
ggagagugaccaggcuuca

SEQ ID NO: 305331 - RNA, 19 nt, Homo sapiens
  misc_RNA (1)...(19): siRNA sense strand
caagucaaucccaacaaag

SEQ ID NO: 305332 - RNA, 19 nt, Homo sapiens
  misc_RNA (1)...(19): siRNA sense strand
aagucaaucccaacaaaga

SEQ ID NO: 305333 - RNA, 19 nt, Homo sapiens
  misc_RNA (1)...(19): siRNA sense strand
caaucccaacaaagacaua

SEQ ID NO: 305334 - RNA, 19 nt, Homo sapiens
  misc_RNA (1)...(19): siRNA sense strand
gaaacuuccuggacuauuu

SEQ ID NO: 305335 - RNA, 19 nt, Homo sapiens
  misc_RNA (1)...(19): siRNA sense strand
gaaauaagguaucgaagca

SEQ ID NO: 305336 - RNA, 19 nt, Homo sapiens
  misc_RNA (1)...(19): siRNA sense strand
gagauuuggucaacuauuu

SEQ ID NO: 305337 - RNA, 19 nt, Homo sapiens
  misc_RNA (1)...(19): siRNA sense strand
caucagagcuggaucuaga

SEQ ID NO: 305338 - RNA, 19 nt, Homo sapiens
  misc_RNA (1)...(19): siRNA sense strand
gcacgccgcuuccugauau

SEQ ID NO: 305339 - RNA, 19 nt, Homo sapiens
  misc_RNA (1)...(19): siRNA sense strand
ggauggacaugaauauauu

SEQ ID NO: 305340 - RNA, 19 nt, Homo sapiens
  misc_RNA (1)...(19): siRNA sense strand
ucaaauugguguacacuuu

SEQ ID NO: 305341 - RNA, 19 nt, Homo sapiens
  misc_RNA (1)...(19): siRNA sense strand
cagaaggccuuacuuuauu

SEQ ID NO: 305342 - RNA, 19 nt, Homo sapiens
  misc_RNA (1)...(19): siRNA sense strand
ucacugagaucaccacuga

SEQ ID NO: 305343 - RNA, 19 nt, Homo sapiens
  misc_RNA (1)...(19): siRNA sense strand
gaaagaaguuccagaccau

SEQ ID NO: 305344 - RNA, 19 nt, Homo sapiens
  misc_RNA (1)...(19): siRNA sense strand
acacggagcuauguuauuu

SEQ ID NO: 305345 - RNA, 19 nt, Homo sapiens
  misc_RNA (1)...(19): siRNA sense strand
gaaagacaguggagauuac

SEQ ID NO: 305346 - RNA, 19 nt, Homo sapiens
  misc_RNA (1)...(19): siRNA sense strand
gaagacaguggccauuaua

SEQ ID NO: 305347 - RNA, 19 nt, Homo sapiens
  misc_RNA (1)...(19): siRNA sense strand
gcaggcacauuuacaucua

SEQ ID NO: 305348 - RNA, 19 nt, Homo sapiens
  misc_RNA (1)...(19): siRNA sense strand
cgaugcagcugccuuauga

SEQ ID NO: 305349 - RNA, 19 nt, Homo sapiens
  misc_RNA (1)...(19): siRNA sense strand
gaugaugauucugccauua

SEQ ID NO: 305350 - RNA, 19 nt, Homo sapiens
  misc_RNA (1)...(19): siRNA sense strand
ucacaaugcuggaagaaau

SEQ ID NO: 305351 - RNA, 19 nt, Homo sapiens
  misc_RNA (1)...(19): siRNA sense strand
uggaugauaugcaaagaua

SEQ ID NO: 305352 - RNA, 19 nt, Homo sapiens
  misc_RNA (1)...(19): siRNA sense strand
gaagcaggcugauacuaca

SEQ ID NO: 305353 - RNA, 19 nt, Homo sapiens
  misc_RNA (1)...(19): siRNA sense strand
caaccugcaugaagucaaa

SEQ ID NO: 305354 - RNA, 19 nt, Homo sapiens
  misc_RNA (1)...(19): siRNA sense strand
ugagugagauuguggagaa

SEQ ID NO: 305355 - RNA, 19 nt, Homo sapiens
  misc_RNA (1)...(19): siRNA sense strand
ugagugaugucuggucuua

SEQ ID NO: 305356 - RNA, 19 nt, Homo sapiens
  misc_RNA (1)...(19): siRNA sense strand
ggaacagccuauggauuaa

SEQ ID NO: 305357 - RNA, 19 nt, Homo sapiens
  misc_RNA (1)...(19): siRNA sense strand
gaugggaguuuccaagaga

SEQ ID NO: 305358 - RNA, 19 nt, Homo sapiens
  misc_RNA (1)...(19): siRNA sense strand
gcagcugaauucauccuuu

SEQ ID NO: 305359 - RNA, 19 nt, Homo sapiens
  misc_RNA (1)...(19): siRNA sense strand
gaagagagugccauugaga

SEQ ID NO: 305360 - RNA, 19 nt, Homo sapiens
  misc_RNA (1)...(19): siRNA sense strand
gaaggugguugaaggaaca

SEQ ID NO: 305361 - RNA, 19 nt, Homo sapiens
  misc_RNA (1)...(19): siRNA sense strand
ccagggaggucaaagaaau

SEQ ID NO: 305362 - RNA, 19 nt, Homo sapiens
  misc_RNA (1)...(19): siRNA sense strand
cgagacuccuguaaccuua

SEQ ID NO: 305363 - RNA, 19 nt, Homo sapiens
  misc_RNA (1)...(19): siRNA sense strand
aaacaauggugacuacaug

SEQ ID NO: 305364 - RNA, 19 nt, Homo sapiens
  misc_RNA (1)...(19): siRNA sense strand
gagcuucaccuaucaaguu

SEQ ID NO: 305365 - RNA, 19 nt, Homo sapiens
  misc_RNA (1)...(19): siRNA sense strand
ggaaacagaaaccgaggua

SEQ ID NO: 305366 - RNA, 19 nt, Homo sapiens
  misc_RNA (1)...(19): siRNA sense strand
gacaguggcuacaucauuc

SEQ ID NO: 305367 - RNA, 19 nt, Homo sapiens
  misc_RNA (1)...(19): siRNA sense strand
aggaacagccuauggauua

SEQ ID NO: 305368 - RNA, 19 nt, Homo sapiens
  misc_RNA (1)...(19): siRNA sense strand
gcagcugccuuaugacuca

SEQ ID NO: 305369 - RNA, 19 nt, Homo sapiens
  misc_RNA (1)...(19): siRNA sense strand
gugaagaucugugacuuug

SEQ ID NO: 305370 - RNA, 19 nt, Homo sapiens
  misc_RNA (1)...(19): siRNA sense strand
acacaggguuguacacuug

SEQ ID NO: 305371 - RNA, 19 nt, Homo sapiens
  misc_RNA (1)...(19): siRNA sense strand
gaugguggauucuacuuuc

SEQ ID NO: 305372 - RNA, 19 nt, Homo sapiens
  misc_RNA (1)...(19): siRNA sense strand
ucagaaggccuuacuuuau

SEQ ID NO: 305373 - RNA, 19 nt, Homo sapiens
  misc_RNA (1)...(19): siRNA sense strand
ggaaaagauucaggaaaua

SEQ ID NO: 305374 - RNA, 19 nt, Homo sapiens
  misc_RNA (1)...(19): siRNA sense strand
ggaaaucagaaaugaagaa

SEQ ID NO: 305375 - RNA, 19 nt, Homo sapiens
  misc_RNA (1)...(19): siRNA sense strand
cagagaagccaaagaaaga

SEQ ID NO: 305376 - RNA, 19 nt, Homo sapiens
  misc_RNA (1)...(19): siRNA sense strand
caaagucccauccaucaaa

SEQ ID NO: 305377 - RNA, 19 nt, Homo sapiens
  misc_RNA (1)...(19): siRNA sense strand
ugaaagacaguggagauua

SEQ ID NO: 305378 - RNA, 19 nt, Homo sapiens
  misc_RNA (1)...(19): siRNA sense strand
ugucugaacugaagauaau

SEQ ID NO: 305379 - RNA, 19 nt, Homo sapiens
  misc_RNA (1)...(19): siRNA sense strand
ugaugauucugccauuaua

SEQ ID NO: 305380 - RNA, 19 nt, Homo sapiens
  misc_RNA (1)...(19): siRNA sense strand
caaagaaagagcuggauau

SEQ ID NO: 305381 - RNA, 19 nt, Homo sapiens
  misc_RNA (1)...(19): siRNA sense strand
ccauuuacaucaucacaga

SEQ ID NO: 305382 - RNA, 19 nt, Homo sapiens
  misc_RNA (1)...(19): siRNA sense strand
gacaguggccauuauacua

SEQ ID NO: 305383 - RNA, 19 nt, Homo sapiens
  misc_RNA (1)...(19): siRNA sense strand
gaaaucaaacccaccuuca

SEQ ID NO: 305384 - RNA, 19 nt, Homo sapiens
  misc_RNA (1)...(19): siRNA sense strand
ucaaguuccuucauccauu

SEQ ID NO: 305385 - RNA, 19 nt, Homo sapiens
  misc_RNA (1)...(19): siRNA sense strand
ccucuauccuuccaaauga

SEQ ID NO: 305386 - RNA, 19 nt, Homo sapiens
  misc_RNA (1)...(19): siRNA sense strand
ggaugaugauucugccauu

SEQ ID NO: 305387 - RNA, 19 nt, Homo sapiens
  misc_RNA (1)...(19): siRNA sense strand
gauugaacccugcugauga

SEQ ID NO: 305388 - RNA, 19 nt, Homo sapiens
  misc_RNA (1)...(19): siRNA sense strand
aacaagcucucaugucuga

SEQ ID NO: 305389 - RNA, 19 nt, Homo sapiens
  misc_RNA (1)...(19): siRNA sense strand
cuaauccucugccagcuuu

SEQ ID NO: 305390 - RNA, 19 nt, Homo sapiens
  misc_RNA (1)...(19): siRNA sense strand
ugcaugaagucaaacauuu

SEQ ID NO: 305391 - RNA, 19 nt, Homo sapiens
  misc_RNA (1)...(19): siRNA sense strand
caguggagauuacgaaugu

SEQ ID NO: 305392 - RNA, 19 nt, Homo sapiens
  misc_RNA (1)...(19): siRNA sense strand
caaccacacucagacagaa

SEQ ID NO: 305393 - RNA, 19 nt, Homo sapiens
  misc_RNA (1)...(19): siRNA sense strand
gugaagagcuauacuuuug

SEQ ID NO: 305394 - RNA, 19 nt, Homo sapiens
  misc_RNA (1)...(19): siRNA sense strand
cuacccaccucccaggaua

SEQ ID NO: 305395 - RNA, 19 nt, Homo sapiens
  misc_RNA (1)...(19): siRNA sense strand
ccaaagaaagagcuggaua

SEQ ID NO: 305396 - RNA, 19 nt, Homo sapiens
  misc_RNA (1)...(19): siRNA sense strand
gcugauccgugcuaaggaa

SEQ ID NO: 305397 - RNA, 19 nt, Homo sapiens
  misc_RNA (1)...(19): siRNA sense strand
aauaagguaucgaagcaaa

SEQ ID NO: 305398 - RNA, 19 nt, Homo sapiens
  misc_RNA (1)...(19): siRNA sense strand
gaaaugaagaaagucacua

SEQ ID NO: 305399 - RNA, 19 nt, Homo sapiens
  misc_RNA (1)...(19): siRNA sense strand
ggccuuacuuuauuggauu

SEQ ID NO: 305400 - RNA, 19 nt, Homo sapiens
  misc_RNA (1)...(19): siRNA sense strand
gaucguccagccucauaua

SEQ ID NO: 305401 - RNA, 19 nt, Homo sapiens
  misc_RNA (1)...(19): siRNA sense strand
gaaagcacacggagcuaug

SEQ ID NO: 305402 - RNA, 19 nt, Homo sapiens
  misc_RNA (1)...(19): siRNA sense strand
gucccaaccugucaugaaa

SEQ ID NO: 305403 - RNA, 19 nt, Homo sapiens
  misc_RNA (1)...(19): siRNA sense strand
gaaaccgagguaugaaauu

SEQ ID NO: 305404 - RNA, 19 nt, Homo sapiens
  misc_RNA (1)...(19): siRNA sense strand
caaguuccuucauccauuc

SEQ ID NO: 305405 - RNA, 19 nt, Homo sapiens
  misc_RNA (1)...(19): siRNA sense strand
cagaagagaaugagcuuga

SEQ ID NO: 305406 - RNA, 19 nt, Homo sapiens
  misc_RNA (1)...(19): siRNA sense strand
caugaaaguugcagugaag

SEQ ID NO: 305407 - RNA, 19 nt, Homo sapiens
  misc_RNA (1)...(19): siRNA sense strand
aggaaugacggauuauuua

SEQ ID NO: 305408 - RNA, 19 nt, Homo sapiens
  misc_RNA (1)...(19): siRNA sense strand
agacccagauguagccuuu

SEQ ID NO: 305409 - RNA, 19 nt, Homo sapiens
  misc_RNA (1)...(19): siRNA sense strand
gguuguacacuugcuauua

SEQ ID NO: 305410 - RNA, 19 nt, Homo sapiens
  misc_RNA (1)...(19): siRNA sense strand
ccagugaagucuacgagau

SEQ ID NO: 305411 - RNA, 19 nt, Homo sapiens
  misc_RNA (1)...(19): siRNA sense strand
gaaaguugcagugaagaug

SEQ ID NO: 305412 - RNA, 19 nt, Homo sapiens
  misc_RNA (1)...(19): siRNA sense strand
aaaccgagguaugaaauuc

SEQ ID NO: 305413 - RNA, 19 nt, Homo sapiens
  misc_RNA (1)...(19): siRNA sense strand
gagauccacucccgagaca

SEQ ID NO: 305414 - RNA, 19 nt, Homo sapiens
  misc_RNA (1)...(19): siRNA sense strand
gaagagcuauacuuuugaa

SEQ ID NO: 305415 - RNA, 19 nt, Homo sapiens
  misc_RNA (1)...(19): siRNA sense strand
aaaugaagaugcugugaag

SEQ ID NO: 305416 - RNA, 19 nt, Homo sapiens
  misc_RNA (1)...(19): siRNA sense strand
agaagacaguggccauuau

SEQ ID NO: 305417 - RNA, 19 nt, Homo sapiens
  misc_RNA (1)...(19): siRNA sense strand
gaagaagacaguggccauu

SEQ ID NO: 305418 - RNA, 19 nt, Homo sapiens
  misc_RNA (1)...(19): siRNA sense strand
gcagacagggcuuuaaugg

SEQ ID NO: 305419 - RNA, 19 nt, Homo sapiens
  misc_RNA (1)...(19): siRNA sense strand
gagaggacgagaccauuga

SEQ ID NO: 305420 - RNA, 19 nt, Homo sapiens
  misc_RNA (1)...(19): siRNA sense strand
ggauucuacuuucuacaau

SEQ ID NO: 305421 - RNA, 19 nt, Homo sapiens
  misc_RNA (1)...(19): siRNA sense strand
gcacacggagcuauguuau

SEQ ID NO: 305422 - RNA, 19 nt, Homo sapiens
  misc_RNA (1)...(19): siRNA sense strand
gaacccugcugaugaaagc

SEQ ID NO: 305423 - RNA, 19 nt, Homo sapiens
  misc_RNA (1)...(19): siRNA sense strand
cuggauaucuuuggauuga

SEQ ID NO: 305424 - RNA, 19 nt, Homo sapiens
  misc_RNA (1)...(19): siRNA sense strand
gcucucaugucugaacuga

SEQ ID NO: 305425 - RNA, 19 nt, Homo sapiens
  misc_RNA (1)...(19): siRNA sense strand
agaaauggaagcucuuaaa

SEQ ID NO: 305426 - RNA, 19 nt, Homo sapiens
  misc_RNA (1)...(19): siRNA sense strand
ggaaugacggauuauuuag

SEQ ID NO: 305427 - RNA, 19 nt, Homo sapiens
  misc_RNA (1)...(19): siRNA sense strand
cgaacuaugugucgaaagg

SEQ ID NO: 305428 - RNA, 19 nt, Homo sapiens
  misc_RNA (1)...(19): siRNA sense strand
cguccagccucauauaaga

SEQ ID NO: 305429 - RNA, 19 nt, Homo sapiens
  misc_RNA (1)...(19): siRNA sense strand
aaacagaaaccgagguaug

SEQ ID NO: 305430 - RNA, 19 nt, Homo sapiens
  misc_RNA (1)...(19): siRNA sense strand
cacagaguauugcuucuau

SEQ ID NO: 305431 - RNA, 19 nt, Homo sapiens
  misc_RNA (1)...(19): siRNA sense strand
gagacggguuccagcaguu

SEQ ID NO: 305432 - RNA, 19 nt, Homo sapiens
  misc_RNA (1)...(19): siRNA sense strand
gagaagagacccuccuuuu

SEQ ID NO: 305433 - RNA, 19 nt, Homo sapiens
  misc_RNA (1)...(19): siRNA sense strand
ugucuggucuuauggcauu

SEQ ID NO: 305434 - RNA, 19 nt, Homo sapiens
  misc_RNA (1)...(19): siRNA sense strand
gaacggacauuguuuauga

SEQ ID NO: 305435 - RNA, 19 nt, Homo sapiens
  misc_RNA (1)...(19): siRNA sense strand
gagaauagaaucaaaccua

SEQ ID NO: 305436 - RNA, 19 nt, Homo sapiens
  misc_RNA (1)...(19): siRNA sense strand
ggacauuguuuaugacaug

SEQ ID NO: 305437 - RNA, 19 nt, Homo sapiens
  misc_RNA (1)...(19): siRNA sense strand
gaacaagcguccaaaagaa

SEQ ID NO: 305438 - RNA, 19 nt, Homo sapiens
  misc_RNA (1)...(19): siRNA sense strand
gccaacaccuucccaagaa

SEQ ID NO: 305439 - RNA, 19 nt, Homo sapiens
  misc_RNA (1)...(19): siRNA sense strand
ggagaacucuuuguaccuu

SEQ ID NO: 305440 - RNA, 19 nt, Homo sapiens
  misc_RNA (1)...(19): siRNA sense strand
gaugcaggauauuacauuu

SEQ ID NO: 305441 - RNA, 19 nt, Homo sapiens
  misc_RNA (1)...(19): siRNA sense strand
gaaucaaaccuaccaacaa

SEQ ID NO: 305442 - RNA, 19 nt, Homo sapiens
  misc_RNA (1)...(19): siRNA sense strand
ggacagaccacaguagcua

SEQ ID NO: 305443 - RNA, 19 nt, Homo sapiens
  misc_RNA (1)...(19): siRNA sense strand
gacgauugaugcaggauau

SEQ ID NO: 305444 - RNA, 19 nt, Homo sapiens
  misc_RNA (1)...(19): siRNA sense strand
ggacagggacucagccaau

SEQ ID NO: 305445 - RNA, 19 nt, Homo sapiens
  misc_RNA (1)...(19): siRNA sense strand
ggacacaccacgagaaucu

SEQ ID NO: 305446 - RNA, 19 nt, Homo sapiens
  misc_RNA (1)...(19): siRNA sense strand
caucuuggcuucuucaaac

SEQ ID NO: 305447 - RNA, 19 nt, Homo sapiens
  misc_RNA (1)...(19): siRNA sense strand
gaaccaggagagaauagaa

SEQ ID NO: 305448 - RNA, 19 nt, Homo sapiens
  misc_RNA (1)...(19): siRNA sense strand
gacagggacucagccaauu

SEQ ID NO: 305449 - RNA, 19 nt, Homo sapiens
  misc_RNA (1)...(19): siRNA sense strand
cuguagagcuucgauguaa

SEQ ID NO: 305450 - RNA, 19 nt, Homo sapiens
  misc_RNA (1)...(19): siRNA sense strand
aaucaaaccuaccaacaag

SEQ ID NO: 305451 - RNA, 19 nt, Homo sapiens
  misc_RNA (1)...(19): siRNA sense strand
ugaugcaagugcuggauaa

SEQ ID NO: 305452 - RNA, 19 nt, Homo sapiens
  misc_RNA (1)...(19): siRNA sense strand
cuacuucgauguugucuac

SEQ ID NO: 305453 - RNA, 19 nt, Homo sapiens
  misc_RNA (1)...(19): siRNA sense strand
aaaggucgcuuccagaaac

SEQ ID NO: 305454 - RNA, 19 nt, Homo sapiens
  misc_RNA (1)...(19): siRNA sense strand
gcacugcucagaaucuuca

SEQ ID NO: 305455 - RNA, 19 nt, Homo sapiens
  misc_RNA (1)...(19): siRNA sense strand
gggcuccaccuacaucuuu

SEQ ID NO: 305456 - RNA, 19 nt, Homo sapiens
  misc_RNA (1)...(19): siRNA sense strand
acgaagcgcuggaggaugu

SEQ ID NO: 305457 - RNA, 19 nt, Homo sapiens
  misc_RNA (1)...(19): siRNA sense strand
ggagcuacccugcguaucu

SEQ ID NO: 305458 - RNA, 19 nt, Homo sapiens
  misc_RNA (1)...(19): siRNA sense strand
ggagaucccagccaaugga

SEQ ID NO: 305459 - RNA, 19 nt, Homo sapiens
  misc_RNA (1)...(19): siRNA sense strand
ucaaaccuaccaacaagaa

SEQ ID NO: 305460 - RNA, 19 nt, Homo sapiens
  misc_RNA (1)...(19): siRNA sense strand
gcacgaagcgcuggaggau

SEQ ID NO: 305461 - RNA, 19 nt, Homo sapiens
  misc_RNA (1)...(19): siRNA sense strand
cgauugaugcaggauauua

SEQ ID NO: 305462 - RNA, 19 nt, Homo sapiens
  misc_RNA (1)...(19): siRNA sense strand
uguaaagggaguagaauug

SEQ ID NO: 305463 - RNA, 19 nt, Homo sapiens
  misc_RNA (1)...(19): siRNA sense strand
ucaaguaccagcugcucua

SEQ ID NO: 305464 - RNA, 19 nt, Homo sapiens
  misc_RNA (1)...(19): siRNA sense strand
ggccaacaccuucccaaga

SEQ ID NO: 305465 - RNA, 19 nt, Homo sapiens
  misc_RNA (1)...(19): siRNA sense strand
cauuugcacugcucagaau

SEQ ID NO: 305466 - RNA, 19 nt, Homo sapiens
  misc_RNA (1)...(19): siRNA sense strand
ggaguucaccuggaucuuc

SEQ ID NO: 305467 - RNA, 19 nt, Homo sapiens
  misc_RNA (1)...(19): siRNA sense strand
cugcguaucuggacaccuu

SEQ ID NO: 305468 - RNA, 19 nt, Homo sapiens
  misc_RNA (1)...(19): siRNA sense strand
gagcuacccugcguaucug

SEQ ID NO: 305469 - RNA, 19 nt, Homo sapiens
  misc_RNA (1)...(19): siRNA sense strand
uaaaggucgcuuccagaaa

SEQ ID NO: 305470 - RNA, 19 nt, Homo sapiens
  misc_RNA (1)...(19): siRNA sense strand
ucucagaucuccgucaagu

SEQ ID NO: 305471 - RNA, 19 nt, Homo sapiens
  misc_RNA (1)...(19): siRNA sense strand
gacauuguuuaugacauga

SEQ ID NO: 305472 - RNA, 19 nt, Homo sapiens
  misc_RNA (1)...(19): siRNA sense strand
gcccaaaauuccuaaaaug

SEQ ID NO: 305473 - RNA, 19 nt, Homo sapiens
  misc_RNA (1)...(19): siRNA sense strand
gacgcagucuaucaugaug

SEQ ID NO: 305474 - RNA, 19 nt, Homo sapiens
  misc_RNA (1)...(19): siRNA sense strand
caaccaucuuggcuucuuc

SEQ ID NO: 305475 - RNA, 19 nt, Homo sapiens
  misc_RNA (1)...(19): siRNA sense strand
ucaaggacagaccacagua

SEQ ID NO: 305476 - RNA, 19 nt, Homo sapiens
  misc_RNA (1)...(19): siRNA sense strand
ggagagaauagaaucaaac

SEQ ID NO: 305477 - RNA, 19 nt, Homo sapiens
  misc_RNA (1)...(19): siRNA sense strand
aaagaaccaggagagaaua

SEQ ID NO: 305478 - RNA, 19 nt, Homo sapiens
  misc_RNA (1)...(19): siRNA sense strand
ggaacggacauuguuuaug

SEQ ID NO: 305479 - RNA, 19 nt, Homo sapiens
  misc_RNA (1)...(19): siRNA sense strand
aggagagaauagaaucaaa

SEQ ID NO: 305480 - RNA, 19 nt, Homo sapiens
  misc_RNA (1)...(19): siRNA sense strand
gaagcgcuggaggauguua

SEQ ID NO: 305481 - RNA, 19 nt, Homo sapiens
  misc_RNA (1)...(19): siRNA sense strand
ucagaucuccgucaaguac

SEQ ID NO: 305482 - RNA, 19 nt, Homo sapiens
  misc_RNA (1)...(19): siRNA sense strand
cgauguaaagggaguagaa

SEQ ID NO: 305483 - RNA, 19 nt, Homo sapiens
  misc_RNA (1)...(19): siRNA sense strand
guagagcuucgauguaaag

SEQ ID NO: 305484 - RNA, 19 nt, Homo sapiens
  misc_RNA (1)...(19): siRNA sense strand
ucauuacaguggaagacuu

SEQ ID NO: 305485 - RNA, 19 nt, Homo sapiens
  misc_RNA (1)...(19): siRNA sense strand
gaaggugaagcccaaaauu

SEQ ID NO: 305486 - RNA, 19 nt, Homo sapiens
  misc_RNA (1)...(19): siRNA sense strand
ccagcuacuucgauguugu

SEQ ID NO: 305487 - RNA, 19 nt, Homo sapiens
  misc_RNA (1)...(19): siRNA sense strand
ggcagacacaggugaauuc

SEQ ID NO: 305488 - RNA, 19 nt, Homo sapiens
  misc_RNA (1)...(19): siRNA sense strand
guaaagggaguagaauugg

SEQ ID NO: 305489 - RNA, 19 nt, Homo sapiens
  misc_RNA (1)...(19): siRNA sense strand
auaaaggucgcuuccagaa

SEQ ID NO: 305490 - RNA, 19 nt, Homo sapiens
  misc_RNA (1)...(19): siRNA sense strand
gagugucauuacaguggaa

SEQ ID NO: 305491 - RNA, 19 nt, Homo sapiens
  misc_RNA (1)...(19): siRNA sense strand
gcagacacaggugaauuca

SEQ ID NO: 305492 - RNA, 19 nt, Homo sapiens
  misc_RNA (1)...(19): siRNA sense strand
uguagagcuucgauguaaa

SEQ ID NO: 305493 - RNA, 19 nt, Homo sapiens
  misc_RNA (1)...(19): siRNA sense strand
ugcaagugcuggauaaagg

SEQ ID NO: 305494 - RNA, 19 nt, Homo sapiens
  misc_RNA (1)...(19): siRNA sense strand
ugaugcaggauauuacauu

SEQ ID NO: 305495 - RNA, 19 nt, Homo sapiens
  misc_RNA (1)...(19): siRNA sense strand
caacaccuucccaagaaca

SEQ ID NO: 305496 - RNA, 19 nt, Homo sapiens
  misc_RNA (1)...(19): siRNA sense strand
gcggcuacaucugcaggaa

SEQ ID NO: 305497 - RNA, 19 nt, Homo sapiens
  misc_RNA (1)...(19): siRNA sense strand
gcaagugcuggauaaaggu

SEQ ID NO: 305498 - RNA, 19 nt, Homo sapiens
  misc_RNA (1)...(19): siRNA sense strand
acaaccaucuuggcuucuu

SEQ ID NO: 305499 - RNA, 19 nt, Homo sapiens
  misc_RNA (1)...(19): siRNA sense strand
ucgauguugucuacuugaa

SEQ ID NO: 305500 - RNA, 19 nt, Homo sapiens
  misc_RNA (1)...(19): siRNA sense strand
cuucgauguugucuacuug

SEQ ID NO: 305501 - RNA, 19 nt, Homo sapiens
  misc_RNA (1)...(19): siRNA sense strand
ccaagaacaagcguccaaa

SEQ ID NO: 305502 - RNA, 19 nt, Homo sapiens
  misc_RNA (1)...(19): siRNA sense strand
gauguaaagggaguagaau

SEQ ID NO: 305503 - RNA, 19 nt, Homo sapiens
  misc_RNA (1)...(19): siRNA sense strand
caaaagaaccaggagagaa

SEQ ID NO: 305504 - RNA, 19 nt, Homo sapiens
  misc_RNA (1)...(19): siRNA sense strand
gcguaucuggacaccuuua

SEQ ID NO: 305505 - RNA, 19 nt, Homo sapiens
  misc_RNA (1)...(19): siRNA sense strand
uagcuaccacuguugaguu

SEQ ID NO: 305506 - RNA, 19 nt, Homo sapiens
  misc_RNA (1)...(19): siRNA sense strand
gcaggauauuacauuugca

SEQ ID NO: 305507 - RNA, 19 nt, Homo sapiens
  misc_RNA (1)...(19): siRNA sense strand
ucccagggcagaaggauga

SEQ ID NO: 305508 - RNA, 19 nt, Homo sapiens
  misc_RNA (1)...(19): siRNA sense strand
caggagagaauagaaucaa

SEQ ID NO: 305509 - RNA, 19 nt, Homo sapiens
  misc_RNA (1)...(19): siRNA sense strand
agcuaccacuguugaguuu

SEQ ID NO: 305510 - RNA, 19 nt, Homo sapiens
  misc_RNA (1)...(19): siRNA sense strand
caaggacagaccacaguag

SEQ ID NO: 305511 - RNA, 19 nt, Homo sapiens
  misc_RNA (1)...(19): siRNA sense strand
caguggcccucccucaaca

SEQ ID NO: 305512 - RNA, 19 nt, Homo sapiens
  misc_RNA (1)...(19): siRNA sense strand
agaaucaaaccuaccaaca

SEQ ID NO: 305513 - RNA, 19 nt, Homo sapiens
  misc_RNA (1)...(19): siRNA sense strand
gagaucccagccaauggaa

SEQ ID NO: 305514 - RNA, 19 nt, Homo sapiens
  misc_RNA (1)...(19): siRNA sense strand
gaugcaagugcuggauaaa

SEQ ID NO: 305515 - RNA, 19 nt, Homo sapiens
  misc_RNA (1)...(19): siRNA sense strand
cuuggcuucuucaaacaaa

SEQ ID NO: 305516 - RNA, 19 nt, Homo sapiens
  misc_RNA (1)...(19): siRNA sense strand
ggcccucccucaacaacca

SEQ ID NO: 305517 - RNA, 19 nt, Homo sapiens
  misc_RNA (1)...(19): siRNA sense strand
ugcaggauauuacauuugc

SEQ ID NO: 305518 - RNA, 19 nt, Homo sapiens
  misc_RNA (1)...(19): siRNA sense strand
gcacauaguuggagagauu

SEQ ID NO: 305519 - RNA, 19 nt, Homo sapiens
  misc_RNA (1)...(19): siRNA sense strand
gaagacaguuugcuauaaa

SEQ ID NO: 305520 - RNA, 19 nt, Homo sapiens
  misc_RNA (1)...(19): siRNA sense strand
gaacugggacuuauauuaa

SEQ ID NO: 305521 - RNA, 19 nt, Homo sapiens
  misc_RNA (1)...(19): siRNA sense strand
ggacaaggcuuugaaugaa

SEQ ID NO: 305522 - RNA, 19 nt, Homo sapiens
  misc_RNA (1)...(19): siRNA sense strand
gaagacaacuggaacuaug

SEQ ID NO: 305523 - RNA, 19 nt, Homo sapiens
  misc_RNA (1)...(19): siRNA sense strand
ggacagaacuccucagucu

SEQ ID NO: 305524 - RNA, 19 nt, Homo sapiens
  misc_RNA (1)...(19): siRNA sense strand
gguugaagauuaccaguua

SEQ ID NO: 305525 - RNA, 19 nt, Homo sapiens
  misc_RNA (1)...(19): siRNA sense strand
ggaauuaucucagccagaa

SEQ ID NO: 305526 - RNA, 19 nt, Homo sapiens
  misc_RNA (1)...(19): siRNA sense strand
gcacacauauaaucuuaga

SEQ ID NO: 305527 - RNA, 19 nt, Homo sapiens
  misc_RNA (1)...(19): siRNA sense strand
caacugaaccacuauuuaa

SEQ ID NO: 305528 - RNA, 19 nt, Homo sapiens
  misc_RNA (1)...(19): siRNA sense strand
gagcaguucugaagugaaa

SEQ ID NO: 305529 - RNA, 19 nt, Homo sapiens
  misc_RNA (1)...(19): siRNA sense strand
gcacagcuuucuuaaacaa

SEQ ID NO: 305530 - RNA, 19 nt, Homo sapiens
  misc_RNA (1)...(19): siRNA sense strand
caacugaauucuauccaaa

SEQ ID NO: 305531 - RNA, 19 nt, Homo sapiens
  misc_RNA (1)...(19): siRNA sense strand
caccaucccuggccaaaua

SEQ ID NO: 305532 - RNA, 19 nt, Homo sapiens
  misc_RNA (1)...(19): siRNA sense strand
gugcacacauauaaucuua

SEQ ID NO: 305533 - RNA, 19 nt, Homo sapiens
  misc_RNA (1)...(19): siRNA sense strand
ccacagacuuugaggauga

SEQ ID NO: 305534 - RNA, 19 nt, Homo sapiens
  misc_RNA (1)...(19): siRNA sense strand
gcaacugaaccacuauuua

SEQ ID NO: 305535 - RNA, 19 nt, Homo sapiens
  misc_RNA (1)...(19): siRNA sense strand
gcgcuuaccugaugaguca

SEQ ID NO: 305536 - RNA, 19 nt, Homo sapiens
  misc_RNA (1)...(19): siRNA sense strand
gaaauaggaacaaagcaaa

SEQ ID NO: 305537 - RNA, 19 nt, Homo sapiens
  misc_RNA (1)...(19): siRNA sense strand
gauggcuucuggaaacuua

SEQ ID NO: 305538 - RNA, 19 nt, Homo sapiens
  misc_RNA (1)...(19): siRNA sense strand
aaacaaaccuugaaaucuc

SEQ ID NO: 305539 - RNA, 19 nt, Homo sapiens
  misc_RNA (1)...(19): siRNA sense strand
gaaccacuauuuaagaaag

SEQ ID NO: 305540 - RNA, 19 nt, Homo sapiens
  misc_RNA (1)...(19): siRNA sense strand
gcaagugaauggguaagaa

SEQ ID NO: 305541 - RNA, 19 nt, Homo sapiens
  misc_RNA (1)...(19): siRNA sense strand
gccaagaggugagcgauuu

SEQ ID NO: 305542 - RNA, 19 nt, Homo sapiens
  misc_RNA (1)...(19): siRNA sense strand
guacgugauugaauucauu

SEQ ID NO: 305543 - RNA, 19 nt, Homo sapiens
  misc_RNA (1)...(19): siRNA sense strand
gagcaaacuugguaaugug

SEQ ID NO: 305544 - RNA, 19 nt, Homo sapiens
  misc_RNA (1)...(19): siRNA sense strand
guuaaugucugugaaacua

SEQ ID NO: 305545 - RNA, 19 nt, Homo sapiens
  misc_RNA (1)...(19): siRNA sense strand
ggaagucgauguccugucu

SEQ ID NO: 305546 - RNA, 19 nt, Homo sapiens
  misc_RNA (1)...(19): siRNA sense strand
ccaauuagcaucugaacaa

SEQ ID NO: 305547 - RNA, 19 nt, Homo sapiens
  misc_RNA (1)...(19): siRNA sense strand
gaaggacaguacccaucua

SEQ ID NO: 305548 - RNA, 19 nt, Homo sapiens
  misc_RNA (1)...(19): siRNA sense strand
gcaacauccuggaggcuuu

SEQ ID NO: 305549 - RNA, 19 nt, Homo sapiens
  misc_RNA (1)...(19): siRNA sense strand
gacaaggcuuugaaugaaa

SEQ ID NO: 305550 - RNA, 19 nt, Homo sapiens
  misc_RNA (1)...(19): siRNA sense strand
cgucacgucuuaaggauuu

SEQ ID NO: 305551 - RNA, 19 nt, Homo sapiens
  misc_RNA (1)...(19): siRNA sense strand
gggauucuccuucuaguaa

SEQ ID NO: 305552 - RNA, 19 nt, Homo sapiens
  misc_RNA (1)...(19): siRNA sense strand
ccaagaauguggguugaaa

SEQ ID NO: 305553 - RNA, 19 nt, Homo sapiens
  misc_RNA (1)...(19): siRNA sense strand
gaagugggauuuauuucag

SEQ ID NO: 305554 - RNA, 19 nt, Homo sapiens
  misc_RNA (1)...(19): siRNA sense strand
gaagugaaccugggacuau

SEQ ID NO: 305555 - RNA, 19 nt, Homo sapiens
  misc_RNA (1)...(19): siRNA sense strand
ggauuagccucaacgaugu

SEQ ID NO: 305556 - RNA, 19 nt, Homo sapiens
  misc_RNA (1)...(19): siRNA sense strand
gaggauggcuucuggaaac

SEQ ID NO: 305557 - RNA, 19 nt, Homo sapiens
  misc_RNA (1)...(19): siRNA sense strand
gcaacucugugugcacuaa

SEQ ID NO: 305558 - RNA, 19 nt, Homo sapiens
  misc_RNA (1)...(19): siRNA sense strand
gaugagagccugacauuac

SEQ ID NO: 305559 - RNA, 19 nt, Homo sapiens
  misc_RNA (1)...(19): siRNA sense strand
acaaggauuucuacuaaga

SEQ ID NO: 305560 - RNA, 19 nt, Homo sapiens
  misc_RNA (1)...(19): siRNA sense strand
caauaaagcaagcaaguga

SEQ ID NO: 305561 - RNA, 19 nt, Homo sapiens
  misc_RNA (1)...(19): siRNA sense strand
gaacuaugauccacaagcu

SEQ ID NO: 305562 - RNA, 19 nt, Homo sapiens
  misc_RNA (1)...(19): siRNA sense strand
aagcauaucacaagcaaua

SEQ ID NO: 305563 - RNA, 19 nt, Homo sapiens
  misc_RNA (1)...(19): siRNA sense strand
gaagugauuauuugucuug

SEQ ID NO: 305564 - RNA, 19 nt, Homo sapiens
  misc_RNA (1)...(19): siRNA sense strand
guggaugucuugcagauau

SEQ ID NO: 305565 - RNA, 19 nt, Homo sapiens
  misc_RNA (1)...(19): siRNA sense strand
caaaugaccaggcuauguu

SEQ ID NO: 305566 - RNA, 19 nt, Homo sapiens
  misc_RNA (1)...(19): siRNA sense strand
gcuacaaacugacauuaag

SEQ ID NO: 305567 - RNA, 19 nt, Homo sapiens
  misc_RNA (1)...(19): siRNA sense strand
caucaaagggagaaucaua

SEQ ID NO: 305568 - RNA, 19 nt, Homo sapiens
  misc_RNA (1)...(19): siRNA sense strand
gaccugaguuuucaaauuu

SEQ ID NO: 305569 - RNA, 19 nt, Homo sapiens
  misc_RNA (1)...(19): siRNA sense strand
ggaauacagaccugaguuu

SEQ ID NO: 305570 - RNA, 19 nt, Homo sapiens
  misc_RNA (1)...(19): siRNA sense strand
gagaucagauaaaggacuu

SEQ ID NO: 305571 - RNA, 19 nt, Homo sapiens
  misc_RNA (1)...(19): siRNA sense strand
agaagacaguuugcuauaa

SEQ ID NO: 305572 - RNA, 19 nt, Homo sapiens
  misc_RNA (1)...(19): siRNA sense strand
agaagaggaugaaauagug

SEQ ID NO: 305573 - RNA, 19 nt, Homo sapiens
  misc_RNA (1)...(19): siRNA sense strand
gcacaaugcccaaagaagu

SEQ ID NO: 305574 - RNA, 19 nt, Homo sapiens
  misc_RNA (1)...(19): siRNA sense strand
ccacaaugcugguacuaca

SEQ ID NO: 305575 - RNA, 19 nt, Homo sapiens
  misc_RNA (1)...(19): siRNA sense strand
uugaagaacugaagaaaca

SEQ ID NO: 305576 - RNA, 19 nt, Homo sapiens
  misc_RNA (1)...(19): siRNA sense strand
ggaagugggauuuauuuca

SEQ ID NO: 305577 - RNA, 19 nt, Homo sapiens
  misc_RNA (1)...(19): siRNA sense strand
guacaauggugucgacuac

SEQ ID NO: 305578 - RNA, 19 nt, Homo sapiens
  misc_RNA (1)...(19): siRNA sense strand
gggaauaguguucaaauca

SEQ ID NO: 305579 - RNA, 19 nt, Homo sapiens
  misc_RNA (1)...(19): siRNA sense strand
cuaauaagagacaugguua

SEQ ID NO: 305580 - RNA, 19 nt, Homo sapiens
  misc_RNA (1)...(19): siRNA sense strand
gggaaucuuugcaaauugu

SEQ ID NO: 305581 - RNA, 19 nt, Homo sapiens
  misc_RNA (1)...(19): siRNA sense strand
gaacagacgucggaaaccu

SEQ ID NO: 305582 - RNA, 19 nt, Homo sapiens
  misc_RNA (1)...(19): siRNA sense strand
uugcagauauuuagaguug

SEQ ID NO: 305583 - RNA, 19 nt, Homo sapiens
  misc_RNA (1)...(19): siRNA sense strand
gaaggaagaagcccagcaa

SEQ ID NO: 305584 - RNA, 19 nt, Homo sapiens
  misc_RNA (1)...(19): siRNA sense strand
ggacaguacccaucuaucu

SEQ ID NO: 305585 - RNA, 19 nt, Homo sapiens
  misc_RNA (1)...(19): siRNA sense strand
agaacugggacuuauauua

SEQ ID NO: 305586 - RNA, 19 nt, Homo sapiens
  misc_RNA (1)...(19): siRNA sense strand
gaacuccucagucuacaga

SEQ ID NO: 305587 - RNA, 19 nt, Homo sapiens
  misc_RNA (1)...(19): siRNA sense strand
cacagaaagugaugagcua

SEQ ID NO: 305588 - RNA, 19 nt, Homo sapiens
  misc_RNA (1)...(19): siRNA sense strand
gauguccugucuuugcuuu

SEQ ID NO: 305589 - RNA, 19 nt, Homo sapiens
  misc_RNA (1)...(19): siRNA sense strand
ggugagcgauuuaguagag

SEQ ID NO: 305590 - RNA, 19 nt, Homo sapiens
  misc_RNA (1)...(19): siRNA sense strand
gcgaagugauuauuugucu

SEQ ID NO: 305591 - RNA, 19 nt, Homo sapiens
  misc_RNA (1)...(19): siRNA sense strand
ccauggcgcuuaccugaug

SEQ ID NO: 305592 - RNA, 19 nt, Homo sapiens
  misc_RNA (1)...(19): siRNA sense strand
ggaagaagcccagcaagag

SEQ ID NO: 305593 - RNA, 19 nt, Homo sapiens
  misc_RNA (1)...(19): siRNA sense strand
gcaugguucuccuguacaa

SEQ ID NO: 305594 - RNA, 19 nt, Homo sapiens
  misc_RNA (1)...(19): siRNA sense strand
ggaaaucuaucagagaaaa

SEQ ID NO: 305595 - RNA, 19 nt, Homo sapiens
  misc_RNA (1)...(19): siRNA sense strand
uggaaaagcuauuggauuu

SEQ ID NO: 305596 - RNA, 19 nt, Homo sapiens
  misc_RNA (1)...(19): siRNA sense strand
ggugagaagcagaaaguaa

SEQ ID NO: 305597 - RNA, 19 nt, Homo sapiens
  misc_RNA (1)...(19): siRNA sense strand
ugaauuagaggaauacaga

SEQ ID NO: 305598 - RNA, 19 nt, Homo sapiens
  misc_RNA (1)...(19): siRNA sense strand
gaacagaauacugaagaau

SEQ ID NO: 305599 - RNA, 19 nt, Homo sapiens
  misc_RNA (1)...(19): siRNA sense strand
gcagagcaauugcaaaaga

SEQ ID NO: 305600 - RNA, 19 nt, Homo sapiens
  misc_RNA (1)...(19): siRNA sense strand
gaacaggauuagccucaac

SEQ ID NO: 305601 - RNA, 19 nt, Homo sapiens
  misc_RNA (1)...(19): siRNA sense strand
ggaagacacuguggaacuc

SEQ ID NO: 305602 - RNA, 19 nt, Homo sapiens
  misc_RNA (1)...(19): siRNA sense strand
ggaggaagacacuguggaa

SEQ ID NO: 305603 - RNA, 19 nt, Homo sapiens
  misc_RNA (1)...(19): siRNA sense strand
uggaggaagucaugaauuc

SEQ ID NO: 305604 - RNA, 19 nt, Homo sapiens
  misc_RNA (1)...(19): siRNA sense strand
ugggaaacaucuacuucua

SEQ ID NO: 305605 - RNA, 19 nt, Homo sapiens
  misc_RNA (1)...(19): siRNA sense strand
ugaaaccagucaugagaug

SEQ ID NO: 305606 - RNA, 19 nt, Homo sapiens
  misc_RNA (1)...(19): siRNA sense strand
cagcagaguucaucauguc

SEQ ID NO: 305607 - RNA, 19 nt, Homo sapiens
  misc_RNA (1)...(19): siRNA sense strand
gcagcagaguucaucaugu

SEQ ID NO: 305608 - RNA, 19 nt, Homo sapiens
  misc_RNA (1)...(19): siRNA sense strand
acaaggagcuauuuucgua

SEQ ID NO: 305609 - RNA, 19 nt, Homo sapiens
  misc_RNA (1)...(19): siRNA sense strand
gugagaagcagaaaguaaa

SEQ ID NO: 305610 - RNA, 19 nt, Homo sapiens
  misc_RNA (1)...(19): siRNA sense strand
aaagucacgugcccauuga

SEQ ID NO: 305611 - RNA, 19 nt, Homo sapiens
  misc_RNA (1)...(19): siRNA sense strand
ggaagaucguggugugcaa

SEQ ID NO: 305612 - RNA, 19 nt, Homo sapiens
  misc_RNA (1)...(19): siRNA sense strand
gagagcgaagugauuauuu

SEQ ID NO: 305613 - RNA, 19 nt, Homo sapiens
  misc_RNA (1)...(19): siRNA sense strand
cauucaaucucuaggugua

SEQ ID NO: 305614 - RNA, 19 nt, Homo sapiens
  misc_RNA (1)...(19): siRNA sense strand
gauuuaaguuggacagagu

SEQ ID NO: 305615 - RNA, 19 nt, Homo sapiens
  misc_RNA (1)...(19): siRNA sense strand
gaacuuauugccaaagaag

SEQ ID NO: 305616 - RNA, 19 nt, Homo sapiens
  misc_RNA (1)...(19): siRNA sense strand
acuccgauaucuuagcuua

SEQ ID NO: 305617 - RNA, 19 nt, Homo sapiens
  misc_RNA (1)...(19): siRNA sense strand
gagaagcagaaaguaaaua

SEQ ID NO: 305618 - RNA, 19 nt, Homo sapiens
  misc_RNA (1)...(19): siRNA sense strand
gaaggaaguuguaggaaua

SEQ ID NO: 305619 - RNA, 19 nt, Homo sapiens
  misc_RNA (1)...(19): siRNA sense strand
gaaaggaggugaaaccauu

SEQ ID NO: 305620 - RNA, 19 nt, Homo sapiens
  misc_RNA (1)...(19): siRNA sense strand
auaaggagcucuucagaua

SEQ ID NO: 305621 - RNA, 19 nt, Homo sapiens
  misc_RNA (1)...(19): siRNA sense strand
ucacgaagguccaggauuu

SEQ ID NO: 305622 - RNA, 19 nt, Homo sapiens
  misc_RNA (1)...(19): siRNA sense strand
ggugaaaccauuaggauua

SEQ ID NO: 305623 - RNA, 19 nt, Homo sapiens
  misc_RNA (1)...(19): siRNA sense strand
gaacaacggcugucugguu

SEQ ID NO: 305624 - RNA, 19 nt, Homo sapiens
  misc_RNA (1)...(19): siRNA sense strand
aaacaaaccuccagauucu

SEQ ID NO: 305625 - RNA, 19 nt, Homo sapiens
  misc_RNA (1)...(19): siRNA sense strand
ccauuaggauuaacaguaa

SEQ ID NO: 305626 - RNA, 19 nt, Homo sapiens
  misc_RNA (1)...(19): siRNA sense strand
gaaaauagcgugaacuuga

SEQ ID NO: 305627 - RNA, 19 nt, Homo sapiens
  misc_RNA (1)...(19): siRNA sense strand
ccucaacaauuccaguaua

SEQ ID NO: 305628 - RNA, 19 nt, Homo sapiens
  misc_RNA (1)...(19): siRNA sense strand
gagaagggcgacacuguuu

SEQ ID NO: 305629 - RNA, 19 nt, Homo sapiens
  misc_RNA (1)...(19): siRNA sense strand
ugagagaugugaccauuuc

SEQ ID NO: 305630 - RNA, 19 nt, Homo sapiens
  misc_RNA (1)...(19): siRNA sense strand
gugaaaccauuaggauuaa

SEQ ID NO: 305631 - RNA, 19 nt, Homo sapiens
  misc_RNA (1)...(19): siRNA sense strand
gaaggauauuuggauguuu

SEQ ID NO: 305632 - RNA, 19 nt, Homo sapiens
  misc_RNA (1)...(19): siRNA sense strand
gaagggcaccagucaagaa

SEQ ID NO: 305633 - RNA, 19 nt, Homo sapiens
  misc_RNA (1)...(19): siRNA sense strand
gaaaggagaaagaaccaau

SEQ ID NO: 305634 - RNA, 19 nt, Homo sapiens
  misc_RNA (1)...(19): siRNA sense strand
uaaacaaaccuccagauuc

SEQ ID NO: 305635 - RNA, 19 nt, Homo sapiens
  misc_RNA (1)...(19): siRNA sense strand
ggacggcgauggagcacau

SEQ ID NO: 305636 - RNA, 19 nt, Homo sapiens
  misc_RNA (1)...(19): siRNA sense strand
ugaaggauauuuggauguu

SEQ ID NO: 305637 - RNA, 19 nt, Homo sapiens
  misc_RNA (1)...(19): siRNA sense strand
ucacuggaccuaauauuau

SEQ ID NO: 305638 - RNA, 19 nt, Homo sapiens
  misc_RNA (1)...(19): siRNA sense strand
gcaauuuccugccauuucg

SEQ ID NO: 305639 - RNA, 19 nt, Homo sapiens
  misc_RNA (1)...(19): siRNA sense strand
uaaauucuuuggagcugaa

SEQ ID NO: 305640 - RNA, 19 nt, Homo sapiens
  misc_RNA (1)...(19): siRNA sense strand
agaaggaaguuguaggaau

SEQ ID NO: 305641 - RNA, 19 nt, Homo sapiens
  misc_RNA (1)...(19): siRNA sense strand
gagcucgacuugugaaagg

SEQ ID NO: 305642 - RNA, 19 nt, Homo sapiens
  misc_RNA (1)...(19): siRNA sense strand
ggagaagggcgacacuguu

SEQ ID NO: 305643 - RNA, 19 nt, Homo sapiens
  misc_RNA (1)...(19): siRNA sense strand
gaacuugaaggauauuugg

SEQ ID NO: 305644 - RNA, 19 nt, Homo sapiens
  misc_RNA (1)...(19): siRNA sense strand
ccgagauucugaaauaugu

SEQ ID NO: 305645 - RNA, 19 nt, Homo sapiens
  misc_RNA (1)...(19): siRNA sense strand
guaggaauagcacauaaau

SEQ ID NO: 305646 - RNA, 19 nt, Homo sapiens
  misc_RNA (1)...(19): siRNA sense strand
uaacaguaaugagagaugu

SEQ ID NO: 305647 - RNA, 19 nt, Homo sapiens
  misc_RNA (1)...(19): siRNA sense strand
gaauaugcuccaagugaga

SEQ ID NO: 305648 - RNA, 19 nt, Homo sapiens
  misc_RNA (1)...(19): siRNA sense strand
ccgaauaugcuccaaguga

SEQ ID NO: 305649 - RNA, 19 nt, Homo sapiens
  misc_RNA (1)...(19): siRNA sense strand
gagaugugaccauuucgaa

SEQ ID NO: 305650 - RNA, 19 nt, Homo sapiens
  misc_RNA (1)...(19): siRNA sense strand
gauaaggagcucuucagau

SEQ ID NO: 305651 - RNA, 19 nt, Homo sapiens
  misc_RNA (1)...(19): siRNA sense strand
agcgugaacuugaaggaua

SEQ ID NO: 305652 - RNA, 19 nt, Homo sapiens
  misc_RNA (1)...(19): siRNA sense strand
gcgugaacuugaaggauau

SEQ ID NO: 305653 - RNA, 19 nt, Homo sapiens
  misc_RNA (1)...(19): siRNA sense strand
gaaaccauuaggauuaaca

SEQ ID NO: 305654 - RNA, 19 nt, Homo sapiens
  misc_RNA (1)...(19): siRNA sense strand
gauccaggacuacgaggaa

SEQ ID NO: 305655 - RNA, 19 nt, Homo sapiens
  misc_RNA (1)...(19): siRNA sense strand
gagcacaucagccggaaca

SEQ ID NO: 305656 - RNA, 19 nt, Homo sapiens
  misc_RNA (1)...(19): siRNA sense strand
cgagaaggaaguuguagga

SEQ ID NO: 305657 - RNA, 19 nt, Homo sapiens
  misc_RNA (1)...(19): siRNA sense strand
gaggugaaaccauuaggau

SEQ ID NO: 305658 - RNA, 19 nt, Homo sapiens
  misc_RNA (1)...(19): siRNA sense strand
ccacuacauugacgugaag

SEQ ID NO: 305659 - RNA, 19 nt, Homo sapiens
  misc_RNA (1)...(19): siRNA sense strand
gccacuacauugacgugaa

SEQ ID NO: 305660 - RNA, 19 nt, Homo sapiens
  misc_RNA (1)...(19): siRNA sense strand
gauaaacaaaccuccagau

SEQ ID NO: 305661 - RNA, 19 nt, Homo sapiens
  misc_RNA (1)...(19): siRNA sense strand
aaaggaggugaaaccauua

SEQ ID NO: 305662 - RNA, 19 nt, Homo sapiens
  misc_RNA (1)...(19): siRNA sense strand
aaggauauuuggauguuuc

SEQ ID NO: 305663 - RNA, 19 nt, Homo sapiens
  misc_RNA (1)...(19): siRNA sense strand
auaaacaaaccuccagauu

SEQ ID NO: 305664 - RNA, 19 nt, Homo sapiens
  misc_RNA (1)...(19): siRNA sense strand
caguauacucuggauaaua

SEQ ID NO: 305665 - RNA, 19 nt, Homo sapiens
  misc_RNA (1)...(19): siRNA sense strand
ggaggugaaaccauuagga

SEQ ID NO: 305666 - RNA, 19 nt, Homo sapiens
  misc_RNA (1)...(19): siRNA sense strand
cacuggaccuaauauuaug

SEQ ID NO: 305667 - RNA, 19 nt, Homo sapiens
  misc_RNA (1)...(19): siRNA sense strand
caacaauuccaguauacuc

SEQ ID NO: 305668 - RNA, 19 nt, Homo sapiens
  misc_RNA (1)...(19): siRNA sense strand
gcagaaaggaggugaaacc

SEQ ID NO: 305669 - RNA, 19 nt, Homo sapiens
  misc_RNA (1)...(19): siRNA sense strand
agaagaugaucacgaaggu

SEQ ID NO: 305670 - RNA, 19 nt, Homo sapiens
  misc_RNA (1)...(19): siRNA sense strand
aaauggguuucuaguaauc

SEQ ID NO: 305671 - RNA, 19 nt, Homo sapiens
  misc_RNA (1)...(19): siRNA sense strand
gagaaggaaguuguaggaa

SEQ ID NO: 305672 - RNA, 19 nt, Homo sapiens
  misc_RNA (1)...(19): siRNA sense strand
caucgagaaggaaguugua

SEQ ID NO: 305673 - RNA, 19 nt, Homo sapiens
  misc_RNA (1)...(19): siRNA sense strand
ggauaauaauguucuaacc

SEQ ID NO: 305674 - RNA, 19 nt, Homo sapiens
  misc_RNA (1)...(19): siRNA sense strand
gggcgacacuguuuucuuc

SEQ ID NO: 305675 - RNA, 19 nt, Homo sapiens
  misc_RNA (1)...(19): siRNA sense strand
caguuuccauccucaacaa

SEQ ID NO: 305676 - RNA, 19 nt, Homo sapiens
  misc_RNA (1)...(19): siRNA sense strand
aaaauagcgugaacuugaa

SEQ ID NO: 305677 - RNA, 19 nt, Homo sapiens
  misc_RNA (1)...(19): siRNA sense strand
uucacuggaccuaauauua

SEQ ID NO: 305678 - RNA, 19 nt, Homo sapiens
  misc_RNA (1)...(19): siRNA sense strand
aaacaucgagaaggaaguu

SEQ ID NO: 305679 - RNA, 19 nt, Homo sapiens
  misc_RNA (1)...(19): siRNA sense strand
ccacuucagggacuauuuc

SEQ ID NO: 305680 - RNA, 19 nt, Homo sapiens
  misc_RNA (1)...(19): siRNA sense strand
aagaaaacaucgagaagga

SEQ ID NO: 305681 - RNA, 19 nt, Homo sapiens
  misc_RNA (1)...(19): siRNA sense strand
ccgauugccacuacauuga

SEQ ID NO: 305682 - RNA, 19 nt, Homo sapiens
  misc_RNA (1)...(19): siRNA sense strand
aaggagcucuucagauacu

SEQ ID NO: 305683 - RNA, 19 nt, Homo sapiens
  misc_RNA (1)...(19): siRNA sense strand
gccaugcacacaauguuga

SEQ ID NO: 305684 - RNA, 19 nt, Homo sapiens
  misc_RNA (1)...(19): siRNA sense strand
accauuaggauuaacagua

SEQ ID NO: 305685 - RNA, 19 nt, Homo sapiens
  misc_RNA (1)...(19): siRNA sense strand
ggaaguuguaggaauagca

SEQ ID NO: 305686 - RNA, 19 nt, Homo sapiens
  misc_RNA (1)...(19): siRNA sense strand
gugaagggcaccagucaag

SEQ ID NO: 305687 - RNA, 19 nt, Homo sapiens
  misc_RNA (1)...(19): siRNA sense strand
gccgauugccacuacauug

SEQ ID NO: 305688 - RNA, 19 nt, Homo sapiens
  misc_RNA (1)...(19): siRNA sense strand
ugcacacaauguugauaaa

SEQ ID NO: 305689 - RNA, 19 nt, Homo sapiens
  misc_RNA (1)...(19): siRNA sense strand
ggccaugcacacaauguug

SEQ ID NO: 305690 - RNA, 19 nt, Homo sapiens
  misc_RNA (1)...(19): siRNA sense strand
uccccgagauucugaaaua

SEQ ID NO: 305691 - RNA, 19 nt, Homo sapiens
  misc_RNA (1)...(19): siRNA sense strand
gcuccaagugagaagauga

SEQ ID NO: 305692 - RNA, 19 nt, Homo sapiens
  misc_RNA (1)...(19): siRNA sense strand
guuguaggaauagcacaua

SEQ ID NO: 305693 - RNA, 19 nt, Homo sapiens
  misc_RNA (1)...(19): siRNA sense strand
gcacacaauguugauaaac

SEQ ID NO: 305694 - RNA, 19 nt, Homo sapiens
  misc_RNA (1)...(19): siRNA sense strand
cuaauauuauggccaugca

SEQ ID NO: 305695 - RNA, 19 nt, Homo sapiens
  misc_RNA (1)...(19): siRNA sense strand
gcacaucagccggaacaac

SEQ ID NO: 305696 - RNA, 19 nt, Homo sapiens
  misc_RNA (1)...(19): siRNA sense strand
ugaacuugaaggauauuug

SEQ ID NO: 305697 - RNA, 19 nt, Homo sapiens
  misc_RNA (1)...(19): siRNA sense strand
uuguaggaauagcacauaa

SEQ ID NO: 305698 - RNA, 19 nt, Homo sapiens
  misc_RNA (1)...(19): siRNA sense strand
uuuccauccucaacaauuc

SEQ ID NO: 305699 - RNA, 19 nt, Homo sapiens
  misc_RNA (1)...(19): siRNA sense strand
uaccugaugccgauauuca

SEQ ID NO: 305700 - RNA, 19 nt, Homo sapiens
  misc_RNA (1)...(19): siRNA sense strand
ccaagugagaagaugauca

SEQ ID NO: 305701 - RNA, 19 nt, Homo sapiens
  misc_RNA (1)...(19): siRNA sense strand
gaacauaaccgagauauuu

SEQ ID NO: 305702 - RNA, 19 nt, Homo sapiens
  misc_RNA (1)...(19): siRNA sense strand
acacacagcugauaaauuu

SEQ ID NO: 305703 - RNA, 19 nt, Homo sapiens
  misc_RNA (1)...(19): siRNA sense strand
gaaauaagccucccuagau

SEQ ID NO: 305704 - RNA, 19 nt, Homo sapiens
  misc_RNA (1)...(19): siRNA sense strand
gcagauaagacaaacuuua

SEQ ID NO: 305705 - RNA, 19 nt, Homo sapiens
  misc_RNA (1)...(19): siRNA sense strand
gagguuuccuuaucucaua

SEQ ID NO: 305706 - RNA, 19 nt, Homo sapiens
  misc_RNA (1)...(19): siRNA sense strand
gcaagaagaggaaguagaa

SEQ ID NO: 305707 - RNA, 19 nt, Homo sapiens
  misc_RNA (1)...(19): siRNA sense strand
ggaauaacuuugguucuug

SEQ ID NO: 305708 - RNA, 19 nt, Homo sapiens
  misc_RNA (1)...(19): siRNA sense strand
gcucaaagccaauuuauag

SEQ ID NO: 305709 - RNA, 19 nt, Homo sapiens
  misc_RNA (1)...(19): siRNA sense strand
gaauaacuuugguucuuga

SEQ ID NO: 305710 - RNA, 19 nt, Homo sapiens
  misc_RNA (1)...(19): siRNA sense strand
ggugaugaauuuagcuuaa

SEQ ID NO: 305711 - RNA, 19 nt, Homo sapiens
  misc_RNA (1)...(19): siRNA sense strand
gaagaggaaguagaaauaa

SEQ ID NO: 305712 - RNA, 19 nt, Homo sapiens
  misc_RNA (1)...(19): siRNA sense strand
ggaaacagaaauucagaaa

SEQ ID NO: 305713 - RNA, 19 nt, Homo sapiens
  misc_RNA (1)...(19): siRNA sense strand
aaauaagccucccuagauu

SEQ ID NO: 305714 - RNA, 19 nt, Homo sapiens
  misc_RNA (1)...(19): siRNA sense strand
gugcagagaugauaaguac

SEQ ID NO: 305715 - RNA, 19 nt, Homo sapiens
  misc_RNA (1)...(19): siRNA sense strand
cagaagguauggauauaga

SEQ ID NO: 305716 - RNA, 19 nt, Homo sapiens
  misc_RNA (1)...(19): siRNA sense strand
gaagagauuuagauucacu

SEQ ID NO: 305717 - RNA, 19 nt, Homo sapiens
  misc_RNA (1)...(19): siRNA sense strand
ggugaaugcuauuuauuuc

SEQ ID NO: 305718 - RNA, 19 nt, Homo sapiens
  misc_RNA (1)...(19): siRNA sense strand
aggaagagauuuagauuca

SEQ ID NO: 305719 - RNA, 19 nt, Homo sapiens
  misc_RNA (1)...(19): siRNA sense strand
ggauauagaagaaguggaa

SEQ ID NO: 305720 - RNA, 19 nt, Homo sapiens
  misc_RNA (1)...(19): siRNA sense strand
caaagccaauuuauagcaa

SEQ ID NO: 305721 - RNA, 19 nt, Homo sapiens
  misc_RNA (1)...(19): siRNA sense strand
ccaaugcccucuaccuuca

SEQ ID NO: 305722 - RNA, 19 nt, Homo sapiens
  misc_RNA (1)...(19): siRNA sense strand
gaagcauaauccaacagaa

SEQ ID NO: 305723 - RNA, 19 nt, Homo sapiens
  misc_RNA (1)...(19): siRNA sense strand
agaagaggaaguagaaaua

SEQ ID NO: 305724 - RNA, 19 nt, Homo sapiens
  misc_RNA (1)...(19): siRNA sense strand
caaaggagauuggaaacag

SEQ ID NO: 305725 - RNA, 19 nt, Homo sapiens
  misc_RNA (1)...(19): siRNA sense strand
aaaugaagaugguagugaa

SEQ ID NO: 305726 - RNA, 19 nt, Homo sapiens
  misc_RNA (1)...(19): siRNA sense strand
caucugaaguguauguuuc

SEQ ID NO: 305727 - RNA, 19 nt, Homo sapiens
  misc_RNA (1)...(19): siRNA sense strand
uaucauacuuccugcagaa

SEQ ID NO: 305728 - RNA, 19 nt, Homo sapiens
  misc_RNA (1)...(19): siRNA sense strand
gcaaaggcuugugcagaga

SEQ ID NO: 305729 - RNA, 19 nt, Homo sapiens
  misc_RNA (1)...(19): siRNA sense strand
uaacuuugguucuugagau

SEQ ID NO: 305730 - RNA, 19 nt, Homo sapiens
  misc_RNA (1)...(19): siRNA sense strand
ucaagaugcucagcucaaa

SEQ ID NO: 305731 - RNA, 19 nt, Homo sapiens
  misc_RNA (1)...(19): siRNA sense strand
uagugaagcugcaacauca

SEQ ID NO: 305732 - RNA, 19 nt, Homo sapiens
  misc_RNA (1)...(19): siRNA sense strand
gagauuggaaacagaaauu

SEQ ID NO: 305733 - RNA, 19 nt, Homo sapiens
  misc_RNA (1)...(19): siRNA sense strand
gaagucaagccucaagaug

SEQ ID NO: 305734 - RNA, 19 nt, Homo sapiens
  misc_RNA (1)...(19): siRNA sense strand
gaaagaacaguaucuccau

SEQ ID NO: 305735 - RNA, 19 nt, Homo sapiens
  misc_RNA (1)...(19): siRNA sense strand
ugagauaaaugaagauggu

SEQ ID NO: 305736 - RNA, 19 nt, Homo sapiens
  misc_RNA (1)...(19): siRNA sense strand
ucaagagguuuccuuaucu

SEQ ID NO: 305737 - RNA, 19 nt, Homo sapiens
  misc_RNA (1)...(19): siRNA sense strand
cuauaaaacugguggauuu

SEQ ID NO: 305738 - RNA, 19 nt, Homo sapiens
  misc_RNA (1)...(19): siRNA sense strand
uggaauaacuuugguucuu

SEQ ID NO: 305739 - RNA, 19 nt, Homo sapiens
  misc_RNA (1)...(19): siRNA sense strand
gaggacacacagcugauaa

SEQ ID NO: 305740 - RNA, 19 nt, Homo sapiens
  misc_RNA (1)...(19): siRNA sense strand
cgaccuuucuggaauaaca

SEQ ID NO: 305741 - RNA, 19 nt, Homo sapiens
  misc_RNA (1)...(19): siRNA sense strand
ucucauaaggacaacauua

SEQ ID NO: 305742 - RNA, 19 nt, Homo sapiens
  misc_RNA (1)...(19): siRNA sense strand
caacugggagccaaaggaa

SEQ ID NO: 305743 - RNA, 19 nt, Homo sapiens
  misc_RNA (1)...(19): siRNA sense strand
ggacacacagcugauaaau

SEQ ID NO: 305744 - RNA, 19 nt, Homo sapiens
  misc_RNA (1)...(19): siRNA sense strand
gcugcgaccuuucuggaau

SEQ ID NO: 305745 - RNA, 19 nt, Homo sapiens
  misc_RNA (1)...(19): siRNA sense strand
auaagccucccuagauuua

SEQ ID NO: 305746 - RNA, 19 nt, Homo sapiens
  misc_RNA (1)...(19): siRNA sense strand
caaaggugaugaauuuagc

SEQ ID NO: 305747 - RNA, 19 nt, Homo sapiens
  misc_RNA (1)...(19): siRNA sense strand
uaaaugaagaugguaguga

SEQ ID NO: 305748 - RNA, 19 nt, Homo sapiens
  misc_RNA (1)...(19): siRNA sense strand
cagcagauaagacaaacuu

SEQ ID NO: 305749 - RNA, 19 nt, Homo sapiens
  misc_RNA (1)...(19): siRNA sense strand
acuaauuacugcucaacaa

SEQ ID NO: 305750 - RNA, 19 nt, Homo sapiens
  misc_RNA (1)...(19): siRNA sense strand
guauggauauagaagaagu

SEQ ID NO: 305751 - RNA, 19 nt, Homo sapiens
  misc_RNA (1)...(19): siRNA sense strand
aaaggagauuggaaacaga

SEQ ID NO: 305752 - RNA, 19 nt, Homo sapiens
  misc_RNA (1)...(19): siRNA sense strand
aauuugcaguggaucuuua

SEQ ID NO: 305753 - RNA, 19 nt, Homo sapiens
  misc_RNA (1)...(19): siRNA sense strand
gacacacagcugauaaauu

SEQ ID NO: 305754 - RNA, 19 nt, Homo sapiens
  misc_RNA (1)...(19): siRNA sense strand
ggaagucaagccucaagau

SEQ ID NO: 305755 - RNA, 19 nt, Homo sapiens
  misc_RNA (1)...(19): siRNA sense strand
gaugcaagaagaggaagua

SEQ ID NO: 305756 - RNA, 19 nt, Homo sapiens
  misc_RNA (1)...(19): siRNA sense strand
gaagguauggauauagaag

SEQ ID NO: 305757 - RNA, 19 nt, Homo sapiens
  misc_RNA (1)...(19): siRNA sense strand
gaagaauuuggcccucuga

SEQ ID NO: 305758 - RNA, 19 nt, Homo sapiens
  misc_RNA (1)...(19): siRNA sense strand
agaaauaagccucccuaga

SEQ ID NO: 305759 - RNA, 19 nt, Homo sapiens
  misc_RNA (1)...(19): siRNA sense strand
gaauuugcaguggaucuuu

SEQ ID NO: 305760 - RNA, 19 nt, Homo sapiens
  misc_RNA (1)...(19): siRNA sense strand
ccuggugaaugcuauuuau

SEQ ID NO: 305761 - RNA, 19 nt, Homo sapiens
  misc_RNA (1)...(19): siRNA sense strand
ggagucuucuauugcuguu

SEQ ID NO: 305762 - RNA, 19 nt, Homo sapiens
  misc_RNA (1)...(19): siRNA sense strand
ugcagaagguauggauaua

SEQ ID NO: 305763 - RNA, 19 nt, Homo sapiens
  misc_RNA (1)...(19): siRNA sense strand
cuaccaaguuuuagaauug

SEQ ID NO: 305764 - RNA, 19 nt, Homo sapiens
  misc_RNA (1)...(19): siRNA sense strand
caagagguuuccuuaucuc

SEQ ID NO: 305765 - RNA, 19 nt, Homo sapiens
  misc_RNA (1)...(19): siRNA sense strand
cagcagcagauaagacaaa

SEQ ID NO: 305766 - RNA, 19 nt, Homo sapiens
  misc_RNA (1)...(19): siRNA sense strand
guagugaagcugcaacauc

SEQ ID NO: 305767 - RNA, 19 nt, Homo sapiens
  misc_RNA (1)...(19): siRNA sense strand
aagccucccuagauuuaaa

SEQ ID NO: 305768 - RNA, 19 nt, Homo sapiens
  misc_RNA (1)...(19): siRNA sense strand
cuuguggagucuucuauug

SEQ ID NO: 305769 - RNA, 19 nt, Homo sapiens
  misc_RNA (1)...(19): siRNA sense strand
cugcgaccuuucuggaaua

SEQ ID NO: 305770 - RNA, 19 nt, Homo sapiens
  misc_RNA (1)...(19): siRNA sense strand
cuaauuacugcucaacaaa

SEQ ID NO: 305771 - RNA, 19 nt, Homo sapiens
  misc_RNA (1)...(19): siRNA sense strand
gcagaagguauggauauag

SEQ ID NO: 305772 - RNA, 19 nt, Homo sapiens
  misc_RNA (1)...(19): siRNA sense strand
guguauguuucccaaguga

SEQ ID NO: 305773 - RNA, 19 nt, Homo sapiens
  misc_RNA (1)...(19): siRNA sense strand
caacaucaacuggcauaca

SEQ ID NO: 305774 - RNA, 19 nt, Homo sapiens
  misc_RNA (1)...(19): siRNA sense strand
gcauaauccaacagaauca

SEQ ID NO: 305775 - RNA, 19 nt, Homo sapiens
  misc_RNA (1)...(19): siRNA sense strand
ggagauuggaaacagaaau

SEQ ID NO: 305776 - RNA, 19 nt, Homo sapiens
  misc_RNA (1)...(19): siRNA sense strand
aauaagccucccuagauuu

SEQ ID NO: 305777 - RNA, 19 nt, Homo sapiens
  misc_RNA (1)...(19): siRNA sense strand
aaucuucccugaacuacca

SEQ ID NO: 305778 - RNA, 19 nt, Homo sapiens
  misc_RNA (1)...(19): siRNA sense strand
gauuggaaacagaaauuca

SEQ ID NO: 305779 - RNA, 19 nt, Homo sapiens
  misc_RNA (1)...(19): siRNA sense strand
gagauaaaugaagauggua

SEQ ID NO: 305780 - RNA, 19 nt, Homo sapiens
  misc_RNA (1)...(19): siRNA sense strand
aagaggaaguagaaauaag

SEQ ID NO: 305781 - RNA, 19 nt, Homo sapiens
  misc_RNA (1)...(19): siRNA sense strand
gcacagcagcagauaagac

SEQ ID NO: 305782 - RNA, 19 nt, Homo sapiens
  misc_RNA (1)...(19): siRNA sense strand
ucaaagccaauuuauagca

SEQ ID NO: 305783 - RNA, 19 nt, Homo sapiens
  misc_RNA (1)...(19): siRNA sense strand
gauaaaugaagaugguagu

SEQ ID NO: 305784 - RNA, 19 nt, Homo sapiens
  misc_RNA (1)...(19): siRNA sense strand
agguauggauauagaagaa

SEQ ID NO: 305785 - RNA, 19 nt, Homo sapiens
  misc_RNA (1)...(19): siRNA sense strand
gcagagaugauaaguaccu

SEQ ID NO: 305786 - RNA, 19 nt, Homo sapiens
  misc_RNA (1)...(19): siRNA sense strand
gaaaagcacagcagcagau

SEQ ID NO: 305787 - RNA, 19 nt, Homo sapiens
  misc_RNA (1)...(19): siRNA sense strand
uuaucaagagguuuccuua

SEQ ID NO: 305788 - RNA, 19 nt, Homo sapiens
  misc_RNA (1)...(19): siRNA sense strand
gagauaaaaggaagagauu

SEQ ID NO: 305789 - RNA, 19 nt, Homo sapiens
  misc_RNA (1)...(19): siRNA sense strand
cucccuagauuuaaaguag

SEQ ID NO: 305790 - RNA, 19 nt, Homo sapiens
  misc_RNA (1)...(19): siRNA sense strand
aauuacugcucaacaaauc

SEQ ID NO: 305791 - RNA, 19 nt, Homo sapiens
  misc_RNA (1)...(19): siRNA sense strand
ugcaguggaucuuuaucaa

SEQ ID NO: 305792 - RNA, 19 nt, Homo sapiens
  misc_RNA (1)...(19): siRNA sense strand
aucaagagguuuccuuauc

SEQ ID NO: 305793 - RNA, 19 nt, Homo sapiens
  misc_RNA (1)...(19): siRNA sense strand
acaaaggugaugaauuuag

SEQ ID NO: 305794 - RNA, 19 nt, Homo sapiens
  misc_RNA (1)...(19): siRNA sense strand
aagcauaauccaacagaau

SEQ ID NO: 305795 - RNA, 19 nt, Homo sapiens
  misc_RNA (1)...(19): siRNA sense strand
ugaagcauaauccaacaga

SEQ ID NO: 305796 - RNA, 19 nt, Homo sapiens
  misc_RNA (1)...(19): siRNA sense strand
gcaguggaucuuuaucaag

SEQ ID NO: 305797 - RNA, 19 nt, Homo sapiens
  misc_RNA (1)...(19): siRNA sense strand
aagaagaggaaguagaaau

SEQ ID NO: 305798 - RNA, 19 nt, Homo sapiens
  misc_RNA (1)...(19): siRNA sense strand
caagaagaggaaguagaaa

SEQ ID NO: 305799 - RNA, 19 nt, Homo sapiens
  misc_RNA (1)...(19): siRNA sense strand
gaagcugcaacaucaacug

SEQ ID NO: 305800 - RNA, 19 nt, Homo sapiens
  misc_RNA (1)...(19): siRNA sense strand
cccuagauuuaaaguagaa

SEQ ID NO: 305801 - RNA, 19 nt, Homo sapiens
  misc_RNA (1)...(19): siRNA sense strand
ggacagcuauugaagcauu

SEQ ID NO: 305802 - RNA, 19 nt, Homo sapiens
  misc_RNA (1)...(19): siRNA sense strand
ggaagaugaugaagauuug

SEQ ID NO: 305803 - RNA, 19 nt, Homo sapiens
  misc_RNA (1)...(19): siRNA sense strand
gaagaagauuggaagaaga

SEQ ID NO: 305804 - RNA, 19 nt, Homo sapiens
  misc_RNA (1)...(19): siRNA sense strand
gaaauugacaaacguauga

SEQ ID NO: 305805 - RNA, 19 nt, Homo sapiens
  misc_RNA (1)...(19): siRNA sense strand
guacagcucucugaaagaa

SEQ ID NO: 305806 - RNA, 19 nt, Homo sapiens
  misc_RNA (1)...(19): siRNA sense strand
ggaaauauggcuucucuga

SEQ ID NO: 305807 - RNA, 19 nt, Homo sapiens
  misc_RNA (1)...(19): siRNA sense strand
gaaagacgagagaccaaua

SEQ ID NO: 305808 - RNA, 19 nt, Homo sapiens
  misc_RNA (1)...(19): siRNA sense strand
guaaagcauugugucauaa

SEQ ID NO: 305809 - RNA, 19 nt, Homo sapiens
  misc_RNA (1)...(19): siRNA sense strand
uggcuucucugacccauua

SEQ ID NO: 305810 - RNA, 19 nt, Homo sapiens
  misc_RNA (1)...(19): siRNA sense strand
ugaaagaacuggugcuaca

SEQ ID NO: 305811 - RNA, 19 nt, Homo sapiens
  misc_RNA (1)...(19): siRNA sense strand
guacagcaaagaauacaua

SEQ ID NO: 305812 - RNA, 19 nt, Homo sapiens
  misc_RNA (1)...(19): siRNA sense strand
ggaucaaguugucaaagaa

SEQ ID NO: 305813 - RNA, 19 nt, Homo sapiens
  misc_RNA (1)...(19): siRNA sense strand
gaauauaacacucaguuuc

SEQ ID NO: 305814 - RNA, 19 nt, Homo sapiens
  misc_RNA (1)...(19): siRNA sense strand
gguggaagaugaugaagau

SEQ ID NO: 305815 - RNA, 19 nt, Homo sapiens
  misc_RNA (1)...(19): siRNA sense strand
gcacaacgacucccucaau

SEQ ID NO: 305816 - RNA, 19 nt, Homo sapiens
  misc_RNA (1)...(19): siRNA sense strand
cagcaaagaauacauagaa

SEQ ID NO: 305817 - RNA, 19 nt, Homo sapiens
  misc_RNA (1)...(19): siRNA sense strand
aguaaagcauugugucaua

SEQ ID NO: 305818 - RNA, 19 nt, Homo sapiens
  misc_RNA (1)...(19): siRNA sense strand
uauugaagcuguagggaaa

SEQ ID NO: 305819 - RNA, 19 nt, Homo sapiens
  misc_RNA (1)...(19): siRNA sense strand
aagaacuggugcuacauua

SEQ ID NO: 305820 - RNA, 19 nt, Homo sapiens
  misc_RNA (1)...(19): siRNA sense strand
gacgagagaccaauacuug

SEQ ID NO: 305821 - RNA, 19 nt, Homo sapiens
  misc_RNA (1)...(19): siRNA sense strand
gaaguaaagcauuguguca

SEQ ID NO: 305822 - RNA, 19 nt, Homo sapiens
  misc_RNA (1)...(19): siRNA sense strand
aaacguaugaacagcauua

SEQ ID NO: 305823 - RNA, 19 nt, Homo sapiens
  misc_RNA (1)...(19): siRNA sense strand
gaagcgagauggcacuuuu

SEQ ID NO: 305824 - RNA, 19 nt, Homo sapiens
  misc_RNA (1)...(19): siRNA sense strand
gccaacaacgguaugaaua

SEQ ID NO: 305825 - RNA, 19 nt, Homo sapiens
  misc_RNA (1)...(19): siRNA sense strand
ccaacaacgguaugaauaa

SEQ ID NO: 305826 - RNA, 19 nt, Homo sapiens
  misc_RNA (1)...(19): siRNA sense strand
gggaagaagugaaugaaaa

SEQ ID NO: 305827 - RNA, 19 nt, Homo sapiens
  misc_RNA (1)...(19): siRNA sense strand
gcaacuggcuauggcuuug

SEQ ID NO: 305828 - RNA, 19 nt, Homo sapiens
  misc_RNA (1)...(19): siRNA sense strand
ucaguucugugguugaauu

SEQ ID NO: 305829 - RNA, 19 nt, Homo sapiens
  misc_RNA (1)...(19): siRNA sense strand
gaagcaggcagcugaguau

SEQ ID NO: 305830 - RNA, 19 nt, Homo sapiens
  misc_RNA (1)...(19): siRNA sense strand
cauggugauuauacucuua

SEQ ID NO: 305831 - RNA, 19 nt, Homo sapiens
  misc_RNA (1)...(19): siRNA sense strand
gcaaugagaaagaaauaca

SEQ ID NO: 305832 - RNA, 19 nt, Homo sapiens
  misc_RNA (1)...(19): siRNA sense strand
caauauguccuuacaagau

SEQ ID NO: 305833 - RNA, 19 nt, Homo sapiens
  misc_RNA (1)...(19): siRNA sense strand
aauauucacugguggaaga

SEQ ID NO: 305834 - RNA, 19 nt, Homo sapiens
  misc_RNA (1)...(19): siRNA sense strand
gagaaagaaauacaaagga

SEQ ID NO: 305835 - RNA, 19 nt, Homo sapiens
  misc_RNA (1)...(19): siRNA sense strand
ucaguauaaucccaaauug

SEQ ID NO: 305836 - RNA, 19 nt, Homo sapiens
  misc_RNA (1)...(19): siRNA sense strand
caagagcgguacagcaaag

SEQ ID NO: 305837 - RNA, 19 nt, Homo sapiens
  misc_RNA (1)...(19): siRNA sense strand
gcagcugaguaucgagaaa

SEQ ID NO: 305838 - RNA, 19 nt, Homo sapiens
  misc_RNA (1)...(19): siRNA sense strand
gcaggcagcugaguaucga

SEQ ID NO: 305839 - RNA, 19 nt, Homo sapiens
  misc_RNA (1)...(19): siRNA sense strand
ggaagaagacuugaagaag

SEQ ID NO: 305840 - RNA, 19 nt, Homo sapiens
  misc_RNA (1)...(19): siRNA sense strand
gaaauacaaaggauuaugc

SEQ ID NO: 305841 - RNA, 19 nt, Homo sapiens
  misc_RNA (1)...(19): siRNA sense strand
ccaaauaccaacaggauca

SEQ ID NO: 305842 - RNA, 19 nt, Homo sapiens
  misc_RNA (1)...(19): siRNA sense strand
ucucgaaucagugaaauua

SEQ ID NO: 305843 - RNA, 19 nt, Homo sapiens
  misc_RNA (1)...(19): siRNA sense strand
ccauuaaccuucaguucug

SEQ ID NO: 305844 - RNA, 19 nt, Homo sapiens
  misc_RNA (1)...(19): siRNA sense strand
ggaagcagcaaccgaaaca

SEQ ID NO: 305845 - RNA, 19 nt, Homo sapiens
  misc_RNA (1)...(19): siRNA sense strand
ugaaggcaaugagaaagaa

SEQ ID NO: 305846 - RNA, 19 nt, Homo sapiens
  misc_RNA (1)...(19): siRNA sense strand
gcauuaaaccagaccuuau

SEQ ID NO: 305847 - RNA, 19 nt, Homo sapiens
  misc_RNA (1)...(19): siRNA sense strand
acacuagccuacccaguau

SEQ ID NO: 305848 - RNA, 19 nt, Homo sapiens
  misc_RNA (1)...(19): siRNA sense strand
gaaaaggacagcuauugaa

SEQ ID NO: 305849 - RNA, 19 nt, Homo sapiens
  misc_RNA (1)...(19): siRNA sense strand
gaugagaagacauggaaug

SEQ ID NO: 305850 - RNA, 19 nt, Homo sapiens
  misc_RNA (1)...(19): siRNA sense strand
guugaagucucgaaucagu

SEQ ID NO: 305851 - RNA, 19 nt, Homo sapiens
  misc_RNA (1)...(19): siRNA sense strand
uacaagaugcugaauggua

SEQ ID NO: 305852 - RNA, 19 nt, Homo sapiens
  misc_RNA (1)...(19): siRNA sense strand
cacacuagccuacccagua

SEQ ID NO: 305853 - RNA, 19 nt, Homo sapiens
  misc_RNA (1)...(19): siRNA sense strand
caacaacgguaugaauaac

SEQ ID NO: 305854 - RNA, 19 nt, Homo sapiens
  misc_RNA (1)...(19): siRNA sense strand
gugaaauuauugacaguag

SEQ ID NO: 305855 - RNA, 19 nt, Homo sapiens
  misc_RNA (1)...(19): siRNA sense strand
gaccuuauccagcugagaa

SEQ ID NO: 305856 - RNA, 19 nt, Homo sapiens
  misc_RNA (1)...(19): siRNA sense strand
agaagaagauuggaagaag

SEQ ID NO: 305857 - RNA, 19 nt, Homo sapiens
  misc_RNA (1)...(19): siRNA sense strand
guucugugguugaauuaau

SEQ ID NO: 305858 - RNA, 19 nt, Homo sapiens
  misc_RNA (1)...(19): siRNA sense strand
uggaagaugaugaagauuu

SEQ ID NO: 305859 - RNA, 19 nt, Homo sapiens
  misc_RNA (1)...(19): siRNA sense strand
ccaggaaauccaaaugaaa

SEQ ID NO: 305860 - RNA, 19 nt, Homo sapiens
  misc_RNA (1)...(19): siRNA sense strand
cgagaugcgucuacuaaaa

SEQ ID NO: 305861 - RNA, 19 nt, Homo sapiens
  misc_RNA (1)...(19): siRNA sense strand
cacaacgacucccucaaug

SEQ ID NO: 305862 - RNA, 19 nt, Homo sapiens
  misc_RNA (1)...(19): siRNA sense strand
acaacgguaugaauaacaa

SEQ ID NO: 305863 - RNA, 19 nt, Homo sapiens
  misc_RNA (1)...(19): siRNA sense strand
gcauggugauuauacucuu

SEQ ID NO: 305864 - RNA, 19 nt, Homo sapiens
  misc_RNA (1)...(19): siRNA sense strand
caaguugucaaagaagaua

SEQ ID NO: 305865 - RNA, 19 nt, Homo sapiens
  misc_RNA (1)...(19): siRNA sense strand
cgaaucagugaaauuauug

SEQ ID NO: 305866 - RNA, 19 nt, Homo sapiens
  misc_RNA (1)...(19): siRNA sense strand
aauauguccuuacaagaug

SEQ ID NO: 305867 - RNA, 19 nt, Homo sapiens
  misc_RNA (1)...(19): siRNA sense strand
cccaggaaauccaaaugaa

SEQ ID NO: 305868 - RNA, 19 nt, Homo sapiens
  misc_RNA (1)...(19): siRNA sense strand
augaaucucuagcucagua

SEQ ID NO: 305869 - RNA, 19 nt, Homo sapiens
  misc_RNA (1)...(19): siRNA sense strand
aagaagacuugaagaagca

SEQ ID NO: 305870 - RNA, 19 nt, Homo sapiens
  misc_RNA (1)...(19): siRNA sense strand
aacaauauguccuuacaag

SEQ ID NO: 305871 - RNA, 19 nt, Homo sapiens
  misc_RNA (1)...(19): siRNA sense strand
gaaucucuagcucaguaua

SEQ ID NO: 305872 - RNA, 19 nt, Homo sapiens
  misc_RNA (1)...(19): siRNA sense strand
gacagcuauugaagcauuu

SEQ ID NO: 305873 - RNA, 19 nt, Homo sapiens
  misc_RNA (1)...(19): siRNA sense strand
caacgacucccucaauguc

SEQ ID NO: 305874 - RNA, 19 nt, Homo sapiens
  misc_RNA (1)...(19): siRNA sense strand
aggaucaaguugucaaaga

SEQ ID NO: 305875 - RNA, 19 nt, Homo sapiens
  misc_RNA (1)...(19): siRNA sense strand
ugaaaacacugaagaccaa

SEQ ID NO: 305876 - RNA, 19 nt, Homo sapiens
  misc_RNA (1)...(19): siRNA sense strand
gaaggcaaugagaaagaaa

SEQ ID NO: 305877 - RNA, 19 nt, Homo sapiens
  misc_RNA (1)...(19): siRNA sense strand
guuuaaacgugaaggcaau

SEQ ID NO: 305878 - RNA, 19 nt, Homo sapiens
  misc_RNA (1)...(19): siRNA sense strand
aaggacagcuauugaagca

SEQ ID NO: 305879 - RNA, 19 nt, Homo sapiens
  misc_RNA (1)...(19): siRNA sense strand
gcacaucccaggaaaucca

SEQ ID NO: 305880 - RNA, 19 nt, Homo sapiens
  misc_RNA (1)...(19): siRNA sense strand
acacugaagaccaauauuc

SEQ ID NO: 305881 - RNA, 19 nt, Homo sapiens
  misc_RNA (1)...(19): siRNA sense strand
gagaaagacgagagaccaa

SEQ ID NO: 305882 - RNA, 19 nt, Homo sapiens
  misc_RNA (1)...(19): siRNA sense strand
cgagaaauugacaaacgua

SEQ ID NO: 305883 - RNA, 19 nt, Homo sapiens
  misc_RNA (1)...(19): siRNA sense strand
gaagauuggaagaagacuu

SEQ ID NO: 305884 - RNA, 19 nt, Homo sapiens
  misc_RNA (1)...(19): siRNA sense strand
uacgagaugcgucuacuaa

SEQ ID NO: 305885 - RNA, 19 nt, Homo sapiens
  misc_RNA (1)...(19): siRNA sense strand
cuuacaagaugcugaaugg

SEQ ID NO: 305886 - RNA, 19 nt, Homo sapiens
  misc_RNA (1)...(19): siRNA sense strand
aaagaacuggugcuacauu

SEQ ID NO: 305887 - RNA, 19 nt, Homo sapiens
  misc_RNA (1)...(19): siRNA sense strand
aaacacugaagaccaauau

SEQ ID NO: 305888 - RNA, 19 nt, Homo sapiens
  misc_RNA (1)...(19): siRNA sense strand
gagagaccaauacuugaug

SEQ ID NO: 305889 - RNA, 19 nt, Homo sapiens
  misc_RNA (1)...(19): siRNA sense strand
aaguugaagucucgaauca

SEQ ID NO: 305890 - RNA, 19 nt, Homo sapiens
  misc_RNA (1)...(19): siRNA sense strand
cuaccggaaugaaucucua

SEQ ID NO: 305891 - RNA, 19 nt, Homo sapiens
  misc_RNA (1)...(19): siRNA sense strand
gagaaauugacaaacguau

SEQ ID NO: 305892 - RNA, 19 nt, Homo sapiens
  misc_RNA (1)...(19): siRNA sense strand
gacaguagaagaagauugg

SEQ ID NO: 305893 - RNA, 19 nt, Homo sapiens
  misc_RNA (1)...(19): siRNA sense strand
auaaaccacuaccggaaug

SEQ ID NO: 305894 - RNA, 19 nt, Homo sapiens
  misc_RNA (1)...(19): siRNA sense strand
cgagggaagaagugaauga

SEQ ID NO: 305895 - RNA, 19 nt, Homo sapiens
  misc_RNA (1)...(19): siRNA sense strand
uggaagaagacuugaagaa

SEQ ID NO: 305896 - RNA, 19 nt, Homo sapiens
  misc_RNA (1)...(19): siRNA sense strand
ugaagucucgaaucaguga

SEQ ID NO: 305897 - RNA, 19 nt, Homo sapiens
  misc_RNA (1)...(19): siRNA sense strand
guacgagaugcgucuacua

SEQ ID NO: 305898 - RNA, 19 nt, Homo sapiens
  misc_RNA (1)...(19): siRNA sense strand
gaaugguacuggggagaua

SEQ ID NO: 305899 - RNA, 19 nt, Homo sapiens
  misc_RNA (1)...(19): siRNA sense strand
gagggaagaagugaaugaa

SEQ ID NO: 305900 - RNA, 19 nt, Homo sapiens
  misc_RNA (1)...(19): siRNA sense strand
ggacggcgaaguaaagcau

SEQ ID NO: 305901 - RNA, 19 nt, Homo sapiens
  misc_RNA (1)...(19): siRNA sense strand
ggacagcuauugaagcauu

SEQ ID NO: 305902 - RNA, 19 nt, Homo sapiens
  misc_RNA (1)...(19): siRNA sense strand
ggaagaugaugaagauuug

SEQ ID NO: 305903 - RNA, 19 nt, Homo sapiens
  misc_RNA (1)...(19): siRNA sense strand
gaagaagauuggaagaaga

SEQ ID NO: 305904 - RNA, 19 nt, Homo sapiens
  misc_RNA (1)...(19): siRNA sense strand
gaaauugacaaacguauga

SEQ ID NO: 305905 - RNA, 19 nt, Homo sapiens
  misc_RNA (1)...(19): siRNA sense strand
guacagcucucugaaagaa

SEQ ID NO: 305906 - RNA, 19 nt, Homo sapiens
  misc_RNA (1)...(19): siRNA sense strand
ggaaauauggcuucucuga

SEQ ID NO: 305907 - RNA, 19 nt, Homo sapiens
  misc_RNA (1)...(19): siRNA sense strand
gaaagacgagagaccaaua

SEQ ID NO: 305908 - RNA, 19 nt, Homo sapiens
  misc_RNA (1)...(19): siRNA sense strand
guaaagcauugugucauaa

SEQ ID NO: 305909 - RNA, 19 nt, Homo sapiens
  misc_RNA (1)...(19): siRNA sense strand
uggcuucucugacccauua

SEQ ID NO: 305910 - RNA, 19 nt, Homo sapiens
  misc_RNA (1)...(19): siRNA sense strand
ugaaagaacuggugcuaca

SEQ ID NO: 305911 - RNA, 19 nt, Homo sapiens
  misc_RNA (1)...(19): siRNA sense strand
guacagcaaagaauacaua

SEQ ID NO: 305912 - RNA, 19 nt, Homo sapiens
  misc_RNA (1)...(19): siRNA sense strand
ggaucaaguugucaaagaa

SEQ ID NO: 305913 - RNA, 19 nt, Homo sapiens
  misc_RNA (1)...(19): siRNA sense strand
gaauauaacacucaguuuc

SEQ ID NO: 305914 - RNA, 19 nt, Homo sapiens
  misc_RNA (1)...(19): siRNA sense strand
gguggaagaugaugaagau

SEQ ID NO: 305915 - RNA, 19 nt, Homo sapiens
  misc_RNA (1)...(19): siRNA sense strand
gcacaacgacucccucaau

SEQ ID NO: 305916 - RNA, 19 nt, Homo sapiens
  misc_RNA (1)...(19): siRNA sense strand
cagcaaagaauacauagaa

SEQ ID NO: 305917 - RNA, 19 nt, Homo sapiens
  misc_RNA (1)...(19): siRNA sense strand
aguaaagcauugugucaua

SEQ ID NO: 305918 - RNA, 19 nt, Homo sapiens
  misc_RNA (1)...(19): siRNA sense strand
uauugaagcuguagggaaa

SEQ ID NO: 305919 - RNA, 19 nt, Homo sapiens
  misc_RNA (1)...(19): siRNA sense strand
aagaacuggugcuacauua

SEQ ID NO: 305920 - RNA, 19 nt, Homo sapiens
  misc_RNA (1)...(19): siRNA sense strand
gacgagagaccaauacuug

SEQ ID NO: 305921 - RNA, 19 nt, Homo sapiens
  misc_RNA (1)...(19): siRNA sense strand
gaaguaaagcauuguguca

SEQ ID NO: 305922 - RNA, 19 nt, Homo sapiens
  misc_RNA (1)...(19): siRNA sense strand
aaacguaugaacagcauua

SEQ ID NO: 305923 - RNA, 19 nt, Homo sapiens
  misc_RNA (1)...(19): siRNA sense strand
gaagcgagauggcacuuuu

SEQ ID NO: 305924 - RNA, 19 nt, Homo sapiens
  misc_RNA (1)...(19): siRNA sense strand
gccaacaacgguaugaaua

SEQ ID NO: 305925 - RNA, 19 nt, Homo sapiens
  misc_RNA (1)...(19): siRNA sense strand
ccaacaacgguaugaauaa

SEQ ID NO: 305926 - RNA, 19 nt, Homo sapiens
  misc_RNA (1)...(19): siRNA sense strand
gggaagaagugaaugaaaa

SEQ ID NO: 305927 - RNA, 19 nt, Homo sapiens
  misc_RNA (1)...(19): siRNA sense strand
gcaacuggcuauggcuuug

SEQ ID NO: 305928 - RNA, 19 nt, Homo sapiens
  misc_RNA (1)...(19): siRNA sense strand
ucaguucugugguugaauu

SEQ ID NO: 305929 - RNA, 19 nt, Homo sapiens
  misc_RNA (1)...(19): siRNA sense strand
gaagcaggcagcugaguau

SEQ ID NO: 305930 - RNA, 19 nt, Homo sapiens
  misc_RNA (1)...(19): siRNA sense strand
cauggugauuauacucuua

SEQ ID NO: 305931 - RNA, 19 nt, Homo sapiens
  misc_RNA (1)...(19): siRNA sense strand
gcaaugagaaagaaauaca

SEQ ID NO: 305932 - RNA, 19 nt, Homo sapiens
  misc_RNA (1)...(19): siRNA sense strand
caauauguccuuacaagau

SEQ ID NO: 305933 - RNA, 19 nt, Homo sapiens
  misc_RNA (1)...(19): siRNA sense strand
aauauucacugguggaaga

SEQ ID NO: 305934 - RNA, 19 nt, Homo sapiens
  misc_RNA (1)...(19): siRNA sense strand
gagaaagaaauacaaagga

SEQ ID NO: 305935 - RNA, 19 nt, Homo sapiens
  misc_RNA (1)...(19): siRNA sense strand
ucaguauaaucccaaauug

SEQ ID NO: 305936 - RNA, 19 nt, Homo sapiens
  misc_RNA (1)...(19): siRNA sense strand
caagagcgguacagcaaag

SEQ ID NO: 305937 - RNA, 19 nt, Homo sapiens
  misc_RNA (1)...(19): siRNA sense strand
gcagcugaguaucgagaaa

SEQ ID NO: 305938 - RNA, 19 nt, Homo sapiens
  misc_RNA (1)...(19): siRNA sense strand
gcaggcagcugaguaucga

SEQ ID NO: 305939 - RNA, 19 nt, Homo sapiens
  misc_RNA (1)...(19): siRNA sense strand
ggaagaagacuugaagaag

SEQ ID NO: 305940 - RNA, 19 nt, Homo sapiens
  misc_RNA (1)...(19): siRNA sense strand
gaaauacaaaggauuaugc

SEQ ID NO: 305941 - RNA, 19 nt, Homo sapiens
  misc_RNA (1)...(19): siRNA sense strand
ccaaauaccaacaggauca

SEQ ID NO: 305942 - RNA, 19 nt, Homo sapiens
  misc_RNA (1)...(19): siRNA sense strand
ucucgaaucagugaaauua

SEQ ID NO: 305943 - RNA, 19 nt, Homo sapiens
  misc_RNA (1)...(19): siRNA sense strand
ccauuaaccuucaguucug

SEQ ID NO: 305944 - RNA, 19 nt, Homo sapiens
  misc_RNA (1)...(19): siRNA sense strand
ggaagcagcaaccgaaaca

SEQ ID NO: 305945 - RNA, 19 nt, Homo sapiens
  misc_RNA (1)...(19): siRNA sense strand
ugaaggcaaugagaaagaa

SEQ ID NO: 305946 - RNA, 19 nt, Homo sapiens
  misc_RNA (1)...(19): siRNA sense strand
gcauuaaaccagaccuuau

SEQ ID NO: 305947 - RNA, 19 nt, Homo sapiens
  misc_RNA (1)...(19): siRNA sense strand
acacuagccuacccaguau

SEQ ID NO: 305948 - RNA, 19 nt, Homo sapiens
  misc_RNA (1)...(19): siRNA sense strand
gaaaaggacagcuauugaa

SEQ ID NO: 305949 - RNA, 19 nt, Homo sapiens
  misc_RNA (1)...(19): siRNA sense strand
gaugagaagacauggaaug

SEQ ID NO: 305950 - RNA, 19 nt, Homo sapiens
  misc_RNA (1)...(19): siRNA sense strand
guugaagucucgaaucagu

SEQ ID NO: 305951 - RNA, 19 nt, Homo sapiens
  misc_RNA (1)...(19): siRNA sense strand
uacaagaugcugaauggua

SEQ ID NO: 305952 - RNA, 19 nt, Homo sapiens
  misc_RNA (1)...(19): siRNA sense strand
cacacuagccuacccagua

SEQ ID NO: 305953 - RNA, 19 nt, Homo sapiens
  misc_RNA (1)...(19): siRNA sense strand
caacaacgguaugaauaac

SEQ ID NO: 305954 - RNA, 19 nt, Homo sapiens
  misc_RNA (1)...(19): siRNA sense strand
gugaaauuauugacaguag

SEQ ID NO: 305955 - RNA, 19 nt, Homo sapiens
  misc_RNA (1)...(19): siRNA sense strand
gaccuuauccagcugagaa

SEQ ID NO: 305956 - RNA, 19 nt, Homo sapiens
  misc_RNA (1)...(19): siRNA sense strand
agaagaagauuggaagaag

SEQ ID NO: 305957 - RNA, 19 nt, Homo sapiens
  misc_RNA (1)...(19): siRNA sense strand
guucugugguugaauuaau

SEQ ID NO: 305958 - RNA, 19 nt, Homo sapiens
  misc_RNA (1)...(19): siRNA sense strand
uggaagaugaugaagauuu

SEQ ID NO: 305959 - RNA, 19 nt, Homo sapiens
  misc_RNA (1)...(19): siRNA sense strand
ccaggaaauccaaaugaaa

SEQ ID NO: 305960 - RNA, 19 nt, Homo sapiens
  misc_RNA (1)...(19): siRNA sense strand
cgagaugcgucuacuaaaa

SEQ ID NO: 305961 - RNA, 19 nt, Homo sapiens
  misc_RNA (1)...(19): siRNA sense strand
cacaacgacucccucaaug

SEQ ID NO: 305962 - RNA, 19 nt, Homo sapiens
  misc_RNA (1)...(19): siRNA sense strand
acaacgguaugaauaacaa

SEQ ID NO: 305963 - RNA, 19 nt, Homo sapiens
  misc_RNA (1)...(19): siRNA sense strand
gcauggugauuauacucuu

SEQ ID NO: 305964 - RNA, 19 nt, Homo sapiens
  misc_RNA (1)...(19): siRNA sense strand
caaguugucaaagaagaua

SEQ ID NO: 305965 - RNA, 19 nt, Homo sapiens
  misc_RNA (1)...(19): siRNA sense strand
cgaaucagugaaauuauug

SEQ ID NO: 305966 - RNA, 19 nt, Homo sapiens
  misc_RNA (1)...(19): siRNA sense strand
aauauguccuuacaagaug

SEQ ID NO: 305967 - RNA, 19 nt, Homo sapiens
  misc_RNA (1)...(19): siRNA sense strand
cccaggaaauccaaaugaa

SEQ ID NO: 305968 - RNA, 19 nt, Homo sapiens
  misc_RNA (1)...(19): siRNA sense strand
augaaucucuagcucagua

SEQ ID NO: 305969 - RNA, 19 nt, Homo sapiens
  misc_RNA (1)...(19): siRNA sense strand
aagaagacuugaagaagca

SEQ ID NO: 305970 - RNA, 19 nt, Homo sapiens
  misc_RNA (1)...(19): siRNA sense strand
aacaauauguccuuacaag

SEQ ID NO: 305971 - RNA, 19 nt, Homo sapiens
  misc_RNA (1)...(19): siRNA sense strand
gaaucucuagcucaguaua

SEQ ID NO: 305972 - RNA, 19 nt, Homo sapiens
  misc_RNA (1)...(19): siRNA sense strand
gacagcuauugaagcauuu

SEQ ID NO: 305973 - RNA, 19 nt, Homo sapiens
  misc_RNA (1)...(19): siRNA sense strand
caacgacucccucaauguc

SEQ ID NO: 305974 - RNA, 19 nt, Homo sapiens
  misc_RNA (1)...(19): siRNA sense strand
aggaucaaguugucaaaga

SEQ ID NO: 305975 - RNA, 19 nt, Homo sapiens
  misc_RNA (1)...(19): siRNA sense strand
ugaaaacacugaagaccaa

SEQ ID NO: 305976 - RNA, 19 nt, Homo sapiens
  misc_RNA (1)...(19): siRNA sense strand
gaaggcaaugagaaagaaa

SEQ ID NO: 305977 - RNA, 19 nt, Homo sapiens
  misc_RNA (1)...(19): siRNA sense strand
guuuaaacgugaaggcaau

SEQ ID NO: 305978 - RNA, 19 nt, Homo sapiens
  misc_RNA (1)...(19): siRNA sense strand
aaggacagcuauugaagca

SEQ ID NO: 305979 - RNA, 19 nt, Homo sapiens
  misc_RNA (1)...(19): siRNA sense strand
gcacaucccaggaaaucca

SEQ ID NO: 305980 - RNA, 19 nt, Homo sapiens
  misc_RNA (1)...(19): siRNA sense strand
acacugaagaccaauauuc

SEQ ID NO: 305981 - RNA, 19 nt, Homo sapiens
  misc_RNA (1)...(19): siRNA sense strand
gagaaagacgagagaccaa

SEQ ID NO: 305982 - RNA, 19 nt, Homo sapiens
  misc_RNA (1)...(19): siRNA sense strand
cgagaaauugacaaacgua

SEQ ID NO: 305983 - RNA, 19 nt, Homo sapiens
  misc_RNA (1)...(19): siRNA sense strand
gaagauuggaagaagacuu

SEQ ID NO: 305984 - RNA, 19 nt, Homo sapiens
  misc_RNA (1)...(19): siRNA sense strand
uacgagaugcgucuacuaa

SEQ ID NO: 305985 - RNA, 19 nt, Homo sapiens
  misc_RNA (1)...(19): siRNA sense strand
cuuacaagaugcugaaugg

SEQ ID NO: 305986 - RNA, 19 nt, Homo sapiens
  misc_RNA (1)...(19): siRNA sense strand
aaagaacuggugcuacauu

SEQ ID NO: 305987 - RNA, 19 nt, Homo sapiens
  misc_RNA (1)...(19): siRNA sense strand
aaacacugaagaccaauau

SEQ ID NO: 305988 - RNA, 19 nt, Homo sapiens
  misc_RNA (1)...(19): siRNA sense strand
gagagaccaauacuugaug

SEQ ID NO: 305989 - RNA, 19 nt, Homo sapiens
  misc_RNA (1)...(19): siRNA sense strand
aaguugaagucucgaauca

SEQ ID NO: 305990 - RNA, 19 nt, Homo sapiens
  misc_RNA (1)...(19): siRNA sense strand
cuaccggaaugaaucucua

SEQ ID NO: 305991 - RNA, 19 nt, Homo sapiens
  misc_RNA (1)...(19): siRNA sense strand
gagaaauugacaaacguau

SEQ ID NO: 305992 - RNA, 19 nt, Homo sapiens
  misc_RNA (1)...(19): siRNA sense strand
gacaguagaagaagauugg

SEQ ID NO: 305993 - RNA, 19 nt, Homo sapiens
  misc_RNA (1)...(19): siRNA sense strand
auaaaccacuaccggaaug

SEQ ID NO: 305994 - RNA, 19 nt, Homo sapiens
  misc_RNA (1)...(19): siRNA sense strand
cgagggaagaagugaauga

SEQ ID NO: 305995 - RNA, 19 nt, Homo sapiens
  misc_RNA (1)...(19): siRNA sense strand
uggaagaagacuugaagaa

SEQ ID NO: 305996 - RNA, 19 nt, Homo sapiens
  misc_RNA (1)...(19): siRNA sense strand
ugaagucucgaaucaguga

SEQ ID NO: 305997 - RNA, 19 nt, Homo sapiens
  misc_RNA (1)...(19): siRNA sense strand
guacgagaugcgucuacua

SEQ ID NO: 305998 - RNA, 19 nt, Homo sapiens
  misc_RNA (1)...(19): siRNA sense strand
gaaugguacuggggagaua

SEQ ID NO: 305999 - RNA, 19 nt, Homo sapiens
  misc_RNA (1)...(19): siRNA sense strand
gagggaagaagugaaugaa

SEQ ID NO: 306000 - RNA, 19 nt, Homo sapiens
  misc_RNA (1)...(19): siRNA sense strand
ggacggcgaaguaaagcau

SEQ ID NO: 306001 - RNA, 19 nt, Homo sapiens
  misc_RNA (1)...(19): siRNA sense strand
ggacagcuauugaagcauu

SEQ ID NO: 306002 - RNA, 19 nt, Homo sapiens
  misc_RNA (1)...(19): siRNA sense strand
ggaagaugaugaagauuug

SEQ ID NO: 306003 - RNA, 19 nt, Homo sapiens
  misc_RNA (1)...(19): siRNA sense strand
gaagaagauuggaagaaga

SEQ ID NO: 306004 - RNA, 19 nt, Homo sapiens
  misc_RNA (1)...(19): siRNA sense strand
gaaauugacaaacguauga

SEQ ID NO: 306005 - RNA, 19 nt, Homo sapiens
  misc_RNA (1)...(19): siRNA sense strand
guacagcucucugaaagaa

SEQ ID NO: 306006 - RNA, 19 nt, Homo sapiens
  misc_RNA (1)...(19): siRNA sense strand
ggaaauauggcuucucuga

SEQ ID NO: 306007 - RNA, 19 nt, Homo sapiens
  misc_RNA (1)...(19): siRNA sense strand
gaaagacgagagaccaaua

SEQ ID NO: 306008 - RNA, 19 nt, Homo sapiens
  misc_RNA (1)...(19): siRNA sense strand
guaaagcauugugucauaa

SEQ ID NO: 306009 - RNA, 19 nt, Homo sapiens
  misc_RNA (1)...(19): siRNA sense strand
uggcuucucugacccauua

SEQ ID NO: 306010 - RNA, 19 nt, Homo sapiens
  misc_RNA (1)...(19): siRNA sense strand
ugaaagaacuggugcuaca

SEQ ID NO: 306011 - RNA, 19 nt, Homo sapiens
  misc_RNA (1)...(19): siRNA sense strand
guacagcaaagaauacaua

SEQ ID NO: 306012 - RNA, 19 nt, Homo sapiens
  misc_RNA (1)...(19): siRNA sense strand
ggaucaaguugucaaagaa

SEQ ID NO: 306013 - RNA, 19 nt, Homo sapiens
  misc_RNA (1)...(19): siRNA sense strand
gaauauaacacucaguuuc

SEQ ID NO: 306014 - RNA, 19 nt, Homo sapiens
  misc_RNA (1)...(19): siRNA sense strand
gguggaagaugaugaagau

SEQ ID NO: 306015 - RNA, 19 nt, Homo sapiens
  misc_RNA (1)...(19): siRNA sense strand
gcacaacgacucccucaau

SEQ ID NO: 306016 - RNA, 19 nt, Homo sapiens
  misc_RNA (1)...(19): siRNA sense strand
cagcaaagaauacauagaa

SEQ ID NO: 306017 - RNA, 19 nt, Homo sapiens
  misc_RNA (1)...(19): siRNA sense strand
aguaaagcauugugucaua

SEQ ID NO: 306018 - RNA, 19 nt, Homo sapiens
  misc_RNA (1)...(19): siRNA sense strand
uauugaagcuguagggaaa

SEQ ID NO: 306019 - RNA, 19 nt, Homo sapiens
  misc_RNA (1)...(19): siRNA sense strand
aagaacuggugcuacauua

SEQ ID NO: 306020 - RNA, 19 nt, Homo sapiens
  misc_RNA (1)...(19): siRNA sense strand
gacgagagaccaauacuug

SEQ ID NO: 306021 - RNA, 19 nt, Homo sapiens
  misc_RNA (1)...(19): siRNA sense strand
gaaguaaagcauuguguca

SEQ ID NO: 306022 - RNA, 19 nt, Homo sapiens
  misc_RNA (1)...(19): siRNA sense strand
aaacguaugaacagcauua

SEQ ID NO: 306023 - RNA, 19 nt, Homo sapiens
  misc_RNA (1)...(19): siRNA sense strand
gaagcgagauggcacuuuu

SEQ ID NO: 306024 - RNA, 19 nt, Homo sapiens
  misc_RNA (1)...(19): siRNA sense strand
gccaacaacgguaugaaua

SEQ ID NO: 306025 - RNA, 19 nt, Homo sapiens
  misc_RNA (1)...(19): siRNA sense strand
ccaacaacgguaugaauaa

SEQ ID NO: 306026 - RNA, 19 nt, Homo sapiens
  misc_RNA (1)...(19): siRNA sense strand
gggaagaagugaaugaaaa

SEQ ID NO: 306027 - RNA, 19 nt, Homo sapiens
  misc_RNA (1)...(19): siRNA sense strand
gcaacuggcuauggcuuug

SEQ ID NO: 306028 - RNA, 19 nt, Homo sapiens
  misc_RNA (1)...(19): siRNA sense strand
ucaguucugugguugaauu

SEQ ID NO: 306029 - RNA, 19 nt, Homo sapiens
  misc_RNA (1)...(19): siRNA sense strand
gaagcaggcagcugaguau

SEQ ID NO: 306030 - RNA, 19 nt, Homo sapiens
  misc_RNA (1)...(19): siRNA sense strand
cauggugauuauacucuua

SEQ ID NO: 306031 - RNA, 19 nt, Homo sapiens
  misc_RNA (1)...(19): siRNA sense strand
gcaaugagaaagaaauaca

SEQ ID NO: 306032 - RNA, 19 nt, Homo sapiens
  misc_RNA (1)...(19): siRNA sense strand
caauauguccuuacaagau

SEQ ID NO: 306033 - RNA, 19 nt, Homo sapiens
  misc_RNA (1)...(19): siRNA sense strand
aauauucacugguggaaga

SEQ ID NO: 306034 - RNA, 19 nt, Homo sapiens
  misc_RNA (1)...(19): siRNA sense strand
gagaaagaaauacaaagga

SEQ ID NO: 306035 - RNA, 19 nt, Homo sapiens
  misc_RNA (1)...(19): siRNA sense strand
ucaguauaaucccaaauug

SEQ ID NO: 306036 - RNA, 19 nt, Homo sapiens
  misc_RNA (1)...(19): siRNA sense strand
caagagcgguacagcaaag

SEQ ID NO: 306037 - RNA, 19 nt, Homo sapiens
  misc_RNA (1)...(19): siRNA sense strand
gcagcugaguaucgagaaa

SEQ ID NO: 306038 - RNA, 19 nt, Homo sapiens
  misc_RNA (1)...(19): siRNA sense strand
gcaggcagcugaguaucga

SEQ ID NO: 306039 - RNA, 19 nt, Homo sapiens
  misc_RNA (1)...(19): siRNA sense strand
ggaagaagacuugaagaag

SEQ ID NO: 306040 - RNA, 19 nt, Homo sapiens
  misc_RNA (1)...(19): siRNA sense strand
gaaauacaaaggauuaugc

SEQ ID NO: 306041 - RNA, 19 nt, Homo sapiens
  misc_RNA (1)...(19): siRNA sense strand
ccaaauaccaacaggauca

SEQ ID NO: 306042 - RNA, 19 nt, Homo sapiens
  misc_RNA (1)...(19): siRNA sense strand
ucucgaaucagugaaauua

SEQ ID NO: 306043 - RNA, 19 nt, Homo sapiens
  misc_RNA (1)...(19): siRNA sense strand
ccauuaaccuucaguucug

SEQ ID NO: 306044 - RNA, 19 nt, Homo sapiens
  misc_RNA (1)...(19): siRNA sense strand
ggaagcagcaaccgaaaca

SEQ ID NO: 306045 - RNA, 19 nt, Homo sapiens
  misc_RNA (1)...(19): siRNA sense strand
ugaaggcaaugagaaagaa

SEQ ID NO: 306046 - RNA, 19 nt, Homo sapiens
  misc_RNA (1)...(19): siRNA sense strand
gcauuaaaccagaccuuau

SEQ ID NO: 306047 - RNA, 19 nt, Homo sapiens
  misc_RNA (1)...(19): siRNA sense strand
acacuagccuacccaguau

SEQ ID NO: 306048 - RNA, 19 nt, Homo sapiens
  misc_RNA (1)...(19): siRNA sense strand
gaaaaggacagcuauugaa

SEQ ID NO: 306049 - RNA, 19 nt, Homo sapiens
  misc_RNA (1)...(19): siRNA sense strand
gaugagaagacauggaaug

SEQ ID NO: 306050 - RNA, 19 nt, Homo sapiens
  misc_RNA (1)...(19): siRNA sense strand
guugaagucucgaaucagu

SEQ ID NO: 306051 - RNA, 19 nt, Homo sapiens
  misc_RNA (1)...(19): siRNA sense strand
uacaagaugcugaauggua

SEQ ID NO: 306052 - RNA, 19 nt, Homo sapiens
  misc_RNA (1)...(19): siRNA sense strand
cacacuagccuacccagua

SEQ ID NO: 306053 - RNA, 19 nt, Homo sapiens
  misc_RNA (1)...(19): siRNA sense strand
caacaacgguaugaauaac

SEQ ID NO: 306054 - RNA, 19 nt, Homo sapiens
  misc_RNA (1)...(19): siRNA sense strand
gugaaauuauugacaguag

SEQ ID NO: 306055 - RNA, 19 nt, Homo sapiens
  misc_RNA (1)...(19): siRNA sense strand
gaccuuauccagcugagaa

SEQ ID NO: 306056 - RNA, 19 nt, Homo sapiens
  misc_RNA (1)...(19): siRNA sense strand
agaagaagauuggaagaag

SEQ ID NO: 306057 - RNA, 19 nt, Homo sapiens
  misc_RNA (1)...(19): siRNA sense strand
guucugugguugaauuaau

SEQ ID NO: 306058 - RNA, 19 nt, Homo sapiens
  misc_RNA (1)...(19): siRNA sense strand
uggaagaugaugaagauuu

SEQ ID NO: 306059 - RNA, 19 nt, Homo sapiens
  misc_RNA (1)...(19): siRNA sense strand
ccaggaaauccaaaugaaa

SEQ ID NO: 306060 - RNA, 19 nt, Homo sapiens
  misc_RNA (1)...(19): siRNA sense strand
cgagaugcgucuacuaaaa

SEQ ID NO: 306061 - RNA, 19 nt, Homo sapiens
  misc_RNA (1)...(19): siRNA sense strand
cacaacgacucccucaaug

SEQ ID NO: 306062 - RNA, 19 nt, Homo sapiens
  misc_RNA (1)...(19): siRNA sense strand
acaacgguaugaauaacaa

SEQ ID NO: 306063 - RNA, 19 nt, Homo sapiens
  misc_RNA (1)...(19): siRNA sense strand
gcauggugauuauacucuu

SEQ ID NO: 306064 - RNA, 19 nt, Homo sapiens
  misc_RNA (1)...(19): siRNA sense strand
caaguugucaaagaagaua

SEQ ID NO: 306065 - RNA, 19 nt, Homo sapiens
  misc_RNA (1)...(19): siRNA sense strand
cgaaucagugaaauuauug

SEQ ID NO: 306066 - RNA, 19 nt, Homo sapiens
  misc_RNA (1)...(19): siRNA sense strand
aauauguccuuacaagaug

SEQ ID NO: 306067 - RNA, 19 nt, Homo sapiens
  misc_RNA (1)...(19): siRNA sense strand
cccaggaaauccaaaugaa

SEQ ID NO: 306068 - RNA, 19 nt, Homo sapiens
  misc_RNA (1)...(19): siRNA sense strand
augaaucucuagcucagua

SEQ ID NO: 306069 - RNA, 19 nt, Homo sapiens
  misc_RNA (1)...(19): siRNA sense strand
aagaagacuugaagaagca

SEQ ID NO: 306070 - RNA, 19 nt, Homo sapiens
  misc_RNA (1)...(19): siRNA sense strand
aacaauauguccuuacaag

SEQ ID NO: 306071 - RNA, 19 nt, Homo sapiens
  misc_RNA (1)...(19): siRNA sense strand
gaaucucuagcucaguaua

SEQ ID NO: 306072 - RNA, 19 nt, Homo sapiens
  misc_RNA (1)...(19): siRNA sense strand
gacagcuauugaagcauuu

SEQ ID NO: 306073 - RNA, 19 nt, Homo sapiens
  misc_RNA (1)...(19): siRNA sense strand
caacgacucccucaauguc

SEQ ID NO: 306074 - RNA, 19 nt, Homo sapiens
  misc_RNA (1)...(19): siRNA sense strand
aggaucaaguugucaaaga

SEQ ID NO: 306075 - RNA, 19 nt, Homo sapiens
  misc_RNA (1)...(19): siRNA sense strand
ugaaaacacugaagaccaa

SEQ ID NO: 306076 - RNA, 19 nt, Homo sapiens
  misc_RNA (1)...(19): siRNA sense strand
gaaggcaaugagaaagaaa

SEQ ID NO: 306077 - RNA, 19 nt, Homo sapiens
  misc_RNA (1)...(19): siRNA sense strand
guuuaaacgugaaggcaau

SEQ ID NO: 306078 - RNA, 19 nt, Homo sapiens
  misc_RNA (1)...(19): siRNA sense strand
aaggacagcuauugaagca

SEQ ID NO: 306079 - RNA, 19 nt, Homo sapiens
  misc_RNA (1)...(19): siRNA sense strand
gcacaucccaggaaaucca

SEQ ID NO: 306080 - RNA, 19 nt, Homo sapiens
  misc_RNA (1)...(19): siRNA sense strand
acacugaagaccaauauuc

SEQ ID NO: 306081 - RNA, 19 nt, Homo sapiens
  misc_RNA (1)...(19): siRNA sense strand
gagaaagacgagagaccaa

SEQ ID NO: 306082 - RNA, 19 nt, Homo sapiens
  misc_RNA (1)...(19): siRNA sense strand
cgagaaauugacaaacgua

SEQ ID NO: 306083 - RNA, 19 nt, Homo sapiens
  misc_RNA (1)...(19): siRNA sense strand
gaagauuggaagaagacuu

SEQ ID NO: 306084 - RNA, 19 nt, Homo sapiens
  misc_RNA (1)...(19): siRNA sense strand
uacgagaugcgucuacuaa

SEQ ID NO: 306085 - RNA, 19 nt, Homo sapiens
  misc_RNA (1)...(19): siRNA sense strand
cuuacaagaugcugaaugg

SEQ ID NO: 306086 - RNA, 19 nt, Homo sapiens
  misc_RNA (1)...(19): siRNA sense strand
aaagaacuggugcuacauu

SEQ ID NO: 306087 - RNA, 19 nt, Homo sapiens
  misc_RNA (1)...(19): siRNA sense strand
aaacacugaagaccaauau

SEQ ID NO: 306088 - RNA, 19 nt, Homo sapiens
  misc_RNA (1)...(19): siRNA sense strand
gagagaccaauacuugaug

SEQ ID NO: 306089 - RNA, 19 nt, Homo sapiens
  misc_RNA (1)...(19): siRNA sense strand
aaguugaagucucgaauca

SEQ ID NO: 306090 - RNA, 19 nt, Homo sapiens
  misc_RNA (1)...(19): siRNA sense strand
cuaccggaaugaaucucua

SEQ ID NO: 306091 - RNA, 19 nt, Homo sapiens
  misc_RNA (1)...(19): siRNA sense strand
gagaaauugacaaacguau

SEQ ID NO: 306092 - RNA, 19 nt, Homo sapiens
  misc_RNA (1)...(19): siRNA sense strand
gacaguagaagaagauugg

SEQ ID NO: 306093 - RNA, 19 nt, Homo sapiens
  misc_RNA (1)...(19): siRNA sense strand
auaaaccacuaccggaaug

SEQ ID NO: 306094 - RNA, 19 nt, Homo sapiens
  misc_RNA (1)...(19): siRNA sense strand
cgagggaagaagugaauga

SEQ ID NO: 306095 - RNA, 19 nt, Homo sapiens
  misc_RNA (1)...(19): siRNA sense strand
uggaagaagacuugaagaa

SEQ ID NO: 306096 - RNA, 19 nt, Homo sapiens
  misc_RNA (1)...(19): siRNA sense strand
ugaagucucgaaucaguga

SEQ ID NO: 306097 - RNA, 19 nt, Homo sapiens
  misc_RNA (1)...(19): siRNA sense strand
guacgagaugcgucuacua

SEQ ID NO: 306098 - RNA, 19 nt, Homo sapiens
  misc_RNA (1)...(19): siRNA sense strand
gaaugguacuggggagaua

SEQ ID NO: 306099 - RNA, 19 nt, Homo sapiens
  misc_RNA (1)...(19): siRNA sense strand
gagggaagaagugaaugaa

SEQ ID NO: 306100 - RNA, 19 nt, Homo sapiens
  misc_RNA (1)...(19): siRNA sense strand
ggacggcgaaguaaagcau

SEQ ID NO: 306101 - RNA, 19 nt, Homo sapiens
  misc_RNA (1)...(19): siRNA sense strand
ggaaugagcucuucuacug

SEQ ID NO: 306102 - RNA, 19 nt, Homo sapiens
  misc_RNA (1)...(19): siRNA sense strand
caucauuucuuucuacuuc

SEQ ID NO: 306103 - RNA, 19 nt, Homo sapiens
  misc_RNA (1)...(19): siRNA sense strand
gcuggacgcuuucgaugga

SEQ ID NO: 306104 - RNA, 19 nt, Homo sapiens
  misc_RNA (1)...(19): siRNA sense strand
gagccacgcuguucuucca

SEQ ID NO: 306105 - RNA, 19 nt, Homo sapiens
  misc_RNA (1)...(19): siRNA sense strand
ggccugcucuguucaccuu

SEQ ID NO: 306106 - RNA, 19 nt, Homo sapiens
  misc_RNA (1)...(19): siRNA sense strand
gaccgcugcuccaccaugu

SEQ ID NO: 306107 - RNA, 19 nt, Homo sapiens
  misc_RNA (1)...(19): siRNA sense strand
gucacaagaugaucgacuu

SEQ ID NO: 306108 - RNA, 19 nt, Homo sapiens
  misc_RNA (1)...(19): siRNA sense strand
ccaugugccuguuggucaa

SEQ ID NO: 306109 - RNA, 19 nt, Homo sapiens
  misc_RNA (1)...(19): siRNA sense strand
cagcaugaguuuggaugug

SEQ ID NO: 306110 - RNA, 19 nt, Homo sapiens
  misc_RNA (1)...(19): siRNA sense strand
acgcuguucuuccaaauca

SEQ ID NO: 306111 - RNA, 19 nt, Homo sapiens
  misc_RNA (1)...(19): siRNA sense strand
cggauugucuucgccauca

SEQ ID NO: 306112 - RNA, 19 nt, Homo sapiens
  misc_RNA (1)...(19): siRNA sense strand
gccacgcuguucuuccaaa

SEQ ID NO: 306113 - RNA, 19 nt, Homo sapiens
  misc_RNA (1)...(19): siRNA sense strand
ccacgcuguucuuccaaau

SEQ ID NO: 306114 - RNA, 19 nt, Homo sapiens
  misc_RNA (1)...(19): siRNA sense strand
uccucuaccuguuccauuu

SEQ ID NO: 306115 - RNA, 19 nt, Homo sapiens
  misc_RNA (1)...(19): siRNA sense strand
guuuggauguggccaguca

SEQ ID NO: 306116 - RNA, 19 nt, Homo sapiens
  misc_RNA (1)...(19): siRNA sense strand
uugcugaagucgcucauca

SEQ ID NO: 306117 - RNA, 19 nt, Homo sapiens
  misc_RNA (1)...(19): siRNA sense strand
ucugagggaccuuuaguug

SEQ ID NO: 306118 - RNA, 19 nt, Homo sapiens
  misc_RNA (1)...(19): siRNA sense strand
ggcugcaccuccacaguuc

SEQ ID NO: 306119 - RNA, 19 nt, Homo sapiens
  misc_RNA (1)...(19): siRNA sense strand
gauugucuucgccaucauu

SEQ ID NO: 306120 - RNA, 19 nt, Homo sapiens
  misc_RNA (1)...(19): siRNA sense strand
ccucgaggccugcucuguu

SEQ ID NO: 306121 - RNA, 19 nt, Homo sapiens
  misc_RNA (1)...(19): siRNA sense strand
caccuugugugcugggaau

SEQ ID NO: 306122 - RNA, 19 nt, Homo sapiens
  misc_RNA (1)...(19): siRNA sense strand
caaccuggcccugcuguac

SEQ ID NO: 306123 - RNA, 19 nt, Homo sapiens
  misc_RNA (1)...(19): siRNA sense strand
gaccuuuaguuggcucugu

SEQ ID NO: 306124 - RNA, 19 nt, Homo sapiens
  misc_RNA (1)...(19): siRNA sense strand
ucuucgccaucauuucuuu

SEQ ID NO: 306125 - RNA, 19 nt, Homo sapiens
  misc_RNA (1)...(19): siRNA sense strand
gcugcucgcgcucuuaauc

SEQ ID NO: 306126 - RNA, 19 nt, Homo sapiens
  misc_RNA (1)...(19): siRNA sense strand
gguuaugcccggauugucu

SEQ ID NO: 306127 - RNA, 19 nt, Homo sapiens
  misc_RNA (1)...(19): siRNA sense strand
cgccaucauuucuuucuac

SEQ ID NO: 306128 - RNA, 19 nt, Homo sapiens
  misc_RNA (1)...(19): siRNA sense strand
ggaaugagcucuucuacug

SEQ ID NO: 306129 - RNA, 19 nt, Homo sapiens
  misc_RNA (1)...(19): siRNA sense strand
caucauuucuuucuacuuc

SEQ ID NO: 306130 - RNA, 19 nt, Homo sapiens
  misc_RNA (1)...(19): siRNA sense strand
gcuggacgcuuucgaugga

SEQ ID NO: 306131 - RNA, 19 nt, Homo sapiens
  misc_RNA (1)...(19): siRNA sense strand
gagccacgcuguucuucca

SEQ ID NO: 306132 - RNA, 19 nt, Homo sapiens
  misc_RNA (1)...(19): siRNA sense strand
ggccugcucuguucaccuu

SEQ ID NO: 306133 - RNA, 19 nt, Homo sapiens
  misc_RNA (1)...(19): siRNA sense strand
gaccgcugcuccaccaugu

SEQ ID NO: 306134 - RNA, 19 nt, Homo sapiens
  misc_RNA (1)...(19): siRNA sense strand
gucacaagaugaucgacuu

SEQ ID NO: 306135 - RNA, 19 nt, Homo sapiens
  misc_RNA (1)...(19): siRNA sense strand
ccaugugccuguuggucaa

SEQ ID NO: 306136 - RNA, 19 nt, Homo sapiens
  misc_RNA (1)...(19): siRNA sense strand
cagcaugaguuuggaugug

SEQ ID NO: 306137 - RNA, 19 nt, Homo sapiens
  misc_RNA (1)...(19): siRNA sense strand
acgcuguucuuccaaauca

SEQ ID NO: 306138 - RNA, 19 nt, Homo sapiens
  misc_RNA (1)...(19): siRNA sense strand
cggauugucuucgccauca

SEQ ID NO: 306139 - RNA, 19 nt, Homo sapiens
  misc_RNA (1)...(19): siRNA sense strand
gccacgcuguucuuccaaa

SEQ ID NO: 306140 - RNA, 19 nt, Homo sapiens
  misc_RNA (1)...(19): siRNA sense strand
ccacgcuguucuuccaaau

SEQ ID NO: 306141 - RNA, 19 nt, Homo sapiens
  misc_RNA (1)...(19): siRNA sense strand
uccucuaccuguuccauuu

SEQ ID NO: 306142 - RNA, 19 nt, Homo sapiens
  misc_RNA (1)...(19): siRNA sense strand
guuuggauguggccaguca

SEQ ID NO: 306143 - RNA, 19 nt, Homo sapiens
  misc_RNA (1)...(19): siRNA sense strand
uugcugaagucgcucauca

SEQ ID NO: 306144 - RNA, 19 nt, Homo sapiens
  misc_RNA (1)...(19): siRNA sense strand
ucugagggaccuuuaguug

SEQ ID NO: 306145 - RNA, 19 nt, Homo sapiens
  misc_RNA (1)...(19): siRNA sense strand
ggcugcaccuccacaguuc

SEQ ID NO: 306146 - RNA, 19 nt, Homo sapiens
  misc_RNA (1)...(19): siRNA sense strand
gauugucuucgccaucauu

SEQ ID NO: 306147 - RNA, 19 nt, Homo sapiens
  misc_RNA (1)...(19): siRNA sense strand
ccucgaggccugcucuguu

SEQ ID NO: 306148 - RNA, 19 nt, Homo sapiens
  misc_RNA (1)...(19): siRNA sense strand
caccuugugugcugggaau

SEQ ID NO: 306149 - RNA, 19 nt, Homo sapiens
  misc_RNA (1)...(19): siRNA sense strand
caaccuggcccugcuguac

SEQ ID NO: 306150 - RNA, 19 nt, Homo sapiens
  misc_RNA (1)...(19): siRNA sense strand
gaccuuuaguuggcucugu

SEQ ID NO: 306151 - RNA, 19 nt, Homo sapiens
  misc_RNA (1)...(19): siRNA sense strand
ucuucgccaucauuucuuu

SEQ ID NO: 306152 - RNA, 19 nt, Homo sapiens
  misc_RNA (1)...(19): siRNA sense strand
gcugcucgcgcucuuaauc

SEQ ID NO: 306153 - RNA, 19 nt, Homo sapiens
  misc_RNA (1)...(19): siRNA sense strand
gguuaugcccggauugucu

SEQ ID NO: 306154 - RNA, 19 nt, Homo sapiens
  misc_RNA (1)...(19): siRNA sense strand
cgccaucauuucuuucuac

SEQ ID NO: 306155 - RNA, 19 nt, Homo sapiens
  misc_RNA (1)...(19): siRNA sense strand
ggagacagcugcucuacug

SEQ ID NO: 306156 - RNA, 19 nt, Homo sapiens
  misc_RNA (1)...(19): siRNA sense strand
gagaggugauugagaagaa

SEQ ID NO: 306157 - RNA, 19 nt, Homo sapiens
  misc_RNA (1)...(19): siRNA sense strand
caacaucucugaggugaag

SEQ ID NO: 306158 - RNA, 19 nt, Homo sapiens
  misc_RNA (1)...(19): siRNA sense strand
ggacgagcuuguuggcauu

SEQ ID NO: 306159 - RNA, 19 nt, Homo sapiens
  misc_RNA (1)...(19): siRNA sense strand
gaaccggccugcugauguc

SEQ ID NO: 306160 - RNA, 19 nt, Homo sapiens
  misc_RNA (1)...(19): siRNA sense strand
agcaagagcuggagacuau

SEQ ID NO: 306161 - RNA, 19 nt, Homo sapiens
  misc_RNA (1)...(19): siRNA sense strand
gcugagggccaccuacuuu

SEQ ID NO: 306162 - RNA, 19 nt, Homo sapiens
  misc_RNA (1)...(19): siRNA sense strand
gggcugaucuccacuuugc

SEQ ID NO: 306163 - RNA, 19 nt, Homo sapiens
  misc_RNA (1)...(19): siRNA sense strand
gcuggagacuaucaccauu

SEQ ID NO: 306164 - RNA, 19 nt, Homo sapiens
  misc_RNA (1)...(19): siRNA sense strand
gacagcugcucuacugguu

SEQ ID NO: 306165 - RNA, 19 nt, Homo sapiens
  misc_RNA (1)...(19): siRNA sense strand
ugcgagaggugauugagaa

SEQ ID NO: 306166 - RNA, 19 nt, Homo sapiens
  misc_RNA (1)...(19): siRNA sense strand
acuauucccucaugaagga

SEQ ID NO: 306167 - RNA, 19 nt, Homo sapiens
  misc_RNA (1)...(19): siRNA sense strand
ugaagaccaugcugcagau

SEQ ID NO: 306168 - RNA, 19 nt, Homo sapiens
  misc_RNA (1)...(19): siRNA sense strand
ugacgaaccaugcgggauu

SEQ ID NO: 306169 - RNA, 19 nt, Homo sapiens
  misc_RNA (1)...(19): siRNA sense strand
ugcaugagguggugacgaa

SEQ ID NO: 306170 - RNA, 19 nt, Homo sapiens
  misc_RNA (1)...(19): siRNA sense strand
aggaagagcggauggugua

SEQ ID NO: 306171 - RNA, 19 nt, Homo sapiens
  misc_RNA (1)...(19): siRNA sense strand
ggccuucucugaguucuuc

SEQ ID NO: 306172 - RNA, 19 nt, Homo sapiens
  misc_RNA (1)...(19): siRNA sense strand
gagcaagagcuggagacua

SEQ ID NO: 306173 - RNA, 19 nt, Homo sapiens
  misc_RNA (1)...(19): siRNA sense strand
gaagagcggaugguguaug

SEQ ID NO: 306174 - RNA, 19 nt, Homo sapiens
  misc_RNA (1)...(19): siRNA sense strand
aagagcggaugguguaugu

SEQ ID NO: 306175 - RNA, 19 nt, Homo sapiens
  misc_RNA (1)...(19): siRNA sense strand
ugaugcccaugcucaauga

SEQ ID NO: 306176 - RNA, 19 nt, Homo sapiens
  misc_RNA (1)...(19): siRNA sense strand
gagcugcaacugacaucuu

SEQ ID NO: 306177 - RNA, 19 nt, Homo sapiens
  misc_RNA (1)...(19): siRNA sense strand
ccacuucuacuacaacauc

SEQ ID NO: 306178 - RNA, 19 nt, Homo sapiens
  misc_RNA (1)...(19): siRNA sense strand
caagagcuggagacuauca

SEQ ID NO: 306179 - RNA, 19 nt, Homo sapiens
  misc_RNA (1)...(19): siRNA sense strand
uauguggccuucucugagu

SEQ ID NO: 306180 - RNA, 19 nt, Homo sapiens
  misc_RNA (1)...(19): siRNA sense strand
gaaggucacagagcugcaa

SEQ ID NO: 306181 - RNA, 19 nt, Homo sapiens
  misc_RNA (1)...(19): siRNA sense strand
gacgaaccaugcgggauuc

SEQ ID NO: 306182 - RNA, 19 nt, Homo sapiens
  misc_RNA (1)...(19): siRNA sense strand
ucucugaguucuucuucga

SEQ ID NO: 306183 - RNA, 19 nt, Homo sapiens
  misc_RNA (1)...(19): siRNA sense strand
cauugacuauucccucaug

SEQ ID NO: 306184 - RNA, 19 nt, Homo sapiens
  misc_RNA (1)...(19): siRNA sense strand
caucuuccgagcucgauuu

SEQ ID NO: 306185 - RNA, 19 nt, Homo sapiens
  misc_RNA (1)...(19): siRNA sense strand
gugauugacuccccauuga

SEQ ID NO: 306186 - RNA, 19 nt, Homo sapiens
  misc_RNA (1)...(19): siRNA sense strand
gaagaaccggccugcugau

SEQ ID NO: 306187 - RNA, 19 nt, Homo sapiens
  misc_RNA (1)...(19): siRNA sense strand
uggagucgcuggcucugau

SEQ ID NO: 306188 - RNA, 19 nt, Homo sapiens
  misc_RNA (1)...(19): siRNA sense strand
agaccaugcugcagauugg

SEQ ID NO: 306189 - RNA, 19 nt, Homo sapiens
  misc_RNA (1)...(19): siRNA sense strand
gaagguguaugauuuucuc

SEQ ID NO: 306190 - RNA, 19 nt, Homo sapiens
  misc_RNA (1)...(19): siRNA sense strand
caggagcugaugcuucaaa

SEQ ID NO: 306191 - RNA, 19 nt, Homo sapiens
  misc_RNA (1)...(19): siRNA sense strand
gaagaccaugcugcagauu

SEQ ID NO: 306192 - RNA, 19 nt, Homo sapiens
  misc_RNA (1)...(19): siRNA sense strand
cagcugcucuacugguucu

SEQ ID NO: 306193 - RNA, 19 nt, Homo sapiens
  misc_RNA (1)...(19): siRNA sense strand
cgcuggagcuggugaagca

SEQ ID NO: 306194 - RNA, 19 nt, Homo sapiens
  misc_RNA (1)...(19): siRNA sense strand
cuuccgagcucgauuucca

SEQ ID NO: 306195 - RNA, 19 nt, Homo sapiens
  misc_RNA (1)...(19): siRNA sense strand
gugaugcccaugcucaaug

SEQ ID NO: 306196 - RNA, 19 nt, Homo sapiens
  misc_RNA (1)...(19): siRNA sense strand
ugacuauucccucaugaag

SEQ ID NO: 306197 - RNA, 19 nt, Homo sapiens
  misc_RNA (1)...(19): siRNA sense strand
ggccacuucuacuacaaca

SEQ ID NO: 306198 - RNA, 19 nt, Homo sapiens
  misc_RNA (1)...(19): siRNA sense strand
ggaagagcggaugguguau

SEQ ID NO: 306199 - RNA, 19 nt, Homo sapiens
  misc_RNA (1)...(19): siRNA sense strand
uaccugagggcaucaacuu

SEQ ID NO: 306200 - RNA, 19 nt, Homo sapiens
  misc_RNA (1)...(19): siRNA sense strand
ggagacagcugcucuacug

SEQ ID NO: 306201 - RNA, 19 nt, Homo sapiens
  misc_RNA (1)...(19): siRNA sense strand
gagaggugauugagaagaa

SEQ ID NO: 306202 - RNA, 19 nt, Homo sapiens
  misc_RNA (1)...(19): siRNA sense strand
caacaucucugaggugaag

SEQ ID NO: 306203 - RNA, 19 nt, Homo sapiens
  misc_RNA (1)...(19): siRNA sense strand
ggacgagcuuguuggcauu

SEQ ID NO: 306204 - RNA, 19 nt, Homo sapiens
  misc_RNA (1)...(19): siRNA sense strand
gaaccggccugcugauguc

SEQ ID NO: 306205 - RNA, 19 nt, Homo sapiens
  misc_RNA (1)...(19): siRNA sense strand
agcaagagcuggagacuau

SEQ ID NO: 306206 - RNA, 19 nt, Homo sapiens
  misc_RNA (1)...(19): siRNA sense strand
gaucugcccuguccucuac

SEQ ID NO: 306207 - RNA, 19 nt, Homo sapiens
  misc_RNA (1)...(19): siRNA sense strand
gcugagggccaccuacuuu

SEQ ID NO: 306208 - RNA, 19 nt, Homo sapiens
  misc_RNA (1)...(19): siRNA sense strand
gggcugaucuccacuuugc

SEQ ID NO: 306209 - RNA, 19 nt, Homo sapiens
  misc_RNA (1)...(19): siRNA sense strand
gcuggagacuaucaccauu

SEQ ID NO: 306210 - RNA, 19 nt, Homo sapiens
  misc_RNA (1)...(19): siRNA sense strand
gacagcugcucuacugguu

SEQ ID NO: 306211 - RNA, 19 nt, Homo sapiens
  misc_RNA (1)...(19): siRNA sense strand
ugcgagaggugauugagaa

SEQ ID NO: 306212 - RNA, 19 nt, Homo sapiens
  misc_RNA (1)...(19): siRNA sense strand
acuauucccucaugaagga

SEQ ID NO: 306213 - RNA, 19 nt, Homo sapiens
  misc_RNA (1)...(19): siRNA sense strand
ugaagaccaugcugcagau

SEQ ID NO: 306214 - RNA, 19 nt, Homo sapiens
  misc_RNA (1)...(19): siRNA sense strand
ugacgaaccaugcgggauu

SEQ ID NO: 306215 - RNA, 19 nt, Homo sapiens
  misc_RNA (1)...(19): siRNA sense strand
ugcaugagguggugacgaa

SEQ ID NO: 306216 - RNA, 19 nt, Homo sapiens
  misc_RNA (1)...(19): siRNA sense strand
aggaagagcggauggugua

SEQ ID NO: 306217 - RNA, 19 nt, Homo sapiens
  misc_RNA (1)...(19): siRNA sense strand
gagcaagagcuggagacua

SEQ ID NO: 306218 - RNA, 19 nt, Homo sapiens
  misc_RNA (1)...(19): siRNA sense strand
ggccuucucugaguucuuc

SEQ ID NO: 306219 - RNA, 19 nt, Homo sapiens
  misc_RNA (1)...(19): siRNA sense strand
gaagagcggaugguguaug

SEQ ID NO: 306220 - RNA, 19 nt, Homo sapiens
  misc_RNA (1)...(19): siRNA sense strand
aagagcggaugguguaugu

SEQ ID NO: 306221 - RNA, 19 nt, Homo sapiens
  misc_RNA (1)...(19): siRNA sense strand
ugaugcccaugcucaauga

SEQ ID NO: 306222 - RNA, 19 nt, Homo sapiens
  misc_RNA (1)...(19): siRNA sense strand
gagcugcaacugacaucuu

SEQ ID NO: 306223 - RNA, 19 nt, Homo sapiens
  misc_RNA (1)...(19): siRNA sense strand
ccacuucuacuacaacauc

SEQ ID NO: 306224 - RNA, 19 nt, Homo sapiens
  misc_RNA (1)...(19): siRNA sense strand
caagagcuggagacuauca

SEQ ID NO: 306225 - RNA, 19 nt, Homo sapiens
  misc_RNA (1)...(19): siRNA sense strand
uauguggccuucucugagu

SEQ ID NO: 306226 - RNA, 19 nt, Homo sapiens
  misc_RNA (1)...(19): siRNA sense strand
gaaggucacagagcugcaa

SEQ ID NO: 306227 - RNA, 19 nt, Homo sapiens
  misc_RNA (1)...(19): siRNA sense strand
gacgaaccaugcgggauuc

SEQ ID NO: 306228 - RNA, 19 nt, Homo sapiens
  misc_RNA (1)...(19): siRNA sense strand
ucucugaguucuucuucga

SEQ ID NO: 306229 - RNA, 19 nt, Homo sapiens
  misc_RNA (1)...(19): siRNA sense strand
cauugacuauucccucaug

SEQ ID NO: 306230 - RNA, 19 nt, Homo sapiens
  misc_RNA (1)...(19): siRNA sense strand
caucuuccgagcucgauuu

SEQ ID NO: 306231 - RNA, 19 nt, Homo sapiens
  misc_RNA (1)...(19): siRNA sense strand
gugauugacuccccauuga

SEQ ID NO: 306232 - RNA, 19 nt, Homo sapiens
  misc_RNA (1)...(19): siRNA sense strand
gaagaaccggccugcugau

SEQ ID NO: 306233 - RNA, 19 nt, Homo sapiens
  misc_RNA (1)...(19): siRNA sense strand
uggagucgcuggcucugau

SEQ ID NO: 306234 - RNA, 19 nt, Homo sapiens
  misc_RNA (1)...(19): siRNA sense strand
agaccaugcugcagauugg

SEQ ID NO: 306235 - RNA, 19 nt, Homo sapiens
  misc_RNA (1)...(19): siRNA sense strand
gaagguguaugauuuucuc

SEQ ID NO: 306236 - RNA, 19 nt, Homo sapiens
  misc_RNA (1)...(19): siRNA sense strand
caggagcugaugcuucaaa

SEQ ID NO: 306237 - RNA, 19 nt, Homo sapiens
  misc_RNA (1)...(19): siRNA sense strand
gaagaccaugcugcagauu

SEQ ID NO: 306238 - RNA, 19 nt, Homo sapiens
  misc_RNA (1)...(19): siRNA sense strand
cagcugcucuacugguucu

SEQ ID NO: 306239 - RNA, 19 nt, Homo sapiens
  misc_RNA (1)...(19): siRNA sense strand
cgcuggagcuggugaagca

SEQ ID NO: 306240 - RNA, 19 nt, Homo sapiens
  misc_RNA (1)...(19): siRNA sense strand
cuuccgagcucgauuucca

SEQ ID NO: 306241 - RNA, 19 nt, Homo sapiens
  misc_RNA (1)...(19): siRNA sense strand
gugaugcccaugcucaaug

SEQ ID NO: 306242 - RNA, 19 nt, Homo sapiens
  misc_RNA (1)...(19): siRNA sense strand
ggccacuucuacuacaaca

SEQ ID NO: 306243 - RNA, 19 nt, Homo sapiens
  misc_RNA (1)...(19): siRNA sense strand
ugacuauucccucaugaag

SEQ ID NO: 306244 - RNA, 19 nt, Homo sapiens
  misc_RNA (1)...(19): siRNA sense strand
ggaagagcggaugguguau

SEQ ID NO: 306245 - RNA, 19 nt, Homo sapiens
  misc_RNA (1)...(19): siRNA sense strand
uaccugagggcaucaacuu

SEQ ID NO: 306246 - RNA, 19 nt, Homo sapiens
  misc_RNA (1)...(19): siRNA sense strand
caccauacaugaccaagua

SEQ ID NO: 306247 - RNA, 19 nt, Homo sapiens
  misc_RNA (1)...(19): siRNA sense strand
ggagaaugccgaagaggaa

SEQ ID NO: 306248 - RNA, 19 nt, Homo sapiens
  misc_RNA (1)...(19): siRNA sense strand
gaacucaaggcccgaaaga

SEQ ID NO: 306249 - RNA, 19 nt, Homo sapiens
  misc_RNA (1)...(19): siRNA sense strand
cuagaugacuuggagaaug

SEQ ID NO: 306250 - RNA, 19 nt, Homo sapiens
  misc_RNA (1)...(19): siRNA sense strand
gcgacgacuuugaugaugu

SEQ ID NO: 306251 - RNA, 19 nt, Homo sapiens
  misc_RNA (1)...(19): siRNA sense strand
cgacgacuuugaugaugug

SEQ ID NO: 306252 - RNA, 19 nt, Homo sapiens
  misc_RNA (1)...(19): siRNA sense strand
gaugggagcuaugaagacu

SEQ ID NO: 306253 - RNA, 19 nt, Homo sapiens
  misc_RNA (1)...(19): siRNA sense strand
cagacaacgaggacaauuu

SEQ ID NO: 306254 - RNA, 19 nt, Homo sapiens
  misc_RNA (1)...(19): siRNA sense strand
ccaggagaaugucgagauc

SEQ ID NO: 306255 - RNA, 19 nt, Homo sapiens
  misc_RNA (1)...(19): siRNA sense strand
cgaaagauccccaucauca

SEQ ID NO: 306256 - RNA, 19 nt, Homo sapiens
  misc_RNA (1)...(19): siRNA sense strand
uagaugacuuggagaaugc

SEQ ID NO: 306257 - RNA, 19 nt, Homo sapiens
  misc_RNA (1)...(19): siRNA sense strand
gaccgcaggccaaccagaa

SEQ ID NO: 306258 - RNA, 19 nt, Homo sapiens
  misc_RNA (1)...(19): siRNA sense strand
gaggaaggccaggagaaug

SEQ ID NO: 306259 - RNA, 19 nt, Homo sapiens
  misc_RNA (1)...(19): siRNA sense strand
gaggaugaagggcuagaug

SEQ ID NO: 306260 - RNA, 19 nt, Homo sapiens
  misc_RNA (1)...(19): siRNA sense strand
gcgaaucaccacaccauac

SEQ ID NO: 306261 - RNA, 19 nt, Homo sapiens
  misc_RNA (1)...(19): siRNA sense strand
cgaaucaccacaccauaca

SEQ ID NO: 306262 - RNA, 19 nt, Homo sapiens
  misc_RNA (1)...(19): siRNA sense strand
cagaugggagcuaugaaga

SEQ ID NO: 306263 - RNA, 19 nt, Homo sapiens
  misc_RNA (1)...(19): siRNA sense strand
augaagggcuagaugacuu

SEQ ID NO: 306264 - RNA, 19 nt, Homo sapiens
  misc_RNA (1)...(19): siRNA sense strand
gcucaucaucaccgacuga

SEQ ID NO: 306265 - RNA, 19 nt, Homo sapiens
  misc_RNA (1)...(19): siRNA sense strand
caucaucauucgccguuac

SEQ ID NO: 306266 - RNA, 19 nt, Homo sapiens
  misc_RNA (1)...(19): siRNA sense strand
ggcgacgacuuugaugaug

SEQ ID NO: 306267 - RNA, 19 nt, Homo sapiens
  misc_RNA (1)...(19): siRNA sense strand
cacccgagcgcuccagauu

SEQ ID NO: 306268 - RNA, 19 nt, Homo sapiens
  misc_RNA (1)...(19): siRNA sense strand
acucaaggcccgaaagauc

SEQ ID NO: 306269 - RNA, 19 nt, Homo sapiens
  misc_RNA (1)...(19): siRNA sense strand
ccagaugggagcuaugaag

SEQ ID NO: 306270 - RNA, 19 nt, Homo sapiens
  misc_RNA (1)...(19): siRNA sense strand
agacaacgaggacaauuuu

SEQ ID NO: 306271 - RNA, 19 nt, Homo sapiens
  misc_RNA (1)...(19): siRNA sense strand
gccaggagaaugucgagau

SEQ ID NO: 306272 - RNA, 19 nt, Homo sapiens
  misc_RNA (1)...(19): siRNA sense strand
ccaucaucauucgccguua

SEQ ID NO: 306273 - RNA, 19 nt, Homo sapiens
  misc_RNA (1)...(19): siRNA sense strand
gaguuuaucuccugaugaa

SEQ ID NO: 306274 - RNA, 19 nt, Homo sapiens
  misc_RNA (1)...(19): siRNA sense strand
gcuaguaccuuguaugaag

SEQ ID NO: 306275 - RNA, 19 nt, Homo sapiens
  misc_RNA (1)...(19): siRNA sense strand
ccaacaaccugcauggauu

SEQ ID NO: 306276 - RNA, 19 nt, Homo sapiens
  misc_RNA (1)...(19): siRNA sense strand
gagaugaaacuucuacuga

SEQ ID NO: 306277 - RNA, 19 nt, Homo sapiens
  misc_RNA (1)...(19): siRNA sense strand
gggcugaccaguuugagua

SEQ ID NO: 306278 - RNA, 19 nt, Homo sapiens
  misc_RNA (1)...(19): siRNA sense strand
ggaaaaguguacaggauug

SEQ ID NO: 306279 - RNA, 19 nt, Homo sapiens
  misc_RNA (1)...(19): siRNA sense strand
agaugaaacuucuacugaa

SEQ ID NO: 306280 - RNA, 19 nt, Homo sapiens
  misc_RNA (1)...(19): siRNA sense strand
uuccagggcugaccaguuu

SEQ ID NO: 306281 - RNA, 19 nt, Homo sapiens
  misc_RNA (1)...(19): siRNA sense strand
ugagggagaugaaacuucu

SEQ ID NO: 306282 - RNA, 19 nt, Homo sapiens
  misc_RNA (1)...(19): siRNA sense strand
ugucucgacugcauuguga

SEQ ID NO: 306283 - RNA, 19 nt, Homo sapiens
  misc_RNA (1)...(19): siRNA sense strand
uagcuaguaccuuguauga

SEQ ID NO: 306284 - RNA, 19 nt, Homo sapiens
  misc_RNA (1)...(19): siRNA sense strand
aauuuacccuguagacuug

SEQ ID NO: 306285 - RNA, 19 nt, Homo sapiens
  misc_RNA (1)...(19): siRNA sense strand
ggagaugaaacuucuacug

SEQ ID NO: 306286 - RNA, 19 nt, Homo sapiens
  misc_RNA (1)...(19): siRNA sense strand
gaugguacccuggaugaug

SEQ ID NO: 306287 - RNA, 19 nt, Homo sapiens
  misc_RNA (1)...(19): siRNA sense strand
gaaguuugaccgagugucu

SEQ ID NO: 306288 - RNA, 19 nt, Homo sapiens
  misc_RNA (1)...(19): siRNA sense strand
cagaguuuaucuccugaug

SEQ ID NO: 306289 - RNA, 19 nt, Homo sapiens
  misc_RNA (1)...(19): siRNA sense strand
aaauuuacccuguagacuu

SEQ ID NO: 306290 - RNA, 19 nt, Homo sapiens
  misc_RNA (1)...(19): siRNA sense strand
ggaugauggugaauacaac

SEQ ID NO: 306291 - RNA, 19 nt, Homo sapiens
  misc_RNA (1)...(19): siRNA sense strand
caacaaccugcauggauuc

SEQ ID NO: 306292 - RNA, 19 nt, Homo sapiens
  misc_RNA (1)...(19): siRNA sense strand
cuaguaccuuguaugaaga

SEQ ID NO: 306293 - RNA, 19 nt, Homo sapiens
  misc_RNA (1)...(19): siRNA sense strand
guacaggauugagggagau

SEQ ID NO: 306294 - RNA, 19 nt, Homo sapiens
  misc_RNA (1)...(19): siRNA sense strand
gaguauguaauguauggaa

SEQ ID NO: 306295 - RNA, 19 nt, Homo sapiens
  misc_RNA (1)...(19): siRNA sense strand
cauucaaauuuacccugua

SEQ ID NO: 306296 - RNA, 19 nt, Homo sapiens
  misc_RNA (1)...(19): siRNA sense strand
gaggauauuuucgauguga

SEQ ID NO: 306297 - RNA, 19 nt, Homo sapiens
  misc_RNA (1)...(19): siRNA sense strand
ugaccaguuugaguaugua

SEQ ID NO: 306298 - RNA, 19 nt, Homo sapiens
  misc_RNA (1)...(19): siRNA sense strand
caaguuccgguuggucaua

SEQ ID NO: 306299 - RNA, 19 nt, Homo sapiens
  misc_RNA (1)...(19): siRNA sense strand
gaauacaaccccacugaug

SEQ ID NO: 306300 - RNA, 19 nt, Homo sapiens
  misc_RNA (1)...(19): siRNA sense strand
guuuaucuccugaugaaga

SEQ ID NO: 306301 - RNA, 19 nt, Homo sapiens
  misc_RNA (1)...(19): siRNA sense strand
ccaguuugaguauguaaug

SEQ ID NO: 306302 - RNA, 19 nt, Homo sapiens
  misc_RNA (1)...(19): siRNA sense strand
gccaacaaccugcauggau

SEQ ID NO: 306303 - RNA, 19 nt, Homo sapiens
  misc_RNA (1)...(19): siRNA sense strand
ucauagcuaguaccuugua

SEQ ID NO: 306304 - RNA, 19 nt, Homo sapiens
  misc_RNA (1)...(19): siRNA sense strand
cugcguacguguccuaugg

SEQ ID NO: 306305 - RNA, 19 nt, Homo sapiens
  misc_RNA (1)...(19): siRNA sense strand
ugaagaugguacccuggau

SEQ ID NO: 306306 - RNA, 19 nt, Homo sapiens
  misc_RNA (1)...(19): siRNA sense strand
uugaguauguaauguaugg

SEQ ID NO: 306307 - RNA, 19 nt, Homo sapiens
  misc_RNA (1)...(19): siRNA sense strand
uuuaucuccugaugaagaa

SEQ ID NO: 306308 - RNA, 19 nt, Homo sapiens
  misc_RNA (1)...(19): siRNA sense strand
cauagcuaguaccuuguau

SEQ ID NO: 306309 - RNA, 19 nt, Homo sapiens
  misc_RNA (1)...(19): siRNA sense strand
cugaccaguuugaguaugu

SEQ ID NO: 306310 - RNA, 19 nt, Homo sapiens
  misc_RNA (1)...(19): siRNA sense strand
ccuggaugauggugaauac

SEQ ID NO: 306311 - RNA, 19 nt, Homo sapiens
  misc_RNA (1)...(19): siRNA sense strand
aagaugguacccuggauga

SEQ ID NO: 306312 - RNA, 19 nt, Homo sapiens
  misc_RNA (1)...(19): siRNA sense strand
gcugaccaguuugaguaug

SEQ ID NO: 306313 - RNA, 19 nt, Homo sapiens
  misc_RNA (1)...(19): siRNA sense strand
uacccuggaugauggugaa

SEQ ID NO: 306314 - RNA, 19 nt, Homo sapiens
  misc_RNA (1)...(19): siRNA sense strand
ccagggcugaccaguuuga

SEQ ID NO: 306315 - RNA, 19 nt, Homo sapiens
  misc_RNA (1)...(19): siRNA sense strand
gagugucucgacugcauug

SEQ ID NO: 306316 - RNA, 19 nt, Homo sapiens
  misc_RNA (1)...(19): siRNA sense strand
gaccaguuugaguauguaa

SEQ ID NO: 306317 - RNA, 19 nt, Homo sapiens
  misc_RNA (1)...(19): siRNA sense strand
uggaugauggugaauacaa

SEQ ID NO: 306318 - RNA, 19 nt, Homo sapiens
  misc_RNA (1)...(19): siRNA sense strand
auugugagagugaaucuuu

SEQ ID NO: 306319 - RNA, 19 nt, Homo sapiens
  misc_RNA (1)...(19): siRNA sense strand
gacaacagcugcaucuaug

SEQ ID NO: 306320 - RNA, 19 nt, Homo sapiens
  misc_RNA (1)...(19): siRNA sense strand
gaacugacccagauuaucg

SEQ ID NO: 306321 - RNA, 19 nt, Homo sapiens
  misc_RNA (1)...(19): siRNA sense strand
caaggaggcuguguucuuc

SEQ ID NO: 306322 - RNA, 19 nt, Homo sapiens
  misc_RNA (1)...(19): siRNA sense strand
cgacaacagcugcaucuau

SEQ ID NO: 306323 - RNA, 19 nt, Homo sapiens
  misc_RNA (1)...(19): siRNA sense strand
gacgaacugacccagauua

SEQ ID NO: 306324 - RNA, 19 nt, Homo sapiens
  misc_RNA (1)...(19): siRNA sense strand
caagaucacgcacgaagug

SEQ ID NO: 306325 - RNA, 19 nt, Homo sapiens
  misc_RNA (1)...(19): siRNA sense strand
gcacgaaguggacgaacug

SEQ ID NO: 306326 - RNA, 19 nt, Homo sapiens
  misc_RNA (1)...(19): siRNA sense strand
ccaaggaagacaaggagaa

SEQ ID NO: 306327 - RNA, 19 nt, Homo sapiens
  misc_RNA (1)...(19): siRNA sense strand
ggacgaacugacccagauu

SEQ ID NO: 306328 - RNA, 19 nt, Homo sapiens
  misc_RNA (1)...(19): siRNA sense strand
gaggaccacccgugccaaa

SEQ ID NO: 306329 - RNA, 19 nt, Homo sapiens
  misc_RNA (1)...(19): siRNA sense strand
acaaggaggcuguguucuu

SEQ ID NO: 306330 - RNA, 19 nt, Homo sapiens
  misc_RNA (1)...(19): siRNA sense strand
gaaccgcauucugcucuac

SEQ ID NO: 306331 - RNA, 19 nt, Homo sapiens
  misc_RNA (1)...(19): siRNA sense strand
gaggacgccaugcgccuuu

SEQ ID NO: 306332 - RNA, 19 nt, Homo sapiens
  misc_RNA (1)...(19): siRNA sense strand
caacagcugcaucuauguc

SEQ ID NO: 306333 - RNA, 19 nt, Homo sapiens
  misc_RNA (1)...(19): siRNA sense strand
uggacgaacugacccagau

SEQ ID NO: 306334 - RNA, 19 nt, Homo sapiens
  misc_RNA (1)...(19): siRNA sense strand
cugcaucuaugucaacaag

SEQ ID NO: 306335 - RNA, 19 nt, Homo sapiens
  misc_RNA (1)...(19): siRNA sense strand
ugccaggaauguaacaaca

SEQ ID NO: 306336 - RNA, 19 nt, Homo sapiens
  misc_RNA (1)...(19): siRNA sense strand
agacaaggagaaccgcauu

SEQ ID NO: 306337 - RNA, 19 nt, Homo sapiens
  misc_RNA (1)...(19): siRNA sense strand
gcuucugccaggaauguaa

SEQ ID NO: 306338 - RNA, 19 nt, Homo sapiens
  misc_RNA (1)...(19): siRNA sense strand
caacaagaucacgcacgaa

SEQ ID NO: 306339 - RNA, 19 nt, Homo sapiens
  misc_RNA (1)...(19): siRNA sense strand
agaagaagaucaccauuaa

SEQ ID NO: 306340 - RNA, 19 nt, Homo sapiens
  misc_RNA (1)...(19): siRNA sense strand
gagaagaagaucaccauua

SEQ ID NO: 306341 - RNA, 19 nt, Homo sapiens
  misc_RNA (1)...(19): siRNA sense strand
uaacaaggacaccaaggua

SEQ ID NO: 306342 - RNA, 19 nt, Homo sapiens
  misc_RNA (1)...(19): siRNA sense strand
caacaaagaagaccacaca

SEQ ID NO: 306343 - RNA, 19 nt, Homo sapiens
  misc_RNA (1)...(19): siRNA sense strand
gaagaucaccauuaacaag

SEQ ID NO: 306344 - RNA, 19 nt, Homo sapiens
  misc_RNA (1)...(19): siRNA sense strand
gguacccaaugccuguuua

SEQ ID NO: 306345 - RNA, 19 nt, Homo sapiens
  misc_RNA (1)...(19): siRNA sense strand
ugggaaacaucauuaaauc

SEQ ID NO: 306346 - RNA, 19 nt, Homo sapiens
  misc_RNA (1)...(19): siRNA sense strand
cccaaugccuguuuauuca

SEQ ID NO: 306347 - RNA, 19 nt, Homo sapiens
  misc_RNA (1)...(19): siRNA sense strand
acacugggaaacaucauua

SEQ ID NO: 306348 - RNA, 19 nt, Homo sapiens
  misc_RNA (1)...(19): siRNA sense strand
cauuaaaucacaacuccua

SEQ ID NO: 306349 - RNA, 19 nt, Homo sapiens
  misc_RNA (1)...(19): siRNA sense strand
aagaagaucaccauuaaca

SEQ ID NO: 306350 - RNA, 19 nt, Homo sapiens
  misc_RNA (1)...(19): siRNA sense strand
gcaggaaggaauugaguag

SEQ ID NO: 306351 - RNA, 19 nt, Homo sapiens
  misc_RNA (1)...(19): siRNA sense strand
ggaaacaucauuaaaucac

SEQ ID NO: 306352 - RNA, 19 nt, Homo sapiens
  misc_RNA (1)...(19): siRNA sense strand
aaucacaacuccuaaaaga

SEQ ID NO: 306353 - RNA, 19 nt, Homo sapiens
  misc_RNA (1)...(19): siRNA sense strand
gggaaacaucauuaaauca

SEQ ID NO: 306354 - RNA, 19 nt, Homo sapiens
  misc_RNA (1)...(19): siRNA sense strand
gcuuucggguggccauaaa

SEQ ID NO: 306355 - RNA, 19 nt, Homo sapiens
  misc_RNA (1)...(19): siRNA sense strand
agacaagcaggaaggaauu

SEQ ID NO: 306356 - RNA, 19 nt, Homo sapiens
  misc_RNA (1)...(19): siRNA sense strand
gaagaagaucaccauuaac

SEQ ID NO: 306357 - RNA, 19 nt, Homo sapiens
  misc_RNA (1)...(19): siRNA sense strand
acaccaagguacccaaugc

SEQ ID NO: 306358 - RNA, 19 nt, Homo sapiens
  misc_RNA (1)...(19): siRNA sense strand
ggacaccaagguacccaau

SEQ ID NO: 306359 - RNA, 19 nt, Homo sapiens
  misc_RNA (1)...(19): siRNA sense strand
uauucaccaucaacaaaga

SEQ ID NO: 306360 - RNA, 19 nt, Homo sapiens
  misc_RNA (1)...(19): siRNA sense strand
gcgagaagaagaucaccau

SEQ ID NO: 306361 - RNA, 19 nt, Homo sapiens
  misc_RNA (1)...(19): siRNA sense strand
cugggaaacaucauuaaau

SEQ ID NO: 306362 - RNA, 19 nt, Homo sapiens
  misc_RNA (1)...(19): siRNA sense strand
agaucaccauuaacaagga

SEQ ID NO: 306363 - RNA, 19 nt, Homo sapiens
  misc_RNA (1)...(19): siRNA sense strand
cgagaagaagaucaccauu

SEQ ID NO: 306364 - RNA, 19 nt, Homo sapiens
  misc_RNA (1)...(19): siRNA sense strand
acccaaugccuguuuauuc

SEQ ID NO: 306365 - RNA, 19 nt, Homo sapiens
  misc_RNA (1)...(19): siRNA sense strand
gacaagcaggaaggaauug

SEQ ID NO: 306366 - RNA, 19 nt, Homo sapiens
  misc_RNA (1)...(19): siRNA sense strand
agaagaucaccauuaacaa

SEQ ID NO: 306367 - RNA, 19 nt, Homo sapiens
  misc_RNA (1)...(19): siRNA sense strand
caucaccgaccucaucagu

SEQ ID NO: 306368 - RNA, 19 nt, Homo sapiens
  misc_RNA (1)...(19): siRNA sense strand
gaccacacacugggaaaca

SEQ ID NO: 306369 - RNA, 19 nt, Homo sapiens
  misc_RNA (1)...(19): siRNA sense strand
gagcgcagcugcaagauuc

SEQ ID NO: 306370 - RNA, 19 nt, Homo sapiens
  misc_RNA (1)...(19): siRNA sense strand
gcaugaagcuggaguacga

SEQ ID NO: 306371 - RNA, 19 nt, Homo sapiens
  misc_RNA (1)...(19): siRNA sense strand
ggaagcaguuggugaaugg

SEQ ID NO: 306372 - RNA, 19 nt, Homo sapiens
  misc_RNA (1)...(19): siRNA sense strand
gcugcaagauucagaagaa

SEQ ID NO: 306373 - RNA, 19 nt, Homo sapiens
  misc_RNA (1)...(19): siRNA sense strand
cgcaaacccuucagugaua

SEQ ID NO: 306374 - RNA, 19 nt, Homo sapiens
  misc_RNA (1)...(19): siRNA sense strand
ugaauuugcugucaaguuc

SEQ ID NO: 306375 - RNA, 19 nt, Homo sapiens
  misc_RNA (1)...(19): siRNA sense strand
gagccuaaguuugaauuug

SEQ ID NO: 306376 - RNA, 19 nt, Homo sapiens
  misc_RNA (1)...(19): siRNA sense strand
gggaagaggaggagaaaga

SEQ ID NO: 306377 - RNA, 19 nt, Homo sapiens
  misc_RNA (1)...(19): siRNA sense strand
gcaagauucagaagaagaa

SEQ ID NO: 306378 - RNA, 19 nt, Homo sapiens
  misc_RNA (1)...(19): siRNA sense strand
ucauugagccuaaguuuga

SEQ ID NO: 306379 - RNA, 19 nt, Homo sapiens
  misc_RNA (1)...(19): siRNA sense strand
cuacaaugccuaccugaaa

SEQ ID NO: 306380 - RNA, 19 nt, Homo sapiens
  misc_RNA (1)...(19): siRNA sense strand
acagugaccuggcccuauu

SEQ ID NO: 306381 - RNA, 19 nt, Homo sapiens
  misc_RNA (1)...(19): siRNA sense strand
gcaaacccuucagugauau

SEQ ID NO: 306382 - RNA, 19 nt, Homo sapiens
  misc_RNA (1)...(19): siRNA sense strand
gaagaagaaccgcaacaag

SEQ ID NO: 306383 - RNA, 19 nt, Homo sapiens
  misc_RNA (1)...(19): siRNA sense strand
gcacugggcaugucacaca

SEQ ID NO: 306384 - RNA, 19 nt, Homo sapiens
  misc_RNA (1)...(19): siRNA sense strand
ccacuacgguguucaugca

SEQ ID NO: 306385 - RNA, 19 nt, Homo sapiens
  misc_RNA (1)...(19): siRNA sense strand
gaccuggcccuauucauug

SEQ ID NO: 306386 - RNA, 19 nt, Homo sapiens
  misc_RNA (1)...(19): siRNA sense strand
ccaagcacaucuacaaugc

SEQ ID NO: 306387 - RNA, 19 nt, Homo sapiens
  misc_RNA (1)...(19): siRNA sense strand
ugaccuggcccuauucauu

SEQ ID NO: 306388 - RNA, 19 nt, Homo sapiens
  misc_RNA (1)...(19): siRNA sense strand
ucacugaguucgccaagag

SEQ ID NO: 306389 - RNA, 19 nt, Homo sapiens
  misc_RNA (1)...(19): siRNA sense strand
ggaaguggcagaggcagaa

SEQ ID NO: 306390 - RNA, 19 nt, Homo sapiens
  misc_RNA (1)...(19): siRNA sense strand
gugauaucauugagccuaa

SEQ ID NO: 306391 - RNA, 19 nt, Homo sapiens
  misc_RNA (1)...(19): siRNA sense strand
caacggcaguggcuuuguc

SEQ ID NO: 306392 - RNA, 19 nt, Homo sapiens
  misc_RNA (1)...(19): siRNA sense strand
uaucauugagccuaaguuu

SEQ ID NO: 306393 - RNA, 19 nt, Homo sapiens
  misc_RNA (1)...(19): siRNA sense strand
agguuacccuucucaagua

SEQ ID NO: 306394 - RNA, 19 nt, Homo sapiens
  misc_RNA (1)...(19): siRNA sense strand
agaagaaccgcaacaagug

SEQ ID NO: 306395 - RNA, 19 nt, Homo sapiens
  misc_RNA (1)...(19): siRNA sense strand
aagaagaaccgcaacaagu

SEQ ID NO: 306396 - RNA, 19 nt, Homo sapiens
  misc_RNA (1)...(19): siRNA sense strand
gaucagcgugcacgucuuc

SEQ ID NO: 306397 - RNA, 19 nt, Homo sapiens
  misc_RNA (1)...(19): siRNA sense strand
caaguucaacgcccuggaa

SEQ ID NO: 306398 - RNA, 19 nt, Homo sapiens
  misc_RNA (1)...(19): siRNA sense strand
gcaacaagugccaguacug

SEQ ID NO: 306399 - RNA, 19 nt, Homo sapiens
  misc_RNA (1)...(19): siRNA sense strand
gcaugucacacaacgcuau

SEQ ID NO: 306400 - RNA, 19 nt, Homo sapiens
  misc_RNA (1)...(19): siRNA sense strand
gcggcagccucaacaugga

SEQ ID NO: 306401 - RNA, 19 nt, Homo sapiens
  misc_RNA (1)...(19): siRNA sense strand
cuacgguguucaugcaugu

SEQ ID NO: 306402 - RNA, 19 nt, Homo sapiens
  misc_RNA (1)...(19): siRNA sense strand
gguuacccuucucaaguau

SEQ ID NO: 306403 - RNA, 19 nt, Homo sapiens
  misc_RNA (1)...(19): siRNA sense strand
cagguuacccuucucaagu

SEQ ID NO: 306404 - RNA, 19 nt, Homo sapiens
  misc_RNA (1)...(19): siRNA sense strand
gaagcuggaguacgagaag

SEQ ID NO: 306405 - RNA, 19 nt, Homo sapiens
  misc_RNA (1)...(19): siRNA sense strand
agaaggggcugguguggaa

SEQ ID NO: 306406 - RNA, 19 nt, Homo sapiens
  misc_RNA (1)...(19): siRNA sense strand
ccgcaaacccuucagugau

SEQ ID NO: 306407 - RNA, 19 nt, Homo sapiens
  misc_RNA (1)...(19): siRNA sense strand
uccacgacaucgagacauu

SEQ ID NO: 306408 - RNA, 19 nt, Homo sapiens
  misc_RNA (1)...(19): siRNA sense strand
acccuucagugauaucauu

SEQ ID NO: 306409 - RNA, 19 nt, Homo sapiens
  misc_RNA (1)...(19): siRNA sense strand
ccucuaucgucaacaagga

SEQ ID NO: 306410 - RNA, 19 nt, Homo sapiens
  misc_RNA (1)...(19): siRNA sense strand
gcagcugcaagauucagaa

SEQ ID NO: 306411 - RNA, 19 nt, Homo sapiens
  misc_RNA (1)...(19): siRNA sense strand
ggaagaggaggagaaagag

SEQ ID NO: 306412 - RNA, 19 nt, Homo sapiens
  misc_RNA (1)...(19): siRNA sense strand
caaggacgggcugcuggua

SEQ ID NO: 306413 - RNA, 19 nt, Homo sapiens
  misc_RNA (1)...(19): siRNA sense strand
ucagcagccucuuccucaa

SEQ ID NO: 306414 - RNA, 19 nt, Homo sapiens
  misc_RNA (1)...(19): siRNA sense strand
ucuccaagcacaucuacaa

SEQ ID NO: 306415 - RNA, 19 nt, Homo sapiens
  misc_RNA (1)...(19): siRNA sense strand
uggaagcaguuggugaaug

SEQ ID NO: 306416 - RNA, 19 nt, Homo sapiens
  misc_RNA (1)...(19): siRNA sense strand
agaagaagaaccgcaacaa

SEQ ID NO: 306417 - RNA, 19 nt, Homo sapiens
  misc_RNA (1)...(19): siRNA sense strand
gaauuugcugucaaguuca

SEQ ID NO: 306418 - RNA, 19 nt, Homo sapiens
  misc_RNA (1)...(19): siRNA sense strand
aagggcuucuuccgucgua

SEQ ID NO: 306419 - RNA, 19 nt, Homo sapiens
  misc_RNA (1)...(19): siRNA sense strand
cgucguacgauccgcauga

SEQ ID NO: 306420 - RNA, 19 nt, Homo sapiens
  misc_RNA (1)...(19): siRNA sense strand
uggaguacgagaaguguga

SEQ ID NO: 306421 - RNA, 19 nt, Homo sapiens
  misc_RNA (1)...(19): siRNA sense strand
ccuggaacuugaugacagu

SEQ ID NO: 306422 - RNA, 19 nt, Homo sapiens
  misc_RNA (1)...(19): siRNA sense strand
cauugagccuaaguuugaa

SEQ ID NO: 306423 - RNA, 19 nt, Homo sapiens
  misc_RNA (1)...(19): siRNA sense strand
uggccucuaucgucaacaa

SEQ ID NO: 306424 - RNA, 19 nt, Homo sapiens
  misc_RNA (1)...(19): siRNA sense strand
gggcuuccacuacgguguu

SEQ ID NO: 306425 - RNA, 19 nt, Homo sapiens
  misc_RNA (1)...(19): siRNA sense strand
uacaaugccuaccugaaaa

SEQ ID NO: 306426 - RNA, 19 nt, Homo sapiens
  misc_RNA (1)...(19): siRNA sense strand
gauccacgacaucgagaca

SEQ ID NO: 306427 - RNA, 19 nt, Homo sapiens
  misc_RNA (1)...(19): siRNA sense strand
gacagugaccuggcccuau

SEQ ID NO: 306428 - RNA, 19 nt, Homo sapiens
  misc_RNA (1)...(19): siRNA sense strand
gagcgcagcugcaagauuc

SEQ ID NO: 306429 - RNA, 19 nt, Homo sapiens
  misc_RNA (1)...(19): siRNA sense strand
gcaugaagcuggaguacga

SEQ ID NO: 306430 - RNA, 19 nt, Homo sapiens
  misc_RNA (1)...(19): siRNA sense strand
ggaagcaguuggugaaugg

SEQ ID NO: 306431 - RNA, 19 nt, Homo sapiens
  misc_RNA (1)...(19): siRNA sense strand
gcugcaagauucagaagaa

SEQ ID NO: 306432 - RNA, 19 nt, Homo sapiens
  misc_RNA (1)...(19): siRNA sense strand
cgcaaacccuucagugaua

SEQ ID NO: 306433 - RNA, 19 nt, Homo sapiens
  misc_RNA (1)...(19): siRNA sense strand
ugaauuugcugucaaguuc

SEQ ID NO: 306434 - RNA, 19 nt, Homo sapiens
  misc_RNA (1)...(19): siRNA sense strand
gagccuaaguuugaauuug

SEQ ID NO: 306435 - RNA, 19 nt, Homo sapiens
  misc_RNA (1)...(19): siRNA sense strand
gggaagaggaggagaaaga

SEQ ID NO: 306436 - RNA, 19 nt, Homo sapiens
  misc_RNA (1)...(19): siRNA sense strand
gcaagauucagaagaagaa

SEQ ID NO: 306437 - RNA, 19 nt, Homo sapiens
  misc_RNA (1)...(19): siRNA sense strand
ucauugagccuaaguuuga

SEQ ID NO: 306438 - RNA, 19 nt, Homo sapiens
  misc_RNA (1)...(19): siRNA sense strand
cuacaaugccuaccugaaa

SEQ ID NO: 306439 - RNA, 19 nt, Homo sapiens
  misc_RNA (1)...(19): siRNA sense strand
acagugaccuggcccuauu

SEQ ID NO: 306440 - RNA, 19 nt, Homo sapiens
  misc_RNA (1)...(19): siRNA sense strand
gcaaacccuucagugauau

SEQ ID NO: 306441 - RNA, 19 nt, Homo sapiens
  misc_RNA (1)...(19): siRNA sense strand
gaagaagaaccgcaacaag

SEQ ID NO: 306442 - RNA, 19 nt, Homo sapiens
  misc_RNA (1)...(19): siRNA sense strand
gcacugggcaugucacaca

SEQ ID NO: 306443 - RNA, 19 nt, Homo sapiens
  misc_RNA (1)...(19): siRNA sense strand
ccacuacgguguucaugca

SEQ ID NO: 306444 - RNA, 19 nt, Homo sapiens
  misc_RNA (1)...(19): siRNA sense strand
gaccuggcccuauucauug

SEQ ID NO: 306445 - RNA, 19 nt, Homo sapiens
  misc_RNA (1)...(19): siRNA sense strand
ccaagcacaucuacaaugc

SEQ ID NO: 306446 - RNA, 19 nt, Homo sapiens
  misc_RNA (1)...(19): siRNA sense strand
ugaccuggcccuauucauu

SEQ ID NO: 306447 - RNA, 19 nt, Homo sapiens
  misc_RNA (1)...(19): siRNA sense strand
ucacugaguucgccaagag

SEQ ID NO: 306448 - RNA, 19 nt, Homo sapiens
  misc_RNA (1)...(19): siRNA sense strand
ggaaguggcagaggcagaa

SEQ ID NO: 306449 - RNA, 19 nt, Homo sapiens
  misc_RNA (1)...(19): siRNA sense strand
gugauaucauugagccuaa

SEQ ID NO: 306450 - RNA, 19 nt, Homo sapiens
  misc_RNA (1)...(19): siRNA sense strand
caacggcaguggcuuuguc

SEQ ID NO: 306451 - RNA, 19 nt, Homo sapiens
  misc_RNA (1)...(19): siRNA sense strand
uaucauugagccuaaguuu

SEQ ID NO: 306452 - RNA, 19 nt, Homo sapiens
  misc_RNA (1)...(19): siRNA sense strand
agguuacccuucucaagua

SEQ ID NO: 306453 - RNA, 19 nt, Homo sapiens
  misc_RNA (1)...(19): siRNA sense strand
agaagaaccgcaacaagug

SEQ ID NO: 306454 - RNA, 19 nt, Homo sapiens
  misc_RNA (1)...(19): siRNA sense strand
aagaagaaccgcaacaagu

SEQ ID NO: 306455 - RNA, 19 nt, Homo sapiens
  misc_RNA (1)...(19): siRNA sense strand
gaucagcgugcacgucuuc

SEQ ID NO: 306456 - RNA, 19 nt, Homo sapiens
  misc_RNA (1)...(19): siRNA sense strand
caaguucaacgcccuggaa

SEQ ID NO: 306457 - RNA, 19 nt, Homo sapiens
  misc_RNA (1)...(19): siRNA sense strand
gcaacaagugccaguacug

SEQ ID NO: 306458 - RNA, 19 nt, Homo sapiens
  misc_RNA (1)...(19): siRNA sense strand
gcaugucacacaacgcuau

SEQ ID NO: 306459 - RNA, 19 nt, Homo sapiens
  misc_RNA (1)...(19): siRNA sense strand
gcggcagccucaacaugga

SEQ ID NO: 306460 - RNA, 19 nt, Homo sapiens
  misc_RNA (1)...(19): siRNA sense strand
cuacgguguucaugcaugu

SEQ ID NO: 306461 - RNA, 19 nt, Homo sapiens
  misc_RNA (1)...(19): siRNA sense strand
gguuacccuucucaaguau

SEQ ID NO: 306462 - RNA, 19 nt, Homo sapiens
  misc_RNA (1)...(19): siRNA sense strand
cagguuacccuucucaagu

SEQ ID NO: 306463 - RNA, 19 nt, Homo sapiens
  misc_RNA (1)...(19): siRNA sense strand
gaagcuggaguacgagaag

SEQ ID NO: 306464 - RNA, 19 nt, Homo sapiens
  misc_RNA (1)...(19): siRNA sense strand
agaaggggcugguguggaa

SEQ ID NO: 306465 - RNA, 19 nt, Homo sapiens
  misc_RNA (1)...(19): siRNA sense strand
ccgcaaacccuucagugau

SEQ ID NO: 306466 - RNA, 19 nt, Homo sapiens
  misc_RNA (1)...(19): siRNA sense strand
uccacgacaucgagacauu

SEQ ID NO: 306467 - RNA, 19 nt, Homo sapiens
  misc_RNA (1)...(19): siRNA sense strand
acccuucagugauaucauu

SEQ ID NO: 306468 - RNA, 19 nt, Homo sapiens
  misc_RNA (1)...(19): siRNA sense strand
ccucuaucgucaacaagga

SEQ ID NO: 306469 - RNA, 19 nt, Homo sapiens
  misc_RNA (1)...(19): siRNA sense strand
gcagcugcaagauucagaa

SEQ ID NO: 306470 - RNA, 19 nt, Homo sapiens
  misc_RNA (1)...(19): siRNA sense strand
ggaagaggaggagaaagag

SEQ ID NO: 306471 - RNA, 19 nt, Homo sapiens
  misc_RNA (1)...(19): siRNA sense strand
caaggacgggcugcuggua

SEQ ID NO: 306472 - RNA, 19 nt, Homo sapiens
  misc_RNA (1)...(19): siRNA sense strand
ucagcagccucuuccucaa

SEQ ID NO: 306473 - RNA, 19 nt, Homo sapiens
  misc_RNA (1)...(19): siRNA sense strand
ucuccaagcacaucuacaa

SEQ ID NO: 306474 - RNA, 19 nt, Homo sapiens
  misc_RNA (1)...(19): siRNA sense strand
uggaagcaguuggugaaug

SEQ ID NO: 306475 - RNA, 19 nt, Homo sapiens
  misc_RNA (1)...(19): siRNA sense strand
agaagaagaaccgcaacaa

SEQ ID NO: 306476 - RNA, 19 nt, Homo sapiens
  misc_RNA (1)...(19): siRNA sense strand
gaauuugcugucaaguuca

SEQ ID NO: 306477 - RNA, 19 nt, Homo sapiens
  misc_RNA (1)...(19): siRNA sense strand
aagggcuucuuccgucgua

SEQ ID NO: 306478 - RNA, 19 nt, Homo sapiens
  misc_RNA (1)...(19): siRNA sense strand
cgucguacgauccgcauga

SEQ ID NO: 306479 - RNA, 19 nt, Homo sapiens
  misc_RNA (1)...(19): siRNA sense strand
uggaguacgagaaguguga

SEQ ID NO: 306480 - RNA, 19 nt, Homo sapiens
  misc_RNA (1)...(19): siRNA sense strand
ccuggaacuugaugacagu

SEQ ID NO: 306481 - RNA, 19 nt, Homo sapiens
  misc_RNA (1)...(19): siRNA sense strand
cauugagccuaaguuugaa

SEQ ID NO: 306482 - RNA, 19 nt, Homo sapiens
  misc_RNA (1)...(19): siRNA sense strand
uggccucuaucgucaacaa

SEQ ID NO: 306483 - RNA, 19 nt, Homo sapiens
  misc_RNA (1)...(19): siRNA sense strand
gggcuuccacuacgguguu

SEQ ID NO: 306484 - RNA, 19 nt, Homo sapiens
  misc_RNA (1)...(19): siRNA sense strand
uacaaugccuaccugaaaa

SEQ ID NO: 306485 - RNA, 19 nt, Homo sapiens
  misc_RNA (1)...(19): siRNA sense strand
gauccacgacaucgagaca

SEQ ID NO: 306486 - RNA, 19 nt, Homo sapiens
  misc_RNA (1)...(19): siRNA sense strand
gacagugaccuggcccuau

SEQ ID NO: 306487 - RNA, 19 nt, Homo sapiens
  misc_RNA (1)...(19): siRNA sense strand
gaacaaagauggaagcauu

SEQ ID NO: 306488 - RNA, 19 nt, Homo sapiens
  misc_RNA (1)...(19): siRNA sense strand
gaugaaaucugugcugaua

SEQ ID NO: 306489 - RNA, 19 nt, Homo sapiens
  misc_RNA (1)...(19): siRNA sense strand
gaauuucacucacauacaa

SEQ ID NO: 306490 - RNA, 19 nt, Homo sapiens
  misc_RNA (1)...(19): siRNA sense strand
ccaaugaccugcacuugaa

SEQ ID NO: 306491 - RNA, 19 nt, Homo sapiens
  misc_RNA (1)...(19): siRNA sense strand
gagaggaacccguauguuu

SEQ ID NO: 306492 - RNA, 19 nt, Homo sapiens
  misc_RNA (1)...(19): siRNA sense strand
guacaaucguugacaauga

SEQ ID NO: 306493 - RNA, 19 nt, Homo sapiens
  misc_RNA (1)...(19): siRNA sense strand
ucaauaagcuugccaacau

SEQ ID NO: 306494 - RNA, 19 nt, Homo sapiens
  misc_RNA (1)...(19): siRNA sense strand
gcaguuauccaccuucuuu

SEQ ID NO: 306495 - RNA, 19 nt, Homo sapiens
  misc_RNA (1)...(19): siRNA sense strand
cgaauaugcugaugaacaa

SEQ ID NO: 306496 - RNA, 19 nt, Homo sapiens
  misc_RNA (1)...(19): siRNA sense strand
aaacagcgccaucaagaua

SEQ ID NO: 306497 - RNA, 19 nt, Homo sapiens
  misc_RNA (1)...(19): siRNA sense strand
uuacaaagcucgacugaag

SEQ ID NO: 306498 - RNA, 19 nt, Homo sapiens
  misc_RNA (1)...(19): siRNA sense strand
cagaauauccgcauugaaa

SEQ ID NO: 306499 - RNA, 19 nt, Homo sapiens
  misc_RNA (1)...(19): siRNA sense strand
caauaagcuugccaacaua

SEQ ID NO: 306500 - RNA, 19 nt, Homo sapiens
  misc_RNA (1)...(19): siRNA sense strand
gaacagagggaaccacgaa

SEQ ID NO: 306501 - RNA, 19 nt, Homo sapiens
  misc_RNA (1)...(19): siRNA sense strand
gaucugaccuggaaaucau

SEQ ID NO: 306502 - RNA, 19 nt, Homo sapiens
  misc_RNA (1)...(19): siRNA sense strand
caggagaucugacacauca

SEQ ID NO: 306503 - RNA, 19 nt, Homo sapiens
  misc_RNA (1)...(19): siRNA sense strand
ggagaucccucaguucgaa

SEQ ID NO: 306504 - RNA, 19 nt, Homo sapiens
  misc_RNA (1)...(19): siRNA sense strand
gggcugaacuuaccaugga

SEQ ID NO: 306505 - RNA, 19 nt, Homo sapiens
  misc_RNA (1)...(19): siRNA sense strand
auacagaucugaccuggaa

SEQ ID NO: 306506 - RNA, 19 nt, Homo sapiens
  misc_RNA (1)...(19): siRNA sense strand
gaccacagacuugaauuua

SEQ ID NO: 306507 - RNA, 19 nt, Homo sapiens
  misc_RNA (1)...(19): siRNA sense strand
gauggaagcauugacuuua

SEQ ID NO: 306508 - RNA, 19 nt, Homo sapiens
  misc_RNA (1)...(19): siRNA sense strand
ccaaagagguaacaaucug

SEQ ID NO: 306509 - RNA, 19 nt, Homo sapiens
  misc_RNA (1)...(19): siRNA sense strand
gaaagaauuccauagagau

SEQ ID NO: 306510 - RNA, 19 nt, Homo sapiens
  misc_RNA (1)...(19): siRNA sense strand
ccauagagauccuaaugau

SEQ ID NO: 306511 - RNA, 19 nt, Homo sapiens
  misc_RNA (1)...(19): siRNA sense strand
gagggaaccacgaagauuu

SEQ ID NO: 306512 - RNA, 19 nt, Homo sapiens
  misc_RNA (1)...(19): siRNA sense strand
ccaagaaaguccugaagca

SEQ ID NO: 306513 - RNA, 19 nt, Homo sapiens
  misc_RNA (1)...(19): siRNA sense strand
guucgaaucugguaaacau

SEQ ID NO: 306514 - RNA, 19 nt, Homo sapiens
  misc_RNA (1)...(19): siRNA sense strand
cuaaugauccuguguguga

SEQ ID NO: 306515 - RNA, 19 nt, Homo sapiens
  misc_RNA (1)...(19): siRNA sense strand
cagcaguucuucaacgaaa

SEQ ID NO: 306516 - RNA, 19 nt, Homo sapiens
  misc_RNA (1)...(19): siRNA sense strand
uaauggacuugaacaaaga

SEQ ID NO: 306517 - RNA, 19 nt, Homo sapiens
  misc_RNA (1)...(19): siRNA sense strand
guagaucgaggaaagaauu

SEQ ID NO: 306518 - RNA, 19 nt, Homo sapiens
  misc_RNA (1)...(19): siRNA sense strand
ccauggagaucccucaguu

SEQ ID NO: 306519 - RNA, 19 nt, Homo sapiens
  misc_RNA (1)...(19): siRNA sense strand
ucuuagaggugcuauuuga

SEQ ID NO: 306520 - RNA, 19 nt, Homo sapiens
  misc_RNA (1)...(19): siRNA sense strand
aaacuucucccuccaaaga

SEQ ID NO: 306521 - RNA, 19 nt, Homo sapiens
  misc_RNA (1)...(19): siRNA sense strand
agaaaguccugaagcaaau

SEQ ID NO: 306522 - RNA, 19 nt, Homo sapiens
  misc_RNA (1)...(19): siRNA sense strand
gauaugaagacuugaugaa

SEQ ID NO: 306523 - RNA, 19 nt, Homo sapiens
  misc_RNA (1)...(19): siRNA sense strand
guagagaggaacaagauga

SEQ ID NO: 306524 - RNA, 19 nt, Homo sapiens
  misc_RNA (1)...(19): siRNA sense strand
acacacauauacauaagga

SEQ ID NO: 306525 - RNA, 19 nt, Homo sapiens
  misc_RNA (1)...(19): siRNA sense strand
gaaaacagcgccaucaaga

SEQ ID NO: 306526 - RNA, 19 nt, Homo sapiens
  misc_RNA (1)...(19): siRNA sense strand
ccacagacuugaauuuacu

SEQ ID NO: 306527 - RNA, 19 nt, Homo sapiens
  misc_RNA (1)...(19): siRNA sense strand
gguauggcuucacgaaaga

SEQ ID NO: 306528 - RNA, 19 nt, Homo sapiens
  misc_RNA (1)...(19): siRNA sense strand
ccacgaagauuuuaugaug

SEQ ID NO: 306529 - RNA, 19 nt, Homo sapiens
  misc_RNA (1)...(19): siRNA sense strand
ucaugcccauuaugucuua

SEQ ID NO: 306530 - RNA, 19 nt, Homo sapiens
  misc_RNA (1)...(19): siRNA sense strand
guaccgagguuacaaagcu

SEQ ID NO: 306531 - RNA, 19 nt, Homo sapiens
  misc_RNA (1)...(19): siRNA sense strand
gaauuuacuccaccgugua

SEQ ID NO: 306532 - RNA, 19 nt, Homo sapiens
  misc_RNA (1)...(19): siRNA sense strand
caacggaaacaaacagaga

SEQ ID NO: 306533 - RNA, 19 nt, Homo sapiens
  misc_RNA (1)...(19): siRNA sense strand
gauacuucaugcccauuau

SEQ ID NO: 306534 - RNA, 19 nt, Homo sapiens
  misc_RNA (1)...(19): siRNA sense strand
guacaagaggcucauucua

SEQ ID NO: 306535 - RNA, 19 nt, Homo sapiens
  misc_RNA (1)...(19): siRNA sense strand
ccaucaagauauuaagaga

SEQ ID NO: 306536 - RNA, 19 nt, Homo sapiens
  misc_RNA (1)...(19): siRNA sense strand
uacaaucguugacaaugaa

SEQ ID NO: 306537 - RNA, 19 nt, Homo sapiens
  misc_RNA (1)...(19): siRNA sense strand
cauaauggacuugaacaaa

SEQ ID NO: 306538 - RNA, 19 nt, Homo sapiens
  misc_RNA (1)...(19): siRNA sense strand
gaucuccguggaagaauuu

SEQ ID NO: 306539 - RNA, 19 nt, Homo sapiens
  misc_RNA (1)...(19): siRNA sense strand
aaacaaacagagaccauga

SEQ ID NO: 306540 - RNA, 19 nt, Homo sapiens
  misc_RNA (1)...(19): siRNA sense strand
gagaggaacaagaugaaau

SEQ ID NO: 306541 - RNA, 19 nt, Homo sapiens
  misc_RNA (1)...(19): siRNA sense strand
ggaaaacuacacacauaua

SEQ ID NO: 306542 - RNA, 19 nt, Homo sapiens
  misc_RNA (1)...(19): siRNA sense strand
uggaaacguugaauacaug

SEQ ID NO: 306543 - RNA, 19 nt, Homo sapiens
  misc_RNA (1)...(19): siRNA sense strand
ucacucacauacaaacuuc

SEQ ID NO: 306544 - RNA, 19 nt, Homo sapiens
  misc_RNA (1)...(19): siRNA sense strand
acaaacuucucccuccaaa

SEQ ID NO: 306545 - RNA, 19 nt, Homo sapiens
  misc_RNA (1)...(19): siRNA sense strand
uaagagagagagugauuuc

SEQ ID NO: 306546 - RNA, 19 nt, Homo sapiens
  misc_RNA (1)...(19): siRNA sense strand
acagagaccaugacacuga

SEQ ID NO: 306547 - RNA, 19 nt, Homo sapiens
  misc_RNA (1)...(19): siRNA sense strand
uaucagagaccacagacuu

SEQ ID NO: 306548 - RNA, 19 nt, Homo sapiens
  misc_RNA (1)...(19): siRNA sense strand
aaacagagaccaugacacu

SEQ ID NO: 306549 - RNA, 19 nt, Homo sapiens
  misc_RNA (1)...(19): siRNA sense strand
auaauggacuugaacaaag

SEQ ID NO: 306550 - RNA, 19 nt, Homo sapiens
  misc_RNA (1)...(19): siRNA sense strand
uaugaagacuugaugaaac

SEQ ID NO: 306551 - RNA, 19 nt, Homo sapiens
  misc_RNA (1)...(19): siRNA sense strand
cuacacacauauacauaag

SEQ ID NO: 306552 - RNA, 19 nt, Homo sapiens
  misc_RNA (1)...(19): siRNA sense strand
cauugacacugaucacuca

SEQ ID NO: 306553 - RNA, 19 nt, Homo sapiens
  misc_RNA (1)...(19): siRNA sense strand
aagaaaguccugaagcaaa

SEQ ID NO: 306554 - RNA, 19 nt, Homo sapiens
  misc_RNA (1)...(19): siRNA sense strand
ccaacauaauggacuugaa

SEQ ID NO: 306555 - RNA, 19 nt, Homo sapiens
  misc_RNA (1)...(19): siRNA sense strand
gaugauucccaagucaaua

SEQ ID NO: 306556 - RNA, 19 nt, Homo sapiens
  misc_RNA (1)...(19): siRNA sense strand
acaagaggcucauucuacu

SEQ ID NO: 306557 - RNA, 19 nt, Homo sapiens
  misc_RNA (1)...(19): siRNA sense strand
gaacugguaccgagguuac

SEQ ID NO: 306558 - RNA, 19 nt, Homo sapiens
  misc_RNA (1)...(19): siRNA sense strand
cgaaucugguaaacauaga

SEQ ID NO: 306559 - RNA, 19 nt, Homo sapiens
  misc_RNA (1)...(19): siRNA sense strand
ggacuugaacaaagaugga

SEQ ID NO: 306560 - RNA, 19 nt, Homo sapiens
  misc_RNA (1)...(19): siRNA sense strand
caagaaaguccugaagcaa

SEQ ID NO: 306561 - RNA, 19 nt, Homo sapiens
  misc_RNA (1)...(19): siRNA sense strand
ggaugcagcaguucuucaa

SEQ ID NO: 306562 - RNA, 19 nt, Homo sapiens
  misc_RNA (1)...(19): siRNA sense strand
ugaugaaucugagguaugg

SEQ ID NO: 306563 - RNA, 19 nt, Homo sapiens
  misc_RNA (1)...(19): siRNA sense strand
caagauauuaagagagaga

SEQ ID NO: 306564 - RNA, 19 nt, Homo sapiens
  misc_RNA (1)...(19): siRNA sense strand
uugaauacauguccagcuu

SEQ ID NO: 306565 - RNA, 19 nt, Homo sapiens
  misc_RNA (1)...(19): siRNA sense strand
ggaaacaaacagagaccau

SEQ ID NO: 306566 - RNA, 19 nt, Homo sapiens
  misc_RNA (1)...(19): siRNA sense strand
auggaagcauugacuuuaa

SEQ ID NO: 306567 - RNA, 19 nt, Homo sapiens
  misc_RNA (1)...(19): siRNA sense strand
gaaggccagacaacacuau

SEQ ID NO: 306568 - RNA, 19 nt, Homo sapiens
  misc_RNA (1)...(19): siRNA sense strand
gagcugcguugaucaucca

SEQ ID NO: 306569 - RNA, 19 nt, Homo sapiens
  misc_RNA (1)...(19): siRNA sense strand
uuagaggugcuauuugaaa

SEQ ID NO: 306570 - RNA, 19 nt, Homo sapiens
  misc_RNA (1)...(19): siRNA sense strand
caacauaauggacuugaac

SEQ ID NO: 306571 - RNA, 19 nt, Homo sapiens
  misc_RNA (1)...(19): siRNA sense strand
cccaaucgguacaaucguu

SEQ ID NO: 306572 - RNA, 19 nt, Homo sapiens
  misc_RNA (1)...(19): siRNA sense strand
ugucuuagaggugcuauuu

SEQ ID NO: 306573 - RNA, 19 nt, Homo sapiens
  misc_RNA (1)...(19): siRNA sense strand
uggaagcauugacuuuaau

SEQ ID NO: 306574 - RNA, 19 nt, Homo sapiens
  misc_RNA (1)...(19): siRNA sense strand
ggauaucagagaccacaga

SEQ ID NO: 306575 - RNA, 19 nt, Homo sapiens
  misc_RNA (1)...(19): siRNA sense strand
acagcgccaucaagauauu

SEQ ID NO: 306576 - RNA, 19 nt, Homo sapiens
  misc_RNA (1)...(19): siRNA sense strand
cgugccauguggaaacuuu

SEQ ID NO: 306577 - RNA, 19 nt, Homo sapiens
  misc_RNA (1)...(19): siRNA sense strand
gagguauggcuucacgaaa

SEQ ID NO: 306578 - RNA, 19 nt, Homo sapiens
  misc_RNA (1)...(19): siRNA sense strand
aaacauagaccaaaaugga

SEQ ID NO: 306579 - RNA, 19 nt, Homo sapiens
  misc_RNA (1)...(19): siRNA sense strand
acugagagcugcguugauc

SEQ ID NO: 306580 - RNA, 19 nt, Homo sapiens
  misc_RNA (1)...(19): siRNA sense strand
gaggcucauucuacucuag

SEQ ID NO: 306581 - RNA, 19 nt, Homo sapiens
  misc_RNA (1)...(19): siRNA sense strand
caacuucaagaccacagaa

SEQ ID NO: 306582 - RNA, 19 nt, Homo sapiens
  misc_RNA (1)...(19): siRNA sense strand
ugaccuuacucgugcuuuc

SEQ ID NO: 306583 - RNA, 19 nt, Homo sapiens
  misc_RNA (1)...(19): siRNA sense strand
uaugaugaaucugagguau

SEQ ID NO: 306584 - RNA, 19 nt, Homo sapiens
  misc_RNA (1)...(19): siRNA sense strand
uacaagaggcucauucuac

SEQ ID NO: 306585 - RNA, 19 nt, Homo sapiens
  misc_RNA (1)...(19): siRNA sense strand
uaagcuugccaacauaaug

SEQ ID NO: 306586 - RNA, 19 nt, Homo sapiens
  misc_RNA (1)...(19): siRNA sense strand
ugaucuccguggaagaauu

SEQ ID NO: 306587 - RNA, 19 nt, Homo sapiens
  misc_RNA (1)...(19): siRNA sense strand
gaacaaagauggaagcauu

SEQ ID NO: 306588 - RNA, 19 nt, Homo sapiens
  misc_RNA (1)...(19): siRNA sense strand
gaugaaaucugugcugaua

SEQ ID NO: 306589 - RNA, 19 nt, Homo sapiens
  misc_RNA (1)...(19): siRNA sense strand
gaauuucacucacauacaa

SEQ ID NO: 306590 - RNA, 19 nt, Homo sapiens
  misc_RNA (1)...(19): siRNA sense strand
ccaaugaccugcacuugaa

SEQ ID NO: 306591 - RNA, 19 nt, Homo sapiens
  misc_RNA (1)...(19): siRNA sense strand
gagaggaacccguauguuu

SEQ ID NO: 306592 - RNA, 19 nt, Homo sapiens
  misc_RNA (1)...(19): siRNA sense strand
guacaaucguugacaauga

SEQ ID NO: 306593 - RNA, 19 nt, Homo sapiens
  misc_RNA (1)...(19): siRNA sense strand
ucaauaagcuugccaacau

SEQ ID NO: 306594 - RNA, 19 nt, Homo sapiens
  misc_RNA (1)...(19): siRNA sense strand
aaacagcgccaucaagaua

SEQ ID NO: 306595 - RNA, 19 nt, Homo sapiens
  misc_RNA (1)...(19): siRNA sense strand
cagaauauccgcauugaaa

SEQ ID NO: 306596 - RNA, 19 nt, Homo sapiens
  misc_RNA (1)...(19): siRNA sense strand
caauaagcuugccaacaua

SEQ ID NO: 306597 - RNA, 19 nt, Homo sapiens
  misc_RNA (1)...(19): siRNA sense strand
gaacagagggaaccacgaa

SEQ ID NO: 306598 - RNA, 19 nt, Homo sapiens
  misc_RNA (1)...(19): siRNA sense strand
gaucugaccuggaaaucau

SEQ ID NO: 306599 - RNA, 19 nt, Homo sapiens
  misc_RNA (1)...(19): siRNA sense strand
ggagaucccucaguucgaa

SEQ ID NO: 306600 - RNA, 19 nt, Homo sapiens
  misc_RNA (1)...(19): siRNA sense strand
gggcugaacuuaccaugga

SEQ ID NO: 306601 - RNA, 19 nt, Homo sapiens
  misc_RNA (1)...(19): siRNA sense strand
auacagaucugaccuggaa

SEQ ID NO: 306602 - RNA, 19 nt, Homo sapiens
  misc_RNA (1)...(19): siRNA sense strand
gaccacagacuugaauuua

SEQ ID NO: 306603 - RNA, 19 nt, Homo sapiens
  misc_RNA (1)...(19): siRNA sense strand
gauggaagcauugacuuua

SEQ ID NO: 306604 - RNA, 19 nt, Homo sapiens
  misc_RNA (1)...(19): siRNA sense strand
ccaaagagguaacaaucug

SEQ ID NO: 306605 - RNA, 19 nt, Homo sapiens
  misc_RNA (1)...(19): siRNA sense strand
gaaagaauuccauagagau

SEQ ID NO: 306606 - RNA, 19 nt, Homo sapiens
  misc_RNA (1)...(19): siRNA sense strand
ccauagagauccuaaugau

SEQ ID NO: 306607 - RNA, 19 nt, Homo sapiens
  misc_RNA (1)...(19): siRNA sense strand
gagggaaccacgaagauuu

SEQ ID NO: 306608 - RNA, 19 nt, Homo sapiens
  misc_RNA (1)...(19): siRNA sense strand
cuaaugauccuguguguga

SEQ ID NO: 306609 - RNA, 19 nt, Homo sapiens
  misc_RNA (1)...(19): siRNA sense strand
guucgaaucugguaaacau

SEQ ID NO: 306610 - RNA, 19 nt, Homo sapiens
  misc_RNA (1)...(19): siRNA sense strand
uaauggacuugaacaaaga

SEQ ID NO: 306611 - RNA, 19 nt, Homo sapiens
  misc_RNA (1)...(19): siRNA sense strand
guagaucgaggaaagaauu

SEQ ID NO: 306612 - RNA, 19 nt, Homo sapiens
  misc_RNA (1)...(19): siRNA sense strand
ccauggagaucccucaguu

SEQ ID NO: 306613 - RNA, 19 nt, Homo sapiens
  misc_RNA (1)...(19): siRNA sense strand
aaacuucucccuccaaaga

SEQ ID NO: 306614 - RNA, 19 nt, Homo sapiens
  misc_RNA (1)...(19): siRNA sense strand
guagagaggaacaagauga

SEQ ID NO: 306615 - RNA, 19 nt, Homo sapiens
  misc_RNA (1)...(19): siRNA sense strand
gauaugaagacuugaugaa

SEQ ID NO: 306616 - RNA, 19 nt, Homo sapiens
  misc_RNA (1)...(19): siRNA sense strand
ccacgaagauuuuaugaug

SEQ ID NO: 306617 - RNA, 19 nt, Homo sapiens
  misc_RNA (1)...(19): siRNA sense strand
gaaaacagcgccaucaaga

SEQ ID NO: 306618 - RNA, 19 nt, Homo sapiens
  misc_RNA (1)...(19): siRNA sense strand
ccacagacuugaauuuacu

SEQ ID NO: 306619 - RNA, 19 nt, Homo sapiens
  misc_RNA (1)...(19): siRNA sense strand
gguauggcuucacgaaaga

SEQ ID NO: 306620 - RNA, 19 nt, Homo sapiens
  misc_RNA (1)...(19): siRNA sense strand
gaauuuacuccaccgugua

SEQ ID NO: 306621 - RNA, 19 nt, Homo sapiens
  misc_RNA (1)...(19): siRNA sense strand
caacggaaacaaacagaga

SEQ ID NO: 306622 - RNA, 19 nt, Homo sapiens
  misc_RNA (1)...(19): siRNA sense strand
ccaucaagauauuaagaga

SEQ ID NO: 306623 - RNA, 19 nt, Homo sapiens
  misc_RNA (1)...(19): siRNA sense strand
guacaagaggcucauucua

SEQ ID NO: 306624 - RNA, 19 nt, Homo sapiens
  misc_RNA (1)...(19): siRNA sense strand
uacaaucguugacaaugaa

SEQ ID NO: 306625 - RNA, 19 nt, Homo sapiens
  misc_RNA (1)...(19): siRNA sense strand
cauaauggacuugaacaaa
